United States Patent Application Publication US 2026/0103690 A1 - sequence listing, part 26

SEQ ID NO: 116178 - protein, 386 aa, unidentified
MIIIGVDPHKSTHTANAVDAATNRSAGSLRIDASFVGYRQLQRWAAQFGERQWAVENARGLGRHLAQWLAARGEHVVDVPSTATARVRELSRGGRRKNDVIDAAAAAAVAALQGDASTVVTEDASAVLALLDERRVNVITQRTRLVNQLHAVLRDLLPGGARRDLTATAAAQLLARVRPAGPVEAARKQLARDLVAEIRDADQRLNTLTSQIGAVVADTGSRLTGVDGVGPVVAGRLLGRVRGASRFPSAAAFASYCGVAPVEVASADRARHRLPRGGDRQLNLALHIVALTQVRMRGSAGRAYYDTKIAAGKTHNEAMRCLKRRLADHLWRLMIADDRRAGTGPGGHSGATRSSSAAGSTPNASTSDKPLPGPVHDDSTSTRPAA

SEQ ID NO: 116179 - protein, 367 aa, unidentified
MKKISTAGTKQSRNISQQKLTIGLDLGDRNSWYCVVDETGQVQLEQRVRTNAKALREVFGAIPRSRIALEIGTHSPWISRLLSELGHEVIVANARKVRLIGESRKKDDRLDAQTLARLARIDPELLYPVKHRSEQAQADLTLIRARAGLVRARTGLVNTARGLAKSYGARLRSCNVRNLNPEKAKSLSPELQAALEPLLNAIESLSERIVEYNERIENLAKESYPQVALLKQIKGVGTLIALTFLLTLEDPHRFGKSRDVGCYLGLQPGRRNSGQSEPQLHISKEGDPYLRTLLVQGAQHILGPFGPDCDLRRWGLKLAERGGKNGKKRAIVATARKLAVLLHHLWVSGEVYEPLHNSSPTLVAAAA

SEQ ID NO: 116180 - protein, 345 aa, unidentified
MSNPTIIAIDLAKDVLQVCKVTSKNKISYNKTVSRKALKELLSREKDCLVAMEACASSQYWSRFALKLGLSVKAMHARHVKPFRTKQKTDRNDALAIAVAATQLTIKPTRILTIDEQGLQSLERIRDLQKSQCIAISNQIRSLLGEFGITIAKGDKALREAMPYIFEDAENELPHSLRAVLFSQWENYRHQVEHLDSITEQLEVEVQKNHQCQKFMKLEGVGPLGAIGLVIALGDGKAFTNGRAASACIGVTPVQHSSGGKENIGSIAKKSSGQRLRSVLFNGAMSVVSFLSKRAARTVKEQWLKALIERRGKKVAAVALINKNIRTAYAILINGTQYKPQLLEA

SEQ ID NO: 116181 - protein, 358 aa, unidentified
MVQRKELNFEGQNIYIGIDVHLKTWHVSILTESGCLKKHSQQSSAQALFEHLKKHYPNGNYLSAYEAGFSGFSTYYSLLDFGIECLPVHAADIPTGQYESVMKTDAIDSTKIARALKSGLLRGIYIPKKEVLDDRNVMRLRITLKRQLSGYKSRVKHLLYNNGVIYPECFQNSKSHWSKRYLKWVHEDVQLLSESRNSLDLLLRQVELFRKSLLEITRLVRTLSRNGRYGEAYENIVSIPGIGMITGMCLLTEIGDIHRFRNERQSASYLGLVPTSHSSGEKTSHGEMTFRGNKRLGPLLVESALVAIRQDRALAAAYREYCKRMLPQEAIIRITRKLSNRILIILKSGKKYEHDRCY

SEQ ID NO: 116182 - protein, 434 aa, unidentified
MGDQMMVWRDEQEADGRVERVAALDIAKASAVVCLRVPGAGARRVQRTWKVAALTSAINELGDLLVCQGVELVVMEATGDYWRPFFYLLESRGLRVWLVNARDVKNVPGRAKTDRLDAVWLAKLAERGMLRASFIPPRPVRELQDLTRLREVLVGERTRYRNRVEKVLEDALIKLSLEASDLFGVSGRAMLDALVSGQRSPAVIADLARGTLRNKIPALRKTLEGRFTEHHAYQLRLLLANNDRLDAQIAELDAEIERRIRDLEAGAPRPPDGMGVLERLDEIPGVGRACAQAIVAEIGLDMSAFPTPGHLASWAKLTPRAIQSGSKNTHGPTGKGNRWLKGPLGQAANSAKRGQTFLGARYRRLIRHMPKKKAQTAIARNILEIAWHLINDPALRFRDLGPDWHERHLNQARATRNHQRALENLGYTVTLTRA

SEQ ID NO: 116183 - protein, 344 aa, unidentified
MSVAIIGVELAKNIFHIHAVDRHGGVVFRASRKRSDWVEHVCERIEPKTIVAMEACASGHHWGREFQARGFQVRLISGQFVKPYVKSNKNDRIDAAAIAEAAVRPGMRFVTVKSRRQQDLQALHRVRDELMHQRTAKANQIRGLTAEYGIVAPVGLKTLRSAIPVWLEDASNGLSDLFRTILLGLQDDLTGLDERVDQLSKQIERIAAEDPIARRLSGLRGIGPLGATALAIQLGDGRQFKRGRDFAASLGLVPRQHSTGGKARLLGISKRGDAYTRKLLVHGARAVIRHHKADNDPLNRWLHHQMSRKHPNVVSVALANKTARIAWAIARGAEYRPELAARTN

SEQ ID NO: 116184 - protein, 381 aa, unidentified
MKQDNKAKQNRGNEVSVEAPQDTGDLGRRRWKVPRVGLTVGLVVGDKISHYCVLQEEAEGVERGKLKTTPAALQPWLEALPAGTRVVLETGTHSSWISRLIEQAGQEALVAQPRKMPQMYAGKRKNDRRDAEKLARTGRLDPNSMGPIRHRRAEQQADLVVIQARDALVQVRTQLINTVRGLVKGTGERLRGCSAPSFARQVEAQIPQRWRGALLPLVSQIRSWSEQSERYDAEVEKLAQKKYPETELLRQVSGVGPVPWLAFVLTVGDRWRFRHSRDVGPFLGLVPAQDESGESSPQWGISKAGHTYLRRLLVGSAHYILGPFGPDCEWRRWGMKRSQRGDKNARKRAKVAVARRLAVLLHKLWVSGEVYEPLPEKRAAA

SEQ ID NO: 116185 - protein, 413 aa, unidentified
MKYALVRVLPDVPPGGVCAGIDWAAADHVVCVVDMAGRVTDRFGAAHDKAGIAAMIARLRRAGAGEVAIERSDGVLVEALLAAGLTVVVITSRQVKNLRARYGAAGAKDDRFDSFVLADTLRTDRARLRPLTADTPATVALRMAVRTRKDLVAHRVAACNQLRAHLAVAFPGAVGLFCELDSRLSLAFLGRFGSQDAADALDEQQLASWLATLPARGFPAPASVLCARLQAAARGTAGPAGAAQAGVTAALTGTLTALSGQIKALETQIAAQLPAHPDGHIFTSLPRAGTVRAARLLAEIGDCRSRFPDSGALASLAGVTPVTRQSGTHTARTYRWADSRPASPWAAAIYADARARGKDHPHAVRILARAWTGVIWRCWQDGTAYDPAKHNALQRSLDRQQASSTSPARPEDR

SEQ ID NO: 116186 - protein, 363 aa, unidentified
MEYIAFDAHKHYTLASVVRPNGNLVREERIEHDRGSLREFLERCERGSPVAVETIGNWYWIVDEIEAAGCVPKLVHARKAKLMMGEINKTDRLDARGLNRLQRNGTLPTVWIPPGELRDQRDLPRTRMVLVRQRTQLKNRIHATLAKYALHDLEVSDFFGVRGRTLLRQRFDLLPPHTAYASQQLLEQVEELDRRVREFEQRIQAVFKPTPAIQLLLTLPGVGLTLGVVIALEVGDVARFASAEKLAAYAGATPRVHASGGKTRFGPSRPDVNRYLKWAFVEAANAICIGRGRAPHCHVSRLYERIARRKGHAKAIGAVARHLAEATFWILRKHEPYREPKASAVSPTGDKRGWPLSSRKLDR

SEQ ID NO: 116187 - protein, 402 aa, unidentified
MTGRCCSARTASFPTTPLGYGQLIDWLAGFGRVVQVGVEGTSSYGAGLTRALEAEGVAFVEVDRPNRQKRRKVGKSDSLDAIAAARATLAGEACGAPKAKSGNVEGIRVLGVARMSAIKARTQSMNQIRSLVSTAPVDLREQLRGLPILELVRTCAGFRPGASSDVVSITKLALRVLGRRVQYLDGEVAQLDTRRTALVKDVAPQLLAAFGIGPHTAATLLVAAGDNPERPRSEATFARLCGVAPIPAGSGKTDGYHRLHRGGDRRANSALWTIVLSRMATHPETRAYVARRTKEGKQTAFIMRCLKRHVAREIFKLLPRQELGLGDLRSFTTLGWVRGIRPTRSLESRGHGDARSRSNEPGSLQGCLRERASKGAGISGSSWRPDHAARTPRQRDVHPECL

SEQ ID NO: 116188 - protein, 351 aa, unidentified
MLIIGVDYHPSFQEIAFLDQDTGECGERRLNHGDGEAEKFYRDLQQKGVRVRVGMEATGYSRWFERLLSELSVEVWIGDAAKIKTKRVRKQKTDRQDAQLLLKLLLENNFPRVWAPSPENRDLRQLLWHRHRLVQMRTRIMNQLQALAMNEGTRWKKRLWSEQGRSQLEKIRLAPWASRRRQDLLGLLDRMNPTIAELTAAVEQEAKKRPEVLRLMTHPGVGPITALAFVIIIMTPDRFPCGKQIGSYVGLIPCEDSSAGRQRLGHISKQGNALLRFLLVEAAQAAVRYDPDWRRRYLHLAMRRERRIAKVAMARKVAVRLYWMWRNGWEYSQSVEFGSHAGQLATGHGVK

SEQ ID NO: 116189 - protein, 341 aa, unidentified
MNVTTIGIDLAKTVFSIHGTDTHGKVVVRKRLNRPKLLSFFAQLPPCLIGMEACSGAHYWAREMTKLGHDVRIIAPRFVAPYRKSSKNDDNDAEAICEAVGRPNMRFVPIKTEDQQATLCLHRIRRGLTKERTAQINQIRGLLAEFGLIIPQGRYAARRRVPEILEDAENGLPMLARRLLNNINQRIRQLDEEILAYDREIEAMARRDERAKRLMAIPGIGPQTATALLASAPDPRQFKSGRHFAAWLGLVPRQYSTGGKPRLGRITKRGDKYLRTLLIHGTRAVIAKIDAKEDRLSAWAKELKERRGYKRAAVAMAAKNARIVWALLMNQTEFKTQPVKG

SEQ ID NO: 116190 - protein, 412 aa, unidentified
MEVLCERCCGLDVHQKSVVACLLTPDAQGRKQRETRTFGTMTAELLQLSDWLQETGCTHVAMESTGVYWKPIYNPLEGQFELLVVNARHLRTVPGRKTDVSDAEWIAELLQHGLLRASFIPPAPQRELRELTRYRTRLGQERVRVSNQLQKVLASANIKLATVASDVLGVSGKAMVTALAAGREDPQELAQLARGQLQQKHAALVQALTGAVRAHHRFLLREHLAHIAYLEEAIERVSAEIAERLRPFEEALAHLDSIPGVNRRTAEVLLAEVGSGMRPFPDAHHLASWAGMCPGNDESAGKRRSGKTRKGSPWLKAALVESAHAATHTKETYLRAQYEHLVRRRGRAKAEVAVGHSIPVIAYHLLTRHEDYRELGSSYYDERQRDRTLRRLVARIEHLDLQVTLTPLAQAA

SEQ ID NO: 116191 - protein, 327 aa, unidentified
MRAIKSEKKLYCGIDVSGDTLDVCYQSSAGSLEWCKCTNNAEGFKEIWQHTGKLYHFIMESTGVYQLPYCFFLEGKKARYSVVNALQIKRYIQMKLERNKTDKKDAFHICMYGVDHNPECYQMPSHLYFECRAINNAIETITTEITSFKNKLHSLSKLDIDSKVIVTGYKKILRDLQAELKKFEAELYKKLEAWQPELVKQVRSVVGIGKRATAILIVTTQGFKHTQTYQQLISYAGLSPKEYSSGSSIRGKVRICKQGGSLLRHTLYMCALNAKETNGACKELFDRLVAKGKNKKLAVIAVANKLLKQVFGVIKNECLFDMEISLL

SEQ ID NO: 116192 - protein, 339 aa, unidentified
MELFVGLDVSLNSIAICVLSSRGKVHKETTSACEPDDLIAFLRTLQGDAACIGLEAGPFSQWLYRHLVEARFETVLMKTRQVKGALKAMPIKADRRDAEGIARLLHMGWFRPVHCKSISAQEMRALLSARKTIVQAITNLELSIRGILRNFGLKLGRVSKGGFAERVIELVEDNLKLYAAAKPILDARRALRHDLASLEKLLGDLARTDRLCHLFMTMPGVGPIVALTVRAAIDDPNRFHSSKDVGPWAGLTPRREQSGERDIIGSISRAGDAGLRTVLYQAAMVMLHKGRPSWLTAWALNVAKRRGMVALARRIGVILHRMWRDETPFRFTRAEPISS

SEQ ID NO: 116193 - protein, 453 aa, unidentified
MSRKKTKLQSVNEPPKIRADAAGIDISPEVIYVAVDPRRDPQPIRHYGSVTAELYRIANWLKACGVRTVAMESTGVYWIPLCQVLDERGFEVYLVNARHYKNVPGRKTDVCDSAWLQYLHAVGLLQRSFRPADEICAFRTVMRHRASLVEAASKHVQHMQKALDQMNVQIHRVLSDITGVSGMAMLDAILKGERDPRRLAELRDGRVQTSEADIIAALEGNYRIEHLFTLKQSLESYRHYQKLIAECDRQIREQLEALDGRSGGNEPPDARKNMRTRSDEELRNEFFRIIGVDLTAIPGINVGTVQVLLAEIGPDLSRFRSAGAFSNWLGLCPNNSITGAKIKSSKTKKVENRLAAALRMAAESLCRDKSYLGQFYRRMKMHLSGGAEAVTASAHKLARIIYAMVTGRVEYDESCFAEIEQRNRERARLRFIKQAEKFGFRLTPIHAGTEFVS

SEQ ID NO: 116194 - protein, 412 aa, unidentified
MRRVVGMDIHRTFGEVVIWENGVLRHAGRVDMTRSALEGLGNRLAATDEVVIEATGNSMAVSRVLSRFVARVIIANPLQVKAIAHAHVKTDKIDAGTLASLHAAGYLPEIWTPDAITERKRRLATRRYQVVRHRTRLKNEVHSILHAHLIPKCPHADLFNARGRTWLARQPLPDDERSAIDRHVRELDRLADDLDILDREIAQGALDDQAIKRLMTITGVNLTVAAALMAAIGDIGRFKSPGKLVSYFGLNPRVRQSGLGAAHHGRISKIGRSHARAMLVEAAWAAARAAGPLHAFFVRIRARRGHQIAAVAVARKLAVLCWHLLTKDEDYLWARPALVANKTRAMELLAGKPQKKGNRRGPAYAYNVKALRDQEMQIAGQAERNYARFVARWKTRPSGEGVRERLNPARQE

SEQ ID NO: 116195 - protein, 324 aa, unidentified
MTDAVLGIDVSKNTFDTNLGAGIKARSQSFANSPDGWHHLIAWLGEHKIGQVHACLEATGRHGLGIALALHEAGHVVSIVNPAQIRDFARTKLGRNKTDQVDAVHIREYAELFKPRPWTPPSPAMRRLCELQTIRAGTVAGLTEWKNRRGSGMADDLALSLVETTIQHFTSQLKVVDQAIAETIDNDLELSAKRDLLVSINGVGEALAGIVLAELPGPDILGCSAAVAAYAGLNPQQHQSGISVSRPVRISKIGNAVLRAALYMPALSAMRYNPAVVALVDRLKAQGRLKGKQIVIAAMRKLLVLCFGVLKTGKEFDPAMAMGK

SEQ ID NO: 116196 - protein, 310 aa, unidentified
MLIVGIDPHPGQHAVALVEKSGKLRELHVFPNTRQGQKAFLNWLKTHKVNALAVEGPTQPFFRSWAARLLELGYPLFPIPSQEVRLLRRVRARGKEDKTDAWLVARTYLNAPEAFPPLALPEWLLPLRELTRSHRALAEERKALRMRLKAARDPRVQAALTRVLASLEASLAELEAEIEARVKVLAPGLLSLTGVGPLLAAVLLAEVGPIERFASEAQFASYLGVAPLPWRSGAGGGERVNPFGNRRLNWAVHLIALNRLRWDPKSRAYWEKKRSEGKSKRSALRALKRQISRELYRALKAYFPPLAKAA

SEQ ID NO: 116197 - protein, 355 aa, unidentified
MNQEKYIGMDVHDASISAAVMNAQGKLLMECVLETKAATVLEFIQGLRGTLAVTFEEGTMAAWLHDLLKPHVSRLVVCDPRKNALLRDGNQNDRADARNLAELLRTNQVKAVYHGKHGTRVLKEVGRSYLTITKDVTRVMNRIKSVYRSWAIPCAGTSVYSHRHRAAWLAQLVEPGVRMRAEHLYQQLDSLEPVRQAARRELLRESRKHAAVKLLRQIPAIGPIRSALLVALLQTPHRFRTKRQLWAYSGFAVQTYDSGEYRFVRGKLQRNRERITVRGLNHNHNHDVKNLLKGAAISAIARPGPLQDFYAALVQKGIRPSMARLTLARKMAAIILTMWKKGVSFDPKQLQRPAA

SEQ ID NO: 116198 - protein, 325 aa, unidentified
MTKVKKVAGMDISKEFFDVFVIADKQTTAGRFPNDPSGYAALDSWLDRDTICVMEVTGVYYMRLALWLYGKGFTVSVVNPLIIKRYSQMRLTRAKTDKADARLIAHYGLSQELQSWTPPEQYILTLNQLDSISEQLAKQHTALTNQLEAFTQSGMLERDTKKILLACVHFNERQQQAVEEKINALIQQHHGRLMRSLTSIPGIGRKTAAMLVVLTGGFTKFKSSKQFSAYVGLAPRIFESGSSVKGRVRLCKMGTARIRALLYVCAWSAKVCNKACREVYERLVAKGKAKKLALIAVANKLLKQAFAIASSGNIYQADYLKNSCL

SEQ ID NO: 116199 - protein, 315 aa, unidentified
MTNLKKSQSEINVGVDVGKFSLDVYLYEKAIHFADENSTEGIKRILKRLSHYSVKRLVVEATGRYEFKLAQAAYEKHISVCIVKPSSVRQYAKAINLAAKTDKLDAELIAEYAAIIQPAATPQRSKNLLAIKDLIARRRQVMGMRTQKLNRLKIMGKGFEVSCKRIIRYLNEEVARLEKKLAKYVEDQADWTEKQRILKSAPGVGNTLVFTLLADLPEIGELSKQEIGSLVGVAPMNRDSGKLRGKRRIKGGRFAVRTVLYMATLSATQCNPVIKAFYNQLVAQGKHKKVALTACMRKFIIMLNAMVRDRCEWAY

SEQ ID NO: 116200 - protein, 357 aa, unidentified
MKIVGCDLHARQQTIAMVDTETGEFTEKTLCHEGDAVRAFYAALEGPVVVGIEATGSMQWFLELLEELGIECRVGHPAKIRAKETRKQKHDRRDARLILELLIEDRFPEIWMPSTEERDLRTLLRDRHQWVKMRARLQHTLQAIALNHALRQGHALWSQAGQSALQALPLPPYTSQRRAELLSLYVQLQKRIQELDKEVEAQARQRPPARRLLTHPGVGPVTALATDVFLGDPSRFATANQVASYIGMIPCEHTSGKRQRLGKMSKQGNSLLRYLWTEAAMSTVRKDPELQRFYRRKLIQKGMGKARIAAARKLGIRLWIMMRDQIDYEEFCRRGKLRQKGKAHAGMPDFNSGPAQQ

SEQ ID NO: 116201 - protein, 341 aa, unidentified
MQKFIRIGVDLAKNYFQVHALVSEGGSAVTRKLTRSKMREFFAQIEPCRIGLEACGSAHYWARELQAMGHEAFLMPPAYTKPYVKRGKNDAVDAEAICEAVSRPGMRFVPIKSAEQQATLTLHKTRDLLVKQRTMTVNALRSHLAEFGIIVAKGIGHVSDLLQLAETDARLPSVANAAVKALAQQIDAIDQSLDDLEKEIANAHSRSEMSQLLVEIPGVGKLTATVISASMPDPNVFRSGRDFAAWLGLTPRQNSSGGKPSLGAITKQGNQYIRKLLVLAGTSLLNVVGKRKGVLRDWIVGLLAKKPARLVTVAIANKLARIIWAMMKTGESFRTEMFMKA

SEQ ID NO: 116202 - protein, 388 aa, unidentified
MNRIIKIGMDVHSKNYTLCAMEPTIGAEDRIFGEVQVAPDYKEVICFIESLKMKLGPDNKYSIECGYEAGCLGYTLYHQLTGAGVKCVILAPTTMLTQQGKRIKTDKRDARLIAQCLCYGGYHPVYIPTGEDDAVKEYLRMRDDHKLALKKLKQQINAFVLRHGHQYSGTKWTIRHVTWLKKLELAPMYRETLDEYLASCEEQEAKIERYDKRIEEIASEARYQENAKKLGCFLGIRTHTALSLIVETGDFKRFAKGNTYAAFLGLAPGERSSSENVNRPGISKAGNTHLRCLLIEAAKGICKGAIGHKPKELRSRQSGQPAEVIAYADKANTRLRSRYYKMIRHGKKKNVAVAAVARELACFIWGMMTGNISIRPTAGTSGPAASQG

SEQ ID NO: 116203 - protein, 318 aa, unidentified
MSHGCDTFIGIDVCKDGFDVCCAGSGPLGRFDNTADGVSRLLPLLPAAGTCLVVVEATGGYERQLVGDLMTAGHHVSLVNPRQVRDFARAFNILAKTDRIDAAVLARFAEKVQPIPREKAGRIEELRQLVTRRRQLIEHRTAEKNRCAQGVSSFVRKNILRHIEMINKDIKAIDKLLLSLVQSDDDWRNKFDKIKEVTGLGTQTATTLVAEMPELGKVNRQQAAALVGVAPFNRDSGQFKGRRMVWGGRQSVRNVLYMAALSAMKHNPVIRDFAARLHAKGKPPKVVITACIRKLVVILNAILKANQSWQPRLATATP

SEQ ID NO: 116204 - protein, 344 aa, unidentified
MKYFAGLDVSLDETAICVVDEDGIVVTEGKAASEPDDLVRWLVATGLTITRVGLEAGPLSPWLHTELRAAGLPAICIETRRMKGATAAMAVKTDRNDARAIAHAMRVGWFTVVHVKTAESQELRLLLNNRRTLLEKRVAIDNEIRGTLKAFGLKLGAVTVAAFEVRVLELLAKRSRLLAMVRPMLAARAALRQQCDVLHRMVLKAVRASAVCRRLLSVPGVGPIVALTYATGVDDPARFIHSRDIGPHFGLTPRKYASGEIDRNGSITKGGDGAVREVLVQAVLTLLTRVQRWSALKAWGMAVAKRRGLRRAIVAVARKLAIILHRMWADSTMFNWKRETVALA

SEQ ID NO: 116205 - protein, 340 aa, unidentified
MDQVSVVGLDLAKSVFQVHGVNAQGEVVLRRRLTRGQLLKLFEKLPSCLIGMEACASAHHWARELAGLGHEVKLMPAQYVKPYVKRGKNDAADAEAICEAVTRPTMRFVGVKSPDQQATMILHRVRKILTRQRTQISNALRAHMAEFGIAAAVGRGGLDRLIAVIADQDDARLPDEARACLAVLCTQLEMVKDQILDNDRRILADARKTEAGRRLMKIPGIGPLLASAIVACVPDPATFSNGRSLSAWIGLTPRQNSSGGKERLGSITKAGNTYLRELLVVGAMAVVRRAMQGSAKRPWMTQLLARKKPKVAAVALANKNARIIWAMMATGEPYRELAAA

SEQ ID NO: 116206 - protein, 416 aa, unidentified
MEVLYPRCAGLDVHKDTVVACVRVAGEGKAQTEVHTFDTTTPGLLALADWLGERSCTHVAMEATGVYWKPVWHVLSDGDLTLILANAAHVKNVPGRKTDVADATWLADLLAHGLIRPSFVPEPETQAMRALLRTRKQLVREQAGHIQRIQKTLEDANLKLASVLTNIMGLSGRAILDALINGQTDPDHLLTLVDRRVKTPPEKLRAALQGRLTDRHRFLLRLHLRQIDALAGAMAEIDQEVDHDLDPFRDAVRLLSSIPGVSELTAQVIVSEIGIDMSRFPTAGHLISWAGLCPRNDESAGKRRSNRLRKGAPWLKTTLVQCAWAGARKKASYLNAQFQRLRYRRGPKKAICAVAASILTAAYHMLRDGTFYRDLGPDHFQTASPQAQAQRLASKIAKLGFICTITEDQTVESVSV

SEQ ID NO: 116207 - protein, 456 aa, unidentified
MQIMYHRCCGIDVHKKMIVACLLIITAQGVHKEIQTFSTMVSDLFRLREWLKAQRCEAVAMESTGVYWKCIWNVLEGEMELLLCNAQHIKAVPGRKTDIKDAEWIADLLQHGLLRASFVPARPQRELRDLTRYRSSLAADRARLVNRIQKTLEDTNIKLASVATDITGKSGRAILAAMLHGEQNPEILAELAQGRMKEKREQLAQALQGTLTDHHRFLLASQLRQLDFLTLQVREIDREIAHRLGLQSDPDDPEPADSIGSLPAKAEIPDPPETSESGPPPCVQPDSPQPLKSAEAIRILDEVPGINVRVGAIVVAELGLEMARFPDEAHLASWVGLCPAAKISANKRLSTKTGKGNRWLRQALIEAANAAARSKGTFLGAYYQRLRKRMGHKKAIVALAHRILVIIYHLLTEQQSYRELGPDHVDEQAAEIARRRALRTLEQLGYEVTLQSAEVA

SEQ ID NO: 116208 - protein, 340 aa, unidentified
MNATTYGLDVAKQIFQMYWIDAQTGEIANRRFRRDELIAFLAQRPAGRVALEACGSAHWWARKIKALGHEVVLLHAKFIRPFVQTNKTDAADARAIWTAVQQPGMRTVAAKTEDQQAMLGLHRMRSLLIKFRTMQVNQLRGLLYEFGVSFRTGRVAGLNEIRARMEELEDALPGVMINSLQDQLRRIDGIEQDIDQLEKQINGWYKQEAACKAIAEVPGIGKLTATALVATIGDAKTFKSGREFASFLGLVPRQSGTGGKIWLGTISKRGDPYMRTLLIHGARSVMCHTKVPTAWQKEIQERRAPNVVAVALANKMARTAWAILAHSTAYEKHHVSVRPA

SEQ ID NO: 116209 - protein, 349 aa, unidentified
MKILAIDLGKYKSVACNYVTATGTARFATVVTHVLELDRLLQRESPDLVVIETCSIAGWVHDLCCQRGVKCQVANPSSEAWKWKNVKRKTDRDDALKLAQLAALEQLPTVHVPAPETRQRRALLKYRQSLITRRVAIQNHLRAIAQRQGILLDRGSRAWTVAGFEVIQQIAKPLEQCSADELWRGEAALELQALKAVTKLLREVERKLEAFAASDESVKLLRTIPGVGRCTAEVVVAYLDKPQRFENGRQVSAYAGLVPKQFQSGETDRQGRISRRGPSLLRKMLVEAGWILLRYNPWAQRLMQRLSRGQKTRRKQAIVALARKLLVRCWAMLRDSTEWREPPPATATA

SEQ ID NO: 116210 - protein, 355 aa, unidentified
MVAQITCLPAGQHACVGVDLHKDTMMNCTLIRGSGEISWRKIPCKNREQIVEFFQTLPRPHTVAIEAVGFYRWLWELLEPIVDKLVLADATQARALAGRRLKTDREDAANVAELLAAGRLPLAYAPPLEVQILRDWTRQRNRLSRAHARVLHGVKSIMNTNNRPGPARLSAARLSGYLIAYQSCLPQRHVRMLWQHQRQLSLVEEEIGMCEREIVTHLRSSQMASLAELLQTAPGVGPVVAATVLAEIGDFTRFPDPRAIGRYAGLTPRLFASGGKARHGSICKTGPSDLRWVLQQAAWTAIRCDERIKRQWLKISRSAGRKGAAVAIARKLLVSLWHMAVKNQPYQPLSIRQAA

SEQ ID NO: 116211 - protein, 356 aa, unidentified
MSHDVKYIGMDVHKEAIVIAVLNESGKQVIESVIETKASSILQFLHGLRGELQVSWEEGTWAAWLYDLLQPQVQHIVVCNPRRNALLKEGSKSDKVDARKLADLLRTGMLRPVYHGENGLRTLRELGRSYQTISKDLTRVMNRLKALYRGWGIPCAGTQVYAARSREEWLSKLPQAGVRRRAELLYQQLDGLQALRREVRPEFLAESRKHKAAKLLRQIPCIGPIRAARLIALMQTPHRFRSKRQLWTYSGLGIETHDSAQYRFVRGQLQLSKKPQQLRGLNRNHNHEMKEIFKSAATRASCGRGPFYDFYAALLAKGMKPEMARLTLARKIAAITLTLWKKEERFDAEQLKTQAA

SEQ ID NO: 116212 - protein, 397 aa, unidentified
MYIVGIDIAKRKHEAAVIDGDGAVIIKPFSFTNNCSGYNRLLAMLAKAKLPLDEVSFAMEATGHYWLALFTRLQKEGFRVQVINPVQTNSIRSFYIRQAKTDPRDALLIAEVIRFGHFSESTLHPENIYELRELCRGRHAIVSMQADVKRKVVALLDQVFPEYETAFTNMFGDTSMAILQTCPTPKELSEMPFEELCHLIEVSSHKRFRMAKAQELQALARNSFGFAMAGDVFSTMIRLYAKHLDFLKQQVREMDRKIAEIMETLDTPITTITGIGPTLGAYILSEIGDISRFSSAAKLAAYAGIDPTMRQSGEYNGVRNRMSKRGSPYLRHAIWLAASSAVLHDPALKLYFQKKRDEGKPYMASVGHACRKMVSIIYAVMRDNKAYTPCIPNEISV

SEQ ID NO: 116213 - protein, 394 aa, unidentified
MNVTHIGLDLAKNVFQVHGVDRDERVVAKRKLTRRQVHDYFEKLLSCRIGMEACAGAHYWAREFGRMGQEVKLIAPQFVKPYLKSQKNDANDAEAICEAVGQPNMRFVTAKSVAQQDMLAAHRIRSELVRQRTAKANQIRGLLAEYGVIVPVGINALRRVLPDIQEDAENGLSGLFRRLLEGLRADWVELELRVDQLDGEIEAAAKEDETARRLQTVPGIGPITATDLAASVGDGRQFRRGRDRAAWLGLTPGQHSSGGKERLLGMSKRGDSYLRTLLIHGARAANKAGPRSRWITGVVARRHKNVAAVAFEAEKPISPRRADAHHGQEASPSSNRSDIRAQSHLGAGCVIRSCFPRVAVLIPIAVARTAGSIQRFAECDALSTAAPGASALKK

SEQ ID NO: 116214 - protein, 355 aa, unidentified
MSSEKYIGLDVHQATISVAVMDSQGKTIMESILETKASTLLEFFAGLRGSLFVTFEEGTWAAWLYDLLKPHVTEVLVCNPRKIPLHKQGNKGDKIDARKLAERLRMHDLKPVYHGDNGVRMLRELARSYLTVVKDLSRVMNRLKALYRSWAIPCAGRDVYYRRHRKEWLEKIPEAGTRRRAEQLYQQLDMLQPLRQQARRELLAESRKHAITAKLRKIPSLGPIRSALAVALIQTPHRFRSKRQLWTYSGLGLQTRDSGEYHYVRGQVRRRKKQAFIRGLNKDYNHDLKSLFKGAATRASVKPGPLQEFYQRSLAKGIKPTMVRLTLARKIAAITLTLWKKGEDFDINKLNSQAA

SEQ ID NO: 116215 - protein, 349 aa, unidentified
MLYVGLDLSRKRLDWQALAADGERVGEGACPPDRDGLLHLVLAVQRDYGERPVLAAIESMTGARFVHDQLELAGWDVRIADAQRAKGIAPLACKTDRIDAWVLAELARRDLVPEIWLPGPEVRCERERARFRLHLVHKRTSLKNRVHAILFQHGLRAPVEDLFGAGGRRFLERCELPEPWRSNVAASLYLIDVLEEQIDGIERELRRLSVEHRYLPLLMSAPGIGSVLGYTIAAEIGDVERFPTPAKLVSYTGLCPRVRQSGEVDRRGALSKHGPPYLRWALIEAAHNAIRCYPPYRELADRQRARLGKQRGGSVAAITIARKLAEASWWMLTRNRPFAPAGARIPLTA

SEQ ID NO: 116216 - protein, 415 aa, unidentified
MALKIVYKICCGIDVHKTFVVACIASTNDKGVTSYESHRFSTYTSGLKTLLQWLLDRNCKDVCMESTGKYWIPVYNILEKDCSIVLAHPKYVKAIRGKKTDKKDAKWIADLFKHDLVAGSFMPPAGIRQLRDLMRYRFKLTCFKSSEKNRLQNCLTVSNIQLGNVVSDTFGKSAQAILDKILENPADTSFDLEPLVFKSLKKKLPELRDAIDGYITPEQAGKLKVIKSHYENLEARKAELEELILALATPYQQELAILQTAPGISSDFTAIGIISEIGTNMEAFPSAKHLCSWAGLTPTNNESAGKKKSVRVSKAGCYIKPLLVQCANAVVKSNKHPEIRNRYLRIKKRRGHKKAIIAIARMLLTALYHMLKNGENYNAELYRKSDLPPVDREITVEQAILIARNQGYKIKSATA

SEQ ID NO: 116217 - protein, 345 aa, unidentified
MKYFIGLDAHSTTSTFAVVDQTGKCVHRSTVKTSEKNLSYVISQINGERVLTFEESTISQWLYLQLREYVDDLIVCNPVYVAKKQGAKTDFRDALHLAQELRTGHLTPVYHDSSHWIQLRVSVSGYLDVVEEIVRTKNRLKAVFRAEALNTDENSFYKNKHRTVELHNESARFVAERLFAQIEYLEEEKLKYIDLFRRNQKKYRPIRNLMTIPGISIIRANIIVALVCQPARFKNKHQFWGYCMLVRHIQKSGGRIYGNKRVFGRRELRDIFIGAAENAMRTKTTLRDHYDALRVRGVNHKDAKVSLARQISSISLSCLKNNEIYQDDYRERLKERKKVRQMLSQ

SEQ ID NO: 116218 - protein, 468 aa, unidentified
MQTAKRLWQNRKEKKEWTRRLQSEDPGLEVVHPHAAGIDVGNSAHYVAVRPDRDPEPVRRFECFTADLYRLSDWLKSCGVNTVALQSTGVYWIPLYDILEERGFEVYLVNARHTKNLPGRKSDVQESQWLLKLHTYGWLNNSFCPPSAIRTLRTYWRQRAEHVEGAATCILRMQKALTQMNLQLANVISDLSGVTGQKIVRAIVAGERDPRKLAELRDARIQASQEEIAKSLEGNWRPELVFVLKQEVDMYDTYQQRIAECDQRLQKHLATFANNATPGQPPSPQGESKKKKKKPTQNAPAFDLSHELERISGVDLTRIDGIEVIVAQTILSEVGLDMGRWKTEAHFSSWLGLCPDNRISGDRVLRRGTRRVINRAATALRMAATTLIRSRSYLEAQYRRLRSKLGAPKAITAMAHRLARLVYRMLKYGQQYVDKGMEYHDQRYRNQQIHLLQKKAAQLGLQLVPALA

SEQ ID NO: 116219 - protein, 368 aa, unidentified
MKKGIKTEGQQDNKTRGKYPEGCTVGLDIGDEYTHAAVLNSDGAMLMEERMRTREPEMRKWLSSGPAALVALETGTHSRWIAQVARQCGHEVIVANARELRLIYGGTNKHDRMDARKLARMARVDPELLKPVKLRGERQQSDLAMIGARELLVNMRSKAINMVRGTVKAAGTRVEACGSGSFPQYAAEVMPEDLKNALAPVLELLDELNNRILEYDERIEHLAEERYPEVKLLTQVHGVGTLTALMFMLTIGDPWRFQRSRDVGCYLGLRPKRNQSGDRDPQLGISKAGNSRLRKTLVNCAHVILGRFGADCDLRRWGLKLAGTGRNTKKRAIVAVARKLAVLLHVLWTTGEEYRPLREVNVAAEVAA

SEQ ID NO: 116220 - protein, 419 aa, unidentified
MSQSNIDRQYAQDLAVTLHAGVDLALEKNVVVVVNERAERIDHFSFPQERGGYDYFLRRLEGLRQKYHATQVVVAMEPTNYFWKLLARELEEKQQTYRLVNAYTVKKHREGDQLDRSKDDRRDAGQIAELSRNGKTTQTQLQKGAYEDLRQYATLYHQLMQSVRREKAILWGLIGQVFPELVRAFKDLEGETYRALLTNCAAAAAIRQMPMEEFLAQMRAAYSGKRLCTSKLKCVYQLASQSIGVTEGIQAIQLAIQVHLTHLQVCETQLEQVTGAMNARLYSLTEATYLLSCPCLKTTSAALFLAEVGDPQRYEAAAQWVKLAGIQPAPNTSGKKQRSRTPMSHQGRPRLRTLLYFTCLRMVQYDTRFAQLYADLQRRKDNPLTKMQALGVLMNKLLHIWWALIHNQTFYNPSFGQPV

SEQ ID NO: 116221 - protein, 360 aa, unidentified
MKNKLNHALRTTTTLTSSETQVRIQQLKLGVDWHADHFRVVRMCDGLSPQPAQRFTPASFLPFVQKQLTLADQVFVVYEAGPGGFHLHRQLTALGVTAFVVHPQKLDPQHKGVVTDKTDARELALNLDRYLRGNLRALSVVRVPTAAQEQRRALARQREQLRRERQRLAAQGRSLCLTQGIRLRGEWWKAPLSLPDWLEQRLAVWRQLIIAVETLLEALTQQVEALSPKERPKGLGPLTLGLLIAELCDWSRFKNRKQIGSYTGLCGGVSSSGQSHCDLSITKAGNARVRWALIELAWRMVQFQPQCKAVQRWRNVLLQPQAAARQKKRALVALARQLAVDIWRWQTGRVTPGQLGWVMV

SEQ ID NO: 116222 - protein, 364 aa, unidentified
MLYLAIDQHRKQLTVNLRDEEGNVLLRRQVSTRWQAVRDFLQEMQQRGRQAGGWIVIVEVCGFNDWLLQLLGEYGAHEIVLLQPEDRQRHKTDRRDANRLGELLWLNRQRLAAGQRVQGMRRVMIPSADDRLDRHLTSLRWGIGRERTRVLNRIKGLLRRHNVEQHCPTKGMQTQQARRWLDKLALGELDRLELDQLLARWQTIDAERAALDEKIRQRQGRHATAPLIATIPGMAAFTSLALACRVGDVSRFPRPRSLANYWGLTPCLRDSGEAKQRLGSITKQGSALARFVLGQAIVHVLRKDAVLRRWYKGIKRRRGSKIARVAVMRRLATIIWHLLRKQQAYVLGGTAAQDRPRTKVAAEV

SEQ ID NO: 116223 - protein, 310 aa, unidentified
MSIHPGVVGIDISKFHLDLFDPRVGRPERIDNTAEAAAALAGRLAAAGDRAVMEATGSYDRALREALRTAGVGFSRVNPGQARAFARAAGFLAKTDAVDARMLALMGQALELRPDAAPEAERERLGRLHRRRDQLVAMRAQERNRRKEWADEEIAASIDEHIAWLARQIAELDGQIRRLIRSSPMLSPLEQLLRSIPGVGPVAAVSAIALVPELGRRSPKTIAALVGLAPYNADSGARRGQRSIRGGRKRVRDAFYMAAVAASRSDGRFGRFYAALRQAGKPPKVAFIALARKLLVTANALVRDQLVFQP

SEQ ID NO: 116224 - protein, 464 aa, unidentified
MQGSGDKTSNTDSEVEVDGLPVVRPNVAGIDLGSEKHWVCAPRVDGAGREVEQFGATTPELERMVAWLKKRKVESVAMESTGVYWIAPHEVLDRYALEVVLVNTRELGRVPGRKKTDRVDCKWIQRLHSCGLLRGSFRPKEQVCMLRTLVRDKGNLVAEAADWLRRMQKSLDQMNVRVHRAVADIEGVTGMAIVRAIVAGERDPRQLAKLRHPGCHKSAEEIAEQLSGHWRADHLFSLQQALRMYDAIQERIADYEQEILRKLAEMEREECRGQEAPKLKNPRKAKTIRNRGQEPMRQALYRISGVDLTGIDAIGVETVQAVLSEYGPDLSRFPTEKQFISHITLAPHQPMSGGKPVKKKKKRGSASSRVAAALRMAAVSLRHSNTALGAYYRKIARRTGADVAVFATARKLATLIYRLLRWGQPYLDEGAEAFEKRHQQVRIQRLTAMAKDLGYQLAPQIAQA

SEQ ID NO: 116225 - protein, 398 aa, unidentified
MDTSYAVFCGIDVGKSDHHAVGLDTAGGRLFDKALPNDEARLRAVFADLAVHGPILVVVDQPNTIGALPVTVARACGHDVAYLPGLSMRRVADLYPGQAKTDARDAFIIADTARTMPHTMRRVDVGDETLTELGVLVGFDDDLAGEATRVSNRIRGLLTGIHPALERVLGPRINHLAVLEILSRYGGPVGIRQAGKRRITTLAVKHAPRMGARLAEEIFAALDAQTVTVPGSKAAEIVLPKLADSLKEVLQQRRAIGDDVERILDEHPLSQVLTSMPGIGVRTAARILIEIGDGSDFASAGHLAAYAGIAPVTHRSGTSIRGEHPARSGNRKLKRALFLSAFAALHDPTSRAYYDRKRAEGKKHNAALICLARRRCDVLHAMLKNKALYRAPVSAEAA

SEQ ID NO: 116226 - protein, 372 aa, unidentified
MKKIRFIGLDVHAETIAIAVAEPDGEVRSLGIIPNREESVRKLVKKLGPAEQLQACYEAGPTGYVLYWQLTALGVKCEVVAPSLVPVKAGDRVKTDRRDATKLARSYRAGDLTAVWVPNEEHEALRDLVRARETAKQDQLRARHRLSKFLLRHGRRVPLGIKVWTQKHQQWIKEQVHFEQPAQEYTLLDYLHEVEHMADRIRRLEQAIEEAVKLAPPRMQEVIQALQALRGVAQISAVTIVAELGEISRFDGARQLMGYSGAVPSEHSSGKRIQRGPITKTGNTHLRRIAIEAAWAYRHRPTVGPALRKRQEGLSEEVKGIAWKAQHRLHKRYRNLVAAGKEKQKVVTAVGRELLGFIWAIGVQVERNSRVA

SEQ ID NO: 116227 - protein, 396 aa, unidentified
MTTIGIDIGGRTHVVARCREGTSRADREILRVNQNRAGFGALDTWLARQPEPVTLVTMESSGHYWMPLASHLRRQDIPVAVVNPLAAKYFAKSRLGRTKSDPADARSLAEMAMRDTPPARDPLVGAELRQAARFAMTLVTEQAKVCQRLIRLVDIGFPELGELFDDPTCRTAREVLRIAPTARAATRRRTATLANANAGPGHRRLGVAKAERLQAAAADSIAVPELDAEVAFEVGLLLDQYDLLERQIGDADGRVAGLLDGELARRLQTIPGVGPSITATLIAEIGDIGRFTDFDQLLAYAGVHPAERSSGRKGSNPETAWHMSKAGNSHLRAAAYRMAVVGVQHNPVIATHYARKRAAGKSKMNALGHCMRKALSLVWGVWRNGQDFDPNWRVEV

SEQ ID NO: 116228 - protein, 419 aa, unidentified
MGKTPGWFAGVDWASQKHDVWLADASGKRLGKRTFEHSGEGLAQMCSWLMATSGGRPEDIHVAIEVPHGAVVETLLDRGFKVYAINPKQLDRFRDRFSPAGAKDDSRDAETLSSSLRTDRRAFHQVALADPAIIELREWSRMADDLSADKIRHANRLREQFRRYYPQMLQLGSDLAEEWIFALWERAPAPAKAARLRQAEVEKLLKRHRIRRIGAAEVLAILKQPALVVAPGVTEAAMAHIHVLIESIRLFAQQLKEVHRQFDRLCNLLAEPIPGRNGQAGPELGQTLVAILQSLPGAGRVVVAVLLAEAFETLKRADYAILRMLCGVAPVTRRSGKGRAVTRRLACNPRLRNAIHYLADAARRSDEKCKAKYLALKARGCSHARALRTIGDRLLYVACTMLKNRTLFDPCFESQKPAC

SEQ ID NO: 116229 - protein, 355 aa, unidentified
MREDSRTTRGETIGIDLGDRGSDVCVLDETGAVVTRTKAATTELGLTRAVKRHGSARIIIEVGTHSPWVSRLFEGLGHEVIVANPARVRRIAEKEDKSDRIDAELLARLGRVDPKILRPIKHRGEQVQRDRALLRVRDGLVRSRSSLVTQARCIAKSLGKRLPRCDAKNFAQRLDREELRELFPGLTTIREVVGELSRQIDALDSSIEEVSRQSYPETARLRQITGVGPITALAYVVTIEDPRRFKSSRCVGAYLGLRPKRHQSGTADREMRISKAGDPYVRRTLVQAAHYILGHHGPDTALRQFGERVKKRGGKCATKRAAVAVARKLAVLLHRLWVTGEKYEPLRGVRQAAAA

SEQ ID NO: 116230 - protein, 451 aa, unidentified
MTGHQVSKVKLSTQHFGDRPTMTKLSSTPADAVLVAIDMSKHRQEVLIERPEGGRRRRMTVMATKTDYDRLASDLADIGRPIVVGFEATGNYHRTLAHRLLTAGFELRLISSVALARTREALHNGWDKNDSKDAQVILHMLRIGATQRYVDPLAAGINDLQEMSKTHEAISKAKTQTWHRILTHYLPLYFPEIERFAGNSRSDWFLALLERFPTPASMTALGQEAFTSEAWSLVGRKVSKARLINDIYETACASVALPVDEDSVAIVMFRMIIAQARSLIRQRDEIERTAHAMLSENRDYQLLRMIPGIGPINALTILAEAGDLRRFAHHRQFLKFCGLDLATCQSGTFRGRTKLSKYGNARLRRTFWMAAQVAARQRDNSFRDKLGRYMEGHASDPDRRRKAMTALTAKMARVAHAVIKTGTEYRPFLERADTRWKDPSLLCREGATATL

SEQ ID NO: 116231 - protein, 364 aa, unidentified
MYDSTTTVTVGLDVHARSIRFAAVRADELLEERTLPYDEEAVERLLRRWPGARCCYEAGPTGFGLYRRLVEGGIDCAVVAPGLVPQRPGDRVKTDPRDARKLARLFAGGLLEPIHVPSPQLEAARDLVRAREDARLDRMRDRHRLSKFCLRHGRLLPTSAWTVTRRKWLSEQRFEHTAEQITFDSYLHAVDLVDRRIEQLERAIRETAEQGPWRQLVARLRCLRGVDTLTALALVAEIGDFSRFERAEELMAFVGLVPSEHSSGEHRRQGPITKVGNSHVRRLLVEAAWHARQRPKVGYELARRQRGQDAIVVERAWRCQQRLHQRWLRMAGRGKPHQKIVVACARELAGFVWAIATEQPLRTT

SEQ ID NO: 116232 - protein, 345 aa, unidentified
MTEAYDGRQVVGMDLHRRRSVLVRMSMDGRKLETVRIGNSPAALRRVLARCGERPLVVLEATYGWYWAAGALAAAGAEVHLAHPLGVRAFSYRRVKNDERDASDLADLLRMGRLPEAWIAPPGVRALREVVRYRHKLVQQRTSCKDQVHAVLAKLGIPVTHSDVFGRGGGLWLGQLVLPEPYAAKVASLRALIGVLDGEIARLGEQAAGMLAADPGYAAVRELDGIGPVLAAVIIAEIGDVTRFRKPGQLCSWAGLTPRHYESDTKVIRGHVSKQGSRMLRWALVEAIQHQPAGTRPQQAKEAILARRGKEARNIAKTAAARVLLTQVFYALRDGHVRRAQDPAA

SEQ ID NO: 116233 - protein, 362 aa, unidentified
MEIFARRKEPRMKEFIAFDCHKRYTLMERENIQTMKAKQYRVEHEPGAIKRCLQGREPGTLVAVEATGNWYWIVDEIEQAGLQPKLVHPRKAKLMMGLINKTDKLDAHGLNQLQRNRTLPIVWIPPKELRDLRELTRTRMVLGAQRTRLKNRIQATLNKYGWVLKDYSDPFGKKARVELNLRIGHLPPQTAYVTGVLMNQLDALEVQIVEMEKRIRALAQQTPEMKQLMTLPGIGWILAVVVVLEVGDILRFPSAQHLASYSGTTPRIHQSGDKTRYGRLRPDVNHYLRWAFIEAAHSVCLNQRCHPEWHVTRLYQRIRGRKGHAKAVGAVARHLAEATYHVWSTGQPYRDPGLKQGRSTEV

SEQ ID NO: 116234 - protein, 481 aa, unidentified
MSMIATHNEFNHVVAFEVSKAELLVHCLPADTQCVIANTSKAARRLLTAELKKLHKLANARLLVVCEATGGYERHVLEVCVALGIACHRAHGSRVRFFARYLGVSAKTDTIDAHVLARYGLKSERLRLYVPPSPQEQALKELKARRDEIQAMMIAEANRLEHARHASVVRSLKSHLAALKKAFDGFEKEIAGLIAACPVLARKTKLMRSVKGVGIVTAATLLAFMPELGTLSKGEAARLAGLAPMNRDSGRLSGPRHVEAGRAAVRRTLYMAALVAMQTNANLRGFALDGGRQSLRGDTLVITREPRLSGDAPYTMPMPLAMRMSFRHELSPEPLIQSADPKIVALARRVRGDTRDPLVAARRINEWVHDSLEKTVAVTIPSAIQVLASRKGDCNEHTQLFIALSRAAGVPARAAAGLARVGNKFYYHAWPEVFVGRWVAVDPTFGQFPADAEHLRFVYGGLARQAELLRLMGTLKIDVLN

SEQ ID NO: 116235 - protein, 316 aa, unidentified
MSQPQRFVGIDVAKAQLDIAVRPTAERWAVSNDEAGIAALVAQLQAMAPTLIVLEATGSYQRAVVAALAVAGLPVVVVNPRHARDFAKATGQLAKTDGLDARALAHFADAVRPAPRPLPDAHTEELRALLARRRQLIAMRTAEQNRLDGASPRLRADIQAHITWLDTRVATLDDDLDTTPRASPVWREREALLRSVPGVGPVCTRTLLLDLPELGTLSRQRLAALVGVAPFNRDSGTLRGTRTVWGGRTHVRATLYMSTLVAVRYNPVLKVFYQRLRAAGKAAKVALTACMRKLLTILNAMVKHQKPWHVQEEPIA

SEQ ID NO: 116236 - protein, 398 aa, unidentified
MPVPAWRPLAGLIRSLSALWGVTRHSAVACGLHPQTGTGVVPQPGLEVEVMLADEVDYVVGVDPHRDSHALAVVHVVSGAVLFEATVAANSDGYAQTLKLADLHAAGRRAFAVEGAGSFGVGLTRFLSDRGEQVLEVSRLRRERRSGGKTDALDAVRAARSVLAQNRSATPRAGGERQALQALVAAREGAVNAKRAGLCQLRDLLITTPEPLRSELRPLTRARLLQRLAATRPGGGRDPELRGSMLALRSIARRVLQLTSEERELAREIETITRKLAPQLLEQPGVGPHAAAQLVLSWSHQGRITSEAAFARLAGAAPIPASSGQTIRYRLDRSGDRKLNRALHMILVTRKRSHPATIAYIERRVQEGKTRREANRCLKRYLARSLYRLLEQGPPLAT

SEQ ID NO: 116237 - protein, 344 aa, unidentified
MPIVGGLDIHRKQITFDYLDTDTGEVRRGQVAPADRVHLARWVAQRFAGRGDVELAVEGCTGWRYVAEELARAGVVAHLAEPADTAALRGRKRHAKTDKTDSRHLRQLLIDGRLPECWVPPGHVLECRALLELYRDLRVEHTAWVQRIQATLFHQGAQQLGSLRSAQDLAQLRAIAAAQLSGAGQLQVATALDMLAVLDEHLDALRRRLLHAAAHLTGARALAARIYGVGPITALALTCWLAGAGRFSSARKAVRFTGLDVTVYSSDGKHAPGHLSRQGPEVLRWCVYEAGKAHARTTAPDHNYYTAVKDRIDGKRAAISQARKIVRQACHILTELGDDALTTT

SEQ ID NO: 116238 - protein, 394 aa, unidentified
MKLVGIDVGKNSHHFCVMDKETGEFNVTPSSFPNNKEGFDFLINSLKPYSKKSILLGMEDTGHYHVALLKFLLSNGYTVALINPKTTDLTRKMEGGITKNDKLDTITICDVLDTPERKKQYRITKVDRFDLYEQRQLTRHHHNLKEELNVYCNRLQKSIDLVFPEFNTLFSSKYSIVYMNLLKTFGSAEAIASTDIRTIRKCFEIKGRGNRISLTPEKLKECAKNSIGISSEVETIQIKHLVSQITLIKEQIAEIDKKIEEFSIPNNSPILSIPGISHFSGTSILAELGDIGNYSKPSQIIKFAGVAPYHYESSQYNAQHTAITKKGSKYLRKTLYQIILPVINNNPVFKKYYLLKISQGKGHRCAQGHCIRKLLRIIYHLLETGQSFDPALLR

SEQ ID NO: 116239 - protein, 340 aa, unidentified
MKKQTGSFLGIDVSKLWFDISLMQVLNFQKQQMVTERFDNTIEGLTLLKKWLKVQKVTFDNDTLLVIENTGIYHRMLWKFFSENNIPIHIGNAAHIKKSFGIARGKNDKIDSQRLCSYAYKNDDELKASPILNPVFLSLKDLITSRARLKSQLSSNKTYLKELKNINDKTTQKMMENVYKMAICGLQKSITEIEKQIRIVIKSDSSINANYTFLVSVPAIGPVTATYILCCTNNFANKISGKQLSCYAGVVPFADRSGTSLKGRNKVHKMANKELKSLLHLCALSSIKYYQEFRDYYERKIKEGKHPNSVLNAICNKILLRAVAVVNNQKNYMENYKKAA

SEQ ID NO: 116240 - protein, 332 aa, unidentified
MTSLPNRPRETSTITAGIDVAKATLELALSDRAATSSHANDEAGHAQVIAQLERLRSQDLNVALIVLEATGGHEAEVAWALQLAGWPVVVVNPRQARDFARAMGQLAKTDRIDAQVLAQLGRTLLQRPDLAKLIKPLPDERQRMLQAMVTRRRQLLGMRVAEQQRAAGPDRRMRKSLDIMLKALDGELARLEREMHAFIGQHHAELLALLGSVKGVGKATISTLLAEVPELGELSGREVSALVGVAPINRDSGTLRGKRTTFGGRPQVRKVLFMAAMVATRFNPVIKPFYDRLVAAGKPKKLAITACMRKLLTILNAMAKARKPFNAGLHLA

SEQ ID NO: 116241 - protein, 410 aa, unidentified
MEVIVERPAALDVHKAQVTACVRVPAPGGGREPHLAEFQTTVRGLLALRDWLAAHRVSQVVMEATGVYWQPVWHILEDDFQLMLVNARHVKQVPGRKTDLSDAAWLCQLAEAGLLKANFVPPKPIRELRQLTRYRKTQIAERQREANRLHKALEDTNVKLGCVASDILGVSGRAMLDALCHGTTDPVVLAELAKGKLRKKLPALQEALEGRFDQLHALLIGAILAHLDFLDEQIERLSDAIEERLAPFGAAVELLCTIPGVGRRSAQNILAEIGPDMSVFPSARHLASWGGQCPGNDRSAGKQRSGRPRKGSRWLDAALKDAAMAATRSKDTYLQALYRRQRSRIGHGKAIGAVKHSILSACWHMLTTGELYREAGGNYFSQRDPERATRRLVAQLERLGHTVTLQEAAA

SEQ ID NO: 116242 - protein, 343 aa, unidentified
MGTFVGLDVSLKETAVCVVGDDGTRLFEGKVATDPAGLARLIRKRAPDLVRVGLESGATSAWLTHALTAEGLPVVCLDARHAQAVLSMRPNKSDPGDARGLAEMVRVGWFRAVRVKSLNSHERKALLISRSQFVEMRVRIDNQLRGILKTFGLVIGACGRGQIGRRASELAEKRPELDRIVAAMVTVRDSVTEQIAALDRVIRQLARSDETMRRLMSVPGVGPVVSLAFLATIDDPERFSRARDVGAYIGLTPTRYQSGELDVAGRISKCGDGFMRTCLYEAAGVLLTKVRRWSALKAWGVRLMKRVGAKKAKVAVARKLAIILFRIWKDGTEFQWTREAAMA

SEQ ID NO: 116243 - protein, 351 aa, unidentified
MKYYQTTTEFNCGIDLHTRQMYICVMNRAGEVLVHRNIRNNDFDFFLKLVEPYRKDLTVTCESCFVCFWLADACEDAGIQFVLAHAYYVKSIAANKHKNDKEDARELAECLRTNRIPPAYVCPRDLRPVRKLLRRRNKYVKNRAVLTGHSTCEVMAAGHQPLKISSNSKERWREGIRESFDEPLDSFTAEAELFMIESYDRVILQMEQRIEKYARDFQLQDYRLLRTAPGIGKILALTILYETIDIKRFRSVKDFVSYSRLVAGTNESGGKDFGGKGRKMGNPYLKWAFMQAAILSKRADPKMNAYYEKLNRQKGKHVANAIIAAKLARAVYFMLDRKTGFSPEMLLKGRR

SEQ ID NO: 116244 - protein, 331 aa, unidentified
MTNAAREAAADARPLDYIGIDMAKARFEWGVHGAQSTQGATNDAPGFETLLAELREHRVGLIVIEATGGLEHALASVLLQHALPVAVVNPRAAREFARSMGHLAKTDAIDALALAHYAHTLAHKANQAGVQLMPLPVHLESLQAMVLRRKQLTDMRTAELNRRGGAMRVLRKSIDAVVKTLNQQIDALNKDIGMHLDEHFKDLNRRFDSIQGVGPNTCAAVIAFMPELGRISNARAAKLVGLAPLNNDSGNSRGKRSIWGGRTLVRGALYMATLSAVRFNPVIKAFYLRLLAAGKCKKAALTACSHKLLRILNAMARTGQAWRPELHRITA

SEQ ID NO: 116245 - protein, 391 aa, unidentified
MICVGIDIAKDKHDCCILDSDGTVRADCFTIPNNMDGFKQLLQTIRNCTKKSDKIKVGLEATGHYSYNILGFLLDNGLPTYVINPLHTNLYRKSLSLRKTKTDRVDARTIATMLLSDVDLKSYTDIAYHNEELKSLTRYRFEKVRERAKLKQSVSRLVTILFPELEKLVPSLHGASVYALLSEYPGAKQISEVHLTKLTNLLVTASKGHYGKEKATLIRETASASIGSVMPAKSLELKHTIKLIQELTSEINEIEDSIQKIIDELNPPILSIPGMGVNSAAVILAEIGDFSNFSSPDKILAYAGCSPSTYQSGKLTNCYAHMEKRGSRYLRYALYNATKYVCHWNPVFAEYLAKKRAEGKHYNVALSHSMKKLVRLIYALQKSGKTYLAAA

SEQ ID NO: 116246 - protein, 338 aa, unidentified
MSMVIGVDTHKQTHSAALLSELGVVESGLEVAASAAGYRQLLAWARSNSASRIWVVEGTGSYGAGLTTYLSEQNEVVYEGDHPKRSWRGPAGKSDQLDAIWVAKEALAHRRPSLPRARGERELLRVLLTARNGAVEAEKQGLNQLYALVVSAPEPLRQRLGNLRAAALVQACLRLRSSADQESAVTAATLRSVARRVSALATEAAGYERQIGKLVSALAPQLLALKGVGPLSAAQFLVSWSHAGRLRDHNAFAKLAGVAPLPASSGRIQRHRLNRLGDRQLNRALHLVAITRSRCDLQTQAYIARRTSDGKSVREIRRCLKRYLARRVFKLLEHLDKT

SEQ ID NO: 116247 - protein, 406 aa, unidentified
MISVGIDVSKGKSMVCIMKPGGEVLKTPFELLHSMESILHLVKLINSYDEEVRVILEDTGHYHLPVVTLLVEKGIFTCCVNALRMKKFCSQSIRRAKTDKIDAVHIAQFGLTYWDELSPVKPPENVYRELKLLARQYYQTVSMLVKAKVNLSNLLDQTMPGIKNLMNDSSGNHKLTDFVKRYYHYSHILEMGEKRFTSDYCKWAKKQGYRVYERLASEILAVAQNGIPVLPNSPVTKAVVVEAVRVLHEIEISRDTILAQMQELAKSLPEFSVIREMPCIGDTLAPRIIAEIGDIRRFKNKHSLIAYAGIDAPPYQSGAFNATERHISKRGNSYLRKTGYEIMQCLIQHKPIGDPVYDFICKKRLEGKSGKEAMIAGLNKFLRLYYGRVAELYKEINEQLIFGSYL

SEQ ID NO: 116248 - protein, 422 aa, unidentified
MSYCPVAGIDVSKRFSDMCILSPDNKIFAQEKIYHDETSINRANTLLQKAERLFFSKPVIVMESTSHYHLILFQFFSEHGYDVIVVNPLQSNSMKDFSIRKRKTDRVDAFKLAMMYRTKTLRPSQIPQTATRALRQLCRHRAELLNDVSSYKNRLTALLDQTFPGYDKVFSDVGGVTSCAVLVRFPTLTILLVEEESELVEVIAAASKSGYSFAKKKAGLLISAAQKAQTLGIHSCADETLIVCTIQMLRTLSESVLQIETAIDNLLAQIKEMRNNVSLLQSIPGVGSHSAALLLGEIGDISLFKKPKQLAAYWVLDPTERQSGSFRGTKNKLSKRGFPYARAALHMGVVNSICKRGKDSAANPVLLSYYEKKCKNKPAKVAQAASMHKLVFIVFAVLRDQMPFELKTPEQHAVEQGFVKAA

SEQ ID NO: 116249 - protein, 391 aa, unidentified
MIYVGIDLAKDKHDCFITNFDGEVLFKAFTIANNLDGFNDLYQKIVSVAEDITKVKVGLEATGHYSYNLLGYLIDKSLPTYVINPLHTNLYRKSLSLRQTKTDKVDARTIASMLMSDVNLKSYSDTSYHNEELKSLTRYRFDKVKERAKLKTSVSRLVCILFPELEKLVPTLHMASVYALLSEFPSAKHVATAHLTRLTNLLSKSSKGRYGKDTAITFRDSARASIGSNMPAKSLELKHTIKLIQELDSEIDEIENEIKIIMDEINSPILSIPGINYRMGAMIIAEIGDFNRFDSPDKILAYAGFSPSTYQSGQLDGAYAHMEKRGSRYLRYALYNATKYVCHWDPTFAAYLAKKRAEGKHYNVAISHAVKKLVRVIYHLEKTKQQYIKAA

SEQ ID NO: 116250 - protein, 430 aa, unidentified
MKSNTQNAKIEAITEKTLVLGIDVGSEMHYARAFDYRGIEYSKKPFKFSNTEAGFVTFKEWILDLKERHEKDKVIPGMEPTGHYWFNLGKFLQDNEMKPVLVNPHHVKKSKELDDNNPTKNDRKDPKVIAGLVREGRYMIPYLPDGVYADLRTASNIRFQLQAELTRIQNRISRWFNIYFPEYKTVYGKPDAKSGMLILKAAPLPEDILTLGIDGVNQIWRDAKLRAVGKARAKTLIEAAEHSVGSKEGAVSARMEIRMLLEDYESRNTRLQEVMVLIEELVRKIPMTEKLLEIKGVGIRTVSGFLAEVGDISRFNNPKELQKLAGLALVENSLGKHKGETTISRRGRKRLIYLLFEVAMSLVSKNQEFRELHNYYTTRRLNPLKKMQSLMAIAAKLIRVFYAILTKGVDYDPKKMVSDIKRPAVYLQAA

SEQ ID NO: 116251 - protein, 417 aa, unidentified
MKSAPSTLPEEPPNGLTCGIDWARDDHAVAVVDARGREVHRCTVEHSAAGLRALLGLLGKRGVGEVAIERPDGPVVETLLEAGITVVVISPNQVKNLRGRYGSAGNKDDRFDAFVLADTLRTDRARLRPLVPDQPATVALRRACRARKDLVSHRVGLANQLREHLKRVYPGAVGLFADLDSPVSLAFLARFDCQDRADWLSPRRMAAWLASTGYCGRADPAVLHARLAAAPRGATGEHGAAEAHVTRALLAVLVTLTEQIKALNAQISEQLALHADQHVFTSLPRSGRVRAARLLAEIGDCRARFPTPESLAGLAGVAPSTRQSGKIRTVGFRWACGKQLRDAVTDFAGDTRRASPWAAKLYDDAIARGHDHPHAVRILARAWLFVIWHCWQDGVAYDPARHKALQRILAEQKPKAA

SEQ ID NO: 116252 - protein, 389 aa, unidentified
MIYVGIDVAKDKHDCCILGSEADNLYPVFTIPNNKAGFDELYEKIFSVTNDRTEIKVGLEATGHYSLNLLGSLIDKGLATCVINPLHTNLYRKGLSLRKTKTDKVDAGSIAMMLMTDKTLKPYSDTSYHSEELKSLTRYRFDKVQERAKLKSSVARLVNILFPELEKLVPSLHMASVYALLSEFPGASYVAESHLTHLRNVLETASKGRYGRDMAVTIRDAAKNSIGSVMPAKSMELKHTIHLIEVLTDEIDEIEVSIKSIMDTCNSPIMTIPGISYRMGAMILAEVGDFSRFSNADQILAFAGLSPSTYQSGQLDSSYSHMEKRGSRYLRYALFNATKFVCKWDESFGAYLSKKISEGKHYNVAVGHAAKKLIRTIYRMELTGEAYRK

SEQ ID NO: 116253 - protein, 405 aa, unidentified
MLFAGDDWAEDHHDVEVQDGSGRVLGRARLPEGVAGIGRFHELIGRFADPDAGPDQVVIGIETDRGPWVAALIAAGYMVYAVNPRQAARYRERLGTSGAKSDAGDAHMLADMVRTDSHQLRAVAGDSGQAQAVKVVARAHQALIWERTRHVLRLRSALREFFPGALEAFDDLTARDALELLARAPDPASAARLSIAQITAALKRARRRNTAEKAKQIQAALRSQQLAQPQVVAAAYAATVRAAVAVISVLNEQIAVMEAQVESHFGQHPDAEILLSQPGLGKVLGARVLAEFGDDPDRYTDARARKNYAGTSPITRASGKKKAVLARYVRNRHLADALHQQAFCALTASPGARAYYDQLRGRGTSHHAALRQLASRLVGILHGCLKTSTPYDEATAWQHRLEYAA

SEQ ID NO: 116254 - protein, 416 aa, unidentified
MDLVHPRCAGLDVSKRDAKVCVRVAGAGRAGAKSTVTTWGAVTSQVLALRDHLIAEQVTLVVMEATGDYWKPFYYLLEDGPFEVMLVNARHVKNMPGRKSDVSDAAWLAQLGAHGLVRGSFVPPQPIRQLRDLTRTRTTIVRERAREIQRLEKLLEDAGIKLSSVASDISGVSGRAILQAMITGQSDPTVLADLAKRRLRNKIPELTEALNGRFGEHHAFLAQLHLDLIDQHTQAVAELTARIEVTIEPFRRFRDLIVSIPGISTGVADVIVAETGTEMTRFPTAAHLASWAGTCPGSNESAGRVGSTHTRPGNPYLKGALGIAAMSAARSKNTYLSAKYRRVAARRGPIIAIVAVEHAILIAIWNMATNDQPYLEPGGDFYLRRNPDKTKNRAIDQLHKMGYAVTLTPLQPVVGR

SEQ ID NO: 116255 - protein, 345 aa, unidentified
MPMFAAFDVSKKETQVHVVDVSGKCVWRGKVLTNPRDIATVLHPYAKKLEKVGLETGSWSSWLFHGLTDQGFEVACMDARQAHAALSVTVNKTDANDAEGLPHLLRTGLFREVRVKPWCDLRRRALLRARATLVRTVIDLGNAIRSALRLFGFNMAAGPGSGGARAFERRVEQHLAEQPGLVPIVMPLLDAWRAARKQVARHESSIRAEVRADERCQLLMTVPGVGHLNALAFVAAIGNTKSFPSGRTAAAWICLTPRRYQSGEINMQGRISRHGDKLLRSYLYEASAHILTRAKTDSALKRWGTALREKVGFKRANVAVARKLAVTLFAMLRTGKPFEAEGIAA

SEQ ID NO: 116256 - protein, 406 aa, unidentified
MNMNAVGIDVSKRKSTVAILRPGGKAVGKPFDVPHLSADFQSLIKRIRELDGETRIVMECTGRYYEPVARELSQAGFFVSAVNPQIIRNFQGQDNPLRKVKTDKADSVKIARYTLDSWANLKQYSLMDELRSQLKTMNRQFDFYMKHKTAMKNNLIGLIDQTYPGANAYFDSSAREDGSQKWVDFIDTYWHVDCVRKLSLTAFIDHYQKWCSRKKYNFSKSKAEEIYGKAKELIPVLPKDSFTKHIIKQAVGQLNVSSQTVEQLRSLMNETASKLPEYPAVMAMKGVGPSLGPQLMAEIGDVTRFTHKGAITAFAGVDPGVNDSGDYSQKSVHASKHGSPALRKTLFQIMDVLIKTKPDDAVYLFMDKKRAQGKPYYVYMTAGANKFLRIYYGRVKEYLAALPTSN

SEQ ID NO: 116257 - protein, 428 aa, unidentified
MGKRKPYRIQRVNQADVQGLCEDVREQRVVIGIDVAKEKMVAVVMDQGPAVLETVGWSHPSQTSEFVAFLVALRERAASVAVAMEPSGVYGDAVRWQLEKSGFEVFRVSPKRSHDSAEVYDGVPSRHDGKCAAIVAWLHVQGKSEAWPLKSERERTLKAALWRLELHAKQSRQNRGRLEALTARHWPEVTELLDLDTATLLELLGEFGSPAAVAAAAVRAKALMQRVGGSKLDPGKVDAIVDSARRTMGVPAIAEEVELIRAVAREARRNELEERAARRRVEDLAEAEGSTAEMQAVVGKTTAAVVVAGAGDPRSFDSPQALVKALGLNLRENSSGKKQNRGVHITKRGSGTARMHLYMAALRLIQSNAIVKAWYAKKVARDGDRTKINAVVALMRKLVLALWHVARGATFDAARLFDARRLDLPVPG

SEQ ID NO: 116258 - protein, 485 aa, unidentified
MKQTKSSPCARAIPAHGGQLSRKERRELARQVQSEQVTLQIVHSNAAGIDVGKNTHYVAVPPDRDAESVRYFDSCTDGLQQMVAWLKKCGITSVALQSTGVYWIALYDLLQEADFEVYLVNARYTKSLPGRKSDVQESQWLMKLHTYGLLPNSFRPPQEIRWLRSYWRQRQNQVRSAASCIHRMDKVLTEMNVRLSSAVTDLSGATGLAIIQAIVDGERDPHELAAYRDPRVKATQEEIARQLHGNGQADLLFRLKQELQGYRFYQTLIAECDQELAQLLRAFPDRSAGVALPEETRKNRRKKKRGNSPQFDLRQLLYLMSGVDLARIDGIDVITAMTVVAEAGYDMSPWPTADHFVSWLRLAPDNRISGDKIIGKARTPTQNRLSQALKMAASSLKASKTYLGAQFRRLRARRGPAIAVKAMAAKLARLVYNMLRHGMEYVDRGTEFYEQQQRERRLHALTKNAAQLGFQLVPTELSLAGTGTI

SEQ ID NO: 116259 - protein, 344 aa, unidentified
MKSKFKLIFGIDISKLTLDVTYFFDGSSYYFQVPNNAKGISQLVDAIKELGIDEHDVLVCCENTGSYTEKLAMVMKSLDTTFWVVHPIIMKGYRLDLQRVKNDKVDSMKIAEFALAHQHKATNYHHADQKTKELKELYLLRKQLIGIRQRTLNFIASENDKAIPGILNTVIYDQLKLFLNDLIKDVEKSILLLIKSEKTISGYYKILLSIPGVGPVIAQHILAVTDGFRKIIDYKSFACYVGIAPFARSSGTSIKFRPRTSKKANQELKAEMHQGALSVIREGQIFYNYYKLMIDKGKHHLWIMNSIMNMIAKCIFNLVNKMTVFNKEIFVNNKKSWQNNLVLS

SEQ ID NO: 116260 - protein, 326 aa, unidentified
MTLSHSLDNTFIGIDVGGASLDVAWHRGDSARYANRPDAIAALVKRLQAQREITRIVVEPTGGYEKALVKALRHAQLPVEIIHTSRFKAYRALVGVNAKSDASDARLLASYAAAPDEVRGRKAGHVELPEDAIREALSELASRRDQLKHMIHAETCRLGTVRMAELREAITTHLEELRAEDKHMHRMMLALVRQRVDLQRDQRLLKTVKGIGVKSALAFLASVPELGRVDNKAAAALIGVAPFVRQSGTMNAPARIHGGRAAVRSILYMAAVSASRHNPVLRPFYERLLAKGKPPKLALIAVLRRLVVFANAVLKSGQPWKGAIAS

SEQ ID NO: 116261 - protein, 373 aa, unidentified
MKKVRFLGLDVHAETIAVAVAEPDGEVRSLGIIPNREESIRKLVKKLGPAEQLQVCYEAGPTGYVLYWQLTALGVKCEVVAPTLVPVKAGDRVKTDRRDATKLARSYRSGDLTAVWVPNDEHEALRDLVRAREAAKQDQLRARHRLSKFLLRRGRRAPEGVKMWTQRHLQWVKEQVHFEQPAQEYTLLDYVHEVEHVADRIQRLEQAIAEAIKLAPAQMQEVVQALQALRGIAQISAVTIVAELGKISRFEGARQLMGYSGAVSSEHTSGTRIRRGSITKTGNAHLRRIAVEAAWAYRHRPAIGPALRKRQEGLSQEVKEIAWKAQHRLNKRYRTLTAAGKEKQKVITAVGRELLGFIWAIGVQVERNHQPNA

SEQ ID NO: 116262 - protein, 356 aa, unidentified
MKQINYLNFKNHHIYVGLDVHHKNWVVSIHTEKIFHDTFTQDPKPAILIKYLKRNFPNGSYHSVYEAGFSGFWIHEQLKGGGIDSIVINPADVPTTNKERDRKTDKVDSLKLSRSLPNGELEGIYVHDRNTYEDRTLLRTRDSLVKDQTRIKNRIKGLMKFFGIEITHEQVKTHWSRRFIELLENVKTIDSGAKISLNMYLEQLKSQRKILCATTREIRKLSMIDKYKEDVKYLSSIPGISTLSAMTLITEIGNINRFNKLDKFLSYIGLIPSEHSSGEKENRRYMTRRGNSSLRKIIVEGSWTAVRKDPGLLMSFNKICKRHTKGRAIITIARKYAARIMHVLKQKEEYKFLAVK

SEQ ID NO: 116263 - protein, 458 aa, unidentified
MYRELQPLRQALSAELKANLPPATPGIQPELLLQTYLDRLTMSVGCDVADQNFALFACDADGKELGHLLDVPNNSRGFEAAWTWLEQLRCQHHLRIILLAMETTGVYYWAWWDFLAGRPNLARVLYNPRTTEHMTEVLSKKVRNELVDAYALAEQARLGATPEVVLMEDEDLLTARFCSRAARDLSQQISRKKTQLRALLRAYNPALHHVFPRSKLHHRAVYALLEHYLFPDEFVAADPKAITTILQTHSHSAFGPADTDRLLSLCRQTLTRPIGRDVIRQRVLHLIDDIRTAQSRKAYFVKTGYRLIENRPETRLLRQATGAGISNTLALVSELGSADRFPAGNHMASFLGLTTSKHISGTTLFHSKHITKQGSPNGRYAAVNLAQHLSQRVPKYQQMYQRIKARKPPRKGHFIALVAVARDFIANVLYDMWRHQRPFFLEVEDYRAYRQKLLSSSD

SEQ ID NO: 116264 - protein, 403 aa, unidentified
MESYAGIDWASEEHALCVVDETGTTLAGELHPHTEEGICELIARMRALGVCRVAIERSEGLLVERLLDAGFTILPVHPNKLAATRPRYEVSGGKSDGFDAFCLAELARTDSHRLPALRSHSDETRALRGLTRAREDLVRVRVHLANQLRAQLDGFWPGAARIFAAVDSQISLAFLRRYPSPGDTRGLGEKRLASFLERNGYSGSRPAAELLERLRQAPVGSTGPIEAEARRAAVLGLVAALEPIVAQIAELGSRIARGVRAHPDGEVFAPLFRNRKSVLTTARLIAEIGDDRSRYPSAEALAANAGMAPVARESGKRKTAYFRRACDKRLREAVSCLANSTRHHHPWARSVYTTARDRGLDHPHAIRVLGRAWLRVLWRCWQDEVPYDPAKHGNLRRLQTAGG

SEQ ID NO: 116265 - protein, 357 aa, unidentified
MDAPTHGCAPLDRTDSGREEPAQLFGGMDTHKDTLAVALIDPSGRRRDAITVANTRAGHGQLVAWLTDRGPVQRLGIEGAGGYGRAVALALLAADIRVVEVPPALTMRERRRCRALGKSDPTDAVAIARITAREDDLPPVIPAGFAEDLTLLVDYRDQLVSERTRVANRVHADLTITHPGYQSRCRDLRSAAALATARQIVAGDQTVRAELIRKRLDRLAELDTEIRALERRLRAMVTESGTTLTEIHGVGALLAARILGEVGDIRRFASKAKFATSNGSAPIPASSGRTQRHRLNRRGNRRLNRALYIIAITQARADHPGRDYLQRKQHEGKSRREALRCLKRRISDATTPSTCTT

SEQ ID NO: 116266 - protein, 425 aa, unidentified
MGVYCGVDWAEGHHDIALVDDEGRLVGKRRIVESLDGLAELTAMLAAAGDSAAEPIPVAIETPRGLLVAALRATGRPIYPINPLAVARYRERTSVSGKKSDHVDAMALANILRTDAHLHRMLPDDTSLARSITVLARAYQDAVWRRTKTVQELRARLREYYPGFLAAFAAGAGSGGGLSTTRLASRDARAVLAIAPSPAEGLRLSTARVEKALRRAGRQRRIAAVAGQVVAALRVPQLRQDPVVEHAMRIEALALLAVLDAVCASIEDLENALVAAFAEHPDHEIITSFPGLADVSGAIVLAEIGDDRSRFADDRALQAFAGSAPVTRASGKSRTVTRRRTKNNRLASIGYSWAFTASARPSPAREHYLRRRDRGDGHPAALRHLFNRMLGQLFHCLQTGQPYDPVKAYPHSTTITGAAATTVAA

SEQ ID NO: 116267 - protein, 438 aa, unidentified
MIEEKILLATALAAYLYVVAPGPAFLALFSLAAAKSVCPFRAEGSGGCSGIIAMPRHLGARRREPGERYMQRTLYVGLDVHKASLSVSVAEDGRDGPVRFIGAIPNTPIALSKLAKQLVKDNCRLDFCYEAGGCGYGIYRQLTKLGHACAVVATSLIPRKPGERIKTDRRDSQKLAILHRSGDLTPVWVPDEAHEAMRDLTRARIDASMQLMRARQQCLAFLLRYGRTYETGKHWTQRHRSWLAGQTFDQAAHQIVFQDYVEAVWSAQDRRDQLIARIAAMSAAWSMGPIVEALRSLRGLDFISAVTFTAAIGDLGRFQTPRQLMAYLGLVPSEQSSGERVRRGGITKTGNCEARRMLIEAAWSYRYPARVAKEKAEIIVRQPKSIREIAWKAQLRLCRRFRALSASGKRPTVVVAAIARELSGFVWAIGQEVKPGAP

SEQ ID NO: 116268 - protein, 311 aa, unidentified
MNSPDCFIGMDVSKDTLEVAVRPTEERMTFANQEEGISLMVDFVKSFCPCLIVLEATGGLEKAAVCALAVRGLPVVVVNPRQVRDFARSKGILAKTDKTDARVIAQFAEAIRPEVRPLKTEEAQKLDALLSRRRQILQMLTAEKNRLQSAPVWTRKDIQKHIHWLEKNLDQFNRDLDRMVKESPIWRAKDEILQSAKGVGPVLSVTLISQLPELGTLKGKKIAALVGVAPLNRDSGKFRGRRTIWGGRSEVRSVLLMATRIAIRFNPVIRAFFERLQKAGKVRKVAETACMRKLLMILNAMLKNNTCWQKA

SEQ ID NO: 116269 - protein, 388 aa, unidentified
MNNVGIDISKYKHDCFIVTDFGEVLNEGFSFANNAEGFAVLLKELRKSDKENLRIGFESTGNYSINLKLFLEKNGYSFMEINPVLVKEHIKSQSLRRTTTDKLSAMAIANYLIAKEYLPHLKSFYHTFSLKQLTRLRSDLVHQRSRYLVQITNVLDCVFPEFKPFFGGKFSATALFILENYPSPDKIANMNVKSFDILRRKSRGKFSMDKFVMLKHLAKNTVGMYTDFYGIQMDALLDIYCQIDSKLSEVDAAITEIITQINPPTLSIKGVGEISAAVIVSEFGDFSRFPNPGKMLAFAGLEPGYFQSGIAEHNGRMVKRGSAHLRCAILNCCRALRLHNEVFAAYYLKKIAEGKEHGVAVSHMAKKLIRLIFTLETKCERFDPAKLR

SEQ ID NO: 116270 - protein, 322 aa, unidentified
MSKKTLDCVLFDTNNEKMRASYIKINNNKNGLEELVKWMKEHKIVKSQAVVCMEYTGRYSFDFAELLGRKKIDFVLIPALKIKGAFAGARGKNDKMDAERIATYAYRYRDELAPTSLKDDTIVHLRDLMNDRKLAVKHAAAYKTIMTEYKEKKSALRYKRAERIVAEYKKQIAAIEKEIKEVINSDEKMNKNYELLTSIPGISLVNAVNLIVFTGNFSFFADARKFASYSGVAPFEYSSGTSVNKGTHVSKMANKMLKADLSQAAKSAINFDPWLKKYYERKRKEGKSYGCVLNAVKFKLIERVFAVVKRGTPYVNTMKYSA

SEQ ID NO: 116271 - protein, 418 aa, unidentified
MKAEYKTSGQAKRYIGLDVHKQYITVGGMNARQELVLKPRNVAMDRFKTWAAQNLRASDEVVLEATTNTWDVYDTVAPLVKRIVVAHPAEVKQIANARVKTDKQDVNRLIRLLIADLVPEVWVPPVEVRQLRALISYRWRLVKMATAIQNRMHSLLHRHNIPAPDGKVDTGENREWWEKLTLSELEDLRLKQEIRMLRMVREHIVEVEKELGRLSTSQRWGNQAVYLMQIPGVGIIVTMTILSAIGDIRRFESPRKLVGYAGLGAGVHDSGQKHTDKGITKSGRKELRWALVEAAWQAIRANPRLRTQYDEFCQRKLPNQAIVAIARKLLVTLWYLLSKKESYDRASDEDLAYKMLTWAWHIDQTALNGLTNQQFAKYGLLQLGRGEQLTRIVKGDVPRRIAPKEEVLALKPDLRSPL

SEQ ID NO: 116272 - protein, 353 aa, unidentified
MKKYIGCDAHARYSIFASLREDGRWDPAVRVEHNEGEMERFLKQLPPGSPVALESSGNWYWLVRAMEEAGLDPRLAHALEAKKRMPGRNKTDHLDAKGLAMLLRNGSLPEVWIPPANLLDLRDLMRTRLATRQQGSVLKCRMLAALRRYGTRRYSEGADLFAESRQVQLSIAMARLPQECRIATGEEWALLKQLEQHIEALEQRIRQRIASLGWVRLLKTLPGVGTILGSTIYLEIGDVARFRTPEKLASYAGLVPTVHASGGKSWQGPTPRSANHFLKWAFIEAANVVSTRQKAWPEKHVVRLYQRLKAHKCHGKAATAVARHLAESSWWILTKRQPYRDPALGTLSSSKNG

SEQ ID NO: 116273 - protein, 348 aa, unidentified
MTLVGCDLHARDQQVAVLDTATGEIQERHLVHDGDSVEQFYTSLPGPVTVGIESTGYAIWFHALLHRLGHEVIVGDAAKIRAMVVRKTKTDRRDAAHLLDLLRHDRFPTVWLPDPAVRDQRTLLAHRMRLVRMRTMVKNGVHAIALNYRLALGPSLFTRAGVAQLQALSLPPHTACRRSESLELLSWLNTRIKGLDDQIEEAAHAHPEAQRLMTHPGVGPLSALATVLVLGAVTRFPTSKHVVSYVGLAPAIESSAGKHRLGRITKQGNALLRYVLGQAGQAAIKRDPDLKRLYYAVLHRRGRSRAKIAVARKLLVRLYVMLRDQIDYPTFLHRAPAAARRKEMTPTS

SEQ ID NO: 116274 - protein, 338 aa, unidentified
MKVYGGIDLHSDNSVIGLIDEQDKVLYLKRLPNDIGLILKELAPFQEELEGLVVESTYNWYWLVDGLQEAGYEVHLANTVALVQYSGLKYTDDNSDALWLAKVYRLGLLPEGYIYPKETRAVRDLLRKRLKLVQQHTANVLSVQNLFARDRGRGIRANELRELRIERVGELIADPYRTLAIQSTLVVMRSQEAMIEMLEKAVKSRMRLSPVFRPLLSVNGIGDILALTIMLETGDIHRFAHVGNYASYCRCVGSERVSNGKKKGKGNTKNGNKYLAWAYIEAANFAVRYCEPVKRFYQRKRARSNTAVAMKTVAHKLARACYYVLRDQVPFDLSKAFA

SEQ ID NO: 116275 - protein, 349 aa, unidentified
MSHKLNAGSAVIGIDIGKNSFHVVGLDRRGAIVLRQKWSRGHVETRLANIPPCLIGMEACVGAHHLSRKLTSLGHDARLMPAKYVRPYSRGQKNDFRDAEAIAEAVQRPTMKFVATKTAEQLDLQALHRVRERLVSQRTGIINQIRAFLLERAVAVRQGLRFLRAELPRILATPCDALSPRMLRVIEDLAGDWRRLDQRIEDLSSEIEVLARRDVGCERLMGVPGIGPIISSAMVAAIGSGDAFTKGRDFAAWLGLVPKQISTGDRTILGKISKRGNRYLRVLFVQAAWVVLIKPQSWDRHGLKPWLEAAKKRLHHNVLAIALANKLARIAWSVLARGQAFEASKIQVA

SEQ ID NO: 116276 - protein, 341 aa, unidentified
MQITTIGLDIAKNVFQVHGIDAAENVIVRKQLRRGQIIAFFEALAPCLVGMEACATSHHWARELTKLGHEVRLMPAKDVKAYVKRNKNDAADAEAICEAVRRPTMRFVRIKSAEQQGQLMLHRARDLLMRQRTQLINALRAHLAEVGITAAQGREGIKELLAIIAQDEGSRLPVDAHASLTVLAAQLQAVQTTIGSIEKRIVAQHRSNEASKRLETIPGIGVIGATTIAAVVPDPRAFRSGRDFAAWIGIVPRQDSTGGKQKLGPISKQGDQYLRRILIVGAHAVLRRARQQPENYPWLTQLLARRPFKVVAVALANKMARIAWALLAKGGTYRAPQLVAA

SEQ ID NO: 116277 - protein, 344 aa, unidentified
MGEVSTIGLDIAKSVFQVHGVDVAGAVVIRKRVSRAKVSEYFRDLPPCLVGIEACPSAHHWGRELQALGHAVKLIPPSYVKAYLKRSKNDANDAAAICEAVTRPSMRFVPIKTREQQSALMLHRTRQLLVRQRTMLSNALRGHLAELGIVSAKGRNGTAELLRIIADGEDSRVSPAVRGILDVLARQYGAIGAEIASIDKSIMALHRGCEASRRLAEIPGIGPVGATALVAEIGDWNSFSSGRSLAAWIGLVPKQHTTGGKDRLGSITKQGNRYLRWLLVVGAMAVIRYARKHGAERRPWLARLMERRPTKVAAVALANKIARMAWAIMVRGERYKEPRLSLAA

SEQ ID NO: 116278 - protein, 391 aa, unidentified
MPTAADRAEAPTAIQTNLAAIFVSLELSRSIWLVTSLSPGGGEKMSKHSLQAGDVASLLVRFGELKQKALTRTGKSFPIVAIQEAGLDGFWLHRVLQSEGIESHVVDPASIATSRRRRRAKTDKIDGEALLRALLANKRGEPRVCAMVKVPTPEEEDRRRLCRERKVLIAERVEHVNRIKGLLFSQGIFGYEPLRRDRRQRLDELTTGDSRPLPTHLKTQISRELDRLELLLDHIKAVETERDALLAEQQAVAAAPAPAGKMLLDLKGIGAEFAAVLWVEGLFRHFDNRRQLASYAGLAPTPWQSGTVDREQGVSKAGNHRLGTTLIQLAWLWLRHQPQSALSLWFKERVNRDGGRRKKTTIVALARKLLVALWKYVTAGVVIEGAMMKTA

SEQ ID NO: 116279 - protein, 355 aa, unidentified
MFIQSQDDSHCCYSFFIKVVILMMKLKYSICCGLDVHKNVIVATIVTTNKDGISEYLQKSFSTINSDIQRFHNWLIENNCYHVCMESTGKYWIPIFNYLENDIDICLTHPKYVKAIKGKKTDKKDSKWIADLYKFDLVRCSFIPPKDFRQLRELARYRFKLVCMKSSEKNRIQNCMTISNVGIASVLSDPFGKTATEIMSYLLEHTADSMDEKAVRKLIKKGAKAKSDEIIEAIKGYNIETDQAKKLELAQGHLEYLDDMITQTEVELYVRIKPYYEFVEFVSTMPGMTELSSTIVLAETGVDMDIFDDAKHLCSWCGLSPANNESAGKKKSVRIAKAGDYLKPMMVQCLSLIHL

SEQ ID NO: 116280 - protein, 376 aa, unidentified
MEHDSTLYVGLDVHKDSITVAYALGSGEVQLLGKTGTTQADIDRLCKRLQSKAPRIRFVYEAGPCGYGLYRQLVNKGFDCMVCAPSLIPRKPGERVKTDRRDALKLVRSLRAGDLSAVYVPGVDDEAFRDLARTWVSAKDDLKRARQRLKAFLLSHGVRYTGRADWGPAHQRWLGAHAFDSAWQQLAFEEHRRAIEDRLAQCARLEAALREAVPNWRFYPAVLGLQTMRGVQFTTAVGMLAELGDLSRFAHPRQLMAWLGVTPSEHSSGEKRRQGSITKNGNSYARKLLVEAAWSYRHPARVSPDIQRRHEGIPKPIVDRAWDAQVRLCRRYRKLIARGKQKNIAVVAVARELAGFIWDVSRLAMSLAVPQEVSLA

SEQ ID NO: 116281 - protein, 402 aa, unidentified
MNAVGIDVSKSKSVVAIMRPFGEIVSTPFEIKHTASDIHSLIELINSVEGESRIVMEHTGRYYEVLAHQLLEANLFVSAINPKLIKDFDNDSLRKVKSDKADAVKIARYALDKWQNLKQYNVMDELRNQLKTMNRQFGFYMKHKTAMKNNLIGILDQTYPGVNTYFDSPARSDGSQKWVDFASTYWHVDCVRKMSLNAFIDHYQNWCKRKKYNFSQSKAEEIYGKAKELVPVLPKDAITKLIIKQAVDQLNSASTTVESLRTLMNETASKLPEYPVVMAMKGVGTSLGPQLMAEIGNVSRFTHKSAITAFAGVDPGVNESGTYEQKSVPTSKRGSADLRKTLFQVMDVLIKTHPQDDPVYQFLDKKRAQGKPYYVYMTAGANKFLRIYYGRVKEYLSSLPES

SEQ ID NO: 116282 - protein, 377 aa, unidentified
MGKGEVRPRGEGPSAETLGAPQPTPSRRRKTPMEQQRQYVGIDLHRRRSVIVRRSAAGETLKVTKVDNDDLLAFERAVMAAGEHPEVVLEACYGWYWATDLLEELGCKVHLAHPLGNSWGNRRVKNDTRDAEDLADLLRLGRLAEAWIAPPKVRELRELVRYRAKLVCLRTNCKLQVYAVLAKEGVNVPMTDLFGVLGSELLETCQLATAYRTRVESLRDLIEVFDHEIAKLEGDVRHELRGHAGYQAIQQIPGVGPLFASVFVAEIGDVTRFRSPAQLASWAGLTPKHHESDLMVRRGPITKQGSRLVRWAAVEAAQRQANRTKLRADFARIAAHHGDSAGARKIARVAVARKIVTLVYYGLRDGTIRSKAISEAA

SEQ ID NO: 116283 - protein, 335 aa, unidentified
MQIYGIDLAKEKFDVSFFDLTSKKVSNQPSHKVVKNNFKSIGRFLETLPSDAVLVAEHTGVYGDTLLKCCMDSNVKIAFVGGYVIHRYRATPDRAKTDVLDCALLREFGERYPDKLKYRKFPEEALYELRQLARHREMLVEQRKQLMTADKSEDCRPIRSLAVKRSMDRIKEMLDKEIAETEKEMLKVIDGHDSIHHNYEIVKSVKGVGLVTAVELLVKTDNFTKITTARQYAAYAGTAPYEKSSGKMDKGAHISKIGNRRSKTLLYICAESARLHNKEIKLYYERRTLIDKKPRHYVLNAIANKLLRIIFTLVEKGEFYDVNYIRQDPRLVKHN

SEQ ID NO: 116284 - protein, 316 aa, unidentified
MNEAKSTTRIAGIDVSKPRLDVAIHGLEAMIQVTNTPPGHAELIAWLRGHGVGRVGLEATGGYERGVMAALTTAGLEVVLHQPIEVRLFARIKRLRAKNDRIDARLIACATAQVDTVKAAADPRLAELAERLTAYEQATDLATLLKTQMEHVSLPDLIEDARAQLAVLKARKARLAADLLRRIRLWPDLARRLDLVRSLPGAGPIVALGLVIRMPELGAMNRGQAAALIGVAPFDRDSGAHKGQRFIAGGRRRPRRLLYIAALAARRCDPGLRTFADRLAAAGKQPKKILVAIMRKLIEAANLVIKRGMPWTATPN

SEQ ID NO: 116285 - protein, 400 aa, unidentified
MLSIGIDVSKGKSTVCGMKPGGEIVYTPFEIQHTREGMSELVSLLHNSGEEVRAVLESTGSYHCPVVAALLENGIFVSVVNSLRMKRFCSQSIRKVKTDRIDAMQIALYGLAYWQELQPTRLPEDTYRELQLLARQYYQMTSMLIKAKVDFNAICDQVLPGMQELMSDHAGRHKLSDFVLRYRHTAHILEMGETRFRKDYCKWAEKKGYRNHERMAALIFATAQNGIPVLPNAPSTQIVITEAIRVLHTVEASRDAILTQMQALAKTLPEYSLVREMPCIGDTLAPRLIAEIGDVRRFHSKRALIAYAGIDAPPYQSGKFCANNRHISKRGNRYLRKTGYEVMQSYVMHKPANDPIFTFIEKKRGEGKSGKLAMVAGLNKFLRVYYGKVTELYRSLPAIE

SEQ ID NO: 116286 - protein, 353 aa, unidentified
MRRYYVGMDVHGASIVLAVMNGAGKVVMESIIETGAETVRGFLKQLRGQVYVTFEEGTQASWLYEVVRPLVTEVVVCDPRQNKLLSAGNKSDRVDARKLAELLRNGSLRAVYHGDKGVRALKELVRNYDCLVSDTTRVKNRLKALFRGRAIACGGHEVYRRKQQGQWLEKLREPGAKQRAYSLYEQLAALKPLRQEAKREMIKEAGRQTAYALLKSVPQFGPVSVAQLLAVVGTPFRFRNKRLFWSYVGLAVVTRTSAEYVVLNGVARRSKRPLGTRGLNRNHNHLLKRVFKSAASSACKRGPFKAGYEARLAQGMDPSLARLTVARQLAATVLAIWKRGELFAPERIRQQVA

SEQ ID NO: 116287 - protein, 416 aa, unidentified
MKIIRFNCCGMDVHKNSVVATIGITNKDTQITRYIQETFSTLNTDLLRLKQWLIDHQCFDVCMESTGKYWIPIFNILEDTVKVHLTHPKYVKAIRGKKTDKKDSKWICDLFKHDLIRFSFIPPKEIRALREITRYRYKLVAMRSSERNRYQNCMTVSNIGIGSVFSDPFGKSAQAVMKEVLESKVIEDDRILKCIHGACKNRDKILDAIKHCHVESDQRFKMNESMRHLEELQIHINNCEIEMIKRASRMFDSFMHITQIPGINTLSAILIISEIGIDMTQFESDKQLVSWAGLAPANNESANKKKSVRISKAGQYLKPLLVQCALGAIKDKESYFGIKYARIKKRRGHKKAIIAIARMILVSIYHMILTGESFNPSDYQSFKAPNSKKVIELTKESAIEFLRKSGFDVSKLTKLE

SEQ ID NO: 116288 - protein, 373 aa, unidentified
MPKHSTAFGMDVHLRSTTVCALDADTGEAVTRRFPGNPWGEIAGWMDGFPGPSLAAYESGYLGFAPQRELAGLGVECVVAAVSKIPRSAADSASKNDRNDAARMAKAILAHDISPVWVPSPEVEGIRDLAGAYDGATARLATAKQRLLAFLARRGFVYGGTTPAGNPRKYWTYDFLRWLDKVRPEDDGGVRTLAALRNEVEAAAEARADLLSEYRAAVDASPIAAEVAALQSIKGCAFALAAAFSAEVGDFTRFRSGRQVTAYFGLAPSQRSSGDSVRLGGISGAGNALVRKLAVEGSWCYAAARHQPKLMPRDTGVPLEIRMHGRKGSERLLRRREEMLARGVPAAKANAATAAELVRWLWALGMMCREGAE

SEQ ID NO: 116289 - protein, 340 aa, unidentified
MSDPMEQSEVILGVDTHLEVHVAVLIDVVGRVIATTTIPTTASGYEQLINWTSSFGRLTRAGVEGTGTYGAALARRMQEYGVQVIEINRPDRSRRRLRGKSDPTDAENAARAVLAGDANAIPKAQSGAVEAMRTLNMARRSAVKAKTQAINQLRALLVTAPATVRSSLWKAKPDQCIAGCVALKSLGETALLKALTRTLRLLAKRWMSLAKELRELDTALEELTRAAGRRVLAQFGVGPQTAATLLVTAGDNPQRLRSEAALAALCGASPLQASSGKTTRHRLNRGGDRAANNALWTISMVRMRSDARTRAYVPGVRPRAYHPRKSSVASNVTSFVSCIL

SEQ ID NO: 116290 - protein, 312 aa, unidentified
MKNDTIGVDVSKDHLDAHRLADGATRRFANDNGGHKALIKWLAETPLNRVVFEPTGPYHRAVERALGASGVPFVKVNPRQARRFAEATGKLAKTDRLDAAILARMGSLLELGARPARSEVLFELKELYVAREALVKDRTAARNRGKALTLSLLKRQNAQRLEQIDRQIATVEAAILQLVEADESLADRFAILISIPGVSNITAFALLIAMPELGSLEAGQAANLAGLAPIARQSGRWTGRSFIRGGRADVRQALYMPALVAARFNPDMKAKYAHLIETGKPAKVALTAIMRKLVVLANALLKANRTWTPRTA

SEQ ID NO: 116291 - protein, 397 aa, unidentified
MNPVIAIDVSKPKSVAAIFSDRNVCVKKPFVFNHSVSELDQIDLWLNTFKQQHGIQPTVVMEATGNYSKPLTAYFYDHGYDIFVLNPLTTSQIKSKSLRKIKTDPVDTMRIATVFYNQKLKPYVPDETVYANLKFLARQYNGFNTTYQELVVRLHAVVDLVYPDFNKMFSSVRSKTALNFLKAYPTPHLIRTASLEELSLAFHSAKKSSEWHLNKANLIKRTVEESLYTPSAQQPILAYYVDLILHMQQTLDDIRAQMRDLAKLSPCYKLLLSIPGVGEVTASVILSEIGDIHRFHSKKQLTAYAGLDPAVFQSGKYTAKNNKISKRGSPYLRKALYQAVCAGISKRSNGYANKELRAFYDKLLESGKPSRVALTACSAKLLRIIFGILSSETEFRY

SEQ ID NO: 116292 - protein, 343 aa, unidentified
MERVYYIGLDIHKRIIFYCIKTIDGSLYAQGKVEADRRSLGEWVKGLPGSWIGAMEATIFTGWVYDFLKPYAVDLKVAHPEMLKAITAAKKKNDRADAERIVDLLRVDLLPECYMLPGEIRELRRILRYRNHIVRTAVKMQNKMTGLLMEVGVTYSKKRIHGKKYFREFLERVEEIPPSVKELLKLSRSSYEIFSSCQKRLVEGLRTNDLIRDRVQGLMAIPGVGELTALTWVLEIGDPGRFDSIRQAVSYCGLCSAQRESAGKEQRGPISKKRNKQLQTMLIEAAKLAPHWNRQLAVLHERELQKGNRNRATLAVARKLVAYMLAVDKQQTSIRPIGEKQAA

SEQ ID NO: 116293 - protein, 371 aa, unidentified
MKDMKKEAFIGFDVSKNSHAVAIAEGGRDGEVRGFGTISTTNEAVQKLLKKLATRFDHLHICYEAGPTGYGLYRQVKALGFDCSVIAPSLTPVRPGDRVKTDRRDAERLARLLRAGELTPIWVPDETHEAIRDLVRARASAAKDKRQKRQMISSFLLRHGRSYQGLRTWTMRYRRWLQSQSFDHPAQQTALQEMVLAERHAAEHTDRLTTSIEGVVADWSLSPAVEALQALRGVALIGAVTFMAEIGDVRRFDHPRKLMAYLGLVPSEHSTGLTTRRGGITKAGNSRVRRTLVEGAWTYRYTAKIGVQKLYILQKLSPEIQDIAWKAQSRLTARYRKLNQRGKKRTVITTAIARELSAFMWDIARKAMAAA

SEQ ID NO: 116294 - protein, 360 aa, unidentified
MKYIGCDFHPSFQQIAMLDTGTGETLDLKLKHDGDETRQFYESLKSQEVIVGIEASGNTYWFERLLSQLGHQLWMGDAAAIRRQDGRKQKHDRRYARLILKLMLSKDGFPKIWVPTVAERDLRQLLIHRRHLVRTRVRIKNQLQHIALNYGLQRKGKLWSREGMEFLRSLELEPWTRLRRDRLLEQLAQCDADLKPLEIAVQKAAEENARAVRLQTHPGVGPVISLATVLTMGEVCRFEDSRKWISYLGLNPSEESSGQRRKLGGISKQGNPFLRYLLVEGASSAARGDKDLGRTYSRLKARKHHGVAKVAVARKLAVRLYWMERTQQPYPEVVRMQGSQSHSVAAVKAERLSRPPASHQ

SEQ ID NO: 116295 - protein, 457 aa, unidentified
MMKTKRRGEQRSMLPVHPDAAAIDIGATVHVAAVGPGRDPEPVRSFGTFTGDLHRLADWFAQCGIKAVVMESTGVYWIPVYEILEQRGFEVRVVNARDAKHVPGRQTDVSDAAWLQRLHEFGLLRGSFRPQGAIAALRAYLRQRERLLDYAAAHIQHMQKALTQMNLQIHHVISDITGATGMRIIRAIVAGERDPDTLASYRDIRCHSSADTVRQALIGNYREEHLFALAQAVELYEVYQAKVATCDEKIEGVLERLKQPCRAPAKPLRAARHKTRQPNAPAFDVRGALYALLGVDLTQIHGLGPYLALKLISECGTDLSAWPSAKHFTSWLSLAPGNKISGGKILSSRTRPSGNRAAALLRLAATTVGRTETALGAFYRRLSARIGKAKAVTATARKIAVLFYNAVRHGMDYADPGASYYEERYRQRVLTNLKRRAKAFGYVLQPTEIKAVSMAVS

SEQ ID NO: 116296 - protein, 421 aa, unidentified
MPRLFTAVARREVKDMLEAMVESCAGLDVHRRQVVCTIIREGSTQTREYPTFHRQLRELAQWLHGERVGLAVMESTGIFWKAVYAALEDAGIEGRVVNARHVKQVPGRKTDVCDSEWLAELGRCGLLRQSFIPPRDLRELRLLTRYRRKLSGMLAGEKNRLHKILDDAGIRLGCVVTDIDGVSARAMVEALIKGGATPEQIAEKALGKLQKKKDALELALEGEISDRHRLVLQKILGHIKWLQRQIAMIDGQIVAAMEPYQEEWKLLQTVPGLDVISAAMLIAEIGVDMSRFGSSDRLCSWAGMCPGNQESAGKRKSGRTRKANSYVRSLLCETANSARKTQSQFQGFYKGLVIRRGHKRAIVAVGHRILKVVYILISRKEPYRDPEIDYEALVVHRNAPRWLTALRKYGYLDDIRSRACH

SEQ ID NO: 116297 - protein, 407 aa, unidentified
MRWFVGDDWAEDHHDVELMNEQGRVLARKRLPEGVAGMARLHELIGEQLGEGADDAEVVIGTETDRGPWVAALVAAGYTVYGVNPLQASRYRERHGVSGAKSDTGDAHMLTDMVRTDSHQLRAVAGDSPGAGAVKVVARTHKTLIWERTRQVQRLRHQLREYFPAALEAFDDLDAPDALELLARAPDPARAARLTRAQISAALKRARRRDIPGKATAILTALRGAQLGQPPAITAAYAATVRSLIAVIITLNEQVKILQGQVGTDFRQHPDAEIYLSQPGLGPVVGARVLGEFGDDPHRYASGKARKNYAGTSPITRASGKKKMVMARFIRNDRLIDALMAQALSALGSSPGARAFYDAQRAAGVEHNAALRKLASRLVGILHGCLKTRTPYDESTAWSHRENKLAA

SEQ ID NO: 116298 - protein, 342 aa, unidentified
MSISYVGVDLGSSNFHQVALNHRGAHTLNREFVTSEANLIKAFSDLHGEIHVHLEAGELAPWASEIIRPLVTRVVCSHPQTNAWIARDRDKCDRIDAYKLASLLRLNEFKEVHYPREQLRRDFKTLVQHYDELTQQQARLKTKLKARLRMQGVIVRGEELFSARGRKAVLEQVKSPVVRTASKQLYAVLDQSIASQTEAQSLMLRGAQALPEIKILRTAPGVGPIGACRFSAYIHTPQRFSSTRKLWKYCRLSVSHRSSNGKPLRRPRLDRMGCGGLKDVSRKTFEAALRRRDNNGFKRAYYRALETTHDATHARLTVQRKIVSTLRAMWINQTPYCDELRR

SEQ ID NO: 116299 - protein, 472 aa, unidentified
MGKGSGNGMTRGDRKRNARRERLRGLLPRDGAVIGIDLAEDKQAIAVIDHDVRVIARKAVRVKAFRLGEALDWAVGQARAKGFADVTVACEPTGPRWMQVQRLCAERGLPLVCIQPLVSHIAREQQDYTTHKTDESDCVMIGRLAVELHCYIPEELDETWAHLRHLGRRRAQLITASTASMQRIQDFLSVAWPVVTGTCVQPLLSKTWLAALQVVTSRCGADPGNLAALGCEAFTALVRSAVAGWGGKKAWGTICARIFAALTDTEGVVVSSRRGLLRRVADELADLQRTRAQLRQVEADMVAVLDELGLSRLAGIPALTAVGAAAILAETGDPRRYDSSSSLVKHAGMSPSDNSSGAFSGDARISRRGRPGLRLAAWRAVWPMLQFNPVMAAKYQAMTQAAGDTAADTSSRQAGAAAAAARARRARARVACAASLLRWIYSMVVHGTSWDAAAAAGDAACQHAPRCPAEAA

SEQ ID NO: 116300 - protein, 466 aa, unidentified
MTPPKDYCLEAPCPPTPLLPPLPVLSDALHVCNPHAAGIDIGEAEHWVAVPPGRDPQPGRRFGTFTVDLDALADWLIDCGVITVAMASTGVYWMPLFELLEARGVQVLLIDPRQAKRAPGRPKTDRLDCQWLQRLHAYGLRAGACRPDDQVCVLRAYLRHRQRLLTYAAHHIQHMHKALQQMNLKLTQVVSDLTGVTGMAIIKAILAGERNPQHLAKLRNPHCHHDADDIAKALQGTWRAEHLFALRQAVELYEVSHQQMAQCDQQITRHLETFADKSDGQPLPPKARRHKKTNEPRFDARTPLSRLAGVDLTTIEGIEENTALILLSEIGTDMHRWPSVKHFCRWLGLCPQHKISGGKVLSRRVRPGAHRVTVALRLAARRLHHSQSALGAFFRRMKVRLGTPKAITATAHKLARLVSSLWQHGSAYVQQGLDAYEAQYRERKVTTMAKQAKALGYTLVLLAAQG

SEQ ID NO: 116301 - protein, 355 aa, unidentified
MSQEKYIGMDVHQATISVAVRDSAGKLIMECILETKAATILEFIAGLRGSLSVTFEEGTSAAWLHDLLKPHVSHLVVCDPRRNALLKDGSKSDRIDARKLSELLHGNQLHAVYHGEHGLRTLKELGRSYLTITKDLTRVMSRIKALYRSWAIPCSGTTVYAPRHRVEWLAKILEPGVRLRAERLYQQLDLLQPVRQEARRHLLLESHKHPAVKLLQQIPSIGPIRAALLVALLQTPHRFRTKRQLWAYSGFAVETHDSGEYRLVRGKLVRNRERITVRGLNPNHNHDLKNLFKGAAISASARPGPLCDFYGALVEKGMRPTLARLTLARKIATITLTLWKKGVQFDAKPLNRQAA

SEQ ID NO: 116302 - protein, 412 aa, unidentified
MQVTYERCCGIDVHKKTIVACAIGPGPGGQAQKETRSFDTMTGDLKALAEWLKGLGITHVAMESTGVYGKPVFNLLEGQFEILVVNAEHIKKVAGRKTDVQDAEWIADLLRHGLLQGSFIPSAQQRALRDLTRYRTRLIDERTEEVNRLQKVLEGANIKLASVASDVMGVSGRAILAALLEGHQTPAQMAELARGALRKKQAELSRALEGVLQPHQRFMVVELLGHIDYLDDAIARLDAEVADQTRPFEAELVRLDSIPGVNRRIAEVLAAEVGVDLHAFANAEHLASWAGMCPGNKTSAGKRYSGKTRHGSPWLRRALTEAAHGAARKKNQYLKAQYHRLAGRRGAKRALLAVGHSILKIAYHVLTRQQTYQDLGENYFDERDREGVKRRAVRRLEQLGFSVNLSPAPVAA

SEQ ID NO: 116303 - protein, 341 aa, unidentified
MKHQISVLGIDIAKRLFHVVGMNERGQIVLRKRLARNALMPFIAALPPVLIGMEACGGAHYWARRFREHHHEVKLMAPQFVKPYVKSNKNDMRDAEGIGEAVTRPTMRFVPTKEVDQQDIQALHRVRERLIGARTALVNEIHGLLHEYGIVVPKGVSKFRQTVVGKLEADKAKLTPLSQEMFGKLIDEFAALEKQLAYYQEKLEALATTHPECQRLMTIPGIGPLTATALVAAVSDASAFKNGRQFAAWLGLVPRQHSTGGKERLLGISKRGDSYLRKLLVHGARTTIRWVGRKTDRRSQWIRQLVERRGKNRTAVAVANKNARIVWALLTSHQDYQPVQG

SEQ ID NO: 116304 - protein, 312 aa, unidentified
MEKLSYGGIDVSKDRLDVVVLPEERFFSVSNDAAGWAELVARIRPLAVSAIGIEPSGGYERGIIRALLAAGLSVRRINPNKLRQFARARGVLAKNDRLDARLIAEYVAIMPTRVVQRDEAVEKLAEVVTMRRQLRDEHVTVENQAAHIEDAMLQRLNKRRLARLEADTRLLDKRLAEMVATNAALAQRYELLTSMPGVGPVLAFTLIALLPELGQMSRKQIAALVGLAPYDFDSGKLRGHRSIYGGRMPVRNVLYMAALSGCRHNPALKAFHKRLAAADKKSKVVIVAVMRKMITTLNAMLRDNVEWQPKSA

SEQ ID NO: 116305 - protein, 415 aa, unidentified
MNNTISDIDTDLTAVSEVEGNAVQAEAQPAQNESDETYAQAVQEKLALARSRANCRYIGIDLHSNNIWLSVIVNEQRPSGPVGKVIFSRSIGTQRVDGTLPEDLIKPVLERFCKDQPHIACVEATYNWYWLADLFEKNGWNLVLADPSTVSEAKTKAADDRKDAEYLADRLRYNALRYTVIMPKQLREIRDLVRTRGTAVEQRAREKIIVINKLTNLIGRKITGKELRELIKEHAEFGTQAPMLLNWGLTEEVRCILNYHLAMATNIDQEIQKLEEHINAVGKNLRYTKELQKMPGCGPVISSILASEIGSIRRFATAANFVSYCRLASTSKLSNGKSKGLGNAKNGNAYLSWAFTELATLMVRYSEAAKRHFEKLMRKYGQLRVKAIRVLAAKLARSVYQCLSKNEPFDVLRCF

SEQ ID NO: 116306 - protein, 332 aa, unidentified
METKETIGIDVSKKTLDVHIHNKKMHRVFENCPKDIAKMIKWALKNTDFDREEMIFTFEHTGLYSLQLSATLSELGMRYVAIPGLEIKRSLGLSRGKDDKVDAAKIALYAYRLREELESCQLPSEDLQSLKRLLSLRDRLVKQRAGYKASLKEEKRVLKQKDNKILLNAQEEMIGHFSKKIKKVEKEMDRIIKENRELDKIYGLVTSIKGVGPQTALYMIAYTQGFTKFENWRKFASYCGTAPFPNSSGTSIRGKTKVSHLANKKIKSLLDQCSKTALQHNPEIRQYYRRRVDEQGKNEMSTINVIRNKLLARIFAVVKRRTPYVDTLKYAA

SEQ ID NO: 116307 - protein, 415 aa, unidentified
MSTPLLVGVDVHRESNTICLMDAQGCELAPRASVANNRPGTQSFITQVRQRLSTGAFDSLRVAAEATGWYWWHFFQTLDQDPTLKQWPVELFPFNPRLTANFKKTYVDLDHADPIDAFVAADRLRLGRDLPVPFHYEERYFALRLLTRYHYHLAHDLAREKSYCLAILYLKASAYTQVQPFANTFGAASQAVLDEFASIEDIASLPFADLVEFIDRHGKRRFADPAATARLLLQVAQQSYPLPAALQEPVNLIVHSCLQHINQLEQVEKRIDAAIAERVSALSQTIDTIPGIGPVYAAGLLSEIAGSERFGDDEAKVAKFAGFKWRKHQSADFEADETRLTRTGNRYLRYYFCEAANRVRLQDTEYAAYYDRKFHEVRQHQHKRAIVLTARKLVRLVVRLLTTNQPYRARRPNQS

SEQ ID NO: 116308 - protein, 432 aa, unidentified
MPVPQPPSTDINFGAFISIDWADQKHTICLRSAGSTTVQKREVAQTAEGLSDWCNGLLAQYPGQKLAMIIEGNRSGLIYHLLGYSAFVIYPINPKAAAKYREAIYPNGSKSDPIDAELLLDFLLHHRECLRPLVPDTIQTRILGHLCEDRRRLVDSRTEILNRLIARLKLAFPQVLAVFDVLAQPMVADFLKKWPALEKLQKAKPDHVRRFFYAHNSRSEELILARLAIIAQAKPLTHDEAVLTTATMMIQELAVLLQGLHKSIARYDQRLEELTQAHDMAPIFASLPGAGKVLVPRLISALGTQSQRWPKAYDLLCFSGVAPIEVASGRQYSVHWRWNCPSFLRQTFIEFAYCSINLCAWAKAYYDGQKSKGKKHHQAIRALAFKWIRIIWKCWKDKVPYDDSLYLQSLETKNSPLLATMTKAASLKLIGE

SEQ ID NO: 116309 - protein, 317 aa, unidentified
MITVGVDISKLKFDIFYQDPSGKKISKVFENNSAGFEAMFKIIPNSDDIRVVMEATGNYGYDLANYSYQQKNEVYVVNPAQIKYYSQSKLRRSKTDKVDAKLICEFAIANNDLRPWQPMTLHLAEFRSLHRCLQNLKLDLVQFNNRLESERDHSVVSIYETIIKTIELQIKKMITKIRSLVKTDEKLTQDISLITTIPGVAELTAWGILSEVDISQFKTAKQLAAYAGLNSHIRQSGSSVKGRGSISKIGSAKLRKALYFPAMVALKHNYLIKDFGDRLKAKGKSGKVIIVAAMHKLLRMIFAILKSSKPFREAKTA

SEQ ID NO: 116310 - protein, 345 aa, unidentified
MDYFAGLDVSVKETSVCIVDDTCKIVREVKVESEPEALLAVLKNPAYHFKRIGLEAGPLSQWLFSALAEAELPVICVETRHMHAVLKAQINKTDRNDARGIAQMMRVGLYRPVHVKTLRSQKLRMLLTHRQLLQSKAIAIENDLRGTLRNFGLKVGMVGKMKFEARITELVENRSDLAVLVEPMLIVRRVLREQIVILHRRLLAIVRDDEVCRRLMTVPGVGPVVSLTYRATVDVPARFQKSKSVGAVFGLTCAKYQSGEIERSGRISRCGDEMMRAMLYEAAQSMLVHSKKWSWLKAWAMQVARRRGMKKAIVALARRLAVIMHRIWVDGTEFRWTRDQAAAPA

SEQ ID NO: 116311 - protein, 370 aa, unidentified
MSNATTFVGLDVHARSVKACAFVPETGETIRRSFGYEPCEIASWASSLPQHAKCVYESGVTGFHLCRELRSMGVDCVVGAVSKMHKPAADRGRKTDRRDAQFLAVQLALGVVTEVHVPDAECEGARDLTRALADARDDAVRAKQRLSKFLLRHGFVYDERNSAGQRRNRWTRDFWAWVGRIDLGDGAAMATLDHYCVRVREADAAKAALEAKVKALAQQPRWKPTCDALKCLKGVDAVTAVSIACEVDGFARFAAASGFAAWVGLVPSEHSSGESQFHGGITKAGNKHLRKLLVEAAWHYKGASRSPKGLVKGQIVDEATRRHANAGVRRLVDRRRAMDDAGKQSSVANVAVARELACWCWAVGRMAEDA

SEQ ID NO: 116312 - protein, 331 aa, unidentified
MDPTTTTTTAAAQVFAGVDVSKDRLDVCLRWNGPESHEEEEAFVLAYDDSGIDALLSRLLEEHTVLVVLEATGGFERTVVGALAAAGLPVVVLNPRQVRDFARATGRLAKTDRIDASILARFAEAVRPTPKPLPDREIRALQAIVARRRQLLGMLAAESNRLSSAAKPVAKRIKAHIRWLEKELSRTERDLEAAIESSPALGENEALLRSVPGVGPVLARTLLAGVPELGTLTHKRVAALVGVAPLNRDSGTLRGHRSVWGGRADVRAALYMGALVAARRNPVVKEFYERLLAAGKPKKVALVACMRKLLSILNAVLKHRTPWRSPHYLSP

SEQ ID NO: 116313 - protein, 343 aa, unidentified
MNDTLIAVDLAKNVFEIAVSHRPGKVDDGCRLKRPKFLAFFAQRPKATVIMEACGSAHYWARKIQGLGHDVVLLPPHLVRPYVRRNKTDRADAKGMLEAYRNEQIRPVPIKSVQQQTLTMLHRLRSGWLAEKVARLNALRGLLRELGLFIPVGAKNVVPHVWAFIEDAESGVPDALRSTFAEAGQEIREIEERIKKVERQLEALARQIPTVEQLRTIPGVGLLTATALVGFIGDARRFPSGRHFASYLGITPREFSSGSRRHLGRISKMGDAYIRMLLIHGARSVLMHAKRTDQIDRLRQWALEVEKRTNHNKAATALANKMARIIWAVWRQDREFRVIPVAA

SEQ ID NO: 116314 - protein, 353 aa, unidentified
MATDMLAHHWCVGIDLHKDTMTVCTYCRCCGEFSFRKIACKNREQIAEFFRGLPRPHSVAIEAVGFYRWLWEMLEPIVEKLVLADATQARALAGRRLKTDRADAQNIAELLADGRLPRAYAPPLEVQILRDWTRQRNRLSRAHARALCGVKSIMNSNNRPGPARLSAARLIGYLKAYGGRLPERHVRMLWQHQRQISLVEEEIGMCEREIARLLDSPRFQSLAGLLHTAPGVGFVTAATVLAEIGDFARFPDGKAIGRYAGMTPRVFASGGKERHGHISKTGPSDLRWVLQQAAWTAIRCDDSIKRRWLKISRGSGKKAAAVAIARQLLVVLWQMARHQAPYRPRVEPPKAAA

SEQ ID NO: 116315 - protein, 482 aa, unidentified
MAKRKMSTFERLQSGKMNRKERKDLSRRIMAEDATLQVVHPNAAGIDIGNESHFVAIPPDRDANPVREFGSWTTDLQNMARWLIEHNIQTVAMQSTGVYWIAVQEVLEQYGLEVYLVNARGTKNLPGRKSDVQECEWLRKLHAYGLLRNSFRPPEQIRAIQTIWRQRDRWVKDCGRAIQQMQKALTKMNIQLANTISDISGVSGQAILRAIVAGTRDPRDLAKLRDRRIAASEEEIVQSLQGNWKEDILFELRQVLEAYDFYQNQIAACDRELAKYIADVPSREISEKQNIPEGACPLVSGKPSRRSKPQKKNSIGFDLASELERTMGVDLTRIDGINATIAQVIFSEIGSDFSPFPTENHFASWLTLAPQRDISGGKVIRHIPAAGRNRVANALRMAAQSLYHSDSYLGARYRRLRARLEGKKAVKAMARYLACLVYRMVTKGQAYVDRGATYYENKRHEKERDSILRKAAILGLKLVPSE

SEQ ID NO: 116316 - protein, 318 aa, unidentified
MNSHCKTESTEPVQYVPLDVSKRRLDYGLQPGRLAAVTNTREGIATLIQRLEGHPRAQVVCEATGGYERALLAALGEAKIAVSRVPPGRVRAFARAEGLRAKTDGIDVELLRRYAVAMQPRVEILPGPEVEVLRELLEHRRQLDEQRVLFSNRCETAGPTLLGLLEGQRAHLERSLQEVEARIRDHIGTHEPLRTKSERLQQLQGCGPVLAATLLAYLPELGRLEDKQVAGLVGVAPHAHDSGERTGPRHAHGGRIAVRNVLYMAAVSAAHHNPVLAPFYQRLLAEGKPAKVAIVAVMRKMIVTLNHLLRDPNFTLAN

SEQ ID NO: 116317 - protein, 387 aa, unidentified
MPQPNDLSRSLATLDQDSTLIAVIEISQSSWLVAGIVPGIERQPLKKLAAEPTALLALLDRWRAEATKAGRVIDRMAVAYEAGRDGFWLARWLQRQGIEAHVIHPTSVAVSREHRRAKTDRLDTELLKRAFLGWLRGEPRHCSMARIPTLEEEDTKRPNRERENLVSERTRVVNRMKSALARLGIRGFKPTLRKAPERLARLLTPEGAPLPPNTLAELQRDMARLRFTMEQIREIEATRAARIAQHPEQANHAMILLLARVIGVGIETADMLVHEILSRPLRDRKAVARYAGLTGSPDESGARRREKGLAKAGNARVRRGMSQLAWRFLMFQKQSALVQWYQRQTADARGGTRKTMIVALARKLLVALWRLVTTGEIPEGVVLRRAA

SEQ ID NO: 116318 - protein, 470 aa, unidentified
MNIYRSIPVRRIFGDLNKKEPSWYDTGCQICAELTPNLVNQGGLHMDFKQNQKINQVNEKTLVIGIDIAKRTHYACFVDDRGRVLLKSFSVSQSRDGFEQFYQRILTAMKEHAKSEVIVGIEPTGHYWLNLAYFLKERGIPLAMANPLHVKRSKELDDNLPTKHDRKDALVIARLIKDGRFSYPRILKDMEAELRVGSTFRGKLTEELGAVKNMMIRWLDRYFPEFSQVFPSFGKMAIAVLKCTPFPSDLYQKQPDELLSLYRQVEGLQSPQRPKTKRLIEIAANSIGVTEGREMARIEIATLVRRYNQLEQDIEGLTQHLVKLVKTSVEYEWLSTVQGLGDTTIVDLLAEIGSFSHYEDPRQIIKLAGLTLRENSSGQHKGQKRISKRGRRKLRALLFRVMMPMIRHNEAFRKLHEYYTNRKVNPLRKKQSIVVLCGKLLKVLHGISTKHKAFDAQRMMKDIPSLAEAM

SEQ ID NO: 116319 - protein, 349 aa, unidentified
MRFYTKTHTHCCGIDLHAKTMYLCILDRDGQIVLHKNMKSRPEAFLAAVEPFREDLVVAVECIFTWYWLADLCREQSIEFVLGHALYMKAIHGGKAKNDKVDSLKIATLLRGGNLPHAYVYPRELRATRDLLRRRQHLVRRRGSLLAHIQNTHHQYNLPEPSARIAYKANRVGVPEVFDDADARKSIEVDFALVEHYDTIIRDIESHLERRAKQHDPQVYHRLRTTPGIGKILALTILYEIHDIGRFPRVQDFLSYSRLVKCDHTSAGKKLGTGGLKIGNVHLKWAFSEAAALFLRSNPEGQRLQRRLAGKHGKGKAMSIIASKLGRAVYIMLTKERAFDMERFMVRSA

SEQ ID NO: 116320 - protein, 413 aa, unidentified
MGAGVVIGMDPHKRSATIEVMDGEETILGGGRYATDVAGYQAMVKFGRQFEQRTWAIEGCNGIGKHIAERLLADGELVVDVPPKMSARVRVFATGQGRKTDATDAHSVALVGTRMSGLRPVVNNEQLAVLRLLVDRRRSLGDDHTRMVSQLHRLLLELIPGGAKTSLSAAQAKALLGKVRPRDTAGKTRRRVAAELIADLERIYERTKAADKELKELLAATGTTLTQLHGIGPSGAARLLVEVGDITRFPTRAHFGSWTGTAPIDASSGDHVRHRLSRGGNRQINRVLHIMAVVQLRSPTEGRAYYDRRKAAGKTSMEAMRCLKRRLSDAVYRQLLADAIRPSKAGPGGHSGATTSSSAVDSNPDIDASEKSLPGPANHHVTRAKSLRPDRSSARSRRPETTPARSRRQAQSA

SEQ ID NO: 116321 - protein, 312 aa, unidentified
MEAKFVGMDVSKATLDVDCLPVSTPRQFRNDASGIAGLVEGLVGSGVECIVLEATGGYEVAVASALAAAGLPVVVVNPKRVRDFAKAQGILAKTDRLDARVLALFAQQIAPPVRALPDAAQRDLAELLDRRHQLVVMRTQEQARMATVLPVARSDVKQHIAWLDKRIRKHEGVLLKRLRANEIWDAKVTLLDTVPGIGPVNLFTLVGRLPELGTLNRQQIAALVGVAPFNDDSGKRRGQRYIRGGRADVRCALYMATLAAKLWNPVIAQMYDRLIAKGKPFKVAMTACMRKLLTILNAILKSKKPWENRLAT

SEQ ID NO: 116322 - protein, 450 aa, unidentified
MGRPQVIDDEEHERVYEKVAAVDVAKDSGMVCTRLPHPSRPGTRQSTVWTVQARMGAIRELGRQLARGGIQTVTLESTSDYWRIWFFVLEGCGLAVQLVNSSQAKNLPGRPKTDKLDAMWLARLTEMGLLRASFVPPAPIRALRDYTRARTRLTQERTRCWQRLEKLLESALIKLSSVASKLTTLSAQDMVRALIAGERDPQVLAALARGKMKAKHDDLVEALDGMFGDHHGELAQLLLDQIAFLDSKIAELTARIQEQAAAQPGAWGVNADGTTGPGAGTSPGDPVLPVVQRLAQVPGISEDLARSIIAETGLDMSRFPDAAHLVSWAGLCPRAHQSGPRARNGKKGRGNGYLRGYLGQAAIGAAATATFLGERYHRIARRRGKAKAQVAVARSILVIIWHLLASPEARFTDLGYGYYQARTDKDKRIKNHIRQIEALLGHPVTIAKAA

SEQ ID NO: 116323 - protein, 418 aa, unidentified
MTANPKTLYTYAGIDSHADTQTAVFLDCFFTKVGEVQFENRLSKFGKFLNDAEKLKIPGTSLLFGMEDISAYGRALTVFLKGKGYKVKHVNASLVAHERKNQNVPQKTDAIDAECVARTLLSKFESLPDAAPDDKYWVLRTLVIRRESIVKQNISLKNHLHTLINDHYPSYGKIFANIDCKTSLAFLSEYPSPYALRKACTKELDGMLWELSNGRAGVNKAQRIFDIIEQDGNLVSDYQDARDNAVRSTIRQLVFNQGEIDGLEKELADFLELFDYPLTSMKGISTVMAARLISCIGDIKKFPTPGKLSRYAGVAPITYSSGKKDVRYSNQRGNRELNSLFYHLSVLVTMKAGRHNKIINPILYDYYHKKQAEGKTKRQSLKCVQRRLVNIIWGIMTYNQPYINPPSYNLPEDEGKKA

SEQ ID NO: 116324 - protein, 345 aa, unidentified
MEYYAGIDVSLESASLCVVDATGQIVCEAKLASEPEVLIGWFRDLGLAVTRIGLEAGPLSQWLYAGMRDAGLAVELLETRHVRNAFKAMPVKTDRKDARGIAQLMRLGWFRPVHCKSLPAQEVRALLTARKLLQTKNHDVEMSLRGVLRGFGLKVGRTTPRTFAGRIRELVTGHATLSTVAEALLSARGTLFEQCQKLEKRLRSLAREDGRARLLMTAPGVGTIVALTYAAAIDDPSRFRSSKAVGAHFGLTPKKYQSGKTDVTGRISKIGDGGVRTALYEAANVILTRPVKGSTLRSWAMRVATRAGMRKAKVALARKLAVVLHRMLADGASFLADKAAVAAAR

SEQ ID NO: 116325 - protein, 421 aa, unidentified
MALCPHHWKIGETICNDPQVCRIVDLPVYYELETNNGNRDYRIQIGGHYMNYNTVYVGMDVHKESFTLCSCKYEDEKASHYQRTPASYKNVLRYLAFLRTIYGEDTRFVCGYEAGCLGYSLYHQLENFNVECVILAPTTMLEQRSKRRIKTDKRDAEIIARSLAQHNYSPVHIPTETDNQTKEFIRMRDDHKAELKKIKQQILSFCLRQGYQYDGSGNWTAKHVKWLRSLEPAGLYKEILDEYLLTYTILTDKLNRLDQRIEELASKEEYKESVSKLTCFLGIKTHTALSVIVEVGDFQRFVSARKFAGYLGLVPGQHSSGDDRNGLGITKAGNTHVRRLLVESAQSYTRGKIGYKSRVLRSRQAGNSPQVINYADRANERLRRRYYKMVLKDGKKYNIAKTAIARELACFIWGMMTDNIY

SEQ ID NO: 116326 - protein, 400 aa, unidentified
MSARLIVGVDPGRYGHGVVARTAEDAEVVRERVDNDAAAIDELVTRVVGLAGGGGQALWVIEADGGDGAVLIGELLARGELVATLTPTEVAVRRKGRRQVHKSDLIDAEVCARIGREEQASLRRLVAVPETIAEMRVLARYQDGLIRDRTRLINRLRFLLGQYWPEFLAARAFAALDGDAVTALLVAFPTPSALRTQSPLELAGFLAGQRYRRRPLERAQQLLAAAQVGVRPQETVYGRLVAEVAGELGALKQRIGTLDAEIRDRFLSRPEAPIVLSLPGMSHRTGPRFLAEVGTLERFGSPDALAAYAGLTPTLWQSGRSSGTHFLSRRCNLHLRQALWSAALGSLKTPASRRFYDRKRAEGKSHHQAIIALARTKLRVLWAMLKAGTLFMPERALEAA

SEQ ID NO: 116327 - protein, 408 aa, unidentified
MNAVGIDVSKGKSMVAALRPMGEVALLPQEFLHTEVGLEQMAYAIIALGEDTRVVMEATGRYHEPVAAALYEYGIYVCVLNPLFIKQSGGGSIRKVKTDKADAMKIAKYGLDNWVDLREYTPMDTVRQQLKLCSRQYNLYMKTVVSLQNNLISLADKTFPGVNELFSSPERADGHQKWVDFVMTFWHCDCVCRVSEKAFTERYQKWCKRKGYHFSAEKALDVYAGSCGHFTTLPKNDNTKLLITTAAQQLLAGKMTLAALRAEMTRLAKQLPEYDTVRAMYGVGETTAAQLMAEIGDVRRFPRRSSIVGFAGVDPAVDQSGKHDAKSTPTTKRGSPHLRKTLYQIVCTYLKKSPVDEPVYQFLDKKRSEGKPYFVYMTAAQNKFLRIYYARVKECLEAFVARQNPPQS

SEQ ID NO: 116328 - protein, 413 aa, unidentified
MELMHARCAGIDISKKDAKVCVRVQGGGKRRTVTTVTTWGAMTNQILALREHLLAEKVTCVVMEATGAYWKPFYYLLDDGLEVMLVNARDARNVPGRKTDVSDAAWLADLGAHGLVRASFVPPPPIRELRDLTRARTIITRERSREAQRLEKLLEDAGIKLSSVATDITGASSRRMLEALIDGQTDLAAITELVHWRMRPKIPALIEALTGRFTEHHRFMTRLFLDRIDAHSADIARLDRQIEAAVEPFSAARELLMSMPGISRVTAEVFIAETGADMGVFPTAGHLASWCGLSPGSNESAGRVKSTKTRPGNPYLKGALGVAALSVVRHKDTYFWAKHRRITARRGPMRALVAVEHAMVIAAWHMLTNGEFYREPGPDYFTRRVPAKTQARAIAQLEALGYKVTLQPLADTA

SEQ ID NO: 116329 - protein, 415 aa, unidentified
MQERTKSSAGIDWAKDEHALCVVEEAGGRKIFEGRFDHRERGLTKLCRSLVEMGVERVAIERPEGVLVERLLECGIVVLAIHPNQLKASRPRFRASGSRSKSDSFDAFCLAELARTDHHRFRALVPDSDETKALKVLTRAREDLVAIRVASANRLRAELEAFWAGAASLFSEIDSSISLAFLERYPSPKDAARLGEKRPSGFLTKKGYSGGRSARELLGRIRKAPKGRAGKAETEARREAVLGLVGTLRVLAERIKHLEDEIAKALRAHPDGEIFLSLFRSPNSTLTAASLVAQIGHCRERYPTNEALAAAAGMSPVAVESGKRKVASFRRACDKRLRRAFATLSESTRQHHPWAEDVYRRARGRGCDHAHAIRILGRAWVRVIFRMWQDGLPYDPERHGGFERLRSGEGLPQGV

SEQ ID NO: 116330 - protein, 406 aa, unidentified
MQTVYERCCGIDVHKKLIVACFRNGKKSELRKFDTLTCNIKELGIWLLDNDCQMVAMESTGAYWKPIYIILELFGLDVIVVNAHHMKNVPGRKTDAKDAEWIADLLQHGLLKASYIPSKEQRELRDVVRYRKSLIEERSREINRLEKTLEGANIKLSSYVSDLTGVSSRKLLNQAIVDEVTPDNIGDLVHSSMQEKIPVLLQAMDGVLTPIQKKLVKAILDHIDDMTRRINDFDDIINDEMKYYEDAINKIDELPGIGKRSAEVILAEIGTDMSRFPTAAHLASWAGLCPGNNESAGKRKSGKTNKGSKHLKSILIQCAKSAKTNKESFFYAQYQRLVVRRGANRATVAVAHSMLIAIYHMLKDNVPFKNLGNDYYTKFNTEKKVNYYYKKLQELGESVPVSLATA

SEQ ID NO: 116331 - protein, 344 aa, unidentified
MSQVTTIGLDIAKNVFHAHGANECGAMVFSRKLTRHKLLDFFAGQPACVVALEACGGAHHWARELLAMGHDVRLIPPAYVKPFVKRNKNDAIDAEAICEAAQRPGMRFVAVKSEDQQAAGLVFRTRDLMVRQRTQFINAIRGHLAEYGWVAPRGAAHMNLLADLLDDEEMASTLPEAARPMFRLMVDLLAELGKRIATLDREIAQRAKEDEAARRLMTIPGIGPIGATAIIALAPPIETFRKGRDFAAWLGLAPRQHSTGGKQRLGSISKMGERTIRRLLIIGGSSMVRQACRHGAPAGSWLERMLARKPRMLVSVALANKMARMAWALLTKNEDYRAPAPVAA

SEQ ID NO: 116332 - protein, 354 aa, unidentified
MSRKRTDAALVFIKPERLQAPNTSAHAQAGDAKTMSESQVVVGIDVAKAHVDCAVLGADFGARQFANDIDGHSALAAALQPLSVALVVMEATGGYESALACALQAAGLAVAVVNPKRARDFAKGIGRLAKTDRIDAEALAELAATLARRRDLARFIRPLPDAQQQELAALVTRRRQLLTMLGAERLRLQLATVKVRPSIDALIEAIRAQLEDIDAQMQAHLQEHFAALDDLLRSARGIGPIASATLIATLPELGRLSRREISALVGVAPMANDSGTSHGRRRITGGRFQVRRVLYMATLTATIHNPTIKAHYQRLLAAGKLPKVALVACMRKLLTMLNAMVRTQRRWSDEFHRA

SEQ ID NO: 116333 - protein, 319 aa, unidentified
MKTTSSARIANTERNVGIDVGKSTLDVLILEPDIYLQEPNSPDGIKRLVSKLSRYKLSRIVVEATGGYERHLVEACAEKALPIIIVQPMQVRQFARAQGLQAKTDKLDARLIAQFGAIMKPKPRPIASKKVRYIKDLLSRKRQLNETRTQELNRHHKAPTTLMPSHNRLLKLVDKEIAWINDKLAKEVAEVTEWQRTYEILSSVPGIGDGVAFTLLGELPELGALSSREVGALCGLAPYNRDSGSMKGRRRIKGGRAPIRTVLYMAMLSAIQHNKIMKTFYQKLVAQGKHKKVALTACMRKMMTILNAMVRDNQEWQSH

SEQ ID NO: 116334 - protein, 378 aa, unidentified
MKIVYQRCCGMDVHKDSVTVCVLLIDEYGEWGSEKRKFRTMTRDLREMATWLASLRVEAIAMEATGVYWKPVWNILEAENKFRLLLVNAHHIKQVPGRKTDQKDSEWIADLLQHGLLKASFVPPPTIRRLRDLTRMRVKMRQMLATFANRIQKVLEDANIKLGSVASDVLGVSGRHILHAVVEGQQDPEQLAGLALGRLREKRAELQLALEGHITDHHRFQLKFLLESVQFGEKQLSQLEAEIRRLINQVEPGLVSSDGAVTAELAAAPGTGEAAVATTVESPLQTVVELWDTIPGIDELTASTLVAEMGANMDQFPSAGHAAKWAGICPGNKEASLRQDIQRQRLVTTSSLPSCLGCLAHQEYLSGGAISSPDCAKG

SEQ ID NO: 116335 - protein, 359 aa, unidentified
MDRYVGLDAHAKTCTLAVMSRSGKRLDSKVVETNGRALVDAVRGIAGDVHLCLEEGTQSAWLHEILSPHTRELVVSVPEKKRGAKDDLRDAWSRADDIRVGRVQTRVYKTPTHLAGLRSAACAYRLATQDVVRTKNRLKAVFRSRGIRSDSGVYEPASRERWLKELPSGSRELAAWFGEELDGLVPLREQAEEWLRKEAKTHPIIRKLRTGPGMGPIRTAQLVAIVGTPHRFRTRRQFWSYCGLAVVTRSTSDWVESKDGGWVRAQTYQTRGLTRKRHPVLKMIFKGAATSVIEQLPQDPLHQHYERMLSSGIRPNLAKLTVARRVAAIVLAMWKHQDVYDPHKHLVVTDKASVPTPAR

SEQ ID NO: 116336 - protein, 322 aa, unidentified
MIVGIDIAKLKFDAVLLSETGKEKHQTFTNNDKGHHSFKTWLEGNNALGAHVCMEATGRYGEEVALFLHTHDFKVSVINPTQIKGFARSEGVCVKTDKVDAGVIARFCRAHSPALWISPSKAHQDLRDLHRLRQNLIDYKTCFSNHMEALKDTRASYATWKESTDFISRQIKKIDEQIKKLIASDAVLNKNVGFLTSIPSVGQTMAVAFLSELPEMSGFKNAKEVAAYIGITPNLRQSGTSLRGAGHITKIGNAHLRKILFMVGLVAQKHNPQIVEFCTRLAKKGKAKMAVIVAAMRKLVHIMFGVLKNQQNFGEHLEPVNI

SEQ ID NO: 116337 - protein, 343 aa, unidentified
MEHFAGIDVSLELSSVCVVDGVGKIVHEAKVASDPEALVGFFRGLETRVTRIGLEAGPLSQWLHAGLVAAGFEVVLLETRHVKAALSAMVVKTDRKDARGIAQLLRMGWFRPVHAKSPAAQEVRALLVARKLLQTKLLDVEFSIRGILRGFGLKMGEVSKGRFVARVRELAAGHAMLERITEPMLRAREALRTEYARLHGEMLAIARPDPVCRRLMTVPGVGALVAITFKSAVDDPGRFARSRVLGAHFGLTPRKYQSGETDVTGAISRVGDAMVRMALYEAANVMLSRVTRFSSLKRWALDVAKRRGLKRAKVALARKLATVLHRMWVDGANFHWGKQAAAV

SEQ ID NO: 116338 - protein, 408 aa, unidentified
MNVLFKRCAGLDVHLREVVACLRLMGRGKAKYEVRRFPTTTAGLLALADWLEEAGCTHVAMEATGAYWKPVWHILEGRFELVLANAAHIRAVPGRKSDVNDATWIADLLAYGLIRSSLVPPEPIAQLRDLTRTRKQLGREIVQHTQRIQKVLEDANVKLSSLISDVLGTSGRRILRALIDGESDPRRLAALGSERLKCSREELVEALRGRVTAHHRFLLAQHLRMVEDLERAVADFDARIEEHTAPFRAQLERLSGMPGISRTSAQVLLAEIGADMSRFPSAGHLLSWAGLCRRLDESAGKHRSTRLRKGAPWLKPVLVQCAWAAARKKNSYLQAQFLRLKSRRGPKKAAIAVAASMLTAAYYILRDEVDYRDLGADYFTRRDKARVAHRLAARIRDLGYEVELREAA

SEQ ID NO: 116339 - protein, 383 aa, unidentified
MRIVCGLDVHKDSIYLCILSSTGEIFEQVFGVLTTQLEEMRDLMLKYNVQEVGMESTSVYWIPVWRVLEPHFKLKLINPYFIKQLPGRKSDVKDAQWIAECMMKELVRGSFVPPERIQQLRIYDRRIYDLDDEIIRKLAKLDAVIQRCNIRLSNYVSNTDSVSYKSVIDKICEGVTSPEELVKEVHGRIINRHGKETIIASLKGSITEVDIDIMAQLKAEIDLAELHKQKCLKKMQEICEKEYSEQLKNLQTIPGVKMRAATSLIAEIGTDMSHFETANHLSSWAGLRPRNDQSNKTIKSRRITHGNRYLRRTIIQCAWGASRAKNYFFSRFSYYQTQVRKKNRMKVIVAISRKMLVCAWHILKENIAYKDFDNKILTSDTKG

SEQ ID NO: 116340 - protein, 341 aa, unidentified
MRLYTGIDLHSSNSYLAIIDETGKRVFKKKLPNDPEQILSALAPYKDSIVGIVIESTYNWYWLVDALMSDGYSVHLANPTKIQQYHGLKYSDDQHDAFWLAEMLRLGILPEGYIYPKEDRPVRDLLRKRSHLVKLRSSLIISLQNIICRNNGFRIKTSDIKALKADRVAPFLDQNEDLALAGKISKESIDFLTLKIKAVENIIEEKMELREPYKNLLMLQGVGKTLGLTIMLETGPISRFAQVGNYCSYCRKVSTKWISNDKKKGKGNKKSGNKYLAWAFSEAAEIARRYYPEARAFYQRKMQKTNAMIAHQALAHKLARAAYYIMRDGVPFMPEKIFKSS

SEQ ID NO: 116341 - protein, 344 aa, unidentified
MTTIMIGLDLAKNVFQIHGIDAKGAVTVQRQLRRAQVAPFFAKLAPCVVGMEACGGAHYWARTLQGLGHEVRIMPAHYVKPYVKRNKNDSRDAEAICEAMSRPTMRFIRPKSEAAQAMLAMHRTRALLVRQRTMAANALRANLAEFGIVAAQGNAGLRTLMEQLVVPTCPLPASAQAALALLARQWAQVDMAVRELEVRIARSAKEQEAARRLMEIPGVGPLGATAILAKVADVSVFRTARDFAAWLGLTPRVSGTGGKQRSGGISKQGDHTLRQLLIMGARSRLNRVRKNAASDPWLRDLVARRPIKVAVVALAAKMARVIWALLKTGERYRAKDQCAAGAAA

SEQ ID NO: 116342 - protein, 386 aa, unidentified
MAASVTSRIEQDTLAQPTLSLAFELGQDTWKLGFTIGVAQQPRERTIPAGDIVRVQQEIAQAKQRFGLPADARVVSCYEAGRDGFWLHRCLVAHGVQNYVIDSASIEVNRRQRRAKTDRLDVRKLLTMLLRHLAGERKVWSVVRVPSVEEADRRQLHRELTTAKQDRTRIINRIKGLLAGHGVQLVLQGDVETQLDQVHQWDGEPLPSALRTRLKRAWQQVGFLTTQIQTLEAERRALLRRRDDPVIAQVRQLFTLRGIGVNSAWLYVMEFFAWRDFQTPKQVGALAGLTPTPYQSGQARRELGIAKAGNRHIRAMAIEIAWAWRRFQPASALAQWYERRFGAGSARLRKLGIVALARKLLIALWRFVKTGVLPEGAALKTETPSR

SEQ ID NO: 116343 - protein, 423 aa, unidentified
MDVVHQRVAGLDVHKETIVACVRIMVDARVSRECRTFDTTTAGLKDLQAWLTASGCSHVAMEATGVYWKPVWNILSDGTFELLVANAAHIKNVPGRKTDVNDATWIADLMACGLIRGSFVPDQAFQELRTLLRTRKQLTREQTRHVQRLQKTLEEANIKLDSVISDVMGLSGRRMVEAMIAGERNPQKLAALADRRIKASPKALYDALHGRLTDHHRFRLRLHLAQYDVLAAAIGAVDQEVDAAIDQMDEVEKGGQAFFRSLIRLLSGIPGVNTLSAQTILAEITPDMTRFATAGHLVAWAGLCPGQNESAGKRKSSRLRKGAPWLKTMLVQCAWAASRRKDSYYKAQFNRLRSKRGPKKAICAVAASMLTAIYHMLKDGISHQDLGVDHFDRRSTEVKAKRLVAQLTKLGYQVALQPLPQAA

SEQ ID NO: 116344 - protein, 424 aa, unidentified
MKVTYQTCCGVDVHKSFLVATIVKTTGGIEPSYQKKRFSTFNNSILEFKQWLLDNDCHDVCMESTGKYWVPVFNLLEDDINVVIANPKWVKAVKGNKDDTKDSKWIGDLFRLGLVKGSYIPCKKVRILREYTRYRYKLVSCRSSEKNRYQNALTVCNVALDSVVSDIFGKSSTSIIDYLLEQSGSSINHEEIASKLLRSLKSKEDAVIESVEGYQMTDAQKYRMRLVRAHMDYITAEINDVDKMIENMISSNTDFENAVQFLCTIPGVKRDSAITIISEIGTDMSQFSSSRRLCCWAGLTPGSNESAGKRKSVRFTRAGVYLKPALVQCAHAAVKSDKSPYYKKKYESLVKRRGKKRAIIAIARMILTAIYQMLSTGEQWNPSDLYKIDMPVALVEKQKAKAIKQAKKLLQREGLLPPDEPLAS

SEQ ID NO: 116345 - protein, 425 aa, unidentified
MREHDTQAEAGTVNIPGKGAMFEIEDVGVFLGLDVGKTAHHGHGLTPAGKKIFDKPLPNSEPKLRAVFDKLTEKFGTVVVIVDQPASIGALPLTVARDAGCRVAYLPGLAMRRIADLYPGEAKTDAKDAAVIADAARTMPHTLRCLELTDEITAELTVLTGFDQDLAAEATRTSNRIRGLLTQFHPSLERVLGPRLDHQAVTWLLERHGSPAALRKAGRRRLVELIRPKAPRMAQRLIDDVFDALDEQTVVVPGTGTLDTVVPSLAASLASVHTQRRAMEAQINTLLEAHPLSPVLTSMPGVGVRTAAVLLVTVGDGTSFPTAAHLASYAGLAPTTKSSGTSIHGEHAPRGGNRQLKRAMFLSAFACMNADPASRTYYDRQRARGKTHTQALLRLARQRISVLFAMLRDGTFYEPRTPKNVELAA

SEQ ID NO: 116346 - protein, 355 aa, unidentified
MNQEKYIGMDVHAATISVAVKNAEGKLLMECVLETKAATILEFIQGLRGTLALTFEEGTLAAWLHDLLKPHVSRLVVCDPRKNARMRDGNQNDRVDARNLAELLRTNQVKAVYHGKHGTRALKELGRSYLTLTKDSTRVMNRIKSVYRSWVIPCAGSSVYSRRHRAEWLAKLVEPGVRIRAEHLYQQLDSLEPVRQAARRELLRESRKHAAVKLLRQIPAIGPIRSALLVALLQTPHRFRTKRQLWAYSGFAVQTYDSGEYRMVRGKLQRNRERITVRGLNRNHNHDLKNLLKGAAISAIEPPGPLQDFYAALVEKGMRPSMARLTLARKIAAITLTMWKKGVSFDPQQLQRQAA

SEQ ID NO: 116347 - protein, 345 aa, unidentified
MEHFAGLDVSVKQTSVCVVDDTGRLMQEVKVASEPEALLAVLSNPLYRFKRIGLEAGPLSQWLFSALAEAGLPVTCVETRHMRAVLQAQINKTDRNDARGMAQMMRAGLYRPVHVKTLRSQKLRMLLTHRKLLQSKAIAIDNDLRGTLRNFGLKVGVVGASKFEARIRELVETLPDLAELVEPLLIVRRTLREQIGILHGRLLAIVRNDDVCRRLMTVPGVGAVVALTYRASVDVPARFRNSKAVGAVFGLTPSKYQSGEIDRTGSISRCGDEMMRAMLYEAAHIVLVRLAKWSWLKAWAMKIARRRGMKKAIVALARRLAVILHRIWVDGSEFRWTREQAASAA

SEQ ID NO: 116348 - protein, 408 aa, unidentified
MTVVGIDVSKGKSMVAAMKPGGELVAAPYEVRHSDIELSHLALDVLCMEPDTRFVMEATGRYHEPVAALLHSEGIFVSILNPLLIKQSGAGSLRKVKSDPKDALKIAKYGLDNWSTLREYTPMEAIRQQLKLCARQCDLYNKSIIMLTNNLISLSDKTFSGVNELFSSPEKADGHLKWVDFYRTFWHCDCINRMSPDAFEDRYKKWCKRKGYHFSADAADALYAASCGLYTTLPRDNNARLLVTVAADQLIALRENQSKLEAEMLNLCKQLPEYETVMAMYGVGKSTGPHLMAELGDVRRFPHRSSIVAFAGVDPGVVGSGKMQLSSVATSKRGSPQLRKVLFQVVSTYVKCKPENEAVYQFYAKKRDEGKPFFVCTTAAANKFLRIYYARVKECLNAAESATQVEEG

SEQ ID NO: 116349 - protein, 409 aa, unidentified
MRRSKGKRSASSIVGCAPRCAEPHAETPEGVLPQPFRGGRPVSKTITSFVGLDVHKDSTAIGEAEAGRETPRFVGTVGPDLGQLLKALKSLGKPETMLVVYEAGPCGYGLARQLRARGYSCEVVAAGKIARRPGERIKTDRRDALSLARLARSGDLVKVRVPDERDEAMRDLSRAREDAVRARLKARQQLKALLLRHGHRYGGKSSWTLAHERYLAEVSFAHPAQDIAFAEYRQAVREGHERVERVTQALRTQSEHWRMRPLVAALSSLRGIDFVAAVTLAAEIGDFSRFAHPSELMGFLGLVPSEYSTGNTRRQGDITKTGNSHARRVLVEAAWNYRFPARISRILQIRQEGQPKAVREIAWRAQLRLAHRYRRLSSRKLHPNKICVAIARELAGFLWDIARQVQLAT

SEQ ID NO: 116350 - protein, 422 aa, unidentified
MQNTAARKRKQVPEGYLIVGIDPHKKKHAAVAITQDLTIRDRFKLDNTKEGLEFMVRRVRTEMVKSDCRGVMFAIETGGHYWRNIAYYLDEQGIPFRFINQYTLKRRREGKDLNHKKNDYRDSEVAAQLLCTGEFTESTIPHGVYAELRTAHNAYRRLVKERTRITNLMKGLLDGLFPEFVRVFKDPCAVTALCVLSCCAIPSEIAGMTQGEFAATIEAHYHGRRLMRRKLVALHQVAISSIGIAAGARSVASEITFLVEKLELIKGQICSIERTLVSLVDETEEGKYLLSITGLNYISAAGLIAELGCFKLYRTSKQMIKMAGSNPTESESGGKRGAHTPMSKQGRPVLRYCAWTSVIPMLRFNTDFRAWAKQRRERPAHANPLGGREVVGAALNKLLRLSFTLVKNQTLYRSPQLMPMTN

SEQ ID NO: 116351 - protein, 367 aa, unidentified
MKKISTVAVKQSKNISGKKLTIGLDLGDRASWYCVLDEAGEVLLEQKLTTTPKAMREVFGKMPRCRIALETGMHSPWVSRLLSELGHEVIVAHARNVRLIGESRKKDDRLDARTLARLARIDPQLLSPVKHRSAKAQADLTVIRARAGLVRSRTALVNTARGLTKSYGERLRGCNPRNMNPEKAQQLSPELQSALEPLLAAIESLSERIHEYNQQIEKIARESYPQAARLEQVKGVGTLIALTYLLTLEDPHRFRKSRDVGCYAGLQPGRRNSGKSEPQLHISKEGDPYLRTLLVQGAHHILGPFGADSDLRRWGLKLAERGGKNGKKRAVIATARKLAVLLHRLWVSGEAYEPLRNSHQSAMPAAA

SEQ ID NO: 116352 - protein, 352 aa, unidentified
MRTSQKTAGIITTIGIDLGKNTFHLVGFDQRGVIILQQKVSRGQLERRLANIPRCLIGMEACSGSHHIGRQLAAVGHDVRLIPAQYVKPFLKGHKNDYRDAEAIAEAVQRPTMHFVAIKTPEQMDLLALHRVRSRLVGQRTGVINQIRGFLIERGIIVRQGVMPLRKALPEILSSHTGVLSARMVSLITDLAQDWRRLDERIAAVSAEIEALAEQDNGCQRLMTVPGVGPIISSAVVAAIGNGAGFKQGRDFGAWLGLVPKQESTGDRTILGKISKRGNKYLRTLFVQAAHVVLVRRPRAAMRGLWSWIEQASKRLHRNMLAIALANKLARTAWAVLARGRVYQPRTAADAA

SEQ ID NO: 116353 - protein, 380 aa, unidentified
MAAVMIGIDPHKASHTAVAISVAEEALGELRVRASGGQAERLLDWAAAWPERTWAIEGAGGMGHLLAQQLLAQQLLAAGERVLDVQPKLGARVRLLAAGDTNKNDPNDARSVAVAALRSASRREARADDHVTVLKVWSRRHRDLGRMRTQVACRLHAVLCELIPGGASRRITAGQAAHLLEAITPSDAVEAARCELAADFAEDLRQIDIRMHETRKKVTAAVQAAGTTVTEVFGVGPVIAATLIGGAGDVCRFASRDHFAAYNGTAPIEVSSGQRKIYRLSRRGNRRLNHAIHMAAVSQVSHRHSTGRAYYDRKLAEGKTPKEALRALKRRISDTVFARLQADARRAGQSPGGQQGNDSGASAAGSHPRHRLFGKATPGP

SEQ ID NO: 116354 - protein, 336 aa, unidentified
MRYIGVDLHTTQITVCYLKAEADFEIRKYQLVEMEKFVNTLEKTDEIAVEATCNTRWFYEQVAEKVSRVVLVNPRQFEVVKNSVKKTDKNDALNLAKFLKADLLPEVRAKREEAERVQSLVQTRTKLVRLKTSLINKIHALFVSNGRKLKKASLASDKGLEKVLLSEWSAIERIELEIIIEQIRSLKVSIRKLDKAIEAESCKLQGYESLVSMSGIGSLSAGILLSVIGEVKDFATADKLASYFGIVPRVSNSNETVNHGRITKRGNKTGRTTLVQCSLAAIKKSEYLKKYYEQVKARRGHGKAKIALARKYLGIIYNTLTNNWVFADFNNFELAE

SEQ ID NO: 116355 - protein, 350 aa, unidentified
MSKVSLDLSSVTVVGLDLAKHVFQVHCVDSGGKVVLNRSLKRREVLDFFRKLPMCRVGLEACGSSHHWGRQLLALGHDVKLIPPAYVKPYVRRQKNDAADAAAIAEAVTRPQMRFVAVRSIDNQALLMRHRVRETLVAQRTQLLNSLRGHLAEAGLIAAQGARNARALAGLLSSGHPDIPTCVVQALLPLATQVGELDTAIDVLDKEFAAAAKADAQARRLMTIPGIGPQTAHAIVSTLGPDGIGQFSGPREFAAFLGLVPRQNSSGGKQRLGRISKMGNAYLRKLLVVGAHSVLHHRERHNDPLRNWAKALLVAKPFKLVAVAIANKMARIVFALLSSQSAYATPAQAA

SEQ ID NO: 116356 - protein, 405 aa, unidentified
MADENKVASIDVHKKVLMVVAGAREGDSQGELPCRRFGTTTSDLRCLSGWLREQGVTEVVLESTAPYWKPVWMELEPYMRLHLAQAFSNRAPKGRKHDFRDAVRLRRRFLAGELILSFVPDSEQRAWRTLTRMKTQRARHRVRLYGQVECLLEEMRIKLSCVLSDLFGASGLRILRALAGGETDPKQWAGLGDERLKCTPGQLLEALRGDPQPMHPQLLTLYLQQLQLIDPQIAKLSGLIAEALKPHQEAVARLAEVPGLGPDSAQQVIAEVGVEASSFPSARNLASWVGTCPGENESAEENHSRRPRKGTALCGGFWRRRRTQRSGPREAICRPCSAACCPAGAIRERLGPSPTGCAAGFGRSCMRESAMWNKVPTATPRPESSGPGPCYEPCANSATTSKSHP

SEQ ID NO: 116357 - protein, 426 aa, unidentified
MRQEIRLEEFRQFRDEIRGSVDYLIVGIDVSKERHHAFFGTSTGKTLCKRLIFDNSCEGFEKLLCMVEALKVQHSLPKVAFGMEPTANYHKPLGEHLIKCGYMVVLVSTAAAKKNRELMNSRWDKNDTKDSANIADLIAQGKCLYYEYPEESLRDLRSLLSLKRRLKKQERGIQVRIRNQLLAQYFPEIDRHFGSTVTLAVIQRCLDPSVIAGMQYDEFRRTVAPGRLNIAQQKQLQAIWQTAPESIGCYVGEAVSVESQVMVTELHHVRQIIKGIERKIEEICLQYPSYSSLLSIPGFGPDLSAKVLGAIGNPERFTNAKQILKMAGFDLSAARSGKTSENVTPVISKKGKADLRYALYQAAVVTSSKNKDFMVYFTNKLRGRQREKGIATKMRVKLAAKLLVIAWTLMKKNELFNAEYLNKEDN

SEQ ID NO: 116358 - protein, 445 aa, unidentified
MPSIHPNAAGIDIGSRFHVAAVPVDRTEEPVRTFKSFTGDLHELARWLKSCRIETIAMESTSVYWIPAFEILESYGFEVFLVNAREAKNVPGRKTDINDAQWLQKLHQFGLLRASFQPTENIAELRAYLRQRERLNDYKASHIQHMQKAMMQMNIQLHHVVSTITGRTGIEIVRAIVAGQHNPDELVKFRDIRCHNSVEVMKAALTGNYKAEHLFALTQALELFDIYTEKIENCDRIIALVLQRLQQLTPDPQQTMPKAKHQESNKNAPSFDVRAALFNFMGKDLTQIHGLGPYLALKLVAECGTDMSRWPTSKHFTSWLCLAPGNKISGGKVLSSRTRRTASRATALLRLAATTIGKSDTALGAFYRRLASRTGKAKAVTATARKIATLFYNTLKYGMDYVDKGADYYETQYRDRVLINLRRRADAFGFTLQEKIVPGIAVEVS

SEQ ID NO: 116359 - protein, 416 aa, unidentified
MNPSISPPIERYVGIDLHKHYLVVGGVNAKQEVVLPPRRIELGDWPKWAKAHLTKSDTVVVEATTNAWDFYDQTSPFVQRVLVANAAKIALIAKTRVKTDKIDVMVLARLLAAGLIPEVWVPPMEVRELRSLIAHRRRVVGTRTSLKNRLHSVLHRHHLVLPSGDPFSDIHRGWWDTLPVSPTERLHLKHDLATVAQLDTQVAEIEDELGRLSCVAPWAAPVTYLIQLPGIALITAMTVLSAIGDVTRFPHAKQLVGYSGLGAGVHDSGQTHHTGHITKEGRKELRTVLVEALWRAVECSDYWRVEFERLTRRMPPTKAIVALARKMLVVIWHVLSEQAADTHADADLVAFKFMMWSWKLTNEQRGGMTTRQFVRYQLMHVKLGDQLTHVVRGGARHLIAPAEEVLALKPDLATAA

SEQ ID NO: 116360 - protein, 444 aa, unidentified
MACSGMILIREVADAPVIMGISKPAGLKSPCGEVKIVNPLFVGIDVSSKNNVAYLMKPDGSKHSSFSVQNNLGGAKLLSERIVSALGSMQLERVVIGLEATSIYGDSLVYALREDGSLGRFQRKIHVLNPKQVRKFKEAYPDLPKNDWVDAFVIADHLRFGRIAKEVYMDDYRYQALRTLTRARFDVIQNLTREKQRFANYLFLKCSGMAQDKDIQNTSATTIALMEHFETVDDLANADLEELTAFITETGRGKFADPDATAKAVRAAAKGSYRLPKTVNDTVNQAMAVSIASMRALKGQVKVLDKAIEQQFEIIPNTLTSIPGIGKVYSAGIIAEIGDIHRFDSQASVAKYAGLVWNRSQSGDFEAEHSRMIKSGNRYLRYYLLEAANSVRRCDSEFRRYYDLKFKEVNKYQHKRALALTARKLVRLVFRLLKDNRLYIPPEG

SEQ ID NO: 116361 - protein, 340 aa, unidentified
MTFAGIDLHKKTITICLVDRDRNVLQTRRFSCVEVDRIVGFFAGLGPFQATVEATAGYQWLLQRIEPLARRVVLAHPGKLRVIAESTRKSDKLDARVLAEFLALDMIPPAYRPTPRQREHRALVRHRQFLQRQRTQLRVKVRRVVSDYNADRKDLFSKPGRAYLAGVPLSAADRFIVEQLLGQLAAADGQLTALRKRLREFAEAAGEAEARSRRVLRSVTGVGEVTTEVVLAELGDVGRFRSAKQVVAYAGLAPGRRESAGKARDLGISKRGSPLLRWVLVEAAWQTVSRSAYWRETYERLKRRRGARRAIVAVARRLLGVLVAVLRSGQGYREPPAPAA

SEQ ID NO: 116362 - protein, 335 aa, unidentified
MSPHHARKGPEWKENMGRQSNYAGIDVSQATLDMAEHATGQQWSFGNDDAGIAETVAVLANLKPALVVLEATGGIEVPVVTELVAANLPVVVVNPRQVRDFAKATGRLAKTDALDAQVIAHFAAAVRPELRPLPDTQAQEFSAIMARRRQLQDMLTMEKNRLRVARRLVRGRIKAHIGWLENELTHTNADLERSIRESPVWREKDDLLRSVPGIGPVTSCTLIAGLPELGMLGRKQIATLVGVAPLNRDSGTLRGKRTIWGGRAQVRAVLYMAALASTRHNPVIKSLYRRLCAAGKVKKVALVACMHKLLLILNSMVKHNIRWHYTTAELIGPCS

SEQ ID NO: 116363 - protein, 388 aa, unidentified
MYHVGIDISKFKHNCFIATDAGVKVKEFVFDNNKLGFIELKDSLTSLGKPQEIKIGFESTGHYGTNLKSYLSNLGYTYVEFNAYLTHLFSKARTLRKTKTDKVDAKVISSMLGSVDYETLHTKFYHMNDLKELVRQRNVYLGNRSKELVKLTNLLDKSFPEFKPFFKNRLGSGALFILKRFKTKARIAKLSMSDIELVKSKTKGKMTYPKLNRLKQLAHDSIGVSSKVYDLLIQTSIEQFEHLTHSLKVIDSEIITLFKQTDSKLLTIPGLGIITAATIYAEVGDFRNFSNPAKLVAFAGFDVRIIQSGTQEHYGKLVKHGSSLLRNAIWTYALPAVRFIPTFNDYYHKKKAQGKHHKVILSHICRKLIRMIYYIEYNNIPFDHNLSR

SEQ ID NO: 116364 - protein, 357 aa, unidentified
MAEGSWVGLDVHARSTVAGVLDGRSGELRVQRVSPESGQTVEWLRALPQPVRVAYEAGPTGYGLARACATAGIACTVAAPSKIPRAPGDRVKTDRRDAERLARLLRLGELVAVRVPEPHEEAARDLVRAREDARGDLMRARHRLSKLLLRHGLVYDASAWTLAHDAWLRRQRFTARPLALAFDECYGAMLHAKTRRDGLDQAIAELAGESPFAEVVGRLVCLRGVSTLTALALTVELGDWQRFRPQSLGPFLGLVPSEDSTGERRRQGAITKTGNSHARRLLVEAAWHQRRPLRASAALERRRQGQPAAVRARADQSARRLHQRWHALESRGKRRTIVAVAVARELAGHCWALATMT

SEQ ID NO: 116365 - protein, 381 aa, unidentified
MTTKATRNTQAKTSEGPLFMAFELSEKTWKLGFTTGPGQKPRERNMTARDHERVLDEIAHAKRRLGLPETAPVVSCYEAGREGFWLHRFLEAHGITNQVVDSSAIEVSRRQRRAKSDGLDVRKLLRMLIRYHEGERQVWQVVHVPSVEAEDQRHLHRDLETLKQERGDTTRRIKGLLSSQGLRVKNLTRLPEQLGALRLWDGSPIPPGVRQRVLRVYAHHQFLSEQIAAVEAERGTQLHDANDASIEKVRQLMLLKGIGINGAWLLVMEFFGWRAFKNRREVGGLAGLTPTPYQSGDSAREQGITKSGNRHVRWMTTELAWSWLRFQPDSALSVWFRERYGSGGKRLRRIGIVAVARKLLIALWRFLETGALPEGAALKMR

SEQ ID NO: 116366 - protein, 365 aa, unidentified
MKTLYYAGLDVHKDSVRIAVLKDAEKQTVYEATVKNDISRIVKKVGEYKAKGIVVAGYEAGCMGYTLQRSLAKAGVECRVIPPNRVARAGSQKIKTDTRDAILIARMLKNNEGDSIYVPTAEDEAARDLLRCREDIKSEVLRTKQQLSKFLMRTGFIYESGKKQWTKAHRDWMASLDFAQELQREAFEQYISHMLELEDRLKRIEAKIVDVAQAAPYRERVAQLRCFKGIDYLIALALVCEVGDFRRFPTAASFMAYLGLVPSEYSSGGKRRQGGITKTGNSHLRKLLIETSWHYRYRGAASGKLQQRRIGMDELVIAYADKAMNRLQAKFSKLVYKGKSTKTAVAATARELSGFVWGAMNAIYS

SEQ ID NO: 116367 - protein, 367 aa, unidentified
MAHRSKAKGTRRRTKLRVIYTRAAGIDVGSTLHVVAVPPELSAEPVQTLQSFTGDLYRLASWLVDIGVTTVAMESTGIYWIPVFDILEAHGLEVLLVNAQHVKTVPGRKTDVNDAQWIQQLHTYGLLRGSFHPAPDWSALRVYLRHRERFVEYAAAHIQHMQKALMHMHLQLHHVLSDITGLTGMQIMRAIVAGQHDPAVLATYRDARCKASEETIRAALTGHYRRAHVCALRQALELYDSYQARIEACDQEIQSTLESLQNDARAIETLPAARHKKQQSHAPRFAVREALLRVLGVDLSQIDGFSASTALKLVGECGMDMRRWPTEKHFTSWLTLAPGNKISGGRSCIPKPDAQRIAPQRSFGYLR

SEQ ID NO: 116368 - protein, 330 aa, unidentified
MPTYYLGLDVHKVRTQYCLMDPGGEILAEGSLPTEEVATVVPADCAVVLEATGSWHHTYDALCACAEVVKLAHPSRIKAIASARVKTDRIDARILAHLLRTDLIPEAWAPPQEVRDLRDLVRLRWRFVAQRTTAKNRISNLLARQCLRFEGTDLFGRGGRAWLAELPLDPHSRALVELLLAAIAEADGHVVALTALLRERLRGAPEVALLETIPGVGFLTAATLIAELGDWHRFASAKQVSAYFGLVPSVRASANVAHYGRITRAGSPHARRALVEAAHVAVRLPGPLRDRYLRRAHRRGKKVALVAAARELLELSWILLSRGEVFRAAA

SEQ ID NO: 116369 - protein, 449 aa, unidentified
MSRPQVIDDQEHERIYERVAAVDVAKDSGMVCIRTPHPSRPGARRAAVWTVKARMNTIRVLGRQLKNDGIEIVTLESTSDYWRIWFFVLEAAGLVVQLVSPAQARQLPGRPKTDKLDAQWLARLTEWGMLRASFVPPKAIRDLRDYTRARVLLVRERTRCWQRLEKLLEGALVKVSSVASKLTTVSAQDMIKAMIAGERDPHQLAGLARGRMRAKHDDLVQALDGMFDDHHGELAQLLLDQIAFLSDRIEALAARAAQLTAAMPPAWGINADGTTGPAGTGPDAPALTAVARLAEIPGISEDLARSIIAEIGLDMTRFRTAGHLVSWAGLCPSARQSGPRTRAGKKGRGDTWLRAALGQAVTGAARTPTFLGERYSRIARRRGKAKAQVAVARSILVIIWHLLASPEARFTDLGPDWHDAKAGRDRKIQAHLKQLRSLGLDVTITETAA

SEQ ID NO: 116370 - protein, 425 aa, unidentified
MSTTTNFAATIGLDWADKKHDLWICPTDNSKAEHTQLDQTPEVLHQWVAKLQQRWPGQRVAIGIETSRGPVISALMAYDFIVLFPINPKALKDYRAAFCVSGAQDDRTDAMLAEELIRLHRDKLRALEPDTELTRKLGGLVLNRRHLVDERTRLVNQLHSILKTYYPLAEVLLGKQMTKLLAAEFLARWPDLDSLKKATAKALRAFFYTHNSRSADTIEERIQAIQKATPLTTDQAIIAPARMLVSALAGMLRVLHQAEARLDKEIEQAMDQHPDAALFRSLPGAGPVLAPRLLTAFGTNRDRFGSATEVAQFYGIAPVVKQSGNSKTVHMRQRCPKFGRQTFHENAGCALRKEPWMQACYARHKNKHDNKHHQACRALAFKLVRIYFACWKHRTPYDPARYLQALEKHASPLAGILKKDAPQKL

SEQ ID NO: 116371 - protein, 350 aa, unidentified
MIIGCDFHPRFQQISFLSEETGECGQRRLMHTAEAEQYYRSLSGPRVRVGIEATGSYGWFRRLLSELGHELLVGDATQIRASNPRRQKTDKRDAEHILGLLVQDRFPAIWQPPAENEQLRQLLLHRSRLVRLRTRVTNQLDGMAKNEGFLVPGGWSGKRRKAIEALPLPGWYGERRKDLLGLLDRLEERIAPLDRAVSQAAANNAEACLLMTHPGVGPVVSLAYVLTIGNWQRFPRGKQVGSYLGLIPAEDSSSDKRRLGHISKQGNTLVRWLLVEAASTAQRYDPSWHRQYLRLSMTKHHGVAKVAIAHKLAVRLYWMLRSGEDYQHARERGSAARQSECPGGRETTAD

SEQ ID NO: 116372 - protein, 337 aa, unidentified
MKLYCGIDLHSSNNVVAVSDEQDRPLYEKRLSNDLDTILTVLKPFKGELVGCVVESTYNWYWLVDGLMAAGFPVRLAHTGAMAQYAGLKYTNDFSDARYLAHLLRLGILPTGYIYPKEERGLRDLLRRRLLLVRQKTLHHLSLQSLIARHSGQRLTANEIKQLETTQIAAYLDAPILLGGQITLQARCWLDEAITRIERELQKHIQPREDYQLLQSIPGVGPVLGTTIALETGTIQRFPSPGNYASYARCVKSEKISNGKYKGQGNKKNGNKYLAWAFMEAAHYGAIWSTPIKRYYQRKQAKSHILVAKKAVANKLARACYHMLKRGEVFDVTRAFG

SEQ ID NO: 116373 - protein, 412 aa, unidentified
MSHGHVMWVSREAAFRSADDWKDTTMPSAISPPKAVLGIDVGKSSHWACLVTREGEVALNRRVRNSEGDLDGLFSQVACDTIVVVDQCRNIGLLAISRARLAGLGVAYLPGLAAHQAARLFAGDAKTDERDALVIAKTALGIPDALLPVPEPNESLEAARSLAAQRSHMVTCATRDKNRLRSILLESCPAFEALADLGDRHWLNMLEKLGGPWGCIDAGKPAFGAVTKGANRARMDAAWNAAMASTRPSKRRVDAENPQVRMLARRIREALEEADRIDREITALLAGDGTYECLVTIPGIGPRTASELVIGINIEDFPDHDHLASYCGIAPRNRQSGTSISSVSASRQGNRRLKNLLIFSCNSLVRCENRFGEYYRACRGRGMCHGEALKAVARKRLKVIYAIMRDKVPYSA

SEQ ID NO: 116374 - protein, 366 aa, unidentified
METIYIGVDFHARQQTICYLKTETGELVFHELKHQDKQQVRAFYAQFVGQVIVGLEASGYSSWFERMLEELGCQVWLGHATEIRRRARWRQKNDRRDAELILDLMLHNEFPRLHRPAVQSREVLRMLRYRQKLIKMRTMSKNSLQAIALQAGLAKGSRLFTKAGQQELGTAEMSPVLHWQREHWLQLMEPLNQQLLETMVWFKSQSKDDDSITRLRTHPGIGLLTSLCIVHTLQPVSRFRNTRKVAAYAGFDPIERSSAERKCFLGISKAGSRLLRYLLVEAAQTAVRKDEDLKRFYQRLADRRGRPKAKVAAARKLLIRAYIMMRDEIDYAEFRHRAVAARLARRSQGPANVPEVLIGQPASPEQ

SEQ ID NO: 116375 - protein, 461 aa, unidentified
MRKKRAASKRKESVQKNVDWKALEIVHPDAAGIDVGGSEHWVAISPDRDPEPVRRFGCFTADLREMAVWLVEKGVRSVAMQSTGVYWMPVLEVLEQHGLEVYLVNARHTKNAPGRKSDVQECQWLLKLHAFGLLNNSFQPTDEIRVARTLWRQRGNLVADASSTIQRMQKVLIEMNVQLSNVLSDISGVSGMCMIGAILEGERDPEVLMALVQPGVKATPEDILKSLEGNWRKELLFVLRQQVELYRMYQEKIQDCDQQLREHLESFGSVVDLQARPIGPKPKGKKGSKNAPQFDLRTELYRITGIDWAQVNGIDVLTAQTVIAECGADLSAFPSEKQYTSWLGLVPTNEQSGGKILRRRTRKVVNRAAAAFRNAATTLLRSESYLGAQYRRLRTRLGAPKAITAMARKLACLFYRLIKHGQQYVDKGNEYYETKYREQQIRALAKRAQKLGLELVIPKTA

SEQ ID NO: 116376 - protein, 378 aa, unidentified
MDRATNSTAPADRLFCAVELSKNSWLLGIQFPDHQKASVYPIKGGDSEGLMAKLVAACERWTKVSGKKPSIILCYEAGYDAFWLARFLKARGIDCLVVDSASMQVNRRSRRAKTDRIDLSKLLRALIAWCGGERHVWSVVRIPSVDEEDLRRSHRERSRLITERTAHVNRIKGLLFAQGIRGINVKARYKTLQIDKLATGEGRPLPPRLAQEITREIERLRLVQQQIAAIEHERDESPTTCKETEKKRAQLLLLKGIGPTGSAVMAREVYYRQFSNRRQVAGFLGLATSPYDSGQMERSQGISRAGSGPVRSTMIQIAWLWIKHQPKSAIAQWFVQRTEGQNGRIKRIMIVAVARKLAIALWRYLEQGLVPQGATLMR

SEQ ID NO: 116377 - protein, 346 aa, unidentified
MPIVGGLDIHRKQITFDYLDTVTGEVNRGQIAPADREHVRAWLARFAGRGDAAFAVEGCAGWRYVSEELAAAGIAAHLGEPADTAALRGRKRHAKTDPLTDARHLRTLLAEGRLPECWIPPAHILEYRALLETYHDLRTAHTAWVQRIHAVFFHQGAPPLSDGALRTEAGLAKLRAAAAAHLPAAGQQQVATAVDMIAATEARMGPLRRQLRDAAAHLTGAKVLAARLYGVGPFTALALTCWLGGADRFSSSRKAVRFTGLDITVHSSDRKGPPGRLSRQGPPVLRWAVYEAGKTHARTAAPDHACYAQVKDRKNSKRACLSEARKIVRQACHILTELGDGALTTI

SEQ ID NO: 116378 - protein, 338 aa, unidentified
MELYAGIDLHSNNSVVTVLDEKDRTVYARRLPNNLDAIVSALRACAGSVRGVAVESTYNWYWLVDGLQAAGFTVHLVNTAAVKQYDGLKHGGDFSDARHLAHLLRLGILPVGYIYPREERAVRDLLRKRSQLVRQRCTQILSIENLMARNLGSRATGNAIKRWEPENINAMELLDEQKQALKANLAVMKCIDCQVNQLERSILAKVKLREDYQALKTVSGIGEILAVTIALETGDIGRFAGAGNFASYARMVDSRRESNGKKKGVGNVKCGNKYLSWAFIEAAHFAVRYDATIKRWYQKKCAGSLSVVAIKAVAHKLARACYHVIKDGTPFDAGRAFS

SEQ ID NO: 116379 - protein, 449 aa, unidentified
MREPQEIEDEEHEQTWERVAAVDVAKASGTVCTRVAHPSRPGRRLTKVWEVPATTGAISELAGQLVGLGIQKVTVESTSDYWRPFLYLLQAGGLSVQLVNAREVKNVPGRPKTDRLDAVWLAKLTERGMLRPSFVPPAEIRRLRDYTRLRADLTEERARHYQRLEKLLEDALIKVSSVASKLDGLSVRDMLEALIAGERDPRVLAGLARGKLKAKHGALAEALAGRFDDHHAELARMLLDQIDALSGQIGTLTARIEALLAAIPAAQGVDADGTTGPGAGSGPDAVVLPAVARLDEVTGIGRGTAQVVTAELGLDMGVFPTPGQLVSWAKLSPRTLQSGAKTRGGKTGRGNPYLKGVLGEAAAAAAKTDTFLGERYRRLVKRRGKRKALVAIARSILVIVWHLLADPTARYADLGAGYYASRIDKDKRARNHIRQLQALGFTVTLTPAA

SEQ ID NO: 116380 - protein, 433 aa, unidentified
MELSKCNETVKVSVGIDVSKGHSTVSFFREGDKSPSKPFTIDHDLPGLKFLERKLDHYKTNGTLRIYMECTGRYHLGLASSLQKDGYTVYTVNPKLLADFHDDSLRKPKTDSIDAQKIASYGIQYWNKERRPFSQMDSKRECLKECERQYKLYTDECVTFTNNLLSLTDLTCPGVNKLFSSNPNQNGHLKWVDFVNTWWHVDCIRKMSMNAFSNRYCKWCQKHGYEFSEDKAEDIMNWAKKALAAMPKSIDIKKTIQIAVNAINELLETIQDTKEHMNQLASQLPEYPVVMKMDGVGEVTGPIIMGELGDVTRFTKRSQITAFAGVDPQKHESGDDKPKSSRATKIGSPELRRALYLVMTSKLARKPQGDRVYDFIVKKRSEGKKYLVYMTAGANKFLRIYYGTVRDYMQNKQNSLFIQDKTSAGQMNVSKTA

SEQ ID NO: 116381 - protein, 346 aa, unidentified
MNITTVGIDSAKNVFHVHAIDERGKVLVRKQLKRDQVGRFFANVPPCLIGMEACASSHHWGRMLQGFGHTVRLMAPQFVKPYVKSNKNDMADAEAICEAVTRPNMRFVPIKSVEQQSVLSLHRVRQGFVKARTAQANQIRGLLGEMGLVIPQGIRFIAQRVPALLEDASNELPLAFRQLIERLTNHLKLLDEQVDAIHSQIVAWDRSCELSQKLQKIPGIGPLTSTALIATVADVHSFKSGRQMSAWLGLVPRQKSSGGKPTLLGISKRGDVYLRTLLIHGARAAIVAAKHRTSGRESSWLAKLLDRRHLNVAAVALANKNARTVWALLAHGRDFDPAYKPVRAVA

SEQ ID NO: 116382 - protein, 367 aa, unidentified
MKKVSTASGKATKNFPQPKLTIGLDLGDRSSWYCLLDEVGEVLQEQKLSTTPKAMREVFGTLPRCRIALETGMHSPWVSRVLSELGHEVIVAHARTVRLIGESRKKDDRLDAGTLARLARIDPQLLCPVKHRSAKAQADLTVIRARAGLVRARTALVNTARGLAKSYGERLRGCNVRNMNPEKAKGLSAELQRALAPLLAGIESLSERIREYNQRIEQLAQQSYPQVALLKQVKGVGTLIALTFLLTLEDAHRFRKSRDVGCYLGLQPGRRNSGQSEPQMHISKEGDPYLRTLLVQGAQHILGPFGIDCDLRRWGLKLAERGGRNGKKRAIVATARKLAVLLHHLWVSGEVYEPLHNSQQSSLALAA

SEQ ID NO: 116383 - protein, 463 aa, unidentified
MAARKPKRMGAQTVEDEDYQLRYERVAGIDVAKGSAMVCLRLPPGPGKARRTSRTWEVTARVPDIEALAAELKAAGVERVSMESTSDYWRIWLVVLEGAGLDVQLVNSSQARNLPGRPKTDKADAQWIARLTEMGLLRGSFVPPPEIRALRQYTRQLVHLSQDRTRYWQRLEKLLESALCKLTSVVSGLAGSASCLAMLEAMIAGERDPQVLAGYARGPMKSKHAALVKAFTGMQFGPEHAFSASSDLRMIKMLDAEITGLEQQVRDHLAAIPAAWGTDADGVTGPGAGTGPGAAVLPAVDRLAEIPGVGPATAAGLIAEIGLDMSRFPTPHALVSWVGMAPVPNQSGPRKGRGKKGHGSSYARRYAGQAGNGAARTDTFLGQRHRRIRSRPGGGGWKKANVAVGRSILIIVWHLLKDPATRFTDLGPDHYARHTDTNRKARNHKRQLEALGYDVILTPREVA

SEQ ID NO: 116384 - protein, 386 aa, unidentified
MRRDSPLSDNGIKCQDWFVEVNLTFERGSTMSEITRIGVDLAKAVIQVHAVDAGGKLVTNKQLSRDKFLSWCAQLPAGCLVAMEACGGSHHWARKLIALGLSVKIIAAHLVAPYRLQGKGGKNDANDAAAVCEAASRPNMRFVPVKNTVQQGILCVHRLREGLKEERTASINRIRGMLTEFGLVASKSPEKLREKLTDMLEDATNELSGLARLVIEEAYAQWKDLEKRIEWCDERISAHVKDDAQAKAAKELMGVGPVTASAVVATVGDFNQFKNGAQFGAWLGLAPRQNSSGGKNTLGGITKRGDTYLRMLLIQGAKSAVMTAHKRSDPISKWLYELREKSGWQKAAVAMANKNARILWAMMTKGCRFDPRHVSVKPAGPTTAMV

SEQ ID NO: 116385 - protein, 358 aa, unidentified
MKATNLKQKVDFTGKNIFVGIDVHKKNWSNTLYYDQQYLRSYTQPGSVEVLVNFLKKEYPNANYLCGYETGFSGFEIQRKLESQGIKCVVLNASDIPQTVKDKLQKTDRLDSRRIAHALATNSYNPVYIPDIESEADRSLVRYHFILVKDITRCKNHIKSLLFQFGVTLPEQYEKRWTKGLVKWLKECDDIKGNARVRLDLMIEQFEKVKTVYLDTNRRIAELQKSPKYKKSIEILTSVSGIGPLIAIVFMTEIIDINRFSNMRKLNSYVGFIPMEHSSGEHEIKGGITVRTNKLLRTLLIEASWIAIRQDPTLTYTYNELIKKMTGKRAIIKIARKLLSRIRYVLINETMYEKGILK

SEQ ID NO: 116386 - protein, 473 aa, unidentified
MSKGSGSGMTRGDRRRNARRERLRGLLPRDGAVIGIDLAEDKQAIAVIDHDVRVIARKTVRMKAFRLGEALDWAAGRARAKGFVHVTVVCEPTGARWMQVQRLCAERGLPLVCIQPLMSHIAREQQDYTTHKTDESDCVMIARLAVELHCYIPEELDEAWAHLRHLGRRRAQLVTAATASAHRIQDFLSVAWPTVMETCAQPLLSRTWLAALQVVTSRCGAQPGRLAEMGEEAFTALVRGAAGDWGACKAWGPICRRIFAALTDTEGVVAWSRRGLLRRVADELGDLQRIRAQLRAMEADMVAVLDELGLSRLADIPALTAVGAAAILAETGGPHRYDSSSSLVKHAGLSPSDNASGAFLGDAHISRRGRPGLRLAAWRMVWPMLQFNPVMAAKYQAMTQAAGDPAEHTAAGTQQASAAAAAARSRRAKARVACAASLLRWIYSMVVHGTSWDAAIAAGETARQRGPRPAEAA

SEQ ID NO: 116387 - protein, 323 aa, unidentified
MNVTGPGVGGGGVEYFVGVDVAKHKLDVAVLPTRESFTLDYTEEGLAALVAPLAALKPALVVVEATGGYERRLAGELADAGLPVAVVNPARVRHLARGTGTLAKNDRLDALNHALFAQVVRPAPRGKGPGRQAELDALVTRRRQLVGMITMEANRLKQLPAGRARDSVAKVRTHLAAERALVDRAIFELLRSDDGWDGRLGLLTSVPGVGATTAATLLAELPELGGLNRRQVASLAGLAPFDRDSGTLRGRRFIAGGRKGVRVALHMAALTATRCNPAIRAQYQRLRAAGKSFRCAMVACARKLLTILNGMVARNERWKPQPA

SEQ ID NO: 116388 - protein, 366 aa, unidentified
MKKTSTVRVRGNMIFKGHQLTMGLDLGDRWSFYCVLDEAGQVILEQKLSTTPEAMKQTFARIPRSLIALETGTHSPWVSRLLRELGHEVLVAHAQKVQLISKSNRKDDRHDARTLARLARIDPELLGPVRHRSAKAQIHLTVIRARAELVSARTALVNTARGLVKSYGERLPKCGTQQVSRELAAALSVELREVIEPLLKEIESLNQRIQEYEVRMEKIARESYPQVELLKQVKGVGTQIALTYVLTLEDPHRFAKSREVGCFLGLRPGRRDSGESQPQRHISKEGDPYLRTMLVQGAHYILGPFGEDSDLRRWGLKLAARGGKNAKKRAVVAVARKLAVLLHRLWVNGEVYEPLHNSQQAMRAVA

SEQ ID NO: 116389 - protein, 343 aa, unidentified
MKHYAGLDVSVEETSVCILDETGRICREVKVTSHPEDLLRILQDPIWHFERIGLEAGQLSQWLFDALADAGLPVVCIETRHAKAFLKAQVNKSDRNDARGIAQMMRVNLFRPVHVKTLTSQKRRVLLTARKLLQEKAIAIENDIRGLLLNFGLKVGVVGAAKFEERIHELIRDMPDLAEIVERLLEARRRLREHFAALHRKLLDLARGDAVCRRLMTIPGVGPVVSLAFVATIDTPARFRKSKAVGPVLGLTPVRSQSGNTDRVGRISLCGDGMMRTLLFEAAQTMLRQTTRWSWLKAWAMRVAQRRGSRKAVVALARRLAVIMHRMWCDGTEFRWTREAPVA

SEQ ID NO: 116390 - protein, 402 aa, unidentified
MNFSVGLDWASQAHAVCVIDGTGRVRWKESVEHSAKGLAELLRQLARFGPPASLSVAIERPSGLVVDTLMDAGYRVVPIHPNALKASRPRYSAAGSKNDPGDAFILADLLRTDGHRFRPLQPLSDETRALRALVRGRDDLVAERVALANQLRALLDRFWSGAAAIFADVDSPIALAFLSRYPTLHSAERLGEKRLARFLVQHAYCGRRSAAELLARLRSAPIAQMGELEAEASGEIVRALVTVLLPLVTQIQQLSAAIAAALPQHPDGPLLQSFPRSGSVNAAQILAELGDDRTRFPTDEQLAAEGGVAPVTHESGKYRGVAFRWACNKRLRQALTTFADHSRHASPWAAAIYAAARRRGCHHPHAIRVLARAWVRVLWRCWQDRRPYDVTLHRAAQRLAAA

SEQ ID NO: 116391 - protein, 363 aa, unidentified
MRKKLRLGYAGNQAERLTPAAGTEVKIAIDLSRTKWVYCVRWGGQEQRRLTTPAQLEHVQSLVAQYQGCPVHIAFEACGFGYEIAWWAQEQKIAVTVIAPSRTERPPGLQVKTDRIDVGKMVRKLEQGELQGIYVPSRTEHEKRQVVRTYGQALKERKRAQQRIRSLLQENGRLGPLPTAGWTLYRQWLDTQQVAQEVKLSVDALLAMRATAELQAKILKARLLLMAASKPYGKIVDALCTHPGVAQLSAIRFVLEIGDIHRFATADSIGHYLGLTPSEYSSGELVQRGPILKCGPGTLRAAMLQCGWASVRKGGEAKLKEMFERLVPRAGKKRAIVAVTRRLVVRLRARWLAALEEAVAAAT

SEQ ID NO: 116392 - protein, 340 aa, unidentified
MSEDIIIGIDLAKNVFQLHGARRDGQVLFRKKLNRSQFRAFCEKHPKCLMAMEACSTSHYWARELQEMGHDVRLIPPVYVKPFVKRHKNDAADAEAITEAALRPSMSFVAPKSADQQAATMMMRTRDQLLEQRTATVNALRGHLAEFGIIAPVGIKNVVKLRAILADTQDITALATEMAKLHFDRIDRLSCEIEALTAKINTRCHGSDTAKRLRSMPGIGPIAAMVIEAFAPDMTHFEKGRDFAAWLGLVPKQHSSGGKTRLGQTSKMGQRDIRRVLITGAMSRIAGYARQNSRAEPWLQDKLDRKPKMVAAIALANKMARQVWAMITREERYQPPAAAT

SEQ ID NO: 116393 - protein, 355 aa, unidentified
MSTMPCIDGEVILGVDTHADTHTAALVDPLGRTLATTTIRAGRRGHRALLRWACLRGQVKVAGVEGTGSYGAGLARFLALEGVEVIEVTRPARKGRRHLGKSDARDAEAAARAVLSGEATAMPKPRNGIVESIRVLRHTRASAVKSRTQAALQLRNLIVTAPDELREPLADLTTKQAVTRCARFRRSDRLDPVAATRKALRTLARRWQALDAEVRELDRDLKRLTAQAAPRLLAQPGIGPENAAKLLIVAGDHPDRLRSDAAFAALCGASPVEASSGKTRRHRHNRGGDRQGNCALWTIANNRMLHHPETRAYVERRTAQGLSTREIRRCLMRHLTRRLYPLLRADLTDAATAST

SEQ ID NO: 116394 - protein, 367 aa, unidentified
MKQQTSATSETLIEGRNIIDFTGKTIYVGIDVHQKDYQVAKVYDGICLGNHRMAANSEALIEHLRSHYQGADFKCVYESCAWGFNLQRKLTAANMECMVVHAADVSTNDKERKRKTDKVDALKLARNLAAGELKAIHVPDETIQKERNLIRYRTRLVGDINRSKNRLKSLLKYQGIEIPAPYLKNNWSRNFMAWVEDQAAKDDLLKDSLLLMLEQMKLLRQLLLKIERKLGVLRKGKYESKAKLAMSVPGIGPLTAMLFLLEVGDVKRFKGFDTLNDFVGFCPDTASSGETDRDKGISARRHKQLRSALVEAAWQAIRIDPAMMNTYQMLTKRMKGSQAIIRIARKLLRRLRAVLLTGIEYQKGVVA

SEQ ID NO: 116395 - protein, 399 aa, unidentified
MAAPSLWAGIDAGKLDHHCVLIDASGERLLSRRVRNDEAPLTALIDDVIALADGGLVQWAIDLNGGGAALVISLLLARDQHLLYIPGRIVHQASAAYLGDGKTDAKDAAIIADQARMRRDLPEFRHRDEFTVELRTLCARRTDVAADRNRAINRLRAQLLEYFPALERAFDYSHRKGALILLTGYQTPEALRRIGRTRLEKWLRGRNAYNSVAIADRAIAAANAQHVVVTGQRLGSTIVARIAQQILDIDAELSDLDDMIEERFSQHQQATLIRSMPGFGPLLGAELVAATNGGLDSFHSADRLAAVAGLAPVPRDSGRISGNLKRPRRYDRRLLRVFYLAANNSIKTCPQSRAYYDRKRAEGKHHRQAILSLARRRVNVLWAMQRDNTAYQSTAKTAA

SEQ ID NO: 116396 - protein, 334 aa, unidentified
MNFKNFIGIDVSKGTFDIALLRESAGNSIVSAQYSNDFHGLVKLEEFVKKQGLNMDETLFCMEHTGIYCRLLSHYLVENKYHVWLEMPVQIIRSLGIQRGKNDRVDAIRIAEYACLKKDKAVLWQPPREIVIQINDLLTLRDRLIESRKSLKQPIKEFIDAGFKDTAKLIENMCCNTLKTLDKEIEQIEKELDKIINKDSNLKKLFKLATSVPGIGKITAFTLLYFTNEFKLYTNANQLACYCGVAPFERTSGTSVKGKSRVSSFANKRLKKLLHLVAMSTISCDKQLSVYYQRKVNEGKNKMLVINAIRNKVLHRLCSVIKRGTPYQVEYQIA

SEQ ID NO: 116397 - protein, 356 aa, unidentified
MGNGDRSRRFARIEKDRLRIRNRGIADYAVSCFTQQHRAVNERMKSVMNTIRNLGLDVHANTIEVAIAEPANGEVRSIGMIPNREESIRRLIKKLGPPEQLRACYEAGPTGYVLYWQLTALGVHCDVIAPSLIPRKPGDKVKTDRRDALKLARCYRAGDLTPCWVPDATHEALRDLIRAREAAKRDQQRARRRLATFLLRHGKRRPDSLKTAWSTHHMKWIKSAVHFDLPALEATLCDYVHEVEHVALRIARLDQAIREAIAAAPERMREVIQALQALRGIAEIGAATLASEIVEFSRFRGAKQLMGYSGLVPSEYSSGRHRYQGSITKTGNAHLRRVLVEAAWAYQFRPCWVVIC

SEQ ID NO: 116398 - protein, 370 aa, unidentified
MNNSITHVGMDTHKKEHKIAVHYPGQAEIVEFVVQNTARDIKKMAKKIARRAPGKVAFCYEAGVCGFALKRRIEDIGCQCSVIAPSLIPIKPGQRVKTDRKDAVKLLGLFRAGMLTEVAAPDEEQEAARELTRLRETAMINLNRIRHQLLKLLTRHGIVFTDGDHWTQRHISWLRGVEFTSPMLADVFDSYFTEMLHCKGRLEALDKEVERLAQSEPYREIVGLLRCFHGIDTLTAITVLAEIFEFGRFESPEYLMSYLGLTPSEDSSGDKQSRGSITKAGNRRVRRLLTESSWHYRHRYSPGQALRKRRRGQPQWAIDIADAAGRRLSKRYRYLTNRGKLSCKATVAVARELSGFIWAMLNEYEKRKAS

SEQ ID NO: 116399 - protein, 371 aa, unidentified
MDESTRTLYVGLDVHKDSIAIAYAPEDRGAEVVSLGGIRTRQYDIDKLIRKLQSKSPTLVFVYEAGPCGYWLYRYLTGQGLTCHVVAPSLIPRKPGDRVKTDRRDAITLARLMRSGDLSSIYVPGIEDEALRDLSRGRDDAMQDLKRSKRRLKSFLLRHDIRYEGRATWNPAHLRWLAEVVCPTPPQQIVFQEYVRAVTEQQERLQRVERELHEAVKGWRLYPVVKAIQALRGVELTGAVILLTELGDITRFDSPRQLASYLGLTPSEYSSGERRRQGGITKAGNSHARRALVEGAWAYRYPAKVSRHLQLRLEKLPAEVQAISWKAQVRLCKRYRQLSARGKHVNQVVVAIAREMAAFAWAIARLVPLAS

SEQ ID NO: 116400 - protein, 380 aa, unidentified
MEYCTTIGADVSDRTTKICVMTKAEGGERHIVVETTCATTKAGFEEALSKFDRSWPVVFETGTHCRWMDRLFKEMGFKTIVGNPGKIPSITKSNTKNDRNDARELARLAIADLAMLHPVFLRDEVYQQMLRFHHARNMLISQRTQTINQIRGFAKSMGHRIECSSTEKFHELSKADWPRELEECAWPLMGVLKTVNLKIKAYDRLIERLAERPEFKPMVERVRVVYGVGVIGSTVFVAAIGGRPDRFDHTRDIGAYLGMIPKQDQSGDDDKQLHITHAGADIVRATLVECAGVVMMSNAKDTDLKLKGLRIAMHGGGIAKKKAKVAVARALAVTMLALLKDPEREYVPLSEEGRKGFERYRAEMEYLVMSKATKRGKKVA

SEQ ID NO: 116401 - protein, 350 aa, unidentified
MTTMTIGVDLHKRESQLCFLAADGSVSERRIVTSRERFTAVLGDAPKAQVLLEASTESEWVARHLESLGHTVIVADPNYAPMYATRTRRVKTDKRDARALAEACKLGAYRPAHRLSDARRHVRAELAVRDALVRTRTRYIALAKALVRRDGLRVAGSESERVAERIAALALSPTLAAELAPLFRVLAPINAEIAAADRRLLAAMATDPIVALVATAPAIGPVTACALVATIDDITRFHSAHQLEAYLGVVPGERSSGEQRRVGRITKAGNARARWLLIEAAWRILRSRSDETAALRAWTLAIATRRGKRIAIVALARRLAGIVYAMWRDGTPYTATKLRMPQPRRTPMTA

SEQ ID NO: 116402 - protein, 351 aa, unidentified
MHYIGVDYHKKYSYVVVKDEQGRREQKGMVNNTKEELQEFLKPYQPGRAVLEATRNWGLIYDWLEEILDDVALAHPLKVRAIAEARIKTDKISADILCDLLRSNLLPEAYVPSKETREAKSTLRQRMFFVRVQTMVKNRIYDILDRHPEIACQAPDVSDLFGASGMAWLRQTVLPGQDNRLLASELELLEVLKRKISESNGMVKELARGDKRIKLLRSIPGLGPFFSVLVAKEIDDISRFRDEKKLCAYAGLVPSTYASGGKVFHGRITRTGNKWLRWAFIEAVQPAISCDADLFAYYQRLKMKKGANAAKVATARRLLIIVYRVLRQERLYERRNRRAIRRLAPAALITS

SEQ ID NO: 116403 - protein, 331 aa, unidentified
MKQIYGIDLSKEKFNVNFINVNGILKDAEIKNNYSGICKFLDSIDQDVILCIEHTGIYGDLLIFLANCLSIPICAIPGYEIKHSLGLQRGKSDPLDASKIRQYGERFRDKLVEARFCTEQMHELKELQSLRDMLVKQRKMLRTHEKEKDRAPYCSKMAREISEVVLRNLDDQIGETENQIQEIINSTEELANNSRLILSINGIGPVTTNELIIKTQNFKKINTARKASSFAGVCPFPNSSGKMVKKAKVSPMGDKKLKSLLYLCASSAIQYNKDMKYYYQRKLAEGKPSYLALNNVANKLLRTIYAIIESRKMWDPMHVCLDPRNSDKKVA

SEQ ID NO: 116404 - protein, 343 aa, unidentified
MNLTQNDKIEQIKDETLVVGVDIGKETNYARALDNRGRELKKHVKFTNSREGFRAFDKWVSEISLANEKTDVIVGFEPTGHYWFSFGDHCKKLGHKLAIVNPMHVKRTKELDDNSPTKNDKKDPKTIAMLVKDGRYREVYIPEDIYQELREAVYEKERLTDLTVSINNQVIRWIDIRFPEFTKVFSKWYGHAALMALKNFPTPEKVLKAGVDNIVSKWKEEISRAVGRKHAERLVNAAAESIGRKTGTISSEASLKNLIDQYELIMRQMKEQEALMLELLLRVPNADKLLGIKGIGLIAVATFVSEVGDIRRFESPKQIIKLAGMNLKEDSSGKHKGKTFMFA

SEQ ID NO: 116405 - protein, 322 aa, unidentified
MTSSKLATRIIGVDVSKDKLDVWDPEGKITKVLRNSTSSIVKHIINKIKEVSEAFVVCEATGGYERTLVKALNKAGIRVCVANPFQVRQFGKGLGLLEKTDPIDAKLLCRFGEGVELWPTAPKTTEQDHHEALVRRREQLLKLISQEENRLAQAWDKSVARMVREVINKLKKQQKQIDRLIGAFLKKEAETNKTVDVLQSVPGVGPVTTSTLICDLPELGKLNRGAIAKLVGVAPFANQTGKRDRRRTIFGGRSHVRRVLYMAALVGTRQNSVIKAFYKRLLAAGKEKKVALVACMRKLLTILNAMVRNNEQWRIEKVVTDA

SEQ ID NO: 116406 - protein, 425 aa, unidentified
MKNTFLSTLFVGIDVSSKTNVLCALDFQGNKLLNEKVLNNRPGAIAILDSILGCLSSNDLKYVVIAMESTSFYSTHVANFLSSSEELLPFKPLVYCLNPKTVANYRKSFVDMDKTDPLDAYVIADFARCGRITSSPWRGAQFLALQRLTRHRLHLVECITREKAYMVSNIYLKFSELAVLDKGDKPFSNTYGATSAAVLTDFLSLDDITYAPIEDLVAFVKEKGKNRFSNPHETARILQKAARDSYRLDKVLYEPLNVAIASSFNVIKAMENEVKAVDKAIEKNIKGLNTAEYQSLTSIPGIGPVLASGILAEIGTIISFGSNDALAKYAGLTWRVNQSGDYTSDNTKMTKTGNRYLRYYLIEAANSVKNHIPEYKDYYYKKYGEVTTHQHKRALALTARKLIRLIFGLLTRNQIYSSDKVGEIK

SEQ ID NO: 116407 - protein, 344 aa, unidentified
MDHFAGLDVSVKETSICIVDDTGRIVREVKVASEPEALLKVLGNPAYRFKRIGLEAGPLSQWLFGALAEAGLPVVCVETRHMQAVLKAQINKTDRNDARGIAQMMRAGLYRPVHVKTLRSQKLRMLLTHRKLLQSKAIAIENDLRGTLRNFGLKVGMVGKVRFEARIQELVENIPDMAVLVESLLIVRRALREQIVILHRRLLAIVRDDEVCRRLMTIPGVGPVVALTYRATIDVPARFRKSKSVGAVFGLTCSRYQSGEIDWSGRISRCGDEMMRVMLYEAAQSMMHSKKWSWLKAWAMQIARRRGMKKAIVALARRLAVIMHRIWVDGTEFRWTREQAAAAA

SEQ ID NO: 116408 - protein, 352 aa, unidentified
MHMIAFDSHKRYTVASVQSMDGQIIKETRINHGRGSIVRFLSQWDKGSPVAVETIGNWYWIVEEIEHAQMRPRLVHARKAKLMLGMINKTDKLDARGLNRLQQTGTLPTVWIPPLEIRDKRELPRTRMVFAHQRTRLKNRIHSVIDKYGLQQKFTDISDMFGKAGREQIQKCLGLLPEQTRYALETLLHHLDEVERQIGKIEKRMKGVFHPNEETKLLMTMPGVGFILSVVISLEVGDVGRFNGPERLASYSGTVPRVHASGDKVRYGRLRPDTNRYLKWAFSEAGNSVAVNRKKWPYRHVSKVYARVRHRQGHAKAVGAVARHLAEATYWILTKKEQYRERGVSRVSRTEA

SEQ ID NO: 116409 - protein, 492 aa, unidentified
MNQPTSIYANQHPKIRKILEAAGSPSRALCVAIDYAKAQHVVLFCNGLGDVLKKPFAIDNSPQGLEKLLEEVRSTCSHRGIKTEHVFFGGEDNPPYVQNFIQALVDAGYWVARVNAWEAKHQRDNHQASTDNLDLPGIAKTLLHKSSYSAQEESKIILAIKELSRTRAYFVGQLSEQKFQIHHYVNRLCPGFLNQKKSGIVPFSRTSLALLGQRFSAGRIRSWPRASLVKFLQRQGQHEPEAAADHLKTLAGQVLDPSPDMVSCWQNSLGQYLLQYQSLAQSVSSLEKELARSLAQTSGALLTSISGIGIVLASGILAELGDPTAWRAVRCLCSYSGIVPRTSQTGGPDKPAQTGKVQRRCNRRAKNWIVQAGSLTGRCGPAELKAQHQELERNGQHADFIMSKRLLRIFKDLMRRGALYRPKPLLAPETPSADLVAYYLALWEQILTKWQGRIEWEVLVDPRYPVGQWRQMAQQLYKISLPVPKIRTSKAA

SEQ ID NO: 116410 - protein, 355 aa, unidentified
MNDAKYIGLDVHQATITVAVRDSAGKLVIEAILETKAETILQFLRGVRGSLHVTFEEGTWAAWLHDLLKPHVTRVVVCDPRKNALLKVGNKNDRIDARKLSELLYLNKLSPVYHGEQGIRTLRELARSYLTITRDLTRVMSRLKAIYRGWAIPCAGQQVYAPHYRGEWLAKISEAGVRRRAELYYLQFDTLAALRQGVRRELLAESRKHPATRLLRQIPSIGPIRAALLIALIQTPNRFRTKRQLWAYGGLALRTYTSGEYRFVSGELKRSKKVLAVRGLNLNHNHDLKNLFKGAATRAAATAGPFQNFYQACVARGMKPHLARLTLARKIAAITLLVWKKGERFDAEHLKQQAA

SEQ ID NO: 116411 - protein, 414 aa, unidentified
MSFIGLDVHKKFINGAVIDAPSDYAKRTFTIPTDKESITRFASSLSPTDSLALESTTHAFPIANLLRNNGNGASVVVSNPMKTKVINESKNKSDSVDALALANLLASGYLPVIWEPDSETESLRRITSYAQAVGRDKTAVKNRIHSILHRNLIVYSQFSDLFGKKGLGFLASLPLPENERIQLDEELDHLDYLDNKFLNIKKRMAKVSVVDTHIRRLMTIPGVDYFIAFSLKAAIGNDISRFCSPKKLVGYFGLCSSVYQSAGKCYTGRITKRGRSHARWVLVQAAQSVVKQPSPLRAFFLRLKQKKGRNKAIVAVASKLTRIIWHMLAHGEDYHYSPPLRTKEKLAKLRIIATGEKVKSGPKPGAVSAGGRPAYLKARKNDKISGKAAEAGYVEFIKERYFSKKSSSRSKLLS

SEQ ID NO: 116412 - protein, 342 aa, unidentified
MSFYCGIDLGARESQICVINKRVKKVFEEKTRNNLEHIKQVLAPYKADLQIVVESTFNWYWLVDGLQAAGFKVVLAHTLGLHMITAAKVKTDRRDAFALAKLLLAGVIPTAYIYPAETRPVRDLLRRRARLVQVRAGEYGSLRRLLLRQGILSRQQQEIKRAEEADLEKWFTHPLVRLHASQELERISLYSQQLAKLETTILEQAKREWAFTQRQQLPEIGPIIALTIFYEMGELGRFATAKDFSSYCRVVPGVAQSGQMNRRGRGSKQGNPYLKWALSQAAVHAVRCYPGVRRYYERQLQRHRGRARQMVVYNIIAHKLAQGVYHVLKERTEYREELLFGR

SEQ ID NO: 116413 - protein, 412 aa, unidentified
MEAVYQRCVGIDVGKAELKVCLRVQGRGSRPTKSTVTTWLTTTPQLIRLRDRLVAEKVERVVMESTSDYWRPVFYVLSEQLDVILVKASDVKAIPGRKSDVSDSEWLADLGAHQLVRASFVPLEQQRQLRDLCRARARLLDERTREVQRLEKNLEDACIKLSTVASNLQGVSARLMLHALIEGRDDPAVMAELAKGKMRAKIAELTEALTGRVNEHHRFMISFRLRRIDAATEDLAVLDARIDELIQQAPGFSAARDLLLTVPGFGVRGAEDLLAEIGPDMSIFESTEHLASWVGVCPGSHESAGKKKNVPVRPGDRYAKRALGMAAKNVIRHKSGFLSVRFKRLAARRGFPKALVATEHAMINAIWHMLTTGSSYHDLGTDYYIRRTPEKVIRRKIADLEAAGYTVIKTAA

SEQ ID NO: 116414 - protein, 355 aa, unidentified
MNQEKYIGMDVHDATISAAVKNAQGKLLMECVLETKAATILEFIQGLRGTLALTFEEGILAAWLHDLLKPHVSRLVVCDPRKNALMRDGNQNDRADARNLAELLRTNQVKTVYHGKQGIRTLRELGRSYLALTKDSTRVMNRIKSVYRSWAIACAGTSVYSRRRRAEWLAKLVEPGVRIRAEHLYQQLDSLEPVRQAARRELLREGRKHAAVKLLRQIPAIGPIRSALLVALLQTPHRFRTKRQLWAYSGFAVQTYDSGEYRVARGKLHRNRERITVRGLNRNHNHDVKNLLKGAAISAIGHPGPLQDFYAARVEKGMRPSMARLTLARKIAAIALTMWKKGVNFDPKQLQPQTA

SEQ ID NO: 116415 - protein, 371 aa, unidentified
MNTVIHIGIDVHKDTYSLCSFNFSSQKSFGQTRIASKSALVVKYVRNLQKEHPDCTVLCGYEAGPTGYGLYRDLAKADIPCVIMAPTTLPKAPGNHVKTDKIDAEDLARHLAWGTYSAIHIPTPQDEAVKNYTRLRNTRKKALGRAKQNLLSFLLRHGRCFTEGKNYWTIAHYRWLKGQLFHDEVDQETFNEYLQEVHDQQEKVDRYNQRIEELASQDAYHDRVSKLRCFRGIETHTALSFISEIGDFSRFANPQQFSSFLGLVPTENSSGQRERRGSITKAGNERLRLLLIEGANSTLRRNIYGKKSKRLLARQKGNDPDVIAYADKANRRLHRVYNNLVARGVHHNKATVAVARELSCFIWGMMNNRIN

SEQ ID NO: 116416 - protein, 579 aa, unidentified
MATHACLFRFSYEELFMNATIAQIEHIGVGVDTARYGHRVTFVRRDHQPAAPPLTVMETRDGYQRLQSQLERLHRQYPQAEFHLHIDAAGQYARNLEHFLRRLNLPMVVSVGEPKRNKDYQNVFYPKRTTDDTESQAMARFGVVEQPAATYDVADEFYLLLEVAGRLQAQIRDSTRAINRLHNLLARVFPELATLVSNLGAQYVLILLKKYPTPQRLAKARIDSLKKIPYLKPELAEKILAAAKETVGSLHGELAESLVLQQVEQVEQTLANVDRLEKLLIQAFKALPRTGHVQVPSIPGIGLLTAAVLVAKIISMDRFVTPEKLVGYFGVFPQELQSGVDPEGNPLPGNKKQMSSKGCDLVRRYLWNAAKSAIQCNPAVRDLYARLRAKGTRGDVALGHCMRKLLHQVFGVWASDHPFDEQRSQPQKASPANQPDSNQPKGDCTSSPAETKTAAGHKRETCPQKKVVTAANSNVEPSPQAVKRPPADDGTVDYGLLRQQVTMSRCSLIWATLVSCAGAPRNVAVRAHCMANSLAADRPFRSIFKKMYFGVSIAIVTPATSSISGVTTTTYRSTKRPKT

SEQ ID NO: 116417 - protein, 497 aa, unidentified
MTTKSTIYSRCNPQLLKLFETAGHPAKVLCVALDYAKAQHTALFCNGLGELLKPSFALDNTPQGAAQLLSEVRACLKSRKIGPEHAFFGGEDYPSYAENFLRHLRQEKFLVVRVNAWEAKQQRSNFQASSDSLDLLGIARCCLNRRGESVRDLPEAYPNLRIATRDRDKLVRMRTAVSNRIHSYVDRLFPGFLSAGKSGLEPFSKASLELMADRFSPAQLSRRPRQALAEWLGRRGVTQPRERADQLKGLAQNVLAPAPEQTLMLQQTLAQLVGLYRNLEQSIARIDREVAHWLARTPGVWLTSIPGFGITLSAGWTAELGPPSQWRSVRQLCSYSGVVPKTKQTGGPQKEPVVGPVQQRCNKRLKNVVLQAVQKVIQHGPEELRRTAQELQARGAHTEFALAKRLVRLGKYLALTGTVYRPKAMMDPATPKAALAAHYQTVWEKLLPKWRDKADLREVFAPEQPLGQWRKMVQELYALELRLPQQKAPQKSSALAP

SEQ ID NO: 116418 - protein, 412 aa, unidentified
MNVRVEKACGIDVHKSFLVATILNWEGIKETKEFNTGLEDLINLREWIMARHCQRVAMESTGIYWTPLYTCLEGKVETIVANPRHIKNIPGRKTDYLDSEWIAELCLNGQIKPSFIPSKGIRELRDLTRTRTKTIQTMTAFKNRVHKVLEKANIRISGVFSEIFGIAGLQILNGILNKKNIDDVLKDVKRIGKKKAAIKEAVRGELSQTDIWLIRECLEIIDFLKKKINLLDSIINQQIKKEQKQNQLQILMTIPGISYTSASAILAEIGDINVFSCPKNLVGWSGLAPSLNESAGKSSNGHITKKGSKYLRRMLVQCAHVIARCRPNKLRFFFQRILMRKGKKIAIVALARKLLSIIHHLLKNNENYIEDELKPKKIGLQKFQSISELSLNEMIDIISKAGFTVEEISSNG

SEQ ID NO: 116419 - protein, 424 aa, unidentified
MKVIYPTCCGVDVHKSFLIATIIKTTGGIEPSCQKKRFSTFNNSILDFKSWLLENECHDVCMESTGKYWVPVFNLLEDQINVTIANPKWVKAVKGNKDDTKDSKWIGDLFRLGLVKGSYIPCKSIRILREYTRYRYKLVSCRSSEKNRYQNALTVCNVALDSVVSDIFGKSSSSIIDYLLEQSGTTINHEEIASKLLKRLKSKEDAVIESIEGYQMTDSQKYRMRLVRAHIDYITAEINDVDKQIESLISSVPDYVKAIRFLTTIPGVKHDSAITIISEIGIDMSQFCNSKRLCCWAGLTPGNNESAGKKKSVSITRAGVYLKPALVQCAHAAVKSDKSPYYKKKYESIVKRRGKKRAIIAIARMILTAIYRMLSTGEVWNPSDLYKIDMPAPLVEKQKAKAIKQAKKLLQKEGLLPPDEPLAS

SEQ ID NO: 116420 - protein, 335 aa, unidentified
MSTRAVQGIDMSMDDFQVCMQQVMEDNRVVIKGSRKFSNTQKGYEEFLSWEARKLKTEMPVVYVMEATGVYYENLAVYLHEKGKFVCVELANKTRHFAQSHNLKTKTDKVDAKTLAMYGVERRLEQWEPMSPQYKELRDVCREKLSIQKELNRAKNQLHAMSHSNNTSEHVKNFKDKQIEFYDQAILELKKEIRRLVKMDPELERKLNIVQTIPGVGLDLAVVLACETNGFKLIKNIRQLVSYAGLDVEFKQSGLYNGKTRITKKGNARIRQALYMPALAAIQWNKPIKQLNERVCERNPTMKKKGVVAAMRKLLILTYTLWKKEEEFDTEYQWI

SEQ ID NO: 116421 - protein, 485 aa, unidentified
MTKRRMSTFERLESGRLNRKQRRVLERQVAAADPGLTIVHTNAGGIDVGNESHYVAVPSDRDPNPVREFGCWTAALNEMAEWFKSCRIDTVAMQATGVYWIALYDVLEQHGIRVVLANGRHTKNVPGRKTDVQECQWLMKLHTYGLLRDSFRLAQEMESVRTIWRLRDRHVKEAGRAVQHMQKALTKMNIQLANVLSDLNGVSGQEIIAAILQGERDPWKLADLKDYRVRASREEVARSLEGNWREDVLFELEQAVDSYHFSHRQMQECDQKLEGYLASLPARMLDIPAQPEGSLAATAKKKTKKAKKPSGNQPHLDLKTELKRICGVDLTSIDGIDVMTALTIVSEIGTDVSRFQDETHFASWLGLTPAKDISGGKTIGRGKRKVKNRVALALRTAATTLLKSDSYLGARYRSLRRKLPSFAAAVKAMGRYLAVLIHRLLTKGEAWVDRGATQFERRHTEQELASLNFKARAKGFKLIPITEAS

SEQ ID NO: 116422 - protein, 373 aa, unidentified
MPKYSTAFGMDVHLRSTTVCALDADTGEAVTRRFPGNPWGEIAGWMDGFPGPSLAAYESGYLGFAPQRELAGLGVECVVAAVSKIPRSAADSASKNDRNDAARMAKAILAHDISPVWIPSPEVEGIRDLAGAYDGATARLATAKQRLLAFLAKRGFVYGGTTPAGNPRKYWTYDFLRWLDKVRPEDDGGVRALAALRNEVEAAAEARADLLSEYRAAVDASPIAAEAAALQSIKGCAFALAAAFSAEVGDFTRFRSGRQVTAYFGLAPSQRSSGDSVRLGGISGAGNALVRKLAVEGSWCYAAARHQPKLMPRDTGVPLEIRMHGRKGSERLLRRREELLARGMPAAKANAATAAELVRWLWALGMMCREGAE

SEQ ID NO: 116423 - protein, 406 aa, unidentified
MFYLGIDVALNTHRLVILDDNGERVSSGISFQNNTADFEKVLSKLKELSINPDNSIAGLEATGNNWENLYCFLTGNKFKTILLNPHQTNKFREALRKKAKTDDIDAFVIAGLLRSNEFASSYVPEDKIQTLRELTKLRYEFIKDHKNYQRQVLALLNIIFPEYRKTALRNPFTIASTAIFKAFSTAKHLSIAKPKHIEKIVRSIKGNNFNVKEIENLISIARTSVYSGRCQESRALTLNILLTQIENFSKAIQQLNEQTNQILSPESNDDINSFPGSNLLTIPGVGPKTLAAILSCVGESGQAFSDGVKLIGHIGFFPQIYESGETKRANKLSTKGPAYLRHALYIASVACIKHNLQLRKLYHDKLSQGKKPKQALICVAKKLAHLCLSMLHSGQDYNPTRVFNYA

SEQ ID NO: 116424 - protein, 322 aa, unidentified
MITLGIDVSKAKIDCCIFPSGLTGKRKTKRFDNAQSGFVKLVKWLTELDVNLSDTRAVMEATSVYHENLAHFLYDMELTICIANPARVRAFAKGLSMLNKTDKADSEALVYYANTVKLATWQPEKENVRILKALINRYAVLEEDLQREKNRLEKAQSTQTFPQVLLSINIRIQQLEQEIIRLDETISSHVNGDSELKNDLALLTTIPAVGRKTGLLMLGLLRSHRFEKASQVAAYVGLVPIHFQSGSSVNKRSRLSKAGDSKIRSSLFMPSIVALQYNPHIKALYQRLREKGKPKMLIVSAAMRKLVHLCYGVLKHQTAYQI

SEQ ID NO: 116425 - protein, 440 aa, unidentified
MNMSKTYRSVPVKRVEVEKVLAAHAGEFVEAGFDIGKRWVWTTIRFRDGTCLRPWRAGNPPEIGSLVDLLKQAGERVKLRAAMESSGTYGDPLRQALSDAGLDVHRVSSKASHDWAEAFDGVPSQHDGKDAGVVAELCAMGKSVAWPLQKPTELEQELAYWVDQLDAAHRVQQVWIGRLESRLARHWPELGQERKLSAPTILKALRHWGSPAALGADPQAAATLSRFSHRLLDQVGIDRLVQEAKQSVGVRMNAWDRRRVREDAEGALLAHRQKTAAKRRLHELARQHELIPALGEVVGIPTACVLWACVGDPRHYGSGGAYRKAMGLNLAERSSGMYQGQLRISKRGKSLPRRFLYFAALRYVSKQPVKQWHLEKKRRDGDEGMRGVVAVMRKLPLALHAAAQGEAFDAARLFKSIVNEVNNSNMRRQAQGGDARPKRQ

SEQ ID NO: 116426 - protein, 452 aa, unidentified
MDRVLDRVLIGVDPHKESVTIEARDSREVLRARGRFETSSVGYRGLMRFTRQWPERVWAVEGANGIGRPFALRLVADGERVLDVPAKLAARARVFDTGQGRKTDATDAHAIVLVALRDKSLRELSVDPDLQVLRLLCDRRDELSRAHAQGLNRMHRLFLELMPGGAPVKQSVDQYKRLLATVRPRDQVGKARRRMAAEELADLVRLDAKLKLMKGELRAAVEAIGSHLMDINGIGPAGAARILADVGDVARFPDRNHFASWTGTAPIDASSGEHVRHRLSRAGNRRLNHVLYMAQLVQLRNDTEGRAYYRRKLSQGKTSMEAMRCLRRRLSDVVYRQLVADAKARTLSDRAELARAASDRADPGGHSGTTLQSSVTDLTPDIGSSDKPLPGPAPSTLPTRASARKTHGPGTAATSRRRAGGVNVERPTGRTTLTPTSADAPSKAPRTTPLTT

SEQ ID NO: 116427 - protein, 423 aa, unidentified
MKFKAQAKQNQLLERISTQHLVVGIDIAQQSHVARAVNFRGILLGTSLHFSNDDAGFSLLLQWMKDLQETHQLNDAIIGMEPTGHYWLSLAAWLKDRSLEVVLVNPHLVKKNKENRDNTPSKSDVKDALVIADMVKNGYYTFIKETSEVFMELRVLMANRETIVHRLVSVKNQIHRWVDIVFPELRQVYKHLLGSGSLATLRLFPTPADLRKLTVRQVVDGWKTVMKRHSGERRAGELLMLAARSVGAKHAEKAYKLHLQQLLTEYDLALEQLQVIEDEVAVALARIPLAKPLLAMKGMSTLSVAGILGEAGDLSGYAHGNALLRHAGLNLAEASSGKWKGQMSISKRGRPRLRHALFMATMALIMNDESFKRQHESNVKTRSMKPMRSVMKLCGKLARLLVAMAQSGEAYEPDRALPMKQAA

SEQ ID NO: 116428 - protein, 350 aa, unidentified
MWIIGCDLHTRYQQVAALNTETGELVERRLSQEGNEVRQFYAALPQPSRVGIEATGHAQWFERLLAELGHELWVGDAAEIRASVVRQQKTDTRDAQHLVRLLAEGRFPRIWIPSAEQREVRQLLLHRSKLVEMRTSVRNQLQALAMNQGLRRRRALWSGPGRKQLEALPLGCWGAERRKDLVGMVEHLDARIATLNQEVAAEAHRRPEATRLMQQPGVGPVTALAFVLTLGPVERFRRSKQVVSYLGLNPREYSSGGQQRMGRISKQGNTLVRWLLVEAAQTAARFDPQLHRVYLRLKHRRGARIAKVAVPRKLAVRLYWMLRAFQRHAQPVSPQSCPCTVMVPQAGSNS

SEQ ID NO: 116429 - protein, 368 aa, unidentified
MKNYKLKAAPTAISKEENNQKGPKAKRIVIGVDVHLKSYEAARKIDNDSVGVVQRLRSKEEFLLYVEKQREQAEQVVVLYESGPLGYTLYWDLKARGIECLVCAPQSKEQKRKRRKNNAIDARTLSSNLFNYLNGNEHALQRVRVPTKAQEQARIESRQHDALVEERKRIAAMGNSLLLSQDYGSWRNWWRPKSFERLSQLVAPWVLKQLQRWVKILGELDQQIQQAKVQLSQQCQGPRPKGMGAPSLAQLNAEVLDWNLYSSGRKIGCLAGMVPSEWSTGEGQRLGAITKVGVPAIRRIITEMVWRMILFQPEYKAVQKWREVLEGSNRGLKKKAVVAIGRRLIVDIWRLQTGRISAQELGLIMIEA

SEQ ID NO: 116430 - protein, 336 aa, unidentified
MWYLGIDLHRLTVVMAGVSDAGEVMKPITISCQDTGAIRDAVKTLGGFRAVIEASGTYRWLYDLLRPYGTVVLAHPLRLRAMVQRRSKTDKLDAQLLANLLRINQIPLAYIPPEPYQQLRDLTRCLARLRQEQAVAKIKLRALLARQNRQAPYRVPFGVRGIAWFRKQDFGPVENLVRDELLERLEHYRKQLAILEAQVLALREVFPQVEVLMEIHGIGLYSALLIVGELGEVDRFQTAKQVGAYAGLTARVNQSGGHCYQGSITRQGSPWLRWILVEAAMKVVQEDVALKNFYTRVRKRSSAKIARVATARKLAEICWKRLRRWQREQNPPAASA

SEQ ID NO: 116431 - protein, 365 aa, unidentified
MQTVNRSQTLFVGVDVHKDTHTAVGLSPFGEKVFEMTIGNETEDFISLVEKTKVEAEKSGLVPSFGLEDIHSWGERLSSFLAEEGLPVRAVAPILVDHRRQKATHPEKSDSLDAKGVAEVMIQRIDSLPLYKLTEEAQKSKQIRELSLEREWLVKERARLKNQLHILLHRMHNTGYRAKFKDPFSKKALHYWMRSAPKGTDAILGQRMKRAVRRLLDLREEIQEIERELVLMMKENQQTISTASGCGTVIAAEIIGEVGDINRFHSPGALAKYAGCAPREHSSGKTIRWRKTRSGNRRLNRAFHRMALSQISRSGNDAARAYFKRKVSEGKTKAQALVCLRRQLVNVVWMMMKHKTEYRYSQKNV

SEQ ID NO: 116432 - protein, 346 aa, unidentified
MTNNIQFSSVCGIDIAKSVMQVYKVTSDGVVSNKAVKRADFLNEFRNTPPALIGMEACGGSQHWARELQSLGHTVRLMPPKLVKPYVTGLKNDKNDARGIYTALEMGVREVPVKSAAIRDLALLQTMRTKRQKEKVAKINHIRGILSEYGLIMGKSVNAFLAKAGSLIVELRERADVSPFIVSELTSLFHEVKEAIAKIKELETNIESIAKTLKQYDLFRSAPGVGPITAATMLVLLCNPEVFKNGREFAAYIGLAPKSSGSGGKNFVTHIPKKCECNNEVRALLVQCAHSICRCRHKSDWVSSILARKPKKVAIIAIANKLARQLWIMAKKGEKFERRFILAAAQ

SEQ ID NO: 116433 - protein, 428 aa, unidentified
MHGKDYNKQIAKRQRIKMTTLVIGMDIGNEFNAMCFMNKEGEVLGKYPQIYNSRKGFDFFTKAIEVMKKKKGFRDVLIGMEPTGHYWRKIAYFAKERGYEVRFVRTTALRHQRELDESSSAKSDVRDAVTIANITREGKYIDTVIEDGVLRQLRTLAHVRERIQRYNTGSKHALRAVLDDYFPELKDIFWSMKSKGLWAVLENVPFPGNVIELGLKRLTELIAKSTRRKESAAKKAVEIYQAARETVGLKQIGGADRYRVKMYLEEVKRSEVQLKDIEQEMGKLLEEVPYAKNILSVPGVGVLSCAVFLGELGEPSNFKHPKQIIKYAGYDPQENDSGQSIGRKRISKKGRWMLRKYLYFMSMRAIYRSEFFREYYEGKLKSSNSFGQPLKKKEAICAVAIKLIKVIFALLRDDRMFTAKVPELALAA

SEQ ID NO: 116434 - protein, 359 aa, unidentified
MQKQSNKLDFSGQNIYVGFDVHLKDWKVTIMSETLVHKTFSQPPEPKVLHQYLVNNFPGGIYHSAYEAGFCGYWIHNQLLSLGIKSIVVNPADIPTTNKEKVQKEDKRDSRKIARSLKAGNLTAIYVPSEKTLEDRSFLRTRKMLTKDLSRYKNRIKSFLYFHGIEFPPVFKNPQSHWSKRFITWLESIPMGHDTGKQSLLALINESKHLRESLLSVTKQVRLLSRTEAYQEQVKLLQSVPGIGLITAMTLLTELETFERFNNIDQLCSLIGLVPSTNSSGDNEQVGDITPRGHNVLRSAIIESAWVAARIDPALLICYRNYCKRMESNQAIVRIAKKLLSRIRYVIKNKQPYVCSVVK

SEQ ID NO: 116435 - protein, 460 aa, unidentified
MTLLGKLGAQLPGRYYLGVDVGYKEHVAVAISLQTFVRGDERWKRARCIHFPSTRAGLRKLKEYLEHFSTEPVEFLGLCEPTGGHYGATVFQYLLDQGYGMYLVGNATVKHMRDKIFAGLPKTDEMDCRVMARIGYLHEAVGEEFALRPLELVNPDDRELLALCRDSWKLTTMIVRARNQFTQLMAVVFPELKTFFTGSVSTAVPVRLIAAYPTPALLAEASEEAVREVLWGARGYQHAGRVAELQALATDSSGLLPNPDLVWRLEWLTDFLLTNFRHQAILERKVTQLVQQRPDYQWIVHVPYASPATLGVVLAVSGDVRRFSNYRKYVAFSGYFAGLEQSQTIDRTHMSRRGNRNLKRALFLIAAPAVWFDQGSNPYKALFQRKIAEGRAWYQAMPFVCAALARHIYHCLKYNEPYDAAEAFRDSSLAVASEERLLDLGADLDGKFEELETSLRQLEP

SEQ ID NO: 116436 - protein, 457 aa, unidentified
MKKKNRKRRKAVNLDVLKQIRPNAAGIDIGDEEIWASVPEDRDQEPVRCFGTFTRDLHELAHWLIQCGIETVAMESTGIYWIPLFEMLENNRIEVYLVNPNHVKNIAGKKDDIEDCQWLRQLHTYGLLRASFVPEKNIRPVRELSRQRDMLIESRAQHIQHMQKALHKMNLQLDNVITDITGKTGMKILRAIIAGERNPKILASYRDPNCKNNYETIEKSLEGFYHDEQVFSLKQAIDLYDYYGQLIRQCDRKIEEYLKKIPAKVNPDDKPLKPSMKKNSHCKNAPEFNLRSYLYNICGVDLTAIDGLNASTVFTVLSETGVDTSPWRTEKHFSSWLCLCPNNKISGGKVLSTRTRKSKSRANKALRQAAQSLHRSPSYLGAYYRRMRIRLGPAQAITATARKLACIIYLLLKEQKEYIDFGEDYYLKKNREREIKKLTKKANALGFYITPAVLPKK

SEQ ID NO: 116437 - protein, 346 aa, unidentified
MKINRVGVDLAKNVFQLHGADCKGKAIWRRRLSRGKWLAVLCDSVEPGTEIGMEACAGAHHWARQLMQRGYPVKIIPPQFVKPFIKSNKNDANDAAAICEAMNRPDMYPVKVKTVEQQDLQAMHRIRDEIKSHRIAKANQIRGLVTEYGLVAPQELHALRRAIPDWLEDADNGLTFLFRQLLQGLWGDLYALDQRMAELDKQIAVVAQEDPTAKRLQQLRGVGPLIATALVATIGDGKQYRKGRDMAAALGLTPRQHSSGGKDRLLGISKRGDAYLRCLLVHGARSAMRTAKDKDDRLSHWIIDLQARRHSNVVAVALANKMARMAWVIMTRDVDYDPDLAAASVS

SEQ ID NO: 116438 - protein, 337 aa, unidentified
MERQQQYVGIDLHRRRSVIVRKTSTGEPIETVQIDNDPELLAAELRKAGEHPEVVLEATYGWYWAADLLQAQGATVHLAHPLGNHWGHRRVKNDERDATDLVDLLRLGRLAEAWIAPPEVRELREHVRYRAKLVHLRGALKSQVHAILAKEGVAVPMSDLFGKRGSQLLDDVALATAFRIRVDSLRELIDRVDLELAMVEECAQRALDGDPGYRAIQRIPGVGPVLAGVFVAEIGDVTRFRSASHLTSWAGLTPMHRESDLKVRRGHITKQGSRLVRWAAVEAVVRQRGHTTVRAHHRRVAERRGTQIGRVAAARKLLIYVYYGLRDGEIRCLAKAG

SEQ ID NO: 116439 - protein, 316 aa, unidentified
MNTKTNQSINIGVDTGKFQLDIYIRPLDIYFTVSNDDKGIREAVNKIKKHKPERIIIEATGRLEMPFIMACAKAGLPFVIANPVHVKRFAGAIGQRAKTDKLDAKLIAYYGEAIRPSLSQLKPENMQLMSDLVARRNQLLVMQTMEKNRLQILPKELAMTIKPILTAFKNQINKIENKIVKLIESCPEYQAKNHLLQSMKGIGKIAAASIISNLPELGYMTNKQASALVGVAPINRESGRFKGLRKIQGGRHQVRTVLYMAMMSAIQSNPVFKAQYEKLVSAGKPKKVALIACVRKMIVILNSMLRDGVVWEAPKV

SEQ ID NO: 116440 - protein, 308 aa, unidentified
MAQNYIGVDLSSDWIDIHDPIRGTSRIANSNAALARWMEAFAPEDFLIFEATSGCDRAILQEAEARGITMRRINPLHGWHFGRSLNLPKTDRVDARMLARYGAERQPEPQAPSSPARLALAELETRREQLKVMEVQEKNRLRKATLEAVRADHLTMLRNLAARTAKIETHIRDHLKAHPDLARAAHLLQSIPGIGSVAATVLIAHLPELGTLDRRAIASLAGMAPKARESGKWHGNRPIGDGRRHIRRALYMAALSALRSSSCFATSVAALRAKGKPGKVIAIAMARKLLVIANAIISKQEPFRAAKQ

SEQ ID NO: 116441 - protein, 319 aa, unidentified
MAQNDLVVAGIDVAKDKVDVCVRSLSLKRTFASTAEGRRELTSWLRRRKVGKAVMEASGGYERDWAKALRNAKIEVRIVDPKRVRSFAQSAGRLAKNDTIDAEMIAWFAETFDEARGQAYDATREQLHQMVNARQAMKDMQTKLESQGEHALPATVQRMHARIMKTIAVELVKIEAAISAMVQATPHFTELAEIIESVPGIGRTTSAALIAAMPELGQANNKIVAALLGVAPYDDDSGRRRGERHIKGGRRRTRNVFYMACLGAATQHNPVLKAFYDRLVAKGKQKKVALVACMRKLISILNIMIERRQKWDASRYAVS

SEQ ID NO: 116442 - protein, 346 aa, unidentified
MSYSTTVGVDLAKNVIQISVVSSRGKELSNRSLTRKKFAEFLGKQKPSRVAFESCASAHYWARAAQRHGHEARIIPAKAVAPFRQGHKTDSNDALAVAEAARRPNIKEAPMKTVEQQGLQAIHRSRELLIQECTALSNHLRGLLMEFGIVIPKGFASLLKAVPEILEDGENELPDLYRPTLHRMYSRLLELREDIEAMTKEVDRLAKAHPICSKLMALEGVGPIGALLLYATMGSGAAFSGSREFAAYLGLAPKQYSSGGKTNIVGLSKKIGNSRLRSVLILGARAYTYRLKEPKSSKDKWLKANIERNGECRAAIALANKNVRTAWAMVTQGTEYQRRVQLEMAA

SEQ ID NO: 116443 - protein, 378 aa, unidentified
MKTALQTKDNASGDVLYMALELSNKKWKLGFSNGEKTRIKTIDAGNWINLIAEIEQAREKLGCSPGCRVVSCYEAGRDGFWIHRALLKAGIENYVLDSASIEVSRRRKKVKTDRVDVVALLRLLMRYVSGEKEALHAIRVPTVEEEDQRRLNRERDRLIKERGAHSARIKSLLKLHGISLGKINDLPGLLPAAKALVVGYALPADLRRELEREYERYELVNQQIKGLEKLQVQRAEDLDKPAMQQITQLMGLKGVGWQSSWILNMEFFLWRDFRNAKQLGSCAGLTPTPYDSGDSTREQGISKAGNKRIRRLMVELSWLWLRYQPDSALSQWFERRFGQGGKRMRRIGIVALARKLLIALWRYLEHGVLPEGAVLKAA

SEQ ID NO: 116444 - protein, 359 aa, unidentified
MSTITLGVDLAKSVFSACEMDGAGHVRRRQDLRRDAFIAWLPQLPAGTVVAMEACSGAHHWARRCQAYGLQPKIMAAQFVKPFRKSSRSKNDRADAEAIATAARQGNMRFVPVKDIDQQVRLSWHRVREGYKVESLAIGNRIRGLLAEFGVIVAQSDRALRRRLADLDAQLALPAEFKELLRDLADHWTQLRLHFDACDARIEAHARQDARCVRLRAMVGIGPITADAAVATVGNAREFKQGRQMSAWLGLVPTQHSSGGHAQLGGISCRGDAYLRTLLIQGARSSLQRAKAVATEKATPEQLWIRSLDGRLPFGKVIVAIANKHARQIWAVLAHDVDYDPHACLNHPMHRQSYARHMA

SEQ ID NO: 116445 - protein, 315 aa, unidentified
MADQTFVGIDVARDHLDVGLYPTGKPWRVPHTAPGIAALTAQLQALRPTRIVLEASGGWELPLLAALGSAELPVVAVNPRQVRDFAKARGTLAKTDRLDAQVLAHFAAAVQPALRPLPTAATQALAALVSRRRQLLDMLVAEQNRTSTAPPAIRTDIQTHIAWLRQRLTGLDQQLAATLRASPLWRAQEDLLRSVPGIGPVASVTLLAQLPELGTLDRKQIAALVGVAPLNRDSGTRRGQRSIWGGRASVRSALYMAALVGIRHNPVLRAFYARLLAAGKPKKVALTACMRKLLVICNALLKHGTRWVPPTPLSP

SEQ ID NO: 116446 - protein, 408 aa, unidentified
MYNAVGIDASKLKSTITIIQPAGVVIRKPFDVLHTSDELNTLVTYLKSLVGETRAVIECTGRYHEPVVKSLSEAGIFISAVNPKLIKGQKQNTLRNVKSDPADARKIAKYALDNWAELREYSSMDTTREQLKTLNSQFTFFMKQKVAAKTNLISLLDNTYPGVNKLFDSPTRDDGSEKWVDYAYSFWHVDCVRKIGLKAFTERYEAFCKKHHYNYQKNKPALLFEESKQLVAVFPKEKSYKLLIQQSIQQLRLASEHIEIIRKEMNELASTLPEYETVMSMYGIGETYGPQLIAEIGDVSRFTHREAITAFAGVDPGVNESGQFKQRSNRASKNGSTRLRKTLFQVMSTYLQNKPVNEPVYQFLDRKRAEGKPYLVYMTAGANKFLRIYYGKVKECLRNLEQSQIEES

SEQ ID NO: 116447 - protein, 355 aa, unidentified
MQPMKYYIGCDAHKKYSVFRMVNEKGQVGSPERVDHDKALYRKYLSTLPAGSPIAVESVGNWYWMIDAMEQAGHNPILVHPRKAKLLMGLVNKTDKLDAKGLAMLNLNGSLPAVWIPPAELRDQRELSRMRMAMVKVRTRFKNRIQATLAKYAITLDAVSDTFGKQGRLLLQEALKELPPETQRSVQEQLQLLDQVSTQIDEIEQHIRQIVKVTPLMQLIKSLPGVGDILAIVIALEIGTVERFRSAEHLASYSGTVPRVSSSGGKTHYGKVRPDVNHYLKWAYIEAANCIALQQNQMEGRHVVDLLRRIQKQKGYAKAAVAVGRHLAEATYCMLKRNEPYCEPNLKKTVSSSQG

SEQ ID NO: 116448 - protein, 356 aa, unidentified
MSRDIKYIGMDVHKEATVIAVLNGSGKLVMESIVETKASSILQFIHGLRGELHVTWEEGTWAAWLYDLLQPQAAQVLVCDPRRNALLKEGNKSDKIDARKLADLLRTGMLRPVYHGEHGLRTLRELGRSYQTLSQDLNRVMNRIKALYRGWSIPCAGTQVYAPRYREQWLQKIEHAGVRRRAELLYQQLDGLQRLRRTLRPELLAESRKHKAAKLLRQIPCIGPIRAARLLALMQTPHRFRSKRQLWTYSGLGIETRDSAQYRFVHGQLQRAKKPQQIRGLNRNHNHEMKEIFKGAATRASCGVGPLRDFYGALLEKGMKPEMARLTLARKIAAIALTLWKKEERFDAEQLKPQAA

SEQ ID NO: 116449 - protein, 364 aa, unidentified
MKKVSRSSRATELKAKPSITVGLDLGDRRSHYCLLNEDGEVVEEGRIATTEAGIRQQFEGEPTQRVAMECGTHSPWISRLLKHLGHQVIVANARKLRAISQNESKNDRADAEMLARLAHSDPRLLAPLQHRSVERQRDLNLMRTRDTLVRARTMLVNAVRGLAKSAGGRLPACSTGYFIEHARPALPAELKKATAPLLNQITSLTRQIRRLDAEIDKLAEQYPEIALLRTTPGVGPLVAAAYVLTLDRADAVSTSRAVGAFLGLRPRQSQSGDSDPEHRISKTGNIYLRKLLVQSAHYILGRFGPDSALRRWGLRLAGAGGKRAKKRAVVAVARKLAVILNCMWRRGQPYQPFPEQKPAALAAA

SEQ ID NO: 116450 - protein, 445 aa, unidentified
MVHPDAAAIDVGATMHMAAVRADRAPEPVRSFGTFTADLHRLVDWFTECGVETVVMESTSVYWIPIFELLDARGFNVFLVNARDAKHVPGRKTDVSDAQWLQRLHSFGLLRASFRPKGQIAELRAYVRQRERLLEYAASHIQHMQKALTEMNLQLHHVVTDITGVTGLRIIRAILAGERDPEALACLRHYSCRSSAETIAKALTGSYRAEHLFALEQALALYDAYHEKASACDARIEAVLKELSFHRGHGHGSAPRVSRRRNRTDQANAPAFDVREALFALLGKDLTAIDGLGPYLSLKLIAECDDDLSSWPSAKHFTSWLGLAPSNKVSGGKMLSSRTRRSGGRAAALLRLAAVTVGRTDTALGAFYRGLSARIGKAKAVTATARKIAVLFYNAVRYGMDYVDPGASSYETRYRTRVVNNLHRRAKAFGFVLHPLEPKVDAAVS

SEQ ID NO: 116451 - protein, 457 aa, unidentified
MSKPKRFRRKQGLAPIHPHAAAIDIGATLHVAAVGPDRDPEPVRSFGTFTADLHRLADWFERCGVRTVAMESTGVYWIPVYEVLEQRGFAVVLVNARDAKHVPGRKTDVSDAAWLQKLHAYGLLRASFHPEARIAALRDYLRQRERLLDYAAAHIQHMQKALTQMNLQLQHVVADITGASGLRIIRAIVAGERDPAVLAALRDHRCKASEATIRQALVGNDREEHVFALAQALDLYDTYQAKVAACDARVAAVLDRLQADRPAPAASLPAPRHQAQTANALAFPAREALHRILGVDLTRIHGLGPYLALKLVAECGPSLAAWPSAKHFTSWLCLAPSNKISGGKVLSSKTRRSNNRAAALLRLAAVAVGRTETALGAFYRRLSGRVGKAKAVTATARKIAVLVYNTLRHGMAYTDPGASYYEERYRHRVLANLRRRAKSLGYVLQAADATPSGAGVS

SEQ ID NO: 116452 - protein, 372 aa, unidentified
MTAKKEAFVGIDVAKLRNAVAIADAGRDGEIRYIGEVDATPDSMKRLIGKLASKYDRLHFCYEAGPTGYGLHRQITELGHFCMVAAPSLIPRKASDRVKTNRRDATALARLLRAGELTAVWVPDPAHEAMRNLIRSRTAAVETVRVHKQQVGAFLLRHNRIFPRRKNWGARYRRWLQEQSFEHLADQIVLQEYVEAVRLAEERLGRIERAIVEFLPRWSLAPLVDALQALRGVDLVTAVCFVVEIGDIRRFASPRQLMGYLGLVPTERSTGETIRRGSITKMGNSRIRQLLVESAWTYRFPPRVGAKKLLKLDRVSPKVREIAWKAQTRLTARYRAFSARGKKTTVACTAIARELAGFMWAVAMEVPPTAAI

SEQ ID NO: 116453 - protein, 362 aa, unidentified
MQVRHIFVGIDLGDKNSVARIAVDRQKSERIGFVNSQRGRARLLEELQRRAKQVGATQIYLAYEASAAGFLLCDEAESAGLQCWVLAPTRMEKSVEQRKHKNDDRDGEDVLEKVRAHVLAGSRLPSVWVPDRQTRDDRELVRTRLELAEKQSRMKTQIQMLLKRHGLEKPSGLGAGWTIRYRQWLEALTAVESVGWGARQALGSLLRQLGWIEQEIEWIQKSVQQLAAAPRHEAVIEELRKENGVGLLTAMVYRTEIGQASRFRRGRQVGKFAGLTPTSHESGQQNDRKGHISRQGPPRLRKMLCQASWVHIAHDAQAAQLYHKLVSRNPKKKKIAIVAIMRRLAVRLWHRMRRVEMESAVA

SEQ ID NO: 116454 - protein, 365 aa, unidentified
MDGKRVIGVDIGKRWLDVAREDGAEVERCVNEAAAIAALVATFDAARDVVVFERCGGYERALEAALAAAGVPWAVVHSASVKAFRQVQGIKAKTDTIDARLLRGFGRDRLNAGRLRLGRAEDVVLDALMARHRQLRAALHAEQCRCETAAIASVQASIERMIAQLEAELAAVATELSAHESNDPRLAFKEAVLCERKGVAQATARALLAELPELGRLDRKQITALGGLAPRVHQSGRTQLRRGLAPGRPGVKVILFNPARTAMRWDPEIRAFANRLRARGKPGKVIMVAVMRKLLVRLNAAVRDALSQAEAPSPATPGGSLIHSITAADCGIGRRQSRLAAGHRRRRRAAALTAEPDAAPSSVVE

SEQ ID NO: 116455 - protein, 348 aa, unidentified
MAHFAGLDVSVKETSVCVVDDAGKVVLEQKVPTEPTDIIALLTSLGVSYGRIGTEAGPLSQWLVSALMAAELPVICVETRHMKALLTAQQINKTDRNDARGIAQMMRVGLFKPVHVKTLVAQQQRMLLTSRKLLQRKLLDLECDLRGTLRNFGLKVSVVSSSRYEARVRELVEGFPRLAAIAQPLLNVRRVMRQQLAILHKMLLDTVRDDPVCRRLMTAPGVGAVVALTYRATIDQPQRFVHSRAVGAHVGLAPKRYQSGETDYDGRVSKCGDALLRTMLYEAAHTLLTHSGKWSWLKAWGMRVAQRRGIRRAIVAVARRLAVVLHRMWVDGSEFRWSKDSAAVPAVA

SEQ ID NO: 116456 - protein, 346 aa, unidentified
MEHYAGIDVSLELSSVCVVDAQGQIVREVKVASEPEALVALFASLGFAVKRIGLEAGPLSQWLHAGLRRAGFDTVLLETRHVKAALSAMMVKTDRKDARGLAQLIRMGWFRPVHAKSMSSQEVRALLVARKQLLGRLIDVELSIRGILRGFGLKVGVVTRKGFEARIRELVTGHITLERIAGAMLSARATLKVEYEKLHKIVLTIVREDAVCRRLMTVPSVGPLVAITYKSAMDDPNRIAKSKAAGALFGLTPKKYQSGEKDVTGGITRAGDEMARTALYEAANVLLARITRFSKLKRWGMDVAKRRGSKRAKVALARKIAVILHRMWVDGTTYRWTDAQPMAVQV

SEQ ID NO: 116457 - protein, 397 aa, unidentified
MEIQDETGRKLAARRLPEGASGITRLHELIAAHLGSEGDPGQVAVGIETDRGLWVQALAAAGYRVYGLNPKQVARFKERYSTSGAKSDAADAHALAGMVRAERHQLRALAGDTPGAQAVKVAARAHQTLIWERTRHTLRLRSALREFFPAALAAYADLGLTGPDTLELLMRAPAPAAAARLTAAQISAALKRAHRHGVPARAQVIKDALRGPQLAQPAPVTAACAAVVQAAAAVLITLNEQISRLEAQVEAHFLQHPDAEIYLSQPGIGTVNGARVLAEFGDAPGRYACAKARKNYAGSSPITRASGRSRAVLARFVRNDRLADALQSQALSALTGSPGARGYYDKQRARGLGHNPALRQLSNRLVGILHGCLKTTTHYDEATAWPATVTHPQPLAA

SEQ ID NO: 116458 - protein, 390 aa, unidentified
MECPMQKLNDLSRSLTVLKGDSTLIAVIEMSQSSWLIAGIVPGVERQPLKKLAVDESALLKLLNRWREEAEKAGRGIERIAVAFEAGRDGFWLARWLRARDIEAHVIHASSIAVSREHRRAKTDRLDTELLKRAFLGWLRGERDHCKMVAVPTIEDEDAKRPNRERENLVGEQNRIVNRMKATLSRLGIRGFNPKLKKATDRLQGLRTPEGEPIPFNTLTELRRDMVRRLLLREQIRQIEDARLERLEQAPGDGPHAMVRLLARVIGVGIETADMLVQEVLSRNMRDRRAVARYGGLTGSPDESGTKRREKGLARSGNARGRRGMIQLAWRFLLFQKDSSLVKWFRARTENARGNRKTMIVALARKLLIALWRLVREGVVPDGVVLRPAQ

SEQ ID NO: 116459 - protein, 323 aa, unidentified
MMNKDKKIFGVDISKDVFDVMDDKSVHSQYGNDASGFSEFKKNLPGDALVVMEATGYYHYLLAQYLSSNGIDCAVVNPLSVKRFVQMKLAKVKTDKADAAAICDYTRTNGVVSYDPLGDVQAECLQLFRLLDTYRKHLTAIKNKLHGEEALGRPSKAVYHSLNRSRKNLEKEIKNLEEKALALVKREHQQQVTLLKSIPGMGLKTALFLIVVTNGFTKFENASQLCSYAGITPTERTSGSSVRGRGRISKVGNKKLRNLLFLCSFSACKHNKACRAQYERIVAKGKSKKLALLAVSNKLLKQAFAIANSGIPYDAGHRSVLQK

SEQ ID NO: 116460 - protein, 359 aa, unidentified
MNKQHKAHSPVVGGVDTHKIIHVAAVVDEHDRVLGSKTFATTTHGYKSLLTWMRSFGELERVGMECTGTYGAGLLRYLQRCDVKTLEVTSPDKTARRKRGKDDVIDAENAAHAAFAGIRTVTPKTRDGMTESLRVLKVCRKTAVAARRVALQIIQTQIVSAPDALRDHLRSMTRMKLIRTVAAWRPDLTGYRDVTMAYRIALKSLARRYIELHDEVAELDVMTKAIVDDLAPNLIARRSIGYESASQLLITAGDNSERLHSEASFAALCGASPVPASSGQTRRYRLNRGGDRAANSALHIIAIGRIHYDPVTQAYVKKRTEQGLTKLEIIRCLKRYIAREVYHIICARNHMINQVQIGT

SEQ ID NO: 116461 - protein, 502 aa, unidentified
MAACMKRPPYTYGGLKDMKNKSIFTRQNQTLINLFRDAGHPDKVLCVPLDYAKLTHVALCCNGSGKVLKKAFPIKNNPEGMAFLLNAMEKICRKHHIKREHVFFGGEDCGTFSLNFIHGLRGQGFVVMGVNAKDAKEQRENMQASTDELDLLGIAKLLINRRGSKAGGEPGAERALRVLTRHRKAQVRLRTATGNRIHQIVDQLFPGFLDEKLSGIPPFSEASLYLMVDRFSPAHLARRQDKPLLRQLKACGLQQAEVALGKLKAYARQVLAHPPELTGLLQTSLASEINLYRCLGANIDQVGREAAQQLARTPGAMLTTIRGIGITLAAGVSAEIGPPDSQPSVRRLGSYAGIVPRVKQTGGPEKGAKTGKVSRRCNHILKDYIVQCGNHLGQHGPAALKEDHRRRGANKQHADFGMARRFLRMGMRLMRNGESYVPPELRHGATLEELQTHYLQSWPKLLDKWVKAGAVHTAFDPANPLGQWRERIEDIYEIELPLPAKK

SEQ ID NO: 116462 - protein, 373 aa, unidentified
MKTSITHVAMDTHKKEHTMAVAKPDTGELKVFAVRNTAKDITKMVKKVQRQAPGEVHFCYEAGVCGFTLKRRIEDLGSRCMVIAPSLVPTKSGDRIKTDRRDARKLLGQFMAGELTEVHAPSLAQEAAREITRCRQAAQENLKRVRHQLLKFLTRHGYIYSDGRHWTQKHDRWLRSLAFDQADLREVFDLYYAELQHCLQRLATLEKEVAALAERPEYRKMVGVLRCFRGIDTLTAITVLTEIFEFGRFPSPRKLMAYLGLVPSESSSGERRHTGGITKAGNKRVRRLLVESAWHYRHRPGVGKELKRRRQDQPPWALDIADRAMARLYKRYWRLLDRGKPGSVVVVALARELAGFLWSVLQEYERREARQAA

SEQ ID NO: 116463 - protein, 401 aa, unidentified
MESPIVSIDVSNGNSHYMCFIKNNKRFGKVKKIDHDIEGFKRLLEDIQKLEAETNEKVCAVFEATGVYTKPLERFLSKNSIKTYIINPLESARKRKEEIHNKKTDKLDPISISKVYYDKEEMMELKKKDETYNWLRKKNRLYEDQLNHLRKYKVTFQNQLSICFPGYLDLFRDGYSDIPMTILKKYPHPDLLKNKKAETVARYLEKNTCHTHKISLEYALKIIGFAKKTYPGCEKDDVEVEIFKILLDKVIETQRECEKTLNEMITVASSLEEYRYISSIDGIGPNLAARIIAEIGDIEEFKSREALVAYAGLDPHIYQSGDQDGKHLKISKKGNKYLRCLLFLAVGCSIRGAKDNPVNRFYQKKKQQSNPLNSKAAKTACTAKLLKIIYGICKNKTTYER

SEQ ID NO: 116464 - protein, 337 aa, unidentified
MKYCGIDLHSNNSVVIITDETDHVVYSKRLPNDLPQILAALAVHRAELFGVVVESTFNWYWLVDGLQEAGYRVHLANTTAIKQYDGLKHRGDESDARQLAHLLRLGLLPQGHIMPKGARAVRDLARKRMQLVQQRTSQILSIESSLSRHTGGRMSSNNIKCLQETDLNGLRLGDLQTLGLKAHVAVMRALQAQIDSLETVLAKHCCTEPGYRLLKTVDGIGEILATVILLETGDIARFADVGNYASYCRCVGSAHLSNGKKKGEGNTKNGNRYLAWAFVEAANFAVRYCEAARRFYQKKKAKRNSTVAIKAVAHKLARACYHMLKTHQVFSVERCFA

SEQ ID NO: 116465 - protein, 512 aa, unidentified
MPADADYSVGCEPVYEPGVGARPGRVTHCCLEHAGQTFGSLTDAPGQPSRWKICGLGWRTSEVRMQPEEIPDDDHELVIERVCAIDVAKASGKVCVRTPHPNRPDRRTSRVWDVSATSRAVTELAEHLIGEGIERVTVESTSDYWRIWFYVLEAAGLDVQLVNAREVKNVPGRPKTDKLDAVWLAKLTEKGMLRPSFVPPVEVRQLRDYTRLRVDVTRERTRYWQRMEKLLEDALIKVSSVVSRLDSMSVRDMLEALIAGERDPRRLAELARGKMRPKRAALIEALTGRFDDHHAELARLLLSQIDALSTHIDTLTRRIDELLAILTDPTRGPDGGYRIGDDGAAPFVNGLQAAKRLAEITGIGPVSAPVILAEIGMDMTRFPTAAHLVSWAKLSPRTIQSGATQRGGKTGKGNPYLKGVLGEAAAVAARTDTFLGERYRRIVKRRGKLKALVAVARSILVVVWNLLADPTAHFHDLGADYHTRRADTDRRLRNHLAQLAALGYRVTVEPAA

SEQ ID NO: 116466 - protein, 369 aa, unidentified
MTKVRTWVGLDVHAAKVVACVVDAESGEMIVRQLPGETAGVVEFCAGLPAPVRVAYEAGPTGFGLARALIASGVGCVVAAPGKIERPAQDRVKTDRRDAERLVRLLMIGGLVAVRVPSGEEEALRDLVRAREDVRGDLMRARHRLGKMLLRHDIRFEDTTSRWGQRHRAWLAKLDLGQPGAQATLSDYVGAIDALMLRRETLEATIGELVPGSPCAQTVARLRCLRGIDTLSAVGLAVEVGDFQRFERAGQLMSYLGLVPAEHSTGATRRQGHITKTGSSHARRLLIEAAWHYRRPPRLGSTLERRQEGQDPLVIAIAWKAQQRLHHLWRRLDTKRGKRKTIVAVAVARHLAGFCWAIALHADAEETQP

SEQ ID NO: 116467 - protein, 389 aa, unidentified
MATAINRVNFPQACDLQRAVDEADFIIGLDIHKKTTAATVIDPKHPEQSVKHRPRLKNTDLPGFIASFPGKKVVTAEASYGWKPLRSALAPCADTTLILLDPRKTSAWIATSGIKNDRIDAGVLAYACLQSAGRLAVYQPAPESCERYKLVTLRDRFVQNRIAVKNQLHALDRDYGINPYTGEQADTSDIVQFMRASLETYLQFLNQNISDIETAMASATAGDATAELLTTIPGIGPLTAYALRWKIDTIDRFEDAAHLTSYFGFGVRQWSSGDHEIRGKLTKTGDGLVRKLLVQGAQVMRYKHPEYVSLCFPRLGTPALMRNRVHANKVVAALARKHLTFAYHVWKKQTPFNLAVYRERRAQASQTICVSATPKKPSRAAELVSVLSA

SEQ ID NO: 116468 - protein, 348 aa, unidentified
MGQLSNRLPTACSLALERGAGPRASPVVWLKRGASAVTVIRHARRGPNFPIEKKGAGVAVIIGVDPHKASHTAVAIDDKERPLGELRVRSSADQVGRLLSWAARWPKRTWAVEGAGGLGYLLAQQLVSAGETVVDVQPKLGSRVRLLATGNVNKNDPNDARSVAIAALRSKSLRPVAAEDHAAVLKLWSKRRRDLGSLRTQAVCRLHSVLCDLVPGGHPRKEITAAQAARILASLEPLGAVAQARYELAVDFLADVRRIDAQMAEAKKRLEVAVKASGTTVTEVFGVGPYVAATVIGYVVDVGRFADRDRFASYNGTAPSRSRPGATRSSGSPGGATGASTTPSTWRR

SEQ ID NO: 116469 - protein, 348 aa, unidentified
MTMTTAYLGLDLHATTSTLGIMASDGTYLGHHHFPTAESELIPHIVAIDASIKRLALEEGNLARWAARTLEPYVDEVFVCDPRENALISRSPHKSDQADAYKLCRLLRLGELKRVYQAREDHRAIFKAAVQHYRDMRDQQVALKQKIKAQFRRWGVLRVEGYTLYSKEGRAAYLDRLSHSGIADQLCHLYQILDLTLAMQKQAKAQMLRLGKRYEEIARFQEVPGIGPIGSHLFDAFIQTPHRFQTRQKLWRYCGLGIRSKTSNGKPLGYEELDPSGRSELKAVSYRAWLAALRQGDNAVHTFFEASLERTGDRTHARLNTQRKILATLLSLWKHESTYSPTRFLGST

SEQ ID NO: 116470 - protein, 405 aa, unidentified
MAGRLYVGVDLGKGFHQVSVVDEKKEQVGEPFRIQRGSGGIEKILRQLRLYGAKPGDLVVTIEATGSYWNELVFALASRGCRVYLAQPKKVHDLRKFYADHTKTDITDAGALARMPLVDEQLRPVWVPSGNEQMLLRLCRLRWKYRCRIADLKRRISTLSEMVMPGLDKVMPVRYSKSARLFLRRYLSPKKARRVGRRRLIEILSKAAWGKFSEKKAEKLWECIENAPELGWQADDLLLEVGVQLDELEMLELQVDRLDHRIAELYSEVDPDQKLMQIPGIGEFLAAALTASIGDVSRFPSTKHLVSWAGLAPRVKSSAGRTKTGQAITKKGSPFLRAWAYLGASCARQYDPELKAYYHGIRDRGKHYNVALCATAARLLERAYRTLSQGGVNKKESLDQKICSG

SEQ ID NO: 116471 - protein, 424 aa, unidentified
MNDTQNKKIAQVTDKTLVVGVDVGSDKHFARAILARGYEVSKKPFEFANTRDGFERFVNWSCHLAVENQLTKIFVALEPTGHYWFNLADYLKAYDVKLVLVAPQHVKHSKEMDDNTQMKNDRKDPLVIAKLVIEGRYMFPYIPEDVYAELRAAFNRRCDLVEALTRNTNRMIRWFDIYFPEYREVYGKANAISGLMILMRAPLPSDILALGVDGICQIWREAKVRAAGTKRAKKLVAAAERSIGRKGCEAVRQELWQLMEEHDLLSRQLSNMMQIITDLLGRIPGAERLLNVPGAGVITVAGFLSEVGDISRFTNPKQIQKLAGLAVVENSSGKRKGLSGISRRGRKRLRWVLFQLARSMVKSNKEMKAYHQYYITRKDNPLKKMQSLMAIAGKITRIFFGILKNGTEYDPAIVMKDLNKAAAA

SEQ ID NO: 116472 - protein, 343 aa, unidentified
MEHFAGIDVSLERSSVCVVDATGRIVRETKVASEPEALVRLFGQLGLPLTRIGLEAGPLSQWLHAGLTKAGFEAVLLETRHVKAALSAMIVKTDRKDARGIAQLLRMGWYRPVHRKSPPAQEVRALLVGRKLLQGKLGDVELGIRGILRGFGLKLGEVSKGRFAARVRELVTGQPMLERVVEPMLRAREALRAEFHVLHRAVLAIVREDAVCRRLMTVPGVGALVAINFASAVDDPARFRHSRSLGAHFGLTPKRYQSGETDVTGGISKAGDAMVRAALYEAANVMLTRASKFSSLKRWALEVAKRRGMRRAKVALARKLACVLHRMWVDDSDFRFGKEVVAA

SEQ ID NO: 116473 - protein, 373 aa, unidentified
MSRNLRHVGLDVHAETIAVAVAEPGGEVCPLGIIPNRPEAVAKLVRKLGPREQLRVCYEAGPCGYVLYWQLTKLGVPCDVVAPTLVPTKPGDRVTTDRRDAAKLAHCYRAGDLTPVWVPDAAHEALRDLVRAREAAKQDQLRARHRLGKFLLRHGRRPPEDVKPWTQRHRRWLDALQFELPAHRATLADYLYEIDHAAARVARLDAALDEAVQAAPAPMRAVIAALQTLRGIRQVIAATIVSEVGSLSRFPHPRELMGYSGTVPSEHSSGSHVQRGAITKTGNAHLRRILVEAAWAYRFSRKCAKGLRQRQRGQPEVITALAWKAQQRLCSRYRRLLARGKPTPHVITAVARELVGFIWAIGVAVEREQTMAA

SEQ ID NO: 116474 - protein, 428 aa, unidentified
MKQEIPMISHLNETNYKAFVGIDWANDKHDLCIQDPLTGKREFSIIKHDVNEIDKWVKGLHKRFGSPIAVAVELTKEPIVYALQRYEFVVIVPINPTTLAKYRTAFKPSKAKDEPTDAELALELMLRYPNHFPPLNQQSVNMRKLMFLVEHRRKVVDDKQRVVNQMINAIKQYYPQANEWFCKKDTHIFCDFIARWPTLQQAKKAHKSTLVKFFNDHGIHNCTIVDHRVSLIKKAKPLTDDKAVIDSHTMLVVFYIERIVNSMKCIRQYNKSILKLMDKLPDAPIFNSLPGAGAALSSRLLAAFGEQRDRFKSAKEVQQYAGIAPVKERSGQKSWVHWRWQCSTFLRQTFIEWATHSRLKSYWANLYYLQQREKGSSHQAAIRALAFKWIRIVYKYWQDGKPYNETQYLRALKDRGSPLISGSGREAP

SEQ ID NO: 116475 - protein, 335 aa, unidentified
MEFTYFIGIDVSKNELDFAVMQGKTHLFHRELVNNPQVIAAFLKELGKLPGFALSHAVFCMEHTGIYGNHLLGCLHKKKANICLEAASQIKNSLGNIRGKNDKVDAIRIAEYAYKNRDELRLWQPKRGVIQQLAYLSATRSRLIEAQKSLKTPLKEAGAFIDKKLVKQNDRLCGKTLAAIEVDLQKVDRAIDEVIAADLELKRLFSLVTSVSGIGKVTATMIIISTNEFKDIKDPKKFACHAGIAPFVKESGLFRGKARVSHMANKKLKTLLHLSAMVSIQYNEELRNYYQRKTVNEKKNKMSIINAVRNKLILRVFACVNQNRPYEKNYQRLVA

SEQ ID NO: 116476 - protein, 344 aa, unidentified
MGQHYVGLDVSLETTSVCVLDEAGGIAWRGKVGSTPEALANVIRTRAPQVARIGLETGPLCTWHWHALRALGLPVICLDARHAKAALSVQVNKTDANDAYGLAQIVRTGWYKEVAVKSLDSHRLRTLLSSRAQLVNMRRDLGTKLRGVLKTFGKVVGKVGERGFEARVRELAAGEAGLEEAVAALLAVRERLEQQIETLETRILRFAKRSDPCRRLMTIPGVGALTAVSFVTAVDDPARFRRSSGVGAYFGLTPRRHQSGEVDRDGKVSKFGDTLTRTYLFEAAGALLSRVARWSALKAWGTRLARRIGSKKARVALARKLAVLMHRVWMDGSEFRWSKESATA

SEQ ID NO: 116477 - protein, 340 aa, unidentified
MNIKRIGLDLAKNIFQIHAVDHHEHVVLRKTLRRDRMIAFFTQLTPCLIGIEACGSSHYWARELTRLGHTVRIIPPQRVKPYLKGQKNDANDAEAICEAISRPGMRFVAVKTERQQTLQAEHRVRARLIRARTALSNEIRGLLAEFGLILPTGIRQLRKALPEILSQQEQWDDRFMRLLCELSEELKILDERIARHDGRLQQAARDDIRIKRLLAIEGMGPVVASALVAAVGDGRQFKNGREMAAYLGLVPRQHSSGGKERLGHISKRGDSYLRTLLIHGARAVLNACKNKTDRRSQWLQALSERRNRNIATVALANKNARIAWAILSREEDYHGLQAAG

SEQ ID NO: 116478 - protein, 350 aa, unidentified
MKKFIIGIDFSKETVDASIVQKEQPETLIAYKKFRNNLKGVDGLIAWAKSKVAQDGEIIFCGENTGTYSTLFSDELTDRGFIIWIEHGMNIVRGMGDVRGKDDKTDSLRIASYAARFYDKMKPYVRPKDETRVLKTLLAKRDRLKSFLKAEITNTKENPLMLQDSNIASSINEFFKRLEESLRKELKELERMILDVVMSSSEYAKNFNILTSMKGIGLINAVALIVYTDNFTKFNFNHRKIATYWGVVPFKNESGTSVRRGTHVSPKCNSWLKALLTEATLCAIRYNSRIKAYHDRLMARGKAIGIVLNNCKNKMLKILVAMVRDSKIYSDMDVSKDPHTTTTTNSIVVC

SEQ ID NO: 116479 - protein, 358 aa, unidentified
MTTQVAIDFHARSQTIRWMTEGDGEIHSAFLNHETDDVRAFYASLPGPVIVGLESHGYTGWFEQMLSELGITVRIGDAARIRACTTRKQKNDNRDADLIFELMATERFPEIYRPTPESRTVLQQLRFRHNLVRTRTRIANSLVAIALSCGAVRRFSVLTVKGRRRMAALKMSEEQAWQRDRWFEILDGLELVIKEVERKLEAEARKDPRVCRLMTQKGVGVLTGLALVHVLGPPERFATSRKVAAYVGLDPVESQSAQRRHIGRISKQGSRLLRFLLVEGAQTAARKDPELKAVYERLRRKKTHATAKVAIARRLLVRSWILLRDQIDIDEFRRRGRARCGVKPGQSEETHGLSMPVL

SEQ ID NO: 116480 - protein, 423 aa, unidentified
MVMKKAKTGKIKFVKEDTLILAVDIGMEMNHGYCTTPDGRDIKPFKFENTREGMDKLWCTVLANKARFKCSEIIVGYESTGPYGEPFLHYLVKKDVKIVQVNPMHTKRVKEISDNSPLKTDDKDPRVIADIIKLGRALSVVIPEGDAAYLRRLNNLRERHIKERTALLNQLQQLVFLLFPEFKKVFKNIQCMTPLYILKTYPTPGEISVLDKDTLGEEMRKKSMGKFREQHAETLIKFAKNTVGIQEGVLGISMDIKHILVQLELLDTQIAEIESEMEVTLGRIPYSSKLLSIKGFELVSVAGIIGEFGDFKQFRTRGEIMKLAGLDLYEISSGKWKGQRRISKRGRSLIRKILYYVAIQTIREHGIMHDYYARLTDGGMKRMKALVAVSRKLLGIIYAIVRDDSEYVTHFESTKRQVKKMAA

SEQ ID NO: 116481 - protein, 479 aa, unidentified
MAVGRMNRKQRKELTRQLRSEDPGLDVVHPRAAGIDVGNGAHYVAVRPDQDREPVRRFECFTADLHRLADWLQACGVATVAMQSTGVYWIPLYEILEERGLEVYLVNARHTKNLPGRKSDVQESQWLLKLHTYGLLNNSFQPTAEIRTVRTYWRQRAEHVRAASTCIQRMQKVLTQMNVQLANVISDLSGLTGQTIVRTILAGERDPKKLAELSHPRIQASREEIAKSLEGNWRPELLFVLKQEVEMYDIYQQRIGECDRELKAHLKRFADNVHRKPAEAGPVSEEQKDKKVPAKLPRSGKRAQGNAPCFDLRSELYRISGVDLTRIDSINVVVAQTVISEVGLDMSRWNTEAHFASWLGLCPDNRISGDKVLSKGTRHVINRAATALRMAATTLLRSRSYLGAQYRRLRARLGAPKAITAMAHKLARLVYRMLKYGQDYVDKGMQYYEDRHRCQQIELLQKSAAKLGLQIVEIQAVGG

SEQ ID NO: 116482 - protein, 346 aa, unidentified
MEISTIGLDLAKNVFQVHGISATGEVVIRKALRRSQMLPFFEKLPPCLVGAEACGTSHHWARELTKLGHEVRLMPAAYVKPYVKRGKNDAADAEAICEAVTRQTMRFVPIKSREQQAALSLHRVRSLLIKQRTQLVNMMRSVLAEPGVAIPVGIVKALQMAREIVDGESRLDLPSEATNVVTMLAGQLLQLHTQLRKLDLRLAALQRSDDRARRLATIPGIGPIGATALAASVTDPSQFSSGRQFAAWLGLTPRQSSSGGKERLGRITKMGDRYLRQLLVVGATALVRYAKHKPSTVDPRFVALLARKPARVASVAIANKMARIAWAVMSRGGVFERGHAPILAAA

SEQ ID NO: 116483 - protein, 313 aa, unidentified
MTAIICGVDVSSQTLDASIGHSGRQVQRFENSPDGIAELAAFCRRHRVSLVVMEATGGYEKLPFTLLWAANMPAAIVNPRQVRHFAEAMGVLEKTDRIDAGVIAWFAEIRRIVAQAPPSQTQNRLAALVTRLRQLTDLRVAQTNQRRLVDDADVNASFEGILALITRQIREIEAKIAALIATDPLWRALDAAFRTFKGVADRTVARLMAELPEIGTLSGKAVSKLAGLAPIARDSGKSTGKRPVRGGREGVRSILFVVAELVSRYDPDFAAFRQRLTAAGKPAKLVRTALAHKLLVRLNAKARDVRNDLARAA

SEQ ID NO: 116484 - protein, 339 aa, unidentified
MKLYAAFDLHSSNNYLAVIDEEGKRQMQKKLPNEAEAIVMALSPYRKKIVGIAVESTYNWYWLVDLLMAKGYEVHLANPAAIQKYKGLKHADDRHDANWLAEMLRLNILPEGYIYPKEERSLRDLLRKRGHLVRLRTSLIISLQHIITRNCGIMVNVNDVKRLKEDRISPLLQDNEDVLMAGEVSKETIDYMTRKIKGIEKTIEEKIELSSSYQQLLSIPGVGKILALTIMLETGPISRFQKVGNYVSYCRKVSSTWVSNGKAKGKGNEKNGNKYLAWAYSEASELARRFDDRARAYFQRKTQRSNRMIAHQALAHKLARAAYYIMRDNVPFMAEKLFA

SEQ ID NO: 116485 - protein, 342 aa, unidentified
MTYYAGIDVSLEYSSVCVVDGAGKIIREQRIASEPEALIAWFRGLGFGLERIGLEAGPMSQWLYAAMRAAGLPVELLETRHVRDAFRAMPVKSDRNDARGIAQLMRLGWFRPVHCKSMAAQEMRALLTARKLVQSKLLDVQMSLRGLLRGFGLKVGATTPSRFAGRIRDLVEGNATLEVIAAALLSVHETLRRELAGFEKRVLSMACSDGRVRLLMSTPGVGAIVALTYVSAIDDPARFKSSKAVGAHFGLTPKKYQSGETDITGRISKIGDEGVRTALYEAGHIILTQPLKGCTALKSWAMRLAKRAGMKKAKVALARKLAVIMHRMLVDGTLFASAAVAA

SEQ ID NO: 116486 - protein, 337 aa, unidentified
MGNYIGIDIAKSTLQIFIPRNNLDIEVSNSDNGLKTLYAKLKKQYKKEINNIVFIYESTGSYSAILEEYCQSKNIKCFKVGAYQSASFSKVVKNRSKTDIVDARMLSQMHILAEDEDIKVPSRDAKAHQIRSFIKYYQSLVKEETRQKNYLEAASFNLEDKYILKQVRKKIKNIQKEQIGIIAKIMEIINSNIEYKEAYENITSIKGIGEKSGIILLYLFLRYPNASRQHITALCGLDPIQRSSGTSVQHKERISKQGLSLVRAILFMPTMAAIQYNDEMRSVYDRLVQKGKPKMLAQMAVMRKIILLAHSLYKNKQQYDDKKYLEFTQLRKDENMA

SEQ ID NO: 116487 - protein, 355 aa, unidentified
MKYYTSTTQFNCGIDLHARQMYVCLMDRDGHKLVHTNIRNNDFNYFLKLVAPYRHDLTVCAECMFGWYWLADACQAAGLNFVLAHALYLKAIHGGKNKNDRIDSEKIAHLLRTNLIPPAYVYPAAKRPLRALLRQRILYVWRRSELLARIQSHQLAYNRPTLPQTRSNRDRWEEKLLTQEDNPIRQLALQNDLALIRHYDAQITILEKQLQKLTKATAWRDYTLLQTVPGIGEHLGLTLLYEIGDIHRFPTVKDFLSYCRLVKGTVASAGKIKGLRGAKLGNAYLRWVFGEAAVIAKRDHEVIGPLAQRLEAKLGGNKFKANTVLAIKLARAVYFMLRDHTVFDPERLVAALTHK

SEQ ID NO: 116488 - protein, 409 aa, unidentified
MDVLFERCCGLDIHKRTVMACLVVPGPTGAPTKEVRSFGTMTDDLVQLADWLLAASCTHVAMESTGVYWKPVWNLLEDQFALLLVNARHVKTVPGRKTDAKDCEWLADLLRHGLLRGSFVPDRGQRELRELTRYRTSLVQERSAEINRLQKTLEGANIKLGDVATDIMGLSSRQMLAALADGETNAAAMAQLAQGRLRDKLPALERALAGSIGAHQRFLLARQLAHIDFLDAAIAEVSVEIAERLRSVADELERLAGIPGIGRRTAEVLIAEVGTDMDRFPTGAHLASWAGMCPGNDESAGKRRSGKTRKGSPWLRSALIEAARAAGRSKGTYLAAPYHRLAARRGTKRAAVAVGHTILLIVYRLLSEGDIYRDLGERYFDERDRHAVERRLVARLVGLGYKVSLDPAA

SEQ ID NO: 116489 - protein, 347 aa, unidentified
MKKIFIGIDVSKEKCDATAISAENGLTGVEKLDYLVFENRPKGFRTLLSWAKKLRPDIPQEDILFVCETTGAYDRALCDYIYSKGLDIWRESALQILWSSGVRRGKDDKTDSLMIAEYALHHMDKVHLYESPDSRILEIRALFLYRRKLEQEKTSKIVRIKELEATAGKSRTLTFILRDAKKSIRQLEKSIKECEDKILELIEADKALNKSYQHLDSVKGLGIVNITALIVYTNNFKAFKTSRKMATYWGVAAFRSKSGTSVDKRADVRNLSSSMLKSYLTQAAMHTIAKGGIYHDYYHRKIAEGKTHSIALNNAKNKLLHLAMSLVTHDMDYEANHEFLRTQRVAN

SEQ ID NO: 116490 - protein, 412 aa, unidentified
MELLHRRCCGLDVHKETVVACLRLVSDGKVTTEVRTFQTTTADLLRLSEWLAANECTHVAMEATGVYWKPVWRILDDGEFALVLANAAHVKNVPGRKTDVNDAMWLAELLAHGLIRASFVPDAQTQEMRNLLRTRKQLVREQSSHVLRVQKTLEDANIKLDSVLTDLMGKSGRAIIEALIAGETNPVKLAGLADRRVKASPEEFREALRGRVTKHHRFLLRLHLNQIDALDAAMATLDAQVEANLGPFRTAVELIGSIPGIKNLGAHVIVSEIGIDMSRFPSAAHLISWACICPRNDESAGKRRSNRARKGGTWLKTTLVQCAWAAVKKKDSYLQAQFYRIKARRGPKKAIMAVVASILTAIYHMLKDGTMYKDLGRNHFDRRSSDQQKNRLVKRLVDLGYVVEIKPLAATA

SEQ ID NO: 116491 - protein, 307 aa, unidentified
MSQHHHDVTAGIDIGDRYSHLCLLDTDSGEVIEEGRILTNHSAFEKRFSGSKPMRIAIETGTHSPWISRMLQECGHDVLVANARKVRLIYGEGRKNDKIDAEKLARLARLDPKLLAPIKHRGEASQAHLAFLRSRDALVSARTKLVNHVRGAVKSFGARLPKCTAESFHNRVAEHLPQELVPALGPVLETIASLTEHIREYDRRLESIAKEIYPETNLLRQVRGVGVLSALAFVLTLEDPSRFAKSREVGAYLGLVPATEQSGKSDPEKHISKHGNKMMRRLLVSRAPTTSLVPAVRTATSGATERR

SEQ ID NO: 116492 - protein, 316 aa, unidentified
MAQDGREVFVGIDVGRDRLDVHIRPLGQHLVVDNDPAGLAALATRLEAHAVKLIVLEASGGYERLAAIGLLERGLPVAVVNPRQTRKFAAALGQLAKTDKIDAAMLAHFAEAIRPAARAVTDDALDRLQTLLARRRQLVVMRNAEKQRLGKATDPITQRSLKAMITSLDKQLGVIDKAIGRLIEADPALAEKLARLKSVPGIGDVSARTLLAELPELGSASRHEIAALSGVAPISRDSGRFRGKRRIQGGRVEVRAPLYMATLVAIRHNPVIRPFYRRLRDAGKPAKVALVACMRKLLTMLNAMLRDRRSWAPAAA

SEQ ID NO: 116493 - protein, 325 aa, unidentified
MSQEKYIGMDVHQATVSAAVRDRNGNLLMECILETKADTLLEFVQGLHGTLSLAFEEGTLAAWLHDLLKPHVNRVVVCDSRKAARLRDGNKSDRIDARNLSELLRTNQLKPVYHGEHGLRTLKELGRSYLTVSKEMTRTMNRIKSLYRSWAIPCAGTTVYAPRHRRQWLAKIAEPGARVRAEHLYEQLDHLQPILVRARRELLQESNQHDAVKRLRQIPSIGQIRAALLVALLQTPHRFRSKRQIWAYSGFAIETHDSGEYRYVRGKLQRNRERITVHGLNRNHNPDLKNIFKGAAISASSRPGPLQCGQPWLALPWHGKSLPSP

SEQ ID NO: 116494 - protein, 318 aa, unidentified
MSTLNSTSVFVGIDVSKGQLDLCRLPSGQSATFANDAAGIGSLLAWLAATPATLAVLEATGGLERLAVAELAAAGVPVVVVNPRQVRQFAGAVGQLAKTDKIDARVLARFAQAVRPEVRPIPSEKERELAELLARRRQLIELRTAESNRLQQCASLRVRRNIERVLTFLNKQLQGFDDELDRQIKASPVWREKDELLRSVPGIGPTVSRTLLIELPELGAGDRGGIASLVGVAPLNRDSGAYRGRRTIWGGRATVRSALYMATLSAVRYYPPLKAAYTRLRAAGKKPKVALVACMRKLLVILHTILKTKTPCRLTQPA

SEQ ID NO: 116495 - protein, 346 aa, unidentified
MEHYAGIDVSLELSSVCVVDAQGKIVKEAKVASDAEDLIAFFASLGFAMTRIGLEAGPLSQWLQSGLKCAGLEVVLLETRHVKAALSAMTVKTDRKDARGLAQLIRMGWFRPVHAKSMGSQEVRALLVARKQLLGRLIDVELSIRGILRGFGLKIGVVTRKGFEPRVRELVAGQATLQHITRAMLSARAVLRVEYEKLHKSVLAMVREDAVCRRLMTVPGVGPLVAMTYKSAIDDPSRITKSKAAGALFGLTPKKYQSGEKDITGGITRTGDEMVRTALYEAANVLLSRITRFSKLKRWGLDVAKRRGSKRAKVALARKIAVILHRMWIDGTTYRWSEAQLMATQA

SEQ ID NO: 116496 - protein, 343 aa, unidentified
MQIVRIGLDLAKYIFEVHGVDAHGKVVLRKTLRRNAVSSLFANLPPCLIGMEASNGAHYWARVLSGFGHQVRLISPQFVAPYVKSNKNDRNDAEAICEAAGRPTMRFVPVKSVDQLAVQALHRIRSRLVSGRTRLANQIRGILAEHGIVIARNIAKLRQNLTYMIEGDGNGLSSLVRALVGELKAELAELDQRIAAYDRRIRELYRNNELCQRLGKIEGVGPLSATALMAAVGDRQGFKNGRQFAAWLGLVPKQRSSGGRDRLFGISKRGDRYLRTLLIHGARASLARAKGKQDPRSCWLEKLRERRHPNIAAVALANKNARIAWALLSSGEAYNPNLSVGST

SEQ ID NO: 116497 - protein, 358 aa, unidentified
MEKLYVGVDLHKTSCWVTVLDADGHLLESRRIGTTKPELLEFFGKVRKPAALAVEATLNWYYFLNVMEPLGLELHLVHALKTRAIASARIKHDRLDSRVLAELLRTGFLAEAWIAPRPVREERQLLRYRVHTVQWATRAKNSIHGVLNRNGIRSPFGSPFGVKGRSFLKEVELARTDRWEVDGQLERLDLLGTQLAALDREIRRKAKASPVARALEQVPGIGPFIASLIIAEVGDIRRFPSAKHLVSYTGLAPSLHASGEHRWGGPITKQGSSVLRWALVQAAHRAALNPRFYGFYQRQRERHGASRAAVALARKLAVIAFYRWRHALHVAETLPRVEKVRERTSAGAWSEHRPLTSD

SEQ ID NO: 116498 - protein, 415 aa, unidentified
MHPKLHPKMQYTYVGIDSHKDTHTAVFIDCFFEKLGEVEFNNMPASFDAFLQQAQAYLMPGTSFMFGMEDCSSYGLLLMKFLKANGQKVKHVNALLVARERKNQNTTQKTDSIDAECAARVLISKFSELPDANHEDKYWVLRSLVARRNLLVRHRAATKHYLHSLLTQQYPNYRTFFEKIDCKTSLAFFERYPSPGTLQGVTAEELAAFLEIPSNRSVSMAKARQILANIHDTAALHQDVRDSVVRSAIRQIVFSIDEVDKLEASIGAFLKEFDCTLTSMVGIDTVTAAQLLSCIGDIRRFSSPAKLARYAGIAPVTYASGKKDLQFSNQRGDRELNSLFFWLAVRLSNPMSANHRVMNSFFYDYYRRKMSEGKTKRQAIKCVERRLVNIIWTMLTNGEEYVNPPAYNLQTDSDA

SEQ ID NO: 116499 - protein, 365 aa, unidentified
MEKHITDVAFDMHQDSITAAWLLPNATTPEVRRIPHEAKTFHRLVRQLLTHGPARACYEAGPCGYAPQRYLVSWGLPCEVVAPALTPRRPGVRIKTDRRDAVKLVRLYRAGELTTIRVPTPAEEARRDLLRCREACGADLLRAKHRLTKCLLRQGLRCPTGSPWSQAWWTWVQALRLPDPVAQRTLEEYLVTVTTLQGRRKALEAEVLALATVEPWAPAVARLRCLHGIDTLSAVTLVGEVLDFHRFGAPRPLMSFVGLVPSEASSGPRERRGWITKTGNAHLRRILVEAAWHYRHRPRVSARLQACRAGQPPRVIAVAQQAQERLHRRFGRLLARGKPAPVVVTAVARELCGFIWALMVEAPAA

SEQ ID NO: 116500 - protein, 353 aa, unidentified
MLAWQPIRFKKYNMNKLIKKKHFIGVDISNETLDLALMEEESFGAFVDKKIDNSLTGFEKITTWLTRQNKTLEDCLFCMEHTGTYGLLLFAWLSQMELDYCVEPGMQIKKSLGMTRGKNDKIDARRIAEYACTNKAKLKAFTMPSTLVLQIKQLLTYREQNIKIRTSLKNSIKSHRQYQRVSGLKAISESITQQIKQQDVLIEEIENQIIDLIKSDPTVKKNFDLITSVKGIGLVIAAFMLVTTNNFTSFENGRKYACYTGIAPFEYASGTSIRGRSRVSYLGNKTMKTLLSNGANSASKWDPQLRAYYKRKIEEGKDHKLVMNSISCKLVNRMFAVVKRQTPYAAIYEHNFD

SEQ ID NO: 116501 - protein, 318 aa, unidentified
MKANTAAVYVGVDVAKATLQVHQQGRQIELHNVPAGLTQCCKKLKALEGAHVICEATGGYERALVQALHKVKIPVSVVNPAQVRGAAQAQGQRAKTDRIDALMLTDYGQRYQPQPTPPASQSQRQLAALAQWLKQLVDAQAVAKTQAEHHEDPFVRKQHKTLLDHYQSQIEAVETKLKALMRKDPVLAQRVECLDAIEGVGLRTAFMVLAHMPELGQLNRQQAAALAGLAPWTRDSGTMKGMRCIGGGRSEVRLALYMSALSAARCNPVLSAFYQRLIAKGKLPKVALTAVMRKLLIYMNHQLKALDAQPAPNAPKKD

SEQ ID NO: 116502 - protein, 341 aa, unidentified
MEQATTIGLDIAKHVFQLHGADAAGHVLFRKRITRVKLLGFLAAQTRCVVAMEACAGAHYWAREIAKLGHHVRLIAPAYVKPFIKRQKNDAADAEAICEAAQRPSMRFVPVKTEEQQANGIVFRARDLLVRQRTQCVNALRGHLMEYGYVFPKGITHVTTLVALVEDPQSSLPDSVRVILKLLVDTFTALEAQIAVLDTEINQRSKSDPTARRLMTIPGVGPIASTAITALVPAPEGFPAGRDFAAWLGLTPLQKSTGGKQKLGAVSKRGERTIRRLLIIGASAVVQQASRRGAPDGSWLAQMLARKPKMLVTVALANKMARVIWALLVKGGTYRAPAVAA

SEQ ID NO: 116503 - protein, 416 aa, unidentified
MRSCPREAMGRAAEVVAPSSSIRTDGGYPVAQVNDLSRSLTAFDPISTLVVVVEMSKASWLVSGAVPGVERQPLKKLEPDATALLRLIERWRNEAVRAGRPISRIALAYEAGRDGFWLARWLIARGIEAHVIHSASVAVSRERKRAKTDRLDAAMLMRVFLGWLRGERGHCGMVAIPTMEEEDARRPSRERECLVNERSRITNRMKSALARLGVRGFKPHLRKAPERLAGLRTAEGTGLPMNIIEEFRRDMARLALVREQISSIEKTRAERLERAPDTGPHAMVRLLARVIGIGIETADMLVREVLSRKLRDRRAVARYAGLTGSPDESGLKRREKGLAKAGNARVRRGLIQLAWRFLVFQKDSALARWYRTRTEGPSGARKTTMIVALARKLLIALWRLVTTGEVPDGVKLRPAL

SEQ ID NO: 116504 - protein, 356 aa, unidentified
MITVAQLEPVRVTVGVDTHKDVHVAAAMDHLGRRLGESSIPTTPSGYRDLLAWAKSHGKVEAWGIEGTGSYGAGLSRFLHDADQTVIEINRPDRKARRLKGKSDPVDAEAAARAVLSGEASTVPKAGDDRVEMIRALRTARSSAIKARTQAINAIKALVVSAPAGLREQLRALSAGELVRTCVRLRPGNVVDPLAATKLALRSLAGRYETLVAEIKVLDPQLERLATEAAPGLVALFGVGPDVAGTLLVTAGDNPERLRSEAAFAHLCGVSPIQASSGKTIRHRLNRGGDRQANAALYRIVIVRLRFDAKTQQYAARRVAEGKSKPEIIRCLKRYVAREVFAVLTDTVQKNVRHAA

SEQ ID NO: 116505 - protein, 427 aa, unidentified
MSYRIAGIDVHKRMLHVVVSDVQVDGEYDFTRRIFGSLPEALRSLAAWLLEQQVQEVVMESTAQYWKPVWGTLERYWKQICQTREGALATSGTLHLAQAQSNRGRRGRKKDFRDAERLVKRLVAHELVLSFVPDVEQRLWRTVVRTKYQLTRNRVQLQNRLEALLEETHIKLSSLVSDLLGASARRMLHAIADGETNRETLAALADRGLRATQEQLQDALGVCQELNPVYRRLIRMVLDEVASIDKRIEQLNQEMANLLRPHEDQVKRLAEVPGLGVDSAQQVIAEVGATAATFPSEKHLSSWVGACPGDKESAEVNYSRRSPQGNRHMRRILNQAANAAVKHKGSIFEILYRRYVPRLGHNQTIGIIAHKLCRLVWKILHRGIRYEERGPEVSKASKQKRTRKMIQALRRLGYRIEPSPSQSAITA

SEQ ID NO: 116506 - protein, 317 aa, unidentified
MAQILPTVGIDVSKDQLDAATFPEGPRLSVANNEAGWRDLIRWLRSIAPRAIGIEASGGYERGVIGALSRASLPVRSVNAWKLRQFAKAAGRLAKNDHIDAVMIGWFVSTMPTREIKRDPAREHLAELVSARRQLVDLQQELGNQLEHLRDAELRRTRRRRIGQLVVDQARLDRRIVEAIEAVPSFLHRYKLMCSMPGVGPVLAATLLASLPELGAATNRQIGALVGVVPYDFDSGRLKGLRCIFGGRAAVRRVLFMAAQAAAQHNSVLKAMKQRLVAAGKEPKVAIVAVMRKMITTLNAMVRADREWDPTRQAAAT

SEQ ID NO: 116507 - protein, 407 aa, unidentified
METIYPVCCGLDVHQASLWACLRRVAADGTITIEKRQFDTTVNGLTQLSQWLTEAGCPIAAMESTGVYWKPVYHILSTTIDIWVVNARDVKQRRGKKTDRADAQWISELLAYGLIEPSFIPPPQIVALRDLIRMRTALVQTRTQVKNRALAVLEDTNVKLSSVASDPFGVSGREMMNALIHGYRDPKGLSQLAKGVLRRKIPQLEAALEGTFTEHHALMLRLNLQLIDQTNMQIAQLDDQIEKLTTPLQSKVERMTSTPGVHYRAAKIILSEIGTDMSRFGSAPRLASWAGMCPGNNQSAGKRKSGKTRKGNRYLRRVLAECAWATRKTDSYLGRTFNRLQARIGGKKAAVAVGHKILVIIYHLLNEETVYDDGRYNHFKQKQEQQQLKRALRMLNRLGYQAQLTVA

SEQ ID NO: 116508 - protein, 389 aa, unidentified
MDEKYFCGIDVSKKSFSVAVKNSQFLVDRQKFSMDRVGFEKLNALLSPYQERLLVGMESTGIYHTNLFYFLHQAGYNTTVVNPYKVKQFFKFVSDKPTKTDNKDARVICQFVQYQNQENSQFHQEEKYQMRYLVREKENLTHQIARTKTEIKRILSLVFPELERENAIFSSGLVSLLKVFPSAHSIRQTDEKKFIHQTEKLLPVGGRKLHLTPAQIYQMAQNSIAHHFPVYEKLLLSKIETLGFLTQQQANISRLVVQMAEKLFSQEIGILTSIPGVGKESAIYFTSEIVDINRFDGWRKLIGFCGLDPVIKQSGNYKGICKISKRGNSHARRIAFIMANCVKRNCPYFREYYLKKRNEGKSYTEAVMTTSTKLLRTIYALLNNNRTFT

SEQ ID NO: 116509 - protein, 375 aa, unidentified
MKNSITWVGLDVHKRSINVARISCDGRLDEWQIENDAKTVKRLARKLVRDAEGREVRCCYEAGPCGYAPKRQMEEAAPDLVCEVIAPSLVPSRAGDRVKTDRRDARRLAEMLRAGLLTEVHAPTEEEESIRDLCRCRDDLRRELMAARHRLSKWLLKRGIVWHRKNWTLVHERWLRSLTFERPAEQIVFAAYLEGVEQVAERKKRIELKMEEFAASSRYAQPVGWLRCFRGIDTITALTVMAEVHDFRRFHTAHQLMSYLGLVPSEHSSGARQHRGAITKAGNSHVRRLLVEAAWHHRHTHRVGSELRKRREGQPQWAVDLADRAGRRLSKRYARFIERKMPHPKAVTATARELAGFIWALVQHWQPQTAVEQLQ

SEQ ID NO: 116510 - protein, 329 aa, unidentified
MTDLLPPLGLDVAKLTFHACLVRETGKLKHRAFPNSPEGFAQLSDWLAKLGAELTHACLEATGTYYEALASYLHEHGHTVSVLNPASVKDYARSRLSRTKTDRVDSALIAGFCLERRPPAWQPPAPELRELQALVRRLDSLVEMRTMEENRLSSGVAVAAVRASVEEHLAYLSEQIKRTQALIRSHIDSHPGLRRQRELLDSIPGIGEATAAALLGEIPDLKEYRSARQVAAFAGLVPRERQSGSSVRGRVRLSKIGNSRLRKALYFPALTALPCSPFFQAWAEGLRQRGKSKMAVVGAAMRKLVHLAYGVLKTGRPFDPEWAQKQKIA

SEQ ID NO: 116511 - protein, 436 aa, unidentified
MQVNTNPARVSIGIDAAVVAPHQIAIRGEVREDFRASPTLAGLAKLTERLETYAGSLVVAEPTAGTWLPLAHAVTDAGCDIGFVANRDSARLRKAIVGASKTDVIDADMLARCQEVLGVVPTPVPPPGQIALRRAMRRRHVATIDAHRVECRLWALAAWAFPDVWKAMGGHTLAQPLLGRWPHLDRLAHARMSSITEMVAAHSRDTNPGRRAERIRDAATGWARFWEGRLDLDALAWEVTAMLGDIEIADERHAGATSQAFGLWEQHWPDDVLTSIPGLGPVCAAAIRGWWGNATQFPSAKAAVAHAGLNPSVWSSGLTEAPSRNITKQGPSELRLALYQAANVARRRDPQIAAHYRRLMVERGHNHISANTAIARKLACRAWAVATSGRAYQPRDLDGDPITIDRAAALAVELTVPDKIRSRRRGHSQRGRLSAS

SEQ ID NO: 116512 - protein, 418 aa, unidentified
MRPRGKIGQEAEAFCVQGHVRSPPQRYAPPPVRAVSVKTERYPGDQPEYGKTGQETASNREDYIMNNEQAPVSPSIHWVGVDVSKRTFDAGLVRHGQKWPATPLAAVPVESFARTSVGVNDFLQWLDALLAENDPPLGVRVVMEATGRYSSELAVWMLTQRLALAPAIAPPHQTAAFIASMGLRNKTDKLEARALGFYGMERQPPAYQPMTPQEAQLRELARYRDFLVRERVAAANRADETSACKTVRDMEHKRLRLLDGDIKRIEEQMRRHTHETPELKRDVELLATIYGVGFITAVTIRVELGDLRRFHKARQLSAYAGLNPSLRQSGSSVNGRPHMNKQGNPRVRQCLYLAAMVAIRGHNDLQRTYLKLREQGKSAMSALGAVMRKLLVLMRAILISGKPFEPMWKTRPQAAQTP

SEQ ID NO: 116513 - protein, 345 aa, unidentified
MKHYAGLDLSMESTQVCIVDDNGRKVVSEKVESSPEAIAMMLERYGPIERAVIETGRMSPAICLGLRELDVPVVCIDARQAHQSLKTMKANKTDPHDAAGLAQLARTGFYKEVHVKSPAAHGVRSVITARSHLVEARVRLDNTIRGLCATFGYRPGAGQGKAFLERIMQAAHIPGLGDAIASLLSVRTELVQQIKEMDRRLRLIASQSQACEILMTIPGVGVQTSAAFAAAVDEAGRFRQSRNAGAYFGLVPRRHQSGELDWTGRITKQGDGAVRKLLYEAANSILTRSRETFALKTWAMKIAKRRGLKKARVALARRLAVIMHAMLRDGTLFQARGRIEPVCQR

SEQ ID NO: 116514 - protein, 343 aa, unidentified
MEHFAGLDVSVKDTSVCIVDDTGRIVREVKVASEPEALLQVLANPAYQFKRIGLEAGPLSQWLFSALAEAGLPVICVETRHMRAVLKAQINKTDRNDARGMALMMRAGLYRPVHVKTLRSQKLRMLLTHRKLLQSKAIAIDNELRGTLRNFGLKVGIVGTVKFEARIKELVENQPDLAVLVEPLLIVRRTLREQIAILHRRLLALVRDDEVCRRLMSIPGVGPVVALTYRATVDVPSRFRTSKAVGASFGLTPAKHQSGEINRTGAISKCGDEMMRVMLYEAAHIMLTRTTKWSWLKAWAMKIARHRGIKKATVALARRLAVIMHRIWVDGTEFRWTRETAAA

SEQ ID NO: 116515 - protein, 454 aa, unidentified
MSGNRTKPTGLPIINEFAAGIDIGSRFHVVAVGSDLCDEPVRTFQAFTSDLLRMADWLIEVGIQTVAMESTGVYWVAAYEVLESHGINVILANAREARAVPGRKSDVNDAQWLQRLHACGLLRASFRPGREIAALRSYLRSRERHLDYAASHIQHMQKALTYMNLQLHHVISDITGATGMQIIRAIVAGERNPEVLAEMRDVRCKATTETVRAALVGNYQPEHVFALKQALALYDFYQQCVAECDIQIEHVVAMLNSSRQIPAIPLPKARHRTKQPNDVNFDVRTAMYQLAGTDLTQIHGIGPFLALRLVAECGTDLTRWKTAKHFTSWLTLSPGCKISGGKVLSAHTRKTSNRLTVALRLAAVTVGRTNTALGAFYRRLAARIGNAKAVTATARKIAILFYNAMRFGIDYKDPGADHYEQQYRDRVIKQLHRRAAQFGLILQQQSTVIEECVS

SEQ ID NO: 116516 - protein, 345 aa, unidentified
MKITTIGLDLAKNVFQIHGIDAAGEVVVRRALRRGQMLAFFSKLEPCLVGMEACGTSHYWARELGSLGHEVKLMPPAYVKPYVKRGKTDAGDAEAICEAATRPTMRFVAVKSADQQSVVMLHRTRELLVRQRTQLVNMMRGQLAEFGVTLAKGIQHALKFVRRLLDGYAPDIPELAVKVVMVLAEQLRQLQIRIGELEKELKRWFRADRVAQGLATIPGIGFITASALASSVTDPHQFTSGRQFAAWLGLTPRANSSGGKERQGRISKMGDQHIRHLLVSGMTSQLRWARRHPDAHPWVASLLARKPAKLVAVAMANKAARIAWVVMTRGELYRARHPSTQQGAV

SEQ ID NO: 116517 - protein, 423 aa, unidentified
MASATTALFTAYIGIDWADRKHDFCLQAAGSTAVEFGVIEHKPEAIEKWAQSLHERFGGPIAICLETTKGPLVYALQRYEFLVLFPVHAATLAGYRRAFVPSGAKDDPSDAHAALDLLRRHPERLQPLKPQSPAMRMLASLVEERRQLINSITRTSNRLLSTLKLYYPQALDWFEHRNTKMFCDFLDRWPTLAHVRRARVTTLESFFHEHNCRRPHVVTARIESIRSARPLTEDQAVIRPAQMVVETLVAQLRVLIKASERYDEEIDAISRTLPDYWLFASFPGAGQIQAPRLAVAFGEDRDRFASASEVQRYAGIAPVVERSGNRCWVHWRIACSTFLRQTFVEWAGSTISRSSWAGAFYWQQRKKGCSHGVAVRALAFKWIRILYKAWKTRKPYDETIYLDALKKHASPLVVSTAETVNTA

SEQ ID NO: 116518 - protein, 344 aa, unidentified
MATIIAVDVAKSVFEVAVSERAGRVREHHRLSRAQFSRFLSVQRPATILMEACGMAHFWGRQAQARGHRVMLLPPHAVRPYVPRNKTDRADAKGILEASRNQAIRSVPVKSITQQIIAALHRLRSTWLAARTARINTVRGLLREFGVVIPVGASHVVPRVRQLVAEPLSVLPEALRPALTQAADEIRELEGRIRSIEKQLDAQAVQISAATRLRTVPGIGLLTATALFAFVGDVERFPSGRHFSSYLGLTPRESSSGLRRRLGRISKHGDAYLRMLLIHGARAVLWHAKTTARRSRLQSWALKLEAQRGHNKAAVGLANKLARIAWAVWKFGADFTDQPLPRRH

SEQ ID NO: 116519 - protein, 346 aa, unidentified
MNQIIRIGMDTSKHFFQLHGVDTAEHPVLRRKLRRKEMLAFFAKLPPTVIGMEACGASHYWARVLCELGHTVKLIAPQHVKPYIKRNKNDGRDAEGLCEAMSRPTMQFVPAKTAEQQAALMLAGMRERLVGQRTQLSNAIRGYAAEFGLIAAKGLDKIEPLLADIAADEALPVLARELFAMHGREYAQLQAELKNIDARLKAWHRANADSRRLAQIPGIGPIVATALIMKVPDPRLFPSGRHFAAWIGLTPKDHSTAGKTRLGKITRAGDERLRSVLVAGATAVIQQAKHGRGHPLPWLLALLKRKPPKLAAVALANKIARIAWKLMTTGESYDGMRMPGASAFAA

SEQ ID NO: 116520 - protein, 401 aa, unidentified
MKTVLSVDVAKNKSMIMLMNSDGEILIDTKEIKHNLEEFKKVKEKIEEINPENLTVFMESTGTYHLPVERYFKENGFNTLVINSLTTKNNYDTIRKTKTDKEDCYRLAKLFFVNEVEYHDLSKKDLYANLKAMTRQYFYLLQNNVSCKNRYKRLINICFPELEKIFKSTRIYDDTALNFIKEFPHAEIVKEKRIDALYNNLYKTNGRNLNFYKRLAEMIKTASVNSYPGVDKEHEDTKNLSDMAKIVQNNNNVINELRDKMIETAKQSPYYEIINSFYGIGEILTAEILGELGDITRFNSPKEIIAFCGLDPTIKQSGKSINVKGAISKRGNKYARYILFNCSQMVVKLGASNYPEHPVYIYYQSKKAEGKHYYESLTACSTKILRMLYSMCKNNKTFLSD

SEQ ID NO: 116521 - protein, 396 aa, unidentified
MDARTVNSLPPAATHDGTVRCLMAIELSKKSWIVGVNVPGSEKISRYTLKGCDGKGLLELIEKIRTRVHRELKQPVEVICCYEAGYDGFWLHRLLEEHGVRNYVVDPASVQVNRRARRAKTDNIDVAQLLRSLMAYLRGDPKVWSVVQVPSVAEEDDRRLHRERDRLINERVQHVNRIKGLCAVHGIYDYHPLRADRLRRLEQLRTGDGRGLPPRLKAEIRRELQRLELVLQMIKTIEKERNVMASGKAPSTHGNAKKVQDLVKIGSIGAEIATVLVGEVFYRQFNNCRQVGGYVGLTPSPFNSGKMTRDQGISKAGNPKARTIMLELAWLWVRHQPNSPLTIWFRERVGTAKGRIRRIAIVAVARKLLIALWRYLETGVVPTGAKLKASKMLSKS

SEQ ID NO: 116522 - protein, 390 aa, unidentified
MEVRLENTASATTNNDPAHCFVAIELSKSSWVLGFQTPLAKQTSRYQVKACDAKALLELIERVRSRMARELGRPVEVMSCYEAGYDGFWLHRVLEAHGIHNHVLDPASLQVNRRARRPKTDRIDADRMVRALIRHLRGEPEACSVIRVPSPEQEDARRLHRERDRLIAERVAHVNRVKGLCATQGIYDYEPLRSDRLKRLEKLRTGDGRALAPRLKAEIVREIKRLEIVLEMISTVEAERDAILTEKKSTHLNADKIKMLAKLKAIGAEFSTTLVGEVFYREFANRRQLGSYVGLASSPFCSGSLDRDQGISKAGNPKARVMMIELAWTWLRYQPESALSRWFRERVGNLKGRPRRIAIVAMARMLLVALWRYLQTGVVPTGAELKAQSN

SEQ ID NO: 116523 - protein, 341 aa, unidentified
MQITTIGLDLAKNVFQVHAIDASENVVAGKQLKRSQMIAYFKGLPPCLIGMEACATSHYWARELAKLGHEVRLMPAKDVKAYLKRNKNDAADAEAICEAVRRPTMRFVRVKSAEQQGRLMQHRTRDLLLRQRTQLINAMRAHLAELGVVAAQGREGLSELLAIIADDQNFHMPVDARASLMVLAAQLQALQTLIGSIEKRIMAQHRSSEVSQRLETIPGIGPIGATTIAAVVTDPKAFKSGRDFAAWIGLVPQQVSTGGKQKLGPISKQGDRYLRRILVVGAHAVLRRAKQDPAKYPWITDLLARRPFKVVAVALANKMARIAWALLAKGGTYQPPRLVAA

SEQ ID NO: 116524 - protein, 424 aa, unidentified
MSRRARRNHTPAFKIPWEVDSNRRSDRVRLLPPTLEATMQTVADRSEAPTAIRTDLGAIFVSLELSRSTWLITSLSPAGGEKMSKHVVRGGDVAGLLERFAQLREKTRARTGKVFPFVVIQEAGLDGFWIDRVLQNEAIESHVVDPASIATSRRRRRAKTDRIDGEALVRALLAYKRGEPRVCAMVKAPTPKEEDRRRLCRERKVLIAERVRHVNRVKGLLFSQGISGYEPLRRDRRERLDTLQTGDGRLLPDHMKAQVRRELDRLELLLDQIKAVEAERDVLLAAQQAPAPAAMLLDIKGIGPEFAAILWSEGLFRHFDNRRQVASYAGLAPTPWQSGSVDREQGVSKAGNPRLRTTLIQLAWLWLRHQSQSALALWFEERVRRNGGRLKKKTIVALARKLLIALWKYVTAGVLIEGAVMKAA

SEQ ID NO: 116525 - protein, 484 aa, unidentified
MPQGIVQREGEEMARAPRRQGGGQPRQRRSSRGRPAQLEQLNLNAAGIDVGATEHWVAVPADRDAQPVQRFGAFTADLYALAEWLRQCQIDTVVMESTGVYWIALFAVLEERGFDVKLVDAHYARQVPGRKTDVKDCQWLQELHTYGLLRGAFRPEDEVCVLRRYLRQRSMLVAMASRTVQHMQKALEQMNLKLTEVVSDITGKTGMTIIRAMLAGERAPQLLATYRDKRCKHDQATIAKALTGHWRAEHLFALQQAVEQYDFIAQQLRACDGHIEGCLQAFVPDVEIDAPQAPSARPWRSSRSNPLSFEVQAYLEAMTGVDLTQIDGIDSLTALKVLSEIGRDMTRWPTSKHFAAWLGLCPGNKLSGGKRYRMRSKPSANRAATALRLAAQGVANSHSALGAYYRRRRARLGAPKAITATAHKLARLVYSMLRYGTAYVDAGQQAYEQKYRDRVLTNLQRKAKAFGYKLVHVEDIAGGVASTL

SEQ ID NO: 116526 - protein, 345 aa, unidentified
MEQISRIGMDTSKHIFQLHGVNTAEEPVLRKKLRRKEMLAFLEQLAPTVIAIEACGASHHCARLLQSFGHSVKLIAPQLVKPYLKRGKNDAADAEALCEAMSRPTMRFVPVKTAEQQAALMLVGVRDRLIRNRTQLSNAIRGYAGEFGLTAAKGKAHLDPLLERIQADESLPALARELFAAQAKEYVQLQAQIDQVDARLIAWHRADECSRRLTKIPGVGPIGAVLLTMKTPEPELFRSGRQFAAWIGLTPKDHSTAGKVRLGGITRAGDQGLRSVLVVGATTVIQHAQRGRRPSPWLTQLLKRKSPKLAAVALANKMARIAWKLMVTGENYAAKAAPAALAGAA

SEQ ID NO: 116527 - protein, 319 aa, unidentified
MAKIVLGIDVSKNTLDVALIFDNRTLCKQFKNSLEGFKLLAAWLESLQITRVHACLEATGTYSEAIALFLHEQGHRVSVVNPLRIKGYAQSNMQRNKTDRLDARLIATFCLTQEPDEWQPPSAEVKHLQSLVRRVEVLEEMLRAEENRLTNAAPQIKSSIERVIMLIKEEISELERQIRQHISQNSNLKEQSELLQTIPGIGARTANLLLSEIEFERYSSARSIAAQAGVTPRKRQSGTSLKQTGLSKLGNARLRKALYFPAIVARQHNEVIKEFAERLKKNGKTPMQIVCAAMRKLLHIAFGVLKHKRAFDASLAFSA

SEQ ID NO: 116528 - protein, 348 aa, unidentified
MPKYIRIGVDIAKNSFQVHALESEDCSATKRKLSRSGIVKFLAEVEPCAIGMEACGSAHYWARRFRAMGHEVKLTPPIYVKPYVKRGKNDAADAAAICEAMSRPNMRFVAVKSEDQQATLMAHKTRELLIKPRTMSVNALRGHLAEFGVIAAKGISHVEELVERAAAADLPAMVQATLGVLLAQLRSLDAATDELERAIVANHRRDPVSRLAASVPGVGALAASAILASAPDSQAFKSGRDFAAWLGATPKQNSTGGKEKFGSITKQGNRYIRRLLVLGAISVLRAAPKRKGALCDWLAALRARKPAKVVAVALANKLARIVWAIITTGGPSAPPSTPRPDFNLGQRT

SEQ ID NO: 116529 - protein, 350 aa, unidentified
MENVSRVGIDLAKQVFHVTAVDAAGEVLERRRLRRSGLQAYLSALPRGSVVAMESCGGAHHWARRAEREGHRPLLLSPQFVKPYVKSNKNDVLDADAIVEASLRPTMRFVEVKSVEQEHVQQVHRVRQQAVKQSTALRNQLHALLLEYGIASPRGTGALLEHLAGALEDGDNELPVEGRALLRELGDELRRVESRVKGFDVQIGALARRMPAARRLMTIPGIGEKTATALAAAVGDASQFRNGREMAAWLGLVPRQHTTGGRPRLLGISKRGDRYVRTLLIHGARSALQRAPRRDDGRSRWAVGVKGRRGQNVAAVALANKNARTAWAVLRHARDYDAEHQGAAAAGRAS

SEQ ID NO: 116530 - protein, 356 aa, unidentified
MTNVKTNFTEQTIYVGLDVHKRSWNAALFLNDHYLRNVHQPPSPQALWKFLQTNYPGADYVCAYEGGKFGYWIQRQLSGNGIRCIVVNPADIPSTHKDEVSKTDTRDARAIAMALQCGQLRGIYIPTQQQEADRSLVRHRKKIWRDLVRCKNRIKGFLDYTGVELPDKFSNSNWSRIFLQWLSAIKFDYVSNRVTLDYMIREAELLRKELLHISNDIRKLMRSSAYKKMYYLLRTITGIGPLTAALLITEIGDMKRFSSFYQLNSFIGLLPSEHSSGEKELKGRLTIRRHRQLRSDLVECAWTAKRTDPALSLFYSDQLKRGKESKLIIVKIARKLLSRIRCVWLTGKPYERGIMK

SEQ ID NO: 116531 - protein, 342 aa, unidentified
MKTTTVGIDLAKNVFQVHGVNEHSKKVFNRQIRRNQMIAFFTQLAPCLIGMEACSGAHYWARRLQALGHTVKLMAPQFVKPYVKTNKHDAADAEAICEAVTRPSMRFVPIKNTEQQAVLSIHRARQGFVKARTAQANQIRGLLLEYGITIPQGIKNITKRVPEILEDGENELPGIFRQLLERLSEHLKDLDSQVDELDTQIHIWHQQNEASKRIACVPGIGPITATALIASIGDASSFTNGRQLAAWLGLVPRQHSSGGKTLLQGISKRGDTYLRTLLVHGGRSVVRVSSAKTLPTYRWLVDLEKRRNRNIAAVALANKNARIVWALLTQNREYQSGFVTAA

SEQ ID NO: 116532 - protein, 349 aa, unidentified
MGEVSTIGVDIAKSVFQVHGVDADGTVVIRRRVGRAKVLEFFSKLRPCLVGMEACATAHHWARELKKFGHDARLMPPTYVKAYLKRGKNDAADAAAICEAVTRPSMRFVPIKSVEQQSTLMLHRTRDLLIRQRTQLINALRAHLAELGLVAAKGREGLCQLVTVVTECGDERLPSNARFACQAIVGQLHAVQTQISGLDKRITQTHRANPDSKRLDAIPGFGVILSTAVVATMTDPKAFKTGREFAAWIGLVPRQNSTGGKDRLGSISKQGDRYLRRLLVVGAISIVRTARMWPDKYPWLIELLGRRPAKVVAVALANKMARVAWAVLAKGETYRAPTRLSNAAITVAA

SEQ ID NO: 116533 - protein, 310 aa, unidentified
MDTLFVGIDVSKDRLDVCVRPTDQAFAVARDGKGLEDLVRRMKALAPALIAVEATGGYETVVAAALAGAGLPLAVVNPAQIRHFARALGKRAKTDPIDAQVIAHFAEAAKPDPRPVADEQSQMLGDLVARRRQIIEMIVAEKQREQRATNRRLRKSIARLIAVLEKEISSVDADIDGLVRGSPVWREKEDLLASVPGIANKTARTLLAELPELGTLDRRRIASLAGLAPFTRQSGAWKGKSMIGGGRAPVRSALFICAMGGARYNPLLKAFYQRLLAAGKPKMVALIAVARKLLTILNAVLRDNKPWQPA

SEQ ID NO: 116534 - protein, 343 aa, unidentified
MQTITTIGLDIAKSVFQVHGVDAGGQVIIRRQLMRRQVVAFFQKLLPCLIGIEACASSHHWSRELQALGHTVRLMPPAYVKPYVKRQKNDMADAEAICEAVTRANMRFVPTKTPEQQSGLMLHRTRHMFIRQQTAVINSIRAHLAEFGIVAPVGRKGVTELLRIVADPNDKRMPEVARACLAALGTQLLALKEQILEFDRMILAWHRSNQTGKRLHYIPGVGPMLATALVASVADPRTFRSGRNFSAWIGLVPKQHSSGGKERLGGISKQGDRYLRSLFVAGALAVIRYAKIHGAGHRPWLTALLGRRPTKVAAIALANKIARMAWAVMAKGERYKQPAALAR

SEQ ID NO: 116535 - protein, 373 aa, unidentified
MSRFFGSERLFPMKKTAQHLIAEVPSRPSRVEMTIGIDLGDVWSHYCTLNEDGEVVDRGRFRTTPKGVEKWFTDLPPVRIAMEAGAHSIWISEQLRELGHEVIVANVRELRAISHSDRKSDQVDAEKLARYARLDPEILRPIAHRTVQQQEALTLIRARDLLVRLRTAAVNAVRGLTKSCGYRMPASSTRCFAKRGLAVMPSGLAQALGPVLEQIAEMTLKIKQYDRLIQQLGQTEYPETQALLKVHGVGHITALTYVLTLGSKQRFQRSRDVGCYLGLRPRRSQSGDRDPQLGITKAGNVYLRSLLIECANHILRPHGRDSALRQWGLHLAARGGKQARNKAVVAVARKLAVLLHRIWTTQEAYMPFYGKAA

SEQ ID NO: 116536 - protein, 345 aa, unidentified
MKNISITRYNVGVDFGSEQMDAKLAAQYEDGTRKILFSRRFENKETGFKNLDGWLKEKCRCKDAEIRISCEATGVYHERCCYFLDGLGYYVTVEVPSRVKSYKKSYGFNSRNDKIDATALAYMGLERNLRKWEPINSFYYELRMLTRYHQSVQEMHTSACNQLHAQQAGMRMSKLVVKQLKANIKLYEKQLAELEKAIEEKIASEPEVKRKIDNIIEDMKGVNVMTVAVVIAETNGFSWFTNRRQVVKYSGYDVVEDQSGKRRGKTKISKKGNAHIRRALYFPAINLVTHNVKPFVDKYERIFERSRIKMKGYTALQKDLLLMLFTLWKKDQKFDPSYQNQQKKK

SEQ ID NO: 116537 - protein, 389 aa, unidentified
MRFVGIDIAAETHVVAAVNEAGEMIFKPTAFTEDADGYRRLRELLGPPAATLVAMEATGHYWRNVFAVLAAEGFEVALLNPLRTHRYAGEDLERTKTDAIDALSIARFASEKRPAVTRLPENATQELRELIRHRDRLLQDFGDRTRQLHRLVDLGFPEFTRHVRRLDSALATAILYAYPTAHAFHGVGVRRVAKLRYDLRQVVGTELAHALIEAARVSVGQHHGAAYQLQVRHVCEDLDRWRGRLRELDRNIEAKLADHEVGSLLTTINGIGPHTAARIVAELGDPASFRDARALAAYVGVVPALRHSGKRRPYARLSPQGHARLRAALWMPTLTAVRTNPWLRQHYQRLLARGKARKVALVTCMHKLLLAVYSVARSRTPFVPRPQTP

SEQ ID NO: 116538 - protein, 295 aa, unidentified
MERKDGQRYHRNRYLERPYRRILAVPLGRAQPSKFRRRFRSLSNWLEGQEDVLIVFEATGGYHRGLERYLGQAGRSFLKVNPKQACRFAQAIGCLAKTDSVDAQMLARMGIALDLSPQQAEGEDAHVLRELLTARRAMAKDQVTAKTRLATAQNPLIQEQLCHRIEDIGADIKALDDAIAQIAKQRGTLEERIRRLMTIPGIGRLTATTMLIDMPELGHLDSKKIAALAGLAPMTQQSGKWQGKERITGGRASSRRAIYMPALVAIRFNRDLHETYQRLVNTLLRETQDWLPERP

SEQ ID NO: 116539 - protein, 406 aa, unidentified
MSDAGTQEPRVVVGIDTHSDTHHVAVVTEYGKPLADQGFPTTAAGHREAFTFITGFGLVLQVGMEGTGTYGAALTKILQGKGMQVIEVNRPNRQQRRLKGKTDSLDAYRAAHSVIAGMSTAVPKAKDGPVECLRVLRASRGSAIKSRNATINQIKGLLVSAPEALRSKYQGLTTGTMIEIMVRSRPSGHLADPSYVTARVLKALAVRYQHLSAEIEDVNAQLQDISESYAPMLQQLTGVGTDVASQLLVTFGDNQERVGNEAQFAALTGAAPVPASSGKTSRHRLSRGGDRQANCALHHIVLVRMNIHRKTKDYVTKRTEEGKSKREIIRCLKRYVAREVYRQITHPVPAPPVLDLRPLRHSLGMTLQQAATDLQTWPSTISRLERGKMRDDELLDRYRTGLHQRA

SEQ ID NO: 116540 - protein, 346 aa, unidentified
MKQITTIGLDLAKQVFQVHAAAADGSPIFNRKLRRAEVLRFFEKTPACLVGLEACGGAHYWAREITALGHDVRLIPPVYVKPFVKRGKTDAADAEAISEAVTRKTMRFVPVKSADQQAAAIVLKTRALLVNQRTQVINALRGHLSEFGIIADAGTTKVAGLISIVRDETDLRLPKAARLALMEVASQIDALRAQIEKLEQAIVATVRRDDDARRLVTIPGVGAIIAASVRALVPDPGGFKSGRHFAAWLGLTPKPHSSGGKERLGRISKMGNTALRSLLVVGATAVLRHARGNPRASRWITALLARRPYKIVAVALANKMARIIWALLVKGGRYQENGARNQMATA

SEQ ID NO: 116541 - protein, 342 aa, unidentified
MSVYVGIDVHRKRSQVAVIDARGEVLANRNVPNGAEPILKVIGGLPPGTPAAFEACYGTSWLVALLEDYGFTPHLVHPSRCKAIASARLKNDKVDAAILAQLLRADLLPEAWIAPPAIRQLRALLRHRVALVRLRTRLRNRIHAIVADYGYDRPAGEYWSGPGRAWLASLQLPAVSRELVEDDLGLIGALQDRIDRLDWGIRQRARSDPRVKVLTQLPGVGPFTALVILAEVGDISRFASARKLASWAGLTPTVRGSDRVAHYGHISKQGSVWLRWVLCEAAQTAKRSPQFAATFQRIATRRGKKIATTAIARKLLTHAWHLLTKTDQAAAPQPAAPQTAAR

SEQ ID NO: 116542 - protein, 367 aa, unidentified
MKKVSTRAAVQSRNISQQKLTVGLDLGDRNSWYCVLDERGEIVLEQKLSTTPKAMREVFGAMPRSRIALETGMHSPWVSRVLSKLGHEVIVAHARSVRLIGESRKKDDRLDAQTLARLARIDPQLLCPVKHRSAKAQADLTVIRARAGLVRARTALVNTARGLAKSYGERLRGCNVRNMNPEKAEGLSPELQRALEPLLAALESLSGQIAEYNECIEALAQQSYPQVALLKQIKGVGTLIALTFLLTLEDPHRFGKSRDVGCYLGLQPGRRNSGQSQPQMHISKEGDPYLRTLLVQGAQHILGPFGVDCDLRRWGLKLAERGGKNGKKRAIIAVARKLAVLLHHLWVSGDVYEPLHNSNRRAVPLAA

SEQ ID NO: 116543 - protein, 403 aa, unidentified
MFCGWDWGSTVHGVCLIDDQGAVVKRWMVQHTEDQLMNVFCELAQLVEGGDVAQVPIAIERGEGLVVGLIAGAGHPVWMVEPSAFKAARPRWGAAGAKSDLSDAFMLADYARTDGHRLRRVEPVGQATRELAALVRARIALVEARTAASNQLWAILAEHWPGAAVVFQKLTSQIALAFLTDYPTPQAAAQLGEGRMARFCRRHSYRGGKSPAELVGRLRAAPASANPIAPTILASIVQGSTAHIQLLNTEITRLERDLAKVLAAHPKTPLLQTLPRVATVSLAALIAEIGPLLERCENPEQVAAMCGAAPVTRASGKSRTVAFRYTANKPARVAITSFADNSRHSSDWASDAYRRARARGARHPHAVRILARGWVRVIWACWTTDTIYDPSRHRGQQLLAAVS

SEQ ID NO: 116544 - protein, 347 aa, unidentified
MRFYTTQHPYYCGIDRHTRTMYVCILDQAGETLLHRHRQATPEALLKAIAPYHDQIVIAAECMFTWYWLADLCAEHSIPFVLGHALYMKAIHGGKAKNDTIDAHNIAVLLRGGMLPQAYVYPREMRATRDLRRRRTHLARKRGALLAHVQNTNSQYNLPAIGKKIAYQANRDGVAERFTDPAVQKSIEVDLALIGCYDELLRDLELAIVRAAKHHDANTLYLLRTVPGIGKILSLVLLYEIHDIERFPRVQEFASSCRLVKCAKESAGKRSGTSGAKIGNAHLKWAFSEAAVLFLRDNPAGQKFLARLEKKQSKGKAFTILAHKLARAVYYMLKRKTAFDMHTFLQA

SEQ ID NO: 116545 - protein, 316 aa, unidentified
MSALTIPARRIIGCDVGKACVVVFDSATGRLASLANEPTALRAFAKTLDPDSLTICEATGGYEAELLDALAQAGRAVHRADARKVKAFIRSLGTLAKTDAIDARALARYGQERHDRLPLWKPREEARRRLHTLVMTRRDLVAQRVAFRNRRQAPGAAPVARRLDRVLRALDKEIDGIEADIEALIRSHASLVRSMQALQTIAGVGATTAATLLALMPELGALPRRQAAALAGLAPHPRQSGARDAYRRTRGGRPDVKRTLFMAALSACKHNKQLKPFYDRLLAAGKKPLVALTALMRKILVIANARLRDAHQNHLS

SEQ ID NO: 116546 - protein, 376 aa, unidentified
MPRYFGLDLHKRYVHGCEWQVDVQKGRHFRFPNTDAGWATFVQQLRADDCVALEVTGNAFTVHDLLSAYAGKVLLANPLELKRLGAGRHTDRVDAERLAKMLALGMVPAVWVPPPAVREVRYLLQYRDRLVRNRRRYLTQAKSVFQRHGLPIPRNVDPRQWLDREEVNRLPQAERVILLSALRQLETVEIEIQAIEAEIARQVADQPAVQLLLTITGVGLLTAATIWAYLGDLRRFRTAKQVTRYAGLDASVHQSGEQDHRGRISRNGSKLLRTAVVEAAHSVARHDQGPLGAFYHRKQRQIGPHKAVVALARKLLIVAWRMLLTGQPYRAAKPTLVVQKQRRLVEVAQAVTDWNAVAVALWPDRLEDRHRRRRVA

SEQ ID NO: 116547 - protein, 325 aa, unidentified
MRKVGQTGVRMSDVPCFIGIDVAKAQLDIALRPSGERWAVPNDASGVAMLVERLQTLHPTLIVLEATGGLERAATSALAAAGLPVVVVNPRQARDFARATGQLAKTDALDARALAHFADVIRPTPRPLPDAQTQELRALLGRRQPLIGMRTAEQNRLAGASERLTKDITAHITWLNVAIATLDDDLETMLRASPLWRANDDLLQSAKGIGPVSAHTFLLELPELGTLTRQQIAALVGVAPLNCDSGTLRGKRTIWGGRAHVRTVLYMSTLVATRFNPQIKVLYERLLAAGKVKKVALTACMHKFLTILNAMLKHRTPWQPQEVQS

SEQ ID NO: 116548 - protein, 350 aa, unidentified
MKKGTTIGMDLGDKTHEVCVLDEAGTVKVRQQIVNTKESVVKFFKSYAGALVVIETGTHSPWIARELEALGCTVLVGNARKLRAIWTAKDKSDVHDAEMLARIARVDRELLYPVHHRGEAAQQDLAVLKARDMLVAARSNLVNHVRGAVKASGHRIAKCSTDSFAGRARDGVPSGLMPALLPVIEEIESMTARIRAYDKQVLDLIEQRHPEAKRLSQVPGVGPVTSLGFVLSLEESGRFKKSRSVGAYLGLTARRDQSGQTDKQLRITKAGDEFVRRLLVGCAHYILGAFGPECDLRRFGLKLAARGGKNAKRRAVVAVARKLSVLLHRLWVTGADYDPDYREHTMKKAA

SEQ ID NO: 116549 - protein, 343 aa, unidentified
MKIYALGIDLGKTVFHLVGLDANGQVVVRKRCSRTQLLAFTANVQAQLIGMEACSGAYFLGRPLRAQGHDVRLMPAQYVKPYVQTNKSDYIDAEAIAEAVQRPRMRFVPIKTEEQLDRQALHRVRERWVMRRTAVVNQVRSLLLERGLTVPKGRRHLNRALPRILEDAELPLSGSFRVLLAQLKLELEQLAARIEQMDAVMEQEARENEACQQLTTIPGVGPVTATALIGAIGNGSAFGKGRDLSTWMGIVPGEFTTGGKQKLLGISKRGNKYLRRLFVQGARSVLQQRDKQAPGLSLWLAQLLACKHQNVVVVALANKLVRIAWAVLYKNESYRAPVLAVST

SEQ ID NO: 116550 - protein, 320 aa, unidentified
MRNAVGLDISKLTFDATAIVGNAEYSAKFDNDSKGLDQFSDRLKSLGCQNLHICMEATGNYYEEVADYFAQYYSVYVVNPLKISKYAESRFKRTKTGKQDAKLIAQYCRSAQESELVKRQKPTDEQYRLSRMTAAYAQIKSECAAMKNRHHAAKDEEAAKAYAQIIKAMNEQLEVLKEKIKEQTEKPNCKEGVKRLETIPAIGRMTAAVLFHHLTSSKFETSNKFAAFAGLSPQQKESGTSVRGKGKLTKFGNRKLRAVLFMPAMVAYRIRAFPGFIKRLEEKKKPKKVIIAALMRKLAVIAYHVHKKGGDYDPSRYKSA

SEQ ID NO: 116551 - protein, 413 aa, unidentified
MNYEPITAVGIDVSKGKSTVAVRRPGGEVVLTPFQVEHDAAGLSGLVRTLRNLDGDVRIVMEHTGMYWHPIALALKEAGFFVSVVNAILIHDFSDNSLRKVKTDKADSMKIANYALSFWAELRDYSPEDETRQMLKMQNRLYLRTKKSSVVLRNGLISLLDQTFPGVNTLFDSQPKRSNGHFKWVDFVKRFCHKDCVADVSLAAFSDAYRKWCTRSGYRFSQSDAERLHAAARNSVATFPKNDSTKLLITQAVDSLNAVYDALYILRGEMLRLASLLPEFDVVMEMQGAGEVTGPQLMAEIGDVRRFTHKGSLVAFAGMDAPPFQSGTFDSKSRRISKRGSPHLRKTLFMVASTILQHSDPANPIFQFMDKKRAEGKHFYVYTVAGAAKFLRIYYARVKAHLMALDTGTSTAA

SEQ ID NO: 116552 - protein, 443 aa, unidentified
MSRKKRTHLRGTRGQAFADKIRGIPLDRILCVSLDIHKYFHVVMLHNALGEIVTPTFEIDIFQTGFDQLCQAMDAAVTQTHAPVVLLGMEPSSHYFENLARHLLARPQPVTLINSFAVKQNRDQQMMQREKDDEIDTAAIGDLLRRGEGSPFRPAQGVYLQLQQLDRVRLGKVKIRTMLQNQILGHLDRIFPGLVILGDAATERYTPLFKMNFWACQTLQHLIRVCPDPRQLAAMSPQDLVKAFHARGYRMGRLAAAKIIAYAKTLLLPEAELIAIRTELLQHDVALLEEVERHIAQLEERLVALVAETPYQVLTKLKGLAPVQVASLAAAIGDPSHYQYAGQVFRRAGLVCGRDDSGTRQRKGKGKHVVKVGDVYLRRALMNALATLILHQPVLLAYYNQLKKSKPNGVARVATARRALGILWATLRDQRPATLVLKRGATL

SEQ ID NO: 116553 - protein, 448 aa, unidentified
MIKINPLSTLYVGIDVSSKSNYVCALDFYKNKYINSSFANNQPGAEELAQKILECLKEHPDLNTVVAALESTSVYSIHIANYLSSCEELMHMKPYVFVVNPKCTANYKKSYIGLGKSDPIDAFVIADYARAGNIETEPWRGSQFLALKRLTRHRLHLVECMTREKTYLVSNLYLKFSELQMLEGENQPFCDIYGATSSSVLVEYLSPEEIIDSSEEDLVSFLAEKSRNRIKDISKTADLLKKAARDSYHLDKALYEPLNVSIASSFNCIETFKKEIKAIDQAIEREIKGLNPNAFIILQSIDGIGPVFAGGIVAEIGDIAAFTSSDALAKYAGLCWRSSQSGDFDGEDTPMTKAGNRYLRYYLGEAANSMRKHNVEYGMYYRKKYNEVPKHQHKRALALTSRKFVRLVYGLLAKNQLYSGVSLDTSIKDKQSNLCLFLSIGLLKLPFF

SEQ ID NO: 116554 - protein, 431 aa, unidentified
MEVIHPRVAGIDVHKKIVWVAVRLPGQRPGERTVTVKRFKTFWRSLRQMAAWLAELGVTDAAMESTGVYWWPVYHALAGAGIEVCVCNAAHMRNVPGRKRDVIDCQWIAELHEHGLLRPSFIPAGAVAELRSRTRYRKKLIEQRTSEGQRLAKVLEDAGIKIDSVASRLLLKSGRAMIEALIAGERNPGRLADLALGRLRRKIEELQLACDGRFTAAHGQMCRLHLDAYDHLTAKIAELDELVAEAAAPFAALIARLQTIPGIGRRTAEVIVAETGGDMARFATAARLAAWAGLAPGDNESAGKRKHAAARKGNRHLRTAMVESAWATARTRTRPGARFRRLARRFGKGNEKKAAVAVAHTLICIAWAVLSRGEDYAEAGEDYYQQRDHRDREHLIRHHQQALARLGCQVTLIPPGDGSPPPSATSQQPAA

SEQ ID NO: 116555 - protein, 415 aa, unidentified
MRQTHVLVAVDVGVQRHRVAVGVPGQLLACEFDLDHTPEGFATFFRQVEAYTEGGVLPVAVAMEGYNGHARPLDQQVLARGWRLFNVHNLKLARFKEIFPGPAKSDPIDTRKRLELFALREELPLAKDVLGEVAPVPEAHAQLKRLTRRRRVLVNEKVRVVNRMQSDLHAVCPGLAEITGAVDNRWFLRLLTCREDVTKLARLQKSSLLKIRGIGVQYAGLLREWQARAQFAPEVAYVGPMIVADARRILELIEQIDALEEACAPIAEDSELAGRIDSIPGFGPITRAELAGEIGTLERFPTEASLALYVGMACLSHQSGQRSRGRTPRQVNRRAKAALMIALARHIEQVPQSKAYYDRKRMEGKPHNQALRALGRHLIRVLWAMVQHRRDYEVRTPAQLPEEAPAHAQNRSLAA

SEQ ID NO: 116556 - protein, 395 aa, unidentified
MYRLLVGVDVSKDLFSASGLGAEGKECFSGTYEMNSHGFSEFLKTLSTHGERLDQMIVAMESTGCYHINLFSFLSSQGIRAVVVNPLLISNFAKLSLRKTKTDKKDALTIARFLLDHHEEISQLSISQDHQDLRDLSRERESLCHLISATKVEIKRVLRTTFAELESIGNFYSGVMLRFLQQYLSARLVRGAKRKAITKALRRPYVGDKLTFSAEDIIKAARNSVAVVSPAKEIIVQGKISTLLHLQERLEKLSKLLTDLCKATRVEDLEILRSIKGVGPNTAVPFLAEVGDVKNFTSSKKLIAFAGLDPSIHQSGKFLGVSKLSKRGNRHLRRAIYLMTTSVVSQNVFFKAYFLRRKKEGLPPQKALFAVAHKLLRVIFAMLSQRTCFNVKEAI

SEQ ID NO: 116557 - protein, 355 aa, unidentified
MTSTKYIGMDVHKESISIQVMNSVGKVVMECVIETKASTILQFIDGLRGDLRVMFEEGTWAAWLYDLLKPHVTEVLVCNPRKAALLKDGSKGDRIDARKLTELLYMNKLATVYHGEHGLRTMKELARSYLTITKDLTRVMNRLKALYRSWGIPCAGNEVYDPRHRAEWLGKISEAGVRRRAEHYYQQLDVLRLLRQEVRRDLLVEAKKHKPWKLLRQIPGIGPIRAALLIALLQTPHRFRTKRQLWTYSGLGLETHDSAQYRAVEGQLQRSKKPVTLRGLNKNHNHDLKAIFKGAALRASSAAGPLRDYYEALLAKGRKPTMAHLTLARKIAAITLIVWKKEVRFDANYLKQQAA

SEQ ID NO: 116558 - protein, 417 aa, unidentified
MVERCAGLDVHRDNVVATTRVPGQGRRRFEQQTQTFKTTLSGLAELAAWLTAAGVTLVGMEATGVYWKTVFQALEDQFECWLLNAHHLRNVPGRKTDVKDSDWICQLVQHGLVRPSFVPPPEIRRLRDLTRLRAAQNNERTRTIQRLEKVLQDAGIKISSVASTSYSKSARAMLEALLSGVTDPEQLAELSKGKMRAKIPQLREALQSRFTIEHHGVMVAQLLAHIDTLDTELRHLTERIELVLAPHSHVIELLSTIPGVQAHAAQVLIAECGLDMSVFPTVGHFASWAGACPGHNESAGRRKSGRTRPGPAWLTSQLTECARAAVRTKETYLASHFAQLRGRRGEPKAIGAIRHDLLVAYYHIVRDQVPYRDLGPNWQRKRYSVEHRATRLQRQLEALGYTVTLDKTDQPEAQQTA

SEQ ID NO: 116559 - protein, 346 aa, unidentified
MKKILKQALGMDVAQKELVVSLGRMHEDLSTEIYAHKVFPNTKNGFSTLVSWTKKRVDSNVKVRYVMEATGVYHESLAYYLAQKDYEVSVVLPNKISNYFRTLETKTITDKTASETIVMFGLERKLDLWKRPKPIFKKLRQLTRERDQIVQERTMAKNQLHADLAEAEPHPSSINRIKKRIALLNKQEKEIQQEIAKMAKEDQEVSRSIEGIRSIPGVGLLTAVTVLAETNGFELIRNKRQLTSYAGLDVREKQSGTSIRGKARISKKGNRYLRKAMHLPALAAIRHSARFKGIFVRLVSKHGIKMKAAVAVQRKLLEMIYTVYKSQTLYNEGYLKINTTKESTII

SEQ ID NO: 116560 - protein, 411 aa, unidentified
MKLFVGLDVSSFDIKVCFLNSEGDQLNAFTIVNDLPGATQLRDTILETVQNESINELRIGLESTSVYSFHPAMFLHNDQSLRDLGGHVLVMNPKQIANFKKSYSDMDKTDEIDAFVIADYLRFGRLPMSVVKEEQYVALQQLTRARYHTVRQISQEKQRFLQYLSYKCNTFTEEVESSVFGKAMLDLFLENYSLDELSNMPLEDLADYLRVKGRNRFPDPEYVAKSIQKAVRSSYRLDKVVEDSIDTILGTSIILIRTFEKQIKALDQAIERIMKGVPQTLQTVPGIGPVFAAGIIAEIGQIERFENEAKIAKYAGLYWRKHQSGRFTADDTSLSRSGNQYLRYYLVEAANSIRRQIPEYSEYYAKKHQEVPKHQHKRALVLTARKFVRLVDALLRSNQIYAPKGARIHEA

SEQ ID NO: 116561 - protein, 400 aa, unidentified
MLSIGIDVSKGKSTVCGMKPGGEIVYAPFEVQHTREGMSELVSLLRSSGEEVRVVLESTGSYHCPVAAALLESGIFVSVVNSLRMKRFCSQSIRKVKTDRIDAMQIALYGLAYWQELQPARLPEDTYRELQLLARQYYQMTSLLIKAKVDFNAICDQVLPGMQELMNDHAGRRKLSDFVLRYHHTTHILEMGETRFQKDYCKWAEKKGYRNCERMAAHIFATAQNGIPVLPNAPSTQIVITEAIRVLHTVEASRDAILTQMQALAKALPEYSLVREMPCIGDTLAPRLIAEIGDVRRFHSKRALIAYAGIDAPPYQSGKFCANNRHISKRGNRYLRKTGYEVMQSYVMHKPANDPIFTFIEKKRSEGKSGKLAMVAGLNKFLRVYYGKVTELYRSSSAIE

SEQ ID NO: 116562 - protein, 366 aa, unidentified
MKKQTKQAIRLKKLCNEVTRILNLGLDEHYWQVTVAMQEDGGRIKVVGKMSHEAFLGWVKKKVAEGWEIRSCYEAGACGYWLHRELEKLGVKNLVVTPRAMGKTGQKQKTDKRDAVELCDTLDRYLRGQHRALSVVKVPTPEEEAKRALIRHHRQIMKDRCRCEARGKGLLCAQGIRVRGCWWKDQTWQELSTDPRLTGWLKQQLEHWRSQIVSAQEKQLSLREEIAALAPARLPKGVGAYSAAVLHYELRGFERFKNRRQISSITGLCPGVHQSNGHGKEGSINRCGIGAVRWVLVEMVWRLMIWQPQYPPVRRLAAGLVKSRRAKKRLVVEAARRLAIDLWRLSTGQTTPEKLGLIMQDHSQSH

SEQ ID NO: 116563 - protein, 352 aa, unidentified
MMIIGCDFHPRFQRICFLLEETGECGQRRLMHTAEAVDYYRSLKGTRVRIGIEATGSYGWFRRLLSELGHELVVGDATRIRASNPRKQKTDKRDAEQILGLLVADRFPAIWQPPAENEHLRQLLLHRSRLVRLRTRVTNQLDGMAKNEGWLIAGGWSGKRRKAIEALPLPGWYGERRKDLLGLLDRLEERIAPLNKAVSHAAANNAEACLLMTHPGVGPVVSLAYVLTIGNWQRFPRGKQVGSYLGLIPSEDSSSDKRRLGHISKQGNTFVRWLLVEAASTAQRYDASWHRQYVRLSMTKHHGVAKVAIAHKLAVRLYWMLRSGQDYGQMMERGSHARQSECPVGRSRRPIE

SEQ ID NO: 116564 - protein, 341 aa, unidentified
MKHKMHVLGIDIAKRVLHAVGMDNRGNVVYRKRLSRHDLMPFIAKLPPVRIGIEACGGAHYWARRFCAYGHEVKLMAPQFVKPYVKSNKNDSRDAEAIAEAVTRPTMRFVPAKDVDQQDIQALHRVRERLMGERTALVNEVHGLLHEYGIVIPKGVAKFRQAVVEKLESEQDKLTLLSQEMFWKLVEEFVALEKQLAYYQEKLEALATTHPECQRLMTIPGIGPLSATALVAAVSDASAFKNGRQFAAWLGLVPRQHSTGGKERLLGISKRGDSYVRKLLIHGARVTLRWVGLKTDRRSQWIRQLLERRGKNRTAVAVANKNARIVWALLTSHQAYQPVQG

SEQ ID NO: 116565 - protein, 316 aa, unidentified
MSAPQRFVGIDVAKAQLDIAVRPTGDRWSVPNDEAGIATLVAQLQAAAPTLIVLEATGGYQRAAVAALAAAGLPVVVANPRQTRDFAKATGQLAKTDALDARALAHFAEAVRPTPRPVPDAQTEALRALLTRRRQLVAMRTAESNRLSPAPAAVQADSTAHLAWLAQRLAALDDDLDTTLRASPVWRERETLYRSVPGIGPVSARTLLLDLPELGTLSRQRIAALAGVAPFNCDSGTVRGRRAIWGGRAPLRATLYMATLVAVRHNPVLKAFYERLLDAGKAKKVALTACMRKLLTILNAMVKHQTPWQPREVAIA

SEQ ID NO: 116566 - protein, 372 aa, unidentified
MKKNSKSTRQSKGKSVHKTTRTSPKITIGIDLGDQKSHYCILDPEGEVLSEGTVRTTESGFAQQFQRMAHSRIVLETGTHSPWVSRLLECYGHEVIVANTRQVRAIYDNDNKTDKVDARTLARLARVDKRLLHPVRHRSAQAQTDLVLLKARDQLVSTRTQLINSVRGMVKSVGGRLPSSSSAYFARKVREHLPDAVREALLPLLEQIEAITVQITAYDKKIECLCHTKYPKTQLIRQIPSVGSLTSLAFILTIDDPYRFQKSRTVGSYLGLRPRRDDSGASSPQLPITKAGDRFLRRLLINCSQHVLGRFGTDTDLRRWGLSLMERGGKNARKRAVVAVARKLAVMMHSLWITGEVYEPLRQANKLKVVAA

SEQ ID NO: 116567 - protein, 345 aa, unidentified
MVICGADLHKRWHTVVVVDETGRKLADKTVRATPDGHLELRRWVAQWPERRWALEDCRHLSRRLEVDLLRSGEAVVRVPPKLMAGVRRSVREPGKSDPIDALAVAQAALREPDLPVATLDGPERELRLLVDHREDLVAERTRHISRLRWHLLDLGVDEPGPRSLDRAAVLADLEARLAGRPEPAARLARDLLGRIRALTLVIRPLGREIGDLAASLAPTLLALPGCGPLTAAKIVGETAGMTRFRSKEAFARHNGSAPVPVWSGNVTRHRLSRGGNRQLNLALHRIAITQMRIDQRGRAYLEHRRAAGDTKSEAIRALCRRISDEVFRRLRADEAARLMPLAAAA

SEQ ID NO: 116568 - protein, 355 aa, unidentified
MNDAKYIGLDVHQATISVAVLDSAGKLVMEAIVETKAETILQCMHGLRGSLHVTLEEGTWATWLHDLLKPHVSRVLVSDPRKNDLGRDGNRNDRRDARELAELLYRNKVKAVYHGEHGLRTLKELARSYLTITRDLTRVMTRVKAIYRSWAIPCTGPRVYALGHRAEWLAKLSEPGVRRRAEFYYQQLDGLAPLRQQARCELLAESRKHSAVKLLRQIPSIGPIRAALLVALLQTPFRFRTKRQLWAYIGLALKTHTSGEYRFERGNLKRSKKAPAIRGLNRNHNHDLKNIFKGAATWAASNGGPFQNFYEARVARGMKPHMARLTLARKIAAITLLVWKKGVRFDPEHLKLQAA

SEQ ID NO: 116569 - protein, 361 aa, unidentified
MANSMNFVGLDVHAHQTCLVSLDQASGELRKARLKTPPLGVLGHLQALAPMRAVYESGPTGLGLARQAAARGLDVRICTPASGARRPTDRVKTDMRDAERLARLLAAGELRFARVPTIEQERFRDLVRAREDIRRDLMRARHRLSKLLLRREIRYLGKGRAWTRAHMDWLRSFQFEDEASVSVGADYLAAVELLLQRRSTLDQAIERLWHESPHAAVIPRLRCFRGVDTLTAAGLCVEVGDFGRFAKPTHLFGYLGIVPSEHTTGEQRRLGAITKAGPTHARRLLVEAAHHCRRVPRVTEQLNRRQRGVDPRAVAIAWRAQRRLHERWVVMRLERNKPAGVVSVALARELAGFLWEAATLD

SEQ ID NO: 116570 - protein, 365 aa, unidentified
MYKKLNSAEVLIQRQPRRLLKESMYYIGLDVHKKTISYCIKEVSGHVHGQGTIGATRYELDLWRNSLPQPWTAAMEATIFTGWIYDHLQPHAAAVKVAHPVMLRAIAASKKKNDRVDASKIADCLRCDFLPECHMASTEMRDRRRTLRYRYLLVRQMVQMKNRISGLLLETGVSHNKQRLHKVKYFRELLATNPEVPDSIRPLLKLSRETIVRLQKTDYVLVSSLQRDPLLAERVQNLRTVPGVGPITALTWALEIGDVSRFPSIKQAISYCGLCGEEKSSADKVLYTPLSKQRNKHLQHVLVEAAKLAPRYSHELALVYEKEKQKGNANRATLAVARKMVAYLLAVDRAQRAFVPAENQGSAAA

SEQ ID NO: 116571 - protein, 320 aa, unidentified
MNIIGFDVSKKELVGIRTDKSASVRDKIIINNNSESIQTFIEEAKRKYPHLMVASEATADYHRRLAEQCLKLNIPFRLINPILTKQFTRATIRKKKTDLTDAWIIAKLALQGEGSLLNLKSLDPLKSINRTAFKIQRIAGMLSAIYQRFERVFPEDGEMLKELAKPLPLLKSTVENLRSKVDGRTDKSTKELLISIPGIGPIIANTLIAEISDINRFSSGKSLVAYAGLDPKVKQSGVSLKHNTKITKRGSPYLRKSVYISAYIAKRHDPELKEYFDKKINEGKRYKEATVATARKILYRVYAVWKRGTPYIKYPQKMLT

SEQ ID NO: 116572 - protein, 370 aa, unidentified
MSEHSTPVMWIGMDVHKTSTTLAILPGDSNEAEILKTTSTVPAIRKLFRKLSKRGAPRACYESSGAGYVLQRGLDRSGFHCDVVASGLIPRRPGDRRKNDRLDAINLAKHYRAGNLTSIEVPDEDREAARQLVRSRLAVQRHIICLKHRIVRVLATHGYIFSGTKCNWTIKHRAWLRTLQRDLPGLLRIVLSTHTAHLEYLEEQRANLDADLVSLSGCDPWRRPVMALRCFRGIDTLTAMTLVTEIGDIRRFRSPRALMSYTGLVPGERSSGDHCHRGPITKAGNAYIRRVLVEAAWHYRHRTGADQKLKNRRQGQAPMVVAIAHKAQNRLHRRFHRLVDRRGQYKAVAAIARELAGFIWAAMMAVAEEE

SEQ ID NO: 116573 - protein, 413 aa, unidentified
MEPIVEKGCGLDVGQEAVVACLMTGPAGERPRKELRTFRTFTAELERMRDWLLAEGCTHVAMESTGPYWVPIYVVLEQAQRFELVVGNAQHIRNVPGRKTDVKDAEWLADLLRHGLIRKSFVPPRPFRDLRDLLRYRRALINAGSAERNRLLKLLESANIKLASVASDVFGASGMLMLKALLRGGSTPEQMAELAKGRLRQKLESLRLALRGNLDLHHRSMLETQIRRIEAAERDLVGLDQLIDARLEPYRDKHDLLTQIPGVDWVTAAVLIAELGIDMSVFPTAKHVAAWAGVCPGNNKTGGKAKRAAARKGNVYLKTALVQAAHAAAHTKGSYFKNKYFRLRARLGAKRAALAIAHKILIAAYHMLSTGKPYAELGETYLDRRDKRGVAKSLIRRLHHLGYTVLITEEATA

SEQ ID NO: 116574 - protein, 433 aa, unidentified
MNTPHPYDLIIGLDRSDRTADLHLIITATGQHSWATIDTAPEALWEWLLELRQQHPQARVALCLEQPAVHLISFLEAYEWIRLYPINPITLQKYREAFVTSRAKDDAKDAHFLAELLLSHHSQLKVWAPEESQTRAVQQLVLHRRAVVDERTGLANRLQALLKQYFPQALVLCGGDLWRPLATEFLLKWPSLQAVQKAKPASLKTFYYLHGSRSAKLLEGRLALVDKAVPVTDQMALIESFVVRVQLVCRQLKLTQHTIQTYDKKIAQAFAQHPDRQIFASLPGAGPVLAPRLLASMGSQRERYQSAAGLQQYTGVAPVTKRSGGSCHIHRRYLCPKFHRQSFHEYAKESILWCRWAAAYYLQQRSKGAPHHTASRALAFKWQRIIWRCWQDHRPYDEQRYEDALRKANSPLVALFDRVELGKSPYKNPVNKN

SEQ ID NO: 116575 - protein, 345 aa, unidentified
MELHTIGIDLGKTVFHLVGLNLRGEVVVRKKFSRTQLLRFTANVHVGLIGMEACGGAHFLGRALREQRHEVRLIPAQYVKPYVKTNKTDYIDAEAIAEAVARPTMRFVPIKTDDQLDLQSLHRVRERWVMRRTAVVNQIRGLLLERGITLRKGRHHVDAALPLILEDADANLSGAVRLLLTQLKLDLDQLSVRIDEADAVIQKTAHENEACRRLVAIPGIGPVTATALIAAIGNGGAFHKGREFAAWMGVVPREHSTGGQQKLLGISKRGNSYLRRLFVQGARAVLQQRTKQSSGLSAWLAQLTSRTHRNVAAVALANKLARIAWAVLAKNEQYRPSVVADIAAA

SEQ ID NO: 116576 - protein, 351 aa, unidentified
MLIIGADYHPSFQQIAFLDQETGESGERRLNHSDGEAEKFYRDLKEQGSSVRVGMEATGYSRWFERLLAELSFELWIGHPAEIKARRVKKQKTDRKDAELLLRLMREGNFPRVWVPSPENRDLRQLLWHRHRLVQMHTRIMNQLQAIAMNEGMRRKTKLWSEQGRAELEKLALGPWTSRRRQELLELLDQIDPVIEELSKAAEQEAHKRPEVVRLMTHPGVGFLTALAYVLIIGTPERFHCGKQIGTYVGMVPSEESSGDKQRLGHISKQGNSLLRFLLVEAAQAAARSNPEWRRRFVRLAMRRHRNIAMVAMGRRLAIRLYWMWRNGCEYSPSMEFGSYAGQLGTGHSVQ

SEQ ID NO: 116577 - protein, 406 aa, unidentified
MYHVGIDIGKRRHDATVLDEEGQERLHISFPNTAAGAEQLLARLARLAEVRPEHFGVVVEATAHYWMGLHGFLTARGLTVTVINPLRSSSIRNLYLRKAKTDARDSFLLADLLRMNRVGESQLPDEDDLKLRQLSRLRFHLVDSVTTSKLRALALLDRIFPEYQSCFASVFTKSSRALLKRYTTPKQIAEARPTHLVRLLKEHSAGRVGRQTAQALQERAKQSIGATVALDTLAFQLKLLLAQIEFVEGQIEQISSAIADLMRAREPVILTIPGIGVVLGAAILGEIGDIMRFRGPKNLVAFAGLDVTVHQSGQYQATRCRISKRGSPQLRRAIWLAAVGSRCRDAQLGDLYRRQLARGKHPKVAMGAVARKLTCLIYYICRHNERYDPNYRLRSTHVAESQSAGT

SEQ ID NO: 116578 - protein, 346 aa, unidentified
MTIVETTRPVTGGVDTHADVHVAAAVDANGGVLGVEMFVTTPRGYAELADWLGRFGEVVRVGVEGTGAYGAGLARFLRARGLMVIEVDRPNRQVRRQHGKSDTIDAIEAARAALSGRASGAAKNADGDVEAIRALQVARRSGRNVRVKYLNQIRHLIFTAPDELRERLRHVHRDQLARTAASLRPAQTGDAVTYATKLAMATLGRRVLALEADGARLDRDLERLVRQVAPTLLAVYGVGVHTAAILLVAAGDNPHRLKSEAAFAHLCGVAPIPASSGKTTRARLNPGGNRQANHALWRIVFTRMSNDERTRKYVARRLAEGKTTREIMRVLKRYVARELYPHIVTR

SEQ ID NO: 116579 - protein, 346 aa, unidentified
MEQISRVGMDTSKRFFQLHGVNAAEEVVLRKKLRRKEMVEFFQALAPTVIGIEACGSSHHWARLLRSFGHEVKLIAPQLVKPYVKRGKNDGADAEALCEAMSRPTMRFVPVKTAEQQAALMLIGLRERLIGNCTQLSNAIRGYAAEFGFTAAKGMAHLDPLLERIQADESLPLAARELFAVQSKEYAQLRGQINEVEAKLKAWHKSDECSQRLIKIPGVGPIGAVLLKMKTPAPEQFRTGRQFAAWIGLIPQDHSTAGKVRHGGITRAGDEALRAVLVAGATAVIQQAVRYGGRASPWLDALLKRKPPKLAAVALANKMARVAWKLMVTGDSYSTKSAPAALASRI

SEQ ID NO: 116580 - protein, 428 aa, unidentified
MNYTQNQKISQISSHTLIIGVDIAKFKHVARAQDFRGVDLGKPLTFENNKEGFDGFTQWCQQIMLNNGCSEFIVGMEPTGQYWLNLAHYLKDHDIPFGVVNPLHVKKSKELDDNSPTKNDVKDAKVIAQLVKDGRYAVPNIPKGVYAELREAMKIRDLLTTDLQAVQGRVHNWLDRYFPEFLTVFKDWEGKSALHILRLNLLPHELLEVSDEDLLTYLRIAAKRGVGLSRIRSLKEAASCSVGIRQGIDMAKLEIVILLDQYEMIKNKFEELDSKIDALLQQVPSVSRMLAIRGVGKDTVAGFLAEVGDLNNYTHPKQIIKLAGLNLRENTSGKHKGQTKITKRGRKKLRALLFRVIMPLVAKNTAFKAMHEYYTKRPENPLKKMQSLIALCNKLIRVLFAIGKKGCQFNEEKMLNDIPHFTSLKMVA

SEQ ID NO: 116581 - protein, 409 aa, unidentified
MRLFVGLDVSSFDIKVCILNGEGKKLDSFSVNNDLPGATTIKERLLQRIANKEVETFKIGLESTSVYSFHPSMFLHYDEDLQRFGAKVFLMNPKQIANFKKSYSDMDKTDEIDAFVIADYLRFGRNQMSIVKESQYVALQQLTRSRYQLVRMLTKEKQHFLQHLSYKCNTFSQEVDSSIFGNAMMELFLEKFSLEELADMPLDELAEFLQMKGKNRFGDPKCVASTIQKAVRSSYRLDKVVEDSIDVLLGTSIAVIRTFQQQIKELEKSIKRIMAGLTQTLESIPGIGPVFAAGIIAEIGQIERFDDETKIAKYAGLYWRTHQSGRFTAENTSLSRNGNHYLRYYLVEAANSVRRHVSDYQEYYVKKYNEVPKHQHKRALVLTARKLVRLVDALLRSHQLFTPERCVKV

SEQ ID NO: 116582 - protein, 338 aa, unidentified
MALYCGIDLHSTNCWITIIDEDRKVVQESKFGNDLAAIMGFFERHRAELEGIAVESTFNWYWLVDGLMDEGYRLHLTNTCAIKQYDGLKYTDDRHDARWLAHLLSLGILPEGYIYPKKDRAVRDLLRRRAFLVHKRTSFLLSMRGAFECRTGMRTTSNDIKKWTPADVEQHIADPLEALGITCLLDPMAAMDGQIKILEKEALKRGNLRAEFRGLKTVWGIGKVLGLTITYEVGDIGRFAKVGNFASYCRLVKSNRLSNGKPKGSGNSKNGNPYLSWAFSEAAHFAVRHHEPAKKFVQRKRAKTNGIVAIRALAHKLARASYYVMKDNVDFDPDKMLH

SEQ ID NO: 116583 - protein, 351 aa, unidentified
MNYYISTTKYNCGIDLHARQMYVCLMDRQGNKMVHTNIIGNDFSYFLKRVAPYRDDLTVVSECTFNWYWLADACFEAGIQFVLAHALYLRHIHGGKNKNDRIDSEKLAHLLRANLIPPSYVYPAERRPVRALLRQRMSYVWERATLKTHLSMNQTAEGMVPVQKGGHNRDVWEERILAQYAHPLHRFSASCDMAMIRAYDEQIEKLETAIVRQAKKDLGRDFHLLLSVPGIGRVLAMTLLFEIDTIKRFPTVKDFLSYCRLVKGSVASAGQLKGMTGGKMGNAYLRWTFGEAAVIAKRNHPLLTPYSEKLTSKHGKFKGNAILSCKIARAVYSMLQKGTGFDAEQVIATAI

SEQ ID NO: 116584 - protein, 316 aa, unidentified
MNEAGEIVEEVRVENANLDDLAQRYAGAQAALEATSNHYHIYDTLSEHLDVTVAHPRELTQIADTDKKTDRVDAKELARMVRLNAVPESYVPTDEIRQARALVRGRQSLVENRTEYANKIHGLLSDHGITEDVKPLSVEGREFLRELSLPTPWETILESYLEVIETLTEEIERLDATIEERAGSLEETQLLMTIPGVSYYTALTIYAELGEISRFDGHKSVVSYVGLNPVIRESGDSRIEGSISKRGSGRVRWLLVQAALTAVHTCNDEYLSRFYDRLASRKNSQKAIVATARKMLVSMFYMLDRREVYDPPGVNT

SEQ ID NO: 116585 - protein, 338 aa, unidentified
MTIVYIGIDLAKNVFAVHGVDQAGKPALVRPAVPRGRLHELIASLPPCTVAMEACSGAHHWARLFGQHGHTVRLIAPKFVAPYRMSGVRGKNDAADAAAICEAAQRPSMRFVPPKSLEQQSQLMVHRARQGYVENRTACINRIRGLLSEFGHVLATKADTVRRQAGELLEELPGWANTVIGDLLSELHHLDERIAGYDRHIQAIAKEDARAQRLMQLRGVGPTTATTIVAMIGSGHEFRCGRQFAAWLGLTPGQYSSGGKTRLGRITKAGDGYLRTLLILGARALLVSAKNKDDSISRWAIGLEARVGYWKAVVAIAAKNARMAWAVLARGESFKMPT

SEQ ID NO: 116586 - protein, 409 aa, unidentified
MHVMHSRCAALDLGKDMLVAGVRLQDSGGVQRECRTYRTTGRQLLELSSWLVSLGVSHVVMEATGSYWKSVWHVLEGQFDLTLANPAQIRNLPGRKSDVNDATWMADLLAHGLIRGSFVPPAAIDALRELTRTRKQFVREITRHTQRIQKILDIASLKLTGTITDVLGVSGRAIVKSLIAGETNPERLADLVDYRLRVKREQLVEALHGRLTVQQRRLLAMHLNLVETIEASIEQLDRDIEKAVDPFRDIVDWLMQIPGLSDIGVPALLGEIGVDMTKFKTHQHLVSWARLCPRLDESAGKIHSRRTQKGAVWIKTLLIQAAWAAIKTKDSYLRAQFLRLRARRGAKKAIVAVAASILTAVYYVIRDRTPYRDLGIQYFNHHDRSRTARRLVARLQQLGYNVQVSEAAA

SEQ ID NO: 116587 - protein, 345 aa, unidentified
MTVEAHRAVTGGVDTHLDVHVAAALDPIGGLLGVESFATSPAGYGQLLEWLSSFGTVARVGVEGTGAYGAGLSRYLHRHGIEVIEVDRANRQARRQAGKSDPADAVEAARAAQSGRARGLAKTRDGNVEAMRALLVTRRSSRSMRVKTLCQIRHLLFTGPDELRERFQGLSHIMLPREAATMRPRTGTDVVAYTTKLAVRTLARRVVALDEETTHIDELLAVLVAETAPSLLALHGVGVEGAASLLVTAGDNPGRLRSEAAWAHLCGVSPIDASSGKVVRHRLNRGGDRQANSALWRIVVVRMVSHAPTRAYVERRTKEGRSKREIIRMLKRYVAREVYRHLPRA

SEQ ID NO: 116588 - protein, 409 aa, unidentified
MSTDACSNVFAGLDWAVHTHAVCIIDIAGGVLDRFEIAHDRDGLAELMRRLARFGERVRIAIERPSGLIVDALVEAGHHVFPIHPNAVKASRPRYRSHGAKSDASDAYLLADLLRTDGHRWRELSPQSDSIRALRALVRCRDDLVSTRVALGNQLHSTLEAYWPGAACIFADITSPIGLAFLKRYPSPTSAARLSQAALGRFCRSQHYSGRRTPAELLERLHSAAVGLAGPLTNEAAGQLVRAMVAVLQPLVTQISDLTRRIERFVESLPDGQIIMSFPRAGRVCAAQILAELGDVRERFPNLDQLAAEAGAVPVTYQSGKTRSVAFRWACNHRLRQAVTCLADNSRHANAWARGIYVAARVRGCDHPHAIRILARAWLRVIWRAWTDRKPYDPELHLGALKLASAQGG

SEQ ID NO: 116589 - protein, 426 aa, unidentified
MAYRIAGIDVHKKMVAVVVADVDVAGTWQFDRRQLGTSPAQLRGLADWLVEREVVEVVMESTAQYWRPVWEALERSWQPRMQQTDTAPRAGTLHLAQAQSNEGPRGRKRDVPDAERLVKRLVAHELTLSFVPDVTQRLWRTVARRKYQSTCNRVQLQNRLECLLEEMHIKLSSLVADLIGPSARRMLRAIANGDTDPGAVVALGSRRLHATPDQLRDALGACTDLHPVYRRLLALTLDELEVIERHIHQLDEELAQLLRGHQDAVERLAAVPGLGVDSAQQIITEVGPTAATFPAAKRLASWVGACPGHDESAGINHSHRAPNGNRQMRRLLNQAANAAVKAKGSIFQLVYRRLVVRLGHAQAIGAIAHRLCRLIWKILHDGVTYEERGPAVTKHRAQRRAAKMIRELRSLGYRVERDLPPASALA

SEQ ID NO: 116590 - protein, 344 aa, unidentified
MAYHTALDVSLRSVSICIVDDDGTIQYEGKAASDVSDIVGCLKRFDPSIDSVGFEAGALTQYLTYGLQAAGYEVICLETRQVNAALAAMRNKTDKNDARGIAQILRTGWYSRVHVKSMESHLTRALLSSRKMVLKQCVDMENEIRGLIRLLGIRLPSPLKHRAFDATVRQSIEKNTTLADSLIPLLDARLVLYQTFLKLDNQAKALVREDTVCQRLMTVPGVGAITALTFKAGVDDPTRFKRSRTVAAHFGLTPRRFQSGEIDNPGRISKAGDPDVRSALYAAAHSLVVRSAEWSSLKVWGLRLVKTKGHRRAVTAVARKLAVILHKMWLDGSDFRYGSTEATS

SEQ ID NO: 116591 - protein, 410 aa, unidentified
MEPILMSCAGMDVHEKKVDVCIVHGSFDKPPKFEIRTFSTMTSDLEDLMIWLKKYGVTTIGMESTGIYWKPIFNVMESDFTIVLANAQRLKAIPRKKTDIIDCKRIANLLRYGLLPNSFIPPREIRELRDLNRTRRKLVGTMTSEKNRLIKVLEAANIKLSSVVSKIYGVSSLALIQSLLEKDKLSREEISQLAKGKLKKKVDLLEKALNGKLTEHHRFLLRMHLENIDHTAKQIKKIDEEIQRKMVPFQKESKLIQTIPGISEVNASAILAEIGVDMSQFPDEAHLSSWAGVCPGNNESAGKKKSSKTQKGNSFLKGALTESAWAASKTKDTTYNAFYHNILRRRGKKRALVALAHRMLIDIYYVLKTGEAYQDMGFEAVRERAVKRQERSMIRFLEKAGYSVIKAEAA

SEQ ID NO: 116592 - protein, 337 aa, unidentified
MKDIKVLGIDLAKNVFQLHGTNAKGKCVLRKRLSREKLAEFVAQINPCIIGIEACMSAHYWARVFQTMGHTVKMMSPQFVKPYVMSNKNDRNDAKGIAEAVTRPDMKFVSVKNIEQQDILLLHRARELVLKQRTAQANQIRGLLMEYGITISQGISNIKSVLVILETNKEKLTVKSLAVFSMLYEQFKIYNDQLSHYDKEIELVVKQDCVCREIMKIEGIGPITASAITATVGDARSFKNGREMAAWLGLVPKQHSSGNKVRLSSISKRGDNYVRKLLVHGARSVVNICDKKSDRKNIWVADKKQRCGYNKASVALANKNARVIWAIMATGECYRTQ

SEQ ID NO: 116593 - protein, 453 aa, unidentified
MAKKAKKLHTKKGVELKIVNPNAAGIDIADTEMQVCVPVDRDGDNNRRFGSFTHDLNEICEWLVDCGIDTAAMEATGIYWIPLFFKLKESGIDVILVNAHEVKNISEKKSDEADAEWLMLLHTYGLLKASYQPENEARQVRNLARHRSNILKSAGKEVQHMQKAMEQMNIKLSNVLSDIVGKSGRAIIDAILKGERRPEVLAQLADGRCKRSKKDIALSLEGTWDEDHLFELKQAYDLYKYLQTQMTECDHKIEELLMSYAAVVDTDMSGLVKCNKTICKKNAVDFDVEKYGYAIWGINPMTIPGMSAGSVLQLIGELGHNFVDKFDTPEKFCKWCNIVPNNRISGGKLISSRVPKRKNPVGQVFRLCANALQDAKNPMGFYFRRIRSRGGHMQAIVATAHKIARIFYVMVKNKCTYDETKVGPDEQELLRKKIVRTQRALDKLNARLSAAIC

SEQ ID NO: 116594 - protein, 333 aa, unidentified
MSKFSNFLGIDVSKEYFDAVIILNSNKNDTIHNQFSNDIKGLKELVKWLKSVTSTNQNTLVCLEHTGMYGKVIIQYLLSKEFNLWVEMSLKIIRSIGVQRGKNDKIDAERIAYYAMKNQDEVQLYQAPRKVIDQIKKLISLREHLITTKAMLVRNSNELKGFEPELSKLHKKYSKATITGIETDLKNIEKALDNLIKSDEKLSNVFEKTTSVTGVGKVTALFLICYTNEFKMYETPRQLACYCGVVPFEHTSGKSVRAKPRVHFMANKKLKKQLHMCAISSIRAEGDLKEYYERKVGEGKNKMLVINNVRNKLIHRICACVKNNKLYEKRIVA

SEQ ID NO: 116595 - protein, 345 aa, unidentified
MTVTSLAPTFELFVGVDIAAASFAASWTLGGPVRERAHTFAQTLEGFSAFQTALLATGIAPAQTLIVLEATSSYWITLAVTLHQAGYAVSVVNPAHAHAFARSLPRRAKTDALDAQLLAQFAAERQPPRWTPPEQVYHELRQRLLVRDGLLTMRQQARNQRHALQQWPVHIAGALDHLDALIADLDTRIATLENELASVLRDGAWAESAALLGTITGIGLVTTAWILVATLNFVACASAEGAAAYAGLVPLTYQSGTSVRGRAQIGHGGHARLRTALYMATLTAARFNPVIRAQYERLRAAGKPPKVARCAAARKLLHLAFAVVTKKRAFDPAYRGAGTAVEQMA

SEQ ID NO: 116596 - protein, 392 aa, unidentified
MSEGTWVGLDVHARKTVAGVLDASTGELRSLRVSTLPAEMVAWLRLLPAPVRVAYEAGPTGYGLARACAEAGIVCTVAAPSKIQRPPADRVKTDRRDAERLARLLRLGELVAVRVPGPHEEAARDLVRAREDARGELMRARQRLSKLLLRHGLVYDAAAWTLAHDAWLRRQRFESRPLQLALEESYAAALQAKQRRDALDQAIAELAAEPPFAEIVGRLCCLRGVATLTALALTVELGDWTRLRPQSLGPFLGLTPSEDSTGERRRLGAITKTGNTHARRLLVEQPGSSGDRCGQAQRLSGADRANLPPYASAPTRAPAGFINAGTRSSGVASGAPWSRSPSRVSSPATAGRSRPCSRPSKRLGEESADGAHRREERPAVQLRAAAHGDARP

SEQ ID NO: 116597 - protein, 415 aa, unidentified
MSTTEIAPSPATRFVALDVHRHYLMVGAVDLQQQVVLSPRRFGFAAFAEWASAHFTHADAVVLEATSHAWLLYDQLQPLVAEVVVAHPQAVKLIAAARVKTDSRDTIKLASLLAANLIPAVWVPPQAVRELRALVTHRNRLVQQRTQAANRLHSVLQRHNLEPPPGQPFALHQRECWLALDLPFAEKLRVPQAMRLYQTLEKLIQESEAELGRLSTCDPWVKQVPFLVQLPGLGVLSAMRLLAAIGEISRFPSAKHLVGYAGLGARVPQSGETHRGGRITKEGRSDLRGVLVEAAWVAVEHHPHGKAQFERFSRRIGQQKAIVAIARKLLVTIWHVLNQQEADGHAQIEAVTRQLLHWMSSTGTTPGKQRNRLLLLSNYLDQLGLSEDVEPVNYHGSTYQLSARQKLLRATQQKE

SEQ ID NO: 116598 - protein, 353 aa, unidentified
MPELTTSSIVIGIDVHKYAHTAVALDCLGKEKERLTFSNDELDKCVGWLSRLGSTENLLIGLEDVNGHGFHVAKRLEEKGFSLIYVPPVLTDRERAHSVHKDKSDVLDAKRVGKVILHKKEETLPATWSIPQEKEHIRAIDLLLQERRDLVREQTRLKNQLHVLFHQHYGNGYRKGFASTFSLKALSWYTASLKKETSYLARSILRRIERLELIYNQIKEIDQTLYEESRHVPAISKLSRNLRGCGHLTACKVVAEIVTIFRFLDRDKLAKYTGIAPITKGTGRTIRVHTNPYGNRKLNQAIHTIALSQIGKAGFPEARTYYEKKLSEGKSKLWALRCLKRQIINRIYDILTT

SEQ ID NO: 116599 - protein, 312 aa, unidentified
MASQDVFVGIDISKDRLDVHVRPLGVGFSVSNEAAGYAALIARLRPLRVKRIVLEATGGYERALWLALSEAGLVAAVVNPRQVREFARAAGRLAKTDRLDAAVIAHFAETFAPRLGKPDPVADRLGEHVRYRRSLQDELVALEHQRRRLETPALRERADRRHAALRAEVKEIECEMRAIVDGDPAKKALFAGLTALKGVGLVLACTLIANMRELGSLSRHQAAALIGVAPLNHDSGTRRGYRAIAGGRRRVRNVLYVATLSAVRYNPAIKEFYRRLSASGKPPKVALVACMRKMLVMLNGRVRDERAAAAIR

SEQ ID NO: 116600 - protein, 425 aa, unidentified
MLLEQSVEPAAILTHLGAIFVSLELSRSKWVITSVSPGAGEKMSRHSLEAGDVAGLLARFAELQRKALARTGRSYPIIVIQEAGLDGFWIHRVLEAEGIESHVVDAASIPVPRRRRRAKTDRIDGETLLRVLMAFKRGDPRVCSMVRAPTPEDEDRRHLCRERKQLVVERVEHVNRIKGLLFSQGTEDYEPLHRDRRRALELLRTGDGRPLEPRLKARIGRELDRLELLIEQIEAVESERDAMLQAEIAPQPPIHAPAPVRAEAEIEIETETEAEAEAPSPPPISPTPPSPVAMLLRLKGIGQEFAAVLWMEAFYRSFGNRRQLAAFGGLAPTPWQSGSIAHEQGVSQSGNPRLRTTMIQLAWLWLRHQPDSALSKWFRARGNTGPGARPRSIVALARKLLVALWKYVTSGVVIEGAVMKTAAVA

SEQ ID NO: 116601 - protein, 412 aa, unidentified
MDVMYPCCCGLDVHKKTVAACLITSTEGPEPVKEIRTFRTMTADLLALADWLQEAGCTHVAMESTGVYWRPVYNLLEGQFELLVVNAQHIKTVPGRKTDVKDAAWIAELLRHGLLRGSFIPSKPQRQLRELTRYRSTLVQDHARMLNRLQAVLEDANLKLASVVTDVYGVSARAMLAAILAGERDVETLADLARGRLRAKRDQLKEALEGRVTAHHSFLLTEHLSTLEYLDEAIARVSGEIDQRLTADQEAIALLDTIPGVGQRAAEILIAEIGTDMSRFPSAKHLASWAGMCPGNHESGGKRLSGKTRKGSRWLRQILVEIAHVASKTKNTYLAAQYRRIAARRGKKRALIAVGHTVLTIVYTLLARKQPYQDLGTAYFDQREQRRVERRLVQRLERLGYEVSLQPKALAS

SEQ ID NO: 116602 - protein, 366 aa, unidentified
MKKQAKQAIRLKKLCNEVTRILNLGLDEHYWQVTVAMQEDGGRIKVVGKMSHEAFLDWVKKKVAEGWEIRSCYEAGACGYWLHRELEKLGVKNLVVTPRAMGKTGQKQKTDKRDAVELCDTLDRYLRGQHRALSVVKVPTPEEEAKRALIRHHRQIMKDRCRCEARGKGLLCAQGIRVRSCWWKDQSWQELSTDPRLKDWLKQQLEHWRSQILSAQEKQLSLREEIAALAPARLPKGVGAYSAAVLHYELRGFERFENRRQISSITGLCPGVHQSNGHGKEGSINRCGIGAVRWVLVEMVWRLMIWQPQYPPVRRLAAGLVKSRRAKKRLVVEAARRLAIDLWRLSTGQTTPEKLGLIMQDHSQSH

SEQ ID NO: 116603 - protein, 368 aa, unidentified
MKKNNTCPKSPKRSKTRKRSLTIGMDLGDKTSRYCVLDSDGEIVREGTVTTTKKGMKQRFGSLAGCRIAIEVGTHSPWVSRLLSSLGHEVIVANARQVKLISASSRKDDRLDAQTLARLARMDPQLLRPIRHRSEKAQGDLMQVRVRAALVDTRTGLVNAARGLAKAMGERLPKCDADQMGVAKTQGMSAELSEALRPLLETVEALTKQIKASDQKLEQLAERDYPETELLRQVSGVGSLISLTFVLTIEDPSRFQKSRDVGCYVGLRPRRSESGESRPQLGISKEGDEYLRKLLVQGAHCILSHKSPDTDLKRWGLKLAGKGNKNAKKRALVAVARKLAILLHHLWVNGEVYEPLRNSRLLEQKAVA

SEQ ID NO: 116604 - protein, 411 aa, unidentified
MTKPTRYLGLDVHKDLIAVAVCDEAGPARSLGAIPNSPEAVERLMRKLTRDATILAAYEAGPCGYVLYRQLSALSVPCIVVAPTLIPVKSGDRVKTDRRDAEKLAHFLRSGDLTPVWVPDESHQGLRDLLRGRQDAKQDQRRARNRLSKFLLREGLCPSDGSEAFSAGYFRWLKSLQLPIAAQARTLDDCIAEVMHQDARVKGLESDLAELVKTLPHAMQKVMAALQCLHGIALLSAATIVAEAGELSRFRKAGQLFSYAGLVPSERSSGGPRGQSRGGITKTGNSHLRGIVVEASWHFQSRPGVSAALLKRRQGQDPRILAIADQAHQRLHRKFRRMEQRGKSSCKAAVAVARELLGFVWAIARQVDAMPDSLAPQQSHTSLAEKHTSHVLPTSRKAATSRRRASTEVAA

SEQ ID NO: 116605 - protein, 350 aa, unidentified
MQQFIGCDAHKRFSVFVAVDERGNATRPVRIEHVREQYVQFLKELPPGSEIAVESTGHWYWLVDEMERAGHHVHLANPMEAKKRMGKTNKTDALDAKGLAILLRNGTLPESWIPPGALRDQRELLRTRMALRDLRSSLKHRIHAAVDRYGLHTDAISDLFGTKGREYLASRLPKFPPETARMVEVQLLALDQLATHIESTEDRICSEIAPTAEVQLLRSVPGVGEILAPVIGLEIGDVHRFPRAENLASYAGLVPRVFSSGGHTRLGGISRFVNQYLKWAFVEASNCAVRLKAHRQSHVGCLYQRLLAKRGHGRAIVAVARHLAEASYWILSKQEPYRAPHQNRISSRNG

SEQ ID NO: 116606 - protein, 432 aa, unidentified
MKKRPYRATAVNDIDEQALINALANQEATVGIDVAKEDFVAALKNAEGVVVKTIKWKHPAQSRTFIGLLSKLKQKAAVKLQAALEPTGTYGLALQHLLLSAEVPVFQVSPKHVHDMMEIYDGVPSSHDGKSAAVIATLHQDSKSHRWIPHSDQRRELRARIKQMDLQREHFQRMVNQLEALLAMYWPELPHLLDLDSVTLLALLAKFGSPQEVARQAVEAEDLMRRKGRSLLKAEKKASVLESARTTTGVVPLEVEVEALKWLAVEMQRTASMLKEARETVEALCKDEPFEQLSEVVGKVTSAVLVAVVGDPRDFPSASHFVKAIGLNLRINQSGKKKGQLTITKRGSGTVRQYLFLAALRWVQRDTVAKAWYEKKVVRDGGLKMKAVVALMRKLAKALFWVARGEAFDSEKLFNTKRLFKGQQCWTATLAK

SEQ ID NO: 116607 - protein, 352 aa, unidentified
MDEKYVAMDVHKASVVIGVRDGTGKMIARAMVETKAQTLKDYVRGLSGTIHLTFEEGTQSAWLYDLLRPLVAECIVCDPRRNKLLEDGNKSDEIDVTKLSELLYLGRLRPVYHGAQGTRVLKELAHNYEALVKDQTRVKNRLKAIFRGRGISYEGDEIYDCQEAEQWLAKLSERGVRERARQLYQQLAQLAEWVGGARRQMLAESRHQKAKKILQLIPTLGEISVAQLIATVDTPFRFRSKRQFWTYCGLAVVRHTSADYHFEQGELRRRLKPGPTRGLNRNYNRRLKRIFKTAAQTGSTKGPFKSYYQGLLGRGLRPELAQVTLARKIAAITLTLWKKGERFDPEKLVKSD

SEQ ID NO: 116608 - protein, 376 aa, unidentified
MTKVYAGLDAHKESIVIGLAFTGGGEPELYGKAPADLDGFLRVLRRVQAKYGLAKEEIRLCYEAGPTGFVLARRLRGLGYDTEVVAPSLTPIRSGDRIKTDPRDARKLAGLFRAGELTAVHIPEAADEVIRDVCRARTDAVDQQMRCRQQLGAFLLRNGYHYTGLSHWTEAHLRYLRELVLQDPIQKLVLEEYLQRIDLAVGQVNRIKGQMELLLEGWTRKPFVQALQGFRGFQLVASMIVASELGSLGRFDHPRQLMAYLGLVPGEHSSGSRRRQGAITKCGNSHVRWILIEAAHHYRMPPKVSKELSHRQEGLSREVRELSWRAQNRLHRRFVKLSLRGLHYNKIVVAIARELAAFIWELARVLDQEQKTRRVA

SEQ ID NO: 116609 - protein, 360 aa, unidentified
MRTQSNKINSNCQNIYVGFDVHKKDWRVTIMTEKIAHKTYTQPPIPEVLYSYLKKNFPGCTYHSVYEAGFCGYWIHNRLLELGINSIVVNPADVPTTGKERDQKTDKRDSIKLARSLRAQELTPIYVPSLKTLEDRSLVRFRSTLVKDLTRNKNRVKSFLHFHGIQIPESYKNSHWSKKFINWLQSIEMKEQSGKMTLDNMLEAAIRLRETLLKVTKQVQTLSKSEPYKTKVDLLRSISGIGIITSMIILTELENIQRFSNIDHLCGFVGLVPSSKSSGEKDGTGDLTSRGHSFLRSCLIESAWVAARTDPSLAIAYNKYCKRMKSNEAIIRIAKKLVARINFVLKNNCKYDYTKSLQKN

SEQ ID NO: 116610 - protein, 338 aa, unidentified
MGTYVGIDLHSSNNYIGIMDQDHKRLFGRRLPNSLDKILMVLEPFKSDLKGVVVESTYNWYWLVDGLQEHGYRVHLANPAAIKQYEGIKHTDDKWDSFWLAHMKHLNILPEGYIYPKEQRPVRDLLRRRLFFVRHRTANILSLQSTITRNLGIKMSSNEIKKLDMDDACDLFDSSNLVFMAQNNISTIKHLGKIIKGIEKEVKTQVQLRKEFVMLTTIPGIGIILGLTIMLEVGDISRFYKAGNYSSYCRCVGSKRLSNGKKKGENNKKNGNKYLAWAYVEAAHFAKRYIPKAQRFYQQKMAKANGAVATKALANKLARASYFIMRDQVPFDEDMLFR

SEQ ID NO: 116611 - protein, 390 aa, unidentified
MIYVGIDVAKDKHDCHILTSDGEVLCDNFSFLNSREGFNAFITLLFGYCKDISNIKIGLEATGHYSKNLLLFLYKANLFVVVFNPLSVSQSRRAISLRKTKSDKSDSRYLAEMLFSNMSCPYQEQTSDVSTLKSLTRARYRLVKEIQPLKNRYRRSLQILFPELPSFFPSFYSNTVFTLLKAMPSAKDIACCNILRLTNILSKSSRGRLKRDKAEALKLAAINSIGSYNFGDATELKFIIERIEFLKSQQIELENSIKSVMNNINSPITTIPGIGFTLGAIILSEIGDISRFSSPSKLLAFAGCEPSTYQSGKFTATNTPMVKHGSKYLRNALYLATTMAYLHSPSFHTYIDLKRSQGKHYYIAISHGMKKMSRVIYSILSSDKPFTEVI

SEQ ID NO: 116612 - protein, 287 aa, unidentified
MFAESVDVVIGVDTHRDSHALALVDAGLGVLVVEERVEANRAGYRRALKVASGCGQRRLWAVEGTGSYGAGLARYLQQRGERVLELERPARSGSRGRAKSDALDALRAARAALTGEPLAELRSGGRREALRVLLVSREASVAVRRRGLNQLRALVLTAPAELRERLLGLPKGELVNRCIALRPRPDQQPQLRGTLLALRSCGRQVKLASREAATLERELAALVQQLSPQLLNHYGVGPITAAQLLVSWSHPGRLRSEAAFARLAGAAPIPCSSGKTIRHRLDRGGDR

SEQ ID NO: 116613 - protein, 389 aa, unidentified
MRYFAGLDISDATTNICIVDELGTVVHEIIAETKPESIVSKLKSLNIPIEQVGMETGAKSNWLWHVLNRSYPTTCYDALKTSQLISLKINKTDKNDARIIAEVVRLNGLSDVLNLQVHVKSESSQEIVTLIRAREDLVQQSIHVYNVVRGICKTHGVAIPPTSPENFTKVVHKTIESLPLIVALSIQALIALYDPIQNSIRMLTQKIEIIAKKNPNAELLTSIPEVGPITALYYVSLIDDPKRFSESKSVGAYFGLTPLQQSSGERHYQGSISKRGDSLMRKLLVGVARRILQRNAPCNDLKKWGQKKEKSRGQGKAAVALARHTSVIMLAMLQTLTPYKEKPATSVQKKSLVLTPEGLASLMKLSQEKGSIDLRSIKHLEKLLETANA

SEQ ID NO: 116614 - protein, 347 aa, unidentified
MTIIRIGLDTSKHVFQIHGVDENERPVLRRQIRRQDVAKFFAKLAPTRIGMEACGASHYWARVLRGLGHEVVLMPPQYVKPYAQRNKNDKIDAEAICEAMSRPMVQARFVPIKTVEEQAALTMLSARDLLVKQRTMLINAIRGHAAEFGVTVAKGPQQVTELLRRLASDECVPALAREMIGVLASQLPVLEARLKAIEARLVAWHRQNATSQLLATIPGIGPIGGVSFALKVPQPRVFRSSRHFAAWIGITPREHSTAGRQRLGHISKEGDEDLSRLLVLGATAVIQQAKPGRASPWLLGLLARKPKKVATLALANKMARTIWALMISGEVYRPEGGGSGGLSRLQT

SEQ ID NO: 116615 - protein, 435 aa, unidentified
MIPAVLTHCAGIDIGKRALAVCLMVGPAEAEPKVELREFSTFTRDLEAMKEWLVQASCTHVVMESTGPYWKPVFNVLEDRLVVCLANAEDVKGRKGHKTDRRDAKWLAHLLRHDMIRASFVPPRPIRELRDLTRRRKQLLSDATSERNRVQKTLEDANVKLGSVLSDVFGVSGQQMLEALLEGRGNVEEIANMARQKARQKIPQIIESLSGHRLSEHHRFMIRQSLEHLRMLEVQIMTLDEEIIKRVDSLGLEHLISLLQTIPGLGHDSAVAILAEVGPDMNQFPTAKQLSSWAGVCPGNKKSAGKDFRGHTTRGNRWLRATLTECAWAVSRSKESPLRDKFWRWAVGGKKKAVVAVAHGLLLQVYQILRTQQPLTEAPPPIDEKRRKRIIRHHLRCLGRLGISTGPKRVSVDGAAPPRGRPPRNAQNSPSRGRS

SEQ ID NO: 116616 - protein, 346 aa, unidentified
MRFYTNQHKFYCGIDLHAKTMYLCILNREGKIVLHRDIKTSPDIFLKTIAPYREDIVVAVECIFTWYWIADLCSEEGIPFVLGHALYMKAIHGGKAKNDKVDSHKIAVLLRGGMMPMAYVYPSEMRSTRDLLRRRNHLARKRAELLAHVQNTNHQYNLPDTGKLAYKSKRKGVAERFQDISVQKNIELDLSLLDHYDQLLLRLEHELSLIAKIHDADSYFRLRSIPGIGRILGLVILYEIHDIDRFPRVQDFVSYCRLVKSAKESGGKKLGTSGKKIGNAHLKWAFSEAAVLFLRRNPQAVKYRDKLMRKHGKAKSLTILAHKLARAVYYILKRKEVFHPKVFFAK

SEQ ID NO: 116617 - protein, 341 aa, unidentified
MADAKLIGIDLGKHFFFVHAQDARGQQLWRRKFTRHQLITMLAQHPPCTVAMEACAGAHWLARKFQSFGHQPRLITPQFVKPFVKGNKTDFGDAHAICETASRPSMRFVAIKTPEQQTLLALHRVREALVSERTATSNQIHAFLLEFGISLPTGARTIARLPALLDEPAHELPPRLIATLLRLHRRYGQLSDEIADIERDLKAQLAEDEAAQRLLTIPGIGPITASRLIAVAGDAHAFRHARDFAASLGLVPRQHSTGGRATLLGISKRGNAQLRSLLVQGARAVMQHIERRHDALGTWVRGLLQRRHSNVVACALANKMARIVWAILARGGEYRAQPCPA

SEQ ID NO: 116618 - protein, 347 aa, unidentified
MSFIGVDLHTTSFTVCRLEADGSEAFATYQLAAADLERFCLTLDADDEIAVEATGNAAWFRGAVLSCVGRVVVVNPRQFGVIRRSVKKTDRNDARALAFFLSKDMLPETRVKTVAESELASLTHTRDLLVKQRTRLLNKIHALHTRHGIKLKKASLGSKRRLNALEIGRFSKLEQVELRIVRDQALSLTEAIGEIDRTIIAAAEDRDGYDGLVSIKGIGPRAAAVFLSGIGNVDDFEDADKLAAYFGIVPRVSQSNETDNRGRITKRGNKLVRTTLVQCTLIAIRYSGYLNAFYRRIKARRGAGKAIIATARKLLKIIYDTLKNGWVFEDFANFKIAAPSITSGQPS

SEQ ID NO: 116619 - protein, 344 aa, unidentified
MDHFAGLDVSVKETSVCIVDDTGRIVKEVKVASEPQSLLKVLGSPAYRFKRIGLEAGPLSQWLFSALAEAALPVICVETRHMQAVLKAQINKTDRNDARGIAQMVRAGLYRPVHVKTLRSQKLRMLLTHRKLLQSKAIAIENDLRGTLRNFGLKVGMVGKVRFEARIQELVENQPDLAVLVEPLLIVRRVLREQIVILHRRLLATVRDDEVCRRLMTTPGVGPVVALTYRATVDVPARFRKSKSVGAVFGLTCSRYQSGEIDWSGKISRCGDEMMRTMLYEAAQSMMHSKKWSWLKAWAMQIARRRGMKKAIVALARRLAVIMHRIWIDGTEFRWTREQAAAAA

SEQ ID NO: 116620 - protein, 360 aa, unidentified
MAKARTLVGLDVHAAKIVAAVLDADTGELKSFSMKGDTLAAAGFCAGLPQPVRVAYEAGPTGYGLARELAKRGVDCVVAAPSKIPRASGDKVKTDARDAELLARLFLAGKLHRVRVPGPEEEALRDLVRARETLRLDLMRARHRLSKLLVRHGVQFDDGRAWTERHRAWLKTVDLGWPAAQATLLDAQGSIEALCHRREQLEREIVAILPCSPWSREVGRLRCLRGVDTLTAVGLCAEIGDFERFARAEQLMSYVGLVPSESTTGNNRRLGSITKTGSAHARRLLVEAALHYRKTPALRKALAERQKDQPPEAVAIAWTAQRRLHRTWTRLEARKKRRTLIAVAAARELLGFCWAIAQIE

SEQ ID NO: 116621 - protein, 369 aa, unidentified
MAKPITYVGLDVHKDTIAVALAEAGLRGEVREHGKIPNTPTALKALTVKLAPAGRELRFCYEAGPSGYGIQRQLTGMGHECAVVAPSLIPRKPGARIKTDRRDAINLAKLHRAGELTAVWVPDQAHEAIRDLVRARQAAVRTLRQARQQLSGFLLRHGCHYHRPAWTQLHRRWLASLKFDQAVNHIVLEDCIAAVEAAIARRDRLEAHIEAALPEWSLAPVVEALQALRGVRLVAAATLVAELGDITRFTNPRQLMAYLGLVPSEHSSGRTRRQGGITKAGNGAARRMLIEAAWSYRFPARIAREQLLRQERLAKPIRDIAWKAQERLCRRYRKLARTGKQPTVITAAIARELAGFIWAIAKQVQPMAT

SEQ ID NO: 116622 - protein, 427 aa, unidentified
MNKVDVSRIEQFRQLKKEIRGTDDYLIVGIDVAKSKHHAFFGTPNGRTVLKGLVVENSASGFEHLLTLTQFYVDRDGFKQVVFGVEPTGVYHKPLAEFLIDQDHLVVYVTNEAIKKNRALLDGRWDKNDTKDSANVADLIAQGKCYYYDYPDHGLRDIRSLLLFRKRLKKRLHACRVRIRNNLVAQYFPEMDKHWNKAESENLAVVRWCLSPRKINDVPFEKFHQMVTTRNRGMRQYRRLHKIWEMAPHSIGCRASAASQLEARLLVENLYYLKEQIAEVERTIFDISQSYEEYEYLLTIPGFGPYVSAVVLGAIGNPYRFENASQVIRLAGLDLNAHRSGKTSATAVPVVSKKGKADLRYALYQAALIASSLTIHFREYYHRLLDGRQKEKGIRTKMRVKLATKLLVIAWTLMKKKETFDPVYLKT

SEQ ID NO: 116623 - protein, 369 aa, unidentified
MMDLTLFIGLDVHKKTISVALVDAAASATVRFYGTIVNTPDALLGLSKKLSKDGQALHFCYEAGPCGYGVQRQLTRLGHRCDVVAPALIPRKVGDKVKTDRRDAMMLAQTLRAGQLTAVWVPDEAHEAMRDLVRLRAQAMRDLRKTRQQLLSFLLRGGLVSPYGHWTKMHRRWLGELVFAHPAQHLAHEEMLQRIERAEALCDRLKGAILDLVPQWSLAPVVQAIQALRGVSLIVASVIVAEVGCFTRFDNPRQLMAYLGLNPSEHSSGSTIRRGAITKTGNALARTCLVEAAWTYRFPARVTQIIRDRLAGLPEPIRNVAWKAQVRLSARYRKLVAAGKPTPKVVVAIARELVGFIWAIARMVEPKFA

SEQ ID NO: 116624 - protein, 390 aa, unidentified
MIYVGIDVAKDKHDCLIVDSDGVILFQPFTIPNNRQGFSELLTNLKTCGSDLAKIKVGLEASGHYSDNLLEFLIANDLPTTVINPLHTSLYRKSLSLRKTKTDTVDAHSIVTMLRTENLKPYSQSSYHVRELKSLTRYRFSLIQDCARLKISYARLCVILFPELEKLVPSLHLASVYALLSELPNARAISECHLTRLTNLISIASKGHYGKEKAIEIRIAARDSIGSYSEVKSLELQQTIQMIRMMENQIKQVEAKINPIVDELHSPILTIPGISYRMAAIIIAETENFCNFDSAEKALAYAGLEPSVYQSGQLLSTHAKMVKRGSKYLRYALFNAAKYVCHWDAGFGKYLAKKRAEGKAYNVAVSHAAKKLTRVIFHLVKTNQSFVSQA

SEQ ID NO: 116625 - protein, 349 aa, unidentified
MKQNEVILGVDTHLDAHVGAVISEAGRLLGTRSVSTDTAGYLDLLTWANSFGHLRRAGVEGTGTYGAGLARVLRDHEIEVLEVNRPDRAMRRSKGKSDPTDAENAARAVLSGRATAIPKEQSGAAEAMRAVSVARRSAVKAKTQAINQLRALLVSAPQDIRDRLLKAKTAECVESCARVRSLGKTLMLQTLTATLRLLAKRWLTLAEELKVLDTMLDSLTTQHARRLRERFGVGPQTAAVLVAVAGDNPERLKSEAALAALCGTSPLQASSGKTVRHRLNRGGDRSANNALWTIAMVRMRSDPRTRAYVERRTKEGMSNKEIHRCLKRYIVRELYPLILADLADSTASA

SEQ ID NO: 116626 - protein, 285 aa, unidentified
MDQHIGLDVSLKDTSISIRQDGKRVWRGKCPSDPKLLAEVIRKRAPNAKRVVFETGPLSVWFFHALTAEGLPAICIDARHAKAALDMAANKTDANDADGLAHLAEVGFFREIRVKGFDSMLMRTLIAARRQLMKMRVQMSNQIRGLMKTFGLVIPKGAGSVFERNVVTLLEDEDNLARIILPLLKAWGDIRLRVAELTKQLVVMAGTDQRCRLLASVPGVGTVTATAFAAAVEDSINFKNSRAVGAWVGLTPKRYQSGEVDYEGHISRRGDAKLRTLLYDAASVI

SEQ ID NO: 116627 - protein, 414 aa, unidentified
MVEMEFGAYVGLDWGDQAHTAAVWDVGAQRRTEKRIEHTPAALHEWVAQLRSIGHGGRVAVAIEQSRGAVFDALSGYDFLTLYPINPRSAARYREAFCPSNAKDDPTDADSLLEMLRKHGESLRPFVADDACTRSLRLLTEDRRELVDQRTAHVQRLTDRLKAYFPQALTWAGGLTSVQACEFLEHWPTLDAIKRARPSTVRAFYRQHRHSEASIDQTLKAVRSAMSLHRDQPIITAAVMMVRSEVAQIRALTASITEYERQIAATFAEHPDAPIFASFPGAGAQLAPRLAAAFGTNRDRYAGAVDMSTLSGIAPVLRRSGKSVVVQMRWACPKFMRQTFHEFARVSIGQSAWARAFYQQQRQRGHSRHQAIRTLAYRWIRVLHACWKNRTAYDEKKYLQQLARRGSPLAALAA

SEQ ID NO: 116628 - protein, 350 aa, unidentified
MSKGITVGMDMGDKKHNICVLDAEGEVLTRTTVTNTGKAIRKYFGVLEPCRVAMEAGTHSGWVSRILEELGYEVLVGNPRKLRVIWDSDEKDDDRDAEMLARIARFDPHLLYPIHHRGQKAQTDLAVIKARDMLVKVRSTLIAHARGTVKSTGQRISACSAEAFHGRLLKEMPAELMPALEPVMKSIAELTCRIRHYDKLLEKLCSEKYPETEGLRAIQGVGPVTTLAFVLTIEESSRFDKSRAVGPFLGLTPRRDQSGQIDKQLGITKAGDAYLRRLLVGCAQYILGPFGPDCDLRRFGLKLAARGGKNAKRRAVIAVARKLAVLMHHLWKAGANYDPLYQQNRKQKVA

SEQ ID NO: 116629 - protein, 422 aa, unidentified
MAVFCGVDWAEGHHDIAVIDGDGALIGKRRIEESLDGVAEFTAMLTAAGDSAEAPIPVAIETPRGLLVAVLRASGRPIYPINPLAVARYRERTSVSGKKSDHVDAMALANILRTDAHLHRMLPDDSPLARSISVLARAYQDGVWRRTKLVQELRARLREFFPGFLSAFAAGSGSGRGLSTTQLASADARAVLAIAPSPAEGVKVSKARVETALRRGGRQRRITSLAASIVAALRTPQLRQDPIVEQAMRVETLALLSVLDAVCASVDQLGGALVEAFAQHPDHKIITSFPGLADISGAIVLAEVGDDRDRFVDDRALQAFAGSAPVTRASGKSRTVSRRRTKNNRLAGIGYSWAFTAAARPSPAREHYLRRRGRGDGHPAALRHLFNRMLGQLHHCLLTGQTYEPIKAFPHAMPTPVQQVAA

SEQ ID NO: 116630 - protein, 417 aa, unidentified
MATVEIVYPTCCGIDVHKNFLVACIAKTDEHVHTNHLMRRFSTNTGDLRKLADWLATHNCKDVCMESTGKYWIPVFNILEKTCNVCLTHPKYVKAIKGKKTDKKDAKWISELFKCDLVRASFIPPFDIRQLRDLCRYHAKLTYMVSSEKNRSQNCLTTSNFKLDAVFSDVFGKSASRILDNLIILGNSNFEIAPLIHKGCKASVEEIQAALDGEFPFAQSEKLKIIRKHMEHLENLKKTLENLIYQLADKYQSEITLLLSVPGISSPLTAIRILAEIGADMSVFETAKKLCSWAGVTPQNNESAGKKKTTRISRAGAYLKPLLVQIALAVSQSAKHPEIRDKYQALKKRRGHKKAVIAIARRLLTAIWHMLNKGELYNTDLYRKSDKPPAKRVLTPEQAFALLRSKGYQIVEPEPAA

SEQ ID NO: 116631 - protein, 350 aa, unidentified
MKVTTIGIDLAKNVFQVHGVDEHAKTVIKKQLKREQMAAFFVNMPACLIGMEACSGAHHWARKLTAMGHTVRLMAPQYVKPYVKSQKNDAADAEAICEAVGRPNMRFVAIKTVAQQSVLALHTVRAGFVSERTALSNRMRGLLAEFGVVIPQGLSKLSSRLPEELEDASNELTGVVRLLMQDLLEQLKTLDALVKKLEKQIKVWSRQDEQACRIEQVPGIGPITASAMVASLGDVKNFEDGRQVSAWLGLVPRQHSSGGKTVLLGITKRGDSYLRTLLIHGARSAILAAQKRKDGPPPWLASLLGRKHPNVAAVALASRNARTVWALLAHKRDYDPKHGLDKRISAALAA

SEQ ID NO: 116632 - protein, 414 aa, unidentified
MDVVYKSCAGLDVHKKVVVAALIVLDALGRGYKETRTFGTMSIDLLALSDWLQSHGVTHVAMESTGEYWKPVYNILENNFELLLINAQHIKAVPGRKTDVNDAEWIADLLRHGLLRASFVPPVGQRELRELTRYRSTFVRARATLVNRLQKVLESANIKLASVATDVTGLSGRAMLEAIIAGQAQPEEMAELAKGRMREKRAELAKALSGRVKAHHRFVLAELLCQIDSLDETIGRFNEQIEEYCRPFEQAVVLLDTIPGVARETAEVIVAEIGVGMSRFPSANHLAAWAGVAPGNHESAGKRYSGRMRQGNQALKTALTQAAHAAAHTKDTYLAAQAHHLTGRRGKKRAIMAVAHSILVIGYHLIQRQEPYRELGGNYFDQQRPEATAKRLVKRLERLGYQVSLQSQAVTAAV

SEQ ID NO: 116633 - protein, 392 aa, unidentified
MEEKAWAGVDVGKGFHWAHVVDASGTELLSRRVDNDEADLLALIDEALSLAEDVAWAVDQPGGGAALLLALLWERGQGVSYVPGLSVDRARDGYRGESKTDRKDARVIADQARMRGDLGRLEPGDDALAELQLLLARRRDLVADRTRAVTRLRETLLALFPALERAFDFNTRGPLELVARYQSSGAIRRAGRRRIAAYLNKRGVAKADALAEKAVAAAKSQSATLPARDVATRIVAELSESVLVLKERVDALDRDLGRRFCARPEAPILSSFPGMGPILGAEFLVAVGDICAFGSADRLAAYAGLVPAAHDSGKRVGNHRKGRGGNKVLKRVFYQSAFSSMRAVPESRAYYDRKRAEGKRHTQAVIALARRRVNVLWAMLRDQTTFETRSTA

SEQ ID NO: 116634 - protein, 312 aa, unidentified
MMQEVFVGVDIAKDWLDIFHPGSGLRRIDNTAAAARRFAKASAKDGVWVIFEASGGYDRLLRDALEAAQARFSRVNPRQARDFARAMGVVGKTDRVDARMLAEFGARLRPAATAAAAPERCALQALTTRRRQLVEIRKQELTRLPQTLDPAARADIRSLILILNARIRRIEGAMAAQVGATPDMAQAARRMQTVPGVGPIVAATLLAELPELGQLDRRRIAALAGLAPIARDSGKHLGKRRIGGGRPTVRAILYIAALHASRLSQPFKAFRDRLKAAGKPTKVTLVATAHKLLDILNAMLAASTDYKANTMP

SEQ ID NO: 116635 - protein, 418 aa, unidentified
MTTSDSTPAAAVLVAIDIAKVRNEVLIEAPGHKRRRRLLVLNTRAEHDHLIEVLQAYGRPVVCAFEATGNYHRPIAWRLAEASFEVRLVSSLALARTREALHNSWDKNDPKDAQVMLHMLRIQATQVYHDPLRAGINDVQELSKTHEAIARAKTEIQHRILTHYLPLYFPEIDRFRGNSRSDWFFAFLHAFPTPASITALTKEEFVTAAWDVVGRKVSKTQILMDIYETARSSIGLPLPLDAPAIRMFRMVIDEARGLIRQRNEIEAQADELLRHSQDYQLLRQIPGIGPINALTIIAEAGDLRRFGHHRQFLKFCGLNLSTQQSGQYRGQTRLSKFGNARLRRTLWIAGQVAIRQRENGFRHKFERYIARGRDNPDLRRKAAITAKMARVVHAVVKGGSDYRPFVEGRVPGGRTSVS

SEQ ID NO: 116636 - protein, 316 aa, unidentified
MMKQIYCGVDACKARLDAYVATSSTGGVSESFENNAVGIEELRLFARKHGAVMVVMESSGSVERLSYSLLWQANMPCALVNPRSVYHYGQSMGYLEKTDRIDAMIIANFASSKEVVPMPPPSPAQQRLTALYARLRQVVDDITKQKQRLHTAYEDFAREGIKELIKVLKAQSDKLSAEIASMIDDDPLWQALAREFTAYKGLADRTVAALMADLREIGTLPNGAISKLAGVAPLADDSGKRKGKRTIRGGRASVRNILFLIAGHLAKFEPDFIAFKQRLEQKGKAKMQIRIALAHKLLVRLNAKARDIRANLANTA

SEQ ID NO: 116637 - protein, 384 aa, unidentified
MQKPNDLNQSRIVLKQDSTLIAVIEMSLSSWLVAGIVPGVERQPLKKLAVDESALLKLLNRWREEAEKAGRRIERITVAFEAGRDGFWLARWLRARGIEAHVIHASSVAVSREHRRAKTDRLDTELLKRAFLGWLRGERDHCKMVAIPTTKDEDAKRPNRERQSLVGEQTRIVNRMKAALIRLGIRGFNPKLKKAAGRLEDLRTPEGEPIPPNTLAELHRDMERRRLVSDQIRQIEEARLERMEQAPGDGPHAMVRLIARVIGVGIETADMLVHEVLSRKLRDRRAVARYAGLTGAPDESGSKRREKGLAKAGNARVRGGMIQLAWRFLLFQKDSALAQWYRTRTEGGRNRKTIIVALARKLLIALWRLVTTGEVPAGVVWRAA

SEQ ID NO: 116638 - protein, 437 aa, unidentified
MQEVTDEPLYRDRVCGIDIGKAGLAATIRVPSDRDPARRAAETRSFGTTKKEVLALADWLRSWQVPAVVMEATGDYWKGPFYRLEAEGFDCVLADAKQVRHLPGRPKHDPGDSRWLAACFERGAVTSCFVATGEFRVIRLHTRYRRDLTEERTREKQRAEKLLESAAIKLSSVVTDLHGVTGRDIMDHLIGGERNPKTLAQLARARARRKITELEAALEGAEFFTPAHAALLATMLARIDQLNAKIDELTAVIERLLAPYEEQLQQAESMPGWGRRSAQDALAETGADMSRFPSGAHLASWAGRTPLGNSSGKRKGKSKSKKGNRYLGGLLGETAVAAGKTQTREGARYRRLARRRGKAKAQVALGNTQLKVYHKLLSSPGMQYHDLGPDYYDRQASTRRQIAHHVGKLGALGFEVTLCRLPGADPDPAEPAGTQAA

SEQ ID NO: 116639 - protein, 418 aa, unidentified
MGAEYAVLVGLDWADQKHDLCWRETATGQVHTAVVEQRPERLNEWITTRLAEHPGGRIAVCLEQSRGAVVYALMGYAEVDLYPVNPVTLADYRKAFRPSRAKDDPTDAALLCELLERHRDRLPVWRPDSELTRLLRSLCEDRRQAVDLRTALCNRLRARLKEYYPQALELVGEQLCSEMCCAFLMKWPHFETVAAVRPNTLRRFYYAHHSRSEQQLQQRLAHLAASRPLTTDGAVVEAGSRWVRTLVAQIRALNRSVQDYDQRLTAVFTAHPDAFIFASFPGAGKQLAPRLLAVFGTDRGRYATAVNVATHTGVAPVIERSGKQEWIHWRWHCPKFLRQSLVEFATKSVGFSAWANVYYQAQLKRGKGHHAAVRALAFKWLRILFRCWQDRTPYDEAKYLAALQQHGSWIAAALKNAA

SEQ ID NO: 116640 - protein, 458 aa, unidentified
MTGAVKPAKESDPEALRYNELSPPSVMASTRRRLFNREASFRATGKEPIMQVVHERCAGLDVHKKSVFACVMCLESNGSKHVEIRSFGTVTRELLKLQDWLRENHITHVAMEATGVYWRPIWAVLEGQFELMLVNPHQIKAIPGRKTDAKDCEWIADLLQHGLIRGSFVPVAAIQDLRDLTRYRAELTQERNRVDNRIQKLLEQCNIKLSSVASDTLGASGRSMIEAIIAGEDNPEQLAELAKRKLRAKIPELRLALEGRVRDHHRFLLKEYLQEWKAIGERIERIEREIDRKIVPFESVAKLWESIPGVNHVTACNLVAEIGVNMDQFPTAHNLASWAGVCPGNHESAGKRLSGSTRDGNNWLRRSLCQSAWAASRQGNCYLSSQFRRIAARRGSKRALMAVAHSMLVIAHTMLKTGRTYHELGGGYLDLINKEQLQRYFVKRLQNLGLTVTLEPAA

SEQ ID NO: 116641 - protein, 407 aa, unidentified
MEPINRFVGIDVSGAHVDVFVRPDGHARRFDRDGEREALLEYLKPLKPTLIVMEATGGLEVPVAAAIATAKLPVVVINPRQARDFAKATGRLAKTDAIDAAVLAHFADALRPEVRPLPDEASRELEALVVRRRQLVDMLVAERHRLRVCASNATKAGLKKHIEWLQKQIKELDDDIGRSVRKSPIWREKDDLLQSVPGIGPVVSSTLLASLPELGTLDRKKISALVGLAPLNRDSGTMRGKRTIWGGRASVRAVLYMTATVAAQHNPTIKAFYARLLAVGSRRRSPSTACMHKGAHGGERDPSNGSRLAAGPRARPPPEGCDEGTNAGSPLAPSGSGGGVPVRPQAPDDEQASRLRAPPRAKSPVGAVAVPRPKSPPKKSFTPGRKTVAPQTRQSEARWRGYRRTSM

SEQ ID NO: 116642 - protein, 334 aa, unidentified
MTEGGFAELTVWLDGLEIEIGRVGVEGSNGLGRQLCGFLSGAGFDVREVQPNRTAERRRRRRRQKTDREDAEAIARETLAHDDLPPAGKQHHQDDAWDELVAIRDHRQTLVRQRVRLLNEAEAVLTGLPLTIRVLLPTTSRVRPRLKALNAGVASTIALTAADRVHLEWLTQSGQDIERLDGRVRAIDKRIPALLAGLGSTLTEEVGIAAVSAMELLVETGDPTRFRTEGQFARWCGAAPIAASSGEGRGEPVHHRLDLAGNRRVNSVLHTMHVTQARCHEPAKEFVTRKRANGKTAKEARRAHKRQLANRIIRRMWDDHQRQRATIAALDQAA

SEQ ID NO: 116643 - protein, 306 aa, unidentified
MSRCIPTGAATITLGVDTHKDTHVGVALDGLGRFQGTLSVAANLAGYKKLLEWASGFGHLEHAGVEGTGSFGAGLARFLKAEGIKVSEVTRPKRRDQYRIGKSEPIDAEAAARAALAGTATGVPKDADGEVEMIRTLRITRRSAVKARAQAANQLQALLITAPEGLKSELCQLSTARVVEKASRLRPGATPSDVEAATKFALRSVARRHRQLSEEISELDEQLDRLVSELAPELVEVEGIGTDTAASLLIAAGDNPERLKNEAAFAHLCGAAPIPATSGKSVRHRLNRHGNRDANRALYVSSPSAA

SEQ ID NO: 116644 - protein, 329 aa, unidentified
MNIKRIGLDLAKNVFQIHAVDHREHVVLRKTLRRDRMAAFFTQLSPCLIGIEACGSAHYWARELTRMGHTVRIIPPRLVKPYLKGQKNDANDAEAICEAVSRPGMRFVAIRTERQQTLQAEHRVRARLIRARTALSNEIRGLLGEFGVVLPAGIAQLRKALPEIVSQQVQWDECFIRLLCELSEELQGLDERVARHDRRLQQSARDDIRIKRLLAIEGMGPVVASALVAAVGDGRQFRSGREMAAYLGLVPRQHSSGGKARLGHISKRGDRYVRTLIIHGARAVLNACQNKTDRRSQWLQGGVGETKPEHRDGGAGEQECPYSMGAAES

SEQ ID NO: 116645 - protein, 424 aa, unidentified
MAVPPERDTDPVRKCETFTGDLHQMAEWLLSCGITTAAMEATGVYWIPVYEVLEQHGIKPCLVNPRNMKNVPGKRTDFHECQWIQHLHSLGLLHSAFRPDGEVCAVRSLMRHRNDLVEMASQHIQHMKKALVQMNVQFQHVISDITGLTGLAILDAILAGERNSAVLAKLRDPRIQASEETIRKSLEGNWRAEHILALKQRLSLYRSHRDLINECDQEIEKLVAAFEPRVDPDEKPMPEDRKQKQRKRKKKSGNPDFNMRAEAYKLFGVDLTQIPGLMTLVFMLFSEVGRDMSRWPTAAHFVSWLGLCPDNDISGGKVLWRGVRRTKNRAGTLFRLAAHSLHRDQTPMGDYLRRMKAKLGPAAATTATAHKIAIIFYTMVNKQVEYDASLWAKRDEMRDKRLEARLQTQAAKRGYKLVPLEPAA

SEQ ID NO: 116646 - protein, 344 aa, unidentified
MNKLNRVGIDLAKNIFQLHGVDRTETSTWCRRLKRDNWVKVLLNKVEPGCVIGMEACTGAHHWARLLQSKGFHVKLIAPQFVKPYVKSNKNDANDAEAICEAMSRPGMRFVTVKTVEQQEIQAVHRIRSELVGQRTAKGNQIRGLVAEYGLVAPQQIYNLRAALPEWLEDADNGLSDRFRRLLNGLWDDLKRLDKRVADMDKEIALIAASDPIAKRLQQLRGVGPMVATALLASVGDGKQFRNGKQMAASLGLTPRQHSSGGKERLLGISKRGDAYLRSLLVHGARSAIYAARGKEDRLSQWMKSIAARRHPNVAAVALANKTARIAWSMLRHDTDYDPKLAAA

SEQ ID NO: 116647 - protein, 412 aa, unidentified
MQVIIERCCGLDVHQETVVACLLIGSPGVQPVKEVRTFRTVTRDLEALRDWLWAAGVTHVGMESTGVYWRPVYAVLEGHFELIVGNARHIRNVPGRKTDVKDSEWIADLVRHGLIAKSFVPPQPLREMRELLRYRRKLVESQAAERNRLLKLLETANIKLASVMSDVFGVSGRAMLRALIEGKASADAMAALAKGQLRRKCADLILALDGRIEEHHRFLLAMQLRRLEAIEADIAALDLRIGQRLEPYRTQHALLVQIPGVDWLVAAVLIAEVGVDMSVFLSVYHLAAWAGVCPGNNESAGRQKSGRARKGNIHLRTILVGAAISAARTKGSYLKDKFHRLKARRGTLRAALAIAHKILVSAYHMLAKNLAYRDLGEAYLDQIGQTRTVANLKRRLERLGYHVTLQPTPHTA

SEQ ID NO: 116648 - protein, 323 aa, unidentified
MDGSVIETRQVFIGIDVSKSSWDVHLLPEGRSFTIRVDDGAIERLLEKLGTPAASLVVVEATGGFERQLVAELIDAGWTVAVVNPRQVRDFAKALGRLAKTDGIDAQTLALFAQRVQPRPTEKMPERQQELDALVTRRRQLVGVRSMEKMRRPQAVHKAASRSIDKMLKVLDQQIAALDKAITRLIEADDDWRAKRDLIESVPGVGPTTSATLVAELPELGRLNRQEIASLAGLAPFNDDSGKFRGQRRIRGGRGALRATLYMAALTAKRCNEKLRAFAERLHKAGKPFKVVITACMRKLLTILNTLVRSGKPWAPHPSVEQR

SEQ ID NO: 116649 - protein, 352 aa, unidentified
MGIDVHKDTHTAVGLNPFGEKVFEMKIGNEVLDFISLVEKTKDESEKLNLAPSFGLEDVHSWGERLSSFLSEEGLPVVSVAPVLVDHNRSKMTHPEKSDSLDVQAVAKVMIQRIDTLPTYTLTEEAQKAKQIRELSLEREWLVKERARLKNQLHILLHRIHNSSYRTKFKDPFSKKALRYWMRSVPKNTDAILEQRAKRAIRRLLNLREEIQEIEEELESLMTNSGQTLSTASGCGTVIAAEIIGEIGDVGRFHSPAALAKYAGCSPREHSSGKTIRWRKTRSGNRRLNRSFHRMALSQISRSGNDAARTYFKKKISEGKTKAQALVCLRRQLVNVVWMMLKHKTEYRWPVC

SEQ ID NO: 116650 - protein, 321 aa, unidentified
MNKTLFCGIDLHSNNAMYVITDEQDRQLFKKRLPNELPVVLAALEPYRQRLQVVAVESTYNWYWLVDGLMDYDYPVCLANPAKMEQYDGIKEANDLTDAAFIAHLARLNVLPTGYIYPRADRPVRDLLRRRMLLVRYRTGLKQSLQNMVMRQTGQSVGWRAVRRLDDEGRAGMLGDNDCLAFVATHQVELIELLDERIQRFEEKVLEHTHLRPAYECLLTLPGVGVILGLTIMLETGDIGRFKRVGDYTSYCRCVRATHSSNGKKKGLEQQPQRQRLPVLGVRGGGAPCDPLLPPGETILRQEGRQTQRRTGHEGIGGKVE

SEQ ID NO: 116651 - protein, 395 aa, unidentified
MADGIRWVGLDVHAHESTLAIFDQATGELTTRRVVGRPHELMPWLRGVKRPARMVYEAGPTGYGLARRALTEGIDLCVCAPGHTERPPHDRVKTDKRDAIRLARRLAAGELTMVAVPSVEHEQLRDLVRCREDIRRDLMRARHRLGKFLLRREIYYEGPATPWTRRHRDWLASLRFADLASQLTMSDYLHAHDVLLARREQIEQELCQLAGDSLWAVTIARLRCLRGIDTLSAFGLCGEVGSFERFGHPDQLAAYFGIVPSENTTGQQRRQGAITKAGSTHARRLLVEAAYHYQRHPSIGQALERRQRDQPAEIINIAWRAQRRLHARWRQLKHARGKRNGIVAIAIARELAGFCWEIATWQAHPDRVPPASMPAGDTLTQAHSLPPKHEVAATA

SEQ ID NO: 116652 - protein, 318 aa, unidentified
MTTKQTAKNGVNVGVDVGKHQLDICIYERDLYFSVSNNTAGIRQALNRLARYQVERIVCEATGRYEHALVEAAIDKRLPIIVSNPIKIRRYAGAIGQLAKTDEIDSRLIAKYAAVIQPEVRRHKCKQVIKIKDLLVRRRQLIEMMTMEKNRYQIMPKFLKADIHRCITHMQKQLEKIDKQLNILVEKHDEWQAKRKRLLSVPGIGPVVVNTLLGDLPELGSLTNKQIAALTGVAPYNRDSGKLRGKRRIRGGRATVRTMLYMAMLTSIQHNPVIKRFYQRLVAEGKHKKVALTACIRKMVIILNAMLRDGTNWNEKMV

SEQ ID NO: 116653 - protein, 336 aa, unidentified
MPLYCGIDLHSNNHVICVIDDKDRRLLEMKLDNDVIQTIKALSPYQKRLKAVAIESTFNWYWLADGLMEAGFQVELVNTAKVVQYSGLKRTNDRYDAFHLAHLMRLDILPTGYIYPKAERGLRDLLRKRIQLVQDRTRHLLRFQSQVQMHTGQSVPASRIKTQKYPLPVIGDSNVQLALHSQLVLIRALSAQIKQLEKSILSQVEPVATFEWLKTVPGIGDILAEAILLETGDITRFKGPGNFASYCRCVDSRRESNGKKKGENNRKNGNRYLAWAFIEVANFAVRYSEPAKRFYLKKEKATNAIIARKALAHKLARSCYWVMRHQQAFNQDRVFH

SEQ ID NO: 116654 - protein, 336 aa, unidentified
MRTVFGIDVSKASSEVAIVINGEKIHGYTMPNDTIGFTRLLDDLKTVQKPEIIFEATGVYSRRLQAFLEENGYAYTQLNPLEAKKQLDSLRVRKTDKIDAETLAISQFVLNRKPTYIQEEVYQELRDLSRFYQNLTEDIVRTKNRLHKVLQVTFPEMENILSTPTREQYWNLVMTFPYKDFVLELSKDELLEGIRQSTSKHISDKRVAYLAQKLAALANQSYCTVKKNSPILEEVRYYAKELLRLSEQRQAVLEQMVELAQPLPEYEILLSIPGIAETTATSMIGELGDIRRFQSANQINAFIGIDLRHYESGNFLAKEHITKRGNPYARKILCCG

SEQ ID NO: 116655 - protein, 366 aa, unidentified
MLQKQLIREKERAMTDIAMHNDRIATIGMDLGKRSFHLIGMDARGKVIMRQQLSRGRFERHMANLQPCLVGVEACAGAHHIGRRLSAFGHNVRLIPGQYVKPFRKGQKNDYRDAEAIAEAVQRPTMRFVPIKSAEQLDLQALHRIRSRLVGHRTAVINQLRGFLLECGVIVPQGPARLREILPSVLAQRTDVLSPRMIRLIEELADDWRRLDDRVDAVTSEVQALARQDAGCRRLMSVPGIGALTASAVVATIGNGAAFTKGRDFGAWLGLVPKQLSTGDRTILGRLSKRGNKYVRTLFIIGARAVLAKPGSWAKFGLEGWLAAAAKRLHHNVLAAALANKLARIAWSVLYHGRSFARDFEPQSVS

SEQ ID NO: 116656 - protein, 356 aa, unidentified
MDNRKYIGMDVHQASISIAVSDAAGKVLMECIIETKAATVLEFIQGLRGSLWVTFEEGTSAAWLYDLLKPRVTKVVVCDPRKNALLKAGNKNDRVDARKLGELLRAELLTPVYHGESGVRTLRELSRGYLAVSKDLTRVMNRLKAIYRSWAIPCAGQQVYSPRHRAAWLEKLREAGVRRRAEQTYQQLDFLMEIRKETRKELLAESRKHPARELLEQIPRLGPIRVALLIAFLQTPHRFRTKRQLWNYCGLGLRTRSSGEYRYTGGQLQHARKPPALRGLNVNHNHDLKSLFKSAATQAGTCKDDPLGEFYQNLLARGMEPPMARLTLARKIAAIALKIWKKGERFDPAKLKQQAA

SEQ ID NO: 116657 - protein, 369 aa, unidentified
MPHVTSIGLDVHARSVAAAAFNPFTGEVMHRDFGTDAAEIAEWALGFEEPRACYESGPTGFHMARELRALGLDYAVAAVSKMQRPAADARRKNDRRDAEFIARMLATHNIVEVPLPDAAVEAARDLDRALDDATVEYRRARQRLNMFLIRLGHVWDERNADGTRRGSWTRAHWRWISGIRLEGPQRDVLEYYVTAARCAESDRRQLEKKVLALARTDRWRPAVEALSCIKGIDTLTAFRLAAEAGSFTRFRTAPAFASWCGLVPSERSSGETERRGGITKTGNRLARTALVESAWHYLTCTPRPKAPAPGADVPAAIRARADDCTARLCRRREALAAAGKSSCKANAAVARELACWVWEIGRRAEGTLG

SEQ ID NO: 116658 - protein, 333 aa, unidentified
MGKKLVVGVDVAKGSFAVSLFDGERFRDFSLSSSPEELLERVAPHLPEDPGEVFFIMEATGVYHFNLALFLRKKGYSVSVVNPFVAKKFAEMLQKRAKTDSVDARTLAQFGFFASPPPFVPKDEKAYLLEEIQKSIEGYQKRRTEILNHLEALRHRPFHHPKLQKLYEEELQRIEKTLKDLEKEAENLAMEYAPREYELLQTIPGVGKRLAGAILGILSPLTRFESSKELSSFLGLAPQIDQSGKRKERARLSKRGNPLLRKLLYLASLSASRFNRQCKLLYERLVTQGKPKKVALIAVANKLLKQIFAILRSGIPYDPYYLEKKRNVVTQGA

SEQ ID NO: 116659 - protein, 402 aa, unidentified
MSYTVFVGIDVSKDSFAACTINKDRKILFESNFTMDRDGFEGLTEMLSSFPRESILIGGESSGCYHINLFSFLSEKGFSCVILNPLLISNFMKMSLRNTKTDRKDARSISLFLSMFHESIPEKNILSSELKDLAREREHIAQEIARIKNDIEKLISILFPELQRKVNIYNRSILKFISSFPSARSVKMAPRKKIRETLEYYGRGRKVDISEEEIIKLARASIASFHPAKELILTQKASLLMFLMDRAEEIEEMLKKIYKDSEFNRDIDILTSIKGIGDITAMHFLSEIGDIKRFESCRKLIAYAGLDPTVYQSGKYQGKSKLSKRGNRHIRRVIWLMTSMAIRFNEVFREYFVKRRNEGLPYKKAVIATAHKLIRVIFSMLSHKRYFSYESPSRIAYKELNS

SEQ ID NO: 116660 - protein, 460 aa, unidentified
MKRNERKKAQRVRSHLKQVNLFAAGIDIGSRSHFVAVPDELDEQPVREFAGFTGDLNRLADWLVEIGIQTVAMESTGVYWIPVYEILESRGLEVLLVDARHVKNVPGRKTDVLDCQWIQQLHTYGLLRGAFRPPEEMVALRSYLRQREGLIASASDSIRHMQKALRQMNLLLDNVVSDITGMTGLRIIRAILAGERDTKQLAKLRDKRCRNNEQTIADSLEGHYREEHLFALQQAVERYDFYQQQVEACEGVIERHVREIEGDNDNDQDVPPASKPKGHSKNGFDFDVRSQLYRLTGVDLTEINGMSESNVLTIVSETGIDMNAWPSEKHFASWLGLSPGNKITGGKRLSGKTKPSPNRAAAAFRLAAFSLANSKTALGAFYRRLRNRLGAPKAITATAHKLARLFYRLLKNRTPFIDPGQDYYEQQYQERATRNLKKRAAALGYKLIPESTDGLQESMC

SEQ ID NO: 116661 - protein, 345 aa, unidentified
MTIIRVGVDIAKSIFHVHGVDRHDQVRWTGKYSRQKWLDALCKRVPVGAEIGIEACASSHHWARELQARGYHVRLVAAQFVKPYVKSNKNDRVDAAAICEAMSRPHMRFVSIRTVAQQDIQAMHRVREELVGQRTAKANQIRGLVGEYGIVAPVGIQQLRKALPCWLEDSKNGLTDAFRCLLNGLAEDLRHLDDRITSLDERISQSVQHDPIASKLMTLRGVGPLTASALAGALGNGEAFRKGRDFAASLGLTPRQHSTGGRDRLLGISKRGDSYLRKLLVHGARSVLCRVDGKEDNLSQWIKALRARKHVNVSIVALANKTARMAWALARHDMEFDPRLAAAAV

SEQ ID NO: 116662 - protein, 339 aa, unidentified
MEVTTIGLDLGKDVFQVHGVAGDGTIVFNRSIRRRQLLKFFQNLPNCLVGIEACGSAHHWARELIAIGHDVRLMPAVYVKPYVKRGKTDAVDAEAICEAVTRPTMRFVAVKSKEQQALLTMHRVRQLVVRQKTQMLNVIRGLLREFGHVIGYGPVAAMRFVKTFQTDDYPDIPDIAKSMLKTLCDQVNSLHDRVTFYDKLIEHHSRIDERAKRIRTVPGVGPITASAIVATIGDGKQFKNGREFAAWLGLTPLNRSSGGKERLGRISKKGDRYIRRLLVIGMTSQVQRARGYPERVHPWIMQLLERKPTRLATIAMANKAARIIWAILTKETYYRQSAA

SEQ ID NO: 116663 - protein, 302 aa, unidentified
MVGKTEHSAKFDNDSKGLDQFSDRLKSLGCQNLHICMEATGNYYEEVADYFAQYYSVYVVNPLKISKYAESRFKRTKTGKQDAKLIAQYCRSAQESELVKRQKPTDEQYRLLRMTAAYAQIKSECAAMKNRHHAAKDEEAAKAYAQIIKAMNEQLEVLKEKIKEQTEKPNCKEGVKRLETIPAIGRMTAAVLFHHLTSSKFETSNKFAAFAGLSPQQKESGTSVRGKGKLTKFGNRKLRAVLFMPAMVAYRIRAFPDFIKRLEEKKKPKKVIIAALMRKLAVIAYHVHKKGGDYDPSRYKSA

SEQ ID NO: 116664 - protein, 415 aa, unidentified
MEVLYSRCAGIDVHKKLVVVCLMVVEENEAGKSQLRKETRTFSTLVKDLLAMGDWLKAEGCTHLVMESTASYWKPVYNLLEGQFELVVVNAQHIKAVPGRKTDVRDAEWLAELLRHGLLRASFIPSAPQRELRELTRYRTSLVEERSRIVNRLQKVLEDTNLKLASVVSNIMGQSARAILAKLLEGESDPELLADLAKGRLREKRAELVLALQGELKPHHRFMLTEQLGHIDYLDEAIERLGQEIEEQLRPFEEALVNLDSIPGVNQRIAEIILAEVGGDMDQFKDAAHLASWAGLCPGNKQSAGKRLSGKTRKGNAALRRALTEAGHAAGKTKNTYLGTKYRRIASRRGAKVAVLALAHNILVIVYYVLKRGEAYKELGVSYYSETEQAKKGQEKRFVKQLEKLGYQVSLKKAG

SEQ ID NO: 116665 - protein, 359 aa, unidentified
MTSMNQDRRRGRVVIGVDTHKYIHVAVALDDFGGVLGREKFTADTAGYGQLIHWSVTHGHLLTFAIEGTGSYGAGLTAAVRRRDIGVVEVMRTDRRDRRLRGKSDFLDAENAARAVLAGHADAVPKTADGVVEMIRTIKVAKDVAVKARTSAMISLKSILVNAPTALREQLQPLSKMALIHRCAGLRPGTISTVEAATKHTLRSIARRWEQLNDEITAHEKVLAELTTALAPQLSAAFGIGADVASEMLIVAGDNPERVRSEPAWARLCGVAPIPASSGMTTRHRLNRGGHRQANAALYRTVIVRMQHHEPTKAYVARRTAEGKTKAEIIRCLKRLLAREIWSLMRPLRMNPQTMKSAA

SEQ ID NO: 116666 - protein, 317 aa, unidentified
MSTPGASFVGIDVAKHQLDVAVRPSGETWTVAHDEGGLSALLARLREVAPTLIVLEATGGLEVPLAGALAAATLPVAVINPRQVRDFARSTGTLAKTDRLDAQLLAQFAEVVRPEPRPLPDAQAQELTALLQRRRQLVEMLTAEKNRLPLAARRIRPPLHAHIVWLHKQIAQFDEDLRQLIHASPLWRAKDDLLRSAPGVGPVLATTLVAALPELGTLTRRQIAALVGVAPLNRDSGTLRGRRTVWGGRAQVRAVLYMSTVVAVRHNPVVAAFYQRLRAAGKAPQLALTACMRKLLTILNAMLKHHTRWAPVMAPHA

SEQ ID NO: 116667 - protein, 349 aa, unidentified
MTMVGGFDVHRKQITFDYVDSDGLVRWGQIRPATRKTLRGWLGEHCPGGDAEFALEGCTGWRYVVEELAAAGVVAHVGDPAEIAGLRGPKKRAKTDRADARLLRTLLLEGRFPESWIPPAHVLEVRSLGRLYCALSEERRAWRQRIHAQLFHQGCPPIPALLTEAGRDALAHAELSTAGRQYVDAALRRIDELTIDIDPVRMQLVNFARRQIGCRALQARQYGVGWLCAAIMWAEIGDARRFHSSDALVRFAGMDVTVYSSDRKRSPGHLSRQGSPELRWATFEAAKCAARRGSPDYVYYRRLAAAPNSGKNPTLAVERKILRRSYHTLRELGDAALATPVPEVTAVAA

SEQ ID NO: 116668 - protein, 430 aa, unidentified
MSLVQPTQLPAVLVAIDIAKLRHDVLIEAPGWKSRKRMILPNTAAEFRLFADYLHGLKHPVRVVFEATGNYHRPLAHFLKTEGFHLELIASLAVARTREAMHNSWDKNDPKDAQVLLHLLKTGVTQHYHDPLANQIHDFQELSLTYAQISLEKTRTQHRLLTHYLPLYFPEIERHYHASRSEWLLAFLHVFPTPARITRLSIEDFVQQAWPVVGRKVSKQRLLEDIYRMAQSSIGIPVDEASEAVAMFRVVLGEMIRLCQLRDQLEQRAALHLKDNADFRRLQQIPGIGPILALTILAEAGDLRRFNHHRQFLKFCGLDLSTQQSGQFRGSTKLSKYGNARLRCAFWMAATVAVRQTENGFRDKFERYLRRDPSSADRKRMAYVAVAAKMARVAHGIIKTGTDFRCFHEAAAPRGRAASHGPLRPPGPRR

SEQ ID NO: 116669 - protein, 412 aa, unidentified
MEVVYECCGGLDVHAKTVVACLITQDQKERRTFSTMTDDLLRLADWLVNAGCTHGAIESTGVYWKPVFNILEGRMDVILVNARHVKAVPGHKTDARDSVWLADLLRHGLLKASFIPPRHMRDLRALTRYHASVLRDQSAVANRIQQVIESGNMKLGQVASDALGVSGRAMLRALAAGETDATMMADVARKSLRRKKPALVRARDGRLTDTQRWVLGELLARYDELEAALARVEGHIRQALEESPDPCVAEAVPLLDTIPGVGEQVAQTIVAEIGVEMTRFPSAEHLASWAGLCPGNHESAGKRKSGKTTKGSPFLRAALVQAAWAASHRRGTYLAAQYHRLVKRMGKKKALVAVAHSLLAIVYHMLSRHTRYVDRGEDVFKRRSVQAQSQRLIRQLAALGVTVTVEERADAA

SEQ ID NO: 116670 - protein, 425 aa, unidentified
MKFTRKHSVDQRLDQMTEKHVIVGIDIAKDKHAARMTNFRGRTLTPRHYAFTNDAHGFEQLLQWLNQAMQKHCLSTAIVGMEPTGHYWFNLAHWLLERGIKVVLVNPALTRRHKEDRDNSPAKNDPKDALVIADVVTRGYYTEYTPQDERFGRLKSAVLHRDMLVRNQTQTGNRIVRWIDLYFPEYSTVFKNWDGVRSLATLKSLQLPKELRRWSVDDFIRHWGEQGLQRPGGVSGRKRAAELIQAASGSIGDCRAPEEAILTLSHLLEMYELGKRQIEAVDQRLEELLRDLPQAEQLASLGSGMGPTVQAALLGLAGDLSSYRHGNQLLNRAGLSLATQRSGTYKGQVKLTKRGDSLLRKVLFLAVLCLVKDHPEFKTCHERNQAQGMARKKSIICLIGKLARMLVAMANKGERYRPNLESNAA

SEQ ID NO: 116671 - protein, 350 aa, unidentified
MIIIGCDYHPGFQQIAFVDTDTGELRERRLQHPEEAEQFYRDLAAPGMKVRVGVEASGHARWFERLLAELNFELWIGDAAEIRAKRVRKQKTDRQDAQHILRLLLEDRFPQIWVPNGENRDLRQLLWHRHRLVQARTRIMNQLQAVALNEGLRCKKRLWRERGREQLESFKLAPWASRRRRDLLALLDRLNPTIAELTEAIEQEAEKCPEAQRLRTHPGVGRLTALAFVLIIGRAERFQCGKQIACYLGLVPLEDSSGDRRRLGHITKQGNSLLRFLLVEAAQVTVRSDQQWRSKYFHLAMRRGRKIAKVAMARRLAIQMYWMMRKEWDYEQVKKFGSHAGQPGNPHGVQ

SEQ ID NO: 116672 - protein, 429 aa, unidentified
MTRISAGVDVSKNRSTVCIIDQDGKVIMRPFLVCHSTEELDFLADTLKRLNGEVRVIMESTSIYQYPIALHLKEKGIFISIVNAYKVKKFANTDFRGGKTDKKDSRTIASYGISYWDKLVEWQIPKDTYFNLDLLNRTYMNAKKHRQIILQELQHYIDCAMPGMDKELHSLNLNTKKDFMLDFVEKFWHRDEIVNMTEAEFTEVFTAWAKEKGYRPGKGKAAKIYAIAKSCIPYYPANPTVKTILQCIVDKLSGVNRTLVTIVTQMIEEAKKLPEYQIVREMPGVGDPLAARFFGSAGDIRRFKNSKALVAYAGIDSPPDESGDFSSTHRHITKKGSKVFRDTGYEIMMALRAQKRTWEKVRKNPDVYDYMLRKEAEGKPPKVAKIAALNKFLRIIYARIKELYDNMALAERAKTKTRSKTRAKTKVTA

SEQ ID NO: 116673 - protein, 345 aa, unidentified
MQVITIGLDLAKNVFQVHGVDAAGTAVIRKALRRAHVLPFFAELPPCLIGAEACSSANYWARELMKLGHTVKLMPPSYVKPYVKRGKTDAADAEAICEAVRRPTMRFVAVKTPDQQAVLMLHRVRALLMRQRTMAVNALRGHLAEFGIVSGQGAKNLRELIERILAEGPDRLEFPRLARIALDPLIMQLNDLQTRVRAIEIELLAWHRTSAASRRLETIPGVGFITATAIAATVTDPTHFKSSRQFAAWLGLTPKQNSSGGKERLGGISKMGDRYLRTLLVVGATSVMRYARGKAAVSAVWINRLLAKKPARLVSVALANKTARIAWALLIEQEDYRAPKMSAAA

SEQ ID NO: 116674 - protein, 392 aa, unidentified
MYIVGIDIGKNHHEASIVSPEGKQIGRSLRFATTYKGADSLMSFIFKNIGNSPCVFGMEATGHYWYPIYSFLKAKGYTIYIFNPIQSDSLRKMYIRQTKNDSIDSFLIAEVIRFGQFGTTSMADENILAMRQLCRYRDSVISSRTEIKLRIGTIMEQIFPEYEKQFSSLWVSTSMGILEKYLTPENIENAPIDELFEIIKDKSHNKLTMKNAISIREAAADTFGIKIAQDAFSFQLKQLIDRMNFLDKQIEALDCQILEYYEKFDCYLHTIPRIGMIAAATILAEIGDINRFKSSSALVAFAGIDPTVRQSGEFSSTHNHMSKRGSPYLRHAIFLAATTCSFHNSPLNAYYKKKREQGKHHLTATGAVARKLTTVIYAVLRDGKPYEPKSFC

SEQ ID NO: 116675 - protein, 400 aa, unidentified
MNAVGIDVSKGKSTIAVMRPFGEVVASPYDVGHTESELKELARFLKSLPGETRVLMEYTGHYYEPIAGYLHEAGIFVSVVNAILAHDYSGNSLRKVKTDKVDAVKLANMAIDRWLNLREYVPEDEIRQTLKICNRQYNQYNKLKTMLKNNLIALLDQTFPNVNKLFNSPARKSDGHEKWVDFTLKFWHCECVCGISERRFKDKYERWCKRNGYHYSTDKAEDIYAEACGNVGLLPMCESTKVLITQAIIQLQTIEETLAAVKREMQKLASALPEYGTVMALYGVGEVLGPQLIAEIGDVSRFKSKKSLIAFAGIDSPADQSGQVDNKSKAITKRGSASLRKTLFQVMSVILQNSPEDEPVYTYLDKKRSEGKPYRVYMIAAANKFLRIYYARAKECLVNT

SEQ ID NO: 116676 - protein, 360 aa, unidentified
MTGTMTWVGLDVHARSTHASAIDVVTGELTRARFAGSEDVVAWLSGLRAPARVVYEAGPTGFALFRAARAAGIAIEVIAPSKTARPSGDRVKNDRKDAELLARLAMAGQLTAVAVPPEFVEACRHLSRTREQVRGDLRSARHRVSKLLLAHGRVYDGTTTWNKPHRGWLGGQRFEQAPTELAFIDLLAAVDGLIARKDALDERLSRLATDDRLWPTVARLRCFRGVDTLTALVLHLELGGDWQRFASPRKLFSWLGLTPSLDQSGQSKTQGSITKTGSTYARRLLVEAAWHYARPPRIGATVANRQAGQPDHVLQIAWRAQHRLHRLHTRLRERGKPHNVATVAIARELAGFLWAAATAP

SEQ ID NO: 116677 - protein, 426 aa, unidentified
MTYRIAGIDVHKRMLAVVIADVAVEGEYQFERRKVGTSPSELCRLADWLVAQHVEEVVMESTAQYWRPVWATLEQRWRLKRLQESDGARSGQLHLAQAQSNRGAAGRKKDFPDAERLVKRLVAQELKLSFVPDVEQRFLRTIMRRKHQLTRNRVQVQNRLVCLLEEGHIKLSSLVSDLLGKSARYMLQAVAEGETNPETIAALADHRLRATAPQLRDALGACRDLHPVYRQLLKMALEELKLMEEQIDKLEQEMANLLSAQQDVVQRLAEVPGLGVDSAQQIIAEVGPEAAAFPSAKHLASWVGVCPGEEESAGINYSHRSPKGNRQMKGLLNQASNAAVKTKGSIFEFIYRRLVVRLGHAQAIGAIAHRLCRLIWMILHQAIRYEERGPAVSRSTTERRAAKMIRELRRLGYRIEPVECKAEGSV

SEQ ID NO: 116678 - protein, 314 aa, unidentified
MILPLRCVGIDVSKRMLDIFDDGIGTVERIANAPQPITEQVARWRCGNVFVVFEATGVYDRALAEALHQAGIRFARINPARARDFARAGGQLAKTDAIDARMLAAFARQMAPAADPPPEPARNTLALLAKRRDQLVQMRAQEKNRRSEARDRAMKESIARVLSYLDGEVEAIEAEIKALIKSEPEISEQARLIRSAPGIGPVACMQLIAQMPELGQVGPKQVAALAGLAPLNVDSGSYRGKRAIGGGRKRVRDALYMAALNAVRRDGSFKNFYQRLRAAGKPAKLALIAVARKLLIILNAMLRDRKIFLQPKPS

SEQ ID NO: 116679 - protein, 358 aa, unidentified
MTRCIPTDAATITLGVDTHKDAHVGVALDGLGRRQGTLSVPATPEGYKKLVDWASEFGPLEHVGVEGTGSFGAGLARFLKGRGIRVSEVIRPRRRDQYRSGKSDSRDAESAARSVLAGTAIGQPKDADGEVEMIRALRITRRSAVKARAQAANQIQALLITAPEGLKSELCGLSTARLVVRTARFRPGTNPSDVEAATKFALRSLARRYQHLSEEIGELDEQLNRLVAEVAPELVAVEGIGTDTAASLLIAAGDNPERLRNEAAFAHLCGAAPIPASSGKTVRHRLNRHGNRDANRALYVIAVCRMSRDKRTRAYVAKRTAEGKSKKEIIRCLKRYIAREIYRILASPSLHSPSISEP

SEQ ID NO: 116680 - protein, 351 aa, unidentified
MVVIGADTHKRSHTVAAVEAASGRLLAEQTVAARRRSFEALLTWARGHGGERVWAIEDCRHVSGALERFLLAHGEAVVRVAPKLTVRERTTARERGKSDVIDAVAIARAALREGLEKLPAARLAGPELDVRLLVDHRQRLVAQRTALSNDLRWHLHDLWPETVIPPRALIRVHWQDRVAARLARAEQTARVRIARDELRRIRELTRTIDDLHAELAALVNTLAPRLLAERGCGVLTSAKLLGEIADVTRFATDAKLARSAGSAPIPASSGRTQRHRLDHGGNRQLNSALHRLAVTRGRLDPETAAYLARKQAEGKTRREAIRCLKRHLARRTWHLLQPPPPDLTTPPTSIS

SEQ ID NO: 116681 - protein, 323 aa, unidentified
MVGLDSRGAIVLREKVSRGRIALRLANLPPCLIGIEAGLATHYVTREVAALGHDVRQVPPTYAKPFRQGHKNDFRDAQAVAEAVQRPTTRFVPAKTDDQLDLQALHRVRSRLVSERTAVINQMRGFLLERGIIVRQGLRFLRQGLPDILAKRTDVLSPRMVRIIADLASDWRQLDERIEAVTDEIETLAKSDDSCRRVMTVPGIGPIISSAMVAAIGSGAAFAKGRDFSAWIGLVPKQMSTGDRTILGRISKRGNGYLRMLFIQAARVILLRPANWPKHGFGIWLVRAAQRLHPNVLAVALDASPHRFAALEHSSDRIVLVAV

SEQ ID NO: 116682 - protein, 420 aa, unidentified
MNKEVRAWIGIDWADEKHDVSLYEVATGRQERLEVKQSPEALAEWIGQLRTRYGNAGQVAVVLEQGRGALLNVLMGCEFLLLYVINPKSLSCYREAFYGSGAKSDPVDAELMREMVRQNPERFRAWHPDDVLTRSLRLMTEGRRDLVNQTTAVTNQLTALLKGYYPQALRWIGALDTHWACDFLDQWPTLQALQSSSRRQILRFYEKHPRHHLDLEQQIQQFHQTLPLTGDEAVLQYSILMVQALIPQLRALLDSIDEFDRKIAEVFRKHPDRPIFESFPGAGAALAPRLTAAFGADRDRYAAASEMQQFSGIAPVTEKSGKQHWVHWRMACPKFIRQTFHEFADHSRRWSAWAKAYYQLQIERGKKHNAAIRALAYKWIRILFRCWKQRVPYNEQVYLASLLKHQSALLLKAAPAVEKL

SEQ ID NO: 116683 - protein, 390 aa, unidentified
MHYKQKHIYIGVDLHKNHHTAVIIDCWHEKLGEIKFENKPSAFPALLKEVKKHTKKGITPIYGLEDVGGYGRSLAVFLIENNQIVKEVNSALSFAERKSYPTIKKSDSWDAYTVAYVLLNKLDILPDANPHDLYWAIGQLVTRRNGLVKALTALKNQLHIQLSYHYPSYKKFFSEIDGKTALAFFQKYPAPHTLKGISINKLTAFLLEASNNSVSKRKAKEILSLITADGDTKREYQEHRDFLVKSLVRDIEFKKQEIEHVEEELILLMDKLDYKLDTMPGIDLVTASALVAEIGDIRRFPNPDKLARFAGIAPVNFSSGGKGKDKKSKQGNRTLHGLFYFLAVQQVQISKGSKNLETLYFYEYYQRKLKEGDSDSSYIPYVFLCILTIR

SEQ ID NO: 116684 - protein, 341 aa, unidentified
MNVKTIGIDLAKNVFQIHGVDEHGKRLFNKQLRRAQMASFFANIPPCLIGMEACASAHFWANKLISMGHNVKLMAPQFVKPYVKTNKHDAADAEAICEAVTRPNMRFVPVKTAEQQAVLALHRSRQSFIKQRTAQANQIRGLLAEFGIVVPRGIQQLQRRLPELVEDADNPLPVLFRTQLSLLQHHMAYLFDVIATLDKQIEQYYRQNALCQRIGKIPGIGPVTASALIATIGKANNFENGRQLAAWLGLVPRQHSSGGKQVLLGISKRGDTYLRTLLIHGARAVLQSAKHKQDAVSSWANQLMARRNNNIASVALANKNARTVWALLAKEREYCAPIISA

SEQ ID NO: 116685 - protein, 430 aa, unidentified
MKSNTQNAKIEAITEKTLVLGIDVGSETHYARAFDYRGIEYSKKPFKFSNTEAGFVTFKEWILDLKEKHEKDKVVPGMEPTGHYWFNLGKYLQDNEMKPVLVNPHHVKKSKELDDNNPTKNDRKDPKVIAGLVREGRYMIPYLPDGVYADLRTASNIRFQLQAELTRIQNRISRWFNIYFPEYKTVYGKPDAKSGMLILKEAPLPEDILTLGIDGVDQIWRDAKMRAVGKARAKTLIEAAEHSVGSKEGAVSARMEIRMLLEDYESRNMRLQEVMVLIEELVKQIPMAEKLLEIKGVGIKTVSGFLAEVGDISRFNSPKELQKLAGLALVENSSGKHKGETTISRRGRKRLRYLLFEVAMSLVAKNPEFRELHNYYTTRRLNPLKKMQSLMAIAAKLIRVFYVMLTKGVNYDPKKMVNDIKRPAVYLQTA

SEQ ID NO: 116686 - protein, 341 aa, unidentified
MTENPNKESPALWIGVDVSKKSFMAAAKFPWEGKAVYPEDSAEFGNNRAGARRLCKWIGELEKEYGGPFGVAMEATGPFSLKLHGNLQKTRPGLHVAICNPLSVSYYMRSLGTNKTDKADAAAIARYAAHIRPCKYREPSKDEAELKRLTRDRTFMVDSRTQYKNRLGSEGDARSRERIRRLIGALDREIDGIDKEIAEYLATKASAECRSEIELMKSVPGVGTSSAAVIYGELGPLSGYTRKQLSAMSGICPATRQSGTSLHKGGLSKRGSKWLRRILYLDSMQTILGSPAMSAFHEKMLKKPDSSKMGARVACMRKLLLILRGIVVSGKKFDKDHTAVR

SEQ ID NO: 116687 - protein, 309 aa, unidentified
MKEELVYLGVDIAKSYLDAAIGDERRRFANERIGHRELIKWVKQLKAPVQVICESSEGYERALVQALVGAKLKVSLVQANRVRQFARAAGILAKTDRIDAEVLCEFGRRMRPQTVTAARLEQERLRELESQRRHLTHLLVMEQNRGARVSDASVQRLNRRLINQIKKQIEHLDLLIKVYIDQSHELSAKAAKLTSISGVGARTAALLLAQLPELGQLNRREVAALVGVAPFNRDSGKMRGKRAIYGGRRPVRHGLYMAALVAAHHNPILRAFYLRLRAAGKPGKLAITATMRKLLIVLNSALKPDLNYT

SEQ ID NO: 116688 - protein, 440 aa, unidentified
MTTPALSILNPAAAAIDVGSEQLHVSIAGGPPKVFGTTTGQLHALRDWLKESEVHTVAMEATGIYWLCPYEVLEQAGLEVVVVNGKYVKNLPGRKTDMKDCQWQATLHAHGLLKPGFVPPEHIRRLQDYLRLRADHVVSAGSHEQHMQKALERMNLKIHDVISDLTGVSGLNMIKAILNGERRAGELVALCDPQIQKKKTAALRAALEGHWKKEHLFALRQAYEGWQFDQKQIAECDQETAEILKALAGPEDPSAPQPPTVPKRGGVNTPQITGLHSLLYRLCGSKDPTTLPGVADHVLLQLIGELGTDLQKNWQTEKRFTSYLGLAPGSRQSGKRRGSQKRSRNRAGRLFCVIARTVGRSVDKALGGFYRRLKGRRGGLVANIALGRKVAELYWRLMVHGRAYVEEGLKKYEEKVAKTEKWLLEKLARKYHLRLETAAA

SEQ ID NO: 116689 - protein, 417 aa, unidentified
MNQYAACLGIDWADKKHDLCLLDTATGKKTRLVLPHTPQAINEYFTGLRAHYPGQQIAVGLEQSRGPLLFALLQFDCLVIYPINPTTLAKYRQAFSPSRAKDDPTDAEYAAELLMKHSDRLKCWHPDDDQTRTLRYLVEHRRRLIGDRTRISNRMTSLLKCYFPQVLSWFPDLATVLVCDFLLRWPALERLRGVKRTTLLNFFRAHHSVRSDTLEKRLAAIKESVPLTTDRAIINSSVLMITALAAQMKTTIEAVRQFDTEIEKLCAAHPDFHLFQSLPGAGDVYASRLLAVMGTQRDRWTTAQELACLSGIAPVIERSGQSTWVRWRYFCPKFMRQSFHEYAGESVKHSFWARAYYEQQIAKGKNRQAAVRALAYKWIRIIWKCWQTRTSYNEVRYLENLRKKGSPLLSYAAKNAA

SEQ ID NO: 116690 - protein, 342 aa, unidentified
MDEYDGRQFVGIDLHRQRSVIVRQSESGEQLSAVRIVNDPVALELQLEDAGADPEVVLEATYGWYWAVDVLQACGARVHLAHPLGVKGFRYRRVKNDVRDAADLADLLRMGRLPEAWIAPPETRELRELVRYRAKLVAIRSGLKAQVHAVLAKAGVLIAVSDLFGVTGRQRLAKVALGPAYAERIRSLLELIDILDGHEARFAAMIAERLDTDRGYQAIQQLPGVGPTLAAVFVAEIGDVHRFTDPAHLCSWAGLTPRHRESDTVVHRGHITKQGSKAVRWAAIEAVQRHPTTAKISADKDRIEARRGKNIAKVAAARKLLTLVYYGLRDGQIRALDRARAA

SEQ ID NO: 116691 - protein, 345 aa, unidentified
MDDTAPGYRLYVGIDIAAETFTAAWLAVGDKPTAPCTLDQTPAGHAALQQRLRATRVAPTETLVVLEATGSYWIALAVALHAGGYRISVINPFQAHHFAKAQLRRAKTDALDAQDRAQLAARLQPSRWDPPPAVYHEARQRLVARDALVEMRQQVRNQRHALLQWPVVVAGVRQHLDELVADLDRRIAALEGEIATVLGEGAWAASFACLTSAPGIGLVTAAWLLVGTLNFTLAATPAAATAYVGLAPMPRESGRSVRGRPSIGHGGNARLRTALYMATLSAARHNPAIRAFYDRLRAAGKPMKVARCAAARKLLHLAWALVTKQRRFDPGFQQQQHAALPELVA

SEQ ID NO: 116692 - protein, 342 aa, unidentified
MLYVGIDVAKNKHDVTALNVPGKTVLKPLTFSNNKAGFELLDLSFRQLNQDCLIALEDTGHYAFNLLNFLHEQGYKVYTYTPLLIKEFAKSLSLRKTKTDKKDAHGIALKLLSDPNREQFQHDNRQVELKILARHIHRLKKKQSDWKVQYTRCLDIIFPELDKIVGKHSEYTCQLLTCYPNPQKRLEAGFDKLIEIKRLTASKIQDILSVAPRSIGTTSPAREFEIIEIIKHYKRLIDKAETCVNDLMAEFNSVITTVTGIGGRLGAVILAEIRNIHAFDNPAQLQAFAGLDSSIYQSGQIDLAGRMIKRGSPHLRWALIQAAKACARFSPAFKAYLKTKLE

SEQ ID NO: 116693 - protein, 356 aa, unidentified
MSEDESARGTRRYVALDIHKHYCVIAAVDREGRVVLHAVRVEHADLEGWLKKNLRVSDHVVFESTTNAWHVYDLLEPLVERVVVANPILVKQIATARVKTDVRDTLILARLLAANLVPEVWVPPGHVREMRQLLSQRRQLVETHTQIVNRMHSVAHRHHLKHERGKRFNEQNTVWQKDKRLSKVERFQLELEMENRGHIEKQISRIGKEVAKMSHQKHWTEGMIYLMQLPGFGVITAMTVLAAIGEIQRFGSAKHLASYSGLTGGVDQSGTHLVPKGITKEGRKELRWAMVEVAQRAVKSDPRWTHKFQELHKRMHRNQAIVAVARQLLELVWYVLTRRQPYRHFSHERIAYKYLT

SEQ ID NO: 116694 - protein, 385 aa, unidentified
MSSKAFVPRDYDVFAGLDVDKKSISVTFANHQGFIRSLRVPYSAEHLVNHVRKHFPDQKVAFAYEAGPTGYGLYDGIVAQDYPCLIASPSMIPKAPGQRVKTNRLDSRGISENLRGGQLKSIHVPSVLYRELRHLTQLRDTFVSELVAMKQRVKSLLLMEGLEFPPAPAGSQWSFMVKDKLRKLACSSTVRFKLDQLLDSLEFNEKQIVKTTQQIRRFCRNDPELSQCIEYVVSVSGIGQIVASQLLARIGDWRELRNVRQLGAFLGLVPTEHSTGDRTDRGSITHSGDPRLRSKLIQAAWSAIRKDGELREFFRSVCQTHARPVASRVAIVAVARKLTVLISVVLMEQRPYVVRKKVHSAPLTQEETVPQGTPRRQAEPGAKNS

SEQ ID NO: 116695 - protein, 340 aa, unidentified
MNIKTLGIDLAKNVFRVHGVDALGKTTLQRALRRRQLLLFMAQLPPCLVGMEACGGAHYWAREIAKLGHQVKLMSPRFVRPYVKSSKNDARDAEAICEAVARPSMRFVAVKSQTQQDVLALHRVRALLIRERTALMNQIRGLLAERGIVVAPGAANLRRAVADLLGAEDHRVSAILRHILVEATERLRSFEQRLADYDQQILHFARWDARTVRLMAVPGVGPLIATALIATVGDARQFKSGRQLSAWLGLVPREHSSGERKILLGISKCGDRYLRTLLIHGARSTLYYAARKHDRRSVWLTGLRERCGANIAAVALANKNARVLWALLSRNEEFRAPAAA

SEQ ID NO: 116696 - protein, 417 aa, unidentified
MISDVKWYVGIDWATQSHCVCLLDAEGKPIGQRDFAHGGAGLAELCDWLLEKTQAAPERIAVAIETPHGPVVEVLVERGFAVFAINPKQLDRFRDRFTVAGAKDDRRDAHVLGNSLRTDTAAFRKIASDNPVTIELREWSRMADELKQERTRLANRLRQQLWRYYPQAAKLTDDVADDWFLALWQKVPTPESAAKASEKAIARILTAHRIRRLDAATALKTLRETPLFVAPGTTQAACAHIRSLAARLRLVNRQIKEAEQHLDRLCARIEEEEKASGQNFEQCDVTILRSWPGIGRINLATLLVEAAEPLRNRDYHALRALAGVAPVTRQSGKQRFVVRRLACNRRLQGAVHHWSRVAIQHDAAARQRYDALRQRGKGHARALRSVGDRLLRGLCATLTRRTPYEAGHNSAKTSAKA

SEQ ID NO: 116697 - protein, 338 aa, unidentified
MTCYSGIDLHSTNSVVVVSDETDRVLYQRRLPNELAGIAAALEPYRSELAGVVVESTYNWYWLVDGLKAAGYRVHLANPAAMKQYEGIKHRGDESDAQYLAHLLRLGILPTGYICPPAQRAVRDLARKRLQLVRTRNAQVVSVESNLARQTGARLTSNVVKRMTLVEAAALGLPEDVTSAMAANVAMIQTLNAEIARLEARLRKRLRLRREYRVLITVPGIGEVLATIIMLETGAIERFAAVGNFASYARCVDSVHRSNHKKKGAGNVKNGNKYLAWAFIEAANFARRYCPQAQRFYERKKAATNGILATKALAHKLARACYHMLKEGQPFDVTRCFA

SEQ ID NO: 116698 - protein, 398 aa, unidentified
MNAVGIDVSKGKSTVAVIQPFGVVIAEPFDVSHTESELNKLVQLIKSLSGETKVVMEYTGAYYEPIANALHNQGIFVSVVNPLLIDDYGTNRVRKVKTDKKDSLKIASFAIDKWLDLREYIPANDIRKTLKILNRQYVQYNKILVMQKNNLISLLDSCFPNANTLFTSPRRESDGHEKWVDFVLKFPHIHSISKLSLSAFKVKYQSWCRKNNYNYSDKKVADIHSYCKTQISVLPMTDSVIKIITEAAVMLNSTLETLCMFRDEMDRLSSTLPEYNAVMGIYGVGKVLCSQLIAEIGDVRKLNNSKSLVAMAGIDPPPNQSGKVDTKSRSISKRGSPVLRKTLFQIMTIIIQNKPVDDPVYQFLNKKRSEGKPYRVYMIAAAHKFLRIYYARVMQALN

SEQ ID NO: 116699 - protein, 379 aa, unidentified
MRTGLHWRGDQVFKRKESEMNATTVAVDLAKSVFQLAVADKHWRVIDTQRLTRTQFERWFANHDVGLVVMESCGSAHHWARWLNGLGIDVKLLPAQYIRAYVKRNKTDAVDAAALLEAARSSDIRPVRIKSVEQQALQGLHRIRSLWMGTRTSRINALRGFCREFGIAIPVGARTGIEAISRVLADPRSAVPDMIRGTARLLIEEIRLLEARIAQLERELAEIARHSPACTTLLSIPGIGLLTATAMVAATSGDVSHFKDARHFASWFGLTPREYSSGSSRYLGRISKKGDRYLRMLLTHGARSVLRAAAVAVNAGRQVCGIRQWALAVQQRTHHNKAACALANKLARICYATLRDHAPFAESERISKKLNRESFAMPA

SEQ ID NO: 116700 - protein, 372 aa, unidentified
MDRLLPPRRGPRLLRIKPEKQPMDTTTSPLASIGIDIGKEVFHLVGFGTDGKIAFRRKVKRLALTETFKKLPPCVVGMEACLSAHFVSRALRQLGHEPRIIPAIYVKPFVKGQKNDYNDAEAIAEAALRPNLRTVREKSQEQLDLQACHRVRSRLVSRRTATINQIRAFLIEQGIAVRAGVTALRNSLFEILKNREKEISPRMSDLIVGLYEDWLWLDERIETITKEIEQISQREGNCIRLMSVPGVGPLISTAVVAAIGTGEAFDRGRDFGAWLGLVPRQYSTGGRSILGGISKRGSRYLRTLFIQAAKVLLMRPQNWPKFSFGPWLTNAAPRMHRNKLATALANKLARIAWSVLITDQAFDTHKLEIEAV

SEQ ID NO: 116701 - protein, 327 aa, unidentified
MRQAKSLAEKAKTTVAFDVCKAALDVHIQVDGKAFQVPNTYEGFDQIALVLADYDVSLVLMESTGGYEDAAACNFQSLGYDVAVINPRHARNFAMAMGQLAKTDRLDAAILADFAAVIDTRPDRARYIKPPTDGERKFISQLIARRRQIVDLISTERQRLAHADDYAKASINIIINFLDVQLKEINSDISFHVKKNFSDLSNLLSEIPGIGELSVGFLVGDVPELGQIGNRQLSAVIGVAPFNHDSGKMRGKRCISGGRQNVRNVLFMGVMSATRYNPVIKAFYDRLINKGKPKRVAYIACVHKLLRIINAMVRDGTSFNPDLHAVS

SEQ ID NO: 116702 - protein, 355 aa, unidentified
MSAKTRQDFSAVAVIGMDIGKDVFHLVGFSSDGSLVLRQKIKRMAFVATFQTLPPCIVGMEACLSAHFVSRTLRGMGFEPRIIPAIYVKPFNKGQKNDYNDAEAIAEAALRPNLRTVSEKSQDQLDLQALHRVRSRLVSRRTATINQIRAFLIEQGITIRKGLRAVRNSLLSLLDERQDEISPRMRHIILDLHDDWMRLDARIEAVSGEIEDIGQSEAHCRALRTIPGVGPIISTALVAAVGKGEAFERGRDMAAWVGLVPRQYSTGGRTTLGRISKRGSRYLRTLLIQAAKIILMRPHNWPGLSFGAWLAEADLRMHRNKLAVALANKLTRIAWAVLRYGRGFDARRDPVAEAL

SEQ ID NO: 116703 - protein, 342 aa, unidentified
MQVTTVGLDLAKSVFQVHAVDEEGRVVVRKALRRAQVLQFFARLPSCLVGMEACGTSHHWARELTELGHEVRLMPPAYVKPYVKRGKTDAGDAEAICEAVTRPTMRFVPVKSAEQQAALALHRTRDLLVRQRTQLVNMLRGLLAEFGIEMARGLHHALRLAGRLSADEVPEVPPLARLVIKGLADQIGTVQLQLARLEKELLAWHRSNQLSQRLATIPGIGVISATALAASVVEPERFRSGRQFAASLGLTPLHNCSGGRERMGRISRMGDRYLRRLLVVGMTSLVRRAKTQPASVDPRLSVMLARKPARLVTVAAANRTARVAWAIMTRGGTYRAPISAAA

SEQ ID NO: 116704 - protein, 475 aa, unidentified
MGRDSGKQKKENMKALSPEQEAGLKQKAEEISKGLQSYTWRDLETGGKFTHNDKLTFIRDDMLIVGCDIGSERHYARAIDAKGRELSKGAYSFENSAEGFQSAKDWALCLAAQHGKNQIVLGVEPTGHYWFSLAAWMIAKGISVVQVNPYAVKQTKELADNSQAKNDAKDPKLIAELVKNGNYGVPYLPEDVYAELRVLCTLRDQLMEDRVRNMNRLHREMKIVFPEYREAFGKIDGIFTLSVLANAPLPSELVALGEDGVKDIWHAEKLRGGGYKRAKEIVRLAGVSAGLTQGAEARKIAIVSFVGKVMELGAELEEIEAQIALKCREIPRADNILEIHGLGAATVSGILAEMGDIDRFDAAKEIQKLSGLGLVACSSGKHQGQTKISHRGRKRLRYWLFQGALSVVSHNEAFRQIHAYYTTRAENPLKKMQSITVIACKLLRIIFTILKKGVRFDPDKMLSDITHPAPLDAAA

SEQ ID NO: 116705 - protein, 342 aa, unidentified
MEKVSIIGLDLAKRRLQAHGARTDGGVAFRKTLSRDKVLAFLAEHPRCVVAMEACGSAHHWGRAIGALGHEVRLIAPVYVKPFVRRQKNDAADAEAICEAAVRPTMRYVAVKTKEQQARAMLFRTRDLLVRQRTQLINALRGHLTEHGVVSPQGPANVKGLAEAIESDMTSLPLLVVELSRLLLDQLDGLSKKIIELEKATVREATHEATMRRLQTMPGVGPITAMAIETFAPPMAVFRRGRDFAAWLGLVPRQHSTGGKPLLGKTSKMGQRDIRRLLIIGAMAVIRGASRRGRAEGSWLHRMLARKPRMLLAIALANKMARAIWAMLTRGEDYRVPAAAAL

SEQ ID NO: 116706 - protein, 400 aa, unidentified
MRCTDHPAHLRTAVREQDSSLFVALELSKSAWLIAASAPGSEKVSKYRVAAADVAALVALLARLKAQAERYRGGPVQVVSIYEAGLDGFWVHRMLEANGVESHVVDAASIAVNRRSRRAKTDRIDVEGLLRTLMGWARGERRICSMVRPPSPADEDERRLTRERGTLVTERTRHVNRIKGLLATQGVFGFEPLHKNRRQRLEELQQWNGQPLPTRLKTELVRELDRLELVMSQLAALEAERDRVLQARRTAVGNTTKAASSGTASAGEVGSQLLRLRSIGPEIASVLSLEAFYRNFSNRREVAAYSGLAPSPWKSGGIDVEQGISKAGNARLRTTMIQLAWLWVRHQPGSALSRWFHERVGDKRGKIKRIAIVAVARKLLVALWRYVAQGVVPEGAELKA

SEQ ID NO: 116707 - protein, 405 aa, unidentified
MMAVMIGIDPHKGSHTAVAINAGEEPLGRLRVRACPDQAGQLVAWAQAWPERAWAVEGATGLGHLLAQQLVAAGERVLDIQPKLAARVRVLEAGNTSKNDPNDALSVAVAALRSKACREVTADDHAAVLRMRSRRHQDLGQSRNQVACRLHAVLCDLVPGGLPKEITAAQAAMLLEQAAPAGAVGQARREVAAELLADLRRLDAQMAESKKKLAAVVRASGTSVTSLFGVGPVIAAIVIGDAVTVTRFPSRDHFAAWNGTAPVEVSSGGRKIYRLSRRGNRRVNSAIHIAAVTQIRYKHSPGRAYYERKIAEGKTPKEALRALKRRISDAIYARLVADAGTAAASKDPGGQPGNDSDSSAAGSHPDRRLFGQATPGPGHHPTTMARGRGSAGEGPAPTLVKPQSP

SEQ ID NO: 116708 - protein, 415 aa, unidentified
MKGTEDTSQIERYIALDIHKEYVLAGGQNAKQEWVMPPRRISMAKFREWATANLHASDALVIETTTNVWDIYDIVAPLVTRTVVAHAGAVRQIAEARVKTDKEDVKRLIRLLIADIVPEVWIPPTEVRELRGMISYRNRLVKMGTMVRNRLQSLLQRHNILLPKGGLQDEAWWQAQKMSELEKMQIQQELAMLEELDQHKAEVDAELGRQSLGAVWGKQAVRLLQLPGFGVVMTMIVLSAIGDIQRFESAKYLVGYAGLGAGIHESGKEHIEKRITKSGRKELRWALVEAAWQAIRISPYWKDQYEKYLRRMRRPNQAIVVIARKLLVAVWQVLTKEETDLHASEEDLAYKMLVLSWDLDESVRMGLTYKQFAKYALMKLGIETDITRFVRRNVPRRIAPREEVLARMEELGLVC

SEQ ID NO: 116709 - protein, 246 aa, unidentified
MDAMVVGIDVSKDWLDVAVRPTGESFAFKRTAAGIEDLVERLKDLSPALVAIEATGGFEAVVAAALAGAGLPVVVVNPAQVRAFAVALGKRAKTDPIDAAVIAHFAEATKPQLRQLPDEKTRFLADLIARRRQIVEMLAAESQRARRISDHRLTRSITRLRKALEEELAELERLIADHMRRSTVWVEKEKLLASVPGVGKTIARTLIAELPELGSLDRRQIAALVGLAPWTRQSGQWRGKCFIGGG

SEQ ID NO: 116710 - protein, 365 aa, unidentified
MTKLSKVTTEMREQMQSRAEISGVAGLDLGDKTSTICLLGVDGEAIERQRIKTSQAALQRYFGHWPRLRVVIEAGVDVHWVARLLEGLRHEVVAANPRRLKLITQSVSKNDRNDSQWLAELGRTNPKLLSPIRLRSQPSQQQRTMLRAREAAVESRTKLINAIRGMAKSHGHRLAKCDADAFARKMQKDCPPELRDALWGLLLLVAAATTQIKAYDRQIQKLCQQYAATKRLQSIRGVGPQTALAFVLTLDNDPGWVQRSRQAGALVGLRPKQRDSGESAPELGITKQGNRLLRKLLVQCSHYILSRHGVDSALRRWGLRLAQGGKRAKRRAVVAVARKLAVLLHVLWRRDEDFVPFPAGQPQTA

SEQ ID NO: 116711 - protein, 348 aa, unidentified
MKFYTKQHPFYCGIDLHADAMYVCILDSAGEIVLHKNIPTKPKTFLRLIKPYRDGLVVGCECMFSWYWLADLCAEESIDFVLGHALYMKAIHGGKAKNDKIDSCKIASLLRGGNFPLAYTYPKKMRATRDLLRRRNHLCRKRAELIGHIQNTATQYNLPEPLGCVAKPSARGELSKKFRDPIVRAMVEVDLSVIEHFDELLGTLERHLEKVAMGHDPISLSLLKSIPGVGRILSLVMLYEIEDISRFPRVQDFVSYCRLVKPEKSSNGKSYGHSGKKIGNAHLRWAFSEAVVLMLKGNPPAKRAKDRLASKYGKGKALAILSHRLGRAVYFMLKNQVPFNQELFLRGA

SEQ ID NO: 116712 - protein, 376 aa, unidentified
MEMMQHRRSRYIGLDVHRATIAVALAEEEGPPESFGTVPNEASSIRKLMTRLGGEDVQLHVAYEAGPTGYALHRQLTKLGIECIVVAPSLIPVRPGDKVKTDRRDALKLARLLRSGDLTSVWVPDQEHEALRSLVRSRADAKVDELRAKHRLSKFLLRQGAHPPVGTRNWSERYFQWLRLLEFEHLADRIVFADYLAEVTAAGERIKRLEAALRQCAETSTQVALIRALQAFRGIGFLSAVTIVAEVGSLRRFRTAPQLMAYAGVVPSEASSGRKQHRGPITKSGNSLLRHVLGEAAHHARHPPRVSPTLQQRQQHLPREITDLAWRAQVRLHHRYRHLAGRIGVHKTLTAVGREMAGFVWAIGQALEEGPTAAAA

SEQ ID NO: 116713 - protein, 334 aa, unidentified
MALNTLAIDIGKHSFHLFGIDDDGVIVSRKVSRLKLVWTVDRLDPKIIAMEACGSAHHWGRMFQEAGRMVRLISPYFVRPFVRGSKNDATDAQAIFEAAGRPTMRFVPVKSLECQDLQSLHRIRDRLVHNRTSLINHTRGLLAEYGIVLPQGAKRFTLQVRQAVVEAELSDLARELFEELLDQLGDLDRRIAHIDKHLIAICRDKAACRRLVGIPGIGPVVATALLAAVDDGRQFGSGRDLAAWIGLVPRQYTTGGKPRLGGIGRRANHYLRRQIVHGARAVMSQAGRRSDPRAEWMKAVAARRGFNRAVIAVANKMARAAWAILVRGEAYAAA

SEQ ID NO: 116714 - protein, 348 aa, unidentified
MVVIGVDSHKRTHTVVATDGTGRKLAEKTVVATSAGHLELVRWATRFAERTWALEDCRHLSRRLSSDLLIAGERVIRVPPKLMAGARRSSREPGKSDPIDALAVARAALREDLPVATLDGPDREVRLLVDHREDLVAERTRAQNRLRWHLHELDPGSEPVARGLHRAVVLAALETRLAEQPGTVARIARELVVRIRELTATINDLEREIARLVASLAPSLLALTGCGSLTAAKLVGETASIGRFHSAAAFARHNGTAPLPVWSGNTIRHRLSRTGNRQLNVALHRIAITQMQREGPGKAYVEHRRTMGNTKTEAIRALRRRISDEVFRRMRHDEATRAASPSGLAAAA

SEQ ID NO: 116715 - protein, 421 aa, unidentified
MLKIHRFNCAGLDVHKNLIVATIGITDKKTRVTEYIQKEFSSLNYDLYHLKNWLIEHDCFDVCMESTGKYWIPVFNVLETENKMNIVLVHPKYVKAIKGKKTDKKDSKWICDLFKHDLLKSSFIPPKDIRELRDLSRYRFKLICMRTGERNRYQNAMTVSNIGLASVVSDPFGKTAQSVMNEVLSTKVIDENKIKKLIHGRCKNKDKIVESLKNSKIEPDQRFKMTEIQSHMNELDQHIEAVEVEIIKRASKYFDNFLHITKINGIQMMSAILIISEIGVDMTQFETDKQLCCWAGLSPANNESAGKKKSVRINKAGQYLKPVLVQCALASIKNKDSYFGQKYSRIKKRRGHKKAIIAIARMMLVSIYHMILTGETFNPSDYESFKNPKPQREKNIYTVETALDFLKSQGFDVSSIQDIPK

SEQ ID NO: 116716 - protein, 406 aa, unidentified
MELTALHKRVIGLDVHQAQITACALIEETDGTTRIEQRQFGAFKRDRRALAEWAAALHPDEVVMESTGIYWKSPYAALEGAGIRAQVVNARHVKNVPGRKTDVGDAQWLATLARAGLLRGSFIPPAKLRELRLIARQRQKLVGQLASEKNRLHKILTDGGIRLGVVVSDIHGQSARAMIKALIEGLPPHEVLQFASRRLKASREELFDALQGELTPSHRFVLDELMRHIEEIDARIARFDARLLDGLADERNTLALLQTLPGVDLIGAAMLLVEIGADMDAFGSADRLASWVGVCPGNNESAGKRKSGRVRKGNPYVRRLLCEFAHAACKTKSVFKSKFQSLIVRRGHKRSIIAIAHKLLRTMFFMIKRGEYYRDGATDYEALSVQRNAPRWIKALRQFGFIPAAV

SEQ ID NO: 116717 - protein, 429 aa, unidentified
MTRISVGVDVSKNRSTVCIMDQDGKVIMRPFLVWHSTEELDFLADTLKRLNGEVRVIMESTSIYQYPIALHLKEKGIFISIVNAYKVKKFANTDFRGGKTDKKDSRTIASYGISYWDKLVEWQIPKDTYFNLDLLNRTYMNAKKHRQIILQELQHYIDCAMPGMDKELHSLNLNTKKDFMLDFVEKFWHRDKIVNMTEAEFTEVFTAWAKEKGYRPGKGKAAKIYAIAKSCIPYYPANPTVKTILQCIVDKLSGVNRTLVTIVTQMIEEAKKLPEYQIVREMPGVGDPLAARFFGSAGDIRRFKNSKALVAYAGIDSPPDESGDFSSTHRHITKKGSKVFRDTGYEIMMALRAQKRTWEKVRKNPEVYDYMLKKEAEGKPRKVAKIAALNKFLRIVYARIKELYDNMALTERAKAKTKSKTKAKTKATA

SEQ ID NO: 116718 - protein, 480 aa, unidentified
MTPRIQKNLRQPPSPEPLRVTHRHAAGIDIHANVHWVAVPPEDAPPPPANHPANLPKHVRSFGTCTADLIALADWLMQCGVKTIAMESTGIYWTVLFELLEARGFEVFLVQPRQSRRAPGRPKSDVLDCQWLQRLHSYGLLTASFRPTEVVVVLRSYLRQRQMLLRYAGQHVQHMQKALEQMNVKLTEVVNDVTGVTGMAIIQAILRGQRDPLELAKLRNDKCKRTQAEIARALYGNWRAEHLFALKQAVALHTFYRQQLRECDLQLQAYLDTFVDQSKGQPCPRRPRRRTKHVNDLPFDAESALYRMAGVNLTVLEGIDPNTALVLLSEVGPDVSRFPTVKHFTSWLGLSPQHQSSAGKIRSRRVQRGASRAGRALRLAVQGCHHAKHALGAFYRRIQARAGGPKAIVATARKTGRAGVSVAEVRRGVRVPKDRSLRSGLSGAAGQGAGAEGGRIGLSTGSDDHDRHLISIDARPWGSG

SEQ ID NO: 116719 - protein, 338 aa, unidentified
MHYIGVDYHKKYSYLVVKDEQGKGERKGMVNNTKEEFQRFLKPYLPGKAALEATRNWGLIYDWLEEILDDVALAHPLKVRAIAEARIKTDKISADILADLLRSNLLPEAYVPGKETREAKNVLRQRMFFVRIQTMVKNHVHTILDRHAEVLSHVPDVSDLFGASGMEWLKQVVLPGEDNRLLISELSLLEVLKQKISESNGVVKELAKGDRSVKLLRSIPGLGHFFSVLVAKEIDDIRRFKSDKKLCAYTGLVPSTHASGGKVFHGRITKQGNKWLRWAIVEAVPHAIKSDPHLYAYYEQIRLKNGNNAAKVATARRLVTIVYRVLTQGRLYERRIFN

SEQ ID NO: 116720 - protein, 427 aa, unidentified
MKEEFFFYVGVDWGVGFHQACILDANGETICQRRIEHSGADMLEFCDFLQALTNGKASALAVAIEVPRGPVVEALLEHNYAVFSINPKQLDRFRDRHTVAGAKDDRRDAFVAADSLRTDQHCFRRVRPDHPDVIRIRELSRTEENVGIDLRRCVNQLSQLLLRYFPQLLRLCSTPDEPWLWALLELAPTPQRATKLTEKRLQQLLAKHRIRRWTAEKVGEILTAPPLPLAGGSAEAISEHALLLLPQLRLLHLQRKQVADRTQQLLDRMAASTNDFPMSQEHRDIPVLLSLPGVGRIITATMLAEGAHILSLRDYHALRAHAGIAPVTKQSGKSRQVLMRYRCNQRLRNAFYHWACTSLQHDPHSKHHYARLRQVGHNHGRALRGVADRLLAMLIAMLKSGHGSRTAVLKPLENHLVVVSTVPCEHR

SEQ ID NO: 116721 - protein, 350 aa, unidentified
MPKAPLQHVATLGIDIGKNSFHLIGLDARGAIVLRQKLSRGQVEQRLANMPSCLIGMEACVGAHHLSRQLLALGHDVKLIPAQFVSPFRKSHKNDFRDAEAIAEAVLRPTMRFVPTKTVEQLDLQALHRVRSRLVSQRTAVINQIRTFLLERGIAVRQGLRSLRQALPDILAQRTDVLTPRMTHMIEGLMQDWRHLDERIDAVTDEIGALVAADEACQRLMSVPGVGPIIASAMVASIGNGAAFSRGRDFGAWLGLVPKQTSTGDRTIPGRLSKRGNIYLRSLLVQAARVLLLWPAKWRQHSFGAWLTAASMRLHHNVLAAALANKLARIAWSVLSQNRIYEPRTAAVAG

SEQ ID NO: 116722 - protein, 365 aa, unidentified
MQKISTMRTSGKNIFKGQLTIGLDLGDRSSSYCVLNEAGEIVLEHKLATTPEAMKQVFGSMPRCRIAMETGTHSPWVSRLLTALGHEVIVAHAQKVRLIVKSRRKDDRLDARTLARLARIDPELLSPVQHRSAQAQLHLTEIRARAGLVSARTALVNAARGLVKSYGERLRKCGTQQVRRETTSGLSTGLQEALEPLFREVESLNERIQEYDRRIEKIAKETYPETALLKQVKGVGDLIATAYVLTIEDPHRFWKSRDAGCFVGLQPGRRNSGESEPQMRISKEGNEYLRTLLVQGAHYILGPFGEDSDLRRWGKKLAARGGKNAKKRAVVAVARKLAVLLHRLWVSGEVYEPLRNSQKAMSAAA

SEQ ID NO: 116723 - protein, 343 aa, unidentified
MTVIIGVDPHKATHTAVAVDQAEQELDRIGVRATRRQLEQLQRWAQPFGDRVWAIESAGGLGYLLAQQLVGAGERVVDVPATLASRVRLLGTGRSDKNDPNDARSVAIAALRAPRLAEVQPADHAAVLRLLAKRNLDLSRERNRTANRLHVVLCELVPGGMPKELTVSRAVSLLETVEPAIAVDQARYEMARELLDDVRRLDAKKKEMNHRIASAVDASGTTVTEVFCAGPVVACLVLGYTGDVTRFRDRHHFAAYNGTAPVEMSSAGRRVHRLSRRGNRVLNYAVHIVAVGQIRQAHSEGRAFYDRKVKEGKTNREALRALKRRISDAIYRQLVIDAARTHS

SEQ ID NO: 116724 - protein, 341 aa, unidentified
MSAIGIDTHKATLAACRVDELDRPAAEATFDNDPPGHRRLLAWIRLGDPADVVGIEGSASFGAAVARLLVGAGVTVREVPPQLTRRERATTRRLGKSDPGDALAIARVTAREADLPPVRLADRTLDLQLLVKAREDVVVEMTRVRNRLHADLRSLLPGYGARAANLVAVRHQRLVGQLLRPLVGVQAELARRRLARLRALGLEERAFTSRIAALVEGHPLLALPGVGPVITAGLVGEIGDIRRFRSVDALAALAGVAPIPASSGQTQRMRLNRGGNRQLNRAFHIIALAQAAHHPPAQAYLARKRAEGKTRREALRCLKRRLVRPVFNLLQAGAAEATRAA

SEQ ID NO: 116725 - protein, 389 aa, unidentified
MSIVFGIDVSSRDSSVCVLQSGVTREYKVTNDTIGFKTLLIDLKEYAEHPQIILEATGIYSRRITRFLDEYDYDYVLLNPLKAKKEINQGLRRNKTDRNDAYHLALAQDRNQHQPNRKEPEAYHQLQSLSRAYEELTHDIVSSKNRLHKYLQLTFPELETIFNNSRGVNYWYLVELFPHCQDVRNLDVSTIAKQIKDFKGYGINRAQKLAIKLKHLADLAYPAVDQDDPERDEVVYYANRLLRLTADRERRSEAMIKLAKTLPNRDLEILMSIPGIAEITAVRILAELGDIRRFSNPNKINAFVGIDPGRYQSGEKDSSLRISKHGNAVARKILYRAIGQIDLAAKTSPCHIADYYERKKQFSQTKGFKKIAIASIHKLLRTGLHFDYH

SEQ ID NO: 116726 - protein, 413 aa, unidentified
MKQTYILAIDVAKHKVRAALSGADERLLFEKDLPVSAGGLRELLVRLREHVAEPEGVLVLLEATGMLHLNWSVALIRAGYAVVVINPLIARRLYTLGNSIRDNKSDPIDARQLCGIGRLHGEKLLSLYRFALKPERLCLQRLQSVRKAVRKSLSNLKKSYRSLLDVSFPELGRLLEIDGVGIRQLLSQAPTPCAIARMRRSSLEKNWMLRPKAAQLKKLAAESMADPELAQASRPALLAMLQSIEAMETRLRELDRQIEALTSQSVDPQTKALVESIPGFGALNAAKLLAFLPGEILHAGSNRQAAARLQAYMGNDPRVRQSGQWQGQTKMSKRGVEMLRTALFQCAFSASQHDPELRSFYQRKRAQGKHHEVALSHLMRILTRRLVAVLRSGQPYQPNYNSELKNAAQNTCH

SEQ ID NO: 116727 - protein, 362 aa, unidentified
MAQPKSVVGMDVHATQTHVSVLDPRSGELRSRRLSGPPRGALDFLAELPAPVLAVYEAGPTGYGLARGAPERGLDVRVCAPGSIPRAPGDRVKTDRRDAERLARLLLAGELSFVRVPTPEEERFRDLTRCREAIRADLMRARHRVTKFLLRREMRWEGSACAWTQAHWKWLDGIEFSDGPSRAVLADYLCAVRALEQRRGVAERAIEDGWPESPWAETVARLRCLRGIDTLTALGLCAEAGDLRRFGRPASLMSYFGIVPSEYSSGEQRRRGPITKAGSPHARRLLVEAAQHYRHQPRVAGLLERRQRGADPRAVQIGWRAQRRLHERWVRLRLERGRPGSVVKIALARELGCFVWEVGQLS

SEQ ID NO: 116728 - protein, 354 aa, unidentified
MPVVAGADCHRDTHTIVVIDGVGKVLSSFSIPASAEGYRLAISEARKLAVESWGLEGTGAYGRAFAQALLQASFTVFEVPGIMTKRHRKHASRHGKSDELDARAIGEVVLRESDRLPRFREFAEQEALRLRYDQRDRLVRERTMVINRLRSAALRLALPGIPSDLTSDSSVDKLRETALPFRADGLVEDVIADEIRFGIETLQRLNAEIRRLEHLIGPFVKRLAPELLELRGVSLVTAAGLVGHTGDVANLRNADAFAMRSAAAPVPWSSGRNQSVRLNTGGDRQLNRLLHTIALTQIRSVGHQGRQYYQRKLAAGMTPRSAIRALKRHLATVVFYRLRLCQNRVEAGMLVAAA

SEQ ID NO: 116729 - protein, 360 aa, unidentified
MYSAGIDYHKRYSVVNIMDDHGSIVVDNARVNGNTLYGFRQVFAGVDGPLQATFECGRNWGYLYDLLEETGSVERIVPAHAAKVKVIGEAEIKTDKIDARMLAHLLRADLIPAVHVPDAATRMRKDVLRQRAQWVQLRTRVRNRVHGIIDRYPEAAMPKVSDLFGRQGMRALKKVELPGDERALLDQHLAALALLAKLIKACQRLIDRAAQGDADEHLLLTVPGMGPVIAPLVSVEVDGITRFSSAAKLCAYAGLVPSTYSSGGRTRHGRMLHSCNHWLKWAFIEASWVAMKHDLYFGGLYKRHRARGKKATTAITIVARRMCTIVYHMLYEQRAYEHRPLRFAAPGRPGRLLTESHMVA

SEQ ID NO: 116730 - protein, 415 aa, unidentified
MALKIVYKICCGIDVHKTFVVACIASTNDKGVTSYESHRFSTYTSGLKTLLQWLLNRNCKDVCMESTGKYWIPVYNILENDCSIVLAHPKYVKAIRGKKTDKKDAKWIADLFKHDLVAGSFMPPADIRQLRDLMRYRFKLTCFQSSEKNRLQNCLTVSNIQLGNVVSDTFGKSAQAILDKLLENPADTSFDLEPLVYKSLKKKLPELRDAIDGYITPEQAGKLKVIKAHYESLESRKAELEELILALAAPYQQELAILQTAPGIRSDFTAIGIISEIGTNMEAFPSAKHLCSWAGLTPTNNESAGKKKSVRVSKAGCYIKPLLVQCANAVVTSKKHPEIRNRYLRLKKRRGHKKAIIAIARMLLTALYHMLKNGENYNAELYRKSYLPPVDREITVEQAIIIARNQGYKIKSATA

SEQ ID NO: 116731 - protein, 367 aa, unidentified
MAKAKKRKYRKLDRNLPVMRPNAAGIDIGATEIFVAVPADRDAESVRSFPAFTQDLHELADWLQRCHVDTVAMESTGVYWIPLFQILEARAIEVHLVNAQHVHHVPGRKSDVMDCQWLQYLHSVGLLRASFRPEQAVCEILALMPHRESNHRIKASLETVRKSLVGDYRPEHIFTLKQSLTAYRYYQQLIADCDREIQERIERFQNHADPSAPAESCNKSPLTTDSTFDLRTHLERIFGVDLTRVPGFDVLRIQTVFSELGVDLSGKFSTEDAFSSWLNLSPKDGFSAGRRIRGPKIKTKNRVTQVFRMAAQSLHNSQSYLGHYYRSQRARHGAPKAIKNTAHKTRPYFLSPGDHLSAVRRNRVCKT

SEQ ID NO: 116732 - protein, 455 aa, unidentified
MGLLPSTSHYKGLVVTLGGAGNSFNQEVVMSSAEKNHPKAVAAFVGIDWADQKHDIALRALSGQEQLERCRIESQPEALTDWVLELRERFGSQAKILVCLEQSRGALIHFLMGYDCFELYPINPKQLDNYRKAFSPSGAKDDPSDAELLCQFVSLHHERLRPWQPDDEQTRKLGLLCEKRRQAVDARTALSNQLKSELKQYYPLALAVLDNDLTSVLAADFLLQWSNFESLKKASAHKLRSFFYGHQCRSEQKIQTRIQSIQAAVALTKDSAIIEAGTLTVQMLAQQLKALAPYIRRYEEQIAELFSQHPDSPLFNNLPGAGDHLAPRLLCAFGSNRERFSSPLEAVTFFGVAPVTERSGKSTWVHFRWACPKFLRQSFHEFANHSLRFCDWAKTFYEQQRARAKDHHAAVRALAYKWIPILFRCWKTRQPYDPQRYLSALAQRGSPFASVKNFP

SEQ ID NO: 116733 - protein, 311 aa, unidentified
MDNIIGIDVSKDTLDVHRLTDGRHNNFTNDKTGHTQLLKWISLQPDTLIVVEATGAYHRRLEQFLSAKTIAFVKVNPKQARRFAQACGKLAKTDRVDCEMLAKMGAALKLTPKPVSAENLYDLRVLLSARRALIKDRTAAKARSATATHSLVKQQLARRLRQIESDIAKIDAAMLQSSQQDQQMSERLDILSSIPGIGTTTALMILVDMPEIGTLDSKQVASLARLAPMSQSSGKWQGKAWIQGGRPNLRHAIFMPALVAIRHNADFKVKYEQLVAAGKEKKVAITAVMRKMLVLANALLRDHRKWVEKAA

SEQ ID NO: 116734 - protein, 418 aa, unidentified
MTSIPCTTPQTTWVGIDIAKKHNDVLVDRPGHRRRRFRVANQLEDYQRFANFLDGIPERPVIGFEATGNYHRPLAFFLAEKGFALRLVSSVAAARTREALYNSWDKNDPKDAQVIIHMLKTGVTQLYHDPLVHGINELQELSKTHFQISLHKVRIQHSILTHYLPLYLPEADKYMTHSRAQWFTHLLERYPCHAAVVRFSREEFIEDAWGYVGRKVNKKAFLEDFYATATQTIGLPVSECSEAIRMFRIVLREHQRLCEVRTDIEKEAESFLGDDVDYVRLKTLPGIGPILSLTILAEAGDLRRFAHHRQFLKFCGFDLSSQQSGQFRGNKKLSKRGNRRLRYAFWMAATTAIRLRENSFRDKYTRYVKADPTNADLRRKAYTAVAAKMARVAYGMIKNGTDYRPFHERAVPGGTIPS

SEQ ID NO: 116735 - protein, 422 aa, unidentified
MLGVGVDWAESFHDVALGRPGEGVMEQFRIEHGPAGVARLVARCLELEPDPAQVRVVLETRHGLLVEALVDAGFSVLPVNPDLVARRRGPAKKKDDAEDARICCLLALDAYLELRKLIPHGQIGAELRAIARDDERAARDERRIGNRLRADLLAVFPAAIDLAAGDLASAVFLQLLQRWPSAQALAAASRQEIEDFARSARHGWPGRFADRVTGAMATAQLTVRPELARAKAGSIQLAAAQLLLLRAQRRQWERRMGELLLGAPRTGRDHTAKDPDPGKAFPGGEIYLSMPGLGDRLAARVAGEIGEHPEQFTTPNALQCYAGRAPVTRRSGRSEFTIARRLAYNHYLGDAVHQWAFCSLRYSAWAREFYDTKITAGHSHHAALRALGNRWLEVLWHCLRLDTPYDEAIHTANRNRALNHAA

SEQ ID NO: 116736 - protein, 404 aa, unidentified
MYNAVGIDVSKGKSTIAVLQPGGTVIRKPFDVSHTSQRLIELARYLGSLEGSTKIVMECTGRYHEPMLKALYEAGLFVSVVNPHLIKNFGNNSLRRVKSDPADARRIARYTLDNWAELRQYSGMDNTRTQLKTLNSQFSFFMKQKVAAKANLIALLDNTYPGVNKLFDSPPREDGSEKWVDYAYSFWHVDCVRRIGLKTFTERYRAFCRKHHYIFQPDKPEKLFHASKELVAVFPKEKTYKLLIQQSIQQLNLASGHVERLRQEMNALASTLPEYSTVMGIYGVGKTYGPQLIAEIGDVSRFTHREALTAFAGVDPGVDESGQHKSKSNRASKGGSARLRKTLFQIMTTLLQNAPEDDPVYRFLDKKRAQGKPYYVYMTAGANKFLRIYYGKVKECLRNLEQAE

SEQ ID NO: 116737 - protein, 322 aa, unidentified
MSVSVLGIDIAKQKFDVALLVDGKTKHKTCKNSAEGFETLMIWLEKQGIQKVHTCLEATGNYGDDLAICLHEAGHIVSIVNPARIKGFAQSELLRTKTDKLDAALIARFCLAMKPIPWIPPSPEIRALRALVRRVDSLIDMRSQEKNRISTAHESVILLIKEHIAYLDQEIEKIRQQIAGLIEQDPNLKRRKELLDSIPGIGKVTIPHILAELDDLEKFNHVRQMVAFIGLAPKETLSGSSIKGKPRLCKIGHARLRKALYMPALVSIQCNPVMIAFYNRLKDKGKNGKVIVCAIMRKLVHVIFGVLKSGKKYDPNFKPISA

SEQ ID NO: 116738 - protein, 350 aa, unidentified
MTTPRMALPKLTIGLDLGDRYTQLCALDARGQIRATERLRTTPAALERPIAAVPRCRIVLEVGTHSPWVSRLLQRLGHEVLVANARQLRLIYGSDRKSDRVDAETLARLGRLDPALLKPIHHRGPEGQAALAQLRARDALVRTRTLLINHVRGAVKAWGARLPASSAPAFATAAAAGVPLALRRALGPLLELIATLTHEIRGMERQLERLAQEQYPETARLRQPSGGGLLTALCYVLTLEDPGRFHQSRAVGPYLGLCPRRDQSGGRDAQLRITKRGEAMLRRLLVSGAQYILGPFGPDTDLRRWGLRLAARGGKNAQKRAVVAVARKLATLLHRLWVSGAAYQPLRAAA

SEQ ID NO: 116739 - protein, 354 aa, unidentified
MSLQHFIALDTHCEFCEMVAVSNSGKIVKRQRCETTIPALTMALESVRRPRILTFEEGPLADWLARNLRPYVERLIVCEPRRNALIAKESDKDDPIDAERLAQLLRGGYLKEVHQSQSLDRAVLKQHVSFYHDRVRERVRQGHQLVAQLRRHGVFASITDVFDLEERQRLWKRLPNRQVLRRDLDLVWQVYELLVQQEEELRSQLIRLARREEPVRRFQELPGLSWIRSITFYVYIDTPSRFASKSALCRYCGIGLERRHSGSGPMRVRLTQAGNRRLKDVLLGAAKSAAAQRDNPFADKYVYWTQEEGMHPSTARRNVARCLANTLWSLWKTGSQYDPALVRGVGRPSAPTRS

SEQ ID NO: 116740 - protein, 370 aa, unidentified
MLDTTTFVGLDVHARSIKAVSLDVMTGEVRAATFGYDAGAVAEWVRSVDPRARCVYESGVTGFDLQKRLSGLGVDCVVGAVSKMIKPSADRRRKNDRNDAEFLARMLSVGNVVEVWVPDDECEAARDLTRALEDARDDLSRSKQRLSKFLLRHGFVFDERTPTGRRKGNWTRAHWSWIESIRFAEGADEEVLAYYVDAVRRAAEEKARLERLVEGEARKPRWRRRVDSLRCLKGVDTASAADLVFEAGEFSRFRNARSFAAWVGLTPSEHSSGESDRRGAITKAGNKHLRKTLVEAAWHYLTCSGRPKDLAKGQAPDRGARRHAAKGVRRLVERREALLARGVHGNKANVATARELACWVWAVGLMAEEA

SEQ ID NO: 116741 - protein, 340 aa, unidentified
MLIIGCDYHPGFQQIACMDSESGEWKERRLGHREEAEQFYRDLKVRGVKVCVGMEASGHAHWFEHLLAELQFELHIGDAAEIRSKRVRKQKTDRQDAQRLLTLRVEDRFPRIWVPNGENRDLRQLLWHRHRMVQMRTRIMNQLHVVALNEGVRLKKALWRPAGRAQLESLLLAPWASRRRQDLLELLDQLTPKIQELTRALEQEVEKRPVTRQLMTHPGVGPLTALAFELVIGTPERFGSGKQIASYVGLVPCEESSGDRRRLGHISKQGNSLLRFLLVEAAQITVRCDPDWRRQFLHLAMRRERRIAKVAMMWRKGWDYEQLKKLGAHVGEPGNRPGVQ

SEQ ID NO: 116742 - protein, 391 aa, unidentified
MFYVGIDIAKNNHEASIIDSNGKLVSGSFSFSNSVKGLEKFKRIISSFLLSSNNCIIGMEATGHYWVSLYSFLVDLGFTCVVINPIQSDAFRKMYIRQTKNDSVDSFIIAQILRFGEFSVSHFSDEDTFALRNLSRYRFALVDEVTDWKRKLVAILDQVFPEYSSLFSNIYGVTSKELLSKYPLPEDMLSISANELAELLSRCSKGRFGIDKAKEIQDKASNSFGIKFALKSFSFQIKQIINQISFLEDQILDIEEEISSMLNSLCPVITTITGIGDILGAAIFSEIGDISRFEKASQLVAYAGLDVAVKQSGNFNATDTKISKRGSPYLRRAIWLAANVAAFKDPALSLYYQKLRQRGKAHGTAIGAVARKLTNIIFAVLRDNKAYVPNI

SEQ ID NO: 116743 - protein, 334 aa, unidentified
MTGNTLMSFLIDTFKKDTGIDVSKDTIDVKSIQTGHKVYDNTLKGFRKLLKESFPKTHFVMEATGVYHEKLAHFLYNKGYSVSVVNPLVIKRFSQMLLRSTKTDKADSEMIFKYATKNHPDHWKPSAEYIEACKDLNGILILLLKQRTALLNKQHSLQYKGCKEAVALRCVKHCIKNLNQQIKRLEDQMEHYIEVHESGLYKRLKSIPGIGTKTAVFLIIITDGFRHFETSKQVSSYLGLSPSIMTSGSSIKGQSRITKSGNSHIRNLLFLSSFTACKYNPACKSLFDRITQKGKSKKLALIAVANKLLKQAFAIAKSEESFNPEHVCLHPTMR

SEQ ID NO: 116744 - protein, 334 aa, unidentified
MEIYAGLDVHSEFTYGTIMDEKGNHMWEAKVPTTEEGFRSLFLKFQGKHKIKAVFEASRNWNYIASLLRQQSVDFVMAHHLRVRAIASARIKTDKIDSKILAHLLRTDLIPQSYMPNEEIVQLRGLVRYRVRTGRLAAQIKNSIRAILAREGKKCGWTDPTGTRAEIWLKHLQLTPQNRRELNHSLSLLANLKQEISELDKQIKAEALKRPDVALICSIPGFAEYSSLLILSEIGDLGRFETPEQLAAFSGLISSTYQSSSTFSQGRITKQGSKWLRWILVECATIAVRKENRLQRFYLRLKRKKGHQKAIVATARKALMIIWTLLQKQQVFQP

SEQ ID NO: 116745 - protein, 347 aa, unidentified
MTTIGLDLHKRESQLCIAHDDGAIQERRIVTSRDRFTAVLGDLDPARILLEASTESEWVARHLESLGHEVIVADPNFAPMYAARYRRVKTDRRDAYTLMEACRLGAYRTAHRSSDARRHVRAQLAVREALVRTRTRYTAIIKSLVRRDGLRVRGSAAHLLQEKITTLDPSPQLLEELQPLFEMLVPLNCQIEAAGDRISALERTDPAVALLMTVPGIGAITASAVVAVADDITRFDSAHQFEAFLGLVPGELSSGDKRHIGHITKAGNARVRYLLVEAAWRIIRSKQDDTAALRAWAVGIANRRGKRIAVVALARRLAGILYAMWRDDRPFDATCIRMPRPRAVALT

SEQ ID NO: 116746 - protein, 318 aa, unidentified
MASYIGVDVGKKTLHIYMPITDKSFEINNDMLGFNKLITCLIKTYPALSDLILVFEPTGGYEVGLREFLKSKDIAFTTVHPNKLRSYARAKGQFAKTDKMDSKLIADYAAAFSLPIKRNHSTASQQNLNALVQRREQLMIFKNQESNRLETVCNQLIIDLLKKHITYLDEQLDLIETAIKELYSKDQELQDKLKALTSIPGVGIVLATKAIIEVPELGQIEPNKLTSLAGLAPYARDSGNYKGKRSIFAGKSGLRKVLYMAAVASLRCNIKLKSFYDRLIANHKPPKVALVAVMRKLLSFMNAILKNNAFWNVNYDLS

SEQ ID NO: 116747 - protein, 405 aa, unidentified
MQVYIGIDWSEKKHDAVFVNEAAAVLAIVTFEHTPQGLAQLESVRRDLDVDPQAIMVGLETAHNLLIDYLWARNYTQVYVVPPSVVKGSRQRYRQSGARTDQSDAELLANLLRTDRHRLQPWGPDSLLTRQLRSKISLHIHLTRSCVRLSNRLRAVLLRYYPAALEVFYSLASPITLEFIQAFPTPQDAATLSFEAFQHFARHHKHARPQQLPARYARLQAAQIAASPDTVLVCQGEAITLAALLLTTMQAKKANTHALSALFAQHPDQAIFASLPGTGDFLQPGLLVKFGDDRRRFPTPGSLQALAGTCPVTDQSGKRKVIRFRRACDRDFRNIAQQWARSSLKKSVWANTYYQQVRPGCRSDNHAYRCLANRWLAIAWKLWQTKQPYDEAYHMQQRLKRAKPK

SEQ ID NO: 116748 - protein, 403 aa, unidentified
MIYVGIDWAEAHHDVCIEDGEGHVLAKGQVPDGIEGVERIHEMLGAHADEASDVAIGIELDRGLLVGALVAAGYEVHAVNPLAVSRYRDRLGPAGAKSDPGDARVLAEVMRTDRHLHREVAGDSDLAEAVKVLARAHQNLIWTRQRIGNQLRSVLREFYPGALRTFAELGSVDAIAVLGLAPTPSAGRALTETKVRKALAAGGRKLRLDQRAGEIVESLRAPQLGAPGLVEEAFGHQVASLVAVLQTLVTQIDELRAELARSFEGHPDAEIITSLPGLSSVLGARVLAEFGDDRTRYTDARARRSYAGTAPITKASGTRRVVLARVARNKRLADACYGWAFSSLKTSPGARAFYDRQRASAKTHHQALRALGNRWVGILHGCLEHRRIYREELGWGGWLETAA

SEQ ID NO: 116749 - protein, 402 aa, unidentified
MSKKNTRNALDTSLSYAVIGLDLAKADCAVAAVPCADDELGLIDRMDYESLFEQAEKLGPTLFAMEPCCGYSQISLRLQNMGHEVKVISGHAVKNWIATHKSNQKTDLNDATALAKLALYDHDLQPIRVKNVEECRIASVQAIRIQLRTQATKSLVCFKSLCQCWGIVIRRGSLNTKKMAEAVAAVEKLLGVEVASSLMILRDAYKFTMKQINALDKLLDALVEANEQARTMKTVLGIGTQTAARLAVTTGDIKRFPMPRSYVAYFGLAPRNIITGHSGTPSPSKRGALKPVSSRGQGKVSRRGDRVARSFIIQGAGLRCYMLYCKDMLPECQLRRWLHEQIKRGKPYGKIIVSLAAKLLRIVWALLTYGEKFDSHKAGVPRSVLAAMEKPLKHDAAAESAA

SEQ ID NO: 116750 - protein, 323 aa, unidentified
MDPVMTMYLGLDVSKAKVDCALLLNGKVKSKVVSNDQEGFETLKQWLSKQGASHVHACCEATGTYSDAIALFLHDQGHVVSVVNPAQIAAYAQSQLARAKTDALDSRLIARYCEREQPMAWTPPPAAERLLLVLLRDLQDLQSMQQAESNRLGTAHPDVRERIVRHLEFLEREIEQLRKKIEKHIDHNDQLRGRRDLLDSVPGLGEHTIPWLIAYLGDGKRFTGSKSAVAFFGLCPKPHQSGSSVRGRARIAKTGHADLRHALYMPAMVAYSRCKAFASFVSRLKAAGKPPKVIIVALMRKLVAIAQAILKSGKPFDPTMHFA

SEQ ID NO: 116751 - protein, 457 aa, unidentified
MSQAKRPRSRRDLSSIHPAAAAIDIGATMHVAAVGPDRDPQPVRTFQTFTDDLHRLADWFVRCGIKTVVMESTGVYWIAIFEILEQRGFEVMVVNARDAKHVPGRKTDVSDAEWLQRLHEYGLLRASFRPQAEIAGLRAYLRQRERLLDYAAEHIQHMQKALTQMNLQLHHVMSDITGVTGMTIIRAIVAGERDPAVLATHRDRRCHASVETVCQALVGNYREEHVFALTQALELYDVYQAKVAACDAQVETILKRLKKNATPPASKLLPVRHETRSANAPAFDIRAALHGILGVDLTQINGLGPYLALKLVGECGTNLTAWPTAKHFTSWLGLAPHNKISGGKVLSSKTRRTSNRAASLLGLAAVSVGRTDTALGAFYRRLSARVGKAKAITATARKIAVLFYNTLRHGLSYADPGATYYEERYRQRVLGNLQRRAKSLGYVLHQADRDPTQVVVS

SEQ ID NO: 116752 - protein, 331 aa, unidentified
MEEVKRFVGIDVAKLALDVFIGSAGGAFSVANDEVGIRELLRQMKPADFVIVEATGGLETPVASALAAAGIAVAIVNPRQVRDFARATGKLAKTDRLDAEVLARFGEAIRPEARPLADEQAQALEALVTRRRQLVEMLTAEKNRRARAPKVLHRSIDEHIRWLEKRLSEFDDELGELIRHTPLWRERDELLRSVPGVGKVLSSTLLAQLPELGMLNRKQIAALAGLAPFNRDSGNMRGSRCIWGGRAQVRRVLYMATVAGVRSNPTIRTFYLRLRTNGKHAKPALTACMRKFLVILNAMLHNKTHWQTPAPTFLTSSLSPLLGAVSEHGCC

SEQ ID NO: 116753 - protein, 333 aa, unidentified
MNQKYCIGLDVHKEQTTYAVKNNKGVTVMEGKCATQYKDISNNLSKYIDKSSVVMEACTSYYHLYENMKKNNIDVHVANVIQLRKCIGKNDKIDAERLADMYRLNALPESYIPRKEIQTLRIMINIYHNIVRENVRFQNQIGAVLDMKGEFSPVNDFSSKSGMIFLSRYLMKNNDFSIRYLYDEIASLNKKQEQIEIEIAGYIENNFAKEYELLTSIPGVGKILAAYLIAEICPIDRFENKKKLRRYAGVIPIKEQSDKKIYATYLPKSSSRKLLRYALVLAANCASRFNNRLREYYLKKKKGSNHGHAIMCVASSLSDIVYHVLKTKQPYKK

SEQ ID NO: 116754 - protein, 360 aa, unidentified
MKRVSTKSVSVVSGKKVFIGIDVHKDSWHVTARTDGEEVFNGRIPASYHSFMKLLERFRDCQIRVAYEAGPCGFSLYDELIEDGIATIVAPPSLIPIESGNRVKTDKRDSRKLARLLEGDMLKKVFVLTGEERMHRELVRTRRQLVGHRGSVARQIKSKLLFYNISSPFPSRYGWGRPYLQWLRGIVCQSQYLKESFEILIDLYEYLTKEIKRITKSVIDLSRIGKYAERMRLIRSIPGIGILTGMEILVEVQDFARFKTSEEIASYIGLTPSEYSTGPYIRQGRITRCGNTRVRVALVESSWILVGRDPCMRAKFLKLKSSKGAKRAIVAIARKLIIRIRAMLLHNAPYRVGGSILQAA

SEQ ID NO: 116755 - protein, 345 aa, unidentified
MDSMYYIGLDVHKKTISYCVKDASGQIHQEGKIGATRRELDSWIKTLPQPWTVAMEATIFTGWIYDHLLPHAQQVKVAHPLMLRAIAAAKKKNDRIDAGKIADCLRCDFLPECHMASTAIRDRRRTLRYRHLLVRQMVQMKNRISGLLMETGVEYNKQRLHKVGYFRELLSDNEEVNASIRPLLQLSRQTIVRLQKTEYALVSSLQRDPMLVDRVQRLRTVPGVGPITALTWALEIGDASRFRSIRQAISYCGLCSAEKSSADKVMRTPLSKQRNKHIQRVLVEAAKMAPRQDHQLALVYETEKQKGNANRATLAVARKMVAYLLAVDREERDFVPAEEHRSAAA

SEQ ID NO: 116756 - protein, 368 aa, unidentified
MGHKSSKLYVGMDVHKESIDIAVADEGGEVRHHGQIGGEMNALWRAVRKLESSGRELVFVYEAGPCGFGIYRGLSARGHTCWVVAPSNTPRRVRDRIKTDRRDSLKLAGLARAGELTPIYVPDVRDEAMRDLVRTREDAVVMQRQARQRLAALLLRNDVRYAGKTAWTAAHRRWIADLKLPQSAQRLAFEEYVQAVEEASARVQRLSQCIEQELATWRWRSVVAALQACRGIQLIHGVRIVAELGDLSRFSHPRQLMGYLGLIPSEDSSGEHRRQGAITKAGNSSARRALVEAAWAYQYTAKVSALIARRQTDVPKAALDIAWKAQVRLCARFRRLAARGVHRNKIVVAIARELAGFVWAIAQHVKPV

SEQ ID NO: 116757 - protein, 311 aa, unidentified
MNAEFDSYWGIDVSKAWLDIAIDNKTYHIEQTPSAIRNFIQQHKIETNKTLVVLESTGGYEKLVVENLRAVGFHVHVAHPNKVHAFAKAKGRLAKTDKIDAQLLSAYGRFIDKNAIREPLSAKQQELQMLGARLEQLKAMHHQESCRKGMTSKAVKKSHELMLKVLKKEVATMEYHIEKLIQADEELAANYTLLRSMKGVGPTLAMVLLTDLPELGKVNKKEIAALVGVAPITQQSGQKTGKAMTRYGRQGVRKVLYMATLVACKHNVKLKEFYDRLVKAGKPKKVAIVAAMRKMLVILNAMVQSKTCFNA

SEQ ID NO: 116758 - protein, 421 aa, unidentified
MKVTYQICCGVDVHKSFLVATIVKTTGGIEPSYQKKRFSTFNNSILEFKQWLLDNHCHDVCMESTGKYWVPVFNLLEDKINVVIANPKWVKAVKGNKDDTKDSKWIGDLFRLGLVKGSYIPCKKVRILREYTRYRYKLVSCRSSEKNRYQNALTVCNVALDSIVSDIFGKSSTSIIDYLLEQSGTSINHEEIASKLLRSLKSKEDAVIESVEGYQMTDAQKYRMRLVRAHMDYITAEINDVDKMIENMISSNPDFENAVQFLCTIPGVKRDSAITIISETGTDMSQFSSSKRLCCWAGLTPGSNESAGKKKSVRITRAGIYLKPALVQCAHAAVKSDKSPYYKKKYESLVKRRGKKRAIIAIARMILTAIYQMLSTGEQWNPSDLYKIDIPVALVEKKRQKLSSRLRSCCNGKDYFLLMNH

SEQ ID NO: 116759 - protein, 403 aa, unidentified
MYAVGIDVSKGRSTVAVLEPLGKTVAKPFEVRHTKSGMNDLVNYLNTLDGECRIVLEHTGRYYEPMVRWLSGAGLFVSAVNPKLIKDFDNNSLRRVKTDKADAKKISRFALDKWYMLRQYTAMDNIRTQLKTMNRQMSFYQKQQTAYKNNLIALMDETYPGANKFFTSPKRPDGSEKWVDFIEKFWHVDCVCNISLKSFTEKYQKWCKKHGYNFQPDKPAEIYNASQELIPILAKDDMTKLFVQQAVTQLNAISKAVEELRQQMDSLASQLPEYPVVMSMFGVGTTLGPQLIAEIGDVHKFTKRSQLTAFAGVDPGVNESGDYAQKSVHTTKHGAPYLRKTLFLIMNVLIQNQPEDDPVYRFMAKKRDEGKPYYVYMTAGANKFLRIYFGKVKEYLSNLHLEE

SEQ ID NO: 116760 - protein, 358 aa, unidentified
MQSVTRVGIDLAKMFIQVHAVDAVGKLVCNKQLSRDKFIAWCNQLPAGCLVAMEACSGSHAWARKLIALGLDAKIIAANHVTPYRLEGKGGKNDANDAAAICEAASRPSMRFVPVKTLSQQGMLCVHRYREGVKEERTANINRIRGLLAEFGIIAPQSPNKLRERLAEIIEDADNDLCGIARMVIQEAFSHWDEIDKQLEWCAQRISAHVKENQQAQTAVELMGVGPVTASAAVVTVGDFKQFKNGAQFGAWLGLTPRQNSSGGKTKLGRITKRGDVYLRMLLIQAAKAAVMTAHKRDDPISRWLLQLREKSGWQKAAVAMANKNARILWAVMTKGCDFDPRYVSVKPSGGGSIAAAI

SEQ ID NO: 116761 - protein, 380 aa, unidentified
MDVHSKNYTLCAMEPTIGAKDRIFGEVQVAPDYKEVICFIESLKMKLGPDNNYSIECGYEAGCLGYTLYHQLTGAGVKCVILAPTTMLTQQGKRIKTDKRDARLIAQCLCYGGYHPVYIPTGEDDAVKEYLRMRDDHKLALKKLKQQINAFVLRHGHQYSGTKWTIRHVTWLKKLELAPMYRETLDEYLASCEEQDAKIERYDKRIEEIASEARYQENAKKLGCFLGIRTHTALSLIVETGDFKRFAKGNTYAAFLGLAPGERSSSENVNRPGISKAGNTHLRCLLIEAAKGICKGAIGHKSKELRARQSGQPAEIIAYADKANTRLRSRYYKLIRHGKKKNVAVAAVARELACFIWGMMTGNISIRPTAGTSGPAASQG

SEQ ID NO: 116762 - protein, 339 aa, unidentified
MSNMNTENEIVCGADIHRDFLVATMISRKGLKLQERFSMNQDGLLEFKSWILNHKCQRVAVESTGSYWYPIFYTLEGYVEFILANAFQIRNIEGKKTDKLDSERIAVYCLNDLIKPSRIYPKDYRDLRSITRSREALVNARSKLKNQIHQLLATCCIKLSSVISDSFGKSGRYILDRLLEGKSIDQIISGIPSKRVRNKEDELRNAIRNGLDPVQLLLIKTNLDAIDDLSEKIKILDDEISIKVKPFEEDLNILLSVPGIGLTSAATILAEMGDYRDFASADKMAMYFGIVPSVYQSAGKLRTGKITKRGSKHMRRILVEVAKAISKTKKIWLLAILCG

SEQ ID NO: 116763 - protein, 460 aa, unidentified
MSLLSRLGTDLPERHYLGIDIGYKEHVAVVIDLERFVRKGGRWKRARCVHFPSTRSGLRKLQTYLDGFSTDHGTFFGLCEPTGGHYGATTFQYLLDQGYNMNLVENATVRHMRERMFPGLPKTDEMDTRVMARIGYLHEAVGEEFTLRPLKLADPEDSHLLSLCRDNWKLNTTLTRARNQFTQLMAVTFPELKTFFTSSVSTIAPVRLIEAYPTPALLAAAPREHVHGVLWKTGAYKHARRVEELQALARASAGLLPDPGRAWRIEWLTRFLVTNFLHQGALSKRLEKIVQQRDGYALIVKVPYSGPVTLGTILAVTGDVHRFSNYRKYVAYTGYFAGLEKSQTIDRTKMSRRGNRDLKRAFFQIAAPLVWLDKGENPYKQLFQRKMAAGREWYKAMPFVCAALARHIYHCLKFNEPYDVGKAFQGLVPAPASEEDWLDLREDLDHRFEEMEISLCQIEA

SEQ ID NO: 116764 - protein, 360 aa, unidentified
MFTERTSAGLDVHARSVAAAAIDGVTGELFQTKLTPSHDHIRSWLQDLPAPVAVTYEAGPTGFGLYRALQDAGIRCVVAAPSKLQRPAGDRVKTDAKDAIHLARLLRLDEVTPVAIPTVDQEAARDLVRAREDARGDLMRARHRLSKLLLRHGIVYSGGRAWTGIHDAWLRRQRFSSPAVQLAYESDYEAVLTVTTRRDRLDAAIEAMAADSEFTPMVHRLRCLRGISTLTGFALAVEIGDWHRFTGNTIGSFVGLVPSEHSSGTSRSQGSITKVGNTHVRRLLVEAAWHHRPRYRVGKTMLDRWELAPPAARVRGDLGNRRLHARWVSYLERRKRPTIANVAIARELAGWCWSLAVMDD

SEQ ID NO: 116765 - protein, 352 aa, unidentified
MAMTIVENHLLTVTGGIDTHLEFHVAAAIDLNGGVLGVETFDTTTGGYRRLVAWLAGFGTISLVGVEGTGSYGAGLARHLTDRGIRVVEVDRPNRQARHRAGKTDAIDAIAAARAALTGTATGTPKSRTGNVEAIRVLTIARRSAANEWIAVVNQIRHVTFTAPDEIRARFIGLSPITLVRTTAALKPRRTDPDVVRFTTLSTMRELGRRALFLREQKMRLNTEMRPLIREVAPSLLEVHGVGFDVAAKLLIAAGDNPHRIRSEAAWAHLCGVAPIPASSGKIQRHRLNRGGNRQANSALYRIVLVRMASDERTKAYVAKRTADGKTMGEVTRILKRYVAREIYPHLPSTMT

SEQ ID NO: 116766 - protein, 323 aa, unidentified
MQGKVSFQEDAMPVVYAGVDVSKEWLDVHLHPLGESRRFSNDKTGIDQLKRLLARHRPKSIVMEATGKFHRPAHHSLWLDGFAVAVVDPLRARMFARACGYLAKTDRLDARFLALLAESLRPPADTPPSPHIEALQELVNARSAAKCDITALQNRSKAATTAFLRGELNRLVRRLEQHVERLDKEIERCVGEDPQLCRKAEILTSIPGIGRVTALALMAGMDELGTCSGKQAAMLAGLAPIANDSGARTGRRSIRAGRPAPRRALYMAALSACRYNPALARFADTLKATGKPAKVILVAIMRKLLVLANCLLSQNRLWTPNPP

SEQ ID NO: 116767 - protein, 339 aa, unidentified
MRLYAAIDLHSNNSVLVVLDQKDKVVYEHRHPNDLPTILAQLKPHKKSIQAIAVESTYNWYWLVDGLMEAGYDVKLVNTVAIKTYDGLKYTSDEHDARHLAHLLRLGILPTAYIYPKEERAVRDLLRKRSQLVRDRTTHLLSIQNLVIRNSGKAITQAGIRKLDEKAIALFCGGNAFRVMAIKSSLEILRCLDGQIAMLERKVLEQAKLKPEFKQVTTIDGVGEIIGMTIMYEAGDMGRFEEVGQFASYARCVQSSRWSNGKKKGEGNRKNGNRYLAWAFIEAAHHAVQFNERVRKFYQRKKARTNGVVAWKAVAHKLARACYHVAKDHVAFDETRAFA

SEQ ID NO: 116768 - protein, 336 aa, unidentified
MSDVTTIGIDLAKHVFSLHGVDRTGRDVLQRTVRREQLLSVVAQLPRCLIGLEACSGAHEWARQFGALGHSVRLMAPKFVIPYRKSGKNDGNDAAAICEAVGRPSMRFIPVKTLEQQAVLALHRVRQGYIEERTATLNRLRGLLAEFGHVLPQRPIELRRRLPTLLDQLPPLAARALRDLQSHVHQLEERILAYERELGQLSRHDARAQRLRALYGVGPLSASAIVASVGNAHEFDSGRQFAAWLGLVPRQYSTGGKIRLGRITRRGDPYLRTLLIMGARAVLQAAERRQDRLSRWALAVRERRGYHRACVAIAAKNARIIWALLARNEPLRGEPA

SEQ ID NO: 116769 - protein, 347 aa, unidentified
MVTLGGDCHKRTHTLVAVDDNGRQLGVKTVVAVLAGHLEALDWARQWTERRWALENCRHLSRRLEADLLRAGELVVQVSPKLMSGVRKSARELGKSDPIDALAVARAALRESELPVAQLEGTSREVKLLLDHRDDLVGERTRDQNRLRWLLHELEPGFEVPERSLDRRLVLKQVAKVLATHRGVAADIAIEVLERVSQLTLRINELEHRIGALVTDLAPTLLELDGCAVLSAAKLIGETAGITRFKTSARFAMHNGSAPIPVWSGNTPRHRLNRGGNRQLNVVLHRIALTQMRLGGRGRDYVEHRRACGDTKREAIRALRRRISDEVYRRMWQDSMKATSERAQAAA

SEQ ID NO: 116770 - protein, 350 aa, unidentified
MKITRLGIDLAKQVFQLHGVDERGHRVLRRQVRRAQLLEYLARLEPCLIGMEACAGAHHWARRLRELGHDVRLIAPQFVKPYVRGNKNDANDAEAICEAVGRPDMRFVRIKTVAQQDIQALHRVRSERVTSRTALVNQIRGLVGEYGIAIAQGVRQVRVALPVLIENADERLSEAFVQILSEQYDDLVALDERIARLDAQIERIAREDGAARRLMSLRGVGPITATALVASLGDARQFSRARQASAWAGLVPAQHASGGKQRLLGISKRGDAYVRTLLIHGARSVIKNCAHKDDALSCWVQALCARRNKNVAAVALANKTLRMAWALLVRGGEYDPEHARTRTEEPVGVA

SEQ ID NO: 116771 - protein, 338 aa, unidentified
MAIVYVGIDLAKNVFAVHGVDEYGKPALVRPSVPRARLHELIASLPPCVVAMEACSGGHHWSRLFAVHGHTVRLIAPKFVAPYRMSGVRGKNDAADAAAICEAVQRPSMRFVPVKSIDQQARLMVHRARQGYVEARTACINRLRGLLSELGIVLSLKAATVRREAGACLEDLPGWANTVVGDLLSELHRLDERIAQYDQHIQAIAREDERARQLMRLSGVGPTTATAILAMIGNGHEFKCGRQFAAWLGLTPGQYSSGGKTRLGRITKAGDAYLRTMLILGARAVLAAAKNKTDVLSRWAIALEQRRGYWKAVVAIAAKNARMAWAMLARGESFKLPA

SEQ ID NO: 116772 - protein, 418 aa, unidentified
MKHTKSEKIKTINEKTLIVALDIGKKIHYGYFRAPKNRDIKPFRIYNTGQSFKLFWKKLCTFKEQHGLDEVIVGFESTGPYAEPISNFLRKKPVNLVQVNPMHTKRIKELTGNSPNKTDRKDPRVIADVISLGHSLTVIVPEGAAAQLRRLSHARERAIGRRTAMNNQLQHLVFVIFPELGDIIKPATKTGMYLIKNHPDPVSIVNLGSEKLGDLVRKVGRGRYSIDRVEKLYKAAKNSVGITEGKESILLETSHLVSNIENENRYIESLEEQMTLYLDQIPYSHSILSLKGIGKITVAGLVGEVGDFRKFKTISEITKLAGLDLFEVSSGSHMGLRRISKRGRALMRKLLFFAALNAVKSHGVMHTKYHTMLDNGTSKMKALVAVARKLLRIIFALARDNTEYDEHYVGKHEYKLAA

SEQ ID NO: 116773 - protein, 390 aa, unidentified
MYIVGIDIGKNNHEATIIDNTGTIIGKSLKFTNSHSGANKLITYISKNIGSSEVIFGLEATGHYWLSLYSFLLEKGYSINVINPIQSDSFRNLYIRQTKNDTVDSFIIAEVIRFGRFTTTQLANDKLLSLRQLCRYRLSLVDSVSELKCRIITVLDQVFPEYEKLFSDTWGISSKKLLEKYQTPEDILEIDTSELADFLKEHSRGQLGYVKAEKIKDAAQNTFGIKIAQNAFKFQLKQLIDQVLFIENQIKSLDKEIEFYYNQFDCHLTSIPGIGAVTAAIILSEIGDVTRFKNASSLVAYAGIDPTVKQSGQFLSNNNKMSKRGSPYLRRALFLAASTCTLHESPLNDYYNKKRSEGKHHLTAVGAVAHKLTHIVFAIMRDNKDYEPMS

SEQ ID NO: 116774 - protein, 341 aa, unidentified
MNYVGVDLHKQSISVCVMAKDGEQRKVVQRRSLKCVETQAIRGFFEQLGPFQMVVEATSSYEWLFLLVEDLADRCVLAHPKKLRVIAESKHKSDKIDAHILAEFLLLDMIPEAYRPTPRVRQHRVLVRHRNALQRRITSVKCKLRHKLAFYNADIANLFTARGLVHLAQIAMSDADRFECNALQEQWTFFEGQLKNAEQELRSFAKTAPLAEREARAVLMTMPEVGPVTIDVVLSETGDARRFRSAKRIVAYAGLDPGLRESAGKAKQLSIAKEGSRLLRWALIETAWRLVNKSARWRRLFLQLQGSTGHKKKAIVAVARRVLCVMFAMLRDGTAYRPAAA

SEQ ID NO: 116775 - protein, 445 aa, unidentified
MSNAVAAAPSEPEWAAFAAIDWADQKNFWRLLPAGSRKSEAGQLDSTPEAVEVWAANLQQRFGGRPIAVILEQTRGPLVYMLTKYPHLVLFPVHPTTSARYRETFAPSGAKSDPSDTDSLLDLLMRHRERLRPLRPDTVETRLLHFLVEERRQTVDEKTRANLRLTDCLKLYFPQVLCWFDDVTSPLVGDLLERWPTLEQLQRVHPGTLRRFLHEHNCRSEEKNAERIAAIQQATSATQDQAVREACVLIAHSLVAMLKTLRAQIGVFDKRIAELVADHPDEALFRSLPGAGAALVPRMIVAFGTQRDRYQSAYEMQCYSGIAPVTEASGNSQWVHFRFICPKFLRQTFHEFAGCSIQQSEWARAYYDHMRNDKNKSHQVAVRSLAFKWLRIIYRCWKDSKPYDEAIYTQSLRRRGSLLAGVLGTSTGVEWKSVAGFQKLSENYA

SEQ ID NO: 116776 - protein, 402 aa, unidentified
MNCVGIDVSKGKSMIAIMRPFGEVVVSPFEVRHTVNELSELAGLLKSLDGETRVVMESTGNYHAPVAWLLHDAGLHVSVVNAMLVHDYGNNSLRRAKTDKKDAVKLANYGLDHWLTLPRYAPEEDTRLMLKTCYRQYQQYSKVQTMLKNNLISLLDTTFPNANRLFTSPPRADGSEKWVDFVAAFWHCECVCGLSEKAFTAKYQKWCRKHGYNFSEDKALDIYAFACAHFAVMPKTDTAKLLVEQAVSQLRTTSTALAALKHEMKSLAASLPEYPVVMKMFGVGPSLGPQLMAEIGDVRRFHSKKALVAFAGIDAPPYQSGQMDIHSRSISKRGSASLRRTLFLVMGVILQCAPMNEPVYQFMDKKRSEGKPYRVYMMASANKFLRIYYASVKTYLDSLEHD

SEQ ID NO: 116777 - protein, 350 aa, unidentified
MIIGVDYHPSFQTIAFLMEETGECGEQELNHSERQAEKFYRDLKQRGIRVRVGMEATGYSRWFERLLAELGFEVWMGDPAEIKAKRVKKQKTDREDARLLLRLMRENNFPQIWVPGPENRDLRQLLWHRHRLVQMRTRIMNQLQALAMNEGFRWKKKLFSEQGRALLEKLSLAPWASRRRQELLELLDRMNPTIEELTAAAEREAKKRPEVLRLMTHPGVGPLTALAYVLIIGTPTRFQRGKQIGTYVGMIPSEDSSAGKQRLGHISKQGNALLRFLLVEAAQAAARIQPDWRRRYMHLAMRRHKSIAKVAMGRRLAVRLYWMWRNGCEYSPSLEFGSYAGQLGTGHGVK

SEQ ID NO: 116778 - protein, 450 aa, unidentified
MNLYIGVDVGKEFNYASFLNEKGLEINKRFKFKNNYLGFLKLKDNIDKLTYDYNFNYNDILIGFESTGHYWINVDWFLTEKLNIKTVMVRNDAVRHTRALNSQGKGKNDSLDSRTIAECLKNGYYFDVQGRKEDYIVLRRLTRERSELEKEIARYKNRFRAWLDVNNPIFLENFSNVFSSGALALLKVYPSPLDIIKDSYLEVREKLREVGYSRTNKTLKIYYEEVQTYKNIINGISYADRLEISEYIEALEMYIKKKENLDERIEALMNFLEGKVYNSLSEIKGMPKAQVASLIAEIGNINNFKSAIHLLSYAGLNLQGEGSGKNKGHSWISKTGNRKIRKELYVITFNLVRHNDYFRGLYCYYKSYKRPNEKSSKEMLIALMCKLLRVVYGMLKYNVEFNLNEMLKNYDFRNINKEKFIDEFLGNSEKKQKIIPLEIEDIFLNNRKSN

SEQ ID NO: 116779 - protein, 412 aa, unidentified
MRNASTMSVIHYHAAGVDIGAEFHVVAVSPDADPEPVRTFQSFTGDLQRMADWLKSCGVTSIAMESTGVYWLPAFEILEAAGFDVILVNARDAKNVPGRKTDVNDAQWLQKLHSFGLLRASFRPDHDIAILRSYLRQRERLTEYRAAHIQHMQKALMQMNVQLHHAVADITGVTGLSIVRAIVNGERDLAVLIQYRDVRCKKPPEILLRALTGNWQPEHLFALEQAVSLFDFYQEKIRECDVKIEESLHQLCQSSSEPEGTLLPARHRTKQPNQLAFDVRPLLWKITGVDLTQIHGFGPYLAQKFIAECGTDMNRWPDASHFTSWLCLSPGNKISGGKVLSSKTKRSSSRIAAALRLAATTIGRSDTALGAFYRRLSSRIGKAKAVTATARKLAILFLQCAEIWAEIYRPRS

SEQ ID NO: 116780 - protein, 452 aa, unidentified
MPSKPERKGTWSTTTYILQPNAAGVDIGATEIYIAVPPDRDSRSVRSFRTFTADLKAAAEWLKQCRIDSVAMESTGVYWIPFFQILEAAGFKVFLVNARHVKNVPGRKSDVADCQWLQYLHSVGLLRASFRPEQAVCAVRSILRHRESLVQIATIHVQHMQKALDQMNLQLHHVISDITGVSGIAIIEAILNGERDPVVLSQMCDKRVKASRQTIAAALVGDYRREHLFTLRQSLHAYRQCQDLIGACDREIEQHLATFDSKVDLQATPLPKPKDRHKPRRNQMKFDLRAHMYRVYGVDLTAVPGIDALTAHVLFAEIGPDLSQFTSAAAFVSWLGLCPDNRISGGKLLSVKTRVVKSRVAKALRMAAQSLHRSQSYLGSYYRRMRTRLGTPKAITAAAHKLARVIYHLLTTGQSYEESVFARCEALHQQRLENRIRRQARDLGFDLVRPPT

SEQ ID NO: 116781 - protein, 323 aa, unidentified
MAKRNTICAGIDTSKDKLDVALDGSSEELQVKNTAEGHQELVEWLKRHKVKRVGIEASGGYEQAAVAELRRQRFVVIVFQPIQVRAYATFHLQRAKNDKMDAALIAACTAAVKKIHPAPDPRLQPFAVHLTMIDQIKEDIAKLKNRLESCPDERIQKFWKEQIALLAKHRRAEFKALVAAIRKHRDLAARLDLIYSVGGSGLPTAVAILIRMPEIGQITREQAAALTGLAPYDDDSGKHVGARRIDGGRQRLRQALYTAALPASFRWNPQLMALYSRLIAAGKGHKRALVACARKLIVIINAVAARGTPWVAEPPRTASVSVT

SEQ ID NO: 116782 - protein, 426 aa, unidentified
MKSTQNEKISQIKFSTLVVGIDVAKETHYARAFDFRGIELSKLLRFSNTAEGFQRLEEWMQNICRQHSKTDIIVGFEPTGHYWFPLGDYLKNQGHKLAMVNPFHVKRTKELDDNSPSKNDRKDPKTIAMLVKDGRYREVYIPEDVYQELREAVSERDRLVQRIISISNQVTRWLDIHFPEFNTIFKDWRRKAALQILRDFPTPEKIVAAGAERIEEAWKSAMKRTAGLKRAQELVKVAEKSIGRKTGLVAAEASLQNLLKEYDLYSQQYQQLEQLMLELLQQVPNAEKLLDIKGVGLITAATFVGEVGDIRRFQDPRQIQKLAGFNLVENSSGKHKGKSKISRRGRRRLRHGLFMAMITILATNPEFRQLHKKNISRENNPLNKMQSIIALCGKLIRVFYALLRTGTEYSAEKMMGDIELGMKAAA

SEQ ID NO: 116783 - protein, 341 aa, unidentified
MNVKTIGIDLAKNVFQIHGVDEHGKRLFNKQLRRAQMATFFANIPPCLIGMEACASAHFWANKLISMGHNVKLMAPQFVKPYVKTNKHDAADAEAICEAVTRPNMRFVPVKTAEQQAVLALHRSRQSFIKQRTAQANQIRGLLAEFGIVVPRGIQQLQRRLPELVEDADNPLPVLFRTQLSLLQHHMAYLFDVIATLDKQIEQCYRQNALCQRIGKIPGIGPVTASALIATIGKANNFENGRQLAAWLGLVPRQHSSGGKQVLLGISKRGDTYLRTLLIHGARAVLQSAKHKQDAVSSWANQLMARRNNNIASVALANKNARTVWALLAKEREYCAPIISA

SEQ ID NO: 116784 - protein, 342 aa, unidentified
MQTITRIGMDTAKNVFQLHGVDENEAVVLRRQLRRREMIAFFEKLPPALVAIEACGSSHHWARMLQSFGHEVRLLPPQYVKPYVKRGKNDAADAEALCEAVTRPSMRFVPVKSRDQQAACMLMTVRERLVGVRSQLSNAIRSYAAEFGIVGAVGRQNVRALIERILDDTTLPDLARDLFRCQAQEYAAVEDRLEEIEAKLMAWHRADDLSRRIATIPGIGPIGSTMLSMKAPPAESFRSGRQFAAWLGLTPKDHSTGGKVRLGGITKAGDPAIRSTLIVGATALLRHIRKGRTKPSPWLEALLNRKPPKLVAVALANKFARIAWRLMVSGGIYNRPPAMVAV

SEQ ID NO: 116785 - protein, 342 aa, unidentified
MEIAVLGIDLGKTTCSVAGLDRDGAVVLRKRVQRHRLQAFLSRLPPCIVAMEACGGAHHLGHFCVEQGHDPRLMSPLHVRPYVKVHKTDDRDAEAIAEAATRPTMSFVTLKRPEQLDLQAQHRAWERLVQNRTRLVNQARGFLMERGIRIGTGRHVFQRELRRLLEDDVSSLMPGMIRILSGMAAELAEVNDRVAGLDAEIRTHARQDQDMRRLMEIPGVGPTIATALVAAIGDGSSFHRARDLSAWLGLVPRQITTGGKARLIGISKHGNSYLRKLFIHGARTVLHLVRDRSTPLARWVDALKARAHANVAGVAMANKLARISWAVLTRGERYRPSALVAT

SEQ ID NO: 116786 - protein, 606 aa, unidentified
MWCGSEAPDLAARRAMSMNKETHGAGPQVEKERVSEANAQSAAPAGAPMPLGGNCSSPNGMAGPRGGPARFGAFGAERVRSTRYNDWVVGGGKLKTDLPLMLIDKLDPKRGSESRVQDIGEARLPFCRLSRLEECSVSTRLGPSTGDSFKSQTRRTPMPNEKTVPENPSSPFNPHAAGIDVGATEMYVAVPPGCTDKPVRCFGTFTEDLIALSEWLKSCGVTSVAMESTGVYWIPLFQILEDRGFEVCLVNARHVKNVPGRKTDVADCQWLQYLHSVGLLRGSFRPPQQVCAVRSVIRHRDALVKMASVHVQHMQKALNQMNLQLHHVIANIVGVTGLAIIDAILAGERDTTKLASFRDCRIKASETTIAKSLVGDYRVEHLFTLRQSLQTYRHYQGLIADCDQQVKALLSEFDSRIDPDQQPLSENLKRRLKKDPTATELRVEFHRLTGVDLTAIPGIQVNTVNTLMAEIGRDVSKFHSSKGFASWLGLCPDNRISGGRVLSVQTRAVKNRAATALRLAALSLYRSQTALGDFFRRMRAKLGTPKAITATAHKLARIIYYLLKTRSPYDQTRFARHEEQYRRRREINLKNQAKALGFSLVPVGVS

SEQ ID NO: 116787 - protein, 342 aa, unidentified
MTLYIGVDIHARQQTLSYLETEDGTTGQVVLDHEVDDVAGFYRQFQGEVIIGIEACGYTNWFEELVERLGHQLLVGDAAEIRRLARRRQKNDRRDADLLLDLLVHDEFPALYRYCQASREVLRQLRYRHKLVKLRTMVANTLHALALNAGLSLRAKLLTKGGRQQLSALPLSAISQQQRNELLSLADELTRRIQLVEQWLAVQAARDGRVQRLQTHPGVGLLTSLCVVHTLGEVQRFSSTRKVAAYVGFDPMEDSSAERKAYGGISKAGSRLLRYLLIEAGQTAAKDDEQLKQFYRRLLPRRGKARAKVAVGRKLLLRCFIMWRAEIDYAEFLRRGQKEETE

SEQ ID NO: 116788 - protein, 400 aa, unidentified
MKRLSGGIDVGSVAHHVTILDEEDHVLYNRKISHTLDEFTESIKQFKKIEKKEKGEISFALEGKNGYSRPFDRILLDQGFALYNIDNLKLKRFREAFAGEWKDDERDALMLSKMLKLKEHINGKKEKVFIKIEKPSLITESLKLLSRHQQTLIDEKVRLTNRLSKKLLEVCPEILRLGKAKSKKLIAILTKYPDFSKYKSMTLKSLLKIKGIGEIQAPFLLKRLNHITYVGLTDIYKTIISSYAKRILELQEEIKAIDQKLDEIGGKNQSVKHLKTIPGVATKLASRFIGEIGDINRFPSEKQLAVYCGIACVNNNSGKVTKAKAVYKANKICKQTLITMAGCSIRIIPQCKCYYLKKRAEGKGHNHSLRCLARQLIKIIYKMLTENRDYIIKKELKKVA

SEQ ID NO: 116789 - protein, 454 aa, unidentified
MSQRKQRSRRKKVGKLPKELAQVNLNAAGIDVGSDRHFVAVPEGRDEVSVREFGAFTTDLEALADWLKRCGVTTVAMESTGVYWIPLFELLERKGFEVKLVDARRVKNVPGRKSDVLDCQWLQRLHTYGLLAGAFRPPDEVCVLRGYMRQREMLTQASSMHIQHMQKALQQMNLLLHNAVTDITGVTGMKILKAIIAGERNAKVLARHRDPRCHNSAATIAKSLAGNYREEHLFALKQAIELYEIYQAKIVECNAAIASHLSNQPNRTDDEPPPTEKAIKAKDCMRGEVDIRAQLFKLTGVDLFAVSGFGADTLLTLASEVGFDMSAWKTEKHFSSWLSLSPGTHKSGGKTLNSKTKRSANRAAAAFRIAASSLKRSKSALGAFFRRIKARVGAPKAITATARKLAVIYYSMLKNGTGYIEVGQAAYEKKYQQRRFNGIQKQALAMGYQLVPIS

SEQ ID NO: 116790 - protein, 324 aa, unidentified
MVTPALGIDVSKDRLDVEIAACGKPRSKCFANSPDGWRQLMAWLNEQKIKRVHACMEATGRYSLGIALALWEAGHIVSIVNPAQIRDFARTKLGRNKTDALDAGHIREYAEIFKPQPWTPPSPAMRRLGELQAIRAGIVSSLTEWKNRCGSGLADDTALALVKATITHFAAQLAEVDKAIAGTIDHDRDLSAKRDLLLSISGVGEVLAGLVLSELPGTDILRSSAQAVAYVGLNPRSHRSGSSIDRPTRISKIGNATLRNALYMPALSAMQHNPVVAALAKRLKAQGRLKGKQIAVAAMRKLLVLCFGVLKSGKLFDPALAMPN

SEQ ID NO: 116791 - protein, 406 aa, unidentified
MDLVYSHVCGLDVHKKNVVACIITPEGKEIRTFSTMTDDLIALKEFIKAKGCSVVAMESTGSYWKPIYNLLELENIKILLVNAKHIKNVPGRKTDVKDAEWIASLLQHGLLQGSFVPDREQRELRELVRYRKSLIEEKSRELNRIQKVLEGANIKLSSVVSDINGASSRSILEAIINGEENPETLAELSQGKLKNKMDELKHALKGLINHHQRMLLEIQLRHIDYLDEEITKLDEEIKNRMLPFEKDLALLDTIPGVGRRTAEQIIAEIGTNMEQFPSAAHLCSWAGLCPGHNESAGKQKSARTRKGNQKLRSSLIEAARAASRAKDTYLSSQYHRIAARRGANRAAVAVAHSILIIVYHILKRKQPYIELGPTYYEEKKRNMIIRQSLKKLESLGLKVTVESVAS

SEQ ID NO: 116792 - protein, 489 aa, unidentified
MKSQGAKKNQKDQRTSKKASGKATPGKWDEMNRKQRREMMRQMQNGDLSLEVVHPDASGIDIGNESHYVAVPPSRDSQPVRCFGCTTAELKKMAEWLTQCGIRTVAMQSTGVYWIAVYDILEAAGMEVYLVNARETKNLPGRKTDVQESQWLMKLHTYGLLRNSFRPSQEIRILRTYWRQRHDLVRSAGRHIQRMQKALTQMNIQLANVISDITGVTGQAILKAILDGQRDSRELAAYRDCRVEASEEEIAQALEGNWQEDQLFVLRQEQEGYEFCQKQITECDQQLAKYLARLEDRTQGATLPEETRKGRRKKKKGNPQFNLREELFRMTGTDLTQIDGIDVMAAMTVVSEVGLDMSKWKTENHFVSWLKLSPDNKISGGKVIGKGRMPTNNRATTVLRMAATNLRESDSYLGAQFRRFRTRLGPPVATKAMAAKLARLLYRMLRYGMKYVDKGAELYEAQHRKQQVIHLKRKAAQLGFQIIEVADAA

SEQ ID NO: 116793 - protein, 346 aa, unidentified
MMIIGCDYHPSWQQICWVDTVTGETQEKKLEHASGEAERFYRQLASPALIGMESTGNCQWFVEMATTLGHNVWIGDAAKIRASEVRQQKHDRRDAALILKLLREGRFPRIWTPSGPEKDLRQLLIHRYKLVRIRAQVKNELQHLAMNQGVTKKQRLWSKAGEKTLRELPLKPWAGRRREDLYKVREMLNGQIDLLDRAVVEVAEKNEKARLLMTQPGVGPITSMAFVLTMGDVNRFQRGKQVASYLGLIPREYSSGGHQRFGSISKQGNRFMRMLLVEAAQTAVRCDPGFRDEYRHRCHRKAKGVAKVAAARKLAVRLYWMLRTNRGYPEVVRVESSPRVPVVSAS

SEQ ID NO: 116794 - protein, 444 aa, unidentified
MNLQNNATKNRLLTFHNYVAIIGIDWADQKHALATLELPAEEGTQPELSTLEHKTEALVEWITSLQKRFCYGRIAIAIEQRKGALIHFLSAFDFIDIYPIEPLSLKSFRKALYPSGAQSDPVDATLLAEFLLKHHGRLRCYRAQSVEVRQGAQYCEHRRRFVDERAQTLQSLKASLKVYFPLAIELFDDLSSPLANGFLQRWTTLEELQTARPASLRAFFYGHRSRRKQLIEQRLKLIAQATALTTDSGVIEPMSLRVKCLLEQIATLSRSIARYDKWIASLIPILDCDGIFASLPGAGNCLCPRLAVLFGQDRTRFGSAGEVQMMTGSAPVSEKSGKKKWVRVRWACSTFQRQTMVEFALASVRFSKWAGAFYDMSMPEDPNADKPTYTVLRKLAFKWLRIIYRCWQTRTRYDEARYIESLRSSGSPIWHHLQKTNSLAPASL

SEQ ID NO: 116795 - protein, 415 aa, unidentified
MEVVFERCAGLDVHLKTVQACVRLPGEGRKRDERNREFNTFTEGLRALRDWLKSEGVTHVAMEATGVYWRPVWYMLQDLEGVELLLVNARHVKNVPGRKTDVKDAQWLCQLLECGLLQGSFVPTAVMQRLRDLTRYRSKLVNDRAREVQRIHKILEDASLKLDAVIADVLGVSGRQMLEALIAGERDPAVLANMAKRRMRSKIPVLNLALEGRFGDHHAVMARLHLDHIDYLDDAIDRLEQEVDKQMIPFKEEAALLETIPGVGTRVAQVIVAEVGVDVSRFPTAAHLASWAGLCPGNHESGGKSRSGKTGKGNAALCAALCEAAWAASHTKDTYLAAQFARFARRFGRRGVNQAITALAHTMLVIAWHVLANNVPYAELGPDYFQRLDDPEAKKRRLIHQLESLGLRVTVQSAA

SEQ ID NO: 116796 - protein, 347 aa, unidentified
MDIVGGFDVHRKQITFDYMEMETGEVHRGKIQPADRENLRLWLECFTERFPGQDAAIAVEATTGWRYVVEELLRAGIEPHLAEPAETRSLQGRKKRAKTDRIDAGHLRDLLVIDRLPESWIPPQHIQEIRTLIRMRHSMIEERSAHLQRIHAQLFHNGYPQERNLLATERRKRLQSLQLPAASRKVVDLSLAMIEHINEELEPIEAELRAYARAQSGCKALMGHYGIGELTSVAMLAELGDTRRFPSSKKAVRFAGLDVTVHSSDGKRAAGKLSRQGPPVLRWAAFEAAQSASRRGSPDHSYYVQTKERLGGNRAALSVARKLLRRAHHTLRELGEEAISEPVRGRA

SEQ ID NO: 116797 - protein, 344 aa, unidentified
MDHFAGLDVSVKETSVCIVDDAGKIVREVKVVSEPDALLSVLSNPAYHFKRIGLEAGPLSQWLFSALAEAGLPVICVETRHMQAVLKAQINKTDRNDARGIAQMMRVGLYRPVHVKTLRSQKLRMLLTHRKLLQSKAIAIENDLRGTLRNFGLKVGIVGKVKFEARIKELVENLPDLAALVEPLLIVRRVLREQIIILHRRLLAIVRDDEVCRRLMTTPGVGPVVALTYRATVDVPARFRKSKAVGAVFGLTCSKYQSGEIDRNGRISRCGDEMMRVMLYEAAQSMLHSKKWSWLKAWAMQIARRRGMKKAIVALARRLAVIMHRMWVDGTEFRWTREQAAAAA

SEQ ID NO: 116798 - protein, 463 aa, unidentified
MAKKNATSRKSKSKARKNVLERINPNAAGIDIGANFHLVAIPEDRTEENIRKFGPFTSDLHRLADWLSEHHIETVVMESTGVYWIPVFQILEQRGFEVKLVNAAHVKNLPGRKSDVSDCQWLQQLHTFGLLNGSFRPKDQVCILRTFMRLRDILVKDCSSHISRMQKALTEMNVQIHRVLSDITGYTGMAIIRAILAGERDGLKLAQMKHPQVRASTEQIVKALEGDYRPEHLFALQTTIELYDAYQLKITECENKIEQQLKHFETKLDVGQVLEQSGALKARSAKVRQELQRQAYLASVCGVDLTRLPGLSTLAVEVIISETGLDMNCWKSEKHFCSWLKVCPDKRISGGKLLSSRPRKTKNRAAGMFRLAAQGAMQSRTAVGAFIRRLRARLGAPTAINAGANKLARLFYRMLKFGAAYVEQGQTYYEQRYKERLLHNLSKRAKELGFQLTPFQPATVSVS

SEQ ID NO: 116799 - protein, 367 aa, unidentified
MRRVIGIDIHRTFGEVVLWENGVLRHAGRVDMTRTGLEGFGKTLLATDEVVVEATGNYMAVARVLSPFVARVVIANPLQVKAIAHAHVKTDKVDASALASLHAAGFLPEIWTPYAETERMRRLVARRYQVVRHLTRIKNEVHSILHSHLIPKCPHADLFNGRGRDWLSRQPMPDDERAAIDRHVRELDRLGEDLQELDRTIAQGTLASPEVRRLLTITGVNVTVATGLMAAIGDIGRFKTPQKLVSYFGLNPRVRQSGLGAAHHGRISKVGRSHARAMLVEAAWAAAKAPGPLHAFFVRIRARRGHQVAAVALARKLTVLCWHLITKEQDYLWARPALVAKKTRTWNSEPGCRRRRVTAAALPTPTT

SEQ ID NO: 116800 - protein, 385 aa, unidentified
MNRIIKIGMDVHSKTFNLCAIEANIAGEDKILGSTQVTADYHEVVKFIEGLKKKLNTINPVDTFDIECGYEAGCLGFSLRNQLAAMHIKCHILAPSTILQPNGKRVKTDARDAEWIAKQLAWGSCTFVHIPTEKDAGIKEYLRMRDDHKSDLKKNKQRINALCLRNGYVYSGTKWTARHWEWLKKLELLEFVRETLDEYMATYQLQQSSIERFDARIEELAADGEYAESVKKLGCFLGIKTHTALSVIIETSDFSRFAKGSTYAAYLGLAPGESSSGEHICRTGITKAGNCHLRRLLVESAAGICKGKIGAKSKALKARQSGNTSEVIAYADRANIRLRSKYYHMIRNGKKRNVAVTAIARELACFIWGMMTGNTLPRNDLRVVA

SEQ ID NO: 116801 - protein, 482 aa, unidentified
MKATPKEPAPKATSQSTPPNWHQMNRKQRRDMERKIQRADLTLQLVHPDAAGIDIGNESHYVAVPPDRDSQPVRHFRCTTAELRTMADWLKQCGIRTVAMQSTGVYWIPVYDLLEQAGLEVYLVNARETKNLPGRKSDVQESQWLMKLHTYGLLRNSFRPSQQIRRMRTYWRQRKDLVASAGRHIQRMQKTLTQMNIQVANVLSDVSGVTGQAIIQAILAGERDPQKLAAFRDPRVKASEKEIAQSLEGNWQEDLLFVLKQEQAGYEFCQKQMAECDRQLEQYLRQLEDRSQGATLPEEMRKDRLQKRKGNKPKFDLRQQLFRMAGTDLTQIDGIDVMTAATILSEAGWDMIKWKDEDHFVSWLRLSPDNRISGGRIIGKGRLPTTNRVTVALKLAASNLRTSQSYLGAQFRRFRARLDTPVAIKAMAAKLARLVYRMLRYGTKYVDRGAQFYEVQQRTRQIKHLKQKAAKLGFQLVQAPAA

SEQ ID NO: 116802 - protein, 348 aa, unidentified
MQSTANLPVIGLDLAKSVFQLHIVDEETGEIQRRQIKRAKLTEFFAKCQRSLVAMEACGTSHHWARVIRSFGHEVKLLPAQHVKAFLLRDKTDAMDAQAIWVAAQQPHIKPVPVKTERQQACMALHGMRRQLMKMRVMQTNALRGILAEFGIVLPVGHNQLLATIQGELAKAQDDDLLPADLVLSVQEQLRRIQALQDDIDHLGQRLRAMIREDRQMQAIQQIPGVGELTASALVAAVGDFSTFKSGRQFASWVGLTPRQVGTGGKTQQLGISKRGDTYLRTLLIAGARAVIARAPTSGWIARLLKRRHYNVVVVALANKMARTVWAVLAKGSGFDRVKWNPLEPVSA

SEQ ID NO: 116803 - protein, 371 aa, unidentified
MNSILYVGMDVHKENYTLCCYGFDRDKVEYRQTVPSDYRLILKYLEQVRRKYPEEVEFICGYEAGCLGYSLYHQLTDHGVKCIILAPTTMGITNTNRVKTDRKDAANIARCLAFHTYSAVYVPDGEDNAVKEYLRMRDDQKLALKKIKQQITAFVLRLGKQYTGGKSLWTENHLKWLRGLDLTLLEKETLQEYLITYDYLTDKLERLDARIEELARNERYGERVRRLGCFIGIKPHTALSLLVEVGDFRRFEKAPNFAGFLGLVPGENSSGGGRNRLAITKAGNSHLRRLLVESSQSYSRGTIGFKSKELKKRQEGNPPEVVAYADRANERLRRRYYRMTLKKGAKRNVAIVAVARELACFIWGIMTDEIA

SEQ ID NO: 116804 - protein, 464 aa, unidentified
MVKSAFLGIDVSKGYADLILLELNKEVLEPAFRLFDAVEGHLQLGKLIDQWLAKGFENIYCGVESTGGYENNWVNYLQDVGKTKPVHIARLNPKGVKALGEAGLTRTITDSVSAQNIALYLIDYQRKVYYLQHLQTSEVYTDGRRHNCFVRMLKKQKNQLGNQLEKIIYQQLSPLMCYCRHGVPNWLLLLLEKYPTIELINKAGQDKLCKIKGISKDKAIALIKKVSSVNSATSGHMSSIIKSTVKQILHLEEAINEQKADLLNRFKNDLNVALLTSITGVGQQSAVELLIEIEDVGRFETAKKIVAYFGTHPMWKQSGDGTWGNHMSKKGRSEIRGVLYMCCMTAIRHDKMFKSLYAEARADGKNHYSAMGVVMNKMLRIVYGVLKTKTKYSIEVDNKNQQNAKIKQTKKEEKQAEIKKEKQTTLERFNYGQLKDTPVSYRYAKKKRQSPKLQKEECTGSSAS

SEQ ID NO: 116805 - protein, 355 aa, unidentified
MQYYKDIENFVKGKKVFCGIDVHLKFWVVCFFCDGEVIEQSRIEFGYHQLLNVLKRYAFSREIHLVYEAGFSGFWLYRNLNADGYHCIITPPVLVPRSGSKVKTDKRDAVKLATYLAAGILKTIYVPPPEVESDRGVIRRRSQLVKKQTSCKGQIKSFLYLRGIQSPKDIKKHWSNAYLNWLESIEFSSTSDGFTFSQLIKSYRRVREDVVEVTAYLKILTKDPRYRTSYQRLYALRGIGLITAMTYILEIYDFGRFKKSTHFSSFLGFTPSQHSSGEHVHLGRISRQGNAHLRDVLVESAWTVIRYDPHLREKYDRIRSRGTNGKKAIVAVARSLAVRLRRCLLDETDYVIGTC

SEQ ID NO: 116806 - protein, 375 aa, unidentified
MNNNNTLYVGLDVHKESITVAYAINSEPVELMGKIGTSPTDIQNLCKRLRSKSSQVSIVYEAGPCGYGLYRRLVKSGFDCMVCAPSLIPKKPGERVKTDRRDAIRLVRSLRAGDLSAVYVPGIEDEAFRDLARAWASARDDLRHARQRLKSFLLVHGVHYVGRADWGPAHRRWLSKYSFESPWRQLAFDEHRRTIEDRQAQCERLESALKEAVTEWRLYPVVEALQAMRRIQFITAVGLISELGDLTRFEHPRQLMSWFGITPSEYSSGGSRHQGSITKAGNSYARKLLVEAAWSYRHPARISPAIQKRQENLPRPVIDRAWDAQLRLCKRYRKLQAKGKNVNITIVAVARELAGFIWDMGRIAMSVAQQPQCHK

SEQ ID NO: 116807 - protein, 379 aa, unidentified
MTCKECGQVVKLTRTMNKCHSNTELSSLEETRCQFNGGTGAIKLEIDVHQDFYVVVEQAGGSNPKPPQRFPKAAFLHWAAKLKSQATEVYAVYEACGFGFSLQRKLSALSIKCYVVCPQKLDEQNRRVKTDGLDAKALCLKLDRFVQGNRDALAIVRVPSEEEEQARAIHRQREQLVKARKQLEAQGRSLMVNHGLEPVPNWWKPRTFTALPAPQWMKELLANSQPILVGLQQKIAALTVQLQSAASPEQPRGLGKMTSVVIDREIGDWNRFSNRRQIASYTGLCPGEYSSGNTRLQSCVTKHGNPRLRAALVELAWRLVRFQPNYHPLRKWRQILAKGALATGAARKKAIVAVARQLAVDLWRIKTGQLRSEELGLIN

SEQ ID NO: 116808 - protein, 377 aa, unidentified
MGRPSPGLVGEAAVLQSDVWTGSERSAPSINGGQHMQYYAGIDVSLEHSSVCVVDDQGKIVREAKVLSEPEALVQFFLELDLPLTLIGLEAGPLSQWLHAGLVKAGLAVVLLETRHVKAALSAMIVKTDRKDARGIAQLLRMGWYRSVHCKSLPAQEVRALLVGRKQLQSKLLDIELSIRGILRGFGLKMGQVSKGRFAARVEELITGHAMLEQIMSSMLAAREALRAEYNRLHRAMLAIVRKDTVCQRLMTAQGVGAVSAITYKSAVDDPTRFAKSKAVGAHFGLTQKRYQSGETDINGSISKVGDATVRTALFEAANAILTRSQRFSSLKRWGLNVAKHRGMKRAKVAVARKLAVILHRMWVDETDFRWGQEQAA

SEQ ID NO: 116809 - protein, 339 aa, unidentified
MQVTRIGIDLGKNIFQVHGIADNGDVVVNRAIRRAQLLAFFEGLPACLVGMEACSSSHYWARQLSALGHDVRLIPANYVKPYFKRGKSDTADAEAICEAVTRPTMRFVAIKTEEQQSVLFLHRARDLIVRQRTQISNMLRGLLAEFGIVIAQGIGSAVKFAKDVLDNDRLDVPEVAVDVLTDLSDQLAALHLRIRWYEMRMRLQAKQDPRVMLLRTIPGVGPVTASAIAATIGDSRQFKNGREFAAWLGLTPLNRSSGGKERLGRIWKMGVRYLRRLLVTGMTARLRQMKVNPDRVDPWAIGLLERKPTRLATVAMANKTARIIWAVLTRNEYYRPHYA

SEQ ID NO: 116810 - protein, 383 aa, unidentified
MSDHSEAFVAFDTSKLRNAVAIADGGRGDEVRFLGEFDNTPAATAKLVRKLAAKYERLTFCYEAGPTGYGLYRQIKSLGHECIVGAPSLIPKKAGDRVKTNRRDAISLAKLLRSGDLSAVWVPDRQHEAMRELTRARETAMNDLRAKRQQISAFLLRRGVHYPPDKKTWGKMHINWLMSQKFEFTEERIVFEELMEAMRQAQGRLDRLEAAIRAAMPDWSLCKLVSGLMAMRGLDIVSAATIVAEVGDLSRFRTPRELMAYVGIVPSEDSTGDKVKRGPITKTGNRRVRRMLVECAWSYQFPPRLSKDKQVKVEAVPQAVREIAWKAQSRLNQRYRALLRRGKLKNIAITAVAREFVGFIWAVAQAVGAAPAAANTKAPAVAS

SEQ ID NO: 116811 - protein, 321 aa, unidentified
MTYIGIDVSKDTFVVAYSPEKNSKTRTFKNTTRGIHEFIRSISKDEHHCVMEATGNYSALLVYLLSEAGITTSLENPLKVKNFARAMLSTVKTDEIDARLIALYGEKMNPAPYRLRSDAILTLKQKRTVIRQLKKQLIATRNLKGSMEVLPFFDAKCKKSIEKTIAFLEKQVKDLEEDLASLAKSEYKKQMDLLTSVKGIGVTLAAALIMATGGFTYFDNAKQLTRHLGLSPTYQQSGTSVNFKGHINRNGDSSLRSQLYVAAFSSLRCNTECRACYERLRSNGKPGKVAIIAVANKLIRQAFAVVTQEKPYIDGFVSSKE

SEQ ID NO: 116812 - protein, 343 aa, unidentified
MKYIGLDLHKKSIFATVMGGDGKILSKVNLGSKREDLSFYLKAQGKNDDLSVAIEASYNWLYYYRILEDITPNIVVAHPLKTRIIGEARVKTDKIDSEALAYMLKADMLPKVYIPTKPAMENKMLLRSRISLVRIRTAIKNKIHAIVDKNRDSYPGLENLSDIFGKTGIFILSNTKIASPDYMILTNYLDLVADINKKIAIVEEEIDKRIAPDKDIELLKTIPGIGSFTAFLLKSEIDDIARFISKEKFTSYAGLIPSVHQSGNKSYTGKITKQGNKFIRWALTEAAQSSIRYSEYFRYYYNKIRAKQDANKATIAVARRMAEIAYVLLKEKRGYIEKPIIFS

SEQ ID NO: 116813 - protein, 411 aa, unidentified
MRLFAGDDWAEDHHDVEVMDEAGKVLAKKRLPEGVAGIAQLHELIGRCMGEDDQDAEVVIGIETDRGPWVAALIAAGYVVFPVNPLQASRYRERHGVSGAKSDGGDAHMLADMVRTDSHQLRPAAGDSPEAEAVKVVARTHKTLIWERTRGVQRLRHQLREYFPAALEAFEDLDAPDVLELLAKAPDPARARRLTRAQISAALKRARRRNIADKTSAILAALRGEHLGQPPALTAAYAATVRSLIAVIATLNEQVKALEEQVGAHFGRHPDAEIYRSQPGLGPVLGARVLGEFGDDPHRYADGKARRNYAATSPITRASGKKKVVAARFVHNDRLIDALMAQAFAALGASPGARAFYDELRSRGLEHNDALRRLANRLVGILHGCLKTRTLYDEATAWGHRENLTQSSAAA

SEQ ID NO: 116814 - protein, 328 aa, unidentified
MKVAAIGLDIAKQVFQVHGADTGGKAVLRRKLRRSEVGKFFAGLEPSLVGIEASGSSHYWARVLSSCGHTVKLMAPQFVKPYVKSNKNDANDAEAICEAVTRSNMRFVPRKSLVQQDLQCLHRVRSRLVACRTQLVNQIRGLLAEYGIVLPQHVGQLRKGLPIVLEDAENDLTGFGRRLFSSLYEELTELEEKIEAADQQIQLAFQTNEDCRRIAAVEGIGPVTATAIVAAISNGQAFENGRQFAAWLGLVPRQNSSGSKTRLMGISKRGDPYLRTLLIHGARSVVYRAKNKIDKRSIWIADKQQRLGTTKACVALANNVNAHLELTP

SEQ ID NO: 116815 - protein, 454 aa, unidentified
MPNKRRKRQNELPVLHSDAAGVDIGAEEIFVAVPADRDTLPVRRFPTFTRDLLEAVAWLKQCGIRTVAMESTSVYWIPFYQLLETEGFEVFLVNAQYVKHVPGRKTDVSDCQWIQYLHSVGLLRGSFRPEGTICAVRSIWRHRESLIQMAAQHVLHMQKSLDQMNLQLHHVLSEITGLSGLRILDAILAGERNPAKLAELCHWRVKSSRDTVAKALEGDYRPEHLFALKQSLAGYRYYQQQIGEADQEIRQQLADLPTAQNAEAKLPKRTKKYPYEKRHYEPTNFDLRAELYRIFGVDLTNVPGISAVTAHTILCEVGTDFSRFRNASAFASWLGLCPEKQISGGKILYTRTRPVRNRVALALRLGANSLHHADNYFGHFFRRMKAKLGKPQAVTAIAHKLARIIFHLLTNKEEYNDSIFLDAEKQTSVRMTARLRKQAAALGFQLLPAASANV

SEQ ID NO: 116816 - protein, 318 aa, unidentified
MTEYCFIGVDIAKDKFDVALEINGKIQNYVFENNANGFNKLLDCLKTLPHQPWVVMEATGYYGDMLAVFLCDHVINTSVVNPTCILHFAKSKLTRNKLDALDARVIRKYALQADLRLFSPKTMAQIEIRDLVRTLDLLKNQSVQLKNQLSATRTKPAIQTLKSSLKLFSKQMAKIEAKLKELVASDKHFDSLSQLLKTIPGIADMTTYRLLGYLPDLTAFKDVRAFAAYIGVTPMQRQSGKWVGETRLCKLGHGKLRKALYMPALSAKRHNKALKPFVDRLTEKGLKPKAIVAAVMRKLAHMIFGVLKSGQPYDPKLI

SEQ ID NO: 116817 - protein, 343 aa, unidentified
MDHFAGLDVSVKDTSVCIVDGTGKIVREVKVASEPDALVTVLASPRYRFKRIGLEAGPLSQWLFSALAEADLPVICVETRHMRAVLKAQINKTDRNDARGIAQMMRVGLYRPVHVKTLRSQKLRMLLTHRKLLQAKAIAVENDLRGTLRNFGLKVGMIGTVKFEARIKELVESFPDLVALVEPLLVVRRVLREQINILHRRVLATVRDDKVCRRLMTVPGVGPVVALTYRATVDVPARFRKSKSVGAVFGLTPARDQSGERDRPGAISRCGDEMMRTTLYEAAQVMLLRSAKWSWLKAWAMKIAKHRGMKKAIVALARRLAVIMHRIWTDGTEFRWTREAAAA

SEQ ID NO: 116818 - protein, 455 aa, unidentified
MAKRTSAERAELKPVKVGAAAIDVGSKIHMAAVDPSCTGMPVRAFGTFTQELHDLADWFKSCGVTSVAMESTGVYWIPVYEILEQRGFEVILVNARYAKNVPGRKTDVSDAAWLRQLHSYGLLRGSFRPDAEIASLRAYLRQRERLVEYAAAHIQHMQKALMEMNLQLHHVVSDITGATGMRIIRAIVAGERNPDVLAKYRDVRCHSSIETVRAALVGNDREEHVFALTQSLELYDTYQAKMLACDRKLESLIAALTDKGAKPVGKLSRPRVKTKQVNTPSFDVRGALFGILGVDLTEIHGLGPSLALKLIGECGTDLRAWPTAKHFTSWLCLAPGNKTSGGKVLSSRTRRSSSRAAALLRLAATSIGRSDTALGAFYRRLSSRAGKAKAVTATARKIAVLFYNTLRHGMTYRDAGADHYEEQYRSRVVANLKRRAKSLGLIVLPVPSDAEMAVS

SEQ ID NO: 116819 - protein, 342 aa, unidentified
MSEQYEGRQYVGMDLHRRRSVLVRMTEAGDRLETVRIVNDPERLAAVMSRAGEAPEVVLEATYGWYWAADALAGMGAQVHLAHPLGVKAFSYRRVKNDERDAADLADLLRMGRLPEAWIAPPAARELREMVRHRAKLVHLRSGLRCQVHAVLAGQGVAVPVSDLFGVGGTSLLKAAPLSPMARRRIDSLLRLINVFDIEIDTAAKTTAARLAEHPGYAAVQTLPGIGPILGAVFVVEIGDVTRFPGPTQLASWAGLTPKHHESDTTVRRGRITKQGSRLVRWAAVEAVQRTGQNTRIGAYRDRVAERRGRNIGAVAAARELIELVYYALRDGTVRRSLSASA

SEQ ID NO: 116820 - protein, 395 aa, unidentified
MFIVGIDIAKRTHVVSVMTSEGQIVCKPFSIRNNCSGYNLLLERLRKISNIKSAFTLAMESTAHYWLPLYTRLRREGWNVVVMNPLQTHAVRELLIRETKTDAVDAQLIAEVIRFGRVRSSSVPQEELLALRELCRNRFYLMDLASDLKRKITALLDQVFPEFEAQFDSIFCKSGLAVLRRYPTPERLAKAQLGKLTEILRTASNGRFGEWKAQEVRECARTSFGLPDSEGVYSALILMYLEQMQHLIDAAAILESHISEHFSRFQTTLTSIPGVGPVLGAVIPSEIRDISVFSSSDKLAAYAGVDPRVKQSGEMKLGGVHMSKRGSPYLRRAIWRASVVAVQHDPMFKAYYEKKAAEGMRYMNIIGHVTRKMTAVIFAVMRDNKAYLPIMPSVA

SEQ ID NO: 116821 - protein, 314 aa, unidentified
MKMAMLSFCGIDVSKDRLDVVVLPEGWFFSVSNDTAGWAELVVRLRPLTVSAIGLEPSGGYERGIIRALLAAGMSVRRINPNKLRQFARARGVLAKNDRLDARLIAEYVAIMPTRVVQRDAAVERLAEIVTMRRQLCDEHVAAENQAAHLEDAMLRRLSKRRQTRLEADIRLLDKRLAEMVAANVALAQRYELLTSMPGVGPVLAFTLIALLPELGKMTRKQIAALVGLAPYDFDSGKLKGHRSIYGGRMPVRNVLYMAALSASRYSPALKAFHKRLADADKKSKVIIVAVMRKMITTLNAMLRDNAAWQPQSA

SEQ ID NO: 116822 - protein, 352 aa, unidentified
MKQINKLDFSGQDIYVGIDTGKKSWKVTILTKEYEHKTFNQNPNPEELVTYLHKNFPNANYLCAYEAGYFGFWICHLLNQMGVKCIVVHPADIPTKDKEKHNRNDSSDARKIARTLRSGELTPLYVPSLSEQQARSLVRMRLEMKRKETRCKNQIKAMLTFYGVNIPDEMANSHWAKRFILWLENLDSDNQALSALLMELSGLREILVKLTKQIRSLANQEPYIRPVKNLCSVPGISTLTAMVLLTELSDISRFSNSDHLASYVGLSPGEDSSGDKEKTTGLSRRRNGYLRSVLIESSWVAVRKDPALLMSFTELTKRMSKNEAIIRIAHKLLNRIRHVLMHNECYELGIVS

SEQ ID NO: 116823 - protein, 345 aa, unidentified
MKKVVAGMDLHSNNVVIGVMDMDGKRLASRKVSCELKEVVKFLAPFKSRLEKVAVESTYNWYWLVDGLQAQQYPVVLANPAGMEQYSGIKHADDTNDAFFVAELLRLDILPTGHIYDAELRPVRDLLRRRMMLVHQRTALMLSFKSLYTRTTGQEMRLGELKDLEIKEAQKLYVHPANQLIAGMQVKHIEQLTESIEKIEKVVMACARALPPYSKVATLPGVGIILGMTLTMEVGDIKRFASAGDFASYCRTVAAQRTSNSKRKGENNSKCGNKYLAWAFVEAANFARRFDPACRKWYDRKAARTSNLIATKALACKLAKAAWHLMSGGTEYDSKRMFGQPAKIK

SEQ ID NO: 116824 - protein, 338 aa, unidentified
MVHVGVDLHKRFARVVAIDDDGRELERQTLYNEDRKAMVDYFRPRSGDATVTVESVLGWVWFYELLEELDVTMKLAHPRKVRMIAESTVKTDTIDALTLAQLERTGYLPECYIPPREVRDRRELLRYRVSLVRIRTGLKNRVQAILHKLNVSHRFTDLFGLSGRRFLASLQLRPVYQQQLDNYLGLLDELEPRIAAVTRQIKAELAPDRRADLLMTIPGIAHLTAYLLLAEIGDIRRFSSAKKLCAYAGIVPRVRQSADHCWHGHITREGDRFIRWGMVEAACKAPAKDHTLGQYYRRIAYRRGPLKARVAVARKLLVAVWNVLTHEEPYCTTRPEAV

SEQ ID NO: 116825 - protein, 406 aa, unidentified
MRRTDHRAAHPRSAVHAHDTALFVALELSRSTWLMGSSMPGSDRVSRHQVRAADTTALLALLKRLKARAERSCGATVRVISIHEAGLDGFWVHRFLEANGVQSHVVDAASIAVNRRSRRAKTDRIDVEKLLDTLMEWARGGRRACSMVRPPSPAEEDERRLTREREALVIERTRHVNRIKGLLATQGVFGFEPMRKSHRRQLEHLHAWDGQTLPPRLKAELARELNRLELVISQVAAVEDERDRALKAQQHPAPSISAPEATASASAQPTATEHAGRLLLRLRSIGPEFASVLSTEAFYRNFGNRREVAGYAGLVPSPWKSGGIDVEQGISKAGNARLRKTMIQMAWLWLRHQPGSTLSRWFHERVGDRRGKIRRITIVAVARKLLIALWRYVTLGLVPEGAELKV

SEQ ID NO: 116826 - protein, 394 aa, unidentified
MMFYLGIDIGKRTHAASIMSNTGEILLKGFSFKNNKEGGEQLLRHLNRFSTDPADFSIGMEATGHYWLTLFSFLDANQYIVHVINPIQTDGWRKGTEIRKRKNDIIDSVLIADLIRYGSFGESALSDEPILELKQLARYRAYLKGTASDFKRKIIAIIDQLFPEYETVFPKSGIFGKASKQVLYELSSPEVIDALSTEELMQFLSKNSRGRLRLDKADKLKQAASNSFGITFAQDAYIFQLRSMLEQLMFLEKQVEAVDQQVKQRMEQLDSVILTVPGIGDVNGATILGEIGDINRFSTPKKLVAYTGLDASVTQSGEFEASHNVMSKRGSPYLRKALFSAALVASNHDPVLKAFYQKKRSEGKHHLTAIGAVSRKLCYIIHAVLKKNEVYKIQ

SEQ ID NO: 116827 - protein, 338 aa, unidentified
MPLYCGIDLHAKSSYLAIIDEQRKRIFKRNVPNDRTVMFGFLAPYKSELAGVVVESTFNWYWLVDSLMDDGYTVHLANPCAIKQYAGLKYLDDKHDAFWLAELLSLGILKEGYIYPKEQRPVRDLLRKRGHLVRLRTSLLTSLQNTVVNTFGIKIPAHRIKGKEDHVTTYDFGNESLALMGLVSKTSIDTLSHQIEAIESHVYQHCRLAVAYNPIVSLPGVGRILGITILLETGPITRFPAVGNYVSYCRKAETIWTSSEKVKGKGNRKNGNRYLAWAFSEAAEHARRFDTASRSFYNRKLRERNSPVAHNALANKLARAAYYIMRDQVPYEEAKLFG

SEQ ID NO: 116828 - protein, 401 aa, unidentified
MEGPIISIDVSNGNSHYILFEKNNKKVGGVHKINHDVEGFAHLKTDIKMLSDKVGEKVCVVYEATGVYTRPLQRFLEKNDIKQYIISPLESARKRKEGIHSKKTDKLDPIAISKVYYDRQEMWLHEVEDDRFHRMKQLNRLYEDKINHLRKYKVTFQNSLSICFPGFLDLFNDGYSGLAMVILKKYPHPDLIKNKQPETIARYIEKHTCHKKVVSMRYAVKIINFANETYPGCDYDDIEVKILQDLLEKVEMIRNDADETLRKIIQIAETINEYYLILSIDGIGPNPASRILAEIGDIKRFKTREALIAYLGLDPNISQSGQLDGDHLSISKKGNKRLRCLLYLAVTCNIRLKKVNPINQFYQKKRQQLNPLNSKAAKVACTAKLAKIIYGMCKNNTIFQR

SEQ ID NO: 116829 - protein, 361 aa, unidentified
MNSKQSSKTGNDRIFLWFGIDVSKNSFTAAFHNGIDGKTIVKSGNAFTSNLAGVRQFLKWRDTILKKAQGEMALTDALVMEATGHYSTKLAKLLLKCNGNLRISICNACSVSHYLRSHKADKSDRQDAEFIARYGQDAQPKAWTPKASEVKVLRELLKQRQVYTNMRIELKNRADSLTCPEVAAENRKMIKFLGERLKKLDEEIRKAAQATAEMKEEIALMTTVPGVALLSAATIYAELGSLKQYTRNQLSAMSGVCPINRQSGVSLHSSRISRRGSAELRRILFLDSFQGIQQIPALAELHARLLTRPESSKMTARCACMRKQLMILRGIVVSGKPFDKTFKSISQAKHAEPAKKCEKSA

SEQ ID NO: 116830 - protein, 430 aa, unidentified
MSVDRSGEQEPQFAAFVGIDWADRKHVWCLQPSGSQKRESGELEHAPEAVEVWVAQLCQRFAQGPIAVALEQSRGALVFMLSKYERLHLFPVPSTMAGKMRDALYPSGVKDDPRDADLLLDLLLQHRDKLRRLSPDTEATRRVQNLVEERRKLVDEKTEQINRLTSHLKIYFPQMLDWFDRLDREAACALLERWPTLEELQKVPPAKLRTFFCKHHCRDQEVIERRIVGIRQAVLAIRDRAVIEAKSAVVKVIAQLIRILVQGIVELDRKIEQEAAAHPDFFIFDSLPGAGPALAPRLLSAFGSQRARYGSAQEVQAYSGIAPVIERSGKKKWTHFRWAAPKFLRQSFHEWAGRSITQSQWARAYYEQQRQRGKEHHAAVRALAFKWIRIAFRCWQNGVAYEESRYLATLLRRASPLSTSMIASTLARTL

SEQ ID NO: 116831 - protein, 397 aa, unidentified
MDVLYEACAGLDVHAATVVACVRRPGTRGRRTREVRTFGTTTGELLKLADWLTEQGVTHVAMESTGVLWKPVFNILEGSCTVILVNAQHIKAVPGRKTDVKDSEWLAQLLEHGLLRASFIPPPRVQKLLESANIKLGLVATDILGASGRAMLRALVAGERDGAVLADLAKGTLRQKRARLAEALTGRFTAHHAALLDDLLAHIEFLDGAIERLSQRIAAALEPQAEAVERLEGIPGVNRQAAEMIIAEIGLDMSQFPTAAHLASWAGICPGNEASAGKRKTGKTRKGNRWLKSLLAECGWGAGRARHTYLGAQYVRLSHRRGKKKAVLAVGHSILVAAYYILRDGVPYRELGPEHFDRLAKERLTRHYLHRLEQLGHHVTLAPEPVQAAEDAEPGAA

SEQ ID NO: 116832 - protein, 344 aa, unidentified
MTLVGCDLHTRKQQVAALDTETGETHERQLVHEGSAVEEFYAALPCPVTVGIESTGYAIWFHALMHRLGHTVLVGDAAKIRAMVVRKTKTDQQDARHLLDLLRHDRFPTVWVPDPATRDLRARLTHRRRLVRIQTMLKNGLHAIALNQRLARGAKLLRHDGLAQLQALPLPPYTAQRRDHSLELLGTLHTKIQQLDAAIATAALAHPDAPRLLTHPGVGPLTALATVVVLGPVTRFADAKHVVSYVGLAPSLHASADKYRLGHITKQGSSLLRWVLGQAAPHAARFDADLKRTYFTLRQRRGRAKARFAVTRKLLVRLFIMLRDHIDYAEFRRRGRPPAPVSAG

SEQ ID NO: 116833 - protein, 341 aa, unidentified
MKLTTIGIDLAKNVFQVHGADARGKPVLKKQLKRAQVLAFFANLMPCKIGMEACSSAHYWARKLQALGHTVQLIAPQYVKPFVKRNKNDAADAEAICEAVTRPNMPAVPIKNASQQAILSVHRARQGFVKARTAQANQIRGLLAEFGIVIPQGISHIAKRVPEIIEDGENDLPGSFRLLIQRLVDHLKVLDQQIGELELEIQAWHRESEASKKLAKIPGIGPMTASALVASIDDAKSFKNGRQLAAWMGIVPRQHSTGGKTTLLGISKRGDTYLRTLLIHGARAVIRAAERKPPTNPWLGKLLARRNKNVAAVALANKNARTIWALLAHDRTYAPDYGLAP

SEQ ID NO: 116834 - protein, 486 aa, unidentified
MAKRKESTFERLKKGQRLNRREKREVAQRLNAADPGLEVVNRDGAGVDIGNESHYVAVPAGRDEQPVREFGSWTGDLHRMAEWLQGCGIHSVVMQSTGVYWMAVYEVLQSHGFEVHLVDARGTKNLPGRKSDVQECQWLLKLHTYGLLRSCFLPAEPIRRLRTVWRLRDQHVKEAGRSVQHLQRALTEMNVQLHNVISDLAGVTGQAIVRAILQGQRDPVQLAGLRDRHIQAREEELVESLRGNWKEDVLFELQQALEAYDFHRQQIAQCDGRLEEYLRALPSREAPAPAAPTATPAPASSPSPRRARRKPRKPKGNQPAFALQPELQRILGVDATTIDGIEVMTVQTVLAEVGPDLSAWKTERHWASWLNLAPQRDVSGGRVIRHTREHHTNRVGNAFRMAAQSLLRSESYLGARFRYLRAKLGGIKAVKAMARHLACLFYRLVTKGQAWVDRGAAEFERRRQEREFAMLQRKARDIGMTLVPAA

SEQ ID NO: 116835 - protein, 456 aa, unidentified
MAQHKRKKSPAEQQLPAQLHAVNLHAAGIDVGAEAHWVAVPVEADPQPVRAFPAHTASLHALAAWLTLCGITTVALESTGVYWIPLFELLETQGFEVILVDPGTMPKNGRPKTDVHDCQWLQRLHTLGLLSAAFRPDDPVVVLRSYLRLRLTLLADAARHIQHMQKALTQMNIKLPHVVSDITGVTGLRIIKAILNGERDPRRLATLRDQRCKEDETTIAQALHGTWREEHLFALHQAVAAYEFCHQQIQEGDAKIAAQLQTFEDRSKGESLPPKPRKRHRNRLSFETRPLLYRMTGVDLTKIEGLDETTALIVLGEIGLDMSRWPSEKQFTSWLGLCPRVRVSGGRVLSSRTRPTANRAAAALRLAAASLHHAKSALGAFFRRMKARLGTPKAITATAHKLARLIYAMLKHGTAYVAGSMAEYEQKYRQRVVHNLSRKARELGYELHPVLGGPPA

SEQ ID NO: 116836 - protein, 373 aa, unidentified
MPKYSTAFGMDVHLRSTTVCALDADTGEAVTRRFPGNPWGEIAGWMDGFPGPSLAAYESGYLGFAPQRELAGLGVECVVAAVSKIPRSAADSASRNDRNDAARMAKAILSHDISPVWVPSPEIEGLRDLAGAHDAATARLAAAKQRLLAFLARRGYAYGGTTPAGNPRRYWTYDFLRWLDKVRPADDGGIRALAALRNEVEAAAETRDDLLAEYRAAVAAGPLSAEVEALQSIKGCGFALAAAFASEVGDFSRFRSGRQVTSYFGLAPKQRSSADSVRLGGISGAGNALVRRLAVEGSWSYVQASHQPKLMPKGSGVPLEVRMHGRKGSERLLRRREEMLARGMPQAKANAATAAELVRWLWALGAMCREATE

SEQ ID NO: 116837 - protein, 357 aa, unidentified
MSQEGVYYVGMDIHKEIIAYCVKNDRGETIMHGDIAANKKSLLLWEQELPHPWIGAMEATMFTGWIYDTLRPYAKELITANPLMMKAISSAKKKNDATDAEKLSDMLRIDYIPRCYMAPSDIRELRRVLRFRNFFVRHCTALKNKNASMLMECGVEYSKKRLHGKRYFKNLLETLEEVPPSLSSLLTINKDVIDQMSKVQRLLVKGLQETKLLKERAERLMTIPGVGEVLALTWALEIAEPERFSSIRKAISYCGLCSAQKESAGKRQRGPISKQRNEHIQWILVEAAKIAVRYNQSLAKVYAHEAVKGGRNRATLAVARKLVAYLLAVDKSGRPFEDRQAQKMEKETGEGRAPSLS

SEQ ID NO: 116838 - protein, 399 aa, unidentified
MNDGATHFERPCLGLDVHKGTTTATYLEAGGRTMKKWIFPTTRPHLLDLAKQMGISVPIVLEASTAGKAVATTLKEVGSELHMAAPNKIALIAKAPVKTDDRDSATLAHLYQVGFFPDCYVPPPEIGRQRTLVRARQDLGFKATLVKNQVHALVTRNLLDSEMKGISDWFGVGGIRKLTRLPIPAGERTHPARSLEQLQLLAEHEESLQAELAKAATESPDVQLLMTIPGVDYYTAVAIVAEIGDIRRFANKKQVCSHAGVVPRADNSGEKVSSHRSVKMGDMVLKRFLCIAVQGMLRANRGTSINRFYEKKAKSIGSAKAQVAAARKLACAIWWMLTHGEPFRDEDEDLMARKTRRMEARSQEAMGEMTESELDRIGQKLEAKASLLERLAREAGNAG

SEQ ID NO: 116839 - protein, 380 aa, unidentified
MEPSSIQYAAYVGLDWADREHAWCLQTPDHMSRDSGFVAQTPEAIETWAAALARRFQGRPVAVALEQSRGALLFALTKYAHLILYPINPARLAHYRKSFRPSGAKDDPSDAELLLNYLCNHRDQLRPLQPDTEDTRSLPFLVEARRRTVDDKTRFKNRLTAVLKQYYPQILDWFADVDSAVVLDLLERWPTLGDLQRVHRPTFDHFLKQHRCGGFEKAEQRWQQIQSAIPATKDLAVLRSFSLTAKCLVRLLREMRSAVGVYDKTIDDLAKKHPDFDLFHSFPGAGDALVPRLIAAFGSQRDRWTNASELQCYTGIAPVLETSGRQRWVHVRWACPKFVRQTFHEWALHSLKKCGWANENYKTQLDSRQIAPRRDSRRGI

SEQ ID NO: 116840 - protein, 371 aa, unidentified
MVKKGPPKKSLTKESQMKNKYSYTGKTIFMGIDVHKKTYSVSVICENELVKRDTISAYPERLVSYLNKYFPKATVKSAYEAGFSGFSLHRHLIDNGIENIVVNAASIEVGARDRVKTDKRDSLKIAIQLSVGRLKGIFVPSPEREDLRELTRLRATFVKDRNRIGVRLKHKANYHGLIGPEDNQKVCKSWIIELKNMWMSSGLRYVINEMTEQWEDLNERIKKLDKALEEQAVVDEEIETVFRSVCGVGKTAARTLANELGNMSQFGSESALFSYTGLTPAEYSSGEHVRKGHITRQGKSALRNILVQCSWTAIRYDDDLREIFERISTHAGVKKAIVAVARRLIGRIRACFRKKETYKKGYLKGLKKVVA

SEQ ID NO: 116841 - protein, 414 aa, unidentified
MFAVGVDVSNGRSTVAVLGARRKVVMKPFEVPHTADGFASLAEKLNGLGSEARIVMEHTGRYYESFAMSMYRAGFFVSAVNPLAIKDYQEGISVRKVKTDKADALKIAQFAIDKWEILPQYTPMDTIRYNLKTLHRQFQLSSKTRTALNNNLIALLEQSYPGANRYFDSPVRPDGSQKWVDFVDTFWHVDCVARVSQSAFVERYRKWCKRHGYNFSEQKAIEIHADARQKFPLVPKTDTCKLLVKEAVSQLNAVSRTVETYRTEMDRLASQLPEYDTVMAMTGVGKSMGPQLMAEIGDLRCFAHQKSLVGFAGTDPIKDDSGDKVSDSKPSSKRGSPYLRKTLFVIMTILLQLQPQDDPVYQFLDKKRSEGKKYYVYMTAGMTKFLRIYYGRVRDCLKEKGLWDSPASQAVNPD

SEQ ID NO: 116842 - protein, 428 aa, unidentified
MQDVEDEPLFAERVAGLDIGKAAVEVTIRVPGGTAPGRRQQEARTFGTTRRELESLGDWLACWGVTKVGMEATGDYWKPAFFLLEARGFGCELYNAAQVKALPGRPKTDRADSIWLAKITERGMICSSFVPPEPIRRLRTHTRYRRHLTQARTAEKQRVEKLLEDGHLKLSAVICDIHGVSGRDMLNALAAGQRDPKALAQLARGSMRGKIRRLEEALDCSFFTSEHAAVLAMMLAVIDHYTAQIEALNARIEALIAPYLHQVAQLDAVHGIGIICAQDIIAETGTDMTAFPTAAHLVSWAKWSPQVSQSAGKRKGSNATGRGNPYLSAALGASRTQSFLGARYRRMVRRMPKKKALVATGNSMLTIVHALLSDHQASYQDLGPDYYEQRMHARRQARNHVKSLERLGYKVTIQALNPDTGELLAPAG

SEQ ID NO: 116843 - protein, 347 aa, unidentified
MQVTTIGLDIAKNVFQVHGIDASEKVVVRKQLRRSQVLAFFKALPSCLVGMEACATAHYWARELTKLGHKVRLMPARDVKAYVKRNKNDAADAEAICEAVRRPTMRFVQVKSAEQQSQLMLHRTRDLLMRQRTQLINALRAHMAELGIVAAQGNAGLKELLKIIAGERDARLPVDAHASLVVLTAGLHAVQTMIGSIEKRIIVEHRSNEASKRLRSIPGIGLLGASAIVATVQDAKAFRSGRDFAAWIGLVPREDSTGGKHKLGPISKQGDRYLRRILVVGAHAVLKLARQKPEKYPWLTQLLARRPFKVVAVALANKMARVAWALLAKGGTYSRARALVTTVTAAA

SEQ ID NO: 116844 - protein, 375 aa, unidentified
MIATTRSVVSVSGPVLFVAFELGKKAWKLGITSGVGVAPWIQTVASGDWAAVERAIERSRARFGVSATAAVVSCYEAGRDGFWIHRALSGRGIQNRVVDSASIEVNRRRRRAKTDRIDALKLVQMLVRAWHGEQQVWSEVRVPTVAQEAARQVSRERTALTREQTRLINQMRGWLATWGTALPRQRPRGWWTTVRDWAGAVLPGAVQERVARAETRIALVAAQIAVLDGQQQMAVAAAAPASAMQRLVQLKGVATTSASVLLDEGLVWRGFRNRRQVGGFLGFAPVPYASGETAHDQGISRAGNNRVQVTTIQLAWSWVQWQPSSALTQWYRTRFGTGKRARRIGIVALARKLLIALWRYATTGVSPAGAVLKAT

SEQ ID NO: 116845 - protein, 401 aa, unidentified
MKRLSGGIDVGSESHHITILDEEDNILYNQKVAHKLSEFTESIKLFKQIEKKEGGKLSFALEGKNGYSAPFDRILINQGFTLYNVDNLKLKRFREAFAGEWRDDQRDALMLSKMLKLKEHINSQREKVFIKIEKPSPLTESLKLLSRHQQTLIDEKVRLINRLGKKLLEVCPQILKLGKLKNKKIIAVLAKYPDFSKYKRITLCSLLKIKGIGKKQAPFLLKRLNNIEYMPGLTDIYQTIILSYAKRISELQKEIEDIDKKLDEIGEKSKEVKHLKTIPGVATKLASRLIGEIGDTDRFPSEKQLAVYCGVACVDNNSGKVTKARAVYKANKICKHTLITMAGGSIRFSFQCKYYYLKKRAEGKSHNHALRCLARQLIRVIYKMLTEDRDYIVRKELRKVA

SEQ ID NO: 116846 - protein, 367 aa, unidentified
MIVNEVAKNVEKIISIDTAKNSFQVLVVNQKTGKKKNTKVQRSKFVEYILKQGPCLIFMESCSASQHWARLFESFGFTIKLIAAQHVKAFLRNRRVKNDERDAEAIYKCGIQPDTKFVRIKTVEEQTVALLHTLRKAAVSQRVELSNRIRGILAEFGIVVARGRGSFNSEIEALFNECEKIHDVNLRVAISSLFEDYHRLEQREKELSEKIESLNKDNELVKIALTCPGVGSLTASAIVAEVGDASQFRNGREMAAWNGVVPSQHSTGGRSTLGGITKTGNRYLRTLLAQCACAVIQNASRHLEQGKDTHLDRFALRLKLNGKPTKKIMIAVANKIIRILWAMLTQRKTFENKAEETSDISAELQLA

SEQ ID NO: 116847 - protein, 343 aa, unidentified
MNEVTTIGVDIAKSVFQIHAVDDAGEPVIRRQLRRRQVMPFFRKLPPCLVGMEACATSHHWAREIAKVGHDVRLMPPRYVKPYVKRNKNDAADAEAICEAVTRPTMRFVPVKTPEQQSVLMLHRTRQLFVRQRISLINAIRAHLAEFGIVAGVGRNGVEALLKLISEGNDDRLPAPARDCLMALAAQLELVKRQIAEADRRVRAWHRSSEVSKRLEAIPGVGPLVASALVASIPDPSVFRSGRDLSAWIGLVPKQNSTGGKERLGSISKAGNRYLRQLLVVGALSVIRRAKQLGYTRHPWLVELLARRSSKIAAVALANKMARIAWAMMARNESFNPSRLSTA

SEQ ID NO: 116848 - protein, 401 aa, unidentified
MESPIVSIDVSNGNSHYMCFIKNNKRFGKVKKIDHDIEGFKRLLEDIQKLEAETNEKVCAVFEATGVYTKPLERFLSKNSIKTYIINPLESARKRKEEIHNKKTDKLDPISISKVYYDKEEMMELKKKDETHNWLRKKNRLYEDQLNHLRKYKVTFQNQLSICFPGYLDLFKDGYSDISMTILKKYPHPDLLKNKKAETVARYLEKNTCHTHKVSLEYALKIIEFAKKTYPGCEKDDVEVEIFKILLDKVIETQRECEKTLNEMITVASTLEEYRYILSIDGIGTNLAARIIAEIGDIEEFKSREALVAYAGLDPHIYQSGDQDGKHLKISKKGNKYLRCLLFLAVGCSIRGAKDNPVNRFYQKKKQQSNPLNSKAAKTACTAKLLKIIYGICKNKTTYER

SEQ ID NO: 116849 - protein, 525 aa, unidentified
MGNGSGVSRGDRNRNARLARLRELVPVTNAIVGVDLADAKQMVVVCDHDSKVLARRTSRCRAWDLGAALDWAATRASGNGFAGVTIACEPTGHRWRVLGQLAADRSMPFVCVQPMVTSWSRRAEDLTLDKTDEKDAVLIARLTAQLRCYLPEPVDETWARLRHLGARREQLLSEVGGQVQQMRDLLECVWPAALGAAQQPFRSRTWIAALSVIVDRDGGDLARTRRLGPVRFEQAVRRQITRRGGQKPCRRIISKVFAALSDRAGVTAHRPGALERVQLLLADWQHAHDRLAEVETRMLAVLDELQLTRLVTSIPGLSAVGAAAILAQTGDPRRFATARALVKHAGLAPREKLSGAFIGRTKLTVQGRPGLRLAAWRAVWGAQRANPVYARQIRPPDHPPAQHAAPHPGPDRDRRRDPAPPPRRDHHQPGLEPNHRHPRHPTTSTPRRRSLTHHTSADHRGAASRRSGRALRGIETPADLDAHHGQPRPSSHQPDHTLPGPTPFSYAGTDDRPGTRPKLAQNDSR

SEQ ID NO: 116850 - protein, 348 aa, unidentified
MIHVGVDLHQEFCYMTALDSRGRQLNAQAVANERTALRAYFSRFRKPVRVAVEACGFWPAFREAIGDQVELRLVHSARVKAIAAAKLKNDRIDSGTLAHLLRCDLLPEAWMADEGTRELRQQVRLRATLVRQRTRLKNQVHAVLHQHGVRHRFTDLFGAAGRVWLETVPLPLVPRQVLRTYLELIDQFSVRILEQDKSVKQFTKKDPRAKWLMTIPGIGPYSAMLLLAEIGQIHRFPDKQGLSNYAGLVPWLRESADKRRSGGITRVGSPWLRWIMVEAAQTAVRTSPAVRSYFERLRQRKHRNVAVVAVARKLLVAVWALLQHGECFDERRFAQSCGKDGARRLGKR

SEQ ID NO: 116851 - protein, 425 aa, unidentified
MNYKQNEKINQVKESTLVVGIDIGSTTQYARAFDWRGIELGKVFTFSNSREGFEAFKAWMQHLQDKYRKSDVIVGIEPTGHYWFDLGAYLEDEGILLVMVNPYAVKQTKELDDNSQSKNDRKDPKVIAKLVTEGRYSAPYTPDGVYADLRIMVANRKRLIREMTQIKNRFARWFAIYFPEYTDVFGDYEAQSSMLLLKKVCTPEAIVELGAEKINQIWRDAKLRAVGMKRATTLCETAKRSIGLKKGSSAAQYEMKLLLEDYEYKKAQLDAVMEEIEKLCRKIPESEQMLAIKGIGVITVAGFLAEVGDVRRFESPRQIQKLAGLSLRENSSGKHKGQTTISKRGRSKLRAVLFNAAIPLIATNPEFKSLHEYYTTRANNPLKKKQSVIAISCKLIRVFYAILANGVTYDAQKMLSDIHRQPQAA

SEQ ID NO: 116852 - protein, 358 aa, unidentified
MEQITRGERGRVVVRVGVDLAKRVIQVHAVDAAGQLVLGRALARDRFIAWCAQLPGGCVVAMEASSSAHHWARKLCSLGLDARIIAARLVKPYRKQGSSDKNDANDAAAICEAASRPSMHFVPIKSVEQQSMLCVHRLREGIKEERTACINRIRGLLAEFGLVFAQSPKVLRLALADTIEDASNEMGTLARLTLQRAYAQWCELDEHMAWCDERIAEHACTNEQVKTATALLGVGPVTASAVVATVGDFRQFRNGAQFGAWVGLTPKQHSSGGKARLGRITKRGDTYLRTLLIQAAKSAVLTAHRRSDRISNWLCMLRERSGWQIAAVALANKNARILWALMTKGAAFNANHLSAKPA

SEQ ID NO: 116853 - protein, 338 aa, unidentified
MYYTGIDLHKKTSYLTTINEQGRVVKRANLINDESLILDYFTALDGPTKIVMESTGSWYWLYDLLHGNGFEVVLSNPTKTKAIAAAKIKNDKLDSHMLAQLLRTDLISTVYVPSIDTRKLKEILRHRTRLVRDTVRMKNRIHALLTKNNCSIPFRDVFCQKGVLCLQEAGLPQYHQEQLQVYLLLYHQLMDQVAPLTESIQKMAQGHPIAKLLMTIPGIGPITAMVIVAEVEDIARFPSYRNLSSYAGLVPCLDASAGKQRIGRITKQGSPYLRTALIEAAQSIPRMKKCRLNLFFRRRIVRSGYKKAIVATAHKILQIAFYVWRNQTPYQEEYPACA

SEQ ID NO: 116854 - protein, 344 aa, unidentified
MQITTVGIDLAKNVIQAHGANERGKAVLRKQLRRDQVMPFFANLPPCLIGMEACGSAHHWARKLQALGHQVRLMAPQFVKPYVKSNKNDAADAEAICEAVTRPTMRFVPVKNVEQQSVLSLHRVRQGFVKARTAQANQIRGLLAEYGLIVPQGIAHIATRVPDLIEDATNELPGTFRLLIDRLLEHLKLLDRQVDEIEVQIKAWHRDSETSRRLERVPGIGPITASALAATVGDAKNFDNGRQLAAWLGLVPRQHSTGGKATLLGMSKRGDAYLRTLLIHGARSVIYRATQRNDPDNWLVKLTTRRNANIAAVALANKTARIVWALLVHNRQFQPDYAPAEATA

SEQ ID NO: 116855 - protein, 354 aa, unidentified
MSQTLNAAFAVVGIDIGKNSFHIVGHDERGAIVLRQKWSRGQVEARLANMPPCLIGMEACVGAHHLSRKLRALGHDARLMPAKYVRPYSKGQKNDFRDAEAIAEAVQRPTMKFVATKTADQLDLQALHRVRERLVSQRTGIINQIRAFLLERGIAVRQGQRFLRAELPRILATPPDVLSPRMVRIIEDLACDWRRLDERVERLSDEIEAIARQDAGCERLMSVPGIGPIISSAMVAAIGAGDVFSKGRDFAAWLGLVPKQISTGDRTILGKISRRGNRYLRVLFVQAAWVVLIKPKIWERHGLKSWIEAARKRLHHNVLAIALANKLARIAWSVLARGRAFEARKMDQAANQSA

SEQ ID NO: 116856 - protein, 363 aa, unidentified
MKQIKDIEKRVTRYIGLDVHKDSTTAVVLDAQGKVLMQVTLRTEASVLVDFLRGLSGSLHLTFEEGTYSAWLYTVLSPWVEKLIVCNPRQNALLKEGNKSDPIDARKLAELLRLGSLVAVYHGSPGMRTLKELAASYAMLVSDGTRVMNPLKSLYRSRGIRCGGTQVYSPHHRRRWLEQLEVGARQRAKLLYQELDLLLQLRRPARRALLSESRKHPAQKILRTIPGLGPVRVARLLALLQTPHRFPNKRKLWGYGGLGLLTRGSAQYELRGGELVVATKGVRVRGLNPSHNAQLKDIFKGAALAAIQRPGPLREAYQRCLREGTEEHLARLTIARKIATLVLTLWKRGERFDAQRLRREQAA

SEQ ID NO: 116857 - protein, 438 aa, unidentified
MSNKVIFNLDELFISVGIDVGADFSWMSIALPNQQFVRKPYKILHNSIDSLTTAVSKIKEAEELYSLESRIFLESTGIYHYPLFCYLRDKGFNCSVINPIITKNSTNINIRKVHNDRFDSKKAALVGLKPDLKVSLMPSDLALNCRNLCREYYDLIDNRSAYVNKLQGELRMAFPQYLGIFSKVTINTSLTLLETYTSPSAFLKADKQEIIDIIKSTARFGLTYAQNKYNAIIQAATDANQFGYIIDSNIKRIRLYISFIRKYDEEINSILESLHELVDANEDSDFVKQIHLIETFKGAGFLSAVSIMGEIGDFSAFSKPKQLFAYFGLDPSVKQSGKFEGTKVQMSKRGSAIARRVIHTLTLQSISISRNREAKNPVLREYYLKKCDSKPKLVAMGAVSHKVCNMIFAILRDNKPFKIIAPQEHIQQYNAAKCDIAA

SEQ ID NO: 116858 - protein, 344 aa, unidentified
MDISVLGVDLGKNVCSVVGLDASGAVVMRRKVKRETLIALAEKLPPCIVGMEACCGAHHLGRVFAAHGHTVRLMSPEYVRPYVKAQKNDDRDAEGIAEAATRPTMRFVELKSQDQLDMQTLHRSRDRLVGERTALIHQLRAILLERGMVAPQGKRKLEQFLAVLMDERGGADLSPRMILLVADAHAQWAELDRRIAAFDAEFVRWVKENEEARRLTTIPGIGAIVASALVAAVGRAESFERGRDLAAWLGLVPRQFTTGGKPKLLGISKRGNKYLRRQLIHGARAALPYVAERDTPLGRWAKELSGRAHHNVAIVAFANKLARIAWAVLRRGERFTATGMPVAA

SEQ ID NO: 116859 - protein, 416 aa, unidentified
MNAVGIDVSSRKSTVAVLRPLGEVVCLPFDVTHDIAGLASLVEKLKALDGETRVVMEHTGRYYEAVEKALHEAGLFVCAVNPLLIKEYGANSLRRVKTDKADAVKIARYALDNWADLRDFTPMDAIRYDLKTLNRQFQLASKQRTTSANNLIALLEQSFPGIRKCFDSPVRSDGTQKWVDFAHSFWHVDCVRKQPFAAFCERYRKWCKRHAYLFKLSNAEEVYALAKRAVVLTPKSKVVKVLVQEAANQLISISRSVEVYRAEMDRLAAMLPEYPVVMAMYGVGKSYGPQLMAEIGDVRRFERKQALVAFAGIDPMPNQSGDKNVRSNKSSKRGSPYLRKTLFNVIRTYLQCAPQDEPVFQFLNRKRAEGKPFYVYMLAAANKFLRRYYAKLRDYFASLDTLQPVAPIPTILKATL

SEQ ID NO: 116860 - protein, 424 aa, unidentified
MRYFGVDVHLEFCEIAVCEDGRVSQVGRIASTPEAIREFAADLGSEDEVVLDASGSVMAIARILRESNAVRVVVSDAAQTRAISHARVKSDRFDAAMLARLLSSGMLSEVWVPDEATLALRRRVARRAALIRARTRIKNQVHGVVMRCLLGRPPVSDLFGRKGRVWLAEQQLPEEETETVQGCLRQIDFLNGEIAQLDQKIAEQALAWPGLCRLLTIPGVDIGTAAAVIAAVGDISRFQSAGQLVAYLGLDPKVRQSGSEPARYGHISKRGNAQARSMLVEAAWIAIRSPGPLRAFGERVRARRGAQVAAVAVARKLVVLCWQLLTKDEDYAFARPSLTRQKTRRLELTAGASRRPRRHDGLTVSPTTAQRAAERELQAQAEQAYRRLVADWRAAAPKGGAGATPGRASNRPSKGKAARQATSP

SEQ ID NO: 116861 - protein, 369 aa, unidentified
MEDRITYVGLDVHKEGIVVAVAEGGLRGEVREYGRIANTAAALDRLVRKLGGEGVRLRFCYEAGPCGYGIQRHLSARGHECVVVAPSLIPKRAGDRVKTDRRDAAGLARLHRAGELTAVWVPDAQHEAMRDLVRARLDAVHALRRARQQLSGFLLRQGCHYGRPAWTKLHRRWLAGLKFEQAVHHIVLEDYIAAIEAAEARRDRLTAQIEAMLPDWTLASVVAALQTMRGMALVNAATLIAELGDLSRFANARQLMAYLGLVPSERSSGASVKRGGLTKAGNKAARRLLIEAAWCYRFPARVSRELRLRQEEQPRPIREIAWNAQLRLCARYRRLARSGKPANVVTGAIARELAGFIWAIARCVPPAAG

SEQ ID NO: 116862 - protein, 425 aa, unidentified
MSYRIAGIDVHKKMLAVVVSDVEVDGEYQFERVRYSSSPEHLRLLAEWLIAQQVEEVVMESTAQYWKPVWGALERYWKPSCQEREGAGPTSGTLHLAQAQSNRGRRGRKKDFPDAERLVKRLVADELVLSFVPDTEQRLWRTLTRRKYQLTRNHVRLQNQLEGLLEECHIKLSSLVSDLLGASARRMLKALAEGETNPVALAVMADKNLRATQAPLCDALGACTELKPIYRRLLKMFLEELQFIDQQISKLDQELANLLSQHHDAVVHLAEVPGLGVDSAQQIIAEVGAGAATFPSAKQLSSWVGACPGEEESAEVSKSHRSPKGNRHMRRILNQAANAAAKSKGTIFEIVYRRLVSRLGHNQTIGAIAHRLCRLIWIILHRGVRYEERGPSVNAKTRRHRTNRMIRELRNLGYRVEPEPLVTTV

SEQ ID NO: 116863 - protein, 338 aa, unidentified
MKKYSGIDLHSNNSVVVVADEEDRIVFQKRLANKLDEILMALAPHKEEIVGVVVESTYNWYWLVDGLMDAGYQVHLANPSAIKKYEGLKYSGDFADAAYLAHLLRLGLLPEGYIFPRELRAVRDLARKRMQLVHYRTAQILSIENILTRETGGRMSSDRIKTMTSETVEAVGFLPDVTLAMESNRVVSQALQQQIEVLEKRLEAQVKLQPGYQLVKTIPGIGQILATTIMLEAGPMTRFANVGNFSSYCRCVGSLHESNGKKKGSGNTNNGNKYLAWAFMEAANFTLRYCPEAKRFYERKKSRTNRIVALKSVAHKLARACYHILREQRPFDVKRCFV

SEQ ID NO: 116864 - protein, 381 aa, unidentified
MANIRPTSERAAIRSHDCAVYVSLELSCSKWLVTSLLAGSERMSRHTIEAGDAPGLLSLLAGLGGKAQELAGTPARIVTIQEAGRDGFWLHRLLVSNGIESHVVDAASVSVPRRRRRAKSDSIDGEVLLRTLLAWLRGEPRVCSMVKPPSPEEEDRRRLCRERHGLITERTRLNNRIRGLLAAQGIKHYNPLRSDSRQRLEKLETADGRPFPQVLKKEVWRALDRIALLAGQIKTIESERDAQAAQSTIATQLSRLRGIGPELAATLWLECFYRTFPNRRGVGAFGGLAPTPWQSGTIAHEQGISRAGNPRLRQAMIELAWLWLRYQKTSALSRWFFKRVGTNSGRVKRIAIVALARKLLVALWRYVNDGVIPEGAVLKTI

SEQ ID NO: 116865 - protein, 315 aa, unidentified
MGGVNAAIEVGKHQLVVRLGSDGEQFVEPNEIHAIKRIAKRLLQAGCDRVLIEGGSYQSALIAGLRAAELPVVVVNARRVREFAKSIGRLAKTDDIDVRVLALYGERTQPPLRELPDKQSQALRSLWVRREQLIEMLVMEVNRLEHAPGEAKAVHRNLRSHINYLRKQIKQADDDLDREVRSSALWDRYEMLSSVPGVGPVLSVALLSDLPELGRLNRAEIAALAGVAPFNCDSGMLRGQRRIEGGRPRVRRVLYVATLAAVRCNPALKPFYLRLRAAGKPAKVALVAAARKLLTILNAMLKTKTAWRTPCQFAV

SEQ ID NO: 116866 - protein, 392 aa, unidentified
MIIVAVDVAKDKHDCFITNTDGEVLFDPFIITNSQGGFEDLFDKIRSVTDSLQNVKVGLEATGHYHLNLLGYLLDKGLHTCLINPLQTSLFRKSLSFRKTKTDTVDARAIARLLMSDQTLQPYSLTSYQNEELKSLTRYRADKVRERAKLKSSLSRLVVILFPELEKLVPTLHMATVYDLLTEFPGASLVASAHLTRLSHLFSDSSKGRYGKEKAIEVREAARHSIGAVFPAKSLELRHTIEHIRFLDAEINEIEAQIFALLDKDPPKMLAIPGMGPRMAAVIIAEVGDFKRFSSPDKLLAYAGLSPTTYQSGQLTSTYAKMEKRGSRYLRYALFNATKYVCIWDPTFRAYLAKKRAEGKHYNVAISHAAKKLVRLIYHLETTGETYLSKVS

SEQ ID NO: 116867 - protein, 400 aa, unidentified
MRAVFGIDVSKASSEVAIVINSEKIHGYSMTNDAIGFSRLLEDLKTVSNPEIVFEATGVYSRRLQVFLENNDYAYTRLNPLEAKKQLDSLRVRKTDQIDAEKLAQSQFVLNRKPTYVQEKVYQNLRDLSRFYQNLTEDIVRAKNRLHKVLQVTFPELENILSTPTGEQYWNLVIAFPCKDFVLDLSKDELSESIRQSTSKRISDKRVAYLAEKLIALANQSYCAVKKTSPMLEEVRYYGKELLRLSEQRQTVLDQMVELAQPLPEYDILLSIPGIAETTATSIIGELGDIRHFQSANQINAFIGIDLRHYESGNFLAKEHITKRGNPYARKILFKCIHNMASASHTNPCHIADFYEKRKRQSQIASTKPHTIASIHRLIRTMYYLITHNKLYDYASTQNH

SEQ ID NO: 116868 - protein, 331 aa, unidentified
MKRCNRVGVDVSAKELVVAIETAGRREAPIVLTNDADGHRKLVKLATKRGASARVVLESTGTYGLDLALALHRAKRVEVMVANPRAIAHFARASLQRSKTDRLDAEAILEFAVRMPFEPWSPPAPEILELRALSRRIEALSKTVVQEKNRLHANDQSEELSEFVKEDIRELAGLLESRITKLRKQALLVIAQSEDLSAAFAHITSIKGIAEASGIAILAELAVLPADMTTRQWVAHAGLDPQQFQSGSSVHKPARISKTGNAHIRRALFMPALVAVQWEPHIKGFYDHLLDRGKTKMQANVAVMRKLLHAIHGMLENDQDFVGEKFFAMKG

SEQ ID NO: 116869 - protein, 354 aa, unidentified
MSQKLNAAIAVIGIDLGKNAFHLVGHDHRGAIVLRQKWSRGQVETRLANLPPCLIGMEACVGAHHLSRKLQMLGHDARLMPAKYVRPYSKGQKNDFRDAEAIAEAVQRPTMKFVATKTADQLDLQALHRVRDRLVGQRTGVINQIRAFLLERGIAVRQGLHSLRSELPGILATRTDVLLPRMLRIIEDLAGDWRRLDARIEGLSSEIETLARQDKACERLMTVPGIGPLISSAMVAAIGTGDVFSKGRDFGAWLGLVPKQISTGDRTILGKISRRGNRYLRALFVQAAWVVLVRVKCWERYGLKSWIEAAKKRLHHNVLAIALANKLARIAWAVLNKGRAFECVKTEETASRPA

SEQ ID NO: 116870 - protein, 429 aa, unidentified
MASEPTKVIAGIDTHADTHHVAVINEHGKPIADKEFLAVGSGYRKIIDFITSYGTVVAIGVEGTGSYGAELARTLRGEGLTVLEVNRPNRAARRLKGKSDPLDAYQAAKSVLEGRTKAIPKAKDGPVECLRIVRSGRASAIKARTAAINQIKALLVSAPDKIRAKYRALATSALITALQRTRPSGHMADPEYVTLMTLKALAARCQALGAEIEAADAVLKEILDSYAPMLCDLPGVGTEVASQLLITFGDNPDRLGNEAQFASLVGVAPVPASSGKTTRHRLSRGGDRSANNALHQVVLVRMGSCQRTKDYVAKRTSEGKSKREIMRCLKRYAAREIYRQITNPRPAPDNSDLRRMRTELGITITTVAGELGQWVSILSRLERGHIRNDDLAATYRQWLTDQCQVQRFTRPLTSAAKTCALPEAVSQPV

SEQ ID NO: 116871 - protein, 381 aa, unidentified
MKDVSIFVGLDVHKDSIDVALVEGDRKATVRFYGTIGGDLTDLEKAVRKIKKAHPGATLHFVYEAGPCGYGIYRYLTKAGHECLVVAPSMIPKRSGNRIKTDRRDAIMLASLHRAGELAAVYVPRAEDEAMRDLVRARQDAVKAERVAKQQLKGFLLRHGIKNAGPGDWKPSYMKWLAGIKMPNPTQQIVLQDYLNAVIDCSERKMRFNTQIREVLPSWDLAPLVKALQAMRGVALMIAVTVVAELGDLKRFDSPRQLMSYLGLVPSEHSSGGTRRTGGITKAGNGHVRKVLVEAAQTYRLPARISKILLERQEGLPKVIRDIAWKAQIRLCGRFRKMVARGKKHQTVVCAIARELCAFMWAIAREVTIITAPVATGGRQI

SEQ ID NO: 116872 - protein, 345 aa, unidentified
MESMYYIGLDVHKKTISYCVKDASGRVVQEGKIGATRGELDSWMKTLPQPWSVAMEATIFTGWIYDHLLPHAAQVKVAHPLMLRAIAAAKKKNDRIDAGKIADGLRCDFLPECHMAPTEIRDRRRTLRFRHLLVRQMVQLKNRVSGLLMETGVSYSKQKLHKVGYFRELLSSNEEIHSNIRPLLKLSRDAIVRLQKTEYALVSSLQRDPLLADRIKRLRTVPGVGPITALTWALEMGEVSRFPSIKQAISYCGLCGDEKSSADKVIRTPLSKQRNKHIQRVLVEAAKLAPRENHELALVYETEKQKGNANRATLAVARKMVAYLLAVDRGQRDFVPAEDHRGVAA

SEQ ID NO: 116873 - protein, 353 aa, unidentified
MKPRMESNTSPPTVVGVDIGKDVFHLVGFGAGGKIAFRRRIRRLGLKDAFEKLPPCIVGMEACLSAHFVSRTLRALGHEPRIVPAIYVKPFVKGQKNDYNDAEAIAEAALRPNLRFVQEKSQDQLDLQACHRVRSRLVSRRTATINQIRAFLIEQGIAVRTGPRALRNSLFAILENRKDEISARTARLIRGLHEDWCYLDERIETVTGQIEALSRTEAKCRQLMSIPGVGPLISTAMVAAIATGEAFERGRDFAAWLGLVPRQYSTGGRSILGRVSKRGSKYLRTLLIQAAKVLLMRPHNWARYSFGPWLNSASARLHRNKLAVALANKLARIAWSVLRNDKAFDTHLEVAAI

SEQ ID NO: 116874 - protein, 400 aa, unidentified
MHGTFTYRHILAIDLGKFNSVACNYDPATHVHRFTSVQTIPAAIHDYLTANAGEDPADTLVVIETCDVCGWVHDIATALGMAVAVANVANDAWRWKKVKRKTDKDDALKLATMALLSQLPTVHVPPPAVRQRRRLIRHRKALVERRTISKNQIRSIYSQQGLQLPRGNTLWTKAGVTQLRSEARSFADCAVDDLWRGRLNVELDLLEAIDGQLQAMEKKLDELGAADPAVVRLQSIKGVGPRLAETVVACLDDPHRFKNANQVGSYAGLVPKQLESGEMKRVGRITRRGSTLLRGMLVEVAWMVYRHNAWARAFVLKVSRGMKSRKRIAIVALARKLLVKMWAMLRDGTTWQEPGNSDEGPRRRKNKCEGLAALGRVSGSPPEDTGRELALSSVVGVLAV

SEQ ID NO: 116875 - protein, 329 aa, unidentified
MRLPALGIDIAKLKFDVCLMNTEGKLRHKVFPNTLPGFAQLTMWLTKQGATPPEVHACMEATGTYGEALAYHLHAAGHIVSVINPAAVKAFAGSRLSRTKTDRVDAELIARFCAAQQPLAWTPPAPEVRALQALVRRLAALIEMRVAEENRLEAGTSVEAVQFSVEEHVAYLAAEIKRTEELIRAHVDTHPTLKQPSQLLDSIPGIGETTAALLLAEIVDVTQYRSARQVAAYAGLVPRERRSGSSVRGRTRLSKIGNARLRKALYFPAITALRCSPFFKRWAEGLRERGKCKMSVIGAAMRKLIHLAYGVLKTGKPFDPEWARKEKTA

SEQ ID NO: 116876 - protein, 411 aa, unidentified
MNPVVGLDVAKGESQVQGFLDKKTPFKKSFKILHTVEGFEQLLQFLQKIEETTNTKPVLIMESTGHYHSPVMQFLDNLNYIYIVINPLISYRAKSTSLRKVKTDAIDAYHLCELYYKEELEPYKKRGVQLLNLRNLTRQHDHLTGISSQAKLHFLAILDQVFPEYRGVFGDLYSNVSLLTLLEFRSSEAVLQAGEDQLSKRIASLCTSRSKQWAKEKAKLLMTAAEKNPFQINLYRSLLVSLEMHIKMVLQYKEHLSNLKAEIDVLVKEIEEYTIIQSIPGIGKKIAATIISEIGEIDRFDNPKKLVAFTGVDPSVFESGKFTASRNRITKRGSSRLRHALFMAVRCAIRDNRKSKTTDEIIPRNKRMRQFYDKKREEGKPFRVTVIACVNKLLHWIYALLKSKTTFQDLA

SEQ ID NO: 116877 - protein, 461 aa, unidentified
MPKQNTKKSQRGQGVKDLESLPTLNQNAAGIDVGSAEHHVGVPAGRDAEPVQKFGSFTADLHRMARWLKACGVETVAMQATGVYWVALYQILEDYGFQVNVVNAHHTKTLPGRKTDVLECQWLQKLHTFGLLNNSFQPAEQIWVLRTYMRQREKLVVGASTCIQHMQKALTEMNIQLANVISDISGMTGMAILRAIVSGERDPQALARMKNERIHASRQEIAQSLEGNWRPELLFVLEQSLALYDTYHQKIAECDHRIEAHLQSIESNGDTEPQPAPPLRIRRSHRKQTSWSDLHAQLHRIAGVDLTQIDGINVQTAQTVISEVGVDMTRWRSEKQFASWLGLCPDNRISGGKVLKRGTRRVINRAATALRMAAWSLFRSQSALGANFRRLRRKLGAPKAVTAMAHKLARLVYRMLKFGQAYVDKGMEHYEAKYRHQQIKWLAKTAAALNLQLIPSPEVVE

SEQ ID NO: 116878 - protein, 413 aa, unidentified
MIELELQAERCAGIDIGQEEVVVRVHRPGPNGGRSRQTRTYATMTRDLLALRDWLVAEGVTRVGMEATGVYWKPVFYLLEDVVAECWLLNPLHLKQRRRGRKTDVIDAGWICQMTEYGLVTPSFVPPPPIRVLRQLTRRRATLISERTREKNRLSALLEDAGIKLAVVATDIFGVSGRHMIEALIVGERDPHVLADLAVGKLVRKHPALIEALTGRFNHHHALIARQILDHVDYLNTAIGQLDTQIEVEIAPFRHVIDLLITLPGVADRTAQVIIAETGGDMSVFPSAAHLASWAGVCPGLNASAGKSKPTGAPKANKWLRAALGDAATACSRTQTHLGHRYRRLAARRGRNRAKLAVGHSILTAAWHMITTGTAHHDLGPEYYTRRQNPERRRRQLTDQLEQLGYIVTLTAA

SEQ ID NO: 116879 - protein, 343 aa, unidentified
MDHFAGLDVSVKETSLCIVDDAGRIVREVKVASEPEALLAVLTNPACHFKRIGLEAGPLSQWLFKALAEAGLPVICVETRHMRAALKAQINKTDRNDARGIAQMMRAGLYRPVHVKTLRSQKLRMLLTHRKLLQSKAIAIENDLRATLRNFGLKVGVVGTVKFEARIKGLVDNTPDLVVLVEPLLIVRRVLREQIGILHRRLLAIVRNDAVCRRLMTVPGVGPVVALTYRATVDVPYRFRNSKAVGAVFGLTPSKHQSGESNRTGGISRCGDEMIRMMLYEAAHIMLVRSAKWSWLKAWAMKIARHRGLKKAIVALARRLAVIMHRIWVDGTEFRWTREVAAA

SEQ ID NO: 116880 - protein, 392 aa, unidentified
MIYVGIDVAKDKHDCFITNSDGEVLFKSFTISNTREGFETLSQRITSISDDLTKVKVGLEATGHYTYNLLGFLLDKGLPTYIINPLHTNLYRKSLSLRKTKTDKVDAHTIASMLMSDVNLKSYSNTSYHNEELKSLTRYRFDKVKERAKLKSSVSRLVCILFPELEKLVPTLHIASVYTLLSEFPGASYVSSAHLTRLTNLLSEASKGHYDKDTANLFRETARNSIGSVMPAKSLELKHTIKLIQELTSEIDEIEAAIKQIMDKEIQSPILTIPGISYRMGAMIIAEIGDFSRFDSADKILAYAGMSPSTYQSGQLDNCYSHMEKRGSRYLRYALYNATKYVCHWDDSFGAYLEKKRSEGKHYNVALSHATKKLVRLIFAMEKSGQAYLPIA

SEQ ID NO: 116881 - protein, 347 aa, unidentified
MNHVAIDLGGRESQICVRGADGAILEEKRHSTRLLDKLMRQWPPSRVIVETSAEAFRIADAAKAAGHEVRVVAASLVKSLGVGARGIKTDQRDARTLSEVSCRIDLPSVHIPTPASRELKSICGAREELIECRTKLINNVRGWMRGQLWRLPSGGAGSFHDRVRAHAASLSAELPPHVARNLDVIEAVTLQVRAADAQLHQFVKTDATCQALTTVPGVGPVTAARFRAAIDDVSRFTSAHGVQSYLGLTPGECSSSERQRRTGITKAGPTATRRMLIQSAWAAWRRYPNEPMVTWAVAIAERRPKHVAIVALARKIAGILFALWRDGTTYHSGHRVAPSTIVRSTAM

SEQ ID NO: 116882 - protein, 337 aa, unidentified
MKYSGIDLHSNNSVVVVSDEVDRVLVRRRVSNDAAAILALLAAHREELVGVVVESTYNWYWLVDALQAAGYRVHLANTAAIKRYEGLKHSGDEDDAAYLAHLLRLGILPSGYICPPAARAVRDLARKRMQLVRSRTAQVLSVENMLSRETGAGMRSRAVQRLTAQAVEGFRFNPEVERSMCANVAVIKTLNREIDILERRLQQCVRLRPEFRLLTSVPGIGQTLATLIMLEVGTIERLATVGNFASYARCVDSARISNGKKKGEGNVKNGNAYLAWAFVEAANFAHRYCAEARRFYERKKARTNGIVATKALAHKLARACYHMLKENKPFDVKRCFA

SEQ ID NO: 116883 - protein, 366 aa, unidentified
MFTERTSVGLDVHARSVAAAAIDSVTGELVQATLTPDYGDVRGWLDRLAGPVAVVYEAGPTGFGLYRHLQAAGVRCEVAAPSKLQRPAGDRVKTDAKDAIHLARLLRLDEITSVAIPTIAQEAARDLVRAREDCRGDLMRARHRLSKLLLRHGIVYYDGKAWTGKHDIWLRHDALRRLPSDAATRLTFDADYDAVLTVKARRDRLDTAIEEAAADCEFTAIVRRLGCLRGIGTLTAFALAVEIGDWTRFTGNTIGSFVGLVPSEHSSGGSRSQGSITRTGNGHARRLLVEAAWHHRPRYTVGKVLRARWDLAPAAARARGNDGNRRLHRRWVQFIDRRKRSTVADVAIARELAGWCWSLAVLDTST

SEQ ID NO: 116884 - protein, 338 aa, unidentified
MKLYGGIDLHSNNSVIALLDEEDKPVYRRRLPNDLNAILGELAAYQDAIEGLVVESTYNWYWLVDGLMEAGYRVHLANTAAIVQYEGLKYSDDDSDARWLAKLLRLGLLPEGYIYPKAERAVRDLLRKRSQLVRQRTANVLAVQNLLARNLGYSLSANAIKRLSLEEADRLLPDVYRALAVKSNLAILRSLDESIEQLEKTVKACSQHRSEFAPLLSVSGIGDILGLTILLETGEIRRFAQVGHYASYCRCVGSERISNGKRKGRGNTKNGNRYLAWAFVEAAHFAVRYNPQIKRYYQRKCARSNGVVAIKTVAHKLARACYYILRDQVPFDVNKAFV

SEQ ID NO: 116885 - protein, 418 aa, unidentified
MKIVFPTCCGVDVHKSFLVATIIKTPQDSLQPSYQKKRFSTFNSDLNRFADWLHENDCLDVCMESTGKYWVPVFNILEKRGIRVTIANPKWVKAVKGNKDDTKDSKWIGDLFRIGLVKSSFIPNKDIRILRELTRYRCKLTSMKSSEKNRFQNAFTVCNVALDSVVSDMFGKSATAITDYLTSDEDFDPQHCVSLLHRSLKKKAEDVLSSIEGYEITLEQKCRIGIVRDHLHYIEKLIERVDICINTMVEKYDGAISLLRTIPGIDRSSAITVISEIGVDMAQFGSSKRLCCWAGLTPGNNESAGKKKSVRISRAGVYLKPVLVQAAHAAVKDKLNPYYALKYERIAKRRGKKRAIVAIARMILTAIYSMLSTGEIWNPVDLFKVDMPEHLKEQQLQKAMKQAVRFLEAQGLTVLDSA

SEQ ID NO: 116886 - protein, 408 aa, unidentified
MRLFVGDDWAEAHHDVEIMDEAGRTLAKARLPEGVAGMARLHAMVAEQIGQAADDEVEVLAGIEVDRGPWVLALVAAGYTVFAVNPLQASRYRERLAVSGSKSDAADAHMLADMVRTDSHQLRPIAGDSAQAEAIKVVARTHKTLIWERTRTGQRLRHALREYFPAALAAFEDLHAPEALDLLERAASPAEAAKLTISQISGALQRAHRRGDLAMRPRPIQSALRTEQLGQPDVVTAAYAASTRALVAVLTVLNQQITTLQGQVEAHFGAHPAAEIVLSQPGLGPILGARVLAEFGDDPSRYATAKARKNFAGTSPITRASGKKKTVLARFVHNDRLIDALITQASTAIRVSPGARAYYDKLRARGAGYNTALRQLANRLVGILHGCLKTGTFYDEATAWSHHQNATT

SEQ ID NO: 116887 - protein, 345 aa, unidentified
MKITTVGIDLAKNVFQVHGIDERGKAVLGKQLRRAQVAVFFANLPPCVIGMEACASAHHWARTLQRFGHTVRLIAPQFVKPYVKTNKNDVADAEAICEAVGRPNMRFVPVKSIEQQAILSVHRVRQGFVKARTARANQIRGLLGEFGLVIPQGIINVAKRVPEILEDASNELPVPFRHLIDRLTTHLKELDRQVKEFEGEIIAWHRSSELSRKLEKIPGIGPLAASALVASIADARSFDNGRQVSAWLGLVPRQSSSGGKPTLLGMSKRGDTYLRTLLIHGARSAILAAKNKVDNTNGWLTNLLKRRHPNIAAVALANKNVRTVWAMLAHGREFKADYVPTRMVA

SEQ ID NO: 116888 - protein, 445 aa, unidentified
MHPQAPASPRLVNMNCSPTPAIQTEMKTNDYAAYLALDWGDSQHAFALQMADNQNIEKGHFGAQPEEIHDWLKELGGRCGHARVACAIEAGGDALVSALLEHKWIEVFPINAAMSARFRKALIPSGAKDDVPDANVLLTLLVRHGDQLKPLQLDSAQTRELAALVLARRGAVDRRSQLGNQLRAVLKGFFPQALMLVGDELHGIMALDFLERWPDLDTLQRARPATVQSFYLQHRVRRPELIKARLDLLARAQALTKDTAIIGPAVLQVQMLTSMIRTLQRHIARFDESIAEQFAVHAESSLFRQLPGAGPQLAPRLLVAFGDNRERYPDAPSLQKYAGLAPVKEKSGRQLWVHWRWTAPVFVRQTFVEWAGQTVVYCGWAGAFYARQKRAGKGHHAIIRALAFKWIRVLWHCWKHQEAYDETRYLAALRQRRSPLIEDLDQATT

SEQ ID NO: 116889 - protein, 395 aa, unidentified
MSKDDRVARVGLDGHRTFSSVTARDAQGEIVWRKRLEHADRRPLREELRTWPKGTPVVLEGTFGWGWMSDELSAAGLEPHLASSKKVAAWRDARGLAKSNRTDADLLSELWNQQPRWWEVWLAPPEVRSQREWLRYRMTLVRLQTGLKNRIHAVLHRHGIVHGESDLFGTAGRRFLSLLIAPNDATLPDSARAMLKGYLQLLDQLRRQIATVTREIRGQIMRTPAGERLRTMPGIDYILSYTILAEVGRIERFRSAKHLAAYSLLAPRAYDSGDDDGEAPKGRHVGHAGRRTLKWAWIEAAHGAVRKGGRFREIFDRRTNGGKRDRNRGYIAVGHELCRIAYILWTKEVDYTETPPPRPGRGKRPGGLRRAAKGIPGRSRPGTGQPEDPMVAVLT

SEQ ID NO: 116890 - protein, 462 aa, unidentified
MARRKRKISLPSDALPPQLATANLHAAGIDVGAEEHWAAVPPCDDPQPVRRFGANTADLEAVADWLWDCGVTTVALESTGVYWIPLFELLETRGFQVLLVDPSKMPRNGRPKTDVHDCQWLQRLHTYGLLSACFRPEDQGVVLRSSLRQRATLLADAARDIQHMQKALTQMNIKLQHVVSDITGVTGLAIIRAILAGERDPTQLARLRAPRCKQDEAAIAAALQGTWRAEHLFALQQALERYAFQHRQLAACDARIASHLETVADQSHGAPLPPKRGQRRRHRNRPAFDPREPLHRMTGVDLPRIEGIDETPAVIVISESGLDMSTWPSETHCTSWLGVSPQRRISGGKVLSSRTRPTTNRAAAALRLAAASLHHSKSALGAYFRRMKSRLGTPKAITATAHKLARLIYSMLKHGTAYVTQGLEAYEQQYRARVVKNLSRKARELGYELVKPVEATSETSLA

SEQ ID NO: 116891 - protein, 356 aa, unidentified
MSQKLNSAIAAIGIDIGKNSFHLVGQDRRGALVLRQKWSRGQVEARLANLPPCLIGMEACVGAHHLSRKLQALGHDARLMPAKYVRPYSKGEKNDYRDAEAIAEAVQRPTMKFVATKTADQLDLQALHRVRERLVGQRTGVINQIRAFLLERGIAVRQGLHFLRAELPSILAKRTDVLSPRMLRVIEDLAGDWRRLDERIENLSDEIAALARQDKGCERLMTVPGIGPIISSAIVAAIGGGDAFSKGRDFGAWLGLVPKQMSTGDRTILGSISRRGNRYLRWLFVQAAWVVLVKITPEGWERYGLRAWIEAAKQRLHRNVLAIALANKLARIAWAVLHKGRAFECVKTNATASQAA

SEQ ID NO: 116892 - protein, 343 aa, unidentified
MEEVATIGLDIAKNVFQIHAADKAGRVIHRQQLKRGRVLAFFGKLEPCKVGIEACASAHYWAREITALGHDVKLIPPAYVKPFVKRQKNDAADAEAIAEAMQRPTMRFVPIKAREQQAGMVLHRTRHLFVRQQTALINAIRAHLAEFGIVARVGRNGVEELVAVIEDRDDDRIPDLVRTCLTALRIQLDALKEHIRILDRRLAGWHRTNDTCRRLDAIPGVGPALATALVASVADPKVFRSGRDFSAWIGLVPKQNSSGGREKLGSITKEGDRYLRSLFCAGALAVIRRAQTHGTRHRPWLTALLARRPTKVAAIALANKLARMAWAIMAKGENYREPVALAR

SEQ ID NO: 116893 - protein, 345 aa, unidentified
MESMYYIGLDVHKKTISYCVKDRSGQIHAEGAIPATRADLDLWMKTLPRPWTAAMEATLFTGWIYDHLLPHAAALKVAHPLMLRAIAAAKKKNDRIDANKIADGLRCDFLPECYMASTEIRERRRTLRYRNLLVRQAVQLKNKISGLLMEAGVSYNKQKLHKVGYFRELLATNQEIGEGLRPLLRICRETLVRLQKTESALVRSLEHDVLLAERVERLMTIPAVGPITALTWVLEIGDVKRFSSIKKAISYCGLCGAEKSSANMSKRTPLSKQRNKHLQSVLIEAAKLAPRRSSGLALVYDRERQKGNANRATLAVARKLVAYLVAVDRSQRDFLVVENQNRTAA

SEQ ID NO: 116894 - protein, 417 aa, unidentified
MDTLFAKVAGLDVHLKQILCAVRCHQQTGKLWRQVRSFGTMTRNLRALADYLQALGVTHVAMEATGVLWKPVWNVLEGRFTLLLVNPRQLKKVPGRKTDVSDAEWIAHLLQCGLLRSSFVPPRPLRELRDLTRHRAQLAGEHTRAANRIHKVLEDANIKLGAVASDILGKSGRRMLRALLAGQDDPEQLADLALRRLRQKIPQLQLALEGCCTEHHRFLLQRLLGHVGYLERQRDELSARIAERLNALLPAAARERLDRIPGLNRTTIENVLAEIGADLSVYPDEHHLASWSGLCPGNEESAGRRLRSRTRQGNRWLRRALVEAAWAASHVKKSYLAAQFRRLAARRGKKRALLAVGHSLLVIIYHVLKHNQEYRDLGPEYFDRLEPERLRRYLVKRLQHLGYDVTLAPSIAEDRAP

SEQ ID NO: 116895 - protein, 351 aa, unidentified
MLIIGVDYHPSFQEIAFLNQETGECGERQLNHSEGEAEKFYRELKQRGVSVRVGMEATGYARWFERLLAELGFELWIGDPAVIKTKRVRKKKTDREDARLLLRLQLEKHFPIIWVPTPENRDLRQLLWHRHRLVQMRTRIMNQLQAVAMNEGKRWKKKLFSAQGRAQLEKLQLAPWASRRRKELLELLDRLNPTIAELTASVEQEAKRRPEVLRLMTHPGVGPITALAFVLIIGTWERFHCGKQIGSYVGLIPCEDSSAGRQRLGHISKQGNTLLRFLLVEAAQAAVRWDPDWRRRYLHLAMRRDRRIAKVAMARRLGVRLYWMWRNGREYSQSVEFGSHAGQPVIVHDVR

SEQ ID NO: 116896 - protein, 457 aa, unidentified
MPPRYKSKRPKSEFSTPLLPTLHPHAGGIDIGARQIHAAVPPGSCSRPVRTFPTFTEDLHALRDWLKECGVTTVAMESTGVYWIPLFQILETAGIEVCLVNARHCKNLPGRKTDVQDCQWLQYLHSVGLLRASFRPADQVCVVRTILRHRDGLVGGASRCVSHLHKALTQMNVQLQHVISDITGVTGLAILEAILAGERDPQKLAALKDHRIKASRDTIAKSLCADWRPEHLFTLKQTYQLWQNHQTLIAGCDEQIATLLAQFDSRIAADAPPMAAAKTTHRKPQRNEPQFDARDQCYRVLGVDLTAVPGFATHTAVLLLCELGPLFADKFPTAKHFASWLGLCPDNRITGGKIFSVRTRDVKSRIAEALRLAAQSLFRAKNYFGDLFRRWRARLGTPEAITAMAHKLARVLWHMLKFKQPFNPEVFANEEARMNKRKLARLQNLATSLNYNLVPIQ

SEQ ID NO: 116897 - protein, 367 aa, unidentified
MKKVSTAAAKATKNFSQPKLTIGLDLGDRSSWYCLLDDVGEVLLEQKLSTTPKAMREVFGSLPRCRIALEMGMHSPWVSRLLSELGHEVIVAHARAVRLIGESRQKDDRLDARTLARLARIDPQLLCPVKHRSAKAQADLTLIRGRAGLVRARTALVNTARGLAKSYGERLRGCNVRNMNPEKAEGLSPELQRALEPLLAGIESLSERIGEYNERIETLAQKSYPQVALLKQVKGVGTLIALTFLLTLEDAHRFRKSRDVGCYLGLQPGRRNSGQSEAQMHISKEGDPYLRTLLVQGAQHILGPFGADSDLRRWGLKLAERGGKNGKKRAIIATARKLAVLLHHLWVSGEVYEPLHNSQQSPLAIAA

SEQ ID NO: 116898 - protein, 420 aa, unidentified
MKVVYQTCCGVDVHKSFLVATIIKTTSGVEPSYQKKRFSTFNNSILQFKEWLVKNQCRDVCMESTGKYWVPVFNLLEDEINITIANPKWVKAVKGNKDDTKDSKWIGDLFRLGLVPGSYIPCKPIRILREFTRNRYKLTSCRTSEKNRYQNALTVCNVALDSVVFDIFGKSATSVIDYLIEQSDNSINYEEITSRLLCSLKKKSDSVIESIEGYQMTDSQKYRMRLIRAHLDYITSTINDIDTMLNSLIAPYENAVQLLCTIPGVDRNSAITVISEIGTDMTPFSNSKRLCCWAGLTPDNNESAGKKKSVRITRAGVYLKPALVQVAHAAVKSDKSPYYKQKYERIMKRRGKKRAIIAIARMILTAIYQMLSTGEAWNPTDLFKIDMPEPMKEKQKEKAIKQAMKLLIREGKISESQLAS

SEQ ID NO: 116899 - protein, 427 aa, unidentified
MKYTQNEKIMQITENTLIIGVDIASDVHYARAFDYRGIELDKVIKFNNDIQGFKVFSDWITKIATNNHKQHVMVGMEPTGHYWFTFAQYLEENNIKIVLVNPYHVKTTKELDDNSPTKNDRKDPKTIAMLMKDGRYMEPYIPKGIYSELRNATNTRWQLVKKLNSIRNQVKRWIKIYFPEFNNVFADWEGKAALIILKHFPTPEKITKLDEPEIIATWRKEISRAVGIKRATKLIKAAKASVGIKEGLIAAENELHILLEEYELLMKQHQNTMNLIEKLTMQIPGVKEILKIKGVGLKTLSGFIAEVGDIERFDHPKKVQKLAGLNLKENSSGKHKGQTTITKRGRKRLRSILFSTIMPIVAKNKEFQQLHKYYTTRKENPLKKKQSLIVLCCKLIRVFFVILKTGVKYDPVKMMNDIKRPTLQEVA

SEQ ID NO: 116900 - protein, 324 aa, unidentified
MHVVGIDVSKGKSMVAVMRPMGEIARKPFEVTHDHKSLDNLARQIITLGSDVRVVMESTGRYHEPMAAVLQSFGLYVSILNPIVIKQYGAGSVRKIKSDKKDALKVAKYGLDNWTFLREHKAVDIIRQQLKLFSRQYNMHTNMTTAMQNNLISLLDKTFPGVNDLFDSSTRIDGHIKWVDFVMDFWHCDVIATLNEEKFIERYRKWCKRKGYNFSQAKAQQVYDASFNNCPTLPKCETTKVLIISSAKTLISALEQRAAVKTEVIRLAKLLPEYECVQAIYGVGEITGAQLIAELGDIRNFANRRSIVAFAGVDPEVNASGEYN

SEQ ID NO: 116901 - protein, 371 aa, unidentified
MGESSKTLYVGLDVHKESIAVAYAPEDRGAEVASLGSIGTRQCDIDKLIRKLQSKGATLVFVYEAGPCGYWLYRYLTRKGLSCHVVAPSLIPKKPGDRVKTDRRDAITLARSMRSGDLTAVYVPQIEDEAIRDLSRGREDAMRDLKATKHRLKAFLLRQDIRYEGRANWNAAHLRWLSEVVCPTRAQQIVFQEYARAVTEQHERLQRLETELHEEVKGWRLYPVVEAIQALRGVELTGAVIVIAELGDLTRFDTPRKLMSYLGLTPSEYSSGERRRQGGITKAGNSHARRALVEGAWAYRYPAKVSRHLQLRLEKLPAEVQAISWKAQVRLCKRYRQLTARGKHVNQVVVAIAREMAAFAWAIARTVPLAP

SEQ ID NO: 116902 - protein, 339 aa, unidentified
MDKSSKKLKTAMNNSNEVYDVLGIDISKAKFDVALIQGNAKIKSKVFANNPEGFAELQAWLNLQSVTNLHGCMEATSTYGNALARFLVEAGYKVSIVNPSRPKAFGKSELSRTKTDRADAKVIARFCAALKPAPWTPPALEIEQLQALVHRLDSLTAMQQQEQNRLATADPILVEAINAHIDFLKEQIEMTKKLIRQHFDQHPHLKSQRDLLTSIPGIAELTATVLLAEIRDISAFDTADQLAAFAGLTPREFSSGSSIHGKPRLSKIGNSRLRKSLFMPAIVARRYNAPISAFCDRLTAKGKSKMSVIGAVMHKLLRQVFGVLKSQRSFDPNFVQIPS

SEQ ID NO: 116903 - protein, 407 aa, unidentified
MTTTTKKKVRFVRPNSSTSSTPRLDSGETAHVGVDVHKASHHVAVVTDLRGLVASRTPPADPESLSERPKPIGSQVARVVYEAGPTGFTLARRLRSSGLRAGVIAPSKTPTMPGPEAESDRLDRRKLAVFARKGPLQPVRVPEEREGADRRVLRLREQLARKLRAAQQQVQAFLLQHGIAEPAGLTRWTAASVDAPRRLELTPEPRLRPDVMLDERQHDRERVARAPRRLEESAGAGRHRETVATPRTAPGVGPITAMTSRVELHDPARFRDGGQVARVIGLAPQVSQGGPTRREGRRLKSGNARLRTAPVEAARRWVAGDEAAKARYRRLVATTGNGKKAIAGMARRLAILLWRLSLSGEPYRAAAWRPGPAPATPERPGSRPRPLPERPSSGAGRPRASEDLRVR

SEQ ID NO: 116904 - protein, 415 aa, unidentified
MALKIVYKICCGIDVHKTFVVACIASTNDKGVTSYESHRFSTYTSGLKTLLQWLLDRNCKDVCMESTGKYWIPVYNILEKDCSIVLAHPKYVKAIRGKKTDKKDAKWIADLFKHDLVAGSFMPPADIRQLRDLMRYRFKLTCFKSSEKNRLQNCLTVSNIQLGNVVSDTFGKSAQAILDKILENPADTSFDLEPLVFKSLKKKLPELRDAIDGYITPEQAGKLKVIKSHYENLEARKAELEELILALATPYQQELAILQTAPGISSDFTAIGIISEIGTNMEAFPSAKHLCSWAGLTPTNNESAGKKKSVRVSKAGCYIKPLLVQCANAAIKSKKHPEIRDRYLRIKKRRGHKKAIIAIARMLLTALYHMLKNGENYNSDLYQKSDILPTTREITVEQAILMAQFQGFRIKSATE

SEQ ID NO: 116905 - protein, 355 aa, unidentified
MDSKKYIGMDVHKESISIAVMNGAGKIVMECVVETKASMILQFINGLRGDLQITFEEGTSAAWLYDLLKPYVTKLVVCDPRKNASMREGNQSDKIDARRLAELLRLNHLNPVYHGEHGLRSLKELVRSYLTVTKDLARVMSRVKAIYRSWAIPCTGKQVYAPRHRAEWLGKIGEPGVRRRAEFYYQQLDALRTVRQEVRRELLAEGKKHKAWKRLCQIPSIGPIRSAVLLGILQTPHRFRAKRQLWTYSGLGIETQSSADHRSVNGQLERAKKQISIRGLNRNCNHDLKNLFKGAAIVASSKPGPFQEFYTALLAKGIRPDMARLTLARKIATIVLIVWKRGACFDAQHLKPQTA

SEQ ID NO: 116906 - protein, 341 aa, unidentified
MAIVTLGIDLAKNVFALHGVDQSGKAVLIKPKVARGQLLELVAQLPPCLIGLEACSGAHHWAREFRRHGHTVKLMAPKFVAPYRMSGKRGKNDAADAAAICEAVTRPNMRFVPVKDIDQQAILCLHRTRQGFVEERTALYNRLRGLIAEFGIVLPQKVERLRREIGAHLEALPGWANHCVGDLLAHADRLKERIEEYDRAISVAARQDLRSRRLMQLPGIGPTTASALIASLGGGHDFKNGRQLAAWAGLVPGQYSSGGKPRLGRITKVGDAYLRSLLVMGARAILAGLGEKQDRFSRWARSLVERRGYWKAAVAIAAKNLRLAWAVLHYGEDFRLNAETA

SEQ ID NO: 116907 - protein, 342 aa, unidentified
MTTIKYFVGVDIASSTFTACVGTTPWKVVLKAHPFENTENGYQTFLDWLTSQQIGAKESVVCMEATGVYSEGLAYFLFATGYPVAVQSPLEVKRTFKPYGPKTDAVDSLQIAEYACRHIDKLSFWQPRNELLEQVKALLATREQFVSQNVAHKNALQAIQRKPVRTLFAEQAHTQMIEQFKKHIQAIDHEIRRLIESDPTFKEMLLLLLSVPGVGLLLASHMLLLTQISLDHKELASYLGIAPNQHSSGTSVFKHATSRHFGPAAVRKLLYLASCSVRTHQTQFTSYFARKTREAKPPKLVLNNIANKLIKIICAVLLTKTAFIQNYHSVQPLVFQNTLTES

SEQ ID NO: 116908 - protein, 384 aa, unidentified
MQKPNDLNQSRIVLKQDSTLIAVIEMSLSSWLVAGIVPGVERQPLKKLEVDESALLKLLNRWREEAEKAGRRIERITVAFEAGRDGFWLARWLRARGIEAHVIHASSVAVSREHRRAKTDRLDTELLKRAFLGWLRGERDHCKMVAIPTTKDEDAKRPNRERQSLVGEQTRIVNRMKAALIRLGIRGFNPKLKKAAGRLEDLRTPEGEPIPPNTLAELHRDMERRRLVSDQIRQIEEARLERMEQAPGDGPHAMVRLIARVIGVGIETADMLVHEVLSRKLRDRRAVARYAGLTGAPDESGSKRREKGLAKAGNARVRGGMIQLAWRFLLFQKDSALAQWYRTRTEGGRNRKTIIVALARKLLIALWRLVTTGEVPAGVVLRAA

SEQ ID NO: 116909 - protein, 342 aa, unidentified
MEKVSIIGLDLAKWSFQAHGALADGGVGFRKKFSREKVLGFFAEQPRCVVAMEACGSAHHWGRAINDLGHEVRLIPPAYVKPFVKRQKNDATDAEAIAEAASRPTMRFVAVKTEGQQARAMLFRTRDLLVRQRTQLINALRGHLSEHGVVAAQGPANVKVLEEAIEDQTTSLPLLVVELARVFLDQIEGLSKTIAKLEKVTAQEATGTETTRRLQTMPGVGPITALAIETFAPPMDVFKRGRDFAAWLGLVPRQQSTGGKQVLGKISKMGQRDIRRLLIIGAMTLVRAALRKGAPEGSWLQRMLARKPKMLVAIALANKMARSVWAMLAKREDFRVPRVAAI

SEQ ID NO: 116910 - protein, 423 aa, unidentified
MFKILKFNCCGLDVHKTWIYACIGITDANFRTEYYEARFSSFPKDLRRLAAWLQEHKCEEVCMESAGKYWIPVFNVLEETCKVTLAHPKYTKPQKGNKTDRKDARWICDLFMCGMIKPSFIPPPAIRHLRDLIRYRIKLTNMLTSEKNRAQNCLTVSNLKLDDVFADVFGKSARSITEYILSHPGEKFDVAPFVDRRCKTPIDQIQAAVDGAISPEQAVKLRECLNHIDELNAHRDRIESEILQLVESFSAQLALIRTVPGLDKDPMTAILILSEIGSDMSAFPTAKNLVSWAGCCPRNDKSAKHVKSTRIAQAGCYLKPLLVQVANALLHSNKHPEFTERYRRIKSHRGHKKAMIAICKMLLTAIWNILSTGEVYNPSGYLIQTPRPTNETKVLTQKQALELLRLRGFVIKDDPVEPEPLPA

SEQ ID NO: 116911 - protein, 313 aa, unidentified
MVIIGCDYHPGFQQIAFVDTETGELQERALQHREEAEKFYRERAAQGLKVCVGMEASGHARWFERLLAELTFELWIGDAAEIRTKRVRKQNTDRQDAQLILKLMLKDDFPQIWVPSWENRDLRQLLWHRHRMVQARTRLMNQLQAVALNEGLRCKKRLWREAGRQQLEAFRLAPWASRRRQDLLELLDRLNPTIAELTQAIEREVEKCPEARRLQTHPGVGPLTALAFVLIIGKADRFRCGKQIASYLGLVPLEDSSGSRRRLGHITKQGNSLLRFLLVEAAQVTVRSDPGWRSKYHHLMMRRGRKSAVGYSL

SEQ ID NO: 116912 - protein, 447 aa, unidentified
MKKKSGFPVLHPNAAGIDIASSEHYVAINPETDEQPIRAFGCFTEDLYAIAYWLIKCKVDTVAMEATGIYWVSLYLILEEVGINVVLVNAKHVKNISGKKSDVKDAEWIRQLHSCGLLSASFQPDHFTRTLRTFMRHRKNLTDMAATHIRMMQKAMEQMNIKLQNVIADITGKSGQAIIEAIIKGEHHPEVLVQLLDGRIKASHEKVRKSLEGVWKEENLFELKQSFELYHFYRSKIKECDEQIKAHLTIRTNEIEKEITVSKQKVKTKAKNNKNNLSFDATEMLQQIVGTDLTEIFGITDTNTIEIISEIGLDVSKWPTVKHFTSWLNLAPNNKVSGGKILSSKTQKKKNKAGQIFKLAAYAVQRSKNWLAMFYHRIKSRHGVKKAITATARKIAVVFYKMMKEKIAFNPLSADTYMQTFKEQQLRKLKKQADKLGLMLVQNELVT

SEQ ID NO: 116913 - protein, 346 aa, unidentified
MDITTIGVDLAKSVFQLHGIDSSGKVLIKKQIKRAQMAEYFVNLKPCLIGMEACGSAHHWARKLESFGHTVKLMPPQYVKPYVKTNKNDAADAEAICEAVTRPNMHFVPIKSTEQQAILSLHRIRQGYVKARTAQANQIRGLLAEFGLEIPQGIGYIGKRVPDILEDASNELPGILRIEIQSLLEHLNELDTRADHCEKKIVAWHKQSETSKKLEAIPGIGPLTATALVASIGEAKNFKNGRQVAAWIGLVPRQHSSGGKQNLLGISKRGDIYLRTLLIHGARSVIYRSGQKENPTDRQGWLNQLTQRRNKNVAAVALANKNARIVWALLNHNRDYQDNHKMLVAA

SEQ ID NO: 116914 - protein, 494 aa, unidentified
MLLHPTRVNVSDGRDGQGWRKVALLMAQKHSLNPSSLAPAQLGQETLYVGVDIGKHGHVGGFLSTTLLARHRRFEHCPALSFENTREGFHTLIARIQAFVPLTQVQVLLEVTGHYHRALMQYLQDLGIPVYIIHVQKRPEGLLKTDKRDALNLANMLYNQLEKGIQVSEPLQAVRHLLPPSQAAAHLRGMVQHHAELVQESTQRKNKLTSICDELFPEFTHLLRNPNLSTALALRSRFPTPAALAAATFWELREARGRTCSVSNAKLLELQRLAGQSIGVTDPARVGGLVFAQKQLMAELKLLEEHLAELETEIIQVVEQSRVGKILTSIPGIGSMAAATLIATIGNIANFERPSQLKSYFGWAPKVAQSGRSLDWAHLSPRGVRQTKHTMYLVVWRAIQWDSEWKEIYERLLPRKCRTDERTHRLIGREKVIGRLAGQMTSVIYALLKQDYELLMRTEPGKEPPEPTLYDREVHHQHRVGLDRFSREREQQSG

SEQ ID NO: 116915 - protein, 343 aa, unidentified
MYYIGLDVHKKTIGYCVKDATGHVHREGKIGSTRRELDAWIQTLPQPRMMAMEATIFTGWIYDYLLPHAEKVKVAHPWMLRAIAASKKKNDRIDAGKIADCLRCDFLPECPMASTEIRDRRRTLRYRHLVVRQVVQMKNRISGLLMESGISYDKQRLHKMGYFTELFSTNEEISDSIRPLLRLGREHILRGQRLDRGLISSLERDPLLSERLRRLRTIPGVGAITALTWALEIGDYTRFPSVKQAISYCGLCGAEKSSADKVMRMPISKQRNKHIQHVLVEAAKLAPRYSHELALLRDKEIQRGNKNRATLAVARKLVAYMLAVDRRKQDFVLAEELAAKAVT

SEQ ID NO: 116916 - protein, 401 aa, unidentified
MHGGYEVFLGLDVGKGDHHAVGLTPDGERLHDAPLANTEAKLRQLFDKLARHGRVLVVVDQPASIGALPVAVARACGHQVTYLPGLAMRRIADLHPGNAKTDARDAYVIADAARTLPHTLRRVDTGDETLAELQVLVGYDDDLAGEATRLANRIRGLLTQIHPPLERALGPKIQHPAVLELLSRCGGPAGLRAAGRRQLTTIALTRAPRMGARLVEAVLAALDEQTVTVPGTTAAETILPRLADSLRDVLRQRDQVAGEVEGMLDDHPLAQVLTSMPGVGVRTCARILLEIGDASAFATPDHLAAYAGLAPVTRRSGSSIRGEHPPRGGNKQLKRAFFLAAFAALAHPESRTYYDRKRAEGKRHNAALICLARRRCDVLHAMLRNKTLYRSHSADQLSAAA

SEQ ID NO: 116917 - protein, 349 aa, unidentified
MKDQAIHYLGLDVHQATTVATSRNESGTIVLKATVPTEAKAIVGLVRSQGPRVHVAFEEGTQAQWLHDLLEPVAERVIVCNVRGKKELANKNDDIDSGLLSERLRLGSLKGVYHGATSVLALKEMVRSYGNLVEDATQVMQRIKAMFRARAIPTPGTGVYGTRQRADWMSKLKGSGVRLRAESLFAQLDALQPLRRKAKEAMIAEARRQPAWKILRSIPFLGPVRVAQIIAIVGTPFRFRGKRRFWPYIGLGVVTHSSADKEIVAGTIRRRRRAPLTRGLNRNHNPILKDVFKSAATAAAHKDGPLKNLYKESLDRGVDADMALLTLARKISSVAPRLWKKESSGIQRN

SEQ ID NO: 116918 - protein, 383 aa, unidentified
MFSSSSADASCSDSTRTIFLALELSRRSWLVALHAPDAAKVELHRLPAGDGQAVLDLLARIRTRVERRTGVSPHVSCCYEAGRDGFWLHRLLEAHGVTSHVMDPSSLQVDRRARRAKTDRLDAQALLRALMAWTRGEPKVCSMVRPPSPDEEDARRPSRERATLLQERIRLVNRIQGLCATQGIDDYEPLRPDRRQRLAQLVTGDGRPLPPRLSAEIARQLDWLELVLRHLAEVETRRDAEAAAARAASSSKLGALLQVRSIGPELATVLAKEVFYRCFASRRHVAAYVGLTPSPFASGRRSREQGITKAGNARARKALIELAWLWLRNQPDSALAAWFRSRVGSATGRVRRIAIVALARKLLILLWRYVETGALPADVAVKP

SEQ ID NO: 116919 - protein, 399 aa, unidentified
MLAVGIDVSKSKSAAAILNPDGTVHTKPFEFRHSQPEMDALIRYIKDQNQPVTILMENTGHYHYPVLKALEVAGLPVCLINAYQMKKYGDMELRKAKTDKKDALRIARYALEKGYSLVPHTSMDQKYEDLRFLARQYDQRMGTLTTNKVFLINLLDETMPGITKLLSLTTRDPETSLTMLFIKRFKSYDRIKKMGRTRFLDSYNKLARKSRNRRAYGYGLAIYELAVNSITTRGENEFTLAAQDQCVDLVSESQKAADAIILQMQTLAETLPEYAVLRSMAGVGDRLGPLILAEIGDIRRFHSGKALNAYAGNDAPPYQSGTFESHNRHISKRGNAALRKYCFEVMQALKLTRPQDDPVYLFLIKKEQEGKPYNVAKMAGVNKFLRIYYARAMEALRLQ

SEQ ID NO: 116920 - protein, 317 aa, unidentified
MEAPLIFVGIDVSKAQLDVAIRPSAQSLSVTNDRAGIKSLIKHLKKLRPQLVVLEATGGLERQVLSALIAGEIPVVMANPRHIRDFAKSIGQLAKTDRIDASVIAHYAEAVRPKPRPLPDEASLELRALSARRRQVLDMIVAEKNRLATASKVVKKRITAHIAYLEQELNDADQDLDRFIEKNAAWKENQQILCSMPSIGPVSSRTLLVELPELGALDRKKISALVGVAPFPRDSATLKGRRTIWGGRASVRSALFMATVVATRFNPVIRDFYKRLKAKGKPSKVCLVACMHKLLTILNAMIKNKIRWSENFTRQTT

SEQ ID NO: 116921 - protein, 339 aa, unidentified
MKVSTLGIDLAKNVFQLHGVGCNGQTVLKKKLTRDKFLPFLMQLEPCLIGMEACASSHHFARVLRQYGHEVKLIPPQYVKPYVKTNKTDAADAEAICEAVARPNMRFVQIKTAEQQAILVLHTERNILIRERTACANSMRAILAEFGIIMPRTLSQLYKKIPEILEEYDNELSAFVRCSVARQLEHLQGVEDQITLIEQELSRWAKTQPACQRVMKVPGVGLMTATYLVASVGNGQQFHSAKQFAAWLGLVPREFSSGGKQRLGRISKRSDSYFRYLLVHGARAVAAVIERHKDNMPWLYRLLNKKAYNVAVVAQANKTARILWSMLVHHTEYRTLSAV

SEQ ID NO: 116922 - protein, 415 aa, unidentified
MSNQRRWYAGVDWGSLSHCVFLTDSDGRKIGEKVFKHGGEGLAEMAAWLMAASGAAEPSQILVAIEVPHGPVVETLIERGFKVHAINPKQMDRFRDRFTMAGAKDDSRDAEVMASCLRTDPRCFRLLAAADPIIVELREWSRIAEDLGVERNRLANRLREQLWRYFPALLALEDDLGAEWLLELWEAAPTPQKASRLRETTVAKLLKRHRIRRLDAASIVEALRKPPVQVAAGTVEAASAHIASLVPRIRLVNRQLKDAHSRIDILTTRLMPVDEAEPGQKKQHDAEILASLPGVGRTVLATLLAEAWDALQRRDYAALRSLTGVAPVTKQSGKSCFVIRRQACNDRLANAVYHWARVAVQHDPRSRSKYAELRRRGHSHGRALRSVADRLLNVACAMLKSGAAFNPSSAAKKPA

SEQ ID NO: 116923 - protein, 397 aa, unidentified
MKEVYRRCCGMDVHQQTVVVCVLPPVGSEGQTIRKVYGTFRNDLIRMRVWLKQLKVTEIAMESTGVYWRPIWNVLEEQGFERLLLVNPLQVKALQGRKSDGRDCQRIAEFLEDKRLDGSFVPPPEIRQLRLMLRHRVALLEQRNEVHNQIRDLLETVGIKLSSVVTDLMGASGRRIIEALVGGEDSPELLSWKVRGRLRKKEKQVRESLKGYFSEFHRTMLQAYYKHYQFLTSEIAWLEVQVEEHMKPHAELVVLLVTIRAHCASWAGVVPGEDESAGKQRSRRCRKGNRTLRRVLTQAAWAASHCKHGYLRALFYRIKARRGWGKAILALAHKILLIAYTIIKERVPYRELGDDYFDKLNPARTVKRLVHRLERMGLQVEVSELRSDGPTLDPSAL

SEQ ID NO: 116924 - protein, 334 aa, unidentified
MKYKFFVGIDVSKSTFGVAVLCRDNSQQIVHHVFSNDEKGIKEMGQFLKETFSDYNHTNTLFCMESTGMYCNALLNFFKETSTDVWVENAIQIKRSSGITRGKQDKIDACRIALYAYKNADAARLWKPAREVMEQIRNLASLRDRMVQTQKKLQTPINEFEAVGEKKMAALLAKSISKSLKAIDADIKQIELKITTLMKQDESLNHLFKLVSSVVGIGFVTATNLIIHTNEFTIMKDCRKLSCFCGVAPFPNQSGTSIRGKTRVSHMANKKLKTNLHMASLTAVKFDPELKTYYERKVAEGKHKMSVLNAVKCKLLARVVSVVNNQKEYVKKAA

SEQ ID NO: 116925 - protein, 416 aa, unidentified
MSNFAESVGAFVGIDWADQKHDIHLQPGDGSAGFHQVIESNGAAVADWILQVRERFGREGAKVLVCLEQTKGALIYQLMEYDFFVLYPINPKTLSSFREAFRPSGAKGDASDAALLAEIVQLHRHRLQPWQPDDVQTRKLAGYCRKRRQAVQSAVRLVQQLRAELKTYYPFALLWLDFETVLSCDFLVRWPTLEALGHAKPQTIGKFFYGHGCRRPEKIEALLAERSKALPITSDTAIIEPAAANVRLLAAQLRVILTMLPEFDRQISELFGAHPDAPIFASFPGAGAQLAPRLLTAFGSDRQRLHSAEQMSVITGIAPIQIASGKSRLTAKRWACPKFLRQSFHEFANYSLPHCAWAKAFYDEQRARNKRHHTAVRALAFKWMRILFACWKNHTPYDAARYQQSLQAHGSAFASA

SEQ ID NO: 116926 - protein, 350 aa, unidentified
MVHVGVDQHKRYSQVAVMDAQGLVLDRRRLEHWDRDGMMDYFAQWGADGSAVLEAGAHWYWLYDLMEECFEEVTLADPSGVRYMADRKIKTDKVDAELLAELDRIGHLPTAHVPTREVRDRRELHRLRIFLVRLSTALKNRVHAVLDKLGIEHPHSDLFGKGGRELLESLELRWPYGLQLEACLAVLDSVKAQIERVRTELRGILKTDQRAELLQSVPGIGELLCYLVLYEIGDIGRFATHKKFASYCALTPTTHQSGATLWHGHTGRRGNLYLKWAFTEAAHTAARKDSALGAFYRRQKARKGAGRAALAVAHKLAVATYHILKRKEPYRYNHLSKVHLGKPVVILGRP

SEQ ID NO: 116927 - protein, 347 aa, unidentified
MSISMIGLDTAKAVFQVHAVDKEGKAEMRRKVRRDELIPFFEKQETCTVVMEACGAAHHWARMLSALGHDVKLIAPEAVSPFVKKGRKNDAADAAAICEAASRPDVKFVPAKSLEQQGVLALHSARSLLVKQQTMLANAMRGLATEFGLIVPKGLGKLNDLSLLVNQDETFPNKARQAFTCLFDHCCAAAAGLQVFEAEIVAHARHDETARRLATIPGIGPITASLIAATVSDIGLFASARHFAAWLGLVPRQYSTGGKSKLGRITKAGNRDIRRLLVLGATSMASRASQWNSTAGAWTRAVLERRPFRLATVALANKMARIAWALMTRKEVYRSKQDITVAANAAV

SEQ ID NO: 116928 - protein, 341 aa, unidentified
MEKATIIGLDLAKRVFQVHAASKDGRPVLRKKVSRAQLLGFLAKQPPAMVAMEACATAHQWGRAIGGLGHEVRLVPPIYVKPFVRRQKNDVADAEAIAEAASRPTMRFVALKTEEQQARSMIFRTRDLLVRQRTQLVNALRGHLAEHGIVAAHGLAKVKVLASAMRDTGSLHPLVCELGERYLEHIARLDVEIAELDKRLRRSSKDDETLKRLQSMPGMGPITAAAIEAFAPPMATFKRGRDFAAWLGLVPRQHTTGGKPRLGRTSKMGQRDIRRLLIIGAMTIVRWAVRKGAARGAWLARRLAEKPRLVAAIALANKMARSVWAMLSKGEDYRGSALAPA

SEQ ID NO: 116929 - protein, 429 aa, unidentified
MNYTQNEKIEQVTDSTMVVGVDIGSQIHYARAFDNRGRELTKRIFSFHNDLEGFNSFNLWAETLKTENEKTAVLIGCEPTGHYWFAFAKYVNDHQKRLVMVNPFSVKKIKELDDNSPKKTDSKDPKTIAKLVVDGRYSIPYMPEGIYAEIRDLVYSRDRIMKQHNISANRIQRWLAIYFPEYLGLYTRFDAISGLAVLEKAPLPKDVIALGVNGIRKIWHDKKMRGRGVTEDRAKTLVEAAHNSVGLDGGIGTKSELYMLLEEHRLWTSQLEAVNKVLEEMILKVPHVEKLLAIKGVGSITIAGFIAEVGDIRRFDSPKQIQKYAGLELVENSSGKHKGRTRISKRGRRKLRKTLYQVMVPLLARNKEFRGIYDYYVTRVKNPLKRRQAMVAVSCKLIRVFYAVLTKGVEYDRFKMMSDIHRKSDIIAA

SEQ ID NO: 116930 - protein, 394 aa, unidentified
MKLFVGIDVSSEKLDVCFLTDDNQLSILSEISVANDIEGASFIRETILEFNDSYHFDQIVIGMESTSMYSFHPSMFFHEDEKLKKLNTLVTIENPFRVKQFSRMFDENKTDRNDALRIADFLRIQRFTTSPIKEEKYMALQRLTRTRYQLIKQLIRTKQHFLENLTYKCNTLAREMRDESTSLFSATLISLMTEDFTLDELAELPLEAFCDLLQEKGKGRFKQPEKIAKAIQRAITMSYRLGALAQESINVVLSVLVREIRALEKNIKELDKAIEQVIVVIPEYQCLTSIPGVGKVYAAGLIAEIGQIERFEDQTKLAKYAGLSWKVNQSGNYQSQNTPLTKQGNRYFRYYLVEAANSVKNYLPEYKGGSKASTQTCTRPNRKKIYASGGYATT

SEQ ID NO: 116931 - protein, 354 aa, unidentified
MEIYTETIDKSKTLYIGIDVHKTTWHVTIIQEEEIRFSGSLTAQWRTLQQLLERYRSPGISCQAVYEAGYFGYWLHDRLEEYGVCCIVTPPSLIPIEYGNHVKTDRRDSQKLARLLSKGLLKRVVVPTEQERHHRHVVRRRRQLANDRVRVQNRIKADLRFYGIEFPDCRGRWSTIYLENLSRLHWNDRWIEESFHRLLEQYEFLTEQIKKQTQLISELAETEQYRDRVTLLVSIPGIGVLTAMELLVELQDVARFRTAKQLAAYVGLTPSQYSSGDHVRMGRITATGKNRLRGLLIESAWHLIAKDPAMREKYDAIKLRAGAKRAIVAIARHLLIRARRLILNRQSYVFGLVA

SEQ ID NO: 116932 - protein, 337 aa, unidentified
MKYSGIDLHSNNAVVAVIDDQDRVLYCKRLANDLSSIIAVLASFNEDLQGVVVESTYNWYWLVDGLVAAGFAVHLANTSAIKQYEGLKYAGDERDAVFLAHIFRLGLLPEGYIYPPEERGLRDLARKRIQLVQQRTLNILSIENIVARQLNLRLNAQQVRHLDNAAVTALRLPPHIECALMANLAVVRTLQAQIHAIETVLHHTVKLRPEFAILKTAPGIGETLATTIMLETGSIARFHSVGQFSSYCRCVESKRISNGKKKGEGNAKNGNKYLSWAFIEAAAVAMRSCPQARRFYDRKRARRMPVVAMKALAHKLARAAFYMLRDGKPFEVTKCFG

SEQ ID NO: 116933 - protein, 342 aa, unidentified
MNIHTIGIDLGKTSFHLVGLNERGEVVVRKRFSRAQLLRFTANRKVHVIGMESCGGAHFLGRALQEQGHAVRLIPAQYVKPYVKTNKNDYVDAEAIAEAVGRPTMRFVPIKSDDQLDLQSLHRVRERWVTRRTAVINQIRGLLLERGITVRKGRRYIEAALPGILEDADSKLSGTLRLLLAQLKLELDQTALRLQEAEALIEQTVQENEACQRLVKVPGIGPVTATAVIAAIGNGAAFRKGREFAAWMGVVPREHSTGGKQKLLGISKRGDRYLRKLFVQCARAVLQQKSKQTPGLKAWLEKLTSHTHRHAAAVALANKLARMAWAVLATGEAYRPPLPAAA

SEQ ID NO: 116934 - protein, 370 aa, unidentified
MNEPITSFVGLDIHKDSIAIAVAEAGRSAPRFVGTTVPTLNSLCKALGRCAQPRRTLVVYEAGPCGYGWSRHLNAHGWRCEVIAPTSIVRSAGEKRLKTDRRDALLLARESRSGDLLKVVTPDERDEAIRDLSRAREDVSAARLRARLQLKAMLLRHGRDYHGKSSWTEAHERHLATIRFAHPAQEIAFNEYRQAIRDAHERLERLTQALREQCEHWRMNPLIKALMCMRGFDFVAAATFIAELGDLSRFAHPRALMAYLGLVPSEYSSGNTRRQGPITKTGNKHARRILVESAWTYRFKPQVSRLLQVRQQGQPKAVRDIAWRAQLRLAKRYRSLSMRRRLPQNKVCIAIARELAGFIWDLARHVPIAA

SEQ ID NO: 116935 - protein, 358 aa, unidentified
MDQQHQPEQHYAGLDVSLDATAICVLDAKGAVVWRGKCASTPEAIRDALRQHAPALVRAGLETGQLSNWLTHGLRRLGVPVVCLDARHAKAALKLQLNKTDANDALGLAQIVRTGWYREVAVKGMDAQTLRLLLVARAQLVSQRQALANTVRGLLKTFGLRIARGSGGLFAPRVREAAKGNDALLALVEPMLLAWQALREQAAILDRQILARAKEDATARRLMTVPGVGVVVALAYMAVIDDPARFQRSSSVGAYVGLTPKRHQSGEEDWSGHISRCGDDLLRTYLFEAATVLLHRHSRACALRGWGLALAKRVGMRRAKVAVARKIAVLLHTLWRRGEDFRWPEPAAASPASTATAA

SEQ ID NO: 116936 - protein, 255 aa, unidentified
MSQPNPLCVGIDVSKATLDIAASSDVAQFTVSNDSDGFNAIITGLRRHSVALVLMEATGGLEVAVACSLQAEGFEVAVVNPRQARDFARAMGYLAKTDRIDARVLTQMAEVINRHPERKRFIRALPDAERQALAAMVVRRRQLIAMLVAERNRLHPFHPQNKKSINTIIKALEDELVRLEKEMDSHIRNHFKEIAERLSSIKGVGTMTVSAMLAEIPELGTLSRREISALIGVAPVNRDSGTMRGRRTILAAGLA

SEQ ID NO: 116937 - protein, 346 aa, unidentified
MHHSTTVGVDLAKNVIQVSVVNGRGKELLNRSLTRKKFAEFLGKQKPALVAFESCATAHYWARAAERHGHEARIIPAKAVAPFRQGHKTDSNDALAVAEAARRPNIKEAPIKTVEQQGSQAILRARDRLIQECIAQSNHLRGILLEFGIAIPQGFAALLRTLPEVLEDGDNDLPDFYRPTLHRMYRRMLELRQDIDEMTREVTELVKNHQVCIRLTAIEGIGPIGAMSLHATLGSGKAFSKGREASAYVGLTPRQYSSGGKANIVGLSKRVGNRKLRSVLIQGALAYVYRMKEPRTGKDLWLQALIERAGPRRAAVALANKNVRTAWALVAQGTEYQRRGQLEMAA

SEQ ID NO: 116938 - protein, 427 aa, unidentified
MNYTQNEKIMSITEKTLVVGVDIAKEIHYARAFDYRGIELAKVFRFENTREGLEAFKEWLASLAKEEDKSSSVVGMEPTGHYWFNLGHFLEGEGIRLVLVNPFHVKRSKELDDNSPTKNDRKDPKTIAKLVIDGRYSVPYIPKGIYSDLRIVMDIRDSINKALIRIKNRVTNWLDKYFPEFFDVFSDWEGKAALITLREFPIPGKIIATGIDNIVATWKKEISRAIGAKRAARLLEAAQGSIGIKEGLRMAQKELRTILQQYDLYMGQLRDTEADMEELALQVPGVNEMLTIKGVGITTAAGFVAEVGDISRFTHPSQIQKLAGLNLVESSSGKHKGQTTISKRGRSRLRSIMFKVMMPLVAKNDEFKILHKHYTTRRENPLKKKQSLILLCCKLIRIFYALINKRVAYSPKKLLTNISYLQLQDAA

SEQ ID NO: 116939 - protein, 339 aa, unidentified
MKNTKYFIGLDVHKEKTTHVVKDKIGNIVLEGETATLYSELYEQLEPYLKSSVIGLEASTSYYTLYQHFLNNGYLVKVANTIQLRQLIAKNDRLDAKRLAEMLRLGTFPCSYIPDEKIQRIRSLIQIRHSLMEEKVRCNNRIQAFLDRNGVQMPSYRAFSKKWRYALMHHMGSGRVSMELRHEYDHFVFLEKKLEQVEQEIQGYARTYWSTEYELLQSITGIGPVIACYAIAHILPIERFSSCKKLRRYAGVVPTCKESGNKRSHGHIPKTSSRRLLRWALIQSANTIGKTNTNLGSYYRRKKRQKKNAGIAKVAVASSLIDIIYKVLTTRQPYTPKIC

SEQ ID NO: 116940 - protein, 338 aa, unidentified
MYYTGIDLHKRTSFITTIDQNGKVIFRRNFPNVEELILDYFRNLDGPTKIVIESMCSWYWLYDLLSANNFTTVISNPLKTKAIASAKIKNDKVDSHMLAQLLRADMIATVHVCAIKTRKLKELIRHRRRLVQDSARMKNRIHMLLMKNNINIPVSDLFGKRGMKLLKEVSLPGYHQQQFNSYLALLRYLAEQIEPLTEQIRDLAKKDPMARLLMSIPGIGFLTAMTIIAEIEDIGRFPSYRNLASYAGLVPSLDASADKCRTGRITKQGSPYLRAALVEAAQAIPRTKQSRLNIFFRKRIVRAGYRKAIVATAHKILQYVYYVLKNQVFYSEEYLARA

SEQ ID NO: 116941 - protein, 313 aa, unidentified
MKKTICGVDVSKAKLDVCIEPGHRFASFDNDSAGIAELAAFCREHAVTLVVMEASGGYERRAFVELWEKGISCALTNPRNVRRYAEAMGILEKTDRIDSSVIARFAHAKNLAPTPLPSQAQQRLKALVTRLRQVTDDLTVQKQRRASMFDSTEMRSSIDEVIALLKRQSRSLEGEIASMIDDDPLWAKLAETWREVKGVAGRTVARLHAELPEIGLLSNKAIAKLAGLAPIANDSGKRKGKRSTRGGRAGVRSILFLVAAIAARYDHSLGEFRDRLLKAGKEKMVIRIALARKLLVRLNAKAREARAEYANAT

SEQ ID NO: 116942 - protein, 351 aa, unidentified
MNIVGAFDVHRKQITFDYVEIETGESHRGEIRPADREHLRSSWLEEFAERFCGREAAFALEATTGWRYVVEELQRAGCEAHLAEPADTRALQGRKKRAKTDRIDAKHLRDLLVIERLPESWVPPEHVQEIRTLMRMRHSMVEERSAYLQRIHAQLFHNGCPRQEKELLCAEGREHLQKLDLPGAAPQVVGVCLKMVEHINEELAPIEAELRAYARAQSGCRALMNHYGVGELTSVALLSELGDTRRFSSSKKAVRFAGLDVTVHSSDEKRAAGKLSRQGPPVLRWAAYEAAKGAYRKGSPDHEYYLQTRERVGTNRAALSIARKLIRRAHHTLRELGEEAMSEPVALSSTL

SEQ ID NO: 116943 - protein, 448 aa, unidentified
MDEHDFTLGVDLACSAAHVATLADAAGRLVWSNHRFRTATVELERLWARVPAGARLQLVIEPTRNAWVPLAAWFRARGVTVILVPPEQSADLRRYYQKHTKNDRLDSVLLARLPLLHPNGLNVCQDQGPADPLRRTVRRRAKLVRQRITSLNRLTALLELLGPGYNDAFSGALATKTAQAVLSRYADPRKLLRTPATRLVQVVSQASRGQHGPILVNQLRGAAAEAMALYGMAGVDFAELAADIEAEMRSITTLQAELDQLDTRIQRLYLDADPDQIVQTVPGVGPVLAPAIHGLFGDPHRFANLAAARAFTALVPDTNESGISQAPARPTKAGDPGLRTALFLAANLARQTDPTLAAKYRRLVVQRRLHHNSAVCHLAAILATRIVACLRAGTPYQIHGLHGHAITAAQGRVLCQELRVQPHERPRPPRRQQKAGQATSKVAQRLTA

SEQ ID NO: 116944 - protein, 348 aa, unidentified
MIVLGADMHKGSHSIAAVAGETGELLDDKTVRVGDRGFAAALAWARGLGPERVWALEDCRHVSGAFERFLVVRGECVVRVATRLMAGERRGGRERGKSDLIDAVAVARAALREGLERLPVAQLAGVELEIRLLVDHRERLVRMRSALNNDLLWHLHDLWPDQTLPGSALLSNKWASRMARRLARHEQSARVRIARDELRQLRELSRVIDELEREIAELVARVAPQLLAEPGIGPLTAGKLIGEIAGAQRFSSDAKLARAGGIAPIPVSSGKTNRHRLDRGGNRQINTAIHRVAVTRARCHPETRAYIERKRSEGKTNRDAIRCLKRHLARRVWLLLQPQDPRPLPSIV

SEQ ID NO: 116945 - protein, 412 aa, unidentified
MQILYPCCGGLDVHAKNVVACLIRDGRKQIRTFSTMTDDLLALLDWLTAEGCTHVAIESTGVYWKPIFNILEGSMQVLLVNAREVKAVPGRKTDVRDCEWLADLLRHGLLRASFIPSAHIRGLRELTRHRQSLVRELTAVANRVQKLIESANIKLAQVASDALGSSGRAMLRALAAGEEDVTKMAELAKGRMKAKKPQLRLALKGKLTTPQRWVLEELLDHYEELEVRIAKTNERIEVEVAQDHHPEVAEAVELLKTIPGVGQSVAQTVIAEIGVDMGRFPSDAHLSSWAGMCPGNNESAGKRRSGKTTKGSPYLRAALVQAAWAASCTKQTSLSAQYHRLYKRLGRKKALVAVGHSLLVIIYHVLQNRAGYAELGGNYFDSLQVDRQRKRLIKKLASLGVKVTVEALSEAA

SEQ ID NO: 116946 - protein, 424 aa, unidentified
MPYKIAGIDVHKRMLAVVVSDVEIDGEYQFERCQFASNPAQLRLLAEWLLEQRVEEVVMESTAQYWKPVWGALERYWKPVCQKREGARPMSGTLYLAQAQSNRARQGRKRDFPDAERLVKRLVAQELTLSFVPAPEQRLWRTVTRAKHQQTRNRVQLQNRLEALLEEAHLKLSSLVSDLLGISARRMLKALAKGETDPAALADYRLRATPEQLSDALGACQELHPVYRRLLKAALEELELIDQQIGQFDRETADLLHPYQDQVERLAEVPGLGVDSAQQIIAQVGATAATFPSERHLSSWVGVCPGDTQSAGVNYSHRSPKGNRPMRRILNQAANAAVKYKGSIFEILYRRYVPRFGHNQTIGLIAHRLCRLIWKILHQGVRYEERGPALSQRSKQRRTARMSCELRMLGYRVELANFQSAVRA

SEQ ID NO: 116947 - protein, 354 aa, unidentified
MRPSPRPHYPSLKYVVGIDIAKDTFVACFGQLDAQQQLRFGKQTTFDNTPAGFAGLLHWTAQQQQEEVPLWFVVEATGVYYEGLAYFLADQQQALSVLLPNKAKHFAQSTELKSKTDQLDARLLCRLGLERQLPAWQPPTPALRRLRALARERQTLTEQATRLKARLHAYRHSYAPEARTMERLVAQQALLKDQQRGVDQDLATLLADEPELARKLAHLTSVPGIGPATAIVIVAETNGFVLVENERQLASYAGLDVAQRQSGSLARATRISHRGNVRLRTALYMPAMSSLRYNPQQIAFYARLRARQPNGKPGVIAVMRKLLLLCYSLWKNDRPYDPRFHPAHLVKNEVAPAA

SEQ ID NO: 116948 - protein, 414 aa, unidentified
MALKIVYQICCGIDVHKTFVVACIASTNYKGVTVYKSHRFSTYTNGLKELLQWLSDNNCKDVCMESTGKYWIPVFNVLENSCNIVLAHPKYVKAIRGKKTDKKDAKWIADLFKHDLVAGSFMPPSDIRQLRDLMRYRFKLTCFMSSEKNRLQNCLTVSNIQLGNVVSDTFGKSSQKILDKILENPLDTSFDIESLIHSSMKKKLPELELAVDGYITPEQAAKLKIIKKHFEDLKNRKAELESIITGLAKPYQSEIDIILTAPSFKNIFTAITLISEIGAIMNVFPTAKHLCSWAGLTPTNNESAGKKKSVRVSKAGCYIKPLLVQCATAIVKSEKHPEIRNRYLRIKKRRSHKKAIIAISRMLLTAIYNMLKNKTPYNAELYKKSDVFPVNREITIDQAIILAQNQGYRIKSAI

SEQ ID NO: 116949 - protein, 357 aa, unidentified
MVEGSWVGLDVHARSVVAGVLDGVSGELRTLGVPAVSEQTVAWLRQLPAPVRVAYEAGPTGYGLARACAAAGIACMVAAPSKIPRAPGDRVKTDRRDAERLARLLRLGELVAVRVPELHEEAARDLVRAREDARGDLMRARHRLSKLLLRHGLLYDASAWTLAHDAWLRRQRFERRPLALAFDESYGAVVQAKTRRDALDRAIVELAAEPSFVNVVGRLVCLRGVSTLTALALTVELGDWQRFRPQSLGPFLGLTPSEDSSGERRRQGAITKTGNTHARRLLVEAAWQQRRPLRASAALERRRQGQPAAVRSQADHSARRLHQRWHALESRGKRRTVVAVAVARELAGHCWALATMK

SEQ ID NO: 116950 - protein, 346 aa, unidentified
MGDIVEVAWVGIDAGKVSHHATLVDADGTIVWSRQVRNDQAAVEQLIAKAAATATTVRWAVDLTSAGAALLLALLIAAGQRVVYVPGTVVNRMSDTFAGEAKTDARDSYVIAETARLRRDLTELITPNELVAELALLAAHRADLMADWVRGVNRLRELLTRVFPALERSFDYTTRSALILVSRYSTPDAIRDADADQLAAYLRSKEAHRPSIPGMVAKAHAAAAAQTVRLPGEAATAALITRQARKLLDLDREIKDLDKQITERFRAHPQARIIESMPGMGPILGAEFIAITAGDLAAFGTAARLATYAGLAPCPTIPASAKGCATGPAATTAGCATSSTWPPSRA

SEQ ID NO: 116951 - protein, 343 aa, unidentified
MSEVTTIGLDIAKTVFHAHGADERGRCVFSKRLTRAKLLVFFAAQPRCTVALEACGGAHHWARELTALGHDVRLIPPAYVKPFVKRHKNDAVDAEAICEAAQRPSMRFVAVKSEEQQASALVFRTRDLLVRQRTQLINAIRGHMTEYGWVAPKGPAYVSMLGDLLEDEMGASLPPAAFSMFRVMLDLLADLDERIAALDKEIAQRAREEETARRLMTIPGIGPITATALIALAPAAETFAKGRDFAAWVGLTPTQHSTGGKQKLGATSKMGERTLRRLLIIGASAVILQATRRGTAKGSWLEQMLARKPRMLVTVALANKMARIVWALLAKGGTYRAPTAVAA

SEQ ID NO: 116952 - protein, 503 aa, unidentified
MTVRSVGIDLSLTGMHQAEAIDLDGNRCGHLKFRTTPEGLNSLVNLCFGDGSLPVIVLEPTGLAWLPIILFLRARCPQAVLVRAKQQKASALRRVLREHAKSDRIDALTLARLPWVDPEHLEPLAFSSPDMQRLDRLTRRRDRLAAAVASRKTRISALLLGLFPGLWECFEDPWNPRARWIYRHRLNPFRLTRTSQGQLNTIFARVTPRSSLGIIQRESTALLATAKRLGAVYKPARDAALATDLLFRTWQQEISAELDLLEAEEAQMARLEEEISALYRLLHPQDHLRTIPGVGPRIAPLLLAAIGDAGRFHSAKAFCQWTGVLPRSHQSSNTQRLGLGMGKAGPARVKRALYQAAQYARRWDPELAALYHRQMVDYGKTHKQAMGAVMSHLATRVYTVLKEQRPYQVRDFQGQPLTRTQAGQIVRECLRVPEEVRRLRRHRHRPTKKSIRQEAIHAEVGRWEDSTSHEAADTPQRGIPVPSHPKLEDNTAFQSVQEFAQVS

SEQ ID NO: 116953 - protein, 322 aa, unidentified
MAMLSFGGIDVSKDRLDVMVLPEEQCSSVPNDAAGWAKLVEQLRGFSISAVGIEASGGYERGAVRALLAAGMSVRQVNPFKLRQFARASGVLAKNDPLDARMIASFVAIMPTRPAQRQAPAAERLTEMLAVRRQLSAEKVAAENASRLLEDAMLQRLSRRRIARLGADIDLLDERMVEIVATDVALDRRYRLLSSMPGVGPVLACTLIALLPELGRMSRKQVAALVGVAPYAFESGTLKGRRCIWGGRAHIRQVLYMAAMSASNWNPVLKAFHDRLTAAGKLPKVVIVAVMRKMITMLNAMVRDDVVWADRLSGRHVLPTAR

SEQ ID NO: 116954 - protein, 384 aa, unidentified
MKNDNILFIGLDTHKEQTQVAYTLDHRTAEINDLGRIQTTKTGFVKLARQLQSKYPHATLHFVYEAGPCGYWIYRLLTSLGHCCFLIAPSLIPKKPGDRVKTDKRDAQNLARLLKSNDLHPIYVPEPEDEAVRDLSRAREVAMRDLNDAKHQLKSMFLRNNILYKGSDSWSLKHLRWLTEIVLPHPCQQIVLQEMIQTISERINRLKRLDNELTHQVKQWRYYPVVKAIQAMRGVRLLIATGIITELGDLSRFDTPRKLMKYVGLTPSEHSSGNTRRLGAITKCGNGRARRLLIEGAHSYRYAAKVSKEMQLRQEGLPKTIIDKAWEAQLRLCRRYQRLMMRGKPRNVVITAIAREMIAFIWSISREVVLPRVDPRTRLSRVPA

SEQ ID NO: 116955 - protein, 347 aa, unidentified
MLHAGLDLSRKKLDLCLLSNDGEHLDQLAVAPDVDSLRRLARRIAEVHRQPVCAVVESMTGARLVHDALEQEGWSVEIADAQKVKGLAPLACKTDKIDSQVLATLSQRDLVPAIWLPGPRVREKRELARFRLHLVKHKSALKNRIHSTLINFGRPCPVTDLFGVEGRRLLARLEVPEPWRGNVCASLALIDSLEEQIAELNARLKEGHADHPYIPLLLSAPGIGWVLAFTIAAEIGEIERFPSPQKLTGYTGLCPRVNQSGERDRRGPITKHGPTYLRWALIEATMHALKHPAYSERYQRTKRRLGKQRGAKVAQIDIARRLAHAIWHMLSRKEEFAPRGAALRLAA

SEQ ID NO: 116956 - protein, 343 aa, unidentified
MTVIIGVDPHKATHTAVAVDQAEQELDRVLVRATRRQLEQLQRWAQPFGDRVWAIESAGGLGYLLAQQLVGAGERVVDVPATLASRVRLLGTGRSDKNDPNDARSVAIAALRAPRLAEVQPADHAAVLRLLAKRNLDLSRERNRTANRLHVVLCELVPGGIAKELTVSRAVSLLETVEPAIAVDQARYEMARELLDDVRRLDAKKKEMNHRIASAVDASGTTVTEVFCAGPVVACLVLGYTGDVTRFRDRHHFAAYNGTAPVEMSSAGRRVHRLSRRGNRVLNYAVHIVAVGQIRQAHSEGRAFYDRKVKEGKTKREALRAVKRRISDAIYRQLVIDAAGTHS

SEQ ID NO: 116957 - protein, 331 aa, unidentified
MTNAMRETDSDSGPLDYIGVDMAKARFAWGVHGMRSTQEVGNDENGFEIFLAQLRQRQVGLIVIEATGGLERALACRLLQEGLPVAVVNPRAARQFARSLGHLAKTDAIDALALAHYAHTLAHKADQAGVRLTAPAEHLEFLQAMVLRRQQLMQMRIAELNRRSGPMRVVRKSIDTVLNTLEREIAELEKQIGIHLDRYFKDLDERFETIKGIGPNVCAVVIAFMPELGRVSNARAAKLAGLAPLNDDSGTMRGKRRIWGGRSMVRCALYMASLSAVRYNPVFKLFYQRLLAAGKLKKVALTACAHKLLRVLNAMARTGQVWNAERHAVTP

SEQ ID NO: 116958 - protein, 326 aa, unidentified
MALKTSTIGTVAQTVIGVDVASKHLDAAVHGEPSIKRLNNSPAAIAKWLDALPAGSVIAVESTSRYHEALVHQAHARGFVVYLLNPRDVRHYARALGMRGKTDTLDARVLARYAAHEGSELRPWQPLSPQQSLLEELLRRRGVLVKHQAAIEQSLADSPVLRAGSAALMCEFAKLLKQLDTQIKQACAALTLGSGDFERITSVPGIGLLSGAALLTLFLRLASRGADAVIAFLGLDPRPMDSGQKTGVRRLSKRGPAEWRRLLFNAARSASRTKAWQAVYQHELSKRLSTTAALNILARKLVRVAFSLYKSQSTFDASRVIAPPKA

SEQ ID NO: 116959 - protein, 388 aa, unidentified
MNVGAEKSEPLTAIQTNLGAIFVSLELSRSSWLITSLSPGGGEKMSKHSVPGGDFAGLMERFAQLQEKARRRTGQSFRIIVVQEAGLDGFWIHRALQNEGIESYVVDAASIATPRRRRRAKTDKIDGETLVRALLAYKRGEPRVCAMVKVPTPSEEDRRHLCRERKALTAERVRHVNRIKGFLFSQGVSGYQPLRRDRRQRLEELQTGDGRAFPRHLKALVNRELDRLELLLKQIKTVEAARDALLAVEQTAKPGPAAMLLDIRGIGPEFAAILWSEGLFRHFENRRQIAAYAGLAPTPWQSGAVDREQGVSKAGNPRLRTTLIQLAWLWLRNQPRSALSVWFHERVSRNGGRLRKTTIVALARKLLVALWKYVTAGVVIEGVTMKVA

SEQ ID NO: 116960 - protein, 352 aa, unidentified
MAVLKQVAGIDVAQNELVVSLGRMDHELSLEIFEYKVFPNNQKGFKELITWAQKQVKNDVRIRYVMEATGVYHESLAYYLTEHGCEVSILLPNKISNFFRTLDVNTITDKTASEAITRFGLERKLQIWQKPKEIFRELKQLTRERDQLIADRTLLKNQLHAENAEAFPNKSSITRVNKRIKLIDKQDLEIKAEIAAIVKKDSELIRKIGLVTTIPGVGKLTAVIVLAETNGFELIRSKKQLVSYSGLDVKLKDSGTSVRGRPRISKKGNRHIRKAMYMPALSAMRFNEQHKDLYTRLICKHGIKMKAAVAVQRKVLELIYSIFKSDKPFDKNYIQTSAQKKTEECQYLEQPL

SEQ ID NO: 116961 - protein, 373 aa, unidentified
MPRYSTAFGMDVHLRSTTVCALDAETGEAVTRRFRGNPWGEVAEWMSGFPGPSLAAYESGYLGFAPQRELSGLGVDCVVAAVSKVPRSAADLSSKNDRNDAARMAKAILSHDISPVWVPSPEIEGLRDLAGAHDAATARLAAAKQRLLAFLARRGYAYGGTTPAGNPRRYWTYDFLRWLDKVRPADDGGIRALAALRNEVEAAAETRDDLLAEYRAAVAAGPLSAEVEALQSIKGCGFALAAAFASEVGDFSRFRSGRQVTSYFGLAPKQRSSADSVRLGGISGAGNALVRRLAVEGSWSYVQASHQPKLMPKGSGVPLEVRMHGRKGSERLLRRRGEMLARGMPQAKANAATAAELVRWLWALGAMCREATE

SEQ ID NO: 116962 - protein, 409 aa, unidentified
MRYVGLDVHKRWTQVAWHHEDGSIDRERIATDPVLLQQLAERLRKDDVVALESTTNALPIARLLARRAGTVLISNPLKTRLIAESRTKTDKVDADVLAQLARSGFLPTVWQPTDDVQLARRRAAYHQALGRQLTRVKNRLHAVLHRNLVAAPVADLFCETGRRFLRTVDLPLDERLQVDADLALLAHLEATRAEAARVLAAHAHASPDVQLLMTVPGIDYPTAVGLSAAIGPIERFREPKKLVSYLGLNPIVRQSAERTATGPISKQGRCHARWLLVEAAHCAVRSPGPLRAFFLRLKQRKGTNVAVVAAARKLAVLLHHMLSTGEPYRYAPERSTHEKLARMHYHATGVRRKSGPPKGSKPSPFYGTGLRGRTVRARQDRERLQAAQRQYEQFLNERRQGETVLHEKR

SEQ ID NO: 116963 - protein, 355 aa, unidentified
MKLYKKNTEFVQDKQVFCGIDVHDKQWTLAFFCDGEIVETIQTQPYYKALLNRLANYQSARKISFVYEAGFSGFVLYRQLSKDGYSCIVTPPSRIVKTDQKVKTDKRDATKLAMLLSAHLLKAVTVPPVDVEADRSIVRRHDQLVKSQTRSKNHINSFLKLHDLKPPADIKARWTKKHLAWLAHISFDQPAHEFTFKQLLNNYCTIRKEIKETLLFLRKLSRDPRYQENYQIVTSVKGVGLITGMTFLLELFDISRFSNVNKFSSFMGLTPSQFSSGDHVRLGHITREGNDHMRRVLVESSWTVIRYDPILREKYLRLRARGVNGKKAIVAVARTLAVRLRRCLLDKTPYMVGID

SEQ ID NO: 116964 - protein, 323 aa, unidentified
MVLMDAKGEIINKGRISNQEITKYLQEKVPQETYAVLEATRNWPFMYDLLNEHVQRVDLVHAKGVRAIANAAVKTDQIDASVLAHLARMNYIPKAYAASKEMRDLRQLLRHREWMVNQRSKAKNRIHAVLAAYNLISPATDLFGVAGREYLHEVMEEDLRPSARQVVKDHLAMIDHLTERIRAIEKNISLNERQNHIVNILKSMPGVGRLIALILLAEIGDISRFHSPKALCSWAGLTPKVHSSDAVVQHGHITKEGSRYLRTAMVQAATTACRVSPKWYRVHEHMALRCGRRAARVAVARRLLTVIYYMWKKDQPYQENYGQ

SEQ ID NO: 116965 - protein, 470 aa, unidentified
MKYKQRRKDTWSKRRGPLSLLERIQPDAAGIDCGEKSHFVAVPPDRDAMPVRAFRTFTPDLHQLADWLVRCGVKTVAMESTGVYWIPVYEILEQHGLEVVLVNARHVRNVRGRKSDVLDCEWLQQLHSVGLLQASFRPAAAIVPLRSYLRERGILVEEVAARIQRMQKALTQMNVLLHTVISDLTGATGLKIVRSILAGERDPEVLAAHRDSRCHASREEIVAALTGNYRAEHLFSLRQNYTAYQFHLQQIAECDSAIEALLNTLAAQQPQPSAALPPARRKSNPKGHEPRFDIRTPLHRLTGGADISQIDSIGAQAGLQLIAEIGTDMSRWPSENHFTSWMTLAPNNKVSGGRLLSSRTTPSANRAAVILRRCAMSLARTPTALGAFYRRLAARTSKPTAITATARKLAVLVYRVLSGKLIYNDPGAAAYHELNRTRELKSLRKRASLLGLELVDRCTGAIVLKPDTVS

SEQ ID NO: 116966 - protein, 469 aa, unidentified
MDKSKKQKRKNKKHRKVDISNLEQLNLNAAGIDIGAEHHYVAVPNGRDPEGQDVRHFCTFTADLHKLADWLSQCKIDTVAMESTGVYWIPVFEILDSQGFDVRLVNPRNIKNAPGRKTDVLDCQWIQQLHTYGLLQSSFRPEDQICELRSYLRQRAMLVSYASHHIQHMQKALEQMNIKLNQVISDITGVTGMKIIRAIISGERNPVKLASMRNARCNNSESIIAKALEGNWRSEHIFALQQAVELYDFYKKQIIACESHIQRHLESFDDRSNGIPLEKSPRNSRGSSNKFNFDARRYLHRITGVDVTRIEGIEAPTALNIIGEIGIDMSSWPTEKHFTSWLGLCPGSKISGGKVLSSKTKPSSNRAAHAFRLAAYSLQRSKSAIGAFLRRKKAQIGAPKAITATAHKIARIFYNMLKYGTEYVDLGQEYYEQRYQDRVVANLKRKAKQFGFELVNIKEHELLTELPAS

SEQ ID NO: 116967 - protein, 361 aa, unidentified
MRIIGCDLHARQQALAMLDTTTGETLAVTLKHEGNNVREFYSKLPRPVSVGIEATGSMQWFVNLMEELGIECQVGHPANIRAAEPRKQKHDRRDADLILKLLVENRFPKIWLPSKEQQDLRALLRHRHQWVRIRTRIQNALQAMALANGLRRGPALWSQEGQRTIASLPLAPHAAYRRSELQAMYAKFAKEIEKLNQRVEEQACERPGARLLMTHPGVGPITALATEVFLGDAARFADSKALASYVGMIPSEYSSGERQRFGGLSKQGNPLLRFLWAEAAIHAVRRDPELQRFYRRKLVQKGLGKTRVAVARKLGIRLWIMLRDEIDYNEFCRRGQKQQKSSEACAGMPDRGHGAKQSPAI

SEQ ID NO: 116968 - protein, 359 aa, unidentified
MNKNSMLYVGLDLGDMLSYITIVDQDGVLIEESRLPTTRASFQRKFATLQPCRVAMEVGAHSRWASHLIQDLGHDVLVANARKLRAIYNNPRKGDRADAETLARLARLDPALLSPIHHRSPQAQTDLAVLRSRDAIVRSRTLLINHARSIVKSTGARLPACSADSFAHKAAPDIPILLRPALAPILDTIASLTQHIKSYDQKVEELCSQRYPETSHLREISGVGPLTSLGFILTLEHPDRFPRSRQVGPALGLVPRRDQSGDQDPQLRITKTGDPYLRRLLVGSAQYILGPFGPDCDLRRWGLALAERGGKNAKKRAVIAVARKLAVLLHHLWKTGEIYDPLDLAKKRSQVFEAIAAVA

SEQ ID NO: 116969 - protein, 435 aa, unidentified
MEEVTDEPLYRDRVCGIDIGKAGMVATIRVPSDRDPARRASETRSFGTTKREVLALADWLRCWQVPAVVMEATGDYWKGPFYRLEAEGFECVLADAKQVKNLPGRPKRDPSDSRWLAACFERGAVTSCFVATPEFRIIRLHTRYRRDLTEERGREKQRAEKLLESAAIKVSSVVSDLHGVTGRDIMDHLIAGERDPKALAQLARARARRKIAELEQALEGAEFFTAEHAALLAAMLARIDRVNAEIDELTAMIERLLAPYEEQLEQAESMPGWGRRSAQDAVAETGVDMTRFRTGGHLSSWTGKTPLDNQFGKRTGRAKSKKGNRYLAAVTGETAIAAGKTQTREGARYRRLARRRGKAKAQVAVGNTQLKVYHKLLSNPGMRYQDLGADYYERQRDVRRQIAHHVGKLGALGFEVTLCRIPEPQPDGTGQTQAA

SEQ ID NO: 116970 - protein, 331 aa, unidentified
MSPPIALPRVPFVVGIDVAKARLDIAASPRDPDVAAATAPVAWAIPNDEAGIATLVAQLSAASGLVTLVVLEATGGLEHPVAAALTVAGVNVAVVNPRHVRDFARASGQRAKTDRLDAAVLARFAAVMRPPVRPVADPEAQLLKDVLARRQQLLAMLVAEKQRRQTAVPRVRTGLTRHITWLEQELTTQDRELGELIQASPVWRERDALLQSVPGVGPGLARTLLAAVPELGQGSPRTIAALVGVAPLNCDSGTHRGQRRIWGGRGSVRRVLYMATLTARRFNPVIAAFGRRLEAAGKPFKVVLVACMHNLLTILDAMVRHGAPWRAPAVV

SEQ ID NO: 116971 - protein, 344 aa, unidentified
MKVHVCGIDIGKTVFHLVGLSKEGHIITKKRFSRKQLVTFTVNLPACLIGIEACPGAHFLARILLKQGHDVKLMPAEYVRPFVKSNKNDYVDAEAIAEAVQRPTMRFVPVKNEAQLDLQALHRVRDRWIGRKTAVINQLRGFLLEHGITVSAGPAHLKRPIPSILEDAENLLSPRMRMLLLELREEWNRLEEQIDSSNQELAQFAKKEDGCRRLLTIPGIGPLTATALIAAIGNGTTFRKSRDLAAWLGLVPRQHSTGGKTRLLGISKRGDPYLRRLFVHGGRAVLSRVKRDAHQFGSWLDRLEARSPRNVVIVAMANKIVRIAWAVLTTGRTYRASADVMAIT

SEQ ID NO: 116972 - protein, 343 aa, unidentified
MQTITTIGLDIAKSVFQVHGVDAPGQVVIRRQLKRRHVLSFFEKLPPCLVGIEACASSHYWSRELQALGHTVRLMPPAYVKPYVKRQKNDMADAEAICEAVTRANMRFVPTKTPEQQSCLMLHRTRHLFIRQQTAVINSIRAHLAEFGIVAPVGRKGVTELLRVVADPSDKRLPEVARACLAALGTQLLRLKQQILEFDRMIMAWHRSNQTSKRLHYIPGVGPILATALVASVADPRTFRSGRNFSAWIGLVPKQHSSGGKDRLGSISKQGDRYLRSLFVAGALAVIRYAKVHGTKHRPWLTALLGRRPTKVAAIALANKIARMAWAMMAKGERYKQPVALAA

SEQ ID NO: 116973 - protein, 483 aa, unidentified
MKKRTIYSDQSQELLKLFEDAGSNEKVMCVPIDYAKKDHVVMFCNGHGDILRKPFSVHNSPEGITYLTDQLFRACKHRHIDQDHIFFGCEDPGGSYAENFINKLRSKGWLVASVNAKDAKKQRDNMQASTDRLDLMGIAKTVLNRRGNCAPAQSGIYLNLRNLVRHRRKLVSLTTEVRNRIHTVVDRLLPGFLDEKKSGIAPFSKGSLLLMKDRFSARQIRRRRRKTLIDVLRRSGTPKPEAAAAKLQDYAAQVLNPPDEYIVTLQVSLSQHVKHYYCLQENIEQMQKEIALWLARNQGAFLTTIRGIGIVLAAGVTAELGNPFEQKPLNNLVSYSGIIPRVKQTGGPEGQTYRGRVKKRSNRILKDYVVQSASHIGLHGPTDLMMDYKRRDAAGQHADFGIARRYLRMAMCLMRKSQIYLPNELRKKDTDTKKRADYYMKTWPSLRDKWQKANALNVAFDDENPLGKWRNMVQGLYEIKLKL

SEQ ID NO: 116974 - protein, 324 aa, unidentified
MHTLGIDIAKEKFDVSLLGGRQAVAGQFDNDAAGFERLQRWLQKRQVAQVHACMEATGAWWEELALFLHEAGYQVSVVNPKLIKRHAESIMQRNKTDRQDAATIADYCLRQTPELWSPPPEANRRLRALVRHLQSLKEDRTRETNRLKAHVSEPAVRELIEQHLRFLDQQIATLQQEITDHIDQHPGLKEDKRLLTSIPGIGDLTAALFLAEIPDVSRFQQAGQLAAFAGLTPAQQQSGSSIRKPARLVKWGNRHLRCGFYMPALSAHRFNPLIAALRERLLRRGKSKMTVVVACMRKLLHLAYGVLKTRQPFDPYHTVNVQTT

SEQ ID NO: 116975 - protein, 396 aa, unidentified
MDRAWAGVDVGKQHHHVVVVDAAGEKALSRRVANDELDLLALIGDVGSLADEVVWAIDLHSSESALLVALLLARGQQVVYVPGMTVNRAASSYRGAGKTDAKDAYVIADQARMRRDLSTIRADEELVVELGMLVARRQDLVSDRTRAVNRLHDRLLAISPALERVLDLGNRGPLVLLTAFQTPAALREAGVEEVTGWLRAQRVRSAAALAVTAVRAAQTQNTSLPGQEVAARLVARLAEGVMALDEQIKEVDQLIEGRFHCHPSAKVIISMPGIGVLLGAEFLAATGGNLDAFGSADRLASLAGVAPVPRDSGRVSGNLHRPRRYHRGLQRVFYTSALISIRCNPESRRFYDRKRAEGKRHTQAVLALARRRVNVLWTLLRQGRCYELAPPHAAVA

SEQ ID NO: 116976 - protein, 338 aa, unidentified
MMKNAASIAPFGRCHGMGIDVSKASLEVVGIDDRDIWKRNVANQLADIEDLAKGLLKVRYLGKIVCESTGHYHLLLALVFSRYGLDLRIVNPLQSRKHQTGQIRKTKTDPVDGYVLATMCGTERDLPEAANLQPNQVLARLRQGQLQSLDKQIQRLRQSLATYRETYDQLNLDRGEAFQSLELALKQLGAAKQQLEAELEQAYLDIAQAQDVVKLRPIPGYSVLVSSMIAGAFDVGVNSERSWIAFSGLDVSVQQSGKWVGRGRLTKRGNSFFRKRLYGAAWGAMMNYPEVRRYYDQLKSNGRHHVEALCIIARKLLRIAYAILVKGKTYDPAIAFPG

SEQ ID NO: 116977 - protein, 344 aa, unidentified
MQHYVGLDLSVKETSVCIIDKAGKVIREVKVATKPVPILAVLTEEALAIERIGLEAGPLSQWLYSALAEAGLPVICVETRHMKAALSAQINKSDRNDARGIAQMMRVGLYRPVHVKTLASQKRRMLLTSRQLLQAKALDIENDLRGTLRNFGLKVGMVGTVKFEARIRELVADHPDLAAIVEPLLIARRVLREQLGVLYRQLLEIVRQDEVCRRLMTTPGVGPVVALTFRATVDVPSRFNNSKAVGAALGLTPRRQQSGEIDRMGGISKSGDAMMREMLFEAALVLMTHSRKWSWLKAWGMKIARHRGMKRAIVAVARRLAVIMHRMWVDGTEFRWSRKEAAAA

SEQ ID NO: 116978 - protein, 363 aa, unidentified
MSNGSREQTKMTAGVDLGDKYSYLCLIDTESGEVIEEGRLRTTPDDLRRRFEPEQQLHIAIEVGTHSPWVSRILEECGHEVLVANARKVRLIYSNKRKTDKLDAEKLARLARADPELLYPVEHRGEDSQAHLALIHSREALVRSRTQLINHLRGTVKSFGYRLPKCSATSFHKKVRDQLPSEFVETLGPIVETIGLLTEKIEDYDRRIEELAAERYPETKLLRQAPGVGPLTALTFVLTLEDPQRFAESRSVGAYLGLVPGTDQSGEQDPQKRICGEGDEMLRRMLVGSAHYILGPFASDSDLRRHGEKIAGRGGKNAKKRAAVAVARKLSVLLPIVSIVCGFRRRSTSHYITPGAWGFKERR

SEQ ID NO: 116979 - protein, 334 aa, unidentified
MEKVTTLGIDLAKSVFSLHGVDGAGRVVLRRTVRRDQLFGAVAALPPCLIGMEACSGAHEWGRRFQELGHTVRLMAPKFVAPYRKSGKNDGNDAEAICEAVTRPSMRFVPVKSAEQQALLAMHRVRQGFVVERTATINRLRGLLCEFGVVLPLRSVTVRRQAAQAAENLPELARRAIGDLLEQLRVLDERIDGYDREIEAQARLCEPAQRLMKIRGIGPTTALAIVATVGNAREFKNGRQFAAWIGLTPSQHSTGGKPRLGHISKRGDAYLRNLLVQGARSVLNSAGRHQDRMSRWILELQPRRGYYRTLVAIANKNARIAWALLAKNETLRAA

SEQ ID NO: 116980 - protein, 357 aa, unidentified
MESQEVKYVGVDCGKKSIEVVRINSENSLERRQFSTTESGINNLLQWLTLNDIVGLEAGSQSFRIAKSILNKGVQVIVLNPGNLATIYQSLKKTDKEDSLKIARLIQRHPIEELPTVPIPNDEEEDNRRLCSEHENWTKQLTQGKNRLHSLFTQAGLTHITKKHLRTKANREISVALLPSRYQKEAERILKVLDLVEQNLKLIEEEIQEALKKNKAYVQTIMSMPGIGMITSLAIMSYMGDCKRFSSAKQAAYYAGLVPRVDISGDTVRYGRIINRGCHSIRRVIVQAAWSLVRCQHGGKVKEFYQRLYLKKGAKKSIIATSRKMIEVLYVMIRTGKLFDSMPENILNRKLTQYGLM

SEQ ID NO: 116981 - protein, 371 aa, unidentified
MKQFSKFVGMDVHKATIAVSVADANGGEVRYVGEIANTPEAIEKLVRQLRKGDAHLSFCYEAGPCGYGIHRQLSDLGWDCQVVAPSLIPRKAGERVKTDRRDSLMLARLHRAGELTAVWVPDDAQEGLRDLTRAREDMKHLQRQAKQRLCAFLLRYGKCYSGKSNWTQAHYRWLEAQKFGQSVQQIVFQEYVDTVKALSKRVDGLDAQLESAASESVFWPVIEGLMALRGVNLLTATTVVAEIGDLKRFASAPQLMAYLGLVPSEHSSGATKSRGAITKTGNAHVRRVLVEASWTYRHPARKTAHLQRRAERTSEAVQDIAWKAQKRLCARYRLMEAKGKLKVQACTAVARELTGFIWAIGQELPQPVPNR

SEQ ID NO: 116982 - protein, 319 aa, unidentified
MESPQVSFKQVVSRGCGLDVHKKVVVATIDGEGIKKQTREFGTVTSSLKELRDWLLEYGVTHVVMESTGVFWKPVYNVLEPAGLTVWIVNAAHVKYVPGHKTDKQDSAWLCKLLLAGLLKPSYIPAKEQRELRDLTRYRTTLIQSNASNKNRIIRILEDANIKLSSVLSSTSGAVGTKLIDKLCEGKEITMQDIEDVYHKKLEASKEEIYEACQGFITEHHVYMLQIIRQEIAATLQIIEKLNQRIKTVLSPYENALELLKKVPGISSKSVEDLVAEIGLDMSVFPTENHLSSWAGMAPGNNESAGKKKADEQLRETSK

SEQ ID NO: 116983 - protein, 412 aa, unidentified
MQVLYARCAGLDVHCKTVSACVSVCESQARKIQKVRVFSTFTRDLLEMARWLKEEGVTHVAMEATGVYWRPVWAVLEDQFQQMLVNPQHMKAVPGRKTDTKDCEWIADLLQHGLLKGSFVPPTPIQDLRDLTRYRAQLRQDQGRAANRIQKLLEQANIKLSSVASNALGVSGRRILKQIIDGEVDPGQLAQLARGALKSKIPVLMQALEGRVREHHRFLLAKFLSEWEWYEEEIASLDHRIEEQIRPFEVAATLWQTIPGVSQVTAWSLVAEIGVRMEQFPSAQHLASWAALCPGNHESAGKRKSGRMRDGNKWLRRSLCQAAWCATRKKDCYLASQFRRLGGRRGLKRAIIAVAHTMLVIGYHMLKTNQGYCELGANYLDRLHKESLQRYHVKRLQSLGFAVRLEPAPIAF

SEQ ID NO: 116984 - protein, 341 aa, unidentified
MQITTLGLDIAKNVFQVHGIDAAEKVVLRKQLRRGQVMKFFAALPRCLVGMEACASAHHWARELTKFGHEVRLMPAKDVKAYVKRNKNDAADAEAICEAVRRPTMRFVGAKSAEQQGRLMQHRARDLLMRQRTQVINALRAHLAELGIVAAQGREGLKQLLAIIADEKDDRLPIDARASLIVLAAQLQALQTMIGSIERRLLMQHRANEASKRLESVPGIGTIGASAIAATVTDPNAFRSGRDFAAWVGLVPRQDSTGGKQKLGPISKQGDRYLRRILVVGAHSVLWLAKKNPQKHPWLTQLLARRPFKVVAIALANKMARVAWALLARGGTYRVPALAAA

SEQ ID NO: 116985 - protein, 358 aa, unidentified
MAHYSLSALKSFVATHHSEPFWVGIDVHKRSYHLALLRSDAKTFTLVTPACPEKLVEQLRHLDIIIAGVVYEAGPTGFSLARTLQTDDFQVIVAAPSKVPRSITAGAKTDRLDCIKLAHFASKGLIRPIAIPTEQEEAHRALSRRRHQLVDSIRRCKQRIKGFLLYHGFEETKSIKNWSSNYEEQIAALPLETEGCLTVESHLRELNFLQNELSSVTHQLNQINLKPKHRAVIRSLTSVPGVGKVVATTFCTEMFRPERFNRGEEVASYLGLAPTVRHSGEQTPRGHLVSVGQTRLRSLLIEAAWMWRAKDPYALELYNKLLNKTGIPQKAIAALARKLAIILWRLSIEQRVYRPMAI

SEQ ID NO: 116986 - protein, 334 aa, unidentified
MEEVTTVGIDLAKNVFSLHGVDEAGKTVLRRTVRRERLVETVAALSPCLIGMEACSGAHEWGRRFQQHGHTVKLMAPKFVAPYRKSDKNDGNDAEAVCEAVSRPSMRFVPVKSTEQQALLAVHRVRQGFVVERTALINRLRGLMSEFGVVLALGSVTVRRQAAQAAEQLPELARGAIGDLLEQLRVLDERIAKYDKQIEAQAGLSEPARRLMQIRGVGPTTALAIVATVGDAREFKNGRQFAAWIGLVPAQHSTGGKSRLGHISKRGDAYLRNLLVQGARSVLQVAGAHQDRISRWALELQQRRGYYRALVAIANKNARIAWALLAKSESLRRA

SEQ ID NO: 116987 - protein, 344 aa, unidentified
MDHFGGLDVSVKETSICIVDDTGRIVKEVKVASEPEALLKVLGNPAYCFKRIGLEAGPLSQWLFSGLAEAGLPVVCVETRHMQAVLKAQINKTDRNDARGIAQMMRVGLYRPVHVKTLRSQKLRMLLTHRKLLQSKAIAIENDLRGTLRNFGLKVGMVGKVRFEARIQELVENQPDLAVLVEPLLVVRRVLREQIVILHRRLLAIVRDDEVCRRLMTIPGVGPVVSLTYRATVDVPARFRKSKSVGAVFGLTCSRYQSGEVDWSGEISRCGDEMMRSMLYEAAQSMMHSKKWCWLKAWAMQIAKRRGMKKAIVALARRLAVIMHRIWVDGTEFRWTREQAAAAA

SEQ ID NO: 116988 - protein, 343 aa, unidentified
MGEISIVGLDLAKNVFQVHGVDASGGVVLRRQLRRGAVEKFFAQLPPCTVGVEACGSAHHWARVIGGYGHQVRLMPPAYVKPYVKRNKNDGRDAEAICEAVSRPTMRFVPVKSVEQQATMAVHTTRGLLVRQRTMVANSLRAALSELGMVAAQGIKGLRELMAKLKDPSDEIPEMMRSALLLLANHWRALDADERLLERQIAKAARADREARRLMEAPCVGPMIASTVLAKVPDATVFRSGRNFAAWIGLTGRDHGTGGKHRPGHISKQGDRMLRALLISGASAYLRHQKARGVSDPWLKDLLARRPYKVVMVALAAKTARIIWAMLVKGEPYRDRASASAAA

SEQ ID NO: 116989 - protein, 325 aa, unidentified
MHNRDSGFLFVGIDVSARELAVALQAGDKLEPVRTFANTAAGHQQLRRYLCRDQQTERVCLEASGNYSLDLCLALHADDGIELSVINPRLARRFAESLGTRSKTDPVDARVLCLYAQRMPPVPWQPPSLASLRLRSVTRAVEALTRMLAQEKARQHAAEASAALPRLVVNELKRHQRYLEQRIQRLRREAVRIIGTDADLARRFRLLQTTPGVAEASTLQLLGELAVLPSTLDARQWVAHSGLDPRQYRSGTSVERTPRLSKLGNRRLRRALYMPALVAVQHDPHLRGVLSATMCQWQGSAAGASSSHAETSACVSCHASSRPAL

SEQ ID NO: 116990 - protein, 459 aa, unidentified
MRKTAKKQSRAVKRAQKSGFPMINPNAAGIDVGAREHYVAVPADRDSQPVRCFGAFTQELHRLAQWLKQCGIKTVAMESTGVYWIPLYQMLESYGLTVKLVNARHVKHVPGRKTDVQDCQWLQQLESFGLLSGSFRPEAKICVLRSYMRQREMLIRAAGRYIQQMQKALTQMNLKLHHVISDLSGQTGLRIVRAIVAGERDGLKLAALKDRRIKSDVSTIAKALEGDYRAEHLFALKQGLELYDCYQQKIAECDAEIRKELETLESRGSAGAVLKRKPRSRHATGFDSQAELYRVLGVDLTSIDGVNESTAQLIVSELGLDICQKWPTEAQFTSWLGLCPNNEITGGKLLKRGTRKVVNRVANALRMCAQSLLKSKSALGAYARRMRSRKDTPVAITATAHKLARLIYRTLKYGQDYVDVGADLYEAKYKAAIVKSLQRRAKSLGYQLVSYQTLDAVVP

SEQ ID NO: 116991 - protein, 309 aa, unidentified
MQDTIGIDVSKAVLDAYRLSDRCHARFANDRTGLKALIHWIGTPVLIVFEATGAYHRQLESALAAQCVAYAKVNPRQARRFAEATGRLAKTDRVDAAMLARMGAVLELDAQPPKSEILQCLKDLMTARRALIKDRTAALSRQKVLASSLLRRQAVARLRQIEGHIQEIDAAIADTVGRDALLSQKLAILVSIPGIAEATAFAMLIEMPELGTLNGKQAASLAGLAPVSRQSGNWQGHERIQGGRTFLRRAIYMPALAAVRFNCDLRTKFDQLIAAGKPAKVALVAIMRKLIVLANALLRDGRPWSEIRP

SEQ ID NO: 116992 - protein, 402 aa, unidentified
MNAVGIDVSKGKSMVAIMRPFGEIVSTPFEIKHTSSDINSLVKLIKSIEGESRIVMEHTGRYYEVLAHQLSEANLFVSAINPKLIKDFDNDSLRKVKTDKADSVKIARYALDKWQNLKQYSVMDELRNQLKTMNRQFGFYMKHKTAMKNNLIGILDQTYPGVNTYFDSPARSDGSQKWVDFASTYWHVDCVRKMSLNAFIDHYQNWCKRKKYNFSQSKAEEIYGKAKELVPVLPKDAITKLIIKQAVDQLNSASTTVESLRTLMNETASKLPEYPVVMAMKGVGTSLGPQLMAEIGNVSRFTHKSAITAFAGVDPGVNESGTYEQKSVPTSKRGSADLRKTLFQVMDVLIKTHPQDDPVYQFLDKKRAQGKPYYVYMTAGANKFLRIYYGRVKEYLASLPES

SEQ ID NO: 116993 - protein, 355 aa, unidentified
MSQEPIYFGIDVSKERIDIAARPTGTSWSVSYDSDGVDDLVAQLKDLKPAGVITESTGGLELPLVAALAASSLPVAVVNPRQVRDFAKSTGQLAKTDRLDAQVLAHFGEAVRPPIRPLRDADTQALGAVLARRWQVMGILVAEKNRIIEAVCPPMRPLRDADTQALGAVLARRWQVMGILVAEKNRMRRAAAEVRPSIEAHIGWLEQELDDLDTDLRQRIQSSPAWREKDDLLRSVPGVGPQVSLTLLAYLPELGKLNRKQIAALVGVAPFNRDSGPYRGKRSVWGGRAMVRKTLYMGALVATRFNPVLSEFYRRLLDAGKPKMVALTAYARKLLNILNCMARTGVHWDPTAPRP

SEQ ID NO: 116994 - protein, 351 aa, unidentified
MIVIGADTHKRSYTFSAVGAETGELRGSETVAATRVGHEQLLAWARGVQPERVWAIEDCRHVSSKLERFLLARGERVVRVAPKLMASRRRGSREAGKSDPIDALAVARAALQEGIATLPVATLEGPAREIKLLLDHREDLVWERTRIQNRLRWLLHDRWAELELPSGCLDRMIWLERLAGRLQRSPQDADVRVMRHQIRRLRELVREARALERELGLLVRGIQPRLLDIHGVNTLTAAKLIAEIAGIERFASPAKLARLAGVAPIPASSGARHRMRLHRGGNRQLNSAFHRIAVTQIRDYPPAKDYFSRKLAEGKSKREALRCLKRHLVRVVYKTMTAPVRHAPAAELVLT

SEQ ID NO: 116995 - protein, 356 aa, unidentified
MREGLRLARGSEVFLGLDISKGSWQVTARSGGETVLSASFPPRREALNGLLQRLEGCRVHSVYETGPFGYGLHDWLRSRQVDSMVVSAAHVPGEIGNRVKTDRRDGFKLARTLEAGLLRPIFVPEARQRADRELVRQRHRVQRDRCAAMVRIKSFFLTYDIEVPEEAGAHWSKDFEAWLHGLKLADQSLDRVLEELRGLYTDLDARVDGLTKELRQMARSSDYAPMVELLSTVPGIGWLTALTLVVEIVDFRRFPDGEALSSYAGLTPSEHSSGDQVRHGHITRQGNPVVRSVLVESSWILIGKDPEMHRFYERIKVRRGGKRAIVAVARKLCHRLLAIANSGQPYQINFSHSKEN

SEQ ID NO: 116996 - protein, 357 aa, unidentified
MKYIGCDFHPSFQQIAMLDLETGEMVERRLLHAEEARVFYRELQGPVVVGIETSGNTHWFESLLVRCGHELWIGDAAAIARQEGRKQKHDRRDAALILKLMVENRFPKIWVPTVAERDLRQLLMHRHQLVRMRTRVKNQLQHIALNQGVQKKYKLWTQAGLKVLRELELEPWTRLRRDTLLQMLEELEQKIQPLERAVEQEAEARPAARLLATHPGVGPVIALATVLTMGEVQRFANSRSWVSYLGLNPSERSSGEKRRMGAISKQGSPFLRFLLVQGATSAARGDKSLARAYARLKAKKHHGVAKVAVARKLAVRLYWMARTQKPYPEVVRMQGSQSLPVAEVTAVRLSRPPASRQ

SEQ ID NO: 116997 - protein, 331 aa, unidentified
MFPVGIDVSKNTLDLCMLYDGIKGRIKTRNIQNNRHSVENILRWLRLQHCSPEDVHVVMEATGVYHERLATELHDAGFRVSLANPHRSREFARGMGIMTKTDKVDAYMLACYAFLKNPHRWEPPAPEIRYLGALLRRRDVLLGDALREENRLEKYLSTDTPADIISSCMHMAQLLRDEVSNIERQIKAHIKASPALRRDYTLLTSIKSVGPQLGMHMLVVLRSHNFVSAEQAAAFLGVVPIEKRSGTSVRRRPRMSKIGPPQLRAKLYMSALCGKIYNKRMRNIYDEMCLRGKPKMVAIGALMRKLVHWCYGVLKTGTVFNDEDLKPVLST

SEQ ID NO: 116998 - protein, 416 aa, unidentified
MFAVGVDVANGRSMVAVLDGMRNMVAKPFEVVHTAQGFAALVEKLRQLDGEVRIVMEHTGRYYESFAMSMHRAGFFVSAVNPLLIKNYQGSINVRKVKTDKADAQKIAQFALDKWTILPHYTPMDTIRYNLKTLHRQFQLASKTKTALSNNLIALLEQSYPGANRYFDSPVRTDGSQKWVDFVDTFWHVDCVAMSSEHAFVERYRKWCKRHGYVFSEQKAIQLHADARQKIPLVPKSDTCKLLVREAVSQLNAVSRTVETYRAEMDRLASQLPEYETVMGMTGVGKSMGPQLMAEIGDLRCFAHQKSLVGFAGTDPIKEESGDKVSQSAPSSKRGSPYLRKTLFVIMSILLQLQPQEDPVYQFLDKKRSEGKPYYVYMTAGGTKFLRVYYGKVRDCLKAKGLWEVPASASQEVNPG

SEQ ID NO: 116999 - protein, 377 aa, unidentified
MSKIRFVGLDVHAESIAVAVAESVGEVRSLGSIPNRPESVRKMIGKLGPVEKLRCCYEAGPTGYVLYWQLTQLGVACEVIAPSLVPVKSGDRVKTDRRDAEKLARCYRAGELTSVWVPDAAHEALRDLVRAREAAKKDQLRHRHRLGKFLLRHGIRPTNAGTAWTQKYLNWIRIHARFDQPALEATLAHYLGEVEHASERIVKLERAIDEAVKQAPQEIRAVIEALQALRGVAQTTAATVVCELGSLSRFQNPRQLMGYSGLVPREYSSGSRTQRGAITKSGNAHLRRVLVEAVWAYRHRPNVQGRVLRRQKALALSEEARQIAWKAQQRLYKRFVALTARQKTSGQAMTALAREFLGFIWAIAVNTEKQLRLPKAA

SEQ ID NO: 117000 - protein, 363 aa, unidentified
MSYRIAGIDVHKKMLAVVVSDVEGDGEYQFERRLFGSNPEQLRSLAEWLLEQEVEEAVMESTAQYWKPVWGALERFWKPMRQRRGGAGPMSGALHLAQAQSNRGPQGRKRDFPDAERLVKRLVARELTLSFVPDGEQRLWRTVMRRKYQLTRNRVQLQNRLECLLEEAYIKLSSLVSDLLGVSARRMLKALAEGETNPASLAALADRRLRATPEQLCDALGACMDLNPVYRRLLKMMLEELRLIEEHIGKLDQEMADLLHPYQDQVKRLAEVPGLGVDSAQQILAEVGVRAAAFPSAKQLSSWVGACPGDNQSAGVNYNHRSPKGNRAMRRILNQSANAAVKAKGTIFEVVYRRSVSRLGINK

SEQ ID NO: 117001 - protein, 367 aa, unidentified
MKKVSTAAVKTTKNVSQPKLTIGLDLGDRNSWYCVLDESGQIQLEQRIRTTATALREVFSEMPRSRVALEIGTHSPWISRLLSGLGHAVIVANARKVRLIAESRRKDDRMDARTLARLARIDPQLLSPVKHRSAQAQADLMMIRARAGLVRARTALVNTARGLAKSYGERLRGCNVRNMNPEKAEGLSPELQRALEPLLAGIEAVSERIVEYNERIEQLAQQSYPQTALLKQVKGVGTLIALTYMLTLEDPHRFRKSRDAGCYLGLQPGRRNSGQSEPQMHISKEGDPYLRTLLVQGAQHILGPFGIDSDLRRWGLQLAERGGKSGKKRAIIATARKLAVLLHHLWVSGEVYEPLHNSSPTTVAAAA

SEQ ID NO: 117002 - protein, 341 aa, unidentified
MDVSVLGIDLGKNSCSVVGLDATGKVVVRRRMRRDTVITYAAGLPACVVAMEACCGAHHMGRALARQGHAVRLMSPEYVRPYVKAQKNDDRDAEAIAEAATRPTMRFVELKTEEQLDMQTLHRIRDQLVGDRTSLMNQIRSLLLERGYIVPQGRAKLAVRLGEMLDGDEPVLGSRIHRLVSDMRLRWIALDDRIAELNAEFTEAARSDERTRRLLTIPGIGALNATALVAAVGDARTFGRGRDLAAWLGLVPRQATTGGKPRLLGITKRGSRYLRKNLIQGARAALPTMSKSDTRLGAWLRGLLSRSHHNTVVVALAAKMARIVWALLRHERTYDPAAQAA

SEQ ID NO: 117003 - protein, 323 aa, unidentified
MESSPVFAGVDVSKARLDVACSDSDETWSVSNAPDGIARLVQRFQEIGPALVVMEATGGFEVAAAADLTAASIPVVIANPRQVRDFAKSTGQLAKTDAIDAHVLALFAERVRSPVRPLPDEAARALDAIVGRRRQIIDMLTAEKNRLGFALPAVQKGIRKHIRWLERQLSDVDSDLDDLIRNSPVWRAKSDLLRDVPGVGPNLARTLIAELPELGRLSNKEIASLVGVAPLARDSGLFRGKRMIWGGRASVRSALYMSIWSASKWNPVIRVFYRRLRRRGKPPKVAQVACMRKLLIILNAMLRDGRPWDPSIPLDQLRLQHSC

SEQ ID NO: 117004 - protein, 319 aa, unidentified
MAQNDLIVVGIDVAKSKVDACIRRFTLRQTFPNTAQGHRKLVAWLRKYQVGKAVMEASGGYEREWRNVLHNAGIEVRIVDPRRVRSFAQSAGRLAKNDPIDAEMIAWFAETFSHAPGQIPDAAREELAALAKARTALVDIKIRLQAQDEHAAPEPARKAYARVLKNLAAEVDKLEAAISAKVKATPDFAERAEIIESVPGLAQVTSAILIAGMPELGQVSDKIAAALIGVAPYDDDSGNRRGERHIQGGRRWVRNGIYMPCLGAATQYNPVLKAFYDRLIAKGKEKKVALVACMRKLIIILNTMIARRQKWNPGRHAMG

SEQ ID NO: 117005 - protein, 377 aa, unidentified
MKNLRFVGLDVHAETIAVAVAESGGEVRSLGVIAHRAEPVNRLIRKLGKPEQLRVCYEAGPTGYALYWQLTRLGVKCEVVAPSLVPVKSGDRVKTDRRDAERLARCYRAGDLTAVWVPDAAHEALRDLVRAREAAKADQLRARHRLSKFLLRQGRRPAEGVKAWTLKYWEWVKSRVQFEQPAQTATFLDYVHEVEHALARIQRLERAIDAAVDTVPPRMRAVIEALQALRGVAQVSAVTMVAELGQISRFTRARQLMGYSGVVSREHSSGTRIRRGAISKAGNAHLRRVVIEAAWSYRHRPSVGKSLAVRQRGQSETVKEIAWKAQHRLCHRYRKLMALGKTKQQVVTAIARELLGFIWAIGVHIERRVSPRLAVTT

SEQ ID NO: 117006 - protein, 347 aa, unidentified
MELKLVAIDLAKHVFQICALSKNGKVMFNRKLSAKKLIEELTKLAPTVVAMEACGSAHHWGRRVQALGHEVRLIPAQHVKAFRRVHKSDTHDALAIAEAAQRPKLHPVAVKSLEQQDLQALVRRRQQLMRQRNAVANQLRGIAREYGVNFPLGIKPLYRDVPRALEDGENTLTPIARTLLAELLEDLRQLDERLAAITLKLATHVKANQHYQRLRTIPGFGPIVAAEFLAAVGSAQQFSSGRDLAAWLGLVPRQDGTGGRVKLYGITKHGDRQLRTTVIHGARAVVRWAHKHNHAQSRWIIELKARRGTNRTVVALANKLARIAWAILVHGSEYELERAFRPQTQGL

SEQ ID NO: 117007 - protein, 415 aa, unidentified
MADQRQWYAGVDWASESHHVFVTDGDGRKIGERVFKHSGEGLAEMAAWLMAASGAADPSQILVAIEVPHGPVVETLLERGFKVHAINPKQMDRFRDRFTMAGAKDDSRDAEVMSSALRTDARCFRLLAVADPMVCELREWSRIAEELGVERNRLTNRMREQLWRYFPAFLEFDSDLSAGWLLDLWQAVPTPDKAAGVRETTIAKLLKRHRIRRFDAAHVLSVLRKPPVQVAAGTIEAASAHITTLIARIRLVNRQIEQAHQRLDSLIARLSPPEEAAPGQNKQHDAEILASLPGVGRIVLATLLAEAHDALQRRDYAALRSLTGAAPVTKRSGKSCTVIRRHACHARLAGAIYHWGRVATQHDPTSRAKYAALRSRGHSHGRALRSVADRLLNVACAMLRAGTTFNPDLAVQKTS

SEQ ID NO: 117008 - protein, 376 aa, unidentified
MKNKATPTLHDNDQPNAALAGGNSGARQIFKLGLDVDLNNAVTAIQCGTGEIKRGQSFSRARLLGWVRTQANAGHTVHTVYEACGFGYTLHHELVGAGAHSLVTTPMRHTAQRRRKNDRMDARELCVRLARWLDGHRDELKPIRIPSSEEQQRRELGRQREFFKRELRRLENHGRALRIEFEHETLPSGWAGPRKWKGLSLQCSSFVREQLEPIVTQIRACRAQLLKLSAALEARVAEQMIPTGLGSLTLALLDGEVCNWHRFKHRKAIGSYTCCCPIEYSTGGVQRFGPIDRQGNKHVRVLLVEAVWRLLKWQPGWHARQKYLARLKHGASLKKKIAVALARQLAIDLWRWRTGRATAAELGWTLKNAMEETTPL

SEQ ID NO: 117009 - protein, 422 aa, unidentified
MSYCPVAGIDVSKRFSDMCILSPDNKIFAQEKIYHDETSINRANALLQKAERLFFSKPVIVMESTSHYHLILFQFFSEHGYDVIVVNPLQSNSMKDFSIRKRKTDRVDAFKLAMMYRTKTLRPSQIPQTATRALRQLCRHRAELLNDVSSYKNRLTALLDQTFPGYDKVFSDVGGVTSCAVLVRFPTPTILLVEEESELVEVIAAASKSGYSFAKKKAGLLISAAQKAQTLGIHSCADETLIVCTIQMLRTLSESVLQIETAIDNLLAQIKEMRNNVSLLQSIPGIGSHSAALLLGEIGDISLFKKPKQLAAYFGLDPTERQSGSFRGTKNKLSKRGSSYARAALHMGIVNSICKRGKDSAANPVLLSYYEKKCKNKPAKVAQAASMHKLVFIIFAVLRVQKPFELKTPEQHAVEQGFVKAA

SEQ ID NO: 117010 - protein, 440 aa, unidentified
MAPTGAAGLICLAWEEAGVHRVRRPAGACHPFNQRKEMALTIVETRAITGGVDTHADVHVAAALDPVGGLLGVAEFRATPAGYARLLSWLGEFGTVCLAGIEGTGSYGAGLARHVATAGIQVVEVDRSDRQDRRRQGKSDPLDAVSAARAAQSGRARGAPKGRDGSVEAIRALMVAKRSARAERTQTINQARSLIVTGPDDLRARFAGHTVAALVAQTASLRPRPGSTVGYATRIALRELGRRAQFLDGQLERLDELIVPLVTARAPGLLALYGVGPDTAALLLIAAGDHPARLRSEAAWAHLCAAAPIPASSGKRTRHRLNPGGDRQANHALWRIVITRMSSHPPTRAYVERRTAEGLSKTAIPACAPPLTDPQLRGRPDPLIGCRIPCWPSNDSSAVPGPIPPCWPWSGSPGALLRPGPPQNHGVRLSPHRAQAGPSG

SEQ ID NO: 117011 - protein, 417 aa, unidentified
MFEYAALVSIDWADQQHAVCLLDQTTEGREQAIVKHTPQALQEWALGLRQRFCGQPIAVCLEQSRGPLLYALLQYDFFVLYPINPATLAKYRQAFSTAHGKDDPSDADYLLDLLEHHRNRLRPWHPDDQKTRTLRLLVEQRRRLTSDRTRFSNRLTALLKGYFPQVLDWFEDIRTRLVCDFLERWPELSSLQRTRPATLNKFFRSHHSTSNSTNQRRLAEIKMALPLTTDEAVMTSSVINVKVLVAQMKTVIAAISEYDRQIEALCLTHDDYHLFAALPGAGPVHAARLTAALGSDRSRWRTVDELLRFSGIAPIIERSGKQFRIRWRYFCPKFFRQTFHEFAAQSIQDSFWARAYYSSQRAKGKDHHAAVRALAFKWIRVIWKCWKTRTPYNEVIYLESLRKKGSSLLKFAADYQP

SEQ ID NO: 117012 - protein, 460 aa, unidentified
MNTKRSKSRNDGKMPMVHPNAAAIDVGATMHMAAVRTDRAPEPVRSFGTFTADLHRLVDWFTECGVETVVMESISIYWIPIFELLDARGFTVFLVNARDAKHVPGRKTDVSDAQWLQRLHSFGLLRASFRPKGQIAELRAYVRQRERLLEFAASHIQHMQKALMEMNLQLHHVVADITGTTGLRIIRAILAGERDPEALACLRHYSCHSSAETIAKALTGSYRAEHLFALEQALALYDAYHEKASACDARIEAVLKELSLHRGHGHGPAPRVSRRRNRTDQANALAFDVREALFTLLGKDITTIDGLGPYLSLKLIAECGDDLSSWPSAKHFTSWLGLAPSNKISGGKMLSSRTRRSGGRAAALLRLAAVTVGRTDTALGAFYRRLSARIGKAKAVTATARKIAVLFYNAVRHGMDYVDPGASSYETRYRTRVVNNLHRRAKAFGFVLQPLEPKVVAAVS

SEQ ID NO: 117013 - protein, 343 aa, unidentified
MAIVILGIDLGKNICSLVGVGEDGSVILRRRMRRQTVLTFAAKLPSCVVAMEACCGAHHLGRLLTAQGHTVKLMSPEYVRPYVKAQKNDDRDAEGIAEAASRPTMRFVDLKSQEQLDLQSLHRVRSRLVGVRRTLLNQLRAILLERGHIFPQGRRKFEAAIDTLVADPAYEISSRIRQLVIDIRSEWQALDSRIEALNGEFVAIARHDDTARRLVTIPGVGVLNATALVAAVGDGAAFRRGRDLGAWLGLVPKQHTTGGKPKLLGISKRGNKYLRMLFIHGARAAMPSLSASQSPLGGWLRGLLARTHRNIAIVALANKLARIAWATLRRKTSFDLRHLAVAG

SEQ ID NO: 117014 - protein, 350 aa, unidentified
MKTAHPIIIGIDTHKATHVAVAIDTQGTRLAALSIPTNPKGYSELERWSQSHGKVLAFGIEGTGSYGAGLSRHLLSQGHTVVEVTRPNRQLRYTQGKTDSLDAEGAARSVLSGQATARPKTQTGSSEMIRHLKIARDTAVKSRSQAMVTLKTLIINAPAELREALDQIRGKVALIRHIAAFRPGDIDTPLASAKMAMKALARRWLWLNDEIIAHDAELQRLVTERAPTLMASHGIATLTIAEMLILVGDDPTRIRSEAAFAKLCGVCPIPASSGKTRRFRLNRGGNRQANAALYRVAIVRMRSHEPTLAYVKKRTKDGKSKSEIIRCLKRYIIREIYSQLCVPKTDEIAP

SEQ ID NO: 117015 - protein, 364 aa, unidentified
MDVHLRSTTVCALDAETGEAVTRRFRGNPWGEVAEWMSGFPGPSLAAYESGYLGFAPQRELSGLGVDCVVAAVSKVPRSAADLSSKNDRNDAARMAKAILSHDVIPVWVPSPEIEGLRDLAGAHDAATARLAAAKQRLLAFLARRGYAYGGTTPAGNPRRYWTYDFLRWLDKVRPADDGGIRALAALRNEVEAAAETRDDLLAEYRAAVAAGPLSAEVEALQSIKGCGFALAAAFASEVGDFSRFRSGRQVTAYFGLAPKQRSSADSVRLGGISGAGNALVRRLAVEGSWSYVQASHQPKLMPKGSGVPLEVRMHGRKGSERLLRRREEMLARGMPQAKANAATAAELVRWLWALGAMCREATE

SEQ ID NO: 117016 - protein, 436 aa, unidentified
MSHAGTKTRVQKAAGWFEGRIVVGIDPALDKHGVVALAGGSCHCLGRHMIANTIAGMQVLVKLLKRWKRQCADHLTIAIEEASAYGEAVECFLGQAGFEVMVVSALKVARFKEVMGVDANDLIDAEAVARFVMVQPDLASRPMRNAIQTDAKGSDYHRLRQLSRRYERWSKEHTAVCNELHAVLRMAWLADYQRFFSNIDGAAARAVWQEYPTPAEAAGADRDDLARLIRTASHGRIKKHDCDQKARDIHSTAKIMVLALGKKNPDRWTAWAQDIRMLAGHLTHLVTGMKHIARQIAELLESVNSPLMSFKGIGPVIAAAIHGETLSVERFATADRFARYNGTAPREDSTGRTPKQVKNRRCNRRLRQAFMQLALNAPRYHPASRLYQDHLASAGITGGAARVRLARRLSDIIFAMMRDSREYKLEYHMAHRRSAA

SEQ ID NO: 117017 - protein, 341 aa, unidentified
MQIAVLGIDLGKNSCSIVGLDASGAVVLRRRMRREGIIKLAAKLKRCVVAMEACCGAHHLGRVLRAQGHEVRLMSPEYVRPYVKSQKNDDRDAEAIAEAATRPTMRFVELKSEEQLDMQTLHRARDRLVGERTALINQLRAVLLERGIIVAQGRRKLERQLTEMGTQVEALSQRMRMLIQDMRSQWHELDRRIAEFDKELADWARDDEAARRLRTIPGIGVLNATALVAAIGHGESFARGRDLAAWLGLVPRQVTTGGKPRLVGITKRGNKYLRKLLIHGARAALPTLLESPTPLGGWLRGLMARMHKNAAVVALANKLARIAWAVLRHGESFSIELSTTA

SEQ ID NO: 117018 - protein, 395 aa, unidentified
MIFLIYVGIDVAKNKHDCCILGVTGEKLFDSFSFPNTKQGFDLLKTNINSVLKAQPDSNIKVGLEATGHYNENLVAFLRYSGIEPVVFNPLQVKLFRQALSLRKTKTDKVDAKCIASLLMSDVSNPLAPSYQIQELKSLTRHRSRLVSERSKAKIQLSRLIDILFPELPSICWSISQKSILALLKAFPSAKSISLCSLDSLTSVLEKNSKGRYKEHKAQQIRDLAKQSIGKDSHALAFELVQVIESIEFFQNQILTLDTKLKLLVEELDSPLLTIPGIGYRLAAIILSEIGDVSRFSSPDKLLAFAGVEPSTYQSGQFSATKTHMVKRGSSYLRWALMQAARLADRRCTVLHAFLEKKMAQGKHYFVALGHATKKLVRLIFHLLTKNEPFLPQII

SEQ ID NO: 117019 - protein, 320 aa, unidentified
MSKKKSKAFIGIDVSKTLLEVAAHESDYQFRCANKAKAFGELIGELIALRPALIVLEATGGLEIPVVAALHAAGLPVVVVNPRQVRDFAKALGQLAKTDRLDARVLAHFAAAIKPPLRPIKSADELELDALVGRRGQLVEMLTAEKNRSGSAATDTVREEIKEHIDWLEERIAELNKQLKAQLKHSTLWQGKDDILQSVPGIGPVVSFSLIADLPELGTLNRQKISKLVGVAPLNNDSGQQRGTRHIYGGRTRVRSMLYMAALTAARFNPVIKEFYERLLANKKLFKVAITACMRKLLAIINVMVRDSTLWKIKDAKVLA

SEQ ID NO: 117020 - protein, 416 aa, unidentified
MSESVKFYVGIDWADQKHDIIILDALGAIIIDNCSIKKNRAGFEQLLEKLRSLSDDPNDFKIGIETPHNLLVDFLVDLNYPVFALFPGSMKSFRKRYRASGARDDRFDAFVVADVLRTDKACWRKVDFGSELAREIRLFARDHHDLVDQLVACNQCLLATLKMYYPEYIHFFADITCANSLAFLQAYPDFEAAAQLPRQQLAAFFKEHHLRNGKTVNRIYELLHQKNLMAPPPLIRVKKLKAVTCAHNIITLRAEIEQYTNRLQELVEQHPDGKIFLSYPGVAHVTAARLIALFGDNRKLYADADELRALAGTCPVTEKSGKNFHVVYFRYACNKFYRDVMHNLAFSSLCEAKWALAYYRQHRALGKKHNHALRCLASLHLRILFAMWKNSTLFDENLFLAQKARHAITNQKKVKI

SEQ ID NO: 117021 - protein, 347 aa, unidentified
MNILKQTVGIDVSMDSFEARFGTIDTNQEQSISKSQKFINDLMGFKKFLKWALNNKLSDKLPLTFVMEVTGVYHENLAYFLHEKGYQVVIVLPNKIKNYGKSLETKSKTDPIDAMTITRFALERKLTAWNPPEPFIRAIKTLSREYLSLKVMMTDIKNKIHAKESAHYPDKDTIKRKRRLLKELQRQIDEILGQIKILFQSKPELNKKINKVATIKGIGEITVIIILAETNCFEHVTNSNQLTSYAGLDVVLNESGKKKGKTTISKRGNKFIRRALFMPAMSACKYNNKMKETFARLVSKGKNKKAALIAIARKLLVLIYTLWKNDAVFIQDYKQTKPFRLKPALGS

SEQ ID NO: 117022 - protein, 360 aa, unidentified
MREISRGIPALTVGLDLGDRFSQIAVLDAGGELVEEGRVATTELALRQRFSGCGRMRIALETGTHSPWVSRVLADCGHEVVVANSRKLRLIYENRRKSDRVDALYLARVARLDPKLLAPVEHRGAAAQKDLALLRSRDALVATRTLLINHARGLVKSFGGRLPNCSSRAFQKRVTESIPQPLEPGLQAIVETIASVTEAIKRLERRLEAVAEQNYPETKLLRQVVGVGPITALAFVLTIEDPKRFSKSRAVGPYLGLVPGRMSSGDSDPQMRITKEGDPFLRRLLVNAAHYILGPFGPDCDLRRFGLKMAIRGGKNAKKRALVAVARKLAVLLHRLWRWAEIYEPLYQQTHQTGRRGKAA

SEQ ID NO: 117023 - protein, 372 aa, unidentified
MQTKLYVGLDLHSNSTYVGVIDSKERRVLKGKFPNQLEVILALLEPYKKRIVGVVVESTFNWYWLVDGLMDNGYKVHLAHPAAFKQYNGLKYTDDEHDAFFLAKMLQLGILPEGYIMPREERHLRDLLRKRLKLVRQRTTHILSFKSLVSRNQAISMDSNKIKTLTEESIDGMFENEHLVISAKANIAIMNYLKEKIVEIEKQIRKVTQLKPEHDFLITVPGIGKSLVLTVMLETGDINRFKAVGNYASYCRCVSSKRLSNNKSKGENNRKNGNKYLAWAYVEIANCAKRYCPQARAFYLKKSMKTNKTLAIKALAHKLARACYYIMKDNVAFDVTKIFGKPILKNGCGREPNWGLGHQPSAPIGQPAAADL

SEQ ID NO: 117024 - protein, 411 aa, unidentified
MEILHPRCCGLDVHKKSVVACLRLVGPGTKVHSEVRTFSAMTDDLLALADWLRGHEVTHVAMESSGVYWKPVYNLLEGDFQLILVNAAQIKNLPGRKTDVQDAEWIADLLAHGLLRGSYVPDQETREGRELVRYRKSLVRQRTAEVNRLHKVLEGANIKLGSVVTDITGQSGRAILSKLLAGEEEPQLLASLARGKLRHKQEELAKALHGRMGPHQRFMLQQLLAHIDYLDQTITHLEREIEARLLPFEDMLRRLTTAPGIKRCHGQTIAVALPDLKQFPSARHLASWAGLCPGNNESANKRKRGKMGKGNAMLREALVEAAWAAVRKKDTYLSVAYRRLAARRGPKRAIVAVAHSLLISIYYMLTRGLDYQDLGPSYFDRRKRSQVKHHLVRRLEAIGYLVTVQPLVTPV

SEQ ID NO: 117025 - protein, 315 aa, unidentified
MREGTFIGIDVSKGRLDVAVVPSGESFSVANEDSGFETLVARIRELNATLVLLEATGGLERRALGRLVTAGLPAMAVNPRNVRDFGRALGKLAKTDRLDAVILARFAEAVRPEWRPMPDEQTQQLHEHLTRRRQLVEMITAEKNRLLSVQDRGIRKQIKATIGWLEKQLNINEYDIDQAIKETPAWREKADLLKSVPGVGRVTVGTMLALLPELGMLTRKQIASLVGVAPFNRDSGTLRGRRSVWGGRASVRAVLYMAALVGTRFNPALRAMYLRLIAAGKRKKVAVVACARKLLTILNAILRTRTAWRSVEVTP

SEQ ID NO: 117026 - protein, 359 aa, unidentified
MRSYIGVDLHLRNATLCHRVDGSEHCLRTLELHSAEWQAFWSSVPAGSDVFVEMSRTTWWFARWVQEQGHQVHVVDPTRSRAMAAGRPKTDRCDARWLAEMGAKDVLHEVYVIQPGTERLRELVRHRALWVRDQTRIKNRIHYQLAREQRRCPHRSVFTQKGWHWLQEQELSPPYAQSLENHRTHFEFVHQEVEKATEQLLRFETEERTLTLLLSIPGIGELTARTLLAEIETIHRFSDPEKLISYAGLAPRVRQSSSMDRRGALTKHGSAWLRTALVESAQIAVRRPNQFQKIFRRVSFRRGRNVGIIATARRLAEVIWHVWSKDLLYQEPARPETAESGSDKLPAATALPRLPPREA

SEQ ID NO: 117027 - protein, 342 aa, unidentified
MIDMMIGVDLAKNVFQVHGALRTGEVQFRKKLTRKQFPAFMAQQNPCLVFFEACGGSHYWAREIEALGHEVKLIGPQYVRPFVKRQKNDAADAEAIVIAGRQPEMRFVAPKTVEQQSRAAVFRGRERLIHQRTADVNALRALLHEHGHVFPTGIRYLDRMMALVEDEASDLPALIREECQDLLAQIAEKTARITERNKKLSALASQSDRARRLQTMPGVGPLTAVAVEAFGPDMAQFKRGRDFAAWLGLVPKQHSSGGKERLGRMTKAGQADIRRLLIIGAMSRLGWLGQRTIAEGSWLSRMLARKPKMLVAIALANKMARQIWAMLTKNEDYKDPALAVVA

SEQ ID NO: 117028 - protein, 423 aa, unidentified
MMKLKYPICCGLDVHKNVIVATIVITNRDGVSEYRQKSFSTINSDIQKFHNWLIENNCYHVCMESTGKYWIPIFNYLEKDIEVCLTHPKYVKAIKGKKTDKKDSKWIADRYKFDLVRCSFIPPKDFRQLRELARYRFKLVCMKSSEKNRIQNCMTVSNVGIASVLSDPFGKTATEIMSYLLEHTADSIDEKAVRKLIKKGAKAKSDEIIEAIRGCNIETDQAKKLELALGHLEYLDGMITQTEVELYVRIKPYYEFVEFVSTMPGMTELSSTIVLAETGVDMNIFDDAKHLCSWCGLSPSNNESAGKKKSVRIAKAGAYLKPMMVQCALAAIKNKKQPYFAIKYGRIKKRRGHKKAIIAIARMMMVCIYHMVSEKKPFTPADYEELMKPQNHVERVVLNENNVFAYLESLGYDSSKLVKRNDN

SEQ ID NO: 117029 - protein, 424 aa, unidentified
MKVTYQTCCGVDVHKSFLVATIVKTTGGIEPSYQKKRFSTFNNSIFEFKQWLLDNDCHDVCMESTGKYWVPVFNLLEDEINVVIANPKWVKAVKGNKDDTKDSKWIGDLFRLGLVKGSYIPCKIVRILREYTRYRCKLVSCRSSEKNRYQNALTVCNVALDSVVSDIFGKSSTSIIDYLLEQSGTSINHEEIASKLLRSLKSKEDAVIESVEGYQMTDAQKYRMRLVRAHMDYITAEIKDVDKMIENMISSNPDFENAVQFLCTIPGVKCDSAITIISEIGTDMSQFSSSKRLCCWAGLTPGSNESAGKKKSVRITRAGVYLKPALVQCAHAAVKSDQSPYYKKKYESLVKRRGKKRAIIAIARMILTAIYQMLSTGEQWNPSDLYKIDVPEALIEKQKAKAIKQAKKLLQREGLLPPDEPVAS

SEQ ID NO: 117030 - protein, 350 aa, unidentified
MIIIGADYHPGFQQIAFVDTETGELQERRLQHREEAEKFYRDLAAQGMGVRVGMEASGHARWFERLLSELQFELWIGDAAEIRTKRVRKQKTDRQDAQLILRLLLEDRFRQIWVPSWENRDLRQLLWHRHRMVQARTRIMNQLQAVALNEGLRRKKGLWREAGRKQLESFPLAPWASRRRRDLLELLDRLNPTITELTQAIEQEVEKCPEAQRLRTHPGVGPLTALAYVLIVGRADRFQCGKQIASYLGLVPAEESSGERRRLGHISKQGNSLLRFLLVEAAQVTVRSDPEWRSKYFHLAMRRGRKIAKVAMARRLAVRMYWMWRKGWNYEQLTKFGSHAGQPGNRDGVQ

SEQ ID NO: 117031 - protein, 343 aa, unidentified
MEHIGIDVHKNQSQVCILTADAELIEKRIRTNRERFAAVLGSRPRAKILIEASTESEWVARCLEAQGHEVVVADPNYAPMYAHRSRRVKTDRRDARALAEACRIKAYRKAHRAADERRHVRGRLAVREALVQTRTKYISLVRALLRREGLRVQPGASSSFVERVSEIEIPKSLRREIAPILKLMGPLNRQIERATRDVDKIAQQDPTIRRLCTAPGVGSITAASFAAIIDTPERFKGAHQVEAYLGLVPRELSSGEKQRKGRITKTGDRRTRSLLVEAAWALLRTRRPAVAPLRAWTERLAARRGRRVAVVALARKLAGILYAMMRDETEFNDKYWTTETQGV

SEQ ID NO: 117032 - protein, 289 aa, unidentified
MQHIHTIGIDLAKNVFQVHGVDESEKVVLGKQLRRNQVIPFFEKLEPCLVGMEACATAHHWARELIKLGHDVRLIPPVYVKAYVKRSKNDAADAAAICEAVSRPSMRFVPVKTEEQQAALAIHRARDLLMRQRTQLINALRAHMAEIGIVAETGREGGAKLVEVVAEARLTGALPAEMIKALSAIIDQIFSLQEQIDELNRRIKQQHRTSEVAKRLEAIPGIGIITATAMAATVIDPGQFKSGRDLAAWIGLVPKQYSTGGKARLGGISKQGELASQEMVYEAVSQHWA

SEQ ID NO: 117033 - protein, 379 aa, unidentified
MEIITQNEKILYIGIDVHKDTYSLCCFDFHKNELSDEMTIKATTKAVIKYLEAIKKKHKEEILFACGYEAGPTGYGLCRGLQKAGYGCVVMAPTTMSNPDGKKRVKTDRIDARAIARILAYKSYSQVHLPSEEMEALKEYTRARDAKKRMFKKAKQELLSFLLRNGKSYPESGNYWTEKFFKWVKTVQFSEKWMQEAFNEYLAEVYSLKAKIELMDMKIREIAELEIIKDKVDKLVCFSGIDVITAVETVVEIHDFTRFATAAQFVSYLGLCPGEDSSGKTKNMLPLTKAGDKRVRALFCESAKAIKRTNPYGQKSKRILERQKNASPEIVAYADKATKRIRTKMRHLEERGKNYNVSSAAGARELACFVWGMMNGKIA

SEQ ID NO: 117034 - protein, 428 aa, unidentified
MKSNTQNAKIASITEKTLIVGIDVGSQVHYARAFDWRNYEYSRKPFAFSNDEEGFMAFKNWMNDIAEKHDKEVVLPGMEPTGHYWFGLGMFLQDMGMRPVHVNPHHVKKSKELDDNNPNKNDRKDPKTIAALVNEGRFSYPYIPTGIYAEIRNLSNLRFQTQEQITRIKNRIARWFSIYFPEYKEVYGNLDALSGMMILKMAPLPMDIVKLGVDGVNKIWRDAKLRAVGLKRAKTLVNKAEHSIGSQEAPEAARVELQILLSDYEMYNQRMDDLMQTIEEKLYEIPYIDKLLEIKGIGMITICGFIAEVGDIRRFDNPKQLQKLAGYAIVSNDSGKHNGESHISYRGRKRLRYVLYEAAISLIGKNTEFKEIHHYYRTRERNPLKKMQSVIAVACKVIRIFYAILTKGVAYDGAKMIKDIKRPALATN

SEQ ID NO: 117035 - protein, 487 aa, unidentified
MHPRTTNKSTQTSDVRRFNFESAGALALDNEYSGFAVLPAHYIAFAERKCARPWTSIYHLGRYDVKPLATQQFTAYVGIDWADTKHDVCLQAPGSQSREFDCIAHQMEDIDQWAHSMHQRFGGQIAVALELAKGPIVYALQKYDFFVLFPINPLTLAKYREAFTPSRAKDDPTDAELALDLLMRHPERFTPLQPQSEGMRTLLSLTEHRRELVGDKTRFTNRLTNTLKQYYPHALNWFEQRDTVLFCDFLTRWPTLSQVKRARRASLEAFFRAHNGRRAHVISARLDAIKAAMPLTEDMGVIAPCRLQVLVLVEQLRTTLQAIDRFDREITELAPTLPDYCLFQNLPGAGPHLTPRLLAAFGEDRQRYQHADELQKYAGIAPVTERSGKKRWVHWRWQCPTFLRQTFVEWAGQTINKSFWAGAYYRQQRAKGSSYQAAVRSLAFKWIRILYRCWQTRTPYDESKYLNALRNRGSPLIKNLELNVQNA

SEQ ID NO: 117036 - protein, 391 aa, unidentified
MTKPKVKTVNDLSRCLDPLDMDATVIAVIEMSQSSWLVAGIVPGVERQPLKKLAIDEHALLKLLSRWRAEAEKKGHRITRIAVAFEAGHDGFWLARWLAAQGIESHVIHASSVAVTREHRRAKSDRLDTELLKRGFLGWLRGERGHCKMVAVPTLAEEDAKRPSRDRETLVGEASRIITRVKAAFVRLGIRSFNPKLKAAAARLGPLRTPEGEPIPPNTLAALKRDLERHRIVKQQIREIEQARLALLEKAPAKGPNAMVLLLARVVGIGVETADMLVQEVLSRNMRDRRAVARYGGLTGSPNESGAKRREKGLARSGNARVRHGMIQLAWRFLLFQKDSALAQWYRQRTADAPSTRKTLIVALARKLLIALWRLARDGVVPEGVRLRPAA

SEQ ID NO: 117037 - protein, 364 aa, unidentified
MPILHPDTVHLGLDVHKDSISAGILNPGHETPDVEKIFHDEESVRRLIGRFPDPRLVRACYEAGPTGYDLARLLVSMGVRCEVIAPSMIPKAPGDRVKTDTRDCRRLARLHRAGELVAIRIPTPTEEAVRDLCRTRADMVEDLTRARNRLTKFLLRHSRVWRGGSNWTVKHEAWLGAQTFSEPALATTFGHYRAVVVARDAALDAVEADLVAWFDKAPFAEGVHRLGAYRGVTRMGALALQAEVCDWRRFGRASAVMGFVGLVPSEYSSGGSTRRGHITKAGNTHLRAQLVESAWAYQHRPNVGSQIAKRHDGLPPEVVARAWAAQLRLCGRFRHLAARKNTKSVVAAAVARELAGFLWAEMVA

SEQ ID NO: 117038 - protein, 315 aa, unidentified
MTHTPRFVGIDISKAQLDIALRPEGQFAVPNDETGRAHVVERLQALPVALIVLEATGGLELPLIGALVAAGLPVVVANPRQVRDFAKATGKLAKTDSLDAQILAHFADVIRPVPRPLPDAQTHALAALLARRRQLIEMLTAEKNRLGSAPHSLHKRLKVHLTWLAREVTQTERALATAIRESPVWRENDDRLRTVPGVGPGLARTLIVSLPELGTLNRKQIAALVGVAPLNHDSGTLRGKRTVWGGRAHVRATLYMAALVASRCNPVIRSFYQRLCDAGKAKKVALTACMRKLLTILNAMVKHRTRWGTHDIVCP

SEQ ID NO: 117039 - protein, 401 aa, unidentified
MAAVRDNAWVGIDVGKTHHWVCAVDADGKTLLSVKVANDEAGILSLIAAVTALTQQLTWAVDIIGAPSALLLALLAQASQPVRYASGRVVAAMSAAYVGEGKTDAKDAYVIAETARIRRDLAIIDTDTDLVRNLAVLTGHRADLIADRVRMINRLRDLMTSVFPSLERAFDYSSHKGALVLLTGYARPDRIRRIGQTRLAAWLRTRHVRGFAEVAARAIAAAKAQSVVLPGQDLTASIIAELAGNVLRLDERLKSLDDQIEELFQQHPQAAIIQSMPGFGPFLGASLLVGAGDLRAFPNAGHLAAAAGLVPVPNDSGRRTGNLHRPLRYSRPLRHVCYLSAQTSMMRAGPNRDYYLKKRANGRTHSQAVIALARRRIDVLWALLRENRTWTATPPQLAQAA

SEQ ID NO: 117040 - protein, 338 aa, unidentified
MKAYAGIDLHSSNNYIGIMDQDHKRLFGRRLPNSLDKILMVLEPFKSDLKGVIVESTYNWYWLVDGLQEHGYRVHLANPSAIKQYEGIKHTDDKWDSFWLAQMKHLNILPEGYIYPKEQRAVRDLLRRRLFFVRHRTANILSLQSTITRNLGIKMSSNEIKRLDMDNACDLFDSANLVFMAQNNISTIKHLGEIIKGIEKEVKSQVKLRKEFVMLTTIPGIGLILGLTIMLEVGDIGRFFKVGNYSSYCRCVGSKRLSNGKKKGENNKKNGNKYLSWAYVEAAHFAKMHIPKAHRFHQQKMAKANGFVATKALANKLSRASYFIMRDQVPFDEDMLFR

SEQ ID NO: 117041 - protein, 346 aa, unidentified
MNNHNKKCTIKVLGIDLAKQSFQLHGVDEQGKVVLRKNLSRNKLTSFVANLPPCLIGLEACGGAHHWVRVFKSLGHTVRMMAPQFVKPYVKSNKNDAVDAEAICEAVQRPNMRFVPEKSISQQDIQCIHRIRSQLIARRTAQANQIRGLLMEYGIIIPKGISYIRKVIPHILEDADNKLTSLLRELLNELYDEMVYLDERISSLENKLKIISHQNEDCQRLLTIPGIGLLTATALIAAIGNISVFRSGRELAAWLGLVPRQHSTGGMPTLMGISKRGDCYLRTLLIHGGRTVVRVAHLYTDKRNLWICELDKRRGKNISAVAVANKNARIAWALLSKKESYQVTAI

SEQ ID NO: 117042 - protein, 400 aa, unidentified
MRVVFGIDVSKASSEVAILVNGEKVHGYTISNDAIGFARLLGDLRTVHKPEIIFEATGVYSRRLQTFLDDNGYAYTRLNPLETKKQLDSLRVRKTDQIDAEKLAQSQFVLNRKPTYVQEEVYQNLRDLSRFYQNLTEDIVRAKNRLHKVLQVTFPELENILSTPSGEQYWNLVIAFPCKDCVLELSNDELSKSIRLSTSKRISDKRVAYLAEKLIALANQSYCAVKKTSPILEEVRYYTKELLRLSEQRQAVLDEMVELAQPLPEYDILLSIPGIAETTATSIIGELGDIRRFQSANQINAFIGIDLRHYESGNFLAKEHITKRGNPYARKILFKCIHNIASASHTNPCHIADFYEKRKRQSQTTSTKPHTIASIHRLIRTMYYLIMHNKLYDYASTQNR

SEQ ID NO: 117043 - protein, 415 aa, unidentified
MALKIVYKICCGIDVHKTFVVACIASTDKQGVTSYERHRFSTYTKGLKDLLQWLLARNCKDVCMESTGKYWIPIYNILEKDCSIVLAHPKYVKAIRGKKTDKKDAKWIADLFKHDLVAGSFMPPADIRQLRDLMRYRFKLTCFMSSEKNRLQNCLTVSNIQLASVVSDTFGKSSQRILDKILENPDDTSFDIEPLIHGSMKKKLPELELAIDGFITPEQAGKLKVIKKHFEDLESRKAELEKLILALASPYQQELDLILTAPSFKNKFTAIGIISEIGVNMEAFPSAKHLCSWAGLTPTNNESAGKKKSVRVSKAGCYIKPLLVQCANSVVKSEKHPEIRNRYLRLRKRRGHKKAIIAIARMLLTALYNMLKNKEPYNAELYRKSDVLPVNREITIEQAILMAQFQGYKIKSAAE

SEQ ID NO: 117044 - protein, 377 aa, unidentified
MLYLGIDQHARQITISLRDEGGDVVQARQVSTQPEKVQAFFQQLTRERLHDGESFVAVLEVCGFNDWLIGLLHEYRCHKVILIQPEERKLRKTDRRDAAALSELLWVNRDRLLQDKPVRGLRQVDIARSTDQENRRLTTLRKDAGRARTRLVNRVRHILRRHNLQWQMPTKKFPSKSGLAWLKQLALPEIDRLEMNHLLADLEQVQGRRQELEQVIAQRCGVSAEAVLLSSMPGVGYFTAVALACRVGRVERFPRAASLANYWGLTPGCRNSGESNQRLGGITKAGSSMARWLLAEVTIKVLRRDARLREWFKRLKRRRGASIARVAVMRKLATVIWHMLSKRLTYAACRDAGEAGTKARQEQGAEGSRPGGAVGRV

SEQ ID NO: 117045 - protein, 393 aa, unidentified
MRSIGLDVHRDFCEVAIFEDGKVSRHPRVPARKAALVAFARSLEPTDQVGLEATGNALAIARLIEPHVARVVIANAAVTKGIGAARAKTDQLDARTLAQLLGTGFFPQVWLAEEPTRLARRRMSRRAQLVRERTGLKNQVHAVLHRNLIERPPASDLFGVKGLRWLATVELPEDERETVSSCLRQLRFLGDELRRLDQVIAQSALEQQSIGLLLTVPGVNLITAVAFMAAVGDISRFETASQLVSYLGLDPTVRQSGLSPARHGSISKQGSAGARWALVESAWVVAGAPGPLHAFAERIRARRGANVATVAVARKLAVLFWHMLTKNEEYAFGRPSLTAEKLRRIELTAGAPSIRGKRGGGRVYASAEQRQREQQIAVHAETAYRQFVSQRGS

SEQ ID NO: 117046 - protein, 359 aa, unidentified
MDIQSNKLDFSNQNIYVGFDVHLKSWKVTVLTEKVTMKTFSQDPNPELLHQYLVRNFPGGIYHSAYEAGFCGYWIHNKLISLGINSIVVNPGDIPTTNKEKVQKEDQRDSKKIARFLRSGELKAIYVPDLKTLEDRGLLRARATMVKDLTRYKNRIKSFLYFHGIVYPESFTKSQSHWSKRFMNWLESIELTEESGKIALNSFIQQSKNLREAVLNLTKQIQALSQTDTYHNNVILLRSLPGIGLLTAMTILTEFESIQRFDNLDKLCSYVGFVPSTNSSGEQERIGDVTSRGHSVLRNAIIESAWIAIRQDPALLKSHLDYCKRMDPNKSIVRIAKKLLSRIKFVLKNKQPYVSSWPK

SEQ ID NO: 117047 - protein, 416 aa, unidentified
MQVLYPCCCGLDIHKKFVVACVLTTSADGSVQKETRTFSTMTNDLLSMVDWLHSLGCTHIAMESTSAYWRPVYNLLEGLFELLVGNAYHMKTVPGRKTDVKDAEWIAELLRHGLIRGSFIPSPEQRHLRDLTRYRTHLVEERARITNRLQAVLEDANVKLASVVTDIRGASARAILQALVAGETDPSTLAELARGRLRSKRELLAQAVIGHFTAHHAFLISEQLSHLDYLDEAMERVSSEIEKRLQDDRSAIELLDTVPGISQRAAEILLAELGTDLSRFPSAKHLASWAGMCPGNKESGGKRLSGKTRHGNSWLRQVLIEIAHVASKTKDTYLAAQYRRIAARRGKKRALIALGHTILVIIYHILTRREPYRELGVSYFDELDRQRVEQRLVRRLERLGYTVSLQPAALGSKLAA

SEQ ID NO: 117048 - protein, 346 aa, unidentified
MLHVGLDLSRKRIEVCLISDQGELIDQFQVPADRDGLYGLTRRVAVYGQPARGVVESMNGARFVHDELVGHGWEVLIADAQRVKGLAPLACKTDKIDSRVLATLSFHDLVPAIWLPTAELRRERERSRWRLHLVKHRSTLKNRVHSTLIAFGYQVPMADLFGHGGRQMLRGLDIPEPWRGHVLASIELIDELELRISHIEAELKRSGADHRYVPTLMTAPGFGWITSFTVACELGDITRFSTPTKFVGYTGLCPRVSQSGDVNLRGPVSKRGPRYLRWGLMEAAVHAAPHPLYKERYQRLKRRHGRQRGAKVAQIDLSRQLATAIWYMLTRNQPFAPASATCRLAA

SEQ ID NO: 117049 - protein, 462 aa, unidentified
MDLPSSVRFLVGVDWATVEHQVCLLTRDGALVGQRRFPHSGEGLSALVDWLLTHAHGEASSVWVAIEVPHGAVVETLLEQGFVVHSINPKQLDRFRDRFTVAGAKDDSRDARVLADSLRTDAQAYRPLRVDEPKVIELREWSRIGDDLQQERTRLCNRLREQLRRYYPQALELTDDLDAGWFAHVWRAVPTPERARRVRESTLASILKSHRVRKLTAAHVLETLRRPPLHVAPGTVEAATAHITLLLDRLAIANQQWHQCQQRLEALCNELAHPAPSDEPSSGQVSEQRDAAVLRSMPGLGRIVLATLLAEASQPLSSRDYQALRSLTGLAPVTRQSGKRHVVSMRYACNARLRRATYHWARVATQRDAASRAHYASLRARGHTHGRALRSVADSLLALTCAALRSHSLYDPSRRTRWTTHSCAASRSSSDPDPTLGAVRSPSSDPSPALDLPAGLPPRQTA

SEQ ID NO: 117050 - protein, 367 aa, unidentified
MKYKLKAAPTALSKQENSQKGPKATRIVIGVDVHLKSYEAARKIDNDSVGVVQRWRSKEEFLLYAEKQLEQAEEVVVVYESGPLGFTLYWDLKARGIECLVCAPQSQEQKRKRRKNNAIDARTLTGNLFNYLNGNKHALQLVRVPTKAQEQARIESRQHDALVEERKRIAAKGNSLLLSQDYGSWKNWWRPKAFERLSQLVAPWVLKQLQRWINILGELDRQIVQAKVELTQQYQGPRPKGMGAPSLAQLNAEVLDWNLYSSERKMGCLAGMVPSEWSTGEGQRLGAITKVGVPAIRRIITEMVWRMILFQPQYKAVQKWREVLEGSNRGLKKKAVVAIGRRLIVDIWRLQTGRITAQELGLIMMEA

SEQ ID NO: 117051 - protein, 470 aa, unidentified
MPQLWAGIDAGKTEHHCVVIDTNGTKLLSQRFKNRETAILTLMGDVASLPGGTDVAWATDLNYGGTGLLQTLLSSHAQPLFYISGRVVHHASGAYRGEAKTDAKDAVIIADQVRTRRDVTLMRQADEFTAELRLLSSRREDLVHDRTRTVNRLRAILVRYFPSLEGAFNYATTRGPLVLLTRYATPSAIRRMGESRLASWLKGQGCWKSAAVAKAAVDAAREQTSVVVGEGAAARLVGRSARDLLRIRDELAELEAEIDAVLAGSACADLLVSVPGFGQRLAADFLAATGADLAAFQSPDRLASFAGLAPVPRDSGKISGNHHRPRRYDRRLLNACFQSAFIAARTCPVLRSFYERKRQEGKSHKQALIALARRRINVIWAIFRDQTVYRPTPTQLQVQGCVPESDDPDLIWVEYGACCKIRPTFLPQSDEQGILLEGRRPTVRRAVGALVEEKDGNDQFWSISWSDTAG

SEQ ID NO: 117052 - protein, 366 aa, unidentified
MEKYKFVGLDVHKATIAVAVAEPNGGEVRYVGEIANTPEAVVKLVRQLKKDGATPSFCYEAGPCGYVLYRQLKGLGLECMVVAPSLIPTKAGDRVKTDRRDSLNLARLFRAGELTAVWVPDGAQEALRDLTRGREDMKHAEKQIKQRLLAYCLRHGKSYGGETNWTKMHFRWFETVKFEHPVQQIVFQEYVDTVKALVKRVEGLDGQIATSAAESVFWPVIQSLMALRGISLLAAAIIVAEIGDLRRFASAPQLMAYLGVVPSEYSSGATKTRGAITKTGNGHVRRILVEAAWTYRHPARKTEYLQRRAKHAPDHVQEIAWDAQKRLCGRYQLLQTKGKLKQKVCTAIARELTGFIWAIGQALPQQ

SEQ ID NO: 117053 - protein, 410 aa, unidentified
MRYYLGVDWADQTHAVWVVDEGGTKVAMRTVPHTAEGLTEWGRELDEWRAQGIELWAAIERPEGRVVDFLLDHGVVVYAVNPKTLDRARDRFRQSAAKSDPFDARVLADFLRTDHAHLRAVQPSSEAAQELKLLTDDYQRQIRQQTRLVNQLTTTLKAYYPRGLEVAELTTGLAREFLQAYPTPATITALTERQWQRWAHAHRLSETRTQQLWVVLQRPQLPIPPHVVRAKARLMQSLVAQLMVVMEGVGAYREAIEDFFARIPAAQWIRTLPIGDHGITAPTLWARLGDAPGRWESFRHLQAQAGTVPVTIRSGKQQVVRFRFACDKSLRYIIDHVAFLSLRWSEWAHAYYAGQRARGHSYRQALLRALSAKWLKIIFVMWERQIPYDEQYHLAMMTRQQLRQRQEKVA

SEQ ID NO: 117054 - protein, 358 aa, unidentified
MVTQVSKAKDFTGQNIFVGIDAHLKSWKVSIFSSEFELKTFSQNPDVEQLSGYLKRHYPGASYKLAYEAGFCGFWMQRAFCNRDIDCVVIHPGDVPSSDKEKKRKSDKVDSRKIARGLRNGDLNNVFVPDEQQEADRQLVRSRAKITKDITVVKNRIKSFLRVRGVEIPEPFSERSWSRAFIVWLSSLEFSSSSNKIALAVYIDELVFLIDKQKQLLKGISELSKTEHYKNNMRLLKTIPSIGSLSAMTILTEIGDINRFKKSEHLFSYCGITPNCHNSGERENIGNMSKRGNATLKTMLIECSWIAIKKDPALLLSYKQLLPKMTATKAIIKVARKLVSRIRFVLKNQKEYEIGIIE

SEQ ID NO: 117055 - protein, 370 aa, unidentified
MLDTTTFVGLDVHARSIKAVSLDVMTGEVRAATFGYDAGAVAEWVRSVDPRARCVYESGVTGFDLQKRLSGLGVGCVVGAVSKMIKPSADRRRKNDRNDAEFLARMLSVGNVVEVWVPDDECEAARDLTRALEDARDDLSRSKQRLSKFLLRHGFVFDERTPTGRRKGNWTRAHWSWIESIRFAEGADEEVLAYYVDAVRRAAEEKARLERLVEGEARKPRWRRRVDSLRCLKGVDTASAADLVFEAGEFSRFRNARSFAAWVGLTPSEHSSGESDRRGAITKAGNKHLRKTLVEAAWHYLTCSGRPKDLAKGQAPDRGARRHAAKGVRRLVERREALLARGVHGNKANVATARELACWVWAVGLMAEEA

SEQ ID NO: 117056 - protein, 399 aa, unidentified
MPAIWAGVDAGKTHHHCTVIDSDGQRLLSRKTANDEAELIDLIAEVNALDTDVLWAVDLNSGGAALLITLLLDHGQELIYIPGRTVHHASGSYRGDGKTDAKDAFVIADQARMRRDLQPLAAFDEIAADLRIYTARRTDLGADRTRAINRMRDQLLGYFPALERAFDYSKSKAALVLLGGDQTPAALRRMGQARLESWLRARKVRNAARVARAAITAAQAQRTTVRGEKAAASMVAKLAGEVIALDAEIAETDAAIEGRFREHEHAGVITSLPGVGTLLGAEFIAATGGDMAAFASADRLAGVAGLAPVPKDSGRISGNLHRPRRYSRRLMRVFYMSALLSIRCCPASQAFYERKRAEGKRHAQAVIALARRRVNVLWAMLRDGRPYSAAPPVKLAAAA

SEQ ID NO: 117057 - protein, 344 aa, unidentified
MKKNLFFIGLDIAKADFAASIYQTPDQPIVTKEAIPNDPKGFEMLLSWLKDHHIDKKNCRICMEATGVYSQAIAYYLLFQGFPVSVEPPLKVKRAFDPIGHKTDPVDSKQIAEYAYRFQDELTSWKPRDEILEKIRQLLSVREQFTKQKVALDNSLQAYSKQRVQVALIKKAHQETLNQLKKQIARIDKELANLIKQDPEIFQRASNLDSIPGCGMLLAAHLLVITENFTKIQNSKRLAAFIGIVPYQNQSGTSVFKRAKIRHFGPGPSRKLLRLAAQSVSTHNVTFRHYYLRKLDQGKAKPLVLNNIANKLLKVACTIIRNNTRYIKEHRSIHPMYLKSLKSA

SEQ ID NO: 117058 - protein, 417 aa, unidentified
MKSSQQIIYYGGFDWGREHHAVVVVDLQGQIVADFQFDHTRSGWQKFREKTASFTGLAFAIETNQGAAVDQLLQQECIVYPVNPASAKSYRQRKMPSGAKSDHVDAWSLAEALRLDGHGWKPLKLTDDASLKLKWLCQDEVVLISQRTQLVNQLQQALVEYYPAALEAFDDWTQSYTWDFIIAFPTPTALAKAGQRRWQKFLHLHRLWRPATLDQRLQAFAGADQFKGSAAITEVKSQLAVSLCKLLRTLQQQLDDYRQKIAELFAQHPDHHLFASLPGAKTKLAPRLLAAIGSDPGRYANDPHVLQAFAGTAPISFQSGQHHAVKMRRACDKFLRYTVHLWADTFRRACPWGDVYYKQKRAEGMSHACALRCLAQRLLKIVFRIIVDKKPYDAELHARNQQKHGSWVLSLVKPTPV

SEQ ID NO: 117059 - protein, 316 aa, unidentified
MPETFIGIDVARDSLEIAVRPTGAHWSASNEPTALGELVARLLELDPQLIVLEATGGLELALLAALGSAGLPVVAVNPRQVRDFAKARGTLAKTDRLDAQVLAHFAAAMRPSVRPLPEAATQALAALVTRRRQLLEMLVAEQNRTAMAPPAIRSQIEEHIAWLRQRLTGVDRELATTVRASPLWRAQEDLLRSVPGIGPVASVTLLAELPELGTLNRKQIAALVGVAPLNRDSGAWRGKRTVWGGRATVRSALYMAALVGSRHNPVLRALYTRLVAAGKPKKVALTACMRKLLIICNAMLKQGARWAPPDPMAPNP

SEQ ID NO: 117060 - protein, 459 aa, unidentified
MAKQHRKKKEDQKADELDGLPPLNRNAAGIDVGSAAHYVAVPVGRDAEPVQEFGSFTADLHRMGQWLKACKVETVVMQATGVYWTALYDVLESYGLKVNVVNARHTKTLPGRKTDVLECQWLQKLHTFGLLNNSFRPAEEIRVLRSYMRQRENLVTAAGTAIQHMQKALTEMNIQLANVISDISGTTGMKILRDIMKGERDPQKLAMHRDGRIQASREEIARSLEGTWRPELLFVLEQSLELYDTYLKKISECDRRVDEHLKSMDAKVDATQPVPEPKRLRGPRKHEPRFDLRGQLYRITGVDLTQIDGVDVQTAQTVISEVGVDMSRWNSEKQFASWLGLCPDNRISGGKVLKRGTRHVVNRAATALRLAAWGLLRSQSALGAKFRRLRSRLGAPKAITAMAHLLARLFYRMLKFGHEYVDKGMEYYETKYRQQQLQWVAKQAAALNMQLIPVAGVAN

SEQ ID NO: 117061 - protein, 402 aa, unidentified
MNAVGIDVSKSKSMVAIMRPFGEIVSTPFEIKHTASDIRSLVELINSVEGESRIVMEHTGRYYEVLAHQLSEANLFVSAINPKLIKDFDNDSLRKVKSDKADSVKIARYALDKWQNLKQYNVMDELRNQLKIMNRQFGFYMKHKTAMKNNLIGILDQTYPGVNTYFDSPARSDGSQKWVDFASTYWHVDCVRKMSLNAFIDHYQNWCKRKKYNFSQSKAEEIYGKAKELVPVLPKDAITKLIIKQAVDQLNSASTTVESLRTLMNETASKLPEYPVVMAMKGVGTSLGPQLMAEIGDVSRFTHKSAITAFAGVDPGVNESGTYEQKSVPTSKRGSADLRKTLFQVMDVLIKTHPQDDPVYQFLDKKRAQGKPYYVYMTAGANKFLRIYYGRVKEYLSSLPES

SEQ ID NO: 117062 - protein, 389 aa, unidentified
MITIGIDIGKFNHCACVVDHDTGELLVEPFFFKNNRVGFTSLITKINPYQSCLIGLEDSGHYGDNFIFFLLDHGFKVSLINPVTADQKRKAKLKSAKNDKKDAILISKILLDKDEYRIVTKSHYRLRQLKQLTRHHHHLMKDINVYKNRLQKHIDLVFPEFNSLFKSKYGIIYMRLLKQFSSAHNIQKTNIRTLRKMLHIEGRGRKITLTAEHLKLIASHSVGENNPCSEIEIKHLISLIELLKLQVMEIDKKIEEFSHQMNSPILSIPGISHITGMSILSEYGDIRRYASPAQMISFAGVNPYVYQSGTYQAQQTLITKQGNPFLRKSLYQVALTVVHNNSVFQEYYNLKRAQGKSHRCAQGHVIRKLIRIIFHLVTNDLQFDSAKLN

SEQ ID NO: 117063 - protein, 327 aa, unidentified
MNDRQVVYVGIDVSKDSLNVDAGALFKGDVPNTPAGIRSLVRKIRKRAGDGGVPHFCFESTGPYSESLFIECCGAGAAASVLNPVKVRRYAEAMSESAKTDPIDARVIRLFAEAKKPEPTHPPSASEIALRKLVLARDALTKCVVQLSGTLEGASGGDAGSVLKSAVVQLRKKIKKLDRLIAEALKGDARLAGLADALTGIAGVGVLSAAKIVALVPELGTLGRRRSAAIAGLAPFTRDSGRYKGKTFISGGRAEVRRALFMPATVAIKHNPVLKAAYQNLRKSGKAYKVAITAIMRRLFAHMDAVAAKWLRETAAAASSAALTALP

SEQ ID NO: 117064 - protein, 344 aa, unidentified
MYFIGVDHHKQASFMTVLDEAGMEVKKGRVLNLKKHIERFLEGCKPFKAALEAGRASYEMADLLEELGGEVKIAHAYQMKAIAQARIKTDKRDAKVLAEALRLGMVPEIYRRGKANRQAQRILRQRAFWVSKQTEVKNKIRALLSHQKEEIRLDVDRREDGLFSEKGVEFLENLALEGPDRKILDQLILGYQQVRAHIKDSDEGVRQLYREMEEAALIDTIPGFSTTFSVLVAVEIADIKRFATPADLHSYAGVIPSTYASGQRTFHGSITKRGNSFLRWAAVEAAFPAIKKDLGLKVLYQRLARRKGPNVAKIAVARRLLTIIYRVLTERRAYIPDMKQTSAA

SEQ ID NO: 117065 - protein, 348 aa, unidentified
MAIVGGFDIHRRQVTFDYLDTVTGQVRRGRISPACRETLRQWLERFGGRQDVTFAVEGCTGWLFVVEELQRAGIAALLAEPAETAHLRGPKRHAKTDKTDSRHLRMLVADGRVPLSWIPPRQVRELRALLQLYRDLAEEHTAWTQRIHATLFHQGVPSLAGQLGDQKVRARLAADGAAMGLSPAGAQAVAVALRRMDDLEAELHPVRAQITAFARRQAGCKALARELFGVGPLVAAVVWAFLGDARRFSSSAQAVRHTGLDVTVRSSDGKGPPGYLSHQGPPILRWALFEAGHQSSRTASPDHRYYADVAERIDANRAALSVARKLARRSHHILRRLGDQAYTPVPDW

SEQ ID NO: 117066 - protein, 347 aa, unidentified
MNYCGIDLAGVSSYAFVTDEKGNKLWSGPIATEKVAFEHLVKKFAGGGLSIAIEAGNQTAWVHEELVKLGAEVTVVNPTKVKLIAESRRKTDKIDAKILCELLRLNALPHPVHMPGPEARELRGLLVARRQLVSARSKLSNVARGMLRQTGVRLPAGGLSSLAAWKRLLAGGFDQEHLLIIVSAYYDSFRALTKSIRELDRQLAQREKSEPRAQRLKTIPKVGRIASLTFLAAVDDVKRFSSSRKLVGYSGLAPTVRQSGERTEYGAISREGRRELRAVWVQIAHLVARDKTKATQPLRSWFNRVARKRGKKTALVALARRLLVIAYQLLRTEQDFDVGRLKKKRAA

SEQ ID NO: 117067 - protein, 322 aa, unidentified
MNYVGIDISKSSFDVAIEKDNRYHYYKFSNDKAGFKELLKAINVTDPWCVMEASGPYYLRLAWYLREQGIDVSVVNPLVIRRFCQMRLIRAKTDKKDAAMIAEYGKTERPKAWKEEDAYVMELKQMQAYVDILEKTRTGLINQLEAFDQSPISSVTVRKGLVKMIGQAEKQMKETEKQMDAIVTKYHGEMMAQVKSVPGIGKKTGLLLVVVSGGFTKFENAKQLSSYLGLSPRIFLSGTSVKGKARICKMGMSRVRAMLYVCSWSAIKCNKACKELYQRLVAKGKSKRLALIAVANKLLKQVFAVATKGILYDENYLQKTCF

SEQ ID NO: 117068 - protein, 360 aa, unidentified
MTKARSQVGLDVHATKIVAAVLDVETGELQTFAMSGDAVGAAGFCAGLPRPARVAYEAGPTGYGLARELVKRGVECVVAAPSKIPRASGDRVKTDRRDAELLARLLMAGKLHPVRVPGDEEEALRDLVRAREAVRVDLMRCRHRLSKLLLRHGIRFEGGAAWTQRHRDWLATVTLDWPAAQATLLDARGAIDALVHRREQLEREIIAMIPDSPWSVQVGRLRCLRGIDTLTAVGLCAEIGDFERFARAEQLMSYTGLVPCENTTGQQRRLGSITKTGSGHARRLLVEAAWHYRTRPSVGRALTDRQQHQPPEAIAVAWSAQQRLRRTWARLEQRAKRRTIIAVAAARELAGFAWAITQIE

SEQ ID NO: 117069 - protein, 436 aa, unidentified
MAKVFIGVDPHKLSATIEVVDERETVLATGRFGTDKAGYAAMRKHVAAWPERVWAIEGSNGAGRPLAQRLLADGQDVVDVPAKLSARARLFDTGHNRKTDAHDAHAVAVVAVRTQGLRVLSYDEALEALRMLADRREELTRQRVQTVNRLQRLLSELVPGNGKKDLTALQAKAILASVRPRDLPGKTRRRLAVEQLAELVAVEKRIRALTAELKQMVKASGSGLMDLRGVGPVVAARVLADVGDIARFADRNRFASWTGTAPIEASSGEIVRHRLSRAGNRRLNHMIHIAATTQIRLETPGRAYYRRKLAAGKTRAEAMRCLKRRISDVLYRQLLADAKTVDAAGPDAGPGGHRGATLHSSAAGSHPHTGTSDQPLPGPAHPTLPATKPHANPCAASAPRPSRRRAGAVKVERPTGRTTLTATSAGAHSAAPKPPS

SEQ ID NO: 117070 - protein, 342 aa, unidentified
MKDMMIGVDLAKNVFQVHGPPRTGEVQFRKRLTRTQFSVFMAQQEPCLVIFKACGSAHYWAREMEAVGHEVKLIAPQYVSPFVKRQKNDAADAEAIVIAARQPEMRFVEPKTLEQQSRAALFRGRERLVHQRTADVNALRALLYEHGHVFPVGMHHLNRITALVEDETVDLHALIREECLDLLTQIAEKTARVIERTTKLKTLAAESDRARRLQTMPGVGPLTAVAVEAFGPDMEQFKTGRDFAAWLGLVPKQHSSGGKERLGRMTKAGQADIRRLLIIGAMSRLGWLGQRTILEGSWLSRMLERKPMMLLAIALANKMARQIWAMLTKNEDYRDPALVGSA

SEQ ID NO: 117071 - protein, 421 aa, unidentified
MRGFGLDVHRDFCEVAIAEQGEIRSAGRIPTRVASLELFARSLVAGDVVALEATTGTDKIVSALQLQGIRVVVANTRKLKAITEAKAKTDRLDARTLAKLLISGLLDEVWTPDERTRALRRLTNRRERIVRARTRAKNEAHGVLARNLCERPPVTDAFGKAGRRWLAELELPVDERLTLDGCLRQVDFLDAEVAALDREISKQALEWPEVLRLMSVPGVNVQTAAAFMASVGDIRRFSSPRKLVSYLGLDPRVRQSGNGPPRHGRISKAGASETRHMLGEVAWKVMQTPGPLRVFFERVRARRGPQVAATATARKLVVLFWHLLTREQDYAFARPAMTRNKIRRLELLAGAPSQKGRKGVAGGKSKQVFEAERELSRQAEAAYRRLVNDWKATGPPKVGAGVTPGRASQRPSKGKATRQAR

SEQ ID NO: 117072 - protein, 402 aa, unidentified
MNAVGIDVSKGKSMVAIMRPFGEIVSTPFEIKHTASDIHSLVELINSVEGESRIVMEHTGRYYEVLAHQLSEANLFVSAINPKLIKDFDNDSLRKVKSDKADAVKIARYALDKWQNLKQYNVMDELRNQLKTMNRQFGFYMKHKTAMKNNLIGILDQTYPGVNTYFDSPARSDGSQKWVDFASTYWHVDCVRKMSLNAFIDHYQNWCKRKKYNFSQSKAEEIYGKAKELVPVLPKDAITKLIIKQAVDQLNSASTTVESLRTLMNETASKLPEYPVVMAMKGVGTSLGPQLIAEIGDVSRFTHKSAITAFAGVDPGVNESGSYEQKSVPTSKRGSSDLRKTLFQVMDVLIKTHPQDDPVYQFLDKKRAQGKPYYVYMTAGANKFLRIYYGRVKEYLSSLPES

SEQ ID NO: 117073 - protein, 402 aa, unidentified
MNCVGIDVSKGKSTIAVMRPFGEVVVSPFEVCHTASELSELARLLKSLDGETRVVMESTGNYHAPVAWLLHGAGLYVSVVNAMLVHDYGNNSLRRGKTDKKDAVKLANYGLDHWLTLPRYVPEEDTRLMLKTCYRQYQQYSKVQTMLKNNLISLLDTAFPDANRLFTSPPRADGSEKWVDFVATFWHCECVCGLSKKAFTTKYQKWCRKHGYNFSEDKALDIYVSACGRFGVMPKTKTAKLLVEQAISQLQATSAALAALKQEMQSLAASLPEYPVVMGMFGVGPTLGPQLIAEIGDVRRFHSKKALVAFAGIDAPPYQSGQIDVRSRSISKRGSASLRRTLFLVMGVLLQCAPMDEPVYQFMNKKRSEGKPYRVYMMASANKFLRIYYASVKTYLDSLEHD

SEQ ID NO: 117074 - protein, 338 aa, unidentified
MNHYAGIDVSLKESHVCVVDASGKIIREGKVASEPEDLIGWFGALGLAVTRIGLEAGPLSQWLYAALRDAGLAIELLETRHVRNALKIMPVKTDRKDAQGIAELMRLGWFRPVHCKSMEAQETRAILTARKLVQKMLHEVEMSLRGVLRGFGLKVGKTTPVTFEARIRELVAGHPSLEVIAQSLLAARAVLRREFNGFERRLRAMARSDRRARLLMSVPAVGTIVSLTYASAIDDPTRFKSSKIVGAHFGLTPKKYQSGETDRSGRISKIGDASVRAALYESAHIMLTKPIKGCTALKAWAMRIAKRAGMNKAKVALARKLAVIMHRMLADGTTFTPA

SEQ ID NO: 117075 - protein, 354 aa, unidentified
MSQTQNAAIAVVGIDIGKNSFHIVGHDERGAIVLRQKWSRGQVEARFANMSPCLVGMEACVGAHHLSRKLNSLGHNARLMPAKYVRPYSRGQKNDFRDAEAIAEAVQRPTMKFVATKTADQLDLQALHRVRERLVSQRTGIINQIRAFLLERGIAVRQGQRFLRAELPRILATPPDVLSPRMVRMIEDLAGDWRRLDERVESLSNEIETIARQDAGCERLMSVPGIGPIISSAMVAAIGAGDVFTKGRDFAAWLGLVPKQISTGDRTILGKISRRGNRYLRVLFVQAAWVVLIKPKIWERHGLKPWIEAARKRLHHNVLAIALANKLARIAWSVLAHGRAFEARKIDQAANQSA

SEQ ID NO: 117076 - protein, 383 aa, unidentified
MKKTQETLRIKDSIKAVILYIAFELSSSKWKLAFSDGSKIRYKTITAGNLSQLQVEIDLAKGKFKMIEDVRVVSCYEAGRDGFWIHRYLEGQGIENLVVDSASLEVNRRKRRAKTDRIDVAKLMRMLLRYWGGEKKVWSVVRVPSEQDEDARHLHRGMESLKKERTKHRNRIKGLLIQQGIKVSNPSQKKFLEVLEKLRTWNGQAVLPGLKSQVVMEYERLQMVEGQIKALEKEKTERLKNPDTASLKKVAKLALLYGVGSVSSWTFVMEFFGWRQFQNRREVGALAGLTPTPYDSGKSLREQGISKAGNQHIRALAVEIAWAWLRFQPQSKLSQWYMKRFGGGGKRMRRIGIVAMARKLLIDLWRYLEYDKIPEGARLKSVT

SEQ ID NO: 117077 - protein, 406 aa, unidentified
MNAVGIDVSKGKSTVAILRPGGEVLASPFEVSHDPRELHELVTLIKSLDGDTKIVMEYTGNYYLPVALFLQKSGLFVSVVNPILVKDYSNKSLTVRKGKTDKKDSLKLAAFALDRWHELPPFSARSDTRTLLKAFNRQYNQYIKLKVMLKNNLISILDQTFPGANTLFNTPARKTDGHEKWIDFVLKFPHCECVSRKSFPAFSKCYLSWCKKGGYKFSEAKAEEIYAFACNCTPSLPDSPAAHALVSTAILQLNTLNETLASLQREMDLLAGSLPEYDTVMSLFGVGSVLGSQLIAEIGDVSRFSNKKALVGFAGIDAPPFQSGNFNPQSRSISKRGSAALRKTLFQIMSVILQNAPQNDPVFLFMDKKRSEGKHFYVYMMAGANKFLRIYYARVMELLNSLQKVA

SEQ ID NO: 117078 - protein, 444 aa, unidentified
MAIRKREDEVFPDAAAVDIGASSHWVAVPPRSSDDPVREFGVMTDDLNAMADWLLACGVDTVVLESTGVYWIPVYELLEQRGLKPWLVDARQVKYVPGRKSDVQDCQWLQKLMSLGLLRAAFRPAADVCVVRAVARQRDVLQAEQASWVQRMQKCLVQMNIQLGEVISDVMGTTGQAIIRAIVAGERDAQVLARHRNGRIRAGEAEIARALRGNWREEHLFVLTQALAMYDDIERHVGQCETRLQQLMSHLCVGSIDLGPVPRAGSKARKDFDARQMLANWAGVDLTRINGLGAGTVLKLLSEIGPDLSRFASVKHFCCWLGLCPGTKISGGKVLSSGTKRAANRARQALKLAAQSLHHSDSALGAFYRRLSARMDKPRANTATAHKLARMVYFMLTRGEEFVDQGQQRYEEQQRQRSVAALKRRAASLGFALTPATPSQTGVA

SEQ ID NO: 117079 - protein, 386 aa, unidentified
MQKLNDLSRSLTPLDPDGTLIAVIEMSLSSWLVAGIVPGVERQPLKKLAVDENTLLKLLHRWQEEAKKAGRKIERIVVAFEAGRDGFWLARWLKARGIEAHVMHAASVAVSREHRRAKTDRLDAELLKRAFLGWLRGERDHCKMVAIPTIKDEDAKRPNRERESLVGEQSRIVNRMKAALIRLGIRGFNPKLKRAAGRLDGLHTPEGEPIPPNTLAELRRDMERRRLVRDQIRQIEAARLARLEDAPCDGPHAMVRLLARVIGVGIETADMLVHEVLSRNMRDRRAVARYAGLTGSPDESGRKRREKGLARSGNGRVRRGMVQLAWRFLMYQKGSALAQWFRARTENARGTRKPMIVALARKLLIALWRLVREGVVPDGVVLRPVQ

SEQ ID NO: 117080 - protein, 427 aa, unidentified
MSEIESNKVDEFRQFKSQIRGSREYLIVGLDIAKRKHHGFLGDANGQTILKGLIVENSAEGFGHLLSQVRFYMQRDGFSRVVFGLEPTSVYHKPLAEHLISQGHLVVYATNEAIKKNRSLIDGRWDKHDTKDSANVADLVAQGKCHYYDLPDQRLRDLRSLLLLRKRLKKQVHSCRVRIRNNLVAQYFPELDLFWNNAEAENLTIVRGYLDPARIRQLTCEQFIARVSTHNGGLRQRRRLRHIWEAAGNSIGCRPGASMQLEAELLVTSLKSIQEQLDQVEQAVQELAEGFPEYGYLKSIPGFGPYVSAVTLAAIGNPHRFENRAQLIRLAGFDLCASRSGEKSNTAVPVISKKGKADLRYALYQAALVASSLTTHFRSHYNRLLEGRQREKGIRTKMLVKIAAKMLVIAWTLMKRKEPFNPAHIQA

SEQ ID NO: 117081 - protein, 314 aa, unidentified
MIKKSAAVYAGLDIAKATLQLHLQDRQHVLPNSAEGHRKLVRLLRAVPAAQVVCEATGGYERTVVAALHAAALPVSVLNPAQVRHFALAQGCRAKNDPLDAAVLTDCGAALHPKPTPIPNAVLAELRALVQWRNHLKDQLCAASNQGEHATLPYVKKQQAKLVKHLSTQMAQVEAQLTKALAQSPETQTQVQRLAQLDGVRTLTAVSVLSQMPELGQLNRGAAAALAGLAPWTRQSGPWEGQRHIGGGRAAVRRALYMSAVVLARLTETPLGKFYQRLRAAGKPAKVALTAVMRKLLLQMNQALKPAQDELQPV

SEQ ID NO: 117082 - protein, 421 aa, unidentified
MADDLVLAARIGIDWADDHHDFCLQEAGSSRVETGRIPQEPRALAEWVAGLRQRFGGRPVGICLETSRGPLIAALIEQDFIVLFPVNPRTLKRFREAFAPSGSKDDPIDAGLLLELLDKHEDRLHRWMPDDAETRAIARLVEARRKAVDLRTRLTNQLGAELKGYFPQALSWAGELDTQLATDFLQRWPTLQDVQRQKAQTIRKFYYGHNSRRAELIEQRIEEIRTAIPLTTDPAIIETSVLVVQMLARQIEALRPSITRYDKEIARRFGSHPDAHLFESLPGSGPAMAPRLLSAFGTRRERFKAASEVQEYSGIAPVTRRSGKQCQTTWRWSAPRFVRQSFHEFARLSIQYSAWARAYYELQMERGKSRHAAIRALAFKWIRIIYRCWQERTAYDEARYIQGLWARRSPLVHRLGLPAAA

SEQ ID NO: 117083 - protein, 355 aa, unidentified
MVGMVVVGVDAHKRTHTLVAVDQVGRKLAERTVATTSAGHLQAVTWAAQWPQPQVTFALEDCRHLTRRLEADLLRVGHRVLRVPTRLMATARRSGRQPGKSDPIDALAVAQAALREPDLPVAHLDGPTRQVKLLADYRGDLVVERTTLCNRLRWHLHELDPELHVPSRGLRRYKVIDELAVRLAGVDGTVAQIARELLGRCRELTVRINQLEGDLRDLVRVLAPGLLGIPGCGVLAAATILGETAGATRFRSRHAYARFNGTAPIPVWSGNAVRVRLNRGGNRTVNWALHMIAVTQARGVGPGQAYVERLLGAGKTRTEALRLLRRRLSDVVFRVLLADEHRQAATQPADTPIAA

SEQ ID NO: 117084 - protein, 307 aa, unidentified
MQGQKSPERSAQPGVYVGVDVCKDWLDVYLHPVGQKLRVANTPVGLKALKRRLAELPVELIVMEATAKFHRQAHRALHAAGFAVAVVNPLRARLFAEAVGQLAKTDRLDARVLALMGQALEPSALVPAPEALEALQELARAQAAAKADQTALLNRRGASQTAFLKAELGRRLKVLAGHIERLDAEIKRRIGADPALKRRYDILITIPGVGPVAAVALVVGLPELGVCSGKAATLLAGLAPLACDSGAKAGERHISGGRAFVRTSLYFAALSATSCNPQLREDYQRLRDAGKKAQSPSGDFMRDYRVF

SEQ ID NO: 117085 - protein, 411 aa, unidentified
MEGLTPLHKVVAGIDVHRMLHVITVLIENEDGTITKHQQSFGGFKRDMRTMVLWLLELGVELVVMESTGIYWKSAYSHLERAGIFAMVVNAHFIKHVPGRKTDMHDSEWLAVLARFGLVRGSFIPPKNLRELRLVSRYRRKLKAMLASETNRLHKTLDDAGIKLGGVVSDIKGVSAREMVAGLIAGKTIEDLVDMARGSLKNKRDDLAASLEGDLSSRHLFILAELHEHIALLEQKLAKIDAYLIEAMQPYQWAFNLLQTIPGIDAIASAMILIEIGDDMSQFGDADRLASWAALCPSNNESAGKRKSGKTRKGNAIVRYILCECANAARNTKSSLAAKYRSLMVRKSHKKTIVAIAHKLIRIIYFMLSRCEPYRDPGVDYEAMSAQKNAPRWIKALKKIGKLPITKPALA

SEQ ID NO: 117086 - protein, 457 aa, unidentified
MAKQRSKEKKTTAKADATQGLPPLNLHAAGIDVGSAEHYVAVPPDRDANPVQKFGSFTADLHRMARWLKDCRIQTVVMQSTGVYWTALYDVLESYGLEVNVANARHTKTLPGRKTDVQECQWLQKLHTFGLLNNSFRPAEEIRVLRGYLRQRENLVAAAATCIQHMQKALTEMNIQLANVISDISGTTGMAILRDIVKGERDPEKLAMHKHSRIRASRQEIAQSLKGTWRQELLFVLEQSLDLYQTYQNKIRTCDQRIDEQLRSMEAKIDPLSDPIPEPRRGKDARRHQSGFDLRSQLYRITGVDLTQIDGIEVQTAQAIVSEVGVDMSRWKTEKHFASWLGLCPDNRISGGKVLKRGTRQVVNRASTALRLAASALLRSQSALGAKFRRLRSKLGAPKAITAMAHVLARLVYRMLKFGHEYVDRGIQFYETKYRHQQLQWVAKQAAALSMQLVPTT

SEQ ID NO: 117087 - protein, 489 aa, unidentified
MDLLVERCAGLDVAKREVVACVRTPEPGTGGQRRQVVRTFATFSAELEALADWLQAEGVTQVVMEATGQYWKPIWYVLEERGFALLLVNACHVKILPGRKTDVADAAWLCELLECGLLRGSFVPPPAIRRLRDLTRYRKKLVQAHTAETQRVHKTLEDAGIKLDSVAADVLGVSGRAMLAALVAGERDPAVLAALAKGKLRKKLPQLRQALAGRFSEHHALLVELSLGHLEHLEGAIARLDGRVDEVIAPFAVARDRLDTITGVGKRAAETIIAEIGADMRVFPTAAHLASRLRAAARATTSPAASAAPASPPRATAGWARYWSSAPGRPPTPARPTWPPSSGGWPAASAGRRPPAPSATRSWSSPGTCSATTATTTSLVVTGLPAAATTIGTRPTWSSSSRRSATRSPSNPPPRLHDRGFSLQSAGHRLLHRPAAGGDRGLRRRARPGHPAQPPARPRLDRRRPPGQGPTGLRPRAGEDLGVRRAAGG

SEQ ID NO: 117088 - protein, 320 aa, unidentified
MEAVLGIDIAKATFQSALLRADGTLRHKSCPNTPAGFEQLAAWLLRQHVTRVHACLEATGTYGEALATWLHDAGHLVSVVNPAIIHAYARAQLARSKTDRLDAELIAHYTATQQPAPWTPPPPEIRQLQALVRRLDALQGMRAQEANRLAAGVVVADVRASIEAMLASLDRQIAHVRQLIADHLDQHPGLRSQRDLLTTIPGIGEATAAVLLAELFDKRYTSARQAAAFAGLVPRIVESGTLRGRSRLSKVGPGRLRKALYFPAVTALRCNPTIRAVRARLHAAGKPTMVIIGAAMRKLIHLAYGVLKSGRAYEPTCAHP

SEQ ID NO: 117089 - protein, 384 aa, unidentified
MKNDSILFIGMDTHKEFTEVAYSLDGRNNEVIHLGRIPSTKQGLLKLARQFQSKYPNATLHFLYEAGPCGYWMYRLLSQQGHCCYLVAPSLIPKKPGKRVKTDKRDAMDLCQLLKNGDISPIYVPETEDEAMRDLSRARETAMKDLNDARYQLKALLLRNNIRYDGKANWSLKHLRWLTEMILPHHCQQIVLQEMIQTITERMSRLERLGNELTHQVKQWRYYPVVKAIQALRGVRLLVATGVIAELGDLSRFDTPRKLMSYVGLTPTEHSSGDKRRQGSITKCGNGRARRLLIEGAHSYRYTANVSTSLQVRQEGLPKEVIDIAWKAQLRLCKRYQRLIKRGKNYNLVVTAIAREMIAYIWAISREVVLPKIDPKLRAVRIPA

SEQ ID NO: 117090 - protein, 484 aa, unidentified
MVTSLATIPVRKMTTGMAQTLQLCKEKEDRPMRKIGSHGSAKLTTINAAAAAIDIGSKMHMAAVDPACADNPVRSFGTFTRDLHQLADWFQSCGVTTIAMESTGVYWIPAYEILEHRGFEVVLVNARYAKNVPGRKTDVSDASWLRQLHSYGLLRGSFRPEAKIAILRAYLRQRERLVEYAAAHIQHMQKALMEMNLQLHHVVSDITGATGMRIIRAIVAGERRPDVLATYRDVRCHASMETIRASLTGNDRDEHVFSLRQSLELYDTYQSKIAECDRVLEASMAALIDEVEKPAKPLSKARVQTKQVNAPAFDVRAALYGMLGVDLTQIHGLGPSLALKLVSECGRDLKAWPSAKHFTSWLCLAPGNKISGGKVLSSKTRRSSSRAAALLRLAATTVGRTDTALGAFYRRLSSRIGKSKAVTATARKIAVLFYNALRHDMEYKDPGADHYDERYRARVVASLQRRARTLGYALEPIPSSEAVS

SEQ ID NO: 117091 - protein, 341 aa, unidentified
MKEIITVGLDIAKSVFQVHAISEAGEVVVRRQLKRRQVLQFFAGLKPCLIGMEACATAHHWARELIKLGHEVRLMPPRYVKPYVKRNKNDAADAEAICEAVTRPTMRFVPVKTVDQQSVLMLHRTRQLFIRQRTTLINSIRAHLAEFGIIAGIGRNGVEALLSVIAKGEEQGVPAEARSCLTALAEQLELVKRQILELDRRVLAWHRASSLSRSLEGIPGVGPLISTALVASVPDPKVFRSGRDLSAWIGLVPKQNSSGGKEKLGGISKAGNRYLRQLLVVGALAVIRRAKQLGFTRHPWLVKLMERRSAKVAAVALANKMARIAWAMMARNEPYRAPLPA

SEQ ID NO: 117092 - protein, 346 aa, unidentified
MTEPNLYVGLDVSLATTSLCVVNQEGRPVWRGTCPTDPAMLADAIQRRAPGAARVGLETGQMSNWLTLSLRRRGLPVVCLDARHAKAALKMQINKTDANDAYGLAQIVRTGWFREVAVKTMDAHQLRMLLVARAQIVGQRQTLANTIRGLMKTFGVVIPRGCKGVFATRVREAGEGNDPLMAIIEPLLAAWQSLREQTVVFDRQIAARAKSDAVARRLMTVPGVGVVVALAYAAVIDDPNRFKYSASVGAYLGLTPRRYQSGDVDVTGHISRCGDGLLRSYLFEAATVVLQRYAKASALKAWGTDLAKRVGMRRAKVALARKLAVIMHRMWVDATEFKDGGAHAAV

SEQ ID NO: 117093 - protein, 359 aa, unidentified
MERDGEEHCRVVGGVDTHKDLHVAAVVDERDRVLASRCFPTTRQGYKQMLAWMRSFGSLQRVGVEATGTYGAGLLRYLQHAGVEVLEVTTPDPHDRRKRGKTDDLDAQNAAHAAFAGRRTVTPKSRDGMIESLRVLKACRKTAVAARRVALQMIHNTIVSAPDELREALRTMTRMQLVRTLAAWRPDLTDYRNVVSAYRITLKSLARRYLELHDEIADLDTMITALVEELAPALVARNSVGHGSAAQLLLTAGDNPERLRSEAGFAALCGVSPVPASSGKTTRHRLNRGGDRAANSALHIIAIGRLRTDARTKAYVAKRIAQGHSKLEAIRCLKRYIARELFALIRQRGREINQGPIAA

SEQ ID NO: 117094 - protein, 419 aa, unidentified
MSKSNIARQIMQVQPGSLHAGVDLALEKNVVIVINEKGQRLDHFSFAQEREGYDYFLRRLEELRQKHQAPGVVVAMEPSNYFWKLLAKELEQKQIAYRLVNAYTVKKHREGNQLDQSKDDRRDAAQIAELSRSGYYTKTCLQKGAYAELRQYAILHDQLIPAITREKNVIWGLVGQVFPELSQVFKNPARETSFALLGSCASATDIRLLSLEDFIATVRTAYSGKKLCVSKLRLVYRLAATSIGVSEGLHAIQLAIQVHLAELQTLQQQLNRVISAMSACLALMPESPFLLSMKSLNTVSAALFLAEVGDPYRYHSSAQWVKLAGIQPAPNFSGKKQRSKTPMSHHGRSRLRSMLYFTCLRLVHQDDHFAQLYAHLQRRPNNPLTKMQALGVLMNKLLHILWALIHNQTFYNPSFNQSI

SEQ ID NO: 117095 - protein, 326 aa, unidentified
MAKARSLVGLDVHATKIVAAVLDAETGELQYFTLGGDVSEAAGLCAGLPRPVRAAYEAGPTGYGLARELAQRRVGCVVAAPSKIPRAAGDRVKTDRRDAEHLVRLLLAGKLHAVRVPGAEEEALRDLVRAREAARADLMRCRHRLSKLLLRHGVRFEDGQGWTRRHRDWLAEVMLDWPAAQATMLDVQGAIDALMHRRDALDREIVALLPALPWAVQAGRLRCLRGIDTLTAVGLCSEIGDFEPFARAEQLMSHVGLVASQSTTGQQRRQGSITKTGCGRARRLLVEAAWHYRPRPRIGKALSDRHDGQPPRRSRSPGAPNSACTP

SEQ ID NO: 117096 - protein, 313 aa, unidentified
MDTHRDAHVAAVLSLVGAVLATGEFPATAAGYRDLLKWAGGLGVVRRAGVEGTGSFGAALSRYLLAQGVDVFDVNRMDRTDRRRRGKTDPLDAQNAARAVLSGRARARAKSGDGPAQIARLYKLAKGSAVKARTQAINQLKAVLLTADPDLREELAGLHHAELFRTCAGFADVSQSEGDGEEAVLHATRVTLSVLARRIGQLTEQIRDLEDHLARLVERHAPQLLAVVGTGPDTAVTLLITVGDNPERLGSEASFAALCGVSPVERSSGRRQYRRLNRGGDRQANAALHRIVQTRLRLDPRTQDYCERRIKQS

SEQ ID NO: 117097 - protein, 362 aa, unidentified
MMGKRAHDWNRAQTSNGGNRGPIYRARRFIERHRDRDPTGRAADLAGEVPSDPKLLAETIRKHAPHAKRVVFETGPLSTWFYHALTAEGVPAICIEARHAQKVLNETLNKTDANDADGLAQLAEAGFYKPVRVKPFDSMLTRTLVKSRNQLLGISIQLSNQIRGLMKTFDLIVPKGSARVFDGNVNELLSGNGGLARIILPLLEAWRDIRKRAAELGRQLLAAARESQATQLLMTIPGIGAVTAVSYVAAIEDPDNFKTSRSVGAWLGLTTRRYQSGETDYDGHISRRGDSQLRGLLYEAATVILTRTSTKNENSLKNWGLKLRERLGFKRAAVAVARKLAVIMHSMLKTGEVFNALAGTTA

SEQ ID NO: 117098 - protein, 407 aa, unidentified
MKKIAGIDVHKQVLMVVIADAANPELVLQKGKFGTGQAELERLRMVLQQAEVTEVVMESTAQYWRPVWSELEPHFTLHLAHAQSNRAPKGRKSDWADAKRLVKRFAAEELFLSFVPEPEQRDWRMLTRARYALIRDHVHLQNQIEALLEQASIKLSSVVSDLFGVSGLRILWALSQGQTDPAKLADLADGHLRCGREVLVDALRGHFGEVHRHLLEQALQRLRMLSEQVAALNQLAAKRMQPHASTVQRLIEVPGVGAEAAQAIVAEIGPTAAAFPSSAQLASWMGVCPGTQESAGQNYSGRCAKGNRYIRSVLCQVAHAAVRTKGSHLQTVFRRFLAKLSCYNKAIWAVAHKICKIIWHILHNGARYLESGGALNPKAAQKAIQHHLKALSRLGYVLPSPTPDPQV

SEQ ID NO: 117099 - protein, 395 aa, unidentified
MMTEQKESAASGRIIGLDLHPDVFSAAALSGREAATAKPVQQWDRLATAQLERWAKTLGAGDLVVLEASGNSFESCERLKRCGVATVVLESQRAGQIRKTYCANDRSDAVKLARIYLSGLAQPVWQPDAATRERREVLHAYRKAVTTATRTRNRLKSFLSDHGIRLQPGVRLTQASGQKKVRSCREWSALQSVLIEQMLEELQLADARRSQLSAVMAQEVAADPKLLPLVRLLGVRHIIAFAIAAVVGDIARFANPKKLVAYLGLAPTVDQSGNGPRGQQGLVSFGRGDLRALLTQSAQNALNQRSSPLHTWGWKLCRRKSHKNVAIAAIARKLTVSIWYMLRGLFTPLKQIDASLRVKLAKLATAIGVKTIRHLGYKSKAAFIEEKNQWLLNTA

SEQ ID NO: 117100 - protein, 386 aa, unidentified
MQKLNDLSRSLTALEPDGTLITVIEMSLSSWLVAGIVPGVERQPLKKLAVDESALLKLLHRWREEAEKAGRRIERTAVAFEAGRDGFWLARWLKARGIEAYVIHASSVAVSREHRRAKTDRLDTELLKRSFLGWLRGERDHCKMVEIPTMKDEDAKRPNREHDSLIGERSRIDNRMKAALVRLGIRGFNPKLKRATTRLDGLRTPEGEPIPPNALAELRRDMERRRLVNNQIRQIEEERLERIEQAPCDGPHVMVRLLARVLGVGIETADMLVHEVLSRNMRDRRAVARYAGLTGSPDESGRKRREKGLARSGNVRVRRGMIQLAWRFLLHQKTSALTKWFRSRTENARGTRKPMIVALARKLLIALWRLVREGIVPDGVVLRAAQ

SEQ ID NO: 117101 - protein, 417 aa, unidentified
MKKSNRSQAIRERTTSITNTGQAVSQSPKEVMAHLVTQLRQKLGVGVAAPNSEKEPPAVALCPALDCLTVGVDLGDKRSAYCILGLSGETLLEGELATTRESFLEFFQAMTASRVVIEVGTHSAWVHEAVVSCGHEVLVANPRLMDRSKRRKRKNDRIDAHKLARLGRVDPQSLYPIQHRSAEVRQDLLVLRARDSLVRIRTELINTVRGLVKSLGERLPPCTSPSFHHKVESALPTAVREVLLPLVSQVESLSESIATYDKKIEELGSTKYPQTKLLRQVKGVGPITALAYVLTLEDPKRFPKSRDVGPYLGLIPKQEDSGDSQPQLGISKAGDQMLRRLLVGSAQYVLGPFGPDTDLRRYGLRLCERGGKNAKKRAVVAVARKLAVLLHHLWISGEVYEPLRQAKPLLAADRQVA

SEQ ID NO: 117102 - protein, 461 aa, unidentified
MGNARARRIPAQIVEDEDYQLRHERVAGIDVAKAKADVCTRLPPAREGGRRTSRVEEVPAAAVAILALAARLTAARVGLVVMESTSDYWRIWYYLLEGAGLNVQLVNSSQARQLAGRPKTDRLDAQWIARLAEMGLLRPSFVPPPEIRALRDLTRTRLQLVRDRSREWQRLEKLLEGALIKLSSALSSLARTKTARGILEAIAGGQRDPKALAALADARVSGGRAAVERSLDGMQLGDHHAMLIRVHLDHITLLDQSIAAIEDEIGAAIDAIPAAWGTDATGETSPNAGRSVDAAALPAVDRLAEIPGVSPALARAIIAETGLDMTRFPDAARLVSWAGLAPVSSQSGPRTRKPGKGQGDSYLKGYCTQAANGAAATETFLGERLRRLSRRLGGNRARCAVARSILVIIWHLLADPAARYRDLGPGWHARKTDTDRRTRSLLNQLRALHPEADITITPAAA

SEQ ID NO: 117103 - protein, 408 aa, unidentified
MDVVYPVCCGIDVHQARLTACLRRVQEDGQVTKDVQEFDTTYPALLILLDWLIAQHCPVVALESTGVYWKPVYHVLAGSLEVLVGNAQDMQQRPGRKTDKADARWIAELLAHGLIRPSFVPPPAISALRDLTRTRVALVQTRSQAKNRVHKVLEDTNVKLASVVTDLFGVSGRRMLAALIAGERDPQALAGLALGRLRRKLPQLEVALTGQFTHHHATIIQASLELVDLLNRQIADLDSQIGELVAPLESQITQLDSIPGVDKIAARDILAEIGTEMSRFGSAARLASWAGVCPGNNESAGKRRRGKSRPGNRYVRRVLVQCAWAARKTPTYLGRTFRRLEVRLGGKKAAVAVAHKILVIVYHLLSEGTVYDEERYDRLQPRQEAQQRQRAIKMLERLGYHVNLERVA

SEQ ID NO: 117104 - protein, 324 aa, unidentified
MRLYGAIDLHSTNNVTVLIDEEDKIVYQKRLPNDLALILKELAVYQWRVEGMVVESTYNWYWLVDGLMERGYRVHLANTAAVQQYNGLKYTDDDSDARWLAHLLRLGVLPEGYIYPRETRPVRDLLRKRSQLVRQRTTNLLSIQNLVTRNTGSSLSASQIKRLDVHQVDELLPEGDLALAVKANLAVMSSADEQTEILERTIIQRVQLRPQFRFLKTVPGIGEILALTIMLETGDIGRFASVGNFASYCRCVGSQKISNGKKKGKGNTKNGNKYLAWAFVEAANFAIRYNSKIKSFYQRKKAKTKGWWPSKRWRTSCVGPHAIS

SEQ ID NO: 117105 - protein, 340 aa, unidentified
MSKITTIGLDLAKNVFQVHATDETDGLVMRRALRRGQVLRFFAGLPSCLVGLEACATAHYWARELRALGHEVRLMPPQYVKAYVKRNKNDAADAEAICEAVKRRSMHFVPVKTVEQQSALLMHRGRELLVRQRTMLANALRGHLAEYGLIAAQGLHKVAGLIAIVRDERDARVPNMARQVLRVMAEQLGALETGIAAIEAQLMAWHKSNPVSRRLATIPGIGPIIATAIAATVADPCVFRSGREFAAWLGLVPRQNSTGGKARLGGISKRGDSYLRRLLVNGAHAVLLRSRAARADPWLLALRGRRPRLVVAVALANKTARIAWAIMSKQDTYRRTIAAA

SEQ ID NO: 117106 - protein, 388 aa, unidentified
MRQVCGLDVHKDTVFVCILNENGVVFQEKYGVLTTELEQMLGILQQHDVSEVCMESTSIYWMPVWRVLEPYFDLKLVNPFFIKQLPGKKSDVKDAEWIATCLQKDLIKGSYVPEDRIQQLRQYDRRIFDLDKDIVYKLTKLDAALQRCNIRISNYLSNTNRKGYKDVVNKIAEGITDPEELIKAIHGRTINRVGRDVVLGALTGVITEADIDMVRQLRDEVELADKHKDECQSKMDALCRQWFPDEYALLQTIPGVKARSATSVLAELGNDVSAFPDAAHLTSWCGLKPRNDESAGKIKSRKITHGNKYLRKTLIECSWAARRTQGSFYNHFSYHQTVVRRKNSMKVQVAVARKMLSAIWFILHDHVPYKDYTPPTSEETSSDIVPAE

SEQ ID NO: 117107 - protein, 348 aa, unidentified
MAHFVGLDVSVKETSVCVVDDAGKVILEQKAPTEPADIIALLTSLGVSYGRIGIEAGPLSQWLVNALTVVELPVICVETRHMKALLTAQQINKTDRNDARGIAQMMRVGLFKPVHVKTLVAQEQRMLLTSRKLLQRKLLDLESDLRGTLRNFGLKVGVVSGSRYEARVRELVVGFPRLAAIAEPLLNVRRVMRQQLAILHKMLLDTVRDDPVCRRLMTAPGVGAVVALTYRATIDQPQRFVHSRAVGAHVGLTPKRYQSGETDYDGRVSKCGDALLRTMLYEAAHVLLTRGAKWSWLKAWGVRGAQRRGMRRAIVAVARRLAVVLHRMWVDGSEFRWSKDSAAVPTAA

SEQ ID NO: 117108 - protein, 433 aa, unidentified
MSKFFNSPVVGIDVSADFSYAAILAPNGDVYKKSFKIKHDAKGFDHLVNEIKKVEKEFNMKTGIFMESTGVYHLSLFHYLNNNFDNTFVINPLVTKCNKNVDIRKVKNDKKDALFIANIGKFQNIKLSQTNNLAIFLLKNLVREYYKLTDTCSTFKKKLSADLRVIFPNYNTVFSDSTSNTSLEILSNYPTPKSVINAPKEDVIKILIEKSKKGVTWSENIYLKLISIAKEANIIGVPLSGLAIKISSSLVLIKAFESQIEDLLNEINTLIESSEFPESIKENIELINSIPGIGRLTAITLIAEIGDIDGFIKPKHLVAFFGIDSSVNQSGKFLGDQSKISKRGTRIGRRALYAVALASIRRSRAGIPINKVLLEYYQVNLKGKKAKVALVAIMHKILNYIFAVLRNQTPFEQRDPKIHKQMFLENKHLHNVA

SEQ ID NO: 117109 - protein, 423 aa, unidentified
MKNSAAKKRRQVPTGYLVVGVDPHKKKHAAVFMTQDFTTHSKFKFDNSREGFEMVLERVKNEMLKTGCRGAIFAIETGAHHWRNLAYFLDERGIPLRLINQFTLKRRREGKDLNHRKNDYRDSEVAAQLLCTGEFNTARLPQGVYADLRGAYGSYRRLVKERTRIVNLIKSLLDGLFPEFTQVFKNPCGQTATTVLLTRAVPRDIAGRTKAEFVNEIRTAHQGRIIETKLRALHRAAKTSVGIEAGARFISLEIAFLIEKHRLIQKQLNQINEAFTRMVDETREGKYLLSITGLNYVSVAGILAELGSFSSYQNAKQLVKMAGSNPTESESGGKRHSHTPISKQGRPVLRHCVWIAVVPMLHFNSDFRDWARKLRERPASANPLNGREIVVAAVNKLLRLSFALVKKQTFYQVPVPQSIRVPN

SEQ ID NO: 117110 - protein, 367 aa, unidentified
MKKVSTRAAAQSRNISQQKLTIGLDLGDRNSWYCMLDEAGQIQLEQRVRTTAKALQEVFGAMPRSRIALEIGTHSPWISRLLRELGHEVIVANARKVRLIGESRKKDDRLDARTLARLARIDPELLYPGKHRSAQAQADLTLIRARAGLVRARTGLVNTARGLAKSYGERLRGCNVRNMNPEKAEGLSPELQAALEPLLNAIESLSERIVEYNERIENLAQQSYPQVALLKQIKGVGTLIALTFLLTLEDPHRFRKSRDLGCYLGLQPGRRKSGQSEPQLHISKEGDPYLRTLLVQGAQHILGPFGIDCDLRRWGLKLAERGGRTGKKRAIVATARKLAVLLHHLWVSGEVYKPLHNSSPTTVAAAA

SEQ ID NO: 117111 - protein, 425 aa, unidentified
MKVKEVAQIIKAEQVMDVSVDVHKEDLYSLARVPGKEYAEQFKNETPRIRKVIKDYQKIAAEHGFQQIRIVCEPTGVYDRKLLRTARQLGALTAYVNAEAVSKFRVVQNNDNNKTDTADPGVILTMAEHGHTIKHRVLPDEYLNLRKLGSLLDDEEIMIVRIRGYINVVREELFCDWKFDKDFMYGNTGKALMKKYGANPYRIVTSGRTRFTSVMKRAVPRIRATSIERLWVQANSSVLNEQPESYIAVLEQRIKDLYEDFWRHKTRKNGIEAQMILILQQLRADDPTIPPPTPGIVSEKNFARLLGETGPLSDFDSVQRLMRYAGLNLCMRKSGQYQGKYKISKKGRPLLRKILSQIVLQLVRRNSLYGKYYHEKKERQNLPGAKMMTIVMRQYLRKFFGWYRSNTEFDEVRFFTCEHEYQKVA

SEQ ID NO: 117112 - protein, 438 aa, unidentified
MAAVMIGVDPHKGSHTAVAIGAAEELLDQVRVRACAARAERLLAWAAAWPERTWAIEGAGGLGHLLAQQLVAAGEMVLDVQPKLAARVRLLATGAVNKNDPNDARSVAVAALRSAACPPVRADDHAAVLKVWAKRHRDLSRSRNQVACRLHAVLCELIPGGVSKQIRAAAAACILEQARPFGAVQAARHELAAEYLADLRRIDAQRRDVQRKLAAAVRASDTTVTEVFGVGPAVAAAVIGDVRDISRFPSRDFFAAYNGTAPVEVSSGNRVIYRLSLRGNRRLNHAIHMAAVTQIRYQHSKGRAYYDKKLAEGKTSKEALRALKRQVSDAIYQRLKADARRAAAGPGGHLGNDSVASVAGLHPADRLFGQATPGPAPTLRSRPGPSKATPRTSNPRRTRRSGHARTSRLARVPGHRDLRAARGGGRPWPARSSCPQGP

SEQ ID NO: 117113 - protein, 432 aa, unidentified
MKKLQQNRNGKKLEAITPECLIVGIDIAKEKQWARFVDYRGLEQSKALEFYNNKTGFEIIVASMESICKMCGFSKVIVGMEPTGHYWKPLANYLIMQGITVVMVNPYHVKKSKELDDNSPTKSDKKDALTIAKLVKDGRYYEVYMPNNVFGELRVLSTARFSLMKRHNALKNTIHAVLDEYFPELETVFKHPVRGKASLQLLKSCPFPAHILELGEEGVLCEIKKAVKKTVGRKKAKQLVETAKTSIGVNYGLAAAKLKLGLMVEELELLIKQLEQVEANMAKAMTETGFGEIVLSIQGIGVISAASLFGEIGDPLRFDDPRQIGRLAGYGLVEDSSGKSKSGTVISKRGRKHLRCVLYQMALVMVATNSEMKKLYAYLKTRRNNPLKKKQALVVISKKIITIIYHLIKKKVSYRAEDVLGEFRRNQIEQAA

SEQ ID NO: 117114 - protein, 349 aa, unidentified
MITIGIDPHKRTHTAVAVNDVGQQLEEITFPADEEGQRRFLAWAHELEGEEELRFALEDCRHVNGRLERFLLATGVQVIRVPPKLMAGARKSARTRGKSDPIDALAIAHAALREESKLHPASHDPAASELKLLVDHRDCTVRERTVLASRLRWQLHDLEPGLEPPARSLDTASVRRGLSQRLARREQTAQVRICRDLLARIGDLTRRERQLASEIGERVRDYAPELLEVPGVARISAGKLIGEIAGIERFKTDAQLAHYAGCAPIPASSGNTRRWRFDRHGNRQLNTAFYRIALTQARVHPGARAYLARKRAEGKSSAEALRCLKRILVRVVWTTLRSSCEQRVSLSQS

SEQ ID NO: 117115 - protein, 508 aa, unidentified
MFYLGIDIGKLHHEAGMTDNNGKRLGKSLRFSNTHAGFQALLSMIEDRKGLTEEADSLPSDLSIGMEATGHYWLALYSFLLAQGFTVHVMNPLQSDSFRNFSVRPQKTDAIDCFLIADVMRFAQFQPTHLADEDILTLRTLARFRESLRDTCSNYKKRAVTILDQLFPEYSQLFSDLFGEASKACLRLYANPQKAAAANTKSLATLLKKASRNRLGTDKAREIKDVAARSVGITICSAAFELELNLLLDQIDFANQQILQLESELDRRVRRIDSVLMTVPGVGPATGAVILGEIGDIQRFPKAKNLVAYAGLDPTIFQSGEYRGKNNHMSKRGSPYLRRAIWMSAVVASRVDPVFADYYAKKRADGAAHGTAIGAVARKLLHTIYAVLKANTPYRPAEPKRSVPPQTAAGQCTAPQQPTAAANHAAQSQIAAADAPGTPHKVPILKKRSGKPGAQTCKPGVQTYKPGVQTYKPGEKVFFRAACLVPTSEAANSLADSVTDSLAGAFVG

SEQ ID NO: 117116 - protein, 383 aa, unidentified
MATRRRGPGPSSVLLTPDHAGSVVGVDPHKRSLSATVVDPRGGVVASEHFRVSGDGHRALEAWAWQFGPIARWGVEGASSWGRHTAVFLSGRGYDVRDVCANRTPRSDRARQRGKSDTLDSERIARETLAHPLLPRAFKRAGQDSGPDELHELLGLWHNQRRSILVSRQHLLNEAESMLSALPLELREQLPDTKAVRPRLVALAARNRRRRYDTPTRLRLGLLDDHRARIAKLDADEKAVCRQLAVLVQASGSTLGELCGLDTRSVAELLVEVGDVRRFTERGFARFNGTAPLAASTAEGPGEPVRHRYNPGGNRRVNAVLYRMAITQLRCEPRAQVIFANARANGHTKKEARRILKRHLSDVVYRRITRDQAALAAEPLLAA

SEQ ID NO: 117117 - protein, 398 aa, unidentified
MKACISIDVSKGKSYYQGFRGMNEPIMKAKPIHHDRPGFEELTTVGDKLKSESREVLYVFESTGIYHKSLQSYLESRNEQYVILNPLTAAKVRKSKLRSTKTDQKDCQTIALAYYAQDYEPHGRRDAHYETLRAENRQYVYYVQILRQMKVRFRNLLDIVFPRWDEMYENPYTEVSLALLKKYPHPEALAKSQAEAIARHLEKATRHRSALCRIEALKAKTYASQTISGCTSNAVEPEQLRDTVDQVERQLKLVDECLEKMKAMVREEKFFGQLSSIPGIGEILAVRLMAEMGDLNRFSTSKRLVAYAGIDPVVYQSGKKDGEHLPITKKGNKNLRTLLYLAIGANIRLKKSNSILDFYNKKRQQATPLAYRAAVIACANKLLRIIYSMYRSGEEFQF

SEQ ID NO: 117118 - protein, 354 aa, unidentified
MVNNIKFMFNIKNYKVMKNFKLFIGIDISKKTIDVSLLTANLIKGLPYKKFDNNTNGYKAMMKWINSKYKFSKNEMLFCMEHTGIYSLNICCYLNENDISFWLENPLQIKRSLGIKRGKNDKLDSKDIANYAYIHKHNAKLYQMPGKTLLTLKNLIAYRDRLIKTKVSFQISSDELKLCNKGIRASICSESDTIVKLFNKKIEKVEKQMKELICSDEKLGHLYQLTTSVKGIGLIIAAHMLVHTNAFTAFNNARQFACYCGIAPFEYTSGISIKGKTKVSHLANKKIKSLLNMGSLNAIRYDLEMKDYYEDKIKKGKTSMSILNIIKNKMVGRVFAVVKRDTPYVELKGYKKAS

SEQ ID NO: 117119 - protein, 410 aa, unidentified
MEVHFANCAGLDVHKDTVVACSRRVIDGKIVREVRTFKTTTSDLLKLSEWLAGLGCTHIVMEATGVYWKPVWNILSDGDFELMLANAAHVKNVPGRKTDVNDATWLADLLAHGLIRGSFVPDTQTQEQRGLLRTRKQLTRERTSHVQRLQKTLEEANIKLDSVISDIIGTSGRAMIEALIAGETNPARLAQLASTRIKASPATLSEALRGRVTKHHRFLLRLHLEQIDTLERAIAEIDKEVEANLDPFRPLIPVLTSIPGIGELAARVLLAEIGTDMSRFPTAGHLISWAGLCPKNDESAGKRRSTRMRKGAPWLKTTLIQCAWAATRKKGSYLQAQFHRLRARRGAKKAVGAVAASILTAAYHMIVNGTFYQDLGADHFDHRSKPTQIKRLVAKLQSLGYEVEIKPLAA

SEQ ID NO: 117120 - protein, 428 aa, unidentified
MTVKDCTSVKEFWQLKKEIRGSKDHLIVGIDVAKDEHRAFFGTANGKTLLKRLTFKNDIEGFGKLLARVKEMKVKHRLDELVLGLEPTANYHKPLGDFLIKCSHMVVLVSGVSVKRNRELLDGRWDKHDTKDSANVADLISQGKCLYYEYAPPLLKDLRGLLSLKRRLKKQEHGLRIRIRNTLLAQYFPELDKYYSKWEPQVLSVVRWCLDPSVIAGLEYDQFVSLVSPGSKNIRQQGRLEWIWKKAVDSIGCDAGEAAEFEGKVMVEELRHIREVIKETDAKIKDVCVRFPEYDYLLTIPGFGPDISSKVLAAIGNPFRFNSGKQVLKMSGYDLSANRSGKTSKSAVPVISKKGKASLRYALYQAAFIASVRNKYFIRYYTNTLRGREREKGIKTKMRVKLATKMLVIAWTLMKKKEPFDPGYLKID

SEQ ID NO: 117121 - protein, 365 aa, unidentified
MTLYGGIDLHSNSNQSAILSEDRKRVMKRKLTNDPALILNFWEPYKADLVGIVVESTFNWYWLVDLLQENGYRVHLANPAAIQKYNGLKHADDNHDAFWLAELLLLGILPQGYIYPKEIRAVRDLLRKRQQLRQLRTCLILSLQNIVTRNGGPKLSAQDLKTLKEDRAQAYLQEFPELLLAGSTNKACIDALTQQMARIEAAVEQKLKLEEPYTKLQTLPGVARILACTILLETGPIHRFASVGAYASYCRKVNSEWTSNDKVKGHGNKKNGNRYLAWAFSEAAEKARIHHRASREFYQRKLRQKKSVSLAHNALAHKLARAAFYILRDHVPFQQEKMFASPQMRGKKEPGADGEPIPKLVKPGD

SEQ ID NO: 117122 - protein, 351 aa, unidentified
MLIIGCDYHPSFQQIAWVDTESGECGERSLMHSTGEAERFYRNLTEQGVKVRVGIEATGHSRWFERLLMELGYELWVGDAAEIKAKRVRKQKNDKEDARLLRTLLVENRFPRIWLPDQLNRDLRQLLWHRHRLVQMRTRVMNQLQAVALNEGVQRKKGLWSQAGRAQLESFQLLPWATMRREDLLRLLDGLTPRIQALTAEVNKQAEQYPEARRLMTHPGVGPLTALAYVLIIGSPDRFRCGKQIGCYLGLIPSEESSANRQRLGHITKEGNSLLRFLLLEAAQAAVRSDADWRREFLHLTMRRGRPIAVVALARKLAVRLYWMWRNGRDYEKSLKFSSHVGQPGTAYGVK

SEQ ID NO: 117123 - protein, 304 aa, unidentified
MKQVSTIGLDLAKHVFQVHGADNEGSALFNRKLRRTEVLRFFKRLPPCLVGMEACGGAHYWAREIAQLGHDVRLIPPAYVKPFVKRGKTDAADAEAISEAVIRKTMRFVPIKTAEQQADAMVLKTRALLVQQRTQSVNALRAHLAELGIIVASGLPNVAALMTIVREAEVTRLPTAARLALTAIADQIDALAIQINVIERTIVTESKRDESMRRLITILGVGAITAATINALVPDPGGFKSGRHFAAWVGLTPKPHSSGGKERLGRISKMGNPEIRVLLVLGATAVLRIARNDDKARPWLKALL

SEQ ID NO: 117124 - protein, 364 aa, unidentified
MVEDRRTVGVGLDVHKSSVRLAAVSGGELLGELSLPYDHERVERELRSWPGARVCYEAGPTGFGLYRHLVAAEVDCVVVAPGLVPSKPGDRVKTDKRDARRLAALHAGGLLTAIFVPSPEQEALRDLVRAREDARLDRMRARHRLGKFILRHDRRMPTTCWGVTRRAWLARQVFELPGQQQAFDDYLFALDQVDRRIEGLEAELSRLAQDGPHRELIARLRCIRGIDTLTALGLAAEVGDFARFATAAQFMSFVGLVPSERSSGESRRQGSITRAGSAHARRLLVESAWHARRRPTVGYELGRRHRGQDPAVLERAWRCQQRLHRRWQKMAGRGKPSQKIVVACARELAGFVWAIATDQPMKTT

SEQ ID NO: 117125 - protein, 408 aa, unidentified
MEVVYRCCCGIDVHKKIIVACLNQGGEQSLREFGTTTSEIKSLATWLTESGCEIIAMESTGVFWKPLYNLFELMDLDAIVVNAAHMKALPGRKTDVKDAEWIADLLRHGLLKASYIPSREQRELREITRYRKSLTEERCRETNRLQKILEGANIKLDSVVKDINGKSARKLLEKIIEDDVPTSEEEISKMIHGRMRSKLGQLVTAIEGITTPLQKKLLAQVIDHIDDLNRRIADLDKLVQDYMDEYEAAITALCDIPGIARRSAEVILAEIGLDMSRFPSAAHLCSWAGVCPGNCQSAGRRKHGKTTKGNKPLKTILTQCAKSARSVKGSYFSAQYQRIAARRGKNRATLAVAHSMLIAIYHMLRNNVPFRDLGSDYYDSFNRDRKIHGYLKRLKALGWEPDALPGSA

SEQ ID NO: 117126 - protein, 416 aa, unidentified
MKIVRPICCGMDVHKNIIVATIGITNKKTRITEYIQETFSTLNPDLLNLKQWLINHKCFDACMESTGKYWIPIFNILEDEINIYLTHPKYVKAIKGKKTDKKDSKWICDLFKHDLIKFSFIPPKEIRALREISRYRYKLVGMRSSERNRYQNCMTVSNIGIGSVFSDPFGKSAQAIMKEVLESDIIEDEKILKCIHGSCKNKDKILDSIKHCNIETDQRFKMNESMTHMEELQVHIDNCEIEMMKRAAPMFDQFMHITQLPGISTLSAILIISEIGVDMKQFESDKQLTCWAGLTPANNESANKKKSVRISKAGQYLKPLLVQCALGAIKDKEGYFGIKYSRIKKRRGHKKAIIAIARMMLVSIYHMILTGETFNPSDYESFRNPKPPIKQQVLTEESAIEFLKKSGFDVSKLTKP

SEQ ID NO: 117127 - protein, 372 aa, unidentified
MNYNTVYVGMDVHKESFTLCAYTIDAEKGSHFQRTEADYKNVLKYLEFLRTVYGNDANFICGYEAGCLGYTLYHQLTEHDVNCVILAPTTMLEQRSKRRIKTDRRDAEIIGKCLAQHNYSPVHIPTATDEETKEFLRMRDDHKLALKKVKQQILAFCLRHNYRYDGNSHWTAAHIKWLRSLNPEALYKEILDEYLLTYTTLSDKVERLDKRIEELASKDEYRESVKKLCCFIGIKTHTALSVLVEVGDFQRFASAQNFASYLGLVPGEDSSGDGQTRLGITKAGNRHVRMLLTEASQCYARGQIGFKSKELKSRQAGNSPQVIAYADKANERLRRRYYKMVLGKSKKHNVAKTAIARELACFMWGMMTEHIA

SEQ ID NO: 117128 - protein, 346 aa, unidentified
MWIIGCDFHPSWQQVAWFNSESGESGEAKLENGNGEAERWYGQLPVPSLIGLEATGNAQWFVEMLQQLGHEVWVGDAAQIRASYVRKQKTDKRDAAHILRLLREGRFPRLWRPSAEQRDIRQLLIHRHKLVEIRTRVKNGLQHLAMNRGMQKKRKLWSEAGQKALRELPLEGWAGQRRQDLLVLLAYLDGKIARLDRAAEETVQRDKMAQLLKTQPGVGPITALAFAVTIGDVTRFQRSKQVSSYVGLIPREHSSGGRQRLGGISKQGNRFLRQLLVEAAQSAVRYDESLRRPYQQRCHRKPKGVAKVAAARQLAVRLYWMLRTNTAYPEIVRIESSPRVPRVGAS

SEQ ID NO: 117129 - protein, 354 aa, unidentified
MSKFLKYAVGIDVSKDSFHVCLSVIDTLQKVTIKASRSFANQSKGFQELAQWVKNYRKDEDIPIVYLMEATGVYHENLAWFLHHLGCHVTIILPKKAKHYFKSLGLKSKNDTIDAKGLAQMAAEQNLDVCKPISPQIEELKALTRHYSNLQEQKTVYNNQIHAIESSHHQDKLVLKDLYELVELMETKLVAIKKQMDVVIEKDPFLKEKFALISPIQGVGTLTIATIVAETNGFEFFDNQRQVTSYAGYDVTERQSGKFIGKKAISKQGNSRIRKILHLPAFNVVRFQQQPFTNLFERVYERTNMKMKGYVAVQRKILVLIFSLWKKNEKYNPNKVASMNEATLDEVQELLLQE

SEQ ID NO: 117130 - protein, 349 aa, unidentified
MNEVHYIGFDVHKKSISYCVKTAAGEILEEGTLAALRNVLRGWAGARSQPWRGAMEATLFSGWIYDTLKPYSAGLEMGHPARMKAISSGKKKSDRIDARTIADLVRCNLLPVCYVATPRIRELRRLLRYRSLVVSEAVRMKNKMAGLLMETGAEYVKEKLHRKKYFASLLKELEEVPDSVIDLLRLSRGALEMFESTQRRLVRELLADAELTRRVERLRSIPAVGEITALTWALEIGDPHRFGSAAEAMSYCGLTAALKSSAGKQQRGPISKQRNHWLQTTLIEAAKLAPRWNRQLAALHARELERGHRNRATLAVARKMVAYLLAVDKSGMRFQVRDQPVEQTATAVG

SEQ ID NO: 117131 - protein, 395 aa, unidentified
MSKDQCNFLFIILKYGIMNLKYSVGLDVSSKKINACMSCIDEKQKVIVKSITVISNNKKGFKILQDWVLKHVKENVPVVVCMEATGIYHENCAYYLFEKGFSVSIILPNKAKKYLEAIGLKSKNDSIDAKGLSQMGAEQCLDTWQPMGTFFYELRLYTRQHQNVTELKTVLKNQFDALSFAMHQVDPVTNQLKETIILFDKQLKELEKVINNHIKSDAKIAERVANILEIKGIGILTLATILAETNGFELFNNYKQLVSYAGYDVVEAQSGTRVGKTKISKKGNSRIRRAMHMPSLVVIKCEVKPFKELFERTYNKHGIKMKSYVAVQKKLLTMIYYMWKKKERFEPNYIKSIQEKEQKSFSLFAFEKGIKNSPNKIEAAQGKHPANDHSKFPLC

SEQ ID NO: 117132 - protein, 352 aa, unidentified
MDYFAGLDVSLEMTSICIVDADGAVMKEAKVASEPDDLVAFFGQCGMAMKRIGLEAGAPSQWLYGGMAEAGLPVVCIETRHAKAALSAMPNKTDRNDARGIANIMRTGWFRAVHVKTQTAQELRFLLVARQTLVRKLMDIELAIRGMLRSFGLKMGVVSKRNFEARVLELAGDRAMLMRALTPMLKARRALALEYTNLQKAATDFARDDDVCRRLMTVPGVGPIVALTYRATIDVPSRFRRSKSVGAHLGLTPRAHQSGEVDWTGRVSKSGDAMARAALYEAAHILLIRVKRWSSLKAWGMRLVKNRGHKRAVTALARRMAVLMHRIWVEGTTFIWKTGDGQAIAQRPIPAV

SEQ ID NO: 117133 - protein, 330 aa, unidentified
MKARTIVGVDVSKLTLDSKLLPAAQHRQVTNTLKGFNQWRQWIDRYKQTDSEVLVVMEHTGLYSHLFELFLQGEGIGYVKKPAVEIKLSIGLTRGKSDRIDAGRIAQYGWMHREDLCAEKYPVAVIMQMKDLLSYRSKLVRDRSGYQVRLKEEIQTSRVRKTDFLYTEQQKDIAYLDRKIEMVEKELFHLIKSNEGVNYNFLLLQSIKGVGRITAAYMIAVTNNFVCFTDPRKFNCYAGLAPFEHSSGKSIRAKNRVSQLANKTIKCLLRLSAFVAVRFNEELKTYYLKRVAEGKSKMSVLNIVGAKLVKTMFAVVKRQTPYIDHLPVAA

SEQ ID NO: 117134 - protein, 351 aa, unidentified
MKEYIAFDSHKHYTLMEREDRQTARTVQLRVAHQPGAIRTCLRNCESGTDVAVEATGNWYWIVSEIEQAGLKPQLVHPRKAKLMMGLINKTDKLDVHGLNRLQRNGTLPTVWIPPAELRDQRELTRTRLVLVAQRTRLKNRLQSTLAKYGLAVRDCSDAFGTVARSQWPELLAQLPEQTQWVSQQLLKQLDLLEEQIGQCEKRLNPLLKITPQIERLKSLPGVGLILGASIALEIGEVSRFASAEHLASYAGTTPRVHSSGDKLRFGRLRPDINRYLRWAFVEAANVVALHHQQRPERHVSHLYWRLKQRKGHAKAIGAVARHLAEATFHILSRQEDYVDPALRKGRSKPV

SEQ ID NO: 117135 - protein, 350 aa, unidentified
MMIIGCDYHPGFQQIGFVDTATGELQERRLQHREEAERFYRDLAAQGMKVRVGMEVSGHARWFERLLAELQFELWIGDAAVIRTKRVRKQKTDRQDAQLILKLMLKDDFPRIWVASWENRDLRQLLWHRHRMVQARTRIMNQLQAVALNEGLRCKKRLWREAGREQLEAFPLAPWAGRRRRDLLELLDRLSPTITELTQTIEQEAEKCPAAQRLRTHPGVGSLTALAFVLIIGRADRFQCGKQIASYLGLVPSEESSGDRRRLGHISKQGNALLRFLLVEAAQVTVRSLPEWRSKYFHLAMRRGRKIAKVAMARKLAIQLFWMMRKEWDYEQVKRFGPHAGQPENRRGVQ

SEQ ID NO: 117136 - protein, 395 aa, unidentified
MTATHASDSTDAAAPVLYLAFELGWNSWKLAFTVGLGQKPRLRTIAARGLNALHAEIQAAKTRFGLPAEVPVHSCYEAGRDGFWLHRYLASQGIANVVVDAASIEVNRRARRAKSDALDATKLVEMLIRYHNGQRKVWSVVRVPSPEDEDRRQLHRDQMSLKDERTEHINRIKGLLATLGLSITVDEHLPARLEALRQWDGAPVPPGMTARILREFARWQQIDRQVRDLDNQRARAVRGDSTTPREQVRQLLTLKGIGWNGAWLLVHEVFAWRQVQNRRQLAALVGLVPSPYQSGDSRREQGISKAGNKRVRWMMIELAWGWLRYQPRSDLSQWYLRRFGAGNARARKIGIVALARKLLVALWRYLERGEVPPGAERIDVSSKLCGRARPSGAVT

SEQ ID NO: 117137 - protein, 404 aa, unidentified
MAIDHDIALVDAGGNQLAKVRISDDAAGFTQLTDLLTEHGDSQAAPIPVAIETSRGLLVACLRATGRLAFAINPMAVARYRDRHSVARKKSDAVDAAALANILRTDMAAHRPLPTDSELVQAIAVLARAQQDAVWARGQAHNKLRSQLREFYPAILDAFAQHKHGLCSREARTILAAAPTPTMAAKLTRRRLQTLLKQAGRVRGIQADAERLHEVFNCDCLHQLPQVETALGLQTSALLRQLNTACDNADQLEEAVTQAFERHPDAPVIRSFPGLAALTGARILAEIGDDRARFANAGSLKAYAGSAPVTRASGKSCKVMSRKVKNQRLAAVGYVWAFISLTRSPGARAHYDRRRAAGDRHVAAQRNLFNRFMGMLFHCLHNGHTYDETIAFPQPSDGHVAAAA

SEQ ID NO: 117138 - protein, 391 aa, unidentified
MSLYFVGIDISKYKHDCCIISATDQKVISKFSIKNDKVGFEELITTFNSLSSPEDIRIGFESTAHYALNLELFLENAHHSFMEVNPVLIKEYKKSTTLRRTKTDSVDCESIARWLMTVEYKPHSKGFYHAYSLKSLTRLRDRLIRQRSFYLVKITNVLDHTFPEFKPFFNKRLSKTALYLLENYGSAEKMARMNSVSYEKLRSISRGKFSPQQFIALKELAANTVGVNNSIFDVELNSLLILYKTLVTEINTLEKEINLLIEEVHPHYLSVPGIGSISAAIIYSEYGDISNFDNPGQMLAFAGIEPGINESGTESHGGRMVKRGSSQLRYALINCCLPLIRFDMTFATYYAKKRAEGKPHRVAITHVAKKLIRVIYALERQNTDFCVQKLR

SEQ ID NO: 117139 - protein, 366 aa, unidentified
MKKISTVAIEGMQIFKGNQLTIGLDLGDHTSHYCILNEAGEVIWEQELPTTAKGIEQVFSKIPRSRIALETGTHSPWISRQLSQFGHEVIVAHARNVRLISESSRKDDRLDARTLARLARIDPALLGPVRHRSAKAQIHLTVIRARAALVSARTALVNAARGLTKSYGARLPKCGTEQINREITKELQPELREALNPLLAEIESLNARIAEYDTRIEQMAKEIYPEVARLQQVKGVGPLIALTYVLTLDDPYRFRRSRDVGCFVGLRPGRRNSGMSEPQLHISKEGDRYLRTLLVQGAHYILGPFGQDSDLRRWGLKLSGRGGRNAKKRAVVAVARKLAVLLHKLWVSKEVYEPLRNNRKQMAAVA

SEQ ID NO: 117140 - protein, 310 aa, unidentified
MDAIYVGIDVSKERLDVHVRPSGEAFVVARDGKGLEDLVDRLRTASATLIAVEATGGFETIVAAALAGAGLPLVVVNPAQVRHFAQALGKRAKTDPIDAGVIARFIEAVRPALRPVPDEQARLLAELVARRRQIVEMIVAERQREKRAANVRVRKSLTRIIKTLEKELPEVDGEIDTPVRGSPVWREKEDLLVSFPGIGNTLARTLLAEMPELGTLSRREIASLAGLAPFTRQSGRWRGKSMIGGGRASLRAALFMAALSASRCNPILKNFYQRLLSTGKPKMVALVAVARKILTILNAMLRDRKQWKPA

SEQ ID NO: 117141 - protein, 350 aa, unidentified
MLIIGCDFHTRYQQIAMMDDATGELLERRLEHENGEAEAFYRGLPKPVRVGIEATGPMHWFERLLAELGHELWIGDAAKIRASEVRKQKTDERDAALILDLLLANRFPKIWVPTPAERDLRQLLWHRHKLVCLRTLLGNQLHALALSQGLCRKRKLFTKKGRAELQSLGLAPWASRRREELLKLLGQVDAPIAELDKAVLEEAQRREEAVLLMTHPGIGPVTSLAFVLAIGPVTRFPRSKKIASYLGLNPSEESSGGRRRLGAISKQGNTMVRWLLIEAVYPAVRQDVALRQDYQRLKFRRGHAVAKVAIARKLAVRMYWMLRRGAEYAQLVRRQGSPGATLVDASSSLG

SEQ ID NO: 117142 - protein, 400 aa, unidentified
MISVGIDVSKGKSTVCLLKPYGEIICKPFEVQHTEKDLEELANLLQKLDGEIKMVMEATGIYHLPILTFLLEEVFFISVINPFMMKRFARDNSLRGAKNDRLDSVMIASYGIEKWHKLKKYEVNDGIYPELRFLGRQYHRFMQTHVKHVQELTHLLDHTAPGLKAMFNSWNEHSNRDKLSDFVERFWHFDLITSLSREEFVEQYLLWAKEKKYHQSRSKAEKIYDLASNGIPTLSSRTPSTQMIIQEAINVLRIVNNSLYNILSRMKELAKSLPEYATVRSMGGVGDALAPQLIAEIGDVRRLHNGHALVALAGIDPPPYESGQFVGTHRKISKRGSPILRKIGFEVMRMLKSHKEPEDNAVYNYILKKEAEGKNKKLAKIAGLNKFLRIYYARVMEVYR

SEQ ID NO: 117143 - protein, 371 aa, unidentified
MTSAAFSGRLKGNTVRETRRMLYVGIDLHRQWSQLAVVDGDGELMRSRRVRSRPDEMWQVFGEMPKDEPLEAAFEATFGYGWLADLLADAGVPAHMAHPLATKAIAAGRIKNDKVDAAMLAQLLRANLLPEAWIAPLEAREARRLVRTRASLVRMRSRLKSQIHAVLADFALRPEASISISTPRSQAPAMFSKAGRRWLSGQVLAEASRQRIEISLRVIDGLDGEIREVSQAMRQRFADDERVRRLLPIPGIGLFTAATVVGEIWDVRRFPSPRRLASWAGLTPKEHSSGDHHHLGHISKQGSRWVRWVLVEAATNHAMRHSGLRELFNRVRRGKQERAQLAHVAVAHRLLTLCYYALRDEGGCRAFPVRR

SEQ ID NO: 117144 - protein, 347 aa, unidentified
MDYYAGIDVSLEASSVCVVDASGKIIREAKVLSEPENLIGFFRDLGLEMTRIGLEAGPLSQWLYAAMKEEDLAVELLETRHVHDAFKAMPVKSDRNDARGIAQLMRLGWFRPVHCKSMPAQEVRALLTARKLVQSKLFDIEMSLRGILRGFGLKIGRTTPNRFGLRVEELVAGHPTLEIIGKALLAAHEVLLRELNGFEKRVRQQARQDKRVRLVMSAPGVGPIVGLTYVAAIDDPARFKSSKQVGPHFGLTPKRYQSGETDYSGRVSKIGDASVRTALYEAANVILTKPLKGATALKSWGMKLAKRAGMAKAKVALARKLGVILHRMWVDGTKFADKGISPKPVTA

SEQ ID NO: 117145 - protein, 332 aa, unidentified
MDNFYFIGVDVSKKKLDFCVLFEGKVLREEQVSNHQQAVARLIGELKNDLEMDNEQFLICAEHTGQYTFPLVCACKSVECKLWLENPSQIKYSSGMQRGKNDKVDAKRIAIYASRFGDKVKYYDRPTEEIERLKQLERERALYVTDLAKYKGQMYDQKDFMPAALYRKKTKRMKGLIQELQAAIDAITAEMEKIIGSTEVLARQMELLMSIDGVGKVVALNVIIETEAFSRFDNPRKFCCHAGVAPFSYTSGSSQHSKNKVSHRANKNIKKLLHRPAVSVTHRKEGELKAYYMRKVEEGKNKMSVINALRAKIVARMFAVIKRNEVYTPIYS

SEQ ID NO: 117146 - protein, 345 aa, unidentified
MELHTIGIDLGKTVFHLVGLNLRGEVVVRKKCSRKQLLHFTANLKVELIGMEACGGSHFLGRALREQGHEVRLIPAQYVKPYVKTNKSDYIDAEAIAEAVGRPRMRFVPIKTDDQLDLQSLHRVRERWVMRRTAVINQIRGLLLERGITVRKGRRHVHAVLPGILEDASAKLSGALRVLLAQLKLELDHLEMRNDEADAVIRKMADENEACRRLVAIPGIGPITATAIIAAIGNGAAFRKGREFAAWLGVVPGEHTTGGKQKLLGISKRGNSYLRRLFVQGARAVLQQSTKQSSALNAWLAKLTARTHRNVASVALANKLARFAWAVLAHNETYRPPLLAGAATA

SEQ ID NO: 117147 - protein, 451 aa, unidentified
MVQRKQKISIKTSKSREALTITHPNAAGIDIGSSSHYVSVPPDRDDEPVREFPSFTVDLNALADWLDACGVDTVAMESTGVYWIPLFELLESRGFKVFLVNARHVKNVSGRKSDVLDCQWLQQLMTYGLLRGAFRPSEAVCVLRALWRQRGMLLRGQGRQVQHMQKALTQMNIQLTNVISDVVGETGQKILRAIVAGERDGQVLGAMKNARIRATSDEIAKSLQGNWRAEHLFALKQALDMFDFIGTQLSECDRQIEGQLESLKIHDGEPAKGKKRGRTRNAPKFDLRTQLFRMCGVDLTRIDGITTALAVISETGTDMSRFPTAGHFASWLGLCPGTKITGGKVMSGKTKRVANRAAQALRLAAAALRSSQSALGAYFRRMCGRMDKPKAVAAAAHKLARLIYTMLTKGEEYTDQGQDYYEERYRERVLRQLAQRAEKIGMKLVANEQPV

SEQ ID NO: 117148 - protein, 436 aa, unidentified
MRGCRCSMIMGFTKPIEHFNLQRKKVITMNTLYVGIDVSSKSNVVYLMLPNGDKHSNFSVANSHEGSTLLVKKIYSALTSHSLDTVLIGLEATSVYGDNLVYFLREDATLAPFNRKIHVLNPKQVKKFHDTYNDLPKNDYVDSFVIADCLRFGRINKEVYMGEYRYKALQNLTRARFFAVQNLVKEKQRFMNVLFKKYSTMTQEKVFSDAFSTTALAVYDEFESAEALANMDLHELTDFIIEKGKNRFPDPDAVAKAIQKAARSSYRLPKTVNDSVNQVLSISITSMKALESQIKEFDKAIIALMELLPNVLISIPGIGPVYSAGIMAEIGDINRFDNQASLAKYAGLAWKQHQSGGFEAEVTRLIPSGNRFLKYYLCEAAFSLVRCDKEYSDFYHLKYKEVNRCQHKRALALTARKFVRLVFRLLKDNRLYCPAK

SEQ ID NO: 117149 - protein, 405 aa, unidentified
MYQVCVGIDWATTEHVVCVLDGSGRRLSRFRVDHTEDGLDDLINRLGGFGDRADVAVGIERPDGLVVDRLLEAGHLVVAVKPAAIRAYASAETPSGAKSDPADAETIAEYLRLKAERLDRLRPYSPQTRALRETCRTRVRLVRRRVRATNQLETTLGVWWPGALTAFPDLDTDIAMAFLTRYPTPEAAAHLGPKRMERFLDVAGYSRYGWRRSGQEMIDLIRKAPRGVGTGQLAAACQAVVGTQVNTVAALRDAIKDLRRAIRTQLDEHPDAEIFLSLPHSGMINAAQMLAEWGDVRKAYPDPESVAAQAGVSPVTRQSGKYRNIVFRRACNKWFRQAMTTFADNSRHGNEWANDVYRQARARGFDHPHAIRVLARAWIRVIWRCWTDHTPYNPDRHGNLQALTS

SEQ ID NO: 117150 - protein, 343 aa, unidentified
MQFFVGIDVSLDSSSICVIDERGVIIKEGKTASEPSAIARFIRHKGRKIEHVGLETGSLSQWLYAGLTGEGFRVTVMEARHVRAAFAAMRVKTDRNDARGIAQLVRLGWFKAVHVKAPSAQETRALLNGRRFLVDKLTGIENSMRASLRNFGLKMGQVSRSKWAGRARELAAGVPALELVIESLLRVRDVLRQELQAIDRRLLDEARADPVARMLMTAPGVGAVVALTFKSAVDDPTRFKRVRDVGPWLGLTPSRYQSGRTDIVGHITKAGDAGVRTALYEAATTLLGRVTGWSTIKNWGMRVARRSSTKKARVAVARKLAVVLLAMWRSQTPFRWSATPASA

SEQ ID NO: 117151 - protein, 349 aa, unidentified
MILGVDVHKHTHTAALLEPPSGEISTLTFANSADGIARLRDWLAEHGGEGAVVGIENAAGYGRLLAAALIAAGHEVLTVPSWRTHRDRDLVGPGKSDAGDATAIAEVVLRKRSELGPAAEPEMVRAMALLEALRRQSVAQRTQAIQRLRAIWTQVDPEAEREVLHLHRQRPLRRLRRISLGGGLAERAAARCVRELAREIATLNDRIGELETEMAALLAEHGNPLADLPGAGPQVAAAVVAHAGDVRRFRSQAAFARFCGVAPIPCGSGQSDGRHRLHRGGNRQMNAALHRIAIVQARVSPQAKAFLARKRDEGKTAREARRALKRHLANVVFRRLVEWAPDALDPAST

SEQ ID NO: 117152 - protein, 393 aa, unidentified
MICVGIDVAKDKHDCFILNSEGEVLADVFTIQNNAEGFDTLLQAIRRCTRPEDKIKVGLEATGHYSYNILGFLLNKGLPTYVINPLHTNLYRKSLSLRKTKTDRVDARTIAAMLMSDVDLKSYTDTVYHNEELKSLTRYRFDKVRERAKLKQSVSRLITILFPELEKLVPTLHMASVYALLSEFPGAKQIAGAHLTHLKALLSDASKGRYGRDMATALRDAARCSVGSAMPAKSLELRHTIRLIHELDAEIEDIEAAIQSMMDEIQSPITTIPGIGVRMGAMILAEIGDFSRFDSPDKILAYAGMSPSTYQSGQLSLSGAYSHMEKRGSRYLRYALYNATKYACLWDPTFAAYLAKKRAEGKHYNVALSHAAKKLVRLIYAMVRSGLPYSSAA

SEQ ID NO: 117153 - protein, 336 aa, unidentified
MRIVGLDVSRSVAELAYLEDGVLHAGGRAGLRRDELERFAAGLRCTDHVVLEATGNTAAIVNVLRPHVARVAIANPLLVRLIAEARVKTDKIDAAVLAQLYASHFLPEVWMPDESTLALRRQVSRRSQLVRQRTRLKNEVHAVLAAHLIEQCPAPDLFGKKGRVWLGAQPLPMDERLGVEQRLRELDRLGEDLREVDQALAQASIGDERLRRLLTITGVNTIVAIGLLSAIGAVERFPNPEKLVSYLGLNPSVYQSGPTPARHGHITKRGRSYARGLLVEAAWGAAQAPGPLRAFFLRLRERRGQQIAIVATARKLAVIVGTCLRVMSRSPGTVQP

SEQ ID NO: 117154 - protein, 411 aa, unidentified
MEAAVITAVGIDVSKSKSTVAVRRPGGEIVLRPFEVHHTNSDLKKLASTLKKLGGDIRIVMEHTSTYWRPIALTLKEAGFFVSVVNAMLIHDFSDNTIRKLKTDRADALKIANYALTFWDTLPPFNNEEETRLLLKMQSRANERITATATALRNGLIALADQTFPGVNIAFDPNTKNANGHEKWVDFFLRYWHKDCVCQYSMEAFTESYRGWCKRKNYKFRTDTAHKIYLLAQEGVATLPKCESTKMLITQACKSLNAVCEAKQSTQLEMQRLAAMLPEYEVVMQMEGAGPITGPALMAEIGDVRRFKNKKALVAFAGIDAPPFQSGAFESKSRHVSKRGSPHLRRTIFIISNIILTRSNPENAVYCFMDKKRSEGKHYYVYTVAGSAKFLRVYYARVTEFLRSQPSSDAC

SEQ ID NO: 117155 - protein, 341 aa, unidentified
MAWTVAIGVDTHKDVHVAVACARLARELDGCQLQASARGYAQLWQWAQALGEPAFAIEGCGSYGAGLARFLQASGASVFECERPRRRERGRGKSDRIDAALAARRLLSGTGLSRPRGQGRREQLRLLLLERRGVVASRTAALNQLQGVLVSAPERLRQRLGCLHGAKLARAARVLPKGGAEHGTLVGVLRRLGRRVEQLEAELAELDAELEAIVRALVPELPDECGVGAVCAAQLVTSSGDPARMRSEAAFAALAGTSPVDASSGRQQRHRLNRAGDRQLNRALHVIALARVRHDPKTAAYQERLLAAGKTPREARRCIKRALARHFYRRLLANAGLALTT

SEQ ID NO: 117156 - protein, 347 aa, unidentified
MKDVTTIGLDLAKHVFQAFGADAEGTPLFNRKLRRAEVLRFFERLPRCLVGMEACASAHYWAREISAFGHDVRLLPPQYVKPFVKRGKTDAADAEAIAEAVTRKTMRFVPVKTAEQQAAVMVLKTRALLVRQRTQAINALRAHLGELGIIAPTGIANVKALAPIIRDEEDTRLPPAARFALTEIINQIEMLATQIDKLEREIVIQAKQDDEMRRLATIPGVGAIIAMAVKAFVPDPAGFKSARHFAAWIGLTPKAHSSGGKERLGRISKMGNPVLRSLLTTGAASVLRHVQYRDRVWPWLKNMLTRRPFKVVAVALANKIARMIWVLLTRGGIYGDPTGIEAGPVAA

SEQ ID NO: 117157 - protein, 367 aa, unidentified
MEDCTMKDYTGKTVFVGIDVHKKTYSVTCICDKIIVKRDTLKASPIGLVEYLNKYFWSAKIKTVYEAGFSGFVLHRYLLEQGIDSIVVHAASIEISARDRVKTDKRDSLKLAIQLSDGRLRGIHVPSPQREAYREVSRTRAKIANDKRRVGNRLKSLLYRQGLIGPDDDNTVNKKWLEKIIQYKYDESVKYCVQVCIDEWLFLRKKLKEIDDELAKQAVADQKLERIYQSVPGIGIVHARVLANELEDMKHFANENKLFSYTGLTPSEYSSGEHKRQGHISRQGRAVLRKTLIQASWKAIYKDSSLEIVYERISRTAGKKRAIVSIARRLIGQIRSCFRSNELYRFRETEVIEFCPKTGEISLAANS

SEQ ID NO: 117158 - protein, 413 aa, unidentified
MLQVIHERCAGLDVHKKTVVACVLVTEQDGQVRQEVRTFGTTTGEILAMAEWLKSSQVDSVAMESTGVYWVPIYNLLEESFKLLVVNAQHMKAVPGRKTDVNDAEWIGQLHRHGLLKGSFVPPKPQRQLRELVRHRTNVVERRSQSVNELQKVLETGNIKLASVVSEITGVSAMEMVSGLIEGKQAPGVLAEMARGRLRDKKPQLAAALTGRLEEHHRFILSQLLADISFCEEQILELDLKIRVQMKEYEEVIQRLDEIPGVNRRIAEVLIAEVGTDTSRFGDAAHVVSWAGMCPGNNQSGSKRRTARVRQGNKSLKRVLVEAAHAAGRKKDSYFSAQYHRLAARRGKKRAKVAVGRSILETAFHMIQRKSTYKDLGSDYFDRRNPERLAKRLADRIGKLGFKVTYEPLDKAA

SEQ ID NO: 117159 - protein, 389 aa, unidentified
MITIGIDIAKFEHCACAINHDTGEFVVEPFFFKNNIEGFSKLKSSLCSIKSALIGIEDSGHYGDNLIFFLLKNNFKIALINPKTTMERRKGKLKSVKTDKQDAILITKVLLDKKDYRIMTKENYALRQLKHLTRRVHDMKKDLNVYKNRLQKEIDLVFPEFNSLFKTKYGIIYNRILKELSSAFVISNTDIRSIRKIFNMKIQGNKISLTAEELKAAATRSVGEHNGASEYQIKYLISVIELIKEQCIELKKIIEEYSLQLNSPIVTIPGISHFSGMSILSEFRDINLFPTASQLISYAGVNPYVSESGIYKSPHTSITKHGNPYLRRVLYQVILPVIHNNPTFLSYYNLKRSQGKSHRCANGHAVRKLLRIIHHLVTKDVDFNSKLLV

SEQ ID NO: 117160 - protein, 412 aa, unidentified
MQTPYKIAGIDVHKGMLAVVIADAVAEGEFRFERRKFGTLASDLRALAEWLTAEQVREAVMESTAQYWKPVWRQLEQQCRLHLAQAYSNRAPRGRKSDFKDAERLLRRHVAGELILSFVPNPEQRLWRALTRSKHQLTRDRVRLYSQLESLLEDARIKLGTCVSDLLGVSSRRMLQGLADGETDASRLANRAEPELQASPEQLADALSVAATLSALHRQILSLFLERADLLERQIATLQQTIAAALRKHQEAVMRLAAVPGFGVDSAAQVIAEVGPTAETFSSAAELASWVGVCPGREESAEVSKSNRTPKGNRAMRRVLNQVANASLKAKGSIFQAMYRRLVPRLGHQKTVWAIAHRLCRLAWIVLHRGVEYVEYGQQRDPKAIQRRTAKLIRALRGLGYQVIPPPVKVAV

SEQ ID NO: 117161 - protein, 398 aa, unidentified
MLHDHPSVGPTAIRTQFGAIFVSLELSRSKWVLTSLSPGNGEKMSQYSLTAGDIGGLLARFADLKRKARERTGSDYPIITIHEAGLDGFWVHRVLQDEGIESHVVDAASIATSRRRRRAKTDKIDGEALLRALLAFKRGEPRVCAMVVAPSPEEEDRRRLCRERQTLLDERIVHTNRIKGLLFAQGISDYAPLRRYRRKRLEGLRTGDGRPLPVHLKTQISRELDRLELLIDQIRSVEAEQEALLAAESKAAPKLGPEKAMSEAEPRNAVAMLLTVKGIGDHSAAILWSEGLSRQFSNRRQVAAYAGLAATPWRSGAVMHEQGLSKAGNPRLRTLMVQLAWLWLRHQPQSALARWFNARGERGRKGSIVALARKLLIALWKYVTQGVVIEGAALKPAA

SEQ ID NO: 117162 - protein, 313 aa, unidentified
MSNSLPQTIGIDISKATLDCYVHPIGIERQFPNTTKGHKTLIAWAGQWEVERIAYEATGIYHRALEIALGHMPCVKLNPERARRFAQATGTLAKTDRIDARLLARMAVTLKPPVRPARSPQQNQLAELVNARDGLVRDRTALKNREKNLTVTLLKRQCSQRLEQIARHIAALDAEIAAVIAADEKLVRRHHILTSIAGLGTLTANQIIATMPELGSLDNKQAASLAGLAPVARQSGQWKGKSFIRGGRANVRQALYMPALVAARFNPNLKAKYQQLIAAGKPAKIAITAIMRKLIVTANALLRADRLWTTACA

SEQ ID NO: 117163 - protein, 402 aa, unidentified
MNAVGIDVSKGRSTIAVVKPFGEIVAKPFEVRHTKSGMNDLVNYLNTLDGECRVVLEHTGRYYEPMVRWLSGAGLFVSAVNPKLIKNFDNNSLRRVKTDKADAKKIARYALDKWPELRQYTAMDKIRTQLKLMNRQMSFYQKQQTAYKNNLIALVDETYPGANKFFTSPKRPDGSEKWIDFIEKFWHVDCVCNISLSSFTDKYQKWCKKHGYNFQPDKPKEIRDASLELIAILPKDDMTKMFIHQAVGQLNAISKAVEELRQQMDSLASKLPEYPVVMSMFGVGTTLGPQLIAEIGDVHKFTKRSQLTAFAGVDPGVNESGDYAQKSVHTSKHGSPYLRRTLFLIMNVLIQNQPEDDPVYRFMAKKRDEGKPYYVYMTAGANKFLRIYFGKVKEYLSSLPLE

SEQ ID NO: 117164 - protein, 386 aa, unidentified
MQKLNDLSRSLTALELDSTLIAVIEMSLSNWLVAGIVPGIERQPLKKLAVDESALLKLLHRWREEAEKAGRRIERTAVAFEAGRDGFWLARWLKAHSIEAHVIHAASVAVSREHRRAKTDRLDSELLKRAFLGWLRGERDHCKMVAIPSIKDEDAKRPNRERESLVGEQSRIVNRMKAALIRLGIRGFNPKLKRAAGRLDGLHTPEGEPIPPNTLAELRRDMERRRLVSNQIRQIEEARLERLEQAPSDGPHAMVRLLARVIGVGIETADMLVQEVLSRNMRDRRAVARYAGLTGSPDESGRKCREKGLARSGNARVRRGMIQLAWRLLMFQKNSALAQWFRARTENARGTRKTMIVALARKLLIALWRLVREGVVPDGVVLRPAQ

SEQ ID NO: 117165 - protein, 342 aa, unidentified
MGEVTIIGVDLAKNVFQVHGAAANGSVVFRKKLSRPQFARFMADHPPCVVAMEACASAHHWAREMARDGHEVRLIAPHYVKPFIKRQKNDAADAEAIVEAALRPTMRFVEPKTQEQQARAVAFRTREQLVKQRTEAVNALRSHLYEFGHVAPVGIGYVPRLEQVIADPDADIPDLAREICRVLLDQINQLTDRIDALKARIAALSNEAEMPRQLQTMPGVGPITALAVETFAPPMEQFRRGRDFAAWLGLVPRQHSTGGKQKLGKTSKMGQRDIRRLLVIGATAVIRWASRRGAPKGSWLARMLERKPVPVVAVALANKMARGIWAMLTRGESYRGPVLIGA

SEQ ID NO: 117166 - protein, 317 aa, unidentified
MDSKKYIGMDVHQATISVAVMDADGKVVMDCVIETKAAIILEFIQGMRGTLWVTFEEGTSAAWLYDLLKPHVAKVVVCDPRKNALLKAGNKNDRIDAHKLAELLRSGLLSPVYHGGAGVGTLRELARSYLTITKDLTRVRNRIKGWYRSWAIPCSGQKVYSPRYRSAWLKKLTEAGVRRRAEWLYQQLDDLQPLRREARRELLAESHKHPANTVLRQVPWLGPIRVALLIALIQTPHRFRTKRQLWAYSGLALQTRASGEYRVSGGQLHRAKRQPSLRGLNENHNHELKAVLRAQPPGPAPLPARLEIFMLPCWPRG

SEQ ID NO: 117167 - protein, 387 aa, unidentified
MPQPNDLSRSLVALDQDSTIIAVVEMSQSSWLVAGMLPGIERQPRKKLEPSAETLLCLLHRWRDEAVKAGRKITRITLAFEAGRDGFWLARWLRAHAVEAHVIHPSSVAVSREHRRAKTDRLDTELLKRGFLGWLRGERGHCTMARIPTIAEEDAKRPNRERECLVRERTRIVNRMKGTLARLGIRNFKPTLRKAAERVTTLHTPEGSALPPNVSAELQRNMARLGFVVSQIKEIEAARQKRLEQEPETEPHAMVRHLARVVGLGVETADILVNEVLSRPMRDRKAVARYAGLTGSPDESGAKRREQGLAKAGNARVRRGMIQLAWRFLRFQKESALALWYRARTADSRVGTRKTMIVALARKLLIALWRFVTTGETLEGVVLRPAG

SEQ ID NO: 117168 - protein, 395 aa, unidentified
MNLVGIDIGKNKHFFCVMNKDTGELLVDPVSFSNNKEGFDFLVNKLKPFSKDSILIGMEDTGHYHFALLKYLLNKHFTVALINPKITDFTRKMQSGITKNDKLDTLMICDVLDTPKRKKQYRITKVNSFDLYEQKQLTRHHHNLKEELNVYSNRLQKCIDIVFPEFNSLFKSKYGTVYINLLRTFGGCAETIANTDIRTIRKCFEIKGRGKRISLTPEKLKGCAKQSIGISSAAEVIQIKHLVNQIELINKQIAEIDKKIEEFSVKNNSPILSIPGISHFSGTSILAELGDISNYKKPSQIIKFAGVAPMHYESSQFTAQHTAITKKGSKYLRKTLYQIILPVINHNPVFKQYYELKISQGKGHRCAQGHCVRKLLRIIYHLLSTNQKFNPALLR

SEQ ID NO: 117169 - protein, 412 aa, unidentified
MKNTTIAIDLAKSVFEIGISDRPGHVAQSHRLSRSQLAAFLAAQPPATVVMEACSSAHYWGRKFEGFGHPVKLLPPFAVRPYVQRSKTDRTDVKGMLEAWRNSDIRPVPIKTESQQQLTSLHRVRSTWMAARTMRINSARGLLREFGIVFPAAAARLPDHVQGLIGDADAPVPMLFRDLLHQLVVEIQDLESRVKIVEKHLEALASQTPVVELLRTIPGVGLLTATALVGFVGDVARFPSGRHFACYLGLTPREHSSAGRRTLGRISKRGDVYLRMLLIHGARAVLWGAKSKSDPDRFRRWALELQRRRGHNKAAVAVANKLARFVWAVWKFRRPLESVLRAPPEGPDEPHLSRSCTFAVRTDGEPVRPARGKADNTPGPPRPVQRLAPRARISSWPGRLRPTSEAADTTAV

SEQ ID NO: 117170 - protein, 422 aa, unidentified
MLQETQDREEIVQRVAALDIGKAEVVCCVRVPHEGRPGRRLQEVVTCSTMTGSLLGMADRLRCLGVTRVVMEATSDYWKPVFYVLEASGFETWLVNARDVKHLPGRPKTDKLDAVWLCKVAERQMIRPSFVPPPEIRRLRDVTRYRIDLVTARTAEKNRAEKLLEDAQIKLSVVASDIFGASGRAMMAALIAGERHPKALAQLARSSMRRKITALEEAFTGHFTDHHAFLLGKMLARVDAIDADIAELDTRIEEMIAPFTAAAERLDEIPGIGRIAAAIIIAEIGLDMSRFPTAGHLASWAKFAPGVKESAGKKKGRGSTGHGNSYLARILGEAAVAASKTDSFLGERYRRIARRRGKKKAIVAVGRSILVIIWHLLSDPGARYTDLGSDFFDHRVNPERRKRAHIHQLETLGYKVTLEPTA

SEQ ID NO: 117171 - protein, 397 aa, unidentified
MMEQLVSSSDISSLVNLIKSVDGESRVIMEHTGRYYEALTHQLSNAGIFTCAINPKLIKDFDNDSLRKVKSDKADAVKIARYALDKWDNVKPHSVTDVMRNQLKTMNRQFGFYMKHKTAMKNNLIGILDQTFPGVNTFFDSPARSDGSQKWVDFASSYWHADCIRKMSLNAFTEHYQNWCKRKKYNFGKSKAEEIYGLSKELVPILPKDEITKLILKQAIDQLKVVSKTVEEFRSIMYKTASKLPEFPVVMNMKGVGPSLGPQLMAEIGDVLRFTHKGALTAFAGVDPGVNESGSYAQKSVPTTKRGSSELRKTLFQVMDILIKTKPQEDCVYKFLDILKKFDLTFYLQAMILIFYHRRPLYCLIYRNFFTGSWDGIFAYFSNIPDTSETRILGYHK

SEQ ID NO: 117172 - protein, 350 aa, unidentified
MEYIAFDAHKHYTLASVVTPDGQLVREERIEHDRGTLREFLERCERGSPVAVETIGNWYWIVDEIEAAGCLPRLVHARKAKLMMGEINKTDRLDVRGLNRLQRSGTLPTVWIPPGELRDQRDLPRTRMVFVRQRTQLKNRIHATLAKYALHDLDVSDLFGVRGRALLRERFELLPPHTAYASQQLLGQVEELGRQVHAFEQRIQATFKLTPAIQRLLTLPGVGYTLAVVIALEVGDVARFASAERLAAYAGTTPRVHASGGKSRFGRPRPDVNRYLKWAFVEAANAICLHRGRAADRHVSRLYERLARRKGHAKAIGAVARHLAEATYWMLSKEEAYREPKSVDRVVHGG

SEQ ID NO: 117173 - protein, 446 aa, unidentified
MSDRSGLSRGDRNRNARLARLRQLLPPENAIVGIDLADDKQAAVVTDHDSRVIARRRVSARAWELGGLLEWAAVKAAAAGFASVTVVCEPTGHRWRVLDQLAAERELALVCVQPLLVYRAREGEDLTRDKSDPKDAVIIARLAAGLHCYEPERADAVWARLRHLGARRHQLTTDATAGVNQIRDLLECAWPAVLTVSGAPFRSASWRAAVAVVLQRCAGDLGRVRRLGEARFIAAVRRELPRWGATRPCLRIVRGVFTALADPAGVTAHRPGALERVHLAMNDWHDTRTRLADAEARMTGVLDDLGLTELVTTIAGLTPAGAAAILAETGDPARFASPRSLVKHAGLCPRDNASGAFQGKTSISGRGRPRLRVAAWRAVWAALPNNPVMAARFTYLTTREDNRLARQQARTACAAALLRWMHVVITRRVSWDPAIAAGGTPLQQAA

SEQ ID NO: 117174 - protein, 344 aa, unidentified
MVAGVDTHQRTHHAVVLTETGVLLADREFPVSRAGYAALVDWVAGHGPITAIGVESTGSYGAGLTVHLLAAGIEVIEVNRPDKTTRARRGKSDVIDAESAARAVLNGTATARPKVKTGVVEAIRVIKVPRDRAVKDRTAAYGQLRDLITTAPAVIHDELIGCTARQRVARAAGYRPDGARLADPVQATKHALRMIARRIQALDAEITAADKTLRVLTRQAAPSVMAMPQVGVQTTAQLVITAGQNIERMHSEAAFAALCGVSPIPASSGHTSSGRVRLNRGGDRQANSALYMVIIGRLRRDPDTQAYFHRRTSEHKTRAETIRCLKRHLARTIYRNLKTDLMTT

SEQ ID NO: 117175 - protein, 313 aa, unidentified
MNTAIAAGIDVGRDFFDVAIAPSGRWFKAPNGAGGVQVIIDRLQRAGVARVVLESIGPYASRLIRALANAGFAVGVVDPKRIKALRLAEGGRAKTDRLDAKLIARFALLMSDVARPIPSAESLEIRALSTRRRQIVEMIAMEKIRLKQAIDAPIAQSHRDLIALLSAARARVELQLEARARTHAGGERRAFLLRTVPGIGPAISTTLLADLPELGSLDRKAIASLAGLAPHADQSGTREGRAHIQGGRPCVRTAMYMAALTASRSAKGYKAEYQKLRAAGKPAKVALIAIARQILLAANSVLREDRPWTPKNV

SEQ ID NO: 117176 - protein, 355 aa, unidentified
MVKHDGGPVYGGIDTHADTHHVAVIDAHGRPLGDVQVPATAAGYRQAVRFIGRWPQVAKVGVECTGSYGAAVTRELRAAGLTAIEVNRPNRFDRRTRGKTDVFDAYSAAEAVLSGRAGAAPKGADGLVEALRVLRTTRTSALRERTATINQIKAMLIAGPEPLRARHRGLSNTRLTATLAATRPTCTPVSATEATAYALRVLARRYLLLSEQITDLTGHLHRLLADHAPALMAVFGAGPDTVAQLLITAGDNPDRLRSEAHFAALAGACPIPASSGKTNRHRLNRGGDRQANSALYHIVIVRMRHDPTTRDYVARRTAEGRTKMEIIRCLKRYLARQLYPLIRDVLQPPARAVAA

SEQ ID NO: 117177 - protein, 339 aa, unidentified
MMEHFVGIDLHKYVSQLAVLRESKPASQLRLANDVVAVERVLKKLPKGSKIALEAMGSWWWMVELAQKTGHEVFLSHPKQTKAIASARLKSDKVDALMLAKLLKADLLPTVWIPPENQRHIRELLTHRVRLVRQRTAVINELRAVYAKRNIDPQARLQRLHPVVTAANELGGYGPRIVDEDLKLLGFINGQVGGLDTELKNIAHEDGQAKRLMTIPGVGPVSAVAVSCWIGEIARFSNAKKLASYFGLAPRVRQSADQERHGHITKEGNRMVRMLVIQAALVHTRRGQGPSRKHYLGVLKRRGKQIARVAAANKLLGAIFHMMRERIDYQEFLRRSGAQ

SEQ ID NO: 117178 - protein, 377 aa, unidentified
MLPQPQWFVALGHSPKEEHDMKFYNKQHEFYCGIDLHANSMHVCVVDHNGEKLLHRNFNTKTPEKFLIALQPFEKHDLILGCESTFNWYWLADLCHQQNLSFLLGHALYLKAIHGGKTKSDRIDSEKLAMLLRGGNFPTSYVYPKDMRGTRDLLRRRCTIVRRRSATIVHVQMVNHQQNLPAFKKSISYKANRVGIADRFEEGSVQRMVSLDVDLIDFYDEQIKKLDLYLEQHAKVDDADTFYRLKSIPGVGRILAMTMLYEIHDITRFPRVGDFLSYARLVKGTNSSAGKQYKPTGAKIGNPHLKWSFSEAITLLKRESPEAKAYAERIEKKHSKARANTLLAIKLGRAVYWMLTRKTAFDPTIFLKQLNASEALT

SEQ ID NO: 117179 - protein, 393 aa, unidentified
MVYVGIDVAKDKHDCFIVNSDGEVLYDVFTIQNDMDGFEDLLFKIKTASRDLSKVKVGLEATGHYSCNILGFLHNKGLTTIVINPLYTSLSRKSVSLRKTKTDKVDARTIASMIMSDVSLKPYSDTVYHNEDLKSLSRYRFDKVSDRSKLKQSVSRLVNILFPEIEKLVSTLHAKAVYALLSEFPGAHQVASANLKHLTALLSTASKGHFGREKANEIREAARRSISSYLPAKSLELRHTIKLIHELNAEIAEIETEIKKIMDSIDSPTLSVPGISYALGSVIVSEVGDFSRFDNPDKLLAFAGCSPSTYQSGQLYSTHAKMEKRGSKYLRWALLNAAKYVCKWEPTFAVYLRKKLAEGKHYNVAVSHAAKKLVRLLYHLETTGEKYIPQTLS

SEQ ID NO: 117180 - protein, 346 aa, unidentified
MQNDTLVAVDIAKEVFEVAVSERPGRVALRKRLLRDRFAAFVAQQPQATVVMEACATAHYWARRLEEMGHVVVLLPPQYVRPYVVRNKTDRTDVDGLLEAFRNEQIRPVPIKTVTQQVIATLHRLRSGWLADRVRSINTLRGLLRELGFFIPEGRQHVLPEAWEIIQDHHRGLPEALKPSLAALCEEIASLSTRIEDVEAQLEAIARQIPVVARLRSVPGIGLLSATALYAFIGDPSRFPSGRHMASFVGLTPREYSSGLRRRLGRISKLGDAYLRMLLIHGARSVLWHAKRMKNRDRLRSWALSLERKLGHNKAAAALANKLARITWAVWTNERDFEPVFEPQAA

SEQ ID NO: 117181 - protein, 453 aa, unidentified
MKVINDSCAGIDVGSRSHYVAVGQADDQVREFGVYADDLKDLSDWLKQHQITSVAMESTGTYWQNLFVELINSGFVVILTNGKFTKNINRKKTDVRDCQWIQKLHSLGLLPSSFLPDTTTERLRTLCRHRMNMISLKADASYKMQKFLKLLNFRLDVVVRDITGQTGMKIIRDICSGVMDPVELAKNRHYNCRKSEQEIAKALVSNQREDYLFGLNQELDRYEFYIGQIQVCDKKITAFLNETLLNSQIDFPEDKPYKRNNKNSISGLDLNKVAYQYFGGVDLYQIPGVSHSTILTLMSEIGIHGFDKFPSAKHFASWLRLAPNNKISGGKILTNRIPRGSGRVKIALRNCANAVGNLKESDLGRFFKKIAFKKGRQAAITATARKIAVIIWNMITKKQPYTPTNPYVFLDEKRKQLALVRKKIARFGIDPNELGVFSQERYRQKWELKHADN

SEQ ID NO: 117182 - protein, 348 aa, unidentified
MEHVAIDLGRPNSVMCRLNAEGQKSFRRFALNRSNLDRFFGTRPPCRVLIESSTESEWVARHLEGLGHEVVVADPNYAPMYGERNRRVKTDRRDADVLFEANRLGIYREAHRRSAEQREVTALLRVRDSLVRTRTRWINVVRALVRGEGLRLRSGDTATFVERVEELELSGGLRALVRPVLELLGPVNEQLRIVDKQVVELKKADERVRSLQTAPAIGAVTSAAFLALIDDVGRFPRAHALESYLGLVPSEWSSSEKRLQGRITKAGDNRVRWLLVEAGWTILRSRRLECQPLRSWAEGIAARRGRKVAAVAVARRLAGILYAMLRDGTDYNPARLHARDHRRTHQAA

SEQ ID NO: 117183 - protein, 369 aa, unidentified
MFAAYKPARKEVEDMIYVGIDIHKKNCQSVLVDESGKVLEQVPFRNTGNGLAYLIERIRPYGEAKAVLESTGNFWLKSYEALEKASIHVSLSNPLKTKAIAQARIKTDKIDAKLLAHLLRANLVAESYVPDKATRDRRALLRHRSSLVKTRTELKNRIHNLLDKYDLQPEYTDLFGRQGTEWLRNLQLPTIEKTILHSNLDLLEALNNQIEKINLDIASIAVDQENVKLLMTLPGIDYYAAMVIANEIGDITRFPEANRLVSWTGLAPSTRQSGSRIKHGAITKQGNRTLRWILIQATHNACRNDERLRSFYQRIARRRGGNKATVAVAREMLVIIYHMLTRREPYRGVDDELYRSKLKRLERLGNSGL

SEQ ID NO: 117184 - protein, 366 aa, unidentified
MAITHVALDDSKRVIVAGILRAEATQPELREIPNDPRQVRRLFARLLQEAPVRACYEAGVSGYDLYRQLTALGVDCAVIAPALTPRKPGERVKTDRRDAANLVRLFRAGELTAIHVPTEAQEGVRDLTRCRDDVRADIIRWRHRVLKLLARHGRVYQTGKNWSQAHWTWIRAQRFEDGALARTLDASLEALEQALRRRAELDRAIEGLADDPRYREAVSALRCFRGINTLSAMILVAEIVDFQRFVRPRALMAYLGLVPSEYSSGERQRRGALTKAGNTHARRVLVEAAWHYRHRPALGDRLARHTAGQAPAVVAEAWRAQQRLHRRYRHLIGHGKRPTVAVAAVARELAGFVWAAMTQRPRRAAA

SEQ ID NO: 117185 - protein, 433 aa, unidentified
MEEVTDEPLYRDRVCGIDIGKAELYATIRVPSDTRPQRRMSETRSFATTRRGVLALADWLRCWQVPAAVMEATSTYWMGPFFRLEAEGFECVLADAKQVKNLPGRPKRDPSDSSWLAQCFERGAVRPCFVATKEFRVIRLHTRYRRDLINERTREKNRAEKLLETAAIKLSSVITDLHGVTGRDIMGHLIAGERDPKVLAQLARTRARAKITELQHALEGAEFFTGHHARLLKTMLERIDQIDAQISDLTAVTEELLAPYEEQLQQAESMPGWGRRSAEDAVAETGTDMTRFATGGHLVSWAGRAPLDKQSGKRKGPARHKKGNTYLGGVLGETAVCAGRTQTREGARYRKLARSRGKNKACVAVGNTQLKVYHTLLSHPGMRYADLGPDYYQRRAQTRRTIDYHVRELEALGLEVTICRHPEPGQAATTPAA

SEQ ID NO: 117186 - protein, 338 aa, unidentified
MYYTGIDLHKKTSYITTVDDTGRIVAKANLVNHEDTIIKYFKELKEKTKIVIESVSSWYWLYDLLMENGFEVVISNPLKTKAIASAKIKNDKLDSHMLAQLLRSGLISTVHVSSLETRKLKELLRHRNRLVRDATRVKNRIHVLLRKNNFQVPFSDLFSAQGLKYLLGVALPDYQRAQVDTYLTLYGHLVQSIEPLTESIHALAKRDPTARLLMTIPGIGPIVAMFIIAEVEDISRFPSYRNLASYAGLVPSLDSSAGKDKRGRITKQGSVYLRTALIEAAQVIPRMKNCRLNLFFRKRIVRSGYQKAIVATAHKILQYAFYVLKNKTSYQEEYPICA

SEQ ID NO: 117187 - protein, 297 aa, unidentified
MAITHVALDDSKRVIMVGILRPDATQPDLREVPNEPRHVRRLFERLLQDGPVRACYEAGVSGYDLYRQLTALGVSCVVIAPALTPRKPGERVKTDRRDAAKLVRLFRAGELTAIHVPTEVEEGVRDLTRCRDDVRADVVRWRHRVLKLLARHGRVYQAGKNWSQAHWDWIRAQRFADRVLTRTLEASLEALDQTLRRRADLDRAIESIAAEPAYRGAVGALRCFRGINTLSAMILVAEIVNFQRFRRPRALMGYLGLVPSEYSSGDRHRRGHSRRPATATRGGCSSRPLGTIAIVRP

SEQ ID NO: 117188 - protein, 347 aa, unidentified
MRFYNQQHDYYCGIDLHARILYVCILDSAGNKLLHKKIDANPDALLDVIAPYQDQIVVGVECMHCWYWVSDLCLDYAFDFVLGHALYMKAIHGGKTKNDRIDSYKIASLLRGGNFPLAYVYPKAMRATRDLLRRRTKIMRHGADLKAHVFNTFSQYNHPSPNLQLRYPYAREEVRNRFDKPAINRNIDLDLNVIAFYTKELASVEHFIEQNAKQHNPQDYQLLQTVPGIGRILALTILYEIGNIQRFPTVQQFASYSRLIKCKAESAGKQYGTCGNKIGNAHLKWAFSEAAVLYLRGNEKAKKYLTRLQKRMSKAKALSALAHKLGRCVYFMLRNKTVFDEQKFLPE

SEQ ID NO: 117189 - protein, 385 aa, unidentified
MATPAASATAICDDDNVILTSLELSQSNWVITLRLPGSETLSRHSRKAGDTAALTALLDRQRDKAERLNGTRPRIVTIHEAGLDGFWLHRWLQDQGIESHVVDAASIAAPRRKRNAKSDSIDGETLLRTLAAWRRQEPRVCSMVVPPTPEQEDDRRIGRERGQLLSERIALTNRIKGLLCGQGITGYQPCKRDRRERLAELRTGDGRALSPRLTAEIGRMLDRLEVVLRQIKQIEAERDKLLAETAAADPKAALALLLTLCGVGPEIAAGLALECFCRRFTNRRQLAAFVGLAPTPWRSGSIQREQGIGKAGRPALRKLMIEAAWQWLRYQPDSALSEWFRAKVGGAKGRVKRVAAVALARKLLVALWRFVTAGVLPEGAKLKAA

SEQ ID NO: 117190 - protein, 413 aa, unidentified
MLKIVYPICCGMDIHKSFLVACIATTNSQGVTSYTSKRFSTFTGDLRRCAEWLSAHNCKDVCMESTGKYWIPIYNILEQTCNIVLAHPKYVKAIRGKKTDKKDAQWIADIFKHDLVSGSFIPPADIRQLRDMVRYRYKLTNFIVGEKNRAQNCLTVSNIKLDDVFSDVFGKAASAITTHLLENPTEKITDVSGFRTRGMKSTDEEILAAVDGELCVEQAEKLRIIRSHMDSLELCKANLESLILSLAENYLPQLELVMSVPGIQSYAAIGIISEIGVDMSVFPSSKHLCSWAGLTPQNNESAGKKKTTRIGKAGAYIKPLLVQCALCAIRKKSNPEIRKRYENLKKRRGHKKAIIAIARMLLTAIYNILKKNEPYNPELYAQINTPPRQRTVSVEEAIFILQRQGYLVAPSVT

SEQ ID NO: 117191 - protein, 407 aa, unidentified
MEENRKRYIGLDVHKHYLIALGVDADLNVALSARRVELSRLESWMKKNLTKQDEVVLEMTTNTWQLYDELIQYAGKVTVVHPPHVALITRSQVMNDKIAASILARLLAKGLLVGIWIPPQEIWEARGLVAQRQKMVRLATQAKNRLHALIQRHHLVPPAGNPFGASNKAWWQSLPLGKLEKVNLQSDLETLQFAEKQVRGMTEIMEGMAAKQEEIGRLLHLTGFGVVTAFTVWAAIGDIRRFAEPKNLVGYAGLGTRVHDSGMTSRSGKITKAGRRDLRTVLIEAANVAANSHPHWKAELARLEPRLGRNKAIVAIARKLLIAVWYVLQGKTDKYAEPEAVAQKMLKFAYAVGKANRPKGQTAAQFARIRLDALGLGSELTSIPWGSKKPIPLPPSKIKGRSDVPNK

SEQ ID NO: 117192 - protein, 380 aa, unidentified
MEIVYERVAGIDVHKKQITVTVRTPGQRPGKRRQQVRRYATFYAALREMTAWLVSEGVTHVAMESTGVYWMPVFHALAEPGSLEIVLCNAQHVKNVPGRKTDVKDSQWLAQLMEVGLLRGSFIPPAQIAAIRQLCRYRRTLRTREGQRPRKMLEDGGIKLDSVASDVLGVSSRSMIRALIDGERDPAVLADLAQRTLRRKIPDLTLALAGRFGAHHGVLCELHLDHIDHLDAMIGRLDARIAQATAPFADACQRLMSIPGVGEHAARAIIGEIGTDMSRFPTAAHLASWAGLCPGNHESAGKQLRRLKRRMGKKSGPKAAVAVAHTILTIAWHLLAHGGTYTDLGADYYTRREEDPETLAAKLKRKIESLGYTVELSPVA

SEQ ID NO: 117193 - protein, 362 aa, unidentified
MTKSTTIIGFDLHAATTVAAVLLPGQRTPALHSLSSDIPTVVRFVERVRRQGRVVCCYEAGPCGFELQRALANREMQCDVIAPALIPRRPGDRIKTDRRDASQLAILYRAGALTIIGIPTEQEEAARDLLRCREDIRADLLRARHRLSKFLLRHGRRFTETKNAWTKRHRAWLQAQHWPLAALEQTHRAYIRAVDEAVARLQSVDTELRDLLTIEPLRARVERLRCFRGIDDLTALTIAAELGDPRRFPTAPRLMAFTGLVPSEHSSGAKQARGTITKTGNAHLRRVLVEAAWHYRHHPFVGRALRLRQRGAPAPVIQQAWHAQHRLNRRYRCLAARGKPRPHIVTAVARELTGFVWAALTQ

SEQ ID NO: 117194 - protein, 392 aa, unidentified
MYIVGIDIGKNHHEASIVSPEGKQIGRSLRFATTHKGADSLMSFIFKNIGNSPCVFGMEATGHYWYPIYSFLKAKGYTICVINPIQSDSLRKMYIRQTKNDSIDSFLIAEVIRFGQFGTTSMADENILAMRQLCRYRDSVISSRTEIKLRIGTIMEQIFPEYEKQFSSLWVSTSMGILEKYLTPENIENAPIDELFEIIKDKSHNRLTKAKAISIKEAAADTFGIKIAQDAFSFQLKQLIDRMNFLDKQIEALDIEIMKYYEQFDCYLHTIPGIGMIATATILAEIGDIHRFKSSSALVAFAGIDPTVRQSGEFNSTHNHMSKRGSPYLRHAIFLAATTCSFHNSPLNAYYKKKRDQGKHHLTATRAVARKLTTVIYAVLRDSKPYEPKKFC

SEQ ID NO: 117195 - protein, 359 aa, unidentified
MDGSRSEPKMTAGLDIGDKYSYLCLIDTESGEVVEEGRLRTNPKAFRRRFASEQPMRIAIEAGTHSPWVSRLLEECGHEVLVANARKLRLIYANKRKTDEMDAENLARLARVDPKLLYPLKHRGQECQAHMAIVRSREALVGTRTQLVNHVRGTVKSFGGRLPKCPARSFHKRASEHIPEALLAALGPILEQIGSLTERIRQYDRQLEAISKEHYPETDLLRRVEGIGPLTALTFVLTLEDPHRFEKSRSVGAYLGLVPATDRSGDSDPQKRISKEGDQMLRKLLVSSAHYILGPFGSDSDLRRHGEKIASRGGKNSKKRAAVAVARKLSVLLHRLWVTGEIYDPLYNTRRRAQQGEAA

SEQ ID NO: 117196 - protein, 448 aa, unidentified
MASLSTATLDTPRPSTGVRDMPDPGPNNEEPAKGLDTAESTTDSDGRQGMSYVGWDWATQTHDVTVLDDEGRARDRWAFEHTESGWTSTLQRLRRHGEPCELPVIIERTSGLVVDRLLGAGHPVVPVHPASFYAARPRWGAAGAKSDPGDSYKLADYLRTDGHRLRRLEPTEPGLRELQALVRLRDDQVRARTAATNQLAATLDAHWPGPRDLFRSLASPIALAFLADYPTPQAAAHLGEARMGAFCRRHAYRGGKSPAELLARLRAAPVAPIGLPAVTLAAIITAQIDVLRALQAVIINIERVIADRVAAHPRARLLEHLPGVGTINLAQLLAEVGPILDRVGSAEQAATECGAAPVTKASGKTTGVYFRSAANTRARKAITAFAHNARMKSPWAAALYADARARGKRNPHATRIVARAWIRVIWACWHSGLPYDPLAHHARQQITA

SEQ ID NO: 117197 - protein, 359 aa, unidentified
MPVTASLQLTRSGHIVIGVDTHKHVHVAAALDSVGGVLAAMTIATDSGGFKQLLEWAATFGQIIAFGIEGTGSYVAGLTSFIRRAGYRVVEAGRPDRRMRRLVGKSDTLDAENAARAVLAGFATAEPKTADGTVEMIRQLKIAHDTAVKDRSAAMITMKAMLIHAPEQLRHDMAKKTPIMLARHLAALRPTTLQTPDDSIRHTLKSLARRWQHLNAEATELEAMIKDLVTRTAPQLIEPFGIGIDTAAEILIVVGDNPERIHSEAALAKLAGISPIPASSGMTSGRQRINHGGHRQLNAAIYRTVIVRMRFHQPTIDYVTRRTAEGLSKRDIIRCLKRYVIRAVYHLIVPAKNVAQITS

SEQ ID NO: 117198 - protein, 321 aa, unidentified
MSSKKAKPFIGIDVSKNTLEVAAHEQEKYFRCTNQTSAFPELIAELITLRPALIVLEATGGWEIPVTQALHQAGLPVVVVNPRQVRNFAKAVGQLAKTDRLDARVLAHFAAAVKPPVRPIKSEQAQQLDALLDRRRQLVEMLAAEKNRRRAAAISPTVREEIEEHIDWLEDRIEALDQQLKRQIKQSAIWERKHQILLSVPGIGSLVALACIAELPELGQLNRQQISKLVGVAPLNCDSGDRRGTRHIYGGRAHIRNLMYMAALSGIRHNPVLRDFYHRLRANHKPFKVALVACMRRLLSIINVMVRDNTFWVHEAAEASS

SEQ ID NO: 117199 - protein, 409 aa, unidentified
MSNDVSAEVFVGLDWAVHTHAVCVIDAAGSVLDRFEVAHDRDGLAALMRRLARHGRRVRIAIERPSGLIVDALVEAGHEVFPIHPNAVKASRPRYRCHGAKSDASDAYLLADLLRTDGHRWRALAPQSDAIRALRALVRSRDDLVAARVAAANQLTSTLQAFWPGAGVIFADVASPIALAFLRRYPSPSSARRLTEAQLQRFCKAQHYSGRRSPAELLGRLHAAAIGHVGATTEKALADVVRAQVRVLVPILAQIAALTRRIEQFMHALPDGLLMMSFPRAGQVCAAQILAELGDVRERFTSADQLAAEAGTVAVTYQSGKTRSVAFRWACNHRLRQAITCLADNSRHANDWAKGVYQAARARGCDHTHAIRILARAWLRVIWRAWTDRKPYDPSLHRNAVAVVSAQGG

SEQ ID NO: 117200 - protein, 430 aa, unidentified
MKSNTQNAKIEAITEKTLVLGIDVGSEMHYARAFDYRGIEYSKKPFKFSNTEAGFVTFKEWILDLKGRHEKDKVVPGMEPTGHYWFNLGKFLQDNEMKPVLVNPHHVKKSKELDDNNPTKNDRKDPKVIAGLVREGRYMIPYLPDGVYADLRTASNIRFQLQAELTRIQNRISRWFNIYFPEYKTVYGKPDAKSGMLILKAAPLPEDILTLGIDGVNQIWRDAKLRAVGKARAKTLIEAAEHSVGSKEGAVSARMEIRMLLEDYESRNTRLQEVMVLIEELVRKIPMAEKLLEIKGVGIRTVSGFLAEVGDISRFNNPKELQKLAGLALVENSSGKHKGETTISRRGRKRLRYLLFEVAMSLVAKNPEFRELHNYYTTRRLNPLKKMQSLMAIAAKLIRVFYAMLTKGVDYDPKKMVSDIKRPAVYLQAA

SEQ ID NO: 117201 - protein, 363 aa, unidentified
MKKISTVQVLGNEILKPTIGVDLGDRWSFYCVLDEAGKIILEQKGATTPEAMKQTFAKIPRSLIALETGTHSPWASRLLTELGHEVLVAHAQKVELITKSNRKDDRHDARTLARLARIDPELLGPVRHRSAQAQIHLTVIRARAELVSARTALVNAARGLVKSYGQRLPKCGTQQVNRELAVGLNTELREVLEPLLKEIESLNERIPEYDERMEKIAQEVYPEVFLLQQVKGVGTQIALTYILTIEDPYRFEKSREVGCFLGLKPGRRNSENSEPQKKISKEGDRYLRTMMVQGAHYILAPFGEDSDLRRWGLKLAERGGKNAKKRAVVAVARKLAVLLHRLWVSGEVYEPLRNSQKAMRAVA

SEQ ID NO: 117202 - protein, 465 aa, unidentified
MKTKTYKSKKRQQKISLEQGWAAVNPHAAGIDIGAREHFACVPPDSTAQNVRSFGTFTADLEALADWFHQCGVSTVAMEATGVYWIPVFQILEARGLEVILVNARQTKHVAGRKSDVQDCQWIQRLHTYGLLQASFRPADRYCVVRTYLRYRDELVSARSTQCQHMQKALQQMNLQLMQVLSDVTGLSGLNIIGAILQGERDSVKLSQLVDRRVRATPRALQKALRGDYRPEHLFVLQQAFALYHTYEEKIQLCEQQIVQAMAELPDQVDVRRQPVPARKTGGKPGLDQMAGLNMRACLYQKTGVDLTAIEGIGVLTALVMFTEVGPDVSRFPTEKHFCSWLGLCPDNRISGGQVLSSRTRRVVNRLADALRMAATTLERSPSALGGYYRRMKGRLGAAEAVTATAHKLARIIYRLIKHGEAYVARGLADYEKQFQHRRLRALQKTAKAMGLELVASHSIPQGVS

SEQ ID NO: 117203 - protein, 406 aa, unidentified
MTVYIGIDWSECKHDVVCLNDAGAIVARQTLAHNPSGLAQLEGLCQQLGVEPSVCLVGLETAHNLLVDYLWARGFSQVYVIPPGVVSASRGRYGASLAHDDARDARLLADLLRTDRARLQPWQPDSPLTRQIRAKVGLVEHLTASKLRVENRLRAVLLRYYPAALDLFGGLSSLTTLAFIAEFNTPQALDELTYADFVAFAAQHRYHNRQGLLGSYARLQQPQLLADPAIVLAYQDEAALLAGQLLQLCRAKQGCLTALQSLFAQHPDQAIFASLPGTGAFLAPALLAKFGDDRQRFPSPASLQAVAGTSPVTRASGKSKQVVFRRACDREFRQIVQQWARCSLRHSVWANAYWQQVRPHTHSTHDAYRRLAHRWLAIAWKLWQSGDTYSESYHLQQRRLRSLPRA

SEQ ID NO: 117204 - protein, 362 aa, unidentified
MKQFIGCDVHKRYSVFVSMDEAGKASRAVRVTHGNGELETYLSGLPAGTPVAVETTGHWYWLLDAIEKAGLEPHLAHALAAKRMMVGPNKTDQLDAKGLATLLLNGTLPEVWVPGGSVRDLRGLLRSRLALRRMGTALKNRISSALARYGLPQQFKGDLFGSGPVATKCREECIAALPAYSRFATEREWELLQTVEEGVGALTEEMAGSIGKLGWVRRLRTLPGVGEILGPTIYLEIGQVERFPTPAHLAAYAGLVPRVISSGGHTRLGRTRRECNRFLKWAFVEAAEVIVAHQESMAAHHVVRLYRRVKNNKPDRHNKAVVAVARHLAESAWHILQRNQDYREPQPTPGMIQRFHTVGRPL

SEQ ID NO: 117205 - protein, 437 aa, unidentified
MRRKKKNANKSVNLQVLPLVHPNAAGIDVGAKEHVAAVPGDRDPKPVRTFQAFTPDLHQLAAWLKGRGIQTVALESTGIYWISLYEVLEQYGFEIRVVNARHVKHVPGRTKTDVLDCQWIQKLHSFGLLNGSFRPNQQIRKLRTYMRLRDNLVVASTQAVHHMQKALFEMNVQLTNVISDITGETGLQIVQAIIGGERDPKQLAALCSSRIKASRETVAKSLHGSWDEALLFALKAALETYRFNQTKIQECDCCVQQHLAQFESRAQSTNAPRDLKTQLQRVCGVDLTKIPGIKEQSAQIIISEVGLDMTKWKTEKQFCSFLGLCPDNSISGGKVLHRTTRKVYNRAADTLRLCAQSLTYSKSALGAKYRRLKARLGAPKAIVAMAHHLARLVYRMLRYGQNYVEQGIHQYELKFQLQRIKWLKKEAKSLNLQLVPA

SEQ ID NO: 117206 - protein, 350 aa, unidentified
MDIVGGLDVHRKQITFDYVQIETGESHRGEIRPADREHLRSWLERFAERFRDREAAFAVEATTGWRYVVEELERAGIEAHLAEPADTRALQGRKKRAKTDRIDARHLRELLLIERLPESWVPPEHIQQIRTLMRMRHSMVEERSAYLQRIHAQLFHNGCPRQEKELISAEGRERLGSLDLPVAARKVVEVCLKMIEHINEELAPIEEELRAYSRAQAGCRALMKHYGVGELTSVALLSELGDARRFSSSRKAVRFAGLDVTVHSSDEKRAAGKLSRQGSPVLRWAAYEVAKGAYRKSSPDHEYYLQSRERVGTNRAALSIARKLLRRAHHTLRELGEEAMSEPVVGSGAL

SEQ ID NO: 117207 - protein, 342 aa, unidentified
MKYYAGLDVSMKETFICIMREDGETMYESQVYTDPKFIHAELTKSGYALEKVGLESGSLSHYLTKGLRALGRKAISIDSRKMAAILSVMVNKTDKNDARGIADAMRCNHYKETQVRSDEDEALSILLNSRATLVNNRVSLKNTIRGYLKSYGIRLGTVSHGKFSATIRSYYPKMLPKSAKGIESLLKNYEMLCQEISELEGALKEVCKEDRVAQRLMTAPGVGMIVALSYKADIGDPSRFKKSESVGAYYGMAPRQYSSGETTRQGSISKCGARSVRTLLNEAAVTLLTRCKSWSPLKAWGLKLMKKNGLKKAAMAVGRKLAVILHRMMITGESFRYKKAEV

SEQ ID NO: 117208 - protein, 331 aa, unidentified
MKENEMIAGIDVSKATLDICLLMDGKHESHQIKNNAKSIKQFFVKLLKKTSEVRLSVCMENTGYYNWPTYEALDGMQLDIYVINPLHLKKSIGLVRGKNDVIDAVRIAKFLFMHKSNLKPTVIPRRIIRALQALVAHRARLVETKKRFVVPANELLLVADKELPKRIKKSSQIMIKEIEKQIEQIEKEIADLIKSDEVLKQKYDRIVSVQAVGKVLAWAMLVNSNEFKSITKAKKMACYAGVVPFGYQSGTSINKRPRVSSMADKNLKKILHLSAMRAIQLRGELQDYYQRKTQEGKNKMLVLNAVRNKIVARICAVVNNERFYENRLVLS

SEQ ID NO: 117209 - protein, 351 aa, unidentified
MVMIGIDAHKRTHTLVAVDELGRKLGEKTVAATTDGHLDAIAWAMRWPERRFAIEDCRHVTRRLEIDLLRAGEAALRVPPHLTADGRQGSRERGKSDPIDALAVARAALREPNLPIAQLEGETRELRLLVDHREDLVHERTRLQSRLRWHLHELFPGLAMRPRSLHRERVLAGLEERLVVTPGVVAGIALELVRRCRELTRRANALEREIATLVGRLAPSLLAMPGCGALSAAKIVGETAGAIRFRSKAAFARWNGTAPIPVWSGNTTHHRLSRGGNRQVNAALHRVAVTQLRGVGEQGRRYVENRMAAGDSKTEALRLLRRRLSDQVFRRLHADERSRPMPAVVSTPRAA

SEQ ID NO: 117210 - protein, 338 aa, unidentified
MTIVMGLDQHRAQITAEWLDPSTGEIGRARVAPAHRAGVRRFAERFRGQELEVALEATTGWRFVVEELRRVGATVHLAEPAETAARRGNKKRAKNDRADARHLRELLMAGRLPESWIPPDHILDLRARVRLRHSLVDQRGEWQQRIQAVLYHHGCPQRRDLMTGEGRQWLAAQPLPVTAREQVTVALSVIDALDCQLAPLTKELRRYARRQPGCRALMGHFGVGEVTAVTILAELGDARRFSSSREAVRYAGMDITVHQSDQRRSPGHLSRQGPPALRWALVEAAQSAARAGSPDRDYYRQAAERLGANRACLSVVRKLLKRSYHTLRELGEEALQPA

SEQ ID NO: 117211 - protein, 288 aa, unidentified
MLDRTTYVGLDVHKESIVVATAAGGLRREVREYGRIANTATALDRLLRKLGGDGITLRFCYEAGPCGYGIHRRLSGQGHECMVVAPSLIPKRAGDRIKTDRRDATGLAKLHRAGELTAVWVPDAAHEAMRDLVRARLDAVHALRRARQQLSGFLLRQGCHYGRPAWTKLHRRWLAGLKFDQAVHHLVLEDYIQAVEAAATRRDRLTTQIEAMLPNWTLAPVVAALQTMRGMALVNAATLIAELGDLTRFTDPRQLMAYLGLVPSEHSSGASVKRGGITRLAIARPAGC

SEQ ID NO: 117212 - protein, 342 aa, unidentified
MDITVLGIDLGKTVCSLAGLDASGAVIFRKRIQRFRLLDFLAELPACIVAMEACGGAHHIGRFCLQHGHEPRLMSPLYVRPYVKVHKNDDRDAEAIAEAATRPTMSFVAIKSEEQLDLQALHRARERLVSDRTRLINQGRGFLMERGIRVGTGRHVFQKELTRLAAGGTVVLSHRIVLMLSDMATELADINRRVAAIDAEIKELAKTNADMRRLMEIPSVGPTIASALVAAVGTGSSFGKGRDLAAWLGLVPRQITTAGKAKLIGISKHGNRYLRKLFIHGARTVLHLVRDRTSPITRWADGLKERAHVNVATVAMANKLARIAWAVLTKGERYRAAALVGS

SEQ ID NO: 117213 - protein, 383 aa, unidentified
MTQALGTVIDYERTLILAIELSNTSWVLAAQIPGLPGVKAKRSIDPTPEALMAAIENYRARAEKAGRNVDRVIAVYEAGWSGFWLVRWLAKHGVEEAHVIQPSSVPVDRRARRAKSDGIDAELLLRTLLAWLRGEPRVCSMVPIPAEADEDARRRVRERTELVSERVGLVNRIGAVLATLGAGEYNPLRRDRRQRLDELQTALGDSLPTNAHAKIARMLDRLELLLIQITELEQSRDAVLEDESPDRASSMIQQLAKLRGIGVQSATVLVREGFVREFANGKALGSYAGLTATPYSSGGIEREQGIGKAGNARLRTVMVELAWLWQRYQPGSAQVRWFRERSGTGRRVRKVMVVALARKLLIALWRFATQGVVPEGAVMKPAS

SEQ ID NO: 117214 - protein, 320 aa, unidentified
MNSTETFVGIDVSKAELDVYVRPDGAYWTVHNDAEGHTQLISQLQSVAPTLIVLEATGGLERQAAYALTEAGLPVVVVNPKRPRDFARSLGLLAKTDRLDAQALAHFADSVRPELRDLPDQEAQDLSAKLARRRQLTDMLTAERNRLHTALAAVKVSIEVHIAWLQEQIATLEQELDALIQANAQWRAQVKRLAAVKGVGTITAYTLTADLPELGQLNRKKIAVLVGVAPLNKDSGKRRGKRFIQGGRAAVRTALYMAALSASRFNPTIKAFYVRLTNAGKPKKVALTACMRKLLTILNAMVKNGTDWDPNYARRATNVA

SEQ ID NO: 117215 - protein, 344 aa, unidentified
MHRKRSQVAVVTEDGTVHLNKNVVNGSEPMLRLIGDLPPGTPVAFEAAFGWGWLAELLEDYGFEAHLVHPLRCKAIASARLKNDKVDAAILAQLLRADLLPEAWIAPPAVRQLRALLRHRAGLVRLRTQQQNRIHAVVADFGYDRSGSYLSGPGRGWLAGLELPAVSREIVTDALAVIDGLAPLTNRIDIELRQHAKTDPRVKTLTTLPGVGQFTALVMLAEIGDISRFGSARKLASWAGLTPTVRGSDLTVRHGHISKQGSAWLRWVMNQAAQTAKRSPEFSATYAAIAQRRGKKIATIAISRKLLTRAWHLLATAQAPGPAAPDASTATAAHPRPGGSPSPG

SEQ ID NO: 117216 - protein, 308 aa, unidentified
MSKLTIGVDVSKDRLDVHCLPEGNRRQFANDEKGHAALCAWLKDQEIERIVYEATGAYHHAFERNLWPAGLPLARVNPLHARRFAQASGKLAKTDKADAAMLAEMGMALAPRLLIVPSQVLDNVREVYGAREALIKDRTALRNRLEGARLPLIKKQINQRLKQIEKHIEALDDDIHDRCRQDPHIKHRLDILTSIPGIGPITAWAMLIDMPELGTLNTRTSAALAGLAPVTRQSGTWRGKTMIQGGRARLRRALYMPALVACRHNPMLKEFYTKLIKRGKPAKVAITAVMRKLITIANALIRDNRKWT

SEQ ID NO: 117217 - protein, 387 aa, unidentified
MRGGAKKRGPGPSHLLLTPDHAGNVVGIDPHKQTLTATVVDPRGGIAASEHFKVSGGGHRALEAWARQFGPIARWGVENAAGWGRHTAIFLAGRGYDVRDVCANRTPRQDRSRQRGKSDTLDSERIARETLAHPLLPKAFKRAGADQGPDELHQLLALWHNRRRSILTSRQHLVNEAENLLCELPLELREQLPDSKAVRPRLAALQRRNRRRRYDPPTRLRLELLDGYHTQIKALDREEKQVTVHLDELVRQSGSTLGELCGLSTRSVAELLVEVGDVRRFTEGGFRRFNATAPLPASTAEGPGEPIRHRYNPGGNRRINAVLHRMAVTQLRHEPRAQQVYANARANHHTKKEARRVLKRHLSDVVYRRMIRDLAAASHPAQPLLAA

SEQ ID NO: 117218 - protein, 342 aa, unidentified
MKDMIIGVDLAKRVFQVHGATRDGDVVFRKKLSREQFRAFMARQPASLVVFEACGSANYWTREMGAVGHEVRLIAPQYVRPFIKRQKNDAADAEAIAIAARQPEMRFVAAKTEEQQAKAILFRGRERLVRQRTELVNALRAALYEYGHVFPVGIWQLKRMEAAVRDPDCALPALVVAECQDLLAQISEKTERIDAKTKSLKALAAETDTTRRLQTMPGVGPLTALAVDAFSPDMAQFKCGRDFAAWLGLVPRQHSSGGKERLGRISKAGQADIRRLLIIGAMTRIMGRARDRIAANSWTGRMLARKPKMLVGIALANRMARQIWAMMTKGEDYRDPTLAGPA

SEQ ID NO: 117219 - protein, 423 aa, unidentified
MSYRIAGIDVHKKMLAVVVSDVEVDGEYQFERVRYSSSPEHLRFLADWLMAQQVEEVVMESTAQYWKPVWGALERYWKPICQKREGAGPMSGTLHLAQAQSNRGRRGRKKDFPDAERLVKRLVADELVLSFVPDTEQRLWRAVTRRKYQLTRNHVRLQNQLEGLLEECHIKLSSLVSDLLGASARRMLKALAEGETSPVALAAMADKNLRATQAQLCDALGACTELKPIYRRLLKMFLEELQFIDQQISELDQELASLLSRHHDAVVHLAEIPGLGVDSAQQIIAEVGAGAATFPSAKQLSSWVGACPGEEESAEVSKSHRSPKGNRHMRRILNQAANAAAKSKGTIFEIVYRRLVSRLGHNQTIGAIAHRLCRLIWIILHRGVRYEERGPSVNAKTRRHRTNRMIRELRNLGYRVEPLVNTV

SEQ ID NO: 117220 - protein, 346 aa, unidentified
MHQNTVIGIDLAKTSFAVIELGRGGDVKRRKTFRRDGLKRFLAKHEPTAVALEACGSSHYWGRWLEALGHKAVLLPPQHVKGYLRGQKNDYNDAQAIAEACLHGAIRPVAVKGIEQQDDQAFHAIRRSLKVESTRLVNQMRGLLAEYGLTVPKSVSAFCRRVPELLEDAENGLSTRFRMLLNRQWHRLKALLEEQVWYDEQLRQQAKEDNACRRLTGIPGVGPVVASALKSWMGDGQQFRRGRDASAALGLVPKQHSTGGKQSLYGITKRGDAYLRSLVVHGARAVVRTAKSKQDALSQWALALEARRGHNRAVVAVANKIIRMAWVVVARHEHYRPAENQMAAMA

SEQ ID NO: 117221 - protein, 359 aa, unidentified
MKIVGCDFHPGWQQISIFDAETGEISEHKFLHGDGEAERFYRSVEEPALVGIEACGNSQWFIDLLQRLGHQVWIGDAAQIRASYVRKQKTDRRDAGHILRMLLENRFPRLWVPTAEQRDLRQLLIHRHKLVEIRTRVKNGLQHLALNRGLQKKSSLWSVRGRAYLEELPLAGWSARRREDLLQLLAELDRQVGELDQAVSRAAEQHPQAQLLMSQPGVGPITSLAFVLTIGDVSRFEHSGQVASYVGLIPREHSSGGKQRLGAIFKQGNRFLRQLLVEAAQSVARLDDGFRKEYQARCHHKPKAVAKVAAARKLAVRLYWMLKQNLGYPEIAFIESSPRVPLARTKKADGLVGRSRTQH

SEQ ID NO: 117222 - protein, 440 aa, unidentified
MKPLPVLDPKAAAVDVGSEKLHASVAGDTPKVFGTFTRELESLREWFKGQGVRTVAMEATGVYWLYLYEVLEAGGLEVVMVNGRYVQNVPGRKTDMSDCQWLATLHAHGLLRGGFVPSADIRRLQDYQRLRADHIIGAGSQIQKMQQALERMNVKFHDVISDLTGVSGLKVMRAILEGERDPARLLTLCDQQIVKKKSLAVQESLRGCWREEHLFALRQGLELWETFQQKIAACDRELQKLLQQLAGPPGAEGSSPLKLAAAKDPGKNAPAIERFQELLARICGGRDATQIPGLGVYLVLQLISEVGTDMTRWATEKHFTSWLGLAGGRKQSGKRKGTVKAHRNRAGRMFCAAARALAQSVDKALGGFYRRLRGKVGGLAANVALARKLAQLFYRLLRYGMECVEKGLKEYEAKVLATETYLLRKLAKKQGFVLIPTLAK

SEQ ID NO: 117223 - protein, 484 aa, unidentified
MHLQITNKLTLALDAFRFNFESAGALELPNEYSGLASEAAPILPSQSSGMQVPLHKLAQWSGMMNQLTGTQYTAYVGIDWAAAKHDICVQAADDRRREFACISSQPEGIEAWAQNLYQRFGGPIAVALELSKGPIVSALQKYEFFVLYPINPSTLAKYREAFTPSGAKDDPTDAELAVDLITRHPERFSPLKPQSVDMRKLIGLVEQRDKFVSDQGRLVNRLGHALKQYYPQVLEWSSEHNTVVFCDFLNQWPMLTQVKRARKASLERFFKSHHVNSSPLIERRITAIKAAMPLTLDAAVIEPHRLQVEILIEQLRITIKALKRFDDEIEATAQKLPDYDLLFSPLPGAAKVLAPRLLAAFGEDRQRYPQADALQKYSGIAPVTKRSGKTTWVHWRWQCPTFVRQTFVDWAAQTINKSAWAGAYYRQQRAKGCSYQMAVRALAFKWIRILHRCWQDRTPYDESKYLEALRRKGSPLLKYLAETA

SEQ ID NO: 117224 - protein, 313 aa, unidentified
MSEKVLVAGIDVSKERLEVWVLGAELGVCVGRDADGLRVLAEWLGEAGVTIVGLEATGGYERAVIDALEAAELFRVRLLNPLRVRRFAEAAGRRAKNDGIDAKLIARFAATFEEDRAPREPELRRIGDHLTLRRHLIDAMIALEGELEHLAEPGLRRMTNDVMRLIERRRDALDKQIAALIAAVPALAEKAARLRSVPGVGPVLAATLVALVPELGRVGRREIASLVGLAPFDNDSGKSRGERHIAGGRKTVRNVLWMAAGVAKRHNPVIRAFAERLAAKKPPRVVRTACMRKLLVILNAMVRDGTDWRQQSG

SEQ ID NO: 117225 - protein, 346 aa, unidentified
MRFYDQQHQFYCGVDLHTKRMYLCILDRDGNKQLHRNVRAKPPDFLRAVEPFREDLIVGAECMFTWYWLADLCLDEKINFVLGHALYMKAIHGGKKKDDKIDSEKIARLMRGGTFPLSYVYPREMRATRDLLRRRTFLMRRRSELLAHVQMVNHQYNLDPFEKMLQYACNRDVLDRFEQDSTRQNVEADLQLIGHYDQLLKQLESNLLRQAKLHDPQACFLLQTIPGVGNLLSLVLLYEIHTIDRFASVGDFLSYARLVTPKHTSDGKVTGHSGAKIGNPHLKWAFSESVLMMMRHCEDAQPFLARKEKKHGKARAMTMLARKIARAVYQMLKRKEAFDAVKFFAN

SEQ ID NO: 117226 - protein, 315 aa, unidentified
MTQTNITTAGIDTSKLKLDIAIHGRAKRWQVANALPGWRALAANLAKAGVTRVGIEATGGYERGVVEHLRAAGLTVLVLQPMQVKAFGRVHLRRAKNDTLDAVLIAACAATLDQPRIAPDPRLTELAGYLTFLEQAEEDIARFKTRLEHIDEPQLRRLVTSDIKRLKARKAAQLRDIGKRLRVHDDLARRLDLVLSIPGIGERTALALIIRMPELGRISREEAAALAGLAPFDDDSGKYKGQRHIAGGRGRLRRSLFAAALPAAFRWNKALIDLYARLIAKGKVHNAALIACARKLLIYANTVVQRGTPWTEKAA

SEQ ID NO: 117227 - protein, 424 aa, unidentified
MKFKMQDKQNQLIERITDTHLVVGVDIAQQFHVARAVNFRGIVVGDPITFPNNEEGFSSLLIWINNLKRLHKLEAAIVGMEPTGHYWINLSKWLMKQDIEVVTVNPHLVKRNKENRDNTQSKSDKKDALVIADMVKNGYYAFVRNTSESFEKLRVLMSNRDVIVKRLVSSINQLNRWVDIVFPELRQVFKDITAKGAIATLRLFPSPMELDSMKPEEIVAGWKSLMKRQPGLKKAYLLLNVARKSVGTRQALDAYKFHLEQLLEEYDLSIQQLERVELAIKDELPKIPFANKLLMIKGISEISLAGILGEAGDLSGFSHGNSLLRHAGLHLAEASSGKWKGQIVISKRGRSRLRRFLYLATMSLVMNNPEFKAIHSNNVKVKKMKKMKSIMKLVGKLARIFVGIARKNESYCARKVQPFTELAA

SEQ ID NO: 117228 - protein, 356 aa, unidentified
MVSPRNNYHKEASMEKMYYIGLDIHKKRIVYCLKNQDGTIVQQGVVAAERKALRQWAEELPTPWIGAMEATMFTGWVYDVLKAHALELKVAHPQMLKAITAAKKKNDRADAERIADLLRVNLLPECYMAPEELRELRRILRYRNHIVRSAVRMKNKVSGLLMEVGVCYAKKQLHGKKYFQKLLERTADIPPSVVELLNLSRANLEMFQAVQKRLVETLRDNELIRERVRRLMTIPGVGEVTALTWALEIGDPERFRSVRQAVSYCGLCSAQRESAGKEQRGPLSKKRNKQLQTVLIEAAKLAPHWNPQLASVHARELEKGNRNRATLAVARKLVAYLLAVDKRQADFVPKVTSQAA

SEQ ID NO: 117229 - protein, 352 aa, unidentified
MSITEVHTQVVVAGVDTHQLTHHAVVLDITGRRLGDRGFEASTAGYAALLDWVASFGLIEAVGVESSGSYGAGLTLALLTAGVEVVEVARPEKATRARQGKSDPLDAESAARQVLSGTASGRPKVKTGIIEAIRAIKVPRDAAVRDRTRAYGQLRDLVTTAPAELREQLLECSGKQRVAVAAGYRPDPTRLAEPLQATKLALRTLARRIQALNAEIDAADAVLADLVAQAVPTLLALPRVGVQSAAQLAITAGQNIDRMRSEAAFAKLTGVAPIPASSGKSTRMRLNRGGDRHANSALYMIAIGRLQRHQPTIAYRTRRQHENLSKRDIIRCLKRYIAREVYTALKHDLLTT

SEQ ID NO: 117230 - protein, 325 aa, unidentified
MGSNEVALSCPSVYLTLMPLWIGIDVAKDTLAVHVLPLDQLLSFPNTAQGHQRLCDHLAGQCVGNALLEATGGYERAVMTALATAGIPVTRINPRRARAFATALGTTAKTDPLDAALLARMAQLVQAPAPVPDPLREQLRMLVQRREQLVQQRDDERRRLHQATLAMVRACLIEQIGDLRRRIQRMNQAIKQVRCQLDDALAHALGTVPGIGEVTTASLMAYLPELGTLDRRQIAALVGLAPYNVDSGQHCGKRRIRGGRATIRRVLYMACWSVVRTQASFKERYQQLRARGKPAKVAITACMRVLLIRLNAMARDRTPWREVIG

SEQ ID NO: 117231 - protein, 320 aa, unidentified
MNTNTLQNINVGVDTGKSQLDIYIRPLDIYFNVTNDEKGIKQAIKTIKKYHPERIVIEATGRLEMPFILACDNAKLPYVIANPLHIKKFSGALGQRAKNDRLDAALIAHYAEAIKPKLTQLKSENIRLMSDLVTRRNQLLTMKTMEKNRSQIMPKTVASSIKSLLTMLKKQIENIETRIEKLIETCPDYQAKNELLQSVPGIGKIAAASIISNVPELGYITNKQAASLIGVAPITRESGSYKGKRMIKGGRMQVRTVLYMAMMSAMQCNPVFKQHYQKLLAAGKPKKVAIIACVRKMVVILNSMLRDGCMWDANSAKINS

SEQ ID NO: 117232 - protein, 310 aa, unidentified
MNNSSLVWVGIDVGSTELVVHHRPATRQLSVPNTAAGVRKLVHALQKLAPEKIVAEATGGYERRLMTACRDAALPLVVVNPRLTRRFAESLGRLEKTDAVDAADLALYAERQQPACRPLPDDATLALHDLVTRRRQLVEMRAGEQNRRRQASPTVRADVIAHLRQLDARIAQLDRQLAVAIAAHPAWAQKAAVLATAKGAGPVLISTLLALVPELGTLSRREIAKLVGVAPFARDSGKRRGRRRCWGGRGEVRVVLYMCMGSAIQHNPTIREFYQRLIAKGKPEKVVRIACLRKFLVRLNAMVRDGQPWQ

SEQ ID NO: 117233 - protein, 460 aa, unidentified
MFEETRKMMELFEKVGSKQVLIMGIDVSKNKFTIAAVNGMYEGKIKAKDILLNKNSLDKLYKEIDLLIEKDGIKQLIFGCEPSGIYYKPIVKELVRKYPDAMFKLINPSSTKANRDQRMEREKTDPIDAYAIVDLLIRGESYDLELEDNTFSIIKEYVRELDHLVKELVRFKNKVHAHTDELYPGLESSTSSFLDSKYGKQFLKLLPKPDILPSLNPEDWEKMLSTQEYKLPKYLAVRLSSRSKSLVISEYKNFDTMKEYIIFLVEGYEQLEKRKNQIEEKLQKLIDSLDFGENLKEIDGIKTLTVARIIAYTGNPYTFKSGKEVASFAGLIPKSDQSGKMDKGKILSKKGHKKLRTTLVQAAQHVITSTGYFTAYYNRLVLENRKDPMVAIVATANKLIRVIMRMIHTGEKFNPPTAKDKELAKSRLNRLTNRELESLNKRKRSDSLTQDINELYPIRV

SEQ ID NO: 117234 - protein, 423 aa, unidentified
MELDRFRKYIGIDWATEAHRICLLDHQGRFVAKTSIPHSGEGLTQLLAWLEQHGAVPDCTAVSIEIPRGAVVETLTERGFSVFHLNPKQLDRFRDRYSSSGAKDDDRDAFVLASALRTDLALFHPVPVESAALIQLRELFRTADELRAELQRHANRLREQLHRYYPQMLALCPAAQQPFLWDLLEAAPLPISAASLDAAHLQALLKARQIRRLTPEQILATLGRPALPLAPGAALAASQHALVLVAQLRVVRQQRDLTLKNLRGALGHLRARRHNDGRPSDVEIVESLPGAGELTTAALLTESAHALAERDPQALRAYSGIAPVTRQSGKRCRVFMRYACNQRLRNALYNQALCSLRNDPVSRRHYDTLRQAGHSHARALRGIADRTLTMLIAMLRQGTLYDARLRKAWRVGDGTVSGEAGDE

SEQ ID NO: 117235 - protein, 457 aa, unidentified
MVEPAILELALQTYGKGYTPFCLGQSEGWIVGDQEGGQPMATKAKEGVFVNGKALVVAVDIGKDLHYGYFRSPTGFEVKPFGFANGRAGFERFWERMVRFKRTEGLIDIVIGFESSGPYGEPLVEFLRRKPVRVVQVNPLHTKRVKELTGNSPNKTDRKDPRVIADVICLGHALNLVIPRGPAAQLRRVTQAREAALRSRSAMMNRLGQLVFVLFPEFGTVMKNLNSKTALSLLKRCASPERMVEMGLESLTTLMKRASRGRLGQRRAEKLFRVAQISVGIKEGIEGLVLEMEHLVSMIEQQNRFIGFAEEQMAVYLGQIDYSWTILSIRGIGRVIAGGLIGEVGDFGQFQTIGQITKLAGLDLYEISSGRHRGQRRISKRGRSLLRKLLFFAAINVIRTGGIMHPQYRGMVNRGMPKVKALVAISRKLLALIFALVRDRSIYRSDYADTIHQKVAA

SEQ ID NO: 117236 - protein, 343 aa, unidentified
MEYYAGIDVSLESSSLCVVDATGRIVREAKVASEPEALIAWLQSLGFDLARIGLEAGPLSQWLYAGLKQAGLAAELLETRHVRNAFKIMPVKTDRKDARGIAQLMRMGWFRSVHCKSLPAQETRSLLGARKLLQSKLHDIELSLRGTLRGFGLKVGKTTAKTFEARIRTLVADHPTLTLIAEALLRARAVLLDEFIKLDKKVHALARQDPRARLLTTAPGVGSMVALTYAAAIDDPARFRSSKTVGALFGLTPKKYQSGETDITGRISKTGDAAVRTALYEAANIILERPVKGGWLKAWALGVAKRAGMRKAKVALARKLAVVMHRMLVDGTPFDMNRVTATA

SEQ ID NO: 117237 - protein, 438 aa, unidentified
MSNKVFLNYDNLFISVGMDVGADFTWMSIALPNQTFVGKPFKILHSSIDSLELAVSKIKEAEELYSLESRIFLESTGIYHYPLFCYLRDKGFNCSVINPIITKNSTNINIRKVHNDRFDSKKAALIGLKPDLKVSLIPSELALDMRNLTREYYDLMDNRSAYVNKLQGELRMVFPQYLKIFSKLTTNTSLTLLENYPSPDAFLEAKKQDIIDSIRSTARFGVKYANEKYNAIIQAASDAKIFGHSVSSNFKRIRIYIRFIRQYDEEISSILKDMHELVDANESTEFVKQIHLIESYRGAGFLSAVSIMSEIGDFSAFKSPKQLFAYFGLDPAVKQSGKFQGTKISMSKRGSSVARRAIHTMALVSISKSRNGSAKNPVLRDYYLKKCESKPKMVAMGAVMHKVCNIVFAILRDGKEFQIITPEEHQKNYLKAKCGFAA

SEQ ID NO: 117238 - protein, 446 aa, unidentified
MALWARADGFRRCLHREKPQPRTPSWLKFLRVSLSPCMLTSVMVNNSLIGKSAVRLAGKAGACEASEASRAGTSRRREFGRVQVFKAVTEREPRRHRGTSPNSRLNRPSVFLSKTKAGASSHLQVREKTMSEPVYVGIDVAKETFHVATCPNILKTQLPNTHQGHRQLSQSLKNHTIALIVLEATGGYERPLTAELLSDSLPVVVVNPRQVRDFARGMGQWAKTDPIDAQVLAKFAQIVKPAPKTHSTPQTAELSELVRRRRQLNDLRTQESNRLLMIHHPKVKKSIQKMLKTLNFQIDEIDRLIREYIDADGNFKNKDRILRSTPGVGPQTSAMLIANLPELGKLNRQEIAALAGLAPWDRSSGKSDGKAHIWGGRKDVRSVLYMAAFTACRFNPVIRALAERLKQKGKAYKVVITACMRKLLIILNTMVRNQTLWTPEKSVKNT

SEQ ID NO: 117239 - protein, 407 aa, unidentified
MELVTIHKSVIGLDVHQAQITACALIEMPDGSTRVEQRQFGGFKRDRRELAEWALALKPDEVVMESTGIYWKSPHAALEAVGILAKVVNARHVKNVPGRKTDIGDAQWLAMLSRAGLLRGSFIPPAVLRELRLIARQRQKLVSQLTGEKNRLHKILADGGVRLSVVVSDLHGQSARILVKAIIRGCSPQEVLDQASKRLRASREELYDAVQGELTDSHRFVLGEIMQHIEEIEARLARFEARLLNGLQPEHNALALLQTVPGIDLVGAAMLLVEIGSDMTSFGSADRLASWIGICPGNHESAGKRKSGRARKGNPYVRRLLCEFAHAACRSNCAFKPKFDALMPRRGYKRSIVAIGHSIIRTIFFMLQRREHYRDRLVDYEAMAVKRNAPRWIKALTKFGYLDSASA

SEQ ID NO: 117240 - protein, 344 aa, unidentified
MNQIIRIGMDTSKHIFQLHGVDATEQVVLRRKLRRNQVLEFFAKLPPTVIGIEACGAAHYWARELRRLGHEVKLMAPQHVKAYVKRNKNDGRDAEGLCEAMSRPTMQFVPVKTEEQQAVLMLAGVRQQLIARRTQLGNAIRGYAAEFGLTAAKGLDKIEPLLAQIAQDETLPEMARELLALQGRDYARLQIELKAIEAKLMAWHRANPDSRRLAQIPGVGPIGATALVMKAPDPRLFPSGRHFAAWIGLTPKDHSTAGKTRLGKITRAGDEMLRSVLVAGATAVIKQAKHGRGSPWLLALLKRKSPKLAAVALANKMARIAWKLMVTGESYDGARMLGASAFAA

SEQ ID NO: 117241 - protein, 310 aa, unidentified
MTKRIIGVDIAKHKADAYDLQHQKHQTIEAENYSQWVDTLAKDKPDLVVMEATGGYERVLAGLLAAAGIPLAVVNPRQVRDYAKATNQLAKTDTIDARVIARFAEAVRIEAKPLVDAATQALRDLMERRRQLVAMRVAESNREAQAAHPRVKRDIASLLQFLDRQLARLDEDLDKDIHNSPAWREAEDLLSSVPGVGKVTARTLLSEMPELGQANRQEIASLAGLAPFNCDSGQYRGQRRIRGGRGQVRRVLYMASVSASRFNPSIRRFYRHLRESGKPAKVALTACMRKLLLLLNSILKNKTPFAAKTI

SEQ ID NO: 117242 - protein, 405 aa, unidentified
MTVLVGVDWGDGSHAVCVINSGGEVLDRFAVNHDRQGLGDLVRRLRKRQGEIRIAIERPSGLLVDTLVDAGFTVVPIHPNVVKACRPRYRAVSAKSDPGDAYILADILRTDGHRLRSLEPQSDAIKALRGLVRGRDDLVATRVAMANQLTAVLQSFWPAAATLFNDLTCRIALAFIERYPSPEAAARLGPKRLAGFLARHPYYGHKKPQALLAHLHTAPPGCAGKAESKAKAELVCALARTLQTLVAQIATIGSRIEHMIAELPDGRIIMSFPRAGRICAAQILAELGDVRQRFQTEQQFAGEAGLAPVTYQSGKSRVVAWRWACNKRLRVAFTCFAGNSRRQSPWAADIYKRARARGCDHPHATRILARAWARVLWRAWTDRQLYDPTKHAGAVAFLSSPQPSG

SEQ ID NO: 117243 - protein, 410 aa, unidentified
MELMHRRCCGLDVHKETVVACLRLVADGKVTTEVRTFQTTTADLLRLSAWLAANECTHVAMEATGVYWKPVWHILDDGEFALLLANAAHVKNVPGRKTDVNDATWLAELLAHGLLRASFVPDTQTQEMRTLLRTRKQLVREQSSHVLRVQKTLEDANIKLDSVLSDVMGKSGRAMIEALIAGETNPTKLASLADRRVKGSQDELREALRGRVTKHHRFLLRLHINQIDALAAAMATIDAQVEESLEPFRTAVELITSIPGIKNLSAHVIVSEIGIDMSRFPSAAHLISWACLCPRNDESAGKRRSNRVRKGAVWLKTTLVQCAWAAVKKKDSYLQAQFFRIRARRGQKKAILAVAASMLTAIYHMLKDGTLYQDLGRNYLDRRSTDQQKKRLVKRLADLGYAVALTPLAA

SEQ ID NO: 117244 - protein, 340 aa, unidentified
MTIVVGLDQHRAQITAEWVDTATGEIGRSRVRPADRAGLRRFLGRFRGQQLEVALEATTGWRFVVQELRTIGADVHLAEPAETAARRGRKKRPKTDRADARHLRELLLVDRLPESWIPPDHILDLRARVRLRHTLVDQRGEWQQRIHAVLYHHGCPHHHGIGLLTAKGRAWLDGLGLPSTALEQVTVALGMIDVLDVQLAPIDKQLRAYARRQPGCRALMAHYGIGHLTAVTILAELGDARRFSSSREAVRYAGLDITVKQSDKRRAPGHLSRQGPPALRWALYEAAQSARRHSSPDRDYYLQAAERLGGNRACLAVARKLLKRSYHTLRELGDQALQPA

SEQ ID NO: 117245 - protein, 369 aa, unidentified
MSENITAFVGLDVHKDSIAIAVAVPGRAAPRFLGTTGPVLAEVEKALSHCGAPPQLVIVYEAGPCGYGLARQLCARGYRCEVIAPTMIPRKPGDRIKTDRRDALALAHFARAGDLTPVVVPQEPDEAIRDLSRAREDAVRARLKARQQLKAMLLRHGQRYTGKSSWTAAHERWLAMVRFAHPAQNIAFVEYRTAVTEAHERVERVTAALRDQVAEWRLQPVVAALMTLRGIELVAAVMLIAELGDLTRFAHPKQLMAFLGLVPSECSTGESRSLGSITKAGNSHARRVLIEAAWAYRFPAKIAREMQVRNESQPRAVREISWRAQLRLCQRYRRLSARGLHQNKICTAIARELAGFIWDLARQVIPVQH

SEQ ID NO: 117246 - protein, 337 aa, unidentified
MDYFAGLDISMDETRICVVDREGAVVYEGKSASTAEAIADELAKAPSCRRIVFETGRMAPILFHSLSQLGLPVVCVESRQAYQALKSLATHKTDRNDARGLAHLARTGFFKPVHVKSLSAHAVRSLIIARKKLVGQRVTLENQIRGLAVVFGVRLPRALTTAFIDQALKASEGVAGLSAAMRGLIAARTAVMTAVAAIDADIRRMTGASEACRRLMTIPGVGRLTALAFVAAIDDPSRIRRSRDVGAYLGLVPKRYQSGEVDYVGGISKRGDRRVRTLLYEAANVMLTRTKGQLKLKDWAFAIARRSSMRKARVALARRLAIIMHAMLRDGTEFVAA

SEQ ID NO: 117247 - protein, 412 aa, unidentified
MLFIGDDWAEGHHDVVAQDDAGKALARRRLPEGADGIARFHEMVASCLGEDAEPDPARVVVVIETDRGPWVKALAAAGYRVYPANPEQAARHKETIAVPGKKDDFFDAGALADMGRTRRHQMRELAADSDIAEAVKIAARAHQKLVWERTRHLLRMRSALREYFPAALEAYAGLSLTGPDTLELLRKAPDPASAARLTVTQVTAALRRAGRRGALDERARNIQAALRAPHLSQPAVIAEAHAASVQAGAAVIAALNEQCKVMEAKVSEFFRRHPDAGVYLSQPGIGDITGARILGEFGDAPGRYASAKARKNYAGTSPLTIQSGKKKTVHARYIRNRHLIDALRAQALSALIASPGARAYYDELRAHDTGHDDALRRVAGRLAGILHGCVKTSREYDETTAWSHRPEFPQAA

SEQ ID NO: 117248 - protein, 352 aa, unidentified
MGIVVALDVHRNQITYKVLDRETGELRRGRIAPAARAEVRAWLGQFVGCEAEFALEGTTGWRFVIEEIERAGHRAHLADPAETAARRGRKRRAKTDNADCDLQLRLLLAGELPESWIPPAHILELRTRERLRKTLIDQRTAWQQRIHAQLFHQGVPAGLRLRTQAGREALFRAELSPAGRELVGLGLRMLDTFDLELAPLDRQLRAFARRQPGCRALMQRLYVVGPVSATAILAELGDTRRFSSSDDAVRHAGLDITVYQSDEKRAPGHLSHEGPAVLRWALFEAAQSAARPSSPDRSYYLQVAERIDHNRACLSVARKLCRRAYHLLRELGEEALAPIERPADEEAIAAAA

SEQ ID NO: 117249 - protein, 342 aa, unidentified
MENIGLDLHKRESQLCGISEEGRIWERSLLTSRERFAEVLGGRRPARILVESSTESEWVARHLEGLGHEVIVADPSFAPMYASRSRRVKTNRRDARTLAEACRLGAYRRAHRVSDARRQLRAELTVRQALVRTRTRYVSVLRTLIRQEGLRLPSGAVEHVLPRLAALALPPHLAAELAPLVPLLEALNGSIAAADERLAGYAATDLTIARLTTAPGIGPVTATAFVAVLDDITRFERAHHLEAFLGLTPSEASSADKRQRGRISKAGHPGLRALLVEAAWRLLRSKQTEAQALRHWAEQIATRRGRSIAAVALARRLAGILYAMWRDGTRYRGHGASQPAAA

SEQ ID NO: 117250 - protein, 429 aa, unidentified
MQPGDIDVWLGLDVGKSSHHACALDHDGNTILDTPVDQDEKQLRRTITELQRRGTVLVIVDQPNTIGSLPLTVARDMGARTAYLPGGAMRKAAQLLPGGSKTDRRDARVIASTALRMPETLRDCEPDDETMAALRLLSGWDEDTAHELTRTVNRLRGLLLHLHPALERALAGDRIKSDTALGLLEHYRGPDGLRRAGAARIREYARRHGLKGTAITDAVADAIAEQTVTVPGTRAAESLIPQLASDIRRLRDRRTDISRQVEELLADAPLLTVLTSMPGIAARTASQILLAIGGDISRFKDAAHLAAYAGIAPVTRQSGTSIHGERPARGGNKRLKNALFQTAFVAIRLDPESRAYYDRKRAEGKRHNAAVMCLARRRCNVIYSMLRNGTLYQPGGTHTTTTTPPRTETTPAHAPRPRQDTTHPRIKRT

SEQ ID NO: 117251 - protein, 418 aa, unidentified
MTRKDDSKVIRIVHPICCGLDVHKESVSACVIFPDDTGEEQYEIKVFGTFTDDMTRLREWLLEHDCPVVAMESTGIYWRPVHNVLEDSVQVVLVNARDMRNVSGRKTDIGDSRWIAGLLRHGLLKSSFIPPQTVRQWRDLTRLRKKYVQSAGDYRKRTHKLFESANIKIDSVVSDLFGVTGRNLMQLLIADRKLTLADIQTCVRGKLKGKEAELFRSIQGFFTGHHRFVLKTILETVTTLETQIETLDHEIRRAMKGHELLLDRMKGAPGISDISSCDILAEIGPTLDSFPTDTALVSWSGLCPGNNESAGKRKSGKSPVRKHHLKTIMLEVAWAAIKKKGSYFKDKYYRLKARRGAKKAIVAIAHRILLGIYHVIKDGVEFRDLGEDYLTCRNKSQKVFHLRKQALALGFDLVPQTV

SEQ ID NO: 117252 - protein, 345 aa, unidentified
MKKGITIGMDLGDKKHQVCILDKTGKIIAEEEVTGTRAAVTQFFKQYREAVVAMETGTHSRWVSQIAEAEGLNVLVGNARKLRMIWQSRQKSDTRDAVMLARIARMDPALLYPIRHRGEQVQMDLEIIRARDLLVRERTRMVTHVRSVVKSMGKRLSPSSAASFGHKAKMPEALNEAMKPMLEMIRELTKKIRGYDLMIKEAATEKYPATERLSQVGGVGPLTALAYVLTLEEPQRFAKSRMVGAYLGLVPRLDQSGQTDKQLRITKHGDGYLRRLLVGSAHYILGPFGPDCDLRTFGLKLMQRGGKNAKKRAVVAVARKLAVLLHALWRSGQQYEPKRKQPLAA

SEQ ID NO: 117253 - protein, 410 aa, unidentified
MLFVGDDWAEAHHDIEIEDESGRVLARRRVPEGLAGITTLHELVAEHLDPTGELDQVLIGIETDRGPWVQALLAAGYVVFAINPLQVARYRERHSPSGAKSDPGDAHLLAEIIRLDRAHHRRIAGDTQIAEHVKIAARAHQTMIWSRVRQVNTLRSLLREYYPAALAAFGTDLAGRDALAVLTAAPSPDLGRRLSQARIETLLRRAGRQRNVSATGAKIRAALRSEQLAARPGVIGAYTASASALLAVLTAVAAQTEVLAGQVEQGFGQHPDAEIYRSQPGLGDILGARVLAEFGDDPGRYADAKARKNYSGMSPITKASGTKRVVLARYARNRRLGDALFLQAYSALRTSPGARALYDHQRARGATHYQALRTLANRLVGILHGCLRSHTLYDEHLAWHSEPDKLSPAA

SEQ ID NO: 117254 - protein, 414 aa, unidentified
MALRSWTGRAIGLDVHRDFCVVAICEDGEIRSGARVPSTPEGLEMLAQSLVKSDRVALEVTGSCWEVARILEPHVDRVVVVSPDDTGIAQARAKTDRLDARTLARLLWSGELESVWMPDERCRVLRRRLARREQLVHARSRAKNEIHAVLQRRLQGKPPCSDLFGVKGRRWLAGLELPLEERESVDAGIRHIEFLDTEIAAVERLIAQQALGWPEIRRLLTVPGVNLICAATFIAAVGDPRRFLTSRKLVAYLGLDPRVRQSGDAPARSGRISKRGSAAARWALVEAAWSVVRQPGPLHAFYDRTRARRGHGKAIVATARKLAILFWCMLCRGEDYAHQQPSLTNKKLRRLELTAGAPKHAKTARGIWSSNQAIRHAERRLAEQAEASYQRLVTDRQLAAPKRKVGASVTAERA

SEQ ID NO: 117255 - protein, 358 aa, unidentified
MRIRGCDLHARQQTVAMLDADSGELVEKTLQHDGEELRKFYSGLSRPVLVGIEATGSMQWFLELMEELGIECRVGDPAKIRAAEPRKQKNDRRDAQLLLKLLVENRFPTIWMPSTEQRDLRALLRHRHQWVRLRSRVQHTLQSMALNHGLRRGHALWNQAGQHALWTLPLAPHASERRKALMKLYPCLQESIDELDRQVSRQVDQHPPARRLMTHPGVGPVTALATEVFLGDPLRFTDGKAVASYMGMIPREHSSGGRQRLGAMSKQGNTLLRYLWCEAAMHAVERDPELKRFYRRKLVQKGMGKARVAAARKLGIRLWIMMRDQIDYQEFCRRGKARQESGSVRAGMPAINSGPAEA

SEQ ID NO: 117256 - protein, 398 aa, unidentified
MTESSDYESVQVFIGVDIGKDTHHAVAINRSGKRLFDKALPNDENKLRSLISDLKQHGQILLVVDQPATIGALPVAVARSEGVLVGYLPGLAMRRIADLHAGEAKTDARDAAIIAEAARTLPHALRTLKLADEQIAELSMLCGFDDDLAAQTTQASNRIRGLLTQIHPALERVLGPRLEHPAVLDLLQRYPSPEKLASLGEKKLAAQLCKLAPRLGKRLAADIAQALAEQTVVVPGTNAAAVVLPRLALQLITLRKQRDEVALEVEQRVLAHPLYPVLTSMPGVGVRTAARLLTEVACRAFASAAHLAAYAGLAPVTRRSGSSIRGEHPSRRGNKALKRALFLSAFAALRDPLSRAYYTRKMSQGKRHNQALIALARRRCDVLFAMMRDGTFYTPQGS

SEQ ID NO: 117257 - protein, 451 aa, unidentified
MNKKVSMEVINPNAAGIDVGSRSHFVAIGQGKDDVKEFGVYNEDLKAIAAWLLANDVKTVAMESTGTYWQSLFAVLQNEGLQVILCNGKFTKNIKGKKTDVQDCQWIQKLHTIGLLSGSFLPDEATEQLRTYCRHRANLLDNAADTTRKMQKYLRLLNLRLDVVVKDITGLTGLAIIDAVCKGETNAEKLASFRNGNCKKSEEEIAKALQTNGRKDYLFALQHEYNMYQNLQKSIQQCDIEIEKMLKEHINNNDDKRQHFIEKKVHKKVNKNSPKNIGINVMSYQYFEGVDLLAIEGVSHSTMLTVMSEVGLEGLKKFGTAKQFASWLRLAPNNKISGGKVLSHKVPKGSNRLKIALRNAANAIGNLKDTPLSNFFNRINFKKGRVSAISATARKLAVIIWSMVVKNQPYKNDNGYEFIDQKRKRKVREMKKLIHKFDITTNELGLELNGL

SEQ ID NO: 117258 - protein, 334 aa, unidentified
MANYYFGIDVSKKTLDVALLKDGVLLSSHVIDNDPHSIDVFFAPYAKQFQLATDQAWICMEHTGIYNYPLLKSLGESKFHICVEPALQIKQSQGMTRGKSDAVDAVRIAQYAYKNRDSLKVWKPQPVNLHRLKALLSQRDLLIKTKLQLEVSTKECKGYLDAQLVKDLVSNSKNSLKAIDKSIYKVEEKIYAVVKSDKSLNTLFHRATSVTGIGPITAFNLIVATGAFEQIKNPKKFACHAGVAPFEHRSGTAVRGRTRVSKMADMGMKRLLHMAALSATQCEGELRNYYLRKVADGKNKMAVLNAVRNKLITRVFVCINQNRDYQKKYERALV

SEQ ID NO: 117259 - protein, 348 aa, unidentified
MNYVGIDWAYGRAAFCALSESGEIEAEGLIPADEDGLARLALRLGPEVKGCVEMMSGAIWVKEQLELCGWSMQVAHARKVRDIAPLACKTDKVDARVLAELCRRDLVPEVWVASAEDRAIRERLRRRAHLVKLRTSHRNRIFGLLTQFGLKVSFTRLRQPGALELLERRGVPEVWRDSIAEHLAQIDELQRRIGPIDRELRPIADSDPRAKLLQTIPGVGPLISLTFASEIGDVSRFSSPAKLVGYAGLAPRIIQSGERSATGRLSKAGSRSLRWAAVEAATQAWRPTNPFHEHYRRLAARHGVNPARSAVARKLLICSWHMLSRGQVFQPSTPTPTAATNSPRFLAA

SEQ ID NO: 117260 - protein, 455 aa, unidentified
MAKKGKKHTRTLENMPILHPHAAGIDVGAEEHWVCVPADRDAQPVQKFSAFTCDLHRLADWLTTCRITTVVMESTGVYWIPLFQILEARGFEVALVNARHVKNVPGRPKTDRFDCRWLQKLHSYGLLAPSFRPPEDICQLRSLLRHRDNLIQMTVKHIQHMHKALDQMNLHLHHVISNVTGVTGLRILRAIVAGERDPRTLAQYRDYRSKSSPDTIVKALEGDYRPEHVFTLTQSLALYDFTQQQIAACDQEIERVLGTFASLVDLEAHPLPPPTTAHRQPQRHEPAFDLRAHLYRITGVDLTQVPGFQALTIHTILSEVGLDMSKWPTDKHFASWLGLCPDNRMSGGKVLATGSRRVQNRASRALRMAAQSLRKSPSYLGAFYRRMRSKLGPAKATTATAHKLAKILYHLLQEKTPYRERGAEAYRHKEHERQLRQLRKQAQHLGFALVPQTSN

SEQ ID NO: 117261 - protein, 481 aa, unidentified
MDSAKNIQPPGTKPTRAKGKSRGKRKGMCLEDRPLLELNAAGIDVGAREIFVAVPPDRDENPVRVFLTFTEDLQQLAAWLVKCRVTTAAMESTGVYWIPLYEMLEQYRVKPCLVDARHMKNVPGRRTDWHECQWIQYLHSVGLLRSAFRPDEDVCAVRALTRHRNDLVQLASQHIQHMHKSMTQMNLQLHHVISDLTGLTGMSIVEAIVAGERDAAVLAKLRDPHIKASEDTIRKSLVGNWRAEHLFTLKQSRDLYQTYQQQIGACEEEMEKLLQQFESRVDPNEKPLPPDRKRKRRNRKKGKKDGDRKPGFDLRTESYKLFGVDLTQIPGLETLPLPLFSEVGRDMRKWPSAGHFASWLLLCPDNDISGGRVLWKGMRKGNNRAGQMFRLAANSLHHNNTLLGAYLRRMKAKLGPAGGITATARKIAIIFYTMVNNQVEYDATLWAQRDTQREKRFEDKVKRQARQLGYQLVPIEEKPAA

SEQ ID NO: 117262 - protein, 423 aa, unidentified
MDVMHDRVAGLDVHKAMIVACVRITTGGKATRECRTFDTTTAGLETLRAWLTESGCTQVAMEATGVYWKPVWNILCEGRFELILANAAHIKNVPGRKTDMNDATWIADLVACGLIKASFVPEQELQELRSLLRTRKQLTREQTRHVQRIQKTLEEANIKLGSVISDIMGVSGRKMIEAMIGGERNPFRLAELADRRLRASRKELYDALHGRLTDHHRFTLRLHLRQYDALAQAIAEIDQEVDTAIERMDAEVVSGQATFLSLIGLLCTIPGVGALAATTILAEIGTDMGRFPTSGHLLAWAGMCPGQNESAGKRKSSRLRKGAPWLKTTLVQCAWSATHRKDTYYRAQLNRLRGKHGAKKAICAVAASMLTAIYHMLKDGTHHQDLGANHFEHRSVEIRAKRLAAQIAKLGFEVDLRPIAHAA

SEQ ID NO: 117263 - protein, 291 aa, unidentified
MNILKQTVGIDISFKKFDARFGTINIHQEVCLSASKSFKNSLAGFKLFLKWLKIYLLSNDIPLVFVMEATGVYYEQLAHFLHCHGYQVAVVLPNKIRNYAKSLESKSKTDPLDAAVITRFGLERQLPLWCPPSENMKTLRDLCRKYHALKTTTTEIKNQCHALNVSFKPHRESFKRKQRLLRFLNRQIALIEKELHYLLKTEPDLARRLKNIKTAKGLGEITILTVLAETRCFQLVTNQKQLTSYAGLDIVFNDSGFKKGKTSISKRGNKFIRKALFMPALSACRANPNRE

SEQ ID NO: 117264 - protein, 475 aa, unidentified
MNLKGKKTKNQVVTANIFEQQELLKKAEVIREKLTASTWHELETNGKFDKNAKLSFISDDMLILGCDVGSETHYLRAIDTRGRELSKSAYSFRNNCEGFQSAKKWAVELAAKNEKKQIVLGLEPTGHYWFCLATWMIANGISVVQVNPYAVKQTKEVEDNSQLKDDTKDPKLIANLVKDGNFGMPYLPEKVYAELRRLSMFREQLNEDRIRAINRMHREMKIYFPEYKEALGRVEGAFSLELLKQTPFPEEIQTLGEEGIRQIWHDAKLRGRGYSRVREIVGYAKTSVGMKDGAEASAMAVKWFVKEIRELDEKLAEIEKLMREKYQEIPYAKNILEISGIGENTLSGILAEMGDISRFDDVKEIQKLSGLGLVACSSGKHKGETKISHRGRKRLRYWLFQAAKSAVAHAEEFKELHVYYTTRADNPLKKMQSLIVIACKLLRIIYGILKNGTVYDPKKMLRDIRRPEKKEVIAA

SEQ ID NO: 117265 - protein, 321 aa, unidentified
MSQFYLGIDVAKAKLDCALRLPSGKFRAKVIPNSPDGFTTLLTWLTDQKAELPHVCMEATGIYWEDIAQHLATSGLTVSVVNPAQIKAYGASRLTRSKTDTVDAKLIADFCAERQPPTWQPRSEAEVTLRALVLRLNALQTMRTQESNRLQVAREAVRKDIQQHLNWLDTAIQQLIDSINDHIDLHPDLKQQRELLDSIPGIGERTSAIILAFYADTSRFANSRQAAAFAGLDPRQYESGSSVKGKPRLSKIGHSFLRKAMYMPAMVTLYKTAWGKRFRSRLASAGKPNKLIIGAMMRKLIHVAFGVLKSSKPFDSAIHLA

SEQ ID NO: 117266 - protein, 440 aa, unidentified
MALSDSTAPPPEFAAFIGAGGGDRKHAWSLQEQGSARIESGEVENTPEAIQLWAVALSQRFAGRLLAIALEQARGAVIGVLSKYAYFYLYPVHSTTSANYRKSFSPSGAKSDPSDAGMLLDLLLKHREQLRPLRPDTEATRSLQILVEERRKEVDLQTSQSHRLTMHLKQSFPQILKWFDDIKAPLVANLLERWPTLEQLQKARPETLRKFFHKNNCRSTERIDERLLQIREAVPATHDRAVLSTGILIVHGLLQVLAALRAVIAGLDVRIATLLEAHPDFFIVDSLPGAGPVMAPRLIAVLGTDRDRFHSAGELQCWTGIAPVVESSGKQRWVHWRWACPKFVRQTIHEWAGHSMKSCEWARQYYDLQRSRNKSHHAAIRSLAFKWLRILFRCWKHREAYNEVRYEESLRNHLAKADEPAKKATLELRWKTCGGFSKLV

SEQ ID NO: 117267 - protein, 437 aa, unidentified
MFSKTKHRNHIMNTTTKFAATIGLDWADQKHDLWIRPDNGEKAQHLRLEQTPEALHEWVAKLRQRFGNRPIAIAIETSRGPVISALMAYDFIVLFPVNPKAMKDYRAAFSVSGAKSDCTDAQLLEEFVRLHRDKLKALEPDTELTRKLAGLVENRRHLVDERTRIVNQLHSILKTYYPLAETLLGRQMNQPMAADFLARWPDLESLQKAGPKVLRAFCYKHNSRNSVKIEERLTALEKAIALTTDQAIITPARLLVEALANILNPLHQAIARLDKEIERAMAQHPDAAIFRSLPAAGSALAPRLLVAFGTNRDRFENAGEVAQFYGLAPVVIQSGNSKTVHHRHRCPKFGRQTFHENAGCVAKLEPWARCYYTQQKQRHDDKHHQACRALAFKLIRIYFACWKHRTIYDADIYLRALEKQGSPLHKMVQIPTPAHGE

SEQ ID NO: 117268 - protein, 340 aa, unidentified
MDHIAIDLGGRESQICVRSQDGSIIDERRCATGTLSRYLQRRPAGRVVVETCAEAFSVADEAVAAGHEVKVVPATLVRVLGVGSRGVKTDRRDAQILSEVSCRIELPSVHVPAAITRDRRSQCTSRENLVQTRTSLINGARGWLRQQRVRIRSGTTQTFPKRVREKLLKSEAGLPAYIERMLVSIETLSEQIRAADGELQQLAREDSACERLMSVPGVGPVTAVRFVSALENVERFGGAHAVEAYLGLTPGERSSSDKKQRTGITKAGPAPVRRALVQACWVFRRLRPEDPLVQWCLEIEKRRGRKIAIIALARRLSGVLYALWRDGTRYDPEHRAVGAK

SEQ ID NO: 117269 - protein, 370 aa, unidentified
MPPPSTLYVGLDVHTDSIAVAYVAKAHDAEVIYLGTIGTRQADIDQLLRNMPSKAKHLVCVYEAGPCGYWLSRDLTKKGHRCWVVAPSVIPKKAGDRVKTDRRDAVQLARLMRAGDLTPVDVPQVEDEAIRDLTRAREEAIGDVKTAKFRLTAFLLRHDIRYTGRAAWGPAHLRWLSEVVCPTPAQQLVFQAYVRAVNEHTERLQRLEQALQEHVNTWRLQPVVEALQALRGVQFTVAVTLVAELGDLTRFDNPRQLMRYLGLIPSAYSSGERRRQGGITNAGHTHARRALVEGAWAYRYPAKGSRHIQRRLEQLPKPIQDISWKAQVRLCQRDRHLMARGKHANQVVVAIARELVGFLWAIAQQVPVTS

SEQ ID NO: 117270 - protein, 425 aa, unidentified
MNYKQNEKINQVKESTLVVGIDIGSTTQYARAFDWRGIELGKVFTFSNSREGFESFKAWMRHLQDKYRKSDAIVGIEPTGHYWFDLGAYLEDEGILLVMVNPYAVKQTKELDDNSQSKNDRKDPKVIAKLVTEGRYSAPYTPDGVYADLRIMVANRKRLIREMTQIKNRFARWFAIYFPEYTDVFGDYEAQSSMLLLKKVCTPEAIVELGAEKINQIWRDAKLRAVGMKRATTLCETAKRSIGLKKGSSAAQYEMKLLLEDYEYKKAQLDAVMEEIEKLCRKIPESEQMLAIKGIGVITVAGFLAEVGDVRRFESPRQIQKLAGLSLRENSSGKHKGQTTISKRGRSKLRAVLFNAAIPLIAKNPEFKSLHEYYTTRANNPLKKKQSVIAISCKLIRVFYAILANGVTYDSQKLLSDIHRQPQVA

SEQ ID NO: 117271 - protein, 390 aa, unidentified
MSFDHHSEEPTAIRTNLAAIFVSMELSRSIWMITSLSPGGGEKMSKHSVSAGDIAALLARFSELKQRAFARIGKPFPIIVIEEAGLDGFWIHRVLEREGIESYVVDPASIATSRRRRRAKTDRIDGETLVRALLAYKRGEPRVCAMVRAPTPENEDSRRLSRERKTLTVERIQHVNRIKGLLFSQGVSGYEPLRHNRRQRLDELKTGDGRPLPTHLKAQISRELDRLELLIQQVKAVETERDALLAPAAKIGQPPAPQAMLLDLKGIGAEFAAVLWSEGLCRNFANRRQIGAYAGLAPTPWQSGSVAHEQGVSKAGNPRLRTTMIQLAWLWLRHQPQSALALWFKERVSHSGGRLKKTTIVALARKLLVALWKYVTAGVVIEGAVVKSAS

SEQ ID NO: 117272 - protein, 339 aa, unidentified
MTVKTVGLDLAKDVFQIHGISAAGRKIFNKKIKRPKLLAFFEALPRCVVGMEACGSAHYWGRELSRLGHDVRLMPAAYVKPYVKRGKTDAADAEAICEAVRRPTMRFVEVKSEDQQAILALHRTRDLAVRQRTQLANMIRSLLREFGHVLRSGIEAVIAFAKRHLEGERPDMPDLASGILGTVCYQFLGVHERVEGYSKMIEKHALLDAGARRLMRMPGVGPITASAIVATIGNAKQFRTGRDLAAWLGLTPLNKSSGGKEKLGKITKKGDRYIRKLLITGMTSRALMGRKHPERIDIWSARILAEKPFRLATVAMANKSARIIWAILTKQQEYRQPTA

SEQ ID NO: 117273 - protein, 410 aa, unidentified
MKMAGIDVHKKVLMVVVVDTSVPEEKPVRRRFVTLPSELQRFRIWLQEQGVEEAVMESTAQYWRSVWLELEPHMSLHLAQAFSNRAPRGRKHDFKDAERLVRRLMADELILSFVPKGEQRIWRSLTRMKVQLTRDRVRLQNQMECLLEEMRIKLSIVVSNLLGASGLRILHALAQGETDPKRLAELGDERLHCTEEQLVDALTGRVQPMHRGMLALQLQRLQLIDQQMAQLNSMIAQGMKPHQDAVIRLAEVPGLGVDSAQQIIAEVGAQASTFSSAAELTAWVGTCPGKEESAEQNHSSRSAKGNKYLRRVLNQAAHAAVAKKGSYFQVVFRRLMPRLGYKSAIWAIAHRLCRVVWKILHEGVRYIEQGRDVGPREKKQRAQMLARALRKLGYEVTITPINELAPKPAI

SEQ ID NO: 117274 - protein, 355 aa, unidentified
MDRQADRDAEIVGGVDTHKQTHVAAAVDGAGRLLGTAEFPATSAGYGELLRWLLGHGGVSRVGVEGTGSYGAGLARYLAREGIFVVEVIRPNRQLRRRRGKSDPVDAEAAARAALAKEAEGTPKSADGLVEAMRMIRLARSSAVKARTQAANQIDALVTCAPESLRSRLKGLSLVRMAERARRWHQSDIRDPLSACRATIARLARRWSRLGAEIKHYDQQLKRLTEQVCPQLLARLGVGPEVASCLLVAAGDNPERLCSEASFAAMCGVSPLDASSGQQRRHRLNRGGNRDANRALWIIAMTRLRVDARTKTYAARRTKEGRTRREILRCLKRYIAREVYALLLATTDAAALDKT

SEQ ID NO: 117275 - protein, 316 aa, unidentified
MNSKTQVEINVGIDTSQSQLDIYVRPTGDYFSVENTPEGAKKAASRIQKYQPTRVLIEATGRLELNFVCAAHNAGLPVVVCNAGQVRQFARSTGRLAKTDKLDAQDIARFGEALQPVLTIIKPEKLRQISDLITVRRQCLDMSTMQKNRLLRMPKNVQPPIQRILKAIQKEIERIDQKLDKLVDAIPQWREQRDLLMSAKGVGKVVAYTLMSELPELGKLNRKEIAALVGVAPMNRDSGSYRGKRRVSGGRSKVRTVLYMSMWSSIQHDPKIKATYERLVATGKPKKVALVACMRKQLTILNTMMKNGTHWNEKLA

SEQ ID NO: 117276 - protein, 343 aa, unidentified
MQNSTVVAVDVAKTIFEVAVSDRPGHVCRRDRPTRAHFLAFFLAYPRATVVMEACGSAHYWGRELMKRGHQVVLLPAHQVRPYVRGNKTDRTDTKAILEAYRNADIRPVPVKSINQQSLTTLHRLRSGWMAQRTARLNAVRGLLREMGVFIPVGSREVVPAVWEQLGDADSEIPSVLRPLFAEACQEIRDIEARIKMVERELEALAAQLPPVILLMTIPGIGLLTATAFVAFVGDIRRFPSGRHLASYLGLTPREFSSGLKRRLGRISKRGDGYLRTMLIHGARSVLIHARKQQPDRLRSWAHDLGQTHVHNKAAVAVANKLARIIWAVWTREMTYQLMPKAA

SEQ ID NO: 117277 - protein, 409 aa, unidentified
MYFVGIDIAKKTHQAAITTDEGKLIGKSFKFSNTIDGFNLLLEKFSSVTTDLSQFEIGMEATGHYWLNLYTWLSDKNFKIHVINPLQSDALRNLYIRKTKTDSVDSKIIADVIRIGQYSETQLADDKIISLRDLSRQRFYLVDMASDLKRKIIAMMDRVFPEYQDFFSDMFGKTSVQVMKECTSPEQILEIPTEKLTQLLKKSSRGRFSETKAKELKKLASNSFAAMLSSDMTSLLIRQMLEQIELLEKQISDIEEIIASQFEQFNTKLATIPGIGTTLGAAILSEIGDINRFEQPKQLIAFAGMDPSVKQSGNFVGTESHMSKRGSPYLRRAIWLAGVVSVSHDSLFKYLFQQKMSSGKSYSQAMGYICHKLLNTIFAMLKSGEEYKPVYPPSIDVSKLADEAINSQS

SEQ ID NO: 117278 - protein, 316 aa, unidentified
MKAPLYVGIDVSKKHLDVALGPEDRRPLRVPNTPAGIEALVAELQGKAVQLVVLESSGGWERGILRALVEAGITTARVPGGRVRHFAKSWGQRAKTDGIDARMLARYGERVQPRPTVLPSPQRQRLDALVTRRKQLVDMRTAESNRLETAEEESVRQGLQKHIAWLNEEIADLEQRIEEHIAAHEELAQQQQLLTSVPGVGVGTARVLLAKMPELGQVNRKEIASLVGVAPFNRDSGGKTGKRYIQGGREDVRAVLYMAALSAIRFNPRFKAFYQRLRNEKEKPFKVAIVAVMRKLLVTLNAMVATQTAWHFEPDP

SEQ ID NO: 117279 - protein, 338 aa, unidentified
MKLYGGIDLHSNNSVLVLIDEEDRVIYEKRLKNDLTLILRELAPFRRKLTGLVVESTYNWYWLVDGLMEAGFGVHLANTAAIKQYEGLKHTDDRHDARWLAHLLRLNILPEGYIYPREARAVRDLLRRRHRLVQQRVGNVLSIQNQFARLGMSGFSAERLKRLHDDDLDGLIADVNVRSAIVANLALVRCLNLQIERLEREVLAQVKLAAQFAPLLSITGIGKILALTIMLETGEIGRFAKVGQFASYARCVDAQRLSNEKKKGSNNAKCGNPYLAWAFVEAANFAIRYSPRIKRFFERKCARTNKIVAFKACAHKLARAAFHVMRDRVVFDETRAFA

SEQ ID NO: 117280 - protein, 391 aa, unidentified
MIFVGIDVAKDKHDCFILNSEGTVLADVFTIANNRIGFETLLSRIQSCSQGESKIKVGLEATGHYSYNLLGFLLDSGLATYVINPLHTNLYRKSLSLRRTKTDRIDARTIAMMLMSDVDLKSHSNTAYHNEELKSLTRYRFDKVKERAKLKSSVARLVNILFPELEKLVSSLHIAVVYALLSNYPGASYIANANTEELAETLCTASKGRYTKSKTAKIQVAAGVSIGSKMPAKSMELKHTIALIRELDKEISEVESAIDKITSQMDSPIFTIPGIGRHMGAMILAEVGDFSNFASADKLLAYAGLSPSTYQSGQLQNCYAHMEKRGSRYLRYALFNAAKYVCLWCPTFSAYLEKKRSEGKHYNVAISHAAKKLVRLIFAMQRSGEAFLADY

SEQ ID NO: 117281 - protein, 345 aa, unidentified
MPIVGGLDIHRKQLTFDYLDTVTGEVRRGQIAPADRDHLRAWLARFAGRDDVGFAIEGCTGWRYVAEELAAAGIAAHVGEPADTAAARGRKRHAKTDKTDARHLRVLLAEGRLPECWVPPAQILEYRALLETYHDLRREHTAWVQRIHAVFFHQGAPALGEGALRTEAGLAALRAAAAAHLSPAGQLQVATALDMLAAVETRMDLLRKQLRAAARQLTGARVLAARLYGVGPVTALALTCWLAGAGRFSSSRKAVRFAGLDVTVWSSDRKGPPGRLSRQGPPVLRWAVYEAGKTHARASAPDHGYYAAVKDRTNGKRAALSEARKLVRQACHILTELGDDALAAA

SEQ ID NO: 117282 - protein, 351 aa, unidentified
MPHKSTVHAVTAIGIDMGKNTLHMVGLDLRGAIVLREKVSRGRVASRLANLQPCLIGIEAGMATHYVARELAALGHDVKQVPPTYAKPFRQGHKNDFRDAHAVAEAVQRPTTRFVPAKTNEQLDLQALHRVRSRLVSERTAVINQIRGFLLERGIIVRQGLRFLRQQLPDILAKRTDVLSPRMVRIVTDLAGDWRQLDERIETVTNEIETLAKSDDNCRRVMTVPGIGPIISSAMVAAIGSGAAFARGRDYSAWLGLVPKQMSTGDRTILGRISKRGNGYLRTLFMQAARVILLRPANWPKHGFGAWLIRAAQRLHPNVLAAALANKLARIAWTVLAQERSYEARVTKAAA

SEQ ID NO: 117283 - protein, 415 aa, unidentified
MTGSMEIVYERCCGIDVHKKMIVCCLITGQRTTQTKTFGTLTKDLQEMTEWLKAENCQIVAMESTGSYWKPLYNIFEMEDIPAMVVNAQHMRTIPGRKTDVNDAQWIAKLLRHGLLQASFIPDREQRELRELVRYHTSRIQERAREKNRLQKMLEGANIKLSNVVSKVTGVSALTLLQMAMDGEELTIEKIEKVRHRGCKSSAEEFLDALTGVITPLQRELFTQVLQTIKEQTTQIERIEALIQAHITDEYAKAAKALEPIPGIGKQSAKSIVAEIGIDMSRFPTAGHLCAWAGIAPGNDESAGKRKKGKPRQGNKALKKTLIQSANNAILNKQSFFYAQYQRLVVRLGKNKAKGAVAHSILIAVYHVLSGKDFVDLGSEYYTQFNRDKKIKSHLKQLEKLGWKPESPDTADQVA

SEQ ID NO: 117284 - protein, 484 aa, unidentified
MKSKPKEKSKKATAHPTQRHWNEMNRKQRRETMRKIQSEDLSLEVLHPDAAGIDIGNESHYVAVPSSRDNQPVRRFGCTTAELKAMATWLKQCGIRTVAMQSTGVYWIAVYDILENAGLEVYLVNARDTKNLPGRKSDVQESQWLMKLHTYGLLRNSFRPSQEVRTMRTYWRQRNDLVQAAARQIQRMQKALTQMNVQLANVLSDVSGVTGQAIIKAILKGERDPHKLAALRDYRVKANEQQIAQSLEGHWQPDLLFVLKQEQDGYEFCQKQMAECDRQLAQYLQQREDRSHSAPLPEEKRKGRLRKTKKGNTPQFDMREGLFRMTGTDLTRIDGIDVMTATTVISETGYNMNKWQTENHFVSWLRLCPDNRISGEKIIGKGRLRTNNRATIALKMAASTLRKSDTYLGAQFRRLRTKLGPPCAIKAMAAKLARLVYRMLRYGMKYVDQGAAFYELRHRELQIKRLKSNAATLGYQLTPIPAAA

SEQ ID NO: 117285 - protein, 409 aa, unidentified
MEHNSEAFIGIDTSKLKNAIAIAEGGRDGEVRYLGEIETTDAATRKLVKKLATKYRKVTFCYEAGPTGYGLYRLITSLGHECSVVAPSLVPKKPGDRVKTNRRDAVGLAKNLRAGELTAVWVPDTRHEAMRDLSRARETAVDDLKSKRQQISSLLLRLGLHYPGKKTWGKSHRNWLASLKLDQREQRIVLEELFGAERQAQERVDRLVSAIIDAVPEWSLAKIVTALMAVRGIDLVAAVTIMAELGDLSRFASPRELMAFLGLVPSESSTGDSVKRGGITKAGNRRARRILVESAWSYRYPPRISRDKLAKVAAAPEPVRAIAWKAQTRLSSRYRALIKRGKRSTIVATAIARELCGSSFLDNVGGSVPRHARSCRRARGRQGRFAPLKRWPEGGPSWTAAARASISRV

SEQ ID NO: 117286 - protein, 436 aa, unidentified
MKIRTTPAPDKARPALLLAADVSRDTLHLFSRFESGGPGGVPHEVIAEDVIPNRTEPVERALDEAATLAEEHGLSGVRVLCEASGGYERTLLAVARRAGHETALVSSEQVGQLTKAESLDTAKTDRKDARVIHLAGRMGKTQRHRDLPEPYVLLRHLTAFHDDEVRTTSAIRTRLQATLRDLFPDYDRPIAFTFSKTGRTLLRERLLCPHRIAKLGRSRLLAMLRRRVPGVKTVTGDRLVTAAEASVRSAPPEAVAAVLSDRLAALVAELEVHEGQADALRAQIEALGAELKAREELPPIDEAVSGVTLFNLARLVGQTGPLSDFATKRQLLRYAGMNLRERESGTYKGQTRLSKKGRPMLRKVLGQAVFPVLRGDRLLGRRYAERRGRMVEQKARVAAMRKLLVAVWGAHRSAARGLPFDPARVHVCQSQYALAA

SEQ ID NO: 117287 - protein, 311 aa, unidentified
MEQGTFIGIDVSKNRLDIAILPSQDSFAVPRDGGGLDALLERLKALAPELIVLEATGGFEQVVAATLAGASLPVVVVNPRQIRDFARALGRLAKTDKVDAAVIALFAERVRPKLRPLPDAETRLLDELVTRRRQIIEMLVAEGNRARRLHTKKVVKRIERHCALLQKDLTEIERELDATIRGTPLWRETEDLLLSVPGVGSTLARTLIAELPELGRLDRRQIASLVGLAPFARDSGVMRGRRTVWGGRAKVRAVLYMATLTATRFNPAIKAFYRRLRQAGKPFKLAITASMRKLITILNAIVRDRRPWQHA

SEQ ID NO: 117288 - protein, 336 aa, unidentified
MPMYQLGIDVSKNTLDLCLLREGIKGRIKTRKLKNTADAAKVVAEWLKKQSCELGEVHIIMEATGVYHEPLAYGLHFAGARISLANPHRTREFARGMNILTKNDKVDAWMLACYGSLKEPEAWTPLPESVRYLRALLRRRDALVADSTREKNRLEKSVFTDSPDAVRASIENMLQELSNEIEHLDVLIQEHIKTHPELNQDFRLLTSIKSVGYLLGLNMLAILKSHSFESAEQAAAFLGVVPVERRSGTSVKGKPKLSKIGPPEIRTKLYLAALCGLRFNPVMKQMYTKLCQRGKSKMCAIGALMRKLVHWCYGVLKTQLPFDAEYNQQSYYKTIF

SEQ ID NO: 117289 - protein, 335 aa, unidentified
MSLKLLAIDLGKRSFHCHGVDSDGVIISRKTSRSTLLETIKELAPETIAMEACASAHYWGRRFLADGHRVLLINPRFVKPFVKGSKNDAADAEGIYEAALRPTMRFVPVKSTEQQDLQSLHRTRDRIICARTALINHMRGLLGEYGVILPQGAWRFLTQAHDAIAAAEVSDLTRELFTDMLDELRALDLRRDKLDRQLLAICRTNEACRRLSKLPGVGPVIATALVAAVDDGRHFRSGRELAAWIGLVPRQYTTGGKPRLGGIGRRANHYLRRQMIHGARSVMFRLAKHDDRRSQWLKGLAARRGFNRTIVALANKTARVAWAVLTRKEDYLAAA

SEQ ID NO: 117290 - protein, 396 aa, unidentified
MHYYLGIDVGKFHHQAILCDDQAKPVIGSLKFKATFDGFQQLFAYVRQQVPEGTVIHAGVEATGAYWITVYEQLLKHQIRVSVLNPLQVKAYRNEGIRGAKTDRLDALLIVKVLRFGDYRESAIPPADLFALRQLTRLRFDLVSVTSDLKRKVICIFDQIFPEYKELFSNLFGTSSKTLLAKAVTPEDIAAISTRKLTTLLEKASFGRYGAKQALAIKKKAEQSIGITLGIDAFTLSVKILLAQVGHLEEQTQKLEEEISQRVAGQQTTLTTIPGIGRIQEATILAEIGNFERFRNDKDGAEKLVAIAGIDPKVKQSGKYQGKAKMSKRGSPYLRTAIRQIAFNAACMRKDAMFARIFQKKVAEGKPHEVALSHVENKLLHVIYSLLKSKKEYVPN

SEQ ID NO: 117291 - protein, 340 aa, unidentified
MELYGGIDLHSNNNVLALMNAAGERMYRRRLPNDLRTVKAALAPYQQDLQGIVVESTFNWYWLVDGLMEAGYRVHLANTTAIQQYSGLKYSDDDSDALFLAQLLRLGILPEGYIFPRAERGVRDLARKRAQLVRQRTANILSIQTIVQRSAAVRLKGDRVKKLEVAELEPLVGSAEVAMAVEANLQVSQCLEQQISRLEKAILERVSLRKEFAVLKSIPGVGNILAITIMLEAGPITRFERVGNFSSYCRCVGSKWLSNGKKKGQGNVKSGNRYLAWAFVEAANFAVRYSAPIGRFHQRKKAKTNGVVAIKAVAHKLARAAYHMLGTQKKFEVTMAFGGD

SEQ ID NO: 117292 - protein, 385 aa, unidentified
MKNTIVHHEGAASLEAAVKKVKLSGSIIKIGLDVHARLYVAVAQYDCLLPKPVRRLGPSEFVPWVKQLLRAGHTVHVVYEACGFGFGLYRELKAAGAHCYVIAPRKLDEQCTRVKTDPRDATTLCQRLSRYLEGNTRELAVIRVPTEGEEQARHVSRQREQLVCLRQKLEAQGRSLLVNHSLPSPAHWWKNQTWSRLLKLLPGWICLRLQVHRPVLLGLEQQIGVLSAQLEATAPADVPAGVGKLTTVIMTREICSWERFTNRRAISSYTGLCPGEHSSGSKRVPGSVTKRGNPRLRAALVECAWRMVRFQPNYPPVKKRLAILAKGAHATGAQRKKAIVAVARHLAVDLWRVHTGRCSAAQLGLKSTETLIVRGEQKAKLNALA

SEQ ID NO: 117293 - protein, 486 aa, unidentified
MTCCTLPKRLLVKLSPTALLGRKKRIECCLTNGFSYTKVLRFLGNILSNWLSKPRKGVKNVKEIDKLDKKRIDLNQYLFAGVDVHRNNHAVSLTDAFGQELAVYELANNPIEFADLAQKVLSHEKNSGKKTIFGLEDTAGNGYLLATFLLKQGFTVKEVTPTLTAKERKKNPHRDKSDRLDAVKVAKALRDNLEKLTVTSNTPIANIARKLRALVNERRWLTVEQTRLKNQLHMLLHQAGYGEAHYQLFSNVFGEAALAFWDVYPTADLAKKTTEEKIRELVVKHSHRRLNGEKSKRIWSIIQELPEEMNLLDEIQVRALKRKLTRLKDIVTDIKYISEDQKRLLEELPYKLTSIPGCDVNLASRLLAYVGDIEQFETCAKLAKYAGCAPQVWESGETKRHRKGRSGNRQLNLAVHHIALSQIGRPGNTLGRKYYERKIKEGKSKKHALTCLKRQLIKIIYVLLKTGKAYSPIKKEHQLQEKPFSR

SEQ ID NO: 117294 - protein, 350 aa, unidentified
MVYIGIDLHRKRSQVAALDDRGKLLFNRRVPTRPAELFEVLATASEAPVEVVFEATFGWGWLADLLAEAGIPTHMAHPLANHAISSGRVKNDAVDAKTLAHLLRTNLLPEAWLAPPPAREARRLVRMRAGLVRIRARLKNQVHAVLAEHGVGVDMTDLFGSSGRRLLSQLRLPAISQQRLEACLRLIDQVSVEVELADQQLKTLFARDPRVERLMPIPGIGITVAATVVAEVWDVARFSTADQLCSWAGLTPSERSSADNVRRGHISKQGSRWVRWVMVEAAVHALRNPELRQLFLRVAKRRGVKIARVAVARRLLTLAFYALRSETGCRSYPLSKPSVEARSFAVMASR

SEQ ID NO: 117295 - protein, 411 aa, unidentified
MNPVIGLDVAKGESQVQAFLEKKKPYKKSFKVAHTLDGLDELHTFIKEVEELTETRPPIVLESTGHYHVPVVQYFEKRGYLLIVVNPLISYKAKSSSLRKVKTDIIDAHHLCELYYKEDLEPYKQRGIQLLNLRNLTRQHENLTGMFVQAKLQFQSVLDQVFPAYVGVFGELYSDVSLRTLSAFPTSKEVLEAGEENLSRKIHELCRSRSQQWARNQANKLMEAASQNPFQQTLYHSHLISLEMLINILLEYKKHLSKLEEEIDALAKNIEEYKIIQSIPGIGEKIAATIISEIGEIDRFNHPKKLVAFAGIDPSVFESGTFKGTKNHITKRGSSRLRHALFTAVRCAIRDARKARTTKELIPRNKRLREFYDKKREEGKPYRVAIIACANKLLHWIYALLKSKSTFQDVA

SEQ ID NO: 117296 - protein, 344 aa, unidentified
MTYYTGIDVSLRSVSICVVDDKGEVCLEAKVAAEIDAIVNRLRRFSSDVKSVGFEAGTLTQYLTYGLQAAGFEVICLEARQVSVTLAAMRNKTDRNDARGLAQILRTGWYSRVHVKSLHSHQVRALLASRKAILKKCVDLENELRGLLKVFGIRLPSRVGHGSFDAELRDRVTGDEMLACALVPLLDARTVLYKTYLKLDNAVKGLVRVDPICRRLMSIPGVGPVTALTFKAAVDDPSRFKSSRTVAAHFGLTPRRFQSGEVDNPGHISRAGDADVRSALYVAAHSLLTRNAQWSTLKAWGVGLAKIRGHRRAVVAVARKLAVILHRMWIDGTEFRWGAATASA

SEQ ID NO: 117297 - protein, 429 aa, unidentified
MTENNHTPQGLTLVAIDIAKDHHDVLIEPPAPARRRRLRVANQREDFEHFARYLRGLKSAVLIGFEATGNYHRPLAYFLHCQGFALRLIPTLALARTREAMHNSWDKNDPKDAQVILHLLKTGLTQIWHDPVVNRINDMRELSKPHCQITLARVRVWHTLRNHYLALYFPEIDRFIRSNYNVWVVQLLAAFPTPASIIAMHEQEFQAQAWNLAGRKVNKQALLAEIYAAAKQSIGVPVALDSAAITMFRLVLEQYLALNRLRERIAEQAATLLADNPDSRRLMTVPGIGPANALTILAEAGDLRRFRHHRQFLSFCGLNLSTRQSGKARGQSHISKYGNARLRTALWMAAQSAVRMRENSFRRKFEHYVRGNPLDADLRRKAYTAVTAKLARVVFGLIKQQTDYRPFFEHQFQVEEPSRARAVGAAVTP

SEQ ID NO: 117298 - protein, 352 aa, unidentified
MAVTMVETRAEIRAITGGVDTHADVHVAAALDPIGGLLGVKEFPATAAGYGGLMSWLGGFGTVCLVGIEGTGSYGAGLARHITTAGVRVVEVDRSDRQDRRRQGKSDSLDAVSAARAAQSGRARGASKGRDGAVEAIRALMVAKRSAAGERTQTINQARALILTGPDDLRARFTGHTAAALVAELASLRPRPGSTVGYATRIALRELGRRAEFLDGQLERLDELIGPLAAARAPSLLALYGIGPHTAALLLIAAGDHPERLRSEAAWAHLCGAAPIPASSGKTVRRRLNPGGDRQANHALWRIVFTRLGSDPATRAYAERRTAEGKSKKEIIRCLKRYVAREVYPHLRTTAG

SEQ ID NO: 117299 - protein, 414 aa, unidentified
MEPVYRCVAGVDVHKKMLAVVIRQQDGEEATYIKRKFGTMKSEIGHLAAWLQEHQVSEVVMESTAQYWRPVWYGLEAHFQLHLTHPMQTRAPRGRKWDFRDAGRLADRWCSGDLRESFIPGAEQRSWRWLTRTRVDLRDKIGLVRNQVEGLLEQGGIKLTAVASDVFGVSGWAMLEKIAQGVTDPEALAAEARGVLRRKAAQLQEALAGRLEPVYRMLLGQHMDQVRLLRKQIEEINRTLAEAMREHLPALQRLSRMPGVDLYAAQELLAEIGPGAAAFASAEHFASWVGVCPGNQESAGVSHNRRSAKGNRYLRRLLCQIAWAAVHTKDSFFAGLFARLKPRIEGKGAMWAVAHRMAKLIWLVLHNQVDYQEKGSAPPNERTLLRKFKRMLKELGHLGLDVRALLESQLAAPA

SEQ ID NO: 117300 - protein, 424 aa, unidentified
MGKTIPICCGVDVHKKFLVATILTGDYLIPQCKQKHFGTSFRNLLAFKQWLLDNNCKDVCMESTGKYWVPVWNILEGVVNVVIANPKWVSAVKGNKDDKKDSKWIGNLFRMGLVPSSYIPGKNIRILREFTRYRSKLVAMRASEKNRYQNAFTVCNLTLDAVVSDMFGKSAMAIENYLLDTDAVDPEICVSFLQRSLKKKSAEIIEAVEGFNMTQEQKERVRIVQGHFADIDKRISQIDEIIGRLTAEHEGTISLLCTIPGIDRRLAITIISEIGTDMSEFGSSRRLCSWAGLVPGNNQSAGKKKSVKITRAGVYLKPALVEAAHAAVKASEKSPYFRIKFEKIMKRRGKKRAIIAIARMILTAIFAMASTGEVFNPSDLQRFDMPEELQKKRTIAEAKDAVKLLVSLGVVPEGSISLEALLAS

SEQ ID NO: 117301 - protein, 387 aa, unidentified
MYFVGIDISKFKHDCAIIDELCDTVMPSWSFSNDREGFSHFKALLDSLEGEKKIGLESTGHYGQNLKQFLESNGFTFMEFNPLLVSRFVRSKSLRNTKTDSIDALSIAQYVMTVEYKPYPSSFYHLDKLKSLTRFRNSLVRQRSKQLVELTNVLDKLFPEFKPFFKDKFSVTALYILAHYQTPERIANMNARSYEALRKLSRGRFTLSNFIQLKALAKNTVGTQSDYLLDQMNILLELYSQLDSKVDELDAQIKECVRGIDPPCLSIPGVGELSAAMILSEFGDFSKFQNPSKMLAFAGLEPGYFQSGQSEYTGHMVKHGSSRLRYALMNCCLPLISNEPVFAAYYAKKRSEGKPHRVALTHVAKKLLRVIYTLQTKNIRYDPTMIH

SEQ ID NO: 117302 - protein, 310 aa, unidentified
MERIFVGLDVSKDRLDVHVRPTDDSFAVAYDEEGLTMLVSQLGLLQPTLIVLEATGGYEVKVAAVLANAGLPVAVVNPRQIRDFARATGQLAKTDTLDARANARFAETVQPAARPLATGQAQVLAELVARRRQLVDMLGAEQNRRRQARDPGLQKRIRAHVTWLTRAIEELEGEIKRLIRSSPVWREAEDLLTSAPGIGDTTAHALIADLSELGRLDRRRIAALVGIAPLNRDSGLWRGRRMIGGGRPPVRRALFMATLVAIRYNPVIRDFYRRLTTAGRPKKVAVIAAMRKLLTILNAMLRDHRQWQPA

SEQ ID NO: 117303 - protein, 354 aa, unidentified
MIIVGCDYHPGFQQIAYVDTETGEVKEQRLEHRELAEKFYRELASQGETIRLGMEASGHARWFERLLAELNIELWIGDAAKIRAKRVRKHKTDRQDAQHILQLLGEDRFPQIWVASWENRDLRQLLWHRHRMVQARTRIMNQLQAVALNEGLRCKKKLWREQGRKQLEAYRLAPWASRRREDLLKLLDELNPTIAELTQAIDQEVEKSAEAGRLMTHPGVGPLTALAFVLIIGRAERFQCGKQIAAYLGLVPLEDSSGERRRLGHITKQGSSMLRFLLVESAQVAARSIPHWRNQYFHLAMRRGRKIAKVAMARKLAVRLFWMMRQGWDYEQVNKFGSHAGQPEHRHGVQSNTA

SEQ ID NO: 117304 - protein, 419 aa, unidentified
MAFKIFRKNCCRLDVHKTWIYACIGITDPNNRTEYKQARFSSFSNGLKELAEWLAKYSCTEVCMESSGKYRIPVFNILEKTCWVTLAHPKYTKPQKGNKTDRKDAKWICDLFMCDMIKPSFIPPPDIRQLRDLLRFRMKLTYQITGMKNRALNCLTVSNLKLDDVFSDVFGKSSRSIIKQILEHPGETFDVTPFVDKRCKHPIEEIQAAVDGAICPEQATKLKICLDFIDEQEKRIAELDSEIFRLAEPHKAVLDFIRTVPGLSKEPLTAIRILSEIGADMSVFPTSKHLVSWAGCCPRNDSSAQKVRSTRISRAGSFLKPILVQIVNALIKSKDHPEFLERYRRIKARRGHKKAIIALCRMLLTAIWNILTKLEPYSAKDYLADKLTEHSVVISKSEGLALLRKRGYIFKDEITDVCC

SEQ ID NO: 117305 - protein, 334 aa, unidentified
MYYVGIDLHKRFAVAALQDDSGRTEKTQRFDCHDVGTIAQFFENHRPFKAVIEASSSCRWFYELLEPLGEVSLAHPLRLRAIVAGRAKTDKLDAALLARLLRAEMIPTAYVPPHPYQHLRDLTRARARITQRMNEAKNELHALLTRANLHSPYVTTFSKRGRAWLKALELQPPGNLVRDELLHRLEHYEREVIELDCALEGMIAAFPEVDALRDLHGIGLYSALLIVGEIAEPGRFTNGRQVGAYAGLTARVSQSGDSSYHGHITRQGSPWLRWILVQAAMKIVQRDAPLRNFYTRIRKRSSAKIARVATARKLAGICWVRLMRWHRLNTQAAA

SEQ ID NO: 117306 - protein, 394 aa, unidentified
MLTIGIDIGKNSHFFAGVDGATGEIVIRPTCFKNDTSGFDFLIDQINRLPVKPDLIGMEDTGHYHLNLLQFLLQKNFKVALINPTSTDMARKMQGSITKNDKTDTLLICDMLLSSSRKKPYRIIQLEDDELTEAKYLTRHHHDLKEERNTYTNKLQQCIDRVFPEFNSLFKSKYGIVYMRILKTFASASNIAHANIRSLRQCFAAQKKGRPISLTPEQLKEAARKSVGTHSDAMVLKIKHLIARIELVDEQLSEIDKKIEEFSEKINSPILSIPGISHFSGTSIIAELGNIGKYSKPSKIIKFAGVAPKEYESSEYKAQHTAISKKGSKYLRKTLYQVIFPVIQNNPVFKAYYNLKISQGKGHLCALGHCVRKLMRVIYHLLSTGTYFDPDLLR

SEQ ID NO: 117307 - protein, 383 aa, unidentified
MEVLMYCCCGLDVHRDLIEACILRGEGLEPEIIRESFGTTKPELKRLTLWLSKNDCFSVAMESTGVYWKPIFETLELSSEYLEQIWVVNANHMRNLPGRKSDVRDAEWIATLLRHGLLEKSFVPPAPIRDLRECSRLHRSFVQERCRYVNRLEKFLQAHGFKFSSVMKDILSVSGRKLLNILRDTGSLTPLDVAENCRRLRRSPEEISAAVCGNLTVAEQRLLKQLLHKIDSCREDIDSILADLRLLSQQFQEQLAIIDSIPGFDEESSIEIIAEISAAPQDHFSSGEKLCHWAGVTPRNDESAGKVKSRKTLHGNPYVKSILCQAAWAAVKVRNSPFHAWFWSHQHKLGQKKAIIAVCRKLLMLIYLLLQTKQYYQPPKKVA

SEQ ID NO: 117308 - protein, 406 aa, unidentified
MELTALHKRVIGLDVHQAQITACAIIEDADGTVRIEQRQFGGFKRDRRALADWAAALSPDEVVMESTGIYWKSPYAALEVVGIRAQVVNARHVKNVPGRKTDVGDAQWLATLARAGLLRGSFVPPAKLRELRLISRQRQKLVGQLASEKNRLHKVLTDGGVRLGVVVSDLHGQSARAMVKAIIDGQSPHEVLQLASRRLKASREEIFDALQGELTDSHRFVLDELMRHIEEIEARIARFDARLLDALTDERNALALLQTLPGVDLIGAAMLLVEIGTDMDAFGSADRLASWVGICPGNNESAGKRKSGRVRKGNPYVRRLLCEFAHAASRTQSVFQSKFQSLIVRRGHKRAIVALAHKLLRTIFFMLNRGQHYRDSATDYEALSVQRNAPRWIKALTKFGFIPRHA

SEQ ID NO: 117309 - protein, 335 aa, unidentified
MSRTISPTTEVPAIFAGIDVGAEELVLVLRKNGVSMKAQTFANTPTGHQQLLKALKGARVCMEATGVYYVDLAVSLHDAGISLSVINPRAAHNFAKALMHNSKTDAVDADALAQFAERMDFVPWTRPSTEALALRAFARRIEALTGERAAAKNQQHALCAWRDTPKAVLRDVKLAIAQLQKRIERLSAEARALIKQHAQLETSFQLLLSIKGVAQTSAIALLGELGVLPQGLTHKQWVKYAGLDPRVFQSGTSVQKKPRLSKAGNRHVRQALYMPALSAKQHDPYVRAYFEHLLARGKKPLQALCAVMRKLLHAIHGMLKHQQPFDNSRFYAMQT

SEQ ID NO: 117310 - protein, 403 aa, unidentified
MNSVGIDISKGRSTIAVMRPFGEVVISPFEVRHADSELSELARQLKSLDGETRVVMEATGNYHASVAKLLHDAGQYVSVVNAKLVHDYGNNELRRVKTDRKDAVKLANYGLDRWLTLPRYIPEEDTRLLLKNCYRQYRQYSKVQTVLKNNLISLLDMVFPNVNRLFSSPIRGDGSEKWVDFVAEFWHCRCVSEKSERTFTSKYLRWCRKHGYSFREAKAHTIYAEASGHIGVMPKSETTKLLVEQAVAQLRATSTALAALKHEMQSLASQLPEYPVVMDRFGVGPTLGPQLIAEIGDVRRFYSKKALVAYAGLDAPPNDSGDVTGRHKSMSKVGASSLRRTLFLVMSVYLQNAPLDESVYQFMDKKRAEGKPYRVYMMASANKFLRIYYATVKAYLESLEHTA

SEQ ID NO: 117311 - protein, 343 aa, unidentified
MQVVTTVGLDIAKSVFQVHGIDAAGQVVIRRQLKRRYVLAFFEKLPPCLVGIEACASSHHWSRELKALGHTVRLMPPAYVKPYVKRQKNDAADAEAICEAVTRANMRFVPTKTPEQQSGLTLHRTRHLFIRQQTAVINVIRAHLAEFGIVAPVGRRGVEALLNVVTDASDKRVPVVARMCLAALGVQLRRLKEQILEFDRMIMAWHRSHETSRRLDAIPGVGPVLATALVASVADPKAFRSGRNFSAWIGLVPKQHSSGGKDRLGSISKQGDRYLRSLFMAGALAVIRYARIHGTKHRPWLTALLARRPIKIAAIALANKMARMVWAMMARGEHYKEPVVLAA

SEQ ID NO: 117312 - protein, 314 aa, unidentified
MPQDGTIVGIDVSKLKVDGCIRSLGLRLSKPSSPDGRKEMIAWLREHKVVLAVMEASGGYERPWAEALRQAGIKVRIVDPKRVRYFAKSAGKLAKNDPIDAEMIAWYAETFPDATDQPHDPDREELSLLVTARQTLLDVKTQLGNWSEHHQPRAVERAQSALLKALRAEIRRLEAAMAAKIKARKDFARRAEIVDSVPGLGDLASAGVIAMLPELGHISNKAAGALLGAAPYDDDSGGHKGDRHIKGGRRNIRTLLYMPIVGAATRHNPVLKAFYQRLRAKGKEGKVALIACMRKLIVILNTMLARGEKWDPAK

SEQ ID NO: 117313 - protein, 353 aa, unidentified
MKKVIMCSADVHEKNISVEIAVHREKSMVKDYPYAVKGRQKLLSYLKTLAEKNQADRIVVVYEASSLGYGFYDDCQTAGVECHVLAPTRMAKSAQDRKRKSDRWDAKKMMELLRGHVLAGNELPSVCVPDHQLRDDRELVRTRLDIGEKKSAVKAQVQMLLKRTRAKRPPECKNWTLAYRIWLNTVEFPSGTRTALDSLLRQLHYLEKESDQMDAGIETLSQTPRYLKLVKALQEVKGIGVLAATVYLTEMGDLSRFANRRKVGAYLGLAPCCYESGEVSDRKGHITREGPSRLRKVLCQAVWSRVRCDKQEQVVYDRIVSRNPKHKKIAVVACMRRLGILLWHKGLEVQAAA

SEQ ID NO: 117314 - protein, 407 aa, unidentified
MTFFVGLDWAATTHAVCVIDDTGGVRWRGTVPHTAAGLTELVERLTRFGPPASLAVALERPSGLVVDTLLDAGFRIVPIHPNVVKASRPRYSAAGAKSDPGDAYLLADLLRTDGHRFRPLRPLADETRALRALVRGRDALVAQRVALANQLRALLERFWPGAATIFADVDSPIALAFLRRYPTPQSAERLGERRLAQFLRRHAYCGRRTPADLLARLHSAPRHRTGDAESEASGELVLALVAVLTPLVAQIQQLAAAIAASLDQHPDGPVLQSLPRSGQVNAAQILAELGDDRGRFPTAEHLAGEGGVAPVTHSSGQHRGVAFRWACHKRLRQALTTFAHNSRHASGWAAAVYARARARGCDHPHAIRILARAWVRVLWRCWQDRRPYDVTCHRAAQPLLALQPARG

SEQ ID NO: 117315 - protein, 339 aa, unidentified
MTVKTVGLDLAKDVFQVHGISENGRIIFNKAIKRAKLLSFFEILPPCTVGMEACGSSHHWGRQLRKLGHDVRLMPANYVKPYVKRGKTDAVDAEAICEAVRRPTMRFVEIKTEDQQAILSIHRTRDLAVRQRTQLANMIRSLLREFGHILPIGIEAVTAFAKRHLDGDHPDMPEIANGMLGIQCYQFIGLNERIEGYSKMIEQHALLNADARRLMRMPGIGPVTASAIVATIGDAKQFRTGRDLAAWLGLTPLNKSSGGKERLGKITKQGDRYIRKLLVVGMTSRAVMAKRAPEKVDLWTAKIIADKPFRLATVAMANKAARSIWAMLTKKQEYRQPAF

SEQ ID NO: 117316 - protein, 343 aa, unidentified
MQSISTIGLDIAKSVFQVHGVDAAGQAILRRQLRRRHVLAFFQKLSPCLVGIEACASSHHWSRELQALGHTVRLMPPAYVKPYVKRQKNDTTDAEAICEAVTRPNMRFVPTKTVEQQSCLMLHRVRHLFIRQQTAVINSIRAHLAEFGIVAPVGRRGVEQLLEVVADTADRRLPEVARACLAALGSQLRALKAQILEFDRRIMVWHRSNATSMRLDAIPGVGPALATALVASIAEPGAFRSGRDFSAWVGLVPKQNSSGGKDKLGSISKQGDRYLRSLFTAGALAVIRYAKIHGTRHRPWLTGLLARRPTKVVAIALANKLARMAWAMMARNERYEEPAALAA

SEQ ID NO: 117317 - protein, 360 aa, unidentified
MFTERTSVGLDVHARSILAHATDWQTGRQATQRLVPTNEEVLAWLRRLPGPAAVAYEAGPTGFGLARALTAAGIRCVVVAPSKLERPPGDRVKTDKRDAARLARLLHIGELPAVRVPTETEEAARDLVRARDDARADLMRARHRCSKLLLRQGIVYSSGNAWTVAHEQWLRGQRFAAPGLQTAFDEALETVLATTARRDRLDAAIVEMAATGPWASVVTRLACMRGIATLTAFGLATEIGDWQRFTGRSIGAYIGLVPAEDSSGERHARGPITKAGNTHARRLLVEAAWHHRRPLRAPSKTVRAHRSMVSPAVRARAEAADRRLHRRWTSLDARGKRATVTVVAVARELAGWCWSLALME

SEQ ID NO: 117318 - protein, 452 aa, unidentified
MRLLNGKQGLRRSQFAKELKGADLEKVLLVPIDVSKVLQKSMILNYFGDVIESPFSFMVNQTGMKFLIQKIEYAKHLYRAEKVFVGIEATGHYYEDIVRILKEKGYSVHIINPASTHEERKQHLTYTKTDDIDLYLIAEVLVGNKATNSKLSAGIFRQLQNLTRARRSEINKRSCIKMELRGIHDQIWREYQGYSVLEDNKLKTTKVFSDFWGKACLHILTHYPHASQILELGETGLRNLSKEHNLKIRKTTIEKLLFAAKESVSKPIEQLSSELFVLKQKLRAYEWHTKNIEAYEKEIERIFAKTEGLLLLTVPGIGLITAAEIFCEMGDLSHYNSASQLIKKAGTNPVIKQSGQNGGYYGCISKQGNSNLRRAIYTAGRCLSTHNEALKPFYNRLKEKGKNIRKIYIAMGNKFIKIAFAMLKNQKPFEWNHPSFNYEQEISKKLSHPLVA

SEQ ID NO: 117319 - protein, 370 aa, unidentified
MTSIIYVGMDVHKANFTLCCYHSETDQVFAVVKMEPDYKNILKYLNQIKKNNEKDCRFLCGYEAGSLGYTLYHQLRGHDVDCVILAPSTMPKTRKQSIKTDKRDAQNIAKCLAYNTYSTVYVPGAEDNAVKEYIRMRNTQKETLKRIKQQLLAFCLRHGKHFIEGKNHWTLKHLAWLKQQDFGNIVLQEAFEEYLILYHQASDKVALFDKRIEELAHQEIYQEKVKKLSCLIGVKTHTALAAIVETGDFKRFTTAKQYAAYLGLVPGENSSGESVHRTSITKAGNSHIRKLLIEAAQNYSRGVVGVKSKALLSRQAGNDPLIIAYADKSNERLKRKFYKIMFRSKRNIAVAAVARELSCFMWGMMTDNIS

SEQ ID NO: 117320 - protein, 351 aa, unidentified
MAIRYIGIDLHTSSCTLAVLGPTGRRLRCWQVDTDQRALVEAVRSVAGELCVCFEEGTLSDWLYEILEPVASEIQVIQPLKRSGNKNDTVDAWAAAEAMRVASKEVTHVFKAPKRYTGLRKAVRGHLLIQQDVVRVKNRIHACYRSRAIQSVNAEIYDSELRVEWLKKLAPAQRQLTELLCVELDGLLEARAQAEHWLLEEAEKVPAVRLLCTAPAISLIRASQIVAIVLSPHRFRTRSQFWAYCGLGIVMRSSSDWQRAPSGRWERTQVAQLRGLNHNKNPVLKNVFKGAAITLLHMPTHPLYASYHRALEAGQKPNLARLTLARRIAAAVLAMWKSNTEYDTNKQQAVP

SEQ ID NO: 117321 - protein, 410 aa, unidentified
METIFDRVAGLDVHKAQVTACVRVPAAGGGREQQVAEFATTVRGLVALLDWLEAHRVTHVAMEATGVYWQPVWHVLEDAFELMLVNARHVKQVPGRKTDVSDAAWICQLMEAGLLRGSFVPPKPQRALRTLTRYRKTQIQERQREANRLHKALEDTGIKLACVASDILGVSGRAMLDALVAGTTDPEVLAELAKGKLRKKLPALREALEGRFEPHHALVIGAILSHLDFLDEHIDRLSDAIEEQLGPFAIGVRLASTITGVAARTAEVMVAEIGTDMSRFPSAGHLASWAGRCPGNHQSAGKRRSGRSRKGSKWLGIALEQAALAATRTKESYLQAQYQRLRPRIGHGRALGAVKHSILVAYWHMFTTGEIYNDLGGDYYQRRDPQRQIRRLVQQLERLGQHVTLEATAA

SEQ ID NO: 117322 - protein, 324 aa, unidentified
MEKYIGIDVHSESCTIAVMNSAGRQLRQQVLDTQAKVLIEFLKGLAGNRYVCIEEGQLAEWLVETLEPYAKEIAVVQPKAHQGHKSDAADAWALAEQLRVRAKGVYVFKPTSQFRPLREANFDSSIYEADQRSAWIRKLPAAYRRRAEWLGKQIDSRVEAHGIAQSWLKEEAEKCPEVERLQTLPGFGPIRAAQVVALVVTPHRFRTTRQFWNYCGLAIVTRASSEWKRDSSRDGWQHVRGNVQTRGLNRNCCSQLKAVFKGAATTVIGKPNPLREHFEQLVANGTKVHLARLTIARRIAAATLAIWKKKEDYDPTKHQSIKPT

SEQ ID NO: 117323 - protein, 412 aa, unidentified
MKDLLEISCGLDVHKEKIVACILTGPLGKPTRSEIREFSTLIPDMIALRNWIVSKNCHHVAMESTGIYWMPIYEILEDAFYGDITLLVVNARHMKNVPGKKTDMRDSEWISTLLRAGLLNGSFIPEKRIREFRDLNRYRKSVIRDITSQKNRIEKFLQSSGFRLSSFISDIFGASGRNIILHLIEHGQIDKTALDSCLKTKTRNRIDEILMSVNGTLSEHQKTFLRILMTHYDSLKKHLAEIETSLEEDMAPFALQVEQLNSIYGISTTASCAIIAEIGIDMKPFKTAEHICSWAGLCPGNNESAGKRKSTSVTKGNPYIKSMLCEIAWVIAGKRNTYLSAWYWRIKQKKGAKKAIVALARKLLVIIYTMLKQGTLFDESCFETRRKHCEQKQLSRYIRELEKHGYHVEAQS

SEQ ID NO: 117324 - protein, 433 aa, unidentified
MGLIVPTTIHPEREDQPLPYEWFVGIDWGSQQHQVCILDRDRRLVGERTVDHDGASLAQRAAWLWTVSAGHPQRVAVALEVPRGAIVEGLVERGFHVFAINPKQLDRFRDRHSVAGAKDDRRDAFVLADSVRTDRPSFRRLQLDAPHLLLLRELSRVEETLLEEFRRSANRLREQLHRFYPQMLQLCSAADEPWLWDLLHLAPTPAHAMLLSEEQVQRVLKAHRLRRLKAPAVLACLQAPALPVAPGTAEAAQAHCGFLLPCLRVLAEQLQTCSQQVSALLSTLAEEPGEGESPSDVAIVLSLPGVGRKITAWLFAEAAQPLAERDYQVLRTHGGVAPVTKQSGKRRQVVMRHGCNPRLRHALYHMARVAMQRDAHFSSVYAALRAKGQRHGQALRNIGDRLLRILMAMLRHRTCYDASRIRCAPVAQMGQKM

SEQ ID NO: 117325 - protein, 310 aa, unidentified
MGEGFVGIDVSKDRLDVAFRPGGEHLQVGNDPRGMARLVRMLERLQPQLVVLEASGGYEAALFERLSAKQLPVALLNPRHVRQFARASGRLAKTDAIDAKVLAHFAEVMRPEPRRMADAETRKLRVLVGRRYQLIQMMTAELHRQSHSLAALREGFVATIRCFKKQIASIDKQLATLIQETPALREKAELLRTTPGIGVVASATLLARLPELGTLDRKKIAALVGVAPFNRDSGKLKGKRAIWGGRSDVRGVLYMSALVAVRRNPPLRDFYRRLRQAGKTPKMALTACMRKLIVILNALIKHRTPWALAA

SEQ ID NO: 117326 - protein, 411 aa, unidentified
MHATCGIDWAEDHHDVAVVDSGARLLGKLRISDDAAGFQDLLHLLAEHGDSPDDPIPVAIETSRGLLVACLRASGRRVYAINPMAVARYRDRHAVSRKKSDHQDAVVLANILRTDVSLHRPLPHDSDLVKAIAVLARAQQDAVWDRTRAHNRLRSHLREYYPAILEAFAAKRERLLSREARTILAIAPTPAEAARLTRHRLRTEVIRAGRQRRIEAETDRLLEVFRRTWLRQPALVEQAMGRQTLALLAQLDAACQACDDLASDTEELFLQHPDAEIITSFPGLAVLTGARILAEIGDDRSRFVQAGNLKAYARSAPVTRESGKSRRVVHRRIKNSRLAATGRYWAFAALTASPGAHAHYNRRRDTGDRYHAALRNLFNRMLGQLHHCLTNHQKFDEAIAFSPSAPLAAAA

SEQ ID NO: 117327 - protein, 345 aa, unidentified
MEHYVGLDVSLKLTAICIVDRTGKIQREGVVHSDPEAIAAFIKSNAPHVVRIGLETGATSTWLWTELKKLGLPVICIDARHAKAALKMQINKSDRNDAVGIARIMQCGWYKEVRVKDLDSHAVKALLVSRALLVKIKRDLENQVRGLLKNLGLVIGPAKMNTFALRAAGLTEDRPELAAAVTPLLKARMAIEQQIAELDRKVMKSARNNAQVRQFMTAPGIGPITALCFLATIDDPGRFRRSRSVGAYVGLTTRRFASGEIDWTGRISKCGDKMLRSYLYEAANVLLTRVAKWSALKAWGIRLAKRSGLRKAKVAVARKLAVILHRMWIDGTDFRWSKETAGQTA

SEQ ID NO: 117328 - protein, 344 aa, unidentified
MDHFAGLDVSVKETSVCIVDDSGRIVREVKVPSEPVALLGVLTNPGYRFKRIGLEAGPLSQWLFSALAEAGLPVICVETRHMRAVLQAQINKTDRNDARGIAQMMRVGLYRPVHVKTLRSQKLRMLLTHRKLLQSKAIAIDNDLRGTLRNFGLKVGVVGRMKFEARNKELVENVPDLAVLVEPLLIVRRVLREQIGILHRRLLAIVRDDDVCRRLMTVPGVGPVVALTYRATVDVPARFRNSKAVGAVFGLTPSKYQSGESDRTGRISRCGDEMVRMMLYEAAQIMLVRSAKWSWLKAWAMKIARHRGMKKAIVALARRLAVIMHRIWVDGTEFRWTREVLAAS

SEQ ID NO: 117329 - protein, 345 aa, unidentified
MKIVGCDLHTRYQQIAMLDKETGELIERRLEHANGEARAFYSELAAPVLVGIEATGHTRWFERMLAELGHELWIGDAAQIRAAMVRKQKTDARDAAHVLQLLVEERFPRIWRPGLEERDLRQLVWHRQKLVWMRNAVGNQLHALAMGEGVCRKKQLFTKKGRVELEALRLGPWASHRRQELLRMLDQLDASLRELDQAGAEQAEQNAAAQRLMTHPGVGPVTSLAFVLTLGPVERFARSKQVVSYLGLNPREHSSGGRQRLGAISKQGNPMMRSLLVEAGHTAARLDQELKQDYQRLKLRRGSGVAKVAIARKLAVRMYWMLRSQASYAQLVRMQGSPWATLVKS

SEQ ID NO: 117330 - protein, 344 aa, unidentified
MDHFAGLDVSVRETSVCIVDDTGRIVREVKVASEPEALLSVLKNPAYHFKRIGLEAGPLSQWLFGALAEAGLPAICVETRHMRAVLKAQINKTDRNDARGMAQMMRAGIYRPVHVKTLRSQKLRMLLTHRKLLQSKAIAIDNDLRGTLRNFGLKVGMVRTVKFEARIRELVENLPDLAVLVEPLLTVRRVLREQFCILHRRLLAIVRDDEVCRRLMTTPGVGPVVSLTYRATVDVPARFRKSKSVGAVFGLTCAKYQSGEVDWSGRISRCGDEMMRVMLYEAAQSMMRSKKWSWLKAWAMQIARRRGMKKAIVALARRLAVIMHRIWVDGTEFRWTREQAAAAA

SEQ ID NO: 117331 - protein, 347 aa, unidentified
MEKAFQAKVQVFAGIDVSARELRVAVQGGVEAGIAVTTFSNKAAGHKALLLYLLRGKTRARICLEASGNYSLDLALTLQAHPQVEISVVNPRRARRFAESLGERSKTDPVDARVLCEYAMRMRWVPWVPPNLAALRLRAITRAIEDLVAMQTQEKNRQHALRASRALPAVVIRELEQHLRYLKLRITRLRREALRLIARHPELNRCFHLMLTTPGLGETSSLQILGELAVLPQTLDARQWVAFSGLDPAQFSSGTSVEKKSRISRGGSRHLRRALYMPALVAIRHEPFVRGFYQRLLRRGKAPLQAVVAVMRKLLHALFAMFRLDQPYDGSKVCPAEFARGTAVVCA

SEQ ID NO: 117332 - protein, 315 aa, unidentified
MVDVPCFVGIDVAKAQLDIAVRPSGERWTVPNDAGGVVPLVERLQTLHPTLMVLEATGGLERVATAALATAGLPVVIVNPRQARDFARATGQGAKTDALDARALAHFADVIRPTPRPLPDAQTQELRALLGRRQPLIGMRTAAQHRLAGTSERLTQDIEAPIAWRNARIATLDDDLETQLRASPLWRDNDDLLQRVPGIGPVCARTFLLELPELGTLTRQQIAALVGVAPLNCDRGTLRGRRTIWGGRAHVRTVLYMGTLVATRFHPQIKALYQRLLAAGKLKKVALTACMHTLVTMLNAMLKHRTAWQAQEVQN

SEQ ID NO: 117333 - protein, 315 aa, unidentified
MSDMPCFVGIDVATAQLDIALRPSGERWAVPNDASGVMTLVDRVQALHPTLIVLEATGGLERAVTSALATAGLPVVVVNPRQVRDVARATGQLATTDALDARALAHCADVIRPTPRPLPDAQTQELRALLGRRQPLIGMRTAEQNRLAGTNARLTKDIAAHMTWLNAAIATLDDDLETILRASPLWRENDDLLQSAKGIGPVCARTLLLELPELGTLTRQQIAALVGVAPLNCDSGTLRGRRMIWGGRAHVRTVLYMGTLVATRFNPQIKVFYERLLAAGKVKKVALTACMHKLLTILNAMLKHRTPWQPQEVQS

SEQ ID NO: 117334 - protein, 376 aa, unidentified
MKNKATPTLHDNDQPNAALAGGNSGARQIFKLGLDVDLNNAVTAIQCGTGEIKRGQSFSRARLLGWVRTQVNAGHTVHSVYEACGFGYTLHHELVGAGAHSLVTTPMRHTAQRRRKNDRMDARELCVRLARWLDGHRDELKPIRIPSSEEQQRRELGRQREFFKRELRRLENHGRALRIEFEHETLPSGWAGPRKWKRLSLQCSSFVREQLEPIVTQIRACRAQLVKLSAALEARVAEQMIPTGLGSLTLALLDGEVCNWHRFKHRKAIGSYTGCCPSEYSTGGVQRFGPIDRQGNKHVRVLLVEAVWRLLKWQPGWHARQKYLARLKHGASLKKKIAVALARQLAIDLWRWRTGRATAAELGWTLKNAMEETTPL

SEQ ID NO: 117335 - protein, 346 aa, unidentified
MLHVGLDLSRKRIDVCLISDQGELIDRFAAIPDRDGLYGLVRRVAAYGEPVRAVVESMNGARFVHDELVAQGWEVLLADAQKVKGLAPLACKTDKIDSRVLAELSFRDLVPAIWLPTLELRREREISRWRLHLVKHRSTLKNRVHSTLITFGHQRHMSDLFGVAGRKLLKELDMPEPWRAHVDASLVLIDDLEARITQIAKELRRSGADHPYVPVLMTAPGFGWITSFTVACELGDISRFASPVKLTGYTGLCPRVKQSGQTDQRGPLSKHGPKYLRWGLMEAAIAASSHPLYRERYQRTKRRLGRQRGPKVAQIDLARQLAEAIWYMLTRNQPFAPAGAINRLAA

SEQ ID NO: 117336 - protein, 389 aa, unidentified
MLLDHPSDGPTAIRTHIGAIFVSLELSRSNWLITSLSPGKGEKMSKHSVTAGDVAGLMKQFADLRRKAEARTGESYPIVTIQEAGLDGFWLHRVLQQNGIESHVVDPASIATPRRRRRAKTDRLDGETLLRALLAYKRGEPRVCAMVVAPSPEEEDRRRLCRERRTLIEERITHVNRIKGLLFAQGISDYAPLRRDRRARLEALRTGDGRELPSHLKAQLGRALDRIELLVDQIKAVEAGQEALLAAARKPASEEAVPDPVTMLLALKGMGANFAAVLWSEAFYRQFANRRQVAAYAGLAATPWQSGGIRHEQGVSKAGNPRLRTTMIQLAWLWIRHQPQSALTRWFKERSQQGRKRAIVALARKLLVALWKYVTQGVVIEGAVMKPAA

SEQ ID NO: 117337 - protein, 352 aa, unidentified
MPTSTTPAITLVLGADTHKDVHVAVLLDQLGRRLAVASFSATDAGNQQLWQWTTRFGVVSAAGVEGTGSYGHRLAQFLVGKSVQTWEINRPDRARRRRRGKSDPVDAENAARAVLAGEVSAIPKDRRGVVGELRALLVTRRSAVKARTQAHNQLQGLLVEADDALRAQLGKLRKAHFARACAQVDPSDGIGRALGSLGRRWLVLNDEAKDLERQIASLVQKHAPKLLARRGVGALSAAQLLVTAGANPHRLVSQAAVAALCGASPVEASSGKTTRHRLNRGGDRAANTALWMIAHVRMVHDPRTRAYAAKRTATGNSRKEIIRILKRYIARELFPLIVEALTSAAATSPTST

SEQ ID NO: 117338 - protein, 340 aa, unidentified
MKVITIGIDLAKSVFQVHGVDTAGEVTVRKKLRRAEVLKFFEGLPPCLVGMEARATAHYWAREIGALGHDVRLMPPSYVKAYVRRQKNDAADAEAICEAVTRPTMRFVPVKSAERQGVLVLHRTRDLLVRQRTMLINAIRGHCAEFGMIAPQGAYRASELIEQVRKAEGSVLPELARSALLMLAAQLDALAVQIHALGRQLLVWHRQDEASQRLATIPGVGIITATALAASVTDPGLFRSGREFAAFLGLVPRQNSSGGKDRLGRISKMGDGYLRKLLVIGATSVIRRAINNTSATGAWVRSLMERKPARVVTVAMANKTARIAWAVLARGDIYRAPAMT

SEQ ID NO: 117339 - protein, 338 aa, unidentified
MQTVIRMGLDIAKNAFQVHGVNAQGKVVVRKQLSRGEVRRFFANVPACLVGIEACAGSHYWARELTALGHDARLMAGQFVAAYRKNGKNDANDAEAICEAVGRPNMRFVPVKSEEAQAVLTVHRARQLLVAERTALGNQIRGLLGEFGIVIAAGLAPLRHGLGRIGTGHRALPVLARETVGELHDRLRLLDARITQYDRKIEALARASEPARRLMRVEGIGPVTATALVASVGNARAFKNGRQFAAWLGLTPSQYSSGGKNRLGRITKRGNVDLRTLLIHGTRSLLRLTAKRRDRKSAWVEALKARSGANIAAVALAAKHARIIWALLAHGTEYQPAI

SEQ ID NO: 117340 - protein, 417 aa, unidentified
MAEATTHVGLDVHKQSISVAVLLPGSAKALQWEMRNEPGEVRRLVRRLRRDGGGGSELLCAYEAGPCGYVLQRQLVREGVACQVVAASLIPRKPGERIKTDRRDARKLAELLRAGLLTEVRPPSEAEEALRDLCRCREDARADLMRARHRLGKMLLRQGLRYVEGKPWTLQHRAWLWSLKLEHAAERMVLEDYLLAVEQVSTRLVTLEAQLGELAEQEPYRERVGWLRCFRGIDTITALSVLAELHGFERFQKPRQLMAYLGLVPSESSSGASVHRGPITKTGNRHLRRLLTEAAHHSRHRPGVGAALRRRRAGQPAAVIALADRAQQRLHHRYSRLLLGRGLPRQKVVIACARELAGFLWAVLFLHPQQPLDAERRPAKKPRTRRSRSGATSSRGDKEEAKRLQVRKRQAPDLARA

SEQ ID NO: 117341 - protein, 349 aa, unidentified
MKILALDLGKYKTVGCAYEGETGRHRFKASGTTPAGLAQLVKEVQPDRVVIEVCNIAGWVCDLLRGQGLEVQVANTSDDAWRWRKVKRKNDRCDALKAAQLSAVNQLREVHIPRLEVRQWRALIAFRQQLVQRRSRIKNHIRDLLLTEGQILPRGASCWTQLGAARLQELAKPFSEVGLHELWRGQLDIELRQLRAVQQEIAAAEAQLDAIAAADGRVALLRTIPGVGPRLSEAIVALLDQPARFHHAREVSAYVGMVPKELDSGETQRRGRITKHGSRLVRSLLVEVAWAGMRYNPWVRQTYHRISGGKKSRKKIAIVAVGRRLLVRCWAMLRDGTRWRPPASEAAPQ

SEQ ID NO: 117342 - protein, 361 aa, unidentified
MHVPIRTKGVNAMPSLAERVDVVIGVDTHKYTHTAAAVAAATGAKLDELTIGTDSDGYAALLTWAQSHPGDRVWSLEGAGGYGAGLARFLAAAGEVVFELDRPVRAARRNGAKSDPLDAVRAAREALSREHLAEPKTDGPRAQLAALMAARRSAVEAATLAQHQLHALVIAAPDSLRALFRGQTTAVMLATAAKLRPHTGWDPTTVTTAQVLRRLARRSNDLTEEAAEHEKAITTLVKAWRPDLLELPGIGPIVAAQVLTAWSHQGRIRSEAAFAMLAGTAPIPASSGMLTRHRLNRSGDRQLNRALHVVALSRTRYDQRTRDYIERRRAEGKTDREIRRCLKRYISRQLYRQLEHGGRLA

SEQ ID NO: 117343 - protein, 320 aa, unidentified
MAQNGRVVVGIDVAKDKVDACIRSLSQRQTFPSSAEGRRQLIAWLRKHKVTKAAMEASGGYERDWAKALREAGFAVRIVDPKRVRSFARSAGRLAKNDVIDAEMIAWFAETFGEAPGQTYDAAREKLVQMVNARQHLLDLQTRTRNRDEHSAPKVVQEMQGRLLKTIALELAKLEAAMAAQVKATPQFAELAEIIESVPGLAEITSAGLIAAMPELGQVSNEAAAALLGVAPYDDDSNRRQGERHIQGGRRKIRNLFYMACLGAATRHNPVLKAFYRRLIAKGKKPKVALVACMRKLIVILNIMIARRQKWNPNLYAVVS

SEQ ID NO: 117344 - protein, 282 aa, unidentified
MNYVGIDHHCQYSHITWLDEKGEVVKSGRVANLRRELEGFFQGARDVQAVIEAGRSSYTMVDVLEELGIETTVAHPKEVKAIAKAKIKTDERDSWKLAHLLRTGYIPEVHKRSRENRSSQRVLRQRAFYVGKQTSVKNRLRALLAQQGEEIRQEVERVEDVFTDKGLKILKGLALPESEAKMVGALLRTYHHLEERVRETNALVKGLYEKMPSAQLIQTVPGFGIFLAVLVAVEIEDIGRFEDGSKFHAYAGVIPSTHSSGERSFDGKIIKEGNRWLRWAAA

SEQ ID NO: 117345 - protein, 387 aa, unidentified
MNATRLSYDIAIRLGQIAVPCPGWPPRTGRKGTDREHAGRMGTGLEWDRPFLFHQARTDTGVFGPDDKHGTAEKMSNDLPQTIGIDISQATLDCHVHPAGIGRQFANTDKGHRALIAWLAQWEIERIAYEATATYHRALEAALAHMPCVKLNPERARRFAQATGTLAKTDRIDAMVLARMAATLQPPVRPARSATQAQLAELINARDGLVRDRTALKNREKNLTIALLKRQCRQRLDQIERHIKDLDAEIAQRIAADPALARRHQILTSIDGVGTLTANQLIATMPELGSLENKQAASLAGLAPVARQSGQWKGKSFIRGGRANVRRTLYMPALVAARFNPDLKAKYHQLIAAGKPAKLAITAVMRKLIVTANALLKADRLWVRNPA

SEQ ID NO: 117346 - protein, 353 aa, unidentified
MAVQVRALVNGYDQFIGIDHHKMRCQVTIKDREGRIVKRGSVPTNRDALAAFFGDRDGVKRLATFEAGPRYRPMHRWLGELVDCSVMANPGRLKLISETAYKDDEIDAEKLADLAMLGMLPEAYACSDEAWDRRQFFRQRAALVKMQTSLKNRIHALVDQHPDALPARPDQTDLFGKLGMSWLGELALPDSDRKRLNQLLEVYEFLRKEIRKTDKEVRELIKSDPRCGWLLTIPGIGNFFAALIIAEVDDIRRFGNAKRFVSYTGLVSGRDESAGVDRGGRIHKRGSKWLRWALVEAAIPATRSNLALKNLYDRICRKRGPKEGPNIAKVAVARKLAEIVYRLLVEERPYEHR

SEQ ID NO: 117347 - protein, 488 aa, unidentified
MKPDSPALYVGMDVSKGYADLHAINHARSVYATGRFDDTREGHERVLKVLTQWREQHPGAAMCVGVEASGGLERNWVRMFHERMPGVTVARLNPLAVKRSLAVKVHRSVTDQGSAAGIATYLAEGRPLHETRWDPRREGLQELYRDIRARIEHLQQTKNRLQSLLPRVHPGLVEFTRSDFAKWLLTVLTRYPTAPALACARVEDLVHIPYFKDEARAVEMIEAAKVSVAGQTDTLTARTVVSLASEILHQQQQIKALQDAMYEELKDDPGIRAMSSITGIGKWSAVCLRVEIGCVERFPTAEALTAYAGLDPVYHQSGDKTRVCRISKHGRRQIRAVLYMCVCSALRSNPVIDVFVNRLIAAGKPKMVALTAAMRKMLHLAYACWISETSFDPNHEQARRARRALAPRPDAAVPATNDEASHVANHPSIEEANTVVHDEATGGTAHAVTVASAKPGTVLPRISAPVSRREAQRRRRNAEEQSRRQRPE

SEQ ID NO: 117348 - protein, 485 aa, unidentified
MSAKKSNQSEARPSGQRPEATKPRPAVDDPGLRIANPHAAGIDVHSREHWVCVPASSALSRPKDHPANLPANVRAFSTCTPDLEQLADWLLACGITTIAMEATGVYWIALFELLERRGFAVMLVDPRQTRQVSGRPQSDVLSCQWIQRLHSYGLLSASFRPDDETCVLRGYLRQRQLLIADAGRSTQHMQKALEQMNVKLTETINDITGVTGMLILKAIVRGQRDPQELAKYRNEHCKCTPAEMARALQGNWREEHLFALRQALKTYEHLRKQLAECDGCIKTYLKALADKSGGAVLPKKTPRRSSKATEPTFDARDLLFRWSGQDLTVIEGIDQSTALNVLAEIGIDMSKWPTENHFVSWLGLCPQHRGSAGKIKNRRLRGGANRAARAFRLAGQGCHHAKNALGAFYRRVQARAGGGKAVVATARKIACRAYRLLKYGEKYVRQEMAAYEAQFRIKTTKGLAKKAASLGYKLVPVAEEEAQAT

SEQ ID NO: 117349 - protein, 359 aa, unidentified
MKAQVKQIDFTGQNIYAGFDVHKKSWKVTIMAEDVYYKTFTQPPNPEILYNYLKNNFPGGNYHSAYEAGFCGFWIHDKLSSYGIKSIVVNPADIPTTNKERVQKEDKRDSRKIARSLSSGTLIPIYTPSIQTQKNRSLMRTRAMLVKDFVRYKNRIKSFLFFYGINIDEAFADPKKHWTQRFMSWLESLEIDGGSGKESLQVLISECKNLRTLIFKVTKQIRELSQSATYQEEVYLLKSVPGIGIITAMTILTELETLDRFKNLDKMCGYIGLVPSTKSSGEKEKSGNITPRGHGVLRNAVIESSWTAIRKDPSLLKSYLIYCKRMDSNKAIIKIAKKLLSRIRFVLANNKPYECLIEK

SEQ ID NO: 117350 - protein, 314 aa, unidentified
MSTEYFVGIDVSKDTLDVCVYPTQDAFRVPNSPHGLDELTRRLKLIEPRLIVFEATGGYETLAVSSLAAAGLPVVVVNPRQIRDFAKSIGRLAKTDGIDAGVIAHFASAVRPELRPMKDSASQELTGLVTRRRQIVGMIVAETNRLQAATRRNRRDIQRHIRWLQKRQAQIDDEIKREIKNGPLWRTTDHILQSAPGVGPATSSMLISCVPELGQLNNKKIACLIGVAPLNRDSGRYKGRRTIWGGRAQVRSVLYMSALSAIQYNPVIRQFYQRLTEAGKCFKVAIVACMRKLLIILNAMVRDQTKWRHCENNG

SEQ ID NO: 117351 - protein, 345 aa, unidentified
MIVIGCDYHPSWQQICWLDTLTGETQEKKLEHMSGEAERFYRGLPGTALIGVESTGNCQWFVELVATLGHELWVGDAAKIRASEVRQQKNDRRDAALLLKLLVEGRFPRIWTPSSEEKDQRQLLLHRHKLVRMRVQVRNELQHLAMNKGITRGRKLWSKAGEKLLCELPLAPWASRRREDLFKIRSLLNEQIALLDEAVKKVAEGNEKARLLMTQPGVGPITSMAFVLTMGDVSRFKRGKQVGSYLGLIPREKSSGGRQRNSSISKQGNRFMRMLLVEAAQSVVRYDAEFRKEYLHRCHHSKKGVAKVAAARKLAVRLYWMLRTNTGYPEIVRVESSSRVPLDVR

SEQ ID NO: 117352 - protein, 338 aa, unidentified
MKLYCGIDLHSNNSVVVILDEADKVIYQKKLNNDLNMILKQLSVYKDRITAIAIESTFNWYWLVDGLMEAGHTVKLVNTAAVQIYSGLKYSDDEDDARWLAHLLRLGILPTGFIYPREERAVRDLLRKRSQLVRQSTTNILSLQNILARNTAHSLSSYRIKKLDDERAEQLIDDPNITLALKSNLNVIRCLQNAINEIETTVLQQTRIRNEFKQLITVSGIGEILGLTIMLESGDMSRFAKVGNFSSYCRCVKSGRFSNGKKKGEGNRKNGNKYLAWAFIEAANFAIRYNDKVKAFYQKKKSKTNGIIATKAVANKLARACYHILKDQVPFDVNKAFT

SEQ ID NO: 117353 - protein, 330 aa, unidentified
MDNFYFIGVDVSKKKLDFCVLFEGKVLREEQVSNHQQAVARLIGELKNDLEMDNEQFLICAEHTGQYTFPLVCACKSVECKLWLENPSQIKYSSGMQRGKNDKVDAKRIAIYASRFGDKVKYYDRPTEEIERLKQLERERALYVTDLAKYKGQMYDQKDFMPAALYRKKTKRMKGLIQELQAAIDAITAEMEKIIGSTEVLARQMELLMSIDGVGKVVALNVIIETEAFSRFDNPRKFCCHAGVAPFSYTSGSSQHSKNKVSHRANKNIKKLLHMAAVSVTHRKEGELKAYYMRKEGKNKMSVINALRAKIVARMFAVIKRNEVYTPIYS

SEQ ID NO: 117354 - protein, 347 aa, unidentified
MNDVTLIGIDTAKSIFHFHAVNKNGKQIYQKALRRPKLLEFLANSPQAVIAIEGCSSCHHWSRKFSALGHSVKIISARKAAQFRSRNKNDYNDAKALTKAARDEDTYFIPAKSSQQQTIQAIHKIRDFTMRQRTATVNTIRALLTEFGIVFPLGVSRLRLMLPNIIDDLENELPQAVRDLLNEQYALFKQLSDQIKSCEKRLQCCLKDSPQAQQLKQIPGVGLIISTALTYMIPDPSIFKNGRNCAAWLGLTPKEHSSGGKQRLGGISCEGNAYLRKILVQGAQAMLQRAHKRQDPLSIWASRLKAKKGTNLAAVALANKITRIAWAILHQQTDFNYKPKFKKMNTN

SEQ ID NO: 117355 - protein, 348 aa, unidentified
MAVYIGVDFHARQQTISYLTTEDGEIKRQQLDHGEAQEVRKFYQQFRGQQVLVGYEASGYAAWFEELLEELGYELWVGHATAIRTFARRRQKNDRRDADLILDLLVRGDFPRIQRHSKVSRAVLQQLRYRQRLVKMRTMVINSLVFMGASRGVSLRTQLKSRRGLARLKQLALPEPLGQQRTELCQLLLEMQVKIKTVEQWLEEQANSDQRVQRLRTQHGIGILTGLGLVHTLAPVERFSNARKVTAYVGFDPVEDSSGERQRIGAISKQGSRLLRGLLVEAGQVAVRRDRDLAVVYKRIWLRRGHAKAKVAVARRLLIRAFIMLRDEIDYAEFQRRGVAARSSRATA

SEQ ID NO: 117356 - protein, 332 aa, unidentified
MKKRSKSQKSQKPTVKTKVIQERVTIGMDLGDKTSRYCMINHEGEILREGQVTTSKAGMAEAFGPLGRARVAIEVGTHSPWVSRLLKELGHEVVVANPKQVKLITESSRKDDRLDAQTLARLARIDPQLLRPVQHRSDKAQGALMVIRVRAALMSVRTSLVNTARGLAKSMGERLPKCDADQMGVLQASSLPPRLRQVLEPLLKEVESLTEKIKDSDREIEQIARKDYPETALLQRVGGVGPLIALTFILTIEDKGRFQKSRDIGCYLGLRPRRSDSGQSQPQLRITKEGDPYLRTMLVQGAHYIISRRGPDSDLKRWGLHNARQEPKKVAA

SEQ ID NO: 117357 - protein, 364 aa, unidentified
MHYVNNTELSSHEETRSQFNGGRGAIKLGIDVHQDFYVVVEQVGGSNPKPPQRFQKEAFLHWAGRLKRKSGAEVHAVYEACGFGFSLQRKLSALSIQCHVICPQRLDEHNRRVKTDGLDAKALCLRLDRFVQGNRAALAIVRVPTEEEEQLRAIHRQREQLVKARKQLEAQGRSLLVNHGLEPVQNWWKPRTFAALQVSDWIKELLQNSQPILIALQEKISALTAQLQSGAAPEQPRGLGKMTSVIIDREIGDWNRFSNRRQIASYTGLCPGEYSSGNTRLQSCVTKHGNPRLRAALVELAWRLVRFQPNYKPIVKWRATLAKGALASGAARKKAIVAVARQLAVDLWRIKTGRLRAEELGLIN

SEQ ID NO: 117358 - protein, 486 aa, unidentified
MKSIYVGMDVSKGYVDIAAVSDAGSVLPYQNTFDDTIKGHLEFQRLIETIEAKYFPAHIIFGLECSGGLERNWLHLIRRTFPGRKVYSLNPLAIKKFAERCLHRNVTDRKSAMDIANFLRQGLRPQDKTYEPQLDGPKSLYRHIKNEISRIASWTNELQSILVRAHPELVQYCRSGINRWVLMILDRYNTADDLRYAKPEDLSSIPYVTEERAEKIIKEAGQSVASQTDAMTKLTIQTISRDILQKQKQVEELKEELIRYIGDDETIKLWCTFPGIGLWTATCLRLEFGGMERFYSSKAAVAFTGLDPIVQKSGDTEKNKGMSRQGRRQIRGILYPAILSAIRCNPVIHDFYAKLRGNGKTHKQAMVACMRKSVCILYAMAVKGSSFDAKYHSQLCREWELKKARKEAEKSSPIITKENDSTKEEAVSLSAPITRREAKRRKERMSKSRGAGSSPCLTCDSKTGEVMELSHTGTSLSMRDLATTSR

SEQ ID NO: 117359 - protein, 345 aa, unidentified
MELHTIGIDLGKTVFHLVGLDPRGEVVVRKKFSRTQLLRFTANVHVGLIGMEACGGSHFLGRALREQRHEVRLIPAQYVKPYVKTNKSDYIDAEAIAEAVARPTMRFVPIKTDDQLDLQSLHRVRERWVMRRTAVINQIRGLLLERGITLRKGRHHVDAALPLILEDADAKLSGAVRLLLAQLKLDLDQLSVRIDEADEVIKKIADENEACRRLVAIPGIGPVTATALIAAIGNGGAFHKGREFAAWMGVVPREHSTGGQQKLLGISKRGNSYLRRLFVQGARAVLQQRTKQSSGLSAWLAQLTSRTHRNVAAVALANKLARIAWAVLAKNEQYRPSVVPDVAAA

SEQ ID NO: 117360 - protein, 370 aa, unidentified
MHETITSYVGLDIHKDSIAVAVAEAGRSSARFLGTTAPTIKALCSALKRCGPVDQTLVVYEAGPCGYGWARYLIAHGWRCEVIAPAHITRKPAEKRIKTDRRDALLLARESRSGNLVKVIVPDARDEAMRDLSRAREDANAARMRARLQLKAMLLRHGHVYHGKTSWTLAHQRHLASIRFEHPAQEIAFNEYRQAVTDAQERLDRLTEALQTQCEQWRMKSLVKALMCMRGFDCIAAITFIAEIGDLSRFEHPRALMAYLGLVPSEFSTGHSRHQGSITKSGNKHARRIMVESAWTYRFKAQVSREIQVRQQGQPKAVRDIAWKAQLRLAKRYRSLRMGRKVHQNKVCVAIARELAGFVWDLARQVHIAA

SEQ ID NO: 117361 - protein, 341 aa, unidentified
MTEVSTIGLDLAKNVFQAHAASASGAILFRKKLRRDQVLAFFATQPRCLVAMEACASAHDWAREIAKLGHAVRLIAPTYVKPFVKRQKNNAADAEAICEAAQRPTMRFVAVKSEAKQASAVVFRTRDLLVGQRTQIINAIRGHLAEYGLIAPQGPSHVDQLIAQIEDPNSGIPDPARSCLAVLVETLRALQGKIVALDTEIAARAKRDDGARRLMSIPGIGPLIATAIEALAPPVETFRSGRDFAAWVGLTPLQRSTGAQERLGKISRMGERTLRRLLIIGASGVVRWARRKGVPAGSWLARMLARKPPMLVIVALANKMARIAWALIAKGGVYRAPAVAA

SEQ ID NO: 117362 - protein, 442 aa, unidentified
MSESLTVASEPEWAAFAAIDWADQKNFWRLIPAGSQRPEQGELENTPEAVEVWAATLHQRFGGRPIAVCLEQSRGALVYMLAKYAHLVLFPVHPTTAARYRETFCTSGAKADPSDTASLLDLLLRHRERLRQLRPDTTETRLLQFLVEARRRTVDEATRQSNRLTDCLKLYFPQILRWFGDVASPLVGDLLKRWPTLEELQRAHPGTLHKFFHQHNCRGEERIQERIQSIYQATSATQDAAVLEAGAMIARGLVALLATLRSQIVVFEQRIEELVRSHPDGALFASLPGAGAALVPRLIVAFGTHRDRYESAYQLQCYSGIAPVKEASGKTEWIHFRFTCSKFLRQTFHEFASHSIGRSEWAKAYYEHLRNDQKKSHHAAVRALGYKWIRIIHRCWKDRQAYDEEVYLRSLRRRGSLFAGALGLATGGAWKTDAGFQKFSAE

SEQ ID NO: 117363 - protein, 458 aa, unidentified
MTVPKKKGGAPLPTSLPAIRPGVAGLDVGSAQHWVCGPAREDGKPNVRVFGTTTDQLKELADWLSDQGVESVAMESTSVYWIPVYELLEARGLEVLLVNARQLHNVPGRKTDFSDCQWLQLLHSCGLLRGSFRPGEAITRLRALQRQLANLVAERTRCIQWMQKALDQMNVQVHRAVTDLTGVTGMAIVRAIVGGERDPARLARHRERRCQKSAHEIARYLTGTWRDEHLFNLASALRLFDVLETEIAAYDAQLLKEVEALQPPDRQAESVPPHPNPAKEKAIKARGEQQARTTLWRFAGVDLTRVDGISAGAAQVILTEVGPNLAAFPSEDHFVSWLRLCPRTPISGGKPLKKRRNSLGANRIAGVLRMAATSLHRSKTALGASFRRIARHKGGAVAVFATARQLARLIYRMLRYGHDYVDIGEKAYDRRFQIRRLAALTETAKSLGYTLVQNVAAG

SEQ ID NO: 117364 - protein, 411 aa, unidentified
MQAIIERCCGLDVHQETLVACLLVGVPGAQPNKEVRTFRTVTRDLEALRDWLRQAGATHVGMESTGVYWRPVYAVLEGHFELIVGNAQHMRNVPGRKTDVKDSEWIADLVRHGLIAKSFVPPRPLRDLRDLLRYRRKLVESQAAERNRLLKLLETANIKLASVASDVFGVSGRAMLRALIAGETSAEAMADLAKGQLRRKRADLILALDGRLKEHHRFLLAMQLRRLEAIEADIAALDLRIGERLEPYSAPHALLMQIPGVDWVVAAVLIAEIGVDMSVFLSVYHLAAWAGVCPGNHESAGRQKSGRARKGNIHLRTILVGAAISASRTKGSYLKDKFHRLKARRGGLRAALAIAHKILVSAYHMLAKNLPYRDLGEAYLDQIGHTRTVANLKRRLERLGYRVILEPNARA

SEQ ID NO: 117365 - protein, 296 aa, unidentified
MAIHPGGESFRITNNPEGHRALIKRLKGFDIARIVFEATGAYHRLFQQALVEAGLPWVKVNPCQARRFAQATGKLAKTDRCDALMLARMGAVLDLETRAPVSKTVEALKELVNARDALIKDRVAALNRQAIAVSPLIKRQLAQRLRQINGQIEAIDRRLKTLRNADSDLCQRFDILTSIPGVGEVTANVLVVETPELGRLEHAQAASLVGLAPVPRDSGQTHGKRSIRGGRPRARQALYMPALNTIRLNPEFKAKYEAMVKAGKPAKVAIVAIMRKLLILANALIRDRRKWAPANP

SEQ ID NO: 117366 - protein, 400 aa, unidentified
MISVGVDVSKGKSTVCILKPYGEVVSSPFEIHHVEKDMEDLDNLLSKLDGEVRVVMEATGIYHLPVVTFLHDKGYFVSVVNPFAMKKYAKDNSIRGAKTDRLDSIMIANYGIEKWFKLQRYEGTEETYAELKLLGRRYRYYMELHVKALQELTHVLDYVLPGIKKMFNSWNEANGKDKLSDFVERFWHFDLITSMSLEKFTEEYIAWAREKKYHRSRSKAEAVYELASSGIPTLSSSTPSTKMLVQEAVSVLRAVDSSLSLILTRMQELAKSLPEYSVVREMGGVGNVLAVKLIAEIGDVRKLHNAKALIAWAGIDPPPYESGQFIGSKRRITKRGSSTLRKVGYEVMRVLKSHSAPKDDAVYNYILKKESEGKSKKHAKIAGLNKFLRIYYARVMEVYQ

SEQ ID NO: 117367 - protein, 325 aa, unidentified
MFALKDENGKRVFCKRLPNDLPSVLEALKPYGKHIEAIAVESTYNWYWLVDGLKEAGFNVRLANPAAVDQYDGIKDVGDRTEATFLAELLRLGILPEGYIYPKEERYARDLLRRRMLLVRHRTAMILSLQGTFSRQTGRTFSWKAMSKLDAEAFPDLLGADELLLFTVGQQGDTVRFLDQKISLLEKKILESAKLKPEFERLLTLPGVGKILGLTIMYETGDIGRFASAGNYTSYCRCASATRRSNDKKKGENNRRNGNAYLCWAYVEAVHHALGCCPPARSFYDRKKAKKNGAVATKALASKWTKAAYHVLKGQANFDVRRVFG

SEQ ID NO: 117368 - protein, 492 aa, unidentified
MRRPKHPPVQNKSSAHHARSNPAPRPPRTQPVTLHVLNPNAAGIDVHADMHMVCVPADRVTPVADDAACQPANVRRFGANSCDLRAIADWLAECGVTTVALESTGVYWIPLFELLESRGFEVWLVEPGQLSRCGARPKTDVLDAQWIQRLHSYGLLLPSFRPADSVMALRGYHRQRQMQIRYAASHAQHMQKALEQMNVKLTEVVSDIMGLTGRRIIAALLAGQRDPVQLAALRDPNCKNDVVTIAKALEGTWRPEHLFALRQANDLYQFHHQQIAQCDEAIQSELTKLPNRAGDKPFTAKPRRCGRKPNDLNFDACAPLFRALGIDLTEIEGIDVGTALVILAEIGVDVSRFPTEKHFASWLGVCPRQHESNHTKKKRGPRKGKNRVAIALRMAAQALGRTQSPLGLFYRRIKSRIGGKGAVTATAHKLACLVYRMLKYGREYARRSLAEYEQKMREQSERSLHRKAAALGYELVAKHRSPAEPPSAPTLA

SEQ ID NO: 117369 - protein, 405 aa, unidentified
MPRIAVGIDVAKGKSEVAVADQSLEILLMPYQVKHTVLELNALADTLRRLGGELRIIMEATGHYSEPVARNLYAAGFFVSVVNPYLVKDFGNNTLRQVKTDKADAVRIARYGIHYWRELRRYTPADDVRARLKELNRQFLFYTDRKIAQQGHLVCLLDRAFPAAHKLFTNRPKADGRLKWVDFVKEFWHCDIINQMSEDEFAEAYRVWCRENNYEFKPRKAFDIYVKSFGLIPTLPKDEHTKSLIAIAANQMTAISQDVERLRGELCDLAQRLPEYPVVTGLFGTGKSIAAQLMAEIGDMRNYKRIKSLPAFAGVDPGQKQSGVYSVRSVVITKNGSCHLRRTLSFAMDVYVLEKPAGDPVYEFYKKKRAEGKHYFVCKVAAANKFLRIYYARVKEYLDGIEDEK

SEQ ID NO: 117370 - protein, 349 aa, unidentified
MSIVAELFDSVVGVDTHAATHTLVVVDATTGAERHRSTFPTSPAGLTRAVSWIRRRTIARVLVVVEGVGSYGALVADALAAAGMEVCEPSPIPPHHGQGKSDDLDAARIARSVLGVDIAMLRHPRSDTGPRVALRVLVIAREEMTADRTRAINALTALLRTIDLGMDARRPLTTSQVTTITGWRARQEATWLATCRGEAVRLARHIRDLDHQIATNRAQLDTLVAAHAPELTTLTGVGSVVAATVLVAWSHPGRIRSEAAFAALAGTCPIPASSGNTIRHRLNRGGDRRLNRALHTVVLVRMRVDPGTRAYVARRRAEGRTTKEIMRSLKRYVTRQLFRALPAAPLDTT

SEQ ID NO: 117371 - protein, 354 aa, unidentified
MPHNTSRLEAVATIGIDIGKNTFHLVGLDRNGAIVLRQKLSRRQIEARLANTPPCLIGMEACVGAHHLSRQLKAYGHDARLMPARYVRPYSKGQKNDFRDAEAIAEAVLRPTMKFVAIKTVEQLDLQALHRVRERLVCQRTSVINQIRAFLLERGIAVRQGPPALRSEIPIVLSMTDKLSPRMIQMIEALCADWRYLDERIETVSDEIKTLSEQDDGAKRLMTVPGIGPIISTATVAAIGNGDAFSKGRDFGAWLGLVPRQMSTGGRTILGPISKRGNRYLRMLFVQAARAVLLRPQSWEKHGLKSWIEAAARRLNRFKLAIALANKIARIVWGVLHGGRNFEIRPMKPASQAA

SEQ ID NO: 117372 - protein, 316 aa, unidentified
MAMRVSKSIVGVDVAKAELVIYLADPDLLTSITNEKPAIKRWLKTLPGPTAIAVEATNIYHVDLVELAHESGHDVYIIDGFQLSNYRKGVGGRSKTDASDARLLARFLKNEGEDLRPWTPPPAVYGKLQSLLRRRASLIQAKTSLTQSWANDASLKAVFTTFVKSIDRLDLLVQKKLKEILREAGLLEEVARCQAIEGIGFLTATALVMAYNRGDFTSGDSYIAFLGMDLRVSDSGQKNGRRHLTKRGCSEVRRLLHNAAMSACRSNAWKAFYSHHLNCGKATTQVLVMLSRKLARIAFALMKNQSEYQSKGAVIA

SEQ ID NO: 117373 - protein, 485 aa, unidentified
MKGGGRERPRVTARGLLTRGPFPAELPEAQQQSVPVGKRTALEVQEKVAPPEGQYKANLPFTRLGRESTRPEGGRVGYYLGVDWADQTHAVWGVDEDGTKIAARTVPHTAEGLSEWGRELDEWRAQGIALWAAIERPEGRVVDFLLDHGVVVYPVNPKALDRARDRFRQSGAKSDPFDARVLADFLRTDHAHLRALQPSSDAAQELKLLAEDYQRHIRQQNRLVNQLTATLKAYYPRALEVTELTTALAREFLQAYPTPEAVAVLTARQWQRWARARRLSEARTRALWDVLQQPQLPVPAHVVRAKARLMLTLVAQLTPVVAAVGDYREAIEDFFASMPAAQWVRTLPIGNHGITAPTLWARLGDAPGRWESFRHLQAHAGTVPVTKRSGKQLRVVHFRFACDKALRYVVDHVAFLSLHSSEWARAYYDEQRARGHSHRQALRALGAKWLKIIFVMWQRQVLYDEQYHLATMTRQQLRQRQKEIA

SEQ ID NO: 117374 - protein, 349 aa, unidentified
MTHYIGLDAHSKTCVFVVLDETGRQVAYREVRTCETEIVKIVDSVSGKKELVFEEGNLSKWLYTLLKDKVDRLVICHPAYVNRRMGPKDDRPDAQHLAQQLRGNFLMPVYHEDNFFSELRAVVSAYSDLVKDTVRCQNRYKALFQSHGSNTEGMRMYRDKTRLKELGAESNRFIGEAIHEQIHLLKEQKKEFLSRFKEYEKAHREIGALSSIPGIGEVRACIIAAVVLSPERFPNKYKFWAYSCLVKYESRSAGVSYGKKNVPGNRILKNVFMGAAKTVLAGDGYFRKLYDSLREKGVDHSAAKKNVARKIAAIALATMRKGTNYEENYEDKKKPRAVESSLKHSVAQV

SEQ ID NO: 117375 - protein, 340 aa, unidentified
MKITTTGLDIAKNLFQLHGVDNGGQPVLRRKVRRDQLLAVLGGFEPCLFGIEACATAHYWARQLQGLGHEVKLMPPAYVKAYVKRNKNDAADAEAICEAVRRPTMRFVAIKSADAQSVLMLHRARHLLVRQRTAQISALRAHLAEYGIVAPKGRAHVRKLVDILKEGEAEIPELARQTLLLIADMIDGLSQQIRQIEIELLAWHRANAACRRLETIPGIGFITATALVATVGDASVFGSGRQFAAWLGLVPKQHSSGGKERMGGISKMGDRYLRNLLVIGGTAVVRYTRRKQTTVSIWANQLLDRKPARLVTVAVANKMARIAWAVMVRNENYRASPATA

SEQ ID NO: 117376 - protein, 346 aa, unidentified
MHYIGMDSHISTLDFAVVNEAGRLVKASRVATSVNGFMEFVKTVPPPRTIYMEEGTLAAWALETCVRFREKLVITDAKENHWIGSSGQKNDSIDALKLAQLARGGYIKEIHHPVGQRRRFRELMIAYHDAVRSTTRIKNKIKAKFRQNGIQCTGVTVYSETHREEWKRKLPQEATLLLILDGLWRQLGQSEQTEKEILAAARAQAKHYPEIKHFEAITGIGFISAATISAILETPYRFADKRKVWMYAGLGLMKRSSGGKTYSEKLSTDYNRLLKYSIKQAAEAAIQAKDNPFRRKYLDMTLLHGIAPHRAKLTIARDMLATMWAMWRKGEKYRPEIREKAACKQG

SEQ ID NO: 117377 - protein, 356 aa, unidentified
MAIPCDYDKEVDMVTTIGIDPHKATHTAVAINETETVLGELTVPADRDQTKTLLDWAQNLDGEGRVWAVEAAGGLGYLLSQQLIAHGEHVVDVPPVLASRVRVLGSGRSDKNDPNDARSVAIAALRQPGLAVVRREDHTQVLRMLAKRHLELTALRTQAACRLHAVLAQLRPGGMGRRLSAKQASRMLQGLRIVDPVGEQRRLTARVHLADIRRYDREIKTNKVLISKAVAASKTTVTDVYGVGPIVAALLIGYTGDIGRFASPNHYASYNGTAPVEYSSGGKKKHRLSMRGNRKLNHAIHMAAVTQIRHDTPGRIYYDKKQAEGKTKKEALRALKRRISDVVYRKLVADQQTKTR

SEQ ID NO: 117378 - protein, 359 aa, unidentified
MIIGCDFHPRFQQIAFVDDETGECGEARLSHPDEAERFYRSLAGVGVRIGMEATGHYRWFRCLMSELGHELLLGNASLIRASCVRKQKTDKRDARHILSLLVEDRFPAVWQPGLENEELRYLLQHRAKLIRLRSQVKNQLDAMAKNEGLLRTRVWSSQRREGIEGLPLTGWLGRRRTDLFGVLDELERRIKPLDEAVEAAAESHPQARLLMTHPGVGPVVSLAYVLTIGDWQRFPRGKQVGSYLGLIPAEASSADKRRLGHISKQGNAELRWLLVQAAITAQRYDPSWHRQYVRLSMTKHHGVAKVAIAHKLAVRLYWMLRSGQDYRQVMERGSHVGQSAESRGSVHADPMIGRPASSR

SEQ ID NO: 117379 - protein, 447 aa, unidentified
MKIVYPICCGVDVHKKFFVATIITTTNGILPHYQKERFSTFNNQILAFKAWLLENNCRDVCMESTGKYWVPVFNLLEDSINVTIANPKWVKAVKGNKDDQKDSKWIGDLFRLGLVPGSFIPSKEIRILREFTRYRSKLVCCKSSEKNRYQNVFTVCNVALDAVVTDMFGKSASSITDYIISSDTFDLKHCATLLYGSLKNRAEEVMASINGFLMADAQKSRARLIRDHCDYLLAHIEKLDVMINQLALPLESFIKQLCFAPGIDRTSAITVLSEIGTDMSQFGSSQRLCSWAGLTPGNNESAGKKKSVRVSRAGVYLKPMLVQIAHAAVKDQKNPYYGIKYERISKRRGKKRAIVAIARMILTAIYHMLSTGEVWNPCDLHKVDIPAELREKELQKSIRRAANLLVAQGVVELGAIRIPLGACAKSILLKQPATAKYQSCRSMTHIH

SEQ ID NO: 117380 - protein, 426 aa, unidentified
MTYRIAGIDVHKRMLAVVIADVAVEGQYQFERRKVGTSPSEMCRLADWLVAEQVEEVIMESTAQYWRPVWATLEQRWRPKRLQEGTGARSGQLHLAQAQSNRGAAGRKKDFPDAERLVKRLVAHELKLSFVPDVEQRLWRTIMRRKHQLTRNRVQFQNRLECLLEEAHIKLSSLVSDLLGKSARQMLQAVAEGATSPEAIAALADHRLRATAQQLCDALGACRDIHPVYRRLLKMALEELKLIEEQIDKLDQEMASLLSAHQDVVQRLTEVPGLGVDSAQQIIAEVGPAAAAFPSAKHLVSWVGVCPGEEESAGVNYSHRSPKGNRQMKGLLNQVSNAAVKTKGSIFEFIYRRLVPRLGHAQAIGAIAHRLCRLIWIILHRAIRYEERGPAVSRSKTERRAAKMIRELRRLGYHVEPMTCQTGVSV

SEQ ID NO: 117381 - protein, 321 aa, unidentified
MQKDLLYCAIDVSKDKLDVDGAALALPAQLGNDHGSFRQLIKAAKKYPGPVQFVFEATGPYHLGLALALWEAQIPLSVLNPARVRYYAKAQGKAKTDPLDKQVIGDFARSFRPPPTPAPDPVRRELTELLQRRDGLISTRAAEQNRLGQCRHKIIKGQIRRLMAQLAEQIGQIDGLMKKLVNSSEELKAKVKALCQVKGVGHLTAVTLLITLPELGTLGRNRIVRLVGLAPLNDDSGTQKNKRYIQGGRARPRCALYMPALSASRHNPVLKEVYERLLKAGKLKKVALTALMRKLLICLNALLRKLADQHPSPQGLCLAKP

SEQ ID NO: 117382 - protein, 351 aa, unidentified
METAYDGRQIVGMDLHRRRSVLVRMTEDGRRLGTAKITNSPAELRREIARAGKSPRVVLEAAYGWYWAADTLEAAGAEVRLAHPLGVKGFTYRRVKNDERDAADLADLLRMGRLPEAWIAPAEVRELRELTRYRQKLVGLRTSCKDQVHAVLAKLGIPVTCPDIFGVAGTAWLDQLGLPQPYAGKITSLRQLTAGLTTEITMLSEVIADLLAGDRGYQVIQQLPGIGPVLAAVIIAEIGDVTRFGNAARLCSWAGLTPRHRESGTKVTRGHVTKQGSRLLRWALIEAVQRIPRDSVTGAIKDAIIARRGKEARNIAKVAAARRLLTLIFYGLRDGQIRCLSPAPAPPPPAV

SEQ ID NO: 117383 - protein, 350 aa, unidentified
MEYIAFDSHKRYTFASVEEHTGNVLRDARIDHPRGAITEFLSAWKTGTEVAVEMTGNWYWIVDEIEAAGMVPRLVHARRAKMMLASVNKTDKLDAHGLNRLQRTGTLPTVWIPPAQIRDLRDLPRTRMVLSRERTRMKNRIHATLAKYGLSIEGASDAFGKRGREEIGKLLGLLPPHSRFSVERLLEQLDVVQDHIQQFEGRMKKVFAANRELELLQTLPGVGSILAVVILLEVGEVGRFADASRLAAYSGTTPRVHGSGDKFRYGQVRSDVNRYLKWAFVEAANVICLTHRRCPSRHVSQLYLRIRQRKGHQKAVGAVARHLAEATYWILKKGEPYRQPHRKAVSSTKG

SEQ ID NO: 117384 - protein, 410 aa, unidentified
MDIVFERCAGLDVHKETVVACVRQPAEQKRQRRGEVRTFSTVTRGLSELAEWLQSERITHVAMESTGVYWRPVYAVLEEKVEILLVNARHIKGVPGRKTDVRDCEWLAQLLECGLLRGSFVPPQAIRDLRDLTRFRKSLVHERADHVNRIAKVLEMANIKLSSVATDIMGKTGRAILEALIAGQDDPQYLAQLAQGLLKKKTEHLREAVTGRMREHYRFMLRQQLKLIDALDGQIGELDAQIEICMLPFAEAYRLLQTVPGVAQRAAQAILAEIGVDMSRFPSAAQLASWARLCPGNHESAGKRQPVSTGHGNRWLREILQEVAWAAARTKRSYYSAFYHRIRGRQGTKKAIVAVQHSLLVAIWHMLSRSTVHQDLGADYFAHRDKERIRRHHVRRLQQLGYEVVIQEAA

SEQ ID NO: 117385 - protein, 457 aa, unidentified
MGNARARKIPAQLVEDEDYQLRHERVAGIDIAKAKADVCTRLPPQREGGRRASRVEEVPARAREILDLAARLIADGVELVVMESTSDYWRIWFYLLEAAGLNVQLASSCHARQLAGRPKTDRLDAQWIARLAEMGLLRPSFVPPPEIRALRDLTRTRLQLVRDRTREWQRLEKLLEGALVKLSSAVSSLARTKTARAVLEAIAAGERDPKALAALAAPQVKGGRAAVEEALDGMMPGGHHLMLIRVHLDHVTFPDRSVSAVEDEIRAALDAIPAAWGISADGEPGPDPGPDAAALPAAERLAEIPGVSPELARAIIAETGLDMARFPTPARLVSWAGLAPVTRQSGPRSRKPKKGQGDDYLKGYCTQAVTGAARTGTFLGERVRRLSRRLGANKAKCAVARSILVIIWHLLADPSARFTDLGPGWHQRTTDRDRKIRAHLRQLQALGLDVTITPAAA

SEQ ID NO: 117386 - protein, 407 aa, unidentified
MDVLYPRCAGLDIHAQTVVGCVRIATGAAVRREHRTVATTTRGLLELAQWLASHQVTHVAMEATGVYWKPVWHVLEGPCTLVLANAMHIRNIPGRKSDVNDATWIADLLALGLIRSSFVPPAPIQELRDLTRTRTQFVREIARHTQRLQKTLEDANLKLTEVISDVLGVSGRAIVQAVIAGERDADQLARLAHPRLEATRAELVEALTGRVTAHHRFMLALHLQQITTLEQAVADLDKRIEDMLRPFRAAVDRLVSMPGLKTRAVAVIIAEIGTDMTRFPTAGHLLSWAGLCPRLDESAGKRRSTRTRKGTPWLKTTLVQVAWAAARTKNSYFHAQFLRIKSRRGPKKAILAVAASILTAIYVMLRDDTRFLDLGDQYFAHSDKARLTNRLVKRLRDLGVEVEIKVA

SEQ ID NO: 117387 - protein, 341 aa, unidentified
MKKFIRIGVDLAKNYFQVHALESENGPAVTRKLKRSKMHEFFSQIEPCLIGMEACGSAHYWARELKAMGHEVLLMPPAYTKPYVKRGKNDAVDADAICEAMSRPGMRFVPIKSAEQQATLMLHKTRELLINQRTMSVNALRSHLSEFGIVAAKGIGRVDELLDLAESDATLPAAARAGVKVLAQALEGLDKAIDDLEDEITSADAQNEMVRLLDKVPGIGKLIASVIAASVPDPSVFKSGRDFAAWLGLTPRQNSSGGKQTLGGITKQGNRYIRKLLILGGTSLLNVLGKRKGALRDWIVGLLAKKPARLVTVALANKLARILWAMMKTGECFRTEMFAKA

SEQ ID NO: 117388 - protein, 341 aa, unidentified
MLEVNIIGLDLAKNVFQAHGSDASGAVLFRKKLRRDHVLRFLAAQPACTVAMEACAGGHYWAREIAKLGHDVRLIAPGYVKPFVKRQKNDAADAEAICEAAQRPTMRFVAVKSEDQQATAMVFRVRDLMVRQRTQTINAIRGHLAEFGLVAAQGLFHVAKLIAEIEDKDSTIPEAARQILSLVVEQLRSLDEKVAMLDREIARRARNDAEAKRLMTIPGIGPISATAVAALAPSAKTFKRGRDFAAWLGLTPLQHSSGGKQKLGETSRMGERTLRRLLIIGASATVRWAMRKGATADPWLSRMLSRKPPMLVIVALANKTARIVWALMAKGGTYRTPALAG

SEQ ID NO: 117389 - protein, 313 aa, unidentified
MLNEIIVGIDAAKDKFDVHISPLGKRFSCPTTKAGLRSLSSRLSRTKPSLIVLEATGGYEFPIASALFKAGLPVSVVNPRRIRDHAKAIGRLAKTDSIDAAVIADYGTANRQHCRPFILRQEQALKEVVTRRGQLVAERTAEMNRLEQAGNPVVVKSIRKNIKNLSEDIKQLQQEVAKLVKENQAWRRRDEILTSCVGIGPVTSSVLISHLPEMGEANRHEVSALAGVAPFNDDSGTKQGHKSISCGRSAVRAALYMATLTAIKRNPVIKEFYQRLIKKGKPPKVALVACMRKLLIILNAMVTTDTTWRPKTT

SEQ ID NO: 117390 - protein, 343 aa, unidentified
MKLSRVGVDLAKNVYQLHGVDRRGKTIWKRRLRRGQWLQALLDKTDSGCEVGMEACTGAHHWARELQSRGYTVRLIAPQFVKPYVKSNKNDANDAEAICEAMSRPNMRFVTVKSVEQQDIQATHRVRSEIKDQRNAKANQIRGLVAEYGLVAPTTLLALRRAIPCWLEDADNGLTDYFRSLLHGLWGDLVALLDRMTELNQQIKTLADSNEVTQRLQQLRGVGPLVATALVATVGTGEQYKKGRQMAAALGLTPRQCSSGDKQRLLGISKRGDVYLRTMLIHGARAVVSQAKHRDDRLSLWVTSISKRSHPNVAAVALANKTARMAWAMLRNEANYDPDFAFS

SEQ ID NO: 117391 - protein, 342 aa, unidentified
MNIHTIGIDLGKTSFHLVGLSERGEVVVRKRFSRAPLLRFTANRKVHVIGMESCGGAHFLGRALQEQGHEVRLIPAQYVKPYVKTNKSDYIDAEAIAEAVGRPTMRFVPIKSDDQLDLQSLHRVRERWVTRRTAVINQIRGLLLERGITVRKGRRCIEAALPGILEDADAKLSGTLRLLLAQLKLELDQLAQRLEEAEALIEQTVQENEACQRLVKVPGIGPVTATAVIAAIGNGAAFRKGREFAAWLGVVPREYSTGGKQKLLGISKRGNRYLRKLFVQCARAVLQQRTKQTPGLKAWLEKLTSHTHRHAAAVALANKLARMAWAVLATGEAYRPPLPAAA

SEQ ID NO: 117392 - protein, 477 aa, unidentified
MDRAAQPFRWSQQEELRMNPERSKSRDGAKMPMVHPNAAAIDVGATMHMAAVRADRAPEPVRSFGTFTADLHRLVDWFTECGVETVVMESTSVYWIPIFELLDARGFTVFLVNARDAKHVPGRKTDVSDAQWLQRLHSFGLLRASFRPKGHIAELRAYVRQRERLLEYAASHIQHMQKALTEMNLQLHHVVADITGATGLRIIRAILAGERDPAALAGLRHYSCHSSAETIAKALTGSYRAEHLFALEQALALYDAYHEKASACDARIEAVLKELSIDRRRGHGSAPRASRRRNRTDQANALTFDVREALFALLGKDITTIDGLGPYLSLKLIAECGDDLSSWPSAKHFASWLGLAPSNKVSGGKMLSSRTRRSGGRAAALLRLAAVTVGRTDTALGAFYRRLSSRIGKAKAVTATARKIAVLFYNAVRYGMDYVDPGASSYETRYRARVVSNLHRRAKSFGFVLQPLEPKVGAAVS

SEQ ID NO: 117393 - protein, 354 aa, unidentified
MSRKLNSEIAVIGIDIGKNSFHLVGQDRRGSIVLRQKWSRGQVEARLANLQPCLIGMEACVGAHHLSRKLKALGHDARLMPAKYVRPYSKGEKNDYRDAEAIAEAVQRPTMKFVATKTADQLDLQALHRVRQRLVSQRTGIINQIRAFLLERGIAVRQGLHFLRAELPGILAKRTDVLSPRMLRVIEDLAGDWRRLDERIESLSTEITRVVEQDPACQRVMTVPGIGPIISSAMVAAIGTGDVFAKGRDFGAWLGLVPKQMSTGDRTILGSISRRGNRYLRKLFVQAAWVVLVKVGPEQWERYGLKSWIEAAKKRLHHNVLAIALANKLARIAWAVLHKGRAFECVKTNALRPA

SEQ ID NO: 117394 - protein, 437 aa, unidentified
MFLKQTMKPIVKQNTEPDPAPDVAAFLAIDWADEKHAFCLQGVGQSKIETGTLEQKPEVLGPWLAQLRERWGGRPIAVALEQSRGALIHALMAYDFLVLYPIHPTTVAKYREAFKSSGAKNDPLDAGQILEILTKHQDRLHRLNPDTVETRLLGRLVEDRRKAVDLRTTHVQALGANLKEYYPQALELTHDNLKSRLACDLLIKWPTFEDFQQAKPSTIKRFYYGHNVRSPEVIEQALTLAQKSQALTTDPAIVESGRRLTQMYAQLLQALSPAIADYDQRIQRVFDAHPEAQLFSDLPGAGPVMAPRLLAFFGTDRSRYARAFNVQSFTGIAPVTKSSGKSKVVHARAACPKFDRQTFHEFSRLSVTHCQWARNYVQYYTDKGKKYHTIIRALAYKWIRILFKCWQQRTPYNEHKYMETLKLRGSIFATWHLQKKS

SEQ ID NO: 117395 - protein, 316 aa, unidentified
MNKKEQVVGGIDVSKAMLDIAVLPNGEVLQLPNDASGIEELGKRLQALAADLVVMEATGGYETAVASALVASGFRVAVVNPRQIRDFAKATGRLAKSDRIDAQVIATFGQAIEPEIVRLPDEEARELEALLVRRRQLVAMRVQESNRLSLVQGAMRKSIKAHIEWLEKEIAKLDIDLTAGLRKSPAWRAKDELLRSFKGVGPITSGTLLVALPELGQLDRRAIAALVGLAPFNCDSGIMRGRRSIYGGRSHVRTLLYMATTTAIRRNPVIRTFYERLKSRGKPHKVAMVACMRKMLTILNAMVRQSTPWTPGIRPV

SEQ ID NO: 117396 - protein, 472 aa, unidentified
MARAARRQGGSQLRKGHSKGARSAQLEQLNLNAAGIDVGADAHWVAVPPDRDERPVQCFGAFTADLYALAEWLRQCQIETVVMESTGVYWIALFEVLEERGFDVKLVEAHYARPVPGRKTDVKAGQWLQELHPSGLLHAAFRPDAQVCVLRSSLRQRGVLVASASRAVQHMQKALEQMNLTLTEVVSDITGKTGMEILRAILAGERDPQRLALYRARRCKHDQATIAKALEGHCRAEHLFALQQALEQYEFLQQQLQACETQIEACLLTFVTHVEVDSPPPAPARKRRSRQRHAPGFDVQVYLDAMTGVDLTQIDGIDALTALKVISEIGRDMTRWPTGKHFASWLGLCPGNKLSGGKRYRMRSKPTANRAATALRLAAQGLVHSHSALGAYYRRMRTRLGAPKAITATAHKLARLVYSMLRYGTAYVDAGQQAYEQKYRDRVLTNLQRRAKAFGYQLVHVEDRDGGVASTL

SEQ ID NO: 117397 - protein, 397 aa, unidentified
MYIVGIDIAKRKHEAAVIDGEGAVIIKPFSFTNNCSGYNRLLAMLAKAKLPLDEVSFAMEATGHYWLALFTRLQKEGFRVQVINPVQTNSIRSFYIRQAKTDPRDALLIAEVIRFGHFSESTLHPENIYELRELCRGRHAIVSMQADVKRKVVALLDQVFPEYETAFTNMFGDTSMAILQTCPTPKELSEMRLEELCHLIEVSSHKRFRMAKAQELQELARNSFGFAMAGDVFSTMIRLYAKHLDFLKQQVREMDRKIAEIMDTLDTPITTITGIGPTLGAYILSEIGDISRFSSAAKLAAYAGIDPTMRQSGEYNGVRNRMSKRGSPYLRHAIWLAASSTVLHDPALKLYFQKKRDEGKPYMASVGHACRKMVSIIYAVMRDNKAYTPCIPNEISA

SEQ ID NO: 117398 - protein, 359 aa, unidentified
MENVIKQSVGIDCSKDELVCCLSMLQQDLTIKNVSQQTFKNDQKGFKSLLKWSEKTFLQNLEHLFVVEATGIYHEKLAYFIEENGLQISVVLPSKISHYRKSMNLKTDNDKTAAIGIAEFGLVKKLESWKKPEPILRTFRQLLRERAQLQSMLIEVKSMQHAHTTGVIYSEKTTKRFKKQCEFYKSQVKDVEQEIEELLESNPEIKAKVKTICTINGVGQLTVLTIAGETDGFNLIRNKRQLVSYAGLDVVDKSSGTSVRGKSRISKRGNKWIRRALYFPALTAVKHSPAFKSDYARIVKNTAIKMKGVVAIERKLLILIYTLWKSEEAYDPDRYQKIGSAITADPTELDQVRSIEIQR

SEQ ID NO: 117399 - protein, 352 aa, unidentified
MRILALDLGKYKSVACDYEAETGQHSFATIVTNPKALHDLIVDREPDRVVIEICSIAGWVGDLVRSLGIELQVANTADERWRWRIVKQKNDRRDALKAAQLSAVNQLSLVHVPQIDVRQWRALIAYRHHLVRRRTKIKNHIRDLLLREGQLLPRGRSAWTQVGMAALEGMVKPLAEMQINELWRGELGVELAQLKELQTQIISVEAKLDELAAADGRVQLLRTIPGVGPRLAEAIVTMFDDPTRFRTAGQVSSYIGMVPKSFDSGETARAGRITRHGHRLVRSLLVEIAWAALRHNRWARECFQRISGGKKSRRKIAIVAVGRKLLVRCWAMLRHQTPWRGSVAEVVATGSR

SEQ ID NO: 117400 - protein, 314 aa, unidentified
MEQPSSPSFVGIDVSKDRLDVHILPAGQAFAVARNGEGLDHLVTELRTRAPTLIVLEATGGFEVTVAAVLAGAGLPLAVVNPRQIRDFARATGRLAKTDALDAQIIALFAERIRPEPRPIADAESQVLAELVARRRQVVEMIGMEANRLRQARSPRVRRTIEATRKTLEAQLVELDKDIDDSVRGSPVWRAADDLLTSVPGIGGITARTLIADLPELGRLDRRRIAALVGVAPVNRDSGQMRGHRAIAGGRTAVRNALYMAALSAVRWNPVIKAHYTRIVAAGRPKKVALVACMRHLLTILNAIIKTASPWKTA

SEQ ID NO: 117401 - protein, 388 aa, unidentified
MLLDHPSDGLAAIRTQFGAIFVSLELSRSTWLVTSLSPGTGEKMSKHRVKAGDIANLLKLFADLKRKAQARTGESYPIITIQEAGLDGFWLHRCLLQEGIEGHVVDPASIATSRRRRRAKTDRLDGETLLRTLLAYKRGEPRVCAMVVAPSPEAEDRRRLCRERKTLIAERVEHVSRIKGLLFAQGISDYAPMRRDRRARLEALRTGDGRLLPAPLKAQISRELDRLELRLDQIAAVESEQEALLAEARKPTGETAAPDPVTMLLALKGMGPNFAAVLWSEAFYRQFANRRQVAAYAGLAATPWRSGGIEREQGVSKAGNPRLRTTMIQLAWLWVRHQEQSALTQWFKAHSQRGRKRAIVALARKLLVALWKYVTAGVVMEGAVMKTA

SEQ ID NO: 117402 - protein, 397 aa, unidentified
MYIVGIDIAKRKHEAAVIDGEGTVIIKPFSFTNNCSGYNRLLAMLAKAKLPLDEVSFAMEATGHYWLALFTRLQKEGFRVQVINPVQTNSIRSFYIRQAKTDPRDALLIAEVIRFGHFSESTLHPENIYELRELCRGRHAIVSMQADVKRKVVALLDQVFPEYETAFTNLFSDTSMAILQTCPTPKELSEMPLEELCHLIEVSSHKRFRMAKAQELQALARNSFGFAMAGDVFSTMIRLYAKHLVFLKQQVQEMDRKIAEIMDTLDTPITTITGIGPTLGAYILSEIGDISRFSSAAKLAAYAGIDPTMRQSGEYNGVRNRMSKRGSPYLRHAIWLAASSAVLHDPALKLYFQKKRDEGKPYMASVGHACRKMVSIIYAVMRDNKAYTPCIPNEIST

SEQ ID NO: 117403 - protein, 310 aa, unidentified
MIINPGFVGIDVCKLHLDVFDSANGRSERLVNTQEALAPLLARWQEAGVFVLFEATGRYDAALRGSLAAAGISFARINPARAREFARATGTLAKTDKIDARMLAAMAQCLAPEPSPASDREREALTLAHKRRDQLVHMRQQERTRRSECSDPALRADIELHLQWLDARIAQWDEQIRRLLACSEQLAGLAHRLRSIPGIGPVAATTLIALMPELGSLQPKKVAALAGLAPFNVDSGQFRGVRKIKAGRKRIRDALYMAAIAAARSHPRFKTFYRRLRDAGKPAKLAIIAVARKLLVTANAILRDNVAFQG

SEQ ID NO: 117404 - protein, 342 aa, unidentified
MDHYVGIDVSLESSSICVLNASGKIVQEAKISSELEPLIVFLRSLGLQLTRIELEAGPLSQWLYARLKSEGFSVELLETRHVRDAFKAMAVKTDRKDARGIAQLLRLGWFKPVHCKSAAAQEIRALLTARKLIQSKLYDIEMSLRGILRGFGLKVGPTTPKRFAGRVAELTRDHPALRTVAQALIKVHEVLLQELDALEKQVRSIARSDRRVKLLMTTPGVGAIVALTFVAAVDDPGRFSSSKRVGAHFGLTPKKYQSGETDVTGRISKTGDGGVRAVLFEAAHIVLTRPVKGGALKSWASKLAKRAGMKKAKVALARKLAVILHRMWSNWTAFDAVKAASV

SEQ ID NO: 117405 - protein, 308 aa, unidentified
MQLSTTYIGVDVAKAWIDIFNPDTRQHARCKNDPMALADWINTLKDERVVFEATSGCDAALIANLSKAGVGYVRVNPLQARQFARAAGVLSKTDRVDARMLSSMGQALQLDASRPPEPHRERLSILHARRGDVVSMIVAEQSRLSSAHEQWVRKDIASSIKLLTRRRERIQAEIDLHIQSHADLAEQTKCLQSAPGVGPQIACTLIANLPELGKTDRRAIANLAGLAPHAHESGRQTGKRKIWGGRSQVRKAMYIAALVAIRWDKHWKAVYLTMREAGKPAKVAMIAVARRLLVRLNAMMKTGTIYSN

SEQ ID NO: 117406 - protein, 403 aa, unidentified
MTKRFAGLDWASRTHAICVIDERGSVLAHFEVNHDSAGLHELCRRLKAMHVAAVAIERPSGLVVDALLEAGLQVVPIHPNVVKATRPRYRSHGGKSDASDAYLLADLLRTDGHRFKPLAPQSDEIRALRATVRGRDDLVATRVQLANQLRALLESFWQGAAEVFADVDSPIGLAFIQRYPTPEAASRLGAKRMASFCAQHAYSGRRTPEELLTRLHQAPAVPLGEMEMEAKGELALALARVLERLVEQIRLVTGRIEHSVAANEDGRILMSFPRAGRICAAQILCEIGSVRERFDDVERLAAEAGVTPVTYKSGKSKAVAFRWACNHRLRAAITCLADNSRHASRWAASVYDEARSRGCDHQHATRILARAWLRVIWRAWQDRQPYDPERHAAAMLHLAAQGG

SEQ ID NO: 117407 - protein, 375 aa, unidentified
MQNKVRFLGLDVHADTIAVAIAEPDGEVRSLGTIANRAESIRRMVKKLGSTEQLRACYEAGPTGYVLYWQLAELGVNCEVIAPTLVPMKSGDRVKTDRRDAERLARSHRSGDLTAVWVPDAGSEALRDLVRAREAAKQDQLRARHRLSKFLLRSGQRPAQGMKAWTQPYVIWVKQIHFPQVAQESTRLDYLTEVEHMGERVVRLEEAIEEAVKLASPEIQEVVKDLQALRGIAQISAVTIAAELGNISRFEGARQLMGYSGVVPSEDSSGKRLKRGSITKTGNAHLRRIAVEAAWCYRLRPGIGPVLRKRQDGVPEEIKEVAWKAQHRLYKRYCKLAAAGKDHRKIITALGRELLGFIWAVGTKAEAAVKQQRAA

SEQ ID NO: 117408 - protein, 309 aa, unidentified
MDRFIGIDVSKDRLDVCIRPSGESFAVAHDGDALAALVERLQALAPRLVVLEATGGYETVVASAIAAAHVPLAVVNPRQIRDFARATGKLAKTDRLDAAAMAHFAEAIRPPVRPIPDAQAQALSELVARRRQVIEMIVAEGNRRRRASQRRVIRAIDRHLALLQTELSELDGDIDNAIRQSPAWQAEADLLQSVPGVGPATLRTLIAELPELGCLTRRKIAALVGVAPINRDSGTLRGRRMIAGGRRAVRAALYMAALVASRANPVIAAHYRKLRGAGKTGKQALVACTRKLLVILNAILRDRKPWQPA

SEQ ID NO: 117409 - protein, 423 aa, unidentified
MSYRIAGIDVHKKMLAVVVSDVEVDGEFQFERVRYSSSPEHLRFLAEWLITQQVEEVVMESTAQYWKPVWEALERYWKPICRKRDGAGPKSGTLHLAQAQSNRGRRGRKKDFPDAERLVKRLVADELVLSFVPDTEQRLWRTVTRRKYQLTRNHVRLQNQLEGLLEECHIKLSSLVSDLLGASARRMLNALAEGETNPLALAAMADKNLRATQAQLCDALGACTELKPIYRRLLKMFLEELQFIDQQISKLDQELANLLSRHHDAVVHLAEIPGLGVDSAQQIIAEVGAGAATFPSAKQLSSWVGACPGEEESAEVSKSHRSPKGNRHMRRILNQAANAAAKSKGTIFEIVYRRLVSRLGHNQTIGAIAHRLCRLIWIILHRGVRYEERGPSVNAKTRRHRTNRMIRELRNLGYRVEPLVTTV

SEQ ID NO: 117410 - protein, 395 aa, unidentified
MKKHSYIGLDVHKESISIAVAEAGRRGEVREQGSVGGSLIALERALRKLKQPGVELHCVYEAGPCGFVIYRRLKQLGIDCAVVAPSLIPRKPGERVKTNRRDAIKLARCHRAGELTVVHVPDARDEAIRDLCRARTDAVRDQRRSRQQLKALLLRLGHHYTGKSSWTGAHLRYLRELELSHPAQKTVLEEYLLAVSQAGERVVRLSGQIELHVATWRMKPAVEALMALRGIQIIAATVLLAELGDLSRFAHPRQLMAYLGLVSSEQSTGTSRRQGAITKCGNQHARWFLIECAQHYALPPKVSKELSRRQQHQPRWVKELSWKVQTRLHRRFWMLLQRGLCRQKVVVAVARELCGFIWALLRELPPILDPDPQHSRLQSLGNHGSPSPSSKGNSY

SEQ ID NO: 117411 - protein, 346 aa, unidentified
MEHYAGIDVSLELSSVCVVDTHGKIVRETKVASEPEALVAFFASLGFAVKRIGLEAGPLSAWLHAGLKRAGFDTVLLETRHVKAALSAMMVKTDRKDARGLAQLIRMGWFRPVHAKSMGSQEVRALLVARKQLLGRLIDVELSIRGILRGFGLKVGVVTRKGFEGRIRELVTGHVTLERIAGAMLSARATLKVEYEKLHKIVLTIVREDAVCRRLMTVPSVGPLVAITYKSAMDDPDRITKSKAAGALFGLTPKKYQSGEKDVTGGITRAGDEMVRTALYEAANVLLARITRFSKLKRWGMDVAKRRGSKRAKVALARKIAVILHRMWVDGTTYRWTDAQLTAAQA

SEQ ID NO: 117412 - protein, 348 aa, unidentified
MIIVGIDPHSRSHAAAAIDEQGRLIEGIEIDAGAVGLAQLGAWIEAFPQPRVVAIENARGYGLAIVRMLLAQREELVDVPATLTCDGRRSSGQCGKNDRGDALVVARIGLRDQARLPRLDATVLDDELKLLADARDQLIVEAGRWRNRAHALLRVAAPGYQAKTGALASAGSVRRARTLAKRAAQQHDPLCGRLAVQALDRLTALERDAGMLEREIRDLLLVRGCTHLIAIRGVGPVVAAKILGETRGVGRFRSAAAYAAHTGTAPVPASSGRVRRHRLNRGGNRQLNRALYTIAMVQARWDPTARAYLERKVAEGKSAAEARRCLKRHLSNVVYRALLADQYAPALT

SEQ ID NO: 117413 - protein, 341 aa, unidentified
MNIKRIGIDLAKQVFQVHGVDGQEKVVVRKKLSRAQMLMYFQKLPPCLIGMEACSRAHYWGRELQKMGHTVKLMAPQFVKPYVKSNKNDANDAEAICEAVARPTMRFVAIKTIEQQDIQAVHRIRSELVQQRTAKVNQIRGLLGEYGLVVGQRIDVLRKALPLILEDAENGLTVDFRTLLEGLQQDLITLDQRVDDMDKKIKLLASSNEDAKRLQQIPGIGPITATALISAIGDGKQFKRGRDLAAWLGLTPRQHSSGGKDRLLGISKRGDAYLRTLLIHGARAVLKVVGNKEDPRSRWIQNLCGRRNKNIAAVALANKNARIVWALLTKKTDFLPEGKPA

SEQ ID NO: 117414 - protein, 430 aa, unidentified
MAKAAKTKKKTKGEWDEGLFALNRNAAGIDVGNADHYVAVPIGRDPEPVQTFGSFTSDLHRMAQWLKACGVETVVMQATGVYWIALFQILESYGFQVNVVNARHTKTLPGRKTDVLECQWLQKLHTFGLLNNSFRPPEEIQILRTYLRQRENLVTAASTCIQHMQKTLTQMNVQLANVISDISGVTGMAILRAIIAGERDTERLATYKHNRVRASREEIARSLEGNWREELLFVLEQSLQLYDLYVEKIAACDQQIERHLKTMTSKLEPVQPSDPIALSAPREQPRFNLKDQLCRITGVDLTRVAGLEVQTVQTIISEVGVDMSRWNTEKQFASWLGLCPDNRISGGKVLKSGTRHVVNRAATALRLAAWSLIRSQSALGANFRRLRSKLGAPKAITAMAHKLARLIYRMMKFGADYVDKGMAAYESKYR

SEQ ID NO: 117415 - protein, 458 aa, unidentified
MAHRKKKIGAQLVEDEEYQLRYERVAGIDVAKGKADVCTRLPPAREGGRRVSRTEEVAATVTVILALAVRLLADGVELVSMESTSDYWRIWFYVLEAAGLNVQLVNSSHARQLAGRPKTDRLDAQWLARLTEMGLLRPSFVPPAEIRALRDLTRTRLQLVHDRTREWQRLEKLLEGALVKLSSALSSLARVKSARVILEALAGGERDPRVLAGLAARQVRAGRAGIEQAMEGMLYGDHHGRLTRIHLDHITFLDRSIAAIEDDVAATLDAIPAAQGIDAAGTRSPDPGPGAAVLPAAERLAEIPGVSLDLARAIIAETGLDMTRFPTAAHLVSWAGLTPVARQSGPRSRKPGKGHGDSYLRGYCTQAATGAATTNTFLGERLRRLSRRLGGSRARCAVGRSILVIIWHLLASPEARYTELGPGWHARKTDTDRRTRSLLNQLRALHPDSDITITEPAA

SEQ ID NO: 117416 - protein, 372 aa, unidentified
MGHHTEAFVGIDTSKLRNAVAIADSGRDGEVRYLGEFPATEAAIRKLVAKLAAKCCHLTFCYEAGPTGYGLYRLLKSLGHDCLVVAPSLVPKKAGDRVKTNRRDAVSLAKLLRADELTAVWVPDERHEAMRDLSRARQAVKKDLQGKRQQISSLMLRLGRIYPGKTTWGPAHMRWLMAQKIEHREQRIAFEELLEGIRQEGERLERLENAIREVVPEWSLSEVVAALQAVRGIDLIAAVGVLAEIGDLSRFQNPRELMGYLGLVPSESSTGDKVKRGGITKAGNGRARRILVEAAWSYRYPPRVSRDKQPKVEAAPRRVREIAWKAQTRLCGRFRSLERKGKRRTVIATAIARELSAFIWAINRELMPHRPA

SEQ ID NO: 117417 - protein, 354 aa, unidentified
MVRKGVGERQTRMLGIDVSKDKLTCALCDRNTRAILWEKSVPNTPEGFTLLLEQIPPQTPWVLEPTGRYGQAVVMAAKQAGREVRLAPPRKAKQFLLAVQSRAKTDPLDSKGLALFGLACDLPTYPVKEADVETVDQLLSARKLLAKSITNFQLQQQALPQATILAPVLSDLRQHLADLDKQIEARVKQTPAFEAATRLDAVPGIGPVVAAAVTSRLVSKSFAHPDQFVAYCGLDIHVRDSGKRKGSLGLTKQGDAEMRRLLYLAAQANLRCKESPFKDQYHRERAKGLSSSGALCAVARKLAKVCWSLHKHGTTYESSRVAVQAAPKGTTQPPHENQNPRPLEKKTPSLDMQP

SEQ ID NO: 117418 - protein, 338 aa, unidentified
MIKAIVGIDVSKDTLDVQLATLSDEHKQVFSSKNQVKNTIQGYRKLLRWVRQCLGAETVAPWYVMEATGVYHENLAYFLTEKGHRVAVVLPTKMKHYFQSLDTKSKTDRLDARGIAQFGLERELDLWKPPSAQMRALKALTREYSTLSEQATQIKNQIHAKDHSHSPVPQSLDRMQEHLELLEQQMADIEQEIEQIVRQDDDLNSRIRNITSAKGVGLMTAVRVVAETNGFALISCAKQLASFAGFDSVLKQSGLRAGKSAISRKGNRHLRAAVFMPALASVRFNPVLKKIYERLIRTKANKKVALVAVARKLLLLIYALWRSHAPFDPDYELRKSVA

SEQ ID NO: 117419 - protein, 368 aa, unidentified
MVTAHSSTAPLKYVVGIDIAKDTFVACFGRIDTRQSLTFGKETTFANTPAGFAALLVWTAKQQVVAAPQWFVMEATGVYYEELAYFLADNARTLSVLLPNKVKHFAQSTEQKSKTDQLDARLLCRLGLERALPAWQPPTPALRQLRQLRQLRQLRQLRQLRALSRERQSLTQQAARLKTQRHAYQHSYQPDARTLARLTTRMQLLAQQLNAVDQDLAALLDAEPELARKLAHLTSVPGIGLTTAIVVVAETNGFVLIENERQLASYAGLDVVQRQSGLSAGATRISRRGNVRLRTALYLPAVSSLRFNPQQMAFYARLRARQSNGKPGVIAVMRKLLLLCYSLWKNDCVYDPHYHPAHCLEKEVAPAS

SEQ ID NO: 117420 - protein, 379 aa, unidentified
MKAIKLYLGLDVHKDSITIALAHEGRQGEIRLFGTITNDLHALEKALARIRKAHLGAHLEVAYEAGPCGFGIARRLHQLKVSCLVAAPSLIPKQPGSPFKTDKRDARTLARLLRAGDLVAVYIPEPTDEAIRDLCRARTDAVDDLRRCRQRLKSFLLRHGYRYQGQAHWTQAHMRYLRELVLPHPAMKTILEEYLQGIDAAHARVQRTEASMAQLLESWRLKPAVQALMALRGFQLVAAMITVSELGDIHRFAHPRQLMVYLGLVSMEDSSGPRQRLGSISRCGNGHLRWLLVECAEHYSLAPKISKELSKRQEAQPPHIRALSWKAQNRLHLRFLRLLGRRLPRNKAKVAIARELCGFVWALLRTQDCYRLGAGGAAS

SEQ ID NO: 117421 - protein, 346 aa, unidentified
MEHYVGLDVSLRTVAVCIVNQLGKVLREGMVACEPEAIADFIALHAPQAVRIGLESGATSTWLWTELKKLGLPVICIDARHAKAALKMQINKSDRNDALGIARIMQCGWYREVRVKSFDSHAIKALLTSRALLVKIKRDLENQIRGLLKNLGLVIGRAKMNVFAVRATELISDRPELAAAVEPLLLAREAIGRQIADLDGKVRRLARGCEEVRRFMTAPGVGPITALCYFATIDDPTRFKRSRSVGAYAGLTTRRYASGEIDWTGRISKCGDAMLRSYLYEAANVLLTRNPKWSALKAWGLRLAKRSGLRKAKVAVARKLAVILHRMWVDGTEFQWSAKEAAPKAA

SEQ ID NO: 117422 - protein, 348 aa, unidentified
MTLVGCDLHSRKQQVAVLDTTTGEVLEQELAHDGDAVERFYRALRPPVTIGIETTGYTQWFHALMHRLGHTVLVGEAGKIRAMVVRKTKTDRRDARHLLDLLKHDRFPTVWMPDPDTRDLRALVAHRVRLVRMRTMVKNGLQAIALNQRLALRSALWTQRGLAQLRGLALPPHTQRRRDDSLELLAWINVRIDQLDAQLAAVVDADPRARRLLTHPGVGPLTALTTVLVLGPVKRFPDGKHVVSYVGLAPAINASADKHHLGKITKQGNALLRWVLGQAAPQAARADDELRRRYVAVLHRRGRPKAKVALARKLLVRLYVMLRDQIDYEEFRRRGRAGQASRAPVTVT

SEQ ID NO: 117423 - protein, 345 aa, unidentified
MDQISRIGMDTSKHIFQLHGVNAAEAPVLRKKLRRKEMVTFFEKLAPTVIGIEACSASHQWARLLQSFGHSVRLIAPQLVKPYVKRGKNDAADAEALCEAMSRPAMRFVPVKTAEQQAALMLVGVRDRLIRNRTQLTNAIRGYAGEFGFTAAKGKAHLDPLLERIQADESLPALARELFVAQAKEYAQLQAQIDEVEARLMAWHRADECSRRLAKIPGVGPIGAVLLKMKTPEPELFRSGRQFAAWVGLTPKDHSTAGKVRLGVITRAGDEGLRSVLVVGATAVIQHVRRGGRATCWLTKLLKRKSPKLTAVALANKMARIAWKLMVTGENYAAKSAPAALVGAG

SEQ ID NO: 117424 - protein, 317 aa, unidentified
MTQAITTTAGIDTSKLKLDIALHGGAERWQVANALPGWRQLAANLARAGATRVGIEATGGYERGVVEHLRAVGFTVLVLQPIQVKAYARMHLRRAKNDALDAALIAACAAAVEQPKIAPDPRLVELAGYMTFLEQIEEDIARFKIRLEHIHEPRLRRLVTNDIVRLKARRAAQMLLIERQLRAHHDLARRLDLVLSIPGLAVRTGLAIIIRMPELGRVSREEVAALAGLAPFDDDSGKSKRQRHIAGGRARLRRSLYAAALPAAFRWNKALIDLYARLTASGKSHKVALIACARKLLIYANTVVQRGTPWIERTVAT

SEQ ID NO: 117425 - protein, 334 aa, unidentified
MDKQAVAGVEVSADVLVVALDNGQLRACEFPNNALGHQQMLRFLHKHATQVRACMESTGLYGLDAALVLHSQPGIEIMVANPRSVRHFGCAMMQRSKTDPIDAKLLAEYARRMPFQPWQPPSLKGRQLCALSRAIHQLTEMNTMQKNRLHAASVTETTPKIVLRELQRSLTHQQRSIQRLTREALQLIASDAELQKRFELLLSFPGIAQTSALQLLGELVLLSPDFNVRQWVAYAGLDPRQYSSGKSVEKKVRISKVGNRHLRRALFMPALVAVRRDPQFRAYYRYLLAHGKLKMVALVAAMRKLLHGIYGVFQTREPFNPHKLFTLSRTGETI

SEQ ID NO: 117426 - protein, 447 aa, unidentified
MTLDIATKTGKTPVLGRMLSKYVGRQTSSIENDITKTRNHSRQRGNIMRAVFGIDVSKASSEVAIVINSEKIHGYSMTNDAIGFSRLLEDLKTVSNPEIVFEATGVYSRRLQAFLDNHGYAYTRLNPLEAKKQLDSLRVRKTDKIDAEKLAQSQFLLNRKPTDVQEDVYQELRDLSRFYQNLTEDIVRTKNRLHKALQVTFPELESLLSAPTGEQYWNLVTAFPCKEMVLELSSDKLLHVIRNSTSKRISDKRVAYLAEKLIALANQSYCAVKKTSPMLEEVRYYGKELLRLSEQRQTVLDQMVELAQPLPEYDILLSIPGIAETTATSIIGELGDIRRFQSANQINAFIGIDLRHYESGNFLAKEHITKRGNPYARKILFKCIHNIASASHTNPCHIADFYEKRKRRSQTTSTKPHTIASIHRLIRTMYYLITHNKLYDYASTQNR

SEQ ID NO: 117427 - protein, 362 aa, unidentified
MQSTPLIAFDQHAATTVAAVLLPGRRTPALHTLASDSPTILRFVRRVARQAGAVRCCYEAGPCGFELQRAMTEHGIPCDVIAPALIPRRPGDRIKTDRRDAEQLAVLFRAGALTAIHIPTEQEEAVRDLLRCREDIRADLLRARHRLSKFLLRHGRRFTATKKAWSKRHDAWLRAQTWPLPALEQTHLAYLRTVDEAMARLRAVEQDLRALLDLEPLRPRVQRLRCFRGMDDLTALTIAAELGDARRFATAPSLMAFVGLIPSEHSSGTRQARGAITKTGNAHLRRVLVEAAWHYRHHPFVGDTLRTRQRGAPPAVIAHAWAAQQRLHRRYQRLAARGKPKQHVVTAIARELTGFVWAALTQ

SEQ ID NO: 117428 - protein, 418 aa, unidentified
MAMKIVRFNCCGMDVHKNLVVATIGITDRKTNVTEYFQRSFSTLNSDLYRLKDWLRSHHCSDVCMESTGKYWIPIFNILEDEINVRLTHPKYVKAIKGKKTDKKDSKWICDLFKHDLIKFSFIPPREIRELREIARYRYKLVCMRSSERNRYQNCMTVSNIGLASVISDPFGKTASNIMKEVMKSNVIDDDKILKLVHRNCKNKDKILDSLHGYRIESDQRFKMEKSLDHMEYLDQLIDSCEVELIKRAYPFRRSFQHITQIKGISALSAILIISEIGIDMSQFGSDKQLVSWAGLSPANNESAGKKKSVRISKAGQYLKPLLVQCALSAIKDKTSYFGRKYSNIKKRRGHKKAIIAIARMMLVSIYHMILTGEEFQPTDHESLMSPKSNTDQSLTVEKALNFLKRSGIDISSIPINL

SEQ ID NO: 117429 - protein, 482 aa, unidentified
MKKRNIYQNQSQELLSLFESAGSSAKVMCVPMDYAKRDHLVMLCNGHGDILRKPFSVKNSPEGIEYLIEQVTRSCRRRGIKKEHVFLGGEDANSFAENFVSNLRFKGWLVAGVNARDAKKQRMNLQASTDRIDLMGIATMLLNCRANCCPAASGIYRNLRTLVRHRRKLVVMLTEVKNRVHGIVDRLFPGFLNENKSGIVAFTQSSLYLMEDRFSPKQISRRRRQKLIEILKQYGTSKAEETAFKLQQYADQVLHTPVEYVDTLQLSLAQHVKHIKCLQESIAQLEKEIAVNLAQTQGAFLTSLRGIGIVLAAGVSAEIGDPYEQKTLSHVVSYSGIIPRVKQTGGVDGKTYTGPVAKRCNRILKDYVVKSGFHLGLHGPEDLMIDYKRRDASGQHADFGIGRRYLRMAMSLMRTSQVYLPSRLRKADSTLEERAGYYLTTWPFLKDKWKKTGAIEVAFAKDRPLGIWRQIVQELYDIKLKL

SEQ ID NO: 117430 - protein, 403 aa, unidentified
MYSSFVGIDIGKWNHQAAFLEVSGKETARSLAFQNTSEGFQSLSESLAPFDKGQTVIGLEATGHYWLALFSFLVDNGWTVKVINPMQSDALRNMNIRKAKTDRKDCVVIADVLRFGRYTETVLPDEDLLQLRELSRCRVAHVELLGDLKRRVLGILDRIFPEFASCFSTVFGAAPMELLQECTDPEELADYDVDKLIKLLEKESRGRHSREKAEELKAKASRSVGTRFGRDALKFELKMLLEQLDFIKGQVKEFDKFLKKLMKNHELIYTIPGISVTLGSAILGEIGDVKRFGPPQQLQAFAGMDPSVTQSGNFQGTQGKMSKRGSPYLRRAVYLAANAARRFDPVFKEFYDRMIARGKHPKQALAAVGTKLLRVIHAVMTSQKPYNPQKLLPSAARISQSNP

SEQ ID NO: 117431 - protein, 341 aa, unidentified
MTAIGIDSHKATLAACAIDTLGASVDERTFSNDPAGHRDLAAWVRRVAPDGVVGVEGSASYGAAAARFLLSDGLMVREVPPQLSRRERIRTRRAGKSDPGDALAIARVTAREVDLPPVRIADRTSEIKLLMEAREDVVAETTRVRNRLHADLVVLIPGYQGTAKHLVTVRSQQAVRQRLRGLAGIHVELARGRLVRLHALDLQARTLQGRTAQLVGPHPLLALPGVGVLTAARLIAETGDVRRFRSADAFAMLAGVAPIPASSGQVQRMRLNRGGNRQLNRALHTIAMVQAVHHPPAKEYLARKAAEHKSAKEAVRALKRQIVRTVFRLLRDGAEGLAMAA

SEQ ID NO: 117432 - protein, 348 aa, unidentified
MTMVGGFDVHRKQITFDYVDDDGLVRWGQIRPATRKTLRAWLGEHCPDGDAEFALEGCTGWRYVTEEVASAGVGVHLGDPAEIAVARGPKKRAKTDRADARLLRTLLLEGRFPESWIPPVHVLEIRTLGRLYCTLMDERRAWQQRIHAQLFHQGCPPIRALLSEAGRDALARVDLSAAGRQYVDTALRRIDELSTEIGPLRTQLVNFARRQVGCQALQAHYGIGWLCAAIIWAEIGDARRFTSSDQLVRFAGLDVTVYSSDGKRSPGHLSRQGSPELRWAAFEAAKCAARRSSPDYAYYHQLAAKRDGHNGKNPTLAVERKILRRCYHTLRELGDAALALPIPEEVAA

SEQ ID NO: 117433 - protein, 310 aa, unidentified
MERRYVGIDVARDRLDVHIRPAGEVFVVARDSEGLAGLVERLKGVAPALVVLEATGGFETTVAAAIGAAGLPLAVVNPRQIRDFARATGKLAKTDALDAAAIAHFAEAVRPEPRPIPSEQAQMLGELVARRRQIVEMMTAERNRRRQLASKRLIKSVDRLLAVLQKELSDLEQEIDDSIRGTPAWRESEDLLRSVPGVGSTTARTLLAELPELGTLDRKRIATLVGVAPLNRDSGTLRGKRTIWGGRAQVRAALYMAALVASRRNPAIAAMYQRLRQAGKPAKLALTACMRKLLTILNAILRDRQPWQHA

SEQ ID NO: 117434 - protein, 416 aa, unidentified
MNAAGIDVSSSKSTVAVLRPFGEVVKLPFDVRHSAEELASLAKQLKSIEGETRVVMEHTGRYYESIAKVLHEAGLYVSAVNPLLIKEYGNNSLRKVKTDKADAMKIAKYALDNWSELRDYTPMDTIRYDLKTMNRQFQLAIKQKTATANNLIALQEQSFPGIRKLFDSPVRSDGTQKWVDFTHDFWHVDCVRSGSLNAFTERYRKWCKRNRYQFSTEKAAKVYALAKSAVVLVQKTSVTKTLVQAAADQLTAISRSVETYRSELNKLASQLPEYSVVMEMYGVGESLGPQLMAEIGDVRRFERKQSLVAFAGIDPAPSESGNYCSRSNRTTKRGSPYLRRTLFNIMKVHLQRAPADEPVFQFMDKKRAEGKPYYVYMIAAGNKFLRRYYGKVMAYFSSLEDLPPVDMDSTGLHHTK

SEQ ID NO: 117435 - protein, 339 aa, unidentified
MKKVFIGIDFSKLKFDAAIYNVDTKAIVATEVFDNEQSGYVDFLQWVKENTRCQKSGMLFCGEHTGYYSGNLSVFLYESGYDMWLVSGLEIKLTQGIKRTKTDRVDACKIAEHAYRYLDKVVLFQPVSKALEEIRELLSYRERLVETRKMLTTSAKEMKRVKDNASCDYIFKDSLEYIKTLNASVRDCEKRIEALLKQDISLNTNYKLVSSVVGIGLVNAALILVATDNFTKFDNPRKFGCYCGVVPFEHSSGTSVRGKTRVSKMANRHLKTKLTLAAQNAVRFDPELKKYYQRKRSEGKNNWLVLNNVKNKLIHRIFAVVRDGQMYEKQYVHPLKQVA

SEQ ID NO: 117436 - protein, 344 aa, unidentified
MVTTIGIDPHKATHTAVAIDDDEIVLGEITIRADKDQTSKLIEWATSVDGDGRVWAVEAATGLGHLLSQQLVASGETVVDVPPVLASRIRVLSSGRSNKNDENDARSVAIAALRRESLAEVKREDEAAVLRMLAKRHRELTALRTQAVCRLHAMLAVLRPGGMAHRLSAKQASRMLQGLRGLDAVGEQRRLMAKTHLVDIRRLDRDLDAIKAQIRRAVAAADTSVTDIYGVGPVVAAFLVGYTPPIERFTTPDKYAAYNGTAPIEVSSGGKTRHRLSRRGNRTLNHAIHTAAVTQISHHTPGKVYYDRKLDEGKTNKEALRALKRRISNAVYQQLRADAQRHSS

SEQ ID NO: 117437 - protein, 324 aa, unidentified
MIDGILGIDVCKNTLDVSISSYTKVRTKSFTNSPDGWRHLLDWLIAQKIQRVHACLESTGRYSLGIACALYEADHVVSIINPAQIRDFVRTKLGRNKTDGVDASHIREYCELFKPSPWVPPSEAHRRLGELQTIRSGIVAGLTEWKNRKNSGIVDAEAQALADATISHFTSQLGAVDKAIALTIDNDCDLQSKRDLLLSISGVGETLAGVVLAELPGPDVLRSSAEVVAYAGLNPRQHQSGTSIDRATRISKIGNAVLRAALYMPALSAMRYNSAIVALVARLKSRGRLKPKQIVVAAMRKLLVLCFGVLKTGRPFDAAIAMGG

SEQ ID NO: 117438 - protein, 345 aa, unidentified
MSMVIYVGLDVHLNSIAAVWGRAKDKPRSMTVAPSEEGFEMLVKAVGTMDVWGVYEASSCGLETYDRLRELGWKMSIVAPTHIAKSVHRKKRKTDLRDAKHLWELLMSHGELGTELAEIWIPSRELQEQREIVRRRLKLSENSCRVKNGILSLLRMHKIKRPEGMKTAWTQKHVAWLRGLAKDESVGASVKTVLASYVRELEFVREEMETLQEEVETLAEKPQYRRPVEKMTQVPGVATLTALTFLLELGELRRFDNRRQVGCYLGLVPASYESGDASDRKGHITRMGPPRIRRVLNQAAWQLVRLDPLWRKRYEGIKARGGAKTAIVAVMRKLGIELWQRAKSA

SEQ ID NO: 117439 - protein, 356 aa, unidentified
MEQVNKLDFAGQRIYTSLDTHKKSWKVSIFTEHFEHKTFSQPPDTEVLIHYLQRNFPGADHQVVYEAGFCGFWIHDRLREKGISCMIVNPADVPTTDKEKRTKSDPVDSRKMARSLRNGELKGIYVPNREKVEDRSLIRTRQAMVKKQTRCKNQIKSSLYFYGIVIPEELGDGHWSRKFINWLTEIQMKRASGNVALKTLLSELLYLRQTIADLTKEIRRLAHTEEYTENHRLMKSVIGISTLSAMTFLTELADIDRFKNLDKLASYIGLVPDVHGSGEKETNSGITSRCNPHLRGILIEAAWITIRKDPAMMMAYNQLLPKISKKIAIVKIARKLLNRIRYVLKNKQEYVPAVVQ

SEQ ID NO: 117440 - protein, 374 aa, unidentified
MSRSIIYLGLDVHKDSITIAVLPAGAPAPTRVERLPNDLAKLRRFCERLAAQGDLRACYEASGAGYVLHRAMREWGYPCDVIAPSLIPTKPGQQRKHDKHDAAQLARLYRAGELTVVRIPSEAEERVRDVVRCRETLQREVLRSRHYILKFLTRRGFVYREGTNWSTAHYNWLRRLAAASSPLAVEDQMVFGEYLGLLEYKLSRRDELDRRIAELALTPALAPAVNRLQCFRGVQRHVAMVLTTEIGDWRRFASPRQLMAYLGLVPKERSSGDRERRGSLTKAGNSHCRHALVQAAWAYRYQPKVGTALKARQQGQSPVVIAHAWKAQHRLHTLYRRLAFRTKPQIAVVAVARELVGFLWAVMQEQDLSSRAAA

SEQ ID NO: 117441 - protein, 375 aa, unidentified
MEHHSEAFVALDTANLRNAVAIADAGRNGEIRYLGEIDNTEAETRKLVAKLASKHARLTFCYEAGPTGYGLYRLIKSIGHDCIVVAPSLIPSKPGDRVKTNRRDAVNLVKLLRAGELTAVWVPDERHEAMRDLVRARDAAVKDYRIKRQNVSSLLLRLGRHYPGKKTWGRTHINWLTGLKLEHREQRIAFEEMLLAVRQVRERIERLEQAMREAVADWTLAPVIEAVQAMRGIDMVGAIAFLAELGDLSRFENPRQLMAYLGLTPSERSTGESVKRGGITKAGNTRARRLLIEAAWSYRFPPRVSKDMQTRIGAAPRTAREIAWKAQMRLCGRFRTLTRKGKRPTIVVTAIARELSAFIWAINREIVGSYATANQ

SEQ ID NO: 117442 - protein, 341 aa, unidentified
MEKFIRTAIDLGKNYFQVHGLESEGGRSISRKVKRSKMHEFYSQIEPCRVGMEACGSAHYWARQLTAMGHEVVLIPPAYIKPYVKRGKNDVVDAAAICEAMSRPDMRFVPIKSADQQAVLMLHKTRELLVKQRTMAVNALRGHLAEFGIVAAKGIGRVDELLALAKADAALPHIAGAAVACMAQHLEGLDLSIETVDEEIAKAHRQNPISCLLDEIPGVGTLIASATAASVPDPGVFKSGRDFAAWLGLTPRQNSSGGKQKLGAITKQGNRYIRKMLVTGATSVLRVVGKRKGALADWINALRARKPERLVAVALANKLARICWAIMTTGEGFRTDTYVKA

SEQ ID NO: 117443 - protein, 336 aa, unidentified
MRYIGLDVHKNNIAACVIANNGKPVKSIEIENRSGMSEITEYMKDQNYCVMMESSTYVYDVYRYFESIGIEAHVAHAKGLKMITSSDKKTDKNDAETIGRYLRLWKKGELKLSMAYIPTKEEAELKDICRLKEEVSRKIGDESRRIKSHMFRNMESFPDDNDNLAVKYVRKGISEAYPNDAALQSRLRYLEELRKENFQLTKMIMGKLPNDKNVEILCSVPGIARQSAVQIMSMIVDVKRFEDPEKMCSYFGLVPRVRDSGEKEHHGRMTKNGDKMMRIIMERVTLSHIRFCDSSITAFYKRKLPEMGEKKALISASRKMLTMIHSLLLNQRKFRV

SEQ ID NO: 117444 - protein, 449 aa, unidentified
MGSRLVLERLTPPSGEQATDKLDGVPGGRLRIYHKAVAFIGPEDNSHPKSIQTMVIEMFYLGIDVGKKHHVASMLGEGVRKPLFKGFSFANTTEGAESLVARISEITPETGEVCIGMEATGHYWLALYSFLFDKGYTIHVINPIQTDGWRKGVEIRKRKTDDIDSMLIADLIRYGDFSETRLSDEAIQSLRTLSRFRSYLIDSIADLKRKVICVLDQVFPEYESLVSDIFGATSKELLLEYSSPAELENLSVETLTTFLEFASRKKCGEDKAEQIINTAKHSFGVTHCRDTFSFQLRALLEQIRFIEKQVADTEAEISAIMEELNSPITTIPGIGPVLGALILGEIGDIRRFDSPAKLVAYAGIDATVAQSGEFEAAHNRMSKRGSPFLRRALFVASNVAVRFDPDLGAFYHRKRAEGKHHSTCLGAVSRKLCYIIYAILTENRPYVKR

SEQ ID NO: 117445 - protein, 342 aa, unidentified
MSIVGGFDVHRRQLTFEYLDTVTGELRVGRVAPADREHLRDWLARFAGQEDAHFALEGCTGWRYVVEELLAAGVEPHLAEPADTAALRGRKRHAKTDKTDSRHLRIHLLAGDLPECWIPPQHVLEVRAVVRLYKDLLDERGAWHQRIAATLFHQGVPAGIGSMCTAEGRAAVAEVDLSAAGRQAVQTGLRQIDRLTGELDPLRRQLGMLSRRQPGCAALRAAHFGIGPVTSVAIWAELGDVRRFPSPDDVVRHTGLDITVYSSDTKRSAGHLSRQGPALLRWALYEAAKSAARATAPDHAYYIATRDRRNAGLATVSVARKLARRLYHTLRDLGEDALRPAA

SEQ ID NO: 117446 - protein, 346 aa, unidentified
MTIVEGTRIVTGGIDTHSEVHVAAALDEVGGLLGTESFEANPDGYSALLAWLGSFGDVTKVGVEGTGSYGAGIARFLTRAGVKVVEVDRQNRQARRQSGKSDPLDAVEAARAVLSGRAHGQAKSRDGSVEAIRVLVVAKRSARGARIKALTQMRQLTYSAPDQLQSRLKGLPIAQFVAVAQGLRPSRSSDSVTAATKASLSSLAHRVADLEEEIAELDTRITPLLEATAPELLAVYGVGIDTAAALLVAAGDNPERLRSEAAWAHLCGVSPLQASSGKVTRHRLNRGGDRQANRALWHIVMSRLASDPKTQTYMERRVKDGGSKREAIRMLKRYVAREVYHYLPRR

SEQ ID NO: 117447 - protein, 310 aa, unidentified
MESIIVGIDVSSDRLDVAVRPSGAAFVVERNARGLDELIARLRELTPAIVAIEATGGFETVAAAALAGGGLPVVIVNPAQVRAFATALGQRAKTDPLDAAVIAHFAEATKPQVRPLPDEATRLLADLVTRRRQIIEMIGAERQREQRVTIPRLKKSISRLLKALEKELASLDEDIDNAIRNSPAWRDKENLLETVPGVGPVIARTLIAELPELGTLGRKEIAALAGLAPFTRQSGKWRGKSFIGGGRTAVRCALFMGALVGKRHNPILKAFFDRLVAAGKPKMVALIAVARKLLTILNAIVRDSRPWQIA

SEQ ID NO: 117448 - protein, 361 aa, unidentified
MKNPAQHLIAEVPRRQAKVELTIGIDIGDVWSHYCTLNQDGEVVDRGRFRTTPKAIEKWFTVVAPARVAMEAGTHSIWISAQLQELGHEVIVANVRELRAISHSDRKSDQVDAEKLARYARLDPNILRPIAHRTVEQQQALTLIRARALLVRLRTAAVNAVRGLTKSCGHRMPASATTCFAQRSLAVIPPGLAQALGPVLQQIAEMTVKIKLYDRQIQQLGQTEYPETQALLKVHGVGHLTALTFVLTLGSKERFGRSRDVGCYLGLRPRRSQSGDHDPQLGITHAGNAYLRSLLIECSNHILRPHGRDSALRQWGLHLAARGGKQAKSKAVVAVARKLAVLLHHLWNTQEPYIPFYEQAA

SEQ ID NO: 117449 - protein, 408 aa, unidentified
MGLLFVGDDWAEDHHDVEVQDEAGRRLGRARLVEGLAGVALLHELIAQHLGEDQADRVAIGIETDRGPWVIALISAGYRVFAINPLQVARYRERQSVSGAKSDAADAHVLADMVRTDSHQLRQVAGDSDEAEAVKVVARAHKTLIWERTRHAQRLRNALREFFPAALLAFDDLTAADTLELLAKAPDPDTAARLTLAQISAALKRAHRHHAGHRAPLIQAALRSEQLRQPSAVTVAYAATVRAQAVLIATLNAQIKTMGAQVEAHFGQHPDAEIYLSQPGLGSILGARALAEFGDDKNRYAHARARKNYAGTSPITRASGKKKTVLARYVHNDRLIDALGQQAFSALSASPGARAYYDDLRRRGTGHRAALRQLANRLVGILHGCLKSGTVYDEATAWPRHAELTTAA

SEQ ID NO: 117450 - protein, 389 aa, unidentified
MYLVGIDISKYKHDCFIATETGEVIKNSFSFANNHQGFNELLTVLKSLDQTQEIRIGLEATGHYGNNLKIFLYDNNFSFMEFNPVLSERFRQVTSLRKTKTDKLDAHLISKMLLTYDYKTYSLKSYHILALKSLTRLRFSMVKERTKYKVRLKNIMDLIFPEFFSFFSDSYGLTPMYLLSKYKSPNNIANVEIKALYEDIFKVSSGRYSYVKLVKLQDCAKKSIGKSNDILEFQLQSILNMIVFYNDEINKVDSKINSIMKLHEFYTPTIKGIGVISAASIISEYGDFSLFDSPDKMLSFAGLEPAVYQSGNSKTFGKMVKRGSPYLRYTIMNCAETLLVHNPRLYDYYNKKRNEGKPHRVALTHVAKKLIRIIYKIEKDKIPFNQNLI

SEQ ID NO: 117451 - protein, 393 aa, unidentified
MQSVLAIDIAKGKSMVTLINSCGEVLIEPYEINHSIKDFSNLLNRIKQLKLDNISVIMESTGIYHRPVERFFLENNFKVYTINALYSKMYKRNLRKTKTDKLDCLSLSELYFTNNFKQYIRPDNIYLNMNALARQYFALDQLCTNLKNRYKNLVYLCFPEYELLFKKEAIYSDIALSFIANYPHAEIIANTRIDHLQHYFKNNNYKRWKQKPTLIKEAAKNSYPSVSKGDEIVSDLSQLAKLIRSYQSEINSIKLKLINYGKQTKYFTAINSIFGIGEFTASIMIAELNDINRFNNIKELTAYCGLDPSIKQSGKSINIHGPISKSGNKYMRKLLFVSCLNIIRLSSKCHVKNDIEIYYRKKRNEGKHHYVAMIACTTKLLRQILALCKQLDK

SEQ ID NO: 117452 - protein, 343 aa, unidentified
MDYFAGLDVSVKETNVCIVDDTGRIVREVKVASEPEALLQVLTNPAYRFKRIGLEAGPLSQWLFSVLTEASLPVICVETRHMKAVLKAQINKTDRNDARGIAQMMRVGLYRPVHVKTLRSQKLRMLLTHRKLLQSKTIAIENDLRGTLRNFGLKVGMVGKVKFETRIKELIENVPDLAVLVEPLLIVRRVLREQIGILHRRLLAIVRDDDVCRRLMTTPGVGPVVALTYRATVDVPARFRNSKAVGAVFGLTPSQHQSGEIDRIGSISKCGDAMMRTMLFEAAQAMLMRSAKWSWLKAWAMKIARHRGMKKAIVALARRLAVIMHRIWVDGTEFRWTREVAAA

SEQ ID NO: 117453 - protein, 416 aa, unidentified
MDVIVARCAGLDVHKNTVMACVRAPGPDGGRISTVRRFGTFTDALRQLRAWLVAEGVTQVAMEATGVYWKPVWHVLEAVPEFELLLANAHAVKNMPGRKTDVADAEWLALLCECGLLRPSFVPPPVIAELRDLTRYRKKLIEERSRETQRIQKLLEDAGIKLDSVVSDILGVSARQMLEALIAGVRDVEALAELAQTRMRPKIPQLRRALEGRFGAHHALMLQMHLDHVDQLSAAITRLDVEVDRVIRPFSAQLQRLITIPGVGRRTAEVIIAEVGVDMRRFATAGHLASWAGMCPGNHESGGKRRSGRARKGNQALRAALCEAAWAAAHGKTGYLPAQYRHLMRTFGKKGQTRAVFAVGHSILVIAWHLLANDCDYTDLGAEHFTRNADPEARKHYLIRQLEALGHTVTVEPAAA

SEQ ID NO: 117454 - protein, 436 aa, unidentified
MRGCRCSMIMGFTKPIEHFNLQRKKVITMNTLYVGIDVSSKSNVVYLMLPNGDKHSNFSVANSHEGSTQLVKRILSVLTSHSLDTVLIGLEATSVYGDNLVYFLREDATLAPFNRKIHVLNPKQVKKFHDAYNDLPKNDYVDSFVIADCLRFGRINKEVYMGDYRYKALQNLTRARFFAVQNLVKEKQRFMNVLFKKYSTMTQEKVFSDTFSTTALAVYDEFESAEALANMDLHELTDFIIEKGKNRFPDPDAVAKAIQKAARSSYRLPKTMNDSVNQVLSISITSMKALESQIKEFDKAIKAQMELLPNVLISIPGIGPVYSAGIMAEIGEIDRFNSQAALAKYAGLAWKQHQSGGFEAEVTRLIPSGNRFLKYYLCEAAFSLVRCDKEYSDFYHLKYKEVNRCQHKRALALTARKFVRLVFRLLKDNRLYCPAK

SEQ ID NO: 117455 - protein, 362 aa, unidentified
MEYFCGLDVGMDETAICVVDDKGNAMLQIAVVTDPEAIKVALKPYLGRLRRAGHEAGSLSPWLHPELLRLGLPVVCLETHHVRAALKAQRNKTDKADALGIAHIMRTGWYRQAHIKTEACYRLRLLLTHRRNLKRKFLDLENAIRHSLKAFGIRLSGTGRGGFAQAVRAAVADDALTTELMDAMLNARAALWKEYCRLHDLVVKFVAGHELCRRFMQIPGVGPVTALSFMTAIDDPTRFRRSRDVAAYFGLTSRRWQSGTSIDVQGRISKAGDGDVRRALYEAASALMTRFKRKDKVKTWGMMLAKRSCHRKAVVAVARKLAVIMHAMWIDGTFYSGDPQARAADVAAHATVKDRRLLGVHA

SEQ ID NO: 117456 - protein, 462 aa, unidentified
MTQSIPRKPPELPAETLPDAKTIDGVWTQLNRTVRQAVAKVVPRKGRHAAPDGGVDRLDHMSARRRGDPSHSMQVARVAPDWPVAILMHGGRVVGDRITYVGLDVHKDGIVVALAEDGLRGEVRDYGRIANTAAALQRLARKIGQEGVELRLCYEAGPCGYGIQRQLSASGHGCIVVAPSLIPKRAGDRVKTDRRDAASLARLHRAGELTAVWVADAGHEAMRDLVRARLDAVHALRRARQQLSGFLLRQGCHYRRPAWTKLHRRWLAGLRFEQAVHHIVLEDYIAAVEAAQARRDRLTAQIEAMLPNWTLAPVVKALQTMRGMALVNAATLIAELGDLSRFANPRQLMVYLGLVPSEHSSGTSIKRGGLTKAGNSVARRLLIEAAWCYRFPARVSRELRLRQEQQPKPIREIAWKAQLRLCARYRRLARTGKPANVVTAAIARELAGFVWAIARQVPPALG

SEQ ID NO: 117457 - protein, 340 aa, unidentified
MGNVTTIGLDLAKNVFQVHGVDAEGAAVLRQRLTRGRMLKFFAKLPRCLVGIEACASSHYWARELVALGHDVKLMPAQYVKPYVKRGKNDAADAEAICEAVTRPTMRFVGIKSPEQQSAMMLHRVRLILSRQRTQLSNALRAHLAEFGIVAPIGRNGIDQLVGVIADTADERVPIDARMCLEMLVAQLNIVKQQILENDRRIMASARETELGRRLMEIPGVGPLLASAIVATVPDPAIFHSGRNLAAWIGLVPRQNSSGGKERLGGITKAGHRYLRQMLIVGAMAVVRYAERNGTKRPWLVQLLARRKAKVAAVALANRNARMIWAMMASGERYREPQVA

SEQ ID NO: 117458 - protein, 337 aa, unidentified
MKYCGIDLHSNNSVVIVSDEEDRVVLSKRLPNDLGQIRAALEPHREDLAGVVIESTYNWYWLVDGLMDTGYQVHLAHPSAIKKYEGLKHSGDFADAAYLAHLLRLGLLAEGYVYPREERGARDLARKRLQLVRYRTAQILAIEGILMRQTGTRLKGEAVKRLTAEQVDQFAFAPDVSLAVQANRAVSQTLSQQIEALEKRLQQRVILRPEYRLLKTVPGIGEILATTIMLETGTISRFTRVGNFSSYCRCVDSLKESNGKRKGEGNTRNGNKYLAWAFVEAANFALRCCPQARSFYDRKKSRSNRILALKALAHKLARACYHMLQDQKPFDVHLCFG

SEQ ID NO: 117459 - protein, 427 aa, unidentified
MNCTQNSKLMQITSETMVVGVDIGSEFQYARAFDFRGFEFSKKALRFANTKEGFEAFDIWATDLMKKHNKTRAFVGMEPTGHYWYGFGCHLQHRGVEFGMVNPYHVKRSKELDDNTPTKNDRKDPKTIAMLVKDGRFLVPYMPEGVYRELRNLMELRRQCIVQLISIQNRVKRWLDIHFPEFSTVFKKWTGKAAILALRHFPTPESVIETGEDKIVATWKEEVKRAVGHKHAKKLIAAAERTIGLKHGLKSATLEIGTLLDEYMIYSKRHQDIMKIVEEQVNQVPNANKLLGIKGIGIVAIAGFIASTGDINRFESPEQIVKLLGLNLKENSSGKHQGKTTITRRGRSDGRYAIFQAVLPLVARTAEFRELHCYYIHRENNPLKKMQSIVAICGKLIRVFYAILKTGSNYDAEKMRNDIKRPMKIAA

SEQ ID NO: 117460 - protein, 339 aa, unidentified
MKTHVGVDLHQRFCYLTAVDASGRKLKQGQVVNQGAALRSWLRQVPGPRQVVVEASGFWPAFGRAVSPEADRLVMVHPLRVKAIASARLKNDRVDSETLAHLSRADLLPEAWMANERTQQARLLTRLRITLGQQRARAKNQLQAVLHQEGFLKPVADVFGSRGRTWLAGLALSPAARVVVQVWLKVVDQMTEAIVEQEKALKAMAELDARARWLQTVPGIGAYSAMVILAEVGEIERFGTKRALASYAGLTPMLRESAGKRKRGGIGHQGSGTLRWIMLQVAQVAARYSPAARAWIARLRQRKPAQVAKIALARKLLTAVWALLRHGVCFDEDCFARQN

SEQ ID NO: 117461 - protein, 430 aa, unidentified
MEFVDGIRLEKFRQVKKEIRGSDQYLIVGIDVAKERHNAFFGTAIGKTLHKGLIFDNTVEGFRKLLTMTEALKVQHDLTKVVFGVEPTANYHKPLGEHLIKCGYQLVLVSAAAVKNNRSLLDGRWDKHDTKDSANVADLISQGKCLYYEYPDPKVRDLRNLLSLKRRLKKEEHGLRVRIRNQLLAQYFPEMDSWFGPAVSLAVISRCLDPSVIAGMEYDDFCRSVVPGKLTIAQQKRLQAIWRMAPESIGCRVGDAVPFEAKVMVSKLHQVRETIKAVEDKIEDICVQFPEYPYLLSIPGFGPDVSSKLLGAIGDPFRFSSGKQVLKMAGFDLCANRSGKTSDSATPVISKQGKADLRYALYQAALVASYSNKDFMTYYTNKLRGRQREKGIGTKMRVKLAAKLLIIAWTLMKKKEPFDSKYLNKGDTQV

SEQ ID NO: 117462 - protein, 420 aa, unidentified
MARTVEIVYPVCCGMDVHKNFLVACIAVTDEHSHTEHHIKRFSTFTGDLRRLSEWLASYNCRDVCMESCGKYWIPVFNILEKTCNVCLTHPKYVKAIKGKKTDKKDAKWISELFKCDLVRSSFIPPPDIRQLRDLCRYYVKLTGFASSEKNRAQNCLTMCNFKLDDVFADVFGKSASRVLDALLEHGNGDFELHGLISGKCKSSPEKIYTALDGELNPMQVEKLNLIRQHMSDITVLKAALENLIYKLAAKYQPQIDLLMTVPGVSTPFTAIRILAEIGADMSVFETAKQLVSWAGLTPQNQESAGKKKTTRIGRAGAYLKPLLVQIALNCGKSDKCPELKNKYLALKKRRGGKKAVIAIARKLLAAIWHLLSKNETYNAELYRKVDKPPAARELTTAQAVAFLRNKGFLIVDEETGEVA

SEQ ID NO: 117463 - protein, 349 aa, unidentified
MPLAARWGKDTAYDTGKNTLHLIGLDDQGAIVLREKIARGRIAARLANVPRCLIGIEAGMATHYVARELSALGHDVKQVPPAYSKPFRQGHKNDFRDAHAIAEAVQRPSTRCVPVKTDDQLDLQALHRVRSRLVGQRTAVINQIRGFLLEHGIAVRQGLRFLRQQLPDILAKRSDVLSPRMIRIMEDLSGDWRRLDERIEHITKEIEVLAGTDVNCGQLMTVPGIGPIVASATVAAIGNGAAFARGRDFAAWLGLVPKQMSTGDRTILGRITKRGNRYLRMLFVQGARAILLRPKSWVKHSFGPWLTTAARRLHRNILTIALANKLARIALSVLIQGRSYETRIVPAAA

SEQ ID NO: 117464 - protein, 433 aa, unidentified
MGLIVPTVMPPERADQPPSYDGFVGIDWGSQQQQVSVLDRDRRRMGERVVDHDGASLAQFVAWLWGLSAGQPQRVAVAIEVPRGALVEGLVERGFHVFAMNPKQLDRFRDRHSVAGAKDDRRDAFVLADSLRTDQPSFRRLRLDDPQLLVLRELSRAEETLLEAFRRSANQLRDQLHRFYPQMLQLCSAADAPWLWDLIDLAPTPAHAARLREEQVQGVLKAHRRRRLKAHEVLACLQTPARPVAPGAVQAAQAHCRFLLPCLRGLAEHLQACGQQVGALLHTLAEMPGAGAGPSDVAIVQSLPGVGRKMTAWLFAEAAQPLAERDYQVLRTHGGVAPVTKQSGKRRVVVMRRGGNPRLRHALYHMARVAMQRDAHFNSVYAALRAKGQRHGQALRSIGNRLLRILMAMLRHRTCYDASRIHREPVVQMGETI

SEQ ID NO: 117465 - protein, 319 aa, unidentified
MAQNDLVVAGIDIAKDKADVCIRAVSQRQTFPNTAEGRRQLVSWLRKYKVTKAVMEASGGYERDWAKALREKDMEVRIVDPKRVRHFAQSAGRLAKNDIIDADTIAWFAETFGEAPGQAHDAARETLLQMVKARQGLLDMKTMLSNKGEHDVPEPVQKSHARLLKTIVVEIAKIEAAIAAMIKATPHFAALAEIIESVPGLAGTTSAGLIAAMPELGQVSNAAISALLGVAPYDDDSGKRRGERQIKGGRRKARNLFYMACLGAATRHNPALKAFYRRLIAKGKKAKVALVACMRKLIVILNIMIARGEKWDASRHAVG

SEQ ID NO: 117466 - protein, 394 aa, unidentified
MKKVCGLDVHKDSIFLCILTGNGQKILQEYSTLTPDILSMRTMILSNKVSDVAMESTGIYWIPIWRILEGYFNLHLVNPYLIKQMPGRKTDVKDAQWIATVLQKKLIRSSYIPQKQIHELRQYERKYVRLCEQVTRIEQEIDRHLHRCNIRITNFATKIGSVSVMGVVGGIVRGETTPEELIRYVHGRITNKYKSKINASLTGVVSETDRFILEQNLQEHELITIQRQRCVENMELLCDKFYQEEIELLCTIPGIKKLGAMTIIAEMGIDMKTFATAAALVGWAGLRPRNDESAGKIKSRKITNGNKYLRRILVQCAWGITRTKRCWLSGKFQELAKRRSQKKALIAIARKLLVIIWHVLSKHEKYREYKPKLNPEQKAKKIARLEKQLLELQA

SEQ ID NO: 117467 - protein, 308 aa, unidentified
MSAAVGIDVSKSQLDVAVLGSSKVEQFPNGPAGFRKLIAWLKPKHPDRVLLEATGGYEQSVLDALHAAGFPVLRVNPRQARDFAKALGQLAKTDALDAHVLARMAATIDLPLYVPREPWRLRLAQWQQRRGHVVHMLLAERARLNQIHESDLQRAARRHTAFLEQELHDLDEGIAEQLQDRPEIAPLRSIRGVGPVLQATLACEVPELGQLRGKAIAKLVGVAPLARDSGTMRGKRSVWGGRASVRPALYMSALTAMRYEPSLRQFYLRLRGRGKAGKVAVVAVMRKMLVILNARMRDALRQPEFAPG

SEQ ID NO: 117468 - protein, 289 aa, unidentified
MKLYGAIDLHSTNNVTVVINDQDQVVYQKRLPNDLSLIAQQLSTYRASLQGIVVESTYNWYWLVDGLMEKGHRVHLANTAAIQQYNGLKYTDDHSDARWLGHRLRLGVLPEGYIYPKQERMVRDLLRKRGQLVHQRTANLLSIQSLISRTTGNSISAQYIKALNIQRVDGVLPNPDLLLALKANLAVMNSADAQIEILEKAVQDRVKLHPQFRFLKTVPGIGPILALTIMLETGEIERFASVGNYASYCRCVGSKKISNGKRKGSGNTKNGDKYLAWVFVEAANFCDPF

SEQ ID NO: 117469 - protein, 359 aa, unidentified
MRVQSNKKDFKGQNIFVGIDVHLKQWTVTVLTESGYKKKFSQPSCPKSLFDHLSKNYPGGIYKAVYESGFSGYSSCYELRKYGIDCQIVHAADVPTSQKEKVTKSDVVDSEKLARSLRNGELDEYFIYIPSSDSLDDRSLLRVRKIIQKESGRYRSQIKHLLYCNGISYPDRFQNQRTHWSRKFVEWLRNDVRLLSPTRTSLDWLLDEYLHLRQSLLAINRKLRELSQTARYKKRYECLISIPGIGCITAMTLLVEIIDIKRFSSQKKFRAYLGLVPVMQKSDETVIVGEKTFRGNKHLGPQVIEASWIAIRHDAELAAAYTRHCHRGLKAQEAIIRIAADLAARIYAVLKQEKKYECR

SEQ ID NO: 117470 - protein, 397 aa, unidentified
MYIVGIDIAKRKHEAAVIDGEGTVIIKPFSFTNNCSGYNRLLAMLARAKLPLDEVSFAMEATGHYWLALFTRLQKEGFRVQVINPVQTNSIRSFYIRQAKTDPRDALLIAEVIRFGHFSESTLHPENIYELRELCRGRHAIVSMQADVKRKVVALLDQVFPEYETAFTNMFGDTSMAILQACPTPKELSEMPLEELCHLIEVSSHKRFRMAKAQELQALARNSFGFAMAGDVFSTMIRLYAKHLDFLKQQVREMDRKIAEIMDTLDTPITTITGIGPTLGAYILSEIGDISRFSSAAKLAAYAGIDPTMRQSGEYNGVRNRMSKRGSPYLRHAIWLAASSAVLHDPALKLYFQKKRDEGKPYMASVGHACRKMVSIIYAVMRDNKAYTPCIPNEISA

SEQ ID NO: 117471 - protein, 341 aa, unidentified
MNVKTIGIDLAKNVFQIHGVDEHGKRLFNKQLRRAQMASFFANIPPCLIGMEACASAHFWANKLISMGHNVKLMAPQFVKPYVKTNKHDAADAEAICEAVTRPNMRFVPVKTAEQQAVLALHRSRQSFIKQRTAQANQIRGLLAEFGIVVPRGIQQLQRRLPELVEDADNPLPVLFRTQLSLLQHHMAYLFDVIATLDKQIEQCYRQNALCQRIGKIPGIGPVTASALIATIGKDNNFENGRQLAAWLGLVPRQHSSGGKQVLLGISKRGDTYLRTLLIHGARAVLQSAKHKQDAVSSWANQLMARRNNNIASVALANKNARTVWALLAKEREYCAPIISA

SEQ ID NO: 117472 - protein, 353 aa, unidentified
MTVYVGVDFHARQQTISYCNTADGEVHQCELQHKDNQVREFYAQFQGEVIVGLEASGYSTWFEELLESMQYEVWLGNPAEIRRKAPRRQKNDRRDADLILELMLKGDFPRLHRFSAESRLVLRQLRYRHKLVKVRTIAKNSLQAISLGAGLTEKRGLLSQRGQERLRALELPPVLGQQREEWLQMVAQLDKRIATLEATLEKTAASDEQIKLLRTHPGIGLLTGLVVRHTITPVARFSTTRKAVAYAGLDPVEDSSGPRSRLGSISKEGSRLLRFLLNEAGQTACRHDPDLKRFYQRLVHRRNRQKAKVAVARKLLVRSFIMLRDQIDYAEFLRRGVAARSARKTYRPSMPAL

SEQ ID NO: 117473 - protein, 397 aa, unidentified
MAKVRSWAGLDVHARSVLAVTLDAPSGELRSRRLPGETAKVVEFLATLPGPTRAAYEAGPTGYGLARALQAAGIGCLVAAPGKIERPAQDKVKTDQRDAERVLRLLMIDALHPVRVPTVEEEALRDLVRAGEDVRGDLMRARQRLSKLLLRHDILYEDTSSTWTQRHRAWLRAQDLGGGAQATLLDYLGAIDTLELRRGALEKTIAELVPASPCAQTVARLRCLRGVDTLSAVGLCAEIGDFGRFQRPGKLMSYIGLVPSENSSGETRRQGAITKTGSRHARRLSRPAGTTARPPPAASPSNAAKTGSPPTSSRSAGKPNNGCTASGAAWPRTAASAARSSRSPSPANSPGSAGHSPTPTDPPTPQRHVGREGRREPANAREHQRSKHEQPCGHARS

SEQ ID NO: 117474 - protein, 341 aa, unidentified
MSDYSYFCGIDLAKNHFSLHAVDHNGKVLLHKSVTRSKLLTTIANMSLMRIGVEACGGAHYWARTLNKLGHDARIMAVKYVIPYRTKGKDDLNDAVAICETVQRPSTRFVPIKSPEQQAILSVHRMREHWVRERTALMNRMRALLSEFGLIIPVGRSSLMKQVPLMLEDAENALPCLARTVISDAYHHLDELNQRIADTEQVFDACAKVSDNVRRVMTVRGIGPQTAAAILASIGNGSQFDKSRDFSAWLGLVPKQYSTGGKPRLGRITKHGDKYLRTLLVHGARTVIANLGDKQDRLSQWCRGVLERRGMNRAIVALAAKNARIIWSLLHNQTEYENYAA

SEQ ID NO: 117475 - protein, 421 aa, unidentified
MTQPSHDTFAACIGIDWADAKHDLCLQAAGTAKRERFQLEHTPEAIDAWVTTLRTRFNGHPVAVCLELDKGPLVSALRKYDFLVLFPINPLTLARYREAFTPSRAKDDPTDAELQLELLLTHRDKLQPLQPQSPPMRALAQLVEHRRRVVGDKVRITNRLTSTLKNYFPQVLHWFQEKDTRIFCDFLSRWPTLKAAQLARRSTLETFFRDHHVRTADVLATRLHAIKTATPLTTDEGVIAPNTLLVQTLVSQLRVTLDAIEAFDQAIAQRAQHHPDFPLFQALPGAGPVFASRLLVAFGEQRERYASAAARQKYAGIAPVTERSGKKAWVHWRLQCPKFLRQTFVEWTAESMRHSFWAQVSYQQQRDKGNTHQAAVRALAFKWIRILYRCWQERTPYDESTYLQALHRRGSLLIQHRAKAS

SEQ ID NO: 117476 - protein, 402 aa, unidentified
MIFINCLGIDIGKSQSVVAHYKDEVLVKEMVIQNNQNGYRYLKNYIKHLDSLFILFESTGIYSRGMKRFCEIHKIDYLEMNPLEAKFKTSSLRSWKTDKSDAHKLALLAFRMKDSKVQRQSEEIYFELRERARFHLEMEINQNRLKVELVETLHQTFPGLEKLFTNRYSKIALSIAKAFPHPDFVSTLTHDELVEKVLHSTDKGISVNKAHKYVQKLIEIQINSFPNVDKSSFLLQKVQYLCDKLLIGIEEMKEFDQEMIDLAKNTTEFENIISIPGIGELTAALLIGELGNIREFKTNKQLNAFVGIDIKRYQSGTSKSRDTINKRGNKKARRLLYLIIMNIIRGRNHYQSHIVDYYYKLREQPHGKTHKTAVIASINRLLKTIHYLIVNNKLYDYQKAPH

SEQ ID NO: 117477 - protein, 320 aa, unidentified
MKELTAGIDVSKETLDISLYNGGKHDNITIANNKKSFMKFLKKYSSDDLQIVMEATGIYHLRIALEAHDLGYFVSVVNPLIIKRYGEMKMLRAKTDRVDARLIAEYGYEQSPKEFTPHSDDRMVLFQLLKAIEDLYKTRTEFRNRLESYTHGYPVSKEVGKTYRSMVQKIDREIERLKKKLQDSLDTHFPDQSSKLTSIKGVGKMTASMIMAFYGNFEQFETAKQAVSFAGLNPHPRQSGTSVKRGSSISKRGHALIRKTLYMSALSAKKHNPVCREYYERLLASGKSKKVALVAVAHKLLRHIFAIVKYDREWDPQYAK

SEQ ID NO: 117478 - protein, 407 aa, unidentified
MFCGIDWAEAHHDIAIVDPEGRLVARRQIRDDAAGFAELVELLAAHGDRPEDPIPVAIETSRGLLVACLRATGRPVYAINPLAVARYRERHSVAPKKSDRGDALVLANILRTDLAAHRPLPADSELVRAIAVLARAQQDAVWDRTLAHNRLRSLLREFYPAILAAVAAKRGGLLRPEARAILAAAPTPTAAARLTLAQLRSLLARAGRRRGVDGEACRLRAVFRASYLHQPPLVEEAMGRQALALLGQLEAACTSAEELAAATIAQFATHPDAQLITSHPGLGPLTGARVLAEVGDDRSRFADARAVKAYAGAAPVTWASGKSHRVSHRRVKNQRLAAAGYLWAFSALTASPGAHAHYERRRAAGDGHVAAQRNLFNRLLGCLYHCLQTRTPYSEQAAFPTQTATAA

SEQ ID NO: 117479 - protein, 450 aa, unidentified
MESSFAGVDWASEKHDVVVQNAAGEELLAASFAHDEAGLRSLCRQLVRLNVELVAIERPDGVLVERLLDAGLRVLALHPNQVAAARARFRVSGGKSDRFDAFVLCELARTDHHRFRVLEPDSDQTKALRALCRAREDLVQTRVALTNQLRAELERFWPGAVKIFRSIDSPIALAFLEKYPSPIEAKTLGEERLAAFLARRHYSGGKTPAELLRKLRSAPEGRAGELEIRTRRQLVLALVALLGPLVTQIKQLERQIAQALDEHPDGELFRPLFRDRKSVITVAELVAEIGDCRARYPTGDALAGDAGQAAVAIESGKRKVACYRWACNKRLRDAFCTLADSTRHWHPWAADHYARAIARGHDHPRAIRGLGRAWCRVLWRCWQDHTPYDPARHRGLQQHVLVTIPASSGSLPDPAATQRMLGATVTQRADRRAERNALDGKPTSAIALGG

SEQ ID NO: 117480 - protein, 465 aa, unidentified
MKHAQRRPRTKPASGPSLLERITPTAAGIDCGSEEHYVAVPTDRDAAPVRAFKTFTTELHRLADWLTACGVTTVAMESTGVYWIPLYEILEARGLDVVLVNARHVKNVPGRKTDVGDCQWLQQLHSVGLLRGSFRPTAAIAALRAYLRHRQTLVQSAATHVQRMQKALVQMNLQLSTVISDITGVTGLRIVREIIAGQTDPRALAQHRDARCRASEEDIMAALTGNYRPEHVFVLQQNLELFDAYQRQLAACDAAIEAHVSTLAAKAPTPAGPLPAPRTRKTPRDNEPRFDIRRPLHQLTGVDLTQIDAIGPYSALRLLAEIGPDMRRWPTEKHFTSWLTLAPHNKITGGRLLSSATLPSANRAAGILRMAAMSLGRTETALGAFYRRLAFQVGKAKAITATARKLAILVYRTLKDGLVYRDPGAAAYDAQHRQRVIRRLRQRAANLGLALVNRETGELLEGPVS

SEQ ID NO: 117481 - protein, 413 aa, unidentified
MDVVHPRCAGVDVSKRDAKVCVRIASTGRAKAKSTVTTWGSVTNQVLALRDHLIVEEVTLVVMEATSDYWKPFYYLLEDGPFEVMLVNARHVKNLPGRKTDVSDAAWLADLGAHGLVRGSFVPPEPIRQLRDLTRARTTITRDRAREIQRLEKLLEDAGIKLSSVASDISGVSGRLMLAALIEGERDPVVLADLAKRRLRSKIPELIEALTGRFGDHHAFLARVYLDLIDQHTSAIDGLTGRIEEVIEPFRGARDLIVTIPGISTLVADVIVAETGADMNRFPSAGHLASWAGTCPGSNESAGRVKSTHTRPGNPYLKGALGIAALSAARANGTYLAAKYRRIAARRGPVKAIVAIEHAMLIAIWNMLSTGAFYSEPGADFYIRLNPDKAKNRALDQLRKMGYDVTLNPIAAA

SEQ ID NO: 117482 - protein, 419 aa, unidentified
MSNTPSNTKLFAGIDVSKKNNQCCLLDDSGKVIKEVSMTNNVTGAHELEAVLAKHAQKLQSQELAVATEATSFYDFHILEFLSESEVLAEHNLKLYRFNARLIKAFKVSLKLMNKTDPEDAYAIAEYLRFRGEKAEEYRAKMDHLPLQRLTRFRWHLVQQLVRERNYFLSQLFLKFSAFGRGEPFSNTFGATASAVIQEFMTPDAIANASDEELVEFVMKHGRNRFSDPEEIVAKLKYVARESYRLRPALAENMHRILCLSLANIRALKASLKELNQTIDKQLSAFSITLTSIKGIGDVYAAGIFAEIGDINCFPSEAQVARYAGLAWKRHQSGNFEAQTTRLDKQSNAYLRYYLVEAADSLRRHNPEFRAYYKKKYAEVTKHQHKRALVLTARKLVRLVDALLRTNRLYQLKTPVESA

SEQ ID NO: 117483 - protein, 357 aa, unidentified
MKGAYEIIAGVDCHKATHAIAFLDSVGKVVHDLEIPANPAGYADAIAAARMLGEVVWGLEGTGVYGRCFAKALLAADMTVFEVPGIVTKRHRKHATQHGKSDRKDARAIAEAVLRDSERLPRFRECEEQEALRLRYDQRDRLVRERTMLINRIRSNALRLSIDAPKDLQTLISLRAIRTALDAIVNPSFVEDALVDEMRFSLATIERLNEQILRLERLMSPFVKRLAPELLELRGVSVIVAAGLIGHCGDMRHLRNADAFAMRSATAPISWSSGKSQAVRLNVGGNRQLNRLLHVIATVQLRAAAHPGRIYYDRKRSEGKTGRTALRALKRTLATIVYYRLRLCQTRIENTNVAIAA

SEQ ID NO: 117484 - protein, 348 aa, unidentified
MSWNLSAAVAVIGIDIGKNSFHIVGLDGRGAIVLRQKWSRGQVEARLVNMPPCLIGMEACVGAHHLSRKLKAFGHDARLMPAKYVRPYSKGQKNDFRDAEAIAEAVQRPTMKFVATKTADQLDLQALHRVRERLVSQRTGIINQIRAFLLERGVAVRQGLRFLRAELPRILAAPPDVLSPRMVRVIEGLAEDWRRLDARVDHLSGEITALARQDVGCERLMSVPGIGPIISSAMVAAIGTGDAFSKGRDFAAWLGLVPKQISTGDRTILGKISKRGNRYLRVLFVQAAWVVLIKPKSWQRHGLKHWIEAAKKRLHRNVLAIALANKLARIAWSVLANGRIFEARLQAA

SEQ ID NO: 117485 - protein, 478 aa, unidentified
MIKSVGIDLAGAGEHKVRCLDEEGQLCDGFGFESTPEGLAKLEERVFRDGANPVIVFEPTGLAWFMVAVYLRARHPDCHLVRTQARNVVALRKYLRRSSKSDRIDALTLAKMPFVDIERLNDVYLPPAKINAILRLSRQRQRLEGDIAGRKKRILGIIDGYLPGVRQPFSNLWSPQGREFLRTHLNPLAVVRDGEKALHRFLAKVRTRGKKEANESQWLYRACHGVATVYEMSNSSGAVNDDFFADLQDEIARELRLMEIEEAESDAIAQRIEILYRELHPSDNLRTIPGVGDLTAPVFLAVVGDPGRFRSQSAFANYNGVVPDSRQSANTEAKGLRMTKAGPSIMRWALYQASQIGRRYDPQLASVYHREMVHNGKNHKQAMGAVMSHIGARILAVLQENRPYELRDNKGKPITWEEARKLVLANYQVPEEIKQARRRRTTESNSAKLKRKRREMVAHSTHEAAEAPQPVATTASPG

SEQ ID NO: 117486 - protein, 347 aa, unidentified
MEYYAGIDVSLEQSSVCVMDATGRVVREGKIASDPAALAEWLLRLGPPLTLVGLEAGPMSQWLHAGLVSAGLPAVLLETRHVKAALSAMIVKTDRRDARGIAQLLRMGWYRRVHCKTPGSQEVRVLLTARKLLLSKVTDVELCIRGLLRGFGLKLGRISKGQFAARVRELVAGQAMLESVMEPMLRARDVMRQEFGKLHRQVLAIVRDDVVCRRLMTVPGVGAVVVLTFKSAVDEPGRFRSSKTVGAHFGLTPRRYQSGETDITGSISRVGDGMVRTALYEAAQVMLTRSQKFSSLKRWAMEVARRRGMQRAKVALARKLATVLHRMWLDGSDFRFGKQEVPAAAVA

SEQ ID NO: 117487 - protein, 344 aa, unidentified
MGEVITIGLDIAKSVFQVHGVDEAGAMMLRKRIGRAKMLEFFGKLMPCLVGIEACPAAHHWGRELQALGHTVRLMPPSYVKAYLKRSKNDANDAAAICEAVTRPTMRFVPIKTKDQQAGLMLHRARQLLVRQRTMLSNSIRGHLAELGIVSAKGRNGTGALLEIIADAGDSRVPLVARGILDVLARQYGALGAEIGSIDRSILAWHRSCEASRRLEEIPGIGPIVATALVAEIGDWKAFGSGRSLAAWIGLVPKQQSTGGKDKLGSITKQGNRYLRWLLVAGAMAVIRYAQKHGTLKRPWLGRLMARRPTKVAAVALANKIARMAWAIIVHGDRYREPKPLLAA

SEQ ID NO: 117488 - protein, 337 aa, unidentified
MEQVQHYVGIDLHRKRSVIVRRNDAGETLETVRIDNDPVALATELAKAGEHPEVILEATYGWYWAADVIEACGGNVHLAHPLGNNWGNRRVKNDERDATDLVDLLRMGRLAEGWVAPPPVRELRELIRYRGKLVHLRSNAKAQVHAVLAKEGVAVPMTDLFGVGGQRLLDEVELGKAYRIRVESLRDLIEIYDREIAMLGKETAPFFAGDLGYHAVQAIPGVGPVLASVFVAEIGDVSRFASARHLASWAGLTPNHHESDEKVRRGHITKQGSRLVRWAAVEAVAYQRGDTVIRRHHRRVGERRGNQIGRVAAARKLLTLVYYGLRDGEIRCLAEAG

SEQ ID NO: 117489 - protein, 355 aa, unidentified
MRILSLDLSKYKTVACEYEAETGRHQFATVLTTQKALHDLIVDREPDRVVIEICSIAGWVCDLVRSLGIEMQVASTNDERWQWRKVKRKNDRRDGLKLAQLSARNELDLVHVPQSEMRQWRALIAYRHHLVQRRTKIKNHIRELLLREGQLLPRHRSAWTQAGLAALEAMVKPLGEVSMDELWRGELEVELAQFKAVQKQLTEVVAKLDALGAANHNVRLLQTASGVGPRLAEAVVTMFDDPKRFRRGAAVSAYIGMVPKQWDSGETERLGKITRHGNRLVRSLLVEVAWCALRHNPWARETYQRISGGKKSRKKIAIVAVGRKLLVRCWAMLRDQSAWHWEGQSAVVTPPAPTA

SEQ ID NO: 117490 - protein, 339 aa, unidentified
MQAIRFGIDLAKSVFAIHGVDAAGSVVVRRQLRRGQVLKVFASQPPGLIGMEACGSAHYWARELGKLGHEVRLMAPLYAKAYLKRGKNDARDAEACCEAVSRPTMRFVPVKTVEQQCGRALHRARDLLVRQRTQVGNAIRAMLYEIGLIASKGRCGVSELIERIESASLEVPTALLTSLAPLARQWRALAAEIAALDKQLEAEAGADPLARRLMTIPGIGPVTAHAIVAAVGDGRQFASARDFAAWVGLTRLNHDTGGRTRLTGPISKAGDRTLRRLLVLGASSQLRRARAKPEKATIWINGLLARRPVKVVVVAQAAKNARIAWAVLTSGQPYRAAAA

SEQ ID NO: 117491 - protein, 381 aa, unidentified
MRTIGAERPDTTAVAVILGVDTHLDFHVAVAVDHLGRRLGDSSVPTTVQGSVQGYERLLRWAEGFGPLRCAGVEGTSSYGAGLTRHLRARGIEVLEVERPKHRRRSSRRNLQKSDPSDAERAARAVLAGEASGVPKSGDGRVEMIRTLRAARRSAIKARTQAANQLQALRVTAPEQLRNRLRGLSTKELVSVAARFRLAGGPSEVPAATKFALRSVARRYGALSAEIAELDAQLDRLVAQVAPELVALPGIGTDSAATLLIVAGDNPQRLGSEASFASLCGVSPIEASSGKVVRHRLNRGGNREANRALYMICLARMRRDRRTQEYVARRTAEGKSKREIIRCLKRYVAREVYRVLICCGARSSPTGPRDEAHIDAGSCAA

SEQ ID NO: 117492 - protein, 327 aa, unidentified
MGIVCGLDLHRRQITFDAMDVDSGDVWRGRLWQPDRERFRRWLRVDVARRAGSRSVAVAVAVEGCTGWRYVVEEITDAGFEAHLAEPADTQAARGRKRHAKTDRSDSQLLRELLQTGDLPESWIPPTPVLEWRERVRLYKSLVDHRTVWVQRIHAELYQHGVAVPEAAIRSVATRTWLATDEVELSEAARQRIAAGYRMIDATDGEAKPLKRELQRFGERQPACRALVDAQYGIGGLIAVAVWSELGDCRRFSRSMQVVRHTGLDVTVDSSDRRRAGGFLSRQGPETLRWALYEAAKNSSHHRSPDHDYYASVKERHDGKIAAISVA

SEQ ID NO: 117493 - protein, 323 aa, unidentified
MRHSILGIDIAKSKFDVVLLHQGKQRHRIFSNCPQGFEQLSAWLVKQEVKQVHACLEVTGTYGEALGTYLYQTGHQISMVNPLCIQAFGQSQLTRNKTDKVDAKIIALYCQSQNPELWSPLPTEIQELQALVRRLDDLMEMRHQEMNRIKASCHLESVQDSLQNVVAYLEQQIKTIKNLIGQHIQEHPLLLEQQELLISIPGIAEITAAKLLAEIPNLKDYKTARQAAAYAGLTPKQRVSGTSVRGKTCLSKTGNVRVGKALYMPAVVAQRHNPILKQCRDRLRQKGKHPMAILGALMRKLLHIAYGVIKTGKPFDPNYGQIG

SEQ ID NO: 117494 - protein, 416 aa, unidentified
MEVVFKYCAGLDVHKKMIVACVLLSSPEGLQRHIKTFPTMLAGLEALAAWLSGFGVTHVAMESTGVYWKPVFNVLSAHFDVWIVNARDLQQVPGRKTDVKDAEWIAQLMRFGLLKRSFIPAVEQRDLRDLTRYRTRLIGERAAASNRLQKVMEDANIKLASVATDSQGVSARAMLEALINGETDPAQLAELAKGRLRAKIPALEQALAGRIREHHRFMWREVLNHIDELNTRLLTLNERIRTFTAPYEGIIQRLDAIPGVDRYTAEVILAEIGPNVTPFPTAQHLASWACLCPGNNISANKRRSGKTRRGNNWLRTALVEAAWAASRTKDTYLGSQFHRLRARRGDKRAAVAVAHSILIVVYHLLAKPEAVFTELGGDYFLKRNPEQEQRRAIRKLEGLGFTVTLTPVVMAAAAAP

SEQ ID NO: 117495 - protein, 368 aa, unidentified
MKQQTSAATETKIKGRNIIDFTGKTIYVGIDVHEKDYQVAKVFDGICLGNHRMAANHQMLIDHLNSRYPGATFKCVYESCAWGFTLQRALNSAGIECIVVHAADVSSSDKEKKRKTDKVDALKLARNLASGDLTGIHVPDEDLQKERNLIRFRKKLVGDLNRSKNRLKSLLKYQGIKIPEHLGKKNNWSYNFMNWVEQEANKDVLLKDTLLLMLEEIKFLRQLLLKTERALRKLMKERHNEKATLLMTAPGIGRTIAMQFVLEVGDIKRFHSFDALNDLIGFCPDTDSSGDMQRDRGITSRRHKQLRSALIEAAWTAIRIDPALMDAYQKLTKRMQGKYAIIRIARKLLRRMRTMLLTGQPYQIGVAA

SEQ ID NO: 117496 - protein, 341 aa, unidentified
MGEVSTIGLDLAKMVFQAHGADASGGVIFRKKLRRDALLGFFAGQPRCLVAMEACASAHYWAREIAALGHEVRLIPPAYVKPFVKRQKNDMADAEAICEAVQRPTMRFVTPKSAEAQGAAVVFRTRDLLVRQRTQLINALRGHLMEFGFIVRQGPGHVSKLIDLVADPSSELPAEARPVLAVIADSLQAIQARILLLDREIAIRAKADSVAKRLMTIPGIGPVVATALVALAPAASTFRRGRDFAAWLGLTPRQHSSGGTERLGRTTKMGERSLRKLLILGASSATKVAARDGCKASPWLASMLARKPRMLVTVALANKMARIVWALMAHGGTYRAPATAV

SEQ ID NO: 117497 - protein, 344 aa, unidentified
MKVTRVGFDIAKRVFQVHGVDENGKVKARKTLAREKVLEYFAQLPACLIGMEACGGAHYWGRELSKLGHTVKLMAAQFVIPYRKRGKNDANDAEAICEAVGRPNMHFVAIKSEEQQSVLMVHRARTLVVANRTAQVNQIRGLLGEFGLVVAKGVARLRRELPGILEDAENGLPVLAREVLAGLLEQFHEFDARVSAYDRQIRALAEASEPARRLMQVEAIGPQTATALVASMGDPHVFKSGRSYAASLGITPRQHSSGGIDRLGQITRQGDRYVRTLLVHGARAYLRVVDKKTDGKSVWARRLKERRHINVVAVALAAKHARIAWAMLAKGTEYRPVVTEEAAA

SEQ ID NO: 117498 - protein, 346 aa, unidentified
MQNDTLVAVDIAKEVFEVGLSDRPGHVARRRRLARYEFLEFFAQLPQATVVMEACGSAHYWARRIEELGHVVVLLPPQYVRPYVVRNKTDRKDVDGLLEACRNERIKPVPVKSVTQQVLGTLHRLRSGWLADRTRAINALRGLLRELGFFIPEGRKHVLPDAWEIIQDPQSGLPDALKPSLGSLCEQIVSLSTRIEEIEAQLEALAKQLPVVARLRSVPGVGLLTATALYAFVGDALRFPSGRHMASFLGLTPREYSTGLHRRLGRISKRGDVYLRMLLVHGARSVLWHARRMKQPDRLRAWALRLERRVGHNKAAVALANKLARISWAVWKNDHNFEPMPELQAA

SEQ ID NO: 117499 - protein, 468 aa, unidentified
MEEVVALRFAPWTCMSAKKSVSQPPRSAVFDLYRLNCVPTCSCEPQEIESATRILARHCYIISEECGLMNAVGIDVSKGKSTVAVARPFGETIVKPFEVLHTKSGIENLVNILNALEGECRVVLEHTGRYYEPMANWLSGAGLFVSAVNPWLIKNFSTNSLRKVKTDKADAKKIARYALDKWCELRQYTAMDKKRAQLKTMNRQFNFYMKQKTAYKNNLVALVDQTFPGANKFFTSPAREDGSQKWVDFIDTFWHVDCVCGISLAAFTERYQKWCKRNGYDFQPAKPADIYNISQDLIATLPKDNMTKMFVKQAVDQLNAISKAVEELRIQMDELASELPEYDIVLGMKGVGPTLGPQLMAEIGDVSRFNKRSALTAFAGVEPGNNQSGDYEQHSVSTSKRGSPYLRKTLFQVMDVLIKTCPQDDPVYAFMDKKRSEGKPYYVYMTAGANKFLIYYGCVKAHLGDTDT

SEQ ID NO: 117500 - protein, 392 aa, unidentified
MRISVGIDIAKEIHWVTAIDAGGVVQVDRKLLNTPAGIATLVDELTALRGTVRIGLDVIGGIAGLAEAMLADAGFALVHVPGIAVNRARQGTVGGENKSDPRDARTIAEQVRTRSDLRPIEPATELDLEIRLLVGRRSDIVQAQTQRLSRMRDLLVGIFPGLEACLDLKTKGPLHLLTKFVTPAELRDAGKKRLVRHLQAAGGVPKVEDLADRVLTVATEQRIAVPAERTTARLIRELAVEALASRTRLIELDRELEALLARHPDAALIRSLPGMGAVLTAELIAEAGNLARFRSADALASAAGIAPVLRQSGRSRFLRRPSGGNKALKRVFYQSAFCSLAHDDSRAFYERKRREGKRHHQAVIALARRRVNVLWAVVHSRTPFQTAFKTAA

SEQ ID NO: 117501 - protein, 313 aa, unidentified
MVQSIGIDVSKKKLDLGMIGNDQSTKSLQFANDTEGIPSLVKTLQSCQEKIEDIPIVIEATGGYHYGITFSLMEKGFRKVIVINPLITKKHLNSQIRKIKTDKKDALLLAKIGLLEELHVFTESKKEVLLKRKVRLFHFLKKQLQQINNRLSSIRSLALEDGFEEDVLEEVKADLEARLEKVKKEVLNSITINFSKIAGVSDFNLKAIVAELGNIERFKNHKQVVAFAGMDPTIKESGTSVRGRSQLSKRGSKTIRYFLYQSAWGVMMHNEKYQKYYAEKRKTKHYYTCLSAIARKLLCEIYFNLKEHSYSIN

SEQ ID NO: 117502 - protein, 329 aa, unidentified
MSDTYSFLGIDIAKATFEAVLQVGPRQNSRGFDNDPAGFRALSRWLDKNGAGRVWAVQEATGRYGEALAHYLSQQGHAVSVVNPARIKAYGASKLRRAKTDRLDAALILDFGRTQRPALWTPPTAQQQELCALVRRVADVQHMRQQERNRLTAGSHPPIVQASLQAILAVLEAQIVDLQKAIETHLQAHPALRHTCQLLRSIPGIGLLTAVRLMVELPNIQAFDNPRQLVAHAGLAPSVCQSGTSVYGRGHTSRKGNAVLRAQLYMPALVALRHNPVIQAMQQRLQRAGKPKMVIVVAAMRKLLHLAFGVLKSGRPFDPAFALSPALGT

SEQ ID NO: 117503 - protein, 509 aa, unidentified
MSFRSLRLQARRVNFEGRRQKMAKEKKSAGTPKTFDTTKLPKHLRHINVDAAGIDVGSDRHVVAVPEGRDEVSVATFGAFTSDLYALADWLEKCGITTVAMESTGVYWIPLFEVLEQRGFEVKLVDARQVKNVTGRKSDVLDCQWLQELHTYGLLAGAFRPPDEIAVLRSYMRQRQMLTEASSMHIQHMQKALQQMNVLLQNVVTDITGVTGMNIMKAIIAGERDPQRLAEYRNERCKNSVETIAKSLEGNYRDEHVFALTQAVELYDIYQQKIAECEAAIVKHVRTLPHATEDEPPSSENPTPSRDRVRGPADLREELFKITGVDLFAIPGLAADTLLTLAGEIGFDMSPWKTEKHCASWLSLCPGTKKSGKRVLNRKTKRNANRAAQAFRMAAATQARSKTALGAFYRRIRARSGGIQAITATAHKIAVIYYSMLKNGTAYFETGQQAYEQRYQERRLLALNSLAKAFGYQLVPAAQSRDSKEVSVVSCQLFVATQTKSCPLPQRNN

SEQ ID NO: 117504 - protein, 442 aa, unidentified
MARKPSKQRFTIVHPDCAAIDVGSREHFVAVDPQYENAVQSFTSFTDDLYKLADWLDSLAIKVVAMESTGVYWIPIYEILSERGFEVYLVNARATRQITGRKSDVLDCQWIWQLMTHGLLRGAFRPSDPTCCVRSLVRQRAFKVKDQAQTLNRIQKALSQMNIQLANVISDISGVTGMRILRAIIAGERDPVRLAELTDGRIKAGKDTIARSLHGNWRREHLHALAQELAAYDFLEQQIAECDAVIGKALEQLPVLEHEPQPPRKALRSPHRTSAQQAALHQALWQVLGVDLTAIPTIGVDTALVLAGEIGSDLSRFPSSQHFCSWLGLAPPTRISGGRQLSGGGPKVINRAAQALKQAASNARNDKGFIGASHRARLTRMDTSCAIKATAHQLARLVYTLLTKKQTYVEQGLEAFEAKSQDRQLRALLRKARKLGYQLVAA

SEQ ID NO: 117505 - protein, 412 aa, unidentified
MEGETVIAGVDTHKDVHVLCLLDGLGRKIWSGSFRADPEGYDRLAETIGDPGSCAVVGVEGTASYGAGLTRRLAELGYNVVEVLRPKRDKVRPGEGKSDPLDAERAARKAASGRGCSVPKSQDGWVEAVRQLYVARRLAVATSTSCVACAKSMLTTAPGALRERFRGCERPKDLMPLLARRRKAGDALEESVLASLRSVATVWKEARSQVESCDARIRALLEANAPALLGVEGCGTTTAAALVVAAGDNPGRLKGEAAFSMLCGVSPIPASSGKTERHRLNRGGNRQANWALYEIAIKRMAYDERTKRYVAKRTSEGKSRREAIRCLKRYIAREVYRVLMDPNPDGAAPEGPELAKMRKAMRVTQKQAAAGLGMSAASLGHLEHGRRRSTKLERRYYELLCELKGALPQTAY

SEQ ID NO: 117506 - protein, 353 aa, unidentified
MTETTTIAWLGLDAHSRNCVLAHLDDHGTELKWWRFPTDPQQLLKHVQAIPASDKRLMLEESNLARWISQLLKPQLQQLVVCDARRNRLISNDPNKHDRRDAFALARLLRLNEFKPVWQPTDDQRVLFKRAAQAYENSVLRQTRLKLQLKSLFQHWGLFPAGASVYSKTGRATWLRQLPYDALRSQALLLYESLDQALAGQSQTRRLMCQTGRLFPEVQRLRTVPGVGLVGAHLFVAYVQDPQRFAKFSRLSKYCRLAIRDRSSDGKPLGFEQLDRHGNGTLKAISYRAYLQAAKRRSGPLWDFYQASLRHTGSTTHARLNTQRKILLTLWTLWLNGKDFDPNQFSRSKPIHV

SEQ ID NO: 117507 - protein, 352 aa, unidentified
MERYVGLDSHARSCTLGVMSASGQRLKSLVVETNGSALIEAVRGIAGRVHVCLEEGTQSAWLYELLRPHVAEVVVAVAPERKGPKDDQRDAWARANELRTGSIETRVYKAPEHLAGLRNAVRAYGFAVTDVVRAKNRLKAVFLSRGMSADTSVYDVKKRPEWLKQLSSPHRELAEWLGRQLDQVEPLRDEAQRWLLTEAKRHPIIRKLATAPGMGPIRTAQVVAIVATPERFRTRRQFWSYCGLGIVTRSSADWVQDRNGKWVRSLVAQTRGLSRKRHPRLKAVFKGAATTVIAQLPGDPLHGDYERMLQSGIKPPLAKLTLARKIAAMVLSMWKHQEVYDPKRHHPSPDQP

SEQ ID NO: 117508 - protein, 419 aa, unidentified
MQPNKSTYVGLDVHKDTIAVAEDGRGGEIRFFGTIAHTADSVLRLTKQLAAAGSKPSFCYEASPCGYGLHRHRTKLGFEWAVVAPAMIPRKARDRVKTDRRDAEMLARLWRAGELTAIWTPDEEQEAMRDLIRTRKQAMDAVKVAKQQLLSFLLRHGLRYENGSYWTKRHRRWLAELRHFRFSHQQLAFEELKRAVDQAETRVATLDQAIDEAVQTWRFAPVVDGLRALRGVNTIIAATVVAEIGDITRFENPRQLMAWLGLVPSEHSSGNTTRRGRLTKTGNALARTMLVEAGWSYRHPPKEGQPFLKRSAHLPQEIKDIGWKAQTRLCKRFRHLSNIGKPQPRVLAAIARELAGFIRDIARKTPLPAYCGASCCLCSTLETVADGQGVQLPPLPDACPRWSGGGPPRAPRLHHQLHF

SEQ ID NO: 117509 - protein, 392 aa, unidentified
MIYVGIDVAKDKHDCFAMNSDGEILIENLTLKNNYEGFDLLFNSTSNFNESFENIKVGLEATGHYSNNILNFLTSKGFNVFVINPLQTNLYRKGQSLRKTKTDKLDARFIATMLITDNFKPYSNLSYHISELKSLVRHRFRLVEERSKFKVSLSRIITIVFPELEKIVWSISQNSVLYLLNELPSVKDISKCNLKHLTNLLEIYSKGKYSRDKALEIRELAKKSIGTCSHSLSFELKQVIQTILFLQSQIDDIDKELKALIEELNSPLMTIPGISYVTAAYILAEIGDINNFDSPAKLQAFAGLDPSTYQSGKFIANHASMVKRGSKYLRWALLTATRLVCMRDKYFNDYKNKKIAEGKHYFVALSHTSKKLIRVIYYLLKTNKSYQLQKVA

SEQ ID NO: 117510 - protein, 369 aa, unidentified
MAQVTTIGLDLAKRVFQVHGVDATGTVVVRRSLRRRQVLAFFAKLPSCLVGIEACATAHCWAREITKLGHDVRLIPPAYAKAYVRRNKNDPADAAAIWEAVSRPSMRFVAIKTEAQQAAAGIHKVRAMLVKQRTMLINTLRGLMAEFGIVVADGRQHVEELIAVLTDPAEARIAAPLHDGLMAIVDSLRSLEQRIERIEKQILGWGRSNPTCRHLTTIPGYGPILSSAMAAMVVEPTAFASARHFAASLGLVPRQDGTGGKVKLGPISKRGNGYLRRLLVNGAMSVLCSKRAKEDPWLMKLLASKPRKVAACALANKLARIGWGVMMRQEDFRSRRMISRTPDPSQPDVVLTALKTASRAPLAVTCGQS

SEQ ID NO: 117511 - protein, 367 aa, unidentified
MKKLTTTMMQRTLNQQDGRLTIGLDVGDRSSFYCVLDEAGDVLLEQRVSTTPKAITEVFGAMPRSRIALETGTHSPWVSRLLSELGHETIVAHARSVRLIGESRRKDDRLDARTLARLVRIDPELLCPVKHRSAEAQADLTVIRARAALVRTRTMLVNAARGLTKSYGERLRGCNARGMNPKAAQDLSPELKRALEPMMSEIESVSERICEYDQMLESMARNRYPEAERLKQIKGVGTLIALTYMLTLEDPHRFRKSRDAACYVGLQPGRRNSGQSEPQMHISKEGDPYLRSLLVQAAHHVLGPWGVDSDLRRWGMKLAEHGGKRGKKRAVIAVARKLAVLLHRLWVSGEVYVPLRPSGRATLPAVA

SEQ ID NO: 117512 - protein, 354 aa, unidentified
MQSQIIATPKLFIGMDIHKKSWSVHLRTDLFDHKGFSMPPQPEKLSDYVASHFADHEVSLSYEAGCCGFSAARYFLNMGWTVKVVNPNDVPRSDKQLYQKTDKLDCRNLCKQLQQEQLHSIYIPTEPEEQLKSLLRQRNQVVKQLRKAKSHIKAMLLFHGIAIPDQFDNPNWSRNFLTWLNTIQWSHSTGTACMNSKLRILAMLKNEYLQTSNELRAYCRRHHKKDYYLLKSIPGIGGLLAAAILAELGDIRRFNNEREFRSCIGLVPGIHQSSETAIKMSLTPRCKALLRSYLIESSWVAIRTDPEIQAYYRKHAGKNSKNIIVKVAHKICCRILSVIKNETPYQINYKSTKK

SEQ ID NO: 117513 - protein, 418 aa, unidentified
MQTELSQYTAVIGIDWADKKHDVCVQDMATGKRRASQVRHRAEDLDEWARSLHRRFDGPIAIAVELSKGPIINVLQKYDFFVIYPIDPSKLANHRKTFTTSGAKDDPTDAEFALDLLSKHTEHFKPLQPQGVGMRTLMTLVEHRRQLMNDRVRITNRLRNALKQYYPQPLEWFDHIDTVLFCDFIRRWPSLPQARRARRATIERFFREHNMNRKPLLERRIKAIKSAMPLTTDDAVIVPHRLRALALVAQLEVTLECIKQYDAEIASLAPQHPDYELFSPLPGAGPVHTPRLMVAFGEQRERFNNAAEVQKYGGLAPVTKRSGQSTWIHWRWQCPTFLRQTFIEWAAQTVNKSYWAGLYYRQQRAKGCSHQAAVRALAFKWIRILYRCWKTRTPYDESRYLRALQERGSPLLKMADAA

SEQ ID NO: 117514 - protein, 339 aa, unidentified
MQLYSGIDLHSTNSYLAIVDENGKRIFKEKLPNDFATINERLSLYSGTLEGVVVESTYNWYWLVDALMAAGYIVHLANPAAIQKYTGLKHADDKHDAFWLAEMLRLNILPTGYIYPKEERPIRDLLRKRSHLVRLRTSLMLSLQNIISRNCGFKLRPDDLKCLSDNRVAPLLSSNEDLALAGQASKEAIDALTRQIRTIESFIEKRLKLKEGYRHLLSIPGVGRILGLTIMLETGPIERFGQVGNYASYCRTVSSKWTSNGKAKGKGNKKNGNKYLSWAFAEAAELARRYDEQARAFYNRKLNRTNFMIAHAALAHKLARAAYYIMRDQVPFQPEKTFA

SEQ ID NO: 117515 - protein, 378 aa, unidentified
MVLEPFEVLHTAQNLHDLAEKLKALDGETRVVLEATGNYHKPVAFVLHDAGLFVSVVNPVLIHDYDNNSLRRVKTDKKDAVKIANYTLDKWTRLRQYLPEDDTRLALKNCYRQYQQAVAIRTMLKNNLISSLDLTFPDANKLFSSPVKNNGCEKWVDFIGDFWHSECVSSLSANAFAKKYLKWCQKHGYVFTRSKSDEIYACAVNSASLPKSPTSKLLIQQQVAQLKAVSQSVAAFRQEMLRLSQQLPEFDTVMEMYGVGPSLGPQLMAEIGDVRRFSSKKSLIAFAGIEPQPNDSGKVVGNDKGISKVGSAVLRRTLFLIMTVILQTQPQDEPVFQFMNKKRSEGKPYKVYMMASANKFLRIYYAKVKAVMDSERSQ

SEQ ID NO: 117516 - protein, 412 aa, unidentified
MEIFVERCAGIDIGKADVKVCVRSPSKHRGSYRKETRTFATMTGSLLQMRAWLESEHVTLVGMESTGDYWKPVYYLLEESLECWLINPQHIKKVPGRKSDVSDAEWIAQLIQYGLVRPSFVPPPPIRELRDLTRFRASLIHDRTRQVQRLHNVLEDAGIKLSLVATDIMGASGRAMITALIAGERDPRALADLALGRMRPKNAALIEALTGRFTEHHALLCELMLDQINHIDATLTRLDIRIDAAIEPFRHIQRRLTTIPGVARKATEVIIAETGADMTRFPSPAHLSSWAGLCPGNNESAGKRMSGTTRHGNAWLGAILGECAYAAARTKNTYLRERHRRLKRRRGDKRATVAVARTILESTWIMITNDCDYQDLGPEHFITRTRNPARRAQHLTNELHSLGYQVTLSPAG

SEQ ID NO: 117517 - protein, 444 aa, unidentified
MAARTRQVFELQHPNAAGIDIGSASHFVAVPPDRDDRPVREFKSFTEDLLAIAEWLSACAVDSVAMESTGVYWIPLYELLVSRGFTVFLVNARHVKNVSGRKSDVLDCQWLQQLMSFGLLAGAFRPDEDICALRALSRLRDMLIEGQAAHIQHQQKALTEMNVQLTNVLTDIDGKTGQAIIRAIVSGERDPVRLAELRDGRVHASREEIAKSLRGNWREEHLFSLAQALKLRDAYQERIDECDRKVEQKLLALACRDGEPPAQGKRKGRAKNAPNFDARTALFRVCGVDLTRIDGIDVGTAMKIIAEIGPDLSKFKSVKHFCSWLGLCPGTKISGGKRLSGTAKRCANRVTQALKVSAMGLLRSKSALGAYCRRMAARMDKPKALKATAHKLARLVYTMLTKGEEYVDRGQDYYEQLYRKRVVTNLQRRANELGFTLTPNLQAA

SEQ ID NO: 117518 - protein, 405 aa, unidentified
MTTVFVGHDWAEDHHDIYLENLEGRRLYRGRVDDGLAGVAAFHAIVAAHADDPADVLIASETDRGLFITALVTAGYAVIAINPMSTARYRERLSTSGAKSDQGDARTLADVARLDGHNHRRVEPDSALADAIKITARAHQTLIWTRQRQLNQLRSTLREFYPAALETFPELAHRDCLATLAVAPHPAAAHALTVDELAIALSESGRKRSITTRAAAILETLTGDQLRAPQPVEAAMGSHTAAMIATATELTRQIDRLEVELDELLDEHPHAPIIRSIPGLGTKLGGRVLGEFGDAPSRFADARCRKNYAGTSPITKASGRSHVVLARRTRNLRLADACYQWAFTSITHSPGARAFYDQRRQRGDSHSRALRALGNRLVGILHGCLTHGTRYDERTAWGHRATNAA

SEQ ID NO: 117519 - protein, 338 aa, unidentified
MNKFSGIDLHSNNSVVVVSDEADRIVYQRRLPNDPLQSRAALAPHREDLVGVVIEATYNWYWLVDELMNDGYRVHLANPAAIRQYEGLKYSGDFTDAAYLAQLLRLGLLAEGYIYPADERPVRDLSRKRMQLVQCRTAQILAIENLFSRHTGEQMSSERVKRLDEAQVNGFGFVPDLTLAIQANLAVMQTLQEEIGILETRLMQRVKPNPDYALLNSVPGIGPVLATTIMQETGTISRFTKVGNFSSYCRCVDSRRESNSRKKGEGNAKNGNKYLAWAFVEAANFAIRSCPEARRFYERKKHARNRIVAIKALAHKLARASYHILREHKPFEVTRCFR

SEQ ID NO: 117520 - protein, 343 aa, unidentified
MNVTTIGLDIAKNVFQVHGVDEHGKVVLRKKLSRGKVLEWIANCPPCLIGIEACPGAHYWARELLKLGHSVKLMPAQYVKAYVKGNKNDGNDAEGICEAVSRPGMRFVAINTEAQQEIQMLHRIRSRVIAERTALLNQIRGLLGEYGIVFGQGPSQVRRGIAALLKGEDPRLSAMARELVLGFQAELRELDERIGHHDARVKATCAGDARSVKVAALPGIGPLTATALVAAVNDGKQFQNGRQMAANLGLTPREHSSGGKQRLLGITKRGNTYLRTLLIHGARTVLRHATGKTDRLSRWALVIQARRGANVAAVALANKLARIAWAVLARDRIYRADWAEQSV

SEQ ID NO: 117521 - protein, 356 aa, unidentified
MSQKLDTLPAVIGIDIGKNSFHIVGQNQRGAIVLRQKWSRGQVEARFANLPPCRIGMEACVGAHHLSRTLKALGHDARLMPAKYVRPYSKGQKNDYRDAEAIAEAVQRPTMKFVATKTTDQLDLQALHRVRERFVGQRMGIINQIRAFLLERGIAVRQGLRFLRAELPGILATRTEALSPRMLHILEDLTTDWRRLDARIDDLSSEIEALARHDKGCERLMSVPGIGPIISSAMVAAIGAGDAFSKGRDFGAWLGLVPKQLSTGDRTILGSISKRGNRYLRSLFVQAAWVVLVKIGPKHWDRYGLKSWIEAAKKRLHHNVLAIALANKLARIAWAVLYKGRAFECVMTNEAASQPV

SEQ ID NO: 117522 - protein, 325 aa, unidentified
MNIVFLGIDLAKNVFQLCGLNQAGKPVYTKRTGRKELLQALANIPACLIGIEASTGAFYWQREFEKLGHKVKVISPQYVKPFVRGQKNDGNDAQAIAVALMQPTMQFVPPKSPEQQDIQALHRARQRIVNHRTATVCQIRGLLLDRGIPIGSAVSRARRAIPLILGDAENGLSSRMRRTIAELYDLFNDLGRRIHFFDKEIETVFRQSEACQRIAKVKGIGPKTATAVVAAIGKGTEFKNGRHFAAWLGLVPRQHSSGDRQVLMNMTKKGDRHLRTLFIHGAPAVVRVATNNNDGHMNQWVNQLKERRGFNKTTVAVANKNARII

SEQ ID NO: 117523 - protein, 405 aa, unidentified
MDVHKNLVVATIGITDRKTNVTEYFQRSFSTLNSDLYRLKDWLRSHHCSDVCMESTGKYWIPIFNVLEDEINVHLTHPKYVKAIKGKKTDKKDSKWICDLFKHDLIKFSFIPPKEIRELREIARYRYKLVCMRSSERNRYQNCMTVSNVGLASVVSDPFGKTASNIMKEVMKSNVIDDDKILKLVHKNCKNKDKILDSLHGYRIESDQRFKMEKSLDHMEYLDQLIDSCEVELIKRAYPFRRSFQHITQIKGISVLSAILIISEIGIDMSQFESDKQLVSWAGLSPANNESAGKKKSVRISKAGQYLKPLLVQCALSAIKDKASYFGRKYSNIKKRRGHKKAIIAIARMMLVSIYHMILTGEEFQPTDHESLMSPKSNTDQSLTVEKALNFLKRSGIDISSILVN

SEQ ID NO: 117524 - protein, 338 aa, unidentified
MDLYTGIDLHSNNGFYGILNEKGERIFQKKLPNDLPRVLKTLELFKKDIKAITVESTYNWYWLVDGLMDAGYPVDLANPAGMTQYNGLKHADDKSDAFFLAELLRLHILPKGYIYPREERAVRDMLRRRMLLVQQRTTHILSFQSMISRQTGSGMSCRTIKALKEEDIKDYFNDEYLILIGETNISVIRHLTEKIRRFEKEVQKRVKIKPEYEKIQTVPGIGKILVLTIMLETGPISRYAGAGNYASSCRTVKAIHTSNNKKKRNLNKKNGNKYLGWAYVEAANFMRRWCPEAKRYHQKKMARSKQVVATKSLASKISKACYYIMRDQVDFDVKKMFG

SEQ ID NO: 117525 - protein, 408 aa, unidentified
MNQDSGFDIWCGLDVGKTGHHACALDAAGRKVFDKPLPQDQKRLEELFDKLQTHGRVLVIVDQPNTIGALPIAVARSMGIQVAYLPGLAMRRAADLYPGNAKTDARDAFVIADTARTMPHTLRRVDAGEETLAELKVLVGFDEDLAAEATRLSNRIRGLLTQIHPALERVVGPRLTTKQGLAVIEQLGGPQAMAAASKSKLLRVISKAYPRGTQEFADAITTALAEQTVIVAGTAAAEQVLPQLAASLRQTLDQRHALAAQIEQVVDAHPLAEVLTSMPGVGVRTAARILLDVGDASQFPTAGHLAAYAGLAPVTRRSGTSIRGEFPARSGNKHLKRALFLSAFAALRSDPTSKAYYDRKRAQGKKHNAALICLSRRRCDVLFAMLKNREPYRAPTPTREPSPLPLAA

SEQ ID NO: 117526 - protein, 343 aa, unidentified
MNKFNVIVGIDVAKKTLAVCLLCQEKVEDFTLDNDLKGLSDLVNKLIEIEPDPGKVLICCENTGRYSEKLAMIATGEGYFVWVVSPVIISRYEVKLSRIKTDWDDARKIKDFAFAHQHLGAQYQIPDAQSQKLKELFQCRKHYVDARQRETNFLKSSQDAANPSGFCLDMCKRTIAELNTKVIEIEKIIKGLITKTPEYNRQYQLLKSVPGIGPISAERFLYVTECFTKFKTWKQLACYIGSAPFEHQSGTSVKKKPRTSKKRHRSFKADLFEGMTSTATRKGQFYYAYYTRMIELHYEHPQVINNIINMVLKVIYSLIKNDTPFDKKIFLSQKKSWINLEMS

SEQ ID NO: 117527 - protein, 426 aa, unidentified
MKVLYERVAGIDVHKDMIKVAIRSPGDKPWTRKTEVLEYRTFYGVLQHMAIELVRRGVTHVVMEASGVYTEPVYYALCEQDFTQIAVINPAHAKALKGHKTDAKDCARLAELFECGLLRGSYIPAPELKEVRDLTRYRIKTVQARTSEIQRLGKSLESAGIKLGSVASEITGVSATAMIEALIDGERRGAVLADLARGRMRTAGKLADLSMALAGRFTSHHALMCRLHLDRIAVFNTAVGGLEEQITARAAPWQREQDLLKTIPGFGDTVAQAWLAEIGPAPHAYFSCHEKLASWVSLCPGNNISAGKRKHGRTGDAGTYIKPMLVQAAWSAIKGRGRLQARYNRLVRRFGGEKNPAAKKKAITAIAHTLLKIAYQVLKSGTPYQDLGADFYTRRESPAQRQAYLLRQLEKLNPGCTITIRPPEAA

SEQ ID NO: 117528 - protein, 349 aa, unidentified
MTTQTAKHYVGLDVSQELTAVCVVDDEGKIVWRGACATEASILAETVRKRAPHAARIGLETGQFSNWLTLSLRRRGLPVVCVDARHAKAALQMQINKTDANDAHGLAQVVRTGWYREVTVKSMDASALRMLLVARAQLVTQRQAIANTLRGLMKAFGIVVFRGAKGRFPVRVREAIEGNAALTAIAEPLLRAWQALREEVETIERQLVTRAKDDAITRRLMTVPGVGVIVALAYQSVIDTPERFRKSESVGAYIGLTPKKYQSGEVDVSGRISRCGDGLLRAYLFEAANVLMQPNRKASALRSWGLKRADRLGRKRAKVALARKLAVVMHRIWANRTEYCGDAITANSL

SEQ ID NO: 117529 - protein, 367 aa, unidentified
MKDSSTVVGLDVHKNSIQIVTAETDGAMEVRHFGRIGGTMDGLDRAVRKLVSKGSTLRFVYEAGPCGYEIYRHLTGKGFSCKVIAPSKTPKKSGDRIKNNRRDAETLARMERAGELTAIYIPREEDEAMRDLTRAREDANKALKTARHQLNAFLLRYGKRYPGKASWTPSHMRWLSDITLPHPSQQIVLQEYIMAVTVGTERETRLTDQIAKLLPEWRMYPVVKALQALRGVAAIVAATTLAEIGDMSRFQNPRQLMAYLGLVPSEDSSGDSTHRGSITKTGNGHVRRALVEAAHAYGFPARVSRHLLKRQAGLPQPVLDIAWKAQVRLCGKFRRLMARGKLKTKVVTAIARELSGFIWAIAREVNV

SEQ ID NO: 117530 - protein, 339 aa, unidentified
MTHIAMDVHRKRSTLAYVTPGMAEPEVVRCYTTPKDFAKVLGELPRPWVVCVESTRQSPAVVCWLREMGVDELHLVNAQALHNFTKGKPKTDARDAKEMLDLQLMGRLPECYLATQGVQDWRALSRTRAFIRKTSTAVRNAIRALLNQHGVEIAYRDLQGAAAQEQLAQLQEQLGPQAWVALQQLMLLLSVTEESLKALDAEIEAQVAQQPAAQALTEIPGVGAILAFGFLAEMGEIDRFEAPPHLISYAGLAPRADDSDEYRGPRHLPKRCNKRLRHLAIQATQCASRTQAESRTRAAYGRLVKRLKPNTAKIAAARVLLKDVFYRWNQAVTPSDVAA

SEQ ID NO: 117531 - protein, 338 aa, unidentified
MRKNNIYNHYIAIDWSIENMAIARMTKTSNKITVVDVPSDIDDLKVYLKRLRNSKILVIEETTTSQWLYTELKDYVDKLVICDPYRNKLLNDGPKTDKIDASKLVQLLKADLIKEVYHSSDKLLHLRRLVSGHGDLIKAGVRLKNQRYSLLRACGKRGLERKGFQLGSPDEQFVLDCMDRQIELYEEEKKAYEKEFNRLVKDVSEIRHQKSIPGIGPISAVKIVARVVTPFRFADKGHFLSYAGLIKLEKMSGGKSYGRKNSRYSRELKSAYKIAAYAAIGGNNPINDYYEYLVNEKGYPVHIARHSTSRKLATVSLGVFKSGKKYQPFKKNLEKSSS

SEQ ID NO: 117532 - protein, 343 aa, unidentified
MTQRQPVVEVFAGLDVSAREIKVARVQGQDQNPTLATFANHASGHKALLAFLLEKTERVRVCLEASGNYSLDLALSLHAQRQVEVSVINPRRARKFAESLGERSKSDPVDARVLCQYAARMPWESWKPPSATALRLRAIPRAMESLGVMHTQESNRGHALASSQALPALVLRERQRHQRYLENRMKQLRREARRLIARDAELDRRYRLMLTVPGIGETSALQILGELVVLSDTADARQWVAFAGLDPCIFTSGSSVEKRPRISRGGSRHLRRALYMPALVALRRKPHLKRFYERLLSRGTARLQAVVALMRKLLHALFAMFRANQPYDGSKLCPSELITKAAA

SEQ ID NO: 117533 - protein, 313 aa, unidentified
MLQPIVYVGLDIAKATLDLCALSPAGPQRRQFANQPKGHRPLLRWLQQWPCVHIICEATGGYEQAVVAALQAAQRTVSVVNPRRVRDFARAQGRLAKTDTLDAAVLAEFGQHLQPAATTRWEPAQQQLAQLVQRRRQLLGLCTAEHNHLEHTTHPALRRQLHAHLRSLQRQLRQLQQWIDALVPAESALQQKLTRLCTVQGVGRTTAIHLLATMPELGQWNRRQVAALAGLAPFNRDSGPRRGHRFIVGGRAATRAALYMAALVAAFHNPRLREFYQRLLAAGKPPKLALTAVMRKLVILLNQLLKKPEFQPT

SEQ ID NO: 117534 - protein, 364 aa, unidentified
MTKSSTLTMGIDLGDVYSQLCVLDAEGEVIEESRIRTTEAAFRGRFAAMELGLAVLEAGTHSPWLSRLLKELGHECLVANPASLHRKGRKKNDRIDAEKLARWGRSDPAMLDAIEHPGAEVQADMALVHSRRSLVEARTKLINRARGLVKSYGGRLPRCDADYFVEKVRAWVPTELEPAVQPLLESIASLTRQVKALDQQIEALVETKYGWATVPLRQIKGVGPITALSFALTIRDPGRFHKSRQVGPYLGLTSRQDQSGESDREHSISKAGNVYLRKLLVQSAHYVLERGPDTDLKRWGLRKAEGGKKAKRRAVVAVARKLAVLLHRLWESGEEYRPLREEADLAFGLPASVQPTPPVKVRPL

SEQ ID NO: 117535 - protein, 368 aa, unidentified
MTKCIRWVGLDVHADSIAIAEIDDGAKEARTSEIESSPKVVAKRFKRMAAEADLRVCYEAGGCGFELYRQLTSMGIECIVVAPSLVPKKPGDHVKTDRRDAIRLARALRTGELTAVYVPNQEQESARDLLRARDDVRKDRITARHRLSSFLLRRGHRFVEASRWSGKHAAWLKELRFAEATAQTSFEHYRAAVEYLDVRLKALDAQIAALAKSDAWRARVERLSSLRGIATLSAMIVLTELIELRRFENPRKLMSYVGLVPSEHSSGNKQQRGRITKAGNGQVRRILVESAWTYQRRGASTAIKKQWAEQPPDVVRIAHAASVRLSKRYARLAARGKPQKAVVAVARELCGFIWALEQLPLAKLPLAS

SEQ ID NO: 117536 - protein, 427 aa, unidentified
MNCTQNRKIEQVTDQTLVIGMDIAKQKHYASMVDARGRVLKKPFPVIQSRSGFEQFYASIQEAMKEFGKTEVIVGIEPTGHYWLNLAYFLEEKGIPLVMVNPMHVKRSKELDDNLPTKHDAKDALVIAKLVKDGRFSYPRILHEVEAELRAGSTFRESLTKELNAVQNQMIRWLDRYFPEFVQVFPSFGKMALVVLEKTPFPMDIANQTVEGLMERYRQSERLKCPQKPKVQKLLEVARHSIGITEGQQMARIEIATLVRRYRQLEQEIATLTEELTALAQTTAEYEWLQTIPGLGDATIIELLSEIGSFAQYQDPRQLIKLAGLTLKENSSGQHKGQKRISKRGRKRLRALLFRVMMPLIRHNEAFRQLHEYYTTRPINPLRKKQSIVVLCGKLLKVLYAVCVKQQAFDGERMIQDIFSQFQAQAA

SEQ ID NO: 117537 - protein, 428 aa, unidentified
MQAVVVSERTQAVWEAVIERCCGLDVHQKTVTACILAGALNQQPSESLRTFSTTTKGLLELRDWLEEHGCSHVAIESTGIYWRPVFHILEDTVTVLLVNAYHMKQVPGRKTDIKDAQWIARLLRWGLLKPSLIPPKPIRDLRDLCRYRKKLTEHASAEKNRIQKVLEDANIKLASVVSNVFGVSGRAMLEALMQGETSPEKTAELARRKLRSKIPQLVEALEGRVNEHHRFLIQMQMEHLEYLEEAIARLHERIDEKIKPYQHEVDLICSTPGIDTVSAQHIFAEIGGDISVFPSEGHLASWIGVCPGNNESAGKRRSGRTTKGNRWLKALLVQTAHASSRTKGTYLKAFYHRVAARRGKKRAALAVAHKQTTIIYHELSDNKPYQELGENFFDLRNQKALEHRLVRRLRNLGYRVDLHPEPVTSQYS

SEQ ID NO: 117538 - protein, 343 aa, unidentified
MQTITTVGLDIAKSVFQVHCVDADGEVVLRRQLKRRYVLAFFQKLPPCLVGIEACASSHHWSRELQALGHTVRLMPPAYVKPYVKRHKNDAADAEAICEAVTRPNMRFVPTKTPEQQSCLTLHRTRHLFIRQQTAIINSIRAHLAEFGIVAPVGRNGVEQLLEVVANVEDKRLPEVARACVAALGTQLVALKAQILAFDRRIMAWHRSNETSKRLDAIPGVGPALATALVASIADPKAFRSGRDFSAWIGLVPKQNSSGGKDKLGSISKQGDRYLRSLFTAGALAVIRYAKIHGTKHRPWLTALLARRPTKVAAIALANKMARMAWAMMTRGERYKEPVALAA

SEQ ID NO: 117539 - protein, 402 aa, unidentified
MNAIGIDVSKGKSMVAIMRPFGEIVSTPFEIKHTTSDIKSLVELINSVEGESRIVMEHTGRYYEILAHQLSEANLFVSAVNPKLIKDFDNDSLRKVKSDKADAVKIARYALDKWQNLKQYNVMDELRNQLKTMNRQFGFYMKHKTAMKNNLIGILDQTYPGVNTYFDSPARSDGSQKWVDFASTYWHVDCVRKMSQNAFIDHYQNWCKRKKYNFRKSKAEEIYGRAKELVPVLPKDDITKLIIKQAVDQLNSASETVESLRTLMNETASKLPEYPIVMAMKGVGPSLGPQLMAEIGDVTRFTHKGAITAFAGVDPGVNESGTYEQKSVPTSKRGSSALRKTLFQVMDVLIKSKPQDDPVYQFLDKKRAQGKPYYVYMTAGANKFLRIYYGRVKEYLASLPES

SEQ ID NO: 117540 - protein, 430 aa, unidentified
MTKLTPTPAGAVLVAIDMSKNRQEVLIERPEGGRRRRLSVMATKKDYDDFAEQLAAIGRPIVVGFEATGNYHRTLAHRLLTAGFELRLISSVALAHTREALHNGWDKNDSKDAQVILHMLRIGATQRYVDPLAAGINDLQELSKTHETISKAKTQTWHRILTHYLPLYFPEIARFAGNSRSDWFFALIERFPTPASITALDAETFSAVAWPLIGRKVSKARLINDIYETACASVALPVPEDSAAITMFRMVIAQGRSLIQQRDEIERLAHARLAKHVDYQLLRKIPGIGPINALTILAEAGDLRRFNHHRQFLKFCGLDLATCQSGTFRGRTKLSKYGNARLRRTFWMAAQVAARQRDNSFRDKLGRYVAGHADDADRRRKAMTALTAKMARVAHAVIKTGTEYRPFLERSDARWKDPSLMCREGARATL

SEQ ID NO: 117541 - protein, 398 aa, unidentified
MTESSDYESVQVFIAVDVGKDTHHAVAINRSGKRLFDKALPNDENKLRSLISDLKQHGQILLVVDQPATIGALPVAVARSEGVLVGYLPGLAMRRIADLHAGEAKTDARDAAIIAEAARTLPHALRTLKLADEQIAELSMLCGFDDDLAAQTTQASNRIRGLLTQIHPALERVLGPRLEHPAVLDLLQRYPSPEKLASLGEKKLAAQLCKLAPRLGKRLAADIAQALAEQTVVVPGTNAAAVVLPRLALQLITLRKQRDEVALEVELRVLAHPLYPVLTSMPGVGVRTAARLLTEVACRAFASAAHLAAYAGLAPVTRRSGSSIRGEHPSRRGNKALKRALFLSAFATLRDPLSRAYYTRKMSQGKRHNQALIALARRRCDVLFAMMRDGTFYTPQGS

SEQ ID NO: 117542 - protein, 418 aa, unidentified
MEVIHERVAGLDVHKKSVVACIRLQQGSKVKRECRSFGTTTAGLEELLTWLTEAGCTHVAMEATGVYWQPVWAILSEGAFELILANAAHIKNVPGRKTDMNDAMWIADLLACGLIRPSFVPDRPIQDLRALLRTRKQLVREQTRHEQRIQKTLEQANIKLDAVISDILGVNGRRMIEAMIAGESNPQKLAALADRRLKAKPSELSDALRGRLTENHRFLLRIHLKQWDAEQSTIDEIDRQVDRVIAGMEQAARFRLLIALLCKIPGVAKLSAITILAEIGTDMSRFRTAAQLVAWSGLCPGQNQSAGKRKSSRLRKGAPWLKTALVQCAWAAKRQKNSYYRAQFYRLCGRRGPQKAICAVAASMLTAIYHIILHGTPYQDLGPDHFDRRPVEAKAQRLVAQLARLGYEVQIQPAAAAA

SEQ ID NO: 117543 - protein, 421 aa, unidentified
MNRLTDTQYTAYVGIDWAAAKHDICVQAAEGGRREFARISSQPEAIEAWAQDLYRRFGAPIAVALELSKGPIVSALQKYDFLVLYPINPSTLAKYREAFTPSGAKDDPTDAELAVDLITRHPERFSPLKPQSVGMRKLIALVEQRDKFLSDRGRLVNRLGHALNQYYPQVLEWFSEHHTVVFCDFLSQWPTLKQAKRARKASLERFFKSHHVHSSALIEKRITAIKAAMPLTLDPAVIDPHRLQVEVLIEQLRITIKALKRFDDEIAVTANKLPDYHLLFSPLPGAAKVLAPRLLAAFGEDRQRYPQADALQKYSGIAPVTKRSGKSTWVHWRWQCPTFVRQTFVDWAAQTINKSAWAGAYYRQQRAKGCSYQVAVRGLAFKWIRILHRCWQDRTPYDESKYLEALRRKGSPLLKYLAESV

SEQ ID NO: 117544 - protein, 408 aa, unidentified
MNTLYVGIDVSSKSNVVYLMLPNGDKHSNFSVANSHEGSTLLVKKIYSALTSHSLDTVLIGLEATSVYGDNLVYFLREDATLAPFNRKIHVLNPKQVKKFHDAYNDLPKNDYVDSFVIADCLRFGRINKEVYMGDYRYKALQNLTRARFFAVQNLVKEKQRFMNVLFKKYSTMTQEKVFSDTFSTTALAVYDEFESAEALANMDLHELTDFIIEKGKNRFPDPDAVAKAIQKAARSSYRLPKTVNDSVNQVLSISITSMKALESQIKEFDKAIKAQMELLPNVLISIPGIGPVYSAGIMAEIGDINRFDNQAALAKYAGLAWKQHQSGSFEAEVTRLIPSGNRFLKYYLYEAAFSLVRCDKEYSDFYHLKYKEVNRCQHKRALALTARKFVRLVFRLLKDNRLYVPAK

SEQ ID NO: 117545 - protein, 344 aa, unidentified
MMIHFVGLDVSQKMTAICVVDNAGRRLWRGQCPTAPEQIAAMVRRHAGDDSRIGIETGAMTPWLVHELRALGLEVICLDARHARAALKMQINKTDQNDAEGLAQIVRTGWFRSVHVKSFDSHRARALLGARAQLVGMTTRLSNHIRGVLKTFGLLPGAMRGLRFDRKVEVLLEDRSDVAPIVRPMLVAWRQLREQISAFDKAIRVLVRSNSPCRLLMSVPGIGVLSALAYVSTVEDPARFSRSRSVGAHLGLTPRQYQSGDVDRSGRVSKCGDTLARTLLYEAAVVIMTRVKKASELKDWALAIAKRSGIGKARVALARKLSVILHSVWRSGKPFRWTEQAITG

SEQ ID NO: 117546 - protein, 346 aa, unidentified
MEVYIGLDVSLACTAICVLGEKGEIVTEAQVASAPEALVSFMRDLPHGIAAVGLEAGPLSQWLHKGLTDAGFEAVLMETRHVKAALKAMPIKTDRRDAEGIARLLQMGWFRSVHCKTVSSQEKRALLSARKSVKDALLNMELSLRGVLRNFGLKLGHVSKGRWEARVRELIAGNAMLEAAAEPILRARTALRRELTGIEKLVRNLAGDDPVCRLLVTMPGVGPVVALSFVSAIDDPERFRRSKDVGPWVGLTPGRNQSGERDIVGQITKAGDVGLRTALYQAATVMLNRGAPNWLKAWALRLAVLRGRKRATVALARRIGVVLHRMWRDGTEFRFTREAAMALHTA

SEQ ID NO: 117547 - protein, 338 aa, unidentified
MAILDSAGKLVMEAILETKAETILQFIRGLRGSLHVTFEEGTCAAWLHDLLKPHVTQVLVCDPRKNNLGKVGNKNDRNDARELAELLYRGNLKSVYHGEYGMRTLKELARSYLAITRDLTRVMSRLKAIYRSWGIACAGQQVYAPRHRAEWLAKISEAGVRRRAEFYYQHFDALAALRQQARRELLAESREHFAVKLLRQIPSIGPIRAALLVALIQTPHRFRTKRQFWSYIGLALKTYGSGEYRFVGGQLKRSKKALAIRGLNINHNHDLKNIFKGAATWAAATSGPFQNFYEACLARGMKPSMARLTLARKIAAITLLVWKKGVRFDAEHLKQQAA

SEQ ID NO: 117548 - protein, 355 aa, unidentified
MPSKADTAVARTIGIDTGKNTLHMIGLDEKGAIVLREKVSRTRIAARFVNLPPCLVGIEAGMASHHVARELVALGHEVKQVPPAYSKPFRQGHKNDFRDAHAVAEAVERPSTRCVPIKTDGQLDLQALHRVRSRLIGNRTAVINQIRGFLLEHGIPVRQGHRFLRQQLPQILATRTDVLSPRMIRIIGDLMADWKYLDERIEGVTDEIEALAHADEGCQQLITVPGIGPIISSAMVAAIGNGAAFCKGRDFAAWLGLVPKQMSTGDRTILGRITKRGNRYLRMLFIQGARAVLLRPASWAKHSFGSWLTAATRRLHRNVLTVALANKLARIAWTVLAQGRRYEARVEPRVEPAAA

SEQ ID NO: 117549 - protein, 367 aa, unidentified
MKKGSIAATKQSGNISQQKLTMGLDLGDRNSWYCVLNEAGQIQLEQRVRTTAKTLREVFGAMPRCRIALEIGTHSPWISRLLSELGQEVIVANARKVRLIGESRKKDDRLDAQTLARLARIDPQLLYPVKHRSVQAQADLMMIRARAGLVRVRTGLVNTARGLAKSYGERLRGCNVRNMNPEKTEGLSPELQTALQPWLAAIESVSERIAEYNQRIEDLAQQNYPQVALLKQIKGVGTLIALTFLLTLQDPHRFGKSRDVGGYLGLQPGRRKSGQSEPQLHISKEGDPYLRTLLVQGAQHILGPFGPDCDLRRWGLKLAERGGRNGKKRAIVATARKLAVLLHHLWVSGEVYEPLHNRCRVAVTAAA

SEQ ID NO: 117550 - protein, 375 aa, unidentified
MKEKVRFLGLDVHAETIAVALAEPDGEVRSLGTIANREESIRKLIKKLGPVEQLRACYEAGPTGYVLYWQLTQLGVECAVVAPTLVPTKAGDRVKTDRRDALKLARSHRSDDLTAVWVPDGDSEALRDLVRTREAAKQDQLRARHRLSKFLLRMGQRPAVGVKAWTEPYMAWVRKVQFERPAQQATLQDYLHEVDHMAARVKRLEQAITEAVKLASPEVQEVVKGLQALRGIAEISAVTIVAELGNITRFDTPRQLMGYSGAVPSEDSSGKRKRQGSITKTGNAHLRRIVVEAAWSYRHRPAIGPRLRKRQEEVPESIKEIAWKAQVRLSKRYARLAAAGKDQRKIVTAVGRELLGFIWAIGVKAETRVNQQIAA

SEQ ID NO: 117551 - protein, 319 aa, unidentified
MKIHRNCCGLDVHKQMIAACLIREDASGSTCKENRLFGTMTQDLRELAQWLHQARVTAVAMEATGVYWVPVWNVLEREGLQLLLITPEHYKAIRGKKTDLKDGERIAELLQDGRLEGRYVPSTELRVLRDLTRYRVKLVEHRSAVACRIQKLLEQCNLKLASVASNVLGVSGTAMLHALARGETNPERLADMAKMQLRKKLPALRLALDGYLMPHHRFLLGEMLDELSHIESQPARLEAEIELQMRPFHKALDAWMSIPGIKHRVAWTLVAEIGPDVQAFPISAHIASWVGVCPGNNETAGKRIMSRDMYTSVFGRCAQ

SEQ ID NO: 117552 - protein, 347 aa, unidentified
MLADQLDYVIGVDPHRDRHALAVVEVRSGGVLFETTVEADSAGYRAALLLADAHAPGRRSFAVEGAGSYGAGLTRFLSDHGETVFEVGRLPRERRSGGKTDALDAVRAARSVLAKSRPALPRAKGEREALRALMAARDGAVTAKTAALSQLRGLLVTAPEPLRAELRPLTRARLLAHLTASRPDRRQDPELRGTQLALKAVARRIRQLASEERELAREIEQLTRSLAPQLLAEPGIGALSAAQVVLSWSHPGRIHSEAAFARLAGSAPIPASSGQTIRYRLDRSGDRQLNRALHQIVVTRRRMHPPTIAYIERRTREGKTRREATRCLKRYLARNLYRLLEHPPITT

SEQ ID NO: 117553 - protein, 344 aa, unidentified
MADGLVAGIDTHKDVHVAAVLDRLGRRLEVRQFPATDAGNTQLAGWLAGLGQVTDAGVEGTGSYGYRLARLLADRGVQVWEVNCPGRSRRRRKGKSDPVDAENAARAVLAGEATAVPKDRRGFVGELRLLVLTRRSAVKARTQASNQIKAFLIEADDELRARLHGLRKARFGRACAALEPADGLRRVLAALGRRWLALDAEARELETQITALISAYAPGLLARHGVGAVTAAQLLVTAGGNPDRLRGDAALAAICGASPVEASSGKTSRHRLNRGGDRAANNALWVIAHVRTISDPRTQAYVAKRTATGNSRKEIMRMLQRYVARELYPLIIDALRTADVVGLT

SEQ ID NO: 117554 - protein, 464 aa, unidentified
MTKRTKASTKTTTATTATSLPTVQAMVAGIDIGSSQHWVCGPARGDDGKPAIRSFGTTTVDLEALADWLAAQGTTSAAMESTSVYWIPLYELLESRGIEPVLVNARQLHNVPGRKTDVSDCQWLQLLHSCGLLRGSFRPSEAISRLRALQRQMGNLVAERSRCVQWMQKSLDQMNVQVHRAVTDLTGKTGMAIVRAIVAGERDPVRLAVHRDGRCRKSSDEIAKYLTGHWREDHLFNLASTLQIYDALQEQIAAYDARLMQELHALQPPERHDQPVPRHPNAGKEKAIKARGDQAGRLALWRFSGVDLTRIDGISAGTAQIVLTEVGASVASFPSEDHFASWLRLCPRTPISGGKPLKKRRNGLGANRIAGALRMAATSLQRSKTALGAAFRRIARHKGGAVAVFAIARKLAQLIYRMLRYGQDYVDIGEKAYEARFEARRLASLKEAARGLGYALVQEPLAEG

SEQ ID NO: 117555 - protein, 456 aa, unidentified
MAHRSKAKGTRRRTKLRVIYTRAAGIDVGSTFHVVAVPPELSAEPVQTFQSFTGDLYRLASWLVDIGVTTVAMESTGIYWIPVFDILEAHGLEVLLVNAQHVKTVPGRKTDVNDAQWIQQLHTYGLLRGSFHPAQDWSALRVYLRHRERLVEYAAAHIQHMQKALMHMNLQLHHVLSDITGLTGMKIMRAIVAGQHDPAVLATYRDARCKASEETIRAALTGHYRREHVFALRQALELYDSYQARIEACDQEIQFTLESLQNDAIAIETLPAARHKKQQSHEPRFAVRAALFRVLGVDLSQIDGFSAYTALKLVGECGMDMRRWPTEKHFTSWLTLAPGNKISGGKVLNTTTRRSANRAAAIFRLSAMNVGQTNTALGAFYRRLGARSGKAKAVTATARKLAVLFYNTLRYGMAYEDPGAAYYEDRYRQRVLKGLHRRAKQFGYQLTEVGTLEGVS

SEQ ID NO: 117556 - protein, 347 aa, unidentified
MRFFTDSHQHYCGIDLHARSMYLCVQNQEGKVVLHRNMQARPESFLKAIEPFREDVVVGVECIFTWYWLADLCAEHNIPFILGHALYMKAIHGGKAKNDRIDSRKIVALMRGGTFPMAYVYPAKMRATRDLLRRRNHLTRKRGDLLSHIQNTNSQYNMEPFEANISYKANRTGVAEQFTDSEVRLSMEADLELIAHLDELKNRLELHITRNAKNHDPQALYRLRSVPGIGPIISLVVLYEICDINRFPTVQDFASYARLVKCSKESGGKRSGTSGSKIGNAHLKWAFSEAAVLFLKNNPEGMKFKKRLEKNHGKGKALSILAHKLGRAVYYILKRDQAFDMNKFLKN

SEQ ID NO: 117557 - protein, 363 aa, unidentified
MFTERTSVGLDVHARSVAAAAIDGVTGEVMQTRLTPSYEHIRSWISELPGPVAVAYEAGPTGFGLYRALSDAGVRCEVVAPSKLQRPAGDRVKTDARDALHLCRLLRLGEITSVSIPGVDQEAARDLVRAREDCRGDLMRARHRLSKLLLRYGIVYYGGKAWTGAHDRWLRTVAAPQLTTPATKMAFDADYDHVLTMQARRGRLDAAIEDIAKDCEFTPIVRRVSCLRGVSTLTGFALAVEIGDWNRFTGNTIGSFVGLVPSEYSSGSSRVQGPITKTGNTHVRRLLVEAAWHHRSRYHAGEVMRKRWDLAPAAARARGDEGNRRLHGRWVGFLERRKRPVVANVAIARELAGWCWSLAVMAD

SEQ ID NO: 117558 - protein, 342 aa, unidentified
MELNKINLYMQFTYLLGIDISKSKIDLALSENKAGASLTLKEFSNHLKGYKKMLEWLCEKKVDLDKLLVCMENTGIYHHLLVNYLQSQKVFCWVENPVAIKWSMGLQRGKTDKIDAQRICLYAFRNQDKAKAYSLKDKNLQKVSELLSARERLIKARKMLLTPIGELKQVGLVEEEKMVKKACKQSLSALEKEIKSIDKDLEGLVEADTTLKASYSYIRSVDHVGAITALQLLVYTHDFKRFDNAKKLGSYAGVVPFEYSSGSSIRGRTRVHPMANKRLKTSLHMCALSAIRRAGTMRSYFERKVKEGKNKMSVLNAVRNKILQRIYACVKGERMYVPLQNS

SEQ ID NO: 117559 - protein, 403 aa, unidentified
MPKSKSKSKGQSTHRRSGQRQPNDLGRSLAAFKPDTTLVAVIEMSAQSWLVAGLVPCVERQPLKKLKPEAQMLLALLERWQREAVRAGCAVTRIAVAYEAGRDGFWLARWLMARGIEVHVIHAASVAVSREHRRAKTDRLDTELLKRAFLGWLRGEREHCKMVAIPSAAEEDARRPGRERATLVGEATRLTNRVKSALARIGIRGFNVKLKGAAEKLALLSMPGGEPVPPNTLAEMQRDLARRDLVRAQIRDIETARLERVAKAPATRANVMLLLLARVIGVGIETADSLVNEILSRNLRDRRAVARYGGLTGSPDRSGSIDREKGLARAGNKRVRHVMIELAWRFVRYQPESALVKWFHTRTASSRGLRKSLIVALARKLLIAMWRLVHDGVVPQGVAMREA

SEQ ID NO: 117560 - protein, 355 aa, unidentified
MNDAKYIGLDVHQATISVAVRDSDGKLIMEAILETKAETILQFVRGLRGSLHVTFEEGTCAAWLYALLKPHVTQVLVCDPRKNALLKVGNKNDRIDSRKLAELLRANLLSSVFHEDTGLRAVKELARSYLTMTKDLTRVMVRLKALYRSWAIPCATKQVYAPRHRAEWLAKIREASVHRRAELYYQQLDALRSLQQQVKKELLIEGRKHSATKLLRQIPSIGPIRAVLLLALIQTPHRFRTKRQLWSYCGLALETRTSAEYRVVHGQLQRSKKPVAIRGLNKNHNHDLKNLFKGAALRAAAVEKPFQEFYAALVGKGIKPEMARLTLARKIAAITLIVWKKGARFDAEQLKQQAA

SEQ ID NO: 117561 - protein, 422 aa, unidentified
MPKIKQLDFEGQTIFCGIDVHKKSWRVNVRCDEFELEDYSQDPSEELLLKHLHKKYPGASFKMAYEAGFSGFGIQRSLKSSGVSCIVVNPADVPLTDKDKKRKSDRIDARKICRHLSNNMLRPIYVPSIRMEHARALVRQRIRLVRDQTRCKNKLWGFLMFHGLKLEMDKPNDYWSRKFLESLKTLPGLTPLLRQSLDTALEEYLMIRRLVGDMTKQIRILSAQKSFASLQNLIQSIPGIGLLNSMVIITELQDMKRFKTLDKLCSYAGIVPDTASSAERTMVKGITHRSNNYLRPAIVESSWVIIRKDPAMLHLYKKYCRKMVPNKAIIKISRQVLNLTTLLPYSYLCRTKSTSSPLNGAFDVDLIPYQYSFDRARTLNIDDYDKNNIDIREILPADPRAVRFPIPVRTAGEVYGGQCPFA

SEQ ID NO: 117562 - protein, 359 aa, unidentified
MLKYSIGLDISAQTIHACISGIDAAQKVTVKSSCKIDNTLAGFKQLDQWANKHRKLKEVPLVVNMEATGVYYENCALYLFKEGYSVSVLLPNKAKKWLQSEGLKSKNDKIDAQGLSKMGAEKSLELWQPAAEYYYQLRAMTRQQQSLQEFKTAVGNQLHAEEHGMYKNKMVIRQLKQQIRFIEKQIADLESAIEAHIAADKEVAAKVENICRIKGLGVLTVAVILAETNGFTLFKNGPQLVSYAGYDVIESQSGDHIGKTKISKKGNSRIRRILFMPAFNMVKYKQTPFVDLYKRTFEKHGLKMKSYVAIQKKLLVLIYALWKNNTAYDINYKNQHARELEQALPLGLASIEARLVDAI

SEQ ID NO: 117563 - protein, 412 aa, unidentified
MEVLHSRCCGIDIHKRSITVCVLIREAGRKEQKHLREFGTTTSAILNCADWLRSLGVTHVAMESTGVYWRPVWNLLEGQFDLLLANATHMRNVPGRKTDIKDSEWIAQLLQHGLLKPSFVPNTVLRDLRELSRDRTSLVAERSRLKNRIQKILEEANIKLGSVASDVLGKSGRAMLTAMVEGQENPQHLADLALGQLRLKIPQLVEALRGRVRGVHRFRLKQQLERVDFIDAQIAQLEAEIEKQNAPFDEAVSLLAEIPGFDRTTAWSVIAEIGIDMNQFPSADHLASWAGVCPGNNESGGKRLSGKTRKGSRWLRQKLCQSAWCASRCKNSYFTAFFQRIAAHRGRKRAIVAVSHSLLVVCYYLLKRRCHFQDLGVNYFDQLNQEKLTRYFVKRLTRLGHRVILEPCSAAA

SEQ ID NO: 117564 - protein, 380 aa, unidentified
MIPSVSDEGGYAVVSIHVKVLALEKKVNMLQTQARTLSKLWIGIDFHKKTWRVHFRSDLFSGNPFSMEPLPDILHSKVLKEYPDYEIEVVYECGCFGYWAHRKFVSYGWKSTVVNPSDIPRVSKQKFTKTDSIDARNLSKLLKAGLLHSVTVPGIKREQLRSLFRRRVHLVMNTRSIKSRLKASLLYYGFKIPDDLDNASWTKNFRQWVKEVEWEHKTGKLMMLSNINQVEYLHYETNEISNHLRKYCRDHYKKEYDLLRSIPGVGPLTAVCFISEVGDISRFRNFKQLACLVGLMPTTYQSSDTNRTQGLTPRALRIMRSYLVEAAWQAVRIDPVLREYYKKHTGKKSNDIIVKVARKLLSRMYGILRTETEYVIGLIK

SEQ ID NO: 117565 - protein, 340 aa, unidentified
MSEVSIIGLDIAKYVFQAHGADASGQAVFRKKISRAKLLAFFADHPRCRVVLEACGGAHHWARELLKLGHDVQLIAPAYVKPFVKRQKNDAADAEAICEAAQRPSMRFVPVKTEAQQAAAMVFRGRDLLVRQRTQISNALRGHMTEYGWIAPKGLAHLEKLGALLADPSAVPEGVRSVCTVLLDSLAVLDRQIATLDKEIIRRSRDDAVARRLMTIPGIGPITATAIAALAPPAGTFAKGRDFAAWVGLTPRQHSTGGKPKLGAISKMGERTLRRLLIIGSSAVVLQASKRGAPKGSWLEQMLARKPRMLVTVALANKTARIVWALLTSNEEYKAPVVAA

SEQ ID NO: 117566 - protein, 344 aa, unidentified
MDNHTQYLGFAGVDLAKKVMQIHFVTADGEITDKSAKRAEFLDFFRNRGKCLIGMEACGSSQDWARKLEAMGHEVHLMSPKAVKPFVSGQKNDYNDAIGIYKAMFNGVRRVPVKSTEIRDLQTLRRIRSQVTKDRVKEINHVRGLLAEYGIVMGKSITAFNKGISSALESLKERGDVSPLVAEELQTTVESIKTKIERQKKLDREIEQLARGCKNYENFLKTPGVGPFTAAMLCVLLCDPSIFANGRQFAAYIGLAPRSRGSGGKNYVTGIPSKFNCDSESRAVLVECAQAIARCKNKSLWVEEILRRKPKKVALIAIANKLARQVWAMANKGESFKQMTILTA

SEQ ID NO: 117567 - protein, 407 aa, unidentified
MADRISYVGLDVHKDSIVVAVARGGLRGEVREYGRIANTATALDRLLKKLGDDGMTLRFCYEAGPCGYGIQRRLSGQGHECIVVAPSLIPKRAGDRVKTDRRDAASLARLHRAGELTAVWVPDAGHEAMRDLVRARLDAVHALRRARQQLSGFLLRQGCHYGRPAWTKLHRRWLAGLKFEQAVHHLVLEDYVQPVEAAAARRDKLTAHIAAMLPDWTLAPVVAALQTMRGMALVTAATLIAELGDLSRFGNPRQLMAYLGLVPSEHSSGASVRRGGLTKAGNSAARRLLIEAAWCYRFPARISRELLLRQENQPKPIRDIAWKGQVRLGARYRRLARTGKPANVVTAAIARELAGFVWAIARQVTVTAGGSRETGDRIHRRRQQTFRHATSGQGWGRGRGQENPRIH

SEQ ID NO: 117568 - protein, 315 aa, unidentified
MHLGIDVSKNTLDCCLISDGIFYERKFKNDSSGIDKLQTWLQEHGADSNLHCCCEATGTYYEESARALSRRYKMSVVNPRTIKGFGTAVMNRSKTDRQDAKLIARYCQAMKPEQWQPFTPEHRQLQELVRYIARTKQQRASEQTKYKTAPDFIKPHIQETINHFTQLIDSLEQELQAYYRNNPEQDKRIKTLKSIDGIGENSAAVLCSIITERFTHAKQLVAYLGLDPKEHQSGTSVKGRTRISKIGKSETRAALYMPALVAYRMGAFPDFTARLKAKGKPPKVIIVAIMRKLAVIAFNLLKNGEEFDRSRYRKI

SEQ ID NO: 117569 - protein, 343 aa, unidentified
MRTVTTIGLDIAKSVFQVHGVDAAGQVVIRRRLKRRYVLAFFQRLPPNLVGIEACASSHHWSRELKALGHTVRLMPPAYVKPYVKRQKNDATDAEAICEAVTRASMRFVPTKTPEQQSCLMLHRTRHLFIRQQTAVINSIRAHLAELGIVAPVGRKGVEELLRVIADPSDKRVPEVARACLAALGSQLCKLKEQILEFDRMIMAWHRSNEASKRLDVIPGVGPMLATALVAGVADPKAFRSGRNFSAWIGLVPKQHSSGGKDRLGSISKQGDRYLRGLFVAGALAVIRYAKIHGTKHRPWLTTLLARKPTKVAAIALANKLARMAWAMMASGECYKQPVALAA

SEQ ID NO: 117570 - protein, 355 aa, unidentified
MKNTIDSQSHSQLTIGMDLGDKISDFCVLDADGQILEEGRVASSPEDFAQDMARFRGAKLFLEVGTHARWAIEALEALGIDATAINPRRLKLIAESRTKSDKKDSRLLARVGQRMPEILSPVSFRSREAQGDYRLLQSRDQLVSQRTAIVLMIKGQAKAAGVRLTGATTVFHKDLLEKIPPHLTASCVPLVKVLQTLTKQIRNVEKELERLSRERYPVTQLLRQICGVGLITSLAFVLVVRDPKRFSNRRRLGSYLGLAPAQRSSGDQNPQLGITKHGNPYLRRILVQAAHYILGPFGKDCDLRRWGLALCERGGKNAKKRAAIAVARKLATVMLALWKNGEAYDPFYRQRKLAA

SEQ ID NO: 117571 - protein, 357 aa, unidentified
MSNIREIVDFSGEQINVGIDVHLKHWNVTIFHNQVYLRKFQQESNPTVLISHLRHHYPNAQFRVAYEAGFSGFWAHRVFSESGIECLVVNAADVPQTDKGIRTKNDVNDSRRIGSALAGGMLEGIYVPSLSQESDRSLVRYRYRIASDLNRCKSRIKSLLYKFGITIPSTFKKGKWTRAFLVWLKSVRLCFEPGDFTLKRMIGQVEYFQGQLLQISGDLRTMLRSASYAQQSSLLMTVPGIGALTALTLLTELGDVKRFPTFYQLNSFVGLCPTEFSSGNSERIGPLTPRHHSMLRSLLIEASWVAIRLDPAMLLAYNEYKNRMSSKRAIIRIARKLLNRIYYILLKQQEYEKGIIK

SEQ ID NO: 117572 - protein, 431 aa, unidentified
MRYIGLDVGRDFAHAAVVEGTGSARKLGRLRMGEELAAFAATLGPDDAVALEASGNTWALVELLGRHAGRVVVSNPLRTRAIADAKRKTDDIDAATLAELLAADYLPAVWIPDEATRRLRRIVAHRAGLVRDRTATRNRVSAILGRRLVRSPLSDPFGSRGRAWLAALELPPDERLALDSALRLNAVLDAEVDLADRAIATALIDDPRVRHLLTIPGIGLVTAAGILAVVGDIGRFPRPAKLVSYLGLDPQVRQSGDRPAHPGHISRAGQAHARGLVTEAAHAAVRAPGPLATFFLRLAGATRRGHRHRRGGTQARGAGLAPAHEGRGLPRCPTRPGPGQATGARPARRAGDSADAAVAPGSDWFKPRPGPGKAARRGRSPSPRSSPRDRPRPTRRYTRTWGLTLSSVGDRAGPGPGPWPTSHMPPGHPGP

SEQ ID NO: 117573 - protein, 343 aa, unidentified
MYIGLDVHKKLSYYSMVDGEGTEMKRGRFPTTCKGLDEFASKLPEGAKVAIEASTSGIFAYEYLDEGGIEVHLAHPVYVKPFAKKHVKTDKVDARVLAQLLRMDYLPESYVPGKEIRDQRVMIRHHASLVRLRTSIKNRVHALLAIEGIQTSEFSDLFGKRGMEFLRRVKLRQVRREALDNYLEVLKALEERIEEMEAILKERAKITDEAKWLMSIPGIGYHNALLILSELGEIERFSNPRSMVSYSGLAPKVEQSGDYTRYGHINKHSNGFLRWAFIQSARVAVRSSKPNRFQGIYNKIKARRGEKEAIVATARHLAESVYWVLTRKQYYKENRAIRASYFS

SEQ ID NO: 117574 - protein, 418 aa, unidentified
MSEDENTRGIRRYIGLDIHKHYCVIAGVDREGRVVLHAVRVEHADLEGWLQKNLRSTDHVVIESTTNAWHVYDLLEPLVERVVVANPIKVKQIAQARVKTDIRDTLILARLLAANLVPDVWVPPLHVREMRQLLSQRRQLVETHTQILNRMHSVAHRHHLKHERGKRFNEKNTAWQKDKRLSKVEQFQLELEMENRAYIEKQISRIGKEVAKMSHQKPWAESMTYLMQLPGFGVITGMTVLAAIGEIQRFGSAKHLASYSGLIGGLDQSGTHLVQKGITKEGRKELRWALVEAAQRAVKSDPHWTRKFQELHKRMHRNQAIVAVARQLLELVWYVLTRRQPYRHFSQERIAYKYLTWAWQMDDAARDGLTRQQFVRYYMMRLGIGHDLTRIGLDPKHPRKISSEAELLTLRPELNHIE

SEQ ID NO: 117575 - protein, 370 aa, unidentified
MENRSMFVGLDVHKETIDVSIAEGARDGEVRHYGVIASDLEPLDKVVRALRAPDRRLHFVYEAGPCGFGIHRHLTARGEDCVVVSPSMIPKRSGDRVKTDRRDSQMLARLHRAGELRAIYIPDATDEAMRDLVRAREDAVVVGTQAKYRLKAFLLRQGRRYPGREGWTLPYRRWLTDLSFPTAAQHVTLQEYRDTIDETERRIERLTEQLRQLAPAWRWAPVVAALQALRGVSFLTAVAFVAELGDLRRFGHPRELMAYLGLVPSEHSSGPSVRRGAITKAGNPHARRLLAEAAWAYQGIPRIGRQHAYRQEALPKVVCDIAWKAQLRLTARFKRLVARGKAKPKVATAIARELTGFIWAIAQEVSPAPR

SEQ ID NO: 117576 - protein, 343 aa, unidentified
MERVYYVGLDVHKKKIAYCVKLVDGTLFCRGEVAAERKALGQWVKGLPGPWKGAMEATLFTGWIYDFMKSHALELKVANPVMLKAITAAKKKNDVADAERLADLLRVDLLPECYMASQQMRDLRRVLRYRNMIVGNAVRMKNKISGLLMEVGAEYNKRRLHGRKYFYEMLQGVEDVPESVMELLKLSRSGLEMFQDMQGVLLDALRNNELVRERVECLMSIAGVGEVTALTWVLEIGEVERFKSVRQAVSYCGLCSAQKESAGKERRGPISKKRNRHLQTVLVEAAKIAPRWNPQLAEVYARELNRGNRNRASLAVARKLVAYMMAVDKSGVRFEPKRIKEVA

SEQ ID NO: 117577 - protein, 407 aa, unidentified
MEENRKRYIGLDVHKHYLVALGVDADLNVVLPMRRVELSNLESWMKKNLTKQDEVVLEMTTNTWQLYDELVEYAGLVMVVHPPHVALLTRSQVMNDKIAASILARLLAKGLLVGIWVPPQEVRELRGLVAQRRKMTHLATQAKNRLHAVIQRHHLKPPAGNPFAKTNNGWWLALPLGKLEKMNLQSDLETLQFAEQQEARIQKEMTGIAAEDEEIGRLLHISGLGVISAVTVYAAIGDIRRFAEPNKLVGYAGLGTRVHDSGMTMRTGKITKAGRRDLRVALVEAAHVVANSHPHWKAELARLEPRLGYNKAIVAIARKLLITVWYVLQGQADKYAEPKAVAQKMLKFAYTVGKANRAKGQTAAQFARIRMDALGLGGELTSIPWGSKKPIPLPPSKLKGRSDVPNK

SEQ ID NO: 117578 - protein, 419 aa, unidentified
MKAEELPTHFAGFDWAKAHHDILVIDSSGNVVTEFQFEHTAEGWKSCQEKLAAFPRLAVAIEAGHANAIERLMLMGHRVYAVHPRSSKSYRARKRPSGVKTDRVDCLALAEALRFEGQSWTPVAPPDPLVLRLRLLCRDEVTLIEQRTALVNQLIQALYEYYPAALDAFDDWTSPAAWAFVEKFPTPEALVKAGKRKWQNFLHARRLFHPQTYEKRLDAFTHAQEFCGSEAVTAAKSTLALALVKLLQTLEKQLLDFRHKIVACFHQHPDHAIFVSLPGAGEKLAPRLLAELFSLPGGATEAPRLQVQAGMAPVSYQSGQVSVVYLRRQCNKFLQHTVHLWADLTRHYSDWARIYYEAHRKKGQSHACAVRCLAMRWLKILSAMMRSHASYDAGLHSRNQLKHGSWVLELVPKATDKPA

SEQ ID NO: 117579 - protein, 362 aa, unidentified
MKEKKTRFIGIDLGKRTYEMAITGKGIKVVMSNGKTSVEGRVRLYKKLHPTDRIALEAGTLAFIMAKELEAAVGCKVYVLNPYRLSVIYKSMKKTDKEDALKLAHIIEDFQEERLPLVNVPSDKEMERRKILSGYRRAQQGRGREINRLHALFVNQGITTVVKKDLATAEQRQDLIKVLKGLDLEDAEYLIKIIDHHEARIENLEMKMKKESEGNEMIQRLQEIPGVGLKVSFAISAHIDAGRFENAGQLSNYLGMVPRVYMSGDTVRYGNITKRGNSYIRALLVQASWALIRSRNGGKLKERYEYMTVKKSISKKKAIVAIARRLAEMMYVLMRDGTRYRTMSFIRNNKMVTDITGVKFCA

SEQ ID NO: 117580 - protein, 343 aa, unidentified
MKLFIGLDVSLAKTAVCIVSEHGKIVKEAEVGSDPAALTQFALEQQGEIAMIGMEAGPLSQWLHRGLTEAGLEVVLMETRQVKGALKAMPIKTDRRDAEGIARLLHLGWFRPVHCKSVSAQEIRALGARKSIQQGVIALEMSLRGLLRNFGLKVGAISKGRFDARIQEQVASNTTLVAATEPMLRARATLRHELARLERHVRSLAQDDPTCRLLMTMPAVGAVVALTFKSAVDDPARFSSSKKVDPWVGLPPSRQQSGERDVTGGITKAGDAHLRRALCQAATVMMNRGRGSWLRTWASRVAKRRGTKRAMVALARRIGVILHRMWLDGRNFRWEGAPEPIHA

SEQ ID NO: 117581 - protein, 375 aa, unidentified
MNYCGIDVSKGKSEVCILDKDKNILFSDAIKHNLEDFQKLEAHLTKDTIIGMESTGTYSAAIHYYLSQRYTEVYYVDTLQMYTYARLRYLHIKSDRTDSRLIAEYLMTEFKRVIPIPMNELKDVTRLYYKTCKYLCKYKKSFLSQLEIIFPELGQTMFVKKSMGIYQLLLKYPKPKDILEVDDEELLQIMNENMIKSHYTMKHINKIKNAAKTSIGVPNYPTTCFRQTIELLMIHQRVKEEIIDNIQILIGQTPYIKLLEKYGYGVISLAQVVGEVGDVRRFRGHKQFVKYCGFDVSQKQSGKMNSVHCFISKKGSKYLRAIFYQLVPSQLRSDKEEFYEFYNRLKGKGKNTRVCMVAVARKIAVRTYYDMLKCH

SEQ ID NO: 117582 - protein, 345 aa, unidentified
MGETTIIGLDVAKQIFQVHGVSADGKVTVKRQLRRSQMLGFFGKLTRCVVGLEACGGSHFWAREIRALGHDVRLIPPAYVKPYVKRGKTDAVDAEAICEAVSRPTMRFVPIKTAECQAALMVLKTRDLLVRQRTQAINALRGHLAEVGIVEAKGAAKVEMLFEIIRDENDGRLPPAARTALKMLTEQIEALTERVDTLERKIVAEVRRDDTMRRLTTIPGIGPITAATIQALVPDPGAFTSGRHFAAWIGLTPKMHSSGGKERLGKISKMGNPALRSLLVVGATAVSRQVRRGATISPWLTALLARRPAKVAAIALANKMARIAWALLTKGGEFIRKNPVAEPAT

SEQ ID NO: 117583 - protein, 384 aa, unidentified
MEKSSTLYVGLDVHKDSLEIATADAGRDGEVRHVSSIGGDLVALDKALRKLVSKGHRLHVVYEAGPCGFVIWRHLTAQGLSCEVVAPSSIPKRPGDRIKTDRRDAMMLARLSRSGDLTAVRVPGAADEAVRDLVRAREDAVREQRNARHRLKALLLRNGIPYAGKTSWTAAHLRWLATLKLEHAAQQIGFQEYLHSITEAGARIARLEQAMRDTLAEWTLKPLVQALQAMRGMQLIASMTLVAELQDFLRFENPRQLMAYVGLVPGEHSSGPKRRQGSITKAGNSVARRMLVEVAWHYQHSPRVSPIIATRQDQLPKEITDIAWKAQLRLNAKFKGLVARRVMKTKAVVAVARELAGFVWAIGQEVQTSGWQGIEIKPASSTAA

SEQ ID NO: 117584 - protein, 427 aa, unidentified
MPEPEPEPRTVAIDLHKDYALIEGVDTRLEVVLHPCRVPTVKLDGWAQKHLQKADTVVLEATTNAWHVCDLLQPLVARVVVANTHRLKALTADAVRTDQRAVQILARLQVAGLIPEVWVPPPPVRELRALIHHRQRLVSQRTAAQNRLHSWLQRYHLVPPEGAPLAASNRPWWDHLPLAASEKLCAQQDWALLDYLGAHLAQVEAELTRLSASERWRGPVAFLIQLPGVGLLTAMTVLGAIGDITRFPSARHLVGYAGLGTRVHDSGQTHHSGGITKAGRCELRTAVVEATWTAVQTHPFWQEQFATLEARLGKQKAIVALARKLLVVIWHVLTAQVADRHADTEAVARSLLTWASRHRLATSLGLSRPAFVRQELDRLGLGAELTHFLASGRPCRLPPSTLLLDLPQEVLATLAAWPEEPTPVPEC

SEQ ID NO: 117585 - protein, 423 aa, unidentified
MTKRSSNPTDAVLVAIDMSKHRQEVLIERPEGGPRRRMTVMATKADYDRLATDLSDIGRPIIVGFEATGNYHRTLAHRLLSAGFELRLISSVALARTREALHNGWDKNDSKDAQVILHMLRIGATQRYVDPLAAGINDLQEMSKTHEAISKAKTQTWHRILTHYLPLYFPEIERFAGNSRSDWFLALLERFPTPTSMTVLGQETFSREAWDLVGRKVSKARLINDIYETACASVALPVDEDSVSIAMFRMVIAQARNLIRQRDEIERTAHAMLAENRDYQLLRMIPGIGPINALTILAEAGDLRRFSHHRQFLKFCGLDLATRQSGTFRGRTMLSKYGNARLRRTFWMAAQVAARQRNNSFRDKLGRYTAGHADDADRRRKAMTALTAKMARVAHAVIKTGTEYRPFLERSDARWKAPSLQVP

SEQ ID NO: 117586 - protein, 455 aa, unidentified
MARKRKAKKETKANNSMLPVMRPDAAGIDIGATEIFVAVPADRAAENVRGFPTFTQDLYALADWLEQCGIKTVAMESTGVYWIPLFQILEDRGLEVCLVNARHVKNVPGRRTDVSDCQWLQFLHSVGLLRASYRPEQEVCAVRSLLRHRESLVQMAATHVHHMQKALDQMNLQLHHVISDITGQTGLAIVDAILAGERDPFVLAKLRHDRIKASEEVIAKSLVGDYRAEHIFTLRQSLGVYRSYQKLIQECDREIRRFLEEFKPPHSPQVPDDDRQKDQNKTSATEGGLGAELKRVFGVDLTKIPGIRVGIAQTLFGEIGPDFTKFRSASAFASWMGLCPDNDISGGKVLWVGTRKVKCRAATALRIAAQSLHHSKSALGDFYRRMRAKLGAPKAITAAAHKLARMIFHLITTGQEFDDSKFAADQLRYQKKQEVKLRAKAKAMGFVLIPLEPAR

SEQ ID NO: 117587 - protein, 351 aa, unidentified
MSHKTAATVAHTIGIDTGKNTLHLIGLDDQGAIVLREKIARGRIAARLANVPRCLIGIEAGMATHYVARELGALGHDVKQVPPAYSKPFRQGHKNDFRDAHAIAEAVQRPSTRCVPVKTDDQLDLQALHRVRSRLVGQRTAVINQIRGFLLEHGIAVRQGLRFLRQQLPDILAKRSDVLSPRMIRIMEDLSGDWRRLDERIEHITKEIEVLADTDVNCGQLMTVPGIGPIVASAMVAAIGNGAAFARGRDFAAWLGLVPKQMSTGDRTILGRITKRGNRYLRMLFVQGARAILLRPKSWVKHSFGPWLTTAARRLHRNILTIALANKLARIALSVLIQGRSYETRIVLAAA

SEQ ID NO: 117588 - protein, 341 aa, unidentified
MKVSTLGIDLAKNVFQLHGVDHEGHTILRKKLTRAKFVQFVIQLEPCLIGMEACSSSHYFARLFTRYGHEVKLIPPQYVKPYVKTNKTDAADAEAICEAVTRPNMRFVQIKTEEQQAVLALHTERGILIRERIACANSLRATLAEFGITIAAGQSHLTRELPAILEDGENGLSPFVRTSIYRQSKHIRELEEQVKQVEEALASWYRTQEACQRMAKIPGVGMLTATYVVAAVGNARQFSTAKQFASWLGLTPKEHSSGGKQQLGGISKRGDGYFRYLLVHGARALTAWVNRNGAVEENSWLQGLLERKHYNVAVVAMAAKTARIMWSMLSHNTEYQPRQLA

SEQ ID NO: 117589 - protein, 407 aa, unidentified
MDMVYARCAGLDVHKETVVACVRIAADGPLVQEVQTFETTTSGLLKLCDWLESFGVQHVAMEATGVYWKPVWHVLEGHFELVLANAAHVKNVPGRKTDVNDAMWLADLLAHGLIRASFVPPAAVQDLRSLTRTRKQFVRERSSHVLRIDKLLEDANLKLGVVLTDIMGKSGRAVLQAIVDGESDPQRLAAHVSVRVKASRTEVLEALRGRVRAHHRFMLKLHLSQIDALDKAITEIEGEVGRGLEPFRQAAKLLSTMPGLSDTSANVIVSEIGIDMSRFATPGHLLSWACMCPRNDESAGKRRSTRLRRGGKWLKTTLIQAAWAAIKFKGGYLQAQFHRLRARRGPKKAIIGVAASMLTAAWHMLRDGTEWQDLGAAHFDRADAAKTANRLIRRLQQIGYTVNATPA

SEQ ID NO: 117590 - protein, 411 aa, unidentified
MEVVHARCAGLDISKKDAKVCVRIAGAGRRKTVETVTTWGSVTSQILALRDHLIAERITCVVMEATSDYWKPFYYLLEDAGFDVVLVNARHVKNLPGRKTDVADATWLAQLGAHGLVRASFVPPEPIRHLRDLTRARTAITRERSREVQRLEKLLEDAGIKLSAVASDIVGVSGRAMLESLIAGNNDPAALAELAKRRLRSKIPALTEALTGRFTEHHAFLARVHLDLVDQHTAAINEITTRIEATIKPFHWFRDLICTIPGISTLTADVIIAETGADMTRFPTAGHLASWAGTTPGNNESAGKVKSSRTRPGNRYLQGALGAAAMSCAQHPGTYLGARYRRIAQRRGPQKANVAIQHSMLIAIWHMGTNGCLYDDPGADYFNRLHPERAKKRAISQLEAMGYHVTLDQAS

SEQ ID NO: 117591 - protein, 403 aa, unidentified
MNAVGIDVSKGKSTVTIRRPGDRVILKPCDFRHTQSDINSLIGIIKGLDGETKVCMEHTGRYYEPVAAWLSEAGIFVSAVNPILIKEFGDVSLRAPKTDKADAKKIARYALDRWTSLKQYGLMDEIRNQLKTMNRQFGFYMDQKTAMKNNLIAILDQTYPGANTFFDSPARSDGRQKWVDFIYTYWHVDCVRGRSLEAFTEHYKNWCKRKGYNFSAAKAEKVYNASSDLIAVFPKNANTKMLVHQAVAMLNLASVTVETLRTEMDKTASNLPEYPVVMAMNGVGSTLGPQLMAEIGDVTRFEKRGSLTAFGGVDPGKNDSGQHIQKSVHTSKKGSPHLRKTLFQIMDGLIQRSPADDPVYAFMAKKRAEGKPYYVYMTAGANKFLRIYYGRVKEYLTRHPESE

SEQ ID NO: 117592 - protein, 352 aa, unidentified
MKETIHIGIDIAKYKHDFCIISSTGEVIVQNNSFENNKKGFQLFFSYLKPYNKADVQILFESTAHYSMNLELELIDQGYSFMKMNGLIIKQFFKAQTLRKTKTDKADAFALTQYLMANTYKPNSNRLYHIYSLKSLCRTRDRLVRERSKFKIYITNELDKSFPEIKKFFDNKISITLLYILEKYKNKNKIALMKDYDSIRKVSAANFSFTRFLQLKQLAKESIGHPTETSDFLIQSYVKSINCLSEQIDSIEKQIIESVRKLDTHILSIPGIAEISAGSIIAEFGDIKNFESPEKMLAFAGLEPSIRQSGTLSTEGHMVKHGSGYLRNTIMRVVNSLVMHDQVFNEYYNKKS

SEQ ID NO: 117593 - protein, 316 aa, unidentified
MKSKTNQNINVGVDTGKYQLDIYIRPLDIYFTVSNDDKGIKEAVRLIKKHHPERIVIEATGRLEMPFIMACANANLPFVIANPVHIKRFAGAIGQRAKTDKLDAQLIAHYSEAIKPRLSTLKPDVMQAMSDLVGRRSQLLVMQTMEKNRLQILPQELAMTIKPILTVFKNQITKIEDKIVKLIESNADYQAKNLILQSMKGIGKIAATSIISNLPELGYINNKEASSLVGVAPMNKESGRFKGHRKIQGGRHQVRTVLYMAMMSAIQSNPVFKETYQRLVAAGKPKKVAIIACIRKMVVILNSMLRDGVLWEAPKA

SEQ ID NO: 117594 - protein, 333 aa, unidentified
MTETTSIKFAALVGIDWADRKHDICLQVADTGEREFSVLEHGPEAIDEWANALRVRFSNQPVAVCLEQRKGALITALLKYEHLVLFPVNPRLLAGLRRAFSPSGAKDDPTDAEIAVDILLQHRDKLRAWTPGDPRTRQLQVFVEARRRLVEQRVRVTNRLTANLKGYFPQALDCFESLDSVLACDFLTRWPSLGEAKRARAETLRAFFLKHNVRSQELIAARIALLKSAMALTSDAGVIVPALLATRTLVAELRTLIAGIERYDVAIAKVFNAHPDAFIFRSLPGAGPTFAPRLLAALGADRARFESVRAVQEYLGIAPVTERSGRSEWVHWR

SEQ ID NO: 117595 - protein, 348 aa, unidentified
MITLGIDAHKRTHTVVAVDEVGRQVATKTTVATSTADHLELLRWAERFGAERSWAVEDCRHLSRRLEADLLAAGERIVRVPPKLMAHARDAARSYGKSDPIDALAVARAALRHPDLPAAQLDDRSRELRLLVDHREDLVNERTRCINRLRWHLHELDPGWDPTARSLTSYKNIDGVISRLGQMPGMVARIALEIAVQIRELTVKERALEREITQRISTLAPTLLAMVGVGPLTAAKIVAEVADVRRFRSKDAFARHNGTAPLPVWSGNHQRHRLSRTGNRQLNAALHRIAITQARCHPDAIEYLERRAAMHNTPAEARRALKRRLSDVVYRALLEDATVEITCLDQAA

SEQ ID NO: 117596 - protein, 398 aa, unidentified
MTESSDYESVQVFIGVDVGKDTHHAVAVNRSGKRLFDKALPNDETKLRSLISDLKQHGQILLIVDQPATIGALPVAVARSEGVLVGYLPGLAMRRIADLHAGEAKTDARDAATIAEAARTLPHALRTLKLADEQIAKLSMLCGFDDDLAAQTTQASNCIRGLLTQIHPALERVLGPRLEHPAVLDLLQRYPSPDKLASLGEKKLATQLCKLAPRLGKRLAADITRTLTGQTAVVPGTNAAVVVLPRLALQLITLRKQRDEVALEVEQRVLAHPLYPVLTSIPGVRVRTAARLLTEVACRAFASAAHLAAYAGLAPVTRRSGSSIRGEHPSRRGNKTLKRALFLSAFAALRDPISRAYYTRKMSQGKRHNQALIALARRRCDVLFAMMRDGTFYTPAAS

SEQ ID NO: 117597 - protein, 463 aa, unidentified
MKKVMQPCKNGQLPSHLQQLNLFAAGIDIGSKSHFVAVPEGTDEKPVREFACFTADLHRLVDWLVSCLVTTVVMESTGTYWIPLFEILESRGLEVKLVNARHVKNVPGRKTDVLDCQWLQQLHTYGLLEGAFRPPEQVCALRAYIRHRMNQVRYCAAHIQHMQKALIQMNLLLHNVVSDITGVTGMQIIKAILAGERNTQVLAGMRDRRCKNSIATIAKSLEGNYRPAHLFSLKQAVETFEFYQSQIAKCDQEIEALLVTFDAKVADSPPTNSGTEADTPSKAVFNLKDELYRVTGVDLTKINGIDSTTVLKIISEIGVDMDRWKSEKHFASWLGLSPGSKVTGGKRLSGKTKPVVNRAATALRMAASTLYRSKCALGAYYRRMKARLGAPKAITATAHKLARLIYSMLKHGQEYTDLGQDYYEQQYKSRAVKSLKSRARELGFELIESNKQNINNNNDAVLA

SEQ ID NO: 117598 - protein, 341 aa, unidentified
MEQVTTIGLDIAKHVFQLHGADAAGHVLFRKRITRVKLLGFLATQTRCVVAMEACAGAHYWAREIAKLGHHVRLIAPAYVKPFIKRQKNDAADAEAICEAAQRPSMRFVPVKTEEQQANGIVFRARDLLVRQRTQCVNALRGHLMEYGYVFPKGITHVETLIALVEDLQSSLPDSVRVILKLLIDTFTALEAQIAVLDAEINQRSKSDPTARRLMTIPGVGPIASTAITALVPAAEGFPAGRDFAAWLGLTPLQKSTGGKQKLGAVSKRGERTIRRLLIIGASAVVQQASRRGAPKGSWLAQMLARKPKMLVTVALANKMARVIWALLVKGGTYRAPAVAA

SEQ ID NO: 117599 - protein, 430 aa, unidentified
MNSEIEKVDEPHFVALAAIDWGDEKHRWAAQTADSPRIERGEMEQSPEAIEEWVAQLRTRYGEGPLAIALEQSRGALVGLLRKYAHLHLYPIHSGSAANFRAALYPSGNKNDPLDADLLLELLVHHRARLRRLSPDSEATRRLQQLVEGRRKLVNEKTRQSNRLTAQLKIYFPQALTWFEKADAPILGALLARWPTLEALQKARPNTLRTFLREHHCRRPEWIEQFPQEVAQAVPALRDPAVQEPAVATVQVLLQLLDTLRQGIADFDQRIEAAAQEHPDFFIFDSLPGAGAVMAPRVLAAFGSQRERYGTAVEMQQYSGIAPVTESSGKSRWVHFRWACPKFLRQSFQEWAGHSLGESVWARAYYEQQRARGSGHQAAVRALAFKWIRIVFRCWKDRVPYDESRYLEALRKRGSPLIRAIDAAASTASA

SEQ ID NO: 117600 - protein, 397 aa, unidentified
MSAVVGIDVGAYKHAAAVCRPGEREAERGVLRLSADRAGFDELDRWLERQGPVERVVMESSGHYYWPLASHLHRRGYGVAVVNPLQAKYFAKSRLQRSKSDPADARTLAALGMSEEPRVKDPLLGAEAKEAARFWGGLVKEQGQIRNKLLRLVEIGFPELKECFEDPLCQTALAVLREAPTARVAARKRVSTLADTSRPGGRRRLGENKARRLHELAKETIAPPELDAQMSFEVGMLIQQYDLLDKQIEIAEQRVAEVLDSELARRLQTIPGVGPALAATFIAEIGDIWRFDDFDQLASYAGVHPKELSSGTKGQNPETSWHMAKTGNSYLRSAAYKMAVVGTQHNPVIRAHYLRKRAQGKSAMNAVGHCMSKALAIVWGVWRSGLDFDPTLGGPKT

SEQ ID NO: 117601 - protein, 328 aa, unidentified
MTHRLPPAYGIDVSKDKLDLACSRARWRRSFPNTHKGQQELLATVAELPDATIILEPTGRYHRAITSVLTDAGRSPILVNPFQMRRYATSKGIRVKTDPIDAGLLADYGARMQPEPRPQKTQDEATLADLVARREDLVKVRAGDKCRLHGASDPREVASIERTIAFYDAEIAILEQDITVAIAANAELRTGLHILQSTPGIGDANGPVILALLPELGGLTPKTAAALAGLAPYANQSGSSDKQRSIGGGRAVVRKALYQMAFTAIRCNAVIRSHYQQLIQRGKAHKVAIIACARRMLGILNAMLREGITWQQTKVGQGQFLSASPSAA

SEQ ID NO: 117602 - protein, 322 aa, unidentified
MNKGIKYYGIDISKDVFDVCSSEGVSSQFENNPKGFEQFVKSLSDDAHCVMEATGYYHYQLAYHLLESSIKVSVEDPLSVKRFIQMKLSKVKTDKSDAKMICAYAEQVELRLWKGQSKNQIECLQISRLLDLYLKQRTAIKNKIHGEEVLGKPSSFVLKSLKQSKRALDKQIKELEDKLLAVVKSEHQDLLTRLESIPGMGRKTSMMLIVLTDGFKRFETAQQLCYYSGLTPTIRESGSSIRGRSRISKVGNNKLRNLLFMCSFTAYKHNKACKQMYDRIVAKGKIKKLALIAICNKLLKQAFAIAKSGLMYDETYKGIRTV

SEQ ID NO: 117603 - protein, 374 aa, unidentified
MKYYSTLYVGMDVHRDSFTLAHYALDMKQPTGIVKTDNDYRRIVAYVHHLREKYGQETRIVCGYEAGCLGYTLYHQLTKMNLECVILAPTTLPSPRGGKRVKTDGRDAANIAQCLAYGTYSPVHVPSAEDEQVKEFIRMRNDHCQMLKKLKQQILSFCLRHGYLYSGTRSNWTQAHMKWLDALQPEGLLGDTLEEYLTSFRYHQNKLERLDRRIEEISREETYREPVGRLCCLLGVKPLTALSVVSEVSDMHRFSTAEKFASYLGLVPCEHSSGNSVRRGGITKAGNVHVRTLLTEAAQSYTRGKVGYKSSALKKRQSGQSETVIAYADRANERLRRRYYQMTLQNGKRHNVAKTAIARELACFMWGLLTEHVA

SEQ ID NO: 117604 - protein, 341 aa, unidentified
MQTTRYIGIDLHRNQFTCCVRLENGREYLSQWKLEDLERFTRRLRPADQIAVEVTGNTRLFHDAVKPRVSRVVAVDPNQFKVISHSVKKTDSNDARNLALYLAKDLLPEVRMKDKTQAQVASLTQTRDTLVKLRAALKNKINNILSAHGINLAKEALSSEKALNEVLAMKFDPMVEIELKVIVDQIRSLNKSIAELEKSITDEGSKLEGHKNLTSIKGIGSLSGSILLSVIGDIHDFADEGKLAAYFGIVPRVSNSNETEHTGRITKRGSKLGRTALVQCALIAQRYSPYLKTYYEKTKARRGTGKAIIALARKLLGIIYRTLKNNWLFEDFPNFVLAEQA

SEQ ID NO: 117605 - protein, 307 aa, unidentified
MRFYTKQHQFYCGIDLHARTMYLCVLNQEGEILLHRNMPAGPEPFLKAVAPYRTDLVVCVECIFTWYWLADLCAGESIPFVLGHALYMKAIHGGKAKNDKIDAQKIAVLLRGGMLPQAYVYPAEMRATRDLLRRRIHFMRKRAELLAHIQQTNRQDNLPQSGKKIAYKANRDGVAERFPDPAVQKSMEVDLALIGHYDQLLRDVELSMGRTAKHHDPHTLSLRRTVPGLGDILSLGLLYAIHDIQRFPRVQDFGSSCRLVTCAKESAGKRYGTSGTKIGNAYRTWACSEAAVLFLRNNPQGQTYLNR

SEQ ID NO: 117606 - protein, 343 aa, unidentified
MKDTIYDHYIAIDWSIKNMAIARMTKKSNKITAIDVPSDIEDLQAYLKNLRGTKILTIEETTTSQWLYTELKAYVDRIIICDPNRNKLLNEGPKTDKIDATKLVQLLKAGLMKEVYHSTDKFLYLRRIVSGYEDLVQAGVRLKNQRYALLRACGKSGNEIIGSTLDSQGEQFVLACLDRQIEAYEQEKEGYEKEFEKLARTHPEIKHQKSLPGIGTINAVKIAARVVTPHRFADKGHYLSYTGLIKLQKTSGGRSYGKKNSRYSRQLKSVYKSGVLAAIGGNNPINDYYEHLILEDGYPEHNARQKACRRLAILSLGVFKSGKKYQPYRRDHVKGSKESTSGL

SEQ ID NO: 117607 - protein, 333 aa, unidentified
MEYYVGLDVSLKQTSICVVDQTGSVVREGVVDSDPEAISVYVRSKAPGAVRIGLETGPTSTWLWTELKRFGLPVICIDARHAKAVLKMQINKNDRNDAIGIARIMQTGWFKEVHVKDIDSHSVRALLASRALLVKIKRDLENHVRGLLKNLGLVIGRATFNVFAARAEELIEGRPDLVAAVEQQVSELDRKVMKLARRDAQVQRFMTVPGVGPITALAFKATIDDPARFARSRSVGAYVGLTSRRHASGEIDWSGRISKCGDAMLRSYLFEAAGVLLTRVPKWSTVKAWGMRLAKRNGLRKAKVAVARKLAVILHRMWIDGTEFNWSKKEIAA

SEQ ID NO: 117608 - protein, 338 aa, unidentified
MIVIGLDVHKQSVTAVAVDEAGRPLAERVIAVGSSELLGWADALDGERLWAVEDCRQLTGWLERQLLSVGEDLVRVPPKLTVPERRAGRTRGKSDPIDALAIARAALREPNLSRPRPDERVYREIKLLVDHREDLVAQRSRNQQRLRWHLHQLDATYEVPLRMLSRSSHLERVGRWLARRQQEVQVQLARELVTTIRTLNRQVAELDRELEARTLQVAPALLELPGCATLTAAKLLAEIGPIDRFRSDAQLARHSGVAPLEASSGKSQRHRLDRGGNRQLNAALYRIAITQARYHAPARDYLERKRAEGKSRREALRCLKRLLIRVVFNTLKTSPALT

SEQ ID NO: 117609 - protein, 341 aa, unidentified
MTEIIRSGVDIAKNVFEVHAVNAQEQVVVRRSLRRNQVLAWFAKLPPCLIGMEACGTAMHWARELSGLGHTVRLIPPAYAKAYVRRNKNDPADARAICEAVGRPSMRFVPIKTLEQQGEAVTHKARQLLIKQQTMTQNSLRGLMAEFGIVVPQGPQHISKRLVILADPEDPRIPAVARTALNAMADLLAALEQQIETLDKTIRAQVRANPTARRLDTIPGFGPILSGAIAAIVADPRHFDSGRDFAASLGLVPRQDGTGGKVKLGPISKRGNGYLRRLLVNGATAVLNGKNARNDPWQAKLLDSKPKKLAAVALANKMARIAWAVMTRQETYRPRTVAAAA

SEQ ID NO: 117610 - protein, 460 aa, unidentified
MTLLARLGEQLPERNYLGIDVGYKEHVAVVITLHSFAQDGDRWKRTPCLHFPSTRSGLEKLQEYLDSFSADAGTFFGICEPTGGFYGATMFQYLLDQGYPMWLIENATTRHMREKIMGHIPKTDDIEARVMARIAYLHEAVGEEFTLRPLVLAEPEDADLLALCRDSWRLKTMISRARNQLSQLMAVVYPELKTFFTGSVSSIAPVRLIAAYPTPAELAAASAEEVRAVLWQARAYHHAHRVGDLQALARNSSGLLPDPQRAWRLAWVTDFLLANFKADAALDKQIEMLVTQRKEYPWIVNVPYAGPATLGLILAATGDINRFRNYRQYVAYTGYFAGLEKSQTIDRTRMSKRGNRDLKRALFQIAAPLVWFDRSENPYKALFKRKEAEGQPWHRAMPYVCAALARHIYHCLKFQDPYDADRALGAPVSSHPCEDTIVDLRAGLEDRLEVMEAHLSQEER

SEQ ID NO: 117611 - protein, 391 aa, unidentified
MATGQRVVIGMDPHKRSVTIEVMTADEGVLGGGRFATDVVGFMAMADYVKQWPDRVWAVEGCSGIGRHVAMRLIADGQDVVDVPPKLSAQARVFSTGQGRKTDATDAHSVALVGTRMAGLRPVVADDQLTVLRMLADRRRSLGEEHTRKVSQLHALLLELLPGGAKKDLSAAQAKALLAKVRPRDLVGKTRRRLAAELVGDLEQIYARKKAADKELKALVAATDTGLLDLHGIGPSGAARLLVEVGDITRFPDRNHFASWTGTAPIDASSGDNVRHPLSRGGNRQINRVLHIMATVQLRNPTEGRAYFDRKKAGGKSSNEAMRCLKRRLSDAVYRVMADDLAKTMRTDPGGQPGNDSYSSATSSQPKASSSEKPLPGPVTTQPRTPLPAAS

SEQ ID NO: 117612 - protein, 403 aa, unidentified
MTVRPVVWVGIDVGKTSHHACAVDETGKVLWNQKVSNEQRAIEQLIARAHKGADEARWAIDLTSPMALMLITVLLGAEQSVVYVPGHVVNTMTGAFRGEGKTDAKDARVIAETARMRSDLSEVAMPDELVVELAQLTGYRTDVMADWVRGVNRLRSLLGSIFPGLEAAFDYSNRTPLILVAHLCTPAEIRAAGIKGVTAYLGDNGGWPTAIAKTAATAVAAAKQQPLALPGEAGTAALVKRLAGKLLDLDHEIKDIDKTITERFRDHPYAHIIESLPGFGPGLGAEFVVVTGGDLASFATAGRLASYAGLVPVPRDSGRISGNLHRPKRYNRRLRRVFYMAALSSIRGDGPSRQFYDRKRGERFIHSQALLALARRLVDVLWALLRDGREFTPDKPTPATAAA

SEQ ID NO: 117613 - protein, 429 aa, unidentified
MNANWSEKPFFAALDWAKDHHDVIVVDRVGTIVADFQFAHTVPGWEEFSQKMQPFGKCPVTIETSSGMAVDQLLQRGYTLYPINPLAAKEYRKRKAPSGTKTDRHDAWSAADALRTDGHAWRPLHPQDEATLRLRTLCRDEIALIENRTALVNQLEAALGEYYPLALESFEEWAKPFTWAFLRAFPTPEALSKAGKRNWQKFLHTHKLWRPDTSAKRLALWERGQQLHASPAVVSAKTLLALSLAAVLETLQRQIQEYRSRIEAAFEEHPDHDVFGSLPGAKEVLGPRLLSFIGSVREVYPDADSLMCQAGVSPVSYQSGKICKARVRYVCDHFLRHAVHLWVDESRKTCDWAQAYYKTKRDQGHEHASALRCLGKRWLKVLWRMWRDRTPYDEAKHLKNLRQHGSFVCGLLEEVLEETLPDGGELCLI

SEQ ID NO: 117614 - protein, 402 aa, unidentified
MKVSGLDVHKDSIFCAIYDGRSHSNVKEYESTTNSILMLGNYLQSEGVRQVAMESTSIYWIPVWDILEEMGFDLILVNPFLIKQMPGKKSDTKDAQWIASLLHKGLLRGSMIPNSHIKELRIYTRKYAKLQQKSVQILTEMDRVMVTANIRLSSCMSVLGSKSMMSIIEALIRGETDAAQLVKLVYANTKNKQSGKLREALTGNLKEHHQQSLKWAKELYDLYQKQIQECLFYMEKICREHYSKQMELLLSMPGISRISAMSIIAETGADMSAFENSGKITGWAGLRPRNDESAGKFKSKAITKGNKYLRSTLVQIAWAASRTKGCYFKEKFNRLALRKSSKKAIVAIARKMLVIIWNILNDSKPYNPTLGHIYDPVKVTRSIAYHQKEIQKASKLLPVNVK

SEQ ID NO: 117615 - protein, 317 aa, unidentified
MKDAQVVYIGIDVSKDTLDIDAGELGAERIANAPAEVRKALKAISRRAQGRPLHACFESTGPYHGALAAECPAMGVAHSVLNPWKVACFAKSVAQAKTDRIDASLIRRFAEARRPKPTPPPSATTAALDELVLAREAAMRGVVALRSLLETLKTPAARKPVKKGVAFGEKRIAEYDRLIAEAVAADAETSGLAGALGEVKGVGALTAAKIVAWMPEIGTLGRRRAAALAGLAPHTRESGRWKGRSFIGGGRKAVRDALFMPATVAIRFDPHMRRAHEALMARGKPYKVALTAAMRRLLCHLDSVAKDYRAKRSGMPA

SEQ ID NO: 117616 - protein, 333 aa, unidentified
MNKFKHFLGVDVSKEYFDAVVILDRNKEKSIHSQFVNDYKGIKSLCKWLKEQGSTFENTLVCLEHTGMYGKLIIKYLMIEKFSLWVEMSLKIIRSIGVQRGKNDKVDAQRIAFYAMKNVEEAVIYNAPRMEISKMRNLLSLREKLVATKASLLRNVKELKAFDLEVARLSEKLQKSTIKGIDLDLKNIEKQLDKTINDDENISRIFTLVTSVIGIGKVTALFLICFTNEFTMYTTPRQLACYAGVVPFEHTSGKSIRSKPKVHYVANKKLKKQLHMCALSAITSDPELKNYFNRKVEEGKNKMLVINNVRNKLVHRICACVRENKMFEKRQVA

SEQ ID NO: 117617 - protein, 320 aa, unidentified
MNSKNNITRKHVGVDVSKAKLDCWKPTKGNKEAAFKSFANDGKGVAALLRWIPKGGHVVLEATGCYGELLACMCHNLGVPVSVVNPKNVRDLARAQGWHAKTDRIDAELIARFADIVEPAPAPKPTKAQRALRAHIDLRESLVEERTRHLCRLEKESNPSLRAIIKKQIAHLDGAIAGIERQIDALMASCPKMTAMRSQLRTIPGIGPVISASLIALLPELGTLSRKQAAAICGLAPYARDSGKKTGKRFITGGRAKLRRRLYMGACAILRTRSLLTAQYKAMVARGKVKMVALIAIARKLAIRANSICKPLASLEYATE

SEQ ID NO: 117618 - protein, 444 aa, unidentified
MNKTLFLGIDVAMAENACCPLLDDGTEASRRFTVLNNLPGAQQLVREILTLMERHHLNRLLIGLEATNLYWWHLACFLISCPELAPFQPRVYAFNPRLVRAFKKALTDTGKSDIGDAYVVAERLRFGRLPAPFILNEVYQPLQRLTRFRCHLMHQITREKNYFLSFLFLKFSEYQNLDPFSNTFGAASQAVLTDFLTVDEIVAAPLEELASLVAKEGRNHFPSPEAVAAAVKRAARDSYRPHPSLNEPLNLILGATLENIRTLSQQVKKIDKAIERELRKFSNTLSSIPGLGPVFVAGILAEIQDINRFPDHAALAKFAGLFWRTKESGSFQAEETLMGKSGNPYLRYYFIEGANSVRMHSAEYGRYYRTKYDESTKHKHKRALVLTARKLVRLVDAMLRRSQLYISPPTNLTEEVSKQGITKARPAKQHRYRLPASHSLAACA

SEQ ID NO: 117619 - protein, 342 aa, unidentified
MLHIGVDMHKRFSVVAVLDEGGNVTREERLEHSARQRLAEFFQTYRGAAVATLEATRNWYWLYELIEAQGVVVKLAHPLRVRLIADAKIKTDKIDAKILAQLERTGFLPEAYIPPPAVREQREWLRYRTALVHTRVGFKNRVHAVLDKLGITHEYTDLFGKKGLEFLKAVPLPEVCRFELGEYLDLITRLDGMVAVVTKRIRSMLKPDPRARWVLGIPGIGDIIAYLALSEIGDIHRFPSPKRLVSYSGLAPGVRQSADHVWEGHITHEGNCYLRWGFTEAAQLAPDKDPALHCFYWQLARRRGRKKARLAVARKICVAVWHVLTYEEAYRYNCMSKFSTSG

SEQ ID NO: 117620 - protein, 356 aa, unidentified
MEEPMSNTKSRAVIVGVDTHKSTHVAVAIDIHGARLATLSIPANPKGYLELEAWSQSQGDVAAFGIEGTGSYGAGLCRSLLNQGHNVFEVTRPNRQLRYAKGKSDSVDAEGAARSVLSGQATARPKTGTGSSEMIRHLKIARDTAVKSSSQAMVTLKSLIINAPAGLRDLLDRIKGKVTLIRHIAAFRPGEITSTTASAKAAMRALARRWLALHEEIQIHDTELERLVAKRAPNLLASHGIATMTVAEMLILVGDDPTRIRSEAALAKLCGVCPIPASSGKTNRFRLNRGGNRQANAALFRVAIVRMSGHEPTLAYVKKRTREGKSKREIIRCLKRYIVREIFNHLCCPKIGKIAG

SEQ ID NO: 117621 - protein, 342 aa, unidentified
MKYIGLDCHKKFDHATMIDTETGEVRAKRLAHLKEDFAEFIGERSDTRLVMESCWNWCKTYELVKDLVEEVTLAHALKVRAIASAKIKTDAIDFRTLAELLMADLVPQAHLRKAENRIKQRVTRHRAFLIAIRTRLKCRIHDLVDSQLLSRDAVQAKPVNIFSKKGMKWLCSLEYNSEEHRKMLESYLKLLEAINREIASSNEMIEEIYEQDKDAQLLATIPGIGVTLATLIGTEIDGIERFRSPSRLCSYAGLVPSTHSSGGKTYHGRITSEGNRWLRWGLIEAVVPASYADAEIRRQLNDLRRIKSGNVAKTIMARRLLKIVYHVLKERRAYVPDYPGRL

SEQ ID NO: 117622 - protein, 344 aa, unidentified
MQIVGCDFHPGFQQIAVLDTSTGEIEQRKLVHGHGEAEQFYRQLEAPALIGMEAVGNSLWFEQLIRGLGHELWIGDAARIRASYVRRQKTDKRDAEHILLLLREQRFPRIWTPSEEDRDRRQLLLHRHKLVQMRTRVKTELQHLALNQGMQKKRRLWSAQGRRDLEKLFLKGWTARRREDLLSLLTMLDSQLAELDTAVAEVAAVDAQARLLMTQPGVGPVTALAFVVTIGDVRRFRRGKQVASYLGLIPRERSSGDTRRLGSISKQGNVFLRTLLVEAAQSAVRCDEQFRREYRHRCHQKPTGVAKVAAARKLAVRMYWMLRNQAPYQPAVHNEGSSCHPVAD

SEQ ID NO: 117623 - protein, 423 aa, unidentified
MQGVEDNEEIIERVAAIDVGKAEVVVCIRIPDPARPGRRQQEIVHSSTLTPRLLVLADRLVELGVTRVVMEATSDYWKPVFYLLESRGLDPWLVNARDVKHLPGRPKTDRLDAVWLAKVAERQMLRPSFVPPAPIRLLRDLTRYRAGLVKVRTAEKNRVEKLLEDAQIKLSSVVSDIFGVSGREMLAALLAGERRPTVLAQLARTRMRPKIPLLEEAFVGQFTEHHAFLLRLMLARIDEAGADIAALEDRIRQLVAPFATVVTRLDEIPGVGATAAWTVIAEIGLDMSRFPTPAHLSSWARFAPGVNQSAGKTKGRGATGHGNRYLGQALGEAAVAAAHTHTFLGDRFRRLARRRGGPRATVAVGRSILVIIWHLLSQPDARYHDLGPDYTRRRADPNRATRNHVQHLEALGYTVTLTPVALA

SEQ ID NO: 117624 - protein, 385 aa, unidentified
MFTERTSVGLDVHARSVAAAAIDGITGEVTQTRLTPSYEHIRSWISDLPGPVAVAYEAGPTGFGLYRALTDAGIRCEVAAPSKLHRPSGDRVKTDARDAVHLSRLLRLDEITSVSIPSMSQEAARDLVRAREDCRGDLMRARHRLSKLLLRHGIVYYGGAAWTAAHDRWLRTEAAPQLTTPATRMAFDADYDHVLTMQARRGRLDSAIEHIAQDCEFTPIVRRVSCLRGVSTLTGFALAVEIGDWKRFTGNTIGSFVGLVPSEYSSGSSRVQGTITKTGNTHVRRLLVEAAWHHRARYHVGAVMRSRWDQASAAARARGDEGNRRLHGRWVGWNAASVRLSPTWRLPASWLAGAGPWRSWRTDRHLICFPPRRWWQRVDRPATHL

SEQ ID NO: 117625 - protein, 363 aa, unidentified
MTDGICFAGLDVHARKTAAAAVQLGSGEVFKAQLPGSAAAAIEWLQSLPGPVRAVYEAGPTGFGLARAARGAGVEVMVCSPGAIPRQPGDRIKTDTRDALKLARLHAAGQLRPVVVPAPELEALRDLVRAREDLRGDLMGARHRISKLLLRRGLVFDGPGQTWSARHLTWLSKVRFEQPLVELVFGEYLAHHEVLLARRDRLDGLLGEQSLQGSWAPLVARLRCLRGIDTLTAVGLVAEIGDVTAFKHPKQLASYLGLVPSEQSSGERRRQGSITKAGSSHARRLLVEAAWHYRRPPRVSLTLKRRQAGQPAAAIDAAWRAQIRLHRRWAHLDAARAKKRTTVAVAVARELACFVWEVAQQPD

SEQ ID NO: 117626 - protein, 338 aa, unidentified
MTVHVLGVDLAKNVFQLHGVDRKGRCVLVRRVRRDLLMNLVAELEPCLIGIEACTGAFYWQRQFEHHGHTVKIIAPQYVKPFVRRQKNDSNDAEAICTAVQQPNMRFVPKKTLEQQDIQALHRARQRLVNHRTALISQMRGLLLDRGIAIGVAATRARCMIPKVLNEPNEDLSSLTREIIASLYDFMLQIDARIRFFDKEIDAIFKANEACQRIAKIRGVGPKTATAMIAAIGDGSDFKNGRHLAAWLGLVPRQHSSGDRRVMMGISKRGSQHLRTLLVHGARAVVRTAVRKTDARSNWVNDLRERRGHNRATVAVANKNARVIWAVLRTGEPYRAAA

SEQ ID NO: 117627 - protein, 348 aa, unidentified
MTEAYDGQEVVGMDLHRRRSVLVRMTPDGRKLETERITNSPAELRRAIARAGTHPRVVLEATYGWYWAADTLAEAGAEVHLAHPLGVKGFAYRRVKNDVRDAADLADLLRMGRLPEAWVAPHEVREMRELTRYRVKLVRLRTSCKDQVHAILAKLGIPVTCTDIFGVWGSTWLDGLELPQPYAGKMASLRKICAVLTGEIAVLEAVIAGLVKDHQGYQAVRTLPGIGPVLGAVIVAEIGDITRFPRPAELCSWAGLTPRHRESDTKVRRGHITKQGSRNLRWALIEAIQHVPAGHPLRQRMDGIITRRGAQARSIAKVAMARQLLTWVFYAMRDGQVRSLATAARQAA

SEQ ID NO: 117628 - protein, 374 aa, unidentified
MDPIYIGVDFHARQQTICYLKTETGELVTSELKHQDKAAVRGFYAQFAGPVIVGLEASGYSPWFERLLEELGCEVWLGHATEIRRRARWRQKNDRRDAELILELLLHDEFPRLHRPAVQSREVLRMLRYRQKLIKLRTMSKNSLQALALQAGLARRSHLFTREGKQELTAALMSPAMQWQREHWWQLLQPLNQQVLEAMGWLKAQSKGDVEVARLRTHPGIGLLTSLCLAHTRQPVARFRNTRKVAAYAGFDPVERSSAERQRFLGISKAGSRLLRHLMVEAAHVAVRKDEDLKRFYQRLAARRGRPKAKVAAARKLLIRAYIMLRDEIDYAEFRRRAVAARLARLGQGPKVPAVVIGQPASTERQEQLTRVRK

SEQ ID NO: 117629 - protein, 421 aa, unidentified
MLGVGIDWAEEFHVVALGRPGSGVIEVVRVEHRPQAVSALAARIAGLEADPAEVRVVIETRHGLLVEALVGAGYTVLPVNPQLVSRRRGPARKKDDAEDARICCLIALDRHAGLRRLIPHGQLAGELRSIARDDERACRDERRLLNRLRADLLVTFPAALAIAGDDLGATRILRLLERWPTAQALAAASREEIIEFGRAQRTGYLARFADRIQAALAEDHFTAPAHLVRAKVDTIRLTARQLLLLDAQRRAWEKRMGELLLGAPSQPAEDQPGQAFPGGEIYLSFPGLGRRLAARIAGEVGEHIEQFTTPNSLQCYAGRAPVTRRSGKRDLVVAHRLACNRYLADAVHKWAFASLRRSAWARQFYDAQRARGKNHHAALRALGNRWLEVLWHCLTHDVPYDEAVHTANRNRALAAITSSAA

SEQ ID NO: 117630 - protein, 366 aa, unidentified
MRKISTVRVNEIVISKGSKLTIGLDLGDRWSFYCVLDEAGEVILEQKVATAPEAMEQAFGRMTRSRIALETGTHSPWVSRLLARLGHEVIVAHARNVRLIGESNRKDDRLDAQTLARLARIDPELLGPVRHRSAKAQIHLTVIRARAELVSARTALVNAARGLAKSYGERLRKCGTGQVSRELVAELSVELREALEPLLAEVESLNERIKEYDARMEKIAAESYPQVALLKQVKGVGTQIALTYVLTLDDPHRFAKSREVGCFLGLKPGRRDSGQSQPQLHISKEGDRYLRTMLVQGAHYILGPFGEDSDLRRWGLQLAKRGGKNAKKRAVVAVARKLAVLLHRLWVSGEVYEPLRNSRKAVRAVA

SEQ ID NO: 117631 - protein, 346 aa, unidentified
MKHVGLDVHQVKTTVVWVDAQTGEVSRARELPTAAVAEHLAGVGEVLRVVMESGLHSKFLARQLLSCGFDVWVLDARKVAAQMPAYKTGKTDQLDARALAKMSFENALDKMRVWVADEHTEERRALTRTREKLVAQTTALRNEWRGQLAAFGLLCPANDVLSAKAECWLAEHLAAVPAWGQFCLQCVHDSLLALREQIKLLDREIERHAAADPACQKVRSLPGCGALLAVTLVAELGDVARFASLGRACSYAGLTPTITQSGDRSYTGRLTRRGNPHLRRALVLLAQHFAWQKDLGETSLKRLYYRTLHKHGPNAAKVALARGLCRVIVAMLRADQAFAPPQAQAA

SEQ ID NO: 117632 - protein, 376 aa, unidentified
MEVLYKRCCGIDIHKNMMVACVFTGVRKKEVRQFSTMTEDILQLVSWLKETDCEMAAMESTDSYWKPVYNIFEEEHIPIMIVNAQHIKGVPGRKTDVKDAEWIADLVRHGLVKASYIPNREQRELREMTRYRQEMIEERARELNRIQAVLEGCNIKLGSVITDISGKSGMAILKAIISGETDPIVLSELAEGRARNKLQEMRRALQGRVLEHQQKMLEHQLVHMESLTSLISDLDEAIKKTDTISWAVEALDGIPGIGRQSAERILAETGVEMEHFQNESRFSSWAGLVPECKESAGKKMSSRIRKGNKYLKACLVECARAAIRKKQSYFYSRYQRIAARRGGKRALIAIAHTMLIAIYHMLKEKVPYYEIRCRLL

SEQ ID NO: 117633 - protein, 427 aa, unidentified
MNFTQNKKLMQITPETMVVGVDIGSEFHYARAFDFRGFEFSKKAISFSNTKEGFENFDRWVTDLMKKYGKTHIFVGMEPTGHYWYGFGCHLQNMGVEFGMVNPFHVKRSKEMDDNSPTKNDRKDPKTIAMLVKDGRYHIPYMPEGVYRELRNLMELRRQCVVQIISIKNRVKRWQDIYFPEFCKVFKKWTGKAAMLTLRHFATPQRILETGEAEIVATWKKEVKRAVGNKHAKRLIKAAEDSIGLNHGLESAELEIETLLDEYETYEQRYERIMNKVEKQVKQVPGATNLLGIKGIGIVAVAGFLAAVGDIKRFDAPEQIVKLLGFNLRENSSGKHKGKTTITRRGRSDGRYAIFQAVLPLIAKNSEFRKLHHYYINRENKPLKKIQSVVALCGKLIRVFFAILKTGSQYNPEKMMSDIKRPKLMVS

SEQ ID NO: 117634 - protein, 415 aa, unidentified
MSYKIAGIDVHKKVLMVVVMDAHAPADEPERRRFATMPSDLRRLLSWLQEKEVKEAVMESTAQYWRSVWLELEPYMRLQLAQAFSNRAPRGRKHDFKDAERLVRRLIADELILSFVPKGEQRIWRNMTRMKTQLTRDRVRLQSQMECLLEEMRIKLSSVVSDLLGVSGLRILWALARGESDPKKLAALGEERLRCNEEQLIDALTGSPQPTHRELLSLQLERLQLIDEQIAKLNGMIAQALKPHQETVVRLAEVPGFGVDSAQQVIAEVGVKASTFPSAAEFTSWVGTCPGKDESAEQNHSSRSAKGNKYLRRLLSQVAHAAVKKNGSHFQAVFRRLLPRLGYQSAIWAIAHRLCRVLWKILHEGVRFIEQGKEPDPQAKKQRARVLARALRKLGYDVAISPMNPPTAESATPTQ

SEQ ID NO: 117635 - protein, 367 aa, unidentified
MGEGTTYVGMDVHKRTIAVSVRFPGGGFDERTIPHEARSVNRLVRKWKREAPGAILCAYEAGPCGYGLQRELQEQGLPCQVIAPSLIPRKPGDRIKTDRRDARRLAELLEGGLLTEVHPPSPEDEAVRDLCRAREDAKEDQVRARHRLGKFLLRRGLRWGRKNWTLAHQLWLRGLRLEHPADQAIFDAYCIALDQATERVRMVELALQDWASIEPYATPVSWLRCFHGIDTVTAMTLVTELHDFRRFRRPRELMSYLGLIPSEHSSGGHTQRGGITKTGNGHARRVLIECAWHYRHSAQVSRALRQRRAGQPPRVIAIADKAHRRLSGRYRRMTARGKEHNKVVVAIARELVGFLWATLVVEERAAV

SEQ ID NO: 117636 - protein, 385 aa, unidentified
MDIFRTGFEQLCHTIDTAAARIQAQRVLIGMEPTGHYYENLTRQLQDNGRPVTIINSFAVKENRQQQMMTQEKNDEIDAAAIGDLLRRGEGSPFRPLSGIYLKLQQLDRARIGELKIQTMYKNRIIGHLDRIWPGLILSKAAAKERYQPLFATEFWECQRWQQLIRICPDPREVAAMSLPVLIDAFHEQGFAMGPVWAKRFIAYAQQSLYPDPEVVSIRRQWLVSDLEAFDGVSARIAAFTDQIHPLLAQTPYHFLTRVKGLTPTTVGSFAAAVGDPTHYRHARHVFRRSGLVSGRNDSGTRQRQGKGKSVTKVGDVYLRRALGIVAGGLILHQPVLSAYYHRLRQTKEPGVARVATIRRATGILWATMRDQRADTLILKRGTLM

SEQ ID NO: 117637 - protein, 366 aa, unidentified
MKKISIEQTFRDDILKEQKLTIGMDLGDHWSCYCVLDEAGKIILEQKVAMTPEAMKQTFAKIPPSLIALETGTHSPWVSRVLTELGYKAIVAHAQKVQLITKSNRKDDRHDARTLARLARIDAELLGPVRHRSAQAQIHLTVIRARAELVSARTALVNAARGLVKSYGQRLPKCGTQQVSRELGAGLHAELREVLEPLLQEVESLNERIQEYEVRMEKIAKESYPHVELLKQVKGVGTQIALTYVLTLDDPQRFPKSREVGCFLGLCPGRRDSGESQPQMRISKEGDRYLRTMLVQGAHYILGPFGEDSDLRRWGLKLAARGGKNAKKRAVVAVARKLAVLLHRLWVSGEVYEPLRNSQKAMRTAA

SEQ ID NO: 117638 - protein, 355 aa, unidentified
MSSEKYIGLDVHQATIVVAVMDSTGKLVMESILETEAATILQFFAGLRGTLSVTFEEGTWSVWLYDLLSPQVDKLVVCNPRKNALLKDGNKRDRIDARKLAELLRGNQLKSVYHGETGVRMLRELSRSYLTIVKDLSRVMNRLKAVYRSWAIPCAGRDVYDRRHRAQWLDKIREAGVRRRAERLYEQLDMLQHLRQQARRELLAEGRKHAITAKLRQIPYLGPIRSVLAVALMQTPHRFRSKRQLWAYSGLALETRISAEYRLVEGQVRRSKKLLSIRGLNKDHNHDLKGLCKGAATMASVRPGPLQDFYQAALAKGIQPTMARLTLARKMAAITLTLWKKGENFDAEKLKSQAA

SEQ ID NO: 117639 - protein, 366 aa, unidentified
MQKISTMQVFGNEIFEEQKLTIGVDLGDRSSAYCILNEAGKIVFEHKLATTPEVMKQVFGSLPRCRIAMETGTHSPWVSRLLTELGHEVIVAHAQKVRLITKSRRKDDRLDARTLARLMRIDPELLSPVKHRSAQAQLHLTEIRARAVLVSARTALVNAARGLVKSYGERLRKCGTEQFRRETTCGLSAGLREALEPLLQEVESLNERIQEYDRRIEHMSKKMYPETALLKQIKGVGNLIATTYVLTIEDPHRFRKSRDAGCFVGLQPGRRNSGESEPQMRISKEGDEYLRTLLVQGAHYILGPFGEDSDLRRWGRKLSARGGKTAKKRAVVAVARKLAVLLHRLWVCGEVYEPLRNSQKTMNAAA

SEQ ID NO: 117640 - protein, 355 aa, unidentified
MTSTKYIGMDVHKESISIAVLNFAGKAVMECVIETKASTILQFIDGLRGDVHVTFEEGTWAGWLHDLLKPHVTELVVCNPRKIALLKDGSKSDRIDAHKLADLLYMNKIKPVYHGEHGLRMLKELSRSYLTISKDLGRVMNRLKALYRSWAIPCAGTQVYAPHYRSEWLSKIGEAGVRRRAELYYQQLDALRLVRQQARKELLVEAKKHRATKLLRQIPGIGPLRAAHLVAVMQTPHRFRTKRQLWTYSGLGLETHDSAQYRVVEQQLQRSKKSVTLRGLNTNHNHDLKDIFKGAAMRASTAAGPLHDFYEALLAKGRKPTMARLTLARKIAAITLIVWKKEVRFDANYLKQQAA

SEQ ID NO: 117641 - protein, 358 aa, unidentified
MQAQNYKLNFAGQNIYVGLDTHLKSWKVTIMLEKLMLKTFVQNPEPEKLVEHLKQNYPGAKYYSAYEASYCGFWIHKKLVALGVNNIVVNPADIPTTDKEKKQKEDKRDSRKIARELQKGDLVGIYVPSDENLEDRALLRLRETMTGDLVRYKNRVKSTLHFYGIKIPEEFAKSSYWSKRFIKWLEDLKFKQESGNKKMEMLLNQVKSLRASLLSLTREIKKLSQTEKYKTNVELLLSVPGIGLIFSMVLLTELDIIKRFDDFDHLCGYVGLVPSTGSTGDKEIVRGITPRENHSLRTMIIESAWVAIRVDPVLSLAYAKYSKQRHENKAIIKIARKLLNRIYYVLRTKNKYVLGVVK

SEQ ID NO: 117642 - protein, 345 aa, unidentified
MSEFYEGRQFVGMDLHRRRSVLVRMGESGEHLETVRILNDRDSLAEVMSRAGESPEVVLEATYGWYWAVDALAELGATVHLAHPLGVKAFTYRRVKNDQRDAFDLADLLRMGRLPHAWIAPPATRELRELVRHRAKLVAMRSQCKAHVHAVLAKGGIWVPMSDLFGVEGNLLLDKITMPAPYKARIASLRRLIEALDFEIDLFGGLAGGRLARDPGYTAIQQIPGIGPVLAAVFVAEIGDVHRFAGPAQLTCWAGLTPSHHESDTTVRRGRITKQGSRLVRWAAIESVKILPDTSRIGAIREQVAHRRGNRNIGAVAAARKQLELVFYALRDHHVRALHRSPHAA

SEQ ID NO: 117643 - protein, 346 aa, unidentified
MKHNNSTGTLKVLGIDLAKQSFQLHGVDEAGHTVLKKKLKRKQLSAFIANLPPCLIGLEACGGAHFWVRRFTEQGHTVRMIAPQFVKPYVKSNKNDAVDAEAICEAVQRPHMRFVPVKSIEQQDIQSLHRIRSQLIARRTAQANQIRGLLLEYGIILPKGISYIRKEIPEILENAENALTSLFRELLNELYDEMVHLDDRVCSLEQKLEAICARNQDCQRLLTIPGVGLLTATALIAAIGDITVFKNGRELAAWLGLVPRQHSTGGKPMLLGISKRGDSYLRTLLIHGGRSVVRVAHKHQDKRNQWIDEIKQRRGENISNVAVANKNARIVWALLTKKENYCAAGA

SEQ ID NO: 117644 - protein, 326 aa, unidentified
MTNPVSQPVPALFVGIDVAKDKLDMARSDSAEVLTVANDPQGIRRLIDSLRQRRPNVLVVEATGGLERAVLDALLDADLPVALVNPGRVRHFATGIGILAKTDAIDAGVLAQFAQLASPRMAQKRSENQTELDALVTCRRQLIHVRTEQTNRRQTTSSKPAKKAIDAVLKAVDKQIKDLHLQIRKLIESDDDFNSTDQLLRSVPGVGAVVSSTLLAELNELGSTDRRRISSLVGIAPLNCDSGRSKGKRAIRGGRASVRSVLYMATITAIRSNPVIRRFAERLQKAGKLAKVTITACMRKLVTLLNAMLRDNLTWEQLNVVHNLDN

SEQ ID NO: 117645 - protein, 410 aa, unidentified
MIKENYIYVGIDLHKETHTAVMIDCYNQKLGEITFPNRPADFPKLVTKVKKCNTDGKEVVYGLENAYGYGRALAVWLIDKGYLVKDVNTAISHRQAKHRGAMYRKSDSDDAEAIALATLNMLDKLPDACPNDAYWSLGQLVHRRDNIMKQRTRLVNQLHEQLCIAYPSYKSFFNDISRPTALYFWEHYPSRKYLRGKFVEDLRKELVPVSHNKCSTKTCQAILDAVAGDKVKNIDYQDARDMVTLSIVSDLQHYDSQLMEVDKMLEQMYKMLGCTLTTIPGVNVITAVKILAEIGDIKRFSNANKLAQFAGIAPLHLSSSGKGKDFATKQGNRRRQATIYFLAVQMIQVSSKGTPRHPAFRAYYEKRKAEGKTSQQALICISRRLISIIYGMLKNGTEYRMPVVESAGEK

SEQ ID NO: 117646 - protein, 354 aa, unidentified
MIIIGCDYHPSFQQIAFVDTETGELQERRLQHREEAEKFYRDLAAQGRKVGVGMEASGHARWFERLLAELQCELWIGDAAEISAKRVRKQKTDRQDAQLILRLMMKDDFPQIWVPSWENRDLRQLLWHRHRMVQARTRIMNQLQAVALNEGLRSKKRLWREAGREQLEAIRLAPWASQRRRDLLELLDRLNPTIAKLTQAIEEEVGKRPAARRLQTHPGVGPLTALAFVLIIGKADRFQCGKQIASYLGLVPLEKSSGHQRRLGHITKQGNSLLRFLLVEAAQVTVRSLPEWRSKYVHLTMRRGRKIAKVAMARRLAVRMYWMMRKEWDYERLRKFGSHAGKPGSGDGVKSNTE

SEQ ID NO: 117647 - protein, 427 aa, unidentified
MLKHHTEPNPAEEFAAFLAIDWADEEHAFHLQVVGQSKIETGTLEQKPHVLGPWVAQLRERFGGRPIAVGLEQSRGALIHGLMAYDFLVLYPIHPTTVAKYREAFKSSGAKSDPLDAGQILEILTKHQDRLHRFNPDTVETRLLGRLVEDRRKAVGLRTTHVQALGANLKEYYPQALELTSGNLSSRLAGNLLLKWPTFADFQQAEPSTLKSFYYGHNVRSPEVIERVLALAEKSQALTTDPAIVESGSRLTQMYVGLIQALNPVIVKYDQRIQRVFDAHPEVKLFTGLPGAGPALAPRLLAFFGTDRSRYAAALNVQSFTGVAPVTKSSGKSRVVYARAACPKFDRQTFHEFSRLSVTHCQWARNYVQYYTDKGKKYHTIIRALAYKWIRILHKCWKERTPYNEDLYMERLKKRGSIFATLHLQTK

SEQ ID NO: 117648 - protein, 316 aa, unidentified
MVPSPLFVGINVAKATLDIAVRPTAETWSVSNDATGIDALVLRLGALAPPLIVLEATGGSQGPLVAALVAAALPVVVVNPRHIRACAQAVGILAKTDRIDARVIAHFAEAVKPAPRPLPDAETQELRALLVRRRQLVEMVSAERARLDTVPPRIQDAIQAHIAWLTTQVAGLDDALTRASQTHPVWQAKDDVLQSIPGVGPVLARTMLGQVPELGTLGPKPLAALIGVAPFNRDSGTLRGRRTVYGGRAEVRAVLSMGALVATRHNPVIKTFYERLLAAGKAKKVALTACMHKLLTIMNAMVRALKPWQPQEVPSA

SEQ ID NO: 117649 - protein, 428 aa, unidentified
MKVLYERVAGIDVHKDMIKVAIRSPGDKPWARKTEIVEFRTFYGVLQQMAAELRRRGVTHVVMEASGVYTEPVYYALCEQDFTEVAVINPAHAKALKGHKTDARDCARLAELFECGLLRGSYIPAPELKEVRDLTRYKIKTVQARTSEIQRLAKALESAGVKLGSVVSEITGKSATAMIEALIDGERRGGVLADLARGRLRTAGKRADLSMALAGRFTGHHAVLCRLHLDRIKLFDAAVDGLGEQIAAKAVPWQRELGLLKTVPGFGDAVAQAWIAEIGPAPHAWFSRHEKLASWVTLCPGNNISAKKRKYGRTGDAGTYIKPTLIQAAWSAIRVRGRLQARYHRLVRRFGGDKNPAAKKKAITAIAHTLLKIAYQVLKSGQPYQDLGADFYTRRESPAQRQAYLERQLQKLHPRCAITITISPPEAS

SEQ ID NO: 117650 - protein, 351 aa, unidentified
MHYVGMDCHITTLDFAVVDDAGRLVKSCKVDTSAKNFMEFVKNVAPPRIVYMEESVLAAWALEICNRFGEKLVITDPKQNHWIGSSNQKDDPLDALKLAQLGRGGFVKEVHHPVGERRRFRELMDSYHDTVKSTTRIKNKIKSKFRQNGIQCTGMTVYSETYREEWRQKLPQDQTLLLIVEGLWNQLKESEQTEKNLLKAARNFAKHYPEIELFEEIPGIGFISAATISAILETPHRFANKRKVWMYAGLGITTRSSGGKTYSEKLSTDYNRLLKYTLKQVAETAVQAKDNPFRQKYLAMTTLRGIAPHRAKLTISRDMLATIWAMWKKGEKYNPEIRNNPCYKQVSLISV

SEQ ID NO: 117651 - protein, 348 aa, unidentified
MIVGVDVHKHGHVAALLDERGGELGTLSFINSPEGMRRLRAWLLANGAGEAVVGVESPAGYGRLLVASLAAAGHQVLNVPAWRTHRERRRHGPGKTDPGDAIAVAQVVLRNRAELGPALEPELVRALALLELQRRRLVRDRTQAIQRLRADWNQIDPVGEASVVNLTRQRELRRLKRISFGDGLVEQVATRCIRDLARDIDDLNQRIATLDAEIAQLLAEHGNPIADLHGAGTQIAAAVIAHAGDVRRFRNGAAFARFCGAAPIPCGSGQTAGRHRLHRGGNRQLNAALYRIAIVQARHHPPAKAYLARKIAEGKTPREARRALKRHLANVVYRRLHAWAETTPALNT

SEQ ID NO: 117652 - protein, 346 aa, unidentified
MVTLGADSHKTTHTLVAVDETGRKLAQGAFAANADGHLSALRWASQWGERRWALEDCRNLTRRLERDLLGAGETVIRVPPKLMAGARDSARTRGKSDPIDALAVARAALREPGLPTATLDGPSRELRLLVAHREDLVAERTRIQNRLRWHLHELAPETAAEVRSLSRKKGLSDLEAQLMGREGLVASLARELVTTVRKLNERIDQLEQEIIARTAQLAPSLLTLPGCGSLTAAKLVGEVAGASRFKSRAAFAMHNGTAPIPVWSGRADRFRLNRGGNRQLNVALHRIALTQMRLDGAGKEYIAKRVGLGNTKKEAIRALRRRISDEVYRRMRSDESLKSAYREEAA

SEQ ID NO: 117653 - protein, 424 aa, unidentified
MKVTYQTCCGVDVHKSFLVATIVKTTGGIEPSYQKKRFSTFNNSILEFKQWLLDNHCHDVCMESTGKYWVPVFNLLEDKINVVIANPKWVKAVKGNKDDTKDSKWIGDLFRLGLVKGSYIPCKKVRILREYTRYRYKLVSCRSSEKNRYQNALTVCNVALDSIVSDIFGKSSTSIIDYLLEQSGTSINHEEIASKLLRSLKSKEDAVIESVEGYQMTDAQKYRMRLVRAHMDYITAEINDVDKMIENMISSNPDFENAVQFLCTIPGVKRDSAITIISETGTDMSQFSSSKRLCCWAGLTPGSNESAGKKKSVRITRAGVYLKPALVQCAHAAVKSDKSPYYKKKYESLVKRRGKKRAIIAIARMILTAIFQMLTTGETWNPCDLYKIDMPEALLEKQKQKAIKQAQKLLIREGLLPPTEPIAS

SEQ ID NO: 117654 - protein, 370 aa, unidentified
MKKNSTCPQSPRRGTKARRQEMTIGMDLGDKTSRYCVLNGDGEVIQEQSVATTKKGMLRVFGARKRCRIAMEVGTHSPWVSRLLGGMGHEVIVANARQVQLISASSRKDDRLDAQTLARLARVDPQLLRPIRHRSEKAQAHLMSIRVRAALVETRTGLVNTARGLAKSVGERLPSCDTDQMGVDRGEGLPRQLLETLQPLLEQVESLTEKIQESDAKIEQIARSEYPETELLKQVCGVGTLIALTFVLTVEDRERFQKSRDVGCYVGLRPKRSDSGESQPQLRITKEGDIYLRKMLVQGAHCILGRRGPDTDLKRWGLKLAARGGKNAKKRAIVAVARKLGILLHRLWVTAEVYEPLRNSQARPRAGRAA

SEQ ID NO: 117655 - protein, 339 aa, unidentified
MRLYAGSDLHSSNSFFGIEEANGKRIFQKKLSNDPELIINTLKPFKKDIVGIVVESTYNWYWLVDLLMAEGYQVHLANPAAIQKYSGLKYADDRHDAFWLAEMLRLGILPEGYIYPKEERPVRDLLRKRGHLVKLRTSLIVSLQNILSRNNGFRLKVGDVKALTTDRVAPLLEGNDDLALSGKVSKDSIDFLTRQIKTVERAVVKKTELRGSYSKLLGLPGVGKILGLTIMLETGPISRFAHVGNYASYCRKVATKWISNDKKKGKGNKKSGNKYLAWAFSEAAVIARRTSAEARTYYQRKMQKTNAMVAHQALAHKLARAAYYIMRDGVDFMPEKLFT

SEQ ID NO: 117656 - protein, 320 aa, unidentified
MPQQARIVGIDVSKLKVEGCIRSLQQRLSEPSTPQGEAALIAWLRANAVTLAVMEASGGYERGWAEALRKAGIAVRVVDPRRVRYFARSAGRLAKNDPIDAEMIAWFGETFTTEAEPTHDPERAALDQLVTARRRLVGLATQIGQLAEHRQPRVVAQAQQAIGKIIKSQLAKLEIAIDAKIAANAAFRARAAIIRSVPGLGPHFTAGAIAWLPELGRISSKAAAALVGVAPYDDDSGEHQGERRINGGRREIRDLLYMATLAAASRHNPVVKAYYQRLRAKGKKAKVALVACMRKLIVILNTMLARGQNWNPPAAAGVLA

SEQ ID NO: 117657 - protein, 355 aa, unidentified
MMNHEAELVYAGVDTHADTHHVAVIGAHGRELDDTQVPATAAGYRQALAFLARWPDVVEVGVECTGSYGAALTRELRAAGHRVVEVNRPNRFDRRAHGKTDTFDAYSAAEAVMTGRAHSAPKGADGLVEALRALRTTRSSALRERTATINQIKAMLIAGPERLRSRYRGLSNIRLTAALAASRPSARPVSAEEATAYALRTLARRHQLLTEQITDLTGHLRRLLDDHAPQLMGVFGAGPDTVAQLLITAGDNPERLRSERHFAALAGVCPIPASSGKTTRNRLNRGGDRQANSALYHIVIVRMRYDEQTRSYVVRRTGEGMSKMEIIRCLKRYVARQIYPLIRDTLQSAGADLAA

SEQ ID NO: 117658 - protein, 426 aa, unidentified
MDVKYPICCGVDVHKSFLVAVIVKDAQPKPQYIKKRFSTFNNDLLEFKKWLIGNDCLFMCMESTGKYWVPVFNVLEDEINVTVANPKWVKAIKGEKDDNKDAKWIADLFRLGLVRGSYIPSKEIRVLREFTRYKYKLTCLRSGEMNRYHNCLTVGNLAVDHVFSDIFGKSSQAIIDYILNTDFADFNDDDCLSLLDKRGKRKSTNEEILNAVKNSSFTDAQKTRISIVKEHLDYITNSISRLESEIDSLVAPYEMYIDLLSTIPGMDRNSAIITLSEISCNMSHFDSSRRLCSWAGLVPANNQSAGKKKSVKISRAGVYLKPCLVQAAHAAVKDTTNPYYANKFNRISKRRGKKRAIIAIARMILTAIYHIIQTGEFWNPSDIENIDMPVEVKIKLAKSDLERSLKTLLSNGYTIEDITNGYLSIT

SEQ ID NO: 117659 - protein, 520 aa, unidentified
MAMRKRDEDEVFPNAAGIDVGGSSHWVAVPRQADDEPVREFGAMTDDLNAMADWLLSCGVDTVALESTGVYWIPVYEVLEQRGLVVWLVDARQMKYVPGRKSDVLDCQWLQKLMSLGLLRAAWRPGDEVCVVRAVVRQREVLLTEQASWVLRMQKALVQMNLQLAEVLTDVMGMTGQAIVRAIVAGERDPRVLARHRNGRVKASEADIERALTGNWREEHLFVLGQALAMVDSLAQRVLECDAKIEALLVPLGRHELELDGPGKRRGKNAPQFDARTALARWAGVDLTRINGLAVTTVMTILSEIGPDLSRFANVKHFCSWLGLCPGTKVSGGKVLSARTRRSTNRVRQALKLAAMSLSRNDSALGAFYRRLCSRMDKPRANTAVAHKLARMVYFMLTRGEAFVDQGQQHYEEQQRQRSIDAPQAPRDCARLPDHPSPANPLKHGVIPIVSQEAAAVPPANLTSASQALAYCPPAAFRAKPLQINQLVMRPRPARHTERSPGHPHRAEPRRRGKNFPSTP

SEQ ID NO: 117660 - protein, 359 aa, unidentified
MATNLKKNKINFKGKTVNIGIDMHKAFWHITALVETKVVMAFTLVNPKYSAFKNILSQFEGNYVRIAYEAGPGGFNLYDRLTSDGIECIVTPPSLIPTASGDKIKTDKRDSLKIARLLEGNMLKRVWVLTAEQRAHRQLVRTRRQIVAHRSDVMHQIKSLLLFHGIEIPFSSKQHWSRSFIIWLHGLDLGDKYLNLSLKALVELFDYLDAEKRKLTQEVVKLAKNEKYASRVKLLKSTPGIGALSAMEILVELQDIRRFQSPGELAAYLGLTPSQYSSGERIRMGHITHTGNARVRTTLIESSWILIRKDPQIRLKYENIKHRRGSKRAIVAIARDLSARIRTMLFNQLPYEIDFRKAA

SEQ ID NO: 117661 - protein, 428 aa, unidentified
MIPAVIERCAGIDVHKKFVMVCVLIGPADSNPTPQIRRFSTFNAELERLRKWLLELQCNRVAMESTGPYWKPVFNVLEEAGIEMVLANPQQVKNLRGHKTDPKDAHWLAHLFRHGMIRPSYIPPKPIRELRDLTRRRKQLVRNGAMERNRVQKLLEEDNVKLGSVLSDVFGASGQDMVEALMKGEATAEQIAQLAQRRARKKIPEIQKSIEGHRLNQTHRDLMQQCMTHLAFLEEQIEEIDQQIQNKIRSYGLSEAYQLLQTVPGMQAEAAATVLAEVGADVQAFPSAAKLSSWAGVCPGNNESAGKRKSSHTTKGNPYLREVLLECAWASSRKKNSQMQHRYRRLLGRRGKKRAAVAVAHALVQAVYYVLSTRKPFVDTAEPRRSPGQVRRLVRHHTRRLRKLDCWTRRTKSENKGNSMAQNQQTSG

SEQ ID NO: 117662 - protein, 327 aa, unidentified
MYLCILNQDGEVLLHRDMKAAPGPFLKAIAPYREDIVVCVEGLFTWYWLADLCAQEGIPFVLGHALSMKAIHGGKVKNDRIDAHKIAVLWRGGMLPQASVYPAEMRATRDLLRRRIHLMRKRAELLAHIQHTNSQYHRPEIGQKLAYKANRVGVAERFLDPAVHKSIEVDLALIGHDDRLLADLELSIVQTAKEPDAQTFYRLRSIPGVGKILALVLLYEIHDIHRFPRVQEFVSYCRLVKCAKESAGTRDGTSGKKIGNAYLKWAFSEAAVLFLRHNPTGQKYLARLVKKHGKGKALTVLAHKLARAVYYMCKRDTAFDLDKFLNE

SEQ ID NO: 117663 - protein, 406 aa, unidentified
MVLFVGDDWASDHHDVEIQDQTGRRLGKARLPEGVEGIARLHGLLARFLPEDADPSQVLIGIETDRGPWPVALVAAGYRVFAVNPRQSARARDRLGVSGAKSDAGDAHVLADLVRTDAHQLREIAGDSDLADGVQGLTRAHQALIWDKTRHVLRLQATLRDYFPAALEAFGDLTAPEALELLGKAPDPDHAARLSRKQISAALTRARRRDIEKRTSTIQAVLRAEHLGRGPILTAASAAITRSQIAVITTLTEQITQLEAEVKASFGRHPDAEIYESQPGLGQILGARVLAEFGDDPHRYTSAKARKNYAGTSPLTIASGRKTLVRARFVHNDRLLDALTRQAQSALRASPGARTYYDTLRTRGVGHQAALRQLANRLVGLLHGCLKTHTHYNETTAWAHHTTTAA

SEQ ID NO: 117664 - protein, 341 aa, unidentified
MDHYAGIDVSLEQSSVCVVDASGKIIREGKVASEPQPLIDWFGALGFDLVRIGLEAGPLSQWLYAGMKQAGLAVELLETRHVRDAFKAMPVKSDRNDARNIAQLMRLGWFRPVHCKSISAQEVRAMLTARKLAQSKLRDIEMSLRGTLRGFGLKVGNTTLTRFAARIRELVGENATLQVIAESLLAVHAVLLREFRGFEKRLRLMARCNVEAQLLMSAPGVGAIVSLTVASAIDDPARFKSSKQVGAHFGMTPKKYQSGETDITGRISKIGDKAVRTALYQAAHIVLTRPVKGSALKSWAMRLAKRVGMRKAKVALARKLAVILHRMLADRKPFAFAATAA

SEQ ID NO: 117665 - protein, 449 aa, unidentified
MSTTPTPTLPVLDLLATFVDVGSEEMYVSIAGGPPEVFGTFTADLQRLRDWLKDRGVKSVAMEATGVYWLPLYGVLEAAGFELVMVNGKYTRNLPGRKTDMKDCQWGATLHAHGLLRAGFVPAAAIRRLQDYLRLRADHVTSAAASVQHQQKALERMNVKLHDVISSLAGVSGQKVIAAILAGEREAARLLALCDVQIQKKKAERVKESLRGTWAEEHLFALRQGVENWQHFQRQIAACDRQIEAVLREISGPEEPPTGPAAKATGAKRAGVNAPEIEGLHGLLCRLCGGKDLTVLPAHTDYSLLQLIGEVGTDLTKWATEKHFTAWLGLAPGSHQSGKRKRSVGRKRNRAGRLFCVMGRSLARSKHIALGGFYRRMAARRGGLVANIALARKLAEWFWRVMVKGVSYVEQGLAQYEQQVLETKRRALQRLAKQLGQVVTPKPTTRQNA

SEQ ID NO: 117666 - protein, 371 aa, unidentified
MKKHVSLELRVSVDVGCRSHNVAIGLSSGEILDEFLIAHEPEGFRHFFSRIEKQERKFGCPVAVAMEGFNGYARPLDTLVRARDYRLFNINNLKLARFKEIFPGAAKTDEIDARKGLELFQLRDHLPVAKDVLQEVYKTPQENNILKRLSRRRRRLVDERVRVLNNLQSDLQAVCPGLLEITGEADNLWFLRFLTSTDDLRKLARMREATIRKIPGIGVKYASVILQWQKRAQFSHDVEWVGEMIHEDAVRVMELHDKIQSLEAKIEDVAQGSDMAQTLATIPGFGAVCTAELAGEMGTIERFSNEGSLALYLGMANLDNSSGKQKGSKPPRQVNTRAKAAMMIAVDRHRKKVLESQRYYEKKRAEGKKHN

SEQ ID NO: 117667 - protein, 388 aa, unidentified
MTAIGADRHVLYEQSVAHDGAAMQAFGDRLLTLGGAAERIAVALEVPHGALVDGLLARGFAVFAINPKQLDRFRDRYSAAGAKDDRRDALVLATALATDRPAFRRLRPEDPALIRLRELSRLEEELRDEAIRLANRLREQLQRFYVQLLAVCPAADEPWLWALLELAPTPAQAQRLTRPALSRLLREHRIRRLTAEALLTVLHVTPLPVAAGTVDAAAEHVALLLPRLRLVATQRADCARRIERVLESLEGQQEHRDVAILRSLPGVGRIVAATMLAEASRLLAARDYHALRVQTGVAPVTRQSGKRRVVGMRYSCNPRLRNAVHYWGQISVQRDPRSRAHYARLRAGGHSHARAIRGVIDRLLHVLVAMLVSQTCYDPVRRSVVEAA

SEQ ID NO: 117668 - protein, 442 aa, unidentified
MAMRKREDGPEVFPDAAGIDIGGSSHWVAVPRTADDQPVREFGTMTDDLNAMADWLLACGVDTVALESTGAYWIPVYEVLERRGLAVWLVDARQMKYVPGRKSDVLDCQWLQKLMSLGLLRAAWRPGDKVCVVRAVARQREVLLTEQGSWVQRMQKTLVQMNIQLTEVLSDIMGTTGQAIIRAIVAGERDPKVLARYRHGRIRRSADDIARALTGNWREEHLFVLKQALSMYDDIARHLGECDARLQTLVDESGHHHVDMGTGPRAGTRLRGNFDQRQRLANWAGVDLTRINGLGVSTVLTLLSEIGPDLSRFASVKHFCSWLGLTPGTKISGGKVLSSATKRSANRARQALKMAAMTLSHSDSALGAFYRRLCARMDKPRANTAVAHKLARMVYFMLTRGEAFVDQGQQRYEEQQRQRSIAALKRRAARLGFRIESVPATP

SEQ ID NO: 117669 - protein, 413 aa, unidentified
MDLLHDRCAGLDVSKKDVKACVRSPGARANQRHSEVRTFATTTNALLQLRDWLIEQRVTLIAIEATGDYWRPPFYLLEDDLNIILVNPAHAKGLPGRKSDVTDSMWLAQLAECGLLKASFVPPTPIRQLRDLTRYRTTLSREHTREAARLEKELEDAGIKISSVATDILGVSGRAMLEALIAGERDPQVLAQMARGRMRTKISPLTQALVGRFGQHHAFLCRMHLDRLDALEADIAKLSTRIEAALEPFRDTLARLDTIPGVGRDVAEVIIAETGADMSRFPTPGHLASWAGVAPGLNQSGERNKPAHTRHGDHWLTGALGVAAMAANRTKDTTFLGARYRRLARRIGKLKALVAIEHSILTAVWHVLSENTDYHDLGGDYHAKRDPQRALRRITRDANRLGYTVRFDPIQAA

SEQ ID NO: 117670 - protein, 319 aa, unidentified
MKDNITKIFVGVDVAKDFLDIHFHPLKKSMRIANSIDGLTKLLRMLAQYEVSQIVCEASGGYESLMLGILKKEQYKVWRVQPYRIRAFITSEGIKAKTDRIDARMIALFASQKDRGYQTVECSQDEECMRALTQLRTDCVKAITRENNKVQHPQQHIVCKKIIEKNISFFQKQLREIEKQIENIMRTNNDMATKASIIQSIPGVGKVTAHTLMTEVTELGKIDNKKIAALVGVAPFVRQSGKGKGSALISGGRKNVRSVLYMAALVASRCNPILRSFYQRLKEAGKPAKLALVAVMRKLIVIINTIVKKGELWSPKLNY

SEQ ID NO: 117671 - protein, 342 aa, unidentified
MAIAIVGLDLAKHVFQVHAVDETGRAVLRRQLRRAGVEAFFKTLPPCVVGMEACASAHYWARRIAALGHEVRLIAPAKVKPYVQHGRKNDANDAAAIVEALMRPHMVFVPIKNEEQQAVLMLHRTRDLLVRQRTMLVNAIRAHLAEFGIVAAQGRRKVKDLITGLDNTEIPELARLALWQIADQIDECDNHIDTLERRILAWHKSDEASCNLATIPGIGPITASAIAATVPNPSAFRNGRQLAAWLGLVPRQNSSGGKDRLSGITKAGNPYIRRLLVIGATSVIRYARSKAPGTAEWLKKLLDRKSARLASVALANKMARIAWSVLTRGEVYRNTYPIPKPT

SEQ ID NO: 117672 - protein, 431 aa, unidentified
MAVVMIGVDPHKASHTAVAINAAEEPLGQVRVRASAVQAERLLGWAQAWPDRSWAVEGAGGVGHLLAQQLLSAGERVLDVPPKLAARVRLLATGDINKNDPNDARSVAVAALRSAGVREARRDDHAAVLKVWSKRYGDLGRVRTQVACRLHQVLCELTPGGVRGEITAGQAARILASITPAGAVEAARCQLAADLVEDLRGVDARIRETRKKAGAAVRASGTSLTGLFGVGPVVAAAVIGDVCHVSRFPSRDHFASYNGTAPIEVSSGGRKVYRLSRRGNRRLNHAIHMAAVTQIRYQHSPGRAYYDKKLADGKTRKEALRCLKRQISDAIFACLQADARRTAACAKSPGGQPGNHSSSRAAGSHPDHRRFGQATPGPATHPTTPAGADTAAPFPALLPSRASRRTGQGPGAARPRSGARRASSTRPPASR

SEQ ID NO: 117673 - protein, 439 aa, unidentified
MSNEKVQPARPFAAFVCLDWADEKHAWALCQPDAEGIEQGELENTPEAIQRWAAGLAQRFPGQAVAVAVESNRKVLFGLLKYGHLVLFPIHPATLAWYRAAWCPSGAKDDPSDTLLGLELLRHHRDRLQVWQRDTVETRTLQFLVEDRRGLVDDTTKYSNRLTDRLKLYFPQILEWFDDVTTPMVGDLLRRWPTLEQLQKASPRTLRQFFHQHHSRSNQLIEKRLQQIRRAVPATSDPAVLATSVTYVRSLLEIIATIRNAIAEIERHIAQAFDQHPDAPLFRSLPGAGPALEPRLLVALGSQRERFASAHQLHCYSGIAPVLQRSGKSQLVRFRRGCNSFLRQTFHEWAACTIRCSPWARGYYQHLRAKGKGHQAAVRALAYKWIRILFRCWKDRTPYEEARYLQSLRRRQAPKPDLRAFRWDQTAGLHRFAGLGVSS

SEQ ID NO: 117674 - protein, 284 aa, unidentified
MPMLEGKIDHVIGVDTHRDSHAAAILDPNGGLVAELTVTSNQAGSEALLGVVAQRAPGRRCWALEGTGSYGAGLASFLADQGEWVTEIDRPKRPRGRNGAKSDPLDAIRAGREALGRDHLASPRQRGHREALRVLQLTRSGAVKVAADSRRQLKALLVTAPEPLRAALCGGTWLAQARACAVLTAEASDPVEYRATVRALRLTAERALAAHAEAKQLAEELQMLVAVMAPALLAQPGVGPITGAQVLISWSHPGRLRSEAAFAMLAGVAPIPASSGRVVRHRLM

SEQ ID NO: 117675 - protein, 350 aa, unidentified
MLIIGCDYHPGFQQIAFVDTETGELQERRLQHREEAEKFYRDLATREVNVRMGMEASGQARWFERLLAELQFELWIGDAAEIRAKRVRKQKTDRQDAQHILRLLLEDRFPRIWVPSWDNRDLRQLLWHRHRMVQMRTRIMNQLQAVALNEGLRCKKRLWREAGRKQLETFRLAPWASRRRRDLLELLDRLNPTIAELTQAIDQEAEKYPAAQRLMTHPGVGALTAVAFVLIIGNAERFQCGKQIASYLGLVPAEESSGERRRLGHISKQGNSLLRFLLAEAAQVTVRSDPQWRSKFFHLAMRRGRKIAKVAMARRLAVRLYWMWHQKWDYQQLKKFGPHAGQPGTGVGVR

SEQ ID NO: 117676 - protein, 376 aa, unidentified
MENDSTLYVGLDVHKDSITVAYAIGMGDVELLGKTGTTQIEVDRLCKRLQAKSMRIHVVYEAGPCGYGLYRRLVEKGFDCMVCAPSLIPRKPGERVKTDRRDAIKLVRSLRAGDLSAVHVPTVEDEAFRDLARAWSSAREDLKQARCRLKSFLLSHGVHYLGRPDWGPTHRRWLSTFSFDSGWQQLAFNEHRRTIEDRLAQCERLEMALREAVVSWRFYPAVLALQAMRGIQFTSAVGLTSELGDLTRFEHPRQLMAWLGVTPSEHSSGGKRRQGSITKTGNSYARKLLVESAWSYRHPARVSVDIQRRHEGIPKPIIDRAWDAQLRLCRRYRKLVARGKSAHVAIIAVARELAAFVWDIGRMGMASAQSYSGQPI

SEQ ID NO: 117677 - protein, 344 aa, unidentified
MPIITVGIDLAKAVFAVHGIDEAGKATLVKPKVARDQLVPLIAQLPPCLIGMEACSGAHHWARVFAEHGHTVKLMAPKLVSPYRMSGKRGKNDAADAAAICEAVTRPSMRFVPVKDEHQQATLCLHRTRQGFIEERTSTYNRLRGLLSEFGVVLPQSPERLRKEIGPCLDTLPGWARRCMSELLEHTSHIEDRLVELDRAINQIAREDDRSRRLLQLRGVGSTTASALVASIGDGHDFRNGRQVAAWLGLTPGQYSSGGKQRLGSITKAGDAYLRSLLVLGARSVMANLGDKQDPLSRWIRNLIERRGYWRAAVAIAAKNARMAWAVLHYGDTFKPEQAEPTGA

SEQ ID NO: 117678 - protein, 408 aa, unidentified
MEVVYRCCCGIDVHKKIIVACLNQGGEQSLREFGTTTSEIKSLATWLTESGCEIIAMESTGVFWKPLYNLFELMDLDAIVVNAAHMKALPGRKTDVKDAEWIADLLRHGLLKASYIPSREQRELREITRYRKSLTEERCRETNRLQKILEGANIKLDSVVKDINGKSARKLLEKIIEDDVPTSEEEISKMIHGRMRSKLGQLVTAIEGITTPLQRKLLAQVIDHIDDLNRRIADLDKLVQDYMDEYEAAITALCDIPGIARRSAEVILAEIGLDMSRFPSAAHLCSWAGVCPGNCQSAGRRKHGKTTKGNKPLKTILTQCAKSARSVKGSYFSAQYQRIAARRGKNRATLAVAHSMLIAIYNMLRNNVPFRDLGSDYYDSFNRDRKIHGYLKRLKALGWEPDALPGSA

SEQ ID NO: 117679 - protein, 336 aa, unidentified
MGLDLHRRRTVMVRMTEAGERLEAVRFVSDPAVLAEQIAKAGPAPRVVVEATYAWYWVADVLDAAGAQLHLAHPLGVKGFAYRRVKNDFRDAADLADLLRMGRLPEAWIAPPPVRAQRELVRHRHKLRQLCSGIKAGAHAVLAKNALFIPRSDMFGLDGRRRLSALNLPEVFRLRLDSQLRLIDTIEQEIDELDKRIRVMFADDLGYRALLRLPGVGPVFAAILRAEIGEITRFPSPGQLSSWAGLTPRHRESDTTIHRGRITKQGSRLVRWACVEAVQRARPGTPMRNRYDQIVARRGGNAKHLAKVAAARELCECVFYALRDGHVRRLGEHGAA

SEQ ID NO: 117680 - protein, 342 aa, unidentified
MERVATVGLDIAKSVFQVHGIDATGTVVVRRKLSRGRVLRFFEALPRCLVGMEACNTSHYWARELIALGHDVRLMPAQYVKPYVKRGKNDAADAEAICEAVTRPTMRFVPVKTPDQQSVMMLHRVRLMLNRQRTQLSNAMRAHMAEFGVVAPVGRMGLERLLAIVDDHEDQRIPADARVCLAMLAAQLAVVKTQVLENDRRIRESARETEVGRRLMAIPGVGPLLASAFVASVADPTVFKTGRDLAAWIGLVPKQNSSGGKERLGGISRAGNRYLRQMLVVGAMAVIRHAQRHGTKRAWLLELLARRATKVAAVALANKTARMVWALMTSGERYREPVVTLA

SEQ ID NO: 117681 - protein, 385 aa, unidentified
MKEQTFVPQDYDVFAGLDVDKRSMSVTFTSHQGFIRSLCMPYSVEHLVNHVRKHFPDQKVAFAYEAGPTGYGLYDGIVAQAYRCVIASPSMIPKAPGQRVKTNRLDSQGLSENLRGGQLKPIHVPSSLYRELRHLTQLRDTLVSEMVGMKQRIKSLLLFEGIEFPPAPAGSQWSFVVKGKLRKLPCSSTVRFKLDQLLDSLEFDEKQIVKTTQQIRRFCHDDAELAKGIGYVMSVSGIGWIVASQLLARIGDWRQIKNVRQLPAFLGLVPTERSTGDTIKRGSITHSGDPRLRSKLIQAAWSAIRQDGELREFFRRVCRAHPRHLASRVAIVAVAHKLSVRVSVVLMKQRPYEVREKVQSTPLTQEETVPQGTPRRLAEPGEKNS

SEQ ID NO: 117682 - protein, 351 aa, unidentified
MPHKLNSAIAVIGIDIGKNSFHVVGHDKRGAIMLRQKWSRGQVEARLANLPPCLIGMEACVGAHHLSRKLQMLGHDARLMPAKYVRPYSKGQKNDFRDAEAITEAVQRPTMKFVATKTAEQLDLQALHRVRERLVSQRTGIINQIRAFLLERGVAVRQGLRFLRNELPHILAAPCDALSPCMLRVIEDLAGDWRRLDERIEFLSSEIEALARQDKGCERLMTVPGIGPIISSAMVAAIGTGDAFSKGRDFGAWLGLVPKQISTGDRTILGSISKRGNRYLRALFVQAAWVVLVKVGPKHWARYGLKSWIEAAKKRLHHNVLAIALANKLARIAWSVLAHGRTFEASKIQAA

SEQ ID NO: 117683 - protein, 355 aa, unidentified
MTGTKYIGMDVHKESISIAVRNSAGKVVMECVIETKASMILQFIDGLRGDLHVTFEEGTSAAWLYDLLKPHVTKLVVCDPRKNKSMREGNQNDQIDARRLADLLRLDHLTPVYHGEHGLRTLKELVRSYLTVTKDLARVMTRVKAIYRSWAIPCTGKQVYARCHRAEWLGKINEPGVRRRAEFYYLQLDALRVLRQGVRRDLLVESKKHKAWKRLCQIPAIGPIRAAVLLGILQTPHRFRTKRPLWKYGGLAIETHSSADHRSVNGQLQRAKRQVSVRGLNRDCNHDLKNLFKGAAVIASSKPGPFQEFYAALLAKGMRPEMARLTLARKIATIVLIVWKKGVCFDAQHLKPQTA

SEQ ID NO: 117684 - protein, 356 aa, unidentified
MNEITTVGVDLAKEVIVVCAGDAQGRAVYFRQLSFVGFAEWAVNLPPCRFGMEACSSAHHWARFLSEHGHAPRLMAAEFVAPFRMSRGAKNDRNDAQAILTAVLQPEMRFVTVKSADQQAMLAWHRTRSGYSEERKALLNRTRGLLAEFGVWLGRSSAVLIRRLPLLTQEEALPARFRPILAHTLEHLRRIEQCIGECDAQIHTHARNSEAAQRIQALAGIGPLAASALIATVSNPRDFKNGRQMAAWTGLVPRQNSSGGKQRLGVITKRGDSYLRGLLTQGARSTLQVALKREPLKRSRLEHWIVALHARVGYHKTLVAIANKHVRIIWAILAHGETYDPNAWRRHTLQPHLVAA

SEQ ID NO: 117685 - protein, 270 aa, unidentified
MDHFAGMDVSVKETCVCIVDDTGRIVREVKVASEPEALLAVLANPAYHFKRIGLEAGPLSQWLFSALAEAELPVVCVETRHMRAVLKAQINKTDRNDARGIAQMMRVGLYRPVHVKTLRSQKLRMLLTHRKLLQSKAIAIENDLRGTLRNFGLKVGMIGKVQFETRIKELVENLPDLAVLVEPLLIVRRVLREQLGILQRRLLAIVRDDEVCRRLMTVPGVGPVVALTYRATVDVPARFRKSKAVGAVFGLTCSKYQSGEIDRSGRISPD

SEQ ID NO: 117686 - protein, 346 aa, unidentified
MAYYVGLDVSVKETSICIMDDKGVVAARTDISTDPDLIADFIFRHAPKVERVVHESGILAIWLTRELEKRGVPIICIDARLAHKALSGRINKSDQGDAEGLAQLARTGWFTQVHIRSEASERVRVLIGTRERLIRMRKDLEGHVRGVLKVFGICMKSVGTGKLRRDFRDQLAAAADADPAIEMMSETFIPLHKTLCIARDALDDEVRMMARESDLARRLMTVPGVGPIVALAYIATLDDEKRFRKSVDVGAFLGLTPKRHQSGEVDWSGKISKCGDCDMRRLLYSAASTLISCTRKPSRLKDWATKLAERKGHKKAAVAASRKIAVILHCLWRNETVFEPGMEGAS

SEQ ID NO: 117687 - protein, 341 aa, unidentified
MEHIGIDLGSQESQICVRAATGDLVIERRWRTERLGLFLKRRPKARVILETCTEAFRVAAVAVAAGHEVRVVPATLVRSLGVGQRGLKTDVRDARVLSEASCRMDLPSVHIPSAIAQEVKAICVSREALIKARTQLIGRVRSYVRGRLGRVLRATPESLPKRVRAALLEDAAGLPLHVERTLIVLEAISTQIAEADDELRVLVEADARMARLMTVPGVGPVTAARFVAAVDDVQRFPTAASLASYLGLVPGENSTGCRTRRTRLTRAGSPQVRWALGQAAWSIYVRRKQDPIAAWAKQVAARRGPQVAIMALARKLAHVLYAMWKHETSYEPARAALPVTA

SEQ ID NO: 117688 - protein, 344 aa, unidentified
MKITTIGLDVAKNVFQVHGVDAAGEVLVRRALRRGQMLVFFGKLEPCLVGMEACGTSHYWARELGQLGHEVKLMPPAYVKPYVKRGKTDAGDAEAICEAVTRPTMRFVAVKSADQQSVVMLHRTRELLVRQRTQLVNMMRGQLAEFGIVLAKGIQHAQKFVRELIDGEAPNIPELAVKIVTILAEQLRQLQIRIGELEKHLKRWFRTNQVAQGLATIPGIGVITASALASSVTDPHQFTSGRQFAAWLGLTPRANSSGGKQRQGRISKMGDQHIRRLLVSGMTSQLRWARRHPDAHPWVASLLARKPAKLVAVAMANKAARIAWVVMTRGELYYTQPPSTQAAA

SEQ ID NO: 117689 - protein, 455 aa, unidentified
MSKSNRTDTPLRAARAQISNPEITVHAMYRSAIGIDVHLNLLVCCHQKQVAGHREQSESRDFNTDRASIDAFAAWCRECNPDIILMESTGSLWQSPYEALERAGFTSEQLALINARDAKAAAGRKTDRKDASRLASLARTGNFKKSFVPEKAFRLQRVISRDLQKNRNDISRTSNRFGKSLNLTGCRPTTVFSDIRGGKAASLILMAKLRDDPHLFDVIKQNSRRLRASPEQIMQALNFEIEPMMKEQILALRKKIDQLEEYDRSTFERLRQLQAPYEKDIQLLITITGIQERSARMIYAELCADLKDHFPTSEQFTSWLGICPGDNTSAGKQKSGKCPKGNKHLRRTLIEAARGLVVGGTAALKEKFQVLKMRRGYRRAMVAFAHLLARIIYSVLTHQKGFEPYLSTAFRDALIERAKNGVKQLLKLKGTKYVIADGLVVETKTGAILGAVVSS

SEQ ID NO: 117690 - protein, 337 aa, unidentified
MMYSGIDLHSNNSVVVVIDDADRVVAQKRLPNDVTKIVGFLARWKDELAGVVVESTYNWYWLVDGLQDAGLHVHLANTAAIKQYDGLKHSGDETDAQHLAHLLRLGILPTGTILPREHRAVRDLARKRMQLVHSRTTHVLAVENIMARQLGGRMTSNQIKRLTAAAIDKLPLAADVGLAIKTNVAVIATLQAQIEVVEKRLQERVKPRPQYGFLTSVPGIGQTLATVILLETGPIDRFAEVGNFASYARCVDSLHTSNRKKKGEGNVKNGNKYLAWAFVEAANFAVRFCPEAKRFHERKKATTNNIVATKALAHKLARACYHILKEGKPFDVTRCFA

SEQ ID NO: 117691 - protein, 405 aa, unidentified
MISVGIDVSKGKSTICILKPYGEILMSPHDYNHTQSDMKMLVDKLNKYDDEIHIIMEATGIYHLPIAQYLKSSEYAVYIINPLEMKRYRCQGIRNPKTDRIDAAIIAQYGIDYWYRPCRNAAVEAIRDELKLLGTQYRSFMKARQSRCLALCTILDRTNPGIYDLIDDYNSKTGKDKLCDFTHDFYHRDCITKYSKNKFIERYQSWAKKKGYKFNDTEAGQLYQIAKESIPTLESTESTKIVVQQTTNTLKEVNTSLFDILTRMNELAKQMPEYDTVMSMKGVGASIGPRLIAEIGDPRRFHSAKALIAYAGIDAPPYQSGKFTGTERHMSKRGSKIMRKLGFEVMDSINKHQASYVGDPVCEYFLKKRAEGKHYGTAMFAAYNKFLRIYHSRVSSVLNEAESTM

SEQ ID NO: 117692 - protein, 338 aa, unidentified
MKFKRIAIDTSKHVFTVHGVDEDERVVLRRDLRRQQVEGFFATLPPTEVVLEACGGSHHWGRRLSVLGHRVKLIAPQYVKPFVKRGKNDRIDAEAISEAAARPTMRFVPVKSAQRQAQASVLSARELLVKQRTQLINALRGQAAEFGIIAAKGAGNAAALAARIASNGELPIVVKAVLALLGREIARLNETIAALDKKLAALHQASPMSRLLCEIPGFGRITALTALLRIEPGQFKSGRHLAAWIGLTPKERSTGGKRRLGAISKQGNERLRQLLVLGAMAVIKVAKPGHRSATPWLLRLLERRPRRVAAVALANKMARILWAMMTSGEAYRHAPVAA

SEQ ID NO: 117693 - protein, 460 aa, unidentified
MNDYFLGVDASKGYSDFVMLDGKKQIVIENFQLDDTFEGHSQLYELLHRFNQDYPQATIYAAVESTGGYENNWFQSLLNFQGSLPIKTAHLNPLGVSHNSKADLKRNVTDKISAQNVAEYMIAHPEKVSYQHQDSLASLRKQWGFITMLTKQCTQLLNQLESLVYNANPEILAYCKDRTPQWVLKLLTRYPTARRLSRAKVNSLARIPYVSTERAKELIATAKKSVGSANDKVTEQLIVSTVKQILHLKKLIDTQTEILANQCQIPEVELLKTFTGIGDYSAIGLMLQIQTVERFLTSKKLSSFFGIHPEYKKSGDGTYKYRMSKKGRKEGRRILFTVAMTAIQSNPLICEIYQQAVDRGMEKMAAMGLCMHKILRIIYGMLKHNKPFDPQIDLKNRQKKPPRQKKAGPDQNRRYQDFDSKAPVSRRQKMKRKERKQSQNAVDVKHGISEAPVPTDQLAN

SEQ ID NO: 117694 - protein, 363 aa, unidentified
MEYIAFDAHKHYTLASVVRPNGDLVREERIEHDRGSLREFLERCERGSPVAVETIGNWYWIVDEIEAAGCVPKLVHARKAKLMMGEINKTDRLDARGLNRLQRNGTLPTVWIPPGELRDQRDLPRTRMVLVRQRTQLKNRIHATLAKYALHDLEVSDFFGVRGRALLRQRFDLLPPHTAYASQQLLEQVEELDRRVREFEQRIQAVFKPTPAIQLLLTLPGVGLTLAAVIALEVGDVARFASAEKLAAYAGATPRVHASGGKTRFGPSRPDVNRYLKWAFVEAANAICIGRGRAPHCHVSRLYERIARRKGHAKAIGAVARHLAEATFWILRKHEPYREPKASAVSPTGDKRGWPLSSRKLDR

SEQ ID NO: 117695 - protein, 574 aa, unidentified
MLMQPRLLPKSQPLCLDSPIRVYHFVVALWRVNSAETYFFLWPTISPDMVRRSTRVRFFSIAAMSNALPRTGVLLAYVRGVEASVSLRSELRGRLWSNHFGWQSLFDVGHAPSWEHWTKSRPADQSLTGHPMSFDRLKRPRRRKRLPGHKLKPSWATLFVQNSKPHLSMKPTYFLGIDAAKHKMRVALSNRSEHVLFEQDLPAQATGLRQLLAAIKRQVNDPQQLLVLIEATGLLHLNWSAALTKAGYAVAVINPLIARRLYTLQNSIRDNKSDPIDARGLCTIGLLHGEKLLVHYRFSLRPEQFTLQRAQSVRKALRSALTNLKKTYQSLMDLSFPELGGLLQLDGVGIRQLLIQAPTPAAIAGKRLSTLEKNWMVRPKAAALKALAADSMADPDLAAASGPALVALLQSVAAMEARLHALDQQIAKLACTSVDPQTKALIETIPGFGPVNAAKTLAWLPTEILHSGSNRKVAARLQAFMGNDPRLRQSGQWKGHTKMSKRGVEMLRTAFFQSAFSAAHNDPELRAYYQCKRAQGKTHEVALSHLMRILTRRLVAVLRSGKPYQSHYNLKNAA

SEQ ID NO: 117696 - protein, 427 aa, unidentified
MKYNQNFRIMQVTESTLIVGVDIAKKKHYARAFDWRGIELDKTISFKSRYQGFQDFIGWVNEVSSKYCKDKIIVGLEPTGHYWYTFAQEILTQGHMIVQVNPYHVKKAKELDDNSPSKSDRKDPKTIAMLVKDGRYQIPYMPHGLFAELRKANNLREEWLVKSWSIKNKVHRWLDTYFPEFTDVFKSWEGKAALLTLKEIPLPDMIVKLSAEEIVSMWRTEVKRAVGLKRAQELKETAMYSVGVNEGTEMAFYEMQLLMKEYHEIRTILEDIEMRLEELVLTIPGAARLLEIKGIGIKTAAGFLAEIGDISRFNHPKQIIKLAGLNLRENSSGTHKGLTTITKRGRSRLRAILFRAMLPLVAKNAEFNALHKYYTSRKENPLKKKQSLIALCGRFIRIAYTLITRNAEYNPVKVLGGLAVVAAPIAA

SEQ ID NO: 117697 - protein, 368 aa, unidentified
MEKGTTFVALDDSKRKVVVAILRPGASEPEQRELAKEPQLIRRLFQRLAREGPVQGCYEAGVSGYDLHRQITACGVSCQVMAPALTPRRPGQRIKTDRRDAAKLVRLFRAGELTPIHVPNEAEEAVRDLLRCREDIRRDVLRWRHRVLKFLDRHGRLYVSGKNWSQRHWTWIRGQQFELPTLQRTFEATLFALEQALARLADLDKDITALADTEPYRPAVGWLRCFRGIDTLSAMILLAEIVDFQRFRHPRELMAYLGLVPSEYSSGEVQRRGAITKAGNTYARRVLVEAAWHYRHRPTVGDALRRRTTNQPLAIVGHAWRAQQRLHRRYRHLIGHGKRPPVAVVAVARELVGFLWAAMTQPAVAVAA

SEQ ID NO: 117698 - protein, 390 aa, unidentified
MLYVGIDAASEKHDAIIINSDGVLTTDPFTFKNDLEGYKKLRTEILSHTESINEVRIGIEYTGIYSMNITDYLCSYGFTIYALNPVQTHFFTRATSLRKTKTDKVDSTSICKYIMNFNSDLNPYTKSLYNTEELKSLSRLRFNKMSECSRCKTEFNRLVMLYFPELAQEFSIQSKWVYKLLSLSPTAEKVSRMHLSTLQKIIGVNGDRSKAAVKLQLIAKNSIGKKSAINEILIKNILDDITHITKQITIVDIEIKEIMKEYSYITSIPGIGNTNGAMIVGEIGDINRFASPAQVLAYAGLDPSIYQSGKFLGTKAHITKHGSRYLRTAVFTAARVACIGTGRENAFRTKYQKKRIEGKHHNSALCNISRNIINVIFALMHTKQNYNFSY

SEQ ID NO: 117699 - protein, 333 aa, unidentified
MNMHTQGGVASRDQRPNAGIDVSKQHLDACWGLQEQRLVNEATGWDGLIAELKQAEVDLVVIEATGGYERGLVCALQGAGIAVARVNPRQARDFAKSMGVLGKTDRVDARTLRDFADVLSRHKDRHKYITPIVDAERAELAALMTRRRQLVDMRVAETNRLEQAASARAVRSIKSLLRTLDKQIADIDRDADDFLNHHFNEQRRLLDSAKGVGPVTILTLTSALPELGQLRRRQISKLVGVAPLADDSGPRKGVRRIFGGRSEVRSVVYMATMSAINYNPVIKVFHSRLIAAGKPKKVAIVACMRKLLTILNAMLRDSAMWDAAKHVQAQKTA

SEQ ID NO: 117700 - protein, 350 aa, unidentified
MQQEERVEAMQIKILGIDLGKNLCSLAGLDGSGQVVVRRRVRRENLLKVVSHLRPSMVAMEACGGAHHLGRLLRDAGFEVRLMSPEYVRPYVKAQKNDDRDAEAIAEAATRPTMRFVELKSAEQLDMQVLHRARDRLVAERTALINQLRAVLMERGIVIPQGWRKLNRALAAILEGDEPALSRRVRMLINDMRSEWGELDRRIHAFDNEFAACVRADQGALQLTTIPGIGVLNATALVAAIGKGQSFARGRDLAAWLGLVPRQQTTGGKPRLKGITKRGNVYLRKLLIHGARAAMTSLSATNTALGKWLRGLRARAHVNIVVVALANKLARIVWAILRTGRGFEAKEATP

SEQ ID NO: 117701 - protein, 432 aa, unidentified
MERIRENAAGIDIGARKVFVSVEGKEVKCFFTFTEDFEKLRDYLLENAIETVAMEATGVYWNILYEILEEAGLDVWLVDGGQTKQVPGRKTDVKDCQWIQQLHSYGLLNRCFVADSDIKELRIYQRLREDHIRSASMHINHMQKALTEMNIRLTEVLNQIHGASGLAIIEAILKGERDKEKLLKLCHIKIIKNKKDEVLKSLNGRYTKSGLFALKQAFDSYYFYQNQIKQCDAMLEEVLKRISKGKPNQTISARRKPIRHNKPDIDNLGTVMLKIFDGKDATALSGITDYTWMQLLSETGTDLSRWESEKHYTSWLGLAPGQHTSGKMKKNKRKLGRPKAGQIFRQIAQSLLTSKHIALGAFGRRLSSRKGSPLAIKAVARKLATLYWRIMVKGMDFVEKGIQQYEEQLKAQKQRSLIRLAKELNMQITNNG

SEQ ID NO: 117702 - protein, 445 aa, unidentified
MHYKRLLTWIDGSSSYLSVGLDVGADFTWMSIALPNGAFIGKPFKVVHSDPRSRDLAVTKIKEAQETYSLKSRCFLESTGIYHIPLLCFLRDKGFDCSVINPIITKNSTNINIRKLHNDKFDSKKAALVGLNVSLKTSIIPEDSIVDLRNLVRDYYYFKDLQSAVALKLTAELKMSFPAYAKVFSKVTTQSSLKLLSSYPLAGDMLEASKDDIVETIRSTARFGEAYALRKYDAVIAAAQDASVFGRALPSNAVRIRLYIDTYQEYQKHLDALLKALHETVERLQDTLIYDQICLLQSLRGIGFLSAVVLIAEMGDFKLFPSPKKLYAYFGLDPAVKQSGKLNGDKVHMSKRGSSLARRVLHMVALNNVKVDKGSGTPVNPVIYDYYTRKCSGKKKPVAMGAVMHKICNIIFAMLRDNKPFEIITPEEHCQRFAAEYPDKIRKAA

SEQ ID NO: 117703 - protein, 341 aa, unidentified
MQITTIGLDIAKNVFQIHGIDAAEKVIVRKQLRRGQVTAFFEALAPCLVGMEACATSHHWARELTKLGHEVRLMPAKDVKAYVKRNKNDAADAEAICEAVRRPTMRFVRIKSAEQQGQLMLHRARDLLMRQRTQVINALRAHSAEFGITAAQGREGIKELLAMVAHEEGSRLPSDAHASLTVLATQLQAVQTMIGSLEKRIVAQHRSNEASKRLETIPGIGVVGATTITAVVTDPKAFRSGRDFAAWIGIVPRQDSTGGKQKLGPISKQGDQYLRRILIVGAHAVLRRARQQPETYPWLTQLLARRPFKVVAVALANKMARIAWALLAKGGTYRAPQLVAA

SEQ ID NO: 117704 - protein, 312 aa, unidentified
MSTNEELYLGIDVSKDSICVCLYPQNEVLTVNNEPRDISKWIKTLPKGIELAVMEATGCWEETVAAQLHAAGIPVCIMNPHRIRSFAIGAGQLAKTDKIDAKIIAFFASVIKPTPQKLPDEQEAALKELVIRRIQIVDLIVIEKNHLLMAKNKIIKKDIEKNIKWLTKNLTEINLKIKTMVKNSPIWSEKEKILTSVKGVGPVTSSVLIATLPELGTITGKEISSLVGLAPITRQSGKWSGISFTLGGRKKTRDVLYMAALSAIRSNAVIKEFYQRLIANGKPFKIAITACMRKLLTILNALLRDNSLWRLA

SEQ ID NO: 117705 - protein, 349 aa, unidentified
MRTKPLPEAFAYGIDIGKKVFHVVAVNREGAVIQRAKFARETLHSFFDLAPKALIGMEACPGSQWLARKLIQMGHDARIIPARFVKPYVKSNKTDTVDAAAIAEAVTRPTMRFVEVRTPEQVDLQALHRIRDRLVGQRTGLMNQARAFCIEYGLAMRVGAGGFHTDIQRHLANLENDLTQNMRALLNDLLDDLAYIENRVKALSAKIEAIAKEDETISRLLTIPGIGALGATALVAAAGDGRQFRKARNMAAWLGLVPAEHSTGGKQTLLGISKRGNRYVRRLIIHGARSCFLHLNRESHALGRWLNALEARTHRNKAVVALANKLTRIVWAILTQPGTVYLRSKGAAA

SEQ ID NO: 117706 - protein, 333 aa, unidentified
MYYSGIDLHSDNCYITTIDDTGALVKQQRVENNDTLVLSYFHSLPGHHQAVVESTTGWYWLNDLLGDHGIDLVLAHAKYLKAISYAKVKTDKVDSQTLAILLRQGLIPRAHKISRELRGLRDTMRIRLRLVQQRSACLRRLKSIHTKFNGSVPDPYRFQTAVLEHTRDTFTAQILALEKSLHPVLIPNDDIQRLLNIPGIGKLTAFTVYLEIDGIERFDSDKHFVSYCRLVPAADNSNRSVHHRSSKDGNKYLKIAFSDAAVHAIQYYPEYQRLFQKRAKRSGEAVARTVVAKELARIVYYVLTNKTTYKGLKGQPISRQKSQQWPRLSSPLA

SEQ ID NO: 117707 - protein, 378 aa, unidentified
MHVVAAQSEAAIAIRTDLRAIFVSLELSRSTWLITSLSPGAGEKMSKHSVSAGDTAGLFSRFVELQQKAQTRTGRTFPIITIQEAGLDGFWIHRLLQGEGIESWVVDPASVLTSRRRRRAKTDKIDGETLVRTLLAYKRGEPRVCAMVKAPTPEEEDRRRICRERKTLTAERVRHVNRIKGLLFAQGVGDYEPLRRNRRGRLEELATGDGRPLPEHLKAQISRELDRLEVILAQLKAVGSERDAMLEPAKEGPPTPASLLVQLKGIGPEFAAVLWSEGLFRSFNNRRQVAAYAGLAPTPWQSGSVAHEQGVSKAGNPRLRTTMIQLAWLWLRHQPGSALSIWFRERASATAAVAKRQRSWQWPESCSSPCGSTRCTGS

SEQ ID NO: 117708 - protein, 337 aa, unidentified
MGLYCGIDLHSNNHVLTVIDEADRKVYERRLPNELAITKAALAPYRAELVAVAVESTFNWYWLVDGLMEAGYTVRLVNTAAVRQYEGLKHTDDEHDAFWLAHLMRLGILPTGYIYPKSERGLRDLARQRMRLVQHRSSLITSVQNQVWRSTAVRLRSDTIKGRGKQPWPEISDPDLASSIKAGREVIDTLTVQIERLEKLILKRVDPSPQFRMLKTVTGIGPILGMTIALEVGDIGRFAGVGEFASYCRCVDSQRLSNGKKKGEANRKCGNRYLAWAFMEAAHFAIRILPAAKRFYERKRRQRHALLAVKALAHKLARACFYVLRDQVPFAPERLFV

SEQ ID NO: 117709 - protein, 340 aa, unidentified
MEKRYIGIDLHRNRFTCCIRLVNERTYVTEWEIEDLGKFVKKLRPTDEVAVEITGNTRLFHDAVSGHVARVVVVNTSQFRVIRQSVKKTDPHDARTLALYLSKDMLPEVRMKDKERGQLASLTQTRDTLVKLRTALKNKINNILSARGLNLPKEALSSEKKLAEVLALPFDEIVQIELRVIVGQIRSLNQSIAELEKTIGEEGSKLEGHKGLSSIKGIGKVTGAILLSVIGDVKDFADEGHLASYFGIVPRVSNSNETEHSGRIHKRGTKLGRTALVQSALIAARYSPYLKRFYEQVKSRRGAGKAIIALARKFVGVIYRTLKNKWVFEDFPNFVLAAAS

SEQ ID NO: 117710 - protein, 343 aa, unidentified
MQTITTIGLDIAKSVFQVHGVDAAGQVVVRRQLKRRYILTFFQKLPSCLVGIEACASSHYWSRELQALGHTVRLMPPAYVKPYIKRQKNDAADAEAICEAVTRASMRFVETKTPEQQSCLMLHRTRHLFIRQQTAVINAIRAHLAEFGIVAPVGRNGVEELLGVVADPSDKRVPEIARTCLAALGAQLRMLKAQILEFDRMINAWHRSNETSKRLDAIPGVGPALATALVASITNAKAFRSGRDFSAWIGLVPKQHSSGGKEKLGSISKRGDRYLRSLFTAGALAVIRYAKIHGTKHRPWLTALLARRPTKVAAIALANKIARMAWAMMAKGERYKEPVALAA

SEQ ID NO: 117711 - protein, 540 aa, unidentified
MEVNVKRCCGLDVHQASVVGCLLVEETGGLRSEVRSFGTTTKELKKLASWLREEGCTHVAMESTGVYWMPVYGVLEGDFELVVGNAQHIKQVPGRKTDVSDSQWLAQLLRFGLIRASFVPPKPLRELRDLLRYRRKLVRSRSAERNRLQKLLETGNIKLASVMSDVFGVSGKAMLQAILEGTRSNEEIVELARGSLRRKRLALLDALEGQFEGHHRFVLQTQLERLDELERHIATLEQRIDDKLTPYRAEHTRLTQIPGVSWVVAATIIAEIGVDMSAFKSAEACAAWVGVCPGNHESAGKRKRVGTRQGNEHLKSTLVEAAQAAARTKRTYLRDKFHRLRARIGHGKAVVAIAHKILRSAYHMLRTGSDYRELGESYLDQRDHKRLTQRLVRRLEAVGFHVTLTACEPPVPADATSEPPDPPSPAPPAPTSSAPAPTPSAPPASSAPSAPSAPSPRPGSQTAANAARRRRARDPRLPPVGHTLRRTYRGVEHHVLLLPHGFEYGGTLYSSLSRVARAITGTAWNGFRFFRLGAKGATPV

SEQ ID NO: 117712 - protein, 385 aa, unidentified
MGKARLLEGIAGIARLHAMIGQHIGEEEDELVQVVVGIETERGPWVRALLAAGYQVYAINPLQVARYRERHGVSGAKSDAGDAHTLADMVRTDRHQLRPIAGDSALAEAVKVLTRAHKTLIWERTRHTLRLRRALLDFFPAAVDAFDDLTAPDSLHLLGAAPDPVSAAGLDTAQIVEALRRARRRGVAAKAEKIQAALRAEHLRQPPVVAGAYAATVRAQVAILTVLNAEIVTMQGQVEAHFGQHPDAETYLSQPGLGVVLGARVLAEFGDDPARYADARARKNYAGTSPITRQSGKKKFVLARHVHNDRLLDALGMQAFAALGASPGARAYYDQLRARGAGHRAALRQLGNRLVGILHGCLKTGTPYDEHTAWAHHQQDLQTAA

SEQ ID NO: 117713 - protein, 349 aa, unidentified
MQRPRQGQVIIGVDTHKEIHVAAAVDWQGTLVGEECFPTTRQGYRLLESWARSLREVLRVGVECSGLYGSGLTRHLLKNGFAVLEVTFPDKTVRRKRGKDDFIDAEMAAEAAFTGARTVTPKSRDGMVEALRMLQKTRSTAVAARRVALQMIRADIISAPEELRGMTRMQLIRHLVATRPDSTDFRTPLGAAKIALKRLAKRYVDLDDEVSELDDMIDAILADAAPLLVQLKCVGAQSAAQLMVTVGDNPERLRSEASFAMLCGVAPVPVSSGMTYRHRLNRGGDRQANSAIHIIAIGRLRTDERTKEYVTKKMSEGHTEMEAIRCLKRYIAREVYYVIKRQSELANCS

SEQ ID NO: 117714 - protein, 366 aa, unidentified
MGLERTSVGLDVHARSVSAAAIDGVTGEVFRQRLVPREDVVIDWVRGLPGPVAATYEAGPTGFGLARAFSTAGIRCAVAAPSKITRPSGDRIKTDARDALLLARLLRLDEIVAVRVPTVAEEAARDLVRAREDARGDLMRLRHRVSKLLLRHGQVYYGGEAWTGKHEAWLHAIHFAGNERAGTAAAYEADLEALTLTLARRQRLDEQITAMAAGSEFTAVTRRLCCLRGISTLTGFALAVEIGDWSRFTGAGIGAYLGLVPGEHSTGGSRHQLPITKTGNSHVRRLLVEAAWHHKPGYRVGATMQARWDQAPAAARARGHAGNQRLHARWTSLTEHHKKHTVACVAIARELAGWCWSLATLPDTPT

SEQ ID NO: 117715 - protein, 370 aa, unidentified
MKPNFEPSKWFTQCVGIDIAKSTFTACLCMYEFDMGCSTVPVVFNNNKTGFNQFVKWSHKEALKGYPLRYLMEPTGVYYEALAYHLHKLGLNICVVLPNKARDFAKYEGILTKTDDMDAYTLGMMGCLDKRLKTWTPPSPIFKELRQMTRFVADINKVKTELNNHLESLAHSETVERSIVKHYNKLIDEIDKQLASNEKAIREKVKQEPGLAERIDRIVTIKGIGYMTVITILAETNGFALITNRKQLTRYAGLDVPAHQSGPVDPKRHISKQGNVHIRTALYFPAIVSTQYNAQMKDFYVRLCKKNPQSKMVGVTAIMRKLLLLIYSLWKSGEKYDPEREKPACSRKKKEAEPIEGQPHGIDVGTLAEE

SEQ ID NO: 117716 - protein, 339 aa, unidentified
MELYAGLDLHSRNTYIGIMDDAFNRVFKKRVANDLDQILHTLKPFKKRLKGFVVESTYNWYWLVDGLVDAGYGTAHLANPSAIKQYEGLKYSDDQHDAFFLAKLLILGILPEGYIYPKKDRGLRDLLRRRTMYVEQKTSHILSLQSMISRSLGIKMPSNEIKKLKPGDAHDLFDDDNLALMAKCNIETIAFLKTIIKQIEKVVKQKAKLRKEYEMLLTITGIGIILALTIMFEVGDIGRFKKVGNYSSYCRCVNSNRLSNGKKKGENNKKNGNRHLAWAYVEAANFAVRYNAKAKRFYQRKKAKRNGVVAVKALSNKIARASYFILRDQVPFDENRLFS

SEQ ID NO: 117717 - protein, 406 aa, unidentified
MNIHNLAHLQVAVDIGSHEHYVAIGLSEGGILDEFSITHTPAGFQYFFSRIKLQEHLYNRPVDVAMEGYNGWARPLDSQIQSHGYQLYNVNNLKLARFKEIFPAPAKSDLVDTHKMLELFQLQDHLPLAKGVLQAVLPVPDANRRLKRLTRRRRQLTNEKVALQNRIQPDLQATCPTLLEITGSIDNLWFLHFLTCRDDLTKLMRLQTKSLLAIQGVGRKYLNLILDWQKQAEFSNEIEEVGPMIQEDARRLLALMASIKTMDAKIDSQIQKSAYAQHIDSIPGFGLVCSAELAGEIGTLDRFPKQSSFSIYIGMAPLDNQSGGYQGTKSPKHVNTRARKAMMTAVCRHMAYVPESRAYYDKKRSEGKTHNNAVRALGRHISRVIWSMLRHDRDYIELASINEKTA

SEQ ID NO: 117718 - protein, 333 aa, unidentified
MQTPSPSNLLWIGVDVSKATFDAALWGHQDFQRMATAAFPRTEEGALAFRTWALAHGGPVVGVVMEATGCYSQELGRWLQRDMPGSRVAIVNPSLVKAFGRSLALRNKTDRLDACMLARYGQERTPEAWIPMTPERAELRDLIRTRTKLIRLQVTLRLRLEDALGRTGTPAGKAQQKVLKVLQGQVEALDKAIERQLRQVAELGHAVELLTTIPGVGKVTAATMLGEAGDLRAFRRGRQLTAFVGVSPRRYDSGSSVRGRTRMCRIGGVHARTVLYMAAVAASRTATPLGDFYRHLVEQGKPKKSALGALMRKLVLVMRAVLIRDKPYSPQPA

SEQ ID NO: 117719 - protein, 454 aa, unidentified
MIPASIERCAGIDVGKKWLSVTIMIGPLEGEPRVEQRRFGTIRSELIRLREWLQQEEITHVVMESTGSYWKPVFNELEGWVQVYLANPKEVKIRKGHKTDDKDGWWLAHLLRHAMIQPSFIPPRAIRELRDLTRYRKKLLGNGTAERNRVHKVLQDANVKLGITLSDLFGVSGQLMLNALLKGEEAPQQIAQHAQRQAKKKIPEIIASLEGHQMNDHHRRMIHYHLEHMRVLEEQIAKVDRDIEEQIQKAGLEKQWQLLQSVPGVQQISAATILAEVGPSVTPFPTQRDLSSWAGVCPGNNRSAGKNKGSKTTKGNKWLKSALTEISWGAANKKGCFLKDKFWKIKTKSKGKDGPALVAVAHTILILVFNVLSTGEPYRERGVPELDEKQKDRAIRHHIRRLGKLGIQAGPPRLATGVSGSTRPSRVVLREAKVKPRPEKGHRLVGGKPPSRKA

SEQ ID NO: 117720 - protein, 317 aa, unidentified
MLETNTNAAGIDTSKLKLDIAVHGRTGCWQVANALPGWRSLVVNLIKAGVVRVGIEATGGYERGVVEHLRAAGFVVLVLQPSQVKAYARMHLRRAKNDALDAALIAACAATIDAPRIAPDPRLVKLAQYLTFLEQTEEDIARFKTRLEHVSEPGLRRIVTNDIVRLKARRSAQIRLIERQLRAHPDLGRRLDLVLSVPGIGKRTALALIIRMPELGQVSREEAAALAGLAPFDDDSGKHKGQRHIAGGRARLRRSLYAAALPAAFRWNKALVQLYARLLARGKAHNAILIACARKLLVYANTVVQRGTPWIESAVRV

SEQ ID NO: 117721 - protein, 412 aa, unidentified
MQTMVERGCGLDVHQATVVACLLIVLQKGKVEKQIRTFGTTTRELLALRQWLRAEGCTHVAMESTGVYWKPVYAILEGALEIVVANAQHVKKVPGRKTDVKDAEWIAELLCHGLLRSSFVPPQPIRELRELTRYRRKLVESQSAERNRLQKLLETANIKLSSVASDVFGVSGLLMLKALAKGDATPQAMAALAKRKLRSKIPQLELALEGRMEEHHRFLLQMQLDRLEAVSHDLTVLEQRLQEKLKPYAVQLALLDEIPGVDWTLAAVIIAELDVDMSVFQNVSQLASWAGVCPGNNESAGKRKSSRIPNGNVYLKTALVEAANSAARTKGTYLRDKFYRLKARRGYKRAAVAIAHKILVATYHMLSRQVSYHELGDLYLDKLNKHHLTRNLVHRLERFGYTVTLTLEQKAA

SEQ ID NO: 117722 - protein, 328 aa, unidentified
MTLSVLGIDISKDTLDLCLMTAKGNHSAQFDNCAEGHRKLHKWLKKRFRSDRPHVCLEATGQYGDPIANYLYELHYPVSVINPSRIKSYARSLMRRNKTDKADAQVIADFCLKQNPELWSPPPQHMQDLKAMVRRLNSLKENRQQEKNRLQSGVSTPWVMTDLEEHIAFLEERIDTLSKAIQEHINQFPELKKQRDLLDSIPGIGKLTAATILAEIPNITEFDSARQVAAYAGLTPRNFLSGSSVHPKTRLSKTGNAHIRRALYMPAISATTWNPIIRVFYQKRLDNGLCKMAALAACMRKLLHIAFGILKHEQPFDPNYLNTQASLI

SEQ ID NO: 117723 - protein, 400 aa, unidentified
MRHIGLDVGRDFAHVAVVEEGGHARRLPRVAMGEEFRAFAATLGPQDVVALEASTNTWALADLLGRHAGQVVVSNPLRTRAIASAKRKTDDIDAATLAELLAADYLPPVWQPDEATRRLRRLTSHRAGLVRDRTAVRNRVVALLARRLVRPPVSDLFGVRGRAWLADLELPPEEGLALEAALCIDALLSEQIAAAEQAIAALVVDDQRVRRLLTIPGIGLVTAASIIAAVGDVSRFERPAKLVSYLGLDPRVRQSGDRPPLRGHISRAGQAHARGLLCEAAHAAVRSPGPLAGFHHRLRARRGAGVAIVATARKLAVLVWHLLTKDEDCRFAPPARTAFKQRYLDRLAGQEGTRPSQRGATGSSHDRGRARLRGGNDPHGPALRQAIDRVHADTTPPPGA

SEQ ID NO: 117724 - protein, 400 aa, unidentified
MRVIFGIDVSKVSSEVAILVNGEKVHNYTMSNDAIGFSRLLGDLKTVHKPEIIFEATGVYSRRLQTFLDDNGYAYTRLNPLEAKKQLDSLRVRKTDQIDAEKLAQSQFVLNRKTTYVQEEVYQNLRDLSRFYQNLTEDIVRAKNRLHKALQITFPELENILSTPTGEQYWNLVIAFPCKDFVLDLSKNELSKSIRQSTSKRISDKRVAYLAEKLTALANQSYCAVKKTSPILEEVHYYAKELLRLSEQRQAVLDQMVELAQPLPEYDILLSIPGIAETTATSIIGELGDIRRFQSANQINAFIGIDLRHYESGNFLAKEHITKRGNPYARKILFKCIHNIASASHTNPCHIADFYEKRKRQSQMTSTKSHTIASIHRLIRTMYYLIMHNKLYDYASTQNR

SEQ ID NO: 117725 - protein, 356 aa, unidentified
MINISKLDFSGQHLYVGMDVHKKSWSICILTKQFEHKTFTQPPDPSVLANYLYRNFPGAAYHAVYEAGYSGFWIHDQLREKGIECIVVNPADVPTKDKERAGKTNKVDCRKLARSHRNGELVGIYVPTRIKIEDRSLLRTRQSMVKKQTRCKNQIKSMLAFYGIHLPADIVYRNWASKFIKWLEAIRMEKASGNVSFMVHLHELHHIRGIIVELNRNIRSLSRTDEYRVNAQLLKKVSGISTLTAMTFLTELCNINRFGSLDKLASYVGLIPNTDSSGEKDTTTGITHRRNQLLRHLIIESAWIAVRKDPALLMAFERLCKNMPRTRAIVRIARKLLNRIRYVLKNQKEYVPAVIQ

SEQ ID NO: 117726 - protein, 409 aa, unidentified
MRFVGIDWAQEEHVVVVIDQAGVVLGRRSIQHRAADLAAMVAWLDEIAPMSQGRVVGMESGAGLICEYLLDRAEPVYVFNPKVVDRYRDRFSPAGSKDDHRDAEVIAGILRTDRNRFRPFEPDSELTTEMRLRVRGRLRLVERRVALMNELGDALRNYYPATVGLAAHGNDAWFLDFLRRFPDPQAGATAKPAVLARLLRQHGVRKWTTARLVEHLRREVMPVRDAIVRGQRANVLALVEQLQVLNAQIARADEDIAGLLKLHPDRDLILSLTGVRTTLAARMLAEIGDDRARLRDHSTLQVRAGTAPVTKQSGKGRVQVSMRRSCNRQLQDAFFQQARTSRARSSWAQAFYAQQRRAGRSHATATRNLSNKWAKIVATLLVRREKYDEPRHLRHLEENRVPWWTQRAA

SEQ ID NO: 117727 - protein, 352 aa, unidentified
MALPTLPHPQVLVTLGVDTHADSHVAAALDQAGRPLGTRTISTTPGGYAALLGWARRLGTVDRIGVEGTGSYGAGLARWLRAHGQLVIEVDRPDRAARRRQGKADDLDAHAAARAVQAGTATGQPKAGDGTVEMIRSLRLARRSAVKARTQAANQLKALLVTAPDVLWAQLRCLPPAELVTTAARLRAATTPATPTDAAKLALRSIARRWLLLTQEITALDTQLDRLVAMAAPALVAVKGVGTETAAVLLVAAGDNPERLRSEAAFAHLCGVAPIPASSGKTTRHRLNRGGNREANWALYLIAVGRMAWHAPTRAYVKRRTTQGKTTAEIIRCLKRYIARELYGILVSRPAA

SEQ ID NO: 117728 - protein, 345 aa, unidentified
MFLLGIDIAKLDHVASCIDSSSNEVIFSNFKFKNDFRGFSSLLDKIRTFDAENLIIGMESTSHYGENLISFLFKQHFKVALINPLQTSHLRKANIRDAKNDNLDSLNIAKALSFAKLNFISKKNIDCFSLKKLTRFRSNLIKQRSKTKIQLTSLLDLLFPELQYLFKSKIHSRAIYSLLKKYPSAEEIAALKDDEISNLLYASSKGHFKKAKSIELKSLAKTSVGIKDTSISLHVVQLIELIELYDKQIKDIVSKISDTVDKMDTKLLSVPGINIIACAIILGETNNFENFSSSKKLLAFAGLDPKIRQSGNFYASSCRMSKKGSPYLRRFSFYCMEHCQTLRKV

SEQ ID NO: 117729 - protein, 366 aa, unidentified
MLRKAGLSAEADPENYLGGSSETMYYIGLDVHKKTISYCVKDAAGCVYQEGKIGSTRRELDAWVRTLPQPRMIAMEATIFTGWIYDHLLPHAEKVKVAHPLMLRAIAAAKKKNDRIDAAKIADCLRCDFLPECHMASTAIRDRRRTLRYRNLLVKQKVQMMNRVSGLLMETGVSYNKRRLHKVGYFAKMMATNEEVSDCVRPLLRLSREHIDRAQRLDYALVSSLERDPLLAERLRRLRTVPGVGPITALTWALEIGDFTRFRSVKEAISYCGLCGDESSSADKVMRMPISKQRNKHIQRVLVEAAKLAPRESHELAVVRQRELERGNPNRATLAVARKMVCYLLAVERRKQDFVPAEKFKQVAAA

SEQ ID NO: 117730 - protein, 440 aa, unidentified
MAMRKREDQVFPNAAGVDVGASSHWVAVPPHSTDAPVCEFGAMTDDLNAMADWLLACGVDVVALESTGVYWIPVYEVLEQRGLKVWLVDARQVKYVPGRKSDVQDCQWLQKLMSYGLLRAAFRPAADVCVVRTVARSREVLLTEQASWVQRMQKALVQMNIQLTEVISDVMGQSGQAIIRDIVAGERDPKALAKHRHRRIKASEQEVIRALTGNWREEHLFVLKQALGMYDDIGAHLRECDAKLHALLEERSAASVEIGKTPRAASKARAAFDVRQQLANWAGADLTRINGLGLDSVMKILSEIGTDLSRFANVKHFCSWLGLCPATKISGGKVLSARTKRSANRVRQALKMAAMSLSHSNSALGAFYRRLCSRMDKPRANTATAHKLARMVYFMLSRGEAFVDQGQQRYEEQQRERSIASLKRRAASLGFQINPLPAAV

SEQ ID NO: 117731 - protein, 389 aa, unidentified
MLLDHPLLGPAAIRTQFGAIFVSLELSRSNWLITSLSPGKGEKMSKHDVQAGDVAALTKLFADLKRKAQARTGQDYGIITIQEAGLDGFWIHRVLQQEGVESHVVDPASIATPRRRRRAKTDRLDGETLLRALLAYKRGEPRVCAMVVAPSPEEEDRRRLCRERRTLIAERIVHGNRIRGLLFAQGISDYAPLRRDRRARLEAVRTGDGRPLPAHVKTQISRELDRLELLLEQIEAVEAEQDALLAEAAKDADENAAKHPVTMLLALKGMGANFAAVLWSEAFYRKFANRRQLAAYAGLAPTPWRSGGIAHEQGVSKAGNPRLRTTVIQLAWLWLRHQGDSALARWFMAHSQRSRKSAIVALARKLLVALWKYVTSGVVIEGAKMKSAA

SEQ ID NO: 117732 - protein, 378 aa, unidentified
MKRIIKIGMDVHTTNYTLCVFEPSFEHEGTVHYITQVKPEVKNIIDVIDKLKEKLKNDDLDITCGYEAGCLGYSLYHELKDKGVKCIILAPTTMKVEKGGKKIKNDYRDARQIAECLSYGGYSAVYVPTKLDNAVKEFIRMRDDLNQNLKSIKQQIIALLTRNGKHYGDGSYWTGKHIKWINSVHFEEKLLNETLAEYMIEYHHLLDRIVCLDARIEEISTKEIYVEKVNKLKCFIGIRAHTALSLIVETSDFSRFSKGNVYAAYLGLIPGDDSSGEDSNKLGITKAGNRHLRKLLIESAQCFARGQTGHISIKLKQRQALCSSDIVAYANKANERLRRRYYKMIGKGKKYNIVKTAIARELACFIWGMMTDNIQLSH

SEQ ID NO: 117733 - protein, 337 aa, unidentified
MKYKRVAVDTSKSVFTIHAVDDQDRAVLRRDLRRGPFIAFLAALEPTELVFEACGASHHWGREAMKHDHAVRLIPPQYVKPFRKRGKNDRADAAALNDAASRPDMASVPVKSEACQAEAMLLKVRALLIRQRTQLVNTIRGHAAEFGLVAAKGRGHLPDLLALAAGSAIPVAAKEALALLGAEVKRLDEQVSGIERRLGRMHRDNETSRRLAEQPGIGIQTALSLALTIDAACFASGRHFAAWLGLTPREHSTGGKPLLGKISKQGNEMLRALLVNGAMAVIRHAKPGSRCASPWLLRLLERKPRKVAAVALANKMARIAWAMMARGEPYRHLPVAA

SEQ ID NO: 117734 - protein, 408 aa, unidentified
MKDSGKRYIGLDVHKHYLIAIGVNDELNVVLPVRRVAFSYLETWMKKTLTKQDAVVLEMTTNTWQLYDELCEYAGSVLVVHPPHVALITRSQVMNDKIAASILARLLAKGLLVGIWVPPQEIRELRGLVAQRKKMTGLATQAKNRLHAVLQRHHLLPPEGNPFHASQQHWWLALPLGALEKVNVQSDLDTLHFAEAQRMHLTSMMEAIASQQEQVTRLLQVPGFGVVTAVTVWAAIGTIERFEDPQHLVGYAGLGTRVHDSGMSTHTGRITKAGRRDLRVVLIEAAQVAANSHPHWKAELARLQPRLGRNKAIVAVARKLLVAVWYILAQHKTDRFAQPEAIAQKFLKFAYQLGKANRPPRQSAAQFVRQHLDALQLGSELTSIAWGSKKPIPLPPSTKKVSDVPNTK

SEQ ID NO: 117735 - protein, 424 aa, unidentified
MAGPSTGLTCENGEVAGVTATSVVWVGIDAGKASHYAVAVDASGKKLWSVKVGNSQQPIEELLDRASTTAGGGEVRWAIDLVSPPAALLLAILLSSGQNVVYVPGRVVHGMAGVFRGEGKTDAKDARIIADTARMRSDLTELITSDELVVELTRLASYRADVMADWVRGINRLRALLTSIFPALEATFDYSTRSALILLTGYCTPAGIRGAGAEGLAAHLREHGAWARGVDKMAAQAVQAAEQQTVELPGEATTALLVKRLAKQLLDLDQEIKDTDKLLTSRFRDHPQAHIIESLPGMGPILGAQFLVATDGRPLDAFANSGRLASYAGLVPVPRDSGRVSGNYHRPKRYHRPLRQVFYMMALSSLKTEGPSRAFYQRKRDENKIHTQALLALARRMVDVLWALLRDNRTYNPIPPSQVNALAT

SEQ ID NO: 117736 - protein, 388 aa, unidentified
MNFEADKSEPLTAVHTDLGAIFVSLELSRSSWLITSLSPGGGEKMSKHSVPGGDFAGLMERFARLQEKARLRTGQSFRIIVVQEAGLDGFWIHRALQNEGIESHVVDAASIATSRRRRRAKTDKIDGETLVRALLAYKRGEPRVCAMIKVPTPGEEDRRHLCRERKALTAERVRHVNRIKGFLYSQGVSGYQPLRRDRRQRLEELQTGDGRAFPQHLKALINRELDRLELLLKQIKTVEDARDALLAAEQAAKLAPAGMLLNIRGIGPEFAAILWSEGLFRHFENRRQIAAYAGLAPTPWQSGAVDREQGVSKAGNPRLRTTLIQLAWLWLRNQPRSALSVWFHERVSRNGGRLRKTTIVALARKLLVALWKYVTAGVLIEGVTMKVA

SEQ ID NO: 117737 - protein, 319 aa, unidentified
MAQNGLVVAGIDIAKDKADVSVRALSQRQTFSSTAEGRRQLITWLRKHKVTKAVMEASGGYEREWAKALREKDIEVRVVDPKRVRHFAQSAGRLAKNDVIDADTIAWFAETFGETPSQAHDAARETLRQLVNARQGLLDIRTVLSNKGEHDVPEPVQKSHARLLKAIAVELAKLEAAIAAMIKATPHFAERAEIIESVPGIAGTTSAGLIAAMPELGQVSNEAISALLGVAPYDDDSGKRRGERQIKGGRRKVRNLFYMACLGAATRHNPVLKAFYRRLIAKGKKAKVALVACMRKLIVILNIMIARGEKWDANRYAVD

SEQ ID NO: 117738 - protein, 354 aa, unidentified
MQSQIIAIPKLFIGMDIHKKSWSVHLRTDLFDHKGFSMPPQPEKLSDYVASHFADHEVSLTYEAGCCGFSAARFFLNMGWTVKVVNPNDVPRSDKQLYQKTDKLDCRNLCKQLQQEQLHSIYIPTEPEEQLKSLLRQRNQVVKQLRKAKSHIKAMLLFHGIAIPDQFDNPNWSRNFLTWLNTIQWSHSTGTACMNSKLRILAMLKNEYLQTSNELRAYCRRHHKKDYYLLKSIPGIGGLLAAAILAELGDIRRFNNEREFRSCIGLVPGIHQSSETAIKMSLTPRCKALLRSYLIESSWVAIRTDPEIQAYYRKHAGKNSKNIIVKVAHKICCRILSVIKNETPYQINYKSTKK

SEQ ID NO: 117739 - protein, 412 aa, unidentified
MKDLLEISCGLDIHKEKIVACILTGPLGKPTHSEIREFTTLIPDMLALRDWIISENCHHVAMESTGIYWIPIYEILEDAFSGDITLLVVNARHMKNVPGKKTDMRDSEWISTLLRAGLLNASFIPEKRIREFRDLNRYRKSIIRDITSQKNRVEKFLQSSGFRLSSFISDIFGASGRNIILHLMEHGRIDKISLDSYLKTKTRKRIDEILMSVNGTLSEHQKSFLKILMCHYDSMKEHLIEIETHLQEDMLPFALQIEQLNTIYGISTTASCAIIAEIGTDMKPFKTAEHICSWAGLCPGNNESAGKRKSTSITKGNPYIKSMLCEIAWVIAGKRNTYLSAWYWRIKQKKGARKAIVALARKLLVIIYTMLKQGTNFDENCFEVRRKNCEQKQLSRYIRELEKHGYTVEAQV

SEQ ID NO: 117740 - protein, 412 aa, unidentified
MNSVYERCAGIDVHKRNVVVCAITPDQQGQRRKEQATFSTMMPDLLRMRQWFQRLGVTHVAMESTGSFWKPIFNVLEGQMEVLVVNAQHLKAVPGRKTDLKDAEWIADLLQHGLLRSSFVPPAFQRELRELTRYRTSVVEERSRTINRLQKILEDTNLKLSAVATDLMGLSAREMLAALLAGETNPTVLAELARGKMRAKRDLLVQALQGQFKPHHRLLIGEQVAHIDALDEEIERLSTDIAQRLRPYEAQLKRLETIPGIKRRLAEVILAEIGPDMQRFPSARHLASWAGMCPGNRESAGKRLSGKTRKGDPWLRTALVEAAHAATHCKDSYLSAQYHRLVLRRGGKKATIAVGHTLLVIVYHVLADEKDYQELGGNYFDEQDRQAVQKRLVHRLEKLGYEVILAPTSPAL

SEQ ID NO: 117741 - protein, 327 aa, unidentified
MNTAGIDVGARALSLVIRKNGKAGKERCFENDGKGHKQILAALKKAKVDRVCLEATGVYHFDLAVSLSDAGPFGLMVLNPKAANNFACAIMSRTKTDPIDAGILAEYAERMEFIPWARPKDAFLAIRACARRLAALTKQSTQSKNQYHALNSVESTPDFILKDVALTIRQLKAQVEQMRSSTLALISEDQELSEILVILKSVTGIAEVSAIQIMGEILVLPEDMQAKQWVAMAGLDPKHHQSGSSVNKKARISKVGNRYLRIALYMPALSASTHDRHIRGYYLHLIEDRGLKKMQAICAVMRKLLHAIHGMLKNRTTFDNTRFYVMD

SEQ ID NO: 117742 - protein, 389 aa, unidentified
MYLVGIDISKYKHDCFIATETGEVIKNSFSFDNNHQGFNTLLTVLKSLDQSQEIRIGLEATGHYGNNLKIFLYDNNFSFMEFNPVLSERFRQVTTLRKTKTDKLDSHLISKMLLTYDYQTYSLKSYHILSLKSLTRLRFSMIKERTKYKVRLKNIMDLIFPEFFSFFSDSYGPTPMYILSKYKSPNKLASVDIKDLYDEIHEVSKGRLSYIKLVKLHDCAKKSIGKSNDILEFQLQSILNMLMFYIDEIDKIESKITSIMKMHEFYTPTINGIGLISAASIISEYGDFSLFDSPDKMLSFAGLEPAVYQSGNSITFGKIVKRGSPYLRYTIMNCASRVLMDNPRLYDYYNKKRNEGKPHRVALTHVAKKLIRIIYKIEKDKIPYNQDLI

SEQ ID NO: 117743 - protein, 359 aa, unidentified
MLFTSRNDPLQQGQPIQTLLIQNEEVLFMENYIGVDISKQTLDIFDGERSYQVPNNAGLKDLKAHLREDFKKSWKDLFCIFEPTGPYAKVLRDFCLKYEIQVYEVNPKQSAYFARALGNRSKTDKIDAKMLRDFSKVLNPSLFSIPSKDIVVEKLSSLLSSYEFILKSKTRIQNHLSSQKLGGDLSTKIQSVLNKELKLIDKTEVTIIQEMEEIVKEDACTIEAYQNLISMPGIGTITAITLIYFFRRYPNANRSEITALAGLDPKRRESGTSLRGKAKISKSGYALLRKIMYFSCMNSVRFNDRLQKYYLHLLENKKIPKVALIACMKKMLLIAHQLYLKKENYMPLQIEIKNIYFKD

SEQ ID NO: 117744 - protein, 459 aa, unidentified
MNRKQRREMMRKMQSEDFDLEVVHPYAAGIDIGNESHYVAVPPSRDPQPVRCFGCTTAELKKMAEWLTQCGIRTVALQSTGVYWIAVYDILEEVGLEVYLVNARETKNLPGRKTDVQESQWLMKLHTYGLLRNSFRPSQQIRTLRTYWRQRQDLMRSAVRHIQRMQKALTQMNIQLANVISDISGVTGQAILKAILDGERDPRELAAYRDCRIEASEEEIAQALEGNWQEDQLFVLRQEQPGYELRQKQITECDQQLAHYLAQPEDPTQGATLPEETRKGRRNKRKGHPQFHLREELFRMTGTDLTQIDGIDVMAAMTVVSEVGWDMSKWKTENHFVSWLKLCPDNKTSGGKVIGKGRMPTNNRATTVLRMAASTLLTSESYLGAQFRRLRTRLGPPVATKAMAAKLARLLYRMMRYGMKYADQGAELYDAQYRKQQVTHLKRKAAQLGLQIIEVAAAA

SEQ ID NO: 117745 - protein, 317 aa, unidentified
MKTVPFEQVILRGCGIDVHKDMVVATISGEGLKTETRSYKTFSSSLTELKEWLLSSGITHVAMESTGVYWKPVYKILECPDMKVWIVNARHIKYVPGHKTDKKDSAWICKLLLAGLLKPSYIPEREQRELRDLTRYRNKLIQHVSSEKNRIVRILEDCNIKLSSVVCSLDGVVANKQIDMLIDKGHVTMDDITCIYHKKLEASPELLYQACEGFIEPHHIYMLQTIRKDMEQTKAIIADLTCRIKEVLSPYENVMELLQKIPGLSRKTVEDLIAEIGVDMEAFPTEKHLASWAGVCPGNNESAGKKKVVEPPMATNS

SEQ ID NO: 117746 - protein, 430 aa, unidentified
MDLIVPSDIDSEREEQPLPYDWFVGIDWGSRQHQVYVLDRDRRRVGERVVDHDGASLARLADWLWTLSAGQPQRVAVAIEVPRGAIVEGLLDRGFHLFAINPKQLDRFRDRHSVAGAKDDRRDAFVLADSVRTDQPSFRRVQLGEPQLLLLRELSRAEETLLEDFRRNANRLRDQLHRFYPQMLQLCSAADEPWLWDLIDLAPTPAHTALLIEEQVQRVLKAHRIRRVTAQEVLTCLQALALPVAPGAAEAAQAHCQCLLPCLRVLAEQLQACSQQVSALLSTLAEAPGKGEGPSDVAIVLSLPGVGRKITAWLFAEAAQPLAERDHQMLRTQGGVAPVTKQSGKRRVVVMRRGCNPRLRHVLYHMARVALQRDAHCNRVYTALRAKGQRHGQALRNVGDRLLRILMAMLRHRTCYDASRIRREPVVQMG

SEQ ID NO: 117747 - protein, 371 aa, unidentified
MKQRSTKEALEVVGLDVSDRSSTVCRMSMTSGEILERTPIATSATGMESYFATRARMRVALEVGTHSPWISRQLEEYGHEVLVGNAALFQASVSRRKSDRSDAEGLARVARLDPSLLHPVRHRSAAAQRDLAVVRTRDALVRARTRLINECRGQVKSYGHRLPSCSAEAFAARVGAALPEDLRPALDPLLEVVAQLSAQIRAMERTLETLARQRYPQTLRLRQVRGVGTLTALSFILILDDPHRFPRPRQVGAYLGLVPGRRQSGERNPHQPITKQGDPLLRQLLVQAAHYILGPFGSDCDLRRFGQRLIERGGAGARCRAAVAVARRLAVLLLHLWKTGDEYDPFFVEHRLARTVVPAAASAATTISTHV

SEQ ID NO: 117748 - protein, 317 aa, unidentified
MHRKNTTTWIGIDVSKKELEIHSHDSALKLPSAIANTKTGISKIISKFKKCDDPHLVFEATGGYEKLLLVMLQNADIKASRINPALARNFAKAKGLLAKTDSIDARILTDYGIQFSPRETAPLDPILEEIQSLVKYRRHLNDELHRERMHLEHMLPKSIESMVNSRMKSLQKQIKKVTAMMINLKVKSAPLDQAVELLTTTKGVGDNSALSLLVAMPELGKISNKEASSLAGLAPFNRDSGKMRGQRKIYGGRREVRRALYMAALVGSRHNLVLKEFYQRLLEKGKPKKLALTAVMRKLLCHLNSLMKRHLQETQPV

SEQ ID NO: 117749 - protein, 345 aa, unidentified
MKKVVAGMDLHGNNVVIGVMDMDGERVAHRKVPCELKEVVKFLAPYKKRLEQVAVESTYNWYWLVDGLRGLKYSVVLANPAGMQQYSGIKHADDTNDAFFLAELLRLKILPTGYIYDEQLRPVRDLLRRRMTLVHHRSALLLSFKSLYTRTTGQEMSLSELKGLEVKAAQELYDHPANQLIAGMQVGHIEQLTESIEKIEKVVLASARELPYYAKLATLPGVGRILGMTITLEVGDIKRFAGAGNFASYCRTVEARRTSNSKQKGENNSKCGNKYLAWAFVEAANFARRYDEQCHKWYDRKAAKTSKVIATKALACKLAKAAWHVMSQETDYDARRVFGQPSSTK

SEQ ID NO: 117750 - protein, 343 aa, unidentified
MQIRSVGIDLGKTTFHLVALGDNGKVLLKKKFTQRQLITFTANLQTTLIGLEACAGAHFLGRALREQGHDVKLIPAQFVRPFVKSNKNDFLDAEAIAEAVDRQNMRFVPIKTDDQLDLQALHRVRDRLITRRTSVINQLRAFLLERGLVFAKSPAKLRERMPEILENAEEYLTPRMRNLLALLWNEWKDLEQQVVDLNHEVELIASSDAACLRLRQIPGIGPLIATAIVASIGNGAAFHKGREFAAWMGLVPKQYSTGGKAKLSGISKRGNRYLRKILIHGARAMVLRCKRERIPMGAWMTALETRAPRNVLIVAAANKLARIAWAVLSSDQDYRAVQEPVAA

SEQ ID NO: 117751 - protein, 344 aa, unidentified
MTYYTGIDVSLRSVSICIVNDRGEVCLETKVEAEIDAIVERLRRFSSEVKSVGFEAGTLTQYLTYGLQAAGFEVICLEARQVSVTLAAMRNKTDRNDARGLAQILRTGWYSRVHVKSLQSHQVRALLASRKAILKKCVDLENELRGLLKVFGIRLPSRVGHGSFDAELRETVSNDGMLACALVPLLDARTVLYKTYLKLDNAVKGLVRVDPICRRLMSIPGVGPVTALTFKAAVDDPNRFKSSRTVAAHFGLTPRRFQSGEVDNPGHISRAGDADVRSALYVAAHSLLTRNAQWSTLKAWGVRLAKTRGHRRAVIAVARKLAVILHRMWIDGSEFRWGAAETAA

SEQ ID NO: 117752 - protein, 353 aa, unidentified
MKPKTDFSTASLAVIGVDIGKEVFHIVGLAVDGKIAFRKKVRRLGFEDAFEKLPPSIVGMEACLSAHFVSRVLRRLGHEPRIIPAIYVRPFVKGQKNDYNDAEAIAEAALRPNLRAVQEKSQDQLDLQACHRVRSRLVSRRTATINQIRAFLIEQGITVRSGARALRNSLFAILENRRDEISPRMASLILGLYEDWCQLDKRIETITSAIEELSQVEPKCQRLMSVPGIGPIIATGIVAAVSMGEAFERGRDFAAWLGLVPRQHSTGGRSVLGRISKRGSKYLRTLFIQAAKVLLMRPHNWPRYSFGAWLTAAASRLHKNKLAVALANKLARIAWSVLRNEKAFDTHLEVTAI

SEQ ID NO: 117753 - protein, 313 aa, unidentified
MAMPVQPVIVGVDVSKQTLSCARSDQSGTETISNQKRAIRQWLKALPVESALAAEATSTYHLELVEMAHAMGHTVYLVDGFRLHNYRKSVGGRAKTDRTDAELLVRYLKNEGEDLRPWSPPPKAYRAIQQLLGRRATLVSARIALQQSFGNMKGLGTSLKAVIRQIERLDQLIRKRLKAALKEHGWAEDYRRCIQVEGIGELTASALVTTFRRGTFRSSDAFIAFLGLDVRARDSGVSKGRRKLTKQGNPELRRLLHNAAMAARNSPTWRPVYERYLERGLKTTQALVALARKLARVAFALMKNQTQYQPKCA

SEQ ID NO: 117754 - protein, 371 aa, unidentified
MKREYIGVDLHSTQITVHRIEVTESGDDTASTVTRKNGRYSIEDLESKFIETLHAGCAVCIEAGSGSHTLARIIVSTGARAFVVHPLSMTHIFMTAKKTDKVDAKKLADCLKRHLESHDPGDELPEVYVADSEAQRLRMLIAQYQRVTAEMTALKNNLHALFRQWLVHTDKGMIIEKLEDYLKHPRLPPEAASIARREKKQFEELVLYRDELRAFIEALGVLRFREELGILIGVNGISVFGAACIMADIITIDRFRSHKNLASYLSAAPRVDASNNTVHIGRLNKSGRKMSFEILLQSVNHLVDGNPHLLAYTERKNGKSKNKIRATIVARSIRQVFYMLKNREENRFINLVSYKTKKRHMEKILETQKSA

SEQ ID NO: 117755 - protein, 413 aa, unidentified
MGGFPVFSLIPFQGGVVLSALFIGIDVSKDFSTAQAIDGKGNKCFYLELAMTADGFEQLLKAITSYCKDIGEVTVAMESTGCYHVNLFSFLTYKGIRCIIINPLLTANFAKLSLRKTKTDKKDALTIAQFLLVQKDSLLKTDLSPDRQDLKDLAREHESLTNLIAGMKNDIRRMLQITFPELESICNIFSETILEFLRQFPSARSIKIARPNTIAKALLHEDKRKKTSVSAEDIIRAAKTSVASHAAAKEIILPEKISTLQHLIEKKVRMKKALVEACEAMMVEDIEIITSIGGISNITASRLLAEIGDYRDFSTYKHIIAFAGLDPSVHQSGKFEGISRISKRGNRHLRYIIYLMTTCVVRGDNIFSSYYQKRRAEGQPFKMAIIATAHKLIRVLFTMLSKRTTYKPKEVNA

SEQ ID NO: 117756 - protein, 351 aa, unidentified
MGRRSTTIIGGVDTHSATHHAAVIDTHGRLLSDAEFPATLTGYAAMLTWMRSKGSLSQVGIEGTGAYGAGLARYLHKQNVEVLEVPRPDRRLRRQRGKSDPIDAEAAARTVLAGNASGAPKLADGPIEAIRMLRVARLGAVKAKTAAVNTLRAVLITAPDSLRSQLHGLSATQLVAACARLRPDLDNLADPIHASKAALRSLAIRVQHLEAETRTLRKQLDKLTEAVAPTTSAVFGLGPDTVSALLVTIGDNPDRLRSEAAFARLCGVAPIPASSGKTNRHRLHRGGDRSGNSALHIAAIVRLRYDPRSRAYADRRTTEGLSMPEIIRCQKRYLAREVFQAIRTDFAELST

SEQ ID NO: 117757 - protein, 337 aa, unidentified
MTVAGIDSHKDTLAVAVVDEQGREIDRTEIENSTRGHHTLIGWLGRHQPTRVGIEGAGSNGRVAALRLQDAGYEVVEVPPQLTAQARRRQRTQAKSDPIDALLICRITLREPELPQIRPSGDIEDLRVLVRHRRELLSERTRLASRLHADLEQLQPGYQTRIGRLTAERNLDRARRLLSGDGHVRADVARERVRRLRQLNRQIARITQGIGVLSATFGSGLTTITGIAELSAAELLAEIGDVGRYRTKAQFAMANGTAPLTASSGRVDRHRLNRGGNRQLNRIIHYVALTQISRSPEGRAYYERKRAQGKTTKEALRCLKRRISDRIFVTLRASVLT

SEQ ID NO: 117758 - protein, 444 aa, unidentified
MQYQKVLQMLNCTPYLSVGLDVGADFTWMSIMLPNGTLTGKPFKIVHSDPHSRELAVTKIKEAQEMYSLKSRCFLESTGIYHIPLLCFLRDKGFDCSVINPIITKNSTNMNVRKLHNDKFDSKKAAKVGLDASLKTSIVPDDAVIDLRNLVRDYYYFKDLQSAVVLKLNAELKVSFPSYLKVFSKITTQTSLKLLEAYPLAADMLAAPKDELVKTIRSTARFGEKYALAKYEAICTAAKDAAVFGRALPSNALRIRLYIKTYREYQEHLDSILEELHKAVNKLEGTPVHDRILLLQSLRGVGFLSAVVLIAEMGSFDLFSSPKKLYAYFGLDPAVKQSGKFNGDKVHMSKRGSSLARRILHMVALNNLKVDKGTKTPVNPVIHSYYANKCKSKKKNVAVGAVMHKICNIIFAMLRDNRPFEIITPQEHCIRYEAEHPSKPDNVA

SEQ ID NO: 117759 - protein, 319 aa, unidentified
MTKIICGVDVASRSLQARIGPEGPAGRFANTAKGIAELAMFCRQHQVDLVAMEATGGYEKRPFALLWAQEVAVAILNPRAVRHFAEGMGWLEKTDRIDAGMIAWFAQVKRVAAMAPLSAEQQRLKALVVRLRQLTAMRTVQQNQQRLVEDPLVLKSFTRVLAVLATQMGKLELAIAELIAADPLWRKLDQAFRSIKGVADRTVAHLMAEMPEIGTVSNKAISKLAGLAPMARDSGQLEGKRKVRGGRRPMRSLLFVVAMIVRRFNPDFAAFHQRLKAAGKPKKVIRIAVAHKLLVRLNAKARQVRGELAGAKVLPAQVG

SEQ ID NO: 117760 - protein, 340 aa, unidentified
MDKHDFSGIEVSAEELIVAVEREGRTVPLECFANDAPGHQALLRFLRGAGHPVRVCMESTGVYGLDLALLLARAGIEVMVANPRATRHFATAMMQRNKNDRLDAWVLMEFAKRMPFQAWAPPRTVVLQLHALSRRLEALKDTQAAEQNRLHAARATSTTPAAVRRDLERSLRSLHRAIARLSIEAVKIIRQDSDLQSRFHLLLSAKGIGETSAIALLAELAVAPQDLDVRQLVAYAGLDPREHSSGSSVHKKPRISKHGNVHLRRALYMPALVAIRRQPNLHAFYEHLRARGKAKMVALVAVMRKLLHAIFGMFKHQTAFDGNKVFALSAPEVSTMEAAA

SEQ ID NO: 117761 - protein, 403 aa, unidentified
MNSVGIDISKGRSTVAVMRPFGEVVISPFEVRHTDSELSELARQLKSLDGETRVVMEATGNYHTPVAKLLHDAGLYVSVVNAKLVHGYGNNDLRRVKTDKKDSVKLANYGLDRWLTLPRYIPEEDTRLLLKNCYRQYRQYSKVQTVLKNNLISLLDTVFPNANRLFSSPIRGDGSEKWVDFVAEFWHCRCVSEKSERAFTSKYLRWCRKHGYNFSEAKAHTIYAEASGHIGVMPKSETTKLLVEQAVAQLRATSTALAALKHEMQALTSMLPEYPVVMDMFGVGPTLGPQLIAEIGDVRRFYSKKALVAYAGLDAPPNDSGDVTGRHKSMSKIGASSLRRTLFLVMSVYLQTAPLDEPVYQFMDRKRAEGKPYRVYMMASANKFLRIYYATVKAYLESLEHTA

SEQ ID NO: 117762 - protein, 301 aa, unidentified
MFDHISVANTTEGFQAMRKWLRSFKINVKDAVIAMEHTGSYSNALAEWCFKKGITFVLLHPLDVKNAGARGRNKTDKTDAQFIADYAYTMREKLTPSLPEPQSIKKLRQLRNERQLAVRARTAYMNQLKTVTDKSTLHRMEKVTATFTAQIKAIEASIRTAVEADSRIKNTYDLLVSIPGIGMLNALTTIIATGNFTRFQTARQYAKFCCVSPLSRQSGTSVRSGDHVSHAGHNEIKSILTEGARSAIHHDANLKSYYERKRAQGKTHGCVMNAVKFKLICRMFAVVQRQTPYVNVERYRG

SEQ ID NO: 117763 - protein, 321 aa, unidentified
MQKFSLYVGIDISKAWLDVAIVSQQNELLSAERIDNSLDSIQTFVRSLKVHSDEILFCMENTGKYGKLFLEATAIMQLNTWVEHPLQIKRSQGMTRGKTDQLDAVRIAQYAFRFQDKVNLWKPEEKVIGQLKELLSKRDLLVKSYKMLKQSSDKNDKDLIQPLKSLQNATAKLNDKIEALISTDNKLSRHHKLLQSVPGIGRIVSTSLLVTTKGFTQLTNPRQLACYMGIAPFPYQSGSSINYKNRVSRLGNQKLKALLNLSAWNAIRSVPGLKSYFERKVAQGKAKLSAINAVRNKLIAIALSVIRRNQPFSKEYLPSIS

SEQ ID NO: 117764 - protein, 343 aa, unidentified
MDKVDTVGVEVSAKVLVVALKSNGQIRACEFANTASGHKQLISYVRRYSQRVRVCMESTGLYGLDLALAVKAQKGMEIMVANPRSVRHFAEAMMKRSKTDPVDAKLLAEYAERMPFQVWQPPSLAARRLCALARAMHQLTEISTMQKNQLHAAGSTETTPKIILTELRRSLAQQQRAIEHLLKEAIDLLQSDLLLQKRFQLLLGIRGIRELSAVHLLGELVLIPADCDVRQWVAYAGLDPRQYKSGDSVEKKVRISKVGNRHLRRALYMPALVAIRHNPHFRAFYRQLLAKGKLKMVALVAVMRKLLHGIYGIFKSQQPFDATKLFSLSLVSALEPATEKMAC

SEQ ID NO: 117765 - protein, 346 aa, unidentified
MVHYVGLDVSLKQTSICVVNQLGSIVREGVVDSEPEAIAAFVRLNAPGAVRIGLETGPTATWLWTELKQLGLPVICIDARHAKAVLKMQINKSDRNDAAGIARIMQTGWFKEVRVKDLDSHSVRALLASRALLVKIKRDLENQIRGLLKNVGLVIGRAKFNVFTVRAEELIEDRPELMAVVRPLLKARQAIEQQTDDLDRKVLKLARYDAQVRRFMTVPGVGPITALCFKATIDDPTRFKRSRSVGAYVGLTTRRHASGEVDWTGRISKCGDAMLRSYLFEAAGVLLTRVPKWSALKAWGIRLAKRSGLRKAKVAVARKLAVILHRMWIEGTEFNWSSKKTANQPA

SEQ ID NO: 117766 - protein, 352 aa, unidentified
MHLYFVGLDVHKQVIAFCVKTAEGGIVVEGSIPATRAGLDEWVLTLPGPWHGAMEATMFSHWIYQHLKPHAAKLEMGHAARMKAICAGKKKSDKIDARTIADLLRCNLFPACFVISPELGALRRQMRFRRLLVEETVMFKNKTAGLLMGAGVEYERRRLHGKRYFESLLKDNEWIDQQLRPLLEFNRAQMTTLQAMDRRLKGMLARHPALESRVKALCGIDGVGTVTALSWALEAATPERFASIKHAMSYCGLTSALRESAGRQKRGPLSKQRNAHLQSALIEAAKLAPMYNEKLKEVHRKTIEKGGHRNRATLAVARRLVAYLMAADRAFFASQREDAAAGATDREALAAA

SEQ ID NO: 117767 - protein, 350 aa, unidentified
MEESITIETIGCDVGDKQSELTILTPDGRLERPKPIKTTRAGFREFFQHRPRAHVVIEVGQHSRWISDLLENLGHQVTVANPRRVKLISESDSKMDRTDAELLARLGKADVRLLAPIQHRGEDAQADLTVAKARDALVVCRTKLVNHARSVVKSFGERLPTCTPESFHTKAWPHVPEKLRPALKPVFGALQQLHLEIRSEDHNLARIAKTYPEVEVLSQPDGVGVLTALVYMLTLEDKNRFKKSRLAGAFIGLRPKKNQSGETDKQLRITKAGDPFLRRLLVSCANYILGPFAKDSDLRRWGMQLASRGGKNAKKRAKVAVARKLAVLMHRLWVTGEPYQPIGYAKHLAA

SEQ ID NO: 117768 - protein, 430 aa, unidentified
MKSNTQNAKIEAITEKTLVLGIDVGSETHYARAFDYRGVEYSKKPFKFSNTEVGFVTFKAWVLDIKEKHGKDKVIPGMEPTGHYWFNLGKFLQDNEMKPVLVNPHHVKKSKELDDNHPTKNDRKDPKVIAGLVREGRYMIPYLPDGVYADLRTASNIRFQLQAELTRIQNRINRWFNIYFPEYKTVYGKPDAKSGMLILKAAPLPEDILTLGIDGVNQIWRDAKLRAVGKARAKTLIEAAEHSVGSKEGVVSARMEIRMLLEDYESRNTRLQEVMVLIEELVKGIPMAEKLLEIKGVGIRTVSGFLAEVGDISRFNNPKELQKLAGLALVENSSGKHKGETTISRRGRKRLRYLLFEVAMSLVSKNQEFRELHNYYTTRRRNPLKKMQSLMAVATKLIRVFYAMLTKGVDYDPKKMVSDIRRPEAYLQAA

SEQ ID NO: 117769 - protein, 417 aa, unidentified
MKLLFIGDDWAEGHHDVAAQDDAGKTLARRRLPEGADGIARFHEMVGSCLGEDAEPDPARVIVVIETDRGPWVKALAAAGYRVYPANPGQAARHKETVANPGKKDDFFDAGCLADMGRTRRHQMRELAAGSDVAEAVKIAARAHQKLVRERTRHLLRMRPALREYFPAALEAYADLTLAGKDALELLAKAPNPESAARLTVTQVTAALKRAGRRGDLAQRARDIQAALRAPHLAQPDVIAEAHAASVQAAAAVITALNEQVKIMEAKVSGLFRRHPDAGLCLSQPGIGDITGARIPGEFGDAPGRYATAKARKNYAGTSPLTIQSGKKKTVHARYIRNRHLIDALPAQALTALSVSPGARGSYDDLRARETGHDDAMRRVASRLAGILHGCLKTGREYDEATAWSHRAGNPEATKAA

SEQ ID NO: 117770 - protein, 353 aa, unidentified
MKITTVGIDLAKSVFQIHGVDERGKTVLRKQLKRSEMVTFFANLPPCLIGMEACASAHHWARKLIAQGHEVRLMAPQFVKPYVKTNKNDRNDAEAICEAVARPNMRFVPVKTLEQQTVLALHRARAGFVKARTAQANQIRGLLSEFGIVLPQGIGQLCRRIPEILEDGDNALPAPMRALLNRLLAQLKGLDRQVAELKGEIVRWHLHNEDSQRLERIGGLGPLTASAFVASLGNAKSFKNGRQVAAWLGLVPRQDSSGGKTRLLGISKHGDVYLRTLLIHGARAVLRHLEHRAHRTDAWLRRLLARRNKNVAAVALANKNARVAWALLAHQRDFTPDYVSTAPSDKQLSAMNR

SEQ ID NO: 117771 - protein, 351 aa, unidentified
MLLIGVDYHPSFQTIAFLMEETGECGDQELNHSDGQAEKFYRDLKERGISVRVGMESTGYSRWFERLLAELGFEVWMGDPAEIKAKRVKKQKFDREDARLILRLMRENNFPQVWVPGPENRDLRQLLWHRHRLVQMRTRIMNQLHALAMNEGYRWKKKLFSEQGRAQLEKLTLAPWASRRRQELLELLDRMNPTIEELTAAVEREARKRPEAMRLMTHPGVGPLTALAYVLIIGTPTRFQRGKQIGTYVGMIPCEESSARKQRLGHISKQGNSLLRFLLVEAAQAAARIHPDWRRRYIHLAMRRHKSIAKVAMGRRLAVRLYWMWRNGCEYSQSLEFGSYAGQLGTGDGVK

SEQ ID NO: 117772 - protein, 336 aa, unidentified
MSHYCGIDLHSNNHVVVVIDDESKRVFDKRLNNDLSATLNVLLPYRETLKGIAVESTFNWYWLVDGLQEHGFGVQLVNTAAVKQYDGLKYSGDHQDAFHLAHLMRLGILPTGYIYPKEQRAIRDLLRRRMSLVRSASTQLISVQSQIWRSTGIRIKSGDLRKLEFIPPMMDKYTLQAVHAGLTVYQAIQQEINVLEKSAFEAIKLTQDFKILQTVTGIGKILGLTIMLETGDIHRFAGAGNFASYCRCVDSSRTSNGKKKGVGNAKAGNKYLSWAFSEAAHFAVRFEPLAQRFYERKKAKTNGIIAIRAVARKLARATWMMLKHQVPYDAKLMFPN

SEQ ID NO: 117773 - protein, 382 aa, unidentified
MAKKAKKVKTAKGAELRIVNPDAAGIDIADGIMQVCVPADRSKDNNRAFGAYTSDLHAISAWLRECGIKTVAMESTGVYWIPLFCRLQEDGMDVVLTNARDVKNITERKTDESDAEWLMLLHQYGLLKASFQPHNDAKRMRTLTRHRDTLSREASSIVLRMQKAMQQMNIKLTLVLSDITGKSGIRIIEAILAGERDPKKLADLADIQCKTPKEEIAKALEGNWEEDLLFVLRQNYDTFKHFCAQLDRCDTELEKLMENYRTEVAGTGRPSYSPTKKHRDYHKRKRNVGFDVERKAYDMWGVNVFEIPGISHLTALGLMSELGHDFTRKFPSSKQFCCWCNIAPNTKISGGEKNIKPRATPSEQVGLIFRSIASSLANAKNQ

SEQ ID NO: 117774 - protein, 445 aa, unidentified
MFIQSQDDSHCCYSFLIKVVILMMKLKYSICCGLDVHKNVIVATIVITNKDGISEYRQKSFSTINSDIQRFHNWLIENNCYHVCMESTGKYWIPIFNYLENDIEVCLTHPKYVKAIKGKKTDKKDSKWIADLYKFDLVRCSFIPPKDFRQLRELARYRFKLVCMKSSEKNRIQNCMTVSNVGIASVLSDPFGKTATEIMSYLLEHTADSIDEKAVRKLIKKGAKAKSDEIIEAIRGYNIETDQAKKLELARAHLDFLDDMITQTEVELYVRIKPYYEFVEFVSSMPGMTGLSSTIVLAETGVDMNIFDNAKHLCSWCGLSPANNESAGKKKSVRIAKAGDYLKPMMVQCALAAVKSRKQPYFAIKYGRIKKRRGHKKAIIAIARMMMVCIYHMVSEKKPFTPTDYEELMDPQNHVERVVLNENNVFAYLETLGYDSSKLVKRSDN

SEQ ID NO: 117775 - protein, 311 aa, unidentified
MDGTDVFIGVDVSKDTLDVAVRPTGEEMSFANTEDGVSAMRDFIQSFSPRLIVLEATGGWEAVGVSVLAAKGLPVVVVNPRPVRNFAKAMGLLAKTDKIDARTIARFAEAVKPEVRPLKGEEAQRLEAFLARRRQLLQMSTAEKNRLVLASRWTKKDIQAHIGWLDKELDKVNRELQKLIRKSPLWRERDEILQSVKGVGPTLSVTLLSDLPELGTLNRKKIAALVGIAPLNRDSGKYRGRRAIWGGRSQVRIVLYMAARAAIRFNPVIRAFAERLKKAGKPYKVVVTACMRKLLTILNAMVKNGTRWQAA

SEQ ID NO: 117776 - protein, 308 aa, unidentified
MPTEICYVGVDIAKSEFVVDLVGHSSSFPQSAEGHNALLASLPSGAHVICEATGGYERKLVAALHLKGTPVSVVLPRRVRSFAVAQGMLAKTDRIDAVLLSAYGRACQPRLHSEIPANLQQLSALVRARQATVERISLEDNYAEHLVGALLVRQANQRKKLVRKQLDELDRAIQVLIASDAQLAKKCARLEQVDGVGKVTAWTMLSEMPELGTLAKGEAGALVGVAPHPHESGQRRGARHIAGGRAAARRVLYMAAISASQHNAVLKVFYERLRTNGKGGKVALVAVMRKLVELFNHILKDDAFLLAG

SEQ ID NO: 117777 - protein, 340 aa, unidentified
MRLYLGIDLHSSNSYLGIIDETGKRVFKRKLPNDPEMILAALSPYKNDIVGIVVESTYNWYWLVDLLMAEGYTLHLANPTAIQKYSGLKYADDQHDAFWLTEMLRLHILPEGYIYPKEDRPIRDLLRKRSHLVKLRTSLVISLQNIITRNNGIRIKGELIKALTTDHAAPFLEANEDLALAGKVSKASIDFLSRQIKAIEANIEGKVALREPYAQLVTIHGVGKILGLTIMLETGPISRFDKAGNYVSYCRKVSSKWISNDKGKGKGNRKNGNKYLAWAFSEAAELARRYYPEARAFYNRKLKHTNVAIAHGALAHKLARAAYYIMRDQVPFMPEKLFAS

SEQ ID NO: 117778 - protein, 452 aa, unidentified
MKKGQQKQGIVKFNSGLPVFNHHAAGIDIGDTLHCVAIGDGMNGHLVKTTTGFTCDLKEIVDFLVEHKITTAAMESTGVYWLPLFLMLEEAGIEPYLVNAKHVKNVTGRKKDDTDAIWIQKLHACGLLQKSFQPEIESRILRNYTRQRRNLITMNSDTVRRMQKALELMNIKVHTVISDILGTTGQRIIKAILSGQRDPATLASLSDARIKATPEQIQKSLQGIWKQEYLFMLEQAFEHYEFHQKQIRSCEQKIEEQLLKQVAIVQNGDITELENGLKKKSKVKPRKNGYSFKIGPYLKEIVGVDLCKIQGISESALEFIAEVGTDMNKWKNYKHFAAWLNLAPNSKISGGKVITSKRMKKKNKAGQILKQAASTLSTSKSALGDYYRKMRARLGGRGAVTATAHKLSKIIYTMILQKEEYKPEILVGNQRKYNQDKIRKLEKQIAKLREAA

SEQ ID NO: 117779 - protein, 320 aa, unidentified
MQTQTQELDIGADVAKDEIVVACSEGSFPVRKLANQRTALLAFLKSLPPGSRIGMESTGIYHELFASLAHQLGFIVYVLNPKDARHYAKGVGQRGKTDRVDAELLARMVAHEHADLHPWVPPTPEQREMDRLIKRRAKLSSLRQALGMSLKGLVGFSTDLKTLRQHFDQVIARIDQRINELVEANPDRKQHVTHLRTITGVGPVISAALVNSLERLPLKKADTFVAFTGLDPRPDDSGQHQGKRRLSKRGPSELRRLLYLAALSAIKTKTWRPIYEHYRGKGLSSTAAIVIVARRIARTAWSMYTYKTEFDPGRLTKSLT

SEQ ID NO: 117780 - protein, 402 aa, unidentified
MANGSMRYIGLDIHKEYFVAVGVNEKREVIFGPQRVSNYQLDDWILRWLTPQDAVVLEMSTNTYQFYDALLPRVHSVMAVHSPSVAMVTNVQVKTDKKAALALAQLHAAGLLTGVWVPPYPVRDLRSLIARREKMVRLSTMAKNRLHSMLHRHHLITPQKPFAPEQRTWWKSLPLSANEQFLVRSDLDTLDFAQKQVEQIEECLKQESAEDVRIPLLIQLPGVGMLTAIIILAAIGDITRFPTAKKLVGYAGLGTRVHDSGMTHSSGRITKAGRKDLRCAMVNAANHAVEHHIHWKKELERLQPHLGRSKAIVAIARKLLVAVWHVLSKEVADRFADPRDVASSFLRYAYRVGVRNLPNEQPALAFTRSQLDRLGVGKDLKEIPWGSKRFKLPPSKILLEKE

SEQ ID NO: 117781 - protein, 354 aa, unidentified
MAALRDQAFIGLDIGKTHHWLCALDGEGKPLLSRKIANDETEIVTLLTTANALAQQLVWAVDIIGAPSALILSLLTRAGQSVRYASGRIVSAMSRAYPGEGKTDAKDAYVIAETARIRRDLPVIDHDTDLVRNLAVLTGYRADLIADRVRMINRLRDLMTSVFPSLEREFDYSSHKGALVLLTGYASPDRIRRVGQTRLAGWLRHRKVRDYASMAARAVDAAKAQSTVLPGQDLATTIVAELATSILALDERLKSLDEQIEQTFKQHPQATIIQSMPGFGPFLGAALLVGAGDLRAFPSAGHLAAAAGLVPVPNDSGRRTGNLHRPHRYSRPLRHVFYLSAQTSMMRAGPNRDY

SEQ ID NO: 117782 - protein, 398 aa, unidentified
MSMLFVGIDVSKDYSSAQGLDQEGKKLFYLEFTMNGEGFSQFLKGLKTHCEDLSGVTVGMESTGCYHINLFAFLCSEGIVCVVINPLLISNFARLSLRKTKTDKKDALTIAQFLLVHRSKLSQVSYSRNSQDLKDFARERESLAVMIAGLKNDVRRLLQMSFPELEHRCKLFTETMLRFLIKFPSARTIRTAKPKEISKALIHAEGKRKRVFISAEEIIKLAKASVASDSVAKELILSEKIEILLYLEQKQGRITEGLVEACRSMRVDELDILTSVDGISAITGSTFLAELGDIGMFKSYKHVIAFAGLDPSIHQSGQYEGVSRLSKRGNRHLRRVIFLMTLCAVRSQNVFREYFLKRKAEGLPPKKAILATAHKLLRVLFAMLTRKSYFRREVVEDS

SEQ ID NO: 117783 - protein, 368 aa, unidentified
MDNDITAFVGLDVHQGSIAVAVADPGRAAPRFLGTTGPQLVQLLKALSHLGQPQQMLIAYEAGPCGYGLARQLSARGYRCEVIAVAKMPRKPGERIKTDRRDALLLAGYLRAAQLTPVVIPDEQDEAIRDLSRAREDAVRARLKARQQLKAMLLRHGHRYTGKSSWTAAHERYLAEVSFAHPAQDIAYAEYRSAVREAHDRVERVTAALREQVASWRWCGVVSALMTLRGVEFVAAVTLIAELGDLARFAHPKRLMSYLGLVPSEYSTGESRMQGKLTKTGNGHARRILIESAWAYRLPARMSRELLVRNEGQPKAVREIAWRAQLRLCSRFRRLQARGLHQNKTCAAIARELAGFIWDIARQVPLAP

SEQ ID NO: 117784 - protein, 326 aa, unidentified
MTLSHSTDNTFVGIDVGGAGLDVAWHRGDSAHYANRPDAIATLVERLRTGPEVTRIVLEPTGGYEKALVKALRQAQLPVEVIHTTRFNAYRALVGVKAKSDTSDAKLLASYAAAPDEVRGRKAGHVELPEDAVREELSELASRRDQLKHMIHAETCRLGTVRNDELRQMIITHLATLRAEDKQVHRMMLELVRQRDDLRRDQRLLKTIKGIGVKSALVLLASVPELGRIDNKAAAALIGVAPFVRKSGTMNAPARIHGGRAPVRSILYMAAVTASKHNPLLSPFYDRLIAKGKPPKVALIAVLRRLVVFANAVLRSGQPWKGASAT

SEQ ID NO: 117785 - protein, 361 aa, unidentified
MSKRLWVGLDVGVHITSVCVLNSAGEAIQEVNLPTSVETIDAFLRPMRRGNIETVAMEAGPSSMYLARGFERLKYTVVVFDCRQMAVYLRIRQNKTDRNDARNIAEVARTGRGTIAEVMVKNVEFQRLRSLLAIRQRMLRLRVGSEALIGAQFHLYGGKLPRSWSAVTLRRNASAEMARIRREQKIDLRSDIEPVLSICENLRAHVEHLDRTFAEMAANIEVCRRFMEIPGVGPLTALSFYSAICNPHRFEKCVDVGPYLGLVPRIRQSGETIARLRISRMGNTMTRAHLTSAAMVLLRSTTKDTALKAWGLEIRERRGGGRAKIAVARKLSIVMLAMWKYGTDWEPFRRAEVQIDHPTGL

SEQ ID NO: 117786 - protein, 340 aa, unidentified
MTITTVGIDLAKNVFAVHGVDQNGKTILVKPKVSRAALSELIASLPPCVIGMEACSGAHYWARLFRQYGHEPRLMAAKFVSPYRMTGKSGKNDAADAQAICEAVRRPHMRFVPVKDESQLAMQCLHRTRQGFIEEKTAAYNRLRGLISEFGVVAPQSTDALRHTVSEQKVTLPLQVQHCVDDLLEHITHIEDKITGYDRILSRMAKTDHRSQRLMELKGIGSTTACALVASIGNAHDFKNGRQLAAWLGLTPSQYSSGGKAKLGRITKAGDSYLRTLLVQGARSVLIGANKKMDSFSRWVCSLVERRGYWRAVVAIAAKNAKLCWASLHYGDDFKLYSAS

SEQ ID NO: 117787 - protein, 309 aa, unidentified
MNPKIHDIVAIDVSKRTLQLDCEKEQAALPNDRVGFDAIAKIAKKLPDPLVVCEPTGGYERPLMQAMQAKRIPFALANATQARAFALSQGVKAKSDPIDARMIRRFAKQRNLQPQGVPDATRRLVADLLDRRTQLCDHAASEKARLDKCSKVAAKSIAKIVRFLEKEIALIEAKIAKAIAADPRASRQAKAMREVVGVGKVTAWSVLAYLPDLGSLSRAKLVALVGLAPYVRDSGAYKGKRSISGGKAKVRCPLFMAATSGRTHNEHLKVFYDRLRAKGKPYKVCIVALMRKLIIHLQSIIKKLEIELA

SEQ ID NO: 117788 - protein, 345 aa, unidentified
MSHITRIGIDTSKAVFTLHCVDDTGRALLRTNLRRAQMVPFFRKLPPTEIAMEACGSSHHWARELSALGHTVRLIPPQYVKPFVKRAKNDRNDAEAICEAAGRPGMRFVPVKSAEQQAHGMVLKVRETLIGQRTQLVNTLRGHAAEFGVIAGKGISCIAPLLEAIEAETAIPVEAREMLALLGREIEHLNAKLAEFEVKLTAMHKANPLSQRLATIPGVGVIIALTLAIEIDPAAFKSGRHLAAWIGLTPKEHSTAGKQRMGGISRAGNERLRQLLVTGATAVIRFADRPGNKQANEWLLNLLQRRPRKLAAVALANKIARTVWAMMKSGETYRRQPVAAGAVSA

SEQ ID NO: 117789 - protein, 410 aa, unidentified
MDKQGHEHRLRGFRPNRKGNAMQFVGIDIASETHVFAILGEDGTVLVKPKPIAEDAAGHGALLAALEPPDAVLVVMEATGHYWKNLFAVLAAKGYDVALINPLRTHRFQGESLERTKTDAIDALGLARFGREKHPPPTRLGSQASEELRELVRHRDRLRQDFDDRVRQLHRLVDLGFPEFRRYVRTLDSMLATAILAEYPTAEAVAKATPRRLAKLRYDGRHAVGAELADQLIAAAKRSVGQHHGPAYRLQVRDICQDLDLWRRRLAERDDDIARLLDEHEVGSLLTSIDGIGPGTAARLIAELGDPARFDSAAALAAYVGVVPALRQSGKRRPTRAGITPIGNARLRTALWMPTLTAVRRNPWLKAFYERLRAHGKPPKLALIAAMRKLLVAVYAVAKARKPFVPNLAA

SEQ ID NO: 117790 - protein, 408 aa, unidentified
MRGCRCSMIMGFTTPIEHFNLQRKKVITMNTLYVGIDVSSKSNVVYLMLPNGDKHSNFSVANSHEGSTLLVKKIYSALTSHSLDTVLIGLEATSVYGDNLVYFLREDATLAPFNRKIHVLNPKQVKKFHDTYNDLPKNDYVDSFVIADCLRFSRINKEVYMGDYRYKALQNLTRARFFAVQNLVKEKQRFMNVLFKKYSTMTQEKVFSDAFSTTALAVYDEFESAEALANMDLHELTDFIIEKGKNRFPDPDAVAKAIQKAARSSYRLPKTVNDSVNQVLSISITSMKALESQIKEFDKAIIALMELLPNVLISIPGIGPVYSAGIMAEIGDINRFDNQASLAKYAGLAWKQHQSGGFEAEVTRLIPSGNRFLKYYLCEAAYTELLNVVISERSEPLTVYIPTSREFS

SEQ ID NO: 117791 - protein, 430 aa, unidentified
MKSNTQNAKIEAITEKTLVLGIDVGSETHYARAFDYRGIEYSKKPFKFSNTEAGFVTFKEWILDLKDRHEKEKVVPGMEPTGHYWFNLGKFLQDNEMKPVLVNPHHVKKSKELDDNNPTKNDRKDPKVIAGLVREGRYMIPYLPDGVYADLRTASNIRFQLQAELTRIQNRISRWFNIYFPEYKTVYGKPDAKSGMLILKAAPLPEDILTLGIDGVNQIWRDAKLRAVGKARAKTLIEAAGHSVGSKEGAVSARMEIRMLLEDYESRNMRLQEVMVLIEELVKGIPMAEKLLEIKGVGIRTVSGFLAEVGDISRFNNPKELQKLAGLALVENSSGKHKGGTTISRRGRKRLRYLLFEAAMSLVAKNPEFRELHNYYTTRRLNPLKKMQSLMAVAAKLIRVFYVMLTKGVDYDPKKMVGDIKRPAVYLQAA

SEQ ID NO: 117792 - protein, 374 aa, unidentified
MNEFSKYVGLDVHKATIAVSIADGAGGEPYFHSEISNTSIAIAKLMTQLAKGGAKLSVCYEAGCCGYVIYRQLTKLGHFCQVIAPSLIPKKSGDRVKTDRRDSLSLARLLRAGEIGGIWVPDGMQEALRDLTRAREDMKDLQRQSKQQLLGFLLRHGVDGFTGKTNWTQAHFRWFETVKFDQPAQQLVFQEYVDVIKAGTKRVQGLDEHIERTAQASKVWPIIEALMALRGISLLAAAIIMAEIGDLSRFAGAPQLMAYLGLVPSESSSGANRRRGGITKTGNAHVRRVLVEAAWTYRHPARKTRTLQRRAEKTPDAVQEIAWKAQQRLCSRYWTLDARGKLKVQACTAVARELAGFIWAIGQAVPSPAHDVSA

SEQ ID NO: 117793 - protein, 392 aa, unidentified
MVYVGIDVAKDKHDCFIVNSDGEVLYDVFTIQNNMDGFEDLLFKIKTASKNPDKVKVGLEATGHYNCNLLGFLKSKGLPTIVINPLHTNAYRKSLSLRKTNTDKVDARAIASMIMSDVSLKPYSDTLYHNEDLKSLSRYRFGKVADRAKLRQSVSRLINILFPELEKLVSTIHAKAVYELLSEFPGAHQIASSNLKHLTSLLETASKGHFGRDKANEIREAARHSISTYLPAKSLELRHTIRLIRELTLEIGEIETEIKKIMDAIDSPILSVPGISYGIGSMIVSEIGDFSRFDSPDKILAYAGCSPTTYQSGQLYSSHSTMEKRGSKYLRWALMNAARYVCNWEPTFAAYLEKKRSEGKHYYVALSHAAKKLVRLLYHLETTGEKYKPISV

SEQ ID NO: 117794 - protein, 349 aa, unidentified
MITLGIDAHKRTHTVVAVDALGRQLGAKTTNATTSADHLAIIRWADQFGTERCWAVEDCRHLSRRLERDMLAAGERIVRVPPKLMAHARDSARTYGKSDPIDALAVARAALREPNLPTARLDGPARELRLLVDHREDLVAERTRHINRVRWHLHEIDPTWDPDLRALTTFKHLDIAADRLARLDSVIARIAADLVRRIRQLTIEINELRVELEAGTETAAPNLRQIHGIGPLASAKLIGEVAGAERFRTRHAFARHNGTAPTPVWSANNTRHRLSRAGNRQLNAAIHRVALTQARSHDEAIAFLNRRTDHGATRKEAIRSLKRRLSDVIYRAMLADEALTSNNTLRPAA

SEQ ID NO: 117795 - protein, 320 aa, unidentified
MNKITEISVGVDVSKNTLDVCFHQTKSFFKIENSHKGINLLLKKLANFKVDKIVFEASGGYEQRLLLALEEAEHNYWRVNPIRVKGFIASEGTLAKTDKSDAKMLALFAYKKDKKNENVKVKEEERRLQCFFRRRRGLKRMIVTKKQRLDKPMEKYCKTMIMRTIKFFEKQIKSLDKEISKLISDNKNIQRKIEIIESVPGLGKESSSALVIEMPELGKIRNKQAAALLGVAPCTKESGTYRGRAIIKAGRRVPRKVIYMAALTASRFNPDFAKFYKRLRKNGKPGKVALVAVMRKLVELVNTLLKENRLWENRVLERYV

SEQ ID NO: 117796 - protein, 450 aa, unidentified
MSSSYAGVDWASEKHDVVIADETGEEILAATFAHDEAGVRGLCRTLVRHEVTLVAIERPDGLLVERLLDAGLRILPLHPNQVAATRDRFRASGGKSDRFDAFVLCELARTDHHRFRVLEPDSDQTKALRALTRAREDLVGTRTALVNQLRAELAGFWPGPLGLFTSLHSQISLAFLERYPGPADARGLGEQRLQAFLARQRYSGGQKPARLLAKLRRAPEARVGELELGVRRALVLSLVATIKTINEQIKQLERQIATAIREHPDGPIFLSLFKKPNSVITAAELLAEIGDCRGRYPTRDTLAADAGQAAVAVESGKRKAACFRWACNKRLRQAFVTLADTSRHHNPWAQDLYAAASARGHDHPRAIRTVGRGWCRIVWRCWQDGVPYDPARHRALQRHVTVTIPTSPGPRPDTAATQRMASAAVTQQADRRAERNALDGKPTSAIALEG

SEQ ID NO: 117797 - protein, 333 aa, unidentified
MSSVVLSKFQVVMTKDRKIYGIDISKSVFDIYNQDTGHYQLQNDEKGFKKLLKSLSKDALVVMEATGYYHYRLAQFLHKNGVLVSVVNPLSVKRFIQMKLAKVKTDKSDAKSICEYGIFNDVPLYNALTDVQAECLQLFRLLDSYVKKSTATKNKLHGEDALGIPSKTVYRSLKRDLNHLKKEILILEKRLLELVKQDQQEQLTLLQTIPGIGLKTALFLIVVTDGFKKFETASQLCSYVGITPTIRESGSSVRGRSRISKVGNKKLRNLVFLAAFSAYKYNRACKALFDRIVAKGKSAKLALIAVANKLLKQAFAIAKSGLPYDENFVSKLA

SEQ ID NO: 117798 - protein, 366 aa, unidentified
MKQQHQDSEVTIGLDLGERWHRFCVLDSRGEVVEEGSLLNDRASLARLTARYPRALAVMEAGTHSPWVSRYLEGLGWEVIVSNPRKVRAIYQHERKSDQRDALMLARIGRMDRALLYPVRHGSEQAQQDLLRIKLRDSLVRARVALINSVRFSLKSLGYAVCNPSSERFHKVAMERLPERVQQMIAPSVQALAELSTRIAVLEREINVVARTKYPQTLWLQQVPGVGALTALYFVLKIEDPQRFENVRDVGAYAGLCPRRDQSGQSDPQLRISKRGDPYLRRLLVSAAQYILGPFGPQSALRAYGLMLAADGSARARKRAVVAVARKLAVLLLSLWKNRSHYQAFPHWQTIEDKRSGTIAMHRVEA

SEQ ID NO: 117799 - protein, 340 aa, unidentified
MGEITTVGLDLAKNVFQVHGVDAEGMTVLRKQLRRAQVLVFFSRLPRCLVGLEACATSHYWARELRALGHEVRLMPAQYVKAYVKRNKNDAADAEAICEAVVRPSMRFVPVKTAEQQAAVLLHRGRERLVRQRTMLVNALRAHLAEFGVIGAQGLRNVGKLIIVIRDEEDARLPDMARKVLQVLAVQIEQTEAAIAVLEKQLMDWHKSNPLSQRLATIPGIGPIIGTAIAAMVAEPSGFRSGREFAAWLGLVPRQNSTGGKNRLGGISKRGNQYLRRLLINGASANLLRSKATNADPWVIGLRRRRPSMVVAVALANKTARIAWAVMHRNENYQREAVSA

SEQ ID NO: 117800 - protein, 341 aa, unidentified
MNITHVGIDLAKHVFSVHGVDQRGRCRLRRDLRRTQLLKFFANLNPCVLGLEACASAHYWARELGKLGHEVRLINPRFVTPYRKSDKNDHNDAEAICEALSRPSMRFVPVKSPEQQAVLSLHRARALLSSQRTALMNQMRGLLAEYGLIVAQGPSALRTRVPEILEDADNELPDIARETFAELYERWLDHERRLTDYDRRLQRMAHQDPATQRLLQLPGVGVITATALVASAGDLGVFRNGRQFAAWLGLVPRHYASAGKRRTGRITKRGDAYVRTLLVHGARAALRTAHRREDALGHWALAVKERRGPNKAAVALAAKHARIIWALLTREVDYQPRLVSA

SEQ ID NO: 117801 - protein, 381 aa, unidentified
MGSLLDDMGCQAGGEAASLTTMITDDKTETNKSYDTIKLGIDAHAKWYYVARQLDGATPQPVQKMTFEALLRFVAKQQALAGEVHTCYEAGAFGYHLHRKLEALGVSNLVVQPQDWDERSKGVKTDRIDALALCQRLDRYVRGNRKAFSVVRVPSEEEERERAFSRQRQQLVRERQRLQAMGRSLLAMQGIHVRGKWWKGQTWAAICREAPAWVVERLEVFMKLIEPVEVEERKLTEGIQKVGRKSRIPKGVGPLSFEVLRREVGDWSRFNNRREVSSYTGLCPREHSSGGKRRGGSVNKSGNPRVRAMLVEMVWRMMRWQPGYHALRKWMAVLGDASRSAAVRKKAIVAVARQLAVDLWRLFTGQTTAEKLGLIYLPEAS

SEQ ID NO: 117802 - protein, 335 aa, unidentified
MSLKLLAIDLGKRSFHCYGIDGDGLIISRKISRSKLLETIRKLAPEAVAMEACASAHYWSRLFLAEGRQVLLINPRFVKPFVKGSKNDAADAEGIYEAALRPTMRFVPVKSTEQQDLQSLHRARERIVCARTALINHMRGLLGEYGVILPQGAWRFLAQAQDAIAAAEISVLTRELFSDLLDELRGLDLRLDKLDRQLVALCRTNEACRRLSKLPGVGPVIATALVAAVDDGRHFRSGRELAAWIGLVPRQYTTGGKPRLGGIGRRANHYLRSQIIHGARAVMFRLTTHDDRRSQWLKGVTARRGFNRAIVALANKTARIAWAVLTRKEDYLAAA

SEQ ID NO: 117803 - protein, 450 aa, unidentified
MGCRYAGIDWATEKHDVRVADETGEKLLAATFAHDEAGLLALCRTLVRMEVGLVAIERPDGVLVERLLDAGMKVLALHPNKVAAARDRFRVSGGKSDRFDAFVLCELARTDNHRFRVLEPDSDQTKALRALTRARQDLVHTRTAVVNQLRAELDRCWPGPLRLFSHMDSEILLAFLERYPSPVDAHGLGIVRMQAFLKRERYSGRQKPEALLAKLRSAPEGRVGELELTARRQLVLTYVAMVRTLNGQIKGLERDIRTAVRAHPDGPLFLSLFKQAHSAITAAELLAEIGDCRARYPNRDALAADAGQSAVAKESGKRKTAQFRWGCNKRLRVAFARLADSTRHWHPWAQAVYAQARQRGLEHPRAIRTLGRAWCRIVWQCWQSRTAYDPTRHRSLQRHITVTIPSPSGPITDPAATARMAADLSPAPGALEPSAQHLTTGLHPVIHTGG

SEQ ID NO: 117804 - protein, 349 aa, unidentified
MAMTIVEAPPGITGGVDTHLDKHVAAALDPLGRLVGTESFDADAAGYKALLVWLEDFGEVTKVGIEGTGSYGVGLSRFLRRKGIEVVEVNRPNRQSRRNQGKTDSLDAVEAARAAISGRASGVGKTKDGPVEAIRVLVVAKRSARQARVKAIVQMRHLGFTAPDQLHSRLKGLSVTALVAEGAKLRATKSADTVTAATKASLSSLAHRIQSLDQEIAGLDEKIESLLLATAPDLMARFGVGPDTAASLLVAAGDNPERLHSEAAWAHLCGVSPVPADSGKNAGHLRRHTGGDRQANSALWRIAMVRIAHDPETTHYFERRVKEGRTKRDVIRILQRYIAREVYRYLPRG

SEQ ID NO: 117805 - protein, 347 aa, unidentified
MDHIGIDVHKKDSQICILAEGGELIEQRIRTELECFAAVLGARPRARIVIEASTDSEWVARCLEGLGHEVVVADPNFAPMYATRTRKVKTDRRDARALADANLLGAYRPAHRLSDPQRHVRGRLAVRDAIVRTRTRYISLIRALLRQQGYRVPSGSAEGFLSRVRALTLPGRLGSTIAPLLAVMRHLNAQLAYSDETIARVTAHDERVQRLRTVPSVGPVTAAAFVATLDDAQRFRHAHQVEAYLGLVPRELSSGETQHRGHITKAGPTRMRWLLVQVAVSILRRRPPQAEALHAWALHIAARRGKHIAAVALARRVAGILYALLRDGTTFDPRRAPRPAGVATLPA

SEQ ID NO: 117806 - protein, 340 aa, unidentified
MKLYAGIDLHANTNHLAIIDEKDVRVYTRKLPNQPDLILAELDPFKNDISGVVVESTFNWYWLVDLLMDNSYCLHLANPAAIQKYKGLKHSDDKHDAFWLAHMLRLKILPEGYIYPKADRPVRDLLRKRVHLVQIRTSLINSLKGIISRNCGHSLAVNKIKASRVDHISPLLCEDEDLEMSGAVSKDCIDYLSRRIRDIEDAVKSKVILRQQFKTLQTIPGIGLILALTIMLETGTIRRFSKVGEYSSYCRKVPSKWTSNNKKKGKGNTKNGNKYLAWAYSEAAEFSRRYNDSAKSFFNRKSAQVNRMVAHAALANKLTRAAYYIMRDGVAFDENKLFSK

SEQ ID NO: 117807 - protein, 349 aa, unidentified
MTVYVAVDFHAREQTVSYCDLADGEIHRRKLRHQHDDVRAFYQQFTGEVIVAFEASGYSAWFEQMLAELGHTVWLGNPAEIRRKAPRRQKNDRRDADLMLDLLLKGDFPKVHGFSEESRTVLRQLRYRHKLVKVRTIAKNSLHAIGINAGLPLKRRLLTEPGIAQLQALSLSPVLTQQRDEWLQLIALMNQRIATVEAQLQQRAKDDADIALLQTHPGIGLLTSLALRYTLLPTSRFSSTRQVTAYVGLDCMEDQSAERRRMGSISKAGSKLLRFLLNEAGHTAARHDPELKKFYRRLLHRRDKPKAKVAVARKLLVRSFIMLRDQIDYAEFVRRGVAARVAREAHSLP

SEQ ID NO: 117808 - protein, 426 aa, unidentified
MRVLYDRVAAIDVHKDMVKVAIRVPGAKRGTRKTEVLEFRTFYGVLQEMARELRRRGVTHVVMEASGVYTDPVYYALRELDFEEVMVINPAHAKALKGHKTDAKDAIRLLDLYECGLLSGSYMPSQELREVRDLGRYRMKTVQARTSEIQRLQKALETAGIKLGSVVSDITGDSATAMIEALISGERRGAVMAGLAQSRLRTAGKMADLSMALAGRFTEHHALMCRLHLDRIKIFDDAVKDLDNHIAPLVARYAREAELLKSLPGFGDVVVAGWLGAIGPAPHQHFATASRLASWATLCPGNYMSAKKSKGGRTGDGGAYIKPLLIQAAWAAVRVPGRLQARFRRLVRKFGGPRSKGAQKRAITAIAHTLLKIAYSVLKTGTPYQDLGADFYTRRESPDARQDYLMRQLQKLNPGCVITITPAEAA

SEQ ID NO: 117809 - protein, 269 aa, unidentified
MNYIGMDAHISTLDFAVVNEAGRLTKAKSIATSVKGFMEFVKQVPAPRTIYMEEGTLAAWALETCVQYGEKLVITDPKENHWIGSSGQKDDPLDAFKLAQLARGGYIKEIHHPVGQRRRFRELMEAYHDNVRMTTRLKNKIKDKFRQNGIPCTGETVYSQTYREEWKGKLPQDVTLLLILEGLWRQLEQSEQNEKEILAAAKAQSKYYPEIKLFKDIPGIGFIHAATISAILETPHRFANKKKVWMYAGLGLMKRSSGGRIYSERLSKD

SEQ ID NO: 117810 - protein, 381 aa, unidentified
MENSIAHSSKVFSSNATLLVALELSKATWVVALSTPFSDRISHHSIAGGDAGALLKLIEQARSRAEAALGQPVRVVCCYEAGYDGFWLHRVLIAHGIDNHVLDAASLLVNRRARRVKTDRIDVDGLIRALAALMRGEHHACRAVHVPSIEDEDRRRQTPERERLIVERTAHVNRIKGLLMAQGIRDFLPMRPNAAERLTELRTGDGRPLPPCLVAEIRRELRRLKLVEEMIGEVETERDSVGAGTVTDQRIALLRQVKGIGPVAATVLGREVFHREFTNRRELASYLGLTPSPWASGSVQLDQGISKAGNARARTVLIEIAWLWTRYQPGSRLAGWFRERVGQTRGRLRRILVVALARKLVVALWRYLSTGVIPEGVELRA

SEQ ID NO: 117811 - protein, 321 aa, unidentified
MEGTPVSVRLEVFVGIDVSKHSWDVCILPAMIRRSFPATDEGLASLLELLRQHPSTLIVLEATGGYERRLAAGLHDAGCEVAIVNPKQVRDFAKALGRLAKTDRLDAEVLALFAQKIQPRPSEKCPEKRAELDALVARRRQLLQLRTMERNRLHMAEHKLPRKSIQKVIDVLQKQIDQLDAAIAKLIESDDDWRQKAQLLESVPGVGAVTSATLVAELPELGKLNRQAIAALAGVAPFNHDSGQHAGQRQVRGGRAGVRTALYMAALTARRFNPVLKRFADRLQSAGKAAKVILTACMRKLLTILNTMVKNNTSWNPKRAS

SEQ ID NO: 117812 - protein, 396 aa, unidentified
MSNAIGRVVVGMDPHKRSVTIEVMTADEAILGGGRFGTDAAGFAALRRYVSQFPDRVWAIEGCAGIGHHVAVRLLATGEDVVDVPPKLSARTRVFATGQGRKTDATDAHSVALVGTRMAGLRPVVNDEQLAVLRILVDRRRSLGEDHTRMVAQLHQLLLELIPGGAKTDLSAAQAKAILAKVRPRDTVGKTRRRVAAELVADLERIHLRKKAADKELTELLAATGTTLTTLPGIGPSGAARLLVEVGDITRFPDRDHFASWNGTAPIDASSGDHVRHRLSRAGNRQINRTLHIMATVQLRNPTEGRAYYDRRKADGKTSMEAMRALKRRLSNIVYKTMLDDAIADATTGSRTGPGGQRGDDSDSSAAGSQPHTNSSDKPLPGPDTTNRRTRLPAAS

SEQ ID NO: 117813 - protein, 326 aa, unidentified
MHIIGVDISRNTIDFHCYGHSVTADPVANNLKGFGQFQKWIRQQVSKTKEEVMIVMEHTGIYTYNIERFLHAKGWSYVKRPALDIKRSVGIQRGKSDRTDARMISKYGWMNKESLAPMEPVNDNRVNLQQLMSYREKLVTDRTAHQVRIKELQGQMGNKLCDQIRRSTQRMIKLLTIEIEKMEEAVKACLAKEASLQKNYELLITVSGIGFVTAVSLLITTENFTRFDNHRKFACYCGVAPFTHRSGTSIRGKTRISQLANKPIKSLLTMSALSAVRNDTELKAKYEQKCKEGKAKMSVLNIIRAKLIERVFSVINRQTPYLKAAA

SEQ ID NO: 117814 - protein, 392 aa, unidentified
MVVSVGIDVSKDKHDCFIVSSEDEVLADVFTIPNNMDGFRFLLQRIQDYTHAQDKIKVGLEATGHYSYNLLGFLLDNGLTTYVLNPLRTNLYRKSLSLRKTKTDRVDARTIASMLLSDVGLKPYTDTAYHNEELKSLTRYRFDKVKERAKLKSSIARLVCLLFPELEKLVPTLHMVSVYALLEEFPGAKQIAAAHLTRLKALLETTSKGRYKRDMALEIRGAARNSIGFPMPAKSLELQHTIRHIRELDNEIAEIEEQIQAIMDELNSPITTIPGLGFRMAAMILAEVGDFTRFDSPDKLLAYAGMSPSTYQSGQLKNCYPHMEKRGSRYLRYAIYNATKYVCHWEPTFAAYLAKKRAEGKHYNVALSHAAKKLVRLIFAMEKSRQPYCLAA

SEQ ID NO: 117815 - protein, 356 aa, unidentified
MIEINAAEIVIGIDTHKDIHAAVAMNGIGARLGATTIPTTPAGYKTLQAWAEAFGTIRAFGVEGTGSFGAGLSRFLQARGHTVMDVNRPNRQLRHQHGKSDSLDAESAARAVLSGQADTRPKTGTGAVEMIRHLKVARDTAVKTRTQAMVTLKALIVNAPAVLRQTLDALRGKMALIRHLAALRPGPMLSTVASAKTALRAIARRWLTLDSEIKAHDADLEALTTAQAPAMLKAPGIATGTTAEMLILVGDNPQRIRSEAAFAKLCGVCPVPASSGKSSRSRLNRGGNWQANASLYRVVIVRMRHHRPTLDYVRKRTAEGKTKREIIRCLKRFVAREIFGYLCRPQRTTNPTPEPT

SEQ ID NO: 117816 - protein, 367 aa, unidentified
MTSVRDRGVIHLGLDVHKNTISVGVLDPGDEVPRVDKISSDPDAVRHLIARFPDPARLRACYEAGPTGYELARQLHGLGVACEVIAPSLIPTAPGDRVKTDKRDCRRLARLYRAGELVAIRIPTVAEEAVRDLCRARADMIIDQTRARHRLGKFLLRHGRVWRDGDNWTLKHQAWIAAQRFDEPALNVTFDHYRATLDARVAAVTAIEADLVGWFTRPPFAGPVARLAAYRGITQMGALTLASEVCDWRRFPTAGSFMGFCGLVPSEYSSGERTRRGHITHAGNQHLRTQLVESAWAYKSRPAVGATIARRHQGLDPAVVARAWTAQQRLCGKFRRLDARKSSRNVVVTAVARELAGFVWAEMTADI

SEQ ID NO: 117817 - protein, 391 aa, unidentified
MTKRKTETVNDLSRCLDPLDMDATLIAVIEMSQSSWLVAGIVPGVERQPLKKLAIDEHALLKLLSRWRAEAEKKGHKITRVTVAFEAGHDGFWLARRLAALGIEVHVIHASSVAVTREHRRAKTDRLDTELLKRGFLGWLRGERGHCKMVAVPTLAEEDAKRPSRERETLVGEASRIITRLKAAFVRLGIRSFNPKLKAAAERLGTLRTPEGEPIPPNTLAALKRDLERHQIVKRQIREIEQTRLEHLAQAPAKGPNAMVLLLARVVGIGVETADMLVQEVLSRNMRDRRAVARYAGLTGSPDESGAKRREKGLARSGNARVRRGMIQLAWRFLLFQKDSALAEWYRQRTANAPSTRKTFVVALARKLLIALWHLARDGVVPEGVRLRPAA

SEQ ID NO: 117818 - protein, 469 aa, unidentified
MKKDNTKISHVQSISKLKTGQALFTAMHTSAIGIDVHESKMVACYQYCNSGDSNIYTEHLETKTKFIDIKHLVDWICKKSPDVVVFESTGVYWMSLYDELERRGFSSDKVAVLNARDVKAVRGRKTDWADAARLTELGRSGCYKASFIPPKPIRQLRVMCRALYNIKKDIQKTKNRMHKYLTGVGFRASQVFSNVRGKAATAIIDAVIGGARGDALLEIIKKEGYRLKASTTEIYEALDGDRESAVWFLISQTKRHLSYLEKKYEELLNQIRIMAEPYKPTIDLLMSIPGVKEIGAITILSEIGDDLSSFKSIKCFTSWIGICPGNSESAGKKYSGRCTKGNKYLKRVLIEIANAVGLSRKGYLYQLFQTFKERRGHKRAIVAIAHKIARIIFACIKNNSKYKEIENCNVLKDHRIKKLKLVTASLGEVNLKIANNLEITNKETNQRELIIDPSPDLSIVEMDDLSFIT

SEQ ID NO: 117819 - protein, 428 aa, unidentified
MNYNTQNAKIASITEKTLIVGIDVGSETHYARAFDWRNYEYTKKPLEFSNTEAGFQTFKAWMGDIAEKYGKTAVIPGMEPTGHYWFALGKFLQDSGMRPVHVNPHHVKKSKELDDNNPNKNDRKDPKTIAALVNEGRFSYPYIPTGIYAEIRSLSNLRFQTQEELTRIRNRLARWFAIYFPEYKDVYGDLKAVSGRMVLKEAPLPEDIRKLGVEGVDRIWRDAKLRGAGMKRAKTLVTAAEHSVGSTEAPEAARMELKNLLADMDVYTSRLEGLLLKIEEKLKEIPYVDKLIGIKGIGLATVSGFIAEVGDIGRFDNPKQLQKLAGYAVVANDSGKHNGESRISYRGRKRLRYVLYEAAISLIGKNAEFRAIHGYYRTRKENPLKKMQSVVAVACKVLRIFYTILTKGVDYDAGKLMGDIRRPQIQAA

SEQ ID NO: 117820 - protein, 306 aa, unidentified
MKIIGCDFHPGYQQIAMLDLVTGEMVEKALSHERKEEVRAFYAGLEGSVRVGIEASGQSQWFERMLAELGHEVWIGDAAKIRASCERKQKTDRRDAELLLRLLAENRFPRIWVPTAAERDDRQLLLHRHKLVRMRTQVKNQLQALALNQGVQRKGKLWSETGRKQLELLPLLPWASRRRAELLQLLDRLEASITELDRAVAEQAQARPAARRLMTHPGVGPVTALAFTLTMGPAERFSRGKQVASYLGLIPSEHSSRGRQQRLGHISKQGNPFLRDCWWKRRRVRCGMSRRCVAPINDWPSGSVVG

SEQ ID NO: 117821 - protein, 343 aa, unidentified
MKLSHVGVDLAKNVFQLHGIDRSGKAVWRRRLRRHQWLSALIKATDTSCVIGMEACTSAHHWARQLQAHGYEVRLIPPQFVKPYVKSNKNDANDAEAICEAMSRPCMRFVAVKSVEQQDIQATHRIRAELKDQRNAKTNRVRGLVAEYGLVAPPTLLALRRAIPDWLEDAENGLTDYFRSLLHGLWGDLLVLDDRIKELDKQIEQLANSNQITRRLQQLRGVGPMVATALVATVGTGEQYRKGRQMAAALGLTPRPNSSGDKHRLFGISKRGDACLQTLLIHGARAVVSQARQRDDQLSRWVTDIAKRSHPNVAAVALANKTARMAWAMLRNKTDYDPGLATR

SEQ ID NO: 117822 - protein, 364 aa, unidentified
MNSVCNNTELSSHEGIRDQFNGRTGVIKLGIDVHQEFYTVVMEEGGSNPKPPQRFRKEAFLHWATKLKKQGGEVHAVYEACGFGFGLQRDLNALGIECYVVCPQKLDEHNRRVKTDSLDAKALCLKLDRFVEGNRDALALVRVPSEEEEQVRAIHRQREQLVKARKRLEAQGRSLMVNHGIEPVQNWWKPRTFAALPVPGWLKELLSNSQPILVALQEKIRLLTIQLQGAAGPDQARGLGALSSVLIDREIGNWHRFHNRRQVGSYTGLCPGEHSSGNTRLQSCVTKHGNPRLRAALVETAWRLVRFQPNYKPIRKWNEILRKGALATGAARKKAIVAVARQLAVDLWRIHTGRVSAEQLGLIN

SEQ ID NO: 117823 - protein, 359 aa, unidentified
MQTQRKELNFEGQNIFVGIDVHLKSWNISIYTEHQYHKTFTQPPNAETLSKYLKLNFPNAIYNSVYEAGFSGLHAHYELTNLGINNIVTNPVDVPTTDKEKRRKTDKVDSSKLARSLRSKDLKGIYIPSQDILEDRSFIRVRKSIVNDQCSLKNRLKSTLYFYGVEFPVEFQKSSTHWSNRFMVWLKTVQLKTKSGNMALAILIKEAELLRALLLEVDKELKGLSITDKYAKSMELIRSVPGVGLITGMLFLSEIDTIKRFENNDKFAGMIGIVPDCHSSGDNKQIGEITPRRHVHLRSGLIESSWIAIRIDPALSKAFSDYCKRMEPNKAIIRIARKLSNRIYFVLKNEKKYETRIVK

SEQ ID NO: 117824 - protein, 395 aa, unidentified
MFIVGIDIAKRSHEAIIIAEDGQVVRKAFSFRNNCTGYNLLLEQVRRLTLVKSQIVFAMESTAHYWLALYARLLKDGYAVMVLNPIQSHSLRELYIRKAKTDARDSLIIADLVRFGRCKASNVPQDRILALRELCRSRAYLVDMAADLKRKLIALLDRIFPEYESLFDSVFSKASIAVLSKYSTPQKVKNANLRKLTDILMESSNGHFGEWKAHQLKEAACSSFGIDDSGGVYSTLLGMFLEQILSLTAQADSLEKQISVFFQEFNNPLTSIPGVGTVLAATILSEIGDITRFSSADKLLAYAGLDPSVKQSGEFKSNQNRMSKRGSPYLRRAIWLASTVAVHRDPMFQTYYEKKISEGLHYMNVIGHVSRKMTAVIFAVLRDGQPYQPILQSAG

SEQ ID NO: 117825 - protein, 338 aa, unidentified
MTQHKIIGIDLAKNIFFLFEINHKGKNLSRKKLQRSKLLNYVVSQSPCVIAMEACSGAHYWAREFVKFGHEVLLYPPQHVKSQRRKQKNDYNDAEAIAELALYQRHPAVPHKSIEQQDIQSLIRMRRLCVTERTRLINQVRGFIAEYGIVLPKGKTSFRKAIPEVLEDVENQLSPILRELLSRQYERYLYIDEQISWFEDKLNQTIKQFDNAKRLMSIPGFGPLTSQAVVVWLGSGKQFKTGRDASAAMGLVPRQDTTGGNVVLLGITKQGNTYIRSLLVHGARAALRRAKFKSDKLSKWMLDLQERRGPNRAAVALANKLMRIAWAVIAKNEEYQPA

SEQ ID NO: 117826 - protein, 350 aa, unidentified
MQYIAFDSHKRYTQASVASMTGTICREARIAHEPEAIAAFLGEFDQGSPVAVESVGNWYWIVDEIEKAGMVPHLVHPRKAKMMMGMINKTDKLDARGINRLQQNGTLPVVWIPPGDLRDKRDLPRTRMVLVRQRTRLKNRIHATLAKYALSPTGVSDAFGKRGREILRERIRKLPPETRFVTERLIKEISSLEASVEALEIRMKTLFAKTPEVKLLMTLPGVGFILATVIAMEIGEVTRFPAANRLASYAGTTPRVYSSGGKTRFGTLRTDVNQYLKWAFVEAANSICVHAHRCPDRHVVRLYRRIQTRKGHQKAVGALARHLAEASFWVLRKGEPYREPTRPAVSSTEG

SEQ ID NO: 117827 - protein, 344 aa, unidentified
MPHYVGLDVSQKTTAICIVDEQGRRLWQGACITEPGAIAARVFRHAGVVDVKVGVETGSMTPWLVHGLRSAGLDVECLDARRVKAALQMRLNKTDENDAEGLAQIMRTGWYRPVHVKSFDAHRARCLLGARAQLVGMRTQLSNMIRGVLKTFGLLPGAGRGLRFDRRVEELLEGAPEIGFIVRPLLATWRQLREQITIFDKAVQQRVRADPICRLLMTVPGIGALSSLMYVSTVENPGRFARSRAVGAHLGLTPRRYQSGETDRSGRISRCGDGLARTFMYEAAVVILHRVKRSLHLKDWAVAIEQRSGPGKARVALARKLSVILHSVWRSGQPFRWAPSTIAA

SEQ ID NO: 117828 - protein, 341 aa, unidentified
MQVITIGIDLAKNVFQVHGVDANDKVVFNKPLRRSQVLPFFAKLGPCLIGMEACASAHYWGRELKKLKHNVRLMPAKDVKAYVKRNKNDAVDSAACCEAVGRPTVRTVPVKTPEQQAQLMQHRVRDLLIRQRTQAINALRSHLGELGIVAPQGYEGLRVLLAIVADSSDTRLPEHARASLSALVAQIASCQAQIGAIDKLLLAQHRKNADSKRLETIPSIGVLGASAIVATVPDATIFKRGRDFAAWIGIVSREDSTGGKQRLGPISKQGDRYLRRILIVGAFAVLRQARAHPEKYPWVTQLLARKPAKVVAVAIANKTARIAWAVLTKKEIYRVQTTVAA

SEQ ID NO: 117829 - protein, 342 aa, unidentified
MTIVMIGIDLGKNSCSLAGLDESGAVVLRRRMQPATIVSFAAKQPHCTIAMEACCGAHYLGRLLSAQGHTVKLMAPEYVRPYVKAQKNDDRDAEAIAEAATRPTMRFVDLKTQEQLDIQSLHRVRSRLVGARTSLINQLRAVLLERGMTAPQGRRKFEQAIEGLLNDPERLPEGRVRQLVVDMREEWLGLDARIGNLDTEFVALARADETARRLTSIPGIGALNATALLAAAGNAEGFDHARDFGAWLGLVPRQHTTGGRPRLLGISKRGNTYLRTLLIHGARAALPTLEKTDSALGQWLRDLLARRHRNAVVVALANKMARIVWALIRHKAVFSLKPAIVA

SEQ ID NO: 117830 - protein, 344 aa, unidentified
MIVIGADTHKRSHTVAAVDAATGRLLGEQTTAARQRSFDALLIWARGHGGERVWAIEDCRHVSGALERFLLARGEAVVRVAPKLTAGARSSARELGKSDVIDAVAIARAALREGLDSLPVARLAGPELEVRLLVDHRERLIGQRTALINDLRWQLHDLWPETEIPPRALIRAHWQDRVAGRLARAEQSVRVRIARDELRRIRELTRAINDLERELATLTSALAPQPRSASNRGALTAAKLIGEIAGADRFATDAKLARTAGSAPIPASSGQTHRHRLDRGGNRQLNSALHRLAITKGRLDPETIAYLARKQAEGKTRREAIRCLKRHLARRVWHLLQPDPSTTV

SEQ ID NO: 117831 - protein, 356 aa, unidentified
MQKVIKQAVGIDCGKEELVVSIANLDAIFEEKNVITFGVSNDVSGFEKLCQMIKKQQHDGIEAHLVVEATGVYHERLCYFLAENGLKISIILPNRAASFMRTLSIKTINDKISSAALAILGLQKKLDVWRVPEPTIYHLRQLSRERTSLLEDTTSMKNQIHALMHSAILAEGTLKRMQLRLEISQAQLAEIEQEMKLVIAGNKDLKQRFDNVCTIKGVGLITAVTVVAETNAFNLIRNQRQLVSYAGLDVVKKESGTSIKTPGRISHKGNVHLRKALHFPALAAVRYDDKMKDCYSNLLAKHNIKMKAAVAIQRKILVLIYTLWKNNEAYDVSKSAGKYLEQSKKTALTELDLVRS

SEQ ID NO: 117832 - protein, 350 aa, unidentified
MIIIGCDYHPSFQQIAFIDTDTGELQERRLQHREEAEKLYRDLAAQGMKVRVGMEASGHARWFERLLAELQFELWIGDAAEINTKRVRKQKTDRQDAQLILKLMLKDDFPQIWVPSWENRDLRQLLWHRHRMVQARTRIMNQLQAVALNEGLRCKKRLWREAGREQLEAFRLAPWASQRRRDLLELLDRLNPTIAELSQAIEKEVEKCPEARRLRTHPGVGSLTALAFVLIIGRADRFQCGKQIASYLGLVPLEKSSGNQRRLGHITKQGNSLLRFLLVEAAQVSVRSLPEWRSKYVHLTMRRGRKIAKVAMARKLAVRLYWMLRKEWDYEQLRKFGSYAGKPGNRDGVK

SEQ ID NO: 117833 - protein, 330 aa, unidentified
MQIYGIDLAMEKFDVSFLDGKGSEKHLIVNNKLGAITRFLKRVPTGSLLCAEHTGVYGNLLVFLCNHLEIPISLTSGYSIKHSLGLLKGKSDKLDAKRIREYGERFSDKLELAEYESDKLQELSELSVLRSQLVKERKMLETQQQSKKHNPYNSVSAHKQAEKVIAVFNKSISEIEEEILKIIESDQSLKRTFELSTSVKGIGPITTCELIIKTGNFKKIDTARKAASYAGVCPYPNSTGKMVKKDKVSHMSDKTLKTLLHLCAKSATQHNQAYRLYYEKKKQEGKPHYLILNNISNKLLRTLYSVITSGISYDPNYICIDPRLKEKKAA

SEQ ID NO: 117834 - protein, 314 aa, unidentified
MSDHNKVFVGIDVSKHSLDLACSHIPGGKTFDYNAVGLKKLLRLVKSHTPQLVCLEATGGYERALVDALHQHNFTVAVVNPRVIRDFARACNQLAKTDRIDARIIARYADRMDPRPTQPVPKNRRILLDLTARKRQVTGMIIQEKNRLGTTVNKDIRKMIQQAIRLYEKQLAAIQKQQRQLIDADEQSKAQARIIESVPGLGPATVATLIAELPELGKLNRKQIARLVGVAPTNRDSGTLRGKRTTGGGRTAVRNALFMPIVVAKQYNPTIKTFYDRLLDNGKPKMVALIAAMRKLLTILNTMLRNGTEWKNQQ

SEQ ID NO: 117835 - protein, 345 aa, unidentified
MDQQQQYVGLDVSLDATAICVIDDKGAVVWHGKYVSTPEAITAAVATHATTAVRVDLETGQLSNWLTLNLCRRGLPVVCLDARHAKAALSLQINKTDANDAFGLAQVVRTGWYREVAVKSMDAQALRMLLVARAQLVSQRQTIANTIRGLLKAFGLVVARGAKGLFAVRVRELLAGNDVLAAIIEPLLVVWHAVREQVATLDRQVLARARGDVAARHLMTVPGVAVVIALAYTSVIDDPVRFRRSASVGAYLGVTPNRYQSGEVDRQGHISKCGDGLLRAYLFEAATVLLSRHPCRSTLKTWGLALAKRIGTRRAKVAVGRKLAVVMHRVWIDRSECRWAETAAA

SEQ ID NO: 117836 - protein, 336 aa, unidentified
MNYIGMDIHKQFTVAVVKDKEGNEIENGKFDNSKENFKKFLKVYRPEETKIVMESTSVWEPIYDMIEDMKYSIKLANPVKTRAIAEARIKTDKVDASTLADLNRANLVSESYIPTREVRMLRDIIRARKSLVQGKVKIKNKIQSILTKTGLRLPYKTLCKSSMDWIVEEIETKHFNMKSVTVSYINMLEHYNLEIKKIDEKLSEIAMKDNRVQLLKTIPGIGNTIALTIIAEVGDINRFNSSQKLCSYAGLVPSIKQSANTLKFGRLIKQSNKDLKTCFIEASWVLVKTKEANRFKWFYGNLSMKKGKQKAICAVARKLCSVVYAMLKKNQEFMLL

SEQ ID NO: 117837 - protein, 338 aa, unidentified
MKLYGAIDLHSNNNVTVLIDELDQVVYEKRLPNDLAVIAQQLSAYQDSLQGIVVESTYNWYWLVDGLMDQGHKLHLANTAAIQQYQGLKYTDDKSDARWLAHILRLGVLPQGYIYPKQERAVRDLLRKRSQLVRQRTTNILSIQNLLTRNTGSSMSSNRIKTLDAKQVDDLLVNPDLALAVKANLAMMQCADQQIDRLERTIKDRIKLREEFSFLKTVPGIGQTLALTIMLETGDIGRFAGVGNYASYCRCVGSQKISNGKKKGKGNTKNGNKYLSWAYLEAANFAIRYCARIKSFYQRKKAKSHGVVALKAVAHKLCRACYYIMKNRIAFDVAKVFA

SEQ ID NO: 117838 - protein, 356 aa, unidentified
MTNVKTNFVEQTIYVGLDVHKRSWNAALYLNDQYLRNVHQPPSPQALYKFLQTNYPGADYVCAYEGGKFGYWIQRQLRSRGVECIVVNPADIPATHKDEVSKTDARDARGIAMALQCGQLRGIYIPPIQQESDRSLVRHRKKIWRDLVRCKNRIKGFLDYTGVELPDKFSNSNWSKNFLKWLWEIKFEYSSSRTTLDYMIREAELLRKELLSISNDIRKLMRSKEYKKLYYLLRTITGIGPLTAALLITEIGDMKRFPSFYELNSFIGLLPSEHSSGERELKGRLTIRRHRQLRSDLIECAWTAKRTDPALSLFYSEQLKRGKEPKLIIVKIARKLLSRIRYVWLTEKAYERGIAK

SEQ ID NO: 117839 - protein, 415 aa, unidentified
MSETFSPMSPPGALAYVVGIDIGMESCLMCCLTMEKRQVIKPSQFSNEAAGFEWLFAHLEALKSTPDQILIGLEATSRYGENLYYALRSKGYRVCLLHPGQIHAFAQQRGLRAKTDRLDATTIARALLSEEARFGYVPSDQVVTYRELTRLQQQLTEEIVRYKNEIHALLVVLFPEFTQVFADPSRPSALTVLKAYPSAQAMREADPTALSQLLREQCPGRYGRKTADKLVQLAKSSVSSGVGVQGRSSSMRILCDQLEHTQNNLTLLQQEIERLLGTDPKAKGVLAISELGPMTVAVLRAELGDLDRFARMDQVVAYAGLDLQVKQSGKWKGQTKLSKRGSGHVRRILYLAALRSIRLPTSPFGTFYHRLVDRGLKKGMAVIAVMRKLLIVAAHLIQTQEDYDASKVGVQALRA

SEQ ID NO: 117840 - protein, 350 aa, unidentified
MLIIGCDFHSRFQQVAMLDPQTGEVIERRLEHENGEARKFYAGLATPARVGMEATGYAQWFERMLAEQGHQLWVGDAAEIRAAMVRKQKTDSRDACHILDLLLKDKFPRIWIPSTEERDVRQLLRHRYKLVCLRTSLKNQLHAMAMGQGICRKKKLWTAVGRKELQGLSLGPWASRRRQQLLDLLDQLEPVLEELDRAVIQEAEKRPAAVRLMTQSGVGPVTALAFVLTIGPVERFPKSRKLVSYLGLNPSEESSGGRQRLGAISKQGNSMLRFLLVEAAQTASIYDPELRRDYQRLKFRRGRGVAKVAIARKLAVRLYWKLREQPSQVPPAPMQGSPASPVVGESLSCF

SEQ ID NO: 117841 - protein, 417 aa, unidentified
MHYIGIDIAKRFHYVGVRDQDGSPVGKAWRFDNNRGGFDGLAKRLRTLGCAPGDDSVVAMEATGSYWMSLYSYLADAGWRVAVVNPALVAAFRKADTMRRTKTDAVDCFLVAEYARFKRVRPSERDPEDEEGLKQLTRYRSWLVRERTALKNKVGDLVGRLFPELPKVFGGDLFAATPLALLKAYGTPARIARTDIRSLTKTVGEASRGAHGRERAELVKAAARDSVGITLAADALAFELGSAVGTLRHLDGEISKVEREIAERLGRTSGRWLETIPGVGPTYAAVIAGEIGDPSRFESPKKLIAYAGIDPVVKDSGDSTGGSHHMSKTGSPQLRWALIEAADSVRKHDPYFGDYYDKMVGENRKHHTVALSGVARKLAGLCLALMREGRAYEPRPSVQSSKSPGPGSPKPGGTATL

SEQ ID NO: 117842 - protein, 355 aa, unidentified
MIIIGVDFHPEFQQIALVHTNTGEFQEKRLLHREEAEQFYRGVAAAGQQVRVGMEASGHARWFERLLSELQFELWIGDAAEIQSKRVRKQKTDRQDAQLILKLMLKDDFPQIWVPSGENRDLRQLLWHRHRLVQARTRIMNQLQAMALNEGLRCKKRLWRERGRQQLEAYPLAAWASRRRRDLLALLDRLNPTIAELSQAVEQEAEKSPAAQRLMTHPGVGALTALAFVLIIGQAERFQCGKQIASYLGLVPLEKSSGNRRRLGHITKQGSSMVRFLLVEAAQVTVRSLPDWRSKYVHLMMRRGRKIAKVAMARRLAVVLYWMWRKEWNYEQSKSSVRTRARSEQAMVCSRTPSN

SEQ ID NO: 117843 - protein, 354 aa, unidentified
MIMIGADYHPAFQQIAFVDTETGELQERRLEQPEGAEKFYRELAAQGKRVRVGMEASGHARWFERLLAELNIELWIGDAGEIRRKRERKQKTDRQDAQHILRLLLKDDFPRIWVPSWENRDLRQLLWHRHRMVQARTRMMNQLQAVALNEGLRCKKKLWREAGRKQLEAFRLAPWASRRRQDLLELLDRLNPRIAALSQAIEQEVEKCPQAQRLMTHPGVGPLTALAFVLIIERADRFQCGKQIASYLGLVPLEDSSGNRRRLGHITKQGNSLLRFLLVEAGQVTVRSLPEWRSKYVHLTMRRGRKIAKVAMARKLAVRLYWMMRQGWDYEQLKKFGSHSGQPGHRHGVKSNIE

SEQ ID NO: 117844 - protein, 384 aa, unidentified
MEKSSTLYVGLDVHKDSIDIATADAGRDGEVRHVGGIGGDLVGLDKALRKLLSKGSRLHVIYEAGPCGFVIWRHLSAKGIECEVVAPSSIPRRSGDRVKTDRRDAMMLARLSRSGELSAVRVPGAGDEAVRDLARSREDAVRECRNARHRLKALLLRNGIAYAGKSAWTAAHLRWLATLKLEHAAQQIAFQEYLHSITQATARIARLELAMRDTLAQWSLKPLVQALQALRGVQLIAAMTLVAELQDFLRFDSPRQLMGYLGLVPGEHSSGPKRRQGSITKAGNSAARRMLVEVAWHYQHSPRVSPIIAARHDQLPTEVTDIAWKAQLRLNAKFKRLVARRVLKNKAVVAVARELTGFVWAIAREVQTSGWPGIETEPAVGAAA

SEQ ID NO: 117845 - protein, 411 aa, unidentified
MEIVHARCCGLDVHKKSIVACVLISQPDGLIERQVRTFKTMTGDLLELADWLNSLGVTHVALESTGVYWRPVFNILEDEERTLLLVNPQHMRAVPGKKTDVRDSEWLADLLRHGLLRASFIPPAPIRAIRELTRYRKTLVQERVDEANRLQKTLEGANIKLAAVASDVLGVSGRAMLAAVLDGERDPDVLAELARGALRAKLPQLRQALNGRVQPHHLVLISQLLAHIDFLEQAIAQVQVEIERCLPSFENALEVLQTIPGIKAVAAAAILAELGPDMSRFPTAGHLVSWAGLCPSTKESAGKRMKGPVNRGNVWLRGIMGEVAWASVKKRATYFYAQFNRVARRRGRNKAVVAVAHSLLVVVYHVLKTGKPYVELGVDYFNQLDATRIEHHHVRRLEQLGYNVTLTPLAA

SEQ ID NO: 117846 - protein, 330 aa, unidentified
MYQLGIDVSKKTLDVCLMREGVRGRLKTKKVKNDFKAVHIITEWLEHHNCSLSDAHIIMEATGVYHELLATGLHLAGVKVSLANPHRTREFARGMDILTKTDKVDAWVLACYGALKQPEAWTPPSEEIRHLSALLKRRDLLVSDATREKNRLEKYRATHTPEAIIISAESMLTRLNDELAKIELMLKQHIEKHIVLKEDYELLTSIKSVGPQLGLNMLVILRSHDFRTAEQVAAFLGVAPVEKRSGTSVRGRSRMSKIGPPEIRAKLYLAALCGLRFNIAMKSMYERLCLNGKAKMVAIGALMRKLIHWCFGVLKSRQPFDTNYINMGRM

SEQ ID NO: 117847 - protein, 347 aa, unidentified
MENSTTIAVDLAKAFFQISISTVPGRVNERMRLTRQKFVSFLATRPPTEIVMEACGSAHFWARTARGLGHQPVLLPAHYTKKYVLRDKHDRADADAILEARRREAIRPVPIKTVEQQTIAFFHRMRSSWIQTRTARINAIRAILRELGKVIPVGPRNVVPHLPELMADIPEALHPVLLAMADEIRQLESSIKDADRQLKALLVDSDGARSLLSVSGIGLITCSAMIAFVGSPSRFRSCRAFSSYLGITPKEHSSGAKRRLGSINKEGDTYLRTLLIHGARSVLVAAKRSKNPDRLQAWALRVQERRGHNRAAVALSNKIARIAWAVWSKGTLYQPRPAAARPAAATN

SEQ ID NO: 117848 - protein, 491 aa, unidentified
MAKPKQSTFQRLTSGKLNRKQRKELGRRLYSDHPGLEVVNRHAAGIDVGNKSHFVAVAPGCDPDPVREFGSWTADLHRMADWLQSLGIKSVVMQSTGVYWIAVYEVLEKRGFQVWLTNARDTKNLPGRKSDVQEGQWLLKLHTYGLLRNSFRPPQAIRSLRTIWRLRDRHVQDAGREIQHMQKALTTMNVQLANTISDVSGLTGLAIIRAILKGERDPYKLAHMKHYRIQASEEEIARSLEGNWQEDVLFELQQAVDRYDFCQQQMGECDRQLQRYLAELPSRSIAPPEEPAPGAAATSSSGAVAAQRKRKRKKAGGKPRKNEPKFDLQEELTRICGVDLTTIDGVDVMTVQTWVSEVGVDMTPWATEDHLVSHLKLAPHRQISGGKVIKHEHSKTTNRVAAGLRMAASTLVHSESYLGARFRYLRGRLGPAKAIKAMAAHLARLIYRMLTRGQAWVDRGAQDYQDRRQQREKVWLQRKAAALGFRLMPEA

SEQ ID NO: 117849 - protein, 366 aa, unidentified
MKQQHNRSEFTIGLDLGERRHRFCVLDGKGEVVEEGSLSNDRACLARLTARYCGALAVMEAGAHSPWISRYVEGLGWQVIVSNPRKVRAIYQHERKSDQRDALMLARIGRMDRALLYPVRHGSEEAQQDLLRIKLRDSLVRARVALINSVRFSLKSLGYPVSNPSSERFHKVAMEGLPEVVRQMIAPSVQALAELSARIAMLEREIRVLARTKYPQTLLLQQIPGVGAITALYFVLKIEDPHRFKNVRDVGAYTGLCPRRDQSGQSDPQLRISKRGDAYLRRLLVSAAQYILGPFGPQSALREYGLMLAADGTTRGRKRAVVAVARKLAVLLLSLWKNRSHYEAFPHWQTIEDKRSGTIAMHRVEA

SEQ ID NO: 117850 - protein, 326 aa, unidentified
MNIVFLGIDLAKNVFQLCGLNQAGKPVYTKRTGRKELLQTLANIPACLIGIEASTGAFYWQREFEKLGHKVKVISPQYVKPFVRGQKNDGNDAQAIAVALMQPTMQFVPPKSPEQQDIQALHRARRRIVNHRTATVCQIRGLLLDRGIPIGSAVSRARRAIPLILEDAENGLSSRMRRTIAELYDLFNDLGRRIHFFDKEIETVFRQSEACQRIAKVKSIGPKTATAVVTAIGKGTEFKNGRHFTAWLGLVPRQHSSGDKHLRTLFIHGARAVVRAATNNNDGHMNQWVNQLKERRGFNKTTVAVANKNARIIWSMLRNETGYQVV

SEQ ID NO: 117851 - protein, 318 aa, unidentified
MNTKINQSINVGVDAGKAQLDIHIRPLDLFFSVENNDKGIKKALKTIKSHSPERIVIEATGRLEMPFVLACAEAQLPIVRANPVHIKRFAGAIGRRAKNDRLDAELIAHYGEAIKPALTVIKAKNIRLMSDLVIRRNQLLSMQTMEKNRIQILPVSLHSTIKPLLTTIKNQITKLEEKLVKLIEDSPEYQNKNTILQSVPGIGNIAAASIISNVPELGYITNKQAASLIGVAPITRESGRYKGKRVIQGGRAQVRTVLYMAMMSAMQCNPVFKTTYSRLLEAGKPKKVAIIACVRKMVVILNSMLRDGVMWDENIAKI

SEQ ID NO: 117852 - protein, 412 aa, unidentified
MDVVKLRCAGLDVHKKTVVACVRLPGPRRGERRGETKTFTTTMRGFGELCDWLQTHEVTDAAMESTGVYWRPVYAVLEGTVEVVLVNARHVKMVPGRKTDVKDCEWLAQLLECGLLRGSFVPPSSVRDLRDLTRLRKALIRERSHHVNRIAKTLELAQIKLGSVITDIMGKTGRAILHALSRGVEDPDRLAAYAQGNVRKKRAALREALVGRMTPHYAFLLQQHLSLIEALAGHIATLDARIEAAMAPWATELTLLQTMPGIAQRAAEAILAETGVDMTQFPTAGHLASWARLCPGNHQSAGTRYNATTGKGATWLRATLQEAAWAAARSRNSYYRALYHRIKSRRGAKKAIVAVQHAMLIALWHILKQRVAHHDLGVGYFDRRHTDRVRRHHVRRLEHLGYNVVLVPRAAA

SEQ ID NO: 117853 - protein, 394 aa, unidentified
MPQQRKPNDLSRSLIALDMDTTLIAVVELSLSSWLVAGIVPGIERQPLKKLKTDENALLALFNRWRDEAVRSGHKISRIAVAFEAGRDGFWLARWLKARGIEAHVIHASSVAVSREHRRAKTDRLDTELLKRAFVGWLRGERDHCKTAAIPSLREEDAKRPSRERESLVGEQSRLVNRMKATLIRLGIRAFNPKLRYAEQRLETLRTPEGEPIPANTLAELKRDMQRRRFICGQIRSIEQERLERLERTPDTEPHAMVRLLARVTGIGIETADLLVHEVLLRNMRDRRAVARYGGLTGSPDRSGGTNREKGMARSGNARVRRGMIQLAWRFLLFQKDSALVQWYRRRTEHSPKARKTMIVALARKLLIALWRLAREGVVPEGVAMRPGVMNTSY

SEQ ID NO: 117854 - protein, 291 aa, unidentified
MTNDSIRYVGLDVHKRVVEACFVDHTGKIVQRESFALNRRTLGLFAAKLLRPADHVALEATTNCWAVADALRPHVARVVVSNPMATKAIAQAKVKTDKVDACTLARLLWMDAVPTAHKISRDLRDLRDIMRARLRLVQRRTLCLMNIHSIGQKLNCWSELSIDHRRTPDELSGAHTLWVKALYRQIDLLEAQIRELEQFLQPILLPNDDIQRLLWVPGLGKITVFSIYLEIDGIDRFESDKRFVSYCRLVPGARNSNRTVRHRSGSKDGNKYLKIAFSDAAVHAIRDVHGI

SEQ ID NO: 117855 - protein, 428 aa, unidentified
MKAFSAVPSNPALVAIDIAKSRHEALLETAQGQRRRLVIGNTLPEFKKFADELQPHHPCEIAIEPTGDYHRPLANFLLREGHHVHFVSSIATSRTREALFNSWDKNDPKDAQVILHLLKNGTTQVFSDPLECGNHDLQELLGTYRQVVDRKTRVYHSLQTHYLPLYFPEAQPFISTPRAEWFLEVLHEAPCPSAVLKRSKKAFVKKFTAAGGRITLRQRLVGDYYEAAKESVGIPVVADSWAVQMFQLTVEQYIRLTKQRRKLEELIHAQLESNTDYQLLRTIPGIGPIIALTVLAEGGDLRRFSHYRKFLNYCGLALSTSQSGTHRGVPQLSKRGNARLRCAFWMAAKAAIMQRQNGFRRKYDAYVRSNPLDPDLKRKAYTAVAAKVARVAFGLIKSGKEYRRFFEAAVPGGRIPSQGPLRRSRPRR

SEQ ID NO: 117856 - protein, 372 aa, unidentified
MNYNTVYVGMDVHKESFTLCSCKYEDEKASHYQRTPASYKNVLRYLAFLRTIYGEYTRFVCGYEAGCLGYSLYHQLENFNVECVILAPTTMLEQRSKRRIKTDKRDAEIIARSLAQHNYSPVHIPTKMDNQTKEFIRMRDDHKAELKKIKQQILSFCLRQGYQYDGSGNWTAKHVKWLRSLKPAGLYKEILDEYLLTYTILTDKLNRLDQRIEELASKEEYKESVSKLTCFLGIKIHTALSVIVEVGDFQRFVSARKFAGYLGLVPGQHSSGDDRNGLGITKAGNTHVRRLLVESAQSYTRGKIGYKSRVLRSRQAGNSPQVINYADRANERLRRRYYKMVLKDGKKYNIAKTAIARELACFIWGMMTDNIY

SEQ ID NO: 117857 - protein, 386 aa, unidentified
MIEAVIERCAGIDVGKKFLVVCVMTGPLEAEPKIEIRRFGTFVAELELLRDWLIRERCSHAVMESTGSYWKPAFNVLENSVEVVLANAYDVQNRRGHKTDPNDSRWLAHLLRHGMIRPSFIPERAVRELRDLTRRRRQLVGERARERNRIQKVLEDANIKLGDVLSDVLGLSGRLMINALLEGVMQAEEIAQLAQRKAKQKIPDLIAALQRHRLTDHHRFLLRHALRHLDFLEVEIEALNIEIRSRLSTEQFKKQHALLQSIPGIKEESSAAILAEVGPNMAQFPSGAHLASWAGLCPGNHESAGIRKTGRTNRGNNWLRSVLTQCAWAASNRKDSMLRSFYSRLSPRCGRKRAIVALGHRLLRVIYYVLLRSQLYQEANTRFISA

SEQ ID NO: 117858 - protein, 352 aa, unidentified
MLYAGLDLSRQRLDVHVLDEEGRTVEVTAATPETFGLRELVARISRYGEEVSAVIESMNGARFVHDQLELAGWDVEIADAVKVKGLAPLAAKTDKIDARVLAELGRRDLVPAIWLPDPTVRAERERARFRLHLVRHRTALKNRIHATLIAFGHPVPVSDLFGAKGRELLASLAIPEPWATTLLRSLHFVDELDAQIAACEAELRAAGADHPYVPLLMSVPGIAWVLGYTIAAEIGDISRFATPKKLAGYTGLCPIVRQSGRRDDRGPLAKNGPKYLRWALIEAATHAARHPAYRDRYEHTKQRLGRQRGSKVARVELARELSTAIWHMLTKKERFNPGRSPVTALVASTTLD

SEQ ID NO: 117859 - protein, 364 aa, unidentified
MKRKVYVGMDVHKETIQIAYLTSNSKEILKEQQIKHNEVQIKKFIKKLKTEWNEIYCCYEAGVTGYPLYRYLKSLGVNCILVAPGKIPRQNTDKIKTDKRDAIKLARLMRSGELESIHVPSEEDEAVRDYLRSRDSLRLDLGRNRQRLMKFLLRKDIKYSTTKYWTVSHYKWLNNLHFNNEILQETFNDYYSRVRVQEENLKAMDKKIQEIAESEPYREKVGILRCFRGVDYLTAMFLLCEVNYFKRFKTAGSFMSFLGLVPGEYSSGSKRKQTGITKTGSPRLRRILTEAAWQHRFPGTGSKIITARRSGQPALVVALAEKASLRLHKKFRNLQLRGKTPQVMITAVSRELSGFLWAAMNLVA

SEQ ID NO: 117860 - protein, 359 aa, unidentified
MINVGIDVHKRICQACLKDGQGTIIEEFRFPNNHEGASRLATIIKKHGEAKVALESTGNLWVKLYDRLDEEESIDVILTNPKKTRIIAEAKIKTDKIDARILADLVRADLVARSYVPPKEIRMQRALLRERISLVESRTMIKNRIHNLLDKYDLQPHYTDIFGKHGREWLRSLKLPSIDQTILEVNLQRLEELEAHIDAFTSKIAQEAYDKPEVKLLMGFTGVDYYSAMLLANEIGDVTRFPSAKKLVRYAGLAPATRQSADKTVHGHIVKEGNKRIRWILVEAAQHASRHDPRLRGFYLRLMKRRGYQRAIVAVARKMLVSMYHVLSKNEAYHGERTELLERKLKRLEWKATHSLQAI

SEQ ID NO: 117861 - protein, 405 aa, unidentified
MEFVVALDVSIGKSYSVIYQDQRCLYEEEIAHNQLGFQQLFDHIQTLPGSVTVVFEATGIYSKPVETFCQRNALRYCILNPLEAKKQLELGTLRSWKTDKHDAHLLAQSHSLHRREENQTQSIIYQHLRDLSRFYQEIEEEIKRMRMYLHNALQLSFPELEQFFSSRITPYALSLIALFPHPDLVLRSSITKIKNQLINHTLKNISQNRAKQKAVEIMSYAHSSYPAVSIESVQTQKVRYYARQLLHLLEEKERVSKELIEEAKNLPEFDLFLSVPGIGEISAALVMGELGDLSRFSNHKKVNAFVGIDIRRYQSGKYHGQDHINKRGNPKGRKILYLIIRNMIRQQKAAPNHIVEYYYKLKKQPTPKKDKVAVVACMNKLIKCMYSMARNHTEYDYSHAVSMDQ

SEQ ID NO: 117862 - protein, 392 aa, unidentified
MYIVGIDIGKNHHEASIVSPEGKQIGPSLRFATTHKGADSLMSFIFKNIGNSPCVFGMEATGHYWYPIYSFLKAKGYTIYVINPIQSDSLRKMYIRQTKNDSIDSFLIAEVIRFGQFGTTSMADENILAMRQLCRYRDSVISSRTEIKLRIGTIMEQIFPEYEKQFSSLWMSTSMGILEKYLTPENIENAPIDELFKIIKDKSHNRLTRAKAISIKEAAADTFGIKIAQDAFSFQLKQLIDRMNFLDKQIEALDCQILEYYEKFDCYLHTIPGIGMIAAATILAEIGDINRFKSSSALVAFAGIDPTVRQSGEFSSTHNHMSKRGSPYLRHAIFLAATTCSFHNSPLNAYYKKKRDQGKHHLTATGAVARKLTTVIYAVLRDSKPYEPKKFC

SEQ ID NO: 117863 - protein, 340 aa, unidentified
MNNLNTIAIDLVKNVFQVGLFSPQHIMMSNKQFSRQKLTSFMAKQEKAIVVMEACYSSHYWARLFMKMRHIVHLLPAQHVKPFVRGNKNDRNDSIAIAEASWRPNIKFVPLKSIEQQDIQALHRIRDKLISRRTSIINQTRGLLSEYGVVIPQGLKSFTQHISALIDPEDERITVRMKQQLRAVKEEYDQLSRRSKTIETELKQYAKQNTLCQRLMTLPGVGVLNVTALYAAIGNGSQFENPRALSVWLGVTPKQYASGEKSFYGGITKRGNHYLRKQLIHGARSVMHRIKAKDDKLSVWVKQLVERRGKNKAAVALANRLARLAWILLHRNENYHSVAS

SEQ ID NO: 117864 - protein, 340 aa, unidentified
MTVIIGIDPHKASHTAVAIGCDEQQLAKIRVRATCQQTAKLLAWAQPLGERTWAVESAGGLGYLLSQQLVEAGEHVLDVPATLASRVRVLGTGRSNKNDPNDALAVAIAALRSPGLRSVEPANHGEVLRLLGKRNHDIGRLRNIVVSRLHAALANLSPGGIAKELNASDAVRLLGDFNPKTPVEQTRYDLALELLDDMRRLDVQLKESHKRIKTAVQASGTTLTELYGVGPILACELIGYTGDVRRFTTRDKFASYAGVAPIELSSGGRIVHRLSRRGNRQLNHAIHMVAICQIRQTNSEGRAYFERKVAEGKTKREAIRSLKRHVANAVYRQLLIDANK

SEQ ID NO: 117865 - protein, 309 aa, unidentified
MEHFVGIDVAKDRLDVHIRPSGEAFTVARDSQGLAMLVKRLQALAPALVVMEATGGYEMVVASALGAAQLPLAVVNPRQIRDFARATGKLAKTDRTDAAANAHFAEAVRPAARPIADAQAQALGELVARRRQVIEMIIAERHRRRMASQRRVIRAIERHLALLQAELSELEGDIDDAIRKSPAWQADADLLASVPGVGKATLRTLIAELPELGHLNRRKIAALVGVAPINRDSGTLRGRRTIAGGRPAVRTALYMAALVASRANPVIAAYYAKLRAAGKTGKQALVACMRRLVVILNAILRDRKPWQPA

SEQ ID NO: 117866 - protein, 423 aa, unidentified
MKNTAARKLKQVPEGYLIIGVDPHKRKHAAVAITQDFTTRDKFKFDNTREGLETMLRRARMAMVKSGCRGIMFAIETGGHYWRNVAYFLDEQGVPFRFINQFTLKRRREGKDLNRRKNDYRDSEVAAQLLCTGEFTESKLPQGVYAELRTAHNAYRRLVKERTRITNLVKGLLDALFPEFTLVFKDPCGLTALSVLSTCPIPGVIAGMTEEEFVATIEAKHQGRLMRKKLRALHHMARASIGIAAGARSVSSEISFLVEKLELISGHICIIERTLVSLVDEAEEGKYLLSIRGLNYIAVAGLLAELGCFKAYRSAKQMIKMAGSNPTESESAGKKRAKTPMSKQGRPVLRYCAWTSVIPMLRFNPDFRAWAKQRRERPVHANPLGGREVVGAALNRLLRLAFAMVKNQTYYQASKPELTLVAV

SEQ ID NO: 117867 - protein, 410 aa, unidentified
MSESPYAFYVGVDWASETHQFTVLTPERRLEAERRIEHTGRALGEMADWLTALADGEPARIAVAIEVPRGPVVETLLERGFHVFAINPKQLDRFRDRHSPAGAKDDRRDGFVLADSLRTDRPAFRQVHVDDPLLIQLRELSRAEEELQTELRRLSNRLWEQLQRFYPQVLRLSPAVDEPWIWALLQLAPTPVAARALRRATLARLLARHRIRRVTAETVLAELHSPALRVAPGTTEAAREHIALLLPRLQLLHEQRGRCARRIEQLLDALEGSDAEHRDVTVLRSLPGVGRVIAATMLAEAARPLAERDYHAVRTQGGVAPITRQSGKSVLVSMRYACNHRLRNALYHWGRVSAQHDPSTRRHYRALRQRGHGHARAIRGVIDRLLAVLMAMLRTGTTYDPARRRVPAAA

SEQ ID NO: 117868 - protein, 346 aa, unidentified
MEHIALDVHKKYTWARVENTQGDRLYECRLAHAHGTIKNFVHRWSEGSAVAVETVGNWYWVVDEIEAGGGKPQLVNARLAKLMMGMVNKSDKLDAKGMNRLQRTGTLPTVWIPCSSVRDARELPRTRMVLSRQRTQLKNRVHATLGKYGHVVEGASDAFGKKGRKIVEELLLKLPPHTRQALGLILDELDHVTNNLREIEQQMTEIFSPCPQTQWLKSLPGVGDILAVVIWTELGTIERFGRAEQLASYCGLVPRENSSGGKIRFGAVRRDVNVYLKWAFVEAANSAVLNAERCGYNHIGRLYQRIKPRRGHGKAKVAVARHLSEASFWMLKKGEPYREPVSSTQR

SEQ ID NO: 117869 - protein, 365 aa, unidentified
MQTVNRRETLFVGIDVHKDTHTAVGLTPFGEKVFEMVIGNEAEDFISLVEKTKVEATRVGLAPSFGLEDIHSWGERLSSFLVEVGLPVVSVAPILVDRRHSKTTHPEKNDSLDAQGVAEVMIQRIDTLPHYKLTEVAQKAKQIRELSLEREWLVKERSRLKNQLHILLHRIHNTGYRTKFKDPFSKKALRSWMRSAPKNTDAILEQRMKRAVRRLLDLREEIQEIEDELEAMMKENQQTLSTASGCGTVIAAEIIGEVGDVNRFHSPGALAKYAGCAPREHSSGKTIRWRKTRSGNRRLNRAFHRMALSQISRSGNDAARAYFKRKVSEGKTKAQALVCLRRQLVNVVWMMMKHKTEYRYPQKND

SEQ ID NO: 117870 - protein, 410 aa, unidentified
MDVIHTHCAGLDVHKKVVVAAIIVEGRPKEIRSFGTMTADLLMLSDWLMSCGVTHVAMESTGEYWKPIFNILENNFEVILVNAQHISKVPGRKTDVSDAEWIADLLRHGLLTASFIPPLGQRELRELTRFRSTFVKERATLVNRVQKVLESANIKLSSVASDVLGVSGRAMLEAIIAGTATPEQMAELSKGRLRNKRTELSQALEGRVKPHHRFVLTELLSQIDSLEETIARFDQEIEEYCRPFEEEVVLLDTIPGVARETAEIIVSEIGTDMSRFPTANHLASWAGVAPGNNESAGKKRSGKTRKGNKPLGVALNQAAHAASRTKNTYLSAQYHRLAGRRGKKRALVAVAHSILVIAYHMIKRHEQYCELGADYFDQRRPETTAKRLVYRLEHLGYQVSLQQLSVPISV

SEQ ID NO: 117871 - protein, 425 aa, unidentified
MDFIQNQKINQVTEKTLVIGIDIAKRTHYACFVDDRGRVLQKSFSVSQAGNGFELFYQRIMTAMKETEKTEVLVGIEPTGHYWLNLAYFLKERGIPLAMVNPMHVKRAKELDDNLPTKHDRKDALVIARLVKDGRFSYPRILEGMEAELRVGSSFKSKLTEEFGAVKNMIIRWLDRYFPEFTQVFPKFGKMALAVLECTPFPSDLHQKQPDEVLSLYREVEGFKSPQRPKAIRIIEVAANSIGVTEGREMARIEIATLVRRYHQLEQDIESITEQLVELVKTSVEYEWLSTVPGLGDATIIDLLAEIGSFSHYENPRQLIKLAGLTLRENSSGQHKGQKRISKRGRRKLRALLFRVMMPMIRHNEAFRKLHEYYTNRQVNPLRKKQSIVVLCGKLLKVLHGISTKHKAFDAQRMMKDISSLTEAV

SEQ ID NO: 117872 - protein, 358 aa, unidentified
MAITTIAHAQPTRVTVGVDTHGDVHVAHAKDQLGRRLDTVSIPTTPTGYRDLLAWARGLGQVQAWGVEGTGSYGAGLARYLRKAGQVVLEVNRPDRAARRRRGKSDPVDAEAAARAVQAGEVTIVPKAADGQVEMLRSLRVARTTAMRARTQAVNALRSLLVTAPAELREQLRGRSAVRLVGVAATLDPGRLTSPTAAAMLALRTLARRYQALDAEITALDSELDRLTATAAPGLLALFGVGPDVASALLIAAGDNPRRLRSEAAFSMLCGSSPIEASSGKTTRHRLNRGGDRQANAALYRIVIVRLRWHQPTKDYVARRTAEGKSKKEIIRCLKRYVAREVFAVLRDMNQADPATAA

SEQ ID NO: 117873 - protein, 327 aa, unidentified
MKKKFLPVYVGMDVAKATLQVHLQNRQIQFGNHAAGHALLCKELGRFPTAQVVCEATGGYEYAVARAFAAANIPVSIVNPAQVRHTARAQGNRAKTDPLDAALLTDYGQRFQPLPTPPVLEVQRQLEELTLWLTQTIQARAIAKTQAEHQSNPFVRAQHQKLLEHYTQQIQTVEAEIQKLIEQDQMLAQRVQCLAQIVGVGQRTAWLVLANLPELGKLNRQQVAALAGLAPWPTDSGEVKGIRHIRGGRHEARRVLYMPALCAARANPVLKVFYEGLIQRNKPAKVALTAVMRKLLIHMNNEMKKTANKPCKIITPKRQKTKKSLAK

SEQ ID NO: 117874 - protein, 425 aa, unidentified
MKALKSHVAGIDVHKEMLAITVLIGELDGEPKEYQFESSTFTDDLMALGLKLKEMGVTDVAMESSGIYWKPVFNVFNPLGLKVVVANAAHIKNVPGRKTDMNDSRWIAELHRFGLIRASFIPDGEFQRMRLLSRHRTNLTEDLARVKNRIQKVLEDGNIKLSIVVSDIFGVSGLKVLKQIAGGYTHPNILITEVTTKIKRMEEMKKALTNCLTTEHCFVINVLMKQYEELKNRIEEVENELCKKVEPYAHLVEELDKIPGIDAILAMGIIAEASANMSSFKDERAFAAWSGVASGNNESAGKKKRAKCRKGNPALRKMLIQAAQGAIHCKKSFYRSKYNKLSFRLGSKNKAKVAIANKIARVVYKVLAGDQYKDLGYMRADPREERIKKLLFELKSLGVEIQNHTHQNIYSKRDVKVEASGIVYS

SEQ ID NO: 117875 - protein, 359 aa, unidentified
MADKLIVGIDVSKDWLDLCASNAAGVERIANTRQAVAAWLERVAPGLIACEPTGGYERTLIAAARERAIPFVRVHPNDVVAFRKSRGIKAKTDAIDARLIAAFVCDKLARAELRTSLIGDERLRALAARRRQLVDALPAERCRLDAAALPAVRASLEAVIAVLRQSLETLEAELAEAIAAHPQTAELAKLLQTIFGIGPVAAITLIADLPELGLLSAKQIAALVGLAPHTKRSGKTRYRETTGHGRPGVRRVLFTLQCRSCRRAPSLALQRLLRPPCHRQPTAREKPAPAKAGVALTAVMRKILITANAVARDRQPWRGRPAVGTPCRPHAEQTAHRAGRVKTAAAPRAVARSASLEAA

SEQ ID NO: 117876 - protein, 367 aa, unidentified
MSRMKRLTVQQLDVSKDYLVIGLDLAKTDTAVIAITTDGELYAIDRLKYSDLLNQARQLGSTVFAMEPCNGMTYLVHELEELGHECRVINGEAVKDYVKSHFAGQKNDLNDAQAIAFLAQDEMLKFIRVKAKSEMTMQTLQVVRQQLIKQRTCSVVCIKGICQNYGLVISKSIMSEAKIRPIIEESQRLPEEIKEPLKTLLRNAARFTIDIKQIDKAIEQGLKGNETAERLLEVPGLGPQCVSRLLTTIGDINRFEGPKNLAAYYGLVPRSHTTGHNEQMGKITKHGDRLMRTFLVQGAHAVLVLHTKGRLPKSALKKWIDKKLSAGMPCSKLGIALAAKLLRIAFAVLKHKEKFDIKRASVARCNL

SEQ ID NO: 117877 - protein, 339 aa, unidentified
MDQVVTIGLDIAKSVFQVHGVDAEGGVVIRQRLTRSRVLAFFAKKAPCLVGMEACGSAHHWARELSRLGHEVRLIPPSYVKPYVKRQKNDMADAEAICEAVTRPSMRFVPVKSPEQQSIMVLHRTRSILVRQRTQLSNAIRGHMSEFGLVAPVGRNGLQALKVIAHAGDVRVPEEARACLLMLFEQFELVSDQILESDRRIIASARSTEVGRRLMEIPGVGPLLASALVATIADPKAFKSGRNLAAWIGLVPRQNSSGGKERLGGITKQGDRYLRQMLVVGAVAVIRYAVRNGTRRPWLVQLLARRTPKVAAVALANKNARMVWALMTSGERYREPVAA

SEQ ID NO: 117878 - protein, 350 aa, unidentified
MQYISFDAHKHYTVACVEQPAGGIVLEVRLPHQRGAIREFLAEWDPGSPVAVETVGNWYWLVDEIEEADMIPRLVHARKAKLMLGMINKTDKLDARGLNRLQRTGTLPTVWIPPAEIRDQRDLPRTRMVVSRARTRLKNRIHATLAKYAITVPEASDLFGVKGRELLTSRLDLLPPHTRFATERLLDQLETVEDQLEQFESRMREVFTETIELKLLMSLPGIGFILGTVIQLEIGDVHRFPDAAHLAGYAGTTPRVDASGGKVRFGRLRPDVNHYLKWAYLEAANVICRHQQHWPSRHVVRLYQQVSHRRGHPKALGAVARHLAESTYWMLTKKESYREPKLRPGASTKA

SEQ ID NO: 117879 - protein, 366 aa, unidentified
MNKKLTGKSIEQGSGEGKCNRVLKLGLDMHYRQVTVAMQEEEGRIKAVGRMGHDGFENWVERKREAGWEIYSCYEAGASGYWLHRDLEQMGVKNLVVAPKAMGQDKGQKTDRRDSAELVDQLDRYLRGNRKALSAVAIPSLEQEQKRALLRYHRQIMADRSRYEARGKGLLCAQGIEVQGKWWQPQAWKELKTHGRFQAWMQTQLQGWRRKLLSAEQEQQKLRKQIEALAPALLPKGVGAYSAVALEYELKGLARFKTARALSSYTGLCPGIHSSDGRGKEGSINRCGNAAVRWNLVEMVWRLLKWQPDYQVVRQLRAGLVRSKRARKRLVVKAARQLAIDLWRLETGRVTAQELGLVMQPASKTK

SEQ ID NO: 117880 - protein, 357 aa, unidentified
MKERINYILRNEKVFVGVDDSKKTWSLCVRSGGMIVHETSMPAKYEVLRNYFHNKFPGCQIEVIYEAGFRGFGLHDQLVADGWECVVTPPHTVTEEKVHRKKNDRNDSRRLAKNLENGDYGQCFIPDKELREDRQISRTCGQVQADITRVCSRIRRMLEFHGLDEGLPAGQWSASAYTKLREYLRELRISDSLRFSFEVMFKELENLRQLKEESVRQLRQLARSDRYKGSVRLLMSAPGIGVLTAIRLALEWDDVSRFRRKEQFTSFLGLVPSDYSSGEQERRGHITKQGNRSVRRWLTESSWVAIRHDPVLLDKFRRVLSHCGSKKKAIVAVARKLALRLRRVLLSGDPYVVGVVE

SEQ ID NO: 117881 - protein, 457 aa, unidentified
MKNEYFMGCDVSKGYADFIVLDKSKRCIEHAFQLDDTFAGHNCLYQKLERFFADHPQSRLYAGVESTGGYENNWYQAMRQYQGIFDIKVARLNPCGVHASSRADMKRTITDAVSAKTIAEYLIAYPDKVSYENEDPWASLRKQWSFVQMLTKQKTQLLNQLESLVYTANPEILRYCQDGVPDWILTLLGRYPTADNLAKARISDIARIPYVSKQRAKTLKAQAKTSVASSLDETTRQLITATVTQIKALKRAIHAQTRILSGQCSPPEVELLKTFNGIGDYSAIGLLLEIQSVKRFASVKKLASFFGLHPVFKISGDGSSGFRMSKQGRKAPRSILYMVAMSAIKSNPLIRDLYQEKVSGGMTKMAAVGLCMHKILRIVYGMLKNNTPFNPDIDRKNREKARHSEGAPKTDKTRRYQTYDENAPVSKRGKKRRLERQSSQGAVNTECGIVKTVPAPS

SEQ ID NO: 117882 - protein, 450 aa, unidentified
MAQGSGLTRGDRNRNQRIAVLREVVRRDRAVLAVDLGEDKQVAALVDHEGRVLARKLVKAKAYQLGGLLEWAAGKAAGAGFAGLTVACEPTGHRWKAVMGLADAAGHGFVCVQSLAVARAREGDDYTRDKTDHRDAYLIGKLVIRLECYLPERAEEQWARLRHRGARRAGLVTDVTACRQLAADLLGCCWPAPLGVAARPLESASWLAGMAVITGRCCGDPRRLRKLGYEKFLAAVRRELPRWGGKQARHAIVRGLWDALGDTGGVAAQRPGALERLHLLLEDWRTLRIRLAATEQRMVAVLGELGLAELVASIDGMSALSGAVILAETGDLRRFMSGRAVVKHAGLNPSEHTSATISGQTRISRRGRPGLRCAAWRAAWPALLHNTVLRAKYAHLTGRDANRLAGGQARIACAAALLRWLHAVVTTGQAWDASIAAGEIPARPAAAAAA

SEQ ID NO: 117883 - protein, 384 aa, unidentified
MSRQTKQADPLEPERHQCARVEVSSNHSRDRGSTMNVTTYGLDLAKRVFQVHWVEPETGELKRKTLARAEVCAFFVRRAPGVVAMEACGSAHYWGRVLSGLGHQVRLIAAQFVRPFVKTNKTDAADAEAIWEAVQRPGMRFVALKSEEQQAVLSLHRMRAQLVKIRTMQAYQVRSLSYEFGVVAPKSWRALLAQVAPLLADPTRSPVPELVRGELLSQLEGLRTLTTRIDELERQIAGWQRREVECQRLAGIPGVGRLTATAVVATVADARSFRSGREFAAFLGLVPRQSGTGGRVKLLGISKRGDPYLRTLLIHGARSVLLSQSRADRVMDPWLRGVLSRRPKNVAIVALANKMARTIWALMAHGRTFDPSWGRTAMAVPTEQ

SEQ ID NO: 117884 - protein, 331 aa, unidentified
MDEVKRFVGIDVAKTALDVFIGSAGAAFSVANDEVGIRELLRQLAPADFVILEATGGLEMPVASALAAAGIAVAIVNPRQVRDFARATGRLAKTDRLDAELLARFGDAVRPAARPLANEQAQALEALVTRRRQLVEMLTAEKNRRASAPKVSHRSIDDHIRWLEKRLAGFDDELAELIRDTPLWRKRDELMRSVPGVGKVLSSTLLAHLPELGALNRKQIAALAGLAPFNRDSGSLHGSRCIWGGRAQVRRVLYMAVVAAVRSNPVIKNFYTQLRARGKYPKSALTACMRKLLVILNAMLHNKTHWQTPALTSSTSALSPFLGAVPEHGCC

SEQ ID NO: 117885 - protein, 316 aa, unidentified
MSVETWFVGIDVAKDRLDVALHPTDERWTGSNDPAGIEALSEQLVRLAPQLVVLEATGGFEVPLVGALGARGLPVVVVNPRHVRDFAKALGRLAKTDRIDATVLAECAARVRPVVRPLPDEEARELHAWLARRRQWVEMITADENRRQQAAAPIRRPIEGHLRWRRCQLAALERELTTRVRRSPVWRESETLRRSTPAVGPVLARTLLADVPDLGRLNRQQIAALVGVAPFNRDSGPRQGHRSLWGGRAPVRGVLDLAALVATPHNPVIRAFSQRRVAAGKPWKVVLTACMRKLLTILNARMKHRTAWKPVPALGA

SEQ ID NO: 117886 - protein, 347 aa, unidentified
MAMTVGLTLGLDVSDRYTNYCFLDSEGEVIEEGRVKTSEPILRKRFEGTPCRVIMEAGAHSPWLSRVFADMECDVIVANPRRVQLIAQSNRKNDRADAETLARLGRADPKLLGPVKHRDRQAQADLAVIRARHALVAARTLLINHVRGAVKSAGGRLPASDAHSFHRKAKEHIPHEMRLALEPLIDAVEQLSFQIREADRRVKALIEERYPTATCLQQVAGVGPLISLSFILTIGDPTRFQRSREMGPYLGLVPKQRESGDSSPALRISKAGDNFLRQLLVNGAQYILGYRGPDCDLRRWGLKRAAGGKAAKKRAVVGVARRLAVLLHRLWVTGEVYEPLRRQVVAA

SEQ ID NO: 117887 - protein, 337 aa, unidentified
MKLYVGMDLHATNTYVGMVDEENKVLYKQRFKNDLPLILSALDPFKKDIQGVVVESTFNWYWLVDGLMGQGYPVHLANPSAIKQYEGLKQVDDKRSSLWLANLLRLGILPTGYIYPKEERPTRDLLRKRLHLVRHRTSHILSVKNILARSLGVGMRSKDVKELTDAQVKALFPDKEMCLAVMASVDLIRHLQENIDDIEKVVKKKVKLKEEFAKLLTMPGIGEILALTIMLEVGHIDRFPTVGDYSSYCRLVKSTRSSNGKVTGHGNRKSGNKYLCWAYIEAAQFARRFHDTVRSYYERKMAQTNRIVAIKAVSNKLARASYFVMRDRVDYDQARLF

SEQ ID NO: 117888 - protein, 348 aa, unidentified
MPTSNTLVLGADTHKDVHVAVLLDQLGRRLAVASFPATDAGNQQLWQWATGFGGVSAAGVEGTGSYGHRLAQFLVGKGVQTREVNRPDRARRRRRGKSDPVDAENAARAVLAGEATAIPKDRRGVVGELRALLVTRRSAVKARTQAHNQLKGLLVEADDLLRDQLGTLRKAHFARACAQLDPTDGIRRALGSLGRRWLALNDEAADLERQIASLVQKHAPKLLARRGVGALSAAQLLVTAGANPHRLVSHAAFAALCGASPVEASSGKTTRHRLNRGGDRAANSALWMIAHVRMVHDPRTRDYAAKRTATGNSRKEIIRLLKRYIARELFPLIVEALTPPATPSSTAA

SEQ ID NO: 117889 - protein, 358 aa, unidentified
MTDGSRERPEITAGLDLGDKYSHLCLIDTDSGEVIEEGRLRTTPESLRQRFDSEYSLKIAIEVGTHSPWVSRLLEECGHKVLVANARKLRLIYGTKRKTDKLDAENLARLARLDPKLLHPLKHRSEASQAHLAMIRSREALVGSRTQLINHVRGAVKSFGHRLPKCSARGFHKKILEYLPKELVSALGPLLETIGELTERIREYERKLEEIATEHYPETELLRQVAGVGTLTSLTFVLTLEDPHRFSKSRSVGAYLGLVPGEDQSGESDPQQQISKEGDEMLRRLMVGSAHYILGPFAQDSDLRRHGLKIAERGGKNAKKRAVVAVARKLSVLLHHLWVTGEVYEPLHNSQRSADQAA

SEQ ID NO: 117890 - protein, 341 aa, unidentified
MNAFVGLDVSQKNTAICIVDQNGTKLCQSMVRTCPLTICEFLVTRGFDKAKIGMETGPLAVWLYHSLRDRGLDIDCIHARHVHAALSMQLNKTDQNDAFGIARLVQSGWYRPTHVKSLDCHQIRLTLTAREKLVRIKVTLVNQIRGLLKTFGVVLPMGRNSVFERAVLDASPSITAVKPVVLMLIQTWRDVSKQIRELDKQLASYAKNDSVCTILKSIPGVGTLTAISFKTAVDDPARFRSVNDVGAFLGLTPKKYQSGEVDRNGGISKHGSRQTRSLLYEAASCLLTRYGKDTTLARWGERLRQKLGFKKAVVAVARKLSALMLSMWKSGEFFRHESVPV

SEQ ID NO: 117891 - protein, 369 aa, unidentified
MIQHSTSTIWVGMDVHQASITAAILFGDRPEPEVVRLPGDLNAARRLFRRLAEQGVPRACYEASGAGFVLQRALDHDGFHCEVIAPSLIPSRPGDHRKTDRLDAVHLAQQYRSGHLTAVTVPDVDQEAVRHLVRAHLFMRRQIVRSKHRIMGILRTGGYRFIETKSSWTRPHRAWLAKLRRELTGPMQTVLASELQHLEYLETSQGALETAIAEVACQHPWRKPVEALCCFRGVKTLTAMTIVSEIGDIKRFRSPRQLMGYVGLVPSERSSGERSHRGPITRAGNRYLRRVLVESAWHYSKRACSTLLLQRRRMGQDPGVVGIAVKAQHRLERRYHHLMRTKHTNKAITAVARELCGFLWSALWEIEGR

SEQ ID NO: 117892 - protein, 365 aa, unidentified
MHKDNKSSSDRQVSTIASRTVGLDVGDRFSHFCELDGDGEIAMQGRVRTTAEAMRAQFGHRQRMRVALEVGAHSGWLQRLLAELGHEALVANARELRRIHQSERKNDRNDAQLLARLARVDPQLVSPIRHRSAQAQADLSVLRGRDVLVRSRTALINAARGIVKSLGSRLPVCSAEAFVHRVEPVIPPALTVALTPLLETIATINLQIRAADRQVTRLARERYPQTHVLQRIVGVGPVTSLAFILTIDDHARFAHSRQLGAYLGLVPRQSSSGESVPQLGITKTGNPYLRRLLVGCAQHIMGPFGPDTDLRRFGLRLAHRGGKNAKKRAVVAVARKLAVLLHRLWVTSEVYQPLRNATSPAPAAA

SEQ ID NO: 117893 - protein, 374 aa, unidentified
MSNSITYVAMDTHKKEHNVALHYPGQEEIVRFTVKNTAREITKMTKKIIKQVPGEVEFCYEAGVCGFVLKRRIEAQGCKCAVIAPSLTPRKPGDRIKTDRRDALKLLGMFKAGLLTEVHAPDKQQEAARELTRCRQSAQEDLKRVRHQLLKFLARHGYIYSEGNHWTGKHIKWLRSLEFEETVLADVFDNYFTQMQHCLQRLDSLDKQVEKLAKSKPYKKVVGLLRCFHGIDTLSAITIITEIFDFGRFSSPGELMSYLGLTCSEFSSGEKQKRGPITRAGNKRVRRILIEAGWHYRHPCNVSKALRERRKGQPQWAIDIADRAGQRLRKRYRHLTNCGKMSCKVTVAIARELAGFIWSVFKEYQARRGVKQAA

SEQ ID NO: 117894 - protein, 367 aa, unidentified
MKKVSTAAVREAKNFSEQKLTIGLDLGDRSSWYCVLDEAGVILLEQRLSTTPKAMREVFDGMPRSRIALETGMHSPWVSRVLNELGHEVIVAHARNVRLIGESRKKDDRLDAQTLARLARIDPQLLCPVKHRSARAQADLTVIRARAGLVRARTALVNTARGLAKSYGERLRGCNVRNMNPEKAEGLSPELQTALEPLLAGIESLSERIRECNERIEKLAQESYPQVALLKQVKGVGTLIALTYLLTLEDPHRFRKSRDVGCYLGLQPGRRNSGQSEPQMHISKEGDPYLRTLLVQGAHHILGPFGADSDLRRWGLKLAERGGKNGKKRAVIATARKLAVLLHRLWVSGEVYEPLRNSNQRAMRAAA

SEQ ID NO: 117895 - protein, 370 aa, unidentified
MLNTTTFVGLDVHARSIKAVALDAMTGEVRSATFGYDAAEVAGWVSSVDPSAKCVYESGVTGFDLQKRLSSMGIDCVVGAVSKMIKPSADRRRKNDRNDAEFLARMLSVGNVVEVWVPDDECEAARDLVRALDDARDDLKRCKQRLSKFLLRHGHAFSETTPSGRRKGNWTAAHWAWIKSISFAEKADDDVLAYYIDATRQAMEDKARLERLVEAEASKPRWKRRVDSVRCLKGIDVMSAADLVFEAGEFSRFKNARSFAAWIGLTPSEHSSGESVRQGGITKAGNKHLRRVLVEAAWHYLGCSPHSKDLAKGQAPDPGARRHAAKGVRRLVGRRAAMLERGVHKNKANVATARELACWCWAIGCMVENG

SEQ ID NO: 117896 - protein, 352 aa, unidentified
MRRPKHQVTGEEDLFVGIDLHKHRWHVTIRTVDLELFSASIPGTWEALQRILARYTGHQLQAVYEAGYFGFRLHDRLVAHGIPCLVTPPSLVPQEYGNRVKTDRRDSSKLAHLLAKGMLKRVWVPSEEELYHRQVIRRRRQLVRDRVRTQSRIKAELRFYGIHLEEPRGNWTQIYFETLRRLRFGNRWMQESFNRLLEQYEFLSAQIDKQTQLLRELSETARYRERVEILQSIPGIGLISAMELLLELQDVSRFRRAEQLAAYVGLTPSQYSSADKVRMGRITGIGKNTLRSLLVEASWTLIRKDQAMREKYERIKIRSGGKRAIVAVARILLLRMRRMLLDKQAYVLQLAA

SEQ ID NO: 117897 - protein, 361 aa, unidentified
MPTQMNNLNFKGQNIYAGFDVHLKSWKVTILSQEMMLKSFTMPPKPEILSDYLQKNYPGASYHSAYEAGFSGLWAHYQLLELGINNIVVNPADIPGTQKDKLQKEDKRDSRKIAYALKSGSLNPIFTPSESTLNDRSLIRSRKMIVNDLTRFKNRIKGLLYFYGIEYPEEFASSRTHWSKRFITWLESIHMKEASGKTALQHLISEARYHKELLKTVLLDITLLSKTDKYKERVVLLRSIPGIALITAMTILTEIEDINRFPNAERFTSFIGLIPMTSSSGEKQKVGEITFRAHDFLRSIIIEASWIAIGRDPALLMAYQHLSKRMESNKAIVRIAKKLANRIYTVLKYKKTYEFGKTDNL

SEQ ID NO: 117898 - protein, 463 aa, unidentified
MKAEIFLGQDPVYKTSLQFSDAGMRPGTRMGICTLEDYYLPVSGQAIVMETQRNKVCGADIHKKFLVATILSRDNTKITERFGMTLDDLLKFKSWVIENQCEQVAVESTGVYWIPIHAVLEGSVDLIVANAYKIKHIPGRKSDLIDSEWLAELCLNGMIEPSRIFPKEDRELRRLTRAREGYVNDMTREKNRIHHALESCGIKLSSVLADVFGKSGRYLLNCLLNGVELEEMIKGIPVKSIRQKADLIREAVRGSLETTQIILIRGGLEQIGSIQRRIDELDSEIKNRIASRGEDLRIAMSIPGIGFTSAVTILAEIGNFKDFSKAEQLAAWAGLVPAVYQSADKLVTGSITKHGSRHIRWILVEVAQAIARSNRSKLKRFFRRVQAKKGYNVAAVALARKVLCILFHLLMNREVYQEDDVIKTKSVDIDTAPLSKKIGFEEMIRVLAQAGYEIRKTNLDAGG

SEQ ID NO: 117899 - protein, 364 aa, unidentified
MYDSTTTVTVGLDVHARSVRLAAVCADELLEERTLPYDEQALERVLRRWPVVRCCYEAGPTGFGLQRFLVERGIECLVVAPGLVPQRPGDRVKTDSRDARKLARLLAGGLLQPIHVPSRKLEAARDLVRAREDARLDRMRDRHRLSKFCLRHDRTLPTSSWTVTRRNWLSEQRFEFAAQQTTFDAYLHTVDLVDARIEQLEHAIRETAEQEPWRALVARLRCLRGLDTLTALALVTEIGDFNRFKSAAELMAFVGLVPSEQSSGQKRRQGSITKVGNSHARRLLVESAWHARRRPTVSYQLARRQRGQDAVVVERAWRCQQRLYQRWQRMAARGKPQQKIVVACARELAGFVWAIATEQPLRNT

SEQ ID NO: 117900 - protein, 371 aa, unidentified
MKKSITFVGLDVHKNSIEVALADAGREGEVRHYGAIGGDMDSFSRLLRKLVSTGKEFHFVYEAGPCGYEIYRYLTTKGFACAVVAAPAGDPTKGGRQRIKNDRRDAMTLARLHRAGELTYVFVPREDDEAMRDLTRAREDASNAQRVTRQQLSGMMLRLGFRYSGKTSWSLAHFRWLSGIKMPSPAQQVVFQEYINAIKETTDRLERLTQQIQDLAPTWRMFPVLQAYQALRGVSLIVASTVVAELGDLTRFDNPKQVMAFLGLVPSEHSSGEKTRKGGITKAGNSHARRVLTEAAHAYQFPARISRAILQRQEGIDKTILDIAWKCQARLCSRFRRLMANGKNRKTVVTATARELIAFMWAIAKQVPIAA

SEQ ID NO: 117901 - protein, 435 aa, unidentified
MEEVEDEPLFCDRVAGIDIGKAEVVVTIRVPSETRKGGRQQETRKFGTTRRELLALADWLRAWQVERAGMESTSDYWKPVLFLLEREGFDCLLYQASQVKALPGRPKTDKLDSAWLAKITEQGSLAGSFVPPEEIRRLRTHTRYRRKLVQMRTAQKERCEKLLEDAHLKLSSVISDIHGVSGRDMLRAIIAGERSPAALAEMARGVMRRKTARLEEALDCSFFTEEHAFILEMMLDSIDQLTAQIEILDGKIAEMCKPYEQQVKQLDGIPGFGITTAQDLIAEIGTDMSVFPTAGHLASWARQAPRVKESAGKRKGKNATGRGNPYIGGTLGEASVSVGRTQTFLGAKYRRMCTHMPRKKAQGAIMRTQLVIAHALLSDPEARYEDLGPDYYERKADTRRRARSHVRGLERLGYKVSIEAIDPGTGELLPVATDR

SEQ ID NO: 117902 - protein, 446 aa, unidentified
MPLDCCRSQSTRVCFLAEDPPGDAIGSGPSLWREHTMEVMFERVAGLDVGKATVTVCVRMPGPRGRRTSETRTFKTMTGSLRVMRDWLLECGVTIAAMESTSTYWKPPFYCLEDHLTVWLLNAAHMKAVPGRKSDVRDSEWIASLLEHGLLAPSFVPPPDIRRLRMLTRYRMQLMGDRTRDTVRLELMLEDASVKLSVVASSLNTVSARAMLTAMINGETDPLRIADLAKGRMRGKIPDLAQAVTGHFDIHHASMARSILRRLELVEEALKESDGVIADACEPWKHQIELLQTIPGVGEKVAQVIVAETGADMSRFPSAEHLAAWAGLAPAMHESAGKRSPAGKRHGNKWLTAMLVEAAGSVGRMRGKNYLAEQHARLRARRGANRAQIAVAHSMLVSAYHMLQRDQPYHDLGPDWHSRRNTEAHARRLVQQLERLGHTVILDPAA

SEQ ID NO: 117903 - protein, 343 aa, unidentified
MQIRSVGIDLGKTTFHLVALGDNGKVLIRKKFNQKQLITFTANLQTSLIGMEACSGAHFLGRALRSQGHDVKLIPAQFVKPFVKSNKNDFLDAEAVAEAVERKNMRFVPIKTDDQLDLQDLHRVRDRLIARRTSVINQLRAFLLERGMTFAKMPTKLKLAMPEILENADSNLTPRMRNLVGLLWSEWKELEQQIIAMNTEVEQIASSDPACQRLRQIPGIGPLIATAVVASIGNGAAFQKGRDFASWLGLVPRQYSPGGKAKLLGISKRGNSYLRKILIHGARAAVVRVKRERSPFGSWLDALQTRAPLNVVVTATANKLARIVWAVLSTGEEFRPGGRLLAS

SEQ ID NO: 117904 - protein, 344 aa, unidentified
MKYHTALDVSLRSVSICIVDDEGNIVFESKTDSDVDKIVHCIRSFNSDIQSIGFEAGALTQYLTYGLQEAGFEVICLEARQVSVTLSAMRNKTDKNDARGLAQILRTGWYRRVHVKSFGSHVIRVLLSSRKAVLSKCVDLENEIRGLIRLIGVKLPTTVKHGIFDETVRETIERDENLASALLPLLDARLVLYKTFIKLDTRARAMSRNDPICQRLMSAPGVGTITALTFKAAVDDPKRFKSSRTVAAHFGLTPRRFQSGETDNPGRISKAGDADVRSALYVAAHSLVVRSKEWSSLKVWGIRLVKAKGHRRGVTAVARKLAVILHKMWLDGTDFRHGSTGSTE

SEQ ID NO: 117905 - protein, 462 aa, unidentified
MRTIGIDLAISAIHKAVVADDQANIITPVIRLGMNPTDLERLLRRAREGADENEPLRVVMEPTGLAWLPLASYFIQRGVTVYLVNTQQVADLRRFYKKHTKSDRIDCRVLARLPWVNPDTLHPLHLADAEHLSGQRWCKQQDELADLMTAIKNRVQAWERAFWPGLEEVVDDLFAPWVRRWREVWYDPWQLQSADPGQLAAFLVEAGADPERVESLAAGLQQVAQRAIALFGTPEGDLSPHVDYAALQDQVLRELRFLAHYQAEHQVVRCQVQALYRRIYPRRHVETIKGVGDDGAAVYVFFIGDVGRFARQKAFRGWSGIVPESGQSGDVERKGLRITRAGPDLVKKYAYINAEVARQWDPQIAAIYYDQMVHKGKHHCQAVCACATHLLDRVRAVLRDDRPYELRDVDGIPVTWQEARAIIAERYQVPEEVRQRNSQRARKAQRDQRAEKKQKRRSRPGR

SEQ ID NO: 117906 - protein, 326 aa, unidentified
MYYLGIDISKRYFDATLLTPDNEKHYFQFENNREGIQACEKWLQKHGVEDKLHVCMEATNNYWEEVAEALHGTGYTVSVVNPSRIKGFAMSKMQRNKNDKLDSEVIVEFCAKMKPDSWQPLSKSERKLRDLVRHRDGLMKTLTQQKNRLANSKDEEVRASLEKIITLLEEELRQLEERIEAFIDSDPEMQEAVSLMCSIKGVGEKTARKVLSEMPNLTQYKSASAAAADVGLTPFHHESGDTVRHRPKISKTGKTSVRGILYWPAIVAIQHNPVVAALAKRLEARHKPRMVIIVAAMRKLMHLIYGVLKNKTPFDPNYGHHAVHGT

SEQ ID NO: 117907 - protein, 412 aa, unidentified
MDVNMEVVYERCCGIDVHKAEIVATVITGQHRMVTRNFGAFTEDLRDLAAWIKAEGCQMVAMESTGSYWKPLYNVFEIEGIKAMVVNSYHARTIPGYKTDKRDSRRLAKLLRHGLLQASFIPDKDQREFRELTRYRNSRIEERARELNRLQKMLEGANIKLGNVVSEITGDTATRLIKLAVSHESLTKEQIAEARDPKCKASVEEFQKALAGIVSPLQRELFAEVLRIIDEQTRQIERIEAMIQKYTTEAYDQAAKAIDPIPGIGRISAEAIIAEIGVDMSKFPTAGHLCAWAGVAPGDNESGGRRKSGKTRKGNRTLKKTLIQCATSAVNNKDSFACAQYQRLVVRKGRNKAIVAVAHSLLIAIYHVLSGNDFRDLGADYYTKFNKEKKIKSLIKQLQKLGVENPCPDLAV

SEQ ID NO: 117908 - protein, 350 aa, unidentified
MDEVELSAVGLDLADKYSDWVGLNGEGEIVVRQRVRTTEPELRRTFGALKATVIAIEAGTHSAWVSRVLKDCGHRVIVANARKVALIHKNRRKNNGIDAETLARLARVDEKLLYPITHRDEQSQADLAVLRSRDLLIGARTKLINHVRGCTKSFGVQLPKCSAEAFVNRCKPLLPSTIQGAVEPLLGHIEQMSEQIHAYDKQILKMIERQPAAQRLMEIKGVGPLTSLAFVLTIEDPRRIVSSRSAGAYFGLVPGSDDSGETHTQKRITKEGDRFCRRLLVMAAQYILGRFGSDSDLRRHGLAIAARGGKNAKKRAVIAVARKLAVVMHHLWISGEAYVPLFNVDHAIAA

SEQ ID NO: 117909 - protein, 397 aa, unidentified
MPAILSGSPAGRKGHRPGHITEKWDELVSWIGETIAMKKPSQYLIAEVPRSVAKIGLTIGIDLGDVWSHYCTLNEDGEVVDRGRFRTTPSGVEKWFTDLPRARIAMEAGTHSIWVSEQLQELGHEVIVANVLELRAISHSDRKSDTVDAEKLARYARLDPKILRPVSHRTVAQQEALTLIRARNLIVRLRTAAVNAVRGLAKPCGYRLPASSTLCFAQRCMAVLPPGLAEALGPVLEQSAAMTVKIKQYDRAIQRLTETEYPETQALIQVYGVGQLTALTYILTLGSKERFPRSRDVGCYLGLRPRRSQSGDHDPQLGITKAGNIYLRSLLVECANHVLGPHGRDSTLRQWGLRLASRGGKQSRNRAIVAVARKLAVLLHRIWVTQEPYIPFYAAAA

SEQ ID NO: 117910 - protein, 443 aa, unidentified
MKPLPVLNPKAAAIDVGSEKLHVSIAGDSPKVFGTFTGDLERLRDWFREQGVNTVAMEATGVYWLYLYEVLEAGGLEVIVVNGRHVQNVPGRKTDMSDPQWLATLHAHGLLRGGFVPTADIRQLQDYQRLRADHIIGAASQVQKMQQALERMNVKFHDVISDLTGVSGLRVVRAILAGERRPGELLALCDEQIQKKKSAAVRESLRGCWKKEQLFGLRQALELWETYQQKIVDCDRELEALLQQLAGPREEGGGGLTGPVKLGPAKGAGKNAPVIERLQELLARLCGGGDPTKIPGLSVYLTLQLISEVGTEMARWPTEKHFVSWLGLAGGRKQSGKRKGSVKAHRNRAGRMFCAAARALAQSVDKALGGFYRRLRGRVGGLAANVALARKLAQLFYRLLRYGMEYVEKGLKSYEYKVWETEARLLRKLARKQGFTLVSTLEN

SEQ ID NO: 117911 - protein, 311 aa, unidentified
MKEITNFVGVDISSEYFTVSFLRAKDMKLVSFENFENSANGFQNLLADFQSHRIDVDSVAICMEATGVYGESLLSFLVARGYSVAVENPYKVKRAFDISPKKSDKIDSGKLAEYAYRFYDELHFWTPKPQIIEEISIFLVQREQFTKQRIATINALHALERKNFRSEKAISLYEVMIKNCEENIKMIDKEIEVLIQKDPEYKQMIENLKTVPGVGNMLATHLLVATDGFRKHLNAKELSSYIGIVPLVYESGKSIKRRNTSSGIGPGILRKLIYLSSLTSRRCDENMQKYFFRKVAEGKSKRLVLNNVSST

SEQ ID NO: 117912 - protein, 346 aa, unidentified
MKILALDLGKYKTVGCAYESESGAHQFQRTLTTPADLERLVQDVKPERVVIEVCSIAGWVCDLMGQLGVEVQVANTSDDAWRWRKVKQKDDRRDALKAARLSAVNQLREVYIPQTEVRQWRALITYRQHLVGRRTKIKNHIRDLLVREGQLLPRAGKCWTKLGQERLSSMARPLEEVGATQLWRGELWEELQQLQVIQERIASVEEKLNALGGADARVRLLRTIPGVGPRLSEAIVALLDQPRRFRKGSQVSGYIGMVPKAFDSGESERRGHITRQGSGLVRSLLVEVAWAGLRHNAWMRQTYQRLSGGKKARRKIAIVAVGRKLLVRCWAMLRDNRAWDWQPQIT

SEQ ID NO: 117913 - protein, 359 aa, unidentified
MQRNKISFKGQKIFVGIDVHKTTWEVAVLTESGLLKRHPQEASAKVLFDFLRKHYPDGEYHAVYESGFSGFATYYALKEFGIECTIAHAADVPTTQYENVMKTDKIDAEKLARALKNGEIKRPVYIREKDNIDDRAVIRIRKTIQKQLSGYKARIKHMLHCNGVEIPERFSKPTSHWSRAFISWLMQDVKLLSSTRRSLDLLIRQVEVIRGTLLEATSELRKLSQTERYKHRFELLMTIPGIGQHVSMCILTEVWDVSRFPNERAFAHAMGLVPTCHDSGPHKSNGEQTFRGNRYLGPMIIEACWVAIHKDMGLAACYAYHKQRTNPQKAIVRVARRMSNIIYSVLKNDKAYEPYQWDK

SEQ ID NO: 117914 - protein, 427 aa, unidentified
MRFIGLDVHRDFCEVAISDGGKARRAGRVASRPAELELFARSLGSDDRVVLEATGNALAIARIIEPHVGEVVFAHARKVRAIAEAKVKTDAIDACTLAELLAADLVPRVWLGDERTRLLRRLISRRRQLVKQSTRTKNEISAVLLRTLQGRPPVSDVFGKAGRAWLAALELGLDERETVDAGLRQLDFLRAELTQVDRAIAEQALASPEIRRLMTIPGVDVTTAATLMAAIGDVSRFPSPRHLAGYLGLDPKLRQSGVAKPRHGRISKEGSAAARHALVEAAWSSAKAPGPLRAFAERTAARRGRHIAAVAVARKLAVLAWHLLSRGEDYAYQRPSVVRRKLRRLELKTGAPRAKRQAGAAPLWGSRAQDDLERELARQAELAYRRLVADWKRTRPKDGAGATPGRASSRPSERQAARQETAPPPAL

SEQ ID NO: 117915 - protein, 351 aa, unidentified
MRANQDEVILGVDTHLDKHVGAVISVAGKLLATQAVDTTSAGYRQLLAWAQSLGDVRRAGIEGTATYGSGLTKVLRDNNIEVFEVNRPDRATRRSRGKADPTDAESAACAVLSGRATAIPKDQSGAAYAMRAVSVARRSAVKARTQAINQLRGLLVSAPQEIRERLLRTKTEECVDGCARIRSLGKTVLLKSLNATLRVLAKRWLALDAEIKVLDGQLEHLTNDHAPKLRAEFGVGAQTAAVLICVAGDNPERLKSEAALAALCGVSPLQASSGKTTRHRLNRGGDRAANNALWTIAMVRMRSEPRTQAYVARRSAQGMSRKEIQRCLKRYIVRELYPLILADLGHLATAS

SEQ ID NO: 117916 - protein, 360 aa, unidentified
MIVQGTSVGLDVHALSVVAHAVDEETGKVARARLCPDHGEVLGWLHQLRAPVRVTYEAGPTGFGLARAITGAGMECLVAAPSKLQRPAGDRVKTDARDAAHLARLLRLGEITAVRVPEREIEAVRDLVRAREDARADLMRVRHRLSKLLLRQGIVYSGGTPWTCVHEEWLRRHRFDDIHLKAAFDHSFDAVLAATAARDRLDEQIMVVAASPRFADPVNRLGCLRGISALTGLALTVEIGDWSRFSGSSIGAYVGLVPCEYSTGNSRVQGSITKAGNTHVRRLLIESAWHHRKSYSTSGPTLRARWAKVDPALRARGHAGNRRLNKRWRSFTERGKNPLVANVAIARELAGWCWSLATMH

SEQ ID NO: 117917 - protein, 347 aa, unidentified
MNANAKVAGLDIAKDVFVGVAQDLNGKRIWQRKWKRSEVLRAFRELPPMAVGIEACAGSHYWARELIALGHDVKLIAAQHTRAFVTGNKNDTNDAAAIAEARSRSSTKYVPINTPAQQDLQMLHRARSALMTERVAMINRIRAFACEYGQVFAKGVSRFRDGLIAWLADPENGLSGSALTTFRELKEQLDDKEQRILAYERRLNQAAKAETAQQLMEIPGVGPITATAVMASVADPHHFRSGRDFAANLGLVPREHSSGGKQRLYGITCKGDSHLRTLLIHGARSALRSAANKPDRQLCWARKVAERRSFNVAAVALANKMARVIWALLAHGRSYVPAWSNDTTRPA

SEQ ID NO: 117918 - protein, 362 aa, unidentified
MLYVGVDLHRKRSVVTALAGDGTVMLSRRIASAPEPFHRVFGELEPSSLSVVFEATYGWSWFADLLADAGIEAHMAHPLATKAIAAGRVKNDSVDARTLAHLLRTHLLPEAWIAPTQVRERRRLARTRTSLVRIRSRLRCQVHAILADRCVQPPLGSIFGPAGRRFLKSVELPAVERGRIDAALRLSDAVTLEVIGVDKELRAAFAGDERIRRLMAIPGVGFLTAAVVLAEVGDATRFACADRLASWAGLTPTERSSDEHTRRGHISKQGSRWLRWVMVEAASRPVQHPTLRGFEEAIARRRGKKIARVALARRLLTLCFYALRDREGCRAFPLRVHARASRQIRPGALAKSHDLPYGTVAP

SEQ ID NO: 117919 - protein, 343 aa, unidentified
MKQYVGLDVSLEQTAVCIVDEHGKALWRGKCASTPEAIAAVVKARATHVERIGLESGPLSTWHWHELKKRGLPVICLDARHAKAALSLQVNKTDPNDALGLAQIVRTGWYREVTVKSLDSQVIRSFLSSRARLVEVRVDLINQIRGMLKPFGLVAGKGGRQPFIDRVRELVADGPLKDAVEALLSALQEVSRQIGILSRRLMGLARQDQAARRLMTAPGVGSLVALAYISVIDTPDRFSSSSSVGAYLGLTPRRYQSGEIDRSGRISKCGDPLLRTYLFEAAGILLNRVSRWSALKAWGTRLAKKVGGKKATVAVARKLAVLLHRMWRDNTDFRWARQEEQPA

SEQ ID NO: 117920 - protein, 319 aa, unidentified
MNSNLQQPLSLGIDVSKDFLDLDVFPVPHPQRVPNNDAGHDQILQLCRCQKFSHIVLEASGGYEQTLVTTLAAANLPVCVVNPRQARDFAKATGRLAKTDSIDAAVLAHFGAALQPICRPLPDEKTREFQQILARRRQLVEMRTAESNRHRQARCAAVRDSIHAVIELLDNQLRDQDRHLDALLRDCPLWKENENLLKSVPGIGDQTARTLIAELPELGHASRQQIAALVGLAPLNQDSGNFRGQRSTSGGRTSVRTTLYMATLVASRFNPVIRAFYQQLLGRGKKKKVALVACMHKLLTIINAMLRNRTAWKSVPIPA

SEQ ID NO: 117921 - protein, 396 aa, unidentified
MTCTSGKMRYVGLDVHAETIVVAVAEGDALSPGEVRSLGTIPNRPTSVAKLMRKLWGPLGDPATLKVCYEAGPTGFVLYWQLTQLGIHCDVIAPGLVPTKASDRVKTDRRDAMKLARSYRAGDLTPIWVPDAEIESLRALLRAREAGKEDQLRSRNRLGKFLLGLGVRRPDGMTAWTQKHRLWLATIRFEEPAREATFLDYLSEVDHAKERIERLEAAIDRAVANSSARVSALVAALQTLRGIKQVTAVTIVSEVGTFRRFSRARYLMGYTGAVPSEHSSGARKRQGGITKSGNSHLRRVLVESAWAYRHRPSCTGNLRKRQEGQSEVVKAIAWKAQHRLSGRYHRLKARGKPMPQVVTAVSRELSAFVWAIGVETERKLEHGMEHSAGAAMAAAG

SEQ ID NO: 117922 - protein, 337 aa, unidentified
MEQVIRVGLDTSKQVFQVHGVDAGERMVLRRQLRRSELGRFFGTLAPTLIGLEACGGSHHWARVLRGLGHEVRLLPPSYVKTYRKRANKNDARDAEAICEALGRPSMRFVPVKTEAQQAALMLHSARELLIKQRTMLVNAIRGHAAEFGIVGAQGLGKLSELLERVRSSDIPELARRMIELLASQIDPLDMKLREIDARLRDWFSTSPESQRLATIPGIGLIAATALALKVPDPGAFRSGRHLAAWLGLTPSQRSTAGRHRLGKISRQGDETLRSLLIVGATAVVRWARPGRASPWLLELLARKPRKLVAVALANKTARIAWAIMMRGETYRRHMPA

SEQ ID NO: 117923 - protein, 357 aa, unidentified
MTTTSASREVIGGVDTHRRTHHVACLDAGTGKLLGDREFPATAAGYRQLLRWLCRFGAVGKVGVEGTGSYGAGLLRYLNSEHVEVIEVVRPNRQGRRLRGKSDPIDAINAARAVLAETATTQPKQRDGLGEAIRLIRTTRRSAVKARRAAIAQIHGLLAGAPEQLRGQLAGFDRAALVDRCAGLRPARTGSMADPTHVAKVMLRRLAKRVHDLDRELAEADEELNSLLQLAVPTLLQVNGVGLSAAGQLLTTAGENIHRLSNEASLARLCGVAPIPASSGNTTRHRLHRGGDRDANSALYLIVINRLRWHEPTRAYVKRRAAEGKTKKEIIRCLKRAVVREIYTALRTDLEGLRQAA

SEQ ID NO: 117924 - protein, 343 aa, unidentified
MNVFIGLDVSLASTAICVLGPQGKIVEELQAESEPEALVRAIVALPYSIDTIGLEAGPLSQWLSKGMEEAGFDVVMMETRLVKAALKAMPIKTDRRDAQGISRLLQMGWYRPVHRKSVSSQEIRALLTARKSVQQAIINLELSMRGVLRNFGLKLGHVTRIRYEARVRELVEQNEILSTSTEALLRARSQLRAELAELDAKIAGLAKDDNVCRLMMTMPGVGPIVALTVKSAIDDPARFARSKDVGPWAGLTPRRTQSGEMDIVGQITRAGDRGLRTALYQAAMILMHRGSPNWLQAWALRVARRRGSKRALIALARRIGVVLHRMWRDGTPFRSAQSPAATV

SEQ ID NO: 117925 - protein, 391 aa, unidentified
MISVGIDVSKDKHDCFILNSDGEILADGFTILNNMEGFSTLLQKIQAVSTPQDKIKVGLEATGHYSYNILGFLLDNGLTTYVLNPLHTNLYRNSLSLRKTKTDRIDARMIAAMLLSDVDLKPYSDTAYHNEELKSLTRYRFHKVEERAKLKSSVSRLVCILFPELENLVSSLHIASVYALLKEFPGAKQIANAHLTRLTHLLQDASKGRYGRDKAILIREAARNSIGANMPAKSLELQHTIRLIYEFDTEIDEVELAIQAILDEMNSTITTIPGMGFRMGAMILAEVGDFSRFESPDKVLAYAGLSPSTHESGKLKNNYAHMEKRGSKYLRYALYNAAKYVCYWEPTFAAYFAKKRAEGKHYNVALSHAVKKLVRVIFALQKSGQPFSISA

SEQ ID NO: 117926 - protein, 323 aa, unidentified
MPPSIGIDVSKKKFDVALITAQGKYRCKVFDNNASGFKAFLDWIQAHVPEGQAQACMEATGVYHEALANFLFDNQVTVFVVNPLRVKRFVESEGLRNKTDEGDAKALARFASKNELDAWEAPSKSVRELQALVVRLESLQSMRQAELNRLDIAHTSVRGSIEAVVAALDKEIEAVRSLIRKTIDDDPELRQRNDLLDTIPGLGDRTIPSLLAYIGRPERFKTVKALIAYAGLTPAIRQSGTSLDKKKGLHPAGHRDLRQALFYPAMAAGRFNPIVAAFWQRLKAQNKPGKVIVVACMHKLLAIAYGVLKSRQPFNPDLALKGT

SEQ ID NO: 117927 - protein, 342 aa, unidentified
MYYIGLDVHKKTISYCVKDGAGKIHQEGKIGSTRRELDAWIKTLPQPRMIAMEATIFTGWIYDHLLPHAEKVKVAHPLMLRAIAAAKRKNDKIDASKIADCLRCDFLPECYMTSTEIRDRRRTLRYRGLLVKQMVQMKNRISGLLMETGVSYNKQRLHKVGYFTELMSGNEEIDCVRPLLKLSRETINRSQKLDYALVSSLERDPLLAERLKRLRTVPGVGPITALTWVLEIGDVARFQSIKNAISYCGLCGAEKRSADKVVRTPISKQRNKHIQQVLVEAAKLAPRYSHELSLIYEKEKQRGNRNRATLAVARKMVAWMVAVERRKQDFVPAEERGGTVAA

SEQ ID NO: 117928 - protein, 428 aa, unidentified
MPQGSGMQGATLAHVTTSTIDPTLTEAAATEVFAGIDWGGSFHQICLIDEDGKVLRQQRVPHNAAGFDELDRLLTCHRARLRVAIERAEGLLVEHLHLLGVEIFCVSPKISARARERYRMAAAKSDAFDAFVLADTLRHEHRHWRALTPPSPVLAELRAISRDRDRIVIAQQATENRLRAVLEAYHPAPLHLFSTLDRDITLDFITDYPTPEQAGRVGTARMDGFCRRHGYSGRTQPEVLVERLRPHLLSAGEGTVAGKAFSASLFTEQLRMLNTHLRAYDKRLDELLERHPDTPIFTSFPGVGPVVAATLISEMGDDRHRFPAPGALLAEAGLSPVTRASGRTRQVRFRYASNRRMRHMIDWWMFTAIREDDWTRQAYDHARARGQGKYRALRGLGSRWTRILWRCWTDHTRYDPAIHHRNPEPTTA

SEQ ID NO: 117929 - protein, 338 aa, unidentified
MNCTTLGIDLAKNVFQLHGVDERGHVVVQKRVTRAKLRATVAQLPPCVIGMEACGSAQYWAREFQQLGHTVKLISPQFVKPYVRGNKNDSRDAEAICEAVSRPHMRFVPLKPVESQDIQAIHRLRSRLIKERTALVNQIRGLLAERGIVIAQGITRLRKQLPVIVGDGENELTPLSREVMRELYAELVALDERITRADAMVHRVFTQSAACQKLAQVEGIGPVVATALVAAVGNAQEFANGRHLAAWLGLVPRQSSTGGKERLLGISKRGDRYLRTLLIHGARATVHRARRKTDARSRWILSVEQRRGKNIAAVAIANTNARIAWALLTSDAGYRKAA

SEQ ID NO: 117930 - protein, 451 aa, unidentified
MEKQKLAMDIINPHCAGIDIGSRSHFVAVGQDLEDVKEFGVYADDLTDICVHLKEHDVTSVAMESTGNYWQNLYVELIKHGFDVTLANGKFTKNIKGKKTDVKDARWIQKLPSIGLLTSSFLPDETTEKLRTYCRQRQNMLTLAAEASHKMQKYLKILNFRLDVVVNDICGLTGMAIITDICKGNLDPEKLSGHRHGNCRKSKEEISKALKGNNREDYLFGLKQELESYQFYQKKIAECDKQIGAFLKQQINTYPEKKKLKTTDKTHKRINKNAIKGIDLNQASFQYFGGVDLMNIEGMSHATVLSIISEIGPDGFHKFETAKHFTSWLRLAPNNKVSGGKLLSSKTPKGSNRLKIALRNAANAIGNLKDTHLSNFFNRVCYRKGRTVAVSATARKLAVILWNMVVKKLPYKPPTDYLFLDEKRKLKLVARVKKQITKFALTNEDLGCVIT

SEQ ID NO: 117931 - protein, 423 aa, unidentified
MKRTPKTQRPSSEKSTILAGDISMDWINVVDHIDGFPRDHVFENEVAPWERGLGELGARARQAGYRDILVVCEPTGGYEKKFLAVARQLGFATAYVSPEAVSKMRVIETNDSGKTDIKDPHVIYTLASLGKTLNHRVLEDLYLLLREWGQIYDAAECGVVAAKCALHHQLQALFPDYNFKKDFLYSPSGIAVRRASGFNPFRILAAGRTGFEARVRKAVPRVRIGSINRLFEQAESSLRALGSPEHAQVLELRLLQLWDDYERHHARKTEARAALERLYLEIRSNDPSLPMEQKGIISTPTLARIFGELGPIGYFHSTRAIIRYAGLNLRERSSGKYRGQTKLSKKGRPLLRKILGQAILPLVKRNALYGKFYWKKKAHMPGTRAMTVVMRKFLKMLFGWFLSRKPFSRDRVFECESQFALAA

SEQ ID NO: 117932 - protein, 361 aa, unidentified
MGDTMTWAGLDVHARSTYAAVVDSRSGELSRVRFGGGAEAVVAWLAGLPAPVRAVYEAGPTGYGLARLAGERGIRVDVIAPGKTPRAAAERIKTDRRDAELLVRQLMAGALRPIHVPSPAMEAARDLVRAREDVRCDLSRARHRVSKLLLRHGHVYPKDRSTWTLQHRRWLAQRRFDEPNTELAYIDALAAVDGLTSRRDALAERLSQVASDAELWSTVARLRAFRGIDTLTALALACEVGDWYRFTRPDQLAAWVGLVPSLTQSGESHTSGGITKTGSRHARRLLVEAAWHYQRPPRIGATLRNRQQGQPDHVLAIARRAQHRLHRVHQRLRERGKHSNLATAAAARELICFCWAAATAP

SEQ ID NO: 117933 - protein, 405 aa, unidentified
MNPVVAGLDWASEKHDVLICDAAGRRLAERVIAHTEAGLSGLCDLLIEHQVAHVAIERPDGLLVDRLTDAGIAVMAVHPNQVKAARPRFTAAGGKSDRFDAMVLCELARTDAHRFRLIQPDSDATRALRARTRGRQDLVEQRVALANQLQAQLDAFWPAGSRVFGDLASPISLAFLARYPTPTDCRGLTPARMRAFLTRHSYSGRRAPELLLERLHAGGPAGRTGEHELAARRAIVLALVAALQVLVTQIALLTKQISAALQEHPAGPVFRSFFTDPKTAICPASLLAEIGDDHSRYPDRDTLCADGGMSPVAVESGKHQHAAFRRACDKRLRAQICVLADASRRTNPWAADVYNRARARGQNHPRAIRTLGRAWTRILWACWQNNTPYNTTQHRAATRHIQTGG

SEQ ID NO: 117934 - protein, 358 aa, unidentified
MEKLYLGVDLHKKSCWVTVLDADGHQLDSRKLGTEKWELLEYFGKVRQPAALAVEATFNWYYFLNVIEPLGLELHLVHPWKTRAIASARIKHDKLDSRVLAELLRTGFLAEAWIAPRPVREQRQLLRYRVHTVQWATRAKNCIHGVLNRNGIRLPLGTPFGARGRTYLEEAELPETDRWEVKGQLARLDLLGDQLRELDREIRKRSKANPIAQALEEIPGVGPFIASLLIAEVGDVRRFPSAKHLASYTGLVPSLYASGEHRWGGAITKQGSTILRWALVQAAHRAAVSPRFQAYYQRHRQRHGAGKATVALARKLAVIAYYRWRHALLASDPAAKLEKVRERSCAGAWSEERPIRSD

SEQ ID NO: 117935 - protein, 354 aa, unidentified
MTRLSVHRQVIGGVDTHKDTHHAAVIDAVTGTLLGDREFAATGSGYRHLLDWLVSFGSVSKIGVEGTGSYGSGLCRFLLDAGVEVIETVRPDRATRRLCGKSDPIDAITAARAVLAGICTSTPKPRCGPVESIRLLRAVRAGAVKAHTATVNQLHAVLVTAPQPLRESLAGGSTRALIESCARLRVIGQRQDPMVAAKLALRTLARRAQGLAREIAELSGELEPLIAATAPRLSAVFGIGPDHAGQFLTTAGDNPARIGSEAALARLCGAAPIPASSGTRVRHRLHRGGDRQANRALHMIAICRMGHHAPTRAYAQRRKAEGKTNKEIIRCLKRALVREIYTALRADFAALQST

SEQ ID NO: 117936 - protein, 355 aa, unidentified
MACNDSSNPVGTIAIGLDVGDRKIDCCVVDGRGEVVERSEIPNKPEALRARFQGNKPTRIALEAGTHSLWMADLLQECGHEVLVANPRRLRGLYENPKKSDRVDAEYLARVARLDPKLLAPVEPRSMKTQQDLAVIRSRDQLVQTRTQLVVHVRSMVKMMGGRIPSSIGTESFGMKAEAQVPDSLRPAVGPILEMIRTLTRQIHAYEAWVKEAVERYPQTKHLQQISGVGPLTSLAFVLTVGDPLRFAKSRDVAAYFGLVPKRDQSGGKDPELGISKAGNSYVRRLLVGSAHFILGPFGPDTDLRRFGTKLAKRGDKTAKKKAVVAVARKLAVLLHRLWVTQAPYIELKEVKKTA

SEQ ID NO: 117937 - protein, 342 aa, unidentified
MEQVTIIGIDLAKRVFQVHGAASDGKVVFRKKLSRAQLLPFLAGQPRCTVAMEACATAHEWGRAIGALGHAVRLLPPVYVKPFVKRQKNDVADAEAIAEAASRPTMRFVAVKTEEQQARSMIFRTRDLLVRQRTQLINALRGHLAEHGVVAPQGPAHVKRLADAIEDEQSLVQPIVRDVGRLYLQQIAIYGEKITELEETLRREAARSETTARLQTMPGIGPITAIAIETYAPPLETFRRGRDFAAWLGLVPLQKSTGGKQKLGRTSKMGQHDIRRLLIVGAMAVVRWATRKGPPEGSWLARILTRKPPMLVAIALANKMARSAWAMLTKKEDYRDPAAASA

SEQ ID NO: 117938 - protein, 401 aa, unidentified
MTAVRSRAWIGVDIGKTHHWVCAVDETGKKLLSLKILNDEAQIIEVITSITDLADGRVWAIDILGTPSALLVALLANAGEQVRYASGRVVAAMSTAYTGEGKTDAKDAYVIAETARIRTDLAVIDADTDLVRALGVLTGHRADLVADRVRMINRLRDLLTSVFPALEREFDFASCKGALVLLSGYATPESIRRMGEARLSRWLRQRRVRGYADVAARAVAAAHSQHTVLAGQDVAASIVAELAGAVLAQHERLKLLDQQIQDVFAQHPQAEVIESIPGFGPVLGASLLVAAGDLAAFPTAGHLAAAAGLVPVPNDSGRRAGNLHKPRRYSRPLRHALYLSAQSSMMRAGPNRDYYLKKRDQGRTHSQAVIALARRRIDVLWALLRDNRTWTAAPPPRAQAA

SEQ ID NO: 117939 - protein, 354 aa, unidentified
MSQKLNAAIAVIGIDIGKNSFHIVGHDHRGAIVLRQKWSRGQVETRLANLPPCLIGMEACVGAHHLSRRLQMLGHDARLMPAKYVRPYSKGQKNDFRDAEAIAEAVQRPTMKFVATKTADQLDLQALHRVRERLVGQRTGVINQIRAFLLERGIAVRQGLHSLRSELPGILATRTDVLSPRMLRIIEDLAGDWRRLDARIEVLSSEIETLARQDKACERLMTVPGIGPLISSAMVAAIGTGDVFSKGRDFGAWLGLVPKQLSTGDRTILGKISRRGNRYLRALFVQAAWVVLVKVKCWERYGLKSWIEAAKKRLHHNVLAIALANKLARIAWAVLNKGRAFECVKTAETASRPA

SEQ ID NO: 117940 - protein, 346 aa, unidentified
MDKTDHSGIEISSEQLLVALRRDAQTLPLKSFPNTPPGHRAVAAYLARKGRVVRVCMESTGVYGLDLALRLHRQAGVEVMVANPRAVRHFAQARMQRSKTDPLDARMLLEFAARMEFQPWQPPSRTALHLCAMARRLAAITELCVAEKNRLHAARSAQALPAVIRQDLERSIAFHQRAAARLTRQALKLIEADPVLRQRFEELDSIPGIAQTSAIPLLAELGMLSPDMDARQWVASAGLDPREYSSGRSVHKKVRISKTGNRHLRRALYMPALVAVQHDPHLRAFYQHLLARGKAKMQALVAVMRKLLHAIFGMFKHNQTFDGNKVYPVPDPSCQPHPTFSTSEAA

SEQ ID NO: 117941 - protein, 411 aa, unidentified
MRLFVGDDWAEDHHDVELMDQAGRVLAKRRLPEGVAGMARLHELIGQQLGEDADDAEVLIGIESDRGPWVAALAAAGYTVFAVNPLQASRYRERHGVSGAKSDGADAHMLTDMVRTDSHQLRAVAGDSADAAGIKVLARTHKTLIWERTRQVQRLRHQLREYFPAALEAFEDLYASDTLELLAKAPDPARAARLTRAQVSAALKRARRRNIADKATAIMAALRGPQLGQPPAITAAYAVTVRSLIAVITVLNEQVKALQGQVEADFGQHPDAEIYRSQPGMGAILGARVLAEFGDDPQRYADGKARRNYAATSPITRASGKKKVVAARFIHNDRLVDALNAQAFASLKASPGARALYDELRARGIEHNDALRRLANRLVGILHGCLKTRTLYDEATAWSHRENLPQSSVAA

SEQ ID NO: 117942 - protein, 424 aa, unidentified
MEVMHERVAGLDVHKETVVACVRVMVGGRRPKRECRTFATTTEGLLNLLEWLTATRCSHVAMEATGVYWTPVWKILSDGDFELIVANAAHIKQVPGRKTDMNDATWIADLLACGLIRASFVPEEEIQELRSLMRTRKQLVREQTRHVQRLQKTLEEANVKLDSVVSDIMGVSGRRMIEAMIGGERNPQRLAALADRGLKASPKQLYDALHGRLREHHRFLLKLHLTQWDALDATIRDIDRQVDGQIERMDETTEDQQPPFRQLILRLCSIPGVSHLSATSILAEIGRDMRRFATAGHLVAWAGLCPGQNQSAGKVKSARLRKGAPWLKTMLVQCAWAAKRRKDSYYMAQFQRLKARRGPQKAICAVAASILTAIYHMLRANAPHRDLGADYFDRRSPDAKARRLVRQLTKLGFAVNLQPLDNAA

SEQ ID NO: 117943 - protein, 378 aa, unidentified
MKRILKIGMDVHTTNYTLCAMEPIIGEDDRVFATIKVTPDYKNILLFIENLKTKLGLNDEYDIQCGYEAGCLGYSLYNQLTAAGVKCVILAPTTMLTPQGVRIKTDMRDAYMIAQCLSYGGYHAVYIPTEDDDSVKEYLRMRNDHKLALKKIKQQINAFCIRHGFCYDGTKWTQAHLKWLKKLEITNELYRETLDEYMASYEEQEAKIERYDKRIEEIAEQTRYHDKVKKLECFLGIKTHTALSLIVETGDFERFAKGNQYASYLGLAPGENSSSDSIHRLGITKAGNSHLRQLLIEASGGICKGAVGHKSKDLRARQNGNTAEVIAYADKANTRLRSRYYKFIRHGKKRNVAVAAIARELACFVWGMMTDNIEMKAV

SEQ ID NO: 117944 - protein, 371 aa, unidentified
MHDTIFVGMDVHKATISIAVADGVRGGEVRQLGNFLNRADHVGKLVERLSKRGGQRLRFCYEAGPCGYGLHRQITALGHECVVVAPSLIPRKAGDRIKTDRRDSVMLAKLHRAGELTAVWVPDAAHEAMRDLIRARATAVRVLGKARQHLQGFLLRHGRVYAGKKGWTLPYRRWLTTVRFDHPAQQVVLQDYIHSVHDAEERIARLTKQIEDLVPTWSMAPVVEAFQAMRGVAFVAAVTVVAEVGDFTRFDNPRQVMAYLGLTPSEHSSGTAIRRGGITKAGNALARRVLIEGAWTYRMQARVSRKLHDRLEGLPQIVREIAWRAQVRLCSRYRRLVATGKPKVVVTTAIAREMVGFLWAIANQTQIGSCA

SEQ ID NO: 117945 - protein, 391 aa, unidentified
MKWPVQPCISWIDRGSVRGDCHTRREPAWTRLHTSGWTCIKKRSLSPPFAPALPFAKKRVIPNTPEALRKLFARMGDPSALRACYEAGPTGYDTQRLLDSLGIACDVIAPALIPRRPGVRVKTDRTDARNLARLHRAGELIPIRIPTVFEEALRELIRTREDLKNDRRIARQRVKSFLLKHGRQYPRTTAARWSGAFAEWARSQKFSEPTAQAAFHYLLAAEETRRAQLVAIEAEIMKAAEEPELAPGVARLRCFRGIDTLSAVTFLAEVGDFRRFASAASFMAFTGLVPSEHSSGHSIHHGPITKTGNAHLRRVLVEAAWAYRHRPAVGETLAKRLQGQPPVVVAYAWQAQCRLSARYRVLAQKKAHNKAVVAVARELAGFIWGMMTDRM

SEQ ID NO: 117946 - protein, 343 aa, unidentified
MNIASVGIDIGKTTFHLAAIDEHGSIVIRRKFSRKSLLAYTAKLASSLIGMEACGGAHCLARAIRDQGHQVRLIPGQFVKRYRESNKNDYLDAEAIAEAVTRKKLRFVPVKTEDQLDVQGLHRVRERLVHNRTEVINQIRGFLLERGITFNRGPLSLRKEMPYLLEDADQNLTPSLRILLSHLWQEWQCLNEQIDRIGATIEAVAESDAACQRLRKIPGVGPLVSTATVAAIGNGAAFRRGRDFAAWLGLVPKQHSTGGKPKLLGITKRGNRYLRKLFVHGARAVLLRVKYDTGGFGQWVHRLAARAPRNKVIIAIANKLARITWVVLSSGNDYHHQPVATPA

SEQ ID NO: 117947 - protein, 399 aa, unidentified
MAGPSLWAGIDAGKLDHHCVLIDASGERLLSRRVRNDEAPLTALIDDVIALADGGLVQWAIDLNAGGGALVISLLLARDQHLLYIPGRIVHHASAAYRGDGKTDAKDAAIIADQARMRRDLPEFRHRDEFTVELRTLCARRTDVAADRNRAINRLRAQLLEYFPALERAFDYSHRRGALILLTGYQTPEALRRTGRTRLEKWLRGRNAYNPVAIADRAIAAANAQHVVVTGQRLGSTIVTRIAQQILDIDAELSDLDDMIEERFTQHQQAAVIRSMPGFGPLLGAELVAATNGGLDSFHSADRLAAVAGLAPVPRDSGRISGNLKRPRRYDRRLLRVFYLAANNSIKTCPQSRAYYDRKRAEGKHHRQAILSLARRRVNVLWAMQRDNTAYQSTAKTAA

SEQ ID NO: 117948 - protein, 411 aa, unidentified
MDKVYDICCGIDVHKKLIVACLRKGNRHEIREFGATTRELLAMADWLRENDCQMAAMESTASYWKPLYNILESSDLPAMVVNARHMKAVPGRKTDVKDAEWISDLLQHGLLKPSYIPDKDQRELRELVRYRKSLVGERTRELNRLQKMLEGANIKLSGTVQDINGKSARNILEYILTGETFDESKYDEMYEQKAIAHNLKASKAQIIDDLNGFMSPLQRRMMKELLSHLDELNAHIKNLDDEIDNFMKPEEKKASQAIQDVTGIGKNSARTIISVIGTDMSRFKTDAHISSWAGMCPGDNQSAGKRKSGKTRKGNALLRTTLITCAHAAVKNKNSYFYAQFMRISAHRGKKRAYVAVAHSMLIAIYHILNDGVVFNDLGADYYNQFNKERKINAYLKKLKALGWEAPVVVA

SEQ ID NO: 117949 - protein, 309 aa, unidentified
MEHFIGIDVAKDRLDVHTRPGGEVFAVARDGNGLAMLVERLQRLAPALVALEATGGYETVVASALGAAQLPLAVVNPRQIRDFARATGKLAKTDRIDAAAIAHFAEAVRPPARPLADAEARALGELVARRRQVIEMIIAERHRRRMASQRRIIRAIERHLALLQAELSELEGDIDDAIRKSPAWQADADLLVSVPGVGKVTLRTLIAELPELGHLNRRKIAALVGVAPINRDSGTLRGRRTIAGGRPAVRTALYMAALVASRANPVIAAYYAKLRAAGKTGKQALVACMRRLVVILNAILRDRKPWQPA

SEQ ID NO: 117950 - protein, 344 aa, unidentified
MNIATMGIDLAKNVFQLHGVDGHGKVLLRRQIHRGQVRGLFVNLPPCLIGMEACASAHYWARTLESYGHTVRLIAPHFVKPYVKTHKTDATDAEAICEAVNRPNMRFVPIKSIEQQSALSLHRVRQGFVRARTGQACQIRGLLAEFGIVMPRGIANIKQVPKLLQVAGKELPAPFCRLIERLLAHLKELDRQARELEEQIVDWHERSEPSRRLAKIPGIGPITASALVASISDVRCFKNGRELAAWLGLVPRQHSSGGKPIVLGISKRGDRYLRTLLVHGARSVILRARKRDDENGLWLKKLLERRHVNIATVALAHRTVRTVWAMLAHDREYCPDYKSLPVAS

SEQ ID NO: 117951 - protein, 422 aa, unidentified
MEGTESNYQWYVGIDWGAERYEVCVLDRQAHVVARRSVAHSGTGIAEFVDWLVKFCEGKPERVAIAIETPRGAMVESLVERTFAVFAINPKQVDRFRDRYTVAGAKDDSRDAFVLGDSLRTDEHCFHRVGLDEAAILRMRELSRLEENLQQESNRLSNQLWEQLHRYYPQMLALSKAADEPWLWELIEWAPRPAEAGKLELARVQQLLGSHRIRRIRAEQVLEALKKEPLRLAPGAEEAASEHALLLLPRLRLAHEQRTQVAKRIQRMLREMSAAEPTEKADKREHSDVKILLSLPGVGRVVPATVLAEASGPLRERDYHRLRNYGGIAPVTRQSGKKKVVSMRYGCNMRLRNALYHWARTSVQKDAAAKKHYAALRQAGHSHGRATRGVADRWLAVLIAMLKAGTLYDPERRGKGQATKVS

SEQ ID NO: 117952 - protein, 354 aa, unidentified
MPHNTSRLEAVATIGIDIGKNTFHLIGLDRNGAIVLRQKLSRRQIEARLANTPPCLIGMEACVGAHHLGRQLKAYGHDARLMPARYVRPYSKGQKNDFRDAEAIAEAVLRPTMKFVAIKTVEQLDLQALHRVRERLVCQRTSVINQIRAFLLERGIAVRQGPSALRSEIPIVLSMTDKLSPRMIQMIEDLCADWRYLDERIETVSDEIKTLSEQDDGAKRLMTVPGIGPIISTATVAAIGNGDAFSKGRDFGAWLGLVPRQMSTGGRTVLGPISKRGNRYLRMLFVQAAHAVLLHPQCWERHGLKSWIAAAARRLNRFKLAIALANKLARIAWGVLHGGRSFEVRSMKPAAQCL

SEQ ID NO: 117953 - protein, 427 aa, unidentified
MKNNRNERINQVHENTLVIGIDIAKEKHYACAVDSRGRELAKVWNFSQSREGFLYLNNAIRELMEQHDKTEVLIGFEATGHYWKNIAFYLKISDIPFVLVNPLHVKQSKEMDDNLQTKNDVKDARVIAKLIPNGYFSVPRDMSIVDHNLRQGSSIRERIRKDIGAVKNRIQRWIDLYFPEFRQVFKHYGQQERTVLKLTPLPEDIKNASVEDLVKQQKDAGAKYAGKPKMAKLIQLAKHSIGITDGAYIAKIEIKALIDQLELLQSQLEEITTEMVEQAKNLPEFNFLVSIKGISENTVSELLAETGSLQNYNHPRQIIKLAGLTLRENSSGKHQGTKKISKRGRRGLRRLLYKAILPLIRNNTAFHKVYTYYHSREDNPLKKKEAMVVVCRKLIQVLHGLSVHQTVFNPERMLGDLTYIEATKIAA

SEQ ID NO: 117954 - protein, 402 aa, unidentified
MNAVGIDVSKSKSVVAIMRPFGEIVSTPFEIKHTASDIHSLIELINSVEGESRIVMEHTGRYYEVLAHQLLEANLFVSAINPKLIKDFDNDSLRKVKSDKADAVKIARYALDKWQNLKQYNVMDELRNQLKTMNRQFGFYIKHKTAMKNNLIGILDQTYPGVNTYFDSPARSDGSQKWVDFASTYWHVDCVRKMSLNAFIDHYQNWCKRKKYNFSQSKAEEIYGKAKELVPVLPKDAITKLIIKQAVDQLNSASTTVESLRTLMNETASKLPEYPVIMAMKGVGTSLGPQLMAEIGDVSRFTHKSAITAFAGVDPGVNESGTYEQKSVPTSKRGSADLRKTLFQVMDVLIKTHPEDDPVYQFLDKKRAQGKPYYVYMTAGANKFLRIYYGRVKEYLSSLPES

SEQ ID NO: 117955 - protein, 381 aa, unidentified
MSDRKDIILVADYHAQNIEYRCFNEASGEEHNGRFGTSAPAIVQRIEEATRMLSAGGKVVWIMESTTGWARVKDLIGVRAEFVLANVLEMPLPPKARRRKTDKIDTGRLLREYLNGRLPTSFQPEACLRQARRLVDFRQELVVRKTAVRNWIGSLLHHETWHVRTNLWSEKGLERLRKMDLPDSDRELVKLKLEQLEQLSQQQESVEARMQELYDRWPEAQWLDEIRGIGMVTAVSMLAHIGPIQRFATAEDLIGYAGLAPGVRQSDGTSHHCRIGGGGTDGRLRWMLIEATQWLCQIPRYRPTYERVMAKRGKKVARIVVARMVLRSIHKMLLDRVRFNPVSQAPAEKAFNALEPAGGLEPVGKRQEQRRPKPKPGLCAV

SEQ ID NO: 117956 - protein, 391 aa, unidentified
MVYVGIDVAKDKHDCFIVNSDGEVLYDVFTIQNDMDGFEDLLFKIKTASKDLSKVKVGLEATGHYSCNILGFLKSKGLYTIVINPLYTSLSRKSVSLRKTKTDKVDARTIASMIMSDVSLKPYSDTVYHNEDLKSLSRYRFDKVSDRSKLKQSVSRLVNILFPELEKLVSTLHAKAVYALLSEFPGAHQVASANLKHLTALLSTASKGHFGREKANEIREAARRSISSYLPAKSLELRHTIKLIHELNAEIAEIETEIKKIMDSIDSPTLSVPGISYALGSVIVSEVGDFSRFDNPDKLLAFAGCSPSTYQSGQLYSTHAKMEKRGSKYLRWALLNAAKYVCKWEPTFAVYLRKKLAEGKHYNVAISHAVKKLIRVIYHLEKTNQQYIKAS

SEQ ID NO: 117957 - protein, 400 aa, unidentified
MIDSDGVGVFLGLDVGKSNHHGHGLTPAGKKVFDKALPNGEPQLRAVFDKLKAKFGTVLVVVDQPASIGALPLTVARDAGCKVAYLPGLAMRRIADLYPGEAKTDARDAAVIADAARTMPHTLRSLELADEITAELTMLVGFDQDLAGEANRTSNRIRGLLTQFHPSLERVLGPRLDHPAITWLLERYGSPAALRKAGRRKLVEVVRPKAPRMAQRLIDDIFDALDEQTVVVPGTGTLDVIVPSLAKSLAAVHEQRRALEAQIEALLEAHPLSQVLTSMPGIGVRTAAVLLATVGDGSSFPSAAHLASYAGLAPATKSSGTSIHGEHAPRRGNRQLKRAMFLSAFAALHDPASRGYYDRCRARGKTHTQALLRLARHRISVLFAMLRDGTFYEPRTPRIA

SEQ ID NO: 117958 - protein, 430 aa, unidentified
MKSNTQNAKIEAITEKTLVLGIDVGSETHYARAFDYRGIEYSKKPFKFSNTEAGFVTFKEWILDLKERHEKDKVVPGMEPTGHYWFNLGKFLQDNEMKPVLVNPHHVKKSKELDDNNPTKNDRKDPKVIAGLVREGRYMIPYLPDGVYADLRTASNIRFQLQAELTRIQNRISRWFNIYFPEYKTVYGKPDAKSGILILKAAPLPEDILTLGIDGVNQIWRDAKLRAVGKARAKTLIEAAGHSVGSKEGAVSARMEIRMLLEDYESRNMRLQEVMVLIEELVKEIPMAEKLLEIKGVGIRTVSGFLAEVGDISRFNNPKELQKLAGLALVENSSGKHKGETTISRRGRKRLRYLLFEVAMSLVAKNPEFRELHNYYTTRRRNPLKKMQSLMAVATKLIRVFYAMLTKGVDYDPKKMVSDIRRPAAYLQVA

SEQ ID NO: 117959 - protein, 354 aa, unidentified
MNIGVDTHKKTHVLVAVGAQGQTLGTRTVANTPAGWAVALQWAREQQQQQVRWGVENTGSLGKGFAQFLLAQGEADVREVVPHRTAQYRRRGRTQDKTDTADALAMARLLGAEGAGLPLVHADDASTELRLLSDHRDNLVADRTRLVNQLHAQMLQLDPQYQERSGPLTRAAGVRYCEQFDPPHADALVCTRLLIVRQLATRIAALTTAIAALTALMGRRVLALGTPLLQLRGVGPVIAARLLGELGCILRVHSAAALAALAGIAPVAVASGSRHGHRVNFGGNRRLNRAIHVIALTQRRCEPLAQAYYAKKRAEGKTARAAMRCLKRRLVDVLYRLWYDRPVESPQPVAAIAA

SEQ ID NO: 117960 - protein, 464 aa, unidentified
MRAGKQLWRNRKEKKEWGRRLQSEDPGLEVVHPHAAGIDVGNSTHYVAVRPDRDPEPVRRFECFTADLHRLADWLQSCGVKTVAMQSTGVYWIPLYEILEEHGLEVYLVNARHTKNLPGRKTDVQESQWLLKLHTYGLLNNSFQPVSEIRVLRTYWRQRGEHVRGAATCIQRMQKALTQMNVQLANVISDISGLTGQAIIRAIVAGERNPLKLAMLSDPRVHASHEEIAKSLEGNWRPELLFVLHQELDMYDTYQKRIAECDQRLQKHLASFTRPLSIRPPTQKLKTKKPAAKNAPRFDLSSELQRVTGVDLTRIDGIDVMVAQTLLSEVGLDMSRWTTESHFASWLGLCPDNRISGDKVLSRGTRRVVNRAATALRQAANTLMRSRSYLGAQYRRLRTKLGAPKAITAMAHRLARLVYRMLKYGQTYVDKGTEYYEERFRQQQIQLLRKRAAKLGLQVAEIHA

SEQ ID NO: 117961 - protein, 429 aa, unidentified
MIMGFTKPIEHFNLKRKKVITMNTLYVGIDVSSKSNVVYLMLPNGDKHSNFSVANSHEGSTQLVKRILSALTSLSLDTVLIGLEATSVYGDNLVYFLREDASLAPFHRKIHVLNPKQVKKFHDTYNDLPKNDYVDSFVIADCLRFGRINKEVYLGDYRYKALQNITRARFFAVQNLIKEKQRFMNVLFKKYSTMTQEKVFSDTFSTTALAVYDEFDSAEALANMDLHELTDFIIKKGKNRFPDPDAVAKAIQKAARSSYRLPKTVNDSVNQVLSISITSIKALESQIKEFDKAIKAQMELLPNVLISIPGIGPVYSAGIMAEIGDINRFDNQAALAKYAGLAWKQHQSGDFEAEVTRLIPSGNRFLKYYLCEAALSLVRCDKEYSDFYPLKYKEVNRCQHKRALALTARKFVRLVFRLLKDNRLYCPAK

SEQ ID NO: 117962 - protein, 340 aa, unidentified
MRSKTVLSKKFKTVGQPNIDELFKVLETYCQDKPHMAVVESTYNWYWLADEFEKRNWNLRLADPSTVSKAGFKYSDDYTDASYLAECVRNGSIRSTAIMPKDDRAVRDLARYRMTLVEDRGRLKTILVNMTANHLSIKLNADKLLKEIDEAVEKAASASDEGATDEVLSHYYDNRQVRTKMRSLLRRTRFLTHEVEALNEELTELIKPNVYATSLQSIKGCGYVTSMLIGLEIVDIGRFRTHKDFVSYCRLAPTSKLSNGKSKGLGNAKNGNAYLSWALTELATFVVRYNPEAKRVYDRYFNRSRLRVKAIRSVAAKIARGIFMMLKNGEVFDMKRCFGG

SEQ ID NO: 117963 - protein, 335 aa, unidentified
MQVYGIDLSKEKFDVSFIDAKGKEKNREVKNAVVSISRFLSSVSEDSILCAEHTGVYGDILVYLCNQMNISIALVPGYTIKHSLGLLKGKSDPLDSKRIREYGERFSDKLEYAEYAEENIAELKQLYTLRNQLVKQRRALRTVDTGRGHLPMQSISVHNHIHAVFSSLDNEITSIEDEIEALIKANQDLNENYELAKSVFGIGPVIATDLLIKTGNFKTIDTHRKAASYAGVCPFPNTSGKMVGKSKTSPHADKKLKSLLYMGAKAVVKNNKEFRLYYQKKQLEGKPHYLIMNNVSNKLLRIVFSVVRNKTPYTSDHVCLDPREKNNNSSTKKVA

SEQ ID NO: 117964 - protein, 317 aa, unidentified
MTQKQVIVGIDVAKEKIDAAIRFGAETSFANSAEGRRELPAWLKEHGVGKAAMEASGGYERSWARLLREAGVEVAIVDPKRVRHFAKSAGQLAKNDPIDARMIAWFGEVFGHASGQPHDEERQELDQMVTARIGMARLKEQIEGWGEHEQPKAVQKAHQALLKAVVTQLDKLEDVIAAKIDKTECFAQRAEIIQSVPGLAGTAAAGFIAFLPELGLVDRQAASALLGVAPFNDDSGKRHGERHIQGGRRKLRKLLFMPIVGAATQHNPVLKACYQRLIAKGKKAKVAFIACMRKLIGILNTMLARGEKWDPNKHAIA

SEQ ID NO: 117965 - protein, 390 aa, unidentified
MHVVAHQPEAPGAIRSDLGAIFVSLELSRSTWLITSLSPCAGEKMSKHGVAAGDIGALLARFSEFKQKAFARTGKSFPIIVIQEAGLDGFWIHRVLQSEGIESHVVDPASIATSRRRRRAKTDRIDGEALLRALLAYKRGEPRVCAMVKAPTPEEEDRRRLSRERKTLIGERVEHVNRIKGLLFCQGVSDYEPLRRNRRQRLDELKTGDGRALPDHLKAQISRELDRLELILEQIKAVEAGQNTLFAAAKAEAPTPAPVTMLLDIKGIGPEFAAILWMEAFFRSFANRKQIAAYAGLAPTPWQSGAVNREQGVSKSGNPRLRTTLIQLAWLWLRHQPQSALALWFKERVTRNGGRFKKTTIVALARKLLVALWKYVTAGIVIEGAVMKAA

SEQ ID NO: 117966 - protein, 342 aa, unidentified
MKDTMIGVDLAKNVFVLHAATMTGEVRYRKKLSRGQFLRFLSEQPPTIVIMEACGSAHYWARELVKVGHEVRLIAPQYVRPFVKRQKNDAADAEAIVIAARQPEMRFVPPKTADQQARAVLFRARERIVRQRTELVNALRAVLYEYGQAIPQGIAHIQRIEAIVERAEIDLPELVREECRDLLAQIDEKTARIKEKAKKLVDLSRQSGIAHRLQTMPGVGPLVALAVEAFAPAMENFRCGRDFAAWLGLVPRQFSSGGKERLGRVSKAGQADIRRLLIIGAMTCVSWAGRKPPVHGSWLSRMLAKKPKMLVAIALANKMARNIWAMLTKQEDYRDPALAIMA

SEQ ID NO: 117967 - protein, 431 aa, unidentified
MKRARLIQPEKKSAATSSSLSMIQPDAAGIDIGSREHWVAVPEDRDERPVRSFGCFTADLYAMADWLRGCGIKTVAIESTGVYWIALYQILEDRGFEVKLVNARQVRNVPGRKTDVQDCQWLQRLHSYGLLSGSFRPEAQVCVLRSYLRQRDNLIRYASAHIQHMQKALTEMNLHLHKVLSDIKGVTGMRIVRAILEGQRNPVALAAMRDGRVKSSAAEIAKALEGDYRPEHLFVLRQAVELYDIYHEKIASCDREIEAVLSAFEARSQGSPCPPAKPRKRRKNEPYFDLRSHLFRVTGVDFTQIKGLDTSTVQTILSEVGLDPSRFPSEKHFCSWMGLCPDNRITGGKIKKRSTRKVTNRAADAFRLAAQSVANSLSALGGYYRRMKARLGSPKAITATAHKLARLFYRLWKTGDAYRDPGLVLTCVSHR

SEQ ID NO: 117968 - protein, 336 aa, unidentified
MKKVYRLQHCVVRGKEIFVGLEDSKRTWKLAVRSEKLLIHQVSMDAKYPALIGYLKNQFPECTVHLIYEAGFKGFNLYDQLTEDGIDCVVIPPHVVTEPKVNRVKTDTRDARRLAKVLENHDFKDSCCVPDKERREDRQVSRTLIALQKDVVRTRNRIRKFLQFHGIEVALPDRWGRNEFRALKKLELSEPLRISLDIFLTQLEELWAHQVALRAALKKLCRKERYHKTFTIARSLPGIGWFTAIRLVLERGEDLTRFGSGKKIASFVGLTMREDSTGETERKGRITGMGSGFIRSTLVENSWMSITKDPVLLAKFTRVWHASGSRKKQSSRWRGC

SEQ ID NO: 117969 - protein, 343 aa, unidentified
MPYFVGLDVSQKTTSICVVDANGRRIWRGVCATAPEQIEQKVKRHAGDGARIGIETGAMTPWLVHELRGRGLDVVCLDARHARAALKMQINKTDQNDAEGLAQIMRTGWYRSVHVKSLDAHRARSLLGARAQLVGMRTRLSNHIRGVLKTFGILPGGVRGMRFDRRVEAQLVDRPDLEPIVGPMLATWRQVREQIKAFDKAVRALVRKSVECRLLMSAPGIGPLTVLAYVSTVEDPERFARSRAVGAHLGLTPRQYQSGEVDRSGRISRCGDTLARTLMYEAAVVILTRVKRSSGLKDWALNIARSSGHGKARVALARKLSVILHSMWRSGEPFRWSAPVAAG

SEQ ID NO: 117970 - protein, 318 aa, unidentified
MNEVYIGIDVSKNTLDVASFPTSKSWQFENHATGINQLVSMLRKQSPALTVAEATGGYETEMAYALKKAGIRCAVVNPREVRDFARATKKLAKTDRLDAYVLAHFAALIQPEPRPLPDEDARELEAILSRRRQVVEMITSEKNRLHHAMSPVKEDILAHIAYLEQRLQDQEFALEGRIDESPVQREKYNLLKTVPGVGPNLARTLLIGLPELGDLDRREVAAVVGVAPYNRDSGKRRGIRHIRGGRPDVRSALYMSTLVATRYNPVIREYYLRLCSSGKAKKVALVACMRKLLTILNAMVRNHSPWAVSRPELAFSVA

SEQ ID NO: 117971 - protein, 341 aa, unidentified
MDTVSLVGIDLGKHCFHLHAQDASGRMVFRKKLTRSQMFALLGNFPSCTVVMEACAGAHWIARRLQALGHEAKLISPHFVKPFRQGNKNDFADAQAICEAASRPSMRFVSPRNEAQQVVSALHRVREALVRERTGTINQIHAFLLEFGISLPRGMAVIRRLLAVLETQALPPRLVAVLERLQAHFKYLDEQIGQLEHELLTQLHEDERSERLLEIPGIGPITASVLMSELGDAHQYGSARQFAASIGLVPRQYSTGGKPTLLGISKRGDKGLRRLLVQCARVIMLRIERRTDSLGTWVRSLLARRHSNVVACALANKLARIAWAILAKGTHYRSAPAALAA

SEQ ID NO: 117972 - protein, 378 aa, unidentified
MYRILKIGMDVHTTNFTLCAVEPILGQEANVLARATVGPDYKNIIDFISKLKNTLKVTDKECDIQCGYEAGCLGYSLYMQLTKAGIKCVILAPSTMLTQQGKRIKTDKRDALLIAQCLCYGGYHAVHIPTDDDNAVKEYIRMRDDHKISAKKIKQQINAFCIRHGLIYTGNNWTGKHRAWLKAQKLDPINQETLNEYIVSLEEAEAKIARFDKRIEEIAVETKYVEKVKALRCLLGIQTHTALSLVVETGDFKRFAKGSIYAAYLGLAPGEHSSSTDINRLGISKAGNNHLRKLLIEAAGGICKGAIGHKSKALRAKQEGNTAEIIAYADKANTRMRSRYYHFIRRGKKRNIAVTAVARELACFIWGIMTNNIALNPT

SEQ ID NO: 117973 - protein, 406 aa, unidentified
MKQIVSVGIDVSKGKSTVCAMIHPNTIIKESFEVLHTVEEMSMLADYIGSLDGEIRIVMESTGHYHLPVAQFLYQKDFFVCVENAYIIRQFSRIMLHGAKTDPLDAKKLAKYGLAYWSELKPYKFHPSCYTELSLLSKQYQTYIKLLIAAKQNVIHLMDEMLPGFKEALDTASSVQFSKVKYVDFAKEFYHVDMIKTMGKEIFRENYKQWCKEKGYRFQSEKADELFHLAEDGIPTLPTEFPSTRLCMEVATEQVSQLGYALEQILSQMQNLAKTLPEYQTIRQMGGMGEKLCVRFIADIGDVRRFHNGKALVAYAGIDAPPYQSGQYTGTKRRISKRGNSALRKTGYEVMKSLKSHPPKTDTRVYDFIIKKENEGKSKKQAKIAGLNKFLQIYYARVMEIYKNIV

SEQ ID NO: 117974 - protein, 372 aa, unidentified
MEERIKFFVGLDVHKDAIAVAVAEAGRTPARLIGSITHDVVKLLKLLARYSEPSTVQIIYEAGPTGYGLQRALAQRGYACQVIAPSLIPKRAGERIKTDRRDCLRLAELARAGELRAVWIPDPADEAIRDLARAREDAVNARTQVRQQLKGFLLRHDVRYPRRTSWSKGFYGWLATLNFGRAEAQTAFTEYWQAVTSADERVARLTSALANSIQGWRFESVVRALQALRGIDQISAIGLVAEIGDIGRFAHPRQLMAYLGLVPCEHSSGERVARGSITKTGNAHARRLLTEAAWNYRFKPRIGYRAQQRAEELPQTIRDIAWKAQLRLTTRFARLQARGVQINKVCVAVARELAGFVWAIASVHPQLPMPQK

SEQ ID NO: 117975 - protein, 366 aa, unidentified
MEKISIEQTFRNEILKEQRLTIGMDLGDHWSCYCVLDEAGKIILEQKVAMTPEAMKQTFSKIPPSLIALETGTHSPWVSRLLTELGYKVIVAHAQKVQLITKSNRKDDRHDAQTLARLARIDSELLGPVRHRSAQAQIHLTVIRARAELVRARTALVNAARGLVKSYGQRLPKCGTQQVNRELAAGLHAELREVLEPLLQEVESLNERIQEYEVRMEKIAKESYPHVELLKQVKGVGTQIALTYVLTLDDPHRFPKSREVGGFLGLCPGRRDSGESQPQMNISKEGDRYLRTMLVQGAHYILGPFGEDSDLRRWGLKLAARGGKNAKKRAVVAVARKLAVLLHRLWVSGEVYEPLRNSNKAMRAAA

SEQ ID NO: 117976 - protein, 343 aa, unidentified
MSEISMIGLDLAKNVFQVHGIDASGKVVLRRQLRRGAVEKFFAQLAPCLVGMEACGSAHHWARVIGRAGHEVRLMPPAYVKPYVKRNKNDGRDAEAICEAVGRPTMRFVAAKSVQQQATMAVHTTRALLVRQRTMAANALRAALGELGIVAAQGIKGLRELMARLETANEEIPEMMRGALLVLARHWQALDADERVLERGIAKAARCDGNARRLMKVPCVGPIIASTVLAKVADAKVFRSGRDFAAWIGLTGRDHGTGGKHRPGRISKRGDRMLRALLRRGASGYPRPTRPRAESAPWPRERAAAGAAGRGVRRAGCAARRGHSRAPGRGAPPARPRARSSCR

SEQ ID NO: 117977 - protein, 374 aa, unidentified
MMETFFDRCAGLDVHKKTVEVCVRVREGSGQLFTETRHFETMTRDLLALGEWLSGHGVTHVVMESTGVFWKPIYNILESGFEVLLVNARHVKQVPGHKTDVKDCQWLAQLMQFGLLRGSFVPGRELRELRDLTRHRSQLVAEKGRTANRIQKTLEDANIKLASVATDILGASGRAMLEALVGGQEDPAQLADLARKRLRNKLPELKLALEGRVMPHHRFMLRLLLDQLRHTETLITRLEEEIDRQIAPFSAAVELLMEIPGIDETAAHALIAEIGTDMSRFPTAHHLASWAGMCPGNNESAGKRKSGRTNPANRWLKSLLVQIAWAASRTKGTYFQAQYHRLARRRGKKRALIAVGHSILIVVHHMLKNGECYE

SEQ ID NO: 117978 - protein, 369 aa, unidentified
MAALLLYRSEKQMTSSVAAVDSDEVVLGVDTHRDEHTAAVVSVAGVLRGCRQFPATGQGYRDLLCWARGLGVVRRAGVECTGSYGMSLSRLLQGERVSVLEVNQPDKRARRHRGKTDEVDAEAAARAVLAGRAGAVAKASDGPVEALRQLKIVRDSAVQARTKALNQLKAVIVTADPAIRQALTGLSTKGLVQRSAQLGEGDGPDATSRYALATLAGRIIALTSEADRTEQRITALVDAVRPALLERVGIGPDSAATLLIMAGDNPERVQRETSFAALCGVSPVEASSGNMQRRRLNRGGDRQANAALHRIVVSRLRWDTRTQAYMQRRLAEGRTRREVIRCLKRFVAREAFGLINPPDPVTATPSIAA

SEQ ID NO: 117979 - protein, 465 aa, unidentified
MKRHRRRPSPKPRTSPDALERLHPHAAGIDCGSAEHFVAVPPDRDATPIRSFATFTGDLHRLADWLTACRVTHVAMEATGVYWIPIYEILEIRGFQVILVNARHTKNLPGRKSDVSDCEWLRDLHILGLLRGSFRPVDGMVALRGYLRHRGTLIECAGALVQRMQKALVQMNVQLPLVVSDITGVTGLRILRNIVAGRRDPQQLAQHRDYRCRASEAEIVAALTGNYRAEHVFVLQQNLELFDTYQQQIAACDRAVEAHLQTLATQAARATLPLPPERPRQKPRGNEPRFDVRTPLHQLTGVDLSQLDGIGPYNALRLLSEVGTDMTRWPTDKHFTSWMTLAPQNKVSGGRLLSSRTQPSANRAAAILRLAAMNLGRTQTALGAFYRRLAFRVGKAKAITATARKLAILVYHTLKGDLVYQDPGAEAYEARDRARTIRRLRQRADHLGFALVDLKTGELAEGAVS

SEQ ID NO: 117980 - protein, 358 aa, unidentified
MQYVAIDLHKRYSVASALNEQGQRTREARIEGNSAVGFAQYFKSLGEPSKVVIEATWNWGRVHDLLEAIEEVDEVVLAHPYKTRIIAEAQVKTDKLDARALARLLRADLVARAYIPSPETRRRKDVLRQRLFWVRVRTMVRNRVHQLLDRQPRVDLPQVSDLFGARGMAAMKKLALPEPDATQLRQDLDLLDELQGRIRELEAMIEKQNAGDESTAILSTLPGLGKVLAAVVASEIDRIERFVHPKKLLAYAGLVPTTHSSGGKTYNGPLMPMCNKWLRWAFVEAAWVAIGCSPYLGGLYRQHRSRGKGANTAIVIVARRMAEIAWQMLRHRRAYEDRPPTQNTFPDRSEVALVEAAA

SEQ ID NO: 117981 - protein, 462 aa, unidentified
MTISKNKGNRTNETPVPTSLPAIRPRVAGLDVGSSAHWVCGPARDDGKPNVRVFGTTTDQLNELAGWLSAQGVESVAMESTYVYWIPIYELLEARGIEVVLVNARQLHNVPGRKTDFSDCQWLQLLHSCGLLRGSFRPGEAITRLRALQRQLANLVAERTRYVQWMQKSLDQMNVQVHRAVTDLTGLTGMAIVRAIVGGERDPARLAMHRDRRCRKSADEIARYLTGNWRDEHLFNLASALRLFDTLDTEIAAYEAQLLTEIASLQPPDRQAEPVPPHPNPAKEKAIKARGEQPARTTLWRFAGVDLTRLDGISAGAAQVVLTEVGPNLAAFPSEDQFVSWLRLCPRTPISGGKPLKKRRNGLGANRIAGVLRMAATSLERSKTALGASFRRIARRKGGAVAVFATARQLARLIYRMLRYGHDYVDIGEKAYDRQFQIRRLTALTETAKSLGYTLVPNVPAG

SEQ ID NO: 117982 - protein, 335 aa, unidentified
METVYFLGIDVSKKKLDSALTIDGKNYQQDEIENTTNAIRVFFQNMKKMFGMKSSQMIVCMEHTGIYCLPLLDFLTKNKIKTCLESAVQIKKSQGIARGKSDRIDALRIAQYAYKNREELHYWEPQRGVVQQLKALLVTRDRLVKIRTQLEVPIKECEEFVVESIRKDMMKNCKRTLKAVGLDILAIEEAIDELIRTDPGLTEQVKIATSIPGIGTITATNMIIATGEFTRISVSKKFACYSGVAPFPHKSGTTIRGKTRVSNLANMNLKKLLHLAAMSAIQCSEELRTFYTRKVQEGKNKMSVINAVRNKLISRVFVCIKEKRMYQKTYRHELA

SEQ ID NO: 117983 - protein, 405 aa, unidentified
MEVVYERCCGLDIHKASITACVIVGNQKEIRTFGTMTDDLLQMAAFLKSCRVQMTAMESTGSYWKPIFNIMEVEDVPAILVNAAHIKTVPGRKTDVKDAEWIADCLKHGLLKSSFVKPRNQRELCELIRYRGSLIEERAREYNRMGKVLEGANIKLTSVVSKMDTVSGMSMIRSLIDGVEDPEVLASMAKGRMRSKTHDLKRALNGLIAPHQKMILKAMLAHNEQMSKLIAELDTEIEKRMSQDVELIEELDEITGVGKNSAQTILAEIGTDMSRFPSANHLASWACMCPGNNESAGKKKSGKTKKANSTLKKTLVQCGRAAANSKNTYLSALYHKIAARRGAKRAVVAVGHSILVTIYHMIKNRTNYHDLGADYFQNRNKEALVKQNIKRLQALGYNVVLEKIA

SEQ ID NO: 117984 - protein, 345 aa, unidentified
MEPSHYVGLDVSQELTSVCVIDQQGAVVWRGKCATDPEAIAGAIRQHAPAVVRAGLETGMLSNFLTRSLRARGIPIVCLDARHAKAALRIQINKTDANDAYGLAQVVRTGWFREIAVKSMDAQALRLLLVARAQLVSQRQAIANTLRGLLKAFGYVMRKGAGGLFARRVREVCDGNPALSAIAEPMLAVWQSQREQIRVLDRQLLQRAKIDPSARRLMSIPAVGVIVALAYVAVIDNPERFRQSSTVGAYLGLTPRRYQSGDVDCTGHISKCGDGLLRAYLFEAANAILTRKVTDSTLRRWGQALVARIGLRRATVAVARKLAVIMHAICKNDRDFECAGLPARA

SEQ ID NO: 117985 - protein, 467 aa, unidentified
MQLRLGIDIACRAPHQASLADERGEFIFTGRRFRTSVADLDHLWAMLPDGTESRDVTVVMEPTRNAWVPLAAWFSRRGARVVLVPPERSADLRAYYAKHTKTDRLDSRMLARLPLLHPEGLHEEHGLGPGDRLRRATRLHQTLTRRRSQSLARLDAMLEILGPAWLGVFGADLSNKTPLRFLAAGYACPHTVKRLGKARVVRFLYRHSRGRWGEEEAEALLEAATETLSLWADDLDFGELADDIAIEARLALRLGEELKDLDERIAIFLAEADPTGILTSVPGIGRVLGGQILGRLGDPNRFRTLAGVRSFSGLVPSLDASGVTGRHGGPTKRGDASLREAVFLAADQARRCDPSLAARYHRLMVEAGKHHNSALCHVAAVLLTRIVACWRAGEHYVIRDVDGTMVDAAEGRRIVRERYTVPADLRAARRAGGRGDGRDGTGRRNQGSLRAPSTGPSRVNARALAGA

SEQ ID NO: 117986 - protein, 363 aa, unidentified
MFEGVYFVGLDVHARKTAAAAVRLGSDEVRKAQLPGSSAAAIEWLQTLPGQVRAVYEAGPTGFELARSAKAAGVELMVCAPGAIPRQPGDRIKTDTRDALKLARLHAAGQLRAVVVPARELEALRDLVRAREDLRGDLMRARHRISKLLLRQGILWTGPGETWTERHLQWLSNVHFQQPLQEVLFGEYLAHHEVLLARRERLDRLIGEQSVQGPWAPLVARLRCLRGIETLTAVGLVCEIGDISAFSHPKQLSSYLGLVPSEHSSGAKRRQGSITKVGSSHARRLLVEAAWNYRRAPSVSLTLKRRQQDQPPAAIETAWRAQIRLHRRWAHLDAACSKKRTTVAVAVARELACFVWEVAQKPD

SEQ ID NO: 117987 - protein, 356 aa, unidentified
MNSTKYIGVDVHKEATTIAVMNPAGKLVMESIVETKAATIVQFIEGLRGELYVTFEESTWAAWLYDLLKPHVTKVVVCNPRKNALLKSGNKNDRIDARKLAELLRAGLLSAVYHGETGLRTLKELCRSYLAISKDLARTMNRIKALYRSWSIPCGGVSVYAPRHRAEWLSKIMEPGVRRRAELFYQQLDGLQKLRQEARGDLLAESRKHGGTKLLQRIPYIGPIRAALLIALMQTPHRFRTKRQLWAYSGLALETHTSGEYHYVQGQLQRSKRPVALRGLNQNHNHDLKSIFKGAATKGGSAKGPFHDFYSALLAQGMKPTMARLTLARKIATITLLVWKKGVCFDAQQLKRQVSV

SEQ ID NO: 117988 - protein, 343 aa, unidentified
MDYFAGLDVSVKDTSVCIVDDAGKIVREVKVASEPEALLAVLSNASYRFKRIGLEAGPLSQWLFSTLGEAGLPVICVETRHMRAALKAQINKTDRNDARGMAQMMRVGLYRPVHVKTLRSQKLRMLLTHRKLLQSKAIAVDNDLRGTLRNFGLKVGAVGAVRFEARIKELVESLPDLAMLMEPLLVVRRVLREQLGILHRRLLAIVRDDDVCRRLMTIPGVGPVVALTYRATVDVPARFRKSKSVGAVFGLTCAKYQSGEIDRSGKISRCGDEMMRVMLYEAAQSMMRAKKWSWLKAWAMQVAKRCGMKKAIVALARRLAVVMHRIWVDGTEFRWTREATAAA

SEQ ID NO: 117989 - protein, 391 aa, unidentified
MDAAGRRLTAARLPEGVAGITRLHEMIGAQLGEDAGDGEVAIGIETDRGPWVSALVAAGYTVYAVNPLQAARYRERHGVSGAKSDKADAHTLADMVRTDAHQLRPVAGDSPQAEAIKVVARAHKTLIWERTRHTLRLRYVLREYFPAALEAFDDLAAPDTLELLAKAPDPASAAKLNRSQIRAALKHARRRDIDIKTTRIQAALRSQQLGRAPVITAAYAATTRSIAAVLATLTEQINTLRGQVETHFGRHPDAEIILSQPGTGVLLGARVLAEFGDAPGRYADAKARKNYAGTSPITRQSGKRKTAHARFVHNDRLVDALMSQAQSALLASPGARAYYDKQRARGLDHHAALRQLANRLVGILHGCLKTRTLYDEATAWSHHNQDQRTAA

SEQ ID NO: 117990 - protein, 341 aa, unidentified
MEQATTIGLDIAKYVFQVHGADSAGHVLFRKRITRGKLLGFLAAQAPCVVAMEACAGAHYWAREIAKLGHHVRLIAPAYVKPFIRRQKNDAADAEAICEAAQRPSMRFVPVKTEEQQANGIVFRARDLLVRQRTQCVNALRGHLMEYGYVFPKGITHVETLAAVVEDLQSSLPDRVRVILQLLVDTFTALEAQITALDAEINQRSKSDPTARRLMTIPGVEPITSTAITALVPAAEGFPAGRDFAAWLGLTPLQKSTGGKQKLGAVSKRGERTIRRLLIIGASAVVQQASRRGAPKGSWLAQMLARKPKMLVTVALANKMARIIWALLVKGGTYRTPTAAA

SEQ ID NO: 117991 - protein, 420 aa, unidentified
MAFKIFRFNCCGLDVHKTWIYACIGITDSNGRTEYKQARFSSFSKGLKELCDWLAKYNCSEVCMESTGKYWIPVFNVLEKADISVILAHPKYTKPQKGNKTDRKDAKWICNLFMCEMIKPSFIPPADIRHLRDLVRYRFKLTCMITGEKNRAQNCLTVSNLKLDDVFSDVFGKSSRSITEYMLAHPGEIFDVAPFVDGRCKTPVEEIQAAVDGAISPEQAVKLRQCLSHIDELEKHLKEIEREILRLSDKYEAALDLIRTVPGFGKRPMTAIQILSEIGGDMSVFPTAKHLVSWAGCCPRNDQSNKKIKSTRISRAGNYIKPILVQIANGLLRSKKHPEITDRYKRIKSHRGHKKAIIAICRMLLTAIWHILSDLKPYTPEGYLEPRPVKESKVLTKSQALHLLKQRGYIIKDDAEPALN

SEQ ID NO: 117992 - protein, 342 aa, unidentified
MEIATIGIDLSKTTFHVIGLNPRGEIVLRRKLSRKQLLLYTANRQRMLIGMEACGGAHYLGRALREQGHDMRLMPAQYVKPYVKTNKNDYLDAEAIAEAVQRPTMRFVPIKTDEQLDLQALHRVRDRWVARRTAVMNQMRGFLLERGVVIRKGPSHLMTQVQEILTNGGTLFSARLCGLLQELKQEWDGLDRRIEQSNAELQRIAKQDDTCHRLMEVPGVGPLVSTALVAAIGNGVTFRKGRDLSAWLGLVPRQHSTGGKPKLLGISKHGNEYLRRMFLHGARSVVMQMERKPSALATWLTELTQRTHRNVAMVALANKMARIAWAIMSKGTRYCVLAPATV

SEQ ID NO: 117993 - protein, 428 aa, unidentified
MNIEDTIRRKQFCQIKDEIAGCDDYLVVGIDVAKDKHHAFMGNTTGKTLSRKLVFENSLDGFQKLLEHSKAVKARAALSKVVFGLEPTGNYHKPLAAYLIRCGCHVVLVTGKAVKNNREQLDGRWDKNDDKDAANIADLVSRGRCLYYDLPSPDLGQLRQVLSLRKRLKKEEHRLRMNIRNNLLAQYFPELDAYYSACESETLAIVSWCLDPHQIAGKHFDEFFTQVTSKKRGIAQKLRLQKIHRAASQSVGCEMGPAVQVEAQLVVNKLGEVRRQLKEVEQWMEDIACGFAEYPYLLTIPGFGPYVAATVLAAIGNPQRFNSANQVLKLAGYDLSASRSGKNSHRAIAVISKKGNGQLRYALYQAARVASSRSADFINYFTGLLRGRERERGIKTKMRVKLAAKMLRIAWALMKKKQVFNPDYLFIK

SEQ ID NO: 117994 - protein, 401 aa, unidentified
MKQLYAGIDWASRTHAVGVVDDHGGIRARFEVPNTGKGFGGLIRRLTKLQVAGVAIERPDGPLVEAMLDAGLRVVVITPRQVKALRSRYRATGAKSDTADALLLADVLRTDGHRLQPLIPDSDATIVLRALGRTRKDLQKARVALCNQLTAQLERCFPGAVGLFADLHSATAIVFLRRYPTSQAAATLTQATLTAFLRRIHYSGRTPVAVLLARLKTAPLAAISPDQATGRAVCVQALLDAIQACHSRERELEAEIIERLEVHADQQIFTSLPKAGHGVRAAALLSEIGDVRTRFPDEEALAALAGVAPVTRASGKLRSVGFRWACDKKLRNAIIDFADDSRHASPWAASIYAQALQRTRRHPQAVRILARAWIRVIWRIWQDHTTYDPTKHGGAVRLLTA

SEQ ID NO: 117995 - protein, 467 aa, unidentified
MTPHKDFFLDSRPSAPTPTLPPSPVLSDALQVCHPHAAGIDIGEAEHWVAVPPGCDPQPVRRFGTFTVDLDALADWLIDCGITTVAMESTGVYWIPLFELLEARGVQVLLIDPRQAKRAPGRPQTDRLDGKWLQRLHAYGLLAGAFRPTDQVCVLRGYLRHRQMLITSAAHHIQHMHKALEQMNLKLTQVVSDITGATGMAILKAIIAGERDPQRLAKLRNARCHHDEDDIAKALQGTWRAEHLFALQQAVALYEFYHQQVALCDQPIKAHLETFADHSAGQPLPPKARRHKKTNEPRFEARTPLYRMAGVDLTAIEGIEEGTALAILAEIGTDMHRWPSVKHFCSWLGLCPQHQISGGKVLSRRVRPGAHRVTVALRLAARSLHHSQSALGAFFRRMKTRLGTPKAITATAHKLARLVYHLLKHGSAYVQQGLDAYEAQYHERKVKTMAKQAKALGYTLVPLVAQG

SEQ ID NO: 117996 - protein, 349 aa, unidentified
MIARRDAACFVGIDLHKDTLTACIVRRTDREVTYKKIACKCRDQIRSFFASLPQPSVVAIETAGFYRWLWTELEPLAGQLVLCDARGARALAGRRIKTDREDALNVALLLADGRLPLAWAPPENVQVLRTWTRHRNGLTRQHAKVLHHVKSTLNRLNFPGPVRLDAAALQRYLLAGVQRFSADDQAMLWQHQRRLVEIEQDRAQSERRIAELMRAPEFARIPEIIESVPGVALVTAAAVIAEIGDFSRFADSKAIGRYAGLAPTVYASGNSSRLGHISKTGAPDLRWVLQQAAWTAIRCDAGFKKTWLRIAKTAGKKAAAVAVARKILVLMWTLQRKDEPSKSRDPVAA

SEQ ID NO: 117997 - protein, 321 aa, unidentified
MDTTQQTIFAGVDVAKDELEVCVLPGEHRITVARDGEGVAKLLDFFKQHGVECVIVESTGGYDRIVTAACLEAKLRTSLINPRQAKHFGIALGLLAKNDRIDARTLALFGDRIRPRTMEKTPEKQRELHDLVTRRRQLVAMQAAEKTRREQAATKLAKKSIAASLAFLEKQIAALDAEIARRIEADDSWRNTDGLLQSVPGVGEATSAALIAELPELGKLNRQAIASLVGLAPFDHDSGKMKGQRSIWGGRKTVRTALYMAALSAIRWNPKLRAFAERLKRAGKKFKVIITAVMRKLLVTLNTMLKNNTPWQDSLATEISQ

SEQ ID NO: 117998 - protein, 403 aa, unidentified
MQHVIAFDVSMGKSYMVIYNAQKQCIFESEINHSKPDFEELRKRIDQLMTENKKSPHIVFEATGVYSRQLERFMQDNKFEYFLLNPLEAKLQCDSLRIHKTDRSDAHQLALTHFTASRREKTGTDNLFHQLKSLSRFYNELDDELSLIRSRMHKVIQLTFPELEQIFITKSDLFLNFVQLFPHPDFVRNLSKTVMKNQIRKNANKNISIRVAEKKAMEVLEAARYSYPAVRQDDVLCEQLKSYAKRYQELLHQKEQCITKMVRLAESRTEYPIILSFPGIGPNTAIRLLAEIGDITRFKNNKQLNAFAGIDIRRFQSGKTFFKDKINKRGNKHLRKLLFLIIQNMIKLRRYGQNHIVEYYDKLKTQPYNKCHKVASIACVNKLLKLLFYLITHNIHYDYRLTA

SEQ ID NO: 117999 - protein, 482 aa, unidentified
MHPRVTNICPITRDVHRFTFELAGALEITNEYSGLAVAPAHLYCFRRSQAGMSHTLNLAQWSIVMEKQDDLPFAAYVGIDWADKKHDFCIEIPAEGTQEFDVIPHRINLIDQWVRTLHARVKGPIAVAIELTRGPLISALQMYDFIVIYPVNPGSLAKYRQAFTPSRAKDDPTDAALAVDMLRRHPERCKPLRPQSADMRALITLVEQRRQLVGERVRLTNRLRAALKQYYPNALEWFDHVDTMVFCDFIAKWPTLVQAKRARIATLNRFFHEHNVRFPSVVQSRITAIKEAVPLTKDDAIIVPYRMKAQAVVEQLKLLLGSIKAFDVEIDSVATRHADYGLFRALPGAGPSLAPRLLVAFGEDRDRFGSATEVQMYSGVAPVTERSGKKEWIHWRLQCPRFLRQTFVEWAAQTINKSYWAGEFYRQQREKGCTYQAAVRALAFKWIRVVYRCWQTGIPYDEAKYLKALERRGSPLMVQKTA

SEQ ID NO: 118000 - protein, 348 aa, unidentified
MDYYAGIDVSLEESSVCVVDSDGKIVREAKVLSEPEALIAWFDSLGLRLARIGLEAGPLSQWLYAAMKKTGLAVELLETRHVRDAFKAMPVKTDRKDARGIAQLMRLGWFRPVHCKSMSAQEVRALLTARKLVQSKLFDMEMSLRGILRGFGLKVGATKPTRFGSRIEELVAGHATLETVAKALLAAHEVLLRELKGFENRVRVMARDDKRVRLLMSAPGVGVIVGLTYVAAIDDPGRFKSSKDVGPHFGLTPKKYQSGEKDIRGRISKIGDASVRTALYEAAHIILTRPIKGASMLKSWAMKLAGRAGMKKAKVALARKLGVILHRMWVDGTPFARERGGALTPAAA

SEQ ID NO: 118001 - protein, 273 aa, unidentified
MQAITTIGLDIAKSVFQVHGVDADGNVIIRRQLKRRYVLAFFQKLPPCLVGIEACGSSHHWSRELQALGHSVRLMPPAYVKPYVKRHKNDAVDAEAICEAVTRPNMRFVATKTPEQQSCLTLHRARHLFIRQQTSVINAIRAHLAEFGIVAPVGRHGVEQLLGVVSDASDKRLPDVARACVAALGAQLQRLKVQILEFDRMIRAWHRSSEESRRLDDIPGVGPVLATALVASVADPKVFRSGRDFSAWIGLVPKQSSSGGKDRLGHISKRGDR

SEQ ID NO: 118002 - protein, 404 aa, unidentified
MAKEQRVVFGGVDTHKNIHVAAVVDDRGKILDTAEFNTTKAGYDRLLAWMQSFGELAKVGVEGTGAYGAGLARHLASCGVEALEVNRPNRQMRRRRGKSDTVDAEAAARSALNGEATVVPKAHDNLVESIRVLRVAFTSARNSRTRVALQIRDLILTAPDQLRGVLGPLSTARRVDRCARLRPGDPTDPAEATKLALRTLARRYEALSEEMAELGAVLEELTAKANPALRAAKGVGADVAAVLLIAAGDNPERLRNEAAFAAMCGVSPVEASSGMIVRHRLNRSGNRQANHALWRIAMVRLRCDEETKAYSARRRAQGKTKRDVVRCLKRHIAREIFLHLTKPAAVPIGGELRAARTAAGISLDTVSSELGTWPIRISRLERGLDHDSNLAGRYEAWLTALKAA

SEQ ID NO: 118003 - protein, 345 aa, unidentified
MPIVGGLDIHRKQITFDYLDTATGEVRRGQIAPADRAHLRAWLARFAGRDDVAFALEGCTGWRYVAEELAAAGVAAHVAEPADTAFARGRKRHAKTDKTDSRHLRVLLEQGRLPECWIPPAQILECRALLEAYHDLRREHTAWIERIHAVFFHQGAPRLGEGALRTEHGLAALREAAAIHLSPAGQLQVATALDMLAAVEARMDTLRQQLLHAARHLAGARALQARLYGVGPLAGLAMTCWLGGAGRFSSARKAVRFAGLDITVYSSDGKRSPGHLSRQGPEILRWVAYEAGKTHARASAPGHDYYAAVKDRTDGKIAALAQARKLIRQACHILAELGDDALTAA

SEQ ID NO: 118004 - protein, 482 aa, unidentified
MVLRVPIGSWMPYKRIKPPKTIGHEAILTLKFRTMNKIKTKNEKVKRISQLPVINPTVAGIDVSDAEMMVAYPINSEQLEVRPFGCFTRDLHSIARCLKENGITSIAMESTGVYWVALFLLLQEQGFEVLLVNSKHVKNVTGRKDDEGDAEWIQKLHSCGLLRASFQPDNMTRTLRSMVRHRKNLVRTSSTYINRMQKALELMNIKLHTIISDIDGKTGLCIIEAILTGERNPEILADMRDRRIKASREDIIKSLEGHWTTEHLFELRQCYELHRLHLQMIKECDLEIEKQLLEQIASRNEGVISDIPQIARKVSGKNKISFNLTADLKAILGVDVTAVFGISELSALTIMSEVGTDMSKWKTEHYFTSWLGLAPNTKISGGKVISSRIAKKKHHAGQAFRMAANSLYNSKSPLGDHYRRIRAKAGAPKAIVATARKLAIIYYKMVANKEAFNPKALDDYQQKYKEKKINQLKKRIAQLEAA

SEQ ID NO: 118005 - protein, 340 aa, unidentified
MIKIIGLDIAKNVFQVHGIDETGQPALRRKLRRAEVLRLFSHLEPAVVGIEACHTAHYWGREIAALGHEVRLMPPQFVRPYVKSQKNDAADAEAICEAVQRPTMRFVPVKGADQQAVLLLHRTRDLLIRQRSSLISAIRAHFAEFGVVVGQRMRNIDRLLGLLVDEGAALPELARRMLAVLADQLRDVAARVAAVEGELMAWHRANDVSRRLATIPGVGPITASAIVATVGDATQFKSGRQFAAWLGLVPQQRSSGGKERLGRISKRGDGYIRRLMIHGARAVVGWRKRRPVARDPWLSGLLARRHVNVATVAFANKSARIAWALMARGRIYTTARARAA

SEQ ID NO: 118006 - protein, 429 aa, unidentified
MSEEKSLELRVSVDVGYRRHSVAMGLSSGEVLEEFEIDHRIEGFEEFFSRIEKQRKKKNCAVAVAMEGYNGYARPLDSMVRQRGYRLYNLNNLKFARFKEIFPAAAKSDRIDARKGLELFQLSDHLPLAKEVLQEVTGTPPENEVLKRLTRRRRRSVNERVRVVNSLQADLQAVCPGLLEITAEASNQWFLNFLLSAQTLPQLARLRRNTLLKIPSVGVKCVSIIEGWQKCAHFSQEVEWVGEMIQEDANRCLDLDGKIKRLEAKIAEVAKGSKIAKILRSIPGFGAVCTSELAAEIGTIERFASEASLSLYLGMSTLDNSSGKYQGTKTPKHVNTRAKAAMMIALDRHRKYVPESQKYYEKKRSEGKKHNQAIRALGRHLSRIIYKMLKEERDYEIRPEKSNTKTKVSSRSSIKTQIRRPKISSKKTK

SEQ ID NO: 118007 - protein, 392 aa, unidentified
MQVGIDAHKRSCTVCVIEEGTVTDSFSFPTTREGVGEFMGRIHGKATVIIEASTTGKVLSRMLLDKYEVHMVAPPERKRSVKTDRRDAERIVREDTLQYLRRCYIPSPYIEMLRSLVMQQIQVGRKISRVKNQVHGLLDRNMIHDLDEFSDIFGVQSLRTLAEIKLPSLDTNALARYLEELKLHVAHHRQLETELAKITESDEDALLLMTIPGIDFFTALAIKSRIGDVGRFPTKKHLCSYAAVAPGASNSGEYISTHNHVKHGDMVLKYALTCAVRGAVLAGKNSAVKRFYLKHCKRMGAQKAEVAAARKMACVVWKVLSTHQPYREEDERLTAKKRRVLAWKAKREEKNVSSDLRQLAEILLGETVTLERYPADFDQQFVGSLPMESEQA

SEQ ID NO: 118008 - protein, 370 aa, unidentified
MRKYSEAFVGFDTSKKRHALAVAEGGREGEVRYLGEIDSSPATVEKVMGKLATRYMKLHVCYEAGPTGYGLYRQIQGLGHDCAVVAPSLTPKKPGDRVKTNRRDSVTLARLHRAGELTSVWVPNAVHEAVRDLTRARESTADDLRKKRQQLVAFLLRHGRIFTGLKHWTRVHSRWLAQQSFEHPAQQIVFQDAINAIEDAVGRLHGLDQQLNAVVPSWSMAPVVAAYQAMRGVSFLVAITFVAEIGDVRRFDNPRQLMSFLGLVPSERSTGDAVRRAGLTLTGNRRARRVLIEGAWTYRYPARVSETLRIRIEQLPKAVRDIAWRAQVRLCARYRRLIAAGKKAPVAVAAIAREMAAFLWAIGQQVHPLT

SEQ ID NO: 118009 - protein, 368 aa, unidentified
MQVTTYGLDLAKMVMQLHWVNMETGEIHRKQLKRRALLEFFANRQPGIVAMEACGSAPYWARELRKLGHEIRLIAAQFVRPFVKTNKNDAADAAAIREAVQRPDMRFVAVKSEEQQSVLSLHRIREQLIKMRAMQVNQIRGLLYEFGADLPQGSQKGLKAVPDALADLEKSLSPMLLDTVRQQLKRLEEMDKDIADIEKRLTLWKKGQEAVTRLMAIPGVGLLTATAIIATVGDMKSFRSGREVAAFLGLVPRQSGTGGKARLLGISKRGDTYLRTLLTHGARTVVNFQIKNRNPWIDKLLSRRPHNVVVVAQANKMARTIWALLVKNTEYVANHARNAAARVRQFIGKNRQFRNVAPAFIGVSAPIF

SEQ ID NO: 118010 - protein, 339 aa, unidentified
MKYIPVGVDIAKHLMQVHFVDEHTGEIIDKQVKREKFLEYFSNREPCLIGMEACGGSHHWARELQKLGHKVRLLKGRFVKAFVMGNKNDVMDARAIWLAVQQPVKSVAVKSEEQQATLGLHRMRQQLVKFRTAQINALHSLLLEFGETTHKGRAALAKEVPEALERLKERLPLYLINMLDEQYQRITELDEHLDHIEKQLQAIARQNETCQRLLNIPGVGPLIATAAVATMGDASAFKSGREFAAFIGLVPRQTGSGGKIRLLGISKRGDKYLRTLFIHGARAAALLTKEPGPWITELKKRRPASVAIVAMANKLARTVWAIAAHGRKYDKNHVSIRPD

SEQ ID NO: 118011 - protein, 360 aa, unidentified
MTATMTWVGLDVHARSTHAAAIDRESGELTRARFGAGVEEVTAWLEGLPQPIHGCYEAGPTGYALYRATEAAGLRVDVVAPSKTPRAAADRVKTDRKDAELLVRLLLAGALSVVAVPAPSCEAARDLARAREQVRADLARLRQRVSKLLLRYGRVYDGGGTWTQAHRRWLAAQRFEHVATELAYLDALAALDGLLARRAALDERLSLLAAEPEHWPAVARLRCFRGIETLSALVLHLEVGDFGRFQRPGQLAAWLGLVPSLHQSGESETRGSITKTGSGFARRILVEAAWHYLREPRIGVTLHNRQTGQPDHVLQIAWRAQHRLYRLHQRLRARGKPGNVAVVAAARELACFLWAAAVAD

SEQ ID NO: 118012 - protein, 355 aa, unidentified
MKYYTSSTEFNCGIDLHARQMYVCLMDRQGNKRVHTNVKDNDFRFFLKLVEPYKHDLTVCCECMFGWYWLADACQAAGLTFVLAHALYVKAIHGGKNKNDRVDSEKLTHLLRSNLIPPAYVYPADKRPLRALLRQRIFYVWRRSELLARIHSHQLAHNRIPARQTRRTRDPWEEQLLGAEDHPLRQIALKNDLAMIRHFDQQIFALEEELQRQTKKVAGRDYALLQSVPGIGENLGLTILYEIGDINRFPTVKDFLSYGRLVKGTVASAGKIKGLRGAKLGNPYLRWAFGEAAVIAKRDHFRIRPLAQRLEEQMNGNKFKANTVVAIKLARAVYFMLKNKTVFDPDRLVAALARN

SEQ ID NO: 118013 - protein, 350 aa, unidentified
MDKELYIGVDVSKQTLDLAYYDGESIDWKKAHIKVSNNNAGFKKIGSWVAKVSKGVDIVLFCMEYTGLYTQNFRLWLEEKHYIYRMVEPRKMHRFEPDLDDGLRSLDRIKTDELDSFRIAIYCEQNHRKILRNPSKLPPPVYFKLKRLLAERKQTVKQSVLYKQQLHDICAYDTDLSVERKNGQLKTLNDALKGIDNEIDMYIKEDADISKNFSLLTSIPGIGRVVALETIVLTENFMAIDNPRKYACYIGVAPFKKESGTSVRKGSSVSKKGFKQAKADLSIACLVCMQHIPNIRDYWERKRKEKCSGIVFNAIKFKMILRMFAVIKRGTPYVETDNYRNGKNKQPGVN

SEQ ID NO: 118014 - protein, 422 aa, unidentified
MNTIAKFEASAMEVIYRCCAGLDVHKQTVECAVRRMQPDGRAQVEIRQFGTMTDDLLEMVEWLKGQGVTHVAMESTGVFWKPIYNILEGHFTVLLVNARSVKQVPGRKTDARDCQWLAQLLQYGLLKGSFIPARWQRDLRDLTRERTQLAEEQTRVANRIHKVLEDANIKLGSVATDILGVSGRDILERLIAGEQDTEKLAERARGRLRRKIPELRRALRGHLSEHHRFALRLQLDHLQRLEQLMERLDQRIAELCKPYDEQIEQLDQVPGVDRTGAQSIVAEVGVDMQVFPSDGHLCSWAGICSGNNESAGKRRSGRIPKGNRWLRRTLVLAAQAAGHAKDTYLASRFRRLAARRGNKRACVAVAHSILKIVYHLLKYGCPYRDLGVSYFDRLDPVRLTRYLVRRLERLGHKVTLEPVPTA

SEQ ID NO: 118015 - protein, 339 aa, unidentified
MQIHLVGIDLGKTTFHLVALGAAGKVLVRKKFTQKQLLAFTANLQPSLIGLEACSGAHFLGRALRKQGHDVRLIAAQFVKPFVKSNKNDFADAEAIAEAVERKNMRFVPIKTDDQLDLQAIHRVRDRLISRRTAVINQLRAFLLERGMVFAQKPAKLKAAMADILENAEADLTPQMRNLIDMLWSEWKLVEEQIEELNDDLERISAADAGCTRIRQIPGIGPVVATAIVAAIGNGAAFRKGREFAAWLGIVPRQYSTGGKAKLLGISKRGNVYLRKILIHGARAAVLRIKRDRAPIGAWLDALDSRAPKNVVVVAMANKLARIAWAVLSSGNEYRPVAA

SEQ ID NO: 118016 - protein, 420 aa, unidentified
MQVAQDDQEIIARVAALDIGKAEVVCCVRVPGEGPRARRMQEVRTYTTMTRSLLAMADWLTELGVTRVVMEATSDYWKPPFYLLENTFQTWLVNAKDVKHLPGRPKTDRLDAVWLCKVAERQMLRPSFVPPPAFRELRDLTRYRVDLITTRTSEKQRVEKLLEDAQIKLSVVASDIFGVSGRAMMAALVAGERDPKVLADMARGSMRGKTARLEEAFTGRFTDHHAFLLRTMLARVDGIDADVDRVQARIDEQIAPFAAAVTRLDEIPGIGVTTAQVIIAEVGLDMTRFPTPDHLASWARFAPGISESAGRKKGGSSTGKGNRYLARVLGEAAVGAGRTKTFLGERYRRIAKRRGKKRAIVAVGRSILMIVWELLSDEEKRFIDLGPGYYDSRVNRNRSTRNHVRELQALGYKVTLEPAA

SEQ ID NO: 118017 - protein, 336 aa, unidentified
MQITTIGIDLAKHVFQLHGVGSDGSVILRRRLRRSQMIAFFAQLPPCLVGMEACATAHHWARELSELGHKVKLMPAHYAKAYVKRAKNDAADAEAICEAVTRPTMRFVAVKTKEQQAVLVMHRTRELLVRQRTQVINALRGLLGEFGIAESQGIWHVGRLRAHLEEDTVPEPGRQILVLLVEQFDGLEKRIERVDLEIRAWHRTNQVSKRLAKIPGVGPLIATAIAATVSDASLFRSGREFAAWLGLVPRQKSTGGKQRLGRITRQGDAYIRRLLIIGAQSALQRSKEIKENAWAQGLLCRCPRLKVAVALANKTARIAWALMAKGETYRRAAASA

SEQ ID NO: 118018 - protein, 475 aa, unidentified
MNSTVLPAFVQPNIDCNYIGLDVHSDNVVVCVRRNILKVGGELQGKTIKLKKVSICDSQDSLTQLLSEYADGQQHVMTAESTFNWYWLADIAEEHGWNFRLADPCTVSQANIKAANDETDAQYLAERLRMGSLKSTTVLPRALRGARDLTRHRMRVMQEVSEKKIRLSNLYHNHCAHPLHGKQLQDLQFAYEENGIDAVLASGISGNGSELIIADLLAGLHDAQMRLERIEAQVYERLDQIDTYREGRLLLKNSMKGCGDVLSAVIITEIGDISRFRTMGEFVSYCRLAPASKLSNGKSKGQGNAKNGNAYLSWALTELATLMARYNKSIQHYLERKVKKTGLRVIGIRALAAKLARCVYQVLRKKEAFDLLLAFGGSHPQEPSASRAKTEESSQRKTATKSSETKVTGMTRTVVTDKKKIPGKKPALAVTQTQRLKSAVGQKTASVASRLKAPCALTTTKPAYADRGCVKSRRE

SEQ ID NO: 118019 - protein, 341 aa, unidentified
MAVAGGLDLHRGQLTFDYVDTGTGESWRGRICPADRESLRGWLRRFHGVPDVEFAVEGCTGWRYVVEELQRAGITPHLAEPAETAGLRGRKRRAKTDWADARHLRDLLLDGRIPESWIPPAHVLEARALVRLYKDLLEERTSWQQRVHATLFHQGIPVVPKLGTADGQQRLDAAELSAAGRRAVQAGLRQIERLTQEMASLRRELVRLSSRQPGCRALRRAHYGIGGLLSVAVWAELGDCRRFSSSDDAVRHTGLDITIYDSDGKRARGHIARQGPPVLRWALYEAALYASRPASPDYAYYCGVRDRIDGQRALLSVARKLARRCYHTLRDLGEDALAPAA

SEQ ID NO: 118020 - protein, 348 aa, unidentified
MRIVGCDLHSRQQTLSMLDAETGEVEEHVLEHEGEEVREFYSGLPSPVRVGIEASCATQWFLQLREELGVECWVGHPAKIRAYEPRKQKNDLRDARLLRRLLTHDIFPRIWVPSVEQRDVRALLMYRYQWVRMRVRIQNALQSIALGHGLRRGSGLWSKDGQLSLLALSLPEHTEARRDELMALYRQLDADIETLDRMVANTAAERRLSRLLMTHPGVGPNTALATEVYLGDPTRFADGKAVGSYVGMIAEEKSSGKKWRLGKLTKQGNTMLRFLWCEAVRHAVRHDAELKRFYTRKLAQKGLGKATVAAGRKLGIRLWIMLRDEIEYDEFCRRGRQCGEAHAERPVR

SEQ ID NO: 118021 - protein, 359 aa, unidentified
MIAIGVDVHKRQCTVAMQGEDGELKCFGPMENTREGWQELLEQLPPAAEIALEVSTSGYFAMSVLEEAGWRERAHWVHTAGIDSLRKQKYDRLDAKRLARKLSVAERDPLPEAWFPPPAIRALRLRARQRCWLAVLRTQVKNRLQSLLQMHGLRPPVTDVFGVAGRAWLAAQTLPEATQESVEQLLRVHDFLGQELAKAEGYLRAVDRQFPELARLRTLPGIGEILAPVIWSEMGTLERFRSADAWVNYTGLVPSLYESGEVSIRGGITHQGSAWLRWALVQAANSVIQGVNPLARRYRRLRRRKLANVAKTAIARSLARCVYGVLKSGGNYQEARWGRRPTGVVRSWGAGKPEVAMGH

SEQ ID NO: 118022 - protein, 436 aa, unidentified
MQVNTNKARVSIGIDAAVVAAHQVAVRGEVREDFKIRPTLAGLAELTDRLRPYAGAMVVAEPTAGTWLPLAHAVTDAGCDIGFVANRDSARLRTAIVGASKTDVIDADMLAHCEGILGVVPAQVPPPGQIALRRAMRRRHIATVDAHRAECRLWALAAWAFPDLWRATGGHTLAQPLLDRWPRLEALSRARLSSISDLAAVHSRDQDPRKRAERIRDAAAGWSRFWHGRLDLDALAWEVAAMLDDIATADQRQAGATGQAIGLWQKHWSDDPLISIPGMGPVCSAAIRGWWGEATQFPTAKAAVAHTGLNPSTWSSGLTKSPSRRITKQGPAELRLALYQAANVARRHDPQLAGHYRRLMTERGHNHISANTAIARKLACRAWAIATTGRAYQPRDLDGNPISYQQAAALAAELAVPDDIRARRRGHTRRGRLNPI

SEQ ID NO: 118023 - protein, 437 aa, unidentified
MSQVAESVGKKWDRLVRFMGLDWAKDHHDVVLVDSGGRIGLDLRIDDTAEGWACLRKKLTEQVGDDLSLVGVAIETRCGPAVERLLELGCAVYPMNPKAAERYRDRKAPSGTKTDHLDAWSSADALRTDGHAWRRLLPEDPLVQELRLLCRDEVRLIEQRTAFVNQLQEALHEYFPVALQTFDDWTLPAAWAFILQFPTPQVLKGAGKRRWEKFLHTQHLYRPQTYEKRLQLFARATEFCGSPGVTRAKSRLAVVLARQLQSLETQLKEYRSHIETLFAQHPDHDLFGSLPGAGPKLAPRMLGELGDDRSRFDKPQAVQCYGGTAPVTLQSGQTRHVRFRRACNKHLRSTLHLWANLSRADCPWAQAYYQQKREHGKSHACALRCLAQRWLKILWKMWQTRTLYDEPKHLRNQIRHGSWVIKLMPQNTVAHTEVPCG

SEQ ID NO: 118024 - protein, 412 aa, unidentified
MRVIGLDVHRTFAAVAVLDNTQLSYPGRVELTREAVLAFGRKLRPDDEVVIEATVNTAMIARLLHPFVGKVIIANPLQVRAIAHAKIKTDKIDATVLAKLHASGFLPEVWMPDEATETLRRLVSQRTQVVQQMTRVKNRIHSILHANLIPLYRGRLFGAAGRAWLEAQPLAPDEKLAIQRYLADLDHRARDLTVLDQALAERALQDDRVRRLMTIGGVHMTVAVGVLAAIGDIARFSSPDKLVSYLGLNPSVRQSGTGPAHHGRITKQGRSHARAMLVEAAWAAARVPGPLRAFFLRIQRRRGQQIAAVATARKLAVIVWHLLAKAEDYAWTRPALLEAKLRKVELAAGQPAVKGRQQGRAHAYNSKAVRDRERAWLEQTEKAYARFVANWQTKPPQGCTGATTGTRSSKAT

SEQ ID NO: 118025 - protein, 386 aa, unidentified
MQALLECCCGIDVHRDMVEVCILKGLSDEPQIIRSQFKTTKSELVKLADFLFCNDCFHISMESTGVYWRPVYEAIEDHSQYYENMFVVNAHHMRNLPGRKSDVKDAEWIATLMRYGLLEASFVPDRIIRDLREFSRFHKSLVGERTRHINRLEKFLQTHGFKLSSVMSNIICVSGRNLLNTLAQNGTLSSEDVLSAVDKRLRTPIDEIEASVCGSINEPEKFLLNLILKKIDDAQSDINSILAKMQSLTSSFENELSIIDSIPGIDKVAALTILGEIGNTPNTSFDSSEKLVSWAGLSPRNDESAGKIKSRKTLHGNPYIKSILCQVAWSAVRSRNSHFHNWFWSHQGKLGRKKAIIAVARKILKLIFKLLSCNELYDPEKAMLVA

SEQ ID NO: 118026 - protein, 378 aa, unidentified
METVYYIGLDVHKKTIAYCIKTITGKLAEQGAISADRQTLRRWLADIPGPWLGAMEATIFTGWIYDFLKPHAVELKVAHPEMLKAITAAKRKNDRADAEKLADLLRVNLLPECIMMPENLRELRRILRYRNMVVRTAITMKNKMSGLLMEVGATYDKRRLHGKRYFKSLLERVEDVPDSVKELLSLSRGGLDLFEGMQKKLIKALRGNALIRERVERLMSIAGVGEILALTWVLEIGEVERFGNSRQAVSYCGLCSAQRESAGKEQRGPLSKKRNKHLQTMLIEAANLAPRWNPHLAAVHEKELLRGNRNRATVAVARKLVEYLLAVDRRGTPFEPAAPTRNVADRGGRSRATGQKPPVSRHLLRRPGGEPLTQAPGP

SEQ ID NO: 118027 - protein, 411 aa, unidentified
MEVIHARCAGLDISKKDAKVCVRVAGAGWRKTVETVTTWGSMTSQILALREHLIAERITCAVMEATGDYWKPFYYLLEGAGFEVLLVNARHVKNLPGRKTDVADATWLAQLGAHGLVRGSLVPPEPIRQLRDLTRARTAITRERSREVQRLEKLLEDAGIKLSAVASDILGVSGRAMLESLIAGNRDPAALADLAKRRLRSKIPALTEALTGRFTDHHAFLARVHLDLIDQHTAAVADITARIEATIKPFHWFRDLICTIPGISTLTADVTIAETGADMTRFPTAGHLASWAGTTPGNNESAGKVKSSRTRPGNPYLQGALGAAAMACAQNPVTYLGARYRRIAARRGPQKANVAIQHSMLIATWHMATNGCLYHDPGADYFNQLHPERAEKRAISQLEAMGYHVTLTRAS

SEQ ID NO: 118028 - protein, 350 aa, unidentified
MTNSITETIGCDLGDKVSAIYLVSSDGKTQRDSVKTTRTAMRTFFTRPRAHVVIEVGTHSRWVSGLLEELGHRVTVANPRRVKVISASDSKSDRADAELLARLGRADAELLAPIKHRGRAVQADLAVTKTRDLLVRCRTKLVNHVRSVVKSLGERLPRCTAESFHRRTHELVPMELEAALVPVYETLERVEEQIRGLDRKIERVIAKKYPDVDVVSQPNGVGVLTALVYILTIEHKERFKSSRMAGAFLGLRPRRDQSGNGDPQLRITKTGDPLLRRLLVQSANYTLGPFGKDSDLRRWGLKLAERGGRNARKRAKVAVARKLAVLLHRLWVTGEVYQPVGYCRRGTAAA

SEQ ID NO: 118029 - protein, 400 aa, unidentified
MLSIGIDVSKGKSTVCGMKPGGEIVYTPFEVQHTREGMSELVSLLRSSGEEVRAVLESTGSYHCPVVAALLENGIFVSVVNSLRMKRFCSQSIRKVKTDRIDAMQIALYGLAYWQELQPTRLPEDTYRELQRLARQYYQMTSMLIKAKVDFNALCDQVLPGMQELMSDHAGRHKLSDFVLRYHHTTHILEMGETRFRKDYCKWAEKKGYRNCERMAAHIFATAQNGIPVLPNAPSTQIVITEAIRVLHTVEASRDAILTQMQALAKTLPEYSLVREMPCIGDTLAPRLIAEIGDVRRFHSKRALIAYAGIDAPPYQSGKFCANNRHISKRGNRYLRKTGYEVMQSYVMHKPANDPIFTFIEKKRSEGKSGKLAMVAGLNKFLRVYYGKVTELYRSLPAIE

SEQ ID NO: 118030 - protein, 343 aa, unidentified
MQTITTIGLDIAKSVFQVHGIDAEGNVILRRQLKRRYVVAFFQKLPPCLVGIEACASSHHWSRELQALGHTVRLMPPAYVKPYVKRHKNDATDAEAICEAVTRPNMRFVATKTPEQQSCLTLHRTRHLFIRQQTSVINAIRAHLAEFGIVAPVGRNGVEQLLRVVADGSDRRLPEIARACVAVLGTQLQSLKAQILKFDRMIMAWHRSSEASRRLDDIPGVGPALATALVASIADPNAFRSGRDFSAWIGLVPKQNSSGGKDRLGSISKRGDRYLRSLFTTGALAVIRYAKIHGTKHRPWLTALLARRPTKVAAIALANKIARMAWAIMAKGERYKEPAALAA

SEQ ID NO: 118031 - protein, 384 aa, unidentified
MLKPYGEVVHAPFEVSHTEKDLALLTERIHNLSDGETRVILEATGIYHLPVVTFLQQNDIFVCVINPLLMKKYCDISLRQGKTDRMDSLKIANYGIDNWYHLTEYLPEDEAYAELRLLSRQYLHYTSLKIKAKVNLTNLLDKTMPGVKPLLRSQPEHSNHEKLCAVVSRYWHFDNIIRFSETRFVKDFTCWAKKKGFYANEKKAYVLYSLAKQGITTLSSQLQSTKMLIQEAVRVLSEIETTLTVILSDMKTIAQVLPGYSVALAMPGIGPTLAVRIVAEVGDICRFHSANALIAYAGLDSPPHQSGLLSVKRSISKRGSPTLRKTGFEIINSIRKAKPSHDNAVYTFMQKKEAEGKPVKVAKIAGLNKFLRIYYARVKETLSD

SEQ ID NO: 118032 - protein, 345 aa, unidentified
MQAVTIGIDLAKHVFQVHGVSAGDKVVFSKPLRRAQMLSFFAKLTPCLIGMEACASAHYWARELMKLGHSVRLMPAKDVKAYVKRNKNDAIDAAACCEAVRRPVVRIVPVKTPEQQARLMQHRVRDLLIRQRTQAINALRSHLAELGIVAAQGYDGLKTLLSIVADESDARLPEDGRASLSALVNQIAACQAEISAIEKRLLAQHRKNEDSKRLETIPGIGIIGASAIVATVPDASVFKTGRDFAAWIGIVSREDSTGGKQRLGPISKQGNRYLRRILILGALSVVKRARCCPENYPWLTKLLARKPAKVAAVALANKMARIAWAVLTKKDTYHVPQITAALIPA

SEQ ID NO: 118033 - protein, 286 aa, unidentified
MIKDIKYFGIDISHLVFDITDSDGNYHQFKNNSSGFKKFVKLLNQQSHCVMEATGYYHYQLAYFLLESGIKVSVENPLAVKRFIQMKLSKIKTDKSDSKLICEYAQKVDLKLWKGNTKDEMECLQITRALSVYTKQSTMLKNKLHGEAVLGEPSKAVVRSLKRSLKQLEKEMKTLEDKLLVLVKQSHQDLLTRLKTIPGIGPKTSIMLVVLTGGFDRFTSAAELCSYAGLTPVIRQSGSSVKGRPRISKIGNQKLRNLLFMFSFNACKPACQQAGTTRLAEIFMSE

SEQ ID NO: 118034 - protein, 330 aa, unidentified
MESFKIILGVDVSKLTLDISCAERLLHLKIDNDSKGFAEFKKWCKTNSINLKETLVVMEYTGGYEYRFIQFCESMSVAYCRISGLEIKRSMGMTRGKNDKVDSFRIGQYGEEKIKRLIPDKPLDTNILLLKQLLSFRKRLVRETAGLSATVKERKHIYEVNKKDAVIHIAGEKIKANERFILQLEEEIMKLIMANAALLQNYRILQSIKGIGPINAWMTLAYTENFTSFTDARKYAVYVGVIPFDHSSGTSINGKKRVSHLANKELKQELNQAAKAAIAHDQEIKDYAERKLKNKHYKLVLNNVKFKLILRMFSLVKRGEMYVENYKRAA

SEQ ID NO: 118035 - protein, 442 aa, unidentified
MLDTNPTHDLVIGLDRSDRKADLHFINTATGQTNSESLASSPENLRQWLLNLRQKYPKASVGICLEQPAGHLIPFLETYDWITLYPINPISLQKYRETFVTSRARDDGKDAQYLAELLATHRDKLKSWQPQDSQTRLLQQLVAHRRAVVDERTALTNRLQALLKAYFPQSLELCGEELWRPLATAFLLKWPTLLAVQQAKGADLKEFYYLNGSRSQKLIEQRLKLVEQAVPVSHEPALNLSFSLRVKLICRQLQDVVTTVKEYEKQIAQCFQQHPDREIFASLPGAGPVLAPRLLAAMGAERERFDSAVSLQRYAGIAPVTKQSGKMCYVHRRYLCPKFERQSFQEFADQSVLWSRWAAAYYLSQRSKGKPHSTAVRALAFKWQRIIWRCWQSHTPYKEEVYEAALRKGGSKLLGLFNQIDLGKNPVKNPAKPPSKTAVKKT

SEQ ID NO: 118036 - protein, 326 aa, unidentified
MALSHLTDNTFVGIDVGGAGLDVAWHRGDSAHYANRPDAIATLVERLRTGPEVTRIVLEPTGGYEKPLVKALRQAQLPVEVIHTTRFNAYRALVGVKAKSDTSDARLLASYAAAPDEVRGRKAGHVELPEDAIREALSELAGRRDQLKHMIHAETCRLGMVRLTELRQAITAHLEALRAEDKQVHRMMLELVRQRIDLRRDQRLLKTIKGIGVKSALGLLASVPELGRIDNKAAAALIGVAPFVRKSGTMSAPARIHGGRAAVRSILYMAAVTASRHNPVLRPFYERLIANGKPPKLALIAVLRRLVVFANAVLRSGQPWKGANAT

SEQ ID NO: 118037 - protein, 378 aa, unidentified
MNEFGTQVKSGRISNKKEELEVFLRPYPHASAVLEAGRNWTYMYDWLESYSERVCLAHPLKVKAIAAAKVKTDKIDAKTLAHLLRADLIPMAHVPGVATREVREILRQRMFFVRLGTMAKNRIHTTIDRHPEFPAAPTKNIFVPSCRSWFAELPFSELERSSLEQDLKLLDDVRARVHESDQIVLKIFKTNSDAKILKTMPGFGVFLATLVSSEIDGVGRFPDPKKLAAYAGLVPSTYSSGPKTRHGGITKQGNKFLRWAFVEAIWPAIRKDPSLRQYYQRIKLKKGSNPAKVATARYLLTIAYHLLRDKRTYEPRPLRFQTVQVRHAVINDDYVRLQFSCLFDRILPVDRLATNFAVQLAEEEGSHALSDNLAVMGD

SEQ ID NO: 118038 - protein, 318 aa, unidentified
MFIGIDVAKDTLVVAERPSGATVTVANTPQGLRPLVQRWREAPPTLIVLEATGGYEAFAASTLATADLPVVVINPRQARDFAKAIGQLAKTDQIDAGVLAQFAEMVRPPVRRLADDETRQLDLLLSRREQLLDMLLAERGRLAQTRPTAKAVRQSLAQTIAFLEKQLGRTDRELDARIAASPLWAARDALLQSVPGIGAVIARTLLGALPELGQLTRQEIGKLVGVVPLNRDSGQHRGQRHIGGGRAQVRKKLYMGALVAVRRNPRLRAFYQRLRANGKEAKVALVACMRKLLTILNQIVRTATPWDATHHMAVLQPA

SEQ ID NO: 118039 - protein, 322 aa, unidentified
MSVSVLGIDIAKQKFDAALLVNGKTKHKVCKNSAEGFETLMLWLEKQRIQKVHVCLEATGSYGEDLAIYLHEAGHIVSIVNPARIKGFAQSELIRTKTDKIDAALIARFCLAMKPGAWIPPSPEIRSLRALVRRVDSLIDMRSQEKNRISTAHESVILMIKEHIAYLDQEIEKIRRQIADRIGQNPHLKRRKELLDSIPGIGKATIPHILAELDDLEKFNHVRQMVAFIGLAPKETLSGSSIKGRPRLCKIGHARLRKALYMPALVSIQCNPVMIAFYNRLKDKGKNGKVIVCAIMRKLVHVIFGVLKSGKKYDPNFLTIST

SEQ ID NO: 118040 - protein, 406 aa, unidentified
MEEKGKRYIGLDVHKHYLVALGVDADLNVVFSLRRVELSNLESWMKKNLTKQDEVVLEMTTNTWQLYDELIEYAGSVTVVHPPHVGLITRSQVMTDKIAASILARLLAKGLLAGIWVPPQEVRELRGLVAQRQKMTRLATQAKNRLHAVIQRHHLKPPLGNPFAKTNNGWWQALPLGKLEKMNLQSDLETLQFAEQQEARIEKEMTSIAAEDEKIGRLLQISGFGVITAMTVYAAIGDIGRFPEAKKLVGYAGLGTRVHDSGMTTRSGKITKAGRRDLRVALVEAANVVAGSNPHWKAELARLEPRLGRNRAIVAIARKLLVTVWHVLQGKTDKHAEPKAVAQKMLRFAYSVGKANRAGKTAAQFARERLDGLKMGESLSSIPWGAKKPIPLPPSTLKGRSDVPNR

SEQ ID NO: 118041 - protein, 364 aa, unidentified
MEAPVKVQRTSIGLDVHARSVVACGLDGDTGEVFRRRLCSDHGEILDWVQGLPGPVAVTYEAGPTGFGLARVLIAAGIDCRVAAPSKLQRPPGDRVKTDARDAAHLARLLHLGQIVEVTVPSPAQEAARDLVRAREDCRGDLMTVRHRISKLLLRQGIVYYGGQAWTGKHELWLRSQRFDALGLQLAYDTAMDAMIAGVHRRDRLDKAIVAMAADSEFTPVVQRLGCLRGVSTLTAFGLAVEIGDWHRLTGRSIGAYLGLVPCEYSSGDTRVQGGVTKTGNGHARRLLVEAAWHHRAPYRPSRDLRARWTAAPAAAQARGHAANHRLHDRWTGFDARKKRSVVANAAIARELAGWCWSLAVLDD

SEQ ID NO: 118042 - protein, 408 aa, unidentified
MNAVGIDVSKGKSMVAALRPMGEVALLPREFLHTEVGLEQMAYAITTLGEDTRVIIEATGRYHEPVAAALHKYGIYVCVLNPLYIKQSGGGSIRKVKTDKADAMKIAKYGLDNWVDLREYTPMDTVRQQLKLCSRQYNLYMKTVVSLQNNLISLTDKTFPGVNELFSSPERADGHQKWVDFVMTFWHCDCICRVSEKAFTERYQKWCKRKGYHFSTEKALDLYAGSCGHFTTLPKNDNTKLLITTAAQQLLAGKMTLAALRAEMTRLAMQLPEYNTVRAMYGVGETTAAQLMAEIGDVRRFPRRSSIVGFAGVDPGVDDSGKHSAKSVPTTKRGSPHLRKTLYQIVCTYLRKAPANELVYQFLEKKRAEGKPYFVYMTAAQNKFLRIYYARVKECLAAFDAQQDTTQS

SEQ ID NO: 118043 - protein, 407 aa, unidentified
MRTIYERCCGLDVHKKTVVACVLTPGNQQTRTFGTMTPDLLQLRGWLQSEGVTHVAMESTGVYWKPVFNLLEDQGMELMVVNARHVKAVPGRKTDVKDAEWLSDLLRHGLLKASFIPNREQRELRELVRYRRTVIEQRAHVVQRIQKLLEGANIKLGDVTSDVMGVSGRAMLTALAANDQDPQTLAGMAKTALRNKIPELERALTGSFGPHQRFMLRSQLQLLQALESQIASLDNEVAQRMRPLQAALDHLDEIPGIGVRSAQQIIAEVGTDMSRFPTSAHFASWARICPGNNESAGKRRNSSVGGGNRWLRSALLEAAWTVSHSRRQTFFTARHRRIAARRGNKRAAIASAHSLLVTIYHLLRDGTVFQDLGPLHFDNRNREAVRRRSLRRLEQLGYRVTLEEATA

SEQ ID NO: 118044 - protein, 348 aa, unidentified
MAHFAGLDVSVKETSVCVVDDAGKVILEQKVPTEPDTIIALLTSLGAIYGRIGIEAGPLSQWLVNALTAAGLPVICVETRHMKALLTAQQINKTDRNDARGIAQMMRVGLFKPVHVKTLVAQEQRMLLTSRKLLQRKLLDVEADLRGTLRNFGLKVGVVGGSRYEARVRELVEGFPRLAVIVEPLLSVRRVMRQQFAVLHKMLLDMVRADPVCRRLMTAPGVGAVVALTYRATVDQPQRFVHSRAVGAHVGLTPKRYQSGEIDYDGGVSKCGDALLRTMLYEAAHSLLTRNRKWSWLKAWGVRVAQRRGMRRAIVAVARRLAVILHRMWVDGSEFRWRKDSATVPAVA

SEQ ID NO: 118045 - protein, 353 aa, unidentified
MSSLTDLREVVDVVIGVDTHVHTHSAAAIDARTGGVVDEITVEATADGYAQLVEFADEHAALRAWAIEGTGGHGAGLTRHLERGEEVVIELDRPERAQRRHGAKSDPLDAIRAAREALARPRLGGPRSGGDRQALSVLLAARRSAVKAATDAQRQVFSLVIAAPEPIRERFRGQKLPAMIQTAAGLRGHASWDVETTTTVTVLRTLARRARALAEEAAEHEKAIRAIVRSWRPDLLGQLGIGPIVAATVLCAWSHPGRIHSEAAFAMLAGVAPIPANSGQVTTRHRLNRYGDRQLNRALHTIVLTRIRYDQATRDYVTRRTTEGKTTREIKRCLKRYIARDLYRLLEHRPITA

SEQ ID NO: 118046 - protein, 342 aa, unidentified
MTTMHYIGFDIHKKTIAFCEKKVDGTIVMQDTIPSTRNALRIWAAQRTCPWIGAMEATMFTGWIYDFLQPYTADLKVAHPAMLKALTTAKHKNDRSDAERIADLLRCNLIPECYMAPEGIRELRRILRFRNLMVKEATKMKNKTSGILMEVGATYNKKKLHGQRYFEELLDNLDYVPKSVTDLLHLCRTNTTHFVQMQKQLVKGLITHKDIAKRVNLLMTIPGIGEITALTWVLEIGEVERFTRISRTISYCGLCSAQSESAGKNKRGPISKKRNKHLQTVLVEAAKLAPRWNPQLAVVYDKEFATGNYNSATLAVARKIVAYMLAVDKNQRAFQIQEVKIA

SEQ ID NO: 118047 - protein, 419 aa, unidentified
MASRKRKSSPSTSLPPQLDTVHLHAAGIDVGAEEHWAAVPACDDPQPVRRFGAHTADLDALADWLWTCGITTVALESTGVYWIPLFELLEGRGFQVCLVDPSKLPRNGRPKTDVHDCQWLQRLHTYGLLSACFRPADQVVVLRSYMRQRAALLADAARDIQHMQKALTQMNLKLQHVVSDMTGVTGLAIIKAILAGERDPRTLAHLRDPRCKQDEAAIAQALYGTWREEHLFALQQALERYEFQHQQLAACDVRIAAHLETFVDRSHGEPLPPKRGKRRRHQNRPAFDPRGPLHRMTGVDLTQIEGIEETTALIVLSEIGLDMNKWPSEKHFTSWLGLSPQRRISGGKVLSSRTRPTTNRAAAALRLAAASLHHSYSALGAYFRRMKSRLGSPKAITATAHKLARLIYRMLKHGTVVTS

SEQ ID NO: 118048 - protein, 405 aa, unidentified
MNEDRFAGIDWASEEHACCVVDGDGRIVEGRRYRHDERGIKALCTRLVEFGVMLVAIERPDGLLIERLLDAGLHVIAIHPNQVAAMRPRFSAAGGKSDSFDAFVLAELARTDSHRFRVLVPDSDQTKALRALSRSREDLVGHRVAIANELRAQLECFWPGAAHVFADVDSPIALAFLRRYPSPADARGLGEQRIARFLTRHGYCGRRTPAELLDRLKSAANGRADQLETEARRNIVLALVAALEPIVTQIAQLTSEIRGALHDHPDGATFRSLFRDPKSTVCAAALLSEIGDCRQRYPTKAALAGDAGQSPVAVESGKSKRARFRWACDHRLRDAICTLADASRHHNPWANDIYTRARARGCTHQHAIRILGRAWTGVIWRMWHDQTTYDPALHRSLQRLITHEG

SEQ ID NO: 118049 - protein, 408 aa, unidentified
MGRAAEIVAPSSSLRTDGGFPVAQVNDLSRSLTAFDPISTLVVVVEMSKASWLVSGVVPGVERQPLKKLEPDATALLRLIERWRNEAVRAGRPISRIALAYEAGRDGFWLARWLIARGIEAHVIHSASVAVSRERKRAKTDRLDAAMLMRVFLGWLRGERGHCGMVAIPTMEEEDARRPSRERESLVDERSRITNRMKSALARLGIRGFKPHLRKAPERLAGLRTAEGTGLPANIIEEFRRDMARLALVREQISSIEKTRAERLERAPDTGPHAMVRLLARVIGIGIETADMLVREILSRKLRDRRAVARYAGLTGSPDESGLKRREKGLAKAGNARVRRGLIQLAWRFLMFQKDSALVQWYRTRTEGPSGARKTTMIVALARKLLIALWRLVTTGEVPDGVELRPAA

SEQ ID NO: 118050 - protein, 340 aa, unidentified
MGEVTTIGLDLAKHVFQVHGVDAEGATVLRKQLRRAQVLAFFSRLPPCLVGLEACATAHYWARELRALGHEVRLMPAQYVKAYIKRNKHDAADAEAICEAVGRPTMRFVPVKTADQQAAVLLHRGRERLVRQRTGLVNALRGHLAEFGVIAPQGLRNVGKLIAIVRDEGDARLPDLARQVLQVLAAQIEQLEAAVAAIEKQLMTWHKSNPVSQRLASVPGIGPIIATAIAATVVEPSSFRSGREFAAWLGLVPRQHSTGGKHRLGGISKRGNQYLRRLLINGASANLLRSKATNADPWVIGLRQRRPPLVVAVALANKTARIAWAVMHRHENYQRVAAAA

SEQ ID NO: 118051 - protein, 356 aa, unidentified
MQHTILNFINQHFFIGIDVHLKQWKVTIRNTGIELKTFSMNPSPQELFHYLQKHYPGGTYHLVYEAGFCGFWIQRTFTELGIHCIIVHPADTPTTAKEKVHKTDPVDSRKLARELENGSLKAIYVPQVASEQLRSLMRLRFRLVQQQTRTKNRIKGFLRVNGIAIPAVHLTNPRWSGAFLLWLKGVHPSSVAGGFTLDNLILQLEQTRLNLSGVLRQLRREATSKNLASTVEAIDSAPGIAFITTMTLITEIIDIRRFSRFEHLCSFVGLVPSVYSSGETSYTRGMSFRHNQYLRPLLIEAAWTAVRKDPALTLRFNELCRTMSKQMAIIRIAKKLLRRIFHLWKQQDRYVYALVA

SEQ ID NO: 118052 - protein, 320 aa, unidentified
MSSAASAVHVGIDVAKARLDLCLLPGGQTLSVGNDDDGIAQVVALLRQQSAAVALVLLEATGRYERRVASELLEAGFRVAVVNPRQARDFARALGKLAKTDTIDARTLAQFAQLGHARLCEKQPQNRTLLDDLVTRRRQVTQMMAMEKTRAQIPQDKATRAMIAKVIRLLEQQREDLDRRIAELIESDDDWRNKRDLMSSVPGVGPITASQLVADLPELGKLNRQQIAALVGVAPINRDSGTLRGKRTIFGGRASVRSALYMAAFCAMKFNPIIRRFAERLRAAGKPFKVIVVAAMRKLLTILNVMLKENRPWDANTQMA

SEQ ID NO: 118053 - protein, 344 aa, unidentified
MSEYAGQQFVGIDLHRRRSVIVRTTESGEVLEAVRIVNDTESLDRVIARGGEDPEVVLEATYGWYWAVDALQAAGANVHLAHPLGVKAFEYRRVKNDFRDAADLADLLRLGRLPEAWVAPPATRELRELVRHRAKLVALRSHCKAEVHAVLAKCGIQVLMSDLFGVEGTALLDRLRVPAPYAARIASLRRLLEDLEFEIDVFTNLVQGRLRTDPGYVAVQQIPGIGPVLGAVFVAEIGDVHRFTTAPQLACWAGLTPKHHESDTHVRRGRITKQGSRLVRWAAVESVQLLGPRTRVGALRDRVADRRGTNIGKVAAARLQIEYVYYALRDGHVRALQPRSRESA

SEQ ID NO: 118054 - protein, 410 aa, unidentified
MDKFFNVAAGIDVHKETLVVSIRTPRTRRDKDAETRTFGTFHDDIVQMVAWLDEHEVEAVGLESTGVYWKPAVRALRTLSPNRTVWLVNPAEVKRVPGRKTDVSDSQWLAKLVMCGLVSPSFVPTVHLDDLRKLTRFRVKLIGEQTSQKNRIIKELEACGIKLASVCSETLGASGRAMIQALVEGSKTPAQIADLARGALRKKLVELERAVSVPLGAASRFILRTLLDQLAHCDRTIQMVDDQIRAMLEPYQKEASLLDTAPGINAVSTGAIIAEIGPDMSVFESAKQLTAWAGLCPGSNESGGKAKHAPARKGNKYARRAAVQSAWCAVRTKGSFWKAKFGSLCKRLGPKKAIVAIARKMLVAIYYMLRDSKPYEPPPPPKLSEKEINRRVQRHLQALAELGMNVTTAI

SEQ ID NO: 118055 - protein, 420 aa, unidentified
MEEVTEEPAELVERVAALDIGKASLVCCVRVPHESRPGARRQEVRTYGTVTPALLELRDWLICQGVTRVVMEATSAYWKPPFYLLEDDIECWVVNARDVKNVPGRPKTDKIDSVWLCKLAERGMLRPSFIPARPQRQLRDLTRYRRTLTQERSREKQRAEKLLEDAQVKLSSVISDIFGVSGRDMLAALIAGQRDPHALANLARKTMRAKIGVLRQALTGHFTEHHAFLLAMMLDRVDALTAQIDTLTARIEEAIAPLAAQVAQLDEIPGIGVTTAQEIIAEIGTDMTRFPTPGHLVSWAKFAPKARQSAGRSKAATTGKGNPWLGGTIGEAAAGAARTSTFLAGRYKRIVKRRGKKRALVAVGNSILTICWHLLSDPGAHFTDLGPDWHDRLAPQRRKHQLIAELERLSGKKVTLHDAA

SEQ ID NO: 118056 - protein, 465 aa, unidentified
MRTDTKLWRNRKAKQELARRLQSENPGLEVVQPHAAGIDVGNGAHYAAVKPDRDSQPVRRFECFTADLSRLADWLQNCGVKTVALQSTGVYWIPLYDILEERGFQVYLVNARHTKNLPGRKSDVQESQWLLKLHTYGLLNNSFQPPSKIRILRTYWRQRLQHVTGAATCVQRMQKALTQMNIQLANVISDLSGVTGQLIVRAIVAGERDPWKLAELSHPRIQASREEIAKSLEGNWRQELIFVLQQEIQMYDTYQQRVAECDQELQKHLSAFADTVSPPAKEELPPKKKKKQNKNNPQFHLAAELQRISGVDLTRIDGVDVMVAQTLVSEVGLDMSRWKTEAHFPSWLGLCPDNRISGDKVLSRGTRHVLNRAATALRLGASTLLKSQTYLGAQYRRLRSRLGAPKAITAMAHRLARLVYRMLKYGQHYVDKGAEYYERRNRQQQIDFVRKKAAQLGLKVTPAHA

SEQ ID NO: 118057 - protein, 382 aa, unidentified
MNRILKIGMDVHSTSYTLCAMEPVLGGEDRIFANIQVTSDYRNVIQFIDKLKEKLGSSDSYSIECGYEAGCLGYSLYHQLTKSGVKCTILAPTTMLTQQGKRVKTDKRDAVMIAQCLSYGGYHAVHVPADKDVSVKEYLRMRDDHKVALKKIKQQINAFCLRQGYFYAGNKWTIKHLNWLKKLVLSDLYRETLNEYLTSYEEQIAKIERFDKRIEELAEDSDYQENVKKLGCLLGIKTHTALSLIVETGDFKRFRKGNTYASFLGLAPGESSSGEKINRTGITKAGNSHLRTLLIEAARGMCRGRIGYKSKVLRSRQDGNPTEVIAYADRGNTRMRSKYYRMIRHGKKDNVAVAAVARELACFIWGLMTNNITSKEEGTKAA

SEQ ID NO: 118058 - protein, 338 aa, unidentified
MAIVFVGVDLAKNVFAVHGVGEAGRAELVRPAVPRSQLRELVAALPPCTIGMEACTGAHHWAREFEALGHTVRLMAPKFVAPYRMSGKRGKNDAADAAAICEAVQRPNMRFVPAKSVEQQGRLMVHRARQGFVEQRTATLNRIRGLLAELGIVLPLKAATVRREAAAALEDLPGWANTVVGDLLSEVTRLDERIAQYDRHVAQMAREDERARRLMRLPGVGETTATALVAMIGNARDFDSGRQLSAWLGLVPGQYSSGGKTRLGRITKAGDAYLRSLLVMGARAVLNAAQGKSDGLSRWAVQLEQRRGYWRAVVAIAAKNARMAWAVLSRGEQFVMPA

SEQ ID NO: 118059 - protein, 347 aa, unidentified
MNFYTQQHKHYCGIDLHARAMYVCILDQQGTKLVHKNLPTTPEAFLRRIAPYREDLVVGVECIFTWYWLADLCSKEGIAFVLGPALYMKAIHGGKAKNDRIDAHKIAVLLRGGMFPLAYVYPAEMRATRDLLRRRCHLVGKRAELLAHIHNTNSQYNLPEIGKKLADKANREGVEDHFPDPSVRKSIEVDVSLIDHYDKLLGEVELYITRTAKGHDSQPFTRLQSVPGIGPILALVLLYEIQDIARFPRVQDFVSYCRLVKCAKESGGKRLGTSGKKIGNVHLRWAFAEAAILFLRQNQLGKEYFAKLAHKHGKAKALTVLGHKLARAVYYMLTRQQAFDRQRFVAA

SEQ ID NO: 118060 - protein, 350 aa, unidentified
MPMVADVVDAVIGGDTHKDTHTLEMATPSGVPMASIVVGNDAAGVAAALAWITDHALGPRIVVGLEGTRSYGIGLARALRAAGLTVVEVERPKRETRRGRGKSDPIDAHLAVLAVLRMHTDRLPTPRADGDREALRILLTARAELTDTYTRQINQLRALLLTGDDTDRAISRGRVTHDWLDRLIRRRGPGTETREQATRRAETRRLAQAIRDAHRDLTHNRDQLAAIITDLAPGLLDRPGVGPVSAAQTIVSWSHPGRCRSEAAFAALAGVNPIPASSGKTIRHRLNRGGDRHLNHALHTIALTRMRSCPRTHAYLTRRRAEGKTDRDIRRILKRYIARELYRTLNTNAA

SEQ ID NO: 118061 - protein, 421 aa, unidentified
MFNAVGIDVSKGKSTIAVLQPGGVVIRKPFDVKHSSCELNDLAKYISSLEGETKAVMECTGRYHEPILQVLSDAGIFVSAVNPHLIKNMGNNTLRKVKSDPADSRKIARYAIDNWAELRKYSIMDATRTQLKTLNAQMDFFTKQKAAAKTNLISLLDMTYPGANDLFDSPVRDDGHEKWVDYVAKYWHVDCVRKRSLKDFTESYRKFCKKNHYNFQANRPEEIYVAAKELVAVFPKDDEYKQLVQMGVEQVITASAHAEQIRKEMNRLAQTLPEYNIVMSMRGVGTTLGPQLMAEIGDVSRFTHREALTAFAGVDPGVDESGQRRKRSNGSSKCGSPRLRRTLFLVMDSLLKTKPIDDPVYQFLDRKRSEGKIYKVYMTAGANKFLRIYYGKVKEHLHKLEMEDEPRSSAEDQDSGQSLVN

SEQ ID NO: 118062 - protein, 320 aa, unidentified
MSATTTKQVYAGVDVSKGRLEVFVAPTAERFGVPNDDTGVDELLARLEESSPALVVLEATGGFERPVAAALVASGLAVAVVNPRQARDFARATGRLAKTNRIDAQSLARFAEAVRPAPRPILDEEARALGEILARRRQLVGMLTAENNRLVTATARRVKKRIEAHLRWLEKELARTDRNLKEAIEESPAWRENEELLRGVPGVGPVLARTLLAELPELGELKNKQLAALVGVAPLNRDSGILRGKRAIWGGRSGVRAALYMGALVATRCNPAVKAFYERLIGAGKPKKVALVACMRKLLIILNAMLRNRTSWRPPHALSP

SEQ ID NO: 118063 - protein, 360 aa, unidentified
MTDVTTAANRMTIGIDLGDRFSHFCVLDEAGETIEEGRLAMTEIAFRRRFETAPAARIAIEVGTHSPWVDALLTKLGHEVLVANPRKLRMIFKSDRKNDRLDAEQLARVARLDPKLLSPIAHRERSTRADLAVARARDTAVAARTRMVNHVRGCLKSFAVRLPKCSTRTFPRRVVAAVPKELRPALVPLLRMIGELTERIVAYEKRIERLSKERYPETALLRQVNGVGAVTALTFVLTLEEPRRFRSSRSVGAYLGLRPKQRQSGASDPELRISKAGDRDLRRLLVQSAQYMLGPFGCDSDLRRFGSKIAARGGKSAKRRAVVALARKLAVLLHRLWVTGEVYEPLRTATRCAPPVVAIP

SEQ ID NO: 118064 - protein, 357 aa, unidentified
MQSQNSDLDFSNQEFYLGIDVHKKSWNVTIRSNNIVLKTFSMNPDSLELKKYMEKNYPKGKYLSVYEAGFSGFHTHRELTQYGFNSIVVSPTDIPTSGKERITKTDKVDSRKLSRELENKNLKSIFIPNLLQQELRSICRLRYQQIKKLTRIKNQIKSYLDFYGHKPPANCVMKRWSRAFIEYLQNLEFQYSMGKEQLDIYIEELLEIRSRIVQIMLSLKKYCAQYEFDKEIKLLRSVPGVGPITAVTIATEIIDINRFSNTDKFASYFGLIPSTNSSGEKERVLGLSFLFNRYVRSLIIEAAWISIRNDPALTLAFNNYSKRMSKQESIVRIAKKLLNRIYFVLKNNKEYVYAVVK

SEQ ID NO: 118065 - protein, 396 aa, unidentified
MKSLSDKPFTAFIGIDWADTKHDICLQAAGSEQHEFDCIPHQVDRIEQWALEMYHRFGAPIAVALELSKGPIVYALQKYDFFVLFPINPMTLAKYRQAFQPSGAKDDPTDAELALDLIVCHPERFKPLKAQSALMRELLYLVEARRSLVGDKNRFVNRLINTFKQYYPQILEWFEHRDTALFCAFVIRWPTLLQVKRARRTTLEKFFRAHGARRAQVIERRTQGIKAAKALTEDMAVIKAHQLQALALVEQLQTTLQGIDRYDKEIAALAPKHPDYGLFSALPGAGPSLAPRLMVAFGEQRERFHGADEVQKYVGVAPVIERSGKKCWVHWRWQCPTFVRQTFVEWAAQTINTSFWAGAYYRQQRDKGSSHQAALRALAFKWIRILYRCWKTHTLR

SEQ ID NO: 118066 - protein, 422 aa, unidentified
MKNNAAKKRLQVPSGYLIAGVDPHKKKHAVVLMTQDFTTHSKLKFDNTREGFEMVLDRARNEMLRQGCRGVMFAIETGAHHWRNLAYYLDELGIPFRLINQFTLKRRREGKDLDHHKNDYRDSEVAAQLLVTGEFTTPRLPQGVYAELRATYSSYRRLVKEKTRTINLIKALLDGIFPEFTQIFKNPCAKTAARVLMTGLAPRDIAGMTETEFVSIVQAGSTGLIFKRRIGELHHIAQTSIGIAPGARSVASEIACLMEQSLLLEGQRRRMMETLEKIVHETDEGKYLLSIPGLNYTSVAGILAELGSFSAYRNSRQLVKMAGSNPTESESGGKRHSRTPISKQGRPVLRYCAYTAVVPMMQFNADFRTWSKRLRERSPGANPLSGREVMVAAINKLLRLCFTLVKKRDYYRSPVIENVTAG

SEQ ID NO: 118067 - protein, 368 aa, unidentified
MKKVSTVAAKQSRNISQPQQWTIGLDLGDRNSWYCVLEEGGQIQQEQRVPTTRKALREVFGGMPHSRVALETGTHSPWISRLLSELGHEVIVAHARKVRLIGESRKKDDRQDAHTLARLARIDPKLLCPVKHRSAKAQADLTLIRARAGLVRARTALVNTARSLAKSYGERLRGCNVRNMNPEKAESLSPELQAALEPLLACIASVSEQICEYNERIEKLAQESYPQVALLKQIKGVGTLIGLTFLLTLEDPHRFRKSRDVGCYLGLQPGRRNSGQSEPQMHISKEGDPYLRTLLVQGAQHILGPFGVDCDLRRWGLNLAERGGKSGKKRAIIATARKLAVLLHHLWASGEVYAPLHNSSRTTVAAAA

SEQ ID NO: 118068 - protein, 420 aa, unidentified
MDVLIERCAGIDIGKNEVVACVRTPAPDGRGRRKQTRTFATFTGALEEMADWFGEQGVTDIAMEATGPYWKPVWYVLEERTFQLRLVNAHHVKILPGRKSDVLDAEWLAELLEHGLLRASFVPPPAIRELRDLTRYRKRLIQAHTAETQRIQKTLEDAGIKLDSVASDVLGASGRAMLDALIAGERDPVVLAELARGTLRRKIPALRQALRGRFRDHHALLIGLCREHTDYLDAAIARLDERIDALIAEHTSEAGLPFARARDRLTTITGVGKRAAECILAEIGADMTRFPSPGHLASWAGMAPGINKTGGKPGSGKTTDGDKWLTDILTQCAWAAARTRETYLSAQFWRLARRIGKKKAAVAVGHSILVICWHLLTDDSDYTDLGGDYFTRRANPDRQRDRLIGQLHALGYRVTLDPVA

SEQ ID NO: 118069 - protein, 343 aa, unidentified
MRLQALNSNSQQGLEPVFARKSQLIMDTRINQSEINVGVDTGKYQLDIYVRPLGIFFSVSNDEKGIKEALIEIKKHSPHRIIIEATGRLEHEFIIACSKANLPFVVANPLHIKRFAGAIGRIAKTDPLDAQLIAHYGEAIKPKLSQLKPENIRLMSDLLSRRRQLITMQTMEKNRLKIMPKVISSAIKPILTVIKNQIEKVDKKLLKLIEESPEYQLKNDILQSMPGIGNIVAFSLLSDMPELGTISNKQAAALIGVAPFNRESGSYKGQRRIRGGRYQVRTVMFMAMMSAIQCNPIFKAKYEQLVAQGKPKKLAIIACVRKMIVILNSMLRDGVKWELDYAK

SEQ ID NO: 118070 - protein, 347 aa, unidentified
MEKYQIGIDVSKKKLNAALLLVPASLKKKTKVVANNPEGFKSLIEWIERQVKDQKAFRFIMEATGSYHQALALFLSDHGFEVCVVNPALIKRHGESMAARTKTDEKDCVIIAHYGATMNPRLWAPPSAQYRALEQLLRRLDQLDKMIRQEKNRLESLGSGPADQDILDSIEKTLSYFDKEYKDLFKKIHDHLERHPDLKDDVKLLTSIPGIGELTALRMSSVLEGGSRFISARQFAAYLGLTPRQNQSGIIKGKSRLSKMGPSALRKALYMPSVTASRCNPDVHALYERLLRAGKTKMSALGAAMRKMAHLVFGVLKSRKTYTAFFTPILEPEVGNEANPIAVGLLS

SEQ ID NO: 118071 - protein, 333 aa, unidentified
MNYIGIDVSHKELVVVISVKGKARAAKTYENTVAGHKAIIKKCFKLKGESRICLEATGIYHFDLAVAISRTQELKVMVINPKTSHNFSKVLMKRSKTDAVDAEVLAIYCERMPFDPWERPADEIITLKAISRRIAALSKLKTQTKNQRHALSSTQETPDLVIDTTDELIKILEQQIAVLRDAALKLIQEHAELKKGYSLITSIKGIADASSIQILAELMVLPKELSARQWVAYAGLDPRHFESGSSVTKKTRISKAGNKYIRHALYMPALVATRHEPHIKGYYEHMINDNGLKKIQAVCAVMRKLLHAIHGMLKTGKSFDGERFYAFPTKANA

SEQ ID NO: 118072 - protein, 392 aa, unidentified
MVVVGTDAHKYSHTFVATDEVGRQLGEKTVKATTAGHATAIMWAREQFGLELIWGIEDCRNMSARLERDLLAAGQQVVRVPTKLMAQTRKSARSRGKSDPIDALAVARAVLRETDLPLATHDETSRELKLLTDRRDVLVAQRTSAINRLRWLVHELDPERAPAARSLDAAKHQQALRTWLDTQPGLVAELARAELTDIIRLTGEINTLAQRISARVHQVAPALLEIPGCAELTAAKIVGEAAGVTRFKSEAAFACHAAVAPIPVWSGNTAGQMRLSRSGNRQLNAALHRIALTQIRMTDSRGQAYYQRLQDAGKTKRAALRCLKRRLARTVFQALRTVHQPSSEHTQPAAACHRSYCSVFQALRTVHQPSSEHTQPAAACHRSYCSRSCLSG

SEQ ID NO: 118073 - protein, 359 aa, unidentified
MQGAVMGGCPIPFRSFETVGELGAPPVLPPNPNSRRGRNASPIRQGRVVMDKITVGVDVSKKQLDIALRPSGETFVVERNAAGLEGLVTRLTALAPHVIALEATGGFETIAAAALAAAGLPVVIVNPAQIRSFAKALGQRAKTDPIDAAVIAHFAEATAPEPRPLPDEATQLLADLVARRRQIIAMIGAERQREMRATAKRLKKSIARLLKALEKELTSVDTDIDDAVRGSPAWREKENLLASVPGIGPVIARTLIAEMPELGQLDRKQIAALAGLAPWTRQSGQWRGKSFIGGGRASVRCALFLGAMVACRHNPILKAFYDRLVAAGKPKMVAIIAVARKLLTILNAILRDQKPWQTA

SEQ ID NO: 118074 - protein, 342 aa, unidentified
MSEDYDGRQYVGMDLHRRRSVLVRMTEAGERLETVRIVNDREQLAAVMARAGEDPEVVLEATYGWYWAVDALAELGGCVHLAHPLGVKGFSYRRVKNDERDAADLADLLRMKRLPEAWIAPPATRELRELVRHRAKLVHLRTSLRCQVHAVLANHGVCVPVSDLFGVQGSMLLERAALSAAGRARVDSLLRLIDTFDTQIDQVAKTTARQLANHSGYTAVQTLPGVGPILAAVFVTEIGDITRFPAPAKLASWAGLTPRHYESDTTVHRGRISKQGSRLVRWAAVEAVQRVGKHTYIGGYRDRITARRGRNIGNVAAARELIECVYYALRDGTCRRALTTTA

SEQ ID NO: 118075 - protein, 349 aa, unidentified
MAMTIVEAPPGITGGVDTHLDTHVAAALDPLGRLVDTESFGADAAGYKALLVWLEDFGEVTKVSVEGTGSYGVGLTRFLRRKGIEVVEVNRPNRQSRRNHGKSDPLDAVEAARAAISGRASGVGKTKDGPVEAIRVLVVAKRSARQARVKAIVQMRHLGITAPDQLHSRLKGLSVTALVAEGAKLRATKSADTVTAATKASLSSLAHRIQGLDQEIAELNEKIESLLLATAPDLMARFGVGPDTAASLLVAAGDNPERLHSEAAWAHLCGVSPVPADSGKNAGHLRRHTGGDRQANSALWRIAMVRIAHDPETTHYFERRVKEGRTKRDVIRILQRYIAREVYRYLPRG

SEQ ID NO: 118076 - protein, 368 aa, unidentified
MEVVYPCCCGLDVHKKSITACVLWAEAKGKSRKEKRRFGTFTHDLLQLADWLGESGVTHVAMESTGVYWKPVWNILAEQFKVLLVNAQHIKAVPGRKTDQKDSEWIADLLQHGLLRGSFVPPQPTRELRDLTRYRVSLAQEINRIANRIQKVLEDANIKLASVATDALGASGRAILEAMLAGEQDAARLAELSKGLLRNKIPELKLALEGRMTEHHRFLLRQLFDHLRFTESKLSQIEQEIDRRMRPFQDEVIRLCTIPGVDQVTAWGILSEIGLDMNQFPSAEHLSSWASLCPGNFESAGKRLSGKMRKGNVSLRRCLSQAAWAISMTKNNYLSALYRRIAARRGGQTRDHGGSSRAPGHCLSHVET

SEQ ID NO: 118077 - protein, 348 aa, unidentified
MALTIVETPAITGGVDTHADVHVAAALDPVGGLLGVAEFPVTPAGYAGLLSWLSGFGTVALVGIEGTGSYGAGLARHVATAGIRVVEVDRSDRQDRRRQGKSDPLDAVSAARAAQSGRARGAPKGRDGSVEAIRALMVAKRSARAERTQTINQARSLIVTGPDDLRTRFARHTVAALVAETASLRPRPGSTVGYATRIALRELGRRAQFLDGQLERLDELIVPLVTARAPGLLALYGVGPDTAALLLIAAGDHPARLRSEAAWAHLCAAAPIPASSGKRTRHRLNPGGDRQANHALWRIVITRMSSHPPTRAYVDRRTAEGLSKPEIIRCLKRYVAREIYPRLRAAAD

SEQ ID NO: 118078 - protein, 340 aa, unidentified
MKHIGMDLHSSTTDVCVRNGRGVIILQKRIATSKVELKKLVEGIPGPKRVIVEESQLSDWAARVLTAHVDEVIRCQPRFNRLISASEDKCDKKDAESLSDLLYLNRFRRVHHPELIYRRLRQAVRGYWISSRELTRAKNRVKHCFLGDGLHEVGDQIYSVRTRSRNLKRLQKQGGYVELAQLLYERMDESRKLKAKHVRLLREAARPVKNLVAVLMTIPCIGRISAYTIVAFLEDGRRIPNKRKLWKYTGVSIRRHESQDSGTQGASYSGNRLLKHVAMSAAITVVARGETNALLKLWERDIRQNVDPKRARRNLARKIVVIAQCLLRSGQEYRDERIVI

SEQ ID NO: 118079 - protein, 399 aa, unidentified
MFYGLDVHKEFIQVCVLDAKGTKREEYRVGGSAEEVEAFAKKLRPDDPVVLEATFHTWALHDILSRHVRRVVVANPLQVKAIAQAKIKTDKVDAFTLARLLRADFLPEVEMPDPKTWALRQLVSHRRLLVKQRTAIKNSIHAVLNRRLVHNPNKDPFSKRARQWMKNLDLPAAESFLLQNAMTLLEDLDDRIDAVDHELLEQASIESNARLLMTIPGVGITAAIGFIAAIGDIRRFDTPDQLASYFGLVPRVSQSAGRCHHGRITKTGSSTARALAVEAAQILARSSSPLTATYWRVRRKRGHNVAVTALARKIIVLVWYLLTKQEPYRYTEPRLARRKLRKATLPELRHRPQCTPQTLAAVYAEAGLPPLTHPTEAERRTAAINRRARTRISNSLKSQ

SEQ ID NO: 118080 - protein, 340 aa, unidentified
MQVSTVGLDIAKNVFQVHGVDEQGRTVLRRKVSRGQLLKLFAALEPCLIGMEACATAHHWARKLGAIGHEVRLMPPAYVKAYVKRNKNDAADAEAICEAVTRPTMRFVPIKSAETQSVLMLHRARHLLVRQRTAQASALRAHLAEYGVVAARGISRLRDLLPVLETGAGLIPELARQTLLLIAQLIEALTIQIRKIDTELLHWHRTNPISQRLESIPGVGVITATALAATVIDAKAFRSGRQFAAWLGLVPRQNSSGGKDRLGGISKMGDRYLRHLLVVGATAVVRYTRRKATAVSLWANRLLQRKPARLVTVAVANKMARIIWAVMARNETYRRTPITA

SEQ ID NO: 118081 - protein, 343 aa, unidentified
MSKSLSKAAVSSQAFCGIDVSAAKLAVAVQREDRAGFEEREFANSTPGHRQLIGWLLKRGTSVRVWLEATGIYSYDLGLALEAAAGVEVAVLNPKTVNRFGQTLRRSKTDQADAVALAEYSLRMPFAPWRRPGPVAMGLRAISRHIAALTQDHTRLGNRLHAAEGSATTPRCVRQDLKRALDGLDKRIAKLRREAVAMISQDAELKRKFEQLVAMPGIAGISAVQLLGELAGLDPTMTVRQWVALSGLDPAHRASGSSVHLPSHLSRNGNSHLRRALYRPALVGVRYDPHLKAFYQSLQARQKSKLQAIMAVARKLLHAIFGIFKTGTPYDGAKLFPQLIPTF

SEQ ID NO: 118082 - protein, 422 aa, unidentified
MLEETQETEEIIQRVAALDVGKAELTCCVRVPGQGSSGRRAQEVRTYKTMTRSLLVMVDRLAELGVTRVVMEATSDYWRGAFYLLEAHGFETWLVNARDVKHLPGRPKTDTLDAVWLCKLAERQMLRPSFVPPRPTRQLRQVTRYRADLVAARTAEKQRVEKLLEDAQIKLSVVASDIFGVSGRAMLTALIAGERDPKRLAQLARARLRAKLSLLEEAFSGFFTDQHAFLLAKMLARVDQLDADLAELDAKLAELIAPFVAAVERLDEIPGVGQLAAHLLIAELGTDMTRFPTAGHLVSWAKFAPGVKESAGKPKGSGSTGHGNPYLARVLGEAAVAASKTDTFLGERYRRIARRRGAKKAIVAVGRSILVIAWHLLSDPEAHFHDLGAGFYDTRIGPERAKRNHIRQLEALGYKVTLQPAA

SEQ ID NO: 118083 - protein, 397 aa, unidentified
MSAVVGIDVGAYKHAAAVCRSGEREAERGVLRVSADRSGFDELDRWLERQGPVERVVLESSGHYYWPLASHLHRRGFQVAVVNPLQAKYFAKSRLQRSKSDPADARTLAALGMSEEPRVKDPLLGAEAKEAARFWAGLVKEQAQVRQKLLRLVEIGFPELRECFEDPLCETALAVLREAPTARAAARKRVSTLAETTRPGGRRRLGENKAHRLHELAKQTIAPPELDAQMSFEVGMLIQQFDLLDKQIEIAEQRVAEVLDSELARRLQTIPGVGPALAASFIAEIGDIWRFDDFDQLASYAGVHPKELSSGTKGQNPDTSWRMAKTGNAYLRSAAYKMAVVGTQHNPVIRAHYLRKRAQGKSAMNAIGHCMSKALAIVWGVWRSGLEFDPTLGGPRT

SEQ ID NO: 118084 - protein, 410 aa, unidentified
MEQIFERVAGLDVHRDSVSACARVPGPRGGTVSLKARYATTTSGLAELADWLGSGAVSVVGMEATGVYWKPVFYALEDRFDVWLCNAHHVKNVPGRKTDMSDAAWLADVVAHGMVRASFVPPPPIRELRDLTRYRKRQLDTRAAEVQRLEKVLQDAGIKLTSVASGVLSMSGRHMIEALIAGQRDPVVLAEMAIGRMRNKLPELTEALSGHFGPHHAVTARQVLDHIDFLDAGIAAMGEQVSLRMAPFSAAVGLLVEVPGLSQRSAEVVIAETGGDMTRFPSPAHLASWAGVAPGNHESAGKRRQVGTTNGNRWLRRTLIESARAAARTKASYFGAQYAQIARRRGPNKAAVAVAHSLTDVIWHLLSTGERFNDLGADYFERRRDPAREARRLINRLEALGHTVTLTPTS

SEQ ID NO: 118085 - protein, 326 aa, unidentified
MTRIICGVDVASKSLQARIGQQGAAGSFPNNPEGVAMLAAFCHAHQVELVAMEATGGYEQQAFAQLSEHGLPTAILNPRAVRQFAQSMGRLEKTDAIDAGMIAFYAEVKQCPPLCLAPRTQRHLRALVTRLRQLTEVRTAQLNQQRLIAEPVVQASFDDLLSLLARQIRDLEQKIAALIAADPLWCELNHAFRSIKGVADRTVARLMAEMPEIGTLSNKTISKLAGVAPLAADSGKHQGKRRVRGGRPSVREILFIVASVVGRHEPDFAAFQQRLRAAGKPPKVVRIALAHKLLVRLNAKAREVRQRRWQPSIHTRWETLTTVNLS

SEQ ID NO: 118086 - protein, 360 aa, unidentified
MQAQITPKTESKQTLYIGLDVHKNSWKVTILGEYMEHKQMSMNSDPVELANYLHRHFPESHYVSVYEAGFCGFSVHRDLVKLGIDSKVIHPADVPSSSKERTFKTDKSDSRKLAHMLRAQVLKPIYIPSEHIEADRDLLRQRNRSVKDLTRVKNRVKSILMTKGIDIPEVYAKGSQVWSKRFLTWLKQVDMGIDEFKSVLLNFIEHGEFLRVQVLKLNRQVRALSKADRYSPNAQLVFSIPGIGLITGMTLLTELGPIERFAHLDQLCSYVGLIPTMHNSGNKVSVGEMTHRGRKVLKVMVIEASWMAVRYDPALHQRYEALRKQGMTANKAIIRIAKKLLNRFRHVVLTQTPYQIGVVQ

SEQ ID NO: 118087 - protein, 298 aa, unidentified
MDHFAGLDVSVKETSLCIVDDTGRIVREAKVASEPEALLHVLLNPAYHFKRIGLEAGPLSQWLFGALAEAGLPVICVETRHMRAVLKAQINKTDRNDARGMAQMMRAGLYRPVHVKTIRSQKLRMLLTHRKLLQSKAIAIDNDLRATLRNFGLKVGTVGRAKFEARIKELVEDLPDLVILVEPLLIVRRVLREQVGILHSRLLAVVRDDDVCRRLMTVPGVGPVVALTYRATVDVPARFRHSKAVGAVFGLTPAKHQSGEVDRTGAISRCGDEMMRMMLYEAAQIVLVRSAKWSWLKA

SEQ ID NO: 118088 - protein, 320 aa, unidentified
MSASSVVAGIDVAKAHVDVSVLGAKLDAQRFDNQAEGHSALTAALKPLDVALVVMEATGGYETELACALQAAGLAVAVVNPRQARDFAKSMGRLAKTDTVDARMLAEFAAVLLRREDLARFLRPLADPQQQWLAALVTRRRQLLAMMLSERQRLQITPKGLHPSIEAIVAAIKAQLDDIEAQMVGHVREHFGELDRLLQSASGIGPVASATLIAELPELGRLNRREIAALVGIAPMANDSGSSKGRRRIQGGRFDVRRVLYMAALTASRRNPTIKAFYDRLIAAGKLPKVALIACMRKLLTTLNAMVRTNKPWENSLHRT

SEQ ID NO: 118089 - protein, 365 aa, unidentified
MKKSNKNVSSKTMGEGVAAVGLDLSDRTGRFHAIDHDGKTIATGSVVLVGPELQRWAKAMAPTVVAIEAGTHSPWVSRLVRGCGHEVIVANPVKVALITKNVNKTDRVDAEYLARLARFDRELLFPIRHRGEQAQIDLQLIRSRDMAVQVRTKLIGHVRGSIKSFGERLPKCSSEAFVNTARPLIPEALGKALGPILVQIDQLTSTIGGYDREVEQLVEQRYPEVERVRQVRGVGALTGLTYVLVLEDAGRFRNSRSVGPFLGLISKKDQSGEGDPQLGITKAGDRLLRRLLIQSAQYILGHFGVDSDLRRHGERIAERGGKRAKKRATVAVARKLSVLMHRLWVSGETYEPLRNSRQAEFRSAA

SEQ ID NO: 118090 - protein, 512 aa, unidentified
MVPGFVFVPVVTLASPRRRRQRSRLGEYCFYTTWAAALGNFSRGDLTITRKRKSKRSVPAGRPESIPIWNPNAAGMDIGAEEIFVAVPADRDGQPVQRFGTFTSELGRLSEWLQQCRIETVAMEATGVYWIPVYQILETAGFELCLVNARYFQNVPGRKTDVSDCQWLQRLHSAGLLRGSFRPAQEVCVLRSLTRHRDNLIRLASTHVLHMQKALDQMNVQLHHVLSDITGLSGLAILDAILAGERDPRVLARLRDGRVKASEETIVQALTGDYRAEHVFTLKQSLTAYRHYQKLMAACDLEIEQQLKRFDAKVDAKAKPLAPPKVRRRKIFSNEPNFDLRSHLYRIFGVDLTAVPGISVLTAHTILSEIGPDISKFRSAAAFASWLGLCPHNDISGGKILSVKTRRVNNRAALAFRMAANALFRSQSPLGDFFRRMRAKLGAPPAITAAAHKLARIVFHMLTTRDAYDEAILNKNERGFRARAEARLRAQAKALGYSLVAAPAQTAQPKTA

SEQ ID NO: 118091 - protein, 405 aa, unidentified
MTGADGVVLARRSPQVSVHDLGPCLDRALAQARAAGYAGLSVACEPTGSRWMAVQDLCEARGLPFVCVQPLVSHLAREQEDLTGDKTDEGDSGLIARLARELHCYEPERLEGAWAELRDEGRRRAQLITGATAAKQLIRDKLGLAAPALLETACEPFDSATWLASLEVVLERCGGDAATVTAMGYEAFAAAVAAVLPGWGGKRVGGTCRQLFSALGDSRGVARMRRAAMRRVRGALADLKYARSRRGQAEADMIALLSELGADAGRICEIPGLSPVTLAAILAETGDLHKYESSSSVVKHAGLSPARNESGSFRGQAKISRRGRPVLRLAAWRATWAVLRHCAVLAAKHAALTSRDDDSRLTPGQARVACAASLLRWIWSLTVHGTQWDPRIAAGQLGHHHAVAA

SEQ ID NO: 118092 - protein, 318 aa, unidentified
MIKEFIGIDVSKGTLDAAAYTSGKKWRASNDDEGIDKLVKAIIGLTPVLVVMEATGGYETQMAYALYEAGICPAVVNPREVRNFAKATKKLAKTDTIDAQILAHFAAVIKPEPRPLSDEQSQELEALIARRRQVINMLIAEKNRLHMARKPVKDAIISHIEYLKKDLSQIDSELKGRIEESPVQREKYNLIQSVPGVGPNLAATLLIELPELGTLNRKQIAALVGVAPLNHDSGTKRGKRSPWGGRPQVRSALYMAALAATHFNPDISQFYNRLCSEGKAKKVALVACMRKLIIMLNTMIKYNTTWHIDQPVLAEVTV

SEQ ID NO: 118093 - protein, 436 aa, unidentified
MHREFAQVAVWEDGVVRQVGQIALTDEALRIFADSLGPEDEIALEATCNTQAIVRLLEPHVARVVVSNPQKTRAIAEAKVKTDKVDAEVLAQLLAADYLPSVWVADPATQALRRQVARRAHVVRQRTRLKNQVQAILHRNLIPRCPAADLFGIKGRCWLANQPLPPDEALTVEALLRQLDFHGQELRIIDAELGRVALGSPEVKRLMTIPGVDATVALSIVAAIGDFRRFRRPEQMVSYLGLNPRVKQSGGQPASHGRITKQGRAHARGMLVEAAWVATKTPGPLRAFHDRVRSRRGMQIAVVATARKLAVLCWTMIERSEDYAFARPSLTDKKLRALELRAGMPSRRGQKGKAAAYSLKEVRRRERELAEQAERAYRQLVADWQTKRLTQPKPKPGVAAANGTRLKRPPVGQAARQASVPEPALRSGVDHALTEA

SEQ ID NO: 118094 - protein, 346 aa, unidentified
MNKITRIGLDIAKNIFVLHAVNEHGKTVKRQTLVRAKVLSFFANIEPCIVGIESCASSQHWAREISQFGHTVKLINPKFVVPYRKSGKNDANDAEAICEAVGRPNMRFVPVKSVEQQAVCSLHTSRQFLVVQRTALINHCRGILTEFGIVMPVGADKVRRLLAEKLQDDANTIPSILHALMQDHLKDLARVEERIEAIDKQLTQWAKQSQQAMSLQQMRGIGVITATAFASGVCDAKLFKNGRQFAAWLGLVPRQYSSGGKNKLGSITKTGDAYLRTMLTQGARSIVFHSKDKNDNFSLWIQRLIARIGMNKTVIAVAAKQARVMWAMMTKNSDYQPERICSPLAA

SEQ ID NO: 118095 - protein, 337 aa, unidentified
MKLYGGIDLHSNNSVIAIKDDTGKVLVCKKLPNDWELIQRFLEPYKEMLIGLVIESTYNWYWLVDALIGVKFCVHLANTAAIQQYSGLKYADDNSDAQWLAEMLRLNILPEGYIYPEEERAVRDLMRKRMSLVQQSTANLLSIQGIYMRHLSYRLSNNKIKQLTCEQIAQDHTANTAQALTATLNVMNCLRNEIKQIESALLVQVKLRSEFKSLSSIDGIGNILALTIMLETGDIKRFNKPGNYAFYCRCIGGARYSNGKKKGGSNSKNGNKYLAWAFVEAANFAIRHNKIVKGYYQREAAKTNQIIAIKTVAHKLARACFYVLRDQVEFDANKAFC

SEQ ID NO: 118096 - protein, 344 aa, unidentified
MDNHTQYSGFAGVDLAKKVMQIHFVTEDGEITDKSTKRAEFLDFFRNRGKCLIGMEACGSSQDWARKLEAMGHEVHLLPPKAVKPFVSGQKNDHNDAIGIYKAMFNGVRRVPVKSTEIRDLQTLRRIRSQVTKDKVKEINHVRGLLAEYGIVMGKSLNAFNKDISSALEILTERGDVSPLVAEELRTTVEAIKAKIERQKKLDQEIEQLARGCKSYENFLKTPGVGPFTAAMLCVLLCDPSIFANGRQFAAYIGLAPRSRGSGGKNYVIGIPSKFNCDCESRAVFVECAQAIARCKNKSPWVEGILRRKPKKVALIAIATKLARQVWAMANKGESFKQMAILTA

SEQ ID NO: 118097 - protein, 344 aa, unidentified
MYKADRTRRRVVVHGVFISMSTMAYLGIDVAKRKVDVALLRPDGKVRSKAVLNTTAGAAELLAWVARYHEGPVHACLEATGTYGLALAEALADAGYVVSLVNPARIAAYARSRLTRSKTDAVDARLIAEFCAKETPPRWVPPSPEIRALQAWVRRLDALDQMRTQELNRLAAEPADAAVRASIQHVVDLLEDEMQTLRARIHDHFDAHPGLRAQRDLLTSIPGIGQATAAVLLAEFGGLTQFRQAAACAAYAGIVPQHRESGTSVRHKPVLSKLGVPLLRKALFYPAMVALRFNPIIVAFGERLRQKGKHKMVVIGAAMHKLVHLAYGVLKTGKAFDPKYRLVP

SEQ ID NO: 118098 - protein, 429 aa, unidentified
MNCTQNKKIEQVKETTMIVGIDVGSEKHYFRAFNWRGIELTRKPVAFSNSMEGFNSFYNTIVELMQKSELEEALVGIEPTGHYWFDLGQFMGEKDIKFVMVNPHHVHKTKELDDNSPSKNDRKDPRVIAGLVRDGRYFYSYMPTGAYAELRNASNRRFVLVEEQTRAKNRLQKWIAVYFPEYKGIYTHIDAKGGMLVLKKAPTPEEIVRLGVEGIIKIWKDAKLRGNGHKKAMLILAAAMRSIGLKAGLTETRMEIQDLIEDYELQTKRLERVNDLIKGLCQQVRYADKLLEIKGIGITTVAGFIAEVGDITRFDSTKELQKLAGLELVADSSGKHNGKTKISKRGRKRLRYLLFEAAISVVGKNEEFKEIHRYYTTREKNPLKKMQSLIVVACKLIRVFHAILTKGIRYDASKMLKDIRHPGEQLKAA

SEQ ID NO: 118099 - protein, 375 aa, unidentified
MDVIYRSCCGLDVHKDSLSACGLVVESSGRRRKEVRRFGTMTRDLLELLDWLLALRVTHVAMESTGVYWKPVWNILEGHLEVLLVNAQHIKTVPGRKTDTQDCEWIADLLQHGLLRGSFVPPEPIRDLRDLTRYRAILTQETTDVANRIQKVLEDANVKLGSVASDVLGVSGRAMLEAIVEGEQDPTHLAEMARHRLRKKIPELRVALEGCIRDHHRFLLKQLLDHLKFLEGKMNEVERQVEKCMGPFEKAVTLWVTIPGVDVVTAWSLVAETGADMAQFPSAQHLASWAGLCPGNNESAGKRKSGKTRKGSLWLRRALSSLGGIPHESHLPGRPLSSVGRPARRQTGDHRHCPQHLAHRLLPAQNRSPLRRPRG

SEQ ID NO: 118100 - protein, 343 aa, unidentified
MQAVTTIGLDIAKSVFQVHGVDAHGNVVVRRQLKRRHVLAFFEKLPPCLVGLEACASSHHWSRELQALGHTVRLMPPAYVKPYVKRQKNDATDAEAICEAVTRPNMRFVPIKTPEQQSCLMLHRTRHLFIRQQTAVINAIRAHLAEFGVVAPVGRKGVEELLRVVADARDERVPEIARACVAALGAHLRMLKAQILEFDRRIMSWHRSNAASKRLDAIPGVGPALATALVACVADPRAFRSGRDFSAWIGLVPKQRSSGGKDKLGAISKKGDRYLRGLFTAGALAVIRYAKIHGTKHRPWLTALLARRPTKVAAIALANKLARMAWAMMARGEYYKEPAALAA

SEQ ID NO: 118101 - protein, 345 aa, unidentified
MKNTIAGVDLAKDVIQVCICKNNTVHSNTEMAHRDFLTWLFNSKPMTLIFEACGTSNYWKQRAIEAGHDAHLISAKLVASIRQNQKTDKNDALAIAQASQLADIQFVKGKSVEQQQLQSMMRLRELAIKQKTASSNQIKALLLEFNIRVSLKQGGLKGVIESLLEDAENGFSIEFRRALNTAWELHIEILDSIRIYDSCLETTIGEHDDCKRLLKLEGVGTLNAINLYIALGCADLGVFSKGKDASACIGLTPLQHSSGGVTKLGHIGKGVKNSSIRSQLITGAMAVVNQVMKRTAVTKKEVWVQGLVARRGKKCAAVALANKTVRTAYVMLTQGTEYKAELVAA

SEQ ID NO: 118102 - protein, 457 aa, unidentified
MGKSQHIQGLKGTKFSQQLRGVNLEQVLVVAIDAAKLHQKALICNYFGDVIEKPFFFSVSQSGMKILYDAIETAIRDTGAVRLFLGIEATGHYYEDIVRQMAMHGYHVQILNAYTTSEERASALSWCKTDDLDLVAIAHALRNNKATESRLAEGLQRQLRTLTRARRSEIRKRSTLRMEIRTLLDIVWREYQGFAEHQNGRARKIKVFSDLWGKASLFFMEHYPHPALVLQLGEDGLRKLSVQHNLKLRTTAIRKLLHIAKESLAPDEQTLRPELMLLHMKLQDLRAFDVKIATLDREIESLLLQTDGRLLLTVPGLGVSTASELYSEIGNVSDYQHAGQLIKKAGTNPIVKQTGGSAGSYRKISKQGNSHLRYVTYLAGRSLCLHNEDLKPFYERLKSRGKHERAIFVAMGNKMLKIAFAMLRDTQPFHSSMPSYRLLQEINKKLTFNCMVTSSPA

SEQ ID NO: 118103 - protein, 395 aa, unidentified
MYRLLVGVDVSKDIFSGSGLSAEGKEHFSGTYEMNSQGFSEFLQALCSHEGRLDQMLVAMESTGCYHINLFSFLSSQGIRTVVVNPLLISNFAKLSLRKTKTDKKDALMIARFLLDHHEEISQLSISQDHQDLRDLSRERESLCHLMSATKVEIKRVLRTIFPELESIGNLYTGVMLRFLQQYPSARLVKGAKRKAIAKALRGPYVGDKLTYSAEEIMKAAQSSVGVVSPAKEIIVQGKIATLLHLQERMAELTKLLTDLCKATRVEDLKILESIKGIGRNTAVPFLAEAGEVKHYTSSKKLIAFAGMDPSVHQSGKFIGKSKLSKRGNRHLRRAIYLMTTSVVSQNAFFKAYFLKRKKEGLAPQKALFATAHKLIRVIFAMLSQRTYFKVEEAI

SEQ ID NO: 118104 - protein, 409 aa, unidentified
MNQLFVGIDVGSRNNAVYIMLPDGSKHSSYSVQNNLDGAQSLAKRVVAALMEQGLSDVVLGLEATSVYGDNLVCFLREDGSLSRFNKKIHVLNPKQVKKFKDAYPELPKNDAIDAFVIADNLRFGRISAAIYMDDYRYKALQNLTRARFYAVQNLTREKQRFMNYLFMKFSGLAQEKIFSNHYGAAALAVFEEFESPDDLAAISLDALTAFIAEKGKNRFLNPEKLAQAVQAAARGSYRLPKTVNDSMNQVLSISISSMRAIQVQIKALDKEIKRQFENIPNTLTSVPGIGPVFSAGIIAEIGAIHRFKTHAAIAKYAGLAWSQHQSGQFESQNTRLIRSGNRFLKYYLCEAANALVRCDTEYRCYYDLKYKEVNKYQHKRALALTARKLVRLLFRLLKDNRLYIPVTA

SEQ ID NO: 118105 - protein, 415 aa, unidentified
MSCPREAMGRAAEVVAPSSSIRTDGDCPVAQVNDLSRSLTAFDPISTLVVVVEMSKASWLVSGAVPGVERQPLKKLEPDATALLRLIERWRNEAVRAGRPISRIALAYEAGRDGFWLARWLIARGIEAHVIHSASVAVSRERKRAKTDRLDAAMLMRVFLGWLRGERGHCGMVAIPTMEEEDARRPSRERESLVNERSRITNRMKSALARLGVRGFKPHLRKAPERLAGLRTAEGTGLPANIIEEFRRDMARLALVREQISSIEKTRAERLERAPDTGPHAMVRLLARVIGIGIETADMLVREILSRRLRDRRAVARYAGLTGSPDESGLKRREKGLAKAGNARVRRGLIQLAWRFLMFQKDSALARWYRMRTEGPSGARKTTMIVALARKLLIALWRLVTTGEVPDGVELRPAA

SEQ ID NO: 118106 - protein, 362 aa, unidentified
MHIGVDTHKKQHVLVALDARGQTCGTHTAANTPPGWAAALQWARDRDATCIWGIENSGSLGKGFAQFLLSSGESTVHEIVPHRTAQYRKRGRNQDKTDHTDALAMARLLQAEAEHLPLVERDDVSTELRLLSDHRDNLVAERTRLVNQLHAQMLQIDPCYAEQSGTLTSRTGIRYCHALDLPHADGVVQTRLLIVRQLTEQLLRLWEEIETVETALAARVRETETPLLGLCGIGVIAAARLIGELGCTPRIHSAAALAALAGIAPVAVSSGGRNGHRLNRGGNRRLNRTFHMIALSQLRCEPLARAYYAKKRAEGKTARSALRCLKRRLVDVVYRLLREQGRAMAPNVRAGNALEPPLQPAA

SEQ ID NO: 118107 - protein, 460 aa, unidentified
MNRKQRREMMRKIQSDDLRLEVVHPDAAGIDIGNESHYVAVPPTRDNESVRRFGCTTAELKEMADWLKQCGIRTVAMQSTGVYWIAVYDILEEAGLEVYLVNARETKNLPGRKSDVQESQWLMKLHTYGLLRNSFRPSQEIRRLRTYWRQRNDLVRAAGRHIQRIQKAMTQMNIQLANVLSDVSGMTGQAIIKAILAGERDPHVLAAFRDHRVKASEEEIARSLEGNWQEDLLFVLQQEQDGYEFCQKQMAECDRRLQQYLKQREDRSAGANLPEEKRKERLRKKKKGNTPQFDLRVELFRMTGADLTQIDGIDVMTATTILSEVGWDMSKWKTEHHFVSWLRLCPDNRISGDKIIGKGRLPTNNRATSALRMAASTLRVSNTYLGAQFRRLRTRLGAPIAIKAMAAKLARLVYRVLRYGMQFVDKGAEFYEAQHRKLQINYLKWKAAKMGLQIIEAPAA

SEQ ID NO: 118108 - protein, 404 aa, unidentified
MRVIGLDVSRTVGEIAYLEDGQLREGGRVVLRHDALERFAHGLRPSDEIVLEATGNTSAIVTALKPHVAKVVIANPLQVRLIAEARVKTDKIDAAILAQLYASGFLPQVWMPDSYTLALRRQVARRSQIVRHRTRLKNQIHAVLAAHLIPQCPAADLFGRKGRTWLAEQPLPMDERLAIEQRLRELDRLGEDLDAIDKLLCESVLHDEQLKRLLTITGVNCIVAIGLLAAVGDISRFASPEKLVSYFGLNPRVRQSGLQPAQHGHISKVGRAHARAMLVEAAWASANAPGPLRAFFLRIRGRRGQHIAAVATARKLAVITWHVLASHEDYEWARPALAAKKRRELELRAGLPVRKGHRGSAAEYSIKEVRDRERATAEMAERAYTRFVSSWKPNRPPSSMREAP

SEQ ID NO: 118109 - protein, 345 aa, unidentified
MQPMYYIGLDVHKQKISYCIKDSSGKIYAEGWIPATHFDLDRWMKRLPQPWSAALEATMFSGWIYDHLKPHAATLKVAHPLMLRAIAAAKKKNDRIDANKICDCLRCDFLPECYMAPTAIRERRRTLRYRNLLVRQMVQMKIKISTLLMEAGVSYNKQRLHKAGYFRELLASNPDIDESLRSLLRQCREMVVRLGKMEAALIHSLQQDRLLAERVERLMSIPAIGPITALTWALEIGEVQRISSIKKAISYCGLCGDEQRSANSVQRTPISKQRNKHLQTTLIEAAKMAPRYSPTLALLYDREKQKGNANRATLAVARKLVAYLMAVDRGQTHFLVIDQETRTAA

SEQ ID NO: 118110 - protein, 453 aa, unidentified
MSKGKKSKGKRTVSMPLVNPDAAGIDIGDSLHVVAVPVDRDPVNVREFGAFTEDLEKIAAWLKECKINTVAMESTGIYWKNLFAVLVQHGFEVNLVNAKHTHNITGRKNDESDAQWIQKLHSCGLLSSCFLPDDRIETLRTLVRHRRTLTQDGSRYVQRIEKSLELMNIKIHTVISDITGKTGTAILKAIIGGERDPKNFLPLIDGRIKATQDNILKSLQGNWRREHLFLVQQCYNLYQEMQTQIELCERQIEEVLKLLVTRYQESNSEQAQQSAPAPGPKKKKTKNQPRFNTTSYLKKIYKVDVTQIYGVSETTALEILSETGTDLSKWSDEKRFVSWLNLCPNNKISGGKLISSKLLKKKPNPAAQAFRMAANSLQRSKHWLGDYFRRKRSKGGQKYAIVATARKLARIYYKMVRFHQPFTPFDTSEYRKKYTQTKIASLERAIQRLKHAA

SEQ ID NO: 118111 - protein, 353 aa, unidentified
MMVVGVDPHKETHTAVVVDELGRKQAQLTVRARRDGHRELIGWARDVAPAGRLRAVEDVRHVAGGLIRELLAAGEMVVFVPPKLMAGVRRGGRERGKSDPIDALAIARAALREDAHLPAARLDKQVLEVRRLVDHRDDLVAERTRVINRLRWMVHDLAPELAPAPRALASARGRAKLEAGLRALPDSAGRRIALSQLARIIALTAEAGQAERELASLVRHLVPALLQVAGVGVITAAKILGEIGDIRRFRSLAAFARHNGTAPIPASSGTGKDGPHRLNRAGNRQLNAALHRIAIVQARCHDGARILLQRRGETAHETRKASLRVLKRHLSDVVYRALAADAWRLDDPAQQAA

SEQ ID NO: 118112 - protein, 400 aa, unidentified
MKYYTSTTEFNCGIDLHARQMYVCVMDRQGQKRVHTNVRDNDFNFFLKLVEPYRHSLTVCCECMFGWYWLADACQNAGLTFVLAHALYVKAIHGGKNKNDRVDSEKLTHLLRSNLIPPAYVYPADKRPLRALLRQRLFYVWRRSELLARIHSHQLAHNRIPAKQTRRTRDLWEEALLNAEDHPLRQIALKNDLTMIKHFDTQIFQLEEELQRQTQKVACREYSLLQTVPGIGENLGLTILYEIGDISRFPTVKDFLSYCRLVKGTVASAGKIKGLRGAKLGNPYLRWAFGEAAVIAKRDHYLVGPLSQRLEAQMGGNKFKANTVLAIKLARAVYFMLKNKTVFDPERLVASMQKCFSPGRRPPGSLTGRAKKAMPPPVPEAASCAPSTALCVGQASSPAH

SEQ ID NO: 118113 - protein, 342 aa, unidentified
MEKVATIGLDIAKSVFQVHGVAADGEVLIRRQLTRARMLPFFAKLPPCLVGIEACNNSHYWARELIALGHDVKLMPAQYVKPYVKRGKNDAADAEAICEAVTRPTMRFVAVKSAEQQSLMMLHRVRLMLNRQRTQISNAIRAHISEFGVVAPVGRLGVDRLLAVVADSGDDRIPEDARLCLQMLAAQLEVVKQQILENDRRVLASARRTELGRKLMDIPGVGPLLASAFVASVADPTVFKTGRDLAAWIGLVPKQNSSGGKDRLGSITRAGNRYLRQMLVVGAMAVIRYAQRHGTKRPWLVRLLARRPAKVAAVALANKNARMVWALMTSGERYREPMLMEA

SEQ ID NO: 118114 - protein, 300 aa, unidentified
MKDMMIGVDLAKNVFQIHGALRTGEVQFRKKLTRQQFTAFMARQAPCLIIFEACGGAHYWAREMKAPGHEVKLIAPQYVRPFVKRQKNDAADAEAIVIAARQAEMRFVGPKTVEQQSRAAVFRGRERLVHQRTADVNALRALLYEHGYVFPVGMRYLDRMTALVDDDTSDLPALIREECQDLLAQIAEKTARITKRTAKLKALASQSDRARRLQTMPGVGPLTAIAVEAFGPDMAHFKTGRNFAAWLGLVPRQHSSGGKERLGRMTKAGQADIRRLLIIGAMSRLGWLGRHTIAQGNCPA

SEQ ID NO: 118115 - protein, 377 aa, unidentified
MIQSQMIQVEDNTKKQHLYIAFELSNREWKLAFGNGFKKREKTIAARCLNVLQAEIERARKHFGMEEGVEIYSCYEAGRDGFWLHRYLVSCGIKNVVVDSASIEVNRRYRRAKTDRIDAGKLLQMLIRDISGERKVWSVVRVPSIEQEDARRTNRERDRLLKERTGHINRLKSLLILYGIKMKISKRFKEDIDCVKLWDGSTLLENIKSELRREYDRYTTVNEQLEAMQKEQIEKQTADDRISQQIEELKKLKSIGPISSRQLILEYFGWRKFSNVKEVGAAAGLAPTPYSSGNSQIEQGISKAGNYRVRKVMIELSWLWLRYQLNSKLSHWFIKRFAFGGKRMRRIGIVALARKLLIALWKYLEKGIIPEGATLKA

SEQ ID NO: 118116 - protein, 355 aa, unidentified
MTSTKYIGMDVHKESISIAVRNAVGKVVMECVIETKASMIVQFIDGLRGDVQVTFEEGTSAAWLYDLLKPHVSKLVVCDPRKNKSMREGNQSDKIDARQLAELLRLDHLTPVYHGEHGLRTLKELVRSYLTVTKDLGRVMTRVKAIYRSWAIPCSGKQVYASRHRAEWLGKINERGVRRRAEFYYQQLDALRVLRQQVRRDLLAESKKHKAWKLLCQIPAIGPIRAAVLLGILQTPHRFRTKRQLWNYGGLAIEMHSSADHRSVDGHLQRSRKNVLVRGLNRNCNHDLKNLFKGAAVVASSKPGPFAEFYAALVGQGMRPEMARLTLARKIATIVLIVWKKGVSFDAQHLKPQTA

SEQ ID NO: 118117 - protein, 316 aa, unidentified
MGWHIVGIDVSKAKLDVCLLGEAGETAYQQVPNTLAGYGQLQTWLQQHGSQPLPVCLEATGIYSLPPAQYLHQHHYLVSVVNPAPVKAFAAALMKRHKTDKTDALVLARYAAHFAPPLWSPPTLSQSQVHDLKRLADDLQSDRTRVKNRLEGTPVGSPARPYLEKQLAQIQRELQKQRDEDQGLHSQCDLLTSIIGIGVTSALQILAELPDLTRFASADELVAYAGLCPRQQQSGNQIAHSWLSKQGSPALRKALYLPALTAKQHNPHLRQFAQRLSDSGKAKMTVVAAVMRKLLVLIYAILKSGHPYDPNYLFAT

SEQ ID NO: 118118 - protein, 387 aa, unidentified
MKKSSKKTKQAERKAKVARQEELVQLSALVERQPNSLVIGIDLGDKTSSYCVRTRDRQVVTEGVVATKAEAILESFREMPRQLMVMETGTHSRWVAQLLHLMGHEVIVANARKLKLISENNQKSDRVDSRLLSELGCTNVDWLHPVYQRNEGKHCDLLVVRAREALVEQRTGLINHVRGTVKSYGCRIRKCSAESFVGVAGSAIPEALQPASSGVLETLEEIGEQIYRYDAQIEHLCQTKYPETEWLRQVKGVGPVTALTYVLTIDDPHRFGCSRDVGAYLGLVPKRRQSGQRDPQLGISKTGDELLRKLLVNCAHHMMGPMGAESDLRRWGLELVAASLRAGKAKGARKRAAAAVARKLAVLLHRLWVEEEEYEPLRKRKSDEAAA

SEQ ID NO: 118119 - protein, 311 aa, unidentified
MSAVVIGIDVAKAHLDVAALPQDLALARVTNDDAGIAALVTALTARAPTLIVLEATGGWETHVATALALAGLPVAVVNPKQVRDFARATGQLAKTDALDAAILALFAERVRPTPRRLPDDAEADLRALVTRRQQLVGMLAAERTRLATTRPAARPSLDAHIAWLEARVRDTDRDLTQRLKGSPVWQAREQLLRSVPGIGPQTARRLLVSLPELGTLTTRQVAKLVGVAPLNVDSGQFRGRRQIWGGRAPVRTALYMAAVTAARANPVIRAFYQRLRRAGKPAKVALVAAMHKLLTILNAMVKHQQPWAPTA

SEQ ID NO: 118120 - protein, 316 aa, unidentified
MTEAPVFVGIDISKARLDVALRPAGSLFTVPYDDAGIAMVVERLGALSPVGIVVEATGGLEVLLSGALATAGLPVAVVNPRQVRDFARATGRLAKTDRLDAQILAQFAEAVRPACRPLPDASTQQLAALLTRRRQLVEMLTAEKNRRGSAPQGMRSQIQTHIDWLAQHVAQLDRDLTTAVQASPIWRAHDELLRSVPGIGPVITRTLLAELPELGTLTRKQIAALVGVAPLNRDSGTFRGKRTIWGGRATVRAALYMGALVAARHNAVLKAFYQRLRGAGKAPKVALTACMRKLLTILNAMLKHRTPWRTISDQAT

SEQ ID NO: 118121 - protein, 411 aa, unidentified
MDAILERVAGLDVHQETVVACVLYGPLDRRAKKETKTFGTTVNELLELQDWLAKHKITDVAMESTGVFWKPVWNILEGEFTLILANAQRIKNVPGRKTDISDAAWIAKLLRAGLIESSFVPSIEFRDLRDLTRYRRKLIGHATSEKNRIHKILQDANIKLSTYVSDLFGVSGRLLLNAILNGEVLEIDEVKALVKTSLKKKAPQIVEALNGRMRAHHQKIIQMHYDHLEYIEERIGELETEISQLVTTHNEEMDLLITIPGIQKDAAASVLAEIGIDMSKFPTGKHLASWGGFSPGNNESAGKKKGSKSSKGNKGLKTVMCQVAWAAMKKKDSRLSSFYYRLVKRRGPYKANMALAHLLLRIIYQVLKERTPYKELGWDYLPTKERKKDYFIKKLKNMGYEIDILDQKSTA

SEQ ID NO: 118122 - protein, 414 aa, unidentified
MFAVGVDVSNGRSTVAVLQTKKKVILKPFEVPHTPEALGRLVDKLNSLNEETRVIMEHTGRYYESIAMFLNSKGLFVSALNPLLFKAYQEGISVHPVKTDKADAIMIAKFGLDKWDELRQYEPMDTIRYQLKTLNTQFQMASKSKTAFTNNLIALLEQNYPGIRKHFPSPARPDGSEKWVDYVGTFWHIDCVRKISLKAFVERYLKFCQKHGYNFSEEKAAELYCHAHSTIALVPKSDISRLMVREAVNQLSTISHTVETYRAEMNRLASQLPEYKTVMGMYGVGPSIGPQLMAEIGDIRRFPQRNSIIAFAGIDPEKDDSGDKVSKTGKSTKRGSPYLRKTLFVIMDILLRLQPADDPVYQFLDKKRSEGKPYYVYMTAGGTKFLRIYYGKVRDCLKEQGLWDQPMIESGNSD

SEQ ID NO: 118123 - protein, 359 aa, unidentified
MQKYNISFKGQKIFIGIDVHKTTWEVAVLTESGFMKRHPQKASAKELFDFLRKHYPDGDYLAVYESGFSGFATYYALKEYGIDCVITHAADVPMTQYDAVMKTDRIDAERLVHALAKGDIKRPVYIREPDNIDDRGVIRLRKVIQRQLAGYKARVKHLLHSNGVEIPERFCKPGSHWSRAFITWLMQDVRLLSSTRMTLDLLLRQVETIRGTLLVATRELHKMSQTERYKHRFDLLLTIPGVGPTIAMCLLTEIWDVNRFANERKFAHYLSLIPTCHDSGPHKCDGEKTFRGNKFIGPMIIEACWVVIHKDIGLGACYSYHKQRMNPQKAIIRVARRMSNIIYSVLKNDRPYEAYQWDR

SEQ ID NO: 118124 - protein, 316 aa, unidentified
MSKRKNNIGIDVSKQLLEVAVHESDFRYRCPNKTSAFAALLAELIALRPARIVVEATGGLEKPVVAALHAARLPVVVINPRQVRSFAKATGQLAKTDRLDAAVLAHFAAAIKPPLRPLKSKEEQELEALMGRRGQLVDMLVAEKNRRHSATSDLVRDAIKEHIDWLEEQIAELDEQLQSRLESSDEWQNKDAILQSVPGIGPVVSFSLLADLPELGTLNRQRISKLVGVAPLNCDSGQQRGARHIFGGRARVRSMLYMAALTALRFNPVIKEFYQRLVVKGKPHKVAITACMRKLLSIVNLMVRNQTNWKTDSVSA

SEQ ID NO: 118125 - protein, 411 aa, unidentified
MQVVYERCAAIDVHQETAVTTILITQANGHVQKETRTFTTMTSDLLRLDDWLQERGVTVVAMESTGVFWHPIFNILEEGREIILVNAQHMKAVPGRKTDVKDSEWLADLLRHGLLQASFIPPKPIRELRELTRYRKTLVQERNREVNRLQKVLEGANIKLAVVATDVLGKSGRDMLEAMMGGEQDAEVLAALARGRLRAKLADLRLALEGRMQPHHRFLLQRILAHIDFLDQSIAQVEQEIEQRLRPFEEAVKLVQTITGLQATTTAGILAEIGIDMTRFPSDKHLASWAGVCPGNKQSAGKRLSGKTTQGNTHLRALLGEAAWAAARTKGSYLSAFYHRLARRRGKKKALVAVEHKLLIIIYHVLRTKKPYSDLGAEYFDHLEKGRLERQHIHRLEQLGYTVTLTPKEAA

SEQ ID NO: 118126 - protein, 400 aa, unidentified
MTAVWAGIDSGKRARHCVVIEATGRVLMSRRVVNDESALLELIAAVLAVADGDAVVWATDLNSGGAALLIALLADRGQQLLYIPGRIVHHAAATYRGDGKTDAKDARIIADQARMRTDLQPVRGSDQISTDLRLLTARRTDLVYDRVRTINRLRATLLEFFPALEAAFDYSKKAPLILLSGYQTPEGIRRIGAPRLAAWLKKRGCRGSASMAVKALAAANAQRTVLRTEAMGAQLVAQLAQQITDIDAAIAALDEQIGERFDQHPDAPILLSMPGFGAVLGATFIANTGGDLRAFETVDRLASVAGLAPAPRDSGRISGNHHRPRRFNRRLMRTCYLAALSSLKSSPASRSFYDRKRAEGKSHKQALIALARRRINTLGAMLRDRTTYQEPPRRALASAA

SEQ ID NO: 118127 - protein, 341 aa, unidentified
MKNKSFIGIDISKNVIDASIFCKGAPIKDFPHAVFNNSHKGFGEMCTWLKKNHVVLLNSLFGMEFTGSYSMELEKFLNAKKYQFCMLSTHVVKHYPMGPKDKSDKIDSAKIADFLYRYDGTECVKPYKMPDKTMQRLKALTKERKFLVEQRTCFMNRRQLCPTKEAAQLYDGYIKEFSHDIENIELKMQNLLEADDSLSTTYKNLLTIPGIGFVNAMNVIVITRNFTAFETARQYASYIGVAPHFHTSGTSVRWRPRPSARCDGQAKADLSMAASVAVQCDAELQSFYNHKLGDKQDSDTKRKALNAVKFKLVLRMFAIGKQNRKWEPLDSKSSNEKLAIS

SEQ ID NO: 118128 - protein, 410 aa, unidentified
MGYETINRRAHVMTRKNTLKSLPTDTEFRVVGLDLAKSDVSVAAIPVDNNTPSLVDRMTYADLLDWAGKISPTLFAMEPCNGYSLLCLQLENLGHEIKVISGSTVSMWINTHLSGQKTDLNDAIALARLAVSDAELTPIRHKSITEIRIQTVQAVRQQLMSQRSKSIVSFKALAQQWGIPCAAGHRNLKKLRESIEAKVDLITRPVANAMLFLLDAVKSLDRQIGQLNQTLQELVMSDERGRLLQSVLGVGTQISARVITVVGNVERFNSPRSLVAYVGVAPRNFITGHKNLTKKKHGNCPDLSHKGQGKISRRGDKLLRSLFIQGAACLYMQFCKDQLPECQLKRWILKQLARQKPYGKLMVSLAAKLIRIVWAVLTYREKFNIQKAGMTRSMWSEMALETPLNKEVPA

SEQ ID NO: 118129 - protein, 342 aa, unidentified
MTEVSTIGLDLAKNVFQAHGASQSGAVVFRKRLRRGQLLSFFAGQPRCLVAMEACAGAHHWARAIGEFGHEVRLIPPAYVKPFVKRQKNDMADAEAICEAAQRPTMRFVAVKSEAKQASAVIFRTRDLLVGQRTQIINALRGHLGEYGLIAPQGSAHVERLIVEVEDASSAIPQAARTCLLRLVGILRALQAEIAALDAEIAARAKRDDVAKRLMTVPGIGPVIATALEALAPPPETFKSGRDFAAWIGLTPLQKSTGGKQRMGRTSRMGERTLRRLLIIACSGVVRWAKRKGMSADSWLARMLARKPAMLVIVALANKTARIAWALMTRGEVYRAPSAVAV

SEQ ID NO: 118130 - protein, 417 aa, unidentified
MQYARSVLPDQPVNGLTSGIDWARDDHALSIVDGRGCEVHRYTVEHSAAGLRELVAVLAGAGATEVAIERPDGPVIDALLNAGVTVVVISPNQLKNLRSRYGSAGNKDDRFDAFVLADTLRTDRARLRPLVPDSPATVALRASCRTRKDLITHRVATANQLREHLKAVFPGPIGLFDNLDSPISLKFLTRFDCQDRADWLTPSRLANRLTSVGYTGRTTPATLHARLTAAPRGITGAASEGFIAITHALVTVLDTLVQQIKTLDKQIARQLAAHADAHIFTSLPRSGTVRAAKLLAEIGDCRARFPTPEALISLAGRAPSTRQSGKTCIVGFRWSCDKNLRDAVADFANDSRHANPWAADIYNRAIARKKKHPHAVRILARAWLYVIWHCWQNNTTYDHAKHRALQALLEGQQQPAA

SEQ ID NO: 118131 - protein, 338 aa, unidentified
MSIVMGLDQHRAQITGEWLDTETGEVARTRVAPADRVAVRKFLARFRGQELEVALEATTGWRFVVEELRRVGANVHLAEPAETAGLKGPKKRAKNDRADARHLRELLMIGRLPESWIPPGHMLDLRARVRLRHTLSEQRSEWQQRIQATLYHHGCPQRRSLLSGDGREWLASQPLPSAAREQITVALAMIDGIEAQIAPLDKELRAFAGRQAGCEALMAHYGIGPLVAVTILAELGDCTRFSSSRLVVRYAGMDITVHQSDQRRAPGHLSRQGPPALRWALFEAAQSACRQTSPDRDYYRETAARLGHNRACLAVARKLLKRSYHTLRELGEEALQPA

SEQ ID NO: 118132 - protein, 360 aa, unidentified
MNKYFGCDAHKRYSVFVSMNDRGKSGVPVRVENNRALFREFLRELPSRSPIAIESVGNWYWMIEEMEKAGHNPLLVHAAKAKLMMGQINKTDKLDARGLALLLRNGTLPSVWIPPGELRDQRELPRMRMSLVRIRTMLKNRIHAALAKYALDIPEVSDIFGATGRMLLKNRLEDMPPYTRQSVEKQLELLDQVETHIGQCEKQIQVVVKACPAMKLLMTLPGVGMILAVVMALEIGDITRFPGPEHLASYAGTVPRIKSSGGKSFYGKVRPDVNRYLKWALVEAANVAAMNQWRWSDRHVVQLYQRIMKRKGHAKAVVAVAQHLAEAAYWVLRKNESYKEPGQKTPISSTRMSTRSMHET

SEQ ID NO: 118133 - protein, 311 aa, unidentified
MIISPHCVGIDVSKRMLDIFDDAVGRPERIANTLQAITERVAGWRCGNVFVVFEATGVYDRELAEALRQADIRFARINPARARDFARADGRLAKTDAIDARMLAIFARKMMPAVEPAPEPARSALASLAKRRDQLVQIRAQEKNRRSEATDRTTIEGIQRHLDFLNGEIKAIEASIKTLIKAEPDISEQARLMRSAPGIGPVACMQLLAKMPELGCLGSKQVAALAGLAPFNVDSGSYRGKRAIGGGRKRVRDALYMAALNAVRRDLTMKAFYQKLRTVGKPAKLALTAVMRKLFILLNHLLKNPHFQLAT

SEQ ID NO: 118134 - protein, 348 aa, unidentified
MQVTTLGIDLAKSVFSLHGCDANGKAVLRKQLSRGQLLRVIANLPRCTVAMEACGGAHYWAREMEKLGHQVRLIAPKFVSPYVKANKNDASDAEAICEAASRPSMRFVAIKSAAQQDIQAIHRVRQQLVKSRTGLANQVHGLLAEHGIVFRRGFAQLRRALPLILEDQDNGLSAVMRELLGEIGERLRFIDDRLHKYDLIIQRLFRDDERCRRVAAVEGVGPLTATALVAAVGNASEFRSGRELAAYLGLVPRHRASGGRTVLLGISKRGNRYLRTLLIHGARSALHRIEQHRSARAIWATRVKLHRGPNVAAVALANKNARVLWALLSRGENYRPAPFSARVPQAGG

SEQ ID NO: 118135 - protein, 304 aa, unidentified
MFGIGIDVSKATLDVVVHGEQFRQFSNDKRGFVRLIRWLKTWPIKQVVLEASGGYERAALDVLHAAGLPMVRINPARARRFAQGTGRAAKTDRLDATVLAQMAHLLPLTRYVPPAPWQQRLAEFAQCRRHLVQMRVSEMQRLRRLVDPDLIAMKQRHIAQLSDDLKQLDKAIAEQLEGQPGWKNIGTLKGVGPILISTLACELPELGSLGSKAIASLAGLAPMNRESGTWQGQRRISGGRAVVREALYMAALTAIRYEPGLHAFYAGLKAKGKASKVALVAVMRKMLVILNARKRDAEVALGCP

SEQ ID NO: 118136 - protein, 424 aa, unidentified
MAIIDGTKVLAKSFTIKCKGGKDMKRLVGGIDVGSEYHHIFIMDEEEKILYDQKIKHRVSEFYKAVEEFKGVEEREGGIISFAIEGKNGYGSPFDRILVENGFTLYNVDNLKLKQFRNVFGAEWRNDQRDARMLAKLLKLREHLEGEKEKAFLLIEKTIGLTEELKILSRHQQTLIDEKVRLQNRLRKRLLGICPEILELGDIDSKKLLRFLVKYPDIREYKKLTLKALLKIETIGKKQAPVMLEGFRTIKSAEELADVYAKIILSHSRRILELQEEIEEIDKQLEGIGEKSTEVKRLKSIPGVGVKLSSRLIGELGGIKRFKNESKLAVYCGVACIDDDSGKKKSSKEVYKANKICKATMIEIASCTIRYIPESMRYYVKKRAEGKEHNHALRCLARQLIKVIFKMLKEDRNYILKEEMEKAA

SEQ ID NO: 118137 - protein, 342 aa, unidentified
MGQVSTIGLDIAKSVFQVHGVDANGEVVLRRRLTRARLLPVFTKLTPCLVGIEACATSHYWARELRKLGHDVRLMPPSYVKAYVKRQKNDTADAEAICEAVTRPTMRFVEVKSPEQQSIMVVHGTRVMLMRQRIQLSNAIRGHMAEFGVVAPVGRQGLLTLTDLLHDETDNRVPVEARHCLQMLADQLRLVNAQILENDRRIRLSARATDVGRRLMGIPGVGPVLASAFVATVPDPHVFRSGRNLAAWIGLVPRQNSSGGKERLGGITKQGNRYLRQLLFVGAMAVIRYAERHGTRRPWLVRLLARRTTKVAAAALANKTARMVWAIMTSGQPYREPELRTA

SEQ ID NO: 118138 - protein, 360 aa, unidentified
MIVQGTSVGLDVHALSVVAHAVDEETGKVARARLCPDHGEVLGWLHQLRAPVRVTYEAGPTGFGLARAITEAGMECLVAAPSKLQRPAGDRVKTDARDAAHLARLLRLGEITAVRVPEREIEAVRDLVRAREDARADLMRVRHRLSKLLLRQGIVYSGGTPWTCVHEEWLRRHRFDDIHLKAAFDHSFDAVLAATAARDRLDEQIMVVAASPRFADPVNRLGCLRGISALTDLPLTVEIGDWSRFSGSSIGAYVGLVPCEYSSGNSRVQGSITKAGNTHVRRLLIESAWHHRKSYSTSGPTLRARWAKVDPALRARGHAGNRRLNKRWRSFTERGKNPLVANVAIARELAGWCWSLATMQ

SEQ ID NO: 118139 - protein, 371 aa, unidentified
MDTPVASQVEVLLMSMELSNTEYRLRFSNQRREREVTVPARDVEKLKHAIRVAKEKLGLNEGCRVVSCYEAGRDGFWLHRCLEQAGVENLVVDSASIEVNRRKRRAKTDRLDAKKLLAMLIRHTICAEQGMWKIVRVPTEEQEDERRRHREHERLKKELTAHMARIRSLLTLHGIAVKRMDPNVETYRDWAGRPLPAGIKMELTREFERVELTTRQLHDLGKHRERCVKAPETQGDQATAKLMKVKAIGLETASVLGYEFFGYRKFKNRRQVGALAGLTGTPYESGSLRREQGISKAGNPRVRHKMVEAAWLWIRFQPESALTKWFFANYGPDSHRKRRVGVVALARKILVALWKYVEFDEVPQGAVLKAA

SEQ ID NO: 118140 - protein, 455 aa, unidentified
MPIKRGSQGFSVVHPHAAGIDIGATFHIVAVSPDCDPNPVRRFQSFTTDLQALSKWLHEVGVTSVAMESTGVYWIPVFEILESDGFEVILVNAREVKQVPGRKTDYNDAQWLQKLHQFGLLKASFRPSEHIASLRAYLRHRERLIEYSAAHIQHMQKALMQMNVQLHHVVSDITGATGMKIIRDIINGERCAATLAGHRDIRCKQSQQTITAALTGNYRDEHVFALKQAVELWDFYQERIRECDVQIEKVMAKLNQNRTSSGVPMPKARHRTKQPHEPDFGVRSALYTLTGVDLTQINGFGPYTALRLIGECGDNMAKWPTEKHFVSWLSLSPGNKKSGGKILLNKTGRTKNRATTLLRIAAVNVGKTETALGAFYRRLAARVGKAKAVTATARKMAVLFYAIMKHGKAYVEPGAAYYETQYRNRVLANLKKRAKRLGYELVANPVPERLHGEVS

SEQ ID NO: 118141 - protein, 411 aa, unidentified
MDLLYPRCAGIDVHKRTAVVTIGWVDEQGQRQKRTRTFGTMTGEIEQLAAWLVDYQVTHVAMESTGVYWKPVFNLLEPHVEVVLANAAHVKAVPGRKTDVRDSEWLLDLMQHGLIRGGFIPEAPIRALRDLTRYRTNVIEERTRALNRIQKVLEDTNIKLASVASDVLGVSGRAMLEAIIAGESDPEVLAGLARGTLRKKHDALVQALTGRVQDHHRFLLRTLLAHVDQLTQAIAELSEEIARRLEPYADAVALLCTIAGVKRRVAEVVLAEIGPDLSRFVDARHLCSWAAICPGNHESAGKRRSGRMRHGNRWLRGVLLQAAWAAIKVRGGYFGTQFRRIAKRRGDKRAAIAVAHSILTVIYYVLTRGEPYQDLGGDYFDQRKPEQRARYHARRLAELGYEVTLDPISAA

SEQ ID NO: 118142 - protein, 366 aa, unidentified
MKKTITVQASKSEIFKEQKLTIGLDLGDRWSFYCVLDEAGQVILEQKLPTTPEAMKQTFGKIPRSLIALETGTHSPWVSRLLAELGHEVIVAHAQKVQLITKSNRKDDRHDARTLARLARIDPALLGPVRHRSAKAQLHLTVIRARAELVSARTALVNAARGLVKSYGERLPKCGTYQVSRELAAALSTELQDVLEPLLKEIESLNERVKQYDERMEKIAKDVYPEVALLKQVKGVGTQIALTYVLTIEDPYRFAKSREVGCFLGLRPGRRNSGESEPQKGISKEGDRYLRTMMVQGAHYILGPFGQDSDLRRWGLKLSERGGKNAKKRAVVAVARKLAVLLHRLWVGGEVYEPLRNSQKGMREVA

SEQ ID NO: 118143 - protein, 417 aa, unidentified
MKDDSNASPIRYIALDIHKYYSVVAGVNRDGEEILPPCRVEHMNLEEWLGKHLLASDRVVIESTTNAWHVYDLLEPLVAEVLVANPIKVKQIACARVKTDNKDTLILARLLAANLVPTVWVPPQPVRELRQFVSHRRRLANMHTQVVNRMHSVAHRHHLNHPKGKDFQPKNTAWQQDASLSQLEKLQLELDMATRAHLEKQIEQMTRELGRMSHKEPWASDMLYLMQIPGCGVVTGMTIMAAIGNITRFENPKALASYSGLTPGLEQSGVKLRGKGITKEGRRELRWALVEVAWRAVRADPHWKRLFEELKKRMHPNQAIVTIAHHLLVVMWHVLTKREPYRHYSPERIAYKYLTWSWALDEEQRGGMTRPQFARYYLMRLGIGDELKRVALNPEFPYRLASVEEVLAIRPELLRSE

SEQ ID NO: 118144 - protein, 407 aa, unidentified
MSKEVLYLGLDVHAESIAVAIAEAGREGEVRNHGEIPNTFHSLEKLLRRLGHLDRELRVCYEAGPCGFVLARFLKKKGIACDVIAPSLTPKGSGDKIKTDRRDARMLARLHRAGELTAVHVPDERDEAIRDLCRARTDAVQDQRSGRNQLKAFLLRNGYRYGEKTSWSAAHMRYLRELILPHPAMKIVLEEYLQCIDAAAERIKRIEVHMKALLEEWHMKPVVLALMGFKGYQTVAAMITVSEIGDIHRFAHPRQLMAYLGLVPSESSSGGSRAQGGITKCGNGHLRWIFNECAQHYRLPPKISQELTTRQEAIPKAHRRQVIEISWRCQNRLHERGRKLAARGKTRQKVQTALARELSAFVWEVMRAVMPKSDGTQAISTPRSSKAEESAKPATKKKGREYILKTK

SEQ ID NO: 118145 - protein, 349 aa, unidentified
MRKLYVGIDLGCKTCAGAVRDSKGKLLETCGFPTSAENLINFVGKQEGEVRVLIEECELAGWVYRTLLPHAKSVEVSDPRHNAWIARGKRKSDPIDAAKLAELLRGGFYRAVYHPEEEEMANFKIAVQHYDQMVRTTTRLQNQIKARFRQQGIMTTGKGVYGTAGRQKAISMVKSEAIAEMLRQDFRLLDHAQKERAGASRLVTKLSRDLLVIKRLKRIPGVGTISDCRFVAYVANPHRFNTKGLVSFSRLAVVKKQSGDSIVCGEHLSKEGNGAMKALSRTVFNGAMKTTSTNGIRDYYLRSLRRTKNETHARLNTQRKILAVMNAVWRDETEYSDHLVTGNGAKRPL

SEQ ID NO: 118146 - protein, 434 aa, unidentified
MQEYPPFLLAVAKGGFMYYLGIDVSKKRSDYLILDSQGERFQRSFSLENSREGFEALARRLEEYNLSPENLLSGLEATGSLWENLYSFLIEKGYKVVLLNPYQTRKYHQALRQKATTDQLAALVIADLLRSNRYLSSMVAEEEIEALRELVKLQYQLEGEKKRLQRRILSLLFVVFPEYEKTALKKVFGIAPRKILEKWPTAKDLATAKPRQIEKLVRSIKGNNFNISEIEALIETAKTSIYSGRAREVRSFTIRLLLSQLERTLSSLKKIKEEIEKILSPRDESGSFPGDNILSIPGVGKGTLATFLAIAGQKGSSFSSAKKVIGYLGFYPQIYQSGEKRRDNVISHQGPNYARQSLYMAAVSCIRHNQEMRTLYNKKVSQGKSHKQALIYVAKKLSQMILALLKSGKPYQPERVFVSPTALPHFREVIPAYF

SEQ ID NO: 118147 - protein, 349 aa, unidentified
MTLYIGVDFHPHQQTIAWCDAQTGEVRTNDLANDPELVRKFYSSLPEPVTVGIEASAKATWFEELLFETGHKLLVGNPVLIRKRATSRHKNDRRDAELILDLLMRGEFPDIRRRPPESDQILEILRLRQTFVRQRTQSYNRLQALAHSVGLPKGKIRTKGFQQMLKAARMTEAASIRREQLFSLVEKFSEQIDELEKWLKKRVETDKSVQLLLTQKGVGDLTALATVHTLGDVSRIPKLSKYVVGFAGLAPVEDSSAGRVRFRGISKAGSPLLRQQLGMAAHIASRSDVKLKSFYKRLAKKKPKPVAKTAAARKLLVKLAIMLRDQITAEEFDQRGRTVGNARGIQDLK

SEQ ID NO: 118148 - protein, 414 aa, unidentified
MDTLVERCAGLDIGKADLKACVRTPGKNARRVREIRTFATTTVGLLQLRDWLTGHQVTVVGMEATGDYWKPVYYLLEDTFEVQLLNARHMRNVPGRKTDVADSAWIAQLIEHGLVRPSFVPPPPIRRLRDLTRYRTAVVQERTREIQRLEKVLEDAGIKLSTVASRTLGKSSRAMIEALIAGERDPQVLADLALARMRNKIPQLRQALLGRFTDHHAFVCRTMLERIDTAENTINKLTERIEQEIAPFHQTVTRLMTIPGVSARIAQILVAETGADMTRFATAAHLASWAGMCPGHHESAGKHHGGATRKGDSWLRGALGEAATAAARTKNTYLQARYRRIAARRGTKRAVVAVGHTILTSAWHMITAEIDYADLGADYYQRHQDRRAATIRLVGKLTQLGYRVTLDDAATVAT

SEQ ID NO: 118149 - protein, 375 aa, unidentified
MSTNLRHVGLDVHAETIAVAVAEPGGEVRPLGIIPNRPEAVAKLVRKLGPREHLRVCYEAGPCGYVLYWQLTKLGVHCDVVAPTLVPTKPGDRVKTDRRDAAKLARCYRAGDLTPVWVPDAAREALRDLVRAREVAKHDQLRARHRLSKLLLRRGIRPPAGVNPWTARHRRWLDTVQFEAPAQQATLGDYLQEVDHAAARLERLEQALDEAVQAAPASLRAVIAALQTLRGIRQVTAATIVCEVGPLSRFTHPRQLMGYSGTVPSEHSSGAAIHRGGITKTGNAHLRRVLLEAAWAYRFPPKCAKGLRQRQRGQPEAITDLAWKTQQRLCGRYRRLLARGKPTPHVITAIARELLGFIWAIGVAVERAGTAAAAA

SEQ ID NO: 118150 - protein, 370 aa, unidentified
MGKSLLYVGLDVHKMSVDVAIAEAGPAGEVRFYGRIGGDLEALDKVTRKLQAQGAELRFAYEAGPCGYQVYRHLTARGLECLVAAPALIPRRPGDRLKNDRRDALALARLLRAGELTPIKVPDEDDEAMRDLTRAREDAICVERRAKQRTVAFLLRHGRVYQGKTTWGRGHWAWLLQQVMDHPAQQIVLQEYLDAVREASARVLRLTEQIRDLVPQWRQAPFVAAYQALRGVSLIVAATIMAEVGDLDRFNNPKELMAYLGLVPSEHSSGASVRRGRITKTGNSHARRVLVEAAWAYRMQARVTRHLLKRQEGLPERVRQLAWKAQLRLCTRYRRLLARGKARQTIVIALARELAAFLWAISRAVAQATA

SEQ ID NO: 118151 - protein, 427 aa, unidentified
MSETKSLELRVSVDVGYRRHSVAIGLPNGEVLEEFEITHGPEGFREFFSRIESHQTERDCGVAVAMEGYNGYARPLDSLVRSRGYRLYNINNLKLARFKEIFPGAAKKDQIDARKGLELFQLSDHLPLAKEVLQEVRGTAKENEVLKRLTRRRRRLVNERVRVVNNLQADLQAVCPGLLEITSEASNQWFLNFLLSADSLPQLARLRKATLLKIPAVGRKYASLIQDWQKRAYFSEEAAWVSEMIQEDAKRCLELDDKVKTLETKIREVAKDSKIAKVLLSIPGFGPVCTSELAGEIGTVERFSKEGSLALYLGMSTLDNSSGKYQGTKAPKHINTRAKAAMMIALDRHRKYVPESQRYYEKKRREGKQHNQAIRALGRHLSRIIYKMLKEERLYEIRPEKRNTKTKANPRSCVKTKLRRSKISGRG

SEQ ID NO: 118152 - protein, 316 aa, unidentified
MNGKRVIGVDVGKSWLDAAVEGCHRVRRYDNDAAGIAALIEHFDPARDVVVFERTGGWERNLEAALAERAITWSVVHSQGVRAFRQAQGIKAKTDRIDAQLLRGYGRDRLDAGKLRPGHREDVTLDCLMARQRQLKAMRHAESCRLATAALEAVRSSIERMIAALDAALAAIAAELARHEKEHTDLVFKEEILCGQIGVAEQTARGILAELPELGRLDRKAVTALGGLAPRVHESGSIRKRRGLAPGRTSIKVILFNPARTAMRFDPQIKEFCGRLRARGKPGKVIMVAVMRKMLVRLNAQMRDAMAQASTGAAVL

SEQ ID NO: 118153 - protein, 412 aa, unidentified
MKDLLEISCGLDVHKEKIVACILTGPLGKPTRSEIREFSTLIPDMIALRNWIVSKNCHHVAMESTGIYWMPIYEILEDAFSGDITLLVVNARHMKNVPGKKTDMRDSEWISTLLRAGLLNGSFIPEKRIREFRDLNRYCKSVIRDITSQKNRIEKFLQSSGFRLSSFISDIFGASGRNIILHLIEHGQIDKTALDSCLKTKTRNRIDEILMSVNGTLSEHQKAFLRILMTHYDSLKKHLAEIETSLEEDMAPFALQVEQLNSIYGISTTASCAIIAEIGIDMKPFKTAEHICSWAGLCPGNNESAGKRKSTSVTKGNPYIKSMLCEIAWVIAGKRNTYLSAWYWRIKQKKGAKKAIVALARKLLVIIYTMLKQGTVFDESCFETRRKHCEQKQLSRYIRELEKHGYHVEAQS

SEQ ID NO: 118154 - protein, 314 aa, unidentified
MAVECFIGIDVSKETLDVHTFPDGNDLQFINDPDGIKAICRKFSKLRPNLIIIEATGGLQIPVATALSLKKFPVVVINPRQARDFARAKGRLAKTDKIDAEILALFGKQMEPEVRPLKDEQAQEMSAFMSRRNQLIRMLVMEKNRFSRAYGSVRHDIEKNIDWLEERLSEIDTHLGKIVRASPIWRERDNLLQSVPGVGDVLSRALLSNLPELGTLNRRAIAALVGVAPLNCDSGKHRGRRRVWGGRSDIRSVLYMAVLSAKKYNPVIRDFYNRLKEAGKPHKVAAVASMRKLITILNAMVRSGQPWAQCANAA

SEQ ID NO: 118155 - protein, 404 aa, unidentified
MLFVGVDWAEAHHDVCAMDDTGKVLARKRIADSLAGLAELQELLAEHAEEPDEVVVGIEKDRGLIVTALLASGYAVYAVNPLASSRYRDRHHVSGAKSDPGDAKVLADMVRTDRHNLRQAAGDSALAEGVKILARAHQNAIWSRQRHVNALRNALKDYFPGALEAFGTDLSSSDAVAVLSVATTPVLARALTVEGIQALLRAGGRQRNLERRGTEIHAALQRPQLSQPEVLASAYGQVAASSMRLITAANVEVNELEAALTSDFEQHPDAKLILSLPGLGMILGARVLGEFGDDPNRYLDAKSRRNYGGTSPITKASGRSKVVLARFARNRRLADALDRWAFCSLTKSPGARGYYDELRARGKTHHQAVRQLANRWVGVLHVCLERHALYDEDAAWSQRQTAAA

SEQ ID NO: 118156 - protein, 317 aa, unidentified
MAKAIPVFVGIDVSKAQFDIALCPSGTMESFPNDEVAIGNLVKNLRTIKPVLIVLEASGGIERSLVRALVAAGLPVTVANPRQVRDFAKATGKLAKTDVLDAQILARFAEAVRPTLRPLPDETTLELRALVSRRRQITAMLTAEKNRLSRAPRRVQTHIEAHIHWLQSELERYDEELDQAIRQSPIWREQQDLLKSVPGIGSVISRTLLAELPELGCLNRKQIAALVGVAPLNWDSGLMRGRRIIWGGRADVRTSLYMAAVTASRCNSVIRDFYKRLRAAGKPANVALVASIRKLLVILNAIIKNRVPWRPVLTQTP

SEQ ID NO: 118157 - protein, 351 aa, unidentified
MLIIGVDYHPSDQYIAFADTETGECGERKLNHSDGEAEKFYRKLQHRAVRVRVGMEATGYSRWFERLLAELGIELWIGDAADIKTRRVRKQKTDSNDARLLLKLLLEENFPRIWVPSPENRDLRQLLWHRHRMVQMRTRIMNQLQALAMNEGQRRKTKLWNEQGRAQLERLPLAPWASRRRNDLLELLDRMNPTIEDLTRTIEREARKRSEAARLMTHPGVGPITALAFLLIIGTPKRFPCGKQIGSYVGLIPAEDSSAGHQRLGRITKQGSALLRFLLVEAAQAAARCDADWRRRYTHLAMRRQRNIAKVAMARRLGVRLYWMWRNGWEYAELVKFGSNAGQPGTGHSVQ

SEQ ID NO: 118158 - protein, 368 aa, unidentified
MNNFNTYVAMDTHKKQHNVVLLHHDTGETQQFVVKNTAKDIARMVKKIASQGPAAVKFCYEAGVCGFTLQRRIEALGCKCSVIAPSLVPIKPGDRIKTDRRDAKKLLGQFVAGQLTEVYPPNQEQEAARELTRCRHAAQENLKRSRHQLLKFLTRHGYIYNEGRHWTQKHLQWLRSLEFDLPQLREVFQMYYAELQHCMQRLNSLDKDVEQLAQRPKYREVVGLLRCFKGIDTLTAMTLIAEIFEFGRFDSPKALMGYLGLVPSESSSGERRRPGAITKTGNKRIRRLLVESGWHYRHRLGIGKDLRRRRKGQPQWAIDIADRAMLRLHKRYWRLTERGKLPNKVVVAVARELAGFIWALMRQYHLHA

SEQ ID NO: 118159 - protein, 440 aa, unidentified
METTARPEMVLAIDFSLDRLDVALRGPAPPWIWGHRAYANNWAGYQQLKQDLLAELQRVSPVQFTAVGESTGPYWWHAFYQFSHDAELAPFDPQLALLNPAHVKGYRKALAEQDKTDPDDARLIERYYRSVGIEHPYQFADRYLRLRTFSRAYARVLHTLAAEKAYFVAVLYLWGSEYQRRAVRPFSDLLGVTSQFIVDEYADLQQLSAIPEAELAALLEQHSHHTLRQPQETAQKLHQVAQHSYPLPAPLGQALHQVLHLTLELLRVLSDNQNAYRQLLEAELALLPEAQRALAFKGLGPVLVAGCLAEIQDTTRFTTGTKFDRRTQTDRPRTYRDGQAAVAKLAGLWWPKQDSGHVQGVQPRLARERNPYLRFWLVQAAYTLQRYQPEYQQFYWQKYREAHDHHHRRALILTARKATRLIFALLHKGRLACLEEGTLT

SEQ ID NO: 118160 - protein, 315 aa, unidentified
MIQTNITTAGIDTSKAKLDIAVHGRTERWQVANALPGWRALAANLAEAGVTRVGIEATGGYERGVVEHLRAAGFTVLMLQPLQVKAFGRIHLRRAKNDALDAVLIAACAAAVDPPEIAPDPRLTELADYLTFLEQIEEDIRRFKTRLEHIDEPTLRRIVNSDIARLKARKTAQMRDIAKRLRSHDDLAKRLKLVLSIPGIGERTALAIVIRMPELGRVSREEAAALAGLAPFDADSGQHRGQRKIAGGRSRLRRSLFAAALPAAFRWNKALIALYARLMAKGKVHNAALIACARKLLIYANTVVQRGTPWTEKAP

SEQ ID NO: 118161 - protein, 344 aa, unidentified
MTIIRIGLDTSKSVFQVHGVDERERPVRRRQLPRGQMEKFFVKLPPTRIGLEACGASHHWGRVLRDLGHEVVLIPPQYIKPYVKRGKNDAIDAEAICEAMSRPGMRFVPIKSREEQAALMLLKVRDLLTKQSTMLSNAIRGHAAEFGVIGAKGPQKIKELLERIGGEANIPEPARELLNSLASQLTAIEVRLAALAAKLMAHHKADPRSQLLATVPGVGPITAVSIALKVPDATVFRSGRHFAAWLGITPREHSTAGRQRLGKISREGDEGLRRLLVLGATSVIQQVERRRKANKTSGSDSPWLLQLLARKPKKLVAIALANKMARIIRAMLVSGELYRRPQTV

SEQ ID NO: 118162 - protein, 317 aa, unidentified
MPAPACFVGIDVAKATLDVAARPSGEHWSAPNDEAGIRALVARLQPLAPALIVLEATGGFETATVAAVAAAGLAVVVANPRQVRDFARATGQLAKTDALDAQVLALFAERVRPEPRPLPDAAVQALDAFLTRRRQLLEMLTAEKNRLGFAAAPVRRDITQHIRWLERRLRDVDGDLEQAIHASPVWRAKEDLLRSVPGVGPVVSRTLLGELPELGTLTHKQIAALVGVAPRACDSGTLRGKRMVWGGRAPVRAVLYMGALVATRHNPAIRAFYARLRAAGKPAKVALVACMRKLLTILNAILRTGTPWRPLGAGATS

SEQ ID NO: 118163 - protein, 430 aa, unidentified
MTKRISIPADAVLVAIDMSKHRQEVLIERPEGGRRRRMTVMATKADYDRLAADLREIGRPIIVGFEATGNYHRTLAHRLLAAGFELRLISSVALARTREALHNGWDKNDSKDAQVILHMLRIGATQRYVDPLAAGINDLQEMSKTHEAISKAKTQTWHRILTHYLPLYFPEIERFAGNSRSDWFLALLERFPTPVSMTALGQEAFTREAWSLVGRKVSKARLINDIYETACASVALPVDEDSVAIAMFRMVIAQARSLIRQRDEIERTAHALLSENRDYQLLRMIPGIGPINALTILAEAGDLRRFAHHRQFLKFCGLDLATCQSGTFRGRTKLSKYGNARLRRTFWMATQVAIRQRDNSFRDKLGRYVAGHGNDPDRRRKAMTALTAKMARVAHAVIKTGAEYRPFVERADTRWKDPSLLCREGAAATL

SEQ ID NO: 118164 - protein, 410 aa, unidentified
MDAIIERCAGLDVHQRTVVACILYGPLDRKPKQLVRTFGTTTRELLSLLDWLTEYEVTHVAMESSGVYWKPVWNILEGDFTLILANAQRIKNVPGRKTDVNDAVWIAQLLRCGLIESSMVPPKDIRRLRDYTRYRRKLLSAATSEKNRIHKVLQDANIKLTTFMSDVFGVSGRALLQALVKGKVLQHDQVQSMVHTHLKKKVPALVEALNGRVDQHHRKMIQYHLNHLDFVEKQIAEIEYEIEQLLIPYREEMGLLNSIPGIDKNAAAAILAETGVDMSKFPTEPQIASWGGVCPGNHESAGKKKSTRTRKSNRTLKAILCQVAHVNARSQNRISAFFHRIRKRRGALKAVVATAHLILRIIYHILKNRIPYHELGPEYDKAQKPSVHHWVQKIKQQGYEVFVTPVNGLP

SEQ ID NO: 118165 - protein, 385 aa, unidentified
MTRTDLSVPVPTAARPEESTLFAALELSGKSWLVATSAPGEAKISKRTVTAGDGLGLLALLSELCEKAERRLGWPVRVVVIQEAGLDGFWLHRLLEAKGLESHVVDPASIAVDRRQRRRKTDAIDVEGLLRTLMAWARGERRVCSMVRPPSPEDEDRRRLSREREALIAERIRHTNRIKGLLAGQGITGFEPLRPAHRDRLDALTTGDGRPLPPRLKDEIRRPLARLDAVIAEIKAVEAERDALVGARPAVPEPAVLVLTLKGIGPEFATVLWLEALFRSFSNRRQIAAYAGLAPAPWQSGGFDRDQGIGKAGNPRLRKTMIQVAWLWLRHQPDSTLSRWFTARVGTARGRVRRIAIVAVARKLLVALWRFVTQGIVPEGAVLKA

SEQ ID NO: 118166 - protein, 387 aa, unidentified
MAQVNDLSRSLTAFDPNSTLVVVVEMSKASWLVSGAVPGVERQPLKKLEPDATELLRLVERWRNEAVRAGRPISRIALAYEAGRDGFWLARWLIARGIEAHVIHSASVAVSRERKRAKTDRLDAAMLLRVFLGWLRGERGHCGMVAIPTMEEEDARRPSRERESLVNERSRITNRMKSALARLGVRGFKPHLRKAPERLTGLRTAEGTGLPANIIEEFRRDMARLALVREQISSIEKTRAERLERAPDTRPHAMVRLLARVIGIGIETADMLVREILSRKLRDRRALARYAGLTGSPDESGLKRREKGLAKAGNARVRRGLIQLAWRFLMFQKDSALARWYRTRTEGPSGARKTTMIVALARKLLIALWRLVTTGEVPDGVELRPAA

SEQ ID NO: 118167 - protein, 340 aa, unidentified
MQTPRHIGIDLHRNQFTCCVRLENGRNYLTDWKLEDLPRFVKKLRPSDQIAVEVTGNTRLFHDAVTPYVKRVVAVDPNQFKVISHSVKKTDPNDARNLALYLEKDLLPEVRMKDRTQAQLASLTQTRDTLVKLRTALKNKVNNILSAHGINLEREALSSEKKLNEILAMRFDAMVKVELEVIIEEIRSLNQRITKLEKTIADEGSKLEGHKNLISIKGIGPLTGSILLSVIGDINDFADEGKLAAYFGIVPRVSNSNETERSGRITKRGSKLGRTALVQCALIAQRFSPYLKRYYEHVKARRGTGKAIIALARKLLGIIYRTLKNKWVFEDFPNFVLAEE

SEQ ID NO: 118168 - protein, 328 aa, unidentified
MFCSSSSSSSSSSSSSSSSFLGIDVAKGSFDLSFDAAPDRPVQRVANEPKAIRRLVRQLCAVTPASRLIALEATGGYERSLMHALIDAKLPVVRLNPLRVRRFAQSRGILAKTDAIDARVIADFARHNAETLSPMQPTSETARMLRELTTRRRQLVEQTVASKGQREHVTLPALRRSIDRTIKHLCAEIAEVERLIQDLIDNDPDLKGRQAKLLAVKGIGPRVSRVLVSELPELGRIDKRKAAALVGVAPFNDDSGNHVGRRTIQGGRATVRAALYMATLVAVRHDPVIRARYEHLKGRGKPKKVALVACMRTMVNYLTAVLAEKENA

SEQ ID NO: 118169 - protein, 433 aa, unidentified
MNTSHPYDLIIGLDRSDKKADLRLITTATGQRRSQTIDTAPEALWEWLLELRQQHPQARVGLCLEQPAVHLIAFLEAYEWITLYPINPITLQKYREAFVTSRAKDDTKDADYLADLLLTHHAKLKPWAPEDSATRAVQQLVFHRRAVVDERTGLSNRLIALLKQYFPQALVLCGEDLWRPLATRFLLKWSSLQAVQKAKPAGLKQFYYLNGSRRARLLEQRLALVEKAVPVTDERALIESFALRVQLICRQLQLVQQTIPHYEKQIAAAYAAHPDHAIFASLPGAGPVLAPRLLASLGSQRERFGTAADLQHYTGIAPVTKRSGGSCYIHRRYLCPKFHKQSFHEFSKESILWSRWAAAYYLQQRTKGSPHQTAVRALAFKWQRVIWRCWQNRTPYQESIYEAALRKSGSHLVTLFDRVEPGKSPFKNPVRKS

SEQ ID NO: 118170 - protein, 379 aa, unidentified
MTQFSSVTSIEPTLHAALELSKNSWLLAIQFPDRDKPSLYRLKGGDGDGLMAKLDAARNRLAKVLGQAPKLVLCYEAGYDGFWLARLLERHDVDCRVMDPASLQVDRRARSVKTDRVDVEKLLQALIAWCRGERHICSMVVIPSVEEEDLRRSHRERDRLVREQTAHINRIKGLLFGQGIRGINVKSRHKTLVPADLVTADGRPLPERLAREIAREIERLEQVQEQLRQVERERDLAPACNQATEQKRQQLLRLKGIGTAIAAILSREVYYRQFTNRGQVASFIGLAPSPYDSGESRRSQGISKAGNGLVRGVMVQAAWLWLQHQPNSALSQWFRQRTQGHSKRVRCIMIIALARKLAIALWRYLEQGLIPEGATFSGK

SEQ ID NO: 118171 - protein, 358 aa, unidentified
MELGVSVTVGVDTHADAHVGVALDHLGRRLGEVVVPNEVTGYRSMLEWALNLGELSCVGVEGTGSFGAGLSRFLRSWGVRVVEVNRTSRQHRRRHGKYNAADAEAAARAVLSGDATGEPKAGDGQVEMLRALKVARRSAVKARTQAANQLHALVMTAPEQLRADLRGLPAKKLVQKASRFRCGPELADPTAATKFALRSVARRYRQLSEEVSGLEEQIERLVKEASPELVALEGVGPDTAATLMIVAGDNPKRLRSEAAFANLCGAAPIEASSGKTVRHRLNPHGNREANRALYMVALNRMRRDLQTQTYVARRTTEGKSKREIIRCLKRYIAREVYRALIVTRPEIIPGEEDLASYA

SEQ ID NO: 118172 - protein, 458 aa, unidentified
MMEQPVAQRNRTLSLKPGKSRQALTITHPNAAGIDIGSASHFVAVPPDRDDEPVREFASFTADLHRLADWLSACGVDTVAMESTGVYWIPLFELLESRGLTVLLVNARHVKNVSGRKSDVLDCQWLQQLMSYGLLRGAFRPADEVCVLRALYRQRGTLLRSQARHVQHMQKALAQMNIQLANVLADVVGETGQKILRAIVAGERDGYVLAALRNVRVRASAEEIAKSLQGHWRAEHLFALKQALDAFDFVGTQLAECDREIERQLQRLQLHDADPAKGKQRGRARNAPKFDLRARLFRMCGVDLTRIDGVDVTTALAVVSEIGTDLSRFPSVKHFTSWLGLCPGTKITGGKVISGKTQRVVNRAAQALRLAAAALRSSKSALGAYFRRLCARMDKPKAVTAAAHKLARLIYTMLTQGQEYTDQGQDYYEQRYRERVLRALSQRAAKLGMKMVPAEQPA

SEQ ID NO: 118173 - protein, 342 aa, unidentified
MSVYVGIDVHRKRSQVAVINQDGQVLANRNVPNGAEPILKVIGGLPPGTPAAFEAACGTSWLAGLLEDYGFAPHLVHPSRCKAIASARLKNDKVDAAILGQLLRADLLPEAWIAPAPVRQLRALLRHRVALVRLRTRLRNRIHAIVADYGYDRPGGGYWTGPGRAWLASLELPAVSRELVEDYLGMIDALQQRIDRLDWEIRQRARADPRVKVLTQLPGVGPFTALVILAEVGDISRFGSARQLASWAGLTPTVRGSDRVAHYGHISKEGSVWLRWVLCEAAQTAKRSPEFAVTFQRIAKRRGKKIATTAVARKLATRAWHLLADAGHAAAPPPAAPQTAAR

SEQ ID NO: 118174 - protein, 350 aa, unidentified
MPRKVGTAIVTIGIDPGKNILHLVGLDARGEIVLREKVARTKIVSRLANMPPCLIGIEAGMGTHYMTRDLLALDHDVRQVPPAYAKPFRQTHKNDFRDAHAVAEAVQRPTTRCVPPKTDEQLDLQALHRVRYRLVGQRTAIINQIRCFLLEHGITVRQRLHWLRHALPDILAQRTDVLSPRMVRILEDLAQDWRRLDDRIEAVSGEIDALSKNTELCRHLMTIPGVGPIISSAVVAAIGDGAAFARGRDFAAWLGLVPKQISTGDRTILGRITKRGNRYLRTLFLQAARVVLLRPRNWMQHGFGPWLAAAAQRLHHNVLATALANKLARIAWSVLAQHREYEARLRVAAT

SEQ ID NO: 118175 - protein, 355 aa, unidentified
MYLGIDQHARQITVSLRDENGDVLLARQVSTEPERINAFFQQLTRECLRKGESFVAVLEVCGFNDWLLRMLHDYRCHKVILIQPDDRKKRKTDRRDAAGLSELLWVNRARLLHGKPVRGLRQVDIASTTDQENRRLTTLRKDAGADLARVINKIKQILRRHNLHWEMPTKTFPTVAAIAWLKALVLPEIDQLEMRHLLLNLEQVQQRLKELEQVIAQRARASTEAAILSSMPGMGGGFTAMALACRVGRVERFPRAHSLANYWGLTPGCRNSGENDQRLGSITKAGSAMARWLLAQLVHKVLRRDARLREWFKRIKRRRGSSIARVAVMRKLATIIWHMLSKRLTYAECRARAAA

SEQ ID NO: 118176 - protein, 374 aa, unidentified
MGYHSEAFVGIDTSKLRNAVAIADAGRGGEVRFLGEIENTPAATAKLVRKLAAKYKRLTFCYEAGPTGYGLHRQIKGLGFECTVVAPSLIPKRPGDKVKTNRRDALSLAKLLRADELTAVWVPDGRHEAMRDLTRARETAMLDLRTKRQHVSAFLLRLGRPYPESRKTWTKAHMSWIASQTLEHPQQRLVLEEMMLAIRQAQERLQRLEQAIAAAVGEWSLAPLVTALMAMRGLDLIAATTLLAEIGDLSRFRTPTELMAYLGLVPSEVSSGDTIKRGPITKAGNRRARRMLVECSWSHPPRVGQAKQPKVDAAPPAVREIAWKAQCRLYRRYRTLIRNGKLKTVAIVAIARELAGFIWAVARVVTSTRFAAAA

SEQ ID NO: 118177 - protein, 387 aa, unidentified
MTFVGIDISKYKHDCFIMNELGEAIKPVFSFENNALGFAKLSSALDEIKDEKRIGFEATGHYGLNLKHFLIKNGNSFMEINPVLIKNYIQGQSLRRTKTDRLDAIAITSYLASVEYKPYPASLYHTLSLKSLTRLRDRLIRQRSSFMVRLTNVLDIIFPEFKPFFKNRFSATALYILANYPSPEKIANMNVRSYDYLRRISRGKFSMPQFVQLKALARNTVGDYDDIMCFELKMLLELYSQLDSKIDETEKMIASLIYEIDPPMLSIPGVGVQSAAIILAEYGNIENFSTVSKMLAFAGLEPGVGDSGTESHKGKMVKHGSAHLRFAILNCCSSVMLHNELFASYYYKKIAEGKPHGVAKSHVAKKLLRLIFTLETRHLQFDPLKLR

SEQ ID NO: 118178 - protein, 337 aa, unidentified
MKYCGIDLHSSNSVVVVSDEVDRVVVQRRVPNELGRILDLLAPYGEELAGVVVESTYNWYWLVDGLQAAGYPVQLANTAAIKCYEGLKHRDDEADAAYLAQLLRLGILPTGYICPAAERALRDLARKRLQLGRSRTSHILAVENILARHLGARMTSQAIKRLSGAALAELGLADDVVRALGANVAVIQTLNAEIGKLEARLRQDMRSRPEYGLLASAPGIGQTLAPIILLELGTIERFAQVGDFASYARCVDSTHWSNGKKKGEGNVKNGNKYLAWAFIEAANFARRYCPEAKRFYERKKANTNGIVATKALAHKLARACYHMLKTRQPFDVKRCFG

SEQ ID NO: 118179 - protein, 346 aa, unidentified
MTIVETRAVTGGVDTHADVHVAAALDPVGGLLGVREFPATAAGYASLLGWLGGFGPVGLVGVEGTGSYGAGLARHMAGAGVRVVEVDRSDRQDRHRRGKSDPLDAVSAARAALSGRAAGAPKGRDGAVEAIRALMVAKRSARHERTQAINQARSLIVTGPEELRARFARHTAGQLVAGLAALRPRPGDVPGYATRIALRELGRRAEFLDAQIARLDELIVPLVTARAPGLLTLYGVRADTAALLLIAAGDHPERLRSEAAWAHLCGVAPIPASSGKVTRWRLNPGGNREANHALWRIVITRMSSHPATREYVARRGKEGLSKKEIIRCLKRYVAREVYHHLRAPGG

SEQ ID NO: 118180 - protein, 403 aa, unidentified
MIFVGDDWAEEHHDVYLMGESGERLVSRRLPEGLTGIRQLHELIAAHAQEPTDVVVGTETDRGLWVGALTAAGYQVYAVNPLAAARYRDRHHVSGAKSDASDAKLLADLVRTDRHNHRPIAGDSADAEAIKVLARAHQSLIWSPTRHTNALRNALREYYPAALVAFDDLAHGDALGVLDRAPTPEQGAHLSRSAIHSALKRGGRQRNIDARAREVQAALGTDQLSASAPVATAFAATTRATVAIIAELNRQISELETGLAAHFETHPDADIYLSLPGLGVVLGARVLGEFGDDPNRYITAKSRKNYAGTSPLTVASGRKRAALARHVRNRRLYDAIDNWAFCALSVSPGARLFYDQHRAGGDLHHQALRALGNRLIGILHGCLHHHVPYNEHTARAHRTPAAA

SEQ ID NO: 118181 - protein, 346 aa, unidentified
MIYVGIDLHRKRSQIAALDEDGTELLSRRVANDPEALKAILAELGGELQVALEATYGWEWLADLLESEGHELHLSHPLRTKAIAAARVKTDAVDARTLAHLLRTDLLPEAYVAPRELRDLRDLLRHRVVLTRMRSALKNRVHALLARQGIQNEHADLFGAGGRRYLSALPLREPARRRLDSLLSLIGDFDREIELAKREIDALARHDPRVDVLCQLRGIGPYTAMLVIAEVGEIERFRSARHLCAWAGLTPTVRSSDGHARLGHISQQGSPHIRWALVEAAQKAATGGGPLRIAFERIAKRRGRNIAKVALARRMLTLCYYGLRDGEIHCLHAPGPASARPVKAAR

SEQ ID NO: 118182 - protein, 368 aa, unidentified
MDRLFVGLDVHKLSISVTTAEDGRDGAVRFCGEVANTPEQVRKLADRLSRSDSRLEFCYEAGGCGYGIYRQLTEMGHGCLVAAPTLIARKPGDRIKTDRRDSQMLALQHRAGGLTAVWVPDEVHEAMRDLVRARGDAMMALMRARQQLLAFLLRHGRTYPVGKPWTLRHRRWLAGQAFEQDAHRVVFQDYVEAVWASQDRRDQLEARISAMLAGWSLAPLVEALRALRGLDTISAVSFVAAVGDLGRFENPRRLMAYLGLVPSEHSSGERIRRGGITKTGNREARRMLVEAAWSYRYPPRVSTGKTDLVSRQPKVVRDVAWKAQVRLCDRYRRLSAGGKRPTVVIAAIARELSGFIWAIGQEVRPAAP

SEQ ID NO: 118183 - protein, 399 aa, unidentified
MPELWAGVDAGKAHHHCVVINAAGDKVLSRRVPNNEIELLELIADVHALSADVLWAIDLNAGGGALLIALLVNHDQQLLYIPGRTIHHASGSYRGSGRSDAKDAFIIADQARMRRDLHSMTAGDEIAVDLRILTARRYDLAADRTRAINRLRAQILECFPALERAFDYSRSKAALVLLTGYQTPAALREAGPERLAAWLRERRVRNSDTVAATAITAARAQFTTVPGQAAAAAMTARLAKGVVDLDAEIAETDALIEGRVRQHRHATALLSMPGIGSLLGAEVLGLTGGDLAMFGSADRLAGVAGLAPVPRDSGRVQGTLRRPRRYNRRLLRAFYLSAQVAITRCSQSKAFYERRRREGKHHKQAVLALARRRLNVVWALVRDDRVFQAGTPQPAATAA

SEQ ID NO: 118184 - protein, 390 aa, unidentified
MTYYVGIDIAKYKHDCFIADDSGCVIRDSFTLTNDKDGFNVLLSILKELKPKGQIKIGFESTGHYHFNLKLCLEANGYDYVEFNPLLVHKFAATQTLRRTKTDKKDAQLIAKYLMTVDYKPYVNSFYHINNLKSLTRLRETLITDRTRFLNQITSYLDQIFPEFKPLFENGLNKSAFYLLTHYMTPAKMSKLDSNKYSKMKSELGHTISYQKICQIKDAAINSIGHTSKALEYALEASLNLYLTLDKQIDELESKIIEIYDSLNCHIHTIRGISKLTSAGILSEIGNFNKFLTPAQFQAYAGLEPSKNDSGTHDGIGVMVKHGSSYLRKYLMNSAETFYVFNPSISDFYWKKRNEGKHHRVALSHVARRLINTIFYLEKHNQDFDSNLAK

SEQ ID NO: 118185 - protein, 356 aa, unidentified
MNSPHYIGFDVHKKSISFCVKTAAGEIVEEGVVAAQRPALQQWAAAQPKPWRGALEATLFSGWIYDTLQPYSAQLEMAHPAKMKAISAGKKKSDAIDARTIADLVRCNLLPACYVATPRIRELRRLLRYRSLVVSEAVRMKNKMAGLLMETGALYVKEKLHGKKYFASLLEELEEVPESVIDLLRLSRGALEMFETTQRRLVRELLAAPELTERVERLTSIPAVGQITALTWALEIGDPRRFRSGGEAISYCGLTAALKSSAGKQQRGPVSKQRNHWLQSTLIEAAKLAPRWNPQLAALHARELERGHRNRATLAVARKLVTYLLAVDKSGQSFQLRGPRIEDDAEPARAQKIKTS

SEQ ID NO: 118186 - protein, 346 aa, unidentified
MEVLIGVDPHKGSVAVAAIDEATGELLERAAFPQDRAGLRALERWAKRFPERRWAVENACGLGRHLAVRLAGSGESVVDVPPKLSARVRVLSSGNARKNDRLDALATALAASRNERLATVDPEATSEVLRLLSERREDLVAERTRALNRLHGLLRDLVPGGVARTLSAHRAARILRGIRPKGASARLRRRLASEVLRDVRTLDRKIADLNGRIEAEVQASGTTLTEIFGVGPILAARIIGTVGDVARFPTKAHFASYSGTAPLEASSGEAVRHRLSLAGNRKLNYALHMVATCQARSDARGGSYYRKKIAEGKSRKEALRCLKRRVSDAVFRSLMADSQRPSRSAA

SEQ ID NO: 118187 - protein, 344 aa, unidentified
MSEVTTIGLDIAKQVFHAHGADQRGGMVFSRRLTRGKLLDFFAAQPRCLVALEACGGAHHWARELRAMGHEVRLIPPAYVKPFVKRHKNDAVDAEAICEAAQRPNMRFVAVKSEEQQAAALVFRTRDLAVKQRTQLGNAIRGHLAEYGWVAPKGAAHLAMLADLLDGGEIGETLPEAARPMFAMMVDMLAGLDERIAALDKEIARRAREDEVARRLMTIPGIGPITAIAIAAIAPPAETFAKGRDFAAWLGLVPKQASTGGKQKLGAISRMGERTLRRLLIIGASAVVLQASKRGAPAGSWLEGMLARKPRMLVTVALANKMARTVWALLVRQEDYRAPVAVAA

SEQ ID NO: 118188 - protein, 426 aa, unidentified
MKEHIDYLSTLFVGIDIASRIHVISALDFNQDFFIKMKPFENTKEGAGIVEKMIADVLADNHQFKYVVIGMESTGFYGVHLANYLSTSELLAPFSVRVYCLNPKEVKNYKKSFNDIGKNDGIDSFVIADFARVGRIAIKPWRGFQYLALQRLTRHRMHITECITREKTYMLNNIYLKFSEYALLRNGEHPFSNKYGATAEAILTEFTTNEDIVNSSIEELVEFINSKSKGRIAYPEETAKIVQAAARNSYRLDKCLYEPLTISIASSFNCISSFEKELKAIDKAILQTVQGLNPEEYTVLNSIPGIGKVYSAGILAEIGSIKAFQNANQLAKYCGIVWNDNDSGDFESEDSRMSKAGNRYLRYYIIEATGSVISHCPEYKAFYQKKYAETRNHQHKRALALTSRKFIRLLFGLLDKGQLYSPEKGR

SEQ ID NO: 118189 - protein, 320 aa, unidentified
MSEAYTVGIDISMDRLDVAIRPGGQCLFVANDAAGWAELVVRLHRCAIAAIGLEPSGGYERGVIRALLAAGFSVRRINPNKLRQFARARGVLAKNDRLDAQLIAEYVAIMPSRSVQSNPAADRLAEVVTMRRQLCDEHVAAENQASHLGDAILRRIDQRRLARIEADVRLLDKRLAELVAAEPGLARRFGLLCSMPGVGATLAYTLLALLPELGQIGRKQVAALVGLAPYDFDSGKFRGQRHIWGGRMAVRNVLYMAALAAFRFNPALKAFHRRLVAAGKKPKVAIVAVMRKMIGVLNAMLREATDWVDHTTGRHTVPAP

SEQ ID NO: 118190 - protein, 380 aa, unidentified
MTIQTHLSPSIYVGLDVHKDSIDIATADAGRDGEVRHLGTVAGGLDAVTKALRRLVSAGHRLHVVYEAGPCGFVLQRHLAALGYHCEVVAPSSIPKRSGDRVKTDRRDSLMLARLARAAELSAVRVPDTIDEAMRDLVRAREDAVREQRNARHRLKALLLRNGTPYAGKTAWTAAHLRWLSDIRLPHPTQQIAFQEYLHAVSESTARIQRLEASLRDAAQTWPLAPVVLALQAMRGIQLIAAITITAEIQDFHRFANPRQLMAYLGLVPSEDSSSTRRRKGAITKAGNSAARRMLVEVAHHYRSPARVSPIIAKRQAELSKAVTDIAWGAQVRLCERYRRLAARRVPTNKIVVAIARELTGFIWDIARNVTPPPPPPQQR

SEQ ID NO: 118191 - protein, 347 aa, unidentified
MVTFGGDSHKRSHTLVAVDENGRQLAACTVAATSSGHMEALGWARQWPERRWALENCRHLSRVLERELLSAGEAVVQVSPKLMGSARRTGREQGKSDPIDALAVARAALREPHLPVAQLEGKSREVKLLVDHREDLVGERTRIQNRLLWHLHELEPGYQVVASGLLRTVILCEVRMRLENRTGVVAEIARELVERLSELTRSVKRLQRRIEALMEELAPALLRLPGCAGLSAAKLVAETADVRRFRSSAAFAMHNGTAPIPVWSGNHERHRLNRGGNRQLNVALHRIAITQMRLGGPASAYIARRLAMGNTKTEAIRALRRQISDEVYRRLRQDDSERSTAPIAAAA

SEQ ID NO: 118192 - protein, 338 aa, unidentified
MKLYGAIDLHSNNNVTVLIDEQDKVVYEKRLPNDLGVIAQQLAAYQSSLEGIVVESTYNWYWLVDGLMDKGHQIHLANTAAIQQYEGLKYTDDHSDARWLAHILRLGILPEGYIYPKEERAVRDLLRKRGQLVRQRTANLLSIQNLITRNTGSSMNSNRIKTLEPQQVDELLADGDRALAVKANVAMVQCANGQIEILERTVRDRVKLRPEFCFLKTVPGIGQTLALTIMLETGDIGRFAGVGNYASYCRCVGSQKLSNGKKKGKGNTKNGNKYLSWAFVEAANFAIRFSSRINSFYQRKKAKSHGVVAIKAVAHKLCRACYYIMKNRVAFDVTKAFA

SEQ ID NO: 118193 - protein, 424 aa, unidentified
MKRTQNEKILQIKNETLVVGIDIAKRIHFARAFDNRGIELGKLLRFENSAQGFAAFDAWLQEIKQRNEMTEAIVGFEPTGHYWFNLADHLVTCGHRLAIVNPFHVKCARELDDNSPSKSDRKDPKTIAMLVKDGRYRDVYIPVGVYQELRELVCERERLQERLGSLKNQIIRWLDIYFPEFTTVFKDLSKQAAWLALRHFSTPQKVVDAGAQEILRTWRAEMKRPSLKRAERLCLVASQSVGRVEGTRASISSLQFQMTEFELITIRLESVKEQMAECLSQIPNAQHLLAIKGMGVVAAAVIVSEIGDISRFTDPRQLIKYAGLNLRENSSGKHKGETTISKRGRRRLRHGLFQAMIPILATNSEFRALHKRNTTRSQNPLTKMQSLTALCGKLLRVTFALLTKGLPYDPEKLVIELPEMAQAA

SEQ ID NO: 118194 - protein, 369 aa, unidentified
MEKDTTYVALDDSKRKVVAGILRPGAAQPELREIMNDPREIRRLFERLKREGPVTACYEAGVSGYDLHRQITTLGVECAVIAPALTPRRPGQRIKTDRRDAAKLVRLFRAGELTAIHVLDEAEEAVRDLVRCRDDIRRDVLRWRHRVLKRLTRHGRAYLTGKNWSQAHWRWIREQRFDLPPLQRAFEATVFALEQARARQAELDKELEAVAAIPAYREPVGWLRCFRGIDTLSALILLAEVVDFQRFRRPRELMAYLGLVPSEYSSGETQRRGALTKAGNSHARRVLVEAAWHYRHRPTIGRSLASRSEGQPHEIVGQAWRAQQRLHRRYRHLVGRGKRTPVAVAAIARELVGFIWAAMTRHESRRAAA

SEQ ID NO: 118195 - protein, 391 aa, unidentified
MIYVGIDVAKDKHDCFITNSDGEVLFKPFTITNNLDGFNELYQKIESVTEDATKVKVGLEATGHYSYNLLGYLIDKGLAAYVINPLHTNLYRKSLSLRQTKTDKVDARTIASMLMSDVNLKSYSDISYHNEELKSLTRYRFDKVKERAKLKSSVSRLVCILFPELEKLVPTLHMASVYSMLSEFPGAKHVASAHLTRLTNLLSEASKGRYSKDTAITFRDAARTSIGSNMPAKSLELKHTIKLIKELDSEIDEIENEIKIIMDEINSPILSIPGINYRMGAMIIAEIGDFSRFDSPDKILAYAGFSPSTYQSGHLYGAYAHMEKRGSRYLRYALYNAAKYVCHWDPTFTAYLAKKRAEGKHYNVAISHAVKKLIRVIYHLEKTNQQYIKAS

SEQ ID NO: 118196 - protein, 366 aa, unidentified
MKKNNTMATGRKQIFKQAKLTIGLDLGDRTSHYCILDEAGNVILEGNLLTTSNGIRQAFIRIPRCRIALETGTHSPWVSRQLAQMGHEVIVAHARNVRLIGESSRKDDQLDARTLARLARIDPGLLGPVRHRSAQAQIHLTVIRARAALVGTRTALVNAARGLTKSYGQRLNKCGTEQMNRDSSQGLSQELRDALDPLLREIESLNERIAEYNGRIEQIAKQVHPAVARLKQVKGVGTLIALTYVLTLDDPHRFRRSRDAGCYLGLRPGRRNSGQSEPQLHISKEGDRYLRTLMVQGAHYILGPFGQDSDLRRWGLKLAERGGRNAKKRAVVAVARKLAVLLHKLWVSGEVYEPLRNNHKVESAVA

SEQ ID NO: 118197 - protein, 351 aa, unidentified
MMIIGVDYHPSFQTIAFLMEETGECGEQELNHSDGQAEKFYRDLKQRGICVRVGMEATGYSRWFERLLAELGFEVWMGDPAEIKAKRVKKQKFDREDARLLRRLMLENNFPQIWVPGPENRDLRQLLWHRHRLVQMRTRIMNQLQALAMNEGYRWKKKLFSEQGRAQLEKLALAPWASRRRQELLELLDRMNPTIEELTAAVEQEARKRPDVLRLMTHPGVGPLTALAFVLIIGTWERFPRGKQIGNYVGMIPSEDSSAGKQRLGHISKQGNSLLRFLLVEAAQAAARIHPDWRRRYMHLAMRRHKSIAKVAMGRRLAVRLYWMWRNGCEYSQSLKFGSYAGQLGTGHGVK

SEQ ID NO: 118198 - protein, 391 aa, unidentified
MIYIGIDVAKDKHDCFITNSDSEVLFKAFTILNNLDGFNDLYQKIESVMDDVTKVKVGLEATGHYSYNLLGYLIDKGLPTYVINPLHTNLYRKSLSLRQTKTDKVDARTIASMLMSDVNLKSYSDTSYHNEELKSLTRYLFDKVKERAKLKTSVSRLVCILFPELEKLVPTLHMASVYALLSEFPSAKHVATAHLTRLTNLLSESSKGRYGKDTAITFRDSARASIGSNMPAKSLELKHTIKLIQELDSEIDEIENEIKIIMDEINSPILSIPGINYRMGAMIIAEIGDFNRFDSPDKILAYAGFSPSTYQSGQLDGAYAHMENRGSRYLRYALYNATKYVCHWDPTFAAYLAKKRAEGKHYNVAISHAVKKLVRVIYHLEKTKQQYIKAA

SEQ ID NO: 118199 - protein, 363 aa, unidentified
MASIALDRGDVIVGVDTHKDQHVAVAIDGVGGLIDEPKFLDANNGGYAELLAWARSLGKVHVFAVEGCGSYGIGLARFLRRHGHLPVEVSRPPRAGARRMSGKSDAIDAEHAARTALAGVGVVTSKLADGQVEAIRLVKIARDTAVKAHTTAMITLKAVLVTADQDLRDQLEVLSDFKLVTACSELDASADLADPAVAMRHTLASLARRWFDLHAEIKSHSKHLKALTRAAAPELLDAFGVGLDIAAQMLITAGDNADRVRSETAFAKMCGVAPIPTGSGKTSGRHRLNRGGNRQANAALYRAVIVRLRWHAPTIAYLERRTTDGLSKKDIIRCLKRYLARELFQLLPDVSAEQAPAPAARAA

SEQ ID NO: 118200 - protein, 337 aa, unidentified
MTLYCGIDLHANNSVISIIDEHDAVVYEKRHANDLREIKDILEPLRGDLLACVVESTYNWYWLVDGLMDAGFDVRLAHTGAIPQYAGIKHSNDQSDARHLAHLLRLGILPEGHIQPREQRAIRDLLRRRLLLVQQKTLHHLSLQSLIARHTGERLTANQIKGLDNEAIADKLADPIRLGGQITRLARCWHEQAIEMIEDEVVKHLKPRKDYQLLSSIPGVGRILASTIVLETGAIERFPDQGHYASYARCVDTAKLSNGKLKGRGNKRNGNKYLAWAFMEAAHYAAIWSPEIKRFYQKRQAKRHILVAKKTVANKLAKACYHMLTRQVPFDVKRAFG

SEQ ID NO: 118201 - protein, 424 aa, unidentified
MKVTYKTCCGVDVHKSFLVATIITTTGGIEPSYQKKRYSTFNNSILEFKQWLLDNDCHDLCMESTGKYWIPVFNLLEDEINVTIANPKWVKAVKGNKDDTKDSKWIGDLFRLGLVKGSYIPCKKIRILREFTRYRYKIVSCRSSEKNRYQNALTVCNVALDSVVSDIFGKSSTSIIDYLLEQSGNSINHEEIASKLLKSLKSKEDAVIESIEGYQMTDSQKYRMHLVRAHMDYITAEINDVDREIEKLISSDPDFENALQFLMTIPGVKRDSAITVISEIGIDMTQFSSSKRLCCWAGLTPGSNESGGKKKSVRVTRAGVYLKPALVQCAHAAVKSEKSPYYKKKYESLMKRRGKKRAIVAIARMILTAIYQMLSTGESWNPRDLYKIDIPEALLEKQKAKAIKQAMKLLQREGLYPPPEPIAS

SEQ ID NO: 118202 - protein, 355 aa, unidentified
MSGEKYIGLDVHQATISVAVVDSQGQVVMESILETKASTLLEFLAGLRGSLFVTFEEGTWAAWLYDLLKPQVTEVLVCNPGQIPLLKHGNKSDKIDARKLAERLRRKDLKPVYHGETGVGMLRELARSYLTVVQDLSRVMNRLKARYRSWGIPCAGRDVYYTRHRREWLEKIPEAGTRRRAEPLYQQWDMLQPLRLQARRELLAESRKHAITAKLRKIPSLGPIRSALAVALIQTPHRFRSKRQLWTYSGLGLETRDSGEYHFLKGQPRRRKKQATIRGLNKDYNHDRKGLFKGAATRASVKPGPFQEFYQRSLAKGIKPTMVRLTLARKIAAITLTLWKKGEDFDINKLNSQAA

SEQ ID NO: 118203 - protein, 462 aa, unidentified
MKNKPSPDRAHKRLTKHLEQINLYAAGIDIGSESHYVAVPEGLDDDPVRSFLCFTGDLERLADWLVQIGIQTVAMESTGIYWIPLFEILEERGLEVLLVNARHVKNVSGRKTDVLDCQWLQQLHTYGLLEGAFRPPEQVTALRAYMRQRGTLVRYAGSHIQHMQKALRQMNLLLDNVVSDITGKTGMTIIRAILKGERDPGKLAAYRDGRCKKSKQEIAHSLQGHYRDEHLFALRQSVELYDTYSAQITNCDEAIEQQLKRFDAQGDPEQLRVSKKQKAANAPTFDVRGELYRMSGVDLTAIDGISDITALKVLSETGTDMSRWKSEKHFSSWLGLSPGNRVSGGKILSSKTKPTTNRAAAALRMAAFTLSNSKSALGAYYRRMRSRHGAPKAITSTAHKLARLIYSMLKHGTEYVDQGQDYYEQQYQDRIMKNLKRRAAQLGFALAPITSDNDTAPDISMA

SEQ ID NO: 118204 - protein, 404 aa, unidentified
MRIVGMDIHRVAAEVVALVDGETVKLGRVPMLRTELEAFAKARLAPDDHVVVEATSNAAAVVEVLAPHVDRVVIANPKQVRMIAHAKIKTDAIDAAVLAKLYATGFLPEVWVPDPRCQALRRQVARRTQLVRQRVRLKNLIQSVLHTHLVPPCPHGNLVGISGRKWIARQTLPGDERDAVARHLAQIDLIEGSLKTVEAEIAREAMADPLIRRLMTLPGVDMTAAAGVAASIGNIQRFSDPRKLIGYLGLNPSVRQSGEGPAHHGRITKQGCGQARGMLVEAAWAAARSPGPLRAFYQRIAAKRGKHIAAVATARKLAMIAWHMLTKQTDYIWARPALLARKFRSMELRAGLPSEHARRGSAYDYNIPEKRAAERARTEEAERDYARYTSRWRAKPPTRTMIAT

SEQ ID NO: 118205 - protein, 346 aa, unidentified
MEKITTVGIDLAKSVFQVHAIDACGAVIVSRAVRRAGLLQLLGKFPPCLIGLEACASSHHWARELTKLGHTVRLIPPAYVKPYVRRQKNDAADAAAICEAVGRPSMRFVPVKTEAQQAVLMLHRVRALLVAQRTALICALRAHMAEFGIVAPVGPRNVAPLLAILADEADARIPSLARLALRPLARRMAMLRLEIERLDRRLLDWHRSSDVSRRLATIPGVGPITATALAATIADPSMFRSGREFAAFLGLVPRQTSSGGKERLGRISKMGDRYLRTLLVVGATAVLRYAKTDGSTSKVWAQTLLARKPFKVVAVALANKTARIAWAVMARGQVFREGVEVRAMAA

SEQ ID NO: 118206 - protein, 326 aa, unidentified
MANLEKKVIGVDVSLKMLTLNYKDSEGVIIVRNIPNLKKDILGTLKFFDKEDYKIIVEATGAYSSKILYFSYELGFEVSMVNPVSIKRYGELKNHISKTDAEDSRLIREYGEQVEFRPYTPKSMTLEYLDQELNLWHDLEQEKRKYSLKLKALRQKALCSKETIKHYERLIRNHDCEIEKVMSRMSRLQDEDLKRDVDLLSSISGIGEKTALLLLVATNRFKNFVNAKQISKYFGVAPRLYESGTKKKSLGKCRTTKKHVRSILYVCSWTAMRFNSQCKELYERILSKNKSKKVALIAVCNKLLRQCFGIMRNKIPYQKNYLQVGT

SEQ ID NO: 118207 - protein, 451 aa, unidentified
MAQAKPQVIDDEEHERVYERVAAVDVAKDTGMVCTRTPHRSRPGARQSTVWTVKARMASIRTLGCQLKADGIEMVTLESTSDYWRIWFFVLEAAGLAVQLVNAAQARNLPGRPKTDKLDAMWLARLTELGLLRPSFVPPAAIRALRDYTRARTRLVQERTRCFQRLEKLLEGALIKLSSVASKLTTESAKDMIRAMIAGERDPHTLAALARTRMKAKHDDLVEALAGLFDDHHGELAQILLDQAAFCDARITQLNARITAAVAAMPAAWGVDADGTTGPDAGTGPDAAALPAVQRLAEIPGVSPDLARSIIAETGLDMTRFPTAAHLVSWAGLCPSARQSGPRTRTGKKNQGDSWLRNSLGQAATGASRTATFLGERYGRIARRRGKAKAQVAVARSILTIIWHLLADPAARYTDLGASYYQTRTDTDRKLRNHIRQIQALGFEVTLTKGA

SEQ ID NO: 118208 - protein, 361 aa, unidentified
MLGNPSEKGKVMDKITRIGVDLAKNLIQVHGVDSMERVVVRKAISRQKFLEWFANLAPCLVAMEACSAAHYWARKLRALGHEVRLIAPQFAAPYRKGGKHVKNDRLDAEAICEAAGRPHMRFVAVKTADQQNVLVLHRMRDGFVEERTALVNRLRGELVEFGAFLPQGIDAFRAHFVEALEDGATELNGVARTALLRGWEHLQALDRQIAWCDAQVATHVKHDSNAQRVMAVIGIGPLTASAAVATVGDAHLFNNGRQFAAWVGTVPKQKSSGGKTRLGRITKQGNTYLRTLLFQGARAAVTSAHRRTDRLSRWIVQLQARVGWYRTLVAVANKHARILWAILAKGERFDPSHVSTPRRPL

SEQ ID NO: 118209 - protein, 350 aa, unidentified
MTTMTATPLLVTGGVDTHTDVHVAAALNHLGGVMGTASFPTTPAGYRRLLAWLRSHGELGIVGVEGTGSYGASLARHLRGAGVQVVEVSRPNRQVRRRHGKSDIVDAIAAARAVLSGEAEATPKTHDGSVEALRSLKMLQRSATKSRTQAINQLRSLLVTAPAELRERLRGMDNKTLFATCAAFRIADDDDSVPAITRFALRDLAQRIGHLDARRAQIRTRLERIVKAIAPQLLEISGVGPDVATTLLLTAGDNPERLKSESSFAALCGVNPIQASSGKTNRHRLNRGGDRQANAALWRMAIVRMNSDQATKDYIAKRVSEGKSKLEAIRCLKRYIVREVYAALPKPALF

SEQ ID NO: 118210 - protein, 343 aa, unidentified
MKIYALGIDLGKTVFHLVGLDASGQVVVRKRCSRTQLLTFTANLQVQLIGMEACSGSHFLGRALRAQGHEVRLMPAQYVKPYVKTNKNDYIDAEAIAEAVQRPRMRFVPIKTEEQLDLQALHRVRERWVMRRTAVVNQMRSLLLERGLTLPKGRSHLDEQLPRILEDAELNLSDSFRVLLAQLKVELEQLAARIGEMDRVIQKTARENEAWQRLTEIPGVGPVTSTALIGAIGNGSAFGKGRALSSWMGIVPGEHSSGGKQKLLGISKRGNKYLRRLFVQGARSVLQQRHKQVPGLSEWIAQLLARTHQNVVVVALANKMVRMAWAVLCKNERYRAPIFAGTI

SEQ ID NO: 118211 - protein, 346 aa, unidentified
MEHYAGIDVSLELSSVCVVDAQGKIVRETKVASEPEALVAFFASLGFAVKRIGLEAGPLSAWLHAGLKRAGFDTVLLETRHVKAALSAMMVKTDRKDARGLAQLIRMGWFRPVHAKSMGSQEVRALLVARKQLLGRLIDVELSIRGILRGFGLKVGVVTRKGFEGRIRELVTGHITLERIAGAMLSARATLKVEYEKLHKIVLTIVREDAVCRRLMTVPSVGPIVAITYKSAMDDPNRIAKSKAAGALFGLTPKKYQSGEKDVTGGITRTGDEMVRTALYEAANVLLARITRFSKLKRWGMDVAKRRGSKRAKVALARKIAVILHRMWVDGTTYRWTDAQPTAVQV

SEQ ID NO: 118212 - protein, 403 aa, unidentified
MNSVGIDISKGRSTIAVMRPFGEVVISPFEVRHTDSELSELARQLKSLDGETRVVMEATGNYHTPVAKLLHDAGLYVSVVNAKLVHGYGNNDLRRVKTDKKDSVKLANYGLDRWLTLPRYVPEEDTRLLLKNCYRQYRQYSKVQTVLKNNLISLLDTVFPNVNRLFSSPIRGDGSEKWVDFVAEFWHCRCVSEKSEKTFTNHYRRWCRKHGYNFSEEKAHTIHAETCGHIDVIPKSETTKLLVEQAVAQLRATSAALAALKHEMQSLASVLPEYPVVMDMFGVGPTLGPQLIAEIGDVRRFYSKKALVAYAGLDAPPNDSGDVTGRHKSMSKVGASSLRRTLFLVMSVYLQNAPLDESVYQFMDKKRAEGKPYRVYMMASANKFLRIYYATVKAYLESLEHTA

SEQ ID NO: 118213 - protein, 507 aa, unidentified
MLYVGIDVAKNKHDVTALNVPGKTVLKPLTFSNNKAGFELLDLSFRQLNQDCLIALEDTGHYAFNLLNFLHEQGYKVYTYNPLLIKEFAKSLSLRKTKTDKKDAHGIALKLLSDPNREQFQHDNRQVELKILARHIHRLKKKQSDWKVQYTRCLDIIFPELDKIVGKHSEYTYQLLTCYPNPQKRLEAGFDKLIEIKRLTASKIQDILSVAPRSIGTTSPAREFEIIEIIKHYKRLIDKAETCVNDLMAEFNSVITTVTGIGDRLEAVILAEIRNIHAFDNPAQFQHDNRQVELKILARHIHRLKKKQSDWKVQYTRCLDIIFPELDKIVGKHSEYTYQLLTCYPNPQKRLEAGFDKLIEIKRLTASKIQDILSVAPRSIGTTSPAREFEIIEIIKHYKRLIDKAETCVNDLMAEFNSVITTVTGIGGRLGAVILAEIRNIHAFDNPAQLQAFAGLDSSIYQSGQIDLAGRMIKRGSPHLRWALIQAAKACARFSPAFKAYLKTKLE

SEQ ID NO: 118214 - protein, 361 aa, unidentified
MGKTHLFEQLGGDILHITDMTTIVGVDIGKDFHQATILNPAGETVGGTIKFDNTALGFTKFLSHLQRFISDKEDLLVSLEATGHYWLPLYLFLLDKGYQVQVFNPYQSDALRKVFLGRAKTDKLDAELVARLARGGTQKATPLPGEELLSLRNLSRFRSELVFQSSDIKRRLVFLLDLIFPEFEKLFSDAFGKTALAILQNHPTPEEILELDEEKLINLLKTSSKGRLGEKTAQLLKAKAALSVGISFGQKSLVFELKLLLEQLKFLKEQLKDLEKEITQILSKTDQRLTTIPGIGPMIASAILGEIGDIKRFPNVPSLVAYAGLDPTTFESGSSILKERKLSKKGSKYLRTACGKGLFTV

SEQ ID NO: 118215 - protein, 337 aa, unidentified
MKYSGIDLHSNNSVVVVSDEADRVLVRRRVPNDAAAILALLAGHREELVGVVVESTYNWYWLVDALQAAGYRVHLANTAAIKRYEGLKHSGDEDDAAYLAQLLRLEILPCGYICPPAARAVRDLARKRMQLVRSRTAQVLAVENMLSRQTGTGMRSYAVQRLTAQAVAGLGFNPEVEQAMCANVAVIKTLNREIDKLEQRLHQCVRLRPEFGLLTSVPGIGPTLATLIMLEVGTIERFAAVGNFASYARCVDSARISNGKKKGQGNVKNGNAYLAWAFVEAANFARRYCAEARRFYERKKARTNGVVATKALAHKLARACYHMLKEQQPFDVKRCFA

SEQ ID NO: 118216 - protein, 351 aa, unidentified
MKKVIKQVLGIDVAQKELVVRLGKMVEGLIIELCAGKAFANTAKGFELMVQWVKKLTDETVPVRYAMEATGVYHEPLAYFLANRGLDVSIVMPNKISNYMRTLDIKTVTGKTSAEAIARFGLERSLDNWQKPLPVYKKIRQLTRERDQLIQERTIVKNQLHAEQSEAEPNENSLERINQRIDFLDSQEKEINAEIKATVKTDERTDTLVTLFSSLPGVGVLTAATVLGETNGFNLIRNKKQLASYAGLDVKEKESGTSVKGKPRISKKGNRFLRKTMHLPALAAIRTDDRFKALYIRLVAIHGIKMKAVVAVQRKLLEMMYTIYKTNTKYDREYLQKQEAETIKNENKEAA

SEQ ID NO: 118217 - protein, 398 aa, unidentified
MIKQFIGIDISKDSFDVTLLQSSGEIKLEVKLTMNKEGFDTLIKYLSSYSKEELLIAMEATGIYHLPLLSFLLENSFKCVVINPILIKSFIGSTTLRKTKNDKKDAASIALFSLKSHQSLHLASADTIENIRPLIRERENLSKDVARLKTEIKANLSQLFPELLKNTNIFTKSILNLLLKAPSRKAIRNFKEKKIQAILDDTSGNKVKITAKEILAMAKTSIAVSDKYLEKVLTSKIRRLLAIQEELSILDTELENSLEDTDINSDIEILQSIPGIGAVTSKNFMVELPSVNKFNSVKQLCAFIGIDPSVKQSGSSINYRGKISKRGNANLRRTIWQMAIGTIRSCEKFKLYFSKKREEGKKFKQAVIAVANKLLKTIFVMLKNKTKFDENLALGVSK

SEQ ID NO: 118218 - protein, 353 aa, unidentified
MITIGVDAHKHAHMAVALDERGQVAGQWQGAHSAAGWDEATRWARALGDERQWGIEGGGGYGRGLAQHLVGLGEVVYDINPRLTATERRRSRRMDKSDAFDAQAIAQVVRREDAQLPRVTVEDETVALDLLTAEREDAQAEATRLRNRLHHLLLQLDPEYHLHLPALTSVAGVQAAKTYTTTSASLVQQERAAVVRRLAGRLRLAMEQVAELGGRIEALAQARYTPLTRLCGVSLLTAGSLAGILSPGRRFASEAQLAAYAGIAPLETSSAGRVRHRLNRGGNRRLNAIVYRIALVQARWSPEAKAYLARRVAEGKTKREAFRALKRYLVRAIWRLWGACVPPAAVESVRRAA

SEQ ID NO: 118219 - protein, 521 aa, unidentified
MAATFRGKRGRKRRPQVLQKPRGVIHPRVQKVGPEHFGIVAIDCAKARSKWMLSDFYGRVLVPPVVVEHNRAGFDSAVATLREAVGAAGIADLMVAVERTGRYHHPPARAFAGAGFEVRTVHPFTTRQFRQPADPGNKTDDTDLAAITRAAVNGFALTDPVMDESWRQLQLLTRHRRDLVQKASILCCQIKEHLDAALPGYAACFPTLWEHPAALTLALRVGDAKLFGQMSRVQLRDVLSKAGVRFQERTLERVVEWAKASAPPDVAAGHHRRIASDLEADRQRKEAEILGLERDIAHLLCATPYVLLMSIPGINVVSAAEYAGEMGPICNYANARCITGRAGLFPSRYQSDTVDLAGGLVRSANRRLRFAILQIADNLITCNHHFGSLAAKWRENKDDPRLIRVRVAMRFCRISFQMVAGGNVFDHPAARKRDYILAKLIAFHHQHQTHAVSVQRDLNSAMRQLPKKEHQAEAKPLQEELERLNSSRRGPQPLGEILPAVLAALGLPPLQSPPSGAVDPT

SEQ ID NO: 118220 - protein, 393 aa, unidentified
MICVGIDVAKDKHDCFILSSEGEVLADVFTIPNNRDGFETLLQRIRSCALPADIIKVGLEATGHYSYNILGFLLDCGLPTCVINPLHTNLYRKSLSLRKTKTDRIDARTIAAMLMSDLDLKSYTDTAYHNEELKSLTRYRFDKVRQRAKLKQSVSRLVNILFPELETLVPTLHMASVYALLSELPSAQQIAAVHLTHLKTLLDNASKGRYGRDKAVEIREAARRSIGSKMPAKSLELRHTIQLILELDKEIDEVEAAIAEIMYSIQSPITTIPGMGLRMGAMILAEVGDFANFDSPDKILAYAGLSPSTYESGKLSLTGAYSHMEKRGSRYLRYAIFNATKYVCIWDPTFAAYLAKKRAEGKHYNVAISHAAKKLVRVIYALQKSGKAYRTAT

SEQ ID NO: 118221 - protein, 343 aa, unidentified
MKQYVGLDVSQDQTSICVVDESGRVLWQGKCASTPEAIAATLSSKAPEAERIGLESGPLSIWLCHGLTALGLPVVCLDARHAQAALKLQLNKSDANDARGLIVRTGWYREVAVKGLDGQLVRALITARAQLVALRVDLGNQIRGILKPFGLLAGKGVGKTFAEKVRSLVPDSPLHDVVEALLRSWEAINKEVATLSRRLVTEARQDDTVSRLMTAPGVGVLVALTYVSTIGDPARFPHSSSVGAYIGLTPRRFQSGETDYTGKISRCGDRLTRTYLYEAAGIILNRVSRWSTLKAWGTRLARKIGHKKATVAVARKLAVILHRMWRDGTEFRWSNKEAAVTAS

SEQ ID NO: 118222 - protein, 396 aa, unidentified
MQITPAAGLTACKGGHFMYRILKIGMDVHTTNYTLCALESKFGEEDTVLANITVGPDHKNVLDFVRRIKEKMDPKGKDKIDVECGYEAGCLGYSLYQLLSACKLKCTILTPTTMHSEKGPRIKTDRRDAKLIAQCLSNGGYHAVHIPTAEDNVVKEYVRMRDDHKLALKKVKQQTNALCIRFGFLYDGTKWTGIHLKWLRALALPELVRETLNEYLATYDELTAKIARFDQRIQEIAGQEQYREKVRKLECFLGIKTHTALSLIVETGDFIRFRKGNVYAAYLGLAPGEHSSAESGGRLGITKAGNSHLRRLLIEASGGICKGQIGKKSKDLIARQAGNSAEVIVYADKANIRLRSKYYRLIRHGKKRNVAVTAVARALACFVWGMMTDNIHGNAA

SEQ ID NO: 118223 - protein, 441 aa, unidentified
MLGRLTPLSLKQIANELDVGRVIGTSYIEQGRDVYKTRGLPKIHKAENSMLYLGIDIAKNNHVATLINEQAKPLFKGFSFANTTDGGESLIAKLHSHIQTLVEVEIGMEATGHYWLSLYSFLVEKGFNVHVINPIQTDGWRKGVEIRKRKTDQIDSFLIADLIRYGDFVETSLSDENILSLRNLSRFRHYLIGSIGDLKRKAICVLDQTFPEYQSVFSNIFGQTSSELLLNFQTADDFQNITAEQLESALQNVSFKGFAKNKLTQISELAANSFGLKFCRDSFSLQLKLLLEQIRFIEAQVSDVEAEMAKILDTLDSPITTIPGIGSVTGSTILGEIGDINRFSNPSKLVAFSGIDASVSQSGENASIGHRMSKRGSPYLRKALFQAALVASTHDTVFKAYYQKKRSEGKHHLTALGAVARKLCCTIHAILKSNTTYKPQN

SEQ ID NO: 118224 - protein, 343 aa, unidentified
MSNDTRIGVDVAKAVFEIAISDRPGHVTRRERLPRGQFLAFMAQQPQATVVMEACGSAHHWGRRIQALGHRIVLLPPHHVRPYIRRNKTDRTDAKGILEASRNEDIRPVPVKTVDQQVLTSLHRLRSGWMTERTARLNALRGLLRELGVFIPMGAREVVPLVWSLIEDADSDLPEALRPIFAEACREIREIEARVKQVERQLEATAEQLPAVEHLRTIPGIGLLIATALVAFIGDIRRFPSGRHFASYLGLTPREYSSGLKRNLGRISKRGDGYLRTLLIHGARSVLIHARKQQPDRLREWANNLAKTHVHNKTAVAVANKLARIVWAVWHHQRPFALIAKAA

SEQ ID NO: 118225 - protein, 415 aa, unidentified
MEDWSGGFHLSFPKISEGGAILYKLFVGIDVSKDFSLARGMDPEGQSCFSLSFPMNATGFSEVWRLIRSHCEDLSRVMVAMESTGCYHLNLYSFLISQGIKTVVINPLLIANFAKLSLRKTKTDKKDALTIAQFLLIHKDAISQISLSQDVQDLRDLSRERESLTVLIASMKNDIKRILQSTFPELESLCDVFSETMLQFLKEFPSARLIKGANPRRIAKALMHSDKRKRVSVSAGEIIKAATGSVASMSAAKEFILSEKISILFHLIEKQEKITKALVELCESMMIEDLEIITSIKGISDKTGATFLAEIGRFNDFDSPKKIIAFAGIDPTIHQSGKFEGTSKISKRGNRHLRRVIFLMAKHVSREDTLFKRYYLRRRMEGLSFKEAVLATAHKLIWVIFAMLTNRTYFCTKEN

SEQ ID NO: 118226 - protein, 462 aa, unidentified
MKGKNKRTGQTRQNRQMVAGLPTLRTNVAGMDLGSEEHWVCAPAVEGVGREIASFGGTTGELLRLAAWLKERRVESVAMESTGVYWIAPHEVLEGQGFQVMLVDTRQLAQVPGRDKKSDPSDCEWIQRLHSCGLLRGAFRPREEVCMLRTMVRDKANLVAELGDWMRRMQKSLDQMNVRLHRAVSDVNGATGMAILRAIVNGERDPEKLAQLRDRRCQKGEEEIAEQLRGHWREDHLFSLKQALTMYDAVQERIAAYDAEILRRLGSMERESVRGSAVPPVKNPSKAKAIRKRGEEPMREALYRMSGVDLTSIDALGVETVQVVLSEYGADLSGFDTEGHFVSHLRLIPHKPTSAGKALQKKRRNTATTRVAAALRMAATSMRNSQTALGAYYRHISRRIGGDVAVFATARKLATLLYRLLRWGQAYVDEGAEAYERRYEQSRLLSLKSKASQLGYQLVLNA

SEQ ID NO: 118227 - protein, 449 aa, unidentified
MSRPQVIDDEEHERIHDKVAAIDVAKDAGVVCTRTPHPSRPGARRSRIWTVKARMNTIRALGRQLHKDGIEIVTLESTSDYWRIWFFVLEAAGLAVQLDGAAQAKNLPGRPKTDKLDAQWLARLTEMGLLRASFVPPKAIRDLRDYTRARTRLVQERTRCWQRLEKLLEGAQVKLSSVASKLTTVSAQDMIRAMIAGQRDPRVLAALARTGMKAKHDELVQALDGMFDDHHGELAQLLLDQIAGLDGKITQLGTRIEQAVTALPDAWGINADGTTGPQAGTGPDAAVIPAVTRLAEIPGISENLARAVIAETGLDMRRFPTAGHLVSRAGLCPTARQSGPRTRAGKKGQGNTWLRGHLGQAAAGAARTATFLGERYHRIARRRGKAKAQVAVARSILVIIWHLLADPSARYTDLGYGYYQDRTDKDRKLRNHMRQIEALGFTVTLNKTA

SEQ ID NO: 118228 - protein, 345 aa, unidentified
MNKLSVVGLDLAKNVFQVHGVNTEGEVVVRKQLRRSEMRKYFAQLAPCLIGMEACGGAHYWSRELTRLGHSVRMMAPAFVKPYLKSNKNDRNDAAAICEAVQRPSMRFVQPKLPEQQAVLHLHHGRQLLVRQRVALSNHMRGVLSEYGIVVPQGVKVLSRQLPEILEDAENTLPMLARHLLAELKAEHDQLIERVDRFEQQLKAWHANSPVSQRLASIPGIGVLTATALAATVGEGQDFKNGRQLAAYLGLVPRQASSGGKDRLLGISKRGDGYLRSLLIHGARAVIHHIRRRLNAGRPGGNPWVEQLLQRCHVNEAAVALANKMARTAWVLLARNETWCPARPV

SEQ ID NO: 118229 - protein, 345 aa, unidentified
MTVYIGVDFHARAQTISYLTTEDGEIRRAQLDHGQPDEVRSFYQQFAGQEVIVGFESSGYAAWFEELLEELGCEIWIGHATAIRLFARRRQKNDRRDADLILDLLWRGDFPRIHRYSPQSREVLQQLRYRQRLVKMRTMIVNSLVFMASSRGVSLRTQLKSRRGIERLQQIALPQPLIEQRDELCQLLQELKTRIERVESWLEAKANSDIRVQRLRTHYGIGPLTGLCLVHTLECPERFANPRKVTAYVGFDPVEDSSGERRRIGSISKQGSRLLRFFLIEAGQIAIRQDQDLARVYQRVLVRRGHAKAKVAVGRRLLVRAFIMLRDEIDYAEFQRRGVAARSSR

SEQ ID NO: 118230 - protein, 414 aa, unidentified
MKSARNTLPTEPVNDITCGIDWARDDHALSIVDAKGREVTRKTIGHNVAGLRVLISTLDSAGAREVAIERPDGPVVDALLDAGITVVVISPNQVKNLRGRYGSAGNKDDRFDAFVLADTLRTDRARLHPLLPDTPATIALRQTCRARKDLVAHRVAVANQLRAHLRIVFPGAVGLFAAIDSPISLAFLARFDCQQRADWLSITRLTAWLAHAGYSGRTDPRELHRRLTSAARATNEVTGAEITGAFVATLTALHAQITVLDDSIADQLAAHADAHIFTSLPRSGVFRAARLLSEIGDCRARYPTPEALACLAGVAPSTRQSGKVTHVGFRWAADKQLRDAVCDFAGDSRRANPWAADLYNRARARGHDHPHAVRILARAWLYIIWHCWQDHTTYDPTQHRALQALLERPQPGAA

SEQ ID NO: 118231 - protein, 349 aa, unidentified
MITLGIDAHKRTHTVVAVDDAGRQLAVKTTTATSSDDHLDLLRWSKQFGSERTWAVEDCRHLSRRLEADLLGAGERIVRVPPKLMAHARDAARTYGKSDPIDALAVARAALRHPDLPAAQLDGPARELRLLVDHREDLVAERTRCINRLRWHLHELDPAWDPPARSLARYKNLDTIAARLASLSGPVARIASEIVAHVRDLTVRERALEREIRSLVDGLAPTLLGQVGVGSLTAAKIVAETADVRRFRSKDAFARHNGTAPLPVWSGNRERHRLSRTGNRQLNAAIHRIAITQIRAHPDARAYLERRKATGNTNTEALRALKRRLSDVVYRSLLADAPTAAASCLAPAA

SEQ ID NO: 118232 - protein, 366 aa, unidentified
MANIKSLIERLGKRIQSEERGTVFVGVDVHKKSYHIAVWSSVTDGLVFDSVAPASPEALASLLEPFAKAIRRVTYEAGPTGYGLARYLIGKGFAVEVIAPSETPQKPGDSEKSDRLDAIELARLSSKNNLQPVYIPTPEEEADRQVTRWRETRRKEVSRTKVRIKMFLLEYGVAAPQGLKNWGKAAIQALWKISLPLPGISEAFTGLLRDLDYHLDQLKAAEAAVHKLSREKRHKERSDLLQKVGGVGEITAMTLLTELPRIEQRFTSKRSLGKMLGLAPKIRGTGQKIKQMGRIRCGNSHLRGILIEAAWAWVRRDDQAKNLYRRMLANTGNKKKAIVAVARKLGIILWRMLVTNEPYNPKLVTA

SEQ ID NO: 118233 - protein, 397 aa, unidentified
MAKVRSWAGLDVHAAKVVACVVDAESGEMTVCRLPGDTSAVVAFCAGLPGPTRVAYEAGPTGYGLARALTTAGIGCVIAAPGKIERPSQDRIKTDQRDAERLVRLLMIDGLHPVRVPTVEEEALRDLVRAREDLRGDLMRARHRLSKLLLRHDVRYDDTSSRWGERHRAWLAKVDLGELGAQLTMSEYVGAIDALKLRRDTLEHAIGELIGSSPWAEDVARLRCLRGIDTLSAIGLCVEVGDFARFEHPRLLASYLGLVPSEHSSGESRRQGHITKSGSRHARRLLVEAAWHYRRPPRLGTVLARRQDGQEQAVIAIAWKAQQRLHHVWRRLDTQRGKRRTVVAVAVARQLAGFCWAVATHDPELSSRPIPPAIHGRRATTSRNQPPTPKHRERTPA

SEQ ID NO: 118234 - protein, 334 aa, unidentified
MEQITTVGIDLAKNVFSLHGVDAAGKTVLRRTVRRERLVETVAQLSPCLIGMEACSGAHEWGRRFERHGHTVRLMAPKFVAPYRKSGKNDGNDAEAVCEAVSRPSMRFVPVKSTEQQALLTLHRVRYGFVVERTATINRLRGLLSEFGVVLPLRTVNVRRQAAQAAEGLPQLARGAIGDLLEQLRQLDERIDGYDRQIEQQAKLSEPARRLMAIRGIGATTALAIVATVGNAREFKNGRQFAAWIGLVPNQYSTGGKSRLGHISKRGDAYLRNLLVQGARSVLHSAPGREDRLSRWALKLQDRRGYHRTLVAIANKNARIAWALLARDQELAIV

SEQ ID NO: 118235 - protein, 521 aa, unidentified
MESVAAIFSLVARKRFGVFEDPVCENASIFRRLSQAASLSQGNQTMKKHKKTKPNPEAAKPLHEPKPDAAGIDLGATEIWVAVAPDRCQMPVRRFGAFTQDLLAILQWLLECGIRTVAMEATGVYWIPLYQLLADAGIEVCLVNARHVKNVPGRKSDVRDCQWLQYLHSVGLLMASFRPAQIICQTRSIYRFRQNLLTQVGQHLQHMQAALDQMNIKLHHVINDLSGQTGMAIIEAILNGERDPLRLAQYRDRRIKATQETIAKSLEGDWRSEHLFVLRLAWENGKQVQEQIKKCDQELMQYTRQLEAKTMVAQPIVPVKIMSLNVEPGVPELTPAPAVRPAKPRKKTSKNEPDGPWRENLHRFFGVDLTLIPAISVLTGITLMTELGNDLSAFKTVHHFCSWLCLCPDNETSAGKVLHKSTRRSQNRVRQALRMAASSLHHDKSYLGDKYRRLRAKLGAPKAITAMAHQIARIIWYLITHQVAFDMSIFAELEKANQKRHLNRLNSAAHQMGYQLTPIAA

SEQ ID NO: 118236 - protein, 403 aa, unidentified
MNNVAGIDVSKGKSMVSVLRPFGEVVAKPFSIGHTGSELKELADYLKSLDGETRVVMEHTGRYYEPVARFLHDEGVFVSAVNPKLIKDYGNNTLRKVKTDKADSRKIARYGIDNWAELRQHTPMDTIRMQLKTLNRQQSLYTKTKTMMKNNLIALLDQTYPGVNALFDSPVREDGSQKWVDFATTFWHVDCVRNMSLTAFAERYRKWCKRHGYNFSQSKAVEVHAGAQDLIAMLPRDALTKTMVRQAIDALNAISASMERLKAEMQALAAQLPEYPVVMAMHGVGDSLGPQLMAELGDVTRFTHRNAITAFAGVDPGADQSGTHEAKSTRVSKSGPPELRRALFLVMDCLLKTQPQDDPVYRFMDKKRAEGKPYLVYMTAGANKFLRIYYGRVKEYLASLEGN

SEQ ID NO: 118237 - protein, 423 aa, unidentified
MMKLKYSICCGLDVHKNVIVATIVTTNKDGISEYLQKSFSTINSDIQRFHNWLIENNCYHVCMESTGKYWIPIFNYLENDIDICLTHPKYVKAIKGKKTDKKDSKWIADLYKFDLVRCSFIPPKDFRQLRELARYRFKLVCMKSSEKNRIQNCMTISNVGIASVLSDPFGKTATEIMSYLLEHTADSMDEKAVRKLIKKGAKAKSDEIIEAIKGYNIETDQAKKLELAQGHLEYLDDMITQTEVELYVRIKPYYEFVEFVSTMPGMTELSSTIVLAETGVDMDIFDDAKHLCSWCGLSPANNESAGKKKSVRIAKAGDYLKPMMVQCALAAIKSKKQPYFAIKYGRIEKRRGHKKAIIAIARMMMVCIYHMVSEKKPFTPTDYEELMNPQNHVERVVLNENNVFAYLESLGYDSSKLVKRNDN

SEQ ID NO: 118238 - protein, 357 aa, unidentified
MQQRFYAGIDAGSTVCELVAIDEAGEQVAAIKFDTGERNFLSAIQEARRSHPGSWSLAVEEGELAQWIADVLRDQVERLVVCDPKRNVWIARDPAKRDRVDAKKLAQLLKGGYLTEVYHSADPARVEFKRAVQHYHDLTRSQAGLKRRIKSRLRSSGAIPRGLGVFGVSGRETFITPMSSPTSQHLIRHLFELLDQSVRTQEKARRLMVALGRAFTEVGRFQEVPGIGPVWACTFSAYIQTPHRFRSKRQLWRYCRLAITNRQSNGELLGRQRLDRSGVGVLKALSYQAFCSAQKSDNEFHRHFEESLARTKDRTHARLSTQRKILTVLWTMWRRNEPYRPGGAQEQPIQMNGAEAR

SEQ ID NO: 118239 - protein, 427 aa, unidentified
MEEDKQSKVGDWEARKYFMGFDWAKDHHEVLVLNREGQTVLDLQIKHTAEGWNVLHDKLVNLAGSDLSTIAATIETNCGPAVERLLVLGCTVYPLNPKAAQRYRDRKVPCGAKTDHLDALSFADALRTDGHAWRQLKPEDPKVQELRLMCRDEIQLIGQRTALINQLQHALQEYYPAVLEAFEDWTIPAAWEFVIRFPTPEVLKQAGKRSWEKFLHVQHLYRSDTYPKRLEKFARASEFCGNSAVTNAKSMLAVSVAKQLRVLQQQLKLYRDRIEKLFQEHPDHGLFGSLPGVGEKLGPRLLSECGDNRDRFEDSESLQCYAGTAPVSFQSGQIHRVKFRRACNKHLRTAVHLWADLSRKKCTWAQVYYRQKREQGKSHACALRCLGQRWLKILWKMWQTGTPYDERVHTANQVRHGSWLLTLTTAE

SEQ ID NO: 118240 - protein, 315 aa, unidentified
MSEFEAVVVGIDVAKAALDVAVRPDRAERHLPNDAQGIAEIVAWLQGIHPQVIVLAATGGYEAPVVAELCLAGLPVAVVNPRQVRDFAKASGPLAKTDRLDAQVLAHFAAALRPTPRPLPDAQAQELAALVERRRQLVAMRTAEQARLGVTRVPRVRAHIQAHLAWLDAEVAGLDADLRRLVQASPLWRAQDNLLRSVPGIGPIISRSLLADLPELGRLSHAQIAALVGGAPLNRDSGTLRGRRTVWGGRAAVRAALSMGTLRATRCNPVILAFYRRLVQSGKPKKVALVACMHKLLTILNAMVKHQALWQAQAA

SEQ ID NO: 118241 - protein, 316 aa, unidentified
MTISIATPAHFIGCDVGKASIVIFDSRTSQTTTVPNRPRDLAAFAATLDATCLAICEATGGHEAALLQALLAAGCPAHRANARKVKAFIRSFGTLGKTDAIDARALARYGHERHAGLARWQHPDPQRDRLQALVLMRQTLVAERVAHKNRLAAPGAAAVKPYLAKLLACLTAQIAAVTRDINALIRAHTTLGRAAEAIRGIIGIGATTAAALLALMPELGTLNRRQAAALSGLAPHPNQSGATDAYRRTKGGRPEVRRVLFMAAMVAAKHDPRQRDFYQRLVASGKKKLVALTAVMRKLVVVCNAVLRQATSVSPA

SEQ ID NO: 118242 - protein, 386 aa, unidentified
MKRNDLSRSLVAFDQASTMVAVVELSFRSWLLAGLVPGLTRQPLKKLGPDAQALLTLLRRWQGEATKAGSTINRIVVAFEAGRDGFWLARWLRARGIEAYVIHPTSIPVSREHRRAKTDRLDTGLLMRAVLGWLRGEPKHCSMAAIPTIAEEDARRPNREHQTLVQERTRIVNRMKATLIRFGIRTFKVKLRKASDRLAALRSPEDESLPPNTVAELRRDMARLQLIRDQIKVIEEARLQQLKHAPRKGTHSMLLMLAQIIGVGVETADMLVHEVLSRKLRDQRAVARYGGLTGAPDESGTKRREKGLARAGNARVRRGMIQLAWRWLTHQKNSAFAQWYQTRTTGAKPAARKTMIVALARKLLIALWRYVTTGEMPAGVTLHPAT

SEQ ID NO: 118243 - protein, 311 aa, unidentified
MEADCIAIGIDVSKHRLDFATLGSQQRGSEPNSVSGIAALAKTLAAIGPHRIVLEATGGYERAVARTLFDAGLPVCVINARQIRHFAKALGVTAKTDSIDAEVLARYAAMVCPPLRPMKAENEEEMADLMARRRQLLTMTVMEKNRLQAPSRTQAIRIAAHLRWLEREVARVDRDLDRWIAADPERVATDAILQSTPGVGAVVARTLIADLPELGKLGKREISALVGLAPFNRDSGAMRGKRKIRGGRASVRGILYMAALTGARFNPVLAAFYKRLCDAGKPKKLALAAVAHKLLIILNAMMRNRSHWAHE

SEQ ID NO: 118244 - protein, 458 aa, unidentified
MYRELQPLREALSHQLKARLSPAVAGVDPDKLLETYLDRLTMYIGVDVADQSFTALAMDAGREILGSLEDCANDPDGFASFVTWARALRDQHHLHIMAIAGETTGIYYWALWDFLGEQADVARVLYNPRTTEHMGEVLSKKVRDELVDALLLSEQLRLGSTPEVRLQEDADLLSARYYSRAARHMAQQINRNKNQLRALLRAYCPPLCQVFPGYKLHHPAVHALLQKALFPDEFVHLGVEAVATTLLEHCDTAFGLTEAQQLVEACRHALARPVRREVIHQLVHAHIQDIATFQQRKAFYLKSGYALIKDRQEAKLLRTVKGAGVSNTLALVSEIGDVQRFASGEQLASFLGLTTSKHISGTTLFQAKRITKQGSRNGRYAAVNVAQQLSHRVPRYHAMYQRIKGRKPPRKGHFIALVAIARDFVSTVLYDMWRNQRPFFLEVSDYRHYRRQHPRTDD

SEQ ID NO: 118245 - protein, 423 aa, unidentified
MNIKAKKAKVQPLSKKSVINVLSQDEIKKKVQVIEQELKASTWRELETKGKFEKNDKLSFISEEMLIVGCDIGSETHYIRAIDTRGRELSKGAFEFSNSSEGFASAKAWVLKLAAKNDKKQIVLGLEPTGHYWFAIAAWMVSNGISVVQVNPYAVKQSKEIEDNSQLKDDRKDPKIIANLVKDGNYGMPYLPEDIYADMRRLSMFRDQLTEDRIRNINRLHREMKIYFPEYMDAFGKIDGAFTLEILKVAPIPSDIVELDEEGLKSLWHEAKLRGRGYSRARVIVDYAKKSVGLTGGTDAGRESIKWFVEQIIQLDEQLAEIENVLHQKCMEIPHAENILEINGVGENILAGILAEMGDISRFDDVKEIQKLSGMGLVACSSGKHKGQTKISHRGRKRLRYWLFQAAKSAVAHYSGSVVKTKI

SEQ ID NO: 118246 - protein, 376 aa, unidentified
MREKLRFLGLDVHAETIAVAIAEANGEVRSLGTIANREDSIRKFIKKLDLPEQLRACYEAGPTGFVLYWQLTQLGVECTVVAPTLVPKKPGDRVKTDRRDALKLARSHRNGDLTAVWVPDEASEALRDLVRQREAAKQDQLRARHRLTKFLLRTGQRAPAGLKAWTERYMRWLAQVRYTQPAQEVTRLDCMNEVEHMSARVKRLEEAILEVVKQAPQAMQELIRGLQALRGIAHISAVTIATELGDVSSRFESARKLMGYSGVFPSENSSGKRIRKGAITKAGNAHLRRIVMESAWCYRHLPRVGEKLRKRHQGIPAEIIEIAWKAQNRLHKRYVKLAVAGKDQRKVITAVGRELLGFIWAIGVKAEQANRRPIAA

SEQ ID NO: 118247 - protein, 421 aa, unidentified
MSDRVCAYAGVDWGSQNHCVFLSDSEGLKIGERVFKHSGEGLAEMADWLMRTSRAEEPGQVFVAIEVPHGPVVEALIERGFCVHAINPKQMDRFRDRFSMSGAKDDSRDAEVAASSLRTDARCFRRLTASDPVIVEVREWSRIADELSVERNRLANRLREQLWRYFPALLELETDVGAEWLLAFLDLAPTPARASRLRESTLARLLKERRIRRLDAATILRAVRVSPPRLSPGTTEAASAHVASLIPRLRLVNRQLRDAERRLEVLTQGLMAPEDGDPAPDSEPGPKKPRDAAIFASMPGVGTNVLAAFIAEAPDALQRRDHAALRSLTGVAPVTKRSGKSCTVLRRQACNQRLANAAYHWARVAIQHDPRSRAKYAELKKRGHSHGRALRSVADRLLNVVCAMLRSGRLFDLEFATQKST

SEQ ID NO: 118248 - protein, 366 aa, unidentified
MVSVSHLAPIHLGLDVHKDTISVGILDPDQQVPDVERITHDEASVRRLLARFPDRARLRACYEAGPTGFELARLLHRMDVRCEVIAPSLIPRAPGDKVKTDRRDCRRLARLHRASELVAIRIPTVGEEAVRDLCRTRADMVEDLTRARNRLGKFLLRHGRPWRGGSTRTHAYQAWLRSQRFDQPAMTQTFHHYLAVVEVRNTQLDAVEADLVGWCARPPFDWQVARLAAYRGVTRLGALTLAAEVADWRRFAHASQFMGFCGLVPSEYSSGNRVHRGRLTKAGNAHLRAQLVESAWSYQHRPSVGREIARRQQGLDPAVIARAWAAQQRLCARFRTLAARKHTKSIVAAAIARELAGFLWAEMTAA

SEQ ID NO: 118249 - protein, 390 aa, unidentified
MILVGIDVAKDKHDCCIINSDGKFPEEVFSILNNREGYETLYKRICSLAVDFTKVKVGLESTGHYSSNLLAFLLDKHLTAYVINPLRVNLFRKGQSLRRTKTDKIDSRNIAHLLMADSSLKPYSLSSYHMEELKSLTRYRGTKVRERTKLKTSIARLVTILFPELEQLVSSIHIHSIYAMLEKFPGSAYIAAAHLTRLTALLLKASRGRFGRETAIRIRDTARRSIGAVSPAKSMELQHTIAHLRVYDQEIGEIESEIEKIMDDVNSPITSVPGIGMQMGAVILAEIGSFRRFDSPDKILAYAGMSPSMYQSGKLTGSYSRMEKRGSRYLRYALFNVTRYVCHYDPGFTAYLSKKRKEGKHYYVAISHAVKRLVRVLYAMEISGNRYKTA

SEQ ID NO: 118250 - protein, 338 aa, unidentified
MVLIGIDPHKATHTAVAVDTDETALDELTVKADRHQVERLLKWAIDFPDRRWAVESANGLGFLLAQQLVAAGEDVVDVPPTLAARVRVLGSGKTQKNDPNDALSTAIAALRAKRLRAVVAEDHGAILRLLADHHRDLGSLRTQAICRLHALLRSIIPGGTGLRLSADRAATVLRSVRPTTAVQAERKRLALAFVADVRRLDAEIAVSKARITTTVAASGTTVTELYGVGPVVAAFLIGHSGDMARFKNRDHYASYNATAPVEASSGPRVRHRLNPRGNRRLNHAIHVIAITQIRNQCEGRAYFDRKVAEGKTTKEALRALKRQISNAVYRQLVIDSSR

SEQ ID NO: 118251 - protein, 388 aa, unidentified
MLTPDSEESNGGRTVIGIDPCSQFLQLAILTPNKKTEFKKLPLSPNITEEIARSIDPATTQIAIESYGSYGKLFVYDLLKRGYDIREVNSHISKKLASLYNEEHSDQKDAESLAKALLLIPDLPRISITDKKQWLAKLTRTRKKLVKDLNGYLNRLHIALTESYGVVYKSLFKTLFAKKALMFFDDNPTINDSISDEDAKKRLGEEKWDLLIQAGKWKDDYYLETLRTEIRGLIGIIRSINSTKIALEENIQEIAEQVEEMRILQTFPGIGGIAGATLLSEIGDIERFDQESYLSAYCGVSPVIWQSGTGRIRTKRRKRYSRRLKGILYFISLSQIRINPESRAYYDRKIKEGKTHWQAMNALSRQLIKIIYYMLKHKKPYQRNTFVN

SEQ ID NO: 118252 - protein, 354 aa, unidentified
MPRKSKGTVAVLGIDIGKNVFHLIGLDKRGAIVLRQKLSRGQLEARLANMPPCLIGMEACVGAHHLSRKLKALGHDPRLMPAKYVKAFLKGNKNDFRDAEAIAEAVQRPTMRFVATKTAEQLDLQALHRVRSRLVSERTAIANEIRAFLLDRGIAVAKGLHRLRAALPGILATRTDVLSPRLLHTIEDLIGDWRRLDERIDTVSLEIEVLAQEDAGCERLMTVPGIGPIISSATVAAIGTGDVFSKGRDFGAWLGLVPKQISTGDRTILGKISKRGNRYLRMLFVQAARVVLVRPANWERYGLKPWIEAAAKWLHHNVLAIALANKLARIAWSVLHHGRNFEVRKMSEATSQSA

SEQ ID NO: 118253 - protein, 361 aa, unidentified
MPMLTEPLEKSRLAETVDVVIGVDTHTNTHTAAAVTAATGALVATVTVSADADGYGELVEFADTHAGLRAWAIEGTGGYGAGLARHLAAIDELVVELDRPGRPARRGGRKSDPLDAARAAREALSRARLAQPKTGADRAALQMLLTVRRGAVKAGADAQRQLRALVITAPERVRDRFRGQSIVVMTSTAAKLRPHTAAEDVHVFTAMTALRSLARRIHDLDTEAGEHEKAIRTIVRSWRPDLLPLPGVGPITAATVLTAWSHAGRCRDDGAFAMLAGTAPIPASSGKTVRYRLNRCGDRQLNRALHTIAVSRLRYDPDTRAYAERRRAEGKTDPEIRRCLKRYISRQFYRQLEHPPVTSRA

SEQ ID NO: 118254 - protein, 394 aa, unidentified
MRKSRNGVNGKMSDVIKTVSPDNEIESMLTNQIRSLKGETVMTLYIGVDFHPHQQTVAWCDTETGETRTFDLAHDLEEVRKFYSLLPEPAIVGIEASTRAAWFEKMLFENGHKLFVGNPVLIRKRATSRHKNDRRDAELILELLLRGEFPSIWRRPPESDQVIEMLGLRQSLVRQRTQVYNRLQALAHNAGLPKGRMRTLAFQALVKAADMDEASALGRSHLFSLMEKFTERIAEVEEWLQRKAEKDVSAQLLRTQKGVGYLTALATVHTLGDVNRFTRLSKQVASFAGLDPLERSSAGKTRFGRVSKAGSPLLRYQLGYAAHIAARSDPRLKSFYKRLAKKKPRAVAKTATARKLLVKLSIMLRDNISADEFDRRGTHSWQCPAGSRSEMTAV

SEQ ID NO: 118255 - protein, 325 aa, unidentified
MTYIGIDISKATFVAAFLHGKSYRTETFPNDAKGIRRFISKLAPAIHHCVMEATGNYCFLLLYLLDKSGIRASLINPKKIKNYARVMMSVTKTDSKDACLIADFGERFKPKPYKFPSEQIMILKQKKTVLRQLQKQLTATKNLLSSLEPLPVKDKKCLTSLKQTVTFLEKQIKYMQQEMEAVVTDVFDRQLKLLTSIKGIGVTLATALIIATGGFIYFDNAKQLSRFIGICPTIEQSGTSINIRGHINRNGDETLRSMLYVAAWSASQHNKACKECYQRLRGNGKSGKVAMIAVANKLVRQAFAVVTSNNLYIDGFVSTKPDTTV

SEQ ID NO: 118256 - protein, 353 aa, unidentified
MSNIKYVGMDVHKTITVIVVLNALGQMESHSKVKTKADNICDFFRGLSGKVEAVFEEGTHSAWLYNLLKPLVGSVTVCDPRHNKLIGDGKKSDDDDAETLAQLLRLGAVKAVYKGDDWQHRLKELSRAYSNLVEDSTRIQNRLKAIYRGRGIDCAGHAIYRPDQRTEWVAKLSDEAARFRATSLLDQWEAISQLRKQAKQRLVTEARQHADYRILSKLPGFGPVRVAQLMAIVGTPDRFRTKRQFWPYCGFAVVTSSSADYGIVEGKIVKQQKKTVTRGLNRNHNPQLKQIFKGAALISLRQQEFRAYYEGLIDNGTRPELARVSVARKLAAITLAVWQRREEFDVKKAFAQA

SEQ ID NO: 118257 - protein, 324 aa, unidentified
MLGIDVSKATLAYSLLAAGTQQVVAEGQVPNTPAGIDHLVALAPAEHPWVVEPTGVYSQAVVRRGQQDGRTVLLAPPKEAKAFLAALHPRAKTDRLDSQGLARYALALPLRPFPVKAESVVQLEQLLAARKGLSDSLAQLTQQRQALPYAAEPLTAAINALRAQQRELDAQIAALCQQPELAVAAALRQVPGIGPVTAAALAACFASHTFTHPDQFVAYLGLDVRVRDSGAYVGRRRLSKRGQPELYLCAQANLRRRDPDNPFKLQYERERAKGLSSTAALNAVARKLARTAWSLVTHGTTYDPARVHQPPHPSTADPPLDTQP

SEQ ID NO: 118258 - protein, 347 aa, unidentified
MRFYTNQHRHYCGIDLHTKTMYVCILDRDGQVLVHKNLPSNPAAFLEVVAPYRDDLVVAVECIFTWYWLADLCAAEGIAFVLGHALYMKAIHGGKAKNDRIDALKIVMLLRSGILPQAYVYPTGMRATRDLLRRRLHLVRKRGQLLAHIQMTNQQYNLPAFAKRIAYPSNREGVANHFEDRVVRKTIAVDLALLDRYDSLLVDLESHLVRQAKQHDPQAFQLLRSISGVGKVLALTILYEIHDVHRFDRVQQIASYARLVKCAKESAGKNHGTSAAKKGNVHLKWALSEVAVLFVRHNEPGKELLARLETRHGKALSILAHKLGRAAYYILLRSKAFEIERFAATVN

SEQ ID NO: 118259 - protein, 330 aa, unidentified
MVYAGLDLHKSFCQVLVCEKEGELIKEGRIKTEAKDIEEFFSGLEDLTIAFEASSNYEYFYDLLESFGHKVVLAHPLKTKMIAEAKIKTDKIDAKTLAELLRGDFLPTSYVPPKEIRELRHLVRHRIFLGKYRGIIKNQIKTELRRKNIKYPDGAGIFMGKGKKWLCSLKNPVIDSYLAIYEAVDRELKEAEREIEKTGKEYEEVKLLTGIVGIGMYSALIIYSEIENCSRFSNEEKAFSYAGLVPRVHQSGNTSYYGRITKEGSKYLRWILVEAVRVHVQWCPNSKITKHYNKIKKKKGANVAATAAARKLLQVIYHMLKNKEEFRIEG

SEQ ID NO: 118260 - protein, 341 aa, unidentified
MSQPQTIVGIDIAKSVFQIHEVDKETGEVTSRQIKRARLLQHFINREPCFIGMEACGGAQHWARQFVAMGHTVKLLPAQSVRPFVGGNKNDAADARAIWTAVQQPGIKAVAIKTEAQQAVLALHRMRQQLVKFRTAQINALRGLLAEYGEVMPLGRDAVAKALPSVFARLVDRLPGVLIESLREQYTRIAQLDKEVSNIERRLQEWHRDDESCRRITAIPGVGLLTATATVAAMGDPGAFSSGREFAAWLGLVPRQTGTGGRVKLLGISKRGDRYLRTLLIHGARSVLMTSKTPPAWAANLAKRRPLNVAVVALANKMARTLWALLAHQRAFQSGYVSRPA

SEQ ID NO: 118261 - protein, 354 aa, unidentified
MPPTARTAIAVVGIDIGKNSFHVVGLDDRGAIVLRQKWSRNQVAVRFANMPPCLIGMEACVGAHHLSRGLQRLGHDARLMPARYVRPYSKGQKNDFRDAEAIAEAVQRPTMKFVATKTADQLDLQGLHRVRERLVRQRTGIINQIRAFLLERGVAVRQGLRFLRNELPSILAAPSDALSPRMLRIIEDLAGDWRRLDERVEGLSKEIEAIARQDAGCERLISVPGIGPIISSAIVAAIGAGDVFSKGRDFAAWLGLVPRQISTGDRTILGKISKRGNRYLRVLFVQAAWVVLIKPKSWERHGLKSWIEAARKRLHHNVLAIALANKLARIAWSVLAHGRSFEASKLAAAVTQPA

SEQ ID NO: 118262 - protein, 417 aa, unidentified
MDVMAERCAGLDVHRSTVVACVLLSEAGGRTKKAKAEFTTTTAGLGKLVAWLREHGVRVVGMESTGVYWMPVYAALESAGGFELIVANAQHIKAVPGRKTDMNDAEWVACLVRHGLMRPSFVPPKAIRDLRDLTRYRRTLVEAQASERRRLIKLLEAADIKLAGVLSDVFGVCGRLILRAVIAGDQSAAEMAKLARGKLRQKRPQLFDALSAQVDPHRRGLLAMQLTRVEAAEADIAALDAQIAIHLAPYARQLGLLMAIPGIDRVVGATMIAEIGVDMTVFATAGHLAAWAGVCPGNNESAGKRKPTGARKGNPHLKTALCNAAIGASRKRDSFFKAKYHKLKSRRGGGRAALAIAHKLLVVAYHVLSTGAEYRDLGETYLDKRNAQRSAQRYVRRLENLGYTVTLNPVAQTANAF

SEQ ID NO: 118263 - protein, 344 aa, unidentified
MNIATIGIDLAKNVFQLHGVNGDGKVVLRRQVHRGQMRGLFVNLPACLIGMEACASAHYWARTLESYGHTVRLIAPHFVKPYVKTHKTDATDAEAICEAVNRPNMRFVPIKSIEQQSALSLHRVRQGFVRARTAQACQIRGLLAEFGLVMPQGIANLKQVPKLLQVAGKELPAPFCRLIERLLAHLKELDRQTRELEEQIVDWHERSEPSRRLAKIPGIGPITASALVASISDVRSFKNGRELAAWLGLVPRQHSSGGKPTLLGISKRGDRYLRTLLVHGARSVIVRTRKREDEKGGWLRKLLERRHVNVATVALAHKTVRTVWAMLAHDREYCPNYKSLPVAA

SEQ ID NO: 118264 - protein, 424 aa, unidentified
MNFTQNDKIEQIKDETLVVGVDIGKETNYARALDNRGRELKKHVKFTNSREGFRAFDKWVSEISLANEKTDVIVGFEPTGHYWFSFGDHCKKLGHKLAIVNPMHVKRTKELDDNSPTKNDKKDPKTIAMLVKDGRYREVYIPEDIYQELREAVYEKERLTDLTVSINNQVIRWIDIRFPEFTKVFSKWYGHAALMALKNFPTPEKVLKAGVDNIVSKWKEEISRAVGRKHAERLVNAAAESIGRKTGTISSEASLKNLIDQYELIMRQMKEQEALMLELLLRVPNADKLLGIKGIGLIAVATFVSEVGDIRRFESPKQIIKLAGMNLKEDSSGKHKGKTRLSKRGRKRLRHSLFKAMITVLAKNTEFKAIHRRNITREINPLNKMQSIFALCGKLIRVFYAILSKGTEYDPNKLMIEIPSMKAA

SEQ ID NO: 118265 - protein, 431 aa, unidentified
MAAREKVGEPEFVAFVGIDWADQKHVWCLQAANSAKRETGELEHKPEVVEAWVSQLCQRFGHGPIAVAVEQVKGALVYMLGKYECLHLYPVPSTMSASMREALYPSGAKDDPRDADLLLDLLLQHRDKLRRLTPDNEATRRVQNLVEERRKLVEEKTAQLNRLTGYLKVYFPQMLEWFAKLDTKLACEFLERWPSLEELQAAAPAEVRKFFHQHRGRHPELTEWRLQGIGQAMSAIRDGELTEWRLQGIGQAMSAIRDGVVIEAKRMVVQVIARVLRTLLEGIAAVDGKITEAAEAHPDFFIFQSLPGAGAALAPRLLAALGSQRDRYASAEEVQKYSGIAPVTERSGKKKWVHFRWACPKFLRQSFHEWAGHSIAQSVWARAYYQQQRQRGKDHHAAVRALAFKWIRIVFRCWQDGAAYDENRYLATLAK

SEQ ID NO: 118266 - protein, 344 aa, unidentified
MEDQSRQPELEVGVDIAAATFTASWLTPAGKPTAAVTMAQSAQGYATFRERLHATGCAPAATRVVMEATSTYWIALAVSLHEAGYRVLVINPAQAHYFAKAQLRRAKTDALDAQDLARLVGKLDLSAWSPPPAVYHELRQRLLAREALIALRQQARNQRHALVQWPVIVASAQRQFDEVIADLDERIASLDRELALVLTNGAWAASAAFLTSAPGIGAITAAWLLVATVNFTLAPSPEALAAYAGLAPMPRQSGTSVHGRPSIGHAGNAHLRSALYLAALSAARYNPAIKPLNDRLRAAGKPVKVARCAAARKLLHLAYALVTKQQAFDPQHRQPKPAELAAAS

SEQ ID NO: 118267 - protein, 422 aa, unidentified
MSYCPVAGIDVSKQFSDMCILSPDNKIFAQEKIYHDETSINRANALLQKAERLFFSKPVIVMESTSHYHLILFQFFSEHGYDVIVVNPLQSNSMKDFSIRKRKTDRVDAFKLAMMYRTKTLRPSQIPQTATRALRQLCRHRAELLNDVSSYKNRLTALLDQTFPGYDKVFSDVGGVTSCAVLVRFPTPTILLVEEESELVEVIASASKSGYSFAKKKAGLLISAAQKAQTLGIHSCADETLIVCTIQMLRTLSESVLQIETAIDNLLAQIKEMRNNVSLLQSIPGVGSHSAALLLGEIGDILLFKKPKQLAAYFGLDPTERQSGSFRGTKNKLSKRGSPYARAALHMGVVNSICKRGKDSAANPVLLSYYEKKCKNKPAKVAQAASMHKLVFIVFAVLRDQKPFELKTPEQHAVEQGFVKAA

SEQ ID NO: 118268 - protein, 470 aa, unidentified
MAAVMIGVDPHKASHTAVAISAAEEPLGELRVRACVAQAERLLAWAAAWPQRTWAVEGAGGTGHLLAQQLVSAGERVLDVQPKLGARVRLLAAGDVNKNDPNDARSVAVAAMRSAGVQEVRADDHAAVLKIWSKRYRDLGRSRTQVVCRLHAVLGELIPGGVPKAITAARAARVLKAIRPEGAVQAARWELAAAFLEDLRRIDAGIRETRTKLAAAVAAAGTSLTGLFGVGPVIAAAVIGDVRDVSRFPGRDHFAAYNGTAPIEVSSGQRKVYRLSRRGNRRLNHAIHMAAITQIRNRHSQGRAYYDKKLAEGKTPKEALRALKRQVSNAIFACLQADARRAAARAKGPGGQQGNDSVASAADSHPRRRLFGQATPGPGHHPTAKPGGPPPGPARSRDRAGHSPVAATLPPATPKVQVERLQRSEDERPGGAARRRPHSAARKATGQTAQVKTQRPKGTSQAAERTDGTS

SEQ ID NO: 118269 - protein, 450 aa, unidentified
MSPLALDVVTKTGKTPVLVRMLSKYVGRKTSSIENDITKARNHSRQRGNIMRVIFGIDVSKASSEVAILVNGEKIHGYTIPNDAIGFNRLLGDLRTVYQPEIVFEATGVYSRRLQAFFEDNSYAYIRLNPLESKKQLDSLRVRKTDKIDAEKLATSQFILNRKPSYVQEALYQELRDLSRFYQNLTEDIVCSKNRLHKVLQVTFPELENILSSPTGKQYWNLVMAFPCNSFVLELDDATLRAIIRQSTSKRISEKRVTYLVDKLTKLANHSYCAVKKTSPMMEEVKYYAGELLRLSEYRQSVLEEMITLAQPLPEYEILLSIPGIAETTATSIIGELGDIRRFHSANQINAFIGIDLRHYESGNFLAKEHITKRGNPYARKILFKCIQNIASASHTNACHIADFYEKRKRQSQVTSTKPHTIASIHRLIRTMYYLITHNKLYDYTSTQNR

SEQ ID NO: 118270 - protein, 413 aa, unidentified
MERIAYVGLDLHKKTVAWCAKDERGRVLGEGTVGATRTELAAWCAAQRRPWIGAMEATLFTGWIDDFLRPHARQLKVAHPLMLRAIAAGKKKNDQVDAAMLADLLRCDLLPECHMAAPEIRELRRVMRYRRLAVEQMVKMKNKSAGLLMEVGAEYNKRRLDGKQSFAALLERLEGPQSEAPASVVDLLRLSRGAMEMYRDTGRRLVASLREHPALAERVEMLMTIPAVGEVTALTWALEIGDPERFGSIARAVSYCGLSSAQRESAGKERRGPLSKQRNRHLQTVLVEAAKLAPRWSAQLATLHARHLARGPRNRATLAVARKLVAWLLAVDKRGQPFEPRRAPGELKSEFSNHATGANGKQTRAPQAVDRPARGAASHGAGVALQQSAATGSLQKPRGGGKLKSIERPDATD

SEQ ID NO: 118271 - protein, 345 aa, unidentified
MSIVGGLDIHRKQITFDYLDTATGQVRRGQVSPADREHLRAWLARFAGRGDTAFALEGCTGWRYVAEELAAAGVTAHLAEPADTAFARGRKRHAKTDKTDCRHLRQLLAEGRLPECWIPPARVLECRALLETYHDLRAEHTAWVQRIHAVLFHQGAPALGEGALRSEQGLAALREAAAARLSPAGQLQVAVALEMAGVLEERLHELRHRLLEAARHLAGAKVLAARIYGVGPVAALAMTCWLGGAGRFSSSRQVVRFAGLDITVRSSDRKGPPGKLSRQGPPVLRWALYEAGKTHARASAPDHAYYAQVKDRCGGKRAALSEARKILRQACHILAELGDDALAAA

SEQ ID NO: 118272 - protein, 350 aa, unidentified
MTHVNQSIGIDISKDTFMACGCTQTFTGELNFTPVHSFTNDKKGFNQLIRWSKSIVSKDASVIYLMEATGVYYESLAYFLNKLNKPVAVVLPNMSKHYFLSLNIKSKTDTIDARILARLGVERKHRLWEPPKSIYIELRNLTRYLVQLNEQRTAISNIKHSKDASNNVQNFILNSNRNLIQHIDRQIEKCKIEIQTLINADRELAERIRKLATIKGVGLTTIATIVSETLGFEGFNNAKQVVSFAGYDVVQRESGTSVKGKTRISKKGNRYIRNALYFPAMVATRFNPVMKENYARIIKDKPSKMIGQVAIQRKLLTLMYALWKTNTEFNPEYKKVASSIKMEKATLDTQ

SEQ ID NO: 118273 - protein, 357 aa, unidentified
MGKSIKNLSSVTIVGLDIAKNVFQVHGVDAGGALVVARRVRRGQLLSFFASLPQCVVGIEACSSAHHWARSLIELGHQVKLIPPAYVKPYVRRNKNDAVDAAAICEAVGRPNMRFVPVRSVENQAQLMRHRARELLVGHRTRMLNALRGHLGEIGVVAAQGAQNAYALKRLLADGCDDNGEVIVPDCVRRALAPLVHQIEAIDAEIAAIDEEIKTLVKADETARRLMTIPGVGPITAQAIIATVRETNAFASGREFAASLGLTPRQNSTGGRERLGRITKMGDRYLRKLLVVGACATLCHRKGHNDALRMWADRLLARKAVKHKFKLTAVALANKVARIVFALMTQGGEYNELPIAA

SEQ ID NO: 118274 - protein, 411 aa, unidentified
MQALVERGCGLDVHQATVVACLLIVSKNGMTQKQVRTFGTTTRELVSLREWLLSEGCTHVAMESTGVYWKPIYAILEGAFEIVVANAEHVKKVPGRKTDVKDAEWIADLLCHGLLRSSFVPPKPIRELRDLTRYRRKLVESRSAERNRLLKLLETANIKLASVASDVFGVSGLLMLEALVEGKATAQEMAELAKRKLRKKIPELELALEGKVEEHHRFLLSLQLRRLQAVEEDLAILEQRIQEKLKPYAAQITLLDEIPGVDWTLAAGIIAEMGVDMKVFGNVSQLASWTGVCPGNHESGGKRKSSRIPKGNVYLKTTLIEAANSAAKAKGTYLRDKFYRLKARRGYKRAAVAVAHKILVAIYHMLSHQVRYHELGDFYLDKLNKHQLTRNLVHRLERLGYIVTLEQNAAA

SEQ ID NO: 118275 - protein, 335 aa, unidentified
MKVFYLGVDVSKKKLDLCLRSNGKDILYDVIPNDLSSIKSWLTRTFEKFFLSEDSLVVCAEHTGQYTYPLVCATKSIGVYLCLEDAAKIKYCHGIPRGKNDKIDACRIAMYAERYNDCLQPYTASELIIQKLKNLSTERSMLVADRAKYQSQLKDQVDYMEHSIYIAKCNRVEGIINTFTDYIAQIDLEIKELINQAPVIAHQMDLLMSVDGVGERVALKMIMETDAFTSFTDPRKFCCHAGVVPFVYVSGSSQRSKNRVSNRADKSIKHLLHMAALSVSQVKNSPLKKYCDRKVEEGKNKMSVLNAVRAKLVTIMFAVIRADAFFSRNYQNSLA

SEQ ID NO: 118276 - protein, 416 aa, unidentified
MNIQRRWFAGVDWARESHHVRLTDEHGNDVGERIFTHGGAGLAEMASWLTTTCQADAPEIHVAIEVPHGPVVETLMERGFAVYAINPQQLDRFRDRFSVSGAKDDSRDARALASALRTDPQCFRHLTPVDPTVVELREWSRIADEIIAERNRLTNRMREQLWRYFPAFLKLDEDLGADWLLDFWELVPTPLKARRVREPTVAKLLKRNRIRRFDAAHVLAIAREEPVTVQAGTMEAATAHIATLVARLRLINRQLADAHRQIDALTARLVGGEESEPGQPVEQHDAAILRSLPGVGRIVLATLLAEAWEPLRRRDYHALRNLCGVAPVTRRSGKTSIVLRRRACHPRLANAVYHWARVAVQNDRTSRAKYEALRDRGHGYARALRSVADRLLNVACAMLRDGTLFDPSLHLQKSAC

SEQ ID NO: 118277 - protein, 344 aa, unidentified
MDYFAGLDVSVKATSVCIVDDTGKTIREVKAASEPEALLAVLNTPAYHFKRIGLEAGPLSQWLFSALAEAGLPVICVETRHMRAVLKAQINKTDRNDARGIAQMMRVGPYRPVHVKTLRSQKLRMLLVHRKLLQSKSIAIENDLRGTLRNFGLKVGVAGTTKFEARIKELVENLPDLAALVEPLLVVRRVLREQIAVLHRRLLAIVRNDEVCRRLMTTPGVGPVVALTYRATIDVPARFRNSRAVGAVMGLTPCKYQSGQSDRTGAISKCGDEMLRVMLYEAAQILLMRSTKWSWLKAWAMQVARRRGIKKAIVALARRLAVILHRIWVDGTEFRWTKQQAAAA

SEQ ID NO: 118278 - protein, 402 aa, unidentified
MYNAVGIDVSKGKSTVAVLQPAGVIIRKPFNVNHTSSELDELAKYIGSLEGETRVVLECTGRYHEPVVKTLSEAGLFVSAVNPHLIKNFGNNSIRKVKSDPADAKKIARYTLDNWIELRQYSSMDNTRTQLKTLNSQFSFFMKQKVAAKANLIALLDNTYPGVNKLFDSPVRDDGSEKWVDYAYSFWHVDCVRKIGLKTFTERYQAFCKKHHYNFQPAKPAELFLASKDLIAVFPKEASYKLLIQQSIQQLNLASSHVEELRSKMNELASTLPEYTTVMGMYGVGKTFGPQLIAEIGDISNFSHREALTAFAGVDPGVDQSGTHNSKSNKASKCGSNRLRKTLFQIMSTLLQTAPEDDKVYQFLVKKRAEGKPYYVYMTAGANKFLRIYYCKVKECIRNLEQ

SEQ ID NO: 118279 - protein, 356 aa, unidentified
MHDTDPAEIIIGIDTHKEAHAAVAINGLGARLGAMTLPASRRGYQELETWARSFGSVRAFGIEGTGSYGAGLSRFLQERGHYIIEVNRPNRQIRNQHGKTDPLDAENAARAVLSGQARAAPKSGTSSAEMIRHLKVTRDTAMKSRTQAMVTLKTIIINAPTALRESLEGLTGTMALIRHLAALRPGAMTDPTASAKAALRALARRWLMLDAEIKSHDAALDALTTACAPVLKEAHGMSTGTAAEMLILVGDNPERIRSEAAFAKLCGVCPVPASSGKTTRHRLNRGGNRQANAALYRVVITRMRSHSPTRDYVRKRMAEGKGKMEIIRCLKRFVAREIFGYLCRTSRLPTALSPAS

SEQ ID NO: 118280 - protein, 340 aa, unidentified
MTVIIGIDPHKASHTAVAIGCDERQMAEIRVRATCQQTERLLTWAKPLGERTWAVESAGGLGYLLSQQLVGAGERVLDVPATLASRVRVLGTGRSNKNDPNDALSVAIAALRSPGLRSVEPANHREVLRLLGKRNHEIGRLRNMVVSRLHAALVNLSPGGISKELNASDAVRLLNDFEPITAVEQTRYDLAHELLDDVERLDVQLKESHRRIKTAVKASGTSLTELYGVGPILACELIGYTGDVRRFTTRDQFASYAGVAPIELSSGGRIVHRLSRRGNRQLNHAIHMVAICQIRQKDSEGRIYFEKKVAEGKTKREAIRSLKRRVSNAVYRQLLIDAQR

SEQ ID NO: 118281 - protein, 329 aa, unidentified
MYYVGIDISKRFIDVCLLVDGIKGKRKTKVLPNDPNSAQALAQWLILQKCDPSQAHIIMEATGVYHEHLADGLHQSDILVSVINPHRVREFAKGMGILTKTDKVDAYVLACYGCLKQPENRLPPSQEIRKLKALLQHRDSLLNDKQRIENRLSTLKSTTAPEEILTSLESIEQNLKDELARIERLIAEHIDKHPRLKNDLKLLKSIDGVGEQIGWNMLAIIRGNNFRSAEQVAAYLGVIPIERRSGTSVCGRARLSKIGPPGIRAKLYMGAIAAISWNSHVRALYERLRLKGKAKMVAIGAAMRKLVHLCYGVLHTQQPYDKNHGVVAG

SEQ ID NO: 118282 - protein, 345 aa, unidentified
MLNQPLFAALDVSLETTTICIMSFDGTITKEAVVATEPDSIAICLGDDLTRIERIGLEAGPLSEWLVRELSVLGIVVTLLETRQVRAALSAMIIKTDRKDARGMAHLLRTGWFRPVHVKSLTAREQRAMLAARSTIVARLKDIEKSVRGLLRGFGLRLPRALRGRWEAGVREAIEGHPTLVQIFEPLLMAREALREQLIILDKRVRDAARADRVCRRLMSAPGVGAIVAMTFRAAVDQPDRFRSSKQVGACFGLTPRKYQSGETDRSGSISRAGDASVRVALFEAAHVIMTRVAAWSKLKAWAMNVAKRRGAKRAKVALARKLGVVLHRMWVDESEFRFGNPAQA

SEQ ID NO: 118283 - protein, 412 aa, unidentified
MEVVYECCGGLDVHAKTVVACLVTKGRKEIRTFATMTDELLQLGDWLSSAGCTHVAIESTGVYWKPVFNILESLLTVILVNARHIKAVPGRKTDVRDCEWLADLLRHGLLKASFIPPPEIRELRELVRYRQTVVTEHTAVANRITKLIESANIKLGQVASEVLGLSGRLMLRALAAGETNAETLAELAQGKLKSKKAELRRALAGCLTQVQRWVLTELLTRVEELEAALTRVETRIGEEVAACPDPFVSEAVELLESIPGVGIRTAQTIVAEIGVDMERFPSAKHLASWAGVCPGNHESAGKRKSGQPTKGNKSVRTILVEAAWAATHAKGTFLQAKYQRLVKRMPKQKALGAIAHRLLVISYHLLRRRVPYAELGTAPVDAQQVTRQRRRLVEQLVGLGVKVTIEEGAVAL

SEQ ID NO: 118284 - protein, 345 aa, unidentified
MEIRTIGIDLGKTVFHFVAVNARGEVVVRKKGSRAQLLRFTSNLRECLIGMEACGGSHFLGRALREQGHDVRLMPAQYVKPYVKTNKNDYIDAEACSEAVTRPTMRFVPIKTDDQLDLQSLHRVRERWVGRRTAVINQIRGLLLERGITIRKGRHHIEESLPGILEDADNKLSGALRVLLTQLRLEMQYLHGQIGETDKLIARICGELEQCRRLVAIPGIGPITATATVAAIGNGAAFKKGRGFSAWLGVVPGEHSTGGKQKLTGTSRRGNKYLRKLFVQGAHTVLLQKTKQSSGLSTWLLNLTSRKRKQVATVALANKMARMAWAVLFKGEAYRPPTAAQVIAA

SEQ ID NO: 118285 - protein, 370 aa, unidentified
MTRISVGVDVSKNRSTVCIMDQDGKFIMRPFLVWHSTEELDFLADTLKRLNGEVRVIMESTSIYQYPIALQLKERGLFISIVNAYEMKQFANIDFRGGKTDKKDSRTIASYGISYWDKLVEWQIPKDTYFNLDLLNRTYMNAKKHRQIILQELQHYIDCAMPGMDKELHSLNLSTKKDFMLDFVEKFWHRDEIVNMTEAEFTEVFTAWAKKKGYRPVEGKAAKIYAIAKSCIPYYPANPTVKTILQYIVDKLSGVNRTLVTIVTQMIEEAKKLPEYQIVREMPGVGDPLAARFFGSVGDIRRFKNSKALVAYAGIDSPPDESRDFSSTHRHITKKGSKVFRDTGYEIMMALRAQKRTWEKVADCIIKLNT

SEQ ID NO: 118286 - protein, 477 aa, unidentified
MEEKIFKFNVDWTKSSFFCGMDVHKHELTAAIYSEDDSKTEFLKTNVFQVNSQGLVQLWNFVKKYQPDGFAMEATGIFHHVIFNFLTKKREFVRWPFKISVVNPSDAKGLPGRPKNDKMDAINLAKYLSKGLLKNGKAIVQVLEDIKAIFRMAAQLERDRTALKNRIIKTLDRAGIRPRRLSLNRDWVVDLIHHLVEYEGTLGAFLQSAVKDENHPLQKHHTKIIKNIAEFVPFFEFSLTHAQRVLIRQNLVELEFKTGRKSLLAVEVEHMLQNHPTLRKHAHNLATIPGISPFAAVWILAETGNIKQFPKHRSFTAYCGCCPRVVSSAGKVYSAHTSRHSNSYLRTIFFNAATVVCNLLKTDSWLKDYATRIVKRKALRSHKLARCIVAAKISRIAFAILRDGIPFNPEPLRNNQTNKTKTIDTHFTIADRKLIRRARNVLNRVREMDELGLLGSRAETLAAGLDQILQGKKIQMI

SEQ ID NO: 118287 - protein, 348 aa, unidentified
MAVTIVEAEPTVVGGVDTHLDVHVAAALDRIGGLLGVESFPATPTGYRSLLGWMSGFGPVTRVGVEGTGAYGAGLARFLGRSGVEVIEVDRANRQARRQHGKSDPADAIEAARAAQNGRACGLAKTRDGNVEAIRALLVAKRSARSTRIKTINQIRQLTFTAPDELRERMRGLPTVPLTLEAASLRPRAGGDSVVFATKLALQTLGRRALSLDAEVARVDEVLAELVADTAPSLLEVYGVGVDTAATLLVAAGDNPERLRSEAAWAHLCGVAPIQASSGKVTRHRLNRGGNRQANSALWRIVMVRMRVDAATRAYVERRTKEGRSKLEITRVLKRYVAREVYRHLPRS

SEQ ID NO: 118288 - protein, 369 aa, unidentified
MNRLFVGMDVHKEKIVAVGLPEEGNHPVLREEFGGNDLSRLVKRLRQIAKSHRVLACYEAGPCGYGLARVLLGAGMECRVAAPSLIPRRPGDRIKTDGRDARELALAFRANTLSFVRIPSREEEEVRGLIRCREDIAKEVRRIKHVIAHWLLIHEHRPPKGVKGWSQAHWRWMRGLELSSLDRTVLDHYLDVLHLLVERLNQIEQQVVALAETATYRERVTRLRAFKGFSPLAAMRVIAEVMEFGRFPRAAAFMKFTGLVPSEYSSSDRVRRGRITKAGNSHLRCVLVEAVQRGTRNAHLGRDMLKRLACVSGPLREVALRCLTRLQHKFWKLTRRGVAGGKVKVALARELAGFVWAMMTLPETAEAAA

SEQ ID NO: 118289 - protein, 367 aa, unidentified
MKKISTVAAQKSERVEAQKLTIGLDLGDRSSWYCVLNETGEVLLEQKLATTPKAMKEVFGGMPRSRIALETGMHSPWVSRLLSELGHEVIVAHARNVRLIGESRRKDDRFDAHTLARLARIDPELLGPVRHRSRKAQADLTVIRARAGLVRARTSLINTARGLTKSYGERLRGCSPRKVNRELAEGLSPELQSALQPLLNEIESLSEGIREYNERVKQIAAQSYPEVARLEQVKGVGTLIALTYVLTLEDPRRFRKSRDVGCYVGLQPGHRNSGQSEPQMHISKEGDPYLRTLLVQGAHHILGPFGADSDLRRWGLKLAERGGKNGKKRAVIATARKLAVLLHRLWVSGEAYEPLRNSNQRAMPAAA

SEQ ID NO: 118290 - protein, 403 aa, unidentified
MERTAGLDLASEEHRLAIVEADGRRLEERRIVHSEEGLAALVRRLRLLRVSRVAIEQPNGLVVDRLLDAGIAVVAVHPNQLAAARDRYRAGGGKSDGFDAYVLAELARTDMHRFRLLEPDSDETKALRALTRTREDLVEQKVALANQLRAQLDAYWPGARRIFADVDSPIGLAFLERYPSPADARSLGTKRLAGFLARNGYCGRRSPEELLARLRSAPEARTGETELEARRAVVLALVATLKPLVEQIKLLTSQIAGAVRAHDDGHIFLSLFRDPKSVVTAAELLAEIGDNRDRHPQSSSLEAIAGQAPVAVQSGKKKVACFRWACNKNLRAAVSVLADSSRQHNPWAADVYQRARARGHDHPHAIRILGRAWLRIIWRLWHDRSPYDPNRHGNLNRLLAAKG

SEQ ID NO: 118291 - protein, 322 aa, unidentified
MNVWVGIDISKDFFDAAWVVDGHRHHVQLANRDAGFKALLEQAPAEARFLMEATGTYYINLALTLHEANRYVSVVNPVRVRNYNKADMARSKSDKSDAYSIARFGTEKQPAPWRPLTPDMAKMQQLRAVADKIGLQISMLRNQKHAFTQSRLACKEALDIIDCSIRFQTKLLDVALLELDTMARTAFPRQMDLVTSIPGIGQETAARLMALVGDFTRFETSRRLVSYIGLSPTLKQSGSSVRSRGHISRMGNKHVRRAVFQCALSAIRFNPHCKVMWERMKEQKKPSKLVLIAIANKLVRTAHALIRSDKPFDPNFANFSLA

SEQ ID NO: 118292 - protein, 370 aa, unidentified
MQFIGIDLHTNRFTCSYRDESSPPQEKKGKRTQTFELTSQGLAQFYQTLTPETYVLVEATITTFAFVRLIQPLVKQVIVANTYELKQISLARTNTDKIDANILSRIVKMQVLSGEQAISAVVLPPEGIQQLRGMFSTYRLYRKQTTQIKNRIHSLLKEKLYGFTQEEIFDRKSRQRIRELENGSCLSFQLNQLFDLLEYSETCIESLKDQIMGQAEPYMKQIQILTSMKGVSVFIAIAIIADIITVNRFKNSKAFASYLRSAPKVSNSNTSVSIRGTNKKGRKISASLITQSLIHVLQASGKLCRWYNRLTQYKKPGLVRNGLRRKVFAEIYQMLKKGEYHYARDQKNHEAKMLHYRKFLEKRKILLKRA

SEQ ID NO: 118293 - protein, 346 aa, unidentified
MKTTANLPIIGMDIAKTVFQLHIVDPDTGELERIKLKRDRVSAFFANRQPSLVALEACGGAHHWGRTLQAQGHTVKLLPAKQVRPFVLRDKTDARDAQAIWVAAQQFHIREVPVKSEQQQACLALHRMRAQLMKIRIMQTNALRGLLYEFGIVLPEGHRILLQRVKAEMSQAQDRLPAVITESVLEQLGRVDRLQEDIDHIDKRLVALGKQNQQMLALQTIPGIGPLTATALVATATDLSGFDSGRQFAAWLGLTPRQTGTGGKIRQLGISKRGDAYVRTLLMHGARAIIARSQRTGWINALLARRPYSVVVAALANKLARTAWAVLIKGKAFDQVKWNPVELATA

SEQ ID NO: 118294 - protein, 463 aa, unidentified
MSKKRTREGTAKPNRPQVDWKASDIVHPDAAGIDIGGSEHWVAIRPDRDEQPVRCFDCFTADVEQMAQWLLQRGVRSVAMQSTGVYWIPVFEILQQHGLEVYLVNARHTKNLPGRKSDVAECQWLLKLHTFGLLNNSFQPSATIRRARTLWRHGGGLVAQASSTIQRMQKALTEMNIQLSTVLSDLSGVSGMAIVHAILDGERDPRALAALADPQVKASKQVIAKSLEGNWREELLFVLAQEVGLYRTYQDKIAACDRMLQPLLQTMPPKVDLRTQPLGPRPKGKRARGNAPKFDLRTELYRMTGVDWTQVDGIDVQVAQSVIVEVGVDLKEFATEKHFTSWLGLCPTNESSGGKILNRRTPKVVNRAKVAFRQAATALLRSQSYLGAQYRRLRTRLGAPKAITAMARKLACLFYRLLKHGQQYVDKGVQYYEQRHREQQIRLLLKRAKQLGVEVVTPATTNA

SEQ ID NO: 118295 - protein, 401 aa, unidentified
MQDTQQHGAVDVFIGVDVGKGQHHAVALDRNGKRLYNKALPNDEVKLRALIAELRTHGRLLFVVDQPSTIGALPVAVARAEGVLVAYLPGLAMRRIVDLHAGEAKTDARDAAIIAEAARSMPHTLRSLRLADEQLAELTMLCGFDDGLAAQVMQTSNRIRGLLTQIHPALERVLGPRLDHPAVLDLLERYPSPAALAGTSEKTLANRLTKLAPRMGKGLAAEIVQALSEQAVTVPGTQAATIVMPRLAQQLAALRKQRDEIAAEVERLVLAHPLWPVLTSMPGVGVSTAARLLTEVAHKAFASAAHLAAYAGLAPVTRRSGSSIRGEHPSRRGNKVLKRALFLSAFAALRDPVSRAYYSRKIQQGKRHNQALIALARRRCDVLFAMLRDGTIYQPKSAPNA

SEQ ID NO: 118296 - protein, 361 aa, unidentified
MKKPAQHLIAEVPRRQAKVERTIGIDLGDVWSHYCTLNQDGEIVDRGRFRTTPKAIEKWFVDVPTARVAMEAGTHSIWISEQLQELGHEVIVANVRELRAISHSDRKSDQVDAEKLARYARLDPEILRPIAHRSVEQQEALTLIRARNLIVRLRAAAVNAVRGLTKSCGHRMPASTTGTFAKRSLSVMPPGLAQALGPVLEQIAQMTLKIKQYDRQIQQLGQTEYPETQALLKVHGVGPITATTFVLTLGSKERFKQSRDVGCYLGLRPRRSQSGDRDPQLGITKAGNTYLRSLLIECANHILRPHGKDSSLRQWGLHLASRGGKQARNKAVVAVARKLAILLHHLWVTQQPYMPFYEQAA

SEQ ID NO: 118297 - protein, 407 aa, unidentified
MNKPNYEVKLMPQLEKACGLDLHKDKIVGFISDKEGRQQELKEFGTFTDDLFQIREWLSANEIGHCLMESTGVYWIGLYNVLTEGGIKVVVANPQHIRQIPKRKTDRKDARWLCTLLLNGLARHSFVPDAVQQRLRDLCRNRIFYTQSQTKTTNRIVKLLERANIKIRSVSSVITTKSTLEMIRLLSAGENDMERLLLCLRGKLKSKKEKMRLALKGVLSESDRQILGLLLADYDHIENQKLAIEKIVKKVIADRYQETFELLQDISGVGPLGAQVIIGEIGDDMQNFPSADHLTSWVGVAPGNNESAGKVKNTGIRKGNKYMRVALVSVAWSAVRTKDSYWKALFEHLRKRMKAQKAIIAIARRMLKVIYKVIDQKIKYQEKGINHFIDLQRRNFERVQLLRVSNK

SEQ ID NO: 118298 - protein, 404 aa, unidentified
MIFVGVDWAEDHHDICVMDQDGAVLGKRRVPDSVAGIGELHELVAEHAEDDEAVAVGIEIDRGLVVTSLVAAGYQVFAINPMASSRYRDRHGTSGAKSDPGDAKVLADLVRTDRHNHRALAGDTDLVEGVKLVARVHQSAIWGRQRQLNALRSALREYYPAALVAFGTDLSHSDATAVLALAPTPELGRTLSRSKIASALRRGGRIRNVERRTEEIQTALRAEYLQAPPTIASAYGTITRSALRLIETYTAEIGSLEAALSEHFEKHPDAKIVHSVPGMGTVLGARVLGEFGDDRTRFANAKCRKNYAGTSPITKASGHSRVVLTRFARNRRLSDACDQWAFCSLTRSPGARRYYDELRARGKTHRQALRQLANRLVGILHACLEDNTLYDETVAWQAAEQSAA

SEQ ID NO: 118299 - protein, 349 aa, unidentified
MNILAMDLGKSKTVFCLYNSENSKHRFGKVVTRPKQVHDLLVESSADRIVFEICSPAGWIYDIAKTLNFHVQVANPSTEGWRWKNVKRKNDREDALKLAKLSAMNQLPTVHMPKPEVRQKRSFIQYRQRLVKRVVQIKNSIHSILDKEGYSMSRGKTCWTKRSLEQLEKMALPLEKCAFNNLWRGQLHVELEMLKAAKKCLVEVTSKLDTQAKTDEQNQRLQTIPGVGPRLAEAVVAFIDEPERFNSSKQVGNYAGLTPKQYQSGSMNRQGRISGHGNKLLRALLVEVSWVGLRHNSWMRETYERLLRGSASRKKIAITAVARKLLVRCWAMLRDEQPWRNEVSSSEAA

SEQ ID NO: 118300 - protein, 413 aa, unidentified
MRLFAGDDWAEGHHDVELMDAAGRRLAKARLPEGVAGIARLHAMIGEQLGEDADKDDAGQVAIGIETDRGPWVAALIAAGYTVFAINPLQASRYRERHGVSGAKSDAADAHVLADMVRTDSHQLRPVAGDTAQAAAVKVVTRTHKTLIWERTRCTQRLRHALRDYFPAALEAFEDLDAADTLELLARAPEPASAAKLTTAQISAALKRARRRGVAAKAERIQAVLRAAHLGQPDVVAAAYAASVRALIAVLITLNEQVKTLQGQVEAYFGRHPDAEIIASQPGLGGVLGARVLAESGDDPARYASAKARKNYAGTSPITRASGKKKAVLARYVHNDRLIDALMSQAFTALRVSPGARAYYDRQRARGAGHNPALRQLANRLVGILHGCLKTRTLYDEATAWPQHAAATEKTAA

SEQ ID NO: 118301 - protein, 411 aa, unidentified
MSKTLFVGCDVSSKRHTVCLMDPEGNSLGTQTFPNTLSGAQTLETWLLETLNQKGFSEVKIATESTSFLDLHLVDFLASSQRLAPFHPSLYQLNPKLVRNFKRAYPDKEKTDKVDAFVIADRLRFGRVPQPYESHQPYLPLKRLTRYRFHLVKAIAREKAYFLTHLYLKFSAFSLEKPFASLFGATSLALITDFSPDELVHFPLEDLTQFILKTGKNRFKDPEGVVEAVKRAARESYRLRPALASSIDLILATILQTLRALQEALKEVDRAIEKEFEAFPNTLQSIKGIGPVYSAGIFSEIGEIRRFPREDALAKFSGLTWRKHQSGNFEAEETRLSKSGNEYLRYYLIEAANALRVHNAEYKAYYETKFKEVTKHQHKRALVLTARKLVRLVYALLKKGQLYRANYQQEA

SEQ ID NO: 118302 - protein, 474 aa, unidentified
MSERTVRRLVGIDLGIASQHTVRVLDGDGNLVKAARCVPAVASLTVLEQAALAGTPAGTVLEVIFEPTGPAWFPIAVFFSARGHRVFRVSSAKASDLRKFFRKHAKSNGIDADTLARLPLVDPAGLRQLELAEAGAAALDRRVRACDRLTQAATAHKVRIKDLARQLMPMTPLTADLGQADLAVLERYADPRALVKTGEPRLTRLITKVSHGQQGAERAAQWLSAAVSAIELYGDHPAVPYAELAAEVATEVCLLKAIAAELAAHAREREKAYLLTDTGQLARSLPGFGQIGAPALVAGMGRPGRFADGAHFKSYTGLAPRASETGETDRKGEPMSKAGPSLLRTTLIRAADHARKVDPQLARIYWIQMTERGAGHLKACCVTAAHLAERAWAVMHRGTPYVICDNDGNPVTPEQAKKIIAEKWTVPEDVRKRRRSGKQKGKAPQQAPAGPGKRGDLPRPRSSRLPRLPVKRSP

SEQ ID NO: 118303 - protein, 342 aa, unidentified
MKQLYLGIDWGKKFSHFFGFDQDGVVVVQGRLNTLDMDEWVKMLATLKDYAVHAAFEIGSHYDWLYDLLNEHCKEVSVIDPAQFAIISRSQRKTDKIDAQKIAEGVRRGDLPVVHVPDKQTRADRRLVAFTHWHSQQKGSVKGKIRSLLLAHRLECPFTDVTGIKARAWLSEQAMRQMDLQAQMYLRMLLEQIELLQQQRKELDTHVKERAGSYEQAEILDSVPGLGNLAILAVLSAIAGVSRFPGPRQLSSYFGACGSVHQSGDTLRLGSLTRRGNVHVRWLLSQSLQHLHRKDAKARQRYMKLKRKKPRGVARAAQVRWLTEIIWHLLSKNQAYRIKKAA

SEQ ID NO: 118304 - protein, 414 aa, unidentified
MEKLLERCAALDVHKRQVTACAHVPDRKGERAELRAEFETMTPDLLALRDWLKGLGVTHVAMEATGVYWKPVYYLLEDDFELLLVNASHVKNVPGRKTDVADAQWLCQLLEHGLLRGSFVPPKPIRELRDLTRYRKSLVWERQREANRLQKLLEDANIKLASVATRVLGASGRAMLAELCEGRNDPEALAALARGKLRRKLPELRKALTGRFSSHHALLVSHLLSHIDYLDETIAALSAEIEERLRPFEREVQLLTTIPGVAQRTAEVILAELGPDMRRFPDHRHVAGWAAICPGNEESAGKRKTGKTRKGDSWLRTALIEAANSAAARTRDTYLNAQYVRIKRRRGHSKAIVAVAHSILVAAYYILRNAKPYEDLGGDYFLRRETPERLTRRLVRQLERLGQSVTLEPALEAR

SEQ ID NO: 118305 - protein, 415 aa, unidentified
MAETDVFCGIDWASDHHDIALVDRDGQLVAKARIGDDTHGLAVLLTLLAEHGDAPERPIPVAIETSRGLLVAALRATGRRIYAINPMAAARYRDRGAVSRKKSDHLDATVLANILRTDASAHRPLPADSELAQSIAILARAQQDAVWDRTQAGNKLRSHLREYYPAFLAAFDEPAKFTSAVARHILAAAPTPAAGGKLTPGKLRTLLLRAGRQRGIETEAERILAALRTPQMRQLPLVEEAMAQRTLALLRQLDAACQSAEQLEAKVAASSNQHPDAEIITSFPGLGLLLGARVLAELGDDKNRFADARAVKAHAGSAPITRASGKKLSVRVRRVKNDRLATAGYRWSLCALLASPGARARYDRRREAGDGHAAALRNLNNRFLGCLHHCLQTREPYDEQTAFPTHAAKNLGTAA

SEQ ID NO: 118306 - protein, 423 aa, unidentified
MSYRIAGIDVHKKMLAVVVADVAVEGEYNFERRQFGSSPDQLRLLTEWLVEQKIQEVVLESTAQYWRPVWQTLEQHWRAECQRWEGAGPMAGTLHLAQAQSNRAPRGRKKDFADAERLLKRLVAQELILSFVPDAEQRLWRTVVRRKYQLTCDRVRLQNQLESLLEEAHLKLSSLVSDLLGASARRMLKALADGETNPATVAALADRRLRATQQQLCDALGASKELNPVYRRLVKMALEELQLIEQQMDQLDHEIADLLSQHQTAVHRLAEVPGLGVDSAHQIIAEVGAAAATFPSEKHLASWVGVCPGQEESAGVSASNRSPKGNRFMRRLLNQAANAAVKVKGSIFEIVFRRLLPRLGYQQAIWAIAHRLCRLIWKILHQGVRYDERGPAVSQRSRGARTAKMIRELRNLGYNVELSGNPA

SEQ ID NO: 118307 - protein, 340 aa, unidentified
MLYVGLDIHTKHIAVCVLSETGQVVQRARVRGIEEMLRLLEGLPDRFEVCYEASCGYGHYHDLLKPLAARVLVAHPGRLRLIFRSRDKNDRKDAERLAKLLYLGEAPTVHVPSLDVRTWRELINCRGQVIAKRTRAKNALRALLRGAGVVPPKSPGLWTKKGLAWLRQLGLPTASQQLRRDLLLEEVEALNGQVRRIEQELNRRAQQTPAVARLRSIPGVGSRTAEAVVAFIDDPHRFPHAKAVGRYFGLVPSQDQSGDKNRLGHITREGPAVVRQLVAEATWQAARRSPTVRAFFERTQRGDPQRKKIAVVATAHYLVRVMWALLKRGTVWQENEAPGK

SEQ ID NO: 118308 - protein, 452 aa, unidentified
MGEEEISMKIVNPKAAGIDIGSRSHWVAIGQGEKDYREFGVFNEDLYAIASWLKDNGIKTAAMESTGTYWQSLYAVLVSEGFEVILCNGKFTKNIKGKKTDIQDCQWIQKLHSLGLLSSSFLPDEKTEHLRTLCRHRSGLQDNAASTSKKMQKYLRLLNLRLDVVVKDVCGQTGLKIIKAICSGETDPDKLSDFRHYNCRKSKEEISRALKTNGRKDYLFALNQELEMYEMLETKIVQCDEEIEKLLHEIIDNDPDKKQHYIEAKPHKRINKNDPKNIDLNLMSYQYFEGIDLMAIEGMSHLTVLSLMSEVGLEGIRRFPTAKHFVSWLRLAPNNKISGGKVLSSKVPKGSSRLKIALRRAANAIGNLKDSTPLSDFFKRINFRKGRVSAISATARKLAVIIWNMVVKCIPYNNPEGYLFLDQKRKLGIVKRINKQITRYGLSTEDLDIVTG

SEQ ID NO: 118309 - protein, 338 aa, unidentified
MQTEFYVGLDLHSNNTYVGVIDEQERRVVKGKFPNKLEVLLAVLEPYREHVVGVVVESTYNWYWLVDGLMDNGYKVHLAHPAAFQQYSGLKHTDDEHDAFFLAKLLKLGILPEGYIMPREERQLRDLLRKRMKLVRQRSTHILSFKSLLSRNLGFTMPSNEVKKLEEDEMSDWFDNQHLALSAKVNIGAMNSLKWQINEIQSVAIKAAKLKPQFEKLLSVPGIGNILAMTIALETGDIQRFPSVGDFASYCRCVNSRRISNEKIKGSNNRKKGNKYLSFAFVEAAQKARRYCPPAQAFSAQVDQDQQDRGHQSPGPQTGPGVLLHHARSSGFRRDQDI

SEQ ID NO: 118310 - protein, 321 aa, unidentified
MTDSVLGIDIGKQKFEVALLVNGKIKSKAVKNSKEGFATLSAWLKKHNAGRVHACMEATGSYGDELALHLHDADHTVSIVNPARIKGFAQSELIRTKNDAVDAGIIARFCLAMQPEPWTPLSPAIRRLQAVVRRIDALIAMRTQESNRLDVSHSLVEPSIKEHLLYIDSEIEKLKAQVRSEINNDPDLKSKKELLISIPGIGDTTIAIILSELDFQKFESVKQVIAFIGLAPKETLSGSSVKGKPRICKIGNARLRKSFYMPALVAMRFNPIISNFQRRLKENGKKGKVVVCAAMRKLVHIIYGVLKTGKPFNPDYGINLA

SEQ ID NO: 118311 - protein, 346 aa, unidentified
MMIIGCDFHPSWQQIAWLDTETGETGEQKLVHASGDAKRYYAQVPGPALIGMEATGNSQWFVELAQELGHQIWIGDAAQIRASYVRKQKTDRRDAAHILKLVVEGRFPKLWTPDQEQRDLRQLVLHRHKLVEIRSRVKNELQHLSLNKGMQRKAKLWSQAGQKLLRELPLQPWATCRREDLLGLLGMLNEQIGKLDEAVQQAADEHPQARLLMTQPGVGPNTALAFVLTMGDVSRFPRGKQVASYLGLIPREESSGGRQKLGAITKQGNRLVRSLLVEAAQIAVRLDPGMKKQYLHRCHQKPKGVAKVAAARRLAVRLYWMLRTEKAYPEIVRIESSPRVALVGAS

SEQ ID NO: 118312 - protein, 349 aa, unidentified
MRFYNQPHAAYCGVDLHARTMYLHVLDAQGQTRFEKNLPARPDAFLDAIAPWRNGLVVGCECMFAWYWLADLCEDQHILFVLGHALYLKAIHGGKTKNDRLDAAKLAALLRGGAFPQAYVYPRAMRQTRDLLRRRTFFVRQRAQLLAHVQNTNSQYNLPPIPQKLSFAGNRDEDELAGRFAHDSTQASIRADLRLTAAYDEQIRTLELHLTRHAKVDDPVTYQLLRSVPGIGPVLALILLYEIHDIGRFPEPGNFLSYARLVRCEHESAGKKKGFGGKKIGNGHLRWALGEAACLMLRCHEPAKQWLARQQKKGSKARALGILAAKLGRTVYHLWRKQVAFDARRFLTS

SEQ ID NO: 118313 - protein, 385 aa, unidentified
MSQFSGSRQAALDYNSTIIGAVELSEKKWVVAVQLPGVGRHSRHVLEACGDGLASFVERLKARCAAAGHRITRVVLTHEAGRDGFWLARFLARRGIEVHVIQPSSLPVDRRARRAKTDIIDVEMLLRTLMAWLRGEPRVCSMVPIPSEADEEARRAYREREDLTGERRSIVNKIDGILATLGVKGYKALRRDRREQVTALRQPDGDPIPQEARARIGRLLDRLELVLKLIEQVESARDAVLKKDAPADEAERMIRSLTDLRSIGPDFATLLVREAFVRQFRNRRALGGYVGLGGTPFSSGGSEREQGIGKDGNRRLRAAMVELGWMWLRWQPDSALSTWFRARVGAMGGRIRKIMIVALARKLLVALWRYVKDGVIPDGAKMKAA

SEQ ID NO: 118314 - protein, 429 aa, unidentified
MNCTQNKKIEQVKETTMIVGIDVGSEKHYFRAFNWRGIELTRKPVAFSNSMEGFNSFYNTIVELMQKSELEEALVGIEPTGHYWFDLGQFMGEKDIKFVMVNPHHVHKTKELDDNSPSKNDRKDPRVIAGLVRDGRYFYSYMPTGAYAELRNASNRRFVLVEEQTRAKNRLQKWIAVYFPEYKGIYTHIDAKGGMLVLKKAPTPEEIVRLGVEGIIKIWKDAKLRGNGHKKAMLILAAAMRSIGLKAGLTEARMEIQDLIEDYELQTKRLERVNDLIKGLCQQVRYADKLLEIKGIGITTVAGFIAEVGDITRFDSTKELQKLAGLELVADSSGKHNGKTKISKRGRKRLRYLLFEAAISVVGKNEEFKEIHRYYTTREKNPLKKMQSLIVVACKLIRVFHAILTKGIRYDASKMLKDIRHPGEQLKAA

SEQ ID NO: 118315 - protein, 354 aa, unidentified
MNIKYIGMDVHKETISIAVMNGDGKLVMESIIETKASTILQCIQGVRGDLHVTFEEGTWAAWLYDLLKPHVTELVVCDPRKNALLKEGNKSDKIDARKLADLLRGGYLRSVYHGENGLRTLKELARSYLTISKDLTRVMNRVKALYRSWGIFCGGQQVYAPRHRAEWLNKIGEAGVRRRAEFFYQQLDALRALRQAVRRDLLAESRKHGATKLLRQIPYIGPIRAALLIALIQTPHRFRRKRQLWTYSGLAIETRDSAQYRYVAGKLQRSKKPQQVRGLNQNHNHDMKAIFKNAATMASSREGPFHDFYEALLTKGMKPAMARLTLARKIAAITLILWKKGAHFDATQLKPQAA

SEQ ID NO: 118316 - protein, 447 aa, unidentified
MQVHPKMKWTYVGADSHKSTHTFVFLDCFYTKLGELVVSSTPSDFEAFYQDALKLLQPNTEFVFAFEDISNYGRSLVRFLLNKGHIVKHTNASLVANERKSHSPSLKSDSIDAECAGRVLINKFDDLPVANLDERYFIMKVLVARRQSLAKGIRRLKSYLHSLLFEQYPSYFQFFANLDAKSSLAFFYRYPSPHALLASSIEELTDLLKKSSQGTLGDERAELIFSLVQSEGVSQCMYQKQRDFTVKSTVKQLKSNIDEKAKLEIELEKFLQCFDIPLTSMKGIDTITACRLIAEIGDASRFKNASALARFAGVAPATYSSGSTSVQYATNRGNRTLSGIFYDLAMNLITPKGKNKMSLNPFFYEYYHRKLAEGKTKKQALKVIQRRLINIIYGMMKYKEDYINPPIAYINEQTGEIINDEEFDRHSDLNHNQLAHSQKQLATFKTS

SEQ ID NO: 118317 - protein, 392 aa, unidentified
MGCPMPQRNDLSRSLVPFQQDGTLVAVIELSRSSWLVAGIVPGLERHPLKKLAPDEDALLRLLHRWRDEAAKAGCAITRLAVAFEAGRDGFWLARWLRARDVEAHVIHPTSIAVSREHRRAKTDRLDTGLLKRAFLGWLRGEPGHCSMAAVPTLEEEDARRPSRERECLVGERTRIVNRMRGCLARLGIRGFGPASRGAPDRLEALCTPEGVALPPNTLAELRRDMARLRFVSDQIAEIEAARRERLRQAPAEDRPHAMVRLLARVIGVGVETADMLVHEVLRRDLRDRRAVARYAGLTGSPEESGARRREKGLAKAGSARVRRGMVQLAWRFLRFQEGSGLAGWYRARTADARAGTRKTMIVALARKLLIALWRLVTTGEVPEGVVLRPAA

SEQ ID NO: 118318 - protein, 332 aa, unidentified
MEMLAVDLAKQSFHVHGVTGDGEVISRRVGRAKLLALVERLGPRTIAMEACATAHHWGRAFIAKGFGVRLVNPRFVKPFVRGSKNDAADAEAIFDAASRPTMRFVPVKTTDQQDLQSLHRVRDRLVAQRTSLINHARGLLAEYGLVYPKGAARFGARARAGLAEAGLSTMARDTFEALLDELDGLEARLAKLDQRLVAICRENEACRRLMSLPGVGPVVATALVAAVGDARQFRSGRELAAWIGLVPRQHSTGGKATLGGVGRRANHYLRRQLVHGARAVALRLATKTDGRSRWFQSVIDRRGFNKGIVAMANKMARAAWAMLTRKETFAPA

SEQ ID NO: 118319 - protein, 365 aa, unidentified
MFIERTSVGLDVHARSVAAAAIDGVTGELVQAKLTPSHEHIRSWIQALPGPAAAAYEAGPTGFGLSRSLNRAGIRCEVVAPSKLQRPSGDRVKTDAKDAVHLARLLRLDEFTPVVVPSVEQEAARDLVRAREDARGDLMRARHRLSKLLLRQGFVYSGGRAWTGTHDIWLRRTGPELGSAATRMAFESDYDAVLTVRARRDRLDAAIAQMAAECEFTPLVRRLGCLRGIGILTGFALAVEVGDWDRFTGKTIGSFIGLVPSESSSGQTRTQGSITKTGNTHLRRLLVEAAWHHRPRYVVGKTMRDRWELAGPAARARGDEGNRRLHHRWNTMRSRHKRSVVANVAIARELAGWCWSLAILEDIKG

SEQ ID NO: 118320 - protein, 457 aa, unidentified
MPKHGRSLRSNAPQGEALSSFNPHAAGIDVGAAEIFVSVPHDRDPQPVRSFRSFTQDLHAIAQWLKACQVTTVAMESTSVYWIPLYEILVAAGFEVALVNPRALKNVPGRKSDVCDCQWIQQLHSYGLLRASFRPAEEIVALRSVIRHREMLITYRSAHIQHMQKILHLMNLQLDKVISDITGTTGLQILRAIVAGERDPAVLARFRDPRCKQPLDVIQRSLEGHYKQEHLFQLQHALALYDYYTELLAQCDQELAHAYTTLPVQADPEAMPLRPATQRRTRPRKHEPAFDLRTNLYQLCGVDLTAIDGCQAVTIQTVLAETGIDMRPWRTCGHFTSWLGLCPHRDISGGKVLRSRTKKTKNRAKIALRMAAQSLHHSDSALGAFYRRMRARLGAPKAIVATAHKLARIIYTMLKYQKEYRDLGAEHYEARYRERQVKHLKHKAARLGWTLVLVAPA

SEQ ID NO: 118321 - protein, 414 aa, unidentified
MLKIVYPICCGMDVHKSFVVACIATTNERGVTTYKSKRFSTFTGDLRRCAAWLAENNCKDVCMESTGKYWIPLYNILERTCNIVLAHPKYVKAIRGKKTDKRDAKWIADIFKHDLVTGSFIPLADIRQLRDLVRYRWKLTSFTTGEKNRAQNCLTVSNFKLDDVFSDVFGKAAFAITTRILNNPAEKITDVSNFRTKGMKATDEQVLAAVDGAMCEEQAEKLRIIRSHMDSLHLCKLNLESLILSVAEKYLPQLGLVMTAPGIQSFAAIGIISEIGVDMSVFPTSKHLCSWAGLTPQNNESAGKKKTTRISRAGAYIKPLLVQCALCAIRAKQFPEVRNRYLALKKRRGHKKAIIAIARILLTAIYNMLKKNEPYNPELYRKGDRPPTHREVSVGEAIFILQRQGYLVTAPPTP

SEQ ID NO: 118322 - protein, 355 aa, unidentified
MVMLAEQYHYVIGGDPDRDTIDLAVLDTVTGGVRAHLADTADGPGYERMLAWANEHAPQQRVWALEGTGSFAAGLARYLVEAGETVVEVGAVKRARGAKNDHIDAVRAAREALSREFQALPRARGLRAALRMVLATRAGVLVSRTKAINELKSLIVVAPEHLRAQLRGLSLARQLVRIEALQTPAAAEIEHRVTISTLRSIAARIRFLQHQTDELDPELAALVAQHPAGSALLAEPGVGPVVAAQLLVSWSHRGRVRDEAAFAALAGVSPLEASSGQRIRHRLNRGGDRDLNRALHTVAITRVRCHPETRAYHAAATARGKTHRDIRRSLKRALARRLYRRIQAATRPTTEPERP

SEQ ID NO: 118323 - protein, 434 aa, unidentified
MICAAMERCAGIDVGKRWLSVCILIGPLNGEPRVERRRFGVNVGDLQQLRDWLQREAITHVVMESTGSYWKPVFNVLEDAVKVYLANSQEVKNRKGHKTDDKDGWWLAHLLRHAMIHPSFIPPRAIRQLRDLTRRRERLNGDGTSEKNRVQKILEDANVKLGNVLSDVFGVSGQLMLEALLRGQAKPEEIAQFAKGRTKQNMPAIIAALEGHQMSEHHRRMIRYSLAHMKFIEEQIEEIDRDIAAQIHAAGLDGPWQLLQSVPGVQQRSAAKILAETGADMAQFPTQRDLGSWAGVCPGNNRTAGKNRSSRPTKGNPWLRSALTECSWAAAAKKNCFLKEKFWRITTKHGGQKNSALIAVAHNLLQLVYIVLKTGQPFRDRQAPPLNEQQKERLIRHHVRRLGKLGVRVHSLRAATGSLQNQPSACGADGSLTA

SEQ ID NO: 118324 - protein, 387 aa, unidentified
MTTDHLATALQTVVRVNDTKLFASLELSKSRWLVTVSAPGSEKLSKHVVIGGDGGALLNLLGRLRASAERRGGMAVQVVVIQEAGLDGFWLHRLLEANGIESHVVDPASIAVDRRHRRAKTDVIDGEMLLRTLMAWARGERRVCSMVRPPSPDEEDRRRLTRERGTLLKERTQHTNRIKGLLAGQGIADYDPLRKDRLARLDALRTGDGRPLPERLKAEIRREIERVDLVVSQMAVVERERDALVGMTSDPAPETAAAVLVRLKGIGPELGSLIWLEALYRGFSNRRQIAAYAGLAPSPWQSGGTDREQGISKSGNRRLRHALVELAWFWLRHQPASALSVWFRARVGQGRGRIRRIAIVALARKLLVALWRYATQGVVPAGATFKA

SEQ ID NO: 118325 - protein, 367 aa, unidentified
MENHSIVWVGMDTDAKRNHVALYRGWEKEPAAEWEAGMDGKGIKQLIERLKKEQGEVRCVYEAGPSGYPLCRKLRQAGIGCDVIAPSLIPRKAGDRVKTNRRDARNLGRLYRAGELTAIEVANEAQEAVRDLTRAREDVREDLTRRQHRLSRFLLRHGYIYQDGNKWTLKHWAWMGKIRFEDANLQAVLEESIRAVQQSQEQLKTYDARIEETAQKPEYEEKVGRFKTLRGVQTITAMTIVAEGADLRRYTTAPQFMGSVGLVPSERSTGDQERRGRITKTGNAHLRRVVVEAAWHYRHRSIPGAGVKKRRNGQPAAGVTIAERADQRLCRKFRKLVDRYNKKPAIAAVAVARELAGFVWAIGQQEL

SEQ ID NO: 118326 - protein, 360 aa, unidentified
MFTERTSVGLDVHARSVAAAAIDGVTGELFQTRLTPAHDHIRSWIQELPSPVAVTYEAGPTGFGLYRSLTAAGIRCEVAAPSKLQRPSGDRVKTDAKDAIHLARLLRLDEITPVTVPSVAAETARDLVRAREDCRSDLMRARHRLSKLLLRHGIVYYDGDAWTGKHDAWLRRQRFDIAATQLTFESDYDTVITTVARRDRLDDAIAAMAAASEFTPMVRRLACLRGVSTLTAFALAVEIGDWSRFTGNTIGSFVGLVPSEHSSGTSRVQGPITKTGNGHARRLLVEAAWHHRSRYRPGKTMRDRWELATPAARARGDLGNRRLHARWVGFIERKKKDTVANAAIARELAGWCWSLAVMEE

SEQ ID NO: 118327 - protein, 346 aa, unidentified
MKKIFIGIDFSKEKFDATLIKAEGLKECAPSAHEVFDNKTSGFRRLVKWVKAQSEGFPIDSWLFCGENTGGYSIGLSNYLYASAYDMWLECAYKIKHSVGLQRVKNDKADSRAIAEYAMRNYDKMIPYKPQSASLTCLREIFLYRHSLVRQRVSLQVRRDGKRLTQEKSDVRAFMSFTSKHLITEVNKAIAKCDQKIKDIIAADDELREIFDIITSMPGIGIQNATCLMVYTDNFQKFDMNARKIGCYYGIAPFGRQSGTSVNSRPQVSPFANRMIKSLLSQAALAAIRFDMNVYNYYQRLKERGKHPLLIHNNIKNKMLHALVAMVRDRVKYNPDYVYRTNKEIA

SEQ ID NO: 118328 - protein, 534 aa, unidentified
MARASKSKKPSFPASQTIHRPRGVISPRVQTVGPEHFGIVCVDCAKARSKWMLADFYGRVLVPPTVVEHTRTCLISMIRELRANLDQARIRDQIVVIERTGRYHRPIQRAFAQAGFEVRIIHPLTTKQHRQPANPGNKTDDTDLAAMHRGAVNGFGLLEPPADSLSIRLQLLARHRRDLVEKTVALRSQIHEHLHAVMPGYSKCFDDVYDAQIPLSIAREFGSARAILQAGVPGLIVHLRGAGIRVHAPTLEKILAWARSAPAAEDESDIHLRILAQLDDDRLSKVRGVRAIEAELAGLLVQTPYVLLMGIPGINVVSAAEFAGEMGPIERYATARAITGRAGLFPSRYQSDRVDYPDGRLVRCANRTLRRALMTIADNLVKCNDHFRVLAAGWRLHGKDARAVRVQVAGRFSRIAFQMVAGRKAYRHPCCQQHDYVLNKLLVFHTENGIGYEQLTMNLEAAVAQLPRSEYREEAVPLADELDRVLKKRGKGPRPLAEILPVVLAKLGVKPVRSPESGEAILTQPFVRRDRTTS

SEQ ID NO: 118329 - protein, 343 aa, unidentified
MYYIGLDVHKKTISYCVKDAAGQVHREGKIGATRLDLDSWIKTLPQPRMIAMEATIFTGWIYDFLLPHAEKVKVAHPLMLRAIAAAKKKNDRIDARKISDLLRCDLLPECHMASTEIRDRRRTLRYRNLVLRQVVQMKNRVSGLLMESGVSYDKQRLHKMGYCTELFSTNEEISDSIRPLLQIGREPILRGQRLDRALISSLERDPLLSERLRRLRTIPGVGPITALTWALEIGDYTRFRSVKEAISYCGLCSAEKSSADKVMRTPISKQRNKHIQHVLVEAAKMAPRYSHELALVRDKEMQRGNKNRATLAVARKLVAYLLAVDRRKQDFVPAEALAGEAVA

SEQ ID NO: 118330 - protein, 412 aa, unidentified
MEGETVIAGVDTHKDVHVLCLLDGLGRKIRSGSFRADPEGYDRLAEAIGDPGGCVVVGVEGTASYGAGLTRRLVELGYNVVEVLRPKRDKVRPGEGKSDPLDAERAARKAASGRGCSVPKSQDGWVEAVRQLYVARRLAVATSTSCVACAKSMLTTAPSALRERFRGRERPKDLMPLLARGRKAGDALEESVLASLRSVAAVWKEARSQVESCDARIRALLEANAPALLGVEGCGTTTAAALVVAAGDNPGRLKGEAAFSMMCGASPIPASSGKTDRHRLNRGGNRQANWALYEIAIKRMAYDERTRRYVARRTSEGKSRREAVRCLKRYIAREVYHVLMDPNPDGAAPEGPELAKMRKAMRVTQKKAAAELGLSAATLGHLERGKRRSTKLERRYYELLCELERTLPQTAS

SEQ ID NO: 118331 - protein, 433 aa, unidentified
MQEAEDEPLFADRAAGIDIAKAGIEVTIRVPSDTRRGGRQQETRSFRTTRKDLLALADWLRCWGVTKIGMESTGDYWKPVYFLLEAEGLDCVLYHAAQVKALPGRPKTDKLDSAWLAKITERGALPGSFVPPEEIRRLRTHTRYRRHLTQARTAEKQRIEKLLEDAHLKLSSVISDIHGVSGRAMLEAIAAGERNPATLAQLARGTMRGKIARLEEALDCAFVTEEHAAVLAMMLAAIDYYTARIEELTAKIEVLCQPYLRQIAQLDAVPGTGVITAQDVIAEIGTDMAVFPTAAHLVSWAKWCPQVAQSGGKRKGANASGRGNRYLGAALGEAAVSAGRTQSFPGAKYRRLVKRMPKKKALVATGNSLLTIYHALLSDPQAVYTDLGTDYYERRANIRRQARNHLRGLERLGYKVTIEPIDPATGELQAADS

SEQ ID NO: 118332 - protein, 351 aa, unidentified
MSHKTAATVALTIGIDTGKNTLHLIGLDDKGAIVLREKIARGRITARLANVPRCLIGIEAGMATHYVARELSALGHDVKQVPPAYAKPFRQGHKNDFRDAHAIAEAVQRPSTRCVPVKTDDQLDLQALHRVRSRLIGQRTAVINQIRGFLLEHGIAVRQGLRFLRQQLPDILAKRTDVLSPRMIRIMEDLSGDWRRLDERIQHVTEEIEVLAHGSEGCRQLMTVPGIGPIIASAMVAAIGNGAAFAKGRDFAAWLGLVPKQMSTGDRTILGRITKRGNRYLRTLFMQGARVILLRPANWAKHSFGPWLTAAANRLHHNVLATALANKLARIAWTVLMQARSYEARVEPRTA

SEQ ID NO: 118333 - protein, 347 aa, unidentified
MKHYAGIDVSLNSSSVCVVDESGKIVREVKVASEPVALIHCIQSFGVRVERIGLEAGPLSQWLYGALRECELPVELLETRHVKAALSAMPVKTDRNDARGLAQLMRLGWFRPVHCKSMAAQEVRALLTARKLVQSKLYDIEMSLRGILRGFGLKVGPTTSRSFAARINHLASGHPSLEMVAEALLSTHAAALCAFKNLEKNVRQISRADARVRLLMSTPGVGPLVALTYVSAIDDPKRFTSSKRVGAHFGLTPKKYQSGETDISGRISKIGDSSVRAVLYEAAHIILTRPIHGGALKSWAMRLAKRAGMKKAKVALARKLAVVLHRMWVSASTFDFEKANGCMRAAA

SEQ ID NO: 118334 - protein, 422 aa, unidentified
MKNTAARKLKQVPEGYLIIGVDPHKKKHAAVAITKDLTIRDRFKPDNTREGLEFLLRRVRTDMVKSDCRGIMFAIETGGHYWRNIAYYLDEKGIPFRFINQYTLKRRREGKDLNKRKNDYRDSEVAAQLLCTGEFVESGIPQGVYAELRTAHNAYRRLVKERTRITNLLKGLLDALLPEFVRVFKDPCGLTALSVLSTCSIPGVIAGMTEEEFIVIVEAQHHGRRLMRRKLGELRSLAMASIGIEAGARSVFMEVCFLVEKLKLIREQIQTIERTLIKLVDASEEGKYLLSIRGLHYIAVAGLLAELGCFKSYRSAKQMIKMAGSNPTESESGGKRRSRTPMSKQGRPVLRYCAWTSVIPMLRLNPDFRAWAKERRERPAHANPLNGREVVGAALNRLLRLSFALVKNQTFYRSPYLVEVTS

SEQ ID NO: 118335 - protein, 340 aa, unidentified
MIATTKFFIGIDISKPHFDVALMAVVNHVKQEIATARFDNTAPGIKLFEKWLKSQKTTFNGDSLVVMENTGIYHRLIWTFCSNRNLPIHIGNAAHIKWSFGIARGKNDKIDSIRLCNYAFKEADDLKATAALDPELMLLKDLISARTKLLKQRSGISVSVKELGNVNGKEHQKLIEKALKNAIEGIAKSIRNLEDQIKKIITGNQGFKQNYKLLLSIPGIGHVTAVYLIGCTGNFAGRPSGKELACYAGVVPFEHSSGISIKGKTRVHRMANKELKRLLHMCALSLIQHNQEFKTYYNRKKDERKHSMSIINAVRNKIALRVAAVIKNQASYKNNYKIAA

SEQ ID NO: 118336 - protein, 346 aa, unidentified
MAVADDLVLGVDTHKDVHVAAVLDRLGRRLAIRDFPATDAGNAQMARWLDSLGTVTDAGVEGTGSYGYRLARALTRHGVHVREINCPDRSRRRRRGKSDPVDAENAARAVLAGEATAVPKDRRGVIGELRMLVITRRSAVKARTQASNQIKAFLLDADDDLRNRLRALRKARFARACAALDPADGLNRALASLGRRWLTLDQEARELEKQITTLVAAQAPRLLACYGVGGVTAAQLLVTAGANPGRLRGDAALAALCGASPIEASSGKTSRHRLNRGGDRAANNALWTIAHIRMISDPRTRAYVAKRTATGNSRKEIMRMLQRYIARELYSLIIDAFVPVTAEVLT

SEQ ID NO: 118337 - protein, 370 aa, unidentified
MLNTTTFVGLDVHARSIKAVALDAMTGEVRSATFGYDAAEVAGWVSSVDPSAKCVYESGVTGFDLQKRLASMGIDCVVGAVSKMIKPPADRKRKNDRNDAEFLARMLSVGNVVEVWVPDDGCEAARDLSRALDDAREDPKRCKQRLSKFLLRHGYAFSETTPTGRRKGSWTAAHWAWIKSISFPEKADDDVLAYYVDAVRQAMEDKARLERLVEAEASKPRWKRRIDSIRCLKGIDVTSAADLVFEAGEFSRFKSARSFAAWLGLTPSEHSSGESVRQGGITKAGNKHLRRVLVESAWHYLGCSPHSKDLAKGQVPDPAARRHAAKGVRRLVERRRAMLERGVHKNKANVATARELACWCWAVGRMIENG

SEQ ID NO: 118338 - protein, 372 aa, unidentified
MTKSIRYVGLDVHADTIAVAICESRGDGRSLGTIPNRPESIRKLVKRLEPVSTLRVCYEAGPTGYALYWQLTGLDVQCEVVAPTLVPVKAGDRVKTDRRDAEKLARSYRSGDLTAVWVPDGAHEALRDVVRAREAAKKDQLRAKHRLSKFLLRHGRRPPEGTNAWTGKYWNWLSTVRFEHTAQEATLLDYRTEVERAADRLDRLEKAIDEAVQDAPAQMKAVIDALQALRGIAKITATTMVTEVGNFSRFAKPNQLMGYGGLVPSEFSTGNSRRQGAITKTGNAHLRRVLVEAAWSYRHRPSLCGAHKRRQQGLSEEIKAISWKAQQRLYTRYWRLTSRGKIPGKAITAVARELVGFIWAVGVQAEREAAAA

SEQ ID NO: 118339 - protein, 458 aa, unidentified
MPQSKAAEEPQFAAFIALDWADRVHAWALQVAGSTQRETGRLEHTPEAIAAWAQQWAVRFAGRPVAVALEQSRGSLVYALSQYQHLVLYPIHPKTSYDYRRAVFPSGSKDDPRDADALLDLLTRHRDRLRALQPDDEPTRKLQILVEKRRQLVDQRTAQTNRITEQLKLYFPQVLNWFDELATPIVAAFLQHWPTLPDLQKASPQQLRAFFQQHGSRSADRIQQRLQEIAQAKPLLQDAAVIEPAVLLVGVLLAQVAALNAGIRAFEKAIEAVAKAHPDYFIFASFPGAGATMAPRLLAAFGSQRQRYRTANELQSFSGIAPVRDASGAHERPYFRRCCPKFLRQSFQEYAALSLQQCDWARAFYQKQKDHGKSHHAAVRALAYKWLRILFRCWQSKKSYQEEVIIEARKAKPAPLRHRSEKAADDRSGGRPVAPCGKPVNAGLIKIGDLLKFLLAQA

SEQ ID NO: 118340 - protein, 368 aa, unidentified
MKQYKLKAAPTAVSKEGNSQKEAKANRIAIGVDAHLKSYQAARKIDNGAVGVAQTFRSKEALLLYVEKQRGQAKEVVVVYEAGPLGYTLYRQLKAMGLECLVCAPRSGEQKRKRRKNNAIDARSLTSELANYLNGNEQALQLVRVPTEAQEQARVESRQHDALVEQRKRIGAMGNSLLLSQGYGSWSNWWRAKAFERLSKGVAPWIVKHLQRWVGVLRELDQQIQQAKVELTKQYQGARPKGMGAPSLAQLNAEVLDWNLYSSGRKIGCLAGMVPSEWSTGEAQRLGSITKVGVPAIRRIITEMVWRMILFQPEYKAVQKWREVLEGPNRGLKKKAVVAIGRQLMVDIWRLQTGRISAQELNLIMVEG

SEQ ID NO: 118341 - protein, 443 aa, unidentified
MQVLYSRCCGLDVHQKTVVACVMITQPNGKVDKSIRTFATTTTTLLTLGDWLASLQVSHVAMESTGVFWRPIYNVLEDQFELILANAHEIKALPGRKTDVRDCEWIADLLRHGLIRPSFIPAKPVRVLRDLMRYRKSLVYQHTQQINRLHKVLETASIKLTSVVSDVWGKSGQSMIKAIIQGESDAQTLTELARGTLRGKLPQVQEALEGRIQPHHRMLLQQIFAQLQFLESSMQQVLKEIEAQMEPYQAVVELLMTHPGVQAVAAMGVVSEVGIDLSRFPSAKHFASWIGVCPGNHTSAGKRKHGKTTKGNAYLRALLAEIVWGISHTKDNYLSAKSHRLARRIGKTKAIVAVSHTVAVNFYHMITKRIPYRELGANYFDTVDRERLTKHTVKRLEALGYEVTLTPKDSKAVATPKLPPPPRSPRTAQRAHTRWLAESLPQR

SEQ ID NO: 118342 - protein, 475 aa, unidentified
MNLKGTKKKNQVSNVNIFEQQEFLKKIEVVRENLTASTWHELETKGKFDKNAKLSFICDDMLILGCDVGSETHYLRAIDTRGRELSKSAFSFSNNADGFSKAKEWAVKIAAEYDKKQIVLGLEPTGHYWFCLATWMISNGLSVVQVNPYAVKQTKELEDNSQLKDDTKDPKLIANLVKDGNFGMPYLPEQLYADLRRLSMFRDQLNEDRIRSINRLHRELKIYFPEYKEALGKTEGTFSLELLKQAPFPDELTALKEDGIRQIWHNAKLRGRGYSRAGEILEYAKASVGIREGKETGKLVVQWFVQKILELDAELALIETQINQKCLEIPHTDKVLEICGIGENTLSGMMAEMGDISRFDDVKEIQKLSGLGLVASSSGKHKGESKISHRGRKRLRYWLFQAAKSAVAHAEEFKELHVYYTTREQNPLKKMQSLIAIACKLLRIIFTILKKGIKYDPRKMLKDIRRESRQESLAA

SEQ ID NO: 118343 - protein, 329 aa, unidentified
MQKELLYCAIDVSKDRLDVDGAALALPEQLGNDQAAYRQLIKAAKKYSGPVQFVFESTGPYHLGLALALWEAQMALSILNPARVRYFAKAQGKAKTDPLDKQVIGAFAQAFRPAPTPAPDELSRQLTELLQRRDELISSRAAEQNRLGQSRHRLIKEQMGRLMAQLTEQIKQIDRLMHKLVGSSAELQSKVEQLCQIKGVGQLTALTLLITVPELGTLGRNRISRLVGLAPLNDDSGEQKHKRYIQGGRKRPRAALYMAALTASQHNAVLGPFYQRLLKAGKPKKVALTAVMRKLLICLNALLCKWAKQKGSLAAFCSAKASVTQPLNA

SEQ ID NO: 118344 - protein, 380 aa, unidentified
MKKELYLGLDVHKDCIITAVAEEGRKGEVRDTGALSNDLHAVEKWIGRLRKVHGKETQLRACYEAGPCGFGLARRLRQLGVECEVVAPSMTPTRSGERVKTDKRDARKLARLLRAGELTPVYIPEATDEAIRDLCRARTDAVDDRRRSRHRLKGFLLRHGYRYQGKSAWSAAHERYLRELVLPHPAMKVILEEYLISIGAAGERIARCEEAMSDLLEKWRLAPAVGALMAMKGFQTVAAMILVSELGEVHRFTHPRQVMAYLGLVPTENTSSDKRRQGQITKCGNAHARWLLVECAQHYAAPPKVSKELSRRQQGQPREVLAISWRAQNRLHGRFARLSARRLQRNKALVAIARELCGFIWELLRTQSCYQAAIPLGLKR

SEQ ID NO: 118345 - protein, 467 aa, unidentified
MSRVNRRAISRAQKIRKVAAGESNHFPLVNSNAAGIDIGSKETYVAVPESRCSESIRSFGMATCDLYAIADWLEQCAIDSVAMESTGVYWIPLFQILDARGISVCLVNACHAKNVPGRKTDVIDCRWLQRLHTYGLLAASFRPADEICVLRSYWRQRAMLVRSSCDHIRRMQKALTQMNVLLHNVVSDITGVTGMAILKAIIGGERDCRKLAILRNYRCKKSEHEIAKALDGDYREEHIFSLRQAIDSWNHCLSQIAECDRKIETYMGDLEAKTDKKFTGKPPKISKAKRHDPPPALREQLYRITGVDLTAVTGIEMTTALTIISEIGADVNAWPSFRHFASWLGLCPCNKISGGKVLGVKTRKVANSVSTALRMAAMTLKFSQTPMGAFYRRMQARIGPQAAITATAHKLARIIYTMLKYRQQYDPKKLDQGNEQIQRRGIAALKQRARNLGFQLIPLEPDSLAVS

SEQ ID NO: 118346 - protein, 376 aa, unidentified
MEHNSEAFIGIDTSKLKNAIAIAEGGRDGEVRYLGEIETTDAATRKLVKKLATKYRKVTFCYEAGPTGYGLYRLITSLGHECSVVAPSLVPKKPGDRVKTNRRDAVGLAKNLRAGELTAVWVPDTRHEAMRDLSRARETAVDDLKSKRQQISSLLLRLGLHYPGEKTWGKSHRNWLASLKLDQREQRIVLEELFGAERQAQERVDRLVSAIIDAVPEWSLAKIVTALMAVRGIDLVAAVTIMAELGDLSRFASPRELMAFLGLVPSESSTGDSVKRGGITKAGNRRARRILVESAWSYRYPPRISRDKLAKVAAAPEAVRAIAWKAQTRLSSRFRALIKRGKRPTIVATAIARELCGFIWAIHRAVTAPGGRQLVS

SEQ ID NO: 118347 - protein, 373 aa, unidentified
MPRYSTAFGMDVHLRSTTVCALDAETGEAVARRFRGNPWGEVAEWMSGFPGPSLAAYESGYLGFAPQRELSALGVDCVVAAVSKVPRSAADLSSKNDRNDAARMAKAILSHDVTPVWVTSPEIEGLRDLAAAHDAATARLAAAKQRLLAFLARRGYVYGGTTPAGNPRKYWTYGFLRWLDGIRPADDGGIRALAALRNEVEAADETREAVLAEYRAAVAAGPLSAEVEALQSIKGCGFVLAAAFASEVGDFSRFRSGRQVTAYFGLAPKQRSSADSVRLGGISGAGNALVRRLAVEGSWRYAQAGHQPKLMPKGSGVPLEIRMHGRKGSERLLRRREEMLERGMPQAKANAATAAELVRWLWALGMMCREAGE

SEQ ID NO: 118348 - protein, 412 aa, unidentified
MSKRFFGFDLHKNFVVVAAVTARQEVIFRPHKIDAADLEGWIIKHITRDDEVVIEAMSCAWIIHDILVQHASRVVVAHPYHVKLIASSFVKTDKRDAVALARLLAANILPEVWIPPQPVRELRSLINHRNRLVQRRANAKCRLRGLYQQYRIVAPDGREAFEPEYWDKLDLPQVEKLRARHISEEIHMLSKQLTEAEEAISQMSSQQPWVEDVPYLIQLPGIGIITAMTILAAVGEIGRFPSAKKLVGYAGLGARVYSSGETTRTGGITKQGRRELRYAMIEAAWNAIKNSSFWRQKYEQLSRRMDKQKAATAIARKLLVIVWNVLTKQEVDREANAEVVGRSILTWGLKNRLATSLGMKPAEFAGWQLNKLGIQLEKVKYCTRVYEIPRLELAQPANLLKQRERRPKHIKV

SEQ ID NO: 118349 - protein, 355 aa, unidentified
MNQEKYIGMDVHQATISVAVMDSSGKLIMECILETKAATILEFIAGLRGTLSVTFEEGTSAAWLHDLLKPHVSHLVVCDPRRNALLKDGSKSDRIDARKLAELLHGNKLHAVYHGEHGLRALKELGGSYLTITKDLTRVMSRIKALYRSWAIPCSGATVYAPRHRAEWLAKILEPGVRLRAERLYQQLDLLQPVRQEARRDLLVESHKHHAVKLLRQIPSIGPIRAALLVALLQTPHRFRTKRQLWAYSGFAVETHDSGEYRFVRGKLQRNRERITVRGLNHNHNHDLKNLFKGAALSASTRPGPLCDFYVALVEKGMRPTMARLTLARKMAAITLIIWKKGVEFDAKPLNRQAA

SEQ ID NO: 118350 - protein, 469 aa, unidentified
MTINSPKTTKTGGNRHDRNRPSKTQHKINTEANPNAGGIDIGAAEIVVAVPPDRCAEHVRTFTSFTSGLIELRDWLLACGVTTVAMESTGNYWVNCYDLLEEAGIEVCLVNARHVKGVPGKKTDVSDAQWLQQLHAAGLLKKSFRPAQDVLRLRYLVRHRDSLVRENAGHVHRIQKVLTEMNLKLHHVFSDIDGVSGRGIITAILAGERDPKVLAALRDNRCRSCEADILAALEGNYRPEYLFVLGQLQTQWDEIRRHLANLDEEIAGLVGSIGPTAAPTAQPTRKTGSKRKQTGKNAIALDFRKEGLRYYGVDLLEIDGIGSGVLTALMSEIGPRDNLLESFPSADRFCAWLGVCPCNQISGGKVLRTSTRKTRNRLAESLRLSAFGLDKAKCRMGEYCRRMKGKLGKAEGITATAHKLARVIHAMIGSGQSYDEAQAFRTNPGVEKKRLKTLKKLAEKHGFQLVPIQ

SEQ ID NO: 118351 - protein, 407 aa, unidentified
MTGPKGHHDVVVQDEAGQTLARRRLPEGADGIARFHELAAAHFGGDGEPDPAQVVVVIETERGPWVKALAATGYRVYPVNPRQARRHRETVSNSGKKDDFFDAACLAGMGRTRRHQLRELAAGSDLAGAVKIAARAHQKLVWERTRHLLRMRSALREYFPAAPEAYKDLGLAGPDTLELLRKAPDPESAARLTTAQVAAALKRAGRRGDLHERAREIRAVLRAPHLGQPGVIAGAYAASVQAGAAVIAVLNEQVKIMEAKVSGLFRRHPDAAACLSLPGIGDVTGARVLGEFGDASGRYASAKARRNYAGTSPLTIQSGKKKTVHSRYVRNQHLIDALHAQAMGALAGSPGARACYDELRASDHEHEDALRRVAGRLTGILHGCLKTGTPYDEATAWAHRAAPADAA

SEQ ID NO: 118352 - protein, 359 aa, unidentified
MTGETVMTFYIGVDLHPHQQTVAWCNTETGETQTRDLKHDPETVREFYSSLPEPAIVGIEASTRATWFENMLFETCHKLFVGNPVLIRKRATSRHKNDRRDAELILQLLLHDEFPKIWRRPIQSNRILEMVRLRQSMVRQRTQVCNRLQAIAHDLGLPKGRVRGVAFQAILKAAPADETTSIRRSHLFSLVGTLNEHIQKLDKWLEAKAAEDNNVQLLLTQIGVGYLTALVTVHTLGDVSRFSRISKQVASFAGLDSMERSSAGRIRFGRVSKAGSPLLRYQLGVAAKMASRSDARLKSFYTRLAKKKPKAVARMAVSRKLLIKLSIMLRDKITAEEFDRRGRTVGNARVLQGSERTVV

SEQ ID NO: 118353 - protein, 349 aa, unidentified
MGEVSTIGVDIAKSVFQIHGVDAEGTVVIRKRVGRARVLEFFADLPPCRVGMEACATAHQWARELRKLGHDTRLMPPTYVKAYVKRGKNDAADAAAICEAVTRPSMRFVPIKSVEQQSVLMLHRTRDLLIRQRTQLINALRAHLAELGLVAAKGREGVHQLVAVVMECGDERLPGNARFACQAIVTQLHAAQIEISGLDKRITQIHRVNVDSRRLDTIPGFGVLLSTAVVATMTDPKAFKTGREFAAWIGLVPRQNSTGGKERLGSITKQGDRYLRRLLVVGATSVINSARARPYKYPWVIELLGRRPTKVVAVALANKMARIAWAVLAKGEPYRAPTRPWNAVVPAAA

SEQ ID NO: 118354 - protein, 349 aa, unidentified
MIYAGLDLHKSFSVITMMNAEGKEMVKQTKLPNNGEIVELLQGFNEPVALAMEATRGWYWLYDLLEENGIEVKLTHPLKTKAIASAKVKNDKIDSRILAHLLRADLVPLSYVPPKPVRMHRELLRYRASLVKVQTGTKNRVHSILAKNNITHTFSDLFGKQGRDFLSSLSLAQVYRMALDGHLSILEELKQQIKVANRSIVTSAKDDEDARLLMTIPGIGYYSALLVKSEIGDINRFPSAKQLCSYAGLIPSTYSSGNTTFHGHITKQGSKWLRWIAAEAIVHCVAKPGHLQEFYRRLEKRKGGKIAKVATERKLLEWIYHMLKDKQTFQDIDKMASTWGKPVLLTGLR

SEQ ID NO: 118355 - protein, 369 aa, unidentified
MEKHTEVFVGLDVAKVRHAVAVAEEGRQGEVRYIGEIGADIKSVRRLVTKLEKRHGRLHFCYEAGPTGYGLYRQLIKLGHQCSVVTPSLIPRKPGDRVKTNRRDALQLARLLRAGELTAVWVPDEAHEAMRDLIRSRQMAVDDMRRKRQAISSMMLRQGRTYPGKKTWGARHTQWFQAQRFDHLAQHLVLQELLLAVQRAGEQLGRIEAAILELLPKWSLAPVVEALQALRGINLVTAATVMAEIGDLHRFENPRQLMAYLGLVPGERSTGDTVHRLGITKAGNGRVRQALVESSWSYRHPPRITQNKHYIHEILSPAVRDIAAKAQTRLCARYRALSQRGKKLTVTVTAIARELAGFIWAIGREVQAT

SEQ ID NO: 118356 - protein, 362 aa, unidentified
MFRPHTLYIRIRIVRKVHEPVFAMRDQDVSDVIKTKNRTAMQYIGIDVSKATFVVAYSSDKGGEIRTFNNTTAGIKQFIGTLPKDGSIHCVMEATGNYSALLLYMLNVAGITVSMENPLKVKNFARAMLSTVKTDKIDARLIALYGEKMNPQPFKVQGEAILRLRQKRTVIRQLTKQITAMSNLRGSLACLPVPDKGATHTVDETIKFLEKRRDRLQSELTDLVEVEFSRQLALLTTIKGIGITLATALIITTGGFTYFQNAKQVSRYLGICPTYEQSGTSVNIRGHINRNGDAYTRGLLYVAAWTASRFNTKCGETYTRLRQNGKPGKLAMIAVANKLVRQAFAVVTHDKEYVDGFVSNRP

SEQ ID NO: 118357 - protein, 387 aa, unidentified
MPQPNDLSRSLVALDQDSTIIAVVEMSQSSWLVGGVLPGIERQPRKKLEPSAERLLGLLHRWRDEAVRAGKKITRIALAFEAGRDGFWLARWLSARGVEAHVIHPSSVAVSREHRRAKTDRLDTELLKRGFLGWLRGERGHCSMARVPTIGEEDAKRPNRERECLVGERTRIVNRMKATLARLGVRNFKPTLRKAAERLATVHTPEGMPLPPNVLAELQRDMARLGFVVSQIRQIEEARQKRLEQETETGQHAMVRLIARVVGVGIETADMLVHEVLSRPMRDRKAVARYAGLTGSPDESGAKRREQGLARAGNARVRRGMIQLAWRFLLFQKESALALWYRARTADSRLGTRKTMIVALARKLLIALWRFVTTGETLEGVILRPAG

SEQ ID NO: 118358 - protein, 374 aa, unidentified
MRISILARDVLPETDGVDGPRPDSTEDGVQGFEEAFAMQITTIGVDLAKHVFQLHGIGPDGRVVLRQKLRRSQMMMFFAKLPPCLIGMEACATAHHWGRELTALGHDVRLMPAHYVKAYIKRGKNDVADAEAICEAVTRPTMRFVAIKTREQQAVLVVHRTRELLVRQRTQAVNALRGLLAEFGICEPQGIWHVGRLRAHLEGETIPEPGRRTLMLLVDQLDGLERLLVQVEAEIRAWHRANSVSQRLAKIPGVGPLIASAIVATVADASAFRSGREFAAWLGLVPRQRSTGGKQRLGRITHQGDAYIRRLLIVGAQSALQRSKEIKQNAWVQGLLGRCARLKVAVALANKTARIAWALMARGGVYHQAVLPAA

SEQ ID NO: 118359 - protein, 418 aa, unidentified
MPTLPWDERKHFAALDWASDHHDVVVVDLKGSVVESLRIAHTAEGWAFLREKLRGYEPLAIAVETNQGLAVEQLLAAGYTVYPINPKSAKRYRERKAPTGVKDDWRDAWSAADALRVDGHGWKALSPEDPLVAELRLLTRDEVALIQQRTGLINQLHSALAEYYPAALAAFPDWTCPGTWAFIETFPTPEALSKAGRKKWEKFLRTHQLWRAETCAQRLDIFTHALDMTGSAAAVAAKSFLAVAVVKVLGTLEEQLRAYRERIEQRFAQHPDHDLFGSLPGAGPKLAPRLLAELGSQRDRFESAEGLQAYAGTAPVTFQSGQIERHVVRRACAPFLRASIHHWANHSRKRCAWAQAYYQAHRAKGQSHACALRCLGQRWLKILWKMWQDGTRYDEALHTRNQLKHGSWLLALQPENRS

SEQ ID NO: 118360 - protein, 395 aa, unidentified
MSYKIAGIDVHKKVLMVVVMDASTPESKPERRRFTTMPSDLRRLLLWLREQGVEEAVMESTAQYWRSVWLELEPYMRLQLAQAFSNRAPRGRKHDFKDAERLVRRLIADELILSFVPHGEQRTWRNLTRMKLQLTRDQVRLQSQMECLLEEMRIKLSVVVSDLLGASGLRILRALAQGETDPKKLALLGDDRLKCTEEQLIDALTGRPQPMHREMLALQLERLQLMDEQIAKLNGLIAQAMKPHQDAVIRLAEVPGLGVASAQQVIAEVGVKASTFPSAAEFTSWVGTCPGKDESAEENHSSRSAKGNKYLRRVLNQAAHAAVKKNGSHFQTVFRRLLPRLGYQSAIWAIAHRLCRVVWKILHEGVRFIEQGTEPDPKAKKQRARMLARALRKLG

SEQ ID NO: 118361 - protein, 391 aa, unidentified
MVEPIQQGIIPRQYEIFAGPDVDKSRIAVTFSDHERLLKSLQMPSSSEHLLNYLGKHFADRKIALAYEVGPTGFGLYDELTAAGHRCLVVAPAMVPTAPGKRVKTNRLDSRKLSEGLRGGQLQSIHVPSELYRQLRHLVQLRDSHVRQMTAAKLRLKALLLYEGIPFPEAPKSQSGQWSARVLQELGTLPCNGSVRFKLDSLIGTLQFHKLQAAATPKQMRQFCQQDPEFKQSIGWLLTIPGLGWITASHLVARLGDWRQLKNVRPIASFLGLVSSEHSTGDDTQRGSITRSGDSRLRNKLIQAAWTAIRKDPELREFYWRIYDRHPKPVAARKAIVAVARKLTTRIYSVLKQQRPFQLRSPLNVVPLTPEETTGPRRRLDAAQNPQEPHS

SEQ ID NO: 118362 - protein, 349 aa, unidentified
MSHKLNSAIAVIGIDIGKNSLHVVGQDKRGAIMLRQKWSRGQLETRLANLPPCLIGMVACVGAHHLSRKLRMLGHDARLMPAKYVRPYSKGQKNDFRDAEAIAEAVQRPTMKFVATKTAEQLDLQALHRVRERLVSQRTGIINQIRAFLLERGVAVRQGLRFLRAELPRILATPGDLLSPRMVRVIEDLAGDWRRLDERIEGLSSEIEVLARRDVGCERLMSVPGIGPIISSAMVAAIGTGDAFTKGRDFAAWLGLVPKQISTGDRTILGKISKRGNRYLRVLFVQAAWVVLIKPKSWQRHGLKPWLEAAKKRLHHNVLAIALANKLARIAWSVLAHGRAFEASKIQVA

SEQ ID NO: 118363 - protein, 380 aa, unidentified
MVVSMKNIRYVGLDVHAETIAVAVAEPGGEIRDLGIIPNRPEAVRKLAAKLGPSTQIRACYEAGPTGYGLYWQLTQWGIACEVIAPTLIPTKPGERIKTDRRDAAKLARCYRSGDLTPVWVPDQDHEALRDLVRQREASVQDRHRARQRFGKFLLRHGFHKPEKMTRWTQKYMAWIKSLQFEQFALKATLEDHMQEIDHVDRRMERLESKIDEAIALAPAQIQEVIAGLQALRGVAKMTAATVVTELGQISRFNSPKQLMAYCGLVPSEHSSGGSIRKGGITKTGNAHVRRVIVEASWCYQHRPWLGGYLGQRQKRLNLDPALIEIAWKAQHRLHKRYVHMTAKGKNKPQTVVAVGRELLGFIWCIATQVEQRQKLAAAA

SEQ ID NO: 118364 - protein, 340 aa, unidentified
MAASPSRPSQRSLPALPSTPFVVGIDVAKARLDLAVGPADPTTASLTPPLTGAIANDEAGIAALVAHLTPRTADLVLIVLEATGGLEHPVAAALSVVGLPVAIVNPRQVKDFARASGQRAKTDTLDAALLARFAAVMQPPARPVADAETQQLSAVLARRQQVLSMLVAEKQRRHTALPTVREGLIRHIRWLEDELAARDRELAELIQASPVWRERDALLRSVPGVGPALATTLLAGLPELGQGSAREIAALVGVAPLNCDSGTHRGQRRIWGGRGHIRMVLYMATLSAKRYNPAIRAFAQRLAATGKPTKVVLIACMHKLLTILNAMLRHGEPWRTVSVA

SEQ ID NO: 118365 - protein, 391 aa, unidentified
MVCVGIDVAKDKHDCCILDSDGMVRADCFTIPNNMDGFKQLLQTIRNCTKKSDKIKVGLEATGHYSYNILGFLLDNGLPTYVINPLHTNLYRKSLSLRKTKTDRVDARTIATMLLSDVDLKSYTDIAYHNEELKSLTRYRFDKVQECAKLKQSVSRLATILFPELEGLVSSIHGTSIYALLGEYPGAKQISEVHLTKLTNLLTTASKGRYGKEKAIQIREAARASIGSVMPAKSLELKHTIKLIQELASEINEIEDSIQKIIDELNPPILSIPGMGVNSAAVILAEIGDFSNFSSPDKILAYAGCSPSTYQSGKLTNCYAHMEKRGSRYLRYALYNATKYVCHWNPVFAEYLAKKRAEGKHYNVALSHATKKLVRLIYALQKSGKAYLVAA

SEQ ID NO: 118366 - protein, 418 aa, unidentified
METNQNRRCCGIDVHQKTVVVCVLPSDGTPGEPVKKVYGTFRNELTRMRGWLKQLRVTDIAMESTGVYWRPVWNVLEGHFAHLLLANPKQVKALQGRKSDHRDARRIAEFLQDGRLDASFVPPPEIRRLRDLTRCRVTLLGQRDEIHNKIRDLFETANVKLSSVMCNLLGVSGQRIIQAMVEGQESAEVLSWKLKGKLRPKEKQVRESLKGCFDEFHRMLLAVYWQQYRFLNSQIEVVEAQIALAMEEYAGLVELLDAIPGVDQIVAWTVIAEMGIDMTVFPDAAHCASWVKLCPGTHESAGKQMNSSTGHGNRYLRRVLLQAAWAASHSKDTYLRALFYRIKARRGWGKAIVAVAHKLVIIIYQMLRDRVAYLELGADHFDRINPVRTARKLVARLERLGLQVTLQPLQDDSQPQQT

SEQ ID NO: 118367 - protein, 344 aa, unidentified
MVTTIGIDPHKATHTAVAIDDDETVLAEITIRADKDQTRKLIDWAQSVDGDGRVWAVEAATGLGHLLSQQLVSRGEPVVDVPPVLASRIRVLSSGQSQKNDPNDARSVAIAALRRESLAEVRREDDTAVLRMLAKRHRELTSLRTQAVCRLHAMLAVLRPGGMGHRLSAKQASRMLGGIRGLDAVGEQRRLMAKTHIVDIRRLDRDLEGNKAQIRRAVAAADTSVTDIYGVGPVVAAFLVGYTPPIGRFATADRYAAYNGTAPIEVSSGGKIRHRLSRRGNRTLNHAIHTAAVTQISHHTEGRVYYDKKLDEGKTTKEALRALKRRISNAVYRRLTTDAQRHSS

SEQ ID NO: 118368 - protein, 360 aa, unidentified
MKIQRTSVGLDVHARSVFGCALDGQTGEVFQRRLCPDHREILDWVNGLAGPVAVAYEAGPTGFGLARFLGGAGVQCLVAAPSKLVRPSGDRVKTDARDAAHLARLLHLGEITAVEVPSAEREAARELVRAREDCRADLMRARHRVSALLLRHGVVYSGGTSWTVVHHAWLQRQRFDTAPAQAAYDTAVETMLACGDRRDRLDAAITDMARESEFSAVVRRLGCLRGVSTLTAFGLAVEIGDWSRLSGRTIGAYLGLVPSEHSSGQSRVQGSITRTGNSHARRLLIEAAWHHRRPYRPGVALRRRWQDASPAARRRGQQANQRLHTRWLRFDARTKRPAVANTAIARELAGWCWSLAVLDD

SEQ ID NO: 118369 - protein, 313 aa, unidentified
MAPCFVGIDVAKAELVVAVAPQGEVFTVGNTPEGLATLAPRLRKLKPHGVVVEATGGYETLAARVLGAAKLPLAVVNPRQGRDCARSTGQRANTDAIDARILAAFAQAIPVAVRPLPDKAARALQAVVSRRRQVVELLTAERNRLYLADAAVAPRIREVIGVLARQVQDRDDDVQQRLRQSPLWREAQDLLKSVPGVGNVVASTVLALLPELGHLDRKAIAKLVGVAPLNRDSGQHRGRRKVWGGRAAVRAVLYMGALVATRHTPAIRAFYQRLLEAGKPKKLALTACMHKLLLILNAVLRTRQPWSLEFSHA

SEQ ID NO: 118370 - protein, 358 aa, unidentified
MKLQSNKISFKGQNIYVGIDVHLKTWSVTILLKDSNYKKTFTQPASPKALFEHLKKNYPGGIYHAVYESGFSGYSSCYELRDLGVDCIITHAADVPTSQKERLSKTDAVDSAKLARSLSNGELKAVYLPPKDKLGDRELMRTRQTIMKDICRVKCRIKHLLYTNGVSYPEPFAAYRSHWTRAFIKWLREEVTLLSGKRIALDMMIEELEYYRKLLLRANREIRILTNSEAYAEAYNRLIAIPGIGMITAMTILTEAVTPDRFTGLRRFISYLGLVPTMDDSGENENAGEITPRGNQKIRRMIVESTWTTIRYDREMASAFGKYCQRMKKNQAVIRVARKLATRLWHVFKYGEDYKECQ

SEQ ID NO: 118371 - protein, 383 aa, unidentified
MKAVCGLDVHKDSIFLCILHSDGELFEQVFGVLTFQLEEMRKLLQKHHVSEVCMESTSIYWIPIWRVLSPHFTLRLVNPYFIKQLPGHKSDVKDAQWIAECTMKELVRGSFVPPEIIQQLRQYDRRIFDLNAEIVRKVSKVDGVLQRCNIRLSNYVSNIECKSYRDVVRRLSEGVTDPNELVKLVHGRIVNRHGADTILASLTGVVSQAEIDVLRQLHEEIDIAESHRDECQQRMLEICEKHFPEELKRLQKIPGIKERAATSLIAEIGTDMSKFETANHLASWSGLRPRNDESNKKIKSRKITHGNVYLRNTIIQCAWAASRQKDCFFCRFSYHQTIVRRKNKMKVIVAVARKLLVAVWHVLHDRTDYVDFKPDREESANNG

SEQ ID NO: 118372 - protein, 343 aa, unidentified
MKLHVVGIDLGKTVFHLVGLDSTGKAVIRKKCSRKQLLAFTANLEVELIGMESCSGSHFLGRALREQGHEVQLMPAQYVKPYVQTNKSDFLDAEAIAEAVQRPRMRFVPIKTEEQLDLQALHRVRERWVMRRTAVVNQIRSLLLERGLTLPKGRRYVDQQLPTILEDAELRLSGSFRVLLAQLKLELEQLGARVEEMDRVIQKMAKENEDCQRLTEIPGVGPVTATALIAAVGNASAFQKGRNLAAWMGIVPREYSTGGKQKLLGISKRGNKYLRTLFIQGARSVVQQRHKQSPGLSHWLGQLLGRTHQNVVIVALANKLVRMAWAVLCKNERYRAPVLAVTT

SEQ ID NO: 118373 - protein, 346 aa, unidentified
MEHYAGIDVSLELSSVCVVDGRGKIVKEAKVASEPEALVCFFKELGVPVARIGLEAGPLSQWLHAGLTQAGFQTVLLETRHVKAALSAMTVKTDRKDACGLAQLLRMGWFQPVHAKSIGSQEIRALLVARKQLLGRLLDVELSMRGILRGFGLKVGQVTRKTFEARIRELVTGQATLERIAEAMLSARATLQAEYEKLHKAVLAFVREDAVCRRLMTVPGVGPVVAVTFKSAVDDPSRITKSKAVGALFGLTPKKYQSGEKDVTGGITRTGDEMVRTALYEAANVLLSRITRFSKLKRWGMDVAKRRGSKRAKVALARKIGIILHRMWIDGTPYRWTEAKPIAAQA

SEQ ID NO: 118374 - protein, 414 aa, unidentified
MEGAINKSCGLDIHKQFLIATILSRSGEKQQQRFTRDDDGILELKNWVTSEKCDVVACESTSDFWVPIYDLLISHLPVIVGNARDMKAFTHKKTDKIDSEVIAKLALNQMVQPSRVFPKNHREFRSFVRLRLALVRKRTDIKNEAHAILSSQMLHLGNVLKDIFGKNGRAVLSGISSGKTVDQIIESLTPNVRKKSTQIREILDREISQTAAIRLQTCLNLIKHFDDEIKLLEREIFNYAYGKHKDKMEILMSVPGIGEIGAATLIAEINDFNDFPSGDKLASWLGLVPNVYQSADKYHNGRITKRGSKVARWILTQIAQAAARKKNSKLKEFFSRKKKSIGHSKAVIALARKIVTIIWHLIKNNEMYEDETGYEKGEVQKRKIIETDIFSVDERIRIISGIFAIMGKEDREST

SEQ ID NO: 118375 - protein, 400 aa, unidentified
MVVLASLCNDVGYNGKTIKEPHTKEASTMDYTTFVGMDVHKDTITVAVAKEGNTEPVLLGTIPNRPDSLLKLLKQLAVTGNRLLFCYEAGPCGYGIYRFLKERNFSCIVVAPSLVPVRIGDRVKTDRRDAKKLARLLRSGELTPVWVPDEEHEALRDLVRAREDAYKDLQRKRHQLSKFLLRTGKRPPVGINPWTVKHRCWLDTVKYELHAQQLVLQEYRHALAQAQERLKRLEQELIELGCKSVHAPVIAALRALRGIDYVSAITLVAEIGDFRRFDNAAKLMSYAGLVPCESSSGPRSRRGSITKTGNSHVRRIIVESAWHYLKAPNVGCTLRKRQEGVPESIKEISWRAQNRLNSKFRKLLARGKSRQTAVVAVARELLGFIWSVALQAKIEYEKAA

SEQ ID NO: 118376 - protein, 341 aa, unidentified
MKKYIRTGVDLAKNVFQVHALESEGGPVVARKLSRAKFRAFFANIEPCLVGVEACGSAHYWARELGAMGHEVRLMPPAYVKPYVKRGKNDAIDAEACCEAMTRPGMRFVPVKSADQQATLTLHKTRDLLVKQRTMSVNALRAHLSEFGIVAAKGRGKVGELLALADAGASLPSAARASARALARHLESIEASIEDLEDEIAAFHASSQTSQLLDGAPGLGVIVSTAVAAIAPDPSVFKSGRDFAAWIGLVARQNSSGGKPTLGSITKKGNPYLRKLLVLAATSLIKVARKRAGALADWINALLARKPKRHVTVALANKLARIVWAMMSNGEAFRAEIFAKA

SEQ ID NO: 118377 - protein, 315 aa, unidentified
MKTGPIYVGIDVSKVQLDVAERPSGERAVIPHTEEGIATLVAQLRARHPACVVLEATGGLQVPLASALAVGGIPVAVVNPRQVRDFAKATGQLAKTDAIDAQVLAHFAEAVQPTPRPLPDEAMQQLGALLTRRRQLIEMLVAEQQRMQRAPHPIRRQIQAHLTWLPQQLAGLDEDLTHRIQATPLWREHEDLLRSVPGIGPVVSRTLLAELPELGTLTHKQIAALVGVAPLNRDSGTLRGRRMIWGGRAVVRSVLYMSAVVAARHNPIITAFYQRLRAAGKAPKVALVACMHKLLTILNAMVKHHTPWRLSIPGT

SEQ ID NO: 118378 - protein, 364 aa, unidentified
METFSTLDVIYSCCAGLDVHKQTVECAVRLMQEGGRVEVQIRQFGTMTDDLLEMVKWLKAQGVTHVAMESTGVFWKPIYNILEGHCTVLLVNARHVKQVPGRKTDVRDCQWLAQLLQYGLLKGSFIPPRWQRDLRDLTRERTQLTDEQTRVANRIHKVLEDANIKLGSVATDILGVSGRDILERLMAGEEDVEKLAECARGKLRGKIPELRRSLRGCLNEHHRFELRLNWKHLQSLQQLIEELDERISELCKPYQPQIQRLDKIVGINPASAEAIVAEVGVDMQVFPSAQHLCAWAGMCPGNNQSAGKRRSGRTPKGSRWLRRTLALAAQAAGHAKDSFLASRFRRLAARRGKKRACIAVVIRF

SEQ ID NO: 118379 - protein, 399 aa, unidentified
MVHVHGAQVQQLVAQTRGVPPQRLVAVPVDVGKAAAMALVCDFTGEVLAGRFEFPISRAGLAELVRRVEAVRAARPVDLVRVGIEAAGHYHRPLTSSGVLPGDWQLVELNPAQVTAQRRSNGQRGVKTDTVDLAAICDLLLAGRGVPVSRADAVLVELAGLVAHRARRVQVRSALKNQLLGPLLPRPCRLPCGPAGRQGRPAAACRVRQPGAAGPPGAGEVSWLRRPAGVLVAGKAAVARRVLAEDLALLAELDRQIGAVNQRLAALLPATPFAVLGSVPGWATLRVAAYAAAVGDRARWPSARQLYRAAGLTPTLDESAGRRRDGQISREGSVTLRRALLGLGIGLWHCDPAARAYAQQLRARGKPGGVIATALANRANRIASAMVRDQAVYDPTRWR

SEQ ID NO: 118380 - protein, 342 aa, unidentified
MSEYAGKQFVGIDLHRQRSVIVRQTDTGDQLSAVRIVNDPVALQLELERAGTEPEVVLEATYGWYWAVDVLQAGGAQVHLAHPLGVKGFRYRRVKNDVRDAGDLADLLRMGRLPEAWIAPPPTRELRELVRYRAKLVAIRSGLKAQIHAVLAKAGVLIAVSDLFGVGGRQRLAKVPLGAAYAERVRSVLELIDVLDGHEARFAAMIAERLDTHRGYQAIQQVPGIGPVLAAVFVAEIGDVHRFTDPAHLCSWAGLTPRHRESDTVVHRGHITKQGSKLVRWAAIEAVQRHPTTAKIAADKDRIEARRGKNIAKVAAARKLLTLVYYGLRDGQIRALDRTRAA

SEQ ID NO: 118381 - protein, 341 aa, unidentified
MGEVSTVGLDIAKSIFQAHGADAAGEVVFRKKLGRGRLLSFFADLPPCIVALEACAGAHHWGRELIRQGHTVRLIPPAYVKPFVKRQKNDMADAEAICEAAQRPTMRFVPVKGEQQQASGVVFRARDLLVRQRTQIINALRGHMAEYGYVAAKGVGHIQRLIDRIEDPQGELPPEARATLQVMVQMLRTLDEQIVVLDAEIARRAKEDPVARRLLTVPGIGPVTAAAIVALAPSAETFRCGRDFSAWLGLTPRQHSSGGKERLGKITKMGERTLRRLLIIGASAVIKQASMRGAPVGSWLAQMLSRKPKMLVTVAQANKSARIVWALLAKGGVYRAPAVAA

SEQ ID NO: 118382 - protein, 409 aa, unidentified
MDVVYARCCGIDIHKKTAVACVINADPNGRPRKQIRTFGTMTDDLLALADWLAAEGVTHVAMESTGVYWKAPYNLLEGQFEVLLANAQHIKAVPGRKTDVQDAEWIADLLRHGLLKASFVPDRPQRELRELTRYRTAVVRERATEANRLQKTLEGANIKLGDVASNILGQSARQMLEGLVVGADPVSLAQFARGRLREKIPQLERALAGRFAAHQRFLIAQQLAHIDYLDEAIERLNAEVAERLGPFVSTIERLDAIPGIARRTAENVLAEIGPDVHRFPTAGHLASWAGLCPGHHESAGKQKRGTTRPGNPWLRAALVEAARAAARSKDTYLAAQYQRIARRRGGKKAAVAVGHSILVIIWHLLQHDCAYVDLGAGYFDEHDRAFAKRHLVRRLEQLGYTVNLSRSAA

SEQ ID NO: 118383 - protein, 364 aa, unidentified
MKKSSRSKRSAEWKERPMITVGLDLGDRFSHYCMLNQDGEVMEEGRVRTSEEALRRHFEGEPRQRIAMECGTHSSWISRVLRSLGHQVMVANARKLRAISANESKNDRADAEMLARLAYSDPQLLSPIQHRSVERQQDLNLIHARDTLVRARTMLINSVRGLVKSAGGRLPAASSESFAPRVCSAVPAELKKATQPLLQQIAALTVEIRGLHQAIEKLAERYPEIPILRTAPGIGPVIAAAYVLTLDQADAVTSSRGAGAFLGLRPKQSQSGDSDPEHRITKTGNIYLRRLLVQAAHYILGRFGPDSALRRWGLILAASGGKRGKKRAIVAVARKLAVILHCMWRSGQRYQAFPEQASVAAVTA

SEQ ID NO: 118384 - protein, 355 aa, unidentified
MNSLGIDVGKKICRAALKDERGDVIREFFFSNNNEGISALIQSVSHYGKCTAVVESTGNMWIRIHDTLEENEIDTILANPYKTKIIAEAKIKSDKLDARILADLLRADLVYESYVPTKEFREKRSLVRHRISLVRNRTMLENKVHSLLDKYDYKSELTDVFGKSGIIWLKTLDVSNIDRLIMNTTLAAIENIGLQIDTISKELAKYGWDSDDVKILLSMTGIDVFSAMLIATEIVDVKRFCTPWKLVSYAGLAPSTRESSGKTKTGRISKQGSPWLRWILVQCAMTAVRYDQRLKSFYERLKSRKGSAKAIVATAKEILVIIWYMLTRRELYRHINKDRYEQKLSRLKKIKESAV

SEQ ID NO: 118385 - protein, 356 aa, unidentified
MSRDVKYIGMDVHKEATVIAVRNARGDLVMESIVKTESSTILQFIHGLRGELHVTWEEGTWAAWLYDLLKPHVHQVLVCDPRRNALLKEGSKNDKVDARKLSDLLRTGMLRPVYHGEHGLRTLRELGRSYQTISKDLNRVMNRVKALYRGWSIPCAGTQVYAPRYRQEWLGKIEHAGVRRRAELLYEQLDGLQALRRTLRPELLAESRKHKASKLLRQIPCIGPIRAAHLIALMQTPHRFRSKRQLWTYSGLGIETHDSAQYCYVNGQLQRSKKPQQIRGLNRNHNHEMKEIFKGAATRASCGVGPLRDFYVALLDKGMKPEMARLTLARKIAAIALTLWKKEERFDAEELKTQAA

SEQ ID NO: 118386 - protein, 316 aa, unidentified
MTAQCVAGIDVSKARLDVFVLPQRLAFEFANNEAGIAKLRQELKGLGVERVVLEATGGLEYCAARTLADAELCVERVQPGRIRAFRTVLGKRAKSDPLDAKLAARFAQAMSEEHAHSVPTRQAETIRSLSARRRQLVDLLVQEKTRLKMSRDLFVLESLKITIAHLKQERARIEALLESVFEKDAAIARKNALLRTIPGIGPVVATTLITDLPELGRLNRHEAASLSGLAPHPERSGIARPGDHIGGGRACVRTALYMAAVCAIRCNPALKTFYKRLVEGGKPHKVAIIAVARKLIVLANALIRTDTPWNPASSIG

SEQ ID NO: 118387 - protein, 408 aa, unidentified
MIYCGIDWAERTHDVALVDDDGKLLAKRHITDDAAGYKILLDLLAEHGDTEDIPIPVAIETSRGLLVAVLRTGKRQVYAINPMAAARYRDRHSVTRKKSDPGDALVLANILRTDRHAHRPLPQDSDLARAIAVLARAQQDAVWNRQQLANQLRSLLREYFPAAIDAFLHWQNGLCRPETRVLLELAPTPSRAARLSLAQLRSALKRAGRQRRIDADAERIREVLRADYAHQPPLVEDALGKQMLALLRQLDAACTAADQLAEAVEEAFPQHPDAEVILSFPGLGTQLGARILAEIGDDHARFTTARGMKAYAGASPITRASGKKSSITRRWVKNDRLNHVGYLWAFASLTASPGAKAHYDRRREAGDWHAAAQRNLFNKMIGQLYCCLQKHILFDENLAFPTQLLEAA

SEQ ID NO: 118388 - protein, 462 aa, unidentified
MPSMTLGIDVACRAAHQASLADDQGRFVFSARKFRTTSADLEALWSSLPDDAALTVVMEPTRNAWVPLAAWFRRHGARVVLIPSEQSADLRDYYAKHTKSDRIDSRLLARVPLLHPEGLTELEGLGPADALRRLSRLRSSLVKRRSLVIARLDAYLELLSPAWHACFGADLVNNTPLRLLASGYGDPHALRRIGRARLTKLCWRYSHGAFGEELATKLLAAADETLSLWQEELDYGDLADDIAVEARLALGITSEVHEIDERLLVHLAAIDPNKILASVPGVALVNGAQILSRLGNPNRFRSLAGVRSFSGLVPSLTSSGQSGHHGPPTKSGDAPLREALFLAANWARRIDPTLAQRYHRLMVQEGKHHNSALCQVSAVLLTRIVACWRAGTPYEIRDLDGTVLNKAEGRRIVDQRYRVAEDIRALRRSTRREVGTSRRSQESPSAPSTDSSPTKATALVGT

SEQ ID NO: 118389 - protein, 349 aa, unidentified
MAVTIVDTSRPVTGGVDTHLEVNVAAVLDPIGGLLGVESFSTSPEGNAQLLEWMAGFGPVSKIGVEGTGSYGASLARFLRDSGVVVLEVDRPNRQERRRKGKNDVVDAIEAARAAQGQRQLGAPKTRDGNVEAIRALMVAKRSARDQKIATMNQIRHLGFTAPEEIRQSLQGVSRRLIAKRAAAMRPRADGDVVAFATKTALRALGRRVLEIDSERKEIDKILTRLLDQTAPGLMELYGVGKDSAAALLVAAGDNRERLRSEAAWARLCGVSPIEASSGKITRHRLNPFGNRQANAALWHIVITRISSDPRTIDYVERRTKEGRTKKEIIRVLKRYVARETYPYIIAAV

SEQ ID NO: 118390 - protein, 312 aa, unidentified
MKKHSKKANEKGRRSASQGQPEITIGIDVGDQYSHFCWLDAEGEIVKRGRVSSTQAGLEKEFGKIPAGRIALETGTHCHWMSEVLSQLGHEVIVADARELKSISGSRRKNDPRDAEQLARLARVDVRLLHPVRMRKRKTQQDRSVLRARDLLVASRTQLICAIRGMVKADGSRLAKCSAESFPEQVGASIPEGMRRALAPLLETLDVLNEKIQYYDQLVTHIAEEEYPETCLLRQVPGVGPVTGLYFRLVIEEARRFQHSRDVGSYLGLVPKQQDSGESTPQLRISKAGDEGARRLLVNCATSWGRLGRTAM

SEQ ID NO: 118391 - protein, 369 aa, unidentified
MKPVLQERVLAMSLELSKQIWKVAFCDGQKIRRVNVQPGERAELQQQLQRARERLGLPATVRVVCCYEAGREGFWVHRFLQALGLENLVVDPASIEVNRRRRRAKTDRLDAEKLVRMLMRWLGGERTVWRTVRVPTVEEEDERRVHRERARLLQERTGHLNRMRALLFLQGHAAGGLKALDLRRCRTWEGQPLPAELQAELLREQQRVQLVDAQLAELDEAMATRLEQPQTAADRKAQKLLTLRAVGPVNAWVLGKELFGWRQLRNHRQLGAIAGLTGTPYNSGQSRREQGISKAGIVWVRSLLVELAWGWLRYQPRSALSQWYRRRFAGGGARLRRIGIVALARKLLIALWHYVEHDQLPVGAVLKPC

SEQ ID NO: 118392 - protein, 394 aa, unidentified
MIYAGVDIAKTDHVIGAVDERGAEMCPPMPFKNTEAGLERAVAWLEGLAGSEDDVFVGMEATGHYWMACYSFLVARGYSVAVINPMQVKAVRKLKGLDKVKNDRVDAGLIAEALRIGQYDETRLATDEMASLRSLSRYLQSLRGMAAELKTQCVCLMDAHFPEYAGIFSDMFGAGSRAVLSKSPLPFELARRRADSLARDIAEASRRGGKSSGYAAKIKAAAKSSIGVRLGQEAASFQVKSLIRQIEFADSECAGVEARLRSLLDEVEPLVLTIPGVSYVTGAQIVSEIGDVSRFRNAPALVSYAGLNSSVSQSGQFDSGGGPITKHGSPYLRRALWLAANRARQYDPGLRAFYDRKRAEGKPHRVAVTAVARKLCHIVFAVMRDQVPYDPGRE

SEQ ID NO: 118393 - protein, 388 aa, unidentified
MAQVNDLSRSLVSFEQSGTLVVVLEMSQSSWLAAGVVPGVERRPLKKISPDPAALLHLVERWRDQAVRAGQTVTRAVLAFEAGRDGFWLARWLRARDIETYVVHSTSVAVSREHRRAKTDRLDTEMLIRVFLGWLRGEPRHCKMVAIPTLEEEDAKRPSRERESLVGERTRIINRMKAALTRLGVRGFKPELLKAPERLEAMRTPEGVQIPPNMLDELRRDMARLAWVREQINAIEQARLGRLEQAPAGGPDAMVRLLARVVGVGVETADMLVQEILSRNLRDRRAVARYAGVTGSPDESGAKRRERGLAKAGNARVRRGLMQLAWRFLRFQKDSALAQWYYARTEGAAGKRKTTMIVALARKLLIALWRMVTTGEIPAGVALRTVAA

SEQ ID NO: 118394 - protein, 317 aa, unidentified
MERILGVDVSKDFLDTDTLPATQRRRFTNDAAGIAELVAWARPFRPERIVFESTGHYQKAAVGALLAASLPAVVVNARQVRDFAKALGILAKTDAIDAGVLARFGQVVPTIVRPLPAPEIQAFQELYDRRGQLVRMLAMEKNHRHATTSAKVITNIDAHIQYLEKQIQTLEDRMDHFVENCAAFRAKDDILQSIPGVGPHVSRTLLAYLPELGLGTRQQISALVGLAPFHDDSGTQSHTRHIRGGRGKVRIGLYQAAVVAIRHCPPMKDFYLRLKQRGKASKVALIAVARKILVLANALVRSMKPYDPANSVCPKTA

SEQ ID NO: 118395 - protein, 346 aa, unidentified
MRFYDGQHRHYCGVDLHTKRMYLCILDHEGNKLLHRNVRAKPYDFLSVIEGFRADLIVGAECMFTWYWLADLCRNEKIRFILGHALYMKAIHGGKKKDDKLDSEKIARLMRGGTFPLSYVYPSEMRATRDLVRRRMFLVRRRSELLAHVQLMNQQYNHDPFEKNLKYASNRDVLDRFAESGARLSVDADLKMVGHYDQLLKQLETKLLREAKLHDPKACSLLRTIPGIGKILSLVLLYEIHTIDRFPSVGDFLSYARLVTPKQTSDGKVTGHGGAKIGNVHLKWAFSEAVLWMLRYSEDAKAFLKRKEKKYGKARAMTLLARKIGRAVYQMLKRKECFDAVKFFAS

SEQ ID NO: 118396 - protein, 372 aa, unidentified
MSQSSTLYVGMDVHKESIAIAYVAQAHGAEVVSLGTIGTRQCDIDKLIRQLQSKAKHLVFVYEAGPCGYWLYRYLTKKDYICWVVVPSLIPKKAGDRVKTDRRDAMQLARLMRSGDLTPVYVPALDDEAIRDLSRAREDTLRDLKAAKLRLKAFLLRHDIRYTGRANWSPAHLRWLSEVVCPTPAQQIVFQEYVQTVTEQTERLGRLELELHEQVKTWRFAPVVEALQALRGVQFTVAVTTVAELGDLTRFATPRQLMNYLGLTPSEYSSEARRQQGSITKTGHSHARRALVEGAWAYRYPAKISRHLQLRLEKLPTAIQAISWKAQVRLCKRYRQLMAKGKNANQVVVAIARELSAFMWAIAKQVAGAPKA

SEQ ID NO: 118397 - protein, 386 aa, unidentified
MHDSTNFPVPERTGIRGDCATLFVSLELSRSSWVATSLAPGSKKMSKHTLVGGDGRKLLDLLARLKSRAEQRMAASVKIVAIHEVGLDGFWIHRLLEANGVESHVVDPASIAVPRRHRRAKTDAIDGETLLRTLMAWQRGEPRVCAMTVPPTPSEEDRRRVSRERATLLRERIRHTNRIRGLLFGQGITNYNPLHKNRREGLEKLRTGDGHPVPVHLKAEILREIDRLELVLRQINEVEAERDEMLRPAQASSPVALLMRLKGIGPEFAAVLYLEGLFRRFENRRQLAAYAGLAPSPWKSGSVDHEQGISKAGNPRLRTTMVELAWMWVRYQPASALSCWFRQRVGSERGRIRRISIVALARKLLIALSRYINHGEIPAGAVVKPV

SEQ ID NO: 118398 - protein, 463 aa, unidentified
MQTRPLEAVAGFASVSGSSAHQRVERRDEVPTRPAMPQGSGLQGATLAHVATSTIDPTLTEAAATEVFAGIDWGGSFHQICLIDEDGKVLRQQRVPHDAAGFDELDRLLTCHRARLRVAIERAEGLLVEHLHLLGVEIFCVSPKISARARERYRMAAAKSDAFDAFVLADTLRHEHRHWRALTPPSPVLAELRAISRDRDRIVIAQQATENRLRAVLEAYHPAPLHLFSTLDRDITLDFITDYPTPEQAGRVGTARMDGFCRRHGYSGRTQPEVLVERLRPHLLSAGEGTAAGKAFSANLFTEQLRMLNTHLRAYDKRLDELLERHPDTPIFTSFPGVGPVVAATLISEMGEDRHRFPAPGALLAEAGLSPVTRASGRTRQVRFRYASNRRMRHMIDWWMFTAIREDDWTRQAYDHARARGQGKYRALRGLGSRWTRILWRCWTDHTRYDPAIHHRNPEPTTA

SEQ ID NO: 118399 - protein, 398 aa, unidentified
MEVMDAAGRRLSAAKLPEGIAGIARFHAMIAAQLDPDADLDAPAGQVLIGIETDRGPWVQALIAAGYRVYAVNPLQAARYRERLGVSGAKSDPADAHLLADMVRTDSHQLRVVAGDSHLAEAVKVVTRAHKTLIWERTRHTLRLRSTLREYFPAALAAFEDLTDADTLELLAKAPDPVSAARLTTTQIMAALKRARRHHRDRRAGEIQAALRTEQLGQPAVVARAYAVAVRAQVAILGVLNEQINLLQEQVEAHFGQHPDAEIYTSQPGLGQILGARVLAEFGDDPTRYGDTRARKNYAGTSPITRQSGKKKVVLARYVHNDRLLDALGGQAFAALTRSPGARAYYDKQRDRGLGHRAALRQLANRLVGILHGCLKTGTRYDEATAWSHTQQDQQVAA

SEQ ID NO: 118400 - protein, 404 aa, unidentified
MWYVGLDWADTHHDVEVLDEAGKRVGARRFAHSHDGLNELKAFLLGIAASPEELACIVETNHGLLITFLLEAGIPVYPVNPKSANRLRKAAGAKTDQIDAHLLAKIGRLDLAELRRLEPDSPTVAELKTLTRDQDALIQTQTRLVNQLTACLKEYYPVALHLFAKVQQRSALVFLQVYPTPQAAQAATLEELTATLRTGKHTNPTRAAPKIFEEVHRPQLVAKEVIVRAKQRLMLSLVKQLLVVIEDIATYDKEISTLFLTHKDQEIWSSLPRAGKRLAPRLLAEWGEDRARYADATSVQSLAGTAPVPFQSGNYAKAHKRFACLKPLRNALYQFAWQSTRQEAWALDYYRRKRAEGKSHSMAVRALATIWVRIIYRMWQTKTCYLAATFEVAKPAHAPRQHVA

SEQ ID NO: 118401 - protein, 368 aa, unidentified
MENNSTVVGLDVHKENITIAVLRPGKDRPDPSVTVENQPSIIEKKVRELNRRHAPLEFVYEAGPGGFALYRQITQLGHPCAVIAPAWMPMKPGDRVKTDRKDAEKLSWYWRMRDLKEVRIPTPEEESVRDLLRVREDVLTNQLRARHRLMKFLLRQGRIYQGKKNWTQAHREWLRQQKFDLEYLTKTYQANFRILEEIDTHLADLDREVETLAQGVNYRTAVGYLKCLKGVNTLTAMTLLAESGDFRRFKNARSYMRYTGMVSWEDSSGKRVYRGGIIKAGNAHLRRVLVQGAWTYRLRSLGSPTLAKRRKGYPAEVIHLARKADERLHLKFQRMVDRNKRSQVAVVSIARELAGFVWAIGQMIPSAQ

SEQ ID NO: 118402 - protein, 366 aa, unidentified
MKKDSIRIRNGKGDWEGKKLTIGMDLGDRTSRYCVLGEEGELLWEASVATTQKGLSEAFSALPPSRMAIETGQHSPWVSRHLSGLGHEVIVAHARNVRLIGESTRKDDRLDAKTLARLARIDPALLSPVRHRSAEAQAHLTRIRARAVLVGARTALVNAIRGLTKAYGERLRKCHPEQIRKELAAELSPELRTALEPLFQEVQSLTERIQHYDREIEKIAQQHYPEVAQLQQVNGVGPLIALTYVLTVDDPHRFRRSRDLGCYIGLRPGRRNSGNSQPELHISKEGNRYLRTLMVQGAHYILGPFGKDSDLRRWGLKLAQRGGRNAKKRAVVAVARKLAVLLHKLWVSGEVYEPLRNHREEKCAAA

SEQ ID NO: 118403 - protein, 319 aa, unidentified
MLIGIDVAKAELVVASRPSGERWTVANDERGVRTLVERLRSEAPELIVLEATGGYELLSVAALVTAMLPVVVVNPRQVRDFAKSTGQLAKTDRIDADILALFAERVRPAVREIPDADAQELDALLARRRQLLEMLGAERNRLGQVFGRGKQKVKKSLKGHIAFLERELRIADTDLGDMVRRSPAWREKDDLLQSVPGVGRIVSFTLLADLPELGRLSRREIAKLVGVAPLSRDSGTLRGRRFVQGGRASVRAVLYMGALVATKRNAVIRTFYQRLLTAGKPKKLALVACMRKLLTILNTMIRTGQRWSIDQSSPALISA

SEQ ID NO: 118404 - protein, 480 aa, unidentified
MAKARKSTFERLQKGQLNRQQRKELQRKFDADSPELDVKHPHAAGIDVGGASHFVSVPPNRDEMPVREFGSWTEDLRCMARWLKACGMETVALQSTGVYWIPVYDVLEGEGLEVYLVNARGTKNLPGRKSDVQECQWLRKLHTYGLLHKSFRPPEQIRMVRTLWRLRDRVVKDAGRAVQQIQKALRQMNVQLSNAISDVSGVTGMNIVRAILRGERNPYQLAKLRDPRIQASEEEIARCLEGNWQPDLLFELQQVMDAYDFYRRQLGIIDKQLEEYLATLPAREPVGKVEPAQLTAKQRKKLKASRKSKDNRPAFDLGAELTRLMGVDLRIIDGIDLMTAQTIYSEVGADLRAWPTEAAWASWLELVPRNDITGGKVIKQKKRPSNNRVATALRNAAESLYRSDSYLGARYRHFTGRLEGLKGVKAMAHYLACLVYRLLTKGQAWVDRGAAYYENKRQQREMVHLQKRAAAAGMKLVPIT

SEQ ID NO: 118405 - protein, 356 aa, unidentified
MINHNRLDFTGQSIYIGLDVHKKSWSVSIFSKYGEYKTFNQPPEADKLVHYLSHYFPGALYYAVYEAGYCGFWIHDQLRKKGIQCLVVNPADIPTKNKERRTKRDPVDCRKLARSLRNGEIEGIYVPCRSKLEDRTLIRTRQSMVRKQTRCKNQIKGMLLFYGVVIPEPREMGHWSRRFIQWIERIRMERASGDIALKAHLEELNHLRQLIASLNRAILHLSRTEEYRPFVRLLKTVPGISTLTAMILLAELGEIRRFPSLDELSCYVGLIPDTQESGEKEYVGGITQRRHSQLRWLLIEASWVAIRKDPALLMAFQEYCKRMRKTKAIVKIARKLLNRIRYVLKNQAEYVPCVIE

SEQ ID NO: 118406 - protein, 310 aa, unidentified
MQDTIGIDISKDTFDIYRLSDRRHERFGSDKAGLAALRRWIGKAPVRIVYEATGRYHRDLEAVLGAAGHDLVKVNPTRARRFAQAVSQGAKTDRVDAAMLARMGAVLELDAKPVRSETMHEIRELHIARRALNKDRTACRNRLEAARNKVVLAQLRARLRQVDSQLEQIDTELARLIAEDPALARRQEILCSIPGIGAVTAVAMIVEMPELGTMEPKEAASLSGLAPITRESGKWKGRSKIGGGRRGVRNALYMPALVAIRHNLHLAETYRKLVDAGKPAKLAIAAIMRKLVILANALIRDDRTWTKTAP

SEQ ID NO: 118407 - protein, 319 aa, unidentified
MNMIAPEQTIGIDVSRDWLDIHCLPDGRSLRLANTAEGHERLVEMAHAAGALVCFEATGGQEWHLWTALDAAGIATRQLPPAQIKAFAASRGTRAKTDRIDAELIARFMAFRPDAGRCLPHEKLRLLRALTSKRGQLVETRKRLLAQIRAHEKLGTADMFAGMDGDLKAMLDRQVAELEARIERLVTADDDLAKTAGILRSIPGIGPVASTMLIAEMPELGQISGEQAAALTGLAPIARDSGAMRGKRAIGGGRCLLRHVMFQAALVASHHNPDLKTFADRLRAKGKPHKVVITAVARKLVTIANALCTSQQKWAAQAS

SEQ ID NO: 118408 - protein, 413 aa, unidentified
MKKRTYRRIAVKEVDVAALAAEVGSGRVVFAIDVAKVDMVAAIVAGDGRVVRTVCWKNPTENGLVLALLGGLRGAGLSVEAVMESSGTYGDVLRHQLLGYGVPVYRLSGKRVHDAAEVYDGVPSLHDAKSAAIIAKLHMDGVSTPWGPLSEEKRELKAAIATMDLYREQHQRLIHSLESSLARYWPELTEHLELSSATLVALLARVGGPHDVACALEQSRGLLHGMSHGLMSQQTIESVLRSATNSVGVRLLTQERVALMTLAAEAHRSLKEFKKAKLAVERLSTSGAAERLAPTTGKATAAVLIADVGDPRDYPSTRAYLKGYGLNLKEKSSGKQKGPAEHHQARSRPSAAIPMAGGVSLAAEGRGSASLVRREDQTRRRATGTSGDSADAQVCAGAVSRSAWGAARLEQVV

SEQ ID NO: 118409 - protein, 447 aa, unidentified
MPELPKPAEPEFVAYLGIDWGDKKHAWALQVAGSTKVEQGEVLHTPEAIQEWVMGLRHRFPTGRLAVALEQSRGPLVFALSKYEHLVLHPIHPTSAADYSKIFRPSGAKSDGPDAAILLDMLVRHRDKLRPLHPDTPETRTLQLLVEDRRQLVNERTRLSNRLGADLKSYYPQVLQWFEDPYAPVALDFLERWPTLEQLQKAKPATLQKFLQTHQCRDEAKNHARREAMQTAVAATTDIAVVTAGCAAARAAVRLLRDLSQSIREYDRQIEKLAKAHPDFAIFDSLPGAGAVLVPRLIAAFGTQRDRYQNAAELQRYSGIAPVTEASGQQSWVHWRWSCPKFLRQTMHEWAAQSIQHCDWAAAYYQVQREERGKSHHAAVRSLGYKWIRIAFRCWQDRTLYDDSRYEAVLRGHHKKATAQPNQPSQFEMPTQWISCGSFQKIALKNS

SEQ ID NO: 118410 - protein, 343 aa, unidentified
MKIHVLGIDLGKTVFHLVGLDSVGRVVIRKRCSRTQLLAFTANLQVQLIGMEACSGAHFLGRALREQGHEVRLMPAQYVKPYVQTNKSDYLDAEAIAEAVQRPRMRFVPIKTAEQLDLQALHRVRERWVMRRTAVVNQIRSLLLERGLTLPKGRSHLDEQLPRILEDAELNLSDSFRVLLAQLKLELEQLAARIEEMDRVIQKTARENEACQRLTEIPGVGPVTATALIAAVGNASAFGKGRKLSAWMGIVPGEYSTGGKQKLLGISKRGNKYLRRLFVQGARSVLQQRHKQAPRLSEWLAQLLARTHQNVVVVALANKLVRMAWAVLCKNQRYHAPVLAITT

SEQ ID NO: 118411 - protein, 452 aa, unidentified
MLWIGTILLPRRWFSKGSNHSVLCSFVNQLNTAQTVYIEQGYESKAPCGYSITNTPLEVFTMISVGIDVAKDKHDCFIISSEGEVLANVFTIQNNMEGFCCLLQRIRDCSSPQDKIKVGLEATGHYSYNILGFLLDNGLDTYVLNPLHTNLYRKSLSLRKTKTDRVDARTIAAMLLSDVGLKPYTETAYHNEELKSLTRYRFNKVKERGQLKQSIARLVCILFPELEKLVPTLHLASVYALLEEFPGAKQIANAHLTRLKTLLQDASKGRYGRDMAVAIRDAARGSVGSVMPAKSLELRHTIHLIHEFDNEINEIESEIQAIMDEIHSPITTIPGIGTRMGAMILAETGDFSRFESPDKLLAYAGLSPSTYQSGQINNCYARMEKRGSRYLRYAIFNAAKYVCHWDPSFAAYLAKKRAEGKHYNVAISHAAKKLVRLIFALEKSGQPYCSAA

SEQ ID NO: 118412 - protein, 309 aa, unidentified
MKASVVQVGIDVAKADLQVAAGGQNLRFANTPAGHHQLIAWLGTLGPIHVVLEATGGYENQLLGALHAAAIPVSRVNPRRVRDFAKASGRLAKTDKIDAAVLADFGAALPSRPTLPPDPAMTRLVAWVRTRAQLLAQGAALENQLEHLTDRVARGCLLELVRACEVRVARLEKAIAGLISSHPLLAARHQKLVAVRGIGPITAALLLAELPELGTFSKSEVAAMAGLAPRNRDSGQFRGQRHAGGGRATVRTGLWMPTLVAVQHNPVLKAHYQHLRAKGKPAKVALVACARKLLIHLNALLKSPLLSPC

SEQ ID NO: 118413 - protein, 320 aa, unidentified
MLSFCGIDVSKDRLDVMVLPDEYSSSVPNDPAGWAILVEQLRGFSITAIGIEASGGYERGAVRSLQAAGMPVRQVNPFKLRQFAKASGVLAKNDPLDARMIASFVGIMPTRPALRTTPAAEQLVEMLAVRRQLSAEKTAAENASRLLEDLMLQRLSRRRIARLAADIELLDKRLVESVATDATLAHRYRLLTSMPGVGPVLACTLIALLPELGGMSRKQVAALVGVAPYAFESGTLKGRRCIWGGRANVRQVLYMAAMSASNWNPVLKLFHDRLKGAGKLPKVVIVAVMRKMITTLNAMVRDDIAWADRLSGRHSVTTAR

SEQ ID NO: 118414 - protein, 325 aa, unidentified
MLTYKNVIGIDVSKDILDVFTLGNSAKPYKQYKNEIPSVEKWLKTIDKTNTLCVLEPTGSYSFVLMHYLSKFEIPFSLVNPLQSDSFAKAQGIVSKNDRQAAESLAIMGKSLDLPLYKYPATTMIKRKQLLLGLNALKKQQQMLKNQLHALSYQIVFAPQVVSALETTLATVEEQIQQLEEELIGLSDDETEEQLKLMQSVTGIGPKTAQLLLAATGGLQHFERTAQLSKFIGLIPSSHSSGSSVRKKGRITKKGNAALRSCLYMAARSAKRYNLACKDLYDRLRTKGRCHKQAIVAVMNKLVKQAFGVVRSGVSFDNQHYLKFV

SEQ ID NO: 118415 - protein, 412 aa, unidentified
MTAKDQFAAHVGLDWADKKHDVCVQFKNGDRIFHVIEHTPEALDIWLNELHQRAKGRIAIAVELKKGPVVYALQKYPFVTVFPVHALSLARYRQAFWPSGAKDDPQDAELALDLMLRYPHKIKAIEADNPDIRLLQQLVEQRRLLVEDKRRFVNRLINTLKQYYPQPLEWFSHRDSSLFCELIIRWPSLQQLKRARSDTVRHFMNAKGGPAVAYTEQRVASIASAIPLTTDKTVIEANALMATALASQIKLTGDLIRIYDERIESLFDTLPDAELFKSLSGMGPCMGPRMLAALGDNRDRFNSAEEIQNYAGITPITERSGQKSWVHWRWQCAKFVRQTFVEWTAKTVNSSYWARLYYQGQREKGKSHQSAVRALAFKWIRIIYRCWKTRTRYDEAKYLLALEARKSPLLKP

SEQ ID NO: 118416 - protein, 453 aa, unidentified
MAGVIIGVDPHKGSHTAVALDGAEKSLGQLRVKATPGQVDQLLRWSASWPDRTWAIEGARGLGQLLAQQLIGAGESVLDVQPKLAARVRLLNTGQVNKNDPNDARSVAVAALRTHAARAVVAEDDTAVMKLWARRHHDLGSARTQLVCRLHAVLCDLVPGGFARQLSAAQAIQVLDDLTVHGPVAAARLELAHDLVADLHRIDEQRQQLKRRITGAVAASNTTLTDIYGVGPIIAATVLGHVGNVARFASRDHFAAYNGTAPIEASSGNRTIHRLSRRGNRQLNHAVHMAAVTQIRNLGTAGRVYYDRKLAEGMGRKAALRALKRKVSDAIYARLITDARPADGAAAKDPGGQSGNDSASSATGSHPETPALRRSHSRATTTLEPAKPSPPPTRRCVLQNRSGAPLDGEDEVVAMVPGLTCCLTRLRWLDGCPFCDLSAEHHRNVHGATDQAA

SEQ ID NO: 118417 - protein, 339 aa, unidentified
MTVKTVGLDLAKDVFQVHGISENGRIIFNKAIKRAKLLSFFETLPPCTVGMEACGSSHHWGRQLRKLGHDVRLMPANYVKPYVKRGKTDAVDAEAICEAVRRPTMRFVEIKTEDQQAILSIHRTRDLAVRQRTQSANMIRSLLREFGHILPIGIEAVTAFAKRHLDGDHPDMPEIANGMLGIQCYQFIGLNERIEGYSKMIEQHALLNADARRLMRMPGIGPVTASAIVATIGDAKQFRTGRDLAAWLGLTPLNKSSGGKERLGKITKQGDRYIRKLLVVGMTSRAVMAKRAPEKVDLWTAKIIADKPFRLATVAMANKAARSIWAMLTKKQEYRQPAF

SEQ ID NO: 118418 - protein, 326 aa, unidentified
MEASIATTEAVTAYIGMIGPIKSTPLLYVRRQTLMEWIGGLEQRFGTQGKILVCLEQSRGALIYHVMGYDFFELYPVNPLQLARYRETFSPGGAKDDRPDSELLCELLYCHRERLRVLKPDSVLGRKLNFFNEGRREAVDQRNRLSNAIKSQLKVYFPVALELLDQDTSTALAADLLLGWPTLEAIQKQPAHRLLKFFYGHNCRGEQRMLKRLELVQKAKHLTQDSAVIEPAALRVQLLARQLKNLLPDIARYEYKIAQLFEAHPERFLFENLPGAGEVLAPRLASAFGSDPQRWESALEIATLSGIAPVRRASGMKSGKKGSKKG

SEQ ID NO: 118419 - protein, 443 aa, unidentified
MSKFKKTFELTYPNAAGIDIGASSHFVAVPADRDDQPVREFASFTEDLHAIADWLTACGINTVAMESTGVYWIPLFELLESRGFTVFLVNSRHVKNVPGRKSDVLDCQWLQQLMSFGLLSGAFRPQGDYAALRVVARLREMLLRYQATHIQHIQKALLLMNILLTEVLSDVMGETGQKIIRAILAGERDGETLARYRNGHVKASEEEITKALQGSWRDEHLFSLKVAVELYDFYAEQLVACDQQIEQLMKDLARYDLKPEKHKRRGGKPKNAPKFDARLLLMQMCGVDLTRIDGIDVTTAFKVLSEIGADMSKFKSAKHFASWLGLCPGTKISGGKVLSAATKRTANKAAQALKMAAVNLRNSQSALGAYYRRLCGRMDKGKAVTACAHKLARLIYAMLTKGEEYVDQGQTYYEEKYRERVIKNLTKRAEALGFQLTPTPEMA

SEQ ID NO: 118420 - protein, 429 aa, unidentified
MTRGKDTTVVTVLHPICCGLDVHKEFVTACVMTTECQGQETSVLESFGTFTDDLVRLRDWLLEHECPIVAMESTGVYWRPVHNILEGHLSVVLVNARHIKNLPGRKTDMSDCQWIATLLRVGFLKASFIPPKTVRHWRDLTRYRRSLVEALGDVKRQVHKLLESSNIKIDSVVSVLFGKTGRNLMELLVKDQSELTLEAVQTCLRGRLRSKATELFRAVQGFFEDHHRWMLREMLDRVDQHEANLARVESRLRDLMQPHNELIGRMAEVPGIGSTSACAILSETGTTLESFPNAGAFCSWTGVCPANNESAGKRRSTRSPVRRNHLRTHLVEAAWGAVKKKGTYFRSKYFSLRSRLGPKKAIMAIAHRILKALYYIIKHGDSFRDLGEDYLMDLKRRSITSYLQRQAKKLGMVLLPESMCKLMTDGSSA

SEQ ID NO: 118421 - protein, 387 aa, unidentified
MIKKRGRVVGLDVHPDSFAGAVVAGSDPASAQVSSTSTRVELERLEQWALRHTRTEDTLVLEASGNAFSVAERLRGIGRKVEVLDSHRAGKVGKVYCANDRVDAVKIARIYLSALLPIVWQPDPKTLERREVFSAYQAVVKESTRARQQLRSMLNEHCVRLEKGFRLCHPNALMRLLALREWTPARRMLLQQLHGSLVAARARRTLLRRHMAQEIVAEEALLRLTRLCGINLVTLYGVVAAVGDVRRFSHSKKLVAYLGLNPSVSQSGNFEGSTALKRHGRGALRALLIQSGKKLLQVTNPLQKWGLAVAARRGRNKAAVAVARKLCVALWHVLMGHAIGALERLDTLETKLSKFATEMGPAALHAFGYNNKADFVKKKLYVLRSYP

SEQ ID NO: 118422 - protein, 321 aa, unidentified
MQTNNAVIYAGVDVAKATLQLHLQGQQSEFRNTPKGLLQLVAQLQTVPSVQVVCEATGGYERAMVKVLHQGQILVSVTNPARVRAAAQAQGQRAKTDRIDARGLTDYGQRYQPKTTPPVSATQEQLVNLTQWLKQLIHGRALAKTQAEHHQNPFVRRQHAKLMTHLDSQIEAVEKQIEALLEQDAALQQRATCLDEIQGVGPRTAWMVLAHMPELGQLNRQEVAALAGLAPWTRESGTMKGMRCIGGGRPEVRLALYMAALSAARCNPVLRILYKRLRAKGKLPKVALTAVMRRLLTYMNHCIKALPSETAGARTEELKAA

SEQ ID NO: 118423 - protein, 340 aa, unidentified
MAIVAGFDVHRAQITFDALDVQTGEVHRGRIRATPEAVREWAQRFTGEQVDVAVEACTGWLFVCEALVEAGAVPHLAEPVETSALRGRKRRAKTDREDARWLRTLLCEGRLPEAWIPPAHVREWRTRARLRKTLVDERTSWLQRVQATLFHHGVAGAPDKLLSAHGREFLAGLELPDAARERIEVALAMIEALDRQLAPLEQGLRRLARRQTGCRALMRHYGIGELTAPTILCELGDVTRLSASRKAVRCAGLDVGVHRSDRRSRAGKLSRQGSPQLRWALYESAQAACRPTSPDRADYLALKARGLSHTRASLTIARKLARRCFHTLRELGPAALEPIT

SEQ ID NO: 118424 - protein, 405 aa, unidentified
MGIYVGIDWAEAHHDICVLDETGRVLAKRRIAEGLDGVGQLHAMLADHAQEPDQVVVGIETDRGLLLGALRAAGYQVYAINPLAASRYRERHVTSGAKSDPGDAKVLADLVRTDRHNHRPVAGDSELAASLQVMARAHQNLIWSRQRLVNQLRNNLREYYPAALAAFGTELAHPVALGVLDAAPTPAIGRTLSQSKLAAILRRAGRERGVQDKAAAIQAQLRAPHLAAPTLIGEAYGKSAASTVRILRGMNAELASLESELAPSFEKHPDAEIYRSLPGLGIVLGARVLSEFGDDRTRFAHPKARKNYAGSSPITKTSGKSRVVLARMTRNRRLADACHQWAFCALIPSAGARDYYHRLRQRGKTHHQALRALANRLVGILHGCLDHRQRYREDIAWPASLTVAA

SEQ ID NO: 118425 - protein, 357 aa, unidentified
MKMTTIGLDLAKNIFQVHGVDEQGQVVLKKSLKRTKVLPFFANLEPCRIGMEACGGAHYWARQFERFGHTVKLMAPQFVKPYVKTNKNDAADAEAICEAVTRPSMRFVPIKPPEQQAVLALHRARQGFVKARTAQANQIRGLLTEYGLVIPQGIGQIAKRLPVVLEDGENALPEVFRALLQRLGEHLKTLNRQVEELDEQIQRWHREQAASRKLAAIPGIGPLTASALVATLGDARQFENGRQLAAWLGLVPKQHSSGGKPTLLGIGKRGDTYLRTLLIHGARGHPRRQAPIESCGKLARSVAPSTKPKCGGGGPGQQKCAEGLGAARARPRVPTGLRPGGDRSVAEPSIESPYSTK

SEQ ID NO: 118426 - protein, 407 aa, unidentified
MEVIHERCAGLDVHKDSVVACARIARGRKVERHVETFGTTTSELLCLVDWLRTHGVTHAAMEATGVYWKPVWYVLADQFELLLANAREIRQVPGRKTDVNDATWIADLLAHGLIRASFVPPEPIRELRDLTRTRKQLVAERSQHVQRIQKLLEDANIKLSSVVADILGVSGRTMIEAIVRGESDPKRLAELAHGRLRASRKQLEEALHGRIRDHHRFMLGLHLAQIDGLNASIGLVESRVEEMLDPFADLVKRLKTIPGVRDVVVAVLLAEIGPDMSKFRTAGHLVSWACLAPRLDESAGKRRSTRTRKGQWLKAVLIQAAWSAVRQKDTYLHAQFHRIRARRGAKKAILAVAASILTAAYYMIRDGTEYRELGPDFFQRKHQKGRAFHLAQQLRNMGYDVELKTAA

SEQ ID NO: 118427 - protein, 405 aa, unidentified
MNVFMGIDWSAKKHDIVILNEAGAIIARDIIPHKACGFQQLDEVRQSLAVSATDCLVGMETAHNILIDYLWGQGYNQVFVIPPTVVKSSRGRYGSSGSRSDQKDAQLLADILRTDRIRLQPWCPDSLLTRQIRAKVSLVHHLTKSVRRATERLRAILVRYFPAALELFGGLQAQITLAFLLEYSTPQAMAALSYEEFVDFTNGRRYPRRWLPKHYARMQRPQPQASLETVQVYQDEMRLLAQQCLDLVRTNRALKRELHQLFSQHPDHEIFASLPGAGQLLAPSLLAKFGDDRERFPEPSSVQALAGTCPVTDASGKRRVVKFRRSCDLEFRQIAQQWARASLGKSVWAQAYWDQVRPRAHHDNDAYRRLANRWLAIAWKLWQSGQPYDEAYHLQQRLQRSKPRD

SEQ ID NO: 118428 - protein, 322 aa, unidentified
MRRKDKASFPASPAGLDRARTWIAHRAGQQAALVVIEGIGSYGAGLSDRVLAAGFPVAEPSVMGSADRRGVGKTDDLDAARIARSVLSVDIDRLRRPRADGSRVAMRVLVVAREQMTCERTRTINALTALVRTVELGVDARKSLTYSQIKEIATWRTRSEDATTATCRAEAVRLAKRIRALDAELVDNRKSLDALVKTNAPELTAAVGVGPVVAATLLIAWSHAGRVRSEAAFASLAGTCPIPASSGNTVRYRLNRGGDRRLNRALTTIVIVRMRTDPETRTYVERRRGEGRTTKEIMRSLKRYVTRQLFRTLATAHPISVS

SEQ ID NO: 118429 - protein, 414 aa, unidentified
MRVVYERCAGLDVHKKTVVVCIGVPDGQGGRRMELRTFRTTTAELLKVADWLRQHGVTHVAMESTGVYWKPIFNILEEEFAVLVVNAKHIKFVPGRKPDVKDAQWIAELLQHGLLKASFVPDAPQRELRELVRYRTHLIQERTREVNRVHKVLEDANLKLSSVATDVMGVSGREMLAAIIAGQDDPAALAELAKGRMRTKIADLEAALTGRIKESHRLLLRLHLEHIDDLNAKLSELEAEIDKQLLPFDQDDLIERLDEIPGINQNTAQIIIAERGIDMARFPTVNHLAAWAGLASGQNESAGRNRSSRTLKANRYLRPALVQAAHAVARTDTYLGEKFRRLARRRGQKRAALAVARTMLVIAYPIIRDGTRFIERGATFFDHWHAPSTQQWLTRRLERLGFTVTLAPIEVVTA

SEQ ID NO: 118430 - protein, 344 aa, unidentified
MQQPTTIGVDLAKTVFQVHGVNQTGKAILKRKLRRNQVLDFFAGLEPCLVGLEACAGAHYWARELSALGHEVRIMPPSYVKPYVKRGKTDAADAEAICEAVTRPTMRFVPVKSAERQAALLEHKTRDFLVRQRTQLVNTIRAHLSEFGIVVAKGIHNVDRLLEAAKDLPEAARPAVDMLADQLRETQEKIDDVTARIEGAQNADPLARRLATIPGLGAITASAIAASCQRHASGVTPEVDNFRTARDYAAWLGLTPQPHSSGGKERLGRISKAGNRYLRRLLYLGASCRRHAFGVTAQISARWCRRPGDDCEPDRVHRRDWSWSLSGDLGREVFAVEVPFCGCG

SEQ ID NO: 118431 - protein, 401 aa, unidentified
MTESTLVVAGADTHLDTIHVAAISMTGALIGDREFPTTRAGYTAAIRFLTSLGQVQRIGVEGTASYGAGLTRALTAAGIEIVEVSRAVKSTRRLKGKSDPLDAYSAARTALAGDGLAIPKDDATAGLRALHIARRSAVKHRTAVINQLKAMLVSAPDAVREKYRGLTTLKLIEAIARCRPDAPSDPWAQSMLIAAKMLAQRVQFLETQAEELETQIDALVTDANPGLRAAYGVGADTAAQLLITAGANPHRLHSEAAFAALCGVAPVPASSGKTTRHRLSRGGDRAANNALHRIALVRLSHHQPTKDYAKRQLLGGHSKSKMEVLRKLKRAIAREIFKLLTHQIAVPEYADLRPARQAKNITVTAAANHFGLWPTVISRIERGLQRDDEFADTYRTWLKAA

SEQ ID NO: 118432 - protein, 365 aa, unidentified
MNSVITNTELSSHEGTRCQFNGSTGAIKLGIDVHQNFYVVVMQEGGANPKPPQRFSKQAFVHWASKLKSRGAEVYAVYEACGFGFWLQRQLSSLGVQCHVVCPQKLDEQNRRVKTDELDAKALCLKLDRFVEGNRCALALVRVPSEGEEQNRAIHRQREQLVKARKQLEAQGRSLMVNHGMEPVQNWWKPRTFGALPAPHWMKALLANSQSILVALQQKIVALSAQLQSAASPDQPCGLGKMTSVIIDREIGDWNRFSNRRQIAGYTGLCPGEYSSGNTRLQSWVTKHGNPRLRAALVELSWRLVRFQPNYKPIIKWRAILAKGALATGAARKKAIVAVARQLAVDLWRIKTGRLRAEELGLINY

SEQ ID NO: 118433 - protein, 342 aa, unidentified
MDYYAGIDVSLECSSVCVVDANGKIVREGKVASEPDALIGWLTSVGYELSRIGLEAGPLSQWLFAAMREAGLAVELLETRHVRKAFEAMPVKSDRNDARGIAQLMRLGWFRPVHCKSIGAQETRAVLTARKLVQSKLRDIENHLRGILRGFGLKVGKTTNPSFGTRIRELVANHASLEMIAEGLLSVHAVLLREFKVFEKQVRSMARSDAKARLLMSTPAVGPIVALTYASAIDDPARFKSSKRVGAHFGLTPKKYQSGETDYTGRISKIGDGSVRTVLYEAAHIMLTKPVKGCSALKSWAMRIARRAGMSKAKVALARKLAVIMHRMLVDGKPFNFAVAAA

SEQ ID NO: 118434 - protein, 324 aa, unidentified
MKTYVGIDVAKDSLAVAFPKSDSSWKAASFPNSPVGIRSLISFLPSEAHCVVEATGSYSMLVAYMLSQAEITLSVINPKQSHHFAKMRLSVTKTDESDAVLLARYGQMTQPAIYHIVSDALLRLRQKRTLLRQYKKQYQAMRNVEHSFSSLPVKDKSAQTSLRHILNELEAAIKNLMVEIEELTKADFNQEFVRLNSVVGISTAIATALIEVSGGFRHFHSAKALSKFIGVAPIIYQSGKLNSVKGICKTGDAQLRSMLNVASWSAIQHNKSCRELYHRLKAAGKASKVALIAVVNKLLRQAFAVVKFDQNFDPNYKPVFRAYP

SEQ ID NO: 118435 - protein, 360 aa, unidentified
MSFNGTSVGLDVHALSVVAHAVDEQAGRVERARLCPDHGEILAWLRRLRDPVRVAYEAGPTGFGLARALAGAQIDCVVAAPSKLIRPAGDRVKTDVRDAAHLTRLLRLGEITAVTVPEADVEAVRDLVRAREDARADLMRVRHRLSKLLLRQGRIYSGGHAWNGVHEIWLRRQRFDDAHTAAAFDHHFDAVLTATAARDRLDEQIVVVAASPRWADPVNRLGCLRGISALTGLALSVEIGDWTRFSGSSIGAYVGLVPTESSSGTSRVQGSITKAGNAHVRRLLIEAAWHHRAAYRNPGPTMRARWAKVDPALKARGHAGNRRLHQQWCRFNERKKPHVVANVAIARELAGWCWSLATLK

SEQ ID NO: 118436 - protein, 421 aa, unidentified
MTTDSKPAFFAGIDWATQKHDVCVIDSEGRVLGERVFRADAEGLGDLAGWVASFEGDAGDIWIAIETPHGAVVDTLLERDLRVHSLNPKQLDRFRDRFTVSGAKDDRRDARVLADSLRTDLRAFRVLSVIDPRVIELREYWRMTEDLQHDRNRQCNRLREQLRRYFPQALEVETDLSKPWVLDLLTEIPTPAIARKRRRATVDRILRTRRIKRVTADEVLATLRKPAVCTAPGIVEAATAHVKKLIEQLRLTVRQHAECRRALDHILAQLAEHDAGDGRAGELRDAAIMRSFPGIGTIVQTALLAGGSRPVEARDYHALRALMGIAPVTRRSGKRRQVLMRQACDSRMRNAAYHWARVASQRDPHWRALYKALRKRGHGHGRACRGVTDRMLSVLVVMLQTRTTYDPTRLGQKLSVSASAA

SEQ ID NO: 118437 - protein, 342 aa, unidentified
MKLFIGLDVSLAKTAVCVVSEHGQIIKEAETESDPEALAHWLDELDGSIAAIGLEAGPLSQWLHRGLTEAGLEAVLMETRQVKGALKAMPIKTDRRDAEGIARLLHLGWFRPVHCKSVSAQETRAVLGARKAIQQNMIALEMSLRGLLRNFGLKVGAISRGRFETRIRELADGNPMLETATAPMLRARATLRQELAALEKQVRQLAQDDPVCHRLMTMPGIGAVVALTFRAAVDDPTRFRSSKRVGPWVGLTPSRNQSGERDLSGGITKAGDVNLRRALCQAATVMMNRGRSTWLRTWGAQLAQRRGRKIAMVALARRIAVILHRIWVDGTTFQSDAAPNPA

SEQ ID NO: 118438 - protein, 410 aa, unidentified
MEAIVERVAGVDVGQATVVATALVGAAHERARKETRTFRTVTRDLLALREWLLAKEVTHVALEGTGIYWRPVYEVLEDAFEMILGNAHHIKNVPGRKTDVKDSEWLADLARHGLIAQSFVPPKPFRRLRELLRYRRKLLESRTAERNRLLKLLETANIKLASVASNVFGVSGRLMLQALIEEAATPSAMAALAQGRLRTKVAELEHALEGRLDEHHRFLLQLQLRRLDHGDADLASLDARIDEALLPYRAPCEVLQQIPGVSRVVAAVIVAELGTDMTVFRSAQHAAAWAGVCPGNNESAGKRMRAGARKGNVHLRTALVEAAVAASHTKGSYLRDKFYRLRARRGTKRAAMAIGHKILIAAYHLLATGAPYRDLGPTYLDGLDKRHTTRTLVRRLERLGYDVTIAPKVA

SEQ ID NO: 118439 - protein, 353 aa, unidentified
MQRPRQGQVIIGVDTHKEIHVAAAVDWQGTLVGEECFPTTRQGYRLLESWARSLGEVLRVGVECSGSYGSGLTRHLLKNGFAVLEVTFPDKTVRRKRGKDDFIDAEMAAEAAFTGARTVTPKSRDGMVEALRMLQKTRSTAVAARRVALQMIRADIISAPEELRDQLRGMTRMQLIRHLVATRPDSTDFRTPLGAAKIALKRLAKRYVDLDDEVSELDDMIDAILADAAPLLVQLKCVGTQSAAQLMVTVGDNPERLRSEASFAMLCGVAPVPVSSGMTYRHRLNRGGDRQANSAIHIIAIGRLRTDERTKEYVAKKMSEGHTKMEAIRCLKRYIAREVYYVIKRQSELVNCS

SEQ ID NO: 118440 - protein, 317 aa, unidentified
MSVASEVFVGIDVSKAELEVCWVPQADRLQVARDEAGLGRLVERLQALGPALVVLEASGGYEMPVVMALAGAGLPCVVVNARQVRDFAKASGKLAKTDRIDAQVIAEFAQAIRPQVRALPDAAAAHLIALVARRRQLVEMLTAEQNRLALSHAAVREDLKQNIAWLKSRLQDLDGELARAVRSSPLWRESDKLMQQVPGVGRVVSVVLLALLPELGRLSPKKIAALVGVCPFNRESGRWNGKRAIFGGRAGVRSVLYMAIVSAIRWNPLIKTFYQRLLAAGKPKKLAMTACMRKLLVILNAMMRDRADWNPNGALAT

SEQ ID NO: 118441 - protein, 340 aa, unidentified
MKLYAAIDLHSTNNVTVVIDEQDRVVYQKRLPNDLALILKELSVYQSELEGIVVESTYNWYWLVDGLMERGFRIHLANTAAIQQYEGLKYTDDHSDARWLAHLLRLGVLPEGYIYPRADRPVRDLLRKRSQMVRQRTTNLLSIQNLLTRNTGSSMKANRVKGLDVQQVDELLPDGDLALAVKANLSVMLSADQQVELLEQTVTQRVKLRPQFSFLRTVPGIGEILALTIMLETGDIRRFASVGNYASYCRCVGSQKISNGKKKGQGNTKNGNKYLAWAFVEAAHFAIRFNSKIKSFDQRKKAKTKGVVAIKAVAHKLCRACYYIMRDRVAFNITKAFGPK

SEQ ID NO: 118442 - protein, 384 aa, unidentified
MDISTMGMDLSKTTFHLIGLSPRGEIVLRKKLSRKQLLTYTATRLPMLVGMEACAGAHFLARALRDQGHDARLMPAQYVKPYVKTNKNDYLDAEAIAEAVQRPTMRFVPIKNDEQLDLQALHRVRDRWVARRTAVMNQIRGFLLERGIAIRKGPSYLMTQLKIIFSDGNPSFSERLLHLIHELKHEWDELERKIEEADTELARIAKEDDGCHRLMEVPGFGPIVSTALVAAIGNGVNFRKGRDLAAWLGLVPRQHSTGGKTRLLGISKVGNEYLRRMMLHGARSVVMQMERKPSALGEWLTSLSARRASQCHGGRFGQQDGSNRVGHLEQRHTLLRTCLRGSLTRGVQKTPSVRAWKSLRDSTLFQPSDDEVFLSSLRDKSMCE

SEQ ID NO: 118443 - protein, 837 aa, unidentified
MTIMTYIGIDVSKDSFIAAYPTKSGYTTKSFPNTTSGVRRFIQSLPAESHCVMEATGNYSMLLLYLLQEANILVSMENPQKIKHFARAMLSTTKTDEIDAKLIAMYGEKMNPVPYKIPSESIILLRQKRTVLRQLKKQLTATLNLQQALAALPKQDPTSKATIEKTISFLRKQISKMEEEITNLSNKEFNSQMTLLTSIKGISNTIASALITATGGFTYFSSAKQISRFLGLCPTYQQSGTSINVKGHINRNGDTYLRSQLYIAACSSIRCNAACRETYERLRAKGKSGKGAIIAVANKLIRQAFAVITNNQPYIDGYISSYNFFNIVRALVAKKRYIFLLLALLLLLPAAAKKKDPKPQEVDSLGRKIKTGWNFGILPSIAYDADYGFQGGVLTNVYYYGDGSQYPEYIHSIYVEAAYTTKHHGIFRVNYDSKYLIPGYRLTLDATYLPDAMCDFYGFNGFQSKYNYSWHNWSKKAADPQFVIDHPEYMDYRTRVFYKYKRDLIRVAGDIEGTIYKDLKWNAGLGVLGYLIDDCDINMLNGKREYDPTKANWEQKALNPNEELLYDKYKSWGLIGTDEMKGGWHPYVRAGITYDTRDKRQGPNKGIYADAFFTYSAAFNAAYGQQAAAGYNHLQFNATFRHYVPCYYDKNGINRITFAYRIGIQNNIAGRSPFYMNNYMNTLFIQRVYYEGLGGGNSIRGMMANRILANGFAYANIEFRFRVVNFDIKRQHFFIGLNPFFDMGVITQPYNLDQLVARNTHGAYSTLRERVEAAGDNYSDYFVDTPNNVYMPHMTAGIGLKIGMNENFVLSADWGMPINTQDNGKYANFYVKMGYLF

SEQ ID NO: 118444 - protein, 355 aa, unidentified
MNQEKYIGMDVHDATISAAVKNAQGKLLMECVLETKAATILEFIQGLRGTLALTFEEGTLAAWLHDLLKPHVSRLVVCDPRKNALLRDGNQNDRVDARNLAELLRTNQVKAVYHGKHEIRALRELGRSYLTLTQDSTRVMNRIKSVYRSWAIPCAGTSVYSRRHRAEWLAKLVEPGVRIRAQHLYQELDSLEPLRQAARRELLRESGKHAAVKLLRQIPAIGPIRSALLVALLQTPHRFRTKRQLWAYSGLAVQTYDSGEFRFVRGKLQRNRERITVRGLNRNHNHDLKNLLKGAAISAIQRPGPLQDFYAALVEKGMRPSMARLTLARKIAAITLTMWKKGVSFDPRQLPRPAA

SEQ ID NO: 118445 - protein, 339 aa, unidentified
MLIIGCDYHPGFEQIAFVDTETGECGERRLTHREEAEQFYGMLKGRSVRVGMEASGHARWFERLLSDLQFELWIGDAAQKTDRQDAQLLLRLMMEDRFPRIWVADAENRDLRQLLWHRHRLVQMRTRVMNQLHVVALNEGLRRKKALWRPAGRNQLESLILAPWASRRRRDLLDLLDQLSPKIQELTRALEDEVEKRPVTRRLMTHPGVGPLTALAFELVIGSPERFHCGKQIASYVGLVPSEESSGDRRRLGHISKQGNSLLRYLLVEAAQVTVRSHQHWRSKFFHLAMRRGRKIAKVAMARKLAVHLYWMWRQGWDYGQFEKLGSYAGEPGNRQGVQ

SEQ ID NO: 118446 - protein, 439 aa, unidentified
MNKRRDRVCGADVHKDLIVATITGDDVLPIRENFGTTKAELKRFRNWLVANKCEQVAFEATGVYWMPIYDALSQNIDTIVANPLQIKTIPNDKSDSKDSNRIATLCLNGQIKRSRVFTDEDRDLRMMTRARSGYVKTRTQFRNRIHKYLSSSGIKLSSTMDDMFCKSGRYILNGLAEEKPIEEILKGIPSGKIRKKQDLIRAALENVLNDTNRMLLIDALEILDNLESKMEKLSLEVLKKVQQKSKDLAIVMSIPGIGFVSASVILSEIGNYRDFQTPDQLAKWCGLNPGENESAGKKKKCGITKRGSKHIRVVLVQAAQTISNMNKTGLSRFFQRLIKKKEHNVAIIAVARKLICLIYHLLINQELYQEDDSGKKRSSQDKSCHAPSFQEEHLTDRVAAIVDAFYHLKESSRKNALMREIADISGIKVGQKRPSKGGG

SEQ ID NO: 118447 - protein, 421 aa, unidentified
MKKAKTGKIKFVKEDTLILAVDIGMEMNHGYCTTPDGRDIKPFKFENTREGMDKLWCTVLENKARFKCSEIIVGYESTGPYGEPFLHYLVKKDVKIVQVNPMHTKRVKEISDNSPLKTDDKDPRVIADIIKLGRALSVVIPEGDAAYLRRLNNLRERHIKERTALLNQLQQLVFLLFPEFKKVFKNIQCMTPLYILKTYPTPGEISVLDKDTLGEEMRKKSMGKFREQHAETLIKFAKNTVGIQEGVLGISMDIKHILVQLELLDTQIAEIESEMEVTLGRIPYSSKLLSIKGFGLVSVAGIIGEVGDFKQFRTRGEIMKLAGLDLYEISSGKWKGQRRISKRGRSLIRKILYYVAIQTIREHGIMHDYYARLTDGGMKRMKALVAVSRKLLGIIYAIVRDDSEYVTHFESTKRQVKKMAA

SEQ ID NO: 118448 - protein, 343 aa, unidentified
MQIRSVGIDLGKTTFHLVALGDNGKVLLKKKFTQRQLIAFTANLQTCLIGMEACSGAHFLGRTLRQQGHDVKLIPAQFVKPFVKSNKNDFIDAEAIAEAVDRKNMRFVPIKTDDQLDLQALHRVRDRLIARRTSVINQLRAFLLERGLVFAKSPARLRERMPEILENADEDLTPRMRNLLALLWNEWKDLEQQLVDLNQEVERIASSDAACTRLRQIPGIGPLVATAIVAAIGNGAAFRKGREFAAWMGLVPKQYSTGGKAKLAGISKRGNRYLRKILIHGARAVVLRSKRDRIAMGQWMTALEARAPRNVLIVAMANKLARIAWAVLSSGQDYRAVQEPVAA

SEQ ID NO: 118449 - protein, 347 aa, unidentified
MNNIIRIGMDTSKHFFQLHGVDAAELPVLRRKLRRNEMLAFFAKLPPTVIGMEACGASHYWTRELGQLGHEVKLIAPQHVKPYIKRNKNDGRDAEGLCEAMSRPTMQFVPVKTAEQQAALMLAGMRERLVAQRTQLSNALRGYAAEFGLIATKGLDKIEPLLADIAADEGLPVLARELFAMHGREYAQLQAELKAIEARLMAWHRANPDSRRLAQIPGIGPISATALVMKAPDPRAFPSGRHFAAWIGLTPKDHSTAGKTRLGKITRAGDERLRSVLVAGATAVIQQARRGRGRSSPPWLLALLARKPPKLAAVALANKNARIAWKLMTTGESYNGARMPGVSALAA

SEQ ID NO: 118450 - protein, 346 aa, unidentified
MKATTIGFDLAKAVFQVHGVDAAGKAVVRKKLSRAQVLPFFTRLAPCTIGVEACASAHHWARKLAELGHTVKLMAPHFVKPYVKANKTDAADAEAICEAVARPNMRFVPVKSVEQQAILAVHRVRSGLVAERTAQLNRLRALLAEFGLIAPRGRRALMERLPLLLADETLPGVARTLFERQSMRIRQLEAEISAEEAVIMDWHRNNELSKRLDAVAGVGPITATALVASFGQGREFDNGRQMAACVGLVPRQHSSGGKTRLLGISKRGDGYLRMLLIHGARAVIRTLERRAKGGNNPTDQWLARLLVRRNPNVAAVALANKTVRVIWALLAHDRTYDRNWSGQRAA

SEQ ID NO: 118451 - protein, 348 aa, unidentified
MRFYTNQHKFYCGIDLHARTMYLCVLNQEGKIVLHRDIKTNPDIFLKTIAPYREDIVVAVECIFTWYWIADLCSEENISFVLGHALYMKAIHGGKAKNDKVDAYKIATLLRGGMMPMAYVYPSDMRSTRDLLRRRTHLARKRAELIAHIQNTNHQYNFSDMGRISRKCDRNKAGVADRFTDPSVQKSIELDLTLIDHYDKLLNHLEHELSLIAKVHDADSYFRLRSIPGIGRILGLVILYEIHDITRFPRIQDFVSYCRLVKCAKESAGKIMGSSGKKIGNVHLKWAFSEAAVLFLRRNPDARKYRDKLIRKHGKAKSMTILAHKLARAVYYILTRKEVFNPNIFFTH

SEQ ID NO: 118452 - protein, 395 aa, unidentified
MFIVGIDVAKRSHEVCMITSDGQTVQRPFSIRNNCTGYNLMLEKIRKHTNIKSQIVFAMESTAHYWLALFTRLRKDGYHVILLNPIQTSAMRDMFIRKIKTDAKDSFIIAELIRFGRYAESNVAQDRLLALKELCRNRSYLVDMAGDLKRKLIALIDRVFPEYEAQFDTIFCKSSVAVLKKYPTPQKLSNAHLDKLTELLWNSSNGHFGEWKARELKELARNSFGVEDCDGAYSTLILLMLDQIQSLSGKADALEKEISRLFQSFDTTVTTIPGVGPIIGAVILSEVGDISRFSSADKLAAYIGVDPSVNQSGEFQAAHAHMSKRGSPYLRRCIWMASQVAVQRDPMFRAYYEKKAAEGLKYMTIIGHVTRKMTAVVFAILRDHKVYEPVLPTAA

SEQ ID NO: 118453 - protein, 326 aa, unidentified
MTLSHLTDNTFVGIDVGGAGLDVAWHRGDSAHYANRPDAIATLVERLRTGPEVTRIVLEPTGGYEKPLVKALRQAQLPVEVIHTTRFNAYRALVGVKAKSDTSDARLLASYAAAPDEIRGRKAGHVELPEDAIREALSELAGRRDQLKHMIHAETCRLGTVRLSELRQAITAHLEALRAEDKQVHRMMLELVRQRIDLRRDQRLLKTIKGIGVKSALGLLASVPELGRIDNKAAAALIGVAPFVRKSGTMSAPARIHGGRAAVRSILYMAAVTASRHNPVLRPFYERLIANGKPPKLALIAVLRRLVVFANAVLRSGQPWKGANAT

SEQ ID NO: 118454 - protein, 364 aa, unidentified
MNSVITNTELSSHEGTRCQFNGGTGAIKLGIDVHQDFYVVVMQEGGSNPKPPQRFRKEAFLHWATKLKSRATEVHAVYEACGFGFSLQRQLNALSIHCYVVCPQKLDEHNKRVKTDGLDAKALVLKLDRFVQGNRAALAMVRVPSKEEEQKRAIHRQREQLVKTRMQLEAQGRTLMVNHGIEPVKNWWKGRTFAALQLPAWMKELLGNSQPILLALQEKISALTLQLQVAAASKQARGLGAMTSVIIDREIGDWNRFSNRRQIASYTGLCPGEYSSGNSRLQSCVTKHGNPRLRAALVELAWRLVRFQPSYKPILKWRRLLAKGALATGAARKKAVVAVARQLAVDLWRVRTGRCKPEALGLVI

SEQ ID NO: 118455 - protein, 295 aa, unidentified
MSQQLSTTIAVIGIDIGKNSFHVVGLDQRGAIVLRQKWSRGQVQTRLANMPPCLIGMEACVGAHHLSRKLKGLGHDARLMPAKYVRPYSKGQKNDFRDAEAIAEAVQRPTMNFVATKTPEQLDLQALHRVRERLVSQRTGVINQIRAFLLERGVAVRQRQRFLRAELPGILAAPPDVLSPRMVHIIEDLASDWRRLDERIEGLSGEIEAIAHRDAGCERLMSVPGIGPIISSATVAAIGAGDAFAKRPRLRRLAGTRPQADLDWRSAAIATCGSCSCRRHGLCSSSQRADGHIEA

SEQ ID NO: 118456 - protein, 397 aa, unidentified
MYIVGIDIAKRKHEAAVIDGEGAVIIKPFSFTNNCSGYNRLLAMLTKAKLPLDEVSFAMEATGHYWLALFTRLQKEGFRVQVINPVQTNSIRNFYIRQAKTDPRDALLIAEVIRFGHFSESSLHPENIYELRELCRGRHAIVSMQADVKRKVVALLDQVFPEYETAFTNLFSDTSMAILQTCPTPKELSEMPLEELCHLIEVSSHKRFRMAKAQELQELARNSFGFAMAGDVFSTMIRLYAKHLDFLKQQVREMDRKIAEIMETLDTPITTITGIGPTLGAYILSEIGDISRFSSAAKLAAYAGIDPTMRQSGEYNGVRNRMSKRGSPYLRHAIWLAASSAVLHDPALKLYFQKKRDEGKPYMASVGHACRKMVSIIYAVMRDNKAYVPYIPSKIFA

SEQ ID NO: 118457 - protein, 400 aa, unidentified
MLSIGIDVSKGKSTVCGMKPGGEIVYTPFEVQHTREGMSELVSLLRGSGEEVRAVLESTGSYHCPVVTALLENGIFVSVVNSLRMKRFCSQSIRKVKTDRIDAMQIALYGLAYWQELQPTKLPEDTYRELQLLARQYYQMTSILIKAKVDFNAICDQVLPGMQELMSDHAGRHKLSDFVLRYHHTTHILEMGETRFRKDYCKWAEKKGYRNCERMAALIFATAQNGIPVLPNAPSTQIVITEAIRVLHTVEASRDAILTQMQALAKTLPEYSLVREMPCIGDTLAPRLIAEIGDVRRFHSKRALIAYAGIDAPPYQSGKFCANNRHISKRGNRYLRKTGYEVMQSYVMHKPANDPIFTFIEKKRSEGKCGKLAMVAGLNKFLRVYYGKVTELYRSLPAIE

SEQ ID NO: 118458 - protein, 450 aa, unidentified
MSVPLLSERVEVPRDLDVTGELFGSFVTEELAKTGETNGIAAIETIAHEREPPVSMGRPARSAHTWVIHHDGRKLPQADLKGADRPMINIPPNATVLALDVHKFSITAAVLEPGSDSPVLDKLGSNEESVRRLVARLGDKAPISACYEAGPTGYELARYLKGLGVRCDVVAPSLIPKMPGDRVKTDRRDARRLARLLRAGQLTAVNVPSPAEEAVRDLCRARTDMVIDRVRAQSRLDKFLLRHGRVFSDGSNWTARHEQWLAAQRFDEPAMQATFAHYRGALSAREAELRAIEVELGDYYVREPFASGVARLSAYRGITALGALTLCSEVCDWRRFPTAGAFMSFCGLVPSEHSSGQQTWRGGITHAGNWHLRTHLVESAWVYKGQPRIGVTLQRRQRDASPELIARSWRAQLHLSKKFRRLDEKKSNRKVVVTAIARELAGFCWAEMTA

SEQ ID NO: 118459 - protein, 337 aa, unidentified
MSVYVGIDVHRKRSRVAVVTEDGTVQLNKNTVNGTEPLLRLIGDLPAGTPVAFEAAFGWGWLAGLLEDYGFEAHLVHPLRCKAIASARLKNDKVDAAILAQLLRADLLPEAWLAPPRVRQLRALLRHRASLVRLGTQLRNRIHAVAADHGYDRSASYWTGPGRGWLAELDLPAASREIVGDCLAVIDGLAPVIGRIDGELHARARADPRVKVLRTLPGVGEFTALVMLAEIGDITRFGSARKLASWAGLTPTVRGSDLKVRHGHISKQGSAWLRWVMNQAAQTAKRSPEFAASYAAIAKRRGKKIATIAVARKLLTRAWHLLNEMQATDTNAPLRRP

SEQ ID NO: 118460 - protein, 343 aa, unidentified
MYYIGLDVHKKTISYYVKDVAGRVYQEGKIGSTRCELDCWIKTLPQPRMIAMEATIFTGWIYDHLLPHAEKVKVAHPLMLRAIAAAKRKNDKIDARKIADCLRCDLLPECHMASTEIRDRRRTLRYRNLVLRQAVQMKNRVSGLLMETGVSYNKLRLHRMGYFAELMSTNEEVSESIRPLLRLCREHIDRSIRMDTALLRSLERDPLLADRLRRLRTVPGVGPITALTWALEVGDTSRFHNIKQAVSYCGLCSAEKSSADKVMRTPISKQRNKHIQQVLVEAARLAPRYSDELALLYERERQRGNGNRATLAVARKMVALMLAVDRRHTDFVPAGEFKRTAAA

SEQ ID NO: 118461 - protein, 393 aa, unidentified
MRYLGLDVHRDFCEVAICERGRARSIGRIASTRDALELFAASLAPDDRVVLESTGNALAIATILRGHVADVVLANPMQVRAISHAKVKNDRVDARTLAELLAADLLPQVWIADEPTRVLRRLTSRRTQLVRQRTRTKNEVSAVLVRNLIARPDVSDLFGKAGRQWMATLVLPVDERHTLDGCLRQIDFLGEELAVIDRAIAEHVLASSDMRRLLTIPGVDATTAATMMATIGRIQRFPTPRQLVGYVGLDARVRQSGNHPARHGRISKQGASAARHVLVQAAWAAIKTPGPLHAFYRRVKARRGAQIAIVAVARKLAILIWHLLTKQRDYAYQRPQLVARKLRRLELQTGAPPRRGQRASHPNTEPAALQRARLAEARYADLTSNWQTRPLRA

SEQ ID NO: 118462 - protein, 417 aa, unidentified
MLAQRDKACGVDVHRDSIVATILDRNGKKDQKEFGTAVSELFEFRDWLSSNGCKAVALESTGTYWIPIYTVLEEGFEVIVANPYMIKHIRKRKKDQLDSEWIAELCLNDQIVPSRIFHKDQWELRMLTRSRESLGKMRSSLKNKIHRDLASANVKLASVITDIFGKSGMHCLTGKLLGKDLDEIIKTIPSKRVRKNADEIREAILPNLTQVQCLSINISLSLIESINQKIQVIDVEIRSRILDRQKDLEIVMSVPGIDFASGTTILAEIGNYRDFSSPEMLASFFGLVPYVYQSAGKLYTGPITKQGSKHMRWILVQVARAASKVKGSRLKRFFLRIKARRGSNVATIALARKILCILYHLLINQEMYEEATIKKSKPSKNGIMKSSLPREMNLEDMIEVIRQSGYSVDRVDRGSHG

SEQ ID NO: 118463 - protein, 348 aa, unidentified
MVVGIDVHKHTHAAALLDERGATVGTLGFANSPEGMRRLQRWLLEHHAGDAVVGVETPAGYGRLLVASLEADGHEVLNVPAWRTHRERRRQGPGKTDPGDAIAVAQVVLRDRAELGPALEPELVRALALLELQRRRLVRDRTQAIQRLRADWNQMDPVGEARVVNLTRQRELRRLKRISFGDSLVEQIASHCIRDLARDIEDLNQRIATLDNQIAELLAEHGNPLADLHGAGPQIAATVIAHAGDVRRFRDAAAFARFCGAAPIPCGSGQTGGRHRLHRGGNRQLNAALYRIAIVQARHHPPARAYLARKIAEGKTPREARRALKRHLANVLYRRLHGWAEATPALNT

SEQ ID NO: 118464 - protein, 312 aa, unidentified
MPTYPPDYVAIDIAKDSLQIQTEHAAWSVPHTDSGHRQLLERLRPLGPVQVVCEASGGYEQPLLRFLHQQGVPVSLVNPARVRAFARSEGQRAKTDPLDAAMLLRFAHEKRPLPTPPPAPEQAALAAWLDRRAQLSEQLAREKNRLQKSPVLLHPGIRAMIAFVEDQLAEVDRQLHRVVQADATLRDRAAVLQSVTGIGAVTTWSLLAYLSEIAAADWHRNQLVALAGLAPWNRDSGQWKGKRSISGGRGKVRRCLYMAAQSAAQHNPVIREYVQRLIARGKPYKCAIVAAMRKLLIHLQSLLKHHQNALAS

SEQ ID NO: 118465 - protein, 338 aa, unidentified
MNITTLGIDIAKNVFQVHGVDHVGKKMISKAVTRNKLPEFINQLPRCLIGMEACGGSNYWGQKFTEMGHEVKLISPQFVKPYVKSNKNDAVDAEAICEAVTRPNMRFVAIKNKEQQDIQSIHKVRARLVRERTAQANQIRGLLHEYGIVIPQGINHVIGKVPLILKDEDSSLTSCGKDLFLDLYMELRNIDFKIKEYDKKIDALCESNPICKLLCKLPGIGALTATAVVALVGNITAFKNGRELSAYLGLVPKQHSSGGKTKLLGISKRGDRYVRCLLIHGARSVLFRAKNLSTKPANWLNELRLRRGFNRAVIALANKNARVIWALMTKGEKFVWNT

SEQ ID NO: 118466 - protein, 388 aa, unidentified
MHVYVGVDIAKELHYAAIMDSDGVVSKPFSFENNDKGFNLLLSHLAPYNKESILIGFESTAHYQENLAYFLKSLGYRTAEINPLQTAALRKANIRNTKTDSVDARLICLALMNHHIQGDQRDSARLDDLYQLCKMRMDTMKKRTTCKIQLVAIMDRIFPELASFFDNNLHTNTIYRLIDSFPLPSQIKKTRIDILTKLLHKASRGHFKKEKAQKLKNLADISVGIPSDIFAFQAQQLVHQIEFYTDQIQTIEERINTNPDVMSSPLMTIPGIGTFCVACILSAIKNINDFGAPCKILAYAGLDPVIRQSGKFTASHTRMSKRGNSLLRYALVWSAGNVVKNNHTFAEYYRHKTEDQGKSHYQALGHCAKKLVKSIYHMLKYNESFNLD

SEQ ID NO: 118467 - protein, 367 aa, unidentified
MKTQTTSIEAGPKHDADKVSAVVGIDLGDKRSAYCVLDSTGALIGGGVVKTSPDALKTVFGGTGKMRIALECGTHSPWVSRILEELGHEVIVANPRRLRLISESDRKNDKADSRTLARLAQAAPDLLAPVHHRSEQVQVDLATIKARDAVIRSRTALISAIRGIIKSTGSRLAVCSTGVFAKTATDNCPAALRDALLPLMRLVQELTNEIRAYDKAITKKAEKEYPETAAIITIPGVGPLTALTFVLLLNNDPRRIPKSRDLGCYFGLQPRQQDSGKHVSQLGITKAGDGLMRKLAVQCAHFMLGKFGKDSALKRWGLALALRGGKNAKKRAVVAVARKLLILMPRLWKTQESFVPFYGCALQPHAA

SEQ ID NO: 118468 - protein, 336 aa, unidentified
MKNTKYFIGLDVHKEKTTYAVRDKIGNILLEEEAATIYKELYERLKPYLKPSVIGVEACTSYYTLYQSFLKNKYTVKVANTLQLRQLIAKNDKLDARRLSEMLRLGTFPCSYIPDENIQRLRSIVQIRHSLMEEKTRCNIRIQAFLDRNGILMPSYKAFTKRWRHALMQYMGSGEVSLELRYEYDHFVYLEKKIEQLDQEMTGYVRKHWKAEYIAIQSITGLGPLLTCYIIAHILPIERFSSNRKLRRYAGVIPTFHESGSKKSKGHIPKNSSRKLLRWALVQAANTAGKTDTKLGRYYRMKKKNAGIAKIAVASSMIDIIYKVLTTKKSYNPIVY

SEQ ID NO: 118469 - protein, 381 aa, unidentified
MPSMQLRRDDVIVGVDTHKDNHVAVAIDGFGGRLGDIVVPTTIAGFEELLAFCLAFVGSAGRLIGFGVEGTGSYGVGLARYLRNHGHDVHEIARPARAAERRLAGKNDTIDAEHAARQLLAGHGLSTPKTADGAVETIRLVKIAYDGAVQARTTAMITLKATLATGSEALRAELETLTDHKLILACAALEGPTPLPPVRRGAPAVVVPGDPDVAMRHVLSSMAKRWLALHEEAKAHAASLKALTAAAAPQLVEAVGVGYDTAAQMLITAGDNANRIKSEAAFAKMCGACPIPAGSGKTNSRHRLYRGGNRQANAALYRVVIVRMRWHQPTIDYVARRTAEGMSKREIIRCLKRYLARELFRLLLAPDAIAKPVNGELEIAA

SEQ ID NO: 118470 - protein, 386 aa, unidentified
MQTVAALIPAAVDYERTLVLAIEVSNESWVLAAQVPGLPHTKAKRTINPDAESLMTAIAGYRARAAATGHSVERVITVYEAGWSGFWLARWIMRQGMEAYVIQPSSVPVDRRMRRAKSDGIDAELLLRTLLAWLRGEPRVCSMVPIPDEADEDARRCVRERTELISERVGLTNRIGAVLATLGVSDYNPLLRNRHRRLTELRTGLGEPLPRNAQAKIERLLARLELVLAQIAELERERDAVVEAEASDKASKMIQQLTKLRGIGVQSATVLVREAFVRRFANGKTLGSYAGLASSPYSSGGIDREQGIGKAGNRRVRTVMVELAWLWTRYQPGAAQVRWFRERVGSTGRRARKIMVVALARKLLIALWRFVIDGVVPEGAILKPAA

SEQ ID NO: 118471 - protein, 394 aa, unidentified
MDMITEKPDRAGAIRTDLGAIFVSLELSRAKWLVTSLLPGGGEKLSQHTVAGGDLAGLLDRLATLVSKAQARSGRVFPVIVIQEAGLDGFWIHRALEAEGIESHVVDPASIAVPRRRRRVKTDRIDGETLVRTLLAFKRGEPRVCSMVRAPTPAQEDRRRLVREYRELVSERVRAVNRIKGLLFTQGVLDYRPLRRDRRQRLAELCSGEGRPLGPYLKAEIDRLLERLELLVKQMKALIAALRALTAEAQTADANTNAEARIMAQLLEIRGIGPVFAAVLVTEGLFRQFDNRRQVAAYAGLAPSPWRSGTIHYEQGVSKAGNKRLRTTLIQLAWLWRRHQPTTALAAWFEDRVDHNGGRVQKVMITALARKLLVALWKYVTQGVIIEGMAMTDA

SEQ ID NO: 118472 - protein, 291 aa, unidentified
MNVNHYIGFDVHKKSVSYCVKGADGLIFEEGKLRATHQALREWAQKRPEPWHGAMEATLFSGWIYDALKPFAAELQMGHPALMKAIGASKKKNDKLDARKIADLVRCNLLPACYVAPVEIRELRRMLRYRNLVVAQAVRMKNKMSGLLMEAGAEYNKQRLHGKQYFTELLDAVEEVPESVKDLLRLSRGALEMFETTQLQLLARLRKDRRLAQRVTLLRSIRGVGEVTALTWILEVGDPHRFSSIAQAVSYCGLTSALVSSADKQQRGPISKQRNAHLQTVLIEAAKLAPR

SEQ ID NO: 118473 - protein, 361 aa, unidentified
MTQTMTWAGLDVHARSTQAVAVDARSGELGRARFGGGIESVVEWLASLTGPVHAVYEAGPTGYGLARAGGELGLRIDVIAPGKTPRAAADRIKTDRRDAELLVRQLMAGTLHPIHVPSPALEAARDLVRAREDVRCDLSRARHRVSKLLLRHGEVYPKDRSTWTREHRRWLSSRRFDEPNTQLAYIDALAAVDGLTHRRDALAERLSHVAADSELWPVVSRLRAFRGIDTLTALALVCEVGDWHRFQRPDQLAAWIGLVPSLSQSGESRTSGGITKTGSRHARRLLVEAAWHYQRPPRIGATLRNRQHGQPDHILQIAWRAQHRLYRVHQRLRQRGKHPNLATAAAARELACFCWAAVTAP

SEQ ID NO: 118474 - protein, 421 aa, unidentified
MFKIFRKNCCGLDVHKTWIYACIGITDDNQRTVYHEARFSSFTKDLQRLSLWLQSHQCSDVCMESSGKYWIPVYNVLEQSFHVVLAHPKYTKPQKGNKTDRKDARWICDLFMCNMIKPSFIPPPDIRQLRDLVRYRRKLTNMITGEKNRAQNCLTVSNLKLDDVFADVFGKSSRSITEYILAHPGEKFDVAPFMDLRCKTSVEVVQDAVDGAVSHEQAVKLRECLDHIDQLQEHKSRIEQEILRLAEPYAVHLNLIRSVPGLGSDPMTPIAILSEIGADMSVFPSSKHLVSWAGCCPRNDRSANHVKSTRISQAGSCLKPLLVQVANALIRSKDHPEFGARYRRIKAHRGHMKAIIAVCKMLLTAIWHILSNGEVYNPDGFLSAEPYPAQKDRVLSTKQALDLLRSRGFIIKDLSENPATA

SEQ ID NO: 118475 - protein, 474 aa, unidentified
MARTRNRPASPPVPGDAGAEVTDEPVQVISRAAAIDVAKGSGMVCMRLPHESRAGRRTQKVREVTATFAAVVALMDHLVCQGVERLVLESASDYWRIWCYLAEAAGLEVWLVNARDVKHLPGRSKSDRLDCVWLCKLNEWGMLRRSFVPPEPVRDLRALTRLRANLTHDRVRHQNRIEKILEDALLKVSSVISDLMGGSGRRFLQALVDGERSPAALAALGDYRLHASKAELAEALTGRFRDIHGFEIGMLLELIDDLSAKITELDERIEAQLENVPGLGGVCTSCGQPGPDGPCTGCGEPVLGVIARLDEITGIGRGAAQVIVAELGTDMTQFPTPGHAASWAKLTPRAIQSGATSKAGRTGKGNPYLRGATGVAVMTAARTETFLGARYRRHARRRGKQKAIVAGCRTIIEIAWRVIADPGFRYIELGPDYHDQLDPRRKTRDKIRQLEKLNPGMTVTLTPRPEPGGQAPAA

SEQ ID NO: 118476 - protein, 416 aa, unidentified
MKIIRFNCCGMDVHKNSVVATIGITNKDTQITRYIQETFSTLNTDLLRLKQWLIDHQCFDVCMESTGKYWIPIFNILEDTVKVHLTHPKYVKAIRGKKTDKKDSKWICDLFKHDLIRFSFIPPKEIRALREIARYRYKLVAMRSSERNRYQNCMTVSNIGIGSVFSDPFGKSAQAVMKEVLESKVIEDDRILKCIHGACKNRDKILDAIKHCHVESDQRFKMNESMRHLEELQIHINNCEIEMIKRASRMFDSFMHITQIPGINTLSAILIISEIGIDMTQFESDKQLVSWAGLAPANNESANKKKSVRISKAGQYLKPLLVQCALGAIKDKESYFGIKYARIKKRRGHKKAIIAIARMILVSIYHMILTGESFNPSDYQSFKAPNSKKVIELTKESAIEFLRKSGFDVSKLTKLE

SEQ ID NO: 118477 - protein, 342 aa, unidentified
MEKRHMGIDLHRNRFTCCVRLESGRNYLSDWKLEALPRFVKKLRPSDEVAVEVTGNTRFFYDAVAPHVARVVAVDPNQFRVISHSVKKTDPNDARNLALYLAKGLLPEVRMKEKTQAQIASLTQTRDTLVKLRTALKNKVNNILSAHGINLEKEALSSEKKLREVLAMRFDPMIRIELKVIVEQIRSLNESIAELEKTITEEGQKLPGHKNLTSIKGIGPLTGSILLSVIGDIHDFADEGKLAAYFGIVPRVSNSNETERSGRITKRGSKLGRTALVQCALIAQRYSPYLKRFYEKTKARRGTGKAIIALARKLLGIVYRTLKNNWVFEDFPNFVLAEEAAA

SEQ ID NO: 118478 - protein, 368 aa, unidentified
MKDYTGKTIFVGMDVHKKTYSVTAICDECIIKRDTLKAEPECLISYLKKRFGSGKIKTAYEAGFCGFHLHRSLEAAGIENIVVHAAGIEVSNTKVKTDKRDSLKIAAHLSEGKLRNVYIPTVEQEDNRTVTRLRDTFSRERARIGNQIKSLLFLHGLIPADNKKKVSPAWIKGLSKFEMTPGVRFSIETFAKMWLEFDAKIKEIDIEIKKQAAKDKTIDMMYQAVSGIGCTSARVLANELGDLQQFKNEKQLFSYIGFTPSEHSSGEHTRQGHITKQGKPIVRKILVQVAWVAIRHDKDLQSIYERIAAKSGAKRAIVAIARRLIGRIRACFRTGELYEAQKTERPTLKFKKMPQTKMQNRKNVKFVA

SEQ ID NO: 118479 - protein, 320 aa, unidentified
MSGMLVVVGIDVAKAHVDVAVLGRAWPAQRFANDIDGHSALAAAMQPLAVSLVVMEATGGYEAPVACALQATGLPVAVVNPKQARDFAKGIGRLAKTDRIDAEVLAELAAVLVRRDDLARFLRPPPDAQQQELAALVTRRRQLLTMLGSERLRLPLAVPKVRPSIEAMITAIRNQLDDVEGQMQTQVHEHYAELDALLRSTKGIGPIASATLIAALPELGRLNRREISALVGVAPMANDSGTVRGTRRIHGGRFDVRNVLYMATLSARTCNPAIRAHYERLRAAGKRPKVALVACMRKLLTILNAMVRTRTPWTNNLHSA

SEQ ID NO: 118480 - protein, 347 aa, unidentified
MVTLGTDSHKRSHTLVAVDEHGRKLDELRVDATRAGHVEALSWAQQWSDRRWAMENCRQLSRGLERDLLKADEQVLQVSPKLMGTSRRAGRQPGKSDPIDALAVARVALRETDLPVARLEGRSRELKLLVDHREDLVGERTRVQNRVHWYLHELDPELGVGRRRLTRRLVLAELSRRLEAHEGVVAEIVRDLIDRMTELTIEVNQLQRRIEALAAELAPNLMRMAGCAGLTAGKLVAETADVGRFRSSSAFAMHNGTAPIPVWSGNVARHRLNRGGNRQLNVALHRIAITQIRLGGEARTYVARRMALGNTRTEAIRSLRRHLSNEVYKRLCLDSRAHLSSPQTEAA

SEQ ID NO: 118481 - protein, 414 aa, unidentified
MDTMYERCCGLDIHKKTIEACFRSGKKKTHMSFGTTSAELRKLTMWLVENDCQSVAMESTGSYWKPIFNILELSGTDMKIIVVNARHMKNVPGRKTDVNDAEWIAELLQYGLLRPSFIPDREQRELRELSRYRKSLVGERAREINRLQKMLEGGNIKLTSVVSEVTGYSSRRLLDRLLRNDEPMTEDVISGLVHTSLAGKSKELETALDGLLSELQKELLIKVLDHIDDMSRRIADLDDFCRKQMEKYEDALDKLDEIPGIARRTAETILIETGLDMSKFPTAKHFARWAGLAPGNNESAGKRSSGRTTKGNPTLKSTLIQSAKVAARKKNSFFKARYQKIAAKRGANRASVAVAHSMLIAIYHILKSGERFKDLGEDYYNQFNREKKKNYYLKKLTKLGVNLKEATLSIRTAT

SEQ ID NO: 118482 - protein, 366 aa, unidentified
MKKTSTVRVNGNKIFKGHKVTVGLDLGDRWSNYCVLDEAGEVLLEQKLATTPEAMKQTFERIPRSLMALETGTHSPWLSRLLRELGHEVLVAHAQKVQLISKSNRKDDRHDARTLARLARIDPELLGPVRHRSAKAQIHLTVIRARAELVSARTALVNAARGLVKSYGERLPKCGTEQVGRELAAELSAELREVLEPLLREIESLNEGIKEYDARMEKIARESYPQVALLKQVKGVGTQIALTYVLTLDDPHRFRRSRDAGCFLGLKPGRRDSGESQPQMHISKEGDRYLRTMMVQGAHYILGPFGEDSDLRRWGLRLAERGGKNAKKRAVVAVARKLAVLLHRLWVSGEVYEPLRNSQKAMRAVA

SEQ ID NO: 118483 - protein, 425 aa, unidentified
MNDVVMIAVDPHKASNTAAVLDPVTKTLIESARFANTMDGYAQLTAFAARWAQRRWAVEGCQGAGRSLAQRLVADGEMVLDVPAKLAARVRVYSRGHGRKTDKDDAVSVGLAALDGTGITLVTCDGALVSLRLLCDRREELTAQRTQAVCRLHRLLTELTPGGMRRELTANKAQALLALIRPADDVGRVRVHIARDHLADIRALDARIKYIGTQIAALVTASGTGLTGLFGIGPVIAGRILAEVGDVARFATKDAFASYNGTAPIDVSSGDQVRHRLSRAGNRRINHALHMMAVTQIRYPATPGRLYYERKRTEGKTPKEALRCLKRQLSDLVYYQLLADRRGTTGACGSPTTPPPTRSPSTSPATRSHRAAPPSRPPRRPAPAGSSRWTGKTAASSASRSSTPAPASTKTSSKRPKSTAKTAAS

SEQ ID NO: 118484 - protein, 346 aa, unidentified
MGIDPHKQTHTAVALDAATGRVLAELTVKARTPGFERLVEWARALDAERTFAVEDGRHVSGHLERYLIGRGERSVRVPPRMMGESRRTDRVWGKSDPVDATAVARAALRHPDLPEATLAGPEREIGLLVAHREMLVNERTDRICKLRWLLHDIDPDLAPPLRTLDRFRTLDRVRRDLEALDPSVVKELCLELVDRCREITVRANELERRIRALVKTHAPALLEIPGCGALSAAKIVAETAQVARFPTEGHFARYAGTAPIPASSGARHRQRFNRRGNRQLNAAMHRIAVTQLRIHEPARTYVAAKRAEGKTKTEAIRALKRHITRVVFKTLTSMDEPTDRLTAVAA

SEQ ID NO: 118485 - protein, 368 aa, unidentified
MNEYKLKAAPTAVSKEQNSQKNPKANRILIGVDAHLKSYEAARKIDNGAVGVAQSFRSKEAFLLYVEKQREQAEEVVVLYEAGPLGYTLYRELKASDIECLVCAPRSGEQKRKRRKNNSIDARTLSSDLFNYLNGNEQALQAVRVPSEAQEQARVESRQHDALVEERKRIGAMGNSLLLSQGYGSWSNWWRPKAFERLSKGVAPWIVKHLGRWVGILRELDQQIQQAKAELTQHYQGPRPKGMGAPSLAQLNAEVLDWTLYSSRRKIGCLAGMVPSEWSTGEAQRLGAITKVGVPAIRRIITEMVWRMILFQPEYKPVQKWREVLEGPNRGLKKKAVVAIGRQLIVDIWRLQTGRITAQELGLIMIQA

SEQ ID NO: 118486 - protein, 390 aa, unidentified
MFYLGIDIAKTNHVASLLDQEGKIVLRNIKFTNSNEGYKSLLEIVSSKVDNFLDVLIGMEATGHYWLSVFSSLVDDNFNVSVFNPYQIKSYRSSYSLRKQKNDVIDSIIIADYLRVFGSDASNLPDEDILALKQLTRFRSNIVDNVASLKTQVIGILDKVFPEYESLFCDVFGVASKQILLNCPTPEDIIKINTSKLSNIFSKYSKGKFNKNTALNLKQVAKSSFGTKYASNACSFEIKQIINQIIFLESQTKDLDIKIKELYDNLDSHLLSVPGVGKVLAPIILAEIGNINNFDKPSKLIAFAGIDPSENQSGNKVSSNEKTSKRGSPYLRHAIFTASLVAIKNNKDLRAYYDKKKSEGKHHFVALTGVSRKLLTIIYYLLKEDRDFRK

SEQ ID NO: 118487 - protein, 427 aa, unidentified
MPYKIAGIDVHKRMLHVVVSDVEVDGEYEFTRRIFGSSPEGLRSLAAWLMEHQVEEVVMESTAQYWKPVWGALERCWKPICQKREGALATSGTLHLAQALSNRGRRGRKKDFRDAERLVKRLVANELILSFVPDAQQRLWRTVMRTKYQLTRNRVQLRNRLEALLEEAHIKLSSLVSDLLGVSARRMLKAIAEGETDPAALAALAHERLRAKPEQIRDVLGVCQELHPVYRRLIQMALDESASIDKRIDRLEQEMADLLRLHEDQVQRLAEVPGLGVDSAQQIIAEAGATAATFPSEKHLASWVGACPGDEESAQVNYSRRSPQGNHHMRRILNQAANAAVKQKGSIFEILYRRHVPRLGHKHTIGIIAHKLCRLIWKILHLGVRYEERGPEVSKTSKQKRTQKMIRELRRLGYRIELTTSQPAMSA

SEQ ID NO: 118488 - protein, 363 aa, unidentified
MVESTTVAVGLDVHARSIRVAAVRADELLEERTLPYDEEAVERVLRRWPGARCCYEAGPTGFGLYRHLVERGIDCAVVAPGLVPQRPGDRVKTDPRDARKLARLLAGGLLEPIHVPSPELEAVRDLVRAREDARLDRMRDRQRLSKFCLRHGRLLPTSAWTIIRRKWLGEQRFEHAAEQVTFDTYLHAVDLVDRRIEMLERAIRETSEKGPWRELVARLRCLRGIDTLTALALVAEISDFDRFRSAEEFMAFVGLVPSEHSSGEQRRQGSITKVGNSHVRRLLVESAWHARRRPKVGYDLARRQRGQDAATVERAWRCQQRLYQRWQRMAGRGKPHQKIVVACARELAGFVWAIATEQPLRST

SEQ ID NO: 118489 - protein, 412 aa, unidentified
MTAIDQFAAHVGLDWADKKHDVCVQFKNGERTFHVINHTPEALDTWLNELHQKVKGRIAIALELKKGPVVYALQKYPFITVFPVHALSLARYRQTFWPSGAKDDPQDAELALDLMLRYPQKIKAIESDNADIRLLLQLVEQRRLLVEDKRRFVNRLINTLKQYYPQPLEWFSHRDSSLFCELIIRWPSLQQLKRARSDTVRHFMNARGGPAVAYTEQRVTSIANAIPLTTDKSVIEANALMATALASQIKLVGELIRTYDERIESLFDKLPDAELFKSLPGMGPCMGPRMLAALGDNRDRFNSAEEIQNYAGIAPVTERSGQKSWVHWRWQCAKFVRQTFVEWAAKTVNSSYWAKLYYQRMREKGKSHQSAIRALAFKWIRIIYRCWKTRTRYDEAKYLLALEARKSPLLML

SEQ ID NO: 118490 - protein, 417 aa, unidentified
MAEVTFPQLIQRACGIDVHLKVVVATIDGAGIQRETRSFKTFTSSLNELKEWLLSNGVTHVGMESTGVYWKPVYKVLEDSIPNVWIVNARHIKNVPGHKTDKMDSEWICKLLLAGLLKPSYIPPKEQRQLRDLTRYRNKLIQQIASEKNRMMRILEDCNIKLSSVVSNTSGTTATSLIDMLCEGKVLTLDDINSVYHGKLSASPEELLEACTGFVEEHHIYLLQMIRKDIDQTQTLVDDLSERIKRLLSKYENVLELLREIPGFSTKVVEDLVSEIGLDMSHFPSEKHLSSWTGLSPGNNESAGKKSARITHGNKQVKAVITEAAWAATRTKNTFFSERYHRIAARRGKKRALIAVGHSQLISVYLILSTGSRYHELGAQYMQSKIEQKRKVYLSSELKKLGYNVSLTKVPQAVTLN

SEQ ID NO: 118491 - protein, 413 aa, unidentified
MAYTVAGIDIHKKVVMVVVLQQIAGRAEELARRRFGTATSELHRLTAWLREQGVEEAVMESTAQYWKPVWYELEPHMRLQLAQAFSNRAPRGRKHDFRDAERLVRRRLAEELILSFVPQPEQRAWRMMTRTKVQLARDRVRLHNQLEGLLEEMRIKLSSVLSDLLGVSGLRILRALAGGETDAKKLAALGDDRLHCSQEQLVDALSGTFQPMHQKLLTLYLDRLQLLDKQMAELNEATAEAMREHGEAVARLAEVPGFGADSAQQVIAEVGPQASTFPSAAQLASWVGTNPGRQESAEQNQSSRSAKGNKYVRRILTEAAQAAVKTKGSHFQVVFRRLLPRLGYQQALWAIAHRLCRLVWKILHEKVRYIEQGAQRDPKALKQRLYGMARSLRQLGYNVNLDIEPPDSAPARG

SEQ ID NO: 118492 - protein, 521 aa, unidentified
MPRPRTTGRIKARRGFVLQKPHGQLLPRVQQVGPEHFGIVAFDCAKARSRYFLADFYGRPLLEPTTLPHSRGDFQAAIDRVRQAMRQHDLKDLVVAIEKTGEYHRPVQLAFRQAGIETRLVHPFTSKQYRQPADPGNKTDDTDLAAIWRATTHGFGLLEPIWPDNYLTIHLLRRHRRDLVNKNVILQCQIRELLHAVMPGYAECFCHFWDDSRAPLILARHTTSPEAVLQAGLPGLQQIAAQAQLRCRSETFHKILAWAEQAPPTRGHSLDRRRMLINLDDDRLEKIRQILELERDLAHLVVHTPYVLLMVIPGINMVTVADLAGELGPISLYLNANAITGRAGLMPSRYQSDEVDYPNGPLRRRGNRCLRGVLMQTADNLVKSNHYFAARAENWTRAGKDPRWIRVKVAKIFSRLAFAMLASRQLFPHPCCQQRHYILSKLLAFHMDHHTQPRVLRRDLEAATDQLPLKARPVEVGPLQQELDALARRRGPQPLAKIIPLVLARLAGRVVQSNSTESAEP

SEQ ID NO: 118493 - protein, 344 aa, unidentified
MKYFAGFDVSLEETAIAVVDETGRMVREGKVVTEPEALDAYLHASGLPIDRIGLEAGPLSTWLYGELTARSWLMICIETRRLRAVTRAMPVKSDRKDADAIAQAMRTGWYRAVHVKSGESQRIRVLLRNRRILQAKRLDIDNEIRGTLKAFGLKIGKVGRVGFAGRVRALIAGEPVLETIMPAMLDARAALIAAFDRLHRQVLAIVRLDPVCRLLMTAPGIGAVTALGYKTAIDDPHRFRHSADLGPHLGLTPRRYQSGETDYSGRISKCGDAMVRSLLFEAAMAVLYRVKAASRLRTWGRTLSRRIGAKKAATAVARELAVVLHRMWVDGKPFNPNPLHDAAN

SEQ ID NO: 118494 - protein, 442 aa, unidentified
MSNELAVPTAPEPEWAAFVAIDWADRKHYWKLVAAGSQKPEQGELDNTPEAVAMWAAGLNVRFGSRPIAVCLEQSRGSLVYMLLKFPQLVLFPVHPRMAASMREAFHPSGAKGDPSDTAVLLTILLCHRDQLRRLKPDTAETRLLQRLAEQRRLMVNEKTRHSNRLTACLKLNFPQILKWFDDPTSPLVGALLERWPSLEPLQRTHDGTLRKFFHQHNCRSEERIQERIDAIRQAVPATTDTAVLGAEAMAARGFLAVIAALRAHIAELDEQIAKAFAAHPEIALWDCLPGAGAALGPRLLVALGTDRQRYAKAHELECYSGIAPVRSASGQSEWIHFRWACPKFLRQTFHEFAGHSIAKSDWARAYYDLQIGRGKSHHAAVQSLAFKWIRILFRCWKNRTPYDEQVYLQSLQKRNSPLKALLPGAGWKDVAGFQKLSENPS

SEQ ID NO: 118495 - protein, 347 aa, unidentified
MDQIIIGVDTHKSNHVGVAISRQGARLGTITIPTTRQGYRDLEAWASKLGTIKAFGIEGTGSYGAGLSRDLLSMGHTVLDVMRPNRQLRYLHGKSDSLDAESAALSVLNGQATALAKTQAGASEMIRHLKIARDSAVKFRSQSMITLKTLIINAPAELRDTLDLIKGPITLIRHIAALRPGKITSPIASAKAAMRAIARRWLYLHEEIQAHGQELERIVSEKAPGLMRSHGISTMTAAEMLIIVGDNPERIKSEAALAKLCGVCPIPASSGKTNRMRLNRGGNRQANAALYIIAITRMRDHEATKNYVVKRTAQGKSKREITRCLKRYIVREIYRELCVPNGAKATP

SEQ ID NO: 118496 - protein, 347 aa, unidentified
MIIIGCDLHVRCEQIAMLDTETGEVVEKRLDHESGEARKFYAGLKEPALVGIESTGYTRWFAEMLAELGHELVVGEAGKIRAKETRKQKHDRRDAEHLLNLLVRGDFPQIWLPSAEERDVRVLVEHRHQLVELRTRAQNGLQAIALSYGLRRRSRLWSKRGQEELKELPLREGMGRRREDLMRLVRQLDAWIKELDQRIEEEVAQREDAQRLMTHPGVGPQTALATVLVLGPVERFPDDRHLTSYLGLIPQEDSSAGRQRFGHLTKQGNRLLRWLLVEAAQTASRYDPRLHRAYRRLAFRKGTAVAKVAMARKLAIRLYIMLRDKIDYQEFCRRGSHAGMLGEVALV

SEQ ID NO: 118497 - protein, 322 aa, unidentified
MGTLSFCGIDVSKDRLDAMVLPEQQSSCMGNDPAGWAQLVEWLSDFSIAAIGLEASGGYERGVMRALLAAGLSVRQINPFKLRQFANASGVLAKNDRLDARMIASFIAVMPTRAAQRRTPGIEQMSEIVTVRRHLSDQKIAAENATKLLEDAMLQRLSRRRIAQLASDIAQLDNRLAEIVAADSALSRRYQVLTSMPGVGLVLACTLIALLPELGQMSRKQIAALVGVAPYDFDSGKLKGKRCIWGGRAPVRHVLYMAAMSAGNWNPTLKAFRHRLKTAGKVPKVTIVAVMRKMITTLNAMVRDDVAWADHLAGRRSAPTAR

SEQ ID NO: 118498 - protein, 426 aa, unidentified
MNATTDFAATIGLDWADQKHDLWIRPADDSKAQHIRLEQTPEALHEWVAKLRERWGNRPVAIGIETSRGPVISALLAYDFIVLFPVNPKALKDYRAAFSVSGAKDDRTDAQLLEEFVRLHRQKLKALEPDTELTRTLAGLVENRRRLVDERTRLVNQLHGTLKTYYPLAETLLGKQMTKPLAADSLARWPDLGSLQRAEVKTLRAFFYQHHSRSAQKMEERLAAVQKAKALTTDPAIITPARLLVLALAGMLKPLHQAVARLDREIEQAMDQHPDAAIFDSFPGAGPALAPRLLVAFGTKRDRFESAQEVAQFYGVAPVVIQSGNSKTTHMRYRCPKFGRQTFHENAGCTLNDEPWARAYYDQHKKRHDDKHHQACRALAYKLIRIYFACWKHRKTYLPDRYLRALEKHGSPLHKHLEIPTPKSGE

SEQ ID NO: 118499 - protein, 440 aa, unidentified
MSNLIFERCAGLDVHKKSVVACRRRLLPDRTIEFETVTFGTTTEDLLALSDWLAEWQVTHVAMESTGEYWKPVFNILEGNFETWLVNAQHVKHVPARKTDIRDAEWLAQLMQMGLLKPSFIPPRPQRELRDLTRMRQTLVQDRARVVNRLQKVLEDANIKLTSVVTDITGVSARRMLEAMIRGETDPKALAQLAKGRLRNKLPELEKALNGRMTDHHRFLLKRYLAHMDFLEEEIQALSQEIAHRIEAMSTSSDNEPPTDARRESKASTENQSLTWNQAIELLITIPGIDRRTAEIILAEIGLDMSRFPSARHLAGWAGVAPGNHQSGGKNYSGRSKKGNRTLRTALVQAAQSAKRKKDSYLAALYHRIARRRGKKRALVAVAHSILVSIYYMLSRQQPYQDLGSDYFDSRRKEAKVDYLMRQLRRLGFQVTLQPVAVAA

SEQ ID NO: 118500 - protein, 373 aa, unidentified
MPKYSTAFGMDVHLRSTTVCALDADTGEAVTRRFPGNPWGEIAGWMDGFPGPSLAAYESGYLGFAPQRELAGLGVECVVAAVSKIPRSAADSASKNDRNDAARMAKAILAHDISPVWVPSPEVEGIRDLAGAYDGATARLATAKQRLLAFLARRGFVYGGTTPAGNPRKYWTYDFLRWLDKVRPEGDGGVRTLAALRNEVEAAAEARADLLSEYRAAVDASPIAAEVAALQSIKGCAFALAAAFSAEVGDFTRFRSGRQVTAYFGLAPSQRSSGDSVRLGGISGAGNALVRKLAVEGSWCYAAARHQPKLMPRDTGVPLEIRMHGRKGSERLLRRREEMLARGVPAAKANAATAAELVRWLWALGMMCREGAE

SEQ ID NO: 118501 - protein, 432 aa, unidentified
MTMWVAHPQPLTLGATAMAAGHVGGGPRLVDKDQALGFQIDLAVEPVVTLLQDVGTVLLDSMASLYGMARPFSPASDMMLVLEEERSGPMSIVILGVDLGKNACSVVGVDASGAVVVRRSMRRQTLVDYVAKLPVCVVAMEACCGAHYLGRLFAAHGHEIRLMSPEYVRPYVKAQKNDDRDAEGIAEAASRPTMRFVELKTQEQLDIQTLHRVRSRLVAERRSLTNQLRAILLERGTIFPVGRRKLELGIDALLADEDTTLSPRLRQLVAELRAEWRELDTRVETLNGEFVELARNDAAARRLTSIPGVGVLNATALIAAVGDASSFAKARDLGAWLGLVPRQHTTGGKPRLLGISKRGNTYLRTLLIHGARAALPSLARSETPLGRWLTGMIERGVHRNAIVVALANKLARIAWAALRKDATFERGYPVAA

SEQ ID NO: 118502 - protein, 320 aa, unidentified
MRNTVGLDISKLTFDATTIVGNAEYSAKFDNDSKGLDQFSDRLKSLGCQNLHICMEATGNYYEEVADYFAQYYSVYVVNPLKISKYAESRFKRTKTDKQDAKLIAQYCRSAKESELVKRQKPTDEQYRLSRMIAAYAQIKSECAAMKNRHHAAKDEEAAKAYAEIIKAMNEQLEVLKEKIKEQTEKPNCKEGVKRLETIPAIGRMTAAVLFHHLTSSKFETSNKFAAFAGLSPQQKESGTSVRGKGKLTKFGNRKLRAVLFMLTMVAYRIRAFPDFIKRLEEKKKPKKVIIAALMRKLAVIAYHVHKKGGDYDPSRYKSA

SEQ ID NO: 118503 - protein, 406 aa, unidentified
MGRTGLHKGVIACDVHQAQVTVCAILEEPDGSVRIEQQRFGAFQRDRRALAEWVGARRPDVVVMESTGIYWKSLYAALEAVGIRAVVVNARHVKNVPGRKTDIGDAQWLATLARAGLLRGSFVPPATLRELRLIARQRQKLMGQLASEKNRLHKVLTDGGVRLGVVVSDLHGQSARAMVKALIRGQAPHEVLRHASRRLKATRAEILDAVQGELTDSHRFVLDELMQHIEGLEARVARFEARLLAGLADQRPVLALLQTLPGVDLIGAALLLVEIGADMDVFASADRLASWVGICPGNNESAGKRKSGRVRKGNPYARRLLCEFAHAASRTPSAFQGKYKTLVVRRGHKRAIVALAHKLLRTIFFMLKRGEPYRDSATDYEALAVQRNAPRWIKALTRFGYITPAA

SEQ ID NO: 118504 - protein, 359 aa, unidentified
MMTDDNLETQRVIGGVDTHKDVHVAAVLDELGRLLDTASFPTTPTGYRRLYRWLCEHGEVLAVGVEGTGSWGAGLSRCLRARGINVVEVNRPNRQTRRRKGKSDTVDAEMAARAVLAGDATATPKAGDGPIEALRQLRLARSGAIKARTAAANQLHSLTDTAPDELRARLRSLTTLRRARVCARLRVGDPLTPSGAAKRALRSVAQRWLALHDETAQLTRDIKHILDAIAAPMLDRHGVGYETTGTLLCAAGDNPERLHTEAGYAALCGTAPVAVSSGKTNRHRLNRAGDRQANSALWTIVMVRIRSNHVPTIAYIQRRTAEGLTKRETIRCLKRYVAREIYNDIRTIITNTTTTRIAA

SEQ ID NO: 118505 - protein, 344 aa, unidentified
MQTTEAQSKLYCGADLHGNNVFLTVCDGQGQRVMERRVKANLAAVNAALDPYWERIERVAVESTYNWYWLVDGLRAQGRDVRLANPAKMDQYAGLKVADDASDAGWIAEQMRLGILPESYVYPPAVRSIRDALRRRMLIVRQRTQSLLSLEGLFARYALDCPAVAELKGWTAQEVAALPVDGFTRLQVESLLELVRKQDGLARWIEGAVLQAVKPKAEYQRLQQVPGVGPVLGMVIVLESGEFGRFASAGDYASYCRTVKSERWSNGKKKGENNRKNGNRYLAWAFAEAAVYAVRFYPRIAAWYERKKRRRNVPVAMKALACKLAKAAWHVMRGQAFNEAMLFG

SEQ ID NO: 118506 - protein, 438 aa, unidentified
MIDKILPGIAGIDIGSEHFFVAAAGAPEAVRRFGTFTSEIKLLAAYLKEHKVAKVAMEATGVYWIPLHDHLECQGLEVTVFNGAHARNLPGRKSDVQDCQWHAILHSHGLLSSCFIPPQEILELRAFYRLREDHLSMAASHIQHMQRALDLMNVRLHTVISQIHGVSGLRVIRAILAGERDPHKLATLCDLQILSKKREQVIKSLEGNWREHHLFALRQALECYEFYQEKIADCDRQIDQALTKLRGGQPPVQPSAGGKKLRHNAPRIENLHGKLLSLSGGCDPTLIAGISSLSFMKLMGEVGTDLCAWPTEKHFTSWLGLAPGKHQSGKRKRRVPRPKTVAGQIFRDCVMSIAKSKYTALGAFYRRLKARKGPAVAATAVARKLAELYYRAMTKGMEYVERGVAHYEEVYRQQTLRYLNKMAAAFGLAVTKPTAPTP

SEQ ID NO: 118507 - protein, 347 aa, unidentified
MYVCILDQAGTVLVHKNLPTTPEAVLRVIAPYRADRVVAVECMFTWSWLADLLARAGITFVLGHALSMKASHGGKAKNDKLDAQKIAVLLRGGMLPQAYVYPAERRATRALLRRRCPLMRQRAELLAHRQNTNSQYHLPEIGKKVAYKANRAGVEAHFPDPRVRKTIEVDVALINPYDQLLGEVELSSTRTAKAPDVQTFSRLQSVPGIGQILALLRLYEIQDISGCPRVPDFVSSCRLLKCAKESAGKRLGPAGKKIGNVHLRWAVAEAAVLFLRHNQPGKAYFTKLEHKHGKAKALTVLAQKLARAVYYLLAREQAFALTRFVPASPLRGGTEPAVSLAADGQSL

SEQ ID NO: 118508 - protein, 339 aa, unidentified
MRLYAAIDLHSNNSVLVVQDEEDRVVCEQRLPNKLAAILPQLAPYKERVQAVAVESTFNWYWLVDGLMDAGYEVKLVNTAAVKQYEGIKYTGDEHDARHLAHLLRLGILPTGYIQPKEDRAVRDLLRKRAQLVRFRTTQMLCIQSLANRNTGERISGEVVKKFTEEHIQRYSGGDEVKALAMRSNLNTLRCLDEQIAGLEAVVLKRAKLKPEFKRLLTVDGIWRILGMTIMYEAGEMSRFKKVGHFASYARCVGSSRWSNGKKKGEGNRKNGNKYLAWAFIEAAYFAVRYNERIRRFYDKKKAKTNRIVAAKAVAHKLARACYHVLKDGTPFDEARAFA

SEQ ID NO: 118509 - protein, 350 aa, unidentified
MSKVTPDLSSVTVVGLDLAKLVFQVHCVDAGGKVLLNRALKRREVMDFFRKLPNCRVGIEACGSSHHWGRQLLALGHDVKLMPPAYVKPYVRRQKNDATDAAAIAEAVTRPTMRFVAVRSIDNQALLMRHRVRETLVGQRTQLLNSLRGHMAEAGLIAAQGARNARALAGLLAEGHPDIPSCVAQALLPFARQIAELDAAIDVLDKEFAAAAKADVEVRRLMTIPGIGPQTAHAIVVTLGPDGIGQFSGPREFAAFLGLVPRQNSSGGKQRLGRISKMGNAYLRKLLVVGAHSVLHHRERHNDPLRNWAKALLAAKPFKLVAVAIANKMARIVFALLSSQSAYAAPVAAA

SEQ ID NO: 118510 - protein, 398 aa, unidentified
MEVMDAAGRRLSAAKLPEGIAGIARFHAMIAAQLDPDADLDAQAGQVLIGIETDRGPWVQALIAAGYRVYAVNPLQAARYRERLGVSGAKSDPADAHLLADMVRTDSHQLRVVAGDSDLAEAVKVVTRAHKTLIWERTRHTLRLRSTLREYFPAALAAFEDLTDADTLELLAKAPDPASAARLTTTQIMAALKRARRHHRDRRAGEIQAALRTEQLGQPAVVARAYAVAVRAQVAILGVLNEQINLLQEQVEAHFGQHPDAEIYTSQPGLGQILGARVLAEFGDDPTRYGDTRARKNYAGTSPITRQSGKKKVVLARYVHNDRLLDALGGQAFAALTRSPGARAYYDKQRDRGLGHRAALRQLANRLVGILHGCLKTRTRYDEATAWSHTQQDQQVAA

SEQ ID NO: 118511 - protein, 336 aa, unidentified
MKNVPVFVGLDYHQDSVQVCVMDSSGEVLKNDSYRNDAEVIGKVVEKYGVEVRAGIESCTGAASLADVLAMRSGWTIDLAHPGFVSRMKQNPDKTDFTDARMLADLERVGYLPKVWLAPQEVRELRRLVRYRQQLVDERRRAKLRISALLRDQRVRCPHGSSTLGWRKWLKTTKEVSEETQWILKRHVRRVDGLDRDVVEVEARLIRLTKKDALVAALQKQKGIGQVTAWTIRAEVGRFDRFRTGKQLARFCGLTPRNASSGQRQADAGLISAGNRQLRSTLIEAAHRLIRYDDPWKEFAKRLLDRGKPKCVVVAAAANRWMRWLFHQMQPGSLAA

SEQ ID NO: 118512 - protein, 319 aa, unidentified
MAQNDLVVAGIDVAKDKVDVCIRALSLRRTFAATAEGRRELASWLRRQKAAKAVMEASGGYERDWAKALRGAKIEVRIVDPKRVRSFAQSAGRLAKNDTIDAEMIAWFAETFDEARSQAYDATREQLHQMVNARQALKGMQAKLESQGEHALPAAVQRMHARILKTITVELVKFEAAIAAMIQATPRFTELAEIIESVPGIGRTTSAALIAAMPELGQANNKIVAALLGVAPYDDDSGRRRGERHIKGGRRRTRNVFYMACLGAATQHNPVLKAFYDRLVAKGKEKKVALIACMRKLISILNIMIERRQKWDASRYAVS

SEQ ID NO: 118513 - protein, 413 aa, unidentified
MERLLERCAALDVHQASVSVCVRVPGEGDQRREFNERFGATTPDLLALCDWLRGHGVTHVAMEGTGVYWKPVYYALEDEFELLLVNAAHVKQVPGRKTDTKDAAWLCQLLECGLLRASFVPPKPIRELRDLTRYRKTLIADRASEANRLHKVLEDAGVKLSSVASNVLGVSGRLMLEALCQGANDPVALAELARGRLRSKLPALRRALESRFRDHHAFLVAQILAHLDYLDEAIAACSARIDEQIAPFASALTLLESIPGVGRRNAEVIVAEIGADMSVFPSSRHLASWAKLSPGNNESAGKRKSGSTGKGSPWLRSALVESALAATRTRGYLRAKYWRIRQRRGHQRAVIAVAHAILEISYHMFQSGELYRDLGDDFFDRRDNERATQRHLRALERLGYRVTVESAPDREAA

SEQ ID NO: 118514 - protein, 427 aa, unidentified
MKQEAPEQQEFGAYIGLDWADRTHVISLRGTDSGKVEHYQLVHKPEALAEWVSDLQRRFPGQRVAVALEQARGAVVHALMGYDFLVLYPVNPKTLAKYREAFSPSGAKDDPTDADLLLELVTLHRDKLRAWLPDDELTRTITLLVEYRRQLVATQTSLSNRLTSLLKLYYPQALAWAGELTTVQACDFLQRWPTLAQVQQAPPAKLRQFYLAHGCRKADVIEQRLQEIKLAQPLTRDGAVISASVVMVQATTTQLRPLMEAIARMEKQIAELFRQHVDHDLFSSFPGAGPVLAPRLLAALGADRGRFAAATEVQQLSGIAPVMERSGKTCWVHRRWACPKFVRQSFHEFAGQSIRWSTWARAFYDQQRQRGNGHHAAVRSLAYRWIRIIYRCWQMRVPYCEETYCRALQRRQSPLARVLAAPMQNAS

SEQ ID NO: 118515 - protein, 333 aa, unidentified
MDLAKHVFQAHGASAAGAVLFRKKLRREQVLSFFAGQPRCRVALEACASAHHWARAIGELGHEVKLIPPAYVKPFVKRQKNDAADAEAICEAAQRPTMRFVAVKSEAKQAAAVIFRARDLLVGQRTQIINALRGHLGEYGLIAPQGPSNIERLIVQVEDPTSGIPAAARACLVRLVAVLRHLQDEIAELDKAVAARAKADAAARRLMTVPGIGPLIATAIEALAPPAETFRSGRDFAAWVGLTPIQRSTGGKERLGRTSRMGERTLQRLLIFAASAVVRWAKRKGVPAGSWLGRMLARKPPMLVIVALANKNARVAWALLAKGGTYRAPAVAA

SEQ ID NO: 118516 - protein, 406 aa, unidentified
MLLAGDDWAEDHHDVELPDEAGRRLARARLPEGAAGVAGLHELIGEHLAADADPGQVAVGIETDRGGWVQALIAAGYTVFPVNPLQAARFRQRHGVSGAKSDDGDSHMLADMVRTDSRQLRPAAGDTPEAEAIKVVARTHKTLIWERTRHIQRLRHQLREYLPAALDAFDDLAAPDALELLAKAPDPARAARLTRAQISAALKRARRHHIADKTTAVLAALRGEQLGQPPTLTAAYAATVRALISVIITLNEQISSLEEQVKDHFGRHPDAEIYLSQPGMGAILGARVLAEFGDDPHRYTSAKARKNYAATSPVTRASGKRKVVAARFVHNDRLIDALMSQAFSAMKAPPGARAFYDDLRNHGIEHNDALRRLANRLVGILHGCLKTRTLYDEATAWSHRDKSLAA

SEQ ID NO: 118517 - protein, 368 aa, unidentified
MLKQSHYKIGCDAHKHYSLFAVLDHRGKPIERTRVNHEPGAIQAFLSRFPEGTPVALETVGNWYWIVDEIEQAGCVPLLAHAQMAKKMMGHVHKTDKLDAQGLAILQHLGSLPTVWIAPRETRDERELPRTRMALSKARTMLKNRMHSTLAKYALSLDTQSDIYAAKWRPQLVDLLRRLPGETERCMRQELELLDQVQEQIHRLEARILERVQMTPTIQLIQSVPGPAEILSIVIDREVGSIDRFPSPHHFASYCGLVPKVKASGGKIHYGKMIKAANNYLKWAFIEAANVVVRQQHHPNWRQKYVVALFERTRQRKGHAVAVGAVARYLAEATYWVLKKGEPYREPTPQRPVGSRSAASLKQGQVRA

SEQ ID NO: 118518 - protein, 596 aa, unidentified
MTTMTSTRPLVTGGVDTHRDEHVAAALDRVGGLLGTASFPTSTAGYAALLAWLRTYGEVSSVGVEGTGSYGAGLARHLTSNKLVVLAISRPNRQVRRRYGKSDVVDAIAAGQAVLSGEATGTPKTHDGPVEALRALKSLHRSANKARTQAINQIRATLVTAPDELRARLRDLSRRDLLATCAAFRIGADDDSLAGIIRLTLRELASRVAFLDAQIKSTVVRLKRITDELAPDLVAMHGVGPDTASTLLLTAGDNPDRLRSERSFASLTGSCPVPATSGLIQKRYRLNRGGAGKPTPLSGASRWSGLVPTRPPASTSHDARPRARPRSKRCAASSATSPARSTTPYRKQPSVDSRSIAHVEQKNWSVVRQAVGYHRYDTAAELALLNEVYALLRLLINFFSPQQKLIDKRREGAKVIKRYDTAQTPYQRVLADPRVTRKVKQALTAQYRQLNRGAATPRPTGPQRAAPDTGQGQAPAQPAARSSTGSDTSICTGASGGVVSSRSRQGSIDAAVRCYYANDPASRPLCTLTAVVMFGTVALCPTCPPQRSSVGKGTPPAPLPAGPELQVLDWVGAAHQQAAAAERTLAAAVARARQTG

SEQ ID NO: 118519 - protein, 345 aa, unidentified
MAEIITIGLDIAKNVFQVHGVDAAGTVVVRRQLRRAEILKFLGKLAPCVVGLEACGTAHYWARQIAALGHEVKLLAPARVKPYVKLGKKNDAADAAAICEAVTRPHMQFVPVKSAEQQAALMLHRARDLLVGQRTMLINAMRGHLAEYGFIARQGKAPFAGLVALVRDDEAARLPDAVRMALRLLADQIDACTAKIEALECDIVARHRGSEVSRNLATIPGIGPIIASALAAAVPDPAMFKSGRQFAAWLGLVPSQNSTGGKQRLGGITKAGDRYFRRLLVVGATGLVRYKRENVPGGLAWLTKLLGNKPVRLVTVALANKMARIAWAVMTSGEVYREVPVPQAA

SEQ ID NO: 118520 - protein, 322 aa, unidentified
MAMLSFGGIDVSKDRLDVVVLPEEECSSVPNDAAGWAELVERLRCFSITAIGIEPSGGYERGAMRALLAAGMPVRQVNPFKLRQFARASGVLAKNDPLDARMIASFVTIMPTRPAQRQTPAAERLAEMLAIRRQLSAEKVAAENASRLLEDAMLQRLSRRRIVRLAADIDLLDKRMVEIVATDDALVHRYRLLTSMPGVGAVLACTLIALLPELGRMSRKQVAALVGVAPYAFESGTLKGRRCIWGGRAHVRQVLYMAAMSASNWNPVLKAFHDRLTAGGKLPKVVIVAVMRKMITMLNAMVRDDVVWADRLSGRRVLPTAR

SEQ ID NO: 118521 - protein, 412 aa, unidentified
MKDLLEISCGLDVHKEKIVACILTGPLGKPTRSEIREFSTLIPDMIALRHWIVSKNCHHVAMESTGIYWMPIYEILEDAFSGDITLLVVNARHMKNVPGKKTDMRDSEWISTLLRAGLLNGSFIPEKRIREFRDLNRYRKSVIRDITSQKNRIEKFLQSSGFRLSSFISDIFGASGRNIILHLIEHGQIDKTALDSCLKTKTRNRIDEILMSVNGTLSEHQKAFLKILMTHYDSLKKHLAEIETSLEEDMAPFALQVEQLNSIYGISTTASCAIIAEIGIDMKPFKTAEHICSWAGLCPGNNESAGKRKSTSVTKGNPYIKSMLCEIAWVIAGKRNTYLSAWYWRIKQKKGAKKAIVALARKLLVIIYTMLKQGTLFDESCFETRRKHCEQKQLSRYIRELEKHGYHVEAQS

SEQ ID NO: 118522 - protein, 351 aa, unidentified
MLIIGCDFHPGFQQVAIFDNRTGEIQERRLPHREEAEQFYRSLSGPVRVGMEACGHYPWFERLLGELGFELWLGDAAEVRASVVRKQKTDRRDAEHLLHLLLENRFPKIWVPSLEVRDVRQLLVHRHKQVQARTRTKNQLQAMALSQGVQKKWKLWTKRGRAELEQLPLLPYAAERRQRLLEALDGLEADLVELNRRVDEEVRKRPEAMRLRTHPGVGPVTALAMVLTLGPVERFASGKDVGSYFGLIPREDSSGGKQRLGKISKQGSSFLRFLLVEAGQTAARYDPQLKRFYRRLAMRKNRGVAKVAVARKLATRLYLMLREQWTYPQLCQAVMQVSPSHSVVEPEKPTA

SEQ ID NO: 118523 - protein, 402 aa, unidentified
MNCVGIDVSKGKSTIAVMRPFGEVVVSPFEVCHTASELSELARLLKSLDGETRVVMESTGNYHAPVAWLLHDAGLYVSVVNAMLVHDYGNNSLRRAKTDKKDAVKLANYGLDHWLTLPRYVPDEDTRLMLKTCYRQYQQYSKVQTMLKNNLISLLDTTFPDANRLFTSPPRADGSEKWVDFVATFWHCECVCGRSEKAFTTQYQKWCRKHGYNFSEDKALDIYASACRHFGVIPKTDTAKLLVEQAISQLQTTSSALAALKQEMQSLAASLPEYPVVMGMFGVGPTLGPQLLAEIGDVRRFHSKKALVAFAGIDAPPYQSGQIDVRSRSISKRGSASLRRTLFLVMSVILQCAPIDEPVYQFMDKKRSEGKPYRVYMMASANKFLRIYYASVKAYLESLEHD

SEQ ID NO: 118524 - protein, 344 aa, unidentified
MEHFAGLDVSVKETSVCIVDDAGRIVREAKVASEPEALLAVLNNPSYRFRRIGLEAGPLSQWLYSALGEANLPVICVETRHMRAVLKAQINKTDRNDARGIAQMMRAGLYRPVHVKTLRSQKLRMLLTHRKLLQSKAIAIENDLRGTLRNFGLKVGVVGAVKFETRIKQLVENLPDLALLVEPLLVVRRVLREQIAVLHRRLLDIVRDDEVCRRLMTIPGVGPVVALTFRATIDVPARFRNSRAVGAVLGLTPCRHQSGESDRTGAISKCGDEMMRVMLYEAAQILLVRSTRWSWLKVWAMQIARRCGLKKAIVALARRLAVIMHRIWVDGTEFRWARQAAAAA

SEQ ID NO: 118525 - protein, 460 aa, unidentified
MKAKERQRRARRERAQLQQINLFAAGIDVGSRSHFVAVPADLTTEPVREFAGFTGDLHRLADWLVELGIQTVAMESTGVYWIPLYEILEARGLEVVLVDARHVRHVPGRKSDVLDCQWLQQLHGYGLLRGAFRPPEALVPLRAYLRQREGLIAEASDCIRHMQKALRQMNLLLDNVVSDITGVTGLAIIRAILAGERDAQALARLRDRRCRADERTIAGSLEGHYREEHLFALGQAVERYDFYQQQILACEAVIEQHLRRLDQAGDAPPPPAPKKPRGNSKNGLAFDARSTLFRLTGVDLTEISGLSENTVLTVLAETSLDLSAWPSEKHFAAWLALSPGSKISGGKRLSGKTKPSANRAAAAFRMAAYSLTNSKTALGAFYRRLKARLGAPKALTATAHKLARIFYRMLTTKTPFVDAGQDYYDRQYRARVARSLKKRAAALGYQLIPLPQDTPQNAAS

SEQ ID NO: 118526 - protein, 332 aa, unidentified
MDSVSQFAGLDYHQNSLQVCVMDARARVGINRRCDNDLGQVLGLLDGAGAVRKVALEACEGAAALAEALQQCRPQWAVELAHPLYVSKLKGSPDKSDYSDAKLLADLSRVGYLPRTWLAPAALRELRQLVGHRQRLTEQRRATKLRVGSVLRNQRVKVAGPRWTQRWVGEVRSAPGLSAAARWMIEELLDELADVQRRIARVEVKLREVTAGDAMIAKLRQIEGVGEVTAWMLRASIGRFDRFKSAKQLSRYCGLTPRNTASGQRQTQGELVNVVDRRLRALLIQAAHRLIRTHDRWRALAMKLVRSGKPRSVAVAAVANRWMRTVHRRMTA

SEQ ID NO: 118527 - protein, 456 aa, unidentified
MARKKRTKESRANNAVLPVMRPDAAGIDIGATEIFVAVPADRATENVRSFPTFTQDLYALADWLKSCGVKTVAMESTGVYWIPLFQILEDREFEVCLVNARHVKNVPGRRTDVSDCQWLQFLHSVGLLRASYRPEQEVCAIRSLLRHRESLVQMAATHVNHMQKALDQMNVQLHHVISDITGLTGLAIIDAILAGQRDPLTLAKLRHERIKASEEVIAKSLVGDYRAEHLFTLRQSLTAYRSYQKLIDDCDKEIRRCLDQFKPPAEPTAGVESSGSKGKAQSSEGIVRSELKRVFGVDLTKIPGIRTGIAQVLFGEIGPDFTKFRSASAFASWMGLCPDNDISGGKVLWTGTRKVKCRAATALRMAAQSLHHSKTALGNFYRRMRAKLGAPKAITAAAHRLARIIFHLVTTRQEFDDSRFAADHLKYERRQEAKLRAKAKALGFQLIPVEHPEVVP

SEQ ID NO: 118528 - protein, 333 aa, unidentified
MWDKATGEMLERALSHERKEEVRAFYAGLQGPVRVGIEASGQSQWFEPLLAELGHEVWIGDAAKIRASCERKQKTDRRDAELLVKLLDEERFPRIWVPTPAERDARQLLLHRHKLVRMRTQLKNQLQALALNQGVQRKWKLWSETGRKQLEALPLMPWASRRRTELLVLLDQLEASIGELDGAATEQANTRAAVRRLMTHPGVGPITALAFVLTIGPAQRFRRGKQVASYLGLIPTEHSSGGRGQRLGHISKQGNPFLRGLLVEAAQSAVRHEPEMRREYQRLAQRKCRALAKVAMARKLAVRLYWMLRTEVDYAQLIQGSHAGQLESFRGRV

SEQ ID NO: 118529 - protein, 365 aa, unidentified
MKTSTTKTKTSAASTTRTILAVDLGKYKSLACAYDGDPASARCVTFPTDREHLRRLFAKYRPAVVVIEACALAGWVHDLCVACGLPCKVANTASEAWKLKHSKRKTDKDDALRLAQLEALGILPTVVMPPLQTRQWRALIAYRQTLVGGRVATQNRIRALLLAQGLPAPRGHRAWTELGLQGIAAHAKPLAECGPEELWRGQLGLALRELQQTRGLILQTEQRLDQLAQADKNVRLLETAPGLGTRTGEAIAAHLHDPGRFHTGKQVSAFSGLVPRQFQSGESDRRGRITRRGPAVLRKLLVQCAWAMLRYNAWARGVFARLTRGRKSRRKQAIVALARKILVRCWAMLRDQTPWRDAAPAAVPA

SEQ ID NO: 118530 - protein, 367 aa, unidentified
MKKVSTVAAKLSRNNSQQKLTIGLDLGDCNSWYCVVDEAGQIQVEQRVRTTAKALREVFGAMPRSRIALEIGTHSPWISRLLSELGHEVIVANARKVRLIGESRKKDDRLDAQTLARLARIDPQLLYPVKHRSAQAQADLMMIRARAGLVRARTGLVNTARGLAKSYGERLRGGNVRNMNPEKVEGLSPELQRALGPLLAGIEAVSERICEYNERIEQLAQQSYPQTALLKQVKGVGTLIALTYMLTLEDPHHFQKSRDVGCYLGLQPGRRNSGRSEPQLHISKEGDPYLRTLLVQGAQHILGPFGIDCDLRRWGLRLAERGGKSGKKRAIVATARKLAVLLHHLWVSGEAYEPLHNSNRTTVAAAA

SEQ ID NO: 118531 - protein, 430 aa, unidentified
MTNLKVTPSESILVAIDVSKSRNDILIDILGASRHQRLVVLNTRSEHDRLIERLLAFGRPVIAGFEATGNYHRPLAFRLLQAGFALRLVSSVALARTREALHNGSDKNEPKDAQVILHMLKIGATQAYCDPICSGVNDIQELSKTHEVISKAKTELWHRLLTHYLPLYFPEIARFAGNSRSDWFLAFLEQFPTPASIMTYSKEEFIDKAWDVVGRKVSKARLLGDIYETARSSIGLPAAIDSPAIGMFRLVLAEGRSLIRRRDAIEQQAHAVLASNDDYHRLRQIPGVGPITALTILAEAGDLRRFHHHRQFLKFCGLDLATHQSGQFRGQTKLSKFGNARLRRALWVAGQVAIRQRDNSFRAKYERYIARDRDNSDLKRKALTAITAKMARTAHAIIKAGSDYRPFFEGPMPSGRTSLSRCREGASATL

SEQ ID NO: 118532 - protein, 383 aa, unidentified
MQGSNVRTPIAGDIGTIFVAIELSQRKWLVTMHSPDRDRISRHPLDGGDHAGLLALIERVRARAARILGPAPQVVSCYEAGYDGFWLHRLLTGAGIANLVFDPASIAVEQRARRAKTDRIDGELLLRTLMAYRRGEPRVVRIVRVPSPAQEDARRATRERDRLITEQTAHGNRIKALLRLHGIAAGNPRRRDWAAWLEAYRDERGQPVPPQAKAELNREHARLMLVREQLQELERAQMSADAPADAVAMAQQGAMLQRLKSLGPAFSGTLTNEAFYKDFRNRREVGAYFGLAPSPWRSGTTERDQGISKAGNPRARHKAIELAWLWIMHQPASALSQWFRQRTAGASKRLRRIAIVALARKLMVALWRYLTTGLVPDGAVLKA

SEQ ID NO: 118533 - protein, 382 aa, unidentified
MKVTYQTCCGVDVHKSFLVATIVKTTGGIEPSYQKKRFSTFNNSILEFKQWLLDNDCHDVCMESTGKYWVPVFNLLEDDINVVIANPKWVKAVKGNKDDTKDSKWIGDLFRLGLVRGSYVPCKKIRILREYTRYRYKLISCRSSEKNRYQNALTVCNVALDSVVSDIFGKSSTSIIDYLLEQSGSSINHEEIASKLLRSLKSKEDAVIESVEGYQMTDAQKYRMRLVRAHMDYITAEIGTDMSQFSSSKRLCCWAGLTPGSNESAGKKKSVRITRAGVYLKPALVQCAHAAVKSDKSPYYKKKYDSLVKRRGKKRAIIAIARMILTAIYQMMSTGEQWNPSDLYKIDMPVALVEKQKAKAIKQAKKLLQREGLLPPDEPLAS

SEQ ID NO: 118534 - protein, 314 aa, unidentified
MAKQRERIIVGIDTAKAELEFYRKDTEQGGVFANEPGEVDRFLESLPEEAEIAIESTGRLHELLVLRALELGVLVYIISGFQLSRYRDAVGQRAKTDRSDARLLARFLEREGENLRPVTPRSPEEKRLWQLLRRRASIVHHRTALQQSLRETDAGFPSPDALLDAFKHYIAVLEREALRLAKTLGWREDLDRLQSTPGVGPISALGLLLAFRHAPFRNADAYIAFMGLDVRVRDSGKFKGKRRLTKKGEPELRRLAFLAGRAGRRAHAPFKEYFDRMLERGYSKIAADVAVGRKIARIAFALLRDGRPFGPSEA

SEQ ID NO: 118535 - protein, 469 aa, unidentified
MTPRAGKHFRTSPQAEGDDLAVKHPHAAGIDVHAAVHFVAVPPADVPAGFVNPEPKLPAGVRKFGTNTGDLEALADWLKACQVTTVAMESTGVFWIPLFDLLASRGFQVLLVDPRQTAHAPGRPKSDALDCQWIRRLHSYGLWTGAFRPADAIVRWRGFQRQRQMLIRYAAQHIQHLQKVLEEMNVKLTEVVSDIVGGTGIKILRDIARGVRDPVKLAKHRHELCKATEEEIAAALCGNWRPELLFALKQDLKLYDFYQKQLQECEGRIEECLRAMEDKSKGAPLPPSPRKRKPEKNEVRFGARALLFRMAGVDLTQIEGISETTALVILSELGADLSAFPHEKNFVSWLGLCPQHRGSGGKIFKRRTRRGANRVARALRMAAQGCHHAKNALGAFYRRIQARSGGAKAVVATARKLAERVYRMLRHGQEYVRQTQEVYEAAYQQRQVKSLAKKAAGLGYKLVPEAVSP

SEQ ID NO: 118536 - protein, 427 aa, unidentified
MSVTQNEKIRQVTETTMVIGVDIASEMHWARAFDWRDLELGKAVKFENSAEGFRFFLHWLSELAAEQKKSSVMVGLEPTGHYWFTLAAYLQGSSIKLVLVNPYHVKRSKELDDGHPSKSDKKDPKTIAKLVLEGRYAFPYIPQGLYAELRVAMNCRWRVQKELTSVQNQIQRWLKIYFPEHKTVFGKFEGMGSMALLHAAPFPSDLIALGVDGINQIWRQMKLRCVGLKRAQRAFEAAKNSVGCTTGIEAARMELQILLEDYDVKLQQYERIMEVVESLCGQIPEAEELLQIKGIGLTTVAGIFAEVGDIRRFSSPRQLQKLAGLAITENSSGKHKGQTEISRRGRAHLRAILFRAAMPLVAKNEEFQKLHQYFTTRAENPLKKMQSMIAICCKLLRVFYAVAIKGCAYSAEKMLADIHRNQPLKAA

SEQ ID NO: 118537 - protein, 391 aa, unidentified
MVCVGIDVAKDKHDCCILDSEGTTLVDCFTIPNNMDGFKSLLQTIQDCSQKSDKIKVGLEATGHYSYNILGFLLDNNLPVYVMNPLHTNLYRKSLSIRKTKTDRVDAKTIATMLLSDVDLKSYTDTAYHNEELKSLTRYRFDKVQERAKLKQSVSRLVTILFPELEQLVSSIHGTSIYALLSEYPGAKQISEAHLTRLANILVKTSRGHYRKDKATHIRDAARTSIGSVMPAKSLELKHTIKLIQELTSEINEIEDAIRKIMDELKPPILSIPGMGFHSAAMILAEIGDFSNFNSPDKVLAYAGCSPSTYQSGKLTNCYAHMEKRGSRYLRYALYTATKYVCYWNPVFTEYLTKKQAEGKHYNVALSHATKKLVRLIYALQKSGKAYLAVT

SEQ ID NO: 118538 - protein, 411 aa, unidentified
MIEAIYRCCAGADVHSKTVAVCVRRVDEAGKVHKEIRTFGTMTRDLLGLSDWLLAEGVTHLAMESTGVFWKPIYNILEGQFEIVLVNARHVKNVPGRKTDVKDCEWLAQLLQCGLLRGSFIPALPQRELRDLTRMRKQLTHEMSAVANRIHKVLEDANIKLGLVATDILGVSGRRMIAALIDGETDVDKMADLACRRLRDKIPLLRLALHGKVTEHHRFMLKRLMDHLCYLEREIEQFSKQIEVASRPFTKAITALIPIPGIDLASAQNVIAEIGPNMKQYPTDAHLASWAKICPGNNESAGKRKSGTTGSGNRWLNSTLVQISWAAVHTKDSYFQAQFRRLAGRRGKKRALIAVAHSILTVIYYVLKRDLQYKELGGDYFDRLQRHKIVKYHVKRLEALGYKVEVVDQVA

SEQ ID NO: 118539 - protein, 356 aa, unidentified
MLNSNKLDFTGQPVYIGLDVHKKSWSVSIHSALCEHKTFTQPPEVEILVNYLRRNFPGASYHSVYEAGYSGFWLHDQLTEKGVACIVANPADVPTKDKERRTKRDRIDCRKLARSLRAGEIEGIYVPCREKLEDRSLVRTRQSMVRKQTRCKNQIKSILLFYGIAIPEEWAERRWSGPFVKWLENLPMERASGEVALRMHLDELKHLRQIIARLDREIRVLAQTGEYVVQVRLLKTIPGISTLTAMILLVELQEIGRFRSLDELAAYVGLIPDTHSSGETEHTGNITQRRHAQLRASLVEAAWVAVRKDPALLMAFEESCQRMRKTRAIVKIARKLLNRVRFVLKNQTPYRMGVVQ

SEQ ID NO: 118540 - protein, 315 aa, unidentified
MSATGWVVGIDVSKATLDVAVRPGGEAWQAANEPAAIGALVERLRALPPHVVVLEATGGYEHAVVAALATAGLPVVVANPRQVRDFGRAIGQLAKTDRIDAVLLAQFGERVQPVPRPLKEAATEEVSALLARRRQLIEMLTAERNRLGTARSPAVRRSVQRHIQWLERQLDDVDGALGAAIEASPAWQATEDLLRSVPGIGPVVSRTLIGDLPELGRLNRKQIAALVGVAPHARDSGTLRGHRQIWGGRATVRGALYMGTIVASRYNPVIREFYQRLRKAGKPAKVALTACMRKLLIILNAMMRTQTRWDPTCAN

SEQ ID NO: 118541 - protein, 408 aa, unidentified
MDRQQAARCQVWVGIDTGKQAHHAAAVDADGQLLWSRRVVNDQAAIQELITKATATAGGVCWAVDLTCSSAALLLALLVEAGQRVVYVPGRTVNRMAGAFAGEAKTDRKDAAVIAQTARMRRDLLPARPKQELVAELALLVGHRRDLMADWVRMVTRLRGLLTASFPGLERCFDFTSRSALMLVSRYQTPEALRAQGRRRLRAWLRRQVPTQLSDTRVEQMADTALAAAAAQTVRLPAQATTAQLIAQLASDLLALDRRLKELDKTIAQRLTGHPQAKIITSLPGMGPLLAAELLVTVGDLSTFPDAGHLAAYAGLAPVPRDSGRRTNNLHPPKRYNRMLRRVFYLSALSSLSTSGPNRDYYQRKRAEGRKHQQALMALARRRVDVLWALLRDNRCFELSAPIKTTTA

SEQ ID NO: 118542 - protein, 446 aa, unidentified
MDVLYTHCAGLDVHKKQLTACRWVPDPTGQCAEGLTEIETFGTMTIELLGLVDWLTEAGITHVAMESTGEYWHPVYNLLEGHFTVLLVNAAHVKNVPGRKTDKADARWLAKLLRHGLLQASFIPPRGQRDVRDLTRYRTKLVQERAREVNRVQGVLERANIKLASVVSDVMGVSSRAILAALVDGRADPATMAELARGRLRSKLPLLEQALSGLVRDHHQQLLAMQLAHIDFLDDQIATLNTTIAERLSALTPPETVAVPVAADEPAGGRAPHVEAAAPLTFDQAITLLDTIPGVDRRGAEMIVAEIGTDMSRFGTAARLAAWAGVAPGNDESAGKRRAGKTRKGNRALRTGLVQLAHSATHTKGTYLATLFRRLAARRGKQRAIIAVAHSILVSVFHILARHEPYRELGASYFDRLRHSQSVERLTRRLEQLGYAVHLEPRPAAA

SEQ ID NO: 118543 - protein, 320 aa, unidentified
MMAQNDLVVVGIDVAKDKVDACIRRFILRQTFPNTAQGHRKLVAWLRKYQVGKAVMEASGGYEREWRNVLHNAGIEVRIVDPRRVRSFAQSAGRLAKNDPIDAEMIAWFAETFSQAPGQVPDAAREELAALAKARKALVDVKIRLLAQDEHAAPEPARKAHARILKRLAVEIDKLEAVISAKVKATPEFAERAEIIESVPGLARATSAILIAGMPELGQVSDEVAAALIGVAPYDDDSGKRRGERYIKGGRRWVRNAIYMPCLGAATQYNPVLKAFYRRLLAKGKQPKVALVACMRKLIIILNTMLARRQKWNPGHHAVA

SEQ ID NO: 118544 - protein, 331 aa, unidentified
MIIGWDWHPRSQIVAWVDEETGEIMTRRLEHENGEARRFYASLPPGATVGIEATFPSHWFERLLAECGHHRWVGDSARIRASEVRRQKTDTRDAEHILDLLRTGRFPRIWVPSMEERDLRQLLVHRMKMVRTRTAVKNQLHYLAMSQGVCRKRKLWSARGRAELEGLRLLPWASRRRQELLEWLDQLDRSVEELDRAVEEAGRGRTEVALLRTHPGVGPVTGLAFVLTVGPISRFANSRKLVSYLGLNSSEHSSGGRQRLGGVSEPGNRVLRWLLVEAAQSAARCDLELGRDYRRWCAGRPGRSKAKVAVARKLATRLYWMLRNGSGDAQP

SEQ ID NO: 118545 - protein, 310 aa, unidentified
MDHLFVGLDVAKDHLDVHTRPSGEAFMVAHDEAGLTELVTRLRAMAPALIVLEATGGYEATVAATLAGAGMPVAVVNPRQIRDFARAIGTLAKTDALDAQVIARFAEAVRPVARALPADHIQRLGELVSRRRQLLDMLGAESNRRRQTRDRGLQRRIDAHVRWLERALEDLETDLHDTIRSSPAWRDTENLLRSVPGVGPITALTLMADLPELGHLDRRQIAALVGVAPFNRDSGILRGRRMIRGGRSSVRHVLYMATLTATRHNPSLATFYARLRATGHPKKVALIAALRKLLTILNAIVRDRRPWQPA

SEQ ID NO: 118546 - protein, 350 aa, unidentified
MKKIAYLGMDVHARHCVLGHMDSKGNFMGNITFSTSEQNIIEALKSIKAKEKYLAMEEGNLAYWVAQVSKPYVTEVISSDPKENALIFRSSRKLDKIDTRKLCRLLRLGELKRVYQPANDHRAIFKAAVQHYIDLRGQQTALKHKIKALYRHWGVTSVEGQAVYGEKRSDYLKMVKQSPIRCLLINLYSLMDEAESKQKNAFKTVKQLGQKYPEIKEFQKIPGVGEVLAHTFDAFIQTPHRFADKHKLWRYCRLGITERSSDGKPLGYKKLDRSGIPELKALSYRAWLAAMKGDNEVKRFFSDSYRRTLNRVHARLNTQRKITAVMYGIWKRGEAYRAQLFLNPLQMGVV

SEQ ID NO: 118547 - protein, 351 aa, unidentified
MSHLSTPSTIATIGIDIGKNTFHLVGLDQRGNIVLQLKTSRVQLERRVANIPRCLIGMEACSGAHHIGRQLEALGHDVRLIPAQYVKPFLKGHKNDYRDAEAIAEAVQRPTMSFVRIKTPEQMDLLALHRVRSRLVSLRTGVINQIRGFLIERGITVRQRPAPLRKALNDILSANSPTLSSRMVRLIVDLAEDWRRLDDRIATVSTEIEVLAEQDGSCQRLMTVPGIGPIISSAVVAAIGDGTGFSQGRDFGAWLGLVPKQESTGDRTILGKISKRGNKYLRTLFVQAAHVILARRPSAAMPGLWPWIERASKRLHRNMLAIALANKLARIAWAVLARGRDYQPKIIPHAA

SEQ ID NO: 118548 - protein, 359 aa, unidentified
MTSMDHDRPPRRVVVGVDTHKHVHVAAALDEHGARLGSGSFAADRSGYAQLISWALRFEAPLTFGVEGSGSYGAGLVSALRRHDVGVVEVVRTDRRDRRLRGKSDTLDAENAARAVLAGIARAVPKSADGEVEMLRTVKVAKDVAVKARSAALISLRQVLVNAPAELREQLEGMSKMALIRRCAALRPGSVTSVAAACKHALRAIARRWLALDEEIRGHEKLLGAITGDLVPELVAAFGVGPDIASELLIVAGDNPERVHSEAAFAKLCGASPIPASSGKTTRHRLNRGGHRQANSALYRAVIVRLQHHEPTKAYLERRSAEGKTKAEIVRCLKRYLAREVWALMRPLRERRPALHETG

SEQ ID NO: 118549 - protein, 312 aa, unidentified
MTDIICGVDVGSETLDARIGQDGAWQQFANTVEGIAALAAFCQSHRADLVVMEATGGYERQPFAQLWAANVPAAIVNPCAVRRFAEAMGVLEKTDRIDCGVIAWFAGVKRIKPTPPASATQCRLAALVVRLRQLTELRVEQSNQRRLVTEPDVLLDFQSILTTIASQIRVLEVKIAATIAADPLWAALDAAFRSVKGVADRTVARLMAQLPEIGTISNKAAAKLTGLAPIARDSGKRQGKRPIRGGREGVRSLLFVVAEVVRRHDPDFKAFHQRLCAAGKPKKLVRVALARKLLVRLNAKARDVRNELAYAA

SEQ ID NO: 118550 - protein, 407 aa, unidentified
MHERCVGIDVHKDSLSVCLIVGGAGGTAEGEVRQFGTTTRQLRELGAWLEQEEVTHLVMESTGVYWKPVWQISDNGRLPLLLANAKAVKNMPGRKTDQADCIWLATLLRKGLIRGSFIPPAEIRALRDLCRCRTTMVQQRSQTVLRIQKLLEESNIKLDSVLTDVRGVSGRAMLNSLSEGETDEEKLAALAVPQLRGKMPQLTRALEGTMVRHRRFVLKQWLSNFEELDRHIAELEQEIEAYAAPFESQIGRLDEIPGVNRIGAIAILSEIGVDMSAFATAGKLCAWAGVCPGNNETGGKRKKARVRSGNRWLRGMLTQCAWAATRTRKSYFHAQYRKLVGRCGNNKALVAAAHSLLAIIWHMLQRNEPYRDLGADYFDCLNTQNKQRAYVRKLEQLGFKVTLQPAA

SEQ ID NO: 118551 - protein, 373 aa, unidentified
MPKYSTAFGMDVHLRSTTVCALDADTGEAVTRRFPGNPWGEIAGWMDGFPGPSLAAYESGYLGFAPQRELAGLGVECVVAAVSKIPRSAADSASKNDRNDAARMAKAILAHDISPVWVPSPEVEGIRDLAGAYDGATARLATAKQRLLAFLAKRGFVYGGTTPAGNPRKYWTYDFLRWLDKVRPEDDGGVRALAALRNEVEAAAEARADLLSEYRAAVDASPIAAEVAALQSIKGCAFALAAAFSAEVGDFTRFRSGRQVTAYFGLAPSQRSSGDSVRLGGISGAGNALVRRLAVEGSWSYVQASHQPKLMPKGSGVPLEIRMHGRKGSERLLRRREEMLARGVPAAKANAATAAELVRWLWALGMMCREGAE

SEQ ID NO: 118552 - protein, 426 aa, unidentified
MDILYESCAGLDVHKEMVSVCVRPIDAQGQVSSKVREFNTMTKDILSMGDWMAAHGVRHAAMESTGVYWKPIWNLLEERFDLMLCNARDVKNVPGRKTDTKDCQWLAQLLQHGLLRGSFIPPKPQRALRDLTRHRAQLVGEHTRAANRIAKTLEDANLKRASVASDILGKSGRLMLKAIIAGETAPEALADLAQRKMRGKIPQLVKALDGGVNGHHRYMLAMLLDHVEYLERAIADLDGHIERLLSSEALNEAPRSNDALPFDEAAKLLSTIPGVEKRTAQAVLAEIGTNMSQFPSSGHLSSWAGVCPGNNESAGKHRRGKTTHGNRWLKRALSQAAWAASHTKQTYLSAQYARIARHRGKKRAIVALSHTLLTIIYHVLDGHVAYQELGTQYFETLHPESRARFHKKQLEKLGFKVTLEAEEMAA

SEQ ID NO: 118553 - protein, 230 aa, unidentified
MVSRGIDISKSSFVAAYPSTNGNRTKTFPNTTARMRELIGTLAVAEHHCVMEATSNYGCCCTCYIRTVLPSVLPPPKKQIKHFSRMMMPVTKTDEKDAYMIAMYGEKMNPPIYKMPSQATIRILTTEGFTYFDNAKQLSRFIGICPTYQQSRTSVNIREHINRNDDERLRSLLYIAFWTALRYNSRECYIRLKANEKPFKVALIAVTNKLVRPVLTITTINSIYRWICPG

SEQ ID NO: 118554 - protein, 365 aa, unidentified
MKLYVGLDVHSKRTFYHVQDEEGGCVRKGATETSVEGYEAMLAELGPPVGTKVALETGTQAGWAWNVLKGLGMDPVVIEAGEVRRKARRPNQKTDNADAFEICDGLRRDIYVGIVWVPPAQIERLRAIVSRRRSFVRLRTSQINAARFLFRARGLSTAGMTLKNETSWGRLLARAEEEEMREYVGMHMAQWQLARQHIERLEEQLREAVEPFAEEMELLRTIPGVGPITAATFIAVIGDPGRFATSAKVASYIGLTPAMYDSGERERHGHITKRGSATLRSVLCEAAHQARRANHPLHPYFARVCAKSGYRKAVTAVAQRLARIMWAVWRKRRAFDLKRLNVVCDRKKITKTVYFRIKEGNKSAA

SEQ ID NO: 118555 - protein, 340 aa, unidentified
MDKHDFSGIEVSAEELVVAVEREEGAIRLEYFANDAQGHQALFRFLRGAGHPVRVCMESTGVYGLDLALALARAGVEVMVANPRAARHFATAMMQRSKNDRLDARGLMEFAKRMPFQAWTPPRPVVLQLHALSRRLEALKDTQAAEQNRLHAARATDITPAAVRRDLERSLRSLRRAIARLTLEAVKIIRQDSDLKLRFDLLLSAKGIGETSAIALLAELAVAPQDLDVRQLVAHAGLDPREHSSGSSVHKNPRISKHGNVHLRRALYMPALVAIRHEPNLRAFYEHLRARGKAKMVALVAVMRKLLHAIFGMFKHRTAFDGNKLYPLPAAGISITEAAA

SEQ ID NO: 118556 - protein, 395 aa, unidentified
MLYLGIDIAKHKHYASIMDSNGNPVEKPFPVYNHKKGGQALLTKIYQHIDAPTEIKIGMEATGHYWLALYSFLLDHGFSVIVLNPIQTNAWRKGTEIRKRKTDAIDATMIADIIRFGNFLETPLVDEKMFALKQLSRFRNSLVSSMGDLKRKSLVVLDQTFPEYQKMFSDVFGKTSTQLLLEYASPSDYEQVSIDDLTQIIEQASRNRLGKEKAHQIIESASHSFGITFGKEAFSFQLKMLMEQIHFIEIQLKQCEEQMDQLLIELDTPITTVPGIGPILGATILGEIGDIKRFDKPSKLVAYAGIDASVSQSGQYNSTSMSISKRGSSHLRRALFQAAVTGYKYDPILKAFYEKKKQQGKHYYVCICAVARKLCHIIYAILKNNKPYQVPIHTS

SEQ ID NO: 118557 - protein, 340 aa, unidentified
MNLKTIGMDLAKNVIQVHGADGKGNTVLRKQLKRAQVLPFFVNLVPCQVGMEACGSAHFWARKLVAMGHTVQLIPPQYVKPFVKRNKNDAADAEAICEAVVRPNMPGVPIKTVEQQAILSVHRARQGFVKARTAQANQIRGLLAEYGLVIPVGIRHIPSCVALIVDDEENELPMSFRHLLQTLVEHFKALDEQVGKLELEIKCWHRDCAASTQLATVPGVGPITASALVASIGDARNFKNGRQMAAWMGLVPRQHSTGGKTVLQGISKRGDSYLRTLLIHGARAVIRVSEHKIGADPWLKTLVARRNKNIAAVALANKNVRVIWSMLTHERDYVPTYAHA

SEQ ID NO: 118558 - protein, 401 aa, unidentified
MAAQRDTAWVGIDIGKTHHWACVVDAEGKALLSVKVANDEAEIEALLAKTGSLAMQLIWAVDIIGAPSALLLALLARAGQSVRYASGRVVAAMSAAYAGEGKTDAKDAYVIAETARLRRDLSVIDTGTDLVRKLAVLTGHREDLIADRVRMINRLRDLMTSVFPSLERAFDYSSHKGALVLLTSYATPDRIRRVGQTRLTGWLRNRNVRGAADVAARATAAAKAQTVVLPGQDMTASIVTELATGILALDDRLKVLDAQIQMTFDEHPHARIIQSMPGFGPFLGASLLVGANDLRAFPSAGHLAAAAGLVPVPNDSGRRTGNLHRPLRYSRRLRHVFYLSAQTSMMRAGPNRDYYLKKRAQGATHSQAVIALARRRIDVLWALLRENRTWTAAPPALAQAA

SEQ ID NO: 118559 - protein, 387 aa, unidentified
MPQPNDLSRSLVALDQNSTIIAVVELSQSSWLVGGVLPGIERQPCKKLEPSAERLLGLLHRWRDEAVRAGSSITRIALAFEAGRDGFWLARWLQAHGVEAHVIHPSSVAVSREHRRAKTDRLDTELLKRSFLGWLRGERGHCSMARVPTMLEEDAKRPNRERECLVGERTRIVNRMKGTLARLGIRTFKPTLRKAAERLATLHTPEGSPLPPNVSAELQHDMARLSLLISQIREIENARQERLEQEPETGPHAMVRLLARIVGVGIETADMLVNEVLSRRMRDRKAVARYAGLTGSPDESGTKRREQGLARAGNARVRRGMIQLAWRFLLFQKESALALWYRARTADSRLGTRKTMIVALARKLLIALWRLVTTGETLEGVILRPAG

SEQ ID NO: 118560 - protein, 417 aa, unidentified
MSNNDRNEAYAAIVGIDWADEVHAVCLWDATTESITHSDLSSKPEAVDAWLDELAKKYPLKSVAIAMEQSKGALINQMADRADLVIFALNPATVARFRQAFSPSMRKDDPSDALILMELVRTHGQKLRRRKALDPASRRLNILVENRRGMVDLRVSLSNRLRQALKDTFPQALELIGQEIYTPLATDFLKRWSSLADLQRARLATVRKFYYAHQVRRKDVVERRIRKIGEMVPPTTDDAVLDPARLLIVALCRQLAAVQDSIKSFDKEIVEAFAKHPDAPIFRSLPGAGEGLAPRLAAAFGSDRSRFESASAIQRASGIAPVKITSGKMSRTCRRISRSLFLHQTFFEFASKSIQFCGWARSYYDAHRSAGKCYGSAIRALAFKWLRIIFACWKNHEVYDEAKYVAQLVKRGSPLVA

SEQ ID NO: 118561 - protein, 345 aa, unidentified
MENYTVLAIDLAKLVFQIVKTTGFGKLVYNKKVSREKLKELLRKEPKALVVMEACGGSHYWCRYAQSLGHEVKALPARRVKAFRQGQKTDANDALAIATAARQPNMKPARILTTEEQGLQGIEKMRQLLVAHKTAMSNQLRGLLNEFGVVIAKSDAALRSALPEVLEDGENDVPMSFRESIAQMWGLLQTLEAELAQLTRQQTALTMQDEQSRSLIELEGVGPIGALGLKLAIGNGSHFKNGRDAAACLGLTPVQHSSGGKQKIGSISQISGHKRLRSVLIQGAISVLSYLDKREARTAKEIWLKALMQRRGKRIAAVALANKTIRTAWAMLSRGESYNASLQTA

SEQ ID NO: 118562 - protein, 313 aa, unidentified
MFVGIDVSKHQLDVHVRPSGENWSVSNDASGHEELVKRVLAVSPTLIVLVATGGYQSAVVAELGMHQLSVAVVNPRQVRDFAKATGRLAKTDAIDAAALAHFAEAIRPESRPMPDEHLVELQALVTRRRQLIDMRTAEMNRLETCHVQRVRKDIQKTIDWLTRRIGQVDEDTDKRIRNTPMWREREDLLASVTGVGKTTARTLLTQFYELGTLNRREVAALAGLAPYNNDSGARRGTRSIRGGRPEVRSVLYMATISAVHHNPQIRVFYERLLAAGKLKKVALIACARKLLTILNAMVRTKTEWRRLDAPNAA

SEQ ID NO: 118563 - protein, 351 aa, unidentified
MTMVGGLDVHRQQITFDYVDDDGLVHWGQIRPATRKTLRGWLAEHCPDGNGEFALEGCTGWRYVSEELAAAGLGVHLGDPAEIAVLRGPKKRAKTDRADAKLLRTLLLEGRFPESWIPPAHVAEIRSLGRVYYTLMDERRAWQQRIHAQLFHQGCRPIKALLSASGRDALARAPLSAAGRQYVDTALRRIDELSAEIEPLRTQLVNFARRQQGCQALQRHYGIGWLCAAIIWAEIGDTRRFTSSDQLVRFAGLDITVYSSDSKRSPGHLSRQGSPELRWAAFEAAKCAARRGSPDYAYYHRQAAKHDGHNGKNPTLAVERKILRRCYHTLRDLGDAALALPDTRPQQEVAA

SEQ ID NO: 118564 - protein, 467 aa, unidentified
MKHNRRRSPGKPRMSRTLLDHINRNVAGIDCGAAEHFVAVPPDRDPTPVQAFSTFTTDLIRLADWLTTCRVTSVAMEATGGYWIPIYEILEARGFKVLLVNARHFKNVPGRKSDVSDCEWLRELHSVGLLRGSFRPSEGIVALRTYQRHRQTLVETASTFIQRMQKALVQMNLQLPLVVSDITGATGLRILRDIVAGQRDPAHLAQHRDPRCRATRAEIVAALTGHYRPDHLFVLQQNLEGFDACQAQIAHCDTTIEGHLRTLTAAIPAPVAPLPASRSRRTTPKNNDLPFDLRAPLFHLTGGVDLTQIDGIASLTALKLISEIGTDMMRWPTEKHFTSWLTLAPNNKITGGRVISSRTQPSANRAAATLRMAAMTLGRTQTALGAFYRRMAARLDKPQAITATARKLAILVYRALKGELVYQDPGAATYDAAQRSRILRRLRQRASTLGFELVHRATGEVFAAGVS

SEQ ID NO: 118565 - protein, 342 aa, unidentified
MEHFAGLDVSVKETSVCIVDDTGRIVREAKVASEPDALLSVLTNPTYHFKRIGLEAGPLSQWLFSVLAEAGLPAICVETRHMQAVLKSQINKTDRNDARGIAQMMRAGLYRPVHVKTLRSQKLRMLLTHRKLLQSKAIAIENDLRATLRNFGLKVGIAGKVKFEARIIELVENLPDLTVLVEPLLIVRRVLREQIVILHRRLLAIVRDDDVCRRLMTVPGVGPVVSLTYRATVDVPARFRKSKAVGAVFGLTCSKYQSGEVDRNGRISRCGDEMMRVMLYEAAQSMLRSKKWSWLKAWAMQIARRRGMKKAIVALARRLAVIMHRIWVDGTEFRWTRETVAA

SEQ ID NO: 118566 - protein, 416 aa, unidentified
MKISQETRVIQRYIALDIHKEYVLAGGMSAAQEWLLPPRKIEMGRFREWALKDLCDTDAVVIETTTNVWDIYDIVQPRVARAVVAHAGAVRQIAEARVKTDKEDVKRLIRLLIAGIVPEVWVPPMHVRELRGLISYRQRLVKTGAMIRNRLHSLLHRHNLLLPEEGLASLEWWAQQEKISPLEKMQIHQEISMLSQIEQHKVEIDNELGRQSLGETWGREAVCLMQLPGIGVVVAMTILSAIGDIHRFESADKLVGYSGLGAGVHDSGKEHIEKRITKSGRKELRWAMVEAAWRAVRMSPYWKEQYEKFLRRMRRPNQAIVVIARKLLVAVWHVLSKEETDERANEADLAYKMLLWSWSLSEEVRQGLTHKQFAKYALMRLGVQTDLTRFVRGKVPRRIASREEVLVRMTELGLSS

SEQ ID NO: 118567 - protein, 364 aa, unidentified
MKEKKKAVTRYVGIDLGKRTYQIAIVERGRVQKSNGRTCVSGRQLLYKKLCRNDKVALEAGNLAFLIAKELEAVVGCHVYVLNPSHLPLIYGSMKKTDKEDSLKLAHILEDFQEDRLPVVPVPSDKEMNRRKLLGGYRRAQQSRSRDINKLHALFLAQGITTIRRQDLSTCEQRKESIKALNCFELEEAKYLITCLELHEQRIETMFRQIKNESSGDEVIQRLQSVPGVGPMVAFAFVAHVAPDRFDGPGQVSNYLGLVPRVYMSGDTVRYGRITKRGNGYLRALLVQAAWALIRTKQGGKLKERFLYMTIENSKNKKKAIVAIARRIAELLYILMRDGTGYESRPFIREKKPVEEFVQLAISA

SEQ ID NO: 118568 - protein, 325 aa, unidentified
MNPTSFSFWLGIDVAKAKLDCALLRDGKYRSKVVDNTAAGFAQLQAWLTKQQVDDPLHVCMEATSVYWEAIAQYLADAGHVVSVINPALVKAHGQSCGLRSKTDAIDARLLADFCRQKSPPAWQALSPSELALRALVLRHQALVEMQTQETNRLGTAREAVGSSLRDHLAWLDQELFRIERAIAKQIDDDPDLRGKRELLDSIPGLGERTIATLLAYLGQMRRFERAGAFVAFAGLCPRLHDSGSSVHGKPRLSKVGHAFLRRALYMPAMVTLWRTDWGRAFRDRLAANGKPPKLIIGAMMRKLAQVAFGVLKSGQPFNPALHAG

SEQ ID NO: 118569 - protein, 368 aa, unidentified
MKKSTSTTKDRFWSGMDDHAATIVVAVVRNEEASPAERFTVSNDEKGLKELIKRLQSLKGEVRCVYEAGPCGYGLQRRLMKAGIRCDVAAPSLTPQRTGQRVKTDRRDALKLAEMLRGQVLTMVTIPEIEREALRDLVRAREDAGEDLLRARNRLSRLLLRHGLQYREGNRWTRAHWRWINAVRFEQEHTQEALNNYITVVNSCKDRVEALTKLLKTASEEYPQVIGRYSALRGVDWLTAVTLYSEFGDLRRFRSASSLMSAAGLVPSEVSSGPRQRRGAITKTGNAHARRVLVEAAWHARRQPKVGQTLRKRRQNLPAEVVRIAEKAEGRLHRKFSRMIYRNKRSTVAAVAVARELTGFLWAIAQLP

SEQ ID NO: 118570 - protein, 392 aa, unidentified
MQVIADRPEAPSVIRTNLDAIFASLELSHSTWLITSLSPGSGEKMSKHVVHGGDIAGLLQRFAQLREKAVAQTGHNFPIIVIHEAGLDGFWIDRVLKNEGIESHVVDPASVATSRWRRRAKTDKIDGEALVRTLLAYKRGEPRVCAMVKAPTPEEEDRRRLCRERKVLITERVKHVNRIKGLLFSQGVFGYEPLRRDRRRRLDELRTGDGRPLPKHLKAQISRELDRLELLLEQIKAVETERDALLAAQQIAAPPSAAMLLAIKGIGPDFAAILWSEGLFRHFDNRRQIASYAGLAPTPWKSGSIDREQGVSKAGNPRLRTTLIQLAWLWLRHQPQSALALWFKERVVHNRGRLKKAAIVALARKLLVSLWKYVAAGVLIEGAIMQAAWCER

SEQ ID NO: 118571 - protein, 352 aa, unidentified
MKTYYGCDAHKRYSVFASMNERGQPGVSHKVDNDRALFRRFLTTLPSDSPIAVESVGNWYWMVDEMEEAGHNPILVHAAKAKLMMGQINKTDKLDAQGLALLLRNGTLPAVWIPPRELRDKRELPRLRMALVRVRTLLKNRIQATLAKYGIQVNEVSDLFGIGGRALLKNRLKELPPQTRQSVDVQLELLDQLEEQIQGTEDQIKAVVAATPEMKLLMTMPGVGPILAVVLAMEIGDVQRFPGPEHLASYTGTVLRIKSSGGKSFFGKVRPDLNRYLKWALVEAANIVVINQGRWSSRHVVRLYGRIKERKGHAKAVVAVARHLAEAAYWILRKNEPYKEPGTTNSISSTRK

SEQ ID NO: 118572 - protein, 400 aa, unidentified
MTTRHERIWVGIDAGKGHHWAVAVGADGETLFSTKVLNDEAQILALIDTAREKADEVRWAVDISGRASALLLALLIAYGQQVVYVPGRTVNRMTGAYRGEGKTDAKDALVIADQARMRRDFTPIEIPPELVSTLQLLTGYRRDLIADRVRLINRLRDLLVGICPALERAFDYSAAKGPVVMLTEYQTPAALRRIGVKRLTTWLERRTVRGAGDIAARAVEAAQSQTTALPGEKRAAKLIRDLAHQLLALDERIKDNDREIRETFRTDDRAEIIESMPGMGPILGAEFVAIVGDLTGYRDAGRLASHAGLAPVPRDSGRRTGNYHRPKRYNRRLRWLFYMSAQSAMMRPGPSRDYYLKKRAEGLIHTQALLALARRRVDVLWAMLRDKRLFTPTPPVTQAA

SEQ ID NO: 118573 - protein, 399 aa, unidentified
MNARYTLDELQIGIDVGSLNHAIAIAKEDGTILQEFEISHNNRGFDSFFQIVDKLSTKYHAKINVAMEGYNGWARPFDTLILEHGYRLYNVNNVKLARFKEIFPGSAKTDSIDARKILELFSLKKHLPIAKEVLQEIKPSDTINAKLKKLTRRRKQLVEEKKSIANRFGSDLQAQVPDLKAITTSVDNLWFLRFITLRDNIVLLSRLHKSSIDSIPYISCKNIEKIIAWQKNARFTNSIEYIGAMLYDDAKRLLELKAKIKELEVQIKALIPSSKIATLIQTIPGFAHISAGSLAGEIGTLERFDSEASLALYLGVTNLDNSSGKSKGSKRNLATNRQAKMAIITATMKHAQHIEESKKYIEKKISEGKRYQQAIRSLARHLVRVIWNMLQQDRAYEIR

SEQ ID NO: 118574 - protein, 317 aa, unidentified
MIVLGIDIAKRKFDCALLVEERFRTKVFENNAAGIEACVQWLTRHAAGHVHACMESTGPYGQALAEALFDAGHTVSVINPARSRAFADSLGLRSKTDAVDARALARLCRALSPEPWTPAPRHVRELQELVRRLDALIQMHTQEQNRLAVAHEAVRGSIEQMLMALNEHIQTIKDEIAKHIDQHPDLKAQRDLLNSIPGIGVATSAWLIAELGAKSFTCARSAAAFIGLTPAHRLSGSSVQGKPRLSKRGHARLRKALYWPAITALRCNPLVHALGERMRARGKHSMAIIAAAMRKLIHIVFGVLKSGKPFDPTLLAA

SEQ ID NO: 118575 - protein, 347 aa, unidentified
MRFYTTQHPFYCGIDLHARTMYVCILDQAGETLVHRNMTATPEALLKAIAPYREQIVLAAECMFTWYWVADFCAEHGIPFVLGHALYMKAIHGGKAKNDKIDAQKIAALLRGGLLPQAYVYPAEMRATRDLLRRRMHLARKRGELLAHVQNTNSQYNLPAIGKKIAYKANRAGVAERFADPAVQKSIEVDLALITYYDELLRDVELSIVKTAKHHDAHTLYLLQTVPGIGKILSLVLLYEIHDIARFPRVQDFASYCRLIKCARESAGKRSGTSGAKIGNAHLKWAFSEAAVLFLRDNPAAQKFLSRLEQKHGKGKALTILAHKLARAVYYMLKRQTAFHLQQFLQA

SEQ ID NO: 118576 - protein, 385 aa, unidentified
MTNQLQGITLVPRDYDIFGGLDVDKKSMAITFTDHGTMRKSLRLPYSATQLLNYTRKHFAGQRVAFVYEAGPTGFGLHDELTAASHPCLVVSPSMVPTVQRKRVKTNRLDSNKLSEGLRGGQLRGIHVPAPGYRELRHLVQLRDTQVGQLRATKCRIKSLLLYEGIPFPAANGKWSGRVLRQLEALPCNATVRFKLDQLIDALQFHFLAAAKVQKQIRHFCQEDPELRHSISFLVSLPGVGSITATHALARLGDWRQISNVRQIAGFLGLVSSEHSTGDKENRGEITRIGDSRLRNKLIQCAWTAIRKDPELRAFYRRIYERQPKKVAARKAIVAVARKLTTRMYAVLKEQRLFVIRADSSIAPLTAEETVGLRERLDSAQNEQP

SEQ ID NO: 118577 - protein, 366 aa, unidentified
MRKISTVVLDGIEKFKGQKLTIGLDLGDRFSQYCILNESDDVIAEQNLPTTPKGIDDVFRRIPRSRVALETGTHSPWVSRQLARWGHEVIVAHARNVRLIGDSSRKDDRVDARTLARLARIDPGLLGPVQHRSAQAQMHLTLLRARAGLVRVRTALVNSARGLTKSYGERLRKCGTQKMNREMAQGLSQELREALDPLLGEIESLNERIAEYGRRIEQIATEAYPQVARLKQVKGVGTLIALTYVLTLDDPHRFRRSRDAGCFVGLRPGRRNSGMSQPQLHISKEGDVYLRTMLVQGAHYILGPFGQDCDLRRWGLRLAERGGKNAKKRAVVAVARKLAVLLHKLWVSGEVYEPLRNSHKVVAAVA

SEQ ID NO: 118578 - protein, 341 aa, unidentified
MSNANTYIGVDLHKKSCYVTVMDGLGKIRKQTEISTDTDKVRKFFGRYQTSQVAVESTMNWIPFYENLESLGCFVVLSNPLATKAIASARIKNDKVDSKVLADLLRTNLLPTAYIQPREIRDLKELVRQRVAYVQLRTIIKNKIHSVLFKNNLSHDFTNLYGKAGRVWLEQLVLRDIYRSELDRYLATLDLLDRQIAELSENIIDTAKEDYDCKLLMTIPGISYFTALVIKSEIGDISRFPNSSKLCAYAGLIPSTYASADKVRFGRITKRGSKWLRKALIDAVTAGSKHPSRLCFFYRKLKKSKGTGKAKVATARKLCSVIFAMLTDKQPFREFTPVKQR

SEQ ID NO: 118579 - protein, 430 aa, unidentified
MNKHRYQAKGLQQVDWGQLAQAVEGRRVVLGVDVAKEDFYGAIMLSAHEVLATVMWRHPQQTRVLEASLRALGAAGIDVALEPSGTYGDSVREVLRALGCSIYLVSPKRVHDAAEVYDGVPSLHDAKAAYLIGRLHLEGASSAWRQDCAERRDRQALVAELDLYQSEQRRNLNRLEALLSRHWPELGRIAEINRSGVLHLLATYGSAQAVRAGRAEAEALLYRVGRGLANTETIEAILDSAAHTLGVPCTPGEQHLLQVLAEEVLRTREALRGVERRIAELVRRDPPLQPLADTLGKTTALVLDTALGSPLDYPNPHAYLKAMGLNLKERSSGQHQGRLRITKRGPGRARHYLFLSALRFVQRDPVVRAWYLRKVQRDGQLPRFNALVAVMRKLALALWHVARGSPFDSRKLFDLKNLGLAAGTTVEHNS

SEQ ID NO: 118580 - protein, 382 aa, unidentified
MKKHITGKKSQKGLSKGTKKQIRQVATKERLTIGLDLGDRTISYCILNEAGEVVSENQLPTTATGLSSLLGKMPSSRVALEVGTHSPWVSRHVASMGHEVIVANPYKVKLITQSVRKNDRTDARQLARLARVDPQLLSPIQHRGEEAQADLAVIRARAELVEARTALINCARGLAKPMGERLRKCDADQVKEALGVGLSEAVQTAIGPLLKSVEKISEQIGVYDEKIEEIGKRYPEMALLTQVYGVGTLIALTFVLTIEDAERFQHSRDIGPFLGMQPKQRDSGDSQPQLGISKTGDRLLRSLLVQGAHCILRRGAPDSDLRAWGLAKMQHGGKNAKRRTIVAVARKLGVLLHRLWVTGEVYDPLYNRKAVEAAQAKARVAA

SEQ ID NO: 118581 - protein, 315 aa, unidentified
MKEAEEVIVGIDVAKASLDVAVRPSGEQRRLDNDAAGIAQAVAWLRAIGAHLIVAEATGGYEAPLVAELGLAALPVVVVNPRQVRDFARATGRLAKTDRLDAQVLAHFGEAVRPTPRPLPEEAAQELAALVERRRQVVAMRTAEANRLGTTRVASVRARIQAHLTWLEADLAEVDTDLRQRLRASPLWREQDNLLRSVPGIGPVLSLTLLGELPELGQLSHGQIAALVGVAPLNRDSGTQRGRRTVWGGRRAVRTALYMGTLRATRCNPVIRRFYERLLAAGKAKKVALVACMHKLLTILNAMLKHRTPWQAQAA

SEQ ID NO: 118582 - protein, 415 aa, unidentified
MQPFEQLTHFAGFDWAKDHHDAVILDRHGATVQSLTFAHTAEGWAQWRETIKAYPALGVAIETNQGAAVEQLLQSQVTVYPMQPKAAERYRDRHVPSGSKTDRTDAWCFGDALRVDGQHWRPLAPEDPLTEELRLLCRDEVELITQRTALVNQLQQALYEYYPAALEAFDDWTAPSAWEFVLAYPTAEQLVQAGQRKWEKFLHTHKLWRPETAPKRLEIFARADRFCGREAVTRAKSRLAVSTAQVLRALQKQLEEYRSAIEKLFAQHPDHDLFGSLPGAAAKLAPRLLSEIGSHREQYPEAQGLQCLAGTAPVSFESGKIRRAKIRWHCNRHLRHAVHLWSDCSRKFCAWAGTYYQAQRDKGKSHACALRCLGQRGLKILWKMWQSRQPYDETLHALNQQRHGSWLLQLKPQTT

SEQ ID NO: 118583 - protein, 316 aa, unidentified
MTQMTHTTALYVGIDVSQKTLTIALYPTDEVWTIDNTSQHHTALVQHLAQLPIQRVLLESSGGYEKAVVSALQQAGLPVVVVPAQRARYFAKSMRGDLKTDRADARMLAYFACCYPVQPVAPCSPVQAELKELWARREQLVQQVEREKKRLHTVQSEAVRASLERMLAVLKDEIAQIEARVELIASDAALAQKAALLQTAVGVGRVVAYGLVAELPELGQVSHRAIAALAGLAPVRCESGDWVGRARVRGGRPRVRRLLYQAAVVAVSHDGRWRAEYALLGRGKVKKVAFCAVARQLLVVLNAMVRDGRAYERVSE

SEQ ID NO: 118584 - protein, 348 aa, unidentified
MKYIGLDCHKQYDHATMIDTETGEVKARRLAHIKEEFREFVGDKAGTRVVIESCRDWSRTYELSKNLVEEVILAHPLKVKAIASAKVKTDAIDSRTLAQLLMTDLIPEAHLRKAENRVKQRVIRHRTFMVVMRTRVKSRIHGLVDSQLLPPEVLQAKPINLFSKKGMKWLASLEWAKEEDKRLVESHLRVMETINQEISITNDMVKGIYEKDGDAHLLTTIPGIGITLGMLISTEIDGIERFHSPSKLCSYAGLVPSTHSSGGKTYHGKITSEGNRWLRWALVEAAVPASYADAEIKERLDTLRKKKGANVAKTAMARWLLKVVYHVLKEKRPYITAYNIMAKAGAAF

SEQ ID NO: 118585 - protein, 371 aa, unidentified
MSELPAETRPARLKAEASPRPPGARKPETELGAVSTTAVPHPDSRSGPSPHLQGRVMDEQRTVFVGIDVSKDRLDVHLRPSGEAFCVPREGKGMDDLVIRLQGLSVALVVLEATGGFEATVAAALAGVGLPLCVVNPRQIRDFARAMGRLAKTDTLDAEVIALFAERVRPQARPLREPERVHLAELVGRRRQIIEMIGMETNRGRQAIDKPLARRLARHVAYLQKELDAIDHDIGDAIKHSPAWREAEALLKSVPCIGDVTARTLLAELPELGTVSRHQVAALVGVAPINRDSGLMRGRRAIAGGRTSVRAVLYMAALTAIRRRSPFRAFYDQLTARGRPKKVAVVAVMRKLLTILNAILRDHTPWRPLNA

SEQ ID NO: 118586 - protein, 415 aa, unidentified
MSLKIVYKICCGIDVHKTFVVACIASTNDKGVTSYESHRFSTYTSGLKTLLQWLLKHNCKDVCMESTGKYWIPIYNILENDCSIVLAHPKYVKAIRGKKTDKKDAKWIADLFKHDLVAGSFMPPADIRQLRDLMRYRFKLTCFQSSEKNRLQNCLTVSNIQLGNVVSDTFGKSAQAILDKLLENPADTSFDLEPIVYKSLKKKLPQLRDAINGYITPEQVGKLKVIKAHYESLESRKAELEELILALATPYQQELAILQTAPGIRSLFTAIGIISEIGTNMEAFPSAKHLCSWAGLTPTNNESAGKKKSVRVSKAGCYIKPLLVQCANAVVTSKKHPEIRNRYLRLKKRRGHKKAIIAIARMLLTALYHMLKNGENYNAELYRKYDLPPTNWEITVEQAIIIARNQGYKVKSATV

SEQ ID NO: 118587 - protein, 407 aa, unidentified
MICVGIDVSKRKSTVCFMAPGDKIIRRPFDVKHTKEELQPLVDEIRVQAKYDEIKVVMESTGVYHLSIAYFLQQNGIFVSVVNALKVANFNKAENFRHTKTDSIDSTNIARYGIAYWAKLPQFDLNGDKYFLLKRLCDAYLNFSEERSRILLQLQSQLEQTMPGIFDLFGGFDINSGKDKLLDFLERYCHIEDIIAKSEAEFIASYCEWAKEKGYRSNESKAATIYAQAKNGIPSIPNNPIVRETIMWYVGLLRRADEALMASLTRMEDIAKDLPEYELVGEMGGVGRVTRVALIAQIGDVRRFKNKHSLICFAGLTPSIHESGKFRASQNHIVKKGPARLRKVLYQVMMSLVMHKIPKDDAVYRFIKKKEAEGKYKKVAKVAGMAKFLRIYYGRVMHLYRDLGLAA

SEQ ID NO: 118588 - protein, 406 aa, unidentified
MNQLFVGIDVSSRSNAVYIMLPDGSKHSSFSVPNNLGGAQTLSKRVVAALEKLQFNDVKIGLEATSVYGDNLVCFLREDGSLSKFNRQIHVLNPKNVKKFKGSHTELPKTDPVDAFVIADNLRFGRITPAVYMDDYRYQALRNLTRARFFAVQNLTREKQRFLNYLFMKCSGLAQEKAFSDNFGAAALATFQAFETPDDLADMDLNELTAFISEQGKNRSPNPEKIAAAVQAAARGSYRLPKTISDSVNQVLSISVSSMRAMQSQIKALDKEIERQILNIPNTLTSVRGIGPVFSAGIIAEIGDVNRFKGHPSLAKYAGLAWSRYQSGSFDGQHTRLIRSGNRFLKSYLCEAAFALVRCDTEFKRFYDLKFNEVNKFQHKRALALTARKLTRLVFRLLKDNRLYVP

SEQ ID NO: 118589 - protein, 340 aa, unidentified
MNATTYGLDIAKRVFQLYWVDAQTGEIANRKFGRDDLIAFLARRPAGRVALEACGSAHWWARKIRALGHEVVLLHAQFIRPFVQTNKTDAADARAIWTAVQQPGMRTVAAKTEDQQVMLSLHRMRSLLVKFRTMQINQLRGLLYEFGVTFRAGRVAGLDEIRERMAELEDTLPRSILLNLLEQLRRINLFEEDINQLEKRIGAWQKHEAACRAISEVPGIGRLTATALVATIGDAKTFRSGREFAAYLGLVPRQNGTGGKIRLGSISRRGDPYLRTLLIHGARSVLCHTKVPTAWQEAIQVRRPANVATVALANKMARIAWAILAHGTSYEAHHVSNRPA

SEQ ID NO: 118590 - protein, 465 aa, unidentified
MAKKAQKMKKGKRSELLIVNINAAGIDIASTEYQVCVPEDRDGEPNRRFEAYTCDLHSIAQWLKQCSIDTVAMEATGIYWVQLFMVLQEYGIDVVLCNAKHIKNIAEKKTDYVDASWIQLLHSYGLLRESFQPENQIRQLKDLMRHRERIIQSMSQDILRIQKALEMMNIKVHKVLSDIKGKSGLNILEAIISGERKPSVLAELVHHGVKASKEEIVKSLEGNWNDAQLFILKQSFDSYRFALGQIEELDQSIKQLLIAYAHVAGESKNNKPIERAIKRKLTQGNILHFDAEQYSYDILGVNLTRIPGISSLTAIKLISELGRDFTAKFPSVKQFCSWLNIVPNNKISAGKILSSKVPKRKNFAGQALRVAANTLCKSKGYLGDYFRRMQSKLGYNQAIIAVAHKLARIIYQMVKVKAEYDESIDRAKNVKLLDFKRKSLQKRLAKIENEIYLSNCNTSNLLLVR

SEQ ID NO: 118591 - protein, 461 aa, unidentified
MARGWKRKAKKVVEERDWTLNLDVVHPNAAGIDIGNEAHYVAVPPDRDPESVRRCACFTEDLRRMAAWLRACGIETVAMQSTGVYWLPVYEILAEEGFRVFLVNARHTKNLPGRKTDVQECQWLLQLHTFGLLNDSFRPPEEICVLRAYWRQRSEHVAAASACIQRMQKALTEMNMQLANVISDLSGVTGMAILKAILAGERDRYKLADLAHPRIQASREEIARGLEGTWRKELLFILRQELNLYETYQRQIEECDQELQVHLKTLDDKIEPGDKLPPAKANKRPGDNAPAGFDLRGELYRISGTDLTRIDGINVMIAQTIIAEVGVDMSRFPTEAQFASFLGLCPDNQITGGKVFHRGTRRVENRAATALRMAATSLWRSKTYLGAKFRRFRMRLGAPKAITAMAHMLARLVYRMLKYGEEYVDMGMSYYEEKYREHEIRSIRKRAKDLGLLVTLSPTGA

SEQ ID NO: 118592 - protein, 400 aa, unidentified
MRAVFGIDVSKVSSEVAILVNGEKVHGYTMPNDAIGFSRLLCDLKTVHKPEIFFEATGVYSRRLQAFLEDNGYAYTRLNPLEAKKQLDSLRVRKTDQIDAEKLAQSQFVLNRKPTYVQEEVYQNLRDLSRFYQNLTEDIVRAKNRLHKVLQVTFPELETIISTQTGEQYWNLVIAFPCKDFVLELSKNELSKSIRQSTSKRISDKRVAYLAEKLTALANQSYCAVKKTSPMLEEVRYYAKELLRLSEQRQTVLDQMVELAHPLPEYDILLSIPGIAETTATSIIGELGDIRRFQSANQINAFISIDLRHYESGNFLAKEHITKRGNPYARKILFKCIHNIASASHTNHCHIADFYEKRKRQSQTTSTKPHTIASIHRLIRTMYYLITHNKLYDYTLTQNL

SEQ ID NO: 118593 - protein, 421 aa, unidentified
MTVYLERGYNCKEYQWFYKQYQNIYSKEIFMIYVGIDIAKDKHDCFITNSDCEVLFKSFTISNNRDGFETLFQKIQSVSDDLTKVKVGLEATGHYSYNLLGFLLDKGLPTYVINPLHTNLYRKSLSLRKTKTDKVDARTIAMLLMSDVNLKSYSVTSYHNEELKSLTRYRFDKVQERAQLKQSISRLVTILFPELEKLVPTLHLASVYALLGELPSADQIASCHLTHLTKLLQTASKGRYSREKAIEIRDAARTSIGSRMPAKSLELKHTLKLIGELDSEIAEIESEIKKIMDEINSPILTIPGIGYRMGAMILAEVGDFSRFDSPDKLLAYAGVSPSTYQSGQLESSYSHMEKRGSRYLRFALINAAKYVCHWDESFGTYLQKKISEGKHYNVAITHATKKLVRLIYAMEKSGKPYIKAA

SEQ ID NO: 118594 - protein, 245 aa, unidentified
MCTLGIDVSKNKIDLCLLTAGPGGKKKHKVLTNEPAVAHKVIDWLNAQRCVPESVTVVLEATGIYHENLAYGLHEAGVSVCMANPCRVREFAHGMDILNKNDAVDAFVLACYGELKPPAVWVPPSPEVRKLREMLALLKDGTFKSASQVAAYLGLTPVEKTSGSSVRGRPHMSKTGPSGVRAKLYVAALTASRWNKQAKAIYERLVAKGKAKKAALGAVMRKLVHLCFGVLKTRLPWDENYVATA

SEQ ID NO: 118595 - protein, 360 aa, unidentified
MVQRTSVGLDVHARSVAAAAIDAQTGELRRRKMTPDHGEIVAWIGALPAPVMVAYEAGPTGFGLARFLNASGIECVVAAPSKLQRPAGDRVKTDAKDALHLARLLHLGEITPVTVPSVEQEAARDLARAREDVRGDLMSARHRVSKLLLRQGIVYSGGKAWTGVHDTWLRKQRFELSGLQMAYDVAYETMLATLARRDRLDAAITAMAAAGSFAPVVDRLGCLRGISTLTAFSLAVEIGDWQRLSGRSIGAYLGMVPTEYSSGQSRSQGGITKTGNGHARRLLIEAAWHHRQPYRAPGADLRRRWDRAPALAAARGHAGNRRLHQRWISFLERKKPPVIANAAIARELAGWCWSLAVLDT

SEQ ID NO: 118596 - protein, 412 aa, unidentified
MGNPLLVGIDVHRKTNTVTLMDLTGRQVAPPFAVANNRPGAAALARTLYATATEQGHDAVHVAAEATGWYWWHLFCALDQDPFLNQLPLALYPFNPRLTANFRKSYAGRDKDDWSDAMVVADRLRFGRDLPPPFTCDAPRLALRLLTRHRFHLVHQIAREKAYLLAHLYLKASEYTLLEPFQNVFGATSRALLQGYADLEEIAAIPFDDLVELIDRLGKRRFADPQHNARQMQAVARDSYPLPTALQTPVNLILQHGWQQIASLQRLVTRTETAIAETLRAFPNTLETIPGIGPVYAAGMLAEIGNLARFAYDQAKVAKYAGLVWRQTQSGDFQAEITPLSQAGNRYLRYYLCEGANSVRMRDAEYRAFYQRKYHEVRLFQHQRAIVLTARKLVRLVVRLLTTNQPYHPREV

SEQ ID NO: 118597 - protein, 404 aa, unidentified
MAKYHVGVDVSKRRHKACIRNLSQDSYSGVSSFDVNRQGFEKLLGILEKFSQNKEGFVIGIEATGNYGITLAYFLLTQGYTVVEINPYRASQFRKAQGKKAKSDRIDARSLATILSLENHKSLSLPDPVLDNLRELTRFRADMVKDRTSLVNQLHETLSTLFPELATIFSQLDSPTCLSLLIAYPGPGYISRAGEGKVAESLRVASRGRVGEILAKALMETAQESVGVFQKQPALALRVSILGERIVALTAAIERVEGEIANLFHKLPYEPEDFPVGNITSLAALISEIEDIHRFPTLKQFLSHFGWCPQSSQSGSYRVEHPRMSHAGNKYVRRLIWMLSIVAVRTVPRYRAYFQRRVVEGKSKMHILVAIGRKLLSAFYAILKKDIPYDPNWEVNRHFALARS

SEQ ID NO: 118598 - protein, 415 aa, unidentified
MKTYILRQPKPVEPQKSVRSPRPKPVAPATTVVLLGRPDATAKGPFLFIGLDVHNDSIAVSLAPSDATEVRRYGIIGGEHEDVLKVAKKLAEAHPGTTLKFCYEAGPRGFALCRCLQTHHWNCILVCPSKIPRKPGERVKTDRRDADDLARLYRAGELTGIYVPEPEDEAMRDLIRARFQVGRQQHRARQQLKMYLLRHNLRYGGQTSWSPAHLRYLAKIKMPFPVQQIVFQEMLNVITEATARLERYDQEIERAVPGWRWEPAVRALMSLRGMALLHAATLVAELGDFNRFDHPGQLMGYLGLVPSEHTTGKDRQQGGITKMGNAPARRALVEAAWQYRAPARLSPHLQKRQEGLPKAITDIAWEAQRRLHHRYTHLTRVGKKKSQVAVTAVARELTGFVWAIARQVKPVGAQS

SEQ ID NO: 118599 - protein, 346 aa, unidentified
MGYFAGLDVSLEETAICIVDDAGLIVREARAASEPEALVAFFGASGMAMERVGLEACSLTAWLHQALTEAGIVAICIEARQAKAAMGAMPNKTDRNDARGIAQIMRTGWYRAVHVKTPSCRTWRALLTARRMVVNKRRDVENGVRALLREAGLKVGTPSRKNFAQRVGELVADDPVLAALAKSLLSVIDVMTREVDRLTKRVLDEVRIEPTCRRLMTVQGVGPFTALAFRATIDRPDRFRRSRDVGAHLGLTPRRYQSGETDMQGRISRCGDELARTALYEAAHSMLIRSTKWSALRAWGMNVAKRRGMARARVAVARKLAVILHRIWADGSEFRWGKRAAASVTA

SEQ ID NO: 118600 - protein, 402 aa, unidentified
MKVSGLDVHKDSIFCAIYDGKLYSEVKEYDSTTNRIRSLGLFLQSEGVQQVAMESTSIYWIPVWDILEEMGFDLVLVNPFLIKQMPGRKSDVKDAQWIAALLHKGLLRGSMIPCSTIKELRIYTRNYVRFQQKSVQVLTEMDRIMVRANIRISSCMSGLDCKSVLCVIEALIRGETDPNQLVKLVYGNTKNKQNGFLREALTGNIKEHHRQSLQWAKQTYDLYQKQIQECLYCMEKICQEHYSKEMVLLQSMPGISKISAMCIIAETGAAMSAFENSGKITGWAGLRPRNDESAGKFKSKAITKGNKYLRSILVQVAWAASRTKGSYFKEKYNRLSLRKSNKKAIVAIARKMLVIIWNILNESKPYNPTLVHVYDPVKLSRSIAYHQKEIEKASKLLPKNLN

SEQ ID NO: 118601 - protein, 347 aa, unidentified
MDQQCHYVGLDVSLETTSICVIDDAGAIIWRGKCRSDPDTITAIVRQHAPGAARVGLETGQLSNWLTLSLRRRGVPVVCMDARHAKAALSLQINKTDANDAFGLAQVVRTGWCREVAVKSMDAHTLRMLLVARSRLVSQRQATANTIRGLLKTFGLIVAKGSKGLFPVRVREQIAGNPALIAIIEPLLAVWYAIRDQVAMLDRQMLARARNDQVARRLMTIPGVGVVIALAYTAVIDDPARFRRSVSVGAYLGLTPRRYQSGEVDTTGHISKCGDSLLRGYLYEAAAVLLYRDGRASVLKSWGLELAKRIGMRRAKVAVARKLAVIMHRIWSDQSEYRWTAIPSTTA

SEQ ID NO: 118602 - protein, 310 aa, unidentified
MDAIVGIDVSKDRLDAHIRPAGLAFSVTRDAEGLTSLVDHLTPLGVKAIGVEATGGFETMVVASLGAAGLPVVVVNPAQVRAFATALGKRAKTDPIDAAVIAHFVEAIKPEIRPLPDAQTQLFADLIARRRQILTMLVAERQRETRAPERLRKSIKRLIKALEKELDTLDRDIDRVVQSSPIWSKNEGLMSSVPGIGPNIARTLMAELPELGSLDRRKIAALVGLAPWTRQSGQWRGKSFIGGGRAPARAALFMGPMVAVQHNPVLKAFRETLLAAGKPKMVTIIAVARKLLTILNAIIRDQKPWDPKSA

SEQ ID NO: 118603 - protein, 412 aa, unidentified
MSVLQTALEPSTLVLAVDPGRVSNRVWLSDGSGLLVEPLSMPVSRAGLSGVERLVASHRGSHPAVVVAVEATGSLHRAWSSALERSFPGAVRLFAPSETKAARTQLGSGRFKTDDRDCAALTYLARQGWGRRWVDEVDVDALRAVVRHRRGLVHDRKIVQQRLHDQLNALAPGLSAPAGHGRSLALDQPSGQTVLACAAAFAGRPATARSLRARATGRFRDADAEFWAGRWRDCLPPPPDAERRAERLGRDLARYQMLRADIAALEADLEPMLAATDGYVLTTLPGVAVVRAAGFAAHSLPISRFPDAEHLYSATGLAPALYQSATLHRRGRISRQGLAEHRDALMGIAWGLSRYSPSFTQRDREYRARGMAPIQARVALARHACRLAYRLLTTQEPFDEQRYRQGRHSRGR

SEQ ID NO: 118604 - protein, 347 aa, unidentified
MMNNIHIAVDLAKNVFQIAECNASGKIISRKRLNRTQFQRYLAEPRENAIIIMEACGTAHHWGRIAQAAGHRVALLHAHYVKPYRRRNKTDRNDSEAILNAFRAEGLTPIPVKTIAQQQIQQLHRLREMWKSNRNQRINLLRGILREHGFDNAAKTDDFLRQCNEAMDSAELKALAPQMHIVLAEIQHLSEWMATCEQQLHQLLHQDEIIDRIDAVSGVGLLTASAFVAAIGAPERFKSGRMVSAWLGMTPKEFSSGNRRKLGAISLAGNVYVRTLLIHGARSALLAAKRCAARTPEKLTRLQQWAIQVCDRIGFNKATVALANKLARISWAVWKHARQFDGNYVPA

SEQ ID NO: 118605 - protein, 355 aa, unidentified
MKYYTSTTEFNCGIDLHARQMYVCVMDRQGKKLVHTYIKNNDFDYFLKLVAPYKHDLTVCCECMFGWYWLADACQAAGLKFVLAHALYVHLIHGGKNKNDRIDSEKLTHLLRSNLIPQAFVYPADLRPVRALLRQRIFFVWQRSELLARIHSHQLAHNRTPPKQTRRVRDTWEEQVLAAEEHPLRRFALQNELAMIRHFDQQIPQLESELLRQTKQLAGQQFALLQTVPGIGEILALTLLYEIGTLERFPTVKDFLSYCRLVKGTVASAGKIKGLRGAKLGNPYLRWAFGEAAVIAKRDHFRIGPLAQRLEAKMNGNKFKANTVVAIKLARAVYFMLKNKTVFDPDRLVAALAKN

SEQ ID NO: 118606 - protein, 478 aa, unidentified
MEQEEAGQPPRRLVGIDLGIASRHSVRVLAADGQVVCRSSCVPAVESLAAVERAALAGAPEGTTLAVVFEPTGPAWMPIAVFFARRGHAVYRVSSAKAADLRRFLRRHAKSNGIDAETLARMPLADPGGLQQLELPGPGAAALDRRVRACGRLTEAASKHKVRIKDLVRQLMPMTPLTGDLGKADLAVLERYADPRLLLAAGDGELTRLITTASGHQQGPQRAGQWRAAAAAAVELYGDHPAVPYDGLAAEVVTEIRLLRAIQAELATHAAAREQHYLQVDPGQLARSLPGFAEISAPVLAAAMGRPGRFRDGTRFKSYVGLAPRASETGETDRKGQPMSKAGPSQLRSAFVRAADTARRQDPQLARIYYLQMTERGATHLKACCVVAGHLAERAWAVLSRGTPYVICDNNGNPVTPAEATKIIADKWTVPEDIRKRRRSRKTAGKAPQTASTRPDKRGDPPRPRSSRSRDKAVNPVT

SEQ ID NO: 118607 - protein, 389 aa, unidentified
MILVGIDVAKDKHDCFIQTADAKVLYKAFSFANNYAGFEELYAKILSCNDSEIKVGLESTGHYSYNLLGFLLSKELATFVFNPLQTNQFRKSLSLRKTKTDKVDARTIALMLATESSDNAYSLQTYQNEELKSLTRYRTDKAGQRSKLKQSLSRLVTILFPELESVVSTLHSNSIYAMLLKYPSAKDVAKSQFHSLVNLLESTSRGKIGSDKAKEIRNLARKSVGVYVSAKVLELRHTIKLIQILDDEIVEIEENIKSYMQEIHSPIESIPGISFRLAAVIEAEVSDFKRFSSPDKILAFAGLSPSTYQSGKFISQNATMEKRGSRYLRYALFLAARLVSRYSKTFASYLQKKRDEGKHYFVALSHVAKKLVRVIFHLQRTGESFLDFA

SEQ ID NO: 118608 - protein, 407 aa, unidentified
MDVIIERACGMDVHKDNITACIITPEGKEIKTFSTKTIYLIELVDWVKEHRCTHVAMESTSVYWKPIVNILEAEDIEFLVVNAQHIKSVPGRKTDVKDAEWIAKLLRHGLLNASYIPDREQRELRELVRYRRSIIEERARQHNRIQKVLEGANIKLGSVVSDIMGVSARDMLNAIANGEENPEILANFARRTMKKKKDELKLALKGYISEHQRLMLRTILKHIDFLTEQVEMLDQEVASRVSDYQDDIDRLDSIPGIATRMAEQMLAELGTDIKNQFPSASLMCSWAGLVPGNNESAGKRKKSKTKNGNKYLKSALIEAAHSVRGSKNYLGELYRRTAARKGKKRAGIVVAHSILRTAYYLLTREEMYVDLGVDYFDKQKKQSILRHSLRRLESLGYTVTLIEQEAS

SEQ ID NO: 118609 - protein, 348 aa, unidentified
MAHFVGLDVSVKETSVCVVDDAGKVILERKVPTEPADIIAVLASLGVSFCRIGIEAGPLSQWLVNALTTADLPVICVETRHMKALLMAQQINKTDRNDARGIAQMMRVGLFKPVHVKTLVAQEQRMLLTSRKLLQRKLLDLESDLRGTLRNFGLKVGVVSGGRYEARVRELVEGFPRLAAIVEPLLNVRRVMRQQLAVLHKMLLDTVRGDPVCRLLMTAPGVGAVVALTYRATVDQPQRFVHSRAVGAHVGLTPKRYQSGEVDYDGGVSKCGDALLRTMLYEAAQVLLTHGSKWSWLKAWGIRVAQRRGMRRAIVAVARRLAVVLHRMWVDGSEFRWSKDSAAVPAVA

SEQ ID NO: 118610 - protein, 422 aa, unidentified
MEVIHPRCGGLDVHKQTVVACVRLALGDKVTREVRTFETTTTGLLLLLAWLTEMGCTHVAMEATGVYWKPVWNILSDGDFELVLANAAHIKNVPGRKSDVSDAVWITDLLAHGLIRSSFVPDQEIQELRELMRTRKQLTRQQTSHVQRLQKTLECANIKLDSVITDIVGKSGRAMIQALIAGETDPVKLAALADRRIKASPQELREALRGRVTDHHRFLLRLHLQHIEFADAAILDIDRNVAALIARMDQEVEAGRAFHTLIALLITIPGIDVLAARAILAEIGPDMSRFPTAGHLLSWGGLCPRNDESAGKRRSTRLRKGDRWLKTLLVQCAWAARRKKDSYFRAQFYRITARRGPKKAACAVAASLLTTIYHMLKDGTPFQDLGADHFDRRSKEARAERLVTQLAKLGFDAKLTPLAQAA

SEQ ID NO: 118611 - protein, 340 aa, unidentified
MSIVMGLDQHRAQISAEWIDTITGEVIRARVVPADRAGVRKFLAQFRGDGLEVALEATTGWRFVVEELERIGAEVHLAEPAEAAALKGKKKRAKTDWADARHLRELLLIGRLPESWIPPAHILDLRARVRTRHLLSHQRTEWQQRMHAVLYHHGFPQRHNLLSLENRGWIAGLRLPAAAREQLDIALQIIDALDLQLVPFDQALHAIARKQPGCRALIQRIYGVGDLTAVTILAELGDVRRFDNSRDVVRYGGLDITVYQSDDHRAPGHLSRQGPPALRWALYEAAQRARFPASPDRPYYEQLAARIGGKRACLALARKLLKRTYHILKELGDQALAPVS

SEQ ID NO: 118612 - protein, 430 aa, unidentified
MEQPTRFIGMDVHKDTIVVAVTAAGDVGKATPYGTFPNTAAALEKLVKRLRQAGSGPTKFCYEAGPCGYGVHRTLTKLGEDCMVVAPSMIPRKSGERQKNDERDAGSLAVLHRGGLLTAVWVPDAAHEAMRDLIRIRLAAVRGVRTARQQLSAFLLRHERIYPNGKAWTRAHRGWLADQSFAKPAQQIVLEESIEAVRLGEQRRDRIDGYLRAQIPTWSLFPLVQNLSALRGLDTIASAGLAAAIGDPSRFASAPDFMAYLGLVPSEHTSGPKRRIGAITKAGDIHARTLLIEAAHSYRFPARIARHKLAAVDAAPEAVREIAWKAQTRLCQRYRHMMARGKLRHVVVTAIARELAGFVWSIACITSDPPAKTSAITTASDEVSPTKSTGQSQAPRRQPLKTTTRHAARPGQTRAPIGLRYVTHAEGSTA

SEQ ID NO: 118613 - protein, 408 aa, unidentified
MKTLHKRCAGVDVHKTEVVVCLRLVTHGKVEREVRRFPTTTHGLLELAEWLESARCTHVAMEATGVYWKPVWHILDGRFALILANAAHVKTVPGRKSDVNDASWLADLLAHGLIRPSFVPPAAIQELRDLTRTRKQLTRQIAQHSQRIQAVLEEANVKLCSVITDILGASGRRMLKAMIAGEIHAHKLAALGSERLGCAPETLIDALTGHMREHHRFLLAQHLHTIEQLEKTIAAFDTRIEEKLMPFRDTVERLKEVPGLGSTATEVILAEIGPDMSLFPSAGHLLSWAGFVPRLDESAGKSRSTRIRKGAPWLKPVLVQAAWGATRKKNSYFQAQFLRLKARHGAKKAAIAVAASILTTVYHMLRDGTCYQDLGPEYFTRRNPAKAAARLANRIRNLGYHVEIRPAA

SEQ ID NO: 118614 - protein, 418 aa, unidentified
MSGNKCGWDNYKFILEVQMISVGIDVSKEKSTICILKPYGEIVSRPFEVCHTEKELSELTSMLLRLNDDVRVVMEATGIYHLPVLCYLKEKGLFVAVVNPFEMKEYRCQGLRRVKTDKQDAVTISNYGIDHWYRLREYEAEESIYAELKLLGRQYRHYMRMRVESVLELTHLLDYTMPGIKTLLKGWNETNGKDKLGDFAEEYWHYDNITKKSEEQFIESYLKWAKEKGYHQSQDKAVKIYALAKEGIPTVSSDTPSTKMLVQEAVRVLREVDNTLMTILTQMQALAKSLPEYPVVRAMGGVGNVLAPKLIAEIGDVRRFHSGKALIAHAGIDAPPYQSGQFIGTERKISKRGSSSLRKIGYEVMRCLKTHKEPEDAAVYKFILKKEKEGKSKRAAKIAGLNKFLRIYYARVMEVYQK

SEQ ID NO: 118615 - protein, 434 aa, unidentified
MTAIDLFAAHVGLDWADKKHDVCVQFKNGERTFHVINHTPEALDTWLNELHQKVKGRIAIALELKKGPVVYALQKYPFITVFPIHALSLARYRQTFWPSGAKDDPQDAELALDLMLRYPQKIKAIEPDNADIRLLLQLVEQPRLLVEDKRRFVNRLINTLKQYYPQPLEWFSHRDSLLFCELIIRWPSLQQLKRARSDTVRHFMNARGGPAVAYTEQRVTSIANAIPLTTDKSVIEANALMATALASQIKLVGELIRTYDERIESLFDTLPDAELFKSLPGMGPCMGPRMLAALGDNRDRFNSAEEIQNYAGIAPVTERSGQKSWVHWRWQCAKFVRQTFVEWAAKTVNSSYWAKLYYQGMREKGKSHQSAIRALAFKWIRIIYRCWKTRTRYDEAKYLLALEARKSPLLMPSKACRMSQGVKRTLPSLFKVVI

SEQ ID NO: 118616 - protein, 351 aa, unidentified
MNTIKQVVGVDVSQNELVCCFGRLFTNLNIELGFTQIIKNSPVGFQAFMAWVKSVQSEHLPTLVVMEATGVYHQKFAHWLSSKNQTVAIVLPNKISNYFRTLATKTITDTTSAQTIARFGLERKLDIWTPPNPLFKALQNLTRERDQIVQERTVIKNQLHAQQACADVHVSTIKRLKARMALLNAQQLQIQNELDELIQSEPTLSRDVELMTCIPGVGRLTAAIILGETNGFELVRNKRQLVSYAGLDVKQKQSGTSVADKPRISKKGNRHLRKALHLPALVAIRHYPLYKDHFDRNVVKHGIKMKAVVAIQRKILELAYVLWKSQSMFDPQYEMKKGRLYEKTIPSESSL

SEQ ID NO: 118617 - protein, 406 aa, unidentified
MNAVGIDVSKGKSTVAILRPGGEVVASPFEVSHNPRKLNELVSLIKSLNGDSKILMEYTGNYYLPVALFLQKSGLFVSVVNPILVKDYNNKSLSVRKGKTDKKDSLKLAAFALDRWHDLLLFSPQSDSRTLLKAFNRQYNQYNKLKVMLKNNLISVLDQTFPGANTLFSTPARKADGHEKWIDFVLKFPHYECVSKKSFSAFSKSYLSWCRKFGYLFSEAKAKEIYAFACNCTPSLADSEATHTLVSAAILQLNTLNETLASLQKEMDLLACSLPEYDTVLSLYGVGSVLGAQLIAEIGDVSRFSNKKALVGFAGIDAPPFQSGNFNPQSRNISKRGSAALRKTLFQVMAVILQNAHANEPVFLFMDKKRSEGKPFYVYMMAGANKFLRIYYARVMVRLNSLRETT

SEQ ID NO: 118618 - protein, 398 aa, unidentified
MLSIGIDVSKGKSTVCGMKPGGEIVYAPFEVQHTREGMSELVSLLRSSGEEVRAVLESTGSYHCPVVAALLENGIFVSVVNSLRMKRFCSQSIRKVKTDRIDAMQIALYGLAYWQELQPTRLPEDTYRELQLLARQYYQMTSMLIKAKVDFNALCDQVLPGMQELMNDHAGRHKLSDFVLRYRHTTHILEMGETRFRKDYCKWAEKKGYRNRERMAALIFATAQNGIPVLPNAPSTQIVITEAIRVLHTVEASRDAILTQMQALAKTLPEYSLVREMPCIGDTLAPRLIAEIGDVRRFHSKRALIAYAGIDAPPYQSGKFCANNRHISKRGNRYLRKTGYEVMQSYVMHKPANDPIFTFIEKKRSEGKSGKLAMVAGLNKFLRVYYGKVTELYRSLPQ

SEQ ID NO: 118619 - protein, 346 aa, unidentified
MRYGSVDIASVSSFVWITDESGKKLVGQAVATERQALQRIFRPHLKHGLKIAIEAGNQTLWIHDCLAQLGAEVVVVNPNKVKLIAESRHKTDKADAKILCELLRINALPTPVHVPSDEARSLRSLLNARRQLIRTRTQLCNTVRALLRQEGVRLPARGLNTQKAWQALLVPAYEHPHVAVIVKAYAPAFASLTASLRELNQELKQRAGTDPRVELLKTMPMVGLIAALTLIAAVDDESRFSSSRKLVSYAGLAPSVRQSGERANYGPISREGRHELRAVWVQIAHLIANDQRGPAKPLRSWFLKVARRRGKKTALVALARRLLTVALQMLRSGEVYDATRLVRKAA

SEQ ID NO: 118620 - protein, 321 aa, unidentified
MDKNSKIAGIDISKSSFDVYSETEGHQKFENTTSGFKKLVKAYGKDTHYVMESTGCYHVLLALYLSGEGILVSIENPLKIKRFIQMQLLKVKTDKADARMICKYGISQDLKIWKSPDSFQRQSESLFSLLQFYEKQRTSIKNKLHREKTLGKPSSSVLKSLKDILLTFDREVLRLEVELEELVKKLYREELALLRSIPGIGIKTSILLVMLTDGMRSFERSGQLCSYAGLTPVIRESGRSVRSRPRISKMGNGLLRKHLFMCAFNAIKYNSVCKSLYERIKGKGKSGKVAIIAVCNKLLKQSFGILKSGKPYCENFSLISA

SEQ ID NO: 118621 - protein, 346 aa, unidentified
MEVVIGVDPHKGTNAAAVLNDREELLEYAVFATNRAGLRSLTRWAKRFSERRWAVEGASGLGRPVAQHLVAAGETVVDVPAKLSSRIRLLSVGNERKNDQVDAICVAVAALRGKWLTEVGEEEGQATVLRMLSERRKDLIKERTRTLNRLHGLLRDLVPGGAPKNLSAHKAALLLRGVRPRVDPALTRRRLAADLIGDVRRLDRRLSDLERHIREAVEQASTSLTGLFGVGPILAARIIGEVGTIARFPTKAHFASYTGTAPIEASSAEVVRHRLSRAGNRQLNHALHLIAICQVRHDTEGRTYYRRKLAEGKSEKEALRCLKRRISDAVFKKLYADLESEISTAA

SEQ ID NO: 118622 - protein, 402 aa, unidentified
MPINMQYNRAFGLDLSKKTFHGCILDGPDLSERHFFTGRMDEEGKARLAGRLCPGDIVLMEAGTASFMLARQLITNTESEVVVLNPAKLFNIFNSTVKTDKSDSEKIARIARNMPRDEWPTVLIPTMEEQAERSAVSHEVFIAQSITRELNRLHALFNSMGFPFIKKSTLKNKESREDMISSCLSGSPLAVEQAMMISSQVDLLMEHMKSSKKNLVRICLNHPMQALSLLSVPGMGVITVAAQIAFLNDGSRFSSPDSYVNYIGLSERRFDSGISVSKGHISHMGNKVIRRNIIQASWIACLKSGDNPLSCKYEYFRSHGKPKVVAAVAVAKKMIQLSYILVKSKGIYEFTKQQGLEAFRNKLKAHRLLALLDYLPASIRFEMEEYDKNKKEVAATTPRKIS

SEQ ID NO: 118623 - protein, 345 aa, unidentified
MEHIAIDLGGRESQVCVRSPDGEIVLERRVATLSLKRLLATRKPSRVIVETCTEAFPIAEIARTAGHDVRVVPATLVRTLGVGARGIKTDRRDARALSEVSCRVDLPSVHLPSARARELKDIANAREVLVGARTALINSVRGYLRRRLLGMRVGGTATFPDRVRTLVLSTAEGIPGSLESLLTVIESATEQIKLQTKELERLAETDDVCRRLMTVPGVGPLTAIRFVAVVDEPGRFASAHQIESYLGLTPGERSSSDRTHRTGITKAGSRRLRSTLIQAAWSARRTHGIHPMLMWTKEVEHRRGAFVATVALARKLAGILFAIWRDGTTYTPQRGAAAEVRPTRT

SEQ ID NO: 118624 - protein, 338 aa, unidentified
MVSIFAKSVFQVHGVDGAGAVVMRKRVSRAKMLEFFGGLPRCLIGIEACPAAHHWARELQAMGHTVRLMPPSYVKAYLKRSKNDANDAAAICEAVTRPSMRFVAVKTKEQQAALMLHRARQLLVRQRTMLSNAIRGHLSELGIVSAKGRNGTGELLEIIANDADSRIPLAARDILKVLAAQYSTIGAEIASIDKSILAWHRSCEPSRRLEEIPGIGPIVATALVAEIGDWKAFRSGRGLAAWIGLVPKQHTTGGKDKLGSITKQGNRYLRWLLVAGAMAVIRYAQKHGTRKRPWLGQLMARRPTKLAAVALANKIARIAWAIMARGERYREPELLLAA

SEQ ID NO: 118625 - protein, 471 aa, unidentified
MKKNQKTRTDEVIRLLSKQKIRDVKELESYKLSVCHPCSAGIDLGSRDIYVALNPEIAAEHDLPIVHKFSTFTSGLYACRDLLLACGITTVSMESTSVYWINIYDILEEAGMEVCLVNPKKFRMVPGRKTDILDCQWLQTLHLYGLLQGSFHPEEHIRKLRNYMRQREKIIQDRSRYVQRMQKALTQMNLLLVNVIDDITGKTGLAIINAILNGERDPYKLASFRDGRVKKSEQEIAEALTGDYKDDQLFLLELNYGTYRFFEKQLDRIDMQITSLLQHFPLKETEPDAEKPKPSKARKGKNDIRTKLNLNEVLIGITGTDLTNITGLQSNTILQIISEVGTDMSKFPSAKHFASYLGFAPRNKITGGIIISSKTDRLKNHAAQAFKKVVPSISRGKTDLACFYHRIAAKSGTGKAIVAVCRKLAVIFYNTLKHGLLYVEQGEDEYKRKREERERLLVIKLARKHNMILQV

SEQ ID NO: 118626 - protein, 403 aa, unidentified
MKYYVGIDIGKSHHQAILCDMEAKPLAESLKFSATSEGFEQFFSYLRKHVSDGDLSLVQAGFEATGPYWLTLYEQLIKQKVKVSVLNPMQVKAYRNEGIRGTKTDRIDALLIVKVLRFGDYKESSIPTEDLFALRQLTRLRSDLVQTGTRTKLKIIGILDQVFPEYQKLFSDIFGTSSQALLAKAVIPEAIEAIPTKQLTALLKKASRGRLGEKQAKAIKNKAQTSIGITMGIDAFSLSLEILLAQVRHLEQQVTKLDKEIAKRTTKREETLTSIPGIGATQEAIILAEIGNFERFKNDKNGAEKLVAIAGLDPKIKESGKYIGKAKMSKRGSSYLRKAIRQAAFMAAVGNGKSKDPMFSKIYEKKISEGKPFEIALSHVGNKMLHVIYSLMKSKKEYKPNIT

SEQ ID NO: 118627 - protein, 308 aa, unidentified
MDHFAGLDVSVKETSVCVVDATGKIVREVRVASEPETLLAVLASPAYHFKRIGLEAGPLSQWLFSALAEENLPVICVETRHMRAVLKAQVNKTDRNDARGIAQMMRVGLYRPVHVKTLRSQKLRMLLTHRKLLQSKAIAVDNDLRGTLRNFGLKVGMVGAARFEARIKELIENFPDLAVLVEPLLVVRRVLREQLGILHGRLLAVVRDDDVCRRLMTVPGVGPVVALTYRATIDVPARFRKSKSVGAVFGLTSAKYQSGEIDRSGAISRCGDELMRTMLTKRPRACCSVRQDGPGSRPGRCRSPGTAA

SEQ ID NO: 118628 - protein, 361 aa, unidentified
MSQNSHARATAAAAMPKVTIGLDLGDRTSRTAEVTADGQCVREATVRTTVAGLTQYFGGRERCRVVLEVGTHSPWISRLLTDLGHEVIVANPSAMFAGRPRRRRNDRLDAEFLARQGRADVQLLYPITHRTGVAQQHLELLRARDQLVTGRTAFINHVRGAVKSWGARLSACSADAFAARGATDLPAALRSVLTPLLEVIADLTRRIKHADREVAQLAATEYPITLRLQQISGVGPLTSLAFVLLLEDPRRFAVSRDVGAYFGLVPRLDDSGDAMPQLRISKAGDAFGRRLLVSAAHYILGPFGPDCDLRRHGRAIAGRGGKTAKKRAAVAVARKLAVLLHHLWVSEVPYDPDHLAKQRAA

SEQ ID NO: 118629 - protein, 291 aa, unidentified
MPFYVGLDVSQKTTAICVVDQHGARRWRGTCATDPSAIAAAVGRHGGGDVKIGVETGSMTPWLIHGLRSAGLAVECLDARRVKAALQMQLNKTDQNDAEGLAQVVRTGWYRSVHVKSMDAHRARALLGARAQLVGMRTRLSNMIRGVLKTFGLLPGAGRGQRFDRQVENLIEHEPQLAAIVRPLLDTWRQLAKQISVFDKAVLQQVRADPTCRLLMTVPGIGALSSLAYVSTIEDPQRFSSSRDVGAHLGLTPRRYQSGEIDRSGRISKCGDGLARTLLSSFCTGSNEPRS

SEQ ID NO: 118630 - protein, 346 aa, unidentified
MCSLPVFVGLDYHDSSVRVCVLDSDGSELANADRTNDWQAIAQFAERFGRPVRAAIESCCGAADLAEELVSCAGWSVALAHPGYVQRMKQNPDKTDCQDAQLLADLERVGYLPRVWLAPRYIRELRHVVRYRLQLTEQRRATKLRLRALLREQRCHAPEGLNAWTKAWQQWVRHTTELSAQGRWLVKQHLRELARLATKIRQVEKRLEHMTANDVEVQRLQQQPGIGPVTAWTIRAEIGHFDRFRTGKQLARFCGLSPRNASSGQRQADAGLIRAANPALRTVLIEAAHRLVQYDPSWQKFAQRLRARGKPGSVVAAAVGNRWMRRLYHEMKTSSGELAIAVGPAR

SEQ ID NO: 118631 - protein, 346 aa, unidentified
MRYFAGLDVSLEETAICVVDETGRILKEVRAASEPDRLVTALQRTGLPLERIGLEACSLSAWLNEGLRQAGLPAICIEARRANAAMKTMPNKTDRNDARALAQIMRTGWYREVHVKSRQCRFWRSLLVARRTVLNEMRAIENVVRAILREAGIKLGTPSRTNFADRVRELAGADVLLMPLVEPLLAILATMLRELARLTKQVLDTVRTEKVCRRLMGVPGVGPITALTFRATIDRPDRFRRSRQVGAHLGLTPARYQSGDTDVQGKISRCGDELARTALYEAAHTLLVRSRKWSSLRAWGVKIAKQRGMARARVAVARKLAVVLHRMWSDETEFRFGKEPSTPAAA

SEQ ID NO: 118632 - protein, 325 aa, unidentified
MKYIGIDISKASFVAAFPTATGYQTSSFCNDVKGIRKFIGKLDVAENHCVMEATGNYGMLLMYLLDKASVKFSLINPKKIKNYARMMMSVTKTDAKDACLIADFGERFKPQPYRLPSEQIMLLKQKKTVLRQLQKQLTATKNLMSSLEPLPLKDKKCLHSLKQTVTFLEKQIKYMRLEMEAVASEVFDRQIKLLTTIKGIGITLATALVISTGGFTYFNNAKQLTRYIGICPTIEQSGSSINKRGHINRNGDENLRSILYVAAWSACSCNKACKEQYQRMRNNGKPGKLALIAVANKLVRQAFAVVKSNEPYIDGFVSKHPDTAS

SEQ ID NO: 118633 - protein, 312 aa, unidentified
MDALVVGIDVSKAQLDVHVRPSGESFVVARTGAGLEELVARLRPLAPALIAVEATGGFECIVTAALIGAGLPVVVVNPAQVRAFANALGKRAKTDPIDAAVIAHFAEATKPEVRPLPDEATQLLADLVARRRQIVEMMGAEGQRERRAVHKPLKKSIARLRKALEKELADIDREIDDTVRGSPAWREKEDLLVSVPGVGPTIARTLIAELPELGSLDRRAIAALAGLAPWTRQSGQWKGRSLIGGGRSSVRAVLFVGAMVAARFNPTLKACRDRLVARGKPKKVALIAIARKLLTILNAIVRDKRPWQPQNA

SEQ ID NO: 118634 - protein, 376 aa, unidentified
MTATTRPEFRSVSEPTLYVALELSAKQWKVAMTAGVASEPWVRTIPAGDLRAFERVVADGRRRWQRAASAPVMSCYEAGREGFWIHRALGTCGVTNRVVDSASIEVNRRARRAKTDRLDAVKLVRMLVRACGGEREVWREVRVPTIAEEAARSISRERTALVKDRTRLLNQMRSWVTVWGARLPARRTDAWWTTLRDWAGAALPAPVQARLQRAAARWAVLQTQIAALEAQQATAGPRAAGAPALERLVRLKGVATTSASTLIDEGLVWRGFQNRRQIGGLLGFTPTPYASGDTRQEQGISRAGNARLQAVAIQLAWNWLRWQPDSPLTHWYRKRFASTKRLRRIGIVAVARRLLIALWRYALTGVVPAQAIVKSV

SEQ ID NO: 118635 - protein, 326 aa, unidentified
MDPVSIGIDVSKATLVIAVAPTGETWSSETSPRALEAVVQRLIALTPSVVVVEATGGYERAIVAAAAAAGLPITVVNPRQVRAYAQAVGRAAKTDPIDAAVLADFGARIQPAVRPLADAETQALAALVTRRRQLLEMLGMERNRLALAPPTGAVTRDLRTHIRWLERRLADVDDDLGTAIQASPLWRVHEDLLRSVPGIGPVTARTLLAELPELGRLDRRAIAALVGVAPFNCDSGQHRGQRHIWGGRAPVRATLYMAALVAVRRNPVLAAFYRRLLALGKPKKVALVAAMRKLLTIVNALLKHHTPWQVASTPGSPADRARAATV

SEQ ID NO: 118636 - protein, 350 aa, unidentified
MVVCGIDPHKSTLTAVTADEVGRKLTQRTLPTRQDSWFGLLVWARGQADEVLWAIEDGRGLAGSLIRYLLAAGQRVVLVPPKLMARTRSSARTRGKSDPIDALAVARAALREDGLPVAHLDQDALDIRLLVDHHDTLVARRTATINQLRWHLHDLDPALEAGVPNLISHRRQNALAGHLHALPASTRRDLGLELLADITALTSRIRDLEQRIGALVRPMAPTLLSLTGIGVLTAAKIIGETGGITRFRTSAVFAAHNGTAPIPIWTGNKPQFRLSRSGNRQLNAALHRMAITQLRRHPAARDYLDRYLQRRPHATRKAALRALKRHLSDIVYKALTADMTSTNNELPAAA

SEQ ID NO: 118637 - protein, 487 aa, unidentified
MAKRNRSTFERLQRGEKLSRGERKQIERQLQAEQPAWEIVHRNVAGIDVGNESHFVAVDTRQADPPVREFGSWTAGLHQMVEWLKTCQVQRVVLQTTGVYWIPVQDVLEKAGFEVAVVDARGTKNLPGRKSDVQECQWIRKLDIYGLLRGCFQLPDSVRSVRTIWRLRQRWVEEAGRSIQQLQKALTLMNIQLANAITDLSGQTGMAILRAIVGGERNPWTLAKLRDRRTQASEEEIAHSLQGNWREDVLFELEQVLAAYDFQIQQIEKCEQQLEKYMKAQPTRPAVGPVRAQAAPEVEEARKKTKKKARGGKGPRKNRVGFDLETELARVMGGDLTVIDGIKLMTVQTIYSELGPDLSAFPSENHFASWLMLAPKRDISGGKVIRHVWVKGRNRVANALRIAAESLNASQSYLGARYRSLRGRLGAPKAIKAMARYLACLVYRMLMKGQDWVDRGAAYYEQRRQQRELLHLQRKAIALGLKLVPAK

SEQ ID NO: 118638 - protein, 313 aa, unidentified
MKTPSYVGLDISKSFIDLHQLPQGRNARFEYEQEGLSKLVTFLKKHKPALIVLEATGGYEAQVAAELSAAGLVVAVVNPRQVRDFARALGKLAKTDAIDAAVLARFAQDVRPEARKLPEPEEQNLKATVSRRRQLVEMLVAEKNRLSRATLQSVIDSHESTINFIQSKIDDLDRQMQSTIQNSPLWSAKDELLKSVPGIGDKTACALLAQLPELGKLNRRQIASLVGVAPMNRDSGLMRGKRSITGGRKSVRNALYMATTAARRFNPTIKAFYLRLRDAGKSYKVALVACMRKLLIILNAMLKHQNTFNQGVA

SEQ ID NO: 118639 - protein, 451 aa, unidentified
MLIQGSSGPPRPVRVGIDAAIVAQHEVCIRATDADGRVRTDRFRVQPTLAGLRSLSNRLAEMPGVVAVAEPTSMTWLALSVALADAGCGLSLLGARHAARLRGAITGKHKSDVIDADVLARAGEVFDLHPLRPVEPAQLALRRACVRRGGSVIDGNRHLRRLISLARWAFPDVWNGFRGSLPTAVAVLNRWPHLAQLAAARRSTLTAVVALHTRGVADVPDRVEAIRSAAAAWAAFWAGHLDLDALAFDVTEHLTDMADAKARTERATGQAQRYWRQLYGDDELLLSVPGMGPVTASVIRGFLADGTMFASGKAAASYVGLNPSTWSSGTVSQPSRAITKEGPAVLRLAFFQAANAARRQDPQLAGFYHQLMTEHGHCHTQACVAVARKLVERTWTVLSRGTPYQIRDLDGQPISRLEAKKMIKQVCTVPDQVRAKARAHSAATNRAKLTR

SEQ ID NO: 118640 - protein, 373 aa, unidentified
MKKIQYVGLDVHKETISAAVANHGEEEVRFIGTISNNSVALEALLRKITSSGGIARFAYEAGPGGYTLYRYLREKGYECMVAAPSLIPRRSGERVKTDKRDALMLARLYRAGELTGIYVPEKDDEAIRDLFRLRCVAKRAEKQARRNLLSFLLRNGLMYSGTRHWTKTHWRWLHEVSLPHPIQQLTLQEHIDAILQCRSRVMRIDGMLQQSVKNWRHEALVRRLQTLRGISFLTAVGLVSELGDLRRFSSARRLMAYAGLVPSESSSGQKVRRAGITKTGNSNVRWLLIESAWSYRLKARKSAYLLRRQPDASEEAKELSWKAQVRLCGRYQRLYMRGKPKGKVITSVARELAGFIWALGRLDDEQRQKGISQ

SEQ ID NO: 118641 - protein, 362 aa, unidentified
MDVHKASFTISCFSVTTQETFATVKISPDAKAIKKYLDGVSLSRSEECEFVCGYEAGCLGYTLYHQLTAMNIRCVIMAPTTILRNSKRVKTDRIDAENLARCLAYGGYKSVYIPTAQDEAVRDYLRMRDDHKLMLKKIKQQINAFCLKHNKIYPGNKSKWTQAHVKWLNALEFDGYLQDAFNEYMITYRELADKVERLESQIEQLAELEEYRDKVKKLICIKGIKTHTALSFIVETGDFSRFQSAERYASYIGLVPGEHSSSEDQNRLGITKAGNRHMRMLLIEAAQCYSRGVPAKKSKDLKSRQKGASPEVIAYADKASIRLRRKYIRMELVNKKKANVAKTAVARELACFIWGMMTDNIA

SEQ ID NO: 118642 - protein, 373 aa, unidentified
MVEHTTTYVAFDNSKETLAVAIADGDARGEVRFWGTIANRAEAVRKLVARLAAKHPALSFCYEAGPCGYGLYRQILSLGHPCTVVAPSLVPTKPGGHIKTDRRDAITLASLFRAGELQAVWVPDADHEAMRELIRARLTAMQEVRRSRQLLLSFLLRHDRATPTRHHCARAHRSWLARQSFAHPAEQIVFEELIQRIEVACARQDRHEDAIRSLLSAWSMAPVVTAIQALRGVALMSAVTLAAEVGDFGRFATPRQLMAWLGLVPKEHSSGSKVARGNITKAGNTRARRVLVEGAWTYRLPARMGEDITRRNDGLPEAIRAAAWKAQVRLCTRYRRMQNTGKPQKIIVVAIARELAAFVWAVSRMVQPAATQA

SEQ ID NO: 118643 - protein, 370 aa, unidentified
MLDTTTFIGLDVHARSIKAVSLDVMTGEVRAATFGYDAGAVAGWVRSVDPRARCVYESGATGFDLQKRLSGLGVDCVVGAVSKMIKPSADRRRKNDRNDAEFLARMLSVGNVVEVWVPDDECEAARDLTRALEDARDDLSRAKQRLSKFLLRHGLAFDERTPTGRRKGNWTRAHWSWIESIRFAEGADNDVLAYYVDAVRRAAEEKARLEGLVEAEARKPRWRRRVDSLRCLKGVDTATAADLVFEAGEFSRFRNARSFAAWVGLTPSEHSSGESDRRGAITKAGNKHLRKTLVEAAWHYLTCSGRPKDLAKGQAPDRGARRHAAKGVRRLVERREALLARGVHGNKANVATARELACWVWAVGLMAEEA

SEQ ID NO: 118644 - protein, 336 aa, unidentified
MKEKKSIQGIGIDVSKQQLDISLVLGKKNIIEHFVVENSIKGINKLMKRISDFAEKIVMESTGRYHFLVAFTLAQAGYDVRVVNPLLARKYLSASIRNNKTDKADSKILGEMAIVEKALPASFNLSKIDIQLRQKMGLMASLEKQIQQFKAVMRDYNFFQEKISITSSEAEDALSDTLKTLEKCKKALEKEFQDIIQESKKDLNDSKCHHALLISIPGVSSFAASLIVQFLDTSVNSAKSWIAYIGMDIAARQSGTWKGKGRLSKRGNPYLRKRLFGVAWGSVMTNAQFKSYYYDLKERGLKHVEALLTIARKILKITFVLLKKNIFYNEKICFSS

SEQ ID NO: 118645 - protein, 403 aa, unidentified
MNNVAGIDVSKGKSMVSVLRPFGEVVAKPFSIGHTGSELKELADYLKSLDGETRVVMEHTGRYYEPVARFLHEEGVFVSAVNPKLIKDYGNNTLRKVKTDKADARKIARYGLDNWAELRQHTPMDTIRMQLKTLNRQQSLYTKTKTMMKNNLIALLDQTYPGVNALFDSPVREDGSQKWVDFATTFWHVDCVRSMSLTAFAERYRKWCKRHGYNFSQSKAVEVHAEAQDLIAMLPRDALTKTMVRQAIDALNAVSASLERLKAEMQALAAQLPEYPVVMAMHGVGDSLGPQLMAELGDVTRFTHRNAITAFAGVDPGADQSGTHEAKSTRVSKSGPPELRRALFLVMDCLLKTQPQDDPVYRFMDKKRAEGKPYLVYMTAGANKFLRIYYGRVKEYLASLEGN

SEQ ID NO: 118646 - protein, 397 aa, unidentified
MIAVGIDVSKSKSTVAILNEDGSIRAKPFDVHHTTDELQALISYIKGISEVPTILMEPTSHYHYPILKAFQDAALPVCLVNPYQLKKYGDTALRKAKTDKKDAVKIAQYALEKSYTLTPYTPQDQKYDDLRFLSRQYNQRMSTLTANKVQLIRLLDETMPGITTVLPLKSRDPENCVLLKFIKRFKSFDSVKKMGKNRFLDSYQVLVNKTKDRYAASKGLAIYEMALTSVTTRGDNSLTFMTQNQCVDLISASQNAVDDINLQMRTIAETIPEYRVLRSMAGVGDRLGPIILAEIGDIRRFHSGKALNAYAGNDAPPYQSGQFESRNRHISKRGNPALRKACFEVMQALKLTKPQDDPVYLFLLKKEQEGKPYNVAKMAAVNKFLRIYFARAMEVYK

SEQ ID NO: 118647 - protein, 322 aa, unidentified
MNKYSEIFGLDISKDVFDVYGSETGHDQFKNDEKGFVKFIKGLPESVLVVMEATGYYHYRLAQFLYKSGVCVSVVNPLSVKRFIQMKLAKVKTDKSDSKAICEYGQMNDVPLYTALNEVQSECLQLFRLLDSYIKYRTASKNKLHGEETLGIPSKFVYRSLKRNVKHLQKEITAIEERLLDLVKQEQQHQLTLIKSIPGMGVKTALFLIVVTDGFKKFETASQLCSYVGITPTIRKSGSSVRGRSRISKVGNKKLRNLLFLCAFSACKYNKACREIYERLVAKGKSKKLALIAVANKLLKQAFAIAKSGLPYCENHVSVLPK

SEQ ID NO: 118648 - protein, 341 aa, unidentified
MEKNTFFIGLDIACDDFVASIYEAPEKKIIIKEAIENNPDGFSQFVNWLKQYNIDSSNSIICMEATGVYSEACANYLAANDFRVSVEPPLKVKRAFDPVGHKTDPVDSRQIAEYAFRYKDELRFWQPKQDIVEKIRQLLTARERFTKQSVMTQNAMKSYEKHVLKVALIEKADQQTLKEFKKHIADIDKELDKLIRQNPIISQMSNQLKSIPGVGLLLAANLIVMTDSFNSISDYRPLAAFVGVCPYQHKSGKSVYRQPHIRTFGPSYARKLLMLAACSVATHNELFRKYYLRKQAEGKAKQLVLNNIANKLLKIACAMIKNNTAYIQNYRSVNPLCLNLA

SEQ ID NO: 118649 - protein, 350 aa, unidentified
MVTVGIDPHKQTHTAVIIDEAGRRVGTPLTVDDDPSSVAKLLAWAGRRAAGRAVTWAIEDGRALARRLASALVAAGQVVVWVPVRLMVAERHHTGPRGKSDPLDALAVAKAALNPDNARYLATHRVDDPGAQLAPLVEHRDQLVGERTRLINTMRWRLHQLAPGLEPTTLTTLKAPRELAARLEEFPDTPLRRVLLANCHRLETLTSDINELTRELGEHTRRVCPNLLAIPGVGPVVAATILAELGDPTRIRNGAALARLAGTAPIPVWSSDTERHRLDRGGNRRLNRALHTIARTQARSHRPAQALIAKHQDTKGKRGAIRVLKRHLTNVIHRALRHDIPPTTCQPSAA

SEQ ID NO: 118650 - protein, 389 aa, unidentified
MKRAKRRGPGPSHLLMTPDHAGNVVGVDPHKRTLTATVADARGGILASAHFRVSGEGHRELEAWARQFGQIARWGIEGSASWGRHTAVFLIGRGHDVRDVCANRTPRSDRARQRGKSDTLDSERIAREVLAHPLLPKAFKRAGQEQGPDEQHQLLALWHNRRRSMLTSRQHLVGEAESLLCELPLGLREQLPDTKAVKPRLAALERRNRRRRYDAPTKLRLQLLDAYRAQIRALDLEEKQVIAQLDALVRENGSTLGELSGLSTRSVAELLVEVGDVRRFTEGGFARFNGSAPLPASTAEGPGEPIRHRYNPGGNRRVNAILHRMAVTQLRREPRAQRIYQGARANGHTKKEARRVLKRHLSDVIYRRMIRDLAAADRGSLPAQPLLAA

SEQ ID NO: 118651 - protein, 362 aa, unidentified
MRIIGCDLHARQQTLAMLDTTTGEVVKTTLKHEGNNVREFYSNLPRPVRVGIEATGSMQWFVSLMEELGIECLVGHPATIRAAEPRKQKHDRRDADLILTLLAENRFPAIWLPSKELQDLRALLRHRHQWVRMRTRVQNALQSIALANGLRRGTALWSHDGQSRIAALPLAPHTAYRRSELQAMYEKFEAEIEKLNQRVEEQACKRPGARLLMTHPGVGPVTALATEVFLGDPARFADSKALASYVGMIPREYSSGGRQRLGGLSKQGNPLLRFLWGEAGAHAARRDPELQRFYRRKLVQKGLGKASVAVARKLGIRLWIMLRDQIEYNEFCRRGQKNQKSSDACAGMPETPNGAKSHRPVD

SEQ ID NO: 118652 - protein, 362 aa, unidentified
MCSVLVGGLDVHKESVVAFLFSPDTGEFFEDEVPNDQVHVLRAVKRWRRKGELRLCYEAGGCGFVLKRWLDAVGVSCEVIAPAFIPKGAGERIKTDRRDARRLAQLHHAGMLHIVRAPTAEEEAVRSLVRHRAGLTQDSTRCKNRILKHLRLLGIRYTLGKKTWTRMHRSWLESLTLEPIPAMVLRGHLRQLAVVEEVRAEVDRQLEVVAETAPYRDKVRWLRCLRGVGLYTAMVLITEIGDARRFGNAKELMSYLGLVPKEHNSAKARHSGGITKVGNTRGRYILTEAAWRQTTKPVESVALRNYRESQPAWVAEIGRKADKRLYHKYWGIASRKDSCTAAIATAREMTGFVWDILTREAA

SEQ ID NO: 118653 - protein, 354 aa, unidentified
MDSVAVVSMDIHKKFSKVVVLSPDGEVLEEERVAHGDRREMGAYFARFHPGTDVVMEATFNWPWIADIAEKMGLRPHLGHPRRLREFAKGLPKTDRKDAIFQGKIWLAGELFPESYMAPRSVRRMRSLFRLRLLWVRMRTMLKNNVHGQFFKLGLVLDGEASDLFSPKGRQVLQSLRLTSDDRAELERKLALIDVLSKHITDLDPLIERCIKKDKRARLLKSLPGVGDKTAYAILAEVGDFGRFPNGRALASYAGLLPIPRESAEKEKERHTSSACNRFLRWAFLETVTGAVRSSRRMKSLHARVRARNPKRPGKARVAVAREVGELAHLLVTRGVLYEEKCPATMPGQRLVTQ

SEQ ID NO: 118654 - protein, 396 aa, unidentified
MTKLFVGIDVSKDSFSATALDTKGNLCFSLSAAMDKSGFSNLLKAITSNCKDLYSVMAVMESTGCYHINLFSYLSDKGVNTVIINPVLITNFAKLSLRKTKTDKKDSLTIAKFILIHKDSIEQSSHSQDTKDFRDIAREREAICHLIASTKNEIKRILQTTFPELESICNIFTTTMLLFLKEFPSARLIRASNAKVVAEALDRCSKGRKVSIGADEIIKAAKSSIASNSLAKEFILSQKISTLLHLMEQLDNISNVLSELCKSIAIEEMEIITSIDGIGDVTGAVFLAEVGDIKKFSSHKSLIAYAGIDPTVFQSGKFEGTSRISKRGNRHLRRIIYLMTIGVIRCNAFFKAYFLKRRQDGLPFRKAVLATAHKLIRVLFAMLSHKSHFHVKENSL

SEQ ID NO: 118655 - protein, 402 aa, unidentified
MSPGRGQRPALGALRERGLLGRTEPSLMHGGRTMSEYSEAFVAFDVAKIKHAVAVAEGGRTGEVRFLGEIENREGPIERTVKKLAGRHGRLHFCFEAGPTGYGLYRQLRALGHDCMVVAPALIPKRPGERVKTNRRDAVTLARLHRAGELTGVWVPDAVHEAVRDLVRARQAAADDLRRKRQQLLSFLLRHGRIDSGSGHWTLAHRRWLANQAFEHAAQQIVFQDGIDAIEDAIARLRRLEEQLVAIVPSWSMAPVVEAYQAMRGASFLVAVTFAAEIGDVRRFDNPRQLMSFLGLVPAESSTGDTVRRKGLTLAGNRRARRALVEAAWTYRYPARVSETLRARLEGLPKAVRDIAWKAQIRLCARYRRLRATGKKLPVVVAAIAREMAAFLWAIGREVAPG

SEQ ID NO: 118656 - protein, 460 aa, unidentified
MRRWPTERKKISARLVEDEEYQLRYERVAGIDVGKGKADVCTRLPPVREGGRRVSRTEEVTSTVAEVAALAERLLADGVELVSMESTSGYWRIWFYVLEAAGLNVQLVNSSHARQLAGRPKTDRLDAQWLARLTEMGLLRPSFVPPAEIRALRDLTRTRLQLVHDRTREWQRLEKLLEGALVKLSSALSSLARVKSARLILEALAGGERDPRTLAGLAAAQVRAGRAGIEQALEGMRYGDHHGRLTRIHLDHITFLDRSVAAVEDDIAAALDAIPAAQGIDAAGARSPDPGPGATVLPAAERLAEIPGMSLDLARAIIAETGLDMTLFPTAAHLVSWAGLTPVARQSGPRSRKPGKGHGDSYLRGYCTQAATGAATTDTFLGERLRRLSRRLGGNRARCAAGRSILVIIWHLLADPEARYTDLGPGWHARKTDTDRRTPSLLNQLRALHPDSHITIAPAA

SEQ ID NO: 118657 - protein, 313 aa, unidentified
MESTKPAVTYVGLDVSKDRLDYTLDGPRVAQVPNTPAGHARLVMQLRRQPGVRVVCEASGGYERAVVAHLLTAGLEVCVVQPGRVRAFAHAEGLLAKTDRIDAGLLRRFGEKMQPRLAVPTDPVALVLRELLEHRRQLSDILVATGNRLGLAGATLRPRLERQQAFLREELAAVDQLIEQHIASDDDLRDKAARLRELQGVGPVLAATVLAYVPELGQIDSAELSALVGVAPFARDSGQSQRARHVRGGRAVVRKVLYMAAVASIRCNPILGTFYARLRATGKPAAVCLVAVMRRMLGVLNRLIAEPHFVLVR

SEQ ID NO: 118658 - protein, 463 aa, unidentified
MVIPLQVKKSKQEQPKKIVKLDSLKQLNLNAAGLDIGMAEIWACVPEGRDAVSVQVFETFTVDLHRLADWLEKCGVETVAMESTGVYWIPIYEILEARGFEVYLVNARHIKNVPGKKTDVMDCQWIQQLHTYGLLNASFRPEAEMCALRAYTRHRDTLVRYRSAHIQHMQKALQLMNVQLSNVISDITGQTGMQIVRAIVSGQHDPVQLAQYRDSRCRNSEAELAKALTGHYQDEHLFALKQAVELYDFYTRQIQACDAEIEQKYRAFKPAIEIETQPLPPPSKRRRPSKNEPDFDLRSYLYHLTGVDLTRIDGLEALTVQQIITETGVDMDNWPTAKHFASWLTLAPHNDISGGKILRSKTLKSKNRAAQAFRMAAQSVSRSDSALGGFYRRMRAKHGGPKAITATAHKIARIFYHMLKHKQAYHDPGQDHYEQQYQERVVKTLKRKAKALGFELVPQPSVS

SEQ ID NO: 118659 - protein, 410 aa, unidentified
MEVFLERCAGLDVHQANVVCCVLIGAPGRKAQKLLRSFGTTTRELEALRAWLTEHGVTHVGMESTGVYWKPVYAVLEGHFDLIVGNAHHIKNVPGRKTDVKDAKWIAQLVRHGLVAKSFVPPPAIRDLRELVRHRRTLIETRTAVRNRVLKLLEGANIKLSGVASDVFGVSGMAMLEALAAGTNNASEMAGLARGRMRRKHAALEAALEGRMREPQCFLLAMQLRTLGTIDQDLDALDARIETQLEPYQAQHRLLMQIPGVDWVTAAFIIAEIGTDMDVFATARRLAAWAGVAPGNYESAGKSKGAGTRRGNVFLKSALFAAASAAVRTKGSYYRDKYNRLRARRGPVRAIMAIAHKLLIAAFHMLSTGEVFRELGESYLDKVARKRSTTRLVQRLSNMGYDVMLVPKAA

SEQ ID NO: 118660 - protein, 405 aa, unidentified
MEVIYERCCGLDIHKASITACVIEGSKKEIRTFGTMTDDLLQMTAFLKERDVQMTAMESTGSFWKPIFNIMEVEEIPAILVNAAHIKNVPGRKTDVKDAEWIADCLKHGLLKASYVKPRDQRELCELIRYRGSMIEERSREYNRMDKVLQGANIKLTSVASSISTVSGMNMVRALCDGVDDPGVLASMAKGNMRSKTEELKRALNGLVAPHQKMILKAMLDHIDQLSGLINNLDAEIEERMSQDVDLVEALDEITGVGKVSAQTIIAEIGTDMDRFPTADHLASWACMCPETKESAGKKKPGKTKKANSTLKKTLVQCGRAAANSKDTYLNAQYCRIAARRGANRAVVAVGHSILVICYHMIKNRTRYYDLGADFFQNRNRESLVKQSVKRLQSLGFTVTLEEVA

SEQ ID NO: 118661 - protein, 376 aa, unidentified
MKNTLYLGLDVHKDSIMIAIAMGGRNGEVRLYGAISNDLHAIEKTLTKIRQAHGGARLEVCYEAGPCGFGIARRLAQLKVACVVVAPSMIPKRSGDRIKTDKRDARKLARLLRAGELTPVYIPESTDEAIRDLCRARTDAVDDRCRSRHRLKGFLLRHGYRYQGKSTWSAAHERYLRELVLPHPAMKVILEEYLQGIAAAGERIERCEVGMRDLLEKWRLAPAVRALMAMKGFQTVAAMILVSELGEVYRFGHPRQVMAYLGLVPTENTSSDKRRQGHITKCGNAHARWLLVECAQHYATPPKVSQHLSRRQQGQGQEVRAISWRAQNRLHHRYTRLLGRHLQRNKAMVAIARELCGFIWELLRTQPCYQAQSPSV

SEQ ID NO: 118662 - protein, 390 aa, unidentified
MFYLGIDIGKFHHATALLTHEGKVVATLSSFPNTHDGFQELLTLITCHLPAGEELRIGMEATGPYWIPLAEWLKTKGCPPVVLNPIKTSSLRNYGVRGSKTDNIDSVLIANALRFEGSQPQKASPKHSEELRHLTRLRADMVKDRTRLVLRVTSQLDRLFPELLCSFSKTTSPSCLALLAEVPTPDRVLALGEEKLTALLRKASGGKLGVARAKEILGKAASSIGVSSPALEEVLVLLLEQINLIDRQLKALDRRIADLYDQAGLFFTTIGGVGILTAATILGEFGSVDRFTKATQMVAFAGVDPKLRNSGQHQGQVHISKRGSPYLRRALYLACQGAVRTDGYFKSIFQRHRDNGKSYKEAIVAVMNRFIHVLYAVWRDNRPYSPLTPA

SEQ ID NO: 118663 - protein, 365 aa, unidentified
MRKYYVGLDVHSKKSAFVIEDEGGKVIARGEVPTTPEGFWGLQATYHLANGTQVALETGTVAFFVARQLGRLGLDPIVVDAHEVRLKAHRPNQKSDGRDAFELCEGLRRGIYRSIVHVPRPEISRLRDTLSRRRHFVRLQAAQVGAVKALLRAAGLGRLSRSLGSEAGWARVIAAVRQHEELRTYAEQHRALWRCAWEQIRALDVSLARQQKESFAAQIARLQTIPGVGPIVASTAIAVFSTPERFPDAKHAASYAGLVPSTYQSGEHEAHGRITKRGSAELRAMLCEAAHHASRPDHPLNPYFARLCARRGYKMAIVAVAHRLCRIIFAMLRHQSDFDVAKLGVERGPFEHKIVRAYRLKASSQ

SEQ ID NO: 118664 - protein, 520 aa, unidentified
MVRTRTRRRSSRRQIATSLGKPRGVLHPRVQQVGPEHFGIVCFDCAKVRSKYLLADFYGRLLIPPTTVEHTRPALDGAVAHLRRAFEQHQLRDGLVAIERTGRYHRVVQRTFAAAGFETRILHPFVTKQYRQPVDPGNKTDDADLAAIHRATVTGCALLEATRDEAWTTLQLLIRHRRDLVCKGAALNCQIRDHLEAALPGYAACFDKLWDSVIPWHLLRHYPTATQIREAGVTTLCHSLRQADIRFQQRTIQTVVDWAEQAAPGDIAAGQHLRIALALYEDRQRKTQEIKALERDIAGRLVQTPYVLLLSFPGINVVSAADFAGEMGPIEHYLNAKSITGRAGLRPSRYQSDQVDKANGPLVRCCNHALRAAILTIADNLIVCNHHFNVLATQWAAQGKDPRHTRVKVGLRFCRIGFQMVAGRQVFRHPCIQDRHYILEKLTAFHREQDTGMVEVLRDLHAAIRHVPPREYAAEAKPLQDEYRRIQDGRRRGPQLLGNILPIVFARLGVGLVSSNESGE

SEQ ID NO: 118665 - protein, 355 aa, unidentified
MNSEKYIGLDVHQATISVAVMDSRGKVVMESILETKASTILEFFAGLRGTLSVTFEEGTWAAWLYDLLKPHVAKVVVCNPRKNALLKDGNKSDRIDARKLAELLRLDNLKPVYHGETGVRMLRELARSYLTIVKDLTRVMNRLKALYRSWAIPCAGRDVYYTRHRTEWLGKIREAGVRRRAEQLYQQLDMLQHLRQQARRELLAESRKHPITAKLRKIPSLGPIRSALAVALIQTPHRFRTKRQLWAYSGLALETRTSGEHRYVRGQLRRSKKQVSIRGLNKDHNHDLKGLFKAAATRASVQPGPFQDFYQRSLAKGIKPTMVRLTLARKIAAITLTLWKKGENFDADKLKSQAA

SEQ ID NO: 118666 - protein, 341 aa, unidentified
MYSIGLDVSKASISIHVPLNSLYLEIENNVKALKSFYTKLKKLYKKDLDKLVFAYEPTGSYSATLTKFCSMKNIKAFIINPKQSSNFAKALGHRSKSDKIDAIMLSRAISVARKNEIRVPVVNATAETIKELMSYYMFTLKQRVAINNHHEALKAKDGNAYALKDLIKRHKEMKEKETEILNKIKNIINEDDDISQAYSNIKTISGIGDIAGIVLIHLFIRYPKANQKQITSLTGLDPVVKDSGTSVKSKPKISKSGSRLYRGVLFMATMVSINYNEQMKVFYNRLKDNGKHSTVAQIAVMRKLIVIAHSLYKNNTIYNAEFYNKACGNRQEKSTSIEIVA

SEQ ID NO: 118667 - protein, 408 aa, unidentified
MEVLYPRCAGLDVHQQTVVACARVASGATVQQDVRTFGTTTGDLLALADWLTAHACTHVAMESTGVYWKPIWHVLDGQFDLILANALQIRSVPGRKTDVNDAMWIADLLAHGLIRSSFVPPAPIHELRDLTRTRKQLVREVSQHTLRIQKILEDANLKLTSVISDVMGISGRAMIEAITRGEQDPERLADLSQGRLKASRPAVIAAVQGRVTPHHRFLLRLHLGQIDALEGAVRDVEARLGEALAPFQAAVDRLMTIPAIGRTVARVIVAEIGVDMTRFPTAGHLVSWAGLCPRQQESAGKRLSTRTRPGNPWLKTTLVQVAWVAARTRNTYLRAQFLRLKSRRGAKKAILAVAASMLTAAYYILRDDVTYHELGADYFEHRDKAQIARRLVRRLEALGLSVEVRSAA

SEQ ID NO: 118668 - protein, 350 aa, unidentified
MLIIGCDYHPGFQQIAFVDSETGECGERRLTHREEAEQFYRELSERSLHVRVGMESSGHSRWFERLLRELGFELWIGDPAEIRTKRVRKQKTDRRDAQLLLQLLMENRFPRIWVPDAENRDLRQLLWHRHRLVQMRTRVMNQLHVVPLNEGLRRKKALWRPAGRKELESIALAPWASRRRQDLLDLLDQLTPKIQELTHALEEEVEKRAVTRRLMTHPGVGPLTALAYELVIGTPERFHCGKQLASYIGLVPEENSSGDRRRQGHISKQGNVLLRFLLVEAAQVTVRSHPEWRNKFFHLAMRRGRKIAKVAMARKLAVHLYWMWRQGCDYGQMHKLGSHAGEPGHLDGER

SEQ ID NO: 118669 - protein, 341 aa, unidentified
MHVVGIDTHKATLAACAIDERGLVLGERTFPNEPAGFTALAAWLGELGAIERIGLEGSAGYGAAAARFLLAAGEAAVEVPPQLSHRERTRTRRAGKSDPGDALAIARVTLREVELPPVRVVDAGRELGLLVEAREDLVAEATRIRNRLHADLVVLVPGYGLAAVNLVAAKHRRTAARLLGHLPGVHAELARDRLARLGRVSVEVRLLERRIEALVADHPLRTLPGAGALVTAKLVAEAGDVRRFRSADAFAMLAGVAPIPASSGQTSRMRLNRGGNRQLNRALFSIAFAQARTHPPARSFVARKRAEGKTWREAIRALKRHLARVVFRLLSLPVTQVSSGA

SEQ ID NO: 118670 - protein, 435 aa, unidentified
MKKNISKTTKTQKEGNGKRKQLQARKRNMAGLETAKKRKAKRSRVDGEVKQEASQAAEEGQAVVEFKAGEGEGYTIGIDIGDKRSRYCILDKEGKILRESSVATLPGALKTVFSKLAGCRIAMEVGTHSPWVSRLLTALGHEVIVANAREVPLIYKSRRKNDKLDAEKLARLGRMDPKLLKGIRHRGAEGQGDLLLIRSRAQLVETRTGLMNMVRGLVKSRGERLPGCTSEGFVVELLEGVDEAAVRALKPVMVLIEQMTEAIKGYDKQVEEMGKKHAEIARLEQVKGVGPLIAATYVLTIEDAERFRRSRDVGGYLGLVPGQSDSGESQPQKRITKAGDGYLRYLLVQGAHYILGPNGPDTDLRRWGLKLGSSGGDRGKKRAVVAVARKLAILLLVLWKTGAKYESLRNSDKQEKEQKQKQDKQDKQEKQKVAA

SEQ ID NO: 118671 - protein, 343 aa, unidentified
MEESQGSVVGVDTHKDSHSAALVDELGGLVASTDVGANQRGYVQLLEWARGRTSRRTWVVEGTGSYGAGLASFLAGCGEVVYEGDRPQRRKYGAGGKSDQLDAIKVAREALAREHHAVPRQRGNREAIRVLLSTREGAVSAYRQALNQLYALVVTAPESTHERLIRLKGDQLVNACLRLRSTTGDIETSVTKRVLQQVAKRIRTLQAEAASHEALLEKLVAETVPALLAEPGVGAITAAQLLVSWSHAGRIRNENAFAAMAGVAPVPASSGRFVRYRLNRQGDRRLNRALHVVAVCRSSFHRPTKDYIARRTAEGKSGREIRRCLKRYLARRFFRLLQGLDKP

SEQ ID NO: 118672 - protein, 376 aa, unidentified
MKYSITWVGIDDHKRELVVAVLRDSSETPEVSQVPNEDRALKRWIRNLVRGSGGGEIRLCYEAGPNGFALRRRLESFGPVICEVVAPSLTPRRPGERVKTDRRDAGKLVKLFRAGELTEIGIPSLQEEAARDLTRLRHLVTREKVRKQHHILRLLTRRGFFHAGMNWTRRHREWIQTLPWTEGADQMAFEELWSGLEELESRQRRLDQALAQLAAEESRALMVAVLRCFYGIDTVAAVSLVTEIFQIERFPSPRRLMSYLGTTSSVSQTGSREARGPVTKAGNCYARWMLVQIAWQYRKPCHVRPKLRQRREGQPVWAIEIAERARIRLHLRFRRLSARGKPTQKVVMAVARELIGFIWEAMWEVRRHETMAGRAA

SEQ ID NO: 118673 - protein, 410 aa, unidentified
MKIAGIDVHKKVLMVVVVDDNAPEEKLARRRFVTLPSELQRFRIWLQEQGVEEAVMESTAQYWRSVWLELEPHMGLHLAQAFSNRAPRGRKHDFKDAERLVRRLIADELILSFVPSGEQRIWRSLTRMKVQLTRDRVRLQNQMECLLEEMRIKLSIVVSNLLGASGLRILHALAEGESDPKKLAELGDERLHCTEEQLVDALTGRVQPMHRGMLALQLQRLQLIDQQMAQLNGMIAQAMKSHQDAVIRLAEVPGLGVDSAQQIIAEVGAQASTFSSAAELTAWVGTCPGKEESAEQNYSSRSAKGNKYLRRVLNQAAHAAAAKKGSHFQVVFRRLLPRLGYKSAIWAIAHRLCRVVWKILHEGVRFIEQGHEVGPREKKQRAQMLARALRKLGYEVTISPINQLVAKPAI

SEQ ID NO: 118674 - protein, 337 aa, unidentified
MNVTLIGIDLAKSVFQVCAVNQAGKPVFNRQVKRQRLLALLLEYPKAIVAMEACSGSNYWGRTLQRHGMDVRLIPPQHVKPFVKGNKNDRNDAFAITEAAQRPHLRCVPPRTLAQTDLIQAHRARERQVNQRTALTNQIRGLLNEYGIVLPQGRRRLQSALPGLLENADNELTPEARVLLEELLIEWQQRDAAINRLDRRIDRQAKGSDAAQRLMTVKGIAEKTATALVAHAGDGRAYRNGRELAANLGLVPREHSSGGKQNLGGLTRRGNTYLRRMLIQGAWSVLRNAHRNHDRLSCWARQVAERRGKHKAVGAIANKMARISWALMYYQQSYRSA

SEQ ID NO: 118675 - protein, 348 aa, unidentified
MVDKVTEAAVVGGVDTHKDLHVAAVVDQNNKVLGTQYFSTTRQGYRQMLAWMTSFGTLKRIGVECTGTYGSGLLRYFQNAGLEVLEVTAPDRMERRKRGKSDTIDAECAAHAAFSGIRTVTPKTRDGMIESLRVLKTCRKTAISARRVALQIIHSNIISAPDELREQLRNMTRMQLIRTLGSWRPDASEYRNVTNVYRISLKSLARRYLELHDEIADLDVMIAAIVDELAPELIKRNAIGYESASQLLITAGDNPQRLRSESGFAALCGVSPVPVSSGKTNRYRLNRGGDRAANGALHIIAIGRLRTDAKTKEYVARRVAEGHTKMEAIRCLKRYISREVYTLLGFVE

SEQ ID NO: 118676 - protein, 427 aa, unidentified
MAKGKIDPEPEFAAFVGIDWADRKHVWCLQAAGSAKRETGELEHKVEAVEAWVAELCQRFGHRPIAVAVEQVKGALVFLLNKYECLHIFPVPSTMTAKMREALYPSGAKDDPRDADLLLDILWQHRDKLRRLSPDNEATRRVQNLVEERRKLTAEKTAQGNRLTSYLKIYFPQMVEWFEKLDMPLVCDLLERWPTLEELQKVSTEELRTFFRQHHCHRGLRERRILAISGAIPAKGDRAVIEAKSAVVKVIVQLIRSLLQGIAELDGKIEEVAAEHPDFFIFESLPGAGAVMAPRLLAAFGSQRDRYRCADELQTYSGIAPVTERSGKRKWVHFRWACPKFLRQSFHEWAGHSIVQSAWARAYYQQQRDRGSDHHAAVRALAFKWIRIVFRCWKDRVAYDESKYLAALAKRGSPLGKLVVVGIGTSL

SEQ ID NO: 118677 - protein, 493 aa, unidentified
MPARKHQNCPASTPAPQARPAPAPHAQRRAARRARQARRQAEACARLAAAPTRHAHAAGIDVGDASHWVCIDADAPAATAVRQFPAHTPGLRQLVAWLKECGVTTVALEASGVYGHVLFLTLLDAGFHVLMTSPKFTRQIQGRPKTDKRDCQWIQRLHRLGFLPTIFQPDAATQTLRDYVRQRANYVRLSGQFIQRMQKALEAMNLKLTLVLGDVTGVTGLKIIRAILADQRDPHALAKLRDRRCQRSEAEIAQALDGRYRPEFLLELRCCLELWEAHQRVIAQVDQAIAAQLRAMQQQTDLPPLPPKPRRRGRKPHDPRFDVRGALYLLTGVDLTAIEGIDEMHALTLLSELGTDFSKWPTVKHFTSWLGLCPNWKKTGGKVQSSRTRQGKGRAARALRLAAWSLMRSTSYLGAYLRRQRGRLGAPKAITATAHKLARIVYNLLRYGAAYVQQTEAAYAEQVRQRREKQLQRQAKELGYELRKIEAAAAAEG

SEQ ID NO: 118678 - protein, 345 aa, unidentified
MKPTAQTRSYVGETVYVGIDVHKRTYSVVARVKQMEVKRWSTAAAPEKLGHQLRQFFPGAEIHSAYEAGFSGFGLHRELQRQGIRSIVVHAAAIEVAANQRVKTDNRDARKIAEHLEAGRLRGIRIPSVAQEAARLLSRTRSQLVRQRTQSQNCIRMKAHQFGLIAPQDQRRMSHALVAELLKESASQEFRCSVRSHQRVWEALDQEIAQLEARLKEQAATDPDETTYRSVPGVGSVSARILANELGDLSQFTNERQLFSYTGLTPAEYSSGENTRRGSITKQGNRQVRSILIEVAWRAIQADSSLADFFERVKARRGSKRALHGYPTNQWMKRQMEYTDCSFRC

SEQ ID NO: 118679 - protein, 399 aa, unidentified
MIKGYESVDVFIGVDVGKSDHHAVALDKSGRKLLDKALPNDEAKLRAIIGSLTIHGNLLLVVDQPATIGALPVAVAQSAGILVGYLPGLAMRRIADLHPGEAKTDARDAAIIAEAARTMPHTLRSIVVADEQGAELSMLCGFDDDLAAQATATSNRIRGLLTQIHPALERVIGGHLDHRAMAELLRKYPTPAALAAAGRTRVGTFLTKFAPRAGKRWAEEIFTALGEQTVVVAGTKAAGTVLPQLAGMLLGLRDARAEIYAQVEALVEAHPLHLVLTSIPAVGVRTEARILTEIVGKDFATAGHLASYAGLAPVTWRSGTSIRGDHPSRKGNKILKRALFLSAFAALKDPVSRTYYDRKRAEGKRHNQALIALARRRTDTLFAMLRDMTLYEEKLPKPA

SEQ ID NO: 118680 - protein, 315 aa, unidentified
MIVGIDISKDTFDASWVVSGKEISKKYDYTELGLKSFSNDTPKEAFFLMEATGVYHTLLALRLYESKRQVSVCNPLVIKRYSQMKLIRAKTDKADARLIRMFGEENNPDMWSPNSEEINELKQAHSWLNDQIQERSRLMNRQEAHSHQAQKSTFVNKQMRIQLNSLNLQIKECEKHLEVVVKKHFVDLYSRLMTIPSIGPKTALELIIITGGFSRFEDIKSLSAYVGVSPTNYLSGTSVKGKGHIAKMGNGRIRQLLYLCSWTAKTCNPSCKELNTRMVEKGKPAKVINIAIAHKLLRQAFAVAVNNVEYSANYA

SEQ ID NO: 118681 - protein, 379 aa, unidentified
MIATTRPEMSVSEPTLYVAFELGKKEWKLAMTSGFGVAPWLRSVASGDWRGVDRAIAQGRARFGLAAAVPVVSCYEAGRDGFWIHRALQQRGIRNRVVDSASIEVNRRARRAKTDRLDALKLVTMLVRVCWGERRVWSEVHVPSVAAEAARQVSRERTALTQEQTRLTNQLKGWLATWGATLPRRRPSGWWTTVSDWAGAPLPVEVQARVARAEARQAVLAGQIAELDAQQQAAVTTAAPGSAVRQLVQLKGVATTSASVLLDEGLVWRAFQNRRQIGGFLGFAPTPYESGESAREQGISRAGNNRLQSISIQLAWNWVRWQPHSALTEWYREQFGTGKRSRRIGIVAVARKLVIALWRYVTTGVVPAGAILKGALPVA

SEQ ID NO: 118682 - protein, 340 aa, unidentified
MSEIKTIGLDLAKHVFQVHGINAAGECVLRKRLRRGQVISFFAELPRCLVGLEACATTHYWARELQAAGHEVRLMPAQYVKAYVKRNKTDAADAEAICEAVRRPTMRFVPIKTAEQQAAVLLHRGRERLVRQRTTLVNALRAHLAEFGVVAPAGLRNVSQLIAIVRDASDRRLPDLARPVLRVLATQVELAQAAVAKVEKELTAWHRSNPLSQRLATIPGIGPIIATAIAAMVVEPSGFASAREFAAWLGLVPRQHSTGGKARLGGISKRGNRYLRRLLINGASANLLRSKATNADPWVIGLRRRRPSLVVAVALANKTARIAWAVMHRQEDYRSLAAAA

SEQ ID NO: 118683 - protein, 413 aa, unidentified
MEVLYPCCCGLDVHKKSITACVLWAEAKGKRRKEKRRFGAFTQDLLKMADWLRDCGVTHVAMESTGVYWKPVWNILDGQFEEVLLVNAQHIKAVPGRKTDQKDSEWIADLLQHGLLKGSFVPPQPTRELRDLTRYRVSLTEECNRIANRIQKVLEDANIKLSSVASDALGASGRQMIQAIIGGQQDSAVLAEMSKGLLRNKIPELKLALEGRVTEHHRFLLAAMFDDLRHVEATMGRVEAEIEQRLRPFQDEVARLCTIPGVDRVTAWGLISEIGLNMDQFPTAAHLASWAGMCPGSFESAGKRLSGRTRKGSAFLRRHLCQAGWAVSTKRDSYLSALFRRLAARRGNKRATMAVGHAILVIAFHLLRRKENYVELGANYFDRKNADSLQRSLVKRLERLGHVVTLSPIAQPA

SEQ ID NO: 118684 - protein, 354 aa, unidentified
MNPIIGCDAHRRYSLFAILDTSTLSVEQTRVNHQPGAILEFLSGFPEGTPVALETVGNYYWIVDEIEQAGCVPLLAHAAKAKVIMGNINKTDKLDAKGLATLIHLGSLPIVWLPPGEIRDERELHRTRMALSKVRTALKNRIHATLAKYALNSSEHSDIFVGKGRSWLERTVQKLPHETHRCLEQELDLLDATMGQIAALETRIRERIRLTPNMQHLKTLPGVGNILAIVIEREVGTIDRFPTAGHLAAYSGVVPRVHSSGGKTRFGRMRKQANNYLKWAFIEAANVVVAHRHHPAWREKKVTNVYERICRRKGHATAVGAVARHLAESAFWILKKGEDYQDPALRRQGSPKLA

SEQ ID NO: 118685 - protein, 419 aa, unidentified
MGKRKYRAIDVKQVNVGALKDRVRGRRVVLGGDMAKETHYGALLDEDKEVIVIWKWDQLRESVQVVDLLRSLPASSVAVAIEPSGTYGDPFRVLAQSAGLAVYRVSPKRCHDYAEVYDGVPSQHDGKSAVLLGRLHLEGFSALWVEHSAEHRELAAAVREMALYQDQEQRYLNQLEAQLARHWPELPSLIGLGTATLLELLKAYGDPAAVSREASSGRDLMRRVGRLQWRKIDAILASAEATIGVPMQAGERRLLQAIAHEARRTQQRLRAANRIVKRLSASLPAIRELARPLGVRTAAVLVVEVGDPRSSASAASYRKAFGLNLKVHSSGKHKGQLKITKRGSGVARQWLYLAVLRLLQKDTVMQAWYERKVARDGGVKMKALIALMRKLVGALWHVARGQAFDSRKLFDVRRLNLAI

SEQ ID NO: 118686 - protein, 389 aa, unidentified
MPSVSERPEAPTAIQTHLAASFVSLELSRSIWLITSLSPASGEKMSKHSVRAGDVAALLARFSELKRKASERTGKSFPIVVIQEAGLDGFWLHRVLQSEGVESHVVDPSSIATSRRRRRAKTDRIDGEALLRALLAYKRGEPRVCAMVKAPRPEEEDRRRLCRERKVLIAERVKHVNRVKGLLFSQGISGYEPLRRDRRQRLDELTTGDGRPLPVHLKTQIRRELDRLELLLDQIKEAEAERDALLAAPLPAAPTPAGRMLLEFKGIGAELAAVLWLEALFRHFDNRRQLASYAGLAPTPWQSGSVDHEQGVSKAGNPRLRTSLIQLAWLWLRHQPQSALTLWFKERVSGNGGRFKKSTIVALARKLLVALWKYVTAGVVIDGAVMKDA

SEQ ID NO: 118687 - protein, 348 aa, unidentified
MEQFVGLDVSQKLTHVCVVDQKGGVVWRGTCLSTPEDIAATVRAKAPHAERVGLETGPLSTWHWHALKEIGLPVICIDARHAKAALSMQINKTDKNDAEGLAQIMRTGWYREVGVKSLDNHKIRAVLGARAQLVGTQTDLKNQIRGLLEVFGTVLQRDRGQSFEQQVIAASEGNGLLDVSVRSLLAVLKTVSEQVAQLDRLVMDQAKQNAMCRHLMSIPGVGVLTALAFMTAIEDPGRFRKSRSVGAFLGLTPKRYQSGETDWDGRISKCGDALTRAYLYEAANALLTNCKKWSGLKAWGMRLAKRRGLCKARVAVARKLAVIMHQMWSTGEAFRWSSEATSAKSAVA

SEQ ID NO: 118688 - protein, 413 aa, unidentified
METVVERCAGLDVHKDTVVACVRTPGPKGQREVELREFGTKTRDLLELRDWLVERGVSLVGMEATGVYWKPIYYVLEDALECWLLNARHLRNVPGRKTDMQDAAWIAQLVEHGLVKPSFVPPKPIRELRNLARYRKAQIEERTRESQRLDKILQDAGIKLSSVASDIRGVSGRTILAALVAGETDGQRLAELAVGQLRKKLPELEAALHGRFSRHHALIVSEILAKLDYLDELIDRLSVEVGDAIAPFAQQVQLLDTIPGVDKRMAEALVAEIGVDMSRFGSSARLASWAGLSPGQNVSAGKSRGSQTRKGSKWLRGHLTQAAKVAGRTKGTYLGAQYARLRGRRGASIATVAVAHSILVAAFHILDKLVPYQDLGDDWFIRRHSPEQHARRLVRQLAQLGYQVDLNDLEEAA

SEQ ID NO: 118689 - protein, 373 aa, unidentified
MPRYSTAFGMDVHLRSTTVCALDAETGEAVTRRFRGNPWGEVAEWMSGFPGPSLAAYESGYLGFAPQRELSGLGVDCVVAAVSKVPRSAADLSSKNDRNDAARMAKAILSHDISPVWVPSPEIEGLRDLAAAHDAATARLAAAKQRLLAFLARRGYVYGGTTPAGNPRKYWTYGFLRWLDGIHPADDGGIRALAALRNEVEAADETREALLAEYRAAVAAGPLSAEVEALQSIKGCGFALAAAFASEVGDFSRFRSGRQVTAYFGLAPKQRSSADSVRLGGISGAGNALVRRLAVEGSWRYAQAGHQPKLMPKGSGVPLEIRMHGRKGSERLLRRREEMLERGMPQAKANAATAAELVRWLWALGMMCREAGE

SEQ ID NO: 118690 - protein, 364 aa, unidentified
MAVTRFTARIKRKNNQSNVNYRVGRKKYRQVVLRRSEPTNSETRLNLLDCTSFVLDVGKFQVVAFNGLKYFSFKPEETEKLLKFKPKKVFLERTGMYHRPITKVLLEHGVEVYEILTRKFKKFREQYSEDVKTDKRDVEVMWKFVQVHNSPRITYVTDELEKLLRKRQAVVNSRRFWKCFLESCKINREEENTVYCEELIKSLDKECIGVDKRLKDFVDPVIGDKYGVVLSATFLSFRPERFSSSMKWVAYLGFRLKTAESGTLSKKRKLSKKGPAEARRLLYLRVMTAIQRKQQPFYEYFLRAKERGKPGLVPMVNTMRKIARHFWAEQRSMELHPTKTLVRSHNPWYVHPTKEDASFVESQS

SEQ ID NO: 118691 - protein, 343 aa, unidentified
MKVTTVGIDLAKNVIQVHGVDEQGKAVLNKQLKRNQVVAFFANLPPCLVGIEACASAHHWARKLQSFGHSVKLMAPQFVKPYVKTNKNDAADAEAICEAVSRPNMRFVPIKNGEQQAVLALHRARQGFVKARTAQANQIRGLLAEFGIVIPQGIGHIAKRLPEILEDGENDLPGAFRQLLKRLGDHLKELERQVGELEVQIQLWHREHEASKKLAQIPGIGPITASALVASIGDAQSFENGRQLAAWLGLVPRQHSSGGKQQLLGISKRGDTYLRTLLIHGARAVIRVAERKAGRTDRWLARLMGRRNKNVAAVALANKNARTVWALLVHGRDYEADYKPAAA

SEQ ID NO: 118692 - protein, 355 aa, unidentified
MKILAIDMGWSNSVSCLFDTDSGEVQYKALITGKEPFARLLKEINPEQVVIEAGPMAGWVRDLCEQMKLKLLVLNTNDEPWRWRNVKKKTDRKDAFKLTQVAALRQGSAVHVPEHAVRQWRQLIYYRQTLVDEMVAIKNRLRAVLLQEDLHLPSGQKAWESASWQKLSEMAKELEECAKDDLWRGLVKLELRRLEELAAHLGAVEKKLDGLAKEDERIKRLKQVPGVGTRTAELVVALIDDPRRFGRGRKLSSYAGLSPRKHQSGKMDRDGHISRCGNGLLRKLLVQAAWSGKRNSLRMSRIYERVRKNTPKRTKQAIVAVARHLLVWLWAMLRDGSSWQVGHQPAPPKELSAVT

SEQ ID NO: 118693 - protein, 422 aa, unidentified
MLAKTQDNEEIIERVAALDIGKAELVCCVRVPDEGRRGRRLQEVETYATMTRSLLSMADRLACLGVTRVVMEATSDYWKPVFYLLEAAGFEPWLVNAKDVKHLPGRPKTDKLDCIWLCKVAERQMIRPSFVPPPPIRKLRDLTRYRADLVAARTAEKNRVEKLLEDAQIKLSVVVSDIFGASGRDMLAALVAGQRNPKVLAQLARHTMRKKITVLEEAFTGHFTGHHAFLLGKMLARVDAITADIADLDTRIEEQIAPFAAAVCKLDEVPGINLAAAHAILAELGLDMGRFPTAGHLVSWAKYAPGVKESAGKKKGKNSTGHGNSYLARILGNAAAAAGRTDTFLGERYRRIARRRGAKKANVAIGRSILVIIWHLLSDPDARFHDLGSGFYATRIDPERRRRNHVRQLEALGYTVTLERAA

SEQ ID NO: 118694 - protein, 334 aa, unidentified
MWHIGIDLHRRMLVMAAVKDDGEVIDPLRIDCQDTAAILQVVEDLRPFRAVIEASGTYRWLYDLLSPHGTVLLAHPLRLRAMIQRRAKTDKLDAQLLANLLRIGQVPLAYVPPKNYQHLRDLTRCRARLIRGQAKAKNNLRALLARQNRAAPYKIPFGPRGLAWFRKEDFGPIENLVRDQLLAQLEHYAHHVAVLDRQIGQVGKDFLQVEALLDIYGMGVFSALVIIAELGEVERFRTAKQVGAYAGLTCRVHQSGGHCYHGSITHQGSPWLRWVLVQVAMHVVREDVALRNFYTRIRKRSSAKIARVATARKLAEICWKRLRRWHEQHGRKAA

SEQ ID NO: 118695 - protein, 318 aa, unidentified
MNIIGLDISKDTIDATLHKTNGSIHYIKFKNNDDGLKQFRLWIKGNRIRKVYIGMEATGIYYEKAADMLSSYYTVYVINPLKIKDYGKSRFNRTKTDKADSNLIADYIKRHQDTLIPYQIPKNKALQKLINLKNQLQQQQKQIKNRLHSTEEDFIRNIHQDLIDTIQDKMEQVKIAISEQIKKQTDYNHYRNLQTIPSIGKDTASVLYAQLTEKHFKTANQFVSYAGLSPAIIQSGTRVRGRGRLSRYGNRRLKSTLYMPALCAYRFNAFPKLINNLKKAGKPKMVIIVAIMRKLAKLAYYIVKTGQPYDAERHRLNQ

SEQ ID NO: 118696 - protein, 386 aa, unidentified
MTQHSHVTTSNGLDYDRTLILAVEVSGRSWVVAAQVPGLRQKSAKQQLAPRADALMAAVEGYKRRAAAAGLAVERVIVAYESGGSGFWLARWLQQRGVEVYVMQPSSVPVDRRMRRAKSDRIDADMLLRTLLAWLRGEPRVCSMVPVPDEAVEDARRPIREREELIRARVALVNRIEAVLTVLGAGDYNPLRRDCRERLGQLRTALDQPLPPHARAQIERLLDRLDLIRQQVADLEAQRDQAVEGEAAGRTEQMIQRLARLRGIGVQTATVLVHEAFVRRFRNARALGSYAGLTGTPYSSGGTQREQGISKDGNRRLRATLVELAWMWLRYQPGCALSRWFHDRLGGSRGRLRKVMIVALARKLLIALWRYIQDGAVPQGMELKPA

SEQ ID NO: 118697 - protein, 346 aa, unidentified
MEHYAGIDVSLELSSVCVVDAQGKIVKETKVASEPEALVAFFEALGFAVKRIGLEAGPLSQWLHAGLQRAGFETVLLETRHVKAALSAMTVKTDRKDARGLAQLIRMGWFRPVHAKSMGSQEVRALLVARKQLLGRLIDVELSIRGILRGFGLKVGPVTRKGFEARIRELVMGQATLERITTAMLSARAALKVEYEKLHKAILAIVREDAVCRRLMTVPSVGPLVAITYKSAMDDQSRIKKSKAAGALFGLTPKKYQSGEKDVTGEITRAGDEMVRTALYEAANVLLARITRFSKLKRWGMDIAKRRGSKRAKVALARKIAVILHRIWVDGTTYRWAAVEPITTQA

SEQ ID NO: 118698 - protein, 346 aa, unidentified
MKMVRFFLGLDVGKSEIVATLMDDEEKELFRGSFKNQLSGFREMMKAVTGVTLNLAKEYQIYAGMEATGTYYLKLVKFLYEKVDGVTPYVINPNKVKKYMEYRGSRTKTDLQDSRIIAMCIRDGVENGLFRPWFPSRKEHEELKQLVRLRESLLTMKNMEKNRIEGLEQNPDHSPHAMKILEDHVAYLSRQIKELEAILKDNIKHGNFPDIEKDIERLKSIPGISDLTATCFVSEIGEIERFDGIKQIVAYAGLSPMEKQSGTSIRGKAQICKKGSKKLRQILYMPTLAAIRCNPVIKSFYEKLLEKGKKKMVAITACMRKMLHIMYGIMKNKAYFDPALCMPKVR

SEQ ID NO: 118699 - protein, 375 aa, unidentified
METIYIGVDFHARQQTICYLTTESGEFVTHELKHQDKDEVRTFYAQFVGRVIVGLEASGYSPWFEQLLEELGHEVWLGDATEIRRRARWRQKNDRRDAELILDLLVHDEFPRLHRPSLESREILRMLRYRHKLVKMRTIIKNSLQALALQSGLSRRTKLFTKIGQQELRAAPMSPVMKQQQEQWLELLLVLNQRIVETTLWLKQQSLNDARIRLLRTHPGIGLLTSLGLVHTLDPISRFRNQRKVTAYAGLEPMERSSAERKRFLGISKAGSRLLRFLVIEAAHTAVKKDDDLKRFYRRLQERRGRPKAKVAVARKLLVRSFIMLRDEIDYAEFQRRAVVARLARQSSRPAVPDSLIGQPASSESQERVLSAAKK

SEQ ID NO: 118700 - protein, 333 aa, unidentified
MVEGTKGSHHKEGTTKMSKHNMVCAGIDTGKHKLDVALDGHPEQMQVDNTPEGHRALSIWLRKHRAQRIGIEASGGYEQAVVAALRRNGFVVIVFQPAQVRAYAKFHLQRAKNDKIDAALIALCSATTKTVHAPPDHRLAPLAAHLTMIEQITEDVARLKTRRESCRDQRLRHFWEEEIGRLKSLLRGELKQLIAAIRQHPDLAERLDLIASVEGIGPRTAVTILVRMPEIGSLTREEVAALAGLAPYDDDSGKRLGERHIAGGRQRLRTSLYAASLPAAFNWNPQIIALYRRLTAAGKSHKAALVACARKLLIFANTVVARGTPWVSKAAAS

SEQ ID NO: 118701 - protein, 390 aa, unidentified
MEHSMQKLNDFSRSRIALEPDGTLIAVIEMSLSSWLVAGIVPGVERQPLKKLAVDESALLKLLHRWREEAEKAGRRIGRIAVAFEAGRDGFWLARWLKARSIEAYVIHAASVAVSREHRRAKTDRLDTELLKRAFLGWLRGERDHCKMVAIPSIKNEDAKRPNRERENLVSEQSRIINRMKAALIRLGIRGFNPKLKRAAGRLEDLRTPEGEPIPPNTLAELRRDMERRRLVRDQIRQIEEARLERLDHAPGDGPHAMVRLLVRVIGVGIETADMLVHEVLSRNMRDRRAVARYAGLTGSPDESGRKRREKGLARSGNGRVRRGMIQLAWRFLMHQKDSALAQWFRARTENARGTRKSMIVALARKLLIALWQLVRQGVVPDGVVLRPAQ

SEQ ID NO: 118702 - protein, 321 aa, unidentified
MENTNIQFPQLIKVGCGIDVHQNLMVATIRKSNETYETRNFEGYTSSLTALRAWCKSEGVTHVAMESTGVYWKPVFNILEDDFEIILVNARHVKNVPGHKTDKKDSAWLSKLLLSGLLKASFIPKQDIRELRDLVRYKKKVVSDAAGDKNRIIKILEDANIKLSSVLSNVDGAVGSKIIADIIDGKHNPDELLKYYHGKMKASKETLKKSLEGRITKHHQFMLKLLKQSITDKENLIMTLDAQIDEASKEYAVEIELLQTIPGVGKASAVSILSEVGGDMEVFATEHHLSSWAGMSPGNNESGGKKKVPKPSTETNTFNPH

SEQ ID NO: 118703 - protein, 364 aa, unidentified
MHDSMTTVSVGLDVHARSIRLAAVRADELLEERTLPYDEEAVERVLRRWPAVRCCYEAGPTGFGLQRHLVERGIDCQVVAPGLVPQRPGDRVKTDSRDARKLARLLAGGLLEPIYVPSRELEAARDLVRAREDARLDRMRDRHRLSKFCLRHGRTLPTSSWTVMRRKWLSEQRFEFTAQQQTFDTYVHTVDLVDARIEALERAIRETAEQEPWCQLVARLRCLRGIDTLTALSLAAEIGDFGRFKTAAEFMAFVGLVPSERSSGEQRRQGSITKVGNSHVRRLLVESAWHARRQPKVGYELARRQRGQHAVVVERAWRCQQRLYQRWQRMASRGKPQQKIVVACARELAGFVWAIATEQPLRNV

SEQ ID NO: 118704 - protein, 450 aa, unidentified
MYQNFYLGIDVSKGYADFIILNKDKKVVEDNFQLDDTFEGHNQLNKIISGFIARYPNSNIFAAVESTGGYENNWLSYLTKCQGKLQLSIARVNPFGVSYNNKATLRRIITDKESAKNVAEYLISHPEKIQYNNEDYYSSVRRQWTFIKMLTKQKVQLLNQLESLLYIANPEVLRYCGSKVNLWILKMLKQYPTAKHLAKVKLSTLSKIPYITEPLAKDLIDNAKKSVASGIDDTTAEIIKALAGQILQLRKLIYLQTKQLEEACNLAEVELLKSFKGIGTYSAVGLMIEILSVERFSSVKKLASFFGIHPVFKQSGDGLSGFKMSKRGRKEPRQILFNVARFAVVHNPYIKEIYVMHLKKGMPKMAALGAVMYKILRIIYGMLKNNKPFDHEIDRANRAKHNSVDNQTKPDYTRRYQPMDVKAPISKRQIKKRKEQEKSHILKPLNAESL

SEQ ID NO: 118705 - protein, 342 aa, unidentified
MAIVGGFDIHRAQLTFDYVDLDSGEVFRGRIAPADRAQLRQWLDRFIERTDVAFALEGCTGWRYVVEELHRAGITAHVAEPAETAARRGPKRRAKTDRSDAQLLRDLLLEGRIPESWIPPQPVLEARALARLYKDLLDERTGWLQRVHASMFQMGVPDLAVSTMSAAGRERITAAELSAATRTAVDVAMRQVDRLTAEMTMVREQIHAIGRRQPACRALQAAHYGIGPLTSVVIWAEMGDTRRFRSSDDAVRHAGLDVTVYSSDGRRSAGHLARQGPPMLRWALYEAAVYAGRPSSPDHAYFQQVKARLDGQLALLSMARKLARRCHHTLRNLDDQVLAPAA

SEQ ID NO: 118706 - protein, 401 aa, unidentified
MNAVGIDVSKGKSMVAILRPYGEIVSSPFEIKHTSSNIQSLIAQIRSIEGESRIVMEHTGRYYEPLARELSLAGLFVTAVNPKLIKDFGAHSLRKVKSDKADSVKIARYTLDSWTELKQYSLMDELRNQLKTMNRQFGFYMKHKTAMKNNLIGILDQTYPGVNTYFDCPAREDGSQKWVDFATTYWHVDCVRKLSLNAFVDHYQKWCKRRKYNFSKDKAEEIYGAAKELVPILPKDDLTKLIVKQSIEQLNTASRTVEELRTLMNDTAAKLPEYPVVMGMKGVGPSLGPQLMAEIGDVTRFTHKGAITAFAGVDPGVNESGTYEQKSVPTSKRGSSSLRKTLFQVMDCLIKTKPQDDPVYAFIDKKRAQGKPYYVYMTAGANKFLRIYYGRVKEYLMSLPE

SEQ ID NO: 118707 - protein, 338 aa, unidentified
MSLYCGIDLHSNNCYLAVLDEQLRLVLGRRVPNSLETIRAALAPHQEQIAAVAVESTFNWYWLVDGLMEAGYHVELVNTSAVRQYEGLKYVDDRHDARWLARLLQLGILPTGYIYPKEQRALRDLLRRRSFLVRQRTANLLSIKNLYSRQTGAQVPTKDLKRLTAEQVADQFTDPLIAQAITCGVNVAQALKTEIASLEKTILAQARQRPEYALLESIPGIGQTLAMTILYETGSLSRFPDAGHFCSYCRCVPSQHLSNGKVKGKGNTRNGNPYLSWAFIEAAHFAIRFEPLAKKYYERKKARTNPLVALRAVAHKMARACFYVMRDQVPFQAAQAFG

SEQ ID NO: 118708 - protein, 403 aa, unidentified
MNAVGIDVSKGKSVVAIMRPFGEIVAAPFEVKHTASDIQSLVGLINSVDGESRIVMEHTGRYYEVLAHQLSEANLFVSAINPKLIKDFDNDSLRKVKSDKADAVKIARYALDKWQNLKQYSVMDELRNQLKTMNRQFGFYMKHKTAMKNNLIGILDQTYPGVNTYFDSPARNDGSQKWVDFASTYWHVDCVRKMSLNAFIDHYQKWCKRKKYNFSRPKAEEIYGKAKELVPVLPKDEVTKLIIKQAVDQLNSASVTVEELRSLMNETASKLPEYPIVMQMKGVGLSLGPQLMAELGDVTRFTHKGALTAFAGVDPGVNESGSYEQKSVPTSKRGSADLRKTLFQVMDVLIKTMPQDDPVYQFLDKKRAQGKPYYVYMTAGANKFLRIYYGRVKEYLSSLPESE

SEQ ID NO: 118709 - protein, 387 aa, unidentified
MNRSKSRIVGLDVHPDSFAGAILQGMDPWKARVVSTSTRVALPLLEKWALRHTREEDILVMEASGNAFCVAERLRALKRKVVILESHRAGKVGKTYCATDRVDAIKIARIYLSALSPVVWQPDAKTRERREVFSAYQAVVKEAMRLKQQIKSMLNEHCVRLEKGFRLSHPSAIGRLLQRRKWTPAQKMLLQQLHAGLVGARARRQQLRHYMAQEVLAEKELLRLTRLCGINLITLYGLIAAIGEIKRFASARKLSAYFGLNPTVEQSGNYEGSGALKRHGRGAIRALLVQSAKKLLQVDNPLQKWGLALAARRGRNKAAVAVARKLCVAVWHVMQGHVIGAIERMDTLHTKLRKLATEPGVPTIKQLGFETKEAFVQKKLYLLRSYA

SEQ ID NO: 118710 - protein, 415 aa, unidentified
MLKIVYPICCGLDVHRDFVYACIATTENGITTYKSHRFSTFTKGLRELLSWLLQNNCCDVCMESTGKYWIPIYNILESDCKIVLAHPKYVKAIRGKKTDKKDAKWIADIFKHDLVSGSFIPPADIRQLRDLVRYNVKLTNYTTGEKNRAQNCLTVSNLKLDSVFSDVFGKASSNIIGRILANPSEKISDVSVFRTKGMKATDEEVLAAVDGEMCAEQAEKLRIIRSHMDGLELCKANLMSLILSTAEKYIPEVDLVSTVPGLTAYSAIAVIGELGVDMSVFPTSKHLCSWAGLAPQNDQSAGKKKTTRISRAGVYIKPLLVQCALAAIKSKNKHPEIVNRYNALRKRRGHKKAVIAIARILLTAIYNILKKREPYNPELYRKSDTPPEHRNVTIEEAVFILQRQGYIISSPTSVG

SEQ ID NO: 118711 - protein, 335 aa, unidentified
MTKVMDAVSVGIDVSACTLVVALERDHQPGRQRREFPNTAAGHQVLVQWLSKSATAVQVCLEATGLYSLDLALALDRAEGIEVMVANPRAIADFAKALLQRSKTDQLDAEVMLEFVRRMPFVPWQPPKPHRLDLRALLRRITGLKLASQQEKNRLHSVSQAAEITPLVRKDIQSHLVQLERHIEKLEQQAEAIVQADPELAQQFRHLVSVRGIARVSALHILAELVVLAPDMTARQWVAHAGLDPRHHDSGPSIHKPARISRAGNRYLRAALFMPALVATQHDPNIRAFYQKLVDRGKTKMQAIVAVMRKLLHALHGMLRTDSDFVGEKFYVIPS

SEQ ID NO: 118712 - protein, 402 aa, unidentified
MAYNFVIGMDVGKYFHHACVLDPQSRQVLSKRINQYESSLRKLLGKFLANDAEVLVIVDQPNNIGRLTVAVAQAIGADVHYLPGLAMRQLSRIHVGNSKTDVRDAYVIAHAGLNLPDALRSVDRVEEVFLQLKVLNGIDEDLARAYTRLINQMRSALVGTYPAFEHVLHGQMIHRKWILHLLAKYGGPTKIRRVGKARLAAFARSHRARNPEPLIDAMLAAIEGQSVTIAGAEYAELGVAMSAKDALAKLEHRKEIEAQVLELIQDIPQTEILLSMPGVGPRSAAQILMTVGDMSDFPDAAHLASYAGLSPRTNQSGTSIMSNSPNRAGNKKLKNALWQSSCASIRFHERSRQFYERKRKEGKRHNAAVVALARRRLNVLFAMMRSGELYRDISTVQEAAAA

SEQ ID NO: 118713 - protein, 339 aa, unidentified
MGEYIGLDVSLKETAISVRRDGQRIWRGKCPSDPSLIAELVRKRAPAAERVVFETGPLSVWFYHALQAEGLPAICIDARHAKAALDMAPNKTDANDADGLAHLAEVGFYREVRVKGYDSMLVRTLVTARARLVQITTELSNQIRGLMKTFGLVVPRGKGGTFEAEVQRLLAGQEELARIILPVLEAWRSVRSRAAALGRQLLASARQSAACQQLMSIPGVGAITAASFTAAIEDPLNFSKSRSVGAWLGLTTRCYQSGEVDYDGHISRRGDAHLRGLLYEAATVILTRTQAESDLRQWGLMLRERIGFKRAAVAVARKLAVIMHAMLKSGEPFNRAVTA

SEQ ID NO: 118714 - protein, 351 aa, unidentified
MIAIGVDAHKRVHAALALDDRGTVLGSWRGANTTKGWMELQHWASQWSGPRHWGIEGAWNYGRGLAQFLVAHREIVYEINPRWTAERRRRTRKADKNDRLDAHAVAKLVREDGSTLPQVTSEDESVVLDLLVSEREAVLAETVRLRNQLHQLLLQLAPDDVVSLPNLRTVAGLRAVEASLPVPSDLLQCQRVEAIRRLMERMHLAVEQTEVLAEKIRGLAAQQYLPLTELCGVQLLTAGMLAGILGPGQRFSSEAQLAAYAGVAPLEASSAGTIRHRLNRRGNRRLNAILYRIALVQAASSPQAKAYLARRQAEGKTRREAIRALKRYLIRAIWRLWQRCLMSQMQPASAL

SEQ ID NO: 118715 - protein, 322 aa, unidentified
MTEETVCVGVDIAKNTLDVADSNSKETRQFNNDHKGISSAVGYIAGLKPARIILEATGKYEMPLAAELQSKRLPVVIVNPRQVRDFARATGVLAKTDSIDARILALFGLQIKPEIRLLPNQKAREMSSLLARRRQLIEILTAENNRLLQADDSIRPGIEIHIKWLEEAISAINDDLDRQIRSNPSWFEKDNLLKSVPGVGKVVSTTLLIDLPELGQLNRRKIAALVGVAPLNRDSGTLRGKRTVWGGRAKLRAVLYMAALVGVRRNPVMATFYERLLKAGKAKKVALVACMRKLLTILNAMIRSKTVWKSDSIFQYVPTEAK

SEQ ID NO: 118716 - protein, 410 aa, unidentified
MSPDQKAAFARTFSVHVGVDTGKRFHVLVARGPDGVRRKPLKVLVSREGFEPDTERSRMLIGLEFAGHHGFTFAHFLASRGYPIVNVLPAHTKRTKELEDNSPLKTDAKDAGVICKLVGDGTFVRFPFLESPYAELRVLVNYRHRLAVEATRFKNRLQGLLDLAWPEFVAQFSTLAKHTPIGLLERWPLPQDLLSAHKATVRAYARTISKGKFVTERFERLYTSAQQTIALPQATTERRMEIQATLARWRLVRKQMVEAEARISELMARLSSAQALLTVPEVSAVCAATILAELGTPGDYAHPRQVLKLAGMNLVEKSSGSTQGRRRQSKRGRPMLRRQLFLLAGRWCQRRGLYRSYYEAMLARNGGLKTKAVCAIARKLVPLLLAVLQRGEPFDKARWQAARHQPALTH

SEQ ID NO: 118717 - protein, 391 aa, unidentified
MISVGIDIAKDKHDCFIISSAGEVLADVFTIPNSMDGFRCLLQRIDGCSSPQDKIKVGLEATGHYSYNLLGFLLDNGLPTYVLNPLHTNLYRKSLSLRKTKTDRVDARTIAAMLLSDVGLKPYTDTAYHNEELKSLARYRFDKVKERGQLRQSIARLVCILFPELEKLVPTLHMVSIYALLEESPGANQIAQTHLTRLKTLLHDTSRGHYGRDTAVTIRDAARGSVGSVMPAKSLELRHTIQLIRVLDAEIDEIETSIQSIMDEMHSPITTIPGIGTRMGAMILAEAGDFSRFDSPDKLLAYAGLSPSTYQSGQLKNCYAHMEKRGSRYLRYAIFNAAKYVCHWDPTFAAYLAKKRAEGKHYNVAISHAAKKLVRLIYALEKSRKPYRSAE

SEQ ID NO: 118718 - protein, 347 aa, unidentified
MDHYAGIDVSLEYSSVCVVGANGTIVREGKVASEPEALIAWFASLGLNLERIGLEAGPLSQWLYAAMRAVGLAVELLETRHVRKAFEAMLVKSDRNDARGIAQLMRLGWFRSVHCKSLPAQETRALLTSRKLVQSKLYDVEMSLRGILRGFGLRVGSTTPKRFPQRIKDLVAGHTSLEVVAAALLSVHEVLLRELDGFEKRMRTMARTDARARLLMSAPGVGAIVALTYVAAIDDPARFASSKGVGAHFGLTPKKHQSGEKDITLGISKIGDASVRTALYEAANVILTRPIKGGRLKSWAMKLAKRAGMKKAKVALARKLAVVLHRMWVDGASFVFGLPDNLAADAA

SEQ ID NO: 118719 - protein, 343 aa, unidentified
MNIQALGIDLGKNVFHLVGLDTSGQVVVRKRCSRTQLLIFTANLQVQIIGMEACSGAHFLGRALRAQGHQVRLMPAQYVKPYVKTNKSDYIDAEAIAEAVQRPKMRFVPIKTDEQLDLQALHRVRERWVMRRTAVVNQIRSLLLERGLTLPKGRSHLEQALPRILEDAELNLSGSFRVLLAQLKLELEQLAARIDPLDAVIQQEARENEACQRLTTIPGVGPVTATALIGAIGNGSAFAKGRDLSAWMGIVPGEYSTGGKQKLLGISKRGNKYLRRLFVQGARSVLQFREKQAPALSQWLAQLLTRAHQNVVVVALANKLVRIAWAVLCKNEIYRAQVLTATT

SEQ ID NO: 118720 - protein, 278 aa, unidentified
MDHFAGLDVSVKETSVCIVDDTSTIVREVKVSSEPDALLAVLTNPAYQFKRIGLEAGPLSQWLFSALAEAGLPVICVETRHMRAALKAQINKTDRNDARGIAQMMRVGLYRPVHVKTLRSQKLRMLLTHRKLLQTKAIAIENDLRGTLRNFGLKVGVVGAVKFEARIKELVENLPDLAALIEPLLIVRRVLREQIGILHRRLLVVVRADDICRRLMTVPGVGPVVALTYRATVDVPTRFRNSKAVGAVFGLTPAKYQSGEIDRTGGISRCGDDAGHAL

SEQ ID NO: 118721 - protein, 352 aa, unidentified
MEVTTIGLDLAKSIFRVHGVDTTGQVVVRRPLRRAQMLPFFARLPSCLVGMEACGTSHYWARELIKLGHEVRLMPPAYVKPYVKRGKTDAADAEAVCEAVRRPTMRFVPVKSPEQQAVLSMHRARDLLVKQRTQLVNVIRSLLAEFGLNIPKGLERALLMARRIVDGKAPDVPMEAAKIVSTLSQQALDIHVRLRQIDRDLLVWQRGNDVARRLMTIPGIGPVGATALAASVTDPHQFRSGRQFAAWLGLTPLQKSSGGKERLGRITKMGDKYLRKLLIVGMTSLVCRAKHNPETIEPRLANLLARKPVRVATVAMANKTARTIWAIMTRGETHRAGHQPALAHKNNVTRIS

SEQ ID NO: 118722 - protein, 508 aa, unidentified
MVRVNAPKPASPIDPALLTVGVDLGDRISEACAYVSGCVYERFQFPMTEGGVRTAFEGKGFGRVAMEAGAQSPWVTRLLRELGYDPLVANPRKLKAISTNERKSDRNDALLLAKLAAADATLLYPIHHRSAERDDALAVLKARDAVVRTRARLIHTVRSLAKATGFRFRQGTTEGFVHQETDVPSALRPALEPIFAALRVLNEQVSVFDKRLAEMCKSFPETESLLQVHGVGPVTALGFVLTIEDPNRFPDGRTAAAFFGLVPRRDQSGASDRQLGISKTGNGFARRTLVQAAQFMLGPLGRDSDLRRFGAKLVARGGPKAKKRAVVATARKLVVLLFALWKGKGAWKPLFNAGDAPAPTSPEVPEGRSETAVSGDCAGRPDEPPPAERRARDCSTIDGLDPTLHQVRSDLSTSANRSVDPRTPPARPPEAPTLSPVRRQGARDANADGDRGRPPPRVGDPTGAGHPRPPHVASGSHGRPPRKKKDGPTSGRETARTGATPAPEKRRS

SEQ ID NO: 118723 - protein, 366 aa, unidentified
MKKISTVQVFGNEIFKEQKLTIGVDLGDRWSFYCVLDEAGKIILEQKVSTTPEAMKQTFSRMPQSRIALETGTHSPWASRLLRELEHEVIVAHAQKVQLITKSNRKDDRHDARTLARLARIDPELLGPVRHRSAKAQIHLTIIRARAELVSARTALVNAARGLVKSYGERLPKCGTQQVSRELAAALSTELRDVLEPLLKEIESLNERVKEYDERMEKIAKEVYPEVSLLQQVKGVGTQIALTYVLTIEDPHRFLKSREVGCFLGLQPGRRNSGESEPQKGISKAGDRYLRTMMVQGAHYILGPFGEDSDLRRGGRKLAERGGKNAKKRAVVAVARKLAILLHRLWVSGEVYEPLRNSQKAMRAVA

SEQ ID NO: 118724 - protein, 358 aa, unidentified
MRIIGVDLHTRQQTIAMLDMKTGEVVEKTLQYEGENVREFYAALPGPVRVGIEATGSMHWFLNLMEELRIDCQVGHAAKIRTAETRKQKHDRRDAALLLKLLAEDRFPSIWMPSTEQRDLRALLLHRHQWVRMRTIVQNSLQAIALSNGLRRGSSLWSQGGQHTIESLPLAQFAARRRTELQTLHRQLNERIEELHEQVREQALQRPGAQLLMTHPGVGPVTALATEVFLGDTARFGNGKALASYVGMIPSEYSSAGRQRLGALSKQGNSFLRFLWGEAAMHAVRKDPNLKRFYRRKLIQKGLGKARMAAARKLGIRLWIMLRDQIDYEEFCRRGQMRQKNGGAYAGIPESDTGPAEQ

SEQ ID NO: 118725 - protein, 407 aa, unidentified
MASIGADANRPMEPPMRKPKQRKPLNDLSRSLTTLDTDHTLIAVIEMGQKSWLVAGIVPGVERQPLKKLDSDENALLKLLDRWRMEAERAGHKIKRLTVAFEAGRDGFWLARWLRARGIEAHVIHASSVAVSREHRRAKTDRLDTELLKRAFLGWLRGERDHCKMVAIPTIKDEDAKRPNRERDSLVGEQSRIVNRMKAALARLGIRDFNPKLKKAAERLGGLRTPEDQPIPPNTLAELHRDMERRRLVIDQIRQIETARLQRLAQAPSHGPNAMVRLLARVIGISIETADMLVQEVLSRNLRDRRAVARYAGLTGSPDESGSKRREKGLARAGNARVRRGMIQLAWRFLLFQKESALAQWYRARTENARGSRKTMIVALARKLLIALWHFARDGVVPEGVILRPAQ

SEQ ID NO: 118726 - protein, 496 aa, unidentified
MNTVKHASSRYESIHPEPQRSKRRSSNGNDALEIETNTQDVGYLQASTIRLSPILGSRVSSDAIQENDGMNNSEIGMEKYAALIGMDWAAEKHDLWMGETATGESQHQVIEPTPEALAEWLAELQARYPGRRVAVCLEQSRGALIYALMGQAFLDLYPINPVTLSRYRQAFSPSRAKDDPSDAKLLSEILRLHRDKLTAWKPQDEQTRTLTLLNEERRKAVDLRTKLVLRLQSALKLYFPQAIEWVGVHLYDPLACDFLLKWPTLEALQKANPQTIRAFYYAHNCRRPDHVEENLQAMAKAQPLTKDPAVITAGVMTVRMLTQQLRTLHGSIEQYDQEIAKLFAKHPEAFLFKDLAGAGPVLAPRLVSAFGTDRQQHPSAQDMQTYSGIAPVIERRGKQGWTHWRWNCPKFLRQTFHEFAKNSIPQSAGAKAYYELQKQRGKGHNAAIRALAFKWIRIIHRCWKERQPYDENQYLQALKQHGSTLWELIAQQPKGA

SEQ ID NO: 118727 - protein, 370 aa, unidentified
MDENIKFFVGLDVHKDTIAVAVAEGGREPARLVGSIAHDVVKLRKLLNRYGEPARVLVVYEAGPTGYGLQRELARRGYQCQVIAPSLIPKRAGDRIKTDGRDGVRLAELARAGELRAVWIPDPADEAIRDLARAREDAVNARTQARHQLKGFLLRHDVRYAGKTSWSKTYYRWLATLNFGLSGAQTAFTEYWQAVTAADERVARLTAASANSIEGWRFEPVVNALQALRGIDQISAIGLVAEIGDIGRFAHPRQLMAYLGLVPSEHSSGERVVRGSITKTGNAHARRLLTEAAWNYRFQPRIGLRAQRRAEDLPQTIRDVAWKAQLRLSQRFARLLARGKERNKVCVAVARELAGFVWAIASTQAKLAPS

SEQ ID NO: 118728 - protein, 348 aa, unidentified
MVVIGVDSHKRTHTVVAADGTGRKLAEKTVVATSAGHLELVRWAARFSERSWALEDCRHLSRRLSTDLLVAGERVVRVPPKLMAGARRSSREPGKSDPIDALAVARAALREDLPVATLDGPDREVRLLVDHREDLVAERTRAQNRLRWHLHELDPGSEPVARALDRAVVLAALETRLAAAPGTVARIARELVVRIRELTTTINDLEREIARLVAGMAPSLLALTGCGPLTAAKLIGETAGVGRFRSRAAFARHNGSAPLPVWSGNTVRHRLSRTGNRQLNVALHRIAITQLQREGPGRTYLEHRRAQGDTKPEAIRALRRRISDEVFRRMRHDDAARAASPSGLAAAA

SEQ ID NO: 118729 - protein, 357 aa, unidentified
MKIVGCDLHARQQSIAVLDTETGELTEKVIRHEGNAVREFYASLGKPVVVGIEATGAMQWFLELLEELGIESRVGDPAKIRAAETRKQKHDRRDALLILDLLERDRFPAIWMPSSEQRDLRSLLRDRHQWVKMRARLQHTLQAIALNHALRKGPSLWSGTGQEVLAKLPLPPYTCQRRNELMSLYAQLQRRIQQLDKQVEEQAQHRPQARRLMTHPGVGPVTALATDIFLGDPSRFTTANEVASYIGMIPSEHTSGKRQRLGKMSKQGNSLLRYLWTEAGMHASGKDPELKRFYLNGGQNERRGGTVLYQWLLLQLRILRLGFLQAEIATVNAGRPTCPNRSLKRGLSRRPSMLGSI

SEQ ID NO: 118730 - protein, 324 aa, unidentified
MVSESSVATTRKGLAQAFGSKPRSRIALEVGTHSPWVSRCLKDLGHEVIVANARRVRLIAESNRKNDRLDARTLARLARIDPELLSPIQHRGEQAQADLMLIRARAALVEVRTRLVNCARGMAKSYGERLRSCGTPVVREELSEALSEPLRDALKPLLAEVESVSGRISEYDKRIENIAQSRYPETELLKQVHGVGTLTALTYVLTVEDPQRFGRSREAGAYFGLRPKQRESGGCQPQLGITKEGDAYVRKLLVQCSHHILGPFGPDSDLRRWGLKLAERGGKNAKKRALVAVARKLAVLLHKVWVTGEVYEPLRVGKAHRAAA

SEQ ID NO: 118731 - protein, 322 aa, unidentified
MNYVGIDISKSSFDVAIEKNNRYDHYKFSNDKAGFKELLKAINVQDPWYVMEASGPYYLKLAWYLREQGIDVSVINPLVIRRFCQMRLIRAKTDKKDAAMIAEYAKTERPQAWKEEEAYVMELKQMQAYVDILEKSRTGLINQLEAFDQSPIPSVTVRKGLVKMIGQTEKQMKETEKQMDAIVTKYHGEMMEQVKSVPGIGKKTGLLLVVVSGGFTKFENAKQLSSYLGLSPRIFLSGTSVKGKARICKMGMSRVRAMLYVCSWSAIKCNKACKELYERLVAKGKSKRLALIAVANKLLKQVFAVATKGMFYDENYLQKTCF

SEQ ID NO: 118732 - protein, 318 aa, unidentified
MTQIICGVDISSASLQASIGRSGAAGNFTNTPDGIALLLAFCHAQQVELVAMEATGGYERQAFALLSEHGLPVAVLNPRAVRQFAQSMGRLEKTDPIDAGMIAWFAEVKRATPTCLSGPGQRQLRALVTRLRQLTEVRTAQLNQQRLIAGPRLQSSFDELLSLLARQIDALARDIAALIAADPLWVQLDRAFRSIKGVADRTVARLMAEMPEIGALSNKAVSKLAGLAPLAQDSGRHQGKRAVRGGRSSVREILFVVASVVGRYEQDFIAFRQRLLAAGKPPKVIRIALAHKLLVRLNAKAREVRTRLAASTQLIPQS

SEQ ID NO: 118733 - protein, 343 aa, unidentified
MEHFAGLDVSVNETSVCIVDETGKVVREVKVASEPDALLAVLKNDTHHFKRIGLEAGPLSQWLYGALAEANLPVICVETRHMQAVLKAQINKTDRNDARGMAQMMRAGLYRPVHVKTLRSQKLRMLLTHRKLLQSKAIAIDNDLRGTLRNFGLKVGMVGTARFEARIRELVENLPDLALLVEPLLIVRRTLREQFGILHRRLLDLAQDDEVCRRLMTVPGVGPVVALTYRATVDVPARFRNSKAVGAVMGLTPCRHQSGEINRSGAISKCGDEMMRVMLYEAAQIMLTRTNKWSWLKAWAMQIARRRGLKKAIVALARRLAVIMHRIWVDGSEFSWTRDIAAA

SEQ ID NO: 118734 - protein, 391 aa, unidentified
MFAGIDVASETHTLARLDDAGAPIGRPIPIAEDRAGYDALLAALGPPPVLVVIEATGHCWKNLFAVLTAAGHDVALVNPLVARRFQEAGLEPTRTDAIEATGLARLAFEKRPAPTRLHDEVAESLRELVRHRDRLRQDFDDRVRQLHRLVDLGFPGFTRYVRTLDSRLATCLLAEYPTAHAFARATPRRLARLRHDGRHPVGAELATQLIEAAERSIGQHHGPAYVLQARHICQDLDLWRRRLADIEHDIEDLLDTHEVGKLLTTIGGIGPQTAARIIAEVGNPARFHSPGALAAHLGVVPALRQSGKRSPARAATTHFGNARLRSALWMPTLSAVRRNPWLRAFYLRLRAAGKPPKPAIVAAMRKLLLAVYVTARTLRPFAANTEQARTA

SEQ ID NO: 118735 - protein, 312 aa, unidentified
MTEIVCGVDVSKRRLDAHVEPAGTFDSFSNDAAGIAELAAFCRRHGVTLVAMEATGGYERTAFLLLWQAGIACGLTNPRSVRRYAEAMGILEKTDRLDAGVIARFAIAKGLKPTRPPTAGQQRLNALVARLRQVTDDLTVHKQRRSIAINDEMTSSINEVIGVLKRQARTLEGEIASLIDDDPLWAHLDAALRTTKGVANRTVARLLAELPEIGIYSNKAVVKLAGLAPLAHDSGAKVGKRHIRGGRAGIRSILFLVAGIVSRFDDSLAAFHRKLTAAGKPKMVVRIALARKLLVRLNAKARQARQQYALAT

SEQ ID NO: 118736 - protein, 388 aa, unidentified
MHRRLLHGCCGKEFGRPGIARRPSGTSSPWESTWHVWLPVCLNTEQLLVGACRKAVTSYLQGWPEMNASELIFVGIDVAKETLEVAVDDKSKTRCIANAGREIEALVKELIPLSERIGVVLLEATGGFERQAAAALCGAGLAVMVVNPRQARDFAKSMGYLSKTDAIDARVLSHFARTLHQSAQRERLLMKLPDANQEALEALLIRHHQLVGMRVAEGNRLAQSHPSQHRSIKAVLKMLDRQIASVDNDMSGMLKAHFADKLALLKDFKGIGPCTQASLMGALPELGQLSHAQIGKLVGVAPLNADSGRHKGKRITWGGRTAVRSALYMAALSAVRYNPVIKAFHQRLIAKGKPKKVALVACMHKILTILNAIVKSGSPSNPEHHKCA

SEQ ID NO: 118737 - protein, 433 aa, unidentified
MAAVMIGVDPHKASHTAVAIGAAEETLAELRVRASESQTERLRAWAQAWPERTWAVEGAGGVGHLLAQQLLAAGERVLDVPPKLAARVRLLQAGDTNKNDPNDAFSVAVAALRSPGVREAGRDDHAMVLKIWSKRYKDLGRTRTQVACRLHQVLCELIPGGVAKQITAGQAAHILESITPADAVAAARCELAAEFTQDLRGIDAAIRDTRKKLTTAVQAAGTSLTGLFGVGPVITAAVIGDVRIVSRFPNRDHFAACNGTAPIEVSSGGRKVYRLSRRGNRRLNHAIHMAAVTQIRYRHSPGRAYYDKKLAEGKTPKEALRCLKRQISDAIYACLQADARRAAGAKSPGGQRGNDSLTSAAGSHPQHRLFGQATPGPATNPTTPADAAADPASAAFPAWPPSRASGRAGPGPGKARPRSGARRASLTQPPASR

SEQ ID NO: 118738 - protein, 347 aa, unidentified
MVTLGTDSHKQSHTVVAVDENGRQLADLRVSATPTGHLEALAWARQWRERRWAMENCRQLSRGLERDLLRAGEQVLQVSPKLMGRSRRSGRQPGKSDPIDALAVARVALREPKLPMAHLEGRSRELKLLVDHREDLVGERTRIQNRLLWHLHELEPGFAVASGALTRRVVQMEVSRRLNLHHGVVAEIARDLVLRLVDLTGSVNQLQRRIETLAAELAPSLMRLPGCAGLTAAKLMAETADVRRFHSSAAFALHNGTAPIPVWSGNQERHRLNRGGNRQLNAALHRIAITQLRLGGEAKLYVARRLSNGNTKTEAIRALRRQLSDEIYRRLRLDTQEPVAMPNALAA

SEQ ID NO: 118739 - protein, 334 aa, unidentified
MENIALIGIDLGKNSFHIHCQDHRGKAVYRKKFTRPKLIEFLATCPATTIAMEACGGSHFMARMLAELGHFPKLISPQFVRPFVKSNKNDFVDAEAICEAASRPSMRFVQPRTESQQAMRALHRVRESLVQDKVKTTNQMHAFLLEFGISVPRGAAVISRLSTLLEDSSLPLYLSQLLLKLQQHYHYLVEQIKDLESQLKRKLDEDEVGQRLLSIPCVGTLTASTISTEIGDGKQYASSRDFAAATGLVPRQYSTGGRTTLLGISKRGNKKIRTLLVQCARVFIQKLEHQSGKLADWVRDLLCRKSNFVVTCALANKLARIAWALTARQQTYVA

SEQ ID NO: 118740 - protein, 421 aa, unidentified
MRVVYPICCGVDVHKTFLVATIITTTPQGAPIYKKKRFSTYNRSLREFRDWLLANKCHDVCMESTGKYYIPVYNLLENDFHVVVANPKWVAAIKGNKDDVKDSKWIGDLFRVGYVPSSFIPSRPIRILREYTRYRYKLVCCKSSEKNRFQNAFTVCNITLDAVVSDMFGKSATAILDYIVNGESFDPKHCVSLLHRSMLEKADRVVEAVEGFQMTEDQKQRIRFVKSHLGFVESLIGQLDSKIDQMVAPMENAISLLKSVPGLARSTAITILSEIGLDMGQFTSSHRLCAWAGLAPSNNQSAGKKKSVRISRAGVYLKPALVQAAHAAVKSKTSPYYKVKYERIAKRRGKKRAIIAIARMILIAVYNMLKNGETWNPCDLKQIDIPQELHERQQKQAMKQAVNFLIKHGVILPENVLLPAA

SEQ ID NO: 118741 - protein, 368 aa, unidentified
MKARCYNDSPNFIDERLVREQRAMSNVPLFVGLDYHQDSIQVCVLNQKGDVLLNRSVANDSKELGQIVQPLGKVARVGIEACCGAADLGEELVEQLGWNVSLGHPAYIAKIKNSPDKSDYSDGRLLADLTRVGYLPRVWLAPANIRELRQLVNHRHRLVDHARALKLQVGAILREQRVKIDKDRGGRWSKVWMASVQDNQRLSQHARWIVNELLDDLKYISGKIAKAEQRLRQATASDKVVDKLMDQAGIGEVTAWVLRAYVGDFGRFKRAKQLSRYCGMSPCNASSGHKVADAGLIDGCNKLLRMTVVQAAHRLIRTSQRWSNLADSMRSRGKPACVIVGAVGNRWLRNLHHAMKGSITEQGVTGMN

SEQ ID NO: 118742 - protein, 334 aa, unidentified
MNNKFYCGVDVSKKKLDVMLLAQEKFHYKVVENSNDGVIFLQEWIKSKLEKDAFVHFCMEATNVYHELLAFSLLENKNFKVSVVNPRIVKAFAKSLVKTKNDKTDAKILAEFCKERNPRPFSPQSKERRELRDLSRLMDNLVELRIMQKVRLQTFNTEAAARVVKATLNSIDNTIAETEEEIKYYYNTYPELHKEYELLNSIPSFGKRVSNVLISEIYKDEYGMYNSKRLTAFFGLEIREMESGSSVWSKPRITKFGNPRVRNMLYMAALVAIRHNTKMSDFYLRLVNKGKPKKLALIAVARKLLVVACAILNSQKPYEENHISYYNKDLVQIA

SEQ ID NO: 118743 - protein, 429 aa, unidentified
MSYRIAGIDVHKKMLAVVVSDVEVDAEFHLEQCMLGSSPGHLRLLSEWLIEQQAEEVVMESTAQYWKPVWEVLERYWKPLCEKREGAKRRSGKLHLAQAQSNRGRRGRKRDFADAERLVKRLVARELTLSFVPDAEQRLWRTVTRKKFQLRRARIRLQNQLESLLEEAHIKLSSFVSDLLGFSARRMLKALAEGETNPAALAALADERLRATPEQLSDALGACTELNDVYRRLLQMALEECRLIDEQIGKLDQEMASLLSQHQDAVERLAEVPGLGVDSAQQIIAEVGPSAATFPSEKCLSSWVGACPGDEESAGVNYNHRSPTGNRHMRRLLNQAANAAARTKGSIFEIVYRRSVPRLGHNQAVGVIAHRLCRLIWLILHQRIRYEERGPAVSKRSKQLRTWKMIRDLRRLGYRIELPNPQPSQAQAQ

SEQ ID NO: 118744 - protein, 418 aa, unidentified
MEVLFPCCCGLDVHKDTVVACLVRSVTAGVRTKETRTFGTTTGELEALGAWLRAVGGTHAAMESTGVYWKPVFNILTEPGDDLAVWVVNAQHARAIPGRKTDVKDAEWLADLLQHGRVRPSFVPGREQRELRDLTRTRTSLVDERSAAVKRVQKVLEDANIKLSGVATDVMGTSGRAILAALLEGTADPAEMAELARGKLRAKIPQLERALAGRVREHHRQLLALHLGHIDFLEGAIAELDARIADKTRPFEAELARLDTIPGVDRRTAEVLVAEIGVDMAQFPSARHLASWAGMAPGNNASAGKRKGGKTRQGSKHLRRALVEAARAAARTKQPGRTAFAQQYRRIVVRRGPKKAAVAVGHAILVTAYFLVSRHTTYREPDPSQFDDRRRARVRQRALDQLRALGYHVTLAPKEVAA

SEQ ID NO: 118745 - protein, 475 aa, unidentified
MPPPGMTAKAQYKRKRKAKSQATHSGMAVVNPNAAAIDIGATMHAAAVGADRASDPVRSFGTFTADLHRLADWFAECGVKTVVMESTSVYWIPIFELLDERGFEVILVNARDAKHVPGRKTDVSDAQWLQRLHSYGLLRASFRPKGEIVELRAYLRQRERLLDTAASHIQHMQKAMTEMNLQLHHVVSDITGATGMRIIRAIIAGERDPAVLASMRDTRCHSSAEVIEKALTGHYRGEHLFVLEQALALHDVYQQKVAACDIRIQSVLKELSSIRRRKEDARADGSGSPRRRSRQSNGPDFDVGKALHSLLGKDLTRIHGMGPYLALKLVSECGDDLSAWPSAKHFTSWLCLAPSNKISGGKVLSSRTRRSGSRAASLLRLAAVAIGRTETALGAFYRRLSARAGKSKAVTATARKIAVLFYNALRHGMDYIDPGASYYETRYRERVVKNLHRRAKAFGFVLQAADISAAEQAVS

SEQ ID NO: 118746 - protein, 355 aa, unidentified
MLYLGIDQHARQITISLRNDDGDVVQARQVSTHPEKIQAFFQQLTRDRLQTDDEFIAVLEVCGFNDWLIRMLQDYRCHRVILIQPDDRKKRKTDRRDAAALSELLWVNRGRLLAHKPVRGLRQVDLAASTDQANRRLTTLRKEVREARTRLINKIRHILRRHNLQWQMPTKTFPTKPAIAWLKNLVLPEIDRLEMNHLLADLDHVQQRFQELEKVIGERCGASQEAVLLSSMPGVAYFTATALACRVGRVERFPRSHSLANYWGLTPGCRNSGENNQRLGSITKAGSSMARWLLAQVAHQALRKDARLREWFKQIKRRRGATIARVAVMRKLATIIWHMLKKRKTYAECREFATA

SEQ ID NO: 118747 - protein, 385 aa, unidentified
MRNKTFVPREYDVFAGLDVDKKSIAATFSGHQGFIRSLSMPYKVEDLLNHVRNHFADQKVAFVYEAGPTGYGLYDGLAAQGYTCLIAAPSMIPRAPGQRVKTNRLDSKALSESLRGGQLKSIHVPSPLYRQLRHLTQLRDTMMSEAVAMKQRIKSLLLFEGIAFPPAPAGSQWSFIVKAKLRKLPCSNTVRFKLDQLLDSLEFAEKQVFKSTKEIRRFCQTDPELSQCIEYMMTVSGVGWIVASQLLARIGDWRELENIRQLGGFLGLVPTEHSTGDKTDRGPITHTGDGRLRSKLIQASWSAIRKDGELREFFRSVCQRHPRKVASRVAIVAVARKLSVRISVVLMKQRPYEVRKKVHSAPLTQEETSPQGTTRRRAEPGGKNS

SEQ ID NO: 118748 - protein, 338 aa, unidentified
MNLSRIGLDLAKQVFQVHGVDRHEHVVCRRQLKRAQVRDFFRQLPPCLVAMEACGSAHYWARELRELGHTVRLIAPQFVKPYVKGDKHDAHDAEAICEAASRPSMRYVPVKSAEQQAVQSVHRVRSRLVRARTALCNEVRGLLGEFGLIATRRGRAATMALLETVMATEPASLPAPMGELLRELKDELQTLEARIARLERQIQAHVRGDARIQRLLAVDGIGPISASAVAASAGDARQFRTGRQFAAWLGLVPRQHSTGGQQRLGNISKRGDTYLRTLLIHGARAVVRCCANKTDARSRWLQGLLQRRPANVVAVALANKNARILWALLSRETCYRPG

SEQ ID NO: 118749 - protein, 388 aa, unidentified
MIQVDDLSRSLIAFEQISTLVIVVELSQSSWLAAGVVPGIERRPLKKLDPDPTALLHLVEGWRDRATKAGRAITRTVLAFESGRDGFWLARWLRVRGVETFVMHSTSVSVSREPRRAKTDRLDSEMLIRVFLGWLRGEPHHCKMVAIPTLEEEDARRPSREREILVSERTRIINRMKAALVRLGIRGFKPGLLTAPQKLDALRTPEETPIPPNMLDEMRRDMARLAWVREQINAIEQARLERLEQAPATGRHAMVRMLARVIGVGVETADMLVQEVLSRNLRDRRAVARYAGLTGSPDESGSKRREQGLSKAGNARVRRGLIQLAWRFLRFQKDSALAQWYRGRTEDVAGKRKKTMIVALARKLLIALWRLVTIGEIPVGVALRTAVA

SEQ ID NO: 118750 - protein, 455 aa, unidentified
MQAPVEIAVDEVEQVVARVAGIDVAKASGMVCTRLPHESVPGRRVTRVWPVKSTTAALGELADQLREQGIERIVIESTSDYWRPFFYLLEAAGLSVWLVNAAQVKHVPGRPKTDKLDAVWLAKLAEKSMVSPSFVPAEPMRAVRDLARARFDLVEDRARVKQRVEKLLEDALIKISSVLTDVHGASGRAMLEALIAGQRDPKILAELARGRPRARRVELEAACSGRFTDHHARLARLLLDQIDQLGKHIDTVTTLLDEAIAALPAPVPDPTGGSTADAGTPGPSTVDTGPAGYACAVERLCQIPGAGPDSVRAVIGEIGLDMSVFGTARRLCSWAKVCPRTVESGHKKGRARTGKGNRYLKAALGQMAVGAAKTDTFLSERYRRLVKRMPKAKARAALARSILVIIFQLLDDPTAEFADLGTDFYTRRIDKDRRAHQLTRQLQALGYTVALTPAA

SEQ ID NO: 118751 - protein, 425 aa, unidentified
MHSISNKKINQVTDQTLVVGMDIAKKKHYACFVDERGRVLKKSFPVLQSREGLEWLYQCIVKAMEEFEKTEVIVGIEPTGHYWLNLAYFLDEKGIPLVMTNPMHVKRSKELDDNLPTKHDAKDALVIARLVKDGRFSYPRILKGMEAELRVGATFRSKLVEEQGAVRNQMIRWLDRYFPEFTQVFPSFGKMALAVLEYTPFPSDLAGKELEEVLALYRQSEGLQSPQKPKAKKLIELAQHSIGVTEGQQMARIEIATLVRRYRQLEEEIEALNEPLTELVQTSVEYEWLKTVPGLGDATIVELLSEIGSFSHYQDPRQLLKLAGLTLRENSSGQHKGQKRISKRGRRRLRALLFRVMMPMIRHNEAFRQLHDYYTTRPDNPLRKKQSIVVLCGKLLKVLHAVCTKHQAFDAKRMMQDIFGLETAA

SEQ ID NO: 118752 - protein, 357 aa, unidentified
MNDATTCEMKMTIGLDVGDRHIQMCVLADDGETIEEGRITCRPQALIARFGGMPAARIVLEAGTHSPWISRILAELGHEVIVANPRRLRLIYENDSKSDRVDAQYLARLGRLDPALLSPLAHRDEQTQADLAVIRSRDALVRARTSLINHVRGSVKAVGGRIPGCSTRSFAKTATGRLPEELAPALGPILDSIADLTETIRAYDRAIERLCREVYPETAAIAQPSGIGNLTALAYVLTIGDPARFRRARSVGSYLGLRPRKAQSGKTDPQLRITKAGDEMMRRLLVGSAQYILGPFGPDTDLKRWGLAIAERGGKTAKRRATVAVARKLSVLLLRLWTTGEVCEPLRNSGGVDAVSA

SEQ ID NO: 118753 - protein, 363 aa, unidentified
MNVHQLATQYVAGVDLHKRSVTICIMDLRGNIILERTFGRRKTARLSACLAPYGTDITIGVEATFNWYWLSDWCDERGIPCVLGHPLYLRRKAIGKNKSDRIDARHMATLLRLNDFPCTAPYPLEWRATRDLARQRTVFTAMQTALKLRRGCIEEQHLLSERHELLLNGGRARWYADVWTGFDTAEPVLDVLAQQIRAIEQRLEQQGPLHFPAGYALLSAVHGIGTVLASTVLYEIGALERFPTVQDFSSYCRVVTPQCDSDGKRVGYGNVRSGNPYLCWALHFMVETTRRRTPQIESLFKELKRRRGLRDAHRILAHQWAVTIYFMLKNQEPFSLERFLYRFRGTVAQGAPIQCSGHAADVA

SEQ ID NO: 118754 - protein, 349 aa, unidentified
MGEVSTIGLDIAKNLFQIHGVDADGTVVIRKRIGRARVLEFFADLPPCRVGMEACATAHQWARELRKLGHDTRLMPPTYVKAYVKRGKNDAADAAAICEAVTRPSMRFVPIKEVEQQSVLMLHRARDLLIRQRTQLINALRAHLAELGLVAAKGREGLHQLVAVVTECGNERLPGNARFACQAIVTQLHAVQIEISGLDKRITQTHRANADSKRLDTIPGFGVILSTAVAATMADPKAFRTGRDFAAWIGLVPRQNSTGGKQRLGSISKQGDRYLRRLLVVGATSVINSARARPYKYPWVIELLGRRPTKVVAVALANKMARIAWAVLAKGKPYRAPTCSSNAVALAPA

SEQ ID NO: 118755 - protein, 353 aa, unidentified
MTSLTDLREVVDVVIGVDTHVHTHSAAVLDAATGGVLDEITVEATTEGYAELVEFANNHATLRAWAIEGTGGHGAGLSRHLLEMSEIVIELDRPKRAGRRNGAKSDPLDAIRAAREAMARPQLGTPRSGAERQALSVLLAARRSAISASTEAQLQVFSLVIAAPEPIRARFRGQKVAAMLNTAANLRVHSSWDIETASTVVALRSLARRAHALMKEAREHQKAIVTIIRSWRPDLLEQFGVGPIVAATVLCAWSHPGRIHSEAAFAMLAGVAPIPANSGQVTTRYRLNRYGDRQLNRALHTVVRIRIQYQPATRDYVARRGAEGKTSREIKRCLTRYVARDLYRLLENGAAAA

SEQ ID NO: 118756 - protein, 339 aa, unidentified
MKYTLIGVDIAKHLMQIHYVDPHSGELVDKKVKRNAFLTFFSNREPCLIGMEACGGSQFWARELKKMGHEVRLLQGKFVKAFVMGNKNDVMDARAIWMAVQQPGKSVPVKSAEQQAILALHKMRSQLVKFRTAQINAIHGILLEFGETINKGRTALDKALPEVLERLKITLPQFFIYQIEDQHRRLKDLDAQINGIEKQLAAWARQDDDCQRLMQIPGVGTLVATAALATMGNTGAFRSGRVFAAYIGLVPKQTGTGGKIKLLGISKRGDKYLRMLLIHGARAAALLSKEPSPWVTELIKRRPVSVAVVAMANKIARTIWALIHYKRPYDKGHISVMPG

SEQ ID NO: 118757 - protein, 348 aa, unidentified
MTVYIGVDFHARQQTISYLTTEEGVIQHLVLLHDNPVAVRAFYAQFAGQRVVVGFESSGYAAWFEELLEELGCEIWIGHATYIRQFAKRRQKNDRRDADLILELLHTGDFPRIHRYSRTTREMLQQLRYRQRLVKMRTMAMNMLLFMASSRGVSLRTQLQSKRGQAKLQQLALPATLGTQRDELLSLLQTLNEKISTIERWLEQQTKADLAVQRLQTHPGIGLLTSICLRYTLEDAGRFANTRKVSAFAGFDPMQDQSDERNRMGAISKQGSRWLRFYLVEAGQVAIRKDADLQRVYQRVARRGGHAKAKVAVARRLLVRAFIMLRDEIDYAEFQRRGVAARSSRGTA

SEQ ID NO: 118758 - protein, 435 aa, unidentified
MSKEDEETTMSARETTEPEFVAFVGIDWADQKHVWSLQKADSRQREAGELEHRPEAVEAWVGELCRRFGYGPIAVAVEQVKGALVYMLRKYECLHLYPVPSTMSASMRAALYPSGAKDDPRDADLLLELLVLHRDKLRRLTPDNEATRRVQNLVEERRKLVEEKTAQLNRLTGYLKVYFPQMLEWFAKLDTKLVCDFLERWPSLEELQKVPSAEVKKFFRHRRGRQGELTEWRVQRIGQAMPAIRDGAVIEAKRAVVQVIAQLLRTLLEGIATLDRKIAEAAEAHPDFFIFQSLPGAGAALAPRLLAALGSQRDRYGSAAEVQKYSGIAPVTEKSGKKKWVHFRWACSKFLRQSFHEWAGHSIAQSVWARAYYQQQRERGKEHHAAVRALAFKWIRIVFRCWQDRVAYDETRYLAVLAKRGSHLTSAFAAAAVSV

SEQ ID NO: 118759 - protein, 350 aa, unidentified
MDKELYIGVDFSKQTLDLAYYDGESIDWKKAHIKVSNNNAGFKKIGSWVAKVSKGFDIVLFCMEYTGLYTQNFRLWLEEKHYIYRMVKPRKMHRFEPDLDDGLRSLDRIKTDELDSFRIAIYCEQNHRKILRNPSKLPPPVYFKLKRLLAERKQTVKQSVLYKQQLHDICAYDTDLSVERKNGQLKTLNDALKGIDNEIDMYIKEDADISKNFSLLTSIPGIGRVVALETIVLTENFMAIDNPRKYACYIGVAPFKKESGTSVRKGSSVSKKGFKQAKADLSIACLVCMQHIPNIRDYWERKRKEKCSGIVFNAIKFKMILRMFAVIKRGTPYVETDNYRNGKNKQPGVN

SEQ ID NO: 118760 - protein, 345 aa, unidentified
MTVYCGVDFHARQQTIAFCDTQDGEIKFIQLKHDDRDVLRRFYTQFQSPVIVGLEAGGYSDWFERFLEELGIEAWFGNPTEVRRRARSRQKNDWRDAELLLDLLIKNEFPRVFRQNADSRAVLAQLRYRHKLVQLRTQVTNSLHALAIREGLSLQATLLTKAGRSKLAALSLTEVKAKQRDEWLALIDQLSENIKRVEQELSKLAAHNEQVIRVRTHPGIGLLTGLALVHTLTPISRFANSRKVTAYVGLEPREFTSDSKQRWGGISKAGSTLLRFLLVEAAQHAARADSELKNTYQHLSARRGKPKAKVAVARKLLVRAYILLRDEIDYATYLRRTVAVRSARH

SEQ ID NO: 118761 - protein, 458 aa, unidentified
MPRKSSNKAKSQRRRERALLQKVHLNAAGIDIGANAHWVAVPEDRDASPVRSFGVFTRDLVALCDWLKSCQVETIAMESTGVYWIPLYQMLERKGFEVRLVNAHHVKNVPGRKTDVKDCQWLQQLHTFGMLAGSFRPEAQMCVVRSYLRLRDTLSKDCNSLVQRMQKALTEMNVQIHRVISDITGVTGMSILRAILAGERDCLKLAQLKHPQIKSSAQDIAKALDGDYCQEHLFALGTALEFYDSYQLKIMACDRHVQDALSAFELKGKAPAPDVSRMRCAEKRLEALRRHHLEEMTGADLTKLPGLDLLAVERILSEIGLDMSRWPSEKHFCAWLNVAPNNRVSGGKILSSKPRKNANRAAAALRLAAQSAMQSKSAIGAFIRRIKSRLGAPTAINAAAHKLARLVYRMLKFGKASVEIGQEAYEKFFKERILRNLQRKAHLLGFQVTPITVTVPVS

SEQ ID NO: 118762 - protein, 429 aa, unidentified
MAAGQAVMCPGRTLLVLESSHAAVVAAADPVFVGVDWGNSHHQLCIVDAAGGIVDQGRFAHDVAGLHLLEGRLRRHADIVGVSIERSEGLLVDAPQQQGYRLFCVSPKMSARARERYRLAPVKSDAFDAFVLADSLRHEHRHWRSLAVPSPLLAELRALTRDRERLIWNQRDVENQLRAVVQAYHPTVLHLFSSLDRDISLAFLRDYPTPAHAGRVGPARMAAFCARHGYSGRTKPEVLVERLRDNLLSASSGTTAGKALSAVLFVDQLDLLNSQVRTMSKRIRERLTAHPDAQIFLSFPGMGKITAATMLAVMGEDRMRFPTADVLLAEAGAAPVTQASGRTRRVRFRYAANKRMRHAIDWWTFVSVRENDWAREAYRQARARGQQHNRALRGIAARWTRILWRCWTDHSRYNPELHLNKQPTRPVSG

SEQ ID NO: 118763 - protein, 348 aa, unidentified
MNGDYAGRQVVGMDLHRRRSVLVRMTADGRKLETARITNSPAELRWVIARAGKRPRVVLEATYGWYWAADTLAAAGAEVHLAHPLGVRGFAYRRVKNDEKDAADLADLLRMGRLPEAWIAPAEIRELRELTRYRIKLVRLRTSCKDQVHAVLAKLGIPVTCTDIFGVQGSRWLDGLALAQPYAGKVASLRVLTDELTAEITVLEEVIAGLLAHHDGYHAIRALPGIGPVLAAVIVAEIGDITRFPHPARLCSWAGLTPRHRESDVKVRRGHITKQGSPIVRWALIEAIQHVPADHLLRRRKEEILARRGDQAKNIAKVATARQLLTWVYYAMRDGQVRALASAERQAA

SEQ ID NO: 118764 - protein, 371 aa, unidentified
MNSIVYVGMDVHKEQYILCCYSYDTDKVEYKQTIPSDYKLVLKYMEQIRSRYEGEVSFVCGYEAGCLGYSLYHQLKDHAVDCKILAPSTMAITNTHHVKTDKRDAANIARCLAFHTYSEVYVPDNDDNDVKEYIRMRDDQKLYLKKVKQQILAFVLRQGKRFEGGKTYWTIAHLKWLKTLELSDLQREALDEYLLTYEYLTEKISRFDERIEELASVERYEEKVKHMSCLLGIKTHTALSMIVEVGDFERFEKAPKFASFLGLVPSEDSSDTRVNRYSITKAGNSHLRRLLVEAAQSYTRGNVGHKSVALKQRQKGNPPEVIVYADKANERLRRRFYKMTLNKGDNRNVAATAIARELACFIWGMMTEHVS

SEQ ID NO: 118765 - protein, 412 aa, unidentified
MSIDPSKAAVRVTGGVDWAKDDHAVCVAGDQGEALERFTVRHDAAGLRQMAARLLRAGAQQVGIERGDGPVVDTLLEAGLTVFVIPPGQVKNLRSRYGSAGNKDDRFDAYVLADVVRTDARRLRPMERDSERTAALRSAVRARRDLVGHRVAAANQLRAHLQAAFPGATVLFTDIDSDITLAFLTRFTTQEQADWLSPLRLAAWLKSAAYSGKKDPALLHARLAAAPRGNAGPHASAHAEVTLALVAVLRALKTQVKALAASIETQLAAHPDAEIFQSLPRSGTLRAARLLAEIGDARGRFPTRDSLTCLAGVAPSTRQSGKVKAVTFRWGADKQLRDALCDFAGDSRSASPWAADLYDKAIARGCDHPHAVRILARAWAHVIWRCWQDHAPYDPATHNSLQNLLRQQQIAA

SEQ ID NO: 118766 - protein, 331 aa, unidentified
MKKTQIIGIDVSKAKLDVFIHSIRHHFTVQNDAQGFAKLLEVIFTLTKCKQQDLLFCFENTGKYSKMLSVFFNSQEILFVMAPALEIKKSLGITRGKNDKIDSRRIALYAYEKIESLTCTVLPGEKIDQIKSLLSLREKLIKHRTAYKNGLTDLNDCYKEGENDMIKDVQKRLIRILSEEISQIEKKIKDIVKNDNSISKSFKLLISVRGIGEIVAYYLIAFTANFTTFSNARAFACYAGIAPFGNSSGTIKGTPKVHPFANKQLKTLLNLAAMSAIQQRGEYQIYYIRRVNELGKSKMSTMNIICNKIIYRAFAVIQRETPYVDLLKYAA

SEQ ID NO: 118767 - protein, 350 aa, unidentified
MLIIGCDYHPSFQQIAFVDTATGEYGEQRLEHMEGAGQFYRDLRARGIEARIGMEASGYTRWFEQLMAELGFELWIGDAAAISRKRVRKQKTDKQDAELLLRLLMEDRFPRIWVPSREDRDLRQLLWHRHRLVQMQTRLRNQLHAVALNEGVRLKKRLWRPKGRAQLESLALMPWASRRRHDLLGLLDQVDATIAELTTAIEQAAEKRPEVVRLMTHPGVGALTALAFVLIMGTPERFPRSKQVSSYLGLVPTEESSGERRHLGHISKQGSTLLRFLLVAAAQVTARSDPDWKRRYLHLAMRRERAIAKIAMARMLAVRLYWMWRNGCNYAQLPKLGSHAGQPGNRLGRQ

SEQ ID NO: 118768 - protein, 408 aa, unidentified
MKTLLRRCAGLDVHKVEIVACLRLVEKGKVARRVRRFPTTTQGLLELVEWLEGAGCSHVAMEATGVYWKPVWHILDGHFALILANAMHVKAVPGRKSDVNDATWLADLLAHGLIRASFVPPTPIQELRDLTRTRKQLTREIVQHVQRIQAVLEEANVKLSSVISDIMGPSGRRILTAIIAGETDAEKLAALGSERLGCGRAALSEALKGRIREHHRFLFAQHLRTIEQLEESVAAFDARIAGALAPFREVVERLNEVPGLGRIAIETIIAEIGTDMSRFPTAGHLVSWAGLAPRLDESAGKRRSTRIRNGAPWLKPALVQAGWAATRKKNTYLQAQFLRLRSRRGPKKALIAVAASILTIVYHMLRDGTFYRDLGPEYFARRSPAKLAANLANRIRNLGYHVEISATT

SEQ ID NO: 118769 - protein, 343 aa, unidentified
MQTVTTIGLDIAKSVFQVHGVDAAGQVVIRRQLKRRYVLAFFQKLPPCLIGIEACGSSHHWSRELRALGHTVRLMPPAYVKPYVKRQKNDATDAEAICEAVTRANMRFVATKTPEQQSCLVLHRTRHLFIRQQTAVINAIRAHLAEFGIVAPVGRNGVEQLLGIVADPNDKRLPEVARACLAALGAQLRVLKAQILEFDRMINAWHRSNEASKRLDEIPGVGPALATALIASVADPKAFRSGRDFSAWVGLVPKQRSSGGKDKLGSISKQGDRYLRSLFTAGALAVIRYAKIHGTGHRPWLAALLARRPTKVAAIALANKIARIAWAMMAKGECYKEPVALAA

SEQ ID NO: 118770 - protein, 315 aa, unidentified
MSDVPCFVGIDVAKAQLDIALRPSGERWAVPNDASGVMTLVARVQALKPTLIVLEATGGLERAATVALAAAGLPVVVVNPRQARDFARATGPLAKTDALDARALAHFADVIRPTPRPLPDAQTQELRALLGRRQQLIGMRTAAQNRLAGASERLTKDITAHMTWLNAGIATLDNDLETLLRASPLWRENDDLLQSAKGIGPVSAHTLLLELPELGTLTRQQIAALVGVAPLNCDSGTRRGKRTIWGGRAHVRTVLYMSTRVATRFNPQIKAFYERLLAAGKVKKVALTACMHKFLTILNAMLKHRTRWQPQEVQS

SEQ ID NO: 118771 - protein, 416 aa, unidentified
MTEAIKAYAGVDWASAAHQVCVLDAGGKLLGEHAFPHDGQGLAAMAAWISATAVAEAPEVAVSIEVPHGPIVETLMERGFVVHAINPKQADRFRDRFSMSGAKDDRRDALVLADGLRTDRHCFRRLEPVDAKVIELREWSRIAEDLQGERQRLVNRLRDQLWRYYPQMLDITPDLGTNWLLDLWVLAPTPAKAKRLRETTVAKLLKRAQIKRLSAAQALEILRRMPVAVAPGATEAAVAHIRTLIERLHLLNRQLKEAHRSLDVLSNALIGEETEPEQARKQHDVTILRSLPGVGRIVLATLLAEASEPLRRRDYQGLRALSGVAPVTKRSGKQIVVVMRQACQVRLRTAVYHWARVAVMQDPHTRTRYAALRKRGQPHGQALRSVANRLLAMACAMLSSGTLFDPNRMSQRQAAA

SEQ ID NO: 118772 - protein, 373 aa, unidentified
MPRYSTAFGMDVHLRSTTVCALDAETGEAVTRRFRGNPWGEVAEWMSGFPGPSLAAYESGYLGFAPQRELSGLGVDCVVAAVSKVPRSAADLSSKNDRNDAARMAKAILSHDVTPVWVPSPEIEGLRDLAAAHDDATARLAAAKQRLLAFLARRGYAYGGTTPAGNPRRYWTYGFLRWLDKVRPADDGGIRALAALRNEVEAADETREALLAEYRAAVAAGPLSAEVEALQSIKGCGFALAAAFASEVGDFSRFRSGRQVTAYFGLAPKQRSSADSVRLGGISGAGNALVRKLAVEGSWCYAQAGHQPKLMPKGSGVPLEIRMHGRKGSERLLRRREEMIARGMPQAKANAATAAELVRWLWALGTMCREAGE

SEQ ID NO: 118773 - protein, 340 aa, unidentified
MKHSVIGMDIAKQVFQLHSVDAETGEIERIKLRRDEVLPHFACRTPALVAIEACGSAHWWARKLVELGHEVRLLPPRSVRPFVLRNKTDAADARAIWTAVQQPDTRFVAVKSETQQAILALHRLRAQLLKFRIMQTNALRGLLYEFGEVLPTGYAALAKALPAALAGLDARLPAMLVDSLREQWARVLRADQEIAAIERRLRIILRDTPSCQAVAEIPGVGLLTATAAVASIGEAKTFKSGREFAAWLGLVPRQRGTGGRVRQLGISKRGDVYLRTLLMHGARAVILRYRHVPWLDALLRRRPYNVVVAAVANKLARTIWAVLAKGRPYDPAAFSAVAAT

SEQ ID NO: 118774 - protein, 476 aa, unidentified
MTKRAASQATTLHSIPQLPDETLYVGIDVGKYSHYAGFISRTLLQRHHHFEGCPTLTFSQSREGFSALVGRIGEWVPLAQATVLLEQTGHYHRVLVQYLQELDIPVYIMPVQKRPVGLLKSDKRDALSLANHLYNQLELGTQLPDTTHLVRRLLPPTEAAQQLKAWMQHRYELIHECTRRKNKLTAICDELFPEFVTVIKDPNGPTALKLREHFPTPQAMATAPLAALVASRGRGLPSNATLVKLQRLAAQSIGTKDLIRQRGLALEQSQLVRELRLFQDHVQQLDTEILAVVAHAREGQILTSIPGIGPIQAAAIIAAIGNILNFPTAAQLKAYCGWAPKVAQSGISLNRAQLTPHGSRQMKQVFFLLVVHAIQQENVWARLYQRLVPKKCAFDDRYGSYRNKLKVIGRVAGQIIELVYALLKQDAEVLSQVPVGAVLPAPLCYDADVHERHVNGAYRPLKHNPPNRKLILLPSP

SEQ ID NO: 118775 - protein, 315 aa, unidentified
MEGEGPSVGIDVSKSVLDVSAYPSGKTWQVEYSAPGITALAEELAALGPAVVVVEATGGLEISLTAALGVAGLPVAVVNPRQVRDFARATGRLAKTDKLDAQLLAQFGAMVQPPARPLPDAQHRELQAIVTRRQQLIGMLTAERNRLRRTTPRVRHQIEVHVRWLREQLREVDRDLENFLRSSPLWQEDAKVLRSVPGVGPIVTATLIARLPELGSLNCKQVAALVGVAPFNRDSGTLRGKRAVWGGRGALRTALYMATLVATRHNPVLRAFYQRLCDAGKPKKVALIACMRKLLIILNSMIKNHRTWNPVAQNS

SEQ ID NO: 118776 - protein, 317 aa, unidentified
MTQTITKTAGIDTAKLKLDVAVHGGTEHWQVANAAPGWQMLAANLAKAGVTRVGIEATGGYERGVVEHLRAAGFVVLVLQPIQVKAFGRVHLRRAKNDALDAALIAACAATIDQPRIVPDPRLAELAEYLTFLEQIEEDIARFKTRLEHIDEARLRRLVTNDIARLKARRSAQILLIGRQLRAHHDLARRLDLVLSIPGIGERTALALIVRMPELGQISREEAAALAGLAPFDDDSGTHKGQRHIAGGRGRLRRSLYAAALPAAFRWNKALVALYARLTANGKAHNVALIACARKLLIYANTVVQRGTPWTENIAII

SEQ ID NO: 118777 - protein, 416 aa, unidentified
MENQPNSITFEQVIERGCGIDIHKEVLVATIRGHGIKEQTRSFDTFTGSLERLRDWLKQHEITHIAMESTGVYWKPAYNILEEDFEILLVNARHIKNVPGHKTDKKDSRWITKLLLSGLLKGSFVPPEHIRQLRDLTRYKRKVIEQISSEKNRVHKLLEDANIKLSSVVSNLSGVTAGKIIDAMMDGQEDVSELVKLRHGKMHSSPQKLAASLQGRLTDHHRFMLQTYKESIESKKAIIAKLDEQIDRQLAESELVLDAELLATIPGVGKEAAAYILAEIGDNMEQFPDEQHLASWAGMSPGSNESAGKKKSTRITHGDKYLKILLVQCAWAATRTKNTYLRSKYESLVGRRGKKRALVAVGRKILIAAYFILKDKQAYKDLGPMYLQQRNKNRKIDRHLKQLEELGVQVEIRHVA

SEQ ID NO: 118778 - protein, 327 aa, unidentified
MTTASVFVGIDVSKARLDVALRPAGTQFTVPYDDARMATIVARLGPLSPVGIVLEATGGLEVLLSGALASAGLPVAAVNPRQVRDFARATGRLAKADTLDAQILAQFAEAVRPARRPLPDANTQQMAALVTRRRQLVEMFTVEKNRRGSAPRGTRDSIQTHIDWLAQHLTQLDQDLTTAVQASPVWREHDELLRSVPGIGPVVTRTLLAELPELGTMTRRQIAALVDVAPLNRDSGNFRRKRTIWGGRATVRAVLYMGALVAARHYPVLKAFYQRLGRRARRPRWHSPPACANCSRCSMSCSNIGPHGEAFLLRQLDIQDSRCGFLT

SEQ ID NO: 118779 - protein, 345 aa, unidentified
MRYSIGIDMHQRYSFCSVKDTVTGSRMRTRVSHTGDAVPAFLAAYRGVAAAAVEATRNWYWMVNALDAADIEAHLVDPTAAKPLISRRNKTDRIDSDGISDLLAEGLLPESWMAPRPVRDGRELLRGRMTLVALRTATKNRLHGLVERYLPTPVIADLFGVRGRQWLAHVTLPPHAQFVLERQLALLDQLEPLLLAYEARIHEVVRRTPEAQRLDTLPGIGPLLALTIAYEVGTWTRFPSHEHFCSYSGLAPTIQASGGHTRYGPTPKASNRFLRWAFVEAANVIASHPSPKPVYQVFAGVRQRRGYGKAIVALARHLAVAAFHMLRKGEGYREDTMQTVLVRNR

SEQ ID NO: 118780 - protein, 338 aa, unidentified
MRTYAGIDLHSSNCYLAVIDEQQRRLFSKRLPNSLDHILAALQPFKDELAGVVVESTYNWYWLVDGLQEKGYRMHLANPSAIRQYEGLKHTDDQWDAFWLAQLLLLGILPQGYIYPKAERPTRDLLRRRLLFVRHRTAHVLSLQSMVERCCGRRISVNEIKKMTPQEAAALFSDPQLGLTARFQVETIGFLSQQIRSIEKAVLPQVKLRPEFVILLAIPGIGKILALTIMLEVGDIRRFAKAGNYASYCRCVKSQKLSDTKKKGEGNRKNGNRYLSWAYVEAANFAVRYSPRAKAFHQRKCAKTKKVVAIKALANKLARASFYILRDQSAFDEKRLYG

SEQ ID NO: 118781 - protein, 352 aa, unidentified
MDATTVAIDLAKDIFEVALANRAGRILERKRLTRRPFERFVDELPAGTEVIMEACGTAHYWGRRCQARHLLVRLFPAQYVRPYVRRNKTDRTDTEALLEAARCGGIRPVPVKTVEQQTLQALHRVRTQWQAARTARINVVRGLLREQGLPIPVGARTVLARVAGILEAAESALPDLLRHTVSLVVDEIRALETRIATIDRQLTQVARTHPVAVRLQQIPGVGVLTATAMVGAVNHIHAFRRGRDFASYLGLTPRESSTGEHRHLGGISKRGDVYLRCLLTHGARAVLLTAQRTVRSAPHRATTFQQWAVTLAARRGHNKAAIAVANKLARMIWAVWHYDVDFQEQPRGIVAA

SEQ ID NO: 118782 - protein, 423 aa, unidentified
MGCGSDQVFTAFVGIDWADTKHDICVQAAGSERRELTCIAHEAGQIESWACSLRERFGGHVAVALELAKGPIVYALQKYDFIVLFPINPATLARYRQAFKPSGAKDDPTDAELALDLLVCHRDKFTPLQPQSAPMRTLIHLVEQRRQLVNDKIRFTNRLGNALKQYYPQVLAWFDQRDTPLFCDFLVRWPTLAQVKRAHRAGLERFFSNHNVRFANVVEERIRAIKAATALTTDEVVISAFRLQVEVLVEQLRTTLQAIDRFDRQIAKLAPTLPDYALFSALPGAGPHLAPRLLVAFGEQRERFRNADELQRYSGIAPVTERSGKKSWVHWRWQCPTFLRQTFVEWAAQTINKSFWAGAFYRQHRDQGSTHQAAVRALAYKWIRILYRCWQTHTSYNEVTYLNALQRRGSPLFRHIATASETG

SEQ ID NO: 118783 - protein, 353 aa, unidentified
MSSNMKKYIGLDVHQESIAIAVLNSAGKLVMESIVETKAATLLEFLHGLRGELHVTLEEGTWAAWLYDVLKPHVSEIVVCNPRRNALLKEGSKSDKVDARKLAELLRAGLLRAVYHGENGLRTLQELARSYLTISKDQARVMSRLKALYRSWGIPCSGTQVYAPRHRDRWLSRIAQPGVRRRAELFYQQLDGLLVVRHTVRGELLAESRKHQAVKILRQIPLIGPLRAALMQTPHRFRSKRQLWTYSGLGVETHDSAQHRYVDGQLQRSKKPQQIRGLNQNHNHEMKEIFKSTALSASRCAGPLQDFYAGLLAKGMKPDMARLTLARKIAAITLTLWKKGEHFDAEHLKSQAA

SEQ ID NO: 118784 - protein, 401 aa, unidentified
MRCIFGIDVSSKSCNVAVAVNKHLVEELKLSLDAIGFNQLKVALDVYTDPEVVFEATGVYSRRLERFLTDNGYHFIRLNPLQARIELTSFRYNKTDVNDAQNLALSSFDRKRQLTTPTARVYQDLRDLNRFYQNVNEDVVRLKNRLHKVLQLTFPELEQILSTTDGEFYWQIVDHYAHPTLVSSEDQTQIIAFLASISKKKVTSTYLQRIAQRLTALSHQAFPAVAIDSPKVMEIRYYAQQLIHGHQQKAELIEQMVTIAKELPEFRNLISIPGFGENTVVTLIAEFGDIRRFKSSNAMNAFVGIDFRHYESGKFVAKDTISKRGNAIARKILYKAVLNCVIASHYHPNHIGDFYRERKKQSSSPQTKKIAIGAIHRLIRTMYHLVKNDQLYDYTKVHVDR

SEQ ID NO: 118785 - protein, 369 aa, unidentified
MTHYTTSRSMYSIKIICKDMKKICIGIDVSKETLDVTVIHIESYELVEKLGYSKFDNRPSGFRSMTAWVRKVIKSRGQMDEALFCMETTGSYDLPLCHWLHKNGLNVWRESALQIHCSKGFQRGKSDKEDSEVIAQYAARHQSRYTAFVPDAEAIADLKELICYRDSLVERRKECKVRLANKKETLVNRNSKAWKCIERLSKAEIKRLDKVIGECDEDIRNLMKEDEEMEKNYQHLTSIVGIGLINGAALIAYTGNFKKITTPNKMSCYCGCFTFYEDSGTSVHRKSPYRNACCKMLKGYLRMAAKSAMLANTELRKYSERHREKGKPYAVILNNVANKLLHIMFSLVKHDYDYEYNHEIVRRMEREIA

SEQ ID NO: 118786 - protein, 366 aa, unidentified
MFSAKQSLGGLGSKTAKAKSCTKEMPNRPFILKIEYHHSRANRLNHKENAMNVIGFDISKDTIDVTLLRNSGQVDYIKIANAFEDFEKLNDWIRSKRIRKISISMEATGIYYEEAADYFSAIYQVFVINPLKIKDYSKSQFNHTKTDKADSRLIAEYTKRHLDKLTPFKPSENPTLYKLISLLQQLKQQQNESQNRLHAAKDTFIRATHEAIILLLAKQIDQTAKRIDLMIQQQDSLNMHYKNLQTIPGIGKDTAAILLHHLTDKQFKTANQFVSFAGLSPRIEQSGTSVNKKGRLSRYGHRRLKRALFMPALVAYRIKAFPKLVQNLSQKPKMVVIVALMRKLAKIAYYIHKTQKPFEKMRYQTA

SEQ ID NO: 118787 - protein, 379 aa, unidentified
MDSMTDPQRGIVVGVDAHTDTHDAAVLDDCGRLLATRTFRVNAAGYRELLTWAQRFGVVTAFGVESTGSYAAGLVRYSRAEGLEVLEINRPHPHTRRRCGKNDPIDAELAARHVLAASSVVIAKDTSGIVEAIRQLRVARDGAVKARSAALNALTGLIVTAPEDLRRQLVTRKTTRGRATLCARLRPDQALLHKPVHAAKAALRSLARRVIELDAEIATLDRQLRELVAAAAPATTARVAVSTGHAGALLVTAGQNIERLRNEASFAALCGAGPIPVSSGRTDRHRLSYGGDRDANRALHMIAVCRLRYCERTRAYAERRTAEGKTKTEIIRCLKRYIAREIYHALLADLLPATSRRRPDPIVSITCGAGTIGRTITTT

SEQ ID NO: 118788 - protein, 343 aa, unidentified
MSIVGGFDVHRRQITFDYVDTDTGRLQRGRIAPACRAVLRRWLAERFVGRSDVEFAVEACTGWRFVVEELERAGIEVSLAETADTAAARGRKRRAKTDPADAAHLRELLAGGRLPTSWIPPEQVREMRAILELYKDLRDEHTAWVQRIHATLFHHGVPQLGTGGVASPAGRARLQAGEGLSPAGHQATMVALRVLDALDTELDALHRQIRTFANQQPGCKALQAQYGVGPLTATAIWAMMGDTRRFSASRQAVRHTGLDVTVYSSDGKRAPGHLAKQGPPLLRWALYEAACLASHTRAPDHDFYTSVKQRIDHKRATISVARKIARRSHHILRELGDKAYAAA

SEQ ID NO: 118789 - protein, 408 aa, unidentified
MQVMYARCAGIDIGKDVLVAAIRIQNGSVQRLCRTFRTTRAQLLSMAAWFESVGITDVVMEATGSYWKAIWHVLEGRFGLTLANPAQVKNLPGRKSDVNDATWLADLHAHGLIRGSFVPTPDIAAMRELTRTRKQFVREVNRHTLRIQKILDVAGLKITGPISEILGVSGRRIVKALIAGETNSERLADLVDPHVRATRREIIEALQGQLTAQQRRLLKMHLHLIENLEADIGQIDHDIQKAVKPFRAVVERVMEIPGFSDVSAPALLAEIGVDMTRFPTAGHLISWARLCPRLDESAGKVRSRKTLKSAAWVKTLVTQAAMSAIRTRNSYYRAQYFRIRARRGTNKAIVAVAASLLATVYHVIRDHKPYRDLGADYFQRRDTDRIVRQSVARLKKAGYAVTLTREVA

SEQ ID NO: 118790 - protein, 353 aa, unidentified
MGRRQCKRALAATPHIRVRMSNAARCWEKAMPSSIGIDVSKKKFDVALITAQGKYRCKVFDNDGGGFKAFLDWIKVHVPEGGAQACMEATGVYHEALANFLFDNQMTVFVVNPLRVKRFAESEGLRNKTDEGDAKALARFVAKNDLEVWEAPSKSVRKLQALVVRLESLQTMRQAELNRLDIAHSSVRASIEAVVAALDKEIEAVRSLIRTTIDDDPDLKQRNDLLDTIPGLGDATIPSLLAYIGRPERFKSVKALIAYAGLTPAIRQSGTSLDKRKGLHPAGHRDLRKALFYPAMAAGRFNPIVAAFWQRLKAQNKPGKVIVVACMHKLLAIAYGVLKSRRPFDASLAAKGA

SEQ ID NO: 118791 - protein, 371 aa, unidentified
MEHTRFIGLDIHKERISVAVAESGRSGAVEYLGEIANELGAISKLCDRLRRPGKPLAFCYEAGPCGYGIHRQLTRLGHRCDVVAPSLIPTKAGDRVKTNRRDATMLARLHRAGELTPVWVPDADHEAMRDLIRLRNVVRQIVTRARQHLQGFLLRHGRKHGRGTAWRMAYRRWLSTLAFEHPAQQIALQDYVDAVMDAERRLKRVEEQVFGLLPDWNLRLVVDGLQAMRGIALINAVVLVTEVGDFTRFSNPRQLMAYFGLVPGERSSGETVRRGAITKTGNAHVRRALVEGAWAYRMKARIGRHKVDRIEALPKVVRDIGWKAQVRLCTRYRRLRARGKTANVVNVAIAREMVGFIWSIACTIQSAPRAA

SEQ ID NO: 118792 - protein, 443 aa, unidentified
MSTLMAPPVEPVFAAFAAIDWASKEHVVASVPAAGGRIEISKLKNTPEAVELWAASLRQRFPGTPAAVAVEQKRGAVIYMLSKYDHLVLYPVPPTMSSSYRHAFFPSGAKDDNGDTLLLLDLLRHHRDRLLPLQQDTPDTRLLRFLTEDRRALVEQKVSVVQQLTDCVAQYFPQVRTWFGPLDTPLPEALLERWPSLQQLQRSHPGTLKRFLAEHRSWDNDRIVEQIRQIYDAVPATRDEVVLEACSRKTAACLAQLRVLRDQVAAYDKRIAAVTADHPDAPIFSSLPGAGAALTPRLIAAFGTDRKQWRDAEDLQRFSGIAPILVRSGNCSRVAMRRACPKFVRQTFHEFAAHSIRFCPWAKLLYEHHLKGDKKNHHPAVRVVAFQWIRIAYRCWVNREPYDERIFLAAQRRRNSPFGGKNAANAGIEFQNHAGFQKLTAKA

SEQ ID NO: 118793 - protein, 412 aa, unidentified
MQQIYDRVAGLDVHRDNVVACFRRRGPRGGAVFEKDRFTTTTSGLRELEAWLGDRRVELVAMEATGVYWKPVLYALESRFTVWLCNARNVKKVPGRKTDLTDAEWLSDVAAHGMVRPSFVPPPAIRELRELTRYRKTQSDARAAEIQRLEKVLQDAGIKLTSVASRVLTQSGRSIIEALIAGERDGARLAELAKGKMRPKIPALTEALTGHFGSHHAVACHRILGHLDFLNESIQALTAEIDARTAAFAPVYTSLLRVPGFDRISTDVILAETGADMSRFPTPGDLASWVGVCPGSHESAGKHRRVGTTKGNPWLRRTLIESARAAARTKGSYFGAQYRQIARRRGPNKAAMAVAHSLIELVWHLLSTGEVYKDLGDDYFTSRQDPERRARRLIAQLEELGFKVTLEAAAAA

SEQ ID NO: 118794 - protein, 321 aa, unidentified
MADHSMKVAGIDTGKAELHVCLLPDGTQFKVGNDTGGIAKLVAKCVEAGIRRAGIEATSIYHRAAAKALRQAGIEVAELQPRQARGYAQALLQWSKSDTIDAAVIARLTQALDEVRPAPDPRIEAFAEVLTYVEQLEERIAWLKTSRERYANARLKTRIAADIKVLEKRRHAELKRLETAMRKEQILATRLDLLLSIPGVAERTAIGLLIRMPELGTLSREAAARLAGLAPCDDDSGQHKGERHIHGGRSRLRRTAFMAAFAAALNWNHDLNIFYKRLRQRGKAHTAAVVACARKLIILANAIIARGTPWEKQRGMPCPAS

SEQ ID NO: 118795 - protein, 407 aa, unidentified
MLFVGDDWAEDHHDVCLQDGAGRVLAARRLPEGVAGIARLHELVAGHLDGDDPGQVVLAIETDRGPWVRALVAAGYRVFAVNPKQAARHREVVAVSGKKDDTFDAAALADMARTRRHQLREIAADSDEAEAVKVAARAHQKLVWERTRHALRMRSALREYFPAALEAYAELTLTGPDTLELLAKAPDPAAAARLTIPQISAALKRARRRDVAGKAQRIQAALREQHLGQSEVVTEAYAASVTAAAAVIAVLNEQIKTMEARVESLFRRHPDAGTYLSQPGIGVITGARMLGEFGDAPGRYADAKARRNYASTSPLTIASGKKKTVHARYIHNDHLVNAMHDQAFAAISASPGARAYYDELRARDIDHTDALRRLANRQAGILHGCLKTGTAYDEHTAWGHRSQPAAA

SEQ ID NO: 118796 - protein, 339 aa, unidentified
MKYYSGLDVSLKTTFISVVDESGKVVKEGEVETDVCSISSWLSKIGYVLENIGIESGQLSISLCKGLRANGFNVTCVDARHMASALSARINKNDRNDGRGIAQMMRVNLYKEVLIKSDEMCELKILLGSRKQLVGMRKQVMGTIRGLLKIGGIKISISKKKGGFIIEAREKIKAMDETSNISIEALLSTLESIEKSLAEINKKLVRISKANEDSQLLISAPGIGPVTALSYLSTIDDVSRFEDSEMVGAYMGLTPRQYASGEVDRHGGISKMGPSACRSLLYEAAIVLLTSSKKKSKLKAWGLRLAKKKGIKKAAVAVARKLAVIMHRMLVERAEFRYS

SEQ ID NO: 118797 - protein, 337 aa, unidentified
MIVIGVDVHKQSLTAVAVDEAGRALAELTVAAAPELLAWSASLAPERLWALEDCRQLTRALEQTLLAEGERLVRVPPKLMAPERRSGRMRGKSDPIDALAVARAALREPRLDHPRPAERRLRELKLLVDHRDDLIDERRRAQQRLRWHLHDLDPALAVPLGALDRGVWLDRLGRRLARLEQTAQVRIARELVGRCRSLTRTILELDRELQAAAAQTAPALLALPGCGAVSAAKLLGEIGPIERFDSDAQLARHAGVAPLEASSGKQRRHRLDRGGNRQLNCALHRIAITQGRVHPPARAYLERKQAEGKSRREAVRCLKRQLARTVYTRLKNEPLLT

SEQ ID NO: 118798 - protein, 377 aa, unidentified
MPEPHAKGAGQVEAITHVGMDAHAATIHVAMLRPGQSQPLTWTVANTQARVRALAKRMRREATGSIRACYEAGPTGYQLLRWLEEEGVRCEVVAPSLIPVKPGDRIKTDRRDARKLAGLLQAGMLTPVRPPTPAEEGARDLTRRLQQAKSDRQALRNQLSKHLLLRGVRWLKKSWTKEHRAWIWKLEGDPIENVLLNDSRFALLHVEDRIQELEKHVKALSESEPYASRVGYLRCLKGVDVLTAMVLLTELHGIERFTSPRQLMAYLGLVPSERSSGAQERRGGITRAGNSRVRCLLIESAWHARHGLRPSKTLRARRRGQPAWVIEIAEKAERRLSQRHHHLSQKGKLSAKVTVAVARESVGFIWDILTHQARGLA

SEQ ID NO: 118799 - protein, 353 aa, unidentified
MCRSVTLIALRINLRTLSVSVRLCAQWAPTIVTQLVTQPGGYAQLATWTESFGTVDKVGMEGTGSFGAGLLRFLSEYGLVVVEVDRPDRSSRRRNGKSDPLDAESAARAVLSGRASGAPKSRDAQVEMIRVLRVARRGAMKARIQAGAQIDAVITSAPEPVRNPLRKMTPRKRIRACAAFRPGTLNDPAAATKTALRSLARRWQALQAEIDDLDAQLTPLVTAAAPRLIALPGVGVDTAGQLLVTTGDNPGRLRSERSFARLCGVAPVPVSSGRTDRHRLHRGGDRDANSALWRIALVRRHCHQPTKDYVARRIAEGETKPEILRCLKRYIARETYPLLLAAPSSGRSGRAAL

SEQ ID NO: 118800 - protein, 375 aa, unidentified
MTADLQEQGYVNATVLYMALELSNTKWRLAFGDDTRQRQVVIGAGDIAGLREQLAKVKEKWGLPPETAVVSCYEAGRDGFWLHRQLAALGIANRVVDAASIEVSRRARRAKTDRLDARALLAKLIRYERGERGVWRVVRVPEVEWEDLRQLHREREDLLNERTRHRNRLSSKLVAQGIRLPLRKDFVARLEEVRLFDGSELPEHLKAGLIREWERLQGVQAQLRAVEQEIGALIETADRTQAVRALMVLTGVGWVGAWVLVMELFGWRELTNRRQLASLAGLVPVPYHSGHMERDQGISKAGNRRVRALMIQLAWLWLRYQPDSKHSRWFEERFGGGSKRQRRIGIVALARRLLIDLWRFVDAGVVPQGARVKVA

SEQ ID NO: 118801 - protein, 336 aa, unidentified
MTITTIGLDLAKYVFQVHGVDAEGNLIEKRRLRRSQVMAYFASIPPCLVGMEACATAHFWGRELAKLGHEVRLMPPQYVKPYVKRGKNDAADAAAICEAVGRPSMRFVPIKTEEQQAVLVMHRARDLLVRQRTQLINAFRGHVAEFGVIGAQGRWNVTRLLATVREGQAVPEPARAMVEMLAAQLDAIGERIDEIDARILAWHKANPVSQRLARIPGIGPLIGTAIAATVADPAAFRSAREFAAWVGLTPRQKSTGGRQRLGRISRQGDQYIRRLLIIGAQTTLLRSKAARSNPWIQSLLARCPRLKVAVALANKTARIAWALMAKGESYRPMASA

SEQ ID NO: 118802 - protein, 419 aa, unidentified
MSIERRKVCGIDVHKSFLVATILDREGNYETKKIYQDLDSLLGLREWILSQTCDSVAFESTADYWRPLYTVLQDKVPVTVANADHIKHVPGRKTDITDSRWIAQLELNNLITPSRIFSGESYDLRSLTRSRELLVQNRTELKNKIHHLLDSASIRLSSVLSDLFGKSGSIILKGIVENQPFDEIVKSLPKRMRASADAISATLPMSIPPVCLVLLQSYLNLVDRHDDEIKLIEGRIREALQNKSREQQILTSIPGVGFIGASTLIAEIGDIHDFEDADKLAKWAGLTPSVYQSANVTRTGSITKQGSRHIRWILVELAHVAIRSPGRIRTFFERLMPKKGYKKAIVAVARKMLRIVWHLLVNDEEYIDEIPRSKQVKLPKLPPKIQKIGINRFIELLSKASEVIIKDNDQEIFRLGLID

SEQ ID NO: 118803 - protein, 323 aa, unidentified
MMNSNVKDFKVVGVDVAKAKLDFAIGEDREVFSISNSKVNIVKELIGRIDEPQKTIVVMEATGGYEDRLVTLLHEHGIPVAVVNPRRVRDFAKGIGIDAKTDPIDARVIAFYGRVVKPSPQCAKSDEDKKLRALVERRRQLQGLINQEKNRLQQTVDPEIKRYIEESLLTLKNQPKTIDGRLKKCVATHTEGARKIEILDSVKGVGPVSISTFLSELPELGELNRGQIAKLVGVAPMNNDSGQKSGRRRTFGGRTNVRCVLYMATLVATRFNDTIKTFYQRLLAAGKPKKVALTACMRKLLTILNTLIKNDEVWAEDRNKSSV

SEQ ID NO: 118804 - protein, 401 aa, unidentified
MEGPIVSIDVSNGNSHYMCFIKNNKRFGKVKKIDHDIEGFKRLLEDIQKLEAETNEKVCAVFEATGVYTKPLERFLSKNSIKTYMINPLESARKRKEEIHNKKTDKLDPISISKVYYDKEKMMELKKKDETYNWLRKKNRLYEDQLNHLRKYKVTFQNQLSICFPGYLDLFKDGYSDIPMIILKKYPHPDLLKNKKAETVARYLEKNTCHNHKVSLEYALKIIEFAKKTYPGCEKDDVEVEIFKILLDKVIETQRECEKTLNEMITVASTLEEYRYISSIDGIGPNLAARIIAEIGDIEEFKSREALVAYAGLDPHIYQSGDQDGKHLKISKKGNKYLRCLLFLAVGCSIRGAKDNPVNRFYQKKKQQSNPLNSKAAKTACTAKLLKIIYGICKNKTTYER

SEQ ID NO: 118805 - protein, 371 aa, unidentified
MKNNNTFIGMDVHKNSINIAIAQQNRKGQVRYYGKIEGTLSALDKVVRKLVSKGDPLHFVYEAGPCGYQIYRHLTAQGFDCSVVAPSRVPKQSGNRIKNDRRDALMLARLHRAGELTGVYVPLVEDEAMRDLTRAREDAKGNEKKSKQRLRAFLLRSGHRYSGRSPWSRAYMRWLSDIKMPHQAQQIVLQEYIDTLSQCKARVQRLTEQIRQLLPQWQLFPIVSALQSLRGVSLIVAATTVAEVGDLKRFQNPAELMSYLGLVPSEYSSGENTRRGSITKSGNGHVRRVLVEAAWAYRYRARVSRALLKRQEDLPQHIRDIAWKAQLRLCSRYRHLWAKGKAKQVIVTAIARELCGFMWAIASEIEGPAAI

SEQ ID NO: 118806 - protein, 344 aa, unidentified
MKQNIKFYIGLDVHKRKTTYVVRDNMGYILSQGETATHYKDLFPPLEPYLKHAIIGLEASTSYYTVYQNFLHNGYRIKVANTIQLRQLIAKNDTLDAKRLADMLRLGTFPCSYIPPENVQHLRELIQLRHSIMEEKTRSKNRIHAILDKNHKIKLPSTKPFSKKWKQALQRYIAAAPISLELRHAYDHYQYLEQKTMQLDQELIGYTRKSWNKEYLLLKTVPGIGSLLACYLIANIHPITRFKNKRKLRRYAGVIPVYKQSGNHKGKGHIPKTSSRKLLRWALIQAANSIAKTNTRLARYYKKKKRQKNNASIAKVAVASSLIDIIYKVLTNDKPYVMNVEHKK

SEQ ID NO: 118807 - protein, 377 aa, unidentified
MREKLRFLGMDVHAETIAVAVAEPDGEVRSLGTIGNREDSIRKFIKKLGSPEHLRACYEAGPTGFVLYWQLTRLGVDCTVVAPSLVPKKPGDRVKTDRRDALKLAHCHRNGDLTAVWVPDEASEALRDLVRQREAAKQDQLRARHRLTKFLLRTGQRPPLGLKAWTERYMRWLAQVRYAQPAQEVTRLDCMNEFEHMSARVKRLEEAILEVIKQAPQAMQELIRGLQALRGVAHISAVTLAAELGNDISSRFETARKLMGYSGAFPSENSSGKRIRKGAITKAGNAHLRRIVVESAWCYRHLPRVGEKLRKRHEGIPAEILEIVWKAQHRLHKRYRKLTLAGKDLRKVMTAVARELLGFIWAIAIKIEQARTPQLAA

SEQ ID NO: 118808 - protein, 339 aa, unidentified
MKYTPVGVDIAKHLMQLHFIDEHTGEVIDKQIKRDALLKYFSNREPCLIGMEACGGSQYWARELEKLGHKVRLLQGKFVKAFVMGNKNDVMDARAIWMAVQQPARVVAVKTEEQQAVLSLHKIRRQLVKFRTAQINALHGLLLEFGETVRKGRASLDKAMPEVLERLKEKLPPFLIDQVEDQHRRLSDLDMQIDGIEKQLTAWAKQNEACKRIMDIPGVGPVVATAAVSIMGDAGTFRSGREFAAYIGLVPKQTGTGGKVRLLGISKRGDAYMRTLFIHGARSAALQAKAPNPWVTELMKRRPTSVAVVGMANKIARTVWALIAHNQTYDKKHISVRPF

SEQ ID NO: 118809 - protein, 350 aa, unidentified
MDAIKYGIGIDISKSTFTVSISVLQKHQEIHLIASEEFENVKKGFNQLLRWVKKNILKDVEVFYVMEATGVYYEHLAYHLHHLDKKLHVALPSKIKYYFKSLNVKSKTDLIDSQILAQYACERKHNQWNPPKEVYLKLRALTRYQDQLKRQLVVVKNRLHSKECAYQIPKEIIKQEKRLIKELEKLVESCLKQIAVLIASDEELKAKNEKLLSIKGAGQLTVAVVIAETLGFQNFYNKKQLTSYAGFDVVYRESGTSVYGRTRISKKGNRRIRKALYFPSLVAARYNSSIKTFYERIVEKKKIKKVALTASGRKLLELMYTLWKTDQFYIENYEQTKTAPRLLEAELDIS

SEQ ID NO: 118810 - protein, 345 aa, unidentified
MPIVGGLDIHRKQITFDYVDTETGQVQRGQVSPADREHLRAWLARFSGTEDVAFAIEGCTGWRYVAEELAAAGVTVHLAEPADTAFARGRKRHAKTDKTDCRHLRMLLAEGRLPECWIPPGRILECRALLETYHDLRREHTAWVQRIHAVLFHQGAPALGGGTLRTGPGLAALRAVAAAHLSPAGQLQVATALEVLEALEARLHAVRHQLLQEARHLAGAKVLAARLYGVGPFAALAMTCWLGGEGRFSSSRKAVRFAGLDVTVSSSDRKGPPGRLSRQGPPVLRWALYEAGKTHARASAPDYRYYAQVKDRCNGKRAALSEARKILRQACHILAELGDDALAAA

SEQ ID NO: 118811 - protein, 430 aa, unidentified
MTAEQPQAPEHEPAWFVGFDWGKEQHRVALFDRHGKLIKQRDVRHSATAYAALADWLLQTTGAAPGEIAVAIETSHGPAVDALIDRGFRAFAINPKQLDRFRDRYNVAGAKDDNRDAFTLGRCLRTDRDAFRELSPDNPLIVRLRAATRLTGELTADRTRLTNRLGEQLWRYYPQMLNLANDLAGDTWLLTLWQQAPTPAKGARLHKETIARILKAHRIRRLDADQVRAVLRQPPLPAAPGVTEAAVSTIHSLIPRIRLLNEQIKAAQAEIDALCAELAGPQVIEPGESVPGQSTGQRDVAILHSVPGVGRIVLATLLAEAGGPLGRRDYHALRALAGQAPITKRSGKSCVVQRRLACNKRLAVAMYHWGRTAIERDPRSRQRYDELKARGCSHGRALRTVVDRLLKLVCILLQRQVLFDPNHSFGGAAA

SEQ ID NO: 118812 - protein, 343 aa, unidentified
MDHFAGLDVSVKETSVCIVDDTGKIVREVKVASEPEALLALLKNPAYHFKRIGLEAGPLSQWLFSALAEAELPVICVETRHMQAVLKAQINKTDRNDARGIAQMMRVGLYRPVHVKTLRSQKLRMLLTHRKLLQSKAIAIENDLRGTLRNFGLKVGMVGKVKFEARIKELIENLPDLAELVEPLLIVRRALREQIVILHRRLLSVVRDDDVCRRLMTTPGVGPVVALTYRATVDVPARFRKSKSVGAVFGLTCSKYQSGEIDRSGRISRCGDEMMRVMLYEAAQSMLRSKKWSWLKAWAMQIARRRGVKKAIVALARRLAVIMHRIWVDGTEFRWTREQSAAA

SEQ ID NO: 118813 - protein, 408 aa, unidentified
MSIVFGIDVSSRDSSVCVLQSGVTREYKITNDTIGFKTLLIDLKEYAEHPQIILEATGIYSRRIIRFLDEYDYDYVLLNPLKAKKEINQGLRRNKTDRNDAYHLALAQDRNQHQPNRKEPEAYHQLQSLSRAYEELTHDIVSSKNRLHKYLQLTFPELETIFNNSRGVNYWYLVELFPHCQDVRNLDVSTIAKQIKDFKGYGINRAQKLAIKLKHPADLAYPAVDQDDPERDEVVYYANRLLRLTADRERRSEAMIKLAKTLPNRDLEILMSIPGIAEITAVRILAELGDIRRFSNPNKINAFVGIDPGRYQSGEKDSSLRISKHGNAVARKILYRAIGQIDLAAKTSPCHIADYYERKKQFSQTKGFKKIAIASIHKLLRTVYILIITDQMYDYNVANNNQKDFCRN

SEQ ID NO: 118814 - protein, 347 aa, unidentified
MRFYNHQHQYYCGIDLHVKTMYVCILDAAGQVLVHRNLPSTPDAFLQVVAPYRDNLVVAAECMFTWYWLADVCAAEGITFILGHALAMKAIHGGKAKNDKIDSHKIAGLLRGGLLPQAYVYPAAMRSTRDLLRRRLHLVRKRGQLLTHIQNTRAQYNLPAFEKRLAYPGNRDGVVERFSDPSVRKSIEVDVVLIDQYDTLVNDLELTIVREAKRHDGDAFHRLRSVPGIGKVLALTILYEIHDIHRFDRVQEFASYARLVKCQKQSGGRTLGTSGAKMGNVHLKWAFSEAAVLFLRHTKDGKKLLAGMVKKHGKGKALSILAHKIGRAVYYMLSRGTVFSMEKFRAA

SEQ ID NO: 118815 - protein, 408 aa, unidentified
MKLFVGIDVSSQKLDVCFMDSEDQIIHEATMLNDITGASEIKEIILKLNRKLEYDVIKIGMESTSVYSFHPATFLAEDAELKKLGIEVIVQNPKAIARFKGLFEEDKTDTIDARRIADFLRLGLHSTTVIKEEKYIALQRLTRSRLQLIEQMTECKQHFLENLYYKCNTLTRDVETSVFGATMMDLLTESLSFGEIAEMEVQDLAAILQQRGRGRFGNPDKLAKAINKAIRDSYRLGKVLEGSVDVVLGTYAMMIKTLKQQIKELDKAIESLLEAIPESQCLLSIPGIGPVFTAGILAEIGQIERFADQAKLAKYGGLYWKKKQSGSWESERTSLTRTGNHYLRYYLVEAANSVKNNEPVYKEYYYKKYDEVPKHKHKRALVLTARKLVRLVDVLLRNHQLYTPERSV

SEQ ID NO: 118816 - protein, 412 aa, unidentified
MQVVYARCAGLDVHQKTVSAYASVCEPNGKKRRQIRVFGSFTGDLLVLAGWLREQGVTHVAMEATGVYWRPVWAVLEGQFEQLLANPQHMKAVPGRKTDAKDCEWIADLLQHGLLKGSFVPPTPIQDLRDLTRYRVELRQSQSRVANRIQKLLEQANLKLGSVASNALGVSGRQMLEAIVAGQDTPEQLAQLARGKLNNKIPQLVQALQGRVRDHHRFLLAEFIEEWDWFEQRIVRLEAEIDKQINPFEQALALWQTMPGVDRVTACSLVAQIGVNMNQFPTAQQLASWAAICPGNHESAGKRKSGKTRDGNKWVRRTLCQAAWAVSRKKNCYLSSQFKRIATRRGPKRALMAVAHTMLVIGYPMLKTGQGYRELGGNYLEQINKDQLQRHFVKRLEKLGFKVTVEPSLEAA

SEQ ID NO: 118817 - protein, 459 aa, unidentified
MTMNRRGKLQICHPDAAGIDIGSKEHWVAVPEDRDDESVQKFGTFTGDLYRLAEWLKACGVTTVAMESTGVYWVPLHEVLEERGFTVLLVNAAHVRNVPGRKSDVKDCQWIQQLHGYGLLRGSFRPNAEIVELRSYARHRQMLVESAASHIQHMQKALMLMNVQVHHVLSDITGVTGMRIIRALVAGQYDPFELAKLRDPRCRATREEIEKALTGTYKTDHLFALKQSLCLYDAYQASIAECDQRLEDKLRALSLSSVEPAEPKPIALAKKPPSRGRRKNKSEPSFDILTPLTKLVGGVDLSTIPGIGSLTSLNLLAEIGTDMTRWPSEKHFTSWLNLAPGITKTGGQLKSGKRPPTKNRAGLLLRQSAASLSRTTSALGGFYRRVAATRGKGKAVVATARKLAVLVYNLLKRGTAYVELGLEAYDNAYRERRIRSLENHAKSLGFELRAKEAVAPAGT

SEQ ID NO: 118818 - protein, 345 aa, unidentified
MKNVHVLGIDIGKNLCSLVGLDDKGLVVLRRRAKRETLVALAAKLPRCIIAMEACCGAHWLGRLFAGHGHDIRMMPPEYVRPYIKAQKNDDRDAEGIAEAATRPTMRFVELKTQEQLDLQTLHRARERLVGERTALINQLRGILIERGIVAPQGRRKFEHRLVEIMEGEEGASLSERIRSLIDDMRTQWRELDQKIGAFDAEFVAFAKDSDEARRLTTIPGVGPIIASALIAAVGNAEAFEHGRDLAAWLGLVPRQSTTGGKPRLLGISKRGNVYLRKQLIHGARAAMQHFVRQDTALGRWVKGLLARSHFNVVVTALANKLARIAWVVLRRRENFSVQEAKVAA

SEQ ID NO: 118819 - protein, 430 aa, unidentified
MGLIVPTAMPPEREDQPMPYEWFVGIDWGSQRHQICVLDRNRRRVGERAIDHDGASLAQLAAWLWTLSTGQPQRVAVAIEVPRGAIVEGLLDRGFHVFALNPKQLDRFRDRHSVAGAKDDRRDAFVLADAVRTDQPSFRRLHLDDPQLLRLRELSRAEETLLEDFRRSANRLQDQLHRFYPQMLQLCSAADASWLWDLIELAPTPAHAALLSEEQVQRVLKAHRIRRVTAHEVLTCLQAPALPVAPGAAEAAQAHCGFLLPCLRVLAEQLQSCSQQVSVLLHTLAEELGEGEGPSNGAIVLSLPGVGRKITAWLFAEAAQPLAERDYQVLRTHGGVAPITKQSGKRRVVVMRRGCNPRLRHALYHMARVAMQRDAHFRRVYAALRAKGQRHGQALRTIGDRLLRILMAMLRDRTCYDASRIRREPVGQMG

SEQ ID NO: 118820 - protein, 337 aa, unidentified
MRFIGVDLHSNSLTACYLSENGSEEMRTFELKELVKFQETLQLSDQVAVEATGNTRHFREAIKSLVSKVVVVNPNQFEVIRKSVKKTDRHDARMLALFLSKDMLPESRLKQLAHAQLNSVAQTRDKLVKLRTTLINKLHALHVGAGIKSKKSSFSSRKGLRLALGRSWDQLTRVELEVIVAQIGSLNEGIKQLNRQLREHGGQLAGHRNLTSIKGIGDKSAAILLSVIGDVSDFAGEDKLASYFGLVPRVANSNETINHGRITKRGSKLGRTTLVQCTLIAVRYSPYLKTFYERIRAKKSAGKAIIATARKFLGIIYRTLKYNWVFADFPNFVLAEE

SEQ ID NO: 118821 - protein, 392 aa, unidentified
MFYLGIDIGKNTHVASLMDEKAKVIFKAHSFSNTSDGASTLLEKITPYAAELEIGMEATGHYWLSLYSFLIENNFVVHVINPIQTDGWRKGTEIRKRKTDIIDSVLIADFIRYGDFLETSLADEDTMSLRNLSRFRNYLVGSIGDLKRKTICVLDQIFPEYHHAFSDIFGKTSKELLLQLNSPSDYEDVSSEQLEELLSQVTLKGYATKKFKDVSALAKTSFGITFCVDSFSFQLKLLIEQINFIEKQVSDVESQMSELLEKIKTPITTIPGIGNIIGATILGEIGDINRFSSGAKLVAYAGIDASVSQSGEYECTNNHMSKRGSPYLRKALFRAAFVASNSDPVFKAYYQKKRMEGKHHNVAVGAVARKLCYTIYAVVKTNVPYKVQTPRD

SEQ ID NO: 118822 - protein, 401 aa, unidentified
MVFLKVDPRLDALRERTDFGRLLGFLHGLPGNCRVGLEPTGDYHRPLAHRLLRAGFEVVSINSVALSRYREAIFNSWDKNDPKDAGVILEMLRRGDVQRYVDPIMVGTHDLQELAKTYYQVSRARTKVQHSLINHGLTLYFPEMHRYWCTTRNDWFVRFLLQFPTPAHVRSLSCAEFVDAAWDVVGRKVNKRAKLEEIWEMAGATAALPHAPDSLAVETFRITLRRYQQLNALRAELEVRAEQALASNEDFAHLKTLPGIGSVIAMTVLAEGGDLRRFGHHRQFLKYCGFDLAKNQSGTQRGKEQLSKRGNARLRLAFWLAAVAAVHMKENSFRAKYERYIRAAPEDPDLRRKALTAVAAKMARVAHGMIKKNQPYRQFFEQSLPSGSIPLSAAVGAHATP

SEQ ID NO: 118823 - protein, 425 aa, unidentified
MSEIEVLRQEPKFAAFVGIDWADQKHAWCLQAAGATQRENGEVEHRPEAVEAWVGQLCRRFGNRPIAVAVEQVKGALVFMLSKYEPLHLFPVPPAMSAKMRQALYPSGAKDDPRDADLLLELLLQHRNKLHRLSPDSEATRRVQNLVEERRNLVDEKTAQSNRLTNQLKIYFPQMLEWFEQLDTELVCALLEQWPTLEELQKVPPARLRTFFRKQRCHYPELVERRMVGIQQAMPAIRDRAVIEAKSTVVKVSAQVIRSLVRGIADLDRKIEEAAAAHPDFFIFESLPGAGAALAPRLLAAFGSQRDRYANAEEVQSYSGIAPVTERSGKKKWIHFRWACPKFLRQSFHEWAGHSIAHSQWARSYYQQQRERGKGHHAAVRGLAFKWIRIVFRCWKDGVVYDESRYLAALAKRNSPLAAVAGTIL

SEQ ID NO: 118824 - protein, 315 aa, unidentified
MQDERGSIVGVDIAKRHLDVALSTGEAWRLTNDEEGLESLVARLEAAEPALVVMEATGGLEAPVAGALASGGLLVAVVNPRQVRDFARATGQLAKTDTLDAAMLVRFGQAVKPEPRPLPDEQSQTLHALVARRKQVVVMLTSERHRLLSARPQVKEDIEAHVAWLQDRLDRLDDDLKRFVRESPLWRAKEDLLRGVPGVGPTTTFSLLAELPELGELNRKQIAALVGVAPFNKDSGTMRGQRRVWGGRGPVRAVLYMATLVATRFNPVIRSFYERLCRAGKPKKVALTACMRKLLTILNAMLSHGTPWEAVPLNA

SEQ ID NO: 118825 - protein, 402 aa, unidentified
MDTHHGLIGMGASLSQGVNGIKGEPSSQRGIFREGVLPNHDAGLSPAHPKESMMRFYNHVHTFYCGVDLHARTLALCILDHAGHAVLQTNIPASPDAFRAAVAPFRDGLCVACECMFAWYWLADLCQKEQIPFVLGHALYMKAIHGGKSKNDRIDAEKIARLLRGGNIPQAYVYPKGMRETRDLLRRRTFLVRQRSHLLAHLVNTNSQYNHPPLTQKLCYAANRKEIDLPARFADPSVRRNVQVDLTLIDTFDEQIRDLELYLTRTAKVDDPQAYQRLLSVPGVGKILALVFLYEIHDIRRFPEVGQFLSYARLVRCAHESAGKKVGTGGNRIGNAHLKWAFGEAACLLLRESEPAKKWLARREKKHGKARALGALSARLGRAVYHLLRKKEAFDLKRFFAS

SEQ ID NO: 118826 - protein, 355 aa, unidentified
MNAIKYIGMDVHLATISIAVLDAAGKLIMEVTIATQAGALLDFIRGLSGTLYVALEEGTSAHWLYTLLEPQVAKVVVCDPRQNPRRLGEKKSDRLDARKLAELLRLGTLKPVYHGNALGPALKELARSYRTLMSDTTRVMNRLKALYRARGIRCAGTRVYSARFRDQWLAQLREPGARGRAERLYKQLDLLLPLRQEARAALLAESRKHPAQKILRSIPALGPVRVALLLALLQTPYRFRGKRQLWTYAGLGLVTRTSADYQMLDGQVTRSRKPAWVLGLNANHNHALKGLFKDAAVTALTRPGPLKDFYTTRVAQGMEAELARLTLARKIAAIALTLWKKGECFNAEHLKAQAA

SEQ ID NO: 118827 - protein, 380 aa, unidentified
MEVLHPRCAGLDVHKETVVACVRIASGGEVSRAVRTFETTTARLIELAEWLEANGCTHAAMEATGVYWKPVWQVLAAGGFELVLANAAHVKNVPGRKTDVNDATWLAELLAHGLIRASFVPGPEIQELRGLLRTRKQLVREKASHVQRLQKTLEEANIKLESVLSDVMGRSGRAMIQALIAGETDPAKLAALAHPKVRAPQARLREALRGRVKRHHRFLLDLHLQQIDALDAGIAAIDREVDAGLASFRDAVKQLSTIPGVSQLSAQVILSEIGIDMSRFATAAHLRSWAGLCPRNDESAGKRRSTRLRTGAPWLKATLVQCGWAAARTKATYLNAQFVRLRTRRGPKKAVLRSCRLHPHGGLSHAQRRHILPRPRGHSL

SEQ ID NO: 118828 - protein, 378 aa, unidentified
MKDIRHVGFDVDSEKLAVAVAEASGEVRSLGTIPYREESVRRLVKKLGPASRLRVCYEAGPHGYGLYWQLTKLGVHCDVIAPTLVPVKSGDRVKTNRRDAEKLARCYRSGDLTAVWVPDAAHEALRDLVRAREAAKKDQLRARHRLGKFLLRRGLRAAGGVKSWTKAHLSWIKTLHFEHPAQEATFLDYQHEVEHAAERVVRLEHAIDQAIEAAPPEMRALIAGLQALRGIKKVSAVTIVAEVGPVSRFARPKQLMGYSGMVSSENSTGNSVRRGAITKAGNAHLRRIAGEAAWAYQYRPAMSPVLKKRQEGLSEEVKEIAWKAQHRLCSRFRRLSAKGKLRQKVTTAIGRELLGFVWAIGIQVEKEQQRIKGPRRAA

SEQ ID NO: 118829 - protein, 354 aa, unidentified
MKHLQLKDGDRLRRQCIGIDVSKKKFTFCLCQSTEQDLHFYTKPKEFENSEPGFRHLLAWSGNEVDSSVPYSFLMETTGCYHESLALFLARKGMTVIIVHANKAKNFARLNGQRTKTDPVDSKMLATMGCDTPGLKPWPIPDEKYLQLRDMSRLSEQLEKTRTQVLGRMESVTYSGYVTKSVLKAHKTLLKSIEKVQAANEQDMAELVNGDPVIKAGVDNMESIKCIGKKTAILVTAETLGFHQMTSAKQVASYAGLDVKKEQSGDTDKKGHMTKRGNAHLRAGLYFPAMVASWSNPQLMEDYNRICASHPQSKNIALMALERKLLCLMYSLWKNGRQWDPEYGQDKKQEEAMS

SEQ ID NO: 118830 - protein, 342 aa, unidentified
MPNRPFILKIEYHHSRANRLNHKENTMNVIGFDISKDTIDVTLLRNSGQVDYIKIANACEGFEKLNDWIRSKRIRKISISMEATGIYYEEAADYFSEIYQVFVINPLKIKEYSKSQFSHTKTDKADSRLIAEYTKRHLDKLTPFKPSENPTLYKLISLLQQLKQQQNESQNRLHAAKDAFIRATHEAIILLLAKQIDQTAKRIDLMIQQQDSLNMHYKNLQTIPGIGKDTAAILLHHLTDKQFKTANQFVSFAGLSPRIEQSGTSVNKKGRLSRYGHRRLKRALFMPALVAYRIKAFPKLVQNLSQKPKMIVIVALMRKLAKIAYYIHKTQKSFEKKRYQIA

SEQ ID NO: 118831 - protein, 462 aa, unidentified
MKLYLGGDVSKGYADWVILSEKKQAVLGNFQLDDTYAGHCKLYSMIEAYVEKHPGSELYAAVESTGGYENNWLNTLKSYQKVFNLKVARINPAGVTFNRKAGMKRNVTDAISALSIAEFMIDHPENITYDQDDKWKSLCRHWNFVEMQKQQRVQTINQLETILYSANPTLMRFKKDNLPNWLLELIIQCPTAETLAKARPEKLAKIPYLSLARAKTLVAEAKQSIASAKDKNAEILVSQIARQIKSFDLNIKSQMQLIERDLTCPEIEILKTFKGIDTISAIGLLLEIETIERFPTVKGFSCYFGLHPKFKQSGDKVIGVRMSKQGSKNMRKILFNIAKGAITYNPLIMAVYEKKLSHGMKKMAAIGVCMHKILRIIYGMLKHKQEYNPLIDKLNCEKSKDKQQEKQQQENANIEKSRRYQEFDVKAPISRKQTKKRRKHDLSQCEITSQSTGSTCSSKTKL

SEQ ID NO: 118832 - protein, 404 aa, unidentified
MIAVGVDVSKGKSTVAVVGEGKKILQKPFDVTHTKTELLNLVSFVKRYGDEAHVVMEHTGVYYKVVAETLHKAGIRVSAVNPVLICQFGNNTLRVVKTDKKDALKIARYALENRDELREYSPDDSIRDALKSFVKQFNFESKTLCAHKNNLKALLERVFPGIDAFFGSKAKPNGHQKLVDFIIAFWHNDCVAALSASKFIEKYKAFCKKNRYIFKEATAKAIHAMSRDNLTTLPKSESTKLLVQGAAKRVFRLSQDVELLRAEMINLAKQLPEYEAVIGLYGVGDTLGAQLIGEIGDVRRFKDKRALVAFAGVDPDKNDSGKKVSVSGSVSRKGDALLRKIAYLVVESYLLNSPADEPVYQFLDKKRSEGKHYYVYMTAACNKFLRVYYGRVMECFDALEQSAA

SEQ ID NO: 118833 - protein, 378 aa, unidentified
MKAARFTADEIERVAYLTTKGYLPVAVDVASRVFQVCYYDLGAKHVRNYQLSRVKFFEFINDTHTPRKLIGIEACGSCNYLCRYIEDHNHKCHILPAQKVKAFLHLDKTDRIDALGILKALITPSMQHIPARTQENQYLLNLITVRDQLNKQFVQTVNAAHAFLYESGVVAGTASVASATKVTEALKALCNTETEKENSEDDCSYSHLNCISESLLSNIESLQTKIKEINSHLLSYASNNEICSNLQTVPGIGKLSAVALYAAMGDPERFSSSRAFAAFIGVAPVTTGTGGKTTVLGIRKSGIQSIKKMLYMGSMVYLSQAMKNGTESSWLKQRLNQNRSKKIIICAIMNRLARIAYAIAKSGQAFDETKCNMIKKLR

SEQ ID NO: 118834 - protein, 346 aa, unidentified
MVIIGCDFHPSFQQVAILDRETGEYAERRLGHRKEAEEFYRALRGPVRVGMEACGHYPWFERLLEELGFELWLGDAAKIRAGVVRRQKTDRRDAGHLLQLLVEDRFPKIWVPSLEERDVRQLLVHRHKQVVARTRVKNQLQALALSQGVRKRWKLWSREGRAELEKLELLPYADERRKRLLVSLDALAGEIAALEQRVQAEVARRPAAVRLQTHPGVGPVTALAMVLTLGPAERFGSPRQVASYFGLIPSEHSSGGRQQLGRITKQGSWFLRFLLVEAGQSAARYDAELGRFYRRLAVRKHRALAKVAVARKLATRLYLMLREDWNYAQLCRAMVQASPSHSVVES

SEQ ID NO: 118835 - protein, 429 aa, unidentified
MNYTQNEKIAQVTENTLVVGIDVGSESHFARAFDWRGYEYSKKAFQFSNTEAGFAEFKAWMHHIKDDHGKEVILPGMEPTGHYWFNLGKYLMDNEISPVLVNPHHVKKSKELDDNSQTKNDRKDPKTIAKLICEGRYSHPYLPEGIYADLRTASNLRFQLTSELTRIQNHIQRWFSIYFPEYKDVYGSFDGKGSMMILKRAALPEDIMALGEEKINQIWRDAKLRAVGIKRAKTLMEAAEHSIGSREGLTSARMEIAILLEDYEAKSAGLEKVMDLIEELCRQIPMAEKLLEIKGIGMKTVSGFLAEVGDIRRFDNPKQLQKLAGLALVEDSSGKHKGQTVISRRGRKRLRYLLFEATMPLVAKNAEFRELHRYYTTREVNPLKKMQSLMAVACKLIRVFYAMLTKGVSYDAEKMLSDIRRPERQPQAT

SEQ ID NO: 118836 - protein, 333 aa, unidentified
MNYSGIDLHTDNCYITTIDESGRLLQHGRIENVDGDILQYFSSLPGPHAAVVESTSGWYWLNDLLEAHGIPLTLAHAKYLKAISYAKVKTDKVDSQTLATLLRMNLIPAAHKISRDLRGLRDTMRLRLRLVQQRGATLRRINSIEVKFNGAVPDPYRFQLAILERTRSMLTEQILQLEQSLHPVLIPNDDIQRLLHVPGIGKLTAFTVYLEIDGIERFVSDKRFVSYCRLVPAAENSNRRQHHRSSKDGNKYLKIAFSDAAVHAIQYYPEIKVFYQRRARRSNEPIARTVVAKELARIVYHLLQKKTAYNGFKGLPISRTKSQQWPRLPSPDA

SEQ ID NO: 118837 - protein, 415 aa, unidentified
MSYKIAGIDVHKKVLMVVVMDAHAPADEPERRRFATMPSDLRRFATWLREREVKEAVMESTAQYWRSVWLELEPYMRLQLAQAFSNRAPRGRKHDFKDAERLVRRLIADELILSFVPKGEQRTWRNMTRTKTQLTRDRVRLQSQMECLLEEMRIKLSSVVSDLLGVSGLRILWALARGESDPKKLAALGEERLRCSKEQLIDALTGSPQPMHRELLSLQLERLQLIDEQIAKLNGMIAQAMKPHQETVIRLAEVPGFGVDSAQQVIAEVGVKASTFPSAAEFTSWVGTCPGKDESAEENHSSRSAKGNKYLRRVLSQAAHAAVKKNGSHFQAVFRRLLPRLGYQSAIWAIAHRLCRVLWKILHDGVRFIEQGSEPDPQAKKQRARLLARALRKLGYNVAISPMNPPTAESVTPTQ

SEQ ID NO: 118838 - protein, 347 aa, unidentified
MSTHYIGADVHAYNTEIHVENKKKVVGRYSVPTTISAIREVLRSISGEKHLVIEEGPMAGWLYRNLHNCVKEMIVCDPKRNKYVYGDGDVDDQIAAEKLAQLLRGGYLRPVYHSIDDQRVELKQWVALYRDRVRSGVSQVNKIRAQCRMHGVRIPRAAVHNPEARETWLGEQDQLTLANQLRLLWVGYDATRQQVKLAKHQLVQLSKKYEIITYWKDLPGFGLIRSVTLFAYLDTPWRFKKKTKLGRYSGLGIRHVTSGKDKRGRPKEAHLALDRQCNRKLKDTIMGAAISAVRTSSPNVFKNYYERLRDEGKLAGNARHSVARKMLRVTWGMWKTMSRFDASLLES

SEQ ID NO: 118839 - protein, 384 aa, unidentified
MNKHSILFIGLDTHKEFNQVAYIEEHRGSQPVHLGRFSSSKVAVQKLVRQFESKYPGATLHFVYEAGPCGYWIYRLITSLGHCCYVVAPSLIPKKPGEKIKTDKRDALKLAKLLKSEDLTPIYVPEPEDEAVRDLSRAREIAMEDLKDAKYQLKALMLRNNINYKGTANWSQKHLRWLTELVLPHPAQHIVLQEFLQTITERISRLERLDNELTHHVHQWRYYPVVKAIQAMRGVRLLVATGVVAELGDLSRFDHPRKLMSYLGLVPSEHSSGGKRHIGAITKCGNGRARRLLVEGAHTYRYAANISTDMQKRQEGLPKDIIDIAWKAQLRLCKRYKKMIAKGKHYNLVVTAIAREMIAYIWAIAKEVVLTPVNAKLRLARVPA

SEQ ID NO: 118840 - protein, 375 aa, unidentified
MSRHSPVRPRDRRGPPNQGRLALQTTPAAEIVVGIDTHKHTHTAVALNALGARLGAMTVPVSRDGYRRIETWARAFGPVRAFGIEGTGSYGAGLSRALREAGHRVLEVNRPDRSARRRHGKDDTLDAEAAARAVLGGQATAEPKSGTSSVEMIRHLKVARDAAVKAKTQAMLTLKAIIVSAPAELREQLEGIRGKLTLVRHLAALRPGPMVSTAASAKAALKAIARRWLVLREEIEGHDRELDRLVSTTAPDLTAARGVATATAAEMLLLVGDNPERVRSEGALAKLCGACPIPASSGRTSRHRLNRGGNRQANAALHRVVVTRMRLHQPTIDYVGRRTREGKTKAEIMRCLKRYVAREIFGLLRKPNQAASKAS

SEQ ID NO: 118841 - protein, 371 aa, unidentified
MKENSTFIGMDVHKNSIDIAIAPKGRKAQVRHYGKIDGTLAALDKVVRKLVSQGDCPHFVYEAGPCGYQIYRHLTAKGFECSVVAPSMVPKQSGNRIKNDRRDSMMLARLHRAGELTAVYVPVAEDEAMRDLSRAREDAKGDEKKSKQRLLAFLLRSGHRYSGRSPWSQAHMRWLADIKMVHPSQQIVLQEYIDTLSHCTLRLQRLTEQIRKLLPQWRLFPVVQALQSLRGVSLIVAATTVAEIGDFKRFQNPEELMNYLGLVPSEHSSGEKTRRGSITKAGNSHVRRMLVEAAWAYRFRARVSRALLKRQEGLPQEIRDIAWKAQVRLCARYRHLWAKGKVKQVVTTAIARELCGFIWAIANETDVPMTA

SEQ ID NO: 118842 - protein, 344 aa, unidentified
MDHFGGLDVSVKETSICIVEDTGRIVKEVKVASDPAALLKVLGNPTYRFKRIGLEAGPLSQWLFSVLAEAELPVICVETRHMQAVLKAQINKTDRNDARGIAQMIRAGLYRPVHVKTLRSQKLRMLLTHRKLLQSKAIAIENDLRGTLRNFGLKVGMVGKVKFEARIQELVENFPDLAVLVEPLLIVRRVLREQIVILHRRLLAIVREDEVCRRLMTTPGVGPVVALTYRATVDVPARFRKSKSVGAVFGLTCSRYQSGEVDWSGEISRCGDEMMRTMLYEAAQSMMHSKKWSWLKAWAMQIARRRGMKKAIVALARRLAVIMHRIWIDGTEFRWTREQVVAAA

SEQ ID NO: 118843 - protein, 366 aa, unidentified
MDAIYIGVDFHARQQTICYLKTETGELVICELQHQDKAQVRAFYQQFPSPVIVGLEASGYSPWFEALLEELSCEVWLGHATEIRRRARWRPKNDRRDAELIWELMVHGEFPRLHRPPATTREVLRMLRYRQKLIKLRTMAKNSLQAIALQAGLAKGKQLFSRVGHEEFKSAAMSPVLHWQHEHWFALLQPLNQQLLETTVWFKEQSRGNISIQRLRTHPGIGLLTAICILHTLQPVERFRNTRKVAAYAGFDPVERSSAERQHFLGISKAGSRLLRYLLVEAVQTAVRYDEDLKRFYKRLAQRRGRPKAKVAAARKLLIRAYIMMRDEIDYAEFRRRAVAARLARTGQGPSNVPEVLIGQPASPDA

SEQ ID NO: 118844 - protein, 350 aa, unidentified
MIIIGVDFHHEFQQIASVDTDTGELQEKRLGHREDAEKFYRTLAAAGQKVRVGMEASGHARWFERLLAELQVELWIGDAAEIRTKRVRKQKTDRQDAQLILRLLLEDRFPQIWMPSWENRDLRQLLWHRHRMVQARTRIMNQLQAVALNEGLRCKKRLWRDRGRQQLESFPLAPWASRRRRDLLELMDRLNPTITELTQAIEQEVEKCPQAQRLMTHPGVGALTALAFVLIIGNAERFGSGKQIASYLGLVPLEESSGNRRRLGHITKQGSSMLRFLLVEAAQVTVRSVPEWRSKYLHLMMRRGRKTAKVAMARRLAVRLYWMMRQEWDYQQWNKFGSHAGQPGHRAGVQ

SEQ ID NO: 118845 - protein, 351 aa, unidentified
MNNLRHNPIEETEMPLYGGIDLHANNSVVVLLDEQDQMIYHQRLANHLPTILEQLAPYQADIKGVVVESTYNWYWLVDGLMEADYRVHLANPAAMQQYSGLKYTDDYSDARWLAHLLRLGILPEGYIYPKAERAVRDGLRKRSHLVRQQTANVLSLQNILVRNTGVRLSAKRIRALTLEEVERLLPEPAQVLAVTSSLAVLHCLGQQSKTLEKAVSMRLKHTPAYEQLLTVDGIGTILAQTIVLETGDIGRFSTVGNYASYCRCVRSTKISNGKRKGQGNVNNGNPYLAWAYMEAAQFAIRFSPQVQRFYQRKQRKSHLMIARKAVAHKLARAGYYIMRDLVPFDVYKAFG

SEQ ID NO: 118846 - protein, 384 aa, unidentified
MVRAKFKFANSRVGFEHALENARAEMLKASCRGVIFAIETGGHFWRNFAYSLEERGVPFRLISQLTLKRMRDGRDLNRRKNDFRDAEMAAGVLLTGDFTETKLPQGVYADLRSTHSAYFRLVKERSRIINLLKGLLDGLFPEFTEVFKDPCGRTALTVLATFPSPAAIAGMNEGVFVEAIRSRRQGRLMVKKLRALHQAAQFSIGVRPGADAVATEVSLLVGRYCLIDQQVKRLVKSLVCLVDRTEEGKYLLSIPGVNYLTAAALLAELGPLKSYQNAKQLVKMAGTNPIEAESGGKRLGQTPMSKKGRPRLRYSAWNAVIPLFRHNPDFRTWAKRLRERPVHANPLHGKEVIGAALNRLLRLVYVLAKKQEFYRSPQIALVVN

SEQ ID NO: 118847 - protein, 406 aa, unidentified
MEITPIYRRVIGLDVHQAKISACAVIEQADGTLAVEHREFGGFKRDRRTLAAWAREVEPEVVVMESTGIYWKSPYAALETVGIEAWVVNARHVKTVPGRKTDIADAQWLATLARAGLLRQSFIPPAEIRHLRLIARQRQKLGGMLASEKNRLHKLLADAGIRLNVLVSDIHGQAGRAMVKALIAGQPLTEVLDLAGRLRASREQLFEALQPEELSGPHLFVLNEVMAHIEELEARMARFDQALIQGLSSWRPQLILLQTIPGIDLMGAAMLLVEIGADMTRFGSAEKLASWVGICPGNNESAGKRKSGKTRKGNAWVRRLLCEFAQAAARSRCALKDKFATLSLRKGHKKSIVALAHKMLRVLFAMLKSNTPYRDRVVDYEALSVQRNAPRWIKMLVKHGFIPAAA

SEQ ID NO: 118848 - protein, 322 aa, unidentified
MNKEQKYVGVDISKEYLDMAVVEPDNKWRFSNNPNGISKAVEMLKGMSSVFVVFEATGGLELSFWEGLTEAGIEAAAINPRQIRDFAKAKGKLAKTDEIDAGVIAHFGQAMQPRSQPFPTTQEIKEMMSRRSQIVEMITAEKNRLNWARSRRIKEDIQLHIEWLERQKDDVDKTLKQAINIDPSMREKSKILQSTPGVGPTVSASLLTQVPELGTLNRHQIAALVGVAPLNRDSGHWRGKRSVWGGRSRVRSALYMATLVATQHNPVITAFYQRLIGEGKPAKVALTACMRKLLVILNAMLKNKTTWSVSETAATSTPCLYF

SEQ ID NO: 118849 - protein, 388 aa, unidentified
MRPISQTTTQKLSHCRPDDATLYASLELSRATWLVTALSPGSEKMSKYSTLGGDGAALLGLLRRLQARAERLAGGPVDIVVIQEAGLDGFWVHRLLSANGIQSHVVDPASLAVPRRRRRTKTNAIDGETLLRTLLAWQRGEPRVCAMVVPPTPEQEDRRRTSRERAVLLQERVRHVNRIKGLLASQGITDYEPLHKDRRARLAALHTGDGQPLPLRLKAELLREIELIELLIRQIAEVEVERDIAAELDVEGNQSPVALLARLKAIGPQIAAVLYLEGLYRSFANRREVAAYAGLVPTPWRSGTIDREQGISKAGNRRLRHIMIELAWLWVRHQPDSALSRWFRARVGTERGRIRRIAIVALARKLLIALWRYVTHGEVPEGAVFKAA

SEQ ID NO: 118850 - protein, 391 aa, unidentified
MINIGIDVGKFKHCATVLDDSTGEVLIKPFFLTNNRKGFDLLYSKTKQFIHRKHSVGMEDTGHYMINLTNYLLDKKFTVKYINPRATFLRRKELGISAKNDRKDALLIAEMLSEKRFWRSISVRSIENSKFRDITRLYHQLQEQQNQDMNRLQRALDIVFPEVNSLSWTRYSKAYMKFLSTYPSASSIALEDIRNLRKALKTEGKGRQSKVTAEEIRELAKCSVGEDNISIDLEVTSIIAIINTREEQIRMLEKKIEEFSHKLNSPIISIPGISHISGMTILAEIGDINQFQNTGNLISFAGMDPLVYQSGKYDAAHMPISKHGSRYMRKALYQAVFTVCKYSPTFHDYYTKKRNQGKSHRCAQGHCARKLLRVIYKLLSTNSLYDQNHIQ

SEQ ID NO: 118851 - protein, 356 aa, unidentified
MERYIGLDVHAKSCTMVVLSQSGRLLRERIVETNGAALVEAIRVEPGHKHICLEEGTQSAWLYEILSPHVHEVVVLQERRSRGPKSDSKDARELAEKLRTGAVDCRVFKAPKQFARLRILARVHQMVVRDFVRTKSRVKSMYRARGIQTSSRSVCGHTEREAWQAKLPASSRTAMTRLYEQLDFFVELREQAENDLVTELQKHRIARVLQTCPGMGPIRVARLLPVVVTPHRFRTKQQFWSYCGLAVVTRSSADWVQAPDGSWMRAKVAQTRGLNRRRNGVLKDVFKGAATTVITKLHDDPLYVDYQRLLDTGTKPPLAKVTVARKIAATVLRMWKNEEEYDPDKYRNKPIARRSS

SEQ ID NO: 118852 - protein, 343 aa, unidentified
MDHFAGLDVSVKETSVCIVDDTGRIVREVKVASEPEALLQVLRNPIYRFKRIGLEAGPLSQWLFSALAEAGLPVICVETRHMRAVLQAQINKTDRNDARGMAQMMRAGLYRPVHVKTLRSQKLRMLLTHRKLLQSKAIAIDNDLRGTLRNFGLKVGIVGTVKFEARVRELVENLPDLAVLVQPLLMVRRVLREQFAILHRRLLAVVRNDEVCRRLMTVPGVGPVVALTYRATVDVPARFRNSKAVGAVFGLTPSRYQSGEINRTGAISKCGDEMMRVMLYEAAHIMLVRLAKWSWLKAWAVKIARHRGMKKAIVALARRLAVIMHRIWVDGTEFRWTHEVTVT

SEQ ID NO: 118853 - protein, 350 aa, unidentified
MDSLSQIVDVVIGVDTHVATHSAAAVHAGTGGVLAEVTVEATAAGYEALVQFADEQPGLRAWAIEGTGGHGAGLARHLASGGELVVELDRPERARRRNGAKSDPLDAIRAAREALSRAKLGTPRTTGERQALSVLLAARASAVEAAKIAQQQVFSLIIAAPEQLRARLRGKRTPAMVRTASRIRLRAGWDLETRATAGVLRDLARRALALSAEADRYKKQILAIVRAWHPELLERRGVGPIVAATVLCAWSHPGRIRSDAAFAMLGGAAPIPANSGQVTTHYRLNRYGDRQLNRAFHTIALSRMRWDEDTRAYVNRRTAEGKTPREIKRCLKRYIARELYRLLEHGPSAA

SEQ ID NO: 118854 - protein, 371 aa, unidentified
MESIIYVGMDVHKDSYSICCYKADEDRFYYEKKVNAESKRVLKYLESVNKEFGEDCLLMCGYEAGPTGFGLYRDLIKAGYICVVIAPTSLKHSTNHKIKNDKVDARFLAKTLFTKDYSSVHVTTEHEEAIKEYCRMRLSLKKELTRAKLVLQSFLLRHDKKFTEGNTWTLKYRDWLNKIHFEEDYLNEALNEYMISVNTYEARIKAVENRLKQISLDPAVKDKVAKLVCFCGIETVSAVTIVSKVGDFNRFEKAYHFSNYLGLTCGEKSSGQKEKHLGITKSGDRELRCLLSECAKSIKKTSIKGRKSKRLLDRQKEKDPKVIAYADKCRYRLRSKIAYLELRGKSSNVATTAAARELACFIWGMMTDHIA

SEQ ID NO: 118855 - protein, 353 aa, unidentified
MNSPHYIGFDVHKKTISFCVKTAAGEILEEGVVVAQRQALQQWASSRPQPWRGALEATLFSAWIYDTLRPYGEQLEMAHPAKMKAISAGKRKSDTIDARTIADLVRCNLLPACYVAPPRIRELRRLLRYRSLAVSEAVRMKNKMAGLLMETGALYVKEKLHRKKYFASLLEELEEVPESVIDLLHLSRGALEMFQNTQKRLVRELLADPELAQRVERWMTIPAVGEITALTSALEVGDPQRFPSCSDAMSYCGLTAALKSSAGKQQRGPISKQRNHWLQTTLIEAAKLAPRGIRNWRRCMPASWSVDIATALLWPWPANSSPICWPSTKAVSPSNCACLWKSQPKKLPKKEKL

SEQ ID NO: 118856 - protein, 405 aa, unidentified
MMVIGVDTHKRSHALCAVDEGTGRVRGSREIKADEAGHQAAVRWARGLDSERVWAIEDCRHVSRRLEQALLAAGERVIRVAPNMMGASRRSQRERGKSDEIDAQSVARAVVKDGVESFPAAYLDERAMEIRLLFDHREDLVRERTRMQNRLRWHLLELCPEVEAKLKRGGLSQLRALERLDRRLRQLSPCVRLRIAREELGHIRALTRQADQLERELLELIRAYRPALLDEQGCGALTAALLIGRTAGAERFRSDACFGRQSGTAPIPCSSGQQTQHRLDRGGDRQLNRALHTIAITRAQRDPATKEYLARKEADGKTRKGALRCLKRYLARRFHRLLSEPPLPAQPTITGEQVPQPAQALDAPACDASRDMSRTVQPSAIAERPAPKPETQRINAAPNPMICIA

SEQ ID NO: 118857 - protein, 333 aa, unidentified
MEDKMCLGIDVSKKTLDCCLYDGNDYKHKIFNSNNASIVSKIIKNYKLTKACKVVMEATGVYHTSIFKSFYEKGFNVVVENPLKIKSYSKMKLCRVKTDKADAKLIAEYGYMQVTERTIPHEPYQDELAALLKLIDGYQCDVTRCKNRLEALNNYSINTSIHIASLNRQIISLNKEIQTLKVSIREIIASTCEEQYQLYLSVTGVGPVTASSIIANFGNFSRFEQSKQVANFIGICPSPFSSGTSVKSSGSISKKGNPLLRKTLYMAALTASRKNRACHDLYTRLVAKGKNKKLARIAAGHKLLRQLFAIAKSGEPYDPDYEIKMCENRKNVK

SEQ ID NO: 118858 - protein, 413 aa, unidentified
MTLISVGIDVSKGKSTVSARKWGDVVVMKPHDVHHTASALGNLADSLKKFGGEVRVILEHTGRYWLPVAKTLHDAGLFVCALNPKLIRDFGDNKLRPLKTDKADSKKLARYGLKYWEDLIPYIPVEITRQKLLEFSRQLDSSNKLLTGLKNNLQAIVDVTFPGVRKLITSPARDDGHIKWVDFVCTFFHCDYVGKLGEERFMERYRKWCKQHGYYFTAKGAVKIFAAAADQVPCLPCDADTRLLISQTAAQLTSVSAAVETWRAKLSELASTLPEYDCVMAMYGCGRTTGPQLMAEIGDPMRFNGKKALVQFAGVAPGDNQSGQYKVKSVKASKKGSPHLRKTLFQVMSTHLQNSPPDEQIYQFLDRKRAEGKLYYVYMTAGANKFLRRYYGAVRDFLAEQKPDSDNVDTSAA

SEQ ID NO: 118859 - protein, 338 aa, unidentified
MKKYIGIDLHSNNSVVVVTDEEDRIIFQKRLANKLNEILASLAPYQEETVGVVIESTYNWYWLVDGLQDAGYQVHLANPSAIKKYEGLKFSGDFADAAYLAHLLRLGLLPEGYIFPRELRAVRDLARKRMQLVRCRTAQILSIEGILVRETGGRMSGEKVKTMTTETVAAFGFVPDVTLAMESNRIICQALQQQIKILEERLESEVKLQPGYRLIKTIPGIGQVLATTIMLEAGPVSRFADVGNFSSYCRCVDSLRESNGKKKGSGNTKNGNRYLAWAFMEAANFALRYCPEAKRFYERKKNRTNRIVALKSVAHKLARASYYILRDQQPFDVKRCFV

SEQ ID NO: 118860 - protein, 397 aa, unidentified
MYIVGIDIAKRKHEAAVIDGEGTVIIKPFSFTNNCSGYNRLLAMLTKAKLPLDEVSFAMEATGHYWLALFTRLQKEGFRVQVINPVQTNSIRSFYIRQAKTDPRDALLIAEVIRFGHFSESTLHPENIYELRELCRGRHAIVSMQADVKRKVVALLDQVFPEYETAFTNLFGDTSMAILQTCPTPKELSEMRLEELCHLIEVSSHKRFRMAKAQELQALARNSFGFAMAGDVFSTMIRLYAKHLDFLKQQVREMDRKIAEIMETLDTPITTITGIGPTLGAYILSEIGDISRFSSAAKLAAYAGIDPTMRQSGEYNGVRNRMSKRGSPYLRHAIWLAASSAVLHDPALKLYFQKKRDEGKPYMASVGHACRKMVSIIYAVMRDNKAYTPYIPNEISA

SEQ ID NO: 118861 - protein, 347 aa, unidentified
MEYYVGIDVSLEKSSVCVMDQTGRILRETKVASDPDALAVFLAGLGHRVTLVGLEAGPLSQWLFAELRKAGVEAVLMETRHVKGALKAMPVKTDRRDAEGIAHLLRMGWFRPVHCKSASAQEVRALLTARKLLLGKMLDIELGLRGVLRGFGLKMGKVSRGRFAARVRELVAGNPMLEHVAQAMLTAREALLAEMTALDRRARAHAREDATCRLLMTAPGVGVLTALTFKSAVDDPGRFRSSKMVGALFGLTPSKHQSGEKDVTGAITRAGDGMARSTLYEAATALLTRTKAFSSLKSWGLAVARRRGRKRATVAVARKLAVILHRMWVDGSTFRFGGAAALDAAAG

SEQ ID NO: 118862 - protein, 419 aa, unidentified
MNQDKTKQTISVVHPVCCGLDVHKKSISACLIFNDSSGQEQSIIQEFDTFTDSLIRLREWLVEHSCPIVAMESTGIYWRPVHNILEEAVEVILVNARHVKNVPGRKTDIADSRWLAGLLRYGLVKGSFIPPKHVREWRDITRCRQKHVQTQNDYKRRVHKLFESANIKIDSVLSDPFGATGRRLIALLADPEAEITLEDVKKAAHGRVRHKAFELFRSIQGHFTAHHAFMLRSLLRSISHHEQEIETLDCRLKELMSEHTPILEELDRIPGINEVTARAVLAEIGPDLEAFPSCSHLTSWAGLCPGNNESAGKRKGGRSPVKKHHLKTILVEAAWAATRKKDSYYKEKFHRLKSRRGPKKAIVAIAHRLLKAIYHVIKFGTAFRDLGAHYLQQRAQAATLRYLRKQASVLGMKLVPTEA

SEQ ID NO: 118863 - protein, 349 aa, unidentified
MDYRVYCGVDFHARQQTICCLTTEDGVMSTHELKHHNQAELRAFYAQFSGPVLVGLEASGYSPWFEQMLEELGHEVWLGDATEIRRRARRRQKNDRRDAELILDLLLHDEFPRIHRPTPTSREILRMLRYRHKLVKMRTIIKNSLQALAIQSGLSLRAKLFTQAGLAQLQSVPMSPMMQYQRDQWLAALGPLNQRIVATAAWLEQQAAADERIERLRTHPGIGLLTALGVVHTLAPVERFSNQRKVAAYVGFDPKERSSGEKKRYLGISKAGPRVLRFLLVEAAQTASRSDPELKRFYLRLLHRHGKPKAKVAVARKLLIRSYILLRDGIDYAEFQRRAVAARLAREDA

SEQ ID NO: 118864 - protein, 392 aa, unidentified
MNVTTVGLDLAKSVFQVHGVDVRGKPVLKKQLRRDQVAAYFANLPACLIGIEACGSAHHWARKLESLGHAVKLMAPQFVKPYVKTNKNDAADAEAICEAVGRPNMRFVPMKNVEQQAVLAMHRVRQGFVKARTAQANQIRGLLAEFGVIIPKGIAHVAGRVPELIEDGANELPGSFRRLIQRLLDHLKDLDRQVDELEEQIRTWHRSSELSCKLEKIPGIGPITASALVATVGDAKSFESARQMSAWMGLVPRQSSSGGKTTLLGISKRGDTYLRTLLIHGARSVVRTAERRRGPDDWLIKLQQRRTHNASESRKLTLPTLSGGSSSLTRRRKADLRTRGFSTAAQTAACSSNDAPLHRRAELPRLLRRPVRRLRRPAEAALTRASTNDASS

SEQ ID NO: 118865 - protein, 395 aa, unidentified
MYNLFVGIDVSKDSFSAAGLSDKAKLLFSLAPLMNAQGFSEFLKALKTHQKDLSSVIVALESTGPYHLNLFSFLVSKGIATIVVNPLIIANFAKLSLRKTKTDKKDAVTIARFLFLNRESISQLPSSQQTTDLRDLARERESILKMIASMKNDVRRILQTTFPELEHLVDVLGDTMLYFLKIFPSARLISKASPEIVAQGFNQGDWRRRISVHYTKIIDLAKTSVATSSPSKEMILPGKIETLLYLKKRVDEITKMLVRLCKSMKKEDLAILTSIRGVNVKTAAPFLAELGDYQNFQSYKKMLAFAGLDPTTHQSGKFEGMSMISRRGNRHLRKVIYNMTFCVVRYTGPLRDYFFRRKAEGLPFRKALLATSHKLVRTIFAMLNDRTLYRFAEVP

SEQ ID NO: 118866 - protein, 344 aa, unidentified
MEISTIGLDLAKNVFQVHGVDADGNVVVRRTLRRAQLLPFFISLPPCLVGMEACGTAHHWARELIKLGHDVRQMPAAYVKPYVKRGKTDAADAEAICEAVTRPTMRFVPVKSPEQQAALSMHRARDLLVKQRTQLVNMVRALLAEFGINIPQGVRLALEMARKIVDGEAPPVPREAAKIAGRLSQQALDTHAQLREIDLDLLAWQRTNDTARRLMSIPGIGPIGATALAASVTDASQFRSGREFAAWLGLTPRQHSSGGKERLGRISKMGDKYLRTLLVVGMTSLIKGVKRKPETADPRLVALLARKPVRVATVAMANHTARVAWAIMARGETYRAGHQPRLAA

SEQ ID NO: 118867 - protein, 338 aa, unidentified
MSLYCGIDLHARNCYLSILDEERKLIRHGRLSNELELVLAAIEPYREEVAGIVVESTFNWYWLVDGLMEHGYRVHLANTDKAQQYKGLKYTDDRHDARWLALMLLLGILPEGYIYPKAERPLRDLCRRRSFLVEKRTSMLTSARGVYGSWTGEQVRRNEMVKWDEEDLEVLLPDPDIRLGVSCLLKPVEAISEQIAIIEAELLRSAKLREEFKKLETVWGIGKVLALTIMYEVGDICRFCDVGHFASYCRLVKTDRRSDTKSKGKGNRKNGNPYLSWAFSEAAYYAERNRPLAKQFAQRKKAKRNAIVANRALAHKLARASFYVMRDKVDFDPELAFR

SEQ ID NO: 118868 - protein, 354 aa, unidentified
MVAQFPTRSIPSAAVRRDRSAALGERLIAQPLFPLPFAPKTVLAAPVFIGVDVSKNWVDIADTQGRKTQVANEYSAIKAALAGPWSSCANMVCEATGGYERVLMRVARQAGLPLRRVHPNRARAFGQATARLAKTDALDAQLLAKFAAFTLNEPWAPLPDPKAQELADMVARLTQLTDLHQSESCRAKLAAGVAIKKSIHAVAKVIKAQIDAMQDAIDAFIAADPTLAENAKILRSCKSIGPKSAQAILGMLPEIGTLNRRKIAALVGVAPITKASGSSVNHASIKGGRKALRDILFMAALTASRHNPTFKTFYQRLRANGKPHKLALVAVLRKLITTLNAMINSRQMFKIALT

SEQ ID NO: 118869 - protein, 370 aa, unidentified
MGNRSMFVGLDVHKETIDVSIAEGERHGEIRHYGVIASDLEPLDKVVRALRAPDRRLPFVYEAGPCGFGIYRHLTSRGEDCVVVSPSMIPKRSGDRVKTDRRDSQMLARLHRAGELRAIYVPDDADEAMRDLVRAREDAVGVGTQAKYRLKAFLLRQGRRYPGREGWTLPYRRWLTDLSFPSAAQHIALQEYRDTIAETEQRIDRLTEQLRQLAPSWRWAPVVAALQAVRGVSFLTAVALVAELGDLTRFRHPRELMAYLGLVPAEHTTGPRVRRGAITKAGNPHARHLLAEAAWAYQGVPRIGRQHAYRQEALPKVVCDIAWKAQLRLTTRFRRLVAKGKAKPKVATAIARELTGFIWAIAQEVSPAPQ

SEQ ID NO: 118870 - protein, 464 aa, unidentified
MTDKKLWRNRKERKEWARRLQSEDPGLEIVHPHAAGIDVGNGAHYVAVRPDRDPEPVRRFECFTADLHHLADWLQSCKVKTVAMQSTGVYWIPIYEILEERGFQVYLVNARHTKNLPGRKSDVQESRWLLKLHTYGLLNNSFQPPSEIRVLRTYWRQRGEHVHGAATCIQRMQKALTQMNVQLANVISDVSGLTGQAIIRAIVSGERDPRKLAELRDPRIHATHEEVAKSLEGNWRPELLFVLQQEVEMYDIYQRRIAECDQQLQKHLASFVDIIPSPTSQVEPKRKKAKPAKNAPRFELSSELQRITGVDLTRIDGIDIMVAQTLVSEIGLDMSRWKTEAHFASWLGLCPDNRVSGDKVLGRGTRRVINRAATALRMAAVTLMRSRTYLGAQYRRLRTKLGAPKAITAMAHRLARLVYRMLKYGQGYVDKGAEYYEQRYRRQQIEFLTKRATKLGLQITVAHA

SEQ ID NO: 118871 - protein, 372 aa, unidentified
MGHHTEVFVGIDTSKSRNAIAIADGGRGGEVRYLGEFPATEAAIRKLVAKLAAKCCHLTFCYEAGPTGYGLYRLLKSLGHDCLVVAPSLVPKKAGDRVKTNRRDAVSLAKLLRADELTAVWVPDERHEAMRDLSRARQAVKKDLQGKRQQISSLMLRLGRIYPGKTTWGPTHMRWLMSQKLEHREQRIAFEELLEGIRQESERMERLEDAIREVVPEWSLAEVVVALQAVRGIDLIAAVGVLAEIGDLSRFQNPRELMGYLGLVPTENSTGDQVKRGGITKAGNGRARRILVEAAWSYRYPPRVSRDKQPKVEAAPRGAREIAWKAQTRLCGRFRSLERKGKRRTVIVTAIARELSAFIWAINRELMPPRQA

SEQ ID NO: 118872 - protein, 339 aa, unidentified
MTTHICGIDIGKTVFHLVGLSKEGHIIVKKRFNRKQLLTYTVNLPACLIGIEACAGAHFLARALIAQGHNVKLMPAEYVRPFVKSNKNDYVDAEAIAEAVQRPTMRFVPIKNEAQLDLQALHRVRDRWIGRRTAVINQLRGFLLEHGITITAGPAHLKRQLPSILEDAGNLLSTRMRTLLMELREEWEKLEEQIEATNRELAQSAKKDDRCQRLLTIPGIGPLTATALTAAIGNGTAFRKSRDLAAWLGLVPRQHSTGGKARLFGISKRGNPYLRRLFIHGGRAVLARVKRENHTFGSWLDRLEGRSPRNVAVVAMANKLARIAWSVLTSGRPYCATVA

SEQ ID NO: 118873 - protein, 354 aa, unidentified
MKAITFSNLQFFIGIDTHLKQWKVTIRNCGIELKTFSMNPSPDELYKYLNKHYPNGTYFVVYEAGFCGFWPQRKFSELGINCIIVNPADVPSSGKEKSAKSDPVDSRKLSRELENDSLKSIYVPEPYAEQLRSLMRLRFRLSLGQTRIKNRIKMLLYNYGISFPKEHLTNSRWSGYFIHWLKSVKLSSSAGQFTLNNLIDQLEQTREHLKNVLRQLRQEAKQEDISAVINALTSVPGVAFITAMSIYTEIIDIRRFKRFDELCSFVGLVPSVYSTGETEYTRGISFRHNKFLRPLLIEAAWTAVRKDPALTLRFNELIKQMSKQKAIIRIAKKLLRRIRHVWMNQDSYVKALVA

SEQ ID NO: 118874 - protein, 344 aa, unidentified
MPHYVGLDVSQKTTAICVVDEQGRRLWRGACVTEPGAISARVLRHAGVVDVKVGVETGSMTPWLVHGLRSAGLDVECLDARRVKAALQMRLNKTDENDAEGLAQVLRTGWYRPVHVKSFDAHRARALLGARAQLVGMTTRLSNMIRGVLKTFGLLPGAGRGLRFDRSVETLLEGAPEIGLIVRPLLATWRQLREQIAVFDKAVQQRVRADPICRLLMTVPGIGALSSLVYVSTVEDPGRFSRSRAVGAHLGLTPRRYQSGETDRSGHISRCGDGLARTLMYEAAVVILHRIKRSLHLKDWAAAIEQRSGPGKARVALARKLSVILHSVWRSGEPFRWTPHTIAA

SEQ ID NO: 118875 - protein, 414 aa, unidentified
MDVVHPRCAGVDVSKRDAKVCVRVAGAGRAKARSTVTTWGSVTNQVLALRDHLIGEEVTLVVMEATSDYWKPFYYLLEDGPFEVMLVNARHVKNLPGRKTDVSDAAWLADLGAHGLVRGSFVPPAPIRQLRDLTRARTMITRDRAREIQRLEKLLEDAGIKLSSVASDISGVSGRLMLAALIEGERDPVVLADLAKRRLRSKIPELTEALTGRFGEHHAFLARVHLDLIDQHTSAIDELTARIEEVIEPFRGARDLIVTIPGISTGVADVIIAETGADMTRFPSAGHLASWAGTCPGSNESAGRIKSTHTRPGNPYLKGALGIAAMSAARSKGTYLAVKYRRIAARRGPVKAIVAIEHAMLIAIWNMLATGAFYSDPGADFSTRLNPEKAKNRALDQLRKMGYDVTLNPLAAAG

SEQ ID NO: 118876 - protein, 417 aa, unidentified
MTQAYKNLVGIDWASDSYEVCVVDDNATVLGKKQVEHSGDGIRQFIDWLLQMAGGDASSIAVAIEVPHGAMVESLIENNVAVFAINPKQMDRFRDRYTVAGAKDDALDAFVMADSLRTDQPCFHRAELDEPAIIRLRELSRMEQDLQTDSNRLANQLWEQLRRYYPQMLKLSPAADEVWLWDLLESAPLPGGTLKLAKVKALLRAHRIRRVTAEQVLEQLRQPALRLAPGAAEAASEHVQMLLPRLRLLQQQREATARRIRQILDELCTVPPEGQGREHRDAEILLSLPGIGPVVAATMLAEASQPLRERDYQALRNYAGAAPVTRRSGKRKVIVMRYACNEPLRNALYHWSRCSMQKDARAKQHYAELRQRGHSHGRALRGLADRNLAMLMSMLKSGTLYDPAKRGSVAVAEAEAS

SEQ ID NO: 118877 - protein, 305 aa, unidentified
MVFYIIGPRTPFTVSNDSDGFNAIITGLRRHSVALVLMEATGGLEVAVACSLQAESFEVAVVNPRQARDFARAMGYLAKTDRIDARVLTQMAEVINRHPERKRFIRALPDAERQALAAMVVRRRQLIAMLVAERNRLYPSHPQNKKSINTIIKALEDELARLEKDMNSHIRNHFKEIAERLSSIKGVGTMTVSAMLAEIPELGTLSRREISALIGVAPVNRDSGTMRGRRTIFGGRAGVRSALYMAALVATRFNPVIKTFYVRLLAAGKAKKVALVACMRKLLTILNAMLRKNEEWDESYHHVAP

SEQ ID NO: 118878 - protein, 327 aa, unidentified
MNDSQVVYVGIDISKDTLSVDAGDLFKGDVPNTPKGRAGLVARLRKAARGAVLHLCFESTGPYGAPLFEACCKAGIRASLLNPAKVRHFAKAMSRSAKTDPIDASVIRHFAQTRKPAPSHAPGANERRIRQLVLARDALTKNVVQLSGTLDSLTDAGAKKHAEKAIRMSKGEIRLLDRQIAETVKGDERLEGLTGTLAGIDGVGALTAAKVVALVPELGTLGRRGSAALAGVAPFKRESGEYKGKAFIHGGRASLRQALFMPAMVAIRCNTVLKAAYEKLVKAGKPHKVALTAVIRKLFAHMDSLAAKWLAEHSAVTGVPAQALSAT

SEQ ID NO: 118879 - protein, 345 aa, unidentified
MKIMRVGVDLGKNVIHVHGVDRNEQPVWRQRLTRGKWLKALLAKVEPGCEIGMEACGGAHHWARELQARGYRVKLIPPQFVKPYVKSNKNDRNDAEAICEAMSRPTMRYVGVKSVEQQDIQAVHRVRAELVGQRTAKSNQIRGLVAEYGVVAPKGLSQLRAALPHWLEDAENALSARLRGLLAGLAEDLRELDRRVAQLDAEIEALARSLPAAQRLQQLRGVGPVIATALVAGLGSGSQFRNGRAFAASLGLTPKQHSTGGRERLLGISKRGDAYLRKLLVHGARSVLSRAKDKQDRLSQWATRLAGRRHVNVATVALANKTARMAWAMLRAGVEYDPDKAACPA

SEQ ID NO: 118880 - protein, 357 aa, unidentified
MKKTAIIGIDFGKESLSAAFLFGEDIESAKVIKEQSYKNTQKGFQKLSKDLLKALSSEGLNLSDALVIGEATGIYHKPFAIAFTRIGIDCKIANPYVIKHSTGTLSRGKSDKADALKIARFGMRFHGEVELFRETTPILTKIENLIDRRRELVDLKKRAATRLKEWIFKIDGGLVDLGDPDMEQIDQDRREDVKLYSLKIKEIDKVILRTVKGDKEIDELFALLASIPGVGLTAASTLIVATRGFTRFSSPKALCTFCGVAPQLFESGTSVYQTPHRSLKADPEYASLLYLVAMAALRSSKRMKEYRDRKQKEGKPFLLIVNNIKNKLLTIMFYIAKNKTLYNDDYVSKAFLQDPAA

SEQ ID NO: 118881 - protein, 378 aa, unidentified
MNRIIKIGMDVHTTNYTLCIFEPSFEHDGTVHCITQVKPEVKNIIHVIETFKKKHENEELNIVCGYEAGCLGYSLYHELKEKGIECAILAPTTMKTEKGGRKLKNDYRDAKMIAECLAYGGYSAVHVPTELDNSVKEFIRMRDDIKENLKSIKQQIIAFLTRNGKQFEGKSYWTRKHIDWINTVSFSEPLLQDTLNEYMIEYNHLCDRVEILDRQIEEISLKEEYVEKVQQLQCLIGIKTHTALSLIVETSDFNRFKKGNMYSAYLGLIPGDDSSGGHENKVGITKAGNSHLRRLLVEAAQGYTRGRVGFKSKDLKARQEKCGSEVVAYADRANERLRRKYYRMTLRGKKYNVAKTAIARELACFVWGIMTDHIDLCS

SEQ ID NO: 118882 - protein, 320 aa, unidentified
MNTSDAQQSCETTVYIGIDVCAQWLDVAGLDAGAKPKIRRLPNTASGHALLVKLLPAAAHVVFEASGGYEHKLWLALLRCGKKVSRVNPARVRHFAKADMKLAKTDAIDAAVLAAFGARFDLRADVLPADWELELADLVNRREQLVAARAQQEVQLQQLHNPRLQLQAKRLIKTFDQQIKHLDKLIAGLLQSEAAKPKAERLCLMQGVGPTVAATLIAHLPELGTLTDKQISSLAGLAPHPEDSGPVKGARHIQGGRMKVRRVLYMASLHCVRCNAILKAFYQRLLIKGKPFKVAITAVMRKLLCVLNKLIARPDFTLAS

SEQ ID NO: 118883 - protein, 411 aa, unidentified
MNNTLFVGIDISKRSNVATFMNCEGKVVGRLTFSNNGSGADRLVAKILSYYEKEDFEAIRIGMENTSVYSKNLVWFLYEHEALNEHKLSIIPLNAIMVANYKKSFLDMDKDDITDSFAIADFIRIRPGLLPFKLDDRQEALKIMTRSRYNYVQALSRMKSQFLTRLFLSFSEMEAGKPFYSIFSKTSLSLLEEELTLDELAEKPIPELLEFLQEKGGGKFQNPEEIAKVLKKAASSSYRVPAMVRESLNRTMASDMEIMRILENEIHNCDKNIEKLMKSVLAILVSIPGIGPVLAAGIMSEIGDISRFQKQESLGKMAGFKWKRNQSGKKESEDKAAVLSGNKKLRYYLVEAANWVRIHDPVFEAYYRKKYAESKTHAHKRALILTARKLVRVIFYLLKENKLYKPDVGIS

SEQ ID NO: 118884 - protein, 339 aa, unidentified
MKYTPVGVDIAKHLIQVHFIDEHTGEVIDKQLRRQDFLMFFCNREPCLIGMEACRGSQHWGRELTKLGHKVRLLQAHFVKAFVMGNKNDVMDARAIWMAVQQLGKDIAVKTEEQQSVLVLHRSRRQLVKFRTMQINSLHGTLLEFGKTIHKGRAAMERELPEALERMKERLPPYLITVLENQYNRLNELDSLIEDIEKKLTSVARQNETCKRLLDIPGVGPLIATAAVATMREASAFKSGREFAAYVGLVPKQTGSGGKIRLLEISKRGNTYLRALFIHSARAAALLPKEPGPWITELKKRRPTSVAIVAMANKLARTVWAIAAHGSKYDKNHVSIRSY

SEQ ID NO: 118885 - protein, 377 aa, unidentified
MHKDGSAFVGLDTSKLKISVALAEEGRQGEIRFFGDIENTPGAVRNLVTKLTGKYDKLQFCYEAGPTGYGLHRQLTDLGQDCVVIAPSLIPKRPGERVKTNRRDAVSLARLHRAGELTAIWVPDAEHEAVRDLVRAREAAMLELREKRQHLQSFLLRHGRIYAGRRPWTKVHARWLSNLSFSHPAQYLVLREYRQSIEDAEARLERLTDQVAEVVSSWSMSPVVDAYQAMRGVAFLTAVIFVAEIGDVRRFETPRQLMAFLGLVPSERSTGETVRRGGITKSGNPRARRVLVEGAWTYRYAARLSRPLEVRQERLPKTVRAIAWKAQLRLCARYRRLAAAGKRQTVVTTAIAREMAAFLWAIGREVEPLQPKQVAAC

SEQ ID NO: 118886 - protein, 365 aa, unidentified
MQSTATVTTIAIDLAKNVFQLALADRDLRVVRSLRLRRKEFLAFWSNYPVVQVVMEACGSAHHFGRWVSALGHRVTLLPAQHVYRRRRNKTDAIDCVALLEALRAADIRPVPIKTESQQVIQMLHRARQQWQKMRTAQINLAHGALREFGIAVPEGAARAVACMRAEQANAQLDPMIRGLLQSLLQEIAMLERRVADVDRQFAAASRTDVVLHKLQTLPGIGWVTASAIRASVGDIERFANARSFSAWIGMTPAQTASGDKRKLGRSKQGDTYVRTLVIQGARAVLAAAQRQRLTTRPLSAPGHWAATLADRRGFNKAAVGSGQQAAAYCRRNQKVPIKGRIDDCTDPASTIRSTSKRLTWGRSP

SEQ ID NO: 118887 - protein, 319 aa, unidentified
MIRTICGVDVASSSLEARIGPLGASARFANDPTGIAALAQFCRDHQVDLVAMEATGGYEQQAVAHLSDQELAIAVLNPRSVRQFAQSMGRLEKTDAIDAGMIAWYAEVKQSKPITLAPHTQRHLRALVTRLRQLTELRTAQLNQQRLITDPLVQDSFAQLLGLLAEQIAMLAQSIAALIEQDPLCRELNLAMRSIKGVADRTVARLMADLPELGTLSNKTISKLAGVAPIAADSGKHQGKRAVRGGRSSVREILFIVASVVGRYEPDFIAFQQRLRASGKPPKVVRIALAHKLLVRLNAKAREVRTQIQAASPKRTVTP

SEQ ID NO: 118888 - protein, 348 aa, unidentified
MKNHQIGIDISKEKVNICLRKERKSIWEHECPNTVTSIKKAIRKGMKDHGVATDEVVVCAEFTGRYIYPLVCACDELGLFLWMEDPTRIKNSFGIARGKDDKIDARRIAEYADRFSDKAVAYGMPDRTLVSIKSKLADRDMLLEDRKRYETQLHDQKGFMDPKDYAQKSRLWNAVIKTLDKQLALLDMQLAELVASDKKISRQVELLKSVDGIGDRVALYMVAVTMGFKRFQNPRQFFCYAGLAPFRYTSGKSIHSKSKVSQRANKRIKALLHLAALSAATHMKDGEYRRYYERKTAEGKHPLSVLNVVRAKLVSRMFAVIRRDSVYQKNYAFSNSLEKNSALPIANS

SEQ ID NO: 118889 - protein, 392 aa, unidentified
MNLYALGWDNHRKFSKVSVMEQTPDGDIRAVERARLEHDDKDAMRAWLSRLDPEIPVALEATFGWPWVADLLEELGHPVHLAHPPIVRALAKHEAKTDRCDSDRLGKFQLRGILPESYLAPPAVRQRRERTRYRMALSALRTAVKNRAQAVLHRHGILHDFSDLFGKAGRRFLEDLALPEGSQQALTGCLQLLDSLTLLIDEVEAWMVENLETDQIVRLLMTIPGVGLILAHVIHAEIGEIERFPTFRHLASYAGLAPMSDDTAGREGPRHCSAACNHVLRWAFVEAVHGVQRTKGPHGFRLRQLYARLCVGGKRRGRKSSAKVAVAHELSKLVYVVWSKQIEYTDTPPSRPGSREDRREPKESRTPKTTLRSDQPRHPMVRRRATVGQTRL

SEQ ID NO: 118890 - protein, 341 aa, unidentified
MRKYIGIDLHKNRFTVCYMQKNGLYQLREFQIRKGLEGFKKTLNKDDEVAVESTGNTGYFTREIEECVKEVKIINPTQFKIISRSVKKTDEKDAAIIAKYLSKGLIPEVRVRTKEESKLASLIGTRDRFIKLRTVLKNKIHNILNSNGIVTKTEMFSSKKGLDNILQMELDESDQFELGIIVEQIHSLNKAIDEIDKKLTERGRKIDGHKNLTSIKGIGDLTATILLSTIGNINDFPDDKRLAAYFGIVPRVAVSNETSRYGRITKMGNKIARTALVQSTLIAIKYNYYLKAFYLRIKSRKGSGKAIIATARKLLSIIYRTLKNNWIFEDFTNFKYIVAST

SEQ ID NO: 118891 - protein, 341 aa, unidentified
MSITIAVDVAKSIFEVAVSDRPGRVVKRARLSRTQFTRLVVTHPPATLLMEACGTAHFWGRQALAHGHRVVLLPPHAVRPYVPRNKTDRADATALLEAARNEAIRPVPVKSIPQQTLTALHRLRSAWLAARTARLNTVRGVLREFGVTIPVGARSVLPRVTALLAAEDGLPPALHPALTAMVAEIRDLEHRIHTVEQQLAGLATTTPGVAPLQTIPGIGLVTATALVAFVGDAHRFPSGRHFASYLGLTPREHSSGLRRRLGAISKRGDPYLRMLLVHGARSILWHAKRAPSRTRLHTWGLAVQTQRGHNKAAVALANKLARCAWAVWTTNRPFHDVPVAA

SEQ ID NO: 118892 - protein, 347 aa, unidentified
MAMTDGLTLGLDVSDKYTNYCLLDCEGEVSEEGRLKTSEPVLRKRFEGMPCRVVIEAGAHSPWLSRMFEDMEYEVIVANPRRVQLIAQSNRKNDRADAETLARLGRADPKLLGPVKHRDQQAQADLAVVRGRNALVAARTLLINHIRGAVKSVGGRLPASDAHSFHRRAKEHIPQELRLALEPLVDTVEQLSFQIREADRRVKALIEERYPAAACLQQVAGVGPLISLSFILTIGDPTRFQRSRELGPYLGLVPRQRESGDSSPALRISKAGDSFLRQLLVNGAQYILGYRGPDCDLRRWGLNRAAGGKAAKKRAVVGVARRLAVLLHRLWVTGEVYEPLRRGAVAA

SEQ ID NO: 118893 - protein, 475 aa, unidentified
MIQIPAVIERCAGIDVGKRELAVAVIVGPADQDGEVETRTFGTTVPALEELRAWLIRQGCTSVAMESTGSYWIPVKNILEASLRIVLVCAKKHKPARGDKTDFRDAKNLAHLHRHGLLKGSFLPHQTVVELRDLTRRRKKLLANLAAEKNRIQKVLEVANIKIGSIVSDVFGVSGQAMLSVLVGGKQISAEEIANLSKRRLRQRIPELTEALQGHHMNDHHRWLIAQCVEHAVLLDRQMEELEARIEEKLQPYREQYELLQTIPGVKEMTAASILAEIGPDMSQFETAKHLCSWAGISPGNNQSAGKRKHSRIKKGSKFLLATLVEAAWAAARKRDSIFQRKFHRWMRTLGEAKANVALARSLLEVAYVLLKERRPYQEPDPKQMHELEKAKLVRHHAKRLRQLGADNELVEEVVARLSRHDVSSSAEKETAAQLPLQRIRRISPAKVCRGALGFRARQTRKHEYSIIKKDPLKR

SEQ ID NO: 118894 - protein, 408 aa, unidentified
MRYLIGIDAAKAKNDIAIFNSDMGLVRKPFTVSQSQSDIQKLAKSFAAIDGDVRAVVESTGRYHLPIVEQLSKERIFVSVVNPKLIKQFGDNSLRNVKNDPADAKKICRYGILNWDSLREYTNMDELRTQLQLYNSQFEFFTSQKVSVKSNLIALLDMTYPGINQLFNSPVRPDGSEKWVDYAELFWHVDCVRSLSLHAFSEKYRHFCEKQGYHFQQSKCESLYASAQDLIAVFPKNAQYKALVKMAIGNLKEVITHVETLRAAMNEIASQLPEYPVVMEMKGVGPSLGPQLMAEIGDPMRFKHREALTAFAGVDPGVNQSGTLNQGSNSASKTGNPRLRHTLFKIMEVLIKLHPEEDKVYQFMDKKRSEGKPYLVYMTAGANKFLRIYYGKTREYLHALEADKETNE

SEQ ID NO: 118895 - protein, 369 aa, unidentified
MHKRITLHVGLDVHKDSIEIALADASQGGEVRHYGRIGGDLASLDRAVRQLGGAQRALIFTYEAGPCGYAIHRHLLAQGHACQVVAPSMTPRRPGERIKTDRRDCIKLARLARAGELTIVQVPDAQDEAIRDLVRARADAVRNQRDARHRLKALLLRQEIRYAGKTAWTPAHERWLAAVKLPHAAQQIVFQEYVDSVREATQRIVRLTRALHEAVAQWRWQPVVQALQALRGVQLVNAATLMAEIGDIARFAHPRQLMAYLGLVPGEHSSGSHRRQGSITKTGNAHARCALIEAAWQYRLPARITPIIAKRLEGVNEAIRALAWKAQQRLCGRYRKLAARQLHKNKIVTALARELTGFVWAIVHEASTP

SEQ ID NO: 118896 - protein, 438 aa, unidentified
MSNKVIFNLDELFISVGIDVGADFSWMSIVLPNQQFVGKPYKILHNSIDSLSTAVSKIKETEELYSLESRIFLESTGIYHYPLFCYLRDKGFNCSVINPIITKNSTNMNIRKVHNDRFDSKKAALVGLKPDLKVSIMPSDLALNCRNLCREYYNLMDNRSAYVNKLQGELRMAFPQYLGIFSKVTINTSLTLLETYTSPAAFIEADKQEIIDTIKSTARFGLTYAKAKYNAIIQAANEAHEFGYIIDSNITRIRLYISFIRKYDEEIKGILDAMHELVDSNEDSNFVKQIHLIETFKGTGFLSSVSLMGEIGDFSAFSKPKQLFAYFGLDPAVKQSGKFEGNKVKMSKRGSSIARRVIHTLTLQSISISRSGEAKNPVLHDYYLAKCEAKPKLVAMGAVSHKVCNMIFAILRDKKPFEIITPKEHIKQYNAVKCDKAA

SEQ ID NO: 118897 - protein, 366 aa, unidentified
MKQQHQDSEVTIGLDLGERRHRFCALDGRGEVVEEGSLLNNRASLARITARYRGALAVMEAGTHSPWVSRYLEGLGWEVIISNPRKVRAIYQHERKSDQRDALMLARIGRMDRALLYPVRHGSEQAQQDLLRIKLRDSLVRARVALINSVRFSLKSLGYAVCNPSSERFHKVAMERLPERVQQMIAPSVQALAELSTRIAVLEREINVLARTKYPQTLWLQQVPGVGALTALYFVLKIEDPQRFENVRDVGAYAGLCPRRDQSGQSDPQLRISKRGDPYLRRLLVSAAQYILGPFGPQSALRAYGLMLAADGSARARKRAVVAVARKLAVLLLSLWKNRSHYEAFPHWQTIEDKRSGTIAMHRVEA

SEQ ID NO: 118898 - protein, 389 aa, unidentified
MLLDHPSDEPAAIRTQFGAIFVSLELSRSNWLVTSLSPGKGQKMSKHNVAAGDIAGLLQLFAELKRRAQARTGQDYPIITIQEAGLDGFWLHRVLQQEGIESHVVDPASIATPRRRRRAKTDRLDGETLLRALLAYKRGEPRVCAMVVAPSPEEEDRRRICRERATLIAERIAHVNRIKGLLSAQGISDYAPLRRDRRARLAALRTGDGRELPAHLRAQIGRELDRIELLLEQIKAVEADQDALVGAAEDKAGKGAVPAPVAMLLALKGMGANFAAVLWSEAFYRQFANRRQVGAYAGLAATPWQSGGIRHEQGVSKAGNPRLRTKMIQLAWLWIRHQPQSELTRWFKARSQQGRKSAIVALARKLLVALWKYVTAGVVIEGAVMKRAA

SEQ ID NO: 118899 - protein, 373 aa, unidentified
MKSKTPQNSDNSTATAPVQNIKLGLDVHADSIVVVRIVDGQTPQPAQRFSPEKFLQWVQKQLPLAEKIYACYEAGPMGYSLQRSLTAMGIVCYVVRPRDWDEYGERVKTDSRDAHQLALCLDRYVSGNTRAFSLVRVPTPQEEQQRSLTRHRQALQNHKQRLAAQGRSHALYYGHRLALSSWWKERSWSDLEEELPDHLLRLLSSLRGLIQSTEKQLNALTREIQQKAQAPLPRGVGKLTAQVLEREIADWSRFKNRRQVASYTGLCPSEDSSGQRRFQGHVNKHGNRRLRPVLIECLWRLIRYQPQYRLVRKWRSQLCASKATASRRKQIIVAMARQFAVDWWRIRTGRVRAETLGLIFQEDFVPSTRPQAK

SEQ ID NO: 118900 - protein, 311 aa, unidentified
MTYAGIDVSQATLDVATHEGPTIQVRNDAGGCAAVVQRLLSETTTLVVLEATGVYHRLVTTALVSAGIPVAVVNPRQVRDFAKSTGQLAKTDRLDAALLARFAAVVRPTPRPIPDEATQALAALLERRRQLVEMLTAEKNRLAVALKHVRPSVQQIIRALEKALAATDDEIDRWIRSSPIWRAQEDLLRTVPGVGPQTARLLIAALPELGHLTRREIAALVGVAPLACDSGTLRGQRHCWGGRSHIRAVLYMAAVTGTRCNPILRACYRRLRVAGKPAKVALVACMRRLITILNAMVKTQRPWQAPALLTP

SEQ ID NO: 118901 - protein, 417 aa, unidentified
MKCFVGLDVSSTKLDVCIMLSDTTTPFTASLPNDLIGAQEIKNQILELNDTHSFERIVIGMEATSLYSFHPAMFFHEDSQLKALNVEVMVEQPNKIKKYRETFEESKNDTIDAFYIADYFRIERFSPAFLKEQKYMALQHLTRTRLQLIEQLTRTKQHFIENIYYKCNTLSTEIKSENLTTSIWSSTIISLMTEDYTLDELANVPLKDLADFIQKLGRGRFKAPEKLAKAIQAAIRGSYRLPKLQQDSVNVVLGLLAREIRNLEQMIKDIDKAIEDMVEVIPEYQCLTSVPGVGKVYAAGIIAEIGQIERFKDHPQVAKYAGLNWKQNQSGNTNSQNTDLVKRGNRYLRYYLVEAANSVRRHDSEYNAFYKKKYQEVPKHQHKRAIVLTARKFVRLVDALLRNRQLYTPPRRPMEDK

SEQ ID NO: 118902 - protein, 318 aa, unidentified
MKVLHAQCAGLDVHKETVVACARLQDGGEVKRELRRFATTTQGLLELLEWLLERGCSHVAMEATGVYWKPVWHVLEGHVELVLANAAHVRNVPGRKTDTNDATWLADLLAHGLVAASFVPPTPIQELRDLTRTRRQLVREISQHTQRIQRVLEDANVKLASVLSNVLGLSGRRMLEAIVSGEDDPETLAALGHERLKCSREQLREALRGRVTDHHRFLLRQHLATLDHLQRVVGEFDAQIARGLEPFRAELERLVTIPGVAETAAAVLIAEIGVEMSQFPSAGHLISWASLCPRLDESARANAARPGCARGLRGSSPC

SEQ ID NO: 118903 - protein, 344 aa, unidentified
MQALRTHVAGVDVHKEMIVVTTAIGDADQDPIEEHFECSTMTDDLIGMGRLLLDRGIKHVAMESTGVYWRPVYNVWHPMGIEVTVGNASHMKSVPGRKTDLKDSQWIARLHRMGFIKPSFIPEPIFQRLRQLSRHRTNLAEDLARVKNRIHKVLEDGNIKWSSIVSDTFGASGLKILRAIARGETRAKTLASYASTNIKRKEDIEKSLKNYLTTEHCFVIKSLMSQFDFLSEEIRRLEGEMAEKMKPYAHLIEELDKIPGIDKVLAMTILAETGVKMENFADERKFAAWAGVAPGNNESGGKKKEPSVAGVIQTFAELLSKQRMEQNKNIAPTIAPSSQSCSFD

SEQ ID NO: 118904 - protein, 353 aa, unidentified
MPMKTNTPPKTETQDRIQQLKLGVDWHADHFRVVRMCDGQSPQPAQRFTPASFLLFVQKQLTLADHVFVVYEAGPGGFHLHRQLIALGVTTYVVHPQKLDPNHKGVVTDKTDARELTLNLDRYLRGNQRAMSVVRVPTEAEEQRRALSRQREQLRRERQRLAAQGRSLCLTQGIRLRGEWWAQTLALPEWLAPRLQVWRQLITAVEEQLDALTKQVEALAPKARPKGLGPLTLGMLIAELCDWSRFENRKQIGSYTGLCGGVSSSGQSHCDLSITKAGNARVRWSLIELAWRMVLYQPQSKAVQRWKHVLLNPKAAARQKKRALVALARQLAVDLWRWQTGKVTPEQLGWVMV

SEQ ID NO: 118905 - protein, 358 aa, unidentified
MTVNYVIGVDVHKHNHTFVAVDCTGRKLATKSVRATTAGHQLALRWARTTCPGSRLWGVEDVRGLSGLLEAELLEAGESVVRVPPKLTARQRASARTVGKSDAIDALAVARAVLREPDLPTARHDAYTRDVKLLVDYRDTLLTTRTAITNRVLSRLHELAPEHSSTRLVLRYANHRRVAQALLQSHTGLLAELIRTDLTQIARASDHINSLEKRIKDAVQCGASALVGIDGCGPLMAAKIIGETADVSRFANEAKYARYAGVAPIPHWSGGTPVHIRATRSGNRQLNRALHTIAMIQIRHGGRGEHYYRRRIADGDTHRQALRCLKRQLCRTVYRALLTDTKARATAASVETGDNLVE

SEQ ID NO: 118906 - protein, 385 aa, unidentified
MKPNSQMTLGDFFRQCVGIDISKKKFTACLYMYDRASDVGCYTKSIDFANTKSGFNQMVKWSRKEAVKEYPLTYLMEPTGIYYEPLAYHLHKIGQTVYVVLPNKARKFCEAEGIKTKTDAVDARCLALMGCVSRKLSPWSPPSTIYHELRQMTRFHADLCKVRASVSNRMEALDHMHGPDKSVIRHCQKLLEEIDKLMEKNGQALLQKLSENKELEERVKRIATAKGISVQTILCVVAETNGFHLIRNRKQLTSYSGLDVIAKQSGNEDPKHRISKKGNVHIRAALYMPALVAIRYNRQLKTTYDRICQKHPKEKMIGITAVMRRILLLIYTLWKNGEEYDETRDMIRMPRKKGLEPENGQEDLVGIDREPIDWNAVGDNGEPPF

SEQ ID NO: 118907 - protein, 399 aa, unidentified
MFYCGIDIAKRNHEASVIDAEGKPLLDSITITNTQEGCEKLFSLFERLNICKDSIIIGMEATGHYWLSVYEHLNEQGYDVRVINPIQSDAFRKMYIRQTKNDSKDSFIIAQVMRFGQYSETTLSDENTVAMRQLTRFRMALVDNCGDCKRRIIALLDQVFPEYADLFSDTFGTTSKELLLNYPTPDDMLAVSTRKLTTFLNKTSHGRFGEEKAKEIRSAASNSFGVGFAKNAFAFQIKQLVEQLVFLEAQIEELDEQIAHLLKQTNQVITTIPGIGDTLGAIIISEIGDINRFDAPNKLVAFAGLDVKVVQSGDFTGTKQKISKRGSPYLRRAIWLAANRAAFCDPILSEYYQSLKARGKHHLTAVGAVSRKMCNIIFTILRENRPYEATPPKKGNVES

SEQ ID NO: 118908 - protein, 321 aa, unidentified
MAAILGIDVAKNKFDVALYRNGKYKTKVFDNKSSGFEGLAVWLKQHGEMLVHACMEATGSYGDALARFLFEAGHKVSVVNPARIKAFGKSELLRTKNDKTDAKLIARFCEAHKPGPWQPDPPEIEHLRMLGRRREALIDLRTQEVNRLNGPDSAVNESVQKVISFLDEEIEQISKAIKDHIHKHDGLRKKQALLKTIPGVGDVTIEAILSEINGFEGFDTIEQVVAFMGLSPKEHNSGTSVRGKAVLCKIGNARLRKVLYMPTLSAIQHNPFVRALYDRLIAKSKNGMIIACACMKKLVHIIYGVIKNGKPFDPAYNIKTA

SEQ ID NO: 118909 - protein, 392 aa, unidentified
MNPRALGWDNHRKFSKVSLMEQTPEGEIRTVERARLEHSDQEAMRAWLSHLDPEIPVALEATFGWPWVADLLEELGHPVHLAHPPVIRALAKHEAKTDRCDSDRLGKFQLRGILPESYLAPPEVRQRRERTRYRMALSALRTAVKNRAQAILHRHGILHDFSDLFGKAGRRFLDNLTLPAGSRQALQGCLELLDKLTSLIHEVEQWMQENLEADEIVRLLMTIPGVGLILAHVIRAEIGEIERFPTFRHLASYAGLAPVSDDTAGREGPRHCSAACNHVLRWAFIEAVHGVQRTKGPRGFRLRQLYARLCGQGRPKGRKSSAKVAVAHELSKLVYVVWTKRVPYTDTPPPRPGSREGRRPAKESQTAKTTLRSDQPRHPMVRRRATVGQTRL

SEQ ID NO: 118910 - protein, 326 aa, unidentified
MNPQGGVASEVARLNVGIDVSKQFLDACWGTREERFGNDAPGWDGLITKLRQADVDLVVIEATGGYERGLLCALQGAGIDVARVNPRQTRDFAKSMGVLAKTDRVDARVLRDFADVVARHKERHKYITLASTPEREQLAAMMVRRRQLVDMQVAEHNRLDLANARAARSIRSVLKTLEKQLADMDRDVDDHLNRHFKQQSKLLDSVKGVGPVTILTLTSCLPELGRLDRRAIAKLVGVAPLADDSGHRKGPRRTWGGRAEVRAVVYMATLTATSHNPVIKAFYQRLLAAGKLKKVALVACMRKMLTILNAMLRDQSAWNPLRHAQS

SEQ ID NO: 118911 - protein, 315 aa, unidentified
MSSQVFVGIDVAKAQLDIALRPTGERWAVTNGEAGIAALVTRLQTIDPQLIVLEATGGYQRAVVAALAAAGLPIVVVNPRQARDFAKATGQLAKTDGLDARALAHFADAVRPTPRPLPDAQTEELRALLARRRQLIAMRTAEQNRLSGASQRLRVDIQAHITWLDTRVAALDDDLDTALRASPVWREHEALLRSVPGIGPVCTRTLLLDLPELGTLSRQRIAALVGVAPFNRDSGTLRGTRTVWGGRAPVRATLYMSTLVAVRYNPVLKGFYERLRAAGKAAKVALTACMRKLLTILNAMVKHQTSWQPREVPIA

SEQ ID NO: 118912 - protein, 395 aa, unidentified
MKKVSTMTEGGATTTRGVAKTATGAVTIGMDLGDKFHVLRELDAAGRVVGEGRIAATRRALEREFSRRSPVTVAIEAGTHSPWVSRALEGWGHTVIVGNPRKVRAITSSTTKCDDRDAEMLARLARADRALLSPIRHRSEAAQADRAVLKSRDILVRSRTMMILHCRGVAKSFGAPLASYSAESFAVKARQEIPAVLAPALTPVLDSIEDLTRRIRKIDEEIEQACQEKYPETEPLRTIRGVGALTALAYVLTLEEEERFAKSRAVGAYLGLVPRRDQSGESDKQLRITKAGDRLMRRLLVSSAHYILGPFGADSDLRRWGLAKCECGGKNAKKRAVVGVARKLAVLLHRLWRSGEAYDPFHDSRRKEAFREKKERRMGREGDRGARANAVVAAS

SEQ ID NO: 118913 - protein, 340 aa, unidentified
MGEVSTIGLDLAKSVFQAHGADSAGGVVFRKKLRRDQLLGFFAAQPRCVVAMEACASAHFWSRELGSLGHEVRLIAPAYVKPFVKRQKNDMADAEAICEAAQRPTMRFVATKTAEAQAAAVIFRTRDLLVRQRTQLINALRGHLAEFGYIARKGPGHSERLIEVVRDPASELPSEARTVLLVIVDSLAALRGKISELDREIAMRARSSEQAHRLMTIPGVGPVVATAMVALAPPASSFRRGRDFAAWLGLTPKQHSSGGKERLGRTSKMGERSLRRLLILGASSVARIAARDGTRDRWLARMLATKPRMLVTVALANKMARIVWALMAHGGSYRAPAMAA

SEQ ID NO: 118914 - protein, 320 aa, unidentified
MSQEQWVGIDVCKKYLDIYVRPLGKLFQVTNDQEGISQLVKTLKEIKPELIVLEATGGMERKAALELTQSGFAVAVINPRQARDFAKATGQLAKTDAIDARILAHFADAIRPQVRTISDESSHELQDLVQRRRQLSDMITTENNRLRGKSDLVQSQIKEHIEWLQKKLQEIESQIKEAIAINEDWKEKLELLTSVPGVGQVVATTLVASLPELGKLSHKSISYLVGVAPLNKDSGKFQGKRRIWGGRARVRRVLYMATLVAVRFNPMIKPFYQRLLDKGKLKKVALTACMHKLLIFLNAMVRNNQLWQPQTLECANEHSS

SEQ ID NO: 118915 - protein, 338 aa, unidentified
MFYTGIDLHKFTSYLTTVDSTGAIIKQENLKNVAHNFVQYFHSIPGEHQATVESTMTWYWLNDLLSSMNIPLVLAHAKYVKAIAYAKVKTDKVDSHTLAQLLRLNFIPAAHKISAENRLLRDALRARLKIVQRHTSVTNSMQLLLAKYNFESPTELSGIPKFQYEQLTEVEALLDEQMLDLEKQLYPFLIPNDDIQRLLWIPGIGKMNAFTILLEIDDINRFPDVKNFFSYCRLVPSARNSGGKSKQRSSKDGNKYLKVAFSDAAVHAVQYYPVIRNYNNSLIRKKNKQIAKTIIAKEIAEIVFHVLKNKSDFNNTFKGRELEHKKSLQWPRVVSPYA

SEQ ID NO: 118916 - protein, 309 aa, unidentified
MEIVVGIDVSKERLDVAILPQEEVFAVGNDHAGIDELAERLKGIGVDAIALEATGGFEMLAVAGLSAAGLTVLVVNPAQVRAYAHAIGRRAKTDPIDAAVIAAFVLATKPEIRPLRDAETQALSELVARRRQIVQMVVAEENRLRMALAKQAQESIKRLLKALRRELESLDADLDSHIRKSPVWRVREALLTSVPGVGATTARTLLAELPELGSLDRRQIASLAGLAPWTRQSGKWKGKSFIGGGRGKVRAVLFMAALVASRYNPDLKAFRDRLVAAGKPKIVATVATMRKLLTILNAIIRDGRPWQNA

SEQ ID NO: 118917 - protein, 366 aa, unidentified
MLARGTEDKEHAMSQKLNSEIAVIGIDIGKNSFHIVGQDRRGALLLRQKWSRGQVEARLANLPPCLIGMEACVGAHHLSRKLQALGHDARLMPAKYVRPYSKGEKNDYRDAEAIAEAVQRPTMKFVATKTADQLDLQALHRVRERLVSQRTGIINQIRAFLLERGIAVRQGLHFLRAELPGILAKCTDVLSPRMLHLIEDLATDWRRLDERIEGLSDEIGALARHDNGCERLMTVPGIGPIISSAIVAAIGTGDVFSKGRDFGAWLGLVPKQISTGDRTILGPISRRGNRYLRALFVQAAWVVLVKIKPEGWERYGLRSWIEAAKQRLHHNVLAIALANKLARIAWAVLHKGRAFECVKTNASRAA

SEQ ID NO: 118918 - protein, 348 aa, unidentified
MQGPKTDITIGVDAHLDTHVAVALDSEGRLLSTTSIPTTGDGYSQFVSWAAQLGDITQVGIEGTATFGAGLARHLAGLGVHVIDVDQPDRRLRRTRGKTDAIDAEIAARAVLNGSQRTIAKSANGDVESLRTLRIARRSALKARTQAANQIRSLLVTAPEELRSGLRSLSLDRLITSASAWRHVAPQTTTAATKLALRALARRYQALTAEITDLDRDIRVLTARVAPELLALRGVGPDTAAALLIAAGDNPERLRSESSFAHLCGVAPLPVSSGKKRRHRLNRGGNRDANRALYTIVLGRMRLDERTRAYVARRTAEGLSKRDIMRCLKRYVVRDVFRVLRGASSPLA

SEQ ID NO: 118919 - protein, 411 aa, unidentified
MTAVIAGPSRFIGLDVHKHYVVVGAVDAQQTVVLRPQRLALEEFEHWRRAQLHGSDAIVLEATGSAWHLYDQLREQTPAVSVANPLLIRWIGAAPVKTDSHDTLKLARLLAAGLVPRVWVPPAAVRDLRALVAHRRRLIAQRTQTRNRLHALLQRHNLMPPAKDPFALPQRGWWQALSLELAEQLLMNQDLQILDALTPLIAQVEAAFYLQSVREPWAEQVPYLIQQTGLGLITAMILLAAIGDISRFPHPSKLVGYAGLGAAVHSSGQTHTQGGITKQGRCELRTAMVEAAWVAVEHNAHWKSKFNRYAKRLGRQKAIVAIARQMLVSVWYLWHNRTLDRHADALSIARKLMTWAEHGGKAMRQGVTCVAFVRARLDRLGIGHDLTSLRYGSHVYTLPPAPTPHTNSPAA

SEQ ID NO: 118920 - protein, 355 aa, unidentified
MDCKKYIGMDVHQASISIAVRDATGKVLAESVIETKAATILAFIRGIRGSLWITFEEGTSAAWLYDLLKPHVTKVIVCDPRKNALLNAGNKNDRVDARKLSDLLRAGLLTPVYHGESGVRTLRELCRSYLTINKDLTRVMNRLKALYRSWAIPCAGDKVYSPRHRNTWLEKLSEAGVRRRAGQLYQQLDALVQIRREARRELLAESQKHPATQLLRQIPRLGPIRVALLIALIQTPHRFRTKRQLWAYCGLALQTRASGEYRFTGGELQHAKRLPALRGLNVNHNHDLKNVFKSAATHVSISTNPLGDFYRSLLAKGMKPTMARLTLARKMAAIVLSVWKKGARFDPGELKRQAA

SEQ ID NO: 118921 - protein, 403 aa, unidentified
MIGVDPHKGSHTAVVLDAREVVLGQVRVTARTDQLLRLQQWAQPWPDRVWAVEGARGLGRLLTQQLLAAGERVVDVQPKLAARVRLLNTGHVNKNDPNDARSVAVAALRSCQVSDASRDDHTVVLRVWGRRYRDLGRLRTQVMCRLHTVLCEMVPGGFSKEISAGQAIQVLAGIVADSPMTAARFELAHDLVGDLQRIDEQRREVRRRAARAVTSSATSITQIYGVGPIVAATVLGYVRDIHRFPTRDHFAAYNGTAPIEASSGNRKIYRLSRRGNRQLNYVIHMAAVTQIRNHGTVGRAYYDRKIAEGMTGKAALRSLKRKVSDAIYSRMINDAARPVPNGLGKDPGGQSGNDSASSVTSSHPESPALRKSHSRATSKPRVQARQAPNSSSLRSSPQPRRNP

SEQ ID NO: 118922 - protein, 408 aa, unidentified
MKLLHANCAGLDVHKDEVVGCVRRTVQGKVGEQVRRFATTTQGLLELADWVQSSGCTHVAMEATGVYWKPVWHVLENCAELVLANAAHIHNVPGRKSDVNDAVWIADLLAHGLIRASFVPPTPIQELRDLTRTRRQLTRQKVQHTQRIQKVLEDANVKLDSVVSDVMGQSGRRILGAILEGEGEPETLAALGSQRPLCSRAELVEALRGRVGEHHRFLLRQHLRMIDDLERAIGDFDRRIEEALRPFRDQAERLTAIPGVSTTAAQVLLAEIGADMSRFPSAGHLLKWAGLCPRLDQSAGKHRSTRVGWGAPWLKPVLVQCAWAAAHSKQTYLHAQFLRIRAGRGSKKAAVAVAASILTAAYHMLRNNSPYHDLGPNHFLSRDSTRIAHRLANRIRALGYQVQIEKAA

SEQ ID NO: 118923 - protein, 348 aa, unidentified
MKSYTKTVVEGEKIFVGVDQDSKRWQVTIRALDRELQTVNIEAGWSSLKNLLIAYQNHPIEIVYEAGYFGYSLYDEAIAFGARCVVTPPSLMPVQQGNRVKTDKRDSRKLALYLAKGLLAEIYVPTPTERNHRMVARRRRQLISDRVAVQARIKSALKFYGIELMEEYWSKIYLTNLHSIKLGDKYANESFHSLLIQYESLRQQEAQQTKLLKELAKEELYTERVKILCSIPGLGLITAMEILLELQDVARFRRADQLAAYVGLTPSQHSSGDNIRMGRITRMGKHTLRAMLVEASWQLIRKDTNMRFKYEAIKRRAGGKRAIVAIARKLLLAARRMLLSGSYYQKAA

SEQ ID NO: 118924 - protein, 446 aa, unidentified
MELLHPHCAGLDLHKETVVACIRHMVDGKVTTEVKSFQTTTQQLMELSDWLSTQGVTHIAMEATGVYWKPVWHILSDGEFVLVLANAAHVKNVPGRKTDVNDAAWLADLMAHGLIRASFVPGEPTQQMRDLLRTRKQFVRERSSHTQRIQKTLEDANIKLDSVISDIVGLSGRRMIEALIAGETDPGTLAALAHRRIHASAEELEAALRGRVTPHHRFMLQLHLDHLDAVNAAIARIDKEVDANVEPFRAAIEMLTTIPGVSSLAAEVIAAEIGIDMSRFETEGHLISWAGLCPKNDESAGKRRSNRMKKGAPWLKTTLIQCAWAASRTKRSYLQAQYLRIRSRRGPKKAIGAVAASILTAAYHMLKNGTLYQDLGANHFDNRDKGKQALRLLNRLQSLGFAVQITSMAAEWRVCFLLDAGRTPPFSYCRDFPSAEKSARAYALSC

SEQ ID NO: 118925 - protein, 656 aa, unidentified
MAKRSMFVGMDVHKESIDVSIAEEGRSGEVRHVGVIPGDLEAVAKVIRALRAPNRRLRFVYEAGPCGFGLHRYLTAQGEDCVVVNPSSMPKRSGDRIKTDRRDGDALARLHRAGELTAIYIPTPEDEALRDLVRAREDAVGLSTQAKHRLKAFLLRQGRRYPGRAGWTRPYRHWLADLSFPLAPQHMTLQEYRDTIDETERSVERLTDQLRQLTPAWRWAPVVDALQALRGVSFVTAVGLVTEVGDIRRFTRPRELMAYLGLVPSEYSSGSSVRRGGITKAGNPHARRLLAEAAWAYQGVPRIGRQMRYRQEGLPPTVCATAWKAQLRLTARFRRLVTIDTSVPRARQLRDEPQSGRYPTRGYQQRQPSLKRDAADQTDLKNQEHGTSVLRKELTTVRRETSALTAAPNDLWATDFKGQFRTGDRVYCYPLTVTDQHTRDLLACHGLLSTKGTGVRPIFDRLFREYGLPSAMRTDNGVPFASTALHGLTPLNVWWLRLGIQHQRILPAHPQQNGAHERMHKTLKRGAIRPPRANLAAQQRAFNRFRQEYNHERPHQFLDGRTPGSRYRASTRPYSGALPPLEYPGHFLVKRVTNAGTIRFKTRLLYLSTALKQHPVGLEEVDDGIWSVVFCHVLLGRIDERLAPIRGQLGVTHVPG

SEQ ID NO: 118926 - protein, 363 aa, unidentified
MQDYTRDVSGVVVREWDLFVGLDVDKSSMLVNVSDREAVIRSVTMPYDSKNLLSFIDNSYSGKRVAFAYEAGPTGFGLYDALVGAGHSCLVVSPGSVPDAPNNRVKTNRLDAKKLAKLLAGGQLRGIRVPPEPIRQLRSLVHLRYTYMQDIRAYKCRIKAELLKEWIPFPRAPRGSQWSMRVVEELRNLKCSEVTNWKINSMLDHIEHLARQIYLAEASLKSLVNGNEDLKRCISYLMSCPGIGWRIACYTLARVGDWKRLGVSKEAGAFFGLVPRENSTGDRTDRGSITKCGDPRLRSMLIQGAWAAIRKDTELNAFYERICGNHPKRVAARVAIVAVARKLAERMHCVLKQQRQYELRIAA

SEQ ID NO: 118927 - protein, 423 aa, unidentified
MRYSKVKQIRPNTLIVGIDIAKQTHWAQIMLQGRLIGKAFSIQNTREGFENLVRTLKAYQQKLGATNIVVGMEPTGHYFKPLAYYLHGTGMCEVVIVNPYHVNRSKELDDNSPSKNDRKDARLIAKLISQGTYFNLPLIFNTWAELRTANASRMQLTQKRWQLKCQLITILDQYFPEFPDVFKNVLGKGAMYVLTHCPFPVDILELGEQTLCEGLRGATHNRVGQKRAQKLWEAAQNSIGIKEGAKGARLQLNHLVEELNLIHKQLEETEKMMSQLLKQTGLGDYLTSIPGVGMVTAAAFLAEIGNPDEYESYKQIQKKAGLNLKENSSGKHKGKTTISKRGRPSLRQLMYQIAYVSVAKNAEMKAFYEYLKNRKENPLAGKQALIAVAVKMMKVMLAVCKNRSHYDGSKVCNQNLVVRMQAA

SEQ ID NO: 118928 - protein, 487 aa, unidentified
MHPRTTNKFLETFDVYRFSFESAGALALDNEYSGFAVLPAHYIAFAERKRARPWTSIYHCGRYDVKPLATQQFTAYVGIDWADTKHDVCLQVPGNELREFDCIRHQLADIDQWAQSLHQRFGGPIAVALELAKGPIVYALQKYDFFVLFPINPLTLAKYREAFMPSRAKDDPTDAELALDLLMRHPERFTPLRPQSVQMRTLLSLTEHRRELVGDKTRFTNRLTNTLKQYYPHALDWFEQHDTLLFCDFLTRWPTFSQVKRARRASLESFFYAHNGRRANVISTRLDAIKAAIPLTEDMGVIAPCRLQVLVLIEQLRTTLQAIDRFDREIAQLAPRLPDYCLFQDLPGAGPHLAPRLLAAFGEDRQRYQHADELQKYAGIAPVTERSGKKSWVHWRLRCPTFLRQTFVEWAGQTINKSFWAGAYYRQQRDKGRSYQAAVRSLAFKWIRILYRCWQTRTPYDESRYLNALRKRGSPLLKHLESNAQNA

SEQ ID NO: 118929 - protein, 406 aa, unidentified
MRVLYERCCGLDVHKQSITACALTPEGKEIRTFGTLTDDLEELVDWLKEKKVTHVAMESTGVYWKPVYNLLETEPIEVLVVNAQHIKAVPGRKTDVKDAEWIADLLRHGLLKGSYIPHRAQRELRELVRYRRSLIEERARELNRIQKVLEGANIKLSSVVSDINGMSARLIIRALIEGKDDPAALAQLAKGRLKQKTEELRRALKGVIGPHQRMMLAEQWRHVEYLDEAIARLDREIEERTSPFHEALELIDTIPGVGRQSAEQIAAEIGTDMSRFPTAAHLASWAGMAPGNHESAGKRLSGRTRKGNKKLRSCLVECARAAARTKNTYLSAKYHRIAKRRGANRASVAVGRTILEMIYYILTRKEPYRELGADYWDRQREASIVRQTVKRLEGLGYEVKLEKTSA

SEQ ID NO: 118930 - protein, 321 aa, unidentified
MQSFHCGIDVAKAKLDCALRLVNGKYKNKVFENNQKGFNELFGWLDKHGASDAHICMEATGVYWEAVAEYLTAKDMTVSVINPAQIKAFGASRLARSKTDRGDAQLIAEFCFERRPTTWQAPSPAEQALRASVLRLEALQTMRTQESNRLEVARDVVADDIVGHIEWLDTEIKKLLKKIRDQIDRDPDMKGKQMLLDSIPGLGERTIAVLLAFCMHPGRFTNARQAAAFAGLDPRQHESGSSVKGRPRMSKVGHAFLRKALYMPAMTTLYKTHWGKRFRERLAASGKPAKLIIGAMMRKLVHVAFGVIRSGKCFDPKLQNA

SEQ ID NO: 118931 - protein, 343 aa, unidentified
MDHFAGLDVSVKETSVCIVDDTGSIVREVKVVSEPEALLQVLGNPIHRFKRIGLEAGPLSQWLFSALAEAGLPVICVETRHMRAVLQAQINKTDRNDARGMAQMMRAGLYRPVHVKTLRSQKLRMLLTHRKLLQSKAIAIDNDLRGTLRNFGLKVGVVGTVKFEARIKELVENLPDLAGLVEPLLMVRRVLREQFSILHRRLLAIVRDDEVCRRLMTVPGVGPVVALTYRATVDVPARFRNSKAVGAVFGLTPSTYQSGEINRTGAISKCGDEMMRVMLYEAAQIMLVRLAKWSWLKAWAMKIARHRGMKKAIVALARRLAVIMHRIWVDGTEFRWTREVAAA

SEQ ID NO: 118932 - protein, 343 aa, unidentified
MAYFVGLDVSQKMTAICIVDARGHRHWRGICGTTPDLIEQAVRRHADSEAQLGIETGPMTPWLVHELRRRGLATICLDARHARAALKMQINKTDQNDAEGLAQIMRTGWYRSVHVKSLDAHRARALLGARSQLIGMTTRLSNHIRGVLKTFGLLPGAMRGLSFDRRVEMLLADRPDVAPIVHPMLQSWRQLREQIAIFDKAVRALVNASPTCRLLMSVPGIGALTALAYVSTVEDPGRFRRSRSVGAHLGLTPRQYQSGEIDRSGRISRCGDTLARTLLYEAAVVILTRVKRALPLKDWALAVARRRGVGKARVALARKLSVILHSIWRSGVPYCESEQPATA

SEQ ID NO: 118933 - protein, 343 aa, unidentified
MKLSRVGVDLAKNVYQLHGVDRHGKTMLKRRLKRHQWFKVLLDKTEPDCVIGMEACAGAHHWGRELQSRGYTVKLIPPQSVKPYVKSNKSDAKDAEAICEAMSRPNMRFVTVKRVEQQDIQATHRIRAELMTQRTAKANQIRGLVAEYGLVAPKHLSSLRAAIPCWLEDAENGLTGDFRALLQGVWNDLLGLDDRVCEMDQVIKRLAENNEDCVRLQQLRGVGPMISTAMVATVGDARQYQKSRQMAAAIGITPKQHSSGDKHRLLGISKRGDVYLRTLMIHGARAVVARAKHKDDQLSRWVTNIANKKHPNVAAVALANKTARMAWAMLRNETDYDPDYAIS

SEQ ID NO: 118934 - protein, 387 aa, unidentified
MPEQFDSHNARAAFDHDSTLVVALELSGKSWQVGAVVPGVARRPRRRLEPRDMAGLLKAIERWVAEASAAGRAVRRVALIYEAGRDGFWIARYLLAQGVEVQVVHPASIPVERPGRRAKTDRIDLDMLLRTFLAWLRGEPRVCSMVRIPNEAEEEMRRPGRERERLVSERLQLENRIENLLCLHGIAGFRPRLKKAAERLEVLRSFAGTPLPAKTMAELRRLMARHALLSEQLQEIEAERDRVATVAQPDPAEQMIQHLALLVGLGLETATLLVREMFCRSFRDRRAVAGFAGLTGTPFRSGGIEREQGIGKNGNARVRRIVMQLAWRWLRFQPQSALARWFAARTGGAKGRIHTVMIVALARKLLVSLWRYVETGEVPAGARLAAA

SEQ ID NO: 118935 - protein, 355 aa, unidentified
MDSVKYIGMDVHKESISIAVMSAAGKIVLECVVETKASIILQFIDGLRGELHITFEEGTWAAWLYDLLKPHVARIVVCDPRKNASMKQGNKSDKIDARRLAELLRLNHLNPVYHGEHGLRTLKELARSYLTITKDLGRVMSRVKAIYRSWAIPCTGKQVYAPQHRTEWLAKISESGVRRRAEFYYQQLDALRSLRREVRRELLEESKKQQAWKRLCQIPSIGPIRAAVLLGILQTPHRFRAKRQLWTFSGLGIETYSSADHRLIEGQLQRAKKPVLIRGLNENCNHDLKNLFKGAAIIASTKPGPLQEFYAALLAKGIRPEMARLTLARKIATIVLIVWKRGVCFDAQHLKPQAA

SEQ ID NO: 118936 - protein, 343 aa, unidentified
MDHFAGLDVSVKETSICIVDDTGRIVREVKVASEPEALLAVLANPTYHFKRIGLEAGPLSQWLFSALAEAGLPVICVETRHMRAVLQAQINKTDRNDARGMAQMMRAGLYRPVHVKTLRSQKLRMLLTHRKLLQSKAVAIENDLRGTLRNFGLKVGVVGKVRFEARIRELVENLPDLAVLVEPMLIVRRVLREQIGILHRRLLAIVRDDDVCRRLMTIPGVGPVVALTYRATVDVPARFKNSKAVGAVLGLTPSKYQSGEINRSGAISKCGDEMMRVMLYEAAQVMLTRTNKWSWLKAWAMKIARHRGMKKAIVALARRLAVIMHRIWVDGTEFQWTREAAAA

SEQ ID NO: 118937 - protein, 403 aa, unidentified
MNNVAGIDVSKGKSMVSVLRPFGEVVAKPFSIGHTGSELKELADYLKSLDGETRVVMEHTGRYYEPVARFLHDEGVFVSAVNPKLIKDYGNNTLRKVKTDKADSRKIARYGIDNWAELRQHTPMDTIRMQLKTLNRQQSLYTKTKTMMKNNLIALLDQTYPGVNALFDSPVREDGSQKWVDFATAFWHVDCVRNMSLTAFAERYRKWCKRHGYNFSQSKAVEVHAGAQDLIAMLPRDALTKTMVRQAIDALNAISASLERLKAEMQALAAQLPEYPVVMAMHGVGDSLGPQLMAELGDVTRFTHRNAITAFAGVDPGADQSGTHEAKSTRVSKSGAPELRRALFLVMDCLLKTQPQDDPVYRFMDKKRAEGKPYLVYMTAGANKFLRIYYGRVKEYLASLEGN

SEQ ID NO: 118938 - protein, 451 aa, unidentified
MAKTKRKKHRKLDRTLPVMRPNAGGIDIGATEIFVAVPADRDTESVRSFPTFTEDLHALADWLQQCRVDTVAMESTGVYWIPLFQILEARNIEVHLVNAQHVHHVPGRKSDVLDCQWLQYLHSVGLLRASFRPEQAVCEIRSLMRHRENLVQMACVHVQHMHKSLDQMNLQIHHVISDITGITGLAIVDAIVAGITEPKELAKLRDYRIKASIETVKKSLVGDYRPEHIFTLKQSVTAYRQYQQLISDCDQEIQQRVQTFQTKDDRPSATADASGATTPSQSSFDLGTHLERIFGVDLTVIPGFDTLRVQTIFSELGADLSSKFPSDDSFCSWLNLCPKDGTSAGRRIPGPKLKIKNRVTQAFRMAAQCLHNNKSFLGDYYRSQRARFGALKAIKNTAHKLARIFFHLVTTRKPYDETVFAELEARNQKRRLHNLQMRARQMGYTLVEAHA

SEQ ID NO: 118939 - protein, 351 aa, unidentified
MKKFFIGIDFAKEKFDAAIIEACGLKEFGTRQFGTFPNDRKGYRQFMKWVRGIAGTTAEDDCLFCGEDTGSCSLGLSKWLYGKGYDMWIENAYVIKHSNGIQRVKTDRADASMIAEYAWRHQDKAVPFEPLSDSLTQLREVFLYRHKLVQQRVAMEVRKQDKEASDKTKALNFINRKSKHLIAEIDKAIKECDTIIDRIIESDDELKENYTIVTSIKGVARQNGACLLIFTNNFKRFDMDARKIACYYGVAPFSKESGTSVHTPARTSHFANKLIKSLLSQAAQSARIFNPEIKEYYDRLIKRGKKHSVALNNIKNKLLRIIVALVRKKTLYDPNSYKFYRDRLNRQFAPA

SEQ ID NO: 118940 - protein, 385 aa, unidentified
MMNLDRTKTPAGDNYATVYVAFELSNAKWRLGIILPGARKMSRYTIDGGDTAGLSARLSQARAKAATCGKPVRIQSCYEAGFDGHWLHRWLTEQGVISYEVDPSSIEVNRRARRAKTDRIDLDKLMRTFLAYIRGEPRVCSMLHVPTVEDEDRKRLTRERERLLKERTAHTNRIKGLLHAHGIRDAMPMKRGFIESLATVRTADGRPLSRWLKEEITREHERLCLVEKHICALEKTSTAELRAAAPGSADAKVIQLAELKGIGLTSGQKLVNEVFYRSFDNRRQVGSCFGLTDTPYHSGTSRHDQGISKAGNRRARTLAVELAWLWTIHQPDSELTRWFRERVGKVKGRIRRIAIVALARKLMVALWRYLTTGVVPAGAALHRAC

SEQ ID NO: 118941 - protein, 339 aa, unidentified
MERWAGVDLHKRKMSVCWLWDDGKREEAEYQLDKKGIAEFKSRLNAGVEVAIEATGNSGYITDEIREKVKAVRLINPRQFKVISDSVKKTDRKDAETIAEYLSKGLIPEVRQMSSEQRQLRSLINTRDKLVKLRSALKNKIHGIMNEHGIITEREMFSSEVSYERIQKMPIGETARFELGVIIEQIHSLGKTIKGIDEKIKEQGKNLPGQKNLTSITGIGELSSAIILNGIGDIKDFDDPKKLCAYAGMVPRVRDTGDNIHHGHITKRGNKILRTTVVQSTLIAIKYNDYLRKFYFRLKQKKGSGKAIIATSRKMLEIIYNTLKNDWVFKDFNNFEIAN

SEQ ID NO: 118942 - protein, 366 aa, unidentified
MKEITTFVGIDAHKKDLFVAMLSGAAAVPVTWQLANAPGAVRRMVRQLEREAPGPVRVFYEAGPCGYARQRQVATKRIACDVIAPSLMPRKPGERVKTNRRDARKLAELGRAGLLTVVQPPTPADEAVRDLARARDDAREDLQRCRHRLGKLLLRRGLHYAGKNWTQAHRRWVDSLTWTHAAERAVVEDYQLAIDHTEARLVELDARLAEIAMQAPYREPVGWLRCFRGIDTLTAMLILAELHDFRRFGSARALMAFLGLVPGEDSSGEKHRRGRITKMGNALVRRILVEASWHYQHRPGVGRGLQARRAGQPARVIAIADKAQQRLCRRFRRMLAEHKPAPKVAVAVARELAGFIWAALQPPVEA

SEQ ID NO: 118943 - protein, 356 aa, unidentified
MSRDLKYIGMDVHKEAVVIAVLNSSGKLVMESIVETKASSILQFIHGLRGELHVTWEEGTWAAWLYDLLQPQVTRVLVCDPRRNALLKEGNKSDKIDARKLADLLRTGMLRPVYHGEHGLRTLRELGRSYQTLSQDLNRVMNRIKALYRGWSIPCAGTQVYAPRYREEWLHKIEHAGVRRRAELLYQQLDGLQALRRTLRPELLAESRKHKAAKLLRQIPCIGPIRAARLIALMQTPHRFRSKRQLWTYSGLGIETRDSAQYRYVHGQLQRAKKPQQIRGLNRNHNHEMKEIFKGAATRASCGVGPLRDFYVALLAKGMKPEMARLTLARKIAAIALTLWKKEERFDAEQLKPQAA

SEQ ID NO: 118944 - protein, 425 aa, unidentified
MSEKIVVGIDVSKAFSDICILSPNNDIIKRMKISNDVIGMQSLISVLEKVENEYEDRAVIIMEATAHYHQILANFFRKHNYEVIVINPIQSGALKNINIRKIKSDKTDAYNIALLYRIKNYNETITHSDTVNSIKKLCRQHKELTDEIVEHINRLIAFLDISFPDYKKVFPDLQGKTPLSLLEKYPTVQDVLSPENKQDMIQLIKENSHKSYSYAEAKYEKLLQAAEKSIEVCIVNLSSAVLIQTTVSVIFSLQEALKAINDEIKRLSLLDEKFHKEIVLLQSIPGVGEYTACVVLSELGDVSNFSKPKELVAFFGLDPGVSQSGTYNRKNNKISKRGSPHVRLILHMLAKSNVYPNRNREYLNPVMRAYFEKKIAEKPYKVVMCAIMRKMVQIIFAVLRNQKSFELRTPEEHQKLIRENSKLAA

SEQ ID NO: 118945 - protein, 318 aa, unidentified
MGGVNAAIEVGKQQLVVQLGSQGEQFSEANEPRAIKRIAKRLLQAGCARVLIEGGSYQSVLIAGLRAAELPVVIVNPRRVREFARSIGQLAKTDKIDARILALYGEQTQPPLRELPDEQSQALRALWVRREQLIEMLVMEKNRLEHTAEKAKAVRHNLCSHIDYLRKQVKQADNDLDREVRNSALWDKYEMLNSVPGVGPVLSVALLSDLPELGRLNRGEIAALAGVAPFNCDSGTLRGQRRIDGGRSRLRRVLYIATVAAVRCHPVLKLFYLRLRAAGKPPKVALVAVARKLLTILNAMLKTKTAWRPPCPARPELT

SEQ ID NO: 118946 - protein, 391 aa, unidentified
MNPRALGWDIHRKFSKVSLMEMDAEGEIHAVERARLDHADKEAMQAWLSRLDREIPVALEATFGWPWVADLLEALGHAVHLGHPPVIRALAKHEAKTDRCDGDRLGKFLLRGILPESYLAPPEVRQRRERTRYRMALVALRTGIKNRIQAILHRLGILHTFSDLFGKAGRDFLERLSLPEGSAQALRGYLDVLDVLSLSIAEVEQWMTENLEVDEMVRLLMTIPGIGLILAHVIRSEIGQIERFPTARHLASYDGLAAMSHDTAGREGPRHCSPACNHVLRWALIEAVHGVQKTKGRHGLRLRKLYARLAAGGKKGAKSSAKVATAHELSRLVHVVWTKRVPYTDTPPSRPGSRPGRRTIQESPPGKTTLRSDQPRHPMVRRRNTVGQTLL

SEQ ID NO: 118947 - protein, 377 aa, unidentified
MKYVGIDLHKKTISGCVVVKERGKRKVAARKRLECRDEAGIKGWFSELGKFEVVVEATASYEWFVKLVEPLACRVVLAHPKKLRIIAESKRKSDKLDAQVLAEFLASDEIPLAYRPCPRVREHRALVRWRGYIQRRLTSVKNKLRHILAAYNADVPNLFTAEGLTHLATVPLRASDRFVSEQLVTELEQHQERLRAANRRLREFAVAAPLAEREARAVLDSVPQVGAITADVILAELGDWRRFHSQADVVCYAGLAPGFRESAGKAKQLGITKEGSGLLRWVMIEFAWRMVGTSRKWGGHYHRLEVRVGAKKAIVAIARRLLGMIFALLRTGQKYSLALEIPPPASCRIKSPRDTNPSDPACLRGQPRQTSSLGAGG

SEQ ID NO: 118948 - protein, 337 aa, unidentified
MKLYCGIDLHSSNSVIAVLDEQDKAVYDKRLDNDLDDILEALNPFKDEIVGCVVESTYNWYWLVDGLMEAGYRVHLAHAGALPQYAGLKFTNDSADARHLAQLFRLGILPTGYIYPKQERALRDLLRRRLLLVRQKTLHHLSLQSLIARHSGQRLNANAIKKLESEHLSYYLDSPILLGGEITHQARCWLDGAIARIERELQEHIRPRKDYRLLQSIPGVGPALGTTIALETGTIARFPSPGDYASYARCVKSEKISNGKYKGQGNKKNGNKYLAWAFMEAAHYSAIWNPRIKQYYQRKQAKAHVLVAKKAVANKLARACYHMLKRGEPFDVKRAFG

SEQ ID NO: 118949 - protein, 351 aa, unidentified
MAYAAEDRSTEVVSLGMIGTRQCDIDKLIRKLESKGAPFAIAYEAGPCGYWLYRYLTRRGLSCIVVAPSLIPRKPGDRVKTDRRDAVTLARLLRSGDLSSIYVPTVDDEAIRDLSRAREDAVRDLKRSKVRLKAFLLRQDIRYEGRANWNAAHLRWLARVVCPTAAQQIVFQEYVHTVTEQTERVQRLEVELHTAVKTWRLHPIVEAVQALRGVDLTGAVTLIAEVGDLTRFDTPRKLMSYLGLTPSEYSSGERRRQGGITKAGNGHARRALVEGAWAYRYPAKVSRHLQLRLENVPTEVRAIAWKAQLRLCKRYRLLSARGKHVNQVVVAIAREMAAFAWAIARTVPMAS

SEQ ID NO: 118950 - protein, 352 aa, unidentified
MANRTRVVIGGVDTHGRTHHAAIIDRHGRLLADAEFGAHTDGYRQLLGWLSRHGQPRSVGVEGTGTYGAGLTRFLLDHGVQVLEADRPDRKTRRRRGKSDPIDAEAAARAVLAGTATALPKRRDGIVEAIRVLRGVRAGAVKARTAAINQLKAVVVTAPAAVREALDTQSTAQQVAACARLRPVATQLDNPTQATKAALRAVAVRILDLEQEIKVADERLGKLIPRAAPRTLGLLGIGIEHAGQLLTTVGDNPERLRGEAAFAHLCGAAPIPASSGRTRRHRLHRGGDRNANCALHLAVVVRMRYCPRTRAYVERRTKQGLSKPEIMRCLKRYLAREVYHAILADFAALQAT

SEQ ID NO: 118951 - protein, 346 aa, unidentified
MGKSIADLSAVTTVGLDLAKHVFQVHGVDALGRVVVAKAIRRNRLLEFFASLPRCLVGLEASGSAHHWARELITLGHETRMMPPAYVKPYIRRQKNDASDASAICEAATRPSMRFVGVRSLENQAALMRHKAREMLVSQRTQLLNGLRGHLTEVGVIAPQGLRCARELAELIEACDETIPFEVCEALAPLVAQLRNLDEAIARLDRIMAKLAQKDETARRLMSIPGFGPITASAMAATIQDASSFAGPREFAAFLGLTPKQNSSGGKQKLGRISKMGNRYLRKLLVVGAHAVLFHRKPHTDPLRMWAKKLIERKPFKLVAVALANKMARIAFAILRSKTVYREIPA

SEQ ID NO: 118952 - protein, 348 aa, unidentified
MEIRTIGIDLAKTVFHLIVLNAHGEVVVQRKCSRSRLLRFTSNLRACLIGMEACGGAHFLGRALRDQGHDVRLMPAQYVKPYVKTNKNDYIDAEAIAEAVGRPRMRFVPIKTDDQLDLQSLHRIRERWIVRRTAVINQIRGLLLERGITIRKGRLHIEASLPSILEDADNKLSGILRVLLAQLQLEMQYLGRQIDESDKLILGIAKGMDSCRRLIAIPGIGPLTATATIAAIGNGAAFKKGRGFAAWLGVVPGEQSTGGKQKLTGTSKRGNKYLRKLFVQGAHTVLLQKNKQSAGLSTWLADLTARKRKQVATVAMANKMARMVWAVLTKGEAYRPPLLLQPAEMACR

SEQ ID NO: 118953 - protein, 419 aa, unidentified
MRGIETKKVRVINKETLIVTVDISKVTNVGYCRCPNGEDVKPFSFMNNTRGFNTFWDRIMKTKNTHDLKDVVVGFEPTGPYGEPLTHFMRKKKVKLVQVNPMHTKRVKELEGNSPNKTDQKDPKVIADIIELGHALTVVHPEGPAAELRRLTHARERAMQRRTAIFNQLQDLVFVIFPEFSQVFKNVKTRSAIFILENCPAPEDIIKYKLKNLTTILRKVSRGKLGEERARELYAAAKTSVGTREGRQSILFEIEEILSIIKATEHFVAELEKEMSHHLEKIPYSRFILSIKGVGDITVAGLIGEVGDFREYNTISEMLKFSGLDLFEISSGGHKGQRRISKRGRPLMRKLLFFAAINTVRKEGIMHEYYQGCLARGMLKMKALIAVSRKLLGVIFALVRDHSGYVEDYTVEHELKKAA

SEQ ID NO: 118954 - protein, 464 aa, unidentified
MKIAKVDQQTRKVKKARAPSFPIINPNAAGIDIGSAEHWVAVPEDRDEQPVRRFACFTQDLHAMAAWLKQCRVETVVMESTGVFWIPVFQILETHGFEVKLVNAKQAKNVPGRKTDVLDCQWLQRLHTYGLLSGSFRPDNAICVLRSYWRHRSTLISYISSHVQHMQKALTQMNVQLHKVISDITGVTGMSIIRAILSGERDPLKLAQMKNYRIQNSTETIAKALEGDYRQEHLFSLRQAVELYDFYQQQIQACDREIEAYLSQLDGIDIASNPIPASRRPIRKHKGNQPDFDLRTHLYRISGVDFTQIDGLDVLNVQTILSEVGLNPDAFPTVKNFTSWLAICPNNRITGGRIKSRSTRKTVNRAAEAFRLAAYTLTHSSSALGGFSRRMRARLGAPKAITATAHKIARIFYQMWKHRTPYQDLGADYYEQRYKERVLSAMKKKAKQIGYFITLTPMPQTAVS

SEQ ID NO: 118955 - protein, 411 aa, unidentified
MDVVNARCAGLDVHKATVVAGVRVPAPQPGTRRGETKTFATTTRGLSDLTNWLLTHGVTAVAMESTGVYWRPVYGALEGRVQLVVVNARHVKMVPGRKTDVKDCEWLAQLLECGLLRGSFVPPRAVRDLRDLTRLRKALIRERGHHVNRIAKTLELAHLKLSCVVTDLMGKTGRAILHALSAGLDDPERLAACAQGSLRKKHAALREALVGRLTPHYAFLLQQHLSLIDAVDAHIATLDARIETAMAPFADAAALIQTMPGIATRAAQAILAETGVDMDLFPTPAHFASWARLCPGNHESAGKRQNTTTGKGATWLRATLQEAAWAAVRSKKSYYRALFHRLKARRGAKKAIVAVQHAMIVALWHMLKHRVAHHDLGADYFDRRHTARIRRHHVRRLEQLGYDVVLVEKAA

SEQ ID NO: 118956 - protein, 387 aa, unidentified
MIYFIGIDISKYKHDFCIISNTGEVIVENSSFENNQKGFQTLIHLLEPYNKQSVRIAFEATGHYSLNLELFLTNQGYSFMKMNPLVVHNYLKARSLRRTKTDKADSKTIANYLMSVQYIPNSTLLYHTYTLKQLCRSREALIKERSKIAVLLTNQLDLTFPELKVFFNNNISTTLLYILEKYKNSSHIALMKDYESLRKVSHGRFSYAKFTKLKELAKNTVGYHDENTDLLISTYVSLYNELSNKIDPIDKQISTIIKELNPRILSIPGIGVISAAAIISEYGDINNFSSPAKMLAYAGLEPSINESGTLQSNGKMVKHGSGHLRYALMNIAMIILRHSPCFYDYYLKKRSEGKCHRVALSHVCKKLIRVIYSLEKYNHIFDPSLLK

SEQ ID NO: 118957 - protein, 317 aa, unidentified
MTQTSMRTAGIDTSKNKLDIAVHGLSQRWQVANTPAGWRKLADRLAETEVKRIGIEATGGYERGVVEHLRAAGFAVKVLQPAQVKAFGRVHLRRAKNDTLDAVLIAACTAALDPLRIASDLRLTKLADQMTFLDQIGEDIARFKTRLEHIDDPRLRRVVLEDIARLKARKLAQIRDIARQLRSHHDLAVRLDLVLSIPGIGELTALAIVIRMPELGQVSREEAAALAGLAPFDNDSGQYKGQRRIAGGRNRLRRSLFAAALPAAFRWNEALIALYRRLIAAGKAHNLALIACARKLLIYANTVVQRGTPWTERPVHV

SEQ ID NO: 118958 - protein, 313 aa, unidentified
MNEQHVGVDVSRDRLDVAITDGRWLQFANDDRGHDELCALWAEEKPTLVVMEATGGMERALATRLSAAAIPVRIVNARFVRHFAKASGLLAKTDRIDAQVLMRFAQAMRLEARELVNDELHLLQALIARRRQLIEMITMEKNRLRSAHQAIKPSITRTIRMLTKQLKDADEDMDKALKSCGVWREKVELLQSVPGIARVISVNLVATLPELGHLNRRQIASLAGVAPFNRDSGRYRGKRSIFGGRAATRSALYMAALVGARFNPVLRTFYQRLRARGKPAKVALVACMRKLLTILNVMVRTGQPWNATLAHSD

SEQ ID NO: 118959 - protein, 403 aa, unidentified
MNAVGIDVSKGKSMVTILRPFGEIVSSPFEIKHTSSDIHSLIKLIHSIERESRVVMEHTGRYYEALAHQLSAADLFVSAVNPKLVKDFNNDSLRKIKSDKADSVKIARYALDKWQSLEPYSITDELRAQLKVMNRQFHFYVKQKTAMKNNLIGLIDQTYPNANTYFNSPTRSDGSQKWVDFVSTYWHVDCIRKMSLNAFVEHYQNWCKRKKYAFNKSKAEEIYTKTKELVPVFPKNEITKHIIRQAIDQLNSTSVTVETIRTLMNETASKLPEYSIVMQFKGIGPSLGPQLMAEIGDVTRFTHKGALTAFAGVDPGVNESGSYAQKSVPTSKRGSSNLRKTLFQVMDVLIKTMPQDDPVYQFMDRKRTQGKPYYVYMTAGANKFLKIYYGRVKEYLSVLPDPS

SEQ ID NO: 118960 - protein, 353 aa, unidentified
MRILSLDLSKYKTVGCDYEAETGRHEFATVLTTHKGLHDLIVDREPDRVVIEICSIAGWVCDLVRSLGIEIQVASTNDERWQWRKVKTKNDRRDGLKLAQLSARNELDLVHVPHSEMRQWRALIAYRQHLVQRRTKIKNHVRELLLREGQLLPRHRSAWTQEGIANLETMARPFAEVSMAELWRGELEVELAQFKAVQAQLTEVVAKLDALGAANHNVRLLQTASGVGPRLAEAVVTMFDDARRFRRGAAVSAYIGMVPKQWDSGETERLGKITRHGNRLVRSLLVEVAWCALRHNPWARETYQRISGGKKSRKKIAIVAVGRKLLVRCWAMLRDQTPWHWEGQSAVVTPPAA

SEQ ID NO: 118961 - protein, 360 aa, unidentified
MPEPRLSYTGERVYVGIDVHKATYAVVCVCQQRMVKTATVPADPAQFAASVLRWFPGATLASAYEAGFSGFVLHRVLAAAGITNIVVNPASVAVAANDRVKTDRRDAKKLAVDLADGRLRGISIPTEAEELARLLPRTRAQIVEHRATIARQIKAKLYQFGLIPPASRRRISSRYLRELAACSLPAELHASLALLADQWRFATRQLLEVRRLLRDQATAQAELETVYRSAPGIGAVVARTLATELGDMSRFANERALLSYTGLTPSAYSSGASIRRGHISRQGASRLRHVLVETAWRALPRDPILQAIFDRIAAPRGKQRAIVAIARRLIGRIRACFRHGTTYAVGTAGEALVHSRRRGR

SEQ ID NO: 118962 - protein, 426 aa, unidentified
MNDTQNEKLAQITPETLVIGIDIAKNKHVARAIDDRGFEFGKRITFTNDREGFEKLLRWVEEHQADHQKTHVMVGMEPTGHYWFSLADYLDSCGHQLVLVNPSHVKRLKEIDDHSPSKNDTKDAMVIAKQVKDGRYSVPNLLEGIYAELREGIKLRDQLVQLKNQTEGRVQNWLHRYFPEFEQVFKDWDGVSALATLRTFPLPQAIAETTPEAIVDTWKAYAKRHAGFARAQKLHEAAEKSVGITAGLRFAHQELEALLDQYELYTRQLETLEAQLTEQLEHLPGAEQMRDIKGLGDMTIAAFFAEVGDIHQYRHPKQLISLAGLDLKENSSGVYKGQTTISKRGRSRLRRILFLAIRPLVNHNDTFRALHHELTQRSDRPLTKMQSLIALCGKLLKVLFVIGQRECPFDGAKLLQDRKCSQTQAA

SEQ ID NO: 118963 - protein, 344 aa, unidentified
MTKKYIAVLGIDLVKNSCSLAAFDNTGALLTRKRMTRDAVVTFAAGLPACTIAMEACCGAHYLGRTLEAQRHTVKLMSPEYVQPYVKGQKTDDRDAEAIAEAATRPTMRFVTIKSEEQLDLQVLHRARQRMVGARTALINQLRAVLLERGIVLPKGRASFKLRLGELIEDELAISDRARRLIEDLSSEWSSLDQRITAYDDELAALTRENVMARRLATIPGIGVINATALVAAVGDASAFGKARDLAAWLGLTPRQHSTGGKTKMLGISKRGNKYLRTQLIHGARAALPHLAAKPNRLGEWLQSMLARSHPNVVVVALAAKLARIAWAVLRHEEKFDHQAATVA

SEQ ID NO: 118964 - protein, 388 aa, unidentified
MPRQLNDLSRSLVALEQDATLIAVIEMGQSSWLVAGIVPGIERQPLKKLAPDQHALLQLLHRWQKEANEAGHVIKRITVAYEAGRDGFWLARWLRAREIEAYVIHPSSVPVSREHRRAKTDRLDTELLKRAFLGWLRGEPKHCSMAAIPTIADEDARRPSRERENLVKEATRLVNRMKANLARLGIRGFRPHLARAARQLQTLQTPEGAALPANTLAELRRDMDRLRFAKQQIKQIEAARIERLEREPAEQRHAMVRLLGRVVGVGVETADMLVHEVFARRLRDRRAVARYAGLTGAPDESGTKRRERGLAKAGNARVRRGMIQLAWRHLLHQRDSALAQWYRARTADARSRTRKSMIVALARKLLIALWRLLTTGEAPAGLLIRPAA

SEQ ID NO: 118965 - protein, 357 aa, unidentified
MLSSNVKFIGLDVHKEAIAIAVLNGAGKLVMESIVEAKASTVLDFLHGLRGELHVTLEEGTWAAWLYDLLKPHVAEVVVCNPRRNALLKEGSKSDKIDARKLAELLRSGMLRAVYHGENGLGTLRELTRGYLTISKDLRRVMSRLKALYRSWGIPCSGSQVYAPRHRERWLSKITQPGVRRRAELMYQQLDGLSVVRHTVRGELLAESRKHHAVKVLRQIPLIGPLRAALLLALMQTPHRFRSKRQLWTYSGLAVETHDSAQHRYVDGQLQRSKKPQQIRGLNQNHNHEMKEIFKSTAMSASRCAGPLQDFYEGLLAKGMKPDMARLTLARKIAAITLTLWKKGERFDAEHLKSQAA

SEQ ID NO: 118966 - protein, 357 aa, unidentified
MNNIMNYVVKGQEIFIGLEDSKKTWKVCARSGKVVVNETTMPAEYDVLKQYFKNKFPECSITVMYEAGFRGFELHDQLKSDGYECIVTPPHTVTEEKCQRKKNDRIDCRRLAKNLEIGDYHRCYPPDRKRREDRQISRLHEQVQRDITRVCNRFRRTLEFHGLDRMFPGGSWTRNQYRQAYERLNKMDIAPTMKFTFDAYFDELIHLWEIKKRIVKELRALSKSEAYRRTVEIFKSAPGIGILTAIRLALEWGDLSRFNRKEQFSSFLGLVPSDYSTGDQDRKGHITKQGNRQVCSWLIECSWRAIKYDPVLLDKFNRVVKSTGSKKKAIVAVARKLANRLRTILINETPYVIALVK

SEQ ID NO: 118967 - protein, 344 aa, unidentified
MKHYAGLDVSVKETSICIVDEAGRICREMKVVSHPEDLLTVLCDPAWQLERVGLEAGPLSQWLFSGLAEAGVPAICIETRHAKAFLKAQVNKSDRNDARGIAQMMRVALFQPVHVKTLASQKRRALLAARKILQEKALAIENDIRGLLRNFGLKVGIVGVVGFEQRIHDLVEGVPELADIMEPLLAARRVLREKFAKLHRKVLLLARANEVCQRLMTIPGVGPVVSLAFISTVDVPARFRNSKAVGPSLGLTPVLNQSGERHRVGRISLCGDEAMRALLYEAAQVMLARVQKWSWLKAWAMNIAKRRGQKKAIVALARRLVVIMHRMWSDGTEFRWTREMAPTI

SEQ ID NO: 118968 - protein, 417 aa, unidentified
MKDRQRKLYVGIDVHSREHKAAVLPIALLEQPGAAWRKVKPLGIKNNIADFERLDISIRSHISSAEEVAIAVDHTGGHYSEPIVYFLQGKGYTVYYLEAKAIKAARERFLDEESKSDVIDSTSAAYMLYLRDAHGLSFRISAITPELDSKAAALNSLVLQRWQFNKLATQATNRLHQFLLAVFPEGEARHFAQLLKVTPYYPTPKDILDSNGLERIEKLSQKDKENILELAANSTGIPGDIYQWLIKELSIQRVESLAKRDGLTAILRQQVAVHLYGDILLSFPFLGEIAAATIIGIIKDIERWPDKKKFKKALGVYSSLTQSGGSSGRTRQGREGSRHGRRVLFQVCFGCIRTNAHDNDFKDCYLRQVAQGKPRMKALVSTMGKLAEIIYHCLKAGEPYQYQGIYRTTIISNDKKS

SEQ ID NO: 118969 - protein, 347 aa, unidentified
MNFYNNMHPYYCGIDLHARLLYVCILDQDGNTCVHKEISADPEKLHTLLKPYIGNIVVGVECMHCWYWVSDFCEDLGVDFILGHALYMKAIHGGKAKNDRIDSFKIANLIRGGNFPLAYVYPKKMRATRDLLRRRMAIVRHGANLKAHVVNTTSQYNLPPNKVNLKNVSAREQLKSTFPELSVQKNINLDIVILDCYAEQLSKVEWFIEQQAKQHNPVYLHLLKSISGIGRILALTIIYEIGNIERFESVQKFASYSRLVKCKAESAGKSYGTQGNKIGNAHLKWAFSEAAVLYLRGNEKAQKYLLKLQKRMSKAKALSALAHKLGRCIYFMLKNEKVFDESKFLKS

SEQ ID NO: 118970 - protein, 326 aa, unidentified
MDVIHQRVAGLDVHKETIVACVRIMVDARVSRECRTFDTTTAGLKDLLAWLTASGCSHVAMEATGVYWKPVWNILSDGTFELLVANAAHIKNVPGRKTDVNDATWIADLMACGLIRGSFVPDQAFQELRTLLRTRKQLTREQTRHVQRLQKTLEEANIKLDSVISDVMGLSGRRMVEAMIAGERNPQKLAALADRRIKASPKALYDALHGRLTDHHRFRLRLHLAQYDVLAAAIGAVDQEVDAAIDQMDEVEKGGQAFFRSLIRLLSGIPGVNTLSAQTILAEITPDMTRFATAGHLVAWAGLCPGQNESAGKRKSSRLRKGAPWL

SEQ ID NO: 118971 - protein, 418 aa, unidentified
MSLLLEQPFTAYVGIDWADTKHDICVQAAGDPRRESSCIAHRVAAIDEWANALHRRFGGPIAVALELAKGPIVAALQKYDFLVLFPINPATLAKYREAFQPSGAKNDPKDAELALDLLLHHPERFGSLRPQSAAMRTLVSLVERRRQLVGDQTRLTNRLCDTLKQYYPQALEWFDDRGTVLFCDFLDRWPTLRSVKQARTATLEAFFRAHHCRSARRISVRIGSIREAAPLTEDPAIIGPCRLHVLALAAQLRAVLAAIVQFEHEIAAVAPTLPDYTLFKNLPGAGAQLAPRLLAAFGEQRERFRSADELQKYVGIAPVTERSGKQSWVHWRLQCPKFLRQTFVEWAAQTIPRSSWAGAYYRQQRAKGSSHHVAVRALAFKWIRVLYRCWQNRTPYNETVYLNVLRKRGSLLAGKLSN

SEQ ID NO: 118972 - protein, 356 aa, unidentified
MQTQVTKKIDFSGKELFIGLDVHKKSWSVTILVEGMEHKTFTQLPDPKALFNYLQRMFPGGTYHSAYEAGFCGYGIHRELNDLGIKNIVINAADIPASQKDQLQKRDPIDSRKIARALEKGLLRAIHIFDRDMEELRSLNRTRFYLMRDFRRSKNRIKSFLQYYSITIPLEMDNNQWPIKFVSWLKEVQMQTLSGQDAFFNLIRSYEYHREQILTLSRQIRLRIREYDNELYSLLKTISGIGPLTSSALITELGDINRFPHIDHLSSFVGLIPRVKQSGESSYSGGITFRCNEYLRTLLIEASWQAIRQDPALMQYYHEHLINNKGQKVIIKIARKLLNRIRYVMKNRQPYVTGVA

SEQ ID NO: 118973 - protein, 430 aa, unidentified
MKFNTQNAKIEAITEKTLVLGIDVGSETHYARAFDYRGIEYSKKPFKFSNTEAGFVTFKEWILDLKERHKKDKVVPGMEPTGHYWFNLGKFLQDNEMKPVLVNPHHVKKSKELDDNNPTKNDRKDPKVIAGLVREGRYMIPYLPDGVYADLRTASNIRFQLQAELTRIQNRISRWFNIYFPEYKTVYGKPDAKSGMLILKAAPLPEDILTLGIDGVNQIWRDAKLRAVGKARAKTLIEAAKHSVGSKEGAVAARMEIRMLLEDYESRNIRLQEVMTLIEGLIKQIPMAEKLLEIKGVGIRTVSGFLAEVGDISRFNNPKELQKLAGLALVENSSGKHKGETTISRRGRKRLRYLLFEVAMSLVAKNPEFRELHNYYTTRRLNPLKKMQSLMAIAAKLIRVFYAMLTKGVDYDPKKMVSDIKRPAVYLQAA

SEQ ID NO: 118974 - protein, 343 aa, unidentified
MQKDTMIGVDLAKAVFHLHAASVTGEPTFRKKMARQGFLRFMAEQPSALVVMEACGSAHYWAREMIRLGHEVKLIAPQYVKPFVKRQKNDTADAEAIVIAAQRPEMRFVDPKSAEQQSRAILFRGRERLVHQRTELVNALRACLYEYGHVVPQGIQQIRRIAEILETPNSDLPDLMREECRDLLEQIAEQTVRINARAGKIKALAAETDRARRLQTIPGVGPLTALAVEAFAPPMENFRCGRDFAAWLGLVPRQFSSGGKERLGRASKAGQADIRRLLIIGAMSRLNWMGRKSIPEGSWLARIAARKPRMLVAIALANKMARTIWAMLTKNEDYRVPAQVAAA

SEQ ID NO: 118975 - protein, 397 aa, unidentified
MIAVGIDISKAKSTVAVIDSDGTVLASPFTMAHTQPEMEAFVSYLKGLGEPTTILMEYTGHYHYPVLKKLQDEGFPVCIVNPYQMKKYGDVEIHKAKTDKKDALRIAAYALEKSYKLVPYSSMEQKYEDLKFLSRQYSQRITYVAKLKVQLIALLDQTMPGITRILPLNSRNPEKCALLLFIRRFKSFDEIHRIGKARFLASYDVLAKKTSERSASSKGLSIYELAVDSITTRGEDPYIWLSQNQCVDLLSTTQNAADEIISQMRNIAETIPEYKVLRAMRGVGDRLGPIILAEIGDIRRFHSGKALNSYAGNDAPPYQSGQFESRNRHISKRGSSALRKACYEVMQALKLTKPQDDPVYLFMLKKEQEGKPFNVAKMAGVNKFLRIYYARAMELYK

SEQ ID NO: 118976 - protein, 444 aa, unidentified
MGRRCIGLDVHREFAQVAVWEDGRVRQAGRIALSDEALRIFADSLGPEDEVAIEATCNTQAIVRLIEPHVARVVVSNPQKTRAIAEAKVKTDKVDAEVLAQLLAADYLPSVWIADQATQALRRQVARRAHIVRQRTRLKNRVQAILHRNLIPRCPAADLFGIKGRCWLSAQPLPPDEAVAVDALLRQLDFHAQELRIIDAELGRVALSSSEVKRLMTIPGVDATVALSIVAAVGDFRRFRRPEQLVSYLGLNPRVKQSGGQPASHGRITKQGRAHARGMLVEAAWSAAKTPGPLRAFYQRVCSRRGMQIAVVATARKLAVLCFTMIERGEDYAFARPSLTDKKLRALELRAGMPSRQGRKGKAAAYSLKQVRRRERELAEQGEQAYRQLVTDWQAKRPKPKPEPGVAAANGTRLKRPSVGQAARQASVPEPALRSGVDHALSKA

SEQ ID NO: 118977 - protein, 347 aa, unidentified
MRFYTKQHPFYCGIDLHARTMYVCILDQAGETLLHRNMPATPEALLKAIAPYREQIVLAAECMFTWYWLADCCAEHGISFVLGHALYMKAIHGGKAKNDRIDAHKIAVLLRGGMLPQAYVYPAEMRATRDLLRRRMHLARKRGELLAHVQNTNSQYNLPAIGKKIAYKANRDGIAERFADPAVQKSIEVDLALITYYDELLRDVELTIVKTAKHHDANTLYLLQTVPGIGKILSLVLLYEMHDIARFPRVQDFASYCRLVKCAKESAGKRSGTSGSKIGNAHLKWAFSEAAVLCLRDNPAGQKLLTRLEKKHSKGKALTILAHTLARAVYYMLKRQTAFDLDTFLRG

SEQ ID NO: 118978 - protein, 325 aa, unidentified
MEYFAGLDISMKETHICVMDRDGKIALEAKAATSAAAIAAELAKAPTTQRIVFETGRMATTLYHGLAALGLPVVCIESRHAYQALKSMATHKTDRNDARGLAHLARTGFYKPVHVKSLPAHAVRALIIARKKLVGQRVTLENQIRGLALVFGVRLPRGLSPAFAEQVTSASSEVPALSSALRGLLVARNALLGAIAAEACQRLMTIPGVGHLTALAFVAAIDEPDRFRSSRDVGPYLGLVPRRWKSGEIDYTGSISKVGDRRVRTLLYEAANVMLTRYRGDLALKDWALRIGKRSTMRKARVALARRLAIIMHAMLRDGTDFQVA

SEQ ID NO: 118979 - protein, 402 aa, unidentified
MNAVGIDVSKSKSMVAIMRPFGEIVSTPFEIKHTASDIRSLVELINSVEGESRIVMEHTGRYYEVLAHQLSEANLFVSAINPKLIKDFDNDSLRKVKSDKADAVKIARYALDKWQNLKQYNVMDELRNQLKTMNRQFGFYMKHKTAMKNNLIGILDQTYPGVNTYFDSPARSDGSQKWVDFASTYWHVDCVRKMSLNAFIDHYQNWCKRKKYNFSQSKAEEIYGKAKELVPVLPKDAITKLIIKQAVDQLNSASTTVESLRTLMNETASKLPEYPVVMAMKGVGTSLGPQLMAEIGDVSRFTHKSAITAFAGVDPGVNESGSYEQKSVPTSKRGSSDLRKTLFQVMDVLIKTHPQDDPVYQFLDKKRAQGKPYYVYMTAGANKFLRIYYGRVKEYLSSLPES

SEQ ID NO: 118980 - protein, 318 aa, unidentified
MITASAGIDAGKKHLDVGIAPAGKTFRVDNAEAGIAEVIARLQQAGVRKVVLEAIGPFAQPVVGRLVGAGFEVGLVNPRRIKAFRDAEGRRAKTDRLDAGLIARFAMRMSEVARPIPTPGQLAAKALATRRRQLVEMIAMEKTRLKQAVNALLATSHRAAIAALSDERRRIEAELEARLAQDAAARRTRDILVSLPGIGPTVAATLITDLPELGTLDRRAIASLAGLAPHPNESGMARGRNAIGGGRPCVRAALYMAGLVASRSNPRFRAEYQAMRDAGKPAKVAIIAIARKLVVLANTLVKHDCLYDPAQAAAPNTH

SEQ ID NO: 118981 - protein, 353 aa, unidentified
MNDTASIAWLGLDAHSKNCVLGHLDDQGRELQWWPFPTQPQKLIAQIQAIPAADKRLMLEESNLARWLGQLLKPHVQQLVVCDARRNRLISHDHHKHDRRDAFALARLLRLNEFKSVWQPVEDQRVLFKRCAQSYEQAVQRQTRLKLQLKALFQHWGLFPTGSTVFSQTGRAVWLKQLPYDALRSQALLLYALLDQALTSQTQCRRLLCQTGRQFPEVPRLRTVPGIGLVGAHLFVAYVQDPTRFRKFSQLTRYCRLGIRDRSSDDKPLGYQQLDRQGNGTLKAISYRAYLQAAKRRAGPVWEFYQFSLRHTRSSTHARLNTQRKILLTLWTLWLTGREFNPETFSRSQPNDV

SEQ ID NO: 118982 - protein, 343 aa, unidentified
MDHFAGLDVSVKETSVCIVDEAGKVVREVKVASEPEALLSVLKNPAYRFKRIGLEAGPLSQWLFSALAEAELPVVCVETRHMQAVLKAQINKTDRNDARGIAQMMRVGLYRPVHVKTLRSQKLRMLLTHRKLLQSKAIAIENDLRGTLRNFGLKVGMVGTVKFEARIKELVENLPDLAVLVEPLLVVRRVLREQFVILHRRLLAIVRDDAVCQRLMTTPGVGPVVALTYRATVDVPARFRKSKAVGAVFGLTCSKYQSGEIDWSGRISRCGDEMMRVMLYEAAQSMLHSKKWSWLKAWAMQIARRRGKKKAIVALARRLAVIMHRIWVDGTEFRWTREQAVAA

SEQ ID NO: 118983 - protein, 420 aa, unidentified
MKSASNTLMTQLPETPPNDVTGGLDWARDDHAVSVVDTRGREVLRHTVEHTAAGLAELIDVLAGAGCQEVAIERPDGPVVEALLAAEMTVVVISPNQVKNLRGRYGSAGNKDDRFDAFVLADTLRTDRARLRALVPDTPPTVALRRACRARRDLIAHRIGAANQLRAHLRAAFPGAVGLFADIDSPISLAFLTRFTTQNQADWLSPTRLGKWLSSVGYSGKVDPTVLHARLTAAPRGLTDADADAHAAITRAFVAVLTSLLEQIKTLTADIETQLAAHIDAHIFTSLPRAGRVRAARLLAEIGDCRAKFPTPESLVCLAGVAPSTRQSGKIRAVGFRWACDKQLRDAVCDFAGDSRRANPWAADLYRRARARGHDHPHAVRILSRAWLTIIWHCWQDRVDYDTTKHGALQRLLKDQTQAA

SEQ ID NO: 118984 - protein, 398 aa, unidentified
MTESSDCESVQVFIGVDVGKDTHHAVAINRSGKRLFDKALPNDENKLRSLISDLKQHGQILLVVDQPATIGALPVAVARSEGVLVGYLPGLAMRRIADLHAGEAKTDARDAAIIAEAARTLPHALRTLKLADEQIAELSMLCGFDDDLAAQTTQASNRIRGLLTQIHPAPERVLGPRLEHPAVLDLLQRYPSPEKLASLGEKKLAAQLCKLAPRLGKRLAADIAQALAEQTVVVPGTNAAAVVLPRLALQLITLRKQRDEVALEVEQRVLAHPLYPVLTSMPGVGVRTAARLLTEVACRAFASAAHLAAYAGLAPVTRRSGSSIRGEHPSRRGNKALKRALFLSAFTALRDPLSRAYYTRKMSQGKRHNQALIALARRRCDVLFAMMRDGTFYTPQGS

SEQ ID NO: 118985 - protein, 327 aa, unidentified
MLPQTTLGIDIAKETMHCTLLSAAASQPLWQGVLPRTAAGLASLLQLAPPEAAWVVEPTGPYSTLVVESGRAAGRTVLLAPPKAAKSFLNSLQQRAKTDRLDSFGLGRYGLAVPLRDYPLRDAVTEQLQQLVRARRGLSDAKASLGQQAQALPGARAVLQPALDALQRQLVAVERELERLLRKEPSLSAARELRKVPGIGLVTTATALACLEAKQFERADQFVAHIGLDVKVMQSGRRQGQAGLSKHGDAELRRLFYLCARSSVTAKDGPFTADYDRLVARQLPKTGALNAVARKLARLCWSLHHYQASYDPHRVHHQPTRAQPAPL

SEQ ID NO: 118986 - protein, 343 aa, unidentified
MDQYIGLDVSLKDTAISIREDGKRIWRGKCPSDPKLLAEIIRKHAPHARRVVFETGPLSTWFYHALTTEGMPAICIEARHAQKVLNETLNKTDANDADGLAHLAEAGFYKAVRIKSLHAMLTRALVAARDQLLNLTTQLSNQIRGMMKTFGLIVPKGTGLVFDAHVRDLLERQISLAQIVLPLLDAWHDIRKRAAILDRQLIAAARQCRAARLLMTVPGIGAITAVSYVAAIEEPENFRTSRSVGAWLGLTTRRYQSGEVDCDGHISRRGDNRLRGLLYEAATAMLTRTSARNESRLKDWGLKLRERLGFKRAAVAVARKLAVIMHTMLKTGEIFNPSAATNA

SEQ ID NO: 118987 - protein, 347 aa, unidentified
MTQVASQVASPGVPPASPVATPVFVGIDVSKDKLDVARSDSRQLVTVDNNEKGIGQIIKLLKDASPACIVVEATGGFERLAVNVMIDAGLPVAVVNPSRVRHLALGLNILAKSDPIDAFVLREFARLAEPRLTQRRSANQAELDALITCRRQLVCTRTGQGNCRLSTSSKVARQSIDSVLKTIDKQIELLDAKIRALINSDDDFKNLDKLLRSVPGVGPVLSSTLVAELNELGAADRRQIGALVGVAPFDKDSGTFKGKRHIRGGRSQVRNVLYMSTLAAMRFNPVLKDFAARLAGKGKAAKVIIVACMRKLLTLLNVMVRDNLKWDQLNVVKMRKATPSDARAMPA

SEQ ID NO: 118988 - protein, 325 aa, unidentified
MVSAPGVFVGIDVAKAHFDVAVRGGKISTVHYENELDAQEALAATLVPMGVTLVVIEATGGYEARLACTLQAAGLPVAVVNPRQARDFAKAVGRLAKTDKVDAEMLAEFGELLASRPDMARFIKGPTNEEQEWLAALVTRRRQLLAMRASEQMRLQLTPKKLHRSILAVIAVIQAQLDDIDAQAVEHVREHNAELDEHLRSVKGIGPVASATLIAELPELGKLTRRQIAALVGVAPMANDSGRKRGARRIIGGRFEVRRVLYMAALSAVRYNPAIKAFYERLIAAGKYKKVALVACMRKLLTILNAIVRSGARWDATRCSTLHKS

SEQ ID NO: 118989 - protein, 413 aa, unidentified
METQKNIVCGADIHKKFIMATILSRDGNKIRGRFGMTLDEIVRFKEWVINSNCEAVAIESTGVYWIPIYTVLEGIIEVILANAYKVKHTPGKKTDKRDSKWLAELCLNGMIEPSRIFPKDDRDIRSLTRTREKLVNNSTQMKNRIHKELESACIKISSVLSDIFGVSGMKIINGLLEGKNIDEILKMITSKAILKKEQELRQAVTISLDPARILLIRTYLNLIEKIESQIEILNNEIMIRMQKLKEDLEIAMSMTGMGFTSASTILAEIGNIKDFETAEQLASWCGLTPKVSQSADKLVTGSITKQGSKHVRRMLVQVAHAISKSRNSKLKRFFLRILAKKGRKKAIVALARKVLCILHHLLVNREKYQDSEMSKTKKVKLNWASSPIQMTEQDMINVLVDAGYTVQKMTEGV

SEQ ID NO: 118990 - protein, 420 aa, unidentified
MTALSNQQFKAFVGIDWADTKHDICLQQAGDDRREFDCIPHQVTRINEWAKALHQRFGGPIAIALELARGPIVSVLQKHAFFTLFPINPAMLAKYREAFKPSRAKDDPTDAELALDLLLRHPERFSPLRPQSAGMRSLLSLIEQRRELVGDKTRFTNRLTNALKQYYPQALEWFDDIDTVLFCDFLTRWPTLPAVRRASRKTLETFFHAHNCRRAKLIEGRLESIRCAVSLTDDPGIVAPHRLLALMLVAQLRTALAAIDVFDKEIATVARTLPDFDLFDSLPGAGPHLTPRLLAAFGEQRDRFKGADELQKYSGIAPVTERSGKKCWVHWRWQCPTFPRQTFVEWAGQTINKSFWAGAYYRQQRAKGSSYQAAVRALAFKWIRILYRCWQTGTRYDESVYLNALRKRGSSLLRNLELPG

SEQ ID NO: 118991 - protein, 353 aa, unidentified
MGKSITNFSEVTTVGLDLAKHIFQVHGVDAAGRVIVAKSIRRSKLLEFFALLPPCLVGLEACGSAHYWARELIKLGHDARMMPPAYVKPYVRRQKNDAADAAAICEAVTRPSMRFVGVRSLENQAALMSHKTREMLISQRTQLINGLRGHLAEVGVIAAQGPRYARELADRIEAGDEAIPLAVCEALAPLVVQLRNLDEAIVRLDRAIAKMAQKDETTRRLMSIPGVGPITASAIAASVQDASSFSGPREFAAFLGLTPKQNSSGGKQRLGRISKMGNRYLRKLLVVGAHAVLFHRKPHTDALRTWAKKLIEKKPFNLVAVALANKMARIAFAILRGKTSYREIPAWRKRPKT

SEQ ID NO: 118992 - protein, 409 aa, unidentified
MRRVIGIDIHRTFGDVVFWEDGRLRHAGRIDMTRTALEGFGKILLASDEVVVEATANSMAVSRVLAPFVARVIIANPLQVKAIAQAHVKTDKIDAGTLASLQAAGYLPQIWTPETERQRRMVARRYQVVRHRTRLKNEVHSILHAHLIPKCPHADLFNGRGRAWLAAQPLPDDERAAIDRHVRELDRVAEDLALLDREIAQDAIDDSAVNRLMTITGVNLAVAAGIMAAIGDISRFNSPQKLVSYFGLNPRVRQSGLGAAHHDRISKVGRSHARAMLVEAAWAAAKAAGPLHAFFVRIRARRGHQIAAVAVARKLTVLCWHLLTKHEDYLWARPALVANKTRAMQLQAGHPQQKGNRRGPAYAYNSKALRDREMVIAARAERNYEQFVSQWKARRPSSLLKNPLATEGA

SEQ ID NO: 118993 - protein, 313 aa, unidentified
MQQSFVGIDISKNSLDVHVLPEGTSYSFGNEPQKVKALIRKLKKLKPTLIVMEATGGYEISLAVELSGAKLNTAVVNPRQVRDYARAIGKLAKTDAVDAYVIARFAQDVRPEAREQLNLKERQLKELVMRRQQLIDMRTAEKNRLSRAYTSQVQEELRCHIAELTARIKAIDEQLHNEVKNDPNWNQKLEIITSVPGIGANTAHSLLMCLPELGTLNRRQIAALVGVAPMNRDSGMMRGKRTIAGGRAVVRRMLHMPTLSAVTRWNKRLEKFYYHLRQQGKKHRVALTACMRKLVIMLNSMLKNNQPYNENYC

SEQ ID NO: 118994 - protein, 335 aa, unidentified
MQVYGIDLAMEKFDVNFINEKGKEKQKEVKNGVVSISKFLSTIPKDGILCAEHTGAYGDLLVYLCNQVKVPIALVPGYTIKHSLGLLKGKDDPLDARRIREYGERFTDKLVFSEYDEEYIVELKQLYTLRSQLVKARKTLLTSDKGRCHLPMQNVSVHNHLQSVLSGLDTEIAAVEEEIETLIKADQDLNENYELVTGIIGIGPVIATDLLIKTGNFETIDTARKAASYAGVCPFPNTSGKMVGKSKTSPFADKKLKSLLYMGAKSAVKHNKEYRLYYLKKQLEGKPHYLIMNNVSNKMLRTIYSVVKNKTPYSQDYICLDPRERIINSSTKKVA

SEQ ID NO: 118995 - protein, 376 aa, unidentified
MNESTVYVGLDVHKETIAVAVAHAGRGEPEYHGEVLHTAQGIAKLLKQLSPHGEVLDVCYEAGPCGYGLYRELVGRGHRCTVVAPALIPRKAGVRLKTDRRDALLLARLHRAGELTAVWVPDAEQEAIRDLSRAREDMKAIELKARQRLGAFLLRHGQVYREGASRWTQAHWRWLAAVRMPSAVQQLVLQEYLEAVKEAQRRVAGLEEQLRQVVADWSLRPVVEGLMALRGVSLIAAVTILAELGDLSRFDSPRELMGYLGLIPSEHSSGGSRRQGGITRTGNGHARRVLVEAAWNYRFPARKTRVIEQRAERTAVAVQAIAWAAQKRLCARYQALLQAGKQKPQVTTAVARELAGFLWAIACEVLGKPHGSKALA

SEQ ID NO: 118996 - protein, 316 aa, unidentified
MSVTETFIGIDVSKRRLEVAVHESNYRFRCANQESEYGRLIAELLALQPKLIVLEATGGLEIPVTAALHAASLPVVVVNPRQVRNFAKALGQLAKTDRLDAGVLAHFAAAIKPSLRPVKSSADLELDALLARRCQLVEMLTAEKNRRAAATTATVRQEVEVHIEWLQQRLSSIDSQLKVQIQTSAVWRVKDDLLQSAPGIGPVVSLSLLAELPELGTLNRQQVAKLAGVAPLNCDSGEHRGTRHIYGGRARVRSALYMAALTATRCNPVIKEFYQRLLAKNKPFKVAITACMRKLLTILNLMLKTQTPWRLVRQSA

SEQ ID NO: 118997 - protein, 446 aa, unidentified
MTNNSIQTNSSGGALPTVPGPIVCWVGLDWADKKHCLVVRTSPAGQAKTYRVDQKPEPLDEFFLDLRAQHPQGRIAVAIEQSRGPVLYALMKYDFLALYPVNPRTLADYRRAFKLSGAKDDPRDGDLLCELVCQHADRLRPLVVEDRTTRQLRLLTEARRDFVDERTGLSNRLGANLKCYYPLALELVGEDLTSPMAMEFLRRWPNLAQLQAAKPGTLRAFFYAHNSRSEDKIAARLAAIQSARPLTEDPALLEPMQLQMQRLVAHVRAVQQTIHQYDEKIRQVFATHSQAWLFAPLPGAGPVLAPRLAAVFGTIQANFQTALDLLCFSGVAPVRKQSGSQERVHFRYARPIFLHQSAVEFAKCSIAKCDWARLLYEHELKNGKSKWMAIRKLAFKWLRILWRCWQTGQPYDETRYLRSLQRDGVELYRSLYEALPPLQTPAVNNS

SEQ ID NO: 118998 - protein, 325 aa, unidentified
MQFLGIDVSKAKLDCLWLRDPENSKIKTKIFQNTLEGHITLKKWIETNIQESPENIHIIMEATGIYHESLAHHLFAQGFKVSVVNPARPKAFAKGLGSIHKNDKKDSYILALYGCRMTPIAWKPEPIEIRELKALTARLEALEDDLRRETNRLEKSEFSPVSELVIDSLRKMIKGLKAEKKRLENEINDHIDRFPHLKKDRLLLETIPGIGPVMSRLMLMVIHSRDFKKASQVAAFLGLIPVQNESGVFKGCSRLSKAGSGKIRCKLYMAAVVSWKYNPDLISQKNRLMANGKTTMQALGASMRKLVQICFGVIKNQTEYQPRVE

SEQ ID NO: 118999 - protein, 254 aa, unidentified
MKLQHIIGADLSKESIDLFSHEFQAHLKIENSFKGFRQMLKWLRDQKISCSNVMIVMEHTGLYSYHMEAFLHKHQISFTKVSALAIKRSLGLVRGKNDKIDARRIARYGFEKKDVLVVTSKPDKAIERLRMLHSTRNRLVRHRASLICAIKEYKNILKQSDLIIKSQLSLVKSFTGQIKKIEAEISQLITKEQLVNQNFQLLKTIKGVGKVVATAAIIKTRNFTQFSNARKFACYCGTAPFEHSSGKTIRRKPG

SEQ ID NO: 119000 - protein, 361 aa, unidentified
MSLSSWLVAGIVPGIERQPLKKLDVDENALLKLLNRWREEAQKAGQGIERIAVAFEAGRDGFWLARWLRARDIEAHIIHASSVAVSREHRRAKTDRLDTELLKRAFLGWLRGERDHCRMVAIPTIKAEDAKRPNRERESLVGEQSRIVNRMKAALVRLGIRGFNPKLKKAVERLDGLRTPEGEPIPPNTLAELRRDMARRRLVNDQIRQIEDTRLERLEQAPSDGPHAMVRLLARVIGLGIETADMLVQEVLSRNMRDRRAIARYAGLTGSPDESGRKRREKGLARSGNARVRRGMIQLAWRFLMFQKDSTLAQWFRARTENARSARKTMIVALARKLLIGLWRLVREGVVPDGVLLRPVS

SEQ ID NO: 119001 - protein, 424 aa, unidentified
MKAQSANDFAAFLGIDWADAKHDICLQPADSNQRERDVLSHRPEAIDQWAGSLRRRFQGRPVAVCLEIAKGPLVYALQKYDFLILFPINPAMLAKYREAFTPSQAKDDPTDAEYQLEILVRHRDKLRALKPQSAPMRTLRSLVEQRRRLVEDRKRMTNRLTSALKQYYPQAVQWFEAKDTPLFCDFLDRWPTLKQVQQARRATLEAFFREHHIRSRQLVEERLSAIKAATPLTEDMAVIAPHQLLVQALVEQLRVILQVIDRFDAEISTIAQRLPDYPLFSALPGAGAALAPRLLAAFGEQRERYENAAELQKYAGIAPVTERSGNQHWVHWRRQCPTFLRQTFVEWASQTITRSFWAGAYYRQQRAKRGSHQAALRALAFKWIRILYRCWHTRTAYDESTYLQALLRRGSPLLKSIVQTTQNT

SEQ ID NO: 119002 - protein, 389 aa, unidentified
MLLDHPLDGPTAIRTHIGAIFVSLELSRSTWLVTSLSPGKGEKMSKHGIAAGNVAELLTLFAELRRKAEVRTGQSYPIITIQEAGLDGFWLHRVLQQEGIESHVVDPASIATPRRRRRAKTDKLDGEALLRALLAYKRGEPRVCAMVVAPSPEEEDRRRLCRERGTLIAERIEHANRIKGLLFAQGISDYVPLRRDRRARLEALRTGDGRELPLHLKAQIGRELDRIELLLEQIKAVEAERDALLAAAREPASEQAAPDPVTMLLALKGMGANFAAVLWSEAFYRSFANRRQVAAYAGLAATPWQSGGIRHEQGVSKAGNPRLRTTMIQIAWLWIRHQPQSALTRWFKQRSQQGRKRAIVALARKLLVALWKYVTQGVVIEGAIMKPAA

SEQ ID NO: 119003 - protein, 400 aa, unidentified
MLSIGIDVSKGKSTVCGMKPGGEIVYTPFEIQHTREGMSELVSLLCGSGEEVRVVLESTGSYHCPVVAALLENGIFVSVINSLRMKRFCSQSIRRVKTDQIDAMQIALYGLAYWQELQPTRLPEDTYRELQLLARQYYQMTSLLIKAKVDFNALCDQVLPGMQELMNDHAGRHKLSDFVLRYHHTAHILKMGETRFRKDYCKWAEKKGYRNYERMAALIFATAQNGIPVLPNAPSTQIVITEAIRVLHTVEASRDAILTQMQALAKTLPEYSLVREMPCIGDTLAPRLIAEIGDVRRFHSKRALIAYAGIDAPPYQSGKFCANNRHISKRGNRYLRKTGYEVMQSYVMHKPANDPIFTFIEKKRGEGKSGKLAMVTGLNKFLRVYYGKVTELYRSLPAIE

SEQ ID NO: 119004 - protein, 336 aa, unidentified
MEAAPVFIGIDVSKAQLDMAERPSGERAVLPHTEESITTLVERLRQRQPTCLVLEATGGLEVPLASALAVAGIPVAVVNPRQVRDFARATGQLAKTDAIDAQILARFAEAVRPAPRPLPDEAMQAFSALLTRRRQLIEMLVAEQNRMQRAPHPIQQQIQAHLTWLKQQLAALDEDLTHRIQSTPIWRAQEDLLRSVPGIGPVVSRTLLAELPELGTLTHRQIAALVGVAPLNRDSGTLRGRRTTWGGRAVVRAALYMSTLVATKHNPVIKAFYQRLRAAGKAPKVALVACMRKLDQPPVVRPPFKFLHADTLTGAKVRVSGAGGRYPSALCGRCVL

SEQ ID NO: 119005 - protein, 387 aa, unidentified
MTARTVSNLPAAMHVDTARCLFAIELSKQNWVIGFVTPLSAKISRRILSGGDWKGLVDLIEEVRARVSRETGRTVDVISCYEAGYDGFWLHRLLEAHGIRNHVIDPASLQTDRRARQVKTDRIDTERLLRSLMAYLRGEPKVWSVVRVPSVAEEDARRLHRERDRLVSERVQHVNRIKGLCALHGIYDYQPLRPQAMARLEQLRTAQGISLPPRLKSEIKRELQRLELVVEMIATLEAERDAIVEDEASTHVNAKKIQNLHQLKAIGPEFAAVLVGEIFHRDFNNRRQLASYVGYAPSPFQSGNVAHDQGISKAGNRKGRTTGIELAWLWLRYQPDSDLSVWFRTRVGTTKGRIRRIAIVALARKLLVALWRYLETGLVPRGAVLKG

SEQ ID NO: 119006 - protein, 400 aa, unidentified
MKIYVGIDIAKLNHFAAAISSDGEILIEPFKFSNNYDGFYLLLSHLAPLDQNSIIIGLESTAHYGDNLVRFLISKGFKVCVLNPIQTSFMRKNNVRKTKTDKVDTFVIAKTLMMQDSLRFMALEDLDYIELKELGRFRQKLVKQRTRLKIQLTSYVDQAFPELQYFFKSGLHQNSVYAVLKEAPTPNAIASMHLTHLAHTLEVASHGHFGKDKARELRVLAQKSVGVNDSSLSIQITHTIEQIELLDSQLFSTELEMANLVTCLHSVIMTIPGIGVVNGGMILGEIGDIHRFSNPKKLLAFAGLDPTVYQSGNFQAHRTRMSKRGSKVLRYALMNAAHNVVKNNATFKAYYDAKRAEGRTHYNALGHCAGKLVRVIWKMLTDECRIQPRIRGLYTIIDRF

SEQ ID NO: 119007 - protein, 453 aa, unidentified
MRQHRQSPALESIHPNPAGIDIGSHTHWVCVPAERDATSIRSFGCFTADLHALADWLATCGVETVVMESTGVYWIPLFQILETRGFAVQLVNAQHVKTLPGRKSDVLDCQWLQQLHSYGLLAGSFRPTDQVCVLRSYIRHRDNLIKSACVHLQRMQKALTQMNVQLHQVVSDLSGTTGMAILRAIVAGERNPQTLAALRHHRAQRSEAEIAQALQGDYRQEHVFVLQQELQLYDVYQTQMAACDQQIEQCLADFEAKVDLNEQPLPPPKYKRHKPQDNQPAFDLRTHLYRMSGVDFTKIDGMGVLTVQTILSEVGLDPSRFPSVKHFTSWLGLCPGSRITGGKVKSSATRRVVNRAANAFRMSAQAAGKSHSALGAFYRRLRTRLGTPKAITATAHKIARLFYQLWTTGQGYVDPGENYYEQRCRERTLKQLQKRAQALGMEIVHRPLEEMIS

SEQ ID NO: 119008 - protein, 309 aa, unidentified
MKQSVVYIGIDVAKAHLDVAWAQTVRRLPNQRSGHAALIRWIKQSTTPVQLICEASGGYEQALLESLEKSAVKVTLVQAVRVRQYARASGILAKTDKIDAKVLAAFGSAIKPQPMSPRSVEQKRLRQYEAQRRHLSRILVAEENRLAQLSCAQLRTLSRSLMSKIKNQIETLDRRIGELIAQDQTLWEKAQKLTAISGVGARTAALLLAQMPELGQLNRRQAAALAGLAPFNHDSGSIRGKRAIFGGRRALRSGLYMAALSAARFNPILSRFYQRLRAKGKPHKLALTAVMRKLLLALNHSLKPEPILA

SEQ ID NO: 119009 - protein, 355 aa, unidentified
MDSKKYIGMDVHKESISIAVMNGAGKIVMECIIETKASMILQFIDGLRGDLQVTFEEGTSAAWLYDLLKPHVTKLLVCDPRKNASMREGNQSDKIDARRLAELLRLDHLTPVYHGEHGLRTLKELVRTYLTVTKDLTRVMSRVKAIYRSWAIPCTGKQVYAQRHRAEWLGKINEPGVHRRAEFYYQQLDALRVVRQEVRRDLLAESKKQKAWKRLCEIPSIGPIRAAVLLGILQTPHRFRTKRPLWNYGGLAIEMHSSADHRKVDGQLQRSRKNVLVRGLNRNCNHDLKNLFKGAAAVASSKPGPFQEFYTALLAKGMRPEMARLTLARKIATIVLIVWKRGVCFDAQHLKPQTA

SEQ ID NO: 119010 - protein, 378 aa, unidentified
MAQRNRSFSRSGLSLMNPDSAGIDIGSAAHYVAVPVDRDDEPVREFASFTADLNALADWLERCGIKIVAMESTGVYWIPLYELLQRRGFEVLLVNARHVKNVSGRKSDVLDCQWLQQLLSFGLLSGAFRPDDKVCELRSITRQRAMLLKSQGRHVQHMQKALTQMNIQLANVISDVAGVTGQKIIREIVAGERDAQVLAAYRDVRIKATEEEIAKSLLGNWRAEHLFALKQALAGFDFCVAQLAECDTETERVLKELHAHTGTPAKGKKRSRARNAPKFDVREHLFKVCGVDLTRIDGIDVSTALVVLSEIGVDMSRFPTVKHFTSWLGLCPGTKISGGKILGSRSKRTANRATQALKLAAAALRSSKSALGAYYRRM

SEQ ID NO: 119011 - protein, 310 aa, unidentified
MDHLFVGLDVAKAQLDVHVRPTGETFTVPHDETGLTALLDRLRTLAPTLITLEATGGYEATVAAILASAGLPVAVVNPRQIRDFARATGLLAKTDTLDARVIAHFAEAVRPAVRLLPTEQAQRLGELVARRRQLVEMLGAEVNRRRLTRDRGLQRRIDTHIAWLERALRDLETDLHDTIRSSPAWRETENLLTSVPGVGPITALTLIAELPELGRLDRRRIAALVGLAPFNRDSGTLRGRRMIRGGRGSVRRVLYMATLTAIRHNPRIRTFYQRLRTTGHPGKVAVIAAMRKLLTMLNAMLRDHRPWLPA

SEQ ID NO: 119012 - protein, 427 aa, unidentified
MNYNRNEKIRQITEETLIVGIDIAKKKHVARAQDDRGIDLGKRLVFENNISGFERLINWASDMKSTHKKSKLMLGVEPTGHYWLNLAYYVRTKDIPIVVVNPMHVKRIKEVDDNSPSKNDTKDARVIAQMVKDGRYSIPNLLEGVYAELRQGMKVRDQLSQDVQILSGRIDNWLDRYFPEFTAVFSKWSGKAALSTLEHFPLPSDIKSMTASAIVTQWREAVKGAVGLKKAEQLLAAAQHSGGLTIGLRMARREIEALIDQYHRLQEKLEAVDSDIEELLQEIPGTDQMLAIKGVNVLTVATFYAEVGDITNYQSPRQIQSLAGLSLRRHESGKYKGQTKISKRGRKRLRRALYLAVRPMVANNTSFKALHDYYTTRRDHPLKKQESLIALCNKLILVLFVIGKKQCAFDGEKMLQDMPQMTMQKAA

SEQ ID NO: 119013 - protein, 347 aa, unidentified
MDHIGIDVHKKESQICILAEGGELMERRIPTQPRRFAEELGARPHARILLESSTESEWVARCLEGLGHEVVVADPNFAPMYATRTRKVKTDRRDARALAEACLLGAYRVAHRLSDAQRHVRARLTVRDTLVRTRTRYISLVRALLRQHGWPVPTGSAEGFGRRVMTLPLPGRLRSEVAPLLAVMRHLQQQLAYSDERIAAVTQTDERVRRLQSVPNIGPVTAAAFVAALDDAARFRRAHEVEAYLGLVPRELSSGETQRRGQITKAGSSRMRWLLIQAAVSMRRLHDPRTAALREWAGHIAARRGKGIAVVALARRLAGILFALLRDGTVYESRQRALAAVPQAVPA

SEQ ID NO: 119014 - protein, 369 aa, unidentified
MPVVRGERAARFTFGTPSPRGSIWRAFATVLWKPEQLIDFNSHLQGWETENMPELIHVGIDVSKDALEVACGPQSPTQCFTNDDAGHEALVNVLHVHRVDLIVVEATGGYEAPCACALQAAGLAVAVVNARQARDFAKAMGYLAKTDRIDAQVLAALAAVLANRADRQKLIKALPSDEQQRLHALVLRRRQLVQMLVAERNRLPMSHQAARVSIEALIKAIRKQIVDIEADLSSHIAHHHADLAGLLRSAKGIGPHTSMALIADLPELGKLSNREISALVGLAPFNRDSGKMRGKRMIFGGRTQVRCALYMATIVAMRHNRVIQRFYQRLLAAGKPKKVAIVACMRKLLTILNAMVRTGKQWDETFHFA

SEQ ID NO: 119015 - protein, 350 aa, unidentified
MLYTAIDYHKRYSVACTMDVIGARVKEACIDDNEPAAFAAYFQSLPDQSQVVMEACWNWGWLYDELGEISGVETVVLAHPFKTRLIADAQIKTDRLDARALATLLRGNLVAKVHAPSPLTRARKHVIRQRMFLVQLRTMVRNRVHTVVARQRGIDRPVFSDQFGKKGLHWLRTVALPAPDDALLRQDLQALEQLGVLIKELEQRLLADNANDAAVRHLQSLPGVGPILAAVMAAEIDGINRFPRTDKLCAYTRLTPTTYASGGHVHHGRMLPFANRWLKWAFIEAAWVAVGCSPYFGTLYRRHRARGKKANTAITIIARRMCRIAWQLLHEGRYFTPVPPKLTLSPVAPL

SEQ ID NO: 119016 - protein, 407 aa, unidentified
MEVISPYVCGLDVHKKSITACILTPKQKEIRTFGTMTDDLWELVDWIQSFHCTHVAMESTGVYWKPIYNLLELEPNLKVLVVNAKHIKQVPGRKTDVKDAEWIAELLKHGLLSPSYIPNREQRELRELVRYRRSMIEERAREANRIQKVLEGANIKLGVVATNVLGVSGRLMMKEIIKGEEDPVTLARLAKHQLKQKHDELVRSLKGLIGPHQKMMIETQLRHIEFLEEEIHLLDEEIKHRMAPFEKEIQRIDTIPGIGRRTAEQIIAEIGTDMSRYASAEHLASWAGMVPGQNESAGKRKSTHTRKGNRYLRSALVESATSCIRVKDGYLTAKYKRLALRRGTKRARMAIAHRLLVIVYHLLTRKEDYKELGFQHFEKEKEEHKKKQAVKELEKLGFQVTIEPKLA

SEQ ID NO: 119017 - protein, 316 aa, unidentified
MYLGIDVSKLTIDCCLIADDQNYQKKFQNNKGGFEQLIKWLQSHKVTDKLHCVCEATGTYYEALAEYLYLRYTITVENPRKIKGYAIAELQRSKTDTQDAKLIAQYCQDRKHKLKAWQPPAKEQKQLKEITRYLDYLKQQRATEKAKQHEAPDYIKSHIQTTISNLTAQILTVKKQLLQFYKDNPSYNNLRKRLKTITGIGEQATAVLLSTYKRHEFKNAKQFTAYLGLDPRKYQSGTSVNGKSRISKIGSSEIRKSLYMPAVVAYRCNAFPEFVGRLKNKGKHIKLILIAIMRKLAVISFTLLKNGQDFQVERYK

SEQ ID NO: 119018 - protein, 317 aa, unidentified
MSEMTVEKFVGIDVSKGTLDLSIDPAGETLHIEYDDAGISQVVKRLAALAPTLIVMEATGGLEMRLACELAAKNLPVAIINPRQARDFAKATGQLAKTDVVDAGILAAFARAIRPAVRPIKDADTRDLDDLVTRRRQLVDMRVQETLRMGTASKVQKKSLAAHITWLDKRITDLDDDLTKRLRASDVWKTKDDLLRGIPGVGAVTSLTMLAKCPELGQLNRREIAALTGVAPLAKDSGKHRGKRFIWGGRADVRAVLYMATVSAIRCNSLIKLFAERLKLAGKPGKVVIVACMRKLLTIMNAVIKNNAPWNPEKYLT

SEQ ID NO: 119019 - protein, 415 aa, unidentified
MEPVLDSCAGMDVHEKKVDVCIAHGPLEKSPKFEIRTFSTMTSDLEDLKSWLKKYNVTTIGMESTGVYWKPIFNIMEGEFTIVLANAQRLKAIPRKKTDIMDCKRIAKLLRYGLLPNSFIPPREIRELRDLNRTRRKLVGMMTSEKNRLTKVLESSNIKLSSVVSKISGVSSMAMIRSLLEKDRLSKEEISQLAKGSLKKKVDLLEKALDGKLTDHHRFLLKMHMENLDHLARQIAKIDEQIERKMIPFQKESNLIQSIPGISKVSASAILAEIGTDMSQFPDEAHLSSWAGVCPGNNESAGKKKSGKTQKGNSFLKGTLAEAAWAASKVKRSTYNAFYQNIVRRRGKKRALVALAHRMLMDIYRVLKTGAPYQDTGAEEANERATKRKERSMIRLLEKTGYEVVRTCTSEIAAA

SEQ ID NO: 119020 - protein, 384 aa, unidentified
MQEVVETEKYTSPTSCLIVAFELSMRTWILAVKLPTSDKISQYHVEGGDTGAVLALIQRARSKASEALGEPVAVVSCYEAGRDGFWLHRLLGEHDVRNLVIDAASIHVSRRARRAKTDRLDADSLVRVLMAYCRGERKACSVLRIPSVAEEDAKRQTRERGRLVTARTGHVNRIKGLLITQGIRHLDPLRPDFPARLALARTGDGRTIGPGLLAELLREWERLQLVTSMVRAIERERDAPRTEETALRSPEAKIERLQQLRGIGPAFATVLTREVFYRSFDNRRQLGSYIGLAPTPFNSGSMRRDQGISKSGNPRARSTAVELAWLWLRHQPESDLSQWFHARVGQLAGGVRKVAVIAVARKLIIALWRYLETGLVPTGATFKT

SEQ ID NO: 119021 - protein, 342 aa, unidentified
MNHVAIDLHDEYSQVCVMNPDREILAEAKVPTTRAALNDFFRQRARCRVIYEAGPHALWVSELLTTLGHEPLVCHPRRVRLIAESRNKNDRVDAELLARLSLSDLELIKPIQQRSRATLDERSVVRARAALVETQKRLRTMLRGLVKPFGVRLAAGKKRALTELAKAELPAEATQSVRAIMTTLNTVSEQIRVLDGRVEQLSTSHPAAAHLQTIPGIGPLVAITYIHSIEDPARFASTDIGPYLGLTPSNRSSAGKRLAPKQRGRPGDPYLRSLLVQAAWTLMNSRSESHLAKWGRHLVERVGAKKAAIAVARKLATLMHHLWLCEQDFRPHPKPFSDTAKA

SEQ ID NO: 119022 - protein, 317 aa, unidentified
MSKSIRPFVGIDVSKARLDVALRPSAESFSVENTETARAALVVRLKILRPKLIVLEATGGLELPILQALLCAGLRAVRVNPRQVRDFARATGERAKTDRLDAHVLAHFGEAIGPKVRPLASEATQQLSALLTRRHQLVELLTIERHRVSTSTGRALESVREHITMLKGMIAQLDRELEQAVEADATWREQAAILHSVAGVGPVLVLTLLSRVPELGTLSHRELGKLIGVAPLADQSGAKEKPRHCWGGRADVRTVLYMATLAAIRFNPVIKAFYTRLLERGKPKKVALTACSHKLLTILNAMVKHKTSWDPDLALGA

SEQ ID NO: 119023 - protein, 461 aa, unidentified
MKVLYERVAGIDVHKDMIKVAIRSAGEKPWTRKTEILEFRTFYGVLQEMARLLRRRGVSHVVMEASGVYTEPVYYALREQDFTEVAVINPAHAKALKGHKTDARDCARVAELFECGLLHGSYIPAPELKEVRDLTRYRMKTVQARTSEIQRLGKALESAGIKLGSVASSITGTASTAMIDALIDGERRGQVLADLAIGRMRTAGKLADLSMALTGRFTEHHALLCRLHQDRIAGFDTAVAGLDERIAGKVTRWQREAGLLTSVPGFGDVVAQAWLGEIGPAPHLHFATCEKLASWVTLCPGNNISARKRKHGRTGDAGTYIKPMLVQAAWNAIRVRGRLQARYNRLVRRFGGDKNPGAKKKAITAIAHTLLKIAYQVLKSGTPYQDLGADFYTRRESPEQKQAWLERQLQKLHPGSTITITISPPEAALTPGAYYQPLPAAPEPPPTPHPGHSRRTTNAIL

SEQ ID NO: 119024 - protein, 419 aa, unidentified
MADGVVSWFAGVDWGSERHQVCLLDAAGQVVGERAFRHGGAGLAALCDWLVSVAGEPERVAVAIEVPHGPVVDALLDRGFAVHAINPKQLERLRDRVSLAGAKDDRRDARVAAGGLRTDPHLFRPVEAGDPAVIALREWSRLAEELQHERVRLGNRIRQQLWRYYPQLLAVSDDVTAEWVLDLWTLAPTPAKAARLRETTLARLLQEHRIRRLDAERALGILRQPAIAVAEGVTEAAVLHLRSLVARLRLANREFYQAERKLDELCTNLRDKTSTPKSGGPCDAAVLSSLPGIGPVTLAILLTEAAGPISRRDYAALRTLSGVAPVTKRSGKSCLVTMRYAAQIRLRNAVFHWARVAVLNDPTCGRRYAALRARGHSYGRALRGVADRLLGVACVLLQRQALFDPAHDTRAASQPRAAS

SEQ ID NO: 119025 - protein, 355 aa, unidentified
MTEIRRLVTGGVDAHADSHHAVALDEQGRLLGDAVFATTARGYRELLAWLEGFGQVRLVGVESTGAYAAGLVRFLSVRAVAVVEVNQPHAHTRRRRGKSDPVDAEAAARKALAGEATVVPKLSSGIVESIRQLRVAREGAVKARTAALNQLSVLLVTAPGELRQQLAARKTNRGKVSLCLRLRPDPARVHEPLQAAKLALRSVAERARELDGQISLLDKHLAPLVAAAAPRTTSLLGISTQHGGQLLVSAGENIERLSSEGAFARLCGASPIPASSGRTTRHRLNRGGDRKANRALYLIAVCRLRNCARTRAYAERRIAEGLSKKEIIRCLKRYIAREVYHTLRADLAALTHPRT

SEQ ID NO: 119026 - protein, 355 aa, unidentified
MRIIGDLHARQRSLAMLETATGEMVNLTLKHEGNEVREFYSQLPRPVGIEATGSMHWFLNLMDELGIECRVGHPATIRAAAPRRQKNDRLDADLILKLVAENRFPAIWLPTKELLDLRALVRHRHQWVRMRTRIQNALQAIALANGLRRGPSLWSYDGQAKIAFLPLLPHRRSALQAMYQKMDEEIEKLTQQVAEQAGQRSGARRLMTHPGVGPVTALATDVFLGDPKRFADGKALASYVGLIPREYSSGGRQRLGGVTKQGSPLLRFLWGEAGAHAVRRDPELKRFYRRKLVQKGLGRARVAVARKLGIRLWIMLRDEIDYQEFCRRGQKQHSGAACAGMPETAYGANRHRAID

SEQ ID NO: 119027 - protein, 325 aa, unidentified
MPMTASDVWIGLDVASAWLDGATAPVGHTWHVANDEAGRARLVAELVALAPQGIVLEATGGVERDLVADLLGAELPVSVVNPRQVREFARASGTRAKTDRLDAHILARFGAAFQPAPRAPLDAAADDLQALLARRRQLQGMLIAERNRLTRARAVAQPSIATVVTVLQAQVTEIDAELRTRVAADARWQAGQTLLLSVPGVGLVLSATLLGELPELGLLSRQQVASLVGVAPWNRDSGRTRGRRQTGGGRASVRRVLYMGALVATRWNPIIRPFYQRLLAAGKPKKVALIACMRKLLTMLNAMKRTGEAWAPRTTSLATESEVTA

SEQ ID NO: 119028 - protein, 315 aa, unidentified
MSEPDAVVVGIAVATMALDVAVRPRREQRQRSHDAAGMAELVAWLQVVHPAVIVREATGGNEAPVVAAVGLAGWPVAVVNPRPVRDLARARGQLAKTDRLDAPVWAHFAAALHPVPRPLPDAQAPELAALVERRRPLVAMRTAEQRRLAVTHSARVRAHMQVHLAWRDGEVADVDVELPCLVRASPLWRAQEDLLRRVPGIGPIIARALLADLPEVGQLAHAQIAALVGVAPLTRESGMWRGRRSVWGGRAAVRTALSMGTLRATRCNPMIRHFYDRLLAAGKAKKVALVACRHKLLTILNAMVKHQTPWQAQAA

SEQ ID NO: 119029 - protein, 314 aa, unidentified
METRAQPVFVGIDVSKNKLDVALWPSGEGFAVERNAKGLNSLCAKLAALNPVTIALEATGGFETVAAAALAAAGLSVAVVNPAQIRAFAQALGKRTKTDPIDAAVIARFAEAAKPAIRPLADAETQLLADLIARRRQIVDMIVAEKQRLDRAPEKRLRKSIERLLKALEKELSNLNGDIDTAVRASPLWRANEELLTSVPGVGPTTARTLIAELPELGSLTRKEIAALAGLCPFTRQSGQWRGKSFIAGGRASVRAALFMAAMVAARFNPILKAFYDRLAAAGKPKKAALIAVARKLLTILNAIVRDQKPWQPA

SEQ ID NO: 119030 - protein, 320 aa, unidentified
MMTQNGLLVVGVDVAKDKVDVCIRSLSQRRTFESTAEGRRQLVCWLRKHKVTKAVMEASGGYEREWAKALREKGVEVRIVDPKRVRHFARSAGRLAKNDAIDADMICRFAETFGEAPSQAYDAAREQLQQMVSARQGLLDIQTTLRNRGEHDVPQVVKQMHARLLKNITAELTKLKAAIIALVKATPDFARLADIIESVPGLSHITSAGLIAAMPELGQVSDEAIAALLGVAPYDDDSGKRRGERHIKGGRRRVRNLFYMSCMGAATLHNPPLKAFYDRLIAKGKLAKVALVACMRKLIVILNIMITRGEKWDASRYAVA

SEQ ID NO: 119031 - protein, 410 aa, unidentified
MKMAGIEVHKKVWMVVVVDASVPEEKPVRRRFVTLPSELQRFRIWLQEQGVEEAVMESTAQYWRSVWLELEPHMSLHLAQAFSNRAPRGRKHDFKDAERRVRRLMADELILSFVPKGEQRIWRSLTRMKVQLTRDRVRLQNQMECLLEEMRIKLSIVVSNLLGASGLRMLHALAQGETDPKRLAELGDERLHCTQEQLVDALTGRVQPMHRGMLALQLQRLQLIDQQMTQLNSMIAQAMKSHQDAVIRLAEVPGLGVDSAQQIIAEVGAQASTFSSAAELTAWVGTCPGKEESAEQNHSSRSAKGNKYLRRVLNQAAHAAVAKKGSYFQGVFRRLMPRLGYKSAIWAIAHRLCRVVWKILHEGVRYIEQGREVGPREKKQRAQMLARALRKLGYEVTITPINQLAPKPAI

SEQ ID NO: 119032 - protein, 359 aa, unidentified
MASRVERNTISFNGKIVNIGVDMHKQSWRVTALVEGEVAFTGTLAKPNYDSFRKLLARFEGNYVRIAYEAGPGGFGLYDILTADGIECIVTPPSLIPTESGSRVKTDKKDSLKLAKLLESNMLKKVWVLSHAERAHRQLVRTRRQIVDHRSDVMRQIKSLLFFHSMDIPFSSRQQWTGPFIKWLHELDLHDQCLNQSLKTLVHLFDYLSAEKKRLTHEVIELAKEEKYAHRVKLLNSIPGIGTLSGMEILVELQEITRFKTADELAAYLGLTPSQYSSGEHIRMGHITHAGNDRVRTTLVESSWILIGKDPSLRWKYENIKHRRGGKRAIVAIARILSARLRRMLLDQVPYEIGFQKAA

SEQ ID NO: 119033 - protein, 540 aa, unidentified
MAATRSRRRPSRPRIPTSVGKPRGVLHPRVQQVGPEHFGIVCFDCHKVSSKFLLADFYGRCLIPPTVVQHNRLDLDSAITQIRLAFEQHQVREGVVAIERTGRYHRVVQRAFAASGFETRILHPFVTKQYRQPVDPGNKTDAADLAAIHRATVTGCALLEASRDEAWTTLQLLIRHRRDLVRKGAALNCRIRDHLEAALPGYAACFDKLWESPIPWHLLRHYPTAGRLHEAGVASLCQSLRQAGIRFQQRTIQTVVDWALQAAAGDIAADQHLRIALALYDDRQRKTQEIQALERDIAARLVQTPYVLLLSFPGINVVSAADFAGEAGPITHYLNAKSITGRAGLRPSRYQSNQVDLASGPLVRNCNHALRAAILGIADNLIVCNHHFQALATQWAAQGKDPRDTRIKVGMRFCRIAFQMVAGRQVFRHPCIQGRHYILDKLTAFHREHDTGMVDVLRDLQAAIGQLPPRAYAVEAKPLAEELQRIQDGHRRGPQVLGDILRASCVVRPLGTGSEPAPRYRSGLTGSGCPAAMALASAIP

SEQ ID NO: 119034 - protein, 431 aa, unidentified
MRSRDTQGADHTGATSLKIPWGGGERPALWQSEVAHPPTPEAIMQIAAVRPQAPTAIRTDLGAIFVSLELSRSTWLITSLAPGGGEKMSKHSVRGGDVAGLLERFVQLHEKARARTRQCFRIIVIHEAGLDGFWIHRVLQAEGIESHVVDPASIATSRRRRRAKTDKIDGEALVRALLAYKRGEPRVCAMVKVLTPEEEDRRRLCRERKVLTAERVRHVNRVKGLLFAQGITGYEPRRRDRRERLEELQTGDGRRLPEHLKSQVRRELDRLELLLEQIKAVEVERDVLLAAEYTVTPAPAAMLLDIKGIGPEFAAILWSEGLFRHFDNRRQVAAYAGLAPTPWQSGSVNREQGVSKAGNPRLRTTLIQVAWLWLRHQPDSALTHWFHERVRLNGGRLRKTTIVALARKLLVALWKYVTAGVVIEGAVMKTA

SEQ ID NO: 119035 - protein, 314 aa, unidentified
MDKAPAPTFVGIDVSKLRLDVHLRPSGERFVTDHDDEGVAALVGRLAALGPALVVLEATGGMEVRPAAALAAAGLPVAVVNPRQVRAFARAIGRLAKTDRLDAEAIARFAEAVRPPVRPLPDEETRRLGALVARRRQLLEMLTAERNRRHAAEPLMHERLDAHLRWLEEALAEIERELDGAVRGNAAWRAKEELLRSVPGVGPVSARTLLAELPELGSLTRRQAAALVGVAPFNRDSGRMRGKRAILGGRARLRACLYMAAVAAARGSNPAIAGFYRRLRLAGKPAKLALTACMRKLVVTLNAMLRANTAWKQA

SEQ ID NO: 119036 - protein, 365 aa, unidentified
MDAPYHGVECARMEFDFELQTEGASTMDITTIGFDLAKTVFQVHGADGQGRVVLRRKLRRGKVLAFFAGLPSCLVGMEACASAHYWARELHALGHEVRLIPPQYVRPFVKTNKNDAADAEAICEAVTRPTMRFAPAKSAEQQSVLMLHRARELLVRQRTMVINALRGHCAELGLIVAQGASKVEELVAIIEDPGDGRLPPLAREALGSLVEQLRSAQARIKTLEATLLAWHRSNEASLRLATIPGVGVITATALVATIGDGAQFRSGRQLSAWLGLVPRQHSSGGKPKLGRISKRGDGYIRRLLVHGARTVLRWRRAKPGTHPGWTDQLLARRPTNVVLVAMANKTARVVWALLRYERIYQPTSA

SEQ ID NO: 119037 - protein, 429 aa, unidentified
MRTESTPGARGPVFCGVDTHADSHWLCVLDWRGRKVLSRQFPADAAGYEALAGAIAAAGEPACVAMEGTSSYGAGLTRHLASLGMPVREALSPARMQRRRPGQGKCDEADAERAARAAMSGSRLGTPKSQDGWVDGVRCMLAARSGAVKARTSAINTARSLLTTAPEGLRSRFRGMGGPRLMEELPSVRAEGALGAALGALADLWAAARDAALDMERAIEASLEENCPALLAMYGCGPVSAAKLAVAAGDNPGRLRSEASFAAICGACPIPASSGKTVRHRLNRGGDRQANSALHEIARQRVMRDPETAEYAERARGRGKSDREVMRCLKRYVAREAYRALMRPHEIRRPEDASGLVAARRAAKVSQVRAASILGTSEKYISMLERGQRELKPIRRAYEAWVEAGLPLDWDRQAFEAERKMDSKKHLAK

SEQ ID NO: 119038 - protein, 345 aa, unidentified
MNYCGIDIAMKSSYIYITDSKGRKKTSGEIPTKAGVFRQRLRPYLRGGLCIAIEAGNQTAWIYDMLVDLGAEVTVVNPAKVKLIAESRRKTDKIDARILCELLRLDVLPHPVHVPDKQTRSLRGLLVARRQLISARTKLCNVVRGMLRQEGITLAARSLKSFVGWQRLMSRSYTHEHLPIVLDSYYQSFISLSRSIQSLDKQLAERERADERAARLDTMPKVGRIASLTFLAAVDRVDRFASSRKLVSYSGLCPTVRSSGERTEYGSISREGRSELRAVWVQIAHLVVRDKSRSTARLRRWYSKVASHRGKRTAIVALARKLLAIAYRLLKDDTVYCSSLVSKAG

SEQ ID NO: 119039 - protein, 386 aa, unidentified
MIYIGIDISKYKHDCFICSDTGEVIVENLSFENNQKGFQQFADLLKPYDNSNVHIGLEATGHYGLNLKLFLAENNYTFMEFNPLLVKDFVKSLTLRKTKTDKVDASIICRKLMSVPYKSNSVIFYHNFSIKSLSRLRESLIKQRSKYLVQLTNILDILFPEFKPFFNNHFSSTALFLLKKYGSTKKIANMKDFDSIVKNAHGRFSYSKFTKLKDLAKNTIGKSNETLEYELKLILDLYSNVDTQINSIDKQISTIIKELNPPTLSIPGIGEITCASIISEFGDISKFSNPNQMLSFAGLEPSIIESGTMSSKGRMVKRGSGHLRHTLMNASMMVITHSHTFYDYYYKKRTEGKCHRVALSHVCKKLIRVIYTLETKNVQFDSSLLK

SEQ ID NO: 119040 - protein, 350 aa, unidentified
MCSLPVFVGLDYHDASVRVCVLDTDGSELANADRRNDWKAIAEFADRFGRPVQAAIESCCGAADLAEELISCAGWSVDLAHPGYVQRMKQNPDKTDCQDAQLVADLERVGYLPRVWLAPHYIRELRQVVRYRLQLTEQRRATKLRVRALLREQRRHAPKGLNAWTKAWEHWLRHEAELSEQGHWLVKQHLAELGRLGMQIRQVEKRLERLTAHDVEVQRLQEQRGIGPVTAWTIRAEIGHFDRFRTGKQLARFCGLSPRNASSGQRQADAGLIRAANPALRAVLIEAAHRLMNYDRYWQQFAQRLRAAGKPGSVVAAAVANRWIRRLYHEMKTPSGELAVAVGPAPSEDS

SEQ ID NO: 119041 - protein, 482 aa, unidentified
MADRKKSIFQRLTNGRLNRKQRRELERKLSAEDPGLEIVNRNVAGIDVGNESHFVAVAPGRDAQPVQEFGSWTADLERMADWLKACGIETVVMQSTGVYWIALFDVLEARGFEICLANARHTKNLPGRKSDVQESQWLLKLHTYGLLRNSFRPPDEIRALRSLWRLRDRHVKEAARTVQHMQKSMLMMNLQLSNAISDISGVTGQAIIRAILAGERSAEKLARLRDWRVKATEEEVARSLEGNWREDMLFELRQAVDAYDFIQKQMAECDQRLQKLMAELPAREVEAAVVAAEASGKPARKKRSGGTKKNVPRFDLHAELQRVCGVDLTRIDGIDIMTAQTIVAELGTDFSRWKNEAHLASWLGLSPSRDISGGKVLRQGSHKVKNRVATALRTAANTLLHSDSYLGARFRALQTRRGTPKAIKAMARYLACLIYRLFTRGQAWVDRGAKEFENRRAQRELAALQRKAAAHGFKLVNLQVPA

SEQ ID NO: 119042 - protein, 413 aa, unidentified
MSLENEPSFFVGIDWAATEHAVCVLDATGKKITAFTIAHTAAGFAALTDRLGRLGDTGRVAVAIERPDGRLVDALLTAGHPVMPVTPNAIKAWRESEVLSGAKSDRGDAAVIADYLRVRHHRLRPATPYTGSTKALRAIVRTRTDLVHARVAATNQLAALLDTHWPGAGMIFARPTSGIALAFLARYPTAASAAGLTEKRLDAFLRRQRHTGRKPAEVLLTRLRTAPAGVTDPDLTEGVRDAVLAQVAVLTTLNTAIKALDRSIGEKMDTHPDGAVFRSLPRAGTVNAAQVLAEWGDARDAYTHPDAVAALAGITPVTKASGKQRAVTFRWACNKRLRQALTTFADNSRRASPRAHAIYDRARTSGKDHPHAIRILARAWTRVIWRCRQNNTPYDPELHRGTHHTSTATPAAA

SEQ ID NO: 119043 - protein, 429 aa, unidentified
MQNESTPGARGPVFCGVDTHADSHWLCVLDWRGRKVLSRQFPADAAGYEALAGAIAAAGEPACIAMEGTSSYGAGLTRHLASLGMPVREALSPARTQRRRPGQGKCDEADAERAARAAMSGSRLGTPKSQDGWVDGVRCMLAARSGAVKARTSAINTARSLLTTAPEGLRSRFRGMGGPRLMEELPSVRAEGALGAALGALADLWAAARDAALDMERAIEASLEENCPALLAMYGCGPVSAAKLAVAAGDNPGRLRSEASFAAICGACPIPASSGKTVRHRLNRGGDRQANSALHEIARQRVMRDPETAEYAERARGRGKSDREVMRCLKRYVAREAYRALMRPHEIRRPEDASELVAARRAAKVSQVRAASILGTSEKYISMLERGQRELKPIRRAYEAWVEAGLPLDWDRQAFEAERKMDSKKHLAK

SEQ ID NO: 119044 - protein, 338 aa, unidentified
MKVYAGIDLHSSNNYIGIIDEQDHRLYQKRLPNEITHIKQSLEPFKESLEGVVVESTYNWYWMVDGLQDDGYKVHLANPSAIKQYEGLKHTDDKWDSFWLAHMKRLNILPEGYIYPKEERPVRDALRRRLLYVKHRTAHILSLQSAITRNLGYKMSGRDIKKLNESDADKLFDEPFLILSAANSISTMHFLGKKIKEIEKAVKSHVKLKPEFEYLLTMPGIGDILGLTIMLEAGDISRFPTVGKYSSYCRCVKSERLSNKKKKGEGNRKNGNKYLSWAYVEAANFAVRSYPEFQSFYNSKKAKKNGIVAIKALSNKLARASYYVMRDQVPYDASKLFR

SEQ ID NO: 119045 - protein, 345 aa, unidentified
MQIKSIGIDLGKTTFHLIALGSRFQVVMRKKFTRPQLLIFTANLPSSLIGMEAGVGAHFLGRALREQGHEVRLIPAQFVRPFVKSNKNDYRDAEAIAEAVERENMRFVPIKTEDQLDLQALHRVRDRLVARRTSVINQIRAFLLERGMSFRKGPASLRRQLPEILENADAKLSTGMRRLLDFLWQEWKGLQLQIESLNAELERIASSDASCVRLQQIPGVGPLISTAVVSAIGNGAAFKKGREFAAWLGLVPRQWSTGGKAKLLGISKRGNPYLRKMFIHGARAAVLRVKREGSTLGQWMSGLETRAARNVVIVATANKLARISWAVLASGNNYQPMHKAAVFSN

SEQ ID NO: 119046 - protein, 375 aa, unidentified
MKENVRFLGLDVHADTIAVAIAEPEGEVHSLGTIANRAESIRKMVKKLGSVEQLRACYESGPTGYVLYWQLAELGVACEVIAPTLVPMKAGDRVKTDRRDAERLARSHRSGDLTAVWVPDACSEALRDLVRAREAVKQDQLRARHRLSKFLLRTGQRPAQGMQAWTLGYMAWIKQIRFAQMAQEATKLDYLTEVQHMGERVVRLDKAIEEAVKLASPEIQEVVKDLQALRGIASISAVTIAAELGNISRFEGARQLMGYSGAVPSESSSGKRTQRGSITKTGNAHLRRIAIEAAWSYRLRPGVGPALRKRQDGVPEEIKEIAWKAQHRLHKRYSRLEAAGKDRRKIITAVGRELLGFIWAIGTRAEAAVKQQRAA

SEQ ID NO: 119047 - protein, 340 aa, unidentified
MQITTIGLDIAKNVFQVHGIDATEKVVVRKQLRRGQVMKFFAALPPCLVGMEACATAHYWARELTKLGHEVRLMPAKDVKAYVKRNKNDAADAEAICEAVRRPTMRFVRAKSAEQQGRLMQHRTRDLLLRQQTQVINALRAHLAELGIVAAQGREGLKQLLAIIADQADARLPLDARACLIVLAAQLQALHTLIKSIEKRLLVQHRAASKRLESIPGIGIIGASAIAATVTDPKAFQSGRDFAAWIGLVPRQDSTGGKQKLGPISKQGDRYLRRILVVGAHAVLRWAKQNPGKYPWLTQLLARRPFKVVAIALANKMARVAWALLASGAKYRAPRLAAAA

SEQ ID NO: 119048 - protein, 376 aa, unidentified
MTAKTDPQPSSVCEAPLYVAFDLGKTSWTVAMTTGLGVAPWVRAVRAGAWEEVGSVVVRARARFGVAATAPVISCYEAGRDGFWIHRALVAHGWANRVVDSASIEVNRRARRTKTDRIDACKLVVLLVRVCLGDRGAWREVHVPPVEAEAARHATRERMALQKEHTALLNQMRGWLTTWGTALPSRRRDAWWERLRDWRGAALPVAVQARLARASARLALVREQLRALTRAEQRAVQAAAPTSAAGRLMRLRAVGVKGTTTLLGEGLLWRGFTNRRQVGGMLGFAPTHASSGEQHRDQGISHAGNWRWQGTMIQLAWSWVRLQPTSALTQWYLARFGTGKRARRIGIVALARKLLIALWRYATTGLVPAGAVLKTV

SEQ ID NO: 119049 - protein, 451 aa, unidentified
MDHPREIEVAEEHEIVERVAAIDVAKATGMVCTRLPHTGVPGKRVTKVWEVRATTRALTELADHLVAERVERVVLESTSDYWRPFLYVLEGAGLVVWLVNAKQVKNVPGRPKTDKLGSVWLAKLAERSMLNPSFVPEEQMRHVRDLARARFDLVEDRTRVKQRVEKVLEDALVKISSVLTDLHGVSGRAILEALIAGERDPEVLAELAKGRARARLGLLAEACDGRFTEHHARLCRMLLDQAGDLTRRIESVTALLDEAISALEVPRGEVMTASLDPETGEIIPAPAAYASAVERISAIPGGGPETARAVIGEIGLDMAVFHSAQRLCSWAKTSPRTIQSGRKIKGAPIGKGNPYLKSALGQMATGAAKTDTFLGERYRRLIKRMPKQKALAAIERSILVVIFHLLSDPSTTFTDLGADFYAKRIDTKRRTDHLVHQLEALGHRVTLLPAA

SEQ ID NO: 119050 - protein, 347 aa, unidentified
MNFYNQQHQYYCGIDLHARKMYVCILNQKGKTMVHENINTDPDLFFQLVSPYLKDIVVGVECVFCWYWVSDLCAKHQIPFVLGHALYMKAIHGGKTKNDKIDSYKIALLLKGGNFPTAYPYPAEWRATRDLLRRRMYLMRRCGELVAHIQNTKTQYNLPGFTKRLARKYNHDGVAEKFENPEVRKSVEVDLAAIASLNQILNQLEWHIEKTAEQHDYHTLYLLRSIPGVGLILALVFLYEIQDIRRFPTVQDFSSYARLIKPVKESDGKWAGKSNGKIGNHHLKWACNEAAVLMLRESEKAKQYVAKLERKYNKGKALGIFTHKIGRAVYFILKNKEAFNMDKFFSQ

SEQ ID NO: 119051 - protein, 430 aa, unidentified
MHNDLGFDIWCGLDVGKQAHHACALDAAGKKVFDKPLPQDQFKLEDLFTRLSEHGRVLVIVDQPNTIGALPIAVARSMGIQVAYLPGLAMRRAADLYPGNAKTDARDAFVIADAARTMPHTLRRVDLGEETLAELKVLVGFDEDLAAEATRLSNRIRGLLTQIHPALERVVGPRLATRQGLAVIEQLGGPQGMTAASKSKLLRVITKANPRHAQNFADAITQALSEQTVVVAGTAAAEQVLPKLAASLRQPLDQRSELAAQVEKVVDAHPLAEVLTSMPGVGVRTAARILLDVGDASLFPTAGHLAAYAGLAPVTHRSGTSIRGEFPARSGNKHLKRALFLSSFAALRSDPVSRAYYDRKRAQGKKHNAALICRDPRDLARKCYSRFVPPTVLAESPAWASPVLTFGPPGQQQQASPTKGSSWGTRQRPA

SEQ ID NO: 119052 - protein, 407 aa, unidentified
MSMKVLYERCAGCDVHKDGITVHIVVPEGQETRTFGTTTNALLTLIEWLVEWKVTHVAMESTGVYWKPVYNLLEAAELTVFVVNAAHMKAVPGRKTDVRDAEWICDLMRHGLLRPSFIPPRAQRELRELVRYRISLIAERGDEANRIQKVLEGGNIKLGSVATDILGKSGRAMLQAMAAGTTDPAILAGMAQGKLRAKHAALMEALRGRLTDHQQKMLRMQLDHVRSLDQLIDALDAEVVVRLDPFQKEIERLDTIPGVNQRAAEVILAEVGADMKRFPNAAHLASWTGICPGNNESAGKRRSGRTRKGNRTLRRTLTEAGWAAGKTKNTYLGAAYRRIKARRGGKKAAIAIGHKILGIAYVVLRDGVEYRDLGVNYYDERKKDAVVRHAIKRLEQLGYKVAVQPVA

SEQ ID NO: 119053 - protein, 411 aa, unidentified
MNNTLFVGIDISKRSNVATFMNCEGKVVGRLTFSNNGSGADRLVAKILSYYEKEDFEAIRIGMENTSVYSKNLVWFLYEHEALNEHKLSIIPLNAIMVANYKKSFLDMDKDDITDSFAIADFIRIRPGLLTFKLDDRQEALKIMTRSRYNYVQALSRMKSQFLTRLFLSFSEMEAGKPFYSIFSKTSLSLLEEEFTLDELAEKPIPELVEFLQEKGGGKFQNPEEIAKVLKKAASSSYRVPAMVRESLNRTMASDMEIMRILENEIHNCDKNIEKLMKSVPAILVSIPGIGPVLAAGIISEIGDISRFQKQESLGKMAGFKWKRNQSGKKESEDKAAVLSGNKKLRYYLVEAANRVRIHDPVFKAYYRKKYAESKTHAHKRALILTARKLVRVIFYLLKENKLYKPDVGIS

SEQ ID NO: 119054 - protein, 411 aa, unidentified
MQVIYERCCGLDVHKRTITACRLKWSGREWQREVRQFGTMTKDLLALSDWLVSEGCTHVAMESTGVYWKPVYNILEGQFELLVVNAQHLKAVPGRKTDVRDAEWIAELLAHGLLRGSFVPPPSVRELRELTRYRTSLVRDRARTINRLQKVLEAANIKLGNVVSDIDGVSARLMLEALVAGERDTEQLASLAKGRLKEKHAQLVEALSCRLQPHQSFLIAEHLAQIDYLEGAIERLSHEIEERLRPFEQEIGWLDTIPGVNRRTAEVLWAETGGDMGRFASARHLASWAGMCPGNNESAGKRRSGRTRKGSPWLRHCLVEAAHGAAHTKNKYLSSQYHRLAARRGKKKAQIAVGHSILVIAYHLLTRKQPYSDLGANYFDERDRQAVTKRCVNRLQRLGYNISLEKLQMAA

SEQ ID NO: 119055 - protein, 346 aa, unidentified
MEHYAGLDVSLKEISICVVDRDGKMIARGACPSDPEGVAGWFRNRSLMPRRIVHESGNLSIWLQRGMTRLGLPATCIDARKAHKSLSARLNKSDASDAEGLAQLARTGWFTEVHIRSEEADRLRCLVGARERSIRLRKDLEGHIRGVLKTFGIRMVGIGEGRQRQAFRDQLAAAGATDPVLRAIADGFISAHATLCKVADDLDKAVKKRAKAHPVARRLMTIPGVGPVNALSFIALVDDPGRFSRTSDVGAFLGLTPKRHQSGEVDWSGRVSKCGDGAMRGLLFEAASCMIGQVKRFSPLKSWAVRLAGRRGFRKAAVATARKIAVLMLTLWKNGTDYQWTKEATA

SEQ ID NO: 119056 - protein, 410 aa, unidentified
MQTLVERGCGLDVHQATVVACLLIVLKSGKVHKQVRTFGTTTRDLLGLREWLLSEGCTHVAMESTGVYWKPIYAILEGAFEIVVANAQHVKKVPGCKTDVKDAEWIADLFCHGLLRASFVPPKPIRELRDLTRYRRKLVESRSAERNRLLKVLETANIKLASVVSDVFGASGRLMLLALAEGKDTAQEMAQLAKKQLRKKIPELQLALEGKVEEHHRFLLSVQLHRLGAVEKDLAIVEQRIEEKLKPYEAEIKLLDEIPGVDVALAGAIIAELGADMRVFENVSQLASWAGVCPGNNESAGKRRSGRIPKGNVYLKTALVEAANAAAKAKGTYLRDKFYRLKARRGYKRAAVAVAHKILVAIYHMLSHRVCYNELGDLYLDKLNKHHLTRNLVHRLERLGYTVTLEQKAA

SEQ ID NO: 119057 - protein, 422 aa, unidentified
MLEQSQDDEQIIARVAALDIGKAEVMCCIRVPRDAPAGRRRQEVQAYSTMTRSLLVMADRLRELGVTRVVMEATSDYWKPVFYLLEAHGFDPWLVNAKDVKHLPGRPKTDKLDAVWLCKIAERQMIRPSFIPPPPIRQLRDLTRYRVDLVSARTAEKNRAEKLLEDAQIKLSVVATNIFGVSGRDMMAALIAGERDPRVLAQMARVRLRAKMSQLEEAFRGHFTDHHAFLLAKMLARVDAISADIAEIDERIEAQLRPFADAVTRLQQIPGIGPVAAAVIIAEIGTDMGRFPTAGHLASWARFTPTVKQSAGHNKGNGSTGRGNPYLARILGEAVVAAGRTRTFLGERYRRLARRRGKQKAIVAVGRSMLIITWHLLSSPSTQFADLGPSFYDSRIQPDRKKREHIRQLEALGYKVNLEPAA

SEQ ID NO: 119058 - protein, 427 aa, unidentified
MNEIKTNRIDAFRQFKRQIRGSKDYLIVGLDIAKRKHHAFFGDANGRTLLKGLIVENNAEGFRHLLTQVRFYMDREGLSRVVFGLEPTSVYHKPLAEHLIEQGHLVVYATNEAIKKNRSLLDGRWDKNDTKDSANVADLVAQGKCHYYDLPELRLRDLRSLLLFRKRLKKQLHSCRVRIRNNLVAQYFPELDVYWNNAESENLTLVRWFLDPSHIRQLSCEQFIAKVTTRNRGLRQQRRLRHIWEAAGRSIGCRPGPAMNLEAELLVETLQSVQAQLSRVEQAIQELAEGFEEYAYLKSIPGFGPYVSAMALAAIGNPHRFENRAQLIRLAGFDLSASRSGEKSNTAVPVISKKGKADLRYALYQAALVASSLTTDFRAHYNRLLEGRQREEGIRTKMLVKIAAKMLVIAWTLMKRKEPFNPAYIQA

SEQ ID NO: 119059 - protein, 349 aa, unidentified
MRCFQPPAGTRFYAGVDLHARAIFVVVLDHDGRVVFAKNLPANPDAFLRAVAPFRDGLLVACECMHCWYWLADTCRQHHISFVLGHAYSMKAVHGCKTKCDRTDAEAIARLLRGGNLPPAYAYPSERRGLRDLLRARLRLVRQRARLYGHVHTARRQANLPPASSDVKYRCKRAACTADIADPFVRRRVETHLALLEPLDTTIRRLEKEISDAAGQIFPAELAVLQSTPGVGKVLSLTILLEIDTIGRFGTRQQFCSYARLCGAVQTSDNKRAGDGNRKAGNAWLKWAFSEAAVLSAQKDEQIGALLQRLASKLGKAKAYSALAHKLGRAFYHMLHTREVFDVNRFVRH

SEQ ID NO: 119060 - protein, 310 aa, unidentified
MANPYVGIDVAKAMLDVAIGSDGEVVQVENDEGGIARLIARLHESAPTLVVLEATGGYESLVAGALAGHGIAVAVVNPRQVRDFAKATGVLAKTDRLDARVLARFAEAVRPEPRPLPTAEAKELEEFLGRRRQIVDMLTMEKNRLSIAATERMKKSLKKHIAWLEEALRRANDDIDTAVRNSPAWREQEDLLRSVPGIGPVSARTMLAELPELGTLNRKKIAALVGVAPLNRDSGTIRGSRICWGGRASVRQVLYMAAVSAVRCNPVIRRAYLALRARGKKHKVALVACMRKLLTILTAMVRDHRRWSPS

SEQ ID NO: 119061 - protein, 391 aa, unidentified
MFYIGIDIAKKNHEASIIDSSGKSLSKSISFPNSTKGIEKFNNFISEFGVTTNNCIIGMEATGHYWISLFSYIIDLGFTCYVINPIQSDAFRKMYVRQTKNDSVDSFIIAQIMRFGEFSISNFSDENTFALRNLTRYRFALVDECSDWKRKLVAILDQVFPEYSSLFSNIYGVASKELLSKYPLPEDMLSIPAEKLGNLLYECSKGRLGINKAEEIQSRARESFGIKFAKRSFSFQIKQIISQISFLEEQLKEIEIEISCLLEDICPVITTITGIGSVLGASIVSEIGNISRFERANQLVAYAGLDTRIKQSGDFSATNTKLSKRGSPYLRRSIWLAATVAAFKDPALSIYYQGLRARGKAHGTAIGAVARKLTNIIFAVLRDQKPYTPNI

SEQ ID NO: 119062 - protein, 354 aa, unidentified
MMYVGVDVHKNFCQSAMMDDAGHIVKEDRFPNTDEGIQSFISRLVGFDDVRVVLESTGSLWMKLYDAIEEHGLEAVLSNPYKTRLIAEARIKTDKLDARILAHLLRADLIPRCYVPSKEIREVRSLVRHRVKLSKTRTEIKNRIHALLDKHRLKAPCSELFSKEGLEWLKSLKLSSIDDAVLKSDLVVLKALDEQIGYVESKIASIALKDPNVELLITMPGIDFYSAMVLSSEMGSIERFSTDKKLVAWAGMAPSLLQSGDVLRVGRITKEGNKMVRWIMVQAALNAIRSDARLRELYERYSSRKGHHKAIIAVAHEMLRIVWFMLKRREPYRGEDKRLSLRKHNRMCRLALDG

SEQ ID NO: 119063 - protein, 350 aa, unidentified
MKTRKVQDFVVKSKEIFVGLEDSKKTWKLAVRSERMVIHRASMEAKYQVLSRYLRNNFPECTIHLIYEAGFKGFTLHDQLAGDGIDCVVIPPHVVTEPKVSRVKTDKRDANRLALILENHDFKDACHVPDKERREDRQISRTLIGIQKDIVRTRNRIHKLLDFHGIKVPASRWGRAEFLALATISLPESLRISLDVLLNELEHLWTYRTTLRAALRRLCQKERYHKAWEIARSLPGIGWFTAIRLILELGEDLAHFTSGKKIASFVGLTCSEYSSGETEWKGRITGMGSGFIRTTLIENSWVAIRKDPALLAKFSRIWRSSGSKNKAIVGVARMLIVRLRACMCSGRRIG

SEQ ID NO: 119064 - protein, 343 aa, unidentified
MQTVTTIGLDIAKSVFQVHGVDAAGQVVIRRQLKRRQVLTFFQKLSPCLVGIEACASSHHWSRELSALGHTVRLMPPAYVKPYVKRQKNDAADAEAICEAVTRANMRFVDTKTLEQQSGMVLHRTRQLCMRQQTSVINAIRAHLAEFGIVAPVGRNGVEELLDIVADPSDKRVPEIARLCLAALGAQLRGLKEQILEFDRMIRAWHRSSEISMRLDECPGVGPVLATALVATVADPKAFRSGRNFSAWIGLVPKQHSSGGKDRLGSISKQGDRYLRGLFVVGALAVIRYAKIHGTKHRPWLTALLARRPVKVAAIALANKIARMAWAMMVRGESYKEPVALAA

SEQ ID NO: 119065 - protein, 360 aa, unidentified
MNTIQINKLDFNGQNIFVGIDVHLKSWSVAVLSESCFLKKISQDPSPKALYKFLTTNYPGACYHSVYEAGFSGFWAHEQLVQLGINNIVVNAADVPTMMKEKLRKTDAVDCAKLARGLRSGDLIGIYVPQREALEIRSLIRLRGQIIKDMTRDKNRIKAFLYFYGITFPEQFDRPGTHWSKRFMQWLKEIELSTVYGRKALDLHIRKAESQRDLLLQETRFIKELSRCEQLKDDMRLITSVPGIGISIGISFLAEIGDISRYKNAYKLASYIGLIPMCHSSGEKENDGELTIRKHAALRWQIIEAAWKAIGSDPAMNVAYEGYKKRMVGNKAIVKIARKLVNRIFFVLKYKQEYVTCVAQ

SEQ ID NO: 119066 - protein, 403 aa, unidentified
MNSVGIDISKGRSTVAVMRPFGEVVISPFEVRHTDSELSELARQLKSLDGETRVVMEATGNYHAPVAKLLHDAGLYVSVVNAKLVHGYGNNDLRRVKTDRKDAIKLANYGLDRWLTLPRYVPEEDTRLLLKNCYRQYRQYSKVQTVLKNNLISLLDTVFPNANRLFSSPIRGDGSEKWVDFVAEFWHCRCVSEKSERAFTSKYLRWCRKHGYNFREAKAHTIYAEASGHIGVMPKSETTKLLVEQAVAQLRATSTALAALKLEMQTLASQLPEYPVVMDLFGVGPTLGPQLIAEIGDVRRFYSKKALVAYAGLDAPPNDSGDVTGRHKSMSKIGASSLRRTLFLVMSVYLQTAPLDEPVYQFMDRKRAEGKPYRVYMMASANKFLRIYYATVKAYLESLEHTA

SEQ ID NO: 119067 - protein, 343 aa, unidentified
MHTVTTIGLDIAKSVFQVHGIDAEDRVIIQRQLKRRYVLAFFEKLPPCLVGIEACASSHYWSRELKALGHCVRLMPPTYVKPYVKRQKNDAADAEAICEAVTRATMRFVATKTPEQQSCLTLHRTRHLFVRQQTAVINVIRAHLAEFGIVAPVGRKGVEELLDVVADPSDKRVPEVARTCLAALGVQLRRLKEQILEFDRLILAWHRSNEASRRLDAIPGVGPVLATALVASIADPKAFRSGRNFSAWIGLVPKQHSSGGKDRLGGISKQGDRYLRSLFMAGALAVIRYAKIHGTKHRPWLTALLARRPTKVAAIALANKIARMVWAMMARGERYKEPVALAA

SEQ ID NO: 119068 - protein, 340 aa, unidentified
MEEITRIAIDTSKSVFTLHGSDAEGRAVLRRNLRRQDMIGFFGKLPPLEVVLEACGGSHYWGRTLAAMGHRVRLLAPQYVKPFVKRGKNDRNDAEAISEAASRPQMRSVPVKSAEAQAAAMLLSVRELLMRQRTQLINALRGHSTELGLVAAKGDKGLAELRAEIVTGDGLPPAAIYALQQLGREIDQIEGRLAAIDKTLAAQHRANAQSRRLAQIPGVGLLGALNFTLRVDPGQFRSGRHFAAWLGLTPKEHSTGGKQRMGGISRAGDERLRQLLVLGATAVISHVRKDRPGVSAWLLNLLERKPRKLAAVALANKMARIIWAMLTSGQSYRRTAPVSP

SEQ ID NO: 119069 - protein, 371 aa, unidentified
MNSILYVGMDVYKENYTLCCYSFDRDKVEYQQTVPSDYRLILKYLEQVHRKYPEEVEFICGYEAGCLGYSLYHQLTDHGVKCIILAPTTMGITNTNRVKTDRKDAANIARCLAFHTYSAVYVPDGEDNAVKEYLRMRDDQKLALKKIKQQITAFVLRLGKQYTGGKSLWTENHLKWLRGLDLTLLEKETLQEYLITYDYLTDKLEHLDARIEELARNERYGERVRRLGCFIGIKPHTALSLLVEVGDFRRFEKAPNFAGFLGLVPGEDSSGGGRNRLVIMKAGNSHLRRLLVESSQSYSRGTIGFKSKELKKRQEGNPPEVVAYADRANERLRRRYYRMTLKNGAKRNVAIVAVARELACFIWGIMTDEIA

SEQ ID NO: 119070 - protein, 355 aa, unidentified
MEKYFGCDAHKRYSIFVSMNEQGKSGHPVRVEHNRALFRKYLSNLPPGSKIAVESVGNWYWMIDEMERAGHNPMLVHPVKAKMMMGQINKTDKLDARGLALLLRNGTLPTVWIPPGELRDKRELPRMRMCLVRMRTTLKNRIHATLSKHAFDIQEVSDIFGKTGRMHLRNRLGTLPPYTSHSLGRQLELLDQLEFHIMQCEKQIEAVVQTTQTMKRLMTLPGVGKILTIVITLEIGDVSRFPGPEHLASYSGTVPRIKSSGGKTYYGKVRPDVNRYLKWAFVEAANSMVIHQNHYPNRHVIRLYRRLWERKGHAKAVVAVARHLAEATYWMLKKNESYREPISSTRKSTRFKHET

SEQ ID NO: 119071 - protein, 343 aa, unidentified
MKISVYAVDLAKSKFQVHGFDALGERRLAKTLSRSGMQRLFAAQDARGEVVMEACGSAHYWGRYLEGLGYRVRLIAAQHVKPFVVGNKTDANDADAIYAASRRADLRAVPLKSTAQQDALLVHATRERLVKARTALVNQLRGELGERGVVFGKQTEVLRRGVMAFLEQAADGEVTEYLRHWVRERLDEWRSLDERIKTCEREMQHGYRTSPACVQIGAVEGVGVITATATVATVGNARQYASGRQFAAWLGLTPKERSSGQARQLSGITKRGDSYLRKLFVHGARAAVLAAQRKSDARSRWINALVERRGHNKAVVALANKNARIVWALLSRGESYRASVEAA

SEQ ID NO: 119072 - protein, 335 aa, unidentified
MQVYGIDLSKEKFDVNFIDANGKEESLKVKNSLASISRFLSSVSEDGFLCAEHTGAYGDLLVYLCNQMNISIALIPGYTIKHSLGLVKGKSDPLDSKRIREYGERFTDKLEYTEYPEENIVELKQLYTLRYQLVRQRKSLRTIDKGRGVLPMQSIEVYNHLNNVMVKLDEEIAAIEDEIEALIMSDQEMRESYELATGVIGIGPVIATNLIIKTGNFKTIDTCRRAASYAGVCPFPKTSGKMVGKSKISPFADKELKTLLYMGAKAAVKHNKEFKLYFQKKELEGKSYFLIMNNVSNKLLRTVYSVVKNKTPYEKDHICLDPRERNTNSSTKKVA

SEQ ID NO: 119073 - protein, 456 aa, unidentified
MQKERRGEPSLTVRYPHCAGLDVGKKELYVAVADDAAVDNVRTFGTYTAALKQLSSWLRDGGVQQVAMEATGVYWIPVYELLERAGFEVRLVDPRATKRLDGRKSDVLDCQGIRQMMSMGMLSGAYRTPDAFCALRSYVRQRARLIQERSRQVLHMQKALTQMNVQLDNVLSELVGKSGLAILRSIVAGERDPWVLAQHRDGRIRATEAEVARSLEGNWRDEHLHELAAALRHFDFLEREIQQLELLIGQEAAKLVWQPEDHDSHSNSGGAPEMRKLQQPCRKARDRHRQLMLWEVAGVDLTAITGVGLETALFIVSELGADVSAFPTEKHFCSWLGLAPNNQISGGNVLRNRRRKANRLGQAFRQCAVTVRRTETWLGAKHRRRLARMEKARAVKATVHEIARLVFAMLRDGAEYVERSIEEFEKEYLQRKLAHIRRQAHAIGCDLVPRPELVPA

SEQ ID NO: 119074 - protein, 343 aa, unidentified
MQTVTTIGLDIAKSVFQVHGVAAAGQVVVRRQLKRRYVLTFFQKLPSCLVGIEACASSHYWSRELQALGHTVRLMPPAYVKPYIKRQKNDAADAEAICEAVTRASMRFVETKTPEQQSCLMLHRTRHLFIRQQTAVINAIRAHLAEFGIVAPIGRNGVEELLGVVADPSDKRVPEIARTCLAALGAQLRMLKARIVEFDRMINAWHRSNETSKRLDAIPGVGPALATALVASITDPKTFRSGRDFSAWIGLVPKQHSSGGKEKLGSISKRGDRYLRSLFTAGALAVIRYAKIHGTKHRPWLTALLARRPTKVAAIALANKIARMAWAMMAKGERYKEPVALAA

SEQ ID NO: 119075 - protein, 346 aa, unidentified
MKLSRVGIDLAKNVYQLHGVDRFGKTVWERRLKRHQWFQALLDKTDPSCEIGMEACASAHHWGRELQSRGYTVKLMPPQFVKPYVKSNKSDAKDAEAICEAMSRPNMRYVTVKTVAQQDIQATHRIRAELITQRTAKANQIRGLVAEYGLVAPKHLSSLRAAIPCWLEDAQNGLTGEFRTLLHGVWNDLLNLDDRVGEMDKAIKQLADRNEECVRLQQLRGVGPMISTAMIATVGDARQYRTSRQMAASIGITPRQHSSGDRERLLGISKRGDVYLRTLMIHGARSVVTNAKHKDDRLSRWVTNIANKKHPNVAAVALANKTARMAWAMLRNETDYDPDYAICSGR

SEQ ID NO: 119076 - protein, 353 aa, unidentified
MEQLYYVGLDIHKRTINYCVKDPRGEIVGEGRIGASRGDLEQWRKGLPQPWVGAMEATLFTGWIYDQLSEQGAQVKVADPSMLKAITASKKKNDQIDARKIADLLRCNLLPECYMGPREIRELRRILRYRQLLVRQCVQMKNRIAGFLMETGTVYEARRLHGRKYFQQMLQDLEGAVPESVIGLLGLSRSTVELLRRMERQLIQGLVVQPSLEQRVHRLSSIPGVGVVTALSWALEVGEPQRFRSVSQAVSYCGLCSAQISSAEKNYRNPISKKRNHHLQHVLVEAAKLAPRWNPPLAAVHSQALERGNRNRATLAVARKLVAYLLAVDRSGKPFQMRALSDANQVRSDSQAA

SEQ ID NO: 119077 - protein, 342 aa, unidentified
MEHYAGIDVSLECSSVCVVDCNGKIVREAKVASEPQALIAWFGALGFGLERIGLEAGPLSQWLFAAMKAAGLAVELLETRHVRKAFEAMPVKSDRNDARGIAQLMRLGWFRPVHCKSMSAQEIRSLLTARKLVQSKLLDVENSLRGILRGFGLKVGKTTKQTFAGRIEELVAGHPHLQMIAKALLAVRAVLRTEFAAFEKQTRRMVRSDMQARLLTSVPAVGPIVALTYASAIDDPARFKSSKQAGAHFGLTPKKHQSGETDYTGRISKIGDASVRTALYEAANVMLTKPVKGCSQLKSWAMRIKRRAGTNKAKVALARRLAVIMHRMLADGTPFNAAAAAA

SEQ ID NO: 119078 - protein, 338 aa, unidentified
MLHVGLDLHKRFSTVATMDEDGNIVREDKLYHDDRGRLTEFFGNLAGNAVVTVEATRNWYWLYELLEEQGVTVKLAHTRKVRLIAEAKLKNDKVDAKRLAELELKDFLPEAYIPPREIRDNREYLRYRLTLVQLRTKLKNKVHALLDKLGISHPFADLFCPAGRRFLDQLKLRPVYQEELTNYLALVDDIESRIAASTKAIKQQLKPDPRAELLMTIPGIGHLTAYLLLAEIGDIKRFANAAKLCAYGGIVPTVRQSADHCWQGHITREGNRYIRWALTESACKAPSKDYALGNFYRRLAARRGPLKARVAVARKLLVAVWHVLTYGEPYKVTAFPKV

SEQ ID NO: 119079 - protein, 357 aa, unidentified
MHTITIGVDLAKQAFSACAVDERGAVLQRRELRRDAFTVWLAQQPIGSIVAMEACGGAHHWGRRCLSHDLVPKLIAAQFVTPFRKSRGAKNDRNDAEAIATAARQGNMRFVPVKSLEQQARLAEHRVREGSKAEHLACGNRVRGVLAEFGVVVAQSDAALARRLGDLDELDLPTSVVVLLHELAAHWRGLRALVAASDARITASARLDARCRRLQALVGVGPLTADALVATIGDGRDFRNGRQLAAWLGLTPSQHSSGGKARLGGITCRGDGYLRTLLIQGARSSLQRAQAIATERATPEQLWIRALAARLPFGKVLVAVANKHARQAWAMLAHGVDYDPHARLANPKARRRPAATD

SEQ ID NO: 119080 - protein, 357 aa, unidentified
MSSEKYIGLDVHQATISVAVLDSTGKLVMESILETSAATILQFFAGLRGRLRVTFEESTCAAWLYDLLKPHVAEVLVCNPRQNFLLNHGNKNDRIDARKLVELLRGGQLKSVYHGENGVRMLRELARSYLATVKDVTRVMNRLKAVYRSWAIPCGGRDVYYRRHRADWLAKIPHPGPRRRAELLYQQLDALEPIRKQAKRELLRESRKHTATARLRQIPYVGLVRAALLVALMQTPHRFRTKRQLWTYSGLGLETRISGEYCYVQGRLQRSKKLLAIRGLNEDYNHDLKGVLKATATTASTRPGPLRDFYQALLAKGMKPTMARLTLTRKIAAMALALWKKGANFDAEKLNPKSQAA

SEQ ID NO: 119081 - protein, 411 aa, unidentified
MAHLIVGIDIAKDKHHAFFGTANGKTLWRRLIFSNDLLGYTRLIEQTQVLSSQYQLGEVVFGLEPTSNYHKPLAYWLIKQQYLVVMVAGKAVKDNRELLDGRWDKNDIKDSANVADLISQGKCQFYEQPDEDIVGVRNLLVIRKQLKREDHRLRMRIRNGLIAKYFPEMDRFWGHRLEENLAIVRWYLDPRKISDTEFEEFVRHVTTTNRGVRQMQRLRAIHQAAGESVGMPMDEAAGYEAQLLVERLRQVKEQISQTMQHLESKCQNLSGYQLLLTIPGFGPYIAALVLGALASPFRFTSRKQVIRLAGLDLNASRSGKKSQDSVPKISKRGNADLRYALYQAALIASYHNDGFRRLYHRTLEGRHGERGIKTKARVKLSAKMLVVAWTMLKNNEPFDARRLLGESVQQR

SEQ ID NO: 119082 - protein, 308 aa, unidentified
MHQARMLSIGWDVHKASITVAYVAKAHHAAVVSLGLGTRQGDIDTLMRQRPSQSTPLVFVYEAGPCGYWLYRSLTNKGHVCWVVAPSLLPTKPGDRVKTNRRDALKLARLMRAGDRTPVDVPQGEDAALRDLCRARADAIRALQAAKFQRKALLLRHDIRSTGRATWRPAPLWWLSEVVCPTPAQQIVFHTSVRAVTDHPERLARLAQARTDPVQTWRLAPVVDALQALRGVPCPVAVTTVAARGAIPRFDHPRPLMHSLGFTPSEDSTGERRHQGGMPKTGNRHARRALVEGAGAARSPANISRHLP

SEQ ID NO: 119083 - protein, 339 aa, unidentified
MTKAMTLGLDIAKQVFQVHGADKSGRAVLRRKLRRSEVARFFSEQPPCLVGIEASGSAHYWARVLSGQGHTVRLMAPQFVKPYVKSQKNDANDAEAICEAVTRPNMRFVPQKSVEQQDLQCLHRVRSRLVANRTQLINQIRGLLAEYGIVLPQHPGQVRSGLPAVLEDAENQLTGFGRELFQCLYEELAQLDEKIGAADGRIQIAFQNTPDCRRIAAVEGVGPLIATAIVAAISNGHAFENGRQFSAWLGLVPRQNSSGGKSRLLGISKRGDPYLRTLLIHGARSVVYRAKAKTDRRSLWINDKQQRLGTSKACVAVANENARIIWSLIAREQEYRRAA

SEQ ID NO: 119084 - protein, 343 aa, unidentified
MQTVTTIGLDIAKSVFQVHGVDAAGQVLIRRQLKRRAVLAFFQKLPPCLVGIEACASSHYWSRELQTLGHSVRLMPPAYVKPYVKRQKNDMADAEAICEAVTRANMRFVPTKTPEQQSCLTLHRTRHLFIRQQTAVINAIRAHLAEFGIVAPIGRQGVEQLLGVVADKNDNRLPEVARASVAALGSQLRMLKAQILEFDRMINAWHRSNETSRRLDKAPGIGPMLATALVATVADPKVFRSGRNFSAWIGLVPKQNSSGGKNRLGHISKQGDRYLRSLFVAGALAVIRYAKIHGTRHRPWLTALLARRPTKIAAIALANKIARMAWAMMVKGERYKEPVALAA

SEQ ID NO: 119085 - protein, 402 aa, unidentified
MNAVGIDVSKGKSMVAIMRPFGEIVSAPFEIKHTASGINSLVELINSVEGESRIVMEHTGRYYEVLAHQLSKANLFVSAINPKLIKDFDNDSLRKVKSDKADAVKIARYALDKWQNLKQYNVMDELRNQLKTMNRQFGFYIKHKTAMKNNLIGILDQTYPGVNTYFDSPARSDGSQKWVDFASTYWHVDCVRKMSLNAFIDHYQNWCKRKKYNFSQSKAEEIYGKAKELVPVLPKDAITKLIIKQAVDQLNSASTTVESLRTLMNETASKLPEYPVVMAMKGVGTSLGPQLMAEIGDVSRFTHKSAITAFAGVDPGVNESGTYEQKSVPTSKRGSADLRKTLFQVMDVLIKTHPQDDPVYQFLDKKRTQGKPYYVYMTAGANKFLRIYYGRVKEYLSSLPES

SEQ ID NO: 119086 - protein, 341 aa, unidentified
MEQVTTIGLDIAKQVFQVHGADAAGHVLFRKRLTRAKLLGFLAGQTSCVVAMEACSGAHYWAREIGKLGHRVRLIAPAYVKPFVKRQKNDVADAEAICEAAQRPSMRFVPVKSEEQQANGIVFRARDLLVRQRTQCVNALRGHLFEYGYVFPQGITHVAALVALVEDPQSSLPESVRTILKLLVDTFTALEGQIAAMDAEINQRSKADPMARRLMTIPGVGPITSTAITALVPAPEGFPAGRDFAAWLGLTPLQKSTGGKQKLGAVSKRGERTIRRLLIIGASAVVQQASRRGAPKGSWLAQMLARKPKMLVTVALANKMARIVWALLVKGGTYRAPVAAA

SEQ ID NO: 119087 - protein, 313 aa, unidentified
MDKHFVGIDVSRDSLSVAVHPGGQSMEFPNTDEGRAELITHLQEWQVALVVVEATGGIERTLARSLAQASIPVAVVNPRQVRDYAKALGRLAKTDAIDAQVLAQFAEAVRPEPRPLADDRTRELADLVTRRDQLVTMLTAEKNRLRSAPHDIQPSIVEHIAWLKGQQDELDQKISALSKAEPKWRERDRILRSVPGVGPVLSATVLGCLPELGQLDRREIAALVGVAPFNRDSGRMRGRRTVWGGRGNVRKVLYMSTLAAVRCNPVIRAFYQRLVDAGKRKKVALVACMRKLLVILNAMIRHGTLWSPYVALP

SEQ ID NO: 119088 - protein, 338 aa, unidentified
MAIVMGLDQHRAQITAEWVDTETGEITRSRITPAHRQGVRQFCEKFRGQELEVALEATTGWRFVADELAQVGAVVHLAEPAETAARRGNKKRAKSDRGDARHIRELLTIGRLPESWIPPDHLLDLRAQVRLRHTLSHQRGEWQQRVQAVLYHHGCPQRGELLTLGGRTWLAAQPLPPAACEQITVALAVIDALDIQRAPLDARLRAFARHQAGCKALLGQFGVGELTAVTILAELGDARRFSSSRDAVRFAGLDITVHQSDQRRASGHLSRQGPPALRWALFEASMCAARRCSPDYEYYAQAAERLGSNRARLSVARKILKRSYHLLRELGDEAIAPA

SEQ ID NO: 119089 - protein, 402 aa, unidentified
MNCVGIDVSKGKSMIAVMRPFGEVVISPFEVQHTASELSELAKLLKSLDGETRVVMESTGNYHAPVAWLLHDAGLYVSVVNAMLVHDYGNNSLRRAKTDKKDAVKLANYGLDHWLTLPRYVPEEDTRLLLKTCYRQYQQYSKVQTMLKNNLISLLDAVFPEVNRLFNSSPRADGSEKWVDFVSTFWHCQCVSTLSLKSFSARYLKWCRKHGYYFSQEKAFEIHSKAQSCIGVMPRNETTKLLVQQAIAQLKETSAALAALKQEMQSLAASLPEYPVVMEMFGVGSTLGPQLMAEIGDVRRFHSKKALVAFAGIDAPPCQSGQMDIHSRSISKRGSAALRRTLFLVMGIYLQSAPLDEPVYQFMDKKRSEGKPYKVYMMASASKFLRIYYTTVKAYWGSLEEA

SEQ ID NO: 119090 - protein, 344 aa, unidentified
MIYIGMDVHQKSTTFCLFDPSAKKKDQYRTVTRPTTVQGLKEVLHPHDGACQVAFEVGTQAQWVARIVRPLASDVQVANPSRIPWLFRDGRKNDRLDARKLATLLYLDQLPQVHLPAADVSAWRALINHRRTLVKRRTMAKLQIRAILRAFQTPCRYKNCWTKRGMAWLRSLTFDAARDLMVKTLLEELDFLNGKIVEIEGQLDDIAKARWEIPLLRTIPGVGPRTAEAIAAFADGTDRFGNGREFASYFGMTPTLDASGGVVRHGHISKRGPSVVRWVLVEAAHQTVRRCPALRTFYERVRHGKKDRNKKAIVAVGRKVLTIAYAMMRHNAAFDATKLGCSAA

SEQ ID NO: 119091 - protein, 356 aa, unidentified
MNRTSDSVVSSSHLQDRVKTISITPVITSTPVTTSVAPVTPPVFVGIDIAKDKFDVHVRPFSKTWTLTNDLKGFEQLVVHLKQFPTLQLLVVEASGGYERTLVSQLIEANIPVAVVNPRQARDFAKGLGHRAKTDPMDASDLAQFAELVKPKLTHKTPENQQQLQDLVTRRRQIIHLQTIEKNRQHTTHGVIPNKTIKETLALFDKQLATLEKAIAELFDASDDWTAKTAILTSVPGVGKITAQQLLAEISELGTVKRTQIAALGGLAPYNHDSGKLKGRRCISGGRQSVRTALYMAALTARRFNPVFIAFAKRLKQAGKPYLVIQVACMRKLLVTLNAMLKSRTDWNHTLVQESS

SEQ ID NO: 119092 - protein, 343 aa, unidentified
MESYVGLDVSLRRTSICVVDKAGKLLCEGTVNSTPEAIIEFVKSKAAGAVRIGLETGPTSTWLWTEIKALGLPVICIDARHAKAVLKMQINKSDRNDAFGIARIMQCGWFKEVRVKRIDSHVVRALVESRGLLVKMKRDLENQIRGLLKNLGLLIGTARGQAFHARVQELVEGKPYLAVAVLPLLETRNNIVRQITDLDRKVLMLARNDNRARSFMTVPGIGPVTALCYRATIDEPSRFKRSRSVGAYVGLTTRRYASGEVDWTGRISKCGDAMLRSYLFEAAGVLLTRVHKWCALKSWGTRLAKRVGLRKAKVAVARKLAVILHRMWMDGTDFQWSADKVAT

SEQ ID NO: 119093 - protein, 455 aa, unidentified
MPRTKRSRMAMSPVHANAAAIDIGATLHIAAVGPDRDPEPVRSFGTFTGDLHRLADWFKQCGVSTVAMESTGVYWIPVFEILEQLGFTVVLVNARDAKHVPGRKTDVTDAQWLQRLHEYGLLRASFRPERRIAALRDYLRQRERLLDYAASHIQHMQKALMQMNLQLHHVVSDITGATGMRIIRAVVAGERNPVTLAALRDQRCKESAETIRQALVGNDREEHIFALAQAVELYDAYLAKVDACDKRIEAVLTELKATCPPPPAPLPAPRHRMKQPNALSFPAREALHRILGVDLTQIHGLGPYLALKLVGECGTDLSAWPSAKHFTSWLCLAPSNKISGGKVLSSRTRRSSNRASALLRLAAVTVGRTETALGAFYRRLAGRIGKAKAVTATARKIAVLFYNTLRYGMGYVDPGASYYEDRYRQRVLANLKRRAKSLGYALQLTEPTPAGAEVS

SEQ ID NO: 119094 - protein, 367 aa, unidentified
MGWMAPLRHLGAKVLVGENQSADREPSMNEITTVGLDLAKNVFQVHGVDAEGTTVLRKQLRRAQLLAFFSRLPRCLVGMEACATAHYWARELRTLGHEVRLMPAQYVKAYVKRNKNDAADAEAICEAVARPTMRFVPAKTAEQQAAVLLHRGRERLVRQRTMLVNALRGHLAEFGVIAPQGLRNVGKLIAIIRDEEDARLPGLARQVLQVLAVQIEQLEAAIAALEKQLMGWHKSNPVSQRLATIPGIGPIIATAIAAMVVEPSGFRSGREFAAWLGLVPRQNSTGGKNRLGGISKRGNQYLRRLLINGASANLLRSKATNADPWVIGLRRRRPSLVVAVALANKTARIAWAVMHRQENYQRMATAA

SEQ ID NO: 119095 - protein, 337 aa, unidentified
MKYCGIDLHGNNSWVVIIDEQDRVLYSRRHANDLPRLLAMLEVHRSELSGIVVESTFNWYWLVDGLQEVGYRVLLANTAAIKQYDGLKHRGDESDARQLAHLLRLGLLPQGHIMPKAARAVRDLARKRMQLVQQRTAQILSIESSLSRHSGWKLSSNRIKCLRQADLDEMRLDEMPMLGLKANVAVMQALQTQIDGLEKVLADYCRAEPGYQLLRTVTGIGEVLATVILLETGGIERFAEAGNYASYCRCVGSAHLSNGKKKGEGNTKNGNRYLAWAFVEAANFAVRHCEAARRFYQRKKAARNSIVAIKAVAHKLARACYHMLKTQTPFCVERCFA

SEQ ID NO: 119096 - protein, 333 aa, unidentified
MNKVVVGIDVSMDDFHVCLKVRDKDERTKIRGSRTFKNTKQGFEELLRWAQRKEKSISLFVMEATGVYHENLAYFLYDKDQTVSVVLANKMKSYIKSLNVKTKTDKTDAKAIAKLGIERSLVPWKPMSSEYKKLRDMCRELLSQKKDRQRAMSQLHAFNKAHEKSDTIIKLKEEQIELSDKIIATLEKSIHQTVNQDPDFKKKIKKLETIPGLRFVTIVILICETNGFELFKNIRQVVSYAGLDVVLDQSGNHNGKTRISKKGNSRIRQALYMPAMSAIQYNKPIRKLHERICRKNPKIRQKGVVAGMRKLLILVYTLWKKDEEFDINYQWGV

SEQ ID NO: 119097 - protein, 408 aa, unidentified
MKLFVGIDVSSQKLDVCFMDSEDHILHEATLLNDITGASKIKEIILKLNEKLEYDVIKVGMESTSVYSFHPATFLAEDAELKNLGTEVIVQNPKAIARFKGLFEEDKTDTIDARRIAGFLRLGLHGTTVIKEEKYIALQRLTRSRLQLIEQMTECKQHFLENLYYKCNTLTRDVETSVFGATMMDLLTESLSFGEIAEMEVEDLAAILQEKGRGRFGNPAKLAKAINKAIRDSYRLGKVLEGSVDVVLGTYAMMIKTLKQQIKELDKAIEALLETIPESQCLLSVPGIGPVFAAGILAEIGQIERFEDQAKLAKYGGLYWKKKQSGSWESERTSLTRTGNHYLRYYLVEAANSVKNHEPVYKEYYYKKYDEVPKHKHKRALVLTARKFVRLVDVLLRNHQLYTPERSV

SEQ ID NO: 119098 - protein, 363 aa, unidentified
MDEAWAGVDAGKEFHWAHVLDASGTELLSRKVENDEADILRLIDDALSLAEEVLWAIDQPGGGAALLLALLWERDQKVLYVPGLSVDRARDTYRGESKTDARDARVIADQARMRPDLGELGPGEQEISELRLLLARRRDLITDRSRIITRLRETLLSLFPALERALDLNGKGPLTLLTHYQSPAQLRRAGHKRVATYLRNRGVKGSANVARKALSAAESQSVILPAQEVASRIVAELAEEVLAFKERIESIDEEIGQRFFARPEARILNSLPGMGPILGAEFLVCVGDVSAFESADRLAAYAGLVPAARDSGKRVGNRRRMRGGNKTLKRVFYQAAFASLRGSTESRVFYDRKRAEGKRHKQA

SEQ ID NO: 119099 - protein, 360 aa, unidentified
MRIIGCDLHARQQTLAMLDTVTGEVVNRTLMHEGNQVREFYAELPHPVLVGIEAIGPMHWFLNLLEELGIECQVGDATKIRAAEPRKQKHDRRDAELILKLLVENRFPAIWMPSKEQLDLRALLLHRHHWVRLRTQIQNGLQAIALANGLRRGPGLWSYDGQAKIAFLPLPPHASYRRSALQTAYRKMAEEIEGLTEQVAEQAKQRCGARLLMTHPGVGPVTALATDVFLGDPQRFADGKALASYVGMIPREYSRGERQRFGAITKQGSPLLRFLWGEAAAHAARRDPDLQRFYRRKLVQKGLGKARVAVARKLGIRLWIMLRDQIDYEEFCRRGQKQSSAACAGMPETGFGAKRHRAVD

SEQ ID NO: 119100 - protein, 430 aa, unidentified
MDEVNRNRLEEFRQLRQEIRQSEEHLIVGIDIAKEHHHAFFGTATGKTLLRRFVFSNDGEGFRRLLDQTETLRVRHGLTKVVYGMEPTANYHKPLGEYLIHMGRTVVLVSGVTVKHNRDSLDGRWDKHDDKDSANVADLISQGKCLYYEHPSAELRGLRGLLSLKRRLKRQEQSYRVRIRNHLVAQYFPEMDSDYGRSEAQGLAIVRWCFPVSQITQIDVGPFIERVTSRQISVEKRRRLEAIWEKAGESIGCDAVPGLDHEAKVTVEGLKQIREMIKETEDKIEELCKEFPEYQYILTMPGFGPDVSAKVLGAVGDPDRFLNGKQVLKLAGYDLSADRSGKSSDKAVPKISKRGKADLRYALYQAAFIASAKNRDFMLYYRSKIQGRQKEKGIHTKMLVKLSAKLLVIAWTLMKKKEPFNPAYLKAKLN

SEQ ID NO: 119101 - protein, 417 aa, unidentified
MKKHNNSGKKSEPTSKRTKSRGPVQQRDTKEVLAELVGKLKEKLDPTKVAATSAGEKHQRGELRPNLDRLTVGVDLGDQWSHYCILGLEGETLAEGQLRTTQEDLATFFQGLNGARVVVEVGTHSAWVQEVIRGCGHEVLVANPRLMEGSKRRKRKNDRIDANKLARLGRVDPESLYPIQHRSREVRQDLVMLRARDALVAARTEIINTTRGLVKSMGTRLPKCSSRSFAQKGEEAVAVEMREALLPLVRLAATLSADIKEYDKKIETLGQEKYGHTALLRQVKGVGPITALAYVLTLENPQRFVKSRDVGPYLGLVPKQEDSGESQPQLGISKAGDTMVRKLLVGSAQYILGPFGPDTDLRRYGLRLCERGGKNAKKRAAVAVARKLAVLLHRLWVSGEVYEPLHHAKSVPIAAAA

SEQ ID NO: 119102 - protein, 408 aa, unidentified
MGASGEGGHSSLLNRWMERLMSQSNDLSRSLTAFVQGTTLVAVIELSLSSWLIAGVVPGVARQPLKKLAPDAAELLRLLHRWRDEAVRSGATIERIVVAYEAGRDGFWLARWLLAHEIETHVIHSTSVAVSREHRRAKTDRLDTAMLLRVFMGWLRGERGHCGMVAIPTMNEEDAKRPHRERENLVGERTRIINRMKAAMVRLGIRGFKPELRRAPGKLDGLRTPEGLPIPTNTLEELRRDMARLAMVREQIDLIEQARLARIAQAPAAGPNAMVRLLASIVGVGVETADMLVQEVLCRNLRDRRAVARYAGLTGSPDESGAKRREKGLAKAGNARVRRGLIQLAWRFLLFQKDSALAQWYRTRTEGRQGARKTTMIVALARKLLIAMWRMVTTGVIPDGVRMRAIAA

SEQ ID NO: 119103 - protein, 377 aa, unidentified
MKAPSTRPGAVLGLDVGKSSHWACLIDRGGKVLASAPVRNREGALDALFSSAPAGTLVVVDQFRNIGSLAVRRARAAGLEVAYLPGLAASRAAGLFAGEAKTDERDAEVIARTALGVPDSLSGVPGRGEALEAARALSSQRDHVVACATRDKNRLRAVLLESCPALEAAVDLSDRRWLELLAGFGGAGGIARSGAEGPQAEAAGEAAAASTAPPPALIEAENRQVRFLAARISEALDEAGALEAETAGLLEGDETYACLLTVPGIGPRTAAQLAVSVDIARFPDHDHLASYCGIAPRVRSSGTSVRSVRASRRGDARLKSLLIFSCNSLVRSSGRYGEYYRACRARGMGHGRALKAVARKRLRAIYAVMRDRVPYRE

SEQ ID NO: 119104 - protein, 348 aa, unidentified
MKYFIGLDAHSSTSTFAVLDPEGQCVLRKTVDTSEKNLWNVIDSINGERILTFEESTISQWLYISLREKVDHLLVCNPTFVAKKPGAKTDFRDAIHLANELRCGHLREVFHDDSHWVQLRTSVSGYLDIVQEIVRFKNRLKSVFRANGLKTDENDFYKNKDRVKEFKYESARFVSENLFHQVEFLEQEKLKYLEWFKSNQKKYRPIRNLMTIPGISLIRANIATAIICQPARFKNKHNFWGYCMLVRHIQESGGKIYGNKRVHGRRELRDIFIGAAESAMRSDSVLRDYYEALRAKGTSHKDAKVALARKVASLTLNLLKNNDTYNDNYEESLKERKKLRLLVGQKKH

SEQ ID NO: 119105 - protein, 358 aa, unidentified
MLYTGIDLHKRYSVFTTLNQGGDIISKEKVENRPELIRQYFNNLDQDKHKAVIEACFAWGWLADELEHNKISVMLAHPAKTKAIASARIKTDTVDSKTLADLLRSDFLATAHYTPAETRDLQELLRSRARLVFTRSSLKHKVSSILHKHNLNPEWDNLTITDMFGKGGREWMEEKQPLLPPHTRFVFVEMLESIDHLKHQIDEFSQKIKEVVPQNEAATLLSQLPGLGEYSALLIASEIGDITRFKTPELLCSFAGLVPSVYQSGDKPARMGKLKTGNKYIRWVLLQATPKAIAKDHHLAEFYRRICSRKGAKKAKVAAARKMLSQIHYMLTHKLLLYQEPGIPAYFSDLRAKANINP

SEQ ID NO: 119106 - protein, 450 aa, unidentified
MSTRISDSHDERLGREPGPAYQRGWMMESTNEREVWVGLDWGDQEHAVALLTPATGQVARFTVPHTAAGMAQLRERLAAAGVVRGVAIERPRHLVVDELLAAGYTVYPINPKVAKAWREGTGVQASKTDARDAAMLAWGLFQRRAELRALAPDDPQTAELLGLCRDEMKLIDQRTEAVQRLQAALKAYYPEALEWFDDWTRPTAWAFITMFPDPAALRAASRKKLCAFFKTRGLGLRSCWLAKIDGRSGAPAWCGNAVTARVESFFAAALVHQLRALQIALDAYRKRIDSLYQAHPDAAIFTSLPGAGEKLAPRLLVCFGADRSRYDDAGGPQKLSGVVPVEVQSGDKGKAVFRWACRPEFRDTMHLFADCSRRRCAWAQAFYVHARQSGQGHALALRNLGAKWLKIIFRMWQERQPYDEARYLNALIKHGSPLLPRMREAAAKNSAPCG

SEQ ID NO: 119107 - protein, 350 aa, unidentified
MTIVGGLDVHRQQITFDYVDGDGLVHWGQIRPATRTTLRSWLGKHCPDGDAEFALEGCTGWRYVCEELAVAGVVAHLGDPAETAALRGPKKRAKTDRADARLLRTLLVEGRFPESWIPPAHVVEIRTLGRLYCALMDERRAWQQRIHAQLFHQGCPPIRALLSEAGRAELATVELSAVGRQYVDTALRRIDELSAAIEPLRTQLVSFARRQVGCQALQHHYGVGWLCAAIIWAEIGDPRRFASSDQLVRFAGLDVTVYSSDAKRSPGHLSRQGSPELRWAAFEAAKCAARRGSPDHAYYRMLAAKRDGHNGKNPTLAVERKILRRCYHSLRELGDAALTLPVPERQEVAA

SEQ ID NO: 119108 - protein, 420 aa, unidentified
MDGTGREVEQFGATTPELEKLAQWLKHRSVESIAMESTGVYWIPPHEVLERHGFEVVLVSTRQFAQVPGRKKTDRVDCKWIQRLHSCGLLRGSFRPSEQVCMLRTLVRQKATLVEERADWVRRMQKSLDQMNVRVHRAVSDLHGTTGMAILGAIVKGERDPMQLAKLRDPGCRKSVEEIAQQLSGHWREDHLFSLEQSFKMHAAIDERIQAYEAEMQRRLAELERVDCAGKQAPPLKNKNKAKMIRQRGEEPMRQAWYRMSGVDLTAIDAVGVGVVQAVLTEYGPDLSCFPTEKHFISHMTLAPKRAMSGGKPLKKKKRGSASTRVSAALRSAALSLRHSRTALGAYFRHTAQRLGADVAAFATARKLGTLIYRLLRWGHAYVDEGAEAYEQRYQTARIHRLLSTAADLGYELVARPTSS

SEQ ID NO: 119109 - protein, 326 aa, unidentified
MEHELHYIGIDTAKEKLDVDVLRPDGRHRTKKFANTTKGHDELVSWLKGHKIDHAHICIEATGTYMEPVAECLYDAGYIVSVINPALGKAFAQSEGLRNKTDTVDARMLAEFCRQKRPAAWEAPHPLERALRALVVRHHALTDMHTQELNRTETAREVQRPSIDAHLLWLEAELKRLEKQIKDLTDDDPDMKHRRKLLESIPGIGEKTSAVLLAYIGLKDRFAHARQFAAFAGLTPRRYESGSSVRGASRMSKAGHVSLRRALYMPAMVATSKTEWGRAFRDRLAANGKKGKVILGAMMRKLAQVAYGVLKSGVPFNASQHNPVAA

SEQ ID NO: 119110 - protein, 354 aa, unidentified
MSDDKYIAFDVHQATTVTSVLNAAGREVNTSIIATKAQPILSFVEGLRGKLHLTFEEGMYSAWLYDLLAGRVAELVVCDPRHNALLKEGNKTDAGDARKLAELLRAGMLRAVYHGSRSLRSLQELACSYEALVQDTTRVMNRIKAFYRSRGIDCAGRGVYTRKQRASWLERLPAGASRLRGELLHDQLDHLRSLRRKARRALLEESRKHTVAARLGEIPGLGPLRVALLIARVQTPHRFRSRRNFWTYVGLGLVRRGSAEYGLVGGRVVRRARAVNPRGLNPNHRPELKEIFKPAALTAIRRLGPFKDYYDPRAQQGVDPAILRVTVARKLAALTLSLWKKGGHYRAEGLKPQA

SEQ ID NO: 119111 - protein, 348 aa, unidentified
MTLVGCDLHSRKQQVAVLDTRTGELVEQELVHEGDAVERFYRALPPPVTIGIETTGYTQWFHALMHQLGHTVVVGEAAKIRAMVVRKTKTDRRDARHLLDLLQHDRFPGVWIPDPDTRDRRALIAHRVRLVRMRTVVKNGLQAIALNQRLALHSALWTQRGLTQLKALALPPHTTRRRDDSLALLAWLTTRIDQLDAHIATVASADPRVQLLLTHPGVGPLTALTTVLVLGPLARFPDSKHVVSYVGLAPAVNASADKQRLGKITKQGNALLRWVLGQAAPLAARADDELRRRYFSILHRRGRPKAKVALARKLLVRLYIMLRDQIDYEEFRRRGRAPRRLQLPVAVM

SEQ ID NO: 119112 - protein, 405 aa, unidentified
MYYVGVDIAKDKHYVCILDESKELACKPFWIYSDILGLRELLKRLADLSLDNDDFIIGIESTGAFSENFYSYITDADYKVVLLNSYQTAKYRDFSTLKKIKNDSIDAYVIAELIASGKYKASYISNEEYHNLKVLNRLKKSLDDKIKTIKREISTVVATVNPEIEKVFPNIFTKTAIVIIKAYPTALDISRATPEKLTKLFRHIKGNNFSDEKAKYLIDLAKSSIYTGRANESRALMIKTNIKILELYIQEKDEIEKQIHDLINNQLDNDSTNIDNLKSIPGVADKTIAAILGECGDLRRFESAKAFIGFLGLYPTLYQSGKSSSTGTLAKRGIPIAKHALYLAAVSSVRHNSELHKLFRDKVSSGKSKKEALIIVAKKLASIIYSLFKYNQEYNPSRVLIQHKR

SEQ ID NO: 119113 - protein, 371 aa, unidentified
MKKDSTTKFIGLDVHSKTISVAIADEGREGEVRHYGTIENTFEAIDKVIKKLTATGVELKFIYEAGPCGFALYRYLTGNGFTCIVISPAMIPRRKNVRIKNDRRDAMTLARLYRAGELSGIYVPEPEDEAIRDLARTRDDARVAERKAKQRLNSFLLRQNLIYPGKTKWNRTYFNWLGSVGMKYPAQKIALQEYIETVNECTGRVARLSEQIGLAVEEWRMAPMVKALQALRGVSLICATVTVAELGDLSRFQNPKELMAYLGLVPSEHSSGETIRRGGITKTGNGHARRVLVEGAWTYKHHARITSPLIKRQRDLPKSICQISWKAQLRLCARYRKMVARKKPNNVVVIAIARELAAFMWAIAQEVRAAA

SEQ ID NO: 119114 - protein, 375 aa, unidentified
METTRQALMNDTSVVRILYMALELSGDKWKVAIADGQRAPSQRSIAAGDTSELLQVVEKAKTRCRLPGVVRVLSCYEAGRDGFWLHRWLLEQGIENVVVDSSSIEVNRRARRAKSDRLDAAKLYEMRIRHSVGEKRLWRVVRVPSVQQEDERRVHRELERLKRERNAHINRMRSLAVLHNVRLGKVGGRGWSERLPQLKEQLPAGLWAEIERERVREQLVYQQMHTLEKSRQEQVKHMSQGPLVALLKLRGIGLTSAWLLTRELFGWRGFGNRRQLAGCAGLNPSPYDSGDCQREQGISKAGNRRVRALLVELAWYWLRYQARSALSAWFTRRFAAGGKRMRRIGIVALARRLLIALWRYVEHGVIPEGAQLKSA

SEQ ID NO: 119115 - protein, 395 aa, unidentified
MEILKYGLGIDMAMEKFDACISIINRLQQVMIRAQCSFTNNKRGFETFIVWVTKNTKLAIPAVYLMEATGIYYEQLAWFLHNKNCSVSVVLPNKAKKYKEALGLKSKNDRIDAKGLAQMACEQNNTTWKPLSSNIYFLRLVTRQIQSIAEQSTVLKNQLHSLQHGMYRDKAIEKMYTRQLDLLQKNKKSLELRVEQIVECDEILKKKFNNIGKIKGLGLQNLAVIVAETNGFTAFENIAQLVSYAGYDVVENQSGKRSGKTKISKKGNHRIRRCLHFPAFNMIKYEVPPFKNLYERVYAKNKIKMKAYTAVQKKLLEFIHILWKKDEAFDPNYQDKKSRDAEPVPSFASVPKEPPIARGAEEKKLKFIRQKITPAITRVTQDKHPSKCRRMPSFA

SEQ ID NO: 119116 - protein, 342 aa, unidentified
MKIIGCDFHPSFQQIAMVDSESGEHTEKKLTPAEALQFYSQLQGPVLVGMEACGNTLWLERLLAQLGHELWLGDAGKIRALEVRKQKTDRRDAELLLQLLLEKRFPRIWVPSPEQRDLRQLLLHRHKLVGMRRQVKNQLQHLALNQGVQQKHKLWTAAGRKLLEGLALTGWTAQRREELLAMLDDLEPRIGKLDQAVREAAEKDRVAQRLQTHPGVGPITALAYSLTLGEIGRFQHSRQVVSYLGLNPAEHSSGGRQRLGSISKQGNPMLRSLLVEAGQSAARLVPELKRAYQRLKHRKHSSVAKVMVARKLAVRLYWMWRNEQPNSATRMRGSPSHPVAEV

SEQ ID NO: 119117 - protein, 430 aa, unidentified
MKSNTQNAKIEAITEKTLVLGIDVGSETHYARAFDHRGIEYSKKPFKFSNTEAGFVTFKEWILDLKEKHEKDKVVPGMEPTGHYWFNLGKFLQDNEMKPVLVNPHHVKKSKELDDNNPTKNDRKDPKVIAGLVREGRYMIPYLPDGVYADLRTASNIRFQLQAELTRIQNRISRWFNIYFPEYKTVYGKPDAKSGMLILKQAPLPEDILTLGIDGVNQIWRDAKMRAVGKARAKTLIEAAEHSVGSKEGAVSARMEIRMLLEDYESRNIRLQEVMTLIEELVNQIPMAEKLLGIKGVGIKTVSGFLAEVGDISRFNNPKELQKLAGLALVENSSGKHKGKTTISRRGRKRLRYLLFEVAMSLVAKNPEFRELHTYYTTRRLNPLKKMQSLMAVAAKLIRVFYAMLTKGVDYDPKKMVGDIRRPVVYLPAA

SEQ ID NO: 119118 - protein, 313 aa, unidentified
MKKTICGVDVSKAKLDACIEPGHRLASFNNDTAGIAELAAFCREHAVTLVVMEASGGYERRAFIELWEQGISCALTNPRNVRRYAEAMGILEKTDRIDSSIIARFADAKNLAPTPLPSQAQQRLKALVARLRQVTGDLTVQKQRRASLLDNSEMLASLDEVIALLKRQSRSLEGEIASMIDDDPLWAKLAETWREMKGVAGRTVARLHAELPEIGTLSNKAIAKLAGLAPIANDSGKRKGKRTTRGGRAGVRSILFLVAAIAARYDKSLGEFRDRLLKAGKEKMVVRIALARKLLVRLNAKARDARTEYANAT

SEQ ID NO: 119119 - protein, 343 aa, unidentified
MTIKVLGIDIAKNTFQLHGADDAGKAVLKKRLPRNRLSPYVANLHPCTIVMESCGGANYWARVFQRSGHTVKLISPQFVKPFVKTNKNDANDAEAIVEAASRPSMHFVPIKRPEQQDIQSLHRVRSRLVKNRTALINEIRGLCLEYGVIVAPGAARVKQSLCATVADSGNGLTPSSRDCMQDLYEELVDVEARLKKLDARNRQLCRQNDSCRRLLSIPGVGALTATAIVAAVADAQEFKNGRHMSAWLGLVPRQSSSGDKRVLLGISKRGDRYLRTLLIHGARAALSHYKTTDNDYGLWLDRKKTTLSFNKAAVALANKNARIIWSLLNSGEEFNYGVQTAAA

SEQ ID NO: 119120 - protein, 338 aa, unidentified
MVLIGIDPHKATHTAVAVDPDETALAELTVKADCHQVERLLKWAIDFPERRWAVESANGLGFLLAQQLVAAGEDVVDVPPTLAARVRVLGSGKTQKNDPNDALSTAIAAMRAKRLRSVVAENHGGVLRLLVDHHHDLGSLRTQAVCRLHALVRCLVPGGTALRLSASRAGVVLRGVRPTNAVDVERKRMALGHVADIRRLDAEIAASKARIVTAVAASGTTVTELYGVGPVVAAFLIGHSGDMARFANRDHYASYNATAPIEASSGPRVRHRLNPRGNRRLNHAIHVIAICQIRHPTEGRKYFDRKVAEGKTTKEALRALKRQISNVVYRQLVIDSVR

SEQ ID NO: 119121 - protein, 357 aa, unidentified
MKSKIKQLDFTGETIFTALDVHKKNWCITIGSKEFELEHYTQNPNAKELARHLKKNYPGAKYIVAYEAGFCGFGIQRSLKEEGIDCIVVNAADIPTSNKEKRRKQDKIDSRKIYKRLAAGDLEGIYVPQTEMEHARSLVRERSRIVSDQTRCKNRIWSLLMFSSLSVDTDKPKQYWSRKFVESLKQLDCGSKPLRGALDLAIEEYILIRQLLATATKKVRELSNDKLFAEIQQFLRSIPGIGLINAMVIHTEIQFICRFKTLDHLCSYAGIVPDSDSSGDKERITGITHRSNNYLREAIIESSWVIVRKDPAMLMLYKRYCARMDENKAIIKIARHLLNRIRYVWEKQTEYEIGIAA

SEQ ID NO: 119122 - protein, 419 aa, unidentified
MHQPDLLLVGVDVSKAKHSACLGTQTTVSCRKLEFTHTREGFRRFEQTLRVHLVKNTCQRMLIAMEPSGIYWQALYERLKSCGYGVCLVHCQAVCNKRKTMQDGTSKTDEKDAYSIFDLLHQGKFFLPVDRDPELQAAYRLMRRHMALKKRVSQLRNHLRAAIHLTFPELNPLVRDLTQPTALRFLRVNPTPTSILRNGQRHFLETWQPRSRCGQWRPEKFQQLYDLAQHSIGLSDPYGIDEFEITALAHDLADALAKQQLWLDKAIALLAPRTDFQVLMPLPRIGQPTAAAILTAIGDLSTYTNGKHLVKLAGLDIRLFESGSSIRKLPKISHVGSAYLSYWLYHYALRLVAHEPHFTAYYQRRKHQSPGKGAGQRALIAVCDKTICMIYRILTDYEPYDPKKGQSIAASYAAQQKAA

SEQ ID NO: 119123 - protein, 339 aa, unidentified
METFVGIDLHKRVSQLATLREPKPASQLRFPNNRATVEKVLKKLPQSSKIALEATGSWWWFVDLAQKSGHEVIMSHPKQTKAIASARLKSDKVDALMLAKLLKSDLLPTVWIPPAKQRYIRELLTHRARLVRQRTAVINEVHALYSKRNMDPGMTFHRVRPPAFKVEDLSGYGPRIVEEDAELLAFFNRQLRGLDSELKKIAQEDEESKRLMTIPGVGPLSAVAANCWIGTIDRFSKAKKLSSYFGLAPRVRQSADRERHGHITKEGNRMVRSLMIQAALWHVRIGKGDPRKHYLGVLKRRGKHIARVAAANKLLGIIFHMMKDRIDYQEFLKRGGNAQ

SEQ ID NO: 119124 - protein, 451 aa, unidentified
MDYAKKHHLVMFCNGYGDIVRKPFPIKNSPEGVDYLVDQVKRACAHRSIKLSHVFFGGEDISSYSENFVHALRSQGWIVGSVNAHEAKKQRENLQASTDRLDLMGIAAMLLNRRANTHPAQSGLYRNLRNIVRHRKKLVKMKTEVKNRIHTVIDQLFPGFLDETKSGIPPFSRSSLYLMSERFSTRQISRRRLQPLSKALNRFGTKHPDQAAVKLKRYALKAFAAPEPYMDTLQVSLSCHTKHLTCVYECIQQLEKEIAIILSQTQGAFLTSIQGIGIILAAGICSEIGDPFIQGNAANLASYAGVVPRVKQSGGPESEPRVGSVSKKNNHILKDYLLQASNHMGLHGPEDLKKDFQRRRIHGQNAEFGIARRLMRIAISMMRTWQFYIPCYLRSNHTDKKDRARYYQSIWPYVTEKWRRARVLEKAFEIDQPMGQWRDIVQKIYKIKLDL

SEQ ID NO: 119125 - protein, 418 aa, unidentified
MKDIKPEKGKKINRKTLIVAFDIAQEKHMVYIRCPDGREEKPFVVFNRREEYEQMWERISQTREAYGVEEVVVGFESTGPYAEPLVHYLMKKEVKLVQVNPMHTKRVKELRGNSPNKTDEKDTEVIADIIELGNYLTVVIPEGISAELRRLTQARERAVGRRTMLVNQVHGLVSVIFPEFLTVMKDIKTKTAHYVLKHCPRPQDIVGLGYERLVETLKKISRGRLGKERAEVLYEAAVNTVGVREGQGSIVFEIKQLMAGIEETGRLIDEIEEKMREYLKEIPYSRCMLSIQGVGEVTVGGLIGEVGDFTKYKTIAEITKLAGLDLFEVSSGKHKGERHISKRGRPLMRKLLFYAAINVVRKGRIMHERYERYLQRGMPKIKALTAIARKLLGVLFALVRDQSEYVRNYEGIPLKKVA

SEQ ID NO: 119126 - protein, 373 aa, unidentified
MSSGKKFIGLDVHKDTIAIAIAEADTKEVRFFGTICGTTEALHAALKKIGRDRSELCVCYESGPTGFVLYRFLVKLGIECLVISPSSMPRRPNDRVKTDRRDAETLARLLRAGELVGVWVPDEAHEAIRDVVRAHRQAKQDLTSAKTCLKSFLLRHDRRYPGKTGWGTMHWRWLADQTFPYPHQQFVYEEYKRRIRELEERCKRLEQVLVEAMQEWQLAPVVEALQALRGIRLIAAATLVSEIGDLHRFESPKQLMSWVGLVPAEYSSGQRIRRGEITRAGNAAARSMLIESAWHYRFPARESRALMERGNFVAEDIRAIAWKAQVRLCGKYRQLANAGKKTVKIVTAVARELVGFIWDIARHTQLMTVGAQD

SEQ ID NO: 119127 - protein, 384 aa, unidentified
MDKSITLHVGLDVHKDSIDIATAELGRDGEVRHVGSIGGDLASLDKALRKLIAKGHRLHVVYEAGPCGFVIWRHLNALGHSCDVVAPSSIPKRSGERIKTDRRDAMNLARLDRSGDLTAVRVPGATDEAVRDLVRAREDGVRECRNARHRLKALLLRNGIAYTGKSSWTAAHLRWLATLKMEHAAQQIGFQEYLHSITEATHRIERLEQAMRDTLPDWSLKPLVQALMALRGVQLIAAMTLVAELQDFMRFASPRKLMAFVGLVPGEHSSGPKRRQGSITKAGNSAARRMLVEIAWHYQHSPRVSPVIATRHDHLPQAVTDIAWAAQLRLHAKFKRLLARRVMKNKCVVAVARELAGFVWAIGCEVQTSGWQGVPLESAAIVAA

SEQ ID NO: 119128 - protein, 405 aa, unidentified
MNAVGIDVSKGKSTVTIRQPGDVVVLAPRDYRHTKSSINDLISTIKCLDGETKVCMEHTGRYYEPMASWLSAAGIFVSAVNPWLIKDFGNESIRTPKTDKADAKKIARFALDRWAKLPQYSRMDELRNQLKTMNRQFGFYMDQKTAMKNNLIALLDQTFPGANSFFDSPARSDGSQKWVDFVYTYWHVDCVRSKSLEAFTEHYKNWCKRKGYNFSAGKAEEIYLAAADLIAVFPKDDYTKLLIRQAVAMLNVAAETVETLRIKMDQTASLLPEYPAVMAMEGVGTTLGPQLMAEIGDITRFKHKGALTAFAGVDPRPDESGDYKRKSNPTTKKGSPHLRKTLFQIMDGLIKRSPIDDPVYAFMDKKRAQGKPYYVYMTAGANKFLRIYYGKVNAYLSGSNEVEKT

SEQ ID NO: 119129 - protein, 362 aa, unidentified
MTDAVLGIDVSKNTFDTNLGAGTKARSKSFANSPAGWHHLIAWLGEHKIGQVHACLEATGRHGLGIALALHEAGHVVSIVNPAQIRDFARTKLGRNKTDQVDAVHIREYAELFKPRPWTPPSPAMRRLCELQTIRAGTVAGLTEWKNRRRSGIMDDLALSLAKTTIQHFTSQLEAVDQAIAETIDNDVELSAKRDLLVSVNGVGEALAGIVLAELPGPDILGSSAAVTAYAGLNPQQHQSGISVNRPVRISKIGNAVLRTALYMPALSAMRYNPAVAALVDRLKAQGRLKGKQIVIAAMRKLLVLCFGVLKTGKEFDPAMAMGKWPGVPRHSLASIAWSAQVGAGGGGQAPQPVGARISARA

SEQ ID NO: 119130 - protein, 341 aa, unidentified
MNQVSTVGLDLAKHLFQLHGADSAGAVVFRKRLRRGQLLAFLATLPLCTVAMEACGSAHYWGREIAKLGHTVKLIAPAYVKPFVKRQKNDMADAEAICEAAQRPTMRFVALKSANQQAAAVVFRTRDLLVRQRTQAINALRGHLAEFGVIASKGLVHTSKLIAALEDPASDLPQAARGILAVLVEELRSLDERVAVLDREIARHAKENAVARRLMTVPGIGAVTAAALTALAPPADTFRRGRDFAAWLGLTPVQRSSGGKERLGKTSKMGERSLRRLLIIGASAVARWAARKGVPAGSWLGRMLARKPPMLVRVALANKMARIVWALLAKGGVYRAPVAAV

SEQ ID NO: 119131 - protein, 322 aa, unidentified
MSKYKEIFGVDISKDVFDVYGSQSGHDQFKNDVFGFKSFLKSLPKESLVIMEATGYYHYRLAQFLFKKSVFVSVVNPLSVKRFIQMKLAKVKTDKSDAKAICQYGKINEVPLYTALTNVQSECLQLFRLMDSFLKKRTATKNKLHGEEVLGVPSKWVYRSLKRDRKHLDKELLGIEKKLLSLVKQDQQVQLTLLTSIPGIGLKTALFMIVLTDGFDKFETAKQLCSYVGITPIIRESGSSVRGRSRISKVGNRKLRNLLFLCSFTACKHNKGCRDTYERIVNKGKSKKLALIAVSNKLIKQSFAIAKSGLPYDEKHVSVLPK

SEQ ID NO: 119132 - protein, 334 aa, unidentified
MDKITTVGIDLAKRVFALHGVDASGRVVLRKTVRREQFVETVAKLPPCLVGMEACSGSHEWARRFQGFGHTVRLMAPVFVAPYRKSGKNDGNDAEAICEAVSRPNMRFVPVKSAEQQALLALHRVRQGFIEERTALINRLRAVLTEFGVVLPNRTQWVRRDAVAVAEPLPVLARQAVEDLRAHLVGLDERIGAYDRQLEQQARQSEAAKRLMKIRGIGPLTAVAIVATVGSARDFASGRQFAAWLGLVPRQNSSGGKSRLGHISRRGDAYLRMLLVQGARSVLNTAARHTDRLSLWALSLQARRGMHKALVGIAAKNARIAWALLSKDQTLRTV

SEQ ID NO: 119133 - protein, 344 aa, unidentified
MQITTIGLDLAKHVFQVHGIDAAGQAVVRKSLRRAQILPFFAKLPPCLVGIEACGTSHHWARELMKLGHEVRLMPPAYVKPYVKRGKTDAADAEAVCEAVTRPTMRFVPVKSPEQQAALSTHRTRDLLVKQRTQLINMIRGLLAEFGVDIPKGLERALLMARQIVDGKAPEVPIEAAKIVTTMSQQALDIHVRLREIDRDLAVCLRGNDVARRLMTIPGIGPVGATALAASVTDPRQFRSGRQFAAWLGLTPLQKSSGGKERLGRISKMGDKYLRKLLIVGMTSLVRRAKYTPGKMDPRLADLLARKPTRVATVAMANKTARIIWAIMARGETYRTSHQPALAA

SEQ ID NO: 119134 - protein, 388 aa, unidentified
MDMIDAVSNAPIQTTISAIFFSMELSRSQWLITSLSPGGGERMSKHVMPAGDVGGLLEQLDAIRSKAEAKTGRVFPFVSIQEAGLDGFWIHRVLDREGIESHVVDPASIATSRRRRRAKTDRLDGETLLRTLLAFKRGDPRVCSMVVVPTPEEEDRRRNSRERKALVHERVSLVNRLKGLLFSQGVTGYEPLKSDRRERFAELVTGDGRPIGEHLRAAVERILDRIELILAQLKTIERVRDSLVAQQPAADQSPACPAQLMTLRGVGPDFAEVLWSEGLYRHFDNRRQLASYAGLSPSPWQSGSINSEQGISKAGNPRLRSIMVQLSWFWLLHQPDSALSRWFHDRVKLDGGRRKKLTIVALARKLLIALWKFARHGVVIEGAVFKSA

SEQ ID NO: 119135 - protein, 340 aa, unidentified
MSAANRLTTSPSAPDAAVEPPPYIGIDVAKDKLDVSRSEAADAVVDTFANDAPGIVQIVGRMLAARPAMIVIESTGGLERPLLEALLDDGLPVALVHPGRVRYFAKGLGVLAKTDRIDARVLARFGKLAAPRLREKRSKTEAELRDLVACRRQLVTTRTQQSNRRGATVSRAARKSIDAVLATLDKQIASLDKQIRALIDADDDFKHLDKLLRSVPGVGPTLAATLAAELPEIGQADRQRVCALVGVAPFADDSGTTRGKRSIRGGRASVRNVLYMATLAAIRCNPVIKVFAQRLEVNGKLKKVGIVACIRKLVSLLNAMIRDGLTWQELNVVKKLANNH

SEQ ID NO: 119136 - protein, 405 aa, unidentified
MDIQPLFTGAVGMDIHLMVIHVCVIQQTPEGEPAVHRRQFGTFKHDLRAMAEWIAGFSPDIVVMESTGIYWKSPYSYLERIGLRAWVVNAQHVKQVPGRKTDTSDAEWLAMLARAGLLRGSFIPPEPLRNLRQISRYHQRTTGLLAQEKNRLAKVLSDAGIRLSGVVSDLHGVAARAMIDCLLDGGTPEQALCHAGRLKAPKEQLLASLQGELSDDHLFVARMIRQHMDVLETQLADLEQRLLQGLKPQEAALQWLVTIPGMDRVAAARLLVEIGDDMTAFGRANRLAKWAGLCPGNHESAGQRKRGTTTPGNRYVRTVLCEIAWAATRTTSQFKSRFQGLVIRRGTKKAIVAIGHKLLKTVFVLLSRQVPYHDSSVDYAALTVKRNAPRWIRALKQFGYLPQPA

SEQ ID NO: 119137 - protein, 361 aa, unidentified
MFTRKALSSWWRREYGRIANTAAALDRLMRKLSGEGVGLRFCYEAGPCGYGIQRHLSAHGHECMVVAPSLIPKRAGDRVKTDRRDAASLARLHRAGELTAVWVPDAGHEAMRDLVRARLDAVHALRRARQQLSGFLLRQGCHYRRPAWTKLHRPHGSSPWAEGSRLAGLKFAQAVHHIVLEDYIAAVEAAEARRNRLTAQIEAMLPDWTLAPVVAALQTMRGMALVNAAALIAELGDLSRFANPRQLMAYLGLVPSEHSSGASVKRGGLTKAGNSAARRLLIEAAWCYRFPARVSRELLLRQEEQPKPIREIAWKAQLRLCARYRKLARTGKPANVVTAAIARELAGFIWAIARRVPPTAG

SEQ ID NO: 119138 - protein, 444 aa, unidentified
MQRARKRYVGLDVHKDVVEYCILDAAGKKIDGGRIMCEQSVLLRFATTTLSSKDHVALESTTNTWSVVDIIEPHVAKVVVGNPMKTKAIAEAKVKTDKIDAMILAQLLRCDFLPTVWIPDAKTRVLRRLSSFRKSLVQDSTAAKNRIKGILNHLLIKHAVVWSEDGLDELKQLDIPAHERTIMECEIAVLEHLGTQIKKVESEIKKLAYEEENVRILMTLPGVDYNTATAIVAAFGDVSRFKDADHAASYLGLVPRTKQSANSCHHGSITKAGSSLARSLLCEAAQHLSRNEGPLGVFVRRLLQKKTWNKAIVAGARKLATIAYHMLKNKEPYRYATVARTQEKLRCLRKSVTGKSLERPRYCYDEQLTEHIKNRNDVLVRFVPPLSDVYEKEGLPQTRSFDELSVGEQRAIKEMGLAEQVRKTETVQVVIKPKKRTDKPLCKG

SEQ ID NO: 119139 - protein, 386 aa, unidentified
MHQATTLPAPQRTCSRGDCATLFVSLELSRSTWVATALAPGSNKMSKYTLVGGDGHKLLDLLARLKSRAEQRIAAPVKVVTIHEVGLDGFWIHRLLEANGVESHVVDPASIAVPRRHRRAKTDTIDGETLLRTLMAWQRGEPRVCAMTVPPSPSEEDRRRISRERAKLLQERVRHTNRIRGLLFGQGITNYNPLHKNRWECLEELRTGDGRSLPTHVKAEILREIDRLELVLRQISEVEAERDEMLQLAQPSSPAALLMRLKGIGAEFATVLYLEGLFRRFDNRRQLAAYAGLTPSPWKSGSIDQEQGISKAGNPRLRTTMVELAWMWVRYQPASALSCWFRQRVGSKRGRIRRISIVALARKLLIALARYLSHGEIPAGAVMTAG

SEQ ID NO: 119140 - protein, 376 aa, unidentified
MTCKECGQVVKLTRTMNKCHSNTELSSLEETRCQFNGGTGAIKLGIDVHQDFYVVVEQAGGSNPKPPQRFPKAAFLHWAAKLKSQATEVYAVYEACGFGFSLQRKLSALSIKCYVVCPQKLDEQNRRVKTDGLDAKALCLKLDRFVQGNRDALAIVRVPSEEEEQARAIHRQREQLVKARKQLEAQGRSLMVNHGLEPVPNWWKPRTFTALPAPQWMKELLANSQPILVALQQKIVALTVQLQSAASPEQPRGLGKMTSVIIDREIGDWNRFSNRRQIASYTGLCPGEYSSGNTRLQSCVTKHGNPRLRAALVELAWRLVRFQPNYKPIVKWRATLAKGGLATGAARKRRSWPWRASWPSICGVFAPAASTPPHWD

SEQ ID NO: 119141 - protein, 343 aa, unidentified
MTKLYGGIDLHANNSVIVLIDEQEQVVFQTRTPNDVSQILLHLHPFQPRIHGLVVESTYNWYWLVDGVMEAGYSVHLANTAAIRQYEGLKHTNDHSDARWLAQLLRLGILPTGYIYPKEDRAIRDLLRKRSQLVRQKTSNLLSIQNLVTRNTGTSLSGNRIKTLSAEAIRDVLPTPDLALAVTSTLTVMHCVADQIAAIEHTIKARVALRPAFRQLLTVARIGQILALTIMLEAGDMRRFPTVGQWASYCRCVNSTKLSNGKRKGQGNTKNGNKYLGWAFVEAANFAVRYYPEVQRFYQRKKSKTQGVVALKAVAHKLARACYYVLRDEVPFDITKAFVPQPA

SEQ ID NO: 119142 - protein, 344 aa, unidentified
MIVKQVLGIDVAQKELVVCLGRMYNDWTPELYGHKTFANTAKGFEAMTLWVKNQTEDGVAIRYVMEATGVYHEALASFLEEKGYEVSVVLPNKISNYFRTLELKTITDKTASEAIARFGLERKLDCWKRPKAIFNELKQLTRERDQIVEQRTMDKNQLHAEQTQAQPNKKSVERVKARIKLLNKQESDIKREITLLIKQEEKVAQSVDLICSIPGVGLLTAVTVLAETNGFELIRNRRQLTSYAGLDVREKQSGTSVKGKPRISKKGNKHLRKAMHLPALAAIRHEDRFKTIFVRLVAKHGIKMKAAVAIQRKLLEMIFILYKTNTAYNKNYLKEENEERKKAA

SEQ ID NO: 119143 - protein, 428 aa, unidentified
MSILNSLFVGVDVSKNTNQICACNFNSDYFFNQNFDNSVFETETVINMINDVMLQNKLTHIIIALESTSVYFFHIANAFSSSDILNKFHLEVYAINAKVIHNYSKSFVSHSKNDPKDAKLIADFARVGRCKDHKPWRGAQLVALQRDTRHRYHLAQQLTREKNYALNNIFLKFNKLENKNGPGDEVNPFSDIFGATSTSVLLYFLSPEDIVQMPLEDLVEYVNTKGKRRFSNPENTAKLLKQCALDSYRLDRVSYDAINIALASSLRMISMLKRELKDIEKQITSFVKALDNNAYLSLTSIPGVGPVSAAGIIAEIGSIDAFSSNDKLAKFAGLTWTDNSSGKIVSENNELTRTGNKYLRYYITQAANSCRKHDSIYSNYYSKKFNESLTHKHKRALALTSRKFVKLIYCLLRNNQLYSIKRDNDQHK

SEQ ID NO: 119144 - protein, 315 aa, unidentified
MDQHTPTFAGIDVSKANLDVYLHPEGSHRQFKNHKTGWRALRGWLNAAHPDGVVYEATGTYHKGVERYLGKHGFPIARLDPRRARKFAQALGISAKTDPIDACGLAQFGAFLKPPTLSLPEPALEQLKELVAARRGLMQQRTRIINKSKTASVPLLKRQLRLSKQQIARQIVQIDTACHEIVNSEPTLAQRLIILKSIPAIGDVTAMTLLAEMPELGELNDKQAASLLGVAPMARDSGAWQGKRFIRGGRATVRRAVYMAALSAMRFNADMKRKYDALVTAGKPPKLALTAIMRKLIILANALIRDNRQWSEVRP

SEQ ID NO: 119145 - protein, 341 aa, unidentified
MQITTIGLDIAKHVFQVHGIDAEEAVVVRRQLRRGQVLRFFEELSPCLVGLEACATSHYWARELSKLGHEVRLMPAKDVKAYVKRNKNDAADAEAICEAVRRPTMRFVQVKSAEQQAHLMQHRARDLLMQQRTQLINAMRSHLAELGIIAPQGREGVKELLAIVAKDANTHLPDDARASLVVLAAQLHALQTTIGAIEKRIVVQHRANKESKRLQTIPGIGPIGASAIAATVTNPRIFRSGRDFAAWIGLVPRQMSTGGKAKLGPVSKQGDRYLRRLLVVGAVSTLRRAKLNPQRYPWVTRLLARRPFKVVAVALANKMARIAWALLMSGKTCRSARFAAA

SEQ ID NO: 119146 - protein, 365 aa, unidentified
MQKISTMQTSGKNIFEGQLTIGLDLGDRSSAYCVLNEAGEIVLEHKLATTPEAMKQVFGSMPRCRIAMETGTHSPWVSRLLTALGHEVIVGHAQKVRLITKSRRKDDRLDARTLARLARIDPELLSPVKHRSAQAQLHLAEIRARAVLVSARTALVNAVRGLVKSYGERLRKCGTEQFRRETTNGLSAGLQQALEPLLREVESLNERIQEYDRRIEKMAKQTYPETALLKQVKGVGDLIATAYVLTIEDPHRFRKSRDAGCFVGLQPGRRNSGESEPQMRISKEGDEYLRTLLVQGAHYILGPFGEDSDLRRWGQKLSARGGKNAKKRAVVAVARKLAVLLHRLWVSGEVYEPLRNSQKVMSAAA

SEQ ID NO: 119147 - protein, 424 aa, unidentified
MMAQRGNSRGSTEFTEGGLKLAKYHVGVDISKHKHKACIRNLAQDSYSGVFSFEVNHQGFEKFLGTLEKFSSNKDDFLIGIEATGNYGVTLTYFLLSHGYKVVEINPYRANQFRKAQGKKAKTDSIDARSLAALLSLENLKPLSIPDPVLDNLRELTRFRSDMVRDHTSLVNQLHETLSTLFPEFATVFSQLNSTTSLALLISYPGPEYISRAGEAKIGETLSNASRGRIGKVVAKALVEAAQSSIGVLQRQPALATKVSILGERLVALTAAIERVEKEIADLFRKLPYNPEDFPVGDIPSLATLVSEIEDIHRFSTLKQFLSHFGWCPKSFQTGSYNREHPRMSHAGNKYVRRIIWMLSIVSIRTVPRYRAYFRQRVKEGKAKMHIIVAVGRKLLSVFYAILKKGIPYDPNWEVNRHFAMARH

SEQ ID NO: 119148 - protein, 345 aa, unidentified
MGEVITIGLDIAKSVFQVHGVDEAGAVVLRRRISRAKMLEFFASLQPCLVGIEACPAAHHWGRELQALGHTVKLMPPAYVKAYVKRSKNDANDAAAICEAVTRPSMRFVAIKTKDQQAALMLHRARQLLVRQRTMLSNAIRGHLAELGIVSAKGRQGTGTLLEIIADAGDRRVPPAARGVLDVLARQYRALGAELGSIDRSLLAWHRSCEASQRLEEIPGVGPVVATALVAEIGDGWKAFRSGRNLAAWIGLVPKQQSTGGKERLGGITKQGNRYLRWLLVAGAMAVIRYAQKRGTGKRPWLGRLMARRPTRVAAVALANKIARMAWAIIVRGERYREPVLLAAA

SEQ ID NO: 119149 - protein, 385 aa, unidentified
MPQSKDDLSRSLLAFDQNSSLCAVIELSLDKWLVGAIVPGLARDPLKKLIPDPEALLKLLHRWRDEAVKAGRKIRRIIVAFEAGRDGFWLARWLCARGIEAYVIHPASVPVSREQRRAKTDRLDIGLLQRCLMGWLRGEKKHCSMAAIPSLEEEDAKRPHREHEQLVNKRTSSVNRMKATLVRLGIRGFNPKLRKAPQQLERLRTPEGCPIPPNNMAELQREMAHFCFISDQIKQIEEARLAQLKQEPQRGLNAKVWQLQQVKGLGLDTSDMLVNEVFWRDLRDQRAASRYVGLTGSPDESGRRRREKGLAKAGNRRARHGMIQLAWRFLTHRKDSALAVWFRTRVAQGKPRKTMIVALARKLLIALWRLVTTGEIPQGVVLYGA

SEQ ID NO: 119150 - protein, 324 aa, unidentified
MPSTTYVGIDVAKATLQVHLNGHQIEFNNNSKGHAKLTKKLAQLTRPHVICEATGGYERPVVAVFHQDKILVSVLNPAHTLAAAKAQGMRAKSDCCDAEALTDYGQRYQPEPTVPVPQELREMTELALWLQQLIDQRAVAKTQAEHHDNAFVRHQHQELLAHYDEQIKTVEKEIKKRIQSQPEFQQRLDCLVEIQGVGFRTALMMLVLMPELGQMNRGGAAALAGLAPWTRDSGTMKGKRCIGGGRAQVRPVLYMSALCASRCNPVLAPFYAALKQRNKPSKLALTALMRKLVIYMNHKLKALATMPPAQETKNATKPKKVLAN

SEQ ID NO: 119151 - protein, 366 aa, unidentified
MNASTVAVDLAKSVFQLAVADQSGRVVETHRLTRAQFSRWFDNRSVGLVVMEACGSAHHWARTLIARGIAVKLLPAAYVRAYVRRNKTDAADAAALLEAARCGDMHPVPVKSVEQQALQGLHRIRSLWMSNRTSRINTLRGLCREFGFAVSVGSRLGVEQISRVLAEPKSPIPELIRSSMSLLVEEIRLLESRVAGVERELSALAKRSAACVQLMSIPGVGLLTATAMVAATSGKVTHFKDARHFASWFGLTPREFSSGNSRHLGGISKRGDRYLRMLMTHGARSVLRAATVAQNQGTTISGIRQWSLAVQRRSNHNKATCALANKIARICYATLRDGEAYRDLSADDRRQRPAKKLDRESFEMPH

SEQ ID NO: 119152 - protein, 320 aa, unidentified
MAKKKSKSFIGIDVSKQQLEVAAHESDYQFRCPNKASAFGELIAELISLRPALIVLEATGGLEIPVVSALHAAGLPVVVVNPRQVRDFAKALGQLAKTDRLDARVLAHFAAAIKPPLRPIKSKEEQELDALIGRRGQLIEMLIDEKNRRGSAASDTVRDEIKEHIDWLEERIAELDEQLKTLLNSSALWQAKDEILQSVPGIGPVVSFSMIADLPELGTLNRQQISKLVGVAPLNRDSGQQRGTRHIYGGRARLRSVLYMAALTASRHNAVIKEFYERLRANQKPFKVAITACMRKLLAIINVMVRDSTCWKTKDEPVSA

SEQ ID NO: 119153 - protein, 394 aa, unidentified
MILVGIDIGKKQHIFSIIDKQTGEILSNPSVFHNNQDGFLLLIGKLSCYAKSKLLIGMEDTGHYHFALLKYLLDRHYTVALINPTTTDLTRKLQGGITKNDPLDSLTICDVISSNQRKKPYRITKVNRFDLYEQKQLTRHHHNLKEELNIYKNRLQKCIDIVFPEFNSLFRSKYGIVYMNILKTFASAEKIANSDIRTIRKCFEYEGRGKRIQLSAEQLKTTAKASVGIPSVAEEIQIRHLVCQIEMIEEQLSEIDKKIEEFSLQNNSPILSIPGISHFSGTSILAELGDICNYTKASQIIKFAGVAPYHYESSQFLARHTAITKKGSRYLRKTLYQIILPVINHNRVFTAYYNKKLAEGKGHRCAQGHCIRKLLRVIYHLLSTGQSFDPALLI

SEQ ID NO: 119154 - protein, 354 aa, unidentified
MSGDKYIAFDVHQATTVTSVLNAAGRELDGSIIATKAQPIRSYLEGFSGPLHVTWEEGTYAAWLYDLLEGRVAERLVCDPRHNALLKEGSKTDRNDARKLADLLRTGMLHPVYHGSRSLRPLQELAHSYEALGEDTTRAMNRIKALYHSQGIDCPGRGVYTQKQRASWLERLPAGATRLRGELLHEQLDHTRSLRRKARLALLKESHKQLISARLREIPGLGPLRVARLIARVQTPHRFRTRRNFWTYVGLGLVTFDSGEYRLVKGRIVRRVQPVKIRGLNRNHQPQLKEIFKSAALTAIRQPGPFKDYYDPRLQQGRDPEMLRLNVARKLAALVLSLWKKGGHYRAEGLPSPA

SEQ ID NO: 119155 - protein, 322 aa, unidentified
MNKYNETFGVDISKDVFDVHGSSSGHSQFKNDERGFKALLKSLPQQSLVIMEATGYYYYRLAQFLYKNDVDVSVVNPLSVKRFIQMKLAKVKTDKSDAKAICDYGLINDVPLYNALTEVQSECLQLFRLMDSYIKHRTATKNKIHGEEVLGVPSKAVFRSLKRNKKHLDKELVAIEERILSLVKKEQQQQLTLLMSIPGIGMKTALFLIVVSDGFSKFENASQLCSYVGITPTIRESGSSVRGRSRISKVGNKKLRNLLFLCSFNACKHNKACREIYERLVNKGKSKKLALIAVANKLLRQAFAIAKSGRPYDQEFVSVLKK

SEQ ID NO: 119156 - protein, 344 aa, unidentified
MTVDYYVGIDVSLEASSICVVDGAAKIIREAKLSSEPEAFIAWFKALPFSLARIGLEAGPLSQWLYAALKEAGFAVELLETRHVRGAFKAMPVKTDRNDARGIAQLMRLGWFRPVHCKSAPAQETRALLTARKLVQGKLYDIEMSLRGILRGFGLKVGRTKKAGFASRIMELTEHHPALKAIAKALLTVHEVLLKELNRFENQVRKLARGDARARLLMTTPGVGPIVGLTYVAAIDDPARFSSSKMVGAHFGMTPKKYQSGAIDVTGRICKMGDKNVRAALYEAAHVILTTPVKGGALKSWAAKLARRAGMRKAKVALARKLAVILHRMLADGSVFDVTKAAAA

SEQ ID NO: 119157 - protein, 365 aa, unidentified
MGDSSTFARNIQPQDYDVFIGMDVHMHSIALRQIDHPGVEKAVNMPYQGACLLGYVRKHLRGQRIAFAYEVGPTGFGLHDTLTQAGHPCLVVMPSAVPTPRGQRVRTNRLDARKLALQLRGGSLEGIRVPSEDYRMLREYVRLRKMHMTEAARCKQRIKALFLRNGLDFPGATPGGYWSRELIRQLREYPCAAALQFKIGSLLTSLEFSRLQAAATQAEMRRFVQASPEIADSVRYAMSLPGVGWIVATYAVARIGNWRLLGDSKEMASFFGLTQCEDSTGDQADRGPITKAGDPVMRSLLIEGAWTAIRKDAELRSFYERVKANHSKDKAARIAIVAVARKLACRLHCVRKERREYQIRKPEGE

SEQ ID NO: 119158 - protein, 346 aa, unidentified
MEHYVGIDVSLELLSVCVVDGRGKIVKEAKVASEPEALVYFLKELGFPVNRIGFEAGPLSQWLHAGLTQAGFEAVLLETRHVKAALSAMPVKTDRKDACGLAQLLRMGWFRQVHAKSIGSQEIRALLVARKQLLGRLLDVELSIRGILRGFGLKVGQVTRKTFEARIRELVTGHTTLERIAEAMLSARATLKAQYEKLHKAVLAIVREDAVCRRLITVPGVGPVVAVTFKSAVDDPSRIAKSKAVGALFGLTPRKYQSGEKDVTGGITRTGDEMVRTALYEAANVLLSRLTRFSKLKRWGMDVAKRRGSKRAKVALARKIGVILHRMWIDGTTYRWAEAKPIAAQA

SEQ ID NO: 119159 - protein, 342 aa, unidentified
MKSATTIGIDLAKNSFSVYGVDDKGKTVLSRTLTRAGVVRFFANLPSCLVGMEACASSDYWARTIESLGHEVRRIHPQYVKAYLLGAKNDTNDAAAICEAVQRPNMRFVPHKSPEQIDIQCIHRNRQGYIKSRTALVNQARGLLAEYGIIIRQGISAIRNQLPLIIADEENALSGLMRRNIASLYESICFFDSQILEQDKLLKTVAKENEACQQLMQVPGIGIMTATILLTVAGVASNFKNGREFAAFLGLVPRQNSTGGKTRLLNISKRGDCYIRTLFIHGARSAITRILAGQTPKYRPNPWVIELIARRGRNKACVAMANKTARIAWSMLAQGTEYRHAA

SEQ ID NO: 119160 - protein, 343 aa, unidentified
MDQYVALDVSLQKTAVCVLNVSGRVLIEADVPSEPAALIAFIQTHAPGAARVGLESGPTSPWLWHSLKAAGLPVVCMDARHAHAALSVRPSKSDRNDAHGLAEMVRMGWYREVQVKSLAAHERMALLGVRRRLVDMRVEIDGQIRGILKTFGLVVGSGNKGAFAQRARMLAQDHPVLSALIDKLIEVREVAVAKVAALDKEIRRFVRDDLTLRRFMTVPGVGPVTALAFRSTIDEPDRFKRARDVGPYLGLTPRRYQSGVTDRHGGISKCGDRFTRTCLYESASVLLTKVQRWSPLKAWGTRLARRIGSKKARVAIARKIAVILRCIWTDGTEFWWTKETATA

SEQ ID NO: 119161 - protein, 552 aa, unidentified
MWEKLLVLSLITGDRWNGYKTQISQIPHDLSRPSGQTPWSHGVIQPRVQQVGPERFGIVAVDCAKARSKWMLCDFYGKVLIPPTIVEHHRAGLQLATVTLKEACRRHGLRDHIVAVEMTGTYHKPVQRAFQRAGSETRLVHPFASKHYRLPAHADSKTDDHDLEAIFRAAVNGFGLLEPTWDETYLRLQLVARHRRDLVQKRSKLQCQIRQYLERCMPGYAALFPDDDLWTCPVAMAVARRAGSAEAIRQAGVPGVTQWLDEQKLRFQARTVERIVAWAGNAAEADPLRTRLHRLWQSLHDDWLTKTTEITRLEQELAEILVKTPYVLLLSHPGIHVVSAGELAGEMGPIECYAHAKAITGRAGLFPSRYQSDEVDRADGPLARFRNARLRAAWLRIADNLLMCNAHYRGKFQLWKQDGIDARDIRCRVANRATRTVFQMVSGRRLYHHPSRLDRQYVLEKLLKFHQDHGTPPHEILRDLQEAARQIPPAEQIAEATPLKQAYQRIRRGRRKGPQPLGTILVAVLARLGVTGLESESKAPSPDANLSDASSG

SEQ ID NO: 119162 - protein, 316 aa, unidentified
MANLTKSKSSVNVGVDVGKSFLDVYIHEKQIYFQEENNHKGIQNILKRLAHYRVERLVVEATGRYEFSLAEAAYLKEIPVCIMKPLSIRRYAGAVEQLAKTDKIDAAIIAEFAAVIKPKPTPQKSKNLIAIKDLLARRRQVMEMRTQELNRLKIMGKSLEASCKRIIKVLDKEVERLEKSLSEYVDEQSEWSEKRELLISTPGVGNTLVYTLLADLPEIGTLNNKEIGALVGVAPMNRDSGSLRGKRKIKGGRASVRTILYMATLSATQCNPVIKHFYKKLVEQGKHKKVAIVACMRKFITILNAMVRDKKEWCHD

SEQ ID NO: 119163 - protein, 343 aa, unidentified
MNISRIGVDLAKNVFQLHGVDRHGKSVWKRRLKRNQWLKAVMDHAEPGCEIGMEACGGAHHWARELEARGFAVRLIAPQFVKPYVKSNKNDANDAEAICEAMSRPNMRFVAVKSVAQQDIQATHRIRSDLMTQRTAKANQIRGLVAEYGLVAPLTLRALRAAIPCWLEDAENGLTDHFRSLLHGLWTDLTALDDRMLELDRAINRLANDNEVTRRLQQLRGVGPMVATAMVATVGDGGQYHKGRQMAASLGLTPRQYSSGDKHRLLGITKRGDVYLRTLLIHGARAVVSQAKHKDDRLSRWVTGIAQRRHPNVAGVALANKTARMAWAMLRNKTNYDPDFAMS

SEQ ID NO: 119164 - protein, 411 aa, unidentified
MDKIYDNCCGIDVHKKLIVACLRKGNRQEVREFGATTRELLELADWLKTSDCKMVAMESTASYWKPLYNILESSDLNAMVVNARHMKAVPGRKTDVKDAEWIADLLQHGLLQPSYIPDKDQRELRELVRYRKSLVGERTRELNRLQKMLEGANIKLSGTVSDINGKSARSILEYLLTGECIDGAKYDEMYEQKVIAHNLKATKEQIIDDLNGVMTPLQRRMMKELLSHLDELNTHIKNLDDEIDNFMKPEEKQASQAIQDVTGIGNTSAQAIISVIGTDMERFFTDRHISSWAGLCPGDNESAKKRKSGKTRKGNSLLRTTLITCAHAAVKNKKSYFYAQFMRISAHRGKKRAYVAVAHSMLIAIYHILKDGVIFKDLGADYYNQFNKERKINAYLKKLKALGWEAPVVAA

SEQ ID NO: 119165 - protein, 350 aa, unidentified
MDKELYIGVDVSKQTLDLAYYDGESIDWKKAHIKVSNNNAGFKKIGSWVAKVSKGFDIVLFCMEYTGLYTQNLRLWLEEKHYIYRMVEPRKMHRFEPDLDDGLRSLDRIKTDELDSFRIAIYCEQNHRKILRNPSKLPPPVYFKLKRLLAERKQTVKQSVLYKQQLHDICAYDTDLSVERKNGQLKTLNDALKGIDNEIDMYIKEDADISKNFSLLTSIPGIGRVVALETIVLTENFMAIDNPRKYACYIGVAPFKKESGTSVRKGSSVSKKGFKQAKADLSIACLVCMQHIPNIRDYWERKRKEKCSGIVFNAIKFKMILRMFAVIKRGTPYVETDNYRNGKNKQPGVN

SEQ ID NO: 119166 - protein, 377 aa, unidentified
MEEKWKRVIGIDLSKRTYEAYAICPGVNTTSTRFNGKLDPGGQHRLLARLKSGDLVMMEAGTATFNLVRYLNRKEGVEFAVLNPAKLRIIFDTVCKTDREDAKKLAMLGSKFSLKELPLVSIPTEEEQSERELVSMRSYLVSTKTKHKNKLHAIFMSCGHPEIRTKHIATESARNKQIEELLTGFASRSAQMIADMITDVENRIKEIDGEINSMLLIHPEETALLMSITGIGPVNAASILAFVGDINRFASARQLCNYAGLVPKMDCSGQRNVIGGISHRGNPHLRKSMVQGAWANVLTKQDSPLKGKYSRLIRSKPKQVTIVAIARESLTLVYLILKHKTLYSYVSISYYEQKLKVYGLLGVLEHTTDPLESERIA

SEQ ID NO: 119167 - protein, 345 aa, unidentified
MDYVGIDLHKTSSQICTLSEGGELTERRIKSTRASFDEVFAGRPPARILVEASTESEWAAQHLEALGHEVIVADPNFAPMYATRDKKIKTDKRDARALCEACRLGAYRPAHRTSERQRRVRSQLLVRSTLVRTRSKYISLVGSLARREGCRIATGGSDNFTARVEAAGLPAHVMAAIAPLFESLKMLNRQIAEADAELEKIVKEDEVVRRLCTVPGVGPVTATTFAATIDDATRFGAAKQVRSYLGLVPREYSSGERQHRGRISEAGGSRARTLLVEAAWALLRWRNAKNQALYDWAMRIAARRGRARACVALARKLAGILYAMWRDGTEFDPRASGRNVAAAAA

SEQ ID NO: 119168 - protein, 444 aa, unidentified
MVHGHAAGIDVGSFSHWVGVGADVEPREFPAHTDGLKALIAWLHEQQITTVALESTGIYWIALYELLDSEGFEVLMADPSYTKQVKGRPKTDRRDCQWIQRLHAHGLLSAAFRPDEDTCVLRSYLRLRANHVRYAGQHIQHMHKALEVMNLKLPEVVSDITGMTGMAIVKDILAGVRDPLQLAKHRDRRCKNTESAIAQALNGSYRDEHVFALEQALAGWEFYQQQLRAVDTQIEAQLRAMKKRQELPPLPPKPRLCKRKANEPRFDVRTALYYVTGVDLTALEGIDAVTALVVVSEIGTDMTRWPTVKHFCSWLGLCPHLKKTGGRVKSSRTRPGSNRAANALRLGASTLHGNKAALGAYYRRMKSRLGGAKAITATAHKLARLVYNLLRFGKAYVQQTQAEYEAQQHERQVRSLKRRARSLGLEVVERAATPAPPAAEGVGT

SEQ ID NO: 119169 - protein, 366 aa, unidentified
MSEITRGPIVRVGVDLAKRVIHVVAVDATGRVVTSRQLPREKFLSWCAQLPAGCTVAMETCSGAHHWARKLVAMGLQPRLIAGHFVGAYRLGGRSGKNDAADAAAICEAASRPSMRFVPVKTVDQQCMLAVHRLREGYKEERTACINRIRGLLAEFGLVFPQSPEALRGVLSDVIEDASNELPGIARLALNRAFQHWVELDCHVAWCDERIADHVRRDERARTAKEVSGIGPITASAVVASVADFKQFRSADQFGAWLGLVPKQNSTGGKTNLGSITKRGDEYLRTLLIQGAKSAVMTAHQRSDRISQWVVQLKARAGWQKAVVALANKNARILWALMTRDARYDPQHVPIPPGGAVLTPTPPCPA

SEQ ID NO: 119170 - protein, 438 aa, unidentified
MSNNVIFNLDELFISVGIDVGADFSWMSIALPNQQFVGKPYKILHSSMDSLTTAVSKIKEAEELYSLGSRIFLESTGIYHYPLFCYLRDKGFNCSVINPIITKNSTNMNIRKVHNDRFDSKKAALVGLKPDLKLSLMPSDLALNCRNLCREYYDLMDNCNAYVNKLQGELRMAFPQYLGIFSKVTINTSLTLLETYTSPSAFLEADKQEIIGIIKSTARFGLTYAQNKYNAIIQAANEANEFGYIIDSNIKRIRLYISFIRKYDEEINRILDSLHELVDANEDTDFVKQIHLIETFKGAGFLSAVSLMGEIGDFSAFSKPKQLFAYFGLDPAVKQSGKFEGTKVQMSKRGSAIARRVIHTLTLQSISTSRKGDAKNPVLRDYYLKKCESKPKLVAMGAVSHKVCNMIFAILRDNKPFEIITPQEHIKQYNAAKCDVAA

SEQ ID NO: 119171 - protein, 368 aa, unidentified
MSSIAAARGLSFLGLDVHRDTISVAVLGPGREEVPTVDRIANDEPSIRRLVGRFGDPRRLRACYEAGPTGYELARLLARVEVRCQVIAPALIPKAPGDKIKTDSRDCRRLARLHRAGELVAIRVPTIAEEAVRDLCRARADMLADRSRARLRLGGFLLRHGRIWRGGSSTWTFAHERWLLAQRFDDPALSTTYAHYRATLSARDAALEAIEADLATWYGKPPFEDAVARLAAYRGVTRLGALTLASEVADWRRFASAPQFMGFCGLVPSEYSSGSSTHRGRITKTGNSHLRAQLVESAWAYQYRAAATLELRRRQHGLPPEVIARAWKAQLRLCGRFRRLAARKHTRQVVVVAVARELAGFLWAEMTA

SEQ ID NO: 119172 - protein, 485 aa, unidentified
MKAKRATASRSIQQSLRNKKGPIRPAANMPVVNRHAGGIDVGSIEHYVCVPEDAVCEGESNVRSFGAFTGDLDKLVEWLQACGVTTVAMESTGVFWIPLAQKLESAKIEVVLVNARHLKDVPGRKTDVKDCQWLQQLHSYGLLNGSFRPTEDICCVRSLMRHRENLIQSCGREVQHMQKALQLMNVHLHHAVSDLVGATGLRILDAILAGEREPSKLVELRDSQCSKSTREELAKALKGDWRQEHLFVLKQALETYRHLLKQVAECDGQVEKALAAVVIPVRAEPESPAPKNPAAKEQTSPKKNRFHHRKTGTSLKRDLTEELKRICGVDLTQIIGLNVLSVLIILSEIGLDLSRWRNAKAFCSWLGLCPGNKISGGKVLNSRTAHVVNRVAILLRTLGPSVGKTDTWLGIFHRRMRARIGPAAANTATARKLACLIYHLLKYKEEYIDVDHFLLLERIHRHRIGRLRKQAEELGFDVVERKMVA

SEQ ID NO: 119173 - protein, 343 aa, unidentified
MSNKQTIGIDIAKRVFYLHGENEFGKVVLREKLTRERLLPFLANHPACTIAIEAGSGAHHWCRAFVRLGHEVRMIHAKFVRPFIKSNKNDWNDAAAICEAAQRPTMRFVAPKSLEQQDLLTIHRIRERIVNHRTGLCNQIRGLLAEYGIVLPQSVSRLRRLLPEVLEDAENELTVRGRELISSLLEELCAIDERLKPYDRAIEKASLDSWTCRRLRSIPGIGPVGATAVVATMGDPKAFKNGRHFAAFLGLTPQQHSSGGKSRLGSISRRGDVYVRRMLVQGAHAILKHVARREGPRADWLRALVARRGRQVAAVALANKNARIAWRLLTHETFFDEAMSVAA

SEQ ID NO: 119174 - protein, 417 aa, unidentified
MAKLKIVYPICCGMDVHRDFVIACIASTNAQGVTSYSSKRFSTFSESLRELRDWLAEQNCKDVCMESTGKYWFPVHNILEKTCNVVVSHPKFVKAIKGKKTDKKDAQWIADLFKHDLVRGSFIPPEDIRQLRDLCRYWCKLTSYTTGEKNRAQNCLTVSNFKLDSVFSNVFGKSASGIISYMLEHPGEQFDVRPFVDGRCKSPIEEIQGAVDGLFNESQAEKLKIIREHMDDLQKLKMLLESQILTLAEPYIRQIDLLCTVPGVSDPMTAIRILGEIGTDMTQFESSKHLCSWAGLTPQNNESAGKKKTTRIGKAGQYIKPLLIQCALAASNPRSTKCPEILQKYQQLKKRRGSKKAHVAIARRLLTAIYQILLKNEAYSPYIAPSTETMPEQRILSQEQALALLRAKGYVIQDTTA

SEQ ID NO: 119175 - protein, 387 aa, unidentified
MAQVNDLSRSLTAFDPISTLVVVVEMSKASWLVSGVVPGVERQPLKKLEPDSTALLRLIERWRNEAMHSGRPISRIALAYEAGRDGFWLARWLIARGIEPHVIHSASVAVSRERKRAKTDRLDAAMLMRVFLGWLRGERGHCGMVVIPTMEEEAARRPSRERENLVNERSRITNRMKSALARLGIRGFKPHLRKAPERLAGLRTAEGTGLPANVIEEFRRDMARLALVREQISSIEKTRAKRLERAPDTGPHAMVRLLARVIGIGIETADMLVREILSRKLRDRRAVARYAGLTGSPDESGLKRREKGLAKAGNARVRRGLIQLAWRFLMFQKDSALARWYRTRTEGPSGARKTTMIVALARKLLIALWRLVTTGEVPDGVELRPAA

SEQ ID NO: 119176 - protein, 469 aa, unidentified
MLCDFYGKVLVPPTFVPHHRGELQAALATLRDAVQTHGLKDLLVAVERTGRYHHPIKHAFAAAGFEVRIVHPFATKQFRQASDPGQKTDDTDLAAIHRAASSGFALAEAPLDRPWRELQLLVRHRRDLVHKSSALCCQIREHLDAALPGYAACFAELWESPLALHLPRQLGSSQAIGQAGLEGLRARLRQDRVGFQERSLHRLLVWASQAPPPDVAAERHLAIALLLDDDRRQKRHEIQALEQQIAAHLTRTPYVLLLSFPGIHVVSAADFAGEMGPISHYANSRAITGRAGLYPSRYQSDQVDHPHGPLVRCANRKLRATILAIADNLLACNRHFAALAAHWKAAGKDPRKTHVKVAARFCRIAYQIVAGRQVFRHPSLPGRSYILQKLLDFQSQHQTPTAECLAQLQAATDQLPRREHAAEAAPLVRALRHTRQARRRGPQPLGQILPIVLARLGVTPVQSPESGDS

SEQ ID NO: 119177 - protein, 310 aa, unidentified
MDIIVVGIDVAKDRLDVAVRPSGEVFAVERNASGVDRLIERMRSVSPCMIALEATGGFETVVAASLAAAALPVVVVNPAQIRAFAKAVGQRAKTDPIDAAVIAHFAEATRPELRALPDEATRLLADLVARRRQIIEMIGAESQREKRIAVPRLRKSIRRVIGMLERELAELDAEIDDSVRGSPAWREKEDLLASVPGVGPIISRTLIADLPELGTLSRKQIAALAGLAPFTRQSGQWKGRSFIGGGRASVRTALFMGAMVAMRHNPVLKAFFDRLIAAGKPKMVAIIAVARKLLTILNAIVRDKRPWQIA

SEQ ID NO: 119178 - protein, 343 aa, unidentified
MLAITTVGLDIAKSVFQVHGIDARGSVVVRRQLKRRYVLAFFKKLPHCLVGIEACATSHHWSRELQALGHTVRLIPPAYVKPYVKRQKNDAADAEAICEAVQRPSMRFVPTKTSEQQSCLTLHRTRHLFIRQQTAVINTIRAHLAEFGIVAPVGRNGVEDLLYAVADQRDERIPEVARACLEALGALLGKLKAQILEFDRQINAWHRSNETCRRLDELPGVGPALATALVASVADPKAFRSGRDFSAWIGLVPKQNSSGGREKLGSITKQGDRYLRSLFCAGALAVIRYAKIHGTKHRPWLARLLERRPTKVAAIALANKIARMAWAMMAKGERYREPLALAR

SEQ ID NO: 119179 - protein, 342 aa, unidentified
MQITTIGLDIAKNVFQVHGIDSTEKVVVRKQLRRGQMLAFFKALAPCLIGMEACATAHYWARELTKLGHQVRLMPAKDVKAYVKRNKNDAADAEAICEAVRRPTMRFVPVKSAEQQARLMQHRARDLLMRQRTQLINALRAHLAELGIAAAQGREGIKELLAIVAQDGDTRLPVDAHASLIVLAAQLQAVQTMIGSIEKRIVAQHRSSEENKRLQTIPGIGVLGASTIMAVVPDPKVFRSGRDFAAWIGIVPCEDSTGGKQKLGPISKQGDRYLRRILVVGACAVLRRARQQPEKYPWLTQLLARRPFKVVAVALANKMARIAWALLAKGGTYRAPALAAAA

SEQ ID NO: 119180 - protein, 333 aa, unidentified
MNRKFYVGIDVSKKTIDVAFIAQSGEQKTEPRWKVFDNTDPGLHQMKTWLNKESVTLDANTIFVIENTGLYHRRLVSFCNKHQIQLCIENGAQVKWSLGIARGKSDKVDSRRLATYALRFADRLKPAAALHEGIQAVKDLITLRNRHITQLSALRSNLKELKLTTDPAAVKELEKIHKPLITATKNTILKIEAALLKKIKSNKLTSRQYELLLSIPCIGPVTAAYLIACTNAFTLCETGKQLACYCGVVPFEYQSGISIKGKHRVHKMANKNLKALLHLCAVSSLRYVKELRAYYDRKVEEGKHKMSVINAIRNKLVLRAFAVVKNGKWETVC

SEQ ID NO: 119181 - protein, 362 aa, unidentified
MNYVGVDIHKRYSVLCAVDEQGCRLREGRVEGNAADGFARFFSGLSGPSKAVVEASWNWGVIHDELEELEQVEEVVLAHPYKTRLIADAQIKTDRLDAYALSTLLRGNLVARAHVPRRLTRARKNLLRQRLYWARLRTMLRNKIHALLDRQRDLELPQCSDIFGVRGLGFLRRLKLSEPDATLLQEQLALHDLIGQQMKAQEKRIAGEFASEAMHRRLMSVPGIGVTLAAVIACEIDAIERFSNADRLCAYAGVVPTTHSSGGKVAHGRLLPFCNKWLRWALVEASWVAIGCSPYFGTLYKAHRARGKKANHVILIVARRMCRIIWQLLHHQRDFEKRSLSSRVNFPGCSALALTVNPATAP

SEQ ID NO: 119182 - protein, 368 aa, unidentified
MQVVYTHCAGLDVHKKTVVACAITPNQKGGWQKEIRNFSTMTKDLLNLSDWLTSKGCTHVAMESTGDYWRPVFNILEGNVEVMLVNARHIKAVPGRKTDIKDSQWIAELLQHGLLRPSFIPGAEQRDLRDLTRHRSNFVRERVNLVNRVQKVLEAANIKLACVASDVMGVSGRAILAALVEGQSTPEDMAELAKGTMRDKRELLIQALEGRVRPSQQFILAQLLAQIESIDQTIALFDQKIEDYCLPFQKAIELVDTIPGIARRTAEIIVSEIGTDMSRFPTAEHLAAWAGVAPGNYESGGKTLSSRTRQGNRTLRAILVQAAHGLSRTPTYLAAQYRRLAARRGKKRAAVAVAHSILVIAYHLISRS

SEQ ID NO: 119183 - protein, 351 aa, unidentified
MTTMTPARPLVTGGVDTHRDEHVVAGLDQNGGLLGTAAFPTTAAGYAALLAWLLGLGEFVAVGVEGTGSYGAALARHLTYHGVKVLEVSRPNRQVRRRYGKSDVVDAIAAGRAVLSAEATATPKTHDGPVEALRALKSLQRSANKARTQALNQLRAVLVTAPDEVRHRLRDLPRGELLATCAAFRIRADDDSVAAITRLTLRELAARVAFLDAQLKSTVARLRRITTELAPDLVAKHGVGPDTASTLLLTAGDNPDRLHSERAFASLVGSSPVAANSGQIQNRYRLNRGGDRQANAALWRIAMVRLSCDQPTRDYVAKRQAEGKTKSEAIRCLKRYIAREVYNALPISAVT

SEQ ID NO: 119184 - protein, 338 aa, unidentified
MNIVFLGIDLAKNVFQLCGLNQAGKPVYTKRTGRKELLQTLANIPACLIGIEASTGAFYWQREFEKLGHKVKVISPQYVKPFVRGQKNDGNDAQAIAVALMQPTMQFVPPKSPEQQDIQALHRARQRLVNHRTATVCQIRGLLLDRGIPIGSAVSRARRVIPLILEDAENGLSSRMRRTIAEFYDLFNDLERRIHFFDKEIETVFRQSEACQRIARVKGIGPKTATAVVAAIGKGTEFKNGRHFAAWLGLVPRQHSSGDRQVLMNMTKKGDKHLRTLFIHGARAVVRVATNNNYGHMNQWVNQLKERRGFNKTTVAVANKNARIIWSMLRNDTEYQVV

SEQ ID NO: 119185 - protein, 340 aa, unidentified
MSNPAVIGLDIAKNVFQVHGADIDGRCVLRRRLRRAEVIMFFARLPRALVGIEACPGGHHWARELRSLGHDVRLIPPQYVRPFAKTNKKDAADAEGICEAVVRPNMRFVPIKSVEQQAAMMLHRTRALLLRQRTQLINAVRGHLAEFGLIARRGARNTRELADLVGNTTQDQLPDAARAMLILLLEQIREAQVRVRQTESSLEAWAKQSDACRRLMSIPGVGIMSATALVLTMDDPRRFRSGRHFAAWLGLVPKQSSSGDRQVLGGISKRGDGYVRTLLIHGARSLTRWRRESWHWLAGLLMRRPTNVAAVAIANKTARTAWAILARGRQFQATRTTEAA

SEQ ID NO: 119186 - protein, 456 aa, unidentified
MGKTKPQVIEDDEHQRVFERVAAVDVAKASGMVCVRLPGKDGRPRASRVWEVTAVMGAVTELGRQLARDQIQMVTLEATSDYWRIWYYVLEMCGLAVQLVDPAQVRALKGRPKTDKLDAMWLARLTEWGMLRPCFVPPAPIRALRDYARARTDLVRERTRCFQRLEKLLEDALIKLSSVASKLTTVSARDMITAMIAGERDPRVLAALARTSMKVRHAELVAALDGMFDSHHGELAQLELDQIAFLDKRITWAGNRIAAVLATIPAAWGIDADGVTGPDAGTGPDAIALPAAVRLAEIDGISVLTAAQIIAETGLDMARFPTAAHLVSWAGLCPVDSQSGRSRKKRKGHGNTYLRGYLGQAATGASGTATFLGERYRRIARRRGKAKAQVAVARSILIIIWHLLADPTARYTDLGPDYVAGRTSRDKKIRNHIRGLRALDLTDQEIIDILTPHQAA

SEQ ID NO: 119187 - protein, 455 aa, unidentified
MVKQKANKPTAIEIVNISAAAVDIGSRMHMAAVNPDVAEMPVRAFGTFTHNLHDLADWFKSHGVTSIAMESTGVYWIPAYEILEQHGFEVILVNARYAKNVPGRKTDVSDASWLRQLHSYGLLRGSFRPSAQIATLRAYLRQRERLVEYAAAHIQHMQKALMEMNLQLHHVVSDITGVTGMRIIRAIVAGERDLDVLASYRDVRCHASVETIKAALNGNDRAEHIFALTQSLDLYDFDQAKMLECDRNLEAVLDTLAANQDHDLSRLPRVRTKRKQVNTPSFDVRAALFGVLGVDLTQIHGMGPSLSLKLVGECGTDLRAWPSAKHFTSWLCLAPGNKISGGKVLSSRTRRSSSRAAALLRLAAVTIGRSDTALGAFYRRLAARAGKAKAVTTTARKIAVLFYNTLRHGMTYQDPGASHYEERYRNHVLGNIKRRAKSLGYDLQKLPNEAEMAVS

SEQ ID NO: 119188 - protein, 310 aa, unidentified
MEPIFIGIDVSKDRLDVHVRPGGEAFVVTRDGKGLEELVGRLQELGPTLVAVEATGGFETIVAAAVAGAALPLAVVNPAQIRHFAQAVGKRAKTDPIDAGVIAHFVEAVRPVPRALPDEASRLLAELVGRRRQIIEMMVAERQREKRAANVRVRKSLARHIAMLERELGAIDQDINTLVRGSPVWRVKEDLLASVPGIGKTLARTLLAELPELGSLDRRHIASLAGLAPYTRQSGRWRGRSMIGGGRSAVRSASFMAALVASRHNPPLKDFYLRLIGAGKPKMVALIAVARKLLTILNAILRDNQPWQSA

SEQ ID NO: 119189 - protein, 428 aa, unidentified
MTSNQHPTPPHVWVAIDIAKHWNAALVEHPDGRQQRFRFTHCLDDYDRLVKLLRSFVLPCRIAFEPTADFHRTLGFRLVREGFEVCLVSSVAGARLREAIFNSWDKNDPKAAEVILRLLKQGITQRFYDPLVHEIHDLQEFSKTYYQISRSRTRLQHTLLNHYLPLYFPEIERYWNTTRNDWFVRLMLRFPTPLTICSLTLDAFVKTAWDLVGRKVNKRAQLEELYELAQRSIGLPVRQDSLAIETFRLQLSRYRAFNEQRSALEKRAHELLRDRTDYQRLCSLPGVGSITALVILAEAGDLRRFKHHRQFLKFCGLDLAKSQSGNSRGRETLSKRGNARLRCALWQAALTAVRMRENSFRDKYARYITRDPDNADLRRKARTAVTAKMARVAYALIKFDRPYRCRFEQGLPSGSTSLNWAVEAVRTS

SEQ ID NO: 119190 - protein, 416 aa, unidentified
MKSASNTLTETPLNDVTAGIDWARDDHAVCVVDARGRQVARSTVEHTAAGLRELVGFLAKNRVGEVAIERPDGPVIDALLEAGLTVVVISPNQVKNLRGRYGSAGNKDDRFDAFVLADTLRTDRPRLRRLEPDTASTIALRRTCRARKDLVSHRVAAANQLRAHLRNVLPGAVGLFADIDSEIALAFLTRFTTQAQADWLTPTRLRDWLAKTGYSGRTSPAVLHTRLTAAPRGLTGPEADNEAGITRALLAVLATLVEQIKTLSAQISAQLDTHADQHIFTSLPRAGRVRAARLLAEIGDCRAKFPTPESLACLAGVAPSTRQSGKLRAVGFRWACDKQLRDAVTDFAGDSRHANPWAANLYQRARDRGHDHPHAVRILARAWLFVIWHCWQQGTAYNTTQHNALQRILTTKTEAA

SEQ ID NO: 119191 - protein, 465 aa, unidentified
MKSYNLYVGIDVSKGKADAAILQVSLLRSVKPKFLRKKLTFKFIKSEVNDFLETVRKYSNDPNCIHTYFALEVTGIYSTNIYEYINENCNMDEEVHQLNTDFVNKWRESHNISKSDPLDAQTICNIIGTDDDVKYVSDSIFENKNGYKDLKALTHRHYQIKKLYSQEINRLIAQCDCYFPELQYVFEPNSAAFLAVLSSYPTTHDIINASKQEVFTTVYEATKHRCSMDKIDKLFEYCHDTLVPPVSDYVRNVTINMVNSVISIRAHIKSIEKEIKQLASTFQVYELLLTLTGCGPTTAANIIAETGDIRRFKNADHFVSYSGSSPRNKRSGKSVEIMGKISKKGSRYLRHALYMIAEFGRRHNPILKHFFERVKNGNKKRHKLAVIAVANRIARYIFSIIKNNSCFVITHESLMKLPEETRNTFFNSISLDFPSNTRKQIYRFYDQYGEVHNFVYTNIAPESIA

SEQ ID NO: 119192 - protein, 472 aa, unidentified
MKKHQRAQAKSKANQPIHVLQPDAAGVDIAANEIWAAVPPERTEQSVRKFAAFTADLKELVKWFLDCGVRSVAMEATGVYWIALFQLLEDAGLQVCLVNARHVKNVPGRKSDVRDCQWLQYLHSVGLLTGSFRPAQAICALRSIYRYRQELLSLAGQHVQHMQAALDQMNIKLHHVIDDLTGLTGQNIVQAILSGQRDPVQLAKLRDKRIQAAESTIAKALEGDWRKEHLFVLQKAWENWTGVQKQIQDCDKELSDYTRELEACTTVIKPVKVVRLKAELLGAEPVSNPAPKKKAGRKTSKNQPEGPWQQELERFFGVDLTVIPGISVLTGLTLMTELGNDLRAFKTEHHFASWLCLCPDNETSASKVLRRRTRRSQNRLRQALRMAASSLHHEKSYLGDKYRRLRARLGAPKAITAMAHQLARIIWTLITRQIPFDQSLFAYHEKVNEQRRLKRLQASARQMGYQLTPIAA

SEQ ID NO: 119193 - protein, 351 aa, unidentified
MPRATSNANVIATIGIDIGKNTFHLIGLDDKGAIILRHKLSRGQVYARLANIPPCLIGMEACVGSHHLGRQLSALGHHTRLMPARYVRPYSKGQKNDFRDAEAIAEAVQRPTMKFVALKTVEQLDLQGLHRIRERLVCQRTSVINQIRAFLLERGIAVRQGLRTLRTEMPIALAKTDKLSPRMIHMIEDLCTDWRHLDKRIETVSKEIETLSEQDDGAKRLMTVPGIGPIISTATVAAIGTGEVFSKGRDFGAWLGLVPKQMSTGGRTILGPISKRGNRYLRMLFVQAARAVLLRPQSWQKHGLKLWIEAAARRLNRFKLAIALANKIARIAWGVLHGGRNFEVRPINQAA

SEQ ID NO: 119194 - protein, 324 aa, unidentified
MNYAALDLHERTVQCVLKNQDGRIVKESKTVKDEGRILSFLEGTDASVVMESGRNHQHIYDVLKERGYDVTVAHPLMVKAIAYAKVKTDRVDARVLADLLRADMIPESYVPGRDIREIRDLVRRRHYMVKLRTMQKNKVHAELATRWLKYEGDPFTEDGKVYLRSLAIDAVNDYLETIEFLNRKIHQLDEKVRRVVESDRYAKLLMTVPGISYYSALLISSEIADIKRFPDHEHLCSYAKLSPGVRQSGETQHTSKSMGNSMMNWIMIQCTRIHVRRYDSAITRFYQQVSKRRGEKVAIVAAARKLMRAIYIMLKEEQAFRLDG

SEQ ID NO: 119195 - protein, 392 aa, unidentified
MYYVGIDIAKRTHVACVLDEEGKVVVKPFKVENSKKGFQKFFDKITPFLEITVGLEATGHYWVSLYEALVLKKYKVVALNPLQVSAFRNQGIRGAKTDDIDCVLIAKVLRFGVHLETQLPNDTVLALRQLCRWRADLVHQMTGIRLKLQSVLDQVFPEFSDVFKDIMLPTSRTVLSEMSTPDEVLKTDYKKLYTLISKASRNVFGKKKAEELIEAAKDSVGIKTSREIFGFQIKLIVDQINHLKNQIKTIDKKVKNLYAKANTKLTSIPGINFRTAAAIVGEAGTDFSRFEHEKGGATAFVAFAGFDPMTAQSGKVNAPRKMSKRGSPYLRWAIWHAAFIAKQCDPMFKRLYEKQKSRGKHHFVAMGHVANKMCHVIYSIMKNNKEYRPILN

SEQ ID NO: 119196 - protein, 397 aa, unidentified
MYIVGIDIAKRKHEAAVIDGDGAVIIKPFSFTNNCSGYNRLLAMLTKAKLPLDEVSFAMEATGHYWLALFTRLQKEGFRVQVINPVQTNSIRSFYIRQAKTDPRDALLIAEVIRFGHFSESTLHPENIYELRELCRGRHAIVSMQADVKRKVVALLDQVFPEYETAFTNLFGDTSMAILQTCPTPKELSEMRLEELCHLIEVSSRKRFRMAKAQELQELARNSFGFAMAGDVFSTMIRLYAKHLDFLKQQVREMDRKIAEIMDTLDTPITTITGIGPTLGAYILSEIGDISRFSSAAKLAAYAGIDPTMRQSGEYNGVRNRMSKRGSPYLRHAIWLAASSAVLHDPALKLYFQKKRDEGKPYMASVGHACRKMVSIIYAVMRDNKAYTPYIPNEISA

SEQ ID NO: 119197 - protein, 357 aa, unidentified
MIAMKYYTSTTEFNCGIDLHARQMYVCVMDRTGKKLVHTNIRNNDFAYFLKLVAPYRHDLTVCAECMFGWYWLADACAEAGIHFVLAHALYLKAIHGGKNKNDRVDSEKIAHLLRTNLIPPGYVYPAAKRPLRALLRQRLLYVWNRSELLSRLQSHQLAYNRPTCRQTLYNREAWEKQLLASEPDPVRQLALQNDLALIGHYDVQLASLEKKLLQLTRQTASRDFTLLQTVTGIGEFLGLTLLHEIGDIARFPTVKDFLSYSRLVKGTVASAGKIKGLRGAKLGNPYLRWAFGEAAIIAKRDPRVIGPLAQRLEARLGNKFKANTVLAIKLARAVYFMLKTKTVFDPERLVAALSHN

SEQ ID NO: 119198 - protein, 332 aa, unidentified
MTDLQYAGFVGIDIAAKTFTATWVPSGPARPRQVDQTTHGYTTFDAQLRAAMPDPTTVLVVMEATGSYWIALAVFLHDHGYHVAVINPAQIANFSKSLPRRPKTDPHDSLLLLQFAQERQPTCWTPPPAVYHELRQRLVARDALMEMRQQARNQRHALEQWPVHVAPVLTQFTTIIADFDTRIAELDRAIAQVLKDGAWAASAALLASIPGLGSTTSAWLLVATMNFALCPTPEAAAAYAGLAPMAHESGTSVRGGSHLGRGGHRRLRTAVYMTTLSAARYNPVIRPFFQRLRAKGKPFKVAHCAAARTLVTLAWAVVTKQRPFDPQQGSVA

SEQ ID NO: 119199 - protein, 449 aa, unidentified
MKILALDLGKFNTMCCFFDTKTRKHSFLNAPTERNYLNTLFKNHKIDLVVMEACGPSGWINDLASSHGLKTLVCSTNEDAWKWSNVKRKTDKDDALKLSRMAAMNELKAVHMPSETHREFRSLVKYRKTLDCRINKMKCTIRAWFVNHGIEIDTGEKAWHSGRERINSFRKPLVDCEPHELWKGELDLELTQFDALTVQLESVVKKLEALGKADPRIQRIRTIPGVGPRTAEILVACIDDPHRFTTGRQVSAYFGLVPRQYQSGETDRNGRITKRGNPLARTILVECAWASLRYNEWAKGVYDRICGKQKTRKKKAAVALARKIAVLAWAMLRDEKDWAPTHMIQVTESFGKMKRELKESLQSMKPKENSDQRKSRLRREAREAKAVADRPKKSVRTATAKRSRSKTTVVPNAAPPSNPTKRTTPKSTARTNLKPKPKPRRAGKLVSAV

SEQ ID NO: 119200 - protein, 338 aa, unidentified
MEQLTTIGLDIAKNVFQLHGVDAAGNVLLRKQLRRGDVLRFFSGLSPCLVGMEACATAHYWARELAKLGHTVRLMPPAYVKPYVKRGKTDAADAEAIAEAVTRPTMRFVAVKTAEQQAVLMLHKVRDLLVRQRTMLINALRGHLAEFGIIAARGPGGVTAAIVALHEMQDSMPVLARVALHGLVDQLRIVRDEVVKVEKRIVAQHRADDASRRLATIPGIGPITASAIAAAVPDATLFKSGRQFAAWLGLTPRTHSSGGKERLVGITKQGDGYIRRLLVIGATAVIRLARQDNASKSWAAKLLERKSARLVSVALANKTARIAWALLARNQSYVAPAM

SEQ ID NO: 119201 - protein, 344 aa, unidentified
MTHYAALDVSLRSVAICIIDNEGHIRLETSVPSEIPDITAVLEAFDGDIVSVGLEAGVLTQYLTYGLQSTGFEVVCMEARQVKAALSAMRNKTDKNDARGIAQILRSGWYSRVHVKSMRSHEIRALLSSRKAVLSKCIDLEQEVRGLFKVFGIKLPPRLGHGAFDETVRPTIEADAALAHALLPLLEARLVLYRTFRELDNRVRRMALQDSVCCRLMTAPGVGVVTALTFKAAVDDPTRFKRSRTVAAHFGLTPRRFQSGDMDISGHISRAGDPDVRSTLYNAAHAIMTRSAKYSSLKVWGMQLAKKRGHRRAVVAVARKLAVILHRMWLDDTQFRWSSEGSTA

SEQ ID NO: 119202 - protein, 329 aa, unidentified
MFVGLDLHKNYLQTAVMDEQGRLLSQERIPNRDENIEEFASKRLRDSHAEIVIESSSTWYHVYELLSKNQNCHVVLSNPVKTKAIASAKVKTDKVDALTLANLLRTGYIPESYIPPRHIMDLREMVRCRTSLVRMRVEAKNKIHAILLQNGTRITEKPFTIGFVEELRRLGDYRIDGYLNIISSLSRQIQTVSNTIKREATEDESTRLLMTIPGVGYFSALLIQSELGDVNRFPDSHHLCSYAGLTPSTHSSGGVTYHGSITRSGSRYLRWILTESAKAHIRTRRDSQLTRFYTRQAKRRGGSKATVATASKLLRIVYWILKEKRPYHS

SEQ ID NO: 119203 - protein, 356 aa, unidentified
MTSTKYVGMDVHKESISIAVMNSAGKIVMECVIETKASVLLQFFNGLRGDVRVTFEEGTWAAWLYDLLKPRVSEVVVCNPRKNALLKDGSKSDRIDAHKLAELLRGNHLKPVYHGEQGLRTLKELGRSYLTITKDVTRVMNRLKALYRGWGIACAGHEVYVPRHRSEWLGKISEAGVRRRAEHCYQQLDVLRLLRQQVRRDLLLESRKHPAWRLLGLIPGIGPIRAALLIALIQTPHRFRTKRQLWTYCGLGLETHDSAQYRVVEGQLQRSKKSVTLRGLNQDHNRDLKDIFKGAATKVSSSNSGPFHDFYEHLLAQGRKPTMARLTLARKIAAITLIVWKKEVRFDASYLKSQAA

SEQ ID NO: 119204 - protein, 344 aa, unidentified
MKKNLSFIGLDISKADFAASIYQTPDKPIVTKEVIPNNPEGFNLLLLWLKDHRINKANSHICMEATGVYSQAIAYYLLFAGFPVSVEPPLKVKRAFDPVGHKTDPVDSKQIAEYAYRFQDELTSWQPKDEILEKIRQLLSVREQFTKQKVALKNAIQAYSRQRVQVVLIKKAQKETLAQLEKQIARIDKELAKLIKQDPEILQKANHLKSIPGYGMLLAAHLLVITENFTKIQQSKRLASFVGIVPYQHQSGTSVFKRAKIRHFGPGASRKLLRLAAQSVATHDVTFRRYYLRKLAQGKAKALVLNNIANKLLKVACAMIRNNTRYIKEHRSIHPMCLKSLKSA

SEQ ID NO: 119205 - protein, 415 aa, unidentified
MEELGLRPLYRRVAGIDVHRMLHVVTVLVEQPDGSVQQHTREFGGFKRDCRALAAWLLQMQVQLAIMESTGIYWKSVYAQLENAGLNAWVVNAHRVKNVPGRKTDIADSQWLAVLARFGMVKASFIPPQDLRELRLVSRYRRKLGAMLASEVNRLHKTLDDAGIKLGSVVSDINGVSARAMVAALIQGQPIEHLLGLARGRLKHKLAELDASLQGDLTERHLFVLAQQHAHIEALQRQIAEIDGYLLQAMQPYAWAHQLLQTIPGIDQIGAATILIEIGVDMQRFGKAASLAHWAALSPGNDQSAGKRRSGRTGHGNSVIRHILCECANAARMTKSTLAAKYRSLMVRKSHKKTIVALAHKMLRLIFVILSRGQPYIDRHIDYDAISAKKNAPRWIKQLKKIGRWPTPQPAAAGH

SEQ ID NO: 119206 - protein, 360 aa, unidentified
MAKARTLVGLDVHATKIVAAVLDAETGELQWFRLGGDVAEAAGLCAGLPRPVRAAYEAGPTGYGLARELARRGVECVVAAPSKIPRAPGDRVKTDRRDAELLVRLLWAGKLHAVRVPGPEEEALRDLVRAREAVRVDLMRCRHRLSKLLLRHGVRFEDGRAWTDRHHAWLAGIELGWPAAQATFADACGAADALVHRRDALEREIVALVPDAPWQAQVARLRCLRGIDTLSAAGLCAEIGDFERFARAEQLMSYVGLVPSESTTGHQRRLGAITKTGSGHARRLLVEAAWHYRPRPRIGKTLSERQHGQSAEAIAIAWSAQQRLYRTWKRLDARAKRRTIIAVAAARELTGFCWAITRIQ

SEQ ID NO: 119207 - protein, 310 aa, unidentified
MEAIYVGIDVSKDRLDVHVRPGEEAFAVARDGKGLEELVARLQAISPVLIAVEATGGFETIVAAALAGAQLPLVVVNPAQIRHFAQAVGQRAKTDPIDAAVIARFVEAVKPEPRAMPDQEARLLAELVSRRRQIIEMIVAERQREKRAENVRVRKSLVRHIKVLEKELPEIDNDIDTLVRGSPVWRAKEELLVSFPGVSNTLARTFLAEVPELGTLNRRQIASLAGLAPFTRQSGRWKGKSMIGGGRAKLRAGLYMAALSASRYHPQLKVFYRRLVTAGKPKMVALIAVARKVLTTLNAMLRDQKPWQPA

SEQ ID NO: 119208 - protein, 421 aa, unidentified
MQQEAHEAFAAFIGLDWAESKHDVCLQAAGSAKRAYCILTHTPEAIDAWVSTLRTRCNGHPIAVCLELNKGPIVSALRKYDFLVLFPINPLTLARYREAFTPSRATDDPTDAALQLALLLTHRDTLQPLKPQSPAMRALEQLVAHRRRVVNDSVRITHRLTRTLKNYFPHVLQWFQEKDTAVFCDFLRRWPTLKAAQLARRSTLETCFRDHHVRSADLIAKRLQAIKTATPLTSDAGVIAPNVLFVQALVSQLRVTLDALETFDHAIAQRAQSHPDFPLFQALPGAGPVFASRLLVAFGAPRARSASAAARQQDAGIAPVTERSGKKSWVHWRLQCPQFVRQTFVEWAAESIRHAFWAQLYSQQQRDKGKAHQAAVRALAFTWIRLLSRCWQERTPYDEATSLQALTRRGSSLLQNLAKVS

SEQ ID NO: 119209 - protein, 422 aa, unidentified
MTGNRRCIGLDVHREFAQVAIWQGGTVAQAGRFATTPEGVREFAAGLGPADEVALEATGNTWAIATVLASRAGRVVVSNPAKTRAIAEAKVKTDKVDAAILAQLLAADFLPPVWMPDAATSALRRQVLRRAHIVGQRTRLKNQVHAILARNLVPRCPAADLFGIKGRKWLGAQDLPADEQAAAAALLRQLDFHAQELTLIDRDLGQAALARPEVLRLMTIPGVDATVALSIVAAVGDFTRFRTPERLVSYFGLNPRVRQSGGQPASHGRITKAGRAHARGMLVEAAWSASKAPGPLRAFYHRVQARRGMQVAAVATARKLAVLCWHLTIRQEDYAFALPSLIAHKQRKLELRAGAPPARGRKGHAARYSLAAVRAAERDLAAQSEAAYRTMVAAWQPARPARGKKAAGAAASKGTRLIKPAG

SEQ ID NO: 119210 - protein, 348 aa, unidentified
MVHFAGLDVSVKATSVCVVDDAGKVILEQKVPTEPAEIIAVLTSLGVPLGRIGIEAGPLSQWLVNALVAADLPVICVETRHMKALLTAQQISKTDRNDARGIAQMMRVGLFKPVHVKTLVAQEQRMLLTSRKLLQRKLLDVESDLRGTLRNFGLKVGVVSGGRYDARVRELVEGFPRLAVIVEPLLSVRRVMRQQFAVLHKMLLDTVRDDPLCQRLMTAPGVGAVVALTYRATVDQPQRFVHSRAVGAHVGLTPKRYQSGETDYEGGVSKCGDALLRTMLYEAAHVLLTRSGKWSWLKAWGVRVAQRRGMRRAIVAVARRLAVVLHRMWVDGSEFRWSKDSTAVPAVA

SEQ ID NO: 119211 - protein, 417 aa, unidentified
MLFIGDDWAEDHHDIELEDEDGRRLARARLPEGLEGIARLHALVAEHAPAAWSELPPEQVADQVIVGIETDRGPWVRALRAAGYRVFAINPLSAARYRQRHSTSGAKSDSGDAHVLAEIVRLDRDHHRPIAGDSDLADAVKLLARAHQTAVWERTRQVLRMRSTLLEYFPAAVEAFEDLAATDALALLARAPDPARAAKLTRGQLDAALRAARRHHVEAKADTLLAVLRAPALRQPATLQGAYAAVVAGQVSIITALNAQIAALQGVMAEHFGRHPAADIYLSQPGYGVVLAARTLGEFGDDKGRFATARARKNYSGQSPITRASGKKSIVLARYATNRRLGAALHLQAFSALGASPGARAYYDTLRGRNIGHHAALRQLADRLVGILHGCLKTGTIYDEDTAWQHHHRSDAHDTAA

SEQ ID NO: 119212 - protein, 363 aa, unidentified
MLIIGIDYHPSFQQIAFLDQETGEYDERRLNHSDGEAERFYRELKQRRVSVRVGMEATGYSRWFERLLAELGFEIWIGDAAEISRQRVRKQKTDREDARLLLRLLRENRFPRIWVPSPENRDLRQLLWHRHRLVQMRTRIMNQLQAVAMNEGYRWKKKLFSEQGRTQLEKLSLAPWASRRRKELLELLDQLDPKIAELTTAVEQEAQQRPEVLRLMTHPGVGSITGLVYVLVIGTPDRFPCGKQIGSYTGLIPSEDSSAGRQRLGHLSKQGNALLRYLLGEAAQAAARCNPHWRRRYVYLAMRRHKNIAKAAMARKLAVRLYWMWRNGWNYSQFVEFGSHAGKLATGHGLKKSVVHLIGHPAP

SEQ ID NO: 119213 - protein, 433 aa, unidentified
MQEAEDEPLFCERVAGIDIGKAAIMVTIRVPGDSGSGRRQQETREFRAVRKDLLAMADWLRGWQVTKIGMEATSDYWKPVYFLLERQGLDCVLYHAAQVKALPGRPKTDKLDSAWLAKITERGSLPGSFVPPEEIRRLRTHTRYRRHLVQARTAEKERCEKLLEDAHLKLSSVITGIHGVSGRDMLTAIIAGERSARTLAQLARGRMRIKTAQLEEALDCSFFTEQHAFILAMMMADIDHLPAQIQELSAKIDELCQPYEHQIAQLDAIPGYGVLTAQDIIGEIGADMTVFPTAGHLCSRARRSPQVRESAGKRKGSNATGRGNPYLGAALGEAAANAGRTQTFPGTKYRRLIRHMPKKKAQGAIARTQLVITWNLLPDPDAGYEDPGTDYYEQRANIRREVRAHARAIERHGCKVTIEAIDPGTGELTPIAS

SEQ ID NO: 119214 - protein, 370 aa, unidentified
MVVVETPSEGSRPWAKSIEKLSSVTRLGLDLAKRVFQVHAVDANGEMVVARKLARGRLVGFFSQLPRCVVAMEACSSAHHWGRQLLALGFEVRLIPPAHVKPYVRRNKNDAVDAAAICEAAGRPSQRFVPVRSIENQAELMRHRARELLAGQRTAALNALRGHLAEIGVIAPQGVQHAYDLKRLAVDGFDEYGEVVVPDCVRVALRPLVSQIDALDAAIGAIDNEIAMSVKADETAKRLMTVPGVGPVTASAIVATIQDIGDFASGREFAAFLGLTPRQSSTGGKPRLGRVTKMGDRYLRKLLVVGACSTLSHRKGHNDALRRWASGMLERKTVRYKFKLTAVALANKVARIVFVLMTRGGQYDDRPLAA

SEQ ID NO: 119215 - protein, 324 aa, unidentified
MIDGILGIDVSKNTLDASMSSCNKVRAKSFANSSDGWRHLLDWLITQKIRRVHACLESTGRYSLGIACALYEAGHVVSIVNPAQIRDFARTKLGRNKTDGVDASHIREYCELFKPQPWAPPSEAHRRLGELQTIRAGIVAGLTEWKNRKNSGMVDAVAQSLADVTISHFISQLGAVDEAIAQTINNDSSLRRKRDLLLSVSGVGETLAGVVLAELPGPDVLRSSAEVVAYAGLNPRQHQSGTSIDRVTRISKIGNAVLRAALYMPAMSAMRFNPAIVALVTRLKSRGRLNPKQIVVAAMRKLLVLCFGVLKTGKPFDPAIAMGC

SEQ ID NO: 119216 - protein, 312 aa, unidentified
MNARFVGVDVSKATLDFDCLPVSMVRQFSNDAQGIEALVSLLRDSEVERIVLEATGGYETALACALAAVGLPVVVVNPKRVRDFAKAKGILAKTDRLDAGVLALFGQVIAPPVRALPDETQRELTELLDRRMQLVAMRAQEKARLGTVLPIARRDIEQHIAWLSKRIEKFDDDLTKRLRTTEVWKDKVEILDSVPGIGKVSIFTLLGRLPELGDLNRGQIAALVGVAPFNDDSGKRRGQRYIRGGRTEVRCVLYMATLTAKRCNPAIKQYFDRLKATGKPFKVVMTACMRKLLTILNIMMKNKQSWINSLAA

SEQ ID NO: 119217 - protein, 335 aa, unidentified
MNDVSVIGIDLAKQVFELVALDDRGRVLWRRRFRRDQLLAFMAQQPPTRVGMEACAGAHDWGRRLSALGHEVRLVPMHQVKPFRQGTKNDRNDALAIAEAAMRASLKGVAIKSQAQQDMLSIHRCRQLLMRQRTALINQGRGLLMEYGVVLRRGAGQFRRGLPLLLAEADNGLTPSIRETLALIGRQVSELDERIEGLERRLKAQADAVSRRLRSRPGVGWLTATAFAASVGDPSTFRDGRQVAAWLGLVPRQHSSGDQIRLGRISKRGDRYLRTLLIEGAHSYLRRAPYYDTRLSRWAVALQARVGQQKAAVALANKNARVLWSLMASGEAHQD

SEQ ID NO: 119218 - protein, 387 aa, unidentified
MTKTTSSPSPAAIDYDATLILAVETSNKNWVLAAHVPGLGPVKAKQTIDPSAEALAKAIEGYRRRATGCGATVDRVIVVYEAGYGGFWLARWLDTRGVEAHVVQPSSVPVDRRKRRAKSDKIDADLLLRTLLAWLRGEPRVCSMVAIPDEADEDARRPAREREELIRERISLTNRIGATLATLGVDDYNPLRRDRRIRLEALRTALGKSLPEHAKAKIVRIIERLELVLAQIAALERRRDAVLEKEAPGRAERMIQTLARLRGIGAQSATVLVYEAFIRPFVSGKALGSYAGLTGTPFNSGGSEREQGISKSGNRRLRGAMGELAWLWLRYQPDSALAKWFRDRMAGANGRMKKVLLVALARKLLIALWRYVTNGVVPDGAVLEPAS

SEQ ID NO: 119219 - protein, 335 aa, unidentified
MKIQFFIGIDISSDVLDFCLLNNGVVVLEIQIKNNPRALKRMIKELRKLGINNKNSWFCAEHTGVYGNNLRLILEAEELYYSMVSATEISRSIGLVRGKNDRADAMRIAEYCMRFSDKLKPSKLPAKYLVELKQLFSFRKQLVKSRSGIKNYVKAMEKSLDSASQKQIIKQAKKQIRDTDKLIDGIELQMRQIINEKKETKQNYKLLISVPGIGLMTASYMIICTENFQLFENVRKFASYAGVAPFEHQSGSSIRGKTKTSKYRNKQMKTLLNNGMSAVINGNNELANYYKRRIEEGKHKNKVKNAVVFKMISRAFSVIKRQTPYVQIDRYKFAV

SEQ ID NO: 119220 - protein, 490 aa, unidentified
MNNIGSNRVIGLDLGVTSAHSAVVLDVTGQVLLRRRVVSTVESLAELEQAALRGAPEQTHLTVVIEPTGPMWLPIAVYFGRGGHTVLRVSSAKAADLRRFLSRHAKSNGIDAETLARLPMVAPAGLHPVELSGTDRASLDRRVRTVARLTREIGQRKVRIRALAQTLIPTIGQALGDGLNRTDLAVLERYADPRALLGAGRARLLRLVRTESRGKLGDDKVRVLRTAAEQALQLWGDDPAIALSDLAEEITTEIRLLRLAETERARHEATRDDALTRVDPDGLATSLPGLGPVGATQLLAAMGRPGRFRNAAAFKSFTGLAPKASETGNTDRKSQPMSKAGNSALRSQLIQSANTARQLDPQLAAIYYAQMTQRGAPHLKALCVVAARLAERAWLTLSKAEPYIIRDLQGRPISPQRARELIAEQFTVPADVRRRRRSNKLAGRAPQQCSGHAKSRHTAGHEATLPSNTITPPNPAVNPTQHTALTPTPA

SEQ ID NO: 119221 - protein, 357 aa, unidentified
MKKRLNADTINVNGKTVNVGIDVHKLSWHVTALVEGVIVESATIKPSYRVLKKLLAQYKGARIRIAYEAGFSGFNLYDELTADGIECIVVSPSLIPVESGNRVKTDKRDSRKLAQYLENNLLKRVYVLSKQERAHRQFVRTRRQLSDHRTDVMRQIKSLLLFHGLPSFDGNRGFWTRPVLRALRSITPDEYVSHSLNKLIDLYEYLTQQVKHMTREVRKLARTEKYARRVELLTSIPGVGVLSAMEVLTELQDVSRFATADQIAAFLGLTPAQYSSGQHVRMGKITHTGNHRLRTRMVECSWIAIKKDPGLNKTYQAIKMRRGGKRAIVAVSRKLIIRIRRILLDEVTYRKECAIAA

SEQ ID NO: 119222 - protein, 326 aa, unidentified
MDGRYNAFESFVGIDVAKENFEVFFMATETGLNLSYDAAGIQTLLEHLKPLPLSLIVMEATGGLERRLAAELMDAGFAVAVVNPRLPFHFAQGIGRIAQTDRIDARTLARFAHDVKPRPLEKTPEKALELEQLVVRRRQLITMRTMETNRRSSCHSKTARKSIDKVLDCFKRQIDLLDDEIQRLIRYDDDWRRKDEILQSVPGIGPATSAAILAELPELGKLNRQQIAALVGVAPFNRDSGKYQGKRSIFGGRAGVRSAIYLAAFNLVHHYRIKPTRIRQFAERLESSGKKTKVVLTAATRKLVVTLNTMLKNNSPWNPKFVPVSS

SEQ ID NO: 119223 - protein, 369 aa, unidentified
MDPSLCAKMKKYFIYRVQNTDGILKEDPSMNNISIVGIDLAKHVFQLHAVDVRGHKLFSKKVKRDQLSAVVASLPPCVVAMEACGSAHYWAREMTLLGHDVQLLPPQAVKPFIQGHKNDARDAAGIAEAAARPATRRVTVKTQEQQSLQALHRVRSRLVRARTAVGNELRGLLNEFGIVVAQGHRVIRQGDIRRLLDEQRESLGVALCEVMHDLLNEWQALDIRVTEYDRRLMSYVQAAPCMQQLMSVPGIGPINATLLVAHMGDAKRFPNGRQFSASLGLVPRQHSSGGKSVLKSITKRGNSEVRRQLVHGARSALRKFQRQEHPDRLAQWIIQLAARVGQRKAIVALANKMARICWSILAYKQPYQA

SEQ ID NO: 119224 - protein, 412 aa, unidentified
MDVVYRCCCGLDVHKDSVVACVRWAGDNGQHRQEKRKYGTFTRHLLELSDWLKLCGVTHVVMESTGVYWKPVWHVLEGSFELLLANAQHVKAIPGKKTDRRDAGWLAELLQHGLLHGSLVPPEPIRGLRDLTRYRVSLAQECNRIANRIQKVLEDANLKLASVATDPLGASGRAMLQAIVAGEQEPEKLAELSRGLLRRKIPQLQLALEGRVSAHHRFLLKELLDHLEFVEGKMTKLEKEIAVRMAPYADQLQRLCAVPGIDRVSAWGIVSEIGVDMQQFPDAQHLASWAGLCPGNWESAGKRQSGRTRKGSAWLRRHLCQSAWAVSTKRNSYLSAQFRRLAGRRGVKRATIAVAHSLLTIAYYILKSPAQFRDLGADYFDQLHPDQLKRRLVKRLQGLGYQVTLVPSPQSP

SEQ ID NO: 119225 - protein, 344 aa, unidentified
MSKAIIIGLDIAKHVFHVHGADERGRAIFSKRISRGKLLDFFAAHPSCTVALEACGGAHHWARQLAQLGHEVRLIPPAYVKPFVKRQKNDAIDAEAICEAAQRPSMRFVAVKSEHQQAASLVFRTRDLLVRQRTQLINAIRGHLTEYGWIAPKGPSHVAMLADLLEEEEMASSLPEAARAMFRLMLDLLAGLNGKIADLDKEIARRAREDEVSRRLMTVPGIGPISATAIAALAPPAETFAKGRDFAAWLGLTPLQRSTGGKRKLGATSKMGERTLRRLLIIGSSTVVLQASKRGAPKGSWLEQMLARKPRMLVTVALANKMARIIWALLVKQENYRAPVAAKA

SEQ ID NO: 119226 - protein, 340 aa, unidentified
MDEIKTIGLDLAKHVFQVHGVDVNGVPVLRKRLRRSQVVAFFASLPRCLVGLEACATAHYWGRELQAVGHEVRLMPAQYVKAYVKRNKNDAADAEAICEAVRRPTMRFVAIKTADQQAALLLHRVRERLVRQRTALANALRAHLAEFGVTAPRGLRNVAPLIAIVRDESDRRLPDLARQVLGVLAAQLEHLGAAVAAIEKQLMDWHRKNPVSQRLASIPGIGPIIATALAATVVEPIGFASGREFAAWLGLVPRQHSTGGKARLGGISKRGNGYLRRLLINGASANLLRSKATNADPWVQGLRRRRPSLVVAVAVANKTARIAWAVMRREESYRPRAAAA

SEQ ID NO: 119227 - protein, 402 aa, unidentified
MNSVGIDVSKGKSMIAIMRPGKEGVIEPFEVSHTDSELINLAKVIQSLDGETRVVMEATGNYHLPVAWMLHDAGIYVSVVNAMLIHNYGNNTIRKGKTDKKDAQKIANYAIDNWTELPRYFPEEDVRIMLKNCYRQYEHFSKIRTMMKNNLIALLDVTFPDANRLFNSPRRADGSEQWLDFVDTFWHCQCVCGLTTAAFSKKYQKWCRKHGNNFSEEKALDIYASACGHICVMPKTEASEFMMKQAVSQLQTVSKTLAALQQQMQSLAEKLPEYPVVMQMFGVGPTLGPQLIAEIGDVRRFHSKKALVAFAGIDAPPYQSGTMDVRSRSISKRGSSSLRRTVVLIMSVYLQQKPLDEPIDQFMDKKRAEGKPYKVYMMASANKFLRIYYATVKTYLDALEAE

SEQ ID NO: 119228 - protein, 371 aa, unidentified
MEWSPPPNGIAMCQTCSVITIKLNGEETNMNITVSGLDLAKNVFHFVGCNKAGKIIRKKMLRRNEVLSFFAKLPPCLVGMEACSSAHYWAREIEKLGHTVKQIAPQHVKAFLRGNKNDYNDALAISEAVARPQMRFVVTKTQTQQDIQSIHVFRKKCERDRTANSNEVRGLLSEYGIAIPQGIHNVFKTLPKLFDKTEDNGLSDLFKTLLAQHYEKLVELNKHLDFYTKKIKVQSKSDECQRLQSIPGFGPIVASAFYQHVGNGSGFKNGRCVSASLGVVPKQYSSGGKDKLLGISKRGDKYLRTLLVHGARAVINTLKDKKTPLANWLNRLIVTRGKNKATLALANKLARIGWAILRNGGCYSAEHAAAN

SEQ ID NO: 119229 - protein, 450 aa, unidentified
MTKGSGVSRGDRNRNARLGRLRELVPLSNAIVGIDLADKKQMVVVCDHDSRVLARRTFRLKAWDLGSALDWARDRAVAKGFAGVTVSCEPTGHRWRVLGQLAADRSMPFVCVQPIQTSSARRSEDLTFDKTDEKDAVLIARLTAQLRCYVPEPVEETWGRLRHLGARRERLLTDAVAQVQQIRDLLDCVWPAALEAAAQPFRSQTWAAAMWVVTYRDDGDLDRTRRLGPARFEQQVRREITRRGGQKPCLRIVGNLYSALVDPTGVLAHRRGGLERVQLVLADWAETQCKLTDTESRMVAVLDELELTALATSIHGLSRVGAAAILAETGDLHRFPTARSLVKHAGLAPRQKQSGTYTGKTKLGRQGRPRLRAAAWRAVWGTLQTNTVYATRYRHLTSRETNRLKPTQAQTVLAAAILRHLHAVITTGKAWDPVIAEHGSQPKQATTLAA

SEQ ID NO: 119230 - protein, 310 aa, unidentified
MAPLYLGLDVAKTTVQLASEPAGLGGQFATDPSGLAVLVAQCQAQPVALVVLEATGGYEAPLAAALATAGLPVAVVNPRQVRDFARALGRLAKTDRIDAQVLALFGARVQPAPRPLPDEATQELEAVLLRRRQLLEMLHAERQRLPRARGREVRRNLRAHIRWLEHSLIDTDATLEALIQASPLWRVQDHLLQSVPGVGPTLARTLLAQLPELGHLDRRQIAALVGVAPLARDSGTHRGRRQCWGGRPALRSVLYMAALVAARWNPVLRAFYARLRAAGKPGKVALVAVARKLLTILNAVLRDQKPWQTA

SEQ ID NO: 119231 - protein, 309 aa, unidentified
MDVVVGIDVSKDRLDVHVLPSGKSFAVANDDESLDGLAARLLSLKADVVALEATGGYEMLAAAALSGAGLAVIVINPAQVRAYANALGKRAKTDPIDAEVIAAFVAATKPAIRPLRDEENRALAALLARRRQILAMIAAEEQRTRMALAKEAQRSIKRLLAALRRELDSLDADIDDHIRTSPLWRVREALLTSVPGVGRVTARTLLAEMPELGSLDRRQVASLAGLAPWTRQSGKWKGKSFIGGGRATVRAVLFMATLVACRHNPVLKAFRDRLVASGKSKIVATAAAMRKLLTILNAIIRDQKAWQNA

SEQ ID NO: 119232 - protein, 341 aa, unidentified
MKKNLFFIGLDISKADFAASIYKTPGEPIVTKEAIPNDRKGFEMLLLWLNDYHIDKKNCRICMEATGVYSQAISYYLLFQGFPVSVEPPLKVKRAFDPVGHKTDPVDSKQIAEYAYRFQDELTSWQPRDEILEKIRQLLSVREQFTKQKVALKNAIQAYHKQRVQVALIKKAHQETLAQLEKQIARIDKELAKLINQDPGTFQKVNNLKSIPGYGMLLAAHLLVITENFTKIQNYKRLAAFIGIVPYKHQSGTSVCKRAKIRHFGPMPSRKLLRLAAQSVATHDTTFRRYYLRKVAQGKAKALVLNNISNKLLKIACTIIRNNTPYIKDYRSIHPMYLKSA

SEQ ID NO: 119233 - protein, 461 aa, unidentified
MSANKPTGAKKKSVPKKVDWKALEVVHPDAAGIDVGGSEHWVAVSPDRDPEPVRRFGCFTADLREMACWLVEKGVRSVAMQSTGVYWMPVFEILEQQGLEVYLVNAQHTKNVPGRKSDIQECQWLLKLHAFGLLNNSFQPNDEIRIARTLWRHRGNLVAEASSVVQRMQKVLTERNVQLSNVLSDISGVSGMKIIQAILDGARDPWELAALVEPGVKATPEDIVKSLEGNWREELLFVLRQHVEFYQIYQKKIRACDLQLRKHLQSLGSKLDLQAQPLGPRPKGKKLSRNAPTFDLRTELYRITGIDWSQINGIDVLTAQTVISEAGADLSAFPSEKQFASWLGLCPTNQQSGKKILNRRTRKVVNRATVAFRNAAMTLVRSQSYLGAQYRRLRTRLGAPKAITAMARKLACLFYRLIKHGQQYVDQGTEYYETRYREQQIRALAKRAQKLGLRLVIPKTA

SEQ ID NO: 119234 - protein, 339 aa, unidentified
MKRTVVGIDIAKRVFQLHWVEIESGEIVSVQLKREKFLEHFANRRPCLIGMEACGGSQHWARELRELGHEVKLLSARLVKPFVGGNKHDAADARAIWTAVQQPGIRTVAVKSEGQQAVLALHRMRAQLVKFRTAQINGLRGLLTEYGEVMPQGRAGIRRDIPAALARIAERLPAVVIDTLREQYARVGRLDEQVQEIERRLRQWYSQDDASRRIAAIPGVGLLTATAAIATMGDAKVFKSGREFAAWLGLVPRQTGTGGRVRLLGISKRGDRYLRTLLIHGARAVMTHSKAPPEWARKLAERRPKNVAIVALANKMARTIWALSAHERAYQSGYVSQPA

SEQ ID NO: 119235 - protein, 372 aa, unidentified
MNNITVYVGMDVHKESFTLADYTIETEKSIHNRRTPADYKEVLKFLEYLRTIYGNDTNFICGYEAGCLGYTLYHQLTDHNVNCVILAPTTMLEKRSGKRIKTDKRDAELIAKCLGQHNYSPVHIPTAEDEQTKEYLRMRDDHKLALKKIKQQILSFCLRHNYRYEGKTNWTAAHLKWLKALNPEALYKEILVEYLLTYTTLCDKIERLDKRVEELASKDEYRESVKKLCCFIGVQTHTALSVLVEVGDFKRFASAEKFASYLGLVPGEDSSGDDKTRLGITKAGNRHVRLLLTEASQCYSRGSVGYKSKVLKTRQAGNTPQVIAYADKANERLKRRYYKMVLGKCKKHNVAKTAIARELACFMWGMMTDNID

SEQ ID NO: 119236 - protein, 377 aa, unidentified
MHKVRWMGLDVHADTIAVAVAESTGEVRSLGIIPNRPESIRKLVKKLGPVGALRACYEAGPTGYVIYWQLTALGVRCEVVAPTLVPTKAGDRVKTDRRDAAKLARSFRAGDLTAVWVPDAAHEALRDLVRAREAAKKDQLRARHRLGKFLLRHGRRPATAMSAWTERHLAWIRQVQFEHPAQEATRLDYLHEVDHAAGRIARLERAIDEAVQTAPPRMRAVIEALQALRGVALVSAVTIVAEVGDLSRFTRAPQLMGYSGLGPREDSSGPRTRRGGITKTGNAHLRRIAIEAAWAYRHRPAVSGALRKRQAPVSEAVKAIGWKAQLRLHARYRKLLGRGKCQQQVVTAVGRELLGFIWAIGVTVEREQRQVSSSMAA

SEQ ID NO: 119237 - protein, 375 aa, unidentified
MATIARLGIDTSKSLFQLHGVDEREEAVLRKQVRRGQFLGFVAKLAPTKIGVEACGASHYWARQLQALGHEVVLLPPQHVKPYVGRNKNDKIDAAAICEAMSRPRVRERFVAIKSAEQSAAQMLLGTRDGLLHRRTQLGNTIRGHAAEFGLVTARGLAHIKPLLERIAVDQAVPALAKELFATLGEEFTELGPRIARLDKKLKAFQRADELCRRLVEVPTIGPVIASSMVIKIGNPAAFRSGRRCAAWLGLTPKDHSTAGKMRHGGITRAGDEGLRAALVSGATAYIQQVKRGRTRPSPWLAQLLKRKPEKLVAVALANKTARIAWKLMTSGERYDRARAEAREGLGATQYQGSTPSPSLHPHTADHGASTMTGA

SEQ ID NO: 119238 - protein, 343 aa, unidentified
MNEAITIGVDLAKNVFQVHGVDDEGGVVFRRQLRRSQVLGFFKKQAPCLVGMEACATSHHWAREIAALGHEVRLMPPRYVKPYVKRNKNDAADAAAICEAVTRPTMRFVAAKTAEQQSVLMLHRTRELMVRQRTMLVNAIRAHMAEFGIVVRVGLPQVEALLAVIDDEADDRLPPLARTCLSGLAAQFMSLQVEIGVAEQRIHAWHRASEVSQRLETIPGIGPITATALAASITDPSVFKSGRELAAWIGLVPRQSSTGGKDRLGRISKQGDHYLRWLLVAGAMTVIRHAKRRGTANLWLAGLIANKPTKVAAVALANKIARVAWVLMRDGGTYRKPVAAAAA

SEQ ID NO: 119239 - protein, 462 aa, unidentified
MPERNDRESGESNRRQLQGLPVIRRNVAGVDLGSERHWVCAPTQDGNGREIASFRATTPELLRLAEWLKARQVESVAMESTGVYWIAPHEVLEAQGLQVLLVDTRQLARVPGRDKKTDPSDCEWIQRLHSCGLLRGSFRPEEAVCMLRTLVRDKANLVAESGDWLRRMQKSLDQMNVRVHRAVSDIDGVTGMAILRAIAAGERDAQKLAQLRDRRCNKTQQEIAEQLTGHWREDHLFSLQQALKMYDAVQERIAAYEQEILRQLEEMEEPGQRGQTAPQLNNANKTQAIKKRGQEAKRQALYRMSAVDITQIDAIGVETVEVVLSEYGPDLSRFPTEKEFVSHVTLVPRVPRSGGKPIKKKKRNSASTRVAAALRMAALSLRHSQTALGAYYRKLAQRLGGDVAVFATARKLATLIYRLLRWGQPYVDEGAAAYEHRYLQQRIKSLTAKAKELGYELTAVNA

SEQ ID NO: 119240 - protein, 352 aa, unidentified
MRKYYVGLDVHKVSIAIAVLDAHGKLITRTVIETSTEAVRDFFRNLGGEIHLTFEEGNHAAWLYDIVEPLVRRVVACNPKHNRIEGSRNDRVDAVKLAELLRLNGLKPVYHGEHGTRTLKHLMRCYECLVKDITRVKNRLKALYNSQAIKQRGRELYHASKRQSWLEKLPNQGQRTRAELFFQQLDELKVIKRAAQKAMVAESKRHPAYGVLSTVAELGPVRIAQIIPTVETPWRFRSKRPFWNYSGLAVVTRSTADHEVENGRVRKRKKQVIQTRGLNQDYNRRLKSIFKSAATHASHCGAYREYYEGLLKTGMREEMARLAVARKLSATVLAVWKSGESFDAGRILRKAV

SEQ ID NO: 119241 - protein, 317 aa, unidentified
MEDILEVSCGLDVHKEMVVACIIKKQERIAKTKNPLSIELKTFKTLPDDLHHLKRWIEDHNCHDVAMESTGVYWCPIYDVLETTFEGKINLIVVNARHMHNIPGKKSDIKDAQWISQLLRAGLLKGSFIPDRSVRDLRDLTRYRKHIIEDISTQKNRIEKFLQRKGFKISTFLSDIFGVSGRSLLELLINNGRITQDDIRNELRGTAKRKTEDMLYALNGQLDFYGRKYLSRMIEMLDSLVNHIKDIEADIDCAVSEFDPQIELLQSIPGIGKTAAKAIIGEIGADMSSFPTPTQFCSWAGLCPGENESAGKKKVHA

SEQ ID NO: 119242 - protein, 342 aa, unidentified
MTELSAIGLDIAKRVFQVHGADAAGRPVLRKKLKRRQVVAFFTALRPCAVGLEACATAHHWAREIGALGHDVRLIPPQYVKPYVKTNKNDVTDAEAICEALMRPTMRFAKAKNAEQQSVLMLHRARELLVRQRTMLINALRGHCAEFGITAPQGISRAGALISCIDEGDDRLPPLARRALASLVAQIKAIQAEIAGLEKELLAWHRSSEASQRLGVIPGVGVITATALVATVGDASQFRSGRQFAAFLGLVPRQSSSGGRDRLGRISKRGNGYLRRLLVHGSRAVLRWTRSRPQRRSPWLEGLLDRRPTNVVLVAMANKMARIVWAMLSRSEAYEPNRLATA

SEQ ID NO: 119243 - protein, 413 aa, unidentified
MEVLYPRCAGLDVPKATGVAAVRLVAGGKVAREVRTFATTTAGLLALAAWLGENGCTHVAMEATGVYWKPVWHVLAEGGFDLVLANAAQVKNVPGRKTDVNDATWLAELLAHGLVRASFVPDAPTQELRSLLRTRKQLVRERASHVLRLQKTLEDANVKLDAVLSDLLGRSGRAMLEALVAGETDPEKLAAFAHPRLAATPERLQEALRGRVTAHHRFLLRLHLDQVDALEAAIGRIDREVEERLAPFSTAVDLLASIPGVGALAARVIVAEIGLDMGRFPTAGHLVSWAGLCPRNDESAGKRLSARLRKGAPWLKTILVQCAWAASRKKASYLQAQYHRLRARRGARKAVCAVAASILTAAYHMLKDGTVYRDLGPGHLDRRSRETQARRLVRRLADLGYAVELAPLEPAPA

SEQ ID NO: 119244 - protein, 386 aa, unidentified
MIEAVIERCAGIDVGKKFLIVCVMTGPVEAEPKIEIRKFGTIVAELELVRDWLIREGCSHAVMESIGSYWKPVFNVLEDSVEVVLANAYDVQNRRGHKTDPNDSRWLAHLLRHGMVRPSFIPERAVRELRDLTRRRRQLVGEKARERNRVQKILEDANIKLGDVLSDVLGLSGLLMINALLEGVMQAEEIAQLAQRKAKQKIPDLIVAMRRNRLTNHHRFLLRHALRHLDFLVVEIEALNIEIRSRLSTEQFREQHALLQSIPGIKEEASAAILAEIGPNMAQFPSDAHLASWAGICPGNNESAGVRKTGHTNRGNNWLRSVLTQCAWAASNKKNSMLQSFYSRLSPRCGRKRAIVALGHRLLRVIYYVLLRSQPYQESNVRLTSA

SEQ ID NO: 119245 - protein, 352 aa, unidentified
MVYGAIDLHSRFRQIRIVTADGAVVRERRVVTSRSPLRNAFAAVGAVRIRVEASTESEWVAQVLEAAGYEVIVADPNSASMDGTRHRRIKTDTRDVAALSDACRLGVFRRAHRVAAAQRTLRQELAVRRQLVRRRTGLIAHLRARLRQDGFRLGSGSRTTVHERVARLERPASLRGSLTPLLETFAALTPIIATTTRRLTTTANADPVAVRLHTVPGVGPLGALTDRATVDVVTRFPSAGHVSSALGLVPREDSSGERRQRGHITKVGPSEARTMLIQAAWTCWRSRTARTTPLRQWADRLPPDAARASRWSRSRAGSVASCMPSGGMTRCFVSRRPAQRRPDRCGFARATR

SEQ ID NO: 119246 - protein, 430 aa, unidentified
MEIVYPRSCGVDVHKSFIVAVICISESVKPKYIKKRFSTFNNQLIQFRDWLIENNCQNVCMESTGKYYIPVYNALEGHISNVVVANPKWVKAIKGEKDDNKDAKWIADLFKFGIVRSSYIPEKDIRVLREFTRYQYKLVNMRSSEKNRFQNALTTGNCKLDLVFSDVFGKSASAIVDTILSNDPYTSEDILSKVHARCKASNEDILSAVEGIQLNQFQKARIRIVQKHMEYLDSLLDEIQHHIDLMVANYEEYIQILCTIPGINRKSAITIISEIGTDMSQWSSHRKLAAWAGLSPGCNESAGKKKSVKISKAGVYLKPCLVQVAHAAVKDKECEYYADKFNKISKRRGKKRAIIAIARKILIAVYHLLKTGEVFNPTDMADIETTKKQRIEYIKNNLRNAFNQLSRTGLSEAEILQLVRKESTNSPQIE

SEQ ID NO: 119247 - protein, 405 aa, unidentified
MAVMIGIDPHKASHTAAAIDKTEKVLGELTVRSGANQVERLVGWASQFEERTWAVEGAGGLGYLLAQQLVAAGEHVVDVQPKLAARVRLLSNAATNKNDPNDARSVAIVALRSSSPVAVHAEDHTAVMKVWSKRHRDLASHRTRLACRLHAVLCELVPGGYSGEIYASRAARLLDELEPQGAVATARHELAVELLADLSRIDEQKRETKKRIAQAVSASKTTVTEIFGVGPIVAATVIGNVGDVARFASSDRFAAYNGTAPIEVSSGPRRIYRLSRRGNRRLNHAIHMAAVTQIRNRHSEGRAYYDRKVAEGKTGKEAIRALKRRLSDAIFRQLQIDAQRSRETTVMGPGGQAGNDSVASVTGSHPESRLFGEATPEPGTTLRPAAIAVRPRRSGTPSRRVKRAS

SEQ ID NO: 119248 - protein, 343 aa, unidentified
MERYVGLDVSLKQTSICVVDQTGSIVHEGVVDSDPEAIAAFVRSKAPGTVRIGIETGPTTTWLWTELNRLGLPVICIDARHAKAVLKMQINKSDRNDAAGIARIMQTGWFKQVRVKDLDSHAVRALLASRALLVKIKRDLENQVRGLLKNLGLVIGRAKFNVFAVRAEGLIEDRPELVAAVGPLLKARQAIEQQVDDLDRKVRKLARHDAQVRKFMTVPGVGPITALCFKATIDDPTRFKRSRSVGAYIGLTTRRHASGEVDWSGRISKCGDAMLRMYLFEAAGVLLTRVVKWSALKAWGTKLIKRNGLRKAKVAVARKLAVILHRMWIEETEFNWSTKKAAA

SEQ ID NO: 119249 - protein, 371 aa, unidentified
MKSILSVGMDVHKNSFSLCAYDGYTGEIVSESTFASDVKLVIKFIETLKSRYENDVEIKCGYEAGCLGYSLYKSLTARGVDCVILAPTTMQVSAKNKMVKNDRMDALNIAKNLASGSYKAVYVPDEEDVEIKEYIRMIHDFKKELKRVKQEICAFVLRHGYQYDGKSKWTIRYMNWIRELEMSEIQRETLNEYIAEMENLNNKIDRFMNRIDEMYQSERYHEKVSKLRCFKGIDTFAAMTIQVETADFERFPNAKAYASYTGLTTGEHSSGDKNNRIGITKQGNTVIRKTLVECAQSLVKGNVYAKKSQRLKSRQKGMDVNIIAYADKATERLKKKYQKLIERNVPRNKAIVAVARELACFIWGMETGNIH

SEQ ID NO: 119250 - protein, 338 aa, unidentified
MDHFVGIDLHSNNSYIAVIDTDNNRTFKKKARNNLSEIIKLLAPFKQQIKGIVVESTYNWYWLVDGLIDNGYKLHLANPSAIKQYEGLKHSDDITDAFHLANLLRLSILPEGYIYPKHERPLRDLLRKRIHLVHYRTALILSFQNLVARNLGSKMHVSTISKMTEEDLEDLFEDDYLILSAKASISTIHFLRSRIVQLEKVIAKAAKLKSEYKLLKTVPGIWNILAQMIMLETGPIERFKKVGNYASYCRCVQSNRFSNSKSKGKGNRKNGNKYLSWAYVEAANHALWNYEYVKKYHQRKTAKTNNVVAIKAIAHKLARACYYIIRDQKEFDPGKAFA

SEQ ID NO: 119251 - protein, 428 aa, unidentified
MNYNTQNAKIASITEKTLIVGIDVGSETHYARAFSWRNYEYSKKPFAFSNDEAGFAAFKEWMDDIAEKHRMEVIIPGMEPTGHYWLNLGAYLQEQGMKPVHVNPHHVKKSKELDDNNPSKNDRKDPKTIAGLVNEGRFSYPYIPTGIYAEIRNLSNLRIQTQEEITRIKNRMARWFSIYFPEIKDVYRDPDAVSGLMVIKQAPLPCDIRELGVEGVNKIWRDARLKGAGIKRATTLVTAAEHSIGNTEAPRSARKEIRNLLDDYEGYKKRMDELMEEIEKTLSEIPYIDKLMEINGIGIKTVSCFIAEVGDIGRFDNPKQVQKLAGYAIVADSSGKHNGESRISHRGRKRLRYALYEAAISVIGKNKEFKEIHSYYRTREKKPLKKMQSVIAVACKLIRIFYTILTKGVDYDGQKMLNDIVRPEIQPA

SEQ ID NO: 119252 - protein, 360 aa, unidentified
MKKISKQNQQVKVAKPERSVGLDLGDRVIHYCVLNQEGEVMEEGRMQSSEPALRKHFADEAVMRIALEAGTHSAWVSRLLKRLGHQVLVANPRKIRAITGSESKNDRNDAEQLARFAAFDPKLLSPIEHRSEQRQQDLNLIHARGTLVRARTMIINVVRGLVKSAGGRLPNCSTESFAERTKAAIPASLSEVSIPLLKQIGLLTGQIDLMDKQIDKLSKKYPEISLLKSTPGVGPLVAACYVLTLDSPDVLGDNRQAGAFLGLRPRQSQSGDSDPQGRISRTGNTYLRSLLVQSAQYIVGRFGPDSALRRWGLKLAASGGKRGKKRAIVAVARKLAVILHSMWRSRIPFLAFPQQVTVVA

SEQ ID NO: 119253 - protein, 359 aa, unidentified
MQTQSNKLNFTGQKIFVGMDTHKNSWKISIVHEELLLKTFVQPPEPETLANYLKRNYPGADYFTAYEASYCGYWIHYRLTELGINSIVINPADIPTTNKEHVQKEDKRDSRKIARCLRNGDLMPIYIPCKKTIQDRTLIRTRYTLVKEMKRFKNRVKSLLLFYGINIPDEHNSYSGHWPKRLITWLEKLNFEEKTATYSLNILIKQVKYLREMLLDVTRQIRELSKTIDYEQNINLLTSIPGIGLITAMLLVVELENVCRFKSLDQLCSYVGLIPSTNSSGDKEMIGEITSRGHSTLRSAIIESAWITAKNDPALLMTYSKLCKRMEPNKAIIRIAKKLLNRIRFVLKNNKVYVKAIIK

SEQ ID NO: 119254 - protein, 398 aa, unidentified
MLSIGIDVSKGKSTVCGMKPGGEIVYTPFEIQHTREGMSELVSLLRSSGEEVRAVLESTGSYHCPVVAALLENGIFVSVINSLRMKRFCSQSIRRVKTDQIDAMQIALYGLAYWQELQPTRLPENTYRELQLLARQYYQMTSILIKAKVDFNALCDQVLPGMQELMNDHAGRHKLSDFVLRYRHTTHILEMGETRFRKDYCKWAEKKGYRNRERMAALIFATAQNGIPVLPNAPSTQIVITEAIRVLHTVEASRDAILTQMQALAKTLPEYSLVREMPCIGDTLAPRLIAEIGDVRRFHSKRALIAYAGIDAPPYQSGKFSANNRHISKRGNRYLRKTGYEVMQSYVMHKPANDPIFTFIEKKRSEGKSGKLAMVAGLNKFLRVYYGKVTELYRSLPQ

SEQ ID NO: 119255 - protein, 395 aa, unidentified
MILVGIDIGKNSHYYTIVRKEDGEILSEPSKITNDLKGFDQLVSCFRKYRKTDILIGMEDTGHYHFPLLKHLLDNGYTVALINPVITDLTRKANGEISKTDKLDTLTICDVLCSNRKDRKPYRISKVQRFDLYEQRCLTRHHHNLKEELNVYTNRLQKCIDIVFPEFNSLFSSKYGIVYMNVLKTYASAESIAKADIRSLRKCFEFCGRGKRISLTAEKLKAAAKDSIGISSVSEVIQIKHLIAQIELINEQLEEIDKKIEEFSRQTNSPILSIPGISHFSGTSILSELGDIDNFTNHRQIIKYAGVAPLTYESSQFKAQHTKISKKGSKYFRKTLYQIILSVIQQNKVFKDYYALKISQGKSHRCAQGHCVRKLLRVIFHLLKTGQRFDPSILC

SEQ ID NO: 119256 - protein, 339 aa, unidentified
MKNTKYFIGLDVHKQKTSYCVRDRLGTILTESEVATRYPELESRLKPYLATSMIGLESCTSYYALYQNFLRNGYHIKVANTIQLRQLITKNDKLDAQRLSEMLRLGTFPCSYIPEEKIQRLRSLLQVRHTLMEEKTRCNNRIQAFLDRNGIIMPDQEAFSKKWRHQLLQYIGSGDVSLELRYEYDHFIYLEKQAEHLDQEISGYTMKHWKNEYRLIQSITGFGPVLSCYVIAHILPITRFSSTRKLRRYAGVVPAFQESGDKKSKGHLPKTSSRKHLRWALIQAANAAGRTNTKLGRYYRKKKKQKNNAGIAHVAVASSMIDIIYKVLTTKKPYNPRIC

SEQ ID NO: 119257 - protein, 365 aa, unidentified
MKKINRVRARFNGLSVGLDIHKKFIEFCVLSRSGEQTSSGRIDSDRAAVEKLILMLRKKGALQVSLEACGCFVWVFDVLVELVGRECVHVAQPSRLHVIANSMEKNDSNDAWWLAYLLYEQRLPEAFVAEGALRDLRIATRELRAWTNQRSDLIRRFRSHLAQAGEVLKGKSWHASKKGRADAKELVERMNGERALALRVLLRQIQRLGRQVLYWRARVDALAVKLPAVKVICAEMPGFGPVIASTVVAELGSPDRFHNQKAYAKSTGLTPGYRESGGKGMQVGITRQGSSHARWAFTRAVIGCLRSKRDPWGVQIRKWIEQRAPYKPKRKLIVAAARKLAEGVWRLFALGEVFDLARAFPVRTT

SEQ ID NO: 119258 - protein, 422 aa, unidentified
MYRIAGIDIHKKMLALVVADVEVQGHYQFERIRYGSNPEQLRLLVAWLIEHEVEEVVMESTAQYWKPVWGTLERYWKPSCQKREGAGPMSGTLHLAQARSNRGRRGRKKDFPDAERLVKRLVADELVLSFVPDTEQRLWRTVTRRKYQLTRNKVRLQNQLEALLEEAHIKLSSLVSDLLGVSARRMLKAIADGARDPAALAALADKKLRATQAQLCDALGACLELQPVYRRLLKMFLEELQLIDHQIGQLDQEMAALLSQHQEPVQRLAEIPGLGVDSAQQIIAEVGATAATFPSGKHLSSWVGACPGEEESAEVSQSHRSPKGNRHMRRILNQATNAAVKSKGSIFEIIYRRLVTRLGHNQTIGAIAHRLCRLIWIILHRGVRYEERGPLVNTNSKRQRTTRMIRELRKLGYRVEPVGSAA

SEQ ID NO: 119259 - protein, 343 aa, unidentified
MSKPNPSMHSTVFCGIDVSAATLAVALHQEDQRFEQRVFSNTASGHKALITWLHKRKARVRVSMEATGIYSLDLAMALDLADGIEVAVLNPKLVYRFAQTLRRSKTDSADAQTLAEYSRRMPFTPWCAPSLNSLQLRTISRHLLGLTAEYTRQNNRLHAAEKSVTTPRCVVNGLKRSMVSLSRRILRFRREARQLVRSDETIQKRFELLIGIPGIAEIGAVQLLGELSSLSPNMSVRQWVAHSGLDPVHQISGTSVHKPSRMSRAGNRYLRRALYMPALVAVRLDPHLKAFYETLLSRHKAKLQALIAVARKLLHAIYGMLHSETSYDGNKLFPALLPATIPR

SEQ ID NO: 119260 - protein, 423 aa, unidentified
MSSDLEIAAFIGLDWADQQHVIRLRMAGSASVEAQLLDQKPETLQTWIGQLRQRFGGRPVAIALEQSRGSLLYALMNVDFLRLYPVNPQNLAQFRKAFYPSGAKDDPQDALLLLEMLEKHRDRLRVWVPDDASTRCLRLLAENRRKLVNRRTALTNQLTSLLKESFPQALDWAGPLDSLRACDFLQHWPSLQILQKTSTSRLRRFYRVHTRLDSQAIHQRLDQIRQAQPLTRDSAVLAAAELMIPALVRQLRCLIESIQQFDQQLKDRFQQHDDYTLFHSFPGAGPALGPRLLSAFGSNRNRFECAAEVQMLSGIAPVTERSGKSHWVHWRLACPKFLRQSFHEFAAQSILFSTWARAFYDQLRSRGTSHHAAVRTLAFKWIRILFRCWKNRTPYQEQIYLASLQRHGSPLCAALSPPTGANL

SEQ ID NO: 119261 - protein, 412 aa, unidentified
MEVVYECCCGLDVHAKRVVACLITRGRKEIRTFATMTDELLQLGDWLSSVGCTHVAIESTGVYWKPVFNILEGLLTVILVNARHIKAVPGRKTDVRDCEGLADLLRHGLLKASFIPPPEIRELRELVRYRHTVVTEHTAVANRITKLIESANIKLGQVASEVLGRSGQLMLRALAAGETNAETLAEFAQGKLKNKKAALRRALTGSLTPVQRWVLTELLTRAEELEAARGRVETRLNEAVATCTDPFVPEAVELLESIPGIGQRTAQTIVAEIGVDMSPFPSANHLASWAGVCPGNHESAGKRKSGQPTKGNKSVRTILTEAAWTATRAKETFLHAKYHRLAKRMSKRKALGAIVHRLLVICYHLLKRRVPYAELGTAPLDEQQVARQRRRLVEQLVGLGLKVTIEEGATVS

SEQ ID NO: 119262 - protein, 333 aa, unidentified
MTTQLETITAVTAGVDTHRDVHMVAALDQRGAELGVQAFGTDPAGHHSMLAWLERFGPVELVGVEGTGTYGAGLTRFLQRNDIVVVEISRPDRQERRSHGKSDEVDAIAAARAAQSGKATAQPKTRTGNVEAIRALRMVRRSATRDRTSAINQMRALVVTGPDDIRETFRGLTTKKLVSVAARLRPSDPTTVHGATKFALRELARRVQFLNAEIKQVNDILSPLVTATAPELVARHGIGIETAATLLVTAGDNPNRLHSEAAFAHLCGSAPINASSGLIKRKRLNPRGDRLANEALWRIVMVRMSSEPRTRAYVQRRTIEGKSKREIIRCLIG

SEQ ID NO: 119263 - protein, 402 aa, unidentified
MYSSFVGIDIGKWNHQAAFLEVSGKETARSLAFQNTSEGFQSLLDSLAPFDKGQTIIGLEATGHYWLALFAFLVDNGWTVKVINPMQSDALRNMNIRKAKTDRKDCVVIADVLRFGRYTETVLPDEDLLQLRELSRCRVAHVELLGDLKRRVLGILDRIFPEFASCFSTVFGAAPTELLQECTDPEELADYDVDKLIKLLEKESRGRHSREKAEELKAKASRSVGTRFGRDALKFELKMLLEQLDFIKGQVKEFDKFLKKLMKNHELIYTIPGISVTLGSAILGEIGDVKRFGTPQQLQAFAGMDPSVTQSGNFQGTQGKMSKRGSPYLRRAVYLAANAARRFDPVFKEFYDRMIARGKHPKQALAAVGTKLLRVIHAVMTSQKPYNPQKLLPPAAISQLNP

SEQ ID NO: 119264 - protein, 351 aa, unidentified
MDTIGLDLHQRESQLCICDEDGTITERRIVTSRERFTAVLGDRPRTKILLEASTESEWVARHLESLGHEVLVADPNYAPMYATRSRRTKTDRRDARTLMDACRTGAYRLAHRLSDPRRHVRAELAVRDALVRTRTRYVALAKTLVRRDGLRVASSESHLVAQRIRALSLSPALTAELQPLFTVLAPLNEQIAAADGRIATLAATDPLVARLATAPAIGPVTASAVVATVDDITRFRSAHQFDAYLGLVPGERSSGEKRHVGPITKAGNSRGRWLLVEAAWRLLRTKSAEAAALRTWAHGVAARRGKKIAVVALARRLAGILFAMWRDGVPYVARRIRSPRIAVAEVTARAG

SEQ ID NO: 119265 - protein, 358 aa, unidentified
MATTTAKTATAAGPILAIDLGKYKCVACVYRAAADHSFRAIDTSVAEVERLIRRTRPAVVVIEACSLAGWVHDLCEQVGVRCAVANTGAEAWKYKHAKRKTDRDDALRLAQLFALGQLPEVVVPAKAVREWRALIAHRQALVTQRVAAQNRVRSILVGQGLPAPRGAKAWTVSGLAGIAQLARPLAECAPDELWRGLLDLALTAYRQAEDLVAAAEAKLDALGKADERVRLLDTMPGLGPRTAEAVVAHLGDPKRFRSGKQVGAFGGLVPRQYQSGEDDRRGRITKRGPAVLRKLLVQCAWAMLRYNPWARAVYDRLSRGRARKKQAIVALARKVLVRCWAMLRDGAAWRPDPAPAAA

SEQ ID NO: 119266 - protein, 352 aa, unidentified
MNYVGIDWAYGRAAWCAKTESGEIKGEGLIPADEDGLARLVLELGTEVKGCVEMMSGAVWVRDQLELAGWQMEVAHARKVRDVAPLACKTDKVDARVLAELCRRDLVPALWVPSEEDRAIRELLRRRAHLIKSRTSHRNRIFGLLTQFGLRISLKRLRELDASELLTRRGVPAVWRASIASHLEEIDHLDRLVASIDREIGPIASADPRAKLLATIPGVGPLIGLTFASEIGDVSRFSAPSKLVGYAGLAPRVSQSGERSATGRLSKAGSRTLRWAAVEAANQAWRSSNPFHEHYLRVAARHGKNPAKSAVARKLLITSWHMLSRGQVFQPRRPSGAENTTAAASSLRFLAA

SEQ ID NO: 119267 - protein, 426 aa, unidentified
MLPRRDGADRKGKGVLFIGDDWAEGHHDVVVQDGAGNTLARRRLSEGVEGIARFHELVASCWGEDREPDPARVVIVIETDRGPWVKALAAAGYRVHAVNPKQAARHKETIAVSGKKDDFFDAGALADMGRTRAHQIRELAADSDIAEAVKIAARAHQKLIWERTRHLLRMRSALREYFPAALEAYSALTLAGADTLELLAKAPDPASAARLTLTQIAASLKRAGRRGDLAQRARDIQAALRAPHLAQPAVITEAYAASVQAGAAVITALNQQVKAMEAKVSGLFRRHPDAGIYLSQPGIGDVTGARILGEFGDAPGRYASAKARKNYAGTSPLTIASGKKKAVHARYIRNRHLTDALHAQAFTALTASPGARAYYDQLRARGTGHDDALRRVASRLAGVLHGCLKNGRLYDEATAWSHRARPTHAA

SEQ ID NO: 119268 - protein, 377 aa, unidentified
MNRIIKIGMDVHTTNYTLCIFEPSFEHNGTVHCITQVKPEVKNILRVIETFKNKHPEESFKITCGYEAGCLGYSLYHDLKSKGMECVILAPTTMKVEKGGRKIKNDYRDARMIAECLAYGGYSAVHVPTQLDNSVKEYIRMRDDVQSNLKSIKQQIIAFMTRNGKSFDGKSYWTQKHLSWIKQTTFNEPILKETLDEYMIEYSRLKERVETLDKRIEELSTKEEYVEKVKQLQCLIGIKTHTALSLIVETSDFKRFRKGDMFAAYLGLIPGEDSSAEHENRLGITKAGNRHLRRLLVEAAQGYTRGQIGFKSKALKERQAACDHEVIAYADHANERLRRKYYRMIGRGKKYNVAKTAVARELACFVWGIMTNHMEVY

SEQ ID NO: 119269 - protein, 375 aa, unidentified
MKRRPSNDKVVAETKTKPRKERLMNNIKYIGMDVHKATTVVAVLNHLGKVISEAIIETKGSTILGFLKGIRGTLHVTYEEGNQAAWLYDLICPHVASVQVCNPKKILVQGSRADKPDARRLAELLRTGGIQPVYHGEHSTKPLKELAQSYGTIVHDSTRVKNRIKALFRGRGIACSGTAVYDQEQHEQWLNQLSLPALRLRVSRLFRQLDFLTELRAEAEKDLVAETRRHPAAKILQSIPGIGPVRAGVIIGFVITPYRFRTRKQFWTYCGLAVMSRITGEYVMVDGRVRRSEKLPLVRGLNHNYNRSLKEVFKGAAATAAMGPWKSHFDAMVANGTEPSLALLTLARKLASTTLVLWIKGERYDEHKIKKSHAA

SEQ ID NO: 119270 - protein, 347 aa, unidentified
MKIIRVGVDLAKNVFQVHGVDSREHVVWQKRLRRSNWLAELQQHVPEGAEIGMECCGGAHHWGRELVARGYSVKLMAPQFVKPYVKSNKSDRNDAAAICEAMSRPSMRFVVLKSTEQQDIQAVHRVRAELVKQRTAKANQIRGLVHEYGLTAPLGVHALRKALPCWLEEADNGLSSRFRRLLAGLGDDLRHLDARVKEHDDELAVMVKEIPAAQRLTTLNGVGPAIATALVAALGSGEGFTRGRDFAVTLGLTPKHQGTGGKDRILGISKRGDAYLRTLLIHGARSAVYAAKGKADPLSRWINALLERRHANVVIVALANKTARMAWALLRHDREYEANWSNAAAKA

SEQ ID NO: 119271 - protein, 486 aa, unidentified
MAKRKKSTFERLQSNRLNRQQRKELQRQFDADSVELAIVHAHAAGIDVGNASHFVSVPPDRDQEPIREFGSWTEDLRRMGRWLKSCGITSVVMQSTGVYWIAVYDVLEQEGFEVYLVNARGTKNLPGRKSDVQECQWLRKLHTYGLLRKSFRPPDQIREVRTLWRLRGRVLEDASRAVQHIQKALTTMNVQLANAISDVSGVTGMSIVRAILQGQRDPHELAKLRDPRIRASEEEIAHSLEGNWQRDVLFELQQVVEGYDFHRQQLATIDTELQKYMAALPTRAPVGEASVEVSKLSAKQRKKLKANRKSKDNRPTFDLGAELTRLMGVDLRLIDGIDVMTVQTIYSEVGADLGAWPNEGAWTSWLELAPRNDITGGYVIKKKKRPSNNRVATALRNAAESLVRSDSYLGARYRHLTGRLEGLKGVKAMARYLACLVYRLLTKGRAWVDRGVAYYENKRREREMVSLHRRAAAAGMQLVPIALKNS

SEQ ID NO: 119272 - protein, 341 aa, unidentified
MKDTMIGVDLAKRVFQLHGAAMTGEVKFRKKLTRDQFRVFMAAQPAALVVFEACGSASYWAREMEALGHEVRLIAPQYVRPFLKRQKNDAADAEAIVIAARQPEMRFVAPKTADQQAKAVLFRSRERLVHQRTELVNALRAVLYEYGHVFPVGICHLKRMEAALEDSHCDLPALVIAECQDLLAQIAEKTERVEEKTKTLKVLAAETDTARRLQTMPGVGPLTALAVEAFAPDMAQFKSGRDFAAWLGLVPRQHSTGGKARLGRISKAGQSDIRRLLIIGAMTRIMGRARHKVPTESWLGRKLARKPKMLVGIALANKMARQIWAMLTKNEDYRDPSLAAA

SEQ ID NO: 119273 - protein, 319 aa, unidentified
MEQLAYKIYIGIDVSKAKLDIKSDEKSQAFTINNQKKDFKQLNKYFPTNKQTILVVLESTGGYEKPIVKWLLSKGIPVAIVNAKRVKDYAKATGQFAKNDKLDAAIIRDYAVTFAKKLHLEEMKGKLEEKIEDLMRRKKQVTSLRAKEKQHLASIQNAEMKRSITRAVKFYNKEMDKIEKKLLQVAAEDESIQARFDLLVTVKGVGLTTAFTLIGELPELGRVGKNQIAALVGVAPFCRDSGTMKGKRTIWGGRAQVRTALYMAALSARRYNPAIKIFYDRLIAQGKPKKLALVACMRKLLVIMNVMVKNNEPWHTEMI

SEQ ID NO: 119274 - protein, 345 aa, unidentified
MQYDAGIDVSLEQSSVCVVDAAGKIVKEAKVATDPHVLVTFFKGLGFPVTRIGLEAGPLSHWLYAGLTQAGFVVVLLETRHVKAALSAMVVKTDRKDARGIAQLIRMGWFRAVHAKSASSQEIRALLTARRLLLDKLRDVELSLRGILRGFGLKLGKVTQRGFETRVRELVANHPMLQQITRSMLLARATLQREHNTLHKALLKIVRRDRVCQQFMTVPSVGPIVAITYKTAVDDPHRIKKSKGAGPLFGLTPTRYQSGETDVIGGISRIGDAMVRAMLYEAANVLLSRTMRFSALKRWGLAVAKRRGMKRAKVAVARKIAVVLHRMWIDGTSFRWSNQKAAAYA

SEQ ID NO: 119275 - protein, 309 aa, unidentified
MDARHVGIDVSKARLDVYVRPGGEALVVTRDDKGLAELVERLRAIAPRLIAVEATGGYETVVAAAIGGAGLPLAVVNPAQVRHYAQALGKRAKTDPIDAEVIARFAEATHPEPRALPDEATQALAELVTRRRQIIGMMVAERQRATRLPRRLRKSCERVVRMLEKELAALDIDIDTTVRGSPAWRATEDLLASVPGIGSITARVLIAELPELGRLDRRAVASLVGVAPFTRQSGQWRGKSFITGGRRSVRAALFVATMAAVRHNPAIRAFRQRLLAAGKPKMVAMIACMRKLLTILNAVARDQKPWQPA

SEQ ID NO: 119276 - protein, 372 aa, unidentified
MGHHTEAFVGIDTSKSRNAIAIADDGRGGEVRYLGELAATEAAIRKLVAKLAAKYCHLTFCYEAGPTGYGLYRLLKSLGHECLVVAPSLVPKKAGDRVKTNRRDAVSLAKLLRAGELTAVWVPDERHEAMRDLSRARQAVKKDLQGKRQQISSLMLRLGRIYPGKTTWGPAHMKWLMAQKLEHREHRIAFEELLEGIRQESERVERLENAIREVVPEWSLAEAVVALQAVRGIDLIAAVGVLAEIGDLSRFQNPRELMGYLGLVPSENSTGDKVKRGGITKAGNGRARRILVEAAWSYRYPPRVSRDKQPKVDAAPRRVREIAWKAQTRLCGRFRSLERKGKRRTVIATAIARELSGFIWAINRERMAHRQA

SEQ ID NO: 119277 - protein, 336 aa, unidentified
MTIIRIGLDTSKHVFQIHGVDENEKPVLRRQLRRSEVEKFFAQLPPTRIGIEACGASHHWARLLRGLGHAVLLMPPQYIKGYVKRGKNDAIDAEAICEAMSRPTMRFVPVKTAEQQAALTMLGVRDLLVKQRTMLMNALRGHAAEFGVTAAKGPNKIVELLQRLATGEGVPALAREMLGMLASQLEAVNGKLKAIEARLVAWHRQDQTSQCLATIPGVGPIAGVSFALKIPDARAFRSARHFAAWIGITPRENSTAGKHRPGKISHQGDESLRRLLVLGATAVIQRAKRGRVSPWLLGLLARKPKKLAAVALANKMARVIWAMMVSGEVYRHPQET

SEQ ID NO: 119278 - protein, 318 aa, unidentified
MAEVNAAIDVGKHELQIALGSEGELFREPNQPRGVKRLVQRLNEAGCVRVLVEGGAYQSVLVAGLRAAELPVVMVNPRRVREFARSTGQLAKTDRIDARVLALYGERIAPPVRELPAEQNQELRALWVRREQLIEMLVMEQNRLEHVPPKAKAVAHDLRAHIDYLRKQIKQADEDLDRTVRNSPLWDKYELLTSVPGVGPVLSVALLSDLPELGRLNRAEVAALAGVAPFNYDSATLRGQRRIEGGRARLRRVLYVATVAAVRCNPVLKSFYQRLRAAGKPAKVALVAAMRKLLTILNRMLATKTPWSPPHVPSKQPV

SEQ ID NO: 119279 - protein, 403 aa, unidentified
MKHVIAFDISMGKSYMVIYNAQKQCVFESEIKHSKPEFKKLQEKIHELTDKTGELPKIVFEATGIYSRQLERFMQDNQYTYCLLNPLEAKLQCDSLRIHKTDRSDAHRLALTHFTATRRVFAGTDNLFYQLKSLSRLYSELDSELSIIRGRMHKVIQLTFPELERMFTSKSDLFLNFVQLFPHPDCILGLSKTIIKNRIRANTNKKISNITAEKKAIQILEIAKTSYPAVSQNDVLCDQLKLYARRYQELLHQKECCINKMVYIAEQRTEYDIILSLPGIGPNTAVRLMAEIGDITRFNNNKQLNAFAGIDIRRFQSGKTFFKDKINKRGNKHLRKLLFLIIQNMIKQRRYGQNHIVEYYDKLKTQPYNKCHKVASIACVNKFLKLLFHLITHDIHYDYRLTA

SEQ ID NO: 119280 - protein, 350 aa, unidentified
MEYIAFDAHKRYTLASVARPDGGLVREQRIPHERGALQQFLERCEHGSPVAVETIGNWYWIVAEIEAAGCVPKLVHARKAKLMMGELNKTDKLDARGLNRLQRAGTLPTVWIPPGEFRDQRDLPRTRMVLVRQRTQLKNRIHATLAKYALHDIEVSDLFGVRGRTLLRQRLDGLPPHTAYASRQLLEQVEALDGQVRGFEQRIQTTFKPTPVIQQLLTLPGVGLTLAVVIALEVGDVTRFATAEKLAGYAGTTPRVHASGGKTRCGPSRPDVNRYLKWAFVEAANAICLTRRHTPHRHVSRLYERLGRRKGHAKAIGAVARHLAEATYWILSKGEGYREPKASGRFVHGG

SEQ ID NO: 119281 - protein, 416 aa, unidentified
MKIVRPICCGMDVHKNIIVATIGITNKKTRITEYIQETFSTLNPDLLNLKQWLINHKCFDACMESTGKYWIPIFNILEDEINIYLTHPKYVKAIKGKKTDKKDSKWICDLFKHDLIKFSFIPPKEIRALREISRYRYKLVGMRSSERNRYQNCMTVSNIGIGSVFSDPFGRSAQAIMKEVLESDIIEDEKILKCVHGLCKNKDKILDSIKHCNIETDQRFKMNESMTHMEELQVHIDNCEIEMMKRAAPMFDQFMHITQLPGISTLSAILIISEIGVDMKQFESDKQLTCWAGLAPANNESANKKKSVRISKAGQYLKPLLVQCALGAIKDKEGYFGIKYSRIKKRRGHKKAIIAIARMMLVSIYHMILTGETFNPSDYESFRNPNPPIKQQVLTEESAIEFLKKSGFDVSKLTKP

SEQ ID NO: 119282 - protein, 376 aa, unidentified
MKKDSTEKLAQATAAKSSPRSTKRLQGRLTIGLDLGDRSSRYCMLNEAGETVSEGTVATTRKGLDQLFGRMPRSRVALEVGGHSPWVSRHLGRLGHEVIVANPRKVRLITQSSRKSDRLDAQALARLARVDPELLSPVRHRGEAAQMDLMRIRARAVLVEARTMLINSARGLAKSCGERLPGGDAKYVNESLIEPLSEPLRQALGPLLAQVRSLTEQIEACDQQIRQLAHERYPETGRLMQIRGVGPLIALTYVLTVDDPTRFRRSRDAGCYAGLRPRRRQSGGRDPEMHISKEGDPYLRKLLVQGAHYILGPFGPDTNLRRWGLRLAARGNKNAKKRARVAVARKLAVLLHHLWVSGEGYEPLRVSQPPVAAAAA

SEQ ID NO: 119283 - protein, 423 aa, unidentified
MQPIAGIDVHKQILMVVVRIERDGVMDYKKRKFVANRQEIEKSLGAWLQSYGVKKVVMESTAQYWRPVWYGLEALGFELHLVNPLQVKAPRGKKRDYRDARRLADRWAAGDLEDSFVPGQEQREWRAMTRARVHMKRKIGVNRNQVEGLLEQGSIKLTSVVSDVFGVSGWAILKLLAKGETNVEELVKEARGSLKQKETKLKEALGGKLDSACRLLLKQHMEQVELLRRQVDELNEAVAKAMSAHVPALVRLCKIPGVEMCAAQELLAEIGPKAATFQTAANFAGWVGLCPGSKESAGVNYSRRSAKGNHYLRRLLSQIAWAAIRTKESFFAGLFGRLKPRIEGRGAAWAVAHRIGKVIWLVLHEEVEYKEMGGGKVSLQSLQRKYRRLLKEFARHGIDPRSMTIETPDRVVLPQALPAGAHA

SEQ ID NO: 119284 - protein, 362 aa, unidentified
MRTDKYVGLDVDKSTIVGAIQDDQGKTLFTTVIEAEGTAIRGFFKSLSGKIRVTLEEGTQATWLHDLIYPLVEEVIVCNPRKNKLILSGNKGDEIDAEKLARLLRLGELVSVYHGENSARGLKELVHGYNNLVSDTTRVMSRIKAMYRGRGVKCSGHGIYRKAERQEWEGKLGEEAARKRAELLFKQLDNDQELRKEARKAMLKEATKQPGYKILVEINGLGPIRVAIIMGIVGTPYRFRTKRQFWPYCGLGVVTKSSADHEIVNGQIRRKKRPAMTRGLNRDYSRQLKYVFKSAAVEAIKTEPFKSINEEMIKKGIRPEMARLTIARKISAIVLRLWKKGESFNAEKIGKATLAAEVNAGA

SEQ ID NO: 119285 - protein, 529 aa, unidentified
MVRRKRRRSGHPTVLHVQRGSASLAERVRKVGADHFGILAVDCHKDRFAVLLANFHGQVLMDLRVVENTGPELASLVEEVKRQAERHGLADLVVALERTGRYYRPIQAVLQPHWPILMVHPFATKQLRQPADPGNKTDRTDLLAMVRAVQVGFTTADADLPARWAEWRLVSRWREDLIRKRAETRVQAQERLEALLPGYTRCFKEIWDAPAALAIAVGYPSAAAILEAGSDGLRACLGEAHRLARAKTVARALDWARQASPADPAAELNHELFCEQIKLLCAMEPAIYAQEMRLFDYLVDTPFVLLTSLPGINVASSASYAAELGPLEHYLGPKKIAGRAGLYPSRSQSDQTDHANGPLVTHRNARLRDAILEIAHNLIQCNEYFKAWARDRRDRGWSDKRLHVAVARKFTRISYSMVGGRMVFWHPSSAGRDAILPKLYRFGIKQGIAPEALRDALLRAARQIPPAFHKAEAETLEPLLPRQPQGPSRRARKPGPEPISAILVDVMRYLVLGRPVPEERSEPNRPVNP

SEQ ID NO: 119286 - protein, 433 aa, unidentified
MTTDSAAVRATKGKSMKPWIEITHYAGFDWARDHHDVVIVDRQGQIVADFRIEHSLAGWQQFRDQVKHYPALALAIETNQGAAVDQLLLLDCAIYPVNPLSAKSYRERKVPSGHKTDRLDAWSLAEALRLDGQQWKALQPLDPLTQQLQMLCRDEIGLIEQRTALINQLQQALVEYYPAALQAFEDWTQPFCWDFVLQFPTPEKLAAAGRRRWEKFLHTQKLWRPETASKRMEIFQNARQFCGSAAVTSAKSLLALSLAKLLNALQLQLDQYRQQIETLFKQHPDHDLFGSLPGAAQTLAPRLLGEIGGNPQRFEDTEALQCVAGTAPVSFQSGQIHRVHVRYQCNKVLRHTVHLWSQCSLRVCPWAEVYYRQKRAEGKSHACALRCLGQRLLKILWRMIQTRQPYDADLHARNQKQHGSWVLTLMKAAPESS

SEQ ID NO: 119287 - protein, 334 aa, unidentified
MQSVTLIGIDLGKHSFHIHCQDKSGKALLRKKLTRTKLIEFLAGCTSATVVMEACAGAHFMARRIADLGHEAKLISPQFVRPFVKSNKNDFVDAEAICEAASRPSMRFVQPRTEAQQAMRALHRVRESLVRDKVKTTNQMHAFLLEFGISMPIGAAVIKRLSTVLADNELPPYLARLLVRLHAHYLYLVEQISELETALEQELSRDETGQRLQTIPGVGPITASVLSSQLGDGKQYGCSRDFAASTGLVPRQYSTGGKNTLLGISKRGDKNLRRLLVQCARVFIQRIDYQSGKLADWVRAQLARKHSCVVCCALANKLARIAWAITTRQTVFER

SEQ ID NO: 119288 - protein, 363 aa, unidentified
MRECSPKASKGDWKEMMRYVGIDVGKTRCRAALMNEKGVVESEFFFENSNEGIANLTSVLTSEDRVVMESTGNLWLNMYDTLDAKSIRVVLANPLKTKVIASAKVKTDKLDARILAHLLRADLIAESYVPQGNVREMRALVRHRLSLVQMRTMVKNKVHAIIDKYGYRCEYSDMFGKAGTRWLRAQRMSDLDQLLLESHLGLIGFVNCQICRVGEVIRVRACGDQDVRLLLSLTGVDVYTALLLRSEIGPIGRFADYKRLVSWAGLAPSVHQSGNVEFHGRITKRGSSILRWALGEAAHVAVQRDERMRAFYLRVAARRGNQKATVAVACKMLKIVWFMLTRREVYGSVNKKRYEEKLKRLDA

SEQ ID NO: 119289 - protein, 428 aa, unidentified
MLEETQDTEEIIGRVAALDIGKAELVCCVRVPSAQGSGKRAQEVRTYQTMTRSLLVLADRLGELGVTRVVMEATSDYWKSPFYLLEAHGFDVWLVNAKDVKHLPGRPKTDKLDAVWLAKVAERQMLRPSFVPPPPIRRLRDLTRYRADLVAARTAEKNRVEKLLEDAQIKLSVVASDIFGVSGRDMLAALIAGERDPKALAQLARRRLRAKLSLLEEAFYGHFSDHHAFLLQTMLARIDQATADIATVEAHIDAEIAPFAQAADRLDEITGVGRAAAQVIIAEIGVDMGRFATPGQLVSWARFAPGVKESAGKKKGKATTGHGNPYLARVLGEAAAAAGKTNTFLGERYRRIARRRGTKKAIVAVATSANWRRWATRSPCSLSPDRHTSTHCLDPAPPGAAACLLTVDFRISFGSDGGRLADDSHEPL

SEQ ID NO: 119290 - protein, 392 aa, unidentified
MNRIVYIGMDVHTSNYTLCSLDPGYGVEKDNYFAEVQFTNNFVTNVVNYVSNLKKKLKDCEFVCGYEAGCLGYSTYKDLTKVGIKCVLMAPSTMAVQKGGKKVKNDRRDARVIAQCLAYQTYKEVYVLSEHDEAVRGYLRMRDSHNKALKRIKQQIIAFCTGHGLFSPTKSNWTVAHLKWLKDLKFNDPVEQEILNEYLSSLTFLSDKIKAMDVRIEELASEKQYCENVKKLRCIKGIETNVALTLLAEIGDFNRFSKPTDFASYLGLIPGEQSSGDKVRGTGITKAGNSTLRRKLTESAKGYWRGRIGIKSATFKKLEKELPKEVTEYALKANTRLQRKFFNMTHVKGKNMNVAASACAREMACFVWGLITNHYDKAPAVPKTDEELLDLN

SEQ ID NO: 119291 - protein, 390 aa, unidentified
MRERPVSREAAEELLGAGVAVTVGVDAHKRVHAAVALDAAGRELGRWEGPNSRSGWEELAAWASRWGPGAVRGWGIEGAWGLGRGLAQHLVAVGETVYEVNPRWTAAERRTARRPGKSDRLDALAVARLVWRESAERTLPAVGREDETAVLDLLTEERESALAEATRLRNRLHRLLGDLDPEYRAVLPGRLGLRSKAGLAAAERYEALPAATPLDHERAAAVRRLARRLRLALDQAEELAAQIRERAAVPCAALTQLCGVSLLTAAALAGILGPGRRFATEAQLAAYAGAAPLEASSAGVSRHRLNRGGNRKLNAILYRIALTQSRCLPEARAYLARRTAQGRSRREALRALKRYLVRAVWRLWRHCPLSHCAPTAAPLNTNAGPLSTAA

SEQ ID NO: 119292 - protein, 411 aa, unidentified
MEVVHARCAGIDISKKDAKVCVRIAGAGRRRTQESVTTWGSTTGRILELRQHLIGAGVTCAVMEATSDYWKPFYYLLEDAGFEVMLVNARHVKNLPGRKSDVSDATWLAQLGAHGLVRGSFVPPEPIRQLRDLTRTRTAVTRERARELQRLEKLLEDSGIKLSSVASDITGVSGRAMLEALIAGQRDPAVLADLAKRRLRLKIPALTEALTGRFNDHHAFLTRVHLDLIDGHTQAIEELTKRIEVMIEPFRGFRDLICTIPGISTGVADVVIAETGADMSRFATAGHLASWAGTTPGMNESAGRVKSTKTRPGNPYLQGALGTAAMSNAGNTHTYLGAKYRRIAARRGPIKAIVAVQHAILIAIWNMGTTGTLYDDPGPDFYTRLHPDKAKHRAIEQLQRMGYSVTLEPTG

SEQ ID NO: 119293 - protein, 314 aa, unidentified
MLEAVRIVNDVQRLASVMARAGHCPEVVLEATYGWYWAVDALQAGGANVHLAHPLGVKAFEYRRVKNDFRDAQDLADLLRMGRLPEAWIAPPPTRELRELVRHRAKLVGLRSRCKAEVHAVLAKCGVQVLMSDLFGVWGTELLDGLDLPAPYAARIASLRRLMDDVDFEITVFAGIIRGRLAHEPGYTAVQKIPGIGPTLGAVLVAEIGDITRFASAQKLTCWAGLTPKHHESDTHVRRGRITKQGSRLVRWAAIESVKTISKTSEVGMLRERVADRRGRNIASVAAGRRQLELVFYALRDGHVRALEHLPRVA

SEQ ID NO: 119294 - protein, 339 aa, unidentified
MKVTTLGIDLAKSTFRLHGVDGRGTVALRRQVTRKQLLPLLANLPACLVGMEACAGAHYWAREIEKLGHTVRLMSPHFVVPYRKSQKNDGNDADAICEAVGRPSMRFVPVKSAAQQDVQALHRIRFQLIKWRTALANEIRGLLGEYGIVITQGIRALRRQLPLILDDHENQLSGFFHEMLGEMAERFNLIDQRIRQYDLKVEHVFGQDERCQRLARIEGVGPLVATALLAAVGNAHEFKNGRELSAWLGLVPRQHSSGGRNVLLGISKRGDRYLRTLLIHGARAAVRVVERRRDHRSIAITRLKLRHGPNVAAVALANHNARVMWALLTRGEEYRPRCA

SEQ ID NO: 119295 - protein, 348 aa, unidentified
MSCYLGVDLHRNCFTVCTLKEDGQSELRKWSIHALGEFAQTVQATDAVAVEATGNTRYFCQSLKDRGCRLVVVNPQQFQVISRSVKKTDTHDAKTLAQFLARDLLPEVRQKDALLAEIASLLQTRDKLVKLRTTLKNKINNLLAGRGILIRRESLSSDKGLEQVLQASVIGLERVELEVLIGQIRHLNGSIQKLEAAIKKQGPKLPGYQNLKSIKGLGDIGSSTLLSTIGDINDFASEGKLAAYFGIVPRVTNSNATARSGRITKRGNKLGRTTLVQCALIARRYSPYLAHYYARIKAARGTGKAIIALARKFLGIIYRTLKNGWVFEDFPRFVIAPAEGKTSLLKQG

SEQ ID NO: 119296 - protein, 456 aa, unidentified
MEHYYLGIDVSKGYADFVILNDKKQPIEANFQLDDTFDGHCHLYEILYTFCENHPECTIYAAVESTGGYEDNWFNSLVKFQGTLNLRTARLNPLGVNANSKADLKRNVTDKISAQNVAEYMIAHPEKVSYQHHDQLASLRKQWGFINMLTKQSSQLFNQLEPLLYTANPEVLTYCKNGMPGWVLKLLMRYPTASDLSRAKVVSVARIPYISSARARELVAAAKRSVASSTDTITAQLIVETVKQILHLKKIIASQIDLMAKHCSVPEVDLLKSFIGIKDYSAIGLILQIQSAERFPSVKKLASFFGLHPVYKISGDGVGRFRMSKKGRKEPRQILFMVTLTAIRSNPLIRGIYLEHIQKGMEKMAAIGLCMHKILRIIYGMLKHNMAFYPEIDWKNRGKMYQSRTRLNKDKTRRYQDFDARAPISRRQNSKRKEQKQSHSDNNTNNGIIASAPLSP

SEQ ID NO: 119297 - protein, 402 aa, unidentified
MYNAVGIDVSKGKSTVAVLQPAGVIIRKPFNVNHTSSELDELAKYIGSLEGETRVVLECTGRYHEPVVKTLSEAGVFVSAVNPHLIKNFGNNSIRKAKSDPADAKKIARYTLDNWIELRQYSSMDNTRTQLKTLNSQFSFFMKQKVAAKANLIALLDNTYPGVNKLFDSPVRDDGSEKWVDYAYSFWHVDCGRKNGLKTFTELYQAFCKKHHYNFQPAKPAELFLASKDLIAVFPKEASYKLLIQQSIQQLNLASSHVEELRSKMNELASTLPEYATVMGMYGVGKTFGPQLIAEIGDISNFSHREALTAFAGVDPGVDQSGTHNSKSNKASKCGSNRLRKTLFQIMSTLLQTAPEDDKVYQFLVKKRAEGKPYYVYMTAGANKFLRIYYGKVKECIRNLEQ

SEQ ID NO: 119298 - protein, 358 aa, unidentified
MQIIGIDVSKDTLHVALAESKDARNDKVIASHKFANNETGFKLFMDWMKKKMADAGTVCLMEATGVYHERLADWLHSHRVKVVIELPNKIKHYAKCLNVKTKNDKVDAEIIARYGLHNAWTPWHPMTENLYQMRALLRQVQSMTKERTRCKNQLHALMHSAHTPGTVVENLMDIIANYDRLIGSYHDEVVRLAKEDEAFYARVEMVCTIKGVREITVLTVLCETDGFQLCQSARQAVSYAGLDVSEYQSGTILKDKRISKKGNARIRHALYLPAVVAGTTGGPMSLMNLYKRVKQKHPTAKKVAIIAVERKLLMLIYTLWKKQEPFDPEKDGKPPLHNAYKSTQAVGSQDSEGSIPCK

SEQ ID NO: 119299 - protein, 404 aa, unidentified
MTERIPRGWAGIDVGKGHHWVCLIDEAGTTVWSTKVVNDEAAILDAIAGVLARGEEVVWGVDVTGTMSGLLLALLAAHGQRVRYVPGRTVNQMAGAYRGEAKTDARDAYVIAETLRHRGDLAEVEVATSLVTELRLLVTHRTDLVGDRVRMVNRLRDVLSGYFPALERAFDYAHSRGALTLLTGYQAPQAIRRLGESRLRSWLVKRKVRSADQIAGAALVAAKAQQTVVPGQDVAATIVADLAAQLLAIGSRISELDTRITTTFRAHPQAEIIESLPGMGPILGAELIAAAGDLAGYANAGRLASAAGLVPVPRDSGRRTGNLHRPMRYSRKLRRVFYLSASAAMMREGPNRDYYLKKRGEGHKHVQALIALARRRVDVLWALLRDNRPFELAPPTRGPMARTA

SEQ ID NO: 119300 - protein, 316 aa, unidentified
MEEYIGLDVSMKETSVSIRRAGKRIWRGKCASDPRIIAELIRKRAPSVKRVVFETGPLSIWFYHSLRTEGLPAICIDARHAKAALDMAANKTDANDADGLAQLAEVGFFREVRVKGFDSMLTRTLVAARTRLVRITTELSNQIRGVMKTFGLLVPAGKGSTFEKNVRSLLADQDGLASIVLPMLEAWRGIRIRAAELGRQLVRDARQSQACRILISIPGIGAITATAFTTAIERPANFKKSRSVGAWIGLTTRRYQSGEVDYDGHISRRGDHHLRGLLYEAAAVILTRSSTDSTLRTLGRPKAFRGLDHLLVVTPL

SEQ ID NO: 119301 - protein, 341 aa, unidentified
MAVAGGLDLHRGQLTFDYVDTGTGESWRGRICPADRESLRGWLRRFHGVPDVEFAVEGCTGWRYVAEELQRAGITPHLAEPAETAGLRGRKRRAKTDWADARHLRDLLLDGRIPESWIPPGHVLEARALVRLYKDLLEERTSWQQRVHATLFHQGIPVVPKLGTADGQQRLDAAELSAAGRRAVQAGLRQIERLTQEMASLRRELARLSSRQPGCRALRRAHYGIGGLLSVAVWAELGDCRRFSSSDDAVRHTGLDITIYDSDGRRARGHIARQGPPVLRWALYEAALYASRPASPDYAYYCGVRDRIDGQRALLSVARKLARRCYHTLRDLGEDALAPAA

SEQ ID NO: 119302 - protein, 438 aa, unidentified
MHSLSYIERFRQIKNELRKNHDFLLVGIDVSKNSHVACIMNSSKYIYHKKFRFSNHLEGITSMLATCGEIKQKDNYTELVFALEPTGNYHKPLANYLYNLGYMVSYVSSVAAKENRKTINGRWRKNDPDDAYNIADLLNQGKIMFYDLEHQKQFKQLKPLIILRKKLQKRLCSIKAKIRNNVFAQCFPEIDSLYEQIDNPEVVEILKNFPTAEQIRNISFKEFYAKLAKTGRITTQKKQRIYNIWHKAANSIGCSLNATLELESKFILQDLELIKQQLRKIDSEVNSICGASEDYKLLLQIPGFGPIYTSIFLAVVKDLKKFNHSDQIIKLAGLDLEYSQSGKYHSKSRSSKKGNALLRYALCGAVNGALKHKDFKILFEEQLRRKGDNKDTRRILKVKLAVKMIRIAYAVLSKNEPFDIEKIKLNSVKEPVLIEREG

SEQ ID NO: 119303 - protein, 407 aa, unidentified
MISVGIDISKEKFTICALEQGSKIIWKPFDVSLNKRKVEEFLEKLEKLKEKVKITMEATGKYHLPILYELKDRGYFVAVINPLKMKQFCRALNFRKAKNDNIDAKQIAEYGLMYWKELEEYKVDEENYRVLKELNRSYQHYMDLRINQMNYIEQTVHQTFPGIKKLIPHNSGDFSKDKLLDFLEKWWHKDLVLEKTEEEFIEEYKTWAKEKRYHPNANKAKAIYKLAEDSISTQPSHNSKIETNIREGINLIKQINQILNSILSQMIEISEPLEEYQEAKKFSGISEKLAVQIVAEFGNLSKFKNKKSLISFIGIDAPPYESGNFKADQRKISKRGNTILRKVGYQAMKCMMSAKDPENEIYKYMVKKEKEGKAKKVCKFAGLNKFLRIYYARVMESKAEKKELKAA

SEQ ID NO: 119304 - protein, 429 aa, unidentified
MQESSSSAPAEGVAAYIGIDWADQKHDVILRAASEPAKVEHRRIAHEPEALMEWLGELQQRFAGKGKILVSLEQSRGALIYHLMGYEFLELYPINPSQLASFRQTFSPGGAKDDRPDAELICELLYCHRDRLKAWKPDDELTRKLAFLNEGRRKAVDQRTQLANEIKSQLKVYFPLALQVLDNDCSTALAADLLLQWPTLDSLQKQSAHKLRKFFYAHNCRQEQKLLEHLELIKAAKPLTRDLAVIEAAALRVQLLAQQLKSLLPYIARYEKQIAELFDAHPDSFLFRDLPGAGSAMGPRLLTAFGTDRKRFEHSMEISSLSGVGPVRRASGKKSGKHATVHFRNACPKFLRQSFHEFAACSIRYCSWAEACYQTQRNRGKGHHAAVRAVAFKWIRILFACWKQRVPYDPQRYQQTLQTRGSEYAKITA

SEQ ID NO: 119305 - protein, 345 aa, unidentified
MEQMYYIGLDVHKKKISYCVKDVSGRVYAEGAIPATRTDLDLWMKTLPQPWTAAMEATIFTGWIYDYLLPHAAALKVAHPLMLRAIAAAKKKNDRIDASKIADCLRCDFLPECYMASTEIRERRRTLRYRNLLVRQAVQLKNKIAVLLMEAGVSYNKQKLHKVGYFRDLLKTNPDINESLRSLLQLCRETLVRLQKIESALIRSLERDRLLAERVDRLMTIPAVGPITALTWALEVGDVKRFSSIKKAISYCGLCSAEKNSADVIKRGPLSKQRNKHLQCMLIEAAKLAPRNSPALALVYDKERQKGNANRATLAVARKLVAYLVAVDRSQKDFLVIENQNRTAA

SEQ ID NO: 119306 - protein, 331 aa, unidentified
MVQIYGINLGMSRFDESGSVRHLSGVKNTVHGISKFLLSLPSSAVLCAEHTGVYGDLLLRLCTLNRICLCFVPGYQIKHSLGLQRGKSDPLDACRIREYAERFYDLLRPCFYPGEEMSELQELYRTRSLLVESRKRLDTLSIGDNCKSSVSLAADHARRAVLAELNTQISGLDHEIEALIQNSSEFSRNYQILTSIVGVGPVTSCELIIKTENFRKLDTAKKCAAYAGIAPYPKESGKMKCGHKISPMGDKQLKTLLFLCARSAKEHNKEIRLYFLKKHKVEKKHFFVAMNNIANKLLRLIYSLIHKQQTYDRDYIQRDPRCVVISDTHKC

SEQ ID NO: 119307 - protein, 417 aa, unidentified
MALKIVYPICCGIDVHKSFVVACIAATNDKGVTTYRKRRFSTFTRDLRLLTKWLADHNCRDVCMESTGKYWIPVYNILETNCKVILAHPKYVKAIRGKKTDTRDAQWIADIFKHDLVSGSFIPPPQIRQLRDLMRYRVKLTGFATGEKNRAQNCLTVSNIKLDDVFSDVFGKSASAITEQLLLHPQGNFDVAPLIHGGCKTSPEKIQAAIDGSISSEQAEKLKVIRSHMDNLELCKANLESVILSLAEPFLPQLELVTTVPGIQLFSAIAIIAEIGVDMSVFPTVKHLCSWAGLVPQNNESAGKKKTTRITRAGAYIKPLLVQCALAVCKSDKHPEIKSRYLALKKRRGHKKAIIAICRMLLTAIYAILKKSEAYNPSLYRREVPIPADRAITVAQAVAFVQRHGFLVMDSDGGIAS

SEQ ID NO: 119308 - protein, 323 aa, unidentified
MDPVTTMYLGLDVAKAKVDCALLFNGKVKSKVVSNNQQGFETLKQWLVKNGVVRLHACCEATGTYSDAMALFLHEQGHTVSVVNPAQIAAYAQSQLARAKTDALDAKLIARYCEREQPMAWTPPPAAERLLLALLRDLQDLQSMQQAESNRLGTAHPDVRERIERHLEFLEREIEQLRKKIEKHIDHNDQLRGRRDLLDSVPGLGEHTIPWLIAYLGDGQRFPGSKCAVAFCGLSPKPRQSGTSVRGKAHIAKSGHADLRHALYMPAMVAYSRCKAFASFVQRLKAAGKPPKVIIVALMRKLVAIAHAILKSGKPFDPSLHGA

SEQ ID NO: 119309 - protein, 349 aa, unidentified
MTIVGCDLHTRKQQVAVLHTDTGEVVEQELLHAGDAVEQFYRTLPRPVTVGIESTGYALWFHELMQRLGHTLRVGEAAKIRAMVVRKTKTDRRDAQHLLDLLKHDRFPAVWIPDPATRDLRALVTHRVRLVRIRTMVKNGLQAIALNRRLALGSTLWSQRGRAQLVALALPPHTAQRREDSLDLLAWLEAHIAGLDARIAAAADAHPGARLLLTHPGVGALTALTTVLVLGPAARFPGSKHVVSYVGLAPAVSASADTCHLGQITKQGSSLLRWVLGQAAPLAARADDDLHRVYRTLIHRRGRPKARVAVARKLLVRLFIMVRDQIDYAEFRRRGCLPPPRQPVLPTRA

SEQ ID NO: 119310 - protein, 414 aa, unidentified
MDTIYARVAGLDVHQKFTTVGVRCRLETGKLFAEVRTFGTMTRDLLALADYLEALGVTHVAMESTGILWKPVWNILEGRFTLLLVNPRRVKQVPGRKSDVSDAEWIAHLLQCGLLQGSFVPKRELRELRDLTRCRAQLVSEQTRVANRVHKVLEDANIKLGAVASDILGKSGRAMLWALNRGERDPDKLADLALGRLRAKIPELKLALEGHFREHHQFLVEHLLGHLDDLERRIEEISQRIAEHLPSILDDERLRRLDAIAGVNRTTIENVVAEIGVDMSQFPDEHHLSSWAGICPGNEESAGKRLRNRTTRKNRWLRRAITEAAWAAGRTKNSYLGALYRRLAPRRGKNRALIAIGHSLLVIFYHMLKYDVEYQDLGVDYFDKREPERLRNYLVKRLQLLGYQVCLTPQTDAA

SEQ ID NO: 119311 - protein, 356 aa, unidentified
MSEKLNSVIAVIGIDIGKNSFHLIGQNKRGAIVLRQKWSRGQVEARLANMQPCLIGMEACVGAHHLSRKLQALGHDARLMPAKYVRPYSKGQKNDFRDAEAIAEAVQRPTMKFVAIKTADQLDLQALHRVRERLVGQRTGIINQIRAFLLDRGVAVRQGLGFLRAELPAILAKRTDVLSPRMLHLIEGLLDDWHRLDARIEALSNEIGALACQDPACDRLMSVPGIGPIIASAMVAAIGDGSAFSKGRDFGAWLGLVPKQISTGDRTILGSISKRGNRYLRVLFVQAAWVVLTRVRPENWERYGLKSWIEAAHQRLHHNVLAIALANKLARIAWAVLNKGRAFECVKSHASASQSA

SEQ ID NO: 119312 - protein, 366 aa, unidentified
MAEFTRFVGLDVHKDTIAIAVAQDDRSDPAVLATIPHDVPRLLRRLQRLGPGVLVAYEAGPTGYGLCRALAAAGIACQVIAPSKTPRASGDRVKTDRRDAVSLARFLRSGDLTPVYVPDEATEALRDLVRARDDAKRAEKTAKHHLSKFLLRHDRRYGRKTAWSDLHLAWIATIRFDQPAQQRVLDDYLHAVLEAIARVERLTRQIEELIPTSPVYALARALQALRGIKLVSGATIACELGDLRRFSHPRQLMSFLGLVPSEHSSGQSIQRGRITKTGNGHVRRVLVEAAWAYRFPPRANHELGQRMAAASGAVRTIAWKAQHRLHRRYWALTAARKSPQRMIVAVARELVGFVWAIGQEPQLLAS

SEQ ID NO: 119313 - protein, 373 aa, unidentified
MLEESLDDQQIIERVAALDIGKAELVCCVRLPGPGGSKRRLQEVITYSTMTPSLQVMAERLLDLGVTRVVMEATSDYWKPPFYLLEAHGLQTWLVNAKDVKHLPGRPKTDRLDAVWLCKVAERQMIRPSFVPPPPIRRLRDLTRYRAALVSDCTGEKNRVEKLLEDAQIKLSVVASDIFGVSGRDMMAALIAGQRDPKVLAQLARSRMRVKIPQLEEAFVGRFGEHHRFLLAKMLQRVDAISADIAEVDARIDAEIAPFADTVARLDQIPGVGVTAARVIIAEVGLDMSRFPTSSHLTSWAKFAPGVKESAGRKKGRGSTGHGNRYLASALGEAAVGSARTDTFSTALLRSVWSPTPRSAAQEWLERPQSNPL

SEQ ID NO: 119314 - protein, 343 aa, unidentified
MRTITTIGLDIAKSVFQVHGVDAGGQVIVRRQLKRRYVLTFFQKLSPCLVGIEACASAHHWSRELQALGHAVRLMPPAYVKPYVKRQKNDATDAEAICEAVTRANMRFVPTKTPEQQSGLVLHRTRHLFIRQQTSVINAIRAHLAEFGIVAPVGRHGVEELLAVVADPNDRRVPEIARACLSALGAQLRRMKEQILEFDRLIRAWHRSNEMSMRLEAAPGVGPVLATALVAAVADPKSFRSGRNFSAWIGMVPKQRSSGGKQRLGNISKQGDRYLRGLFVAGALSVIRYAKIHGTKHRPWLTALLARRPTKVAAIALANKIARMVWAMMARGERYKEPVALAR

SEQ ID NO: 119315 - protein, 344 aa, unidentified
MTYFAGLDISLRSINVCVIDGEGDVVTEGKTDAEAADIVAFLDDLDVDIATVGLEAGTLTQYLTYGLQFAGYSVHCMESRQVKAALSAMRNKTDKHDARGIAQLLRTGWYSRVHIKSMESHQVRALLTSRRAVLNKCIDLEQEIRGLFKVFGVKLPSKLGHGSFDTHVRPLIEADEVLSLSLLPVLDVRLELYRTYRELDNRTRHLAEQDPVCQRFMTAPGVGFVTALTYKSGVDDPLRFKRSRTVGAHFGLTSRRYQSGEVDFDGHISRCGDAAVRTALYTAANALLTRSSKWSSLKAWGMKVAKARGHKKAVIAVARKLAVILHRMWIDDTQFRWGTEAARS

SEQ ID NO: 119316 - protein, 318 aa, unidentified
MGMNEKLSETFVGIDVSKHSLDIQIDPAGQFLHVAYDDAGVADVCRRLLRLAPTLIVMEATGGLEVRLAGELASRGLAVAVVNPRQVRDFAKASGELAKTDRIDAGILSRFAKAIRPTARPLKDADTRDLDDLVTRRRQLVEIRLQETIRLGSTTSKSSVKSIKTHIAWLDKQIDKLEDDMNDRLRNSDVWRVKDDLLRGIPGVGTVTTTTMLAKCPELGQLNRRQIAKLIGVAPLACDSGRHKGKRFVWGGRADVRSVLYMAAVTAIRYNPVIKTFADRLKQAGKPAKVVIVACMRKLLTIMNTMLKNNEPWNPKIA

SEQ ID NO: 119317 - protein, 392 aa, unidentified
MFFVGIDIGKNNHVASMMDESGKVVFKAFSFPNTSDGGHALFSKLASYSPCPDDFEIGMEATGHYWLSVYSFLFEKKFLLHVINPIQTDGWRRGTEIRKRKNDIIDSVLIADLIRYGQFVETRLADEDLFSLRSLTRFRTYLVESISDLKRKVVCVLDQVFPEYQSIFSDIFGKTSKEILLQFSSPIDFESVSSQTLAELLAKLSRKQVGSAKAAQLKAAASCSFGVTFAKSSFTFQLKALIEQISFIEKQVKETETEIAGIMKKLDSPITTITGIGSVTGAAIISEIGDISKFDSPRKLVAFAGLDATVTQSGEFEAAHNVMSKRGSPYLRKAIFQAALVAAFKDPVLSAYYQKKRAEGKHHLTCIGAVARKMCNIIYAVVKNNQPYVPKA

SEQ ID NO: 119318 - protein, 423 aa, unidentified
MEVMHECAAGLDVHKDSVVACVRGMREGKAKREVRGFATTTEELEALRDWLTSCGCALVAMEATGVYWMPIWKILSEGAFTLIVANAAHIKAVPGRKTDMNDATWIADLAAFGLIKASFVPDEAFQELRTLMRTRKQLVREQTGHVQRIQKTLTEANIRLDSVISDVMGANGRRLIEAMIEGVRNPRQLAALADRRLKASAKELYDALHGRLTEHHCFLLKLHLGQYDALGATIRTLDAEVEARVTRMDREVTADKASFSGLIDLLVSIPGVSQVSALTILSEIGRDMSRFPTCGHLVAWAGLCPSQNESAGKRKRSRLRKGSPWLKTMLVQCAWAAKRAKNSYYKAQFFRLKARTGPQKAICAVAASILTAIFHMLNDGVAHNDLGVAYFDARKPEAKVQRLVRQIKKLGYEAALTPIAKAA

SEQ ID NO: 119319 - protein, 330 aa, unidentified
MKLPQIIGADLSKKTIDFVVHSTQQHLKTTNNPRGYREFIKWMKNQKVNCSAVMIVMEHIGLYSYQFEQFLFHKGLTFTKVSGLAIKLSMGLVRGKSDKIDAMRIAKYGHEKSRDLVVIQAGNETLNRLKMLHSLRERLVKNRAALMTAVKEYQEACNLKNSDIIIASQMHLIKTFNTQIAKVDDSMAELIASQHALKMNFDLLQSIKGVGPVLALATIIKTCNFSCFSNARKFACLCGTAPFEKTSGTSIRGKTRVSHYADKRMKTLLDLAAKSAIQYDKELKEYYTKRTQNGKSKMSTINVVRNKILGRMFAVIKRQTPFVDNYLQAA

SEQ ID NO: 119320 - protein, 412 aa, unidentified
MDVIVERCAGLDVHRDSVVATVRVPGKGKSRRRRAQQTRTFGTTIAQLEQLGNWLEGFAVTLVGMEATGVYWKPVFFVLERRFECWLINAEHLHNVPGRKSDVIDSRWLCELLEFGLVRPSFVPPPEIRRLRDLTRLRSTQAEERTRAIQRLEKVLQDAGIKLTSVASGTYSVSARAMLEALLGGVSDPACLAELAKGRLRAKIPQLQEALANRFDIAHHGVLVAGLLAHIDALDQAVAALDARIAAATDAELIERLSTIPGVKRHIAEVLIAECGVDMSVFGSAQRLVSWAAICPGTNQSGHRRRSGKTRRGNPWLRTALTQAARAAARSKNTYLASHYWQIRGRRGEAKAIGATRHDILIAYYHIVHERVPFRELGPDWLARRHSPEHRTRRLVKQLEALGHNVTLEAAA

SEQ ID NO: 119321 - protein, 477 aa, unidentified
MAKTNSTQKQSTPKSSSNFKSSRHRKSKNRAPLKPQDWTLGLEVVHPKAAGIDVGNTEHWVAVPPHMDPEPVRVFGCYTRDLIAMADWLQSLGIQTVAMQSTGVYWIPLADILAERGIRVFVVNARDTKNLPGRKSDFQECQWLLKLHVYGLLHNSFRPEEEILRMRTYWRQRQQHVEDAARCMQRMQKALTQMNVQLANAISDISGATGQAILGAILEGERDVRVLAELRDPGIQASEEEVMQRLEGNWREELLFILRQEFETYHTFQKKIGECDQQLQAHYQSMESKADPKKLPPCRREKRPHGNVPKCFDLRSELFRTTGVDLTAIDGINVLTAQTVISEVGYHMGRFDTEAQFVSFLNLAPNNKISGGKVVGREKRKKRSRAGLALQQSATSLLRSDSYLGAQYRRLRTKLGTPKAKKAMANRLARITYRMLKYGEAYVDKGKEFYEQRYRQIQLRMLHRKAAELGLQVIEAA

SEQ ID NO: 119322 - protein, 375 aa, unidentified
MGDCNEAFVAFDTSKLRNAVAIADGGRDGEVRFLGEIENSEAATAKLVRKLERQYQRLTFCYEAGPTGYGLHRQITELGHECIVAAPSLIPKRPGDRVKTNRRDAVGLVRLLRAGELTAVWVPDRHHEAMRDLTRARERAMLDLRGKRQQISSLLLRQGRHYQEGRKPWTKIHKAWLMRQEFDHPERRLVFEEMMLAMREAEERLARLEQAIRVAVPEWSLAEVVTGLMAMRGIDLVSAAGFLAEMGDLSRFPTPSQLMGNLGMVPSEHSSGETTKRGPITKAGNRRARRLLVECAWAYRHPPRIGVTKQAKVAAAPPAVREIAWKAQHRLYGRYRTLIRRGKLKNVAITAVARELAGFIWAVSREITIVGAAAM

SEQ ID NO: 119323 - protein, 326 aa, unidentified
MKMTHSQAVVGIDVSSGKLDAHVHGHDQSRQVTNDASGHRELVAWARAKRATTAVMEASGGYERDLARALRRAEFAVYVVDPKRVRHYAKAVGQLAKTDRIDARIIAEYGTTVLAAGRLALPRPDDPQRDRLSALLGARAALIEHRDALQQQSAAMPAGLARQALKDAHASMKLRIKQLERQIGALIAEHAAFAALARRLDTVPGLGPVAIAALIAWLPELGYAGRARISALVGVAPVADDSGDREGKRHIAGGRKKLRNVLYMPVVAAIRCNPVLAAYYKRLLACGKEPKVALVACMRKLLVIVTAMITNQQDWAPRSGAQAAAA

SEQ ID NO: 119324 - protein, 362 aa, unidentified
MRIIGCDLHTRQQTIAMLDTTTGEVVNLTLTHEGHNVREFYSTLPRPVRVGIEATGSMMWFVNLMEELGIECQVGHPAKIRAAEPRKQKHDRRDADLILRLLAEDRFPAIWLPSKELRDLRSLLRHRHQWVHMRTRVQNALQAIALANGLRRGPSLWSQDGQNTIASLPLAPHTAYRRNELQALYAKFEAEIEKLNQRVEEQACGRPGARLLMTHPGVGPVTALATDVFLGDAARFRDSKALASYVGMIPREYSSGGRQRLGGLTKQGNPLLRFLWGEAGAHAVRRDPELKRFYRRKLNQKGFGKASVAVARKLGIRLWIMLRDQIEYNEFCRRGQKQQKSSDACAGMPETRNGATSHRPVD

SEQ ID NO: 119325 - protein, 356 aa, unidentified
MNQLTTVGLDLAKDVIAACVLDLHGAVVERRVLKREAFQRWAEQLPVCTVAMEACGSAHHWGRWFAARGHTVRLIAPQFVAAFRKGGKNDAADAEAVAIAARQPTMRFVPIKTIDQQTILAWHCAREGWKEERTALMNRVRGLLTEFGIVIARSSDRFLAELPRLTEDPRLPDAMQGLLLEAREQLASLHARLARCEAQITNHARSNTAAQRVSALLGIGPITSSALAATVPDTTTFKSGRQFGAWLGLTPKQHSSGGKARLGRISLRGNVYLRTLLIQGARSTLQSALRADLSRASRLQRWIIELYGRRGYHKTLVAIANKHARIVWAILAKDERYDASAWQRHPMAQALPAASS

SEQ ID NO: 119326 - protein, 345 aa, unidentified
MQSRSIGIDLGKTTFHLIALGDRSQVVIHKKFSRSQLLVYTANLPSSLIGMEAGVGSHFLGRALREQGHEVRLIPAQFVRPFVKSNKNDYRDAEAIAEAVERENMRFVPIQTEDQLDLQALHRVRDRLVARRTSVINQIRAFLLERGISFRKGPASLRRQMPEILENADAKLSTRMRRLLDFLWQEWKGLQSQIESLNADLEQIASSDPSCVRLQQIPGVGPLVSTAVVSAIGNGAAFKKGRDFAAWLGLVPRQWSTGGKAKLLGISKRGNPYLRKMFIHGARAAVLRVKREGSSLGEWRSGLETRTARNVVIVATANKLARISWAVLASGNDYRPMHKAAVFSN

SEQ ID NO: 119327 - protein, 482 aa, unidentified
MLTGDGVVRHERFSDRPAAAPTRDRSPAQDGVTTLMQEPAPTETSDNTPHDTDETPVRWAGVDWSWSEHAICIIDDTGAALERLTVRHTAAGLRKLVTLLHQHQVQGVAIERGDGPVVAALLEAGLTVFLIVPQQVTALRSRYSTARNKDDRFDAYLLADVLRTDRRRLTPLTVDTDATVGLRMLVRARADLVKARVAAHNQLRAHLQLAHPGAVGLFHQLDGKISLAFLTRFPTPRRARWLSEKRLTAWLKAAHYTRPTTRTAGQLFDHLTQAPAGHPDGPAADAAEVITLELVALLTGLRDRITALEAHIERALAAHVDAAVFTSLPRSGTVRAATMLAEIGDARGRYPTDDALAAAAGISPSTRASGRAHYVAFRRGCNHRLRQAIVDFADASRAAHPWAQEVYARARGRGHNHAHAVRILARAWLRIIWRCWTDHTAYDSVHHAAVVAARTPRLSPSGTGESIEAQSIRHETSAGVAS

SEQ ID NO: 119328 - protein, 337 aa, unidentified
MRIIRIGLDTSKHVLQVHGVDQNEQPVLRRQLRRSEVEKFFAKLAPSRIGLEACGASHYWARVLRGLGHEAVLLPPQYVKPYVKRGKNDRIDAAAICEAMSRPGMRFVPIKTAERQAALMVLRVRDLLIKQRTMLSNAIRGHAAEFGIVAAKGPVGISELLQRAHAEEAGIPALAREMLSLLANHLDALEARLKALETRLVAWHRQDPVSQCLATQPGIGPIGAVSFALKVTDPKGFRSARHFAAWLGLTPKEHATGGRRRPGRISRQGDETLRRLLVLGATARIRFAKAGRASPWLINLLARRPNKLAAVALANKMARILWAMMVSGETYRHPQQA

SEQ ID NO: 119329 - protein, 320 aa, unidentified
MMYIGIDVSKDSFVAAYPRKNGYTTMTFKNDTKGVRSFITSLPEDCHCVMEATGNYSMLLLYLLQQAGIPTSMENPQKIKHFSRAMMTVTKTDEIDAKLIAMYGEKMTPEPYKIPTESILLLKQKRTVLRQLKKHLTATKNLQQALAVLPKQDLASKRTVEKTIKFLERQIAELEDEITNLSNKEYARQMSLLTSINGISDTIASALIVATGGFTYFSCAKQISRYLGLCPTYQQSGTSVNVKGHINRNGDPHLRGQLYVAALVCIRYNKACKDTYENLRAKGKSAKVALIAIANKLIRQAFAVVTKNQPYVDGFVSSIA

SEQ ID NO: 119330 - protein, 408 aa, unidentified
MESQIIFGIDVSSKSSTVCVVNDRIKQGESFRISNDSFGYQKLYEQLNQYLITPLVVFEATGVYSLSLQAFLEDYHIKYLKLNPLKAKKLMDNNLRHNKTDKVDAYRLALIQFNAPQKLRDPQPREYHELQNASRYYEELTRSIVTTKNQLHRNLQSTFPQIEEILSHPSGRIYWALVSLFPHAGYVLEKNETQVTQMLNSISGIGQQRARYLTTRLYAFAREAYPYDSKDSIIVRAIQRNISNLFSLQQERDYVINYMEKLAKAVNARALSIYLSIPGVARITAVRLVAELGDLRRFSTSAQIDAFVGIDPGRYQSGEKDSSLGITKHGNHIARKILYRVITQMETVKATQPCHITDYYDKKKRSSNRQGYKKIAIASVHKLIRTMFALIKHDQLYDYNIATENKRL

SEQ ID NO: 119331 - protein, 351 aa, unidentified
MLSSNVKYIGLDVHKEAIAIAVLNGAGKLVMESIVETKASTLLDFLHGLRGELHVTLEEGTWAAWLYDVLKPHVQKIVVCNPRRNALLKEGSKSDRVDARKLAELLRTGMLRAVYHGENGLRTLRELARSYLTIRKDQRRVMSRLKALYRSWGIPCAGRQVYAPRHREQWLSKMAHAGVRRRAELLYQQLDGLLVLRHTVRGELLAESRKHQAVNILRQVPSIGPLRATLLLALMQTPHRFRSKRQLWTYSGLGVETHDSAQHRYVDGQLQRSKKPQQIRGLNQNHNHEMKEIFKSTALSASRCAGPLQDFYAGLLAKGMKPDMARLTLARKIAAITLTLWKKENISTQNI

SEQ ID NO: 119332 - protein, 308 aa, unidentified
MEAMIERCAGLDVHQETVVACVLFGPLDKRPNKSIESFSTTTDGLLKLNDWLTSFQVTDVVMESTGVYWKPVWNILEDDFQLVLANAKHVKNVPGRKTDVKDAEWLAKLLRSGLIEGNFVPPEDIRDLRDLTRYRKKLIHQRTSEQNRIHKILQDANIKLTSVLSNVFGVSGRRILEAIINGEKIEVKNLQEIVDHRTKASLADIANAMNGRIRLHHRDMLRYHWEHMSYLEKTIEELEKQIDHCLEPYRKEVELLDTIPGVNKNGAATFIAEMGVDMSVFKSAKHLASWAGVSPGNNESAGKKKRVK

SEQ ID NO: 119333 - protein, 401 aa, unidentified
MVSDFKKGRYNLMKIFVGIDIAKLNHFAAAISSDGEILLEPFKFTNDADGFQLLVSKLESFDKNSIIIGLESTAHYGDNLVRYLVAEFYQVCVLNPIKTCQMRKNNVRKTKTDKVDTFVIAKTLMMQDDLRFITFFDLDMMDLKDLGRFRQKTIKQRTRLKIQLTTYVDQVFPEIQYFFKSGLHQHAVYALLKEAPSPKEIASMHMTHLANLLKVNSHGHFTKELAKELRVLAQKSVGANDSAISIQITQTIQQIELLDSQLEKIEAEMTDIMKFNDSVIMTIPGIGYINGGMILGEIGDIHRFSNPNKLLAFAGLDPSVYQSGNFQAKTTRMSKRGSRVLRYALVNAAWNVVRNNATFKAYYDAKRAEGRSHYNALGHCAGKLVRVIWKMLTDEVEFNLE

SEQ ID NO: 119334 - protein, 414 aa, unidentified
MELLHERCAALDIGKKDLKACVRTPSPKGKRSRRQQIRTFATTTNALLELRDWLVAEQVSLVVVEATGDYWRGAFYLLEDQLNVILVNAAHAKGLPGRKTDVCDAAWLCQLGECGLLRASFVPPEPIRQLRDLTRYRTTLTAERSREAQRLEKELEDAGIKLSSVATDITGVSGRAMLAALIDGERDPQVLAEMAKTRMRPKIPHLVQALTGNFGEHHAFLCRLHLQRIDELTAAIAELSARIAEQMRPFARQLEHLMTIPGVGQTVAEVIVAETGTDMGRFRTGANLASWAGVCPGHHESAGKRKSGKTRHGDRWLTGALGTAAMAAARTKDTTYLGARYRRLAPRLGKKKALVAIEHSILVAVWHMLTNNVDYHDLGGDYFARLDPERAMRRIIRQANSLGFTVRFDPIQAA

SEQ ID NO: 119335 - protein, 384 aa, unidentified
MNKHNILFIGLDTHKEFVEVAYIEDQRGAQAVHFGRVSSAKASIIKLARQFQSKYPEATLHFVYEAGPCGYWIYRLLTSLGHCCYVIAPSLIPKKPGEKVKTDKRDALKLAKLLKSEDLTAIYVPEPEDEAIRDLSRARETAMKGLKDAKYQLKALQLRNNINYRGTANWSLKHLRWLTELILPHPSQQIVLQEYLQTISERIARLKRLDNELEHHVKKWRYYPVIKAIQALRGVRLLVAAGVIAELGDLTRFDHPRKLMSYVGLVPSEHSSGGKRHVGAITKCGNGRARRLLVEGAHSYRYPAKISTEMQIRQEGLPKEIIDIAWQAQLRLCRRYQKLTYKGKHNNVVVTAIAREIIAYIWAISREVVLTNVNPKLRLSRVPA

SEQ ID NO: 119336 - protein, 330 aa, unidentified
MEKWNVVLGVDVSKKTLDVCCASRELHVRIDNNSQGFALLGKWCRQYGIDPGTALFVMEYTGGYEYRFLQHCESKSYPYCRIPGLEIRQSMGVVRGKSDHADSFRIGRYGEEKSARLDADRPLDTRFLKLRQLLSFRKRMVREEAGYKASLKEREEMFGISKGDKVARISREKIKANNTHIKTIEQEIMGVIKSDGAMEFNYGLIASIKGVGFVNACMAIAYTENFTSFTDGRKFAVYAGVVPFEHTSGTSIRRRKRVSHIANREIKQELNQAAKSAMAHDPEISAYASRKLENKPYPLVLNNIKFKLIMRMFSLVKRGEKYVENYGKAA

SEQ ID NO: 119337 - protein, 353 aa, unidentified
MNTMPEETASVIAGVDTHTDTHTAAVLDLRGRVLGTETFPTTASGYRQLVRWCCGFGAVAQFGVEGTSSYGRGLCDHLVEASFDVIEVVRPSRQQRRRHGKSDPADAVAAARAVLSGEADGHPKLGGGPVEAIRALQIARTSAVKARTQAIVQLHHLIITGPDQIRRQLEPLSNLKRARACAAWRPKPTESTIDAVRYAMRTLARRWIELGDEVNDLTRHLDRLTRQAAPTLRSLTGIGTDTAARLLITAGDNPNRLRSEASFAALCGTSPVDASSGRQQRHRLNRGGDRRANNALWRIVMVRMQRDDSTRAYVQRRLDEGLTKREAMRCLKRYVARQAHRALLTDLKMLAPT

SEQ ID NO: 119338 - protein, 505 aa, unidentified
MQVVYDRCCGCDVHKKMIVACVLITLASGEVQRHIRTFSTMTAGLLALSDWLESLQVSVVAMESTGVYWQPVFNLLEDGREIILVNAQHMKAVPGRKTDVKDSEWIAQLLRHGLLSASFIPPAPVRELRQLTRYRKTVVQERARHVNRVHKLLETANLKLGAVATDILGKSGRSMLDAIVNGEQDPEVLAQLACGRLRKKLPELRLALDGRVQPSHRFLLKHLLSHVDFLDRSIETVQQEIDEHVKGFAEAMTLIQTLPVQLQAGAATVIAEIGVDMTRFPSPAHIASWAGLCPGSCESAGKRISGKTTKGNPYLRSVLCEMALIVTRMKDTYLSACYHRIARRRGHKRAVVAVAHKLLVIIYSMLKNKTPYQELGADHFDQIDPAKVERRAVARLEQLGYKVTLTRPEEDSDQATDQGAAQLTDQEATKSAKRTSHQKVAKAPKGVLRKVPTKQALEEATDQSTTQLTDQEATKSAKRTSHQKVTKAPKGVLRKVPTKQALEKV

SEQ ID NO: 119339 - protein, 356 aa, unidentified
MEYGAIDLHKKESQIRIVTKEGEVIDRRIATTRAAFQTMFWGRAPMRVLLEASTESEWVAQHLEGMGHEVIVADPNYAPMYGQRTRRMKTDRRDVAALTEACRQGTYRVVHRRSAAQRAVQQQLQIRRALVQNRTGAISMVRAMTRAVGLRIRTGGPETFLTRLSALELSPALTDTLAPLRTTIATLNEEVATIDEAVGARARTDPVARRLMTFPSVGAITASTFIAALDDVHRFRRAGEVTSYLGLVPQEYSSGEHQRRGHVVRSAQPEAQSLLVQTAWRVWLSRDPRTAGLRLWVQRLAQRRGKRVAVVALARRIARILFAMWRDETDFDSTRRRTAQRATPVDRSADSVTVEV

SEQ ID NO: 119340 - protein, 395 aa, unidentified
MFIVGIDVAKRSHEVCMITSDGQTVQRPFSIRNNCTGYNLMLEKIRKHTNIKSQIVFAMESTAHYWLALFTRLRKDGYHVILLNPIQTSAMRDMFIRKIKTDAKDSFIIAELIRFGRYAESNVAQDRLLALKELCRNRFYLVDMAGDLKRKLIALIDRVFPEYEAQFDTIFCKSSVALLKKYPTPQRLSNAHLDKLTELLWNSSNGHFGEWKARELKDLARNSFGVEDCDGAYSTLILLMLDQIQSLSGKADALEKEISRLFQSFDTTVTTIPGVGPIIGAVILSEVGDISRFSSADKLAAYIGVDPSVNQSGEFQAAHAHMSKRGSPYLRRCIWMASQVAVQRDPMFRAYYEKKAAEGLKYMTIIGHVTRKMTAVVFAILRDHKVYEPILPTAA

SEQ ID NO: 119341 - protein, 402 aa, unidentified
MNCVGIDVSKGKSMIAVMRPFGEVVVSPFEVRHTANELSELAGLLKSLDGETRVVMESTGNYHAPVAWLLHGAGFYVSVVNAMLVHDYGNNSLRRGKTDKKDAVKLANYGLDHWLTLPRYVPEEDTRLMLKTCYRQYQQYSKVQTMLKNNLISLLDTAFPDANRLFTSPPRADGSEKWVDFVATFWHCECVCGLSKKAFTAKYQKWCRKHGYNFSQDKALDIYASACGRFGVMPKTNTAKLLVEQAISQLQTTSAALAALKQEMQSLAASLPEYPVVMGMFGVGPTLGPQLIAEIGDVRRFHSKKALVAFAGIDAPPYQSGQIDVRSRSISKRGSASLRRTLFLVMGVLLQCAPMDEPVYQFMNKKRSEGKPYRVYMMASANKFLRIYYASVKAYLDSLEHD

SEQ ID NO: 119342 - protein, 317 aa, unidentified
MKTSTVSIIVGIDVAKDTLEVATSAAEHWVCSNDLEGQRALRDRLRQIKAALIVMEATGGYETALAGTLAQANLPVVVVNPRQVRQFARALGKLAKTDRIDAEILVRFGQQAAPEVRPLPDEQTQLLDALLTRRQQLLEMIQRERNRLELAVGPVRTDIRDTIAFLVKRLKQTDRDLDDQLRRSPAWREKEKLLKAIPGVGRQMLLTVLATLPELGRIPRKKLAALVGVAPYNCDSGTLRGRRHCWGGRAQTRRVLYMATLSATRCNPQIRPFYERLVAAGKPKKVALTACMHKLLLIMNAMLRDNSQWNPQMQRAN

SEQ ID NO: 119343 - protein, 364 aa, unidentified
MKRKVYVGMDVHKETIQIAYLTSNTKEMVKEQQIKHNEVHIKKFINKLKTEWNEIHCCYEAGVTGYPLYRYLKSLGVNCILVAPGKIPRQSSDKIKTDKRDAIKLARLLRSGDLESIHVPSEEDEAVRDYLRSRDSLRLDLGRNRQRLMKFLLRKGNVYSTTKYWTVSHYKWLSNLHFENEILHETFNDYYSRVRVQEENLKAMDQKIQEIAKSEAFRERVGILRCFRGVDYLTAMFLLSEVNDFRRFKTAGSFMSFLGLVPGEYSSGSKRKQTGITKTGSPRLRRILTEAAWQHRFPGTGSKIVAARRTGQPALVVALAEKASLRLHKKFRNLQLRGKTPQVMITAVSRELSGFLWAAMNLVA

SEQ ID NO: 119344 - protein, 322 aa, unidentified
MSDKTFIGIDVAKEWIDVAFFGRPGAVRVVQTEAAIGGWLAGLDPAEVGLVAFEPTGGHERLLAECLRRRGVAFARAHPNEVTAFRIRRGVKAKTDAIDARLLAEFAALELAGRGLRPLLEADDELRELTTRRRQVIATLHAERCRAALVRSPIVTASLDAAVALMAKDLATLDAAIAARIAERAPLARMAALLRSLKGVGPVTVATLLAELPELGQLSGKEIAALVGLAPRQRDSGRSHGRATVGHGRPGVRQVLFNVARAAIRRNQVMRATYERLVTQNHRPGKVALTAVMRRMLVILNAIARDGKPWKGAPVTEIAQPA

SEQ ID NO: 119345 - protein, 330 aa, unidentified
MTGTMTSAGLDVHARSIDAAAVCIATGEVTRRRFGAAPEPVIGWLKGLPGPVHACYEAGPTGFGLHRRAVAAGIRMEVIAPSKTPRAAGERIKTDRKDAELLARLLIAGQLTAVRVPAARMEARRELFRCHEQVRGDLMRARHRTSKMLLRHGRVFSGGSTWTQRHRAWLAREQFDHVESELAFGDYLATVDAAAARKAALAERLSRVALEPDLWPTVARLRAFRGIDTLTALGLHLELGGDWARFKRPAQLSAWLGLIPSLHQSGESASHGAITKTGSLYARRLLVEAAWHDRSRSSASASARLGLSAISTLYCPAQARTAPPLPTPSS

SEQ ID NO: 119346 - protein, 343 aa, unidentified
MDIASIGIDLGKTTFHLVALTEQGKIVIRKKFSRKQLLAYTANLQHSLIGMEACAGAHFIGKALRDQGHDIRIIPAQFVKPFRKSNKNDFIDAEAIAEAVTRKNMRFVPIKTDEQLDLQALHRVRDRLVHRRTALINQIRGFLLERGIAFNKGPANLRNQMASLLENADLNLTPRLRTLLDRLWAEWKQLQYDIEVASEDIERISSEDVACRRLRHIPGVGPLVATATVAAIGNGAAFGKARDFSAWLGLVPRQHSTGGKTKLYGISKRGNKYLRRLFVHGARAVLLRIKKDTGQFGQWVHRLEARTARNKVIVAVANKLARIVWAVLFREQAYWFQDASAEA

SEQ ID NO: 119347 - protein, 403 aa, unidentified
MNNVAGIDVSKGKSMVSVLRPFGEVVAKPFSIGHTGSELKELADYLKSLDGETRVVMEHTGRYYEPVARFLHEEGVFVSAVNPKLIKDYGNNTLRKVKTDKADARKIARYGLDNWAELRQHTPMDTIRMQLKTLNRQQSLYAKTKTMMKNNLIALLDQTYPGVNALFDSPVREDGSQKWVDFATAFWHVDCVRNMSLTAFAERYRKWCKRHGYNFSQSKAVEVHTGAQDLIAMLPKDALTKTMVRQAIDALDAVSASLERLKAEMQALAAQLPEYPVVMAMHGVGDSLGPQLMAELGDVARFTHRNAITAFAGVDPGADQSGTHEAKSTRVSKSGPPELRRALFLVMDCLLKTQPQDDPVYRFMDKKRAEGKPYLVYMTAGANKFLRIYYGRVKEYLASLEEN

SEQ ID NO: 119348 - protein, 318 aa, unidentified
MYYIAFDVSKKVLYGFDGEKELAFDNKKGLKALKSYLKKKYKDLNDLVIVFEATGVYSNYLKAFCADNNLKVYIINPKRSSNFSKAIGNRSKTDKIDTKQTIYEYRKIIGPKDIKVPKIDQVAQTLSAYLTSYKFTVKKRVSISNHLEALERNTSSLELVALLKEELKRTKKTEEKIKAKIEEYIKKDSQLNEDYKRQMTIPGVGKVSAICLLTLFNQYKDTNQAQITALVGLDPTKRESGTSVKGKMKISKNGDRMIRGTLYFPLLSAIRFNKKIKALYDRLLANHKPKQVALIAAMRKLILISHAIYKNKTVYSAG

SEQ ID NO: 119349 - protein, 387 aa, unidentified
MAQVNDLSRSLTAFDPISTLVVVVEMSKASWLVSGAVPGVERQPLKKLEPDATALLRLIERWRNEALRAGRPISRIALAYEAGRDGFWLARWLIARGIEAHVIHSASVAVSRERKRAKTDRLDAAMLMRVFLGWLRGERGHCGMVAIPTMEEEDARRPSRERESLINERSRITNRMKSALARLGVRGFKPHLRKAPERLAGLRTAEGTGLPANIIEEFRRDMARLALVREQINSIEKTRAERLKRAPDTGPHAMVRLLARVIGIGIETADMLVREILSRKLRDRRAVARYAGLTGSPDESGLKRREKGLPKAGNARVRRGLIQLAWRFLTFQKDSALARWYRTRTEGPSGARKTTMIVALARKLLIALWRLVTTGEVPDGVELRPAG

SEQ ID NO: 119350 - protein, 355 aa, unidentified
MNSLGIDVGKKKCRAALKDEKGNIIREFFFSNNNEGISALIQSASHYGKCTAVVESTGNMWIRIHDTLEENGIDTILANPYKTKIIAEAKIKSDKLDAKILADLLRADLVYESYVPTKEFREKRSLVRHRISLIRNRTILENRVHSLLDKYDCKTDLTDIFGKSGMIWLKALDVSRIDKVILNTTIAAIENINLQADIISKELARYAWDSEDVKILLSMTGIDMLSAMLIATEIVDVRRFCTPWKLVSYAGLAPSTRESSGKTRTGRISKQGSPWLRWILVQSAMTAVRYDQRLKSFYERLKSRKGSAKAIVATAKEILVIMWYMLTRRELYRYMNKERYEQKLSRIKKIKESAA

SEQ ID NO: 119351 - protein, 354 aa, unidentified
MIIIGVDFHPEFQQIASADTDTGEFQEKRLAHPEEAEKFYRAVAGQGVKVRVGMEASGHARWFERLLAELQIELWIGDAAEIRTKRVRKQKTDRQDAQLILQLLLENRFPKIWVPSWENRDLRQLLWHRHRTVQARTRIMNQLQAVALNEGLRCKKRLWGEAGRKQLESFALAPWASRRRRDLLELLDRLNPTIAELTRAIEHEAEKNPAVQRLRTHPGVGALTALAFVLIIGQAERFQCGKQVASYLGLVPLEDSSGKRRRLGHITKQGSSILRFLLVEAAQVTVRSLPEWRSKYFHLAMRRGRKIAKVAMARRLAVCLFWMMRKEWDYEQLKKFGSHAGQPENRHGVQSNTE

SEQ ID NO: 119352 - protein, 354 aa, unidentified
MDVGIPYKGFSQRNHFNKLKYKVMRIKQTIGIDISKLTFDVRIHSNQMFHQFENTNKGFKKLIKWVNSNNSFLKEETIFIFEHTGIYSYLLSVFLTEQQLSFALVPGLEIKRSLGIARGKDDKIDATKIALYGYRLRDEIKLYNMPSEDIINLKRLLSLRGRLVKQRAGYKSSLKELSRVLTFKNNKVLLETQEKMIRYLTKQIDVIEQKLDSVINSNDTLKNVFKLVTSVKCVGRQTALFIIAYTESFTKFKTWRQFASYCGTAPFPNSSGTSLRGNTQVSHLANKKIKSLLDLCAKVAIQHNPEMKAFYKRRVAEGKNKMSTINIIRNKLLSRIFAVVNRETPYVDFMKYAA

SEQ ID NO: 119353 - protein, 346 aa, unidentified
MKILALDLGKYKTVGCAYESESGAHQFQRTFTTPADVQRLVQDVKPDRVVIEVCSIAGWVCDLMGQLGVAVQVANTSDDAWRWRKVKQKDDRRDALKAARLSAVNQLREVYIPQTEVRQWRALITYRQHLVGRRTKIKNHIRDLLGREGQLLARGGKCWTKLGQEVLNSMARPLEEVGAAELWRGELWEELQQLQTIQERIATVEEKLNAIGRADKRVQLLRTIPGVGPRLSEAIVALLDQPQRFRKASQVSAYIGMVPKAFDSGESERRGHITRQGSGLVRSLLVEVAWAGLRHNRWMRQTYQRLSGGKKARRKIAIVAVGRKLLVRCWAMLRDNRAWDWQPQIT

SEQ ID NO: 119354 - protein, 352 aa, unidentified
MERYVGLDSHARSCTLGVMSAGGRRLKSLVVETNGKALVEAVRGVGGRVHVCLEEGTQSAWLYELLKPHVAEVVVAVAPERKGSKDDQRDAWARANELRTGAIETRVFKAPEHLAGLRNAVRAYGFAVTDVVRAKNRLKSVFLSRGIGTDASVYDAAKRMAWLKQLSSPHRELAEWLGRQLDQLEPLREEAEGLLLRESKKHPIIRKLSTAPGMGPIRTAQVVAIVATPERFRTRRQLWSYSGLGIVTRSSADWVQDRTGKWVRGHHAQTRGLNRKRHPRLKAVFKGAATTVIAQLAEDPLHADYERMLKSGIKPTLAKLTLARKIAATVLSMWKHQEVYDPKRHRPTPEQK

SEQ ID NO: 119355 - protein, 331 aa, unidentified
MSVSVGIDIGAGQVDVVVYEAGQFSKPSCYSQAPEGHKQLIKQLKTLHPTVVVMEATGVYYLDLAIALAEAGLPVAVINPKSSKHFAQIKLQNSKTDRLDAALLAEYGARMEPRRWTPPDQNRQALRSLGRQINRLIGSRTQAKNRLHAMKATKTTPRILIDDESQAIDVLDQRIERLRQAALMLLEKAPELKRLHAHCCAAKGIGDASALALLAELCVLPEHLKAAQVSRHAGLDVRLHQSGSSVNQKARISKAGNAYIRSALYMPALSAVRFDPHAKAFYEALVARGKTKMQAQVAVMRKYLTGLWACLKTDSPFDSSRLFSSIHAQKA

SEQ ID NO: 119356 - protein, 419 aa, unidentified
MSFKILKFKCCGLDVHKTWIYACIGITDSNNRTEYKQARFSSFTKGLNELCDWLAKYNCTDVCMESTGKYWIPVFNILEQHNLWVTLSHPKYTKPMKGNKTDRKDAKWICDLYMCGMVKPSFIPPADIRELRDLVRYRYKLTCMITGEKNRAQNCLTVSNLKLDDVFSDVFGKSSRSITEQILQHPGEKFDVAPFVHGRCKTPIEEIQAAVDGAISKEQAVKLRQCLDHIDELNKHISEIEQEILRLSDKYETALNLIRTVPGFDKNPLTAVQVLSEIGGDMSVFPTAKHLVSWAGCCPRNDQSNQKIKSTRISRAGSYFKPVLVQVANALIKSKKHLEFTNRYKRIKARRGHKKAIIAICRMILTAIWHILSDLKPYTPEGFLESHPVKEGKVLSSSQALNFFKQRGYIIKDEPLSVS

SEQ ID NO: 119357 - protein, 397 aa, unidentified
MIAVGIDISKAKSTVAVIDSDGTVLASPFAMAHTQPEMEAFVTYLKGLGEPTTILMEYTGHYHYPVLKKLQDEGFPVCIVNPYQMKKYGDVEIHKAKTDKKDALRIAAYALEKSYKLVPYSSMEQKYEDLKFLSRQYSQRITYVAKLKVQLIALLDQTMPGITRILPLNSRNPEKCALLLFVKRFKSFDEIHRIGKARFLASYDVLAKKASERSASSKGLSIYEFAVDSITTRGEDPYIWLSQNQCVDLLSTTQNAADEIISQMRNIAETIPEYKVLRAMHGVGDRLGPIILAEIGDVHRFHSGKALNSYAGNAAPPYQSGQFESRNRHISKRGSSTLRKACYEVMQALKLTKPQDDPVYLFMLKKEQEGKPFNVAKMAGVNKFLRIYYARAMELYK

SEQ ID NO: 119358 - protein, 352 aa, unidentified
MDKGNKLNFSGQHIYVGMDVHKKSWSVSIQSEQFEHKTFTQPPEVEKLTGYLEKTFPGATYHTVYEAGFSGFWLHDQLREKGIDCMVVNPADVPTKDKERAGKTDRVDCRKLARGLRNGDMKGIYVPPRVKVEDRTLVRTRQSMVRKQTRCKNQIASILFFYGITIPEEGRWTRRFIHWLESIRMERASGDFSLKAHLEELNHLRQIIANLNRAILSLSRTEEYRSDVLLLKSVPGISTLTAMILLTELSDISRFSSLDKLASYTGLVPDIKSSGETEYATGITFRRNPALRALLIESSWVTVRKDPALMMAFNKLSLRMKKTQAIVHIARKLLNRIRFVLKNRQKYVLAVV

SEQ ID NO: 119359 - protein, 314 aa, unidentified
MDKIAVGIDVSKDRLDVAVRPSGEVFVVARNAAGLEELVERLCSLGPHLVALEATGGFETVAAAALAAAGLPVVIVNPAQVRAFAKAIGQRAKTDPIDARVIAHFAEATQPEPRPLPDEATRLLADLVARRRQIIDMIGAERQREKRAPARLKKSIVRLVKALEKELTSVDGDIDDAVRGSPAWRETEDLLASVPGVGSTIARTLIAELPELGRLDRKQIAALAGLAPHTRQSGQWKGRSFIGGGRANVRTALFMGAMVAKKHNPVLKAFFDRLVAAGKPKMLALIAVARKLLTILNAIVRDHRPWQGTVVAAS

SEQ ID NO: 119360 - protein, 345 aa, unidentified
MKEVSTIGLDLAKKVFQVHGVDGVGGVVLRRALRRSQVLVWFAKLPRCLVGMEACATAHDWARELEKLGHEVRLIAPADAKAYVRRNTNDPADAAAICEAVGRPSMRFVAIKSTAQQAAAGIHRVRDLLMKQHTMMKQHTMLRNQLRGLMAEFGRVAAKGQRGLSALIAILVDPEDRRLPSPLREGLVAIVETLRGIDRKLEAIDRQLVQAGRENATYRHLITAPGYGPILASAMVAMVVDPGAFRRGDDFAAALGLVPRQEGTGGKTWLGPISKRGNGYLRRLLVNGATAVLKSKRAKEDPWLAKLLTSKPRKLVAVALANKMARIGWALMTRQEDFRGSLAVA

SEQ ID NO: 119361 - protein, 394 aa, unidentified
MKTVYAKVAAIGMDVHAKFTTVAMRDADGKVVRRERLDHADRSALREHLAGWPAEASVVLEASFGWMWLAELMDEAGLSPQLSNCYKLHQLRKARGWVKTNKKDADLLSLLPFETDRWWQVWLAPPAVRDRREWMRYRASLVAVQTATKQRITALLHRFGILHRFSDVFGVGGRRWLRVIVAAEGTEQAPLSTGAVAALRGHLALLDHVRSELAAITRALRAELPCSELADRLATIPGVGLILAHVLIAEIGRIERFRHHRALASYSLLAPLADESGEQDATTAPLGRHLGHRGNRTLKWTFIEAAHAAIRHGGQWRRRFEAATDGGRRDRNRGYINVARELVKIVYVVWSRGMAYTETPPPRPGRSARRQARCPRTDPRSRTGQPFSPMAAVR

SEQ ID NO: 119362 - protein, 308 aa, unidentified
MPVFVGIDVAKASLAVALYPGEQQLEVGNDAAGHKALCRWLAAQQVERVLVEATGGYEQALVQHLAEHWPVVRIPPHRARAFAVAIGKVAKTDPIDAAVLARLAAVVDGPEVTPLRAVDARLQALVRRREQLVAQRDDERRRQQQATDRCVRSSLLRQIRQLAREVARLDRDIAACVPQCDSERAQRLRSVPGLGPVTVATLMAFLPELGQLGNRQISALVGLAPYNCDSGNRQGLRRIRGGRANVRRILYMASWSVVRHQPAFKARYAALRARGKCAKVALVACMRVLLIRLNAMIRDASEWRMAAG

SEQ ID NO: 119363 - protein, 293 aa, unidentified
MKYIPVGVDIAKHLMQVHFVDEHTGEIIDKQVKREKFLEYFSNREPCLIGMEACGGSHHWARELQKLGHKVRLLKGRFVKAFVMGNKNDVMDARAIWLAVQQPVKSVAVKSEEQQATLGLHRMRQQLVKFRTAQINALHSLLLEFGETTHKGRAALAKEVPEALERLKERLPLYLINMLDEQYQRITELDEHLDHIEKQLQAIARQNETCQRLLNIPGVGPLIATAAVATMGDASAFKSGREFAAFIGLVPRQTGSGGKIRLLGISKRGDKYLRTLFIHGARAAALLTKEPGP

SEQ ID NO: 119364 - protein, 339 aa, unidentified
MLLTPVGIDIAKSVFQVHHVDADTGQIINKAIKRASFLNYFANRAPCLIGMEACGGAQHWARELTKLGHQVRLLSSKFVKAFNIGNKSDAADARAIWLAVQQPGKCVSVKTEAQQAVLAMHQMREQVVKMHTMQINALRGLMTEYGEVMGRSRAVLEREMPGTLHRLSECRPAMLIDTLRDRWNEVPRMDERIARIEQRLRVWLKQDRSCSAIAEIPGVGLLTATAAVATMADPKSFRSGREFAAFLGLVPRQHGSGRKVSLFGISKKGDTYLRTLLTHGARCVLANAKDPGLWVEQLRKRRRKNVVVIALANKLARIIWAVLAHRRPYEKEYASVRPV

SEQ ID NO: 119365 - protein, 424 aa, unidentified
MKNTAARKLKQVPEGYLIIGVDPHKRKHAAVAITQDFTTRDKFKFDNTREGLETMLRRARMAMVKSGCRGIMFAIETGGHYWRNVAYFLDEQGVPFRFINQFTLKRRREGKDLNRRKNDYRDSEVAAQLLCTGEFTESTIPQGVYAELRTAHNAYRRLVKERTRITNLVKGLLDALFPEFTLVFKDPCGLTALSVLSTCPIPGVIAGMTEDEFVAIIEARHKGRRLMRKKLRALHYLARTSIGIDAGARSLSCEITFLVDKLELIRQQICIMEGTLVRLVDETEEGKYLLSIRGLNYIAVAGLLAELGCFKAYRSAKQMIKMAGSNPTESESAGKKRAKTPMSKQGRPILRYCAWTSVIPMLRFNPDFRAWAKQRRERPVHANPLGGREVVGAALNRLFRLAFALVKNQTYYQDVKPALTPVAV

SEQ ID NO: 119366 - protein, 429 aa, unidentified
MRTESTPGARGPVFCGVDTHADSHWLCVLDWRGRRVLSRRFPADAAGYEALAGAIAAAGEPACVAMEGTSSYGAGLTRHLASLGMPVREALSPAGMQRRRPGQGKCDEADAERAARAAMSGSRLGTPKSQDGWVDGVRCMLAARSGAVKARTSAINTARSLLTTAPEGLRSRFRGMGGPRLMEELPSVRAEGALGAALGALADLWAAARDAALDMERAIEASLEENCPALLAMYGCGPVSAAKLAVAAGDNPGRLRSEASFAAICGACPIPASSGKTVRHRLNRGGDRQANSALHEIARQRVMRDPETAEYAERARARGKSDREVMRCLKRYVAREAYRALMRPHEVRRPEDASGLVAARRAARVSQVRAASILGTSEKYISMLERGQRELKPIRRAYEAWVEAGLPLDWDRQAFEAERKMDSKKHLAK

SEQ ID NO: 119367 - protein, 363 aa, unidentified
MDTFAGLDVSVQETALCVVDGEGNVLLETTVTTDPQRIAKALAPYRASLRRVGHEAGALSPWLHPALQVLGLPVTCLEARRVRAALSAQRNKTDAADARGIAHILRTGWYGTAHIKQESTYRLRLLLTQRRNLKRKFLDLENTIRHSLKAFGVQLHKVGRGGFDEAVRKAVADDALTRELMDSMLTARAALWKEYLRLHNLVVRYVAQNPVCRQFMAIPGVGPVTALSFMTAVEDPARFKRSRDVAAYFGLTSKRWQSGTSIDIQGRISKAGDPDVRRSLYEAATVMLKRYRGQDKVREWGLQLARKSCHHKAAVAVARKLAVVMHAMWRDGTTYVGNAADDEATRAARQRDKDVRLLGAALA

SEQ ID NO: 119368 - protein, 390 aa, unidentified
MEVSMENTPSARTNNDPTHCFVAIELSKSSWVLGFQTPLAKQTSRYQVKACDAKALLELIDRVRSRMARELGRPVEVMSCYEAGYDGFWLHRVLEAHGIHNHVLDPASLQVNRRARRPKTDRIDADRMVRALIRHLRGEPEACSVIRVPSPEQEDARRLHRERDRLIAERVAHVNRVKGLCATQGIYDYAPLRSDRLKRLENLRTGDGRALAPRLKAEIVREIKRLEVVLEMISTVEAERDAILTEKKSTHLNADKIKMLAKLKAIGAEFSTTLVGEVFYREFANRRQLGSYVGLASSPFCSGSLDRDQGISKAGNPKARVMMIELAWAWLRYQPDSALSRWFRERVGNLKGRPRRIAIVAMARKLLVALWHYLQTGVVPTGAELKAQRN

SEQ ID NO: 119369 - protein, 388 aa, unidentified
MAARTVNNLSPAGAHDDTVRCVLAIELSKKSWIVAVNTPLSDKISRHTLKPCDGKGLLDLCELIRTRIAEATKKRVEIVSCYEAGYDGFWLHRLLEAHGIRNYVIDPASLQVDRRARRAKTDRVDVERLLRSLMAYLRGEPKVWSVVRVPSVAEEDDRRRHRERGRLIGERVQHVNRIKGLLALHGIYDYQPLRPDRRQQLERLCTADGTLPPRLKAEILRELQRLELVVAMIKTIETERDAIASAKVETEHGNAKKIQDLAKIKCIGPEFATTLVGEVFYRSFDNRRQLASYVGLTPAHFQSGSMCHDQGISKGGNAKARTVMVELAWLWLRHQPASSLSVWFHERVGKLKGRIRRITVVAVARRLLIALWRYLETGLVPEGATLKV

SEQ ID NO: 119370 - protein, 476 aa, unidentified
MHDLGAARGTSSRGDQSMSRRRKTNRCEHSTSNDKPQPLPILQPNAAGLDIGATEIYAAVAGDRDQKPVRCFGTFTVELLALAAWLRQCGIETVAMEATGVYWIPVFQILEAQGFKVCLVNPRYFQNVPGRRTDVSDCQWLQRLHSVGLLHGSFRPPQQVCGLRSLTRHRDNLIQLASTHILHMQKALDQMNVQLHHVLSDITGLSGLAIIDAILDGERDPAVLAELRDGRVQASAETIVQALTGDYRAEHLFTLKQSLECYRHYRKMLASCDREIEQLLKHFEPRVDATTKPLATPKVRRKPVRNQPKFDLRKHLYRIFGVDLTEVPGLNVLTAHTILSEIGPDLSKFPNDGAFASWLGLCPHNDITGGRVVSSKTRRVKNRAAHAFRLAANALWRSKSALGDYFRRMRAKLGAPEAITAAAHKLSRIVFHMLSTREPFDESLVRNHEQQFRARAEARLRAQAKALGYSVVAATA

SEQ ID NO: 119371 - protein, 354 aa, unidentified
MNSVRYIGMDVHRDTISVAVLDENGRLTMQSVLATRAGAILDFIHGVRGTLHVTFEEGTHSAWLYDVLVRRVAKLVVCNPRKNALLKSGSKSDAIDARKLAELLRAGMLSPVYHGETSALEVQQMARSYTQLTEDTTRVMARLKAVFRGQAVSCTGKKLYGKRHREQYLAQLGGGLRRRAEHLYEELDALQPLRHAVRRELIVECRKHAAAGWLQSVPFLGPIRAALLIGRVQTPHRFRSKRQFWTYCGLGLETRDSGQYRMVNGQVEHRRRPVLIRGLNWNHNHEMKNLFKSTATAASVREGVWREFYLGLLAKGMRPEMARLTLARKIAAITLKIWKKGEPFHAEHLKLQAA

SEQ ID NO: 119372 - protein, 443 aa, unidentified
MTRKNQKRFEVVHPDCAAVDVGGSEHLAAVDPAKCADPVQRFSAFTDDLHAMADWFSSMGVKVVAMEATGVYWIPLFEILDRRGFEVYLVNSRATRQITGRKSDVLDCQWILQLMTHGLLRGAFRPSDEVCSLRSLVRQRANKVRDQAKSLNRMQKALVQMNIQLAQVISNIAGVTGMSILRAIVEGERSPDVLARLRDKRVKADEATVARSLRGNWRAEHLHALSQELAAYDFLEKQIGECDQAIADALDRLPVLQSDVTTPTKTLRSAHRSNEQQLALHQALNKVMGVDLTAIPTIGIDTALVLASELGADLSRFPTSQHFCSWLGLAPPTRISGGKPLPGKSAKVINRSAQALKQAASIARNDKSFIGASHRARLTRMDTCCAIKATAHQLARLIYAMLTKGQPYVEKGIEKFEERSRDRQLRALERKARKLGLQLVKAA

SEQ ID NO: 119373 - protein, 339 aa, unidentified
MWNIGLDVHQRETQVCILTPDGTVTEHRLPTTRARLTGYFAPLPPSRILLESSTESEWVAQCLEGLGHSVLVADPSFAPMYGRRRRAKTDRRDARALAEACASGVYRLAHRLSARQREVRLALAVRQSLVRTRTRWINQIRGQLRGAGLRLARGTPTTFATRVQALALPTPLAGQLAPLFALLPPLQAAIVAADQQLVAWAGRDPVAPTLQSVPGVGPLTALAFLAALDDVTRFPTAREVPAYLGLVPRERSSGEVVRRGGISKAGNAQVRWLLVEAAWRVLRSPAPSHAALRAWGERVAQRRGRRIAVVAVARRLARILYALWRDAGVYGVRAPRRAA

SEQ ID NO: 119374 - protein, 363 aa, unidentified
MESKRLGNLRVKTEEDFGLYTFKIFKMDKLFKQCVGIDIAKHKFTACVSKYYLSDLQELSDVEEFENNKTGFNQFLRWSRKHLLKETPPVFLMEATGIYYEALAYHLHKLNQDVVVILPNKAKYYAQSLYVKTKNDIMDARVLATMGCLQRFKHHWASPKPIYRQLRALTRFYSDLHKQKTVLANHLEALNSSGEPMPSIIKSYQKMVKEIDKSIENNLTEIRKLVATDSELQQRIQKLETIKGVGFITLAIIIAETLGFELITSRKQLASYAGLDVIERQSGQRVYGRTKISKKGNSHIRAALYFPAMVASRHNKLLREDYNRIISKNPRHKKIGVTALQRKLLLLIYTLWKTGEIYEEANR

SEQ ID NO: 119375 - protein, 345 aa, unidentified
MKITTVGIDLAKNLFQVHAVDERGRAVLRKQLRRDQMARFFANLLPCLIGMEACASAHHWARTLQKFGHTVRLMAPQFVKPYVKTNKNDVADAEAICEAVSRPNMRFVPIKSVEQQAVLSLHRVRQGFVRARTAQGNQIRGLLGEAGLIIPKGIVNVAKRVPALLEDAGDEVPASFRQLIQRLTEHLKELDRQVDELETQIKAWHRGSKLSCKLEKIPGIGPLGASALVASIADAKSFDNGRQLSAWLGLVPRQDSSGGKPKLLGISKRGDVYLRTLLIHGARSAILAAQRKAVNTNVWLASLLNRRHPNIAAVALANKNARTVWALLAHGREFRTDYAPEVSAA

SEQ ID NO: 119376 - protein, 359 aa, unidentified
MKKRLSRKQMFFNKINLTKDDDVYVGIDAHKESYSVAIWLNDAPAIDFVMPADNTKLLKFLEKVRIGLNMVVYEAGPTGYTLARYLQKAALPIKVIAPSKTPRQSARDSKTDSLDARTLAKYAAKGLLRAIAIPTKQQEADRQLTRTREQMVSKQSCVKLQIKSLLLQHGIKQPPSLRAWSANAVRELNALKLSKQLRFCLDVLVEELQFLQNQLAKIEDQLKEIFGSQRHAQKVDLLQTHPGIGPVIARQFNAEIFAPKRFKHKTELAKYVGLSPTIIQSGQSLRDGPITKTGRPQLRSNLIQGAWIWITRDPKAHKTFLRILHNTGHKNKAITAMARRLAIHLWKMVCDNKPYINAA

SEQ ID NO: 119377 - protein, 416 aa, unidentified
MKIVRPICCGMDVHKNIIVATIGITNKKTRITEYIQETFSTLNHDLLNLKQWLINHKCFDACMESTGKYWIPIFNILEDEINIYLTHPKYVKAIKGKKTDKKDSKWICDLFKHDLIKFSFIPPKEIRALREISRYRYKLVGMRSSERNRYQNCMTVSNIGIGSVFSDPFGKSAQAIMKEVLESDIIEDEKILKCIHGSCKNKDKILDSIKHCNIETDQRFKMNESMTHMEELQVHIDNCEIEMMKRAAPMFDQFMHITQLPGISTLSAILIISEIGVDMKQFESDKQLTCWAGLAPANNESANKKKSVRISKAGQYLKPLLVQCALGAIKDKEGYFGIKYSRIKKRRGHKKAIIAIARMMLVSIYHMILTGETFNPSDYESFRNPNPPIKQQVLTEESAIEFLKKSGFDVSKLTKP

SEQ ID NO: 119378 - protein, 372 aa, unidentified
MNQNILYVGLDVDDTQYHGSAFNQDTGEALDFKCRPTLKGLLNQLDKLANHFPGCAIRLCYEASYIGYCLQRDLLSNGHHCEIVSPSSIPSPRGKVVKTDRIDAGYLAQFYANDLLTIVQPPDEVQEQDRDLLRSRQKVMQQRTHLRKHLQAVLRRNGLHYKVETGNKSHWTKHHYGWLERTISGLSGSVKVNLELLLRQLRGLNQILTEYGQQIEALAQAPRYRQAVRSLTCYKGIKNLFALTMITEIGDIKRFPHPRKLMSWIGMDIREYSSGGKHNHFGITKHGNRYLRTAFVEANQRGYRTARISKDVKARRKDTAPELIHIADRCLRRLNKKGNRLLLAGKHPNKVKVACAREMVGFVWESLNQVAA

SEQ ID NO: 119379 - protein, 464 aa, unidentified
MTDKKLWRNRKERKEWARRLQSDDPGLEVVHPHAAGIDVGNGAHYVAVRPDRDPEPVRRFECFTADLHRLADWLQSCKVKTVAMQSTGVYWIPIYEILEERGFQVYLVNARHTKNLPGRKSDVQESQWLLKLHTYGLLNNSFQPPSEIRVLRTYWRQRGEHVHGAATCIQRMQKALTQMNVQLANVISDVSGLTGQAIIRAILTGERDPRKLAELRDPRIHATREEVAKSLEGNWRPELLFVLQQEVEMYDIYQQRIAECDLQLQKHLASFVNTNPSPTSQVEPKRKKAKPAKNAPRFELRSELQRITGVDLTRIDGIDVMVAQTLVSEVGLDMSRWKTEAHFASWLGLCPDNRVSGDKVLSRGTRRVINRAATALRMAAVTLMRSRTYLGAQYRRLRTKLGAPKAITAMAHRLARLVYRMLKYGQGYVDKGAEYYEQRYRRQQIDFITKRAIKLGLQITVAQA

SEQ ID NO: 119380 - protein, 366 aa, unidentified
MLVRGTKDKEPAMAEALKNSIAVVGIDIGKNSFHVVGLDKSGAIVLRQKWSRGQVEARFANMPPCLIGMEACVGAHHLSRGLQRLGHDARLMPARYVRPYSKGQKNDFRDAETIAEAVQRPTMKFVATKTADQLDLQGLHRVRERLVSQRTGIINQIRAFLLERGVAVRQGLRFLRNELPSILGAPSDALSPRMVRILEDLAGDWRRLDERVEGLSKEIEVIARRDAGCDRLISVPGIGPIISSAIVAAIGAGDVFAKGRDFAAWLGLVPRQISTGDRTILGKISKRGNRYLRVLFVQAAWVVLIKPKTWERHGLKSWIEAARKRLHHNVLAIALANKLARIAWSVLAHGRSFEASKLAAAVTQPA

SEQ ID NO: 119381 - protein, 323 aa, unidentified
MTCVIGIDIAKHTFDIAKPLERDKYRTKAKLANSPEGFKQFDQWLEKHAEPHCWVLMEATSVYHEALATHLHQQGYQVCVINPARIAKYAQSELRRVKTDKTDAKLIARYAQRHLEELRPWEPEPESIRQLRGLVRRLADLKELAQMERNRLDVSAESAQASIRIHLEHLDGQIALINTAINDHIDNDPDLREQKRLMKSIDGVSDGTTATLLAELGSPLRFDSARQLAAFCGLTPRLQESGIYRGKSTISRTGSGRLRAALYMPALSAMTYNPVIKAMKVRLAERGKAGRLAVCAAMRKLLHIIYGVLKSGQPFDPIRALAR

SEQ ID NO: 119382 - protein, 310 aa, unidentified
MPDVEGNTVEQVRGYGTTTPDLLELLDWLKALGITHVAMESTGVYWRPIYYVLENDFEVLLVNAAHIKHVPGRKTDTIDAAWIARLLAHGLLKGSFVPPKPIRELRDLTRYRRVLMDDRTREINRLHKLLEDADVKLATVVSDVMGVSGREMMRALIADQDDPEVLADLAKRRLRSKIPRLHKALTARFSDHHAFLLDRMLRRIEDIEADIDAISERVEAKIAPFGKEVELPDSIPGIGRIAAQVIIAEIGVDMSRFPTARHVALWAGVCPGQNESAGDVGASVGSTDVARGSGRSPSATVAARARGGAC

SEQ ID NO: 119383 - protein, 351 aa, unidentified
MIIIGCDFHTRYQQIAMANDETGELLLERRLDHQSGEAHTFYRNLQGPVCVGIESTGPIHGFERLLAELGHELWIGDAAKIRASEVRKQKTDERDARLILDLLLAKRFPKIWVPTPDERDLRQLLWHRHKLVCLRTMLGNQLHALAMSQGLCRKKALFTKKGRMELLHLALAPWASWRREELLKLLEQLAAPIAELERAVMEEANRREDAVLLMTHPGIGPVISLAFVLAIGPITRFCRSKKIASYLGLNPTEHSSGGRRRLGAISKQGNTMVRWLLIEAVYPAVRKDPALRQDYLRLKFRRGHAVAKVAIARKLAVRMYWMLRSGAAYAQLVRMQGSSGATLMDASPSLG

SEQ ID NO: 119384 - protein, 342 aa, unidentified
MDHFAGLDVSVKETSVCIVDDTGRIVREVKVASEPEALLGVLKNPGYHFKRIGLEAGPLSQWLFSALAEAGLPVICVETRHMRAVLKAQINKTDRNDARGMAQMMRVGLYRPVHVKTLRSQKLRMLLTHRQLLLAKAIALENDLRGTLRNFGLKVGMVGKVKFEARIRKLVENLPDMAVLVEPMLIVRRVLREQIVILHRRLLAIVRDDEVCQRLMTTPGVGPVVSLTYRATVDIPARFRKSKSVGAVFGLTCAKYQSGEVDWDGRISRCGDEMMRTMLYEAAQAMMRSKKWSWLKAWAMQIARRRGMKKAIVALARRLAVIMHRIWVDGTEFRWTREAAVA

SEQ ID NO: 119385 - protein, 416 aa, unidentified
MNCRIRLLLRRTGDGMRRPVYDRSLGFKSINALAGAKRRLALKKNSKITRPRKNAAQITSTPLLPRTVGLDLGDQTTHYCILDEQGDVVSEGTVRTTEVGFREQFRSMARARIVLETGTHSPWVSRYLERLGHEVLVANARQVRIIYDNDRKTDKVDARTLARLARVDKSLLHPIRHRSAEAQADLAILRARDQLVSVRSTLINSVRGMVKSVGGRLPSASGAYFATKVREQVPACISGALLPLLEEIENLTVRIRECDKRIEELAKTKYPKTELMRQIPGVGVVTSLAFALTIDDPNRFHKSRDVGGYLGLRPKQNESGSSKPQLSISKAGDHMVRRLLVNCAQYILGHWGPDCDLRRWGLSLMAHGGKNAKKRAVVAVARKLAVLMHKLWVSGEVYEPLRQSNEAVPTEAVPAA

SEQ ID NO: 119386 - protein, 345 aa, unidentified
MQSMYYIGLDVHKKTISYCVKDGSGIVHAEGAIPATRWDLDRWMKMLPQPWTAAMEATIFTGWIYDHLKPHAAALKVAHPLMLRAIAAAKKKNDRIDANKIADGLRCDFLPECYMASTEIRERRRTLRYRNLLVHQAVQLKNKISGLLMEAGVSYNKQKLHKVGYFKELLATNPDINEGLRPLLRLCRETLVRLQKTESALVRSLQRDSLLAERVQRLMTIPAVGPITALTWVLEVGDVKRFSSIKKAISYCGLCGAEKSSADTVKRTPISKQRNKHLQSVVVEAAKMAPRLSPELALIYDREKQKGNANRATLAVARKLVAYLVAIDRSQRDFLVVEKENCAAA

SEQ ID NO: 119387 - protein, 337 aa, unidentified
MKYCGIDLHSNNSVVSVIDETDRVVAEKRLPNDLAKILAFLDPWQAELTGVVIESTYNWYWLVDGLQAAGFIVHLANTTAIKKYEGLKHSGDETDARYLAHLLRLGILPTGTILPPEARSVRDLARKRMQLVQNRTTHILAIENITARQHGMRLSGAQVHRLTAEAIDQMGLPAEVALAMQSSLAVIQTLSTQIGLLENRLAENVEARAEYALLKTVPGIGPILATVILLEVGSIERFDSAGNFASYARCVDSRHMSNGKKKGEGNTKNGNKYLSWAFIEAANFALRFCAEAKRFYGRKKAKTNPILARKALAHKLARACFHILKERRPFDTTRCFV

SEQ ID NO: 119388 - protein, 415 aa, unidentified
MALKIVYKICCGIDVHKTFVVACIASTNDKGVTSYESHRFSTYTSGLKTLLQWLLDRNCKDVCMESTGKYWIPVYNILEKDCSIVLAHPKYVKAIRGKKTDKKDAKWIADLFKHDLVAGSFMPPAGIRQLRDLMRYRFKLTCFQSSEKNRLQNCLTVSNIQLGNVVSDTFGKSAQAILDKILENPEDTSFDLEPLVFKSLKKKLPELRDAIDGYITPEQAGKLKVIKSHYENLEARKAELEELILALAAPYQQELAILQTAPGISSDFTAIGIISEIGTNMEAFPSAKHLCSWAGLTPTNNESAGKKKSVRVSKAGCYIKPLLVQCANAVVKSNKHPEIRNRYLRIKKRRGHKKAIIAIARMLLTALYYMLKNGENYNAELYRKSDLPPVDREITVEQALMIARNQGYKIKSATA

SEQ ID NO: 119389 - protein, 300 aa, unidentified
MYPIKAVGIDLAKLIFSIHGVDANDKCKLRKTVKRNKLLAEVAKLPPCIIGMEACSGAHYWAREFTKLGFDVRIMASKLVIPYRQNEKNDANDAEAICEAATRPKTRFVSIKSEEQQAVLCLHRIRQGAIKDRTARINRLRGLLAEFGITMPKGRYPAQKAIGGILEDGENNLPFLARELLNDLWQSIKCLNEEILKHDRKLYALANQMKSAKRLMSIPGIGEITATAVVATVNDAKHFETSRSFAAWVGLVPRQYTTGGVTRLGRISKRGEKHIRTSLIHGARAVIANCKIKPTEQVCE

SEQ ID NO: 119390 - protein, 428 aa, unidentified
MAYAIAGIDVHKRMLAVVVADLAADGEDAFERRQFGSTPAQLRLLADWLSEHPVNEVVMESTAQYWKPVWAALERHWTPRARARAGAGPMAGTLHLAHARSNRARRGRKRDFTDAERLVKRLVAQELTLSFVPAPEQRLWRTVTRTKVQLTRNRVQLQNRLEALLEQAHLKLSSLVSDLLGVSARRMLQALADGATDPGALAALADHRLRATPEQLRDALEACQELSPVYRRLLKMVLEELQLLDSQISRLDQEMAELLCPYQDQVQRLAEVPGLGVDSAQQILAEVGPTAATFPSAGQLASWVGACPGEHESAEVNYSHRSPKGNRQMRRLLNQAANAAVKSKGTIFEILYRRYVPRLGHPQTIGVIAHRLCRLIWKILHQGVRYEERGPALSQKSKRHRTARMIRALRSFGYRVELASAQSTVVPA

SEQ ID NO: 119391 - protein, 315 aa, unidentified
MDSMIAQTVGIDISKDTLDIHLHPAGVVRRVTNDPKGFAALMTWLRGFEVTRIVFEPTGPYHHAFERRLGEAGLPLVKINPRQARRFAEAIGRHAKTDAVDAAMLARLGAMLEPPVRPITSQAIDDLKELHGARAALVKDRVATVNRGHGLRLPLLKRQSDQHLKQIDNQLAEIDTAMSERIAADEALSQRLKILLSIPGIGKLTAFAILVEMPELGTIENKAAASLAGLAPVARDSGRKHGKRFIQGGRAGLRQALYMPALVAARFNPDLKAKYQALIQAGKPAKLAITAIMRKLLILANSLLRDGRVWAEKLA

SEQ ID NO: 119392 - protein, 385 aa, unidentified
MAPPRMPEAVIGLDVGKLSHWACVATRDGEILLSAPVANREGDLDSLFGRFPDALVVVDQSRNIGALALARAKAAGMSAAYLPGLAAHGAARLFAGDAKTDERDAMVIAKTALGIPDALLPVGDPGPTVAAARALAAQRNFLTCENTRSKNRLRSILLESCPAFEALVDLSDGPQLRLMASLGGAWSVADAGPRRAAALTRGAARGKIEALVRSTASSTRPDAAAIAAEDRAVRLLARRISENSAEIDVITAEISALLEGDDTYRCLLTVPGIGPKTASELAISIDIEDFPSHDKLASYCGLAPRNRQSGTSISSVTASRQGNKRLKNLLIFSCNCLTRTEGRWGDYYARCRERGMPHGKALKALARKRLKVIYAIMRDRVPYAA

SEQ ID NO: 119393 - protein, 327 aa, unidentified
MWWWSKWVGVILSRRSVLGKKRFWGWAAKLKRQAAEVHAVYEACGFGFTLQRQLVALGIKCYVVCPQKLDERNKRVKTDSLDAKALCLKLDRFVEGNRDALALVRVPAEKEEQLRAIHRQREQLVKARKQLEAQGRSLMVNHAIEPVQQWWKRRAFAQLQVPQWMRTLLLNSQPILLVLEEKIRALTVQLQSAAAPNQPRGLGQMTSVVIDREIGNWHRFNNRRQVGSYTGLCPGEYSSGNTRLQSCVTKHGNPRLRAALVELAWRMVRFQPNYKPILKWRALLAKGRLASGAARKKAIVAVARQLAIDLWRFRTGRGTPEQVGLTI

SEQ ID NO: 119394 - protein, 315 aa, unidentified
MKSAHTVYVGIDVSKNHLDIHLYPVHKKLHVSNSADGFEKLIHKLSQYSIGQVVCESSGGYQQNVKVTLENLGYNVWVVDPNRIKSFIRSEGIRVKTDVHDAKMIALFASEKSCRYVPYKASKELLHLRSLVDRRINLIAMRSNEKKRTKNPCQNLCREHIESHINFLENEIKALDKEIDTLIKQCNEFFTKSTIIQSAPGIGKTTSAILLAHMPELGTLDTKSVAALAGVAPYTHQSGIYKGHAIISGGRKAVRHALYMASLSIIARKKSSLGLFYKSLIDSRKPGKVALVAVMRKLVIILNVMIKNKTPWKEK

SEQ ID NO: 119395 - protein, 459 aa, unidentified
MKRKWCGGKRVSVKRAEGKLAVTRPKVAGIDLGSVEHYVACPPCEGQANVKSFGTTTPELAALADWLQAEGVESVAMESTGVYWIPLFELLEQRGIEVVLVDARQMKHVPGRKTDMIDCQWLQLLHSCGLLRGAFRPADAFCRLRAVVRQKATLIDEQADWLRRMQKSLDQMNVRVHRAVSDISGTTGMAMVRAIVAGERDPSKLAGLRDERCSRSLREMIEELTGNWREDHLFNLKEALAMYDFILQRIAVYEAEIQRILQELTPNPSVAPAPEPSNPNKKKLLRARGQEPLRQALYGVCAADMTSIDGISTSTAEVVLSELGPDLSAFPTERHFVSFLKLSPKLAISGGKPIRKRPHGTASTRVGAALRMAALTLRNSKTALGGAYRRLARRKGASVAVFATARKLAILIYRMLRYGAAYVDEGLQVYEQRFQEAKLHMCQQIANQFGYKLIQQETA

SEQ ID NO: 119396 - protein, 418 aa, unidentified
MSEEKMARLPRRYVALDIHKHYCVVAGVDREGRVLLPPVRVEHADLEGWLQKHLLPSDRVVIESTTNAWHVYDLLEPLAERVVVANPIKVKQIATARVKTDIRDTLILARLLAANLVPDVWVPPLPIRQMRQLLSQRRQLVETHTQIVNRMHSVAHRHHLTHERGKRFNDKTTGWQKDKRLCAIEQFQLELEMENLAYIEKQIERISKEVRKRCHQKPWADSMTYLMQLPGFGVITAMTVLAAIGDVQRFETPPHLASYSGLTPGLEQSGTKHRGKGITKEGRRELRWALVEAAQMAVKSDPYWKSRFQEMQKRMHRNQAIVAVARRLLELVWYVLTRRQPYRHFSQERIAYKYLTWAWQMDEAARDGLTRQQFTRYYLMRLGIGHDLTRIALDPKHPRRLATEAELLALRPELNRIE

SEQ ID NO: 119397 - protein, 410 aa, unidentified
MEVLYPHCAGLDVHKETVVACARHMVNGTVTREVRTFKTTTKDLLALSEWLSSQGCTHLAMEATGVYWKPVWHILSDGDFTLVLANAAHVKNVPGRKTDVNDATWLADLMAHGLIRGSFVPDAQTQELRGLLRTRKQFVRERSSHVQRLQKTLEDANIKLDSVISDILGLSGRAMIEALIAGESDPDALAAFAHRRIKAPVGVLREALRGRVTHHHHFLLQLHLRHIDALDDAIGVIDREVDAHVEPFHMAVLLLTTIPGVSDLSAQVIRAEIGGDMSRFPTVGHLISWAGLCPKNDESAGKRRSNRMRKGAPWLKTTLIQCAWAAARKNGSYLQAQFHRLRARRGAKKAIGALAASILTAAYHMLKDGTLYHDLGPDHFDCRARPVQTRRLITRLQKLGYAVQITALAG

SEQ ID NO: 119398 - protein, 424 aa, unidentified
MALEQAQDHQEIIERIAALDIGKATLVCCARVPGTGAGRSRRAQEVTTYSTMTRSLLTMADRLMELGVTRVVMEATSDYWKPAFYLLEAHGFEVWLCNAKDVKHLPGRPKTDVLDAVWLCKIAERQMIRPSFVPPPPIRRLRDLTRYRAALVSDRTGEKNRVEKLLEDAQIKLSVVATDIFGVSGRDMMDQLIAGQRDPKVLAQLARRRMRSKINQLEEAFVGHFTDHHAFLLRRMLTRIDALSADITALDARIEEQIAPFAEAVERLDEIPGVGRTAANVIIAEVGLDMSRFPTAGHLASWAKFAPGVKESAGRKKGTGATGHGDPYLARVLGEAAVAAGKTDTFLGERYRRIARRRGKKRAIVAVGRSILVIVWHLLSDDQARFHDLGADFYDTRLGTERAKRNHVQHLEALGFTVILEPAA

SEQ ID NO: 119399 - protein, 378 aa, unidentified
MNRIIKIGMDVHTTNYTLCIFEPSFEHDGTVHCITQVKPEVKNIIHVIETFKKKHENEELNIVCGYEAGCLGYSLYHELKEKGIECVILAPTTMKTEKGGRKLKNDYRDAKMIAECLAYGGYSAVHVPTELDNSVKEFIRMRDDIKENLKSIKQQIIAFLTRNGKQFNGKSYWTRKHIDWINTVSFSEPLLQDTLKEYMIEYNHLCDRVETLDRQIEEISLKEEYVEKVQQLQCLIGIKTHTALSLIVETSDFNRFKKGNMYSAYLGLIPGDDSSGGHEDKLGITKAGNNHLRRLLVEAAQGYTRGRVGFKSKDLKSRQEKCSSEVVAYADRANERLRRKYYRMTLRGKRYNVAKAAIARELACFVWGIMTDHIDLCS

SEQ ID NO: 119400 - protein, 355 aa, unidentified
MTSTKYIGMDVHKESISIAVMNAAGKIVMECVIETKASIILQFIHGLRGDLQVTFEEGTWAAWLYDLLKPHVTEVVVCNPRKIALLKDGSKSDRIDARKLAEQLYMNKLQPVYHGEHGLRTLKELARSYLTITKDLTRVMNRLKALYRSWGIPCAGNEVYAPRHRAEWLAKISEPGVRRRAEFYYLQLDVLRALRQEVRRDLLVESKKHKAWKLLRQIPGIGPIRAALLVALIQTPHRFRTKRHLWSYSGLGLETHDSAQYRVVEGQLQRSKKPVTLRGLNENHNHDLKDIFKGAAMRASTAAGPLHDFYEALLAKGRKPTMARLTLARKIAAITLIVWKKEVRFDANYLKQQAA

SEQ ID NO: 119401 - protein, 366 aa, unidentified
MLYLGIDQHGKQLTVNIRNEDGSAILKRQVSTEWKRVREFFDRLREEAREDGGFAAIVEVCGFNDWLLKMLAEYDCREIVLVQPDKTSKRKTDRRDAGKLSELLWVNRQRLLAGQKAQGMRRVLPPSAEDVEARQLTSVRKRLAEERTKTINKVHHILQKHNLQQECPTKGKKTKTARRWMAAMTLPSVDRLEMDQLLAQWDLWDDQLEAIEKRIDESQAKHPVARIVRSMPGAGTYSSLALASRIGPIDRFPRPSSLANYWGLAPGCRNSGDVTNRSGSITKEGSAIARHILGQMVLHVLRDDKYVKKWYMRIKKRRGSKIARVAVMRRMATVLWHMVKYDQPYMFGGPPQVKASRAAYEEFRDV

SEQ ID NO: 119402 - protein, 338 aa, unidentified
MKTHVGVDLHQRFCYLTAMNASGKIFRQAQVVNEGEALRAWLRQLPGPRQVVVEASGFWPAFARAAGPESERLVMVHPQRVKAIASAKLKNDRVDSETLAHLSRCDLLPEAWMADVATQQLRLLVRLRITMGRQRARAKNQLQAVLHQEGFKKPVTDVFGKRGRAWLKGLELSASGRAVVDTWLREVDHLDVELAAQTRELERLAGADARARFLRTVPGIGAYAAMVILAEVGDVARFESKRGLASYAGLTPVVRESAGKRKRGGITHQGSNTLRWIMLQVAQVAARCSPGARNYYAGLRARKPAQVARIALARKMLTVVWAMLRHGVCFDEEQFARG

SEQ ID NO: 119403 - protein, 408 aa, unidentified
MNTLYVGIDVSSKSNVVFLMLPNGDKHSNFSVANSQEGSTQLVKRIYSALTSHSLDTVLIGLEATSVYGDNLVYFLREDATLAPFNRKIHVLNPKQVKKFHDAYNDLPKNDYVDSFVIADCLRFGRINKEVYLGDYRYKALQNLTRARFFAVQNLIKEKQRFMNVLFKKYSTMTQEKVFSDTFSTTALAVYDEFDSAEALANMDLHELTDFIIEKGKNRFPDPDAVAKAIQKAARSSYRLPKTVNDSVNQVLSISITSMKALESQIKEFDKAIKAQMELLPNVLISIPGIGPVYSAGIMAEIGDINRFDNQAALAKYAGLAWKQHQSGSFEAEVTRLIPSGNRFLKYYLYEAAFSLVRCDKEYSDFYHLKYKEVNRCQHKRALALTARKFVRLVFRLLKDNRLYVPAK

SEQ ID NO: 119404 - protein, 342 aa, unidentified
MEINTIGLDLAKSIFQVHAIDAAGTAVVRKALRRAQVVPFFAKLPRCLIGMEACGTSHHWARELARLGHEVRLMPPAYVKPYVKRGKTDAADAEAICEAVTRPSMRFVPVKSAEQQAALALHRTRDLLVKQRTQLVNMVRGLLAEFGIETARGLHHALSLAARLSAGDAPEVPALAQRVVKGLADQIGALQVQLDLLEKDLLAWHRSNELSQRLATIPGVGVISATALAASVTEPERFRSGRQFAASLGLTPLQNCSGGKERMGRISRMGDRYLRRLLVLGMTSLVRRARSTPDSVDPRFVAMLQRKPVRVVTVAAANRTARVAWAIMTHGGTYRTPPAAAA

SEQ ID NO: 119405 - protein, 367 aa, unidentified
MTIVAHAHPFVVGVDTHAKNHALSILATPAGVQVDDGEFPTTAAGMARAIDWVARRTGGDLAGLWVIECAASFGSQLAHAVTAAGYQVVEAARMSAKANRGVGKSDPLDARRIAAAVLPLELDRLRHLRKDDGVRVGLRVLIAARDHMTGERTATVNALIALLRVLDLGIDARKPLTAAQIIEVSKWRTRTEDIGAAIARAEAARLAKRVIVLEAELAENTKTTTDLLRRSPARVLLDKPGIGPVTAAVAMAAWSHDGRLRSEAAFASLAGVNPIPASSGNTVRHRLNRGGDRRLNQALHMAVVVRTRMDPATKAYVERRLTEGHTKKEIRRCLKRYLARQIYRTLTAVTRADEALAAVTSATPIPA

SEQ ID NO: 119406 - protein, 351 aa, unidentified
MIVIGVDFHPSVQQIAWVDTETGECAERQLTHSNGEAEKFYRDLQRRGVSVRVGMEATGHARWFERLLSELGFELWIGDPAQIRAKRVRKQKTDRQDAQLLLKLLLEDRFPRVWVPSPENRDLRQLLWHRHRLVQMRTRIMNQLQAVAMNEGVRHRKKLWSVAGRTQLEAFLLAPWAARRRQDLLQLLDRLSPNIDQLSAAIEQEAQKRPEVLHLMTHPGVGPLTALALVLIIGTPERFHCGKQIGSYLGLIPCEDSSAGRQRLGHISKQGNSLLRFLVVEAAQVAVRCDPEWRRQFVRLALRRQRPIAMVAMARKLAVHLYWMWRKEGEHQQTSKFGSHTGQLGSSHGVK

SEQ ID NO: 119407 - protein, 339 aa, unidentified
MAIVGGLDVHRGQITFDCLDSDSGQVQRGRIVPATRDRFRAWLRELPRPAVPAVEGCTGWRFVVEECREAGVEVQLAEPADTAAANGPEHRARTDRADAAKIRHLLAEDRLLQSWIPPTQVLEMRTLLRLYKDLRDEHTSWVQRIHAHLFHHGVPAPVGDLLALEMRARLTAGEGLSPAAHQAVQAALRTLDALEREMTVLRRQFTLFARRQPGCAALLEYYGVGPVTAVAIWAELGVARRFSSSRQAVRHAGLDITVYSSDSKRSPGRLARQGPPLLRWALGRAATCAARPSAPDYAYYQQVKERCGGNRAALSVARKLIRRAHHTLRALGDKALAPA

SEQ ID NO: 119408 - protein, 402 aa, unidentified
MLSVGIDVSKEKSTVCVVSSVGKMVLKPIEVFNNENELEALCQKLCNIGEDLRVVMEATGTYHLPLIKKLKEHGFFISVINPLLMKKYASATLRKVKTDKMDALKIANYGIDNWHKLVEYQPQKEIYEELRFLGRQYSHYIKVKVDIKLSFISILDRTMPGIKKLLTSKHTENPTKDKLSDFVERYWHYDNITKLSEEEFVSDYCKWAKEKRYAASAAKAKSIYQAAKAGISTLSSSAASTKMLTLEAVRALREINKTLLTILTEMKKLAITLPEYNTVLAMNGVGAVLSLRLIAEIGDVNRFHSGSALIAYAGLDAPPFESGNFAAQKRSISKRGSSLLRKTGYEVMKCLKSAKPTKDAAVYDYMIKKEREGKPKKVAKIAALNKFLRIYFARVKETYSAA

SEQ ID NO: 119409 - protein, 312 aa, unidentified
MTYFGIDVSQATLDGADATGEAWQHANDAAGIAATVARLGAQGPTLIVLEATGAYHVPLTAALAAAGVPVAVVNPRQVRRFAESVGQLAKTDRLDAALLARFAATVRPAARPLPDAATQELAALVDRRRQLVEMLTMEHNRLAVARRSVQPSVRQTIRALERALRALEDETDRWIQDSPLWRAQEDLLTSVPGVGPQTARLLIARLTELGALSAKEIAALVGLAPFAQESGRWRGVRRIRGGRADVRTGLYMATLAAIRCNAVVRAMYRRLVAAGKPKKLALTACMRRLLVILNAMVKHQTRWQASPTPTTA

SEQ ID NO: 119410 - protein, 384 aa, unidentified
MPRPMKELTEVEHHTATLFASLELSQTSWLVTSLSPGSVTMSKHSISAGDGAGLLGLLARMRVKAESVAGVPVEIVVIQEAGLDGFWVHRLLEANRIKSHVVDAASISVPRRRRRAKTDAIDGETLLRTLRAWTRGEPRVCAMVAPPSPEQEDQRRISRERAILLRERVRHVNRIKGLLSSQGITDFEPLHKDRRIRLDALRTGDGRPLPPRLKAELLREIELIELLLLQIAEVETERDSAAEFGTAQNPSPIALLTRLRGIGSQIASVLYFEGLYRHFGNRREVAAYAGLAPTPWRSGTIDREQGISKAGNPRLRHIMVELAWLWVRHQPDSALARGFRARVGTETGRVRRIAIVALARKLLIALWRYVNLGEVPEGAVLKSA

SEQ ID NO: 119411 - protein, 350 aa, unidentified
MLLGVDYHPSFQTIAFFVEETGECGEREVNHSAGEAEKFYRDLKERGISVRVGMEATGYSRWFERLLVELGFEVWIGDPAVIKTKRVRKQKTDREDARLLLKLMLEDRFPGIWVPSPENRDVRQLLWHRHRLVQMRTRIMNQLQALAMNENQCRKSKLWSERGRAEFEKLPLSFWASRRRQELLELLDWMNPKIEELTAAVEQEAKKRPDALRLMTHPGVGPITALAYVLIIGTPARFPRGKQIGTYVGMIPSEDSSGGKQRLGHISKQGNSLLRFLLVEAAQAAARIHPDWRRRYLHLAMRRHKNIAKVAMGRRMAVELYWMWRNGCEYSQLSKCGSYAGQLGTGHGGK

SEQ ID NO: 119412 - protein, 389 aa, unidentified
MRSSHRFDTPVADSEHATMYVAFELGKAKWLAGIVSPGSAKLSRHVLPGGDTAAVWHHIARAHGRAVKRLGKPVRIVSCYEAGYDGFWLHRWLEAQGVESRVLDPASIEVNRRARRAKTDRLDLEQLMRVLIRHEGGERRVCSVVRPPSVEQEDTRRPWRERERLVKERTMHVNRIKGLLHGQGVRDLQPRARGFVEQLEGARSGDGHALAPHLVSEIEREHVRLTLVEQQIGAIEAQAEATRQAAVPNGVANKINQLIELKSLGPATSQTLVGEAFFRDFQNRRQVGAYFGLTGTPFDSGNSRHEQGISKAGNPRARTAAIELAWLWRRHQPRSALSRWFEARVGTQKGAIKRIAIVALARKLIVALWRFLEHGVVPEGAVLRSASRA

SEQ ID NO: 119413 - protein, 400 aa, unidentified
MISVGIDVSKGKSTVCILKPYGEIVSKPFNITHTQKDLSELSSMLFRLNDEVKIVMEATGIYHLPVLTYLQEKGFFVSVINPYLMKSYRNESLRKAKTDKIDSRIIANYGIDHWFKMKEFQTSGEIYEELKLLGQQYRHYMKLHLLSLAELTHLLDLTMPGIKNLLASWNETNRKDKRSDFVERFWHYDVITSMSEQEFTEEYILWAKEKKYVPSQEKAKVIYTLAQESIPTLPSETSSVKMLVTEAVRVLKEVDATLGLILSRMQEIAKTLPEYSVVREMGGVGNTLAPKLIAEIGDVRRFRNGKALVAFAGIDPPPYESGQFVGCNRKISKRGSASLRKVGYETMRSLKMRSRPEDPVYRYVVKKESEGKSKKSAKIAGLNKFLRIYYARVTELYNLI

SEQ ID NO: 119414 - protein, 343 aa, unidentified
MEAVTTIGLDIAKSVFQVHGVGASGAVVVRRQLKRRYVLAFFEKLAPCLVGIEACATSHHWSRELKGLGHTVRLMPPAYVKPYVKRQKNDANDAEAICEAVTRTNMRFVEIKTPEQQSCLMLHRTRHLFIRQQTSVINAIRAHLAEFGIVARVGRNGVMDLLEGVADSSDSRLPEVARSCIAALGDQLRVLKAQILEFDRRIMAWHRSNETSKRLDEIPGVGPVLATALVGSVADPKAFRSARHFAAWIGLVPKQHSSGGKDRLGGISKQGDRYLRSLFTAGALAVIRYAKIHGTKHRPWLAALLARRPTKVAAIALANKIARMAWAMMVRGERYQEPAALAA

SEQ ID NO: 119415 - protein, 367 aa, unidentified
MKKPKIPSATAFEPNAAYLGIDVSKEHFDAALSLSQDRVFQEIVWEKFENSTKGLKAFDKWLTKQGVNDALRPQLLVVMENTGIYHRRLWQYCCQHDLHATIGNAADIKWSMGLVRGKDDITDSMRLCEYAYRHEDRLRKADAFDENILLLKDLQTMRRRLLKQLSANKVALSELRSTNVKATQAIMEKASKDAIQGIESSIKKVEAQITALIRKNEAIRKNYQLLLSIPGIGHVTAVYLICCTANFIGEPTGKQLACYAGVVPFESTSGKSVKGKPKVHKMANKELKTLLHMGARSIAAHNKEAKDYYQRKSKEGKHDLAIINALKNKLLLRVAAVIRNGTTYVDKYKVAEEQPTKNKLAPDLVRS

SEQ ID NO: 119416 - protein, 322 aa, unidentified
MDGVFVGIEVGKATLAMAVGPTGETRTVTNDATGWAQRTTWLSAQPVQRLVLAATGGDHAGGWLALGEAELPVAVVNPGWTQALARSEGRRAKTDRSDAQLLARYAQQQQPAVTPIPAEVGRQLAALIGVREHLVKQLVMTQNRQHTAAAIVRPLQAELIASLTAQRERGTAEIAALGASDPELQAQVAQLQTGPGIGPVVRATLVARLPELGRLDRRASASLAGVAPHPRESGKWRGQRALGGGRRDVCKALYQMAQRTIRWEPTIRAQDRHLTEHDHRPHKVAVIACARRRLGILTAMVRDGLTWQQTRVGQGVYLSTSA

SEQ ID NO: 119417 - protein, 350 aa, unidentified
MKYVGIDWAYRTAQWCALSPGGELCGEGRIAADRDGLARLVFELGDEVKACLEMMSGALWVRDQLVACGWQVEVADARRVKTVAPLAAKTDKVDARLLAELSRRELVPALWLPSLDERALRERLRRRMHLVRLRTSAKGRIFGLQTQWGVRVSLARLRRADGLTVLERAGVPAVWRRSVSESLALIDFLDARLEPLDAELRPFAQADPRAVLLDTIPGVAELLALTIAVEVGEISRFAGPQKLVSYGRLAPRVHQSGESRPRSGPLSKSGSRLLGWAAVEAAQQAWRESNPWHELYLDVSRRSRNHNSAKAAVARKILIAAWHMLSRNEPFNPTPRTTSVPASSRLALAA

SEQ ID NO: 119418 - protein, 409 aa, unidentified
MYAICGGLDVHKDTIPACLRRLGAPGQVPQELRPCGTTTAELLMFLDWLVAAGCTHVARESTGVYWQPVCTLLEGSVEQILVGNAQPSKALPGRKTDMLDAEWIAQLLQHGLLRGSFIPPAPIRDLREGTRYRKQLIRARADEANRLQKLLEGANLKLGSVAPDILGVAGRALLAARVHGETDAAARARLAKGRLRKKQPQLVAALTGRITPGQRTLLGQQLAHVEYLDRAIATLDALIGTLMAPYPAEAARVCTVTGIETRTAEALIAELGVDMTVFPSAGPCASWAGMCPGHNESAGKRKSGKTRQGSQGLRTALTEAAWAARRTRTYLGAQAHRFARRRGKKQAAVAVGHSILVIAYHILKEGTTYREFGQDYFDKRDTARLQQRLIARLESLGVKVTVEPIAQAA

SEQ ID NO: 119419 - protein, 355 aa, unidentified
MNDSKFIGLDVHKTSISAAVLDHDGKLVMQSVFATHAAAVLSFIHGVRGSLRVTFEEGTHSSWLYDLLRPQVSEVLVCNPRKNSLLKSGNKSDQIDARKLAELLRAGLLSPVYHGQTSTVTVKELGRTYTALTEDTTRVMSRLKALYRSQAIATEGKKLYTKRRREQWLKELTQAGRRYRAERMFEQLDALQRFRRQARRDLFVECRKHAATGVLTSIPFLGPIRAALLIARVQTPFRFRGKRQFWAYCGLALETRSSADYRLVEGELRRAKKPLFIRGLNQNHNHDLKNIFKAAATTASGSPGPFRDYYETLLGKGMKPEMARLTLARKIAAISLIVWKKGERFDPEQLKAQAA

SEQ ID NO: 119420 - protein, 389 aa, unidentified
MSYCPVAGIDVSKRFSDMCILSPDNKIFAQEKIYHDETSINRANALLQKAERLFFSKPVIVMESTSHYHLILFQFFSEHGYDVIVVNPLQSNSMKDFSIRKRKTDRVDAFKLAMMYRTKTLRPSQIPQTATRALRQLCRHRAELLNDVSSYKNRLTALLDQTFPGYDKVFSDVGGVTSCAVLVRFPTPTILLVEEESELVEVIAAASKSGYSFAKKKAGLLISAAQKAQTLGIHSCADETLIVCTIQMLRTLSESVLQIETAIDNLLAQIKEMRNNVSLLQSIPGVGSHSAALLLGEIGDISLFKKPKQLAAYFGLDPTERQSGSFRGTKNKLSKRGSPYARAALHMGVVNSICKRGKDSAANPVLLSYYEKTNRQRLLKQRQCTNWSL

SEQ ID NO: 119421 - protein, 350 aa, unidentified
MAKVSMIGLDLAKNVFQVHGVDAAGKVVVRRQLRRRQLEKFLAALPPGVVVGMEACGGAHHWGRVAQKLEHEVRMMPPAYVKPYVKRNKNDGRDAEGVCEAMGRPTMRFVPVKSIESQAVLVLHRTRRLLVRQRTMTANAFRSALSEFGLVAAQGLKGLRSLMETLDDAASTIPEAARMPLQMLARQWERFNADICKMEGEIVRAAKSDEAARRLMAIPGLGPIGATAILAAVPDARVFKSGRDFAAWLGLTPRQFSTGGKQRSGGISKKGDRTLRTLLTVGATAYLKVERARGPRDPWLRALLARRPFKVAAVAYAAKMARIIWAMLVTGELYRAAGQRRKLAVQAAAA

SEQ ID NO: 119422 - protein, 344 aa, unidentified
MKDVRILGVDLGKNSCSIVGLDGEGRVLLRRRTRREGVIALAAKLPGCVVAMEACCGAHHLGRLLVEQGHEVRLMSPEYVRPYVKAQKNDDRDAEAIAEAATRPTMRFVALKSEAQLDVQVLHRVRDRLVGQRTSLTNQIRSILLERGIVVPQGRRSLLEALAVLSSEPDGRRVGTRVQRLLDDMLDQWRALDARIKALDDEFAEMARNDPAARRLATIPGIGVLNATALVAAIGDGRTFSRGRDLSAWLGLVPHQATTGGRPKLLGITKRGSKYLRKLVIQGARAALPSLARTATPLGGWLRGLLARAHGNTVVVALASKLIRIAWALLRNETRFVAGGAAVA

SEQ ID NO: 119423 - protein, 349 aa, unidentified
MILVGCDLHARDQQVAVLDTATGEIQEQRLTHDGPSVEQFYAALPGPVTVGIESTGYALWFHALLHRLGHEVIVGDAAKIRAMVVRKTKTDRRDAAHLLDLLRHDRFPIVWLPDPAVRDQRTLVAHRMRLVRMRTMVKNGVHAIALNYRLALGPSLFTRAGVAQLQALSLPPHTSCRRSESLELLRWLDTHIKGLDDQIEEAAHAHPEAQRLMTHPGVGPLSALATVLVLGSVIRFPTSKHVVSYVGLAPAIESSAGKHRLGRITKQGNALLRYVLGQAGQVAIKRDPDLRRLYYAVLHRRGRSRAKIAVARKLLVRLYVMLRDQIDYQTFLYRAPAAARRKELMPTTP

SEQ ID NO: 119424 - protein, 316 aa, unidentified
MKSQVFVGLDVSKQHLDVAVRPQGRHFVTNNNDQGIKQLVKRLVALKPQLIVLEASGGYEFLVTAALAEAQLPVAMVNPQAVRKFAGATGKLAKTDKIDAQVLAHFAEALKPEPRSLPDQDQQLLKAALQRRLQVVKMIGQEKNRLEKTFIPRVRQDIQAHLTWLQQRLEQLDRDLNDQIRNSPLWRNRDRLLQSIPGVGPIVARAVMAQLPEAGTLPGKQAAALVGVAPYNRDSGRFRGRRMIRGGRSHLRHMLYMAAVVAARFNPVIRPFYQRLLAAGKSKKLALTACMRKLVLIINAMLKNNQPWNQFLTQVP

SEQ ID NO: 119425 - protein, 359 aa, unidentified
MAVIEGRERHIVGGVDTHKDLHVAAVVDEQDRILGTRSFPTTRQGYRQMLAWMLSFGELQRIGIESTGSYGAGLLRFMQQAKVVVLEVTTPDKQDRRRRGKNDDFDAQNAAHAALAGQRTVTPRSRDGMIESLRILMACRKTAVSARRIALQMIHNTIVCAPDALRDQLRNLTRMQLVRTLASWRPDLTAYRDLDSAYRIGLKSLARRYLELHDEIADLDVMIAAIVNELAPNLVARNSIGHIGAAQLLLTAGDNPERLRSEASFASLCGVSPVPASSGKTVRHRINRGGDRAANSALHIIAIGRLRTDQRTKDYVARRIAEGHSKLDAIRALKRYLAREVFTLITQRRKEINATRIAA

SEQ ID NO: 119426 - protein, 416 aa, unidentified
MYYVGIDWADENHQVFITDDSAQRLDAFSIENSRSGVEELFERIRYFVKDQKQVLFALETSKGLLIDSILDAGYTVYPINPKSVDRYRDRYKVSGHKSDDFDAMVLANILRTDRHNYRPILPDSPITRELKILTRECCSLIRLKTLLSNQLTSCLKDYYPVALELFCKLDQPITLVFLKNFPTYQQAKQVSLPQWGKFLSKHHYRVGVKKKANEIYLKLQEPQFNVEPFVDNAKARYTLALVEQLQLLLAQIKSFEDKIEQLLKQHTDGEIFLSLPGAGITLAARMVSEFGDNRERYKKVSSVQAEAGTAPITESSGNWKFVHFRSACRKSFRNTMHQFAFCSIKESSWAKQRYQQYVASGKKHTQSIRCLANAWLEIIFPMWKNYMPYSEQRHLLKYVKEQKPVNYSRNLNYLSV

SEQ ID NO: 119427 - protein, 344 aa, unidentified
MEVAIGVDPAKGSLAVAAVDPLGRVLGAGEFSNDPRGHRALLRWVRERGVDRVIGIECSLSYGASLSRYLLGGGEDVREVPTTLTFQQRRRRHSQGKSDLVDSVAIARIVASGEVLPSARRVEVLTDLRALVDYRDQLVRAKTRVANRAHADLVNLRPGYGREVANLRAKVHRAKARSLLRGDRSVRAELVRKRLGELSRLEGEIAAMDRRIEAVVRDTATSLTDIPGVGPFIAAKILGEVGDPSRVRSKSAFAVLSGTAPLPASSGQTHRHRLNRGGNRQLNWALHYIALVQCRIFPEAQAYMARQREGGKSHKEAMRCLKRQLSNVVYRHLLADARGAELAA

SEQ ID NO: 119428 - protein, 418 aa, unidentified
MTSTLSKKLASVKPGTLYAGVDLALDRNVAVVLSERAEQLDRFGFPNERGGYDYFHHRLETLRERWRAPAVLVGMEPTNYFWKLLAADLEQRQVSYRLVNPYTVKKHREGDQLDRSKDDRRDAFTISDLLRTGKYTETRLLHGGYAELRQYSTLYEQLRRDTGRQKTIIRNTAGQLFPELPRVFKDFTGLTALAMLNNHAPTTVIREMSQDALISGVRADFQGTRLQVSKLCRAHVLAANSVGLQDGVQALQLSLRLHIEALETLQRQLEEARIAFVDTLLALPESRYLLSVHGLGVVTAATILAEIGDPSHYSNARQLIKLAGTQPVLNTSGRKTRSKTPMSHKGRPRLRTALFFAVMRLIQTDETFAREYQRLQLRQENPLIKMQALGVLMNKLLRILWALMRHQTFYDPAFQPGD

SEQ ID NO: 119429 - protein, 351 aa, unidentified
MLIIGVDYHPSDQYIAFADTETGECGERRLNHSEGEAEKFYRGLQPRAASVRVGMEATGYSRWFERLLAELGIELWIGDAAEIKTRRVRKQKTDTNDARLLLKLLLEDTFPRIWVPDPENRDLRQLLWHRHRMVQMRTRIMNQLQALAMNEGQRRKKKLWNEQGRVQLEKLPLAPWASRRRKDLLELLDRMNPTIEELTRAIEREARKRTEVARLMTHPGVGPITALAFLLIIGTPKRFSCGKQIGSYVGLIPAEDSSAGHQRLGRITKPGSTLLRFLLVEAAQAAVRGDADWRQRYLHLAMRRQRNIAKVAMARRLGVRLYWMWRNGWEYSEWVKFGSNAGQLGTGHSVQ

SEQ ID NO: 119430 - protein, 365 aa, unidentified
MRIDVGVDLHKTQMTVYVRTGKDEGEGGEYATGEEGYREFLKALGKWRSKGADVRVAVESTGNTRYFMHRLETRGYPVVVINTMKFKVITQSVKKTDKHDACTIAEFLSKDMLPASKLCSEKSEEVRRLLKVRSMLVRTRVSIKNQIHGLLVSRGMEDTRASLQSKRGRQKIQDTLAGAGNGLVVQPLFETIEVLGEKIKAIEAQIEKLMAEDKAVKLLETIPGCGPVTAWTIRAYTDDIRRFASYKQYSSYAGLVPWVQCSNETEHYGRITKRGPEELRTAFVQLVMGIRRSRSTVSWRLMVQYESMKRQKGTGKSIIATARKMSKIVWYMLMREEEFKTSLMVDTKLDSVIQSMREEALCESA

SEQ ID NO: 119431 - protein, 376 aa, unidentified
MNRVVYVGMDVHKDTYSLCGFDAQNQCFLTETTIKSETVLVLKYVKSIENRYKDDEVAVICGYEAGPTGFSLCRDLQKAHVSCVVMAPSSLPKSPDNKRRKTDRIDARDLALHLAHHTYKAVNVLSPEMESIKELTRVRASATKAKKRAKQNLISFLLRKGMVYPFGGRAKYWTQQFSAWLRTLEFANPLDRYSFEEYLTEANHQIARVALLDAKIAEAAENQLIEADVKKLCCFSGISTYTAVSLISEVGDFKRFEKASHFANYLGLCPGVHSSGLSSQNLGITKAGNGNLRRLLIEASQSLGHSLKCGKKPLRVLSRQKGMDPSIVAYADRAVARVKRKRTAMIIRGVNVNKATTAAAREMACFIWGMMTNNVA

SEQ ID NO: 119432 - protein, 371 aa, unidentified
MEQSSKTVYVGLDVHKESIAVAYAPEDRGAEVVSLGPIGTRQCDIDKLIRRLEAKGATPVFVYEAGPCGYGLYRYLTGKGFACHVVAPSLIPRKAGDRVKTDRRDAMTLARLMRSGDLSAIYVPGIEDEALRDLSRGRDDAMQDLKRSKRRLKSFLLRQDIRYEGRATWNAAHLRWLSEVVCPTPPQQIVFQEYLRAVTEQHERRQRMEHELHEAVQGWRLYPMVQAIQALRGVELTGAVILMTELGDITRFENPRQLMSYLGLTPSEYSSGERRRQGGITKAGNSHARRALVEGAWAYRYPAKVSRHLQLRLETLPTEVQAISWKAQVRLCRRYRQLTARGKHVNQVVVAIARELAAFAWAIARLVPLTA

SEQ ID NO: 119433 - protein, 397 aa, unidentified
MYIVGIDIAKRKHEAAVIDGEGTVIIKPFSFTNNCSGYNRLLAMLTKAKLPLDEVSFAMEATGHYWLALFTRLQKEGFRVQVINPVQTNSIRSFYIRQAKTDPRDALLIAEVIRFGHFSESTLHPENIYELRELCRGRHAIVSMQADVKRKVVALLDQVFPEYETAFTNLFGDTSMAILQTCPTPKELSEMPLEELCHLIEVSSRKRFRMEKAQELQALARNSFGFAMAGDVFSTMIRLYAKHLDFLKQQVREMDRKIAEIMDTLDTPITTITGIGPTLGAYILSEIGDISRFSSAAKLAAYAGIDPTMRQSGEYNGVRNRMSKRGSPYLRHAIWLAASSAVLHDPALKLYFQKKRDEGKPYMASVGHACRKMVSIIYAVMRDNKAYTPYIPNEISA

SEQ ID NO: 119434 - protein, 424 aa, unidentified
MNLTQNDRLNQVTADTLVVGVDIGSQDHFARAFDWRGFEFSKRAFRFSNTSVGFLSFLRWLYELQGKTDTKKVIVGCEPTGCYWLTFQKFLKDHGILLVTVNPYSVKKCKELDHNSPEKSDLKDPKTIAGLVKDGRYSTSYLPSGIYAAIREASVCRDMVMKQHVRLANQIQGWLQKYFPEYFECYKDWNSTSGLMVLKNAPLPQDIIKLGSGGINQIWREAKVRAAGIKRATTLVEAAQNSVGLEGGEAARLEIWILVNDYTSKVEQLNRLDGFLKEKIMEVPNVEKLLAIKGVGLSTVIGFVAEVGDIGRFTDPRQVQKLAGLEITKISSGKRKGQPGISKRGRRKLRRTMYESARALINWNPAFLDVFLYYRNRERRPLGSMQAKIAVACKAIRVFFVIMQTGCDFDEERFRKDILRPEAA

SEQ ID NO: 119435 - protein, 316 aa, unidentified
MNTLPEPVPPVHAGLDVAKDTLQLHLQGRQHALPNTPAGHVRLLRLLRAVPGAHVVCEATGGYQRAVVAALQAAAVPVSVVHAACVRHFAQAQGRRAKNDPLDAAVLTAFGQALRPAPTPPPDAVLAELRELVRWRQFLKEQLVAAGNRAGHSTTGFVARQQARLIRSLEKQVAAAEAELGAALQRSPHWQAQIQRLAELAGVGRLTAVATLSQMPELGRLSRREAAALAGLAPWTRQSGPWEGQRHIGGGRPEVRRALYMAAVAVARMAHTTLGRFYAQLRAKGKPAKVALTAVMRKLLLQMNHTLKSAPLPLAN

SEQ ID NO: 119436 - protein, 376 aa, unidentified
MSEIIRIGIDTSKSIFVLHGVDAAEQPALRRKLRRSQMHEFFRKLAPTKIGMEACGGAHYWARELKALGHEVVLLPPQYVKAYVKRNKNDAADAEAICEAMSRPTMRFVPMKTSEQQAALMLAGTRRGLTKRRTQLSNTIRGYAAEFGLTTAKGLDKIEPLLARIALSADLPKLAKELFAAYDREYAQLERQFLGMEARLMAWHKHNELSRRLVEIPSIGPIGATLLAMKVTNPHAFRCGRDFAAWIGLTPKDHSTAGKTRLGVISRAGDEELRSVLVAGATAVIQQAQKGRGYCPPWLVDLLKRKPAKLVAVALANKMARVAWKLMVSGERYNPACIAAPATPTREGAALRCVGLRAAPPRSASRLGAVVARTKA

SEQ ID NO: 119437 - protein, 370 aa, unidentified
MPKTRVRFVGLDVHKDSIVIAVAERGRDSARDIGSFPSDWNSLHKQLRKLSMGFTLKLCYEAGPTGFELHRRLVEAGFDNQVVAPSLIPRKPGERIKTDRRDARKLARCLRAGDLTSVYVPNEETEALRDLERARDAAKKAETTCKHQLGKFLLRHGRRFDGGSNWTVRHFAWIRQQTFEWEAQQRVLRDYLKALGDATERVEGLTSDIKELVETSTLAPLVTALQAMRGVATISSVVIAAEIGDLRRFDSAGAFMSFVGLVPSESSSGQRKQRGSITKTGNRHVRRILVEAAWHYFRPAGMSKALRARNAKVSDEVRAIAWKAQKRLHRKFQHLVYEKGKQRNVAAIAVARELAGFLWAIGQEQTLTAA

SEQ ID NO: 119438 - protein, 349 aa, unidentified
MTIVGCDLHTRKQQVAVLHTDTGEVVEQELLHAGDAVEQFYRTLPRPVTVGIESTGYALWFHELMQRLGHTLLVGEAAKIRAMVVRKTKTDRRDAQHLLDLLKHDRFPAVWIPDPATRDLRALVTHRMRLVRMRTMVKNGLHAIAMNRRLTLGPSLWSQRGLAQLQGLALAPHTTQRRDESLQLLTWLTARIEALDARVAAAAQADPGARLLLTHPGVGPLTALTTVLVLGPVARFPDSKHVVSYTGLAPAVHASADTCRLGQITKQGSPLLRFVLGQAALIAAHSEVDLKRHYRTLLRRRGRPKAIVAIARKLLVRLYIMLRDQIDYEEFRRRGRTPRGPEVPPPALA

SEQ ID NO: 119439 - protein, 360 aa, unidentified
MSLDRTFVGLDVHTWSVVAHALDATTGEVWQRRLTPDPADILGWVSGLPGPVKVVYEAGPTGFGLARHLREHGVECLVAAPSKLQRPTGDRVKTDARDAAHLARLLKLDEIVEVVVPSETQEAARDLVRAREDVRGDLMRARHRLSKLLLRQGIVWTGGQAWTGRHDVWLRSQHFELPGRQLAFDSAYEAMTLTLDRRDRLDKAILEMAEDCEFTDVVHRLGCLRGISTLTGFGLAVEVGDWTRFSGSTIGAFLGLVPTEYSSGQSRSQGSITKTGNSHARRLLVEAAWHHRKAYRSPGQTMRTRWDAAPAAARVRGHQGNQRLHQRWEGFTARRKKPVVANVAVARELAGWAWSLAVMD

SEQ ID NO: 119440 - protein, 385 aa, unidentified
MANQNDLSRSVVAFEQHNTIIAVIEMSLSSWLVAGIVPGIERHPRKKLSVDEEMLLKLLYRWRDEAVNAGRTITRIVVAFEAGRDGFWLARWLRARGIEAYVIHPTSVAVSREHRRAKTDRLDTELLKRAFLGWLRGEPDHCSMAAIPSLQEEDAKRPTRERENLVGERTRIVNRMKACLVRFGIRNFNPTLRRATERLNALCTPEGVSLPPNTLAELRRDMARLRFVMDQINEIEAARLQRLERAPTEGPHAMVRLLARVIGVGLETADMLVHEILSRKLRDRRAVARYAGLTGAPDESGSKRGEKGLAKAGNARVRRGMIQLAWRFLLFQKDSALSQWYRTRTESTGKKRKTMIVALARKLLIALWRLVTTGEVPAGVVLRAV

SEQ ID NO: 119441 - protein, 329 aa, unidentified
MPSSVNFWVGLDVHKDSITAAVFRNRDPEPIRVDRLPYDLQKVRQYFQRLQAEGSVHACYEASGAGYVLQRSLVEWGVPCELAAPSLIPQRAGERRKSDRRDAIKIGRDFRDDRLVLIHVPTEADERVRDLVRCRETFQREIVKSRHYILKFMRRRGFIYREGTHWTVRHIDWIRHTLAPGTLADEDQVVLSEYLALLEYKLQRRDDLDRRIEDLALTPRYKPLADRLRCFRGFKTQAAMVIATELGDVRRFDSPRQLMAYVGLIPSEHSSGERRRLGAITKAGNTRVRHILIQAAWHYRKRPAMLTLPGVLNDGGILAALTAAQGRAD

SEQ ID NO: 119442 - protein, 421 aa, unidentified
MLGVGIDWAEEFHLVALGSPGEGIISVLRVEHRPEAVSALVERIAGLEADPAGVRVVIETRHGLLVEALVEAGYTVLPVNPELVSRRRGPARKKDDAEDARICCLLALDRHAGLRRLIPHGQLGGELRSIARDDERACRDERRLLNRLRADLLVTFPAALAIAGDDLGATRILRLLERWPTARALAAASREEIIEFGRAQRTGYLQRFADKIQAALAEDHFTAPEHLARARIDTIRLTARQLLLTDAQRRAWEKQMGELLLGPPGQQPEDQPGQAFPGGEIYLSFPGLGRRLAARIAGEIGEHIEQFTTPNSLQCYAGRAPVTRRSGKRDLVVAHRLACNRYLADAVHKGAFASLRRSAWAREFYDAQRARGKNHHAALRALGNRWLEILWHCLTHDVPYDETVHIANRRRALAAITVPAA

SEQ ID NO: 119443 - protein, 413 aa, unidentified
MAAWIGWDWADQHHDVFLESADGKTERVRLPHRPEKLHAWFKELGQRFQQRPVALCMEACLSALLPILLEYPFLQLYLINPKSLTRFRQAVRPSGSKSDDLDCQLACQLVKSHAPLLARFVAQDPVTQELAQLVSYRRDLVDQRTAVANKLTAVLKLYHPLALELLQNDTTTDLAADFVLKYPTLRALQEAPLHRVRQFFLGHRCHLTEGLQDRLGRIAATAPVTDQAHWNNPHSFMACALADQLKALVQRVDQIEERIAVVAAQHPNAPLAKSVPGAGAALEPRLMAVLGTQPENCASAAALAVRSGVAPRRIQSGNTCVIHRRIAKPQFDHQTWIEFAQHSTATCAWAREFVEAKTKAGKSYYTAIRALAYKWIRILYACWKKGATYDEAKYLKALQRQASPYRPPTEAKT

SEQ ID NO: 119444 - protein, 344 aa, unidentified
MTAIDYIGFDIHKKMISFCVKAQDGTILEEGTIPSVRKKLLAWAEARPRPWMGAMEATLFTGWIYDLLKPLAQALKVAHPPMLEAIAAAKKKNDKVDARMITDLLRCNLLPECYMAPVAIRDLRRMLRYRNLVVRQTTRMKNRIAGLLMETGTAYNKERLHGKAYFRELLGSLQEVPRSVVELLQLSRGQVEFFVTIQRRLLKELSEHPELSQRVMRLQSIPGVGEILALSWALEVGEVDRFPSIARAVSYCGLTSAQHSSAGKDQRGPISKQRNRHLQTILIEAAKLAPRHNAQLAGVHERELQRGNRNRATLAVARKLVAYLMAVDKSGQPFQLRASDQEAA

SEQ ID NO: 119445 - protein, 346 aa, unidentified
MKVVYQTCCGVDVHKSFLVATIIKTSSGVEPSYHKKRFSTFNNSILQFKEWLIENQCRDVCMESTGKYWVPVFNLLEDEINVTIANPKWVKAVKGNKDDTKDSKWIGDLFRLGLVPGSYIPCKPIRILREFTRYRYKLTSCRSSEKNRFQNALTVCNVALDSVVSDIFGKSATSVIDYLIEQSDNSINHEEIASRLLRSLKKKSDSVIESIEGYQMTDSQKYRMRLVRAHMDYITSTINDIDTMIDSLIAPYENAVQLLCTIPGVDRNSAITIISEIGTDMAQFSNSKRLCCWAGLTPGNNESAGKKKSVRITRAGVYLKPALVQVAHAAVKSDKSPYYKTKLGIC

SEQ ID NO: 119446 - protein, 443 aa, unidentified
MSRKKHTHLRGERGQAFADKIRGIPPEQILCVSLDIHKYFHVVMIHNALGEIVTMPFEIDIFQAGFDRLCRAIDEAVARTKAQVVLVGMEPTGHYFENLARHLHQRPQPVTLINSFAVSRNREQQMMRREKDDEIDVAAIGDLLRRGEGTPFQPISGLYLEMQHLARVRLSKVKIQTALKNQIVGHLDRIFPGLVLQGKAARERYEPLFVADFWSCQTLQHLIRVCPDPRQLAAMAPRELRTAFHDRGFALGLKTAAEIITYAQKVLLPDPEVITIRVELLARDLAFLEEVERLITELEDQLHALLQQTPYWVWTKVRGLSETQVASLAAAIGDPAHYAYAAQVFRRSGLVSGRNDSGTRRHKGKGKRVVKTGDVYLRRAVMNAIMSLIRHQPTLHDYFDELHHSKHAGVARVATARRAVGILWAMQRDQQSRTLVLKRGAKM

SEQ ID NO: 119447 - protein, 351 aa, unidentified
MMIIGVDYHPSFQQIAFWMEETGEYGERQLNHSDREAERFYRDLYERGILVRVGMEATGFSRWFERLLAELGFELWIGDPAEIKAKRVKKQKYDREDARLLLRLMREDNFPKIWVPSLENRDLRQLLWHRHRLVQMRTRIMNQLQALAMNEGKRRKSKLWSAQGRAELEKLALGPWASRRRKELLELLDRLNPSIEELTIAVEQEARKRPDALRLMTHPGVGPITALAYVLIIGTTERFQRGRQIGTYVGMIPSEDSSAGKQRLGHITKQGNSLLRYLLVEAAQAAARINPHWRRRYMHLAMRRHKSIAKVAMGRRLGIRLYWMWRNGCDYSPSFEFGSYAGQLAPVHGVN

SEQ ID NO: 119448 - protein, 348 aa, unidentified
MALTIVEDTRAVTGGVDTHADMHVAAALDPIGGLLGVGEFPATAAGYTRLLAWMGGFGTVALVGIEGTGSYGAGLARHVAACGVRVVEVDRPDRQDRRRQGKSDPLDAVSAARAAQSGRAAGAPKGRDGAVEAIRALMVARRSARAGRTQAINQARALIVTGPGELRARFAGHTAAALAADLAALRPRPGDVPGYATRVALRELGRRAQFPDGQAGRLDELIVPLAAARAPGLPGLHGVGPATAALLLIAAGDHPGRLRSEAAWAHLCGVAPIPASSGKVTRRRLNPGGDRQANHALWRIVITRMSSHPPTRAYVTRRTAEGLSGKEIIRCLKRYVAREVYPHLRAGA

SEQ ID NO: 119449 - protein, 327 aa, unidentified
MQGKVESTISATAVYAGIDVSKDWLDVHVHPGGQSWRVANDQVGLRRLRRHLDELELRPERIVLEATGKYHRLAFRTLSAWGYGVVVINPLRARLFADACGVLAKTDRIDARLLAVMGYSLAPQPSAPVPLQLEQLQELVNAHSAAHAEAAALGNRLEQSTIRFLKNELKRRRTSLKGHIKRLEAEIAQLIKGDPGLAARYAILVSIPSIGAITAAALLAGLSELGQCTSKAAALLAGLAPIADDSGRRQGQRHIRGGRMPVRKALYMAALSAARFNPDLKVVYQRLRNAGKPPKVALTAVMRKLVVLANTLLTQNRLWQPNQPKTA

SEQ ID NO: 119450 - protein, 444 aa, unidentified
MGRDVEELDADGDEETLERAAAVDVAKASGKVCVRVPGNQRRVTKVWDVGSTTNAIMGLADELAEMGIERVVVESTSDYWRPFFYLLEARGLVVWLVNARDVKQVPGRPKTDKLDAVWLAKLNERGMLRPSFVPPAPIRELRNYTRLRTQLVQERSRHKQRLEKLLEDALIKLSTVATDILGKSGRAMLEALIAGERDPKVLAELALGKMRPKRPALIEALTGRFDDHHAELATMLLDEIDALSEKIDRLTARIDALITELPGTQPPPPTDPPAAGSQQPPGLSVLARLDEIPGVGLLAAQVIVAEVGLDMAQFPTAAHLVSWAKLSPRTIQSGPRSRTGKTGKGNPYLKGVLGEVAAAAAKTDTFLGERYRRLVRRTGKQKALVAVARSILVIVWHLLADPTARFVDLGADFYDQRIDKGKKARNHIRQLEALGFTVTLTPAA

SEQ ID NO: 119451 - protein, 343 aa, unidentified
MQISTIGIDLAKNVFQVHGVDAQGKVALVRQLRRNQMIAFLAKLPACLIGMEACATSHHWAREISKLGHEVKLIPPAYVKAYVKRQKNDAADAAAICEAVTRPSMRFVPIKSAEQQSTLAVHRTRNLLISQRTQLINALRAHLAELGLVAEQGCDGLARLIAMLKDESTLQSLPAAMLEALRAMIAQLAALQAQIGELDRCIKAQHRASDVSRRLATIPSIGLIGATALTATITDPSAFKSGRDLAAWIGLVPRQNSTGGKERLGSITKQGDRYLRRLLVAGAMAVVQQARRHPEKYPWIARLLARKPAKLVAIAIANKTARIAWAVMTRGETYRSPVLLAAA

SEQ ID NO: 119452 - protein, 347 aa, unidentified
MNFYTQQHKHYCGIDLHARAMYVCILDQQGTKLVHKNLPTTPEAFLRVIAPYREDMVVGVECMFTWYWLADLCAKEGIAFVLGHALYMKAIHGGKAKNDKIDAQKIAVLLRGGMMPQAYVYPAEMRATRDLLRRRCHLARKRAELLAHIHNTNSQYNLPEIGKRLANKANREDVADHFPDPSVHKAIEVDVSLIDHYDKLLGEVELYLTRSAKTDDVQAFARLQSVPGIGQILALVLLYEIQDISRFPRVQDFVSSCQLVKCAKESGGKRLGTSGKKIGNVHLRWAFAEAAVLFIRQSQPGKAYFAKLEHKHGKAKALTVLAHKLGRAVYYMLTRKQAFDLQRFVTA

SEQ ID NO: 119453 - protein, 432 aa, unidentified
MDNRLQVGIDFSQKRADLCLLFPDGRPLESHVAVDNSYLGYSLAKRLLLDALDDYSFDGINVSGEATGYLWLPFFLQLAADPDLEPHDLDLYLLNPRWVKWFKKCFAQDDKTDEKDSYYIAERTRTRRPDAAWIADPSTLALRFYTRLRFHLVQNLAREKCYFSAFLFLKASSYRRLKPFSDVFGVTSRLVLTQQPSLDELAALPVEDLAMQLHEMSGHHLRDPFENAHKLRQVSQESFPLNDLLALPVQRILDLTLEHIRFLEGQIAQVDQWITIEVQGHPQIVKLATIPGVGPVFSSGKGAEIGKTQRFLQSPKWDKKRKHFRPRNLRDVEDAVAKIAGLWWPRSSSGDFDAEDRRMAKTGNRYLRYYLVQAANQMRQHIPEYAKFYARKYQEASKHHHKRALVLTARKSVGLVVGLLHRNEPYRSKEHR

SEQ ID NO: 119454 - protein, 469 aa, unidentified
MRKRSKQLEPIAIVHPHAAGLDIGSREIWVCVPPDREGETVQMFGTFTPDLNRLADWLISQHVDTVAMESTGVYWIPVFELLEARGLRVNLVNGRHLKNVPGRKSDVQDCQWIQKLHALGLLTGSFRPDGEMCALRAYLRHRADLLKHRASHILHMQKALQQMNIQLAQVLSDITGDTGMAIVRAILGGERDGLKLAQLRDRRCKSSEATIAQALTGTWKDEYLFVLQQSLALYDFYTGQVAACDAQIQRQYAAMKPRWDLADPGSRPPTRAPQKRRKNAPAFDVRSDIIRLTGVDVAAVAGIGPSLAQTILSEIGTDMTPWPTHRHFTSWLGLAPHNDISGGRVLRSRTLPTHNRAGQAFRQAAASVSRSPSAFGAYYRRKRAHGGPMFAQAATAHKIARTVYHLLKYRVQYVEMGADTYAQKQRERDIITLRKKAAKLGFKLVAPESLQATPGVLPGGDITASFSPA

SEQ ID NO: 119455 - protein, 384 aa, unidentified
MVNFKDKLVIAGNPRGGSLRPAARSLIPGAYKPVDESGSRSASYIKRPNSRQGLCHRQARIRKEGTIMSMPIEFVGVDVSKDTLDVAFVGEETTALRFLNSPTGFTELVKACQTRSIELIVLEATGGYERPVVAELAVAGLPVVVVNPRQVRDFARALGRLAKTDRIDAEVLALFGKAVRPEIRPFNDEKAEELREKLTRHRQLVQLRVAEGNRLAQSRVRSVRKSIQAVLQVLDKQLKTLDDDVDRLVRESPLWREKDNLLQSVLGVGPKTSRSLLAYLPELGHCTRRQIALLVGVAPLNRDSGKLRGKRTIWGGRAYVRHAIYMATLVATRHNPIIKRYYHRLLQTGKKKKIALVACMRKLLCILNAMLRDHKSWNLSVQNT

SEQ ID NO: 119456 - protein, 428 aa, unidentified
MAEQRSYTREHIYVGVDVHKATYTVTCVCQRPMVKTATVPAEPARFAASLSRWFPGAIRSSAYEAGFSGFVLHRALTTAGITNLVVHPASVAVAANDRVTTDRRDAKRLAIDLADGRLRGLAVPTEAEALARLLPRTRAQIVAHRATMTRQIKAKVPQCGLIPPASRRLMSRRYVREITTWPLPPELCARLTLVADQWRFATRQLLELRRLLRAQATAQAALATVYRSAPGIGEVVARTFATALGDRTRLTNERGLCSSTGLTPSAYSSGAAIRRGHISRQGESRWRHVLVETAWRALPRDPALQEIFDRIAATRGKQRASVAIARRLIGRRRACFRHGTLYAVGTAGEASVHRWLATESAWKPGAPVRPQGKGNTCAEALSRDRGRLSQVWTPCHLRLRLPPCAGPTASTGKSVKRSTALSTHEEAT

SEQ ID NO: 119457 - protein, 403 aa, unidentified
MSDMITNHADIDVFIGIDVGKHNHHAVALDRDGKQLLSKALPQNETKLRALLNRLAKHGTLLVVVDQPATIGALPVAVAQAESITVAYLPGLAMRRIADLHPGEAKTDARDAAIIAEAARTMPHTLRGIRVADENVAELSMLCGYDDDLAKQATATSNRIRGLLTQIHPGLETVIGPHLDHPAMLALLAKYPTPKALRHAGKHRVETLLRKQAPRAWKRWSTAIFTALDGQTVVVSGTDAAGLVLPQLAASLAQTRASRDEVLERIEELVEAHPLFELLTSMPAVGVRTAARILTEVVGKDFESAGHLASYAGLAPVTWRSGTSIRGDHSSRRGNKVLKRALFLSAFAALKDPLSRAYYDKKRAEHKKHNQALIALARRRCNVLYAMLRDGSYFHTPEVATAA

SEQ ID NO: 119458 - protein, 529 aa, unidentified
MTLGYLNAERQLWTDTVSKVIRHRSKRSGESAQSEMAKNFAGAQTGAGPFSAPQATRPFWTSPSRVIRRSPAPAAADAQKAERTSPPEGSCISSPVPRQPRRVRAARNMNTHWNKITHFAALDWSSDHHDICVVDQSGAIASEFRFTHTAQGWNEFRDKMKAYPANIPITLETSSGPAVDQLLNGHWPIYPLAPTASALYRQRKAPSGTKTDRHDAWSMADALRTDGHAWRVLLPQDEATAALRLLCRDEIALIEQRTALVNQLQATLRDYYPAALEAFEDWTQRYTWAFIQRFPTPGLLQSAGKRKWESFLHAHHLWRADTRQRRMDIFGKGNAMPARPATVEAKQLLAVSLTNVLTTLQKQIDEYRRRIQDAFKAHPDHGIFGSLPGAKQVLGPRLLAEIGSVREQFPDAESLMCMAGTSPVSYQSGQINKCRLRRACNKVLRATVHLWANASRFTSEWAQAYYARKRTEGQSHASALRCLGKRWLKILWKLWQEGQAYEEAKHLANLQRRNPLTIAVMSAKKTLKA

SEQ ID NO: 119459 - protein, 347 aa, unidentified
MRFYTKQHPFYCGIDLHARTMYLCILDQAGETLVHRNMTATPEALLKTIAPYREQIVLAAECMFTWYWLADFCADHGIPFVLGHALYMKAIHGGKAKNDKIDAHKIAVLLRGGMLPQAYVYPAAMRATRDLLRRRLHLARKRGELLAHIQNTNSQYNLPAIGKKIAYKANREGVAERFADPAVQKSIEVDLALITYYDELLRDVELTIVKTAKHHDAHTLYLLQTVPGIGKILSLVLLYEIHDITRFPRVQDFASYCRLVKCAKESAGKRSGTAGSKIGNAHLKWAFSEAAVLFLRDNPAAQQFLARLEKKHSKGKALTILAHKLARAVYYMLKRQTAFDLHTFLQG

SEQ ID NO: 119460 - protein, 346 aa, unidentified
MLYAGLDLSRQRLDVHVLDEEGRTVDVLAVHPDADALRTLANRVLRHGQEVSAAIESMTGSRFVHDQLELAGWDVAIADAVKAKGIAPLAAKTDKIDAHVLAELARRNLVPEIWLPDPAVRAERERARFRLHLVRHRSALKCRIHATLMTFGHNIPVSDLFGTSGRRLLAGLELPEPWAGTLATSLAMVDELEERIDECGRELARLGADHPYIPLLLTVPGVGPLLAYTIASEIGDIARFASPKKLAGYTRLCPLVRQSGNRDFRGPLAKNGPKYLRWALVEAATHAARDPRYRERYERNKKRLGRGRGAKVARIDIARQLAEAIWHVLTKNEPFAPASPAILLVA

SEQ ID NO: 119461 - protein, 372 aa, unidentified
MQDATKYVGLDVSKEKISVAIADSGRDAPRFWGTINHTAEAVRKLMKQLGETGSLQVCYEAGPTGFDLYHWLMKMGISCTVIAPSLIPKRQGDHIKTDRRDALRLAQLFRAGELTPIHVPSREQEALRDLVRAREDARDDLHRARQRMVHFLLRHHIHPPAVMKRRWTKMYRKWLETLKFTYTCEQLVHQEYLQHLFECEQRLARIDQSLAEESSKGAHANVIRALQSLRGIALVHAVSIATEIGSFERFRSPMQLMAYLGLVPREFSSGLSSRKGKMTKAGNSLLRRIFVEAAWSYRHSPAIKGDLKKRLDGQAAMIQAISWKAQTRLNKKFFRLVVNRGKHKNVAIGATARELVGFVWAVARQAEGSHLA

SEQ ID NO: 119462 - protein, 391 aa, unidentified
MVYLGIDVAKDKHDCYIVNSDGEILANVFTIPNDQAGFNLLLQRLKSIAPDLSKVKVGLEATGHYSYNILGFLLDNGLHTYVINPLHVNLFRKAGSVRKTKTDPIDARTIAGMIMSNVDLTSYTAKSYHNEELKSLTRYRFDKVQERAKLKTSVARLVSILFPELEKLVPTLHMHTVYALLAELPGANQIASCHLTRLTHLLSESSKGRYKRDKAIQIREAARTSIGSVMPAKSLELKHTIHLIEVLTEEIDEIEFSIKQIMDADPSPILTIPGISYRMGAMILAEIGDFSRFSSPDQILAYAGLSPSTYQSGKLDNAYPHMEKRGSHYLRFALFNATRFVCNWDPTFAAYLAKKRAEGKHYYVAISHAAKKLVRLIFALVRSGQAYSPAT

SEQ ID NO: 119463 - protein, 338 aa, unidentified
MTCIGFDHHKKWTQAAAVDDQGKIIREMRVLNDNSSLKGFLKGLPQPLKGVVEAGPTWGWIYDTLTELGVKMIVANPSAVRAIAAAKIKTDKIDARMLASLLRVGLIPEVYVPTEEVRSQKMLWRERIWLVRMHVRLKNRIHRLLNHYHLEVPEFSDLFGAAGRRFLEELKLPEPGNRILNAQLKLLQSYRLQIEEVQRWAVKATQGHPNRAYLESLPGFGKVFAPIVALEIDDPKRFASPGKLASYCGLVPSLYSSGGKSWQGGIGKEGNHWLKWAFVEAAWAAIRSSAYFRVVYQRLRQRKTAQVSIIACARRLCEIAYHLLKERRCYEERPFRCA

SEQ ID NO: 119464 - protein, 410 aa, unidentified
MRRVIGMDIHRTFGEVVIWDAGILKHAGRVDMTRTALEGFGKGLRPTDEVVIEATGNCMAVSRVLSPFVARVIIANPLQVKAIAQAHVKTDKIDAGTLASLHAAGYLPEIWTPDVGTERRRRLTARRFQVVRHRTRIKNEVHSILHAHLIPRCPHADLFSGVGRAWLLRQPIPEDELMAIERHVRELDRLGEDLAIIDREIATDALDDPAVARLLTITGINLTVAAGVIAAIGDIGRFSSPQKLVSYFGLNPRVRQSGLGPAHHGRISKVGRSHARAMLVEAAWAAAKTPGPLHAFFVRIRAKRGHQIAAVALARKLTVLCWHLLTKDADYRWARPALIANKRRTMELKAGRPQAKGNKPGPAYAYNIKVLRDQEMEVARRAEQAYEQFVAQWETRPKAKVRGRSKPAGL

SEQ ID NO: 119465 - protein, 395 aa, unidentified
MAACLRHVSDGKVTTEVRTFQTTTADLLRLSEWLAVNGCTHVAMEATGIYWKPVWHILDDGEFELVLANAAHVKNVPGRKTDVNDAMWLAELLAHGLIRASFVPDAQTQEMRNLLRTRKQLVREQSSHVLRVQKTLEDANIKLDSVLSDVMGKSGRAMIEALIAGETNPAKLASLADRRVKASPEELREALRGRVTKHHRFLLRLHLNQIDALDAAMATVDAQVEANLGPFRIAVELIMSIPGIKNLSAHAIVSEIGIDMSRFPSDAHLISWACICPRNDESAGKRRSNRQRKGATWLKTTLVQCALAATKKKGSYLQAQFHRIKARRGPKKAIMAVVASILTAIYHMLKDGTMYQDLGRDHFDRRSTDQQKKSLVKRLADLGYAVEIKPLAATA

SEQ ID NO: 119466 - protein, 342 aa, unidentified
MAIVAGFDVHRAQITFDALDTDTGEVSRGRIDATPTAVARWTQRFDGCEIDVAVEACTGWLFVCDALVAAGAVPHLAEPVETRALRGRKRRAKTDREDARWLCELLADGRLPEAWIPPEHVRQWRSRARLRHTLIGERTQWMQRIQATLFHHGIGGTPDKLRTQEGREFLERIEIPQDARERIQVALGMVDAIDAQIAPLERDLRQLARRQTGCKALMGLYGMGELTSLVTLCELGDVQRLSASRKAVRMAGIDIGVHRSDRRSRVGKLNRQGSPQLRWALYEAALAACRPSSPDHADYLALKARGLSHTRASLTIARKLARRSFHVLRELGPNAVEPIPTR

SEQ ID NO: 119467 - protein, 419 aa, unidentified
MIGIDPHKGSHTAVAIDGNETPLGRVRVRATMGQAEGLRQWAQRWPQRTWAVEGARGLGQLLAQQLIAAGERVLDVPPKLGARVRLLDSGQINKTDENDARSVAVAALRAHRLGEVRGEDQTMVLRVWSRRHHDLGRLRTQAVCRLHAVLCELVAGGVRKHLSTIKAAAIVEGLSADTPVAQAKLELARDLVADLQRLDVQRREVKRRIAHAVAETDTSITDIYGVGPIVAATVLGQVRDIRRFPDRDRFASYNGTAPIEVSSGDRKIYRLSRRGNRHLNHAIHVAAVAQISHPDNPGHAYYQRKRAEGMTGKCALRALKRKISDTLYDALLQDSCPREDPGGQSGNDAVASVAGSHPDRPALRRSHSRVATNSKTASTSSPTTELRPAPDRRRTSRSATGVQVEPRPRPPRGHGQERP

SEQ ID NO: 119468 - protein, 402 aa, unidentified
MRVVHERCAGLDVHKSSVVACALLPEGKQLRTFGTMTWQLEQLADWLRSLEVPVVAMESSGVYWKPVFNVLEAAGFELLVANARHIKAVPGRKTDLKDAEWIGDLLRHGLLKPSFIPGREERELRELTRYRRTLIEERAHEVQRLQKVLEGANIKLEDIISNVVGLNGRRFLGALIAGDYDPQAVAATANYGLQRKRELLAQGLRGSIGSHQRFLLDQLLSHIDFLEQRITALDRELKQRSLPFEAAIAHLDQIPGVGTRAAEEILAEIGTDMSRFPTHRHLASWAKVCPGNNESAGKRRSGYAGKGNRWLRSILVECAWSASRKKDSYFKAQYHRLAARRGRKRALLAVGHSLLTLIYHLLREGVLYQDLWLQLLRPTRPLTDRSPSSPQAGAPRLSSSAH

SEQ ID NO: 119469 - protein, 338 aa, unidentified
MDRQYVGIDFHRRRSVIVRLSGSGERLGLHRIVNEPFELVQVLGLCGEAPQVVIEATYGWYWAVQLLQDLGAVVHLANPRALNWGDRRVKNDVNDATDLADMLRLNRLAEAWIAPPALRELRELVRYRAKLVQLRSGLKAQVHAVMAKEGVIPVVSDLFGPAGTRQLDALALGGPFARRVRSLRDLIAIHDREISALDRDLHQHLKGHRGYEAVQEINGIGKISAAVLVAEIGDVTRFPSPAQLCSWAGLTPTHRESDLKTRRGHISKQGSRLVRATLIEAISRYHGGTLLDAQYRRIAKRRGANKARVAIARKVLTLVYYGLRDGEIRCLAPAETAA

SEQ ID NO: 119470 - protein, 329 aa, unidentified
MSKPICYVGIDVGQAELWVAVADRRPRQFVHTAAGIRALVRFCHAAAPDHLLHFCLEATGVYGRSLAVRLLRGSHPDVEVSIVNPVQIAAFAKAQLRRTKTDAVDARVILAFAQSQTPRPWTPEPAALRELHQLVAEADALQAAHRQWSNRAHTHALTPDRPTAVRCTDRAMLRTVDRELTRIKEAITALCQGDPTLRQQIDLLCTIPGIAQHSATRLLAYGGRAWTTHSAKQLTAHAGLAPRHRLSGTSVRGKSHLAKQGDAHLRRTLYMPALVASRYNPALKTVYQRLRDGGKPGKLAIAACMRRLLLIARAVLKQQRPFDPAYGRT

SEQ ID NO: 119471 - protein, 353 aa, unidentified
MAKDTSSVTRTIGLDLGDRHSHFCSLDPSGEVEQQGRLRTTREALARLFEGRERCRVVLEAGSQSAWVAEQLEAWGHEVLVANPRQLAAIYAQPTKSDAIDAETLARLGRADPKLLRPIRPRRPGTLADRAVLRSRALAVRCRTQLINHVRGTVKALGARLPACSTTAFARRVRGELPEALRPALEPVLDLIQQLSDQVRAYDGQIERLGAERYPETALLRQVPGVGATTALAFVLTIEDPLRFPRSRIVGSYLGLRPRRDQSGARDPQMRITKAGDRELRRLLVQAAQYQLGPFGPDTDLRRFGQRLAARGGKAARKRAVVAVARKTAVLLHRLWVTGAVYEPLYHSARPVD

SEQ ID NO: 119472 - protein, 384 aa, unidentified
MGCDICKNRAVFCCLKSLPANIRQHWQDIKGTAAEFHFNSDGIAKFLKIRPDAIVLEPTGYHYSEFLNKVCIAERIQVFWVNHRQIRHYREGHRLPNKNDFADSYALACYFLENRDIPEAFLHFYPGNSRRLRELSLQLHSLNRMQSPMINRIRQQLAIEFPEVALIDSAPGVDQVSPLWGWLAEEPISPLANSIYSNKWNSSIAPKYGEFISPFTRGVAKSLCHLQRLQVELENQLLLLLDSEEFAPYVQVLSQFGLGTRTQSLIISQIYPVDRFPSISQFKRRLGVAGEENSSGDKKVYRTSGGSKICRSQLYLWALTRIAPRKARPNTEIGQKIGTYYDSQREKYYRGRLPGDDHGSGNLIIMKSVGYAIKLLWRELNPLK

SEQ ID NO: 119473 - protein, 369 aa, unidentified
MTDLTLFVGLDVHKKTISVAMVEATAGAEVRFYGTIANTPDAIRGLCKKLTKDRQQLHFCYEAGPCGYGVQRQLSRLGHRCDVVAPALIPRKVGDKVKTDRRDAMMLAQTLRAGQLTAVWVPDEAHEAMRDLVRLRAQAMRDLRKTRQQLLSFLLRHSLVSPYGHWTKMHRRWLGELIFAHPAQHLAHEEMLQRIERAEALCDRLKRAILELVPQWSLAPVVQAIQALRGVSLIVASVIVAEVGCFSRFDSPRQLMAYLGLNPSEHSSGAMIRRGAITKTGNALARTCLVEAAWTYRFPARVTQIIRDRLNGLPEPIRNVAWKAQVRLSARYRKLIAAGKPAPKVVVAIARELVGFIWAIARMVEPKFA

SEQ ID NO: 119474 - protein, 312 aa, unidentified
MTQEALVVGIDVSMATLDVVILPTGEVFSLPNAADGWRRLVRRLGGKRLEVVAFEATGGYERGLLKALALAGLPASRVNPARVRAFAMASGTLAKNDKLDALVIARFAQALPPRLTLSDPVTDALAELVTARRQIVQDLTRTANQADHAVNVILKRSFRRRLRGLEADLKLVDMEIAKAMAADQGLASRSEILRSAPGVGPVASATFLALLPELGKLENRQIAGLVGVAPYDHDSGKMRGQRSIWGGRKPVRDILYMAALGAIRSKQTIFKACYDRLIANGKKPKVAIVAIMRKLITTLNAMLRNNTQWSPT

SEQ ID NO: 119475 - protein, 360 aa, unidentified
MRTISKSTLFKDQSFYIGIDYHKKSWKVTILGEQYEHKTMSQNPDPDLLAAYLKRNFPGGNYHAVYEAGFSGFSSCRRLSELGVECMVIHPADVPTTQKEKLQKTDKVDSRKLARCLRSKEFEGVDIPEVEMEADRALIRQRFRMVKDLGRTKNRVKSLLFQFGKKIPDRFTASQSRHWSKIYINWLKDLSLIDMSLRQVLDNYIRIGEIQRKELLLINRQVRALSEKNRHKINFSLLVGVPGIGLITGMTFLAQIGDIKRFNRIDDLCNYVGLVPRMYGSGEMMKTGKMVKRGRKELKIMLIEAAWVAIRKDPALMLKFNELSQRMNKNKAIIRIARKILNRIRHVLTTQKQYVLGVIE

SEQ ID NO: 119476 - protein, 332 aa, unidentified
MYYIGMDLHKQDLVMAVEDEQGPVGRPRRIACRDTEAIRAAVERWRPFRAVVEASASYRWLYDLVSRQGEMVLAHPLRLRAIATARAKTDKLDAALLARLLRANLIPAAYVPPARYQRLRDLTRTRARLSYGATLAKNQIHALLARANVHPPLKTLFGPRGRRYLAGLDLGLSGNLARDELVRRLEHYGREIAAFDAHLEAVASEFPEAEALEVLHGIGRYSALLVVAEIGEPERFRNGRQVGAYAGLTARVHQSGKTEHRGSVSKQGSRWLRWILVQAAIKLVRRDERLANFYQRIRRRAGRNVARVAVARKLAGICWVRLRRWQREQAAA

SEQ ID NO: 119477 - protein, 355 aa, unidentified
MDNTKYIGMDVHTETISISVLNSAGKLVMESVIETKALTVIQFVQGLRGDLHVTLEEGTWAAWLYDLLRPHVNQVLVCDPRQNAFLKAGNKSDKIDARKLAELLRSNLLRPVYHGEHGVRTLKELSRSYVAISGDLARVMTRLKAVYRSWAIPCAGKQIYAPRYRSEWLGKLSEAGVRRRAEIYYEQFDALRSLRQQVRRELLAESAKHKASKLLCQIPSIGPIRAAQLIAIVQTPYRFRTKRQLWAYGGLGIETHSSADHRYVKGQLQPSKRQVSLRGLNRNHNHELKNIFKGAAIIAATKPGPLQEFYAALVAKGMRPEMARLTLARKIAAIILIVWKKGVSFDAQHLKLQTA

SEQ ID NO: 119478 - protein, 310 aa, unidentified
MLIIGCDYHPSVQQIAFVDLETGETGERQLLHKDGEAERFYRELKLRGISVRVGIEATGHARWFERLLAELGFELWIGDPAQIKAARVRKQKTDRQDAQLLLKLLVEERFPRIWIPSPENRDVRQLLWHRHRLVQMRTRVMNQLQAVAMNEGVRRKKALWSKSGRAQLESFVLSPWASRRRQDLLEVLDRLNPTIDELSTAVEEEAKKRPEVLRLMTHPGVGALTGLAFVLIIGSAERFACGKQIGSYLGLIPCEDSSAIVSGWDISASKVTLCCVSCWWKRHKLPSVAMPSGDGSLYTWRCGGIPESPR

SEQ ID NO: 119479 - protein, 414 aa, unidentified
MAEETLAWFAGIDWGSETHQACLLDAHGTIVGERECPHSAVGLAELSDWFLSIAGAAGAVAVAIEVPHGPVVDTLFDRGFSAYAINPKQLDRLRDRFSVAGAKDDRRDAHALADGLRTDRHLFRRLQVADPRLVELRAWSRLAEELQGERVRLSNRVHQQLWRYYPQMLKLTDDLAATWFLELWDRAPTPAKAGALRKSTVERLLRQRRIRRVDAETVLRVLRQPAIKVAEGVAEAASVHMRSLIARLNVVNREIKHAERKLDELCAAIGETGSATADCVAQREVAILKSLPGIGRINLATLLAEASGPLSRRDYQALRTLSGVAPVTKRSGKSHVVVMRYAAHVRLRATVYHWARVATQHDPKSRTRYAALRGRGHSHRRAIRGVADRLLALACVLLQRQTPFDPHFGQAAAG

SEQ ID NO: 119480 - protein, 324 aa, unidentified
MTAVLGIDVAKATYQATLLVEGHSYKRSFGNRESAFPELLKWLHKHYAGQLLVGMEATGRYWEALAYYLHEQGHVVSVINPSRISYFARSKLVRNKTDAIDATLIAEYCLSQQPEPWTPPPAEVRELQALVRHLEALQGLRTQQGNRLQAAPPSCDVRASLESLLSHLDDQIQAIESKIREHIDQHPTLKQQSVLLQSIPGIGQITAARLLGENIQQFDSTRALTAYAGLTPRHKISGTSVHARPHLCKTGNEHLRKDLYFPAIVAMRYNPAVSSFSQRLAERGKHKMAVVGAAMRKLLAIALGVLKSNTPFDPCYTERNLVLN

SEQ ID NO: 119481 - protein, 457 aa, unidentified
MRKKNNRTPGMEEAHPFSGMSRIHLHAAGVDIGAIEIVACVPSDENTQIVKAFGNYTVDLQALAQWLKSYSIKTVAMESTGVYWIPLFEELERQGFECLLISSRSLRRVAGRKSDISDAQWIQTLHSYGLLEGSFRPQAELVALRTLLRHRSQLVEHRSPHIQHMQKSLLQMNVQLSQAVTDVTGMTGQKIIRAILAGERDPQTLAAMREPGCKKSAEEIGKALTGTWREEHLFVLKQSVMLYDFYTEQIQACDLEIERLYGLTRPDWESGEVAPVTKRKRNSHSKNIPQHPEEIRKHLKRISGVDLSAVDGFGVSLAQTVIMEVGTDMSKFPDEKHFCSWLGLAPKHEISGGKVLKKNTLKTKNRAGQAFRLAANSVKQAECMFGVFYRRLRARLGPAQATVATAHALARVVYRMLKYKVEYEPLSLNEYQKHYEEQQIKYMRKKAAKCGFQLVPT

SEQ ID NO: 119482 - protein, 401 aa, unidentified
MHREPGEVVGGVDTHLDVHVAAVIDHIGQILATRSFPTTPAGYRQLLAWMRRHGELGQVGVEGTGAYGAGLTRHLVDEGIEVVEVNRPDRQRRRRRGKSDTTDAEAAARSVLSGDAAVTPKTSDGQVEGLRALRIARRSARKARTQTALQIRDLVLTAPDALRAQLSPLESPQRAERCARFRCGHPTDPVQAVKRALRILGRRYNQLSAEIAELNELIAGLCAQINPALLGAKGVGPEVAATLLVIAGGNPERLRSDAALAALCGASPIEASSGRVVRHRLNRGGNREGNNALWRIVLVRMSTCPRTKAYVARRTAEGRSKREIIRCLQRYVAREIHSLLVKDHVVITGAELRAQRVRTNKSLAQAAEAMNTCAIAMSRLERGITHNTEMATRYHTWLQTA

SEQ ID NO: 119483 - protein, 364 aa, unidentified
MDVHLRSTTVCALDAETGEAVTRRFRGNPWGEVAEWMSGFPGPSLAAYESGYLGFAPQRELSGLGVDCVVAAVSKVPRSAADLSSKNDRNDAARMAKAILSHDITPVWVPSPEIEGLRDLAGAHDAATARLAAAKQRLLAFLARRGYAYGGTTPAGNPRRYWTYDFLRWLDKVRPADDGGIRALAALRNEVEAAAETRDDLLAEYRAAVAAGPLSAEVEALQSIKGCGFALAAAFASEVGDFSRFRSGRQVTSYFGLAPKQRSSADSVRLGGISGAGDALVRRLAVEGSWSYVQASHQPKLMPKGSGVPLEVRMHGRKGSERLLRRREEMLARGMPQAKANAATAAELVRWLWALGAMCREATE

SEQ ID NO: 119484 - protein, 381 aa, unidentified
MRRVIGMDIHRTFAEVVFREDGRLRHHGRVDMTRSGLEGFGRSLNRTEEIVVEATGNAMAVVRVLSRFVDRVIVANPMQVKAIAHARIKTDKIDAGVLAQLHASGFLPEVWVPDERTERLRRLVARRNQVVRHRTRVKNEVHGILQAHLVPKCPHADLFNNRGRAWLERQVLPDDERAAIARHIREIDRLAEDLADLDGDIAREAVDDPQVRRLQTITGVNAVVATGIIAAIGDIHRFGEPQKLVSYFGLNPRVRQSGLGIAQYGRISKHGRSHARAMLVEAAWAAAKAPGPLRAFFLRIRNKRGHQVAAVAVARKLAMLIWHMLTKQEDYLWVRPALVAAKQRQLALKAGAPNERGVGRRGSAYAYNVKPYFNSEILKAL

SEQ ID NO: 119485 - protein, 402 aa, unidentified
MNCVGIDVSKGKSTIAVMRPFGEVVVSPFEVCHTASELSELARLLKSLDGETRVVMESTGNYHAPVAWLLHGAGLYVSVVNAMLVHDYGNNSLRRGKTDKKDAVKLANYGLDHWLTLPRYVPEEDARLMLKTCYRQYQQYSKVQTMLKNNLISLLDTAFPDANRLFTSPPRADGSEKWVDFVAAFWHCECVCGLSKKAFTTKYQKWCRKHSYNFSEDKALDIYVSACGRFGVMPKTKTAKLLVEQAISQLQATSAALAALKQEMQSLAASLPEYPVVMGMFGVGPTLGPQLIAEIGDVRRFHSKKALVAFAGIDAPPYQSGQIDVRSRSISKRGSASLRRTLFLVMGVLLQCAPMDEPVYQFMNKKRSEGKPYRVYMMASANKFLRIYYASVKTYLDSLEHN

SEQ ID NO: 119486 - protein, 319 aa, unidentified
MNLGIDVSKNTLDCCLILDGIFFERQFKNNKAGFEQLKSWLKKSGATSALHCCCEATGKYYEAAADYLAESYVMSVENPRKIKGYGNAKLQRSKTDRLDARLIAQYCRDMKPRAWQKPSEAQTKLKELNQYCRRLKAQKAAEQTKLHTAPDYLAPLIEDTIRHLQKQIKAVQEKIGKFHQDHPDYKANRNRLKTITGVGDNTADTLLTVLAEQDRFENQRQFTAYLGLDPKQFKSGTSVKGRERISKVGSRRLRTALYMPAMHAYRSRTFAPFVSRLKANGKRPKQIIVALMRKLAVIAYNLIKTGRDFEPQRYMSKNQ

SEQ ID NO: 119487 - protein, 347 aa, unidentified
MKHYSGLDVSVKETAVCIVDETGRICREIKVVSHPDDLVAVLQDPAWNLERIGLEAGPLSQWLFEGLAKAGLPVICIETRHTKAFLKAQPNKTDRNDARGIAQMMRVNLFRPVHVKTLSSQKRRALLTARKLLQEKAIAIENDLRGLLRNFGLKVGIVGAVKFEERIRELVDDMPDIREIMEPLLASRQKLRDEFTRLHKKVVDIARDDRTCRLLMTIPGVGPIVSVAFTSTIDIPQRFKNSKTVGAVLGLTPRMNESGESKRVGKVSCCGDGMMRMLLHEAAQTLLSVVRRWSWLKAWAMSVARRRGRAKAITALARRLAVIMHRIWSNGTEFCWTRAELAGASHA

SEQ ID NO: 119488 - protein, 351 aa, unidentified
MEEYIAFDSHKRYTWVEHEQVSTGKVRQYRLEHAPGAIVRALAGCQPGTAVAIEATANWYWIIDEIEQAGLRPALVHPRKAKLMMGQINKTDRLDTHGMNRLQRNGTLPTVWIPPGRLRELRELTRTRVVLVAQRTRWKNRITATLAKWGVPASEYSDAYGKSAREELAGRLERLPEQTRWATRQMLMQLDTLSVQIGAFEEKLEELVEVSPAMRQLMTLPGVGVILAATIALEIGEVGRFLSAERLASYAGTAPRVHASGDRVRYGRTRPDVNRYLKWAFAEAGNSVAVNHRRCPQRHVSQLYFRLRQRKGHSKAVGAVARHLAEAAFHVLSRQQEYRDPTAAVGRTREV

SEQ ID NO: 119489 - protein, 347 aa, unidentified
MKFMTPVTGFYCGVDLHARTMYLCVIDRQGKILMHRKIGTDPEYFLRLIQPWGKDITVAVESTFNWYWLADICASEDIPFALAHALYLKAIHGSKVKNDRIDCEKIARIALGGNLPLAYAYPRQHRAVRDLMRRRIHFVRERAELMGHIQCLNMQENNLPLGASLKVKAGRAAAPDNFIQEDVRFTAEANLAMIAHYDSVIPIMEKRILERASNGHQRELAILDTFPGIGEVTALTIIYEMDTVDRFKSRQDFCSYARLVKPLHESGGHKSPGHGAKIGNPHLKWAFSEAAVHAAQHNESIRILYEKLVRRHSKGRAKSILAHKIGRAVFHMLKNGTAFDEKKFLSN

SEQ ID NO: 119490 - protein, 352 aa, unidentified
MTAVMIGIDPHKASHTAVVISGAEEPLGELRVRASTAQAERLLAWAAAWPERTWAIEGAGGLGHLLAQQLLSAGERVLDVQPKLGARVRLLDTGNVNKNDPDDARSVAVAALRSPGVREARPDDHAAVLKVWSKRRRDLASSRTQVVCRLHAVLCELVPGGDPKKIIADRAARLLGSITPPDAVAAARRELAAALVEDLRRIDGQLRETRKKPDTAVRASGTSLTGLFGVGPVTAATIIGEVRDVSRFTNRDRFAAYNGTAPIEVSSGQRKVHRLSRRGNRRVNHAIHMAAVTQIRQKHSEGRAYYDKKLAEGKTRKEALRSLKRQISDAVFTRLRADARRATAQVRDPGGQ

SEQ ID NO: 119491 - protein, 374 aa, unidentified
MSKNTRYLGLDVHAETITAAIAEGRQKIRSLGQFPNRPEAVRKFIEKLGGPSGLKVCYEAGPTGYALYWQLTKMNVECEVVAPSLIPKKSGERIKTDRRDAEKLAQCYQAGTLTAVWVPDGAHEALRDLVRARGAAKDDENRAKHRLVKYLLHYALRDPEGCRAWTHPWWRWLQSLKLEHEAQQETLLAHIAEVLHQGERVSRLDKAIERVVETVSPEKKAVIDALQALRGVAKLTAVTIVTEVGTFQRFRKPTELMGYTGLVPSEYSSGGKESKGRITRTGNAHLRHVLGETACHTRHKPWLSNRLKQVLPTLPPGVSEIAWKAQERLHRKFVKMTYQSKQPGKVLTAVARELVGFIWAIGSKVEREALAKAA

SEQ ID NO: 119492 - protein, 351 aa, unidentified
MIVLGADTHKRSHAIAAVAASTGELLGEQSVPVGQRGFGALLQWARELDEDRVWALEDCRHVSGSLERFLIERGERVVRIPTHLTANARRSARQRGKSDPIDALNVARVALQEGLESFPTAHLDGPELDLRLLVDHRERLVRHRVELNSTLQWHLHDLWPELQLPGGALFSKTWSTRIGRRLARAEQTMRVRIARDELRRLRELTVAINQLERDITALVEQIAPQLIAEPGFGPLIAAKLVGEIAGADRFATPAKLARAAGVAPIPASSGNTQRQRLDRGGNRQINAALHRVIVTRARCHPPTREYIARRRSEGKSTREAIRCLKRYLARRVWHLLQAAPPGPGHPHPSTT

SEQ ID NO: 119493 - protein, 403 aa, unidentified
MSAVFAGLDWASRTHAVCVIDERGAVRTHFDVAHDAQGLHELVHRLRGASVQRIAIERPSGLLVDALVEAGLQVVPIHPNALKASRPRYRSHGGKSDASDAYVLADLLRTDGHRFKPLAPQSDEIRALRALVRGRDDLVDTRVQLANQLRSLLESYWAGAAEVFADVDSPIALAFIQRYCTPEAASRLGPKRMAAFCAHHTYSGRRSPEELLARLHQAPSAPVGELEIDAKGELACSLARTLSTLVEQIRSLTSRIEHHIASTDDGPILMSFPRAGRICAAQILAELGSVRERFDSDEHLAAEAGVAPVTYESGKHKAVAFRWACNHRLRAAITCLADNSRHASAWAAAIYARARARGCDHPHAIRILARAWLRVLWRAWTDRKPYDPALHGGLQIMLNTKRG

SEQ ID NO: 119494 - protein, 487 aa, unidentified
MAKRKMSTFERLQSGKMNHKEKKELKRRILAEDASLQVVHPNAAGIDIGNESHFVAIPPDRDATPVREFGSWTADLHEMGRWLAEHNIQTVAMQSTGVYWIAVQEVLEQYGLEVYLVNARGTKNLPGRKSDVQECEWLRKLHTYGLLRNSFRPPEQIRAIQTIWRQRDRWVKDCGRAIQQMQKALTKMNIQLANAISDISGVSGQAILRAIIAGTRDPRELAKLRDRRIAASEEEIVQSLQGNWKDDILFELRQVLESYDFFQNQIAACDRELAKYMADVPSRDLPEKQDIPEGARPLVSAKPTRQAKLPKKNRPNFDLAAELQRAMGVDLTLIDGIDAITSQVIFSEIGTDFSAFPTENHFASWLTLAPQRDISGGKVIRHISSAGRNRAANALRMAAQSLWHSDSYLGARYRRLRARLDGKKAVKAMARYLACLVYRMVTKGQAYVDRGAAYFEKKRSEKERDALIRKAASIGLKLVPSTESAQV

SEQ ID NO: 119495 - protein, 430 aa, unidentified
MKSNTQNAKIEAITEKTLVLGIDVGSETHYARAFDYRGIEYSKKPFKFSNTEAGFVTFKEWILDLKERHEKDKVIPGMEPTGHYWFNLGKFLQDNEMKPVLVNPHHVKKSKELDDNNPTKNDRKDPKVIAGLVREGRYMIPYLPDGVYADLRTASNIRFQLQAELTRIQNRISRWFNIYFPEYKTVYGKPDAKSGILILKAAPLPEDILTLGIDGVNQIWRDAKLRAVGKARAKTLIEAAEHSVGSKEGAVAARMEIRMLLEDYESRSIRLQEVMTLIEGLVKQIPMAEKLLEIKGVGIRTVSGFLAEVGDISRFNNPKELQKLAGLALVENSSGKHKGETTISRRGRKRLRYLLFEVAMSLVAKNPEFRELHNYYTTRRLNPLKKMQSLMAIAAKLIRVFYVMLTKGVNYDPKKMVNDIKRPAVYLQTA

SEQ ID NO: 119496 - protein, 390 aa, unidentified
MEARTVNNLPSAAAHDGAVRCRVAIELSKKSWVVAVNTPLSDKISLYKLKPNDWKELLELIERIQKRVAQELKKPVEVISCYEAGYDGFWLHRLLEAQGVRNHVIDPASLQVDRRARRAKTDGIDVEKLLRSLMAYLRGEPKVWNVVRVPTVIEEDDRRLHRERSRLINERIQHVNRIKGLLAIHGIYDYEPMHPERMPRLERLRTTARHRLPPHLNAEILRELQRLELVLGMIQTIEAERDAIASAKSKSRHTSAKKIQHLVKLKSIGPEFATVLVGEVFYRTFDNRKQIGSYVGLTPSPFQSGSTFRDQGISRAGNAKARTTMIELAWLWLRNQPDSSLSVWFRERVGERKGRIKRIAIVAMARKLLIALWRYLETGLVPEGAALKSK

SEQ ID NO: 119497 - protein, 371 aa, unidentified
MKKNITGTGPVKQKQQARKQRREELTVGIDIGDRNSSYCILDETGEVVGAGSLKTTRAGLREGFGKLQKSRIAIEAGTHSAWVARALGGCGHAVIVANARAIPLLTANSGKTDPMDAEMLARMARVDPALLHPIRHRSEEGHGHLCVIRARRVLVETRTKLMNAARGLVKPLGERLPSCSPAAASVRLAADLAPAARIAIEPLLTAVEALNQQIQEVDQRIEAIARAHYAEQVRRLTQVQGVGTLVALTFVLTLEDPARFRKSRDVGCYIGARPKRDQSGESNPQLGITKEGDRYLRTLLVNSAQYILGRFGPDTDLRRWGLKLCARGGRNARKRAVVAVARKLSVLLHRLWVSGQVYEPLRNSPTAAAAA

SEQ ID NO: 119498 - protein, 382 aa, unidentified
MPAYADPTPTPISADTIFLAFELSGTSWLVALHAPDADKVERHRLSAGVAAEVLGLIARTKARVTRRLGTTPRVACCYEAGRDGFWLHRVLEAEGIASHVMDPTSLQVDRRARRAKTDRLDAQALLRALMAWSRGERQVCSMVRPPSPEHEDERRLSRERGTLLKERLRLSNRIKGLCAAQGIYDYEPLGADRRERLARLVTGDGRALPGRLAAEIGRQLDCLELVLRHLAEVEAVRDARAAQAREEGGSKLATLLRLKGIGPELATVLELEVFHRHFANRRDVAAYAGLAPSPYASGGTSREQGISKAGNRRARKALIELAWLWLRHQPESALARWYRDRVGTATGRVKRIAIVALARKLLVAIWRYVETGLVPAEATVRT

SEQ ID NO: 119499 - protein, 364 aa, unidentified
MENVYYVGMDVHKDSIRMAVLQGEERSTVYEGTYENDISKIIRRLKSFSQKGTVITAYEAGCMGYTLQRGLSQAGIDCRVISPNKIDRLSINRIKTDARDAVLIARMIKHNEADTIQIPTQDDEAARDLLRCREDIKTELQRTRHQISNFLLRQGHLYSGKTNWTGMHKAWMKKLAFPRAPQKEAFTQYFCHMMEIEARLERIEASIIALAQAEPYREKVARLRCFKGIDYLTALACICEVGDYRRFPSAGSFMSYLGLVPSEHSSGAKRCQGGITKTGNSHLRKLLIESSWHYRYRFAANAALKERRKGMDEMVIMYADKAIHRLQKKFSKIVYKGKSAKMAVTATARELAGFIWGMMTESYC

SEQ ID NO: 119500 - protein, 411 aa, unidentified
MHNRQNYLYVGVDLHKEHHTAVIINCWQEKLGEIQFDNKPSAFSKFLLKVETYVCDGITVVFGLEDVGGYGRALAKYLVDHEQVVKEVNLALSFLERKSQVMIQKNDSWDAECVARILINKFNQLPDAKPNDLLWSIQQLVSRRNALVKAQSALKNQLHIQLNHHYPSYKKFFSELDGKTALAFWQQYPSPSCLEGTNIKQLTAFLLDVSNNTCSVKKASDILKLVKEDGQTMKEYQETRDFLVRSIVRDIEFKKKEMKYIQRELKRLVNLLDYQLETMPGIELVTASALIAEIGDVRRFPNANKLARFAGIAPVYFGSGGKGKTHKSKQGNRALHALFYNLAVQQVQVAKGSKLPRNPVFHAYYQKKLKEGKTKGQALVCIMRRLVNIVYGMMKYKIAYELPVVEEKEVV

SEQ ID NO: 119501 - protein, 342 aa, unidentified
MDYYAGIDVSLEASSVCVVDASGKIVKETKVSSEPETLIAWFKALPFGLARIGLEAGPLSQWLYAGVKQAGFAVELLETRHVRDAFKAMPVKTDRNEARGIAQLMRLGWFKPVHCKSALAQETRALLTARKLVLGKLLDVQMSLRGILRGFGLKIGRTTKAGFASRVMELTEHHPALKAIAKALLAVHAVLLRELDGFEKQVRKLAKGDARTRLLMTAPGVGPIVGLTYVGAIDDPARFSSSKSVGAHFGMTPKKYQSGETDVSGRISKMGDKGVRAALYEAAHVILTTPVKGGALKSWAAKLAKRAGMQKAKVALARKLAVILHRMLADGTPFDAVKAATA

SEQ ID NO: 119502 - protein, 311 aa, unidentified
MPDFVIGVDVSRRWLDVSFGGSRARRVEMEAGALADLAAEAAGRSALVVFEATGSYELPLREALEAAGVSYARVNPARARAFAQSCGILGKTDAVDARVLAGMGARLELPLTEPLAPARRALRSLAVRRRQLVEMRKQELTRCDGLGPSSMRASALRHIAWLDGEVAALDAEIAALTAADPEIDACARLLRSAPGVGPVVAATLLTDCPELGKLGRRQLASLAGLAPLARDSGQYRGQRAIRGGRPDLRARLYNAAFCACRCDPEFKALRARLTAEGKAFKSIIIIAAHKLLRRLNAMMKSGQPYSPVTAT

SEQ ID NO: 119503 - protein, 345 aa, unidentified
MENDTLVAVDIAKEVFEVAVSDRPGHVARRERPRRLNFLPLVAQLPISTVVMEACGSAHYWARQIEELGHVVVLLPPQYVRPYVVRNKTDRTDVNALLEAYRNEQIRTVPIRTVPQQVLGTLHRLRSGWLGERTRRINSLRGLLRELGFFMREGRKHVLPEAWEIIQGSRDFPAALRPSFTALCEEIASLSDRIEAIEKQLEALARQLPVVTRLRSVPGIGLLSATALYAFVGDVGRFPSGRHFSSFIGLTPREYSSGLRRRLGRISKRGDSYLRMLLIHGARAILWHAKRMKYPDRLRIWALRLEKQIGHNKAAVALANKMARIAWAVWSRDRNFEPAPEQQIA

SEQ ID NO: 119504 - protein, 415 aa, unidentified
MTDQITIPQKRFIGLDVHKHYLIALGVDAELNVVLPAQRVELFRVEAWMKKTLTKQDAVALEMTTNTWEIYDELSPCAHSVTVVHPPHVALITRSQVMNDKIAASILARLLAKGLLVSIWVPPVEVRELRALVAQRSKMTRLATQAKNRLHAILQRHHIVPPEGNLFHADQTEWWCALPVGKLEKINLQSDLDTLRFAETQLTRLASTMNELAVKDERVTRLIHLPGFGAVVALTVLAAIGEIARFEDAKHLVGYAGLGARIHDSGLTTRTGRITKAGRRDLRAALVEAAQVAANSHPHWKAELARLEPRLGRNKAIIAIARKLLVAVWFVLSKQTTDRFAQPEMVARKLMQFAYKVGKHNRPVNQSAAQFIRQQMDALQIGADLSAIPWGTKKRSIPLPPSALLENKMSDVPNT

SEQ ID NO: 119505 - protein, 348 aa, unidentified
MERFCVGVDVSAKSFDVAFRGVKGRVEYETFANDGVGRRAFVKYLKKRWKLIRVVMESTGIYGLDLALALNKAGIEVMVANPRAAANFAKATLQRSKTDRLDAEMLLLFAERMPFIAWRSPSSAQLELRAISRRVQALLETVRAEKNRMHAAMHVEGTKVVRKSITATLRALAKQIAELRAAAVKLIASDPILARRNELLVTIKGVGQVSAISILAELSVLPADMTDRQWVAHAGLDPRDFESGTSVRSVPKISKRGNRYLRAVLYLPARVASRFEPNAAAFGSRLKATGKEPLQIHVAVMRKLLHGIHAMFLTNQPFDGRRLFPPTAGAVGTSGIASSAISEVSIAN

SEQ ID NO: 119506 - protein, 466 aa, unidentified
MKPFYMGIDVSKGYADFMIINAQKKPVIQGFQLDDTFEGHQTLYNIVGRFLAENPNSILFAGMESTGGYENNWYNSLVAFQSSLDIQTARLNPLGVKRNSQADLKKNTTDKISAQNIAEYLVAHPEKVVYQQQDQLSALRKQWGFIKMLTKQRTQFLNQFKGLLYTSNPELLRYCQTETPAWILKLVVKYPSAARLKRAKVKTVAKIPYLSKTKAQQVVTDAKRSVASATDMATEQLVVATAQQIIHLNKTIDGQTRRMIEACGVPEVELLKTFSGIKDKSAIGLIIEIQTIERFDNVKKLASFFGVHPVYKISGDGISGIKMSKQGRKEPRHILYMIALSALKSNPLIKQLYEKHQKNGKHNMAAMGICMHKILRIIYGMLKHNKPFDPRIDIANKHRSVQVKKAAPRKNESRRFQEYDTKAPLSRRQKKKRLERDRSHSVPDTKSGITAPVPVGDIIANILPEL

SEQ ID NO: 119507 - protein, 362 aa, unidentified
MAHSVIFAGLDVHAAQTHAAQLEAATGELSVTRLAGGSDPAVAWLRRLGPGVRAVYEAGPTGFGLARAARDKGIDLRVVTPGLIPKRPTDRVKTDRRDAVRLARLLAAGELSFARVPTEAEEAFRDVVRAREDVRGDLMRARHRLSKLLLRREIVYPGPGGAWTQAHLAWLARLGFDDTASTVTMADYLAAVHALVQRRATLDAAIAELVPESPYAATVPVLRCFRGIDTLSAAGLCADIGDFARFAHPKLLAGFLGIVPSEHTSDDTRRQGAITKAGPAHARRLLVEAAHHYRRRPHVGVTLQRRQAGADPRVCDVAWRAQQRLHRQWQRLHGQRRKPSGVVAVACARELSAFLWEAATIT

SEQ ID NO: 119508 - protein, 348 aa, unidentified
MNRIYIGVDFHARQQTICYLTTEGGEIQLHELKHQHKQEVRAFYAQFQGQVIVGLEASGYSPWFERLLEELGCEVWLGHATEIRRRARWRQKNDRRDAELILDLMLHDEFPRLYLPPLQSREVLRMLRYRQKLVKIRTMGKNSLQALALQSGLAKGSHLFSKAGLQELRTAVMSPAMQWQREQWLQLLEPLNQRLLETMFWLKQQSQDDQRIIRLRTHPGIGLLTSLCLVHSLEPVTRFRNQRKVVAYAGLEPLERSSAERIRFLGISKAGSRILRYLLVEAAHVAVRKDEELKRFYQRLAARRGRAKAKTAAARKLLIRAYIMLRDEIDYAEFRRRAVAARLARKIT

SEQ ID NO: 119509 - protein, 404 aa, unidentified
MYYVGIDVAKEKHYVCILDDSGEIATKPFWIYTDIVGLRELIRRLADVSLNNDDFLIGVESTGAYSENLYEYITDSDYKVVLLNSYQTAKYRDFSTLKKIKNDTIDALVIAQLLHSGKYKESYISDDAYHSVKVLGRVKGSLDKKIKTIKREISTVMATINPEISKVFPNIFTKTALEVIKVYPSATHLAKATPKKLTRLFRHIKGNNFSEDKAKYLIELAKSSVYAGRACDARASLLSSYIKILELYCQEKKSIEIQIKKMITEEIDAIDKRIENLQSIPGISDKTIASILGECGDLRRFTSAKAFIGYLGLYPTQYQSGNSNSVGRLAKRGIPIAKHALYMAAVGSVLHNPQLNKIFHDKVSAGKSKKEALIILSKKIATIMYSIVMYNKPYDAQRVFISKK

SEQ ID NO: 119510 - protein, 333 aa, unidentified
MKILKQSIGIDVSKNDFKVCLGVIDEQLQAKNVYEYAYTNNKKGISQFIKDIIKKTDQLIPLSFVMEATGVYHQELAYALADKEFPVVILLPNKAKSFSKSINIRAKSDVIDAKLLCQMGLERKLITWQPPETIFATLKVLTREREALVLQRSKLKNQLHAYQTAFVKANKTISRIKAHIAYLTKQISDAQADMRTLVKQSQPVADKVKKITKVKGLSFLSVVTILAETDGFNIIFNQKQLIGYSGLDVRVDQSGEKTIKGRITKKGNSHLRKALYMPALSACRTNKSMKLFYTQLNQRQRAKKQGVIAVQRKLLLLTYSLWKSGQEYLEKCA

SEQ ID NO: 119511 - protein, 403 aa, unidentified
MNSVGIDISKGRSTVAVMRPFGEVVISPFEVRHTDSELSELARQLKSLDGETRVVMEATGNYHAPVAKLLHDAGLYVSVVNAKLVHGYGNNDLRRVKTDRKDAVKLANYGLDRWLSLPKYVPEEDTRLLLKNCYRQYRQYSKVQTLLKNNLISLLDTVFPNANRLFSSPIRGDGSEKWVDFVAEFWHCKCVCERSERAFINKYQRWCRKHGYNFSETKAQTIHAVASGHIGVMPKSETTKLLVEQAVAQLRATSAALAALKHEMQTLASQLPEYPVVMDMFGVGPTLGPQLIAEIGDVRRFYSKKALVAYAGLDAPPNDSGDMTGRHKSMSKIGASSLRRTLFLVMSVYLQNAPLAEPVYQFMDKKRAEGKPYRVYMMASANKFLRIYYATVKAYLESLEHTA

SEQ ID NO: 119512 - protein, 370 aa, unidentified
MSSVSHQGFTHLGLDVSKDWIAVAALAPDRDRATVQKIFHDEVSVRRLIGRFDDRSKLWACYEAGPTGYDLYRRLVGMGVRCDVIAPSLIPKRRGDRVKTDKRDARHLAGLHRAGQLTPIGVPSPAQEAVRDLCRTRGDMVEDLTRARNRLTKFLLRHSVVWRDGSNWTFKHQRWLAGLRFDDQALAATFAHYRATVELRDNSLAAIEEDLAPYCDRAPFGDQVHHLAAYRGVTRMGGLCMAAEVFDWRRFPAARSFMSFTGLVPSENSTGLSEHRGNITHAGNRHLRAQLVEAAWAYQHRPHVGAGIAARHDGLPPEVIARAWAAQVRLSTRFRKLAARKNVRSVVAAAIARELAGFLWAEMTADSIAP

SEQ ID NO: 119513 - protein, 427 aa, unidentified
MAVVMIGVDPHKGSHTAVAINAAEGPLGQLRVRAPAVQAERLLAWAQVWPERTWAVEGAGGVGHLLAQQLLSAGERVLDVPPKLAARVRLLATGNINKNDPNDARSVAVAALRSADVREARRDDHAAVLKVWSKRYRDLGRMRTQVACRLHQVLCELVPGGVPGEITAGQAGQILGSVTPAGTVDAVRWELAAELTEDLRGIDARIRETRKKAAAAVRAAGTSLTGLFGVGPVIAAAVIGDVRHVSRFPDRDHFAACNGTAPIEVSSGGRKACRLSRRGNRRLNHAIHMAAITQIRYRHTKDRAYYDKKLAEGKTPKEALRALKRQISDAIFACLQADARRAAAAAAKRPGGQPGNHSASRAAGSHPGHRLFGQATPGPATHPMTPAAPFPAQLPSRASGQPGPGPGAARPRSGAREASSTRPPASR

SEQ ID NO: 119514 - protein, 315 aa, unidentified
MSDVPCFVGIDVAKAQLDIALRPSGERWAVANDADGVVTLVERLQPLHPTLIVLEATGGLERVATAALATAGLPVVVVNPRQARDFARATGQLAKTDALDARALAHFADVIRPTPRPLPDAQTQELRALLGRRQQLIGMRTAEQNRLAGTSGRLTQDIEAHIAWLNARIATLDDDLETMLRASPLWRENDDLLQSVPGIGPVCARTLLLELPELGTLNRQQIAALVGVAPLNCDSGTLRGRRVIWGGRAHVRTVLYMGTLVATRFNPQIKAFYQRLLAAGKLKKVALAACMHKLLTILNAMLKHRTSWKAQEVQN

SEQ ID NO: 119515 - protein, 417 aa, unidentified
MFRRCVAGIDVHKKMLAVVVRRQEGGQVTYVKRKFGATKSEIGHLAAWLKHEGVEEVVMESTAQYWRPVWYGLEPHFRLHLSHPLKTKAPLGRKRDYRDAQRLADRWCSGDLEESLIPLSEQRGWRWMTRARVDLKRKVTRVRNQVEGVLEEGGIKLTSVASDVFGVSGWAMLERIADGETDVEVLVGEARAALRKKKAELQEALAGYLGPAYRMLLKQYLDQVRLLRKQIEELNKEIALAMKDYTEVLCRLCKVPGIQLEAAQELLAEIGPKAAAFPSAPQFASWAGVCPGCQESAEVCYSRRSAKGNRYLRRVLTQVAWAAVRSKDNFFGSLFARLKPRIEAKGAAWAVAHRIAKVVWLLMHEGVEYVEKGPGQPSVKSLTNKLRRMTKQFAAHGLDIANVLAQVSATTLSEPAS

SEQ ID NO: 119516 - protein, 343 aa, unidentified
MSEVSTIGLDIAKQVFHAHGADASGRQLFSLRVVRRKVLEFFASQPRCLVALEACGGSHHWARELARLGHDVRLIPPSYVKPFVKRQKNDAADAEAICEAAQRPTMRFVAFKSEEQQASALVFRTRDLFVRQRTQTINALRGHMAEYGWVAPQGRTHVAILADLLEEEAGASLPQAAATMLKVMLTMVEELDGRITELDKEIARRVREDAVVRRLMTIPGVGPLAATAIAALAPPLETFRRGRDFAAWLGLTPLQKSTGGKQRLGKMSKMGERTIRRLLIIGSSAVVHHANRSGAPERPWLAGMLARKPRMLVTVAQANKTARIVWAVLTKEEDYRAPAARAV

SEQ ID NO: 119517 - protein, 316 aa, unidentified
MAKLVTKITLGVDVAKDQLVVCNWHTEEITYLPNQLGEIKAWLKSFHGPLRIAIEPTSHYHMCFVTEALAQGHQVYLVNPRQLMHYRQAVNVRNKTDPLDAWLLARYLEHESAQLRPFQPQDRRAQRLWALLLRRATVVQSRQQLQQSFREVQISIQAMLTQFKQLLVRLDQQIIRLIRELGWWSDYRYCLSVPGIGPINAAALVAAYHRGAFAGSDAFVAYMGLDVRIRESGRFKGKRKLTKQGKPELRRLLFCAAHPARTHQRFADYYQKQLNKGLSKIAARVALARKLARIAFTLMNRQQSFNKQEIIYCTAP

SEQ ID NO: 119518 - protein, 344 aa, unidentified
MLIIGCDFHTRYQQIAMAREETGELLVERRLDHASGESQEPVRVGIEATGPIHWFERLLADLGYELWIGDSAKIRASEVRKQKTDERDAALILDLLLAKRFPRIWVPTPAQRDLRQLLWHRHKLVSMRTMLGNQLHALAMSQGLCRKKKLFTKKGRVELVSLGLAPWASRRREELLKLLDQLELPIAELDRAVLEEAKRHADAVRLMTHPGIGPVTALAFVLAIGPITRFRRSKKIASYLGLNPSEESSGGRRRLGAISKQGNTMVRWLLIETVHHAVRQDPELRQDYQRLKFRRGHAVAKVAIARKLAVRMYWMLRSGADYARLVRRQGSPGGTLVGASPSLA

SEQ ID NO: 119519 - protein, 391 aa, unidentified
MVCVGIDVAKDKHDCCILDSDGTIRADCFTIPNNIDGFKQLLRTVRDCTTKADKIKVGLEATGHYSYNILGFLLDNSLPTYVISPLHTNLYRKSLSLRKTKTDRVDARTIATMLLSDVDLKSYTDTAYHNEELKSLTRYRFDKVRERAKLKQSVSRLVTILFPELEKLVPTLHIASVYSLLSEYPGAKQVSEVHLTKLTNLLATASKGRYRKEKAVQIRDAAKTSIGSVMPAKSLELKHTIKLIQELTSEIDEIEDSIQQIMDELNPPILSIPGMGIHSAAMILAEIGDFSNFESPNKILAYASCSPSTYQSGKLTNCYAHMEKRGSRYLRYALYNATKYVCYWNPVFAKYLAKKRAEGKHYNVALSHAMKKLVRLIYALQKSGKAYLTAA

SEQ ID NO: 119520 - protein, 354 aa, unidentified
MNIKYIGMDIHKEAISIAVMNGDGKLVMESIIETKASTILQFVQGLRGDLHVTFEEGTWAAWLYDLLKPHVTELVVCDPRKNALMKEGNKSDKIDARKLADLLRGGYLRSVYHGENGLRTLKELARSYLTISKDLTRVMNRVKALYRSWGILCGGQQVYAPRHRAEWLNKIGEAGVRRRAEFFYQQLDALRALRQAVRRDLLAESRKQSATKLLRQIPSIGPIRAALLIALIQTPHRFRTKRQLWTYSGLAIETRDSAQYRYVAGQLQRSKKPQQLRGLNQNHNHDMKAIFKSAATMASSREGPFHDFYQGLLTKGMKPAMARLTLARKIAAITLILWKKGAHFDAEQLKPQAA

SEQ ID NO: 119521 - protein, 364 aa, unidentified
MKRKVYVGMDVHKETIQIAYLTSNSKEILKEQQIKHNEVQIKKFIKKLKTEWNEIYCCYEAGVTGYPLYRYLKSLGVNCILVAPGKIPRQNTDKIKTDKRDAIKLARLMRSGELESIHVPSEEDEAVRDYLRSRDSLRLDLGRNRQRLMKFLLRKDIKYSTTKYWTVSHYKWLNNLHFNNEILQETFNDYYSRVRVQEENLKAMDKKIQEIAESAPYREKVGILRCFRGVDYLTAMFLLCEVNDFKRFKTAGSFMSFLGLVPGEYSSGSKRKQTGITKTGSPRLRRILTEAAWQHRFPGTGSKIITARRSGQPALVVALAEKASLRLHKKFRNLQLRGKTPQVMITAVSRELSGFLWAAMNLVA

SEQ ID NO: 119522 - protein, 454 aa, unidentified
MVAIPLHAHKERLYVGIDIAKSKHVAGFLSAPLLASRQKFNNCPSFSFQNTREGFEFLVSRMADQAPLAMCLVIVENTGHYGRALIQYLRAHHIEIYSIHAAKRLSKNKTDRSDALNLANILYNQEELKVQASDAQLEAHRYEEATATAAQLAVLAQRRQELTQGITKIRNKLTAICDELFPEFVTVIKDPNLPTALAIRHQYPTAAHVAAASVDDLLALRSARTKKPGRPTLQRLVDVAKFSVGNVDEFRIRGLIIEQRQLIEELRLANQHADELDRDIAAILAESREGAILMSIDGIGPTHAASIIAAIGNINNFESASKLRGYFGWSPRWTQTGTTIDSATLDKGGNNMLKSTMYLVAMVAIKNDTEWKAIYDRLVPIKCRYDDRKKTYSGKIKVLGRIAGQIVGVIYSLLKRDSDYLARLEPGQSASASAPVLYSREVHRFKMGRVSKLD

SEQ ID NO: 119523 - protein, 337 aa, unidentified
MKYSGIDLHSNNSVVTVMDDNDRVVAEKRLPNDLAKIIGFLSPWREELAGVVVESTYNWYWLVDGLQEAGFVVKLANTGAIKKYDGLKHSGDEADARHLAHLLRLGILPTGTILPPEHRAIRDLARKRMQLVRSRTSHILAIENIMARQQAVKITSNIIKRLTAEGVEQMGLPADVSLAIQSNLAVTITLGAQIDLLEKRLQESVGERPDYVLLSSVPGIGRILATIILLETGSIDRFAAVGNFASYARCVDSQHTSNGKKKGEGNTRNGNKYLAWAFVEAANFALRFCPEAKRFYERKKARTNTVVAIKALAHKLARACFHILKERKPFDVTRCFA

SEQ ID NO: 119524 - protein, 376 aa, unidentified
MRSVAIDVGGKKICFCEVRDGQVVQRATVQSLESLKPLLGPEQPTAKVGVEACREAWHAYELLSRWGNEVLLIDTTRSKQLGIGQHGRKTDRIDAEVLAKAVESGRLPKAHLLSPSRRELRRLLGIRRNLVEARAQFVVTARGLAREQGITLPTGHTESFSAKVNASHHVPREMKELLQPLLISIQTLNEQIERVEGQLDALGKAEPTIQLLCTAPGVGPLVAATFVSVVDEARRFKNAHQLESYLGLVPSESSSGSQKRVGGITKKGNGYLRSVLMQSAWVIVRKRDATDPLVRWANEVVKRRGKKVGVVAVARKLAGILWAMWKRNEVYDAELLRAGSVRGLQRQAQDTLQRATALREASRKTTGRFSVREVHV

SEQ ID NO: 119525 - protein, 388 aa, unidentified
MQDVADQSVAPTTIAADLCAIFISLELSRSRWLATSLSPGRGEKMSKHSVSAGDIAALVARFSELRRKAYARTGKCFPIIVIQEAGLDGFWIHRVLLSEGIESHVVDAASIATSRRRRRAKTDRIDGEALLRALLAHKRGEPRVCSMVRAPTPEDEDRRRICRERKVLIMERVQHVNRIKGLLFSQGASEYEPLHRDRRARLDALQTGDGRRLPQHLKAQVCRELDRLELLLEQIRAVEAERDALLNAEQTKVSAPPPMLLGVHGIGPEFASVLWSEGLSRHFDNRRQVAAYAGLAPTPWQSGSVNREQGISQSGNPRLRTTMIQLAWLWLRHQPGSALTLWFKDRMERNGGRRRKTTIVALARKLLVALWKYVSAGLVIEGATIRPA

SEQ ID NO: 119526 - protein, 345 aa, unidentified
MTMVETRAVTGGVDTHADMHVAAALDPIGGLLGVEEFPVTPAGYARLLGWLGGFGTVALVGIEGTGSYGAGLARHVTAAGIRVVEVDRSDRQDRRRRGKSDPLDAVSAARAAQSGRARGAPKGRDGTVEAIRALMVAKRSARSERVQTINQARALVLTGPDDLRTRFARHTAAGLVSGLASLRPRPGDVVGYATRIALRELGRRAEFLDGQLERLDELIGPLVAARAPGLLALPGVGPDTAALLLVAAGDHPERLRSEAAWAHLCAAAPIPASSGKVTRHRLNPGGDRQANHALWRIVLTRMSAHPPTRIYVERRTKEGLSKKEIIRCLKRYVAREVYRHLRAAG

SEQ ID NO: 119527 - protein, 344 aa, unidentified
MEISIIGLDLAKSVFQVHGVDGSGRAVVRKALRRSQVVPFFSKFAPCVVGMEACGTSHHWARELSSLGHEVRLMPPAYVKPYVKRGKTDANDAEAICEAVTRPTMRFVSIKSPEQQAALSLHRTRNLLVKQRTQLVNMVRGLLAEFGVETPRGLHHALALASRLVDGEAAAVPALAQRVVAGLARQIAALQVELTVIEKEILVWHRSSDVAQRLATIPGIGVISATALAASVTDPQQFRSGREFAAWLGLTPLQHSSGGKERMGRISKMGDKYLRRLLVVGMTSLVRRARVSPASVDPRIIDLLARKPVRLATVAMANRTARVVWAVMARGETYRRPTTIGLAA

SEQ ID NO: 119528 - protein, 346 aa, unidentified
MKKIFIGIDFSKEKFDATLIKAEGLKECAPSVHEMFDNKTSGFRRLVKWVKAQSESASVDSWLFCGENTGGYSIGLSNYLYASAYDMWLECAYKIKHSVGIQRVKNDKADSRAIAEYAMRNYDKMILYKPQSASLTCLREVFLYRHSLVRQKVALQVRRDEKRLTQEKSDVRAFMSFTSKHLVTEVNKAIAKCDQKIKDIIAADDELREIFDIITSMPGIGVQNATCLMVYTDNFQKFDLNARKIGCYYGIAPFGRQSGTSVNSRPQVSPFANRMIKALLSQAALAAIKFDMNMYDYYQRLKERGKHPLLIHNNIKNKMLHALVAMVRDRVKYNPDYVYRTNKEIA

SEQ ID NO: 119529 - protein, 405 aa, unidentified
MIEPIVKRIAGLDVHKMVVVGTVLIEEEDGSIKQETREFGTFKRDRRQMCQWLKDHEVELVAMESTGIYWKSIYATLEKAQILAYVVNARHVKNVPGRKTDVSDSQWLAALARVGLLRPSFIPTKDLRELRIISRQRTKINVTLSAEKNRLNKVLDDAGIRLGGVASDIDGVSAQKIIEGIIDGKPIEELIACARGRLKAKTDDLRACLDEELSERHIFLLKALQKHIQFLKSELEDIDAYLFAAMSPYQKQWEILQTLPGVDKVAAMVLIIEIGIEMERFGSADQLSSWAGMCPGNNESAGKRKSGKTRKGNQAIRSILCEIANAARRTKSQFKGKYESLVIRRGHKRTIIAIGHKILRVIFVMLKNEKPYFDPGINYEELNVSRNAPRWLQALKKFGYLPQTV

SEQ ID NO: 119530 - protein, 345 aa, unidentified
MKCKTIGLDLAKNVLQVHGVDERGKTVLKKALKRAQVLPFFANMAPCLIGMEACGSAHYWARKLEAMGHSVKLMAPQFVKPYVKTNKNDAADAEAICEAVSRPNMRFVPIKDGEQQALLAIHRARQGFVKARTAQANQIRGLLAEYGITIPVGISHIATHLPEILEDGENGLPGIFRQLIDRLGTHLKALDRQVAELDTQIQAWHRESVASRRLAQVPGIGPMTASALVASIGDARNFENGRQLAAWLGLVPRQHSSGGKPTLLGISKRGDTYLRTLLIHGARAVIRVAEHKVGYAQSWLAGVMGRRNKNIAAVALANKNARIVWAMLAHDRMYRADFGMQESAA

SEQ ID NO: 119531 - protein, 355 aa, unidentified
MNAIKYIGMDVHLATISIAVLDATGKLIMEGTIATQAGALLDFIRGLSGTLSVTLEEGTSAHWLYTLLEPHVAKVVVCDPRQNPRRLGEKKSDRLDARKLAEWLRLGTLKPVYHGNALGPALRELARSYRTLVSDTARVMNRLKALYRARGIRCAGTRVYSPRWRDQWLEQLREPGVRGRAERLYKQLDLLLPLRQEARAALLAESRKHPAEKILRSIPTLGPMRVALLLAILQTPHRFRGKRQLWNYAGLGLVTRTSADYQMLDGQVTRSRKPALVLGLNANHNHVLKGLFKDAAVTARTRPGPFKDFYATRVAEGMEPEMASLTLARKIATLALTLWKKGECFNAEHLKAQAA

SEQ ID NO: 119532 - protein, 408 aa, unidentified
MTVFVGNDWAEAHHDVHLMGDDGDKLAAKRLPEGLEGIAALHAMIADHADDPSEVIVGIETERGMWVQALIATGYQVYAINPLSVSRYRDRHNVAGAKSDPGDAKVLADLVRTDRHNHRPVAGDSDTADGVKVLARAHQNLIWDRTRHTNRLRNDLREFFPAALVAFDDLAHPDAVTVLAKASDPAIAARLSVAQIRGALRRGGRQRNLDTRAAEIQQALRSPQLSAPSAVTDAFAATSHALVEIIAGLNRQIGRLETELANHFEQHPDAGIYRSLPGLGVILGARVLGEFGDDPERYDTAKSRRNYAGTSPLTIASGKKRAVLARHIRNRRLYDAIDQWAFCSLQASPGCRDFYDQRRAAGDLHHQALRALGNRLVGYLHGCLRTRTHYNEHTAWAHRQHQQTQIAA

SEQ ID NO: 119533 - protein, 359 aa, unidentified
MEQSTSITIGVDLGDRYSQLCVVDADGGIVEEGQVRTEESKLRASFGSRARARVVMEAGTHSPWVSRLLEGLGHEVVVANPRQLRLISQSDRKSDRYDAQVLARLGRVDPALLRPIRHRSAETLADREMLRARDTLVRARTQLVNHVRSAVKVTGGRLPASGTSAFVKKVSPAIPARLRPALEPVLAMITALNEALRHYERELETLADTRHPETACLRQVAGVGVVTSLAYVLTLEDPHRFAKSRSVGAYLGLRPRQHQSGDMDLQMRISKAGDRDLRRLLVQSAHYILGPFGPDTDLKRYGQRLAARGGKSAKKRAVVAVARKLAVLLHRLWVTGEVYEPLRAVARKAESERAEGAAA

SEQ ID NO: 119534 - protein, 395 aa, unidentified
MRSPIMLKRLHPEHYLNRCDTSYGLPSDEGVIKEFPNSINPSPKGGQVMRFYNKQHKYYCGIDLHARKMYVCILDKKGKTHVHKNIKTDPELLFEMIFPYIDDIVIGVECVFCWYWVADLCAEHKITFILGHALYMKAIHGGKTKNDKIDSYKIALLLKGGNFPTAYPYPAEWRATRDLLRRRMYLSRRCSELVAHILNTNTQYNLPGFNKKLSRKYNHQGVAERFEDPQVRKSVEVDLEMINSLNQVLKKLEWHIEKTARQHDYHTLYLLRSIPGVGQILALVILYEIHDIKRFPRVQDFSSYARLIRPVKESNGKWAGHSNKKIGNHHLKWAIKEAAILMLRDSHDAKYYVSKLERKYNKGKALGIFTHKLGRAIYFMMKNKEAFDMKRFFTK

SEQ ID NO: 119535 - protein, 414 aa, unidentified
MEQLVERCAGLDVHQAEITACARIPGEHGGVVEIVQEFRTTTPDLLALLDWLVALGVTEVAMESTGVFWKSPYYVMEGHFDRVLVVNAAHIKHVPGRKTDVIDAAWIAQLLAHGLLRGSFVPPPAIRELRDLTRYRKALTEERNREVNRIHKILEDAGVKLAVVASDVMGVSGRAMMRALIEGQADPEALAELAKGRLRAKLPELRKALTSRFRGHHAFLLERMLAHVVDLESDIEAVQERIEEAVAPFGRQVEILDSIPGVGRIAAQAILAEIGTDMRVFPTAEHCASWAGMCPGQNESAGKRKSGKTRKGSRWLKTILLECAHAAGRSKGTYLSERYRQLARRRGKKKALVAIGHDIVTIAYHLLSTDQLYQDSGPDRVTSEAEDLAKRRAIRQLTALGYRVSLTPLPGRAA

SEQ ID NO: 119536 - protein, 325 aa, unidentified
MTQPMWVGIDVSGKWLDVGSHPQQETIRLPYTDAGLADLLVWLDGRVVIGVAMEATGGIERTVAYALADAGHQPRIVNPKRVRDFSKAISPVKNDRIDACRIAHFAATVAVVPIERDKVREQLDEMVTTRQFLMNQLIAARNHARLLRMPAMRAHMASQIKAMRTRMAAVERDIEGVIKADEAIDRDRKRLCTMPGIGPVVGAALVAWLPELGRLSAGKVAALVGVAPFDDDSGDRSGKRHISGGRIGLRNLLYMASLSAIQHNPVITAFYQRLIAGGKLKKVALVAVMHKMLTRLNAMQRSGQVWNAGHVCVRVQLPTAIATLA

SEQ ID NO: 119537 - protein, 362 aa, unidentified
MEFFCGLDVSMDETAICVVDATGKVQLEVTAVTDPDAIATALKPFRGRLRRVGHEAGALSPWLHPELVKCGLPALCLETQHVRSALSAQRNKTDKADALGIAHIMRTGWFRQAHIKSESCYRLRLLLTQRRTLKHKVLDIENTIRHSLKAFGIKVGGISRGAFDKAVRDAVAQDALTTELMDAMLAARAVLWKQYCRLHDLVVRFVAGHELCRRFLQIPGVGPVTALSFMTAIDDPSRFRRSRDVAAYFGLTSRRRQSGTSIDVQGRISKAGDPDVRRALYEAASALLTRFKRKDKVKTWGMSIAKRACHRKAVVAVARKLAVIMHAMWVDGTFYVGDPAAAEQDVAACAALKDRKLLGAAR

SEQ ID NO: 119538 - protein, 343 aa, unidentified
MNTITRIGLDLAKSVFEVHAVNAEEQVVHHRSLRRAQVLKWFAKLPPFLIGMEACGTAHHWARELTQLGHQVRLIPPAYVKAYLRRNKTDAADAAAICEAVGRPSMRFVPIRSVEQQATTVIHKAREMLVKQRTMITNSLRGLLAEFGVTVPEGPRHVSELTARVADPEDTTIPSGTRVALSGMIEVLNTLNEKIAGLETRIRALVRENEGMRRLQTIPGVGPILASALAAIVTDPRHFDSGRDFAASLGLVPRQDGTGGKVKLGRISKRGNGYLRRLLVNGATAVLNSKNGTSDPWRARLLKTKPRKLAAVALANKTARIVWAVMMRGEAYRPSTATVATAG

SEQ ID NO: 119539 - protein, 429 aa, unidentified
MLRSIGMDVHRDFCEVAIAEDGAVRAAGRIETKPAALELFARSLAPSDDVAIEATANALAIVRIIEPHVRRVVLANPKAVRETSRRAKTDRIDAKVLAQLLAVGFLDRVWTPDEAARTRRRLISRRCALVRQRTREKNQVHAALQRNLVERPPMSDAFGVKGRAWLAERVERLPLDERLSVEACLRQIDFVDDELERLDKIIAADALSDDDALRLMTLPGVSAVTAIALRGAIGDVSRFKTPRHLVAYLGLDPRVRQSGSEPAKHGKISKQGPGEVRGLLVEAAWHAARTAGPLRAFHQRLAARRGANIATVAVARKLVIIAWHLLSRGEKYAFMRPALYRQKLRRLGLMTGASRQQGQRLPEPGFLRAGDPRRRAEDELVAAQEAAYRRLVADWQASRPTKNVGAGATPGRASDRPSKGKAARQAASP

SEQ ID NO: 119540 - protein, 441 aa, unidentified
MAMRKRDEEAVFPNAAGIDVGASSHWVAVPRQATEEPVREFGAMTDDLNALADWLLGCGVDVVALESTGVYWIPIYEVLERRGLQVWLVDARQMKYVPGRKSDVQDCQWLQKLMSLGLLRAAWRPGDEVCVVRAVVRQREVLLTEQASWVQRMQKALVQMNIQLTEVLSDVMGMTGQAIIRDIVAGQRDPHALARHRSGRIKASAEEVRKALTGNWREEHLFVLTQALAMYDSLAQRIGECDAKTQALLAPLGRQDVDLGKAPKERSKQRAAFAVRQALANWAGVDLTRIDGLGVAAVMKILSEIGPDLSRFANVKHFCSWLGLCPGTKISGGKVLSANTKRSANRVRQALKMAAMSLSRSDSALGAFYRRLCGRMDKPRANTAVAHKLARMVYFMLTRGESFVDKGQQHYEQQQRQRSIAALKRRAATLGFNITPSSATA

SEQ ID NO: 119541 - protein, 456 aa, unidentified
MRKPQVIPDEDHVVVYERVAAVDVAKASGVVCMRTPDPARPGRYQNQVWHDVTATRARITELGRELLRNKVQMVTLESTSDYWRIWYYVLESIGLAVQLVSASQAKNLKGRPKTDKLDAMWLARLTQWGMLRPSFVPPAAIRALRDFTRARLDLVRERTRCLQRLEKLLEDAMVKITSVASDGLKAKSVVAMVQALIAGERDTAKIADLAKGPLRGKRAQLAEALNGMFDSHHGVIAQALLDQVAFLDQRIARMEDGAIEALAQIPQSWGVDATGETGPQAGKTPDSPVLAAAWRLAEIPGISLMLAIAIIAEIGLDMARFPTADHLVSWIGLCRAASQSGTRQGKGKQKKGNSYARCLAGQAAIGASRTSSFPGERYARVGRRRGGAIAQVAVARSIMIIVWHLLSDPQARYRDLGADWYERRTDKDKKIRNHIRQLEALGLSVTITADPQETAA

SEQ ID NO: 119542 - protein, 320 aa, unidentified
MTYIGIDVSKDSFVAAYPAKSGYTTKTFKNTSSGVHQFIQSLPAECHCIMEATGNYSMLLLYLLQQANITVSMENPQKIKHFARAMLSTTKTDEIDAKLIAMYGEKMEPAPYKIPSESIIQLKQKRTVLRQLKKQLTMMINLQHSLSVLPKQDPTAKVATEQTIKFLRKQISKLEDEITHLSNKEFKRQMELLTSIKGIGENIASALIMATGGFTYFSSAKQISRFLGLCPTYQQSGTSVSFKGHINRNGDTHLRSQLYIVAVASIKCNAACRDTFVRLRERGKSGKAAIIAVANKLIRIAFAVVTNNRPYLDGYASTLA

SEQ ID NO: 119543 - protein, 402 aa, unidentified
MAKHFLKVIAGIDTHSDTHHVAVISDTGEHLADKEFLAVGSGYRKIVEFITSFGTVLAIGVEGTGTYGAELARVLTGEGLQVLEVMRPNRQYRRLHGKSDPLDAYQAAEAALAGSGTSLPKARNGAVEAMRVVRAERSTAMRARVAVITQIKSILVSAPDTLRSRYRGMTGTAIIAAPEKSRPGGDLKDPLNTTAIVLKRLARRYRALAQELALIDTELDALVTAHAPMLRDLRGVGTDTASQLLVTVGDNPERITTEAKFAALVAVAPIPASSGKTTRHRLSRSGDRQANKAIHHIALVRMSCDARTKTYVSKRRQEGKTSKEIIRCLKRYIAREIYDQLLHPHPAPAAGELRALRTAKNITLQRAADTLHIWPSTLSRFERGLTRDDHFFQRYSDWLNTN

SEQ ID NO: 119544 - protein, 418 aa, unidentified
MTTVAKKLAQVKPEHLVAGLDLGLDSLAVVVLEAQGSRVDRFKVTQSRDGYETLRERLQRDVTQHAAQGVLIGLEPTNYYWKQVGTYLNQVSLPFRLVNPYTVKRHREGDQLDRAKDDWRDAAMIADLLRTGKFTETRLRTGGYAELQIGHATYWRLRHDRGRQLTLLTNSLRQVFPEMPQVFKDLTGITARAVLHSLPAAVAIRAVSWPDFLAQVRAAAAGQRLAVSKLRQLYDLAETSIGLQDGLEALQFDVRITLTTVTLLDQQAQDLLEQLLRDFRALPEAPYLCSIEALPEVCAMGRLAETGPLSDYGSGKDLIKLAGTQPTPNASGRYERQHTPFSKQGRGRLRFVLFWATLPLLKHNAAIAHQYQRLQTRAQHPLAKMEAIGVCMNKLLWYVWHTAHTQEKYDPDFWKQAH

SEQ ID NO: 119545 - protein, 365 aa, unidentified
MKKLVRPVQKVNADVVGMDVHQRQITYTHLDARGDDVAMAQVRTSEEEVVALLDRLPSPVHVAFEAGGSTFWLYDVLVARLGARFVHVAQPKKIRAIANSTQKNDENDSWWLAYLTYEGRLPECHVPTGKRRELRIAVRERFETVKLITRAKVRMRSHLRQMGVKLPTRKIDSIAGWNSLVDLIEERDGVQAQAIEHYLVLLEHLMSSLKKWEQVVEDLAAGLPEVRTLEREMPGVGPVLSAVIAAELGPIGRFKSPKALACFTGLTPSNRSTDGNQRKGAITREGSEHLRWALTQAAMGCLRSRSGPGLAAGNWIRAKERRMGCKAKARAAGARKLAESIWRLFHWGECFDARRPFGGAPATAR

SEQ ID NO: 119546 - protein, 351 aa, unidentified
MKYYTSTTEFNCGIDLHARQMYACVMDRTGKKLMHTNIIGNDFEYFLKRVEPYRHDLTVVSECTFNWYWLADACFDADIEFVLAHALYLKHIHGGKNKNDRIDSEKLAHLLRANLIPPSYVYPSERRPVRALLRQRMSYVWDRATLRTHLSMNQTAEGLVPARKKNHNRDVWEEMILKQYSNPLHKFAVSCDMDMIRAYDKQIIKLESEIIRQAKKGMGRDFMLLQSVPGIGHILAMTILFEIDTISRFPAVKDFLSYCRLVKGSVASAGKLKGLTGGKMGNAYLRWAFGQAAVIAKRNHPLLTPYAERLTSKHGKFKGNAILANKLARAIYFMLQSGTAFNAERVIATSI

SEQ ID NO: 119547 - protein, 400 aa, unidentified
MLSIGIDVSKGKSTVCGMKPGGEIVYTPFEIQHTREGMSELVSLLHNSGEEVRAVLESTGSYHCPVVAALLENGIFVSVVNSLRMKRFCSQSIRKVKTDRIDAMQIALYGLAYWQELQPTRLPEDTYRELQLLARQYYQMTSILIKAKVDFNALCDQVLPGMQELMSDHAGRHKLSDFVLRYRHTAHILEMGETRFRKDYCKWAEKKGYRNRERMAALIFATAQNGIPVLPNAPSTQIVITEAIRVLHTVEASRDAILTQMQALAKTLPEYSLVREMPCIGDTLAPRLIAEIGDVRRFHSKRALIAYAGIDAPPYQSGKFCANNRHISKRGNRYLRKTGYEVMQSYVMHKPANDPIFTFIEKKRGEGKSGKLAMVAGLNKFLRIYYGKVTELYRSLPAIE

SEQ ID NO: 119548 - protein, 359 aa, unidentified
MCVIDAAGSVLGRFDVTHDRNGLAELMRRLARHGQCLRIAIERPSGLIVDALVDAGHAVFPIHPNAVKASLPHYRSHGAKSDASDAYLLADLLRTDGHRWRALAPQSDAIRALRALVRSRDDLIAARVAAANQLTSALQAFWPGAACIFADVCSPIGLAFLRRYPSPSCAKRLTEAELQRFCKAQHYSGRRSAAELLARLRAAATGRVDAQTEQALADVVRAQVAVLVPIVTQIADLTRRIEQFMHSLPDGLLMMSFPRAGQVCAAQILAELGDVRERFPSADQLAAEAGTVPVTTSPARHAAWPSAGRATTGGARPSPAWPTTRAMPTTGLEASTKPPKAAVAITPTPCASWLAPGCG

SEQ ID NO: 119549 - protein, 360 aa, unidentified
MRIVMLGIDLGKNLCSLAGLDETGAVVLRRRMKRASVLPFTAQLEICTVAMEACCGAHHLGRQLVAQGHVVRLMSPAYVQPYVKAQKNDERDAEAIAEAATRPTMRYVEIKSEAQLEVQSLHRVRGRLVAERTALINQLRALMLERGIAVPQGRCKLARYLPEILADERNGLGPRLRQLIEDIREEWRSIDQRIKGYDDELAEQVRNEDTAKRLISIPGIGVLTATALVAAVGNAQTFSCGRDLAAWLGLVPRQATTGGKPRLLHISKRGNGYLRMLLIHGARTALPGLAKKDTPLGRWVKALLARAHRNVVTVALANKLARIAVLTLSGLSSARISSVRAGDPARPQTAWISRTAWLRI

SEQ ID NO: 119550 - protein, 404 aa, unidentified
MDHLFAGLDWASNVHAVCVLDAAGAVRERFEVAHDAAGLTALLTQLRKLSPEARALPIAIERPSGLLVDTLIEAGFRVVPIHPNVVKATRPRYRSHGAKSDASDAYLLADLLRTDGARFAGLKPQSDEIRALRALVRGRDDLVATRVQLANQLRSLLDSFWPGAATVFADVDSPIALAFVQRYATPHATTRLGEKRMAGFLAQHHYCGRRTPAELLERLHTAPTGHADELEADAKGELVCALARVLERLVEQITQLSARIEHNVAALPDGRIVMSLPRAGRVCAAQILAELGDVRERFPSDDQLAAEAGVAPVTYQSGKSRNVTFRWACNHRLRRAITCLADNSRHASAWAARVYSAARQRGCDHPHAVRILARAWTRVLWRLWVDHVTYDPAKHRAALALATT

SEQ ID NO: 119551 - protein, 342 aa, unidentified
MEQYVGLDVSLEETTVCVLDSAGKIVWRGRCSSDPEAIARIVRERAPFAVRLGLETGQLSTWLVHSLRRLGLPVVCLDARHAKAALSLQINKTDDNDAHGLAQIVRTGWYREVAVKSMDSQAVRVLLMARTQLISQRQATANQIRGLLKTFGLMVGQAGGSRFAVRVRELVPEHPVLVAIVEPLLTVWQTLREQVADLDRQVRMRVREDVAARRLMTAPGVGAVVALAYTAVIDDPARFAKSASVGAYLGLTPRRYQSGEVNYDGHISRCGDGLLRSYLFEAANVVLSRLTKPSWLKEWGEALAKRIGVRKAKVAVARKLAVVLHRMWMDQQEFRWSPKAAA

SEQ ID NO: 119552 - protein, 388 aa, unidentified
MNDFNTHKRSTHKTIEHAGFVGLDVHKDTIAVAVALPGREAPYDHGEIANTPKSVKKLVNRLSKQFEGQVLLFVYEAGPCGYDLYWQLTAMGHDCQVVAPGLIPKKPSERIKTDRRDARKLAVNARSGELTPVWVPDQEQEAMRDLTRARDDFKGQERKARQQLNAFLLRHGKVWPSGKSRWTKTHWRWLEELRFEHDWQQVVLQGYIDAVREASERVADITTQMERALPQWSLAPVIHSLIALRGVDKITAMVLMAELGDISRFDDPRQLMAFLGLVPSEHSSGDKRRRGPITRTGNRHARRVLVESAWCYRFPPRQTAHMRRKAVGASKEAQAIAWKAQKRLCCRYRDLIQAGKNTKVVTVAVARELVGFIWDIACQEVPKIQKTA

SEQ ID NO: 119553 - protein, 345 aa, unidentified
MRSLFLLFFFFLSCPLYANLTSFHMKNQYVIGVDMAKESFYACFDECTPPKSFHNTHAGIDQFFQQIQIYFVDIPAQQIIIGVESTGIYHLLLCVQSQKHGYTIKLINPLITKKYTQLQLRATKTDVLDAKLIRLCTQNSEGYRFQDTPETLTLKQLIREREFLAHLKRTLAVRHATTACKEHSIGASLYSAQTTLLPVIHAELKQLQKQLAHYKKEEQKLLQTIPGVGPLTAAAFISEVQDITRFSTIKQLIAFIGIDPKVHQSGTSIDKYRHISKRGNTLLRTRLYNAVSVAVLKPNQFQHFFQKKRSEGKPYRVALIATMNKLTRIIYAVWKHNSPYQEPQH

SEQ ID NO: 119554 - protein, 370 aa, unidentified
MPKITPVFVGLDVHKETISVAYAAAGAVEPAQFVGEIGTRQCDLDKLIRRLRTRSSCLVFAYEAGPCGYGLHRYLTAKGLECRVVAPSLIPKKPGDRVKNDRRDAVELARLLRSGDLTGVYVPSVEDEAIRDLCRARDATRVALKAAKLRLQSFLLRHGLNYVGRADWNDAHRRFLAQVVCPTPAQQIVFQEAVRAVDEQVERLARLEQELRDLAPSWRLYPVVEALQALRGVQWLVALTVVAELGDLTRFDNPRQLAAFVGLTPSEHSSGAKRRQGGITKTGNPRARRVLVEGAWAYRYPAKISAHIQKRIDKLPKVARDIGWKAQVRLCKRYRRLAARGKHANVVTTAIARELLAFMWAIAKEVPLTA

SEQ ID NO: 119555 - protein, 414 aa, unidentified
MCAPPEYQVRRDTIILTESLDVVAGADTHADTIHVAAISMTGATLGDKEFPTTRAGYAAAIRFLMTLGHIVRIGVEGTASYGAGFTRALTAAGIEVVEVTRAVKSTRRRKGKSDPLDAYSAARTALAGDQLATPKDDATAGLRALHIARRSAVKHRTAVINQIKAMLVSAPDTVREKYSGLTTLTLIEAIARCRPDTQAEPWAQSLLVAAKMLAQRVQFLQTQADALEAQIDAIVTAANPGLRAAYGVGPDTAAQLLITAGANPHRLHSDAAFAALSGAAPVPASSGKTNRHRLSRGGDRAANSALHRIALVRMSSHQPTKDYVQRQKSKGHSKKEILRKLKRAIAREMFKLLTRQIDVPEYADLRPARQAKNITVTAAANHFGVWPTVISRIERGLQRDDAFADTYRNWLNVA

SEQ ID NO: 119556 - protein, 351 aa, unidentified
MIVLGADTHKRSHTIAGVGATTGELVGERTVQVGRAGFAALLSWARELDGDRVWALEDCRHVSGSFERFLIARGERVLRVPTNLMAQTRKSARQRGKSDGIDAVNVARAALREGLATFPAAHLDGPELDLRLLVDHRERLVNHRVELNNTLQWHLHDLWPELELPGGALFSKKWSTRIARRLARAEQTMRVRIARDELRRLRELTDTIKTLAREITQLVRRIAPQLLAEPGFGPLIAAKLIGEIAGAQRFATDAKLARAAGAAPIPASSGNTRRQRLDRGGNRQINAALHRVIVTRARCHQPTRDYIERRRRDGKTTRDAIRCLKRYLARQVWNLLRAPAPEMALTTTSTS

SEQ ID NO: 119557 - protein, 490 aa, unidentified
MSKKSSKKAKSQRSRERALLNKVHLNAAGIDVGADTHWVAVPEDRDQRPVRNFGVFTSDLIALCQWLKACQIQSVAMESTGVYWIPLFQMLEREGFEVQLVNAKHVKNVPGRKTDVKDCQWLQQLHTFGMLGGSFRPQAQMCVVRSYLRLRDTLSKDCNSLVQRMQKALTEMNIQVHRVISDITGLTGMSILRAILAGERDCIKLAQLKHPQIKSSTQQIAKALEGDYCQEHLFALQTALELYDNYQLKIMECDKRVEEAMGVFEAKVQVAAPDLSRLRSAQKRQEALRRHHLEQMTGADLTKLPGLDLLAVQRILSEVGLDMSRWPSEKHFCAWLNVAPNNRISGGKILSSKPRKNANRAAAALRLAAQSAMQSKTAIGAFIRRMKVRLGAPTAINAGAHKLARLLYRMLKFGKAYVETGQEAYERLFKERTIRNLQRKARELGFHLTPATPGALIKDALHGHANSFVVLIDRSGILWAARFAPALGGG

SEQ ID NO: 119558 - protein, 347 aa, unidentified
MEQIIRIGMDTSKHVFQLHGVNAAEQPVLRKKLRRSEMIAFFEKLPATMVAIEACGSSHHWARLLGALGHEVKLIAPQLSKPYVKRGKNDAADAEALCEAMSRPTMRFVPVKSAEQQASLMLMGMRDRLVRNRTQLANAIRGYAAEFGLTAAKGMCKVKPLLDRISIDPAIPALARELFASHAMEYRRLDEQLAEIDDKLMKWHRANECSRRLAQIPGVGPIGAALLMMKTPAPELFASGRQFAAWMGLTPKDHSTAGKSRPGIITRAGDETLRCTLVVGATSLLQHVRAGRGKNGTPWLLELLKRKPPKLVAVALANKIARIAWKMMMTGEAYHANTSPPPQACAA

SEQ ID NO: 119559 - protein, 441 aa, unidentified
MQILFSRCCGIDVHKDSVTACVLIYAEGQEPEVRKKEFPAHFKSLGNLRFWLMAQKVTHVAMESTGVYWKPVWQALEGHFELILANPFQIKTVPGRKTDARDSQWIAELLAHGLIRPSFVPPRATRDLRDLTRYRVKLVQERNRVHNRIHKVLEDACIKLDTVASDILGATGRAIIQAIIDGQEHPDWLADKARGKLRGKRAKLRLALRGQITDHHRLMLRELMEDLEFVERKISRLETEIATQVDHGKLDRLCSIPGVDLITGCTLLAELGSDMSVFNSPHHAASWAGLCPGNHESGGKRLSNRTRKGNQWLRRALCQAAWAATRKKNSYIAAFFYRKAGKHGMRKAIVATAHKLLIISFCILRDGTEYQELGDNFFDRLHPERTRNRLVRRLQRLGLEVVLQPRSGTPAALEPPDRSTIRKRGRPCKCTERGIPCKHVP

SEQ ID NO: 119560 - protein, 434 aa, unidentified
MTLWKGGDFMKNNFLSTLFVGIDVSSKTNVLCALDFQGNKLLNLKALNNQPGAESILSSILDCLLSNNLKFVVIALESTSFYSTHIANFLSSNEVILAYTPMVYCLNPKTIANYRKSFIDMDKTDPLDAFIIADFARCGRITSQPWRGAQFLALQRLTRHRLHLIESASREKAYMVSNIYLKFSQLAVVKDEDKPFSNTFGATSEAVLTEFLSLDDIAYSSLEDLVEFIKSKGKNRFNNPVETAKLLQKAARDSYRLDKVLYEPLNVSIASSFNVINALDTEIKTIDKAIEKAIKGINTTEYQSLTSIPGIGPVLASGILAEIGSITSFDSNDALAKYAGLTWRINQSGNFKSDETNMTKTGNKYLRYYLIEAANSVKNNVPEFNEFYHKKSDEVTSHQHKRALALTSRKLVRLIFGLLTKNQIYSSNKAGEVQ

SEQ ID NO: 119561 - protein, 470 aa, unidentified
MAAVMIGVDPHKASHTAVAISAAEEPLGELRVRACAAQAERLLAWATAWPQRTWAVEGAGGLGHLLAQQLLAAGERVLDVQPKLGARVRLLAAGDVNKNDPNDARSVAIAALRSAGVGEVRPDDHAAVLKIWSKRHRDLGRTRTQVVCRLHAVLCELIPGGVSKAITAGQATRILASIAPPDAVAAARCELAAAFLEDLRGIDARILETKKKLIAAVQASGTSLTGLFGVGPVVAATVIGGVRDVSRFGGRDHFAAYNGTAPIEVSSGGRKVYRLSRRGNRRLNHAIHMAAVTQVRHRHSEGRAYYDKKLAEGKTRKEALRSLKRQVSNAIFACLQADARRAAAHAKGPGGQQGNDSAACAAGSHPRHRLFGQATPGPGAHPTTPAASPAPGPASARGRAGHSSIAATLPSATPQVQVERPQRSEDERPGGAARQRPYSAARKALGQKFPLKAQRPKGTSHAAKRTDGTP

SEQ ID NO: 119562 - protein, 371 aa, unidentified
MKRDSTTKFIGLDVHSKTISVAIADEGRKGEVRHYGTIENTTDAIEKVIKLLTATGVELKFIYEAGPSGFALYRYLTGNGFKCIVTAPGLIPKRSGVRIKNDRRDAMTLARLYRAGELTGIYVPEPEDEAVRDLGRARDDARMAERKAKQRLNSFLLRHNLIYPGKTKWNRTYFNWLGSVGMKYPAQKVAFQEYIEAVNESTGRVARLSEQIGLAVEEWRMAPMVKALQALRGVSLICATVTVAELGDLSRFQNPKELMAYLGLVPSEHSSGETIRRGGITKTGNGHARRVLVEGAWTYKHHARVTLPLIKRQRELPKSICQISWKAQLRLCARYRKMVARKKPNNLVVIAIARELAAFMWAIAQEVRAAA

SEQ ID NO: 119563 - protein, 312 aa, unidentified
MQIATIGIDIGKSSFHVVGLNTRGAIVRRRRCSRNQLMRELANLPPCLVGMEACCGAHHLGRRLATFGHTVRLIPPQFVKPFVKSQKNDLLDAAAIAEAVQRPTMRFVPLKTTDQLDLQAIHRVRTRLVRRPTAVINQLRAFLLDRGVTFPVGRHALIERFPEVLDNPAFNLSPRMCRLLQQLRDEWRSLDQAIEEADQEVSTLAHEDEACRRLTQVPGIGPVTATALVAAIGNGAAFTKGRDLAAWLGLVPQQYSTGGKVTLRQSLSPLSLYSWGARGLSPSPSSATPPGPVDREPRSTGASEHCRGRARQ

SEQ ID NO: 119564 - protein, 415 aa, unidentified
MYYVGIDIAKSFHVVSVIDDEEIKVINKPFKINNDAKGFEKLLTILESISLDKSEFTIGLEATGIYGENLQEFLKSSAYLVKLLNPFQTTRYREQLTLKKVKNDEIDSLVIALLLKSGKFSSGYITDDEYQSLRTLYRNRATIQADMKDIKKRILTQITVTFPEFEGFIKPFNVTGLALLDKYPTAYHYKHSNVDRIMKLFRHIQGNNFTQSKALQLLELSRDSIYSGKAKDARAIAIRSSIRLLQVYLSELDIIEEEILSLLQNSSIETTVDEAGIEIQKVDNLLSNLKTIPGVAEKTIAALISECGDLTRFPSIPKFIGYLGLFPTENSSGNSKYIGHLSKRGSPLAKHALYMSAVSCLIHNTQLKQLYDTKRSQGKSKKEALVAVSRKIATIIYSIFKYNVPYDPNRVFAKS

SEQ ID NO: 119565 - protein, 454 aa, unidentified
MALPFINDDGEQAMAARKQEVAVFPNAAGIDIGATSHWVAVPPHTADDPVREFGPMTADLNALADWLLACGVDTVALESTGVYWIPVYDVLEQRGLKVWLVDARQMKYVPGRKSDVQDCQWLQKLMSLGLLRAAWRPDGEVCVVRAVARQREVLLTEQASWVQRMQKALVQMNLQLTEVLTDVMGVTGQAIIRAIVAGERDAVVLAQHRNRRVKASQADVIKALSGNWREEHLFVLGQSLAMYDDIARHLAGCDTKLQALLTERSRGGIELGKPPRAGSRTRAVFDLRQTLADWAGVDLTRINGLDVTSVMKILSEVGPDLSRFANVKHFCSWLGLCPATKISGGKVISASTKHSANRVRQTLKLAAMSLSRSQSALGAFYRRLCTRMGKPSANTAAAHKLARLVYFMLTRGEAFVDQGQQRYEEQQRERSVAALKRRAAALGFQVAPVAPAAT

SEQ ID NO: 119566 - protein, 353 aa, unidentified
MKTYYVGMDVHRASIVMVVLNGAGKVVMQSVIETGAERVRGFLKQLRGKVYVTFEEGTQANWLHEVVRPLVTEVVVCDPRHNKLLQSGNKNDRVDAQKLAELLRLGSLKAVYHGDNGVRALKELVRSYDCLVSDTTRVMNRLKAIYRGRAIGCAGHDIYRPNRREQWLEKLRERGAKQRASFLYQQLAALKPLRHEAKRIMVKEVRRQPAYPWLLSVPQFGSVSVAQLLAIVGTPHRFRSKRQFWTYIGLAVVTRTTADHEVVNGVLRRSQRPVSTRGLNRNHNHLLKRVFKNAAQGACHSGPFKAAYELRVKQGMVPSLARLTVARQLAAITLAVWKHGEQFNPERMKQQAA

SEQ ID NO: 119567 - protein, 351 aa, unidentified
MIIGIDPHKMSHTANAVDPATNTTAASLRIDASLAGYRELMRWAKQFPERRWAVENARGLGRHLAQWLVARGEVVLDVPSTATARVRELSRGSRRKTDVIDAAAAASVAALHGDATVVTGEDHTTVFALLEERRANLAAQRVRIANQLHAVLRDLIPSGAALAITAKSAAALLRLIRPESPAERTRKELAQDLVRELRAADASLADIETRMTVALDEHGTRLREIDGIGAVTAVRLIGRTGIASRFASEHSFATYAGVAPIEIASGEHTRHRLSRAGDRRLNSAIHLIAVTQVRMRDSIGRAYFDKKIVEGKTRNEAMRCLKRRLANHIWRMMIADERRLTDEPRDTEIAA

SEQ ID NO: 119568 - protein, 400 aa, unidentified
MHLWAGIDAGKAHHHCVVIDADGHRLLSQKIPNDEPALLDLIATVLKLADGDEVIWATDLNHGGPALLIAILVAHGQNILYIPGRIVHHASKLYRGEGKTDAKDAAVIADQARMRKDLQPLRAGDEISTGLRILTARRADKSADRVRAINRLQAQLLEYFPALERAFDYSRSKAALLLLTKHRTPDGIRRTGQTRLHAWLKKHGTRSSAAVAQAAVDAAKSQHTTVPAQHLGEQIVAALAQEITTLDKELADLDALISEKVTEHRHARALLSMPGFGPVLAAEFIGATGGDLTVFQTADRFAGVAGLAPAPRDSGRITGNHHRPRRYDRRLLRVFYLSGLSALKSCPASRTYYDRKRTEGKTHIQAMLSLARRRLNVLWAMLRDGTAYTPVPAQAARMAA

SEQ ID NO: 119569 - protein, 341 aa, unidentified
MSSIAVIGLDIAKCVFQVHGVDETGASMVRRQLRRGEVLAYFSGLSPCLIGLEACATGHHWGRELGRLGHEVRLIAPQYVKPYVKRNKTDAADAEAICEAVSRPSMRFVGIKSTEQQAVMVLHRSRDLLVRQRTMVVNALRGHLAEFGVVEAQGMAGTKRLIAVLGDATDRRVPALARRVLSVTVDHLRGLMERIGDLERELVAWHKQSEVSQRLATIPGIGPITATALAATVPDASAFSSARQFAAWLGLVPRQHSTGGKPRLGGISKRGDGYLRRLLMTGATAALRRSKQTRARPWVQELLERRPAKVVAVALANKMARTAWALMHSGGTYRAPKPGRA

SEQ ID NO: 119570 - protein, 357 aa, unidentified
MKELTTIAVDLAKSVFEVAVSEVPGRVSQRRRVNRAGLVAFFANRPPAVVLMEACGSAHHWGREFQKLGHQVRLLPPSKSAKYRIGNKTDRTDTDALLEANRNERILPVPVKSIPQQTLASVHRLRVGWMGTRTARLNALRGVMRELGVVIPLGAKVVLPAVAEAMACGHVPEDLHPLLAASMAEIRQLEENVKECERTLARMARSIPAAHALQKIPGIGLLGSTALIPAVGDPLRFKNGRKMSAFFGIVPSEHSSGNRRRLGSITKRGNTYVRTLVIHGGRSVLLAAHRRKNPDRLHRWALEVERRQGPNRAAVAVANKIIRIAWAVWARGTTYDGSLPGSTPKPPTTNTTTPQST

SEQ ID NO: 119571 - protein, 364 aa, unidentified
MIRLLHLIKQGDGSMNEITILGIDLAKNTFQLIGVDKHHKVVMKRRCQRDKLVEVVTNLPACTILMESCGTSNYRGRRFQEMGHTPKLISPQHVTPYVANHKNDYKDTEAIIEVGTRPRTKFVQIKTIEQQDIQSIHRVRERLVNNRICLSNQIRGLLLEYGVVILQGFSSLKRKMIELLSPECNLVNKEIKEILVDVYDEFKVLSERITKYDKKIETSSNQQESCKLLKTIPGIGPITATALYASMGNGSQFKNGREMAAQIGLVPKQHSSGDRQLLLGITRKGNRDLKQLLIHGARAVVATAGKKEDKRSIWVNKLAATKHFNVVATALANRTARMAWAVLRSSKPYNANFSYVKTNEGGAC

SEQ ID NO: 119572 - protein, 322 aa, unidentified
MSQPNPLCVGIDVSKASLDIAASSGIAPFTANNDPDGFDAITAELKKHAVALVLMEATGGLEAAVSCRLQAEGFDVAVINPRQARDFARAMGYLAKTDRIDARVLAQMAEVINRHPERERFIRAIPDVQRQALAAMVVRRRQLVTMLVAERNRLHPSHPQSRKSIAIIICALEEELVRIDGDMNAHIREYFKELSDQLRAIKGIGMMSVATLLAEVPELGKLSRREISALVGVAPVNRDSGTMRGRRTIFGGRAGVRTALYMAALVATRFNPVIKEFYGRLLAAGKAKKVALVACMRKLLTIVNAMLRKNEEWDESYHHIAP

SEQ ID NO: 119573 - protein, 523 aa, unidentified
MATRFKSRTRRSRRYLTIVKPSGSLHPRVQKVGPEHFGIVAVDCAKARSKWMLADFYGRILIPPTVVEHNKQGFDSAFAEISRAMESHSLGDMIVAIERTGIYHLPVKRAFSSKRFDTRIVHPLTTKQYRLPADPGNKTDDTDLFAIHRATTNGFGLIELPLDEIHGPLRLLARYRRSLVRRNASLRNQIIALLDVLLPGYTSLFDDVFDNQAALSIARSLKSASKVRSLGSEGLAQILKELKVRYQRRTLKKILDWANGIESTTEYFEMYHAILIHMDDERCARLQQIAKLEQEMASFLVRTAYVVLLSIPGVSIVTAAEFAGEMGPIVNYANDQAITGRAGIYPSRYQSDKVDRSDGPLVRRANRKLRGVIMMIADNLLSCNRFFKALKVPWVAAGMEQQAMCVRVAKRFCRIAYQMVAGGQVFRHPSCQKRDAILRKLSIFHSEHGSSMAQVMTDLQAATDHIPKSEHAPEAKSLYEELQPSNSRQQCGPRRLGEILPVVLAKLGVTAVELSLKGENDLT

SEQ ID NO: 119574 - protein, 339 aa, unidentified
MHKVDLNKFFLGSKCILPTLGIDISKDSFHVELSINNKLRHRRFANRKEGFAELCVWLAKHKAGAVHACLEATGPYSEAVALYLHEQGHTVSVVNPAQIKAFGQSELLRNKDDRPDAGLIRRFCEKQQPAAWQPPPAHFRELQALTRHLENLLETRQQQVNRLEVATTKDVLKSLRKLVAHLDAEIKRTEQQIDDHVDRHPDLRQQCQLLQSIPGIGKRTATKLLAEIEDISRYKSARQVAAYAGLTPRNNRSGTWRGQTRLSKTGNARVRKALFLPAMVAKQHNPVVRSFCHRLARHGKNKMQLVGAAMRKLIHIAFGVLKSGKVFNPDHELLSNSVS

SEQ ID NO: 119575 - protein, 341 aa, unidentified
MVVGVDIGKEVFHLVGFGIDGKIAFRRRIRRLALKDVFEKLPPCIVAMEACLSAHFVSRTLRALGHEPRIVPAIYVKPFVKGQKNDYNDAEAIAEAALRPNLRFVQEKSQDQLDPQACHRVRSRLVSRRTATINQIRAFLIEQGIAVRVGPRALRKSLFVILENRKEEISLRTAKLIRGLYDDWCCLDERIETVTGEIEILSRSEAKCRQLMSVPGVGPLISTAMVAAIGSGEAFERGRDFAAWLGLVPRQYSTGGRSILGRISKRGSKYLRTLLIQAAKVLLMRPHNWARYSFGPWLNAASERLHRNKLAVALANKLARIAWSVLRNDKAFDTHLEVAAI

SEQ ID NO: 119576 - protein, 341 aa, unidentified
MKVSTLGIDLAKNVFQLHGVDHEGHTILRKKLTRAKFVQFVIQLEPCLIGMEACSSSHYFARLFTRYGHEVKLIPPQYVKPYVKTNKTDATDAEAICEAVTRPNMRFVQIKTEEQQAVLALHTERGILIRERIACANSLRATLAEFGITIAAGQNHLIRELPAILEDGENGLSPFVRTSIYRQSKHIRELEEQVKQVEEALASWYRTQEACQRMAKIPGVGMLTATYVVAAVGNARQFSTAKQFASWLGLTPKEHSSGGKQQLGGISKRGDGYFRYLLVHGARALTAWVNRNGAVEKNSWLQGLLERKHYNVAVVAMAAKTARIMWSMLSHNTEYQPRQLA

SEQ ID NO: 119577 - protein, 367 aa, unidentified
MKKVSTILAKQSRKSSQRELIVGLDLGDRNSWYCVLDEAGYIQLEQRVRTTAKALREVFSAMPRSRIALETGTHSPWISRLLRELGHEVIVANARKVRLIGESRKKDDRLDAQTLARLARIDPELLCPVKHRSAKAQADLMMIRARAGLVRVRTGLVNTARGLAKSYGERLRGCNVRNMNAEKAEGLSPELQAALQPLLAALESVSERITEYNERIEKLAQESYPQVAVLKQVKGVGTLIALTFLLTLEDPHRFSKSRDVGGYLGLQPGRRNSGQSEPQMHISKEGDPYLRTLLVQGAQHILGPFGVDCDLRRWGLKLAERGGRNGKKRAIVATARKLAVLLHHLWVSGEVYEPLHNSCRVAVTAAA

SEQ ID NO: 119578 - protein, 319 aa, unidentified
MTTERFVGIDVAAATLMIAVWPEQRTWEAANTVEGIEQLVADLRGLTPERIVLEGTGGLQAPLVAALGLAGLPVVVMNPRQIRDFAKGKGQRAKTDRIDALVLAEFGALHRPTVRPLADPDTVHLSALVTRRRQLVEMRRAEEQRLARLEAQRAARRVRADVSEHIAWLTRRIERLDGELDAAIAASPLWQAQDTLYQSVCSVGPVVAHTLITQLPELGRVSSKVIAALVGLAPFTRESGVWRGHARISGGRVEVRRILYLAAMVGIRRNPVLRTYYAGLVARGKPKKVALIACAHKLLTILNAMARDQRPWTPSAATA

SEQ ID NO: 119579 - protein, 358 aa, unidentified
MNNVKSSRLDFTGQPIYIGLDVHKKSWSVSIFSNYGEYKTFNQPPEVDTLVHYLRHQFPGGDYRSVYEAGYCGFWIHDQLREKGIQCFVVNPADIPTKNKERRTKRDRIDCRKLGRSLRNGEIEGIYVPCRPKLEDRTLIRTRQSMVKKQTRCKNQIKGMLLFYGVVIPEEKEMGHWSRRFIQWIEGIRMERASGDIALKAHLEELSHLRQLIASLNRAILRLARTEEYRPLVRLLKTIPRISTLTAMILLTELGEITRFPSLDELSCYVGLIPDTRESGDKEYVGGITQRRHSQLRWLLIEASWVAVRKDPALLMAFQEYCKRMRKTKAIVKIARKLLNRIRYVLRNQAEYVPCVIQ

SEQ ID NO: 119580 - protein, 354 aa, unidentified
MNNIKYIGIDVHQATSVFSIMNQQGKALGEGYFETKQQTITDFLKSQRGTLCVTFEEGTYANWLYDVIQPHVAKLVVCDPRKNKLDGNKTDKIDARRLADLLRMNALKPVYHGQHSTRPLKELARSYVTLQQDSTRAMNRVKAIYRARGIQCRGTSLYQPKNRKEWLGKLNEDGARHRAELLLKQLEFLQKFRLEAQKSLVRESRKHKESKILRTIPGLGNIRVALILAFVMTPHRFRNKRQFWTYTGFSVVRRGSAEYEITEGIVKRTKKKPLPRGLNRNCNHVLKNVFKGAALTAAYRGAFQDLFKQRVDSGAAPNLVLLTLARKIASITLALWKKGERFDIERHRLSEQKT

SEQ ID NO: 119581 - protein, 481 aa, unidentified
MASKTTAESGNGKRLTRQQRKELGRRIWSGNPGLEVVHRDAAGIAIGSRVHSAGVGPDRDPAPVRACGCFTADLHEMAQWLQPCGVKTVVLQSTGVYWIPVYDVREQYGFAVWLVNAQDTQNLPGRKSDVQECQWLLKLHTYGLLRRWFRPTAEILALRTCWRERAEYVQQAGACIQRMQTALTEMNLPLATVLSDLSGVTGMSILRAIVAGERDGQKLAELRDPRVQASQETIALSLEGTWRPEPLAWLQRQLQDGDHIQRQIRACDGDLEARMKAMAAAVPATEPGQSAAETNSKRKRKKNGKWSRNEPTFHLAGELQRVTGIDLTRIEGVKVLTAQTVLTEAGRDMAQWPSENHFVSWIGLAPRNDVSGGKVLNRRTRKVKSRLATALRMAASTLLKSDSYLGAQYRRFRTKLGEPKAIVAMAAKLARQIYRMLRYGQEYVDRGTAEYEKKYRQQQIKLLAKKAAQHGFALVAVPNRA

SEQ ID NO: 119582 - protein, 340 aa, unidentified
MDDVTLIGVDLAKRVFHLHGAAGDGSVVFRKKLSRAQFDHFMKCHPHCVVAMEACGSAHHWGRLIAGFGHEVRLVPPVYAKQYVKRHKNDAADAEAIAEAASRPTMRFVAVKSQTQQTQAMAYRSRDMLVRQRTQLINALRGHLTEFGVVAPQGITQLKKLAAAIDAPETELPELVRQLAHDHLDIIEGLTARIAVLDRTLQRVTAADEKTAYMRTVPGVGPITAAAIEAFAPSLESFRRGRDFAAWLGLVPKQHSTGGKERLGRVSKMGQRDIRKLLINGAMSVIRWAIRKGDDANPWIVRLLARKPRLVAAVALANKMARMIGATATKKQDYQIPVAA

SEQ ID NO: 119583 - protein, 408 aa, unidentified
MEAIVERCCGLDVHQATVVACLLVGSAERRARKVTRTWGTSTSELEELRAWLLAEGCTHVGMESTGVYWVPVYNVLEDCFELVVGNAAHIKNVPGRKTDVKDAEWIADLVRHGLIRKSFVPPKWQRALRDLVRYRRKLVDSETAERNRLLRLLETCNIKLSPVASDVFGVSGRAMVRALIEGTATPEHMAKLARGSLRRKTDRLTLALRGQLEEHHRFLLRLQLERVERIEADIAVVMARIDQALAPYLEQLERLTQIPGVDRIGAATIIAELGIDMSVFPTARHAAAWAGVSPGNNQSAGKRAGNAKRRGNVHLMTALVQAAFGASRKKGSYLKERFWRLKARRGDKRAAMAVAHSILVAAYEMLRRHAQYRDLGAAYLDHIARAVTEKRLVRRLESMGYRVTLETA

SEQ ID NO: 119584 - protein, 409 aa, unidentified
MERLIERGAGLDVHKKSVTACVRVPGPAGSRRQEVQTFGTTAAALLTLRDWLQAHGVTHVAMESTGVYWKPVYYVLEELLTCLLVYAAHVSKVPGRKTDVRDCEWLAQLLEHGLLRGSFVPPVAIRELRDLTRYRTVLVQDRTREANRLHKVLTDAGIQLASVASNVLGKSGRAMLAALVEGTHDPEVLADLAQGKLRSKLPALREALAGHFRGHHAFLVSQLLAHLDYLDEALDVLTAQIQEALGPFASEAARLDAIPGVGARTAEVLIAELGVDMRQFPTARHLASWAGLCPGTHESAGKRRAVRTGKGNRWLRGALIEAALAAINVRDGALASRYHRLRPRCGHKKAIVAVAHKILTTAYVLLADGRTYHELGAGYYDAQRKDRDIRRALHALERHGYRVSLEPAA

SEQ ID NO: 119585 - protein, 351 aa, unidentified
MPRTTTLHAVTAIGIDMGKNTLHLIGLDARGAIMLREKVARGRIALRLANLPPCLIGIEAGMATHYVARELAALGHDVKQVPATYAKPFRQGQKNDFRDAHAVAEAVQRPTTRFVPAKTNEQLDLQALHRVRSRLVSERTAVINQIRGFLLERGIVVRQGPRFLRQQLPDILAKRTDVLSPRMARIVADLANDWRRLDERIETVTDEIGTLAKSDDSCRRVMTVPGIGPIISSAMVAAIGNGAAFARGRDFSAWLGLVPKQMSTGDRTILGRISKRGNGYLRTLFMQAARVILLRSANWPKHSFGLWLVRAAQRLHPNVLAAALANKLARIAWTVLAQERSYEARVTKAAA

SEQ ID NO: 119586 - protein, 349 aa, unidentified
MRFYTKTHNYCCGIDLHAKTMYVCILDRDGQSVLHKNMRSRPEDFLSAIEPFRDDLVVAVECIFTWYWLADLCREEKIEFVLGHALYMKAIHGGKAKNDKIDAFKIATLLRGGNLPKAYVYPPEMRATRDLLRRRLHLVRRRANLLAHVQNTHHQYNMETPTAKIAYKANRVGVAEAFEDVDVRKSMEIDFALIEHYDGLLRDLELHLERRAKQHDPQAYHRLRSVPGIGKVLALTILYEINDIRRFERVQDFLSYSRLVKCEHSSAGKKLGTGGSKIGNAHLKWAFSEAAALFLRNNPEGQKHLRRLAGRHGKGKALSILAAKLGRAVYLLLAKERVFDMKRFLARTS

SEQ ID NO: 119587 - protein, 412 aa, unidentified
MGAVVIGMDPHKRSATIEVMDRDETILGGGRYATDVAGYQAMLAFGKQFPERTWAIEGCNGIGKHIANRLLADGEPVVDVPPKLSARTRVFATGQGRKTDVTDAHSVALVGTRMSGLRPVINDEQLAVLRILVDRRRSLGEDHCRMISQLHRLLLELIPGGAKTSLSAAQAKVLLGKVRPRDAAGKTRRRVCAELIADLQQVYDRSKAADKELTALLAATGTTLTQLRGIGPSGAARLLVEVGDITRFPTRAHFASWTGTAPIDASSGDHVRHRLSRGGNRQINRVLHIMAVVQLRNATEGRAYYDRKKAAGKTSMEAMRCLKRRLSDIVYRQLIADAIRPSGTGPGGHSGAALDSSAVDSNPDIDASEKSLPGPVNTDATPTNPSRLDRSSTRSRRPTTTPARSPRQAHSA

SEQ ID NO: 119588 - protein, 326 aa, unidentified
MFEYIGIDVSKQTIQVFDGEKDNTFPNEPELKAFDRFILNQKRKKNGEPALIFEPTGPYSHYLKMYCVKHRIKAHILNPMQSAHFAKAKGNRSKTDKVDARMLQSAHALLREEDFKVPYESAIANQIGVYLLSSYLLTQMVTRLNNHLYAMRRFCHPDQACQVLLESEQHQLEKTKEEMMKRALAWIQQDPLLSSKMAFLCSIPGVGNVTALNLLYHFQKYPQANPNQLTSLAGLDPVTRVSGTSLHQRLKISKRGNPLLRRALYCAAMSGIRCNASLKEQYEALLARKKPKKVALVALMKQILLIGFALYRNNRYYEERERTKKN

SEQ ID NO: 119589 - protein, 437 aa, unidentified
MSNTHRELVLAIDFSLDELDVGLRNGQGEVLWPHRAYANNVSGCQALRADLHDCLAQQDDSRLTVVGESTGAYWWHAYQQLSQDRALADYEPTLLLFNAKHVKHFRKALPERDKTDSDDPGLIDRYYRANPQHHAYQPQPRYACLRALTRAYSRLIHTLAAQKAACAATIYLLASEYQRVCPFGDLFGVTAQKLLDAYPDIAPLADVPLETLVAQLQQLSGNKLPDPHDNAVKVQAAAEVSYPLPADLRQMLQTIRQLSLEHIRFLQGQQKSYQQLIEQELARLPEARPALAEHGLGPVLVAGCLAEIGDTRRFTTGTKFDRKRKVHRPRRYRDGQAAVAKMAGLWWPKQQSGRWQGEDRHLAQERNPYLRFWLVQAAYTLQRHRRDYASYYWRKYNTTNRNPHQRALILTGRKATRLIFALLHKGQAACLKEGDDT

SEQ ID NO: 119590 - protein, 398 aa, unidentified
MTESSDYKSVQVFIGVDVGKDTHHAVAINRSGKRLFDKALPNDENKLRSLISDLKQHGQILLVVDQPATIGALPVAVARSEGVLVGYLPGLAMRRIADLHAGEAKTDARDAAIIAEAARTLPHALRTLKLADEQIAELSMLCGFDDDLAAQTTQASNRIRGLLTQIHPALERVLGPRLEHPAVLDLLQRYPSPEKLASLGEKKLAAQLCKLAPRLGKRLAADIAQALAEQTVVVPGTNAAAVVLPRLALQLITLRKQRDEVALEVEQRVLAHPLYPVLTSMPGVGVRTAARHLTEVACRAFASAAHLAAYAGLAPVTRRSGSSIRGEHPSRRGNKALKRALFLSAFAALRDPLSRAYYTRKMSQGKRHNQALIALARRRCDVLFAMMRDGTFYTPQGS

SEQ ID NO: 119591 - protein, 346 aa, unidentified
MNNSFSGFDPCGIEVSARALLVTLGPEERTASPREFPNTAEGHQAVLRWLKSWKRPVRVVMESTGLYGLDLALCLQRAGIALMVANPRAARHFAQAMMKRSKTDRLDAEVLRQFAARMPLVAWRPPSPPAFKLVAVARRLEALTQMLAAEKNRLHAASLSEALPVVIRRDIQRSIATQQRAIERLTRAAQQFVISDPELGRRYRLLLSIPGFATTSALHTLAELALLPPGMDVRQWVAYAGLDPRHHTSGSSVEKKPRISKTGNKHLRRALYMPALVSIVHEPHLRAFYDHLLARGKAKMQALVAVMRKLLHAIFGIFKHDQSFDGTKVYPLSPTVVPVPLAQEVA

SEQ ID NO: 119592 - protein, 401 aa, unidentified
MAAVMIGIDPHKGSHTAVAVGAAEEPLAKLRVRACPAQAGKLVTWAQAWPERTWAVEGAQGLGRLLAQQLVAAGERVLDVQPKLAARVRLLQTENTGKSDPNDALSVAVAALRSKTRREVISDDHACVLKVRAKRHRDLSRARNQAACRLHAVLCELIPGGVPGEITAGHAARLLGQIRPAGAVAQARCELAAELLADIRRLDAQRREARKKLGAAVKASGTSITEIFGAGPVIAATVIGDVRQVARFPSRNHFAAYNGTAPVEVSSGEKKIYRLSLRGNRRLNHAIHMAAITQIRYRHSDGRAYYDRKIAEGKTHKEALRCLKRRISDAIYTRLRADARQAGPEGQPGNHSVSREAGSHPEHRLFGQATPGPETSLRAEAALTPPMPPSEPSAKKTRRAT

SEQ ID NO: 119593 - protein, 355 aa, unidentified
MNRNAGMNAGQIIGTMNGRQVVGLDIAKNVFQLHTVDMCTGEIINMQLKRAKVAQHFANKAPCVIAMEACGGAHHWARLLTALGHTVRLLHAKIVRPFVTGNKTDASDARAIWLAVQQPDVKFVGIKSTEQQATLTLHRQRELLMKMRNMQASALRGLLYEFGAVFAKGRRALLGELEPALEGLSAQLPQIVADSLREQLTRIQALQQDIARIDQRLALQLKSDPQMRRIAQIPGVGVLSATAAIATMGQAGAFKSGREFCAWLGLVPKQNGTGGKVRLGAISKRGDTYLRTLLIHGARSVLAHAKQPGPWLEAIKARRPANVAAVAQAAKMARTIWALTARQQDYQDGHESVRP

SEQ ID NO: 119594 - protein, 403 aa, unidentified
MNAIGIDVSKGKSMVAALQPGGKLLARPFEVLHTKSGIQELVSFIRSLKGDTRIVMEHTGRYYEPMLQRLAVSDLFVCAVNPKLIKDFGGNSLRKVKTDKADAKKIARYALDNWCDLRQHTGMDTTRTQLKTMNRQFAFCMKQKTACKNNLIALIDQVYPGANTYFESPARADGSQKWVDYVSTFWHVDYVCAMSLSAFTERYRKWCHRHGYNFQPDKPRLLMEKAKDLIAMLPMDKTTKVLVQTSIAQLNVLSKTLEALRTQMIVLAEQLPEYPVVIAMNGVGPTLASQLIAEIGDVTRFPRRGSLTAFAGVDPGAKQSGTMQLKSNKTSKAGSPHLRRALFQIVSGLLMRSPDDPVYNFMDKKRAEGKPYYVYMTAGANKFLRIYYGRVKEYLSRLPQVQE

SEQ ID NO: 119595 - protein, 413 aa, unidentified
MDVVHARCCGVDVHKATVVACLIVPGAQGRPTKEVRTFGTMTVDLLQLVDWLVAAGCTHVAMESTGSYWKPIYNLLEGVIDEVVVVNAAHIKQVPGRKTDVKDAEWIADLLRHGLLRASFIPDRPQRELRELTRYRTALVRERSAEVSRVQKVLEGANIKLAVVAKDITGVSGRDMLAALLAGRTDAATMAQFARGRMREKIPQLEKALVGRFAAHQRFLVAQQLAHIDFLDDLIARVSAEVAERVGPFEALIALLDTITGIGRLTAEVVVAEIGVDMTRFPSAAHLCSWAGVVPGNNESAGKRRGGKIRKGSPWLRAVLVEAAHAAGRTKTSYLGAQYRRLVARKGRKRAAVAVAHSILTIIYHVLSDRKPYADLGVDYFDRRDQQALERRLVSRLEALGYDVALQPKETAA

SEQ ID NO: 119596 - protein, 364 aa, unidentified
MHRLNSAETLIQRTTTEAPRLSMYYIGLDVHKETISYCVKDAAGRVQQEGKVGSTRGELDDWMKGLPQPWTVAMEATIFSGWIYDHLQSHAVEIKVAHPLMLRAIAAAKKKNDTIDAGKIADCLRCDFLPECHMMPPEIRDRRRTLRYRHLLVKQMVQMKNRVSGLLMETGVEHNKSRLHEVGYFGKLLATSAEIDASIRPLLKLSRETIERCQKTEYALVSSLQRDPLLADRIRRLRTVPGVGPITALTWALEMGDVSRFRTLRQAISYRGLCGDERSSADKVMRMPLSKQRNKHIQRVLVEAAKLAPRLSPELALVHEKEKQKGNSNRATLAVARKMVAYLLAVDRQQREFIPTEQRRSRAA

SEQ ID NO: 119597 - protein, 345 aa, unidentified
MQSMYYIGLDVHKKTISYCVKDVSGSVHAEGSIHATRPDLDRWMKALPQPWTAAMEATVFTGWIYDHLKPHAAALKVAHPLMLRAIAAGKKKNDRIDAKKICDCLRCDFLPECYMAPTAIRERRRPLRYRNLLVRQVVQLKNKIAVLLMEAGVSYNKQRLHKVGYFRELLATNPAINDGLRSLLGLCRETLVRLARTESALVRSLERDPLLAERVERLMSIPAVGPVTALTWALEVGEVQRFSSIKKAISYCGLCGSDRRSAETVQRTPLSKQRNKHLQCVLIEAAKMAPRNSPELALLYDREKRKGNANRATLAVARKLVAYLVAVDRRQKEFLVIEREIAAAA

SEQ ID NO: 119598 - protein, 387 aa, unidentified
MQKPHDDSKACLTAFVQDSTLTVVIEMSLGSWLVAGMVPGVNRQPRKKIAPNPEVLLQLLYRWRDEAIKAGKEITRIAVAYETGRDGFWLARWLRARGIDAHVIHATSVAVSREHRRAKTDRIDTAMLQRGFLGWLRGERGHCSMAIVPTVAEEDGRCPHRERETLVKQRTSTVNRMKSILIQFGVRNFNPVLRKAPEKLESVRTPEGIPLPSNAVAALQRQMERFRVIKEQIKAIERTRLQRLQRDPAEKFNAMVFLLVRIIGLGIETAEQLVHEILSRNLRDRKAVARYAGLTGSPDESGSKRREKGLSRSGNGRVRNILIQLSWRLLKFQPESDLVRWFKTRTANAQGSRKPMIVALARKLIIALWRYVNTGLVPEGFQLRPAA

SEQ ID NO: 119599 - protein, 357 aa, unidentified
MKKKLQKKDFTGKTIFVGMDVHKKTWHAAIIFGEVMTKKSFPSDPKQVYTYLSRAYPGAEFHIAYEAGFSGFWTCEILNRLGAKTIVANPADIPTTDKEEKFKTDRNDSKKIAKCLKAGLLNGIYLPSIKAQEDRSLLRHRDTLVKDQTRIKNRIKSELMFYGIEIPDTFANPGSHWSKKFILWLETIKFRTNSGGISFQSKINQLKFIRQELLDITIEIRKLSRTKTYKKQYDILTSAPGIGLITAMGLLTEVIDIKRFPHLDKLLSFIGLVPTERSSGEKQKKGNMTKRRNAKLRKLIIEASWIAIRNDPVLGLYYSKNKIRIGAQKAIVKVARKLVSKLYYLWNNEEMYVKGVV

SEQ ID NO: 119600 - protein, 317 aa, unidentified
MTYIGIDISKSWFDCFNLTTASHHHYDNNVQGWDEFVESLPGDVWVVMEASGPYYLGLASLLAEQKIPVSVLNPLVIRRYSQMRLSRTKTDAKDAQLIAEYASEQPLTKWSPPTRVNQAMRQIISASQGLIRQRTMLLGQKEAFTSTTLADPLVIEIVEEQIGGITSALNKLEDRLKQLTLTHYRSCYEAVTSIPGIGPKTAILLIGLTDGFSKFEDARKLASYVGICPRIFNSGSSIKGRGAICKLGSSQLRKMLYMCSWSAKKCNPGCKQMYNRMKQAGKPERVIKIALAHKLLRQAFAVGTSGEYFIEEKALAA

SEQ ID NO: 119601 - protein, 323 aa, unidentified
MQGKVSFQEDAMPVVYAGVDVSKEWLDIHLHPLGESRRFCNDKTGIRQLKRLLARHRLASIVMEATGKFHRPAHRSLWLDGFAVAVVDPLRARMFARACGYLAKTDRLDARFLALLAESLRPPADTPPSPHIEALQELVNARSAAKCDITALQNRSKTATTALLRGELNRLVRRLEQHVERLDKEIERRVGEDPQLYRKAEILTSIPGIGRVTALALMAGMDELGSCSGKQAAMLAGLAPIANDSGARTGRRSIRAGRPAPRRALYMAALSACRYNPALARFADTLKAAGKPAKVILVAVMRKLLVLANCLLSHDRLWTPNPP

SEQ ID NO: 119602 - protein, 450 aa, unidentified
MDKKSKAIESLQLAVIHPRSAAIDVGSMMMMVAYTDKDGNQNLLEVDAFTASLQHLAATLHKAGVTHIAMEATGVYWIVVYEILEQQGFQVTLVNARHFKNVDAQKTDVKDCQWLHQLHASGLLRASHIADEVYRELRSYLHERNLLQKQKSDTLNRIHKLLTQMNIKVQHLISDIEGVSGMKLLCGIASGITDAKELLALIDVHKLKAGEEDLLKSLQGIYKKQYVTILKNTLRSYDFFKAQMRVYEKLIEEVLNKMLPEDGNGNKAVIKSKTSYTRKNQYRINLKEYLKHIIGIDVTRIDGIDEISALEIIAVTGLNMSKWPSAEHFASWLNLSPRPKISGGKIIGYEKRPTNNNATQAFRMAAQTMWQNKGSLGHLYRRLSAQKGSKKSNKAIARKLAVIFYHMVKNKTEYNKNKLQVNTERQRAKRISFLNKEARKYGYVLQNAVD

SEQ ID NO: 119603 - protein, 378 aa, unidentified
MKRILKIGMDVHTTNYTLCAMEPIIGEDDRVFATIKVTPDYKNILMFIENLKMKLGLNDEYDIQCGYEAGCLGYSLYNQLTAAGVKCVILAPTTMLTPQGVRIKTDMRDAYMIAQCLSYGGYHAVYIPTEADDSVKEYLRMRNDHKLALKKIKQQINAFCIRHGFCYDGTKWTLAHLKWLKKLEITNELYRETLDEYMGSYEEQEAKIERYDKRIKEIAEQTKYQDKVKKLECFLGIKTHTALSLIVETGDFERFAKGNQYAAYLGLAPGENSSSDSIHRLGITKAGNSHLRQLLIEASGGICKGAVGHKSKELRARQNGNKAEVIAYADKANTRLRSRYYKFIRHGKKRNVAVAAIARELACFVWGMMTDNIEMKAA

SEQ ID NO: 119604 - protein, 315 aa, unidentified
MAKQLFVGVDVSKKQLDVAIFPTGKSFSCPNSYAGHQKLVQRLRRCQPALIVLEASGGYQSAAARALAQAELPVTVVNPRQVRDFAKATGQLAKTDQIDAQVLALFAYQLRPEVRPVPDAAAQQRRDLGLRCQQLRDNLAAERTRRHQAEGAYRDSIASHIAWLEQELQQLQAQWQASLQSDPQLSQLQELLCSAPGVGPGVSAVLVTYLPELGEASRQEIAALAGVAPFNRDSGQHQGQRCVFGGRAQVRCALYMAVISAIRHNPPIREFYQRLISKGKATKVALTACMRKLICMLNAMAKTHTRWQPQTTTTP

SEQ ID NO: 119605 - protein, 343 aa, unidentified
MDYFAGLDVSVKETSVCNVDDTGKIVREVKVESEPEALLAVLKNPAYHFKRIGLEAGPLSQWLFSALAEAELPVICVETRHMHAVLKAQINKTDRNDARGIAQMMRVGLYRPVHVKTLRSQKLRMLLTHRQLLQSKAIAIENDLRGTLRNFGLKVGMVGKMKFEARITELVENRSDLAVLVEPMLIVRRVLREQIVILHRRLLAIVRDDEVCRRLMTVPGVGPVVSLTYRATVDVPARFQKSKSVGAVFGLTCAKYQSGEIERSGRISRCGDEMMRAMLYEAAQSMLVHSKKWSWLKAWAMQVARRRGMKKAIVALVRRLAVIMHRIWVDGTEFRWTKEVAVA

SEQ ID NO: 119606 - protein, 419 aa, unidentified
MDTSPKTWSERSAFAGFDWASDHHDVVVVDAQGTVVEDFRIDNTATGWQQLRERLSRYAGLPVAVETCSGAAVERLVEAGFAVYPVNPLAAKRYRERKAPTGTKTDRVDAWRLAEALRTDGHAWRALHPDDPLTVELRLLCRDEISLIAQRTALINELRAALREYYPVALQAFEDWTMRSSWAFVERFPTPAALIQAGRRRWEKFLHLQKLYRPETYAQRLSLFATADQFCGSPAVVQAKSLLATGLAIQLRVLQDQLDRYRARIEELFARHPDHDLFGSLPGTGPKLAPRLLAELGDDRARFDSAEGLQCCVGTAPVSYQSGKVRKARFRGGCNKLLRQTVHLWAGLSLQVCPWAQAYYEKKRAEGKSYASALRCLAQRRLKILWKMWQTRTRYDAELHQRNQVRHGSWVIALLPAPS

SEQ ID NO: 119607 - protein, 335 aa, unidentified
MNKSETAFLPCGIEISCKVLVINLSGKAPCEFANTPTGHQCLIRWLQLAGSQIRVCMEATGLYGLDLALALHAAGIAFMIVHPRSARNFARAMMQRSKTDRLDAIVLREYAARMPFEPWRPPSPQALHLMAIAHRIQALTRMITAEKNRLHAASLSRALPAVVRQDLARSIQSLQRALKRLTLAALELVLSDPQLARRNELLLSVPGIGVTSALNVLAEILRLGPDCGVRQWVAFAGLDPRHYTSGTSVAKKTIISKSGNAHLRRALYMPALVTVQHEPHFRGFYQHLVARGKTKLQAIVAVMRKLLHAIYGMFKHNQLFDGSKIYALDTSCAQN

SEQ ID NO: 119608 - protein, 407 aa, unidentified
MELSALYKCVIGLDVHQSQITACALIQQPDGGVRIEQRQFGGFMRDRRELAQWAASLNPDEVVMESTGIYWKSPYAALEAVGIRAKVVNARHVKHVPGRKTDVGDAHWLAMLARAGLLRASFVPPAALRELRLIARQRQKLVGQLASEKNRLHKVLTDSGIRLGVVVSDLHGQSARAMVKAIIAGHAPQQVIKLASRRLKASREEILDALQGELSASHRFVLDELMRHIEEIEARISRFDARLLEGLESERDTLALMQTIPGIDQIGAAMLLVEIGADMDDFGSADRLASWVGVCPGNNESAGKRKSGHTRKGNPYVRRLLCEFAHAASRTTSMFKSKFQALVVRRGYKRAIIAIGHKMLRMLFFMLKRREHYRDCATDYEALSVQRNAPRWIKALTRFGFITPASA

SEQ ID NO: 119609 - protein, 421 aa, unidentified
MLTESRDEEQIIARVAALDIGKAELVCCVRVPGKGASTPRLQEVTTHSTMTRALTELANHLVDLGIERVVMEATSDYWKPVFYLLEAHGLDPWLVNARNVKHLPGRPKTDVLDAVWLCKVAERQMLRPSFVPPRPIRQLRDLTRYRSTLVAARTAENNRIEKLLEDACIKLSVVASDIFGVSGREMMDALIDGQNDPKVLAQMARARMRTKIACLEEALDGHFDHHHAFLLTRMLGRIDTLDADITAVDEQIEAHLAPFAAAAARLDEIPGIGPVVAATIIAEVGVDMSRFPTAGHLCSWAKFSPGINSSAGKTKGNGSSGHGNRYLAAALGEAAVMTRRTDTFLGARYRRLAKRGKKRAIVAVGRSILVVVWHLLSDEQVTFHDLGSDHYTRHIHPDTKKHSHIRQLEALGYTVTLAPAA

SEQ ID NO: 119610 - protein, 473 aa, unidentified
MPPRAGTTIPIMKRKARIRRKRKSKIQIDDQWQMVNPHAAGIDLGSKEHWVCVPPGSDVVNIRRFGTYTADLHALADWMEQCGVTTVAMEATGVYWIPIFQILETRGFEVILVNARQTKNIAGRKSDAKDCHWIQRLHTFGLLQGSFRPKDAYCTLRTYLRYRDELIAARSTQCQHMQKALQQMNLQLTQVLSDVTGVSGLAIIHAILEGKRDPVELSKLVDPRVRAKPAAIQKALVGDYRPEHLFVLRQAFELFHTYEAKIEACNQQIVTETAKLPDRVDPALKPLPPRKEGRSKCHDKLAGQDMRPWLHQKFGVDLTAIEGIGITTALVMLTEVGSDLSKFPTEKHFCSWLGLCPDNRISGGKVLCSRTRRVVNRLSDTLRMSAYALEHSQSALGGFHRRMKARLGAPEAITATAHKLARIIYRLIKHGENYVRVGMEEYEHKFQERKLRGLKKTAKAMGFDLVALQTVPT

SEQ ID NO: 119611 - protein, 317 aa, unidentified
MSAPAASFVGIDVSKQQLEIAVRPSGETWTVAHDEAGVNALVGRLRDLTPTLIVLEATGGWEVAVAGALAAAALLVAVVNPRQVRDFARSTGTLAKTDRLDAQMLAQFAEAVRPEPRPLPDAQAQELTALLQRRRQLVEMLTAEKNRLPLAARRIRPQLQAHIAWLHKQIAQFDEDLRQLLRASPLWREKDDLLRSTPGVGPVLATTLVAALPELGTLSRRQIAALVGVAPLNRDSGTLRGRRTVWGGRAQVRAVLYMSTVVAVRHNPVLIAFYQRLRAAGKAPKLALTACMRKLLTILNAMLKHHTRWAPVLAQHV

SEQ ID NO: 119612 - protein, 337 aa, unidentified
MDYFAGLDISMDETHVCVLDREGAVVYESKTESTAQAIANELAKAPSCRRIVFETGRMAPILFHGLSQLGLPVVCIESRQAYQALKSLATHKTDRNDARGLAHLARTGFFKPVHVKSLSAHAIRSLISARKKLVGQRVTLENQIRGLAVVFGVRLPRALTAAFIDNALKASDGIAGLSAAMRGLIAARTAVMTAVAAIDADIRRMTRASAACRRLMTIPGVGQLTALAFVAAIDDPSRIRRSRDVGAYLGLVPRRYQSGEVDYTGGISKCGDRRVRTLLYEAANVMLTRYKGQLKLKDWAFAIAKRSTMRKARVALARRLAIIMHAMLRDRTEFASA

SEQ ID NO: 119613 - protein, 436 aa, unidentified
MRAAHEATLCDERGEVIWSKRRFGNRHQELVAVVAQGGDCDQLTVVMEPTRNAWVPVAAHFMAVGADVVLILPQRSADLRRYYTKHTKNDRLDSHVLARLPLHPEGLNPIDSLGPADALKRAVHRRVKLVEWQLASRQRLDSMLDLLGPGYAETIGGARYTKTALEILEHYGNPRRLRRLGVNRLTVLMRGTSGDQWSEDKATELVATAGEAIALWEHDQLDFDELAWDLASEVRLVRQLGDEITRLEERIDVLYEKADPAGIVISALGVGPILAGGILGRLGDAKRFATLAGVRSFSGMVPKVNQSGHTETRPGITKAGDAGLRRDIWFAADQARHVDPQLGAKYHRLIVERRLHHYSAVCHLATTLLTRIAACWRNDERYVNPGRRGPTYHCHRRESHRQSPLPDPTRTPDPDTHHRHNERISAIRSRPKPLRR

SEQ ID NO: 119614 - protein, 344 aa, unidentified
MGEVSTIGLDIAKSVFQVHGVDVAGAVVIRKRINRAKVLEYFGELPPCLVGIEACPSAHHWGRELQKLGHVIRLIPPSYVKAYLKRSKNDANDAAAICEAVTRPSMRFVPIKTKEQQTALMLHRTRQLLVRQRTMLSNALRGHLAELGIVSAKGRSGTAELLRIIRDGEDSRVAPAVRGILDVLARQYGAIGTEIASIDKRIMALHRACEASRRLAEIPGIGPVGATALVAEIGDWNSFSSGRSLAAWIGLVPKQHSTGGKDRLGSITKQGNRYLRWLLVVGAMAVIRYARKHGTERRPWLGRLMERRPTKVAAVALANKIARMAWAIMVRGERYKEPKLSLAA

SEQ ID NO: 119615 - protein, 484 aa, unidentified
MKNRSLYGSGSQEVRACFERAGGPDGVLVVPMDLAKDEHVAMLCLGGGQCLCRPFAVRNSAEGAAYLLERIEGVRRQRGIERQNVLIGGEDPAAYTFNFIHRLRLEGLAFLRVNAAQASRLRNNRRAVSDSLALDGIGQALIQQRGRMLESFDGLYCGLKSAARSRRRLVRDETAWKNRIHRNTDILFPGFLDRGLTGIVPFSQASLALMEEDFSCLKIRRCRLDTLVRQLQRHGTRKPEEAAARLKALADEVLPPAPLLIPAEAAGLAVRVRMLRAVREAIAMEENQMARCLVQTPGFYATSIPGLGVVLAGHIMAEYGRPDLWPAADNMASYGGIVPRQTQTGGPSCPARIGHLPLDANRILKDYLLQAAFQTGNTGEHRLRQHYLSVEHRDGKSRLSTAKLLVRILKQVVGSETAYLPLEILRPGPDLPQGRVVACLGDITARLLAKWKPYDLSGIDPSVNRLQQWKESFDDLAASSPSEE

SEQ ID NO: 119616 - protein, 401 aa, unidentified
MKKFNAEEVRVETASALETVRRAQAFAGYPAYIGLDVHKETIVVAVARAGREAPESREEIANKPKAVAKLVERLNREFGGEVLLFCYEAGPCGYGLYRQLLALGHDCQVVAPSMIPKKPGERIKTDRRDARKLAQSLRTGDLTAVWVPDEEQEAMRDLTRARDDMKTQERKARQQLNAYVLRHGHAWPSNKTRWTQTHYHWLESLKFPHDWQQVVLQEYIDAVKAASQRVADITAQMERVLPQWSLAPVVDSLVALRGIDKLAAMVLLAELGDISRFDSPKQLMAFLGLVPSEHTSGGRRRQGAITKTGNCHARRLLVESAWSYRFPARQTMHLKRKAKNASGEAKAIAWRAQKRLCGRYRTLLQAGKNTKQTTVAIARELVGFIWDIACHEMPKVRQAAR

SEQ ID NO: 119617 - protein, 340 aa, unidentified
MTTPLYCGIDLHSNNSVISVQDNQGKQVYEKRLPNDLPIIMSSLSPYKQDLQGCVVESTYNWYWLVDGLMDAGYSVKLANPAAIQQYSGIKHTNDFTDARFLAHLLSLDILPTGYIYPKETRGIRDMLRRRLLLVDQRSSQRTSLQSLLARHTGRRLSEGQLKKLSSEELQQLLPIPCTGLMAEALLSMIKSMTGVIKQLERAVSTHCVKQKDYQLLNSIGGVGEILGATIALETGNIRRFPDAGHYLSYARCVDTQKVSNGKSKGRNNRKNGNRYLALAFMQAAHLATIWEPKVKRFYQKKQAKSHSMVAKKAVAAKLARAIYHMLNKQEPFDVERAFG

SEQ ID NO: 119618 - protein, 277 aa, unidentified
MRIIGCDLHTRQQTIAMLDEHTGELVEKQLNHEGEEVRQFYSALPRPVLVGIEATGSMFWFLRLLEELAIDFRVGHPAKIRAAEPRKQKNDRRDARLLLRLLVENRFPAIWMPSPRLRDLQVLLRHRHRLVRIRTRVQLGLQALALSHGLRRGSSLWTPGGQHQLRALPLARHAAAQRETLLTLYPQLQHSIDCLDRQIETQVNERPQARRLMTHPGVGPITALATEVFLGDPRRFANSKAVASYIGMIPQEKSSGGCQRFGKLSKQGNALLRFLWW

SEQ ID NO: 119619 - protein, 421 aa, unidentified
MNEDVYYERCAGIDVHKKFLVVCLRIGRKAEIRKIGTLTHELRDMVAWLKANGCQMAAMESSGSYWKPIYNIFEQEGLPVMVCNAYHIKNVPGRKTDVNDARWIAKCLSQGMLNPSFVPDREQRELRDMTRFRKSQIEERARNINRLQKFLEGANIKIGDFLSDVEGKSATLLLELVIGKPDFTVDDVVARMHKSMKSTADELFRSLEGYMTSIQREFFAHIMGIIRDQTVQIEKTDALIKRSLNDNYKAAVAALDAIPGIGVISAEQIVAETGIDMSHFKNQHSLSKWAGVCPGNNESAGKRKSGKTPPGNKTLKSTLTQSAKSAKVNKKSFFSAQYNRLVSHRGKNRATMAVAHSILIAVYFVLSGHKFKDLGADYYTQFNREKKINSHFKQLSKLGVSFPDDILRDVLHPPDHKTRSA

SEQ ID NO: 119620 - protein, 349 aa, unidentified
MTKVTIGVDLGDQYSQLYVVDAAGTCVETGRVRTTRAGLERWFARQAPARVVLEAGTHSPWASRALQALGHEVLVANPRKLRGLYENDSKDDRVDAEYLARVGCLDPALLKPITHRGAAAQADLAVLHARDALVRTRTQLISHTRGVVKALGGRLPRCSAEAFARRASGAVPAELQPALAPVLAQVQQVTAAIRAFDRELERRCAEQYPATARLRQVSGVGPVTALAYVLVLEDPRRFARSRAVGAYLGLRPRRSQSGERDPQLGITKGGNPFLRRLLVQGAQYILGPRGPDCDLRRHGERIAARGGKNAKKRAVIAVARKLAVLLHRLWISGAVYEPLRHSTALAQAS

SEQ ID NO: 119621 - protein, 359 aa, unidentified
MVGMLQVVGLDVHLSRTEVAILDVVSGQLWCGRVVGQPERVLDLIAERAATAACVYEAGVTGFALARQAAARGLDVRVVSAGQIPRDPSDRVKTDRRDAISLARKLAAGDLSFCRVPTLEQERFRDLVRAREQVRRDLMRSRQRLRMFLLRADLYYPGSAWTVAHTRWLDQIRFHDRAQTATFTDLRAAIEGLLARRDRLEQTLEELVPDSPFADTIARLRCFRGIDTLTAAGLCAEIGDFHRFQHPRFLAGCLGIVPSERTSGQRRRQGAITRAGSSHARRLLVEAAHHYRRPPAIGVTLRRRQHGHDPRLLQIAWNAQTRLHHRHQHLRGRGKPPAVTVIALARELSSYLWQAATMT

SEQ ID NO: 119622 - protein, 410 aa, unidentified
MEVVYPRCCGLDIHKRTVVACRIVPGPDARPQKDVRTFGTMTDDLLALADWLADAGVTHAALEATGVYWQPLWNLLEDRFALLLVNAAHVRQVPGRKTDVKDAEWLADLLRHGLLRASFVPPRPQRELRELTRYRTSLVRERSREANRIQKTLEGANLKLGDVASNVLGVSGQAILRALVAGTTDPAALADLARGRLRDKRADLERALAGAVGPHQRFLLGEQLRHLAALDDAIARVSAEIAARVRPVAAALEALDTIPGVARRTAEALVAEVGTDLTRFPSAAHLASWAGLCPGNHQSAGKRQSGRTRKANPWLRAALTEAAQGAGRTKQTYLGAQYRRLAARRGAKRAAIAVGHSILVIAYHLLTTGEVYTDLGPNYFDERARDAVQRRLVRRLEALGYTVQLQRPAA

SEQ ID NO: 119623 - protein, 350 aa, unidentified
MLIIGCDYHPGFQQIALVDTETGELEERHLAHRQEAEQFYQELKQRNVAVRVGMESSGHSRWFERLLRQLEFELWIGDAAEIRTKRVRKQKTDRQDAQLLLRLMMEDRFPRIWVPDAANRDMRQLLWHRHRLVQMRTRVMNQLHVVALNEGLRRKKALWRTAGRKELEAIALAPWASRRRQDLLEVLDQLTPKIQELTRLLKEEVEKRPVTRRLMTHPGVGPLTALAYELMIGTPERFHCGKQIASYVGLVPEEKSSGDRRRLGHISKQGNVLLRFLLVEAAQVTVRSQAEWRSKFFHLVMRRGRKIAKVAMARKLAVHLYWMWRQGRDYGQLQKLGSHAGEPGNRDGGQ

SEQ ID NO: 119624 - protein, 342 aa, unidentified
MNNVAIAAIDLGKHSFHLHAQDDRGHEVYRKKFTRAALTQYLANLAPCIVVMEACGGAHFMAQEVVKLGHTPKLIAPHLVRPYVKSNKNDFADAEAICEAATRPTMRFVPPKTQAQQALAMLNSVRDSFIKDRTATVNRIHAALLEVGISLAPGFKSIKTLPALLEASSFSGSIKKILMELHEHFNYLDGKVKTLDKDVECQAAEDDLAARLMTMPCVGPITSSALAAELGDGKQFKCGRGYAASIGLVPKQHGTGDKTVLLGISKRGDRNQRRLLIQCARVYLIKLEHQKGALAEWVRQLLASRHHSNLVVCALANKLARIAWAIAAHHTEFDAGSAAMNA

SEQ ID NO: 119625 - protein, 354 aa, unidentified
MHYANRVDFSGQTIYIGMDVHKKSWTVSLFMEHLEHKTFTQVPDVAVLAAYLQRHFPGARYSAVYEAGYSGFWIHDKLLESGIACMVTNPADVPTRDKERRRKGDRSDSRKLARCLRSGQLEGIHVPPRATVEDRGLIRTRQAMVRKQTRCKNQIKSLLLFYGLPVPDAASGWSRNFIRFLEETRLERESGDLALKANLTELIHLRQIIAQLNRDILALSRTDEYRERVQLLKSVPGISTLSAMIFLTELGELSRFPSLDKLCGYVGLTPDTHGSGEKQGIGDITRRGNQMLRSLLIECSWVAVRKDPALALAYHSFCKRTLKTKAIVKIARKLLNRIRFVLNNRCRYVSSVAA

SEQ ID NO: 119626 - protein, 356 aa, unidentified
MEPQSYWVGLDLGGQESHICVVDGLGQPVQSQACKTSLSAILDSLSAFPVESIRLISAEAGTETHVLRKLREAGLPVAIFEARKASKFLAMRRNKTDANDARGLADMGRIGQHTVSQIYLKSLECQQLRSRLVMRQRLVKLRVTADGVLRSGLALYGRRLVKTRSAATLRADAEAHVASLKTNEGIDLSKDFEPIIELCERLRANIADLNTVLEAAARNHPVCRRFMGLTGVGPICALSFYSLIEDPDRFRRSSEVGAYLGLVPKVYRSGPTSFTEGISKTGSRMTRTHLFIAATVFHTRGPESDLKTWAIELEKRAGAKRARTALARKLAVILLTMWKTGASFEPFPGRLMANMT

SEQ ID NO: 119627 - protein, 348 aa, unidentified
MLHAGLDLSRTRLDFCLVDEVGERVEVGAVPPDADGLAGFVRRVGERHGGLPVRAAIESMNGARFVHDQLERLGWEVEIADAARVKGLAPLACKTDRIDAWVLAELSRRDLVPAIWLPSFGLRQERERARWRLFLVKKRSSLKHRVHAQLLAFGHACPVSDLFGIGGRELLDRLEFPEPWRGGVLAAVRMIDELDEEIVGIEKELRALGADHQYVPLLMTVPGIAWVLGYTIAAEIGDITRFASPTKLTGYTGLCPRVYQSGGSDRRGPLTHAGPRYLRWALMEAATHACRHELYRDRYQHTKRRLGKQRGAKVAQVDLARKLSEAIWHMLTRSQPFAPAGATPALAA

SEQ ID NO: 119628 - protein, 411 aa, unidentified
MRDRQNYVFIGADVHKEQHTVVIINCWSEVLGDFTFESKISEYPKVIEKINEVIPYGLVPIWGLEDVCGNGRSLAVFLKENGYTVKEVNPSFSSSERKNHATTKKNDYWDAKCIADVLIRKLNELPEATPNDLYWTLKQFVYRRDSLVKSATTAKIQLHEQLVKNYTSYKKFFSNIDGSTALDFWEKYPSPTTLKGVTVIELRNFLRKASKNSCSTNKATTILELIEGDGDTFREYQNSRDELVKSYVRSLKYYQEEIEKLNKEIKGIISNLDYKLETLTGVGTVTAAQLIAEIGDINRFKSAEKLAQYAGIAPVRFSSAGKGKDKKSKQGNRNLNGVLYFLAMQQIQISKQSKMPRNEILYEYYQRKLTEGKTKVQALICIMRRLVNIIFGMMKNKTEYVKEYRHNRIVS

SEQ ID NO: 119629 - protein, 352 aa, unidentified
MKHYIGCDAHKHYSIFVSMDESGHARAPQRVQHERTEFQDFLRRLPPGSPIALETSGHWYWMVDAMEQAGHQPILVHARKAKLLMGMVNKTDKLDAKGLATLLRNGTVPAVWIPPATLRDQREWPRLRMTFVRIRTALKNRLHAAFAKYGMALTDVSDVFGAKGRQVLEQRLPELPPETRRAVREELALLEALQDQIDDLEVRIREVVRQTPEMVLLQTLPGVGPILAIVIALELGSIERFPNAEHFASYSGTVPRVQESGGHRRYSGAVRSDVNRYLKWAFIEAANCVVLNQAHWEGRHVVQLYQRLRRHTGHAKAVVAVARHLAEATYWMLKKQEPYREPAWTRRRGSRG

SEQ ID NO: 119630 - protein, 355 aa, unidentified
MNSEKYIGLDVHQATISVAVMDCRGKVVMESILETKAATLLEFLAGLRGTLSVTFEEGTWAAWLYDLLKPHVQKLVVCNPRKTALLKHGNKSDRIDARKLADLLRLNDLEPVYHGQTGVRMLRELARSYLSLVKDLTRVMNRLKAMYRSWAIPCAGRDVYYTRHRAEWLGKIREAGVRRRAEHLYQQLDMLQHLRQQARRELLAESRKHAITAKLRQIPSFGPIRAALAVALIQTPDRFRTKRQLWAYSGLALETRTSGEYCYVRGQLRRSKKQISIRGLNKDHNHDLKGLFKAAATRASVQPGPFQDFYQRSLAKGIKPTMVRLTLARKIAAITLTLWKKGENFDAEKLKPQAA

SEQ ID NO: 119631 - protein, 358 aa, unidentified
MEHFAGLDVAMEASALCVVDSNGTIVHEASVATDPDAIAAALAPWGRTLGRVGHEAGSLSPWLQPALDGLGVPAICLETRNVRAAMAAQRNKTDQTDAQALAHIMRTGWYREVHIKSETSYRLRLLLTMRRNLKRKFRDIENSIRHSIKAFGIRLGSVSRGHFADMVRGEIAHDPLLRAMIEPMLEVRAVMWEQYTRLHRLVVKVVRADEVCRRFMTIPGVGPVVALQVKTALDDPARFNRSKTVGAYFGLTSRRWQTGSSIDIQGRISKMGDDDVRRALVEAANSLLLRYQGWSALKVWGLKLSRTRGRKRALVAVARKLATIMFAMWRDGSEYRFGAQQDVPDPLVQAIVTEAATA

SEQ ID NO: 119632 - protein, 389 aa, unidentified
MNSSRHTDTLAAVEEHCTMYVAFELGKAKWKLGIVVPGKTKLSRYVVDGGNVEAAWRLMTKAAAQAQKRLGRPVRMVSCYEAGYDGFWLHRWLVERGVESRVLDPASLQVDRRARRAKTDRLDLEQLMQALIRHEGGDRRAYSVVRSPSVEHEDDRRPGRERERLVKERTAHTNRISGLLHGQGVRELAPRAKDFMARLTEVRSGDGHALPAKLVAEIRREAMRLELVEEQIAEIEAHCRIARQAAAPGTMAAKAAQLMELKSLGPVSSQTLVNEVFWRDFQNRRQVGSYFGLTGTPYDSGRSVREQGISKAGNARARTSAVELAWLWLRNQPSSALSRWFKERVGTQQGRVKRIAIVALARKLMVALWRFLTQGLMPEGAVLRAPARG

SEQ ID NO: 119633 - protein, 314 aa, unidentified
MYYYIGIDVSKKVLNIFDGKKDLIFDNKENLSSFKKYLKKRYPDFSSLVILFEATGIYSFYLKAFCAAHMLKAYIINPQVSHSFAKSLGAPSKTDTTDARTIWAYHKLIIDKDINIPKVDREIMTLSSYLASYRLTLKQRLALTNHLEGIKDKTLYRLLKKEQERLQKLEHELLTQTDATIKQYPQLKEDYQRLLSISGIGQKTAISLLVLFHAYTKTNRNQITALIGLDPIQRQSGTSVHGRSRISKHGNRMMQKSLYMPTLSCIKHNHKIKVFYERLVSKHKPKKVAVIAAMRKLLLIAHAIYQNKTVYIPG

SEQ ID NO: 119634 - protein, 412 aa, unidentified
MLFVGDDWAEDHHDIEVQDENGRRLARTRLPEGIAGLTRLHELLAEHLGEDDVDPETGLLAQNVVVGIETDRGTWVAALVAAGYQVFAINPLSAARYRERHGTSGAKSDRGDAHVLAEIVRLDRDHHRPIAGDSPTVDGLKLVTRSHQAFIWDRTRHFQRLRSALRESFPAALEAFPDLMAPEALELLERAPDPARAARLSRSKITAALARARRRDPEAKAETIQAVLRAPALRQPPEVEAAYAVIVASAVRLIAQLNSQIAELQAVVAEGFGRHPDAEIVLSQPGLGPVLGARVLAEFGDDPARYADAKARKNYAGTSPITRASGTRRVVLARYARNKHLADATHQWAFCALTASPGARGYYDTLRARGTGHHAALRQLANRLVGILHGCLKTRTPYREDTAWPQVIADAA

SEQ ID NO: 119635 - protein, 446 aa, unidentified
MSAIENCRTAALGGHVDACEDCGRLRVAYNSCLMGKDAMGVGGRGSGILSVMKVPQERPMSEMFNPHAPATAYDHNTTIVAVLELSGKSWLFGAVAPGLPRRVKRSFAARDVEAVARAIEQVKAQSARANFEAQRIVVGFESGCDGFWIARALQQRGFEVYVMHAASIAVERRGKRAKTDRLDVDLLLTTLIGWLRGEPGRCTMAPIPSEEEEDLREPGRRRETLVKTRLKVENQISSLLIRHGIAGFKPRLKNCETRLDELRTFDGRPLPANMMKSLGLLLAQHRLLSTQLKEIEEARQQVVKVAKPDRWQLMIQTLARVVGVGVETAIVLVYEVFSRSFKDRRALAAFVGLTGTPYNSGGSETEQGISKNGNARVRRMLSQLAWRWLMHQPESALAQWFNARLNGAKGRMKKILIVALMRKLVIALWRLAETGEVPVGARLALR

SEQ ID NO: 119636 - protein, 332 aa, unidentified
MSNVPLFVGLDYHQDSIQVCVLDQQGKVLLNRSAANDCHALSRLVQPLGVVQRVGIEACCGAADLGQELVEQLGWTVSLGHPAYIAKIKRSPDKSDYTDGRLIADLTRVGYLPRVWLAPANLRELRQLVNHRQRLVDRGRAIKLQVGGVLREQRVRIDADRGSRWSKSWVASVRDNLRLSAHARWIVNDLLDDLTYTDGKIRRAEQRLREASQGDAVIEKLLQQPGIGEVTAWVLRAYVGDFGRFRTAKQLARYCGLSPCNASSGKRVADAGLIDGCNLRRVDRWRKLADAMRSRGKPACVIVGAVGNRWLRTLHHAMKQQSTLEPAATSMN

SEQ ID NO: 119637 - protein, 413 aa, unidentified
MEVLYPRCAGLDVHKATVVAAVRLVAGGKVAREVRTFATTTAGLLALAAWLGENGCTHVAMEATGVYWKPVWHVLAEGGFDLVLANAAQVKNVPGRKTDVNDATWLAELLAHGLVRASFVPDAPTQELRSLLRTRKQLVRERASHVLRLQKTLEDANVKLDAVLSDLLGRSGRAMLEALVAGETDPEKLAAFAHPRLAATPERLQEALRGRVTAHHRFLLRLHLDQVDALEAAIGRIDREVEERLAPFSTAVDLLASIPGVGALAARVIVAEIGLDMGRFPTAGHLVSWAGLCPRNDESAGKRLSARLRKGAPWLKTILVQCAWAASRKKASYLQAQYHRLRARRGARKAVCAVAASILTAAYHMLKDGTVYRDLGPGHLDRRSRETQARRLVRRLANLGYAVELAPLEPAPA

SEQ ID NO: 119638 - protein, 317 aa, unidentified
MEIIESQIEINVGVDVGKSQLDIVLHPLDLHLSIPNESNAIQKVVQVLLQHQVKRVVTEATGRYEHAFIYACDKAGIPVSVVNPIKIRRFAQALGVLAKTDKIDALVIAKFAAMMKPETKALPDKQSRIIKDLLVRRKQLLDMQTMEKNRLQIMPKELHSSIKSMLKQLEKQIEKVTSKIDDLVIQVKHWRLKTEVLTSVPGVGKVLAYTLLSELPELGSLNRKEIAALVGVAPMNKESGSYNGKRRIRGGRHRVRTVMFMAMMSAIQCNPVFKGYYERLKAAGKIPKVAIIACMRKMIVILNTMVKNEELWCQKTA

SEQ ID NO: 119639 - protein, 337 aa, unidentified
MNNYIGIDVAKATLQVYIPKIDLDIEIANTNQGLKTLHSKLKKQYKKDINEIVLVYESTGAYSTILEHFAEEKKVKCFKVGAYQSASFSKVVKNRSKTDIVDARMLSTMHVIANDEDIKIPSRDIKAHQIKSYIKYYQSLVKDEIRAKNYLEAATFNLEDKFVIKQVEKKVQNLQKEQIDIIAKTMEIIKSNNEYYESYKNITSIKGVGEKSGIILLYLFLRYPNASRQHITALCGLDPIQRSSGTSVQHKERISKQGLSLVRAILFMPTMAAIQHNEEMKLIYDRLVQRGKPKSLAQIAVMRKIILLAHSLYKNKEQYDEHRYLKFTQTKVDKDIE

SEQ ID NO: 119640 - protein, 344 aa, unidentified
MYHYAGIDVSLESSTICVVDGAGKILRETKVASEPEALIAWLGSLGLALERIGLEAGPLSQWLYAALREAGFAVELLETRHVRDAFKAMPVKSDRNDARGIAQLMRLGWFRPVHCKSIEAQETRAVLTARKLLQSKLRDIENSLRGVLRGFGLKVGKTTECTFAERIRELVAGHPRLELVAKALLEAHAVLRREFNGLDKHTQKLARLHPQAKLLMTTPSVGPIVALTYASAIDDPKRFASSKATGAHFGLTPKKYQSGQTDYTGRISKIGDASVREALYQAAHVMLTKPIKGCTALKSWAMRISKRAGMRKAKVALARKLAVILHRMLADAKPFNPTAKAAAT

SEQ ID NO: 119641 - protein, 327 aa, unidentified
MNVSVSALGIDIAKLKFDVCLIKENGKAKHKVFDNNRNGFEKLAAWLSSHKIVDLHVCLEATGSYGEALAIFLFDAGFPVSVVNPAQVKAFAASRLTRTKTDKVDAELIARFCLAHSPEAWTPPAAQVRELQALVRRLESLVEMRVMEENRLSSGITIDSVRQSLETHIAYLCEEIKQTELLIQEHINKHPDLKQKSDLLDSIPGIGETTAALLLAEIPNINQYKSARQVAAYAGLVPRERRSGSSVRGRTCLSKIGNARLRKALYFPAMTALRCSEFFQAWASGMRERGKSKMAVIGAAMRKLIHLAYGVLKTGVPFDPNWTAKTA

SEQ ID NO: 119642 - protein, 422 aa, unidentified
MQVAAWLRITHKAESLVDVRGHLTSLNRLEAVHMMYCGIDVAKHKHAALILDEKGKVLKPALSFSNDRQGFDQLLGLLAEFSQPVTIGMEATGHYWLSLYDDLTCQGHPVIVLNPLQIAAYRRSGIRKVKNDRNDAFWIADYVRIANLSPTEQDLPSLLQLRELSRFRFGLTDQIGDVKRRILAILDRVFPEYETLFSSVFWKSSRQLLKEAVTADEFADFDLAELSQLLRSTSRGRFGSDKAETIQRPARRSVGVGFLADVVRIKMRCLLEQIEPLERQRTQVDEELEALMAQIPQHITSIPGIGLATGAAILAEIGDVNRFESAEKLVAYAGIDPTVYQTGQFQASQARMSKRGSPYLRHALWQAASMAVRYDPDLRSFYQAKRAEGKHHGTAIGAVCRKLLARIYIILKEQRPYVIRNC

SEQ ID NO: 119643 - protein, 355 aa, unidentified
MDSKKYIGMDVHKESISIAVMNGAGKIVMESVIETKASMILQFIDGLCGDLQVTFEEGTSAAWLYDLLKPRVTKLLVCDPRKNASMREGPQSDKIDARQLAELLRLNHLHPVYHGEHGLRSLKELVRSYLTITKDLGRVMTRVKAIYRSWAIPCSGKQVYAARHRAEWLAKITEPGVRRRAEFYYQQLDALRAVRQEVRRELLAESKKHQAWKLLCQIPSIGPIRAAVLLGILQTPHRFRSKRQLWSYGGVGIATISSADHHVVKGQLERKKKQVEIRGLNRNYNHDLKNLFKGAAIVAASKPGPFAEFYAALLAKGMRPEMARLTLARKIATIVLIVWKRGVSFDAQHLKPQTA

SEQ ID NO: 119644 - protein, 410 aa, unidentified
MITPAEGNITIVTASQLVVIGADTHLDTVHLATLSDTGKPLADAEFPTNPTGYCEALTWAQSFGTVLIAGVEGTSSYGAGLTRALQDAGIEVVEVNRPDRATRRRRGKSDPLDAYAAARNALSGDGLAAPKDERTTALSALLTARRGAVKARTAATNQIQSLLITAPAELRERYRRCNTAGLVKALARCRLVAHGDPTTMAVLSAVKTLALRAQFLHRQERELTDQIDTLVQSINPGLRVAHGIGPDTAAALLITAGLNPYRLRSEAAFAALCGVAPVPASSGKTTRHRLSRGGDRSANNALYRIALVRMSNDPRTRDYVARQTTNNRRKAEILRLLKRAIAREVFRLLTRPCVIDDYSDLRPARQAKNITLSTVAEHFGVWPNDISRLERGLQRNDTLAANYRQWLTAA

SEQ ID NO: 119645 - protein, 399 aa, unidentified
MATMRNNAQRVKRFRDLKADLRIRRDRLLVGLDVAKATHVAQVRLAHTRILDKTVPIPNTTAGFGTFWCRLERHQRATGVTEIVVALEPTGTYHQALAAFLDAQGADVVLVDNHVAALHRRLLDRTWEKSDPKDAHNLCELLEQGRVLFCALPDEPVATLRRLVRLLRRARVELGACKARWQNTLRPALGPSGDPLPPGVLTALPPPLRAFLPAGDRMGGPARPRPLAPGLAAEVADLAARVTGIQARCATLEAALVQVTAPLPATAWLRSIPGLGPTLTAIVLAELGDITWFTKFSQLRKLAGLDIVRVQSGQWAGTARISRCGRPLLRWALYQAALGACRTPAWRAKRESLRAKRQGDPHAFFKTNVEVAAKLLRVIWGVWRSGRPYTAGRAGVPAA

SEQ ID NO: 119646 - protein, 344 aa, unidentified
MEQYAGIDVSLEFSSVCVVDAAGKIIREARVVSEPASLIAWFAALGMDVARIGLEAGPLSQWLYAEMKTAGLAVELLETRHVRDAFKAMPVKTDRKDARGIAQLMRLGWFRPVHCKSLPAQEVRALLTTRKLLQGKRHDIEMSIRGVLRGFGLKVGPTTPKTFEHRIRELVENHGTLSLVADALLKARAALGLEFRAIEKRLLTIARADKRVRRLMTTPGVGALVALTFSAAIDDPDRFRSSRMVGAHFGLTPRKYQSGETDVTGRISKIGDHEVRVVLYEAANVMLTRPVKGSTLKRWALAVAKRAGMRKAKVALARKLAVVLHHMMRSGTAFSQTGQPAAAV

SEQ ID NO: 119647 - protein, 381 aa, unidentified
MPDGIRWVGLDVHARESTIAVFDQATGEVATKRVVGRPHELLPLLRAVERPARMVYEAGPTGYGLARRALAEGIELGVCAPSKTERPADRVKTDKRDAVRLARLLAAGELVLVTIPSLEREQLRDLVRCREDIRCDLVRARHRIGNFLLRREIYWEGPGEAWTRKHRSWLTSIRFSDLASQATLADYLHAHDVLIARRDQVEADLAKLATSAPCAHTVARLRCLRGIDTLSALGLCAEIGEWGRFDHPDQLSAYLGIVPCEHTTGSQRRLGSITKAGSTHARRLLIEAAYHYRRGPGVGQALELRQRGHAPEIINISWKAQRRLNARWRQLKDARRKPGGIVAVAVARELAAYCWEIATCPTTSPEPTPTPTTRKRLSNSR

SEQ ID NO: 119648 - protein, 354 aa, unidentified
MEEYIAFDSHKHYTWVEHEQVTTGKIRQYRLAHAPGAIRNALAGCEPGTAVAIEATANWYWIVDEIEQAGLRPLLVHPRKAKLMMGQINKTDKLDAHGLNRLQRNATLPTVWIPPGRLRELRELTRTRVVLVAQRTRWKNRLTATLAKWGLPASEYSDPYGKGARAELKGRIERLPEQTRWVSRQMLAQLDGLSEQIRQFEQRLEGLVEVTPEMQLLMNLPGVGVILAATVALEIGEIARFASAERLASYAGTTPRVHASGDRVRYGRTRPDVNRYLKWAFAEAANSVAVNYERRPQRHVSQLYFRLRVRKGHSKAVGAVARHLAEAAFHVLSGHEPYRDPTAAPGRTREVEAR

SEQ ID NO: 119649 - protein, 411 aa, unidentified
MNAVGIDVSKGKSTVAILRPMGKVVQTPVDVPHDAVSLKRLAYQILSLGENTRVVMEATGRYHEPVAMELHDRGIFVSVVNPLAIHGYCSGGTVRKVKNDQKDSLKIAKFALDHWVDLREYTPMDAVRQQLKIFSRQYNLYMKSRVALQSNLISLTDKVFPGVNEIFTSPERSDGHLKWVDFVTTFWHCECISLVSENAFTERYKKWCKRMGYKFSAAKVSDIYIDSLGHIVTLPKNNNTKLLIQTAAKELTAMNELLAVVKAEMIRLAKELPEYETVHAMFGVGELLAAQLMAEIGDIRNYPRRSSLVGFAGVDPEVNQSGKMNSESNPSTKRGSPHLRKTLFQLMTVYLRLSPADEAVYQFLDKKRSEGKPYYVYMTAGANKFLRIYYARVKECMAKLETPAEIAEENG

SEQ ID NO: 119650 - protein, 392 aa, unidentified
MYIVGIDIGKNHHEASIVSPEGKQIGRSLRFATTHKGADSLMSFIFKNIGNSPCVFGMEATGHYWYPIYSFLKAKGYTICVINPIQSDSLRKMYIRQTKNDSIDSFLIAEVIRFGQFGTTSMADENILAMRQLCRYRDSVISSRTEIKLRIGTIMEQIFPEYEKQFSSLWVSTSMGILEKYLTPENIENAPIDELFEIIKDKSHNRLTKAKAISIKEAAADTFGIKIAQDAFSFQLKQLIDRMNFLDKQIEALDCQILEYYEKFDCYLHTIPGIGIIGAATILAEISDISRFKNSSALVAFAGIDPTVRQSGEFNSTHNHMSKRGSPYLRHAIFLAATTCSFHNSPLNAYYKKKRDQGKHHLTATGAVARKLTTVIYAVLRDSKPYEPKKFC

SEQ ID NO: 119651 - protein, 375 aa, unidentified
MSEITRGLIARVGVDLAKLVIQVHAVDASGARVVARALKRDQFLPWCAQLPPGCLVAMEACSSAHHWARKLRAMGLDARLIAANFVTPYRMEGRGGKNDATDAAAICEAASRPSMRFVPIKSAEQQGVMSLHRVREGLKEERTACINQIRGVLTEFGLVFAKSPKLLRAVLADVIEDASNELSTLARLVLQRAFEHWRELDEHLRWCDRQVGLHVRSNPAARRAAKVIGIGELGASALVAGVGDFKQFRSGDQFGAWLGLVPRQDSTGGKARLGRITKRGDDYLRTLLIQGAKAAVMSAAKRDDPISRWTVQLTARVGWQKACVAMANKNARILWAVMTREQGFDAKHVSIKPPAKHSQRQQGAAPPPAGALCAA

SEQ ID NO: 119652 - protein, 362 aa, unidentified
MELLKQVVGIDCAQQELVCCFGNLNSELDAQLKASKTLRNTDEGIHRLLAWIDRLAASSVEPIFVVEATGVYHQRLAYELHRQRRKVVVVLPSRASKFAQTLKVRTVTDGTAAKALMQMGLEKQLELWSPPHPIFARLKQLTRERKRLKDEISRLKNQRHADGVAVRTLPGTLRRIAQRLELAGEHIKAIEQQIEVIIAENEHISRQFGYVCSINGVGLMTAATVVSEADGFAMVRNVRQLVSYAGYDVVDKQSGTSVRGKSRISKKGNSYIRRALYFPAITAVRHEGRLSRFYERLYNKHDIKMKAYTAVQRKLLILIYTLWSKQEPYDPSYLQKKSGATATGCPTRAGLKPLFVHKHLVR

SEQ ID NO: 119653 - protein, 345 aa, unidentified
MGPMYYIGLDVHKQKISYCVKDVGGRIQVEGWIPATRFDLDRWMKTLPQPWSAALEATMFSGWIYDHLKPHAAELKVAHPLMLRAIAAAKKKNDRIDANKICDCLRCDFLPECYMAPTAIRERRRTLRYRNLLVRQMVQMKIKISTLLMEAGVSYNKQKLHKAGYFRELLASNPDIDESLRSLLRQCREMVVRLGKMETALIHSLQQDPLLVERVERLISIPAIGPITALTWALEIGEVQRFSSIKKAISYCGLCGDEQRSANSVQRTPISKQRNKHLQTTLIEAAKMAPRYSPTLAQLYDREMQKGNANRATLAVARKLVAYLMAVDRGQTHFLVIDQETRTAA

SEQ ID NO: 119654 - protein, 378 aa, unidentified
MSNLRFIGLDVHAETIAVAVAEAKGEVRSLGIIIPNRSASIRKLVKKLGAPEQLRVCYEAGPTGYVVYWELTSLGVCCEVIAPTLVPVKPGDRVKTDRRDAVKLARSYRAGDLTPVWVPDAAHEALRDLVRAREAAKKDQLRARHRLGKFLLRHGRRPPTTVKAWTQSYVAWARSAVHFDYHAQEATLLDYLHEVEHAADRIVRLERAIDEAVRTAPARQRAVIDALQALRGIALISAVTIVAEVGALSRFVKPRQLMGYSGAVASEDSSGERIRRGGITKTGNAHLRRIVGEAAWAYRHRPAVGPALRKRHALVDDAVKAIAWKAQHRLHSRYRTLTARGKTPQHAATAIGRELLGFIWAIGVHVEAKEGHRTPVAA

SEQ ID NO: 119655 - protein, 364 aa, unidentified
MKKISTAKIKSQAAKKKVTIGIDLGDRSSRYCLLDEEGVVIGEASTPTTKAAIAKVFGAMARCRIALEAGGHSPWVSRLLEEFGHEVIVANPRNVRLIGESTRKDDRLDARTLARLARIDPMLLSPVRHRGAEAQADLAVIRARRVLVKARTMLINAARGLTKSFGERLRKSGAGQVGPTLAAELSPEIRAAVVPLLAEVAVLNQRIAAYDHQIEQLAKEHYPEVARLKQVKGVGTLIALTFVLTVDDPNRFQRSRDVGCYMGLRPGRRNSGKSEPQMHISKEGDRYMRTLLVQGAHYILGPFGIDCDLRRWGLKMSERGGKSAKKRAVVAVARKLAVLLHKLWVSGEVYDPLRNSRQLIARAA

SEQ ID NO: 119656 - protein, 390 aa, unidentified
MAKKRISDDPAGFTVLTEMLAAAGDSSDDAIPIAIETPRGLLVAALRATGRPVFAINPLAVARYRERHTVAGAKSDHADAMTLANILRVDSHLHRRMPADSELAQAIAVLARAQQDAVWRRSKASNELRSLLREYYPAFLDTFAGKSATNLAKPEARAVLAIAPAPARAAKLTKTRVAAALRRAGRKRGIHGLAVNILEHLQAPQLRQPELVEKAMGRQALALLAMLDAACTGADELAQTAAEEFRKHPDYAVITSFPGLADLTGARVLAEIGDDRDRFADDRALKAYAGSAPITRASGKVTSITHRRIKNDRLAAVGWVWATYAYINPGPAQDHYRRRRDHGDRHAAALRHLFNKMLGQLHHCLQTRQTFDPIKAFGQPRTAPREPAAA

SEQ ID NO: 119657 - protein, 355 aa, unidentified
MTSTEYIGMDVHKESISIAVRNAAGKIVMECVIETKASTILQFFDGLRGDVHVTFEEGTWATWLYDLLKPHVTKVVVCDPRRNALLQEGNQNDRVDARKLAELLHNNQLRSVYHGDHGLRTLKELVRSYLTITQDLSRVMSRVKAIYRSWAIPCTGKQVYASRHRADWLGKISEPGVRRRAELYYQQLDALRSLRQEVRRDLLAESKKHQAWKRLCQIPSIGPIRAAVLLGILQTPHRFRTKRQLWTYGGVGIETSSSADHHVVKGQLERKKKQAEVRGLNRNYNHDLKNLFKGAAIVAASKPGPFAEFYAELLARGMRPEMARLTLARKIATIVLIVWKRGVSFDAQHLKPQTA

SEQ ID NO: 119658 - protein, 419 aa, unidentified
MDLTDLTSTDTEPASPAPPPGLVAGVDTHQDTHTLAVLTAQGAVIATSSFPADQQGYDDLTAHLDRFGPLMAVGVEGTSSYGAGLTRTLRQAGYDTVEVLGPSRRVRRHHGKSDPIDAIAAARTVLSGDGVSQAKDTTGPAEQLRLLLAARTRLISAATAITNSIHSLLTTAPEPLRERYRRLDTPALITRLARTRPTRTITTPQQAATSALHHMARTHQDLHHRAERLNQQMHHILTTHYPGLLAVYGAGTTVAAQLAVTAGGNPGRIHNEAAFAHLCATAPIPASSGKTTRHRLNPGGDRRANAALHRIALVRLRHDPTTKNYANRRTQEGKTTKEIIRCLKRAIAREVYRALTQPPPTDTTSTLAAHRKRHHLTQTDVAHALNTYPARISDIENHRRPLPQLTHRYHQYLTTLDTQ

SEQ ID NO: 119659 - protein, 319 aa, unidentified
MSKRVLGIDAAKKKLDVALMFDGKVLSKKFDNTPKGFKLLSGWLASLHIGPVHACLEATGTYSEAVAEYLHECGHRVSVVNPFRIKSFANSDLQRNKTDEADARTIADFCLAKDPEDWHPLAPQIKQLRDLTRRIEALERMLGVERNRLEMAPAATRPSIERMVDSLNKEIDAVRGLIKDHIDDHPDLKQQSELLQSIPGIGEKTAALLLGEIEFRSFESARAVAAHAGVTPRRSQSGSSLNRTRLSKLGNARIRKALYFPAVVAVRFNEIIKQFAQRLSRNGKTPMQIVCASMRKLLHIAFGVIKHNRPFDPELAFHI

SEQ ID NO: 119660 - protein, 350 aa, unidentified
MEFFVGLDVSLDETHICVVDEGGRIIKETCAASEPEAIAKAIRHKGRRIEHVGLEAGNLSQWLYEGLVKEGFSVSVMETRHVRAAFAAMRVKTDRHDARGIAQLVRLGWFKRVHVKSLDAQETRALLTARGFLVEKVTATENSLRAALRNFGLKMGSVTRKTWEARARELADGNSVLEGIVEAMLRVRTLLLNELASIDGQLTALAKSDPITRLLMTTPGVGVIVALTFRSAVDNPDRFPRSRDVGAWAGLTPRRWQSGKTDIAGRITKAGDPRVRVMLFEAAASILGRARVMSPLKAWGLRIAKRTSMKKAIVAVSRKLATILLAMWKSGTAYWAAGRPPSSAQDFAAA

SEQ ID NO: 119661 - protein, 361 aa, unidentified
MAKVRSWAGLDVHARSVLAVTLDAESGELRSARLSGETAKVVEFLAKLPGPTRAAYEAGPTGYGLARALIAAGIGCVVAAPGKIERAAQDKLKTDQRDAERVLRLLMIDALHPVRVPTVEEEALRDLIRAREDVRGDLMRARQRLSKLLLRHDILYEDSASTWTQRHRSWLRAQQLGGGAQATLLDYLGAIDTLELRRGTLEKTIGELVPASSYAQAVARLRCLRGIDTLSAAGLCAEIGDFTRFERPGKLMSYVGLVPSENSSGESRRQGPITKTGSRHARRLLVEASWHYRKTPSRGITLQRRQDGQPANIIAISWQAQQRLHRVWQRLAEQRGKRRTIVAVAVARELTGFCWALARAD

SEQ ID NO: 119662 - protein, 347 aa, unidentified
MRFYTKQHKAYCGIDLHARSMYVCILSQDGEILLHRNMKTSPETFLKAIAPYREDLVVAVECIFTWYWLADLCAQEQLPFVLGHALYMKAIHGGKAKNDKIDAQKIAVLLRGGMLPQAYVYPAEMRATRDLLRRRLHLTRKRAELLAHVQNTNSQYNLPEIGKKLAYKANRDGVAERFPDPAVQKSVEVDLALIDYYDQLLSDVELTIVQTAKQHHAQTLYRLQSVPGIGKILSLVLLYEIHDISRFPRVQDFVSYCRLVKCAKESAGKRYGTSGAKIGNTYLKWAFSEAAVLFLRHNPAAQKYLARLEPKHGKGKALTVLAHKLARAVYYMLKRDTAFNMQKFLNG

SEQ ID NO: 119663 - protein, 323 aa, unidentified
MGSFIGIDVSQGELVVAWRNESGEEGVRNFPNTERGQRELRTLLEKEKPAPALIVLEATGGYERGVTAELGGAGLPVVVINPRQVRDFARSTGQLAKTDRVDARVIANFASAIKPDLRPLPSEDQEELHDFLIRREQLKQMLLAEKSRLDQTESKRNKKLKKKIKSHIHFLEREMNLLDADLDDTLKGSPIWRESDDLLQSVPGVGDQLARTLLGLLPELGTISGGAAAKLVGVAPMSRDSGKMKGKRRIGGGRARIRAVLYMATLSATRHNPVIKAHYRRLLSKGKAKQVAVVACMRKLLVILNAMMRTKKRWQAEIVPVTA

SEQ ID NO: 119664 - protein, 426 aa, unidentified
MKNHEVLSTLFVGIDVSSKNNVVCAIDFDETRYIEISVSNNQPGATVMAEKLAAVMKGNPSFTRLVIAMESTSCYSTHVATFLSSTEILMPFKPYVYCLNPKIVANYKKSYISIGSTDPIDAFIIADFARVGRIKTQPWRGAQFLALQRLTRHRLHIVEAITREKTYMLTNIFLKFSELAVSSNNEAPFSNSYGTTATAVLTEFLSPEEIVGMDSEELIEFICKKSKNSFAEPHKVAALLKKAAADSYKLDKCLYEPLTISIAASFNCINAFEGEVKKLNKAIERAIKGFNTNEYQSLLSIPGIGPVFAGGILAEIGSVKAFRSQDAVAKYAGLVWNPNQSGDFTAEDSFMSKAGNRYLRYYLIEAANSVKNYAPVYNAFYLKKFREVTKHQHKRALALTSRKLIRLIFGLLDNNQLYSESVEHIT

SEQ ID NO: 119665 - protein, 396 aa, unidentified
MIRRHHSSDRPSRPVPSTQHVTTQGANHHDDPTAQYLLQHRSSRSGEVALGVDTHGEVHVASVVSPLGKVLGTESFPATAAGYRLLLVWARKRGTVRRVGVEGTGTFGAGLSRYLLAQQVQVYEVNRPDRTARRLLGKSDPLDAQAAARAVLSGRAKARAKTGDGPVHCARMFKLAKESAVKARTQAINQLKAVLVIADPALRERLSGLGNRELFRTCARLGQLDGEDGGGDEDVVAQATHITLSLLAQRIEQLTAQIVELNKRLTRLVERHAPQLLVPVGIGPDSAVTLLITIGDNLERLNTEASFAALCGVSPVEYSSGRRSSRRLNRGGDRQANAALHRIVFTRLRHDPRTQAYYERRTQEGKTRREIIRCPKRYAAREVFNLVRPVSGIPSL

SEQ ID NO: 119666 - protein, 352 aa, unidentified
MRTSQKTPETITTIGIDLGKNTFHLVGLDKRGAIALQRKVSRSQLEHRLSNVPRCLIGMEACSGSHHIGRQLTALGHDVRLIPAQYVKPFLKGHKNDYRDAEAIAEAVQRPTMSFVAIKTPEQMDLLALHRVRSRLVGQRTGTINQIRGFLIERGIIVRQGVVPLRKALPDILSSNANVLSPRMVSLIADLMQDWRRLDERIETVSTEIEALALQDDSCQRLMTVPGVGPIISSAMVAAIGNGAGFRQGRDFSAWLGLVPKQESTGDRTILGKISKRGNKYVRTLFVQAAHVVLVRRPSTAMRGLWPWIEQASKRLHRNMLAIALANKLARIAWAVLARGQAYQPRIAANAA

SEQ ID NO: 119667 - protein, 431 aa, unidentified
MNYNQNHKIAQITPKTLVIGIDIAKHHHVARAQDYRGMELGSTCFFDNTQEGFSAFINWINQIKESCEMESVITGMEPTGHYWLNSAHILKEKQIKFVTVNPLHVKHSKELDDNSPTKNDVKDAKVIAQLVKDGRYAEPTIPQGVFAELRVAKKLRDLLNVDLQIVQGQVHNWIDRYFPEFFTVFKSWEGKAALHLLKLEALPDELVRYKDEELLEYLRQAVKRSIGIKKIQALKEAANRSIGIRQGAMMAKMELRALIQKYELIQAKFEELDQTLDTLLQDIPGVDQMLEITGIGRDTVAGFFAEVGDLSEYNHPRQITKLAGLSLKENTSGKHKGRTKITKRGRKKLRALLFRASMILVAKNKAFKALHHYYTTRPDNPLKKMQSLIALCNKLIRILFSIGKKQFVFQEEKMLKDIPHMHAFIQEPIAA

SEQ ID NO: 119668 - protein, 400 aa, unidentified
MIDTGDIDVFLGLDVGKGEHHATAVTPAGKKAFDKRLPNTEPKLRELFAKLQAKHGTVLVVVDQPASIGALPLAVARDMGCPVAYLPGLTMRRIADLYPGEAKTDARDAFIIADAPRTMPHTLRAIDGEDETIAELEMIVGFDDDLAGEATRVANRLHGLLTQIHPSLERVLGPRLQHPAVLTLLERFGSPAQIRKAGRRRLVTLLRPKAPRMAERLVDEIFAALDEQTVTVPGTEAAALIVPSLAGSLTAVLDQRKLLAGRIEELLEAHPLSKVLTSMPGVGVRTGARILIEVGDGSTFPTAGHLAAYAGLAPATRSSGSSIRGEQPSRRGNKQLKRAFFLSAFAALADPASRAYYDKKIAQGKHHTQALLCLARRRADVLFAMLRDGTFYEPQPAAAR

SEQ ID NO: 119669 - protein, 352 aa, unidentified
MIVLSADTHKRSHTIAAVAAGTGEFRGEQTIVVGRRGFAELLAWARSFDGERVWALEDCRHVSGSLERFLIEHGERVLRIPTHLTAGARKSARTRGKSDSIDALNVARAALQEGLESFPAAQLAGPELDLRLLVDHRERLVCHRVELNNTLIWHLHDLWPELQLPGGALFSKKWSTRIAGRLARAEQTTRVRIAREELRRLRDLTQSIEQRKHEITALVSEVAPQLVAEPGFGPLIAAKLVGEIAGAERFATSAKLARAAGVAPIPASSGNTRRQRLDSGGNRQINAALHRVIVTRARCHQPTRDYIDRRRREGKTTREAIRCLKRYLARDVWRLLQPPHPVLETTPPTSIS

SEQ ID NO: 119670 - protein, 377 aa, unidentified
MGDYSEAFVGFDTSKLRNAVAIADASRGGEVRFLGEIENTPAATAKLVRKLAAKYERLTFCYEAGPTGYGLHRQIKDLGFECVVVAPSLIPKRPGDKVKTNRRDALSLAKLLRADELTPVWVPDGPHEAMRDLTRARETAMLDLRTKRQHVSAFLLRLGRPYPESRKTWTKAHASWIASQKLEHPQQRLVLEEMMLAIRQAQERLARLEQAVAAAVPEWSLAPVVTALMAMRGMDLVSATTLLAEIGDLSRFQTPTELMAYLGLVPSENSTGDTVKRGPITKAGNRRARRMLVECSWSYQHPPRVGQAKQPKVDAAPPAVREIAWKAQCRLYRRYRALIRKGKRKTVAIVAIARELAGFIWAVARAVMTGRVAAATA

SEQ ID NO: 119671 - protein, 427 aa, unidentified
MQYALPQVLPDVPAGGVCAGIDWATADHAVCVVDMAGRVTDRFSAAHDKAGITTIITRLRRNKVTEVAIERGDGPLVDALLAAGITVVVITSRQVKNLRSRFGAAGAKDDRFDAFVLADTLRTDRARLRPLIPDTPATISLRMAVRARRDLVAHRVAAGNQLRAHLAVAFPAGTRLFHDLDSPISLAFLARFGSQDAAAGLDEQGIGAWLATIAVRGRPAPASELHARLHAAPPGATGADGAAQAGVTAALTATLTALSAQIKALETQIAGQLAAHPDRHIFTSLPRPGTVRAARLLAEIGDCRSRFPDPESLAGLAGVAPVTRQSGNRTAHHFRWAVNRQLRDAICDFAADSRHASPWAAAIYHDARARGKDHPHAVRITARAWSYVIWRCWHDGTAYDPAKHNALEAILARQAAPAGGPAPQENQ

SEQ ID NO: 119672 - protein, 337 aa, unidentified
MSIVGGLDIHRKQLTFDYVEVETGRLERGRIAPADREHLVGWLRRFDGVSGVAFAMEGCTGWRYVAEEMRAAGVQPHLAEPADTSALRGPKRRAKTDKADAQLLRELLAAGRVPECYIPPPQVLEWRALLELYHDLRMEHTGWAQRIHATCFHQGTTALGEAGVIRGSHERLRRIVADQLSVAGRLQVNTALAIMDTLAVHLDRLRRGLLASARHIKGARALMADIYGVGPMTSVALCAWLGGADRFSSSRKAVRFTGLDITVHCSDSKRSPGRLSRQGGGAAVAAVRGGQDLRPWLRPRPHLLRRGQTALRRQPGRAVAGPSHRPPRRAHPGRPRR

SEQ ID NO: 119673 - protein, 400 aa, unidentified
MLSIGIDVSKGKSTVCGMKPGGEIVYAPFEVQHTREGMSELVLLLHNSGEEVRAVLESTGSYHCPVVAALLENGIFVSVVNSLRMKRFCSQSIRKVKTDRIDAMQIALYGLAYWQELQPTKLPEDTYRELQLLARQYYQMTSLLIKAKVDFNAICDQVLPGMQELMNDHAGRHKLSDFVLRYRHTTHILEMGETRFRKDYCKWAEKKGYRNCERMAVLIFATAQNGIPVLPNAPSTQIVITEAIRVLHTVEASRDAILTQMQALAKTLPEYSLVREMPCIGDTLAPRLIAEIGDVRRFHSKRALIAYAGIDAPPYQSGKFCANNRHISKRGNRYLRKTGYEVMQSYVMHKPANDPIFTFIEKKRGEGKSGKLAMVAGLNKFLRVYYGKVTELYRSSSAIE

SEQ ID NO: 119674 - protein, 407 aa, unidentified
MVAVMIGVDPHKGSHTAVAIGQKEEPLGQVRVRASGCQAERLVAWAAEWPERTWAVEGARGLGSLLARQLVAAGERVLDVQPKLAARVRLLAAGDTNKNDPNDAQSVAVAALRSTARQEVKPDEHAAVLKVWSKRHRDLGSARTQVACRLHAVLCELVPGGICKDITAAHASDVLESIDPAGAVEVARCELAAVFVEDLRRIDTQMRDTKRKLTTAVQTSGTTVTQIFGVGPVIAGTVIGYVADVSRFPSQDHFAAYNGTAPIEVSSGSRKIYRLSRRGNRRLNHAVHMAAITQIRYRHSDGRAYYDRKLAEGNTHKEALRCLKRRISNAIFARLQADARRAAAAASAEGPGGQSGNDSVASAAGSHPEYRLFGQATPGPRSTLRPRPDPEINKATTPHAKRVGATS

SEQ ID NO: 119675 - protein, 322 aa, unidentified
MSVSVLGIDVAKQKFDAALLVDGKTKHKTCKNSAEGFETLMLWLEKQGIQKVHVCLEATGNYGEDFAIYLHEAGHTVSIVNPAHIKGFAQSEMIRTNTDKIDAALIAWFCLAIKPDPWTPPSPEIKFLRALVRRVDSLIDMRSQEKNRISTAHESVIVLIKEHIAYLDQEIEKIRRQIADLIGQNPHLKRRKELLDSIPGIGKATIPHILAELDDLEKFNHVREMVAFIGLAPKETLSGSSIKGKPRLCKIGHARLRKALYMPALVSIQCNPAMIDFYNRLKDKGKNGKVIVCAIMRKLVHVIFGVLKSGKKYDPNYKPTFA

SEQ ID NO: 119676 - protein, 329 aa, unidentified
MEIKEVIGIDVSKLTLDCCIHKSQEFKVFNNDSGGIEKLIEWSLKKSKLDKENLLFVLEHTGLYSDHLVRLLDGGDCLMNIVSGLEVKRSLGITRGKDDRTDAKRLALYGYRTREEFSPNKIPSSTLARLKRLMSMRRKLVGQRAGHMATLREQKRVLEEDPLLFWVQEDVINLLSWRISDLEREMDKLIQGDLELKQMLALLTGIKGIGKVTARFMIVHTVGFTSFATWRKFASYCGIAPFPHTSGTSVRGRTRVSRLANREGKALLHQCSLSAVKCNPEMKAYYERRLEIGKSKKSTFNIIRNKLVARACAGVSRGTPYVQLMGHAS

SEQ ID NO: 119677 - protein, 379 aa, unidentified
MESITQNEKVLYVGIDVHKDTYALCCFDFQRNELRDEMIVKGTTKAVISYLEAIKQKDREELLFVCGYEAGPTGYGLCRGLQQAGFGCVVMAPTTMANPEGKRRVKTDRIDARAIARILAYKSYRQVYLPSEAMEALKEYTRARDAKKRMYKKAKQELLSFLLRNGSTYPESGKYWTEKFFTWIKTVQFSEKWMQEAFSEYLAEVYSLKAKIALMDAKIREIAELEIIKDGVDKLVCFGGIDVTTAVETVVEINDFTRFATAAQFVSYIGLCPGQDSSGKSKIMLPLTKAGNRRVRALFCESAKAIKRTNPYGEKSKRIQMRQKNASAEIVEYADKATKRIRTKMKQLEWRGKNYNVASAAGARELACFVWGMMNGRIA

SEQ ID NO: 119678 - protein, 334 aa, unidentified
MKSGVVHIGVDVSKEKLDIYVPAEKEGSRPVTKEVDNNIKGFRELRDLARKAKATVCVEPTGGYELELIAFMHKFNVPVAYTDALRVRQFARAEGNLSKNDTIDAALISRFADKIGARILEPQAVEAVELKRKAKFRQTMVDSRTAMINRLETEVDTEMKVLLKEQIKLVNKIIKKAERLCLDTVKKNERMSGLKKRFMNIGGVGDLTAISILSGLPEIGTLSDGKLNRLVGIAPEERQSGTKEWQRRIWGGRKDVRNALYMAAVASIKWNAALGGYYRKKRAEGHPHKWAIVPTMRKLLSLLNRIARDPSFTPTPEPVSTKQNANVGRKKKVA

SEQ ID NO: 119679 - protein, 372 aa, unidentified
MGHHTEVFVGIDTSKSRNAIAIADGDRGGEVRYLGEFPATEAAIRKLVAKLAAKCCHLTFCYEAGPTGYGLYRLLKSLGHDCLVVAPSLVPKKAGDRVKTNRRDAVSLAKLLRADELTAVWVPDERHEAMRDLSRARQAVKKDLQGKRQQISSLMLRLGRIYPGKTTWGPAHMRWLMSQKLEHREQRIAFEELLEGIRQESERVERLENAIREAVPEWSLAEVVVALQAVRGIDLIAAVGVLAEIGDLSRFQNPRELMGYLGLVPSENSTGDKVKRGGITKAGNGRARRILVEAAWSYRYPPRVSRDKQPKVEAAPRRVREIAWKAQTRLCGRFRSLERKGKRRTVIVTAIARELSAFIWAINRELMPPRQE

SEQ ID NO: 119680 - protein, 416 aa, unidentified
MIMGFTKPIEHFNLQRKKVITMNTLYVGIDVSSKSNVVYLMLPNGDKHSNFSVANSHEGSTQLVKRILSVLTSHSLDTVLIGLEATSVYGDNLVYFLREDATLAPFNRKIHVLNPKQVKKFHDAYNDLPKNDYVDSFVIADCLRFGRINKEVYMGDYRYKALQNLTRARFFAVQNLVKEKQRFMNVLFKKYSTMTQEKVFSDTFSTTALAVYDEFESAEALAYMDLQELTAFIIEKGKNRFPDPDAVAKAIQKAARSSYRLPKTVNDSVNQVLSISITSMKALESQIKEFDKAIAAQMELLPNVLISIPGIGPVYSAGIMAEIGDINRFDNQASLAKYAGLAWTQHQSGNFEAQNTRLIHSGNRFLKYYLCEAAFSLVRCDKEYKAFYHQKYKEVNRYQHKRALSLIHISEPTRRS

SEQ ID NO: 119681 - protein, 353 aa, unidentified
MTNTKYIGMDVHKESISIAVRNAAGKIVMECVIETKASIILQFIDGLRGDLHVTFEEGTWATWLFDLLKPHVSKLVVCDPRKNSRQGNKNDRIDARELSDRLYMNKLSSVYHGGAGVRTLRELARSYLTISKDLARVMSRVKAIYRSWGIPCAGKQVYAPRHRAEWLAKISEVGVLRRAEFYYQQLDALRPLRHQVRRELLAESKKHPATKLLCQIPAIGPIRAALLIALIQTPQRFRSKRPLWKYSGFGIEMHSSADYRKVKGQLERTKKQVSVRGLNRDCNHDLKNLFKSAATIASVKPGPFQEFYAALVAKGMRPEMARLTLARKIATIVLIVWKRGVSFDAQYLKPQTA

SEQ ID NO: 119682 - protein, 483 aa, unidentified
MKPKRVEKNKKASCRPTQNNWHEMNRKQRREMTRKIQSEDLSLEVVHPDAAGIDIGNESHYVAVPPTRDSQPVRRFGCTTSELKEMAVWLKQCAIRTIALQSTGVYWIAVYDILEEAGFEVYLVNARETKNLPGRKSDVQESQWLMKLHTYGLLRNSFRPPQEIRTMRTYWRQRNDLVRTAGRHVQRMQKALTQMNIQLANVLSDVSGMTGQAIVKAILAGERDPYQLAALRNWRVKASEEEIARSLEGNWQNDLLFVLQQEEDGYEFCQKQILECDQRLQQHLQRLEDRSHGAALPEEKRKERLRKKKKGNAPQFDLRVELFRMTGTDLTQIDGIDVTTTMTILSEAGWDMSKWKTEHHFVSWLRLCPDNRISGDKIIGKGRLPTNNRVTNALRMAASTLRLSNTYLGAQFRRLRTKLGAPVAIKAMAAKLARLVYRMLRYGITFVDRGAEFYDAQHRKLQINYLKRKAANLGFQIIEATAE

SEQ ID NO: 119683 - protein, 324 aa, unidentified
MNAEERPVLRKKLRRTEMMTFFEKLPPTEVAIEACGSSHHWARLLRTFGHEVRLIAPQLSKPYVKRGKNDAADAEGLCEAMSRPTMRFVPVKSAERQSVLVLHRSRELLVRQRTMLSNALRGHLAELGIVSAKGRNGTGELLRIIADGADNRVPPAVRGILDVLARQYRAIGTEILSIDKNILALHRSCEASRRLAEIPGIGPIVATALVAEIGDWKTFSSGRSLSAWIGLVPKQHTTGGKDRLGHITKQGNRYLRWLLVVGAMAVIRYAQKHGTKNRPWLARLMERRPTKVAAVALANKITRMAWAIMVRGERYKEPTLLMAA

SEQ ID NO: 119684 - protein, 364 aa, unidentified
MNAMIAENTANEEAYWVGADVAKQTFDAALVSPGQHYPSTPLRDVPVATFARSAEGVNEFLSWLAAQLRGVSSPVSVRMVMEATGSYSVELAGWLNEKYPALAPAIANPRQTSAYLDSMQLRNKTDRVEARALAFYGAERRPAPYETLSPERLELRALSRHRDALVGEKVREHNRGEEPFVSKLLASLHKSRLAQLKRDIAKLEARIKDLIEKTPELRRDAKLLRSIPGVAFVTSMVVLAELGDLRRFSRARQVTAFAGLTPRAKQSGTSVNAPAILCKRGNPRIRQALYMAAMVAVRLRGPLKDFYDRLVAKGMNGKAALCAVMRKMLTMMRAILIHETPYNPLWKKQGTKQPHPVENAAQNA

SEQ ID NO: 119685 - protein, 310 aa, unidentified
MDSITVGIDVSKDRLDIAVRPSGEVFAIERNPAGLEQLTLRLGALSPNLVALEASGGFETVVAAALAAARLPVVVVNPAQIRAFAKAIGQRAKTDPIDAVVIAHFAEATRPEPRPMPDEATRLLADLVARRRQILEMMVAERQREKRVTVPHLRKSIMRLLKVLERELTSVDTDINDAVRGSPAWREKEDLLASVPGVGPTIARTLIAELPELGQLSRRQVAALAGLAPFTRQSGQWRGKSFIGGGRTSVRTALFMGAMVAKKYNPVLRTFFNRLVAAGKPKMIALIAVARKLLTMLNAILRDRRPWQTA

SEQ ID NO: 119686 - protein, 360 aa, unidentified
MDIAEGTTGRFVIGGVDTHKDLHVAAVVDDHDRLLGSQSFPTTRHGYKQMLAWMRSFGPVQRVGVEATGTYGAGLLRYLQKASVEVLEVTTPDKGDRRKRGKNDDLDAQNAAHAAFTGRRTVTPKSRDGMIEALRVLKACRKTAVAARRVALQMIHNTVVCAPDDLRDQLRKLTRMELIRTLAAWRPDMTDFRDVVSAYRITLRSLARRYLELHDEIGDLDGMIGAIVDDLAPDLVAQNCIGHESAAQLLLTAGDNSERLHSEASFAALCGVNPVPASSGKTTRHRLNRGGDRAANSALHIIAIGRLRTEPRTKAYVAKRIAEGHSKLEAIRCVKRYIAREVFSLISQRRREINQLPVAA

SEQ ID NO: 119687 - protein, 370 aa, unidentified
MRENITLFVGLDTHKDSISVAYAESGSPAPPVFVGPVGSRMADVGRLVRRLRSKAAKLVFVYEAGPTGYGLYRHLTAMGHECVVVAPSLVPRRPGDRVKTDRRDAVALARLLRSGDLIPIRVPSIEDEALRDLCRARDATLVTLRAAKLRLKSFLLRHGLQYTGRARWGDAHRRYLARIVCPTPAQQIVFQESLGAVDEQVDRLARIEGELAELAPPWHLYPVVRAIQALRGVQELVALTVVTEIGDLTRFDNPRRLAAFVGLIPSESSSGASRHQGGITKTGNGRARRALVEAAWAYRYPAKVSELIRKRVETLPKAVQDIAWKAQVRLCRRFRRLASHGKHPNVAVTAIAREILAFMWAIAKEVTPQA

SEQ ID NO: 119688 - protein, 324 aa, unidentified
MEKQGSKELYVGIDVSKKTLDIAIRQSDEVWQVNNDPEGIAQLIGQLKTLDPRLIIMEATGGYETNAALELGVAGFAVAIINPRQARDFAKSMGRLAKTDKIDALMLARFGEAIRPEPRELPNEQSVKLQALLVRRRQVIEMLVAEKNRVKMTHPTMKPRVDEHIEWLEKELEDLDNDLGNMLHLSPIWREKEELFRSIPGVGRVLAVTLLAELPELGQLNRKKIAALVGVAPFNCDSGKMHGKRAIWGGRACVRNSLYMATLAATRWNPIIMDYYHHMKELGKPSKVALVACMRKLLCILNAMAHTNQSWSSSLASPKVPAQA

SEQ ID NO: 119689 - protein, 387 aa, unidentified
MIYYIGIDISKYKHDFCIISNTGEVIVENSSFENNKKGFQSLLELLKPYNKSEVHIAFEATGHYSKNLELFLIDQGYSFMKMNPLVIHQFLKARSLRRTKTDKADSLTIANYLMSVPYKPNSDLLYNIFTLKSLCRSREQLIKERSKYQVLLTNQLDLTFPELKQFLNNRISATLLFILEKYTNTDHISLMRDYDSIKNISRGKFSYAKFAKLKELAKNSIGHHDENTDLLISTYTSIIKTFNEKIDPIEKQISTIIKELNPKMLTIPGLGEISAAAILSEYGDINNFSSPNKMLAFAGLEPSIIQSGTIENNGKMVKHGSGHLRYSIMNTTMIILRYSPTFYDYYLKKRSEGKCHRVALSHVCKKLLRIIYTLEKNNIDFDPSLLK

SEQ ID NO: 119690 - protein, 345 aa, unidentified
MGVIIGVDPHKASCTAAVLDERGELVDQQRFASTRTGSRALGRWAKRWPERRWAVEGASGLGRRLAQQLVGDGEPVVDVPAKLAARVRLLSAGHGRKSDTHDAVSVAVAALGARRLGQVRLEDHAAVLRLLSDRRDDLVRQRTRTLNRLHVLLCDLLPGGAKRSLDADTAAALLRRLRPATAPARTRRQLAVDLVADLRALDRRITAVEERLRHAVTQSATTLIELFGVGPILAAKLLGEVGDVRRFATKHRFAAHNGTAPIEASSGEVVRHRLSRAGNRKLNHALHLIAIVQIRHPTAGQAYYRRKLAEGKSRKEALRCLKRRLSDAVYRQHLADQHQPVQAQA

SEQ ID NO: 119691 - protein, 383 aa, unidentified
MNTIVAIDVAKDASSFCVMGEKKSHVSGFSMTKRGFEQLLKVTGKIRNPAYFMESTGRYHLTLLNYLVSHRRDAFVVNPILVKNFSKANTLRKTKTDKIDARLIAEFAQQHAHSLKKAEYGLTEEIRSLARRREQIAEEIAKVKTQVKADLTVAFPEILSLNVFTAGMLRLLSEYASPRALLAAPGNVISGLLREQGKGRSCTVSVDQVLALAKESIGIESYGTLARDSVKNLISVQNREKAVTEALLKYIREHQSKEQDILISVPGIGEITSAHFLAEVGDITKYPRYQNLIAYCGTDPSLYESGSIQKRGHITKRGNSSLRKYVYLMASGVRTYSPYFRAYYDKKREEGFPHRKAMVALMNKLLRTMFALLTKGEMYNIPE

SEQ ID NO: 119692 - protein, 348 aa, unidentified
MGKIVKQVVGIDVAQKEIVVSMGRMFEDWAIQLHAHKAFANNKKGFEAMLLWVKKHCQETLPISFAMEATGVYHQSLAYFLDEKNYPTSVLLPNKISNYIRTLDVKTITDKSCSEAIARFGLERKLEVWKKPKDIYRNIKHVTRERDQIIEERTMAKNQLHAEETEAYPNKRSVARIKERIKLLNKQEKEIKGDIALLVAKDPEVKKIVNRISSLPGIALLTAAIILAETNGFELIRNKRQLASYAGFDIKEKQSGTSIKGKSRISKKGNKHLRKAMHLPALSAIRHDERFKAVFVRLVSRHGVKMKAAVAVQRKLLEMTYTLYKTGTTYEKDYFEKSIKEDKQKEVA

SEQ ID NO: 119693 - protein, 348 aa, unidentified
MRFYTGQHRYYCGIDLHARTMYICIQEHASGEVVLHRNLRCDPELFLKTIAPYRDDLVVATECIFCWYWLADLCAREGITFVLGHALYMKAIHGGKAKNDKIDSRKITVLLRAGALPQAYVYPPGMRATRDLLRRRLFFVRKRGELFAHIRITFHQYNLPIPGGQLLYQCNRAKVPDAFCDPIVRASVEADLELAGHYDGLIRSIERTILEQAKVDDLSTLILLQTIPGVGPILSLTLLYEIHDITRFPRVQDFVSYARLVKSQKSSAGKVLGTSGAKIGNAHLKWAFSEAAVLFLRKNPRGQKYLDRLRAKHGKGKALSILAARIGRASYFMLRRNTAFDPDRFMST

SEQ ID NO: 119694 - protein, 347 aa, unidentified
MNYSGFIGIDVSKKTLDASIFVAGEVIDRFPHVQVRNDKQGFRDLLRWAREQGMKPKDTLFGLEFTGYYSDALEQFLTGKKLSYAMLPTTAVKHYQRGTRDKNDKTDSAKIADYLFRFNGTECIKLRVLPSKAMQELKALKSERKFYVQQRVACENRQKVAKSKQEQKHLQKAIDLFSEQIGLIEQQMAEIVTSDEEIYLTYTRLLTIPGIGPVNAINTIANTQNFTAFETARQYAKYVGVAPSEHSSGTSVRWRRRPSPHADLQAKADLSMAALRAVEFSFEMSQCYEQKLGGRPDDKDVQRKALNAIKFKLIRQMFSVAKQHKNFTVMQQRQVQADTHSTEERVN

SEQ ID NO: 119695 - protein, 378 aa, unidentified
MYRIIKIGMDVHSTNYTLCAMEPVIGAEDRIFANIKVTPDYKNVLMFIENLKLKLGLNDTYDIECGYEAGCLGYSLYNQLTAAGVRCVILAPTTMLTQQGQRIKTDARDAVMIAQCLSYGGYHPVYIPTEEDDSVKEYLRMRDDHKLALKKVKQQINAFCLRHGHRYEKTKWTIAHLKWLKQLELSALYRETLDEYMASYDEQTAKIERFDKRIEELASQERYQEKVKKLGCFLGIKTHTALSLIVETGDFERFAKGNVYAAYLGLAPGERSSSDSINRLGITKAGNQHLRLLLIEASGGICKGAVGHKSKDLRQRQNGNPADVIAYADKANTRLRSRYYKFIRHGKKRNVAVAAIARELACFIWGMMTDHIQMQKAA

SEQ ID NO: 119696 - protein, 392 aa, unidentified
MLFIGIDAASNNHEAAITTLHGEVLTEPFTIPNNISGFKKLRSEIYSHTEHHNNVRIGIEETGIYHKNITEFLALCGFTVHTINAVLTSHSRKSQSVRLTKTDKIDALSICRYLEFNFKRLNSYTPSLYINEELKSLSRARFDVQNKLSKAKTEYTRLIDLSFPEFKQHFNQHSKWSYKLLSQYPSADKISRAHLKTLIKIIAIKGDRTAAANQLKSIAKNSIGSQSVTNELLLTNVLEDIKHFTSQAKRFEKSISKIVEEHYENILSIPGIGNITAGLIIGEIGDISRFKSSSALLAYAGLDPIVHQSGKFKATKVNISKRGSAYLRTAVFTSTRVACVSPHIPDNKFRTKYYKTLNQGKHDHSAIYHAYKNMVNVIFALLKSGDFYKFDY

SEQ ID NO: 119697 - protein, 595 aa, unidentified
MLPQSPSASQAPRRFGVGIDTSRYGHYAAFLNEQVQPAAAELQFPESAAGYALLRGRLDSLTRRHGPAHFVVRLDAAGQYADNLRHFLHGLASPAAGAVGAAPFSLTLSCGDPQRNKNYRAALFGSKKSDPVEARAAARFALTERPSTDIPLSQELRILRQVAGRLQAVVRQRTRLLNQFHHLLALTFPELALLTKELAAGWVLELVHRYPTAPLLAAAPPTDLGNIAYLPDRHIAPLLEHARASVASLAGATVAELVREQVRQLRDSGARQKRLENLLVTAYRALPEANHLDSIPGFGAVTAAVLTACTVAIERFATPAKYVAFFGVLPVEVASGVERDGQARAPRRWAMSRRGNDLVRRYLWMAALSAAQCNPAVKALYARVVAKHPQHKAVAVGHAMRKLLHLAFAVWKTGRPFDRDHYPWQTPAHVESSDNGMSPAPETSDNTGSQEGQAAGHKPDRMPAQPVVTAARTDTLADAAAVGEGTYLDFAHLKRQLPLARVLDQLGLTARLRGSGPQRRCACPLHRGDARGRTFSVNLDANVWQCFAQECGRKGDVIDLWAAVQGLSLRAAALELVQTFGLEPAPCGGTEKRHG

SEQ ID NO: 119698 - protein, 284 aa, unidentified
MAHIEDQRGAKPVHYGEIKTTKAAITKLARQYQSKYPHTTLHFVYEAGSCGYWIYRLLTSLGHCCYVVSPSLIPKKPRDKVKNDKRDALKLTKLLEDEELTPIYVPEPEDEAIRDLSRARETAMKDLKNAKYQLESLFLRNNISCKVNDNWSLQHLRWLTELILPHPSQQIVLQEMIQIITERIQREKRLANELFHQVKSWRFYPVVKALQAIRGVRLLIATGIIAELGDLRRFDHPRKLMSYLGFVSKEHSSGDNRRLGSITKCGNGRERRLLVQGMCIVIKL

SEQ ID NO: 119699 - protein, 332 aa, unidentified
MITNLQLGADVSEQWFDVCALRGKKPPVMRFNNNEEGYAAFLAWANAFEARNIHIAMEHTGGCETAFALFCHAKNLKVSLLDGFQVARYRESGGRAKAKTDQQDAKLIAKFLKERRPALWSPHPEEYRILTEFVRHRQDLVDSKKAWICRSRKASPSPLVAAQRDCQIAVYDEQLKALQEAILEHIKIHPKIQADVKRLCTLPGVAEVSAIRILAEMGPVGGYKTPRELALFAGLCPIADQSGKSKGKGVFFPYGNRQLRNALYMPVIVAMREKSALFQFTERIRANGAKSNKTVITAAMRKLIQVIHGMLAHGIDFDHARFLKDMKKPKQA

SEQ ID NO: 119700 - protein, 419 aa, unidentified
MKLFVGLDVSKTKLDVCFLSRDDDYNTVLYQTTVGNSDAGASHIKQSILQFHEELSFDKIVVGMEATGLYSTHPSLYFSQDPDLQLINVQTVIENPRVIHRFSKVWTDEKNDTLDAQLIAEFLSTGKYNAALPRNDQYVALLRLTRARYQLVHQMTEAQQHYVENLYYKCNTLTTELKNENINTSVFSSTMVQLMTGDITMSSIHSMETEELANLLQKYGRQRFKDPEKLAMVIKKSIRDSYRLGRVAQDSIDINLGIQMRIIRAFEQEIKTVDKAIKDIMETLPEATCLMSIPGIGPVYAAGILAEVGQIDRFDHEGKLAKYAGLYWPKHQSGNFQKENTPIAKSGNRYLRYYLVEAANSVRRFIPEYKAYYDKKYNEVPKVQHKRALVLTARKFVRLVFALLSEHQLYVARSEAIES

SEQ ID NO: 119701 - protein, 369 aa, unidentified
MTDLTLFVGLDVHKKTIAVAVIEGVAGAAVRFYGTIANTPETVRTLCRKLSRDGQQLYFCYEAGPCGYGVQRRLTRLGHRCDVVAPALIPRKVGDRVKTDRRDAMMLAQTLRAGQLTAVWVPDEAHEAMRDLVRLRAQAMRDLRKARQQLLSFLLRHGRNSPYGHWTKMHRRWLGELVFAHPAQHLALEEMLQRIERAEALCDRLKQAILELVPQWSLAPVVQAIQALRGVSLIVAAAIVAEVGCFGRFESPRALMAYLGLNPSEHSSGATVRRGAITKTGNTLARTCLVEAAWTYRFPPRVSQIIRDRLKELPEPIRAVAWKAQVRLSARYRKLSAAGKPGPKVVVAIARELVGFIWAIARMVEPKFA

SEQ ID NO: 119702 - protein, 350 aa, unidentified
MSQNLNSAVAVIGIDIGKNSFHVVGLDDRGAIVLRQKWSRGQIEARLANMPPCLVGMEACVGAHHLSRKLKALGHDARLMPAKYVRPYSKGQKNDFRDAEAIAEAVQRPTMKFVATKTADQLDLQALHRVRERLVSQRTGIINQIRAFLLERGIAVRQGQRFLRAELPRILAAPPEVLSARMVRVISDLAEDWRRLDQRIDCLSSEIAVLARQDAGCERLMSVPGIGPIISSAMVAAIGTGDAFAKGRDFAAWLGLVPKQISTGDRTILGKISKRGNRYLRVLFVQAAWVVLIKPMSWERHGLKHWIEAARKRLHRNVLAIALANKLARIAWGVLAGSGRTFEASKLQAA

SEQ ID NO: 119703 - protein, 403 aa, unidentified
MAVVMIGIDPHKGSHTAVAVDPGESQLGQIRVRASSSQVERLMSWAQSWPDRVWAIEGAGGLGRLLAQQLLAAGERVVDVQPKLAARVRLLNTGAVNKNDPNDARSVAVAALRSPDVRVVAAEDHASVMKLWARRHRDLSRTRNRIVCRLHAVLCDLVAGGFPKQISAIQAAQVLAGIDALDAMSAARLELAQELLEDLRRVDEQRRAAKRRLTKIVAASATSVSEVYGVGPVVAATVIGDVGSVARFPTRDHFAAYNGTAPIEASSGNRKIHRLSRRGNRHLNHAIHMAAIAQIAHRGTTGRTYYERKIAEGMAPKSALRALKRKISDTLYACMIADAKRAARRSEQGGPGGQTGNDSASSVTGSHPEPALRKSHSRTATNPTTRNAEKTTTASARTRRRAS

SEQ ID NO: 119704 - protein, 385 aa, unidentified
MANQNDLSRSLVALEQNNTIIAVIEMSLNYWLIAGIVPGVDRHPLKKLNVDEKALLQLLRQWRDEAAKAGHAITRMAVAFEAGRDGFWLARWLRARGVDAHVIHPTSVAVPREHRRAKTDRLDTELLKRAFLGWLRGEPEHCRMAAIPSLQEEDAKRPTRERENLVGERTRIINRMKACLVRFGIRNFKPTLSKAPERLNELCTPEGDLLPPNTLAELRRDMARLRFIIDQINEIEAARLLRLEQARVEGPTAMVRLLARVIGVGIETADMLVHEILSRDLRDRRAVARYAGLTGAPDESGSKRREKGLAKAGNARVRRGMIQLAWRFLLHQKDSALTQWYRARTASAGRKRKTMIVALARKLLIALWRLATTGEVPTRVVLRAA

SEQ ID NO: 119705 - protein, 307 aa, unidentified
MSATSDRVVIGMDPHKRSATIEVMAGDETVVGAGRFDTGRGGYAAMRKYAMQWPNRVWAIEGCQGIGRHIANRLLADGEQVVDVPPKLSARARVFATGQGRKTDATDAHSVALVGTRMAGLRPVVNDEQLALLRILVDRRRSLGEDHTRMVSQLHQLLLELIPGGAKNNRAHFASWNGTAPIDASSGEQVRHRLSRAGNRQINRVLHIMATVQLRNPTEGRAYFDRKKASGKTSMEAMRALKRRLSDIVYRRMINDAAAAVAAGPGGHRGTTTDSSVTNSHPQAGSSEKSLPGPAATQLRTPLATVS

SEQ ID NO: 119706 - protein, 358 aa, unidentified
MDNVKSSKLDCTGQPIYVGLDVHKKSWSVSVFSRYGEYKSFTQPPQVDTLVNYLRHHFPGGEYHSVYEAGYCGFWIHDQLKERGINCTVVNPADVPTKQKEHQHKRDRIDCRKLARNLCHGEMEGIYIPSPTMREDRTLVRTRHALVKKRTRCKNQIKGMLLFYGLHLTDEQTFAPWSGSFIKWIESIRMERDSGNTALKAHLEELAYLRQLINKVNQEVLKLARSEEYAVPVKVLKSAPGISTLSAMILLTELCDMARFASLDTLCSYVGLIPAIKSSGETEYVRGITPRRNAYLRWILIEASWVAVRKDPAMMMAFNEYCKRMRKNKAIVKIARKLLNRIRYILKHQTPYVPCVAK

SEQ ID NO: 119707 - protein, 370 aa, unidentified
MEVLYPRCAGLEVHKATVVASARLATGREVVVEVRPFATTTAGLLLLSAWLAECGCTHVAMEATGVSWKPVWHILADGEVTLVLANAAHVQNVPGRKTDVADATWLAELLAHGLVRPSFVPDAPTQALRALLRTRKQLVRERAGHVQRLQKTLEDADLKLTSVLSNVMGMSGRAIIEALIAGESDPAILAALAHRSVKAPPEKLAEALRGRVTPQHRFLLRLHLRQIDALEAAITDIDQEVEAELGPFRAAVRLLSSIPGVSTLSAEVIVAEIGTAMRRFPTAGHLLSWAGLCPRNDESAGKRRSTRLRRGARWLKTTLVQCARAASRKRASSLQAQFQRLRRRRGPKKAVCAVAASILTAAYHTRCPKF

SEQ ID NO: 119708 - protein, 352 aa, unidentified
MNQIAVVGVDLAKAVIVVCAGDREGRVLFYKQLSFSGFAQWAATIPPCTFGMEACGSSHHWGRRLTSFGHTARLMAAEFVKPFRKSQGAKNDRNDAQAILTAVRQPDMRFVGVKSVDQQAVLAWHCMRRGWSDERTALINRMRGLLAEFGVWLAQSPEALKRCLPRLLEGETLPSRMRSLLTVAREKLCDLEKRIETCELEIRAHAQQSEEARRIEAIIGVGPMTASAVTATISNACDFKNGRQMAAWLGLVPKQSSSGGKTMLGKITKRGDTYLRGLLTGGARSALISAMRRPPERRTRLQHWMLEARVRLGFCKTLVAIANKHARMIWAILAKGEAYDPDAWKRYSPQGA

SEQ ID NO: 119709 - protein, 409 aa, unidentified
MRYYVGVDWADQAHAVWIVDESGTKVAARTVPHTAEGLNEWGRELDQWRAQGIDLWAAIERPDGRVVDFLLDHDVVVYPVNPKALDRARDRFRQSGAKSDAFDARVLADFLRTDHAHLQALQPSSDAARELKLLTEDCQRQIRQQTRLLNQLTATLKAYYPRALEVAELSTALARAFLQTYPTPAAAAALTERQWTRWARTHRLSAARTRELWDILQQPQLPVPAHVVRAKARLMLTLVAQLTPVIVAVDDYREAIEHFFASIPAAQWVRTLPIGKHGIIAPTLWARLGDAPRRWQSFRHLQAHAGAVPVTKRSGTQRIVHFRFACDKSLRYVVDHVAFLSLNSSEWARAYYDQQRSRGHSHRQALRALGAKWLKIIFVMWHRQIPYDEQHHLASMTRHQLRQRQRKVA

SEQ ID NO: 119710 - protein, 333 aa, unidentified
MPRRARKPKDEYNRMQTQLRYLGVDVSKDTLVVAFERNRWQFPNSKEGYAKLIGQLQKQAGTVHVVCEATGPYHLPMCLALQEAGLPVTVANPAWIKYFGRSEGVLAKSDPIDATLIERYANARRPAADAPFRREQIGLTELVNHRAQLVDSKRALLNMRAQVLDRTAAKEIDRAIAALERCIEAAERRMKEKIEADPIWSAKLGVLTSVEGVGFITATVLLAKMPELGLLNRAQCAALAGLAPYDNESGTFTGQRSICGGRSEVRRALYMAAVSAARHNAVLRGFYERLIQAKKPFKVAITAVMRKLLVYLNSLLKAAAMDRGSDLSIIAPV

SEQ ID NO: 119711 - protein, 482 aa, unidentified
MKKTNIYQNQSQELLHLFKDAGSNNKVMCVPMDYAKNDHLVMFCNGNGDILRKPFSVKNTQAGIAYISDQVTRSCRKRGIKKKHVFLGGEDANSFAKNFVSSLRGKGFLVANVNAHDAKKQRGNVQASTDRIDLMGIASMLLNCRANCSPAQSGIYRNLRTLVRHRRRLVQMLTEVKNRVHGIVDELFPGFLNEKNSGIVPFTQSSLYLMEDRFSPKQIRRRKRQKLIEILKRFGTSNAEKTAAKLQQYAAKVLHAPVEYVDTMQVSLAQHVKHIRCLKESVSQMEKEIALNLAQTQGAFLTSVRGIGLVLAAGVTAEIGDPNQQKALNNLASYAGIIPRVKQTGGLEGRTYTGPVAKRCNRILKDYVVKSAYHIGLHGPPDLMADYKRRDASGQHADFGIGRRYLRLAIGLMRTSQVYHPPHLLKGDCTSEQSASYYLMSWSYLRDKWKRVGAHEAAFAKNRPLGIWRQFVQGFYGIKLKL

SEQ ID NO: 119712 - protein, 365 aa, unidentified
MARSVVTEDRAKKEAPYIMLHVGLDLSRKRVDVCLISDQGELVDELTAPFDDDGLCRLTDRVSAKHKGPVRAVVESMNGARFVHDTLEAQGWEVLVADAQRVKGLAPLACKTDKIDARVLAELSFRDLVPAIWLPDPQVRRERELARFRLHLVRHRSSLKNRIHSTLITFGKPCPVSDLFGVAGRKLLERLEVPAPWRENVEATVILVDQLDRQIDAIASELKHVGADHPYVPLLMTAPGVGWLVGFSIACEIGDINRFCSPSKLCGYTGLCPRVIQSGETDRRGPISKHGPKYLRWALFEAALNACDHPLYKERYERTKKRLGRQRGPKIAQIELSRKLTEAIWHMLTRNQPFAPAGAPIRLAA

SEQ ID NO: 119713 - protein, 316 aa, unidentified
MPPKREVHVNVGIDIGKRQLDVFIRERELHFSVANDPKGIRHLLGRLARYHLARVVLEATGRREYDVVLALAERGWPVIVCQPIKVRRYAAARGTLAKTDKLDAALLADYAAVMQPEVRPVAAGKLRLLRDLVARHRQLMTMRTMELNRLDVMPKGLLADIRRHVRHLDAQVAKLDQRLTELIEAIDEWRDKRTVLLSVPGVGPQVVATLLADLPELGTLTNKQIAALAGLAPFNRDSGTFRGRRRIRGGRASVRTVLFMGMMSAIQCNPKFKAMYANMVAAGKHKKVALTACMRKMITVLNAMLRDGKPWSLSNA

SEQ ID NO: 119714 - protein, 313 aa, unidentified
MQQSFVGIDISKNSLDVHVLPEGTSYSFGNEPQKVKALIRKLKKLKPTLIVMEATGGYEISLAVELSEAKLNTAVVNPRQVRDYARAIGKLAKTDAVDAYVIARFARDVRPEAREQLNLKERQLKELVMRRQQLIDMRTAEKNRLSRAYTSQVQEELRCHIAELTARIKAIDEQLHNEIKNDPNWNKKLKIITSVPGIGANTAHSLLMCLPELGTLNRRQIAALVGVAPMNRDSGMMRGKRTIAGGRAAVRKMLHMPTLSAVTRWNKRLKTFYYHLRQQGKKHRVALTACMRKLVIMLNSMLKNNQPYSENYC

SEQ ID NO: 119715 - protein, 368 aa, unidentified
MPVVVTRISDDRVVVAVDPHKASWTAAAVDGSLQPLATVRVPVSRDGYRALRRFAHRWPHARWAIEGAAGVGAPLTTLLRTDGIEVIDVPAKLAARVRVLSSGHGRKNDDADALSVGIAALTSHALGTAEIDAATTALRAVVEHRDDLVKTRTQTVNRLHVVLTRLVLAGARRHLSADHAAELLRGVRPRDPAAKTLRALAMDLVSEVRQLDRRIAKAANDIQMAVSASGTTLTELHGLGALTAGKILGRVGDVSRFRSAAAFASYTGTAPIEVSSGEVVRHRLSRAGDRQLNFCLHVMAIAQVRHDTPGRAYYLRKRSEGKNHNEAMRCLKRRLSDIVYRQLIGDAVKQKADPGGHSGAALSSRAAS

SEQ ID NO: 119716 - protein, 436 aa, unidentified
MAKNRAYRATDVKKVSLDEVFGRGPAGEVTVGLDVGKHEVLAVLRWADGSFLRPWKIKNPSEVRALVKLLENVAKERPLRVAMESTGTYGDALRQALTDAKLNVHRVSGKATHDYAEIFDGVPSQHDGKDAAIIAELAALGKSWPWPYRPKTKQDAEMAYWVDWLDAQQSIEMLWLGRLEPLLARHWPEATRLLELTSVTLLEALAHYGGPAKLAADKAAAKRLADWGGPMLKTTKIEKVLQSAVETVGVRQTSQDIRRMQQYATMALAAYRQTQQARRMLTRLAKGNETIRRQSKAVGTVTACVLWVVLGDPKDYHCGEAYRKAMGLNLKEYSSGLHKGKLKISKRGPSIARRWLYFAAMRTTQNRHVRPWYEAKKAKDADRGTGALIGIARKLALALYSVGVRDEPFEAWRLFPGRSIPRRKLQAQEITITCGS

SEQ ID NO: 119717 - protein, 456 aa, unidentified
MSRKRRSSKKTGTPVLHSLNPNAAGVDIGATEIYIAVPADRDAQPVRHFSTFTEDLHAAADWLKSCNIETVAMESTGVYWIPFFQILEARGLQVFLVNAHHVKNVPGRKSDVSDCQWLQYLHSVGLLRGSFRPEQEVCTVRSILRHRDGLVQMASSHVQHIQKALDQMNLQLHHVISDITGMTGLAIIEAILAGERNPQTLAKLRDGRIKATESTIAKSLVGDYRREHLFTLGQSLAAYRHYQKLIGACDKEIEQYLETFESKADPPEDPKWESQDGQKTRDGKPTFDLQSHLYRIFGVDLTQIPGVHTLTTQTLLAEIGPDLSRFANAAAFTSWLGLCPDNRISGGKILSVKTRKVKNRAATALRMAAQSLYRSQSYLGHYFRRMRAKLGAPKAITAAAHKLARVIYHMLTTRQAYDETICVQNELQNRQRLEARLRKQARDLGLEIIPAKTGAV

SEQ ID NO: 119718 - protein, 367 aa, unidentified
MKKINTVTAKKDEKVAIQKLTIGLDLGDRWSWYCVLDEMGEVVLEQKVATTPKAMKEVFGGMPRSRLALETGTHSPWVSRVLSELGHEVIVAHARNVRLIGESRKKDDRLDARMLARLVRIDPKLLAPVKHRSAQAQADLMAIRARAGLVRARTSLINTARGVTKSYGERLRGCNPRNMNPVKAQELSPELQAALEPLLGAIESLSERIVEYNERIEQIAKQSYPEVARLKQVKGVGTLIALTYVLTLEDAHRFSKSRDAGCYVGLQPGRRNSGQSEPQLHISKEGDRYLRTLLVQGAHHILGPFGADSDLRRWGLKLAERGGKNGKKRAVIAVARKLAVLLHRLWVSGEAYEPLRNQRGVVLPVAA

SEQ ID NO: 119719 - protein, 433 aa, unidentified
MLKLNYMSTLFVGIDVSSKTNAVYAMDFEENKYISSSFGNNQPGADQLENMIAECMQKHKNLDTVLIVLESTSVYSVHISNFLSASEVLMPYRPYVFCVNPKAASNYRKSYIGMEKTDPTDAYLIADFGRVGRTKKLEPWRGGQFISLKRLTRHRMHLSECITREKTYMVSNLYLKFSELQLLEGDDKPFGSLYGATSSAVLTEFLSPQEIIDMPEEELLTFLAGKSRNRISDLSKTSELLRKAARDSYRLDKCMYEPLSISLASSFNCIHAYQKEIKLIEQAIEKCINGMNPNALLILQSIPGIGPIWASGILSEIGDITVFHSSDALAKYAGLYWPKGDSGDFTSEDNKMSKAGNPYLRCYLGEAANSVRKHIPEYADFYARKYAEVTKHQHKRALALTSRKLVRLVFGLLVKNQLYTGEKLDTEYNIESN

SEQ ID NO: 119720 - protein, 365 aa, unidentified
MVNHIFVGIDLGDKNSVARIALNREKTERIGFVNNRRGRVRLFEELRRRAEKVDEAQIVLAYEASSCGFILRDEAEAQGMKCWVLAPTKMEKSVEQRKHKNDDRDADDVVEKLRGHILAGNRLPTVWIPDTHMRDDRELVRSRMDVVEKQTQLKTQIQMLIKRHGLEKPSGSGVGWTIRYRRWLEALSESDRLGNGTRTALRSLLRQLSFLEAEIERMEEPIRELAQQPRHKPIIEELTQEHGVGLITAMVYRTEIGYAGRFRRGRRVGKFVGLTPTSHESGQQQDRKGHISRQGPPRLRKILCQASWVHVQRDPQAKRFYQQLVSRNPKKKKIAIVAVMRRLAVRLWHRMRAAELGMMAVTEMN

SEQ ID NO: 119721 - protein, 431 aa, unidentified
MKNRSNQRLEEITAGTLIVGVDVAKSVHWARFVDYRGVEYGQALSFQSNRRGFENIVARIYEIRNMKILRYPIETVKIGMEPTGHYWKSLANYLMKTGFRVVGVNPYHTKKSKELDDNSPTKNDKKDAITIARLVKDGRFFDPYLPQEVYGELRGLTNARVSVVKRGSAVKNTITAILDEYFPEIWTAFKKPLKGKASRQILRSCPFPALILSMGEAGVLAEIKKAVKKTVGMKKVRQLVAATEDSIGVQYGLDAAKMRLGWLLDELELAEKQLCEVEQAMEAALDKTGFAAQLLGIKGIGVVTAASFLGEVGDPLRFQNARQIANYAGYNLVEDSSGKSKSGTRISKRGRKQLRSLLYQMAFTMVGTNAEMKMLYQYLITRKTNPLKKKQALVVVSKKIITVIYSLLKKRTAYQPELVFGAARQDMLLAA

SEQ ID NO: 119722 - protein, 345 aa, unidentified
MEYYAGIDVSLESASLCVVDATGRIVREAKLASEPETLIGWFRGLGLAMTRIGLEAGPLSQWLYAGMRDAGLTVELLETRHVRDAFKAMPVKTDRNDARGIAQLMRLGWFRPVHCKSLPAQEVRALLTARKLLQTKNHDVEMSLRGVLRGFGLKVGPTTPRNFPGRIRELVAGNTTLSTVAEALLAARSTLFEQWQKLEKQLRCMAREDRRVRLLMTAPGVGTIVALTYASAIDDPGRFRSSKAIGAHFGLTPRKYQSGETDVTGRISKIGDGSVRTALYEAANVILTRPVKGSTLKSWGMRLAARAGMRKAKVALARKLAVVLHRMLADGTSFLADKAAVAVAR

SEQ ID NO: 119723 - protein, 357 aa, unidentified
MGKSIQKLSSVTRVGLDLAKRVFQVHAVDSNGEVVVTRKLARGQLVGFFSELPRCVVAMEACPSAHHWGRQLLALGFEVRLIPPAHVKPYVRRNKNDAVDAAAICEAAGRPGQRFVPVRSIENQAELMRHRARELLAGQRTAALNALRGHLAEIGVVAPQGAQHAYDLKRLAVDGFDEYGEVVVPDYVCVALRPLVSQIDALDEAIGAIDKEIAMSVKANETAKRLMTVPGVGPVTASAITATIQDMGDFASGREFAAFLGLTPRQSSTGGKPRLGRITKMGDRYLRKLLVVGACATLRHRKGHNDALRLWASGMLERKTVKYKFKLTAVALANKVARIVFVLMTRGGQYDDRPVAA

SEQ ID NO: 119724 - protein, 323 aa, unidentified
MQGKVSLERSAMTPVYVGIDVCKDRLDVYIHPVGLRRAFANSPEGIKQLKRALNAHEVALVVMEATGKFHRAAHRSLHADGFAVAIVNPLRSRLFAEALGALAKTDRVDCRMLAVLGESLEPGAVAPPGELMERLQELTHCRDAAVAARTALLNQFGAATGRLAQIEIKRQLRATETSIEKLGAEIGRLIAADPCLARRMAILTSIPGVGTLTAIALIAGLAELGSLSAKQAAMIVGLAPIACDSGQSSGARHIRGGRAHVRKAIYMAAVSAARFNPALKTFYDRLVANGKKPKVALTAVMRKLVILANTLINEDRTWELNHA

SEQ ID NO: 119725 - protein, 340 aa, unidentified
MTITTVGIDLAKNVFAVHCVDQHGKTVLVKPKVSRAALPELIASLPPCVIGMEACSGAHYWARLFRQYGHEPRLMAAKFVSPYRMAGKSGKNDAVDAQAICEAVRRPHMRFVPVKDESQQAMQCLHRIRQGFIEEKTATYNRLRGLISEFGVIAPQSTDALRHMVSEQKSSLPLQVQQCVNDLLEHIDRIEDNITEYDRILSRMAKTDHRSQRLMELKGIGPTTACALVASIGNAHDFKNGRQLAAWLGLTPSQYSSGGKSKLGRITKAGDSYLRTLLVQGARSVLIGAEKRTDLFSRWVCSLVDRRGYWRAVVAIAAKNARLCWASLHYGDDFRLYSAS

SEQ ID NO: 119726 - protein, 383 aa, unidentified
MHASNICTPIADHIGTIFVAIELSQKSWLAVMHSADRSRLSRHKLESGDAAGLLGLIESVRARAARALGSAPAVVSCYEAGYDGFWLHRRLEAAGITNFVFDPASIAVDQRRRRAKTDRIDGELLLRTLMAHCRGEPRVVRIVRVPSPEQEDVRRGSRERERLSKEQTAHTNRIKALLRTLGLAAGNPRRRDWLKWLAEQRDWQGQPVPPHYLAELKREHARLLLVGEQLGELSRGGEPTDVPAAAARMAEQKTRLRQLKSFGPAFAGTLVDEVFYKEFDNRRQVGSYFGLAPSPWASGGTNREQGISKAGNPRARHQAIELAWLWLRHQPDSALSRWFRQRTAGASARTKRIAIVALARKLMVALWRYLTTGLIPDGAVVRA

SEQ ID NO: 119727 - protein, 341 aa, unidentified
MQITTIGLDIAKNVFQVHGIDAAENVIVRKQLRRGQIIAFFEALAPCLVGMEACATSHHWARELTKLGHEVRLMPAKDVKAYVKRNKNDAADAEAICEAVRRPTMRFVRIKSAEQQGQLMLHRARDLLMRQRTQLINALRAHLAEVGITAAQGREGIKELLAIIAQDEGSRLPVDAHASLTVLAAQLQAVQTTIGSIEKRIVAQHRSNEASKRLETIPGIGVIGATTITAVVTDPKAFRSGRDFAAWIGIVPRQDSTGGKQKLGPISKQGDQYLRRILIVGAHRVPIQARQQPQKYPWLTQLLARRPFKVVAVALANKMARIAWALLARGGTYRAPQLVAV

SEQ ID NO: 119728 - protein, 364 aa, unidentified
MGILHYVGMDVDKEKIAIAVLTGGKATPMAETIIRNEGQAIDIYFKNLMSAGDLVACYEAGCLGYSLYRQLTELGVQCVVAAPSQIPHRPGDRVKTDRRDALTLARALRNGDLSAVHVPTREDEAVRDYLRMLEDMKADLRKAKQRVLGFLLRRRIRYEQGTAWTQLHRAWLQALQLEDPLEQLTLTEYRCQVDELEEKCRRIKAGIEEIAARKSYAEPVAKLKAFKGVETLIALSLVSEIGDFRRFAGADQFMAFLGLVPSERSSGNKRRLGGITKAGNSHLRKLLVEAAWQYRSYHPSSTRLMKRREGLSPSLVSYANRAGRRLNKKFLRLIFRGKASQTVVTAVARELSGFLWGAMVDRVA

SEQ ID NO: 119729 - protein, 337 aa, unidentified
MQHVAIDLGSRESQICIRDHAGEILVERKVATAGLPKFLAKQPPSRVVVETSAEAFFVADAALECGHEVRVVPATLVRSLGVGERGIKTDRRDARKLSEVSTRIDLPSVHVPSARSRERKVICNSRAKLLAARTKLINYVRGYLRATATVLPRRSPETFPALARATLLSRSDGIGAHIERVLVVLDVLNAEIKQADQELLAIAEEDPVCSRLMTVPGVGPVIAIRFVAVIDQPGRFHSSHHLMSYLGLTPGENSSSQRSHRTGITKAGASDLRFALVQGAWTLMRSRSPEPMAAWALEIAARRNKQVAVVALARKLVGVLWAMWQHDSEYQPKMTAA

SEQ ID NO: 119730 - protein, 375 aa, unidentified
MDEDRSVCVGLDTHKAKIAVAVAEPGRSGEVRFQGEIANRPEAVRRLVERLAETHGRLNVCHEAGPCPCGYGLHRQIIALGHGRTVAAPSLVPVRAGDRVKTNRRDAVTLARLHRAGELTAVWVPDPAHEAIRDLIRARTAAMEAVRRARQQLQGFLLRHGRVFTGRKAWSPAHRRWLGGPRFAHPAQQIVLQEQLDAIAEAERRRDRLGEQIRELARDWPMAPVVAALQAMRGVAFLSAVVLVAEIGDFRRFASPRQLMAWLGLVPSEHSSGSRVERGGITKAGNSRARRVLVEGAWSYRFPARVTSLIQARLGDVPDGVRAIAWKAQLRLCARFRRLVAAGKNANLVATAVAREMAAFAWAIASEVKPVGAPA

SEQ ID NO: 119731 - protein, 347 aa, unidentified
MSHKTAATVAHTIGIDTGKNTLHLIGLDDQGAIVLREKIARGRIAARLANVPRCLIGIEAGMATHYVARELGALGHDVKQVPPAYAKPFRQGHKNDFRDAHAIAEAVQRPSTRFVPVKTDDQLDLQALHRVRSRLVGQRTAVINQIRGFLLEHGIAVRQGLRFLRQQLPDILAKRSDVLSPRMIRIMEDLSGDWRRLDERIQHITEEIEVLAHGSESCRQLMTVPGIGPLIASAMVAAIGNGAAFAKGRDFAAWLGLVPKQMSTGDRTILGRISKRGNRYLRTMIMQGARVILLRPANWAKHSFGPWLTAAANRLHHNVLATALANKLARIAWTVLMQARSYEARVN

SEQ ID NO: 119732 - protein, 355 aa, unidentified
MNSTKYIGMDVHTATISVAVRDAAGKLIMESVLETKASTIVQFIHGLRGELYVTFEEGTWAAWLYDLLKPYVTNVVVCDSRRNALLQEGSKSDRIDGRKLSELLRANLLRPVYHGENGLRPLKELVRAYLTISKDLARVMNRVKAIYRGWGIPCAGQSVYHPRHRDEWLGKITRASVRRRAQLYYLQLDMLVLLRKQARQELLVEGKKHQAWKSLRSIPALGPIRAAVLMAIVQTPHRFRTKRPLWKYGGFGVVTHSSADHRYVEGQLQRSKKPVSVRGLDSSHNHHLKDLFKGAAIQASTREGPFREFYEALVAKGMRPEMARLTLARKIATIALTVWKKGVVFDAKYLKPQTA

SEQ ID NO: 119733 - protein, 365 aa, unidentified
MNPIYIGVDFHSRQQTICYLKIETGELVICELQHKDKEKVRAFYQGFQGQVIIGLEASGYSPWFETLVEQLGHQLWLGDATEIRRRARWRQKDDRRDAELIWDLMAHNEFPRLHRPSLESSEVLRMLRYRQKLIKVRTMSKNSLQAIALQAGLAKGHRLFTKAGQEEFRQAAMSPVLQWQRDHWFSLLKPLNEQLLETMVWFKAHSKDDVNIKRLRTHPGLGLLTSLCLQHTLQPVSRFRNQRKVVAYGGFDPMIRSSAERKIYLGISKAGSRMLRYLLVEAVHTAVRYDEDLKRFYNRVAERRGRAKAKVATARKLLIRAYIRLRDEIDYAQFQRRAVAARLARRSQGPKVPEVLIGQPTSPGA

SEQ ID NO: 119734 - protein, 412 aa, unidentified
MKDLLEISCGLDVHKEKIVACILTGPLGKPTRSEIREFTTLIPDMIALRDWIVSQNCHHVAMESTGIYWMPIYEILEDAFSGDITLLVVNARHMKNVPGKKTDMRDSEWISTLLRAGLLNGSFIPEKRIREFRDLNRYRKSVIRDITSQKNRIEKFLQSSGFRLSSFISDIFGASGRNIILHLMEHGQIDKTALDSCLKTKTRNRIDEILMSVNGTLSEHQKTFLKILMTHYDSLKEHLTEVETSLEEDMAPFTLQVEQLNSIYGISTTASCAIIAEIGIDMKPFKTAEHICSWAGLCPGNNESAGKRKSTSVTKGNPYIKSMLCEIAWVIAGKRNTYLSAWYWRIKQKKGAKKAIVALARKLLVIIYTMLKQGTLFDESCFETRRKNCEQKQLSRYIRELEKHGYHVEAQS

SEQ ID NO: 119735 - protein, 402 aa, unidentified
MNAVGIDVSKGKSMVAIMRPFGEIVSAPFEIKHTASDIHSLVELINSVEGESRIVMEHTGRYYEVLAHQLSKANLFVSAINPKLIKDFDNDSLRKVKSDKADAVKIARYTLDKWQNLKQYNVMDELRNQLKTMNRQFGFYMKHKTAMKNNLIGILDQTYPGVNTYFDSPARSDGSQKWVDFASTYWHVDCVRKMSLNAFIDHYQNWCKRKKYNFSQSKAEEIYGKAKELVPVLPKDAITKLIIKQAVDQLNSASTTVESLRTLMNETASKLPEYPVVMAMKGVGTSLGPQLMAEIGNVSRFTHKSAITAFAGVDPGVNESGSYEQKSVPTSKRGSSDLRKTLFQVMDVLIKTHPQDDPVYQFLDKKRAQGKPYYVYMTAGANKFLRIYYGRVKEYLSSLPES

SEQ ID NO: 119736 - protein, 345 aa, unidentified
MGAYNVGLDVHSRETVFVIQDPTGAVIGRGALPTTPEAFARMCHQYQLPAGTPVALETGTSAFYVARALSALDLKPIVIDAHEVRLKAHRPAQKSDRRDAFELCDGLRRDLYRSIVHIPSPAISTLRTALSRRRHFVRIQTAEVNAAKRLLRGAGWLGGKRGSLRTASGWERLIDALASEPALQTHTRFHYAVWQQAGEQVRAIDHLLGDLGRGFRDDVRRLETVPGVGPIVALTAVAVFADVERFGSAKHVASYAGLVPSTYQSADRDCHGHITKRGSAELRTMLCEAAHHARPPLASAASVFSEALCPAWLQKRGRRRGPPALPSALRPLAGWNRFPTLTFRH

SEQ ID NO: 119737 - protein, 355 aa, unidentified
MNDAKYIGLDVHQATTTAAVRDATGNLVMEAVLETKTETILQFFRGLRGSLHVIFEEGTWSAWLHDLLKPHVARVVVSDPRKNALLKDGNKNDRIDARKLSELLYLNRFTPVYHGEHGLRTLKELARSYLTITKDLTRVMGRIKAIYRGWGIPCAGQQVYAPGHRAEWLAKLSEAGVHRRAEIYYQQFDGLAPIRQQARRELLVEGRKHAAVKLLRQIPSIGPIRAALLVALLQTPNRFRTKRQLWAYVGLALRTYTSGEYRFEHGQLKRSKKVLAIRGLNRNHNHDLKNIFKGAATWAAGNTGPFQNFYEACIARGMKPHLARLTLARKIAAITLLVWKKGVCFDAKHLTQQAA

SEQ ID NO: 119738 - protein, 308 aa, unidentified
MTTMYTGLDIAKLNLQLDLAGRPYDLTNTAAGHRRLVQLLTRQPGAHVVCEATGGYERDLVAALHAAKVPVSVLNPARVRHFARAQGQRAKTDNIDAAVLTAYGQALQPKPTAPRTEHEQQLTELVRRRTQLVEVLVAQRQQAEGLRVPAVRRLAQSLIRRLERDLAQMEAQLKALQQQATELQARVQKLEAITGVGMITALSVLAELPELGTLNRQQAAALAGLAPHPRDSGQWRGQRHIGGGRAPVRRALYMAALVAARSNHILKVFYQRLRAAGKPAKVALTAVMRKLVVLMNHTLKHPHFVPQN

SEQ ID NO: 119739 - protein, 361 aa, unidentified
MKSTTIIAFDQHAATTVAAVLLPGHRTPALQTLASDSPTILRFVERLRRQGPMVCCYEAGPCGFELQRALSARDIACEIIAPALIPRRAGDRIKTDRRDAGHLAVLYRAGALTAIHIPTEQEEAARDLLRCREDIRADLLRARHRLSKFLLRHGRRFTGTKKAWSKRHETWLRAQTWPLPALDQTHRAYLRAVEETIARLRAVEEDLRALLDLEPLRPRVVRLRCFRGIDDLTALTIAAELGDARRFPTAPSAMAFVGLVPSEHSSGAKRAQGGITKTGNGHLRRVLVEAAWHYRQHPFVSAAVRHRQRGAPDTVVAQAWTAQQRLHRRYHRFAARGKPKQHIVTAIARELTGFVWAALTQ

SEQ ID NO: 119740 - protein, 350 aa, unidentified
MKRPKDKLFAGIDLHGNNLVTGIMNQNGDRLAHRKLDCDLNQVEAFLRPFKPQLQSLAVESTFNWYWLVDGLRQRGYPIDLANPAQIQQYNGIKHADDKHDAFHLAELQRLNILPKAYIYEAQLRPVRDLLRRRTNFVQQRTELFLSFKSLYARTTGQEMPLRELKRLEPKQGKKLYQHPANQLIAELQLEHIQALNRSVGCIEKEVLGWAREIPIYDKLLTLPGVGKILAMTITMEVGDIGRFKIDGDFASYCRAVDSRRMSNNKQKGENNQKCGNRYLAWAFVEAANFARRYDENCRRWYDRKKARTSAVIATKALACKLAKAAWFIMRLGTEYDASRMFPERAARKK

SEQ ID NO: 119741 - protein, 419 aa, unidentified
MVENVHWFVGIDWATQTHRVCLLNAEGGRLGEREFAHGGAGLVELRDWLLEKTKAAPAQIAVAIEMPHGPVVEMLLECGFLVFAINPKQLDRFRDRFTVAGAKDDSRDALVVGDSLRTDRKAFRQLAMDDPAVIRLREWSRLLDELQQERTRLSNRLRQQLWRYYPQAAELTDDVADDWFLSLWQKVPTPAAAAKVSEKTIARILKEHRIRRVDAATALQTLRKTALFVAPGTTEAACVHIRSLVARMRLVNRQIKQAGAALDGLCDSLAAQDEENSSGQSHEQRDVAILRSWPGIGRIVLATLLTEAAQPLRARDYHALRALAGAAPVTRQSGKQRFVIRRFACNRRLQTAVHHWSRVAVQHDPAARHRYDALRQRGHGRARALRGVGDRLLSALCAALKNRTLYDANHRSAQAVSSQ

SEQ ID NO: 119742 - protein, 338 aa, unidentified
MEFKRIAIDTSKHVFTIHGVDEQERPVLRRELKRGQVETFFSKLAGTEVVLEACGGSHHWGRMFQKMGHDVRLIPPQYVKPFVKRSKNDRNDAEAISEAAARPSMRSVAVKSLDQQANGIIVKHREMLVGQRSQAINALRGHAMEFGVVAAKGAAKVESLLAVLAGDINIPAAARAMFEHMGGHIAALENRIAVLDAELVALHKAHPVSRLLVEIPGVGPMIAATMALTVEPENFASGRHFAAWLGLTPREHSTGGKQRLGRISKAGNERLRTLLVVGAMSVIRFAKPGSKSASTWLLQLLERRPRKLAAVALANKMARIIWAMMASGEAYRRQPITA

SEQ ID NO: 119743 - protein, 321 aa, unidentified
MTYVGIDVSKATFVVAYSSAKTGRTKTFKNTVKGVHEFIQTVSAAEHHCVLEATGNYSALLVYLLSEAGITVSLENPLKIKNFARAMLSVTKTDEIDARLIALYGERMQPAPYKLRSDSILILKQKRTVLRQLKKQLVATRNLKGSLEVLPSFDPECKKTIERTITFLEKQIKAMEEKIASLAQGEYKKQMDLLTSIKGIGVTLAAALIVATGGFTYFDNAKQLTRYLGLSPTYQQSGTSVNVKGHINRNGDSSLRSQLYVAAFSSLRCNTECKACFDRLRSNGKPGKVAVVAVANKLVRQAFAVVTQGKPYVDGFKSERP

SEQ ID NO: 119744 - protein, 428 aa, unidentified
MEQQDRIRLEHFRQLKKEIRGSERHLVVGIDVSKDRHHACFRTVMGKTLLKRLVFENSCEGVTKLLDQVARVQLENGLAEVVFGLEPTGNYHKPLGEYLIRRLAQVVLVSGVAAKENRKTLDGRWDSNDPKDAANVADLVSQGKFLFYEYPDPRLRELRSLLALKRRLKRQEHGYRVRIRNHLVAKYFPELDRYFDQSEKYGLAIVRWCLDPRSLSGYQFEEFVGLVAPGRRGGQQNSRLRMILQMAQGSIGCEGGPAVKFEAELMVEGLRQIRLMIEDTDKQIQDLCLEFPEYEYLLSIPGFGPDISSKVLGAVGDPFRFENGRQVLKLAGWDLNAERSGKSAETARPVISKKGKADLRYALYQAALIASIKNQHFMVYYTNLLRGREREPGIKTKRRVKLAAKLLIIAWTLMKKKESFNPDYLKLE

SEQ ID NO: 119745 - protein, 390 aa, unidentified
MIYVGIDVAKDKHDCCILGPDTEELFPVFTIRNNSDGYGELFHKIESVSKDKSQIKIGLEATGHYSYNILGSLLDHGYHTFVINPLHTNLYRKGQSLRKTKTDKVDARSIAEMLVTDKTLKPYTGTSYHSEELKSLTRYRFELVKERAKLKTSVSRLVNILFPELESLVPTLHMNSVYRLLQELPGAYFIASSNLTHLKALLADASKGRYGREKAIEIRETAKSSIGSLMPAKSMELRQTIHRIDTLTSDIKEVEQSIQKIMDECGSPITTIPGIKYRMGAMILAEIGDFTRFSNADQVLAYAGLSPSTYQSGKLISSYARMEKRGSKYLRYALFNAAIYVSGWDERFRLYLSKKRAEGKHYYVAISHVIKKLVRTIFRMEITHTSYQPL

SEQ ID NO: 119746 - protein, 413 aa, unidentified
MQVLFARCAGLDVHKKTVVVCVMLTEITGEVHHQMQTFETTTAGLLALADWLTGLQVTHVAMESTGIYWRPVFNILEAMFTVILVNAQHMKAVPGRKTDVKDAQWLAELLRHGLLQASFIPPQPIRDLRDVVRYRKSLVQERSREINRLQKVLETANIKLSSVVKDVLGVSATAMITALIEGETSPEQLSALARGKLRSKVPQLRQALEGRVDRHHQILLSHQLAHLCFLDQEIAELGVQIQQFLTPYEQAMQLLVSIPGVAEETAACILGEIGADMSAFPTSAHLASWAGVCPGNHVSAGKRSHGKTNQGNKRLKAALAQVVWVLSHMKDNYLSAQYHRLARRLGKKKAVMAVAHSLLVIIYHILSDQQPYHDLGATYFETLDRERVVKGAVGRLERLGYTVSLQPQEEVSA

SEQ ID NO: 119747 - protein, 343 aa, unidentified
MEYGAIDLHLRRSQIRILAEDESIVLDRRIDTTRAEFDRVFGTRPPLRILLESSTESEWVAQHLEGLGHEVIVADPNYAAMYGSRSRKVKTDKRDVAALAIACRRGIYRRAHRVSAETRTLRQTLRVRRQLVQMRSGLISLLRSLLRQHGLRLPSGSAEQVLPRLDRLPLPADLAAVLAPVRAVITQLTTTLTAADVEVEARATADPVTQRLMTAPGVGPVVALTFQAVLDDPARFGGDAGRASAFVGLVPREDSSAERQHKGHITKTGPGELRALLVQASWVIWRGRSAAGADLRTWAQTLAARRGRRIAIVALARRLTRILYAMWRDQADFVVRSRGAVAA

SEQ ID NO: 119748 - protein, 336 aa, unidentified
MTLYCGIDLHSTNHLVVVIDDNDKRLEERRLGNDLSLTLTLLAPYREELVGIAVESTFNWYWLVDGLQDAGYRVDLVNPAGIKQYEGLKYTDDRYDAFWLAHLMRLGLLKTGYIYPREERAIRDVLRRRMQLVRTASRQLICAQSQLWRSTGIRVSCNQLKKADFPVPLPDGATRVAVESHLQVYRAIHTEIERLEQLVMGSVKPKPAYPLITSMTGVGPILGTTILLETGDIERFKSVGQYASYCRCVKSEKTSNGKKKGEGNSKSGNKYLSWAFSEAAHFAVRYEPLAQRFYERKRRKTNGIVAIRAIAHKLARAAYYMLRDQMPFDAGRLFAN

SEQ ID NO: 119749 - protein, 344 aa, unidentified
MDHFAGMDVSVKETSVCILDDAGKILKEVKVASEPQALLKVLGNPAYCFKRIGLEAGPLSQWLFSALAEAELPVICVETRHMQAVLKAQINKTDRNDARGIAQMMRVGVYRPVHVKTLRSQKLRMLLTHRKLLQSKAIAIENDLRGTLRNFGLKVGMVGTVRFEARVQELIETIPDLVVLVEPLLVVRRALREQIVILHRRLLAIVRDDEVCRRLMTTPGVGPVVALTYRATVDVPARFRKSKSVGAVFGLTSCRYQSGEIDWSGRISRCGDEMMRTMLYEAAQSMLHSKKWSWLKAWAMQIARRRGMKRAIVALARRLAVIMHRIWIDGTEFRWTREPATAAA

SEQ ID NO: 119750 - protein, 390 aa, unidentified
MYYCGIDVAKRKHAIALLDEHGQPVQRPFTIENTRAGFDHLLQALAHLQEPVLIGLEATGHYWWALYEDLTRHDHPVVVLNALQVHAFRKSGVRKVKSDRTDASWIAEFLRFSQPEPAQPTTAVFLQLKEVSRFRYHLSDQIGDCKRKLLSILDRVFPEYETLFSSVFLNSSRQLLAKAASAQELATFDLAELTEFLKTSRRSRFGRTKAETVQTVARQSVGVRFLADAAQLEVRCLLAQIDLLEEQRDQVDGALAQLMDQIPQHLTSIPGVGPTTGAALLAEIGDVQRFDAPEKLVAYAGIDATVYQTGQFEARQMHMSKRGSPYLRHALWQAASMAIQYDDELRVYYDHKRQEGKSHGTALGAVCRKLLTRVYIVLKENRPYEVRTKH

SEQ ID NO: 119751 - protein, 358 aa, unidentified
MIAMKYYTSTTEFNCGIDLHAHQMYVCLLDRQGHKLLHTNIRNNDFEYFLKLVAPYRHDLTVCCECMFGWYWLSDACQAAGLPFVLAHALYLKAIHGGKNKNDRIDSEKIAHLLRTNLIPPAYVYPAAQRPLRALLRQRLYYVWHRADLLARIQSHQLAHNRPALRQTRPNRAPWEKQLLAHEDHPLRQLALQNDLAMIRHYDTQITALEEALHRLTKRTAPREYALLQTVPGIGEHLGMTILYEIGDIGRFPTVKDFVSYCRLVKGTVASAGKIKGLRGAKLGNPYLRWAFGEAAIIAKRDHAVIGPLAQRLEAKYNGNKFKANTVLAIKLARAVYFMLRSKTVFDVEHLVARLAHN

SEQ ID NO: 119752 - protein, 340 aa, unidentified
MSEKEAILGIDISKDKFSAALLKGEKKSQVKEFSNNLEGFEQLKQWLEQNQLEKVHACLEATSTYGHSVATYLHGLGHIVSIVNPARIKGFAQSRLSRTKNDQADATTIARFCAALKPQAWIPPSPEMAQLQSYSRRLRALEQMATQEKNRLKTTVDESLIEDIEAHLVFLETQIDNVKKRQKELLNEYSSLKSQADLLTSIVGIGEPTAMTILAEIGDINQFSSARQLAAFAGLTPQEHQSGTSVKGKTRLCKIGNPHLRKALYFPALSSMRHCSPMKDLRERFLEAGKNKMQIVGVVMHKLIRIVYGVLKSGKPFDQTKLALPNVVLEEETDFLPVSP

SEQ ID NO: 119753 - protein, 377 aa, unidentified
MESLARVEPNIYLAIELSASTWLVAAQLPTSDKIGMHRIDAGDTASLLELIRKLQARVRAKLGCNEVTVASCFEAGRDGFWLHRFLVAHGIANYVLEPTSILVSRRARRAKTDRLDAQGLLRVLAAYRRGEHHVCSVVRVPTPNEEDAKRQHREREHLVQERVRIENRIEALLATQGVRKRPSLRSWDRDLEGLRTGDGRPIPVHLRAELDRLRRRLVMTIEMIREVEAERAQDLNEEKDDPANSMIHALCRIRGIGENVAAVLTREVLYRPFSNRRQIASYVGLAPMPFQSGEIDRDRKISRAGNPRARTTIIQFAWLWLRYQPDSALSRWFRERVGALQGRTRRIAIVAMARKLLIAIWRYVTRGIVPAGVQIAA

SEQ ID NO: 119754 - protein, 504 aa, unidentified
MRRVGIDIALRAAHKAAVYEDGERIGRPFSVAQTKEGFAELIHRATQGTSGPVEFVMEPTGLAWLPLAAELSRRGHRVFLPKPAKTHALRKFLAQYAKTDAIDACTAALVRHVDKRTTELRVPSAAQTTLRLMVKQRSRLVVDAAKEKSRIFTWLLLANPHVGRALGQDPTSRIADAFLRRRLDPFEVVGQGKRALRRFLQTHCHGPLKETQLEAVWSACEQSCALFEAMRESGKLPFHYADLQILISQALDHVAFLEAQIGELDGRIAEVYEQLDPIRLLEREVPGFGATIASAVEAFAGDVERFGSVKRYAAFFGLVPRTKQTGMAGEKPRQALTKGGQNLLKKYMYLAAEVARRHDPELAATYERAIARGKHHYSAVIIVAHKLVRHVYALLKARAAGVADVRYQRRAPDGTAVSANQARTIIAAQFPSKAAKDARKRAPQTARQKGTMSQGTGSSEDATKAVVAAVPTTLVPDLDRAREILEITPIDNPSPQIKNLLDRS

SEQ ID NO: 119755 - protein, 352 aa, unidentified
MQAISVGCDAHKHYSQLELQDASGQVLNRVRIDHSPGAVSSFFSRLPGGTPVALESVGNWYWIADEIEAAGCLPLLTNPAKAKLMMGHVNKTDKLDANGLATLLRIGSLPTVWLPPAALRDQRELPRTRMALTALRTSIKNRIHSLLAKYNLSPEDGSQLFSKKGRSWLESSLSRLPPETGRCLAQQLELLDFLSLQIDTLEERIHNLIALTPTMQLLKSLPGVGDMLAIVIEREVGTISRFPSAPQFSSYCGTTPRVNSSGGKTRYGKLRTESNQYLKWAFIEAANAISAHHAQRDWTTRHVSKLYLRIRSRKGSSVAIGAVARHLAESTFWILSKNEPYRESSKVSPRQG

SEQ ID NO: 119756 - protein, 375 aa, unidentified
MGEITRVLIARVGVDLAKLVIQVHAVDAAGRRVLSRALRRDQFIAWCQHLPAGCLVAMEACSSAHHWARKLGALGLDARLIPANFVTPYRMEGKSGKNDMTDAAAICEAASRPTMRFVPVKTCEQQGVMSLHRVREGFKEERTACINRIRAVLGEHGLVFGKSPKALRAVLADVIEDAGNELSTRARLVVQRAFEHWRELDEHMRWCDQQVGTHVRSSPEAKRAAKITGIGELTASAMVAGVGDFKQFKAAHQFGAWLGVVPSQDSSGGKTRLGRITKRGDDYLRTLLIQGAKSAVMSAGKRDDPISRWLVQLVARVGWQKACVAMANKNARILWAVMTRELGFDPRHVSIKPDAKQTALEKINPAHSALASCPA

SEQ ID NO: 119757 - protein, 392 aa, unidentified
MVWVPAHDAKESEMDAISAAAALQPRRPEDGLIVGVDLAKNVFQLVVADAQWRTCASHRLTRVQFERWFANRSVALVVMEACGGAHHWARWLTGLGIAVRLLPPRYVRAYVRRNKTDAADAAALLEAARCAELHPVRVKSVEQQALQALHRTRSLWQADRTRRINTLRGYCREFGIAIAQGARLGLEQIARVLAEPHAALPELLRPTMRLLVEEVRLLEARIAGLERELAALARCSPACATLLTIPGIGLLTATAMVAATSGDVTHFGDARHFASWFGLTPKESSSGERRRLGRLSKQGDRYLRMLLTHGARSVLRAASAAAQRGKPPQGLRAWALDVQRRSNHNKACCALANKLARIAYACLRDKVPFGLSPRMNEKLQRQAFSLPAGTHA

SEQ ID NO: 119758 - protein, 351 aa, unidentified
MVLYVGGDLSRKRLDWVAMWPEGVICQVGAVPPDRDGLARLADMLLPLATEVVCVIESMTGARFVNDELERHGFEVQIADARKAKVAAELLGQSGAKTDRLDAQLLAELGRRGLVPEIWLPDVATREAREIARFRLHLVRHRTSLKNRIHQTLITHGVAAQESDLFGAKGRRRLAALSLPEPWASNVSCALRLIDHLDEEISAEEKLLRQVGADHPYLPLLLSAPGIGWVLGFTIASEIGTIGRFASPTKLVGYTGLCPRVDQSGESDRRGPLRKNGPKWLRWALVEAANNAARHPMYRDRYQRTRRRLGRQRGPRVAQVDVARKLAEAIWHMLNAGEKFAPAGAALYLAP

SEQ ID NO: 119759 - protein, 351 aa, unidentified
MAASTRSIIGGVDTHTATHHAAVIDRNGRLIDDAEFRATPAGYAAMLTWMRGKGTLTQVGVEGTGAYGAGLARHLHDQGIEVLEVPRPDRRLRRQRGKSDPIDAEAAARTVLAGTASGAPKLADGPIEAIRMLRVARTGAVKACTAARNTLRSIVITAPEPLRSQLRAMSSAQLVAAAARLRPDLENLADPVQAAKHALRSIALRVQHLNAESRSLRTQLDALTKRAAPSASAVFGLGPDTVAALLIALGDNPDRLRSEAAFAHLCGVAPIPASSGKTNRHRLHRGGDRAGNSALHIAAVVRLRYDPRSRAYADRRTAEGMSMPEIIRCQKRYLAREVFRALRADYDELNT

SEQ ID NO: 119760 - protein, 351 aa, unidentified
MKTGHTARPKLFIGIDIHKRSWKVHCATDLSSGRTFSMSPDPEGLREYVERHYPGHEVSTAYEAGCCGYRAHRSFEGYGWCSLVVNPADIFRKGKERHTKTDRIDAQLIARELKDGRLEGIVVPDPEREQLRSLFRRRNDLVKDMRQIKSYIKMQLLYYGIKVPERYDNDNWSHAFRDWLDNLEFAHPTGKEVLESRMRSFRFIDREFRDVSTQLRKWTKKHYKGDYMLLRSIPGIGPIVASGILSELGDLRRFNNIKQLAGYVGLSPGIYQSGDTIRHTGVSMRAHRLIRSYFIEASWQAIRTDPVMQGYYRKHQGKNVKSVIVKVARKLLSRTLAVIKTGIPYEIGVIA

SEQ ID NO: 119761 - protein, 369 aa, unidentified
MSDYIWVGLDVHVESITAAILEGDSQEAEVVKLSGDLNKVRRLMRRLSKRGPVRACYEASGSGFVLHRRLKKDGFHCEVIAPSLIPRKPGDRRKCDRLDAVMLARLYRSGHLTPVHVPDEWQEAVRQLIRLRCSYQWQTKSTKHRIYGVLKTHGYIYREGKSLWTQKHKVWLAKLRRELEGPLHTVLVTELEHLEYLEMQRGALDGEIDRYAEQPPYRESVEALCCLRGVKTLTAMTLLSEIGDIERFPTPRALMAYFGLVPTERSSGERERKGPITKAGNSHARRILVEAAWNNRHRAGADLIVKRRRQGQPAEVVAIAVKAQHRLSKRFYHLDQKKHRNKVVVAVARELCGFIWAMMKAAPLCRDAA

SEQ ID NO: 119762 - protein, 345 aa, unidentified
MNAAGIDVSSSKSTVAVLRPFGEVVKLPFDVPHSAEKLASLAGQLKSIEGETRVVMEHTGRYYESIAKVLHEVGLYISAVNPLLIMEYGNNSLRKVKTDKADAMKIAKYALDNWSKLRDYTPMDTIRYDLKTMNRQFQMAIKQKTATANNLIALQEQSFHGIRKLFGSPVRSDGTQKWVDFTHDFWHVDCVRSGSLNTFTERYRKWCKRNRYQFSTEKAAEVYALAKSAVVLVQKTSVTKTLVQAAADQLTAISRSVETYRSEMDKLTSQLPEYSVVMEMYGVGESLGPQLMAEIGDVRRFERKQSLVAFAGIDPAPRGSAARCISCGIFLSMCRRKRRKPLSRY

SEQ ID NO: 119763 - protein, 337 aa, unidentified
MSKITLIGIDTAKKVFHLVGVDKRGNYVYRKQLSRKRLLPTLAQLEVCEVVLEACAASHHWARSMGQLGHRVRLIAPQHVKPYRRGQKNDYRDAEAIISAALSPGMHFVGVKSVEQQAEQALHRVRTQLLRQRNAAANGLRGLLGEYGLSFSKGIARLRQGAVGFIDSGQAETLGLTELVWDVLNEIDRLQQRMDNYERQIEQRVRHDPISQRLRTELHGVGRLSASALRVKVADPRDYANGRNFAAYLGLAPGHRGTGGKVKIGKIRRGHDRYLRQLLIHGARSVLSHLGDKQDPQSRWLRELRDRRGFNVATVALAHKNARQAWAILVQEQALQN

SEQ ID NO: 119764 - protein, 352 aa, unidentified
MYYVGLDLHKKYITGCALDSQGAVVATERRLPPVLATVLSWLAPVGQPAAVALEATLYWAWLHDRLTAAGYQVAVAHPQQVKLICHARCKTDPVDARKLADLLRTDLLPAIWIPDAETRARRTLLRGRAWVVRTRTRVKARIQAYLAAENERVPVSDLFSRGGRAWLATVALPPEVRSQVDRLLALVEQLDVQIAGQDRTVRALARATPEAEQLQTIPGIGPFGALLLLAEIGTITRFGSSHELAAYAGLVPSTRSSSGKTAHGSVGPAGSAWLKWLFVEAVQTLKRQPGPVRSKYERLLRAKGKQKATVAAARKLCCYVYWMMKEGRSYDEWLRQRQQREVRPIQAVASVA

SEQ ID NO: 119765 - protein, 358 aa, unidentified
MADKDTEAAVVGGVDTHKDLHVAAVVDENNKVPGTRYFSTTRQGYRQMLVWMVSFGTLKRTGVECTGTYGSGLLRYFQNAGVEVLEVTAPDRMERRKRGKSDTIDAECAAHAAFSGIRTVTPKTRDGMIEFLRVLKTCRKTTISARRVALQIIHSNIISAPDELREQLRNMTRMQLIRTLGSWRPDASEYRNVTNVYRIALKSLSRRYLELHDEIADLDVMIAAIVDELAPELIKRHAVGYESASQLLITAGDNPQRLRTESGFAALCGVSPVPVSSGKTSRYRLNRGGDCAANSALHIIAIGRLRTDDKTKEYVARRVAEGHTKMEAIRCLKRYISREVYTLLRNQNRYVNSIPITS

SEQ ID NO: 119766 - protein, 404 aa, unidentified
MIFVGVDWAEAHHDVCVLDDEGVVLAKRRIAEGVEGVSQLHALLADQADDPSQIVVGIETDRGLLVGALVAAGYQVYAINPLAASRYRERHVTSRAKSDAGDAKVLADLVRTDRHNHRQVAGDSDLSSALQVLARLQQNLIWSRQRLVNQLRSSLREFYPAALAAFGAELAHPIALGVLQEAPTPAIGRTLSLAKLAAILRRAGRERNLEATALEIQAQLRAPQLAATPLVDAAYGKSVAATVRILRELNAQLASVEAELTPTFEKHPDAELYRSLPGLGVVLGARVLSEFGDDRTRYAHPKARKNYAGTSPITKASGTRHVVLARLARNRRLADACHQWAFCSLTGSAGARRYYRTLRLRGKTHHQALRALANRLVGILHGCLEHRRPYSEQVAWPSSVTAAA

SEQ ID NO: 119767 - protein, 316 aa, unidentified
MSQFSVFVGIDVSKDHLDVHVLPEGQAWRVANDATGCAELSERLSGLTGSVLVVMEATNVFWRLAATKLASAGLSAAVVNPRQVRDFAKATGQLAKTDAIDAQMLARFAEAIKPPVRALPSEQCQVAGELLARRAQLMGMLVAEKNRLSTARATKVRKDISATIAFLEKRLAALDEEIDQWLKSTPIDQSRVNLLKSFVGIGERTAKSLLISLPELGSLTSKQIGALAGLAPFARDSGHKRGQRHIGGGRSIVRAALYMPAITAIRCNAVIRALYERLIDAGKHHYVAITACMRKMLIILNAMLKSNQPWKSQQEV

SEQ ID NO: 119768 - protein, 402 aa, unidentified
MTYDYVIGMDVGKYFHHACVLDIDGTQVLSKRINQNEQSLRALFSAFSAYDHKVLVVVDQPNNIGRLTVAVAQDIGIDVRYLPGLAMRQLSRIHAGNAKTDIRDAYIIAHAAKNLPESLRSVDRVEEAFLQLKVLNGIDEDLARSYTRLINQIRSALVGCYPQFEQALRGQIIHRKWVLHLLARYGGPTKIKRLGKAKAAAFARRYKARNPEPVLDAIFAAISEQTVTIAGAHYAEMGVAMSAKDALLKLEHRQQIEKEVIELINDIPHTQFLLSMPGIGRKTAAQILMTAGDMSDFPSAGHLASYAGLSPRTNQSGTSIMSNSLNRAGNKKLKNALWQSSFASIRFHERSRQFYERKRREGKRHNAAVVALARRRLNVLYAMMRNHEHYHDPAPSQEDLAA

SEQ ID NO: 119769 - protein, 452 aa, unidentified
MAKLQKNEDIGKLKVQHSRCGGIDVGATLMQVCISVEDREHGSNRSFGTDTQSLRDIVNWLLGHGITHVAMEATGVYWIPLFNMLVKNGIEAVLLNAADVKNYTARKTDVNDAAWLMTLMSYDLVKPSFQIDELSRALRNCTRHRMSLVSTCSDCIRRMQKTMELMNIKLTEVISDIAGPTGIRIIEAILAGNTSPRDLAALASDRCKSSKEDIAGALEGTWEDELIFILGQHYRQYLLYREKTMQLDSVIEGKLKLLVERILKMNDGEVRTVIRSKKGTPHMKNRISFDIEALSVQIWGVNLMRIEGVSGITMLSLMGELGCNFVGSFKDAAHFCSWCNLSPCHKITGGKIISSKMKKRVNPVGLTLRNCAQTLANSKSPLGDYYRRMRSKGGGKYAVCATAHKIAAIIYTMVRNQQEYDPSKVSVNDRQWLEKRIKHHEKLLKKLKSMAS

SEQ ID NO: 119770 - protein, 341 aa, unidentified
MNNVAIVAIDLGKHTFHLHAQDDRGHELYHKKFNRTGLARHLAGLEPCTVAMEACGGAHYMAREAAKWGHVPKLIAPHLVRPYVKSNKNDFADAMAICEAASRPTMRFVSPKTEAQQALAMLNSQRDAYIKERTASVNRIHAGLLEVGISLSPGFHAIKELPALLEECSFSAQIKQLLLGLRDHFNYLDGQVKALDKQVERQAAEDDLASRLMTIPCVGPITSSVLAAELGNGQQFKCGRDYSASIGLVPKQHSTGDKTVLLGISKRGDRNQRRLLIQCARVYLMGLERQTGALADWVRQLLARHHSNRVVCALANKLARIAWSIAAHHDEFKARPSAMNA

SEQ ID NO: 119771 - protein, 457 aa, unidentified
MNPKRSKPKNDRTMPMIHPNAAAIDIGAAMHMAAVRADRTPEPIRSFGTFTTDLHRLVDWFTECGVETVVMESTSVYWIPIFELLDARGFAVFVVNARDAKHVPGRKTDVSDAQWLQRLHSYGLLRASFRPKGQIAELRAYVRQRERLLEYAASHIQHMQKALTEMNLQLHHVVADVTGATGLRIIRAILAGERDSKVLACLRDYRCHSSAEAIEKALTGNYRAEHLFALEQALALYNVYQDKASACDARIEAVLKELSISRGRDAGPLPSPRRRLHGKANGPDFDVRAALFKLLGKDLTQIDGLGSYLSLRLIAECGDDLSAWPSARHFTSWLCLAPSNKISGGKVLSSRTRRSGSRASALLRLAAVTVGRTDTALGAFYRRLSARIGKAKAITATARKIAVLFYNAVRHGMEYVDPGSSYYETRYRTRVVENLHRRAKAFGFVLLPLESKAGAVS

SEQ ID NO: 119772 - protein, 359 aa, unidentified
MEAQVKKIDFTGQNIYAGFDVHKKSWKVTIMAEDTFYKTFTQPPNPEVLFNYLKSNFPGGNYHSAYEAGFCGYWIHDKLTSFGIKSIVVNAADIPTTDKERVQKEDKRDSRKIARSLSSGTLVPIYTPTIQTQRDRSLMRTRAMLVKDMTRFKNRIKSFLFFYGINIDDAFTQSKKHWSKRFMSWLESLEIDGGSGKEALQLLISEFKNLRTSILKVTQQIRALSQTATYQKQATLLKSIPGIGLLRAMTILTELESMDRFPNLDKMCGYIGLVPSTKSSGEKEKNGDLTSRGHGVLRSAIIESSWIAIKNDPSLMKSYLTYLQRMDPNKAIIKIAKKLLSRIRFVLANKMPYQCLIEK

SEQ ID NO: 119773 - protein, 403 aa, unidentified
MSNYFAGLDWASKTHALCVIDERGGVVERFDIDHDAGGLTELRRRLRRFGSPPVAIERPSGLLVDTLVDADFTVVPIHPNAVKASRPRYRSHGGKSDASDAYVLADLLRTDGHRLKALTPQSDEIRALRALVRGRDDLVATRVHLANQLRTLLESFWPGAAAVFADIDSPIALAFIERYPTPESASRLGPKRMAAFCAQHAYCGRRSPDDLLARLQEAPSAVSAETEMEAKGELARCVARTLTRLVEQLRLLSSRIEHLVASLDDGRILMSFPRAGRICAAQILAELGSVRERFATDAQLAAEAGVAPVTYESGKSKAVTFRWACNHRLRAAITCLADNSRHVNAWAAHVYANARARGCDHPHAIRILARAWLRVIWRAWTDRKTYDPMQHRAAQVLLKTAGG

SEQ ID NO: 119774 - protein, 377 aa, unidentified
MKKELYLGLDVHKDCMATVVAEEGRTGQVRDTGVISNDLHALEKWIARLRKAHGKEVLLRACYEAGPCGFGIARRLRQLGVECEVVAPSMTPTRTGDRVKTDKRDARKLARLLRAGELTAVYIPEATDETMRDLCRARSDAVDDRRRSRHRLKGFLLRHGYRYQGKSAWSAAHERYLRELVLPHPAMKVILEEYLQAIAAAGERIERCEMGMRDLLEKWRLAPAVRALMAMKGFQIVAAMILVSELGEVHRFSHPRQVMAYLGLIPSERTSRDRRRQGAITKCGNAHARWLLVECAQHYATPPKVSHQLSRRQQGQEKEVRAISWRAQHRLHSRYTRLLGRRLLRNKAMVAIARELCGFVWELLRTQPCYQAKSTLS

SEQ ID NO: 119775 - protein, 375 aa, unidentified
MNNNNTLYVGLDVHKESITVTYAINSEPVELMGKIGTSPTDIQNLCKRLRSKSSQVSIVYEAGPCGYGLYRRLVKSGFDCMVCAPSLIPKKPGERVKTDRRDAIRLVRSLRAGDLSAVYVPGIEDEAFRDLARAWASARDDLRHARQRLKSFLLVHGVHYVGRADWGPAHRRWLSKYSFESPWRQLAFDEHRRTIEDRQAQCERLESALKEAVTEWRLYPVVEALQAMRGIQFITAVGLISELGDLTRFEHPRQLMSWFGITPSEYSSGGSRHQGSITKAGNSYARKLLVEAAWSYRHPARISPAIQKRQENLPRPVIDRAWDAQLRLCKRYRKLQAKGKNVNITIVAVARELAGFIWDMGRIAMSVAQQPQCHK

SEQ ID NO: 119776 - protein, 342 aa, unidentified
MEHYAGIDVSLEFASVCVVDATGKIVREGKVASEPEALIAWFGAFGIGLVRIGLEAGPLSQWLYARMKQAGLAVELLETRHVRTALETMPVKSDRNDARGIAQLMRLGWFRPVHCKSIGAQETRAVLTARKLVQSKLQDVENSLRGILRGFGLKVGKTTNRSFEERTHELVAGHPSLQMIAEALLSVHSVLLRELKTFDKRVRSMARSDAKSKLLMSAPAVGVIVALTYASAIDDPGRFRSSKRIGAHFGLTPRKYQSGQTDVTGRISKIGDAAVRTALYEAAHIILVKPIKGCSQLKSWAMRIARRSGMKKAKVALARKLAVILHRMLVNGIPFDAAAAAA

SEQ ID NO: 119777 - protein, 387 aa, unidentified
MPQPNDLSRSLVALDHNSTIVAVVELSQSSWLVGGVLPGIERQPRKKLEPSPERLLAVLHRWRDEAVRAGHTITRIAVAFEAGRDGFWLARWPEAHGVEAHVIHPSSVAVSREHRRAKTDRLDTELLKRGFSGWLRGERGHCSMVRVPTIAEEDAKRPNRERECLVGERTRINNRIKATLARLGIRNFKPTLRQAAERLATIHTPEGMPLPPNVLAELQRDLARLGLVISQIREIENARQKRLEQQPETTPHAMVRLLARVVGIGIETGDLLVNEVLSRPMRERRAVARYAGLTGAPDESGARRREQGLARAGNARVRRGMIQLAWRFLRFQKQSALTLWYRARTADSRIGTRKTMIVALARKLVIALWRFVTTGEPLDGVVLRPAA

SEQ ID NO: 119778 - protein, 318 aa, unidentified
MASFLGIDLSKETFHACLLSDRGAAKKVFPNSLKGFEQLVAWLRNRQAVDVHICMEATGAYWEALALYLHGIEHRVSVVNPARIKAFAQSELLRTKTDAVDAALIARFCKSQSPESWLPPPPEIRVLQAFMRHYEHLKTTRVQQSIYEQSSEASIVKAFIRQVIVTLEEQIAQVEREIRQHFDDHPDLKRKRDLLTSIPGIGETTAGSLLGEIPHLDRFESAKAVAAFAGLSPRHRRSGTSIHGRPRLCKTGNSRLRKALYMPAIVALRFNPVLKIFADRLAAAGKHKRLIIGAVMRKLLVLAYGILRSGVAFDANYA

SEQ ID NO: 119779 - protein, 402 aa, unidentified
MNAVGIDVSKGKSMVAIMRPFGEIVSAPFEIKHTASGINSLVELINSVEGESRIVMEHTGRYYEVLAHQLSEANLFVSAINPKLIKDFDNDSLRKVKSDKADAVKIARYTLDKWQNLKQYNVMDELRNQLKTMNRQFGFYMKHKTAMKNNLIGILDQTYPGVNTYFDSPARSDGSQKWVDFASTYWHVDCVRKMSLNAFIDHYQNWCKRKKYNFSQSKAEEIYGKAKELVPVLPKDDITKLIIKQAVNQLNSASTTVESLRTLMNETASKLQEYPIVMAMKGVGASLGPQLMAEIGDVSRFTHKGAITAFAGVDPGVNESGSYEQKSVPTSKRGSSDLRKTLFQVMDVLIKTHPQDDPVYQFLDKKRAQGKPYYVYMTAGANKFLRIYYGRVKEYLSSLPES

SEQ ID NO: 119780 - protein, 355 aa, unidentified
MDNKKYIGMDVHQATISAAVRDASGKLVMESIVETKAATILEFIQGIHGSLWVTFEEGTSAAWLYDLLHPHVAQVVVCDPRRNALLKAGNKNDRVDARKLSDLLRAGLLTPVYHGQSGVRTLRELAKSYLTVTKDATRVMNRLKGLYRSWAIPCGGDKVYSVRHRNAWLEKLSEPGVRRRAEWLYQQLDILLDLRREARRELLTESQKHPAHQLLRQIPRLGPIRVALIIALLQTPHRFRTKRQLWAYCGLALQTHSSGEYRVTGGRVQYTKRAPALRGLNANHNHDLKNVFKSAATQASASGDPLGDFYQNLLAGGMRPAMARLTLARKIAAIALKLWKKGERFDPGQLKRKCA

SEQ ID NO: 119781 - protein, 412 aa, unidentified
MDVFCGIDWAEDHHDIALVGRDGQLLGRCRISDDAAGLAQLLTLLAGHGDSAGDLIPVAIETPRGLLVACLRATGRKIYPVNPMAVARYRDRHSVAGGKSDHGDAVVLANVLRTDMGMHRPLPADTELAQAIAVLARAQQDAVWDRTTAHNRLRSHLREYFPGFLAAFADARGGIVRPEARAVLAAAPTPADAARLTVTRLRAVLKKAGRSRGIDTEAARLREAFRNPQMRQLPLVEQAMGRQALALLGQLNAACAAASGLEQAATESFNLHPDAGIITSFPGLGPLTGARVLAEIGDDRSRFQDAKGLKAYAGAAPITRASGKTRSVSHRRIKNNRLASVGYTWAFSALTASPGARGHYDRRRDHGDRHTAAQRHLFGRLLGCLHHCLTTGQNYDETTAFPNTAGKHPRAA

SEQ ID NO: 119782 - protein, 344 aa, unidentified
MIYLGVDLHKRSCWVTVLDADGHVLESRKLGTTRRELEEYFGQVAKPAQVAVEATFNWYYFLNVVEPLGLEWHLVHPWKTRAIASARIKHDKLDSRILAELLRTGFLAEAWIAPKAVREQRQLLRHRARSMQWSTRAKNGVHGVMNRQGIRAPLESLFGPKGRAFLAELELAKMDRWEVDDQLARLDLLGAQIATLDREIRRRSRAEGVARALEEIPGIGPFIALLLVAEVGDIQRFPTAKHLASYTGLVPSLYASGEHRWGGAITKQGSTLLRWALVQAAHRAAQSARFSTYYQQQRERLGTAKAIVALARKLAVISFYRWRAVQSSGVHLGWRMVGRSTQTV

SEQ ID NO: 119783 - protein, 316 aa, unidentified
MSESERWIGIDVAKSHLDVADTRDARPWRVPNDEAGIAALVTDLLARMPQLVVLEATGGHERAVTAALAAAAIPVAVVNPRQVRDFAKAMGQLAKSDALDARLLAVFAERVQPPVRPLPDVVAQDLAALLARRRQVLEMRTAELNRRPSLTPRLRPALDAHVRWLSQQLAELDRELDQTLRDSPIWREKHDLLRSIPGIGPVVARTLLGDLPELGSLTRWEVAALAGVAPLNADSGTRQGKRRTWGGRATVRAALYMAAVVASTHNPIIRPLYQRLLAQGKATKVALVACMRKLLTIANAMLRDGVPWDAQRAVTA

SEQ ID NO: 119784 - protein, 387 aa, unidentified
MDVLYQSCAGIDVHQANIVVCILHGPLTSTRPKREMATFDTTTKGLRACHDFLSQFHVEAVGMESTGVYWRPVWHALCDDFKLILAQPAHMKAIPGQKTDKKDAHWIAKLTRIGLLPRSFIPDETIQELRELTRQRKHYVESRNRETNRIHKILQSGGIKLTTYIEDIMGLSGRNLLQLLVDGTPITPRIVHQSVYTSLKKKVPQLLEALDGYFSDHHRFMLKQSLEIYDFYQKQIELLEERMNVYLSQYENYVEILDSIPGIDVITASVIISEVGVDMSQFPTAGHLASWAGLCPGNNESAGKKRSTKIRHGNSYLKKCLCQAAFAIKKQKGSPLADRFYQIQSRRGSQKATIALAHQLLKIAYILLKEQMTYPEFLAQKRLLGTS

SEQ ID NO: 119785 - protein, 343 aa, unidentified
METITTIGLDIAKSVFQVHGINAAGKPVVRRQLKRRQVIAFFQKLEPCLVGIEACASSHHWARELIVLGHDVRLMPPAYVKPYVKRHKNDATDAEAICEAVQRPNMRFVPVKSPEQQAGLMLHRTRHLFIRQRTALINSIRAFLAEVGIVAPVGRQGLDQLLELIAEGKDQRVPPPARTCLVALSIQLGALREQIRILDRRILGWQRTNETAKRLVALPGVGPALATALVASVADPKVFRSGRDFSAWVGLVPKQNSTGGKAKLGNVSKQGDRYLRSLFTVGALAVIKYAKQHGTQHRPWLAKLLERRPTRVAAVALANKLARMAWAMMASGEAYREPVALAR

SEQ ID NO: 119786 - protein, 354 aa, unidentified
MSATPNMITGLDVSDRHSAFYTISAGGEVEEEGRIRTTAQALRVHFQGPKRRVVLEAGVHSPWISRLLSELGHEVIVANARMVALIHKNPKKSDPVDAETLARLGRADPKLLAPIEHRSKEAQVHLGLIRTRDTVVRARTALVNHVRGAVKSVGGRIPRCSTETFPTKAADHIPDPLRAALEPILETIAHLSRQIRFFDKQIDKTCQEAYPETALLRQIQGVGPVTALAFRLVLDDPTRFKESRSVGAYLGLTRRRSDSGDFEPELRITKLGDKLLRSLLTQSAQYILGAFGPDTDLRRWGLAYWHRGGNSKKAKKKAVVAVARRLAVLLHRLWVTGDVYEPLRNSKKLGAAMA

SEQ ID NO: 119787 - protein, 347 aa, unidentified
MADQQSHVTVGVDSHKDVHVAAVIDQVGQILATTSMATTDRGSGQLVRWAQRHGQVDRFGVEGTGSFAAGLTRYLRARGYQVLEVNRPNRQTRRRRGKSDTVDAESAARAALAGQASTPKAADGTVEMIRALRVARRSAIKARTQAANQLDSLVITAPEELRVQLRGLATARRVEVAAAFRPGSLTTPVAATKLALPELARRHLALTAELERLDTELAKLVRKAAPKLVARRGVGTEVAGRLLVAAGDNPDRLRSEAAFAHLCGAAPIEASSGKTVRHRLNRGGDRQANNGLWVTAMCRMHSDQRTKDYVARRTKEGKSKKEIIRCLKRYIARELYRDLVTAVLDKP

SEQ ID NO: 119788 - protein, 349 aa, unidentified
MKILALDLAKSKSVALDMNTRTGEVEYETVRTVPAEVDVLLERRRPDRVVLEIGAAAGWVHDLAVARGIQVQVANPNGEAWRWSGLKVKTDRKDVDKLAYLSSVNQLPLVHMPSPQVRQKRMLIAYRHKLVERRTGIKCQIHAILDRQGLSCASGKKTWNQESLQRLRELSKPLAELAELELWRGLLALELTALDQIEEQLQTAEQKLNALGKQDPKVRLLRTIPGVGARLSEALVAVIDDPHRFRSGKEVSSYLGMVPRLYESGQPRRNGHITRAGSALLRGLLVEVSWLALRWNPYLAEMYKRIRGGSKTRSKVAIVAVARHLLVMAWAILRKNQPWQAPKVPAATT

SEQ ID NO: 119789 - protein, 359 aa, unidentified
MQTQRKELNFEGQNIFVGIDVHLKSWNVSIFTENLHHKTFNQPPKAESLSTYLKLNFPNAIYHSVYEAGFSGLHAHYELTNLGIHNIVTNPADVPTSDKERRRKTDKVDSNKLARSLRSKDLKGIYTPSQDILEDRSYVRVRSSIVKDQSRLKNRLRSMLYFYGIEFPIEFQKSSTHWSNRFMVWLKTVQLKTRSGNMALAMLIKEAELLRTLLLEVNKELKVLSFSEKYAKNIELIRSVPGVGLITGMLFLSEIETIKRFENNDKFAGMIGIVPDCHSSGDNEQIGEITPRRHVHLRSGLIESSWIAVRIDPALSRAFSDYCKRMEPNKAIIRIARKLSNRIYYVLKNEKKYETRIVK

SEQ ID NO: 119790 - protein, 359 aa, unidentified
MKKSSRASVSAQKPLITVGIDLGDRFSRYCIVNADGEVMEEGRIATTAAALERHFGGEARQRIALECGTHSPWVSRLLQGMGHEVWVANARKLRAITASESKNDRNDAEKLARFAAYDPRLLSPIQHRSPERQRDLNLLQARDTLVRARTMLVNALRGLLKSAGHRLPKCSTESFARVAGKAIPPGYEVAARPLIEQVAQLTQQIRGMDKQIEALAKRYPEVERLRSVPGVGPVIATAYVLTLDSPTATGKSRAVGAFLGLRPRQSQSGDSDPQHRISKTGNDYLRRLLVQAAQYVLGPFAPDSQLRRWGLKLAASGGKRGKKRAVVAVARKLAVLLHTLWRSGERYRPFPEPASKVAA

SEQ ID NO: 119791 - protein, 423 aa, unidentified
MSKKKSMAGMQALYGRVCGLDVHKKVVVACVRILDSKDGMVQSTLRSFGTMTRDIVALRDWLTELEVTHVAMESTGVYWQPIFNLLEGHFTVWVVNAQHIKKVPGRKTDVKDAEWIAQLMQCGLLRPSFVPDRQQREVRDLTRQQTKLVQQRNAVDNRIQKVLETANIKLGSVASDVLGVSGRKMIEALIAGESDVEVLADLAKRQLRGKIPQLQRALEGDLTDHHRFLLRQLLEQYDFLETKIKSISERLGVLAPSSFQAAVEKLDQIAGIAERGARALLAETGTDMSRFPTHRHFASWAGQCPGNHESAGKRKTGKTPDANRHLDSVLTEIAHAAVRTKKSYFKGQYHHVASRRGKKRAIGAVKHSILVTVYYMLRDNKPYKDLGVDYFDKLNPQQRIRYHVRKLKELGQGVELSALNDAA

SEQ ID NO: 119792 - protein, 463 aa, unidentified
MARNNKGKKHKMSGRSLKAIQPDAAGIDLGSREHWVAGPPLKDNTPNVQRFGTTTPELLRLADWLKEQKVKTVAMESTGVYWIPLFEILDSRGFEVILANARQVSHVPGRKTDMLDCQWLQVLHACGLLRGSFRPSDDICRLRALFRERNTMIDQRSDWVRRIQKSLDQMNVCVHHAVSDITGVTGMAIIRAIVDGERDPRTLAQMRDRRCQKSEEQIAEELTGNWRPEHLFNLRQALKMYDQFCQIVTEYDAEIFAYIKTLQPGVDDDQTAPPPASKSKARNIAKKGQEPMRQALYQLTGFDMTIIDGIGVDTASVVLSELGFDYSAFPDEGHFVSYLRLAPNLSISAGKKVPSKLKGTTTSRVASALRMAALALRNSKTALGAFYRRISRRKGASVAVFATARKLAQIIYRFVCHGQAYIDIGAKAYETQFNNRRLKYYTKALKDMGYKVKPLAAEQPVAA

SEQ ID NO: 119793 - protein, 376 aa, unidentified
MSKYTVAQNIAKHNQLKRKIKKLKRSNEVKLLDGERVHVAIDVHTRNYHVAMWSKDREMLVAYWHQPSSPEALCRSLLKYKDHIFHVVYEASYFGYTLVRTLRDHGFSADVIAPSLILTPQTKQEKSDRIDCTTLSFMDSKGLLRMVQVPTKQEEADRQVSRLREQTMRKQRRVKQHIKSFLTYHGIPHTTGLKFWANYAIQALRELKLDDDLRFCLDSLLDELDLLRRQITRINKRLQALMETERHGSIGKLLNTIPGVGLVTISTFRTEILAIERFRNEREVSKMCGLIPLVRRSEDKSKKGKLMKVGNQRVRTALIEAAWRLVHQDKKMEERFLKLFYTTANRNKAIVGIARRLAIIMWHMSIRREPYRVEQK

SEQ ID NO: 119794 - protein, 337 aa, unidentified
MKRTTKYVALDVHQATTVASVREESGRVIARSVLPTDHASITEFMRGMRGAVHVVFEEGTQAQWLHDLLAPVVDRVVVCDRRGSPRQGNKGDQVDADQLSELLRRGGLRAVYHGSAHRAVLKELTQTYRNLVEDSTRVMLRLKALFRARAIPTPGTTVYQARARGQWLAQLADRGARFRAEALYAELDVLRRLRPRAKAAMVTEARRDPVWPVLRTIPFLGPVRVALLLATMQTPWRFRTKRNLWAYAGLAVVTRSSADYAVVAGETVRRRRPPMTRGLNRNHNRVLKDVFKGAATAATARPGPLQDFYHSVIARGTREELARLTLTRKLAALTLRL

SEQ ID NO: 119795 - protein, 348 aa, unidentified
MDHYAGIDVSLEYSSVCVVDGSGTIVREGKVVSEPEGLIAWFGSLGLQLVRIGLEAGPTSQWLYAGMKQAGLAMELLETRHVRDAFKAMPVKSDRNDARGIAQLMRLGWFRPVHCKSIGAQETRAVLTARKLVQSKLHDVEMSMRGILRGFGLKVGKTSASGFAGRIEELVAGHPHLEAIAAALLPVRAVLLREFNGFEKRVRMMARADANAKLLMSTPAVGPIVSLTYASAVDDPARFKSSKQAGSHFGLTPKKYQSGETDRTGRISKIGDAAVREALYLAAHVMLTKPVKGCSELKSWAMRIAKRAGMRKAKVALARKLAVIMHRMLADGQPFNPAARTKPVAAAA

SEQ ID NO: 119796 - protein, 427 aa, unidentified
MKNSTARKLRQIPAGYLIVGIDTHKKRHAAVVKTQDAFTRAKFKVSNSRDGFAELLERTKAQMVKTDSRGTIFAIEAGSRYWRTLAYFLEEQGIPFRLISPFTLKRRREGEDIDRRKNDYRDADMAAELLRTGKFTETRLPQGIYADLRAAYHTYHSLGRERSRATNLLSALLDSLFPEFHNVFKDVSTKTALAVLAAYPLPHVIAEMSMEKFMDTMMTKYKGQHIIRKKVSAIYQAAHNSVGIHAGAGVVCFEISLLVERIRLLTEHRRKVEDLIVTLVEWIPESKYLLSIPGLGHITIAGILGELGPLNHYRSGKQLVKMAGINPMQSESANKQASKTPMSKKGRPLLRYCLWEASLNILNHNQEFKAWAKRLQERPLHQNPLKKREARGAVCKRLLYLVFALFNKHSFYEKNYKVETERELVVA

SEQ ID NO: 119797 - protein, 365 aa, unidentified
MKKIAYVGVDYHVKTITCAVIIEGEKDFLNTIRFKNNDKNIKKYMKKLSETYDLRTCYEASCNGYSFQRKMRSWGYHCDVIAPSLVPKKPGDRRKNDFRDARTLAQHYAQGMLAVVHPPTEQEESVRSLIRCRLAMKKNGKSVKQQINSLLLTQDLHWSKTKWTDQHRAWLSKLKLRDKYSQQVLDELLGLLGYLDSRIQYLDKQIEEVACSDIYAPSVKKLKAFKGIKTLTAMLLIAEITDFRRFPNPKALMAFLGLIPSEDSSDDNRKGGSITKAGNSRCRLQLIESVIHYTKKPVISGQMQKDLKEVDSHSANIAIKCMKRLHKRYWSLVLKGKNSNKAKTAIAREFVGFIWAMMQPEPATI

SEQ ID NO: 119798 - protein, 437 aa, unidentified
MSKRLLAGLDIHLKHNHVCLMTQDGQLVIPHRRFDNNWPGFQEFVGMLVRVLNEGQFEGLDIAGEATGMLWFHPFYHLDQTEELLPFDLHLYLFNPRTIKHFKKVLAERDKVDPKDAHAVAERLRFGGRLPHEVSFDERYLPLQRLTRYRYHLAHTLAREKVYARLVPIYLKASDYTRKPKPFSDIFGATSRHILSKYATIDELAAMPLDDLAEELDRIGRHRFVDPADNARRLQRVAAQSYPLASCLVEPVNVILHSLLAHIRFLEEQVERLDPLIEAALADTPGAPYVRSIDGLGLVYTSGILAEVQDPARFMQGLKQDKKGHLRPKTKHDGQSALARFVGLWWPRGDSGDFQAEDRRLPRTGNPYARYYFVEGANSLRRHNAEYAAYYQRKFDESLKHKHWRATVLTARKLIRLVFALLHEEEMYQPPEVHSRS

SEQ ID NO: 119799 - protein, 318 aa, unidentified
MENISQWVGIDISKATLDVYLRPMGKAMKVANTKEDISKLVETLKSYTVNLIVLEATGGLETELVIQLQEADLPVALINPRQGRDFAKATGKLAKTDAIDAQILAHFGEAMQPQILAVESEESRQLGDLISRRRQLVEMRTAEKNRRERARGKALVDIEAHLEYLDNCLEKLNQEIEELTQANQQWLEKVNLLKTVPGIGQVISTTLVSDLPELGQLTAKQISRLVGVAPINPDSGQHKGKRMIQGGRAQIRATLYMGAVVAMRHNPVIKTFYERLVGRGKSKKLALTACVRKILVILNAMVRQNQPWQLADNLPPCS

SEQ ID NO: 119800 - protein, 354 aa, unidentified
MIIIGCDYHPGFQQIAYVDTDTGELQERRLQHREEAETFYRELLAQGVRVRVGMEASGHARWFERLLAELRIELWIGDAAEIRTKRVRKQKTDRQDAQLMLKLLLEDRFPRIWVPSGENRDLRQLLWHRHRMVQARTRIMNQLQAVALNEGLRRKKGLWREAGRKQLEGFRLAPWASRRRHDLLELLDRLTPTIAELTQAIEREVEKCPEAQRLTTHPGVGSLTALAFVLIIGRAERFQCGKQIASYLGLVPAEESSGDRQRLGHISKQGNSLLRFLLVEAAQVTVRSDSEWRRKFFHLAMRRGRKIAKVAMARRLAVRLYWMWRKEWDYEQLKKFSPHAGQPGTGVGVEANTE

SEQ ID NO: 119801 - protein, 412 aa, unidentified
MSIYCGIDWAEGHHDVALAGDSGKLVAKLRIDDSLAGYQQLLELLELLAEHGDSEGSPIPVAIETGRGPARGLPAAGKTAGLCPQPVSVARYRDRHRVSRKKSDPGDALVLANILRTDADMHRPMPNDSELAQSVAVLARAQQDATWNRQQLTNQLRSLLRDYYPAALEAVASWQNGLCRPEARAILTVAPTPGKAVVINRKRLCTTLKRAGRVRGIEAEAERWLEILQRPQTRHPKLVEDALGQQMLGLLRQLDAACRTVDELAEATEKAFRQHPDCEVMLSFPGLGVQLGARILAEIGDDRSRFDDARGLKAYAGAAPITRASGKHHYVVRRRIKNNRLHNAGFLWAFSALTASGGANAHYRRRRARGDLHPAALRHLFNRMLGQLLHCLQARTLFEETAAFPMPLLVAA

SEQ ID NO: 119802 - protein, 354 aa, unidentified
MPPKTTSLEACRTIGIDIGKNTFHLIGLDKMGAIVLRQKLSRNQVNIRLANMPRCLIGVEACVGAHHLSRQLKALGHDARLMPARYVRPYSKGQKNDFRDAEAIAEAVLRPTMKFVAIKTVEQLDLQGLHRVRERLVCQRTSVINQIRAFLLERGIAVRQGLRALRTAMPNVLAMTDKLSPRMIHMIEDLCTDWRHLDARIATVSNEIETLSEQDDGAKRLMTVPGIGPIISTATVAAIGSGDVFSKGRDFGAWLGLVPRQMSTGGRTILGPISKRGNRYLRMLFVQAARSVLLRPKSWQKYGLKSWIEAAARRLNRFKLAIALANKIARVAWGVLNGGRNFEVRSMRTAPQAG

SEQ ID NO: 119803 - protein, 429 aa, unidentified
MGFMSEIEVMGQEPQFAAFVGLDWADQKHAWCLQAAGATQRENGEVEHTPETVEAWVGQLCRRFGNRPIAVAVEQVKGALVFMLSKYELLHLFPVPPAMSASMRDALYPSGAKDDPRDAELLLDLLLKHRDKLRRLAPDSEATRRVQNLVEERRNLVDEKTAQTNRLTNHLKIYFPQMLGWFDRLDTEMVCALLEHWPTLEELQKVPPARLRTFFRKHRCRDQELIERRMVGIHQAIPAIRDGAVIEAKSAVVKVSAQLIRSLARGIADLDRKIEEAAAAHPDFFIFESLPGAGAALAPRLLVAFGSQRERYANAEEVQAYTGIAPVTERSGKKKWVHFRWACPKFLRQTFHEWAGHSIAHSQWARSYYQQQRERGKGHHAAVRGLAFKWIRIVFRCWKDEVVYDENKYLAALAKRHSPLAAVVAEIIL

SEQ ID NO: 119804 - protein, 435 aa, unidentified
MSFTSPASIDPVWAAFAAIDWASQKHSWSLLPAEGGSIESGQLDNTPEAVELWAAELRRRFPQAPIAVALEQKRGSVVYMLSKYQHLVLYPVPPSMSAAYRRAFCPSGAKTDPGDANLLLDLLVHHRQQLSPIATDTAETRLLRFLVEQRRQLVQQKVGLIQQLTDSLQQYFPQIRTWFGSLDTVLVTALLHRWPTLSDLQHAHPGTLRRFFVDHACRNDDLIQQRIQAIYAALSATTDPVVIEAGTRKTAAIGSLLAAAREQIHALDKRIAAVVADHSDAELFASFPGAGAATVPRLIAAFGTDRNAWTSAAALQCFSGIAPVHKSSGNSTVVVMRHACPKFLRQTFHEFAGQSIRFSEWAKAYYRHQREDQKASHHTAVRSLAFRWIRILYRGWKDRQLYDERLFLEAQGRRNTPRTGWNTAAGFHKPATPNS

SEQ ID NO: 119805 - protein, 355 aa, unidentified
MNSVRYIGLDVHRDTISAAVLNESGRLIQQSILATRAAAILDFIGGMRGTLHVTLEEGTHSAWLYDLLARRVARLLVCNPRKNALLKSGNKSDAIDARKLAELLRADMLSPVYHGEKSALEVQHLARSYALLTEDTTRVMARIKAVFRSQAIACTGKKLYGHKHRDEYLSALGGGALRRRAELLYQELEAVQQLRRQAKHDMIVECRKYPECKLLCSVPFLGPVRAAVLIGRVQTPHRFRTKRQFWAYCGLALEMRDSGEYRMVDGQVERRKRPAQIRGLNWNHNHELKNLFKAAATSASASNGVFREFYLGLLKKNMRPEMARLTLARKIAAIALKIWKKGEAFDAEHLKLQAA

SEQ ID NO: 119806 - protein, 342 aa, unidentified
MTTMHYIGFDIHKKTIAFCEKKVDGTIVEQDTIPSTRNGLRVWASQRTCPWIGAMEATMFTGWIYDFLQPYAAELKVAHPAMLKALAAAKNKNDRSDAERIADLLRCNLLPECYMAPEGVRELRRILRFRNLMVREATKMKNKTSGILMEVGAVYNKKKLHGQRYFEELLDTLNYVPESVTNLLRLCRMNTTHFVHLQKQLIKGLVANPDIAKRVKLLMTIPGIGEVTALTWALEIGEIERFTRISRAISYCGLCSAQSESAGKNKRGPISKKRNKHLQRVLIEAAKLAPRWCPQLAAVYDKEFATGDHNSATLAVARKIVAYMLAVDKNQVAFQAQEVKVA

SEQ ID NO: 119807 - protein, 357 aa, unidentified
MIVMKYYTSTTEFNCGIDLHARQMYVCVLDRDGKKLVHTNIKNNDFAYFLKLVAPYRHDLTVCAECMFGWYWLADACADAGLHFVLAHALYLKAIHGGKNKNDRIDSEKIAQLLRANLIPPGYVYPAAKRPLRALLRQRLLYVWNRSELLARIQSHQLAYNRPTHRQTLYNRETWSEQLLTAEPDPVRQLALQNDLALIGHYDTQLALLEKELLKLTKQTASRDFTLLQTTPGIGDYLGLTILHEIGDIARFPTVKNFLSYCRLVKGTVASAGKIKGLRGAKLGNPYLRWAFGEAAVVAKRDPLVIGPLAQRLETRLNNKFKANTVLAIKLARAVYFMLKQKTVFDPERLVAALSKN

SEQ ID NO: 119808 - protein, 414 aa, unidentified
MEQKMLYVGIDWADDHHDIVITDDSAKTLDQFRIDHTCDGFALLHSHIANRQTSSSLVVIAIETSRGLLVHELLQKGYTVYAINPKAVNRYKDRHVLSKAKSDILDALSLGHLLRTDRHLFRPLEPLPEDYRLLDRLCGDLRKAIDEKSRIINQVISCSKEFYPKALEMFSLNSQIFIDFLNAFPDHDALSACKKKTLLAFLRKHRYSYPAKAEELWKTIQSPSLQPDKITARSGRLRLGMLLGQLENLKKHITHYEREIQHILDHLPESTPVKSLPGVGERLAPELVAILGPNSKDGHHRFQAAAEIAKLSGCVPVVRESGKWRTVSLRYACVKPLRRTFRDWAFTSISRSRWARAFYDYHKQRNQNHSTILRNLGKKWIKILFALWSQGTTYDEMVHIQNLKAKKVTWAMAL

SEQ ID NO: 119809 - protein, 408 aa, unidentified
MNPLFVGIDVSSRNNVVYLMKPDGSKHSSFSVQNNLGGAKLLSEKIVSALHSMQLIDVVIGLEATSIYGDSLVYALREDGSLGRFRRKIHVLNPKQVKKFKEAYPDLPKNDFVDAFVIADHLRFGRIAKEVYMDDYRYQALRTLTRARFDVIQNLTREKQRFANYLFLKCSGMAQDKDIQNTSATTIALMEHFETVDDLANADLDELTAFIAETGRGRFANPNAVAKVIQTAARGSYRLPKTVNDTVNQAISVSIASMRALKEQVKVLDKAIEQQFEIIPNTLISIPGIGKVYSAGIIAEIGDIHRFDSQASVAKFAGLVWLKNQSGEFEAEHSQMIKSGNRYLRYYLLESANSVRRCDSEFRRYYDLKFKEVNKYQHKRALALTARKLIRLVFRLLKDNRLYIPPEG

SEQ ID NO: 119810 - protein, 349 aa, unidentified
MSIVGTNPDAVIGGVDTHADVHVAAVVNHVGGVLGVESFPTTVKGYRQLVSWLASHGELVLVGVEGTGSYGVGVARYLTREGIDVVEVDRPNRQTRHRHGKSDPVDAVAAARAALSGTATGLPKTRDGNVEAIRVLMIARRSAVDTRIETLNQLRHVVFTATAETRAKFTGLTAIGLANKAAALKPRASDPDQVRHLTLVTIRILGRRVQYLREETKTITRLLRPLIRATAPGLLEVYGVGFNTAAKLLVAVGDNPQRIRTEAAFAHLCGVAPIPASSGKTIRHRLNRGGNRQANSALYHIVLTRMKHHQPTRDYVARRLKEGKTMGEIARILKRYVAREVFKQLPRPS

SEQ ID NO: 119811 - protein, 340 aa, unidentified
MNQSMTIGIDLAKHVFFVAALDGSGKPARRKKLRRQEVLPFLANHPGAVVGMEACSGAHHWAREIRALGHSVQLLPAQHVKAYLRGQKNDYNDALAIAEAVQHGRIRCVEIKTVDQQLDQSLHRLRQALVTEQTGLINRTRALLADHGVDLPEGKYRFRQAVLAQLEDAQNGLPWRLRELLGRQYQLFIALEQELAWYEREIKTKAAENEACQRLMSVPGYGPIVSSAFYGWLGSGQQFRCGRDVAAALGLVPKQYSTGGKTVLGSISKREDRHLRALLVHGARAVARYAKERDDRLSRWVCSLIERRGYNKAVVALANKLARIGWAVVARGQPYQAVPA

SEQ ID NO: 119812 - protein, 381 aa, unidentified
MTTLATHNPQDTTTAGPLFVAFELSEKTWKLGFTTGHGQKPRERTVTARHQECVLAEIAQAKHRLGLPDTVPVVSCYEAGREGFWLHRFLQAQGITNQVVDSSAIEVNRRRRRAKSDGLDVRKLLSMLMRYHHGERQVWQGVKVPSVEAEDHRHLHRDLETLKQERASTTTRIQGLLSSQGIRLTSLPQLPEQLEALRLWDGSPLPPGLRRRVLRVYAHHTFLSEQIAAVEAERRAQLQTSTEAQSDKVRQLMQLKGMGINGAWLLVMEFFGWRAFTNRREVGGLAGFTPTPYQSGDSARAQGITKAGNRHVRWMTTELAWSWLRLQPDSALSVWFRERFGKGGKRLRRIGIVAVARKLLIALWRFLETGVLPAGAVLKEG

SEQ ID NO: 119813 - protein, 425 aa, unidentified
MNMVQDAGAATPEFAAFVGLDWADAKHDICLLAEGASKPEASVIASTPEAIQDWIQLLQKRFGNRPVAICLEQSRGPLIYALMNYAFITLYPINPVQSAKYREAFAPSGAKDDPVDAGLLLDLLCRHRAQLTPWKPDDVQTRTIRGLSEERRHAVDLRTKCVQKLTARLKTYFPQAIDGFVDDLTSLMACDFLLRWPTVAEVKKAKPAALRAFFHGHNCRNETLIAQRLDAIAKAVPLTEDPGVVTPAVLTVQTLARVIRDLSVAIAKFDQQLAEIFATHPDAPIFNSFPGAGDVMAPRLSAAFGSDRQRWRDAGAIQSFSGIAPVTERSGKSAWVHRRWKCPKFYLQTFFEYAQRSIPYSVWAGAFYRQEIAKGKGRNAVIRALAFKWMRIQMACWQQKVPYDESRYLQSLIQRGAPLAKLIQT

SEQ ID NO: 119814 - protein, 321 aa, unidentified
MEPAIVGVDIGKQEFSVALLLDSGDRNGVFRNTAAGFAMFSRWLGKHGVERAHICMEATGTYGEDLAQHLHHAGHVVSVVNPARVKGFGQSELSRTKTDKADARLIARFCRAMKPEPWQPPTPATKELRAQVRRLDELKSMLIREKNRLQSADDVVKPSIQDMIGLIEDRIIQLTQQIRDHVDRHPDLRARRDLLETIPGIGPGTSAMILAEFGDVSRFPDAGSMASFCGLTPRHHQSGTSVHGRSMLSKTGSSRIRQALYMPALSAIRYNPVIRAFRARLLANGKHKMIIVGAVMRKLVYLAYGVLKSGKPFDPVVAGLA

SEQ ID NO: 119815 - protein, 408 aa, unidentified
MERFYLGVDWADQFHQIWVSDFEGKKVIEKKVVESVEGLAEFGRWLDESRAKGMEHWAAIEKPHGRIVDFLLDHGVEVYPVNPKALDRVRDRFRMSQSKSDGFDAYVLAQFVRTDHGHLRALRPNSIEAQELKLLTRDQHRLGREKTRLLNQLRATLKEYYPRPLEVFSDLETNIALDFLKQYSTPQDLSKLTRRQWNRFAKREHHLGEERAEELWEKLHQPQLPVPDHVVRAKMRLMSVLVGQLEPLREAVKSYEERVKSFFASMPAAELVQTLPGTKTGTIVATVWAELGDAKDRWESFRHLQAEAGVVPVTKASGKSRVVQFRFSCNKVLRHGAYWLAFVSLNRSEWANHYYRDQRAKGHSHHQSLRALGAKWLKIIFVMWRDHKPYDENYHLANITRQKMRQAA

SEQ ID NO: 119816 - protein, 430 aa, unidentified
MKYALIQVLPDAPAGRVFAGIDWATADHVACVVDMAGRVIDRFSAVHDKAGLEALISRLRRGGVSEVAIERGDGVLVAALLAAGLTVVVIASRQVKNLRSRYGSAGAKDDRFDAFVLADTLRTDRARLRPLIPDTPATLALRAAVRARRNLVAHRVAACSQLRAHLAVAFPAAIGLFCDLGSPVSLAFLERFGSQDAALQLDEQAIAAWLKTVPVRGRPAPVSVLCARLRAAPGGVTGEDGAALAGVTAALTATVAMLAAQIKTLETVIGVRLAAHPDAHIFTSLPRTRALRAARLLAEIGDCRARFPDPDSLAGLAGVSPVTRQSGTHTSHTFRWAVSRQLRDAVCDFADGSRHASAWAAGIYDAARARGKDHPHAVRILARAWIYIIWRCWQAGTAYDPAKHTALQAILDQQQAARTAAAGPGPEVTP

SEQ ID NO: 119817 - protein, 338 aa, unidentified
MKLYGAIDLHSNNNVTVLIDEKDKVVYQKRLANDLPLVIEQLSPYASSMEGIVVESTYNWYWLVDGLMEKGHRVHLANTAAIQQYEGLKYTDDDSDARWLAHLFRLGVLPEGYIYPKEERAVRDLLRKRSQLVHHKTAHLLSIQNLYSRNTGASLSANRIKQLTSETVDARFTASDLALAIKANLSVMRSLETEITVLERVVKERIKLKPAYRYLLTVSGIGQILAFTIMLETGEIRRFPKVGNFVSYCRCVKSEKLSNGKRKGSGNTKNGNKYLSWAFVEAANFAIRYEPLVARFYQRKKAKRHRVVALKAVANKLARACYYVMRDEVPFDVARAFA

SEQ ID NO: 119818 - protein, 442 aa, unidentified
MKQKKVLKKVVRGLPKNLQHINVHAAGIDIGSRSHFVAVPEGIDEMPVREFPSFTGDLEQMAAWLISCGVTTVAMESTGIYWMPAFEILERHGIEVKLVNARHVKNVPGRKSDVLDCQWLQQLHTYGLLRGAFRPDAQVCTLRAYVRQRAMMVRSAASYIQRMQKALSQMNLQLHNVVTDITGLTGMRIIKAILSGERKPEVLAAMRDRRCKNSVATIARSLHGSYRPEHLFSLQQAVEFYEFHQEKISACDLQILEQLKSFDSQNDKPPKNVAEALQLMSGVDLTSIDGIDTNTALKILAEIGTDMSRWKSAKHFASWLGLSPGTRVSGGKVLSSATKPVANKAAAALRIAAFTLLNSKSALGAYLRRQKARLGAPKAITATAHKLARLVYMMLKQGTAYVDAGQEYYEKRYRGRVVQNLKRRAQELGFELVAIQETMTPA

SEQ ID NO: 119819 - protein, 342 aa, unidentified
MVIIGCDYHPSMQQIAWCDDQSGQRGERRLEHATGEAEKFYRELKQRGVQVRVGLEASGHTRWFERLLAELEMELWIGHPAKIAAQRVRKQKTDRGDAQLLLQLLQEDRFPKLWIPSPENRDLRQLLWHRHRLVQMRTRVKNQLQSIAMSEGVRRRSRLWSRLGRAQLDSLVLPPWTARRRYDLLQLLDQLTPQIAELSRAIEQEAERRPEVLRLMTHPGVGPITALAFVLVLGTPQRFRCGKQVGSYLGLIPCEDSSAGKQRLGHLSKQGNTLLRYLLVEAAQAAVRCDPQWRRRFLHLAMRRQRNIAIAAMARKLAVSLYWLWRKAEDPPAPPQSGSHVG

SEQ ID NO: 119820 - protein, 341 aa, unidentified
MQDVTMVGIDLGKNTFHLHGQDRRGKAVFRKKLGRRQVVEFFATFHACTVVMEACAGAHHMARLLTTFGHQVKLISPQFVRPFVKSNKNDFVDAEAICEAASRPTMRFVTAKTESQQTLSALHHLRESFVRDRTRTVNQMHGLLLEFGVSLPVGKASVARLPAFLTEHSLPPRLIAILQRLHNHYKYLDSEVSHIEKEINAQLADDELGQRLLTIPGIGPVTASVLAAEMGDGKQYRCGRDFAASVGLVPRQYSTGGKATLLGISRRGDKNIRRLLVTCARAYMLRLEGRTGHLADWVRAMLTRRHSNVVACALANKLARTAWSMAAHGTAYCAGSTVASD

SEQ ID NO: 119821 - protein, 380 aa, unidentified
MRHTANKFLVPFRLQVPIRILSNGLIKDISKATLPVKKQLIMSKFTKKKAFIGVDISKDTLDFSILLDSDPQSFEDKQVPNSFSGFSKIEKWLSSKPFALNECLFCMEHTGTYGLLLFAWLSQLEVDYVVEPALRIKRSMGMARGKNDRVDARRIADYAYTNRTKLKPFVMPSSLLLQIKQLLTYRDQLTRMSTSLKNSLKNHREYEQVIGSTSITESITGQIDDIQTKKEDIDRQIKELIQSDKELNKNYNLVKSVKGIGLMIAAYMLVTTHNFTSFENGRKYACYSGIAPFEHTSGSSIRGQTRVSHLANKRIKTLLSNGANSACKWDPDLRAYYKRKTGEGKDHNLVINSISCKLVNRVFAVIKRQTPYVTMYAQNF

SEQ ID NO: 119822 - protein, 339 aa, unidentified
MNITTVGLDLAKNVFHVVCLNEHNKEVRKKMLRRNQVRQFFAQLPVCTVAMEACATSHDWGRELIALGHEVKLIPPQQVKPMVQGNKNDYNDALAIAETVNRPKTTFVAVKTVEEHDIQAIHRMRSQCIRDRTALSNSTRGLLGEYGISFSKGLATLRKKIPELLEDADNGLSFRFRNLLARRYDQLVELDEHIAFYTKELEILSRQDEACQRLQTIPGFGPIVASAFRSTVGDGSAYARGRHAAASLGLVPRQHSSGGNNLLLGISKRGDRYLRKLLVHGARTVVRHAVDRDDPFSRWINRVSERRGKNRAAVAVANKLARVGWAVLRYNTEYDPAMA

SEQ ID NO: 119823 - protein, 336 aa, unidentified
MSELVTVGIDLAKRIFQIHGVDESGRVLVRRQLRRSQLLAFFEKQPRCLIGMEACGGAHDWGRRLQGMGHDVRLMPPSYVKPYVKRGKTDAADAAAICEAVTRPSMRFVAVKSESCSSVLVLHRTRDLLVRQRTQIGNAIRAHMTEFGVIAAKGAQNVDRLRTQMHQLPEAARLPVSLLFEQMVDTDTRIEQLTGEIGAIHAQSETSQRLATIPGVGKLSATIIAATTPEVGNFDCARDYAAWLGLTPKPHSTGGKQRIGRISKMGNRYIRRLLYLGAISQIMVRSRCGARQDWLSDMLSRKKTKVAAIALAHRMARTIFAVLRDGSRYQPQATTA

SEQ ID NO: 119824 - protein, 413 aa, unidentified
MDVLHHRCCGLDVHKSSISACILVQEAGRVQKHQRRFGAMTQDLQELANWLRQFEVAQVAMESSGVYWKPVWNILEGQFTVVLANAQHIKNVPGRKTDQKDAEWIAQLLQHGLLRPSYVPCEIIRDLRDLTRMRTSLSQEASRISSRVQKVLEDANVKLASVATNTLGKSGRAMLEEIIAGQDDPEYLASLALGHLRAKTPQLRLALEGKIRAHHRFLLRRLLDQLRFVEHEIVLLDERLEDIGRERQELSQAVARWDTIPGIDRVAGWTLLAEVGHSMSQFPTAEQLASWASLCPGNHESAGKRLGGTTRKGSPWLRRMACQCAWAAARTKNTYLSAQFRRLASRRGNKRAIIAVAHSLIIIGYYLQKNQRNYEDLGADYFDRIDSDGLKRYFIRRLEKLGHKVTLAPIKAA

SEQ ID NO: 119825 - protein, 407 aa, unidentified
MEVLYPRCAGLDVHAGSITACMRVATGATVTYEQRKTPTTTRGLLQLAEWLTEHGCTHVAMESTGVYWKPVWHVLEEHFTLILANAMHIRNVPGRKSDMNDARWIADLLAHGLIRSSFVPPAPIQELRDLTRTRRQLVHEAARHVLRIQKTLEDANLKLTQVMSDITGVSGRAILNALIAGETDPDKLADLTRGRLKATRAELVDALHGRVTDHHRFMIKLHLSQLDALDAAIASLEARIGAALGPFRPAVSLLTTMPGLRETTAHVLVAEIGIDMTRFPTVGHLISWAGLCPRLDESAGNRRSTRTRQSAPWLKPTLVNAAWAASRKKDSYLRAQFLRIKSRRGAKKAILAVASSMLTAAYFMLRNGVEYQDLGPRYFADRDKTRLTKRLLQRLQDLGVTVEVKAA

SEQ ID NO: 119826 - protein, 412 aa, unidentified
MEGETVIAGVDTHKDVHVLCLLDGLGRKIWSGSFGADPEGYDRLAEAIGDPGSCMVVGVEGTASYGAGLTRRLVELGYNVVEVLRPKRDKVRPGEGKSDPLDAERAARKAASGRGCSVPKSQDGWVEAVRQLYVARRLAVATSTSCVACAKSMPTTAPSALRERFRGRERPKDLMPLLARGRKAGDALEESVLASLRSVAAVWKEARSQVESLDERIRALLEANAPALLGVEGCGTTTAAALVVAAGDNPGRLKGEAAFSMMCGASPIPASSGKTDRHRLNRGGNRQANWALYEIAIKRMAYDERTRRYVARRTSEGKSRREAVRCLKRYIAREVYHVLMDPNPDGAAPEGPELAKMRKAMRVTQKKAAAELGLSAATLGHLERGKRRSTKLERRYYELLCELERTLPQTAS

SEQ ID NO: 119827 - protein, 429 aa, unidentified
MIDIEETDEAVDLVERVCALDIGKAALTVCIRVPHDDKPGHRRQEVREHATTTRSLLDLAARLHAAGVTLVAMEATSDYWKPAFYLLEAEGFTCWLLNARHVKNVPGRPKTDKLDAVWLAKVVERGMCRPSFVPPAPIRRLRDLTRYRRTLIRERTREKQRVEKLLEDAQIKLSSVASDIFGVSGRHMLQAMIAGQRDPKVLAQLARASMRAKIRQLEEALTGHFDDHHGFICQMMLERIDELTSRIEELTARIDEQVAPFAAQVAQLDAVTGIGGVCAQELIAELGVDMAVFPTAAHLVAWAKFAPQANTSAGKAKTAATGKGNPWLAASLGEIAVTAGRTNTFLGERYRRIAKRRGKQRALVAVGNSVLTIVWHLLADPHASYCDLGPDFYQSRSSRHRQEHNLIRQLQQLTGKTVTLTPRPATPAA

SEQ ID NO: 119828 - protein, 341 aa, unidentified
MMIIGCDFHPRFQQISFVDQETGEYGERRLSHPGEAEQFYRSLAGRQVRIGAEATGNFRWFRRLMQELGLEFLLGDASAIRASCTRKQKTDKRDARHILTLLVEDRFPAVWQPPMENDDLRQLLMHRCRLVRMRTGVKNQLDSMAKNEGVLSPRVWSSKRRSEIEALPLPGWYAQRRSDLLGLLEELDERIKPLDKAVGEAAEGNAEARLLITHPGVGPIVSLAYVLTIGDWRRFPRGKQVGSYLGLIPAEESSGNSRRLGHISKQGSTLLRWLLVEAATTAQRYDASWHRQYVRLSMTKHHGVAKVAIAHKLAVRLYWMLRSGEDYSNVMERGSHVGQSV

SEQ ID NO: 119829 - protein, 339 aa, unidentified
MNLYAGLDLHSSNTYIGVLDQQFNRIFKKRVSNDLDLILKTLEPFRARLKGLVVESTYNWYWLVDGLMDAGYACVHLANPCAIKQYEGLKHSDDQHDAFFLAQLLILGILPQGYIYPKETRPVRDLVRKRLFLVQQKTAHILSLQSLLARCCCQRVSSNQLRKMTSHDLRQWLKEEHLVLSAQANLDNIVFLKQQIGRLEAAIQKQVKLSDAFNCLLTVPGIGKILAMTIMLEAGDIRRFATVGNFASYCRCVSTQRLSDGKSKGSGNRKNGNRYLSWAFTEAAQMARRFNSRFRSYYDRKAAQTNSILATRALSNKLARVCYYIMRDQVEFREELTAH

SEQ ID NO: 119830 - protein, 354 aa, unidentified
MYYVGVDYHKRSSYVTVVDGQGRVVKEGQIANSREAVAAALKGIEGKTAAVLEAGRNWPVMYDWLEELVDQVTLAHPGKVRVIAEAKVKTDRIDSRMLAQLLRADLIPRAYVPGKVTQEQRRQLRQRMFLVRLRTMLKNRIHILLDRHPELSEQAQRFSDLFGKGGRQWLAQVAVPGVDAQLLAEDLELLEIIEARIKASDGWVSQLSRRDGRATLLATLPGIGDFFALLLAVEIDDVERFSRAQKLCAYAGVVPSTYASGGYVRHGRITKQGNKWIRWACIEAVYPAIRKDPALAAMYERLKPAKGANVAKVAVAKRLLTIAYRLLKEGRPYRPATEQTRIRRRISPAAPVCA

SEQ ID NO: 119831 - protein, 319 aa, unidentified
MFTLGIDVAKDTLDAALFDGAKYKTKTFRNTHAGIQSLLEWVDHHHAGRCAVGLEATGSYSEAVACTLHDAGHPVSVINPAQIAAFVRAELGRSKTDTLDAKRIARFTALHSPPQWSPPPQAIRVLQALVRRLDSLLDLQQQENNRLHTAHPSVQDSIRAVIDALQVQIDDLRQRIRDHVDQDPELRQRRDLLESIPGIAERTSAVLLSHVHILDRCRCVKKWIAYAGLDCTIVQSGSSVQRTGHISKRGPAALRAALYMPAVVAMRHNPILSAFAGRLRTAGKPGRVTICAVMRKLMHIVYGVLRSRKPFSSTPVAAM

SEQ ID NO: 119832 - protein, 348 aa, unidentified
MAMTIVEAGRTVVGGVDTHLDVHVAAALDSIGGVLGVESFDAAPRGYKAMLEWMGAFGEVAKVGVEGTGSYGAGLARFLRRSDIEVVEVDRPNRQVRRTQGKSDPADAVEAARAVLSGRADGTPKSRDGGVEAIRALLVAKRSAREGRLRAINQMRHLSYTAPDQLRSRLKGLSTTQLVVEAAAMRPRPGGDPVVYATKVALSSIGRRVLALEEETAGIDELLDELVTATAPSMLEIFGVGIDTAATLLVAAGDNPERLRSEAAWAHLCGVAPIQASSGKVTRHRLDRGGDRHANNALWRIVIVRLRSDPRSRAYMERRTKEGRSKREVIRILKRYVAREVFKQLPRA

SEQ ID NO: 119833 - protein, 356 aa, unidentified
MSRDIKYIGMDVHKEAIVIAVLNGSGKLVMETIVETKASSILQFIHGLRGELHVTWEEGTWAAWLYDLLQPQVEQVLVCNPRRNALLKEGSKSDQVDAQKLADLLRTGMLRPVYHGENGLRTLRELGCSYQTISKDLTRVMNRLKALYRGWGIPCAGTQVYGPRYREEWLTKIPQAGVRRRAELLYQQLDGLQGLRRHLRPEFLAESQKHKASKLLRQIPCIGPIRAARLIALMQTPHRFRSKRQLWTYSGLGIETHDSAQFRFVSGQLQRSRKPQQIRGLNRNHNHEMKEIFKSAATRASCGRGPFHDFYAGLLAKGMKPEMARLTLARKIAAITLTLWKKEERFDAEQLKPQAA

SEQ ID NO: 119834 - protein, 458 aa, unidentified
MSFRPSGFPTSVDGEGSVRVVRYVGMDVHREFAQLAVVEDGLVRDVGRIGVTPEALRTWAAGLRPDDQVALEATGNSDAIATMLTPLVARVVVSNPSKTRAIAEAKVKTDKVDARILAQLLAADFLPPVWLPDARTRGLRRQVARRAHVVRQRTRLKNQVHAILARNLAPTPPVSDLFGKAGRHWLSRQDLPTDERSCVAALLRQLDFHTEELELITRELALEALDDPTVRRLMTIPGVDAIAAISIVAAVGDFSRFGDAHKLVAYVGLNPKVRQSGNSAPVHGRISKAGRAQVRGVLVEAAWSASRAPGPLRAFFQRVKARRGFPTAVVATARKMTVLAWHLITKNQDYAFARPALVAHKQRKLELTAGAPSRRGNHRIPGATYNDKQRRHEERAIVEQAERAYATLVAHWRPKGPSRPSSVVVSSPRSRPSPPGGLRPALSAPAGPPIGLEARTQG

SEQ ID NO: 119835 - protein, 447 aa, unidentified
MSAGSRKKIVAQKMHSPLLNIQTAGIDIGATELYVAVPEGSAEKPVRCFGTFTEDLIALCGWLKTCGVTSVAMESTGVYWIPVFQMLEDHGFEVCLVNARHVKNVPGRKTDVSDCQWLQYLHSVGLLRGSFRPPQQVCAVRSVVRHRDALIKLASLHVLHMQKSLTQMNLQIHHVIAKITGTTGLAIIDAILAGERDPRKLAAFRDARVKASQEVIAKSLVGDYREEHMFTLRQSLQSYRHYQELIAQCDQKIKDLLSAFDSATNPDERPLPASDKPVMKKNPELRTEFYRLTGVDLTAIPGIQTATVYTILAEIGRDVSKFPTAKHFASWLGLCPDNRVSGGRILSVRTRPVRNRAAVALRLAAQSLFRSQSALGDYFRRMRAKLGTPQAITATAHKLARIIYHLLKTGNPYDQTQFARHEEQYRRRKEIYLRNQAKAFGYSLVPA

SEQ ID NO: 119836 - protein, 315 aa, unidentified
MKNYIGIDISKATLDVYDGLKSYKFENNKDGFEHIVSLAEQIDETILIFEPTGIYSYALTEFCSKHKINVVMVGPKESRDFARSLKVRSKTDKIDAQVLYKYQSHVEPDMVKIPSVNRHALKVQEMLNVYESIQSNKQRFKNQIESTSKEHKDLVRTLNRLIDNLDVEAQKLFNKIELLLLKDMEIKESYDAISTIPSIGQKSALYLCAFFLKYPLANAKEMTALLGLDPMMKDSGTFRGKQKISKHGGQQIRNLLYLPTLCAIQHNPRIKTFYEGLTARAKTKKLAVIAAMRKLILMAFSIYNPNPEIEIHHQW

SEQ ID NO: 119837 - protein, 397 aa, unidentified
MAKDKHNAFFGTATGKALFKRLVFENTSEGFERLLIQTDTLKIQHGLTKTVFGLEPTANYYKPLAEFLIKCGHIVVLVSGVAVKRNRELLDGRWDKHDTKDSANVADLISQGKCLFYEYPPMALRELRSLLSLKRRLKKQEHGLKGRIRDHLLAAYFPEFDRYYRQSDSQGLAIVRWCLDPSVIAGLKYDEFVRLVAPRTRTIGQRDRLKAIWKKAADSIGCDAGESLEFEAKIMVEGLKHVQEAISEVNAKIEDICCEFPEYSYLLTIPGFGPDVSSKVFGAIGDPFRFKTGKQVLKMAGLDLSANRSGKNSDAAIPVISKKGKADLRYALYQAALIASIRNQSFVMHYTNKLRGREREKGIRTKMRVKLAAKLLIIAWTLMKKKEVFDCKYLNRA

SEQ ID NO: 119838 - protein, 325 aa, unidentified
MTDLPPLGLDVAKSKFNACLIRESGKLRHSSFANSPAGFVQLSQWLAKLGAGTAHACMEATGTYYEALAAYLHEGGHAVSVVNPAAVKAYAQSRLSRTKNDRVDAELIAGFCLERRPAPWHPPAPELRELQALVRRLDALTEMRTMEENRLASGVTVAAVRESVEEHLAYLAEQIKRTEALIRDQIDSHPGLKRQRELLDSIPGVGETTAAALLAEVPDILQYRSARRVAAFAGLVPRERQSGSSVRGRVRLSKIGNARLRKALYFPAVTALRCSPFFQAWAEGLRQRGKSKMAVIGAAMRKLVHLAYGVLKTGKPFDPEWAQRA

SEQ ID NO: 119839 - protein, 354 aa, unidentified
MIIIGVDFHPEFQQIASVDSETGEFQEKRVAHREEAETFYRGLAASGQKVRVGMEASGHARWFERLLAELQIELWIGDAAEIRTRRVRKQKTDRQDAQLILKLMLKDDFPQIWVPSWENRDVRQLLWHRHRMVQARTRIMNQLQAVALNEGLRCKKRLWRDRGRQQLEAFRLAPWASRRRRDLLELIDRLNPTIAELSQAIEQEAEKCPEARRLRTHPGVGALTALAFVLIIGKAERFGSGKQVASYLGLVPLEDSSGNRRRLGHITKQGSSMMRFLLVEAAQVTVRSVPEWRSKYLHLMMRRGRKTAKVAMARKLAVRLYWMMRKEWDYQQWVKFGSHAGQPGNRDGVQSITE

SEQ ID NO: 119840 - protein, 377 aa, unidentified
MKNVRFIGLDVHAETIAVAVAEVGGEVRSLGTIPNRPESVRRLIGKLGKASQLRVCYEAGPTGYVLYWQLTELGVACEVVAPTLVPVKAGDRVKTDRRDAEKLARCYRAGDLTGVWVPDAAHEALRDLVRARLAAKRDQLRARNRLSKFLLRQGRRAPEGTTPWTVKYLLWVKQQRFEHAAQEATRRDYLHEVEHVAERIVRLERSIDGAVESMPESQRAVIAGLQSLRGVAKISAVTLVSELGQISRFGSPRQLMGYAGMVSSEYSSGEKVRRGSISKAGNAHLRRIVTEAAWSYRHIPAVGPTLAARQREQSEAVKAMSWRAQHRLHGRYRALLAKGKTKQKVITAVGRELLGFIWAIGVELEATKATKEVRRAA

SEQ ID NO: 119841 - protein, 345 aa, unidentified
MQSMYYVGMDVHKKVISYCVKDVSGSIQAEGVIPATRIDLNRWMKALPQPWTGAMEATVFTGWIYDHLKPHAAALKVAHPLMLRAIAAAKKKNDHIDAKKICDCLRCDFLPECYMASTAIRERRRTLRYRNLLVRQVVQLKNKIAVLLMEAGVSYNKQKLHKVGYFRELLATNPDIDEGLRSLLRACRETMVRLAKTESALVRSLERDSFLMERVERLMTIPAVGPVTALTWALEVGDVQRFSSIKKAISYCGLCGAERRSADTIQRTPLSKQRNKHLQCVLIEAAKMAPRNSPDLALLHDREKRKGNANRATLAVARKLVAYLVAVDRRQKDFRVIERQNQTAA

SEQ ID NO: 119842 - protein, 429 aa, unidentified
MKGGDPMNTLFVGIDVSTKNNQVCAVNFDQDVFFNLSFPNNPDGCDLLITTVLAFVDKEKFDSIIIVTESTSIYDYHICAYLSSQLAIVGTSVVIYSVNAKSIANYKKSYIEMEKTDPGDAFLIADFARVGRCKKLRPFKAAQHIALKRLTRERYHLAEQLTREKNYVLNNIYLKVSGLMTLPHKDLPFSDNFSASNTKFLTDYTSPFDLAERPLDEIIEYFKSASQNRCDDYDKIASLFDKAIRSSYRLDKTAYDPITISITASINLIQCIESQIKMVDKAIEKEMRGLYPNGYQSLMSITGIGPVFAAGILSEIGDISYFKSDASLAKYAGFHWKKNDSGNFIADEKHAANSCNKYLKYYITQATQMSVMHDFDYTTPFYRKKYNEASTHKHRRALVLTSRKLVRLIYVLLRDSKLYVSVSHDTVIE

SEQ ID NO: 119843 - protein, 361 aa, unidentified
MPGTMTYVGFDVHARSMHAAAVDVMSGELTRYRFRGDLETPVAWLRTLPGPVRGCYEAGPTGYGLARALEAAGIGCVVAAPGKIERAAQDKLKTDQRDAERVLRLLMIDALHPVRVPTVEEEALRDLIRAREDVRGDLMRARQRLSKLLLRHDILYEDSASTWTQRHRSWLRAQQLGGGAQATLLDYLGAIDTLELRRGTLEKTIGELVPASSYAQAVARLRCLRGIDTLSAAGLCAEIGDFTRFERPGKLMSYVGLVPSENSSGESRRQGPITKTGSRHARRLLVEASWHYRKTPSRGITLQRRQDGQPANIIAISWQAQQRLHRVWQRLAEQRGKRRTIVAVAVARELTGFCWALARAD

SEQ ID NO: 119844 - protein, 398 aa, unidentified
MLSIGIDVSKGKSTVCGMKPGGEIVYTPFEVQHTREGMSELVSLLRGSGEEVRVVLESTGSYHCPVVAALLENGIFVSVVNSLRMKRFCSQSIRRVKTDQIDAMQIALYGLAYWPELQPTRLPENTYRELQLLARQYYQMTSILIKAKVDFNALCDQVLPGMQELMNDHAGRHKLSDFVLRYRHTAHILKMGETRFRKDYCKWAEKKGYRNHERMAALIFATAQNGIPVLPNAPSTQIVITEAIRVLHTVEASRDAILTQMQALAKTLPEYSLVREMPCIGDTLAPRLIAEIGDVRRFHSKRALIAYAGIDAPPYQSGKFSANNRHISKRGNRYLRKTGYEVMQSYVMHKPANDPIFTFIEKKRSEGKSGKLAMVAGLNKFLRVYYGKVTELYRSLPQ

SEQ ID NO: 119845 - protein, 315 aa, unidentified
MDDVPCFVGIDVAKAQLDIAVRPSGERWAVSNDADGVATLVEQLQPLHPTLIVLEATGGLERVATAALATAGLPVVVVNPRQARDFARATGQLAKTDALDARALAHFADVIRPTPRPLPDAQTQELRALLGRRQQLIGMRTAEQNRLAGTSGRLRQDIAAHIAWLNARIATLDDDLETMLRASPLWRANDDLLQSVPGIGPVCARTLLLELPELGTLTRRQIAALVGVAPLNCDSGTLRGRRTIWGGRAHVRTVLYMGTLVATRFNPQIKAFYQRLLAAGKIKKVALTACMHKLLTILNAMLKHRTSWKAQDVQN

SEQ ID NO: 119846 - protein, 361 aa, unidentified
MLNSTTWIGMDVHKERIHVVTVNEAGHTEARWETPNTPKGKGRLATRLAGLGKARCVYEAGPCGYDLLRFLDGKGIPCDVIAPSLIPTRAGDRVKTDRRDAEKLARMHRMGELTAIHVPTPAQEALRDLVRAREDANEDLVRARHRLQKFLLRQGRRFEGKSWTRDHWRWIRALSFEDKNAETVLAEYLLAVDQQLERVARLDARIEEEAQNPGIAPAVARLKALRGVRTLTAMTILSELIDMNRFASPRELMSFIGLVPSEYSSGGKQRRGSLTRAGNAHVRRVLVEAAWHYRHPPHRTGETIRKRREGQSPEVIETARKAEVRLHRKFTRMVMRGKRTTVAAVAVARELAGFVWAIGRI

SEQ ID NO: 119847 - protein, 324 aa, unidentified
MSKTILGIDVSKKELVVALLMKDSSIHKKKFANDKGGFNSLLKWLKFKKINDIKICMEATGNYSTAIADFLYDLSYEVNVVNPACIKAFAGSKLTRTKTDELDAVIIAQYASKSELTPYKPLDPALKELRYMYRCLNDLKKQQVDVLNHLENEDLLPNSVCKVWKELSKNLQQQMNEIEKSIDNLLQNNPGINQQLQNLQTIPGIGKTTAGAVIAESPNISTFKDARAYAAYAGLVPKHRNSGSSIKGRAKLSKLGSAKLRKAVYFPAIVAKHHNPILKAFAEKLKRKGKHTMVIIGAIMRKLLHIIFAVLKHNTAFDHNICAD

SEQ ID NO: 119848 - protein, 390 aa, unidentified
MEAGTVNNLPPAGTHDDAVCCILAMELSKKSWIVAVNTPLSDKISRHTLKPGDGKELLDLCERIRTRVARETKKRVEMVSCYEAGYDGFWLHRLLEAHDIRNHVIDPASLQVDRRARRAKTDRVDAERLLRSLMAYLRGEPKVWSVVRVPSVAEEDDRRLHRERGRLINERIQHVNRIKGLLAIHGIYDYQPLRRDRIQRLEQLHTADGRTLPPRLEAEILRELQRLEIVIGMIKTIEAERDAIASANTVTERRSAKKIQHLAKIKSIGPEFATTLVGEVFYRSFDNRKQLASYVGLAPAHFQSGAMSRDQGISKAGNAKARTVMIELAWLWLRHQPDSDLSVWFRDRVGKIKGRIRRITIVAVARKLLIALWRYLETGLAPKGAALKVC

SEQ ID NO: 119849 - protein, 414 aa, unidentified
MDVIIDRVCGVDIGKSILAATVRTPVIGTGRKRREQTRKFPTFAGDLDRLATWLVDEGVTHVAMEATSDYWRPVWWVLEQAGFEMLLVNARDVHQLPGRKTDVADSAWLAQLLECGLLRSSFVPPPEIRELRDLTRYRKRLVQDRTREAQRVEKVLEDTGIKLSSVASSVLTKSARAMIDALIAGERDPEVLAELAKGPMRSKIDELTLALRGRFRDHHALLLRVHLDHIDQIDGHVATIDARIKEKTAPFDRQLRHLMTMPGIGEVAARVVIAEIGVDMAVFPTAGHLASWAGLCPGNNESAGKHRSGQTTPGNPWLTETLVQAAWAATRQKDSWLRARYYRLTKRIGRKRAIVAIAHSMLIAIWWMLSQDCDYQDLGNDFYDRFNNTEAETRRLVRRLEHLGHHVVLDTTAA

SEQ ID NO: 119850 - protein, 432 aa, unidentified
MKVTRGMQRRATKSARRAAVVGTDTLIAGVDLAKKTSVVVFMRASDKAPLGRLRIPTSPAGLLELDRRGKELLRRMGLSRLLMGMEATGHYWKIMARTANELGLPYVIVQSFVLARSREFDDLTRDKNDQRDALLISELVAERRFTEVELDRGAWAELRLLAEARDQRRVERAAALHEQRALLELVWPELLAEIRLLDGSHVQACLSLGLPPAQIASMSLARFARLLQREHGERRFMGSMATRLWAAAGANRACDETAAALLRVQLAAQRIEAADRAVATLDARMAVTFEATGLGWMRGQIRGLGEVLLVNLLALSGDPRRFDEAGCMVKLAGSNPTERSSGQVEASGGIPRRGRRTLRLVACQAATCLALHNPDFEAFFRHLTQRQHRQLAPKAARVAVANKLLRILWAMATAGQNYDSRLATRGRLADAA

SEQ ID NO: 119851 - protein, 700 aa, unidentified
MFAVGVDVANGRSMVAVLDGMRNMVAKPFEVVHTAQGFAALVEKLRQLDGEVRIVMEHTGRYYESFAMSMHRAGFFVSAVNPLLIKNYQGSINVRKVKTDKADAQKIAQFALDKWTILPHYTPMDTIRYNLKTLHRQFQLASKTKTALSNNLIALLEQSYPGANRYFDSPVRADGRQKWVDFVDTFWHVDCVAMSSEHAFVERYRKWCKRHGYVFSEQKAIQLHADARQKIPLVPKSDTCKLLVREAVSQLNAVSRTVETYRAEMDRLASQLPEYETVMGMTGVGKSMGPQLMAEIGDLRCFAHQKSLVGFAGTDPIKEESGDKVSQSAPSSKRGSPYLRKTLFVIMTILLQLQPQEDPVYQFLDKKRSEGKPYYVYMTAGGTKFLRVYYGKVRDCLKAKGLYEKINNYAEDIRDDGTALFLAIMNHSKKNLYEKYEKAAVLQEMYHWIKDCLDINYPDSPISSYSYMASMENVEEICKMIAAFGTGITDYKLVTVPVDRVMSRLPKERKELLLAQLEKIMNEAKKETGDESVVGIIMRSKRDFFILNIKEDDIECQTIRFEHNNNDVLFDLSEESDGTVRILDLLEILLSDEGKTYVIDELDRCLHPSLTYKYIQTFLQLAAKKNIQLIVTTHESRLLDFDLLRRDEIWFVNKRKTGESDIYSLEEYNTRFDQKIDKAYLEGRYGGVPIFNTIFPMGED

SEQ ID NO: 119852 - protein, 358 aa, unidentified
MQTKGKTISFKEQNIYIGIDVHLKSWVVTIMVEDTYFKTFSQNPKAQELQKYLNANFPQGNYYSVYEAGFCGFSVHRELEKCGIKNIIVNPADIPTTDKDKRQKEDKRDSRKLAKSLKNGELTGIHILSIEIEELRSLVRYRKTIVKELGRHKNRIKSILKLYGKEIPEELNTASKYWSSNFIKWVKQITTNTPEGLLVVRETIDTVEYLRKKQLLINRELRKLRKDSRYSKTIKLLTSVPGIGLVISFILLSELETINRFKNLDRLSSYVGLIPSTNSSGEKDRVGNITRRSNKILRTSLIEAAWVAIRQDPALLLKYAELKNRMSPNEAIVRIAKKVLNRIRYVLKNEQEYVKAIV

SEQ ID NO: 119853 - protein, 343 aa, unidentified
MSEITVIGLDLAKHVFQVHGADPDGRPVLRKRLRRGQVLEFFASLSPCLIGMEACAGSHYWGRELRALGHEVRLIPPQYVKPYVKTNKNDATDAEAISEALTRPTMRFTAVKSAEQQSVLMLHRTRELLVRQRTMLVNALRGHCGEFGIVAAQGLSRAGDLIKRIEDPADTALPDLARQALQCLTSQIRAIQEQIALIEKKLLAWHSSCEASRRLAEIPGVGLVTATAVVASVGNATQFRSARQFAAWLGLVPQQHSSGGKERLGHISKRGDGYIRRLLVHGARAHLSWSRRKKQIRSAWLTGLLARRPTNVVLLAMANKTARIAWAMLSRGERYQEMIAAAA

SEQ ID NO: 119854 - protein, 279 aa, unidentified
MDHYAGLDVSLEETAICVVDGIGRIVKETRAASEPEALIAAFQGLGLPLERVGLEACSLTSWLHDELCAAGLPAICIETRQANAAMKTMPNKTDRNDARALAQIMRTGWFRQVHVKSRQCRMWRSLLVARRTVLNEMRAIENVVRAILREAGIKLGTPSRMAFAGRVRELAGGDCLVMALVEPLLAIIATMLDQLACLTKQVLAIARREDVCRRLMSVPGVGPITALAFRATIDRPERFRRSRDVGAHLGLTPARYQSGETDIQGRISRCGDELARTSL

SEQ ID NO: 119855 - protein, 463 aa, unidentified
MSKSQRTTKRGRRTKLQAGTERPLSVLRPNAAGIDIGSEEHYVSVREDRDLQAVRRFGCYTSDLRRMAEWLRSCGVDSVAMEATGVYWVPVFELLEEYGFEVYLVDTHQTKNASGRKTDVLDCQWIRQLHSYGLLTAAFRPEQQIAAVRAYWRQRQGLVESCSRQIHLMQKALEQMNVQLHKAVSDIAGLTGLSIIRRIVAGDRDPKELAKLRQKGVKRSEAEIAEALSGNYKAEHVFALTQALESYDFFQGQMQRCDGEIERCMSNIAGKAAPPEETKQKRRRWKNEPHFNLRAELHRICGVDLTRIESIDAVTAQAVVSECGTDMSRFPSEKNFASWLSVCPNNRKTGGRIRSTRTRRIRRNRAADALRRAAQSLHHSKSALGAEYRRKRARLGAPKAITAMAHKLARVIYRLLKHGDAYVSEGLEQYEARHRERALRGLRNHAQSMGFQLVSQATGELMA

SEQ ID NO: 119856 - protein, 314 aa, unidentified
MSPLVFVGIDVSQARLDIAVRPGASFSVTHEESAIATVVEQLCALSPTLIVLEATGGMEIPLTSALATAGLPVVVVNPRQVRDFAKASGHLAKTDALDAQVLAQFAEMMRPQPRPLPDAEARALTALLTRRRQLVEMLTAEKNRLLSAPSPIRTRLRTHITWLERELQSTNTTLAEAIRQSPVWREKDELLRSVPGVGPVLTSTLLANLPELGTLTHKQIAALVGVAPLNRDSGTLRGRRTVWGGRAQVRAVLYMGAIVAARFNPVIRGFYQRLQRAGKAKKVALTACMRKLLTILNAMLKHRMPWREVEVRHA

SEQ ID NO: 119857 - protein, 373 aa, unidentified
MKKSTRFVGMDVHAETIAVAVAEEGRDGEVRSLGTIPNKVDAVRRLVKKVGAGAKLRVCYEAGPTGYALYWQLVQLGVSCEVVAPTLIPKKAGDRVKTDRRDAVKLARSYRSGDLTAIWVPDKDHEALRDLVRAREAATKDQLRARHRLGKFLLRHGLRRPPGTKVWTKTHMAWLRTLKFEQPALDATLCDYCTEVEHAGERIERLEHWIDAAVETAPASMRAVIHALQALRGVAKIGAVTMVTEVGCFSRFSRPKQLMGYSGAVPSEHTSGGPPKRGAITKTGNAHLRRVLIEAAWTYQHRPSLSRPMKRRQEGLSEAIRAIGWKAQHRLHRRFCRLAAKNKPHQKVVTAVGRELLGFIWAIGVAAEREAAA

SEQ ID NO: 119858 - protein, 312 aa, unidentified
MDVLYERCVGLDVHRDTVVACLITPDGRELRTFGTMTGDLLTLADWLTGRSVSHVAMESTGVYWKPVYNLLEATGLELLVVNARHIKAVPGRKTDVRDAEWIADLLRHGLLRGSFIPDRPQRELRELVRYRKRLIEERAREAARLHKTLEGANVKLGAVASDILGVSGRAMLTALVEGRDDPEVLASLAVGKLRDKRERLVAALRGLIGPHQRRLLAAQLRHVDFLDAEIASLSAEVEERMRPFEAAIELADGIPGIARRTAETILAEIGPDMRRFPSDRHLASWARMCPGMDESAGKRGSGATGPGNRWLR

SEQ ID NO: 119859 - protein, 337 aa, unidentified
MTHVGVDLHERFCYMTALDATGRSLKAGAVANQPAELRRWLRGLPAPIEVAVEACSFWPAFQEAIASQVNVIHLVHPQRVKAIASAKLKNDRVDSATLAHLLRCQLLPEAWMADRATRERRQQVRLRISLGQHRAALKNQVHAILHQHGKRAPVTDTFGRKGREWLRKIALPPEAREAVNTYGGLIDQVSQHIQRQEQRLKSMASGDARVKWLTSIPGVGTYSAMIILAEIGEIRRFSSTKALFSYAGLVPWVRESAGHKSRGGISRCGSPRLRWVMVEAAHTALRCSPAARSYFDRLRQRRHAHVARVALARKLLAAVFAMLRDGECFDETIFATM

SEQ ID NO: 119860 - protein, 347 aa, unidentified
MRFYTEQHKHYCGIDLHTRSMYVCMLDQDGTVLLHRNLRANPDAFLKAVANYREDLVVAVECMFTWYWLADLCRRQGIHFVLGHALYMKAIHGGKAKNDRIDAEKIAVLLRGGMIPQAYVYPPEMRATRDLLRRRLHFRRKRAELLTHIQNTNSQYNLDEFAKKLTYASNREGVSQRFTDPHVHKSIAIDLALIAHYDRLLRDLEYFILRTAKDHDHNTLYRLRTVPGIGKILSLVILYEIHDINRFQRPQELASYARLVKCTRQSAGKMYGTGGSKIGNVHLKWAFSEAAVGFLRNNPDGKRYYAKLERKHGKGKALTVLAHKLARAVYYIWKRDEVFDQQKFLTT

SEQ ID NO: 119861 - protein, 323 aa, unidentified
MSNNIHFSCICGIDIAKKVMQVFKVTSDGVVTNTSVSRKDFLEHFRNIPPALIGMEACATSQHWGRELQGLGHTVKLLSPKAVKPYVKGLKNDRNDAEGIYRALIMGVREVSIKSTAVRDLSLLQTMRAKRQRDKVATINHIRGILAEYGLVMGKSVRAFLSNAGTLIARLKESETTSQLVISELEKLLKEVKEIVSRIEELESSIKKIASENKNYDLFRSAPGVGPITAAMMVVLLCNPTVFKNGRDFAAYLGLAPMSFGSGGRNQVTGIPSKYRCHNEARSLLVQCAHSITRLKYKSDWVASILSRKPKKVAIIGSPVNYG

SEQ ID NO: 119862 - protein, 340 aa, unidentified
MGQYIGVDLHQKTTFVTRINERGKVLEQVNLKSDPETLQTFFRKQPASSQVVVEASGHWYRFYELIEDRFPDLVLAHPLKTKAIAEAKIKTDKIDSGILAHLLRSDLVPQSYVPTREIRDLREVLRYRASLVKLRVQVKNRMTSVLTKAGLRTPTKDAFGVKSFKYLAKADVRPCYRLELDGYIQVIGELGKEIEKSNQVIQKMAKESRDARLLTTMPGVGAFSALLILSEIGDINRFPDAEHLCSYGGLVPCTWSSGGKTRRGPITKQGSKWIRWILVEGSLHAIRKTRRYSKLYSRVRRKHGHNTGRIAVARAMLKSIFHMLRRKEAFQDSPASSAGV

SEQ ID NO: 119863 - protein, 372 aa, unidentified
MIVVGTDTHKQTHTCGAVDALTARARGELTAAARRGSFGKLLVWARKLDGERVWAIEDCRHVSGAFERFLLARGERVVRVAPKHMAGARRSARERGKSDSIDAFAVARAALKEGLENLPGAHLDGRALDIRLLSDHRDDLIHARTQDQQRLRWHLHDTWPEFEIPSGALDTAKWLGKISRRLAHVEQTMRTRIARELVRQIATRTTRINELERDLARLVADYAPQLLAEPGCGPLTAAKLVGEIAGADRFATDAKLARTSGTAPIPASSGATHRHRLDRGGNRQLNCALHRLAVNKGKWDPAAAAYLERKQAEGKSRKEAIRCLKRHLARRIWKLLHTPPATPAPATAPPTAQNTTDRVEIAGAPNPMICLG

SEQ ID NO: 119864 - protein, 375 aa, unidentified
MIEQVTVGVDVGCHRHRVAIAAPDGKFVEEFDIPADSEGFKYFFGRLDFYRKSFDVPVVVAMEGHGGYGRPLDSSVKRSGYTLLNVNNLKLCRFKEIFSSPAKTDAIDARKIALLARMQDVLSPSREVLQEVRDVPQEHQIMKRLSRRRRQLVDEKVVVLNRMQADLQAVSPGLADIVEYKDGVAFLNLLTCRSNLEDLSRLDKKELLSIGGIGEAFAGRVIKWQKKAYFSREVAYVGPMIIEDAKRIIEIKRSINELEEKIEDILKSSKLAETIGSIPGFGAVCTAELVAEIGTMERFSSERSLALYLGMAPLDKSSGKSQGTRTPTQINKRGKAAMMTAVAHNIRKVEESKRYYQKKRDEGKSHNQAVRALGR

SEQ ID NO: 119865 - protein, 457 aa, unidentified
MYRELHSLRQVLQQELKDTLPPLPGVEPEQLLDTYLNQLTGYVGVDVADRTVTLLAINANQDELAHLLEVPNAPSGFARIGEWLERLRVDHHLRLLVVACEATGVFYWGLWDALAQRPNVARVLYNPRTTEHMGEVLSKRVRDDLIDALLLAEQVRLGSTPEVVLTEDADLLSARLCSRAARDEAQSINRKKNQLRSLLRGYNPVLNRVFPGGKLHHPAVYALLQQQIFPEEFVAAGVEALTLILTTHSRSAFGTEQAQQLVDQCRGLLSRPMRRAVVHQRVNDLIAEIQLAHQHHTALLKAGYALIHDRSEAKLLKASTGAGVSNTLALVSEVSDVQRFPDGEHVASFLGLTTSKHISGTSIYQSKHITKQGSPNARYAAVNIALHLSLRVPKYQTMYKNIKARKPPRKGHFVALVAIARDFVTNVLYDMWREQRPFFIKVEDYRLYRKDHPRPKA

SEQ ID NO: 119866 - protein, 411 aa, unidentified
MRLFVGDDWAEDHHDVEVMNEAGKVLAKRRLPEGVAGMARLHELIGEHLGQDADGAEVAVGIETDHGPWVAALVAAGYTVYAVNPLQASRYRERHGVSGAKSDSGDAHMLTDMVRTDSHQLRAVAGDSAEADGVRVLARTHKTLIWERTRQVQRLRYQLREYFPAALEAFDDLDAADTLELLGKAPDPARAARLTRAQVSAALKRARRRDIPGKATAIMAALRGEQLGQPPALTAAYAATVRSLIAVITVLNEQVKALQGQVEENFGQHPDAEIYRSQPGMGAILGARVLGEFGDDPNRYADGKARRNYAATSPITRASGKKKVVAARFIHNDRLVDALNAQAFASLKASPGARALYDELRTRGIEHNDALRRLANRLVGILHGCLKTRTLYDEATAWSHRENLPQSSVAA

SEQ ID NO: 119867 - protein, 351 aa, unidentified
MIVIGSDPRKRSCTFSAVVAGTGELRSSETVQATSAGHERLLGWARAIDGERVWAIEDCRHVSGKLERFLLARGERVVRVAPKLMAGRRRGSRQAGKSDPIDALAVARAALEEGVDALPTARLEGPAREIKLLVDHREDLVAERTRMQNRLRWLLHDRWPELELPAGCLDRLVWLDRLGARLARSVQDADVRVMRAQVRRLKDLTREASRLEREVAVLVGGLQPRLLELPGVGTLTAAKLIAEIAGIERFKNSAKLARLAGIAPIPASSGDIQRVRLHRGGNRQLNAAFHRVAVTQLRCHQPAQDFMTRKRGEGKTKTEALRCLKRHLVRSVFNAMTPASANAPAPALALT

SEQ ID NO: 119868 - protein, 400 aa, unidentified
MDHIDDVGVFLGLDVGKSAHHGHGLTPAGKKVFDRQLPNSEPKLRAVFDKLAAKFGTVLVIVDQPASIGALPLTVARDVGCKVAYLPGLSMRRIADLYPGEAKTDAKDAAVIADAARTMPHTLRSLEVTDEITAELTVLVGFDQDLAAEATRTSNRIRGLLTQFHPSLERVLGPRLDHPAVTWLLERHGSPAGLRKAGRRRLVEVIRPKAPRMAARLIDEVFDALDEQTVVVPGTGTLDVVIPSLARSLAAVHEQRRALETQIGQLLEAHPLSKVLTSLPGVGVRTAAALLVTVGDATSFPTAAHLASYAGLAPTTKSSGTSIHGEHAPRGGNRQLKRAMFLSAFAALHDPASRTYYDRCRSRGKTHTQALLRLARQRINVLFAMLRDGNFYEPRGPRPA

SEQ ID NO: 119869 - protein, 348 aa, unidentified
MDKITAVGLDLAKQIIQVHGIDAAGHVVLRKAVRGERLLALLAQFPLCVVGMEACSGAHHWARQFKQLGHEPRLMAAEFVRPFRKSLAAKNDANDAEAICTAVVQPNMRFVSIKSVEQQALLSLHRIRQGLIEERTATINRLRGVLAEFGVVLPQSVPALQRALPTVLADAERLPAVVQRSLQLLLEHLRELELRLAEFDRQIAQHAKSSAPAQRLAALPGIGPLTASAVVATVGNAQDYRNGRQFAAWLGLVPRQYSSGGKCKLGPITRRGDAYLRALLVQGARSTLQAALRRAPARHDRLSAWIVQLAQRVGYHKTLVAIANKHARIIWALLAREQTLDLARTTTH

SEQ ID NO: 119870 - protein, 349 aa, unidentified
MPRTAIRTIQRSEQQRASCLYLGIDIAKKNFAVALLDEEVLVGEGTFLNTPSGFTKLATWCDRQMKAFPAASLHACMEATGSYGVDLAFFLQKRFCGTVHHISVVNPHQTHHHAQSRLLRNKTDRSDAENIAHFCATHHPVDWQPPTETQRRLKELSRHLESIEQSMTREKNRLESGIKDKGIQRQIKQVLRLLDGQKQETQKEIDELLKQDTSLNQQARLLITIPGIGRTTAVKFLAEVQDFQRFDAAAQLAAFAGLSPSQKQSGSSVRGKTSLSKKGNRHLRTALYMPILAAMRSNPLVKRLTDRLIAEGRPKKVAMAAGMRKLLQLMYGVLKSGRDFDPDYTPLRA

SEQ ID NO: 119871 - protein, 318 aa, unidentified
MSHGYDTFVGIDISKDALDVHGLKDGSPSRFDNTAAGRAMLLSLLPQAGACLSVVEATGGYERDLVAEAVTAGHHIAVVNPRQVRDFAKALGLLAKTDQIDAAVIARFAETTRPVPKGYEERQEQLRELIVRRRQLLDHRTAEKNRAEMAHSSLVRKSVLKHIEMLNKDIQRIEKAILQLVESNDDWRGRFERLKGVPGVGEQTAATLMAELPELGRLNRQQVAALVGVAPFNRDSGQFRGRRAIWGGRQSVRNALYMAALSAKKHNPVIRAFAARLLAKGKPPKLVLTACMRKLLIILNAMLHSGDSWSPRVATLTP

SEQ ID NO: 119872 - protein, 352 aa, unidentified
MEACTGMDMHKRYSVCAPLDAGGRPSAPVRVPHDRETVRSYLRSRPPGSVVALETIGNWYWMVSEIESAGLVPKLAHAGKAKLMAGHINKTDKLDAEGLARLEYNGTLPTVWIPPAELRDQRELTRSRMSIVGMRTKLKNRIHATLDKYLIRIEEVTDIFGKRGRELLEARLAELPPETRQCVGQELELLDQVQRQIDASEARIDAMVKETPEMQRLRTLPGVGRILASVIWLELGTIDRFPRAEKLASYAGTTPRVHSSGGKTRYGHTRSDVNQYLRWAFVEAANGIVMNQRRAPESHAVQMYLRIRRRGGHGKAVVAVARHLAEATYWMLKKQEAYREPKGPQDVSSTQG

SEQ ID NO: 119873 - protein, 504 aa, unidentified
MEWSQTSILSKVLSPPRMLIGRWRPYRSLLTSLRVQACPLSFIVQLRKVLPMAKKAKKIKTKKGIALKIVNPNAAGIDIASDELQVCVPADRDADNNRCFGSYTKDLRLVCEYLRACRIDTVAMESTGVFWVQPFRMLKEAGFDVILVNARQVKGYSEKKTDEADAEWLMLLHSYGLLKASYQPENLARMVRNLSRHRENILDASAKAIQHMQKSMELMNMKLTEAISDITGKSGMAIIKAVLRGERSPQKLAELADPRCKAAPDEIAASLEGTWDDEHLFALGQSLDQYEFLQKQAKACDLEIEKILINYSAVCDTDMSKFVPCKKRIAKKNAVTIDVEKYAYSLWGVNMMQMPGVSTGGLLTLTGELGHNFTEKFESADAFCRWLNLVPNNKISGGEVLSSKVPRRKNTAGQAFRQFANSVKDSKTPLGYYFRRMKAHGGHKYAIVATAHRMAKITYAMVSNKEEYDEKKSGPSEKELLMKKIERTRKALDKLNAKLLESGG

SEQ ID NO: 119874 - protein, 385 aa, unidentified
MLTQSFEAAAAARQDGTIYLAFELSKSRWLVARLLPGSSKVSRFRLAGGDTAGLLELLSEAREKAARLGFPRARIVSCYEAGYDGFWLHRWLQGHEVDNRVIDPASVEVPRRARRAKTDKIDVDKLLRVELAYDRGEPRVCSLVHVPTLGEEDAKRLNREREALLQERISHTNRIKGLLHAQGLRDIDPLVRNFLAGLDELVTPDGHRLCDHLLKELRREHARLTLVVAQIAELEAEVRTAIQQTQPGTAQAKIAMLLRLKSMGPTWSTLLVNEVFYRDFRNRRQLGAYLGLTGTPYNSGQSVREQGISRAGNARARNAALEFAWLWVRNQPKSALARWYRQRVGDAKGGVRKVAITALARKLMIALWRYLETGLVPTGAVLRVK

SEQ ID NO: 119875 - protein, 287 aa, unidentified
MHVAYDEQGIKAVCQRLAKAAPALIVLEATGGVETRLASALVAKGLPVAVVNPRQTRDFAKATGELAKTDRIDAAVLCRFAQAIRPAVRPFPDADTRDREDRVNRRHQWVENRVQETLRLGTAASKALQKSLKSHITWLDKQIATLDDDLTKRLRTSEAWKAQDDLLRGIPGVGAVTSLTLTAKCPELGQLNRQQIAKLVGVAPLANDSGKHRGKRFVWGGRADVRSVLYMATVSALRCNPVIRAFADRLKQAGKPAKVVIVACMRKLLTIMNAMVKNNAPWDPKKA

SEQ ID NO: 119876 - protein, 389 aa, unidentified
MKTKTYVGLDVHRKLVVATAMDPLGKRIRQSSFGPSPKELRRFLIRLPKPTRVVLEACHVWERYYEAALSTGAEVVVSHPSRTRMIAEASLKTDKVDSATLANLLRLDSLPLTYIPPPEIRLLRKIYLERDFYTRARIALLRHTYARLAEYGIDYQKALLQHRPQREKLRQHSIPAIDRALDSIDDLDRTLKGLNAEVHSAFLSSPDAQLLKTIPGIGEVMAVGIAGYLCPIDRFPNVDKLTSYVGLCPTTHQSGDSLYYGQLKPDVSRRLRSLLVAASWTHRVSAPKSDVSKFAHRMIRRKGRMRATVASAHKFLRLVHAILKQRRPYLPHAPERPVPKQAVRVSRKRSAAVSRVKRASPGSPVAGSRARRRTKTALNPRKPRPTAMR

SEQ ID NO: 119877 - protein, 324 aa, unidentified
MKNIIIGIDISSKTLDICVKEESVNHFSIENTVPAIRRFLKRYSNENVMIAMENTGRYNWNLFEALEKFSFKVYVISALHIKKSIGLVRGKNDKIDALRICNFIEKNHQENREWKPSSCSIKKIKILLAERALRIKIKKQLTVQQHDYKLMKGIGLDKELKNLNIRLIKNIDAQIKIIEKDIENIIHNDQNLSQQHKLIKSVPGVGKVLSWTLLSKTEGFTAITDPRKMACYSGVVPFDFQSGTSLKKRPAVSILADKNLKTILHMAAMSAIRLDNDLRRYYIRKIEEGKNKMSVLNAVRNKIIHRVFAVIKNQTFYEKDLVLS

SEQ ID NO: 119878 - protein, 351 aa, unidentified
MPSTAQTAIAVVGIDIGKNSFHIVGLDDRGAIVLRQRWSRGQVEARFANMSPCLIGMEACVGAHHLSRKLKALGHDARLMPARYVRPYSKGQKNDFRDAEAIAEAVQRPTMRFVATKTADQLDLQAMHRVRERLVSQRTGIINQIRAFLLERGIAVRQGQRVLRTELPRILATPPDVLSPRMVRVIEELACDWRRLDERIEGLSGEIEELAKRDPACERLMSVPGIGPLISSAMVAAIGSGNGFSKGRDFAAWLGLVPKQISTGDRTILGSISKRGNRYLRVLFVQAAWVVLVKVKPSRWQGHGLKPWIEAAKKRLHRNVLVIALANKLARIAWSVLARGRAFEASKLQAA

SEQ ID NO: 119879 - protein, 383 aa, unidentified
MEGAPMLDTTTFIGLDVHARSIKAVSLDVMTGEVRAATFGYDAGAVAEWVRSVDPRARCVYESGVTGFDLQKRLSGLGVDCVVGAVSKMIKPSADRRRKNDRNDAEFLARMLSVGNVVEVWVPDDECEAARDLTRALEDARDDLSRSKQRLSKFLLRHGLVFDERTPTGRRKGNWTRAHWSWIESIRFAEGADNDVLAYYVDAVRRAAEEKARLEGLVEAEARKPRWRRRVDSLRCLKGVDTATAADLVFEAGEFSRFRNARSFAAWVGLTPSEHSSGESDRRGAITKAGNKHLRKTLVEAAWHYLTCSGRPKDLAKGQAPDRGARRHAAKGVRRLVERREALLARGVHGNKANVATARASSPAGCGRSASWPRRRRGPVPRT

SEQ ID NO: 119880 - protein, 342 aa, unidentified
MNYCGIDVANVTSAVCIIDGQGKVLRQVSIATDVGDLAEALSGFGRLRVMIEASPLAEWVATQVEAMGHEPVLVDARAAKHLVSSAKKTDARDAYTLAQMGRSGWYTAVHRKSAAARLLRSRLQGRQALLRTAKASAASIRGLLRAHGIRVGRVAEGAFASRVRQLVGETVAELTETIEALLAVWQQSRAAAVALERALRREGRQDAVRRRLQGVPGVGPLVSSVYQATIDDPRRFETARQVADYVGLAPRVYQSGELDKRGRISREGDTLLRWHLVEAAHVLLTRGPDCALKRWGLALAQRKGASKAKVAVARKLAVLLWRLWRRDEDFQAWPESAGVAAG

SEQ ID NO: 119881 - protein, 356 aa, unidentified
MNSTKYIGMDLHSATISTAVVNDAGKLNMEATIATEASAVLDFIGGLQGTLHVAFEEGIHATWLHDLLRPHVAEVVAGDPRQLPHHKGENRNDKIDARQLAQWLRLGVLKPVYHSPTGLRTLKELVRSYVTLVSDTTRVMSRLKAIYRGRAIPTKGKRVYAPRFREAWLKQLREPGVHHRAELLYRQLDALLPLRRQARKAILAESRKHAVQKILLSIPTLGPVRVAVLMAVIQTPHRFRRNRKLWTYAGLGLVSRSTANYRMVEGQLARSPKPALILGLNLNHNHLLKALFKDAAATAVSRPGPFQEFYARQFAQGSHPEIARVTVARKLATIVLTLWKKGGRFDAAYLQAQQAA

SEQ ID NO: 119882 - protein, 413 aa, unidentified
MGGMNMEKVYERCCGIDVHKKVIVACLRIGNKKENQEFGTSTRSLLLLSDWLIEHKCEMVAMESTGSYWKPLYNVLEAQGLPAIVVNAQHMRAVPGRKTDQKDAEWIADLLQHGLLKSSFIPSKAQRELRELVSYRRSLTGEKSRELNRLQKMLEGGNIKLSGTISNVNGKTGRNILNALVRGEDINQERLSELIVSHLKADSNQILDDLQGILTPMQRKMIDIVLRHIDELDRYVAELDEEIDRSMSADEKACVALLDGVAGIGPDSAKTILAIIGTDMSRFPSANHLCSWAGVAPGNNESAGKRLSGRTTKGNKVLKSTLVQCAHAAVRVKSSFFHAQYQRLSIRRGKKRAIVAVAHSMLIAIYHMLKNGQIFNDLGADYYNQFNRERKINSLLKKLHLLGWEQQTVAVTG

SEQ ID NO: 119883 - protein, 386 aa, unidentified
MIYVGIDISKYKHDCFICKDTGEVIVENLSFTNNKKGFQQFLDLLKPYDNSNVRIGLEATGHYGLNLKLFLEKNNYSFMEFNPLLVKEFYKSLSLRKTKTDKVDAVVITQKLMSVPYKPNSKLFYHKYSIKSLTRLRETLVKQRSKYKVQLTNILDIIFPEFKPFFSNSFGITSLYILNKYKTPDKIANMRDFETLNKLSRGNFTYAKFVKLKDLAKNTIGESNDIFEIQLSSILNLYKNIDDHIIELDKQISTIIKDLNPPTLSIPGIGVISCASIISEFGDISRFSNSAKMLSFAGLEPGIIESGTMSSKGKMVKRGSGYLRYSLMNVSLTVIRYNNIFYDYYYKKISEGKCHRVALSHVCKKLIRVIYILETKNIQFDPSILK

SEQ ID NO: 119884 - protein, 370 aa, unidentified
MIRLAHAMQYLINTELSSHEETRFEFNRSTGAIKLGIDVHQDFYVVVEQVEGGNPKPPQRFDKQAFLHWASKLKQRGAEVHAVYEACGFGFSLQRNLTALGIKCHVVCPQKLDERNKRVKTDGLDAKALCLKLDRFVQGNRDALALVRVPTEEEERSRAIHRQREQLVGARKRLEAQGRSLMVNHGVDPVQNWWKPRTFATLPVPHWMRELLLNSQPILLALQEKIAVLTLQLQNAAAPNQPRGLGKMTSVVIDREIGDWHRFNNRRQIASYTGLCPGEYSSGNTRLQSCVTKHGNPRLRAALVELAWRLVRFQPNYKPIVKWRQILAKGALATGAARKKAIVAVARQLAVDLWRIKTGRLRAQELGLIT

SEQ ID NO: 119885 - protein, 353 aa, unidentified
MAVYIGVDLHVRTETVCWMNTADGEIHQHTLDHRRDDLRAFYAQFTAPAVVGIESSGYALWFHQLMEQAGHRLLVGDAYAIRQFARRRQKNDRRDAELLLDLLRREEFPVVHRPAPPSQDTLALLRYRHRLVRMRTMVKNGLQAVALNHQLRLGFRLFTVRGQQQFAALPLSGAYATQRQQAQVLLTTLEAQIAAVNQELATRAAADPRVVRLRTHPGVGLQTALAVVHTLEPVTRFDRARRIAAYCGLDPSEHSSGDTTRYGHISKQGNRLLRFLLVEAAWSAVQHEEDLGRFFRRLRARKKPHAVTVVAVARKLVLRLYRMLREGIDYEEFRRRGRDARRARQCASPAQRG

SEQ ID NO: 119886 - protein, 435 aa, unidentified
MEEVTDEPLYRDRVCGIDIGKAQMVATIRVPSDKDPARRMAETRSFGTTRKEVLALADWLRCWQVPAVVMEAAGDYWKGPLYRLEAEGFECVLADAKQVKNLPGRPERDPADSRWLAACFERGAVTSCFVATPEFRVIRLHTRYRRDLIEERTREKQRAEKLLESAAIKLSSVVSELRGVTGRDIMDQLIAGERNPKVLAQLARTRARRKISQLEEALEGAEFFTDEHAGLLKVMLERIDRISEEIARLSEVIERLLAPYEEQVAQAESMPGWGHRAAQDAIAETGVDMSRFPTGAHLSSWAGRSPLDNQSGKRNRRAKSKKGNRYLAGLLGETAIAAGRTQTREGARYRRLARRRGKLKAQVAVGNTQLKVSRKLLSNPGMRYQDLGPDYYERRRDIRRQIAHHVGKLGGLGFEVTLCRIPEPEPDGPASTQTA

SEQ ID NO: 119887 - protein, 404 aa, unidentified
MFKFGIDWSEQHHNLCIRNSKGAIVSQVEFKHTLEGFQRFDDERRKLGVPPSECLVAIETAYNLLVDFLLDRGYLVYLIPPQATKGYRNRQRSTDAHTDDTDAALLSSILHTDLDSHRRLQPNSALTQQILAQVRLIEVLRRSIQRQTNQLRAVLFRVYPQALGLFGKLTAQINLHFLMAYPSAQEAQGLTRAAFEAFCREHRYGRVDLISRRYAHLMEPAPEANPIAVAAYRDQIRILAELLLPQVLRRTEALSSLAQLFSQHPDAFIFDSLPGAGELLAPALLAKFGDHRDRFPSPAGVQALAGTCPVTKKSGKRKVVIFRRGCDREFRRIAQQFAKASVRQSGWALAYWRDVRPRCRSDSDAYRRLANRWLAIIWKMWQDRKAYDESYHIQQRAQRRRPRS

SEQ ID NO: 119888 - protein, 367 aa, unidentified
MRRTLSKISGLSDEWKEAQGLLTIGIDLGDRYSQCCVLDSQGNIIAEGKLSSTQGAFEKHFKDVKRIRIALEAGANSRWVSELLSSFGHEVLVANPRNLHLISESVRKSDRVDARALARLARVDPSLLSPLTHRKTATYPDMAQIRARHVLVRSRTSVVNAIRGMAKAAGLRLPVCSTETFAGKVSTLLPDDLKASLLPLLETIVTLNLQIQRCDRAIYHLAKHKYPETNQLRQVSGVGVNTALEFVLTIENPHRFQKSRQVGAYLGIQPKQRDSGERTPQLGITKAGNSSLRRLLIQCAHYLLGPFGKDCDLKRWGIQLAARGGKNAKKRAIVAVARKMAVLLHRLWVTGEKYEPFRQAQLVQVVA

SEQ ID NO: 119889 - protein, 462 aa, unidentified
MRILGIDLAVTAKHRAILADERGRFIGGILKFNTTQAELERLYATARQGLEADEELAVVLEATDIVWYPVAVFFHRRGATVYLVNPRMAADLARFYKRHAKSDRLSAKVLARLPVVSPDSLYPWVPSGPDYLALQRGCKELERLTEQASATQNRLRSADHLGWPGLHLRVFGDPFSPAARWFREHCYDPHRVVEAGVSGLRRAWQAAELYDGDEDWIEPLLTLAHEVLALYGEQGECLDYQALAAEVQREQRRLAVLEDDANFVRLKVTRPRYRQLHPSRNLESLYGVGQDGAAVYVAFIGDPHRFPDNRAFRGWHGLVPRSDQSGEREAKGLHISQAGPDLIKKYGFLGAETARQWDPQIAAIYHDQMVNKGKHHTQAVCACATHLLDRLRVILAEDRPYELRDVDGTPVTPQQARAIIAERYTVSEEVRRRNNHRARRERAEQWAERKEERRSRSREKRG

SEQ ID NO: 119890 - protein, 315 aa, unidentified
MIVGIDISKQWIDAAWQQNGQLQQQRFDYNETGITQLLTRTNLIAHYVMEATGTYHTRLALALHQAERKVSVVNPLIIKRFAQMQLSRVKSDRADADLIRRYAEQQTLTPWAPAATEVLELQQAHGWLNDLIGERTRLTNRKEAHIHHASPSAFVLAQMDEQAQLLEHRIRTCEAHLEQLVKKSFALLFERLQTIPAIGIKTAIELIIVTGAFRQFADIKALSAYVGVSPTTYCSGSSVKGRGGIAKLGQGRMRQLLYLCSWTAKSCNPACRALYLRLKAIGKPAKVINIAIAHKLLRQAYAVATSQKAFSPEFT

SEQ ID NO: 119891 - protein, 343 aa, unidentified
MKYIGLDLHKKSIFATVLGGDGKILSRTKIGSNSRDIIYYLKSQGTKEELSVAMEASYNWQYFYRAVEEAADNIVLAHPLKTRIIGEAKIKTDKIDSEVLAHMLKADMLPAAYVPKRSTMQSKMLLRSRISLVRIRTQIKNKIHAIIDKNRDSYTGLENLSDIFGKMGTQILRDTKIGPIDYHILSGYLDLIEEINKKIKDLESRIDKRSLNDKEIELLKTIPGIGTFSAFLIKTEIDDIARFLSKEKLCCYAGLVPSTHGSADKLYHGRIVKQGNKFLRWALTEAAQVSIRYSEYFRYYYNKVRSKKNANSATIAVARRMLEVIYAMLKEGRAYIEKPVDIK

SEQ ID NO: 119892 - protein, 359 aa, unidentified
MTDASKGEPTMTTAGIDLGDRYSYLCFLDTQSGEVIEEGRLRTTPEAFQRRFGSQQRVRIAIETGTHSPWVSRLLEGCSHEVLVANARKIRLIYAEGRKTDRVDAEKLARLARLDPKLLAPIEHRGEFSQAHLALVRSREALVRTRARLINHVRFTVKPFGYRLPKCSAQAFHKRVAEGIPEPLQPCLGPILETLGELSARIREYDRKLEALAEGFYPETRLLRQVQGVGPLTALTFVLTLEDPARFADGRAVGAYAGLVPGKDQSGESDPQRRISRHGNELLRRLLVGCAHYILGLFGEDSDLRRHGEKIAYRGGKNARKRAIVAVARKLAVLLHRLWLSGEVYDPLYNARRAGEYAA

SEQ ID NO: 119893 - protein, 445 aa, unidentified
MHYKRLLTWIDGSSSYLSVGLDVGADFTWMSIALPNGAFIGKPFKIVHSDPRSRDLAVTKIKEAQETYSLKSRCFLESTGIYHIPLLCFLRDKGFDCSVINPIITKNSTNINIRKLHNDKFDSKKAALVGLNVSLKTSIIPEDSVVDLRNLVRDYYYFKDLQSAVALKLTAELKMSFPAYAKVFSKVTTQSSLKLLSSYPLAGDMLEASKDDIVETIRSTARFGEAYALRKYDAVIAAAQDASVFGRALPSNAVRIRLYIDTYQEYQKHLDALLKALHETVERLQDTLIYDQICLLQSLRGIGFLSAVVLIAEMGDFKLFPSPKKLYAYFGLDPAVKQSGKLNGDKVHMSKRGSSLARRVLHMVALNNVKVDKGSGTPVNPVIYDYYTRKCSGKKKPVAMGAVMHKICNIIFAMLRDNKPFEIITPEEHCQRFAAEYPDKIRKAA

SEQ ID NO: 119894 - protein, 344 aa, unidentified
MQIAVLGIDLGKNSCSVAGVDSAGAVIKRRRMRPESIAAFTEKLPACIVAMEACCGAHHLGRMLADQGHQVRLMSPEYVRPYVKAQKNDDRDAEAIAEAATRPTMRFVELKSASQLDVQTLHRVRDRLVGERTALINQLRAVLLERGITIPKGRRKLEQHLEAMKVSGSDHSLSPRIRQLIDDMRAEWLELDRRIAAFDNEFAAFARSDADARRLATIPGIGVLNATALLAAIGDGRTFARGRDLAAWLGLVPRQITTGGKPHLVGITKRGNKYLRKLLIHGARSALPSLATSATPLGGWLRGLIQRMHKNAAVVALANKLARIVWVVLRRGEEFDAAAVAAVA

SEQ ID NO: 119895 - protein, 429 aa, unidentified
MRTESTPGARGPVFCGVDTHADSHWLCVLDWRGRRVLSRRFPADAAGYEALAGAIAAAGEPACVAMEGTSSYGAGLTRHLASLGMPVREALSPAGTQRRRPGQGKCDESDAERAARAAMSGSRLGTPKSQDGWVDGVRCMLAARSGAVKARTSAINTARSLLTTAPEGLRSRFRGMGGPRLMEELPSVRAEGALGAALGALADLWAEARDAALDMERAIEASLEENCPALLAMYGCGPVSAAKLAVAAGDNPGRLRSEASFAAICGACPVPASSGKTVRHRLNRGGDRQANSALHEIARQRVMRDPETAEYAERARARGKSDREVMRCLKRYVAREAYRALMRPHEIRRPEDASGLVAARRAAKVSQVRAASILGTSEKYISMLERGQRELKPIRRAYEAWVEAGLPLDWDRQAFEAERKMDSKKHLAK

SEQ ID NO: 119896 - protein, 342 aa, unidentified
MDSTIYGLDLAKRVMQLHWVDMGTGEIHRKQLRRRSLLEFFANRGPGIVAMEACGSAHYWARELRKLGHEVRLIAAQFVRPFVKTNKTDAADAAAIWEAVQRPDMRFVAVKSVDQQSVLALHRMREQLVKIRTMQINAIRGLLYEFGADIPQGRQKGEKTIPQVLEQLEDQISKMTLDAMRGQLERLKALSHDIADIEKSLALWKKGQEAVSRLMAIPGVGLLTATAIVATVGDMKAFRSGRELASFLGLVPRQSGTGGRVRLLGISKRGDTYLRSLLTHGARAVVNCQIRSRNPWIDRLLSRRPHNVAVVALANKMARTIWALLAKERTYDPQYQGIMMAA

SEQ ID NO: 119897 - protein, 340 aa, unidentified
MSLVLQPLLPFPDSCQGMSPHQQGRGTKMTEHCYGGIDVSKDRLDVMVLPDRKSFSVDNNAAGYSELVKRLRGLSIAAIGIEPSGGYERAVIRALLAADLSVRRINPNKLRQFGRARGVLAKNDRLDARLIAEYVAIMPTRVVQRDPATEQLAEVVTMRRQLCDEHVAVENQTAHLEDAMLRRLNKRRLARLAADILLLDRRMAQIVADNANLTRRYELLTSMQGVGPTLAFTLIALLPELGQMSRKQIAALVGLAPYDFDSGRLKGHRCIYGGRLPVRNVLYMAALSACRYNPALKVFYRRLAATNKKPKVIIVAVMRKMITTLNAMLRDNVAWQPKSA

SEQ ID NO: 119898 - protein, 362 aa, unidentified
MYIGVDTHKKTHALVAIDAQGQTCGTHTVANTPTGWATAFHWACDLAVARTWGIENSGSLGKGFAQFLLANGETDVHEIVPHRTAQYRKRGRSQDKTDHTDALAMARLLRAEAEYLPNVQPDDLSTELRLLSDHRDNLVAERTRLVNQLHAQMLQIDPCYAEHSGTLTSRTGIRYCHAFDLRHADGVVQTRLLIVRQLTEQLLRLWEEIETVETALAERVRETETPLLGLCGVGVIAAARLIGELGCTPRIHSAAALAALAGIAPVAVSSGGRNGHRLNRGGNRRLNRTFHMIALSQLRCEPLAQAYYAKKRAEGKTGRSALRCLKRRLVDVVYRLLREQKRATAPDSGACNARGPFLQPAA

SEQ ID NO: 119899 - protein, 498 aa, unidentified
MEWDWRASEVGARRKTKQKPAMVEPVEIPDAEHELVVDRGAAIDVAKAAGKVCVRLPGKSGRRFSRVWDVPARTGAITELAEQLVELGIEKVTVESTSDYWRIWYYLLEDAGLDVQLVNSRDVKNVPGRPKTDKLDAVWLAKLTEKGLLRPSFVPPAPIRVLRDYTRLREDLIRERTRYWQRLEKLLEDAAIKVSAVASKLDTLSTRDMVEALIGGERDSRRLADLARGRMKTKRSELITALDGRFDDHHAELARLLLGQIDALTAQIGALSARIERLIDAMDESDHPTGDRGRSGGGGPQVTGAPSTGGQATAPARRTTTAIGVDSDTATVVEPQRLTAVERLDEITGVGQCAAQTIIAEIGLDMARFPTPEHLVSWAKLCPRTIQSGPVIRGGKTGKGNPYLKGALGEAAAAARTDTFLGERYRRLVKRRGRLKALVAVARSILVIVWQLLSDPTARFHDLGPDYHTSRVVTERKIRNHIAHLTAMGFHVTLQPAA

SEQ ID NO: 119900 - protein, 378 aa, unidentified
MSTIRFVGLDVHADTIAVAVAESGGEVRSLGVIPNRLESIRKLIGKLGPIGSLKVCYEAGPTGYVLYWQLTQLGVACEVIAPSLVPTKAGDRVKTDRRDGEKLARCYRAGELTPVWVPDAAHEALRDLVRAREAAKKDQLRARHRLGKFLLRHGRRPEGLKAWTQKYLEWIKTHVHFDQAALEVTLADYLEEVDHVAARIVKLEKAIDEAVQKAPPEIRAVIEALQALRGVAQTTAATIVSELGSVSRFQSPRLLMGYSGLVAREHSSGNRVRRGGITKTGNSHLRRVLVEAAWAYQHRPNVTGFLLRRQKNLALSDEVKKIAWKAQQRLHKRYQAFAARDKNKNQIVTALGRELLGFIWAIAVHIERQQKPVVGKTV

SEQ ID NO: 119901 - protein, 321 aa, unidentified
MAMLSFCGIDVAKDSLDVVVLPEQQCLLVRNDAAGWAELVKQLRGLSIAAVGLEASGGFERGVMRALLAANMAVHRINPFKLRQFAKASGILAKSDRLDARVIASFIAIMPTRRAQRHSLAIERLTEMLTVRRQLSDEKIAAQNAAAMLEDAMLLRLSRRRIGRLKADIDMLDTTLIEIVRTDAALVHRYRLLTSMPGVGPVLACTLIALLPELGSMSRKQVAALVGVAPYTFESGKLKGKRCIWGGRAPVRDVLYMAAMSASNWNPVLKAFHNRLKAAGKLHKVVIVAVMRKMITMLNAMVRDDVVWADHLYGRHIVPTA

SEQ ID NO: 119902 - protein, 420 aa, unidentified
MSNIKAKKSALVNGKTLIVTADISKNTNFGYWRCPDGTDTKPFAFSNNRAGFQAFWERISYAREIHHLEELVFGYESTGSYAEALVHFLRELGMHVVQVNPMHTKRIKELSDNSPNKTDQKDPKVIADVIELGYVLTVVIPEGPAAELRRLTQARQRSIKRYTALANQLQSLIAIIFPEFLQVMKGVTSVSAQYLLKHHPTPQQIVAYGLDNLTCTLRKVSRGKLRADRAQALYEAGQSSVGVIHGQASIVLEICEILMALEASEHFTDLLEQEMVNYLKEIPYSNSILSIKGIGEVTASGLIGEVGDFRKFRTISEIIKLAGLDLYEISSGKRKGNRRISKRGRPLLRKLLYFAALNTVHKGGVMHQWYQMHLVKGMPKNKALIAVARKLLGIIFALVRHNSVYISDYSNVSLKLNEAA

SEQ ID NO: 119903 - protein, 412 aa, unidentified
MTATNQFAAHVGLDWADKKHDVCVQFKNGERVFHVIEHTAEALDVWLTELHQKVKGRIAIALELKKGPVVYALQKYPFITVFPVHALSLARYRQAFSPSGAKDDPQDAELALELMLRYPQKIKAIEPDNADIRLLQQLVEQHRQLVEDKRRFVNRLINTLKQYYPQPLEWFSHRGSLLLCELIMRWPSLQQLKRARHDTIRNFLNAKGGRAMALTEQRVVSIDNSIPLTTDPSVIEANALMATALATQIKVVSEIIKTYDERIETLFDSLPDAGLFKSLPGMGPCMGPRMLAALGDNRDRFNSAEEIQNYAGIAPVTERSGQKSWVHWRWQCAKFVRQTFVEWTAKTVNSSYWARLYYQGQREKGKSHQSAIRALAFKWIRIIYRCWKTRTRYDEAKYLLALEARKSPLLKP

SEQ ID NO: 119904 - protein, 339 aa, unidentified
MTIVGCDFHPGWQQVAVFDFDTGEIRELKLENATGEAERFYRSLPSPARVGIEACGNTQWFEDLLDRLGHELWIGDAAEIRASYVRKQKTDKRDAAHILKLLIEDRFPKLWRPSAVERDIRQLLIHRHRLVCIRTRVKNGLHHLMLNKGIQLKRKLWSEAGQKTLRDLPLDGWAAQRRKDLLHLLGNLDPQIAELNTAVEQAAQQNPRAQLLMTQPGVGPITALAYVVTIGEPTRFQRGKQVASYLGLIPSEYSSSNRRRLGSISKQGNSFLRMLLVESAQTVNRLDEGFRKQYKHRCHHMAKGTAKVAAARKLAVRLYWMLRTNTAYPEIARIESSPR

SEQ ID NO: 119905 - protein, 343 aa, unidentified
MQIRSVGIDLGKTTFHLVALSAAGKVLLRKKFTQKQLITFTANMQTCLIGMEACSGAHFLGRTLREQGHDVKLIPAQFVKPFVKSNKNDFLDAEAIAEAVDRQNMRFVPIKTDDQLDLQAMHRVRDRLVARRTSVINQLRAFLLERGMVFAKTPAKLKQAMPEILENADANLTPRMRNLVSLLWSEWKDLEQQILAMNLEVEQIASSDPACQRLRQIPGIGPLVATAIVAAIGNGAAFRKGREFSSWLGLVPRQHSTGGKARLFGISKRGNSYLRKLLVHGARSAVLRVKRERSPFGPWLDALERRSPIKVVITAAANKLARVAWAVLSSGEQYRPPTALMPS

SEQ ID NO: 119906 - protein, 338 aa, unidentified
MAILFVGIDLAKNVFAVHGVNQVGKAELVRPAVPRAKLAEMIAALPPCTIGMEACSGAHHWARLFQAHGHTVKLMAPKFVAPYRLSGKRGKNDAADAAAICEAVQRPNMRFVPVKSQDQQARLMVHRARQGFVHDRTAALNRIRGLLSEFGIVLPLKAATVRSQAAAHLEDLPGWANTVIGDLLSHVHHLDDRIQAYDQHIACIAKEDARAQQLMQLTGVGATTATALIAMIGNAHEFSCGRQLSAWLGLVPGQYSSGGKTRLGRITKSGDAYLRSLLVLGARSLLHAAKTKADSVSRWAVALAERRGYWRAVVAIAAKNARIAWAVLSRGENFVFPA

SEQ ID NO: 119907 - protein, 308 aa, unidentified
MAKNFIGIDLSKARLDIHDPQTGKDSCCPNARTGLHRFVRGLGPDDIPVFEATSGCDRLLIEELTLGKRRFVRVNPLHAWHYAQSLNLPKTDRVDARMLARFGTERQPAPTPLRDPARDELAELTGRRDQLKRMETEEKNRLARTANPIAARDIRASIKTLAQRIARFDAEIRACIAHNPKLSETARLITSVPGIGPVVAAGLMAWMPELGTLDRRAVASLGGLAPKARESGMYKGHRRLGQGRCHVRRMLYMAALSLWRNPGVVGDMVPRMRERGKPNKVILIALARKILTFANAVLRDRKPFQSNA

SEQ ID NO: 119908 - protein, 409 aa, unidentified
MSNDACSEVFAGLDWAVHTHAVCLIDAAGAVLERFEATHDRDGLAELMRRLARHGQRLRIAIERPSGLIVDALVDAGHQVFPIHPNAVKASRPRYRSHGAKSDASDAYLLADLLRTDGHRWRALAPQSDDIRALRALVRSRDDLVAARVAAANQLTSTLQAFWPGAAVIFADVASPIALAFLRRYPSPHSAKRLTEAHLQRFCKTQHYSGRRSAADLLARLRAAATGHVGAHTEQALAEVVRAQVAVLVPVVTQIAELTRRIEQFMHSMPDGLLMMSFPRAGQVCAAQILAELGDVRERFPSADQLAAEAGTVPVTYQSGKTRSVAFRWACNHRLRQAITCLADNSRHANDWAKGVYQAARARGCDHTHAIRILARAWLRVIWRAWTDRKSYDPALHGSALALASSQGG

SEQ ID NO: 119909 - protein, 319 aa, unidentified
MKTTTNASTNVIERNVGVDVGKSTLDIFILELDIHWQCDNSEEAIKTLVTRLARYKLSRVVVEATGGYERKLVYAMAEKELPVVVVQPMQVRQYAKAQGILAKTDKMDARILAEFGAVIKPEVRLIQTKNIRFIRDLLARRRQLMEARTQELNRIQKAEKALQATHARLIKMFDKEVQWVDKHLSKEISEVTEWQQTYDLLKSVPGIGDGVAHTLLGELPELGSLTSRQVGALCGLAPYNRDSGQMKGKRRIKGGRAPIRTMLYMAMMSAIQHNPVMKKFFKRLVAEGKHKKVALTACMRKMMTILNAMVRDGKRWQEA

SEQ ID NO: 119910 - protein, 322 aa, unidentified
MAMLSFGGIDVSKDYLDITVLPDEQCSSVSNDAVGWAELIEQLRGSSITAIGVEASGGYERGVVRALLAAGMSVRQINPFKLRQFAKASGILAKNDRLDARMIASFVAIMPTRPAQRQTPMIEQLAAMLTVRRQLSEQKVATENASRLLEGAMLQRLSRRRVAGLTADIDLLDQRLVEIVTADPALVHRFRLLTSMPGVGAVLACTLIALLPELGQMSRKQVAALVGLAPYDFDSGKLKGRRCIWGGRARVRHVLYMAALSASNWNPALKAFHDRLAATGKKPKVVIVAVMRKMITTLNAMLRDGTTWVDRYSGRRSASTAR

SEQ ID NO: 119911 - protein, 341 aa, unidentified
MKVNTLGIDLAKNTFQLCGMSKRGQIIFNKKLKRERLVSFVNKLDKASDFTVAMEACGGAHHVARGLIAQGWNVKLISAKFVKPFVKSNKNDAKDAEAIAEAAQRSNMRFVGVKSVGQQDIQAIHRVREGFIKRRTALANEIRGLLLEYGTVIPQGIGKLRKSIPVILEDGDDGLTVNFRELLRGLFEELIRCFEKVEELDKKLQIIYRTDENCKRLSKIEGVGVITATALVAAVGDPSAFKNGRQFSAWLGLTPKQCSTGGKTTLLGITKRGDSYIRKNLIHGCRAVVFHASGKSDKKSNWISNKLSSKGVNKTSVAVANKTARAIWAVLAKEEEYRRAS

SEQ ID NO: 119912 - protein, 383 aa, unidentified
MKAVCGLDVHKDSIFLCILHSDGELFEQVFGVLTFQLEEMRKLLQKHHVFEVCMESTSIYWIPIWRVLSPHFTLRLVNPYFIKQLPGHKSDVKDAQWIAECTMKELVRGSFVPPEIIQQLRQYDRRIFDLNAEIVRKVSKVDGVLQRCNIRLSNYVSNIECKSYRDVVRRLSEGVTNPNELMKLVHGRIVNRHGVETILASLTGVVSQAEIDVLRQLHEEIGIAESHRNECQQRMLEICEKHFPEELERLQKIPGIKERAATSLIAEIGTDMSKFETANHLASWSGLRPRNDESNKKIKSRKITHGNVYLRNTIIQCAWAASRQKDCFFSRFSYHQTIVRRKNKMKVIVAVARKLLVAVWHVLHDKTDYVDFKPDREESANNG

SEQ ID NO: 119913 - protein, 341 aa, unidentified
MQITTIGLDIAKNVFQVHGIDATEKVVVRKQLRRGQLIKFFEALAPCLIGMEACATAHYWARELTKLGHQVRLMPAKDVKAYVKRNKNDAADAEAICEAVRRPTMRFVAVKSAEQQGRLMQHRVRDLLMRQRTQLINAMRAHLAELGIAAAQGRAGIKELLAIVAQEGDRRLPVDAHASLIVLAAQLQAVQTTIGSIEKRIVLQHRSNEESKRLQSVPGIGVLGATAIAATVPDPKVFRSGRDFAAWIGLVPREDSTGGKQKLGPISKQGDRYLRRILVVGACAVLKQARQQPEKYPWLTQLLARRPFKVVAVALANKMARVAWALLAKGGTYRVPQLKAA

SEQ ID NO: 119914 - protein, 341 aa, unidentified
MKNKSFIGIDISKNVIDASIFCEGTPIKDFPHAVFNNSRKGFGEMCTWLKKNHVVLSNCLFGMEFTGSYSMELEKFLYARNYQFCMLSTHVVKHYPMGSKDKSDKIDSAKIADFLYRYNGTECVKPYKMPDKTMQRLKTLMNERKFLVEQRTCFMNRRQLCSTKEDAQLYDGYIRKLGHDIENIELEEQKLLATDDSLLSTYKNLLTIPGIGFVNAINVIVITRNFTAFETARQYASYVGVAPHSHTSGTSVRWRPRPSARCDGQAKADLSMAATVVVQYDAELQSFYNRKLGGKQDSDTKRKALNAVKFKLVLRMFAIGKQNRKWEPLDSKSSNEKLAIS

SEQ ID NO: 119915 - protein, 356 aa, unidentified
MIKYSIGIDISKNDFHACLSYIDGKQQVKVVRSGSFKNNKSGFLEFIKWITVTCTNKDIPLTILMEATGVYYENCALFLFGHGYSISVVLPNKSKKYISALGIKTKNDKVDAKALSRMGAEQALDKWEPMGEFFYKLRSFTRHNQSLKEMHTVVSNQVEAAEQCMYPNKEIIQSLGKVIKLIDAQIKQNVKAISAHINSSPEVAEKIANITAIKGVGELTVAVILAETNGFELFKSIAQLVSYAGYDVIENQSGTHTGKTKISKKGNSRIRRILHMPALCLVTYKVKIFEDLYERTVNKHGIKMKSYVAIQKKLLTLIYTLWKKNEKFDEKYQSKTNTTGDVEVVHSSRHSFVEAE

SEQ ID NO: 119916 - protein, 403 aa, unidentified
MIFVGDDWAEDHHDVYLMDADGARLASRRLPEGLTGIGALHELIADHVGEPSQVVIGIETDRGLWVQALGVSGYQVFAVNPLAVARYRERHQVSGAKSDAGDAKVLADLVRTDRHNHRSLAGDSPEAEAIKVLARAHQNLIWARTRHTNMLRSALREYYPAALNAFDDLHDRDALAVLSRAPAPAEGTRLSLSKIRSALKHAGRQRNIDARAHEIAVALRTEQLAAPATVTAAFAATTRATVGIIGELNRQITDLETQLATHFETHPDADIYLSLPGLGVILGARVLGEFGDDPNRYTTAKSRKNYAGTSPLTVASGKKYAVLARRVRNRRLYDAIDHWALGAINHSTGARAFYDQHRAAGDLHHQALRALGNRLVGILHGCLRHHTYYSEHTAWAHRTTTAA

SEQ ID NO: 119917 - protein, 332 aa, unidentified
MNLVSTLGIDLAKNTFSVHGVNSHGAVVLRRTVSRSRLAELVAQLPPCLIGLEACSGAHEWARRFSGCGHTVKLMAPKFVAPYRKSGKNDDNDAEAICEAVSRPNMRFVPVKSVQQQADLSLHRVRQGFIEERTATLNRIRGLLAEFGYVLANGAIQIRRQVPPLLEVLPARVARCVRDLLEHAERLAAKALEYEREIRLGVRDNDLARRARTRQGIGPITASALVATVGNGHDFNNGRQFAAWLGLVPRQYSTGGKTRLGHITKRGDPYLRTLLVMGARSVLQRAARAQDPLSRWALAVQARRGYHRACVAVAAKNARVAWALLAKESRAA

SEQ ID NO: 119918 - protein, 340 aa, unidentified
MNKRNLIAIDLAKNVLQVGIKDTAKQQILTNKKIRFDQLATFLARQPPSLVVMEACSTAHYWSWIAESHGHEVKMLPPVHVTPFRQGHKTDANDVLALMSAAEQPHLKHAVKKSVEQLSLQTFLGVRGYYVDEKRALSNRIRGLLLEFGVRIPKGYAALKHHIHDVLEDAENYLPDLCRELIWDLYQDFERYEQKMRDLDRQLRQIVKTNNPCHRLTALEGIGDVCSMSLYVKVGDGSAFKNGREAAALIGATPQQHSTGGKANIGHIRKKHVDKQLRALLLQGAKAVIYKKTISPTQKERWLRDLVARRGEGIAAVALLNKNIRTAWAMLKTGEEYRAV

SEQ ID NO: 119919 - protein, 359 aa, unidentified
MARTARRPSARQHHKRRSSRGRSAPLAQMHLNAAGIDVGATEHWVAVPEDRDEEPVRRFGAFTADLYVLAEWLRQCQIETVVMESTGVYWIALFEVLEERGCDVKLVDAHYARQVPGRQTDVKDCQWLQELHTSGLLRGAFRPEDQICVLRSYLRQRSMLVAMASRAVQHRQKALEQMNLQLPEVVSAMNGKTGMEIIHAILAGERDPQRLASHRDRRCTHDQATIAKALEGHWRAEHRFALQQALEQYEFLQQQLQACETQIEGCLQTFVTHVEVAPPQPTPARQRRARPRQAPSFDVHGYLHAMTGVDLTQIDGIDALTALKVISEIGLDMTRWPTGKHFASWLGWCPGNKLSGGNR

SEQ ID NO: 119920 - protein, 428 aa, unidentified
MNAVESIRLEEFRQLKKQIRGSKDHLIVGIDVAKDKHHAFFGTATGKTLFKRLVFENTSEGFEKLLIQAEALTLQHCLTKTVFGLEPTANYHKPLGEFLIKGGHMVVLVSGVAVKRNRELLDSRWDKHDTKDSANVADLISQGKCLFFEYPPMTLRELRGLLSLKRRLKRQEHGLRVRIRNHLLATYFPELDRYYGQSEPDGLSIVRWCVNPSVIAGLDYAHFLQLVAPHRRSLAQQKRLQAVWKLASDSIGCEAGEALEFEAKVMVETLEQIRDSIGATDHKIEDICLQFPEYHYLLTIPGFGPEVSSKVLSAIGNPFRFTTGAQVVKMAGLDLSADRSGKGSDAAIPVISKKGKADLRYALYQAALIASLRNRHFIAYYTHTLRGRDREKGIRTKMRVKLAAKLLIIAWTLMKKKEPFNPEYLNRE

SEQ ID NO: 119921 - protein, 374 aa, unidentified
MGLDLSKKSAVIFAVYAGVREIKPAQQKFLDELNKEFRMIHPDLDEFVRLSKAVKDHEVHVLIENSTQTFDVYWMLTNLGLNVTVAQSQDLYRITKSVKKTDSNDSVELANYMRRRLAGEDEFAVCVMPPKEWMYRREMCRVVFDEKVHLADLKRRVRSHMLLHGIKLSKDYREIFSPYAIRELKNTKDPVLLCHVAEAESIKKRTDQEVKYIETMFEGVRIYELIHSIPGFGCISAAYLASMIIDIDRFESCKKFTANFGVVPRMYQSGDTNRNCHVTHRGDADAIRLLKQAAFVHVNTVENSVVTQMYNRLRAKGKSFNEVKMACARKLLTVVWSVLKNDKPYTSPMELQRKASDLADEMLEDMEQELPILG

SEQ ID NO: 119922 - protein, 377 aa, unidentified
MHSENIAAYVGLDVHKETLAVAIAAPERLGEVRYYGTINNEAQAVRRLFQKLQGLYGNILSCYEAGPCGFGLYHQLTAMNIKCQVIAPSRIPKSPTDRIKNDHRDAISLARLLRAGEFTPVWIPDLTHEAMRDLIRARAAAKRDSRVARQRILSMLLRTDKHYAGKHWTGKHRTWLANQSFSQPSQQIAFQHYCQSLEQIEDRILQLDQEISRLLPEWSLCNLVCQLQALKGVGQLIAITLVAELGDFSRFSNPKQLMAFLGLVPGEYSSGNSIRPRGITKVGNSELRRLLYEAAWSYRTPAKVGAWLIYYRPDSVTQYSKDIAWKAQQRLCSRYRSLTAKGKKSQVAITAVARELTGFMWDIALAAQSSFSQQKQN

SEQ ID NO: 119923 - protein, 525 aa, unidentified
MIATSRRRSAASSPAFDHLGKPNGILSPRVRAVGPEHFGIVAVDCAKASSKWLLADFYGKVLIPPTVLDHRRDAFDHAIAQISQVTASHQIKDHVVVLEQTGRYHKPAQRALTAAGHDVRVMHPMISRHFRHAAHPGEKTDDTDLEGIVQATCNGYGLIDPPWEPIYCQIQLWARYRRDLVQKSTQLCCQILEHLESCLPGYARCFDDVFKSGIALVIPGAYGTPQAILEAGLPGLVELAGRQGVRVQKSTLIRILAWAQDAPSPDREAILHQRLLGDLNRDRITKEEYIQASERELVALLVQTPYVRLLALPGINVVLASELAGELGPIVHYATARVITGRAGLFPRRHQSGPVDYRRGLVCQGNRRLRQVLLLAAETLCRCNNYFQVLSQRWSSHGKDPRDVYVRVAGRLSRITFQMVAGSAAFRHPACQGPPAVLEKLMEFHDEHEINLTTTRTNLQHAAAQLPGAEQAREREVWKAKRAEIRGKRGRGPKRLAAILPAVLRQLLGGELAELIESKASGETP

SEQ ID NO: 119924 - protein, 344 aa, unidentified
MDNHTQYSGFAGVDLAKKVMQIHFVAGDGEITDKQVKRAEFLDFFRNRSKCLIGMEACGASQDWARKLEAMGHEVHLMSPKAVKPFVSGQKNDYNDAIGIYKAMFNGVRRVPVKSTEIRDLQTLRRIRSQVTKDRVKEINHVRGLLAEYGIVMGKSITAFNKGISSALESLKERGDVSPLVAEELQTTVESIKTKIERQKRLDREIEQLARGCKNYENFLKTPGVGPFTAAMLCVLLCDPDIFANGRKFAAYIGLAPRSRGSGGKYFVTSIPLKFNCDSESRAVFVECAQAIARYKNKSPWVEDILRRKPKKVALIAIANKLARQVWAMANKGENFKQMAILTA

SEQ ID NO: 119925 - protein, 354 aa, unidentified
MLIIGCDYHPGFQQIAFVDTETGECGERRLAHRGEAEQFYQDLKQRNATVRLGMESSGHSRWFERLLRDLQFELWIGDAAEIRTRRVRKQKTDRQDAQLLLRLMLEDRFPRIWVPDAANRDLRQLLWHRHRLVQMRTRVMNQLHVVALNEGLRRKKALWRPAGRNELESLVLAPWASRRRQDLLDLLDQLTPKIQDLTRQLEQEVEKRPVMRRLMTHPGVGPLTALAYELVIGTPERFHCGKQIASYVGLVPEENSSGDRRRLGHISKQGNALLRFLLVEAAQVTVRSHPQWRSTFFHLAMRRGRKIAKVAMARKLAVHLYWMWRQGLDYGQGKSSVRTRESPDIPMVCSKSPT

SEQ ID NO: 119926 - protein, 385 aa, unidentified
MGYSRGGHHAFGNIAAYVGLDVHKETLAVAIAAPERLGEVRYYGTINNEAQAVRRLFQKLQGLYGNILSCYEAGPCGFGLYHQLTAMNIKCQVIAPSRIPKSPTDRIKNDHRDAISLARLLRAGELTPVWIPDLTHEAMRDLIRARAAAKRDSRVARQRILSMLLRTDKHYAGKHWTGKHRTWLANQSFSQPSQQIAFQHYCQSLEQIEDRILQLDQEISRLLPEWSLCNLVCQLQALKGVGQLIAITLVAELGDFSRFSNPKQLMAFLGLVPGEYSSGNSIRPRGITKVGNSELRRLLYEAAWSYRTPAKVGAWLIYYRPDSVTQYSKDIAWKAQQRLCSRYRSLTAKGKKSQVAITAVARELTGFMWDIALAAQSSFSQQKQN

SEQ ID NO: 119927 - protein, 356 aa, unidentified
MAIAIGIDVHKKASTFFAYGEDGEPLEEFNKRFKRVASNRDGYTEVLVWLGNSDCDFLMENSTKTHDVYWILQGLGYKNLYVAHSVDLKRITKSSKKTDQFDAEKLASYMRVKQQNIDQFRTCYICTPEDMRIRRLCRIAKQELFDMGRIRRRIRSHLLLTGREWMGGLNTKWECEALMNEDDPGLRHLGRQLNECRLRRDAAEEAVVKAIKGNEKMFPIYEKLKEIPNFGDITAAYLAAVIVDIDRFENPKKLAAYLGIVPRMRDSGETENHCGLTRSGDPAARWLLIQATFRLVNSSAPDSQLKAFFAEKNGGSIEERKEADTSGLLKRPALVATANKLIHIIFALLTHPDRHW

SEQ ID NO: 119928 - protein, 373 aa, unidentified
MPKYSTAFGMDVHLRSTTVCALDADTGEAVTRRFPGNPWGEIAGWMDGFPGPSLAAYESGYLGFAPQRELAGLGVECVVAAVSKIPRSAADSASKNDRNDAARMAKAILAHDISPIWVPSPEVEGIRDLAGAYDGATARLATAKQRLLAFLAKRGFVYGGTTPAGNPRKYWTYDFLRWLDKVRPEDDGGARTLAALRNEVEAAAEARADLLSEYRAAVDASPIAAEVAALQSIKGCAFALAAAFSAEVGDFTRFRSGRQVTAYFGLAPSQRSSGDSVRLGGISGAGNALVRKLAVEGSWCYAAARHQPKLMPRDAGVPLEIRMHGRKGSERLLRRREEMLARGMPAAKANAATAAELVRWLWALGMMCREGAE

SEQ ID NO: 119929 - protein, 410 aa, unidentified
MEPILISCAGMDVHEKKVDVCIAHGPFDKPPKFEIRTFSTMTSDLEELMAWLKKYEVTTIGMESTGVYWKPIFNVMEGEFAIVLANAQRLKAIPRKKTDIIDCKRIANLLRYGLLPNSFIPPREIRELRDLNRTRRKLVGMMTSEKNRLIKVLEAANIKLSSVVSKIYGVSSLALIRSLLEKDKLSREEIAQLAKGKLKKKVDLLEKALNGKLTDHHRFLLKMHLENIDYLAKQIEKIDEEIERRMVPFQKESRLIQTIPGISEVNASAILAEIGVDMSQFPDASHISSWAGVCPGNNESAGKKKSGRTQKGYSFLKGALTESAWAASKTKDTSYSAFYHNIVRRRGKKRALIALAHRMLIDIYYVLKSGEPYQDAGAEAVCERTMKRRERSMIRSLEKAGYSVVKAEAA

SEQ ID NO: 119930 - protein, 326 aa, unidentified
MQSYLGVDVSKAKLDVCLLLPTQKVRSKVFANDPQGFQQLLQWLQTHAPDGPGSVHVCMEATGSYHEALALVLDERGVFLSVVNPLLVKRFAELSRQRNKTDRADARGLAEFCRNQRPERWDAPSPGLRALQALVARLETLQAMRQAECNRLEVAHDSVAASIRSVLVDLDEAIDQVKAQIARTVDDDPDLRRRAQLLQSIPGLGDRTIAQLLAYIGRPERFSSVKALAAYASLTPLIRQSGTSLQQRRGTHPSGHRQLKRSLYFPAMVAGRYNPLVAALWQRLKAQGKPGKVIVVACMHKRLAIAFGVQRSGKPFDANHLRPQQA

SEQ ID NO: 119931 - protein, 333 aa, unidentified
MSSILRTVGIDISKDWLDAFAAPEGRASRFTNDRTGFRKLIAWIGSGIDRIAYEPSGSFHRNFEDTLLKAGLPLYAINPFQVRSFARSIGRRAKTDAVDARTLATMAMAIEDLRPTEARSEGQRDLTELQQIRDALVRDRTATTNRGRNLRTPVGKRVTKQRLRQIDRQLKLIDAEIRQRIGEEKEMERRAEILTSIPGISDITAAGLIVHLPELGMLTRWRAASLAGLAPVTRESGNWKGRSFIQGGRHRVRRMLYMPAVVAAQHNPDLRRKYEALVARGKPRKVALTAVMRKLLVLANALVQQDRTWTAQPPREYSCPAFPAPSPAGSVHG

SEQ ID NO: 119932 - protein, 364 aa, unidentified
MKKNTSPLRRRNAKEKRIRARFPALPEFCYGVDLGDRRSCYVLVNSDGEEIEEGEFDNTVDDLKSVFADGPRARVVLETGGQSAWISRAIEGLGHELLIANARDAGGKGARKNDRRDAEQLARCGRLDPVALNPTRVRGEQAQAGLTRLRVREALVRARTQLINAVRSTAKAYGERVVKCSTNVFAERARTSLSAETATATESLLSQIESLSEKIREADRGLRQAAEAHPAARLLMTANGVGPLTALTFVHTIDEPQRFRKSRETGPYLGLIPRQKQSGDADPQLGISKAGDERLRRLLVQCAHYILGPFGTDSTLRRWGLKYSERGGKNARKRAIVAVARKLAVALHRMWTTGEKWKAFPAVG

SEQ ID NO: 119933 - protein, 338 aa, unidentified
MLHVGLDLHKKYSTVVVMDDDGNIQLEDTLYHDDRPRLIEFFSKLAGKAVVTVEATRDWYWLYELLEELGVTVKLANARKVRLIAEAWLKNDKVDPRSLAQLERTGFLPEAYISPRPIRDNREYLRYRLTLVRLRTGLKNKVHALLDKLGIKHPFADLFCPAGRRFLGQLTLRPAYQEELTNYLALIEDIERRIVAATKEIQRQLKPDPRAKLLMTIPGIGHLTAYLLLNEIGDIKRFPTPGKLCAYGGIVPIVRQSADHRWQGHITKEGNHYIRWALTESACLAPSKDYVLGSFYRRLKARRGNLKARVAVARKLLVAVWYVLTYGEPYKTTAFPTI

SEQ ID NO: 119934 - protein, 315 aa, unidentified
MSVIDVVAGIDCGKLFLDVAVTPGADTVRVANTAAGHAELVAWLASHGVVRVGVEASGGYERPVRDALRAAGLAVGVFDPARVRHYAKALGRRAKNDALDAAVIAAFTAVQEPGAFVPATEPAREELAGLVKARRLLVDKRTDLRRARASAPPLAQAALDDAIAALGRTIDELDAGIARRVAAVPALAKTVEALRSAPGVGPVVAVTLVARLPELGRIPKTGIAALVGVAPFDHDSGQARGQRHIAGGRADVRRALYMAAEVAATHCHGSLATYYRRLCGQGKAPKLALTACARKLIVRLNVMLARGATWEDQPA

SEQ ID NO: 119935 - protein, 430 aa, unidentified
MKSNTQNAKIEAITEKTLVLGIDVGSETHYVRAFDYRGIEYSKKPFKFSNTEVGFATFKEWILDLKERHEKDKVVPGMEPTGHYWFNLGKFLQDNEMKPVLVNPHHVKKSKELDDNNPTKNDRKDPKVIAGLVREGRYMIPYLPDGVYADLRTASNIRFQLQAELTRIQNRISRWFNIYFPEYKTVYGKPDAKSGMLILKAAPLPEDILTLGIDGVNQIWRDAKLRAVGKARAKTLIEAAEHSIGSKEGTVSARMEIRMLLEDYESRSIRLQEVMTLIEGLVKQIPMAEKLLEIKGVGIRTVSGFLAEVGDISRFNNPKELQKLAGLALVENSSGKHKGKTTISRRGRKRLRYLLFEVAMSLVAKNPEFRELHNYYTTRRLNPLKKMQSLMAIAAKLIRVFYAMLTKGVDYDPKKMISDIKRPTVYLQAA

SEQ ID NO: 119936 - protein, 348 aa, unidentified
MNQIIRIGMDTSKRFFQLHGVDAAEQPVLRRKLTRKQMIAFFEKLPATVVGIEACGASHHWGRLLSELGHEVKLLPTQLVKPYVTRNKNDAKDAEALCEAMSRPKMRFVRVKTAEEQAALMLATIRDRLVRNRTQLGNSIRGHAAEFGLTVPKGCAKIEELLLLTQTTENLPALARELFADLAKEYAKLEERFAEVDDKLMAWHRSNEVSRRLVKIPGVGPIGASLTVMKVQDPKAFRRGRDYAAWLGLTPKDHSTAGKHRLGVITRAGDEELRRMLVLGATAVIRQLRRGTSKASPWLAALIKRKAPKLAAIALANKNARICWKLMVSGQSYDACKMLAPVALDQAA

SEQ ID NO: 119937 - protein, 396 aa, unidentified
MKTNETSPTAPQGRIIGLDLHPDVFSAAALTGRDAATAQVAQSWDRRPTAELEKWARALSAGDLVVVEASGNTFAAVERLRAAGVPAVVLESQRAGQIRKTYCANDRLDAVKLARIYLSGLAHLVWQPDTLTRERREVLHSHRQAVTAATRARNRLKSFLSDHHVRLKPGVRLTQRSGAETVQASAAWTTLQKLLLDEMLAELQGAEQRRARLVALMAREVAADPRLLQLMRLLGVRHIIAFAIAAVVGDITRFANPKKLVAYLGLAPSVAVSGTSIRGRGELVSFGRGDLRALLIQSAQNALQQRNSPLHAWGWKLCLRKPSKNVAVAAVARKLTVSIWYLLRGLLAPLTKIDASLQVKLSKLATAIGVKTIRHLGYASKAAFIEEKTGWLLKIA

SEQ ID NO: 119938 - protein, 394 aa, unidentified
MQVTRIGMDIAKQQFDVHGVDERGQVVLRRTLKRERVREFMAQLPGCEIGMEACGGAHYWHRELTKLGHTVRLLSAHKVKPYVVGNKNNRHDAAAICEAMSRPSMRFVEPKSTAQQDIQTLHRARALLLRERTALSNQLRGILHEYGIVMPTGLAALKRKVAALMAGDDERATTVLRTVVAEQFECFLELSRRIAKYDRQIAQFCRQDERCQRLLAIEGIGPLSATALVAACGDGREFQNGRHFSAYLGLVPGHSNTGNKTVMLGITKRGNRYLRTLLIHGGRAALYAARRRRDPRSVWLKRLQEKHCANLAAVALANKNARVAWALLRYGQEYCPARAHAQTSTSARTARPAKTTPASAVHRARPARSGAEQLTGSSMSPAKQLRRLSDQVDG

SEQ ID NO: 119939 - protein, 364 aa, unidentified
MEQITRGECGGVVVRVGVDLAKRVIQVHAVDASGLLITGRALARERFIAWCSQLPAGCIVAMEASSSAHHWARKLCSLGLDARIIAAHLVKPYRKQGSGGKNDANDAAAICEAASRPSMHFVPIKSVEQQSILCVHRLREGVKEERTACINRIRGLLAEFGLVFAQSPKVLRLVLADVIEDASNEMGTLARLTLQRAHAQWRELDEHLAWCDERIAEHARTNGQVKTATTLLGVGPLTASAVVATVGDFRQFRNGAQFGAWIGLTPKQHSSGGKTRLGRITKRGDTYLRTLLIQAAKSAVLTAHRRPDRISKWLCALRERSGWQIAAVALANKNARILWALMTKGEAFDANHLSVKPGMSPQPT

SEQ ID NO: 119940 - protein, 339 aa, unidentified
MTYTLYVGIDIAAQSAAVAWQVPDRGEWQALEIKQQQSDYTRLMQQLRRQATPAETLVVMEATGVYWLALADALHRQGFQVGVINPLQARRFAQLHLQHAKTDAIDARLLAAYAQHMQPTPWTPPPAIYYHLQQRLAYRQDLVKIRTQERNHLHALRHHPHADAAIIQRQRQHLAYLTGQIKALEAELKTLLAGDHPWREAARRLQTIKGFGPIVTAWLLVATQCFAFCDTPEQAAAYAGLVPYPRHSGSSLRATRSTGRTGHAQLRTMLYMAALSAARHTPPVKALYDRLLARGKPNKVARVAAARKLVHIAWAVVVKERDFDPYYNTPSHQAVPIPT

SEQ ID NO: 119941 - protein, 338 aa, unidentified
MKTIKSAGPERLWAGIDLAKLTFQVAIWGHQDFPEMQVRSFPRTRKAMKPFLAWLRAQVPAGADLGLVLEATGAFAEEMASWLLDLEPTLWVAIVNPGQTSAFIKSLGFRNKTDDLDAKGLARYGHDRRPAPWERPTPELAVLKDLVRIRMDLINARTAMHLRLKDHQRAAKLASDAMRKVILSLKTQIQHLDDAIEKQVAAFPELAHQVELYTSICGIALVTATTVMTELGDLRRFPRSRQLTAFAGLSPKRCQSGTSVNGKTRLCKQGSARVRAVLYMAAGCAARFNPDMRATYEGQLAKGKEKRSALGAVMRKLLVLMRAVLIADRAWQPMKKVA

SEQ ID NO: 119942 - protein, 389 aa, unidentified
MIYVGIDVAKDKHDCCILGSEADKLFPVFTIPNNKAGFDELYEKMFSVTDDKTKIKIGLEATGHYSLNLLGSLIDKGLPTCVINPLHTNLYRKGLSLRKTKTDKVDARSIAMMLMTNKTLKPYSDISYHNEELKSLTRYRFDKVQERAKLKSSVARLVNILFPELEKLVPSLHMASVYSLLSKLPGASYITECHLTHLKNLLETASKGHYGRDMAITLRNTARDSIGSVIPAKSMELKHTIHLIKVMTEEIDEIEDSIKSIMDTCNSPIMTIPGISYRMGAMILAEIGDFTRFNYADQILAFAGLSPSTYQSGQLDSSYSHMEKRGSRYLRYALFNAAKFVCKWDENFGAYLSKKIGEGKHYNVAIGHATKKLVRTIYRMELTGEAYRR

SEQ ID NO: 119943 - protein, 339 aa, unidentified
MKLYAGLDLHSRNTYIGIMDKAFNRVFKKRVPNHLELILQTLDPFRDQIKGFVVESTYNWYWLVDGLMDAGYSSAHLANPSAIKQYEGLKHSDDQHDAFFLAQLLILGILPQGYIYPKKERPVRDLARKRLFLVRHKTAHILSLQSLVQRCCAMKVRANDMRHLTVKELEAWLEEEYLVLSAQANLDSINFLKQKIQGLEKAIRKKVRIDKAFHNLKTVPGIGDILALTIMLEVGDINRFPKVGNFTSYCRCVPSRRLSDGKSKGYGNRKNGNRYLSWAFTEAVHLGRRHNERFRRYYNRKVAQANTSLATKALGNKLARICYYIMRDQVPFCEELFCQ

SEQ ID NO: 119944 - protein, 420 aa, unidentified
MGRLKIVYPVCCGMDVHRDFLIACIAATNAQGVTEYQSRRFSTYTGSLRELRDWLLANDCKDVCMESTGKYWFPVHNILEESCHVVVSHPKFVKAIKGKKTDKKDAQWIADLFKHDLVRGSFIPPKDIRQLRDLCRYWVKLSSYMTGEKNRAQNCLTVSNFKLDDVFSNVFGMSASAITTQLLEHPGEQFDVAPFVDGRCKTPIAQIQEAVDGIFTYEQAEKLKIIRGHMDSLERHKAELESLILEIAQNYLPQIELLLTVPGIHDAFTAIRILAEIGADMTVFDTSKHLCSWAGLTPQNAESAGKKKTTRIGKSGAYLKPLLIQVALAASRGEKHPEIYGKKQALQKRRGKKKAIVAIARRLLTAIYHILSKNEPYNPAAYIQEDKNPMARQISQEKAFEMLARMGFIVSNPSPLSSSG

SEQ ID NO: 119945 - protein, 397 aa, unidentified
MSAVVGIDVGAYKHAVAVCRSGEREAERAVFRLAANRAGFDELDGWLERQGPVERVVLEASGHYYWPLASHLHRRGYQVAVVNPLQAKYFAKSRMQRSKSDPADARTLAALGMSEEPRVKDPLLGAEAKEAARFWGGLVKEQGQVRQKLLRLVEIGFPELKECFEDPLCETALAVLREAPTARAAARKRVSTLAEATRPGGRRRLGENKARRLHELAKDTIAPPELDTQMGFEVELLIKQFDLLEKQIEIAELRVSEVLDSELAQRLQTIPGVGPALAATFIAEIGDIWRFDEFDQLAAYAGIHPKEQSSGTKGQNPETSWHMAKTGNAFIRSAAYRMAVVGTQHNPVIRAHYLRKRAQGKTAMNALGHCMSKSLAIVWGVWRSGRAFDPTLGGPRT

SEQ ID NO: 119946 - protein, 347 aa, unidentified
MDTIGLDLHKRESQLCVLAPDGTAREQRILTSHDRFTAVLGPLAPATVLLEASTESEWVAAHLEQLGHTVIVADPNFAPMYATRARRVKTDRRDARTLAEACRLGAFRRAHRLSDARRHVRAELAVREALVRTRTRYIALAKALVRRDGLRVASGESERVVARLAELELSPTLAGELAPLVALFGPLNAEIAAADNRIAQLTAADPAVTLLTTAPGVGPITASALVATIDDITRFRSAHEFEAYLGVVPGERSSGEKRRVGRITKAGNARARWLLIEAAWRIVRSRSEETAALRAWASGIATRRGKRVAVVALARRLAGILYAMWRDGARYDGGKVRAPRPRAVAVA

SEQ ID NO: 119947 - protein, 324 aa, unidentified
MAKRTTVCAGIDTGKRKLDVALDGSSLQLQVENTAEGHKVLLEWLRRHKVKRIGIEASGGYEQAVVVELRRKRFVVVVFQPAQVRAYAKFHLQRAKNDKIDAALIAACTAAVKKIHPAPDPRLQPFAEHLTMIEQIGEDITLYKNRLETCRDPRIQKVWKEEIARLAKRERVELKALVAAIREHRDLAQRLDLIYSVGGAGMPTAVAILVRMPEIGQLSREQAAALAGLAPYDDDSGEQVGARHIDGGRKRLRRALYTAALPASFRWNPQLIALYKRLKAAGKEHKRCLIACARKLLIFVNTVVARGTPWQDEPPPTAATAPAG

SEQ ID NO: 119948 - protein, 348 aa, unidentified
MQQFYIGLDVSLDETSICVVDAKGAIVQEITASSDPESVSAALKMYRDRIARIGLEAGALTSWLAVELRELDYPAIVVEATHMRSAIRAQASKTDRNDARGIAHMMRLGWYKTVHVKSAESQRLRVLLSNRRILKRKLIDIENHIRGTLRAFGRKMGRIGRSSYEARVLELIEDLDPATAEFIVAMLEVRRGIWKGYTALHNLVVRIVKDDPVCRRLMTVPGVGPIAALTFRAGVDDPLRFARSRALGAHFGLTPKVHQSGTIDRDGHITKRGDIDVRTSLCEAAASLLMRVQKWSALKAWGLRIAKRSSMMNAVVAVARKLAVILHRLWLEDRDFQWTAEAAVAEKG

SEQ ID NO: 119949 - protein, 387 aa, unidentified
METVNPVCQAQSSVSAEAVTLFVSLELSRARWLVTSLSPGSSKISRHSVVGGDSRDLLRLLADLRMKAERHIGATVRVVTIQEIGFDGFWIHRVLASNTIESHVVEAASIAVPRRRRRAKTDTIDGELLLRTLMAFKRGEPRVCAMVVVPSPDEEDQRRLSRERKTMIKERIEHINRIKGLMACQGITGFEPMRANACEKLGELRTGDGRAIPERMKAEIRRELDRLELLRRQIAAVEAERDALLHTEETPNRSPGAQLLKLRGIGPEFASVLWQEGLYRRFANRRQLAAYAGLAPSPWRSGDMKREQGISKSGNARLRTTMIEAAWLWLRHQPGSALSRWFQERVRADRGRLRRVSIVALARKLLVALWRFTIHGEIPEGASLKAA

SEQ ID NO: 119950 - protein, 345 aa, unidentified
MEQHAGIDVSLKLSSVCIVDTSGKIVRETKVASEPEALIAFFKGLSIPVTRIGLEAGPLSQWLHAGLVRAGFEAVLLETRHVKAALSAMSTKTDRNDARGIAQLMRMGWFRAVHAKSVGSREVRALLVARKQLLSKLMDLEASMRGILRGFGLKMGVVTRKGFEARVRELSAGQAMLERITNAMLDARAALWREFEQLHGEMLRIVRDDEICRRLMSIPGVGPLVAVTFKSAIDNPGRIVKSKSVGALFGLVPKKYQSGERDFSGSITRTGDESVRTALYEAANVMLTRTTRFSSLKRWALEVAKRRGLKRARIALARKLGVVLHRIWVDGTTFRWTKPNPAIAG

SEQ ID NO: 119951 - protein, 321 aa, unidentified
MTYVGIDVSKVTFVVAYSSVKTNKTRTFKNTVNGVHEFVQTISASEHNCVLEATGNYSALLVYLLSEAGITISLENPLKIKNFARVMLTVTKTDEIDARLIALYGEKMQPAPYKLRSDAILVLKQKRTVLSQLKKQLVATRNLKGSMEVLPFFDPKCKKTIEKTITFLEKQIKEMEEELASLAQGEYKKQMDLLTSIKGIGVTLAAALIVATGRFSYFDNAKQLTRYLGLSPTYQQSGTSVNVKGHINRNGDSSLRSQLYVAAFSSLRCNTECKACFDRLRSNGKPGKVVVIAVANKLVRQAFAVVTQGKPYVDGFKSEKP

SEQ ID NO: 119952 - protein, 391 aa, unidentified
MSMYFIGIDISKYKHDCCIISAADQKVVSKVTIKNNKAGFDELLTIINSLSNPEDIRIGFESTAHYALNLELFLENSLLTFMEVNPVLISEYKKSKTLRRTKTDSVDCESIARWLMTVEYKPHSKGFYHAYSLKSLTRLRDKLIRQRSFYLVKITNVLDHTFPEFKPFFNERLSKTALYLLENYGSAEKMTRMNSASYEKLRSLSRGKFSPQQFLQLKELAANTVGVNNSIFDVELNSLLSLYKSLVKEIDTIEKEINKLIEEVHPHYMSIPGIGPLSAAVIYSEYGDISNFSNPSQMLAFAGIEPGINESGTESHGGRMVKRGSSQLRYTLINCCLPLIRFDMTFATYYAKKRGEGKPHRVAITHVAKKLIRVIYALERQDIDFNAQKLR

SEQ ID NO: 119953 - protein, 319 aa, unidentified
MIHYIGIDISKRDFYVSFTENSEVLMFNNDTTGIKQFIKHLKSHKYNKADTLIGLESTGSYHLPVAYLCTQSGYTVNVINPLITKKQNQVSIRRVKTDEKDARLIRHCLLSGAGHPFMETAESLALKTLVRQRSGYSMLRHRVRLRQEEVLNREDYLGISITTLNQELYDFLDIKIKDLDCILRRYNSKTQRLLQTIPGIGPQTAVTCLSEIGDITRFPDAQKLTAWIGLDPRVHQSGTSINGKGYITKRGNKILRTRLFNAASVAVIHPPNIFYEFFQKKRSEGKPYRVALCAVMRKMMHVIHAVWTDEKPFVNRFKV

SEQ ID NO: 119954 - protein, 333 aa, unidentified
MDTETGELQEGGLQHREEAEKFYRDLAAQEATVRVGMEASGHARWFERLLAELNFELWIGDATEIARKRERKQKTDRQDAQHILRLLLKDDFPRIWVASWENRDLRQLLWHRHRLVQARTRIMNQLQAVALNEGLRCKKRLWRESGREQLEAFRLAPWASQRRRDLLELLDRLDPTIAQLTQAIEQEVEKWPDAQRLRTHPGVGSLTALAFVLIIGRADRFQCGKQIASYLGLVPLEKSSGNQRRLGHITKQGNALLRFLLVEAAQVTVRSLPEWRSKYFHLTMRRGRKIAKVAMARKLAVQMYWMMRKAWDYEQLKKFGSHAGQPGHRYGVQ

SEQ ID NO: 119955 - protein, 342 aa, unidentified
MTIVTIGLDLAKNVFQVHGVDETGKVVVRQQLRRGIVEKLFASHPSCLVGMEACATAHHWARQLMALGHLVRLIPPSRVKAYVQPGKKNDATDAAAIAEAVTRPHMAFVPVKSEDQQAVLMLHRTRDLLVHQRTMLINALRAHLAEFGIVAALGRGKVAGLISTLGELAIPDLARTALQELAGQIETCSQRVEAMEKEIFAWHKTNEASRNLATIPGIGPITASMLAATITDPSVFKNGRQMAAWLGLVPRQNSSGGKDRLGGITKAGDRSIRRLLVTGATSVVRFARTKAPGDADWLKSLLDRKPARVVTVALANKMARIAWAVLTRGEVYRKNFPILATS

SEQ ID NO: 119956 - protein, 418 aa, unidentified
MKKDSDSRKKSEPTTKRVKSRGPMRRDTKEVLAELVGKLKEKLDPKKVAATSAGDGYPRGELRPNLDRLTVGVDLGDQWSHYCILGLEGETVVEGQLRTTREDITEFFQALNSARVVFEVGTHSPWVQEVIGGCGHEVLVANPRLMEGSKRRKRKNDRIDANKLARLGRVDPQSLHPIQHRNREVRQDLVVLRARDALVAARTELINATRGLVKSMGTRLPKCSSASFAEKVEGTVPAELRDALLPLVRMTAALSDCIQEYDEKIEKLGREKYGHTALLRQVKGVGPITALAYVLTLENPDRFVKSRDVGPYLGLVPKQEDSGESQPQLGISKAGDTMMRQLLVGSAHYILGPFGPDTDLRRYGLRLCERGGKNAKKRAAVAVARKLAVLLHCLWVSGEVYEPLRQGMSATMTPAGAA

SEQ ID NO: 119957 - protein, 355 aa, unidentified
MNSEKYIGLDVHQATICVAVMDPKGKVVMESILETKAATILEFFAGLRGTLSVTFEEGTWAAWLYDLLKPHVANLVVCNPRKNALLKHGNKSDKIDARKLADLLRLNDLEPVYHGETGVRMLRELARSYLTIVKDVSRVMTRLKALYRSWAIPCAGRDVYYTRHRSEWLGKIPEAGSRRRAEQLYQQLDMLQPLRQQARRELLAESHKHTITAKLRQIPSLGPIRSALAVALIQTPHRFRTKRQLWTYSGLGLETRDSGEYHYVQGQVRRRKKQVSIRGLNKDHNHDLKGLFKAAATRASVQPGPFQDFYQRSLAKGIKPTMVRLTLARKIAAITLTLWKKGENFDVEKLKSQAA

SEQ ID NO: 119958 - protein, 371 aa, unidentified
MQKKALYVGLDVHKASISTTVAEDGRDGAVRFIGAIPSTPFDIAKLAKRLSKDGGRLEFCYEAGGCGYGIYRQLLSLGHSCMVVAPSLIPRTPGERIKTDRRDSEKLARQHRAGDLTSVWVPDPVYEAIRDLVRAHMDAAAQLTRARQQCLAFLLRHGRIYGPNRKNWTLRHRRWLGLQTFEQAPHQIVFQDYVEAVWAAQDRRDQLEARIAAMLPDWSMAPLVEALRAMRGLDTISAVIFLASIGDLARFETPRQLMAYLGLVPSEQSSGTSVWRGGTTKAGSSEARRMLVEAAWSYRYPPRLASEKVLVVERQEKPVRDIAWKAQVRLCGLYRKLSATGKKPTVVVTAIARELCGFIWAIGQEVAPAPS

SEQ ID NO: 119959 - protein, 348 aa, unidentified
MIIIGVDFHPEFQQIASVDTDSGEFQEKRLAHREDAETFYRALAGQKVRVGMEASGHARWFERLMAELQIELWVGDAAVIRTKRVRKQKTDRQDAQLILRLLLEDRFPQIWVPSWENRDLRQLLWHRHRMVQARTRIMNQLQAVALNEGLRCKKRLWRERGRQQLESFLLAPWASRRRRDLLELLDRLNPTIAQLSQAIEQEVEKCPEAQRLRTHPGVGALTALAFVLIIGRAERFGSGKQVASYLGLVPLEESSGNRRRLGHITKQGSSILRFLLVEAAQVTVRSLPEWRSKYFHLAMRRGRKIAKVAMARKLAVRLYWMMRQGWDYEQLKKFGSHAGQPGHRDGVQ

SEQ ID NO: 119960 - protein, 402 aa, unidentified
MGWFAGLDWGSERHAVCVVDRDGKVAAHFEVTHDREGLALLRAKLAQLDAAEQIPIAIERPTGLIVDSLVDAGHPVVPIHPNVVKACRPRYRAAGGKSDLGDAYLLADVLRTDGHRFRSLTPQSDAIKALRAFVRTRDDLVAERVAMANQLRALLESFWPGAAAVFADIDSPIALAFVQRYPTPKCASKLGEKRLASFLAQHQYCGRRPASELLERLRAAPTGLARGAEANAKGELVRILARILEQLVTELGKLTWRIQHEIEQLADGRIVMSFPRAGRVNAAQILAELGDVRERFQTEEQFAAEAGVCPVTHESGKSRGVSFRWACNHRLRSAITLWANNSRRSSPWANDIYARARARGCDHPHAVRILARAWIRVLWRAWTNKTPYVAAQHGGAKKFLAA

SEQ ID NO: 119961 - protein, 391 aa, unidentified
MPQPNDLSRSLTALDQDSTLIAVVEMSQSSWLVGAIIPGVERRPAKKLEASEGMLLALLHRWRDEAAKAGCTIDRITVAFEAGRDGFWLARWLRQRGIEAHVIHATSIAVSREHRRAKTDRLDAALLQRAFLGWLRGERGHCTMVAVPSLADEDAKRPSREREALVGERTRIGNRMKSTLARLGIRGIRPGLRKAAERLEQLRTPEGAPLPPNTLAELRRDLARLRLIHDQIGEIEAARVERLRQQPDEARHPMILLLARVVGIGIETADMLVQEVLSRKLRDRRAVARYGGLTGSPEESGARRREKGLARAGNARVRRGMLQLAWRFLMFQKDSALAQWYRARTADARGATRKTMIVALARKLLVALWKLVTTGELPNGVVLRPAIQAVL

SEQ ID NO: 119962 - protein, 345 aa, unidentified
MQIVGCDLHTRYQQIAMLDTETGELSERRLEHGNGEARRYYSELKGKVRVGIEATGHTRWFERLLAELGHELRIGDAAQIRASMVRKQKTDARDAAHLLQLLVEDRFPCIWRPTMAERDLRQLVWHRQKLVWMRNAVGNQLHALAMGEGVCRKKQLWTKKGRAELEGLQLGAWASYRRQELLTMRDQLEASLKKLDQAVTEQSQQNQAAVLLQTHPGVGPVTSLAFVLTLGPVERFERSRKVVSYLGLNPREHSSGGKQRLGAISKQGNPMLRSLLVEAGHSAARLDAELRKDYQRLKLRRGSGVAKVAIARKLAVRMYWMLRQQANYAQLVRMQGSPWATLVEK

SEQ ID NO: 119963 - protein, 351 aa, unidentified
MKNHKYVALDVHKASVTMGVRDGAGKCVGHAVVQTKAETIKELIAGLSGTIHVTFEEGSQSAWLYDLLKGRVAECVVCDPRRNKLLESGSKSDHIDVDKLSELLYLGGLRSVYHGDHGTRALKELVHNYESLVKDQTRVKNRLKAIFRGRAISYQGAELYQLKERQQWVSKLNERGVRQRTEQLYEQLAALEPLVVAARQKMLRESRQQKASKNLQYISTLGEISVAELIGTVDTPYRFRSKRQFWTYCGLAVVRHTSSDYRFEQGELQRRRKSGPTRGLNQNYNRRLKKIFKTAALTGSHTGPFKPYYERLVQRGLSPELAQVTLARKIAAVTLNLWKKGERFDPKKLQS

SEQ ID NO: 119964 - protein, 393 aa, unidentified
MVYVGIDVAKDKHDCFIVNSDGEVLYDVFTIQNNMDGFEDLFFKIKTSSMDLSKVKVGLEATGHYSCNILGFLHNKGLSTIVINPLYTSLSRKSVSLRKTKTDKVDARTIASMIMSDVSLKPYSDTLYHNEDLKSLSRYRFDKVSDRAKLKQSVSRLVNILFPELEKLVSTLHTKAVYELLSEFPGAHQVASANLKHLTALLISASKGHFGRDKANEIREAARRSVSSYLPAKSLELRHTIKLIRELNDEIAEIETEIKKIMDSIDSPTLSVPGISYALGAVIVSEVGDFSRFDNPDKLLAFAGCSPSTYQSGQIYSTHAKMEKRGSRYLRWALLNAAKYVCKWEPTFAIYLRKKRAEGKHYNVAVSHAAKKLVRLLYHLETTGEKYIPQTLS

SEQ ID NO: 119965 - protein, 347 aa, unidentified
MRFYTKQHKYYCGIDLHTKKMYVCILDSEGKIRLHQNIRTDPESFLHILTPFREDVVVAVECMFTWYWIADLCVQHNIPFVLGHALYMKAIHGGTAKNDKIDSHKIATLLRGGMIPQSYVYPVRMRATRDLLRRRNHFMRKRAELFAHIQNTRNQYNLPDPLGCIAKPQNRKGIVERFDDPSIQKSISANLLMIESYDRLLTQLEHEIIASAKEHDLRSYALLQTIPGVGKILALVILYEIESIDRFPSVQDFVSYSRLVKCTKESNGKIYGTNGNKIGNAHLKWSFSEAAVLFLKGNEPGKKYLQRLAHKHGKAKALSILAHKLGRAVYFMLKNKEAFNPKKFLGL

SEQ ID NO: 119966 - protein, 347 aa, unidentified
MKNHNTIGVDLAKNVIQVCAVSARGKQLHNKALSRKKFSEYLTKQKPGLVAFEACATAHYWARYAQAQGHEVKILPVLSVYPFRQGHKTDENDALAVAEAAMRPHLKEAPLKTVEQQGLQSIQRSRELLVQDRTALSNHIRGILLEFGIAIPKGFSTLHTRIPEILEDGDNELPDSYRATLHLLYGRLCDLREDIRLMNKEIDVLVKQHVACHRLTAIEGIGPIGAILLYATLGTGEAFKNSREFAAYLGLTPKQYSSGGKTNLVGISKRIANKRLRAVLIQGARAYINHLKEPRTTKDQWLSALVQRAGYGKASVALANKNVRTAWAILTQGTTYRKTYTAELLAA

SEQ ID NO: 119967 - protein, 348 aa, unidentified
MVSGRVVIGIDPHKASWTAAAVDSTLRVLASIRVEVNRDGYRQLRRFARRFTHASWAIEGAAGLGAPLVARLAADDIAAVDVPAKLSARVRLLSHGHNRKTDQADAVSVAVAALTAQTLRNAEVDQTSAALRVLTDHREDLVRARTQAVNRLHVLLTHLTPAGLADRLTADAAAALLRTVRGRTPLSRAHRQVAVDLVAEIRRLDRRITAADKAIKDAVTASGSALTGLYGVGDIVAAIVLARAGTAGRFPSAAHFASFAGVAPIEVSSGDVVRHRLCRAGDRQLNRALHVMAITQIRGDTDGKAYYQRKRQAGKSHREALRCLKRRLADVVYRTLLNDDEAPSMATP

SEQ ID NO: 119968 - protein, 465 aa, unidentified
MKPHRRLPRKKPVAGPSLLERLNPNAAGIDCGADTHYVAVPPDRDATPVRAFKTFTTDLHRLADWLTTCGVTTVAMESTGVYWIPLYEILEARGVDVVLVNARHVKNVPGRKTDVVDCQWIQELHSVGLLRGSFRPTAAIAALRAYLRHRETLVQSAATHVQRMQKALVQMNLQLPIVISDITGVTGLRILRDIIGGQTDPHALAQHRDHRCQASAAEITAALTGHYRPEHVFVLRQNLALFDAYQGQLAVCDAAIEAHVLTLAAQTPAPSGLLPAPRTRKKPRDNEPRFEIRTPLHQLTGVDLTQIDAIGPYSALRLLAEIGTDMSRWPTEKHFTSWLTLAPHNKISGGRLLSSKTQPSANRAAAILRMAAMNLGRTDTALGAFYRRLAYRVGKAKAVTATARKLAILVYRTLREGLVYQDPGAAAYDAQHRVRVLYRLRQRAAHLGFSLLNRETGELLEGAVS

SEQ ID NO: 119969 - protein, 344 aa, unidentified
MQVITFGIDLAKNVFQIHGVDAAGHAVVKKQLKRDQLAPYFANVAPATIGMEACSSAHYWARKLQSQGHSVKLMAPQFVKPYVKGNKNDANDAEAICEAVARKSMRFVPIKNVEQQALLSLHCVRQGFVAERTAYANRIRGLMGEFGFVIPQGIHHISERVHDLIEDASNELPGLFRVTIERLLEHFKELHRQVRELELQIQAWHRSNDASSKLEAIPGIGPITASALIASIGDAKNFKSGRELSAWLGLVPRQHSSGGKQNLLGISKRGDMYLRMLLVQGAHSVINASCRQGVEAGWLPGLLKRRNHNVAAVAVANKNARIVWALLARERQYEAGYSQDTALT

SEQ ID NO: 119970 - protein, 463 aa, unidentified
MQKQKNSKEKDKRISGHLEQINLYAAGIDIGSTSHYVAVPAELDDQAVREFPCFTRDLNRMADWLVKIGIQTVAMESTGVYWIPAYEILEERGLEVLLVNARHVKNVSGRKSDVQDCQWLQQLHTYGLVCGCFRTPEQSVALRAYMRQRENLVQSASDCIRHMQKALRQMNLLLDNVVTDITGKTGMGIIRSILDGIRDPGELAKLRDARCKHDEKTISASLEGHYREEHLFALKQAVELYDVYQQQILACDAAIETQLRTLESKGDTDDLPPMKIRKSKNGLAFNVRSELYRMTGVDLTRIDGMNENSILKVLAETGIDMKAWPTEKHFASWLGLSPNNKITGGKVLSGKTKPSSNRAAAAFRMAAYGLFNSKSALGAYLRRQRARLGAPKAITATAHKLARIFYSMLTNGTEYVDQGQDYYEKQYRERVMKSLKKRAASLGFDLVPNDGNDSTNDPELSMA

SEQ ID NO: 119971 - protein, 414 aa, unidentified
MEDILDCCCGLDVHKESIVACLLQGPPGNGLKPQSEVREFGTQLKDLLALRKWLEEHKCNHVAMESTGIYWQPVYAILETSLSDEMHLLVVNARHMKNVPGKKTDMRDAEWIATLLRAGLLKGSFVPERDIRDLRQFTRYRKALIRDITSQKNRIEKLLQSNGFRLSTFLSDIFGSSGSALMHQLVQVGFITKQSLDMCLKARARQKASEILSSLNGTLSVPQRKLLKMQLAHLSDLQDNLREVETEIHDGFSQFQGPIELLDSIPGIDQTAAYTILAEIGKEMSAFPTAQHICSWAGLAPGNYKSANKQKKQRINQGNNYLKTILCEVAWVIASHKNLYLSSWYWRLKQHTDSKRAIVALARKLLVIIYTMLKTEQLYNEQKFLERKKASEQRKVKRMVYELSQLGYAVSLPA

SEQ ID NO: 119972 - protein, 348 aa, unidentified
MVADSLDVVIGVDTHRDAHALALAAAPSGALLLEAVVEASTVGYRDALALAQAHAPGRRAWAIEGSGCYGAGLACFLLARGERVLEVDRPRREQRPGRGKSDALDALRAARSLLASEPLASPRRAGRREALRVLLATRESAVGARRCALNQLRALLVTCPEPLRAELRPLTRARLLGRLRGTRPRRHADSQLRGSLLAMRLLAVRIEALTLEERTLKREIRALVRELAPRLLAEPGVGPIAAAHVLLAWSHKGRLRSEAAFARLAGAPPIPASSGKVVRHRLDRGGDRKLNRALHAIILTRRRTDPETIAYIQRRVSEGKSDREAVRCLKRYLARSLFRQLEAMPQAA

SEQ ID NO: 119973 - protein, 406 aa, unidentified
MELIALHKRVIGLDVHQAQITACALIEEADGTTRIEQRQFGAFKRDRRALAEWAAALHPDEVVMESTGIYWKSPYAALEAAGIRAQVVNARHVKNVPGRKTDVGDAQWLATLARAGLLRGSFIPPAKLRELRLIARQRQKLVGLLSSEKNRLHKILTDGGIRLGVVVSDIHGQSARAMVKALIEGQPPHEVLQFASRRLKASREELFDALQGELTESHRFVLDELMRHIEEIEARIARFDARLLDGLADERNVLALLQTLPGVDLIGAAMLLVEIGTDMDAFGSADRLASWVGVCPGNNESAGKRKSGRARKGNPYVRRLLCEFAHAASKTQSVFKSKFQSLIVRRGHKRSIIAVAHKLLRTMFFMIKRGEYYRDSATNYEALSVKRNAPRWIKALRQFGFIPAAV

SEQ ID NO: 119974 - protein, 420 aa, unidentified
MPNIEIGVDSMVKENFIYVGIDLHKETHTAVMIDCYNQKLGEITFPNRPAAFPKLVTKVKKCNTDGKEVVYGLENAYGYGRALAVWLIDKGYLVKDVNTAISHRQAKHRGAMYRKSDSDDAKAIALATLNMLDKLPDACPNDAYWSLGQLVHRRDNIMKQRTRLVNQLHEQLCIAYPSYKQFFNDISRPTALYFWEHYPSRKYLKGKSVEDLRAELVPVSHNKCSTKTCEKILDAVASDKVKNNAYQDARDMVTLSIVSDLQHYDSQLTEVDKMLEQMYKMLGCTLTTIPGVNVITAVKILAEIGDIKRFSNANKLAQFAGIAPLHLSSSGKGKDVATKQGNRRLQATIYFLAIQMVQVSSKGTPRNSVVRAYYEKRKAEGKNSQQALICISRRLISIIYGMLKHGTEYRMPVVESAGEK

SEQ ID NO: 119975 - protein, 403 aa, unidentified
MSTFFAGLDWASRTHAACVIDEHGSVYLQFEVNHDACGLAELCRRLLGAAVTAVAIERPSGLIVDALLEAGFAVVPIHPNVVKATRPRYRSHGGKSDASDAYLLADLLRTDGHRFKPLAPQSDDICALRALVRGRDDLVATRVQLANQLRSLLQSFWPGAAEVFADVDSPIGLAFILRYPTPESAARLGPKRMAAFCAQHAYSGRRSAQELLDRLHQAAAVAVGELEMEAKGELSLSLARTLDRLVDQIRLLSSRIEHHVSSIDDGRILMSFPRAGRICAAQILAELGSVRERFDSDEHLAAEAGVAPVTYASGKSKAVTFRWACNHRLRAALTCMADNSRHANAWATSVYAKARARGCDHPHAVRILSRAWLRVIWRAWTDHKPYDPALHGGAQLVLKTAGG

SEQ ID NO: 119976 - protein, 320 aa, unidentified
MLSFGGIDVSKDRLDVVVLPEEECSSVPNDAAGWAELVERLRGFSITAIGIEPSGGYERGAMRALLAAGMPVRQVNPFKLRQFARASGVLAKNDPLDARMIASFVTIMPTRPAQRQTPAAERLAEMLAIRRQLSTEKVAAENASRLLEDAMLQRLSRRRIVRLAADIDLLDKRMVEIVATDDALVHRYRLLASMPGVGAVLACTLIALLPELGRMSRKQVAALVGVAPYAFESGTLKGRRCIWGGRAHVRQVLYMAAMSASNWNPVLKAFHDRLTAAGKLPKVVIVAVMRKMITMLNAMVRDDVVWADRLSGRHVLPTAR

SEQ ID NO: 119977 - protein, 342 aa, unidentified
MKQYVGLDVSQKETSVCVVDESGKVVFQGKAKSDPGALAELLSKRAPGVERIGFETGAMSSWLWHELNRIGLPVVCIDARHANAALSVRINKSDENDARGLAELVRVGWYREVKVKSAESQAVRSMLVARSKLVAIRRDLENQVRSMLKEYGLQFGRSIGSQFRRVVRELIIDGHRLAPVVEALLAVHEQVCAEQDKLDRQVRRLAHDDGTTRRLMTVPGVGVVTALTYRHTIDDPSRFSSASDVGAYLGLTPRRKQSGETDVSGRVSHWGDRLLRTYLYEAASVLMHRTKKWSTLKAWGIRLSKRIGMKKAKVAVARKIAVLLHCIWVDGTSFEWGSEKTA

SEQ ID NO: 119978 - protein, 419 aa, unidentified
MTECNITASTPVLVAIDISKGRHEVLIEVPDKKRRRRVSVLNTLDEFERLINLLRSFQRPVRVAFEATGNYHRALAFQLGAAGFNIKLISSVALARTREALHNSWDKNDPKDAQVILHMMTIGAEQFYHDPLLQGTNDIQELSKTHDMISRAKTELWHRILTHYLPLYFPEADRFHRSSRSDWFFAFLELFPSPHFIAALSKEAFIAAAWDVVGRKVGKELLLSDIYATSIRSIGLPVAPESDAIVMFRMVLAEGRSLIAQRNLIEARAVEMLKDNSDYKLLTTIPGIGPINALTILAEAGDLRRFNHHRQFLKFCGMDLATIQSGMFRGQTKLSKYGNARLRRTLWMAAQVAILQRPNSFHDKFERYITKDRHNTHLRRKALTAIAAKMARTVHAVIKSGETYRPFYEGAIHSGRTFL

SEQ ID NO: 119979 - protein, 321 aa, unidentified
MSAPSLVTVGIDVAKDHVDVSVLGAHLDTQRFDNDAEGHSALAVALQPLDVALVVMEATGGYEAEMACALQSAGLPVAVVNPRQARDFARSMGRLAKTDRIDARMLSELASVLVRREDLSRLLRPVPDERQQWLAALLTRRRQLLTMLLSERQRLQITPVGLHPSLLAIIAAVQAQLDDIDAQMVGHVREHFSELDRLLQSTHGIGPVSSACLIAELPELGKLSRRQIAALVGVAPIACDSGSRNGRRRVHGGRFEIRRVLYMATLTATRHNPAIKTFYQRLKAAGKLPKVALVACMRKLLTILNAMVRSNTPWDDSLHKA

SEQ ID NO: 119980 - protein, 418 aa, unidentified
MKNIKTKRLKAVNGKTLIVTVDVSKGKHTGYSRCPDGTEMKPFDFFNNGRGFGEFWNRISKTKRDHNLEEIVFGFESTGPYAEPLLQYLRKKSVRIVQVNPMHTKRLKELQGNSPNKTDYKDPKVIADIIELGHALTVVVPKGVAAELRRLTQARERSMQRRIVLLNQLHDLAYLLFPEFLQVMKDIKTKTAQYLLKHYPTPQGLAEHGLGELTKTLKEVSRGKLGKGRAAALYEAARTSVGIIEGQRSMVLEAKEILTNIEASEQFIDSIEKEMAHNLKQIPYSRFILSLKGIGDVTAAGLIGEVGDFSKFTTIAEIEKLAGLDLFEISSGKHKGTRRISKRGRSLMRKLLFFASINVVRKGGVLHEAYQNLLKGGKPKLKALIAIARKLLRIIFALVRNHSVYVIDYCKPQLKMAA

SEQ ID NO: 119981 - protein, 409 aa, unidentified
MSKLFVGIDVSSRKNVIHFMLPDGSKHSSFSVDNNFNGARLLVRMIISALVELQLQNVVIGLEATSVYGDNLIFFLRESSDLAKFQPDLHILNPKQVKKFKDAYPDLPKNDPVDAFIIADALRFGRITNKLHTDDYRYQALKTLTRARFFAVQNLTKEKQRFMNYLFMKFSSFTQDKVFSDSFGASALSLYTEFDSVEELAAMNLTELTDFIRKTGRNRFPDPDAVAKAIQAAVRSSYRLPKTLVDSVNQVLALSIIYMRSLKEQIKSFDKAIELQLQSIPNTLTSVKGIGLVFSAGIIAEVGDIKRFSNQAALAKYAGLVWTQHQSGNYEAQNTRLINSGNRFLKYYLTEAAYSLLRCDAEFKRYYSLKKSEVNRGQVKRALALTARKLVRLVFALLKDNKLYIAPEV

SEQ ID NO: 119982 - protein, 352 aa, unidentified
MIVLGADMHKSSHTIAAIAAATGEVLDDKTAAVGARGFDRVVRWARRLGPDRVWALEDCRHVSGSFERFLIARGERVVRLPTRLMANSRRSSRERGKSDRIDAIAVARAALAEGVETLPTAELAGPELDIRLLVDHRERLVRARCALNNTLQWHLHDLWPELELPGSSLFYGKWSTRIARRLSRAEQTMRVRIARDELRRLRELTHAINALEAEIADLVAQVAPQLLDEPGFGPLTAAKLVGEIAGAARFASDAKLARAAGLAPIPVSSGRTDRHRLDRGGNRQINAAIHRVAVTRARCHPETIEFVARKKAEGKTHREAVRSLKRHLARRIWQLLRAPHPVPETTPIPSTS

SEQ ID NO: 119983 - protein, 318 aa, unidentified
MTENIEKVYIGVDVASEKLDIAASHPVANLPRQVENKAAPIKKWLRTLPENAHLVCESSGPYHKLLLRLCWREGVPVSRVNPERVRALAKAHALHAKTDQLDALLLAEFGRRQEPPPTPAPDPLRARLLEFNTRREQLVSMRTMELNRLKQPELDPSTASSIRRALSMLKAEITRTEKDIDALVSQSEELAAQVKLLCKVKGVGKRTATSLLLTMPELGTLSKQRAACLAGLAPMSRESGRWKGQRRIRAGRSSVRNSIYMAALSAKRFNPRLKAFAERLDSNGKPFHLVITAVMRKLLICLNSILRNHLKSSQHSIS

SEQ ID NO: 119984 - protein, 351 aa, unidentified
MMIIGVDYHPSFQTIAFFMEETGECGEQELNHSDGQAEKFYRDLKQRGICVRVGMEATGYSRWFERLLAELGFEVWMGDPAAIKAKRVKKQKYDREDARLLLRLMRENNFPQIWVPGPENRDLRQLLWHRHRLVQMRTRIMNQLQALAMNEGYRWKKKLFSEQGRAQLEKLALAPWASRRRQELLELLDRMNPTIEELTAAVEREARKRPEALRLMTHPGVGPLTALAYVLIIGTPMRFERGKQIGTYVGMIPCEESSAGKQRLGHISKQGSSLLRFLLVEAAQAAARTQPDWRRRYMHLAMRRHRSIAKVAMGRRLAVRLYWMWRNGCEYSPSLEFGSYVGQLGTGHGVK

SEQ ID NO: 119985 - protein, 355 aa, unidentified
MKRTTKYVGLDVHQATIVAVVRDETGRVIARTILPTEAAALTAFVGPWRGRVEVAYEEGTQAQWLHDLLRPLVARVVVCDRRAVRRQGNKSDWRDAEELAAMLQRGAIRSVYHGGGPQQAELKELTRTYVTLVQDATRVMTRVKALYRARAIPTRGRGVYHAGERATWLAKLPAGGVGFRATTLYRELEVLLALRASAKAALLGAARRDPAWALLQTIPFLGPVRVALLLGIVQTPWRFRTKRHLWAYAGLAVVTRTTAEYTLEGRTPVHRRRAPLTRGLNRNHHRLVKALFKGAATAATARPGALQDWYQQRLARGMRDELARLTLARKLAALTLHVWKTGEAYDPAKLTRPAG

SEQ ID NO: 119986 - protein, 413 aa, unidentified
MDRVTERCCGLDVHKSSVTACVRIAAEGGRVRQKTEEFAATTQGLLLLRDWLASFEVELVGMEATGVYWKPIYYMLEDDFELWLLNAEHLKHVPGRKTDIKDAEWICQLLEHGLVRPSFVPPKEIRELRNLTRYRKVQTEERTREVQRLEKVLQEAGIKLSSVATRVLGVSGRAMLDALIGGTTDPEVLSELARGRLRSKIPALKEALEGSFSAHHALMASRILAHIDYLDETIAELSTEIERVLDPFSEEVALLDTIPGVNRKVAEMIIAEIGVDMSRFPTHYHLASWAGMCPGNDESAGKRRSGKTRKGSKWLRSALIGAAHAAGHAKGSYLAARYARLKGRRGSRKAAVAVGHSILVIAYHVLERGEPYHELGEDYLHQRRSEEAYSKRLVRQLEKLGHRVVLDPLPQPM

SEQ ID NO: 119987 - protein, 402 aa, unidentified
MGLAVGIDVAKLIHWVVAVDDEGHQVLSRRCENSPAAIATLIDDLDALTGHGPVTVAVDMLGGIASVLTTMLIDSGLNLVHTPGLLVNRSRRATPGGERKSDPADAKVIADQVRLRAATGELRRITPVAETDAALRLLVSRRADLVADRTRRLARLRDLLTSINPGLERAVDPTTKSSLWLLSRFVTADEIRRAGLDGLTTHMRELPRLSRRTATKLIDAALAAATAQHVQVPGETVAADILRELAAEITTMGNRITAIETQIAQAVNAHPDGTLVRSLPGMGTTLPAEFLAAAGGLERFPTPGALASAAGLAPVLQQSGKMNYLRRSYAGNRTLKRVFYQSAFCALQHDQLSRAFYDRKRKEGKRHHQALIALARRRINVLHAMLRTRTEFHAPTTGLTAA

SEQ ID NO: 119988 - protein, 347 aa, unidentified
MERYVGLDVSQKFTHVCVVDDEGRITWQGRCVSTPDAIAATLKDKAPGVSRVGLESGPLSTWNYHGLIELGVPVICIDARHAQAGLRMQLNKTDKNDARGLAELMRVGWYREVAVKDLDSHTVRAMLGVRFQIIGMRTNIINQMRAMLKTYGIILKPEFGKSHEETIQRLCEEGHGVLFETLAAVLSVYQALKRQIAVLDRLLARFVRSSSTCRLLMTVPGVGVLTSAAYVCVIDDPKRFLKSELVGAYLGLTPQRYQSGEVDRIGRISKCGDPLLRAYLFEAATSLLTRTTQWSAIKVWGLRLAKSRGMKKAKIAVARKLAVIMHRMWLSGEKFRHATTVAAVSAA

SEQ ID NO: 119989 - protein, 414 aa, unidentified
MEQKMIYVGIDWADDHHDIFVTDDSAKTLDQFRIDHTCDGFALLHSHLANHQTSPGLVVIAIETSRGLLVHELLQKGYTVYAINPKAVNRYKDRHVLSKAKSDVLDALSLGHILRTDRHLFQPLKPLPEDYRLLDRLCSDLRKVVDEKSRVTNQVISCLKELYPKALDIFSLDSQIFIHFLKAFPDHRALSACTKKAFLMFLKKHRYPCPAKAEELWKTVQAPTLQPDKVVARSGILRLRMLLDQFENLKEHITHYEQEIQAILEKIPESTSVKSLPGVGERLAPELVATLGPNCKDGHHRFQAAEEIAKLSGCVPVVRESGKWKTVSLRYACVKPLRRTFHDWAFASISRSSWARAFYDYHKERNQSHCTILRNLGKKWIKILFAVWSNGTSYDETLHIQNLKTRNVPWAMAL

SEQ ID NO: 119990 - protein, 351 aa, unidentified
MAEKEKQVVVGVDTHKRFHVVTVISELGERLAFEHFEANAKGYDKALKWAKKHGSVLRAGIEATGSYGAGLTERFRKDDIEVFDVYRPDKQERRRRGKNDVEDSFQAAEAALAYIRCAVAKEKSGLLEAARMLEGAYELVVRQRTATMNLLRADITTLPAKMRERLEGLCRSELLKTCANFRISKGAGAEEGMKAAVRHLARKVQAMDKEAADLEKQIEQCAKKLAPRTLSLPGIGCHGTIRLLCSAGQNIDRLKSDAAFSMLCGTSPIPASSGNNIHLRLNKGGDRKANSVLYIMAINRIQRCEKTQAFIAKKMSENKSKKDAIRALKRYLAREVYYALKADIAKLGMTA

SEQ ID NO: 119991 - protein, 421 aa, unidentified
MKGKRTSAENHSGMVTVHPNAAAIDVGATMHMAAVGADCTSDPVRSFGTFTGDLHRLADWFAECGVKTVVMESTGVYWIPIFELLDERGVEVFLVNARDAKHVPGRKTDVSDAQWLQRLHSHGLLRASFRPKGEIAELRAYIRQRERLLDYAASHIQHMQKALTEMNLQLHHVVSDITGATGMRIIRAIIAGERDPTVLALLRDTRCHAGVDIIEKALTGYYRAEHLFGLEQALALYDEYQQKVSACDMRIEAVLMTLASLRGNRGEPLGSPRRRMPRQANGPAFDVREALYALLGKDLTQIHGLGPYLALKLVAECGDDLSAWPSAKHFTSWLCLAPSNKISGGKVLSSRTRRYRLVSARQRPSLRRRAKSRSCSTTRFDMGWITSTRAHPITRHATESALSEIFTAAPRRSASSCSQTR

SEQ ID NO: 119992 - protein, 338 aa, unidentified
MKKNVIGVDVSKEKLDFCFQVENMFVKEWTLSNATAAIKKSLKTLLKDSRCEVSDVLVCAEYTGQYTYPLCCACEELGLSLWLENPAQIKHSSGVQRGKNDRLDARRIADYACRFQDKARLFSLPEKNIASLKQLISERDLYIADKAKYQGQLKDQKQFMSPEDYKRKSKRLEELMNCLEKTIAIIEQQIQQLIDNDDTLSNQHRLLCSVDGIGDRTATKMLVATNVFKNFDNARKFSCHAGVAPFQYTSGSSVFSKNRVFQRADKSIKSLLHMAALVAATRMKDGELREYYLRKVAEGKNKMLVLNAIRAKLIARMFAVIKNNQPYEKNYQFCLQIS

SEQ ID NO: 119993 - protein, 452 aa, unidentified
MEQELISMEIVNPHAAGIDVGSRSHWVAVGQQEQDVREFGVFNEDLFTMGEWLKEKQVKTIAMESTGTYWQNLYAVLIAKGFHVILCNGKFTKNIQGKKTDVKDCQWIQKLHSLGLLISSFLPDEQTDQLRTYCRHRANLLHMTASTSKKMQKYLMLLNLRLDVVVNDICGLTGLSIVRAICHGETNPEVLASLRHGNCRTSKEEIAKALQSNGRKDFLFGLKQELETYDHLQRKIEQCDKEIAIKLNEIIENDENKNQHFIEPKSYKKINKNTPKDIDINLKSYQMFEGTDLLAIEGMSYSSVLSLMSEIGLKGIHKFPTAKHFTSWLRLAPNNKVSGGKILSSKVPKGSNRLKIALRNAANAIGNLKDSTPLRDFFQRINFRKGRISAISATARKLAVIIWNMVVKKVPYLNPEGYLFLDQKRKLGLVKRIKKQIAKFALTNEDLGIVTA

SEQ ID NO: 119994 - protein, 349 aa, unidentified
MLAEKVDYVIGVDTHRDQHTLAVVAAPAGAVVAQRSVRASAAGYSDALRFAGRHAAGARVWAIEGAGHYGAGLTRYLTSRGEAVIEVGRSARTERRLRGKNDPLDALRAARSALAAETPSLPRAGEYQEALRVLLLARRSAVDVRRRALVQLRSVIVTAPESVREELRQLPVGQLIRRCSRFRRSASRTPDELAIVLALRSLARRIEAATAEAAELEHEILTHVRKLVPKLLDEPGVGPIVAAQLIVTWSHRDRLRSEAAFARLAGVAPLPASSGLTIRHRLSRGGDRQLNRALHTVILHRRQHDPATRDYIARRVADGKSARDATRILKRYLARHLYRVMQNTTPLMT

SEQ ID NO: 119995 - protein, 354 aa, unidentified
MESTADTYVGLDVHRKIVVATALDGTGHELAQEKFGPEPSELTDFLSRLPGRKHVALEACSMWAPYYDTAASTGAEVTLTNPYKTRLIAEASLKSDKVDSEALARLLRVDSLPTSFAPSPEVRALRTLVQDRVFYRRYWTAVANHTYHFLIARGIPYEDRLLKFRRKREVLRKLHLPEIDRGLATLLALEERCKELEREIHSAWVESEDGQLLTTIPGIGELTAMALVAYLCPIERFPTSRHAASYVGLVPRSYQSADRQYHGKLKRDSNGFVRWLLVEASWTHRHRERKGDVARTARRITRHRGSGKGTVAGAHKLLRIVFAILKERRSYLPHAPEPTAPTQALRRLRTTASQ

SEQ ID NO: 119996 - protein, 322 aa, unidentified
MFLGIDVSKNTFDAALIGAGKKPAHKLFSNDADGHAALLIWLNEQGAETVHACLEATGTWAHDLALALQSAGHTVSVVNPARIYAFSKSRLKRTKTDKADALLIAQFCQMHNPPAWTPLSPQVQQLQGLVRRLEHLEEMCLMEENRLASGGICDEVKNSLEEHIAYLQQQIEKTRRQIKEHINQYPDLREQALLLESIPGIGAATAALLLAELGDVALFDNARQVAAFAGLVPRIRESGTSVRGRSRLSKVGSSRLRKSLYFPAITALRFNPLIKSFGLRLSAQGKSKMLIIGAAMRKLLHLAYGVLKSKRPFDPAFAAQNT

SEQ ID NO: 119997 - protein, 411 aa, unidentified
MDVLNMRCAGLDVHKKVVVAAVIALDAQGRLCRETRSFGTMTAELLTLSDWLSCYGVTHVAMESTGEYWKPIYNILESNFAVLLCNAQHVANVPGRKTDVNDAEWLAELLRHGLVKASFVPPQEQRELRELTRMRTTFVHERVNLVNRLQKVLESANIKLASVATDVMGVSGRAMLEALATNQGSSAQEMAELAQGRLRNKREALAQALEGRVRPHHRFLLTELLCQIDSLDETIAHCNAQIEAYRRPFEEAVLLLDTIPGVGPAVAEVIVAEIGVDMSRFPSAKHLAAWAGVAPGNNESAGKHRSGKTRHGDRSLKTTLIQAAHAASHTKGTYLAAQYRRLSARRGVRKAAVAVAHSILEIAYYLIQRHEPYRELGANYFDQLRPEAVTKRLVRRLEQLGYTVALQAQAA

SEQ ID NO: 119998 - protein, 397 aa, unidentified
MIAVGIDVSKSKSTVAILNGDGSIRAKPFDVHHVADELQALVDYIKRTSEPPTILMEPTSHYHYPLLKAFTEAELPVCLINPYQMKKYVDTELRKAKTDKRDSLRIAQYALEKSYSLIPYTPQDQKYEDLRFLSRQYSQRISTLTVAKVQLLSLLDETMPGITTILPLKSRDPDNCVLLRFIKRFKSFDVIRKMGKTRFLDSYQVLVKKTKDRFAGSKGLAIYELVLNSVTTRGENPLSAMTQDQCVDLVSTSQKAADEINLQMRIIAETMPEYKVLRSMAGVGDRLGPIILGEIGDIRRFHSGKALNAYAGNDAPPYQSGQFESRNRHISKRGNPALRKACFEVMQALKLTKPQDDPVYLFLLKKEQEGKPYNVAKMAAVNKFLRIYYARAMELYK

SEQ ID NO: 119999 - protein, 356 aa, unidentified
MRIIGCDLHTRQQTIAMLDEQTGELVEKQLNHEGEGVRQFYSALPRPVLVGIEATGSMFWFLRLLEELAIDFRVGHPAKIRAAEPRKQKNDRRDARLLLRLLVENRFPAIWMPSPILRDLQVLLRHRHRLVRIRTRVQHGLQALALSHGLRRGSSLWTPGGQHQLRTLPLAQHAAAQRETLLTLYPQLQHSIDCLDRQIETQVNERPQASRLMTHPGVGPITALATEVFLGDPQRFANGKAVASYIGMIPEEKSSGGRQRFGKLSKQGNTLLRFLWGQAAMQAVRRDPELLRFYRRKLVQKGLGKAMVAAARKLGIRLWIMLRDEIDYTEFCRRGNLLRQCGTAYAGMPEGDSGPR

SEQ ID NO: 120000 - protein, 318 aa, unidentified
MSSAAPTFVGIDVAKAELVITIHPSGEHWTIANDVTGIHTLVQRVRGHAPTLIVLEATGGYERAAVAALAAAQLPVVVANPRQVRDFARATGQLAKTDRIDADILALFAERVRPAPRALPDDAAQALDALLTRRRQVLEMLIAERNRLEHAVPTVRRGITQHIRWLERQLADVDRDLDDTIQASPVWRAKENLLRSTPGVGPVLSRTLIGELPELGTLPRKQIAALVGVAPLARDRGTLKHKRLVWGGRAPVRAALFMAALVGTRCNPVLRAFYRRLLEAGKPKNVALTACMRKLLTILNAMMRTNTAWRHIDLSPTT

SEQ ID NO: 120001 - protein, 339 aa, unidentified
MDTIRFLAIDLAKNVFQVHGVDAAGKLVLRRRVGRAQLTELVLRLAPCTIGMEACSSAHHWARQFLQQGHTVKLISPQFVKPFVKGNKTDGNDAEAICEALQRPSMRFVPIKSVEQQDVQSLHRARSRLVSNRTGLVSQMRGILAERGIVFAQSITRARREIPVIVADTSNALTPLAREMLADLMDQLRELDRRIAGFDRRIDLVFKASETCQRIAQIEGGGPKTATAIVAAVSDPKDFRNGRHFAAWLGLVPRQSSSGDRTHLLGISKRGDRHLRTLLIHGARAVLRTAPTKHDKKHAWALALKARRGANRAIVAIANKMARVIWSMLATGQSYQKAG

SEQ ID NO: 120002 - protein, 382 aa, unidentified
MDGAPNGIKRAKMVVVESAIEGRPSVGKSIIDTSSVTRVGLDLAKRVFRIHAVDATGSVVIARSVNRRTLLKFFDALPRCVVAMEACSSAHHWGRQLQALGFAVRLIPPAHVKPYVRRNKNDAADAAAICEAAGRPAQRFVSVRSVENQAELMRHRARELMVGQRTAALNALRGHLSEIGVVAAQGVPNAYALKELVDGGFDENGEIVVPDCVRLALAPLVRQIDALDEAIEAIDRTLEASARTDATARRLMTIPGIGPVTAMALLATIQDFAAFSSGREFAAFLGLTPREHSSGGKPRLGRITKMGDRYLRKLLVVGACSALAARKGHNDALRRWASDLIERKTVKYKFKLTAVALANKLARIVYALATKGGHYDDRPVAA

SEQ ID NO: 120003 - protein, 305 aa, unidentified
MKKELYIGLDVHREAVAIAVAEQGGKGEVRDYGQISNDLHALEKFITRLRQTHGKRVTLRACYEAGPCGFGVARRLQQLGVECAVVAPSLTPTRAGDRLKTDKRDARKLARLLRAGELSAIYIPEPTDEAIRDLCRARSDAVDDRRRSRHRLKAFLLRHAYRYQGKSAWSAAHERYLRELVLPHPAMKVILEEYLMAVQLASERIARCEAAMSDLLQSWRLEPAVRALMAMKGFQTVAAMIVVSEMGVIARFNHPRQLMAYLGLVPSERSSSDKRRQGAITKCGNAHARWLLVECAQHYATAQSE

SEQ ID NO: 120004 - protein, 424 aa, unidentified
MKRTQNEKILQIKFETLIVGIDVGKETHYARAFDFRGLELAKLFRFSNTRQGYEALENWTQEIMREHGKTEAIVGFEPTGHYWFTLGDHLQRQGHRLGIVNPFHVKCTKELDDNSPTKNDRKDPKTIAMLVKDGRFREVYIPEDLFQELREAVNERERLLEQLIILSNQVLRWLDIRFPEFSGVFKDWSRDAAWLTLRHHSTPKKVVTAGVAGLMRTWRQEMKRPSLKKAERLVKAASESIGRTAGSEAAEAALQNILTQYELIDRQKQETEMLMQELLLRVPNASKLLGIKGIGMVTAAVIVSEIGDIHRFHDPRQIQKMAGLSLRENSSGKHKGKTTISKRGRKRLREGLFRAIITMLATNQEFRAIHRRNLTRENNPLTKMESVIALCGKLIRVIFAILTKGNDYDAKKMMDDMNRSMKAA

SEQ ID NO: 120005 - protein, 348 aa, unidentified
MSQNPPVSTPCVNAKPIYKLFCGIDIAAKTFTAATCKLDDEEEPSKATNYKQTSQDFEALQNHLLQNQLPPSQILIVMEATGNYWVELASFLHNSNFVVSVINPSRMHGFAKSLLLRSKNDELDAQTLARLARAHKPACWTPPPAIYHELLQRLNQRADLLEIRQQLKNQLHALTVGTGTAVPAVATRFESLIETLSQQLKELDDEIKTSIKKEEKWAKSAALLESVTGIGWLTACWLVTLTLNFTTCSKAESLVHYAGLAPVVRKSGSSVRGRPMIGYGGNGTLRAIVYMAVMSAIRFNPAIKAQYERLFNQKGKPHKVARCACARKLLHLAFAVVTKQKPFDPEYA

SEQ ID NO: 120006 - protein, 412 aa, unidentified
MNAVGIDVSKGKSMVAVLQPLGVVVAKPFEVSHTAAGLGKLSDFLSSLDGETRVIMEHTGRYYEPVAQVIHNRGLFVSAVNPLLIKEYGGNSLRRVTTDKADAKKIARYGLDNWAELRQYTPMDTIRYDLKTLNRQFQLASKYKTACSNNLIALLDQSFPGVRGWFDSPVRKDGSQKWIDFAMTFWHVDCVRSASRTAFTERYRKWCKRNGYLFSAVKAEEIHSESKDMIALVLKSDMTKLLVQEAVSLLLSVSRTTETLRAEMNRLAAQLPEYPVVMGMYGVGESLGPQLMAEIGDIRRFVGKQSLVAFAGVDPMPNQSGMKNSRSNKTSKRGSPYLRKTLFVLMSTLLQLAPADEPVFQFLDRKRAEGKPYYVYMTAGANKFLRIYFGKVRDHLAALDAPTQDTTSANPQ

SEQ ID NO: 120007 - protein, 360 aa, unidentified
MEFQRTSVGLDVHARSVMACGLDRETGELVERRLCPDHREILEWVKAQPAPVAVTYEAGPTGFGLARAMEAAGVSCVVAAPSKLIRAPGDRVKTDARDARHLARLLHLGQIVEVTVPTVTQEAARDLIRAREDCRGDLMAVRHRLSKLLLRQGIVYYGGKAWTREHERWLNGQHFDQLGLQTAYREAFDAMLVTRDRRDRLDAAIIAMAADSEFTPVVHRLGCLRGIATLTAFGLAVEIGDWQRFTGRSIGAYLGLVPTEYSSGSTRSQGGLTKTGNGHARRLLIEAAWHHRKLYRPVQALRQRWDAATPAARARGQAANRRLHQRWQRFDQRSKRPVVANAAIARELAGWCWSLATLND

SEQ ID NO: 120008 - protein, 426 aa, unidentified
MNTRNSDTSPTPEFAAYVGLDWGDKNHALAWTADSSKTAPQTGTLVNSPEVLHAWLQELGQRLEGRPVALAVETSRGPLIHLFGAYPWLTVYPIHPMTSARYRTAFKPSGAKDDLPDALLLLELVRDLRHKLRPLQMPEAATRQLAALVELRRDLVDRRTQVLLQLMALLKSYFPQALELVGQDLTTGLALAFLRRWPDPLALKAARPASLKSFYYQHSVRSEALVTQRLALVQQLRPLTTDDAVLMPAHLHLAALLEELRTLAKHIDLVEQKSHTLFKAHSEAYLFRELPGAGKALQPRLLVAFGEDRSLYPDPGSLQKYGGLAPVVERSGRQAWVHWRWHAPRFLRQTFIEWAGQTVVYSAWAKEYYQHMKAKGKSHHVILRALAFKWVRILWKCWQTRTPYDEARYLKQLLARKSPHAIKLNP

SEQ ID NO: 120009 - protein, 316 aa, unidentified
MKNYIGIDISKSTIDVYDGKKSYKFKNNEEGFKKVVSLSENIKETIFIYEPTGVYSYPLTEFCDKKNIGCVIVSPKVSRDFARSLKVRSKTDKIDAKVLYKYQSHVELNMIKVPKVNHHAIKIQEMLNVYEGFRESKQKLKNQLESISSSHKDLRRTVNGMIKILEKKIENLFTKIEGLIFKDESMKKKYNALLTIPGIGNKSALYLISFFIKYPLANAKELTALIGLDPVMRDSGTYRGKQRISKHGGQQIRNLLFLPTLSSLKCNDRINLFYTRLTSKAKSKKLAVIAAMRKLVLMAFSIFKSEQNYEPLVIQC

SEQ ID NO: 120010 - protein, 377 aa, unidentified
MNYSTSYSTVYIGIDAHKESFSLCSYTNEKEQAEYPQRVDAHYSKVINYIEAMRFHYGEDALFVCGYEAGCLGYTLYHELEAHNVKCVILAPSTMPVPKGKKRIKTDKRDAALIARCLAHNDYSAVHVPTEKDEQTKEYIRMRDDHKLQLKKVKQQILSFCLRHGCIYDGTKNHWTQTHINWLRKLNLDSMLQEIMDEYLLTYDYLTGRLGLIEKRIEELANDKDYAENVHKAECFIGIKSQTALAVIAETGDFNRFPDAQHYASFLGLVPGEDSSGDDKNRLGITKAGNRHIRTLLIEAAQSYGRGKVGYKSAALKARQAGNSSAVIAYADKANERMRRKYYHMVLKQGKKTNVAKTAIARELACFLWGMMTGHIV

SEQ ID NO: 120011 - protein, 390 aa, unidentified
MFAGIDVAAERHVLARLDEAGEPIGRPIALAEDASGYRTLLEALGPPPALVVIEATGHYWKNLYATLAASGHDVVLLNPIVARRFQEAQLERTKTDAIDAAALARLGFEKRPAPTHLHDATSEALRELVRHRDRLRQDFDDRVRQLHRLIDLGFPEFTRHVKGLDTMLATALIAECPTAEAFARADPRRLARLRYDGRHKVGLDRAEQLVAAARRSVGQHRGPVYEMQARHICQDLDLWRRRLTEIEGEIEGLLDAHEVGRLLTSIDGIGPHSAARIIATVGDPARFRSAGAFAAYVGVVPGLRQSGKRTAARAATAFGNARLRRALWMTVLAAVRINPWLKAFYDRLRDAGKPPKLALIAAMRKLLHAVYSVARNRKPFVVSTEQAPAA

SEQ ID NO: 120012 - protein, 414 aa, unidentified
MGLKIVYPVCCGIDVHKTFVVACIASTNKGVTTYKRHRFSTYNKGLKELSQWLCENNCKDVCMESTGKYWIPVFNVLEDSCNITLAHPKYVKAIRGKKTDKKDAKWIADLFKHDLVAGSFMPPLAIRQLRDLMRYRFKLTNFTSSEKNRFQNSLTVSNIQLGNTVSDTFGKSSMNIIEKLLEDPTDTDFDIEPLIHGSMKDKIPELELAIDGVISPEQAGKIAVIKQHYDDLQARKADLEQLILSLAEPYTEEINLILTVPPFKNIFSAIAVVSEIGVNMDVFPTAKHLCSWAGLTPTNNESAGKKKSVRVSRAGVYIKPLLVQCATAVVKSDKHPEVRNRYLRLKKRRGHKRAIIAIARMLLTAIYHILKKKEPYNPDLYQKADVLPVNREITIEQAISLAKSQGFRIMETVT

SEQ ID NO: 120013 - protein, 418 aa, unidentified
MHKRRVSFDRSYGAGDEVVVSTIDIAKHRMEFPMAHVEDLSRCLVAFEQNSTLVAVVEMSQSSWLVAGLLPGVARHPLKKLDPDPEALLRLMERWREEAVKAGRAIARMVLAYEAGRDGFWLARWLRSRGIEAYVIHPTSVAVSREHKRAKTDRLDAAMLLRALLGWLRGEPKHCSMAAIPTLEEEDAKRPNRERKSLTGEQTRLINRMKGALARLGIRGFKPQLRRSAKLLAGLRMPEGTAIPPNTLAELQRDLARLAVVREQIKAIKNAREERLKQSPDSGSHPMMRLLRRVVGVGEDTSDMLVHEILYRKLRDERAVARYAGLTGSPSESGAKRREKGLAKTGNARVRTEMIQLAWRFLTHQKNSALVKWYQARLAEGARRKTMIVALARKLLVALWRLATTGEIPQGFVMRPAG

SEQ ID NO: 120014 - protein, 345 aa, unidentified
MKIVGCDLHTRYQQIAMLDDETGELIECRLEHANGEAKEFYTQLTGPVRVGIEATGHTRWFERLLASLGHELWVGDAARIRASEVRKQKTDARDAALLLELLLSGRFPKLWRPSSEERDLRQLLWHRQKLVWMRNAIGNQLHALAMGEGLCRKQKLFTKKGRAELQALNLDPWASRRRQELLRLLDQTDASLKQFDEAVNEQAAQRAEAKLLMTHPGVGPVTSLAFVLMVGPVARFQRSKQLVSYLGLNPRENSSGGKQKLGSISKQGNPMLRGLLVEAGHTAARLDAELRQDYQRLRLRRGGSVAKVAIARKLAVQMYWMLRRQVNYTQLVRMQGSSRATLVQQ

SEQ ID NO: 120015 - protein, 323 aa, unidentified
MSELWVGIDVSKKYLDVCLRPTQQASRYPNKPEGLDTLVAYLQPLSPQLIVMEATGGLEVPLAAALAVAGLAVVVVNPTNVRNFARATGTLAKTDTIDAAILAHFADAIRPPIRPLPDQQAKHFNDLVTRRRQIVEMLVAENNRLPHLSGLAHSDLEEHITWLKSRLKNLEQHLQQAIEQSPIWQARNDLLISVPGIGQVVSTTLIAELPELGELTHKQLSALVGVAPFNRDSGRMQGQRRIFGGRASLRAVLHMAVVVGLRHNPVIQKFYKRLRAAGKPAKVALTACVHKLLIILNAMVKSGQRWNPKTVEDSTAEQSTAVA

SEQ ID NO: 120016 - protein, 339 aa, unidentified
MWMIVVGLDVHKHSLTAVAVDGLGRSVGEMRGPVDEQVIDWGRSLDEECLWAVEDCRHVTRGIEQALVARDERLVRVPPRLTAPQRRRGRTRGKSDSIDALAIARAALQEPSLDGPRPGEQILHDLKLLVDHRDDLVAERRRAQQRLRWHLHELDPSLAVPLGALDRTVWLDRLSRQLARREQTTQVRISRELLGRCKSLTRSVLTLDRELEQRAQTLAPGLLEIAGCGPLSAAKLLCEIGPIDRFRTDAQLARHAGVAPLDASSGKHQRHRLDRGGNRQLNCALHRIAVTQGRWHPPARSYLERKQNEGKTRREALRCLKRQLARTVYTTLKNEPPLT

SEQ ID NO: 120017 - protein, 341 aa, unidentified
MGQASTIGLDIAKRVFQAHGADERGRVVFRKRITRTALLRFFAAQPPCTVAMEACAGAHYWARELGKLGHKVRLIPPAYVKPYVKRQKNDMADAEAICEAAQRPSMRFVPVKSEAQQANGVVFRARDLLVRQRTQCINALRGHLSEYGYVFPQGITQADTLISCVEDPDTSLPENARAVLTVLVGTYTALEAQVRALDAEIAKRAKADPVARRLMTVPGIGPIAAAAITALVPAPEGFRTGRDFAAWLGLTPLQKSSGGKQKLGAVSKRGERTIRRLLILGASAVVRWASQRGGPEGSWLARMLARKPKMLVTVALANKTARIAWALLVKGGVYRAPVAAA

SEQ ID NO: 120018 - protein, 231 aa, unidentified
MGNESPVKVFAGIDVSKQRLDVCVVPSGKTLGVGNDQAGIVEVIDLLRALGVALVVIEATGRYERRVTSELLNAGIRVAVVNPRQARDFARATGKLAKTDAIDAKVLAQFAALGPVTASALVAELPELGRLNRQQIAALAGVAPMNCDSGQMRGKRAIRGGRASVRTALYMGAFCAAKYNPVIKAFFGRLIAERKPFKVAITAAMRKLLTILNAMVKNNQQWKENLCLKNA

SEQ ID NO: 120019 - protein, 416 aa, unidentified
MKQWPDITHYAGFDWAKDHHAVVIVNSEGRIVADFEFEHSLEGWKSFVEKTSAWPNLGVAIETSQGAAVDQLLQREYTVYPVHPVAAQSYRERKAPTGTKTDHIDGWGLGDALRVDGHGWRPLQPMDPITQQLRLLCRDEVVLIEQRTALVNQLQQALAEYYPAALEAFDDWTDAFTWEFILAFPTPQALVEAGKRRWEKFLHTHKLWRPGTAEKRLKLFAQADQFKGSEPIARAKSQLAVSLAKLLCTLGQQLKLYRKQIEALFRDHPDHDLFGSLPGAKKVLAPRLLAAVGGDPDRYGSHEVLQCIAGTAPVSFQSGKLNKVRVRWACDKFMRYTMHLWADCFRKASAWGQTYYEQKRQEGMTHACALRCLGQRLLKILFRMIATKTPYNAELHARNQQKHGSWVLKLAKKPAA

SEQ ID NO: 120020 - protein, 411 aa, unidentified
MSYKIAGIDVHKKVLMVVVIDATTPEEKPERRRFATLPSDLQRFLIWLREQGVEEAVMESTAQYWRSVWLELEPHMRLHLAQAFSNRAPRGRKHDFKDAERLVRRLIANELILSFVPGGEQRTWRNMTRMKLQLTRDRVRLQNQMECLLEEMRIKLSIVVSNLLGASGIRMLRALAKGETDPKQLAQLGDERLQCTEEQLVDALTGRAQPLHREMLALQLERLQLIDTQIAKLNGMIAQAMKPHQEAVMRLAEVPGLGVDSAQQIIAEVGEQASTFPSAAELTSWVGTCPGKDESAEQNHSSRSAKGNKYLRRVLNQAAHAAVKRKGSYFQVVFRRLLPRLGYQSAIWAVAHRLCRVVWKILHEGVRFIEHGIEPDPKAKMRHARRLAQALRKLGYQVTITPTNLASRMQI

SEQ ID NO: 120021 - protein, 356 aa, unidentified
MDKVIREEAVRVGVDLAKRVIQVHAVDATGHVLTSRALPRARFIEWCVRLPVGCVVAMEASSSAHHWARKLVALGLDARIISAQLVEPYRMEGVRGKNDANDAAAICEAASRPKMRFIPVKSIEQQSMLCVHRLREGLKEDRTACINRIRGLLAEFGLVFPQSPRELQAALSDVLEDAGNELGTLARLTLQRAQAQWRELDDHLAWCDERIDAHRRSNPEVQHAATLIGIGPVTASAAIATVGDFKQFKNGAQFGAWIGLTPRQRSSGGKNNLGRITKRGDTYLRTLLIQGAKSAVMTAHRRQDKISSWVLALRERSGWQKAVVALANKNARILWAVMTRGDVFDPNYLSVKPTPC

SEQ ID NO: 120022 - protein, 342 aa, unidentified
MLRYQNLGIDLAAKSFRVCLKVKNEDLSVKIKGQRKFDNTTSGFEALNGWLKKKADAGSALTVTMEATGVYYERLAYFLHGAGYKVHVLLPNRIKGYMKFLNLKSKTDKLEAKALAELGLGIKLPEWKPASPQMYTLKRLSRERNTLKEEKTALSNRLHAEKACQKPEKLAIKRLRQRITLIDKQVDQVEKQMHQLTAKDQELQSRIENICKIKGVAFITVLAVIAETNGFELVEHKSQLVSYAGYDIVERESGSSVKGKTRISKKGNRHIRHALHFPAISVVKYHEEFRSLYERVFDRTKVKMKGYVAVQRKLLVLIYTLYKKNMPYDPAYYKTLAVGQEG

SEQ ID NO: 120023 - protein, 414 aa, unidentified
MEENMDAIVECCAGLDVHQATAVVCLTTGAPGTRAAKEIRTYGTTARELREMRDWMKAAGCTLVAMESTGVYWKPIHAELEGHFEIIVGNAHHIKNVPGRKTDVKDCDWIADLARHGLIASSFVPPRAIRDLRDLTRYRRKLVQTRAAERNRLIKLLESASIKLSGVISDVFGVSGRAMLRALIEGELSPAEMARLAQKRMKRKQPEIARALDGHVGAHHRFILRLQLNRITVADADLEQLDERLREKLAPYDEEVGLLMLIPGVDWVTAAEIIAEIGVDMSVFLNAAHLAAWAGVCPGSHESAGRQKGAKVRKGNVWLKTALVTAAIAAAKKKGSYFAEKYRRLAARRGKMRAAVAIAHKILVAAYHMLAKRCGFRDLGAGYLDELHHQRTANNLTARLRAMGYEVQITAKPA

SEQ ID NO: 120024 - protein, 397 aa, unidentified
MYIVGIDIAKRKHEAAVIDGEGAVIIKPFSFTNNCSGYNRLLAMLTKAKLPLDEVSFAMEATGHYWLALFTRLQKEGFRVQVINPVQTNSIRNFYIRQAKTDPRDALLIAEVIRFGHFSESTLHPENIYELRELCRGRHAIVSMQADVKRKVVALLDQVFPEYETAFTNMFGDTSMAILQTCPTPKELSEMPLEELCHLIEVSSHKRFRMAKAQELQELARSSFGFAMAGDVFSTMIRLYAKHLDFLKQQVREMDRKIAEIMDSLDTPITTITGIGPTLGAYILSEIGDISRFSSAAKLAAYAGIDPTMRQSGEYNGVRNRMSKRGSPYLRHAIWLAASSAVLHDPALKLYFQKKRDEGKPYMASVGHACRKMVSIIYAVMRDNKTYTPHIPNEISA

SEQ ID NO: 120025 - protein, 347 aa, unidentified
MSHKTAATVAHTIGIDTGKNTLHLIGLDDKGAIVLREKIARGRITARLANLPGCLIGIEAGMATHYVARELSALGHNVKQVPPAYAKPFRQGHKNDFRDAHAIAEAVQRPSTRCVPVKTDDQLDLQALHRVRSRLVGQRTAVINQIRGFLLEHGIAVRQGLRFLRQQLPDIMAKRSDVLSPRMIRIIGDLSADWRRLDERIEHVTEEIEVLAHGSEGCRQLMTVPGIGPLIASAMVAAIGNGAAFAKGRDFAAWLGLVPKQMSTGDRTILGRISKRGNRYLRTMIIQGARVILLRPANWAKHSFGPWLTAAANRLHHNVLATALANKLARIAWTVLMQARSYEARVN

SEQ ID NO: 120026 - protein, 402 aa, unidentified
MKAPKRYLRFCGIDVAKEKHVACLVDPQGQVLVRPRSFTNDTAGYQQWLECLRQTGRADSILIGMEATGHYWYSLHEFLTRHGYTVIVLNPIQTAAQAKQAIRKCKTDKHDAVHIATLLRTCQYKAVLVPGELAMTCRQLTRLRYRLLRQNAAIKQLIHSRLHPAWPEYEGLFSDPFGATSRQLLQAAPTPQQLLAMAPETLNELVRKASHGKFGPAQVQKLRDAAAQSIGIQRAQSGTSTCIQILLEHLDAMRPLREKLETSIENLAGQLPGYLLTLPGATALTIVSLYGEVDPIEAFAHPSQLVAFAGLDPKVFQTGQYDAPVRHLSKRGSPYLRYTIWHMAHRAVCREGSLRDYWRKKRRENKHHLVAVTATANKLCRIIWRIMTDRRDYVPNPTTPNS

SEQ ID NO: 120027 - protein, 426 aa, unidentified
MEVPHAGDATGEEVMEVMYPRCAGLDVHKETVVACVRIVEGGDVSRSVRTFATTTASLIELGEWLEVNGCTHVAMEATGVYWKPVWQVLVDSSLELVLANAAQVKNVPGRKSDVNDATWVSELLAHGLVRASFVPEPAIQQLRGLLRTRKQLVREKASHVQRLQKTLEEANIKIESVLSDVMGRSGRAMIQALIDGESDPAKLAALAHWKVRASAATLREALHGRIKRHHRFLLRLHLQQVDALDAAIAEIDREADAGLACFRDAVKQLSTIPGVSELSAQVILSEIGTDMGRFATAAHLRSWAGLCPRNDESAGKRRSTRLRRGAPWLKAMLVQCAWAAARTKATYLHAQFVRLRARRGPKKAICAVAASILTAAYHMLKDGTFYEDLGAVHFDRRRPETQARRLVKRLAELGFSVELKPAAAVS

SEQ ID NO: 120028 - protein, 403 aa, unidentified
MNMNAVGIDVSKGKSMIAILRPYGEIVSSPFEIKHTSSNIQSLIEQIRSIEGESRIVMEHTGRYYEPLARELSLAGLFVTAVNPKLIKDFGAHSLRKVKSDKADAVKIARYTLDSWTELKQYSLMDELRNQLKTMNRQFGFYMKHKTAMKNNLIGILDQTYPGVNTYFDSPAREDGSQKWVDFATTYWHVDCVRKLSLNAFVDHYQKWCKRRKYNFSKDKAEEIYGAAKELVPILPKDDLTKLIVKQSIEQLNTASKTVEELRTLMNDTAAKLPEYPVVMGMKGVGPSLGPQLMAEIGDVTRFTHKGAITAFAGVDPGVNESGTYEQKSVPTSKRGSSSLRKTLFQVMDCLIKTKPQDDPVYAFIDKKRAQGKPYYVYMTAGANKFLRIYYGRVKEYLMSLPE

SEQ ID NO: 120029 - protein, 347 aa, unidentified
MRFYTENRKYYCGIDLHTKTMYVCILDETGKILAHKNIPAKPAPFLKLIEDYRDGLVVGVECIFSWYWLADLCEAEGIEFLLGHALYMKAIHGGKTKNDKIDSEKIARLMRGGTFPMAFVFPAELRPYRDLLRRRNVLVRMRSEVLAHIKLTNYQYNLPAFEKHIGKKGNREDLAERFKDATVRKNVEVDLFVADHMHEQINALEAYLVRHVKSFDPRTYFRLQSVPGIGKVLALIILYEVGDLSRFPTVQSFCSYSRLVKCPRESAGKTYGYGGGKIGNAHLKWAFSEATALLMRESDRAKAFVAKHEKKHGKGKAMSILAHKLGRAIYFMWRRNDAFDEKYFFQC

SEQ ID NO: 120030 - protein, 400 aa, unidentified
MHLWAGIDAGKAHHHCVVIDADGNRLLSQRIPNDEPALLALLGSVLELAAGDEVVWATDLNHGGPALLIALLVGHGQNILYIPGRTVYHASKLYRGDGKTDAKDAAVIADQARMRRDLQPLRAGDEISTGLRILTARRADKSADRVRAINRLQAQLLEYFPALERAFDYSRSKAALLLLSKHRTPDGIRRAGETRIHAWLKKHGARSSAAIAAAAVEAAKSQHTIVPAQHMGEGIVAALAREILTLYEELAELDALISEKVSEHQHTQVLLSMPGFGPVLAAEFLGATGGDLTVFRTADRFAGVVGLAPAPRDSGRVSGNNHRPRRYDRRLLRVFYLSGLSALKSCPASRGYYDRKRLEGKSHIQAMLSLARRRLNVLWAMLRDGTTYIPVSSGVAPMAA

SEQ ID NO: 120031 - protein, 339 aa, unidentified
MELYAGLDLHSRNTYIGILDQNLKRVFKKRVVNNLEIILQTLSPFRNQLKGLVVESTFNWYWLVDGLMASGYEQFHLANPSAIKQYEGLKHSDDQHDAFFLAQLLILGILPEGYIYPKKTRPLRDLARKRLFLVRNKTAHILSLQSLIQRCCALKVTSNEMRNLSAEDLQQWLEEKHLVLSAQANLYSIQFLSQQILCLEKAIKQEVKLNKSFQNLISIPGIGNILAMTIMLEVGDIGRFAKVGNFTSYCRCAPSRRLSDGKSKGTGNRKNGNRYLCWAFIEAAHSTRRYNQRFRNYYNRKVAQTNTSVATKALGNKLARICYYIMRDQVPFREELLSH

SEQ ID NO: 120032 - protein, 340 aa, unidentified
MMNFSNQLLNRKNKVMKKIILGIDISKKTLDICVKEGLEVKHQTIENKTQVIKSFLKKYSSENVILAMENTGRYNWNLYEVLENFNFKVYVISPLHLKKSIGLTRGKNDIIDALRICDFIEKNHEQIPLWKACPASIKKIKILLTERALRIKMKKQLMVQQYDYKLMKNLEIDKQLVSLNKKMISSIANQIKNIENHIEQIICNDEKLNVQHKLIKSVPGVGKVLSWTLLSKTEGFTTITDPRKMACYSGVAPFDFQSGTSVRRKPKVSMLADKGVKTILQMAAMSAIRLDNDLRKYYIRKVAEGKNKMSVLNAIRNKIIHRVFAVIKNQTPYQKDLVLS

SEQ ID NO: 120033 - protein, 413 aa, unidentified
MSVTDGATSPRPTTAGIDWAKDDHAMCVLDADGQALDRISVAHTQAGLAQLVTLCQRYQVSGVGIERPDGPVVQALLEAGITVYVIAPAQIKALRQRYGSAGNKDDRFDAYVLADTVRTDRRRLTPLRPDTDATTGLRCLCRARKDLIAHRVAVANQLRAHLGTALPAAVDLFSDIDSAISRAFLTRFTTQDTLDWLSIKRLTTWLHAHSYRGRTDPAVLYHRISTAPRGATGELGDALATITRAYLSTLATLAEQIRALTKQITTALDTHPDKDIFTALPRAGTVRAARLLAEIGDARGRFPTPTALACLAGVAPSTRRSGTAHVVAFRWAVNKQLRDAICDFAADTRHANPWASDLYRKARARGHDHPHSVRILARAWTQIIYKLWTTHTTYDPTQHHALQRLQHLQPTTT

SEQ ID NO: 120034 - protein, 323 aa, unidentified
MSKTVVGIDVSKETLDVVLLVKEQRRERSFRNDRGGFGQLVSWLGQQQAREGHVCLEATGRYSLPVTKYLYEEGVKVSMVNPARIKAYRDSQLKRNKTDRLDAYVIADFCRTQNPPTWQPPSPEVEELQALSRYLEDMDGQLQQERNRLSSGIESEYVIHSITDHMAYLSEQRKAVMTAMDEHIAQHEELKQQSELLCSIPGIGKLTAARLLAEIVDVRRFDNAAQLAAYAGVTPRQFYSGTSVHKKSRMSKMGNVHLRKALFMPAISAKKNNPVIREFCQRLEHNGKLKIVAVGAAMRKLLHLVFGVLKHKTRFDPHYAKSS

SEQ ID NO: 120035 - protein, 447 aa, unidentified
MNNNGFLGLDISKGYADLYVINSDKIPVEAAFRLYDVQDGHQRIEELIDKWFEKQSFETLYCGVESTGGYENNWINLLQELAIKRPLKIARLNAKGVKSLSDAALKRTITDSVSAENIAMYLFDFRHKIKWIDDPQSFKKYTDGRRHNTFIRMLKKQRIQLSNQLEKLLYQELSPILTYCRHGAPGWLLNLLLKHSSVAAINKAGVKGLLKIKGITTEKAEAILNKTRESKHCTSAHISSVIKGTIKQMLHLDETIKEEKNKLIAEYSDSEEVKLLTSISGLGNQSAVEILIEIENIHRFEDAKKLSAYFGLHPVFKQSGDGKWGNHMSKKGRSEIRAVLFMSSLTAIRYSDLFKNIYSNARAKGKNHFNAMGVVMHKLLRVIYGVLKNKIAKNVENAELKQQAEKEKSKEQKREQVQKLERYNRAELDHSPISKRHAKKRKVLQVT

SEQ ID NO: 120036 - protein, 319 aa, unidentified
MQDILETCCGLDVHKDTVVACLLKGNIGEEPTKTIRTFSTLLAGLDELKAWLEAENCRHVAMESTGVYWQPVYNVLEEAFDGSMVLIVANARHMKNVPGKKTDMKDAEWIANLLRAGLLEGSFIPSKPIRELRNLTRYRKSIIEEIASQKNRIEKHLQSCGFKLSTFLTDIFGVSGRAIMDHLCRYGKITAREVETLVKGRAKCKLPEIKQAVNGKMDVHQREFLKLLLGWLDQHYEHLRQVEQKLEEKLNQYQRQLEQLDGIPGIDKTAAAAILAEIGLDMSRFKTAEHICSWAGLSPGNNESAGKKSPLVPPTATPI

SEQ ID NO: 120037 - protein, 415 aa, unidentified
MKKHNYRAKKVNDINWPQLRQQFTGQALVFAVDVAKEQQFALLSNTGMSESVLIQWNQLEQTAGLINELKQLNALITVVMESTSTYGDAMRYQFRQAGFTIHQASAKRVHDAKEIYDGVPSLHDAKAAWLIAHLYQDGLTKPWHELGDKERELNAYRREYELHESQHKRNQNRLEAFLSRHWPEVLPLLALDSVTLESLLIDYGSPEQIAACAEQAAKDMHRWGKHCLSTEKIDAVIHSAASTLGQPCIEAERRYLQALAEELRHNRTQAKNAKSALEAVVKAEPELKEMGLTVGMVTTAILIGLHLDPRHFGCARSYLKALGLNLKEKSSGQDHGKLKLTKRGSALARKYLYFAALRLINSDPVISAWYQNKVDPRAKLKTVIALMRKLAKALWHVARGQRFDARKLVMTTVVN

SEQ ID NO: 120038 - protein, 369 aa, unidentified
MKADKRGKVKGCKMNSIVAGIDLGDRESLATVLSPIGDVADRFSFPMNEEGYAYFASRVPKNARIAFESTIMAYPILRAFRTHGYSDITVAHPKTLAWIVKSKKKNDKADSLKIAKLHMAGMLPESHLLDRDQQIARDLLVQRVKLGVEIGRLKNSLIGYLKREGVYDSLPKTGDNFSVKRRHAILSLRFDDKRDLILGTMMGRLEFLEGQCIPLEDSVRENARVSDDVKLLMSITGVDYYLASLLSSFIGDVERFPSDDHLASFFGIIPTSRDSADVKRRGRMTKDGSSIVRWALSIMVDTVMLHNDPIREYYTGVKKRTGSGKLAHVATMRKLTRMLYHMLKTKQHWKWENPLLTERKMAKLEGGWR

SEQ ID NO: 120039 - protein, 470 aa, unidentified
MVAARKQKQKQKRMSAQVVEDEDYQLRYEIAAGIDVAKESAVVCVRMPPAAGRKHRTSHLQTVPATVPAITELAAELKAAGVQMVSMEATSDYWRIWFAVLEEAGLAVQLVSSSQARNLPGRPKTDKEDARWIARLTEMGMLRSSFVPPPEIRALRVYTRHIWDLTADRTRYWQRLEKLLEDALCKLTVVVSKLAGHQTARAIIEKMIAGERDPRVLAALGQGKMRNDKLPALAEALSGMRFGPQHAHAAASLLRAIDLLDAELRDLQERVTAHLAAIPASWGVDADGVTGPEAGRAADAAELPAADRLDEIPGLGREAAAALIAEIGLDMSRFPTPEALVSWAGLTPTARQSGPRKGRGKKGHGNTYAKRIIVLAAYAAANTDTFLGERFRRLAARPGGGGRKKAGCAVGRSILVIVWHLLNDPAARYRDLGSDWHARHTDRSRKARNARRQLEALGYDVIITLREDAA

SEQ ID NO: 120040 - protein, 464 aa, unidentified
MATLRIIGIDLAVTAAHRAIVLDSASNQFVSHVISFHANPAEIEGVLAIARKGAPANTRLIAVLEATGMAWFTVGTYLQRRGVEVYRVNGRQTADQRKVYHRHAKSDRIDARVLPRLYLNAAERITRLFLPEPRIMELQRLCREVTRLSQQISASKNRLLAIDNFAWLGIKDILAPYEAPARWFRRQWYNPWQVYQAGSEALKQAWLQSHADPEQDLSWVEALVAQAQQVMAFYGEPAPIDYPRLQAFLGREQARLEQVEAQKHLLQLKMLRPLYRQLYPQRYLESLPGVGQDSAAVFIAFVGDIRRFPSLNDFLGWSGMIPFSSQSGQGQTRGLHITQAGPDLLKRTAFLTANIARLYDPQIAVVYYDQMVNKGKHHLQAVCACATHLLTRVFVVLRENRPLELRDVDGSPISKPRARAICQQHYTVPEQVRRQNNHRVRTQRAEQRLEQRTQRRQLKQRSKG

SEQ ID NO: 120041 - protein, 461 aa, unidentified
MAESRPRRPRRPRRTSPSVLERINPDAAGIDCGATTHVVAVPPDRDDEPVQSFRTFTTDLQRLADWLVACRVTSVALESTGVFWIPIYEILEARGLAVHLVNARHVRNLPGRTSDVSDAEWLRDLHSVGLLRASFRPTAAIVTLRTYMRHRHTLVELAVMHVQRMQKALVQMNLQLPFVISDITGQTGLQIIRASVAGERDPAQLARFRHGRCRATPAEITAALTGHYRPELLFVLQQNLELYDACERQIEGCDRAIEAHVRELTATVAAPGPLPAARAARQRIEPAFDVRAMLHHLTGGVDLTQIDGIGTYTALKLVAEIGTDMGRWPSAQHFTSWLTLAPKNKVSGGKLLSSQTQPSANRAATAFRLAAASLGRTQTALGAFYRRLAARTGKPQAITATARKLAVLVYHALKGDFVYRDPGADGYDAQQRARQLRQLRQRATRLGFALVSHETGEVLGG

SEQ ID NO: 120042 - protein, 347 aa, unidentified
MNFYTRQHKHYCGIDLHAKAMYVCILDESGAKLVHKNLPTTPDAFLCLIAPYREDLVVGIECMFTWYWVADLCQKEGIAFVLGHALYMKAIHGGKAKNDKIDAHKIAVLLRGGMFPQAYVYPSQMRATRDLLRRRCHLVHKRAELIAHIQNTNSQYNLPEIGKKLAYKANREGVEEHFPDPSVRKTIAVDVSLIDHYDKLLGEVERYLARSAKAHDVQTFARLQSVPGIGQILALVLLYEIHDIRRFPRVQDFVSYCRLVKCAKESNGKRLGTSGKKIGNVHLRWAFAEAAVLFIRQSQPGKAYFAKLEHKHGKAKALTVLAHKLGRAVYYMLTREQAFDLQRFVTA

SEQ ID NO: 120043 - protein, 369 aa, unidentified
MAKRSMFVGMDVHKESIDLSIAEEGRDGEVRHYGVIPGDLEAVAKVVRALRAANRRLRFVYEAGPCGFGLHRYLTAQGEDCVVVNPSSMPKRSGDRIKTDRRDGDALARLHRAGELTAIYMPTPDDEALRDLVRAREDAVGLSTQAKHRLKAFLLRQGRRYPGRAGWTQPYRRWLADLSFPLAPQHIALQEYRDTIDETERRVERLTDQLRQLTPEWRWAPVVEALQALRGISFVTAVGLVAEVGDIRRFTHPRELMAYLGLVPSEYSSGPNVRRGGITKAGNPHARRLLAEAAWAYQGVPRIGRQLLYRQEALSKTVYDIAWKAQLRLTSRFRKLVARGKAKPKVATAIARELTGFIWAIAREVPPPA

SEQ ID NO: 120044 - protein, 410 aa, unidentified
MFFIGIDWAEKHLDYCIENNSGDVIKRGRVDNDDNGFNSMLFSIGKENIQLSQIAVAIESPHQHVVDFLLARGVDVYPVNPAAIHDYRKSRKPSGSKSDEGDAQLIASYLREHHKSLRVWHLPAPKLRQLKLLVDDRDKIVTEKVRLQNQLRSTLRDYFPQAVDAFCDITCPTSLDFLDQFPTFEETEAKTDEDWQIFLDEHRVHNPNARQRFLSALKSKPITVDEVVANAKSLLTKTIVSQLRAITAALKEYHKRIEELLKEFSDGTLFRSLPGVDIILAVKLLVAIGTDRERFSNANELQSFFGTAPYTKSSGQYRSVHFRLACNKTMRAALGQMALASLRSSTWAKNYFSKKRKDGKKAHHALRCLANLWLKVIFAIWKNRTEYDETKHLASIARHQLTQPIVGATA

SEQ ID NO: 120045 - protein, 352 aa, unidentified
MRAQVSKVDFSDRNFYCGIDIHKKNWAVTIETDDMPLKTFTQDANPELLVKYLNRNYPGGRYIAAYEAGYFGFTTQRRLSEQGVECLVVHASDIPTTHKEKDQKRDPVDSRKIARSLRAGQLKSIWIPPITITQDRQLIRTRKLLVKDRVRTKNRIKAFLQLHSIVYPERFIKLQTHWSKAFIKWLEEIQLEEPSGTEALQSLVRILKHTRDELVILAQRIKALSEHERYHQAYSRLIAIPGIGRLTAMTILTEVGDINRFKNVDAFRSYIGLIPTSNSSGEKEYNGRITNRKCVNLRSLLVESAWCAIRADPTYLYIFNQYKKRMETNKAIVRTTRKLTNHIYFTLREVNR

SEQ ID NO: 120046 - protein, 354 aa, unidentified
MRTKPLPETFAYGIDIGKKVFHVVAVNREGAVIQRAKFARETLQSFFDLAPKTLIGMEACPGSQWLARRLIEMGHDARIIPARFVKPYVKSNKSDTVDAAAIAEAVTRPTMRFVAVRTPEQVDLQALHRIRDRLVGQRTGLMNQARAFCIEYGLAMRVGAGGFHADIRQHLGNQDNDLTQNMRGPLNDRSDDLAYIENRVKALSAKIEAIAKEDETICRLLTIPGIGPLGATALVAAAGDGKQFRKARDMAAWLGLVPAEYSTGGKQTLLGIVARGNGYVRRLIIPRLAICGARSCFLHLNRESHALGRWLNALEARTHRNKAVVALANKLTRIVWAILTQPGTVYLRSKGAAA

SEQ ID NO: 120047 - protein, 343 aa, unidentified
MQAITTIGLDIAKSVFQVHGVDVQGQVVIRCQLKRRYVLAFFQKLAPCLVGIEACASSHHWSRELKALGHTVRLMPPAYVKPYVKRQKNDAADAEAICEAVTRVNMRFVATKTPEQQSCLMLHRTRHLFIRQQTSVINVIRAHLAELGIVAPVGRKGVEELLDVVADPSDKRVPEVARACLAALGAQLRRLKEQILEFDRIILAWHRSSETSRRLDAIPGVGPMLATALVASIADPKAFRSGRNFSAWIGLVPKQHSSGGKDRLGSISKQGDRYLRSLFMAGALAVIRYAKINGTKHRPWLTALLARRPVKVAAIALANKIARMVWAMMARGERYKEPVALAA

SEQ ID NO: 120048 - protein, 407 aa, unidentified
MKELYIGIDVHLRQHVVTVIPAVKFQENKTGWKKTRSIKIGNNRPDFEYLDSFIKSQVTKANQVCVGIDHTGGHYSEPIGYFLKSQGYEVYYLGPVSVKAIKERLLGEENKTDKIDSATLAYLLYLRDFYDVSLHISATSVNFESRASILRSLALQSQYYQKLGTQTTNRLRQYTHAVFPEGEEKYFTRLVKIFPYNPTIAEIINDPDVLKKVRMSTNAREEFLELAKKTVGIPGETYKFIIQDLALLLKTNKERIIAIDRTIKEAVLEHPYAQILMSFPGVKEKSAAIIISTVKDINNWPTKKQFRKGLGIYGTLRETGKKQVKFRRGLSGDRLCRLTLFLICFTIIRLKNKNDFKDFYERQIKKGKPRIKALVATMGKLAEIMYHCLKFNEPYQYQSLRKMKPKG

SEQ ID NO: 120049 - protein, 451 aa, unidentified
MPNSIVVPSPSTGCESQRPLVTRGLRREQEKRQRRRARVPRDTLVLGIDLARERQAASFSHDGHVLGRRRLQCGAHEIDGFFPEAEALAAKHGLSHLVVAFEPAGLYWCLAAEACERAGVDYVLVHGLSVKREREITRYTPEKTDPRDADLISFLPPQGKFLETRLSSSTERDTLAQLARDYFLIRKLSAAERTRLRNFWNRMLPEFFSVLRDPTSNTALAVAAALPSTSETAGLSSRSWGAHVRRAAQGDRIQLSRASSLLPLLKQADADPVRRSGEGMRPRIRHAAQRRRLLEAQKLELRLEILTRYQSFEEHVFIDSIPGSDPFYNALVLGIVGDFELFDDPRALVKLAGSEVNHYASGDWDGTSRISHRGRSRLRAAAYQQARFLVARNDDYRARFYHLLHRTHRPNLRDLPAYVAVMNSYLRTAHALVTRRQLYLPRAQRPTMENR

SEQ ID NO: 120050 - protein, 345 aa, unidentified
MSEDYDGPQIVGLDLHRRRSVMVRTAADGKQLEAVRFSNDREMLARQIAKAGVEPQVVLEATYGWYWAVDVLQAAGARVHLAHPLGVKGFAYRRVKNDVRDAADLADLLRMGRLPEAWIAPAPIRECRELVRHRLKLVNLASGVKAQVHAVLAKCGIAVPMDDLFGPSGMRLLEVAELPAVFRERVDSQLRIIDALETEVARFDTRIKARMYSHPAYAVLQQIPGVGPVFAAVFIAEIGDISRFATPSQLCSWAGLTPRHRESDTTVHRGAITKQGSPLVRWAAVEAVQRAPKSSAMGRTYQRIVDRRGTTAKKVAKIAAARKLLILVYYGMRDGFIRSLAPHAV

SEQ ID NO: 120051 - protein, 336 aa, unidentified
MKLMPVGVDIAKNVMQVHFINTDTGEIFNKALKRDKFLEFFTNRSPCIIGMEACGGAHHWARQLSRLGHQVKLMPGEFVKAFNIRNKNDIADAQAIWRAVQQPGKAVAIKTEQQQAMLALHRIRSQLIKFRLMQTNALHGLLAEYGEVMRTGHASLIKNVPDILARLYGRLPAVLIDSLREQLGEVERTDSRITDIERRIRELSKNDPGVKAISEIPGVGLLTATAAVASMGNADVFRSGREFAGWVGLVPRQTGTGGKIQLLGISKRGDKYLRKLLVNGAHSVIQNAREPGDWVTNLLKRRPINVASVALANKMARIIWAVLAHGRPYRKEVAPD

SEQ ID NO: 120052 - protein, 355 aa, unidentified
MKYYTSTTEFNCGIDLHAHQMYVCVMDRSGKILVHTNIKNNDFQFFLKLVAPYRHDLTVCAECMFGWYWLADACQEANLTFVLAHALYLRAIHGGKNKNDRVDSEKITHLLRSNLIPPAYVYPSALRPLRALLRQRLCYVWRRTELLNRVQSHQLAHNRPALKQTRPNRDPWEQRLLAQEDHPLRQLALQNELSMIRHYDAQITTLETELKKLTRDQCGRDYTLLQTTPGIGENLGLTILYEIGDINRFPTVKDFLSYCRLVKGTVASAGKIKGLRGAKLGNPYLRWAFGEAAVIAKRDHAQIGPLSQSLEARLGGNKFKANTVVAIKLARAVYFMLKNKTVFDPERLVAALSRK

SEQ ID NO: 120053 - protein, 402 aa, unidentified
MCNFNNLIMKTVCGLDVHKDTIFACTLNQNGDQDISECSTMTPDLLRLRDRLKELGVRRVAMESTGIYWIPIWRVLESDFELILVNPYFIKQVPGRKTDVKDSQWIAMLLMKGLLRGSYIPEKRIQELREYGRRAVKLCGQLNRTEMDIDRQLSKCNIRITSLASSINTQSVMKVVQAIIEGETRPEVLETLVHGRIRNKYKEQVRASLTGTIAPHDVLLLRQSYQVHNLFLAQQEELNQAMSVICEADYQKELSLLCSIPGVQKNSAMQIIAEVGFSVKAFITAAALCGWAGLRPRNDESAGKIKSKKILHGNKYVRRVLVQCAWAASRTKGCWFKWKFDELNKRMTSKKALIAIARKMLVVIWCILYSRAPYQERPIIPDENKRQRQIQYYRKQLDALLT

SEQ ID NO: 120054 - protein, 402 aa, unidentified
MIFVGDDWAEDHHDIHVMDADGTRLASRRLPEGLPGISRFHELVAAHVAEPSQVVIGIETDRGLWVQALGAAGYQVYAVNPLAVARYRDRHQVSGAKSDAGDAKLLADLVRTDRHNHRLMAGDSSEAEAIKVLARGHQNLIWARTRHTNALRSALREYYPGALEAFDDLADRDALAVLGRAPTPTEAAHLSLAKIRSALKRAGRQRNLDARAQEIAAALRTEQLAAPAAITAAFAATTRAAVAIIIELNRQISDLEISLAAHFETHPDADIYLSLPGLGDVLGARVLGEFGDDPNRYTDATSRKNYAGTSPLTIASGKKRAVLARHVRNRRLYDAIDQWAFCALSNSPGARAFYDHRRDAKQSHHQALRALGNRLVGILHGCLRHHTPYDEHTAWAHRAAAA

SEQ ID NO: 120055 - protein, 351 aa, unidentified
MTSQAYFVGIDLHKELIQVCVLDARGEKIAEQRFAGGTLEQGHAVVKFLCQWKGGGRYAVEALGMNRWLVNAMREQGLDIVVVDAVKLNLRMLGKKTDRRDAYEIARRLWLGDIDRNAKTYYPSEGEYGCRKLLRTRHKLVQIRQQLVNQVRGLLNAYRVAAPKGELTSKRNLEWLSRIELSGKLLTVCLRGLEQTLRSVQGSIDALTLRIKEEASKDEISSLHENIAGVGPQTALTLVRELGDVSRFTNARAVASYAGLAPRVANSADKAHHGKITKRGNSEVRWILSEWAVRLLTRDPLVQRWAAPLLRRMHKNKVRIALARRLLIGVYFMLRRGEAFSLERCLATRAA

SEQ ID NO: 120056 - protein, 314 aa, unidentified
MTTSSGKFVGIDVAKDKLDIAVLGEKKASQVGNDEKGITSLLKKMQVLKPVLIVVEATGGYQRAVVLGLYEAGLPVAVVNPVRVRQYARASGLLAKTDKLDAFNLAEFGKQMKPRRFEAKSENERYISALLVRRRQLEEMLKAEKSRLRTVSVEMRESVERMIEMLKEEIKRLEKELDRFMKEHEDWQEQEDILRSAKGVGRVTATTLLAELPELGKLDRKKIASLVGLAPMNADSGKKRGYRKTKGGRMEVRNVLYMSTLVATRYNPLIQAQYQQLLKREGEEGGVDSVHAKVPNHPERDDARWAAFRGSAVT

SEQ ID NO: 120057 - protein, 398 aa, unidentified
MTESSDCESVQVFIGVDVGKDTHHAVAINRSGKRLFDKALPNDENKLRSLISDLKQHGQILLVVDQPAIIGALPVAVARSEGVLVGYLPGLAMRRIADLHAGEAKTDARDAAIIAEAARTLPHALRTLKLADEQIAELSMLCGFDDDLAAQTTQASNRIRGLLTQIHPALERVLGPRLEHPAVLDLLQRYPSPEKLASLGEKKLAAQLCKLAPRLGKRLAADIAQALAEQTVVVPGTNAAAVVLPRLALQLITLRKQRDEVALEVEQRVLAHPLYPVLTSMPGVGVRTAARLLTEVACRAFASAAHLAAYAGLAPVTRRSGSSIRGEHPSRRGNKALKRALFLSAFAALRDPLSRAYYTRKMSQGKRHNQALIALARRRCDVLFAMMRDGTFYTPQGS

SEQ ID NO: 120058 - protein, 361 aa, unidentified
MKRTTKYVALDVHQATTVSSVRDESGRIIARSIIPTEAESLLAFVRRMRGAVHVAFEEGTQAQWLSELLTPIVQRVVVCNRRGDTTTGNKNDQHDADDLSDRLRLGRLRAVHHDRGDHARLKELTRTYANVLQDSKRVMQRLKALYRARGIKTPGMSVYHPQHRERWLAQLSESGARFRAETLYAQLGVLQALRPRVKAAMVQEAQRDPAWPVLRRIPYFGPVRIALLLALLLALLLATLQTPWRFRTKRHLWAYAGLAVVSRTSAEYDIADDRPVRRRKRWVQTRGLNRNHNPIVKDVFKSAATTAATTAATRPGPLQDWYEGVRARGLSADLARVTLARKLAAVTLHLWKTGAHYDPTQ

SEQ ID NO: 120059 - protein, 341 aa, unidentified
MDYCGIDLHVEYSEVCILDEEGEVMETSRVRTSRSSLERLFRRGAMRVVMEAGGSSPWVSRLVETLGHEVIVCSPRRVRLIAESSLKNDKVDAEVLARLVRLAPGFLHPIRQRSEGAQLLRLRMKIRRAMVDARTAWINAVRGMLRSFGYRVSGKTPHTFSKRVDGMKLPVELREVIEPMLEQLDLLSGEIKRRDEELEEIAKQLPEVEHLRAIPGVGLIVALYFVLTIDDPDRFRNSREVAAFFGLRPAMRESASMSHYGRITKEGDPEMRRLLVQAAHALLRTRADSELKRWTLALAERKGKGKAIVALARKLAVLMHHLWVTGEVFQAFPSSDAVQAA

SEQ ID NO: 120060 - protein, 477 aa, unidentified
MVTARPSHLNRKQRKELARRLRVEDPGLTVMHPHAAGINVGNSAHYVAVRPDRDPDSVRRFECFTADLHRLADWLVHCGVTTVAMQSTGVYWIPLYEILDARGLEVYLVNARHTKNLPGRKSDVQESQWLLKLHTYGLLRNSFHPPAEIRVVRTYWRQRGDHVHAVSTCIQRMQKALTQMNIQLANVISDLSGWTGQRIVRAMLAGERDPEKLAALSHPGIHATRQTIARSLEGTWQPDLLFVLQQEVAMYDAYLQRIAECDQALEQHLKGVADKVADTLSDAASQTPSRETRRSGPKRRRKAGSHAPQFDLGRELHRISGVDLTRIDGIDVGVAQTVISEVGLDMTRWKTEAHFASWLGLCPDNRITGGKVIRKGTRHVVNRAATALRLAATTLLRSQSYLGAQYRRLRARLGAPKAITAMAHKLARLVYRMLKWGHEYVDKGLQYYEERHREQQVQLLKKRAAKLGLQIIEPEAA

SEQ ID NO: 120061 - protein, 392 aa, unidentified
MDKPKQQKPINDLSRSFTPFDPNHTLIAVIELSKSSWLVAGIIPGVERQPLKKLEPDENQLLKLLGRWRTEAEKAGHKIKRIAVAFETGRDGFWLARWLRARGIDAHVIHAASVAVSREHRRAKTDRLDTEQLKRAFFGWLRGEREHCKMAVIPSSAEEDAKRPHRERETLVGEQTTIINRIKGTLARLGIRNFNPKLKKAPERLEHLRTPEGEPIPPNTLAELHRDMQRRRLVNEQIRKIEKSRLEHLKQAPNTGPNLMVRLLARVIGIGIETADMLVQEILSRNLRDRRAVARYGGLTGSPDESGKKRREKGLARSGNARVRRGMIQLAWRFLEFQKDSALAKWFRARTENARGSRKKMIVALARKLLIALWHFVHTGAVPEGVLIRPAH

SEQ ID NO: 120062 - protein, 397 aa, unidentified
MKACVRVPAESGARGYRQEVRTFGATTRQLLRLADWLAHSQVSLVVMEATGDYWKPVFYLLEQQFEVRLVNARDVKKVPGRKTDVKDAEWLAQLAQHGLVSASFVPPPPVRRLRDLTRQRANLVRERVRALNQLEKVLEDAGIKVSLVLSKTLTQSGRLMIEALVDGERDPYTLADLALGKARAKIGDLREALVGRFSDHHGFLARQALRHIDLLDAEITVFSSRIEQELRPSRHHQQLLITIPGVSDRVAEIILAETGGDMTRFPTAATLASWAGVAPGNNESAGKHLSGATTHGNTWLLGALGNAAAAAARTKNTYLGAYYKRLAKRRGPQRALVAVMHKIILAVWHMLTHDVAYHDLGPDYFRNRPDQIQRRKQRLIRELAELGVDTTSLAPTA

SEQ ID NO: 120063 - protein, 358 aa, unidentified
MNKTSNSNAPWESHWAGLDVSKRFFDAAVAGPGQHVANTSLRDLPWKQFPRTKEGATQFVGWLDTCAVAPQAAGVRVVMEATGKYSIELTAWLLEVRTGLAPAIENAGRTKAFIDSLGQRNRTDGLAARALAFYGVERRPAPCEPLTPQRQKLRELSRFRDTLVGQRGALKNRRMSGISTKVVERMQTRQLRQLDRDIAKIEHEMDQVVKAHPPFQRDYKLLISIAGVGRITAMVVLAEVGDLRRFYRARQLTAYVGVSPSVVQSGSSIRGRTRMCKRGNRRVRKALYMSALAVLRTQYPNSLKAMYLCLCDHGKEKKSALGALMRKQLTVMRAVLIHGVPYNPLWDTCGQRGGKIAA

SEQ ID NO: 120064 - protein, 349 aa, unidentified
MIVIGIDPHKQTHTAVAIDKATGQVLAEITVRARRQGFERLVEWSRHLDRQRLFAIEDGRHVSGHLERYLISRGERSVRVPPRLMGEARRADRVRGKSDPIDATAVARAAMAHPDLPAATLAGPEREIGLLAAHREQMVNERTAIQSKLRWLLHDIDPDLAPGPRTLDRFATLDRLQTRLRELAPTADVRICLDLVARCREITVRANELERELAPLVDATTPELVQIPGCAVLTAAKIVAETAQIGRFPTEGHFARYAGTAPVPASSGAVHRHRFNRRGNRQLNAALHRIAVTQLRIHQPAKDYVAKKRSEGMSKTEAIRALKRRLSRVVFKTMTSVNRPTDGLIAAVA

SEQ ID NO: 120065 - protein, 382 aa, unidentified
MQTIDTVNPTILLAIELSASTWLVAARVPGLEKPHLHRIDGGDTAALLALISSLRARAARGLDATIGVVCCFEAGRDGFWLHRLLTAHGVVCHVLEPTSILVNRRARRAKTDRLDAEGMLRVLAAYLRGDHQACSMVRVPTPEEEDAKRTHREREKLVQERLRIENRIEALLFTQGIRKRPSLRSWERDLAVLRTGDGREIPRHLRAELGRLRRRLVMTLELIREVEAERDQAANTKPQDQTCHKIANLCRIRGIGENFAAVLTREVFYRSFDNRRQIASYVGITPIPYQSGGMDRDRRISRAGNPRARTTMIQLAWLWLRYQPGSELAEWFRERVGTLAGRTRRIAIVAMARKLLIALWRYAETGVIPAGAEIREETTVAA

SEQ ID NO: 120066 - protein, 397 aa, unidentified
MYIVGIDIAKRKHEAAVIDGEGTVIIKPFSFTNNCSGYNRLLAMLTKAKLPLDEVSFAMEATGHYWLALFTRLQKEGFRVQVINPVQTNSIRSFYIRQAKTDPRDALLIAEVIRFGHFSESTLHPENIYELRELCRGRHAIVSMQADVKRKVVALLDQVFPEYETAFTNLFGDTSMAILQTCPTPKELSEMPFEELCHLIEVSSHKRFRMAKAQELQELARNSFGFAMAGDVFSMMIRLYAKHLDFLKQQLREMDRKIAEIMDTLDTPITTITGIGPTLGAYILSEIGDINRFSSAAKLAAYAGIDPTMRQSGEYNGVRNRMSKRGSPYLRHAIWLAASSAVLHDPALKLYFQKKRDEGKPYMASVGHACRKMVSIIYAVMRDNKAYVPCIPSEISA

SEQ ID NO: 120067 - protein, 374 aa, unidentified
MEILKTTIMLKKLLKQVVGIDVAQKEIDVSLGWMNQEANTEVYAYKTFNNNEKGFAALILWVKKHTQADVQLRFVMEATGVYHEALAYHLSTKAYAVSIVMPNKITNFFRTLEVKTITDKTMSEAITLFGLEKKLDNWTPPKKVYRELRQITRERDQLIQERSMNKNQLHAEQTEAYPNEKTIKRVMARIIMLNKQIKEIITEIVEINKNDSQVAQATKLITTIPGVGLLTAVTVLAETDGFSLIHNKRQLTSYAGLDVKEKESGTSVKCKPHISKRGNKHLRKAMHLPALAAIRHTERYKATFTTIVSKTGIKMKATVAVQRKLLEMIYTIYTTKKPFDTEYLQKETKRKQDMKEAKKIENSPKELLSIQADI

SEQ ID NO: 120068 - protein, 339 aa, unidentified
MNQPIIIGLDLAKSVFQVHGVDAQGRVVLRRQLRRSQVPGFFERLEPCLIGMEACSGAHHWARELGGLGHEVRLMPPAYVKAYVKRSKTDAADAEAICEAVTRPTMRFVPVKSDEQQAALLDHKARDFLVRQRTQTVNAIRAHLGEFGIVVAKGIHNVDRLLEAAQDIPEAARPALDLLTGQLTGLEERIEAATARITAAQKADPLARRLATIPGLGPIASSAFAATTPDVAAFRSARDYAAWLGLTPRAHSSGGKERLGRISKAGNRYLRRLLYLGAMARIAARRGRPPVPAASTPDWLHRMLARKPVKVVAVALAARMARTVWALIRSGDSYRHITA

SEQ ID NO: 120069 - protein, 414 aa, unidentified
MWVQLARRDHTHGLDRPTQKGYSMQGYDVVVGVDVGKSFHHLYAIGKGGEELENKQVVQCEQILIDTFREFKTQGSVLVVVDQPNNIGSLAISCARKTGCDVSYLPGLAMRRAAGIIPGDAKTDARDAYVIALTAYSMPLSLRPVQRQDALRADLLALAAFDDDCRCDMTREKNRLRAHLVEVHPAFEQALKDDIDSTFVLNMLMKFSGPWTMKNNIGRVKRWVKTQSRVPQALFERLMGSLSEMHFALEGSTLREEIAIPSCARRIAELKECRKKTQARMETLLIGDATYEALQTMPGVGTKTAVALIVHVDIDAFESVGHLASYAGIAPRTHQSGTSIKGEGASRIGNRALKNALFLSAFASLRAEGPSRNYYDKKRLEGKRHNMAVIALARKRLKVMYAIMRDKTPYRASV

SEQ ID NO: 120070 - protein, 351 aa, unidentified
MIPGLSREPLKKIAPDPELLLRLLYRWRDEAIKAGKEITRISVGYETGRDSFWLARWLRARGIDAHVIHATSVAISREHRRAKTDRIDTAMLRRGFLGWLRGEPGHCSMAIVPTLAEEDAKRPHRERESLVQERTSTINRMKSILIQFGVRDFNPVLRKAAQKLHAVQTPEGVPLPPNAASALRRNVERLRLINEQIKAIERSRVQHLKRDPTDKFNAMVFLLVRIIGLGVETAEQLVREILSRNLRNRKAVARYAGLTGSPDESGARRREKGLSRSGNGRVRSILIQLSWRLLQFQPDSELVLWFNKRTAGVKSSSKPMIVALARKLIITLWRYVNTGMVPNGFKLRSAG

SEQ ID NO: 120071 - protein, 415 aa, unidentified
MALKIVYKICCGIDVHKTFVVACIASTDKHGVTSYERHRFSTYTKGLKNLLQWLLEHNCKDVCMESTGKYWIPVYNILEKDCSIVLAHPKYVKAIRGKKTDKKDAKWIADLFKHDLVSGSFMPPADIRQLRDLMRYRFKLTCFKSSEKNRLQNCLTVSNIQLGNVVSDTFGKSAQAILDKILENPEDTSFDLEPLVFKSLKKKLPELRDAIDGYITPEQAGKLKIIKAHYESLESRKAELEELILALAAPYQQEFAILQTAPGISSDFTAIGIISEIGTNMEAFPSAKHLCSWAGLTPTNNESAGKKKSVRVSKAGCYIKPLLVQCANAVVKSTKHPEMRNRYLRLKKRRGHKKAIIAIARMLLTALYHMLKNGENYNAELYRKSDLPPVDREITVEQAILIARNQGYKIKSATA

SEQ ID NO: 120072 - protein, 499 aa, unidentified
MADARRVVVGGVDTHKDVHVAAVIDGQGRILGTLECKTTAKGHGRLLAWMRSFGELVKVGVEGSGSYGAGLTRYLAGAGIEVLEVNRPNRQTRRLRGKSDTVDAEAAARAVLSGEARVTPKSQDGIVESIRALRVAFTSARGARAGVINQIDALIVGAPGELRNALEALSTSERVGRCARFRAGGDPADPVEGTKLALRALARRYEALSTEMVDLGQMLGELTARANPALCGAHGVGPDVAAILLIAAGDNPGRLTSDSAFAALCGVSPVQASSGKTVRHRLNRAGNRQANNALWRIAMVRLTCDPATKEYLARRTAEGKTKREIVRCLKRYIAREVFRHLTAPASVPAGAELRAARKKPDSVSKQSQRPWEPGQSASQNSSAASFTTPTSPAATKPYSQPNTPLDNHRSIRTLDPPPPPGQSHPRSKTRDQDPAIRRTAGQQGHQAQAMQFPRGRSKRKSTFFLTSDMEQNVKVLRGLVLFVAGVGWRASRGSDGGSD

SEQ ID NO: 120073 - protein, 340 aa, unidentified
MRTLYAGSDLHGNNNMMGIIDGEGKRVFKKRVSNEPQLVRDVLKPYKEEIVGVAVESTYNWYWLVDALMEEGYKVHLANPAAIQRYSGMKHVDDKHDAFWLAEMLRLGILPEGYIYPKEERPLRDLLRKRGHLVRLRTSLVISLQNILSRNLGVNVVVNEVKRLREDRITPLLGESEDLALAGRVSKEAIDFFTRQISRIEGVVEKRVGLKEEYRSLLTLPGVGKILALTIMLETGPIDRFETVGDYVSYCRKVPSQWTSNGKKKGSGNKKNGNKYLAWAYSEASDFARRFYPEPRAYYNRKMQKTNPAVAHSALSHKLARAGYYIMKDQVPFRPEKLFG

SEQ ID NO: 120074 - protein, 413 aa, unidentified
MFYGLDLHWRFIQVCCIDGGGQKQKEFRVDVTREAIAAFAERLGPGDAVVMEATFHTWVVWSLLAPRAGRVVVANPLQVKAIAHARVKTDKVDAHILAQLLRLDFIPAVEMPSTQTWELRQLVTHRQLLARKRTAVRNAIHGILHRKLLRCPHCEPFSAVGRRWLLAQDYTETERLMLDSDLALLDQLERGLETVDARLRAAAAAEQDVRLLMTIPGVGTTVAVGLLAAIGDIARFATPEKLAAYFGLVPSISQSGDQCHHGRITKQGRSSARWLAVEAAQSLSQNSTPLAATYHRVKRKRGHNVAVTALARKLVVLVWHVLRNQEPYRYGPVAHTRRKLRQVTPGLAPAHPGRVPHTLEAVYEEVGLPVPSAPRVAEKRTASVNLSTVTLARKARVCDMTVKSHKSLARARS

SEQ ID NO: 120075 - protein, 419 aa, unidentified
MSFKILKNNCCGLDVHKTWIFACIGITDSHRRTEYKQARFSSFTKGLQELCDWLAKYNCTDVCMESTGKYWIPVFNVLEKNNIWVTLSHPKYTKPQKGNKTDRKDAKWICDLYMCGMVKPSFIPPADIRQLRDLVRYRFKLTCMITSEKNRAHNCLTISNFKLDEVFSDIFGKSSRSITEQILQHPGETFDVAQFVDGRCKTPIEEIQAAVDGAISTEQAVKLRQCLNHIDELEKHQAEIEREIFRLSDKYEEVLNLIRTVPGFDKNPMTAIQVLSEIGGDMSVSPTAKNLVSWAGCCPRNDQSNQKIKSTRISRAGSYFKPVLVQVANALIKSKKHPEFTTRYRRIKARRGHKKAIIAICRMILTAIWHILTDLKPYTTEGFLESRPVNDSKILTTSQALNLLKQRGYVIKDDIVSVP

SEQ ID NO: 120076 - protein, 309 aa, unidentified
MSSWVGIDVSKNTLAVWVRPSGVNFIVCNSSEGHQALLLNLADIQVERVLLEATGGYERAVMGCLAQAGHSVVRINPRRARAFAQAMGKLVKTDPVDAGVLAHLAQVIEPSACQTVSLARDELQELVRRREQVVKLRDDERRRLTLARSGVVQESLQTNISQLNEQIARLNSAIEAAAQRTDNQLVKQLGAIAGIGPVTVASLLAYLPELGQLSRRQIAALAGLAPYNNDSGQHSGKRCIKGGRASIRRVLYMATWSVIRCHSSFAARYASLRARGKCAKAALVACMRVLLIRLNAMVRDHSSWRAEAV

SEQ ID NO: 120077 - protein, 344 aa, unidentified
MIYYAGLDVSLRTVNLCVIDDQGELVAETKLASDVQDIVAYLDALKLDLASVGLEAGTLTQYLSYGLQAAGFEVICMEARQVKGALSAMRNKTDKHDARGIAQILRSGWYSRVHVKSMASHHIRMLLSSRKAVLGKCVDLENEVRGLFKIFGIKLPSKLGHGAFDVAVRDIIETDEALSHALLPLLDARLVLYRTFRVLDNRTRKMAHADPVCVRLMSVPGVGFITALTFKAGVDDPHRFKRSRTVGAHFGLTPRRFQSGEMDNPGRISRRGDSDVRSVLYTAANALLTRSSRWSPLKAWGMKLAKTRGHRRAVIAVARKLAVILHRLWIDDTQFRWGTEGARS

SEQ ID NO: 120078 - protein, 344 aa, unidentified
MDVHTTNYTLCCYSMEDDRFFAEVQVEPDAKNILKYLARIEKQQSRDCRIVCGYEAGCLGYSLYHQLHAHGIDCVILAPTTMMTKPGKRIKTDRRDARLISKCLAFHTYSPVYIPTEVDDAVKEYIRMRDDANSALTRVKQQIIAFCIRHGKIHDGKSYWTNKHLEWISSLDLGNKILSEVLQEYLIRYYQLREQVDMYDMRINELAQAEPYRQKVEKLGCFRGIAAHTVLPFCVEVGDFRRFATAQQFASYLGLVPGECSSGDKQQYTGITKAGNSHLRKLLVETAQVFGRSATKSGKSVALKERQARCDSLTVAYADKANARLKKKYFKVTPHKYKIYFSRQ

SEQ ID NO: 120079 - protein, 374 aa, unidentified
MSAKGITWVGLDAHKQSIHVAMLLPGRDEPIAWQEPNEENAVRRLARRLTREAPGEVRSCYEAGPLGYALQRELESQGVICEVVAPSLIPLKPGERIKTDWRDARKLAELLRAGLLTEVQAPNEADEALRDLCRGRDSVRQDLMRARHRMSKFLLRRGYRYRDTQRHWGVRHMNWLRPQTFEPAAAQAIFDHYLLTVDHLDERLRQLDARLGVFGDQEPYREPVAWLRCFRGIDTVTAVSLVAELHDFRRFRSARGLMAYLGLVPSERSSGEQRRQGSITPAGNHYVRRLLVEAAWHHRHRPVLSQPLRRRREGQPADIIAIADRAQERLHARFMRMTRRGIHYNKTIVAMARELVGYLWATLSRRAADAPPAA

SEQ ID NO: 120080 - protein, 370 aa, unidentified
MSVRRILAKTIDTDLEYEAIGIDLAKNCVSAALLTTDGEVVCIDRLDYSELEKSAQALSPTTFAMEPCTEMNYLVQKLEAWGHRCLVIGGKNVQNYVENHYSGQKTDLNDAQALAFLAQDTQLRTIKAKDMEQRKYASLTTLREQYIKQYRQTIVSLKGICQAWGLNISKGISGKARLKDLIENHAAFPEELKESLVDMVTHAQTAQKALNKITKTLEELAKSDKVCQLIQTIPGLGSICSCRLRATIGDIKRFKNPKDFPAYYGLVPRSIATGHNERKGKITHRGDRTMRSLMVQAAGSLVNMATKGKLKSKQLTKWILKKQKEKMPWGKLVCAVAAKLLRIVRAVLISSKPYNPQIAGVAKCSLPKGS

SEQ ID NO: 120081 - protein, 451 aa, unidentified
MEAEGLPVVRANVAGIDLGSKQHWVCAPKPGGQGREVKSFGATTPELERMAAWLKERNVASVAMESTGVYWIAPHEVLERHGLEVVLVDTRQLARVPGRKKSDPVDCQWIQRLHSCGLLMGAFRPVEQVCMLRTLVRDKAVLVAETGDWLRRMQKSLDQMNVRVHRAVSDIDGVTGMAIVRAIVGGERDARQLAKFRDPHCHQSEEAMAEQLSGHWRADHLFTLEQTLKMYDAIQERIAAYEQEIMRKLAELEREECRGKEAPKLNNPNKAKAIKKRGEEPLRQALYRTSGVDLTGIDAIGVETVLLVQSEYGTDLSMFPTEKQFVSHLTLAPHKPTSGGKPVKKQKKKRGSASSRVAAGLRMAALSLRNSKTALGAHYRHIAARKDGDVAVFALARKLATLIYRLLRWGQPYLDEGAAAYEKRYQEGRLKRLTATAKDLGYQLTPKAVTA

SEQ ID NO: 120082 - protein, 334 aa, unidentified
MNDVTTVGIDLAKNVFSLHGVDARGAVVLRKSVSRAKLSGIVAQLPPCLIGMEACSGAHEWARRFTEFGHTVKLMAAKFVAAYRKSGKNDGNDAEAICEAVSRPSMRFVPVKSREQQAQLCVHRVRSGFVEERTATLNRLRGLLAEFGHVLPLGANALRAQVPNLLEDLPALAADAARDLLEHVRELDARILGYERQIQAHVRSSEPAQRAQTQMGVGAITASAIVASVGEAREFKNGRQFAAWLGLVPRQHSTGGKTRLGQITRSGDGYLRTLLVLGARAVLRRAPRESDPLSRWAVALRERRGYHRACVAIAAKNARRVWAVLAGRTPVTAG

SEQ ID NO: 120083 - protein, 436 aa, unidentified
MEEVSDEPLYRDRVCGIDIGKAELYATIRVPSDNHPARRAAETRSFPTTKRGVLALADWLRCWQVPALVMEATGDYWKGPFCRLEAEGFDCVLADARQVKNLPGRPKRDPSDSAWLAACFERGAVTPCFVAAPEFRVIRLHTRYRRDLTDERSREKNRAEKLLESAAIKLSSVVTDLHGVTGRDIMDHLIAGERNPKALAQLARARARRKISELEAALDGAEFFTPEHAALLTAMLDRIDRVNEEIARLTEVIDRLLAPYEEQLQQAESMPGWGRRSAQDAVAETGVDMARFPDGAHLASWAGRTPLDNSSGKRQGKAKVKKGNRYLGGLLGETAVAAGKTQTREGARYRRLSRRRGKAKALVAVGNTQLKVYHALLSHPGTRYQDLGPDYYERRASTSRQIAHHVGKLGALGFEVTLCRTPGPDPEPGQAATPAA

SEQ ID NO: 120084 - protein, 459 aa, unidentified
MARSRRAPEEIPDVEYEQVLERVCAIDVAKEFGQVCVRTPRADGKRASKVFAVDAITGDILRLGESLLEQGIEMITLESTSDYWRIFYYLLEGCGLRVQLVNARDVKHVPGRPKSDKHDCVWLAKLTERGMLRPSFVPPAEIRVLRDYTRTRIDLTRDRTRHWQRLEKLLEDALIKVTTVASKTTTVSVRDMIDALIRGERDPEVLADLARGVMRAKRRDLVRALDGRFDEHHAELATILLGQIDSLTAEIDRLTTRIEQLVDQLPTPGHPVDPDRAPTPTPNPGNAQPATAPSQPRPALQRLADIPGIKLAAAEVILAEIGLDISRFPTPEHLCAWARLTPQLIQSGNKRRGGKTSKGNPYLKGVLGAAAASASRTNTFLGERYRRIVKRRGKGKALVAVARSILVIVWHLLANPDAHYQDLGAHFYDNRIDKERRKRQLIQQLEALGLQVTLTPVVA

SEQ ID NO: 120085 - protein, 371 aa, unidentified
MTDSSTFIGMDVHKNSIDIAIAQSGRKGQVRHYGKIDGTLSALDKVVRKLVSNGNRLRFVYEAGPCGYQIYRHLSAQGFDCSVVAPSRIPRSSGNQIKNDRRDALMLARLHRAGELTSVYVPRAEDEAIRDLTRAREDAKSDEKKSKQRLLAFLLRSGIRYTGRALWSQAHVRWLSDVKMPHRSQQIVLQEYIGTLNQCKDRVQRLTEQIQQLLPEWQLFPVVRALQSMRGVSLIVASTTVAEVGDLKRFKNPAELMSYLGLVPSENSSGPKTRRGSITKTGNGHVRRVLVEAAWAYRLPARVSRVLLKRQEGVSQSICDIAWKAQIRLCSRYRYLWAKGKVKQVVVTAIARELCAFMWAIANETQATVTV

SEQ ID NO: 120086 - protein, 392 aa, unidentified
MIYVGIDIAKDKHDCFIINSDGEILFHTFTISNNHEGFNTLFQRIESVSDDFTKVKVELEATGHYSYNLLGFLLDKGLPTYVINPLHTNLYRKSLTLRKTKTDKVDSRTIATMIMSNMNLKSYSDISYHNEELKSLTRYRFDKVKERAKLKTSISRLVNILFPELEKLVPSLHLSSVYALLSEFPGAAQIAASHLTKLTNLLSQASKGRYGKETAILFRETARSSIGSVMPAKSLELKHTIKLIQELTAEIDEIEVAIKQIMDEEIHSPILTIPGISYRMGAMILAEIGDFNRFDSADQILAYAGMSPSTYQSGQLNNCYSHMEKCGSRYLRYALYNATKYVCQWDESFSAYLAKKRSEGKHYNVALSHATKKLVRLIFAMEKSGRTYQPAA

SEQ ID NO: 120087 - protein, 401 aa, unidentified
MADAAQRYVAFDLHKRQVTVAAVDQAKAVVLAPRQVALSRLEKWCHQHLRSQDQVVMEAGPNTWHAYDIVEPVVSLVVVADPRKLRAMAAGAPKTDARDAIFPATLLAAEMVPEIWVPPKDVRDLRTLIHYRQRLVRRSTAARNRLHALMARRHVAVPDGDPFAQSCRAWWETLDLRPTEALLACQDLDTLDATTDQRRAVDAHLARLSVSEPWHADANLMLHRPGFAVVNAMTLLSAVGTIHRFPRSSHLVAYGGLDPRVYQSGETLRAGRISKRGRRELRSVMVQAAWVAVTCDEYWKARFAHLQAKLGTPKAIVAIARKLLVLVWRVLTHREVADRSDPETVARKYLRWATEHRLATSLHLSRTEFVRLELKRLRIKHGPINIKSGGWNLRLEATTAG

SEQ ID NO: 120088 - protein, 358 aa, unidentified
MVQRKELNFEGQNIYIGIDVHLKTWHVSILTESGCLKKHSQQSSAQALFEHLKKHYPNGNYLSAYEAGFSGFSTYYSLLDFGIECLPVHAADIPTGQYESVMKTDAIDSTKIARALKSGLLRGIYIPKKEVLDDRNVMRLRITLKRQLSGYKSRVKHLLYNNGVIYPECFQNSKSHWSKRYLKWVHEDVQLLSESRNSLDLLLRQVELFRKSLLEITRLVRTLSRNGRYGEAYENIVSIPGIGMITGMCLLTEIGDIHRFRNERQFASYLGLVPTSHSSGEKTSHGEMTFRGNKRLGPLLVESPLVAIRQDRALAAAYGEYCKRMLPQEAIIRITRKLSNRILIILKSGKKYEHDRCY

SEQ ID NO: 120089 - protein, 375 aa, unidentified
MIRVAAPLGMIGRGPVCIGHKHRGEAAVGYFAGLDVSLEETAICIVDDEGRILREARVASEPYALVAFFNALGMTMERVGLEACSLTAWLHQGLSEAGIPAVCIEARQAKAAIGAMPNKTDRNDARGLAQIMRTGWYRAVHVKSPSCRSWRALLTARRMLLNKRRDIENGVRALLREAGLKVGAPSRKDFPARVRELASGDAVLTGLVESLLSVIKVTTDEVARLTKRVLDEVRVEPTCRHLMTVPGVGPLTALAFRATVDRPDRFRKSRDVGAHLGLTPRRYQSGETDVQGRISRCGDELARTALYEAAHSLLIRSRKWSALRAWGMQVAKRRGIARARVAVARKLAVILHRMWVDKSEFRWGKQAATAAKAAR

SEQ ID NO: 120090 - protein, 397 aa, unidentified
MIAVGIDVSKSKSTVAILNGDGSIRAKPFDVHHVADELQALVDYIKRTSEPPTILMEPTSHYHYPLLKAFQEAELPVCLINPYQMKKYGDTELRKAKTDKRDSLRIAQYALEKSYSLIPYTPQDQKYEDLRFLSRQYSQRISTLTVAKVQLLSLLDETMPGITTILPLKSRDPDNCVLLRFIKRFKSFDVIRKMGKTRFLDSYQVLVKKTKDRFAGSKGLAIYEFVLNSVTTRGENPLSAMTQDQCVDLVSTSQKAADEINLQMRIIAETMPEYKVLRSMAGVGDRLGPIILGEIGDIRRFHSGKALNAYVGNDAPPYQSGQFESRNRHISKRGNPALRKACFEVMQALKLTKPQDDPVYLFLLKKEQEGKPYNVAKMAAVNKFLRIYYARAMELYK

SEQ ID NO: 120091 - protein, 339 aa, unidentified
MKDHDVSDVVKTKKRTAMRYIGIDVSKATFVVAYSSDKGGEIRTFNNTTAGIRQFIGTLPKDGSIHCVMEATGNYSALLLYMLNVAGITVSMENPLKVKNFAKAMLSTVKTDKSDARLITLYGEKMNPRPFKVQGEAILRLRQKRTVIRQLTKQITAMSNLRGSLACLPVPDKGATHTVDETIKFLEKKRDRLQSELTDLVEVEFSRQLALLTTIKGIGITLATALIITTGGFTYFQNAKQVSRYLGICPTYEQSGTSVNIKGHINRNGDAYTRGLLYIAAWPASRFNAQCKETYTRLRQNGKSGKLAMIAVANKLVRLAFAVVAHDKEYVDGFVSNRP

SEQ ID NO: 120092 - protein, 412 aa, unidentified
MVNPVVGLDISKGESQVQAFVDKGKPFRKSFKVAHTIQGLALLVEFLEVVQKETGLKPPVILEATGHYQTAVVQYLEERGYLLIIINPLISYKAKSSSLRKVKTDAVDAYHLCELFYKEELEPYKKRGVQLLNLRNLTRQHENITGVMIQTKLQFQAILDQVFPEYRGVFGDLYSVVSLLTLKEFPSSEDILEASDETLSNRIKELCKSRSIRWANEKALQLKEAATRNPFEKTVYQSHFLSLGMYINIILQYKEHLSTLESEIDALAKEVEEYNIIKSIPGIGEKIAATIISEIGEIDRFTDPKKLVAFAGVDPSVFESGKFTATKNRITKRGSSRLRHALYMAVRCAIRDCRKSKTSDEIIPRNKKLREFYDKKREEGKPFKVAVIACVNKLLHWIFALLRDRTTFQDIA

SEQ ID NO: 120093 - protein, 400 aa, unidentified
MIAVGIDVSKYKSTVAIISNTGEILLPPKVYTHTYSALLSLVSLLKKQNDDIRIVMEATGHYHYPILKLLLGHHFFVSVVNPYIIKKYNDNNLRKVKTDKQDAIRLAFYALEKSYCLNAYVPAGEKYADLKFLYQQYTQRIHIIQKEKINLCHLLEESMPGLYDMLSTSVRNPSKNLLYSFVKRFKSFNRIKRMGKERFLNSYFKMAAEIGSRRRKNYALDIYEMAKDCIATGSTEPYSTMAQEECLRSLILAEEAANRLCEQMNSIANTLPEYPLVRSMYGVGDKIAPQLIALIGDIRKFKSGKALNAYAGNDAPPYQSGQFESKNRHISKKGSTELRKVCFEIMCCIKVHKSPEDPIYKFMQKKESEGKAKKVAIMAGINKFLRIYYARVSEVYQKAL

SEQ ID NO: 120094 - protein, 353 aa, unidentified
MSMLADLVEVVIGVDTHSLTHTAAVVDARTGAVLAGATVTADPDGYAELSALAEQHSGLRAWAMEGTGGYGAGLARHLADAGELVVELDRPKRPARRAGAKSDPIDAERAARDALARTRLAQPKTGAERAALQMRLTARRAAVEAATAAQRQLLAMVITAPEGVRARFRGQNTRAMIATAVRLRPTASSGDVEVTAALAVLRDLARRIRLLETEAIGHEQAIRTLVRSWRPDLLELTGVGPIVAATVLAAWSHSGRCRDDAAFAMLAGVAPIPASSGKTVRYRLNRSGDRQLNRALHTVTLCRLQRDPRTRAYADRRRAEGKTDREIKRCLKRYIARELYRRLESPPSALDAS

SEQ ID NO: 120095 - protein, 343 aa, unidentified
MSEISTIGLDIAKHVFHAHGADGSGRQVFSRRIARRKVLEFFASQPRCLVALEACGGSHHWARELMRLGHDVRLIPPSYVKPFVKRHKNDAADAEAICEAAQRPNMRFVAVKSEEEQTSALVFRTRDLFVRQRTQTINALRGHMAEYGWVAPQGRAHVATLADLLDEAAGASVPEAAGAMLRVMIAMVAELDGRIAELDKEIARRAREDVVVRRLMTIPGVGPLAATAIAALAPPLETFSRGRDFAAWLGLTPLQKSSGGKQRLGRMSKMGERTIRRLLIIGSAAVVRHASRPGAPERPWLTAMLARKPRMLVTVAQANKTARIVWAVLTKKEDYRAPAARTA

SEQ ID NO: 120096 - protein, 419 aa, unidentified
MNTHWTQYTHFAALDWAADHHDVVVVDRTGAIAAEFRFAHTAAGWAEFTDKMKPFAGCPLALETSSGPAVDQLLQRGWILYPVNPKAAQRYRERKAPSGTKSDRHDCWSLADALRTDGHGWRPLVPQDEATATLRALCRDEMGLIEQRTALVNQLIAALREYYPAALEAFDEWTAPYAWALLIQFPTPAALQAAGKRKWEKFLHTQRLWRESTAPARLKVFAAANALPASPPIVTAKSLLAISLVRVLQALEKQLDEYRQRINQAFTQHPDHSVFGSLPGAGEKLAPRLLGELGSARQVYPDANALCCQAGVSPVSFQSGQRDKARIRWACDKVLRHTVHLWVDYSRKKSPWAQTYYKHKRQRGHSHASALRCLGKRWLKVLWRLWQDGTCYDPRVHEQSLKDHGSWVAPLLSAAPAEL

SEQ ID NO: 120097 - protein, 323 aa, unidentified
MNKYIGVDISKKDFYACFEESEEPILFGNNKAGIKAFEKYLAKNDFKKYQTTIGVESTGVYHLPMSFGMSKAGFQVNVINPLIVKKQNQTSLRRVKNDQKDAALIRYCTVNKAGYKFIDNAETLTIKSLVRQRDSLATMKNTLNRKQDCVSYKEENLGITISKSNKRLIDAVDCEIKQLEKQLKEFRKNEQKLLQSIPGLGPITAISFISEINNVARFTEPKKMVAYIGLDSRVHLSGTSIHGKGYISKRGNKILRTRLYNACSVAVLHDNVFKDFFQKKRSEGKPYKVALCATMNKMAHIVYAVWKSGVPFEDRRNKSTQTV

SEQ ID NO: 120098 - protein, 338 aa, unidentified
MVYGAIDLHMRYSQIRIVDAAGTVLRDQRVMTSRERLTKGFEGAGPMRMLLETGTESEWVAQALEAAGHGVVVADPNYAPMYGELTRKVKTDRRDVAALAEANRRGWYRPAHRSSAAQCATKQILRSRRFLVQTRSGAVSLLRSLLRQAGYRLGTGSCETVPARVARLTVPTELAETLAPLCRQIASLTTEIQAMDGRLQRRTASDAIVARLRSVPGIGLIVATTLRAFIDRHERFQHAGQVSAAIGLVPREDSSADRRHRGHITKAGPGELRSLLIQAAWVCWRHPGSATLRAWVDRLAGRRGRRIAVVALARRLSRILFALWRDDTTFDATKLATA

SEQ ID NO: 120099 - protein, 350 aa, unidentified
MRTKPIPETAAFGIDIGKKVFHVVALNAAGAIIQRAKFSRDTLIGFFEIAPSALVGMEACPGSQWLARRLAAMGHDARIIPARFVKPYVKSNKTDTVDAAAIAEAVTRPTMRFVEVRTPEQVDLQALHRIRDRLVGQRTALMNQARAFCLEYGLAMRVGAGGFHADIQKHLANKENDLTSSMRVLLGELLDDLGYIEDRIKAVNGKVEAYARENDTVSRLVTIPGIGALGATALVAAAGDGQQFRKARDLAAWLGLVPAEHSTGGKQTLLGISKRGNRYVRRLIIHGARSCFLHLNRANHALGGWLSALEARTHRNKAVVALANKLTRIVWAILTRPGAVYLQSKGAALS

SEQ ID NO: 120100 - protein, 388 aa, unidentified
MIQVDDLSRSLIAFEQISTLVIVVELSQSSWLAAGVVPGIERRPLKKLDPDPTALLHLVEGWRDRATKAGRAITRTVLAFESGRDGFWLARWLRVRGVETFVMHSTSVAVSREPRRAKTDRLDTEMLIRVFLGWLRGEPRHCKMVAIPTLEEEDARRPSREREILVGERTRIINRMKAALVRLGIRGFKPGLLTAPQKLDALRTPEETPIPPNMLDEMRRDMARLAWVREQINAIEQARLERLERAPATGRHAMVRMLARVIGVGVETADMLVQEALSRNLRDRRAVARYAGLTGSPDESGSKRREQGLSKAGNARVRRGLIQLAWRFLRFQKDSALAQWYRGRTEDAAGKRKRTMIVALARKLLIALWRLATIGEIPVGVALRPAVA

SEQ ID NO: 120101 - protein, 454 aa, unidentified
MAPRHPKTKQKVHAQLPTLHPHAAGIDIGAREIWVAVPPGSDPKPVRGFDTFTDDLLQLRDWLLACGVQTVAMESTGVYWIALFQILEAAGLEVCLVNARHCKNLPGRKTDIQDCQWLQYLHSVGLLRGSFRPPEQVCAVRSLLRHRSRLVRCAADQVRLMHKALTQMNVQLQHVISDLVGVTGEAIVQAILAGERDPVKLAQLKDHRIKASHDTIARSLRGDWRPEHLFTLSQSYQTWQHYQKQITACDAQIEAQLANWDARVDVQVQPLPAPKTSHRTAQRNEPQFDARTESYRVLGVDLTALPGFQTPTALLLLAELGPDFAQKFPSAKHFASWLGLCPDNRITGGKIMSSATRDVKSRVAEALRLAAQSLWHAQNYFGELYRRWKARLGGPKAITAMAHKLARILWHLLKHRQAFNPEVFRKEEEKMRRKKIARLQNTAAALGYRLVQSQ

SEQ ID NO: 120102 - protein, 400 aa, unidentified
MVTQETPQVFLGLDVGKSEHWACAITSGRKVIWNKALPNDEAKLVDMYTRLQEHGPLLVVVDQPATIGALAVAVAQHMGVPVAYLPGLTMRRIADLYPGDAKTDEKDAFIIADAARSLPHTLRELTEADVDEATLGMLTGFDLDLSRQVNQVSNRIRGLFTQIHPALEKVLGLRLEHDAILEMLATWPTPEKLRKAGRARIDAKLKKHGARRHAAWTEEILTALAKQTVTVTGTQAAGIVIPHLARQLIHLHAQRADVAQEVEEIVVHHPLYLVLTSMPGVGLRTAAVIIAELSGKTFTSAAALASYAGLAPTTRQSGTSIKSERVSHSGNKRLKRALFLSAFAVIRTDPASRAYYDRKRSQGKRHNQAIIALAHRRLGVLYAMLRDGTLYNTPETVLMA

SEQ ID NO: 120103 - protein, 417 aa, unidentified
MKCFVGLDVSSTKLDVCIMLSDTTTPFTASLSNDLTGASEIKKHILELNETYAFERIVIGMEATSLYSFHPAMFFHEDSQLKALNVEVMVEQPNKIKKYRETFEESKNDTIDAFYIADYFRIERFSPAFLKEEKYLALQHLTRTRLQLIEQLTRTKQHFIENIYYKCNTLSTEIKNENLTISLWSSTIISLMTEVCTLDDLANIPLKDLADFIQKLGRGRFKAPDKLAKAIQAAIRGSYRLPKLQQDSVNVILGLLAREIRNLEQMIKDIDKAIEDMVEVIPEYQCLTSVPGVGKVYAAGIIAEIGQIERFKDHPQVAKYAGLNWRQNQSGNANSQNTDLVKRGNRYLRYYLVEAANSVRRHDSEYQTFYKKKYHEVPKHQHKRAIVLTARKFVRLVDALLRNRQLYAPPRRLMEDR

SEQ ID NO: 120104 - protein, 341 aa, unidentified
MDKFIRVGIDLGKGYFQVHGLRVEDGWAVNRKLSRSKMRPFFASIAPCRVGMEACGSAHYWARELVAMGHEVVLMPPGYIKPYVKRGKNDAVDAAAICEAMSRPDMRFVPIKSAAQQAVLMQHKTRELLVKQRTMSVNALRSHLAEFGLVVAKGIGRIDELSELAENDPSLPPEAREMAKLLTLHIEALTRSIDATERKIAKAAAGSKSTRLLDRIPGVGPLTASAIAASVPDPGVFKSGRDFAAWLGLTPKQNSSGGKAKLGAITKQGNPYIRRLLVVGSTSVLRHAGKRKGALAEWIAALRARKPERLVAVALANKLARTCWAIMITGEFFRHEAFAKA

SEQ ID NO: 120105 - protein, 430 aa, unidentified
MEVIYPKACGVDVHKSFIVAVICDSTSVKPQYLRKRFSTFNNSLIEFRNWLLANDCQNVCMESTGKYYVPVYNALEGHISNVVVANPKWVRCIKGEKDDNKDAKWIADLFKLGIVRGSFIPNKDIRILRELTRYLYKLTNMRTSEKNRFTNALTVGNCKLDLVFSDIFGKTSSAIINTILSQNEYNDEDILKNIDWRCKSSNEDILNSISGISWESSQKQRMNVIQEHIDYLDKSIKTVREIIDSIIAPYESAINLLCSVPGVDRKSAITIISEIGTDMRQFSSHYRLASWAGLAPGCNESAGKKKSVKISRAGVYLKPALVEVAHCAVKDKTNPYYANKFNVLSKRRGKKRAYIAIARKILVAIYHMLSTGELFNPSDLSRVETSDKDKIKYTKNNFMQSTKQLISLGITIDELQTFLTSKISESTPVI

SEQ ID NO: 120106 - protein, 382 aa, unidentified
MTTDTTLQSEDNPLSNVLYISFELSKKSWKLGFSDGDFEHIKIREISSRDIEQLAKEVRWAEEYFDLAEDYEIRSCYEAGLDGFWLHRVLGDLGIQNIVVDPASIEVRRRKRRRKTDRLDARRLVCQLIRYVGGDTRVWSVCQVPTRQDEDDRRIERELKRLKNERTQHVNRIKGLLSTRGLYMEVNDELIESLDELVGRDRAGLGNQLKREIRREYERIQMVDQHIKAVEKERAHQIKQRRDDEKIKKVKFLEMLHGIGEDSAWLLVMEMFGWRQFDNRGQVGSYSGLTPTPHDTGQSRREQGICKAGNKWVRGRMVQLAWLWLQYQPDSELSQWYQRRFGDASRRQKRVGIVALARKLLVRLWRFVEDGEVPNGAVLTQS

SEQ ID NO: 120107 - protein, 432 aa, unidentified
MKKNRKRNLELITPTTLIVGVNGHAKSNTAAFCLASGDEPMRPMKFGNDRCGFMMFLDKVKWLMRKSGLNEVVFVLEPNGPYWLLLARFLAERNYTVKVVNPLQVKRNRQTDNPSPDKNDFRDARSAADLGRQGKFNQTNLLSQTYEDLRTLARLRDGLMEERSMQKHRLRASLVRAFPELSRCVSDICGKGAVALLRMAPTAGAIVSLGEAEVAKALKEGSRGRLGLKKARQIMQLAKDSVGYAAASPSLRMEFTATLDAMDFFSGKIEQIESEMKRLLWELNEAALLLSVPGIGEITAATIFGETGGLSCYETPSQIRKLAGFDLVGDQSGDYQGKLRISKKGRKLLRKALYQCAVSSLHCNETLKRFYDGLISPERSNRLKKKQAIVAVAGKLVDIMFSLVKSQEEFDPEHKWSAPAKKSDEVLEVAAA

SEQ ID NO: 120108 - protein, 356 aa, unidentified
MNEGSCVGLDVHARSVVAGVIDVGSGEVRSLRVPLGPDATVTWLKTLPAPVRVVYEAGPTGYGLARACAGAGISCVVAAPSRIRPAADRVKTDRRDAERLARLLRLGEIIPVRVPGPEEEAARDLVRAREDARGDLMRARHRLSKLLLRHGAVYDATAWTRAHDAWLRRQRFQSGPLAIVFDECYGRMVDAKTRRDALDEAIAELAATDPYVDVVERLVCLRGVSTLTAFALTVELGDWNRFRPESLGPFLGLTPSENSSGERRRQGGITKTGNTHARRLLIEAAWHQRRPPRLSVTLERRRTGKSLAVRAQAERSARRLHGRWHALEARGKPRSIVVVAVARELAGHCWALATVE

SEQ ID NO: 120109 - protein, 416 aa, unidentified
MFKIIRFNCCGLDVHKTWIFACIGITDANFRTEYFEARFSSFPKDLRQLAAWLQKYGCTEVCMESSGKYWIPVFNALETTCKVTLAHPKYTKPQKGNKTDRKDARWICDLFMCNMIKPSFIPPPDIRHLRDLIRYRTKLTNMLTSEKNRAQNCLTVSSLKLDDVFSDVFGKSARSITEYILAHPGEKFNVAPFVDKRCKTPIDQIQDAVDGAICPEQAVKLRECLNHIDELNTHQDRIEQEIFTLVKPYSVHLNLIRTVPGMNKDPMTAILILSEIGSDMSVFPTAKNLVSWAGCCPRNDKSAKHVKSTRISQAGSYLKPRLVQVANALLNSKDHPEIRERYRRIKSHRGHKKAIIAVCKMLLTAIWNILSTGEAYNASGYLIQTPRPTDETKVLTQKQALELLRLRGYVIKEESA

SEQ ID NO: 120110 - protein, 417 aa, unidentified
MSDNVRFYAGVDWATEAHQVCLIDAGGKVIDERAFAHGGVGLAEMCGWLETTSGAEPSAIVVAIETPHGPVVEILLERRFQVDAVNPKQLDRFRDRHTVAGAKDDRRDAYVLADSLRTDRHCFRRLRVEDPIVIELREWSRMAEDLQQERNRLANRVREQLWRYYPQALELGDDPAADWFLDLWAVAPTPAKAARLRESRAASLLKANRIRCIDAAEVVRILRQKPLVVASGTVEAATAHIAAVAARLKLVNQQIKQAHRSLDELCARLTESREQDAPGQRPEQRDVTILRSLPGVGRIVLATLLGEAAEPLRKRDYHALRSLSGVAPVTRRSGKRCIVLMRQACQLRLRAAVYHWARVAIQHDARSRARYAELRKRGHSHGRALRSVADRLLAVACAMLRTQTPFNPHRAAVADAA

SEQ ID NO: 120111 - protein, 408 aa, unidentified
MNTTLYVGIDVSSRSNVVYLMLPNGDKHSNFSVANSHEGSTQLVKRIHSALTSNSLDTVLIGLESTSVYGDNLVYFLREDATLAPFNRKIHVLNPRQVKKFHDTYNDLPKNDYVDSFVIADCLRFGRINKEVYMGDYHYKALQNLTRARYFAVQNLVKEKQRFMNVLFKKYSTMTQEKVFSDTFSTTALAVYDEFESAEALSNMDLHELTDFIIEKGKNRFPDPDTVAKAIQKAARSSYRLPKTVNDSVNQVLSISITSMKALESQIKEFDKAINAQMELLSNVLISIPGIGPVYSAGIMAEIGDINRFGNQAKLAKYAGLAWKQYQSGGFEAETTKLIPSGNRFLKYYLCEAALSLVRCDKGYSNFYHLKYKEVNRYQHKRALVLTARKLVRLVFRLLKDNRLYRSV

SEQ ID NO: 120112 - protein, 311 aa, unidentified
MTEHATVGIDIAKDTFDVFIDSTRQLLHLDNTPEGHQQLLSALSAITVKLVVMEATGRYHSLLAATLELAGLPVAVVNPRQVKNFARALGTLYKTDPNDARVICEFGRRMEPEARPTPDEQTQRLAGMVTRRRQLVDNRTMEINRYKSCDDVVVSVGIKRHIDWLTAEIRDADDDIDRQIKVMPLWREKATLLEEVKGIGPTTMAVLLAMLPELGTLNRHKISALVGVCPYAHDSGKMKGKRSIWGGRSAVRSALYMATLSAVRYNPTIRAFYERLIGRGKAFKVAVTACVRKLLTILNAMLRDNKKWVTN

SEQ ID NO: 120113 - protein, 346 aa, unidentified
MDMRTIGLDLAKNVFQIHGVDQSGKVVLRKQITRAQVAAFFVNLPPCVVGMEACGSAHFWARKLASFGHDVRLMAPQFVKPYVKGSKTDAADAEAICEAVSRPNMRFVPVKDPEQQALLAIHRARAGFVKARTAQANQLRGLLAEFGLIIPQGLAALRQRLPEIIEDAENGLPRMMRDLVGKLTAHLQLLDEQAAALEKQIQQWHRQSEASLRLAAIPGVGPITATALVASIGDARSFSSGRQLAAWLGLVPRQHSSGGKPVLLGISKRGDVYLRTLLIHGARAVISHVERRSDQATGWLKSLLGRRNRNISAVALANKNARIIWALLAHDRRYGMKETLPSTQCA

SEQ ID NO: 120114 - protein, 351 aa, unidentified
MIIIGVDYHPSDQYIAFVDTETGEGDERRLNHSDGEAEKFYRELAARGASVRVGMETTGYTRWFERLLAELGMELWIGDAAKIKTKRVRKQKTDRNDAQLLLQLLVDNKFPQIWVPSPENRDLRQLLWHRHRLVQMRTRIMNQLQALAMNEGQRRKKKLWSEAGRAQLEKLALAPWASRRRQDLLELLDRMNPSIEGLTAAIEQEAKKWPEVLRLMTHPGVGPITALAFVLIIGTVERFQCGKQIGSYVGLIPCEDSSAGHQRLGHITKQGSSLLRFLLGEAAQAAARCDADWRRRYLHLAMRRQRNIAKVAMARRLGVRLYWMWRNGWEYAQWVKFSSHAGQLGTGQGAK

SEQ ID NO: 120115 - protein, 347 aa, unidentified
MRFYTNQHPFYCGIDLYARSMYVCILDQSGKVLVHRNMQTTPEAFLQAIAPYRQGIVVAVECMFTWYWLADLCADEGIPFVLGHALSMKAIHGGKAKNDKIDSQKIAALLRGGMLPQAYVYPAQMRATRDLLRRRMHLAHKRAELLAHVQNTNSQYNLPAIGKKIAYKTNREGVAERFADPAVQKSIEVDLALITYYDELLRDVALTIVKTARHHDANTLYLLQTVPGIGKILSLVLLYEIHELARFPRGQDFVSYCRLVKCAKESAGKRHGTSGSNIGNAHLKWAFSAAAVLFLSDHPAAQKYLTRLEKKHGKGKALTILAQKLARAVYYMLKSKVAFEKDTFFQQ

SEQ ID NO: 120116 - protein, 337 aa, unidentified
MEHFAGLDISMKETHICVMDRDGKVVLETKAVTSTAAIAAELAKAPTVQRIVFETGRMATTLYHSLNALSLPVVCIESRHAHQALKSLATHKTDRNDARGLAHLARTGFYKPVHVKSLPAHAVRALIIARKKLVGQRVTLENQIRGLALVFGIRLPRGLSPAFARQVNTASGELAALSGALRGLLAARDALLAAIATINRDIKRLAHSLEACRRLMTIPGVGHLTALAFVAAIDGPDRFRRSRDVGPYLGLVPRRWKSGEIDYTGSISKVGDQRVRTLLYEAANVMLTRYRGNLALKDWALRVGRRSTMRKARVALARRLAIIMHAMLRDGTEFQAV

SEQ ID NO: 120117 - protein, 400 aa, unidentified
MRAVFGIDVSKASSEVAILVNGEKVHGYTMSNDALGFARLLGDLKTVHKPEIIFEATGVYSRRLQAFLDEHGYAYTRLNPLEAKKQLDSLRVRKTDKIDAEKLAQSQFVLNRKPTYVQEEVYQELRDLSRFYQNLTEDIVRAKNRLHKVLQVTFPEIETVLSKPTGEQYWNLVTAFPCKDFVLELSKDELLESIRQSTSKRISDKRVAYLAEKLIALANQSYCAVKKTSPILEEVRYYAKELLRLSERRQAVLDQMVELAQPLPDNDILLSIPGIAETTATSIIGELGDIRRFQSTNQINAFIGIDLRHYESGNFLAKEHITKRGNPYARKILFKCIHNIASASHTNPCHIADFYEKRKRQSQTTSTKPHTIASIHRLIRTMYYLITHNKLYDYRSTQNQ

SEQ ID NO: 120118 - protein, 377 aa, unidentified
MSKLRFVGLDVHADTIAVAVAEAGGEVRSLGVIPNRLESIRKMIGKLAPVETLKCCYEAGPTGYVLYWQLVQLGVACEVIAPSLIPTKAGDRVKTDRRDAEKLARCYRAGELTSVWVPDANHEALRDLVRAREAAKKDQLRHRHRLGKFLLRHGKRPTDAGKAWTQKYLNWIRIHVHFEQPALEATLKYYREEVDHIAERITKLEQAIDEAVKQAPPEIRAVIEALQALRGVAQTTAATVFSELGSLSRFPNPSQLMGYSGLVSREYTSGNRVQRGAITKSGNAHLRRVLLEAAWTYRHRPNVQGRVLRRQKSLALSEEANRIAWKAQQRLHKRFAALTARGKESNVAATAVARELLGFMWAIAVHTEAQHQQAKAA

SEQ ID NO: 120119 - protein, 314 aa, unidentified
MLDTTTFIGLDVHARSIKAVSLDVMTGEVRAATFGYDAGAVAGWVRSVDPRARCVYESGVTGFDLQKRLSGLGVDCVVGAVSKMIKPSADRRRKNDRNDAEFLARMLSVGNVVEVWVPDDECEAARDLTRALEDARDDLSRSKQRLSKFLLRHGLVFDERTPTGRRKGNWTRAHWSWIESIRFAERADNDVLAYYVDAVRRAAEEKARLEGLVEAEARKPRWRRRVDSLRCLKGVDTASAADLVFEAGEFSRFRNARSFAAWVGLTPSEHSSGESDRRGAITKAGNKHLRKALVEAVSANLKLTTFANESRRMR

SEQ ID NO: 120120 - protein, 433 aa, unidentified
MLKLNYMSTLFVGIDVSSKTNAVYAMDFEENKYISSSFGNNQPGADKLVNMIAECMHKHKNLDTVLIVLESTSVYSVHISNFLSTSEVLMPYKPYVFCVNPKATSNYRKSYIGMEKTDPTDAYLIADFGRVGRTKKLEPWRGGQFISLKRLTRHRMHLSECITREKTYMVSNLYLKFSELQLLEGDDKPFGSLYGATSSAVLTEFLSPQEIIDMPEEELLTFLAGKSRNRISDLSKTSELLRKAARDSYRLDKCMYEPLNVSLASSFNCIHAYQKEIKLIEQAIEKCINGMNPNALIILQSIPGIGPIWASGILSEIGDITVFHSSDALAKYAGLYWPKGDSGDFTSEDNKMSKAGSPYLRYYLGEAANSVRKHIPEYADFYARKYAEVTKHQHKRALALTSRKFVRLVFGLLAKNQLYTGEKLDTEYNIESN

SEQ ID NO: 120121 - protein, 344 aa, unidentified
MDHFAGMDVSVKETSICILDDAGKIVKEVKVASEPQALLKVLGNPAYRFKRIGLEAGPLSQWLFSALAEAELPVICVETRHMQAVLKAQINKTDRNDARGIAQMMRAGVYRPVHVKTLRSQKLRMLLTHRKLLQSKAIAIENDLRGTLRNFGLKVGMVGMVGFEARIQALVATIPDLAMLVEPLLVVRRALREQIVILHRRLLAIVRDDEVCRRLMTTPGVGPVVALTYRATVDVPARFRKSKSVGAVFGLTSSRHQSGEIDWSGRISRCGDEMMRVMLYEAAQSMLRSKKWSWLKAWAMQIARRRGMKKAIVALARRLAVIMHRIWVDGTEFRWSRGPATAAA

SEQ ID NO: 120122 - protein, 349 aa, unidentified
MVTIGVDPHKKTHSAVAVDVVGAALDGRTESAKSDGFGELLIWARQLPDRERVWVIEDCRHVSGPLERFLLDRGETVVRLPPRLMAGARQSVRERGKSDPIDALAVARAALREGLDTLPAARLAGVELEIRQLAVHRERLVDARTRLINELRWQLHDLWPEWEIPKRVLIGGRWQQQVARRLARAEQTARVRIARDEIRRIADLTRTINQLHQELAHLVAQTAPQLLAERGLGALTAAKLIGEIAGIDRFTTDAQLARLAGCAPIPVSSGRTDRHRLDRGGNRQLNHAIHMLALSRIRHDPQTALYIAKQRRNGKTNREAIRNLKRHLTRRVYNLLRNPDQTPTTVCLT

SEQ ID NO: 120123 - protein, 345 aa, unidentified
MKITTIGIDLAKALFQVHGVDTHGKVVLRKQVKRKDVVSFFANLEPCLIGMEACGSAHYWGRKLSGFGHTVRLMAPQFVKPYVKTNKSDRNDAEAICEAVGRPNMRFVPVKTAPMQAVLSLHRARQGFVRARTAQGNQIRGLLAEFGIVIPMGIGHIAKRLPEILEDGENELPGMMRALLKRLGENLKDMDQQVGELECQILLWHRDNEASRKLEAIAGIGPITASAMVAMLGDAKSFKNARQVPAWLGMVPRHEGTGGKVKLGGISKRGDVYLRTLLIHGARAVIAHSERKPDQADAWLKKLLARRNKNVATVALAAKNARIAWALLAHERSYQHDYVATRKAA

SEQ ID NO: 120124 - protein, 310 aa, unidentified
MDKIHVGIDVSQATLDVAISNQKEIKNFPNGESGITQIVSYLKKQAPTLTVMEATGGLEKLLAAALVEADIPVVVVNPRQVRDFAKAKGKLAKTDSIDATILAEFACDIHPEIRSLPDKATEEIKALMVRRQQIQGMITMENNRLWSAGLKVIPSIQEHINWLKRELKNLDKDLEDKIQKSPIWREKDDLLRSVPGVGPVLSLTLLGSLPELGSLNRKQIAALAGVAPFNRDSGRFRGKRATKGGRARVRTVLYMATLVATRFNPVIKAYYQNLLDKGKAKKVALIACMRKLLTTLNAMVRDHHPWQYAN

SEQ ID NO: 120125 - protein, 394 aa, unidentified
MILVGIDIGKHQHIFSILDKQTGEILSNPSVFHNNQEGFLLLIRKLNSYAKSQLLIGMEDTGHYHFALLKYLLDRHYTVALINPTTTDLTRKLQGGITKNDPLDSLTICDVISSNQRKKPYRITKVNRFDLYEQKQLTRHHHNLKEELNIYKNRLQKCIDIVFPEFNSLFRSKYGIVYMNVLKTFASAEKIANSDIRTIRKCFEYEGRGKRIQLSAEQLKTTAKASVGISSVAEEIQIRHLVCQIEMIEEQLSEIDKKIEEFSLQNNSPILSIPGISHFSGTSILAELGDICNYTKASQIIKFAGVAPYHYESSQFLARHTAITKKGSRYLRKTLYQIILPVINHNRVFTAYYNKKLAEGKGHRCAQGHCIRKLLRVIYHLLSTGQSFDPALLI

SEQ ID NO: 120126 - protein, 410 aa, unidentified
MDVMYERCCGLDIHKQLVVACLLTPGAGAQPTKEVRSFGTMTADLLELADWLGAAGCTHVAMESTGVYWKPIYNLLEDQFTLLLVNPKHFRAVPGRKTDVRDAEWLADLLRHGLLRGSYVPARPERELRELTRYRTALVHERSDEINRLHKTLEGANIKLGSVASDLMGRSGRRMLAALAAGTTDAAALADLAKDKLRHKLPELERALTGRMGAHQRFLLQQQLAHIAFLEQTIEQVSTEIQERLRPFEAELARLETIPGIGRRVAEILVAEVGTDMSRFATAGHLASWAGMCPGQNESAGKRKSGRTRRGSPWLRSALIEAAHGAARSKGTYLGAQARRLKPRLGWKKTMVAVGHSILVRAYHVLQRGTTYEEPGADYFLERDRHALERRHVRALERLGYRVALEPDAA

SEQ ID NO: 120127 - protein, 359 aa, unidentified
MEAQRKALSFKGQNIYIGIDVHLKSWSVTLMSEATQLKRFSQSPDPDALYAHLVRNYPEAEYHSVYEAGFCGFWIHYRLVGLGIHNIVVNPADVPTTTSEKLRKTDAVDSAKLARSLRSGELKGIYVPGSESLETRSLIRLRDSITKDQTRLKNRIKSHLRYLGIEIPEEFSGPGRCWNRRFVVWLKGAETGTAYGRQTLDFIVRQYEALRGQRLEMLRAVRALSRTERFEKPLENLMTVPGIGQLTGMSLLSEIDDIRRFKSADQLAAFIGMIPMCHSSGEREGVGDITVRRSARLRSVLVEASWVAVRQDPALSMAYGNYCKRMAPGKAIIKIARKLVNRIYFVMKRNQPYVKCVVA

SEQ ID NO: 120128 - protein, 411 aa, unidentified
MLEVKEERCAGIDVGKKFLAVCVMIGPANQKPAVEVRRFGTTVKELERLRTWLQETRCTEAVMESTGSYWKPVFNVLEGQLKIILANPEQVKALRGKKTDPNDSRWLASLLRHGLVQGSFIPPRDIRELRDLTRRRRTLLSDGASERNRVQKILEDANVKIGDVLSDVFGVSGQAMLEALLENKRSAAEIAELVHWRLAPKIPRIVEALEGHRMRDHHRLLIRQSLDHMQYIEKMISELDAEIAKRLRPYQKQIELAGTVPGIGATAAASILAETGMDMSPEGPFLDCHHLASWAAICPGNNESAGVRKSGRTRRGNRWLRATMQQTAWAGVAKKNSAFQFRYQKLKLRRGPQRAVTAVAHAQLIAIYWTLRNGTPYQEQIRQIEEDRRKAQIRHHLHQLTKLGHELGEVI

SEQ ID NO: 120129 - protein, 418 aa, unidentified
MSLALPEALFFAGIDWAAETHAVCVMDAAGKIAAEFTIGHSADGIATLIRRLARYGDPGDLPVAIERPDGRLADLLLEAGHPVVPVRPNAIRTWRDGEVLSGAKSDAADAAVIAGYLRLRAHKLRVAAPCSESDETRALRTVVRTRGDLVEMRVAATSQLPALLDAHWPGARAIFAGVESPVSLEFLTRYPAPAAAAHPGEKRMAAFCVKHGYSGRRTAAGLPARLRSAPAGTGREALTEALRDAVLAAAGVLIALNASVKNLDRSIAAHLGEHPDGAIFTSLPRSGQVNAARVLAERGDARQACGHPGSVAALAGCTPVTRESGKHRAVHFRWACSKRFRVAITTFADNSRHASPRAAKICNDARASGKDHPHATRVLARARIRVIYRCWLDGVPCDPAAHGTAAALARQTTERIAA

SEQ ID NO: 120130 - protein, 358 aa, unidentified
MSVYVGIDVHRKRSQVAVIDSGGEVLANRNVPNGTETILGVIGGLPPGTPAAFEAAFGWGWLLELLEDYGFDPHLVHPLQCKAIASARLKNDKVDAAILAQLLRADLLPEAWIAPPAVRQLRALLRHRAQLVRLRTLLQNRIHAVLADHGQDRPSGCWSGPGRGWLASLELPAVSREVVEDDLALIDALQVPIDRLDAEVRQRARSDPRVKILTQLPGVGTFTALVILAEVGDITRFGSARKLASWAGLTPTVRGSDRTVRHGHISKQGSAWLRWILCEAAQTAKRHPDYAASYAAIARRRGKKIATTAIARKLLTRAWHLLTDAERTASHQATATTSAPRAPGRDAVTSREGSPGPG

SEQ ID NO: 120131 - protein, 413 aa, unidentified
MSQKAYLGIDLAKGPSKVAAIDEDGDEIVSPFSISNSREGVEKLMSKLHSYKKSDIICAMEVSSNYWENMYSYFNQKDISCILLNPYQVKKYRQALGSKIKTDSIDAAAIASLVRAKKYDSLCVSDEAVLELRELVRMKHSFGRRVKDLKRSVLALLYLTFPEYTKIISYPFSKVSMQILSKYPTSFHMAKDGTVGRLVKIFRRYQGCNFGADKAKELIAVAKDSFYSGKASKSRGMSICMQIEEIASLSLKISEIESEIKSILNPDDPKDGYRQDFDILNSIKGVGIGTIAAFIAAVGDVSRFSSSDKLVSFIGFYPKIFESGKYKKKNPTIVKAGPKDLRYMLYMSSVAAVKHNSHLKKYYYDMVSAGMPVKKALIKVAVKIARMMYSMLKYKQYYDPCRVFLQQAPAVAA

SEQ ID NO: 120132 - protein, 338 aa, unidentified
MKLYMAIDLHSTNNYLAAVSEDGKPIMNKRLRNDPRDILETLAPYKPEIAGIAVESTYNWYWLVDALMAEGYRVHLANPTAIKKYSGLKYADDKHDARWLAEMLRLGILPEGYIYPKEHRSLRDLMRKRQHLVRLRTSLLLSLQNIITRNCGIKVGGNTLKRQAEPVEIHLSSSRELALAGTVSKELIDHLTRQILILESHIERQVKDLVSYRNLMSIPGVGKILALTIVMETGPIHRFAKVGSYASYCRKVISRWVSNEKTKGKGNEKNGNKYLAWAFSEAAEHARRYDPQSRAFYERKKQQKNLMVAHNALAHKLARAAYYILRDNVPFDAARLYA

SEQ ID NO: 120133 - protein, 345 aa, unidentified
MIPVASDVHKGRCWMAMIPPGEDVKMLEPIECTREAWKERLAELPPEAEIALEVSTSGYFVMSVLEEAGWRERAHWVHTAGIDSLRKQKSDRLDTRRLVKKLAVHDVEPLPEAWFPPPPIRALRLLARQRCGIARLRAQTKNRVNSLLEMHGLRPQRCVFTAKGRAWIQQQALSAAQLCFQRLFRLYDFLSAEREISEAELLAAAAAFPQVALLQTIPGLGHMLAAVVWSEIGDLDCFDSADALSNYTGVVPSSYDGGEVSVHGPITRQGPVWLRWALVTAANAVTRSKSPLGQRYWHLRRCHKHPHVAKTAVAGSVARCVYGVLKHGVPFQVERWGRRAGKLGQ

SEQ ID NO: 120134 - protein, 352 aa, unidentified
MKKNIISVCEVPERTIGIDLSDRTFRYCALDRGGKIVEEGERKLNPESLGKFLAAQPAARVAVETGAHCAWVEALAQQLGHEAIVANARELRAVTGRSHRSDSQDARQLARLARVDGELLNPVRLRGAEQQADLFVIRARAMLVEARTRMINFARGIVKTTGRRLPSADAKNFAERARQAVPEALRPALLPLLNVLDQIAKELDGYDENVQALAEERYPETRFLRQVPGVGPITALTFVLTLGDPARFAHSRDVGPYLGLVSRRRQSGEQDPHLRITKCGDRYLRQLLVQCAHVVMGRFGPDCALRRWALEHAGGSRTAKKRTVVAVARKLAVLLHRLWLRQEEFRPFPAIG

SEQ ID NO: 120135 - protein, 345 aa, unidentified
MTIKTIGLDLAKQVFQIHAVDERGQVVMKKQLARAKLVAFFANLPPCLVGMEACSSAHFWANKLARFGHDVRLMAPQFVTPYVKGSKTDHADAEAICEAVQRPSMRFVPIKQPEQQALLALHRARQGFVKARTAQANQLRGLLAEFGIIIPQGISKLFQQLPILMEDAEHGLPDMMRELVCRLAAHLRLLDSQAKELEQRIEQWHRQSESSRRLAAIPGIGPITATALVASVGNAHAFENGRQLAAWLGLVPRQHSSGGQPVLLGISKRGDVYLRTLLIHGARAVIAHAERRIQNGTNWLSRLLSRRNRNVVAVALANKNARIVWSLLTSGRDFESGHLSFPAVA

SEQ ID NO: 120136 - protein, 430 aa, unidentified
MKSNTQNAKIEAITEKTLVLGIDVGSEMHYARAFDYRGIEYSKKPFKFSNTEAGFVTFKEWILDLKERHEKDKVVLGMEPTGHYWFNLGKFLQDNEMKPVLVNPHHVKKSKELDDNNPTKNDRKDPKVIAGLVREGRYMIPYLPDGVYADLRTASNIRFQLQAELTRIQNRISRWFNIYFPEYKTVYGKPDAKSGMLILKAAPLPEDILTLGIDGVNQIWRDAKLRAVGKARAKTLIEAAEHSIGSKEGTMSARMEIRMLLEDYESKNMRLQEVMVLIEELVKEIPMAEKLLEIKGVGIRTVSGFLAEVGDISRFNNPKELQKLAGLALVENSSGKHKGKTTISRRGRKRLRYLLFEVAMSLVAKNPEFRELHNYYTTRRLNPLKKMQSLMAIAAKLIRVFYAMLTKGVNYDPKKMVNDIKRPAVYLQTA

SEQ ID NO: 120137 - protein, 351 aa, unidentified
MNKVSTLAANGNGENIPTVIGIDLAKNVFALHAINRYGKPVLVKPQVRRDQLLDVLAQFPPCVIGMEACSGAHHWAREMIALGHTPKLMAPKFVIPYRIQGKRGKNDANDAAAICEAVTRPNMRFVPIKTVDAQSILTLHRVRQGFVEERTATINRIRGLMSEFGIVLPQRAEVIRKQAQLAAEKMPSWAASAVYDLLAHLVTLDMRVAEYDEHLKRMANRDERCKRLMALTGIAHITATALVASIGNGHDFKNGRQLAAWLGLVPGQYSSGGKVKLGHITKAGDRYLRTLLILGARAMLANAVRKNDRISRWAVALQARAGYGKALVAIAAKNARIAWALLAKGEAFEPA

SEQ ID NO: 120138 - protein, 352 aa, unidentified
MRRPKEQVAEGEDLFVGIDLHKIRWHVTIRTFDVELFSASIPGTWEALHRVLARYPGHPLQAVYEAGYFGFRLHDRLVAHNIPCIVTPPSLVPQEYGNRVKTDRRDSSKLAHLLAKGMLKRVWVPSEEELYHRQVIRRRRQLVRDRVRTQSRIKAELSFFGIRLEEPRGRWTLIYFETLQSIRFGNRWMQESFNRLLEQYEFLSAQIDKQTQLLRELSETELYQERVKILQSTPGVGLISAMELLLELQDVSRFRRAEQLAAYVGLTPSQYSSADKVRMGRITGIGKNTLRAILVEASWKLITKDQVMREKYERIKIRSGGKRAIVAIARTLLLRMRRMLLDGRAYALPLAA

SEQ ID NO: 120139 - protein, 363 aa, unidentified
MDEAWAGVDAGKEFHWAHVLDASGTELLSRKVENDEADILRLIDDALSLAEEVLWAIDQPGGGAALLLALLWERDQKVLYVPGLSVDRARDTYRGESKTDARDARVIADQARMRPDLGELGPGEQEISELRLLLARRRDLITDRSRIITRLRETLLSLFPALERALDLNGKGPLTLLTHYQSPAQLRRAGHKRVATYLRNRGVKGSANVASKVLSAAESQSVILPAQEVASRIVAELAEEVLAFKERIESIDEEIGQRFFARPEARILNSLPGMGPILGAEFLVCVGDVSAFESADRLAAYAGLVPAARDSGKRVGNRRRMRGGNKTLKRVFYQAAFASLRGSTESRVFYDRKRAEGKRHKQA

SEQ ID NO: 120140 - protein, 342 aa, unidentified
MQISIIGLDIAKHVFQVHAVDAEGHAVAQVRLRRGQVLDYFAKLPPCLVGMEACATAHHWARELIGLGHQVRLMPPTYVKPYVKRNKTDAADAEAIAEAVIRPNMRFVAVKSADQQAALMLHRVRELLVRQRTMLATALRAHLAEFGIIAPQGIHRVEKLAGEVESPAVPALAREALMLLVDELADIWRRIEAIEARLVALHRADEVSRRLASIPGIGPITAMAIANTVPDPTMFRSGREFAAWLGLTPKSHSSGGKDRLGRISKRGDRYIRHLLYVGAGNAVRFAKPRAATGEAWIEALQKRRPPKVVIIAVANKMARIAWALMMRGGTFRSPTAAVAAAA

SEQ ID NO: 120141 - protein, 458 aa, unidentified
MTRHARPPHRTGPLSVIHPHAAGIDVGATEHWAAVPGGDPAPVRRFGACTADLEQLADWLAGCQVTTVVLESTGVFWIPLFELLESRGFEVRLVDARQMRRIPGRPKSDVHDAQWLQRLHTYGLLAGAFRPDEPVCVLRSYLRQRAMLVTYAAQHIQHMQKALTQMNVKLQHVVSDITGVTGLAIIRALVAGQRDPTELAKLRDDRCGHSAADIARALYGTWRAEHLFALKQALELYDFYHRQMATCDRQIEQQLQQFADKSGGQPLPPKARRRRRGGNRPGFDPRGALYRMAGVDLTVIEGIEESTALVVLSEIGTDMSRWPSAKHFGSWLGLCPNHRISGGKVLSRRTKPCANRAAAALRLAAQALHRSQSALGAFLRRLKARVGAPKAITATAHKLARLVYSLLKHGTAYVTQGMEEYERRYRERVVRSLSRRAKELGYALVELPAPAAAQPLPT

SEQ ID NO: 120142 - protein, 401 aa, unidentified
MKTVLSVDVAKNKSMIMLMNSDGEILIDTKEIKHNLEDFEKAKEEIKEISPENLTVFMESTGTYHLPVERYFKENGFNTLVINSLTTKNNYDTIRKTKTDKKDCYRLAKLFFVNEVEYHELSKKDLYANLKAMTRQYFYLLQQNVSCKNRYKRLLNICFPELEKIFKSTRIYDDTALNFIKEFPHAEIVKEKRIDALYNNLYKTNGRNLNFYKRLSETIKIASANSYPGVDKEHKDVKNLSDMAKIVQNNNNVINELRDKMIETAKKSPYYEIINSFYGIGEILTAEILGELGDITRFDSPKQLIAFCGLDPIIKQSGKSINVKGAISKRGNKYARYILFNCSQMVVKLGASNYPEHPVYIYYQNKKAEGKHYYESLTACSTKILRMLYSMCKNNKQFLEN

SEQ ID NO: 120143 - protein, 489 aa, unidentified
MNFTALTATVQPNLDVNYIGMDVHSDNVVVCVRRNTINSSGQLVGKTIKTKKVVIKSSQEPLVELLSKYADGQQHIMTAESTFNWYWLADIAEDRGWNFRLADPCTVSQANIKAANDETDAEYLADRLRTGSLKSTSVLPRQLRGVRDLMRHRLRVMQEVSDKKVRLSNLYHNHCAHPMHGKLLTALQDAYDEISVDAVLESGICNNGSELIIGDLLTGLREAEARLAKIEAAVYERIDEVDEYKAERLLLKTSMKGCGDVLSAIIVTEIGDISRFRTMGDFVSYCRLAPTSKLSNGKSKGQGNAKNGNAYLSWALTELATLMARFNEPIRRYLERKQDKTGLRVVAVRALAAKLARCVYQVLRKNESFDLALAFGGKPTRAPTALAEKPAAEVVQSPQEPEVPPITTAPEPHLQAPLSEAPIVVKEPSPVKAKRGARKKAVSPASSAPAVTAEGRQTARKADRVKARCALTATPPSCAGTSCVKSRRE

SEQ ID NO: 120144 - protein, 368 aa, unidentified
MKQALFAGIDLHSNNVMIGIVDQSGRRLKHQKLGCDLNEITSFLEPWKPQLKSVAVESTYNWYWLVDGLRALSYPTKLADPAQIEQYSGIKHADDKNDAFFLADLQRLNILPTGYIYDPALRPVRDLLRRRLGLVHQRSALLLSFKSLYARTTGQAMSLSRLKAMEPNDTKTLYRHPANCLIALLQKEHIDKLCQSIELIEKSVLAQARELPCYQKLLSLPGVGRVLGLTITMEVGEISRFKTPGQFASYCRTVNSQRLSNNKKKGDNNRKCGNKYLAWAFVEAANFAKQHHQHCRRWFDRKAARTSKVIATKALACKLAKAAWYLMSQGSDYDPERMCPEGAMKEEKLKFVRAAASQKIGVGKNPFD

SEQ ID NO: 120145 - protein, 483 aa, unidentified
MKVWSEVRYRVLHAEAGEVGNALEQLKPSGSMAWDALESEQMCAASPAREAAARNGAFDSCASSASAPETTMIRRIIAGIDVHKRVLMVVIGVLDEAGESLRFEGRRFGTTTAELGHVTAWLQQYGVTEVVMESTAQYWKPVWLALEAHFRLCLAQAWSNRAPRGKKADFKDAERLVRRHLAGELTLSFVPDAEQRVMRSLTRRRSQLTRERVRIQNQVESLLEETRIKLSSVVSDLFGASGVRILTALAQGTTDAAELAKLADARVQRSPAELAEALTGVFGDIPRRLLRQHLDQLELVDEQLEQLRSMTADAMREHMEAITRLVDIPGIRTLAAQQIVAEAGPGAAAFASSAQFSSWIGVCPGREESAEQNRSSRCAKGNKYLRSALCQAAQAAVRTKNSFFEHKFRRLLPRLGYVKAIWAIARHLSVVIWKILHEKAHYVEHGAASTPQARKRRLQRLQKEFRALGYAVELKPLPEGARA

SEQ ID NO: 120146 - protein, 403 aa, unidentified
MVYVGVDWAEAHHDICVVDEEGLVLAKRRVPEGLEGVGKLHALVAEHAEDPAMVVVGIETDRGLLVGSLVAAGYQVYAINPFASSRYRDRHATSGAKSDAGDARVLADLVRTDRHKHRPLAGDSNLAEAVQILARAHQGLVWTRQRQVNQLRNALREFYPGALTAFDDLDAGDAVAVLERAPTPSLGRTLSQAKIISALRHGGRTRNLEAKAAQIQAKLRLPQLEVPALLAQAYGHSVVATVAVIKQLNLQIAVLEQELASNFEMHPDAEIYLSLPGLGLVLGARAMAEFGDDRTRFLNPKARKSYAGTAPITKASGTRKVVLARVARNRRLADACYLWAFSALTRSEGARHRYDLLRARGQTHHQALRALANRLVGILHGCLTNREAYSEHIAWSAHVPVAA

SEQ ID NO: 120147 - protein, 330 aa, unidentified
MKKDRITLGVDVSKKTLDICHWGTHDFIKIENNSSGFKQLAKWMRGKGFVSSQVFFIMEYTGGYEYRFLQYCESKGLSYTRKSGLEIKKSMGMVRGKSDKQDSFRIAQYGEEKAYMLEPSGKLNSTIFDLKQLISFRKRLVRAMAGYKASSSERKAMYGKDAGKVILKVSKTMIDVYKKEIYRVEREILQLIESDESLNRNYQILKSVKGIGPINAWMTIVYTENFKAFTDPRKYAVYAGVIPFEHTSGTSIRGRKRVSHMANKAIKQELNQAAKIAITHDKTLREYAQRKLTTKAYPLVLNNVKFKLILIMFSLIGRQEMYREDYHYAA

SEQ ID NO: 120148 - protein, 368 aa, unidentified
MPRMAEQALPVTGGVDTHADVHVAAVVDQVGRVLGTEAFPATAAGYQAALAWMSAHGELAKAGVEGTGSYGAGLARYLAACGVEVVEVIRPNRQARRQRGKSDTADAVAAALAALNGEAAGVPKSRDGAVESIRALRVARAGAVKARTQAGNQLRDLILTAPEQVRQQLAGLSRERQVEAAARFRLRDLADPAEGVRAAIGSVARRHHELTAEIARLDAMLDELVHHAAPAQFLAKKGVATQVAATLLATVGDNPGRVRKEASFAALCGASPVDASSGKQIRHRLNRGGDRQANSALWTIAMTRLAHDPRTRAYMARRTAEGKTKKEVIRCLKRYIAREIYKALCRPRQPGSASAPQVKQHVPARLLT

SEQ ID NO: 120149 - protein, 354 aa, unidentified
MRRSKAYIAVDVHARHCVMGWRNGRGQWQGAERFDTSEKGLREHLVKIAAAFKIVTIEESTLAAWVARTLQPEASEIIVCDPRRNESVHRDAFKNDGRDVEELSRLLWLGQLKGVYHPQDDTRAVFKALVQQYLELRDTQVELKQQLKAKYHRWGVTAVEGDRVYNTTEREGYLDQIADGSVRHQLHRQYALLDVAVKQQADAYRELLACGRRYPEIAEFLKIPGVGPVSAHVFDGFIQTPERFAQKSALWRYCQLAVTDRSSDGKPLGFRRLDPQGNPQLKAMSYWAWKGALQTRTPNEVKTFYRASLDRTHDRTHARLNTQRKIVATMWAIWKKGEPYRPERFLNPADAVER

SEQ ID NO: 120150 - protein, 331 aa, unidentified
MNNDLCRNDIVMEKVIFDQVVKVGCGIDVHKDNIVATVRKSEKEYETREFSSFTSSLTELREWCKTEGVTHIAMESTGVYWKPVFNILEEGEFEIILVNARHVRNVPGHKTDKKDSQWLSKLLLSGLLKASFIPPIEIRDLRDLVRYKKKVTAQASSEKNRIIRILEDANIKLSSVLTNVDGAVGSHIIDDLIAGKTNVDGLMQHYHGQIKASKEEFRKALQGRLTKHHQFMLRVLKESITDKEKLIDKLDKQIDEMAKQYAVEIELLQTIPGVAYDSAVGIISEIGADMKQFSSEQHLSSWAGMSPGNNESGGKKKAQKPSTGTHICKPS

SEQ ID NO: 120151 - protein, 338 aa, unidentified
MRKFIGIDLHSNNSVVVITDEEDRVVCQKRLPNQLEAIEAALAPHREETVGVVIESTYNWYWLVDGLMDVGYRVHLANPAAIKKYEGLKYSGDFADAAYLAHLLRLGLLPEGYIYPREQRAARDLARKRMQLVRQCTAQVLAIEGILMRQSGARQSSNAIKRFTVEQVEALPFAPDVVLALQANRAVSEVLQQQIAALEQRLQERVRLRPEYRLLRTVPGIGEVLATVIMLEAGPVSRFAQVGNFSSYCRCVDSLRESNGRKKGEGNGRNGNKYLAWAFVEAANFALRYCPQAKSFYERKKRRTHGVVAVKALAHKLARACYHILREQKPFEVKRCFA

SEQ ID NO: 120152 - protein, 337 aa, unidentified
MIVVGVDVHKQSLTAVAVDEVGRALAEVTSADVAALSAWSASLDDERLWAVEDCRQLTRQLERTLIDAGERLVRVPPKLMAPSRRVGRVRGKSDPIDALAVARAALREPHLDHPRPGEQRLRELKLLVDHRDDLVDERRRAQQRLRWHLHELDPQLVVPAGALDRTVWLDRLARRLARQEQTVLVGIARELLRRCRSLTRTILEVESELQQRTSKTAPALLALPGCGALSAAKLLGEIGPIERFQTDAQLARHAGVAPLEASSGSHRRHRLDRGGNRQLNCALHRIAITQARIHPPARVYLARKQTEGKSRREALRCLKRQLARTVYTTLKNEPLLT

SEQ ID NO: 120153 - protein, 326 aa, unidentified
MLDPTTGEIIERRLEHENREAKNFYATLPSPARVGIEATCDAQWFERMLQEHHHELWIGEAAEIRAAMVRKQKTDARDALHILDLLLANRFPRIWVPSPAERDLRQMLRHRHKLVRFRTSVMNQLHALAMGQGLCRRKKLWAKVGRKELEGLVLDPWASLRRKELLQLLDQLDPWIDKLDEAVIRSAESRPPAVCLMQQAGVGPVTALAFVLTIGPVSHFANSKRVVSYLGLNPSEESTGGRQRLGAITKQGNPMMRYLLVEAAQTASRLDPELRRDYQRLKFRRGSGVAEVAIARKLAVRLYWKLRNADQPVPSARMRAARQLLW

SEQ ID NO: 120154 - protein, 316 aa, unidentified
MSESMSFVGIDVSKNVLDVHVLSTGEHWQVGNDQAGCASLVERLKPLGKTMLVVMEATNVFWRMAAAALAGAGLACAVVNPRQVRDFAKSMGILAKTDAIDAQVLAQFAQRVKPAVRALPDAQCQVAAELLARRAQLMGMRVAEKNRLGTANAKKVRKDIEATIAFLEKRLAALDEEIDRWLKSTPIDQSRADLLQSFTGIGQNAARSLLITLPELGRLSGKQIGALAGLAPFAKDSGGKRGQRHIAGGRAVVRAALYMPALSAITHNPVIRALYQRLVQAGKHHYVAITACMRKMLVILNAMLRSGKPWKASHHA

SEQ ID NO: 120155 - protein, 346 aa, unidentified
MENCTYVGLDLSKTSTMATAVDPLGHRIRQEKLGVSDEELLRFLGEIPGPKQVVMEACNVWEHTYDAAASTGAEVLLANPLKVKLVSKTTLKTDKVDSEKLALLARLNAIPESYAPSPEQRALRRLVRERVFYHAKWKAVASHTYALLLQKGIPYRPEILTRRRLRGELRVHNIVEVNRGLDTLEKIEEISVPLDREIHRAYLASREAQLLATIPGVGEFTSMTLVAFLFPIERFYSLDAVVKYCGLCPSVRQSGERAFHGRLVWDCNVILKWVLIEGQWNVRLRERKGDVSRVARRVARRGAANDGAVAAARKLVRICAAILRRGTPYQPESPGSSSRQVGHAAS

SEQ ID NO: 120156 - protein, 415 aa, unidentified
MFKIIRSKCCGLDVHKTWIYACIGIADSNSRVEYKQARFSSFSKGLKELSEWLAKYECTEVCMESSGKYWIPVFNVLETTCDVTLAHPKYTKPQKGNKTDRKDAMWICDLFMCGMIKRSFIPPADIRELRELIRYRTKLTNMITGEKNRALNCLTVSNLKLDDVFSDVFGKSSSSIIQFMLDNPGVYFNVKPFIDPRCKTPIEEIQAAVDGAMSPAHAVKLRECMSHIDQLESHKHMVEQDIIRLSAPYEQELELIRTVPGFDKNPMTAITILSEIGADMSVFPTAKHLVSWAGCCPRNDQSAKKIKSTRISKAGSCLKPLLVQVANALIKSKNHPEFKERYRRLKARRGHKKAIIAICRMLLTAIWNVLSKAEPYSPAGYLSDHQVSEVRRLTQKQALNLLKSRGYVITDEVPT

SEQ ID NO: 120157 - protein, 343 aa, unidentified
MQVITTIGLDIAKSVFQVHGVDAGGQVVMRRQLKRRYVLPFFQKLPPCLVGIEACASSHHWSRELQTLGHKVRLMPPAYVKPYVKRQKNDATDAEAICEAVSRPNMRFVETKTPEQQSCLVLHRTRHLFIRQQTAVINAIRAHLAEFGIIAPVGRNGVEQLLGVVADASDKRLPEVARACVAALGAQLQMLKAQILEFDRMIRAWHRSSEASRRLDDCPGIGPALATALVATVADPKVFRSGRNFSAWIGLVPKQHSSGGKDRLGSISKQGDRYLRGLFVAGALAVIRYAKIHGTKHRPWLTALLARRPTKVAAIALANKMARMAWAMMAKGERYKEPAALAA

SEQ ID NO: 120158 - protein, 452 aa, unidentified
MAKKSKRRCDTLPVLHPDAAGIDVGASELYVAVSADRDPQPVRSFPTFTRDLHAPADWLVQCGIRPVAMESTSVYWIPVYQILEARGLEVYLVNAQHVKNVPGRKTDVSDCQWLQYFHSVGLLRASFRPPGFICAMRSLWRHRASLIQMAAEHVLHMQKALDQMNLQIHCVLNDITGVSGLRILDAILTGERAPLTLARLCHGGVKSSEDVIAKSLEGDYRPEHLFALRQSLAAFRFYQQLVLEADREIQLQLAELTTAATAQPTTPARTKANAHYARHYEPRTFDLRGELCRIFGVDLANLPGISALTAQTILCEIGTDVSRFRNASAFASWLGLCPEKKISSGKVLFTKSRRVRSRVATALRMGAQSLHHAQDYLGEFFRRITRKLGRPQAITATAHKLARIVFHLLSTKEAYTESVFHKTEEETIRRAQYRLRGQATQLGFQIIPAENG

SEQ ID NO: 120159 - protein, 346 aa, unidentified
MTRYIGLDAHSESCTIAVLGGSGKRLRHERLQTSAELLKSFIKEVPRPRHLCMEEGTLSEWLCEELTPLVDKLVVVMPDRNPGNKSDLIDACKLADDLRRDAIRRPVYKAPGCFRALREAARTHYVLQRDKVRTKSRLSALCRGCGRPELAKALYGSNTRPDALQELPEHLRPRAALFGQELDALVECAAQAERSLQEESGRVPIVRRLATAPGIGVVRAAYIVAVVMTPHRFRTARQFWSYSGLAVVTRSSSDWVSEGSGQWRRSKTQQTRGLNHNRHPLLKNVFKGAALQITLMPEHPLGQAYQRLLTTTKPNLARLTIARRLAAAVLAMWKNEKDYEPAKHLM

SEQ ID NO: 120160 - protein, 342 aa, unidentified
METFVGLDVSLKETSVCVLNQAGTVIFEGKVVSEPKAITRLIRKHATNVARVGLESGPTSVWLSHALLAEGLPLACLDARHAKAVLSVRPNKSDRSDARGLAEMVRVGWFKMVQLKSLTSHERKALLIARHQLVEMRVRIDNQLRGILKTFGLVIGKCGHGQIGRRAQELAEGHPGIDCVVASMVAVRDNLLKQVAVFDRAIRRLAKTDDTARRLMTVPGVGPVVALAYMAVIDDPGRFGRARDVGSYLGLTPQRYQSGEVDLTGRISKCGDGFARTCLYEAAGVLLTRVRRWSPLKAWGVRLMKRVGAKKAKVAVARKLAVILHRIWTDGTNFRWTKEAAA

SEQ ID NO: 120161 - protein, 340 aa, unidentified
MNTTQVAVDLAKSVFQVAVSSTPGRVDEQHRLSRARFHRFFAEHRPVEVLMEACGSAHHWGRELEALGHTVSLLPPSDVRRYRDGDKTDRADTKAILEAARNEAIDSVPVKTIDQQAITTLHRLRSGYLATRTARINCVRGLLREFGVTIPVGARHLAPRARAAIDDGSVPAYLEPVLLDAITEVEELRRKAKDIEAQLKRLVRHMPDVTLLMSVPGIGVLTATALVAYVGDVGRFPSGRHFAAYLGLTPREHSSGLSRRLGRISKRGNTYLRMLLIHGARSVLRAAKLTEQPDALRAWALSVEGRSGHNVAAVALANKLARITWRVWRDHRFFESRLAA

SEQ ID NO: 120162 - protein, 340 aa, unidentified
MQISTIGLDIAKNVFQVHGIDAAEKVVVRKQLRRGQVLKFFASLRPCLVGMEACATAHQWARELTKLGHEVRLMPAKDVKAYVKRNKNDAADAEAICEAVRRPTMRFVRAKSAEQQGRLMQHRTRDLLLRQQTQVINALRAHLAELGIVAAQGREGLKQLLTIIADERDERLPIDARASLIVLAAQLQALHTMIGSIERRIVVQHRANEASKRLECIHGIGVIGASAITATVTDPSAFRSGRDFAAWIGLVPRQDSTGGKQKLGPISKQGDRYLRRILVVGAISVLQRAKLNPEKYPWLTQLLARRPFKVVAIALANKMARIAWALLANGSHYRPRLATT

SEQ ID NO: 120163 - protein, 411 aa, unidentified
MDIVHKRAAGIDISKRDAKVAVRKPGSRKGTYRTQVKTFGATTAQIRELISHLKTEGVTVIVMEATSDYWKPFYFLMEEEHLPVMLVNAKQARNIPGRKSDVNDATWLADLAAHNLLAASFIPPEPIRHLRDLTRARSALVHDRTRVYQRLEKFLESSGIKLSSVASNLTSVSSRAMLEALVGGERDPLVLADLSLRSMRRKIPELIEALEGRFTEHHAFMVKLHLQHIDLLSGQINTLNGQIDEAMEPFDAACQALITIPGISANTAQVAIAEIGVDMTVFADAAHLASWAGVCPGQNESAGRQRSSHTRGGNVYLRAALGTAALAAIKHKDSFLAARYRRLYPRRGGNRALVAIEHSIIIAVWHMLAHGEVFKELGADYYDERNKDRARLRAVNELERLGFDVQISPAA

SEQ ID NO: 120164 - protein, 314 aa, unidentified
MKTYVGLDVSLKETSICIVDETGVALKEGVVVSDPDLIVEYLAEHSPMAQRVGLESGPTSRWLWRELEARGLPAICIDARHASAALSMQINKSDRNDALGLARIMQTGWFRRVQVKSEHSHRIRALLNARSLLVQMRRDLENQIRGLFKSFGLIIGRANGGVFLKRALDVSQQAPELAGIAGPLLAARADIDRQRLDLERQIKRLARGNAQSRAFMTVPGVGPMTALAFLSGIDDPARFTRSRTVGAYLAFEGEACQTRGMSGSSVSDSICARASCTSTSAPRANGASGSRSGRLPSPKNRRQRAKCWRRRAAH

SEQ ID NO: 120165 - protein, 391 aa, unidentified
MVCVGIDVAKDKHDCCILDSDGMVRADCFTIPNNMDGFKQLLQTIRNCTKKSDKIKVGLEATGHYSYNILGFLLDNDLAVHVMNPLHTNLYRKSLSLRKTKTDRVDARTIATMLLSDVDLKSYTDTAYHNEELKSLTRYRFDKVCERAKLKQSVSRLVTILFPELEKLVASPHIASVYSLISEYPGAKQVSEVHLTKLTNLLTTASKGRYGKDKAIQIRDAAKTSIGSVMPAKSLELKHTIKLIKELTSEIDEIEDSIQQIMDELHPPILSIPGVGIQSAAMILAEIGDFSNFESPDKILAYAGCSPSTYQSGKLTNCYAHMEKRGSRYLRCALYNATKYVCHWNPVFAEYLAKKRAEGKHYNVALSHAMKKLVRLIYALQKSGKAYLTAA

SEQ ID NO: 120166 - protein, 344 aa, unidentified
MDHFAGLDVSVKETSVCIVDETGKIVREVKVASEPEALLAVLKNPAYRFKRIGLEAGPLSQWLFSALAEAGLPVICVETRHMRAVLKAQINKTDRNDARGMAQMMRVGLYRPVHVKTLRSQKLRMLLTHRQLLLSKAIALENDLRGTLRNFGLKVGMVGKVKFEARIRKLVENLPDLAVLVEPMLIVRRVLREQIVILHRRLLAIVRDDEVCQRLMTTPGVGPVVSLTYRATVDIPARFRKSKSVGAVFGLTCAKYQSGEVDWDGRISRCGDEMMRTMLYEAAQAMMRSKKWSWLKAWAMQIARRRGMKKAIVALARRLAVILHRIWVDGTEFRWTREQATVAA

SEQ ID NO: 120167 - protein, 350 aa, unidentified
MNILAMDLGKNNTVICKYDSETGEHKFTKVKTLPQEIHDMLVENIPDRVVFEIGALSGWVYDIAAALKIDVQVANTSHQAWRWKNIKKKNDRTDALKLSQLSAMNQLSMVHIPRPEIRQKRALIQYRQSLIKRRTQIKNNIRSILERQGCHKILLSGKNGWSKNSVEMLRKMSIEFSLCDMDQLWKGELNLELKQLEAIENCIEQTETRLDKLAECDENIKILRTVKGVGPRLAEAIAAFVDEPERFETGKQVGSYIGLTPRQYQSGQMDHQGRISGAGNKVLRSLLVEVCWLGLRHNKWMNETYHRILRGSNSRKKIAITAVARKLLVRCWAMMRDKKNWCDVEIKKVA

SEQ ID NO: 120168 - protein, 344 aa, unidentified
MVYYTALDVSLRSVSICIIDNNGVVCFEDKVVSEVDEIVSCLKRFSPEIRSVGFEAGTLTQYLSYGLQAAGYEVICMEARQVSAALSAMRNKTDRNDARGIAQILRSGWYSRVHVKSMESHLIRALLSGRKAVLKKCVDLENEVRGLIRLLGIKLPCSVKHGAFDDVVRPIVEEHGLMTNSLIPLLDARLILYQTYLKLDGQVLALARKDEVCQRLMTVPGVGAITALTYKAAVDDPSRFKRSRTVAAHFGLTPRRFQSGELDNPGHISRAGDADVRSALYVAAHSLVIRSDKWTYLKAWGLRLSKTKGHRRAVIAVARKLAVILHRIWIDETDFRYGATEVTT

SEQ ID NO: 120169 - protein, 356 aa, unidentified
MEQLATVGIDLAKDVIAACVLDAHGTVIERRVFRRAAFERWAEQLPTSNVAMEACGSAHHWGRWFAARGHAARLIAAAFVTPFRKGGKNDTADAEAIAIAAQQPTMRFVPIKTVDQQAILAWHSVREGWKEERTALLNRLRGLLAEYGVVVGRSATRFLVALPQLTEDRRLPDPVKSLLLEAREQLGALHARLARCDAQIAAHARNSPVAQRAGELLGVGPVTSSALAATVPDAKVFRSGRQFGAWLGLAPRQHSSGGKTRLGRISRRGNVYLRNLLIQGARSTLQAAINVEPARASRLQRWIVELYGRKGYYKTLIAIANKHARILWAMLAKDEPYDAAAWQRHPMNQPPLIGNA

SEQ ID NO: 120170 - protein, 320 aa, unidentified
MSDSLDIGVDVDSKELVPAVADRKAGDRIANTRAGIAQWLNTLPQRCRIGMEATGRYYELLARMAGQAGHVVYVINPRLIKHYGRATGSRGKTDAMDAEAIARYVKKENDRLREYVPRTDEQQQMHDLLRKRQTLVKTRARLEQSFGVSKSAPGELSDLFCALAGTLSELESELQRLGRDGEHGTLYKRLLTIPGIGPAVAAHLIYYMTRWPLANANAWIACTGLDPRPNESGGRTGRRRLSKQGAPVLRQMLYMAAMGLKRCRRGQPLYDELSKRGHPSTAVFNILARKLARIAWGVFKSGRDFDPAMLKVGQACFQQA

SEQ ID NO: 120171 - protein, 425 aa, unidentified
MRVIHDRVAAIDVHKDMVKVAVRVPGEKRGKRKTDVLEFAAFYGVLQEMGRELRRRGVTHVVMEASGVYTDPVYYALAELDFEEVMVINPSHAKALKGHKTDARDAIRLLDLYECGLLSGSYIPAPDLRELRDLARYRMKTVQARASEIQRLQKTLETAGIKLSSVVSDVTGVSAMAMVEALIDGERRGAVLADLAIGRMRTRQKMADLSMALAGRFTAHHAMMCRLHLDRIRLFGEAVADLDARIAPRVAGYSREAELLKTVPGFGDVVVAGWLGAIGPVPHEYFATAQRLASWATLCPGNYMSAKKSKGGRTGDGGAYIKPLLVQAAWAAVRVPGRLAGPQVRRGQEQGRGQKSDHRHRPHPAQDRLPGPQDRQALHRPRGRLLRQPRVGPGPAGLPDPPAARAQPRLRRHHHPPGGRLMTQA

SEQ ID NO: 120172 - protein, 450 aa, unidentified
MSPLALDVVTKTDKTPVLGRMLSKYVGRKTSSIENGITKARNHSRQRGNIMRVVFGIDVSKASSEVAILVNGEKVHGYTIPNDAIGFNRLLGDLKTVHQPEIVFEATGVYSRRLQAFFEDNSYTYTRLNPLESKKQLDSLRVRKTDKIDAEKLAMSQFILNRKPSYVQEALYQELRDLSRFYQNLTEDIVCAKNRLHKVLQITFPELENILSAPTGEQYWNLVITFPCNSFVLESDDATLTAIIRQSTAKRISEKRVTYLVDKLTKLANHSYCAVKKTSPVMEEVKYYAGELLRLSEYRQSVLEEMITLAQPLPEYEILLSIPGIAETTATSIIGELGDIRRFHSANQINAFIGIDLRHYESGNFLAKEHITKRGNPYARKILFKCIHNIASASHTNPCHIADFYEKRKRQSQVTSTKPHTIASIHRLIRTMYYLITHNKLYDYTSIQNR

SEQ ID NO: 120173 - protein, 338 aa, unidentified
MKVVIIGLDLAKHIFQIHGVDAEGRPRLRKRLRRSQVAHFFANLPPCVVGMEACCGAHYWSRVIGRLGHSVRLIAPQFVKPYVKSNKNDANDAEAICEAVGRPQMRFVPAKSVEQQDIQSLHRVRSRLVSSRTQLANQIRGLLAEYGIVLPEHVSQLRSGLPLILEDATNELTAFSRRLFASLYDELLSLEEKIQAIDEQIWVVYEASEPCRRIAAVEGIGPLTATALVAAISDGKTFKNGRQFAAWLGLVPRQHSSGGKARLLGISKRGDPYLRTLLIHGARSVVYRASKKTDRRSLWIADKQRRLGTSKACVAVANKNARIVWSLIARGESYRRAA

SEQ ID NO: 120174 - protein, 374 aa, unidentified
MHKYIWVGLDVHKVTIAVAVAKGEEVPHSLGTIPNDPDAIAKLMRKLGPSARLRVCYEAGPCGYVLYRQLTAMGIDCAVVAPTLVPVRAGDRVKTDRRDALKLARLLRSGELTAVAVPDEAHDALRDLVRAREAAHKDLRRARHRLQKFLLRQGHRCPLRTKAWGVRYLAWVSGLRFAHAAQSVVHREYLAEVERLAERRTRLDRELEVALAQAPAAIQTVVRALQVLRGVAFVTAVTAVAEVGQFRRFTRARQLMAYSGLVPRESSSGDTVWRGAITKTGNAHLRRVLIEAAWQYRHQPRAGITIRQRRKGQAAALCAIAEKADHRLHLRYRRLLARGKSKGKVVTAIARELLGFLWAVAVHAENGSTMPAAA

SEQ ID NO: 120175 - protein, 438 aa, unidentified
MRTDIEDIDADGDEEMVERVGAIDVAKASGKVCVRLPGRQRRVTRVFDVTATTNAIMALADELTELGVQRVVVESTSDYWRPFFYLLEARGLLVWLVNARDVKQVPGRPKTDKLDAVWLAKLNERGMLRPSFVPPREIRELRDYTRLRAELIEERSRHKQRLEKLLEDALIKLSTVATDLFGKSGRAMLEALITGEHDPEVLADLALGKMRPKRAALKEALTGRFDDHHAELARMLLDQIDALGEKIETLTDRVDQLVGQLPEAQARGADGGTESGLSVLERLDEIPGVGLRAAQIIVAEIGLDMTQFPTAAHLVSWAKLSPRTIQSGPRTRSGRTGRGNPYLKGALGEVAAAAARTDTFLGHRYRRLVRRKGHQRALVAVARSALVIVWHLLADPSARFEDLGPDYYEHRINKDRRTHDLIRQLQALGHQVTLSSAA

SEQ ID NO: 120176 - protein, 390 aa, unidentified
MILVGIDVAKDKHDCFICNSEGEALCKTFSFPNSMEGFNDLYVKIKSFSEDLSKLKVGLEATGHYSYNLLGFLLNKGLPTFVINPLHTNLYRKSLSLRKTKTDKGDAHTIAMMLMSDVDLKPYSNTLYYNEELKSLTRYRFDKVRERAKLKSSVSRLITILFPELEHLVPTLHMKSVYALLTEYPSAHHIADAHLTKLSNLLYTASKGRYNRNTAIRLREAARNSIGSVMPAKSLELKHTIKLLGELTVEIDEIENEIKQIVDNLNPPILSIPGISYATGAMIIAEIGDFNNFSSPDKILAYSGMSPSTYQSGQLTNCYSHMEKRGSRYLRFALYNAAKYVCYWEPTFAAYLSKKRSEGKHYNVALSHAVKKLVRVIYHLEKTGQSFKAA

SEQ ID NO: 120177 - protein, 454 aa, unidentified
MGRKSNMEKMPIVNPNAAGIDVGSKSHYAAIGQSDDQLREFGCYTEDMRELCQWFADNGVATVAMECTGTYYKGLFVMLQEYGIEVLLVNGRQTKNMKGKTDVKDARWIQKLHALGLLTGSFQPQEFTEAVRKYSRHRQGMVQDAATYIRKIQQALRLMNLRLDVAISDVTGKSGRAIIEAILAGERDAQKLANLCDRRIKKSKEEIARALTGYWRDEYLFELKQSWEIYQFYYIKIRECDTEIERLLEQGVEDNERQDGEERPVYNEKTRPVKKLNKNDPKFDVQQLAFQLSGGVDLSTIPGVGRNTILSIIAEVGLNMSAFRSAKAFASWLRLAPNNKISGGRTLSSHVPKGATPLANALRKAANVIGDLKTGGLMHFFKRIAYKKGRPAAITATAHKLAVIIWNMLTKKENYNYYNDEQYESKIRELQIQNLNKKIRALGIQAHEINFATI

SEQ ID NO: 120178 - protein, 380 aa, unidentified
MLDTTTFIGLDVHARSIKAVSLDVMTGEVRAATFGYDAGAVAEWVRSVDPRARCVYESGVTGFDLQKRLSGLGVDCVVGAVSKMIKPSADRRRKNDRNDAEFLARMLSVGNVVEVWVPDDECEAARDLTRALEDARDDLSRSKQRLSKFLLRHGLAFDERTPTGRRKGNWTRAHWSWIESIRFAERADNDVLAYYVDAVRRAAEEKARLEGLVEAEARKPRWRKRVDSLRCLKGVDTASAADLVFEAGEFSRFGNARSFAAWVGLTPSEHSSGESDRRGAITKAGNKHLRKTLVEAAWHYLTCSGRPKGLAKGQAPDPGARRHAAKGVRRLVERREALLARGVHGVSVNIFFTIFTNVFSPIAPTRMRRIRQRGCAAFGV

SEQ ID NO: 120179 - protein, 353 aa, unidentified
MKTNKSSKYYCGLDFHKNFSQICVMDQDGKIKEETRLKSDQLTKYLSNKREYEIGVESSGGVFDIANKLENTGHKVRIINSVQFRGIGLGGKKNDKNDAKALATALRVSYVPEVHKKTLYSRRLKSLLASRDIVVRTRTSLICHVRSILREYGFVIPAGITNFWEDVPERINEVECESIKRVLQELVRQAETLKIEAGLIEKELGNLVCEDERTSRLLQVPGIGLLSAVAFVASIDDFSRFPDAKHLGSYLGLTPKQNASGSRNRFGHITKCGPELLRRYLIHGARTVMRYAPTSASDGKNKIRTWADRVEKRAGTNKAIVALAHKNARICFAMMRDGTNFGEFKESTQEKAC

SEQ ID NO: 120180 - protein, 397 aa, unidentified
MTESSDYESVQVFIGVDVGKDTHHAVAINRSGKRLFDKALPNDENKLRSLISDLKQHGQILLVVDQPATIGALPVAVARSEGVLVGYLRLAMRRIADLHAGEAKTDARDAAIIAEAARTLPHALRTLKLADEQIAELSMLCGFDDDLAAQTTQASNRIRGLLTQIHPALERVLGPRLEHPAVLDLLQRYPSPEKLASLGEKKLAAQLCKLAPRLGKRLAADIAQALAEQTVVVPGTNAAAVVLPRLALQLITLRKQRDEVALEVEQRVLAHPLYPVLTSMPGVGVRTAARLLTEVACRAFASAAHLAAYSGLAPVTRRSGSSIRGEHPSRRGNKALKRALFLSAFAALRDPLSRAYYTRKMSQGKRHNQALIALARRRCDVLFAMMRDGTFYTPQGS

SEQ ID NO: 120181 - protein, 423 aa, unidentified
MMKLKYSICCGLDVHKNVIVATIVTTNKDGISEYLQKSFSTINSDIQRFHNWLIENNCYHVCMESTGKYWIPIFNYLENDIDICLTHPKYVKAIKGKKTDKKDSKWIADLYKFDLVRCSFIPPKDFRQLRELARYRFCLFCMKSSEKNRIQNCMTISNVGIASVLSDPFGKTATEIISYLLEHTADSMDEKAVRKLIKKGAKSKSDEIIEAIKGYTIETDQAKKLELARGHLEYLDDMITQTEVELYVRIKPYYEFVEFVSTMPGMTELSSTIVLAETGVDMDIFDDAKHLCSWCGLSPANNESAGKKKSVRIAKAGDYLKPMMVQCALAAIKSKKQPYFAIKYGRIKKRRGHKKAIIAIARMMMVCIYHMVSEKKPFTPTDYEELMNPQNHVERVVLNENNVFAYLESLGYDSSKLVKRNDN

SEQ ID NO: 120182 - protein, 414 aa, unidentified
MEVLYSRCAGLDVHKKTVVVCRLGVDAKGHKVKEIQTFGTTTAELLSLSDWLTAGACTHVAMESTGEFWKPIWNLLEGSFELLLVNAQHVKRVPGRKTDVQDAEWLADLLQHGLLKASFIPPVEQRDRRDLTRQRTQLVRDRASVLNRIQKVLEGANIKLSSVVSEISGVSSRAILAELVANHLDPAQLEGLVHGRLRDKLPELERALSGRVRPHHRFLLAQHLAHLDFLDEQIAAYSREIENLTAPFDELVALLDTIPGVARTTAELILAEVGADLSRFPTADHLASWAGLVPGNNESAGKRLSGKMRQGSQWLRAGLTQAAHAAAHQKNNYLAAHYHRLAGRRGKKRATMAVAHSILVIAYHIIQDRKPYQDLGSNYFDERQKTFTANRLTRRLEKLGYRVLITPPATPVAA

SEQ ID NO: 120183 - protein, 337 aa, unidentified
MKYCGIDLHSNNCVVIVSDEEDRIVFSKRVLNDLRQICAALEPHREEMAGVVVESTYNWYWLVDGLMDAGYRVHLAHPSAIKKYEGLKHSGDYADAGYLAQLLRLGLLAEGYIYPREERGARDLARKRMQLVRYRTAQILSIEGILMRQTGARMKGEAVKRLTAEQVTEFAFAPDVALAVEANRAVSQALGQQIEALERRLKERVSLRPEYRLLKTVPGIGETLATTIMLETGSIGRFAQVGNFSSYCRCVDSLRESNGKKKGEGNTRNGNKYLAWAFVEAANFALRYCPQAKSFYDRKKSKTNRVLAIKALAHKLARACYHMLREQKPFNVHLCFG

SEQ ID NO: 120184 - protein, 315 aa, unidentified
MEGEVMVGIDVSKARLDVAVLPGEEIFREEHDSRGIAALIERLKKIAPALVVLEASGGLETGLVAELVAAGLPAAVVNPRQVRDFARATGQLAKTDKLDARTLARFGDRMRPQLRKLPDQQELALKALVVRRRQLVEMMVAEQNRLDRAPKVLHRQLRRHVDWLRKQIHSLDRDLDHELRNSPVWREKETLLRSVPGVGPVVCSTLIAGLPELGTLSRRQIAALVGVAPLNRDSGTLRGRRMVWGGRGQIRTALYMSTLVAVRFNPALKSFYLRLRAAGKSPKPALIACMRKLLTILNAILKNRKPWSPQCLNLT

SEQ ID NO: 120185 - protein, 451 aa, unidentified
MKTIGKEVHPRALTENSGGTEPAGVPLYIGIDAGRRHHVVVGIGQERMENGSWERAGARRVPSNGAGFSEMLKWLQAFGASPDEVRIGCEPTGGWCAETLVAFLERHGYRVSWLQNWALHERRRLAIGKQTKTDALDARLIARLLYERECHGQTKGFLGRPPRTTDGLRLLVRNRARLVTQRTRYRHQLTQIQDILFPELKDFFKDSNTGPAARRLLERFATPADIAAASEEELFDLVARQAHSHIHGARIGELQQLARGSAGLTAGLEPMLQTQRWLLENLRLVDEQVDHLEKTIQSVVETWPESQRKVLNSFPCMSKLRQAVLIAMMGDISGFHHDGQLRKLFGWYPETRESGTSVFSQHLGSSGNRLARREIWLWAMQLISPRCPSTPFRTYYERLRERNMKGNVAVGHLASKLISVLFFCLRSEQPYDPHRHSLDLGLRDAFSNTEA

SEQ ID NO: 120186 - protein, 388 aa, unidentified
MHPTGPYPEQDPPRDRHHQATLYASLELSRSTWLVTSLAPGDRKMSKHSVAAGDGAALLALLARLRGRVERSAGGPVGVVVVQEAGRDGFWLHRLLEAEGVESHVVDPASIAVPRRQRRAKTDAIDGETLLRTLLAWRRGEPRVCAMVVPPTPGEEDRRRLTRERGTLLEERTRHTNRIKGLLAGQGIYDFEPLRPDRLERLGALVTGDGRPLPDRLRAELRRELERLELLRRQIAEVEAERDAAAAAESEAGPSPVALLAGLKAIGPQTAAVLYHEGLYRSFANRREVAAYAGLAPTPWRSGKVAREQGISKAGNPRLRHAMVELAWLWVRHQPESAPSRWFRARVGQERGRVRRVAIVALARRLLVALWRYLAHGEVPEGAVLKAA

SEQ ID NO: 120187 - protein, 389 aa, unidentified
MKIYVGIDIAKLNHFAAAISSDGEIIIEPFKFTNDADGFQLLVSKLESFDKNSIIIGLESTAHYGDNLVRYLVAEFYQVCVLNPIKTCQMRKNNIRKTKTDKVDTYMIAKTLMMQDDIRFVSFYDLDMMDFKALGRFRQKTIKQRTRLKIQLTTYVDQVFPEIQYFFKSGLHQNAVYALLKEAPSPKEIASMHMTHLANLLKVNSHGHFTKEQAKELRVLAQKSVGANDSAISIQITQTIQQIELLDSQLEKIEAEMTDIMKFNDSVIMTIPGIGYINGGMILGEIGDIHRFSNPNKLLAFAGLDPSVYQSGNFQAKTTRMSKRGSRVLRYALVNAAWNVVRNNATFKAYYDAKRAEGRSHYNALGHCAGKLVRVIWKMLTDKVEFNLE

SEQ ID NO: 120188 - protein, 408 aa, unidentified
MFVGWDWASTTHDITVIDTTGAVVDRWAPPHTERGLAQTITRLVRHGHPADLPVAIERPSGLVVDRLLTAGHPVVPIHAAAFHAARPRWGAAGAKSDPGDSYKLADYLRTDGHRLRRLRPLDDATRRLQALVRLREDHIKAKTAASNQLNALLDAAWPGAAAIFSRLGSDIALAFLQAYPTPQAAARLSQARLAAFCRRHSYRGGRSPAELLARLRAAPTPPAGLDPETLTELVNAQVRLLRTLLATIADLDRAIGAALLSHTKARLLAPMPYIGEINLGQIVAEVGPILDRASSAEHAIAECGAAPVTRASGKTRTVSFRWAANRHARTALHAFADNSRHGSPWAAKLYADARRRGKRHPHAIRILARAWLRVMWACWHTDTAYDPANIAPNSASPPELDSGNSSAR

SEQ ID NO: 120189 - protein, 344 aa, unidentified
MQHYVGLDVSVKETSVCIVDKAGKVIREVKVATKPVAILAVLTEEALAIERIGLEAGPLSQWLYSALAEAGLPVICVETRHMKAALSAQINKSDRNDARGIAQMMRVGLYRPVHVKTLASQKRRMLLSSRQLLQAKALDIENDLRGTLRNFGLKVGMVGTVKFEARIRELVADHPDLAAIVEPLLIARRVLREQLGVLHRQLLEIVRHDEVCRRLITTPGVGPVVALTFRATVDVPSRFTSSKAVGAAFGLTPRRQQSGEIDRMGHISKCGDAMMREMLFEAALVLMTHSRKWSWLKAWGMKIARHRGMKRAIVAVARRLAVIMHRMWVDGTEFRWSTKEAAAA

SEQ ID NO: 120190 - protein, 362 aa, unidentified
MTTITVGVDLAKNVFSACEVDSSGRVRQRHDFKRDTFAAWLVQVPAGTTVAMEACSGAHHWARRCLEHDLQPKLIAAQFVTPFRKSRTSKNDRNDAEAIATAARQGNMRFVAIKTVDQQARLVWHRVREGYKVESLAISNRLRGVLAEFGLIAPKSDGALRLLLADLGKTSLPVSVVEVVTQLSGHWQSVRERMLDCDRRIVAHTKSDTRCTRAQVLIGIGPLTADAMVATVGSAREFKNGRQMSAWLGLTPTQFSSGGHTRLGNISCRGDSYLRTLLIQGARSSLQRAKAVPREKATPEQIWIKDLETRLPFGKLLVAIANKHARQLWAILARDEDYDPNAWLKHPRVQRPASKRSVQRTH

SEQ ID NO: 120191 - protein, 307 aa, unidentified
MAKPTSLITLGIDVSKDELVIHVFDTEQSTTIPNQPATVRDWLSQFPDAEIAIEPTSSYHLVTIEAALEQGFTVYLISPRQLVHYREAVNQRNKTDLSDAFLLARYLDRERDQLKPFQPQHAKAQALWTLLKRRGLLAQTRVQLRQSFNGIRLATKPLFNQISALMKRIDEKIRQLIDQLGWRADYQRCLTIPGIGQLNAAALVAAFHRGAFSGANAFVSFIGLDVTIRESGRFKGKRKLSKRGEAELRRLLYCAAHPARCHPEFDSFYLRQLDKGLPKTAANVILARKLARIAFALMRNQQAFNAG

SEQ ID NO: 120192 - protein, 363 aa, unidentified
MRFYKNQHQFYIGIDLHARTMYICVINNIGETVFHKNMECSRDNLELVTNTFGKDIVIGVECIFTWYWVADFCAEQGIDFALGHAYYMKSIHGGKTKSDKIDSEKIANLLRGGMFPIAYAYPKAKRAVRDLLRRRLFFVRQRAELSVHLQNTNHQYNINDPLTSSRMRSEVYRNTIPLKFSDPATLKMVNADLAMFQAYHDIITKLEFQIEDSMEVQDPVSYSIINSVPGLGFILSLTILYEIDDIHRFSDVGKFISYCRLVKCSHESAGKKEKGGHNKIGNVHLKWAFSEGAVLFLRNNERGQRWHDKLVQRYGKAKAMSIIAQKLGRTVYYMLKRKEAFNPDKFYGDKKIENKDSGGEHLA

SEQ ID NO: 120193 - protein, 379 aa, unidentified
MERIIYIGMDVHSTSYSLCALEPVFGQENKFFFETKVAAEPSNIIKYIDDIESCFANDECTFVTGYEAGCLGFSLYNYLKGRGIDCKILAPTKMSEEKGGKKVKTDKRDARTIAQNLAYGTYSAVFVPTEEDLAVRDYIRMRNDHKAAVKRIKQQINALCMRHGYIYQRTKWTAEHLKYIKGLTLSPLYREILQEYLATMEQLNNKIKAFDVRIEELSKTKRYKDNVGKLACFTGITRSRALAIIAEIGDFRRFLKPLNFAAYLGLVPGEKSSGKKQKRIAITKAGNSHIRKELIEAAQSICRGLPGYKSRALLARQQGNDTTVINYADKASARLRRRYYKLGRCGKKHNVAVTAVARELSCFICGMMNGLTEVQIKKA

SEQ ID NO: 120194 - protein, 377 aa, unidentified
MKRVKFVGLDVHAETIAVAVAEQNGEVRSLGVIPNREDSVRKLVRKLGPVEEPRFCYEAGPTGYVLYWQLTRMGAKCEVVAPTLVPVKSGDRVKTDRRDALKLARNYRAGELTPVWVPDAAHEALRDLVRAREAAKKDELRARHRLNTFLLRQGRRPPMGVKLWTIKYLEWVKREVHFEQLAQEATLLDYLHEVEHAAARIARLDGAIAEAVKLAPPKMRAVIEALQALRGIAHVAAVTVVAELGELSRFARAKQLMGYGGIVASEHSSGERTRRGGITKTGNAHLRRVVVEAAWTYRHRPAVGTSLRKRQEHVSEEVKEIAWKAQQRLHQRYKKLLANGKNKGVVVTAIGRELLGFIWAIGIKVETAQKEPLQRAA

SEQ ID NO: 120195 - protein, 347 aa, unidentified
MTLYIGVDFHPHQQRVSFCDTTDGEVHQASLAHNADQVRRFYKQFSAAVVGIEASSSALWFESMMFDLGHELKVGNPSLIRARARSRHKSDRRDAELILDLLVKDEFPELWRRSMESQAVLEQLRFRHHLVKQRTQVCNRLQALAHAAGLPKRPIQTKRARAALEEATLSDTQSFQREQLFEMLNDLSQRIKHIESWFEQKAATEQKVQLLMTHKGVGLLNALAVVHTLGDVSRFATSKQAVAFTGLDPLERSSAGKVRFGSISKAGSSVLRHLLGQAIHSAVRYDGELKAFYKRLASRRTKSVAKVAATRKLLVRLFIMLRDEIDYREFKRRGSAVGMPAVSQGLR

SEQ ID NO: 120196 - protein, 317 aa, unidentified
MLCAGIDVSKPHLDLALVSTTAKPTRLRFPNTPEGRQALLAALAHHRPTWVALEPTGAYHLPLLQLLAEKGLQVALVNPYHLAAFRRATGERHKTDRQDALLLARYAQVYGESLRAYTLPPKALQELKALVGYREDLAQRERAILNQLEAARWAGSAEILVLLQRELACVEGLLGEVEARIQALLTALPEAEVLMGLPGVGPQVAAAVLALLPPHLWGRAKAAASYAGLIPEREESGKSVERSRLSRKGPPLLRRKLFMGALVAVRHDPEMGAFYRRLLSRGKRKKQALVAVAHKLLRRMMGRLREYYAGQSLQGVA

SEQ ID NO: 120197 - protein, 406 aa, unidentified
MEVIHPRCAGLDVHKQTVVACVRIVGSGPPLQEVRTFATTTSGLLTLADWLDSFGIDVVAMEATGVYWKPVWHVLEGHFELVLANAAHVKNVPGRKTDVNDAMWLADLLAHGLIRASFVPPVAVQELRALTRTRKQFVRERTAHVQRIDKLLEDANLKLGVVLSDILGKSGRAVLQALIDGQTDPDQLVRLIGRVKASRAELLEALRGHVSAHHRFMLKLHLGHIDALDRAIADIEKEVGLGLEPFRHAAKLLSTMPGMSTIASNVVVAEIGIDMSRFATPGHLLSWACMCPRNDESAGKRRSTRLRRGGKWLKTTMVQAAWSAIKVKGSYLQAQFHRLRARRGAKKAIIAVAASMLTAIWHMLRNGTEWHDLGAAHFDRADAHKTANRLIHRLQQLGYVVQLTPA

SEQ ID NO: 120198 - protein, 350 aa, unidentified
MLYTGLDYHRSFSYITTMNDKGEIINQKKLPSNGEIVDFLKEFGEEMEVAIEATPSWYWLYDHLEDEGFEVKLFHPLKTKAIAYAKVKTDKVDSATLAHLLRSNLLPLSYVPEKPVRLNRELLRYRASLVKIQTGIKNKIHTILAKNNLSHDYTDLFGKAGMAFLHSLPLPENYKIALEGYLFVLETVRHEIGGASKRVQQLAEDDQDSRLLMTIPGVGYYSALLIKSEIGDVKRFPSAKQLCSYAGLVPSTHASGNVCYHGHITKQGSRWLRWILIEAAIHAVKRPGALRRFYFRVERKKGGQIAKVATARKLLEWIYHILKDGKSFQEVEKVVEAMGKGEPVNSSGNA

SEQ ID NO: 120199 - protein, 406 aa, unidentified
MTAATSFKVIIGLDVGKTSHHACALSADGSRRYFDKPLPQDESKLRDLFTSLQAHGPVLLVVDQPNTIGALPVAVARDCSVAVAYLPGLAMRKAAALHPGTAKTDKRDAFIIAETARTIPATLRKVDHNDEALSTLKALAGFDEDITRDCSRTINRLRSALLQIHPALERVFAGGTITRSAVLDLLEHYGGPTKLRAAGKSRVTAWINRRCRGDHTDLVAAIFHALDQQTVVVPGTSAIERTIPLLASNIKMFKKQRDLIAAEVNEVVDALPLYEILTSIPGVGVGIATSILMAVGDCSDFPDAAHLASYAGIAPTTRRSGTSIRGEHPSRAGNKRLKNALFRSAWISTNCHEASRDYYQRKRREGKRHNAAVMCLARRRCNMIYAMLTRKEFFRDEPRTPILAAA

SEQ ID NO: 120200 - protein, 340 aa, unidentified
MYVTTIGIDLAKTIFQVHGVTEDGGVAFNRSLRRHQVLPFLAKLEPCLIGMEACSGSHYWAREISKLGHQVKLMPPAYVKPYVKRGKTDAADAEAICEAVTRPTMRFVAIKSPDQQALLSQHRARQLLIGQRTQLSNMIRGLIGEFGHTVRKGLNHIRDFAEALQAGNGPELPTAAQMVILSLCQQLLLLHVRIKDLEAEIFAASRADKRVKLLETIPGIGPVTASAIVATVGSPHQFKSGREFAAWLGLTPLNRSSGGKERLGRISKMGDRYLRALLVAGMTSRVRAARARPDRVDPWLVSLLERKPVRLATVAMANKAARIIWAVMTRGEPYRASVTA

SEQ ID NO: 120201 - protein, 401 aa, unidentified
MKELWCGLDWATRTHAVCVVDEDGQIRARFEVPNTGKSFAGLIKRLSKLKVTGVGIERVDGPLVEAMLEAGLAVHVIAPSMLKAVRTRYGAAGAKSDPGDAFVLADLLRTDHHRLAPLVPDGPATKALRALTRTRKDLVQARVALTNQLEAQLHVCFPGAVGLFADLHSAVAAAFLRRYPTASRAARLTEARLAGFLRRISYCGRTPVAELLRRITEAPAATLGAEEDEARAACVLALVDAIQTCQGRARELEAEVVERLEVHADASIFTSLPRAGRGVRAASLLAEIGDVRERFPDAESLIALAGAAPVTRASGKHRSVNFRWACDKKLRQAVVDFADDSRHASPWAADIYGRAVDRGCTHPHAVRILARAWLRVIWRCWQDRAPYDVTKHRGAVMLQAA

SEQ ID NO: 120202 - protein, 370 aa, unidentified
MSNATTFVGLDVHARSVKACAFVPETGETVRRSFGYEPCEIASWASSLPQHAKCVYESGVTGFHLCRELRSMGVDCVVGAVSKMHRPAADRGRKTDRRDAQFLAVQLALGVVTEVHVPDAECEGARDLTRALADARDDAVRAKQRLSKFLLRHGFVYDERNSAGQRRNRWTRDFWAWVGRIDLGDGAAMATLDHYCVRVREADAAKAALEAKVKELAQQPRWKPTCDALKCLKGVDAVTAVSIACEADGFARFAAASGFAAWVGLVPSEHSSGESQFRGGITKAGNKHLRKLLVEAAWHYKGASRSPKGLVKGQIVDEATRRHANAGVRRLVDRRRAMDDAGKQSSVANVAVARELACWCWAVGRMAEGA

SEQ ID NO: 120203 - protein, 338 aa, unidentified
MELSVIGMDIAKNVFQLHCVDRETGEIERIKLRRNEVLPYFARRTPALVAMEACGGAHWWARQLQQLGHTVRLLPAKAVRPFVLRNKTDAADARAIWTAVQQPEMKTVAIKTEYQQSILALHRMRAQLLKFRHMQTNAIRGLLLEFGHPLPESYLALRKAFPTVMATLDKQLPGILIETLREQWARVQSLDNEIALIEGRLKRALAETPTCQMISDIPGVGLMTATAAVATMGDPASFKTGREFAAWLGLVPRQTGTGGRIRQLGISKRGDAYLRTLLMHGARAIIARRTYSDWVAGLIARRPYSVVIAAIANKLARTIWAVLATGKRYDGAAFAAAI

SEQ ID NO: 120204 - protein, 419 aa, unidentified
MRIIKTKKHEIVNGRTLLVAVDLGKSKHMGYYRCPDGTDIKPFEFSNNRLGHQKFYDRICQAKAAYHLEEVVVGFESTGVYGEPLIHFLNNKGIKLVQVNPLHTKRMKELEGNSPGKTDRKDPKVIADIMELGHFLSVVIPEGVSAELRRLTQARERSVERRTAFYNQLQDLVFIIFPEFLEVMKDIKTRSAQYLLRHYPTPQPILQCGVDGLSLALKQVSCGKLGRERAEALYEAASQSVGIKEGQKSILLEIEEILLGIEGCESFIAKLEREMHCLLEQIPYSRLILSVKGIKAVTAAGLIGEVGDFRKFRTISELLKLAGLDLYEISSGNHTGNRHITKRGRSLLRKLLFFASLNMIRKGGVMHEPYQRYIGRGMPAHKALVAISRKLLRILFALVRDHREYVVNYSERENLKLAA

SEQ ID NO: 120205 - protein, 312 aa, unidentified
MQHCVCVLEMSKASWLVSGAVPGVERQPLKKLEPDAGALLRLIERWRNEAVRAGRPISRIALAYEAGRDGFWLARWLIARGIEAYVIHSASVAVSRERKRAKTDRLDAAMLMRVFLGWLRGERGHCGMVAIPTMEEEDARRPSRERECLVNERSRITNRMKSALARLGVRGFKPHLRKAPERLADLRTAEGTGLPANIIEEFRRDMARLALVREQISSIEKARAERLERAPDTGPHAMVRLLARVIGIGIETADMLVREILSRRLRDRRAVARYAGLTGSPDESGLKRREKGLAKAGNARVRRGLIQGGARR

SEQ ID NO: 120206 - protein, 427 aa, unidentified
MNYNQNEKILQLTDETLIIGIDIAKHKHVARAQDFRGIQFGKPLYFENSSEGFQIFVIWMNDLTLQHDKSDVIIGMEPTGHYWLPLAYWLMEKQLKVVVVNPAHVKKSKELDDNSPTKNDVKDARVISRLIQDGRYSEPHLPEGIYAELREGMNMYEQLMKDLQAVQGRVHQWIDRYFPEYTTIFANWEGKASIQVLKMGLFPEELIKIEEEKILLEIRKEVKRGIGLKKIRQLKEVARNSIGIKESRTIARMKIQTLMEQYALLHEKINEVWEIVGALTNTIPGVKEMTDIKGVGEITIAAFLAEVGDLSRYYHPEQIIKLAGLNLKLATSGKWKGKTVITKRGRPKLRALLFKVILPLVNHNPAFKALHEYFTTRKENPLKKKQSLIALCCKLVRILFTVGKKQVTFSPEKMLQDIPHFRLQNAA

SEQ ID NO: 120207 - protein, 283 aa, unidentified
MLYAGVDVSKDKVSMAVLTSGGTKLTSGDFDITTEGLKLLELTLKHLKDEISMFIEQTGTYSIPVIFYLMKRVENLRIYLVDGLNFSRFIKLEGRKKQDKTDAVSLAEYGRRGLKARIITDKDIKAYELKVLISEREHLLKVKNQIENRLRQLIETIFPDSKTLSKQVFWSEVRKGWGLIDWKRLTDKPEVLSTTVRERKIWLEIIHSLEETEKEINTFLRLNYPEDVKILKSFGFSDTTTAYFISVYVDVERFKDVKAFKSYMGLGLRIYQSGKKEKNVVNW

SEQ ID NO: 120208 - protein, 403 aa, unidentified
MYSSFVGIDIGKWNHQAAFLELSGKETARSLAFQNTSEGFQSLLESLATFDKGQTVIGLEATGHYWLALFSFLVDNGWTVKVINPMQSDALRNMNIRKAKTDRKDCVVIADVLRFGRYTETVLPDEDLLQLRELSRCRVAHVELLGDLKRRVLGILDRIFPEFASCFSTVFGAAPTELLQECTDPEELADYDVDKLIKLLEKESRGRHSREKAEELKDKASRSVGTRFGRDALKFELKMLLEQLDFIKGQVKEFDKFLKKLMKNHELIYTIPGISVTLGSAILGEIGDVKRFGTPQQLQAFAGMDPSVTQSGNFQGTQGKMSKRGSPYLRRAVYLAANAARRFDPVFKEFYDRMIARGKHPKQALAAVGTKLLRVIHAVMTSQKPYNPQKLLPPAARISQVTP

SEQ ID NO: 120209 - protein, 393 aa, unidentified
MICVGIDVAKDKHDCFILSSEGEVLADVFTIQNNAEGFDTLLQTICRCTRPEDKIKVGLEATGHYSYNILGFLIDKGLPTYVINPLHTNLYRKSLSLRKTKTDRVDARTIAAMLMSDVDLKSYTDTAYHNEELKSLTRYRFDKVRERAKLKQSVSRLVTILFPELEKLVPTLHMASVYALLSEFPGAKQVAGAHLTHLKTVLSDASKGRYGRDMATTLRDAARCSVGSVMPAKSLELRHTIRLIRELDAEIKDIEAAIQSMMDEIQSPITTIPGIGVRMGAMILAEIGDFSRFNSPDKLLAYAGMSPSTYQSGQLSLSGTYSHMEKRGSRYLRYALYNAAKYVCLWDSTFAAYLAKKRAEGKHYNVALSHAAKKLVRLIYALEKSKQPYSTAA

SEQ ID NO: 120210 - protein, 403 aa, unidentified
MTKYHVGIDVGKYNHHVSIRDIERDTYCKTFSITNDHEGFAELISSLKRLSHDRREFLIGIEACPYGINLSYFLMGTGFSLVEVNPFRVGQFRKAQGKKAKTDTIDARSIAGILSLGDHKALSMPDPILDNLKELTRFRTDLVDEKATMMIHLRESLGILFPEFDKVFRQLDSSASLAVLTAFPSPECLIRAGEDEVTKILSLASPHRMGRGMASRIIEADKDTVGVAQKQPAIGIKISILAKKIASLQATIRELDKQITVVYNSLPNKLQGFPCGKATSLAAIISEIGDIHRFATLKKFLSHLGWCPQSFQTGGYHMEHPRMSHAGNKHVRRLIWMLSIHAIKNVPRYRLYFTTRVKEEKAKMHILIAIGRKLLSVLYTMLKKGTSYDPNWEEVGHLAAAGH

SEQ ID NO: 120211 - protein, 401 aa, unidentified
MAAAQETAWVGVDIGKTHHWVCALDADGKRLLSVKVANDEAEILALIATVQGLAEQPIWAVDIIGAPAALMLALLAQADQSLRYASGRMVAAMSSAYAGEGKTDAKDAYVIAETARLRRDLAVVDQDTDLVRNLAVLTGHRADLVADRVRMINRLRDLMTSVFPGLERAFDYASRKGALVLLTGYASPHRIRRIGHTRLAAWLRQRKVRDSAGVAARAITAARAQMTVLPGQDLATSIIAELATNILALDERLRSLDAQIAETFDQHPQAAVIQSMPGFGPLLGACLLVGAGDLRAFPSAGHLAAAAGLVPVPNDSGRRTGNLHRPKRYSRPLRHVFYLSAQTSMLRAGPNRDYYLKKREHGRTHSQAILALARRRVDVLWALLRENRTWTTAPPVVAQAA

SEQ ID NO: 120212 - protein, 350 aa, unidentified
MLIIGCDFHTRYQQIAMLDEATGELTERRLQHENGEAEAFYRSFSQPVRVGIEATGPIHWFERLLSELGHELWIGDSAKIRASEVRKQKTDERDAALILDLLLSKRFPRIWVPTPQERDLRQLLWHRHKLVRMRTMLGNQLHFLAMSQGLCRKKKLFSKSGRMELIHLHLGPWASRRREELLKLLDGLNPAITELDHAVLQAAQQREDAVLLMTHPGIGPNTALAFLLAVGPISRFPCSKKIVSYFGLNPSEESSGGRRRLGAISKQGNIMVRWLLIETAHLAVRKDPELRQDYQRLKFRRGHAVAKVPIARKLAVRMYWMLRSGAAYAQLVRRQGSPGATLVNASSSLG

SEQ ID NO: 120213 - protein, 332 aa, unidentified
MYIGIDLHKKYSVVTTMDINGNIMNQKRVEHDSKTLDDFLSSIDENDNIAMEATTNWYYFYELLESKTKNISLAHPAKTRIIAEAKVKNDKIDSKMLAHLLRTDLLPKAYIPSRETRDLRELLRYRASLVRFRTQIKNKIHAILSKNGIASPYSDLFGKAGMVFLKQIELRESYRQSVDGYLTIIQQINIQINDVSKDIDQIAKLDDQAQLLMSISGIGAYSALLILSEIGDVSRFPRENSIVSYAGLAPSVHSSGGKTYHGHITKQGSRWLRWILMEAVPHVVDSSSEYKRLYNKLVAKKGKGTAKVAIARKLLIAIYYMLQRGERFNMGQ

SEQ ID NO: 120214 - protein, 411 aa, unidentified
MPRFAHRRVILFFWPTRASSENQTSILSLSIAFSRAIVSRHAGKLMEWPAPPPGEIVLPETQTEERMMKIAVLGIDLGKNVCSVVGLDPSGAVVLRRRVRRDTLIDLVAKLPSCIVGMEACCGAHHLGRLFAAQGHDIRLMSPEYVRPYVKAQKNDDRDAEGIAEAATRPTMRFVEMKTEDQLDMQTLHRSRERLVGERTALINELRAILLDRGIVVPQAKRKLEQYLVILMNEHGGEGLSARMRMLVADIRAQWQELDRRIGEFDAEFVRWAKENEDARRLVTIPGVGVTISTALIAAVGKAETFEHGRDLAAWLGLVPRQSTTGGKPRLMGISKRGNKYLRKLLIHGARAALPYVAEKDTALGRWAKSLLSRVHQNVAVVAFANKLARICWAVLRSGQRFAAKGAPLVV

SEQ ID NO: 120215 - protein, 347 aa, unidentified
MRFYTKQHKFYCGIDLHAKKMYLCILDESGEIRLHRNIKTARDVFVKVIEPYREDIVVAVECMFTWYWIADLCTEEQIPFVLGHALYMKAIHGGKAKNDKIDSHKIAVLLRGGMIPQSYVYPARMRATRDLLRRRNHLMRKRAELYAHIQNTRSQYNLADFLGRIAKAQNREGVVEHFEDTSVQKMIAADLAVITAYDPIIAQMERDIIRTANQHDPVAYALLKTIPGIGRILGLVILYEIENIKRFPTVQDFASYCRLVKCAKESNGKRHGSSGKKIGNAHLKWAFSEAAALFLKGNEQGKRYLDRLTSKHRKGKALSILAHKMGRAVYFILKNKEPFDQKKFLGL

SEQ ID NO: 120216 - protein, 370 aa, unidentified
MKKNSSQKQNSGKSNPPREKEGFASYIGIDLGDKYCDVCVLDGQGEVHEEFRLRMKGPELQGYFTSIGRSRVAVEAGGQSRWVAEIIQRCGHEVYVSNTRKVAYIHQSDDKNDPGDAYKLAELVHFKPRLLHPIQHRSLEAQADLSWIRAREVLVESRTQLVNAVRGMSKAFGERLAKCSVESFTAKMAGQVPEAIRKAMAPLLETIDHLNEQIYYYDLMEAHMARERYPKYWLLEQVNGVGVHTALAFMLTIGDAERFAKSRQVGCFLGMRPKKQESGESKPQLGITKAGDVYLRKTLVNCAHYILGPHGKDSDLRRFGLRLCARGGKNAKKRAVVAVARKLAVLLHRLWVSGEVYEPLRNSKAREVAA

SEQ ID NO: 120217 - protein, 336 aa, unidentified
MPLYCGIDLHSNNHVICVIDDKDKRLLEAKLDNYSELTIRALSKYKKRLKAIAVESTFNWYWLVDALMEAGFQVELVNTAKVVQYSGLKRTNDRYDAFHLAHLMRLEILPTGYIYPKPERGLRDLLRKRIQLVQDRSSHIIRLKSQVQMHTGQTLRAGHIKTKKFEVPVVGDDNVQLALQSHLSMIRALSVQITMLEKSILGQVESTPSFHYLKTTAGIGDILTQAILLETGDITRFKGPGNFASYCRCVDSRRESNGKKKGENNRKNGNRYLAWAFIEAANFAIQHSDKAKRFYLKKAKATNPIVARKALAHKIARACYWVMRNQEDFNEDLVFG

SEQ ID NO: 120218 - protein, 280 aa, unidentified
MKIQRTSVGLDVHARSVVGCGLDGDTGEVFERRLTPDRGEIAAWLRDLPGPVAVTYEAGPTGFGLARALDAAGIACVVAAPSKLIRPTGDRVKTDARDAAHLARLLHLGQITEVTVPSIEQEAARDLVRAREDVRGDLMSARHRLSKLLLRQGIVYCGGRAWIREHQRWLRRQRFDSAALQLAYDTAFDAMLATLERRERLDTAIAEMAADSRFTPVVTRLGCLRGVSTLTAFGLAVEIGDWSRLTGRSIGAYLGLVPSEYSSGATRTQGAVTGLVKITV

SEQ ID NO: 120219 - protein, 409 aa, unidentified
MSATHQTNCTSNSAHLYVALEMGMANWKVCSTIGVAQKPRTKEVAARRMDLVLQEIARAKARFRLPAEATVHVCYEAGRDGFWPYRCLTAQGIDTVVVDSSSIEVNRRKKHAKTDRVDGEKLSVMLARYHQGERRLWSVVRVPSMEEEDARHLHRELKTLRGERTEHINRIKGLLIGMGIDVGKMALRLPEKLGELRLDWETQTDPQGAPLPAGLQAQLRREYERLALVERQIDQIEGQRAEAIGRGRGAGVEKVRRLMNLHGIGETTAWTLVMEFFGWRTFGNGREVGSLAGLAPVPYSSGASDRSQGISKAGNPRVRALMIELGWGWRRWQKRSALSRWYEERFGGGSKRQRKIGIVALARKLIVKLWRYVETGVPPEGAVLVDWRNKIPKSLQAEPEPPPAGKKVA

SEQ ID NO: 120220 - protein, 370 aa, unidentified
MSVRRILAKTIDTDLEYEAIGIDLAKNCVSAALLTTDGEVVCIDRLDYSELEKSAQALSPTTFAMEPCTEMNYLVQKLEAWGHRCLVIGGKNVQNYVENHYSGQKTDLNDAQALAFLAQDKQLRTIKAKDIEQQKYASLTTLREQYIKQYRQTIVSLKGICQAWGLNISKGISGKAQLKDLIENHAAFPEELRESLVDMVTHAQTTQKVLNKITKTLEVLAKNDKVCQLIQTIPGLGTICSCRLRATIGDIKRFKNPKDFPAYYGLVPRSIATGHNERKGKITHRGDRTMRSLMVQGAGCVIRLATCGKLKSKQLTKWILKKQKEKMPWGKLVCAVAAKLLRIVRAILISSKPYNPKIAGVAKCSLSKGS

SEQ ID NO: 120221 - protein, 394 aa, unidentified
MKLIGIDIGKNKHFFCVMDQQTGEIISQPVSFSNDKEGFDFLVQEIKSYPKDSILIGMEDTGHYHFALLKYLLDLQYTVALINPKTTDFNRKMQGGITKNDKLDTINICDVLDTPERKKQYRITKVNSFDLYEQKQLTRHHHNLKEEENVYKNRLQKCIDIVFPEFNKLFNSKYGIVYMNILKMFGSAENIANTDIRTIRKCFEIEGRGNRISLTPERLKECARSSIGISSSAEVIQIKHLTAQIELIEEQLTEIDKKIEEFSIQNNSPILSIPGISHFSGTSILAELGDISNYSKPSQIIKFAGVAPLHHESSQFNAQHTSITKKGSKYLRKTLYQIILPVIRHNPVFNKYYQLKISQGKGHRCAQGHCVRKLLRIIYHLLKTNQQFDPQLLR

SEQ ID NO: 120222 - protein, 304 aa, unidentified
MNGIGIDVSKRQLDVGTTKRETLQVTNSPSGFAELDAWLKKHPSNQIVLEATGGYEQPVLDFLHDAGHRVVRANALRARKLAQGLGQAAKTDRLDAYALAQMAALVELPAYQPLGPWQRKLREFVRARRQVMQALTVARQQQEMVGDRGLRRLLQANIKRLQTLAERLGKQIAEQVAQQPELTVLKSMKGVGPVLQAVLASYLPELGHISGKAIASLVGVAPMSHDSGTMRGKRSIHGGRAEIRQVLYMASMSAMQHEPRLRDFYRSLRARGKEAKVAIVAVMRKMLVILNARVRDAQRGSTPA

SEQ ID NO: 120223 - protein, 341 aa, unidentified
MSEITTIGIDIAKHVFQLHGVDAAGEVVLCRRLRRNQIASFFTALPPCLVGIEACGTAHFWAREIAALGHDVRLMPPGYVKPYVKRSKHDAADAEAVCEAVRRPSMRFVPVKTLEQQSALIAHSVRDLLIRQRTMLVNALRGHLAEFGIVAPRGIHKVEELTAVIGDQTDRRIPTSAKHALRVLASELATIELRIAVLETEIVTRTRADAVARRLATIPGIGPIIASRITATVPDPSIFRSGRDFAAWIGLAPRQNSTGGKVRLGGISKRGNGTLRRLLVGGAMAAMFRSKVLQTDPWLRQLRARKPVMVAAVALANKIARTVWAVMRYDQDWRPAAAPVR

SEQ ID NO: 120224 - protein, 342 aa, unidentified
MQITTIGLDIAKNVFQVHGIDAKEKVVARKQLRRSQVITFFKALPPCLIGMEACATAHYWARELTKLGHEVRLMPAKDVKAYVKRNKNDAADAEAICEAVRRPTMRFVRIKSAEQQGQLMQHRTRDVLIRQRTQIINALRAHLAELGIVAAQGNAGVNELRAIVTDEQDTRLPIDARASVIVLAAQLEALESVIGAIEKRIKMQHRSSEASQRVEAIPGIGVIGATAIVATVADPTVFRSGRDFAAWIGLVPRQDSTGGKQKLGPISKQGDRYLRRILVVGAIAVLRRAQENPGKYPWLTQLLARRPFKVVAVALANKMARMAWALLAHGGTYRAPELAETA

SEQ ID NO: 120225 - protein, 408 aa, unidentified
MLSCGIDTHKEIHQVEIQNQDEKVMWKGQISNDRKGFNALLSKIQIIERSNSDKVEGIFMNPTGNYHIPLHHFLESSGYKVIYVDPRVTDYARKMSNLGKEKSDTVDAAMLASTPWKDRKAFGNTIHKREPVSGLTRLYESVTRNVTRITNIINSDLACIFPEFTEVFPDVGSKTSIAILDRFTTPSGIVKEGIDSVLKVMQRSSRNHYKKDDAEKLVSLARDSVGIHDTDGVYAFRIRQNVARLISEKKHLKEIEEKILKLAENDEDVKNIDDMKGIGPINAAAIVSEIGDIGQFDSALKLQSYGGKAPKMSGSGGKAHATGVSRIRNSYLANSVYESAKSLVHHKNEEFLKIYEREIGKGKKRKQAYMVVSRRLLYHVHSIMKNHKPYRVRLPNVKGREGNTSTAA

SEQ ID NO: 120226 - protein, 354 aa, unidentified
MPLKTKTLNFVGQVFHVGIDVHKKNWKVKVRSNHSVIKSLSVDPSPDVLSKTLNNLFPHATFNTVYEAGFSGYWAHRQLKELGINNIIVNPSDVPTSYKERDRKSDPIDCGKLSRELENGSLKEIYIPSEEKEGLRSISRLLHQNRKRSTQVKNRIKSYLHFTGVSITAHNESSHWSKAFLQFLQDVKFSTEYHQYTFNCYMEELLRCRKERLNILRKIRSICAENETIQMLRTIPGIGPIIAFVLYTELIDIIRFSSFDRLASYVGLVPSTEASGEKLIVKGLTARHARYLRYLLVESAWHAVRKDAVMSFAFLNYTKRMSKQKAIIRIAKKLLSRIRYVWKNNKPYEMGIIE

SEQ ID NO: 120227 - protein, 350 aa, unidentified
MLIIGCDYHPSFQQIAFVDTSSGELSERRLFHREEAEQFYGKLKEQSVPVRVGMEASGHARWFERMLRDLQFELWIGNAAEIRAKRVRRQKTDRQDAQLLLRLLMEDCFPRIWVADAENRDLRQLLWHRHRLVQMRTRVMNQLHVVALNEGLRRKKALWRQAGRQELESLALAPWANRRRQDLLDLLDQLTPKIQQLTQALEEEVEKRPVTRRLMTHPGVGPLTALAFELVIGTPERFHCGKQIASYVGLVPSEESSGNRRRLGHISKQGNALLRYLLVEAAQVTIRTQAQWRSRFFHLAMRRGRKIAKVAMARKLAVHLYWMWRQGCDYGHLQKLGSHAGEPGNPYGVR

SEQ ID NO: 120228 - protein, 338 aa, unidentified
MSKITTIGLDLAKNVFHVVCCDARGKVVRKRMLKRGQVLRFFGNLERCLVGMEACAGSHHWGRELEALGFEVKLIAARYVKAYVRGNKNDYNDGLAIAEAVVRPEMRFVRSKTPEQQDIQALHRMRKGCIGARTALCNQMRGLAGEYGLVAPKGIATLRRRIPEWLEDGDNGLSALFRRLLCEGVEHLQELDTHIAFYTREVERLSEHNEACQRLQTLPGYGPIVASAFHGQIGHGEAFRRGRDASASLGLVPRQHSSGGQDTLLGISKRGDGYVRSLLVHGARAVVSRAEHKDDRLSLWINKIRVKRGYNKAVVALANKMARMGWAVLANKTVYRAA

SEQ ID NO: 120229 - protein, 424 aa, unidentified
MKVTYQTCCGVDVHKSFLVATIVKTTGGIEPSYQKKRFSTFNNSILEFKQWLRDNDCHDVCMESTGKYWVPVFNLLEDDINVVIANPKWVKAVKGNKDDTKDSKWIGDLFRLGLVKGSYIPCKKVRILREYTRYRYKLVSCRSSEKNRYQNALTVCNVALDSVVSDIFGKSSTSIIDYLLEQSGSSINHEEIASKLLRSLKSKEDAVIESVEGYQMTDAQKYRMRLVRAHMDYITAEINDVDKMIENMISSNTDFENAVQFLCTIPGVKRDSAITIISEIGTDMSQFSSSRRLCCWAGLTPGSNESAGKKKSVRITRAGVYLKPALVQCAHAAVKSDKSPYYKKKYESLVKRRGKKRAIIAIARMILTAIYQMLSTGEQWNPSDLYKIDMPVALVEKQKAKAIKQAKKLLQREGLLPPDEPLAS

SEQ ID NO: 120230 - protein, 377 aa, unidentified
MSEITRLMLLIVRVGVDLAKSVIQVHAVDAAGRRVVARTLKRDQFLAWCGQLPANTVLAMEACSSAHHWARKLRAMGVDARLIAANFVTPYRMEGKSGKNDANDAAAICEAASRPSMRFVPIKSCEQQGVMSLHRVREGFKEERTGCINRIRGVLAEHGLVFGKSPKALRAVLADVLEDADNELSGRARLVLQQAFEHWRELDEHIVWCDRQVGQHVRSSPQAQQAIKITGIGELGASALVGGVGEFKQFNSAKQFGAFVGLVPSQNSSGGKASLGRITKRGDDYLRTLLIQGAKSAVMSADKRDDPTSRWLVQLTARVGWQKACVAMANKNARILWAVMTRDAEFDPKHVSVKPQAKVAPAKRLAAPPPALAQCPA

SEQ ID NO: 120231 - protein, 364 aa, unidentified
MTESITFVAFDMHQDSITAAWLRPGAAEPETRTVPNEPKPFRRLVKELLARGPARACYEAGPVGYEPQRQLAAWGLPCEVIAPSLIPRRSGDRIKTDTRDAKKLVKFYRSGELTPIRIPTPAEEAARDLVRCREAAGVDALRALHRLRKFLLRRDLRCPAGRPGTQAWWRWVHALRLPDPAAQRTLEEYTLAATTARTRWKALDPEVTALATREPWVAPVAQLRCFRGLDTLGAVSLHLEVFDWRRFGSPRPCMSFVGLVPSEHTTGRRRRQGSITKAGNAHLRRILVEAAWHYTRRADRRAAVRKRQQGQPPAVVAVAQQAEQRLYRRFQHLVAGRKLRTVAVTAVARELCGFLWAAMVASPA

SEQ ID NO: 120232 - protein, 344 aa, unidentified
MKITTIGIDLAKTVFQVHGVDKRGKAVLRKLKRKDVLSFFANLEPCLIGMEACGSAHYWARKLSELGHTVRLMAPQFVKPYVKTNKSDRNDAEAICEAVARPNMRFVAVKTAPMQAVLALHRARQGFVRARTAQANQIRGLLAEFGIVIPKGIAHIAKRLPEILEDGENALPGMMRELLQRLGENLKDMDRQVGELERQIKLWHRENEASRKLEAIAGIGPITASALVATLGDAKSFKNARQVPAWLGMVPRHEGTGGNVKLGGISKRGDVYLRTMLIHGARAVIAHMERKPEHADEWLKKLIARRNKNIAAVALAAKNARIAWALLAHERSYQHDYVATRKAA

SEQ ID NO: 120233 - protein, 435 aa, unidentified
MIDKILPGFGALDLGASNLFAATADTAVKSFSTFTVDLHALCAWLTEHKVHSVAMEATGVYWIPVHDLLESKGFKVTLFHGAHARNLPGRKSDVSDCQWHGMLHSHGLLRPCFIPAEPIRKLRSFYRLREDHLSMAVAHISHMQRALDLMNVRLHHVLSQLHGVSGLRVIEAILAGQRDPAVLAALCDMQVLKKKKADLIKSLEGDWQEHHLFALRQGLEAYRFYQGQIVACDAQIESLLRTLNAQRTPQQPKPGQKVKIVRHNAPAISNLHGQLLTLCDGRDATLLPGISPLGWMKLTGEAGIDLSEFADENHFTAWAGLAPERHQSGRRQRRRPRRKTAIGQIFREAALSIAKSKHLALGGFYRRVKGRRGAAIAIVATARKLAVLYYRAMTRGLEYVERGLAQYEADYRKQSERHLRKMAARLGFTIQPKNA

SEQ ID NO: 120234 - protein, 440 aa, unidentified
MSKRAYRATRVNDVNWDQLAQGKDGLDIALGVDVGKYSLWAVCRWADGRFERPWRVQNPGEIPTLLTLLKRVSAGRKLVVAMESSGTYGDALRQALADNQLEVRRVGGKAAHDYAEVFDGVPSQHDGKDAAVVAELAALGKAMPWEYQPADPWEQELAYWVEWMVAHRQMLTIWQGRLEGLLARHWPEATQVLKLSSGTLLRVLKRYGTPQALAADGEAAKLLARWGGAFLAAEKIEQLLAGARASVGVRLGEWQQRQIQNYAQQALAARQEANRAERRLRSLAEGHAVLQAQGKVVGVPTACVLWVSTGDPRKYHAAGAYRKAMGLNLVERSSGTYQGKLRISKRGSSRTRQWLYFAVLRLVQKCGVRSWYEAKKAHDEADARRALVAVMRKLAVALYYVGVHNEEFQPRRLFGRIRRHRGSPGEQKSRTKRRSRAEQL

SEQ ID NO: 120235 - protein, 320 aa, unidentified
MKHKVGKDNTVARFIGIDVSKQWLDVATLPERETRRFTNDGAGQEQLGAWLIQLAPELIVMEATGGFETRVATALAAEGLALAVVNPRHVRDFARAFGILAKTDRIDASVLAAFAEKVHPPVRPLPDEDRRELIDLVDRRRQLVTMRAEEKTRLSQATASARQDIKEHIEWLDERLRRLDIDLTAKLRSSSLWKAKEEILISVPGVGRVTVFTLLARLPELGALNRRAIAALTGVAPFARDSGQHRGRRMIWGGRADVRSVLYMAAVTAARINPVIKSFYLRLKQAGKPAKVALTACMRKLLTILNTMLRTNQSWHAPTT

SEQ ID NO: 120236 - protein, 341 aa, unidentified
MSLSQTIVGIDIAKSVFQIHEVDKETGEVTSRQIKRARLLQHFINREPCFIGMEACGGAQHWARQFVAMGHTVKLLPAQSVRPFVGGNKNDAADARAIWTAVQQPGIKAVAIKTEAQQAVLALHRMRQQLVKFRTAQINALRGLLAEYGEVMPLGRDAVAKALPSVFARLVDRLPGVLIESLREQYTRIAQLDKEVSNIERRLREWHRDDESCRRITAIPGVGLLTATATVAAMGDPGAFSSGREFAAWLGLVPRQTGTGGRVKLLGISKRGDRYLRTLLIHGARSVLMTSKTPPAWAANLATRRPLNVAVVALANKMARTLWALLAHQRVFQPEYVSRPA

SEQ ID NO: 120237 - protein, 333 aa, unidentified
MLPPNCGTATPYILRNTVGLDISKLTFDATAIVGNAEYSAKFDNDSKGLDQFSDRLKSLGCQNLHICMEATGNYYEEVADYFAQYYSVYVVNPLKISKYAESRFKRTKTGKQDAKLIAQYCRSAQESELVKRQKPTDEQYRLLRMTAAYAQIKSECAAMKNRHHAAKDEEAAKAYAEIIKAMNEQLEVLKEKIKEQTEKPKCKEGVKRLETIPAIGRMTAAVLFHHLTSSKFETSNKFAAFAGLSPQQKESGTSVRGKGKLTKFGNRKLRAVLFMLTMVAYRIRAFPDFIKRLEEKKKPKKVIIAALMRKLAVIAYHVHKKGGDYDPSRYKSA

SEQ ID NO: 120238 - protein, 412 aa, unidentified
MLDSSVVESTAAGGVFIGVDWGNSHHQLCVLDAAGRIKHQRKFTHDVAGLRDLLDQLQRHGPVTGIAIERSEGLLVESLQQQGFRLFCVSPKMAARARERYRLAPTKSDAFDAFVLADSLRHEYRHWRSLAVPSPLLAELRALTRDRERLVCNQRDVENQLRATVLTYHPGVLHLFSSLDRDITLAFLRDYPTPAQAGRVGASRMTAFCARHGYSGRTRPELLVERLRANLLSASAGTTAGKAFTAGLFVDQLELLNTHVRVITKRIRELLAAHPDAAIFLSFPGMGEVTASILLAEMGEDRHRFPTADVLLAETGTAPVTRSSGRSRTVRFRYAANKRMRHAIDWWAFVAVRENAWAHDAYQQARDRGQLHNRALRGVGARWTRILWRCWIDHTTYDPGRHLRNQPAATTG

SEQ ID NO: 120239 - protein, 449 aa, unidentified
MPKKRNKVCSLPVIETNAAGIDVGATEIFVAVPADRDAEPIRCFPTFTVDLERLADWLQQCQIRTVAMESTGVYWIPLFQILEKRKIDVRLVNAHHVKNVPGRKTDVSDCQWIQHLHSVGLLRGSFRPDDEICALRSLWRHRDNLIQLATLHLQHMQKALDQMNLQLHHVISDLAGTTGLAIMDAILAGERNPQKLAQLRNRHIQASEETIMKSLVGDYREEHLFTLRQSLKSYRHYQELIQEVDLQVKQMLQRLPSKTAAGDEPPKGDKIRRTPWRNEPPQLRNDLYRAFGVDLTEVPGINSLTAQMLLTEIGPNLSRFPTAAAFCSWLRLCPNPKISGGQVLSSRTQPTKNRAALALRMATQGLHRSDSFLGDYFRRMKARMGAPKAMTATAHKLARIVYHMVTTQQEYDATVFQQQEQRRRLQKSARLHAQARELGFDLVPINAVP

SEQ ID NO: 120240 - protein, 340 aa, unidentified
MKRYLGVDLHRNCFTVCTLKEDGQSELRKWSIHSLCDFAQEVQATDAVAVEATGNARYFCQALKERGCRLVVVNPHQFQVVSRSVKKTDAHDAKTLAEFLAKDMLPEVRMKEALPAEIASVLQTRDKLVKLRTVLKNKINNLLAGQGILIRRESLSSDKGLEQVLQAPVSDLERVELEVLVGQIRHLNDSIRRLEAAIKEQGPKLPGYESLKSIKGIGDIGASTMLSTIGDINDFASEGKLAAYFGIVPRVQNSNATERSGRITKRGSKLGRTALVQCALIAMRYSPYLAHYYARIKAARGTGKAIIALARKFLGIIYKTLKNGWVFEDFPAFVLAPAAG

SEQ ID NO: 120241 - protein, 361 aa, unidentified
MRKVALDLGVRKTAYCEVRDGAVVQRATVTSVESLASLLGPEQPPAVVAIEACREAWHVHDLLRGWGNEVVLVDTTRSRRLGIGQHGRKTDRIDAEVLALALERGGIPMAHVLSPHRRELRRWLGVRRALVESRANLITTCRGLAREQGVVLPKCAVASFAKKARQTAGLALVVLGPLLKQLDAINPEIAAAEGKLAELCETEPVVKLLMTAPGVGPTVAACFVSVIDDAKRFRSPHQVESYVGLVPSEDSSGGKQRLGAISKKGNPYLRSLLVEGAWGILRHRDPKEPLRVWAEAVAERRSRKIAVTALARRLVGVLWAMWRDSKPYDPKLLAAASSRGTRQLANVLHAQARQMEVQLQP

SEQ ID NO: 120242 - protein, 360 aa, unidentified
MLRIADAGPLVTGGVDTHAEVHVAGVAGQAGRVLGTGEFPATTEGYHAALAWMRGHGDLVKVGVEGTGSYGAGLARYLAGQDVEVAEVIRPNRQARRRRGKSDAADAVAAALAALNGEASGTPKSRDGAVESIRALQVARRGAVKARTQAANQLRDLIVTAPEALREELAGVPTAQRAEHAARFRPGDLTGPGGVSAAMAAVARRHQALTAEITELDASLAELVGCAAPAAFLSKQGVGTQVAAALLSAAGDNPGRLRCEASFAALCGASPVDASSGKQRRHRLNRGGDRQATSALWRIVMVRMSHAPRTRSYVARRTAEGKTTKEIMRCLKRYVAREVYKALATSGAGHAAGSTLNPAA

SEQ ID NO: 120243 - protein, 361 aa, unidentified
MRIIGCDLHARQQTLAMLETTTGEVVNRTLLHEGNHVREFYSTLPRPVLVGIEATGSTQWFLRLLDELGIDCQVGHPATIRAAEPRMQKHDRRDAVLILRLLAENRFPAIWLPSKELVDLRALVLHRHQWVRMRTRVQNALQAIALANGLRRGPGLWSRDGQQKIASLPLMPHTADRRNALQAMYQKMESEIENLTQQVADQAFHRSGAQLLMTHPGVGPVTALATDVFLGDPKRFVDGKALASYVGIIPREYSSGARQRFGGVTKQGSPLLRFLWGEAGAHAARRDPELKRFYRRKVVQKGLGKARVAVARKLGIRLWIMLRDGIDYAEFCRRGQKQQSGAACAGMPETGFGANRHRPVE

SEQ ID NO: 120244 - protein, 370 aa, unidentified
MGKKLLYVGLDVHKKTIDAAVATGRSNGKVRSFGKINSTLNALDKLTAKLQKPGVELRFVYEAGPCGYQIYRHLSSKDIHCSVVAPSMIPKRSGDRIKTDRRDAINLVRLFRAGELTSIYVPSVDDEAIRDLVRCRDDMRRLERKARQRLLAFLLRHGHQYSGKKHWTKGFYTWLAMIKFSHRAQQITLQEYIDTTNECGERIKRITQQIQTQIETWERLPFVKAYQALRGVSFIVAVTVVAEIGDMNPFPTPKQLMAYLGLIPSEHSSGNTVRRGPITKTGNSHVRRVLIEAAWTYKMPARVSTILLKRQQGLPKSVRDISWKAQTRLCARYRRLIARGKSRQTVITAIARELGAFMWAIDKQMQVAKA

SEQ ID NO: 120245 - protein, 488 aa, unidentified
MSTPRKRKEKKGSDAQRSASKRKARDSHCQQGDGNRRRSKLTITNPDAAGIDVGARIHYVAVPEGRAEVSVRSFGAYTAQLDELVQWLKDCRIKTVAMESTGVYWIPLFQKLEEAGFEVLLVDARQAKHVPGRKSDVQDCQWLQQLHSYGLLRAAFRPEDSICRLRTLQRHRKNLVESAAMWIQHMQKALNEMNLHLHHVLSDISGRSGLAILDAILAGERDPKKLASLADRRVEKSQAQIEAALTGDYRPELLFVLSQSLHNYRQMQEQIAQCDLSIEKQLAKMADCTNPNQASEPIQQSQDSAGSKPRKRKPKDALELSLAGHLKRILGVDLTTIPGLNILAVLNLLSEIGTNMAKWRNEKAFVSWLGLSPNNKISGQRVLSSRTRKVVNRAATTLRLAVMILGKTNTPLGSFYRRKRAQLGAPKAITATARKLGCLIYRLIKNGQGYKEPDLHTYELKFKDQILNSLRKRANSFGFDLVQVPKAA

SEQ ID NO: 120246 - protein, 345 aa, unidentified
MDIMYYIGLDVHKKTISYCVKDASGQIHQEGKIGATRCELDCWMKTLRQPWTVAMEATIFTGWIYDHLLPHAAQVKVAHPLMLRAIAAAKKKNDRIDAGKIADCLRCDFLPECHIASTAIRDRRRTLRYRHLLVRQMVQMKNRVSGLLMETGVSYNKQRLHKVGYFRELLSSNQEVHESIRPLLKLSRDTIVRLQKTEYALVSSLQRDPLLADRVQRLKTVPGVGPITALSWALEIGDASRFRSIRQAISYCGLCGEEKSSADKVMRTPLSKQRNKHIQRVLVEAAKLAPRQDHDLALVYQREKEKGNANRATLAVARKMVAYLLAVDREQRDFVPAEDHRRAAA

SEQ ID NO: 120247 - protein, 423 aa, unidentified
MPYRIAGIDVHKKKLAVVVADVEVEDEYQFERRWYGSNPEQLQLLGEWLIQQQVEEVVMESTAQYWKPVWGALEQYWKPSCEKREGAGRMSGTLHLAQALSNRGRRGRKRDFRDAERLLKRLVSQELTLSFVPPAEQRLWRTVTRTKYQLRRNKVRLHNQLEALLEEAHIKLSSFVSDLLGASARRMLQALADGETDPAALAVLADQRLRATSAQLRDALGACTELNPVYRRLVKMALEELQLIEQQIAQLDKEIASLLRQHQDAVRRLAEVPGLGVDSAQQIIAEVGAKAATFASAKNLSSWVGACPGEEESAGVNYSPRSPKGNRHMRRLLNQAANAAAKHKGSIFEIVYRRLVPRLGHNKTIGAIAHRICQLIWMILNKGVRYEERGPAVSENSRRARTSRMIRTLRKLGYRVEPLRDPA

SEQ ID NO: 120248 - protein, 397 aa, unidentified
MIAVGIDISKAKSTVAVINSDGTILASPFTMAHTRPEMEAFVTYLKGLGEPTTILMEYTGHYHYPVLKKLQDEGFPVCIVNPYQMKKYGDVEIHKAKTDKKDALRIATYALEKSYKLVPYSSMEQKYEDLKFLSRQYNQRISYVTKLKVQLISLLDQTMPGITKILPLNSRNPEKCALLLFIKRFKSFDEIQRIGKARFLASYDVLAKKASERSASSKGLSIYELAADSITTRGEDPYIWLSQNQCVDLLSATQNAADDIISQMRNIAQTIPEYKILRAMHGVGDRLGPIILAEIGDIRRFHSGKALNSYAGNDAPPYQSGQFESRNRHISKRGSSALRKACYEVMQALKLTKPQDDPVYLFMLKKEQEGKPFNVAKMAGVNKFLRIYYARAMELYK

SEQ ID NO: 120249 - protein, 356 aa, unidentified
MSRDVKYIGMDVHKEATVIAVRNSRGELVMESMVETESSTIVQFIHGLRGELHVTWEEGTWAAWLYDLLKPHAHEVLVCNPRRNALLKEGSKTDRIDARKLSELFHAGMLGAVDHGENGVRTLRELACMYQTVSQDLTRVMNRVKALYRGWGIACAGTQVYAPRYREEWLQKIEQAGVRRRAELLYEELDGLQALRRKVRPELLTESQKHKAAKLLRQIPCIGPIRAARLIALMQTPHRFRSKRQLWTYSGLGIETRDSGQYRFVDGQLQRSKKPQQVRGLNRNHNHEMKEIFKGAATRASCGVGPLREFYGRLLDKGRKPEMARLTLARKIAAITLTLWKKEERFDAEQLKTQAA

SEQ ID NO: 120250 - protein, 394 aa, unidentified
MTATYTHSIPAGTLVLHVAFELGANQWKLGFSTGLGVAVRLRTIGAGNLAVLRREIELAKKKFWLTDDVPVCSCYEAGRDGFWLHRWLVEQGIGNIIVDAASIEVNRRYRRRKTDSLDAAKLVAMLIRHHAGEKLWSVVRVPSREDEERRHLHRDLEEMKAETTQHRNRIRGLLAGVGARVAEINSNFLEMLPTLQTADGREIPGELRARLLREFERLQFVEQQIRSLERQRNQKLRDGDDQEYVVKARKLMGLRAIGPHSAWVFVLELFGWRRVNNRRQLASLVGLTPTPYDSGEDEREQGISKAGNRRLRTLLVEIGWCWLQYQKSSALSQWYQKRFAGGSKRQKKIGIVALARKLLIALWKYLQHDEVPEGAVLGNWRSKLIGLGAQSLPN

SEQ ID NO: 120251 - protein, 351 aa, unidentified
MNTVTIGMDLGDKNHALCILDKTGKVIKQTTITNTSDEIKKFFARYKGATIALEAGTHSPWISRQLAAMGCNVLVGNPRKLRAIWDSNDKSDNRDAKMLARIARFDPELLYPINHRGKQAQIDLELLQARDILVRNRSRIINHVRSSVKSLGGRLPKCSAECFHRKADKHLPEELCDILKPLLMIIEQLTAQIKTFERQVDEISRERYPETELLRAINGVGPLTSLAFILTLEDPTRFDKSRQVGNFLGLTPRRDQSGAIDKQLRITKAGNPYLRRLLVSAGQYILGPFGEQCDLRRFGKRLEARGGKNAKKRAVIAVARKLSVLMHRLWLHGEVYDPNYLVNSRTLAKAA

SEQ ID NO: 120252 - protein, 474 aa, unidentified
MKEHKKAKAKTKSELSKAIREREPNAAGIDLGAEGIWVAVPADRDANAVRRFEAFTRDLVAIVQWLVGCGVRSVAMEATGVYWIPLYQLLEDAGLKVCLVNARHVKNVPGRKSDVRDCQWLQYLHSVGLLLGSFRPAQVICATRSIYRYRQNLISMAAEHIQHMQAALEQMNIKLHHVIDDLTGVTGQAIIAAILSGQREPVQLAKLRDKRIQACEEKIVKSLEGDWRKEHLFVLAKAWAQYQEVKKQIQDCDRELLEYTSELEACTTVSKPAKVVHLKAELLGAEPVSNPLPKKKARTKTSKNQPEGPWQQELERFFGVDLTVIPGISVLTGLTLMTELGNDLRAFKTQHHFASWLCLCPDNETSASKVLRRATRRSQNRVRQALRMAASSLHHNKSYLGDKYRRLRARLSPPKAITAMAHQLARIIWTLITRQVPFDLSLFAEQEKLNHQRRLKRLAASARQMGYQLTPVAA

SEQ ID NO: 120253 - protein, 375 aa, unidentified
MKEKLRFLGLDVHAETVAVAIAEPDGEVRSLGTIPNRADSLRKLIKKLGPAEKLRVCYEAGPTGYVTYWQLAELGVKCDVVAPTLVPVKAGDRVKTDRRDAEKLARCYRSGDLTAVWVPDEGSEALRDLVRAREAAKQDQMRARHRLSKFLLRSGQRPPTGVRPWTRPYLIWVAQLRFTQVAQEATRQDYLHEVEHMRERVARLEQAIMEAVKLASPALQQVINDLQALRGIADISAVTIAAELGQVSRFGSARQLMGYCGAVPSEDSSGKRIRRGGITKTGNAHLRRIVGEAAWSYRRPPGIWYGLRRRQESISEEVKEIAWKAQHRLHKRYMKLGAAGKPQGKIITAVARELLGFIWAIGTRAETTVSQRAAA

SEQ ID NO: 120254 - protein, 372 aa, unidentified
MNYNTVYVGMDVHKESFTLCSMTIEDEKASHYQKTEADYKKVLKYLEFLRTIYGGNAKFICGYEAGCLGFTLYHQLTSQHVECIILAPTTMLEQRSKKRIKTDKRDAEIIAKCLAQHNYSPVHIPTATDEQVKEFLRMRDDHKLALKKIKQQILAFCLRHNYRYDGNSHWTAAHLRWLKSLQPEALYKEILDEYLLTYTTLSDKLERLDKRIEELASKDEYKEAVKKLCCFIGVKTHTALSVLVEVGDFNRFASAKNFASYLGLVPGENTSSDDRNLLGITKAGNRHVRLLLTEAAQSYARGQIGYKSKDLKSRQSGNSAQVIGYADKANERLRRRYYKMVLGQSKKHNVAKVAVARELACFMWGMMTEHIS

SEQ ID NO: 120255 - protein, 356 aa, unidentified
MPTEFAAIIAIDWADQKHAWAMQAGTSKVETGAIDHTPEAIEVWAAELRMRFGGQSVAVALEQSRGSLVFMLTKYDHLVIFPVHPTILVNYRKSFRPSGAKNDPSDARLLLDILMLHRDKLRRFNPDTPETRTLQFLVEERRKFVHEKTRCSNRLTAHLKMYFPQVPNWFDEIGSNIAAEFLERWPSLEKLQRARPATIERFFIDHNSRDPERNKERLEQIRKAVPATTDAAVITSSSVAIVAWAGLLKQLLVAITAYDKQIDELARAHPDFELVKSFPGAGPAMAPRLVAALGSQRERYQSAAEIQRYSGIAPVVASSGKQHWVHWRWACPKFLRQTFHEWALHSIAYSDWAREY

SEQ ID NO: 120256 - protein, 369 aa, unidentified
MKKLSSMATTATAVGIDVGDRISHWCALDKAGEVVGRGRMRTTAEAVTEQAQAWRGARVALENGTHSGWMSRALTAAGCETTVANPSRWRGTAHMSKNDRNDAEALARVVRLDPRLLFPIEHRGEQHQQDLAVIRSRAQLVKTRTQLVNSTRGLVKSLGARLPRADAAYFTQKTWSEVPEALRPALAPLYRTLAALNQEIRTLDREIEQLSQKRYPQTAGLRSVPGVGPVTALTYVLTLGDPHRFPRSRDAGAYLGLRPRQRQSGERDPQLGIAKNGDCCLRSLLVECAHHVLSRGPDSALKRWGLALAAGGKRVKRRALVAVARKLAVLLHRLWITGRLFRPFPEAVPEETVDAGLRAHRSLGTAAAA

SEQ ID NO: 120257 - protein, 327 aa, unidentified
MNHSEQVKAVLGIDIAKATFKVALLRESKFKHKTFPNHQEGFKALTLWLTQHRAQQVHACMEATSHYSEPLAEYLFDQGMAVSVVNPARIKGYAQSELVRTKTDKTDAALIARFCAVMQPALWQPEPQEIRVLRAYVRRLDALIDMRQQERNRLEATDAVLADAIQSHIVYLEQDIKQTQQKINDHIDNHPHLKDKKQLLESIPGIGPATINVILSEFAQVQRFKNAKHLAAFIGVAPRLFESGTSVRGRSRMSKIGRSQLRKAFFMPAMVALRYNPIIKSFGERLRASGKTKMQIIGAAMRKLIHIVYGVLKNEMPFDEKFFVKIA

SEQ ID NO: 120258 - protein, 423 aa, unidentified
MSQNQPEIQYAAFLAIDWADQKHVWSLQEANSSTRLRGEVDHMPEAVETWVAQMSQRFPGRPIAVAVEQSRGALVFLLSKYEQLHIFPVPPAMTANLRKAFYSSGAKNDPSDADLLLDLLQRHREKLRRLSPDTEATRRIQNLVEERRKLVDEKTAQSNRLEAHLKIYFPQIPRWFGDVDIPLVCALLERWPTLEALQKARPDTLRSFFRKQHSRKEELIESRIKAIGEAMPALKDRAVVEAKVAVVKVLVQLIQVLHEGIEGLNRQIQEAAEAHPDFFIFDSLPGAGAVMAPRLLAAFGSQRERYQNAAEVQIFSGIAPVSESSGKSSWVHFRFACSKFLRQSFHEWAALSITQSQWARAYYELQRRRGKKHHAAVRALAFKWIRIIYRCWKEQVAYDENVYLAALAKHNSPLVAATKAVAL

SEQ ID NO: 120259 - protein, 401 aa, unidentified
MTGTEPQESIQVFVGVDVGKGTHHAVALDQTGKRLLDSALPNDEAKLRALITKLKEHGRVLLVVDQPATIGALPVAVARAEGVAVAYLPGLAMRRIADLHAGEAKTDARDAYIIAEAARSMPHTLRSLKLADNEVAELTMLCGFDDDLAGQITQTSNRMRGLLTQIHPALERVVGPHLDHPAILDPIERHPSPAQLASLSEKQLANRLLRLAPRMGKRWAAEIVQALSEQTVVVLGTQAATVVLPRLAQQLAALRRQRDEVAKEVERLVLAHPLHPVLTSVPGVGVRTAARLLIDVASRAFASAAHLAAYAGLAPVTRRSGSSIRGEHPSRRGNKQIKRAMFLSAFAALRDPISRAYYARKIGQGKRHNQALIALARRRCDVLFAMLRDGTLYSPPANEIY

SEQ ID NO: 120260 - protein, 346 aa, unidentified
MQPVIGCDAHKHFSVFVSVDQHGQPSRPVRVDHDRDLYCSYLRSLPAGSEIALEATGHWYWIVDAMEEAGHHPHLANPFEAKRRMAKSNKTDALDAKGLAILLRCGTLPESWIPPGELRDQRELLRTRMALRDLRTSLKHRIHAGIDRYGLQADAISDLFGTKGRIYLASILKALPTETAHMIALQLNSIDQLEEKITAIELRIAEQLKASPEIRLLRTVPGLGPILAPLVWLEVGDVERFPRAEHLASYAGLVPRVISSGGHTRHGGTCRNVNHYLKWAFVEAANCAIRIKAHRQNHIGLLYQRLYPNKGHGRAVVAVARHLAEASYWVLRKRQAYRAPQPRIAG

SEQ ID NO: 120261 - protein, 405 aa, unidentified
MTDPSERGWRGQGARQRPAEPVSGGADFVRALFERSHEIDDVDGPPNPSREMLRSFCATQRRNRVMTFEKITVVGLDLAKNVFQVHAIDDVGNVIVRRQLRRNQLLHFFEQLPPCLVGMEACSTSHYWARELGALGFDVKLMPPVYVKPYVKRGKNDAADAEAICEAVTRPTMRFVPVKNCERQALLMQHKTRDLFVRQRTALINALRGHLAEFGIITPQGKFGLKAALEALHVAKDHLPEPSWQPFKHIQMQLEELSNKIAELDRTIMQWCRDQAAARRLMTIPGVGFLTAAAIAASVGNAEEFKSARQFAAWLGLTPRQNSSGGKERLGRISKQGDRTIRRLLVVGATAVIRRARIDAPSFPWIAKLLQRKPARMVSVAIANKTARVAWALLRREETYRHAAV

SEQ ID NO: 120262 - protein, 369 aa, unidentified
MVLFTEHLARQHFVPPGGIDPAAEPKAQYRHATVPTTREGLESILAPLNRNCRVAFEVGLQAQWVAEIVRPLTTDLQVANPSKMPWLFRDGRKNDKLDARKLATLLYLDQLPRVHLPRAEVSIWRSLINHRRARIKRRTMVKNQIRALLRARALRCPCKSLWTRKGQTWLRSLAFDPVCVHMMQGLLEELALIEGHIDGVEVQLDGIAKTQPAIALLRTIPGIGPRSAEAIVAYTDDVRRFGNRKQFASYFGLTPTQDASGRVDRHGHISKRGPSVVRWVLVEATHQVVLRCPAFRAFFERIVRGKPDRRKRAIVAVARKLLTIAFAMWRDGTPFDPARVSPPAETKKPAPQAANDPKEKPEMTHKPAA

SEQ ID NO: 120263 - protein, 524 aa, unidentified
MPATRTRKRSRTRFVEVLQKPKGVIHPRVQKVGPEHFGIVSIDCAKARCKWMLCDFYGNVLVPPTIVALNRNDIQAAVERLRQALAQHNIHDQLVAVERTGRYHHIIRDAFRAAGYEVRLVHPFTTNRFRQPSDPGIKTDDIDMAAIHCATANGFALLEPQLDETWTVFQLRVRQRRDLVRKSSQLCCQIREHLEACLPGFAACFEERLWESAVAWTLIRQFTTPQAMHQAGVDGLRRCLSRAGIRYQQRTLQKVLAWAGAAAAPELAAAIHHGIVLALNEDRSRKTLEIQALESELAGRLARTPYIRLLSVPGINVISAADLGGEAGPIEHYLNGRGITGRAGLRPSRRQSDAVDRPNGPLIRCANRRLRAALMWIADNLLVCNQHFNVLAARWKAAGKDPRHTRTRVASRFARIAYQIVAGGQVCRHPAMQQQSYILEKLLIFHTAHGTPMAQTLADLQAAAGQLPQSAHAREAQPLSDILRKLEHGRKRGPVPIADIIPIVLARLGVRLLQSKASGEADSR

SEQ ID NO: 120264 - protein, 356 aa, unidentified
MARTSLSSVQQFVKGFEAHPFFIGIDVHKRSYHLALRRIDGKTVTLVCPADPLGLVGVIQRLCIRVGSIAYEAGPTGFGLARELRQAGMKTLMAAPSRIPRAVTSGAKTDRLDCLRLADYAAKGMIRSIAVPSAQQEAQRSLLRRRHDIVDSRRRCKQRIKSLLLFLGLPEPKPTERWRRGSEEALRELPMEPHARLTLESHLRELSFYQNELSEVEEQLSQMGRQQAQALACLQSVPGVGEVVATTFMLELFDPERFQRAEEVTSYLGLAPMVRHSGEKTPSGRLRPVGQTRLRSLLIEAAWTWRQHDAYARALYNRFLGRMGIAQKAIAAVARKLAVILWRLYVERRQYRPAVI

SEQ ID NO: 120265 - protein, 377 aa, unidentified
MSNCTRYLGLDVHAETITAAIAEGRDRIRNLGKFPNRPAAVRKLVDKLDGGKNLKVCYEAGPTGYALYWQLTHLGVDCEVIAPSLIPKKSGDKVKTDRRDAEKLARSYQSGDLTPVWVPTPEHEALRDLVRERAAAKGDESRAKHRLTTLLLRHASREPSGSRAWTHPWWRWVQALKFDHEARQVTLADCIAEVLHMAERLARLDQAIDRVVETAPPHMRAVIEALQALRGVAKLTAVTVVTEVGTFQRFHRPTQMMGYTGLVPSEHSSGGRHAQGAITHTGNAHLRSVLVEAAWHARHRPWLNKRLKKLLPTLPADVAEVAWKAQERLHRKFGKMIYSRKHAGVVAAAVARELVGFIWAIGTMVEAKHNETMARAA

SEQ ID NO: 120266 - protein, 393 aa, unidentified
MVCVGIDVAKDKHDCFIISSEGEILADVFTIPNNAEGFDTLLQAIRRSTRPEDKIKVGLEATGHYSYNILGFLLDKGLPTYVINPLHTNLYRKSLSLRKTKTDRVDARTIAAMLMSDVDLKSYTDTVYHNEELKSLTRYRFDKVRERAKLKQSVSRLVTILFPELEKLVSSLHSASAYALLSEFPGAKQISSTHMTHLKAVLKNASQGRYGQEMAETIRNAARSSVGSVMPAKSLELQHTIRLIRELDAEIEDIETAIQAIVDEMQSPITTIPGMGVRMGAVILAEIGDFSRFDSPDKILAYAGMSPSTYQSGQLSLSGAYSHMEKRGSRYLRYALYNATKHVCHWDPTFAAYLAKKRAEGKHYNVALSHAAKKLVRLIFAMEKSQRPYCAAA

SEQ ID NO: 120267 - protein, 412 aa, unidentified
MTATNQFAAHVGLDWADKKHDVCVQFKNGERVFHVIEHTAEALDVWLTELHQKVKGRIAIALELKKGPVVYALQKYPFITVFPVHALSLARYRQAFSPSGAKDDPQDAELALELMLRYPQKIKAIEPDNADIRLLQQLVEQRRQLVEDKRRFVNRLINTLKQYYPQPLEWFSHRGSLLLCELIMRWPSLQQLKRARRDTIRNFLNARGGRAMALTEQRVANIDNAIPLTTDSSVIEANALMATALATQIKVVSEIIKTYDERIETLFDTLPDAGLFKSLPGMGPCMGPRMLAALGDNRDRFNSAEEIQNYAGIAPVTERSGQKSWVHWRWQCAKFVRQTFVEWAAKTVNSSYWARLYYQGQREKGKSHQSAIRALAFKWIRIIFRCWKTRTRYDEAKYLLALEARKSPLLKP

SEQ ID NO: 120268 - protein, 334 aa, unidentified
MSMLAELVELVIGVDTHTDTHTAVLVAVDTRAVLATVTVTADAQGYTELVTLAEHHSGLRAWAIEGAGGYGAGLARHLQELGELVVELDRPVRPGRRAGAKSDVIDAERAARDALSRVRLAARRAAIAAATTAQHQLRALVITAPEPVRARFRGQSTRDMLTTAARLRPTTAGGDIHTMTALTVLRALARRVHTLQAEAADHERAIQTIVRGWRPDLLEQPGVGPINAATVLTAWSHPGRCRNDAAFAMLAGAAPIPASSGKTVRHRLNRAGNRQLNRTLHNITLSRLRYDPDTRAYAQRRRGEGKTDRDIKRCLKRYIARQLYRQLETGAAAA

SEQ ID NO: 120269 - protein, 428 aa, unidentified
MKIRTVAAPDKERPLLILSADVGSKTLHLFSRFDSGARVHSLEDVVANRTAPVEGALTEVAALAKEHGFHGVRVLCEASGGYERLLLSVAQRLGFQTALVSSEQVGQLTKVVSLDTGKTDKKDARGIHLAGELRKDRPFRVLPQRYVILRRLTAFHDDETLIASTLRMRLHAVIVEIFPDYNQRPGFAFSKTGRVLLRQRLLCPHRLVRLGEARLLSTLRRHMRYVRTSTVTQLIESATTSIRSAPPRAVTDILSERLAVLMAEFEMHEAHAEALKAQIEDLGAQLKASGELPPIDEVVSGLTLFNLARLIGQTGPLSNFPSQRQILRYGGMNLQERESGTYKGKTRLSKKGRPLLRKVLSQATYPLLRRDRLLGTLHAKRCTHMKKKQAMVASMRKLLTMVWGAHRSASAFNPARVHRCASQFARAA

SEQ ID NO: 120270 - protein, 414 aa, unidentified
MALKIVHPVCCGIDVHKTFVVACIAKTNNKGITTYKRHRFSTYTKGLKELSQWLCEHDCKEVCMESTGKYWIPVFNILENSCNITLAHPKYVKAIRGKKTDNKDAQWIADLFKHDLVAGSFMPPLPIRQLRDLMRYRSKLTNFMSSEKNRLQNCLTVSNIQLGNVVSDTFGKSSMKIIDKILENPLDSSFDLQPLIHGSLKKKISELELAVDGFITPEQAGKLKIIKQHHSDLADRKSELEFIILSLSVPYSEEINLILTVPSFKNIFSAITVVSEIGANMDVFPTAKHLCSWAGLTPTNNESAGKKKSVRISKAGCYIKPLLVQCASSVVKSEKHPEIRNRYLKLRKRRGHKRAIIAIARMLLTAIYMILKKKEPYNADLYKKSDVLPVDREITVEQAILFAKTQGYRIKETT

SEQ ID NO: 120271 - protein, 403 aa, unidentified
MNNVAGIDVSKGKSMVSVLRPFGEVVAKPFSVGHTGSELKELADYLKSLDGETRVVMEHTGRYYEPVARFLHEEGVFVSAVNPKLIKDYGNNTLRKVKTDKADSRKIARYGIDNWAELRQHTPMDTIRMHLKTLNRQQSLYTKTKTMMKNNLIALLDQTYPGVNALFDSPVREDGSQKWVDFATAFWHVDCVRSMSLTAFAERYRKWCKRHGYNFSQSKAVEVHAGAQDLIVMLPKDALTKTMVRQAIDALNAVSASLERLKAEMRTLAAQLPEYPVVMAMHGVGDSLGPQLMAELGDVTRFTHRNAITAFAGVDPGADQSGTHEAKSTRVSKSGPPELRRALFLVMDCLLKTQPQDDPVYRFMDKKRAEGKPYLVYMTAGANKFLRIYYGRVKEYLASLEGN

SEQ ID NO: 120272 - protein, 405 aa, unidentified
MEIFCGIDWSEAAHDVAVVDESGRLLARRRIADDAAGFTALTELLAGYAGRPERVDVAIETGRGLLVAALRAAGHRVFAINPKAVDRYRDRHGVAGAKSDPGDARVLADILRTDRDRHRPLPADSDLAAAVGVLARAHQDAVWARVQDANRLRSLLREFFPAALTAFADLTTNTALAVLAAAPTPTAAARLSRANLTDLLRVAGRGTRPTEAVRLAEIFTVDQLRQPPVVEAAMGQAVRAIVRTLTAANQSISDLEAALAAAFDQHPDGEILRSLPGLGPILAARVLSEFGDDPTRFPDPASRRAYAGTAPITRASGRSRVVLARHVRNKRLADACYLWAFAALNRSPGARAYYDTRRAAGDRHNAALRRLASKLLGQLHHCLTTSRPYDEALAWPQPDTTPAAA

SEQ ID NO: 120273 - protein, 343 aa, unidentified
MKISMIGLDLAKNVFQVHCIDGSGTVLVQRQLRRGQVQGFFAKLAPAVVGLEACAGAHHWARLLRGMGHDVRMMAPGYVKPYVKRNKTDSRDAEAICEAMQRPTMRFVQIKSVESQAILMLHRTRMLLVRQRTMAANALRAGCAEFGLVAAQGLKGLHSLMAQVMDEAAGAIPELARSALRLLARQWEALDDDIRGLEARIVRAAREDHTAQRLIEIPSVGPITASTTVAMVPDARMFRTGRDFAAWLGLTPRQQGTGGKTRSGGISKQGDRTLRTLLIVGASSVLRQAKLRGSKDPWVSAMLARRPFKVVAVALAARTARIIWALMVKGERYRDRAVIAAAA

SEQ ID NO: 120274 - protein, 343 aa, unidentified
MDYFAGLDVSVKETSVCIVDDAGKIVREARVATEPEALLQVLTNTLYRLKRVGLEAGPLSQWLYSLLAEAGLPVICVETRQMRAMLKAQINKTDRNDARGIAQMMRVGLYRPVHVKTLRSQKLRVLLTHRKLLQSKAIAIENDLRATLRNFGLKVGMVGTVKFEARIKELVENLPDVAVLVGPLLVVRRVLREQIGILHRRLLAVVRGDDVCRRLMTVPGVGPVVALTYRVTVDAPARFRNSKAVGAVFGLTPSKYQSGQNDRTGGISRCGDEMMRVMLYEAAQSMLMRSTKWSWLKAWAMKIARHRGMKKAIVALARRLAVIMHRMWLDGTEFRWTREVAVA

SEQ ID NO: 120275 - protein, 326 aa, unidentified
MEHELHYIGIDTAKEKLDVDVLRPDGRHRTKKFANTTKGHDELVSWLKGHKIDHAHICIEATGTYMEPVAECLYDAGYIVSVINPALGKAFAQSEGLRNKTDTVDARMLAEFCRQKRPAAWEAPHPLERALRALVVRHQALTDMHTQELNRTETAREVQRPSIDAHLLWLEAELKRLEKQIKDLTDDDPDMKHRRKLLESIPGIGEKTSAVLLAYIGLKDRFAHARQFAAFAGLTPRRYESGSSVRGASRLSKAGHVSLRRALYMPAMVATSKTEWGRAFRDRLAANGKKGKVILGAMMRKLAQVAYGVLKSGVPFDASRHNLVAA

SEQ ID NO: 120276 - protein, 331 aa, unidentified
MYFSQFIGVDISKNTLDAAIYPAKDKKLDFLHFDNTQKGLGEMLSWLKRRGVKPSEMVICAEHTGVYTNPLIAFVDKKGLALSLNSPLDIKHSMGIARGKNDAVDAGRIAEYAHNHRDKLRLYEKPSEAIMKLQYLLTERRQYMRQRTAIINLNSAMGKYETPEARYRNESAIHHCEKLVKKVEEQMMDVLCSEPEVKQNFDLVSSVKGIGLINAINTVVYTNNFKAFETPRRYACYIGVAPFDHTSGTSVKGKTQVSKICRTQQKAELSMAARSAVVHDPGLKRYYQRKMKEKGGGKDAHGVVLNAVKFKLILRMFAVVRSRQPYKVLNY

SEQ ID NO: 120277 - protein, 500 aa, unidentified
MEIVYQCCTGLDIHKKDVKACLITTGPDGEIHKEIRTYPTKTQDLLQMRDWLKEAGCGHIAMESTGVYWKPVYNMLEGYFKLLVVNPQYVKALRGHKTDVKDAEWIADLFRLGMLKASFIPSTDQRELRELTRYRTRLGEERAREVNRLQKTLEDTNTKLGDVVSDVMGKAARMILYALANGETDPHRLASFAVGRVRASQEQLERALTGQVSAHHRFMLGEQLKQIENLDAAIKRVSQEIANRFAGQETDPITEKPQITPSKQEKPEPTKPTQESVGSCTNDQVVGPSLLDGPMSPPSTSQPAEGSRAQRDEDIQRAIQASESGLCGRATQLLSWHQAMELLCSIPGISERAAQGILAEIGLNMGQFPSARHLASWAGVCPGNNESAGKRFSGKTRQGNPWLRRLLVQVAHAAAHSKKSYLAVQYRRIASRRGAKRAAMAVAHSILVIIYHVLLEQKSYQDLGNNFFDERDRQVVEKQLVRRLERLGYRVDLQELPQTG

SEQ ID NO: 120278 - protein, 357 aa, unidentified
MAIVAHSHPFVIGVDTHARNHAISILACPHGEILDEGQFPATAAGLARAASWVARRTGGDLAVLWVIEGTGTYGARLARVVADAGYEVVEAPRMSARANRGIGKSDPLDARRIAAAALPLDVTQLRHPRADDGVRAAVRVLLASRDHMSNERTATINALTALLRVSDLGIDARRPLTTAQITTVAAWRARQEALATSTARWEATRLAQRVAALDEELKEITKRITDLLHRSPASALLEQPGIGPITAAVALTAWSHLGRIRSESAFASLAGVNPIPASSGNTVRHRINRGGDRRLNRALHMAVVTRMRMDPRTRAYVERRTAEGRTLREIRRCLKRYLAREIYRRLNSTAQLDQAAA

SEQ ID NO: 120279 - protein, 391 aa, unidentified
MKKRYGSVAYGGMDVHRKFSNATLRDARGEVVSRERLDHVDRRKLREHVARWPKGTLLVMEASFGWPWLSDEVEAAGHEPRLSNCYKVEHLRKARALPKTNRRDADLVSLLPQESTAWWVVWRAPPEVRDLREWMRHRAGLVTMQTEVKNRVHALFHRHGIFYEEATDLFGGLGRRFLFALCQRGRHANGTLPEGALEALRSDLRVLTMLRAELATIAGRLRGRLTRDPLVRRLMTIPGMGLILAHVVASEIGDIGRFKNHRNLAAYACLAPQCRDTGELDATRDPLGRHLGNRGNRTLKWAFILAAHGAVRKGEKWRALYDRHTGNGKKNRGRGFIKVARSLVKVTFAVWSKGMAYTQTPPPRPGSRPARRRRSDSRPGTGQLDLAMVQA

SEQ ID NO: 120280 - protein, 333 aa, unidentified
MNSIVYVGMDVHKEQYTICCYSYETDKVEYKQTIPSDYKLVLKYMEQVRSRYEGEVSFVCGYEAGCLGYSLYHQLKDHAVDCKILAPSTMAVTNTHHVKTDKRDAANITRCLAFHTYSEVYVPDNDDNDVKEYIRMRDDQKLYLKKVKQQILAFVLRQGKRFEGGKTYWTIAYLKWLKTLELSDLQREALDEYLLTYEYLTEKISRFDERIEELASVERYEEKVKHISCLLGIKTHTALSMIVEVGDFERFEKAPKIASFLGLVPSEDTSDTRVNRYSITKAGNSHLRRLLVESAQSYTRGNVGHKSVALKQRQKGNPPEVIAYADKANERLR

SEQ ID NO: 120281 - protein, 409 aa, unidentified
MQVMHERCAGLDVHKKSVYACAICPGDNGEKKQEVRSFGTFTADLLKLADWLRGHGVTHVAMEATGVFWRPVWAVLEGQFELGLVNPQHIKAVPGRKTDTRDCEWIADLLQHGLLPSSFVPPREIQDLRDLTRYRAELTQAQNKVDNRIQKLLEQCNIKLSSVASDTLGVSGQLMLEAMIEGEDDPARLAELAQRKLREKIPQLRLALAGKVRDHHRFLLREYLQEWKSLRGRIARVEQEIERRMGPFEQAVALWESMPGVNHTTACNLVAEVGADMGQFPSGQHLASWAGLCPGNNESAGKRMSGTMRDGNRWLRRSLCQAAWAVTRKKNCYLSAQFRRLAARRGMKRAVMAVAHSMLIIGYTMLKTGRSYHELGGTYFDQINKDQLQKYFVKRLEKLGLAVSVVPAA

SEQ ID NO: 120282 - protein, 410 aa, unidentified
MQQQCDRVAGLDVHRDSVVACVRLGRGDEPQVHRRSFKTTTAGVDQLARWLADFEVTRVVMESTGVYWKPVYYPLEGLFAELWLVNAAHVKNVPGRKTDMADAEWLADVAAHGMVRPSFVPDPPVRELREFTRYRKSQVTIRGQEVQRLEKVLQDAGIKISSVASTVLSMSSRAMIEALIAGERDAAVLAGMALRRMRPKIPALAEALVGRFDAHHGAVARVILDHIDFLDAAIARLDEEVAARLGPFRDAVELLQTIPGVGRTVAEIIVAETGADMARFPTAGHLAAWAGVAPANNESAGKRRHGGTRHGANWLRRALIEAANSAGRSKGTYLGAQYRQIAARRGPNKAAVAVAHSILVIAWHMLTTGSTYEDLGPDYFAVRRDPNVEARRLVKRLEALGLTVTVTQAA

SEQ ID NO: 120283 - protein, 463 aa, unidentified
MKHKKASGKRARRSRPLLERVNPNAAGIDCGSEMHYVAVPADRDPEPVRCFKTFTGDLHQLADWVVSCGVKTVAMEATGVYWIPVYEILESRGLEVLLVNARHVKNVPGRKSDVSDCEWLQELHSVGLLRGSFRPSAEIAALRSYVRHRETLVESAATTINRMQKALVQMNVQLHVVISDIAGATGQRILRDIVNGQTDPQHLAKHRDGRCQASETEIAAALTGNYRPEHLFVLKQNLELYDEFQRQIKACDTQIEDHLKALAANAAPPQAPLPAARTRRKARSNEPKFDVRTPLHQLSGVDLSQIDGIGPYNSLRLISEIGTDMSRWPTADHFTSWVTLAPHNKITGGRLISSRTQPSANRAADILRVAAMSVGYTQTALGAFYRRLASRIGKAKANTATARKLAILVYRVLKGEIVYKDPGATAYDARHRETVLRKLRRQAAVLGFGLVNGQTGEILQGVS

SEQ ID NO: 120284 - protein, 410 aa, unidentified
MPLIFVGHDWSEDHHDVVVLDVEGRRVTSARLEEGVDGVARFHALVVDLVSDPGEVVVGTETDRGLFIGALVAAGYEVYAVNPRAVDRYRDRHRMAGGKSDASDAKVLADLVRTDRHLHRPVAADSELGEGIKILGRAHKDLIWQRQDQVNRLRSSLREYYPGALAAFGADLAHPDAVAVLSSAPTPGDGRRLSRARIATTLRRGGRQRNIERRASEIHAALQETQLAAPAGVSAAFGAATKAAVAVLVTLNEQITALETELAHGFEQHPDVEIYRSLPGLGVVLAARVLGEFGDDPNRYQSAKSRKNYAGTPPVTRQSGKLRIVSARRARNQRLADACYRWAFCSLHASPGARAYYDELRARGKGHHGALWQLANRWVGILHGCLHSRTVYNEATAWSHHLPETKADAA

SEQ ID NO: 120285 - protein, 337 aa, unidentified
MEKIKELKRFEESVGIDVSKLTLDVFLYNRKMHHQFANTPKGFSDMQKWVRSQVGSLNDLIYCFEHTGWYCILLSHFLQDQSMFYCCINPLELKRSMGFKRGKTDKTDSYEIARFAWLRKDELQGSVPMPVKLIALQRLMSVREQLVKQCTASRNLEKGLLVTVEKSSTDPGVKVLRNVIIQLEKHITKLEKEMTDLIRTDDKMKNNYKLTKSVKGVGPILAIQMLLHTHNYTRFGEWRQFSAYCGLVPYPYQSGTSIMGRKKTHPISDVKMKSLLSMCAISAIQHDAELRVYYHKRVEEGKPKMVALNIIRNKIVSRIFATVKRGTPYVEIGKFAA

SEQ ID NO: 120286 - protein, 407 aa, unidentified
MRLFAGDDWAEDHHDIEVMDEAGKVLVKRRLPEGAAGMTQLHALIGRFLPEDADGAEVVIGIETDRGPWVAALVAAGYVVFPVNPLQASRYRERHGVSGAKSDGGDAHMLADMVRTDSHQLRPAAGDSPEGQGIKVVARAHKTMIWDRTRATQRLRSQLREYFPAALAAFEDLDAPDVLELLGKAPDPDRARRLTRAQVAAALKRARRRDIAGKTDAILAALRGEHLGQPAALTAAYAATARSLIAVITTLNAQVKILEDQVRDHFGRHPDAEIYLSQPGIGAILGARVPGEFGDDPCRYVSAKARKNYGGTSPITRASGKKKVVAARFIHTDRLIDALMSWAFASLNASPAARAFYDGQRAKGLDHNDALRRLANRLVGILHGCLKTRTPYDEATAWSHRESSLAA

SEQ ID NO: 120287 - protein, 349 aa, unidentified
MTMVGGFDVHRKQITFDYVDDDGLVHSGAIRPATRTTLRGWLGEHCPSGDAEFAVEGCTGWRYVVEELAMAGVVAHVGDPAEIAGLRGPKKRAKTDRADARLLRTLLVEGRFPESWIPPAHVVEVRTLGRLYCALMEERRAWQQRIHAQLFHQGCPPVTALLSVAGRDALAGAELSGVGRQYVDTALRRIDELGAEIVPLRAQLVNFARHQRGCQALQARHYGIGWLCAAIIWAEIGDARRFSSSDQLVRFAGMDVTVYSSDAKRSPGHLSRQGSPELRWATFEAAKCAARRGSPDYGYYHKLAVKHDGHNGKNPTLAVERKILRRCYHTLRELGDAALSPPQPVREAA

SEQ ID NO: 120288 - protein, 359 aa, unidentified
MKTKSTQEGVTIGMDLGDKTSRYCLLSSEGEVLREGQVTTTKAGMVEAFGSLGRVRIAIEVGTHSPWVSRLLQKLGHEMIVANPKQVKLITESSRKDDRLDAQTLARLARIDPQLLRPIQHRSDKAQAALMIIRVRAALIAVRTSLVNTARGLAKSMGERLPKCDADQMGVRQAVLLPTKLRHVLEPLLKEVESLTEKIKDSDREIEQIARKNYPETAVLKQVGGVGTLIALTFILTIEDKDRFQKSRDVGCYVGLRPRRSDSGQSQPQLRITKEGDPYLRTMLVQGAHYIISHRGPDTDLKRWGLHLAKHGGKRGKKRAVVAVARKLGILLHRLWVTGEVYEPLRNHNARQEQKKAVA

SEQ ID NO: 120289 - protein, 387 aa, unidentified
MEVRIENTPSARTNNDPVHCFVAIELSKSSWVVGFQTPLSKQTSRYQVKACDAEPLLELIERIRTRVAREVGRPVEVTSCYEAGYDGFWLHRVLEAHGIHNHVLDPASLQVSRRARRPKTDRIDADRMVRALIRHLRGEPEACSVVRVPSPEQEDARRLHRERRRLITERVGHVNRIKGLCATQGIYNYEPLRSDRLERLDKLRTGDGRALPARLKTEIVREIKRLEVLLEMISTVEAERDAILKDKKSTHLNADKIKMLAKLKAIGAEFSTTLVGEVFYREFANRRQLGSYVGLASSPFCSGSLDRDQGISKAGNSKARAMMIELAWTWLRYQPDSALSRWFQARVGNLKGRPRRIAIVAMARKLLVALWRYLQTGVIPTGAELKA

SEQ ID NO: 120290 - protein, 366 aa, unidentified
MKDKYIGFDIDSNKTVACIVQQGQRDRYTTLVTDLTEMRQYLEQQRQDGSRVHLTFEISGEAGYRYDALRPYVDTLTVSNPHELTWIYRTSKKNDRIDARKQAVLLSIGEVPKVHIPKPQIRQWRKTIQHRRVLVNRTVAVKNRIRAVLRAHGLTQALHQGSWWKAANVQWMRQQAQDWSAVTIETLWRVQLTNLLEELKLLSEQLKGVTQYLDRYLATKPGGALLMSIPGVGPRTAEAILAYTDDVHRFARSKQYGAYFGLTPKLDESGQVRRLGHISKEGPSVVRWLLVESTWRAIKKSPALKAFYERIVGGQNQRKKVAVVATARKLLTIMRAMLHTGELFNEELVSGDNKNEKQRVTPLNNG

SEQ ID NO: 120291 - protein, 436 aa, unidentified
MRGCRCSMIMGFTKPIEHFNLQRKKVITMNTLYVGIDVSSKSNVVYLMLPNGDKHSNFSVANSHEGSTQLVKRILSALTSHSLDTVLIGLEATSVYGDNLVYFLREDATLAPFNRKIHVLNPKQVKKFHDAYNDLPKNDYVDSFVIADCLRFARINKEVYMGDYRYKALQNLTRARFFAVQNLVKEKQRFMNVLFKKYSTMTQEKVFSDTFSTTALAVYDEFESAEALANMDLHELTDFIIEKGKNRFPDPDAVAKAIQKAARSSYRLPKTVNDSVNQVLSISITSMKALESQIKEFDKAIKAQMELLPNVLISIPGIGPVYSAGIMAEIGDINRFNSQAALAKYAGLAWKQHQSGGFESEVTRLIPSGNRFLKYYLCEAAFSLVRCDKEYSDFYHLKYKEVNRCQHKRALALTARKFVRLVFRLLKDNRLYCPAK

SEQ ID NO: 120292 - protein, 368 aa, unidentified
MENHNIVWVGMDTDAKNNQVALYRGWDKEPAAEWMAGMDRKGIQRLIERLKREEGEVRCVYEAGPCGYELYRKLRKAGIPCDVIAPSMTPRKPGDHVKTNRRDARKLGRLYRAGELTAIEVPDEKQEAVRDLVRAREDVREDLTRRQHRLSRFLSRQGLAYTEGTPWTQKHWRWIEKITFEDSNRQTVLEESMRAVQQSQEQLKAYDARVEENACKPEYEKKVSRYKALRGVRTVTAMTIVAESWDLRRYPTAPEFMGSTGLVPSEQSTGDHQHRGKITKAGNAHLRRVLVEAAWQYQHRSMPGPSIKKRRQGQPQAVVAIAERADQRLNRKFRRLVDRYNKKPALAAVAVARELAGFIWAIGQLHDE

SEQ ID NO: 120293 - protein, 517 aa, unidentified
MAKSKKQHIQKVKGRRFTDEIRNLNLKQVLVIPVECGKNSHKALVANYFGDILYDAFEFTNSITGIKMFDSIIKNTSLSVNAQKIIIGMESTGHYYENLYRNLTNMKYDVAIVNPSSVYSQRTGQLNWCKTDDIDLCAIGQVLIDNQATETKLSDGLYYNLKHFARLRRDEVNKRARLKIQIKVLCDHIFPGLQKSKIFSDFWGKSSLLLLENYPTPLSIIQLGVKKLSQFFKKHNTKLSLTTTQRLIYLAENSLTTDAANLYAHLFNLKFKLQDLKIADDKIRKLNIELAQCLIRTPGILLLSIRKINVPSAAEFLAEVGPLSEAGNAKKIICRAGLNPSNFQSAEYQRANNPITKHGSNPLRYSSLIIAHNLIGNDPHLINQAANPYFKNFFDHLVDEQGKNKRLAKVACANKFIRVAWVMMTQKMLFCPPCWKQEKIADDPLAKLEKFLNDNNAKCLFEDAAHFAKEQLPTNYNSYIKQKEKNIDSLINMNSLTNDEQEGDPVNFLGSMPVEIR

SEQ ID NO: 120294 - protein, 354 aa, unidentified
MTSTKYIGMDVHTESISIAVRNSVGKVVMECVIETKASTILQFVDGLSGDLRVTFEEGTWATWLYDLLKPHVTEVLVCNTRKNTSRNGSKSDRIDARKLSEQLYMNNLKSVYHGEHGLRTLKELARSYLTITKDLTRVMNRLKALYRSWGIPCAGKEVYAPRHRAEWLAKISEAGVRRRAEHYYQQLDLLRPLHQEARRDLLLEAKKHKPWKLLRLIPGIGPIRAAIVIAVIQTPHRFRTKRHLWTYSGLALETHDSAQYRVAEGQLQRSKKPATVRGLNKDYNHDLKDIFKGAAMRASTAAGPMHDFYEALLAKGRKPTMARLTLARKIAAITLIVWKKEVRFDANYLKPQAA

SEQ ID NO: 120295 - protein, 355 aa, unidentified
MNAIKYIGMDVHLATISIAVLDAAGKLRMEVTIATQAGALLDFLRGLSGTLQVALEEGTSAHWLYTVLEPHVAKVVVCDPRQNPRRLGEKKSDRLDARKLAELLRLGTLKPVYHGNALGSALKELARSYRTLVSDTARVMNRLKALYRARGIRCAGTRVYSPRFRARWLEQLSEPGVRGRAERLYKQLDLLLPLRQEARAALLAESRKHPAHKILCSIPTLGPVRVALLMALMQTPHRFRGKRQLWTYSGLALVTRSSADYQMVDGQVTRARQPALVLGLNANHNHTLKGIFKDAAASALAHPGPFKDFYTTRVAQGMKPELARLTLARKIAAIVLTLWKKGECFNPEQLKAQAA

SEQ ID NO: 120296 - protein, 346 aa, unidentified
MRFYNRQHTYYCGIDLHVKTMYVCILDGAGQVLVHRNVASTPEAFLEIVGPYRDGLVVAAECMFTWYWLADVCDSEGIAFVLGHALAMKAIHGGKAKNDRIDSHKIAVLLRGGMLPQAYVYPAAMRSTRDLIRRRLHLVRKRGQLLAHIQNTRAQYNLPVFGRKLAYKTNRVGVVEHFADPSVQKSIAVDLALIEQYDALVIDIELTIVREAKRHNADAFHRLRSVPGIGKVLALTILYEIHDIARFDRVQEFASYARLVKCQHQSGGKTLGTGGAKMGNVHLKWAFSEAAVLFLRHTEGKKLIARIEKVHGKGKALSILAHKIGRAVFYMLSRGTIFSMEKFLAA

SEQ ID NO: 120297 - protein, 418 aa, unidentified
MQDEYAVLVGLDWADQKHDLCWRQTDTGEIHTLVLEQRPERINEWICGLIAKYPGRRIAVCLEQSRGAVVYALMGYAEVDLCPVNPVSLADYRNAFRPSGAKDDPSDAALLLDLLERHRDALKVWRPDTEHTRLLRSLCEDRRKAVDLRSALCNSLRARLKEYFPQALQLVGEELFSELCCAFLMKWPHFKAVAAARADTLRRFYYTQHSRSEQQIQERLALIAASRPLTTDAAVVEAGIRWVQTLVAQIRTFNRAIQGYDQRIAELFKAHPDGFIFASFPGAGKQLAPRLVAVFGTDRGRYETAVNMATYSGVAPVIERSGKQEWIRWRWHCPKFLRQSLVEFAGHSVGFSTWANVYYHEQIKRGKGHHAAVRALAFKWLRILFRCWKTRTPYDEAKYLAALQRHGSWIAAAIKNAA

SEQ ID NO: 120298 - protein, 411 aa, unidentified
MNRQDYLFVGVDLHKEKHVAVLANCWSEVIGFFVTDNAPAKFPKFLRDIKKKAKGKPVIFGLEDVTFYGRSLAKFLLDEGQIVKAVNSAYTKRERNRSTAPDKTDTKDAEAICETLIRKLPQLPDANPQDIYWVLKQLLANYEYLNKMATGVKNSLQNQLIHHYPTYNKLFKDIDGKTALAFFEKFPSPDKLMNETVDSLATFLRKHSNNAFSNKKAECIFNEVKNSGWRQAGFQRERDSLIKSYIRTLRTLQGEMQEMERQMSELIKQSGYKLKTMPGLGTVTAATIIAGIGDISRYPSADKIAKISGIAPLNKSSGKNLRQTRNRYGNRRLNYAFYILALNHIQVDKKKNPRNPVMYQYYLKKQQEGRSGKQAMVYVMRRLVNIVYSMMKHKTEYRPPVQLQKVEGEAS

SEQ ID NO: 120299 - protein, 341 aa, unidentified
MIIISYYCGIDLHSNNCVIVVIDSRDNIVLDRKTSTSIGDVLDSLSICRDPIKAIAVESTYNWYWLVDGLQEAGYHVELVNTSAVKQYEGLKYSDDKSDARHLAHLLRLGILPTGYIYPPEERAVRDLLRRRLQLVRQRTTHVQSMQNQLTRNTGKQFKANEIKKLSPATIKRMLPNPNMQEAILSNLTILSVLQATIKKLEKSIINQVKLKPEFKQLRTVPGIGVIMALTIMLETGDINRFAKVGNYVSYCRCVDSKRMSNKKQKGQGNRKSGNKYLAWAFIEVANFSLQFNEQAKRFYQKKLAKTKRVIALKALAHKMARACYYIMKNNEEFDNERLFA

SEQ ID NO: 120300 - protein, 370 aa, unidentified
MTDVSRGEQRRTTAGLDLGDKHSHLCLIDTESGEVIEEGRLRTTPEAFERRFGSERPLKIAVEVGTHSPWVSRLLKRLGHEVLVANARKVRLIYAEGRKTDRIDAEKLARLLRLDPSLLYPIEHRDEDCQAHLALIHSREALVRARTQLVNHVRGTVKSFGHRLAKCSAGSFHYKVADALPTELEEALGPVMETIASLTERIKDHNRKIETLAKERYPETELLRQVPGVGVLTALTFVLTLEDPSRFAKSRSVGPYLGLVPSNAQSGQHNPQRRISGKGDELLRRLLVGSAHYVLGPFAPDTDLRRHGEKIAERGGKGGKKRAVVAVARKLSVVLHRLWASGEVYDPLRNSSERSSDARRSDARAAEEIA

SEQ ID NO: 120301 - protein, 322 aa, unidentified
MNKNTKFIGIDISKDTFDIWNKESGHQKFQNNLVGFKDFIKCIPDNAWCVMEYTGSYYQQLAAFLFTKKVNVSVINPMVIKRFIQMKLQHNKTDKSDAQMIALYAENQPTKKWNPNPEYLEECKALNSAIVLYLKQRTALKNMLHSLKSKNQKGKIVMSLKRQIKQIQKEIILLESRIENLVKENEPELLTNLTSISGIGKKTALLLISSTNAFKGFENHKQLSAYFGLAPVERTSGTSIKGRSRITKKGNPIVRNHLFLCSFTACEYNPQCNALYKRIVDKGKSKKLALIAVCNKLLKQAFAVAKSGIPYDPYYKSTLVPQ

SEQ ID NO: 120302 - protein, 308 aa, unidentified
MPTEVTYVGVDIAKSELVVDLSGNSRAFPQTAEGHEALLAILPTAAHVVCESTGGYERGLVAALHKKGTSVSVVLPRRVRSFAVAQGLLAKTDRIDAVLLSAYGRACEPRLHVEIPPRLQELSSFVRARQAIVERISLEDNYAEHLTGRLLVRQANLRKKVLRKQLDELDRAIRVLIASDAELARKCARLEQVDGVGKVTAWTMLSEMPELGTLAKGEAGALVGVAPHPNESGQRRGPRRIAGGRAAARRVLYMAAISASQHNAVLKLFYERLRANGKGGKVALVAVMRKLVELFNLILKDDNFLLAG

SEQ ID NO: 120303 - protein, 340 aa, unidentified
MTKLYTGIDLHSNNNYIGIIDDSDRRVYKKRLPNKGEVILAELEPFKKEIAGVVVESTFNWYWLADCLMDAGYKVHLANPAGIQKYKGLKHSNDAYDSFWLAHLLRLNILPEGYIYPKEDRPVRDLLRKRGHLVKLRTSVINSLQGIINRNYGFKLTTNKIRQVSQDNVTPLLAGEDDLALSGAVSKDTIDYLSQQITRIERSLKNKVKTKQAFTWLQTIPGVGLILALTITLETGSIERFAKVGNFTSYCRKVPTSWTSNNKKKGKGNKKNGNKYLAWAFSEAAEFARRYNDMARTFYNRKLARTNRMVAHAALAHKLARASYYIMKDNVEFDNKKLFA

SEQ ID NO: 120304 - protein, 334 aa, unidentified
MLYAGIDIHKAVFQAAVFDPDSGELKESRFEPSRARLGDWAMEWRGRLAAVAIEATTGWRWVARELQAQGFEVHLVDPGRASALQGRRRRPKTDRLDARWLALLLARDLLAECEAWLPPEEIQRLRDRTRLRKALAGERTGWAQRLHALLAHEGWPCARGRLLTAEGRRWVDALALDPHVRTQVEVIVAVMAALEQQLGLVESELRRYARADKRCQALQTIFGVGPILACHLLAEIGDVRRFQRPRQLVRASGLDPAVIESAESKRRGRLAKQGSRHLRWALVEAANHSHRQTSPDHALYASTVNRCGRGRARLTVARKIARRSYHVLLAAEAA

SEQ ID NO: 120305 - protein, 344 aa, unidentified
MTLVSDGLVVGVDTHKDVHVAVVLDRLGRRLAVRESPATDAGNAQLAGWLAGLGPVTDAGVEGTGSYGYRLARVLAGAGLQVWEINCPDRSRRRRKGKSDPVDAENAARAVLAGEATAVPKDRRGFVGELRLLMLTRRSAVKARTQTSNQIKAFLLDADDALRATLHGLRKARFGRACAALEPGDGLHRALAGLGRRWLALDAEARELEKQMTTLITAHAPDLLARHGVGAVTAAQLLVTAGANPDRLRGDAALATLCGASPVEASSGKTSRHRLNRGGDRAANNALWVIAHVRTISDPRTRAFVAKRTATGNSRREIMRMLQRYIARELYRQLTRSMNPPLSP

SEQ ID NO: 120306 - protein, 422 aa, unidentified
MNNSSDDGFAAFVGIDWADAKHDICLLGANAEVPESLVIAHSAEAIEEWALSLQRRFKGQPIAVCLELNKGPLVSALCKYDFFVLFPVNPQSLARYRTVFSSSGAKDDPTDALLQLDLLCKHRDRLKRLEPQSATMRSLQQLVEHRRRLVGDKVRITNRLTSTLKNYFPQVLQWFSDKDTAIFCAFLSRWPTLKTAQQARRTTLQRFFTQHHVRYPQIIQERITQIKEAMPLTNDAGVIAPNALMVEALVGQLRTTLDAIRRFDGRIAEVAREHSDFAFFDALPGAGPVYATRLLAAFGEQRHRYPNANDLQQYAGIAPVTDRSGNKTWVHWRMSCPKFLRQTFVEWATQSIRQSFWASAFYEQQRDKGKSHQMAVRALAFKWIRILHRCWQEGTPYDESTYLKSLKKRRSPLLKYLGGATA

SEQ ID NO: 120307 - protein, 364 aa, unidentified
MNNITHIGLDVHKDTIAVATLRPGSTSCEERVIPNTPEAIRSLTRHLRDPASYAFCYEAGPTGYDTYRLLDSLGLRCDVIAPALIPRRPGVRQKTDRSDARNLARLHRAGELIPIGVPTPTQEALRELIRVREDLKNDRRISRQRIHSFLLRQGRHYPKGASRWGKGFEAWARAQTFDLPAVQATFSHLLGSEEVRRAQLEAVEGEITRAASDPEIAPLIALLRCFRGVDTLTAVTLVAEVGDFRRFRSAAAFMAFTGLVPSEHSSGLSVRHGSITKTGNAHIRRVLVEAAWAYRYRPGIGAGLAKRLEGQPPEAVAYAWRAQCRLSARFRLLSVKKGSNKAAVAVARELAGFVWGLMTENTAA

SEQ ID NO: 120308 - protein, 407 aa, unidentified
MIFVGNDWAEDHHDVWVMDDVGERLAYHRFSEGIEGVGEFHELVAGFVQDPGEVVIGVETDRGLWVGALVGAGYQVYAVNPKAVSRYRDRHTVSRAKSDRGDAKVLADMVRTDRHIHRHVAGDSPQAQGIKVLARAHQTLIWERQRHTNRLRSTLREYYPAALETFGRLAHKDTVAILGVAPTPDTGARLTLSQIKAALKRGGRKRYLDERAAEYQAGLRTEHLKAPSAVVSAFGVTTTSTVSIIVELNRQIQDLETELSNRFREHPDADIYLSIPGCGDVLGARMLGEFGDDPNRYADAKSRRNYTATSPLTIASGNRRAVIGRYIRNDWLFNAAMRMAFCSLTSSEGARAFYDERITKGDTHNRAIRALANRFVGYIHGCLKNGTLYDEDIAWTHRQPEGIQQAA

SEQ ID NO: 120309 - protein, 430 aa, unidentified
MNNFINDYVVGVDVSSTSSVITILKPDGEAYGKTFSITNDLIGFNKLISILNDINSKHSKKAKIFMESTGMYHLLLHNYFTNNNFECFIINPISTKNFAKQSIRKVKNDKIDSLRIAQLAQSPTFSIQNTFNENFFLLKKLCREYDSIIDHRSHFKKKLNSLLNLVFPKFDKVFSDTFSPIPLAILSKYPTYNDFLATPKSDVIKLMKSTINHSNEWAEKKYNLVLNIALEAKSLKIPTSYLGSEVCCFINIIESFSKTSDILKEQIYLLHKKMPNLEQNLKLLCTHPEVGFMSAVTLLAEIGDINNYKSAKKIVAFLGVDTSVSQSGNYNSTHNKLTKRGSRLARKTLYNLAIGSIKTRRNGAPANPILLAYYKRLTKSKPKKIAICAIMHKLINHFFAILRDQQPFELRLPEIHEKNYLSKQLTLTAI

SEQ ID NO: 120310 - protein, 341 aa, unidentified
MKPELSVVGIDLAKSIFHLVGMDERGTIILRKRLTRGEVMPFMAQLPRVLVGMEACGGAHYWARQLRAQGHEVKLMAPQYVKPYVKTNKNDLRDAEAIAEAVTRPNMRFVPIKNVAQQDLQALHRVRERLMGARTALVNEMRGLLAEYGIVLPTGVNAFRHALVEKLEVEHAKLTPLSQELFGKLCAEFKRLEIEVAYYDEKLQALATTHPESQRLLTIPGIGPITATALLAAVGDVGSFTNGRQFAAWLGLVPKQHSTGGQTRLLGISKRGDSYLRKLLIHGARATLRWARTKTDRRSQWIRGLLERRGWNRTAVAVANKNARIVWALLYRGGVYGESTN

SEQ ID NO: 120311 - protein, 416 aa, unidentified
MFVELLHERCAGLDIGKKDLKACVRTPNPGGRRSRRQEIRTFATTTNALLELRDWLAAEKVTLVVLEATGDYWRGAFYLLEDYLNVILVNAAHAKGLPGRKTDVSDAAWLCQMGECGLLKASFVPPEPIRQLRDLTRYRATLAAERTREASRLEKELEDAGIKLSSVATDILGVSGRAMLTALIEGERNVNVLAEMAKARMRPKIPQLVQALTGNFGQHHAFLCRLHLERIDQLSAAILELSVRIEDQMRPFARQLEQLATIPGVGQATAEVIIAETGADMSRFRTAAHLASWAGVCPGHHESAGKRKSGKTRHGNRWLGGALGTAAMAAARTKNTTYLGARYQRLTPRLGKKKAIVALEHSILTAVWHMLTHDVDYHDLGGDYFTRLDPDRALKRIIRQANALGFTVRFDPLPAA

SEQ ID NO: 120312 - protein, 422 aa, unidentified
MLQETQDEQEIIARVAALDIGKAELVCCVRVPDPKGGSRRVQEVTTYSTMTRSLQVMADRLMDLGVTRVVMEATSDYWKPPFYLLEAHGFETWLVNAKDVKNLPGRPKTDRLDAVWLCKVAERQMLRPSFIPPIPIRRLRDLTRYRIGLVSDQTREKNRVEKLLEDSQIKLSVVASDIFGVSGRQMLGALIAGERNPQVLAQMARTRMRVKIPQLEEAFVGHFTDHHRFLLTKMLSRIDALQADIADLDTKIEAQIAPFADAVARLDQIPGIGATAAAVIIAEVGVDMTRFPTPAHLSSWARFAPGVKESAGRKKGTGSTGHGDRYLARALGEAAAGASKTNTFLGERYRRIARRRGNKKAIVAVGRSILVITWYLLSDPDVGFNDLGSGYYDSRINPERRKRNHIRELEALGYKVTLEPAA

SEQ ID NO: 120313 - protein, 326 aa, unidentified
MRVNDMSRAVVPFEQSTTLVLVVEMGAKSWLAAGNVPGVERQPMKKLEPDAAALLGLIERWRGEAIKAGQTIRRVVLAYEAGRDGFWLARWLIARGIEVHVIHSASVAVSRERKRAKTDRLDAAMLMRVFLGWLRGERGHCGMVAVPTLEEEDARRPSCERERLVNEKSRITNRMKSALARLQRAPNTGPNLMVRLLARVIAIAIETADMLVREILSRNWRDRRAVARYAGLTGSPDESGTKRREKGLTKAGNARVRRGLIQLAWRFLQFQKKSALAKWFWSRTEGPSGVRKTTMIVVLARKLLIALWRLVTTGEVPEGVVLRPAV

SEQ ID NO: 120314 - protein, 368 aa, unidentified
MRDDITGYVGLDVHKDSIAIGVAEPGRAAPRFVGTTGSDLSELTRALSHLGRPEQLLMAYEAGPCGYPLARQLAAHGYRCEVIAVAKMPRKPGERIKTDRRDALTLARYLRAGELTPVCIPDERDEAMRDLSRAREDAVRARLKARQQLKAMLLRHGRRYSGKKAWTQAHERYLAEVAFEHPAQAIAFAEYRSAVREADERVERMTAALREQVAGWRWAAVVQSLMSLRGIDFVAAITLVAELGDLSRFAHPKELMSYLGLVPSEYSTGESRVQGRITKTGNGHVRRVLIESAWAYRHPARMGQEITVRNQGQPKAVRDIAWRAQLRLCGRFRRFAARGIPQNKICVAIARELAAFVWDVAHHVPGLT

SEQ ID NO: 120315 - protein, 377 aa, unidentified
MTSVGSFAIKEPLPATPFMAGSGGGRIVVFRVYRDRSRVGSTAVFTLGLNGYACLRHARQEEDMAKMTEHTIGIDISKTHLDAFRLEDQAARQFENSARGFRALVKWLGQTPVARIVFEPTGPYHRAFETALSGKFPLVKINPLQARRFAEACGTRAKTDAVDARILARMGAALELEADAPVSEKLLVLRELQVARTALVKERTRLRNRSHVQINPVLKRQIKARLTLVEHQLAELDAEIASHIATDEGLARKREILCSIPGIGLIAAALILTFLPEVGSLDRKQAGSLAGLVPHSRESGQWKGRSFISGGRKPLRDALYMPALVAMRFNLDLKGKYHALREAGKPAKLAIVVLMRKLLEMANALVKADRVWVEKRP

SEQ ID NO: 120316 - protein, 355 aa, unidentified
MKRPKDRLIAGLDLHSNNVMINNVMIGVINQDGKRVAHRKLDCDLKKVVEFLQPLKPQLQSMAVESTFNWYWLVDGLRAQGYSIDLANPAKIEQYSGLKHADDKDDAFHLADLQRLNILPQAHVYDPELRPVRDLLRRRTNLVHQRTALLLSFKSLYARTTGQKLDLSEAKKMEPKEAPKLYEHPANQLIAPVQAEHIQALEQSIRRLEKAVQACAREIPLYEKLLTLPGIGRILGLTITMEVGDISRFKTDGDFASYCRMVDAKRLSNGKCKADNNQKCGNKYLAWAFVEAAHFARRYDEPCRRWYDRKAAKTSKVIATKALGCKLAKAAWHVMAQQCNYDEKRMFPELAMKKS

SEQ ID NO: 120317 - protein, 309 aa, unidentified
MDLFIGIDVSKDRLDVCVRPSGETFVVTRDDEGLERLVERLRALAPVLVALEATGGYETVVASALATAHLPLAVINPRQIRDFARSTGKLAKTDRLDAAAIAHFAEAIRPPARPIADAEAQALGELTARRRQVIEMIVAEKNRRRLAGQPRVLKAIDRHVDLLQAELSELDRDIDGAIRKSPAWQADADLLASVPGVGKATLRTLIAELPELGRLDRRKIAALVGVAPVNRDSGVARGRKTIAGGRAPVRTALYMAALVASRANPVIAPYYQKLRASGKPAKQALTACIRKLLVILNAILRDRKPWLPA

SEQ ID NO: 120318 - protein, 341 aa, unidentified
MDYFAGLDVSVKETSVCIVDDAGKIVREARVASEPEALLQVLTLYRFKRVGLEAGPLSQWLYSVLAEAGLPVICVETRHMRAVLKAQINKTDRNDARGIAQMMRAGLYRPVHVKTLRSQKLRMLLTHRKLLQSKAIAIENDLRATLRNFGLKVGMVGTVKFEARIKELVENLPDLAILVGPLLTVRRVLREQITVLHRRLLAIVRDDDVCRRLMTVPGVGPVVALTFRVTVDVPARFRNSKAVGAVFGLTPSKYQSGESDRTGGISRCGDEMMRAMLYEAAQILLVRSAKWSWLKAWAMKIARHRGMKKAIVALARRLAVIMHRMWVDGTEFRWTREFAAA

SEQ ID NO: 120319 - protein, 427 aa, unidentified
MRVLYDRVAAIDVHKDMVKVAVRVPGARRGARKTDVAEYRTFYGVLQEMGRELRRRGVTHVVMEASGIYTEPVYYALAELDFTQVLVVNPAHVKALKGHKTDAKDAVRLLDLYECGAVVRGSYIPSPELKEVRDLTRYRVKTVQARTSEIQRLQKTLESAGIKLSSVVSDVTGASATAMTEALIDGERRGRVMADLAQTRLRTAGKMADLSMALSGRFTEHHALMCRLHLDQIDGLGQQIDGLDERIAVRTARYSRETGLLATIPGFGDVVIAGWLGAIGPAPHQHFATAQRLASWATLCPGNYMSAKKSKGGRTGDGGAYIKPLLVQAAWAAIRVPGRLQARFHRLVRRFGGPRNKGAQKRAIVAIAHTLLKIAYQILKTGRPYTDLGDGFYDTRDTTQAKQDYLIRQLRKLNPGCHITITPAEAA

SEQ ID NO: 120320 - protein, 345 aa, unidentified
MVVIGIDPHKGSHTAAALGSGGEVLAQLRVPANRAMLNRLLKWAAAWSERTWAVEGASGLGLLLAQQLVNAGEAVVDVPATLAARARLLHTGHGRKTDALDAVSVATVAMHSPSLRRVAREDHGTILRLLADRRDELTQERRRAVNRLHRLLRDLCPGGAPTDLAAEDAAALLTAIRPVTAVEHERKGMARELVADVRRLDRDLTINRKRCAEAVAASGSTLPQILGISDVLTAKILGHTGDITRFATAGHYASYTGTAPIEASSGDIRRHRLCRSGNRSLNNALHLAARVQAMHPGLGQEHYQRKLAEHKTSREALRSLKRQLAKVVYRALRADHDRFVVHRLT

SEQ ID NO: 120321 - protein, 346 aa, unidentified
MTIVEAARGVTGGVDTHLDVHVAAALDPLGALLGTERFDTDPAGYKALLTWLEGFGALSKVGVEGTGSYGAGLARFLRRADVEVIEVDRPNRAERRRSGKSDPLDAVEAARAALGGRATSISKSKDGAVEAIRVLVVAKRSARGARVKAVVQMRHLVITAPDQLRCRLKGLSVAGLVAESARLRPSRSGDPVMAAHKASLCSLARRIQGLEDEIAELDERIERLLVRTAPELLSRFGVGPDTAAALLVSAGDNPERLHSEAAWAHLCGVAPIPASSGKSNRHRLDRGGDRHANSALWRIVMVRIAHDPETTAYFERKVKEGRSKRDVIRLLKRYVARELYRYLPRG

SEQ ID NO: 120322 - protein, 353 aa, unidentified
MEYIALDAHKHYSVASVERPTGEILGETRLAHRRGAIRDFLAEWTPGSPVAVETVGNWYWLVDEIEEAGMIPRLVHARKAKLMSGMINKTDKLDVRGLNRLQRTGTLPTVWIPPAEIRDQRDLPRTRMVLVRARTRLKNRIHATLAKYALTVTDVSDLFGKKARIILSDKLAQLPPHSRFSTEHLLEQLKILDKHIAEFEDRMCKVFKKTPTLEWVMSLPGVGLILGIVILLEVGDVHRFPDAEHLAGYAGTTPRVSGSGGKIHFGPLRSDVNHYLKWAYTEAADAICQHRADWPHRHVSQLYTRVRHRKNHQKAIGAVARHLAEATYWILTKEVSYQEPRRKTRKTDASTKA

SEQ ID NO: 120323 - protein, 416 aa, unidentified
MRFRCIAGIDVHKRMLAVVIRREPNGKVEYLKRKFGTMRSEIEHLAAWLRSEQVEEVVMESTAQYWRPVWNGLEAHFRLHLCHPLKVRAPRGRKQDFKDAQRLADRWWSGDLEDSFIPGAEQRQWRWLTRTRVQLRRLIGVVRSRVEGLLEQGGIKLTAVATDPFGVSGWAMLKLIAQGETDINVLAGQARGRLRKKDAELREALGGKLDPVYRLLLQQNLEQVELLRRQIEETNQALSIAMQAHVPTLVRLCKMPGVDLAAAQELLAEIGPGATAFPTPEQFASWVAVCPGSQESAGVCYSRRSAKGNRYLRRLLCQIAWAAIHTKESFFTGLFARLLPRLEAKGAAWAVAHRIAKVVWLLLHEGVEYEEKGSPPNPKALVRKFRHLMKDLARAGLDVNSLLAESAQPQPPQATA

SEQ ID NO: 120324 - protein, 341 aa, unidentified
MAKNTFFIGLDIAAYDFAASIYQAPEKPIMTKESIKNSPEGFSMLVSWLKEHHIDKTNSIVCMEATGVYSEAVAYYLTSCGFKVSIEPPLKVKRAFDPVGHKTDALDSRQIAEYAYRYNDELKFWQPKEEIIEKIRQLLTAREQFTKQKVALKNAMHAYSRQIVQVALIKEAHQETLTQIKKQIARIDQELSKMMKQDPAISQKMNNLKSIPGCGMLLAANLIAITNNFKQISNYKKLAAFIGIVPYQHQSGTSIVKRPRIRHFGPRYIRKLLRLAAQSIATHDITFRRYYLRKVAEGKAKALVLNNIANKLLKVACATIRDNTCYIKEYKSIHPMYLKTT

SEQ ID NO: 120325 - protein, 409 aa, unidentified
MNIRVEKACGIDVHKSFLVATMLTCDAANETKEFNTGLEDLINLREWLMERHCQRVAIESTGIYWIPVYTCLEGKVETIVANARQIKNMPGRKTDYLDSEWLAEICLNGQIKPSFIPSKEIRELRDLTRTRTKTTQTMTAFKNRVHKVLEKANIRISGVLSELFGIAGLQILNALLDKKNIDEVLKKVKRIGKKKAAIKEAVRGELSQTDIWLIRECLETIDFLKRKINLLDSMINQRIENTKKQDHMQILMSIPGISFTSASAILAEIGDINVFPNPKSLVGWSGLAPSLNESAGKSSNGHITKKGSKYLRRMLVQCAHVIAGHRPNRLRFFLQRILMKKGKKIAIVALARKLLSIIHHLLKNNEKYSEDSLKPKQIKQLKFQSISEFSLDEMIEIISRAGYTVDKGS

SEQ ID NO: 120326 - protein, 354 aa, unidentified
MPHNTSRLEAVATIGIDIGKNTFHLIGLDRNGAIVLRQKLSRRQIEARLANTPPFLIGMEACVGAHHLGRQLKAYGHDARLMPAQYVRPYSKGQKNDFRDAEAIAEAVLRPTMKFVAIKTVEQLDLQALHRVRERLVCQRTSVINQIRAFLLERGIAVRQGPSALRSEIPIVLSMTDKLSPRMIQMIEDLCADWRYLDERIETVSDEIKTLSEQDEGAKRLMTVPGIGPIISTATVAAIGNGDAFSKGRDFGAWLGLVPRQMSTGGRTVLGPISKRGNRYLRMLFVQAAHAVLLHPQCWERHGLKSWIAAAARRLNRFKLAIALANKLARIAWGVLHGGRSFEVRSMKPAAQCL

SEQ ID NO: 120327 - protein, 435 aa, unidentified
MSTLGIDLAVRAAHVATLTNDRGEVIWSRRRFQSHPPDLAALSEAAGPASELTVVLEPTRNAWVVVAAHFRATGAKVVMVAPEKSADLRKYYKKHTKNDRLDSFVLSRVPLLPPEGLIEVNGLGPADPLRRAVRRRVRLVGERHACHQRIDAMLDLLGPAYNEALGTRDTKTVAVILERHGSPKSLRRLGLSRLTDLVGRTSGGHFGAEYAAELLDAANEAIELWKGGGLDFDELAWDLAQEIRIIGQLDVEIGRLDARIAELYDAVDPKGIVRSAPGVGPVLSAGIVGRLGDVNRLANLAGIRSFTGIVPGVNQSGLAETRPGITKQGDPGLRRDLFFAADLARHHDPQLAAKYHRLIVERRLHHYAAVCHVATTLITRIAACMRSGQHYVVRDIDGTPVTPVEARAIIADRYVIPPEARRRSRVPDVKSEPTS

SEQ ID NO: 120328 - protein, 449 aa, unidentified
MKKSSSERHGLPVIHERAAGIDIGSRFHVVAVPADITEEPVQTFKAFTADVERMANWLVDLGITTVAMESTGVYWIPVYEILESHGLHVVLANARDARAVPGRKTDVNDAQWIQRLHACGLLRASFHPDREISALRSYLRLRERHLDYAAAHIQHMQKALIHMNLQLHHVVADITGATGMRIIRAIVGGERNAATLAAMRDTRCKSSIETIQSALVGNYQPEHVFALAQALAMYDAYQAQLEICDQQIAQSLQRLSQQKPPPSEPLPKPRHRTRQPNALNFDVRTLLYQLIGVDLTQIHGIGPYLALRLVAECGTDLSRWRTAHHFTSWLTLAPGCRISGGKVLSAHTRKTKNRVTAHLRLAAVTVGKTNTALGAFYRRLSARIGKAKAVTATARKIAILFYNTMRFGMNYQDPGADHYEQKYRERVVKGLYRRAAEFGFTLQAVEGVS

SEQ ID NO: 120329 - protein, 341 aa, unidentified
MKQPFRKNYLGIDVSKPWFDVSLMQVIDHVKQPIITQRFDNTTSGMSAFKSWLKASGVTLDSNSLLVIENTGIYHRLLWSFCSKHNLPLHIGNAAHIKWSLGITRGKNDVIDSVRLCQYCCKQSDELKASPVLNPVFMKLKDLMSSRSRLVTQLHSTRNYIKELQCSHDKILLATLEKAHKAALEGIKKSILQIEELINRIIQEDPMIYKNYLLIKSVPGIGHLTAVYIICCTNNFAAKVTGKQLASYAGVVPFEHSSGVSVKGRNRVHKMANKELKKMLHLCALTAIKYYPEFKDYFNRKKATGKNGMLILNAIRNKLILRVVAVVNNQQPYVNNASIAA

SEQ ID NO: 120330 - protein, 397 aa, unidentified
MRFIGIDIASENHVLAIVDEDGNVLVRPKTFKESSEGHELLLELAGEPEDVLVAMEATGHYWRNVFARLASAGFQIALLNPLRTRRFAEEDMLRAKTDEIDALSIARFAAQKKPRVTPVDDELTEEMRELVLLRDRMKQDFDDRTRQLHRALDLSFPEFTKHVRKPSSRKATALLARWPTARAFAKASESEVAELVYDGRHRVGKELARALRRDAKRSVGAHQGTPYALQTKYFCEDLDVLRERLATLDRDLEQLLERHEVGKLLTTIQGIGPNTAARLVAVLGDPSHFDSPKALAAYVGVSPKTNWSGKRRPIRSPLGHLGHADLRSKLWMPTLSAVKHNPWLRAFYERLKAKGKKPKVALVAAERKLLGAIYSVAKNRRPFEPILTTCEVAPTTA

SEQ ID NO: 120331 - protein, 366 aa, unidentified
MQKISAKGVMGTRIFNGQQLTIGLDLGDRWSFYCVLNERGEVVREEKLATTPEAMKRTFEKFPASRIVLETGTHSPWISRLLTELKHEVIVAHAQKVQLITKSSRKDDRHDAQTLARLARIDPQLLGPVRHRSAKAQIHLTVIRARAELVSARTALINAARGLAKSYGERLPKRGTQQAGRELAAALSTALREVLEPLLREVESLNERIGEYDQRLEQIAKEVYPEVALLKQVKGVGTQIALTYLLTIEDPHRFAKSRDVGCFLGLRPGRRNSGQSEPQKSISKEGDRYLRTMLVQGAHYILGPFGEDSDLRRWGLKLAERGGKNAKKRAVVAVARKLAVLLHRLWVGGEVYEPLRNTNRAMSAAA

SEQ ID NO: 120332 - protein, 345 aa, unidentified
MQPMYYIGLDVHKRTISYCVKDSSGAVHAEGTIPATRFDLDRWMKILPQPWSAAMEATVFTGWIYDHLRPHATALKVAHPLMLRAIAAAKKKNDRIDAKKICDCLRCDFLPECYMASTAIRERRRTLRYRNLLVRQMVQMKNKIGMLLMEAGVSYNKQRLHKAGYFRELLATNQGIDEGLQSLLRLCRETVVRLQRTESALVRSLERDSLLVERVERLMTIPAVGPITALAWALEVGDVERFSSIKKAISYCGLCGAEKSSGNTVQHTPLSKQRNKHLQTTLIEAAKMAPRNSSELAMLYDKEKQKGNANRATLAVARKLVAYLMAVDRGQRNFQVVETNNGIAA

SEQ ID NO: 120333 - protein, 347 aa, unidentified
MSEYIGIDLHKAKSFVTRVDRHGRVLEQVELRHAAGELQRYVEKIPGDTRIVVEATGNWMWLYELIEDRHPDLVLAHPLKTKAIASARIKTDKIDATTLAHLLRADLVPAAYIPPRAVRDTREILRYRASLVRLRTQVKNKIAAILSKNGIVTPTKTAFGVKSRQFLATVAVRPCYRLALDGYLRQLAHLTDEITQAAQTIEAQAQADPQAQLLCTMPGIGAYSALLILSEIGNVHRFPDSRHLCSYAGLVPSVHASGGKTRLGRLTKQGSTWLRWILIELSMHAIKGAPQFRQLYHRVARKHGRNAGRTAVARAMLKTIYAMLKHQEAFRPIEQGSTGQRLGAMAG

SEQ ID NO: 120334 - protein, 344 aa, unidentified
MSKRSVPGGDFAGLMERFAQLQEKARLRTGQSFRIIVVQEAGLDGFWIHRALQNEGIESHVVDAASIATSRRRRRAKTDKIDGETLVRALLAYKRGEPRVCAMVKAPTPGEEDRRQLCRERKALTAERVRHVNRIKGLLFSQGISGYQPLRRDRRQRLEELQTGDGRAFPQHLKALVNRELDRLELLLKQIKTVEAARDALLAVGQTGKPAPAAMLLDIRGIGPEFAAILWSEGLFRHFENRRQIAAYAGLAPTPWQSGTVDREQGVSKAGNPRLRTTLIQLAWLWLRNQPRSALSVWFHERVSRNGGRLRKTTIVALARKLLVALWKYVTAGVVIEGVTMKVA

SEQ ID NO: 120335 - protein, 438 aa, unidentified
MQVVYSRCCGLDVHKDQVTACVLVLGENGKREVRIREFRTYWKELQKLKLWLYASKVMQVAMESTGVYWKPVWHVLEGHFPLLLANPYHMHNIPGRKTDQNDAEWIADLLAHGLLKASFVPKQALQELRDLTRYRVKLQGEYNRVHNRIAKVLEDANIKLGSVASDILGTTGRKIIRALIAGEQRPEWLADKAMSHLRNKREELRLVLRGDVHEHHRYLLRELMDDLERIEAKLLRLEGEITRRMAPYQKHLENLNTIPGVDWITAWTILAELGDDMSQFPDAAHAASWAGLVPGSYESAGKRKSTRTRHGNAWLRRALCQSAWAVSHKKDCYLTARFYRCAGRSGTKKAVLATAHQILIIAFHLLRDGTRYEERGGDYFDRLNPDRARHKLTARLERLGWEVVLKPYPGPQPESAPPRRRGRPCKCAERGIDCKHRP

SEQ ID NO: 120336 - protein, 413 aa, unidentified
MDVLHPRCCGLDVHKSSISACILLREAGRVQKHQRRFGATTQELQALAEWLRQFGVTQVAMESSGVYWKPVWNILEGQFTVVLANAQHIKNVPGRNTDQKDAEWIAQLLQYGLLRASYVPCEIIRDLRDLTRMRASLSQEASRISSRIQKVLEDANVKLASVATNVLGKSGRAMLEDIITGEDNPEHLASHALGHLRVKIPQLRLALEGKIRSHHRFLLRRLVDQIQFVEQEIALLDERLDDIGRRRPDLAQAVDRWDSIPGIDRVAAWALLAEIGDNMGQFPTADHLASWTALCPGNHESAGKRLRGTTRQGSPWLCRMACQCAWAAARTKNTYLSSQFRRLAGRRGKKRAIIAVAHTIIVIGYHLHKNQRNYEDLGGNYFDRIHSDGLKRYLVKRLQQLGHKVTLEPMEAA

SEQ ID NO: 120337 - protein, 319 aa, unidentified
MAQNDLVVVGIDVAKDKVDVCIRSLDLRRTFASTAEGRRELASLLRQRKVGKAVMEASGGYEREWAKALRKAKIEVRIVDPKRVRSFARSAGRLAKNDAIDAAMIAWFAETFDQARGQAYDAAREELVQIVNARQSLLDQRTQLQNRGEHAVPLPVQKMHQRLLKAIAVEIARLEAAIATAMKVSTHFAETAAIIESVPGLSKITSAGLIAAMPELGQVSNAAISALLGVAPYDDDSGKRRGERQIKDGRRKIRNLFYMACLGAATRHNPMLMAFYRRLVARGKPPKVALVACMRKLIVVLNIMIARGEKWDASRFVVS

SEQ ID NO: 120338 - protein, 475 aa, unidentified
MLLFFEVITMIFVGIDVAKDTHYAAVSDDSGAVLVKPFAFQNNAEGFCLLLKKLSEFDRSKLLIGLESTGIYSENLICFLYESGFRLAVINPIQTATLRKTAIRKTKTDKVDTMLIIKSLMVNSYRLYSQRDADSLKLRTLCRFRQNLKKSKARLKIQLAGYVNLVFPEFGKFFKSGIHIAASYALLKKYSSPKEIAALRTSTLCTLLSKASHGRFGKDTAEALKSLALSSVGVKNPYISIQIAQTIAQIELLEQQIKDLNSAIEEAMESINSVLMTVPGIGAVNAACILGEIGDIKRFSKPCKLLAYAGLDPTVRQSGQFTAKSTRMSKRGSALLRFALINSAWQLTLNDTTFKAYYDLKRSQGLNHYGALGHVAHKLTRVIFKLLTSDTPFNNCLPYVARSSPSCTTFTIMRPISYLVMTSVILIARATFVRAFVINRSIRSAISAMMWLSIFCILLMVFRGIFTYQILNFDT

SEQ ID NO: 120339 - protein, 341 aa, unidentified
MNEVTMIGVDLAKSVFQAHGATTAGEPVFRKKLSRGQFLKFLSEQPPCVVAMEACASSHYWGREIMKLGHEVRLIPPIYVKPFIKRQKNDANDAEAIAEAAVRPTMRFVPVKSAEQQSRSMVFKTRDLFVRQRNAIINALRGHLMEYGIIAPPGRNFVKKLAEQIESPDCGLPSIVIELSRVHLDQLSVITDKVVAIERRLKEESKSDPETIRLQTAPGIGPVSAMAIKAFSPPLEGFKRGRDYAAWLGLVPVQKSTGGRQILGKTSKMGQRDIRRLLIIGAMTRIRWAIKNGPPKGSWLEQMLDRKPRMLVAIALANKTARTIWAMMTKHEDYRDPIAAV

SEQ ID NO: 120340 - protein, 341 aa, unidentified
MIIIGCDFHPGFQRIAYLEEETGEYGERHLSHPTEAEQFYRSLQGKEVRIGIEASGNYRWFRRKMAELHFEVQLGDATQIRASNPRKQKTDKRDARHILKLLVEKRFPEIWQPPVENEEVRQLLLHRCRMVRMRTHLINQLDSIVKNEGVPKKSLRTSKNRQQIEDLPLTGWYQRRRADLLELMEEVDKRIKLLDQAVQQAAQQNEQACLLMTHPGVGPVVSLAYVLAIGDWQRFPRGKQVASYLGLIPTEESSSNKRRLGGVSKQGNSFVRWLLVEAATLAQRHDSSWHRQYVRLSLDKHHGVAKLAIAHKLAVRLYWMLRSRQDYSQIRERVSHAGQSE

SEQ ID NO: 120341 - protein, 340 aa, unidentified
MEKRYIGIDLHRNRFTCCIRLENERTYVTEWELEDLGKFVKKLRPGDEIAVEITGNTRLFFDAVAPHVARVVVVNTNQFKVIRHSVKKTDPHDARALALYLSKNMLPEVRMKDKEHGQLASLTQTRDTLVKLRTALKNKINNMLSARGLNLAKEALGSEKKLNEVLELPFDEIVRIELRVIVEQIRSLNKSIADLEKTIGEEGSKLEGHQGLSSIKGIGKITGAILLSVIGDVNDFADEGRLASYFGIVPRVSNSNETEHSGRIHKRGTKLGRTALVQSALIAANYSPYLKRFYEQVKARRGAGKAIIALARKFLGIIYRTLKNKWVFEDFPNFVLAEAS

SEQ ID NO: 120342 - protein, 329 aa, unidentified
MFYLGIDVAKAKIDCCLILENSESKKKTKTFSNMPKGFEQLQTWLNHHAANSTQTIILMEATSIYHERLAKYLFDAGYQVCVTNPARARYFAQSMSKLNKTDKADSEVLARFAMTADLHFWQPLPEHIQLLNALLDRRAVLCEDLQREKNRLEKAESTFTIEPVLQSIHKSIKQLNKHIQDIDQQIDDHIDQNPDLKNDKELLSSIPAIADRTSLLMLSFLRSHSFERASQAAAFVGLVPIQRQSGSSIHGRSRLSKAGSSKIRAGLYMAAIVATRHNPHIKEMNERLLANGKTKMMAIGAAMRKLVHLCYGVLKHQRPYQENYCINSQ

SEQ ID NO: 120343 - protein, 341 aa, unidentified
MYSIGLDISKATICIHIPLNSLDLEIENSAKGLKSFYSKLKKLYKKELKKIVFVYEPTGSYSALLTKFCANKNIKAFIINPKQSSNFAKALGYRSKSDKIDAKMLSKSLSIAKESEIKVPVINATAEDIKELMSYYIFTVKQRVAAQNHHEALKVKEGNSYALKDLKKRIKEMKQKEDEIIQKIDNIIKEDDKLLNDYENIKTIPGIGTITAIVLLHLFIKYPKANKQQIVSLVGLDPVIKESGTSLNSKPKISKSGSRLYRGILFMATMVSINYNEQMRAFYDRLKANGKHSTVAQIAVMRKLIVIAHSLYKNNSKYDAQVYQLACGIIDTKSENKEVFA

SEQ ID NO: 120344 - protein, 414 aa, unidentified
MNYNQNKKIAQITSQTLIIGVDIAKFKHVARAQDFRGLEFGAPIHFENTKCSFESFLEWIKELQSQNDLDKVIIGMEPTGHYWLNLAHYLKENNLKFVVVNPMHVKKTKELDDNSPTKNDVKDARVIAQLVKDGRYAELNIPEGVYADLRVARKIRDLLSVDLQAVQGQIHNWIDRYFPEFLNVFKDWEGQSALQMLKLNLLPHELVKLSNQEILTHLRKAVTRAVGISRIQKLKQAASESIGIREGSELARLELSTLLDKYELIIQKFEQLEAKRDELLEQIPGVQQMLAITGIGKDTIAGFFAEVGDLSFYSHPRQIIKLAGLSLKENTSGKHKGQTKITKRGRKNLRALLFRVVMPLVAKNSAFKALHEYYTKRPDNPLKKMQSLIALCNKLIRVLFAIGKKQFELVKKEC

SEQ ID NO: 120345 - protein, 384 aa, unidentified
MNPDHTDTPAGTEYATVFVAFELSKAKWKLGVIVPGSAKMSRHTIDGGDLVALSKLLGVARTKAGRSGRPVRVLSCYEAGLDGHWLHRWLTDQGVINHVIDASSIEVNRRARRAKTDQIDLDLLMRAFLAHLRGEPRACSVVRVPSVEDEDRKRRTREREHLVKERTRHINRIKGLLHGQGIRDAMPLMPGFLSTLDQVRTGDGRPLSPRLKEEIRREHERLVLLCKQIKTIEAEQLAAHRAPAPRSVEAKVVQLAELKSIGPVIAQVLVGEVFYRRFDNRRQVGSYLGLTGTPYDSGNSRREQGISKAGNSRARTVSIELAWLWLRHQPDSELSRWFRERVGNIKGRIRRIAIVALARKLIVALWRYLETGLVPTGAVMRQSF

SEQ ID NO: 120346 - protein, 402 aa, unidentified
MHRDSVVACFRQLGPRGGIVREKERFTTTTAGLQVLDTWLAERRVQLVAMEATGVYWKPVLYALEHRFTVWLCNARNVKKVPGRKSDLSDAEWLADVAAHGMVRPSFVPPLPIRELRELTRYRKTQIDARVAEIQRLEKVLQDAGVKLTSVASKVLTQSGRSIIEALIGGEQDTAKLAALAKGKMRPKIPALTEALAGHFGSHHAVACRRILEHLDFLDETIEALTEQIDIRTDAFEAVYKSLLPVPGFDRLTIDVIIAETGADMSRFSTAGDLASWAGVCPGGHESAGKRRRVSTTLGNQWLRRALIEAARAAVRTKGSYFGAQYRQIARRRGPNKAAVAVAHSLIELVWHLLSTGEVFQDLGDDYFARRQDPQRRARRLVAQLEELGYTVNIEAAEAVAA

SEQ ID NO: 120347 - protein, 398 aa, unidentified
MTRKNTLKSLPTDTEFRVVGLDLAKSDVSVAAIPVDDNTPSLVDRMTYADLLDWAGKISPTLFAMEPCNGYSLLCLQLENLGHEIKVISGSTVSMWINTHLSGQKTDLNDAIALARLAVSDAELTPIRHKSITEIRIQTVQAVRQQLMSQRSKSIVSFKALAQQWGIPCAAGHRNLKKLRESIEAKVDLITRPVANAMLFLLDAVKSLDRQIGQLNQTLQELVMSDERGRLLQSVLGVGTQISARVITVVGNIERFNSPRSLVAYVGVAPRNFITGHKNLTKKKHGNCPDLSHNGQGKISRRGDKLLRSLFIQGAACLYMQFCKDQLPECQLKRWILKQLAMQKPYGKLIVSLAAKLIRIVWAVLTYGEKFNIQKAGMTRSMWSEMALETPLNKEVPA

SEQ ID NO: 120348 - protein, 423 aa, unidentified
MMKLKYSICCGLDVHKNVIVATIVTTNKDGISEYLQKSFSTINSDIQRFHNWLIENNCYHVCMESTGKYWIPIFNYLENDIDICLTHPKYVKAIKGKKTDKKDSKWIADLYKFDLVRCSFIRPKDFRQLRELARYRFKLVCMKSSEKNRIQNCMTISNVGIASVLSDPFGKTATEIMSYLLEHTADSMDEKAVRKLIKKGAKAKSDEIIEAIKGYNIETDQAKKLELAQGHLEYLDDMITQTEVELYVRIKPYYEFVEFVSTMPGMTELSSTIVLAETGVDMDIFDDAKHLCSWCGLSPANNESAGKKKSVRIAKAGDYLKPMMVQCALAAIKSKKQPYFAIKYGRIKKRRGHKKAIIAIARMMMVCIYHMVSEKKPFTPTDYEELMNPQNHVERVVLNENNVFAYLESLGYDSSKLVKRNDN

SEQ ID NO: 120349 - protein, 403 aa, unidentified
MNSVGIDISKGRSTVAVMRPFGEVVISPVEVRHTDSELSELARQLKSLNGETRVVMEATGNYHAPVAKLLHDAGLYVSVINAKLVHGYGNNDLRRVKTDRKDAVKLANYGLDRWLTLPRYVPEEDTRLLLKNCYRQYRQYSKVQTVLKNNLISLLDTVFPNVNRLFSSPIRGDGSEKWVDFVAEFWHCRCVSEKSQKAFTNKYQRWCRKHGYNFSEAKAHTIHAETCGHIDVIPKSETTKLLVEQAVVQLRATSAALTALKREMLTLAEQLPEYPVVMGMFGVGPTLGPQLIAEIGDVRRFYSKKALVAYAGLDAPPNDSGDVTGRHKSMSKVGASSLRRTLFLVMSVYLQRSPLDEPIYQFMDRKRAEGKPYRVYMMASANKFLRIYYATVKAYLESLEHTA

SEQ ID NO: 120350 - protein, 440 aa, unidentified
MAMRKREDLVFPNAAAIDVGASSHWAAVPPHATDAPVREFGAMTDDLNDLADWLIACGVDVVALESTGVYWIPVYEVLEQRGLQAWLVDARQVKYVPGRKSDVQDCQWLQRLMSYGLLRAAFRPGAEVCAMRAVARQREVLLTQQASWVQRMQKALVQMNIQLTEVISDVMGQTGQAIIRDIVAGERDAKALARHRHRRVKASEQDIVRALTGNWRDEHLFVLKQALAMYDDIAAHLRECDSKLGELLAERSAASVDLGKAPRQGSKARAEYDARQQLANWAGADLTRINGLGLDSVMKILSEIGTDLGRFANVKHFCSWLGLAPATKISGGKVISARTKRSANRVRQALKMAAMSLSHSDSALGAFYRRLCSRMDKPRANTATAHKLARMVYFMLTRGEAYVDAGQQRYEEQQRQRSVAALKRRAAALGFQLNPVGIAA

SEQ ID NO: 120351 - protein, 392 aa, unidentified
MYIVGIDIGKNHHEASIVSPEGKQIGRSLRFATTHKGADSLMSFIFKNIGNSPCVFGMEATGHYWYPIYSFLKAKGYTICVINPIQSDSLRKMYIRQTKNDSIDSFLIAEVIRFGQFGTTSMADENILAMRQLCRYRDSVISSRTEIKLRIGTIMEQIFPEYEKQFSSLWVSTSMGILEKYLTPENIENAPIDELFEIIKDKSHNRLTKAKAISIKEAAADTFGIKIAQDAFSFQLKQLIDRMNFHDKQIEALDIEIMKYYEQFDCYLHTIPGIGMIATATILAEIGDIHRFKSSSALVAFAGIDPTVRQSGEFNSTHNHMSKRGSPYLRHAIFLAATTCSFHNSPLNAYYKKKRDQGKHHLTATGAVARKLTTVIYAVLRDSKPYEPKKFC

SEQ ID NO: 120352 - protein, 343 aa, unidentified
MVHYVGLDVSLKQTSICVVNQAGSVVREDVVDSDPEAIAAFVRSKAPGAARIGLETGPTSTWLWTELKRLGLPVICIDARHAKAVLKMQINKSDRNDAIGIARIMQTGWFKEVHVKDIDSHSVRALLASRALLVKIKRDLENQIRGLLKNVGLVIGRAKFNVFTVRAEELIEDRPELMAVVRPLLKARQAIEQQTDDLDRKVLKLARYDAQVRRFMTVPGIGPITALCFKATIDDPTRFKRSRSVGAYVGLTTRRHASGEIDWTGRISKCGDAMLRSYLFEAAGVLLTRVPKWSALKAWGMRLAKRNGLRKATVAVARKLAVILHRMWIDGTEFNWSKKEIAA

SEQ ID NO: 120353 - protein, 413 aa, unidentified
MELEVVVERCAFLDVHRDTVMACARTPGGGGGRCEEVREFGTTTSQLLKLADWLADRQVTLVGMEATGVYWKPVHWVLEASVSEVWVINARHMRNLPGRKTDVADAVWGASLLEHGLVRPSFIPPEPFRALRDLTRYRKSVIEDRARETQRLHKVLEDAGVKLSSVASSVLTKSGREMIDALISGERDPEVLAEMAKGRLRSKIPQLQDAMAGRFNEHHALLCRAMLARIDQADATVEVLGDRVEDLLAPFEAAVALLVTIPGVSFRTAQVILAEIGADMSRFPSAGHLASWAGMCPGNNESAGKHRSGRTRHGSKWLRKALIESGQAAGRTKDTYLAAQYAQIRSRRGPQRAAVAVGHSILVIAWHLLTTGETYNDLGGDYFDQRRNSTARQRRLVAQLEAMGHTVTLQPAA

SEQ ID NO: 120354 - protein, 473 aa, unidentified
MARTRKKPVPVPAGEGVEVTDAPVQVVDRAAAIDVAKGSGMVCTRLPSDTRAGRRTQRVWEVTATFAAVVTLMDHLRSQGIQRLVLESTSDYWRIWYYLAEAAGLEVWLVNARDVRHLPGRSKSDREDCAWLCKLNEWGMLRRSFVPPEQIRDLRALTRLRTHLVHDRTRHQNRIEKILEDALLKISSLISDLMGASGRRMLAALVNGERSPRALAALGDCRLKATPAQLEAALTGRFRDIHALETGMLLELIDDLTVKITRLDGQITRLLEQIPGIRGVCTSCGLIGGGHAPACASDQARVLSVIERLDEITGVGTANAQVIVAELGTSMAQFPTPGHAAAWARLTSRTIQSGTTTKNGRTGKGNRYLRGALGAAVMTAANTDTFLGERYRRLARRRGKQKAIVAVARTICEIACLIIGDPGFRYIELGAGYHARHDPRRQTRNKIRELEKLNPGMTVTLTPRAPATETPAA

SEQ ID NO: 120355 - protein, 338 aa, unidentified
MTIEILGIDIAKNVFQLHGVNRGGRVVLKRRVMRDQLLEVLAQIEPCTVVIEACTGAFCWARKFEALGHRVKIISPQYVKPFVRRQKNDRNDAEAICTAARQPHIQFVPKKTLEQQDIQALHRARQRMVNHRTAVVSQIRGLLLDRGFAMAQSITRARRLIPKILADAANELTDLAREAIAELYDLFRDLDRRITSFDKKINRVFLESEPCQRIAKIKGVGPKTATAIVAAIGDGSEFKNGRHLAAWVGLVPRQFSSGDRKVLMGISKRGNQHLRSLLVHGARAVVRTAPSKTDPSNMWVNQLRERRGFNRATVAVANKNARIIWAVLRTGEPYRAAF

SEQ ID NO: 120356 - protein, 418 aa, unidentified
MSMTNQLNIVCGADIHQRFLVATILCRDGRTWADRFLMNLNGLLDFKSWLVSYGCQKVAVESTGRFWIPVHMILEGTIEVIVANAYKIKHIPKKKTDLKDSEWLAELCLNDMIEPSRIFPKEDLELRNLTRTREAYVRDLSKEKNRIHNVLESCSIKLASVISDIFGKSGMHILKGLLSGTSIDEVLKGIPDKRIREKKSEELRDALMGKLEATDIFLIRQSLQIISQFEMRIEELDREIRSRIASRPMDIKILRSIPGIGMVSAYTILAEIGNYLDFKKPEQLAMWAGLVPSVYQSADKLITGGITKQGSKHLRWILVQVAHAIAHAKGGKLKKFFLKIRAKKGYLVAVVALARKVLCLIHHLLVNQEMYEEEGRLSKRDAPIPKNKNQGTLTIEDMIQCIAQAGYVVKRLNSGMHG

SEQ ID NO: 120357 - protein, 349 aa, unidentified
MRYIKNIAAFVTDKIVFCGIDMHVQHWNLSFFCDGEVVEELRIGGDLVLLLFVLKNYSTARSVRIVYEAGFSGFWAYRQLRARGYDCMVTAPSLIPQNNSHVKTNKRDARALASYFAAGLLKAVYVPPIEVEADRRVSRRRSQLVKQLTRTKNHIKSFLHLHGLKTPVDIRSKWSKRYLTWLRELQWEQSSDAFTFRHLLLCYQRHREDLAIITQQLRQLSHASCYIDHFKRLCTARGVGLITGMTFLLEIFDFGRFRRAEEFASYLGLTPAQYSSGHITRQGNAALRAVLVESAWTVIRHDPHLRAKYERLRQRGTNGKKAIVAVAHSLALRLRRCLLDQTDYVIGVC

SEQ ID NO: 120358 - protein, 341 aa, unidentified
MNSVTLGIDLGKRWFHVVGCDAAGKVVLREKLGRNQLLQLMAQHPPSLVGIETCCGSQYLARKFQGFGHDVKLLPAQYVKPFVKSQKNDFNDAQAIAEAVRLPTMRFVPLKSEEQMDVQALHRSRERMLQQRLALTNQIRGLLLDRGIEIAQGFYALRTVLPSLLEKEDSGLTPMMRDLGRMLLDMWNRTEATIEQMNDRLKCLARESDLCRRLQTIPGVGILLSTAIVSAVGNASTFKRARDLAAWVGLVPQQHTTGGKPRLLGITKRGNSYLRRLFVQGARALWVWKDKHHNDPIQRWLLQLAERRHAHVAVCALANKLVRIAWAVMRSGAEFNLHYRT

SEQ ID NO: 120359 - protein, 368 aa, unidentified
MVIPQNDGVVSKRGQATPPQASSGMTMDYYAGIDVSLEASSVCVIDGSGKIVREAKIASEPEALTLFFRSLGFAVTRIGLEAGPLSQWLYAGLKQAGFAVELLETRHVRDAFKAMAVKTDRKDARGIAQLLRLGWFKPVHCKSAAAQEVRALLTARKLVQSKLYDVEMSLRGILRGFGLKVGPSTPKRFAGRVAELTQDHPVLRAIAQALLAAHEVLLRELCVFEKQVRSLARSDGRVKLLMTTPGVGAIVALTYVSAIDDPGRFSSSKRVGAHFGLTPKKYQSGETDISGRISKAGDGGVRAVLFEAAHIVLTRAVKAGALKSWALKLAKRAGMKKAKVALARKLAVILHRMWCDGTAFDAAKAAAV

SEQ ID NO: 120360 - protein, 345 aa, unidentified
MKNLFIGVDFSKEKVDVAIIFADGLAETASRVFNEFKTTVSGYKQLIKWVEQNSSGIEPSLWLFCGENTGDYSKGLCNFLYGKGYDMWLENAKSIKDASGLRRLKSDRADASMIAEYAMRNYDRAIMYEPLSESLAQLRELFLYRQMVVHHRCSFQVRRGEKKLTMEKSPIKTMISQSGRHIVSELNKEVEKIDKRIAELIKSDEELTEVFTIVTSVPGIGTQNAVCLMVYTDNFRRFNYDSRKIACYYGIAPFGKDSGTSVHSDPRVHYMANRQIKSMLTQAALAAINFNPVIARYYMRLVERGKKKQVALNNVKNKLIRLVTAMVRNRQIFSPESLLSKEIFP

SEQ ID NO: 120361 - protein, 465 aa, unidentified
MRQPDDRRRRKPRVSPSVLECINPDVAGIDCGSSEHYVAVPPDRDPNPVQSFSTFTHDLHRLADWLTACRVTSVAMEATGVYWIPIYEILEARGLEVHLVNARHVKNVPGRKSDVSDCEWLRELHSVGLLRGSFRPADVIVALRAYLRHRQTLVESTAMYIHRMQKALAQMNLQLTLVVTDITGDTGLRILRDIVAGHHDPTHLARYRHRRCNASEAEIAAALTGHDRPEHVFVLRQNLELFDACQTQIAACDRAIETHLQTMVVAVPLPVAPPPTPRATRTPRGHAPRFDIRLPLHHLTGVDLSQIDGIAPYTALRLISEIGTDMRRWHTEKHFTSWLTLAPRNKISGGRLLSSRTQPSANRAAAILRMTAMSLGRTQTALGAFYRRLAVRIGKAQAITATARKVAILVYRTLKGNLVYRDPGAHGYDAQQRNRLLRSLRQRAETLGFSLVNRQTGEVLETAVS

SEQ ID NO: 120362 - protein, 355 aa, unidentified
MNDAKYIGLDVHQATISVAVRDSDGKLVMEAILETKAETILQFVRGLRGSLHATFEEGTCAAWLYALLKPHVTQVLVCDPRKNALLKVGNKNDRIDSRKLAELLRANLLSSVFHEDTGLRAVKELARSYLTMTKDLTRVMVRLKALYRSWAIPCATKQVYAPRHRAEWLAKIREASVHRRAELYYQQLDALRSLQQQVKKELLIEGRRHSATKLLRQIPSIGPIRAVLLLALIQTPHRFRTKRQLWSYCGLALETRTSAEYRVVHGQLQRSKKPVAIRGLNKNHNHDLKNLFKGAALRAAAVEKPFQEFYAALVAKGIKPEMARLTLARKIAAITLIVWKKGARFDAEQLKQQAA

SEQ ID NO: 120363 - protein, 346 aa, unidentified
MKILALDLGKYKTVGCEYERESGAHQFKRSFTTPTGLRKMVQEVKPDRVVIEVCSIAGWICDLLRGMGIAVQVANTSDDAWRWRKVKQKDDRRDALKAARLSAVNQLREVYIPPIEVRQWRALITYRQQLVRRRTKIKNHIRDLLLREGQILGRGSKCWNKLGMELLTSLARPLNEVGLAELWRGELHEELQQLQLTQARIATVEEKLNALGAADGRVQLLRTIPGVGPRLAEAIVALLDQPQRFRKASQVSGYIGMVPKALDSGETERRGRITRQGSRLVRSLLVEVAWAGLRHNAWVRQTYQRLSGGKKARKKIAIVAVGRKLLVKCWAMLRDNRPWDWQPQIT

SEQ ID NO: 120364 - protein, 310 aa, unidentified
MESITVGIDVSKDRLDVAVRPSGEAFAVERNAAGLEQLTIRLRELAPQVVALEATGGFETIAAAALAAARLPVVVVNPAQIRAFAKAIGQRAKTDPIDAATIAHFAEATKPEPRPLPDEATRLLGDLVARRRQIIEMIGAERQREQRVTVPHLRRSITRLLKALEKELASLNTDIGDAVRGSPAWREKENLLISVPGVGRVISSILIAELPELGQLGRREIAALAGLAPFTRQSGKWRGKSFIGGGRTAVRTALFMGAFVAKRHNPVLKAFFDRLVAAGKPKMVALIAVARKLLTILNAIIRDNRPWQTA

SEQ ID NO: 120365 - protein, 345 aa, unidentified
MKLTTVSIDLAKAVFQLHAIDEQGKTALKKQLKREQVVPFFATLEPCLIGMEACGGAHYWARKLHSLGHTVKLMAPQFVKPYVKSNKNDAADAEAICEAVTRPNMRFVPVKTVEQQAILAVHRARQGFVKARTAQANSIRGLLAEFGVVLPQGIRHINERLPGILEDYENDLPGSFRQLMQRLHEHLKELDRQVVELEREIQQWHRANEASCRLAEMPGVGPLTATALVASVGDAKNFANGRQMAAWLGLVPRQHSSGGKPTLLGISKRGDGYLRTLLVHGARSVVRVVESKTDPSADWLKGLLARRNTNVAVVAQANKTVRIAWALLAHGSRFRLDYTPDVTGA

SEQ ID NO: 120366 - protein, 423 aa, unidentified
MSKRLSTPTASVLVAIDMSKHRQEILIERPEGGRRRRMTVMAAKPDYDRLVDDLIAIGRPIVVGFEATGNYHRTLAHRLLTAGFELRLISSVALARTREALHNGWDKNDPKDAQVILHMLRIGATQAYVDPLAAGINDLQELSKTHETISKAKTQTWHRILTHYLPLYFPEIARFAGNSRSDWFLALIERFPTPGSITAMDREAFAAEAWPLVGRKVSKAALINDIYETACSSIALPVPEDAAAIAMFRMIIAQARSLIQQRNRIEETAQATLAQNRDYQLLIKIPGIGPINALTILAEAGDLRRFRHHRQFLKFCGLDLATCQSGTFRGRTKLSKYGNARLRRTFWMAAQVAARQCDNSFRDKFGRYVAGHAGDADRRRKAMTALTAKMARVVHAVIKTETEYRPFLERSDARWKDPSLQVP

SEQ ID NO: 120367 - protein, 457 aa, unidentified
MYRELHSLRQALHHELESTLPPLPGVEPNKLLQTYLDQLTLYVGVDVADQTVTLLALNASKEELGDLPDCPNTPHGHAQIGEWLEHMRMQHHLRIVAVACETTGVYYWGLWDYLATCPNVARVLFNPRTTEHMGEVLSKRVRNELVDALLLAEQLRLGSTPEVLLTEDADLLTARLCSRAARDLAQQINRKKNQLRSLVRGYNPVLLQVFRGGKFHHPAVYALLERYLFPDEYVVAGVGLLTQLLTEHSRSAFGQEHAQMLVDHCRECLSRPIGRAVVHQRVNHLTTEIVLARTHQKDMLQKGYALIRHRPEAQLLKASTGAGISNTLALVTEVGDIRRFPDGEHVASFLGLTTSKHISGATIYHSKHITKQGSPNGRYAAVNMALHLSQRVPKYRTMYQAIKSRKPPRKGHFVALVAIARDFVTNVLYDMWRYQRPFFVKVEDYRQYLRNHPRVAA

SEQ ID NO: 120368 - protein, 340 aa, unidentified
MSEITTIGLDLAKRVFQVHGIDEAGTAVVRKRLRRGQVLGFFADLPPCLVGMEACATAHHWARELKALGHDVRLMPPQYVKAYVKRNKNDAADAEAICEAVQRPAMRFVAMKTIEQQSALMMHRARDLLIRQRTMLVNALRGHLAEFGLIEARGLHKVAGLVAIVRDDTDGRLPDMARQVLKVMADQLDELQMRIVTIERQVLAWHKSNATSQRLASIPGIGPIIATAIAVTVPDPSMFRSGREFAAWLGLVPRQSSTGGKARLGGISKRGDSYLRRLLVGGAQAVLLRSKMGKADPWLTALLDRRPRLVVAVALANKIARIAWATMSRQETYRRTAAPA

SEQ ID NO: 120369 - protein, 349 aa, unidentified
MRHTFLSAARTVARANEPAFSQERDWRENMKNDDSVVVGIDVSKEFLDVLLLPSESKKRVANDESGCAELLAWLVSETPSKIVLESTGGLEMLAAGILSAASLPVVVVNPRQVRDFAKACGMLAKTDTLDARIIARFAQAVKPEIRPLKDELSQTLSALVARRRQLVDMMAAEKNRQSSAPRATRKSIELHIAWLEKQIGSVDDDISTFIQSSPVWKAKGEILTSVKGIGDVTASTILAALPELGSLPRQKIAALVGVCPFNRDSGKFKGKRSIWGGRAAIRSVLYMATLSAARFNPVIKAFYERLTKAGKPHKVALTACMRRLLTILNSMIKNNQKWDHGKFQLNTAT

SEQ ID NO: 120370 - protein, 370 aa, unidentified
MLDTTTFVGLDVHARSIKAVSLDVMTGEVRAATFGYDAGAVAGWVRSVDPRARCVYESGVTGFDLQKRLSGLGVDCVVGAVSKMIKPSADRRRKNDRNDAEFLARMLSVGNVVEVWVPDDECEAARDLTRALEDARDDLSRSKQRLSKFLLRHGLVFDERTPTGRRKGNWTRAHWSWIESIRFAERADNDVLAYYVDAVRRAAEEKARLEGLVEAEARKPRWRRRVDSLRCLKGVDTASAADLVFEAGEFSRFRNARSFAAWVGLTPSEHSSGESDRRGAITKAGNKHLRKTLVEAAWHYLTCSGRPKDLAKGQAPDRGARRHAAKGVRRLVERREALLARGVHGNKANVATARELACWVWAVGLMAEEA

SEQ ID NO: 120371 - protein, 387 aa, unidentified
MAQVNDLGRSLTAFDPISTLVVVVEMSKASWLVSGAVPGVERQPLKKLEPDATALLRLIERWRNEAVRAGRPIGRIAVAYEAGRDGFWLARWLIARGIDAHVIHSASVAVSRERKRAKTDRLDAAMLMRVFLGWLRGERGHCGMVAIPTMEEEDARRPSRERESLVNERSRITNRMKSALARLGVRGFKPHLRKAPERLAGLRTAEGTGLPVNIIEEFRRDMARLALVRQQISSIEKTRAERLERAPDTGPHAMVRLLARVIGIGIETADMLVREILSRKLRDRRAVARYAGLTGSPDESGSKRREKGLAKAGNARVRRGVIQLAWRFLMFQKNSALARWYRTRTEGPSGARKTTMIVALARKLLIALWRLVTTGEVPDGVELRPAA

SEQ ID NO: 120372 - protein, 409 aa, unidentified
MDIVHTHCVGLDVHKKTVVAAIIVPGKKETRTFETMTSDLLVLSDWLTVEGVTHAAMESTGEYWKPVFNILENNFEVLLVNAQHIKSVPGRKTDVKDAEWIADLLRYGLLKASFIPPVGQRELRELTRYRTTFVQEKATLVNRIQKVLESANIKLASVASNVVGVSGRAMLAAIIEGKAAPAEMAELSKGRLREKRDQLIKALEGQVKAHHRFVLTELLCQIDSLDETIARFDQQIQEYCRPFEEVVNLLDTIPGVARQTAEIIVSEIGIDMSRFESANHLSAWAGLAPGNNESAGKRLSGKTTRGNKALGVALNQAAHAVAHMKNNYLAAQYHRLAGRRGQKKAIVAVAHSILVITYHMIKRKEPYRELGGDYFDKRRPEATAKRLVKRLEQLGFTVSLEQASAPLAA

SEQ ID NO: 120373 - protein, 403 aa, unidentified
MAAVMIGVDPHKGSHTAVVIGPAEEPLGELRVRASAAQAGKLLEWAAAWPQRTWAVEGAGGLGHLLAQQLVAAGERVLDVQPKLASRVRLLQAGDTNKNDPNDALSVAVAALRSRTWRQVSAEDYPAVLKVWSKRHRDLARTRNQVACRLHAVLCDLIPGGHPKEISAAHAARILAQISPSGPVALARAELAAEFLADLHHLDVQLHATRKKLAAAVKASPTTLTQVFGVGPVIAGTIIGDVGDVARFPGRDHFAAYNGTAPVEVSSGNRKTHRLSLRGNRRINHAIHMAAITQLRHKHSEGRAYYDKKVAEGKTHKEALRSLKRKVSDAIFARLRADARQASAKGPEGQPGNGSDSSAASSHPERQLFGPATPGPDTTIRPATTSDTPAPPKPATKKTRPAA

SEQ ID NO: 120374 - protein, 354 aa, unidentified
MPRTSQSASVALSAIGVDIGKDVFHIVGFDRTGQIALRRKIKRSALVETFEALPRCVVGLEACLSAHFVSRTLRQLGFEPRIIPAKYTKPFVKGQKNDYNDAEGIAEAAMRPNLKTVAEKSQEQLDLQALHRVRSRLVSRRTATINQIRAFLIEQGIAVRTGARALRNSLFAILKNRESEISPRMTSIIVGLYEDWVSLDKRIESLTLEIEKISEVETNCERLMSVPGIGPMISTATVAAIGTGEAFDRGRDFGAWLGLVPRQYSTGGKPILGRISKQGNRYLRTLFVQAAHIILMRPKNWLKFTFGRWLEQASTRMHKNKLATALANKLARIAWSILRNGGTFGTHIRTADAI

SEQ ID NO: 120375 - protein, 483 aa, unidentified
MMQSQRRLVGIDLGIASAHTVRVLDGAGREVCRRRCVPSLESLTRIEREALAGAGEDARLEVVIEATGPAWLPIAVFFTDRGHQVFRVSSQKAADLRRFLSRHAKSNSIDAQTLARLPLVDPRGLVALQLPAAEQAALDRRVRACDRLTMQAARHQVRIKDLVRQVMPLTPLTGNLGNTDLTVLERWADPRKLLALGKTKLTAVIVKASYRQQGAERAQQWLDAARAAVDLYADNPAVAFVDLAAEIATEVRLIRALQAELAHHAKQREDAYRWADPGQLARTLPGLAEVGGPALAAVIGDASRFATGAHFKSFLGLAPRAAQTGETDRKGQPMSKAGSRLLRATLIRAADHARKQDPQLAKVYHEQMVHRGASHLKATCVVAAHLAERAWAVMHRRMPYVTCDTTGDPVTPQQAKHIIDEQWTVPADVRARRRSRTTKAGKALNKSSPDMTRRTRTASTNEATFPTPDRRPPHRTRQPHAHT

SEQ ID NO: 120376 - protein, 402 aa, unidentified
MNAVGIDVSKGKSMVAIMRPFGEIVSTPFEIKHTSSDINSLVKLIKSIEGESRIVMEHTGRYYEVLAHQLSEANLFVSAINPKLIKDFDNDSLRKVKTDKADSVKIARYALDKWQNLKQYSVMDELRNQLKTMNRQFGFYMKHKTAMKNNLIGILDQTYPGVNTYFDSPARSDGSQKWVDFASTYWHVDCVRKMSINAVIDHYENWCKRKKYNFSKSKAEEIYGKAKELVPVLPKDDITKLIIKQAVDQLNSASITVESLRTLMNETASKLPEYPVVMAMKGVGTSLGPQLMAEIGDVSRFTHKGAITAFAGVDPGVNESGSYEQKSVPTSKRGSSDLRKTLFQVMDVLIKTHPQDDPVYQFLDKKRAQKKPYYVYMTAGANKFLRIYYGRVKEYLASLPES

SEQ ID NO: 120377 - protein, 342 aa, unidentified
MLYVGIDVAKNKHDVTALNVPGKTVLKPLTFSNNKAGFELLDLSLRQLNQDCLIALEDTGHYAFNLLNFLHEQGYEVYTYTPLLIKEFAKSLSLRKTKTDKKDAHGIALKLLSDPNREQFQHDNRQVELKILARHIHRLKKKQSDWKVQYTRCLDIIFPELDKIVGKHSEYTYQLLTRYPNPQKRIEVGFDKLIEIKRLTASKIQDILSVAPRSIGTTSPAREFEIIEIIKHYKRLIDKVEKCVNDLMAEFNSVITTVTGIENRLGAVILAEIRNIHAFDNPAQLQAFAGLDSSIYQSGQIDLAGRMIKRGSPHLRWALIQAAKACARFSPAFKAYLKTKLE

SEQ ID NO: 120378 - protein, 343 aa, unidentified
MQTITTIGLDIAKSVFQVHGVDAAGQVVIRRQLKRQSVLAFFQKLPSCLVGIEACASSHHWSRELQALGHTVRLMPPAYVKPYVKRQKNDMADAEAICEAVARANMRFVPTKTPEQQSCLMLHRTRHLFIRQQTAVINSIRAHLAEFGIVAPVGRKGVTELLHIVADPSDKRVSEVARACLAALGGQLLSLKQQIVEFDRMILAWHRSNQTSKRLHYIPGVGPMLATALVASVADPSNFRSARNFSAWIGLVPKQYSSGGKERLGSISKQGDRYLRSLFVAGALAVIRYAKIHGTGHRPWLTALLARKPTKVAAIALANKIARMAWAMMTKGERYREPIALAR

SEQ ID NO: 120379 - protein, 359 aa, unidentified
MRILAIDLGKFKSLFCWYEPQEQKFRIRTAASTPAAFHDLLVEREVDRVVIEVCDMAGWVKDLCQTLSIAIQVVNPNGEGWRWRNVKKKTDKEDAKKLCRLSLSGDVKTVWLASRIERHWKSLILYRHKLVERRTAIGNSIHALLVCEGKAMKGRECWSGESMEALRAMARPIGECGKEESWQGHLGMELESLEHVRRQIRELDQKLNEIGEKDPRVVLLRTIPGVGPRLAELAVAVIGDPNRFENAGQVGSYGGLVPRRYQSGQMDRSGRISKAGCGKLRKLLVEIAWGMLKHNEEGRKVFMRICKGHKTRRKQAAVALARRVLTWCWAMLRDGTTWRKPGKEMDLEKELENGLSVLE

SEQ ID NO: 120380 - protein, 401 aa, unidentified
MSKKNTRNALDTSLSYAVIGLDLAKADCAVAAVPCADDELGLIDRMDYESLFEQAEKLGPTLFAMEPCCGYSQISLRLQNMGHEVKVISGHAVKNWIATHKSNQKTDLNDATALAKLALYDHDLQPIRVKNVEECRIASVQAIRIQLRTQATKSLVCFKSLCQCWGIVIRRGSLNTKKMAEAVAAVEKLLGAEVASSLMILRDAYKFTMKQINALDKLLDALVEANEQARTMKTVLGIGTQTAARLAVTTGDIKRFPMPRSYAAYFGLAPRNIITGHSGTPSPSKRGALKPVSSRGQGKVSRRGDRVARSFIIQGAATIYMLYCKDMLPECQLRRWLHEQIKRGKPYGKIIVSLAAKLLRIVWALLTYGEKFDSHKAGVPRSVLAAMEKPLKHDAAAESAA

SEQ ID NO: 120381 - protein, 343 aa, unidentified
MEIHAIGIDLGKTLFHLVGVDSCGNVVVRKRCSRSRLLAYTANVRVQRIGMEACSGSHFLGRALREQGHDVRLMPAQYVKPYVKTNKSDYIDAEAIAEAVQRPTMRFVPIKTEEQLDLQTVHRVRERWVMRRTAVVNQIRGLLLERGLTLPKGRSHVDRALPDILADATLRLSDLFRVLLAQLGLEMDQLTARIEQMDAVIHRTATENEACQRLTTIPGVGPVTATALVAAIGNGSAFRRGRDLAAWVGMVPREYSTGGKQKLLGISKRGNVYLRRLFVQGARTVMQYRSKQAPGLRCWLDHLMARAHQNVAIVALANKLVRMAWAVLCKNETYRPPALVAAT

SEQ ID NO: 120382 - protein, 348 aa, unidentified
MRIIGCDLHSRQQTLSMLDAETGEVEEHVLEHEGEEVREFYSGLPGPVRVGIEASCATQWFLQLMEELGVECWVGHPAKIRAYEPRKQKNDRRDARLLMHLLEQDIFPRIWVPSVEQRDVRALLMHRHQWVRIRVRIQNALQSIALGHGLRRGSGLWSKDGQLSLLALSLSPHTDARRNELMTLYRQLEADIEVLDRMVAETAEERPLSRLLMTHPGVGPNTALATEVYLGDPTRFADGKAVGSYVGMIPEEKSSGKKWRLGKLTKQGNTMLRFLWCEAARHAVRHDAELKRFYTRKLAQKGLGKATVAAGRKLGIRLWIMLRDEIEYDEFCRRGRQCGEAHAEKPGR

SEQ ID NO: 120383 - protein, 366 aa, unidentified
MKKPSTTALRRIKKLQDGQLTIGLDLGDRSSFYCVLNSAGEVILEERVATNPEAMKKTFEKMPSSRIALETGTHSPWVSRLLTELGHEAIVAHSRNVRLIGESRRKDDRLDAQALARLARIDPRLLSPIQHRSAQAQADLTVIRARYALVRARTALVCAARGLTKSFGERIRGRNPKGFGSATTETLGPQLQVALAPLLSALETITARIREYNVQIETLAEESYPETALLKQVKGVGTLIALTYVLTLEDPRRFRKSRDAACYVGLQPGRRNSGQSEPQLHITREGDSYLRMVLVQGAQHILGPFGEDSDLRRWGLKLAERGGKRGKRRAIIAVARKLAVLLHHLWISCEEYEPLHNTRKRRLAAA

SEQ ID NO: 120384 - protein, 345 aa, unidentified
MKMTTVGIDLAKQVFPVHGVNPHGKTVLKKQLRRNKVLAFFANLPPCLIGLEACGSAHHWARQLETFGHEVKLMAPQFVTPYVKTNKTDAAEAEAICEAVGRENMRFVAIKTTEQQAILAVHRARQGFVKARTAQANQIRGLLAEFGIIIPQGISHIGKQLPVILDDEDNAVPGTFRAMLARLGEHLNELDQHVQDLATQIEHWHRSNEASRRLAQVPGIGPLTASALIATIGDAKQFTNGRQLAAWLGLVPRQHSTGGKPLMLGISNRGDSYLRALLVHGARAVLRVAEHKRGATPVWLQQLIGRRHKNVAAVALANKHVRIVWALLAHERDYQADYASMAVSP

SEQ ID NO: 120385 - protein, 350 aa, unidentified
MLIIGCDYHPGFQQIAFVDTETGECGERRLAHREEAEQFYRELKERNLAVRVGMEASGHARWFERLLRELQFELWIGDAAEIRTKRVRKQKTDRQDAQLLLRLMIEDRFPRIWVPDSENRDLRQLLWHRHRLVQMRTRVMNQLHVVALNEGLRRKKALWRPAGRNELESLILAPWASRRRQDLLDVLDQLTPKIQELTRALEEEVQKRPVTRLLMTHPGVGPLTALAFELVIGDPDRFQCGKQIASYVGLVPSEESSGDRRRLGHISKQGNSLLRFLLVEAAQVTVRSHPQWRSKFFHLALRRGRKIAKVAMARKLAVHLYWMWRQGWDYGQFEKLGSHAGAPGNRRGVQ

SEQ ID NO: 120386 - protein, 343 aa, unidentified
MEQSQGVVVGVDTHKDSHSAALVDELGAVLASTDVGANQRGYVRLLEWARCRSPRRTWVVEGTGSYGAGLAGFLARCGEVVYEGDRPQRRKHGAGGKSDQLDAIKVAREALAREHHAVPRQRGNREAIRVLLSTREGAVTASRQALNQLYALVVTAPEPIHERLIGLKGEQLVKASLRLRCSAGELETSVTTRVLRQVARRIRTLQAEAVDYEAQLEKLVAETVPVLLSEPGVGAITAAQLLVSWSHAGRIRNENAFAAMAGVAPVPASSGRVTRHRLNRQGDRHLNRALHVVAVCRSSFHRPTKSYIARRTAEGKSAREIRRCLKRYLARRFFRLLQGLDKP

SEQ ID NO: 120387 - protein, 309 aa, unidentified
MEIIIERGCGLDVHKGTVVACIMGTGIKKEIRTYLTVTNDLLRLKEWLRETGITHVAMESTGVYWKPVFNILEDNFEVILVNARHVKNVPGRKTDVQDSEWLCRLLRSGLVSGSFIPPRDIRELRDLTRHKRKLIQAITAEKQRVEKVLEDANIKLSSIASDTFGASGKRIIEELIKGKLRAEEMAELSKGRLRQKREGLKEALVGEVREHHKFMIKASLKHIRAMEKILSDIERKIQEKIDRQYKEEYALLQTIPGVKGEASTLIAEMGVDMERFPSEEHLSSWAGMSPGHNESGGQKKTGSTTYGHK

SEQ ID NO: 120388 - protein, 326 aa, unidentified
MEHELHYIGIDTAKEKLDVDVLRPDGRHRTKKFANTTKGHDELVSWLKGHKIDHAHICIEATGTYMEPVAECLYDAGYIVSVINPALGKAFAQSEGLRNKTDTVDARMLAEFCRQKRPAAWEAPHPLERALRALVVRHQALTDMHTQELNRTETAREVQRPSIDAHLLWLEAKLKRLEKQIKDLTDDDPDMKHRRKLLESIPGIGEKTSAVLLAYIGLKDRFAHARQFAAFAGLTPRRYESGSSVRGASRMSKAGHVSLRRALYMPAMVATSKTEWGRAFRDRLAANGKKGKVILGAMMRKLAQVAYGVLKSGVPFDASRHNPVAA

SEQ ID NO: 120389 - protein, 456 aa, unidentified
MKIPQSTIRLLTGRLVKILLYREVSTMKSNTQNAKIEAITEKTLVLGIDVGSETHYARAFDYRGVEYSKKPFKFSNTEAGFVTFKAWVLDIKEKHGKDKVIPGMEPTGHYWFNLGKFLQDNEMKPVLVNPHHVKKSKELDDNNPTKNDRKDPKVIAGLVREGRYMIPYLPDGVYADLRTASNIRFQLQAELTRIQNRISRWFNIYFPEYKTVYGKPDAKSGILILKEAPLPEDILTLGIDGVNQIWRDAKLRAVGKARAKTLIEAAEHSVGSKEGAVSARMEIRMLLEDYESRNTRLQEVMVLIEELIRKIPMAEKLLEIKGVGIRTVSGFLAEVGDISRFNNPKELQKLAGLALVENSSGKHKGETTISRRGRKRLRYLLFEVAMSLVAKNPEFRELHNYYTTRRLNPLKKMQSLMAIAAKLLRVFYAILTKGVGYDPKKMVNDIRRPAAYAQAA

SEQ ID NO: 120390 - protein, 354 aa, unidentified
MSEIATIGLDIAKNVFQLHAVDRSGKIVLRKALRRSQVQGFFSRLPPCLIGMEACATAHHWARTLMAFGHDVRLIPPAYVKPYLRRQKNDAADAAAICEAVTRPSMRFVPVKSPQQQSTLMLHRARDLLIGQRTALINALRGHFAELGIVVAQGARNTRQLLAFLHEEANLDFPTAARIALQPLATMLLGIETQIARLDKAILAAHRSDPISVRLAAIPGIGPIVASCLSASVPDASLFQGSREFAAYLGLVPRQHSTGGKARLGSISKMGNRHLRKLLVVGAHAALYSMKSGKTRTDLADWARSLLAKKPFKVVAVALANKIARIAWAVMARNTAYEPGNKGAAAPAASYTAA

SEQ ID NO: 120391 - protein, 371 aa, unidentified
MLYVGIDQHSKQITVCVRNQEGDAILRRQVSTRAEKITAFFEQIIQLDAEFMAILECCGFNDWLIKELRKYNCREIVLIHPEKPSKKKTDQRDARKLCDLLWLNRERLAAGQTVHGLRRVYIATQQEQEDRQITTLRKHLAQRRTRALNKIRRILHRHNLMWQYPTKSFQTKSGQQWLETVQLPEIDRFEMDLLLQEWKSLEKQIAQVNVKIIERANRSVPGCILNATQILMTAPGVSHYSGLGLSSRIGPIDRFPRPRSLANYFGITPGTRNSGESQQRLGSITKEGSKIARFLLGQLVIQFLKQDPVIRDWYRRIKLRRGSKIAQVAVMRRITTMFWHMLKYQEPYHYGGPPPRLRKTRPHHGSKPKAA

SEQ ID NO: 120392 - protein, 363 aa, unidentified
MNIPVRIGMDTSKSVFQLHGVDENEVVVVRRQFRRAEMIRYFERLPPVLVAIESCGSSHHWGRLLQSFGHEVKLIPPQYVKAYVKRGKNDAADAEALCEAVTRPSMRFVPVKSKERQAACMLMTVRERLVSVKSQLSNAFRSYAAEFGIVGPAGQQNVAALIKRVLEDDSLPEMARDLFRLQADEYAAVQARLAKIEAKLMKWHREDDISRRIATIPGVGPIGSSMLSMKAPPPETFRSGRDFAAWLGLTPKDHSTGGRQRLGGITKAGDSILRSTLIVGATALLRHVRKGRHKPTPWLASLLERKPPKLVAVALANKFARIAWRLMISGGVYNQPVATSRPDLKSAREQACSADCPRTCRTQ

SEQ ID NO: 120393 - protein, 319 aa, unidentified
MSEIILGIDVSKKTLDAALIFDNRIVNKQFQNSSEGFKLLSAWLASLQITRVHACLEATGVYGEAVALFLHEQGHRVSVVNPLRIKGYGCANMQRNKTDRLDARLIADFCLTQEPDEWKPPSAAVKHLQSLVRRVEVLEEMRQAEENRLANAAPQIKPSIERMITLMKEEILQFERQIKEHIEGNPDLKEQSELLQTIPGIGARTANLLLSEVEFERYSSARSLAAQAGVTPRKRQSGTSLKQTSLSKLGNARLRKALYFPAIVARQHNEIVKEFAKRLKKNGKTSMQVVCAAMRKLLHIAFGVLKHKRPFDASLAFSA

SEQ ID NO: 120394 - protein, 330 aa, unidentified
MKLNYVGIDVSAKTFTVIIDHEGARTEAFDLPNDAKGHKKLIRMITKKSFSARVVLEATGVYGLDLALALHRAKRVEVMVANPRAMGQFAGAFLRRSKTDALDANIIVEFAIRMEFEAWNPPEPHTFDLRAISRRIEGMTKMATQEKNRLHAATSFDEMSDIVRNDIKVNIRHLERRIDRMREQARELIAEHPDLDRAFLHITSVKGIAQAAGIQILAELSVLPEDMDVRQWVAHAGLDPRVFQSGTSVNKPARISRQGNVHMRRALFMPVLVAVQHEPNVKAFHEKLVARGKTKMQANVAVMRKLLHAIYGMLKHDRDFEGEKFYAIGA

SEQ ID NO: 120395 - protein, 370 aa, unidentified
MKEYIIVGCDLHDKTMLLKIARGRSAVEKVTWANNVAGRRAMLKDLKRRSAEADDAAVVFAYEASGLGFRLHDFLTENGIACYVLAPTKMPKSLKHRRSKCDEKDANQILELLRAHVLAGNSLPSVWIPDAETREDREVVRSRLDAKRKATKVKVQIQTLLKRNGIDRPKDTGKGWTVSFRGWLSRLAGRSRRLSHGTRLGLGTLLRQLEFLEAEAKLLDVAVAKLSEKERYVATVERMTSSAGVGILTAMVFLTEMGDLTRFTSRKEIGAYIGLVPSSDDTAESDRKGHITHQGPWRVRWILCQAVWTIVRTNPEEAECYDRIVRKNPQHKKIAVVACMRRLAVCLWHVGKRVQREQGVFGRALAAVSS

SEQ ID NO: 120396 - protein, 442 aa, unidentified
MPKSEVSQQAQEPEFAAFVGIDWADQKHAWCLQAVGSTQRESGELEHKVETVEAWVTQLCQRFGGDRPVAVALEQTKGALLYMLAKYECLHLFPVPSTMAASMRKALYPSGAKDDPTDSDLLLDLLLLHRDKLHRLTPDTEATRRVQNLVEERRKLVDEKTAQLNRLTSNLKIYFPQMLEWFEALDTELVCDLLEHWPTLEELQKVSSEDLRRFFHQHHCRNRELMERRLQGIGQARPAIQDRPVIEAKRVVVRVTVQLIRSLRAGIAELDGKIAEATATHPDFFLFASLPGAGEVMAPRLLAAFGSQRDRYSSADEMQIYSGIAPVLERSGKTKWVHFRRACPKFLRQSFHEWAGHSMVKSAWAQAYYRQRRKQGQGHHAAVRALAFKWIRILFRCWKDRVAYDEKKYLAALAKRGSPLRELLVASAVRTCEIPSEIVVNP

SEQ ID NO: 120397 - protein, 337 aa, unidentified
MEQQTQYVGIDLHRRRSVIVRRTDAGETLDTVRIDNDPVALAQELAKAGEHPEVILEACYGWYWAADVIQECGGNLHLAHPAGNNWGNRRVKNDERDATDLVDLLRLGRLAEAWVAPPAQRELRELVRYRAKLVHLRTSLKAQVHAVLAKEGVPVPMSDLFGVAGRHLLDDVALGDAYRLRVNSLRDLLGHVDREIALVENQVAPIFAGDLGFHAVQAIPGVGPVLAAVFVAEIGDVSRFTSARHLCSWAGLTPKHKESDVVVRRGHITKQGSRLVRWAAVEAVARQSTDSPIRRHHRQVGERRGTKIGRVAAARKLLIYVYYGLRDGQIRCLAQAE

SEQ ID NO: 120398 - protein, 310 aa, unidentified
MSISCLYVGIDISKDHLDIFDPHHGLLRVANNATAVAAWASTPNVKGRFVIFEATGSYDRVLRQHLEAVGIPFSRVNPERARDFARATGRRAKTDPVDAKMLSELGRRFAPDADDAVDLQREALALWHKRRDQLVAMRAQESVRHSESLDLELAAAIARHIAWLNQEIADLEAQIKASIQSNPELREIQNRLRSVPGVGLVTSTTLIALMPELGQRSPGSIAALAGLAPFNNDSGKRSGQRSIQGGRRRVRRALYMAALGASRSKTRLGAFYKNLRGQNRPAKVVLVALARKILVILNAIMRDKTNFVTA

SEQ ID NO: 120399 - protein, 344 aa, unidentified
MKEASIIGVDLAKHVFQLHGATAEGEVVFRKKLSRKQFVAFMRVQPGCCVAMEACATAHHWARTLMGLGHEVRLIAPKFVKPYVKNRKNDMADAEAITEAASRPTMRFVEVKTPEQQGLGMIFRLRDLLVGQRTQTINALRGHLAEFGLVTGKGRENVDPLRSALERDEEATDLPVAVHHMAQICFAQIDDLSRRIAELEAEIAAASRRSRFSARLQTMPGVGPVISMALAAFAPPMESFRRGRDFPAWLGLVSRQHSSGSKQRLGRTSKSGQRDIRRLLIIGAMAVISGAKARPRAENSWLGRILARKPRMLAAIAPANKMARMLWAMITKDDEFRGGPLLAH

SEQ ID NO: 120400 - protein, 408 aa, unidentified
MNAVGIDVSKGKSMVAALRPMGEVALLPQEFLHTGVGLEQMAYAILALGEDTRVVMEATGRYHEPVAAALHEYGIYVCVLNPLYIKQSGGGSIRKVKTDKADAMKIAKYGLDNWVDLREYTPMDTVRQQLKLCSRQYNLYMKTVVSLQNNLISLTDKTFPGVNELFSSPERADGHQKWVDFVMTFWHCDCICRVSEKAFTEHYQKWCKRKGYHFSEEKALDIYAGSCGHFTTLPKNDNTKLLITTAAQQLLAGKTTLAALRAEMTRLASQLPEYETVRAMYGVGETTAAQLMAEIGDVRRFPRRSSVVGFAGVDPAVDQSGKHETQSTSTTKRGSPHLRKTLYQIVCTYLRKAPADEPVYQFLDKKRAEGKPYFVYMTAAQNKFLRIYYARVKECLEAFDAQQGTSQG

SEQ ID NO: 120401 - protein, 374 aa, unidentified
MLSARPAGACRPPPDRQKELAITTIAHPERPRVTVGVDTHLDVHVAHAKDQLGRRMATVSIPTTPVGYQDLLAWARGLGEVQAWGVEGTGCYGAALTRFLGDQGQVVLEVNRPDRQARRRHGKSDPVDAEAAARSVQAGEVTTLPKAGNATVEMIRSLRVARQTAIKARTQAINALKALLVTAPAELREQLRGRSAAMLVRQAAALEAGPLDTPTAAAKLALRCLACRYQALHAEVATLDTELARLVAKAAPGLVARFGVGPDSAGALLVAAGDNPGRLRSDACFSMLCGSSPVEASSGKTRRHRLNRGGDRQANAALYRIVVVRLRWHQPTKDYMARRLKEGKTTKEIIRCLKRYAARELFTVLNQTVPTPAT

SEQ ID NO: 120402 - protein, 346 aa, unidentified
MEHYAGIDVSLELSSVCVVDAQGKIVKEAKVASEPEAVVAFFEALGFAVKRIGLEAGPLSQWLHAGLKEAGFETVLLETRHVKAALSAMTVKTDRKDARGLAQLLRMGWFQQVHAKSMASQEVRALLVGRKQLLGRLIDVELSIRGILRGFGLKVGAVTRKGFEARIRELVTGQATLERIAEAMLSARAALKAEYEKLHKAVLAIVREDAVCRRLMTVPSVGPLVAITYKSAMDDPSRIAKSKAAGALFGLTPKKYQSGEKDVTGGITRTGDEMVRTALYEAANVLLSRITRFSKLKRWGMDVAKRRGSKRAKVALARKIAVILHRMWIDGTTYRWAEAKPIAAQA

SEQ ID NO: 120403 - protein, 411 aa, unidentified
MNKIFCGIDWAEGHHDIALVDQDGTQVAKLRISDDSAGFHALIELLTQHGDSAEDPIPVAIETPRGLLVAGLRATGRQIYAINPLAAARYRDRGSVSRAKSDAADARVLANILRTDRHAHRPLPDDSEAGQAVAVLARAHQDAIWDRQQMINRLRSHLREYYPAALAAFHGAGKPGLDSPRARVILTAAPTPADAARLTRSQLRALLKRGERPRCGIEAEVERLRAIFRADYLRQLPQVEKALGHQTVALVRQVDAACLSVTQLAAATEEAFLAHPDADIITSFPGLSVLSGARVLAEIGDDHERFADARAMKAYAGAAPVTRASGRSHVVVARTVKNQRLASAGHMWAFAALRTQAPRAHYDRRRAGGERHTAALRNLFNKLLGCLYHCLQNRMPYDPERAFAAPVALAA

SEQ ID NO: 120404 - protein, 377 aa, unidentified
MSKVLFVGLDVHAETIAVAVAEPGGEVRSLGTISNRVESIRKMIHKLGPVQQLKVCYEAGPTGYVLYWQLTQLGVACEVIAPSLVPTKAGDRVKTDRRDAEKLARCHRAGELTAVWVPNAAQEALRDLVRAREAAKRDQLKARHRLGKFLLRHGRQRPEGVKAWTKKHREWIKSHVRFEEAALEATLADYVDEVDHVAERIVKLEKAIDEAIQQAPTQIRAVIEALQALRGVAQTTAASIVSELGSLSRFATAPQLMGYSGLVASEHTSGNRVQRGGLTKTGNGHLRRVVVEAAWAYQHRPNVIGHLLRRQKNLAISDEVKDIAWKAQQRLHKRYKAMSARGKNKNQIVAALGRELLGFIWAIGVKTEQQQRPAKAA

SEQ ID NO: 120405 - protein, 453 aa, unidentified
MPRPTTGGHPDLKMVNPDAAAIDIGSTMHMAAVNPSSCDMSVRAFGTFTQDLHDLADWFRSCGVTSVAMESTGVYWIPAFEILEARGFEVILVNARYAKNVPGRKTDVSDAGWLRQLHSYGLLRGSFRPEAEIATLRAYMRQRERLTEYAAAHIQHMQKALMELNLQLHHVVSDITGATGMKIIRAIVAGERDPEVLAAYRDVRCKSSPETIRAALVGNDRAEHVFALAQSLDLYDFYKAKIKECDQRLEAAVAALSVKGGDDRPPLPKARIKGRQVNAPAFDVRAALYGVLGTDLTQIHGLGPSLALKLVAECGTDLRAWKTAKHFTSWLCLAPGNKISGGKLLSSKTRRSSSRAAALLRLAATTIGRSDTALGAFYRRLSARIGKQKAVTATARKIAVLFYNSIRHGMTYQDQGAAAYDERHRQRVLANLQRRAKTLGYALAPVSPEPAVS

SEQ ID NO: 120406 - protein, 400 aa, unidentified
MDGRQRFRWFLGIDVSKETFDACCLPNQGEKVFNLSASMDRKGFEELIKQLSALSMVQESVLVGVESTACYHINLYSFLVSLGYPVVVINPLLISNFVKLQLRKTKTDKKDASVIAQFLLLNRDSLSQTLFSSEISDLRDLSRQRESLVDQMSSTKSEIKRLLSMTFPELEHISGIFTKSMLRLLCQYPSAVSMKQAKRSRIAKILIPGSYGKQTNASVDRILKAAQISIGTSSPTKEIILKQKASLLTQLEEHLQELTDILIELCQGKIQGEMDILTSMKGIGEKSAANFLVEMGGDMKQFGNHKKVIAMAGLDPALYQSGKIDRKGKISKRGNRHLRRVIWLMTTKVIQFNERFKQYYLRRIKEGLPYKKAVLATAHKLIRVIFAMLRNKTLFDARMN

SEQ ID NO: 120407 - protein, 346 aa, unidentified
MTIVEAARGITGGIDTHGEVHVAAALNEVGGLLGTESFDATPDGYAALLSWLAGFGQVGKVGVEGTGSYGAGLARFLARAGVQVIEVDRHNRQARRRQGKSDPIDAVEAARAALSGRARGKAKSRDGSVEAIRVLVVAKRSARQARVKALTQMRQLTFTAPDQLQCRIKGLAAPQFIAAGKGLRPTRSSDPVTAATKAALSSLAHRIGELDDEVAQLDVRITPLLETHAPELLAVYGVGIDTAATLLVTAGDNPERLRSEAAWAHLCGVSPLQASSGKVTRHRLNRGGDRQANRALWIIVISRLASDPETQAYMERRVKDGRTKREVIRMLKRYVAREVYRQLPRG

SEQ ID NO: 120408 - protein, 603 aa, unidentified
MSVMTATAPQRTGSPSPRIGVGIDTSRYGHYAAFLRHDLHPAADELPFAESAQGYGQLRQRLEQLAQRHPDASFAIRLDVAGQYADNLLHFLHQLANPDQTTSATLARRTLTISCGDPQRNKNYRAAHFGAKKSDAVEARAAARFAVNERPAPTPVLSPALRALRQVASRLQAVVRQRTRLINQLHQLLAVSFPELALLIKDIALGWVLELVHRYPTAKLIADASRDDLGSIPYLPHDRITDLLERARTSIASLSSATIEELVRDQVRQLRDVKARQQRLEGLLVTAYRELPKANHLDTIPGIGEVTAAVLSAFILDIERFATPNKLVAYFGALPIEMSSGIDRQGQPRSARRYVMSNRGNDLVRRYLWMAALSAVQCNPAVRALYRRVVAKHPEHKAIAIGHAMRKLLHLVFALWKSDRPFDPNHHPWAGPGGPSENDNEMSMEAGVGRTAAGANAGKGQAAGHKPESKPAEKVVTAACGGTVAAAADIGEGTFIDFAHLKSQLSMAQVLDQLGLSSRLRGGGAQRRCACPIHRGDGRGRTFSVNLQENVFCCFDSGCGKQGDVIDLWAEVKKMSLREAAMELVRTFNLEAAPAKATEKRDG

SEQ ID NO: 120409 - protein, 424 aa, unidentified
MSCLPALAGVCPTHHQVRRDTIILTESTLIVAGADTHADTIHVAAITMTGAAIGDREFPTTRTGYAAAIRFLTSLGQLERIGIEGTASYGAGFTRAVTAAGLEVVEVTRAVKSTRRLKGKSDPLDAYSAARTALAGDGLATPKDDATAGLRALHVARRSAVKHRTAVINQLKAMLVSAPDAVREKYRGLTTLRLIEAIARCRPEAQNERWAQSVLTAAKMLAQRVQFLEAQTETLQAQIDALVTEANPGLRAAYGVGADTAAQLLITAGANPHRLHSEAAFAALCGVAPVPASSGKTTRHRLSRSGDRAANNALHRIALVRMSHHQPTKDYAQRQLLNGHSRSKMEILRKLKRAIAREVFKLLTRQIDVPEYGDLRLARQAKNITLTAVANHFGVWPAVISRIERGRQRDDAFADTYRNWLKAA

SEQ ID NO: 120410 - protein, 356 aa, unidentified
MSIVAHVHPYVVGVDTHARHHVYSVLVSSTGELLGSQKFPTTEAGLKRAMRWVVHRTRSHVEALWVIEGTSSYGAVLTGMVLASDFSVAEAPRVDSQHRAGVGKTDELDSARIARAALGLPVDKLRRPRLGKGIRQAIRILVASRELLAGERTRKVNALTALVRGNPLGIDARSSLSRTQIEQIASWRMRGEDIELRVARTEAKRLAHQILELDCELGANERDLAGLVQISEAAPLLQETGFGAVSAAKCLAAWSHYGRIRTEAEFASLAGVNPIPASSGNTVRHRLNRGGDRKLNSALHMVAIVKMTHDEETRKYVARRREEGKTDREIRRCLKRYIARRVYRTLNAQHELSITA

SEQ ID NO: 120411 - protein, 457 aa, unidentified
MRKKSKRTKGVEEARPFAGMSRVNQDAAGVDIGAMEIVACVAGDENTQIVKAFGNYTVDLQNIGKWLKEHKVKTVAMESTGVYWIPLFEELERQGFECLLISSRSLRRVPGRKSDVIDAQWIQTLHNYGLLESSFRPEGELAALRSLLRHRAQLLEHRAPHVLHMQKALLQMNVQLSQALSDVTGETGQAIIRAIVGGERDPQKLAELRNRQCKKSKEEIGRALTGTWRAEHLFVLKQSLELYDFYTKQVETCDREIERMYALTRPDWEAGEVKPLPPKKKQSHSKNAPENKEEIRQHLKRICGVDLSVVDGFGVSLAQTVITEVGTDMSKFPSEKHFCSWLGLAPKHEISGGKVLKNKTLKTKNRAGQAFRMAAQSVKNADCVFGSRYRRLRARLDNRQATVATAHAIARVVYRMLKHQVEYEELSVEEYEQEYKSQQVKYLKKKAQKFGFQLVPA

SEQ ID NO: 120412 - protein, 408 aa, unidentified
MGRSIGLDVHRDFCEIAVADGGRARSAGRVVTTPQELELFAASLVSDDRVVLEATGNALAIARLIEPHVAEVVLANARQLKAISHARVKTDKVDARVLADLLAADLIPRVWAGDERVRMLRRLVARRRGLVKRRTQVKNEISAVLHRNLKGRAPMSDLFGRKGRAWLAAQELPVDERLTVDAGLRQLDFLGEELVEIDRLVAVEARGDGDVRRLLTIPGVDVTTAVTLVAAIGDVRRFPTARHLVGYLGLHPRVRQSGSGPARHGRLSKEGPAAARHVLVEAAWTASRSPGPLHAFAARVAARRGRQVAAVAVARKLSVLCWCLLTRGEDYAFARPSMVRRKLRRLELAAGAPHRKSGPQPDPVWNRDADERERRLAEQAERAYERLVADRTATRARAGAGATPGRAS

SEQ ID NO: 120413 - protein, 338 aa, unidentified
MTIETLGIDVAKNVFQLHGVNRSGRVVLRRRVMRDQLIEVVARIDRCTVVVEACTGAFYWARKFEALGHQVKIISPQYVKPFVRRQKNDGNDAEAICIAARQSHIPFVPKKSVEQQDIQALHRARQRMVNHRTAVVSQIRGLLLDHGFAIAKSITRARRLIPDILANFDNELTPMARDAIGELYDLCRDLDRRIASFDKKVEAVFRDSEVCQRIARIKGVGPKTATAIIAAVGDGAEFKNSCHLAAWVGLVPRQFSSGDRKVLMGISKRGNQHLRSLLVHGARAVVRTAPNKTDPNNQWVNQLRERRGFNRATVAVANKNARIIWAVLRTGEPYRAAF

SEQ ID NO: 120414 - protein, 346 aa, unidentified
MEHYAGIDVSLEFSSVCVVDAQGKIVRETKVASEPEALVAFFASLGFAMKRIGLEAGPLSQWLHAGLKRAGFDILLLETRHVKAALSAMMVKTDRKDARGLAQLIRMGWFRLVHAKSMCSREVRALLVARKQLLGRLIDVELSIRGILRGFGLKVGVVTRKSFEGRIRELVTGHITLERIAGAMLSARATLKLEYEKLHKIVLAIVREDAVCRRLMTVPSVGPLVAITYKSAMDDPNRIAKSKAAGALFGLTPKKYQSGEKDVTGGITRAGDEMVRTALYEAANVLLARITRFSKLKRWGMDVAKRRGSKRAKVALARKIAVILHRIWVDGTTYRWTDARLTAPQV

SEQ ID NO: 120415 - protein, 407 aa, unidentified
MAVVFLGVDWAEEHHDVCLLDEQGKVLGRARVANSLEGVSRIHALVADYADEPGTVVVGIETDRGLLVQALVAAGYQLYAINPLAVDRYRDRHSVSGAKSDAGDAKVLADLVRTDRNNHRQVAGDSEEVEAIKLLARAHQSLVHSRQRQVNQLRSTLREFYPAALEAFKDDLGGRDAMAILEYAPTPTSGRSVSQAKLISALRKAGRERNLEARAVELQGMLRQPHLEQPATLVAAYAVIVKSCIQMIRELNAQTKALEDELTKSFELHPDAALYLSLPGLGFVLGARVIGEFGDDPNRYLDAKGRRAYSGMAPITKSSGIRHVVLARYARNRQLADACYLWAFSSLTGSAGAHQYYRVLRARGKSHHQALRALGNRWVSILHGCLRHGTLYSEAVAWTTPATAIAA

SEQ ID NO: 120416 - protein, 366 aa, unidentified
MGWAPPFGGAIVPRLAREAHQKEEAVSNARTIGLDLAKHVFQAHGADEAGEVVFRKRLRRDKVLEFFASQPRCLVAMEACGGAHHWAREIGKLGHEVRLIPASYVKPFVKRQKNDMADAEAICEAAQRPTMRFVAVKSEEQQASAVVFRARDILVRQRTQLINAVRGHLAEYGTVVAQGPSHMAKLISHVDDPSSGLPDAARLTLGILIEVLRSLDDRIRRLDAEIARRAKEDEVARRLTTVPGIGPVTATALAALAPAAETFRKGRDFAAWMGLTPLQRSTGGKQKLGRTSKMGERTLRRLLIIGASSVVQQATRRGAPSGSWLAQMLARKPRILVIVALANKMARTVWALLAKGEIYRAPIVAA

SEQ ID NO: 120417 - protein, 376 aa, unidentified
MATMLRPAFRSWLGKPNQENPKMNVPHYIGFDIHKKSVQYCVKTADGAIVREGRLSAERAVLVQWALTLTEPWQGAMEATLFSGWVYDTLKPYAAQLNMAHPLMMKAIGASKKKSDRIDARKIADMVRCNWLPVCYVAPAEMRELRRLLRYRNLVVRQAVRMKNKIAGLLMEVGEPYNKRRLHGKKYFDELLGNLEETPESVKHLLRLSRGVLVLFESIQMQLLQRLREEPKLRERVRRLQSIGGVGEVMALVWALEIVDPHRFSSIGQAQSYCGLTAALKSSANKEQRGPISKQRNAHLQTTLIEIAKLAPRWNPQLAAVHARELERGHRNRATLAVARKLVAYLLAVDKSGQPFQVRGEAGAEAGTEAETKAAA

SEQ ID NO: 120418 - protein, 421 aa, unidentified
MKPEKVDYAAWIGIDWGSEHHAVCLQAAGSSRLEACSLEQKPELLHAWFLNLVARFGRGAKIAVAIEQSKGAVINFLLGLDFVHIFRVHPLSLKNYRKALYPSGAKDDPVDAELILQFVRQHQDTIQPWVPDDVDSRLLLRLVEGRRKTVNKRVRLTNELTQLLREYFPQALDWAGELDKVMACDFLRKWPTLQKLQKSKGETVRQFYRDHGSRNGELIDQRIEKISSALPLTTDKAIVESSVLMVDTIVLQLHTMIEAIARFDQKIAMVYKRQPDADIFASFPGAGPVLEPRLLAAMGTDRNRFSCAQEVAEYSGIAPVTERSGKKEWIHRRLACCRFIKQSFHEYAGQTVTYCVWAGAYYKSKRAAGMAHHAALRALAYKWIRILYRCWKDHVAYDEQKYMQSLKRRRPAWLAFLPAGA

SEQ ID NO: 120419 - protein, 372 aa, unidentified
MVANFTFDEYAVQCVGIDISMDKFTACLFTYNTASDLGWWTDVIEFRNNKTGFNQLVRWSRKNANKEYPIRYLMEPTSTFHEPLAYHLNAIGCTVFLIFPAKAKEFAKYEGIRSKTDEIDARTLSTIGCTNRKLKPWTPPKPIFRKLKQMCRFNNRMERMRTELTNQQSALKSGANAEVSLMNRYKALLNELDKQVENNKKLIKKTVESDSDLKERVARITTIKGVGYLTAVAIIAETDGFSLIGNRRQLASFAGLDVIAYKSGTIDTNHRISKKGSSYIRAALYWPSIAASMHNPQMKVLYNRIASKNTRTKMIAITAVMRKLLLLIFTLWKSGEEYDSKRSVSCTDVVTLSLDQMYKDEPGATLKESALV

SEQ ID NO: 120420 - protein, 323 aa, unidentified
MNKYNEIFGVDISKDVFDVYGSKSGHNQFKNAASGFMFFLKNLPKKSLVVMEATGYYHYSLAQFLFKQGVLVSVVNPLSVKRFIQMKLAKVKTDKSDAKAICEYGQINQVPLYSALSDVQSECLQLFRLLDSYLKKRTMTKNKLHGEDVLGIPSKHVYRSLKRNRKHLDTEIASIETKLLSLVKQDQQAQLTLLKSIPGLGVKTALFLIVITDGFTKFETAAQLCSYVGITPTIRQSGSSVRGRSRISKVGNKKLRNLLFLCSFSACKHNKSCREIYERIVNKGKSKKLALIAVSNKLLKQAFAIAKSGNPYDETFVSVLMAK

SEQ ID NO: 120421 - protein, 330 aa, unidentified
MQGKVMSEHSASYEVGVGIDVCKEWLDIHILPAGTVLRFSNTKRGHKQLLCALKPFGVRIVVVEATGKYHRGVHRFLHDAGLSIAVVNPLRARLFAESLGALAKTDSVDARMLAAFGLMAELAATPPLPEAIENLCEIVRNREAAIAAETALENQLATAAVADVKHQIERQIRSAKAAAGVLEALAIRTIKADPGLSRRFAILLSIPGVGAVTACGLIANMPELGSLGAKQAGLLAGLAPVACDSGKRNGPRRIRGGRQAVRNGVYMAALSAARFNPHLKRFYERLLAAGKVKKIALTAVMRKLIVLANSLIKEDRLWSPDCPTAEPLHA

SEQ ID NO: 120422 - protein, 373 aa, unidentified
MGKHRLAFVAYDSAKEKHAVAIADDGRDGEVRYLGEIDNSPDAVSKLVAKLSRQYERLHFCYEAGPTGYGLHRQLTDLGHLCDVVAPTMIPKRSGDRVKTNRRDSVTLVKLLRAGELRAIWVPDTVHEAVRDLTRAREVAMLDLKKKRQQLLSFLLRHGRIFPGGKNWTKMHERWLAKQTFNHPAQQIVFQDHVEVINAAQVRLAALEQQLREIVPTWTMAPVMAAYQALRGVSFLVAVTFVAEVGDVRRFATPQQLMAFLGLVPSERTTGDTVRRGSITKTGNHRARRVLIEGAWTYRFSARVGETLRGRLKDLPLSIRSIAWKAQVRLCARYRRLIANGKKTPVATTAIARELAAFLWAIGQQVAPLNPAA

SEQ ID NO: 120423 - protein, 320 aa, unidentified
MMAQNDRVVVGIDVAKDKVDACIRTLSQLRTFESTAEGRRQLVAWLRRHKVGKAAMEASGGYERDWAKALREAGLEVRIVDPKRVRSFARSAGRLAKNDAIDAEMIAWFAETFGEAPAQAYDAARDKLVQIVNARQALLDVQTELQNRGEHAAPEVVRKMQARLLKKIALEVAKLEAAIAAMIKTTAHFTELSEIIESVPGLGRGTSAGLIAAMPELGQVSNKAAAALLGVAPYDDDSGKRRGERQIKGGRRKVRNLFYMACLGAATQHNPVLKAFYRRLIAKGKEKKVALVACMRKLIVILNIMIARGEKWDASRYAVS

SEQ ID NO: 120424 - protein, 366 aa, unidentified
MFEKNGPTVTRSEILCQRARIRGFPVHVTAPAETQTMFLGIDLHDHEAQVAVVDDDGNLQTEIRLPTDRLDELAEEYAGSEAAIEASSNYRAAYEMLDEHLDVTVANPSKNRLIADATVKTDRLDAKRLAHLLHAGMLAESYVPEDEIRELRDLVRARKSLVEERTAEKNRVRAVLKRTNNTYDSELFGPTGREFLAELSLSDPDQTIIEAHLAVINELDEQIEVLEEKIERRVLESPAAQLLLTIPGVGQTTAAVVVAEVGEIDRFETDKEVVSYAGLDPEVYQSGETELHGSISKKGPGALRWALVQAARIAVRCEKYFGNFYTRLKRKKNDQIAIVATARKMLVSMFYMLKRNEPFDPPEVST

SEQ ID NO: 120425 - protein, 402 aa, unidentified
MSKTDVKACVRTPGARRNQRRTEVRTFSTMTNPLLAMRDWLIAEQVTLVVMEATGDYWRSPYYLLEDALNVVLINAKQAKALPGRKTDVADSVWLAQLAECGLLRASFVPPEPIRELRDLTRYRTVLTAERTREAARLEKELEDAGIKLSVVATDILGVSGRAMLESLIGGERDSEVLADLARGRMRPKIPDLVQAMIGRFGEHHAFLCRMHLDRIDALTRDIATLSTRIDALMAPFRDVLRRLDTIPGINQTVAEVIIAETGADMSRFPTPAHLASWAGVCPGNHESGGRRKSGKTRKGDHWLTGSLGVAVLAAGRGTDTYLAAQYARLIRRLGNKQKAIVAVEHSMLTAVWHMLSDGTDYHDLGGDYYLRRDPHRERRRAINVLNKLRYTVTLTPIQTTA

SEQ ID NO: 120426 - protein, 341 aa, unidentified
MDEVSTVGIDLAKSVFQVHGADRSGAVVLRKKLRRDQVLSFFSTLPRCVVAMEACASAHHWAREIAALGHDTRLIPPAYVKPFVKRQKNDMADAEAICEAAQRPTMRFVQGKSAEAQASAVVFRTRDLLVRQRTQLINALRGHLTEFGYIVRQGVGHVGKLVDIVRDPASDIPPQARPILMVIAQGLDALQAQIAVLDREIASRAKADPVAKRLMTIPGVGPVIATALVALAPAASTFRRGRDFAAWLGLVPRQHSSGGKERLGRTTKMGERSLRRLLIIGASSVTKAAARDPDKVGAWLASMLARKPRMLVTVAMANKMARTVWALMAHGGTYRAPAAAM

SEQ ID NO: 120427 - protein, 388 aa, unidentified
MPQQRKPNDLSRSLIALDMDTTLIAVVELSLASWLVAGIVPGVERQPLKKLKTDENALLALLNRWRDEAVRSRHKISRIAVAFEAGRDGFWLARWLKARGIEAHVIHASSVAVSREHRRAKTDRLDTELLKRAFVGWLRGERDHCKMASIPNLREEDAKRPSRERESLVGEQSRLVNRMKATLIRLGIRGFNPKLKHAEQRLETLRTPEGEPMPPNTLAELKRDMQRRRFICEQIRRIEQERLERLERTPDTEPHAMVRLLARVTGIGIETADLLVHELLLRNMRDRRAVARYGGLTGSPDRSGGTNREKGMARSGNARVRRGMIQLAWRFLLFQKNSALAQWYRRRTEHAPKARKTMIVALARKLLIALWRLVREGVVPEGVAMRPA

SEQ ID NO: 120428 - protein, 370 aa, unidentified
MAEYREGFVAFDVAKAKHSVAIAASGRGGEVRFLGEIENTPAAVERIIKKLAGRYDRLRVCFEAGPTGYGLYRQIQELGHDCMVVAPALIPQRPGERVKTNRRDALMLARLHRAGELSRVWVPDATHEAIRDLVRAREAVAEDLRRKRQQLLSFLLRHGRIYTAGRGHWTQAHRRWLARQGFEHAAQQIVFQEGVDAIEDASQKLHRFDDQLARLVPCWSMAPMVDAYQAMRGASFLIAVTFAAEIGDVRRFETPRQLMAFLGLVPGERSTGKTVRRTGLTLAGNRRARRALIEAAWTYRFPARVSETLRARLEGLPKAVRDIAWKAQARLCARYRRLSAAGKKLPVVVAAIAREIAAFLWAIGREVVPV

SEQ ID NO: 120429 - protein, 358 aa, unidentified
MDGSSEQPQMTVGLDIGDKYSYLCLIDTESGEVIEEGRLRTTPEAFRRRFASEQPLRIAIEAGTHSPWVSRLLEGCTHEVLVANARKLRLIYANKRKTDEIDAENLARLARLDPKLLYPLSHRGEGSQAHLALIRSRVALVSCRTQLVNHVRGTVKSFGARLPKCPARSFHKRASEHIPEALRPALGPILEQIGSLTERIKDYDRKLEAICQEYYPETDLLRQVEGIGPLTALTFVLTVEDPYRFEKSRSVGAYLGLVPATDRSGERDPQKRISKEGDQMLRRLLVGSAHYVLGPFGSDSDLRRHGEKIASRGAKNAKKRAAVAVARKLSVLLHRLWVSGEVYDPLYNAHRRQSKEAA

SEQ ID NO: 120430 - protein, 395 aa, unidentified
MFIVGIDIAKRSHEAIIIAEDGQVVRKAFSFRNNCTGYNLLLEQVRRLTLVKSQIVFAMESTAHYWLALYARLLKDGYAVMVLNPIQSHSLRELYIRKAKTDARDSLIIADLVRFGRCKASNVPQDKILALRELCRSRAYLVDMAADLKRKLIALLDRIFPEYESLFESVFSKASIAVLSKYSTPQKVKNANLRKLTDILMESSNGHFGEWKAHQLKEAACSSFGIDDSGGVYSMLLGMFLEQILSLTAQADSLEKQISVFFQEFNNPLTSIPGVGTVLAATILSEIGDITRFSSADKLLAYAGLDPSVKQSGEFKSNQNRMSKRGSPYLRRAIWLASTVAVHRDPMFQTYYEKKISEGLHYMNVIGHVSRKMTAVIFAVLRDGQPYQPILQSAG

SEQ ID NO: 120431 - protein, 336 aa, unidentified
MRYIGIDLHTTQLTVCYLKTGEDYQFKKYRLDEVEQFLAELVETDEAAVEATGNTRWLVNLVKEKVGRVCIVNPREFEVIKQSVKKTDKADALSLARFLAVDMLPEVRAKSERAETVQRINETRTKFVRLKTSLLNKIHSLAVSKGRKLKKESLGSERDLEKVLAQEWTASERVELEIIIEQIRSLKAGIRKLENALEEQSKQMSGFENLITVSGIGARSAGVLLSVIGEVEDFPDENKLASYFGIVPKVANSNQKVSHGRITKRGSKTGRTTLVQCTLVAIRHNPYLKKYYEQVKARRGHGKAKIATARKYLGIIYNTLKNKWVFEDFNNFVLAE

SEQ ID NO: 120432 - protein, 346 aa, unidentified
MEYIALDVHKKYTWARVENTHGERLYESRLAHAHGTIKNFVHRWSEGSPVAVETVGNWYWVVDDIEAGGGKPQLVNARLAKVMMGMVNKSDKLDARGMNRLQRTGTLPTVWIPSSSVRDARELPRTRMVLSEQRTQLKNRVHATLAKYGYVVEGVSDAFGKRGRQIVMELSSELPPHTQQALQRVLDQLDYVGKNLKAIEAEMIKVFAPCPQTTWLKTLPGVGEILAVVIWTEIGSIERFSRAEQLASYCGLVPREHSSGGKFYYGSVRRDVNVYLKWAFVEAANSSILNRERCGYDHISRLYQRIRAHRGHNKAKVAVARHLSEASFWMLKKAEPYREPVSSTQR

SEQ ID NO: 120433 - protein, 429 aa, unidentified
MNCTQNKKIEQVKETTMIVGIDVGSEKHYFRAFNWRGIELTRKPIAFSNSMEGFNSFYNTIVELMQKSELEEALVGIEPTGHYWFALGQFMGEKDIKFVMVNPHHVHKTKELDDNSPSKNDRKDPRVIAGLVRDGRYFYSYMPTGAYAELRNASNRRFVLVEEQTRAKNRLQKWIAVYFPEYKGIYTHIDAKGGMLVLKKAPTPEEIVRLGVEGIIKIWKDAKLRGNGHKKAMLILAAAMRSIGLKAGLTEARMEIQDLIEDYELQTKRLERVNDLIKGLCQQVRYADKLLEIKGIGITTVAGFIAEVGDITRFDSTKELQKLAGLELVADSSGKHNGKTKISKRGRKRLRYLLFEAAISVVGKNEEFKEIHRYYTTREKNPLKKMQSLIAVACKLIRVFHAILTKGIRYDASKMLKDIRHPGEQLKAA

SEQ ID NO: 120434 - protein, 412 aa, unidentified
MDVYCGIDWAEDHHDISVVDRDGQLLARRRISDDAAGLAALLGLLAEHGDNPGDLIPVAIETPRGLLTACLRATGRKVYPINPMSVARYRDRHSVAGRKSDHGDSFVLANVLRTDMHAHRPLPADTELAQAIAVLARAQQDAVWDRTTAHNKLRSCLREYFPGFLAAFADARGGITRPEARIILAAAPTPADAATLTLTQLRGLLKKAGRIRGLDTEATRLRDAFRVPQMRQLPLVEDAMGRQALALLGQLDAACAAADGLEQAATQSFNLHPDAGIITSFPGLGALTGARVLAEIGDDRSRFADAKGLKAYAGAAPITRASGKTKSVTHRRVKNNRLNAAGYSWAFSALTASPGARAHYDRRRDDGDRHAAAQRNLFGRLLGCLHHCLTTGQRYGETIAFPAIGKELPQAA

SEQ ID NO: 120435 - protein, 359 aa, unidentified
MKNSNRGKSEVEKPAVTVGIDLGDRFSRYCVVDQAGEVVEEGRIATTAAALERHFAGQSRMRVAMECGTHSPWVSRLLRDWGHEVWVANTRKIRAITGSESKNDRNDAEKLARFAAHDPRLLSPIEHRSPERQRDLNLLQARDTLVRARTMLVNAVRGMAKSSGHRLPKCSTESFAKVARSAVPSGYELAMLPLVEQVGAVSEQIRTMDKQIAALAKRYPEVERLRSVPGVGPVVATAYVLTLDSPATVASSRAVGAFLGLRPRQAQSGERDPQRRISKTGNGFLRRLLVQAAQYTLGPFGPDTQLRRWGLKLASSGGKRGKKRAVVAVARKLAVLLHRLWRTGESYRPFPNAHQPLAA

SEQ ID NO: 120436 - protein, 404 aa, unidentified
MNADVLAGLDWATATHAVCIIDAAARVLERFTVAHDRDGLAELLRRLGRYGSRVRIAIERPSGLIVDALVEAGHQVFPIHPNAVAATRSRYRSHGAKSDASDAYLLADLLRTDGHRWAPLSPQSDSIRALRALVRARDDLVAARIALANQLRSTLETFWPGAGRIFAAVDSPIGLAFLRRYPCPAKAVGLTQSQLARFLRAQHYSGRRTSAQLLARLRAAALGRSGELTAATMADVVLAMLAVLEPLVEQLATLTRRIEHFVQSLPDGQLIMSFPRAGRVCAAQILAEMGDVRERYPSDDRLAAEAGVVPLTYESGKRRYVGFRWACNHRLRRAITTLADNSRHANLWARSIYTAARARGCDHPHAVRILARAWLRVIWRAWVDHKPYDPQLHLGALKASAQGG

SEQ ID NO: 120437 - protein, 317 aa, unidentified
MSKHSMICAGIDTGKRKLDVALDGRAERLQVDNNADGHKALSAWLRRHRTKRVGIEASGGYEQAVVAELRHDHFQVIVFQPAQVRAYAKFHLQRAKNDKIDAALIAACTAAAKKIHAPPDPRLAPFSEHLTMIEQITEDIARFKTRRESCRDPRIGRFWDEEVARLKRRLKIELEQLVAAIREYRDLAERLDLIASVDGVGERTALAILVRMPEIGTLSREQAAALAGLAPYDDDSGDQVGVRRIDGGRERLRKSLYAAALAASFRWNPQLGAMYRRLLAAGKAHKLALVACARKLLIFVNTVVARGTPWTKKTAAV

SEQ ID NO: 120438 - protein, 386 aa, unidentified
MQASTVDTPTAGHCGTIFVAIELSQKTWLVTLHSPDRDRISRRTLEGGDDAGLLALLEGVRTRVAGKLGTAPKVVTCYEAGYDGFWLHRLLTAAGITNLVFDPASIAVELRSRRAKTDRIDGELLLRTLMAHLRGEPRVVRIVRVPSVEQEDVRRASRERDRLVKEQTGHTNRIKALLRLMGMAVSNPRRSDWLSWLAQQRDRQSRPVPPHLMFEVAREHARLMLVREQLAALEQAPTAAVAAAPAPMAERRNLLLRLKGLGAVFAATLTNEVFYKDFHNRREVASYCGLTPSPWRSGGIDREQGISKAGNPRARLKAVELAWLWLRHQPESALTRWFRSRTHNNASKRNKRIAIVALARKLMVALWRYLTTGLVPEGAVLKAVKA

SEQ ID NO: 120439 - protein, 323 aa, unidentified
MSNYTGIDVSKSTIDCSISLADGSVRELKTGNNSEGFQKLLKILSAESHVVMESTGPYYFRLAYFLHDAGIPVSVVNPLVIRRFCQMRMVRAKTDRKDASMIRQYGESEHPGLWEPDLPDITKLKQLNAAIELLDKNITASHNQLEAFKIMPDTDKSLVKALESVIQQNEKAKDKLEKEMLLLAKKKFNKSYSALQTIPGIGPKSAALLVAITGNFTKFNHYKELVAYVGLNPRIYESGISVKGRGHISKMGTGKMRKLLYLCSWSAKRFNVHCKEMYERLKAKSKPEKVIKIALANKLLRQAFAIGKYGTEFKANYQNQFAF

SEQ ID NO: 120440 - protein, 412 aa, unidentified
MDVIVERPAALDVHKAQVTACTRVPGEHGERVQHLAEFKTTVRGLLALRDWLASHGVTQVAMEATGVYWQPVWHVLEDDFELLLVNARHVKQVPGRKTDVSDAEWLCRLAEAGLLRSSFVPPKPIRELRQLTRYRKAQISERQREANRLHKALEDSGIKLDCVATDILGKSGRAMLDALCSGTTDPAVLAEMAKGRMRTKLPELREALEGRFNELHALLIGSILAHLDFLDGQIEALSQAIEVKLAPFASAVELLRTVPVIEQRTAENVIAEIGVDMGQFPSDAHLASWAGQCPGNHESAGKRKSGKTRKGSKWLNEALKEAGMGAIRTNGSYLQALYRRKKSQLGHARALGAVKHSILCSIWHMLSTGELYNDLGADYHARRNPERQTKRLVSQLEALGHHVTLQAVQVAA

SEQ ID NO: 120441 - protein, 342 aa, unidentified
MQITTFGLDIAKNVFQVHGIDGNETVVVRKQLRRGKLIAFFESLAPCLVGIEACATAHHWARELTRLGHQVRLMPAKDVKAYVKRNKNDAADAAAICEAVRRPTMRFVRIKSTDQQCQLMQHRTRDLMMRQRTQLINALRAHLAELGIVAAMGDKGVTELLMIVADEDDGRLPVEARASLALLAAQLNALQMLIGSLEKQIKMQHRANPASQRLETIPGIGIIGATAIAATVADPTVFRSGRDFAAWIGLVPRQESSGGKHKLGSISKRGDRYLRRILVVGAHSVLRRAMEKPGKYPWLTQLMARRPFKVVAVALANKMARMAWALLTYGGTYRAPRLSIVP

SEQ ID NO: 120442 - protein, 405 aa, unidentified
MEVLYKRCCGIDIHKNMMVACIFTSVRKKEIRQFSTITEDILQLVSWLKETDCEMAAMESTGSYWKPVYNIFEEEQIPIMVVNAQHIKGVPGRKTDVKDAEWIADLVRHGLVKASYIPNRDQRELREITRYRQEVIEERARELNRIQAVLEGCNVKLSSVITDISGKSGMTILKAIVSGETDPVVLSELAEGRARDKIPEMQKSLQGRISEHQQKMLKHQLGHIESLTALIMDLDADIKKKTESINWAIEALDDIPGIGRKSAERILAETGVEMEHFQNESRFSSWAGLVPECKESAGKKMSTRIRKGNKYLKATLVECARAGIRNKQSYLYSRYQRIAARRGGKRALIAVAHTMLIAIYHILKEKVPYHDLGADYYSVINQEKIINRNIRTLEKLGVNVMIQPK

SEQ ID NO: 120443 - protein, 422 aa, unidentified
MNKAKKQKQEEKRCWVGLDWGGKGHAVSVVDDTRAVLGSFKTGAGLADLERLALRLRTYGTVAGIAIETTCHPVVNYLLAAGFPIYAINPKQSKNWRACNSVACSKNDERDGLVLAVELAQRHASLRPIEPLDPVVAELMGLCEKLRALVDERTALIQRLKATLGQYYPGVLGFFSDWTSPAAWRFVKRFPQPQTLAHAGKETLIRFLKANHIGIKPLWLARIEARGEVARWPRPADSIALEALALATIAQLLALQPHIERMDRLIAQHIPRVPHACLLDSLPGAGKRLAPALTAITALVTSDQADLQGLRGMSGVAPVEYTSGKRCRVQIRRRCNKHWRDIMHLFAHCSTVSSAWAKAFYDMHREQGDTHASALRKLADKWLKIINRMIQTGQPYDDQRYVEALRRSNSPVYLRLGEKTCG

SEQ ID NO: 120444 - protein, 416 aa, unidentified
MKSPTNQPFTAFIGIDWADRKHDVCVQPADCERREFLVIPHKVEMINDWVQSLIQRFGSPIAVAVELSKGPIVSALQKFDCFVIYPINPSTLAKYRQAFTPSRAKDDPTDAEFAVDLLLRHSGRFKPLQPQSIEIRALSSLVEQRRSLVNDKIRITNRLRSAFKQYYPQVLDWFDHIDTPLFCDFIRHWPTLTQVKRARKNTLETFFNQHNMRFAQLLADRVEAIKTATPLTSDDAIIIPYRLQALVLIEQLSVTLEGIKQFDQEIENIARKHSDYPLFSALPGAGPSLAPRLLVAFGEQRERYPSAADLQKYAGVAPVTERSGKKHWVHWRWQCPTFLRQTFTEWAAQTINKSFWAGQYYQQQRAKGCTYQAAVRALAFKWIRILYRCWQTGKPYNESTYLKALEHRGSPLLKQA

SEQ ID NO: 120445 - protein, 321 aa, unidentified
MTKDRKIYGIDISKDVFDVYCETTGHLQLKNDEKGFKSLLKTLPKTALVVMEATGYYHYRLAQFLHKNDVAVSVVNPLSVKRFIQMKLAKVKTDKSDAKAICEYGTKNELPLYNALTDVQSECLQLFRLLDNYLKKRTQTKNKKHGEEVLGIPSKYVYQSLKRDLKHLDKEIKGIEVRLLELVKQDQQQQLTLLKSIPGMGVKTALFLIVVTDGFKKFESASQLCSYVGITPTIRESGSSIRGRSRISKVGNKKLRNLLFLCAFSACKHNKACREIYERIVNKGKSKKLALIAVTNKLLKQAFAIAKSGLSYDENFVSKLA

SEQ ID NO: 120446 - protein, 404 aa, unidentified
MDTRPEIWVGIDVGKASHHACAVDETGKTVFSQKVGNDQAAIEALIARADQAGQLVRWAIDLTSPMALLLITVLLAADQAVTYVPGRVVNTMTHGFRGEAKTDAKDAKVIAETARMRRDLSQVTMPEELVVGLTQLTSYRTDLMSDWVAGINRLRALLGSIFPALEAAFDYTARTPLVLVAGMCTPAELRAAGIDGVTTYLVDNGGWRPVIGKTAVAAVDAAHRQSLALPGEADTAMLVKRVARKLLDLDREIKDTDKLITTRFRAHPWARIIESLPGMGPGLGAEFLVGTGGDLANFASSGRLASYAGLVPVPRDSGRVSGNLHRPKRYNRRLRRVFYMAALSSLRYENGPSRRFYDRKRSERQIHTQALLALARRLVDVLWALLRDGREFSAIRPTSVAAAA

SEQ ID NO: 120447 - protein, 429 aa, unidentified
MTRISVGVDVSKNRSTVCIIDQDGKVIMRPFLVWHSTEELDFLADTLKRLNGEVRVIMESTSIYQYPIALHLKEKGIFISIVNAYKVKKFANTDFRGGKTDKKDSRTIASYGISYWYKRVEWQIPKDTYFNLDLLNRTYMNAKKHRQIILQELQHYIDCAMPGMDKELHSLNLNTKKDFMLDFVEKFWHRDEIVNMTEAEFTEVFTAWAKKKGYRPVEGKAAKIYAIAKSCIPYYPANPTVKTILQCIVDKLSGVNRTLVTIVTQMIEEAKKLPEYQIVREMPGVGDPLAARFFGSVGDIRRFKNSKALVAYAGIDSPPDESGDFSSTHRHITKKGSKVFRDTGYEIMMALRAQKRTWEKVRKNPDVYDYMLRKEAEGKPPKVAKIAALNKFLRIIYARIKELYDNMALAERAKAKTRSKTKAKTKATA

SEQ ID NO: 120448 - protein, 342 aa, unidentified
MNIPVRIGMDTSKSVFQLHGVDENEVVVVRRQFRRAEMIRYFERLPPVLVAIESCGSSHHWGRLLQSFGHEVKLIPPQYVKAYVKRGKNDAADAEALCEAVTRPSMRFVPVKSKERQAACMLMTVRERLVSVNSQLSNAFRSYAAEFGIVGPAGQQNVAALIKRVLEDESLPEMARDLFRLQADEYAAVQARLAKIEAKLMKWHREDDISRRIAAIPGVGPIGSSMLSMKAPPPETFRSGRDFAAWLGLRPKDHSTGGRQRLGGITKAGDSILRSTLIVGATALLRHIRKGRHKPTPWLASLLGRKPPKLVAVALANKFARIAWRLMISGGVYKQPVAAMPT

SEQ ID NO: 120449 - protein, 331 aa, unidentified
MNYSHFVGLDVGKKTFDASLMSADEKELSHKSFDNTPEGIQSLLDWIAGYHLSLSKLLFCAENMGSYVTELSVSSVSMGFSLALVCPLTIKKSIGLQRGKNDRIDAKRIANYAALHYRKLELYKLPDKDLVRLRGWIIIRDNLVKQKVSSIKLLETFSQMAKLANVTEAISFLEEQLKSIKEKILEVEKDMEQLIAVSTSLYTNYRLLRSIKGIGIINAIVLLCVTDNFQRFDNPKKFACYCGVAPFEHTSGISIRGKTQTSSLANKEVKVYLTRAAITTISWNPQMKAYYKRKIAEGKHKASVINAVRAKIIARSFAVIRRQTPFVTLAV

SEQ ID NO: 120450 - protein, 421 aa, unidentified
MEEVVEQEEIIERVAALDIGKAELVCCVRIPGAGKRRLQEVTRYSTMTRSLLGLADRLGELGVTRVVMEATSDYWKSPFFVLEAAGFETWLVNARDVKHLPGRPKTDRLDSVWLCKVAERQMLRPSFVPPADIRDLRALTRYRRSLIAARTAEKQRVEKLLEDAGIKLSVVASDIFGVSGRAMMAALVAGERDPEVLAGMARGQLRKKNTDLTEAFFTTRFRDHHGWLLAKMLARVDQLNADIAEVDDRIGEQIAPFAPAVARLSEIPGVSDTTARIIIAEIGVDMTRFPTPGHLASWAKFAPGIKSSAGRQKGNGASGHGNRYLAAALGDAAVATRQTDTFLGQRYRRLVKRRGKKRAVVAVGRSILNIVWHLLSDPDAHFIDLGPDYYDTRINAARARRNHVRHLERLGYKVTLEPAAA

SEQ ID NO: 120451 - protein, 360 aa, unidentified
MSSIAHAPAVRVVIGVDTHKDFHVAFAKDHLGRELGHRKVTADRSGYADLLEWAQNLGEIDAFGVEGPSSYGAGLARFLATSGEVVLEVGRPSREHRARHGKSDPADARAAATAVLAGDALGVPKSCDGKVEMMRLLSQARTSAVKAKRAASASIRDILVTGPEDLKEALGQLSTGRLTRACAAMDSVEYPTTPLEAAIVTLVSLSRRYQQLSEEAAALERQIKSLVAEVCPSLLSLVGVGPEIASTLLVTFGDNADRIPSEAALAKLCGVAPVDASSGRQIRHRLNRGGNRQANRALHMLVIVRLRVHEPTRAYMARRIAEGKTRKEVLRCLKRYVVREIFAIMQETLLSNRRSRLSLV

SEQ ID NO: 120452 - protein, 294 aa, unidentified
MSKSSQYVGLDVSLKETSICVIDDADKIVWRGQVESTPETIASAVKQHAPHAVRIGLESGQLSNWLFHGLKEAGLPVICVDARHAKAALSLKVNKTDANDALGLAQIMRVGWYREVTVKGLDCQAVRALLVARGQIVSQITTLKNCVRGILKTFGRVLPKGLRSQFPARVRAAIDGHPVLGAIIEPTLRVLEAARAQLLVYDRAVIQRARSDDTARQLMSAPGVGTVVALAYMTGVEDPARFKRSSSVAAYFGMTPRRYQSGEVDHAGRISKCGDGMVRSLLFEAAKVLLSRAR

SEQ ID NO: 120453 - protein, 396 aa, unidentified
MEQVAERVVVGMDPHKRSVTIEVMTADEDVLGGGRFGTDPAGYKSMLEYLRRWPDRVWAIEGCNGIGRHVALRLLADGQDVVDVPPKLSARARVFSTGQGRKTDATDAHSVALVGTRMSGLRPVVDDQQLAVLRILVDRRRSLGEDHTRMISQVHQLLLELVPGGAKKDLSAAQARALLAKVRPRDVVGKTRRRVAAELISDLERIYARKKAANKELTALLAETGTSLTDLPGIGPSGAARLLVEIGDITRFPDRDHFASWNGTAPIDASSGDQIRHRLSRKGNRQINRVVHIMATVQLRNPTEGRAYYDRRKAEGKTSMEAMRALKRRLSNIVYKTMLDDAMSRAASGARTGPGGQRGNDSDSSAAGSHPHTDSSDKPLPGPAITQPRTPIPAPS

SEQ ID NO: 120454 - protein, 415 aa, unidentified
MKKIYDNCCGIDVHKKIIVACFIHGKEQEVREFGATTNELLKLADWLIQGNCQMIAMESTASYWKPLYNVLESSSLDAIVVNPRHMKAVPGRKTDIKDAEWIADLLQHGLLQASYIPDKTQRELRELVGYRKSLVEEKSRELNRLQKMLEGANIKISGTITDINGKSARNILEVILSGTFINENKIKEMYAQKKIASNLKATPSQLAEDLNGILSPLQKRMMGELITHVDELEKHIKNLDDEINNTMNPDQKHAAEVIDDVTGIALDSAKAIISVIGTDMSRFPTDAHISSWAGLCPGNNESAGKRRSGKTRKGNKLLRSTLIVCAHSAARTKNSYFAAQFKRISAHRGAKRAYVAVAHSMLIAIYHILKDGVVFKDLGAEYYNQFSRERKINAYLKKLKDLGWQDFNAMESQPT

SEQ ID NO: 120455 - protein, 401 aa, unidentified
MRIIRSNAIRIKRFRELKETLRTTRDRLLVGLDIAQGEHVAHLRHAHTRVVTAALVIPNTTRGFAQLWARIQQAQRATGCREVVCGLEPTATYHEALARFLEAQGAEVVLVSSAVAYWNRRTQDGTWDKHDRKDAANCADLLEQGKVLFYSQPDGPLAELRRLVKCLRRARGELAACKARWRTTLRPALGPMGEPLPNGLRAELPVVLQAWEPAAPGRPALAKGRLPLGLATACADLGAQVTAVQARITALERACTPVAERLPAYALLRTIPGVGPTVAAILLAEIGDIAWYTKFSQLRKLAGLDIVRVQSGQFAGQARISKAGRGLLRWALYHAAMGLARTAGGRARLAALKAKRQGDRYAGFKAIVELAAKVLRVVWGVWRSGTPYDPRRTGGLRRQPR

SEQ ID NO: 120456 - protein, 360 aa, unidentified
MKQITRGESRREAVRVGVDLAKRVIQVHAVDALGRVLTSRTLGRDRFIEWCTRLPAGCIVAMEASSSAHHWARKLAAIGLDARIISAQLVEPYRLEGASGKNDANDAAAICEAASRPSMRFIPVKSIEQQSMLCVHRLREGLKQDRTACINRIRGLLAEFGLVFAQGPRELQLILSDVLEDAGNELGTLARLTLQRAQAQWRELDEHLAWCDERINAHGRDNVEVKQAATLIGIGPVTASAAVATVGDFKQFKNGAQFGAWIGLTPRQRSSGGKSNLGSITKRGDTYLRTLLIQGAKSAVMTAQRRHDKISSWALALRERSGWQKAVVALANKNARILWAVMTRGDVFDPNHLSVKPTGG

SEQ ID NO: 120457 - protein, 310 aa, unidentified
MQDTIGIDISKDTFDIHRLSDRRHERFGNDKAGLKALQRWIGKAPVRVVYEATGRYHRDLEAVPGAAGHDLVKVNPTRARRFAQAISQGAKTDRVDAAMLARMGAVLELDAKPVRSETMHEIRELHIARRALNKDRTACRNRLEAARNKVVLARLRARLRQVDSQLEQIDTELARLIVEDPALARRQEILCSIPGIGAVAAVAMIVEMPELGTMEPKEAASLSGLAPITRESGKWKGRSKIGGGRRGVRNALYMPALVAIRHNLHLAETYRKLVDAGKPAKLAIAAIMRKLVILANALIRDDRTWAKTAP

SEQ ID NO: 120458 - protein, 343 aa, unidentified
MRKELFIGVDVSKNWLDVAYYDGVDVDWKQGHIRVDNRQSGYDQIGKWLRGLGADRESVLFCMEYTGLYCQDFRVWLEKEGFVYGMVQPRKMHRFEPDLGEGERALDRIKTDEMDSFRIAMYCEKHCRKIRVSPSRLPGEACLRLKRLLAERKQYTRQSTLYKQQLRDISAYDTEESRRRKQAALAMLNGQIRQTDAEMLGVMDGDPALRGSYDLLCSVGGIGHVVAVETIVLTENFTSVTNPRKYACYIGIAPAKKESGVSVRGGEHVSRKGFTQAKADLSMACLTAIQSDANIRAYWQRRKAEGKKGGVVLNAVKFKLVLRMFAVIRRQKPYVEIDGYKAR

SEQ ID NO: 120459 - protein, 323 aa, unidentified
MQGKELSDPGAGQPVYVGVDVCKARLDVYLHPVGRRLSVANGRDGLRRVKRVLGGHRVALVVLEATGRYHRMAHRSLAAAGFAVAVVNPLRARLFAEASGALAKTDRLDARLLALLAAGLDPPARPPAPEPLEQLDELVRARAAASAEATALANRLGASQTGFLKAELRRRLASTKRHIDRLQAEIARRIAADASLARRTAILVSIPGIGPVAAATLVVGLAELGSCSAKAAASLAGLAPVARDSGTANQPRRIRGGRTQPRAALYMAALAATRHNPDLAAFYKRLRNNGKKPKLAITAVMRKLVVLANTLLTQNRTWTPTPP

SEQ ID NO: 120460 - protein, 317 aa, unidentified
MDEPPTAVRFVGIDVSKGHVDVHVRPDVAAFSCTTDPDGLAALVNRLAPLRPQLVAMEASGGYEGVIAAALTEAGLPVAIVNPRQVRKFAGAIGRLAKTDAIDAGVIAHFADAIRPVPKPMPDALMLRLRELLARRRQLVVMINAEKQRLGKTADKLAQRSFKTILRSLEAERARIDHAIDTLIQQSPLFCAKQDLLKSVPGIGDIVARTLIVELPELGRVDRHQIAALAGVAPMNRDSGRFRGKRRIQGGRVEVRAPLFMACLTAIRHNPPLRSFYRRLRDAGKPARLAIVAVMRKLLTTLNAIIRDNRAWAQAHS

SEQ ID NO: 120461 - protein, 343 aa, unidentified
MTEVSMIGLDLAKNVFQVHGVDASGAVVLRRQLRRSQVEKFFAQFPPVLVGVEACGGAHHWARVIGRYGHEVRLMPPSYVKPYVKRNKNDGRDAEAICEALSRPTMRFVPVKSVEQQATLAVHNTRSLLVRQRTMVANALRAMLSEIGIVAAQGIKGLGELMQRLAQPSAEVPELMRGALLLLVRQWQALDAAERALERQIKQMAAADQEARRLMQVPGVGPIIASSVVAKVPDARVFRSGRGFAAWIGLTGRDRGTGGKPRPGPISKQGDRMLRALLINGASAYLRQARRRGVSDPWLRELLARRPYKVVLVALAAKTARIIWAMLVTGKRYRDRASVSAQA

SEQ ID NO: 120462 - protein, 338 aa, unidentified
MAILYVGIDLAKNVFAVHGVNESGKPEQVRPSVPRARLHELIAALPPCVIGMEACSGAHHWARLFMAHGHTVRLMAPKFVAPYRLSGKRGKNDAADTAAICEAVQRPNMRFVPVKTEAQQAQLCVHRARQAFVEARTATLNRIRGLLSEFGIVLPLKAATVRREAALRLEDLPGLSNLVIGDLLSEVHRLDDRVAQYDRHIAQMAREDERARRLMRLAGVGETMATALVSMIGNGHEFKCGRQLAAWLGLVPGQYSSGGKARLGRITKAGDPYLRSLLVMGAKALLNTAKLKTDGISRWAVALAERRGYWRAVVAIAAKNARMAWAVLARGERFTMPA

SEQ ID NO: 120463 - protein, 456 aa, unidentified
MPKSRRVPKGSRMSPTVRVLEPNAAGIDIGATEFYVAVPSDRDPQPVRRFSTFTDDLNNLVDWLQTCGVDSVAMESTSVFWIPLFQILEDRGFKVCLVNARHVKNVPGRKTDVSDCQWLQYLHSVGLLRASHRPPQIICAVRSICRHRESLVQMATVHIQHMQKALDQMNIQLHHVISDITGATGLAIIDAILNGERSPEKLAALRDARIVASQETIARALVGDYRPEHLFTLKQSLQGLRQYQQWIAACDTEIEQQLQLLPGNLANNQKPMSKPKDHHKPRRNELRFDLRSHLYRIFGVDLTAVPGISSLTAHTILTEVGSDLSRFPNAAAFASWLGLCPDNRISGGKILSVATRKVKNRVATALRMAAQSLHRSQSYLGHYFRRIRIRLGTPAAITAAAHKLARILYHLITTRQPYLEGTFAETEERARNRHFLQLAKQAAKLGFQLAPVGSVP

SEQ ID NO: 120464 - protein, 342 aa, unidentified
MEITTIGINLAKHVFQLHGVDGAGKDVLKKQLRREQMVPFFVQLPPCLIGMEACSGAHFWARKLQALGHRVRLMAPQFVKPYVKSNKNDAADAQAICEAVARPSMRFVAIKSPEQQAVLSLHRARQGFVRARTAQGNQIRGLLAEFGLIAPQGLCSLRQRVPELIEDASNELPGALRLLIQDLMAHLKVLDQQIEQLQQQIQDWHRGNEVSQRLGQIPGIGAITASALVASVGDAAQFKNGRELSAWMGLVPRQHSSGGKDRLLGISKRGDVYLRTLLIHGARALVRLAQLHPDRYAWLHGLIGRSNANVAAVALANKNARVAWALMAHGTAWRERPMRALA

SEQ ID NO: 120465 - protein, 344 aa, unidentified
MDYFAGLDVSVKDTSICIVDDAGRIVREVKVASEPQALLAVLKIPACRFKRIGLEAGPLSQWLCSALAEAELPVVCVETRHMQAVLKAQINKTDRNDARGMAQMMRVGLYRPVHVKTLRSQKLRMLLTHRRLLQSKAIAIENDLRGTLRNFGLKVGMVGKVKFEARIKELVEIQPDLAELVEPLLIVLRALREQIVVLHRRLLAIVRDDEVCRRLMTTPGVGPVVALTYRATVDVPARFRKSKAVGAVFGLTCSKYQSGEIDRSGRISRCGDEMMRVMLYEAAQSMLRSKKWSWLKAWAMQIARRRGIKKAIVALARRLAVIMHRIWVDGTEFRWTREQAAAAA

SEQ ID NO: 120466 - protein, 393 aa, unidentified
MFIVGVDIAKRSHEAIVIDNSGNIVRKAFNFKNDSAGFSKLISVLADISENPDDFVIGMESTSHYWLALYSNLQKLGYTVHVFNPIQSNALRNMYIRQIKSDEHDSFIIAEVIRFGRYTEGGLPPSELYELRELCRARFFVVDMTSDLKRKVIALLDQVFPEYETVFTDIFGRTSSELLLNCSTPEEILAIDTEKLAEIIEAPSRKRFSIPKAKEIKELAGNSFGIVAGFDTMGLLIKQHMEHIRYTEMQIAELDAKIEELFSRFNTCITTISGIGSTLGATIFSEIGDISRFSSPAKLAAFAGIDPTVKQSGEFVGTHNHMSKRGSPYLRRALWQASTIAVRCDPALKAFFQKKLAEGKPYMNAIGHVTRKLTNIIYAVLRDGKPYYSRLEG

SEQ ID NO: 120467 - protein, 343 aa, unidentified
MQAVTTIGLDIAKSVFQIHGVDAAGNVIVRRKFKRRYVLSFFQKLPPCLVGIEACASSHHWSRELQALGHTVRLMPPAYVRPYVKRQKTDAADAEAICEAVTRANMRFVATKTPEQQSCLMLHRTRHLFIRQQTAVINAIRAHLAEFGIVAPVGRNGVEQLLDVVADASDKRLPEIARACLAALGVQLRALKLQIVNFDRQIVAWHRSNEASKRLDEIPGIGPALATALVASVADPKAFRSGRKFSAWIGLVPKQHSSGGKDRLGSISKQGDRYLRSLFTAGALAVIRYAKIHGTKHRPWLTALLARRPTKVAAIALANKIARMAWAMMARGDRYKEPVALAA

SEQ ID NO: 120468 - protein, 335 aa, unidentified
MKKYLVTVGIDVSKSKLDVRFVFEPANTEHPHIIVANNEKGIKGIISFLKKQKIQPDDALFCFENTGLYSMPLSIYFSKQQLDYWEIPAVEIKRSKGISRGKNDKVDAKDIAFYAVTHGHKLKLSQIPEQDILKLQLLYSEREKLLKAIHAMEASVEATNFLSKEVTNEVMAINKKTVAQLKVSLKKIDAAIIVIVKSNKQLEDCFQLATSVPGVGKQSAIYLIIKTRCFTRFKNWRKLACYAGIAPFEYSSGSSIKGKTKVSHVADKKMKSLLNMAALSAKKYDKEISDYYVRKINEGKNPMLVMNAIRCKILSRVFAVINRQTPFVNTQKFAA

SEQ ID NO: 120469 - protein, 341 aa, unidentified
MNYYVGIDVSLEASSLCVVDANGKIVREGKVASEPDALIAWLKGLKLELTRIGLEAGPLSQWLYAAMRQAGFAVELLETRHVCAALKTMPVKSDRNDARGIAQLMRLGWFRPVHCKSMAAQETRALLTARKLLQTKLHDLELSLRGILRGFGLKVGPTTPARFEERIRELVAGHPRLEVIVKSLLAARGALRREFDHFEKQVRDAARCDTRVRLLTSIPGVGAIVSLSFTAAIDDPARFKSSKRVGAYLGLTPTKYQSGETDIDGRISKIGDASVRAALYESAHIILTKPLKGCTALKSWAMKIAKRSGMKKAKVALARKLAVIMHRMLADGTSFRNAAAV

SEQ ID NO: 120470 - protein, 353 aa, unidentified
MTSNCDTYIGVDLHKKSIYVTVMKPNGEIARQTEIENKGETIKSFFTKYADGSKIAVESTMNWIPFYERLESLGCSVSLSNPLMTKAIAAARIKNDKVDSRILADLLRTNLLPMSYIQTQPIRDVKEIVRERYSYVQMRTKVKNNIHSILFKAGVEGQPDNLFTKKGRKFLTELEIRNIYRQELNRYLETLTFLDERISGIENTVRKLAQNDYDCKILITIPGIGYYSALMIKSEIGDIERFPSAKKLCAYAGLIPSTYASADKIRTGRITKRGSKWLRKTLVDSITSGSRKTHKLSTFYRKLKKNKGTGKAKVATARKLCSIIFAMLKDKQPYREFVPTKHREDTPLNNMVN

SEQ ID NO: 120471 - protein, 457 aa, unidentified
MSKRSKKAKSRSFKASSLPKHLQHINLNAAGIDIGSERHMVAVPEGRDTVSVREFGTFTADLEALAAWLKQCGVTTVAMESTGVYWIPLFELLERRGFEVKLVDARHVKNVSGRKSDVLDCQWLQQLHTYGLLAGAFRPPDEVCVLRSYLRQREMLIQASSMHIQHMQKALQQMNLLLHNVVSDITGVTGMKIIKAILAGERDPRVLARNRDERCKNTTTTIAKSLVGNYREEHLFALRQAVDLYEIYQTKIADCNQAIIKQVEKQPDISDDDPPTPEQQVPARDRIRDGVDVRDLLFKKSGVDLFAIPGLAADTLLTLASEVGFDMTPWKTEKHFASWLGLCPGTKISGGKVLAKKTKRNPNRATQAFRMAAASLYRSQTALGAFYRRIKSRAGGKQAVTATAHKIARIYYAMLTQGATYVELGQQAYEQRYKERRIDHLKVQAKSLGFQLVPCAT

SEQ ID NO: 120472 - protein, 418 aa, unidentified
MQSRISKNLDGVKTGTLYVGIDLGLDRNEALVIDSRARQLDRLGFPHSRHGYDYLLRRLKGIQDKHQSPAVLVGMEPTNYFWKLLANYLEQQQINYRLVNAYTVKKHREGDQLDRSKDDTRDAFMIADLLRTGKYTRTQLLHGGYAELRTYSTLYDQVRRDIRRHKTILRTVVMQLFPELCLVFKDLTGYTAMAVLRDHASAIAVRELSQEAFIARVRTHFVGKRLMVSKLCRVHLLATNSIGVQDSLRALQETARTQIDALVLLRRQFDTVCAALVDTLKTLPEAPYLLSMHGLGKVQAAIILGEIGDPSRYQNAGQLIKLAGTQPTPNNSGRKNKGLTPISRKGRPRLRTALYFSVMCLIRVDDAFAREYLRLQTRCQNPLTKMQSIGVLMNKLLRILWSLMRNRTLYQPDHQQGD

SEQ ID NO: 120473 - protein, 368 aa, unidentified
MLLPRQRLKLVRGAKDKEYAMSWNLSAAVAVIGIDIGKNSFHIVGLDGRGAIVLRQKWSRGQVEARLVNMPPCLIGMEACVGAHHLSRKLKAFGHDARLMPAKYVRPYSKGQKNDFRDAEAIAEAVQRPTMKFVATKTADQLDLQALHRVRERLVSQRTGIINQIRAFLLERGVAVRQGLRFLRAELPRILAAPPDVLSPRMVRVIEGLAEDWHRLDERVDHLSGEITALARQDVGCERLMSVPGIGPIISSAMVAAIGTGDAFSKGRDFAAWLGLVPKQISTGDRTILGKISKRGNRYLRVLFVQAAWVVLIKPKSWERHGLKHWIEAAKKRLHRNVLAIALANKLARIAWSVLANGRIFEARLQAA

SEQ ID NO: 120474 - protein, 424 aa, unidentified
MNFKMQNKQNQLIERITDQHLVVGVDIAQHVHVARAVNYRGIVIGKPLSFENSEEGFTRLLNWIKELKHMKNLDTTIVGMEPTGHYWINLSKWLVKQNMDVVTVNPHHVKRNKENRDNTQSKSDKKDALVIADMVKNGYYAFVRSTSESFEKLRVLIANRDVIVKRLVSSINQINRWVDVVFPELRQVFKDVSCKGAIATLRLFPTPAEICSLQPQDIVNGWKSCMKRHSGHKKARSLITLAKRSIGTKQALDAYKLHLEQLLEEYDLASSQLERVTQEVTNVLEQIPFVKQILAIKGISEISLAGILGEAGDLSGFAHGNALLRHAGLHLAEASSGKWKGQIVLSKRGRSLLRRYLFLATMSLVMNNPEFKALHSNNVKVKKIKKMKSIMKLCGKLARVLVGIARNGSVYKPEMVFPLEQLAA

SEQ ID NO: 120475 - protein, 346 aa, unidentified
MEYIAMDVHKKYTWARVENEKGDKLYECKLSHSHGTIENFVKRWTGGSAVAVETVGNWYWVVDEIEAGGGKPQLVNARLAKLMMGSVNKSDKLDAKGMNRLQRTGTLPTVWIPPSSVRDARELPRTRMVLSKQRTQLKNRVHATLGKYGFVVEGASDAFGKRGREILTELMAKLPPHTEQALGRVLDQLDHVCENLQWIEEKMIEVFAPCPQTLWLKSLPGVGDILAVVIWTEIGTIERFSRAEQLASYCGLVARENSSGGKFRFGPVRRDVNVYLKWAFVEAANSSVLNRERCGYDHISRLYERIKARRGHGKAKVAVARHLSEASFWMLKKGEPYREPMSSTQR

SEQ ID NO: 120476 - protein, 312 aa, unidentified
MIPSTIGVDISKDFLDVYRLPDGEARRFENSKAGYKMLIRWLSETPIERIIYEPTGPYHRSFEQALAKAALPLAKVNARQARRFAEATGKLAKTDRADAAMLARMGVALTIAVRPVAGEMLSELKELNLARQALIKDRTAAKNSSKILSLRLLQRQNAQRCKQIEAQITAIEEEIKARIAEDEQLAERLLILESIPGISKITAFSLLIEMPELGTLDGKQAASLAGLAPIARQSGRWIGHAFIRGGRASLRQALYMPALVAARFNPDMKVKYRALIDAGKPAKIAITAIMRKLIVLANALLRDRRKWNENHA

SEQ ID NO: 120477 - protein, 345 aa, unidentified
MQPMYYIGLDVHKQKISYCVKDSSGKIYAEGWIPATRFDLDRWMKTLPQPWSAAMEATMFSGWIYDHLKPHAAELKVAHPLMLRAIAAAKKKNDRIDANKICDCLRCDFLPECYMAPTAIRERRRTLRYRNLLVRQMVQMKIKTSTLLMEAGVSYNKRKLHQAGYFRELLASNPDIHEGLRPLLRLCRETVVRLSKTENALVSSLQQDPLLLQRVERLMSIPAIGPITALTWALEVGEVQRFSSIKKAISYCGLCGDEQRSANSVQRTPISKQRNKHLQTVLIEAAKMAPRYSPTLALLYDREKQKGNANRATLAVARKLVAYLVAVDRGQTHFLVLDQETRTAA

SEQ ID NO: 120478 - protein, 351 aa, unidentified
MITQITAVPKLYIGIDIHKRSWKVHCSTDLFSGKSFSMSAAPERLFEYVSKNFPDHEVSVAYEAGCCGYYAHRCFESYGWRSLVVNPADIHRKGKEKHTKTDKIDAQLIARELKDGRLESIIVPDIKREELRSLFRRRNDLVKDFRRIKSYIKMQLLYFGIKEPAEFDNDHWSHKYRNWLDDMVFQHPTAKATLDSRMRFFRFVDQELRDVSTQLRRYCKVHYKKDYTLLRSIPGIGGIVACGILCELGDLRRFNSVKHLAGFVGLAPGVYQSGGSSRIMGITPRAHRLIRSYFVEASWQAIRADPVMQAYYRKHTGKNVKSIIIKVARKLLSRTLAVIKTEVPYTIGVVE

SEQ ID NO: 120479 - protein, 376 aa, unidentified
MENDSTLYVGLDVHKDSITVAYALGNDEVELLGKIGTTQADIERLCKRLQSKARRVCIVYEAGPCGYGLYRELVQKAFDCMVCAPSMIPRKPGERVKTDRRDAAKLVRLLRAGDLSAVYVPSVEDEAFRDLARAWVSAKDDLKRARQRLKAFLLSHGVRYAGRADWGPAYRRWVSTYAFASAWQQLAFEEHRRSIEDRLTQCERLEAALREAVVEWRFYPAVLGLQAMRGVQFTTAVGMLAELGDLSRFVHPRQLMAWLGVTPSERSSGGKRHLGSITKTGNSYARKLLIEAAWSYQHPARVSPEIQRRHEGIPKAIIDRAWDAQIRLCRRYRKLAARGKNVNIAVVAVARELAGFIWDVTRLAMSLAIPRQAWTP

SEQ ID NO: 120480 - protein, 391 aa, unidentified
MTTTMLAESHDEEQIIARVAALDIGKAELVCCVRVPGPGSRRLQEVSTHSTMTRSLTELANHLVELAVERVVMEATSDYWKPVFYLLEAHGLQPWLVNARDVKHLPGRPKTDVLDAVWLCKVAERQMLRPSFVPPRPIRRLRDLTRYRIDLVAARTAEKNQAEKLLEDACIKLSVVASDIFGVSGRAMMAALIAGERDPKVLAQLARSRMRTKIGWLEEAFNGHFDEHHRFLLQRMLDRVDGIDADIAAIDEQIEAYLAPFAAAAARLDEIPGIGAVAAAVIIAEVGVDMSRFPTAGHLCSWAKLSPGLNTSAGKTKGNGSTGHGNRYLAGILGEAAVVAGRTDTFLGARYRRIAKRRGNKRAIVAVGRSILVIIWVCPERGREFDVGRAS

SEQ ID NO: 120481 - protein, 454 aa, unidentified
MAKKAKKIKTGKGLKLEIVNPNSAGIDVSSTEMQVCVPEERDGENNRRFGTFTQDLHLISDWLKACGIETVAMESTGVYWVQLYMILESEGFDVLPVNAKAIKNISEKKTDRVDAETIMVLHSYGLLRASFQPQNHVRRIRNVSRHRDGLLKASSREVLHMQKAMELMNIKLGNVISDILGKSGQEIIRAILAGERDALKLSALADPRCKSPKETIAKSLQANWDEDLLFMLKQSYELYVYYQNLMKDCDKQIEGILQEYLKDVKPEETSKPEQRAKKAKAQKNAVTIDIEKHAIRLWGVNAMRIPGVSEAALLRLAGELGHDFTDKFDSYKQFCCWCNLTPNNKISGGKLQSSKIPKRKNPVGQILRSSANSLKTSKTPLGYYFRRIQAKSGYLPAIIATANKLGRILYTMVKYKVEFDDSFTQTSETEILRRKLIKTQRTLEKLQNQIKECG

SEQ ID NO: 120482 - protein, 358 aa, unidentified
MRRYIGLDAHAASCTLAIIAETGKRLRDFPVETNGAALVEAIRAIPSPRHLIFEEGTHSAWLYETLAPHVAEIVVIGVRTSRGPKSDARDAYGLAEKLRTHAVDQSVFKAPKEFTVLRELARVHRMLVRDVVRVQARLKSIYRSRAIATTGATVYGPRQRQAWESRLPAATRHTTSKLYAHYDCLLALKTQAESELIAEAKRHPIARVLQTAPGLGPIRVARLLPIVVTPHRFRTKRQFWSYCGLGIVMRSSSDWVRGRDGGWQRAQVAQTRGLSRQHNHTLKETFKGAATSVVQQGKKVPIYADYARLVESGTKPNLAQLTLARKIAAIVLRMWKDKEVYRPDKLASPTPPAARSPT

SEQ ID NO: 120483 - protein, 359 aa, unidentified
MDIQGTSVGLDVHALSVVAHAVDEETGKVSKARLCPDHGEVLGWLHQLRAPVRMTYEAGPTGFGLARAINEAGMECVVAAPSTLQRPAGDRVKTDARDAAHLARLLRLGEITAVTVPEREIEAVRDLVRAREDARVDLMRVRHRLSNCFCGRGSSIFGGTPCTCAHEKWLRRQRFDDAHLKAAFDHGFDAVLAATAARDRLDEQITEVAASPRFADPVNRLGCLRGIAALTGLALTVEIGDWSRFTGSSIGAYVGLVPCEYSTGTSWVQGSITKVGNTHVRRLLIEAAWHHRKSYRTSGPTLRARWAVAEPALRARGHAGNRRLYKRWRHFTERGKNPLVANLAIARELAGWCWSLATM

SEQ ID NO: 120484 - protein, 511 aa, unidentified
MKAKQRKAKGNDHSSSRASKQRAKIAKAMQAPEQMEIVNRHAGGIDCGSEEHYAAVSPESVEEGEPFVRCFSAFTEGLDALVEWLKDCGVTTVAMESTGVYWVALYQKLEAAGIEVFLVNARHLRHVPGRKTDVKDCQWIQRLHSFGLLSASFRPEDMICRLRSLQRHRLNLVSAGAAEIQHMQKALQQMNLHLHHVVSDISGLSGLRIIEAILAGQRDPSQLAKLRDPRVRKSTVAQMEAALVGDYRPEHLFVLDQSLQAYRFYQARIEECDHEIEPLLQQLAERFECSSSPLAAESSQPEVIQDQAAQSQTARPIKPKRKRKPKANQPKIDLAGYLQRICGVDLTQVVGLDVLSVLLIVSEIGVDMSKWRNAKAFCSWLGLCPGNKISGGKVLDRRTCKVINRVATTLRLAAQAVGRSNTCLGIFYRRKKAHLGPAKATTATARKLACLVYHLLKYKDQYREPDPVTYQLKVQKTHPQQTSETSCRSRLSVTTNRPGPGLIPPAHRSSS

SEQ ID NO: 120485 - protein, 331 aa, unidentified
MKNKEFIGIDVSKNVLDIFILKLKFHFVVSNDPSGFAKLLEICCIKLSCTKDKLFFCFENTGRYSRLLSIFFHESEIIYAMVPALDIKQSKGMTRGKSDKKDAKSIALYAWRKKDELVPTKLHSAEVGQLRQLLALRDKLIKHRTAYKNAINDLHDCFCEGETEFIRQIQLRLIKQLNNEINNVEQQIDDIIQAMPEWKTNYKLIQTVKGIGPVIAKYFIIYTENFTRFSDPKKFACFAGIAPFEYSSGSSIKGKTKLHPCANKHLKSLLNIAAMGAVQLKGEYKTYYQRRTQEGKNKMSTLNIIRNKLVTRIFAVVKRQTPYVDFSTFAA

SEQ ID NO: 120486 - protein, 362 aa, unidentified
MEFFTGLDVGMDETTICVVDDKGKVVLETAVVTDPEAIKLALKPYLGRLRRVGHEAGALSPWLHPELLKLGLPVVCLETRHVRAALSAQRNKTDKADALGIAHIMRTGWFRKAHIKSEACYRLRLLLTHRRNLKRKVLDLENAVRHSLKAFGIRISGTGRGGFAQAVREAVAGDALVSELIDAMLNARAALWKEYCRLHDLVVKLVAGHKLCRRFMQIPGVGPVTALSFMTAIDDPSRFKRSRDVAAYFGLTSRRWQSGTSIDVKGRISKAGDGDVRRALYEAASALLTRYKRRDKVKTWGMVIAKRSCHRKAVVAVARKLAVIMHAMWVDGTFYCGDPAATEADVRAHAAVKDSKLLGRYA

SEQ ID NO: 120487 - protein, 353 aa, unidentified
MLQIKYVGFDVHKATTVVVVLCADGSVFIRAEIPTTEQGIIGFLGTLNGTVHVAFEEGTQAQWLHDLIEPLVSSVTVCRGLPRAPKRNKSDRIDAFELARQLRSGDLRAVFHRYSSNLRHLRHLVRAYETAVSDSVRTMLRLKALFRGIGRPIDTHSLYNPKHRNRWCGELATAGERTRAGFLYDTLQTLRDVRTRSKAQLLVQSRSHPAYKLLTSHPLIGPIRAAELTALLGSPFRFRTKRQLWAYGGFAIRTWSSGEFDVRSGKIVRTRPPMTRGLSPDFNRHLKRVLKSLATDLCCRQGPYGDWYRRRLAAGMRPDMAKLARARKVASVILITWKKGEPFDPDRLIRDFN

SEQ ID NO: 120488 - protein, 429 aa, unidentified
MNSTQNKKIEQVKETTMIVGIDVGSEKHYFRAFHWRGIELTRKPVAFSNSMEGFNSFYNSVVELMQKNELKEALVGIEPTGHYWFDLGQFMGEKNIKFVMVNPHHVHKTKELDDNSPSKNDRKDPRVIAGLVRDGRYFYSYMPTGVYAELRNASNRRFVLVEEQTRAKNRLQKWVAVYFPEYKGIYTHIDAKGGLLVLKQAPTPEEIVRLGVEGIIKIWKDAKLRGNGHKKAMLILNAAMKSIGLKAGLTEARMEIQDLIEDYELQTKRLERVNDLIKELCQQVRYADKLLEIKGIGITTVAGFIAEVGDIKRFDSTKELQKLAGLELVADSSGKHDGKTKISKRGRKRLRYLLFEAAISVVGKNEEFKEIHRYYTTREKNPLKKMQSLIAVACKLIRVFHVILTKGISYDASKMLKDIRHPGEQLKAA

SEQ ID NO: 120489 - protein, 323 aa, unidentified
MQGKVKPDLDAIEAFYVGIDVCKERLDVHVHPSGETFAVANDAGGWRCLKRKLARYLVERVVMESTSKFHRAAHRSLAAAGYATAIVNPLRVRLFAEAAGVLAKTDRLDARVLALMACQLAPGATEPASKSLEDLGEMAHARRKLIEQRTATLLQQSTVACRSVHGTLRAHLAAIAKAIGSLDKQIMEAIHSDAALARRFAILTSIPSIGPVVASTLIAAMAELGSLGGKQAAALAGLAPFADDSGPRTGKRRIRGGRAEVRRALYQAALVAARFHPQLKQVYLRLTAEGKAKKLALIAIARKLLVLANTLITENRTWQPRHA

SEQ ID NO: 120490 - protein, 324 aa, unidentified
MQNQTIVGIDVSNATLDICVSNHEQRSFVINNEVKAICQFFKAYKEKLVIGMENTGRYNWALYEALKETNHRIFVISPLHLKKSMGLVRGKNDKIDAVRIADFTAKNYNELPQWKPSSQAVQKLKILLTERSCRVKSKRQLLKQQYDYAKMKHLGMDKYLMGLNKQELALVNKQIAMIETEIEALIKTDEQMHNQAKLIRSVPGAGKVLCWMMLAKTAGFTTITEPRKMACYSGVVPFSNQSGTSIRGKNRISPYADKAIKAVLHLAAMSAIRLKNDLREYYLRKIAEGKNKMSALNAVRNKIVHRIFAVIKNQTHYQNHLLLS

SEQ ID NO: 120491 - protein, 351 aa, unidentified
MTMLAEPNEKVEDPAILDAAVGGDTHRDTHYLEMLTGAGVLISRITIDNDADGYAEALAWIAEHTPGPRVLIGLEGTRSYGIGLCRALQAAGLEVVEAEQPKKAQRRGRGKSDPIDAHLAALTVLRMPADRKVLPRNDGDREALRILLGARREATTIKTKQTNRLRALLLTGDDDDRALSKGAMSDARLGTIARRRARKGENTEQQVRREEATRLALAIRRVTSELKANKTHLTELVEEFVPGLLDTVGIGPVSGAQAIVSFSHVGRCRNEAAFAALAGASPIQASSGRTHRHRLNRGGDRQLNRALHDIAKTRWRHCERTKAYITRRQAEQMPDREIRRCLNLDAPRELV

SEQ ID NO: 120492 - protein, 410 aa, unidentified
MQSAPDTLPRIPEGGLTSGLDWARDDHAVSVVDADGLEVHRFTIEHTAAALLALTRRLRKLGVREVAIERPDGPVVEALLAAGFTVVVISPNQVKNLRGRYGSAGNKDDRFDAFVLADTLRTDRARLRPLVPDSPATVALRQTCRARKDLVAHRVAVANQLRAHLQVVFPGAVGLFADLDSPISLRFLTRFDCQDRADWLSAKRLEAWLTSVGYCGRTDPAELYDRLIAAPRAAGGGPAQAQITRAMVAVLTTLVEQIKALSEEIGEQLAVHADAQIFTSLPRSGTVRAARLLAEIGDCRARFPTPESLACLAGVAPSTRQSGKVRTVGFRWACDKQLRDAVTDFAGDSRHANPWAANLYNLAIARHHDHPHAVRILARAWLFVIWHCWQTNNPYDPAKHRALQILGLPA

SEQ ID NO: 120493 - protein, 412 aa, unidentified
MQDILTCVMGLDVHRDIIVACLVKGAVDAEPEAETRTFSTLIPEMQKLRDWVIEAECRNIAMESTGIYWQPIYEMLESCFDGEISILVVNARHMKNVPGRKTDMKDAQWIATLLRAGLLKGSFIPDKTFRELRHLTRYRKSVVHDITAQKNRIDKFLQSSGFRFTAFLSDTFGASGRNIIRHLIEHGSIDREALDKCLKTKTRNRIDEILVALNGSLSVHQRRFLNMVFLHLEDLEAHKHTIEDEITEEVLKHTDALNLLCSIPGIDVTAAAAIVAEIGTDMSAFPDSQHICSWAGLSPGNNESAGKRKSVHINKGNPYLKSMLCETAWIMASHRKLYLSGWYWKVKQRKGAKRATIALARKVLSIIYTMLKTGTPYSEECFEQRRQRCERKRANRMVNELQKLGYTVVAPN

SEQ ID NO: 120494 - protein, 482 aa, unidentified
MECRSIPFRRIPFYHHPAITSTLAAERTPTMAKRKQKKNKNVAENLLVIQPNSAGIDIGASEIYVAVPGDRSDEPVRRFDTFTDDLHDAAKWLKKCGIESIAMESTGVYWIPVFQILDLYGLDVILVNARHVKNVPGRKTDVQDCQWLQYLHAVGLLKGSFRPDQDVCAVRSLLRHRDNVVKAASSHVQLMHKSLTQMNLQIHNVISDITGATGTKIIDAILAGERDPYQLADLKDRRIKADKETIAKSLTGDYRREHLFTLRQTVDSYRHCLQLIRDCDAEIESYLKEFDSRIDVDETPAPPSTKSKRKTKGNAPDFDVRTHMHRILGTDLTEIDGVGDLTAHVVFTEVGPDLSKFKTANHFSSWLGLCPNNKVSGGKVLSSHTRPGSNRLAQALRISANSLWKSKSYLGDHFRRMRARHGAPKAITATAHKLARIIYHLIKNQKAFDETVFAEQEQAHQKRMKKRLANQAKSLGLQLVPA

SEQ ID NO: 120495 - protein, 381 aa, unidentified
MTTPATCHVPESTTAGTLFVAFELSEKTWKLGFTTGHGQKPRERTVTARHQERVLEEIAHAKRRLGLPETAPVVSCYEAGREGFWLHRFLQGHGITNHVVDSSSIEVNRRRRRAKSDGLDVRKLLSMLLRYAQGERQVWQVVKVPSVEAEDQRHLHRDLETLKQERASTATRIQGLLSSQGLRVTSLTKLPEQLDALRLWDGSPIPPGLRRRVLRVYAQYTFLSEQIAAVEAERRAQLQTATDARIEKVRQLMQLKGIGINGAWLLVMEFFGWRAFKNRREVGGLAGFTPTPYQSGESAREQGITKSGNRHVRWMTTELAWSWLRFQPASALSVWFRERFGSGGKRLRRIGIVAVARKLLIALWRFLETGVLPAGAVLKEV

SEQ ID NO: 120496 - protein, 337 aa, unidentified
MKVTLIGIDLAKNVFQVCGVNQACKSVFNRALRRHQLMAFLAQYPDVIIAMEACSGSNYWGRSLKAQGYQVRLIPPQHVKPFVKGNKNDRNDAFAICEAAHRPNIQFVEPRTLEQVDMMLAHRIRERQVDARTTLINQIRGLLNEYGIVIAQGKESLKAALPDLIEDAENELTERARVHFTLLHQEWSAINEAIKSSEKDIKQQAQASEGAKLLMQIKGIGEITATAVVSFAGNGSSYKNGRHFSANIGLVPKEHSSGGKQSLGGITKRGNRYLRKLLIQCAWSIIRHCKTAQDRLSVWVKTLIERRGSHKSAVALANKLARIVWAILFKKTEFRAV

SEQ ID NO: 120497 - protein, 448 aa, unidentified
MKIDHPSLSAVLGKAMIRETRFERHRKRTRYSRNSCVKSRRSLLLWFAGVDWADAHHDVMVSDDAGRKVGGRRVTHTPEGLTELNAFLLSITGPERKEELACIIETTHGWLIASLLEAGYAVYPVNPKTVEHRRGAAGAKTDQIDAYLLAKHGRSEFADLRRLEPDSPIIAELKALARDQDSLIHSQTRLVNQLTAWRVTYYPVALHLFTKLQQPTTLAFLQRYPTPHVAQAASVEQVAQVLKQAGHPTPDKSAANIVETLHHPHLTADDVTTRTKSRLMLVLVRQLQPLLEEIAVCDKEITRLFLTHEDNEVFSSLPRAGKRLAPRLLAEIGDDRQRYADAASVQALAGTSPVPYESGNYSKPRRRLACMKPLRNALSQFAWQSTHTEAWAAEYSQRKRTEGKSHSVAVRALAHLWVRIIFALWRDKQWYQTATFEAARQLHARRAA

SEQ ID NO: 120498 - protein, 354 aa, unidentified
MRIIGAFDVHRKQITFKWLNTETGEVRRGRIMPALREPVREFLVPFKGLDAHFALEATTGWRFVVEEVSRAGLIAHLAEPADTAALRGTKRRAKTDRLDCDHMVDLLGSGRLPESWIPPEHVLEMRTLVRLRKVLTDERREWQQRLQAQLFHQGIQNIHVTEAQGREQLIRATLSVAGRKVITTGLDVIDHLDRQLAPLDAYIVRVSRIQRGCRALQQRLFGVGPLTAVFIWTELGDCSRFPSSDDAVRYAGLDVTVRESADKRPPGHLSRQGPEALRWALYEVAQSAARRTSPDHAYYLEVKKRLNHKRACLSVARKICRRAHHILRSLGADAFALVDLSVFPLYEQPAAETA

SEQ ID NO: 120499 - protein, 398 aa, unidentified
MTRKNTLKSLPTDTEFRVVGLDLAKSDVSVAAIPVDDNTPSLVDRMTYADLLDWAGKISPTLFAMEPCNGYSLLCLQLENLGHEIKVISGSTVSMWINTHLSGQKTDLNDAIALARLAVSDAELTPIRHKSITEIRIQTVQAVRQQLMSQRSKSIVSFKALAQQWGIPCAAGHRNLKKLRESIEAKVDLITRPVANAMLFLLDAVKSLDRQIGQLNQTLQELVMSDERGRLLQSVLGVGTQISARVITVVGNIERFNSPRSLVAYVGVAPRNFITGHKNLTKKKHGNCPDLSHKGQGKISRRGDKLLRSLFIQGAACLYMQFCKDQLPECQLKRWILKQLASQKPYGKLIVSLAAKLIRIVWAVLTYREKFNIQKAGMTRSMWSEMALETPLNKEVPA

SEQ ID NO: 120500 - protein, 345 aa, unidentified
MTDYKRIAIDTSKAVFTLHGIDQQERPVLRINLRRAQLLPFFAKLPPTEIAMEACGGAHHWARELITLGHKVRLIPPQYVKPYVKRSKNDRNDAEAICEAAGRPGMHFVPVKSITQQAQGMVLKVRESLVGQRTQLANTLRGHAAEFGVIAGKGLGKVGPLLAAIEQEATIPSEAKDMAVVLGQQIAELDTKIKAIEVKLTAAHKTNPVSQRLATIPGVGPLIALTLALEVDPTAFESGRHLAAWIGLTPKEHSTGGKQRMGGISRAGNERLRVLLVVGATSVINAAMKPGSKQMTDWLRALLMRKPRKVVAVALANKIARIAWVLMTRGEVYRRPAAPTAAAAA

SEQ ID NO: 120501 - protein, 298 aa, unidentified
MKVAGIEVSYQTLTLVINQNGRLGKPRTLGNTPEEYPALIQILRKARVSRVCLKTMGLYHLDPALVLDGAGLEVMVIAPKAAKRLAETMQVRTRTAAVDAAVLAELALRMPFEPWSRPDASALAIRTCAHHINALNEVRTQTENELHAAQATAATPGFLLAELQQSIAQLEAQLQLLHRQVLDLIAAAEQLQPTFELLVSVTGIGAADAIQLLGELLVLPRDMSAKQWVAMAGLDPRPLQSGAGANKKPRLSKTGNRNLRIALYRPALNATCHDPQVRAYYHHLIETRGLRACLRSLE

SEQ ID NO: 120502 - protein, 355 aa, unidentified
MNQEKYIGMDVHQASISVAVMDVKGKLIMECVLETKAATILEFIRGLRGTLAVTFEEGTSAAWLHDLLKPHVSRLVVCDPRKNALLKDGNKNDRVDARKLAELLRTNQVKPVYHEKHGTRALKELGRSYLTITKDVTRVMNRIKSVYRSWAIPCAGTSVYTSRHRGEWLEKLVEPGVRTRAEHLYEQLDRLEPLRLEARRELLLESHKHAAVKLLRQIPSIGPIRAALLVALLQTPHRFRTKRQLWAYSGFAVEVHDSGEYRSVRGKLQRNRERITVRGLNDNHNKDVKSLFKGAAISASARPGPLHDFYVARVESGMRPTMARLTLARKIAAITLTMWKKGVSFDPKQLDRQAA

SEQ ID NO: 120503 - protein, 407 aa, unidentified
MQPIVKNCAGIDVHKMMVMVAIRKEMPEGGIEVLTREFGTFRKDRELMCQFLQQHQIDLVVMESTGVYWKSIYASIIGRDLKPWVVNARHVKNVPGRKTDTLDSQWLAHLAHCGLVRPSFVPHPEQEQLRLLTRRRDTLVKQIANEKNRLHKTLDDSGIRLGGLISDINGKSGQRMVNALIDGESLQEIIKKADGRLKADRKQLMESMDEKLSPSHLIVLKDIRDHIHFLSEQQQKLEVQILSSVQLWKEAWQLLQTLPGVSEMSAAALIAEIGDDMSQFGGMKEIASWAGLCPGNNESAGKRKSGRTRKGNKMIKTILCEVANAAIKTKSQFKGKYQSLVIRKGHKRSLIAIAHKLIRVIYTLLKRRQPYIDPDTDYEGLMVRKNASRWLHKLEDYGYLKQVQQQA

SEQ ID NO: 120504 - protein, 387 aa, unidentified
MARKRTLSTLDTSIAYEAVGLDLAKEDTAIAAFGPDHEGPYLIDRMPYDKLYELLADMAPTLVAMEPCSGAHQIAEQIQELGHEVMMISGRHVQAWVKDHCNGQKTDLNDAFAILNLAYDRWLTPIRGKTREECRLLALQSSYRQLKGQRTKTMVHVKATLHAWGFPIRAGSFNQKVLHELIDANREAFGDEVVETLHLMINRVRDLDHDIATVLKLLTEATQRDPRASLLRSIPGFGVLTTSRWCAVVGDIARFDTPKQTMAFIGLVPNNRITGHHTETSSGREARGQGKMSKRGDKMLRSLCILGAGALCLMVRNDRLPDCPFVASIKERLASPRPWFKVLVYVAAKLVRIATALLKYGETFSFEKAGISKAVLKQWELEQAKAA

SEQ ID NO: 120505 - protein, 376 aa, unidentified
MKLHGEAFVGIDAAKARNAVAIAEGGRDGEVRYLGEFDATPEAMARLVRKLGDRYEALHFCYEAGPTGYGLYRQILSLGHKCTVVAPSLTPRRPGDRVKTNRRDAQSLARLLRAGELTEVWVPDETHEAVRDLVRTRAMAVADYRRKRQHVTSFLLRYGRFYEGKPSWKGRHLRWLDGQNFAHPAQRLAFQEMLNAVRAAAERIDRLDAALEEVVPSWTMAPVVAAFQAMRGVQFVTATTMVAEAGDLRRFDHPRQLMAFLGLVPSERSTGDTRRRGGITKAGNSSARKALIEAAWTYRHAAGLGRHHQDRQQGLPQQVRDIAWKAQTRLCARYRRLMAKGKRNTVVVAAIAREIAAFLWAIARHVEPMPLSRAAG

SEQ ID NO: 120506 - protein, 351 aa, unidentified
MLIIGLDYHPSVQQIAFVDLETGETGERQLNHNEGEVEEFYRELKQRGISVRVGMEATGSTCWFERLMTDLGFELWIGDPVQIRRQRVRKQKTDRRDAHLLLKLLVEDRFPRVWVPSPDNRDLRQLLWHRHRLVQMRTRIMNQLQAVAMNEGVRRKKGLWGKQGRAQLESFLLAPWATRRRQDLLELLDRLKPIIADLNTAVQEEAERRPEVRRLMTHPGVGPITALAFVLILGTPKRFQCGKQIGSYLGLIPSEASSAGCRRLGHITKQGNTLLRFLLVEAAQATVRCEPEWRRRFMHLALRRDRRIAKVAMARKLAVCMYWMWRKGCDYQQLLKFGSHVGQLETGNGVR

SEQ ID NO: 120507 - protein, 410 aa, unidentified
MRYYLGVDWADQTHAVWVVEEDGTKIAARTVPHTAEGLSEWGRELDEWRAQGIELWAAIERREGRVVDFLLDHGVVVYPVNPKALDRARDRFRQSGAKSDPFDARVLADFLRTDHAHLQALQPSSEAAQELKLLTEDYQRQIRQQTRLVNQLTHTLKAYYPRALEIAELTTALTREFLHAYPTPQAVTALTPRQWQRWARAHHLSEARTRDLWTVLQSPQLPVPAHVVRAKARLMLTLVAQLMPVVAAVGHYREAIEDFFARMPEAQWARTLPIGNHGITAPTLWARLGDAPGRWESFRHLQAHAGTVPVTKRSGKQQRVVHFRFACDKALRYVVDQVAYLSLLSSVWARAYYDQQRARGHAHRHALRALGAKWLKIIFVMWQRQVPYDEQYHLATMTRQQLRQRQERIA

SEQ ID NO: 120508 - protein, 310 aa, unidentified
MDAIYVGVDVSKDRLDVHVRPSGKAFVVSRDGKGLEELVERLRALLPALVAVEATGGFETIVAAAIAGAALPLAVVNPAQIRHFAQAVGKRAKTDPVDAAVIAHFAEAVRPAPRALPDEAARLLSELVGRRRQIIDMIVAERQREKRATNVRVRKSLARHIAVLEKELREIDADIDTLVRGSPLWRAKEDLLASVPGIGKTIARTLIAELPELGTLGRRQIASLAGLAPYTRQSGRWRGKSMIAGGRSSVRSVTFLAALVATRHNPPLKDFYQNLLHLGKPKMVALIAVARKLLTILNAILRDNRPWQNA

SEQ ID NO: 120509 - protein, 366 aa, unidentified
MMIIGCDFHPRFEQISFLLEETGECGRRRLMHPAEAEQFYRSLVGVRVRVGIEATGSYGWFRRLMGELGHELVVGDASRICASNPRRQKTDKRDAEHILRLLVEDRFPAIWQPPAENEQLRQLLLHRSRLVRLRTRVTNQLDGMAKNEGLIVAGGWSRKRRQAVEALPLPGWYGERRKDLLALLDRVEERIAPLDKAVSRAAASNAEACLLMTHPGVGPVVSLAYVLTIGNWQRFPRGKQIGSYLGLIPSEDSSGDKRRLGHISKQGNTLVRWLLVEAAGTAQRYDASWHRQYVRLSMDKHHGVAKVAIAHKLAVRLYWMLRSGQDYRQMMERGSHPSDEDLSLGVRGSHARQSECPGGRSKRPIE

SEQ ID NO: 120510 - protein, 406 aa, unidentified
MSQEKPVPTRFIGLDVHKHYLVAIGVDAELNQVLGPRRVPLVHLDSWMCKVLTLQDAVVLEMTTNAFQLYDDLLPHVHSVTLVHPPHVKLITRAQVMTDKMAALVLARLHAVGLLPPVWVPPLEVRDQRALVAHRAKMVRLSTQAKNRLHAVLHRYHLPLPAGDLFTADNHHWWLGLDVTPVERVRIQSNLDTLAFAQSQIALFEETLAALAAQDERVSLLIQLPGMGLITAMTLLAAIGDISRFPTAKKLVGYSGLGSRVHDSGQSRRTGRMTKAGRRDIRAAMTEAAHTASRTHPHWKAELARLEPRLGHNKAIGAIARKLLVAVWHVLTKGCADRFADPELIARKLLRHTYRLGRTNRPDGQTAAEYVRQQLDCLGLGADLKAIRYGSRTIALPPSRLTSADN

SEQ ID NO: 120511 - protein, 314 aa, unidentified
MRTPVFVGIDVSHAQLDVAVRPGTRFSASNDEPGIVTVVEELRALAPTLIVLEATGSLEVPLTSALAAARLPVVVVNPRHVRDFAKAAGQLAKTDALDAQILAQFAQVMRPAPRPLPDEQTQALAALLTRRRQLVEMLTAEKNRLSLAPRPVRNSVRAHITWLERELLHTDTDLAQTIRQSPVWREKEDLLRSVPGVGPVLTTTLLANLPELGTLTGKQIAALVGVAPLNRDSGTLRGKRTVWGGRAQVRTTLYMAAIVAARFNPVIRTFYQRLRTAGKAKKVALTACMRKLLTILNAMLKHRTPWHPEVAEHA

SEQ ID NO: 120512 - protein, 355 aa, unidentified
MSFKILKNNCCGLDVHKTWIFACIGITDSNKRTVYKQARFSSFTKGLQELCHWLAKYDCTDVCMESTGKYWIPVFNILEKNNIWVTLSHPKYTKPQKGNKTDRKDAKWICDLYMCGMVKPSFIPPADIRELRDLVRYRFKLTCMITGEKNRAHNCLTVSNLKLDDVFSDIFGRSSRSITEQILQHPGETFDVAPFVHGRCKTPIEEIQAAVDGAVSKEQAVKLRQCLNHIDELEMHKSEIEREIFRLSDKYEDILTLIRTVPGFDKNPMTAIQVLSEIGGDMSVFPTAKNLVSWAGCCPHNDQSNHKIKSTRISRAGSYFKPVLVQVANALIKSKKHPEFSTRYRRIKARPWCSL

SEQ ID NO: 120513 - protein, 339 aa, unidentified
MYGKTTADLKAFEAVLRRIMKKYELAKEDMALCYEAGPTGFVLARRLIKLGFECIVIAPSKIPTQSGDRVKTDRRDARKLARLYRAGELEGIHIPSVEDEVIRDVCRGRTDAVNSMACTKKQLLSFLLRNGYRYKGKAHWGEPHMRYLRELVLADPAQKVVLEEYLQRIDFAVKQVERIDGQMEALLQTWSRKPLVEALMGFKGFKRTAAMVIVSEIGHFGRFEHPKQLMAYLGLVPSEDSSGGRRRQGSITKCGNSHARWMLVESAEHYRKPPKIAKGLSVRQEGLSREVKIISWHAQNRLNKRWNKLIFRGMHPNKIRVAVARELSSYIWDLAKIVG

SEQ ID NO: 120514 - protein, 323 aa, unidentified
MSVGQMHILGIDVAKLKLDVALLLPDGKFRSEVIPNTAEGFEKLAAWLERHDAAQVHACMEATGIYWEAAAAFLAEQGHAVSVVNPAQISAFGSAALSRTKTDRKDARLIARFCAERRPSLWDPPPPELAELRALVTRRDALERMRTQEMNRLHVSCPEVRTGIERHLAFLEREINDIDSEIQQKTDGDTRLKKQRELLDSVPGLGVKTIPVLLSFFSGKRFASSRQAAAYAGLDPRQHESGSSVRRKPRISKMGHSFLRKALYMPAMVAVTRTEWGKAFKARLSANGKPPMVIICAMMRKLVHVAVGILKSGKMFDPAMHGA

SEQ ID NO: 120515 - protein, 455 aa, unidentified
MVKQKANKPTAIEIVNISAAAVDIGSRMHMAAVNPDVAEMPVRAFGTFTHNLHDLADWFKSHGVTSIAMESTGVYWIPAYEILEQHGFEVILVNARYAKNVPGRKTDVSDASWLRQLHSYGLLRGSFRPSAQIATLRAYLRQRERLVEYAAAYIQHMQKALMEMNLQLHHVVSDITGVTGMRIIRAIVAGERDLDVLASYRDVRCHASVETIKAALNGNDRAEHIFALTQSLDLYDFYQAKMLECDRNLEAVLDTLAANQDHDLSRLPRVRTKRKQVNTPSFDVRAALFGVLGVDLTQIHGMGPSLSLKLVGECGTDLRAWPSAKHFTSWLCLAPGNKISGGKVLSSRTRRSSSRAAALLRLAAVTIGRSDTALGAFYRRLAARAGKAKAVTATARKIAVLFYNTLRHGMTYQDPGASHYEERYRNHVLGNIKRRAKSLGYDLQKLPNEAEMAVS

SEQ ID NO: 120516 - protein, 461 aa, unidentified
MKKQKGRPAAKVDQGSRLAVIQSDVAGVDIGSREMFVCAPADRGEGREMQVFATTTQQTQECIGWLKERKVRSVAMESTGVYWIPVLEMMESSGLEVLLVDTRPLSRVPGRKTDAEDCQWLQTLHSHGLLRGAYRPSEQISELRTIVRQKAVLVREQADWIRRMHKCLDQMNVRVHHAVTDTQGVTGMAMLRAIVAGERDPRNLAKLRGPGCQKSEAEMVELLTGNWRSDHLFNLKQHVTMYDSAAKQIAVYEEEIQRRMQEITPVGRQDLQAPPLANIEKRKTMKKRDQEGKRQALYRAIGVDLTTIDGIGVETVEVIMSEYGTEMSKFQTEREFVKHVGLAPHRPVSGGKVLKSKRKKQKGTRTAEVLRNAASSLKHSRSALGAYYRRIARRKDSGIAVFAAARKLAGQVYRMLRYGQEYVDIGQAAYDKRYEETRIRALQSTAHQMGFNIVPREPVTV

SEQ ID NO: 120517 - protein, 448 aa, unidentified
MVMQEPEEIPDEGHERIVERVAAIDVAKVSGKVCTRTPHPQGGSRRVTKVWEVTATLAAVEELGDHLMREQIQAVTLESTGDYWRIWFYVLEERGLRVQLVNARDVKHAPGRPKTDRLDAVWLAKLTEKGLVRPSFVPPHEIRALRDYTRMRIDLIHERTRYWQRLEKLLEDALIKISSVSSTLNTLSTRAMLQALIAGERDPRLLAELAKGRLRVKIPALTEALNGRFDDHHGELAGLLLAQIDGLDAQIARLTARIEALITDMPDVRPAELNSDAHPDKAASSAMDTVARLDEIPGISPEVAQVILAEIGLDMTRFPTAGHLASWAKLSPQTIQSGTRSRGAAVGKGNPYLKGVLGTAAVVAGRTDTFLGERYRRIAKRRGRLRAVVAVGRSIMVIIWHLLSDPHARYRDLGSDYFLTKIDREKKARTHIRQLQALGFTVALTPAT

SEQ ID NO: 120518 - protein, 530 aa, unidentified
MPSPTLDYDPGLLERVENLTVEQLVSQSGVEAFDKTVLPGAARCDVGRLGTNRMDPLLDGLGDELGAIARRERVLPRGYGHARSPKIAQRVAITGLRSQQWFCRTTPLRRPAMTATDTTALTLLVAIDISKHRHEVLIGVPGKKRRRRMTILNTLDDFQRLSATLASYDLPVRIGFEATGNYHRTLAHHLGRAGFELKLVSSVGLARTREALHNSWDKNDPKDAQVILHMLEIGAVQFFHDPMMVGTVDIQELSKTHEIVSRSKTELWHRILTHYLPLYFPEAERFHRSARTDWFLAFLEKYPSPHMISAMSREAFIADAWDVVGRKVSKEQLLSDIYATAVDSVGLPVHAESDAVRMFRLVLAEGRSLVRQRDAIEARAVELLSDLPDYQLLTTIPGVGPINAMTILAEAGDLRRFRHHRQFLKFCGMDLATVQSGMFRGQSRISKYGNARLRRTLWMAGQTAVLKRTNSFRDKFERYISKDRHNAHLRRKAYTAIAAKMARTVHAVVNHGEPYRPFFEGVSPGGRTSL

SEQ ID NO: 120519 - protein, 344 aa, unidentified
MGEVSTIGLDIAKSVFQVHGVDGAGAVVIRKRIGRSKMLEFFTDLPPCLVGIEACPSGHHWGRELSGLGHTVKLMPPSYVKAYLKRSKNDANDAAAICEAVTRPSMRFVPIKTKQQQAALMLHRTRQLLVRQRTMLSNALRGHLAELGIVSAKGRHGTAELLKIITDVEDDRIPPAARGILDVLARQYGAIGAEIGSIDKSILALHRSCEVSRRLAEIPGIGPIVATALVAEIGDWKAFRSGRNLAAWIGLVPKQHTTGGKDRLGSITKQGNRYLRWLLVIGATAVIRYAQKHGTKNRPWLGRLMERRPAKVAAVALANKIARMAWAIMVHGDRYKEPKLLMAA

SEQ ID NO: 120520 - protein, 487 aa, unidentified
MSLGDIPKHENTCESDYDRQGLRGMEAVTLWSSKPATQSGSDIVANPKWSPRFGESTQGRVFHLRCPPAQEEGGSIMEEVYACCAGLDVHKESVEACVRRMEPTGGLHQQTRHWGTMTQDLRAMADWMAAQGVTHVAMESTGVYWKPIYNLLESRFTVLLVNARHLKQVPGRKSDIRDCQWIAQLLQHGLLKGSFIPPRAQRELRDLTRHRTQLVEEKARTVNRIHKVLEDANIKLASVASDILGVSGRAMLQALIEGQHDAVQLADLAQRQLRGKIPELEKALEGQVTAHHRFMLQLLWKQLAQQEEVIAALDVRIEEQTRPFADEIERLDAVPGVDRRVAQVVLAEVGAEMKPFPSAQHLASWAGMCPGNEESAGKRLRRSIPPGNRWLKRTLVQAAWAATHARNSYLAAQYRRLAGRRGRKRALVAVGHSLLVIFYHMLKARASYADLGGDFFDRLEPQRLTRYYLKRLEALGHKVTLESSIAA

SEQ ID NO: 120521 - protein, 343 aa, unidentified
MEHFAGLDVSVKETSVCIVDETGKIVREVKVASEPEALLAVLKNPAYHFKRIGLEAGPLSQWLFSALAEAGLPVICVETRHMRAVLKAQINKTDRNDARGMAQMMRVGLYRPVHVKTLRSQKLRMLLTHRKLLQSKAIAIENDLRATLRNFGLKVGGVGTVKFEARIKELVEKAPDLMMLVEPLLVVRRALREQIGILHRRLLAIVRDDDVCRRLMTVPGVGPVVALTYRATVDVPVRFRNSKAVGAVFGLTPSKYQSGEINRTGAISKCGDEMMRAMLYEAAHILLVRSAKWSWLKVWAMQIARRRGLKKAIVALARRLAVIMHRIWVDGTEFRWTREAAAA

SEQ ID NO: 120522 - protein, 429 aa, unidentified
MNLRPIVGIDVGKYFSEMAILSPSNEVVARMKINHNSYADIERAVELLKKAEKDFASRPFVVMESTGHYHKILFHSLCKNGFEVSIINPIQTDSIKNIGIRKVKNDKVDARRIALLYRFQELKATNIPDEGIDCLRNLCREYYKLSDELTAYKNRLTGIIDQVMLNFKDVFPDTCSKTAIAVLEEYPTPTLIIKADKNKLTSLIQKESHRSLEWAAAKYELLVLKAKEFGQLSIDNSANVTMLGIYISMIKSLQQNLGKVLKAIQQLVANNLSKDIPTLSSTLKLLQSIPGIGLLSAATIIAEIGDFSAFSKPGKLVAYFGIDPSVRQSGEFTGTRNKMSKRGSRLLRRVLFTIALANIRTKRNKEACNPVLLKFYKQKCQSKPKKVALGAVMHKLICIIFAVLRDRKPYQLRTPEEHARMLAAKYAAA

SEQ ID NO: 120523 - protein, 366 aa, unidentified
MTMMTDQLREVIAGVDTHGETHHAAVIDPLGRHLADEEFPASGAGYRDLLSWLGSHGTVAAVGVEGTGAYGAELARVLARGGLRVVEVDRPDRKTRRLKGKSDPIDAYAAATAVASGRATGVPKARDGIVEAIRALRVPRRSAVKARTQAINQARQLLITAPEALRAQLRGLSAIELATACVRLRPGGDCSAPLGATKAALRRLGRRILILSEEITELDAELKTLTAQAAPTLLGRMGVGPDVAGQLLATAGDNPDRLRSEAAFAHLCGVAPIPASSGRRDRHRLNRGGDRAANHALHTIVLSRMRWDDRTRVYVQRRTEQGLSKKDIMRCLKRHIAREIYRALTDDLYARQHPTLTTLTDLAPAA

SEQ ID NO: 120524 - protein, 458 aa, unidentified
MAHRKKKIGAQLVEDEEYQLRYERVAGIDVAKGKADVCTRLPPAREGGRRVSRTEEVAATVTVILALAVRLLADGVELVSMESTSDYWRIWFYVLEAAGLNVQLVNSSHARQLAGRPKTDRLDAQWLARLTEMGLLRPSFVPPAEIRALRDLTRTRLQLVHDRTREWQRLEKLLEGALVKLSSALSSLARVKSARVILEALAGGERDPRVLAGLAARQVRAGRAGIEQALEGMLYGDHHGKLTRIHLDHITFLDRSIAAIEDDIAAALDAIPAAQGIDAAGTRSPDPGPGAAVLPAAERLAEIPGVSLDLARAIIAETGLDMTRFPTAAHLVSWAGLTPVARQSGPRSRKPGKGHGDSYLRGYCTQAATGAATTDTFLGERLRRLSRRLGGSRARCAVGRSILVIIWHLLASPEARYTELGPGWHARKTDTDRRTRSLLNQLRALHPDSDITITEPAA

SEQ ID NO: 120525 - protein, 353 aa, unidentified
MAKRREKRECRAVVLEPDAAGVDIGAEEIYVAVPPDRDEESVRMFSTFTCDLHALADWLVQCRIRTVAMESTGVYWIPLFQILEARGLEVYLVNARYLKSVPGRKSDVSDCQWIQYLHSVGLLRASFRPSMDICAVRSLWRHRGSLLQMASEHILHMQKSLSQMNLQIHHVPSDITGASGQAILDAILAGERDPVQLAQLCNCRVKSPREKVAKALEGDYRPEHVFTLKQSLDGFRYYQKLIAELDREIQRLMQTLPSAVEAGQEIPRRKKHSAFQRQGNDPGFDLRGPLYRIAGVGLTDIPGGSAVTAQVILTEVGPDLRRFRNASAFAWWLGLCPENRVSGARFCPVKRAK

SEQ ID NO: 120526 - protein, 339 aa, unidentified
MKKVFIGIDFSKLKFDAAIYSVDTKAIVATEVFDNEQSGYVDFLQWVKENTRFQKSGMLFCGEHTGYYSGNLSVFLYESGYDMWLVSGLEIKLTQGIKRTKTDRVDACRIAEHAYRYQDKVVLFQPVSKSLDEIRELLSYRERLVETRKVLTTSAKEMKRVKDNASCDYIYRDSIEYIKTLNASVRDCEKRIEALLKQDISLKTNYKLVSSVVGIGLVNAALILVATDNFTKFDNPRKFGCYCGVVPFEHSSGTSVRGKTRVSKMANKHLKTKLTLAAQNAVRFDPDLKEYYQRKRSEGKNNWLVLNNVKNKLIHRIFAVVRDGQMYEKQYVHPLKQVA

SEQ ID NO: 120527 - protein, 344 aa, unidentified
MKINLLGIDLAKNVFQLCALNQANKILFNRSIRRAHLRSSIARLEPTTIAMEACSSAHYWGRAFEDMGHQVVLVPAQHVTPFVRGGKSDARDALAICEAAQRPNLHRVPIKTIEQQDIQLLHRLRQRQVQHSTALANQIRSLGREYGVIFPSGIKSLISQIPSVLEDGDNELSGVARHALNDQYQCLRQTRQAMVTFLHQIEQLAAQHPAYYDLQVLPGIGPMTASAYIAAVGNGRQFKRGRQVSAWLGLVPRQYGSGGQIQLKGMTKSGDRYLRTLLIHGARAVITRGLKRRPLLAQWVQPIIDRQGFNKGVVALANKLARISWVVLTTGEPFDMKQAFKPAQ

SEQ ID NO: 120528 - protein, 353 aa, unidentified
MRIVVALDVHRRQITYKTLDRESGEVRRGRIAAATRGAVREWLERFAGREAEFVLEGTTGWRFVVEEIERAGHRAHLADPAETASKRGRKRRAKTDNADCDLQLKLLLAGELPESWIPPAHILELRTRVRTRKLLIDQRTAWQQRLHAQLLHQGVAAGLKPRTRAGREALARAELSPAGRELVALALRTMDAIDRELAPLDRALRSFAHRQPACRALIANLYGVGAISATAILAELDDCRRFASSDDAVRHSGLDVTVHQSDNKRSAGHLSHQGPELLRWALFEAAHQSARRGSPDHDYYLQVARRIDHNRACLSVARKLCRRSHHILRELGDAALAPVERERQTDEAIQAAA

SEQ ID NO: 120529 - protein, 350 aa, unidentified
MTIVETRAEIRAITGGVDTHADVHVAAALDPIGGLLGVREFPATTAGYGCLMSWLGGFGTVALIGIEGTGSYGAGLARHVTAAGVRVVEVDRSDRQDRRRQGKSDPLDAVSAARAAQSGRARGASKGRDGAVEAIRALMVAKRSAAADRTQTINQARALILTGPDDLRARFTGHTAAALVAGLASLRPRPGSTIGYATRIALRELGRRAEFLDGQLERLEELIGPLVAARAPGLLALFGIGPHTAALLLIAAGDHPERLRSEAAWAHLCGAAPIPASSGKTVRRRLNPGGDRQANHALWRIVFTRLGSDPATRAYAERRTAEGKSKKEIIRCLKRYVAREVYPHLRTTAG

SEQ ID NO: 120530 - protein, 382 aa, unidentified
MKKATTGVRRFVGLDVHAQTIAAAMAEKQEAARGLGTIPNREESVRKLVKRLNEGGAWTACYEAGPTGYTLYWQLTKLGIPCVVIAPTLVPTKAGDRVKTDRRDAERLASSFRAGELTPVWVPDATHEALRDLVRAREAAKQDQLRARHRLGKYLLRYGKRPPQQLRAWTQNYLEWIKGKVTFDQRSQRVTLEDYLSEVEHAGVRIARLEKAIDEAVEQAPESMRELIQALQALRGVAKVGAVTIVAEVGTLTRFEHPRQLMGYSGAVSSEHSSGGKIRRGGITKTGNAHLRRVIVEAAWSQRYKPVLSLAMRKRQEGLSAEVQEIASKARHRLHSRYMRLLAKGKAKQEVVTAVAREMLGFIWAIGVSVERAQEQRAKGAA

SEQ ID NO: 120531 - protein, 412 aa, unidentified
MRRVIGIDIHRTFGEVVFWEDGRLRHAGRVDMTRTALEGFGRRLLATDEVVIEATGNCMAVSRVLSPFVKRVIIANPLQVKAIAHAHVKTDKVDAGTLASLYAAGYLPEIWTPDAATERLRRLVARRYQVVRHRTRIKNEVHAILHAHLIPKCPHADLFNGRGRDWLARQAVPDDERGAIERHVRELDRLAEDLAFLDREIAESALGDASIERLLTITGVNLTVAAGLMAAIGDIGRFKSPQKLVSYFGLNPRVRQSGLGAAHHGRISKVGRSHARAMLVEAAWAAAKAPGPLHAFFVRIRARRGHQIAAVAVARKLAVLCWHLLTKEEDYLWARPALVANKRRSMELQAGRPQKKGNKRGPAYAYNVKALREQEMRIAEQAERSYEHFVDQWRTRPSQEKARGRLKPARRE

SEQ ID NO: 120532 - protein, 347 aa, unidentified
MMNLYQQRHQFYCGIDLHANKMYACVVDHDGRKRLHQNFHTRDTATFLERIKPFRNDLVVGCESTFNWYWLCDLCEGKRIPFILGHALYLKAIHGGKVKNDKVDSEKLAYLLRGGNFAVAYAYPKDWRATRDLLRRRAHFVRRRGQTLTHITCTHHQYNLPPSKRLQYASNRDGVAEAFSDPDIRFSIQSDIRMLGHYDDVIRDLERHLEQSAKVHDPNSFFRLQTIPGVGRIIAMTMLYEIHNIRRFKEVGDFLSYSRLVKGQHSSNGKNYGSPGKKIGNPYLKWAFSEAVPLLKRQCSRAKAYCNRIENKHGPARANTLLAVKLGRAVYFMLRRGQVFDINRITG

SEQ ID NO: 120533 - protein, 349 aa, unidentified
MPRTSTVHAVTVIGMDMGKNTLHMVGLDSRGAIVLREKVSRGRVALRFANLPPCLIGIEAGMATHYVARELAALGHDVKQVPPTYAKPFRHGHKNDFRDAHAVAEAVQRPTTRFVPVKTNDQLDLQALHRVRSRLVSERTAVINQIRGFLLERGIIVRQGLRFLRQLLPDILAKRTDVLSPRMVRIVIDLAGDWRQLDDRIETVTHEIETLAKSDDSCRRVMTVPGIGPIISSAMVAAIGNGAAFAKGRDYAAWLGLVPKQMSTGDRTILGHISKRGNGYLRMLFIQAARVILVRPANWPKHGFGAWLVRAAQRLHPNVLAVALANKLARIAWTVLAQERSYEARVTKQ

SEQ ID NO: 120534 - protein, 467 aa, unidentified
MPRVRAHPQRRGPAVTLPRELQQVNLNAAGVDIGAESHYVAVPEGRDADGQDVRAFGAFTADLAAVADWLTRCGVETVAMESTGVYWIPLFELLTERGFEVMLVDPRRLKYVPGRKTDVLDCQWIQQLHTFGLLAGAFRPTDQICVLRSYLRQRAMLVTYAAHHIQHVQKALEQMNLKLAHVVSDIAGLTGLAIIRAILAGERDPRVLAQLRDRRCKADEATLARALEGTWRPEHLFALRQAVELLDFYRGQIATCDAEIEAQLGRFEDKSGGQPLNAAARGRKAGRTALSFDARPPLQRLTGVDLTRIEGIDAATALKVVAEIGLDMTRWPTDKHFASWLGLAPGNKVSGGKRLSGRTKPSASRAAAALRLAASTLHHSRSALGAFYRRLKGRLGAPKAITATAHKLARLIYSMLRFGTEYVDRGQDYYERRYQSRVVSQLMRRAQELGYTLTKTADFSSPAGSPA

SEQ ID NO: 120535 - protein, 315 aa, unidentified
MLIIGCDYHPGFQQIAFVDTETGECGERRLTHREEAEQFYQDLKQRNAAARVGMEASGHSRWFERLLRDLQFELWIGDAAEIRTKRVRKQKTDRQDAQLLLRLMMEDRFPRIWVPDAANRDLRQLLWHRHRLVQMRTRVMNQLHVVPLNEGLRRKKALWRPAGRKELESIALAPWASRRRQDLLDLLDQLTPKIQDLTHALEEEVDNRPVMRLLMTHPGVGPLTALAYELVIGTPERFHCGKQLASYIGLVPTEESSGDRRRLGHISKQGNVLLRFLLVEAAQVTVRSQPEWRSKFFHLAMRRGRKIGGWPTHPL

SEQ ID NO: 120536 - protein, 411 aa, unidentified
MDEGAVVAVPGQVDVWIGLDVGKETHFADVLDNDGERLFARAVGNDQGDLEALLDRAAGHGMPGLVIDQPGSIAQLALAVAARRGVPVAYVPGLVMRRAADLYPGEAKTDRRDAYVLADTGRTRRKQVHWLDAASDELLASLRVLNGFDIDLAADQNRLANRLRDALTATSPALERALGQRLHQPGVRDLLARYPTLTALRAASQSRIERTIKARSPRIAAKVTAAIAAVLAAQDVTVPAEATTGRVIAELASELDRVCSRREALAGEIEETFLAHPSGELLATMPGIGPRTGARILAEIGDGSAYANGSKLAAYAGLAPVTRQSGITLNAEIRSRRGNHRLKNAMFLAAFASLRDPASKAFYDRKRAEGKRHNAALICLARRRCDVILAMLRTHQPYQPARPTSELADAA

SEQ ID NO: 120537 - protein, 403 aa, unidentified
MKHVIAFDVSMGKSYMVIYNAQKQCVFESEIKHSKPDFKKLQEKIHNLTDETGESPKIVLEATGIYSRQLERFMQNNQYTYCLLNPLEAKIQCDSLRIHKTDRSDAHRLALTHFTVTRRVSTETDNLFYQLKSLSRLYSELDDELSIIRGRMHKVIQLTFPELERIFTSKSDLFLNFVQLFPHPDCVLGLSKTIIKNRIRANTNKKISNITAEKKAIQILEIAEICYPAVSQNDVLCDQLKLYARRYQELLHQKESCISKMVYVAKQRAEYDIIRSLPGIGPNTAVRLMAEIGDITRFNNNKQLNAFAGIDIRRFQSGKTFFKDKINKRGNKHLRKLLFLIIQNMIKQRRYGQNHIVEYYDKLKTQPYNKCHKVASIACVNKLLKLLFYLITHNMHYDYRLTA

SEQ ID NO: 120538 - protein, 387 aa, unidentified
MAIANDLKKSLVTLEQDSTLIAVIELSQSSWVVGGVVPGIEREPAKKLEADPEAVVKLLERWREEAARGGRRISRIAVAFEAGRDGLWLARWLRARGIEAHVIHAASIAVPREHRRPKTDRLDVQLLKRAFMGWLRGEAEHCRMVAIPTLEAEDARRPSRERERLKAERTRLVNQLKAAFARLGIRGFKPTLRKAPERLAGLQTPEGTPIPPNGMAELRRAMERLALVKAQIKQLEAVRLERLEQAPNDHPHAMVRLIARVIGIGIESADTLVHEILSRGLRDRRAVARYAGLTGSPDESGKRRRDKGLARSGNARVRRCMLQLAWRFLMFQPDSALARWYRARTEAGAKDAKKTMIIALARKLLIALWRYATTGVPPEGVLMRAPA

SEQ ID NO: 120539 - protein, 416 aa, unidentified
MSEVTVGIDWGAQEMSVCALDEAGKRLLKKDVARTGEKIEGLVERLLALVDGDPKRLKVALEMPRASVIEALLARGVSVYTINPKQADRFRDRHTISGAKDDSLDAFVLADALRSDTHLFRLLRIEPEDVVLLRERSRAYEELTGQAVALGNQLHALLSRYYKEIIDLGVSLHETPWVWRLIQVAPNADKLRAGKTTTVLKRLTTKKGPKLPQDILARLEAARRGRPLPMTRATRDALTERVQRLLPILRATHRQRRECQAELRKLVNQLTKEEDESERPSDMAILMSMPGIGYRIASVLFAEASRAIQERKLQPLRRLAGIAPVSRRSGGRAKTPVVSMRRAAHRRLRDAVHNWMGIAIRYDERARALYERQRAKGNTYARALRAVADRMLAVLVAALRERRLYDESQRRLPAPS

SEQ ID NO: 120540 - protein, 428 aa, unidentified
MSYKIAGIDVHKKMLAVVVSDVEIESEYQFERRMFNSNPEQLRSLAAWLVEQEAKEVVMESTAQYWKPVWGALERYWKPMCEKREGARRKSGTLHLAQALSNRGRRGRKRDFVDAERLVKRLVARELTLSFVPDAEQRLWRTVTRKKYQLRRDRVRLHNQLEALLEEAHIKLSSLVSDLLGVSARRMLKALADGETNPAALAVLAHERLRATPEQLCDALGACTDLKPVYRQLLKMALEQLQLLEQQIRQLDQELATLLHPHQDAVQRLAEVPGLGVDSAQQIIAEVGPTAATFPSGEQLSSWVGACPGDEESAGVNYSHRSPKGNRHMRRLLNQAANAAVKVKGSIFEIIYRRCVPRLGHNQAIGLIAHRQCRLIWLILHKGTLYEERGPAVTKRSKYQRTWRMIRQLQQLGYRIESPNLQASQAQA

SEQ ID NO: 120541 - protein, 414 aa, unidentified
MSEFEFGALVGLDWGDTSHQVAVWDEQRQMCTSERIEHTPAALHAWIEALHAQVGSARIAVAIEQSRGAVFDALSSYPSVTLYPINPRSAARYREAFHPSLSKDDPTDAASLLDLLRKHRNELRPFVPEDASTRLLRLLTEDRRELVDQRTQHVQRVTDRLKTYYPQALRWAGALTTAQACDFLERWPTLEAIQRARPSAIRTFYERHHHAAAWIDQRLAEIRAAVAFHDDPVITDTAVLLIQSELAQIRALNASIAAYDDRIAAVFAAHQDASIFESFPGAGAQLAPRLAAAFGTDRQRVESAASIATRSGIAPVLRRSGKTATVHMRWACPKFLRQTFHEYARVSIGYSVWARAFYKQQRARGHGQHEAIRTLAYRWIRILYACWKNRIAYDESRYLKQLAARGSSLTSAAA

SEQ ID NO: 120542 - protein, 391 aa, unidentified
MPSAFCWVIDAEWLSSTQSNGMDPFSPTGIHVPDWRCQSSVIEKKGTIMKLIRVGVDLAKNVFQLHGVDRDERPVWRRRLSRAEWLKALQETLEPGCEIGMEACAGSHHWARLLEAKGYRVKLIAPQFVKPYVKSNKNDANDAEAICEAMSRPSMRFVTVKSVEQQDIQAAHRIRSGLIEARTAKTNQIRGLVSEYGLVAPKQIASLRTGIPDWLEDAENGLTARFRRLLHGLWQDLQALDTRIGELDREIQQIARSVPAAQRLQQLRGVGPMIATALVAAVGRGEQFANGRQMAAALGLTPRQQSSGGRERLLGISKRGDSYLRMLLIQGARSALQTAGNKTDRLSKWITSLCARSHPNAATVALANKTVRIAWALLSRESDYQIDYVAA

SEQ ID NO: 120543 - protein, 340 aa, unidentified
MFIAIDVSRSKWAFNVRWEGQERRHFTTPYGIEHVQALVGEYEGCELTMAYEACGFGYEIAWWLRERGIRAVVVPPSTVEKAPGSRVKTDRTDARALCRKLEKGDLKSAYIPTRSEHEQRQLSRSYTQVVKDRKRQQARVRSLMQEHGRIGPAPAQGWRAYQRWLATQELPEPVALSVRQLLELREAAERRTTRLAEALLELAERPEHCVVVQALCAQKGVGAFTAIRLVLEIGDIHRFTSAESFVNYLGLTPSEYTSGEEVKRGHLLKCGPGIVRAWLIECAWASLRGKKPDPKLYACFDRLAARPGRKRAIVGVARRLARKLRAVWLQALNSQSPPAA

SEQ ID NO: 120544 - protein, 315 aa, unidentified
MEAAVWVGIDVSKARLDVALGAEGELFEVANDQRGIAALLARLSQPALARVVVEATGGLETALVAELGAAGLPVVVVNPRQVRDFARATGQLAKTDALDARLLARFAERVQPPLRALPTPAERELKAVVARRRDLVEMLTAERNRLGSAPKVLHREITAHIRWLEARLKERDRDLDRKLRGSPLWQEKEDLLRGVPGVGPVLCATLLAELPELGRLDRREVAKLAGVAPLNHDSGRLRGQRTVWGGRAPVRAALYMATLSAVRFNPALKAFYRRLRSAGKPPKLALTAAMRKLLVILNAMLKHRTPWSPPCPVAL

SEQ ID NO: 120545 - protein, 343 aa, unidentified
MQTVTTIGLDIAKSVFQVHGVDGAGQVVIRRQLKRRYVLAFFQKLSPCLVGVEACASSHHWSRELQALGHTVRLIPPAYVKPYVKRQKNDAADAEAICEAVTRANMRFVPTKTPEQQSGLVLHRARHLFIRQQTAVINAIRAHLAEFGIVAPVGRHGVEELLNVVADPNDNRVPEIARACVAALGAQLRRMKEQILEFDRLIRAWHRSNEMSMRLEEAPGVGPVLATALVAAVADPKSFRSGRNFSAWIGLVPKQHSSGGKNRLGNISKQGDRYLRGLFVAGALSVIRYAKIHGTKHRPWLTALLARRPTKVAAIALANKIARMVWAMMARGERYKEPVALAR

SEQ ID NO: 120546 - protein, 408 aa, unidentified
MEVVHERCAGLDVHKETVVGCARVAEGDAVRREVRRFATTTAGLLELADWLRQAGCTHVAMEATGVYWKPVWHILEGESELVLANPLHIRNVPGRKSDINDATWIADLLAHGLIRSSMVPPGPIQALRDLTRTRKQLMREVVQHKQRIQKVLEDANVKLASVVSDVVGESGRRMLKAIIAGQTDAKKLAALGSERLSASRETLAQALHGKVTAHHRFLLKQHLQMIEHLEQTVREFEAQIEAALAPFRAAVERLMTIPGVSATAASVIVAEIGVDMSYFATAGHLRSWAGLCPQLKESAGKIMSRRLRYGAPWLKTVLVQCAWAASRSKNNYLHAQFLRLRARRGPKKAILAVAASILTTAYYVLRDQVPYRDLGPLYFARLDQDRTAQRLARRIQELGYEVQIRKAA

SEQ ID NO: 120547 - protein, 342 aa, unidentified
MGEVSTIGLDIAKSIFQIHGVDADGVVMIRKRIRRAKLLEFFAALPACLVGIEACPTAHYWSRRLQILGHTVKLMPPSYVKAYLKRSKNDANDAAAICEAVTRPSMRFVATRSEEQQSGLMLHRSRQLLVCQRTMLSNAIRGHMAELGIICAKGRNGTAELLRIIADEHDDRIPAVARLSLDVLARQYTVVRAEIVAIEKRIHAWHRSCEESRRLEEIPGVGPIVATALVAAVGDWKEFTSGRSLAAWIGLVPRQHSSGGKERLGRISKQGNRHLRWLLVAGAMAVIRYARQHGTKRLWLARLMERRPIKVAAVALANKIARMAWAMMVRGERFKEPKLLPA

SEQ ID NO: 120548 - protein, 401 aa, unidentified
MQVTRIGMDIAKQIFDLHRVDRRGKVTLRKTLRRERVLEFFAQLKPCEVGMEACAGAHYWHREISRLGHTVRLLSAHKVKPYVDGNKNNRHDAAAICEAMSRPSMRFVQPKTTAQQDLQTLHRARALLVRDLTALSNQVRGLLHEYGIVMRKGAAALRRVVPELLTGDDERITAVLKAVVAEQFERFKYLTLRIDRYDRQIGELCKQDQRCQRLLKVPGIGPLSATALVAAIGNGHEFKNGRHFSAYLGLVPGHSNTGDKTVMLPITKRGNRYLRTLLIHGGRSAVYAARRRSDPRSIWLNRLREISCYNVAAVALANKNARVAWAMLRYGEDCRASRAHRQSADLAAARSARPANRALAFASHRARPAGQRREHFSAPPSVQTKGGAKNAKAESKKARQD

SEQ ID NO: 120549 - protein, 312 aa, unidentified
MTRIERYVGIDVSKARLDVHVRPEAEVLVFANDEAGIAALCAQLQQATGPCLAVLEATGALQERAAAALCAAGIFVAVVNPRQVRDFARATGRLAKTDRLDAAVIAAFAEAVKPEPRPLPDEARKALIDRVTRRRQLVEMRASEKIRRSQINPKLRSSLEAHIAFLDKEIAALDDEIGTSLRHSPVWRSEDDLLASVPGVGPVLRAALIAKLPELGQLTRRQIAALVGVAPINRDSGQMRVKRTIAGGRADLRTLLYMAALTAIRCNPTLKAFNARLRAAGKPSKLAITACMRKLITILNAIIRNKSPWRCA

SEQ ID NO: 120550 - protein, 354 aa, unidentified
MATYYIGADLHCNNTELAIESRGKVVRRYSVPTTIRAIGEVLDSLSGKKHMVFEEGPMAGWLYRNLVHKVEQITVCDPRRNKLIASDGDKDDKIDAAKLAALLRGGYLRAVYHSLDEGRVAFKSWVGLYDGRVKDATRNINKVRACCRMCGIKVPRAALRDVGFRQKWLCTLKDESVAEQLRILWIGYDATATQSRLAKKQVSRLAKQYKIIGYWSELPGVGLIRAATIFAYLDTPRRFRKKNSLWKYCGVGLQRQASGTDRQGRVRPARLKMAWAVNKRLKNAVMGAATSAIRCRDNVFRRDYERMIRDGMRASNARHAVARKMVTVMWGMWKHNCRFDERFLLKETCSLCNE

SEQ ID NO: 120551 - protein, 335 aa, unidentified
MNVAGIDVDSRTLKVVVRRQGKNEKVKVYDNTALGHGDVVALLRRARVQRVCLEATGSYHIDLAVALSDGPDLEVMVLNPKVAKRFAESLGQRQKTDAVDAGVLAEYAERMPFSAWVRPAEEVLALRALTRRVTALTKQRTQAKNHLHAARAARSTPALVLEDMALSIAQLDRQIERLRDAALALVRQHKGLARTLALLSSAKGVGVTSALQLMGELLVLPTCLTARQWVAMAGLDPRHHRSGHSVDKPPRLSKAGNRYLRLALYMPALSACRHEPHVRAYYQHLIVRRGLKKLQAVCAVMRKLLHAFHGMLATQTPFDGTRFTAVRVEPAAALA

SEQ ID NO: 120552 - protein, 444 aa, unidentified
MFFWFSTIYFITRVVSCFLSSKNPTIILHYEDTLIAGVDIAKESHYARAFDYRGVEYGKYLRFENNREGITKFLRWAKDLMERHKKNKLIVGIEPTGQYWLCFAQYLKDNNIKVVLVNPFHVKRSKELDDNSPTKSDKKDPKTIAMLVKDGRYVEPTIPEGVYAELRVAMDIKDRLNKQIGMTKNQITRWMDIYFPEFNTVFSDWEGKAALITLREFPTPEKIAKKSAEEIISIWKKEVQRGVGEKRAIKLIETAKESIGKKQGIKMAEYEIKTLIEQYEFLKKQIEEIEKKMEELIVEIPGVKELLEIKGIGMNTVAGFIAEVGDIEKYEHPKQIQKLGGLNLVENSSGKYKGETTISKRGRKRLRRVLFTAVMALVAKNEEFRELHKYYTTRAQNPLKKKQSLIVLCNKLIRIFYVILKKGVKYDPIKMIKDIKRPALQEAA

SEQ ID NO: 120553 - protein, 361 aa, unidentified
MRTITIGVDLAKLLFSICEVEPSGRVLQRRDLRRDAFAAWLAQLPPDTIVAMEACSGAHHWARRCLAYGLEPRLMAAQFVKPFRKSCTTKNDRNDAEAIATAARQGNMRFVPVKTVDQQARLAWHRVREGYKTEALAIGNRLRGLLAEFGTVVAQSDHALRRALADLKPSSEMPATMLTLFDDLNRHWQQVRERIAECDQRIAHHAKLDDRSVRAQQIIGIGPLTADAVVATVGSAREFKNGRQMSAWLGLTPTQHSSGGRSRLGAISCRGDSYLRTLLIQGARSSLQRANAVSRERATPEQLWIQSLSTRMPFGKLLVAIANKHARQLWAMLAREERYDADAWARHPMAQRPKAARAATG

SEQ ID NO: 120554 - protein, 344 aa, unidentified
MQHTTIAVDLAKSVFEIAVSQRPGKVAERHRLSRSRFLAFFVQRPPATVLMESCGSAHHWAREIEALGHQVLLLPPHRTRPYVTGNKTDRADAKGLLEAHRNEQIRPVPIKSTQQQALAGLHRLRSAWTAARTARINTVRGLLREFGITIPAGARQVVPHLQRLLVDSDSDLPAALRPALEDAGREIIDLEGRLRSVERQLRALGRQMPLVRRLRTIPGIGPITATALVALVGDVQRFPSGRHFSAYLGLTPREHSSGPRRKLGAISKRGDVYLRMLLTHGARAVLRSAKLREHPGRLRAWALAVESRRGHNKAAIALANKMARVVWAVWRRDVEFSDEVAPAA

SEQ ID NO: 120555 - protein, 377 aa, unidentified
MTKTHHKTGQPVLVAIDIAKHRNEVLIAVPGRRRRKRLTVRNVREDIDRFVETLTAFGVPVQVGFEPTGDYHRPLAWRLHQAGFELKLISSLSLARTREAMHNSWDKNDPKDAQVMLHMMQTGLTQIWHDPLVHGVNDIQELSKTHAVISQTKTEFWHRLRTHYLPLYFPEAERFMGNSRSDWFLAFLEQFPTPGSITCMSEDAFIEAAWGVVGKKASIARLLADIYATAADSIGLPVDPETPAIRMFCLVLGQGRHLIAQRDQIEQQASDLLGTHPDFVRLRTIPGIGPINALTILAEAGDLRRFGHHRQFLKFCGFNLSTQQSGIFRGQTKLSKFGNARLRRTFWMRDRSPFGSARTASATSMKDTSPEITAIRT

SEQ ID NO: 120556 - protein, 335 aa, unidentified
MKIEEIVGIDISKQTFDAFIESKELHSTFENTPGKFEDFKKWLEKNIGKDLSGVIIVMEHTGHYSYQLEQYLHAQELVFSKVGGLEIKRSLGLARGKSDKIDAKRIAEYGADKKKKLKVTAEEDKVAFKLKNLISLRDKLVRDKAGYQARMKEQQTCLGCADDDPLLKIQASIISSLEERVKELEEMIQQLIRSNEPTSKNYDLLTSIKGVGPVLATYTIAYTGNFTRFKNPRQFACFVGIAPFPYKSGTSVKGKTKVSPLANKKIKSILYLSASSAAQYNGELKAYYKRRLAEGKTEMSTLNVIRNKIVARMFAVVRKQNKYSAEIPTTKNLTN

SEQ ID NO: 120557 - protein, 369 aa, unidentified
MPHVTSIGLDVHARSVAAAAFNPFTGEVVHRDFGTDAAEIAEWALGFEDPRACYESGPTGFHMARELRALGLDCAVAAVSKMQRPAADARRKNDRRDAEFIARMLATHNIVEVPLPDMAVEAARDLDRALDDATRELRRSRQRLNMFLIRLGHVWDERNADGARKRAWTRAHWRWVSEIRLEGPQRDALEYYVTAARCAESDRRQLERRVVALAGTDRWRATVEALSCIKGVDTLTAFRLAAEAGSFSRFRSAPAFASWCGLTPSEHSSGESERRGGITKAGNALARTALIESAWHYSTCSPRPKAPAPGTDVPPAIRSRADDCTARLHRRREALAAAGKSACKANAAVARELACWVWEIGCRSEGTVL

SEQ ID NO: 120558 - protein, 438 aa, unidentified
MSNIVIFNLDELFISVGIDVGADFSWMSIALPNQQFVGKPYKILHNSIDSLTTAVSKIKEAEELYSLESRIFLESTGIYHYPLFCYLRDKGFNCSVINPIITKNSTNINIRKVHNDRFDSKKAALVGLKPDLKVSLMPSDLALNCRNLCREYYDLMDNRSAYVNKLQGELRMAFPQYLGIFSKVTINTSLTLLETYTSPSAFLKADKQEIIDIIKSTARFGLTYAQNKYNAIIQAATDANQFGYIIDSNIKRIRLYISFIRKYDEEINSILESLHELVDANEDSDFVKQIHLIETFKGAGFLSAVSIMGEIGDFSAFSKPKQLFAYFGLDPAVKQSGKFEGTKVQMSKRGSAIARRVIHTLTLQSISISRNREAKNPVLREYYLKKCDSKPKLVAMGAVSHKVCNMIFAILRDNKPFKIIAPQEHIKQYNSAKCDIAA

SEQ ID NO: 120559 - protein, 318 aa, unidentified
MLNESFVGIDVSKDWLDVGWEPAGQSERLAHDEVAMVGLCERLARERPCLVVLEATGGLETHLASALAAAGLPVAVVNPRQVRDYARACGRLAKTDRIDALVLAAFARAIRPQVRAPRDDETLELGALLARRRQLIDMRVQEKLRLERASPVQRDSIKEHIAWLTERIARLDTDLMHRLRSSSLWRDKEDLLKAIPGVGTITRVTLIALLPELGKLNRREIAALVGLAPFNRDSGQHRGERVIWGGRAQVRRVLYMASVAAIRSNPVIRAFYQRLRAQGKPGKVALVACMRKLLTIMNAMLKHNTPWNPNALDLEHSC

SEQ ID NO: 120560 - protein, 310 aa, unidentified
MENPTTIAVDLSKNVFEIAVERQGRICQRKRLNRRQLVEFFSRSPSATVLMETCGSSHYWGRKAQEFGHAVKLLPAQHVKPYRIGQKTDRRDAEAILSVRHRESIVPVPVKTVEQQTICALHRVRAALMKTRTARLNTVRGLLREFGVTIAEGAERVLPAVREALSESPSPVPEPLHATLFSMMAEAGELDERSGQVEKQLKALSRTVPLVEGLETIPGIGLLNATAFSAMVGNFPRFKSGRKFASSLGLTPKESSSGKRRWLGSISKAGDPYLRTLLIGGARSMILAAHRTKRPHRLQAWALEVEKRRG

SEQ ID NO: 120561 - protein, 407 aa, unidentified
MNEKKNYVLAIDVAKGKSMFYIQSIHGEVILDAIECKHTLSHFKMIDQIIGKEEIKKEIVVFMESTSTYHYPVMRYFLEQDYDVIVVNPNLVKKSSTTFRRTKTDRLDAIKIAETYFKEEIKSNAIKTGRLYDDLQAAHRQLISLEKALTAIKNRYTRLLDICVPEHELFYSDKSDKYSLKYITLFEHFPHSEFIQKTRVDHIASILNLTFNRSYKSRLIKEANKLKSISKDAYPGVSITSNEVDNLKQTIIILKEFMGHYELAKVRLIHLGKQTKEYTYISSIPGIGDQTASQLIAEIGEFSRFRSYKQINAYCGIEPSVYQSGKTFYNGKITKSGNPFARKVLYSVIMNIIQSSRSNYPEHPINIYYTSKKEKENKSTKESVIASSTKLIRILFSLCKYERTFTK

SEQ ID NO: 120562 - protein, 328 aa, unidentified
MDHFAGLDVSVKETSVCIVDGAGKIVREVKVTSEPEALLAVLKNPAYRFKRIGLEAGPLSQWLFSALAEAGLPVVCVETRHMQAVLKAQINKTDRNDARGIAQMMRVGIYRPVHVKTLRSQKLRMLLAHRKLLQSKAIAIENDLRGTLRNFGLKVGIVGKVRFEARIKELVENLSDLAVLVEPLLLVRRTLREQTIVLHRRLLAVVRDDEVCRRLMTIPGVGPVVALTYRATVDVPSRFRKSKAVGAVFGLTCSKYQSGEIDRTGRISRCGDEMMRVMLYEAAQSMLRSKKWSWLKAWAMQIAKRRGMKKAIVALADRKIVPPRLRIP

SEQ ID NO: 120563 - protein, 341 aa, unidentified
MQITTIGLDIAKNMFQVHGIDAAEKVVVRKQLRRGQVIKFFEAVPPCLVGMEACATAHYWARELTKLGHQVRLMPAKDVKAYVKRNKNDAADAEGICEAVGRPTMRFVGVKSAEQQGRLMQHRTRDLLMRQRTQAINALRAHMAELGIVAAQGREGLKELLAIIADERDERLPIDARASLIVLAAQLQALHTMIGSIEKRLIVQHRANEASKRLQSIHGIGIIGASAIAATVTDPKAFRSGRDFAAWIGLVPREASTGGKQKLGPISKQGDRYLRRILVVGAHSVLRRAKQSPQKYPWLTQLLARRPFKVVAIALANKMARIAWALLASGGIYRAPRLAAA

SEQ ID NO: 120564 - protein, 318 aa, unidentified
MTQPRIFVGIDVSKAQLDVAQRPMGRFTVPNTEAGLTQLLAHLAAAPPTLIVVEATGGVELPLTGALAAASLPVVVVNPRQIRDFAKATGQLAKTDTLDAQVLAHFAEGMRPEPRPLPDVQTQELAALVTRRRQLIEMLTAEKNRVASARAVVRKQLRAHITWLERALDQADRDLAEALRQSPVWREKDEGLRSVPGIGPVLATTLLANLPELGTLTHKQIAALVGVASLNRDSGTLRGKRTVWGGRAQVRAALYMAAIVAARFNPVIRAFYQRLCIAGKAKKVALVACMRKLLTIVNAMLKHRTPWREGMEPARTEV

SEQ ID NO: 120565 - protein, 326 aa, unidentified
MEHELHYIGIDTAKEKLDVDVLRPDGRHRTKKFANTTKGHDELVSWLKGHKIDHAHICIEATCTYMEPVAECLYDAGYIVSVINPALGKAFAQSEGLRNKTDTVDARMLAEFCRQKRPAAWEAPHPLERALRALVVRHQALTDMHTQELNRTETAREVQRPSIDAHLLWLEAELKRLEKQIKDLTDDDPDMKHRRKLLESIPGIGEKTSAVLLAYIGLKDRFAHARQFAAFAGLTPRRYESGSSVRGTSRLSKAGHVSLRRALYMPAMVATSKTEWGRVFRDRLAANGKKGKVILDAMMRKLAQVAYGVLKSGVPFDAARHNPVAA

SEQ ID NO: 120566 - protein, 339 aa, unidentified
MYYGAIDLHRDNSVLGIINTDGQRLYVRKIPNDLDLIKKALSPFAENLEGIVVESTYNWYWLVDGLQGAGYRIHLANPTAIQQYSGIKHTDDVTDAWWLAELLRTKQLKEGFVYPRAERAVRDLLRKRAHLVKQRTQNILSIQNLTSRNTGGRLNANQAKQLTEEAVQKFYDKEEERALAINCSLRVIQTLKREITLIEKQVKSKLKLSQPYQVLQSVPGIGELLAMVIMLEAGDMSRFPSVGDFSSYCRCVDSIRLSNGKKKGSGNRKNGNKYLSWAFMEAAHYAIRYYPVIRKFYQRKSAQKGIFVACMAVAHKLARASYYVLRDQVPFEETKCFVH

SEQ ID NO: 120567 - protein, 376 aa, unidentified
MTMMHQQRTLRYLGLDVHKASISVAIAEESGPPTTYGRIPNEPTGIRTLMTRLGGPGIELRVAYEAGPTGYALHRQLTRLGIACLVVAPSLIPRQPGNKVKTDRRDALKLARLLRSGDLTPVWVPDEAHEALRSLVRARADAKADQLRAKHRLSKCLLRHGCWPPIGIRHWSKRYFTWLHQLEFEHLPDRIVFADYLAEVNAAGERITRLERTLHECAQSSSQVALIRGLQAFRGIGFLSAVTLAAEAGDLRRFRTAPQFMAYAGIVPSESSTGEKHQRGPITKTGNRLLRHVLGEAAHHARHAPRVTSKVKQRQADVPPELIDLAWRAQVRLHTRYRQLSARIGALKALVAIARELAGFIWAAGHLLQEEVPAAA

SEQ ID NO: 120568 - protein, 348 aa, unidentified
MDKLYHAGIEISAQQFLVGLQAEGSAEGVAQREFANTPEGVQALVRWLLVPGRRVRAVMEATGLYGLDLALRLEGEPNLELMVANPRAVRHFAQALMKRSKNDPIDARVLVEFARRMPFQRWQPPSPAALHLHALARRLEALTEMHAAEKNRWHAAQLSDAWPQDVRRDLRRSLRALERAVKRLTRQAVEVIAQDPDLNLRYQLLLSAHGIGPTSAVQILAQLAVLSPDLDVRQWVAQAGLDPRHYDSGSSVHRQTRISKAGNRHLRRALYMPALVASVREPHLRGFYLHLLERGKTKMQALVAVMRKLLHAIFGMFKHQQPFDGAKLYRLPEDTSTPQPTLSTAEVA

SEQ ID NO: 120569 - protein, 471 aa, unidentified
MSCFRGAIQNRLRKENFMQKQDSYDYYVGIDCTQNKHDFAMKNNQDKFLIKKGHFSNTLQGYEKFLNTVLSKCLDKDKILFGMEVTGIYGTNLYERLKSDGYHVVMIFPDSVKNYRDYKRLNKTDKIDSACIAELLLNGDAQIVHAEKNGYTDLKAYIRRRNALKVTCTQETNRFLAKVCLYFPDLLKVFPSGRATLKAIFSIYPTPYSIIEADFNELVSVLQKASKNKFGVDKANELIHAARNSIVVRKSISDGELYNIHSLIDSIDSLESEIRHLEKIIDSKAEEFPAYHVLLTLTGCGKITAATIVAEIGDISRFHKASQIVSLAGLYGDNSKSGSSVNKRGKISKKGSRYLRHAIYMVAEFARRNNPIFKAYFTKKKNGDRTKHILAVNAVANKLCKVIYSLMKNQSTYIIQYRDLAKLSESTQNEFFQNAETDFSAKTRRKKYLYEDEYGELHEFVFKSIKTALIE

SEQ ID NO: 120570 - protein, 405 aa, unidentified
MPRLGSTHDEALAPVTTGWLIGIVVAPVCRRPERKAALGDGVDAPRRHLCAKVTVSKLPPKEASMEQATTIGLDIAKHVFQVHGADAAGHVLFRKRITRGKLLGFLAAQAPCVVAMEACAGAHYWAREIGKLGHHVRLIAPAYVKPFIRRQKNDAADAEAICEAAQRPSMRFVPVKTEEQQANGIVFRARDLLVRQRTQCVNALRGHLMEYGHVFPKGITHVETLVAVVEDPRSSLPDSVRVILKLLVDTFTALEAQITALDAEINQRSKSDPTARRLMTIPGVGPIASTAITALVPAAEGFPAGRDFAAWLGLTPLQKSTGGKQKLGAVSKRGERTIRRLLIIGASAVVQQASRRGAPKGSWLAQMLARKPKMLVTVALANKMARIVWALLVKGGTYRTPTAAA

SEQ ID NO: 120571 - protein, 422 aa, unidentified
MNFGPVAGIDVSKRFSDMCILSPDNKIFAQEKIYHDETSINRANTLLQKAEQIFSSKPVIVMESTSHYHLILFQFFSEHGYDVIVVNPLQSSSMKDFSIRKRKTDRVDAFKLAMMYRTKTLRPSQVPQTALRALRQLCRERVEFLNDVSSYKNRLTAFLDQVFPGYDKVFSDVGGITSCAVLVHFPTPAILLAAEEAELVEVIAAASKSGYGFAKKKAELLISTAQKAQTLGIHSCADETLIVCTIQMLRTLSESVFQIEKAIDNLLVQIKEMRNNVSLLQSIPGIGSHSAALLIGEIGDFTLFKKPKQLAAYFGLDPSERQSGTFRGMKNKISKRGSPYARASLHMAVVNAICKHGKQPAPNPVLLSYYEKKCKNKPAKVALAASMHKLVFIIFAVLRDQKPFELKTPEQHAAEQGFVKAA

SEQ ID NO: 120572 - protein, 499 aa, unidentified
MKVSPTGPSLLNSTWKVHMKARQPEKGKPAIPPRRCKWHEMNRKQRREIMRKLQSKDLSMEVIHPHAAGIDIGNESHYVAVPQQRGSQPVRRFGCTTAQLRAMADWLKQCEIRTVAMQSTGVYWIAVFGILEEAGFEVYLVNARETKNLPGRKSDVQESQWLMKLHTYGLLRNSFRPVQEIRTMRTYWRQRNDLVRSACRHIQRIQKTLTQMNIQLANVLSDLSGTTGQAIIKAILGGERDPHELAGFRDPRVKASEEEIAQSLEGHWQPDLLFVLKQEQEGYEFCQRQIAQCDRQLEHYLLQRDDRSHGAPLPEETRKNRLKKKNGNKPQFDLRAELFRMTGTDLTRIDGVDVMTATTIVSEAGYDMSRWQTENHFVSWLRLCPDNRISGDKIIGQGRLPTNNRATIALKMAASTLRTNQTYLGAQFRRLRTKLGAPVAIKAMAAKLARLVYRMLRYGMNYVDQGVEFYEDQHRKLQIKSLKWKAAQLGFQIIEAPAT

SEQ ID NO: 120573 - protein, 367 aa, unidentified
MKQSSKIFVGMDVHKESIDITLAEQDGEVGRFGTVGGDRVSLLKAVRKLTSRGRALVFVYEAGPCGFWIYRELTALGHACLVVSPSLIPRRSGDHVKTDRRDSENLARLARADELTGIHVPDMRDEAIRDLVRARDDALITQRRARQQLKALLLRNEIRYLNKSSWTAAHLRWLGELKLPQPAQQIAFQEYVNAITAATGRIERLVHAIGNEAATWRFAPVVAALQAMRGIQFLHAVTLVSELGDLTRFGSARQLMAYLGLVPRENSTGEHRHQGAITRAGNAYARRALVEAAWAYRFPARVSRLIATRQSGLPKVACDIAWKAQLRLCTKYRRLSARRVNPNKIVVALARELSGFVWAIGQCVKPH

SEQ ID NO: 120574 - protein, 334 aa, unidentified
MKNYCFHIGIDVSKLKLDVNLLNSQTLESEHFVLDNDAKSIKLFIKALIKRKIDIREVLFCCENTGIYTNHLINVSTDLKFDLWVVPAIEIKRSKGISRGKTDKTDAKDIAFYSFRNLDKLKIFNVSDINIQKLKILFTEREKVLKALLLLETTKENENFVDKKVFAEVVGINKSLINVIKKTLQKIEIKIKEIIKADEQLDQQNRLIQSIPGLGEKTSTYLIIATKGFTMFANWRKFACYSGIAPFEYSSGTSIKGRTKVNHMADKKMKSLLQMCAMTAIKYDPQLKEYYQKKKLEGKNSMLVLNNIRCKLISRVFAVISRETPYINTYKFAS

SEQ ID NO: 120575 - protein, 312 aa, unidentified
MDECIFVGIDVAKDQIDVCLQPADIYRTFPNEKKGFDELQKLLAHQRITLAVMESTGGLEIPVAVSLGCAGIPIAIVNPRQVRDFAKASGRLAKTDRLDASTLAQFGAAIRPAAQPLRSDEHRALAAIMTRRVQIIDMIFSEKTRLSSVPNSEMAKDIKSHIGWLEKRLRKIDQDLGNRVKRTPLWRERDALFQSVPGVGSVVSHTILAHLPELGTLDRRKIAALVGVAPLNWDSGRMRGRRVIWGGRAAVRKALYMAAVASMKWNPIIAAFYKRLRAAGKKPKVAIVACMRKLLTILNSIARSGEAWRSCA

SEQ ID NO: 120576 - protein, 345 aa, unidentified
MSIVGGFDVHRKQITFDYVDTETGEVSCGQVTSADRRRLAEWLERFAGRDDVAFAAEACTGWRYVIEELQHAGVVPHLADPAETAAARGRKRRAKTDRADAKLLRTLLDQGRLPECYIPPTEVLEYRALLELYHDLRREHTAWLQRIHAVLFHQGAQQLGEGGLSTPEGRNRLVEVAAGQLSAAGQVQVATGMDMLEATEAQLEELRRKLIGIAHQVRGAKSLSDSIYGVGPITALALTCWLGGADRFSSARKAVRFAGLDVTVYSSAGKRSPGHLSRQGPPVLRWCLYEAGKTHARVTATDHGYYTRVKDRIDGKRAALSEARKSVRRACHILTDLGDDAYVRV

SEQ ID NO: 120577 - protein, 370 aa, unidentified
MLKIVYPICCGIDVHKGFIVACIASTNEQGVTTYQSKRFSTFTNDLRRCAVWLAQNHCKDVCMESTGKYWIPVYNILEATCTIVLAHPKYVKAIRGKKTDQKDAKWIADIFKHDLVSGSFIPPADIRQLRDLMRYHWKLTNFTTGEKNRAQNCLTVSNIKLDDVFSDVFGKAASAITTRLLESSEPFDVTPYLTKNIKAPVEKIQAAVDGEMCAEQAEKLRIIRSHMDALELCKLNLQSLILTTAEKYLPQLNLVTTAPGIQAFSAIGIISEIGVDMSVFPTSKHLCSWAGLTPQNNESAGKKKTTRISRAGAYIKPLLVQCALSAIKAKHFPEVRRRYLAIKKRRGPQEGGYCHCKDAAHCHLQYAQEK

SEQ ID NO: 120578 - protein, 353 aa, unidentified
MKAVAQTGQIRKVSFEGPIWVGVDVHKASYAVAVRDQEGRAVQFTMAADNDAFVRKIVSYGQPVALVVYEAGPCGYSLYRACEAAGIAALVAAPSRIPRPVTRGNKTDRLDCRKLADYAARDMLVPVSVPAKEEEMLRGLQRRRHGLTDRIRSTKQNIKSLLLEYHIEEPHGLTTWSKTSVEALRRLALGSVLRDTLDSYLRELAYLESERHSVDQAIAKATSQELSQRIRILQSVPGVGVVLAMTFACEIFRPERFADGERLSSYVGLAPVVSQSGEGAATGSLVRTGQQRLRSLLVECAWTHKGRDAGAESLYRRILSRTGHAQKAIVAVARRLLTLLWRLCIENRVYISA

SEQ ID NO: 120579 - protein, 453 aa, unidentified
MAQRNKKIKFKPGKGEALTITHPNAAGIDIGSASHYVAVPPDRDDESVREFPSFTADLEALADWLLACNVDTVAMESTGVYWIPLFELLESKGFTVLLVNARHVKNVSGRKSDVLDCQWLQQLMTYGLLRGAFRPSDAVCVMRALMRQRGMLLRSQGRHVQHMQKALTQMNIQLTNVISDVVGETGQKILRAIVGGERDPQVLAAMKNGRIRASSDQIAKSLQGNWRTEHLFALKQALALFDFIGTQIRECDRELEQQLKKLRINNDTPMKARRRGGSTRNAPGFDLRTDLFRMCGVDLTRIDGINVTTALVVISETGADMSRFPTAKHFSSWLGLCPGTKITGGKIMSGKTKRVANRAAQALRLAAAALRSSQSALGAYFRRMCARMDKPKAVTAAAHKLARLIYTMLTQGEEYTDKGQDYYEERYQKRVVRQLTLRAEKLGFALVPVEEST

SEQ ID NO: 120580 - protein, 358 aa, unidentified
MSAADPHISSIGSDPFSDHYRHRPTQVHPHGNRPRTRHQHRPRVTTHRSDTRGVHTPLTWSKTWPQQTWAIENAEGLGHHLAQWLLAAGESVLDIPTTATARVRQLSKSSRRKNDRIGAAAAASVAAMQGDARPVHPESITDMLALLDERRNNLTAARTRTANQLHALLRQLLAGGVPTQLTASRATTAIRRMKPRTTIDSMRMRLCRDLIADLKRYDIQLADNHRELASLLDQLGTTLRDVPGVGTILAGRLIGRTGIAHRFPTAAAFATYTVQIASAQSNRHRLSHYGDRQLNSAIHTVAMVQIRMPGSAGRAYYDKKRAAMRCLKRHLSNHLWRIMIADGQCQHTHRTSPNTMAA

SEQ ID NO: 120581 - protein, 481 aa, unidentified
MKKRTIFQQQSQELMQIYEEAGNSKKVLVVAMDYAKKEHTVMFCNGNGDILRKPFGVWNNPEGIDYLLEQVKRNCNYHKIRTKHVFFGGEDCGSYTENFIQSLRERGYLVAGVNAHDAKKQRENIQASTDRLDLLGIARMLIGRRGNCAASQSGVYRNLRTLVRHRRKIVTLSTEERNRMHCLVDRLFPGFLQERHSGLMPFHEPSLRMMERRFSADQIKRRKQATLVDILARAGAQKPEQKAKQLQAYAGTVLQPPREYIATLQTSLTQHVALYRCLLGNITSLEREIAIWLAQTQGAFLMSVKGIGLVLAAGVTAEIGNPVTQKPVGNLTSYSGIIPRVTQSGGSDSSGHTGSVAKRCNRILKDYLVQSASHLGLHGVDELMADHKRREANGQHANFGIARRYLRMILHMMRFSHIYLPPELRIDAAFEARGRYYQMIWPYLLDKWKKYHAHEIAFAPENPLGRWRDIVQSIYKITLKI

SEQ ID NO: 120582 - protein, 340 aa, unidentified
MSEITTIGLDLAKHVFQAHGIDAEGTTVLRKRLRRGQVLAFFSRIPRCVVGLEACATAHYWARELGALGHEVRLMPAQYVKAYIKRNKHDAADAEAICEAVQRPTMRFVPVKTTEQQATALLHRGREQLVRQRTMLVNALRAHLAEFGMVAAQGLRNVGELIAIVRDDGDTRLPDVARQVLQVLADQIEQIETAVAGLERQLLAWHKANPVSQRLASIPGIGPIIATAIATTVADPKVFRSGREFAAWLGLVPRQNSTGGKTRLGGITKRGNRYLRRLLINGASANLLRSKATKADPWVIGLRRRRPPLVVAVALANKTARIAWAVMLREKEYQPRAVAA

SEQ ID NO: 120583 - protein, 346 aa, unidentified
MAFIGVDLHTNSFTVCRLEADGAETFETYQLAPADLERFCLGVDADDEVAVEATGNTAWFCGEIRSCVGRIVVVNPRQFQVIRKSVKKTDKNDARALAVFLSRDMLPETRLKRPGEAELASLAQTRDMLVKSRTRVLNKVHGVFNRHGIKLKKEGFSDKKLRGLEIERFGDVEQMELTVLRDQALELTATIRRIDKALAEAAAELDGFEEITSIKGIGPRAAAIFLSGLGDVNDFANADKLAAYVGIVPRVAASNGVVQHGRITKQGNKLVRTTLVQCTLSAIRYSGYLNAFYRRIKDRRGSGKAIIATARKLLTIIYNTLKNKWVFEDFPAFKIKNSSQTAGQTS

SEQ ID NO: 120584 - protein, 375 aa, unidentified
MTMQTRVSGIDPRSYDVFAGLDVDKRSIVATFTDWGQSEKSLRMPYNSEHLLNYVRRHFPNQRIAFVYEAGPTGFGLFDDLVAQGHPCLVVAPSMVPRAPGQRVKTNRLDSKSLARKLRGADLHSIHIPSPTYRELRHLVQLRDTHVHQVVATKCRIKALLTYQGIEFPSANGTWSASVVGELQRLSCTGAVRFKLNDLIRTLKFHLQSAAATEKEIRSFCKNDPELRQNITLLKSISGIGWVVATHLAARLGDPDEITKVDQIAGFLGLAGSEHTTGDHENRGSITGVGDKRLRGKLIQSAWVAITKDPELREFFERIQKRHPKKYAARKAIVAVARKLTTRIYAVLKQQRPYTLRLDSSIASLTQKETGGPRE

SEQ ID NO: 120585 - protein, 345 aa, unidentified
MPNYNQAHQFYAGVDLHARSMFVHVLSAKGKTVFERDLPAAPDAIQPFRKNLVVGCECMFAWYWLADLCEDQRIAFVLGHALAMKHIHGGKAKNDRLDAAKLAAMLRGGMFPLAYVYPRGKRQTRDLLRRRSFFVRQRAQLITHIVNTNSQFNLPPLTKKLSYAANRSAEIAERFADPSTRLSISANLQLIDAYDEQITSIERHLLQTAKVDDPVTFAFLRTTPGIGPILGLILLYEIDRIERFPEPGNFLSYSRLVRCAHESAGKVKGFGGKKIGNAHLKWAFSEAACLMLRSSVHVKGWLQRQEAKRGKRKALSVLEAKIGRAVYHLWRKQTAFDVKRFLKNG

SEQ ID NO: 120586 - protein, 348 aa, unidentified
MNALHYIGFDVHKKTISFCIKTAAGEIVEEGSVPAQREVQRRWASARPQTWRGAMEATLFSGWIYDTLKPYSEQLEMAHPAKMKAISAGKKKSDTIDARTIADLVRCNLLPACYVAPPRIRELRRLLRYRSLVVSEAVRMKNKMAGLLMETGALYVKEKLHRKKYFASLLEELEEVPQSVMDLLRLSRGALEMFESTQKRLVRELLADPELAERVERLMTIPAVGEITALTWALEVGDPHRFRSSSDAMSYCGLTTALKSSAGKQQRGPISKQRNRWLQTTLIEAAKLAPRWNPQLAALHARELQRGHRNRATLAAARKLVAYLLAVDKSGQPFQVRAPLEVPTQKAA

SEQ ID NO: 120587 - protein, 536 aa, unidentified
MNKHRRDGHGRGTKCRKRIDNGLRQRVRRIGGDKFGVLVVDSSKKNAELWLTDFYGEPLWEESRTFPITDGHLTEMINVVGGTCRERGLKDLVVGIEQTGRYHRPIQRALAQRWEVKAIHPFVTKQLRQPASPGVKTDGVDLEAMSRAIISGYGDDQRAVPLLYTKWQLINRAREDAVDRRRRLKQQCQERLHAFMPGYAALFEHLWETPAAVALAERYGSAKRLLATDTDAISEQLRGQGLRMMRPTINRVLAWAADAPTADPGGVLNRRIWSDHLRLMEHLGRDILRYERSLAAYLVQTPFVLLLSIPGVNVVSASGYGSEVGPITHYLKPSHLNGRAGLFPSRYQSDQTDCADGPMVGGRNARLRDAVMEIVMNLILHNDYFQGWSDLRAQRGWPKKKIHVAIANRFNRIAYHMVAGRMLFDHPCLKKRHPVLKKVAVFSLAHGIKPETTMSLVAKAARQLPADAVAGELTALQDGLADLPTSEGVPTGALKEARLLLPALVSRINHDDKHPGEEDHQAIKEAPYRVTAETLA

SEQ ID NO: 120588 - protein, 377 aa, unidentified
MTTTDAATEARETVYVAIELSKKTWVLGIAHPDRDRPSIHRVSGGNIAELVSRLRVAARNNRRILVCYEAGYDGFWLARALAKMGIECRVLDPASIQVNRRARRVKTDRIDVLALLRALIATDRGERHVCAIVRVPSVEEEDARRAHRERQRLVRERTGHINRIKGLLFAQGIRDIKPKLRRSRIDFAALETAEGHPLPDRLRRELEREYARLSLIATQLREVEKERDTADAQDPVVEQKRQLLVALHGVGATSAAILAREVFARSFASRRQLGSYLGLTPSAYDSGSTTRCQGISKAGNSWARRILIEVAWLWQKYQPASPLSHWYIQRTAGQSSRIRRIMLIALARKLAISLWRYVETGLVPEGVAIAKAKLHPA

SEQ ID NO: 120589 - protein, 337 aa, unidentified
MNKIVIGLDVSKKKIDATAIVTSCGGNGMEKLGYSVFENTACGFRKLLSWCSVIGRGCSAEDCLFCCETTGSYDRAMCLYLCAHRCFIWRESAIQIKRSSGVRKGKDDRSDSLMIAEYAVRHMDKAECFRPLDGTVEELRQLFLYRQRLVEERKGAAVSVSESFVGIKDGPIANRIKREMQRHLRHLDAMIRRCEILIRQTLMKDREVWDNFCRITTIKGVGLVNAVAFIVYTNNFQNFKTARQLASYYGVAAFRNRSGTSVDRRAQVSNLSNHRLKAYLAQAAECAARTNGIYRRYYERMVERGKHRMIILNNIRNKIIHTVFALVRDKCDFCIAK

SEQ ID NO: 120590 - protein, 343 aa, unidentified
MEVYVGLDVSLKETSICVVDGNGKIVSEGKVLSEPLALAEFLRAKAGNAKRIGLETGPTTTWLWHELRALGLPVLCIDARHAKAALSLQINKSDRNDAVGLARIMQCGWYKEVQVKSLSCHEVRAVLISRAQLVKTKVDLENQIRGLLKNHGLVIGKAGGNIFRRRAEELVGKYRLLREAVRSLLAVHEVVRREIAGLTRKLLALARTNDQSRRLMTVPGIGAINALAFCAAIDEPSRFRRSRSVGAYFGLTPRRYASGEVDRTGRISKCGDVMVRTLLFEAAGVLLTRVQQWCKLKAWGHKLWKRIGFKKAKIAVARKLAVILHRMWRDGTDFVWSTKEAVA

SEQ ID NO: 120591 - protein, 343 aa, unidentified
MQSISTIGLDIAKSVFQVHGVDAAGQAILRRQLRRRHVLAFFQKLSPCLVGIEACASSHHWSRELQALGHTVRLMPPAYVKPYVKRQKNDTTDAEAICEAVTRPNMRFVPTKTVEQQSCLMLHRARHLFIRQQTAVINSIRAHLAEFGIVAPVGRRGVEQLLEVVADTADRRLPEVARACLAALGSQLRALKAQILEFDRRIMVWHRSNATSMRLDAIPGVGPALATALVASIAEPGAFRSGRDFSAWVGLVPKQNSSGGKDKLGSISKQGDRYLRSLFTAGALAVIRYAKIHGTRHRPWLTGLLARRPTKVVAIALANKLARMAWAMMVRNERYRQPAALAA

SEQ ID NO: 120592 - protein, 430 aa, unidentified
MSFKTRTSLISYSLESGDFMNDLLQYLFVGIDVSKDNNQVYAMNFSQEKLASFSSPNHQSGASLLEEKLLEVLDRHHLSKIIIAMESTGIYSAHIATFLSASKFLFPFDVKVYVLNPKISRNYRHSFSDMDKTDPQDAYILADLARVGRCDQLTPFRGPQKIALQRLTRHRHHIADLLAKEKVYALNNVFLKFSEFKGILSNDFSKTAIELLLNFKSVDDIINVSLEDLVEFVMTASKNRFTDSNQIALTLKAAARNSYRLDKMAYEPINLSLAASFNCIATYQTELKSIDAAILKQVKGLNQNHYLSLTSIPGIGPVYASGILAEIGLIDQFDNDDALAKYAGITWRKSQSGNFDAEDTRMTKTGNVYLRYFITEAANSARIHNPVFKNYYQKKFDEVKTHQHKRALALTARKLIRLIFGLLSTDRLYK

SEQ ID NO: 120593 - protein, 435 aa, unidentified
MMLRWSRSMKCAFGPPMPRVGVRTDRFRVQPTLAGLRSLSNRLAELPGVVAVAEPTSMTWLGLSVAQRNAGCDLSLLGARHAARLRGAISGKHKSDVIDADVLARAGEVFDLHPLRPVDPGQLALRRACVRRGAAVIDGNRHLRRLISLARWAFPDVWNGFRGSLPTAVAVLERWPHLAQLAAARRSTLTAVLALHTRGVADVPDRVEAIRSAAAAWAAFWAGHLDLDALSFDVTEHLTDMADAKARTQRATGQAQRYWRQLYGDDELLLSVPGMGPVTASVIRGFLADGTVFASGKAAASYVGLNPSTWSSGTVSQPSRAITKEGPAVLRLAFFQAANAARRQDPQLARFYHQLMTEHGHCHTQACVAVARKLVERTWTVLSRGTPYQIRDLDGQPISRLEAKKMIKQVCTVPDQVRAKARAHSAATNRAKLTR

SEQ ID NO: 120594 - protein, 416 aa, unidentified
MAEHEQETISWFAGVDWGSERHQVCLLDARGTSVGEREFPHSGEGLAELGDWLLSMATAASTVAVAIEVPHGPVVDALIDRGFVVYAINPKQLDRLRDRFSVAGAKDDRRDAYVQADSLRTDRRLFRRLQVADPRLIELRAWSRLAEELRAERVRLGNRVRHQLWRYYPQMLKLTNDLAAPWFLELWAIASTPAKAGRLRKSTVERLLKQHRIRRLDAETVLRILREPAIKVAEGVAEAASIHMRSLVARLCVVNRELREAERKLDELCTAVSEIEQTSGEGLQRRDVAILRSMPGIGRINLGTLLSEASGPLSRRDYEGLRTLSGAAPVTKRSGKSLIVVRRYAAHVRLRDTVYHWARVATQRDPKCRTRYTALRKRGHSHGRALRGVADRLLALACVLLQRQTLFDPYFGRSTT

SEQ ID NO: 120595 - protein, 395 aa, unidentified
MFIVGIDIAKRSHEVCMITSDGQTVQCPFSIRNNCTGYNLMLEKIRKHTNIKSQIVFAMESTAHYWLALFTRLRKDGYHVILLNPIQTSAMRDMFIRKIKTDAKDSFIIAELIRFGRYAESNVAQDRLLALKELCRNRFYLVDMAGDLKRKLIALIDRVFPEYEAQFDTIFCKSSVALLKKYPTPQKLSNAHLDKLTELLWNSSNGHFGEWKARELRELARNSFGVEDCDGAYSTLILLMLDQIQSLSGKADALEKEISRLFQSFDTTVTTIPGVGPIIGAVILSEVGDISRFSSADKLAAYIGVDPSVNQSGEFQAAHAHMSKRGSPYLRRCIWMASQVAVQRDPMFHAYYEKKAAEGLKYMTIIGHVTRKMTAVVFTILRDHKVYEPVLPTAA

SEQ ID NO: 120596 - protein, 446 aa, unidentified
MSLDCCYEHAGLCPGRGPSGPAPGGDGRLPEERRDVMEVMFDRVAGLDVGKETVAVCLRTPGPKGRRRAETRTFKTTTGSLRVMRDWLVEAGVSIAAMESTSVYWKPPFYCLEEVMEVWLLNAAHMKAVPGRKSDVRDAEWIAQLLEHGLLAPSFVPPPEIRRLRMLTRYRVQLMGDRRRDIVRLELMLEDASIKLSSVASSLKTVSARAMLTAMINGETDPLRLADLAKGRMRRKIPDLAQALTGHFDANHARLARSMLRQLDLVEQALAELDAVIVDACQPWAHQIELLQTIPGVGPKVAETIVAETGGDMTRFPTAAHLAAWAGLAPAMNESAGRQTPAGKRHGNKWLTAMLVEAAGSVGRMQGKNYLATQHARLLKRRGMGRAQVAVAHSMLVAAYWMLKRDEPYHDLGADWHSRRSDEAHTRRLIAQLEHLGHTVIIDPAA

SEQ ID NO: 120597 - protein, 350 aa, unidentified
MANCCWVGVDLHRSRSQVAVLDDGGRELFSRRIVNDPQTFLELLAEIDGESKIALEATYGWEWLADLLQDAGYELHLAHPLRTKAIASARVKNDAVDARTLAHLLRTDLLPEAYIAPRELRELRDLLRHRVALTRMRSALKNRAGAILAKQGVKRPYSDMFGPGGLRFLEALELRESPRRRLNSTLALIADFTREIDLTTREIEARAKHDPYVEVLCQIRGVGRYIAMLVIAEVGDVTRFGTARQLCSWAGMTPTVRTSDMRTRLGHISRQGSPALRWALVEAAQHAACGGGPLRQAFERIAKRRGRQVAKVAIARKILTLCYYGLRDGEIRCLAPRAGARTVRTPAVTS

SEQ ID NO: 120598 - protein, 348 aa, unidentified
MKYYIGLDAHSTTSTFAVVDENGQCVLRETVKTSEQSLVHVINKINGERHMTLEESSISQWLFLHLKDKVDKLIICNPTYIAKKQGAKTDFRDALHLANELRTNHLQPVFHDTSHWMELRTSVSGYLDIVEEIVRFKNRLKSLFRAEAINTDENSFYKNSLRVKELKNPSAKFVAEKLFNQIEFLENEKEKYKELFDKNRKKYRPIRNLMTIPGISIIRANIIAALVCQPARFDNKHKFWGYCMLVRHIQESGGRIYGNKRFFGRRELRTVFIGAAENAIRLEGELRDKYESQRAKGVDHKDAKLNLAKQIAAIALCLLKNNDKYNENYGAHLKERKKLRLEFYNQTL

SEQ ID NO: 120599 - protein, 345 aa, unidentified
MNTAITHIVGVDIAKDTFVVRLLALGEPGPIPVGEIQTVPNSSDGYRQFTQWLGEQGVAAASTQVVMEATGVYWEALALYCHAQGCAVSSMNPAQIKYFARTTLMRGKTDAQDADLIARFGAVMKPRVWDPPGVAFDDLQVLMRQREAYVTMATEEKNRLHALSHRAHCPREAIRMTKAHIRFLEKRIEELEQAFKDRLDQTPMWKQSVTLLTSIPGVGLMTAGVLLTETLAFSTLVDARQLVAYAGLAPAPYVSGTSVRRASSISKIGNARLRRAVYMASLSGIRFNPTLKTFYERLRAKGKPAKVALVAVAKKLLTICFAIVQSSRPFNPNHVSMRPSAQFCV

SEQ ID NO: 120600 - protein, 416 aa, unidentified
MNKGQNTRGYKRYMALDIHREYILVGAQDEEKEWVLTPRRVSIDKFSEWAKKNIRTGDIVVLETTTNVWATYDIVAPLASRVLVANAAEVGEIANARVKTDKEDVKRLLKLLIAGIVPEVWVPPLAVRELRAFISYRGRLVKTGTMIRNRLQSLLHKHNLMLSEEGLLDQTWWEAQKNISRLEKMQIRQELALLKEIEKLKVAVDEELQRQSTSSTWNKQALQIMQLPGVGFVVAMTVLAAIGDISRFENAKQLVGYAGLGAGVHDSGKTHKEKKITKKGRRELRWAMVEAGWRAIRMSPFWKAEYEKHLRRMRKPNQAIVVIARKLLVAIWHVLSKEETDIHASEEELAYKMLLLSWSLSADVRMGLTYKQFAKYALMKLGVETDITRFVRRNVPRRLAPREEVLARISELGLTA

SEQ ID NO: 120601 - protein, 350 aa, unidentified
MSHRNLPRPAAVYGIDIGKNIFHVVGLSCDGTPVQKARFRRDTLLQFFARADPTIVGMESCAGSQWLARKIQALGHKVRLIPAQFVKPYVKSNKNDIIDAEAIAEAATRPTMRFVTVKEIDQVDLQALHRIRDQMIRSRTRLINQMRAFCLEYGVPLRQGAGLFKLDLPQALHDEDNDMSSTMRRLLGDLYADLLRLEDRIRQVTKEIEAIADREDVARRLMTIPGIGALGATALLAAVGNGLQFRKARDLAAWLGLVPRQYSTGGKQTLLGISKRGNLYVRKLLVHGARSCFRHLDRTRDRLGSWLDGLEARMHPNKAVVALAAKMARIVWVVLNKPGALYERRDPAFA

SEQ ID NO: 120602 - protein, 481 aa, unidentified
MSQKRKDSKSLDEEKIAAGKGKRGRKRTGMCLEDRPILEANAAGIDIGAREIFVAVPPGRDEHPVRVFSTFTEDLEKMAQWLVSCRITTVAMESTGVYWIPLYDVVEQHGVKACLVDARGMKNVPGRRTDWHECQWLQFLHSVGLLRAAFRPEGDVCAVRSMMRHRTELVEMTSQHIQHMHKALTQMNVQIHHVISDVTGVTGLAIVDAIIAGERNPAALAKLRDPHIKASEETICKSLVGNWRAEHLFTLKQSRQSYQHYQEQITTCDEEIEKLVVAFVARVDPAERPLPPDRKRKQRGRKKKNLNSKTGFDVRTESYKLFGVDLTQIPGLMAMVLMLFSEVGRDMSRWPTAAHFVSWLALCPDNDISGGRVLWRGMRRVHNRAGDLFRMAAYALHHDQTPLGDYLRRMKSKLGPAGATTATAHKIAIIFYTMVTKQVEYDATLWAERDAEREKRFEAKLKRQAQQRGYKLVPIEEKPAA

SEQ ID NO: 120603 - protein, 374 aa, unidentified
MRWSLPPSRYYAEDRLSFGELSWKTLRSLVSIWVKTLSIFIAKDRRGKAVYRKKFTRPKLIEFLATCPATTIAMEACGGSHFMARKLEELGHSPKLISPQFVRPFVKSNKNDFVDAEAICEAASRPSMRFVQPRTESQQAMRALHRVRESLVQDKVKTTNQMHAFLLEFGISVPRGAAVISRLSTILEDNSLPLYLSQLLLKLQQHYHYLVEQIKDLESQLKRKLDEDEVGQRLLSIPCVGTLTASTISTEIGDGKQYASSRDFAAATGLVPRQYSTGGRTTLLGISKRGNKKIRTLLVQCARVFIQKLEHQSGKLADWVRDLLCRKSNFVVTCALANKLARIAWGPNGTTANLCSITAEIHRFKELLIWFCEY

SEQ ID NO: 120604 - protein, 415 aa, unidentified
MELLHERCAALDIGKKDLKACVRTPSVSRRKRSRSQEIRTFATTTNALLELRDWLVAEQVTLVVLEATGDYWRGAFYLLEDDLNVILVNAAHAKGLPGRKTDVCDASWLCQMGECGLLRASFVPPEPIRQLRDLTRYRTTLIAERTREAQRLEKELEDAGIKLSSVATDILGVSGRAMLAALIAGEDDAVALAELAKGRMRPKIPQLVQALTGNFGAHHAFLCRLHLERIDQLSATIEELSTRIEEQMRPFSHKLDRLATIPGVARAVAEVIVAETGGDMSRFPSPGHLASWAGVCPGHHESAGKRKSGRTRHGDRWLCGALGTAAMAAARTKDTTYLGARYRRLVPRLGKKKAIVAVEHSILTAAWHMLTDDVDYHDLGGDYFARLDPERAMRRIVRQANALGYTVRFDPIQAA

SEQ ID NO: 120605 - protein, 420 aa, unidentified
MKSASNTPTDTTLPQEPPGGVTAGLDWARDDHAVSVVDDRGRELDRATVPHSAPGLRELIAFLRRHGVGEVAIERPDGPVVDALLLAGLAVVVISPNQVKNLRGRYGSAGNKDDRFDAYVLADTLRTDRARLRALIPDTDATVALRRACRARKDLVNHRVAVANQLRAHLRNVLPAAVGLFKDIDSAISLAFLTRFDTQDKIDWLTPKRLGDWLAKQGYSGKVDPAVLHHRILDAAPGATGSHGSTQAHITASYVALLGTLVAQIKALSTQIEAQLDTHADAHIFTSLPRAGRVRAARLLAEIGDCRARFPTPESLTCLAGAAPSTRQSGKSRIVGFRWACDKQLRDAVTDFAADTRLVNPWAADLYDRARTRGHDHPHAVRILARAWLHIIWHCWQDNLAYAPDKHRALQRILTQDEAA

SEQ ID NO: 120606 - protein, 343 aa, unidentified
MQTVTTIGLDIAKSVFQVHGIDAAGQVVIRRQLKRRYVLAFFQKLPPCLIGIEACASSHYWARELQALGHTVRLMPPAYVKPYVKRQKNDMADAEAICEAVTRGNMRFVPTKTPEQQSGLVLHRTRHLCIRQQTAVINAIRAHLAEFGITAPVGRRGIEELLRVVADPSDKRVPELVRACLAALGSQLLGLKKQILEFDRMILAWHRCNETSKRLNCIPGVGPLLATALVASVGDPKSFRSGRNFSAWIGLVPKQHSSGGRERLGSISKQGDRYLRRLFVAGALAVIRYAKLHGTKHRPWLTALLARKPTKVAAIALANKLARMAWALMARGERYNYPVALRP

SEQ ID NO: 120607 - protein, 350 aa, unidentified
MAMTTMVESCAVTGGVDTHLDVHVAAALDAIGGLLGVESFPTTRAGYVSLMEWLASFGMVERVGIEGTGSYGAGLARYFDSAGVTVVEVNRADRAARRRQGKSDPLDAISAARAAQSGTATGSSKGRDGQVEAIRTLMVAKRSARRDRTATINQMRALIATAPDDLRARFAHHRTASLVTETAAMRPRPGEIVEFTTRMALRELGRRAAYLSAQTDRIVDLLGPLVADRAPALLAVGGIGVDTAAILLIAAGDHPERLRSEAAWANLCGVAPIPASSGKITRRRLNPAGDRQANHALWRIVLCRMNSEPRTRAYVTRRVLEGKSKPEIMRCLKRYVAREIYPLLAVAVAD

SEQ ID NO: 120608 - protein, 349 aa, unidentified
MKNFSIGIDVSKEKFDLTVKKVHFGAEQSEFLHYDVYENNPSGFRKMLKAVDKATGRADKSEWLFCLETTGAYELHLCNYLYAKGYDVWRESALQIKMSNGVTRSKNDRVDSDRIADYAIRHMDKMVIYVPVEEKLGTLKSLFLYRDRLVKEKQSKHTSSQEIKCTHVMNDEMRWMHTRSQQDIARLNKEIRECEDHIQELIASSAEIEKNYKHIMSIKGMGIITTTALIICTHNFATITSARKASSYCGVAPFFAQSGTSISHKKNVSHYSNAQLKAILTQAAFIATRYNEDIAIYYNRLKEKGKPLGVCVNNVRNKLLRIAFSLVQNDCDYEENHEWRRSQLYKDAA

SEQ ID NO: 120609 - protein, 339 aa, unidentified
MKNIKVLGIDLAKNVFQIHGTDAKGKCLLRKRLNRVKLMEFIANLPPCIIGIEACGGSHYWARCFKQYGHEVRMMAPQFVKPYVKSNKNDRNDAEAIAEACTRPHMRFVPIKTVDQQDILMIHRSRELAVKQRTSQANQIRGFLNEYGVILSKGISKLNQLLKILEENKAKLTVIAMELITQLYEQFKLYDAQVKKYDKLLEALAKQHVLCQEIQKMQGIGPIIASAIVATIGDAKAFKNGREVSAWLGLTPKQYSSGDKIILGGISKRGDRYMRKLLIQGARTVVKVCDSKKDKVSCWVANKKQRCGFNKAAVALANKNARIIWAIMATGECYRQPSL

SEQ ID NO: 120610 - protein, 476 aa, unidentified
MPLLGRRHTIQMKKKPQNHKNKRTKIKLDSGLPMINPDAAGIDIGHREHWCAVPVERSAKPVQRFGTFTEDLEKLADWLKECGIKTVAMESTGVYWIPAFQILERRGFEVRLVNARQVKNVSGRKTDVLECQWLQRLHSYGLLNASFRPADEMCVLRSYLRYRDELVCARSVQCQHMQKALQQMNVQLHQVLSDITGLSGLRIIEAILAGERDAEKLANLADRRVHASKATIQRALKGDYRSEHMFLLKVAFELHGTYEKKIHECDEQVIAEMAKLPARVDPKQKPLAPRKPGRAPIRDMVAGKDLREELYRWTGVDLTAIEGIGVLSAQVILSEIGTDMSRWRTEKHFTSWLGLCPDNRISGGKILSSHTRHVINPVADVLRIAATTLERNKSALGAFYRRMKGRLGPASAITATAHKLARLIYRLLKHGDAYVRQGIEVYEQKYRERLIHNLKKTAASFGFQLTETKELAQGVS

SEQ ID NO: 120611 - protein, 360 aa, unidentified
MMKYMIKTQTPCLTAFKTIVSVNFETPIAIGIDVAKNSLMICYRYADNHILTKNIGNNDSDIKKLIKELKLLNFSGKIVSESTGRFHMLSAVMLSEKNFLMYVINPLMSKKYNSASIRKVKSDKRDAEILAEIAIKEEKLPDVFTADRKKLMIKKKISLVATMDKQIQAMQATVKEYQETAKTLKIKLTKAEKGILGVVKNLKEEKEKLEKEIENIFNEQSSVDAINIRRQEIFSSIPGVSNYAATLATVFFLEDYCQNPKQWIAYSGLDISVKQSGQWVGKGKLTKRGNGYLRKRLFSAAWGTIMHDAKFKEYYNYLREKKHSYVESLLMIARKIIRIMFYLSKNNCMYDPNKIVFTTN

SEQ ID NO: 120612 - protein, 352 aa, unidentified
MTVTNLARSITGGVDTHLDVHVAAALDERGTLLGVESFATTESGYKKLLGWLSDFGPVELVGVEGTGSYGAGLTRHLQAEGVRVVEVDRPNRQRRRLKGKSDPQDAITAARAALSGEACGEAKTRDGNVESMRVLRVARASARKGRTQALNQMRNLVSTAPDPIRAELRGLSVFNLLERASSYRPGSKRDIVSLTKFTLRMLARRAISLEEEITELDAILKPLVKETAPELVATLGIGTDAASALLVAAGDNPERLRNEAAFAHLCGASPLDASSGKNQRHRLNRSGDRQANSALWHIVLTRMVYDPRTTEYINRRRTEGLTKKEAVRCLKRYVAREVFSLLPHDTLGLDSP

SEQ ID NO: 120613 - protein, 349 aa, unidentified
MTIVEDRPVITGGVDTHADLHVAAALDPLGGLLGVQEFPATAAGYARLLDWLGGFGSLALVGVEGTGSYGAGLARHLAAAGVRVVEVDRADRQDRHRAGKSDPLDAVSAARAAQSGRASGAPRGRDGAVEAIRALMVAKRSARAVRTQAINQARALIVTGPDELRARFARHRPAALVEAIAALRPRPGDVPGYATRVALRELGRRAQFLDAQLDRLDELIVPLVTARAPGLLSLHGVGPDTAALLLIAAGDHPERLRSESSWAHLCGVAPIPASSGKVSRHRLNRGGDREANHALWRIVITRLGSRPGHPATRAYVERRTKEGLSKKEIIRCLKRYVAREVYHHLRGSV

SEQ ID NO: 120614 - protein, 346 aa, unidentified
MGMDIAVLGVDLGKNICSVVGLDGSGAVVMRRKVRRETLIALAEKLPTCIVGMEACCGAHHLGRVFAAHGHDVRLMSPEYVRPYIKAQKNDDRDAEGIAEAATRPTMRFVELKSQDQLDMQSLHRSRDRLVGERTALINQLRAILLERGMVAPQCKRKLEQFLAVLMDEQGGEGLSPRMTLLVADARAQWAELDRRITAFDAEFVRWVKDNQEARRLMTIPGIGAIVASALVAAVGRAESFDRGRDLAAWLGLVPRQFTTGGKPKLLGISKRGNKYLRRQLIHGARAALPYVAERDTPLGRWAKGLMSRAHRNVAIVAFANKLARIAWAVLQRGERFAATGMSMTA

SEQ ID NO: 120615 - protein, 444 aa, unidentified
MKTELPNIYEQAAGIDIGADKIFVCAKDGEYQVFRCFTEDFRKAAAYIKENGVSRVAMEATGVYWIALKDILEQEGLVVDVVKAGDAKQLPGRDKTDGADCQWIRTLYQKGLLRPCVIPDAAIRELRTYVRMRQDHIEMAAQHVQQMQKALIQMNIRLPQVLSDIMGASGKRIIEAIIKGEKDPEKLVLLCDRQILKNKKEEVVLALEGNYREDYLFLLSQAYQGWQFYNELMKECDKKINEWLERHTKDKAPLEQVTPAKSIRHHKPNIEKLHEKVLLLNDGKDVTRIPGFTDYTVLRLIAEVGTDMSKWKSAKHFVSWLGLAPKKRYSGKGKRHYRGIANTKAAQILRESAQALLRSKHCALGSFGRRIRSTRGPAIAIKAMARKLGILFYNTLTKGIEYVEQGIKKYEEQVRQTELSKVTKWAGRLGYTLIPNQQINVVHQ

SEQ ID NO: 120616 - protein, 477 aa, unidentified
MIYSVGIDLHKGQHRVHCLDEKAQPCDAFSFQTAPEGLATLEQRIFRDGSNPIVVFEPAGLAWLTVAAYLRSRHPGCRVVRAKGQKVAALRRYLRGPVKSDRIDAITLAKMPFIDPERLDEVYLAPAQTHALQRLTRQRKRLEDQITTHKKRIGSIVDGYLPGVRKTFTHAWSMQARAFLHSKINPFAVVRAGEEELHHFLTQAKPGKRGRAESHLVYRACQNVLALQELCAAAGMINEDFFVNLQDEIDRELRLMEAEEAEVGALDRRIEELYRQLHPSDNLRTIPGVGEHTAPVFVANIGDPTRFPGQSEFTNWTGVVPAARQSSDIESKGLRMTKAGPSVVKWALYQAAQIGRRWDPQLASVYYRQMVYHGKNHKQAMGAVMSHIAARVFTVLREDRPYQLKDTEGKSINMLAARDIIMAKYHVPEDIRQIRRKSKVKRAGTPGLLSKRGMVAGREHEAAIAPQPAKIQPSPVT

SEQ ID NO: 120617 - protein, 403 aa, unidentified
MKSVLSIDVANGKSEVLLITEHGEVLIEPYEVNHCLSEFNLLKNKIDNYKLDDLTIFMESTSTYHLPIQRFFTNNNYNVQVINPILGKNNTRNLRKTKTDIEDCYNLANLFFKNTVKIHTKNMNDIYSSMIELSRQEKHLTESLVRSKNRFKQIIANAFPEYIKCFTANDIFGKTSLNFIKEFPHADIIKEKRIDALANNLYKSSKNGCSYNKCLSKAKKIKELANNSYPGIDVDSCEVNNLINIVDVISYNDSKLNDVKQDIVKLARQTPYFNIINSIYGIGETSTAQIIAELGDINRFENIKQLNAFCGLDPTIVQSGKSINYHGPISKRGNRNIRKILFITCCSIIRSSVLHNVDNDLLLYYRKKQAENKHFKECIIACSTKLLRTIFAMCKNNSLYVQK

SEQ ID NO: 120618 - protein, 427 aa, unidentified
MGTCELESGDVALAAIPIRKMTIGIAQTLLLIIDWRIAMPKRMTGRPELKPVNVGAAAIDIGSKMHMAAVNPASTDVPVRSFGTFTQDLHDLADWFKACGVTSVAMESTGVYWIPVYEILEQRGFDVILVNARYAKNVPGRKTDVSDAAWLRQLHSYGLLRGSFRPDAEIAKLRAHLRQRERLVEYAAAHIQHMQKALMEMNLQLHHVVSDITGATGMRIIRAIVAGERNPDVLATYRDVRCHSSIETIRAALVGNNRDEHVFALTQSLELYDTYQAKMLDCDRKLESLIATLTDKGAKPVGKLPKPRIKTKQVNTPTFDVRTALYGVLGVDLTEIHGLGPSLALKLVGECGTDLRAWPSAKHFTSWLCLAPGNKISGGKVLSSRTRRSSSRAAALLRLAAITVGRSDRRSAHSIADCPHVQVSQRR

SEQ ID NO: 120619 - protein, 341 aa, unidentified
MDQVALVGIDLGKHSFHLHGQDRNGKALFRKKLGRKQLIEFFATCEVCTVVMEACAGAHHMARKLATFGHEIKLISPQFVRPFVKSNKNDFVDAEAICEAASRPAMRFVTPKTESQQTLSVLHRVRESMVRDRTRTINQMHGFLLEFGVSLPVGKAAVARLPELLDANALPPRLIAILERLHEHLKYLENQVGEIERELARQLADDDVGQRLMSIPGIGPITASVLAAEMGDGRQYGCSRDFAASVGLVPRQYSTGGRSNLLGISRRGDKHVRSLLVLCARAYLRGLEKRTGRLAEWARAMMARRHSNVVACALANKLARTAWAIVARHGTFDSEFARPSA

SEQ ID NO: 120620 - protein, 412 aa, unidentified
MDMYCGIDWAEDHHDIAVVDRDGRLLARRRISDDAAGLAQLLGLLAEHGDTPEDPIPVAIETPRGLLVACLRATGRQVYPVNPMSVARYRDRHSVAGRKSDHGDSVVLAGVLRTDMHAHRPLPADTELAQAIAVLARAQQDAVWDRTTAHNRLRSHLREYFPAFLAAFADARGGITRPEARAVLAAAPTPADAAKLTVTQLRGILKKAGRSRGLDTEAARLREVFRAPQMRQLPLVEAAMGRQALALLGQLDAACAAAGDLEHAVTESFNLHPDAGIITSFPGLGTLTGARVLAEIGDDRSRFQDAKGLKAYAGAAPITRASGKTRSVTRRKVKNNRLNAAGYTWAFSALTASPGARAHYDRRKDAGDRHAAAQRNLFGRLLGCLHHCLLTCQHYDEATAFPAATKKISQAA

SEQ ID NO: 120621 - protein, 357 aa, unidentified
MKRTAKYVGLDVHQATTVAVVQEESGRVILRSVLATEESAIVEFVRGMRGPIHVAFEEGTQAQWFHDLLVSRVAQVLVCNRRGETRHGNKGDWADAEYVADQLRRGGLHAVYHGSPQRAVLKELGRAYRNLVEDSTRVMLRLKALFRARGMKTAGRSVYHATERATWLAQLRDAGVRFRGETLYAELEVLQRLRPKAKAALLVEAKRDPAWAILQTIPFLGPVRVALLLATLQTPWRFRTKRQLWAYAGLAVVTRTTAEYTLDGGRPVRRRRPPMTRGLNRNHNRVVKDVFKGAATAAASRPGALQDFYQGLLSRGMRPELARVTLTRKLAALTLRLWKTGERYDPAKLTVHAVLAR

SEQ ID NO: 120622 - protein, 336 aa, unidentified
MKLYCGMDLHSTNTMVVVIDEEDHRLIEQRLPNDLVSILEQLEPYREQLVGIAVESTYNWYWLVDGLMDHGYSVQLVNTTAAQQNYSGLKYAGDRHDAFWLAHLMRLKILPTGYIYPRPLRWQRDLLRQRLNLVRERARHRLALQSLWALHRGRRLSFRQLHRGLAQLRMGEPALDLALDAHRRTIGLLDDLVEELESAVYRQLKPTTADQLLHTVNGIGPVLAATINLETGSIERFARVGQYSSYCRLVKSERRSNAKKKGEGNRKCGNKYLSWAYSEAAHFAVRYDDRARRFYDRKKAQRNGIVAIRAVAHKLARACYFILRDQVEYRSDKVFV

SEQ ID NO: 120623 - protein, 429 aa, unidentified
MKIIYPRVCGIDVHKKFIVAVICISESVEPIYLKKRFSTFHNDLIRFREWLIQNDCQNVCMESTGKYYIPVYNVLESHISNIVVANPKWVRAVKGEKDDDKDAKWIADLFKFGIVRSSFIPQKDFRILRELTRYRYKLVNMRSSEKNRFQNALTSGNCKLDMVFTDVFGKSASNIIDLILSDNPYTDEDILSKVHKKCKASPDMILDSVNGTNLTPAQKARIELVNDHIKQLSSNIQKLDKLIDLMIEPYEDYISFLCQIPGVSRNSAIIILSEIGIDMNQFTTSRRITSWAGLTPSSNQSAGKKKSVRISRAGVYLKPCLVEVAHAAVKDKSHPYYANKFNKISKRRGKKRAYIAIARKILVAAYHMLLTGEIWNPADLSEVETPVEQRLKYVKNNLKSDIKQLLDIGLTVEELTLMIQQNANIIATQ

SEQ ID NO: 120624 - protein, 378 aa, unidentified
MDHIGIDVHKRESQICMLAEGGELIEQRIRTEPERFAAVFGKRPRARILIEASTDSEWVARCLEGLGHEVIVADPNFAPMYATRTRKVKTDRRDARTLADANVLGAYRPAHRLSDAQRHVRGRLGVREALVRTRTRYISLIRALLRQQGYRVPSGSAEGFVHRVGAMALPGQLRSLIAPLLAVRLPLNRQLAYSDQVIEHLAVHDPRVQHLRTVPSIGPVTAAAFLATLDDAQRFHHAHEVEAYLGLVPREFSSGESQRRGPITKAGPGRPRWLLIQAAVSILRRRPPEAEALWTWALRIAARRGKHVAVVALARRLAGILYALLRDGSVFQPHRAVGVPGRRWGPGTAAPRVRDDPSPASRAAEQRSKDVHVDRFKI

SEQ ID NO: 120625 - protein, 375 aa, unidentified
MKEKVRFLGLDVHAETIAVAVAEQDGEVRSLGVIANRAESVRKLVRKLGPAEQLRACYEAGPTGYVLYWQLTELGVECTVVAPTLVPVKAGDQVKTDRRDAVKLARCHRAGDLTGVWVPDASAEALRDLVRTREAAKQDQLRARHRLSKFLLRTGRRPPFAGKAWTLPYMAWVRQLCYEQAAQEWTRLDLLHEVEHMSERVKRLEEVIREAVKLAPAAMQEVIRGLQALRGVAEISAVTVVAELGQISRFENARQLMGYSGAVPSEESSGKRQQRGSITKTGNAHLRRIAIEAAWSYRLKPAIGPVLRKRQEGVPDQIKEMAWKAQLRLHKRYARLAAAGKDQRKIVTAVGRELLGFIWAIGRRAEAAIPQQRAA

SEQ ID NO: 120626 - protein, 355 aa, unidentified
MNVTHYIGLDVHKKSISFCIKTADGQITDEGQIAAERYALRKWASERPQPWRGAMEATLFSGWVYDTLKPYAAQLDMAHPAMMRAITAGKKKNDKIDARTIADMVRCDWLPVCYVAPPEVRELRRLLRYRGLVVRESVRMKNKIAGLLMEVGAPYNKEKLHGRKYFTELVKNLEQVPESVKDLLRLTRGAMETFQAAQKQLVKRLLANQELGRRVERLASIPGVGQITALTWALEIADANRFSSSADVMSYCGLTAALKSSAGKEQRGPISKQRNAWLQTALIEAAKLAPHWNPQLKVVHQRELERGHRNRATLAVARKLAAYLLAVDKSGKPFQLRTPPPAEETVAAPESEKAA

SEQ ID NO: 120627 - protein, 353 aa, unidentified
MDKDVTTIAVDLAKDVFQVAYGDGQGRVLSQQRITSRRAFAQQLGQWREVVVVMESCATAHYWGRQCQRLGLPVRLLPAQHVGAYRRRNKTDAADAEALLEANRNAQIKEVPVKDETQQLVLTVHRLREGWKASRTARINALRGHLLGFGQAIPLGADKAIAQASACIEKVPVALHGLLHQLLEEIRQLSQRMTDAERQIIALNKQNPAATHLQQICGIGPLTASALTASAVDVKYFKSGRQLSAWLGLTPREHSSGGSRHLGRISKRGDGYVRMLLVHGARSALSVALATRNKAPDTLNRIQRWATQLHNRIGMHKAIVAMANKLARICWAMWTYGDGYDGNDAGPASVATA

SEQ ID NO: 120628 - protein, 372 aa, unidentified
MQSYYVGLDVHSRESVFVVENEAGAIVARGSVPTTINGLKHLRDSCGLPAATGVALETGTSAFFVARELARLELKPVVIDAHEVRRKAQRPEQKSDTRDALELCEGLRRGFYRSIVHVPSPAISDLRTTLSRRRHFIRIQTAEVNAVKRLLRGVGRNSGRRGSLRTDAHWQSLLASDLVPEQLQEHVRHHYAVWRQGAERVRALDLSLGESARERRDAVKRLETVPGVGPIVALTAIAVFAEVGRFESAKHAASYAGLVPSTFQSGERDAHGHITKRGSAELRAMLCEAAHHARRPAHPLHPHFARVCARRGYKTAVVAVAHRLCRLLFAMLRDGTDFSVTRVGVEEGDFERTTTYKYRLRPKSAGRLPAAG

SEQ ID NO: 120629 - protein, 340 aa, unidentified
MQWSVAIGVDTHKDAHVAVACDSLGRQLGSVRMSASAAGYLGLLEWAQALGRPAFAIEGSGSYGAGLARFLVAAGAVVFECERPQRRDRRRGKSDLIDAAVAARRLVAGDGLSQLRGDGDRDDLRLLLLERRSGQAARTAALNQLHAVLVAAPERLRRRLAALAGTALAHACARLRANAETHLSSAVLQRLGRRVLQLEAELAAVDRELEQLVRARVPELLDECGVGVVCAAQLVVSSGDPARMRSEAAFAALAGTSPVDASSGRQQRHRLNRGGDRQLNRALHVIALARVRHHPETAAYHARLLTSGKTPREARRCIKRALARHFYRKLCQLPRPALTT

SEQ ID NO: 120630 - protein, 342 aa, unidentified
MYYIGLDVHKKTISYCVKDASGRVHQEGKLGATRCELDSWMRTLPQPWTVVMEATIFTGWIYDHLHPHATQIKVAHPLMLRAIAAAKKKNDRVDASKIADCLRCDFLPECYMAPTEIRDRRRTLRYRYLLVRQMVQTKNRISGLLMETGVTHNKQRLHKVGYFRELLASNEEVSESIRPLLRLSRDTIARLQKTERALVSSLQRDPLLTERIKRLRTVPGVGPITALTWALEMGEISRFPSIRQAISYCGLCGDERSSAEKSIRTPISKQRNKNIQFVLIEAAKLAPRQDHDLAVLYAREKEKGNANRATLAVARKMVAYLLAVDRGKRDFVPVEHGSNAAA

SEQ ID NO: 120631 - protein, 323 aa, unidentified
MFYLGVDVAKKKLDCMLLDTSTGKMKSKSVANTPVGFAELVEWLKKNKAVDPHIVMEPTGMYHEAAALALADAGLVVSLINPAQLRAFAQGLGIKNKTDKEDSAVLARFGAAQNPEPWQPPSPSARRLKALLTRRDAVADDLQRERNRQEANDFSSVPEAVSDSIKESIAFLEAELKRLEKMIATHINDDPDLRNKKKLLETIPGVGPRVATHMTTLFAGRTFERAEQLAAYLGLVPVMWESGSSVRGRPHMSKAGPAYLRKVLYLPAVGARRWNPHIKALNDRLLAKGKSKMAAIGAAMRKLAHLCFGVVHSGKPYDPKFAM

SEQ ID NO: 120632 - protein, 399 aa, unidentified
MIENYELIEVFVGLDVGKGEHHAVALDRVGKRLLDRALPNDEARIREILAELERHGRILVVVDQPATIGALPVAVAQAAGTLVGYLPGLAMRRIADLHPGEAKTDARDAFIIADAARTMPHTLRSVQLADTQLAELSMLCGFDDDLAKQATATSNRIRGLLTQIHPALERVLGPRLDHPAVLDLLRTWPTPEALRHAGRRRIGNRLTRLAPRMGERLAVDIIDALEKQTVTVVGTSAATIVLPQLAGMLAGIHEARTTVYAQVEALVEDHPLHQVLMSLPAVGIRTAARILTEVAGKDFPTAGHLASYAGLTPVTWRSGSSIRADRASRKGNKVLKRTLYLSAFAALKDPLSRAYYDRKRAEGKRHNQALIALARRRCDTLFAMLRDGTQYEPQTPAAA

SEQ ID NO: 120633 - protein, 455 aa, unidentified
MTLIYRRCAGMDVHQKSISVCARIRTARNTFTTETAVFRTFTQDLEKMAAWLKERRIRNVAMESTGVYWKPVWNVLEAGKRGLFALVLVNPQHIKALPGRKTDQQDAERIATYLQEGLLRGSFVPPQPVRELRELTRRRTHLQGDRNRIINRVGRLLETANIKLGSVLSNIVGQSGRAILNAIVAGETAAGDLATYTSSRVKRSREEFELALEGRYSDHLRWLLGQLLEELDHLDRRVALVDLRIGQLTRPHTDLLARLCTLPGVDIITAHIILAEIGTDMSQFPDARHLASWAGLCPGNSESAGKRFSGRTRKGDRYLRRVLIQNAWAVAHMKDCALTALFRRIAANAGMKKAAVAVAHRILMLAYYIIRDGGVYREAGGDVYDRRNPERTAKRLARRLQRIGFEVTLKPVVRTQPSPQGPPLPGQTCTKCNAWGIACIHVRPRKTDARKKSSR

SEQ ID NO: 120634 - protein, 350 aa, unidentified
MSIVGGLDIHRKQLTFDYLDTASGEVRRGQICPADRAHLAAWLEGRFTGETADFAMEGCTGWRYVAEELAAAGITPHVGEPADTAALRGRKRHAKTDKTDSRHLRVLLADGRLPECWIPPSHVLECRALLETYHDLRTEHTAWVQRIHAVLFHQGARQLGEQRLRAGEGLATLRSVAAAELSPAGQLQITVALDMLQVLEGHLDALRRRLIEAARQLTGARELHARLYGVGPATALALCCWLGGAGRFSSARKAVRFTGLDITVWSSDRKGPPGRLSRQGPEVLRWCVYEAGKAHARRCAPDHAYYAQVKERIDGKRAAISEARKIIRQAVHILAELGDDALTMDPRPSR

SEQ ID NO: 120635 - protein, 345 aa, unidentified
MNYFAGLDVSLKLTAICVVDGDGNVVREGLADTQPEMLVSWLKDTGLVFSRIGLEAGQCSSWLHKGLALAGFPVVCVETRHAKGVMQAQNVKTDRNDARALAQMMRTGWFKAVHIKGEDSQKLRTLMGSRRCLLDKRRDLDNHIRASLRVFGFKVGLIGQSRFEERVRELIAGDGDLKVGIVALLDARRALQGQVRLLTRMIEGFARKDEICRRLMTAPGVGPLTALAFKTAIDDPARFAKSRNVAVHLGLTPRKYASGEVDYNGGITRCGDDFVRKHLYEAAHSLLVNTKRWFALKAWGVRLAKRSSFKNACVAVARKLAVILHRMWIDGTDFRWGHEEQAAAA

SEQ ID NO: 120636 - protein, 376 aa, unidentified
MKDDSTVYVGLDVHKESITVAYAIDAGEVESLGKIGTTQTEIDRLCKRLQSKASHVRVVYEAGPCGYGLHRQLTQHGFESMVCAPSLIPRKPGERVKTDRRDAAKLVRSLRAGDLTAVYVPGVEDEAFRDLARVWAAVKEDLRQARQRLKSFLLAHGVGYTGRVNWGESHRRWLSEYSFANAWQQLAFEEHRRTIEDRLVQCGRLEAALRDAVVNWRFYPVVLALQAMRGVQFVTAVGMVSEVGDLSRFTHPRQLMAWLGVTPSEHSSGGKRRQGSITKTGNSYARKLLVEAAWSYRHAARVAPEIQRRHEGLPKAIIDRAWDAQLRLCRRYRKLVARGKNANIAVVAVARELAGFIWDIARLAMALALPRSVQST

SEQ ID NO: 120637 - protein, 429 aa, unidentified
MTRISAGVDVSKNRSTVCIIDQDGKVIMRPFLVCHSTEELDFLADTLKRLNGEVRVIMESTSIYQYPIALHLKEKGIFISIVNACKVKKFANTDFRGGKTDKKDSRTIASYGISYWDKLVEWQIPKDTYFNLDLLNRTYMNAKKHRQIILQELQHYIDCAMPGMDKELHSLNLNTKKDFMLDFVEKFWHRDKIVNMTEAEFTEVFTAWAKEKGYRPGKGKAAKIYAIAKSCIPYYPANPTVKTILQCIVDKLSGVNRTLVTIVTQMIEEAKKLPEYQIVREMPGVGDPLAARFFGSAGDIRRFKNSKALVAYAGIDSPPDESGDFSSTHRHITKKGSKVFRDTGYEIMMALRAQKRTWEKVRKNPEVYDYMLRKEAEEKPRKVAKIAALNKFLRIVYARIKELYDNMALAERAKTKTRYKTRAKTKVTA

SEQ ID NO: 120638 - protein, 451 aa, unidentified
MSLEVVNPNAAGIDIGSRSHWVSVGQNSEDVKEYGVYSEDHKELCEWLKKHKVTTVAMENTGTYWQNLFSSLVAYGFEVILVNGRQTRNIKGKKTDILDCQWIQKLHTLGLLSSSFLPDSTTDIIRTYSRHRQNIIKQSASTVMKMQKYFRLMNMRLDVVVKDIVGLTGTKIISDFVNGEKSGKKLAENRHYNCRKSEEEIAKALQYNGREDYYFALQQEWHTYLHLQKQIDAVDIQIKKHLTDVIDNDNNKKQHIASKKPYKRKNKNTIRNVDMNQMSYQYFEGIDLMAIEGVNDATIMALISEIGLAGIKKFRTAKQFTSWLRLAPNNKISGGKVLSNYMPKGSNRLKISLRQAANSIGNLKEGHLSDFFRRINYKRGRATAVSATARKLAVIIWNMLVKGVPYQPPTEYLFLDQKRKMKLVSRIKKNIAKFELKPEDVGFGNLLNMSV

SEQ ID NO: 120639 - protein, 356 aa, unidentified
MKKGITERSGLTIGLDLGDKQTAGCVVSADGEVAETFQIATTRAAVARTMAGFGPSRVVLEVGNHSPWVSRLVEEAGHELVIANPRRVRLIAENDSKTDEVDAELLARLGRIDPALLRPIVHRGEQAQRDRILLQARDGLVRARTQLVNQVRGFAKSLGHRMPSSSTSSFARRAREAFGEDLFPGQGAMLEMIERLTCEIAKMDREAERLCRERYPETGVMRQVKGVGPLTALAFVLTLEDPERFRKSRAVGAYVGLRPRTRKSGEQEPQLRSTKAGDALLRRYLVGAAQYILGPFGPDTDLRRFGLKLAERGGRAAKKRAVVAVARKLAVLLHRLWLTGEVYEPLRGVAPQTVQT

SEQ ID NO: 120640 - protein, 346 aa, unidentified
MKITTIGIDLAKNVFQIHGVNERGKVMVRKQLKRADMAKYFSNLEPCLIGMEACGSAHHWARKLEGYGHTVKLMAPQFVKPYVKTNKNDMADAEAICEAVGRPNMRFVALKNVEQQAILSVHRARQGFVKARTAQGNQIRGLLSEFGIAIPQGIGKVMKQVPEILEDGENGLPGTMRHLIARLADNLKEMDRQVKELEAQIQQWHKENEASRKLAKIPGLGPITASAIVATVGDAREFKNGRQLAAWMGLVPRQNSSGGKQSLLGISKRGDTYLRTLMIHGARAVVRVAEKKAEPGSWMRKLLDRRNKNVAAVALANKNARIVWALLAHDRMFRPDYTPAEKTAGV

SEQ ID NO: 120641 - protein, 310 aa, unidentified
MEITVGIDVSKARLDVHVHPSSESFALDNDEAGITVLVTRLSRLAGVKTIGMEASGRYERLAVAALAEAGLPVVVLNPAQVRHYAMAIGLRAKTDPIDARLIALFVEAVRPEPRPLADAQTSQLAALMARRRQLVTMLAAERMRRQQAPKGAVRLSLARVVTSLEDALRELDAHIDTTVRGTPVWRDKEDLLASVPGVGKTIARTLLAELPELGSLSPKQIGALAGLAPFTRQSGKWRGRSFIGGGRTQVRTALFMGALSAARYNPALKAFRDRLVAAGKPKLVALIATARKLLVILNAIIRDAKPWRNA

SEQ ID NO: 120642 - protein, 353 aa, unidentified
MEYYAGLDVSLKLVSVCVVDEKGKIVREAKVESDTCSLVNFFSELGLPLARVGLEAGPLSQHLYAGLAEAGLDAVLLETRHVKAALSAMTVKTDRKDARGIAQLLRMGWFRPVHCKSMPAQEKRALLTARKLLVSKLIDVEMSVRGILREFGLKVGATTKKLFADKVRMLIAGQTSLQLVIEPLLRCHESLRSEFAILHRQLLAVVRSDEVCKRLMTAPGVGPVAVLTFTATIDDPGRFSSSRSVGPHFGLTPRKYQSGETDVTGGITKAGDAMTRGALYEAAFSMLFKSQRMSALKAWAMQVARRRGMKRAVIALARKLATVLHRMWVDGTEFRWTREALRRRPDRVQRQKL

SEQ ID NO: 120643 - protein, 375 aa, unidentified
MENLSTLYVGLDVHKDSITIAYAIGLGKVEQAGRIGTTQRDLERLVKQLKTKGSHVYVVYEAGPTGYGLYRQLVNQGFECMVCAPSLIPRKPGERVKTDRRDAIKLVRSLRAGDLSAVHVPDVEDEAFRDLARAWSSAREDLGQARRRLKSFLLTHDVRYSGRADWGAAHRRWISGFSFGSEWQQLAFNEHRRTIEDRLAQCERLERALREALPGWRFYPAVLALQAMRGIQFTAAIGLMSELGDLSRFKHPRQLMAWLGVTPSEHSSGETRRQGSITKTGNRYARKLLIESAWSYRHAARVSPEIQRRHEGLPKPIVDRAWDAQVRLCRRYRRLVNRGKNAPTAIVAIARELAGFIWDIGRMGMAAAAPSATQR

SEQ ID NO: 120644 - protein, 343 aa, unidentified
MQIHSVGIDLGKTTFHLVALGAAGKVIVRKKFNRKQLLIYTANVPASLIGLEACSGAHFLGRALRKQGHDVRLIPAQFVKPFVKSNKNDFIDAEAIAEAVERKNMRFVPIKTDDQLDLQGIHRVRDRLICRRTAVINQLRAFLLERGMVFAHRPANLKAAMADILENAEADLTPQMRSLINMLWNEWKLVEEQIKKLDLELERISAADAGCTRIRQIPGIGPVVATAIVAAIGNGAAFHKGRDFAAWLGIVPRQYSTGGKAKLLGISKRGNVYLRKILIHGARAAVLRIKRDRAPIGPWLDALDARAPKNVVVVAMANKLARIAWAVLSSGEDYRPMGNTVAA

SEQ ID NO: 120645 - protein, 425 aa, unidentified
MKISQTAQKIKLNQVVDVSVDVHKDSLNFFFETGGKEYSDECSNRTTVISKRLEAYHRIAAEHGMKSLRIICEPTGQYHNKLFRTARRMGFFTSFVNAESVAKFRVIETNDTGKTDTKDPRVIRTLGQLDKVIKHRMISEEYMILRKLNKIYDEVDEMIVSLRCRLDRLLVELFCDYSFKKDFLYTASGLALIEAYECNPYRIIEAGYVGFCARMRKGAPRIQKQTLRRLWEDAQSSVLNEQPEGYVQTLEMHLRQLINDWLEQIRRKEEMVRKMVEVLSRPRGKDPKIPPSTPGVINDKNLARLLGETGPLSDFANGRMLMRYGGLNIRMRQSGKYQGQNKITKRGRPLMRKVLQHIVLPLVREGCLYGQYYYRKKEIEKMPGNKAMTCVARHFLKKFYGWYKSGEAFNQQRFFSCETQYRRAA

SEQ ID NO: 120646 - protein, 352 aa, unidentified
MNQNIILSTDYHDENCVIRWLDESTGQEQIHKIATCAKGLSALVARAEAIAKPRGGHVVWIQESTTGWARVEALLGRRVKFHLANVVQMPLPPKGKRRKTDKIDTARIQREYRNGALPLAHRPPAWWRQVRRLVALRENLVNRRTALRNWINRYFAHETWQERTGFWSQKGRTRLQKLAAAAPRWDRLVLETKLAELDQLVCQVETVAAAMHEVFKQWPQAQRLDKIAGIGVIAATSIVARIGPINRFASAEQLIAYAGLAPGVQQSDGTRRHGRIGGGGTDGHLRHYLIEATVWARHIPRYRATYERTCQRRGARIGRLMVARMMLRSIWRILRKGETFDPALPAGVGKKN

SEQ ID NO: 120647 - protein, 428 aa, unidentified
MYEVDSIRVEQFRQLKDEIRGSKEHLIVGIDVAKEKHNAFFGTATGKTLLKRLVFGNNMEGFHKLLTFVEAVKVKHCLSSEVFGLEPTANYHKPLGEYLIKCGLDVVLVSGLAVKNNRELIDGRWDKHDTKDSANVADLVSQGKCLYYDYPCMPLRDLRDLLSLKRRFKKLEHGMRVRIRNHLLAQYFPELDRYFVGAGSQGLAIVRWCLAPSVIAALEYDDFVGLVAPGKKSIGQQKRLSAIWKIAVDSIGCDAGGSLEFEAKMMVEELQQTRESIRLIDAKIEDICLQFPEYSYLLTIPGFGPDISSKVLGAIGNPFRFDTGKQVLKMAGMDLSAKRSGKKSQASIPVLSKKGKADLRYALYQAALIASSKNTNFVIYYTNKLRGREKEKGIKTKMRVKLAAKLLIIAWTLMKKQEPFDPEYLKLK

SEQ ID NO: 120648 - protein, 426 aa, unidentified
MAYRIAGIDVHKKMVAVAIADVEVVGTWRFERRQIGTSPTQLRALAEWLVTCAVDEVVMESTAQYWRPVWEALERDWQPQRRQARSHPRAGALHLAQAQSNEGHRGRKRDFPDAERLVKRLVAQELTLSFVPDVTQRLWRTVARRKYQSTCNRVQLQNRLECVLEEMHIKLSSLVADLIGPSARRMLRAIANGETDPGAVAALGSRRLQATPDQLRDALGACTDLHPVYRRLLTLTLDELEVIECHIHQLDEELAQLLRGHQDAVERLAAVPGLGVDSAHQIITEVGPTAATFPTAKRLASWVGACPGHDESAGINHSHRAPNGNRQMRRLLNQAANAAVKAKGSIFELVYRRLVVRLGHAQAIGAIAHRLCRVIWKILHDGVVYDERGPAVTKHRAQRRAAKMIRELRSLGYRVEPGPPPASALA

SEQ ID NO: 120649 - protein, 338 aa, unidentified
MQAYAGIDLHSSNSYIGIIDEQDKRHFGKRLPNSLSQILVALEPFKKDLESVVVESTYNWYWLVDGLQEDGYKVHLANPSAIKQYEGLKHTDDKWDSFWLAHMKRLNILPVGYIYPKEERPIRDLLRRRLLFVRQRTAQILSLQSAIQRNLSFKMAGRAIKMLKEEDTEDLFDSPFLVLSAKSHVAVIQFLTKTIRAIEKAVTYEVKLRKEFQLLKTISGIGDILALTIMLEVGDISRFPKVGNYSSYCRCVKSEKFSNNKKKGENNRKNGNRYLSWAYIEAANFAIRFSEEAHRFYQQKTAKTTKIVAIKALSNKLARASYYVMRDQVAYDASKLFG

SEQ ID NO: 120650 - protein, 372 aa, unidentified
MEHRNTFVGLDVHKDTIDVSMADDDGEVRHYGVIASDLEPLDKVVRALHAPGRRLHFVYEAGPCGFGIHRHLTSRGLECIVVSPSMVPKRSGNRVKTDRRDSLTLARLHRAGELRAIYVPDTTDEAMRDLVRARDDAVIVATQAKFRLKAFLLRQGRRFSGRSDGWSGSYRRWVAGLQFSTVPQHVALQEYQDTITETEQRVDRLTGQLRELAGTWRWAPVVEALQALRGVAFVTAIGLVAELGDLTRFQHPRQLMAFIGLVPSEYSSGPSVSRGAITKTGNPHVRRLLAEAAWAYRSKPRVSRYRLPRHEQLPKVARDIAWKAQLRLTARFHRLVARGKPKPKVATAIARELTGFIWAIGQEVPPTSATRS

SEQ ID NO: 120651 - protein, 410 aa, unidentified
MAQPILWAGIDAGKAAHHCVTINADGQRVLSRRVVNDEAALTDLIRAVKELAGGGSVRWAIDLNSGGAALLITLLLDDGQDLLYIPGRTVHHASGAYRGDGKTDAKDAAIIADQARMRKDLHKFRHRDKTAVDLRILCARRNDLASDRNRAINRLRAQLLEYFPALERAFDFAHRKGALILLTGYQTPDGLRRMGAVRLQRWLRDRGAYNVSDIATRAIQAATAQRTTVIGQPVAALMVARLAQNVLDLNAELVEVDAMIEAKFRQHQLADIIASMPGFGHLLGAELLAATNGDLTRFTTADRLAGVAGLAPVPRDSGRISGNLKRPRRYDRRLLRVFYLAANNSIKTCPESRNYYDRKRSEGNSIPRPSCALHDGASTSYGLCSETTPATDPDHHAPLDAMKGRGLRSL

SEQ ID NO: 120652 - protein, 410 aa, unidentified
MAERFVGIDVALREHRIAVLDRDGEAVGPSFTIVASQDGVTTLLRTLAARGATAAPTLIGLEASGHLWENLEAALVGAGYRVLVLNPLQTRRYRDVVRRKAKTDDIDAHLIAGLLRSGVAQASYVPDEQIQSLRELARLRARLLADRQDYLRQLIAQLDVVLPEHRAVLGDLLTARARGILAQFPTAQHLATASPRAIRRAAEDAGARGFSLDDATSVRDHARRSLYSGKAAAARAHVVRTLVSQLERLTTAMDEVDRAATTLLPPSEPGTGPSDAELLQTIPGIGPHTAATLIGELGALSRFTDARALVAYVGFYPVISESGDHAVPPRMSRIGPRIARHSLYLAAVNAVRLSGEWRTIYLRKKAQGKTAKQALVVVAVKLLHAVYAMLKHRQPYNPSRLLVAPATMRT

SEQ ID NO: 120653 - protein, 331 aa, unidentified
MSVHVGLDVGSRSTAMAWRQKGRPAGTWDIDQTPKGRKNAVKKLLALNPVSVVMEATGIYYLDLAIELSAAGLPVSVINPKSSRNFARLMLQHNKTDAIDAQLLAEYGERMTPRIWKAPTPGQLELRAIGRHINRLTCHRTRAKNELHALLATETTSKLLIEDEQEAIAMFDKRIERFRAAGRELIANDPILSAQFGHMTAAPGMGDVSTLAVLAELTTLPTTLKSAQVSRHAGLDVRVTQSGTSIDKPGRLSKSGNAYLRSAMFMPAMSAIRCDPYVKAFYEGLVSRGKRKMQAICAVMRKYLTGLWACMHTGQDFDTAKLFSEKHLQKA

SEQ ID NO: 120654 - protein, 328 aa, unidentified
MFYLGIDVAKAKLDCCLLLDPESTKRKSKVVANTKAGFATLLQWLSGKGVSFPQLHAVMEGTGVYHEQAALALADAGVTVSIVNPAQIRDFGRGLAVRTKTDGVDSFVLARYGALLKPAAWQPPAPETRVLRALLARREAIAQDLQRELNRQEKANETETPALIRQSIDGSIAFLRKQLVELQENIDHHIDRHPNLRRDMDLLTSIPAVGPQTASNLLAIVHLHRFDSAEQLAAYLGLVPVERQSGSSLLGRARLSKVGPPRIRAVLYMAAIVATKYNPHVKAVYDRLVAKGKAKKAALGAAMRKLVHLCFGVLNTRICYQADYVKNG

SEQ ID NO: 120655 - protein, 437 aa, unidentified
MRRKKNKANKSVNLQVLPVVHPNAAGIDVGAKEHLVAVPCDRDPQPVRTFQAFTPDLHELAAWLKHCGIESVALESTGIYWISLYEVLEQYGFEIRVVNARHVKHVPGRTKTDVLDCQWIQKLHSFGLLNGSFRPDQQIRKLRTYMRLRDNLVVNSTQAVHHLQKALFEMNVQLSNVISDIVGETGLKILEAIIAGQRDPKQLAALCSSRIKASRETVAKSLHGNWDDALLFALKVALETYRFSQTKIQDCDCCIQHHLALFESRAEVTNSPQNLKTQLHRVCGVDLTKIPGIKEQSAQIIISEVGLDMTKWNTEKQFCSFLGLCPNNSISGGKVLHRATRKVYNRAADTLRLCAQSLTHSKSALGAKYRRLKARLGAPKAIVAMAHHFARLVYRMLRYGQNYVEQGIHQYELKFQLQRIKWLKKEARSLNLQLVPA

SEQ ID NO: 120656 - protein, 409 aa, unidentified
MKLFVGLDVSSQDAKVCFLNGDGDRLQAFTITNDLPGAITLKEKILDTVSRSTCKTIKIGLESTSIYSYHPAMFLHNDKELRTYGSQVFMINPKQIANFKKSYSEMDKTDAIDAFIIADYVRFGRHTMSIVKEEQYIALQQLTRSRYQLVHALTKEKQHFLQHLSMKCSQFSQDVNSSVFGNAMMELFLEQFNLEDLIQMPLQELALFLQEKGRNRFGNPEEVAKSIQKAVKGSYRLSKVVEDSIDLLLSTSIRIMRTYQTQIKEIEKGIESLMSTLPQTLESIPGIGPVFAAGIVAEIGQIERFTDETKIAKYAGLFWKKYQSGRFTAENTSLSRAGNQYLRYYLVEAANSVRRNVPEYRDSYAKKAAEVPKHKHKRALVLTARKLVRLVDALLHNNQIYAFGRSADR

SEQ ID NO: 120657 - protein, 354 aa, unidentified
MSIVADHYRFVIGVDTHAATHTYAILESPSGKLRAQETFPTTSAGLERAAAWIGRRTEGDIESALISAECTGSYGAVMSDRFAQVGYRVVEAPTPSTKRLRGKGKTDTLDAITAARSTLVMDLDKLRDRRAGEVQTALKLLSVGREQMNADRLRAINALTALVRAHDLGLDARKPLTASQIKTIAAWRTRDEALGATVARGEAVRLAKQITGLDGDLKANQVQLTKLTTEHVPSLLDMHGVGAVTAAIIMAVWSHPGRIRSESAFAMIAGTCPIPASSGNTVRHRLNRGGDRRLNRAINTIALTRMRTDKATREYVQRKIAEGRSKREIMRSLKRYITRQIHRVLTTNPPLSVT

SEQ ID NO: 120658 - protein, 417 aa, unidentified
MALKIVYPICCGIDVHKSFVVACIASTNCNDVTTYQKRRFSTFTSGLRLLSSWLSDNNCRDVCMESTGKYWIPIFNILEQTCKVVLAHPKYVKAIRGKKTDARDAAWIADIFKHDLVCGSFIPPPDIRQLRDLTRYSVKLTSFTTGEKNRAQNCLTVSNIKLDDVFSDVFGKSASAITEQLLLNPTGNFDVAPYIHHRCKTPSDKIQEAINGFICSEQVQKLKIIRSHMDSLQVCKDSLLSTISSLAEKFRPQIDLLKTVPGILENSAIAIVSEIGVDMSVFPTAKNLCSWAGLVPQNNESAGKKKTTRITRAGAYIKPLLVQCALAVCKSDKHPEIKNRYLMLKKRRGHKKAIIAICRMLLTAIYSMLKKSEAYNPALYRKVDFIPSDRSLSVQQAVAFVARHGYIVVDPDGVLAS

SEQ ID NO: 120659 - protein, 322 aa, unidentified
MHPFHLGIDVAKAKLDCALLGEDGKLRHKVVNNNLEGFHNLSRWLAKQKVQALHVCMEATGVYWEAVAEFLANAPATIVSVVNPAQIKAYGASRMVRTKTDRADAKLIAQFCRESRPEPWQAPSPSEQALRALVLRLEALNTMHTQESNRLQVARPAVREGISSHLAWLDQEIKRVMQMIREHINSDPDLHDKQKLLDSIPGLGERTIPVLLAYCATPERFGNARQAVAFAGLDPRQHESGTSVKAKPRLSKIGHSFLRKSLYMPAMVALNRTQWGQKFRDRLILAGKPKKLIIGAMMRKLMQVAFGVLKSRTIFNPAKHGA

SEQ ID NO: 120660 - protein, 348 aa, unidentified
MGMVGGLDLHRGQITFDVVATETGEVWRGRIWQPDRERFGRWLRVELAGRAGDEPVALAVEGCTGWRYVVEEICAAGFEAHLAEPAETQAARGRKRRAKTDRTDAKLLRELLVAGELPESWIPPECVLEWRERVRLYKSLLDQRTQWTQRIHAELFQHGVAVPDGEIRSEKTRASLTDPALAVSPAARRRIAAGYTMIDATDSELVPLRAELVRFGTHQVACRALVTNHFGIGGLTAVAIWSELGDCRRFSRSMQVVRHAGIDITVDQSDGHRASGHLSHQGPETLRWALYEAAKVSSRPSAPDHAYYASVKQHHDGKLAAIAMARKLVRRCYHTLRAVDPEEVYAVP

SEQ ID NO: 120661 - protein, 347 aa, unidentified
MSEHTPTTMGIDISDQWSTVCVLDTDGEVMEESRFRSTRAGLGRYLEHRAPMRVVLEVGTHSPWMSRQIEELGHEVFVANPRQLRLIYQSDRKCDAVDAEALARLGRVDPKLLRPIRHRAADTQLARAQLRVRDMLVAARTRFILSVRGMAKSMGEVIPRASAESFHVGVPGAVSAPVWQVVEPLVEAVAGLTAKIKGCDAALEELSLTRYPETAALRQISGVGPITALAFVTTIEDPHRFARNRSVGAYLGLCPRRDQSGASDPSLRITKAGDPYLRRLLVGCAHYILGPFGPDSDLRRWGLAYAGRGTNSKKRAVVAVARKLAVLLLSLWKSGETYEPTRHGAAA

SEQ ID NO: 120662 - protein, 357 aa, unidentified
MPSSDVKYIGLDVHKEAIAIAVLNGAGKLVTESIVETKASTLLDFLHGQHGELHATLEEGTWAAWLYDVLKPHVLEVVVCNPRRNALLKEGSKSDKVDARKLAELLRSGMLRAVYHGENGLRALRELARSYEVVSKDLRRVMNRLKALYRAWGIPCTGTQVYSRRHREQWLKKIREAGVRRRAELFYQQLDGLQVLRRTVRGELLAESRKHQAVKVLRQIPFIGPLRAAQLVALMQTPHRFRSKRQLWTYSGLAVETHDSAQYRYVDGQLQLSKKPQLVRGLNQNHNHAMKEIFKSAALSATGRAGAFQDCYAGLLAKGMKPELARITIARKIAAITLTLWKKGECFDAGYVKRQAA

SEQ ID NO: 120663 - protein, 340 aa, unidentified
MQITTIGLDIAKNVFQVHGIDAAEKVVVRKQLRRGQMMKFFAALPPCLIGMEACASAHYWARELTKLGHEVRLMPAKDVKAYVKRNKNDAADAEAICEAVGRPRMRLVRAKSAEQQGRLMQHRARDLLLRQQTQVINALRAHMAELGIVAAQGREGLKQLLKNIADEKDARLPIDARASLIVLAAQLQALHTMIGSIERRIVVQHRANEASKRLECIHGIGVIGASAITATVNDPGAFRSGRDFAAWIGLVPRQDSTGGKQKLGPISKRGDRYLRRILVVGAISVLRRAKLNPEKYPWLTQLLARRPFKVVAIALANKMARIAWALLANGSHYRPRLATT

SEQ ID NO: 120664 - protein, 344 aa, unidentified
MKTIVKQVVGIDVAQKELVVCLGRMYDDWTPELYASKTFANTAKGFAALTGWVKKLTEESSPVRYLMESTGVYHESLAYFLEGKEFEVSIVLPNKISNYFRTLEIKTITDKTASEAIARFGLERRLDKWKRPSEIFRKLKQKTRERDQLVGERTLVKNQLHAEQTEAYPGKESMARMKTRINLLNKQLTQIKEEMKVLVKQDKEVKKSVELISSIPGVGTLTAVTVLAETNGFELIRNKRQLTSYAGLDVKEKLSGTSVKGKPRISKKGNRHLRKAMYMPALAAIRYDGRFKVLFIRLVSKHGIKMKAAVAVQRKLLEMIYTLYKTNTVFDKDYLKEEVMALST

SEQ ID NO: 120665 - protein, 328 aa, unidentified
MYYVGIDVSKNKLDICLLYDGVKGKRKTKSLLNNEHLACMLIAWLAKYIPALQQVNIVMEATGVYHERLAYSLHQAGGRIAIANPLRVRDFAKGMGILTKTDKVDAYILACYSALKQPDVWQPPPIEIRELKALLCRRDALLEDIQRERNRYEKSGSTHTPKRVIESIEAMMHHMKNELAELEALIAEHINQHPNLKKDFELLTSIKGVGTQIGLNMLIILRTNTFTRATQVAAYLGVIPIAKQSGTSVHGRVRLSKTGPAKIRAKLFMSALTAVRFNPHINDLYNRLVNKGKAKMLALGAAMRKLVHLCYGVLNTQQSYDENYAIRT

SEQ ID NO: 120666 - protein, 353 aa, unidentified
MSKVAQKAGEGKRKMCLEEGDRVFVGLDVHKKSVHAALMVNGLIVKTWSMPYEPAVIAASLEPYRMAMCGVVYEAGPTGFSLARHLIAVGHAVTVAAPSKIPRPSGPQSKSDRLDCRRLVEFFANGQLKGVAIPTQTQEADRQVMRARGQCVSKVKRAKQQIKSFLLQHGIGEPDGLAHWSNASVQALRELKLNTQLRFCLDRLLEELAYLRGELKAIEVHLDKLARAPRLRKAVKVLDAHPAVGPVTAMAFALEVYSPERFTQDKAIAGYTGLAPKVHQTGVTRREGPLMKTGRGELRALLVEASWRWVTKDAHARQLFGHLVRNTGSKQKAIVGVARHLSIALWKRLIQAA

SEQ ID NO: 120667 - protein, 382 aa, unidentified
MEENITGFVGLDAHAESTVIGLAEAGRAAPRYVGKASAKVPEIKRALSKLGEPASLLIVYEAGPCGYGLARELRAAGYRCEVIAPSKIPKKSGDRIKTDRRDALKLASLARAGELVAVLIPDERDEAIRDLSRARVDAVRARLKARQQLKALLLRHGRRYTGKSSWTAAHERYLAEITFKHPAQDIAYAEYRHAVGEGEARVQRLSQSLSQQVEGWRMQPVVRALMTLRGLDLIGATTVVAELGDLRRFAHPRHLMGYLGLVPSEHSSGSSHRQGAITKTRQQSRPPHPGRSGVELPLPGTHERAIADPARRPASRDPRDRLASTAAPVPSLSATERARTAVQHSLRCDRARAGRLYLGYRPARQPASLSSAHLNARRSAMS

SEQ ID NO: 120668 - protein, 362 aa, unidentified
MTAASLSQPALNTQHDSALAEDVILGVDTHKDIHVAAVITTLGASLAHQEFPTTAVGYRQLISWAKSFGIVRRAGIECTGSYGVALTRALRREHIDVIEINQPDRATRRKRGKTDAIDADAAARAVLSGRATTIPKTADGPAADLRVLRLAKESAVKARTQAMNQLKAVLLAVEPDLRELLTGLTNPALVATCVALGEDRGEAVFTMRLLARRIQNLGQEIKELTRRMTAAVRSSRPQLLDLVGVGPDSAAVLLSAAGDNPDRLTDEASFAALCGVSPVEQSSGKTQRRRLNRGGHRQADAALYRIVQSRLRWDERTQAYLQRRTAEGMSRREIIRCLKRYVARELYRHIRPSASPVTPSAV

SEQ ID NO: 120669 - protein, 339 aa, unidentified
MLIIGCDFHPGFQQVAVFDNGTGEIEEKRLRHRGEAEEFYRGLVGQEVLVGMEGCGQYPWFERLLAECGHELWVGDAARIRACAVRRQKTDRRDAALLLELLRERNFPRIWVPSLGERDVRQLLMHRHKQVQARTRVKNQLQALALSQGLQKKRSLWTRAGRAEFERLELLPYAGERRRGLLEQLGRLEAEIAGLTRQVEEEVKRRPEAMRLMTHPGVGPVTALAVVLTLGPAKRFASARHVASYVGLIPSEHSSGGRQQLGRITKQGSSFLRFLLVEAGQSAARGDAELGRFYRRLAVRKHRALAKVAVARKLAMRLYWMLREDWTYAQLCRAVCGRA

SEQ ID NO: 120670 - protein, 329 aa, unidentified
MNYAGIDTSNKTLDVVVRKKGKSLDCRTFDNDYAGHMAIITYLRKHKVTRVGIEATGYYHLDLALELDDAKDIEVMIINPRASKNFARAMMQRNKTDASDANVLAEFVERMDFVKWTSPVGEVLDIRACGRRLVSLGKEKTKAKNQLHAFSRTRRTPRFVIDDIHLSIQQIEAQVEKLISHALRLIKQCEFLKERYRRLTSMKGVADKTAIKLLGELGVLAMDMSAKQWVAHAGLYPRAFESGTSVKKRTYIGKVGNRYIREALYMAALSASSHDPHVRGFYLHLIEDNGLTKLQAVCAVMRKMLLAMHGMLKDNKPFDGARFYNLSGS

SEQ ID NO: 120671 - protein, 320 aa, unidentified
MSLNNLPIMIEKPSVVHAGLDVAKATLQLHLQSRLYDLANDPVGHAQLVKLLSAVPGVHLITEATGGYERKAVQALHAAGLPVSVINPMQTRAFARATGQRAKNDPLDAASLSAYGAALRPDPTPAPAAGQTELAALVSWREQLKAALTVAKNQAEHHEQKFVWAEHAKLVRHLESRLAAVTVELNALLARHEAKQKQVNRLVEISGVGVLTAVTVLAQMPELGTLNRGQAAALAGLAPWTRQSGPWEGQRHIGGGRAGVRRALYMSAVAAVRCNRQLKAFYRRLRDTGKKPKVALTAVMRKLIVRMNHALKDPNFCVAQ

SEQ ID NO: 120672 - protein, 412 aa, unidentified
MAVVMNQDSGFDIWCGLDVGKTGHHACALDAAGRKVFDKPLPQDQKRLEELFDKLQTHGRVLVIVDQPNTIGALPIAVARSMGIQVAYLPGLAMRRAADLYPGNAKTDARDAFVIADTARTMPHTLRRVDAGEETLAELKVLVGFDEDLAAEATRLSNRIRGLLTQIHPALERVVGPRLTTKQGLAVIEQLGGPQAMAAASKSKLLRVISKAYPRGAQEFADAITTALAEQTVIVAGTAAAEQVLPQLAASLRQTLDQRHALAAQIEQVVDAHPLAEVLTSMPGVGVRTAARILLDVGDASQFPTAGHLAAYAGLAPVTRRSGTSIRGEFPARSGNKHLKRALFLSAFAALRSDPTSKAYYDRKRAQGKKHNAALICLSRRRCDVLFAMLKNREPYRAPTPTREPSPLPLAA

SEQ ID NO: 120673 - protein, 373 aa, unidentified
MVHSSEAFVGFDTSKLRHAVAIADNGRTGEVRFLGEIENTAAATAKLVRKLAAKYERLTFCYEAGPTGYGLHRQIKSLGHECVVVAPSLIPKRPGDKVKTNRRDAVGLARLLRANELTAVWVPDGRHEAMRDLTRARETAMLDLRSERQQVSALLLRQGRSYPENKKTWTKAHLSWLASQKFDYPEQRLVFEEMMLAVRQAQERLERLEQAVRAAVPDWSLAELVTGLMAMRGLDLISAATLLAEIGDLSRFRTPQQLMAYLGLVPSEESTGDTIKRGPITKAGNRRARRMLVECSWSYQHPPRVGSVKQHKVDAAPPAVREIAWKAQCRLYRRYRALIRNGKLKTVAITAIARELAGFIWAISREIAPAAAQ

SEQ ID NO: 120674 - protein, 364 aa, unidentified
MKLYTGLDLHSSNTYLGIEDKNGKRIFKKKLPNDRELILETLKPYKNDIVGIVVESTYNWYWLVDLLMEAGYKVHLANPSEIKKYTGLKYADDQHDAFWLAEMLRLGILPVGYIYPKEERPIRDLLRKRMHLVRLRTSLIVSLQNILSRNNGFKLKKSDVKALTEDRVTPYLTGSEDLALAGMISKESIDFLTRQISKLEKVIETRVKLKPPYAKLQSVFGVGKILALTIMLETGPISRFEKVGNYVSYCRKVSSKWLSNDKAKGKGNKKNGNKYLAWAFSEAAEGARRCYTQARTYYNRKMQKTNFMCAHNALAHKLARAAYYVMRDEWIFSQRRSSHEKSLITRWLERGTRCNVGRTTNIDW

SEQ ID NO: 120675 - protein, 365 aa, unidentified
MFKLRVEIAAAKKVFGLDPKAPVISCYEAGRDGFSVHRCLVTMGIESHIVDPASIQVTRKKRRAKTDRIDAQKIVNALMRFKAGDQFACRMIRIPDAQAEDERNINREMRTIKTERTAHTNRIKGLLVTQGIPKVVIDGSFPRRLKRMQTAEGKPLGENLRAQLLREFDRLALATAQIRTLQMQQAKMMREAAKEVNKSDAERTLPKCAVTAEFLARLSGIGPVTAWTLSSEVFSWRDIKNRRQLAALAGLTPTPNSSGDEEKEQGISKSGRGELRVLLIEVAWGWLMHQPQSELAKWYHKRFDDGTKRNRKIGIVALARKLLVALGKFIRFGEVPAGAKLKSELTFNYMRLLKIPGTELDCLAA

SEQ ID NO: 120676 - protein, 351 aa, unidentified
MLIIGCDYHPSMQQIAWLDKETGECGERRLEHSTGEAERFYRELQQRGVQVRIGIEATGHTRWFERLLAQLAMELWIGNPAKIAAQRVRKQKTDRQDAQHLLQLLVEERFPRLWVPSPENRDARQLLWHRHRLVQMRTRVKNQLQAIALNEGVRRQHRLWSKQGRAQLESFALGRWTARRRDDLLRLLDQLTPQIAELSQAIEQEAARRPEVRRLMTHPGVGPITALAFVLVLGTPQRFCCGKQVGSYLGLIPCEDSSAGKQRLGHLSKQGNVLLRYLLVEAAQAAVRCDPEWRRRFVRLAMRRQRNIAIAAMARKLAVSLYWLWRKAEAQPVAARFGSQVGQLDLPHGVL

SEQ ID NO: 120677 - protein, 459 aa, unidentified
MAKQRGKKTRKKKDVLEGLPPLNLNAAGIDVGSAEHHVAVPRDRDAECVRKFGSYTADLHRMGQWLKGCGIETVVMQATGVYWTALYDVLESYGLQVQVVNARHTKTLPGRKTDVQECQWLQKLHTFGLLNNSFRPAEEIRVLRSYMRQREVLVAAAGTAIQHMQKALTEMNIQLANVISDISGTTGMKILRDIVSGERDPEKLALHKHARIQASREEIARSLEGTWRPELIFVLEQSLDLYDTYLKKISACDERIEAQLKSMDGKVDVTANPAPEARKLRRPSKHQPRFDLRGQLYRITGVDLTQIDGVDVQTGQTVISEVGVDMSRWETEKHFASWLGLCPDNRISGGKVLKRGTRRVVNRAATALRLAAWNLIRSQSALGAKFRRLRSRLGAPKAITAMAHRLARLIYRMLKYGSQYVDKGMEDYESKYRQQQLQWVAKQAAALNMQLIPAADVVS

SEQ ID NO: 120678 - protein, 338 aa, unidentified
MQWTVAIGVDTHKGLHVAVAFDVLGVELGSREIATTEAGYRDLLGWARGLGVPAFAVEGCGSYGAGLARFLELAGVAVWECERPRRRDRRRGKSDLIDAVIAGRRLLAGEGLSVPRGGGRREELRLLLLERRSAVRARTAALNQLSALVVTVPAQLRARLEPLSGERLARAAARQRSGPEVTAAVLRRLGRRVEHLSEEIGELERALTALVVELAPALLGEPGVGPVCAAQLLVSSGDPKRMASEASFAALAGTSPVEASSGKQQRHRLNRGGDRQLNWALHVIALARMRHHVETAAYYQRLLATGKTRREARRCVKRALARHFYRQLRELSTLPLTT

SEQ ID NO: 120679 - protein, 326 aa, unidentified
MQGKVPSQRSAAAPVYIGIDVCKARLDVHIHPLGESLVVPNDAGGLKRLKKILARYDVVLVVMEATGKFHRQAHRNLHASGFKVAIVNPLRSRRFAEAIGTLAKTDRVDARMLALMGESLKPGALEPTPELMETLQELARGRESAVDSKTAIVNQIQTSNSKVLVRELKRQLSAVETAIENLEAELQRQIDADPVLARRFEILTSIPGIGLVAAVALIVELNEIGQLSSKQVAMIVGLAPIACDSGQKTGRREIRGGRKHLRTALYMPANSAKQHNPDLKIFHDRLIKAGKLAKVAITAVMRKLLVLANTLVREDRLWQPRAVIAK

SEQ ID NO: 120680 - protein, 320 aa, unidentified
MAKQLDQRIIGVDVAKSWLDICDAEQGEAKRIDNTAKGIDAWLRGLSGPAQIAVEATNRYHERFIEQADAQGHRIYVIDAFRLSRYRDAVGHRAKTDRCDAELLARYLRQEHEHLQRWKPRDPRQARLWRLLKRRATLVQTKTRLRQSLADIGALDDAAQDLISHCQRLIGKVDRELQVQARQLGWQADLQRGRDVPGLGPTTSVALVAAFYRHNFRSADAFVAFLGLDVRVRDSGRFRGRRKLTKKGDPEIRRLLYNAAMAGCRDPHWNPYYQSLRDRGISGTAALMILARKMVRVCYALLKQQVLFDPGIRNTPCQAT

SEQ ID NO: 120681 - protein, 384 aa, unidentified
MNKHSILFIGLDTHKEFNEVAYIEEHRRAQPVHLGRFSSSKVAVQKLVRQFESKYPGATLHFVYEAGPCGYWIYRLITSLGHCCYVVAPSLIPKKPGEKIKTDKRDALKLAKLLKSEDLTPIYVPEPEDEAVRDLSRTREVAMKDLKDAKYQLKALLLRNNINYKGTANWSQKHLRWLTELVLPHPAQHIVLQEFLQTITERISRLERLDNELTHHVHQWRYYPVVKAIQAMRGVRLLVAAGVVAELGDLTRFDHPRKLMSYLGLVPSEHSSGGKRHIGAITKCGNGRARRLLVEGAHTYRYAANISTDMQKRQEGLPKDIIDIAWKAQLRLCKRYKKMIAKGKHYNLVVTAIAREMIAYIWAIAKEVVLTPVNTKLRLARVPA

SEQ ID NO: 120682 - protein, 464 aa, unidentified
MTARSRRSKSSTRNLQVLNPRSAGVDIGSRFHVAAVSPDLSDAPVRRFDSFTANLREMVEWFAACGVTTVAMESTGIYWIPLFELLMASGIEAVLVNARYAKNVPGRKTDINDAQWLQKLHSHGLLRASFRPDEQLAALRSYVRQRDMLVRRRASHIQHAQKALMQMNLQLHHVVADIMGVTGRFIIDAILGGERDPGKLAMLRDRRCKNSAAIIAAALDGNYQDEHLFELKVAITMFDAYGEQIQACERLIEEQLASIAQAGAQEGACHSVTPDRLPQSARLRKRSCSFDPRPMIRAMDCHRILEIPGIGPSSLLTIISECGLDMTKWPSAKHFTSWLGLAPHNKVSGGKVLSSSTNRGARQASSAFWTAALVLSRTSTALGAFHRRVAIRIGKAKAVVATARKLATIYYQVLRYDVSGKDPGVESYKASQQQRLMSGLERRAKQLGMGLVPLERTLSMTGVS

SEQ ID NO: 120683 - protein, 347 aa, unidentified
MRFYNRQHRHYCGIDLHVKTMYVCILDTAGQVLVHRNVPSTPEAFLETIAPYRDELVVAAECMFTWYWLADVCAAERIAFVLGHALAMKAIHGGKAKNDKIDSHKIAVLLRGGMLPQAYVYPAAMRATRDLLRRRLHLVRKRGQLLAHIQNTRAQYNLPAFEKRLAYPGNRDGVVEHFPDPSVRKSIEVDVALIDQYDVLVTDLELTIIREAKRHDADTFHRLRSVPGIGKILALTILYEIHDITRFDRVQEFASYARLVKCVHQSAGKKLGTGGAKMGNVHLKWAFSEAAVLFLRHTKDGKKLLAGIEKKHGKGKALSILAHKIGRAVFYMLSRRTIFSMEKFLAA

SEQ ID NO: 120684 - protein, 321 aa, unidentified
MNKDRKIHGVDISKDVFDVMDPKGHHHQFINGPKGFKQYLKLLGEEDLVVMEATGYYHYLLAQFLYGSGIKVSVVNPLSVKRFRQMKLAKIKTDKSDAMAIRDYGLVNEVPLYDGKGKDHAESLQLLALMDIYLKQRTQVKNKLHGEKVLGVPSKAVYGSLKRMLKVLDRELCSLNERLLSLVKETQQQQLTNLKSIPGLGDKTVALLIVLTEGFTKFDNAGQLCNYAGITPTIRRSGSSVRGKSRISKVGNRKLRNLLFLCAFSACKHNKGCREIYERITAKGKSKKLALIAVSNKLLKQAFAIAKSGIPYDENYVSRLT

SEQ ID NO: 120685 - protein, 348 aa, unidentified
MNQRYEKSRQYVGIDLHRRRSVIVRMDGEGEVLECVQIENSVPALIEQVAKAGPGAPVAVEATYGWYWAVDALTETGFAVTLAHPRGVKSMQDRRAKTDKLDATELADLLRLDRLATAWIAPREIRELRELVRYRHKLVGERSAIKASIHAVLGKCGVIPEIADIFGPVGAKMLDSLVLPEPYASRVASQRRIIAVLSAEIAGVESETARRLKDNREYRALLTINGVGPVMAAIFVAEIGDVHRFATADQLTCWTGLTTRVDSSDRRTRYGHVSKQGSRLLRWAAVEGCQRAREPYLAGKRRQIIDRRGRNAQHIATVAAARHMMKVVYYTMRDGHARCLDAPTPVAS

SEQ ID NO: 120686 - protein, 462 aa, unidentified
MKRFYLGGDVSKGYADWTILSENKKPILDNFQLDDTYDGHCRLYAILKSYFDRYPDLEMYAAVESTGGYENNWVNSLKGYQKMFNIKVARLNPLGVNFNQKASMGRNVTDATSAHSIAEYIINFPDNVQYDQDEKWKTLKRHWNFVEMQKKQRTQAINQLETLLYSANPTLMRFKDDKFPSWLLELIILCPTAKKFSKAKPERLAKIPYLTLGKAKALVEEAKQSIASATDENTEMLVKQVALQIKSCTMNIKSQMALIEKEFRCPEIDILTSFSGIGTTSAIGLLLEIGTIERFPNVKSICCFFGLHPKFKQSGDKVIGVRMSKQGSKNMRKILFNITKTAIVHNPLIKELYEKKVAEGMTKMAAIGVCMHKILRIVYGMLKHNKPFNPDTDKQNRERSVQKLQEDKLQHFAWIEKSRKYQKFDSKAPISKRQSKKRKEHVLSQCEVTHSAGSTHSFHCPS

SEQ ID NO: 120687 - protein, 345 aa, unidentified
MAKLIIGIDFSKEKMNFCCMDAQDMSVLMEGEVENSRQGCGEMTGRLRSLRNGLRSCDLLFCGENTGIYSIEVAECLTARKYFVWLENPLQLKLSSGIRRSKTDTLDARMIAEYAYRHQDKAERFSASSEGLKKLRELHLTRRKLKDCEIALKNFSGSLSKDSLPAVKALRKVMESIKEAIRTLEKEIREQLMHEPEFMENASLALTVPGISWVTASAIILDTRNFTRFSTARQYANHTGCVPHEHDSGTSVHRKPRVSKASNRYVNSLLTQGANSLITHNPQTREYAQKKRKEGKPHGFIVNNIRNKIIHRLFAVIRNRKAFDWAYVNEYQTQQPCGKTKTHAA

SEQ ID NO: 120688 - protein, 410 aa, unidentified
MQHATPPSATAPVAGVDWATDSNALCIIDGDGQVLRELVTAADTAGTRRLVEALDRHGVTKVAIERPDGPVVAALLAAGHTVVVIPPRQVRHLRARYGQAGNKHDRFDAFVLADVLRTDHRRLQPLHPDSPQTVVRSTTVRARTDLVETRVALCNQLRAHLRLVFPGAVGLFANLDAPISLAFLARFPSADAAAWLSHRRLAAWLAANRYSGRTPVAVLLGHLQDAPAGLGGEHGHAATATTLAYVHALVAVRDQITALEARIAEQLALHPDRLVFQSLPRAGTVRAAKLLAEVGDARGRFPTAASLAALAGAAPSTRQSGRHQVVTFRWACDKKLRDAVVDFAADSRRASPWAQTIYQRHRAAGKTHQHAVRILARAWLRVIWRCWQDHSPYNPALHGIRPHRRLPLAA

SEQ ID NO: 120689 - protein, 371 aa, unidentified
MYIVGIDIGKNHHEASIVSPEGKQIGRSLRFATTHKGADSLMSFIFKNIGNSPCVFGMEATGHYWYPIYSFLKAKGYTIYVINPIQSDSLRKMYIRQTKNDSIDSFLIAEVIRFGQFGTTSMADENILAMRQLCRYRDSVISSRTEIKLRIGTIMEQIFPEYEKQFSSLWVSTSMGILEKYLTPENIENTPIDELFEIIKDKSHNRLTRAKAISIKEAAADTFGIKIAQDAFSFQLKQLIDRMNFLDKQIEALDCQILEYYKNFDCYLHTIPGIGIIGAATILAEIGDISRFKNSSALVAFAGIDPTVRQSGEFNSTHNHMSKRGSPYLRHAIFLVATTCSFHNSPLNAYYKKKRDQGKHHLTATGAVARL

SEQ ID NO: 120690 - protein, 401 aa, unidentified
MVRYIGMDVHREFAQLAVLEDGLVRDEGKIGVTPEALRRWAEGLRPDDEVALEATGNSDAIANLLMPLVGRVVVSNPSKTRAIAEAKVKTDKVDARILAQLLAADFLPPVWLPDDRTRSLRRQVMRRAHVVRQRTRIKNQVHAILARNLAPTPPVSDLFGRTGRHWLSRQELPADERATVAALLRQLDFHGGELAIVDKELAVDALADPMVARLMTVPGVDAIAGISIVAAVGDFTRFDDPNKLVAYVGLNPRVRQSGNSAPVHGRISKTGRAHVRGVLVEAAWSASRAPGPLRAFYQRVKARRGFQKAVVATARKMTVLAWHLITKDQDYAFARPGLVTHKRRKLELAAGAPSRRGNYGLPGAAYNDKQRRNEEKIAVEKAEHAYEVFVAHWQPKRPSSA

SEQ ID NO: 120691 - protein, 387 aa, unidentified
MNKSNRVIGLDVHPDSFTGAVLLKGKDAASARVVSTSRRVELPELEKWVARHTGEQDVLVLEASGNAFAVAERLRVLQRQVVILDSHRAGKVGKAYCANDRVDAIKIARIYLTALSPVVWQPDAKTRERREVFSAYQAVVKEATRLKQQLRSMLNEHCVRLESGFRLSHPSAINRLLKLREWTPVRAMLLEQLHRGLVSAQARRTRLRRYMAQEVLDEPELLRLTRLCGISLITLYGLSAAIGDIKRFSNSRKLSAYFGLNPSVEQTGNWEGEGALKRHGRGALRALLVQSAKKLLRVNNPLQKWGLAVATRRGRNKAAVAVARKLCVAVWHVMQGHVIGAIERMTTLHTKLHKLATELGLNTIKSQGYETKEAFVQKKLFVLRSYA

SEQ ID NO: 120692 - protein, 428 aa, unidentified
MDFTQNQRLMQITEKTLIIGVDIAKRKHVARAIDDRGRDLVKRLVFENTLPGFKDLLTWVETLKHVERRSDVIIGMEPTGHYWLNLAYYLQDLGFKVVVVNPLKVKRSKEMDDDSPTKNDTKDAKVIAQLIKDGRFNEPTLPEELFAELREGMKLHDMIQEDLSSIKAQVHNLLDRYFPEFLTVFKDWTGRSALHLLTEGYFPVDIINTSEDVLLEEVNKVTKRSIGMKRIRALKTAAENSVGIRVGLKMARQEMAYLMDQYHGLAERLASLENELVTLVMEVPGAEEMMNIKGIGVMTVVAFFSEVGDITQYRDPRQIIKLAGLNLKMNQSGLHKGRTSITKRGRKRLRNILYQVAIPLAKHNAAFSQLHDYYRTRANNPLTGKQSFIALARKLIKIFYVIGTRKCAFDPQRMMQDIPSLQGVQEAA

SEQ ID NO: 120693 - protein, 334 aa, unidentified
MSIQVYVGADIAAESIQIDWLDVNNQQRQQVQIQQQKRDYRRLVKQLTTSVAAEQIHVVMEATGNYWMAFAEYLHQAGLRVSVLNPIQAKHFAQARLQRTKTDRVDAQLLQEYGRMLKPEVWIPPPAICQQLQQYLNRRDDLIAMHSAECNRLHALQHHPQQLSDLLLPLQTHIRDLKAQIEQIEQWIQTLLLSQHEWAEMVRRLRTIKGLGYLTIARILTSTHAFARCSTPDEAVSFAGLAPHVRQSGKWKGKSRVGGGGHASLHQSLYMASLSASRFNPPLHTFYLQLRQRGKLEKVALCAVARKLLILAWTLVVKQRDFDPCYRSRSQAAA

SEQ ID NO: 120694 - protein, 461 aa, unidentified
MSHKDPKRKAHPPKVDGKALEVVHPHAAGIDIGGREHWVAISPEKDAKPVRSFDCFTEDIETMADWLSGHGIQSVVMQSTGVYWIPVFEILQQRGMEVYLVNARHTKNLPGRKSDVAECQWLLKLHTFGLLHASFQPDDEVRTMRTLWRHRAGLVAQAGSTIQRMQKALIEMNIQLSNVLSDLSGVSGMAIVQAILDGQRDPQRLARLADPHVKASKAVIAKSLRGNWRPELLFVLRQELEIYRNWKEKIAACDQQVEQQLQSMAPKVDLEAEPLGQRPRGKRARGNAPKFDVRKELYRLTGVDWSQVDGIDVQVAQTVIAEVGVSLHAFPTEKHFTNWLGLCPMNETSSGRVLNRRTPKVVNRAKVAFRQAASTLIRSQSYLGAQYRRLRTRLGAPKAVTAMARKLACLFYRLMQRGQQYVDKGVQYYEARYKEQQIRGVIYRAKQLGLQVIQPVEGTSS

SEQ ID NO: 120695 - protein, 387 aa, unidentified
MYYCGIDVGKGSHTALVIDDDRQVVVPAFSVANDRAGLEKMATVLSRYQSQLHIGLEATGHYWLNLYSVLSGQDFVLTVINPMQVRAFHKTDIRRRKTDRIDAFWIADFMRFSHPNPSTTETPNLLQLRELTRFRFRLTQQIGDCKRKIISILDRVFPEYEKIFSDIFLQTSRRLLQEAVTAADFTDLDLAELEGILSRTSRGRFGREKAAQIHDAARQSIGVSFLTDAVRVEMRCLLQQIDLLEQQRATVDAQVERLMADIPQHILSIPGVGEVTGAMILAEVGDITRFAGPEKLVAYAGIDASVYQTGQFEGDQMHMSKRGSHYLRYALWQAGMGCLLHNSELSAYYRKKRAEGKAHGVAMGALCRKLLGRVYIILKENRPYQTR

SEQ ID NO: 120696 - protein, 318 aa, unidentified
MTNITYQFNIGVDIAKQKLDVSFSDQRGVSFENNLAGFKLLLKEIENKSQTRVVMEATGGYEKPLAHFLQGQGVAVSIVNAKRVRDYAKALGLLAKNDVIDAKVIRLFADAVNPKLLSAASDTQQALDAQVHRREQLVKQRAMEKQHLETVGNKEAVRSIKRTITFLDKEIERIEKAIKALIKADSTLTEKVDRLSAIKGIGDITAMTLIADLPELGQLSNKEISALVGVAPFCHDSGTQKGKRTTWGGRTQVRSILYMAVLSAVQYNPPLKAFYNRLLMKGKTKKVALVACMRKLLTVANSMLRNNTEWNPNHGKLA

SEQ ID NO: 120697 - protein, 349 aa, unidentified
MKIIAIDLGKFNSMVCFFDSETNEYRFQLIKTERGYLKTLLRKNSSDLVVMEACTASGWVSDLCDELGLTRLVCSTHEEAWRWRNVKRKTDKDDALKLARLAVMQQLKPTHVPSVETREYRGLIKYRKKLVGTDNRLKNSIRAIFNRRGIAISRGERTWHTGRVELDEYRKPLEECSMSDLWRGQLDQQLTQLDQTQQLLKVVEKKLDAMAKADDRVGRVMQIPGVGRVTAEAIVTAIDDARRFQSGRQVSAYAGLVPRQYQSGETDRRGRITKRGSRLLRTLLVECAWCSLKYNPWARLTYERIHGGKRVRRKKAAVALARRILVVAWAMLRENADYDPKKLLLTEAT

SEQ ID NO: 120698 - protein, 317 aa, unidentified
MTESVKVNVGIDVSKDFLDVHVSNVALRRVPNRSSGLSVLKRILSRYSVSLVLCESTGGYENLAVTYFQSLGYDVCVINPRQARDFARSMGRLAKTDRIDAQILCRLADVIDASPERTRFIRPLTDERRQHLVSMVRRRRQLCDLMTAERNRRAKTDDYGSESISTVLDFLTDEVARIDRDIAAHVGSCFSDISSLLQTFTGIGPVTASTLLGELPELGKLNRRQITALVGVAPFNRDSGYMRGRRRISGGRSGVRNVLFMAALSAVRFNPVLKAFFTRLVAAGKPKKVALVACMRRMVCILNAMLRDGSRFEVAVG

SEQ ID NO: 120699 - protein, 373 aa, unidentified
MEEITKVHVGLDVHKDSISVGVAEPGRGAGRVIGKVVHDLGKLTKVLRRIGQPQQLHLVYEAGPTGYGLQRALVAQGYSCEVIAPSQMPRRAGDRVKTDGRDCIQLAECSRAGQLRAVWIPDPADEAMRDLSRAREDAVNSRTQARHQLKGFLLRHGLRFVGKTSWTKAYGAWLGSLNFQAQPAQTAFTEYWLAAQAADARVLRLTQALRDSVGGWRFEPVVKALQSLRGVDVVTAVGLVAEIGDLRRFEHPRKLMGYLGLVPSEASSGDRVRRGSITKTGNAHARRLLTEAAWHYRFKARIGSHAHRRQRDLSPLVCEIAWNAQLRLNKRFAMLQARGVQVNKACVATARELAGFVWAVGRQSMLETGQWPH

SEQ ID NO: 120700 - protein, 454 aa, unidentified
MKILALDLGKFNSVCCLFDSKTRKTQFVTTPTTREHFGVIFKDTKADLVVMEACGPSGWINDLAQDQGHETLVCSTNEEAWRWTNVKRKTDRDDALKLARMAAMGELKGVHTPSLQHREFRSLVKYRKTLDGRINKTKNAIRAWFVNHGIEIATGEKAWHTGRDHINSFRKPLADCGPEELWKGELDIELTILDSLSQQITGVVKKLEAIGKNDERIKRVQTIPGVGPRTAEILVACLDDPHRFENGRQVSAYFGLVPRQYQSGETDRNGRITKRGNPLARTILVECAWASLRYNPWAKGVYERICGKQKTRKKKAAIALARKIAVIAWAMLRDEKDWDPKQMIQVTESFGRMPAGLKDSLQNMKPKENADQRKSRLRKEARAAREAAESRASKTTGQNPMKRKTTGSAKPTASKRKATNSPATRSSRSTSQPNEKRQTKTSEPRRARKPVIPA

SEQ ID NO: 120701 - protein, 333 aa, unidentified
MNSIVYVGMDVHKEQYTICCYSYETDKVEYKQTIPSDYKLVLKYMEQVSSRYDGEVTFVCGYEAGCLGYSLYHQLKDHAVDCKILAPSTMAVTNTHHVKTDKRDAANITRCLAFHTYSEVYVPDNDDNDVKEYIRMRDDQKLYLKKVKQQILAFVLRQGKRFEGGKTYWTIAHLKWLKTLELSDLQRETLNEYLLTYEYLTEKISRFDERIEELASVERYEEKVKHISCLLGIKTHTALSMIVEVGDFERFEKAPKIASFLGLVPSEDTSDTRVNRYSITKAGNSHLRRLLVESAQSYTRGNVGHKSVALKQRQKGNPPEVIAYADKANERLR

SEQ ID NO: 120702 - protein, 430 aa, unidentified
MKSNTQNAKIEAITEKTLVLGIDVGSETHYARAFDYRGIEYSKKPFKFSNTEAGFVTFKEWILDLKERHEKDKVVPGMEPTGHYWFNLGKFLQDNEMKPVLVNPHHVKKSKELDDNNPTKNDRKDPKVIAGLVREGRYMIPYLPDGVYADLRTASNIRFQLQVELTRIQNRISRWFNIYFPEYKTVYGKPDAKSGMLILKAAPLPEDILTLGIDGVNQIWRDAKLRAVGKARAKTLIEAAEHSVGSKEGAVSARMEIRMLLEDYESRNIRLQEVMTLIEGLVKQIPMAEKLLEIKGVGIKTVSGFLAEVGDISRFNTPKELQKLAGLALVESSSGKHKGETTISRRGRKRLRYLLFEVAMSLVAKNPEFRELHNYYTTRRLNPLKKMQSLMAIAAKLIRVFYAMLTKGVDYDPKKMVSDIKRPAVYLQAA

SEQ ID NO: 120703 - protein, 475 aa, unidentified
MQILVSRSCGIDVHKDTLAVSVLIYREGQPLPESHYKEFATHQKALATLRAWLSAHKVTHVAMESTGVYWKPVWYALEQHFQLLLANPFQVKSLPGKKTDKKDSHRLAEFLAHGLVAGSFVPPEETRQLRDLTRYRVKLTEELNRIHNRIHKILEDASIKLDTVVSHILGGTGRSIIEGIVEGKESPRRLAERALGRVRGKQAQLEVALHGRVSEHHRSMLRELLEDYEFVEAKILRLNKTLSERVDWEKVVRLCTIPGVDTITAFTLLAELGSDMRVFANSKKVASWAGLCPGDKESGGKRLSGRTRKGNRWLRRALCQAAWGASRKKDSFLNAFFQRHRANLGVQKAIIATAHRILVIAYCILRDGTVYQERGGDFYDQLNAVRTRQRLIERLRRLGAHVTLSPHPLPVPPPPAPSELASRAPASSSSMAQPPLAGSPRALPPDGKRRRGRPCKCAERQIPCTHSKPMPAPLS

SEQ ID NO: 120704 - protein, 348 aa, unidentified
MLADGLDYVIGVDSHRDRHALAVVGAAAGAQVLAAEVGADAPGYREALALAQVQAAGRRVWAIEGTGCYGRGLARFLLAQGEVVLEVERPRREGRGGRLKSDALDALRAARLVVGEQPLAKPRRGGAREALRCLLVTRESAINARRVALNQLRGLLVTCPEPLRGELRQLTRARLLARCRRFRLQKQREPELAGTLLALRLLAVRIEALALEERTLRREILARVEALAPTLLEKPGVGPISAAQLLVSWSHRGRVKSESAFARLAGAAPIPASSGRVSRYRLDRGGDRKLNRALHQIVLSRRRYDPATATYIQRRLHEGKSEREAIRSLKRYLARQLFRELERTAITA

SEQ ID NO: 120705 - protein, 427 aa, unidentified
MNEPKYKPTLCVGADVHKDEIVLRAVDKALGHEVLERFRVTNNRPGAQSAAATLAQVAAALGYTRIEIGWEATGMLWIPFHRYLSTEPLLHPFELELICFNPKLVAKFKDGLVLRSPKNDDRDAFDIAARIRFGELPVTYVPGDFWQGLRRLTRYRYRLSKALSQEKMRFQSYAFLKASDWKRVKPFTNVLGATSAALLTEFTVTELQQMTHDQLVDLIARRGRGRFADPTTTARLVRQALRTSYPIDPRMDDMVTASLAAMWDHIRYLDRAIKRLDQHIARYIDLIPNPIITIKGLGAVITAGILAEIVDVLRFKEHKHLAQFIGLTWRKSSSAGFVSQNTRLTKVGNVYLRYYFILGANLLRQHNLEYKAYYWRKYQEVSKYQHKRSLVLTARKLVRLVHALLTKNLPYVRPRMTDPSQEDDKLQ

SEQ ID NO: 120706 - protein, 287 aa, unidentified
MNTNTLQNINVGVDTGKANLDIYIRPFDIFFTVSNDDKGIKEAVKIIKKHQPERIVIEATGRLEMPFIIACSKANLPFVIANPIHIKRFAGAIGRRAKTDKLDAQLIAHYSEAIQPQLTQLKPEIMRLMSDLVARRHQILTMQTMEKNRLQQLPKTLHSTINPIITSFKNQIEKIEALIIALIEKTPSYQSKNIILQSVPGIGKVSAAAIISNVPELGYINNKQAASLIGVAPMNRESGRYKGKRIIQGGRAQVRTVLYMAMMSAMQSNPVLRPHISDYWKQENPKK

SEQ ID NO: 120707 - protein, 416 aa, unidentified
MKKIRTKLKYVNSNVLLATVDMGKDSFSGYARCPDRSEMKVSDFPNNLSGFRRFWDILVHTKKTRGLEQIVLGFESTGPYAEPLLHYFQDKGVRLVQVNPMHTKRVKELSGNSPNKTDQKDPKVIADIIELGHALSVVIPQGAAAELRRLTHARERAIKRRTALFNQLHDLVFISFPEFLQVMKDIKSKSARYLLQHHAEPEAILALGLAPLTQVLKCISRGRLGADKAQALFEAASNSVGIREGRIAVNLEIKEMLEGIEGSDRFVDRLESKMDRHLEEIPYSRRLLSIKGISTITVAGVIGEVADFTHFETQEEILKLAGLDLFEISSGKHRGQRRISKRGRPLLRKLLFFAALNAVRKGGIMHERYQKHLAKGMPRTKALIAIARKLFGIMLALVRTKSEYTAAPKTELSEAA

SEQ ID NO: 120708 - protein, 337 aa, unidentified
MQVYGIDLSKEKFDVNFFDTDGKEKSRMVKNGLDSISKFLSKVPGGSVLCAENTGSYGDLLVFLCNQCGVSIALVPGYTVKHSLGILKGKSDPIDAARLREYGERFFDKLSFKTYQSESGSELRQLYSLRSQLVKSRKKLRTGEHAREQMPMQSIRANVILQASLAALDEQVGAVEKEMELIIKSDAGLVENYELAVSVLGVGPVIATDLIIKTGNFSTIGTARKAASYAGVCPFPNASGNMVGKSRTSPFADKELKSLLYMGAKSAVKHNKEYRLYYQKKQQEGKPHYLIMNNVMNKLLRTIYSVVNSKKPYSRDYICLDPREINKNDNGSKKIVA

SEQ ID NO: 120709 - protein, 445 aa, unidentified
MIRKVMEVIYQCVAGLDVHKETVVACRRRLIGNWQVELEIETFRTTSAGLRALAGWLLEWGVTHVAMESTGVYWVPVWNVLEGQFTKLLLVNAQHLKKVPGKKDDQIDAEWIAQCLQVGLLRGSFVPRSEIRQWRQLTRQRTKLTDHRTSVINRIHSVLEQGNIKLSSVATDIMGVSGRAMIRALSQGESDPVRLAALARGRLKTKYEQLVESLDGQLSANQRWMLKQLLEQLEELENKDAIYSERIRGQMLAYERQLELLDTISGIGRRSAENLLAEIGPEMDPFPTDNDLVSWGGLCPGKNESAGKKRSSKTPDGNKWLKRVLVEAGWAATNEKNSYLAALYRRLASRRGKNRAIVAVARTILQAAWHILKEDVNYKELGGDYFERLNEEKSTKYLVKRLEKFGYEVVLKPKKAKKAALELKPKKTKKAKVELKPKKASEATA

SEQ ID NO: 120710 - protein, 365 aa, unidentified
MSSLAASAGAIHLGMDTSKNTIVVAVLMPGEEVPVIDRMWNEEGSVRHLVGRFPDRAALRACYEAGPCGFELHRLLASMGVACEVVAPSLIPRRAGDRVKTDRRDAGRLARLHRAGELTAIRVPTEAEEAVRDLVRARAALLADRKRAQQRITAMLLRHGRAWRGTYWTAAHEQWLAAQRFGEPALASALAHYSAALDTRRAELEAVEDELAVWAARPPLAAAVARLGCYRGIAELNGLTLAAEVVDWQRFGSARAFMCFTGLVPAEYSSGERTRRGSITKAGSAAARTALIEAAWSYRFRPAIGVTLRRRQHDADPQTLARSWRAQRRLHTRYKAMTARGKPAAVAVTAMARELAGFAWAEMTS

SEQ ID NO: 120711 - protein, 353 aa, unidentified
MGIVVALDVHRKQITYKTLDRETGEVKRGRIAPAARVDVRAWLARFAGCEAEFALEGTTGWRFVVEEIERAGHRAHLADPAETAAKRGRKRRAKTDGVDCDLQLKLLCAGELPESWIPPAHLLELRTRVRMRKTLIEQRTAWQQRLQAQLFHQGVPAGLRPRTRAGREALVRAELSPAGRELVSLALRMIDAIDRELVPLDRQLCSFARRQPGCRALIARLYGVGPVSATAILAELGDARRFARSDDAVRHSGLDVTVYQSGEKRAPGHLSHEGPELLRWALFEAALSAARAGSPDHAYYLQVAERIDHNRACLSVARKLCRRAYHILRELGEEALAPVEGDPYAEEAIAAAA

SEQ ID NO: 120712 - protein, 327 aa, unidentified
MDHFAGLDVSVKETSVCVVDGTGRIVREVKVGSEPEALLKVFGNPAYRFKRIGLEAGPLSQWLYSALAEAGLLVICVETRHMRAVLKAQINKTDRNDARGIAQMMRVGLYRPVYVKTLRSQKLRMLLTHRKLLQSKAIAIDNDLRGTLRNFGLKVGMVGTTRFEARIRELVEDLPDLAALIEPLLIVRRTLREQVVILHRRLLAIVRDDEVCRRPMTIPGVGPVVSLTYRATVDVPARFRKSKSVGAVFGLTSSRYQSGEVDWSGEISRCGDEMMRSMLYEAAQSMMHSKKFMAQGVGHADRQALRDEKGDRGPGSPVVRDHAPHVD

SEQ ID NO: 120713 - protein, 420 aa, unidentified
MDVMVERCAGLDVHRDNVVATTRVPGQGRRRFEQQTQTFKTTLPGLAELAAWLAAAGVTLVGMEATGVYWKTVFQVLEDQVECWLLNAHHLRNVPGRKTDVKDSEWICQLVAHGLVRPSFVPPPEIRRLRDLTRLRAAQNNERTRTIQRLEKVLQDAGIKISSVASRSYSKSARAMLEALLSGVTDPEQLAELSKGKMRAKIPQLREALHSRFTIEHHGVMVAQLLAHIDTLDTELRHLTERIELVLAPHSHIIELLSTIPGVQAHAAQVLIAECGLDMSVFPTVGHFASWAGACPGHNESAGRRKSGRTRPGPAWLTSQLTECARAAVRTKETYLASHFAQLRGRRGEPKAIGAIRHDLLVAYYHIVRDQVPYRDLGPNWQRKRYSVEHRATRLQRQLEALGYTVTLDKTNQPEAQPTA

SEQ ID NO: 120714 - protein, 342 aa, unidentified
MKDTMIGVDLAKSVFQLHGASLAGHLKFRKKVTRVQLRHFMAKHEPAVVVMEACGSASYWAREMVKLGHEVRLIAPQYVRPFVKRQKNDAADAEAIVAAAQRPEMRFVEPKSEDQQACAVLFRARERLLHQRTELVNALRSVLYEYGHVFPKGIAHLRRIEAVLTVPASDLPALVRDECQDLLEQISEQTARIEAKTAKTRGLAGTNDTARRLQTMPGVGPQTALAISGFAPPMDSFKRGRDFAAWLGLVPRQYSSGGKERLGRISKAGQTDIRYLLIIGAMSRLTVLARKSIQEGSWLARMLHRKPLMLVAIALANKMARAIWAMMTKKEDYRDPARAVST

SEQ ID NO: 120715 - protein, 409 aa, unidentified
MKLFVGIDVSSKDLQACFMNQEGETLKTLSVANNLPGAVLLRDTMVEVTRLHRLKAIRIGMEATSVYSWHPALFFDQDETLNQWDTKVYVINPRQIKNFKKAYAEMDKTDPKDAWVIADRLRFGRLKKTLIMSEQYQALQRLTRMRFHVTQNMTREKQVFLQHLFYKCSAFTTEVDSSVFGNTLMDFLTEAYSLDEIAQMPVEDLVDYLKTKGRNRFANPECLASSIKKAARSSYRLSKCVEDSINILLATSVEAIRQLERQLKQIDQAITRVMDGIPNTLMTIPGIGPVTCAGILAEIGDIDRFDGQAAIAKYAGLTWGRHQSGDYEAEDRKLGKEGNRYLRYYLIEAANQVRRHDATYSAYYSKKYREVPKHKHKRALVLTARKLVRLIDALLRNNQIYAPEGKVTR

SEQ ID NO: 120716 - protein, 467 aa, unidentified
MVCFNPSTKLTRVRPAELIVARSKELSTRRKFVSYFAPLVGRGSDEERLLREVGTGMQVVHERCCGLDVHKKTVVTCILITLANGEVQRHIRTFSTMTAGLLALSDWLESLAVTVIAMESTGIYWRPVFNLLEEGRSVILVNAQHMKAIPGRKTDIKDSEWLADLLRHGLLKASFIPPAPIRELRDLTRYRKSLVQERAREVNRVHKVLETANVKLSSVATDVLGKSGRDMLSALIEGTTDAQILADLARGKLRKQLPQLQQALDGRVQAHHRLLLKHILAHIIFLEETLEQLQQEIEQHLGPLEEAMTLLMSIPGIAALAAAAILAEVGDDMTRFPSAKHLASWAGVCPGNKQSGGKRLSGKTTQGNATLRAMLAEVVWVISHMKDTYLSAQYHRLARRLGKKKAVVAVSHSLLVIIYHVLSTKQPYSDLGADYFEQRDSTRLTQRSVRQLEALGYTVTLVPKEVA

SEQ ID NO: 120717 - protein, 327 aa, unidentified
METQVASQWVGIDVSKAKLDIALRPGNNAWQVTNQESGWQELSEQLKKYKIELIIIESTGGMERGVAQKLQKEEFKVAVINPKRARDFAKASGRLAKTDKIDAEVLAHFGEALQPSPKPLASESQVALSDLVNRRSQLVEMLNSEQKRAHSVRSSTAKADIETNIQWLKQRIKGMDEQIDQLRQDNEESKKQYELLTSVPGVGRVTAVTLLSMLPELGELPLKKLSSLVGIAPMNCDSGQMRGKRRIIGGRARVRAVLYMSALVAIQHNPVIKAFYQKLLQAGKAKKVALIACAHKLLGFLHAIVKSQKPWRCPENIETKEEKLQAC

SEQ ID NO: 120718 - protein, 403 aa, unidentified
MNMNAVGIDVSKGKSMVAILRSYGEIISKPFEVKHTVSGIRSLIEQIQSIDGESRIVMEHTGRYYEPLVRELSQADLFVSAINPKLIKDFGDNSLRKVKSDKADAVKIARYTLDSWTELRQYSLMDEIRNQLKTMNRQFDFYMKHKTAMKNNLISILDQTYPGANTYFDSPAREDGSQKWVDFSATYWHVDCVRKLSLNAFIDHYQKWCKRRKYNFSRSKAVEIYEASKELVSILPKDDLTKLIIKQAVEQLNTASQTVEQLRTMMNEAASKLPEYPVVMAMKGVGKSLGPQLMAEIGDVSRFTHKGAITAFAGVDPGVNESGSYEQKSVPASKRGSSTLRKTLFQVMDVLIKTKPQDDPVYLFMDKKRAQGKPYYVYMTAGANKFLRIYYGRVKEYLSSLPE

SEQ ID NO: 120719 - protein, 418 aa, unidentified
MKSMEITAVGIDVSKRKSTVAIRRPGGVIVACPFDISHSSHDLEKLVSILKTTGGDIRVVMEHTSNYWKPIALTLKNAGFYVSVVNAMLIHDFSDNSIRKLKTDRADSLKIANYALTFWNQLPPFNDEDETRLVLKEQSRMYERLASTATSLRNGLIALADQTFPSIDQAFGHAIKNADGHEKWVDFFSIYWHRDCVLRLSIEKFTESYRKWCLRRNYKFRTNTAHKLYALAQDAVPTLPKNNGTKALVLQACKSLNAVCEAKQSTQEEMNRLASLLPEYEVVMQMEGTGPITGPALMAEIGDVRRFKNKKALVAFAGIDAPPFQSGNFESKSRHVSKRGSPHLRRTVFLVANIILTLSHKDNSVFCFMDKKRAEGKHYYVYTIAGSAKFLRIYYARVSEYLRTQEPPAAAICLDCKD

SEQ ID NO: 120720 - protein, 440 aa, unidentified
MRLGTRMGNCRVQELAAHRISMSTERRKVCGIDVHKKFLVATILDREGKSETRRILQNTESLLELRKWIQSENCDSVAFESTADYWRSLYLVLENHVPVTIANAHHIKHVPGKKTDITDSHWIAQLELNNLITPSRIFTGEIYDLRTLTRSRELLVQSRTELKNKIHHLLDSTNIRLSSLLSDLFGKSGSIILKGLAQNKPLDEIIESLPKKMRGNADIISATLPASIPSVVLVILQSYLKIVDDLDAEIKLLEGRIRESLATKSRDFQIITSIPGIGFIGASTLIAEIGNVNDFQTADKLTKWAGLTPTVYQSANVTRTGSITKQGSRHIRWILVELAHVAIRSPGRIKSFFERLMPKKGYKKAIVAVARKMLRIVWHLLIHNEVFVDEFPRSKQVKFPKLPNKIQAVGINKLIELLSKASEVIIRDRNQEIFRLDLSD

SEQ ID NO: 120721 - protein, 372 aa, unidentified
MNTIAYIGMDVHTTNYTLCAFTAEKDIPFGRVTINPELKELEKYLRNLHECRGFTHFICGYEAGCLGYSLYHSIMGHKWKGFSVECLIIAPTTIPVPKGIRIKTDWRDAQLIGQTMVHGTCSYVYIPDQNDESVKEYIRMRNDTQTQLKATKQQISAMCTRQGHHYSGKSLWTQAHLEWLKKLTFPNALFRETLDEYLFTYTQQSERLARFDRRIEEMAQTERYNSRVKALSCLKGIAPHTALSLIVEVGDFNRFPEAKNFASFLGLVPGEDSSSTRIHRLGITKSGNNHLRRLLVESANCFSKGSKIKSKALKARQNGNPKEIIAYADRANERLRRKYMNIQLRSKGAIAKVAVARELACFVWGMMTGHID

SEQ ID NO: 120722 - protein, 423 aa, unidentified
MLLNNSLIVGVDVHRRSNVVQVMDGQGQVLTTSLVVSNNRHGTAYLADCLAETARRGNFTTIHIAAEATGAYWLPFFCQLQQEPRLAAWPLTLYPFNPRVVHNFRKAFVDLDKVDLNDAHLVAERLRFGRNLPAPFVMEEQFLPLRSLTRYRFHLVHELVRVKSYCTYLIYLKSSEYTADRDMQPFSNLFGATSRAVLRDFPSMDAIIEMPFDELVEWLDVKGKRRFPDPEANAHKLVQVAEDSYRLPAPWLESVNTILGLNLRHLKTLENLIQRVDTAIAEEMEAIPNTLTTIPGIGPVIAAGIIAELGDLARFDYDQKKVASYAGLKWSRRQSGDFLAEETHLKRQGNRFLRYYFCEAAHLVRMNDAEYNAFYTKKYNEALKHKHKRAVVLTARKLVRLVVRLLTTNQPFRVRRVDSDEVA

SEQ ID NO: 120723 - protein, 331 aa, unidentified
MQAGEGIIGIDISKDSFDVVLRSVRGETHRVFANNQKGFVAMVIWLEKQPERIERICMEATGSYWEGLAEHLYQGGYTVSVVNPYQIKRYGDHLLNRNKTDKADARLIAEFCEKDLERLRVWKPYPAEIKALRSMERRLDELQTMKQQEQNRLKSGVSDPVVIESLEENLKHLEEQIKALKEKIEDHMEQHPELKTKQRLLTSIPGIGKQTANKLIAEIRAIEDFASASQLAAYAGLAPKQFRSGSSVYKQTRISKQGRVELRNCLYMPAVVAADHNPIVIDLKKRMMASGHAKMEVIVAAMKKLLHLVYGVLKSGKPFDPDYGKQLCFSS

SEQ ID NO: 120724 - protein, 464 aa, unidentified
MTAGKKLWRNRKERKQWTRRLQSEDPGLEVVHPQAAGIDVGNSAHYVAVRPDRDPEPVRRFECFTADLHRLADWLQSRGVKTVAMQSTGVYWIPLYEILEERGLEVYLVNARHTKNLPGRKSDVQESQWLLKLHTYGLLNNSFQPVSEMRVLRTYWRQRGEHVREAATCIQRMQKALTQMNVQLANVISDISGLTGQAIIRAIVAGERNPRKLAALSDPRVQASQEEIAKSLEGNWRPELLFVLQQEVDMYDTYQKRIAECDQRLEKHLASLTHPLPVQPPTPKPKTKKPAAKNAPRFDLSSELQRLTGVDLTRIDGIDVMVAQTVLSEVGLDMSRWKTESHFASWLGLCPDNRISGDKVLGRGTRRVVNRAATALRQAANTLMRSRSYLGAQYRRLRTKLGAPKAITAMAHRLARLVYRMLKYGQTYVDKGTQYYEERFRQQQIQLLRKRATKLGLHVVEIHP

SEQ ID NO: 120725 - protein, 406 aa, unidentified
MEVVHPRCSGLDVHKKTVVACVMVPGRKEVRTFGTVTAELLRLSDWLQEEGVTTVAMESTGVYWKPVFNVLETTGLELLVVNAQHIKAVPGRKTDVKDAEWIADLLRHGLVRASFIPSRPQRELRELVRYRKTVVEQRSHLVQRIQKLLEGANIKLSDVASDIVGVSGTAMLRALANGESDLDRLVELAKTSLRNKREELRLALEGSFGSHQRFLLGKQLDQLEFIDRQIADLNLEVEQRLRPFEALLARLDAIPGIGQRNAEQILVEVGTDMSRFPSAAHFASWAKLCPGNDESAGKRRSGRTGMGSRWLRSTMVEAAWSASRVRNSYFAAQYHRLVPRRGKRRAAVAVAHSMLIAIYHLIKDGTIYQDLGPNHFDELDRKRITHRAVRRLQALGYTVTLEEVSA

SEQ ID NO: 120726 - protein, 348 aa, unidentified
MWAIGADVHMKTTTFFAFDDEAKPVTDFNRMFKSVRSNREGFLLVRMYLENIDYQILMENSSKTHDVQWTWEELGMNYIIAPSHELRRITQSDSKTDKHDARELATYMVARFAGAKQFHVCYMCSKEDMMNRQLCRTAKVYMVEIGKCKRRIRSHALVYGIDLPKDVTTNRAKEFMKNMDDPIFDSIIGMMEDLENRRDEILETIRIRFQGNPIYEKILNIPYFGEITAAYLACFICDISRFDGSKQFVASLGLAPRVRNSAETVSHCGITNKGDPHARWLLIQATIGHVRNVKDSPVTLFFNKKNGGSIEMRKELDEDKLMDRSAIVAASAKMARIIYTLVVKDRVW

SEQ ID NO: 120727 - protein, 370 aa, unidentified
MDRLSVGMDVHKEKVVMCGLPERGDTPVMRETFRGDNISGIVKRLKTLSRAWAVESCYEAGPSGYGLARVLTEAGISCRVVAPSLMPRRPGNLVKTDIRDAKELAAALRAQTLEFVRIPSCEEEEVRGLVRCREDIARQLRSFKQIVSHWLLSHGYRPPAKVNRWSPVFWTWVRSLPLPPLERTVLDHYLDVLLMLEDRRKQVESQICELADREEYRERVCRLGSLRGFSKLAAMRLIAEVMDFNRFPKASAFMKFTGLVPSEHSSSERIRRGRITKGGNSHIRHVLVEAVQRAHVSARPGRSLLKRQEGAAGEFRQIALKCLLRLYRKFWAYTKRGVPVGKVRVAMARELAGFVWALMVHPAPVLTAAA

SEQ ID NO: 120728 - protein, 391 aa, unidentified
MTKRKPETVNDLSRCLDLLDMDATLIAVIEMSQSSWLVGGLVPGVERQPLKKLAIDEHALLSLLNRWRAEAEKNGHRITRIAVAFEAGHDGFWLARWLAAQGIEAHVIHASSVAVTREHRRAKTDRLDTELLKRGFLGWLRGERGHCKMVAVPTLAEEDAKRPSRERETLVGEATRIIARVKAAFVRLGIRGFNPKLKAAATRLETLRTPEDEPIPPNTLAALKRDLERHQIVKKQIRELEQTRLDRLEQAPAKGPHAMVLLLARVIGIGVETADMLVQEVLSRNMRDRRAVGRYAGLTGAPDESGTKRREKGLARSGNARVRRGMIQLSWRFLRFQEDSALARWYRQRTTDAPSMRKTLIVALARKLLIALWQFARDGVVPEGVRLRPAA

SEQ ID NO: 120729 - protein, 421 aa, unidentified
MQSEPERLKAFRQLRIDIRGSERHLIVGIDIAKDKHYAFCGTANGKTLCKQIIFPNSKEGFELLTSRVEVVRVKHQLDHVIFGLEPTANYHKPLAEYLIRQGLQLVLVSGNSVKKNRELLDNRWDKHDRKDAANVADLMAQGKCLFYDYPKESIRDLRELLSLKRKLKQHAHGLKTRIRNNLLALYFPEMDHFMNTCQQDNLAVVGTSCSPMLIAGMEYDTFKAQVACVRKGKIQDEHLYKIWQCAKNSIGCNSGVAAAYEGQILVKQLQETTAAYQELDKLILQLCSGLEEYPYLLSIPGIGPDTASKILAYVSDPNRFDHEKQVLKLAGFDLCASRSGGSSAKATPVISKRGQADLRYALCQAALVASTCNAFFCTWFAKKLQGREREKGIFSVIRVKLAAKMLVIAWTLMKKKRDVGL

SEQ ID NO: 120730 - protein, 357 aa, unidentified
MKYYTSTTQFNCGIDLHAHQMYVCLMDRDGKKLVHTNIRNNDFAFFLKLVAPYRHDLTVCAECMFGWYWLADACQSAGLTFVLAHALYLKAIHGGKNKNDRIDSEKIAHLLRTNLIPPAYVYPAAQRPLRALLRQRLYYVWSRAELLARIQSHQLAHNRPTLRQTRPNRDPWEAKLLAAEDHPLRQLALQNDLAMIRHYDKQITALEEELHRQTKRTAPREYALLQTVPGIGEHLGLTILYEIGDIERFPTVKDFVSYCRLVKGTVASAGKLKGLRGAKLGNSYLRWAFGEAAVIAKRDHEVIGPLAQQLEAKYHGNKFKANTVLAIKLARAVYFMLKTKTVFDAQQLVARLARKTK

SEQ ID NO: 120731 - protein, 323 aa, unidentified
MMAQDDLVVVGIDVAKDKVDACIRAFALRQVFPSAAQGHRKLIAWLRKHKVTKAVMEASGGYERDWAKVLRQAGIEVRIVDPKRVRSFALSAGRLAKNDAIDAEMIAWFAETFSEAPSQRHDAAHEELLALVKARKGLLDLKTRLQSQNEHAAPGPVQKAHARVVKSLATEIAKLEAAISTKIKATPDFAERTEIIESVPGFAETTSANLIAGMPELGQVSNKIAAALLGAAPYDDDSGHRRGERHIKGGRRWVRNAIYMPCLGAATQNNPVLKAFYHRLIARGKPPKVALVACMRKLIIILNSLIARRQKWDPSRYPHSERA

SEQ ID NO: 120732 - protein, 343 aa, unidentified
MQIHSVGIDLGKTTFHLVALSAAGKVLLRKKFTQKQLITFTANMQTSLVGMEACSGAHFLGRALRAQGHDVKLIPAQFVKPFVKSNKNDFIDAEAIAEAVVRENMRFVPIKTDDQLDLQALHRVRERLIIRRTSVINQIRSFLLERGIVFAKSPIRLREAIPEVLENANENLTPRMRNLVAMLWDEWKDLELQIVEMNDEVERIASSDAACVRLRQIPGVGPLVATAIVASIGNGAAFKKGREFAAWMGLVPKQHSTGGKAKLYGISKRGNRYLRKILIHGARAVVLRSKRERIAMGAWLTALETRAPRNVLIVAMANKLARITWAVLSTGQDYRAVPNAIVA

SEQ ID NO: 120733 - protein, 354 aa, unidentified
MLNVGVDLHKNQMTVCFMADDGQTSLKVYSTTRKGYNAFLLTLKQMNIPKDQIWVGVETTGNVWCFVKSIENNVGEIKVVNTMKFKVIVESTSKTDNRDAETIATYLKKDMLPTVTLPNECSRMIAKYVKVRDRYVKLSTKLKNQLHALFLEEGIILKAQDLTSVKRMNTLKNSGLHEDVQFLVDGLIDDLITLKARKTVLEKKLTELVAEDKDVELLKTIPGTGLVNASAVRGILGTIERFDSPKKVASYAGLVPWVSNSNETVRHGHITKRGSTILRNALVQMAMGMIRHWAGGKNFENMPLYTWYNQISGRTSGGKSKIALARKMSHIVWAMLKYRESFSYNLIKNPSQVG

SEQ ID NO: 120734 - protein, 346 aa, unidentified
MNITVLGIDLGKRWFHVVGRDGTGHVSLRQKFNRAQLIQFIAQHPPSLIGMETCCGSQHFARKFSAMGHSVKLLPAQYVKPFVKSQKNDFNDALAISEAVVLPTMRFVAVRTEEQMDVQALHRARDRLLQQRLALTNQIRGLLLDRGIEIAQGFYALRTVLPRLLADESVELTPMMRDLGQLLLQMWNHTEQAIQELNGRIERLARSSDLCQRLQSIPGFGPLLATALVASVGNGGAFKRARDLSAWIGIVPRQLSTGGATRLVGITKRGNSYVRRLFIQGARAVWVWKDKHPDDPLQRWLTQVGNRRHAHVAVCALANKLARIAWAVMRSGQEFRTHYRREPVVA

SEQ ID NO: 120735 - protein, 401 aa, unidentified
MKRLSGGIDVGSEFHHITILDEEDHILYNQKVSHQLNEFIETIKQFKKIEKKEKGEISFALEGKNGYSAPLDRILLNQGFTLYNVDNFKLKRFREAFAGEWRDDQRDALMLSKMLKLKDHINSQREKVFIKIEKPSPVTESLKLLSRHQQTLIDEKVRLTNRLRKKLLEVCPEILKLAKLKNKKLIAILAKYPDFSKYKSITVKSLLKIKGIGEKQAPFLLKRLNHIAYMPGLTDIYKTIILSYAKRISELQKEVKDIDKSLDKIGNRSKEVKHLKTLPGVATKLASRFIGEIGDIHRFPSEKQLAIYCGIACVNNDSGKITKAKAVYKANKICKQTLITMAGGSIRLSLQCRAYYLKKRAEGKSHNHALRCLARQLIKVIYKILTEDRDYIIRKELKKVA

SEQ ID NO: 120736 - protein, 463 aa, unidentified
MPGRDDVATSQNNKRRQLQGLPVLRRNVGGIDLGSERHWVCAATLDGSGREIASFGATTPELLRLAEWLKARHVESVAMESTGVYWIAPHEVLEAQGFEVLLVDTRQLARVPGRDKKTDPTDCEWIQRLHSCGLLRGSFRPEETICMLRTLVRDKANLVGERGDWLRRMQKSLDQMNVRVHRAVSDIDGATGMAILRAIAEGERNAQKLAQLRDPRCSKTEQEIAEQLSGHWREDHLFSLQQALKMYDAVQERIAAYEKEILRKLGDMEREEHHEPTAPPLPNANKAKKIKKRGQEAKRQALYRISGVDITQIDAIGVETVEVVLSEYGCDLSRFPTEKQFVSHVTLAPHVPKSGGKPSKKKKRNSASTRVAAALRMAALSLRHSQTALGAYYRKLAQRLGGDVAVFATARKLATLIYRLLRWGQPYVDQGAAAYENRYHQQRIRSLMAKAKELGYQLAPASA

SEQ ID NO: 120737 - protein, 384 aa, unidentified
MTAATRIEKTTAKSPMLFVSFELGESTWKLAFTTGRGQKARQKTITGRQRDAVLAEIERAKRRFGLPRDCRVVSCYEAGREGFWLHRWLVSQEIESHVVDAASIEVNRRLRRAKTDRMDATRLLALLIRFAEGERSVWSVVHVPSPEEEDRRHLHRELLTAKRDRTRLANRIQGLLANQGVRVDWRKPLPAQLSTLRLWDGSSLLAGLCERLGQEWDRLELLNRQIERLERVRREQMREAADPASEKAKRLVALKAIGSNSAWLYVMEFFGWRKFRNRREVGALAGLTPTPYQSGESSREQGIAKSGNRHVRAMAIEIAWGWLRFQPKSQLARWYEERFGRGSSRLRRIGIVALARKILIALWRYLETGVVPEGAELKPAPAVR

SEQ ID NO: 120738 - protein, 368 aa, unidentified
MKNVTTYVGIDAHKKDLFIAMLVGTQTTPVGWTVPNEPSAVRRLVRKLEREAPGPIVACYEAGPCGYALQRQMTTPRVTCQVIAPALIPRKPGERIKTNPRDARKLAELLRAGLLTEVRPPTPEDEAVRDLCRARDDAREDLQRCRHRLGKLLIRRGLHYSGRNWTAGHRRWIDSLSWAQPAERVVVDDYLLAIEQLESRLSALDTGLAEVAETAPYRERVGWLRCFRGIDTLTAILILAELHDFRRFQSPRALMAYLGLVPGEDSTGEKHRRGRITRTGNALVRRLLVETAWHYQHRPRIGVALTRRRKGQPGRVIGIADKAQQRLCRRFRCLMEHHKPAPKVAVAIARELAGFLWAALQPAPTPAG

SEQ ID NO: 120739 - protein, 295 aa, unidentified
MAVAESCLIGIDVSKAQLDVAVSPSGETTGFANTDGGIEELVAWAKGVQPHLIVLEATGGLEMLATGRLTAADFPVAVVNPRQVRDFAKATGRLAKTDRIDAQVIAQFGQAIKPVPRALKDEETQRLSALLVRRRQLVDMLTAEKNRLSRAHLRIQKDVKQHIAWLEKRITKTEGELAAAIKASPIWRAKEKILTSAGGVGPVLATTLLCRLPELGDLNRRQISALVGVCPFNRDSGTMRGKRSIFGGRADVRAALYMSTLAATRFNPPIKAFYDRLIRAGKLPKVALTACMRKF

SEQ ID NO: 120740 - protein, 376 aa, unidentified
MSNVRFIGLDVHAETIAVAVAEPDGEVRALGIIPNRAESIRRLVKKLGPVDQLRVCYEAGPTGYVVYWQLTALGVACDVVAPTLVPTKAGDRVKTDRRDAMKLARSYRARDLTPVWVPDAAHEALRDLVRARGAAKKDQLRARHRLGKFLLRQGRRPPTAMKAWTLRHLTWLNTVHFEHAAQEATLLDYLHEVEHVTNRIKRLEQAVDEAVQQAPPQMRAVIEALQALRGIAQVSAVTIVAEVGELSRFAKPRQLMGYTGAVASEDSSGERTHRGAITKAGNAHLRHIVVEAAWAYRHPPALTARLRKRQALLDDPVKAIAWKAQHRLHARYRTLTAKGKCSQQAVTAVARELLGFVWAIGVAVEAKGRDARSAAA

SEQ ID NO: 120741 - protein, 323 aa, unidentified
MFYLGIDIAKRTMAVALLRPDGKWRSKTVANTSDGHRDLLAWVERHAPAGPVHVCLEATGTYGTTVAETLHDAGYRVSVVNPAAIEAFGRSRLSRTKTDPTDARLIAQFCRAQEPPPWTPLPRELRELQALVRRLDALEGMRQQERNRLAADPGSAVVCASIQHLIDTLDEEMTALKGQIHDHFDRHPPLRQQRDLLTSIPGIGAATAAILIAEFGPMRRFAQARQCAAFVGVVPRDRRSGTSLHGKPVLSKLGSAAVRKALYYPALTALRCNPIVIALRDRLRLRGKHPMAIVGAAMRKLVHLAYGVLKTDQPFDPNFSHTR

SEQ ID NO: 120742 - protein, 452 aa, unidentified
MPAGKDITMHYQKVLKMPESIPYLSVGFDVGADFTWMSIMLPNGILIGKPFKIIHSDPQSRELAISKIKEAQEMYSLESRCFLESTGIYHIPLLCFLRDKGFDCAVINPIITKNSTNMNVRKLHNDKFDSKKAAKVGLDASLKASIVPDDAIIDLRNLVRDYYYFKDLQSAIVLKLHAELKVSFPAYLNVFSKVTTQTSLKLLEAYPLAADMLAAPKDELVETIRSTARFGETYALARYDAICTAAKDAAVFGRALPSNALRIRLYIKMYREYQAHLDSILEELHQAVGKLEGTPDYDRISFIQTLHGVGFLSAVVLLAEMGSFDLFSSPKKLYAYFGLDPGVNDSGKFHGDRVHMSKRGSSLARRILHMVAINNLKVDKATKTPVNPVIYDYYTRKCASKKKSVAVGAVMHKICNIIFAMLRDNKPFELITPEEHRERYAAEHPESVNTAA

SEQ ID NO: 120743 - protein, 387 aa, unidentified
MMKNKGRVVGLDVHPDSFAGAVVQGRDPASAVVLSTSTRVELERLEEWARRHTSTEDTLVLEASGNAFAVAARLRAIGREVEILDSHHAGKVGKVYCANDRVDAVKIARIYLSALSPIVWQPDQKTLERREIFSAYQAVVKESTRAKQQLRSMLNEHCVRLEKGFRLCHPQAITRLLKLREWTPARRMLLQQLHGSLLAARARRTMLRRHMAQEIVAEEALLRLTRLCGINLITLYGVVAAVGDVHRFTQSKKLVAYLGLNPSVSQSGNFQGNGALKRHGRGALRALLIQSGKKLLEVNNPLQKWGLAVAARRGRNKAAVAVARKLCVALWHVMMGHAIGTLERLDTLQTKLSKFATEIGPAALTAFGYHNKADFVQKKLYVLRSYP

SEQ ID NO: 120744 - protein, 384 aa, unidentified
MAGTEPHAWETGRMNSITYVGLDVHKATVAVAVAEGGRGGEVRQLGVFENRPEVLSKLAARLSNNKNCRISFCYEAGPCGYGLHRLLTSYGHDCVVVAPSLIPMKAGDRVKTDRRDALMLAKLHRAGELTPIWIPDAGHEAMRDLVRARATAGRVLSKARQHLQSFLLRHDRIYRGLRAWTSAYRRWLTTVRFDHPAQQIVLQDYIHAVQDAEARRDRLTRQINELLPSWSMAPVAMALQAMRGVALVVAVTVVAEVGDFRRFANPRQLMAYLGLVPSEHSSGGSIRRGAITKAGNALARRVLIEGAWTYRMPARVSRKLHDRLEPLPAAIRDIAWKAQIRLCARYRRLAAAGKPKVVVTTAIAREMVGFIWAIAQIAQPPLSA

SEQ ID NO: 120745 - protein, 396 aa, unidentified
MSMAELRVALDIGSKKHRVGIGSADGHVLEEFEITHDKEGFAKFFDRVALFEKRLKLPVVVAMEGLGGWARPLDRMIQQRGYELLNVNNVKLARFKEIFAGPAKTDKIDTRKILELMHMREVLPLSKRILHRVGVTPVENEQLKRLTRRRRQLVEEKTRVGNRLGSDLQAVSPGLLEITGEVDNLWFLNLLSAREDLSKLAGMKRSSLLRIAGVGKAYAAKIELWQKDATFADETEWVGEMIVSDARRMIELIRQIQGLEERIEAIAASSPLASRLRTITGFGLICSATLAGEIGNLERFEKEASLALYAGMTRLDNSSGNFIGTKNTRQVNTHAKAAMMTGAARHIDNTPESRIYYDKKRAEGKSHNQAVRAFGRHLIRVIWSMLKHERDYIHKH

SEQ ID NO: 120746 - protein, 413 aa, unidentified
MDVLHARCCGLDVHKSSISACILLREAGRVQKHQRRFGAMTQELKELAEWLRQFGVTQVAMESSGVYWKPVWNILEGQFTVVLANAQHIKNVPGRKTDQKDAEWIAQLLQYGLLRPSYVPCEIIRDLRDLTRMRASLSQEASRISSRIQKVLEDANVKLASVATNVLGKSGRAMLEDIITGEDDPERLASLALGHLRVKIPQLRLALEGKIRSHHRFLLRRLLDQIQFVEHEVALLDERLEDIGRQRPDLAQAVARWDTIPGVDRVAAWALLAEIGDNMAQFPTAEHLASWAALCPGNHESAGKRLRGATRQGSPWLCRMACQCAWAAARTKNTYLSSQFRRLAARRGNKRAIIAVAHTLIVIGYHLQKNQSNYDDLGGNYFDRIHSDGLKRYLVKRLEQLGQKVTLEPIEAA

SEQ ID NO: 120747 - protein, 338 aa, unidentified
MNNITTIGLDLAKTIFHAVCLNQAGKIVKRKQLKRHELRRFFSQQPPCLIGMEACGSAHYWARELRAYGHTTKLIPAQYVKGFVRGNKNDYNDALAIAEAVKQAEMRFVAVKTPQQQDVQAMHRLRQQRIKERTALSNQLRGLLMEYGIVMTRGVNELRRRIPVILDDEKNGLTALFRQLLRQGYMQLLELDTHINTYTKILTAHSKQDDRCQRLQTIPGYGPIVASVFASTMGNTREYKRGRDASAALGVVPRQHSTGGQRVLLGISKRGDKYLRSLIIHGARAVVRSAQNKDDNLSRWVNRIRAERGYNKATVALANKMVRMGWAVLHYGTTYRPA

SEQ ID NO: 120748 - protein, 315 aa, unidentified
MTEPESQKVSVGIDVSKNSLDVAVHETHASWSCTNDQSGCGELVSKLKQLRPASILLEATGGFETLASATLSAADLPVSVVNPRQVRDFAKATGELAKTDRLDCRVLAHFAAAIAPPVRPMKSDETQHLEALLRRRRQIVEMLVAEKNRLTNNRDRAVVKDLQAHISWLEQRLKSRDDELQRVLKSSPVWRERDDLLRSVPGVGPVLSLTLLAQLPELGQLNRRQIAKLVGLAPFNWDSGQWRGSRHIWGGRASVRTPLFMATLCAIRVNPPIKSFYRRLIAAGKAPKVAIVACMRKLLTILNTMVKTQTSWRTA

SEQ ID NO: 120749 - protein, 346 aa, unidentified
MLYAGLDLSRKRLDVHILDEDGQTVEVTAVSPDAAGLRRLAAHVLHFGHEVYGAIESMTGARFVHDTLERYGWDVAIADAAKVKGIAPLAAKTDRIDARVLAELARRELVPEIWLPDPTVRAERERARFRLHLVHHRTALKNRIHATLMTFGHPVPVADLFGVGGRELLARLALPEPWSGTLATSLRMVDELGAEIDACEADLRRLGADHPSIPLLLTVPGIGPILAYTIASEIGDIGRFSSPKKLTGYTGLCPLVRQSGNRDVRGPLAKNGPKYLRWALIEAATHAARDAHYRDRYERTKRRLGRQRGAKVARIDIARKLAEAIWHVLTKNEPFAPAGPTMLLVA

SEQ ID NO: 120750 - protein, 342 aa, unidentified
MKTITTIGIDLAKNSFTVYGVDAKGDPVLQRTLPRAGVVRFFAHLPSCLVGMEACASSEYWARVIESLGHEVRRIHPRYVKAYLLGAKNDTNDAAAICEAVQRPNMRFVPHKSPEQTDIQCIHRIRQGFVRSRTALINQIRGLLGEYGIIMRQGASFVRKQLPEIIADEANELSPIMRRNLASLYESLFFLDNRILDQEKLLKDVVRENEACKRLMQVPGIGLLTATILLSVAGVASNFKNGREFAAYLGLVPRQNSTGGKTKLLGISKHGDSYTRTLLVHGARAVLYSLITGRTPQVRQNAWLAELVARRGTNRASVALANKTARIAWSMLAKGTEYKLAA

SEQ ID NO: 120751 - protein, 331 aa, unidentified
MQGREHFTEGILMHSTNVFVGIDVSKRTLDIAACVDNQPTGSWSVSNDQDSINQLVKQLAKLHPAAVVLEATGSLESALVAALAAASLSVAVVNPRQVRDFAKAVGKLAKTDRIDAQVLARFAEAVKPPCRPFPDDATQQLRQLLTRRRQLVEMLTAERNRLSRADLAIQPRIQDHIRWLKIALDDLDQDLGHRIRSSPVWREKDQLLRTVPRVGPVVSNTLLGELPELGSLNRKEIASLVGVAPRNRDSGNFRGRRTTWGGRSQVRCALYMATLVATTHNPTIRAFYAHLLKQGKAKKVALTACMRKLLTILNAMIKKHTPWKQPLPATS

SEQ ID NO: 120752 - protein, 400 aa, unidentified
MISVGIDVSKEKSTVCILKPYGEIVSKPFEVYHVEQELSELATMLLRLNDEVRIIMEATGIYHLPVLSYFKERGFFVAVINPFEMKEYRCQGLRRVKTDKQDAITISHYGIDHWYRLKEYKAQENIYTELKLLGRQYCHYMRMRVESVLELTHLLDYTMPGIKTLLQGWNEKNGKDKLGDFAEEYWHYDNITKKSEKQFIDSYLKWAKKKGYHQNQDKAIKIYALAKEGIPTVSSNTPSTKMLVQEAVRVLREVDHTLMTILTQMRSLAKSLPEYPIVRAMGGVGDVLAPKLIAEIGDVRRFHSGKALIAYAGIDAPPYQSGRLVGTERKISKRGSSNLRKIGYEVMRSLKTHKAPEDAAVYEFILKKEREGKSKRAAKIAGLNKFLRIYYARVMEVYRK

SEQ ID NO: 120753 - protein, 353 aa, unidentified
MIPGGFTLGLDLGDRSHHVCVLDAAGRIIREGALSNTRPALAKLLAEFPRATVAMEAGTHSPWISRYLTGLGAHVLVANPRKLHAISRSERKCDQRDARMLARLARVDPALLHPIQHGTAQAQHDLLGLKLRDALVRTRVNLINAIRFTLKSLGHSVRNPSSESFHKTVLADVPADCLPVIQPLLTVLAHVTEQIKGMERDLVQRGKQVYPATQRLQQIAGVGPLTALCFVLKIGDPQRFGRSRDVGAYLGLCPRRDQSGGTDKQLRISKCGDGLLRRLLVSAAHYVLGPFGPPCALREHGQRLAGAGSAREKKRAVVAVARKLAVLLLSLWKHGTDYEPRATASPVLVMVPA

SEQ ID NO: 120754 - protein, 312 aa, unidentified
MTQIICGVDVSSKTLDARIGREGAVGRFACTAEGVAALAAFCKAHRVDLVAMEATGGYEKMPFALLWTHGVPAAIVNPRSVRRFAEGMGFFEKTDRIDAGVIAWYAEVKRIVAQEPSSEAHQRLEALVTRLRQLTELRTAQTNQRRLVKEAAVLSTFDELLALLKRQTRSLERQIAALVDSDPLWHKLDPAFRSIKGVADRTVARLMAEMPEIGTLSNKAISKLAGLAPFARDSGTFKGKRAVRGGRTHVRSILFVVAELVRRYNPDFAAFHKRLKDAGKPLKVIRIALAHKLLVRLNAKAREVREQIAYAA

SEQ ID NO: 120755 - protein, 321 aa, unidentified
MTTTQASSSPLGVGIDVSKRRLDLAFSDERPGFAADNDADGHARILKAMKAAAPARIVIEATGGYERTMVAELAATGLPVAVVNPRQVRDFAKATGQLAKTDAIDAKVLALFAVAIQPPPRPLDDEQTRAFAELLARRRQLIQMRVAESNRLAQARDRRVRKSIEGVIKLLDRQIAAIDDDIDRHIQNSPIWKEKQDLLTAVKGIGPTTARTLLAELPELGLANRQQIAALVGVAPFNRDSGAMRGRRAIAGGRATVRSVLYMATLVATQHNPVIREHYQQLLARGKRKKVALVACRRKLLVILNAIIRIDTERRSNCAKA

SEQ ID NO: 120756 - protein, 404 aa, unidentified
MHDHDREVTGGVDTHGEVHVAAVIDATGRILGTAPFAATGAGYRRLLRWLRRHGEVARVGVEGTGSYGAGLARYLTGEGVTVVEVNRPDRQRRRRRGKSDTVDAEAAARAALNGDATAAPKTGDGPVESVRVLRLARRSAIKARTQAANQIRDLILTAPDRLRSRLRDLGTDQRVAVCSRFRTADVADPGEATKTALRTLARRHEELSAEIAVLDAHLAQLCATINPALLAAHGVGPEVAATLLVAAGDNPHRMGSEAAFAALCGASPVEASSGKVTRHRLNSGGDRQANNALWRIVLVRMSSDERTKVYVARRTLEGKSKKEIIRCLKRHVAREVFGLLTNPPAAVAGADLRATRLDAGLTLAAAAEALGTWPTRLSELERGVAHDAELSHRYQLWLHPNQAA

SEQ ID NO: 120757 - protein, 334 aa, unidentified
MKKYSIFIGVDISKLTLDIVGINSKNSIVKNSLSISNNIKEIKKYFNSLKSKFNKEEIIVCFENTGLYGYYLSLILSELKIDFSMVPALEIHLSKGMTRGKSDIKDALMIAHYVLSNQFKLKVSTLNEFDIEKLKVLNNQRDKIVKAISIFRHTYESKGFLPKQLTKDTYRINDSIIKNLKKNLGKIENEIETVINLNINLKTNFELIKTIPGIGTQTSVYLLIVTKNFTAFSDARKLACYAGVAPFPFQSGTSINGRTKVHHFADKKLKSLINMCALNAKRWDAQISTYYDKKVSEGKNKMLVMNNVRNKLLHRVFAVVKRQTPYVNTYKFVA

SEQ ID NO: 120758 - protein, 457 aa, unidentified
MTRQSPSRRQRDLAPIHPHAAAVDIGARMHVAAVSPRSDPEPVRTFGTFTGDLQRLADWFEQCRVTTVALESTGVYWIPLYEILTQRGFAVVVVNAREVKQVPGRKTDVCDAQWLQRLHEYGLLRASFQPQGEIPTLRSYLRQRERLLEAAAAHIQHMQKALTQMNLQLQHVVADITGQTGLRIIRALVAGERDPDRLATLRDGRCKTPLATLRAALVGNDREEHIFALAQALELYEVYQTKVAACDERIAAVLERLQAQSPPPATALPPPRRAQPQANEPAVPVRAALHAILGVDLTQIDGIGPYLALKLVSECGSDLAAWPSAQHFASWLGLAPHNKISGGKVLSSRTRRSGSRVAALLRLAAGAVGRTQTALGAFYRRLAARVGKVKAITATARKIAVLVYNTLRHGMAYADPGASYYEERYRQRVLSNLRRRAKSLGYVLEKAEPASTEVVVS

SEQ ID NO: 120759 - protein, 365 aa, unidentified
MNRYIGVDLHTNSFTTCTRSPEGDEAFATWPLSAGGLGAFCAGLREDDELAVEATGNSAFFRDHVMPHVGRVVVVAPQSFQVIRKSVKKTDRNDASALAFFLSKDMLPEARNKEERYQQLNSLCATRDQMVKLKTSLIGKVHGILNRHGIKEKKERLTTKKGLASSLEHGFAPVVQAELTVIAEQIEHLQGSIKKLESSMLEAAKALPGFDGLVSIKGIGERSAAILLSVIGNIRDFESADKLAAYLGIVPRVSQSNETCNVGRITKRGSKLGRTTLVQCTLIAIRYSKYLRDFYERIKERRGAAKAIIATARKFAAIIFNTLRHGWIFEDFTTFTKRTVDLMDNAAALSTTPQPHQPLGSRQLS

SEQ ID NO: 120760 - protein, 380 aa, unidentified
MGKIIRIGIDTSKSVFVLHGVDENELPVLRKRLRRSQVLAFLATLEPTKIGLEACGAAHNWARRIQALGHEVVLLPPQYVKAYVKRGKNDDRDAEAICEAMSRPTMRFVPVKTAEQQAALMLAGIREGLIRRRTQLANTIRGHAAEYGLVAPKGLFHIKPLLARVAEDGEVPDLAKALFATLAQEYDRLQIEIKAIDRKMMAWHKANAPSRKIAKVPGIGPIGASLGVMKVPDPHAFRCGRDFAAWVGLTPKDHSTAGKTRLGVITRAGDEALRRALVVGATAVIKEVTRGKGPRSPWLVEMVRRKPPKLAAVALANKNARIMWKLLVSGEDYDPKRGLASGARGARREERVAALHGGSAPRSSLLATPTIAEASAMTNA

SEQ ID NO: 120761 - protein, 336 aa, unidentified
MFQLGIDVSKKTLDLCLLREGVKGRVKTRKLQNDINAVSAGIAWLSKQHCKPEDVHIIMEATGVYHESLAYGLHKAGGRISLANPHRAREFARGMGMLTKNDRVDAYMLACYGALKAPEPWLPPPEEVRHLSALLRRRDALVADSTREKNRLEKYLATDTPSVIAESVEAMIGQLNAEIKRLDSLIRSHLNQHPELKKDFDLLTSIKSVGYQLGLNMLVILRSHDFTTAEQVAAFLGVVPVEKYSGTSVRGCPKLSKIGPPEIRAKLYLASLCGLRFNPLMKAMYERLCLRGKAKMCAIGALMRKLVHWCYGVLKTQKPFDVGYLSSYARSACKAA

SEQ ID NO: 120762 - protein, 338 aa, unidentified
MKVQTLGIDLAKNVFQLHGIDRRGHTVLARRLRRDQLLKALSELEPCLIGIEASTGAFFWQRQFEKLGHTVRIMAPQYVKPFVHRQKNDTNDAEAICTAVQQRNMRFVPKKTLEQQDIQALHRARQRLVNHRTALISQMRGLLLDRGIAIAVSATRARQLIPKILAAPSDELTGLMREIVSSLYAFMLQIDDRIRTFDRKIAAIFKASDVCQRIAKIRGIGPKTATAMIAAIGDGSDFKNGRHLAAWLGLVPRQHSSGDRKVLMGISKRGSQHLRTLLVHGARAVVRTAVRKTDSRSIWVNELRQRRGYNRATVAVANKNARVIWAVLTSGEPYRAAA

SEQ ID NO: 120763 - protein, 392 aa, unidentified
MYIVGIDIGKNHHEASIVSPKGKQIGRSLRFATTHKGADSLMSFIFKNIGNSPCVFGMEATGHYWYPIYSFLKAKGYTIYVINPIQSDSLRKMYIRQTKNDSIDSFLIAEVIRFGQFGTTSMADENILAMRQLCRYRDSVISSRTEIKLRIGTIMEQIFPEYEKQFSSLWVSTSMGILEKYLTPENIENTPIDELFEIIKDKSHNRLTRAKAISIKEAAADTFGIKIAQDAFSFQLKQLIDRMNFLDKQIEALDIEIMKYYEQFDCYLHTIPGIGIIGAATILAEIGDISRFKNSSALVAFAGIDPTVRQSGEFNSTHNHMSKRGSPYLRHAIFLAATTCSFHNSPLNAYYKKKRDQGKHHLTATGAVARKLTTIIYAVLRDSKPYEPKKFC

SEQ ID NO: 120764 - protein, 341 aa, unidentified
MDKELYFGVDVSKKTLDLAYYDGETIDWKNAHIKVSNDDAGFKKIGSWVAKVGKDFDTFLFCMEYTGLYNQNFRLWLESKEYIYGMVEPRKMHHFEPDLDDDQRSLDRIKTDELDAFRIAIYCEQNHKKILRNPSKLPSPVYFKLKRLLAERKQNTKQSTLYKQQLHDICAYDTDLSVERKKLLLKNMMENQKAIDKEIDSYMNEDASISKNYVLLTSIPGIGRIIALETIVLTENFTAISNPRKYACYIGIAPFKKESGTSVRKRTAVSKKGFSEAKADLSIAVLSAIKNNPSIRDYWIRKRKEKCGGIVLNAVKFKLVLRMFAVIKRGTPYVETDAYKN

SEQ ID NO: 120765 - protein, 346 aa, unidentified
MPTLPRRITGGVDTHLDVHVVAALDELGTLMGVESFSTTPAGYRATLRWLRSFGEVELVGVEGTGSYGAGLTRHLLGEAIAVVEVDRPNRQRRRKRGKSDPQDAITAARAAQSGDALGAAKTRNGSVEAIRVLRLVRISARRNRNRSLNQMRSIVSTAPDQLREQFRGVTGHQLVKRAAKLRPGGRGDVVSVTKLALRTLARRIIAIDEEIAEVEAIMHPMVEAAAPELVALTGVGPDCASALLVAAGDNPERLRNERTFAHLCGAAPLDASSGKQERHRLNRGGDRQANAALWRIVMTRIVYDPRTKHYINRRMREGLTKKEAMRCLKRYVAREVFAHLPRERLA

SEQ ID NO: 120766 - protein, 313 aa, unidentified
MSQNNINILYVGLDVAKLSLQLHLAGTFHLLANDAKGHAQLLKRLRGHPAAHVVCEATGGYEQAVVRALQTAGVPVSIVEAGRVRYFARAQGQRAKTDPIDAAVLSEYGTLFKPLATAPASPQQQQLAELAQRRRQLIQLLISERNHAEHYTDAFRMRQSRQLIKALEKQITQCDEAITTLIAQDPELARKAERLKAIPGVGPVVAATMLAEMPELGSLNTQTAAALAGVAPYNCDSGGQTGVRRINGGRASVRCALYMATLSAVRHDRILKEFYLRLRAAGKKPLVAMTACMRKLVILMNRLLKNYDFHLAN

SEQ ID NO: 120767 - protein, 346 aa, unidentified
MMLIGCDYHPSWQQICWLDTATGETGEKKLEHASGEAERFYRQLPAPALIGMESTGNCQWFVELAATLGHDLWIGDAAKIRACEVRAQKHDRRDAALILKLLLEGRFPRIWTPSGEEKDLRQLLIHRYKLVRIRAQVKNELQHLAMNQGVTKKRKLWSKAGEKVLRELPLAPWAGRRREDLFKVREMLNGQIDLLDQAVVEAAEKNEKARLLMTQPGVGPITSLAFVLTMGDVSRFQRGKQVASYLGLIPREYSSGEHQRYGSISKQGNRFMRMLLVEAAQCAVRYDPQMRSEYLHRCHRKAKGVAKVAAARKLAIRLYWMLRTNTGYPEVVRVESSSRVPLVSAS

SEQ ID NO: 120768 - protein, 355 aa, unidentified
MTNGITTMLTIGIDLGDRRSEVCVLDTDGEVKQRFSVATSREGLEKKLGNLVSARVVIEVGTHSPWVSRWFEGKGHEVIVANPVKVALITKNVQKTDPVDAEFLARLARVDRELLFPIQHRGEQAQIDLQMIRTRDIAVKLRSTAISHVRGAVKSFGGRLSQCSTEAFVSTTRKEVPEALKTALDPMFVLIDQLTKTINGYERQVLKLVEQRYPEVERVSQIKGVGALTGLAFVLVLEDARRFTSSRSVGPFLGLTSKKDQSGDDDPQRGITKAGNRLLRRLLVQSAHYIQGPFGEDSDLRRHGEKIAARGGKRAKKRATIAVARKLSVLMHRLWVSGETYEPLRNSTNTPAKAA

SEQ ID NO: 120769 - protein, 388 aa, unidentified
MNYVGIDISKYKHDGFILSDFGEVINEGFSFANDAEGFRKLEHELNLCGKGNTRIGFESTGNYAINLKLFLEKIGFEFMEINPLLVKKYIKSNTLRRTTTDKLSAKAIAGYMVEKGYRPHRTEFYNKFALKQLTRLRSRLVSIRTSYLVRLTNVLDCIFPEFKPFFGNKFSVTALYILAHYPTPEAISNMNSRSYDILRRKSCGSFSMDKFVTLKHLAKNTVGVHQKCYGVELETLLDLHSQIDCKIDEVEAEIAQIVDELEPPTLSVKGIGTVSAAVIISEFGDFSRFNNPGQMLSFAGLEPGYFQSGTAEHNGHMVKRGSPHLRSTLLNCCRSMRLHNEVFAAYYRKKVSEGKHEGVALSHMAKKLVRLIFTLETKGVSFDPEKLR

SEQ ID NO: 120770 - protein, 360 aa, unidentified
MQTKSKSTTINFKGQNIYVGIDVHLKSWKVTIIVNDMEHKTFSQDSDAKTLSNYLRKNFPEANYFSAYEAGFCGFSVHRDLEGYGIRNIVVNPADIPTTDKEKRQKEDKRDSRKIAKSLKNGELTAIYVPTKEMEELRSLVRYRKALVKDIARHKTRIKSFLFVNGIEIPPELDGASSYWSGKFTNWLKEIRFLTMHNQLVLDGTLETVTFLRQKLLEITRYFITLTKESEYVFKLKLLKSIPGIGLVSALTILTETEDVLRFKNLDKLCSYVGLVPTTNSSGENEKVGRITGRSNRFLREILIESSWAAVRKDPSLMYSYGLLCQRMKPNEAIVRIAKKLLNRIRYVMKNETEYVLSVI

SEQ ID NO: 120771 - protein, 430 aa, unidentified
MATVSIPIVDWLDKPQSFYFAQGYEDRFLWNTVVTNDTRSDAYMIYLGIDVAKNSHVAAAMSSEGEVLLMPFPFANSADGFALLREKLNSLPRLPLLVGLESTAHYGENLIYFLCGNGYHVAVINPLQTAAIRKSAIRKTKTDKVDAFVIAKSLMMEGYTELQQADLQILKLKGLCKTRQNLILMRTRCKIQLGSFVDQLFPELNQFFRSGLHINVSYTLLKAHPRPAEVCSLHLTYLSNLLRKASRGKYTKEDAIRLRELARNSIGTDSPALALQIRQAVSQIELFSTQLEQVENEISTIMDSLHSPIMTVPGIGHLNGAMILSCIGNIQRFSSPAKLLAYAGLDPAVVQSGNFHAKSTRMSKRGNSMLRYALINASHNVVRNNETFAQYYNSKIAQGKSHYCALGHTAHKLIRVIFTLLTKNVAFDLA

SEQ ID NO: 120772 - protein, 360 aa, unidentified
MLKIVYPICCGLDVHRDFVYACIASTENGATTYKSHRFSTFTKGLRELLSWLLQNNCRDVCMESTGKYWIPVYNILESDCKIVLAHPKYVKAIRGKKTDKKDAKWIADIFKHDLVSGSFIPPADIRQLRDLVRYNVKLTSYTTGEKNRAQNCLTVSNLKLDSVFSDVFGKASSNIIGCILKTPSEKISDVSVFRTKGMKATDEEVLDAVDGEMCPEQAEKLRIIRSHMDGLELCKANLMSLILTTAEKYLPEINLVSTAPGLTAHSAISVIGEVGVDMSVFPSSKHLCSWAGLAPQNDQSAGKKKTTRISRAGVYIKPLLVQCALAAIKSKNKHPEIVSRYNALKRRRGNKKPVIAIARM

SEQ ID NO: 120773 - protein, 343 aa, unidentified
MAIVILGIDLGKNVCSLVGVDEDGAVVLRRRMRRQTVLTFAAKLPSCVVAMEACCGAHHLGRLLTAQGHTVKLMSPEYVRPYVKAQKNDDRDAEGIAEAASRPTMRFVDLKSQEQLDLQSLHRVRSRLVGVRRTLLNQLRAILLDRGHIFPQGRRKFEAAIDTLVADPAYEISSRIRQLVIDIRSEWQALDSRIEALNGEFVAIARHDETARRLVTIPGVGVLNATALVAAVGDGAAFRRGRDLGAWLGLVPKQHTTGGKPKLLGISKRGNKYLRMLFIHGARAAMPSLSASQSPLGEWLRGLPARTHRNIAIVALANKLARIAWATLRRKTSFDLRHLAVAG

SEQ ID NO: 120774 - protein, 318 aa, unidentified
MTTPAPALYVGIDVSKDSLDVHVRPTGQASRFTNDEAGIAALATLLRGLRPAGIVLEASGGYEIPLVAALAAAGLAPAVVNPRQARRFAEGLGHLAKTDPIDAADLAHFAEAVRPQPRPVPDADARALGDLLARRRQLVQMRVSEQHRLPTAAGAIRKNIQAHIDYLDRQIGKLEADLAQAVRSSPAWRERDELLQSVPGVGPQVSRTLLAELPELGALSGRQVAALCGLAPFNRDSGRHRGARRIRGGRAHVRAALYLAALVAMRFNAPLRGVYQGLLARGKAKKVALIAVARRLLVILNALVRTGTPWQEKLAVGA

SEQ ID NO: 120775 - protein, 344 aa, unidentified
MAVKESQITVMDEAGKIVKRKRVPSSREGLHEALKGYTQPLKAVLEASYNWGPLYDWLEEIAEEVVLAHPTKVRAIAEARIKTDAIDSETLAHLLRADLIPAAHAPSKDIRARKRVLRHRLFFVRVQTMLKNRIQALVSQHALTPPAVSDLYGKAGLHWLQSLTLPEPDGALLREDLQFLETLRQRIAATEGLIKELAAGDAAVGWLRSLPGVGAFFSVLIRYEVDDMTRFREAKKFASYTGLVPSTYASGQRVVHGRLTKQGNKWLRWAFIEAVTPAIRWSPFCRRYYDKLKARLGPKEARTATARKLAELAWTVWTERRDWQEHQRPEIASKTPAALVPSWA

SEQ ID NO: 120776 - protein, 426 aa, unidentified
MRFIGLDVHRDFCEVAVVEGDACWSGPRVRSTPEDLEVFGQSLGPKDHVVLEATGGALAIARILERYAGRVVMANPMAVRAIASAKAKTDRLDARTLAKLLAAGFLPAVWMGDERTRLLRRLVSRHAQLIRQRTRAKNQIHAVLQRTLKGRPPASDLFGKRGRAWLGDQELPADERETVQASLRQVEFLDGELRLVDRTMAEQALSWPEVRRIMTIPGMGAMAAAGVMATIGDIRRFPTPRHLVAYLGLDARVRQSGSAPARHGGISKQGSSEARHLLVEAAWAAIRTPGPLRAFGERIRARRGANIATVAVARKLAILCWHLLTREEDYAFARPSLVRQKVRLLELAAGDVRRIGYRNPVRVFATPAQHRLEREVGAQAEKAYRRFVKDFQATGKKGAGAITGARNSVPRKGQAARQEQAPDPAL

SEQ ID NO: 120777 - protein, 328 aa, unidentified
MCTLGIDVSKNKIDLCLLTAGPGGKKKHKVLTNEPAVARKVVDWLNAQKCVPESVTVVLEATGIYHENLAYGLHEAGVSVCMANPCRVREFAHGMDILNKNDAVDAFVLACYGELKSPAVWVPPSPEVRKLRALLRQRDALREDVQRTVNRLEKANSTSTPQEVIRSLERTKSWLNEELARIEKLITDHTDNDPGLKADLELLKSIKGVKDQVGREMLALLKDGMFKSASQVAAYLGLTPVEKTSGSSVRGRPHMSKTGPSGVRAKLYVAALTASRWNKQAKAIYERLVAKGKAKKAALGAVMRKLVHLCFGVLKTRLPWDENYVATA

SEQ ID NO: 120778 - protein, 367 aa, unidentified
MKFVGIDLHTNRFTCCYLSDNSKEKQTETFNLDSEGLISFYSSINKDTYVLIEATVNTFSFITLFKDLVKEVIVANTYQLKAIGVPGKKTDKLDAAKLAEKLKVQVISGVQQIVPVFISPKEIRDLRALFATYRSFRKEIGRTKNRIHSLLKENLYPFTKEYIFGKKARKEIRKISPDRLLSFQINLLMDTLEHLEEAFDKLVNEILKAGAQFLPQIEILTSMTGISVISAIAVIADIFDISRFRNSKHFASYLRSAPRVESSNDKTIIKSTTKAGRKLSITLLSQSLNHFRDNNKTLAGFYERASVYKKKGVVRMAICRRVITQIYQMLKKHEYHYFRNPVLHEKKMAEYKKFLQGENIVFSQIAA

SEQ ID NO: 120779 - protein, 402 aa, unidentified
MNSVGIDVSKGRSTVAAMRPFGEVAISPFEVSHTDSELSELARQLKSLDGETRVVMEATGNYHLPVAQALRDAGLYVSVVNAKLVHGYGNNELRRVKTDRKDAVKLANYGLDRWLTLPRYIPEENTRLLLKNCYRQYQQGCKVQTMQKNNLVSLLDTTFPNANRLFHGPVRADGSEKWVDFVAEFWHCECIRERSEKVFTTKYQRWCKKNGYNFSEEKARNIYNEACGCVGVMPKSSTARLLVEQAVSQLKATSSALAALKQEMQTLAAQLPEYPVVMGMFGVGPTLGPQLMAEIGDVRRFYSKKALVAYAGIDAPPNDSGDVTGRHKAMSKVGASSLRRTLFLVMSVYLQNSPLDEPVYQFMDRKRSEGKPYRVYMMASANKFLRIYYATVKAYLNTLEQV

SEQ ID NO: 120780 - protein, 355 aa, unidentified
MDNLRYIGLDVHRDTISAAVLNREGQLIMQSVVPTRAPAILDLLDGIRGTLHVTFEEGIHSAWLYDLLQRRVARVLVCDPRKTSLLKSGNKGDLIDARKLAELLRNDALSPVYHGELSSLEVQRRTRSYTMLTEDTTRIMSRVKAVFRGLAIPYHGKSIYRPDRRESYLAQLPTEGLRQRVELLYQELDAVHRLRLRAKREMLAECRKHPAMKWLQSVPFLGKVRTAVLIGRVQTPHRFRTKRQFWSYCGLALETHDSAQYHVVHGQVERKPRFVQVRGLNWNHNHDLKDVFKSAATMAAVREGVFRDYYCGLLAKGIRPEMARLTLARKIAAITLKIWKEGGMFNAEQVKPQAA

SEQ ID NO: 120781 - protein, 404 aa, unidentified
MHDPTVRFGGVDWATDAHSVCVVDPDGAVRSEFTVAHTADGLAELSRRLTKAGALRVAIERPDGPVVDTLMEAGLQVVVVSSRSVKALRERYGTAGNKSDRSDAYVLADCLRTDGHRWASLQPDSPATVTLRAHVRARKDLVETRVATANQLRAHLQVTFPGAVGLFRDIDSPISLRFLGRFPSAERAAWLSERRLGAWLRANGYCGRKTPTELYARLRAAPRGLTGTEGDTRAAVGLAFVAVLSALRAQIDELTTRIDELLDAHPDADIFRSLPRAGTIRAATLLAEIGDCRARFPEPESLACLAGVAPSTRSSGRLRVVTFRWSSDKKLRDALCDFAGDSWRGNVWAEHRYRQLRAANKSHPHAERILARSWAHIIWRCWQDHTPYDPAKHTALQHLIKNAA

SEQ ID NO: 120782 - protein, 374 aa, unidentified
MEQTSIGYVALDTSKLRNAVAIAVDGRDGEVRYLGEIDNTPAAISRLVRKLARQYTKVTFCYEAGPTGYGLYRQITGLGHECIVAAPSLIPRKPGDRVKTNRLDALSLARQLRAGDLTAVWVPDPHHEAVRDLTRARGAAVRDLRVKRQQVSALLLRLGQPYPGKTTWGKTHLTWLAGRKLEHLEQRIAFEEMLLAVRQASERIARLEQAIRAMVPEWSLASTATALMALRGIDLIAATTLLAEIGDLTRFRAPRELMAWLGMVPSENSTGERVRRGAITKAGNRRARSMLVECAWSYRHPPRVGAAKLAKVEAAPLAVRDIAWKAQTRLTARYRALRRAGKLDTVAITAVARELAAFIWAVGLAVGAGATPPA

SEQ ID NO: 120783 - protein, 386 aa, unidentified
MQNLNDLSRSLIALEPAVTLIAVIEMSLSSWLVAGIVPGLERQPLKKLAVDESALLKLLHRWREEAEKAGCRIERIVVAFEAGRDGFWLARWLKARSIEAHVIHAASVAVSREHRRAKTDRLDAELLKRAFLGWLRGERNHCKVVAIPTLKDEDAKRPSRERESLVGEQSRIVNRMKAALIRLGIRGFNPKLKRAAGRLDSLRTPEGEPIPPNTLAELRRDMERRRLISNQIRQIEEARLKHFEQAPNDGPHAMVRLLARVIGVGIETADMLVHEVLSRNMHDRRAIARYAGLTGSPDESGRKRREKGLARSGNGRVRRGMVQLAWRFLTYQKESALAQWYRARTENARGARKPMIVALARKLLIALWRFVWQGVVPDGVVLRPAQ

SEQ ID NO: 120784 - protein, 483 aa, unidentified
MHITRMPEWDGPFFKTREVKQKGMNKAIGIDPDSKGYVCYLVDTGEGRTTRKGFLITVPDLESLIRWIKKEGEVIVALEGSNGYSRPLEKAFREAGVVFYAFRPSDVSKFRKAVLGQNKNNEKDAESVARYALALQAQGKLEQFRRVWFADEPLRLLTRSYERKSKELTAELNRMWKMLRLASPDLYLALGGFNPEVEIGENVLQNQGILSLLEQKPHLSEWKTLSTEGFSAAMGGGNYRGREKLIESLQKLAAVFTSTPHAVALMIKNSAQTIRQIKQQMNERQKMIGKITAGNPAVKALEEHRGISVITAATMVAEIIDIRRFVNDDRLASYVGLARIEYSTGDRSKMIPSQQFNHRLKDIFMTAARNFVRYNPDSHLAGYFKNLVKKGMKPNESRKRVARALVRMIFKKLRSLNVEGSEGEKRSESDMASGLDSRGDLCRISNISLSTPNENDTEPVEKIKRRTKGKGTREEIQAFVDKL

SEQ ID NO: 120785 - protein, 330 aa, unidentified
MRTIGIDVGAKELVVMVCQDGKVASSETFDNTHAGHNQLIKYIKPKKYPSRVCMEATGVYHFDIAVVLSKTPGIELMVINPKVANRFAQALATKDKTDMVDAKVLALYAERMDFVPWDCPKDTILALRAYARQLAKLARSRTAAKNQLHALEATIYTPKPVLQNQKKQVKFYEREIKKLELMAIEFIKTDSKLYHRFELLLTIKGVGETSAVQLLGELSALPNDMTHRQWVAHAGLNPRKHQSGTSINKKSYISKAGNRYLRKALYMPALSAARHDPYVEKFYLHLQEDQGLKKMQALCAVMRKLLHAIWGMFEADAPFDNSRFYGGSRV

SEQ ID NO: 120786 - protein, 351 aa, unidentified
MSEPYAGRQIVGMDLHRRRSVLVRMTEAGQRLETVRISNDPEYLREVMTRAGEAPEVVLEATYGWYWAADALAELGAHVHLAHPLGVKAFEYRRVKNDERDAADLADLLRMGRLPEAWIAPPATRELRELVRHRAKLVALRAHCKAQVHAVLAKCGVPVPMSDLFGLEGLALLERVTLPGVYRARVASLRRLIEALEFEIELFAGMARARLARDPGYTAIRVIPGIGGVLAAVFVAEIGEVSRFPDPTRLASWAGLTPRHRESDTHVHRGPITKQGSRLVRWAAVESVQVLPAHTRIGAIRERVAARRGRNIGVVAAAREQLELVYYGLRDHTVRAPLHRPPAAPARTAAA

SEQ ID NO: 120787 - protein, 469 aa, unidentified
MLRNEYSDEVRNKAVKRAHYKDFAGARPASAWVEDKEDEETTRSGKEKVPEPEFVAFVGIDWADQKHVWSWQNADSTQQESGELEHRPEAVEAWVGELCRRFGHGPIAVAVEQTKGALVYMLRKYECLHLYPVPSTMSASMRAGLYPSGAKDDPRDADLLLELLVLHRDKLRRLTPDNEATRRVQNLVEERRKLVEEKTAQLNRLIGYLKVYFPQMLEWFAKLDTKLVCDFLERWPSLEELQQVGAGEVKKFFRHRRGRHGELTEWRMEGISQAMPAIQDRSVIEAKRTVVQVIAQLLRRLLEGIATLDRKIGEAVEAHPDFFIFQSLPGAGAALAPRLLAAFGSQRDRYGSGNEVQKYSGIAPVTERSGKRKWVHFRWACSKFLRQSFHEWAGHSIGQSAWARAYYQQQRERGKEHHAAVRGLAFKWIRIVFRCWQDGVAYDESRYLAALAKRGSHLISTYAAAAVSM

SEQ ID NO: 120788 - protein, 356 aa, unidentified
MSSMTITSPRVQAFAGVDTHKSTHHAAVIDAGGTVLGDREFDTDRSGIEALVSWLSQWPVAAVGVEQTGTYGAEATRVLIRAGHRVAEVNRPDLTVRATVGKSDPIDAIMAADAIRTGRARVIPKDRTGVIESIRVLQAARSSAVKARTATLLQLGDLAVIAPPEIRERVGQGSGSRIARNAIGLRADRDRLDQPTQAMKLAMRSLATRVRDLEAEIRSLDTALTALVTQVAPRLLARPQVGIHAAAQLLITAGQNPHRIRTDAQFARLTGVAPIPASSGRTNRMRLHRGGDRQANKTIHMIAVGRLRNHQPAIDYIARRQAEGLTKKDAIRAMKRLIARELHGALKADLTTLDEL

SEQ ID NO: 120789 - protein, 371 aa, unidentified
MDESSKTLYVGLDVHKDSIAVAYAPEDRGADVVPLGAIGTRQCDIDKLIRKLQSKGATLVFVYEAGPCGYWLYRYLTRKGLACHVVAPSLIPRKPGDRVKTDRRDAVMLARLMRSGDLSSIYVPGIEDEALRDLSRGRADALRDLKATKYRLKAFLLRQDIRYEGRANWNAAHLRWLSEVVCPTPPQQIVFQEYVRAVTEQHERLQRLQRALHDQVRSWRLYPVVEAIQALRGVELTSAVILIAELGDLTRFDTPRKLMSYLGLTPSEYSSGERRRQGGITKAGNTHARRALVEGAWAYRYPAKVSRHLQLRLEKLPAEVQAISWKAQVRLCKRYRQLIARGKHANEVVVAIAREMAAFAWAIARIVPLAP

SEQ ID NO: 120790 - protein, 346 aa, unidentified
MKYERKASVSMNPTGISYVGVDVHERESQIAILEPEGTLLYETRIETKNLPKFIESVHGEKHVAIESIGFIYPIYDKLKALPMCHVHVANPSRLQLIAKSKTKCDVTDAKVLADALRGNYLPTSWIPEDDETREKRLIVRDRVRYGVRTAVIKGSIKWLLKRKGIEVKSPFSIAGRKQLRSLGLFEIESRLEELSLVESMTNKLDGMIAKLVSGDKNAKLLDTLPGLAPYTALFLSSHVGDINRFADSRHMCADLGLVPMVYQTGDTKVLGHITKVGNKWLRRNLVQCARTAVKKDKHLRKFYLKLRRKRGEKRAVIAVARKLVSYAYWMLKRNLTYEELNPWTPP

SEQ ID NO: 120791 - protein, 418 aa, unidentified
MSAEENERTLRRYVALDIHKYYCVVAGVNRDGQVVLQPVRVEHADLEGWLQKNLQKTDAVVIESTTNAWHVYDLLEPLAERVVVANPIKVKQIATARVKTDIRDTLILARLLAANLVPDVWVPPMHVRQMRQLLSQRRQLVETHTQILNRMHSVAHRHHLKHERGKRFNEQNTGWQKDTRLSPIEQFQLSLEMENREYIEKQIERISVEVKKICHQKPWSDSMGYVMSLPGFGVITAMTVLAALGEIGWFETPKKLASYSGLTPGLEQSGTKHRGKGITKEGRRELRWALVEAALQAVKSDPLLKHRFNELQKRMHRNQAIVSIARHLLELVWYVLTRRQPYRGFTQERIAYKYLTWAWQMKDAERDGLTRQQFARYYLMRLGIGHDLTRVAINPKYPRRLASEAEVLALRPELSQIE

SEQ ID NO: 120792 - protein, 328 aa, unidentified
MCKAGPPREEDAMTTTPVFVGIDVSKDRLDVALRPTSDRWALAHDAPGVATLVARLQGLAPTLIVLEATGGLAVPLTGALAAAGLPVVVVNPRQVRDFAKATGKLAKTDALDAAVLAQFAEAVRPALRPLPDAATQALSALLARRRQLIEMLTAEKNRLGSALPPVHKGIRAHIRWLDRRLADLDADLAQAIRESPVWREKDDLLQSVPGVGPVLATTLLASLPELGTLTRQQIAALVGVAPLNRDSGAWRGKRRVWGGRAPVRAALYMSALVATRYNPVLRAFYQRLCAAGKAKKVALTACMRKLLTILNAMLKYRTPWENNFAHAS

SEQ ID NO: 120793 - protein, 340 aa, unidentified
MDEIKTIGLDLAKHVFQVHGVDVNGVPVLRKRLRRSQVVAFFASLPRCLVGLEACATAHYWARELQAVGHQVRLMPAQYVKAYVKRNKNDAADAEAICEAVRRPTMRFVAIKTADQQAALLLHRVRERPVRQRTALANALRAHLAEFGVTAPRGLRNVAPLIAVVRDESDRRLPDLARQVLGVLAAQLEHLGAAVAAIEKQLMDWHRKNPVSQRLASIPGIGPIIATALAATVVEPIGFASGREFAAWLGLVPRQHSTGGKARLGGISKRGNGYLRRLLINGASANLLRSKATNADPWVQGLRRRRPSLVVAVAVANKTARIAWAVMRREESYRPRAAAA

SEQ ID NO: 120794 - protein, 348 aa, unidentified
MKHYAGLDVSVKETSVCIADASGKICWEKRVVSHPEDLIAILSDPALNLERVGLEAGPMSQWLFEGLAKAGFPVFCIETRHTKAFLKASQTNKSDRNDARGIAQMMRVGLFKNVHVKTLTSQKRRALLTARSLLQEKAIALENDMRGLLRNFGLKVGVVSGGTFEERIRELVEADPDLAEIMEPLLAGRRKLREELAKLDKRVVHEAKCDEVCKRLMTVPGVGPVVSLAYVSTIDIPSRFRHSRAVGAVLGLTPVLNQSGESKRIGHVSLCGDAMMRALLYEAAQTMLTRVVKWCWLKAWAMSIARRHGRKKANVALARRLAVVMHRMWVDGSEFRWTREATAGAMAV

SEQ ID NO: 120795 - protein, 310 aa, unidentified
MGMVTVGIDVSKDRLDVHVLPDGLTFAVDRDGAGLADLVTRLGPLSPHRVAVEATGGFETVVAAALAGAGLPLVIVNPAQVRHFAQALGRRAKTDPIDAAMIARFVEATRPELRPLPDAATQMLSDLVARRRQIVEMIVSEKNRQRRTTVPRIAKSIARLIKALEKELAEINAEIDTGVRGSPAWCAKEDLLASVPGVGVNTARTLIAEMPELGTLDAKRIASLAGLAPYTRQSGRWVGKAMIGGGRKTVRSALFLAALVAGRHNPVLKIFRARLIAAGKPKMVAAIAVARKLLTILNAMLRDQKPWQTA

SEQ ID NO: 120796 - protein, 402 aa, unidentified
MNCVGIDVSKGKSMIAVMRPFGEVVVSPFEVLHTDSELSELARLLKSLDGETRVVMESTGNYHAPVAWLLHDAGLYVSVVNAMLVHDYGNNSLRRAKTDKKDAVKLANYGLDHWLTLPRYVPDEDTRLMLKTCYRQYQQYSKVQTMLKNNLISLLDTTFPDANRLFASPPRADGSEKWVDFVDAFWHCECVCGLSEKTFITRYQKWCRKHGYNFNENKALDIYASACGHFGVMPKTDTTKLLVEQAISQLQATSAALAALKQEMQSLAASLPEYPVVMGMFGVGPTLGPQLIAEIGDVRRFHSKKALVAFAGIDAPPYQSGQIDVRSRSISKRGSASLRRTLFLVMGVLLQCAPMDEPVYQFMNKKRSEGKPYRVYMMASANKFLRIYYASVKTYLDSLEHN

SEQ ID NO: 120797 - protein, 400 aa, unidentified
MRVVFGIDVSKASSEVAILVNGEKVHGYTIPNDAIGFNRLLGDLKTVHEPEIIFEATGVYSRRLQAFFEDNSYAYTRLNPLESKKQLDSLRVRKTDKIDAEKLAASQFILNRKPSYVQEALYQELRDLSRFYQNLTEDIVCAKNRLHKVLQVTFPELENILSAPTGEQYWNLVMTFPCNSFVLESDDATLTAIIRQSTAKRISEKRVTYLVDKLTKLANQSYCAVKKTSPVIEEVKYYAGELLRLSEHRQGVLEEMVTLAQSLPEYEILLSIPGIAETTATSIIGELGDIRRFHSANQINAFIGIDLRHYESGNFLVKEHITKRGNPYARKILFKCIHNIASASHTNPCHIADFYEKRKRQSQVTSTKPHTIASIHRLIRTMYYLITHNKLYDYTSTQNR

SEQ ID NO: 120798 - protein, 413 aa, unidentified
MAQEAFAWFAGVDWGSERHHACIVDAQGIIAGEREFPHSGAGLAELGDWLLLIAGEASAVAVAIEVPHGPVVDSLIDRGFALYAINPKQLDRLRDRFSVAGAKDDRRDAYVLADGVRTDRRLFRRLQVADPRLIELRAWSRLAEELQEERVRLTNRMHHQLWRYYPQMLKLADDLAAGWLLELWTLAPTPSKARRLRKSTIERLLKQHRIRRMDAETALGILKEPAIKVADGVAEAASIHLRSLIARLRVVNCELREAEHKLDEICAVIGETGAASGVCLQRQDIMILRSMPGIGRINLAALLSEGSGPLSSRDYPALRTLCGAAPVTRRSGKSHIVLMRYAAHVRLRNTVYHWARVASQHDPKCRARYGALRQRGHSHGRALRSVADRLLGLACVLLKRQTLFDPHFGQPTA

SEQ ID NO: 120799 - protein, 311 aa, unidentified
MEQFVGIDVSKHRLDVCLEPAGEALSVAYDEPGIETVCQRLLAASPALIVMEATGGLEVRLACELCARALKVAVVNPRQARDFARATGQLAKTDRLDAAMLAGFAQAVRPQARALKDDDTRALDEMVSRRRQLVSMRVQERLRLGTAASKPLQKSLKLHIAWLDKRIEDVDIDLTHRLRTSPAWRVKDDLLRSIPGVGAVTCVTLLAKCPELGSLNRREIAALAGLAPLANDSGRHRGKRTLWGGRAEVRHILYMATLSAMRFNEAIKTFAQRLAKAGKPPKVVIAACMRKLLTIMNAMIKNNTPWSPSPA

SEQ ID NO: 120800 - protein, 318 aa, unidentified
MTVSPMVGVDVAKDRLDVAVRPSGEAWSEANDDAGVRALVARLRPLGPALIVCEATGGFERAAIAALAAAGFPVVVANPRQVRDFARATGQLAKTYQLDAAILALFAERVRPTPRPLPDAAAQLLDAVLTRRRQLLEMLVAEKNRLGFAPKPLHRGIQAHIRWLERQVDDVTKELAGLIEASPVWRAKDDLLQSVPGVGPIVSYTLLGELPELGTLSHKQIAALVGVAPLARDSGTLRGKRLVWGGRASVRTALFMAALCGRRWNPALKRFYERLKAAGKPTKVALIACARKLLTILNAMVRDGKRWAVPAPSVQYSC

SEQ ID NO: 120801 - protein, 419 aa, unidentified
MKPLSDEFTAFIGIDWADRKHDICLQGAHGERREFARIEHKVDAIDQWAISMRQRFGGPIAVALELTKGPLVYALQKYDFFVLFPINPATLAKYREAFKPSHAKDDPTDAEHAFELLMHHRDRLTALNPQSVPMRTLLHLVEQRRRVVDDKTRFTNRLGYALKQYFPQALDWFDHTDTILFCDFLTRWPTLLQVKRARATSVKAFFWSHNVRYLNVIDERIQAIKVARPLTQDVAVITAYRLQALVLVDQLRVTLQAIDRFDAQIAEITPNLPDYALFKSLPGAGMQLAPRLLVAFGEQRERFATAAEIQKYSGVAPVTERSGNKCWIHWRWQCPTFLRQTFVEWAAQTINKSFWAGAFYRQQREKGSSHQAAVRALAFKWLRILYRCWQTRTPYDESTYLNALKKRGSPLLSKLVTQT

SEQ ID NO: 120802 - protein, 414 aa, unidentified
MEKNCQIAGIDVHKKMLAVVAAEVSSEGQLRFERAKFGTTESELGRMANWLKERNVGEVVMESTAQYWKPVWQQLEGQCQLYLAQAQSNRGPRGRKRDFVDAERLVRRQMAGELILSFVPDGEQRLWRIMSRTKYQLRRDRVRLQNQLEAFLEEARIKLSGCVSDLLGISSRRILEAMSKGESDLGKLAAMVDANLRATPEQLQDALQGAKRLSEPHRQVLGLFLARLKLIEEQIEALNSNLGQGLRQHNDAVVRLAEMPGLGVDSAQQVIAEVGPTAATFPSPQELCSWVGTCPGKEESAEVSKSDRSPKGNRMMRRLLNQAANAAVKTKGSIFQNLYRRWVPRLGHNKAIWAVANRLCRLVWKILHQGDRYIEYGDRPNPKTVKERAKRMIRELQALGYQVQTAPPAEPLLS

SEQ ID NO: 120803 - protein, 430 aa, unidentified
MNYSNDSRREQFQQLKKEIWGSAEYLIVGLDIGKEKHNAFFGTATGSALFRGMFFDNTREGFRKLLAQVEALKAEYGLSKVAFGLEPTANYHKPLAEYLIKCGFMVVLVSPFSTVRNRELLDGRWDKNDPKDAGNVADLVSQGKCLYYDYPEAAIRDIRSLLSFKKRLKKEKQALQVRIRNQLLAQYFPEIDRHFRTEVSMAVVRTCLDPSLIARMEYDEFCRTVAPGRMNLRQQRLLQNIWQLAHQSIGCRVGETVLFEAQAMVSTIYHLRETIKTLNDKIEALCLPFPEYPCLLSIPGFGPEVSSTVLGAIGNPYRFSCGKQVLKMAGYDLSADRSGKTALNAVPVISKRGKVDLRFALYQAALVASNTNHYFIMYFGRKLRSRRQEQGIGTKMRVKLAAKLLIIAWTLMKKKEMFDPACINLGDTQI

SEQ ID NO: 120804 - protein, 367 aa, unidentified
MRENTTYWVGMDVHADKINIAVYRGNEISPHEQYESQTDSKSKGRLLKRLQGLPGDVRCIYEAGPCGYDFQRYLTGNGVHCEIAAPALIPKKSGDRVKTDRRDARNLGRLYRSGELTAIHIPDEDQEAVRDLTRAREDAVEDATRKRHQLSKFLLRHGHRYHGGKQWTQKHEKWMKGMKFENSVLQAVFEEYQLSLDQAEERVERLTRSVEELAKKPEYQKPVAALMTLRGIKTITAMTIVSEIGDMRRFGKAKDFMSALGLVPSEYSSGKNICRGSITKTGNAHVRRVLVESAWHYQHRPTVGKTIKSRRSGQPLEVVQVAQKADIRLNRKFRKIVDRGKRTTIAAVATARELAGFVWAIGQRVHQ

SEQ ID NO: 120805 - protein, 342 aa, unidentified
MKIETIGIDLGKTKFHVVGLNERGEVVVRKQFSRGQLLRFTANRKVHLIGMEACGGSHFLGRALQEQGHEVRLIPAQYVKPYVKTNKSDYIDAEAIAEAVGRPTMRFVPIKSDDQLDLQSLHRVRERWVSRRTAVINQIRGLLLERGITVRKGRRYIEAALPRILEDADAKLSGALRLLLTQLKLELDQMAKRLEEADALIERTALENEACRRLVKIPGLGPVTATAVIAAIGNGTAFRKGREFAAWMGVVPREHSTGGKQKLLGISKRGNRYLRKLFVHCARAVLQQKTKQTPGLRAWLEKLTARTHRHVAGVALANKLARMAWAVLATGEAYRAPLPAAA

SEQ ID NO: 120806 - protein, 390 aa, unidentified
MFYLGIDIGKFNHAAALVTDEGKVIATVPSFSNTRAGFQVLLTLITSHLPPAEELRIGMEATGPYWIPLAEWLNTHGWPPVVMNPIKTSSLRNYGVRGSKTDNIDSVLIACALRFEGDKPQQVFPKHSEELCHLTRLRADIINDRTRVALRATSLLDRLFPELLSSFSKTLSPSCLALLSQAPTPTRVLALGEERLTTLLRHASRGKLGVTRASQIINKAAVSVGVTSKALEEILPLLLEQIDLLDSQLRTLDHRITESYDQAGLYFTTIAGVGTLSAATILGEFGSVERFKQAKQMVAFAGVDPKLRDSGQHRGRVHISKRGSRYLRRALYLACQGVVRKDDYFNAIYQRHRDNGKSYKEAIIAVMNRFIHVIYAIWRDKRPYYPLTPV

SEQ ID NO: 120807 - protein, 467 aa, unidentified
MAHVGGQLQAQLMARIRGRDLERCLVVPVDVGKSIAMALVADHYGEIVVEPFEFPLTETGFGLLAAAIARASASRSAEVVRVGVESAGHYHRTLVARLRAEGLEVVELNPAAVKEARAQQLFRRLKSDARDLGAMAELMVRGAGRRPAIRTDALATQAAWVAHRRRKVAARVALANQVIGELDLVFPGLDGCFSDLLGSRAGRVLVTHICDPDRVRRQGVEGIRRFVARRGVALSGPKAAQVVDAARVALRLPTAERAALGRVLAADLALLASLETEILAAEAALSDVLAATPAAVLTSLPGVAVVRASNYGAGIGDPARFPNAAAAYRSAGLVPASYESAGRSRPRQHISREGSVELRQAIIELGRGLAQHEPDFVAYRRRLLDANKPASVAAVAVGHRAHRLAFAMLRDQKPYDPAKWSKSVAAGMTAMAKTQKAHQNDVTCPPPDTSVAEGGEPHNTKYRRARR

SEQ ID NO: 120808 - protein, 505 aa, unidentified
MGPLAYVRGVEASVSLRSELRGRLWSNHFGWQSLFDVGHAPSWEHWTKSRPADQSLTGHPMSFDRLKRTQSRKRLPGHKLKPSRATLLVQNSKPHLSMKQTYILAIDVAKHKVRAALSGADERLLFEKDLPVSAGGLRELLVRLREHVAEPEGLLVLIEATGMLHLNWSVALIRAGYAVVVINPLIARRLYTLGNSIRDNKSDPIDARQLCGIGRLHGEKLLSLYRFALKPEQLCLQRLQSVRKAVRKSLSNLKKSYGSLLDVSFPELGRLLEIDGVGIRQLLSQAPTPCAIARMRRSSLEKNWMLRPKAAQLKKLAAESMADPELAQASRPALLAMLQSIEAMETRLRELDRQIEALTSQSVDPQTKALVESIPGFGALNAAKLLAFLPGEILHAGSNRQAAARLQAYMGNDPRVRQSGQWQGQTKMSKRGVEMLRTALFQCAFSASQHDPELRSFYQRKRAQGKHHEVALSHLMRILTRRLVAVLRSGQPYQPNDNSELKNAA

SEQ ID NO: 120809 - protein, 308 aa, unidentified
MDIYAGIDVSKDWLDVSVEPSGQAVRFRRDADGLDELAGFLRPQGRCLAVVEATGGLEAVVTASLAAAGLDVVTVNPAQVRAFAFSLGQRAKTDKVDARVIALFAQAVRPPVRALPDAQARELADLVSRRRQIIAMIVAERQREHRASPRMKKSIARLVRALEKELSSVDGGIDEAVRNSPVWAQTLDLLTSVPGIGDQIARTLIAELPELGSLDRRQIAALAGLAPYTRQSGQWRGQSFISGGRASVRSALFMGAMVAARYNPTLKTFRDDLIARGKPKKLALIAVARKLLTILNAIIRDKKSWQTA

SEQ ID NO: 120810 - protein, 347 aa, unidentified
MLIIGCDFHPGFQQVAIFDNRTGEIEEKRLQHRREAEEFYRSLAGQEVRVGMEACGHYPWFERLLEELGIELWMGDAAQVRASVVRKQKTDRRDGEHLLQLLLENRFPRIWVPSLEVRDVRQLLVHRHKQVQGRTRTKNQLQAMALSCGVQKKRKLWTKAGRTELEQLPLLPYAAERRKRLLEGLDKLEAEIVELDRRVFEEARQRPEAVRLMTHPGVGPVTSLAMVLTLGPAERFGSAKQVGSYFGLIPSEESSGGKQRLGKISKQGNSFLRFLLVEAGQTAARLDPQLKRFYKRLAARKNRSVAKVAVARKLATRLYLMLREDWTYAQLCQAVMQGSPSHSVAGE

SEQ ID NO: 120811 - protein, 396 aa, unidentified
MRYAGIDVAAEKHAVAVVDEREQVVQRPAQFGEDAEGYARLRGLLGSPEGLVVALEATGHYWQNLVAAMVADGYAVALLNPLRTRRFAEEELARAKTDEIDALLIARMAAQKRVGPTALPDAVTQQLREAVRLRERIQQEIGDKTRQLHRLVDLGFPELTRHVRTLDSMLATAILREYPTAEAFRKAEKGKLARLCYDGRRKVGDELAHALVDAAKVSVGRHHAAVYQVQVRYLCDDLDTLRRRLRDLDKDIGRMLEAHEVGRLLTTIDGVGDTTAANLVAELGDLSRFPDASAVACYVGVVPGTKQSGTRRPLRSPLCPLGSARLRRALWMPTLAAVQRNAWLRAYYQGLRARGKPAKVALIAAMRKLLHAVFSVAKNRRPFVPLLPPAPLPPRA

SEQ ID NO: 120812 - protein, 426 aa, unidentified
MCTPQPKDTDVKAWNQITHYAALDWARDHHDIAVVDRSGKIVAEFRIPHSIEGWKDFRARLAPFPDLAIAVETNQGPAVEQMAAAKMQIYPVNPRSAKHYRDRLKPTGVKNDRIDAWSLADALRVDGHGWRPLLPEDPLVAELRQLCRDEVSLIEQRTSLLAQLRYTLHTYYPAALEAFEDWTYPTTWDFLIEFPTPDILAAAGPRKWKSWLMSHKFHFPGTNAKRFEVFARAAQFQGCPSTVAAKSLMAVSLAKILQTLEGQLRAYRMQIEDRFEKHPDHALFGSLPGAGPKLAPRLLSELGADRSRIPTPEVLQCYAGTAPVSFQSGQMDRALMRRACNLDLRQAVHLWASLSMRKSTWAYAYYLKHRKDGQSHSCALRCLGQRWLKILWKMWQSRTSYDSELHQKNQLKHGSWVLQLQAGPTR

SEQ ID NO: 120813 - protein, 388 aa, unidentified
MNVGADKSEPLTAVHTDLGAIFVSLELSRSSWLITSLSPGGGEKMSKHSVPGGDFAGLMERFAQLQEKARRRTGQSFRIIVVQEAGLDGFWIHRALQNEGIESHVVDAASIATSRRRRRAKTDKIDGETLVRALLAYKRGEPRVCAMVKAPTPGEEDRRHLCRERKALTAERVRHVNRIKGLLFSQGISGYQPLRRDRRQRLEELQTGDGRAFPQHLKALVNRELDRLELLLKQIKTVEAARDALLAVGQTAKPTPAAMLLDIRGIGPEFAAILWSEGLFRHFENRRQIAAYAGLAPTPWQSGAVDREQGVSKAGNPRLRTTLIQLAWLWLRNQPRSALSVWFHERVSRNGGRLRKTTIVALARKLLVALWKYVTAGVVIEGVTMKVA

SEQ ID NO: 120814 - protein, 448 aa, unidentified
MKKQTTTRESALNLPLVNPNAAGIDVGDTIHAVAVPEGRDTLPVRSFGTMTCDLEAIAAWLLECGVDTVAMESTGVYWRPLFNLLTQHGLEVYLVNAKQVKNVSGRKNDEDDARWIQKLHSCGLLRSSYLPDDQQEALRTLVRHRRTLTQDRGRCVLRMQKALELMNVKVHTLLRDITGKSGLAIIEAILRGERAAENFLACVHFKVKADRATILKSLQGNWRPEQLYLLEDCYMGYKYLTERIASCDVAIERQLERYHREIRPEAAPEREAVSAKKANRNKPSFNTCSYLRKVLGVDVMAIYGISDIAALEILSETGTDMGKWETAKHFASWLNLCPNNKISGGKLISSTLMKKKPNPASQAFRNAANAVQRSDNWLGDYFRRMKAKGGNKYATVATANKIATIYYKMVSSQQEFSPVELTAYQKKYRQAKIIYLERRLFELKKEAA

SEQ ID NO: 120815 - protein, 410 aa, unidentified
MTMITITQNTPVLVAIDIAKARHEVLIAVPGKKRRRRLTVLNELADFTRLITALKDYGRPVRVAFEATGNYHRALAYHLATAGFEVKLVSSVALARTREALNNSWDKNDPKDAQVILHMMEIGNEQFYHDPLVRGTNDIQELSKTHDIVSKSKTELWHRILTHYLPLYFPEADRFHRSSRSDWFFAFLERYPSPHFISAMSKDAFTADAWDVVGRKVAKERLLADIYETSKVSVGLPVALDSDAISMFRLVLGEGRSLIAQRNQIEARAVALLKDLPDYQLLTSIPGIGPINALTILAEAGDLRRFGHHRQFLKFCGMDLATIQSGTFRGQTKLSKYGNARLRRTLWMAGQVAILQRTNSFRDKFERYISKDRQNTHLRRKAYTAIAAKMARTVHGIIKNGEPYRPFFEG

SEQ ID NO: 120816 - protein, 336 aa, unidentified
METKTKFIGIDFSKATFDATIYEGEHCKFTNDDQGFKEFLTWVETHIEGLSLQDCLFCGENTGNYSVRLSNFLYVHHCTMWLESALRIKRTMGLVRGKDDKIDSAYIARYAARNAEDAVSYEPCCKNIGELRHLFARRQLLVSQRTALMNAGKEANVLGEKSKYDRALEKQNTKLITLLAKEVLRIEKMMLEVIQADERLSRQYQHITSIKGMGPINAIALISVTEGFTKYAGDAKKLACHAGVAPFKKESGTSVNGGTHVSHLSNHILKPLLTQAALSAILYNRQIIAYYERLISRGKKSQVALNNVKNKLLHIVIGLIRKDEDYDIQYQPAPKI

SEQ ID NO: 120817 - protein, 347 aa, unidentified
MRYVGLDVGKWKCRAAIMNQEGLILDEFWFTNNHEGIETLTAKLDLQDRVVMESTGSVWTNLYDRLDDRHIHVSLANPLKTKAIASAKIKSDKVDARILAHLLRSNLIAESYVPTKPLREIRALIRHRVAIVKIRTMVKNQIHAIIDKHGLSCEYSDMFGKGGMEWLRTLELPSVDKLMLNNHLTHLESLNQQTDRVDEEIHRKACEDDDVRLLLSLTGVDVYTALLIRSEVGNIDRFPDYKKLVSWAGLAPSLHQSGRVEYHGSITKQGSKILRWIMVEAARVAVNHDPRMRSFYERVKHRRGDQKAIVAVANKMLKITWFMLTRREPYESRNEKRYLQKLNSAAA

SEQ ID NO: 120818 - protein, 408 aa, unidentified
MARYYLGVDWVDQSHQLYVSDESGRKIRELEVQQTADGLAELGRWLEESRGQGIELWAAIEKPEGRVVDFLLDHGVVVYPVNPKALDRARDRFRMSPSKSDGFDAYVLAEFLRTDHAHLRALEPNSAEGQELKMLTRDHQRLGRQKTRLLNQIGITLKEYYPVPLEVFESLDTKIALDFLKAYPTPQALSKLTRRGWKRFAKRDHHLSEARCSELWDKLNKPQLAVPTHVVRAKAKLLAALVMQLEASVKAVDSYSQEVQSFFAAMPAAEIAKTLPGGKSGTTVASIWAELGDAPKRWNSFRHLQAEGGAVPVTKASGKSRMVQFRFACNKHLRQAMYWFSFNSLQRSEWAKKYYRNQRAKGHSKHESLRALGAKWLKIIFVMWRDHKPYDENYHLANIARQMMRQAA

SEQ ID NO: 120819 - protein, 357 aa, unidentified
MIRKEYYIGMDVHKEFVQMAVFEERGEEPIYERRLNNDNGLLVKEAIRFARKGKTVVAYEAGCLGYVIHRAMEEAKIPCYVLPANKVAKKRDDRIKTDKRDARLIGRELRSGSIRPISVPDAADEAARDLLRCREDVNGDLRRVKQRLLKFLLRHGYIFTEGKKNWTQIHWRWMDKIQFSYEHEQTVYEEYRSQIKSLEERLTRLEKQITETAESPKYKAAVSKLRAFKGIDYIIALSVICEIGDFRRFANAKSFMSYLGFLPSENSSGGKRYQGGITKAGNGHLRRLLIEGAWHYTKSARAGKRLEQRRQNCSASVIEFADKALHRLHKKYFRLILRGGKHKNVAVTAVASITIIN

SEQ ID NO: 120820 - protein, 464 aa, unidentified
MTTRKILWRNRKERKEWARRLQSEDPGLEVVHPHAAGIDVGNSAHYVAVRPDRDPEPVRRFDCFTGDLHRLADWLQSCGVKTVAMQSTGVYWIPLYEILEERGFEVYLVNARHTKNLPGRKSDVQESQWLLKLHTYGLLSNSFHPPAEIRVLRTYWRQRGEHVAGGATCILRMQKALTQMNVQLANVISDISGLTGQTIIRTIVAGERDPLTLAALSDPRVHASQEEIAKSLEGNWRPELLFVLQQEVDMYDIYQKRITECDQRLQKHLASLTHPLQVQPPTQKPTTKKPAAKNAPRFDLSSELQRVAGVDLTRIDGIDVMVAQTLLSEVGLDMGRWKTESHFASWLGLCPDNRISGDKVLGRGTRRVVNRAATALRQAANTLMRSRSYLGAQYRRLRTKLGAPKAITAMAHRLARLVYRMLKYGQTYVDKGTDYYEERSRQQQIQLLRKRAAKLGLQVAEIHA

SEQ ID NO: 120821 - protein, 345 aa, unidentified
MSQIKRIGIDTSKAVFTLHCVDDTGRAVLRTNLRRAQMAAFFKKLPPTEIVMEACGSSHHWGRELSTLGHDVRLIPPQYVKPFVKRAKNDRNDAEAICEAGGRPGMRFVPVKSAEQQAQAMVLKVRETLVGQRTQLANTLRGHAAEFGVVAGKGIKRIAPLLEAIEAETAIPAEAREMLALLGREIERLDARLAELEVKLIAMHKVNPLSQLLATIPGIGVIIALTFALEIDPAAFKSGRHLAAWIGLTPKEHSTGGKQRMGGISRAGNERLRRLLVTGATAVIRFATRPGNKQANEWLLKLLARKPRKLVAVALANKMARTVWAMMTSGEVYRRQLSVAGVASA

SEQ ID NO: 120822 - protein, 428 aa, unidentified
MYLPCNELKWVVMSMDGNNCKHRERRLKMISVGIDVSKGKSTVCCMRDYGEIIAGPMDISHVDPEMRVFAKMLAGFREEVRVVMEATGTYHLPIMSYLLERGFFVSVINPYQMKQYRTEGQGLRKVKTDKADSMLIAKYGIDHWASLKKKSKTDDAYEELSVLSKQYRHYMRVHVESLLELTHILDYTMPGLKEQLNSWNPDSGKDKLADFVMQYWHYENITKRSEKQFIESYLKWAQRKGYHQSQEKAAKIYSMAKEGIPTLPATQTTKMLVIQAVDVLKRVDETLVMILARMREIAKTLPEYDTVRSMGGVGNVLAPRLIADIGDVRRFHSGKALIAYAGIDVPPYESGKFHGSNRSILKRGSASLRKTGYEVMRVLTSHAVPEDKAVYEFIKKKESEGKAKKVAKIAGLNKFLRIYYARVMEVYS

SEQ ID NO: 120823 - protein, 444 aa, unidentified
MHFNKLLQMLDGSSYLSVGLDVGADFTWMSIALPNGSFPWKPFKIIHHDPYSRELAVAKIKEAQELYSLKSRCFLESTGIYHIPLLCFLRDKGLDCSVINPIITKNSTNINIRKLHNDKFDSKKAALVGLNASLKTSIIPDEDIADLRNLVRDYYYFKDLQSSVVLKLNAELKVSFPAYLKVFSKVTTQSSLKLLGAYPLARDMLAAPGEELVGIIRSTARFGETYALSRYEAILEAAKDAAIFGRALPSHAVRIRLYIESYQTYQKHLDTLLLALHEAVDRLHGTPVYDRICLLQSLRGVGFLSAVVLMAEMGDFDLFSSPKKLYAYFGLDPAVKQSGKLNGDKVHMSKRGSSLARRVLHMVALNNLKVDKGTKTPVNPVIYNYYTGKCANKKKNVAVGAVMHKICNIIFAMLRDNKPFEIIPPEVHCKQYVLNHTASVTNAA

SEQ ID NO: 120824 - protein, 410 aa, unidentified
MKIAGIDVHKKVLMAVVVDASTPEEKPARRRFTTMPSELHRFVTWLREQGVEEAVMESTAQYWRSVWLELEPHMRLHLAQAFSNRAPRGRKHDFKDAERLVRRLIANELILSFVPSGEQRIWRGLTRMKLQLTRDRVRLQNQIECLLEEMRIKLSIVVSNLLGASGLRILHALAAGETDPKKLAQLGGERLQCTEEQLIDALTGRAQPVHGAMLALQLERLQLIDQQMAQLHSMIATAMKPQQDAVIRLAEVPGLGVDSAQQIIAEVGAQASTFASAAELTSWVGTCPGKEESAEQNHSSRSAKGNKYMRRVLNQAAHAAAAKKGSHFQDVFRRLLPRLGYQSAIWAVAHRLCRLVWKILHEGVRFIEKGADVGPREKKKRAQMLARALRKLGYEVTITPINQLIPKPAV

SEQ ID NO: 120825 - protein, 461 aa, unidentified
MAGDDTETFDNNRRQLGGLPVVRRNVAGVDLGSERHWVCAPTQDGSGREITSFGATTSELVRLAEWLKARQVESVAMESTGVYWIAPHEVLEGQGLQVLLVDTRQLARVPGRDKKTDPTDCEWIQRLHSCGLLRGSFRPEEAVCMLRTLVRDKANLVAESGDWLRRMQKSLDQMNVRLHRAVSDIDGVTGLAILRAIAQGERDAHKLAKLRDPRCSKTEEEIAEQLTGHWREDHLFSLQQALKMYDAVQERIVAYEKEIVRKLGEMERDEQRGQTAPPLPNTNKAKMIKKRGQEAKRQALYRMSGVDVTQIDAIGVETVEVVLSEYGSNLSRFPTEKQFVSHVTLAPHVPKSGGKAVKKRKRNNASTRVAAALRMAALSLRHSQTALGAYYRKLAQRIGGDIAVFATARKLATLIYRLLRWGQPYLDEGAAAYESRYLQQRIKSLSAKAKQLGYELSPTSG

SEQ ID NO: 120826 - protein, 347 aa, unidentified
MRFYNRQHRHYCGIDLHVKTMYVCILDAVGQVLVHRNVPATPAAFLEIVAPYRDDLVVAAECMFTWYWLADLCAAEGIAFVLGHALSMKAIHGGKAKNDKLDSYKIAVLLRGGLLPQSYVYPAAMRATRDLLRRRLHLVRKRGQLLAHIQSTRHQYQLPAFEGRITNPANRDGLSEHFPDPSVRKSIEVDVALLDQYDTLINDLEATLVRDAKRHDADTFHRLRTVPGIGKILALTILYEVQDITRFDRVQEFASYARLVKCSKQSAGKTLGTSGAKMGNVHLKWAFSEAAVLFLCRNAEGKRLLAQIQKKHRKDKALSILAHKIGRAVYYMMARRTVFSMEKFLHA

SEQ ID NO: 120827 - protein, 451 aa, unidentified
MAQGSGLTRGDRNRNRKLAVLREAVRRDRAVLAVDLGEDKQVAVVMDHECRVLARKIVRAKAHQLAGLLEWGAERARRAGFAGLMVACEPTGHRWKALMGLADAAGHGFGCVQPLAVHRAREGDDYTLGKTDHRDAYLIGKLVSRLECYLPERADAEWARLRHLGARRFALVADVTSCMQQAGDLLGCAWPAPLGAAARPLESVTWLAGMAVITDRCCGQPGRLRKMGYDRFLAAVRRELPRWGGKIVRHSIVKGLWEALSDTGGVAAQRPGALERLHLLLGDWRALRARLASTGQRMAAVLGGLGLADLVASIDGMSALSGAVILAETGDLHRFASGRAVVKHAGLNPSEHTSATINGQTRISRRGRPGLRTAAWRAVWAALRHNKVLAAKYSHLTGRDANRLADEQARTACAATLLRWLWAVITSGQAWDARIAAGEIPAGPAVTAAAA

SEQ ID NO: 120828 - protein, 369 aa, unidentified
MQKTIKNIGLDVHKNSISIGIADEGRDGEVRYYGKIDNNMNQLNKVIRKLISNGAVLRFVYEAGPCGYAIYRYLTKNAMDCVVIAPSKIPQQSGNRIKNDRRDCLSLARLHRAGELTPVYVPTEEDEALRDLVRAREDATRAVRAAKQQLGAFLLRYDIVYSGRTKWTKAHFNWLADIAMPHPAQQIVFQEYIDAVTNCSNRVQRLTEQVRFQSRQGRQHKLIEALQSMRGISLIIAATIAAELSDLTRFENPEKLMAFLGLIPSEHSSGDRVSKGSITKTGNGHVRKALVTAAHAYRFPARKSKAIRKRQEELPEGVIDISWKAQCRLCTRYQYLTAKGKNVNVTKTAIAREIAGFSWAIAQELSKAA

SEQ ID NO: 120829 - protein, 404 aa, unidentified
MSTRNDYSMVSGGGMDVHYKFSQVTMRDEQGHIVRRERLDHPDRERMRCRLAQWPRGVPFVLEASFGWGWVAELMQEVGLMPVLSNCLKVERMRKARGLPKTNKKDADLLSLLPAEKSDWWKVWLAPPSVRDQREWMRYRSDLVKIGTQTRCRIHAIFHRHGVFHEFSDLFGGQGRVFLAELCRQGQARDVQLPPGALAALRGQVRLLGHVRGQLAEVARTLRAHLADSPVARRLDGIPGFGLILSHTVMAEIGEIGRFRTHRNLASYSLLSPIAADSGEEDPSRSPLGRRLGQRGNRTLKWAFIEAAHGAVRSGGKWRRIFDAYTEGGRKNRNRGYIKVARELVKVVYVVWSKGVEYTDNPPARTKACGRDKKKAFLGRSRSGTGQPCAAMAAAQPHGHQASV

SEQ ID NO: 120830 - protein, 318 aa, unidentified
MPQPRPPANAGLRVIGGDVSKLTVTLVDSSTGRRQDVANRLPDLVEALRPHACHDWLVCETTGGWERPLLDAAAIVGLRASRADAARLKAFILSHGGRAKTDGIDAEWAARYGLERADSLKPWHPPAPERQALAELMRHRQDLLAQRVQASNRRSAPSGPAVQALLDEQIAFLSGQIQTIDQQMARLIKASPDLDQDEQCLRAITGIGPVVARSLVALLPELGRLGPKQIASLAGLAPHPRDSGQTTGRRRTTPGRNGLRPVLFMAALSAARRHPQLAEVYKRLLDAGKPKRLALTAIARKLIVIANAKLRDQRAILT

SEQ ID NO: 120831 - protein, 317 aa, unidentified
MSENLFVGVDVAKDSLAVASAPAGLTLSVPNSPEGRRDLIKALKSHTIALVVLEATGGYERPVALDLIEAGFTVVVANPRQVRDFARGLGELAKTDPIDAKVLARFAQVVQPKPRPVKDPEEADLAELVSRRRQLVNTLTQERNRLAMARLRDVRRSIKKMIRVLEQEIARLDDDIAGLIRADEDLSRKDQILRSAPGVGPGTSAMLLSRLPELGHLNRQQVAALVGVAPWDFKSGRWTGKSSIWGGRRDVRDALYMAAMAARQFNPSIRAFARRLESQGKAFKIVITACMRKLLVMLNSMLRSNASWRTENSQIIS

SEQ ID NO: 120832 - protein, 412 aa, unidentified
MMEVLYERCCALDVHKKTVIVCVATRDGKQTRTFATMTSDLLELADYLVSKGCTHVAMESTGVYWKPIYNILDGLGMELLVVNARDVKAVPGRKTDVKDAEWICDLLRHGLLRGSFIPDRSQRELRELVRYRKGLVQERSREVNRIQKVLEGANIKLGDVATNVMGKSGQAILEALVQGNTDPESLAGLAKGKLRRKNEQLARALQGLIGPHQRMMLSTQLGHIRFLDGQIERLNREVEERMRPFEEAIEAIDAIPGVGRRIAEEVLAETGADMAQFPTAAHLASWVGVCPGNNESAGKRKSGRARKGNPHARQALVEAAQSAAHTKDTYLSSQYHRIAARRGNKRAIVAVAHTILTIMYHILTERTTYRELGPDHFDKLNQDAVARRAIKKLETLGYKVTIEPLSTLECSA

SEQ ID NO: 120833 - protein, 424 aa, unidentified
MAKAVASDEVIYLRSAGVDIGKRFVVVCVRTPSARGGRWMLETERFDTTPPALRELSAWLAERMVDVVVLEATGDYWRPVFYRLQDAGLNLLLANPAHLKGVKGRKTDPSDAAFLARAGSSGMVLGSFVPTRAVRELRDLTRRRTEVAADRAKEVQRLEKELEDSGLKLSSVLTDLTGASSRRILGALIAGERDPQALADLAVSGARAKLDALAVALDGSFTEHHAFMCRHFLAQIDHLAAVLGELDERIRQLTHEREHDDDIDRLDTIPGIGRLTAEIIVAETGGDMTAFETAGHLASWIGVCPGVNESAGVNRSARTRHGNTALKKVLGTAAMAAVKQKDSYYAAYYRRIAARRGAKRALVAVMHKLTIVIWHVLHDKTVHQDLGAEYFARKNPERAIRAITRQANAIGLTVAFNPIEARTA

SEQ ID NO: 120834 - protein, 422 aa, unidentified
MKIVYPICCGVDVHKTFLVATIITSNGITPHYSKKRFSTFNNSILQFKQWLIDNNCFDVCMESTGKYWVPVHNLLEDTIRITIANPKWVKAVKGNKDDTKDSKWIGDLFRLGLVPGSYIPQKPIRILREYTRYRSKLVSCKSSEKNRFQNAFTVCNVALDAVVSDMFGKSATYITDYLISSDTFDPEHCASLLQKSLKKKASSVIESIEGYQITQAQKERMVMIRSHLNYINNSIDKLDQALSKMLKPYESTIELLCTIPGVDRQSAITIISEIGTDMSQFSNSKRLCCWAGLTPGNNESAGKKKSVRITRAGVYLKPALVQVAHAAVKSDKSPYYKIKYERIYKRRGKKRAIIAIARMILTAIYYMFTTGEEFNPCDLYKIDMPQEMQDKQKEKAVKEAVRFLIAQGVIKDSNISIQESNH

SEQ ID NO: 120835 - protein, 317 aa, unidentified
MSTPVASFVGIDVAKHQLDVAVRPSGETWTVAHDEGGLSALLARLREVAPTLIVLEATGGLEVPLAGALAAATLPVAVINPRQVRDFARSTGTLAKTDRLDAQLLAQFAEVVRPEPRPLPDAQAQELTALLQRRRQLVEMLTAEKNRLPLAARRIRPPLQAHIVWLHKQIAQFDEDLRQLIHASPLWRAKDDLLRSAPGVGPVLATTLVAALPELGTLTRRQIAALVGVAPLNRESGTLRGRRTVWGGRAQVRAVLYMSTVVAVRHNPVVAAFYQRLRAAGKAPKLALTACMRKLLTILNAMLKHHTRWAPVMAPHA

SEQ ID NO: 120836 - protein, 349 aa, unidentified
MHSTTVAVDLAKNVFELAVADSEGKIGERLRLNRARFSSFFVHRAPCRVLMEACGSSHYWARRIAEYGHEVRLLPAQYVRQYVRRNKTDRADAAALIEAARCAAIRTVPAKSLEQQQVLVLHRLRSQWMSTRHRYLNTLRGLLREFGIAVPLGVRVARTRIAHYLAQPPQELPAAIRPLMAQMLSEVKELEHHIEQSERDLTTLTRADPVVQQLRQIPGIGLLSSTAIRVAVGDVERFPCGRSFASWLGLTPREHSSAERRRLGGISKRGDVYLRTLLVHGARSALLAAHRQQRAGRPLDHLRQWALQCERERGHNVATVALANRLARIVWATWKHARAFDGNWGRAAQ

SEQ ID NO: 120837 - protein, 318 aa, unidentified
MKKHSIACGGIDTGKRKLDVALNGSNDRLQVANSADGHGELSVWLQRYRVKRVGIEASGGYEQAVVARLRRDGFEVIVFQPAQVRAYAKFHLQRAKNDKIDAALIAACTAAAKKIHPPPDPRLAPMAERQTLIDQIVDQIARFKNYRESCGDPQLRQFWQAEIKRFYGLFRKELKQLVAVIRQHRDLSERLDLIVSIDGIALRTATAILVRLPEIGRLSREQVAALGGLAPYDDDSGDRDGARHIAGGRERLRKSVYAAAFAASFRWNAELIEIYKRLTAAGKEHKVALVACARKLLIYANAVVARGTPWESRAAATR

SEQ ID NO: 120838 - protein, 392 aa, unidentified
MFYVGIDIAKRKHEAVVTDDKGDIVVKAFSFTNDLTGYNYLLGKIKLVTISREQIVIGMESTSHYWLTLYTRLIKDGYNVHIFNPIQSDALRGMYIRQSKTDARDSFIIAEVIRFGKYSESNVPQEKLFALRELTRNRYFMVDSVSDLKRKTTALIDQVFPEYEKLFSNNFGVSSMALLLKYPTPEKLKNVSLQSLAKLLSKASNGYFGLGKAKEVKETAKSTFGVIDNCGIYATLISTYIKQILFIQDQVKEIDSQIAEIMSELDSKITTINGIGQALGAVIISEIGDISRFQNSDKLAAYAGVDPTVKQSGDYCAVRNHMSKRGSPYLRRAIWQASVIAVGCDPMFKAYYDKKASEGKRYMNIIGHCTRKMISVIFAVLRDNKEYIPMAA

SEQ ID NO: 120839 - protein, 340 aa, unidentified
MEFKFFIGIDVSKDTLDIGLLDANQPDAVIHKQVSNDDTGITVMLDWLQKQDGFLMESSLFCLEHTGMYNYPLLQFFSQRGTSVWVENPVQIKKSLGLQRGKNDKVDALRIAQYAYRSRQQVRLWQPAREVIDRLKHLSALRERLVETRKRLLTPVEELSKVGNVVIAKVLEKAMKKTIAGLDKDLEAIEDQMKDVIDGDDDLRNLYGLVTSVVGIGFVTAVNLIVYTNEFKLFSNHRQFACYSGVAPFEYRSGSSIRGRTKVSHMANKKMKKYLHMASLTGIKFDEGLKAYYDRKVTEGKNKMSVLNAVRNKLLARVFAVVTRGVAYQKNYSQNHLVLS

SEQ ID NO: 120840 - protein, 351 aa, unidentified
MRYYTSTTEFNCGIDLHGRQMYICVMDREGKILVHCNIQGNDFAYFLKKVAPYRHSLTVVCECIFNWYFLADACEVEGITFVLAHALYLKAIHGGKNKNDRIDSEKLAHLLRANLIPPSYVYPGEKRPVRALLRQRTTYVWRRAELLTRVEMNQLAEGLEPVRQSRPNRDKWEGRLMDTYKHPLHQFSAQIDLTMIRLYDQMIEKLEAELLRITKRDACKEFNILQTIHGVGNILSLTILYEMHTVERFPTVKNFLSYARLVKGSVASAGKIKGLRGGKLGNPYLRWAFGEAAIIAKRSHPMLKEYSKRLEAKHGKFKANGILAAKLARAVYFMLRDGTAFDLEKLVATSV

SEQ ID NO: 120841 - protein, 409 aa, unidentified
MRYYVGVDWADQTHAVWVVDESGTKITARTVPHTAEGFVEWGRELDEWRVQGIERWAAIERPDGRVVDFLLDHGVVVYPVNPKALNRARDRFRQSGAKSDPFDARVLADFLRTDHLHLQALQPSSDAAQELKLLTEDCQRHIRQQTRLVNQLTTTLKAYYPRALEVAELTTALAREFLHAYPTPEALTVLTARQWQRWARGRRVSEARIGALWAVLQQPQLPVPAHVVRAKARLMQSLVEQLTPVVVAVAQYRKTIDDFFARMPAAQWARTLPIGTHGITAPTLWARLGDAPGRWESFRHLQAQAGAVPVTKRSGKQRVVHFRFACDKALRHVVDQVAFLSLLSSDWARVYYDQQRARGHGHRQALRALGAKWLKIIFVMWHRQVPYDEQYHLATMTRQQLRQRQTKIA

SEQ ID NO: 120842 - protein, 347 aa, unidentified
MTIVEAAPGITGGVDTHLDKHVAAALDPLGRLVGTESFNADASGYKALLVWLEGFGQVTKVGVEGTGSYGVGLSRFLRRKGVEVVEVNRPNRQSRRNQGKSDPLDAIEAARAAISGRASGLGKTKDGPVEAIRVLVVAKRSARQARVKAIVQMRHLGITAPDQLHSRLKGLTVTALVTEAAKLRSTGSADPVTAATKASLSSLAHRIQSLDEEIAELSEKIESLLLATVPDLLARFGVGPDTAASLLVAAGDNPGRLHSEAAWAHLCGVSPIPADSGKNAGHLRRHDGGDRQANSALWRIAMVRIAHDPETTAYFNRRVREGRTKRDVIRILQRYIAREIYRYLPRG

SEQ ID NO: 120843 - protein, 388 aa, unidentified
MYHIGIDISKFKHNCFIATDAGVKVKEFIFDNNASGFNELLDSLKSLEDPSEIKIGFESTGHYGTNLKQYLSNLGYTYVEFNAYLTHMFSKASSLRKTKTDKVDAKVISSMLGSVDYETLHTKFYHNNVLKELVRQRYAYLQSRSKELVKLTNLLDKTFPEYKPFFKGRLGQGAIFILKRFKSKARIAKMTIKDFELIRSKTKGRLTYPRFNQLKILARDSIGISDKVYNLLIQTVISSIKYLTETLEVLDQEIVNLFSKTDSKLITIPGLGIITAATIYAEVGDFKNFSSPAKLIAFAGFDVRIIQSGTKESYGKLVKHGSPLLRSAIWTYALPAVRFIPTMNDYYHKKRDQGKHHKVALAHVCRKLIRMMHYIEFNNVSYNPNLSR

SEQ ID NO: 120844 - protein, 356 aa, unidentified
MIGIDPHKGSHTAVAIDHAERPLGELRVRASAGQAQRLVAWAADWPDRVWAVEGARGTGLLLAQQLLAAGERVLDVQPKLGARVRLLATGATGKNDPNDARSVAVAALRSPLVRQAGAEDHAAVLKVWAKRYRDLGRSRTQVACRLHAVLCALVPGGVSMEITAACAATVLAPVAPADAAALARCELAVQFLDDLRRLDRQRPETRKRLAAEVRASGSSVTEVFGVGPVVAAIVLAEAGDIARFASRDHFAAYNGTAPVEVSSGPRKVFRLSWRGNRRLNHALHMAAVTQVRHRHSAGRAYFDRKLAEGKTGKEALRCLKRRISDAVFARLQADAQHVTAGQGAAGPSGRSPLGGS

SEQ ID NO: 120845 - protein, 454 aa, unidentified
MSRARTQPVSTETMPLVHSHAAGLDIGSEEIWACVPADRDAEPVRKFGTYTPDLQALADWLKACGIQTVAMESTGVYWIPAYEILEARGFKVYLVNARHLKNVPGRKSDVQDCQWIQRLHSFGLLNGSFRPEADICVLRAYRRHRGTLIEHRAAHIQHMQKALQQMNVQLTQVLSDLTGVTGLAILRAIVAGERDPQTLAQLRDRRCAKPEAELVKALTGNYRAEHVFALKQALALYDAYTGQMRECDQEIERQYSVLKPVHEDDLPPLDTSDKRNTHSKNAPAYDARPLLYQWVGVDLVAVHGLNASTVEEILSEIGTDMRCWPSVKHFCSWLHLAPHNDISGGKVLRSRILKAHNRAGQAFRLAAQAVSRTQTALGAYYRRMRAKHGPEKAIVATAHKIARIVYFMLKHRTPFHDIGAEEYDKREREREIARLQKKATKLGFTLVLASAQPA

SEQ ID NO: 120846 - protein, 369 aa, unidentified
MKQLITYIGLDVHKETIAVALAEAGKRNEVREYGKIANTPAAVKALVAKLARNGHELRFCYEAGPCGYGIQRQLTASKHDCIVVAPSLLPRRPGERIKTDRRDAINLAKLHRAGELTPVWVPDEAHEAIRDLVRARLAAVRTLRQARQQLSSFLLRHGHHYNRPAWTLMHRRWLAGLRFEHAVHHVVLEDCIAAVEAATARRDRLEAHIAGALPDWSLAMVVHALQALRGMALVAAATLVAELGDITRFANPRQLMGYLGLVPSEHSSGGTRRQGGITKAGNGAARRMLIEAAWSYRFPARISREQLLRQEGLAKPIRDTAWKAQERLCRRYRKLARAGKPPTVVTTAIARELAGFVWAIARQAQPTDA

SEQ ID NO: 120847 - protein, 343 aa, unidentified
MQVSTIGVDLAKNVFQVHGVDSVGKIVISRQLRRKQVIDFFSKIPPCLVGMEACGTAHHWAREVSKLGHTVRLMPPSYVKGYVKRSKNDAADAAAICEAVTRPSMRFVPIKSADQQALLMLHRTRDLLIRQRTQLINALRAHLAEFGRVAETGREGLAQLAGIITDESNREALPSAMKQALQAIVDQLAALELQIATLDRAIHAHHRANDMSCRLETVPGIGVIGATAIASTVTDPSAFKSGRDFAAWIGLVPRQHSTGGKERLGSISKQGDRYLRRLLVIGATAVVRHARQHPQKHPWVMRLLAKKPAKLVAVAVANKMARIAWAIMAKGGYYRAPELAAAA

SEQ ID NO: 120848 - protein, 450 aa, unidentified
MSQPTSATSATSANVIPSTASAANDGAFAQLTHFGGFDWAQSEHQFVLVDARGQIVLSLRFANDAEGWVLFRQKVAALVPAAFVDGHLGVAIETSCGPAVERLLDMSLKVYPMNPKAAERYRDRKAPAGAKSDELDAWSFADALRTDGHAWRALLAQDPLTAELRLLCRDEIKLIEQRTALINQLRAALCEYYQAALDAFDNWTVEGPWRFVIAFPDPQALAKAGKRKWEKFLHAHKLYRPQTADERLKIFAGAMTFANPNAAVTRAKSLLAVTIARQLCLLESQLDEYRKRIVGLFGDHPDHDCFGSLPGAGPKIAPRLLSELGANRDVFQTAESLQNYAGTSPVTKQSGRSRIVILRRACNKTLRATVHLWADLSRRACVWAEAYYQKKKADGMNHTAALRCLGQRWVKILWKMWQTGTPYNEALHLKNQTRHGSWLIQLLPATPAKT

SEQ ID NO: 120849 - protein, 441 aa, unidentified
MHYKRLLTWIDGSSSYLSVGLDVGADFTWMSIALPNGAFIGKPFKIVHSDPRSRDLAVTKIKEAQETYSLKSRCFLESTGIYHIPLLCFLRDKGFDCSVINPIITKNSTNINIRKVHNDRFDSKKAALVGLKPDLKVSLMPSDLALNCRNLCREYYDLMDNRSAYVNKLQGELRMAFPQYLGIFSKVTINTSLTLLETYASPSAFLEADKQEIIDIIRSTARFGLTYAQNKYNAIIQAATDANQFGYIIDSNIKRIRLYISFIRKYDEEINNILESLHELVDANEDADFVKQIHLIETIKGAGFLSAVSIMGEIGDFSAFSKPKQLFAYFGLDPAVKQSGKFEGTKVQMSKRGSAIARRVIHTLTLQSISISRNGEAKNPVLREYYLKKCDSKPKLVAMGAVSHKVCNMIFAILRDNKPFEIITPQEHIKQYNASKCDMAA

SEQ ID NO: 120850 - protein, 350 aa, unidentified
MLAELVDHVVGVDPDRDWITLAVLDARSAGVIAEGRFPATRDGYDDAIAFVDGHSVDSERAWVIEGSAGYGRGLAVALERCGEWVIEFDRPTRKSKDGAKSDALDAVRAAREMLGRKRLSIPRAHDGVREAIRVHAMTRAAAVRARTGAVNELKALIVTADEALRAQLRGLSTTNQIEACARFRDRPCAAVHERATRSAMRSLAQRIRLLDTEIDGHDRALKELLDQAAPQLLAERGFGHVTAAHCYIAWSHPGRCHSEAAFARLAGTAPVPATSGQNQTRHRLNRGGDRQLNWALHMVAVTKRRCDPDTKAYIARRISEGKTEREATRCVKRFLARRVWRLLEHPQFRT

SEQ ID NO: 120851 - protein, 341 aa, unidentified
MLALLSDLGQQASTKLGHAVDVACCFEAGRDGFWLHRLLTAHGVAAYVLEPTSILVNRRARRAKTDRLDAEGMLRVLAAWLGGDRGVCSMVRVPTPEQEDAKRPHREREHLVQERLRIENRIEALLFTQGIRKRPSLRSWERDMAELRTGDGRAVPPLLRAELDRLRRRLVLALELIRDLEAERAAALAAAADAAAADNAMARKITALQRIRGIGENFSAVLVREVLYRSFANRRQLASYVGIAPMPYQSGGMDRDRSISRAGNPRARTTLIQLAWLWLRYQPGSALAAWFRERVGTLQGRTRRIAIVAMARKLLIALWRYVETGVLPEGIEIRADVVTTA

SEQ ID NO: 120852 - protein, 328 aa, unidentified
MLYVGIDVAKNKHDVTVIDNTGKMVLKPITITNRKQGFELLHNTLKQLNQNCLIAMEDTGHYALNLLTFLHQNNYQIYTYNPLLIKEFTKSISLRKTKTDKKDARTIALKLLSDPNRALFMHDNKQEELKIMTRHMNRLKKHQSDWKVQYTKCLDIIFPELHQVVTKHSDYVYELLKRFPSPEKMVTAGFDKLIEIKRLTAKHALDILELAPNSIDTTSLAREFELIEIIKNIQHYEKLIKQTEKKIDELMAELNSVITTVPGISNRLGSVILAEIRNINTFNHSAQLQAFAGLEPAIYQSGQLDAQGKWSNEAHHTYVGHSYKLPLK

SEQ ID NO: 120853 - protein, 385 aa, unidentified
MPTLDDLSRSLTALNQDSTLLVVVEMSKSSWLVAGMAPGIDRHPMKKLDPDPAALLDLVGRWRGESERKGQRIERVALAFEAGRDGFWLARWLRQRGIEAYVIHSTSVAVTREHRRAKTDRLDTAMLMRVFLGWLRGERGHCRMAAIPRVEEEDAKRPSRERESLVGERTRVINRMKGALARLGIRDFKPELQRAPKQLIALRTPEGRSLPPNLLEEMQREMARLALIREQIAAIEQARLARLQQAPPSRPNGMVALLARVIGIGVETADMLVHEVLSRNLRDRRAVARYAGLTGSPDESGSRRREKGLAKAGNARVRRGLIQLAWRFLMFQKDSGLAQWRRTRTAQGARKTTMIVALARKLLIAFWRMVTVGEIPTGVVLRPAM

SEQ ID NO: 120854 - protein, 376 aa, unidentified
MAQTDVQYPTIHLAIELSRSAWLVAARLPGVEKPSLHRIEGGDTAALLALAAALRARAAARLGTPVRVACCFEAGRDGFWLHRLLTAEGIAAYVLEPTSILVNRRARRAKTDRLDALGMLRVLAAYLGGDRQACSMVRVPTPEEEDAKRPHREREELVRERVRLENRIAALLATQGVRERPSLRSWERDLAALRTGDGRPLPPHLRAELDRLRRRLVLTLGLIRELEAERDAALAAGPRDAAGRKIAALCRLRGVGANFAAVLTREVFYRAFDNRRQLAGYVGLAPVPHQSGEADRDRRISRAGNARARTTLIQLAWLWLRYQPDSAPARWFRDRVGALRGRTRRIAIVAMARKLLIALWRYAETGLVPEGVEVAA

SEQ ID NO: 120855 - protein, 413 aa, unidentified
MELVHARCAGIDISKKDAKVCVRVQGTGRRRTAASVTTWGSMTNQILALREHLLAEKVTCVVMEATGAYWKPFYYLLDDGLDVMLVNARDARNVPGRKSDVSDAAWLADLGAHGLVRASFVPPPPIRELRDLTRARTVITRERSREAQRLEKLLEDAGIKLSSVATDITGASSRRMLEALIDGQQDPTVIADLVHWRMRPKIAALMEALTGRFSEHHRFMTRLFLDRIDAHSADIARLDARIEAAMEPFASARDLLMSIPGISRITAEAFIAETGADMSVFPTAGHLASWCGLSPGSNESAGRVKSTKTRPGNPYLKGALGVAALSVVRRKDTYFWAKYRRITVRRGPMRALVAVEHAMVVAAWHMLTNGEFYHEPGPDYFTRRMPAKTQARAVAQLESLGYKVTLEPLADTA

SEQ ID NO: 120856 - protein, 341 aa, unidentified
MTLFHPIFSLRLPEDITMIFIGIDISKLTFDAAYFINKRYVHKQFSNNPKGFTDFELWMNKSDGEVFACLEATGIYSFDLAQYLSQQKRNVLVVNPIITHAFFKMELNRNKTDKADAKLIARYCKHAVLNGEFKKNCYQPKHADYEAIQRLVTRCDQLEKSKTQESNRLEASTNKHTTRSIKRLQKSIANEIIWTKKTIADIVKNNKNLSQQIELITSIKGMGERTAWSVIAYVGDINFFANAKQVASYAGLTPKIIQSGTSINKSSLSKLGHKRLRKSLYMPALVAIRYNSSLKAVYERLVHNGKPKKVAIVAVMRKLLILSYGVLKSGKAFDVNYQPQV

SEQ ID NO: 120857 - protein, 341 aa, unidentified
MEQVTTIGLDIAKHVFQVHGADAAGHVLFRKRLARAKLLGFLASQPACVVAMEACAGAHFWAREIGKLGHRVRLIAPAYVKPFVKRQKNDAADAEAICEAAQRPSMRFVPVKTEEQQANGIVFRARDLLVRQRTQCVNALRGHLFEYGYVFPQGITHVATLVALVEDPQSSLPESVRTILKLLVDTFTALEAQIAAMDGEINQRSKADPTARRLMTIPGVGPITSTAITALAPAPEGFPAGRDFAAWLGLTPLQKSTGGKQKLGAVSKRGERTIRRLLIIGASAVVQQASRRGAPKGSWLAQMLARKPKMLVTVALANKMARIVWALLVKGGTYRAPVAAT

SEQ ID NO: 120858 - protein, 339 aa, unidentified
MAIIPVFVGLDYHRDSVQVCVLNTQGKVLMNRSVRNDGGLIKSLSSKHGVPQRIAIEACCGSADLAEELATRWRLPVQLAHPGYVNRMKQSPDKTDFGDARLLADLARVDYLPAVWLAPRATRELRRLVRHRVQLVRRRKDTKLRIRGLLRENRLKCSYAHAWTKVWFTWLTEHAELSECDRWLVQQHLEELISLEGRIGAVEAKLRLRIQDDPMVKHLLTLTGVGLVTAATLRAEIGRVDRFRSGKQLARFCGVTPRNASSGARQADAGLIKAGNPEVRQTLIELAHRLARLPGHWSDVARDMWSRGKPKNVVVAAIANRWVRWLYHELGRILDEPLT

SEQ ID NO: 120859 - protein, 317 aa, unidentified
MSKKKSKTFIGIDVSKKLLEVAVHESDYHFRCANKVSAFAELIAELIALRPALIVLEATGGLEIPITAALHAAGLPVVVVNPRQVRDFAKATGQLAKTDRLDARVLAHFAAAIKPPLRPIKSKDELELDALVGRRGQLIEMLTAEKNRRGSAATDTVRKEIKEHIDWLQDRIAELDEQLQALLKSSSLWQVKDDLLQSVPGIGPVVSFSMLADLPELGTLNRQQISKLVGVAPLNCDSGQQRGTRHIYGGRARVRSMLYMAALTATRYNPVIKEFYQRLLAKNKPFKVAITACMRKLLAIINVMVRDGAHWHTPLLA

SEQ ID NO: 120860 - protein, 482 aa, unidentified
MAKRKKSTFERLRSNSPNRQQRKKLQRQFDADSAELIVVHPNAAGIDVGNPSHYVSVPPERDQTPVREFGSWTADLRCMVEWLRSCGITTVVMQSTGVYWIAIYDLLEQSGFDVYLVNARGTKNLPGRKSDVQECQWLRKLHTYGLLRKSFRPPAGIREVRTLWRLRSRVLEESSRSVQHIQKALTTMNVQLANAISDVSGVTGMAIVRAILQGQRDPHELAKLSDPRIQASEDEIAHSLEGNWQRDVLFELQQVVDAYDFHRQQLATIDTELQKYMTALPTREPVGEVSAEVSKLSAKLRKKLKANRKSKDNRPAFDLGAELARLMGVDLRLIDGIDVMTIQTIYSEVGADLSDWPSEDHFASWLELAPRNNITGGKVIKKEKRPSNNRVTTALRNAAEALVRSDSYLGARYRHLTGRLVGLKGVKAMARYLACLVYRLLTKGPAWVDRGAAYYEHKRRDRELVSLHRKAAAAGMQLVPIT

SEQ ID NO: 120861 - protein, 354 aa, unidentified
MVKPASNQIAIIGIDIGKNSFHVVGLDKRGAIVLRQKWSRGQVEARLANIPPCLIGMEACVGAHHLSRKLNSLGHDARLMPAKYVRPYSKGQKNDFRDAEAIAEAVQRPTMKFVATKTAEQLDLQALHRVRERLVSQRTGVINQIRAFLLERGVAVRQGPRFLRAALPNILAAPSEVLSPRMARTIEDLAGDWRRLDERIEDLSSQIETLAREDAGCDRLMSVPGVGPIISSAMVAAIGAGEVFSKGRDFAAWLGLVPKQISTGDRTILGKISKRGNRYLRALFVQAAWVVLIRPKSWERHGLKPWIEAAKKRLHHNALAIALANKLARIAWSVLARGRNFEARTIAALNAQPA

SEQ ID NO: 120862 - protein, 336 aa, unidentified
MGEISTIGIDLAKNVFQLHGVTSEGQVLLRRQLRRGQVLVFFARLQPCLIGIEACAGAHFWARELAKLGHEVRLMPPSYVKPYVKRGKTDAADAEAICEAVTRPSMRFVPVKTEDQQAVLLMHRTRDFLVRQLTQSGNAIRAHLGEFGIVVAKGVHNMERLFAAAEVADLPDAAGNPIRLLVEQFRDTHEKIEDVTAEIKAAQKDDETARRLETIPGIGPLTSSAIAATVPDVANFRCSCDLSAWIGLTPKPYSSGGKERLGRISKMGNRYIRRLLYLGAMAQISARKRRPAGDDWLWNMLERKPVKLVAIALANRMARTVWALLKTGEAYKARAA

SEQ ID NO: 120863 - protein, 341 aa, unidentified
MKHEMHVLGIDIAKRVFHAVGMDDRGTIVYRKRVSRHDLMPCIAQLPPVLIGIEACGGAHDWARRFREHGHEVKLMAPQFVKPYVKSHKNDSRDAEAIAEAVTRPTMRFVPIKDVDQQDIQALHRVRERLIGERTALVNEVHGLMQEYGIVLPKGVSKFRQAVVEKLESEKDKLTALSQEMFWKLVEEFAALEKQLAYYQEKLDTLATTHPECQRLMTIPGIGPLTATALVAAVSDASAFKNGRQCAAWLGLVPRQHTTGGKERLLGISKRGDTSLRKLLVHGARTTIRWVGRKTDRRSQWIRQLVERRGKNRTAVAVANKNARIVWALLTSHQDYQPATS

SEQ ID NO: 120864 - protein, 384 aa, unidentified
MYKDNIIFIGLDTHKVSTEVAYIEDQRGAKPVHHGKIKTNKSAIMKLARQFQSKSPQATLHFVYEAGPCGYWIYRLLTSLDHCCYVVAPSLIPKKPGDKVKTDKRDAMKLAKLLKSEDLTPIYVPEPEDEAIRDLSRARETAMKDLKDAKFQLKGLFLRNNITCKVNDNWSNQHLRWLTELVLPHPSQQIVLQEMIQTITERIKRVERLVNELAHQVKLWRYYPVVQALQAMRGIRFLVAVGTIAELGDLRRFDHPRKLMAYLGLVPKENSSGDNRKQGGITKCGNGRARRLLIEGAQTYKHNANVSTELQKRQETLPKVVIDIAWKAQLRLCRRYKRLMQRGKHRNVVVAAIAREMLAYIWAISREVILVPVDPSTRISRVPA

SEQ ID NO: 120865 - protein, 348 aa, unidentified
MRTYNTSHAYYCGVDLHARSLFVHVLDHNGRTHLERDIAASPATFLDAVKPYREGLVVGCECMFAWYWLADLCERERIPFVLGHALAMKAIHGGKAKNDRLDAQKIAGLLKGGFFPMAYVYPRDKRETRDLLRRRSFFVRQRAQLIAHIQNTNSQYNLPPFSKKLAYKGNRSEDIAQRFEHPSTQLSITADLALIENYDAQIAALEAHLVKAARVDDPATFGFLRTVPGIGPILGLTMLYEIDTIRRFPEVGNFLSYARLVTCTHESAGKVKGVGGRKIGNAHLKWAFSEAASLMLRSFPAAKSWMQRQSKKRGTKKAHAILEAKIGRTVYHLWRKQVAFDAKKFLAS

SEQ ID NO: 120866 - protein, 401 aa, unidentified
MQQDQQHDSVDVFVGVDVGKGQHHAVALDRNGKRLYNKAMPNDEAKLRALISELRAHGRLLFVVDQPATIGALPVAIARDEGVMVAYLPGLAMRRIADLHAGEAKTDARDAAIIAEAARSMPHTLRSLRLADEPLAELTMLCGFDDDLAAQITQTSNRIRGLLTQIHPALERVLGPRLDHPAVLDLLERYPSPATLAAASEKTLANRLTKLAPRMGKNLAAEIVQALNEQAVIVPGTQAATIVMPRLAQQLAALRKQRDEVASEVERLVLAHPLWPVLTSMPGVGVRTAARLLTEVAHKAFASAAHLAAYAGLAPVTRRSGSPIRGEHPSRRGNKVLKRALFLSAFAALRDPISRAYYTRKVEQGKRHNQALIALARRRCDVLFAMLRDGTIYQPKAADNV

SEQ ID NO: 120867 - protein, 343 aa, unidentified
MYYIGLDVHKKTISYCVKDAAGKIHQEGKIGSTRRELDAWIKTLPQPRMIAMEATIFTGWIYDHLLPHSEKVKVAHPLMLRAIAAAKRKNDKIDASKIADCLRCDFLPECYMTSTEIRDRRRTLRYRGLLVKQMVQMKNRISGVLMETGVSYNKQRLHKVGYFAEPMSGNEEIDASIRPLLKLSRETINRSQKLDYALVSSLERDPLLAQRLERLTTVPGVGPITALTWVLEIGDVARFQSIKQAISYCGLCGAEKSSADKVMRTPISKQRNKHIQQVLVEAAKLAPRQSPELALIHEKEMQRGNRNRATLAVARKMVAWMVAVERRKQVFVPAEKFGGKVAA

SEQ ID NO: 120868 - protein, 402 aa, unidentified
MNCVGIDVSKGKSMIAVMRPLGEVVIPPFEVGHTESELCELSKLLGNLDGETRVVMETTGNYHLPVASFLYDSGFYVSVVNAMLVHSYGNNSLRRAKTDKKDAIKLANYGLDHWLTLPRYIPEDDVRLMLKTTYRQYQQCAKVQTMLKNNLISLLDTAFPDANRLFASPARADGSEKWVDFVAAFPHCECVCGLSERVFTAKYQKWCRKHGYNFNQDKALDIYASACGHFSVMPRTDTAKLLVVQAVSQLRAASASLAALRNEMQSLAASLPEYPVVMGMFGVGPALGPQLMAEIGDVRRFHSKKALVAFAGIDAPPYQSGQLEVRSRSISKRGSSALRRTLFLVMSVVLQRSPADEPVYQFMDRKRAEGKPYRVYMMASANKFLRIYYASVKAYLESLEHD

SEQ ID NO: 120869 - protein, 330 aa, unidentified
MTMTPTQQTYNHVVAFEVSKEALVVHTLPADEQCTIVNKPQAIRRLLRSQLKHNRKQKLGAMLIVCEATGGYEQHVLDMAIDLGLPVHRAHGTRVRFFARYCGLIAKTDPIDARVLAHYGVKTDKLRLYVPPPPETAALRALHARRTEIQQMMIAETCRLDQAHHKSVVKSLKAHIAQLKSALEAIEDEIAQLVHDNATLKRKVELMRTVIGIGPVSAMVLLAYLPDIGCLTKGEVARLSGLAPINNDSGKKRGARHVEAGRTAIRRALYMAAVVAMRTNPVIKRFADRLRGKGYPFKYVAVAVMRKLVVILNAVLRDGQPWKGAQAACA

SEQ ID NO: 120870 - protein, 350 aa, unidentified
MIIIGVDYHPEFQQIAMLDKESGEFQERRLTHPEEAEQFYRALAAAGQRVQVGMEASGHARWFERLLAELQFELYIGDAAEIRAKRVRKQKTDRQDAELILRLILEDRFPRIWVPNWENRDLRQLLWHRHRMVQARTRIMNQLQAVALNEGLRCKKRLWREHGRQQLESFRLAPWASRRRCDLLGLLDRLNPIITELSQAIEQEVEKYPEARRLMTHPGVGPLTALGFVLIIGKAERFQCGKQVASYLGLVPLEDSSGNRRRLGHITKQGSSMLRFLLVEAAQVTVRSVPEWRSKYLHLMMRRGRKIAKVAMARRLAIGLFWMMRKERGYEQLKKFGSHAGQPEHRHGVQ

SEQ ID NO: 120871 - protein, 312 aa, unidentified
MAKPVSQITLGIDVAKDELVIADWDTGEVTTLINEPLAIKRWIGSLPGPVRMALEPTSHYHLALADRAQAAGHRVYLVNPRQLAHYREAVGERHKSDPRDALLLARYLAHEAPKLRLYEPQSAAARELWTLLTRRATAVESCKRVRQSFLGTGISIQALRSEYRKVLKRIDRRMEALIDACGWQQSYQFCLSIPGIGPSNATALVAAFHRGAFSSQDAFIAYLGMDVRTRESGTYKGKRKLTKKGPSELRRLLYCAAIAGRSYEPFARYHQRQLDKGLPKIAANCILARKLARLAFVVMSRQENFKKGAVAY

SEQ ID NO: 120872 - protein, 404 aa, unidentified
MSVHVAPVTSSTIVVAVDVGKTSAMLSVTDCARKRVFGPVEFSMTRSGLVATVHRVEAVVVASAQVKVGVEAAGHYHRPVLDYGWPTGWEVLELNPAHVAEQRRVVGRRRIKTDAIDLEAITDLLLAGRGQLITEREVLIGELSAWAGQRSRRVATRSATKNQLLAQLDRAFPGLTLALPDVLGTKIGRLITAEFADPARLCAVGVSRLIRFAAARDIQLRRAVAERLVTAAREALPTRDGVVARRVLAADLGLLADLDTQIETAERELAALLPASPYATLTSVPGWGVVRVSNYAAALGDPDRWPGPRQIYRASGLSPMQYESAGKRRDGTISREGSVALRRALIDLGLGLWLTEPAAKAYAAGLKSRGKPGGIIGCALAHRATRIAFAMVRDHTSYDPSRWA

SEQ ID NO: 120873 - protein, 425 aa, unidentified
MEVIHRRCSGLDVHKETVVACVRLVLDDKITREVRTFETTTSGLLLLLAWLTELGCTHVAMEATGVYWKPVWNILSDGDFELVLANAAHVKNVPGRKTDVSDAAWIADLLAHGLIRSSFVPEQEFQELRELLRTRKQLGRQQSSHIRRLQKTLECANVKLDSVITDIVGKSGRAMLQALIAGETDPVKLAALADRRIKASAQELREALRGRVTDHHRFLLHLHLQHIDFADSAIQDIDRNVTALITRMDQEVEAGQTRATFQNLILLLTTIPGIDVLSARIILSEIGRDMSRFPTAGHLLSWAGLCPRNDESAGKRRSTRLRKGDPWLKTLLVQCAWAARRKKGSYFNAQFLRLRGRRGPKKAACAVAASLLTTIYHMLKDGTQFQDLGADHFDRRSKDVRAKRLVAQLANLGFNAKLTPLAQAA

SEQ ID NO: 120874 - protein, 415 aa, unidentified
MKVFCGIDWAEDHHDVALIDADGGLVAKRRIGDSAMGFAELMTMLADAGDIAEAPIPVAIETPRGLLVSALRQTGRRVYAINPMAVARYRERHTVARKKSDHVDAMTLANILRTDAHAHRPLPADSDLARAVAVLSRATQDATWRRTRATQELRAVLREYYPGFLAAFAKGTVTNLASPEARAVLALAPTPAAAAKVTKTQLAAALRRAGRQRGIEDLALQLCQALRAEQLRQPPAVEDAFGSQALALLGTLNAECAAVDQLSQTTAELFQQHPDYAVITSFPGLADLSGARVLGEIGDDRSRFADARALKAYAGSAPVTRASGRSISITRRTVKNDRLNAAGFLWAFAAMAKTGAPQEHYRRRRERGDRHAAALRHLFNRFLGQLHHCLQTGEHYDSIKAFGPIDDTPAQAAAA

SEQ ID NO: 120875 - protein, 348 aa, unidentified
MTVYIGVDFHARQQTISYLTTETGEIRQLELLHEDPAKVRAFYEQFAGQRIIVGFESSGYAAWFEELLEELGCEIWIGHATYIRQFAKRRQKNDRRDADLILELLVSGDLPRIHRYSRSTRQMLQQLRYRQRLVKMRTMVVNMLLFTASSRGHSFRTQLQSKRGQARLGQLPLPEPLAQQRDELLSLLAQLDQKITTIERWLEQQTAEDVTVQRLRTHPGIGLLTSICVRYTLEDVGRFATTRKVSAFAGFDPMEDRSDERRRMGAISKQGSRWLRFYLVEAGQVAMRKDADLARVYQRISRRGGHAKAKVAVARRLLVRAFIMLRDEIDYAEFLRRGVAARSSRGSA

SEQ ID NO: 120876 - protein, 474 aa, unidentified
MEKELSKKQKEVIKLLEKQKIRDVKDLESYKLSVCHPFSAGIDLGSKELYAALSPDIAAEMNLPVVHRFTTFTKDLLACKDLLVFCGIKTVSMESTSVYWTTIYSVLQEAGIEVCLVNPKKFRMVPGRKTDIADCHRLQTLHLYGLLRGSFHPSRDIEVLRTYMRERDSIIKERNTFVQRMQKSLTKMNLLLHNVIDDITGKTGTQIIEAILKGERDPKVLASFRDPHVKKSEEEIIEALRGYYKEDQLYLLKINYQSYCFFDRQLNDLDKQITSALKRFPLKKEKKEKRPDNAKSMGRGKNNIRTKENLEDMLFHILGADLSSLPGIRANAILQIISEVGTDMTKFPSAKHFASYLGFVPHNKITGGHIISARTDRIKNSAAQAFRKLIPSISQTKTALGAFYRRLVPRIGKAQAITAACRKLAVLVYNTLAFGIEYTERGELFYKQKQEDWERKKLASLAKKYNCNIVPCAS

SEQ ID NO: 120877 - protein, 343 aa, unidentified
MKYIGLDLHKKSIFATVLDGDGKILSRTKIGPNTRDICYYLKSQGSRDELSVAMEASYNWPYYYRAVEEAADTIVLAHPLKTRIIGEAKIKTDKIDSSVLAYMLKADMLPAAYVPSRDTMENKMLLRARISLVRIRTQVKNKIHAIVDRNRDSYHGLDNMADIFGKTGIKILRDTTICPTDHKILIGYLDLISEIDKKIKDIESQIDKRSIKDRDIELLKTIPGIGTFTAFLVKSEIDDISRFTSKEKLSSYAGLIPSTHSSGERLHHGRIVKQGNKFLRWALTEAAQTSIRCSEYFRYHYSKIRSRKNANSATIAIARRMLEVIYVMLKEGREYIEKPVDIK

SEQ ID NO: 120878 - protein, 387 aa, unidentified
MIYVGIDIAKQKHFASIMDSDGAIIAQPFSFTNDFNGFQKLLDNISSFSKESMLIGMESTAHYSENLTCFLFSRGFNVCIINPIQTSSLRKSNIRKTKTDSIDTFLIIKALSLNSYRLFSQQDYDSLQLKNLCRFRQKLIKARTKVKIQLVTYVDLLFPELQYFFKSGIHIKSCYALLKTEPNPDRIAKMHLTRLANLLSKSSHGHYKQSNAVQLKKLASQSVGIKNDTLSLQIFQSIEQIELYNSQLAEVDKSINEIMEKIDSVIKSIPGIGNLNGAMIIGEIGDISRFEKPCQLLAYAGLDPSVYQSGSFNASRTRMSKRGSKLLRYALINAAWQTTLVNKTFKDYYDLKISQGRRHYNALGHVAFKLVRVIHKMMTDNVEFNLA

SEQ ID NO: 120879 - protein, 343 aa, unidentified
MEQYVGLDVSLKDTAISIRQDGERIWRGKCPSDPQILAQVIRKHAPHASRVVFETGPSATWFYHTLAAKGLPAICIEARHAQKVLGETLNKTDANDADGLARLAEAGFFKAVRVKSYDTMLIRTLVAARNQFILISTQLGNQTRGTMKTFGLIVPRGKGGAFENNVRHLLDGEEGLARIMLPLLEAWRDVRKRAADLDHQLIAMVRKSQRAQLLMTVPGIGAVTAISYVAAIEDPDNFRKSRAVGAWLGLTTRRYQSGEVDYDGHISRRGDKRLRSLLYEAALVILTRTGAKNESSLKTWGRQLRERLGFKRAAIAVARKLSVIMHAMLKSGEAFNRSAGASA

SEQ ID NO: 120880 - protein, 388 aa, unidentified
MIGVDVHKRAHTLAAVDGSTGREIARREFRATDAGHVEAIRFAADLDDEVVWAVEDCRHVSRRLEQALLSAGSEVIRVPPAMTGQSRKGQRQPGKSDPIDALAVARTVVREGVERFAVAFLDEHAMEIRALHDHREQLIGERTRVINRLRFHLVVLDPSLEADLARRTLDLAGAQARIRRRLAKLPETAQARVARSELGHIVALTKEINALHADLDQLTVEHSPGLRAETGCGPVTAAMLIGQTAGARRFATDAQFARQAGTAPIPASSGNTTRYRLHRGGNRQLNRALHAIALTRARIDPQTRAYLQRKRAEGKTNREAFRCLKRHLARRIWKILFAAAPIPGQRQPRSDSLGYLEIGEDRLHHIKGGSLRSPPTATRPQIATSPPP

SEQ ID NO: 120881 - protein, 405 aa, unidentified
MTKVFVGHDWAEDHHDVFVQDGEGRRLDGGRLPEGVDGVARFHAMVADQVDDVSDVVIATETDRGLFVGALVAAGYTVLAVNPRSVSRYRDRHSTSGAKSDAGDAKVLADLARTDAHNHRPIAGDSELAEAVKVLARSHQNLIWTRQRQLNQLRSTLREFYPAALEAFYQLGHCDALAVLAIAPTPSLGRQLSRSKIASALRRGGRQRRIEERAAQIQTSLRANQLAAPDVIADAMGSIITALVAVIGELGTQISRLENELADHVDQHPDAKIIRSLPGLGMVLGARVLAEFGDDPNRFVDAKSRKNYAGTSPITKASGKSHVVLARHTRNRRLADAAYLWAFASITASPGARAFYDQRRDNGDTHSRALRALANRWVGILHGCLRHQTLYDEHTAWSHRTALAA

SEQ ID NO: 120882 - protein, 332 aa, unidentified
MSVYVGIDVHRKRSQVAVIDQDGKVLANRNVPNGVRPILGVIGDLPPRTPTAFEAAYGWGWLVELLEDYGFEPHLVHPLQCKAIASARLKNHKVDAATLAQLLRADLLPEAWIAPPAVRQLRALLRHRIQLVRLRTLLRNRIHAVLADHGHDRPSGYWSGPGRSWLASLDLPAVSAEVICDALALIDALESVIDRLDAEIRGHARSDPRVKVLTALPGVGPFTALVLLAEIGDITRFGSARKLAAWAGLTPTVRGSDRMVRHGHISKQGSVWVRWILCEAAQTAKRSPEFAARYQAIARRRGKKIATTAIARKLLTRAYYLLTDASSAGAPS

SEQ ID NO: 120883 - protein, 426 aa, unidentified
MPYRIAGIDVHKRMLAVVVADVSVETEYVFERRLVGTTPDQLRTLAAWLSERDVEEVVMESTAQYWRPVWEVLERQWRPSRRARAEAGPMSGALHLAQAQSNQGPRGRKKDFPDAERLVKRLVAHELILSFVPEVTQRLWRTVTRRKYQLTGNRVQLQNRLESLLEEAHIKVSSLVSDLLGASARRMLRAVASGAIDPATVAALGSPRLHATAAQLGDALGACTDLDAVYRRLLRMMLDDLDVIEAHIRELDEELARLLRPHQEAVQRLAAVPGLGVDSAQQMIAEVGPTAATFATAKRLASWVGSCPGDEESAGVNHSHRSPKGNRQMRRLLNQAANAAVKTKGSIFELVYRRLVVRLGHAQAIGAIAHRLCRLVWKILHDGVTYEERGPAVTKARAHRRAAKMIRELRSLGYHVELPSPAKSPA

SEQ ID NO: 120884 - protein, 317 aa, unidentified
MGQSITSVAGVDIGKAWLDIALYGSGEAMRTPNTLEGHAALLGWLAERRVTRVGLEASGGYERKLVAALRAGGLEVALLQPRQVRAFAVYRLRRAKNDRLDAQLIAHCAAALEAVRAAPDPRLAPFAEHLRLIEQIEADLSRLKTRSEAYHAARLKRWLAQEAARLERRLKAELLLLGKTISACADLLHRLDLIESVEGIGRRTALSLLILMPELGTLSRTQIASLAGLAPFDRDSGKYAGQRRIAGGRPRVRRSLYAAALPASFQWNAALKALYRRLRDKGKPHKPALVACARKLLTFANMVLARDTPWVKSAALT

SEQ ID NO: 120885 - protein, 428 aa, unidentified
MKYNTQNAKIESITEKTLIVGIDVGSETHYARAFDWRNYEYSKKPLEFSNNEAGFVTFKVWMEELAEKYGKDVVIPGMEPTGHYWFNLGAYLQDNGMKPVHVNPHHVKKSKELDDNNPNKNDRKDPKTIAALVNEGRFSYPYIPTGVYAEIRSLSNLRLQAQEEITRIKNRIARWFSIYFPEIKDVYKNPGAVSGLMILKVAPLPKDIVKLGVGGVNQIWRDAKLRAAGLKRAKTLVTAAEHSIGSQEACDSARIELKILLNDYEIYHQREEELMELIEEKLSEVPYIDKLLEIKGIGMKTVSGFVAEVGDIKRFDNPKQLQKLAGYAIVECSSGKHKGESHISYRGRKRLRYVLYEAAISLIARNTEFKEIHRYYQTRGKNSLKKMQSVIAVACKALRIFYAILTKGVTYDGAKMLQDIKRPQLKVA

SEQ ID NO: 120886 - protein, 436 aa, unidentified
MSKSQNPTKEVIPIMKKRIYRRMPVNDFQPQSISPADLGGKLVFAIDVAKVDMVAALAAADGRVLQTICWKAPEENPTVLSILRSFRAAGVTVEAVMEPSGTYGDVLRYQLEQDAFPVFMVSGKRTYDAKEIFDGVPSLHDAKSAAIIARLHADGLSTRLPAEVPERRQLKAALAIMDLHQERYLQLVHRLESWLARHWPELPTLLDLTSSSLMALLARIGGPADVAAAPDQATKLLRGISHRLIPDDKVAAVIASANTSVGVPLVGLERDALIAIAAEAYHAHRAFATAKTKVAQLAATTPAAALSPVVGPTTAAAIYAEVGDARSYHCTRAFLKAMGLNLKEKSSGTVHGQIKITKRGPSRVRQLLWLAIFRWIQDDPIADAWYQRKKQRDGGRASRAAVALMRKLAKGLYHVGRGGTFDSSKLFDTRRLQVAV

SEQ ID NO: 120887 - protein, 344 aa, unidentified
MQIARIGLDLAKYVFEIHGVDAHGKTVLRKTLRRHAVSTFFANLPPCLVGLEASNGAHFWAQALSDLGHDVRLISPQFVTPYVKSNKSDRNDAEAICEAVGRPNMRFVPVKSPEQLAVQAVHRIRSRLVADRVRLVNQVRGLLGEHGIVVAKDIGNLRRALASIVGDNEDHALHDLVRSLMGELREELIELDARIEGYDRKIRELYRNSEICQRLGKVEGIGPVTATALVAAVGDRSSFKNGRQFAAWLGLVPKQRSSGGRARLFGISKRGDRYLRTLLIHGARSALGRVRDKQDPRSLWLGKMRQRRHPNVVAVALANKNARIAWSLLTSDSVYDVKLSVRAA

SEQ ID NO: 120888 - protein, 312 aa, unidentified
MTKDTIGVDISKDHLDAYRMSDGAHRRFANDKAGHRALLKWLSGETSTRIVYEPTGPYHRAFERRLADAGFPLVKVDPRQARRFAEATGRLAKTDRLDAAMLARMGALLNLEARPPRSPILNDLKDLSMAREALVKNRTAARNRAKTLTLALLRRHNAEQIRQIERQIDAIEAEIMTIIKADPDFARRFDILVSIQGVSAITAFALIIDMPELGSIENAQAASLAGLAPVARQSGNWTGRAFIRGGRANVRQALYMPALVAIRFNPHLKAKYDQLKAAGKASKLAITAIMRKLIVLANALIRDDRKWTPELP

SEQ ID NO: 120889 - protein, 398 aa, unidentified
MNLNIGIDIAKNVHEACLVNENGEQIGKFIRLKNSKKSIEKFTKHIESVSKELNVKPRIGMEATGIYWYSLYSALSKKYKIHVYNPSQISGFASVNIRESKTDKIDANTIANMLRFGESPKTNYSDTQRLELREYGRFYFKLTSIKINLKKRLRRNLHLIFPGYDEIFKNLYTATSKEIITNITTPEKVLEMGEKKLLELMKTKSKNHIDPEKAKILMEKAEDTIPSEIIKESSLFEFQMMLEMIEYYEKQIASIENKMMLIWNKVRDKHYIQTITGVSELRAAMIWAEMGNVDDFKHPDQIVAFSGYDPKVRQSGNKEVIGGPNKRGSKILRWVLGWTVQEAKCSNPVIGQYFDKKIEQGKHYNNARCAAAKKLIRIIWSVEKNKKSFQIPNNLQSS

SEQ ID NO: 120890 - protein, 344 aa, unidentified
MSTISILGIDIAKNTFQLHGADHAGKAVLRKRLARQELAAYVANFPPCRVVMESCGGANYWARVFQRSGHTVKLISPQFVKPFVMTNKNDANDAQAIVDAASRASMNFVPIKEVEQQDIQSIHRVRTRIVKNRTALINEIRGLCLEYGVVIAPGAAKVKLSLCAVIAESNNEFTPSSRECMQDLYEELIDVDLRLKKLNTRIRQLCRQNENCQRILKIPGVGELTATAIVAAVPNPKEFRNGRHMSAWLGLVPRQSSSGDKQVLLGISKRGDRYLRTLLIHGARAVLSHYKDLDNDYARWVGRKKATLSHNKAAVALANKNARIIWSMLSTGEEFNYGAQAAAA

SEQ ID NO: 120891 - protein, 354 aa, unidentified
MMNDSESTGLNGSPNEKENDNGKASSAEASVFAGIDVSKAHLDLAFTGAGLVGAAAHSGRFTNDVAGVKLLLAELKKCPTLRAALFEATGGLEREAAGSLCAAGLAVMVVNPRQAHDFAKALGYLEKTDAIDARALAQFAQTLAASPKFEALRMRLPEPEQEGLQVLVTRRAQLVEMRVAEGNRLERAPKAVRKSVQAVIALLERQIKALDGDIDGALKAHFAEKLALLKGLKGVGPGTQAALMAGLPELGRLTHKEIAKIVGVAPLSHDSGKMRGKRTTWGGRADVRAALYMGTLTAVKHNDVLKAFHQRLLANGKPKKVALVACIRKLLSIMNAILKSGVPWNPNFNAKKFA

SEQ ID NO: 120892 - protein, 356 aa, unidentified
MSHDVKYIGMDVHKEAVVIAVLNESGKQVIESVIETKASSILQFLHGLRGELHVTWEEGTWAAWLYDLLQPQVQHMVVCNPRRNALLKEGSKSDKVDARKLADLLRTGMLRPVYHGENGLRTLRELGRSYQTISKDLTRVMNRLKALYRGWGIPCAGTQVYAARTREEWLSKLPQAGVRRRAELLYQQLDGLQALRREVRPEFLAESRKHKAAKLLRQIPCIGPIRAARLIALMQTPHRFRSKRQLWTYSGLGIETHDSAQYRFVRGQLQLSKKPHQLRGLNRNHNHEMKEIFKSAATRASCGRGPFYDFYAALLAKGMKPEMARLTLARKIAAITLTLWKKEERFDAEQLKTQAA

SEQ ID NO: 120893 - protein, 370 aa, unidentified
MKKRSMFVGLDVHKESIDISVAEDGRRGEVRHYGVIAGDLEAVAKVVKALRAPDRRLRFVYEAGPCGFGIHRYLRAHHEDCVVVSPSHIPKRSGDRIKTDRRDSQALARLHRAGELTAINIPTADDEALRDLVRAREDAVGLSTQAKHRLKAFLLRQGRRYAGRAGWTLPYRRWLAGLSFPSVPQHVTLQEYRDTIDETERRVERLTEQLHQLVPTWRWAPVVEALQALRGVSFVTAVGLVAEVGDFRRFTHPRHLMAYLGLVPSEHSSGPSVRRGAITKAGNPHARRLLAEAAWAYHGIPRVSRRILARQETIPKPIRDIAWKAQLRLTGRFRRLVARGKAKPKVATAIARELTGFIWAIAREVPPLSA

SEQ ID NO: 120894 - protein, 342 aa, unidentified
MDIIRIGLDIAKHIFYLHGVDASGKTTLRKKLPRHELLAFFAQRSPCLIAMEACSGSHYWGRELRKLGHEVRLISPQFVVAYRKNQKNDYNDAEAICEAASREHMRFVAIKSEEQQATLMVHRIREQCIADRTSKANQIHGHLHEFGIVLPQGVTKITALLPPLLEDNHLPGLLKSLLQDLLEDIHQLNKRIASLDKQIREFVKSNDTATRLMTIKGIGPITASALVATVGNAHLFKNSRQFSAWLGLVPKQFSSGGKTKLGGITKAGDGYLRKLLIQGARAVLFKCTSDEDHRSKWIMQLRMRKPENVVATALAAKLARTAWAIMTSDETYQENYTGLTAA

SEQ ID NO: 120895 - protein, 350 aa, unidentified
MNANMVTIGMDVSDAWSQVAVLDDGGNVVLEDRVTTKAPAVRKFFKRFVGARIALEVGQHSPWLSRLLGEVGLEVIVGNPRKGGLIHASDRKSDRVDAQPLARLARLDPALLFPVQHRREDTQVMLAFLRAREALVEARTKLINSVRGQVKAIGARMPKCTAQSFHKHAAEIPELLEDALLPLMETIGVLTEKIKHQDKVIEEACREVYPETAPLLGVNGVGPLTALAFVLTVEEPGRFRSSRAVGAYFGLRPRRDQSGDVDKQLPVTKAGDRMVRKLLVQDAQYILGPFGKDSDLRRWGSKLAERGGKNGKRKAVVAVARKLAVLLHRLWVTGEVYEPLRRANLDAVNA

SEQ ID NO: 120896 - protein, 375 aa, unidentified
MKQYSKYVGMDVHKERITVAVAQANRKAPLYYGEIENTSEAIAKVVKRIAGQEETAFCYEAGPCGYGLYRQITAMGHRCEVAAPSLIPKKSGTRVKTDRRDALALAGLYRAGELTPVWVPDKEQEAMRDMTRAREDMKMMERHSRQRLGGFLLRHGKVYPGRSKWTQGHFRWLEGIRFETASQQIVFQEYVDMVKHTQGRVTAMQEEMRKALDGYTLKEVVEGLMALRGIDLIAAMTIVGELGDISRFTSPRQLMAHLGLVPSEHSSGGKRRQGGITKTGNSHVRRVLVEGSWSYRLPARKTAHLQRKAAKASKAVQEIAWKAQKRLCSRYWYLVYKGKLPVESCTAVARELVGFIWAIACEVMGNKRSLPVGKG

SEQ ID NO: 120897 - protein, 457 aa, unidentified
MYGPFNVASSTRIRFAVSLQLPRATAPSLVRRVEVVRVQVAQDDQEIIARVAALDIGKAEVVCCVRVPGQGPRARRMQEVRTYTTMTRSLLAMSDWLTGLGVTRVVMEATSDYWKPPFYLLENSFETWLVNARDVKHLPGRPKTDRLDAVWLCKVAERQMLRPSFVPPPAFRELRDLTRYRADLITTRTSEKQRVEKLLEDSQIKLSVVASDIFGVSGRAMMAALVAGERDPKVLADLARGSMRGKTARLEEAFTGRFTDHHAFLLRTMLARVDGIDADVDRVQGRIDEQIAPFAAAVTRLDEIPGIGVTTAQVIIAEVGLDMTRFPTPDHLASWARFAPGISESAGRKKGGSATGHGNRYLARALGEAAVGCRSTKTFLGERYRRIAKRRGKKRAIVAVGRSILMIVWELFSDEEKRFVDLGPGYYDSRVNRNRSTRNHVRELQALGYKVTLEPAA

SEQ ID NO: 120898 - protein, 410 aa, unidentified
MDVIVERPGALDVHNASVVACVRLPGEKGRRDEQVAEFSTTTRGLLALHDWLWAHGVRQVAMEATGSYWKPIWAVLEDDFECVLVNARHVKQVPGRKTDLKDAQWLCQLLEAGLLRASLVPPKPIRTLRNLTRYRKSQIRDRQREANRLHKVMQETGIKLDCVASDLLGKSGRAMLDALVAGTTDPALLADLARGQLRKKLPALREALTGRFSSEHSLVVGRILAHIDFLDESIAQLSEAIEQQIAPFAPAVELLCTIPGVGRRAAEVIIAETGGDMSAFPTAKHLTSWAGVCPGNDQSAGKRRSGKTTKGSKWLRGTLIEAAKAAARTKDTYLQAQYARLRVRRGASRASVAVAHSILTACWHMLQTGELYNDLGGDYFARRDPTRTTKRLVAQLERLGHIVTLEQAAA

SEQ ID NO: 120899 - protein, 349 aa, unidentified
MIIIGVDAHKSTHTFVAVDEIGRQVGQLTAAATLDGHLSAVEWAAHWPQVQFALEDCRHVTRRLEADLLRRGYSVVRVKTQLMAVHRRSARQPGKSDPIDAQAVAMAALREPNLPIARLDGPAREVKLLSDHRHDLVCERTKLINRLRWHLHELDPELHIPARGLRRYCVMDELADRITESTGVVAQIAGELLQRCRQMTRQINDLEREIRGRVRVLAPSLLAVPGCGVLSAAVIIGETAGAHRFHSKDAYAKFNGTAPIPVWSAHERVRLNRGGNRTVNAALHAIAITQVARGGQGKNYVDKLQAAGKTRREALRLLRRRISDRVFQVLRADESARGNIANATLSAAA

SEQ ID NO: 120900 - protein, 411 aa, unidentified
MDTVVERCCGLDVHKDTVVACVRTPGEGGERHQEVRTFGTTTASLLALRDYLVEQRVSLAGMESTGVYWKCVYYVLEDALECWLLNARHLNNVPGRKTDVGDAAWICQLVEHGLVRPSFVPPKPIRELRNLTRYRKAQIDERCREIQRLDKVLQDAGVKLSSVASDIQGKSARAMLEALVSGERDPQVLAEMALGRMRKKVPELQEALVGRFGAHHALLVRTILAKVDFLDSAIGDLSAEIDKVIAPFGAEMELLDTITGVDRRTAEGLIAEIGVDMSRFPSSGHLASWAAMCPGNHESAGKSKSGRARKGPKWLGVHLAEAASAAGRSKGTYLGAQHHRLTGRIGYAKANKAVGHSILVAAWHILSNSVPYEDLGEDWFVKRRPEAHARRLAKQIEALGYSVSIAPTQAA

SEQ ID NO: 120901 - protein, 309 aa, unidentified
MGAIIAGIDVSKDRLDVALRPSGDLFVVERNADGLEALVARLKDLDLGIVALEASGGFETVVTATLAAAGLPVAVVNPAQVRFFAKGVGERAKTDPIDAQMIAHFAEVTRPRPQALPDEKAQLLADLVQRRRQIIAMIGAENQRLKRAPDSLARSIGRLLKALEKELSSVNTDIDGAVRGSPLWRAKEDLLQSVPGIGPTIARTLIAEMPELGLLDRKEIAALAGLAPFTRQSGQWRGRSFIGGGRTAVRTALFMGAMVAKQHNPTLKAFFERLVAAGKPKMVALIAVARKLLTMLNAILRDQKPWQNA

SEQ ID NO: 120902 - protein, 337 aa, unidentified
MKATTIGIDLAKHLFQLHGVDQHGKTVLKRQLKRDQMLSFFSYLPPSLIGMEACGSAHYWANKLQGLGHTVKLMAPQFVKPYVKTNKHDAADAEAICEAVTRPNMRFVPIKSPEQQAVLALHRSRQGFIKQRTAQANQIRGLLAEFGIVMPIGIHQLLRRLPEILEDAENQLPSLFRVQLRLLQKHMEYLFDVVSTLDKQIEQCHQQNTLCQRIGKIPGIGPITASALIATIGNANTVENGRQLAAWLGLVPRQHSSGGKQVLLGISKRGDTYLRTLLIHGARAVLQSVKRKQDTVSGWASRLLERRNNNIASVALANKNARIVWPYWPKTRNTARQ

SEQ ID NO: 120903 - protein, 324 aa, unidentified
MSKASIICAGIDTGKHKLDVALEGRSQELQVPNTAEGHRQLSSWLCKHQVGRVGIEASGGYEQAVVSQLRQDGFVVIVFQPAQVRAYAVFHLQRAKNDKIDAGLIADCTAAAKKIHAPPDPRLAPFAEVVTLIDQITEDVACLQTRRESFRDERIKAHYTSEIRRHKALLRGELKKVAADIRQHDDLGKRLDLILSVDGVGLRTAVAILVRMPEIGRVPREQAAALVGFAPYDNDSSDYAGQRHISGGRKRLRGNLYNAALPASMRWNPQLIALYKRLIAKGKPHKVALVACARKLLIFVNTVVERGTPWSKETPALAIANRST

SEQ ID NO: 120904 - protein, 350 aa, unidentified
MRFYTGQHRFYCGIDLHARTMYVCILDAAGQIVVERNLPTTPEAFLEAIAPYRDGLVVACECLFTWYWLADLCAKEQIPFVLGHALYMKAIHGGKAKNDRIDAHKIAVLLRGGMLPQAYVYPPGMRETRDLLRRRLHLVRKRGQLLAHLQNLTHAYNRGAFEKRIAYPSNREGVVAHFAGEPMVQANAALDLSLLAHYDEILVELEARLVKQAKKEAPRGFHLLRSIPGIGKVLAMTIVYELHDVHRFERVQQFASYARLVKCAKESAGKRKGTSGAKMGNVHLKWAFSEAAVLFVRHSAEAKALLARLTQRHGKGKALSILAHKIGRAAYYVLVREKPFDAAKFFAHAR

SEQ ID NO: 120905 - protein, 344 aa, unidentified
MQIARIGLDLAKYVFEIHGVDAHGKTVLRKTLRRHAVSTFFANLPPCLVGLEASNGAHFWAQALSDLGHDVRLISPQFVTPYVKSNKNDRNDAEAICEAVGRPNMRFVSVKSPEQLAVQAVHRIRSRLVADRVRLVNQVRGLLGEHGIVVAKDIGNLRRALARIVADNEDHALHDLVRSLMGEAREELIELDARIGGYDRKIRELYRNSEICQRLGKVEGIGPVTATALVAAVGDRSSFKNGRQFAAWLGLVPKQRSSGGRARLFGISKRGDRYLRTLLIHGARSALGRVRDKQDPRSLWLGKMRQRRHPNVVAVALANKNARIAWSLLASDSAYDASLSVGAA

SEQ ID NO: 120906 - protein, 310 aa, unidentified
MKEQIVHVGADVAQNHIDLHGEIAGLPARIANTKTGLGRLLKMLSPAGSVQIVCEATGGCERLLVAACHEAGVAISVINPRCVRDFARAKGQLAKTDQIDARILREYGRMMQPAADSAIEPGLQKLAAYSTRRRQLIALRSAEKNRTLRSGPLLAASHRAILRALDKQIAAIDASLARTVASCARLRAKITALTSVNGVGTTSATALLAALPELGTLSKNQAASLAGLAPFNRDSGLYRGQRHIHGGRLSVRNSLYMAALVASRHNPVIKSFYQRLRSNGKPPKLALTASMRKLLIHLNSLLKSLPPQLA

SEQ ID NO: 120907 - protein, 388 aa, unidentified
MERVVIGVDPHKLSATIEVVDHQEKLLGSGRFTTDKAGYAAMRKYAKTWPERVWAVEGSNGTGRPLAQRLLEDGEQVVDVPAKLAARVRLFDTGHNRKTDARDAHSVAIVAVRTETLRVLQLDGELEALRLLCDRREALTRRRVQTVDRLQALLAELLPGQVKRDITTGQAKAMLASVRPRDIAGKTRRRIAVEELAELIAVEVKIKTTTAELKEIVLARGSRLMDLHGVGPVVAARILADVGDITRFADRNRFASWTGTAPLDASSGEQNRHRLSRAGNRRVNHMIHIAAISQIRLNTDGRVYYRRKRAEGKKSLEAIRCLKRRISDAVYRQLVEDTAEATPRDVDTGPGGHCGASQESSAADSHPLIDTSDQPLPGPAKETLRPTG

SEQ ID NO: 120908 - protein, 346 aa, unidentified
MHYIGMDCHITTLEFAVVNEAGRLVKAHKVATSVNGFMEFVKKVQPPRTIYVEEGVLAAWALETCVRFGEKLVITDAKKNRWIGSCGQKDDSIDALKLAQLARGGYIKEIRHPVGQRRRFRELMIAYHDTVRGTTRIKNKIKAKFRQNGIQCTGTTVYSETQREEWKGKLPQETTLLLILDGLWRQLKQSERIEEELLAAAKAQAKQYPEIKLFQDIPGIGFIHAATISAILETPYRFADKRKVWMYAGLGIITRSSGGKLYSEKLSTDYNRLLKYTLKQAAEAAIQAKDSPFRRKYLDMTLLHGIAPHRAKLTIARDMLATMWAMWRKGEMYNPGIREKAAYKQD

SEQ ID NO: 120909 - protein, 337 aa, unidentified
MKYSGIDLHSNNSLVTVTDEADRVVAEKRLPNELSTILAFLLPWREELIGVVVESTYNWYWLVDGLQAAGYKVHLAHCTAIKKYDGLKHSGDEADARHLAHLLRLGILPTGTILPPAQRAVRDLARKRMQLVRSRTTHILAVENITARELGARISSNQVKHLTAEVIDQMPIAADVALAIKANLAVINTVSAQIELLEKRLQESVKAGSDYGLVSSIPGIGRVLATTILLETGPIDRFASPGNFASYARCVDSQHTSNGKKKGEGNTKNGNKYLAWAFVEAAHFAMRYCAEAKRFYERKKAKTNNVVAIKALAHKLARACYHILKERKPFDVTRCFA

SEQ ID NO: 120910 - protein, 461 aa, unidentified
MSKKAKVISALPVVRRDVAGVDIGSTQHWVAAPQADPDTPNVRVFGSTTGALEELIDWLVSLGVKSVAMESTSVYWIPLYELLEARGLEAVLVNARHLRSVPGRKTDMRDCQWLQTLHSCGLLRGSFRPPEQIARIRAIHRQQGNLVRERTRAVQWMQKALDQMNVQVHRAVTDITGTTGMAIVRAIVDGVRDPNKLAELRDVRCAKPQAVIAQYLKGTWREEHLFNLGSALRLHDFVTSEIERYDHMLEAELARLESEEHRDQSPPALPSKVKEKKIIREGKGQRRDQLFRVAGVDLTRIDGLGVDAASTIIDELGPDLSAFPTEHHFVSWLRLCPNRAYSAGVPLPKKRQNGAGSSRVGAVLRMAATALARSQTALGAYYRHIAKRKDAAVAAFATARKLACLVYRALRYGTEYTDQGAEAYERAYHERRLKSLKHAAISLGFDLVPATPTGASAPSAG

SEQ ID NO: 120911 - protein, 332 aa, unidentified
MVAGTHGSLNKAGSTKMTQISTTAGIDTSRAKLDIAVHGGVEHWQVENTSVGWRRLAVGLSQAGVTRVGIEASGGYERGVVGYLRDKGLTVLVLQPIQVKAYARVHLRRAKNDKLDAVLIAACAATIDQPRIEPDERLAKLAQHLTFVEQIEEDIARFKVRLEHIDNPRLRRMVLADIARLKTRRSAELSRIVMALRAHEDLGRRLDLVLSIPGLGERTAIALIVRMPELGRVSREEAAALAGLAPYDDDSGKHKGQRHIAGGRGRLRRSLFAAALPAAFRWNKTLIELYTRLTARGKAHNAALIACARKLLIYANTVVHRGKPWVERPATI

SEQ ID NO: 120912 - protein, 319 aa, unidentified
MSKSEITFEQVIEKGCGIDVHKKVLVSTIRGTGIQEETRSFDSFTESIEAMRDWLKENHITHVAMESTGVYWKPVFNILEDDFEVILVNARHIKNVPGRKTDKKDSKWITKLLLSGLLRGSFIPPKDTRELRDLTRYRRKLIGYVASEKNRIQKILEDANIKLSSVVSSTSGATATKIISAMIGGQESIDELVKLRHGKLQVSKEDLAKALKGHLTEHHKFMLTTIKSSIEDRQAVIEKLDKRIEEHLKANEQILDSELLQAIPGIGKDAASGILAEIGNNMDQFPDEHHLASWAGMSPGNNESAGKKKVVASPMEINT

SEQ ID NO: 120913 - protein, 412 aa, unidentified
MRILFERCCGLDIHKVSIAACVVITRDGKTEEETRRFGMMTADLLELAAWLKARGIQHVAMESTGVYWKPVWNILEAEGFDLPLANAQEVKIVPGRKTDQKDSQWIADLHQHGLLRKSFVPPRQVRDLRDLTRTRATLAQDHSSICNRIQKVLEDANIKLASVATDALGASGRAMLEAILSGEQDSARLAELSKGLLRNKIPELKLALEGRVTEHHRFLLRQLYDHLLFTESKMEQIEEEIERRMRSFQDEVVRLCTIPGVDRVTAWGLLAEIGLNMDQFPSSAHLASWACLCPGNFESAGKRLSGKMRKGNVSLRRCLSQAAWAISMMKNNYLSALYRRIAARRGAKRAVMAVAHALLVIAFHMLKRKENYHELGADHFDRIDITRVRRSLVRRLERLGHRVTLEPLAQTV

SEQ ID NO: 120914 - protein, 408 aa, unidentified
MDVLHQRCAGLDVHQKTVVACVRLVAQGTVSREVRTFGTTTRELLTLSDWLAACAVTHVAMESTGVFWKPVWHVLEEHFELVLANAMHIRNIPGRKSDVNDATWIADLLAHGLIRGSFVPPAPIQELRDLTRTRTQLVREVARHTLRLQRVLEDANLKLAAVVSDLLGVSGRAVLDALVAGEADPARLADLTHGRLHVARTTLVAALDGRVTPHHRFLLQLHLGQIDALRAAVRDLEARLEEALHPFRAQVERLKTVPGFRDIAVRVVLGEIGVDMGRFPTAGHVRSWGGFCPGLHESAGKRLSTRTRPGTPWLKTTLVQAAWAAVRRRDTYLHAQFVRLKSRRGPKKAILAVAASMLTAAYYILRDDVPYRDLGAEYFVRRDKTKLARHLVRRLQDLGLQVEIRPAA

SEQ ID NO: 120915 - protein, 398 aa, unidentified
MLSIGIDVSKGKSTVCGMKPGGEIVYTPFEVQHTREGMSELVSLLRGSGEEVRVVLESTGSYHCPVVAALLENGIFVSVVNSLRMKRFCSQSIRRVKTDQIDAMQIALYGLAYWQELQPTRLPENTYRELQLLARQYYQMTSLLIKAKVDFNALCDQVLPGMQELMSDHAGRHKLSDFVLRYHHTAHILEMGETRFRKDYCKWAEKKGYRNHERMAALIFATAQNGIPVLPDAPSTQIVITEAIRVLHTVEASRDAILTQMQALAKTLPEYSLVREMPCIGDTLAPRLIAEIGDVRRFHSKRALIAYAGIDAPPYQSGKFSANNRHISKRGNRYLRKTGYEVMQSYVMHKPANDPIFTFIEKKRGEGKSGKLAMVAGLNKFLRVYYGKVTELYRSLPQ

SEQ ID NO: 120916 - protein, 448 aa, unidentified
MSFEQRPILEAKAAGVDLGAREVYVAVPPERDANPVRIFQTFTEDLNKLADWLEQCGVKTVAMESTGVYWIPLFEILERRGLNPCLVDARHMKNVPGRRTDWQECQWLQYLHSVGLLRSAFRPDDEVCAVRALSRHRQGLVEMAIQHVQHMQKALTQMNLQIHHVIDDLTGVTGMAIVDAIVEGQRDATELAKLRDPRIKADLETIRKSLVGNWREEHLFTLKQSRDLYVAYQRQITACDQEIETRLQQTPPRVDPDQKPLPPDKKAKSHDRKPNPDSTFTMRTEAYKLFGVDLTQVPGLARNILALYSEVGRDMSRWASSAHFASWLTLCPDNDISGGRVLWRGTRQQKNRAAQLFRMAAYGLHRSQTPLGDFLRRMKAKLGPAAALTATARKIATIFYAMVKNQVEYDHTKWSKLDIQRKRRVENKLRRQARQMGFELIPLEQPAP

SEQ ID NO: 120917 - protein, 368 aa, unidentified
MGRKSSKLFVGMDVHKESIDITLAEEGGAVRHYGRIGGEQSALIRTVRKLESLGKSLVFVYEAGPCGFWIYRLLRERGHECWVVAPSNTPRRVRDRIKTDRRDSLKLAGLARAGELTPIYVPDAADEAMRDLVRAREDAVATQRQARHRLAALLLRNDIRYCGKTAWTEAHRRWMARLPLPGAAQRIAFEEYVLTVNEATASVQRLTASMEQELVHWRWQPVVHALQACRGIQLIHAVRIVAEVGDLSRFSHPRQLMAYLGLIPSEASSGERRRQGPITQAGNRSARRALVEAAWAYRHHAAMSPIIVRRQSGLAKPVLDIAWKAQLRLCARFRRLSARGINRNKIVVAIARELAGFVGAIGQRVKLN

SEQ ID NO: 120918 - protein, 338 aa, unidentified
MKIYTGIDLHSNNSYVALINEEEKVLYKKRLPNDLIGLLEILKPYQDVIEGVVVESTYNWYWLVDGLQEAGYKVHLANTGANEQYSGIKHTNDESDAIWLANLLRLKTLRTGHIYPKEKRGTRELLRKRLLLVRQQTACLLSIQGMITRYENVKVTASNIKTLNTKKILSLVKDEDVRFAAQSQLKILSCIMEQVDILERQIQKKIKSDQQFILLKSVPGIGPILAMTILLETGDINRFESVGNYSSYCRCVESKRVSNEKKKGMNNRKNGNAYLCWAFIEASNHAINQYPTIKKYYQRKLNKTMRVVALKTIANKLSKACYFMLRDKVEFDMKKLFM

SEQ ID NO: 120919 - protein, 311 aa, unidentified
MDHFGGLDVSVKETSICIVDDTGRIVKEVKVASEPEALLKVLGNPTYRFKRIGLEAGPLSQWLFSALAEAELPVICVETRHMQAVLKAQINKTDRNDARGIAQMIRVGLYRPVHVKTLRSQKLRMLLTHRKLLQSKAIAIENDLRGTLRNFGLKVGMVGKVRFEARIQELVENIPDLAVLVEPLLIVRRVLREQIVILHRRLLAIVREDEVCRRLMTTPGVGPVVALTYRATVDEPARFRKSKSVGAVFGLTCSRYQSGEIDWSGKISRCGDEMMRTMLYEAAQSMMHSKKWSWLKACGATIKMGIPRQSG

SEQ ID NO: 120920 - protein, 350 aa, unidentified
MERYIGLDVHAASTTFAVIGESGKRLGSHVVETNGQSLVEQLKTIPGTKHVVLEEGTQSAWLYEILSPHAEEVVVVMVPESRGQKSDEGDAFQLAEQLRTGALKKRVFKKAGEYKTLRELGRTHSMIVQDVVRVQNRIKALFRSRGVAVSGKSVYSEKGREELLEKLPDASRGAAKMLYAQYDAVEEIRREAEKDLVKEAHRHPMSRVLESCPGLGPIRVAQLIPVVVSPMRFRTKRQFWSYCGLGIVMRSSSDWTRTKDGGWTRAEVQKTRGLNMNHNHTLKNIFKGAATTVITQLSTEPLHQDYERLIAAGTKPNLAKLTIARKLAAIALSMMKSKEKYDSTKHRKQG

SEQ ID NO: 120921 - protein, 343 aa, unidentified
MDHFAGLDVSVKETSLCIVDDAGRIVREVKVASEPEALLAMLTNPACHFKRIGLEAGPLSQWLFSALAEAGLPVICVETRHMRAVLKAQINKTDRNDARGIAQMMRAGLYRPVHVKTLRSQKLRMLLTHRKLLQSKAIAIENDLRATLRNFGLKVGVVGTVKFEARIKELVENLPDLVVLVEPLLIVRQVLREQLSILHRRLLAIVRDDDVCRRLMTVPGVGPVVALTYRATVDVPARFRNSKAVGAAFGLTPSKYQSGENDRTGGISRCGDEMMRAMLYEAAQILLVRSTKWSWLKAWAMKIARHRGLKKAIVALARRLAVIMHRIWVDGTEFRWTREAAAA

SEQ ID NO: 120922 - protein, 343 aa, unidentified
MYFIGIDVSTKESALCIVDGNGKIVRETKLPTDPAIIAGFITDTGLAIERIGLESGCTAAWLFAGLQRYGWPVICIDARHAAAALQAGFRNKNDRNDARGIADLMRVNKYRTVWVKSPEAQRQGRLLTARAALQSQLVALENTIRGLLRQEGIGLTDRRTAFEAAVREVIGEDRLLHAAIHPLLETRNAVLCQRAALDRQILLIVRADPVCRLLMTAPGVGAIVSLAFKVAVDDPRRFSRSRNVGAHFGLTPREHSSGELHYQGRISKMGDREVRRLLYVAASRMLRRDAALWCPLKAWAVRLAQRVGIRKARVALARKLAVALHAMWSSGQVFQWQRTEASA

SEQ ID NO: 120923 - protein, 440 aa, unidentified
MAVRKREDEVFPNAAGIDVGGSSHWVAVPARSSDEPVREFGAMTDDLNAMATWLLACGVDTVALESTGVYWIPVFEVLEQRGLKVWLVDARQMKYVPGRKSDVQDCQWLQKLMSLGFLRAAFRPDAQVCELRAVARQRDILVAEQASWVQRMQKSLVQMNIQLTEVLSDVMGLTGELIIRDIVAGERDPKALARHRHSRVKASLEDIIKALTGNWREEHLFVLKQSLGMYDDIARHLAECDTRLNAGLKDLGQKSVDLGKTPRAGSKQRKEYDMRQVLADWAGVDLTRINGLGLAAVTKILTEIGPDLSRFPTVKHFCSWLGLCSGTKISGGKVLSAKTKRSVNRVRQALKMAAMSLSHSGSALGAFYRRLCTRMDKPSANTAVAHKLARMVYFMLTRGEAFVDQGQQRYDEQQLERSVAALKRRATALGFAITPVAAQA

SEQ ID NO: 120924 - protein, 356 aa, unidentified
MEPIKSNCIGCDAHRRYSVFVVLDDRGQIGKEVRVEHGRELYRHFLTTLAPGAPIALETVGNWYWMIEEMERAGHQPILAHAKKAKLMMGLTNKTDKLDARGLALLLRNGTLPSVWIPPGELRDQRELPRMRMVFARIRTMLKNRIRSTLAKYAIEIDEVSDLFGVTGRDLLEKRYQQLPQETQRCVKEQLALLDHVLEQVETTEKRIREVVKESAQMKLLMTLPGVGFILAIVIALEIGNIDRFPDAPHLASYSGTVPRIASSGGKTYYGRVRVDVNRYLKWAFIEAASAIVVHQKTMADRHVVKLYQKIHKRKGHAKAVVAVARHLAEAAYWMLKRNEAYRERSLSISISPTRK

SEQ ID NO: 120925 - protein, 297 aa, unidentified
MYYIGLDVHKKTISYCVKDVAGHVHREGKIGSTRRELDAWINTLPQPRTMAMEATIFTGWIYDHLLPHAEKVKVAHPLMLRAIAAAKKKNDKIDAAKIADCLRCDFLPECHMASTEIRDRRRVLRYRNLVVKQMVQMKNRVSGLLMETGVSYNKQRLHKVGYFGELMSTNEDISQAVRPLLNLSRGMIRRSGKLEYDLVSSLERDPLLRERLRRLRTVPGVGSITALTWALEIGDYTRFSSNKQAISYCGLCADEKSSADKVMRMPLSKQRNKHIQRVLIEAAKLAPRESPELAMIR

SEQ ID NO: 120926 - protein, 337 aa, unidentified
MIIIGCDFHPSFQQIAMLDTECGTTTEHKLMHTSGEAERFYRALTSPALVGIETVGNDQWFVQLLQRLGHEVWVGDAAQIRASYVRKQKTDRRDAGHILKLLIEGRFPRIWVPGAQMRDHRQLLVHRHKLVQIRTRVKNELQHLMLNQGMQKKQKLWSTEGRSALETLSLDPWADRRRHDLLHLLGILDVQLGQLDAAVKQVASQYPDVQLLLSQPGVGPITALAFVLTIGDVRRFPRGKQVASYLGLIPRERSSGGKQKMGGISKQGSRLMRFLLVEAANIAVRFDPDFRKEYSHRCHQKHFIVAKVAAARKLAIRMYWILRTQKPYPQVLSSRAA

SEQ ID NO: 120927 - protein, 348 aa, unidentified
MHTVVVIGIDPHKGSHTAAALGSGGEVLAQLRVPANRAMLNRLLKWAATWPERTWAVEGASGLGLLLAQQLVNAGEAVVDVPATLAARARLLHTGHGRKTDALDAVSVATVAMHSPSLRRVAREDHGAILRLLADRRDELTQERRRAVNRLHRLLRDLCPGGAPTDLAAGDAAALLTAIRPVTAVEHERKSMARELVADVRRLDRDLTINRKRCAEAVAASGSTLPQILGISDVLTAKILGHTGDITRFATAGHYASYTGTAPIEASSGDIRRHRLCRSGNRSLNNALHLAARVQAMHPGLGQEHYQRKLAEHKTSREALRSLKRQLAKVVYRALRADHDRLVVQRLT

SEQ ID NO: 120928 - protein, 403 aa, unidentified
MNSVGIDISKGRSTVAVMRPFGEVVISPFEVRHTDSELSELARQLKSLNGETRVVMEATGNYHAPVAKLLHDAGLYVSVVNAKLVHVYGNNDLRRVKTDRKDAVKLANYGLDRWLTLPRYVPEEDTRLLLKNCYRQYRQYSKVQTVLKNNLISLLDTVFPNVNRLFSSPIRGDGSEKWVDFVAEFWHCRCVSEKSERAFTSKYLRWCRKHGYNFREAKAHTIYAEASGHIGVMPKSETTKLLVEQAVAQLGATSTALAALKHEMQSLASQLPEYPVVMDLFGVGPTLGPQLIAEIGDVRRFYSKKALVAYAGLDAPPNDSGDVTGRHKSMSKIGASSLRRTLFLVMSVYLQTAPLDEPVCQFMDRKRAEGKLYRVYMMASANKFLRIYYATVKAYLESLEHTV

SEQ ID NO: 120929 - protein, 399 aa, unidentified
MLAVGIDISKSKSVAAILNQDGSMHTGPFEFHHTQPELDAFIKYILNSNQSATILMENTGHYHYPVLKAFQEAGLPVCMVNAYQIKKFGDMDLRKAKTDKKDAVRIARYALEKSYSLVPYTSMEQKYEDLRFLARQYNQRMLTLKTNKVFLLNLLDETMPGITNILPLTTRTPETSLSVLFINRFKSYDRIEKMGKSRFLDAFEKIARKSRNRQTKTYGLAIYEAALLNITTRGENEYTLGAQDQCLELVCESQKAADSIILKMQTLAETLPEYAVLRSMAGVGNRLGPLILAEIGDIRRFHSGKALNAYAGNDAPPYQSGTFESHNRHISKRGNAALRKYCFEVMQALKLTRPQDDPVYLFLLKKEQEGKPYNVAKMAGVNKFLRIYYARAMETLKQL

SEQ ID NO: 120930 - protein, 373 aa, unidentified
METIITYVGMDTHKKEHSIALHYPGQEEILRFTVRNTYSDVSKMVKRILKKAPGEVRFCYEAGVCGFDLKRKIEALGCKCAVIAPSLTPIKPGERIKTDRRDALKLLMMFKAGLLTEVYAPDPQQEAARELTRLRQSARKDLMKARHRLLKFLARHGYIYHEGSHWTGRHFRWLGSLEFENPLMRDVFDSYFTEMQHCMQRLDSLDKEVEQLAESEPYKKIVGLIRCFYGIDTLTAISIITELFEFGRFANPGCLMSYIGLTPSESSSGEKQNKGSITKAGNKRVRRLLIEVSWHYRHPYHVSKALKERRKDQPQWAIDIADRAGRRLRKRYWYLVNRGKMPCKANTAVARELAGFIWSVLREYRARKTEKVA

SEQ ID NO: 120931 - protein, 343 aa, unidentified
MDHFAGLDVSVKETSVCIVDDTGRIAREVKVASEPDSLLQVLTNPAYHFKRIGLEAGRLSQWLFSTLAEAGLPVICVETRHMRAALKAQVNKTDRNDARGIAQMMRAGLYRPVHVKTLRSQKLRMLLTHRKLLQSKAIAIENDLRATLRNFGLKVGMVGTVKFETRIKELVDNLPELAVLVEPLLIVRRVLREQIGILHRRLLAVVRDDDVCRRLMTVPGVGPVVALTYRATVDVPARFRNSKAVGAVFGLTPSRYQSGESDRTGGISQCGDEMMRAMLYEAAQILLVRSAKWSWLKAWAMKIARHRGLKKAIVALARRLAVIMHRIGVDGTEFRWTREVAAT

SEQ ID NO: 120932 - protein, 420 aa, unidentified
MNKTKQRKLDRVKGNVLIVGVDASKSKHDAAVRLPDGVVLKTFSFNNDLTGFEKLAQEVLRCCERYDLRSAILGIEPTGHYWEALAYWWEEQSGTVVLVNPMHTKRAKELEDNSPLKNDKKDGIVVADLVSQGKYFECHLPRGVFAELRNLVFERDRCQNQRTQVINQLHQSVDRLFPEIAAEFSGIRVKTYQRLLRKYPEPKELAAVPVGKLTKMLRKWSRGSLGEEKAQRLIALAGRSVGVKEAASIIAAEVKRLIALLEWIESDSSKLKAQIEQCLVRTPGAAMLLSVPSFGPITVAGILANTGNLAEYEHPEEALKLAGLNLFEISSGKHRGRLRISKRGRAQLRKILFMAALRAARRDSLFRQYYQRLLDRGVEKTVALVALMRKLLRISWSLVRNSQMFDPQRLNATQAQKQAA

SEQ ID NO: 120933 - protein, 349 aa, unidentified
MKKSSKMLKRMRETIGIDLGDKVSRYCMVDQEGEVMEEGTFRNQASSLEKHFGDRPRRIALEAGAQSAWISRELKRLGHEVIVANPRELKWITSSDTKNDPVDARKLALLARADVRLLAPVEHRSAEQQGELAVIRGRDAILRARTLLINSARSIAKGFGVRLPKSITHTFGERAVDALPDFLRAALTRLLEQIDALSRAIAGYDQQIAELAAKHPELERLESIPGVGRLTAMTFVLTLGRAERFAHSRDVAGFLGLRPKQRQSGARDPQLGISKSGDPYLRKLLVQCAHHILGHYGKDSALRQWGLAKSEGGKKATLRAIVAVARKLSVLLHRLWVSGEYYKPFPKMA

SEQ ID NO: 120934 - protein, 407 aa, unidentified
MEVLYPRCAGLDVHAKTVVACVRTASGATVTYEHRTVSTNTRGLLDLADWLTAQGVTHVAMEATGVYWKPVWHVLEDHVTLVLANAMHIRNIPGRKSDKNDATWIADLLALGLIRSSFVPPAPIQELRDLTRTRKQLVRERARHMQRIQKTLEDANVKLTEVITDILGTSGCAILTALVAGETDPERLADLTSGRLKATRAELTEALHGRVTTHHRFMLKLHLTQIAALNTAVADVETRIREALVPFRAAVSLLTTMPGVSETAAAVILAEIGDDMAKFPSAGHLLSWAGLCPRLDESAGKRRSARTRQGAPWLKTTLVQIAWPASRKKQSYFQAQFLRLKSRRGPKKAIVAVAASMLTDVYYMLRDGVEFHDLGDQHFAQHDKARLTNRLLKRLRDLGVEVEVKAA

SEQ ID NO: 120935 - protein, 339 aa, unidentified
MDQISIVGIDLAKSVMQVHGVDAAGAVVVQRRLRRGQVMGFFARLPRCVIGLEACATAHYWGRELKALGHEVRLIPPAYVKAYVRRNKNDAADAAAICEAVSRPSMRFVVLKTAAQQAAGGLHKVRELLVKQRTMTINTLRGLMAEFGIVVPQGPHHVGQLKAKLADGAGLDIPAPLPAGLLALATNLESLEQQLAAVEKEIIAWGRASKTCRHLITAPGFGPILASAMAAMVADPRQFRSGRDFAASLGLVPRQEGTGGKVRLGPISKRGNGYLRRLLVNGAMAVMISQRGRRDPWLMKLVARKRPKVVAVALANRMARIAWALMMRQEDFRAAPAQP

SEQ ID NO: 120936 - protein, 416 aa, unidentified
MSRVVDIVHAVCCGIDVHKSFLVACIATTDERNNTTHQIRRFSTFKGDLKRLADWLSANNCKDVCMESTGKYWIPIFNVLEKTCNVCLTHPKYVKAIKGKKTDKKDAKWISELFKCDLVRSSFIPPPLTRHLRELCRYHAKLTYMNSSEKNRGQNCLTVCNFKLDDVFSDVYGTSATRVLDKLIELGHSDFDVAPLLHKRCKATPEQVKAAIDGELSPAQAQKLTLVRQHMKYLESHQDTLESFVAQLAVPYQPQVDLLMTVPGVGSEFTAIRILAEIGVDMSVFETAKQLTSWAGLAPQNNESANKKKTTRIARAGAFLKPLLVQCTLAAVSSTKYPWLKDKYQSLKKRRGHKKAVIAVARKLLAAIWNMLAKHEPYNHELHQKSDPAPQNRVITPEQAFALLRNHGYQITEPAV

SEQ ID NO: 120937 - protein, 348 aa, unidentified
MKHYAGLDVSVKETSVCILDASGTICREKKVVSHPEDLVAILSDPAFSLERVGLEAGPMSQWLFEGLAKAGLPVFCIETRHTKAFLKASQTNKSDRNDARGIAQMMRVGLFKDVHVKTLTSQKRRALLTARSLLQEKAVAFENDMRGLLRNFGLKVGEVSGGKFEERIRELVEADPDLAEIMEPLLAGRRKLREEFAKLDKKVLQEAKHDEVCKRLMTVPGVGPVVSLAYVSTIDIPGRFRNSRAVGAVLGLTPVLNQSGESKRVGHVSLCGDAMMRKLLYEAAQSMLTRVAKWCWLKAWAMNIARRHGKKKANVALARRLAVVMHRMWVDGSEFRWTKEETTSTVGA

SEQ ID NO: 120938 - protein, 343 aa, unidentified
MRLFMGLDVSLEKTAICVISEHGKIVKEAQVASEPEALLRWISDQGGAVAAIGLEAGPLSQWLHRGLSEAGQPVVLMETRQVKGALKAMPIKTDRRDAEGIARLLHLGWFRPVHCKSVSAQEVRAVLTARKAVQQGFITLEMSLRGLLRNFGLKVGTISRGRFEQRIRELAAGNPMLEAATEPMLRARSALRRELAGLERHVRQLAQQDPVCLRLMSMPGIGAVVALTYRSAVDDPARFTSSKKVGPWVGLTPSRNQSGERDISGGITKAGDVKLRRALCQAATVMMHRGRATWLRTWAAKLARRRGAKRAMVALARRIAVILHRMWMDDTDFRFDNPAPHAD

SEQ ID NO: 120939 - protein, 356 aa, unidentified
MSQDVKYIGMDVHKEAIVIAVLNGSGKLVMETILETKASSILQFIHGLRGELHVTWEEGTWAAWLYDLLQPQVEQVLVCNPRRNALLKEGSKSDQVDAQKLADLLRTGMLRPVYHGENGLRTLRELGRSYQTISKDLTRVMNRLKALYRGWGIPCAGTQVYGPRYREEWLNKIPQAGVRRRAELLYQQLDGLQGLRRHLRPEFLAESRKHKAVKLLRQIPCIGPIRAARLLALMQTPHRFRSKRQLWTYSGLGIETHDSAQFRFVSGQLQRSKKPQQIRGLNRNHNHEMKEIFKSAATRASCGRGPFHDFYAGLLAKGMKPEMARLTLARKIAAITLTLWKKEERFDVEQLKTQAA

SEQ ID NO: 120940 - protein, 313 aa, unidentified
MNAQAVVVGIDVSKDWLDVAMGVESSRVANDAEGIGALLERLRQGVELVVMEATGGYETQAASAIAGAGLRLAVVNPRQVRDFAKATGRLAKSDRIDAQVIAAFGEAIEPQVVRLPDEQTKELQDLVMRRQQLVAMKVQESNRLAMMTGAAKKQIKTHIAWLEKAIDEVNTDITARLRTSPVWREKDELLRSMKGIGPITSSMLLMNLPELGQLDRRSIAALVGVAPFNRDSGSFRGRRTIWGGRAEVRHVLYMAATTAIHHNCVIKPFYEHLIARGKPHKVAIVACMRKMLTILNAMTRSNTRWMPAPGIAS

SEQ ID NO: 120941 - protein, 312 aa, unidentified
MTEHSYGGIDVSQDRLDVAVLPQGKGFSVTNDRAGWNALIERLQGLPLVAIGLEPSGGYERGIVRALLGAGLSVRRINPNRLRQFARARGALAKNDRLDARLIAEYVAIMPTRAVRHDPAAGRIAEVVTMRRQLSNEHVAVENQAAHLDDAMLRRLAKRRLARLNADIRLLDKRLAEMVAAEPALARRYEVLASMPGVGPVLAFTLIALLPELGEMSRKQVAALVGLAPFDFDSGKLRGHRSIYGGRMPVRNVLYMAALSACRYNPALKAFRDRLVGAGKKPKVVLVAVMRKMITTLNAMLRDGATWQHRSA

SEQ ID NO: 120942 - protein, 463 aa, unidentified
MFAATLLGAVTRLTSGNEAAFAEGASFAARDIIRSLLDPSDTEIAVPPDGVSASVFYSRNDTAFMRSVMARYLRHDLDYRWGDWGLTRMIRVAAPLGMIGRGPVCIGHKHRGEAAVGYFAGLDVSLEETAICIVDDEGRILREARVASERYALVAFFNALGMTMERVGLEACSLTAWLHQGLSEAGIPAVCIDARQAKAAIGAMPNKTDRNDARGLAQIMRTGWYRAVHVKSPSCRSWRALLTARRMLLNKRRDIENGVRALLREAGLKVGAPSRKDFPARVRELASGDAVLTGLVESLLSVIKVTTDEVARLTKRVLDEVRVEPTCRHLMTVPGVGPLTALAFRATVDRPDRFRKSRDVGAHLGLTPRRYQSGETDVQGRISRCGDELARTALYEAAHSLLIRSRKWSALRAWGMQVAKRRGIARARVAVARKLAVILHRMWVDKSEFRWGKQAATAAKAAR

SEQ ID NO: 120943 - protein, 343 aa, unidentified
MDQITRIGMDTSKHIFQLHGVNAAEAPVLRKKLRRKEMMAFFEKLAPTAVAIEACGASHHWARRLQSFGHTVKLIPPQLVKPYVKRGKNDAADAEALCEAMSRPTMRFVPVKTVEQQAALMLVGVRDRLIRNRTQLANAIRGYAAEFGLTAAKGMCKIEPLLARIAADETLPELARELFALHGREYRQLQARLEEVDARLMTWHRTDECSRRLARIPGVGPIGASMLVMKTPAPQEFRSARHFAAWLGLTPKDHSTAGKVRPGVITRAGDEALRSVLVTGATAVIKQAQRGRVASPWLVDLLNRKPAKLAAVALANKIARVAWKLMVSGETYTTPQTVMVRAA

SEQ ID NO: 120944 - protein, 415 aa, unidentified
MGSALPLPLARLRETEGPAKREGEGAAKACAPGAGLPLVSGFWRRGMVRTSLRGVRWPADPSRGGRRPQPLRPQPWVSNGTAAAVTRDRTVAGSPIARTRQVTVTKIICGVDVSSRTLDARIGRDGAASRFERTAAGIEALVAFCEAHRVELVAMEATGGYEKLPFALVWAAGIPAVILNPRAVRRFAEAMGFLEKTDRLDAGIIAWFAEVKRLVPQKPASQTQERLEALVTRLHQLTRLRTTQSNQRRLLTEAAVLASIDAVIALVTRQIRSFEAQIAELIAGDPLWRKLDETFRSIKGVAARTVARLMAELPEIGTLSNKAVAKLAGLAPIARDSGRVSGKRPVRAGRSGVRAILFVVAEIVRRHEPDFADVHRRLSQAGKPRKLIRIALARKLLVRLNAKARDARNELAHAT

SEQ ID NO: 120945 - protein, 337 aa, unidentified
MEREYIGVDLHKQFFQACAVDVTGARRWETRFPRTDGGLTLFRARCAAETAIAVEACGPTWAFVDALIPTGARVCVVDPRKTRLKAGFAAKTDRLDARRLADALRRESVVSVYVPSPAVRELREVCRGRHQLVRLRTRLVQMIRSLLLRSGVADVPVGSLYSARGFAWLAAVQLPADAQVSLMRLRQILTVIHAAAIEAEATIRSRAQAEPIAQALDTVVGIGPVLGLTLRAEIGEVERFARGADLASYAGLVPRVDASADRYWSGRITRQGSPWLRWALVEAAMHGLRRSDAIGRWGRRLAIRKGVCKARVALARRLCDEVLAVWPRTRERSSESD

SEQ ID NO: 120946 - protein, 315 aa, unidentified
MAMRVTLEKPIIGVDVAKNELVIYHDQYDRLEAIPNTKVAITQWLKALASSCAIAIEATNVYHVLFADAAHEAGCDVYMVDGYQLSHYRKGVNIRAKTDAQYARLLARYLKNELDELRPWIPASPLYRQRLSLFRRRAALVQARTGLVQSWTNEPFLRTAFANQVNSMKRFEALVEKKIRDVLQEAGLMRQVNRCMKVEGIGFLTAARLVTSFQRGEFSGANAFIAFLGLDLRVSKSGQSDGPRRLTKRGDPEARRLLHNAAMSGSRTPAWKPFYEEQRKRGFSTTQALVMLSRKLARVVFALLKNQSEYQTKVA

SEQ ID NO: 120947 - protein, 359 aa, unidentified
MYFAGLDAHLKYVSIAVLDRRGQVALETSVSTREPEQLLAALAPYRPLEVVVETCPFWPWLYDLLVPAGIGFHLAHAKQLRAIAAAPQKSDAVDARLLARMLLAGLIPEAYPRPADQRELLRLLRHRTTLVRYRTRLAGRIHSQLHQQRLSLPREKLLRQATRAWLEETAWPRLTVEQQAIVTTHLELIDGLTPLVQALERRIATAAAGHATAPLLATIPGIGPYRSLLLAAELSPITRFPRAEHLVSYAGLAPVTRSSGGHTHHGSIPQGANRWVRGALVSAIPTHVRWAPTSPVTMAYAQLKARLGWRVARVAAARKLARVVYVMLTRRTPWRGAPAAGDVRDEVQNSHVARTTSFC

SEQ ID NO: 120948 - protein, 320 aa, unidentified
MQTPSAVLNIGADVAKDTIVVACSEGSFPARQIANQRTAVLAFLKGLPAGSRIGVESTGTYHELFAETAHQFGFRVFLLNPKDTRHYAKAVGLRGKTDRVDAELIARMIAHEHTQLHVWNPPTPQQREIDRLIKRRATLISLREAVEMSLHDLGGFADELKALRTHFNQLIARIDLRTKALVEASPDRKQNFTRVCTITGVGPVIGTALVNTLERVPVKSADAFVAFTGLDPRPDDSGQHRGKRRLSKRGPGELRRLLFLAAMSAAKTKTWCPLYEHYRAKGLSGTAALVVLARRIARTAWSIYTHKTEFDPARLMKPLT

SEQ ID NO: 120949 - protein, 357 aa, unidentified
MMKTGTMRQSIGIDCAKDEFVAAYCCSNDVRGSECKETRAFKNSKQGIARFMTWQGKLRAEGLALPMVMEATGVYHEQLACALFDGGHQVHVVLPNMAKAFSRSINLRSVDDGSSARTLALMGMERKLDAWEKPRELYSRMKHLTREREDIQQTLASSKNQLHAEETSAFTNPGTVKRLKGRIRFLTKQIREIETDLRSLINAEKDVKERIERVCTAPGIGWLTMAVLLAETNGFHHVRNQRQLTKYAGLDVEKQDSGTSVHKPGRLSKKGNRHIRKALHMPALSRIRSEAKSKEFFKRLVSKHGVKMKAVAAVQRKTLVLAYTLWKNNATYDQQYQSSTGAKERGQPLEAALNELA

SEQ ID NO: 120950 - protein, 427 aa, unidentified
MEEPQEVQADEEHERVWERVAAVDIAKASGVVCTRLPDEDRPGKRKTHLWTVQATAGAVIELGDYLRARQVQVVTLESTSDYWRIWFVLLEAAGLRVQLVNARAVKNAPGRAKTDKKDAVWLAKLTEKGMLQPSFVPPYAIRRLRELTRLRAELVHDKSRYWARLEKLLERALIKISAVLSTLDTDTARAMIEALIAGGRNPRVLADLAIGKARAKRAELTLALEGRWEDHHSIQARILLDNIDALNRQIEQLTGTIGELISQIPAAWGIDADGTTGPHAGTSPDSPVLPAIAQLDAITGCGIIAAQAIIAEIGLDMTVFGTPGRLVSWAKRCPQTRQSGKKTSGGKAGKGNPWLNGILGEIAASASRTDTFLGERYRRIARRRGKRKAMVAVARSILVIIFCLLSDRSARFRDLGPDFYDTQINLS

SEQ ID NO: 120951 - protein, 309 aa, unidentified
MSSFVGIDVSKATLAVAVRPAGSPLSFTNDAQGHRDLLQSLKGLSVSRIVLEATGGYERALLVALLDAGLPAVRVSPHRARAFATAMGRLAKSDPIDAAVLAHLAEVLDVGSTPVVSPKQQALRDLVQRREQLIQWRDDERRRVQQAASPFVRHSLQRSLVATQREITRCDREITAALAAVDLESSQRLLAVPGIGPVTTASLLAYVPELGTLDRRQVAALVGLAPYNSDSGAHTGKRRIHGGRPRIRRVLYMAAWSAIRSQPDFKARYQDLRQRGKCAKVALVACMRVLLIRINAMLRDKTEWKMAKI

SEQ ID NO: 120952 - protein, 358 aa, unidentified
MAVTGGTRRIVGGVDTHKDLHVAAVVDEQDRVIGTRSFATTRQGYRQMLAWMRSFGELQRIGIESTGSYGAGLLRFMQQAKVAVLEVTTPDKQDRRRRGKNDDLDAQNAAHAAFAGQRTVTPRSRDGMIESLRILVACRKTAVSARRVALQMIHNTIVCAPDGLRDQLRSLTRMQLVRTLASWRPDLTAYRDLDSAYRIGLKSLARRYLELHDEIADLDVMIAAIVDELAANLVARNSIGHIGAAQLLLTAGDNPERLRSEASFASLCGVSPIPASSGKIVRHRLNRGGDRAANSALHIIAIGRLRTDQRTKDYVARRIAEGHSKLDAIRALKRYLAREVFTLITQRRKEINATRIAA

SEQ ID NO: 120953 - protein, 413 aa, unidentified
MRVIGLDVSRSVAEIAYLENGLLRAGGRVGLRRDELERFAAKLKPDDHAILEATGNTIAIANVLTGHVGRVIVANPLQVRLIAEARVKTDKIDDAILAQLYASGFLPEVWIPDEATQPMRRQVSRRAQIVRQRTRLKNEIHAVLAAHLIERCPATDLFGKKGRTWLSLQPLPMDERIGVDQRLHELDRLAENLQQVERILAQSAIQDDRLRKLLTITGINTTVAIGLISAIGDIARFRSPEKLVSYFGLNPSVYQSGLQPAKHGRISKRGRSYARAMLVEAAWAAAQSAGPVRAFFLRVRDRRGQQIAAVATARKLAIIVWHVLTRNESFAWDRPALTARKTRKLELQAGVPPARRGSRKGSAAAYNLKSVRDLERAAGEQAEQAYQRLFSRWKQARPQATAVRAPWPPIRTP

SEQ ID NO: 120954 - protein, 457 aa, unidentified
MSKKEKSPSAYVKKTRYNTGLPVYNPYAAGIDIGDSIHDIAISDGEGGHIVREYGTFTCDLESIVSWLLEHKINTVAIESTGVYWISLYLMLEEVGIKPYLVNARYAKNVSGRKKDDTDAIWLQKLHSCGLLQNSFQPDSEYRILRDYVRQRKKNLRLGADNVRRMQKALELMNIKIHIVISDILGKTGMLIIEAILSGERDPYELLKFKDNRIQASNEDIIKSLDGIWKEEYIFTLKQAYDGYMFYQNQAKECEIKIEEQLIKQIAIIKDGDITEIVQIQKKSKNIKPKKNSYSFDVRSLLHIIVGVDLCRIDAISEITAIEVISEIGVDMSKWPNYSYFAAWLNLVPNTKITGGKIISSKMRKRKNTAGVSLRMAASNLSKRKSPLGDYSRRLKSRIGKKGAVVASAHKLSKIIYTMIKNQKEFSEQIIYKDQIASNKNRIKALERRLAQLKSVA

SEQ ID NO: 120955 - protein, 356 aa, unidentified
MNATTVAVDLAKSVFELALADGQWKVLERARLTRGQLERWFDNRKVDLVVMEACGSAHHWGRWLEARGIMVKLLPAQYVRAYVKRNKTDRADAAALLEAARAADIKPVPVKSIEQQALQGLHRLRSGWMGTRTRRINTLRGFCREFGLEVRVGAVQGLAAIARLIADDRSAIPALLRTPMRLALEEIRLMEARIEQLERELAQLARQSPACEALTSVPGIGLLTSTAMVAAVRDPRSFDSGRRYASFFGLTPREYSSGQHRYLGRISKRGDRYIRMLLTHGARSVLRAATVARRQGRKLDRLRTWALAVQDRTNHNKATCALANKLARIAWAVWVKHEKFQSVAAHPTVVPDEVAA

SEQ ID NO: 120956 - protein, 355 aa, unidentified
MTKDITLTPETTIGIDLGDRYSHSCVLDSIGEVRERFRFETTHSGLAQAFKERPPCRVVLEVGTHSPWLSRDLKALGHEVIVANAREVQSISKSDRKNDAADAEQLARLGRADPKLLHPIEHRREDTQRDRALLAVRDKLVRTRASLVVQARGLAKGLGERLPKGTTQTMPKRVREAGFEDLFPGLSSLLEVIETLGEKIRGLDRQIEQLSKQRYPETALLRQVGGVGPITSLAYVLTIEDPKRFSRSRSVGVYLGMRPRQRDSGERTPQLSISKAGDRYLRSLLVEGAQYILSIGPDCDLRRYGQRIMERGGRAPYQRAIVAVARKLAVLLHSLWRTAEVYEPLRQANLTQAAA

SEQ ID NO: 120957 - protein, 390 aa, unidentified
MIYVGIDVAKDKHDCCILGSDGEVLFSPFTIQNSLQGFDELYDKICSLSSDSSEIKVGLEATGHYHMNLLRSLLDNGLASYVINPLHTNLFRKGQSLRKTKTDKVDASSIAMMLLTDKTLKPYSDSSYHNEELKSLTRYRFNKVSERSRLKVSISRLVSILFPELEKLVPTLHISSVYALLSEYPGASYIASANLTHLKHLLSKSSKGHYGRDMAIAIRDAATSSIGTIIPAKSMELKHTIRLAEVLTEEIDEIEATINSVMKTLESPITSIPGINTRMGAMILAEIGDFSRFENADQILAYAGLSPSTYQSGQLTASYSHMEKRGSRYLRYALFNATRFVCLWDPTFRAYLAKKRAEGKHYNVAISHACKKLVRTIYRMQLTGEPYHKA

SEQ ID NO: 120958 - protein, 404 aa, unidentified
MRLFVAIDVSSEKLDVCFLDSHDTVLKEICLSSDVNGANAIKEDVLHFHQLYNYEKIVIGMESTSVYSFHPSMFLTEDKDLRALDVEVVVQNPKAIHRYKKLFEEDKTDKIDDFRIADFLRIGRYNKFLIKEEKYVALQRLTRSRYQLVHQQTECKQHFLENLYYKCNTLSKELNTSVFGATMMEILSDSLSLDEIAEMDLEALATLLQKKGKGRFSDPEDLAKTIKKAIRDSYRLGKVVQDSVDVILATYARLIQTLKKQIKEIEKSITAFFEAIPEARYLTSVPGIGVVYAAGIIAEVGQIERFENEAQLAKYTGLYWKKSQSGNFESERTPMTRTGNQYLRYYMVEAANSVQLREATYRAYYLKKYDEVPKYKHKRALVLTARKLVRLVDVLLRNHQLYMP

SEQ ID NO: 120959 - protein, 304 aa, unidentified
MDAIVVGIDVSKDRLDVAMRPTGEVFAVARDAEGIDALIARLAPLAPAAVAVEATGGYETVVAASLAAAGLAAVVVNPAQVRAFAQALGRRAKTDPIDAGVIAHFVEATKPAIRPLPDEKTRLLADLVARRRQIVAMLVAERQRQKRLTEKRLQKSIVRLIAALQKELSMLETDLDQAVRGSPAWREKEDLLASVPGVGKIIARTLLAELPELGSLDRLAPWTRQSGQWKGKSFIGGGRADVRASLFLGAMVAARHNPQLKTFRDRLVQAGKPKLVALVATARKLLTILNAILRDRKPWRIQTA

SEQ ID NO: 120960 - protein, 368 aa, unidentified
MPQRSTKRQAVKTVAKGKGSVSPIHVGLDVHKLSVHVALWQNSRITRTWVQPRDSDRLIAALQRLAAPIALVVYEAGPTGYALGYDLKAAGLPVRVVAPNKTPRVSFSDPKSDRLDCRHLAEYAALGMLTYVAIPTPDQLALRQIVRLREQLVNKVRRTKQQLRSLLLFHNVPEPQNLSNWSRRALDELRAIQLPDHLDFTRHSLLSQLDYLDGELSHVEKHLQALASSKALAGRVALLRTHPGVGPILALSFLAEFYQPERFACERQVARYLGLAPGGRETGQTRRGGRLLKSGLTRLRSLLVEASWAWVSKDQHARAVYGRLVHNTASGKKAIVGVARRLAIHLWTMLTREEPYMSPQTLTQRPLP

SEQ ID NO: 120961 - protein, 338 aa, unidentified
MKKVARIGIDIAKTVFQLHAVDHHGKPVFRKTLSRSEMLTFFAHLEPCLVGIEACAGSHYWARELIKLGHDARLMAAQFVSPYRKSGKNDANDAEAICEAVGRPNMRFVPVKSEEAQAVLAVHRARALTVSERTALINQVRGLLGEFGIITGTGAAQARRLLADIGAGGRQLPILARETIGELHDRLRALDERILAYDRKIAALARQSEPASRLMALEGIGPITATALVASVGNARAFKSGRQFAAWLGLTPRQNSSGGKTKLGAISKRGDVVLRTLLIHGTRSALQRMTDKTDRKSRWARALKERTCNNVAAVALAAKNARIIWAMLARGTEYRVAA

SEQ ID NO: 120962 - protein, 428 aa, unidentified
MNESEDIRLREFRQLQRDIRGSRGYLVVGIDVAKERHHAFFGTATGKTLWRRLVFDNTREGFERLLIQAEALKVQHGLSQVVFGLEPTANYHKPLGEYLIKGGHQVVLVSGNAVKRNRELLDGRWDKHDTKDAANVADLVSQGKCLFYEYPSVSLRDLRSLLSLKQRLKRLEHGYRVRIRNHLLAQYFPEMDGYYGQSLSEGLAIVRWCLAPSAIAGMEFDHFVQLVTARHGGIRQQRRLRMIWEQAAGSIGCEGGEMVGFEARLMVEGLRQIQEAIQVTEAKIKDICSQFPEYPYLLTIPGFGPAISSTVLGALGNPFRFERVSQVIKMAGFDLGADRSGKGSDAAVPVISKKGKADLRYALYQAALIASINNRAFIVYYTNKLRNRQGERGIKTKMRVKLAAKLLVIAWTLMKKKEAFNPAYLNKD

SEQ ID NO: 120963 - protein, 331 aa, unidentified
MGFEPEPSKEGSWMMAQNDLVVVGIDVAKDKVDACIRSLSLRQTSPGTVQGQRKLIAWLCKHRVSKAVMEASGGYERGWAKALRGAGIEVRIVDPKRVRSFAKSAGRLAKNDAIDAEMIAWFAETFCEAPGQTYDAAREELQKLVNARQGLLEIQTKIQNRDEHVAPAPVQKMHARLLKRVTTELARLEAAIAATIKATPHFAERAEIIESVPGLAGTTAANLIVGMPELGQVSNKIAPALLGAAPYDDDSGRRRGERHIKGGRRKVRNAFFMPCLGAATQHNAVLKSFYQRLLAKGKEKKVALIACMRKLIVILNTMLARGEKWDATRYA

SEQ ID NO: 120964 - protein, 367 aa, unidentified
MKKNITAQHSPRGGKRISQPITIGMDLGDKTSRYCELEGDAMRESSLATTKKAMLQKFGSMRRCRIAIEVGAHSRWVNRLLSELGHEVYVANARQVKLISQSSRKDDRLDAKTLARLARVDHQLLGPIRHRSEEAQQDLNVIRVRARLLDMRTSAVNAVRGMAKASGERLPKCDADQMGVERSEHLPAQLRETLKPLLEVVEALTEKIQQCDEKIEQIARDKYPETKLLKQVSGVGTLIALTFVLTLEDKQRFQKSRDVGCYVGLRPKRSGSGARQPQLGISKEGDMYLRKLLVQGAHGILRHRGPDTDLKRWGLKLGERGGKNAKKRAIVAVARKLGILLHRLWVTAEVYEPLRHSLARQRLRPAA

SEQ ID NO: 120965 - protein, 319 aa, unidentified
MRRIVLGIDVSKKTLDAALIFDNRTFCKQFRNSSEGFELLAAWLAFLQITQVHACLEATGSYGEAVALFLHERGHLVSVVNPLRIKGYAQSNMQRNKTDRLDARLIASFCLTQEPDEWLPPSAEVKQLQAFMRRIEVLEEMRQAEENRLANAESLVQPSIGRMIHLLKEEIIQLEKQIKEHIDRHPNLKEQSRLLETIPGIGARTAHLLLSEIEFERYSSARSIAAQAGVTPRKRQSGTSLKQTNLSKLGNARLRKALYFPAIVARQHNEIVKEFAERLKKKGKAPMQIVCAAMRKLLHIAFGVLKHKRAFDSSLAFSA

SEQ ID NO: 120966 - protein, 366 aa, unidentified
MAIPNSLSAASALVAIDIASRRHHVLIQPVGKKRYRLSITNDKTDHDRLAQHLRELGSDVIVAFEATGNYHRAIAWRMCEEGFDVRLISSVALARTREALQNGWDKNDPRDAQVILHMLSNGLTQRYYDPLVEGINDWQELSKTHEAVSSMKTETLHRLKTHYYPLYFPEVDRFRHNSRSEWFFRWLHAFPTPGSITALSQQDFLEAAWPLLGRKVSKRALLSDIYETARSSVALPVDVDSAAVQMYRLVIQQMCELIRHRDAIERQAQELLGNHPDYQRLRQLPGVGPIHALTILAEAGDLRRFAHYRQFLKFCGFDLATHQSGRFRGQSKLSKYGNARLRRTFWLAGQVAVRQRENDFRDKFVR

SEQ ID NO: 120967 - protein, 403 aa, unidentified
MFVGIDWASRAHELCVVDEEGAVLCRFGFAHSERGISEALERLAKLAAAVELPVAIERPDGLLVGRLLEAGHPVVAIHPNAFHAARPRWEGVGAKSDAGDAYRLADLLRTDHHRLRALRPLDAATRELQALVRLRDDHLAARIAATNQLQALLGQHWPGAAAIFARLDSEIALSFLERYPTPESAVRLGEARLSGFLRRHAYSGRRSPSELLERLRAAPQPVQALDSGVAVELVRAQVRLVRTLLRTIDGLERAIATALERHAKAQLLRPLPRIGTVSLGQIAAEVGPIVERTASADEAAALCGAVPVTKRSGQQRGVCFRHATNAKARTALTRYADNSRHASPWAERIYREARARGCRHPHAVRILARAWLRVIWACWHTDTPYDPSRRRGRDRRLEPVTLT

SEQ ID NO: 120968 - protein, 401 aa, unidentified
MAPTAGIDWASEAHEVCISEEGRVAERFSVVHDEEGIADLARRLLKLGIARVAIERPDGILVERLLDAGLVVLAIHPNQVKAARPRFAVAHGKSDRFDAYVLAELARTDAHRFRALVPDGDETKALKALTRAREDLVGVRVELANQLRAQLQAFWPGALIFADVDSPISLAFLKRCPSPDDAKGLGPKRLAGFLARHRYCGRRSPEELLERMRSAPAGRTGELEAEARRAVVLSLVAALEPIVAEISEFTSQIRGALAAHPDRGIFAPLFRDAKTAISPATLIAELGDCRERYPTEAAMAADAGMSPVALESGKLKVATFRRACDKRLRAAVARLADSTRHWHPWAREVYRRARARGQDHPHAIRTLGRAWIRVLWRCWRDRVPYDPARHGNFGRLNTAGG

SEQ ID NO: 120969 - protein, 310 aa, unidentified
MIITSGFIGIDVSKHYLDVFEGGSSRTERLDNNEESLAPMVARWKNSDIFVLFEATGQYDLGLRRVLTAANIAFARVNPARARDFARATGVLAKTDVIDARMLAAMAQALAPARAAESDREREALALAHKRRDQLVHMRQQERTRRSECSDAAVLGDIESHLEWLDAHIAQRDEEIRHLLAQSERLDRTARLLRSIPGIGPVAAATLIALMPELGSLKPKKIAALAGLAPFNVDSGQFRGIRRIKGGRKRVRDALYMAAVAAARSHGRFRTNYERLRAAGKPAKLALIAIARKLLVTANAVLRDKIAFQR

SEQ ID NO: 120970 - protein, 351 aa, unidentified
METRVTALPKLFIGIDIHKRSWKIHCSTDLFGGKSFTMPPEPDKLYVYVQKHFSDHQVTTAYEAGCCGYSAHRSFESYGWKSLVVNPADIHRKGKERYTKTDRIDAQLISRELKDGRLDGITVPDIEREELRSLFRRRNELVKDFRRVKSRIKMHLLYFGIKVPAEFDNDHWSHAFRHWVDSQEFNYPTAQETMASKMRTFRFIDKELRDVSSQLRAYCRKHFKKDYYLLRSVPGIGGIVAVGILSELGDIRRFNTLKHLAGYIGLAPGIYQSGTTCKTLGMNPRCHRLIRSYFVEASWQAIRTDPVIQAYYRKHVGKDVKKIIVKVAHKLLSRTLAVIKTEIPYEVGVIA

SEQ ID NO: 120971 - protein, 458 aa, unidentified
MGVPKPRVLLGERRIIGAFEQVNPNAAGIDAGHPSHWVSVPEDRDPNPVKEFKTFTGDLFAMADWLVSCRIETVAIEATGVYWVPLVEVLEARGIRVRLVDSRSIGRRNKKTDVLDCQWIRQLHTFGLLEGAFRPDAEMLPLRAYQRQRKMLIEYAADHIRHMQKALDQMNLKLHLVLSDIMGKTGTQIIESILKGERDPLVLATFRDPKCQKSEATIAKALVGNYREEHVFALRQAYTLVQHYQTKIMECDEMTEKALKEFDRQAAPGKIPTTKKKNTGKRRKNQPHFDGQALLAQTVGVDLVAIHGFNLSTALTIVSEIGTDVDDFDNEGKFKSWLRLSVNDRITGGKKIRGRKRKVHPNRATQALRLAAQSLAKAQNWLGAFFRRIRARGGWAVAVKATAAKLAGIVYSMLKNKTEYMPPDVNYYEQRYRSNLVKSLEKKAQTLGFTLVPTEVVH

SEQ ID NO: 120972 - protein, 347 aa, unidentified
MRFYTNQHKYYCGIDLHTRKMYICILDEKGEIREHRNLKTDRDAFLKAIAPFREDIVVAVECIFTWYWVADLCHKEGIPFVLGHALYMKAIHGGKAKNDKIDSQKIAILLRGGMMPMAYAYPAKMRATRDLMRRRNHLMRKRSELYAHIQNTNSQYNLPDSFGPISRHQNREGIAGQFEQPAVQKSIAVDMEMIRTYDGILLQLEKSIIKLANNHDPVSYALLQTIPGVGKIIALIILYEIENIRRFASVQDFASYSRLVKCAKESNGKKCGSSGSKIGNVHLKWAFSEAAVFFLNGNDPAKKYLDRLTKKHGKSKALSILAHKLGRAVYFMLKNKEAFDQKKFLTI

SEQ ID NO: 120973 - protein, 400 aa, unidentified
MSHRYTLFCGIDIGKRKHVGCLLDAQGKPLIKTLAFNNDAEGFARLRQRLQEVAANTPILVGMEATGHYWYALHDQLHRWGYAQQVLNPLQSAQQIKNAIRKCKSDSSDALHIATLVKNGEGKPALVPDDLAMTCRQLTRLWYALGKQRTRIKQLIHAKLECVWPEFETYLSNPFGTTGRTLLRAAPTPEDLLAMNHETLVELLLKASRQRLGPGTAEHIRTSAQTSVGMRRGLEGIRVGIHTLLDQLEATMPIRKKLESQIKELSARLPGYLLTLPGSNPIRAVSLFGETDPISTFKSPEQLVAFAGLDVTVYQTGQFEASRRHISKRGSPYLRHTLWTMASVAVKKKGMLRRHYLKRRKRGLHHLAAVTAASLKLTRIVWRICTDQRDSQPKAPAKHS

SEQ ID NO: 120974 - protein, 394 aa, unidentified
MKLIGIDIEKNKHFFCVMDQQTGEIISQPVSFSNDKEGFDFLVQKIKSYPKDSILIGMEDTGHYHFALLKYLLDLQYTVALINPKTTDFNRKMQGGITKNDKLDTINICDVLDTPERKKQYRITKVNSFDLYEQKQLTRHHHNLKEEENVYKNRLQKCIDIVFPEFNKLFNSKYGTVYMNILKTFGSAENIANTDIRAIRKCFEIEGRGNRISLTPERLKECARSSIGISSSAEVIQIKHLTAQIELIEEQLTEIDKKIEEFSIQNNSPILSIPGISHFSSTSILAKLGDISNYSKPSQIIRFAGVAPLHYESSQFNAQHTAITKKGSKYLRKTLYQIILPVIRHNPVFNKYYQLKISQVKGHLCAQGHCVRKLLRIIHHLLKTNQQFDPQLLR

SEQ ID NO: 120975 - protein, 391 aa, unidentified
MSMYFVGIDISKYKHDCCIISAADQQIISKFTITNDKHGFEHLLTTLHSLSSPKDIKIGFESTAHYALNLELFLENAHHSFMEINPFLIKEYKKSTTLRRTKTDSVDCESIARWLMTVEYKPHSKGFYHAYSLKSLTRLRDRLVRQRSFYLVKITNVLDHTFPEFKPFFNERLSKTAIYLLENYGSAEKMARMNSASYDKLRCVSRGKFSIQQFLRLKELAASTVGVNNSIFDIELNSLLTLYSSLCKEIKTLETEITRLIDEVHPHYMSIPGIGPISAASIYAEYGDISNFSNPGQMLAFAGIEPGINDSGTESHGGRMVKHGSSQLRYVLLNACLPLIRSDITFASYYAKKRAEGKKHRVAITHVAKKLIRVIYALEKQDIDFNTQKLR

SEQ ID NO: 120976 - protein, 412 aa, unidentified
MEILYACCCGIDVHARMLVACLIKNGKKEVRTFSTMTDDLLQLLDWLVAAGCTHVAIESTGVYWRPVFNILEGSVDVMLVNARDAKGFKARKTDVIDAEWLADLLRHGLLKPSFIPPLHIRELRELTRYRESLVREQTALANRIQKLIESGNIKLGQVVSDALGVSGKQMLRALAEGETDVERISEMARRRMKRKVPELKRALAGRLTEAQRWVLTELLDQYEVVEAAIKRVEHKIGEEVERAPDPFVSEAVKLLDTIPGVGERVAETIVAEIGVEMERFPTDGHLASWAGMCPGNNESAGKRTTGKTRKGNRYLRAALVQAAWAASHQKGTYLAAQYQRLVKRMGKKKALVAVGHSILVIVYHVLANKVSYEEMGGDYFDRRHADKQRQRLVHQLEALGLKVTIEELTQAA

SEQ ID NO: 120977 - protein, 375 aa, unidentified
MTGVDSRHRPRRDRKPAVASESKPRMSLELRSLVPYPNSCLGTSPHQQERDTKMATVSFCGIDVAKDRLDVVVLPEQRCWSVCNDAAGWAELAKQLGSFSIAAIGLEASGGYERGVMRVLLAADMPVHQINPFKLRQFAKASGVLAKSDRLDARVIASFIAIMPPRRAQRPSPAIERLTEILSVRRQLTDQKIAAQNASAMLQDAMLLRLSCRRIGRLAADIEMLDRSLVEIVRTDAALAHRYRLLTSMPGVGPALACTLIALLPELGSMSRKQVAALVGVAPYTFESGKLKGKRCIWGGRAPVRHVLYLAAMSASNWNPVLKAFHSRLKIAGKLHKVAIVAVMRKMITMLNAMVRDDVAWAGHLGGRQILPTAR

SEQ ID NO: 120978 - protein, 311 aa, unidentified
MDTQAVSYIAIDVSKKTLEVLSEDWSKSRSVANSEAALEGLLKKHAGFSQSHFICEATGGYERALVGLLHSRGIAVSVVSPAKVRYFAQSEGVKAKTDPIDAKMLLRFAREKRPRATPAPSPQRKALAALMDRREHLSEQLKREKTRLQKCDGLVAQSVGRMIDIVEREIETVDGQIRRLVAGFASFAKVYETLVSVVGIGPVTAWTLLAYLPELGRLSRNQVVALAGLAPYNRDSGDSKKIRKIFGGRAKVRRCLYLAAVAAYRHNDVIRAYTQHFLDAGRPFKWAVVAAMRKLLIHTHYLVKKLDVALA

SEQ ID NO: 120979 - protein, 492 aa, unidentified
MPQLNKNATIKWPTESKGVGRSKSRRVSKSRRSSADPTEGLQVGNPNAAAIDIGCSEHWVAVPAGRTERPTQRFGCCTAELNRLADWLKECGVDTVVMEATGNYWVVLYDILEERKLNPVVVNPRYAKNMSGKKGDICDCEWMQKLHTYGLFSNSFRPTQEIRVLRAYLRQRETLVGAAAQEIQHMQKALTEMNLQLANVISDIRGETGLRIIDAVLGGERAAGVLAKLKGPRIMASLVTLERSLEGHWKEEELFRLEQARLSYAHFQEQLQQCQQRIEQQMQTIQGRVPLEGQGRAPRTMPTADKAAEPVPGQGDGRKSKSFDLGVELKRVLGVDLTQIDGVGPVAAQVILSEVGTDMSRWRTEKHFASWLGLCPDHRISGGKILGRATRPVVSRARNALRLCAYTLTHSKSWLGAKYRRLKHKLGAPKAIVAMAHHLARLIYRMIKNGQDYVDKGMEVYEANYRENRIKWLKKQAKELNLELHEMQALAS

SEQ ID NO: 120980 - protein, 349 aa, unidentified
MILVGCDLHTRKQQVALLNTDTGELWDQELSHDGDAVERFYATLPPPVTVGIESTGYSLWFHALLQRLGHTLLVGEAAKIRAMVVRKIKTDRRDARHLRDLLKDDRFPVVWIPDPATRDLRALIKHRLRLVRIRTMVKNGLHAIALNQRLALGPSLWSRAGLAQLHALVLPPHTRRRRDDSLELLQWLNGHIHELDLHVATAAAADPDARRLMTHPGVGPLTALATVLVLGPVGRFPNSKHVVSYIGLAPAVSASADKYRLGRISKQGSALLRWVLGQAAPLATRGDAALKRIYFAVLRRRGRPKAKVALARRLLIRLYVMLRDQINYDEFCRRGRTQRPGLEPARIPV

SEQ ID NO: 120981 - protein, 390 aa, unidentified
MLILGIDIASKKHDCCIIGENGNVLVPAFTFENNAEGYGVLLKNIRKHERDFSQVRVGLESTGHYGNNLVSFLKAQGFEITVFNPLQVDLYRKAGTLRKTKTDKADAKFIAQMLLVTENSTRADTKPEIVELKALVRHRSRIKAMRTKLKVSVSRLVSVLFPELSGAVSTIHQASSYALLSELPTAKSIAECHLTRLTNILSESSKRRYGKDKALEIKSLADKSIGTVSHAVGFELQQTIRLISSISDELAMLDKEIKLLMLKINSPILTIPGISYNLGSVILSEIGNIENFANPSKLLAFAGLEPSTHQSGNYYATRTSMVKRGSPHLRWALLQAARLIAQNDPTFKAYAQKKESEGKHYYVVLNHVGKKLLRVIFHLLKNDHSFVTAA

SEQ ID NO: 120982 - protein, 368 aa, unidentified
MNSITYIGMDVHSTSYALCAFTMEGQKFFGQTSINPDIKELVKYLKTLNAQQGGKAEFVCGYEAGCLGYTLYHELTAKGYKCVILAPTTIPSAANEIKTDKRDARKIAKCLAYGTYSPVYVPTDQDNAVKEYIRMRDDVQTMLKQTKQQIHALCLRHGKMFDGKCRWTEKHMQWLRKVEFTNFIVRETLDEYLVTLGQLSDKVERLDKRIEEFSRMDNYAEKVRKLVCFKGIKTHTAMSLIVETSDFRRFPSAPQYAAFLGLVPGEHSSSDSCHRLSITKAGNTHLRRLLTEAANSYSLARTGRKSANLKQRQQGNAPEDIAYADKANDRLRRKYVRIATRSKANIAKTAVARELACFVWGMMNNQIF

SEQ ID NO: 120983 - protein, 341 aa, unidentified
MSIVGGLDIHRSQVTFDYLDTATGEVRCGQVRPADREHLRAWLARFAGQDGDFAMEGCTGWRYVAEEVAAAGLRPHVADPAELAALRGRRRHAKTDRADARFAREQLQAGRLPECWIPPPHILECRALLEAYHDLRAEHTAWLQRIQAVLFHQGAPHPGSLTAAGGQDRLAEAAAGLSAAGQAQVANALAMTAACEQRLETTRRQVAEAARHLAGARALQERIYGAGPATALALACWLGGAGRFSSARKAVRFAGLDVTVYSSAGKRAPGHLSRQGPAVLRWCAYEAGKTHAHTAAPDHAYYAAVKDRIDGKRASLSEARKIIRRAAHILAELGDDALAPC

SEQ ID NO: 120984 - protein, 418 aa, unidentified
MRVNEKIEKITENTIICGIDVGKTNCCARFCNFRGLEVYKKVWFDRTKDLDVIGAHITAACHLTGLNNVIVAFEPTGHYWLNINKYFKDNEIETVLMPTQTVKQEKGVHDGEMVKSDPVDAMLIARLASEGKYVKPIERDELYQDIYSGYSEYEDINKEINRTINKIHVWNDKYFPELEHVYKVNSVAIKAIYENQLLPNEIAEMSEEEFNKIMTENNSHAKKSAIKKIYELAKKTSGITPDAFTKKNIKRLYERYQELLKELEETKKELIELASQIDYVEEVVKIPGVSHISVIGIIAETGDLNHYEHAKQVLKMSGLSLKETSSGQKKGKRHISKRGRAKLRRNLKQTGISLVRNNSFFLQLHNYYTTQRENKLSKLISINAIIRKFVYILMALVKNKDSYNEEKAIRESCILSSC

SEQ ID NO: 120985 - protein, 405 aa, unidentified
MTDLDRHEAVEVFVGIDVGKGAHHAVALNRAGKRLLDSALPNDEAKLRALITRLKEHGSVLLVVDQPATVGALPVAVARDEGAMVAYLPGLAMRRIADLHAGEAKTDARDAYIIAEAARTLPHTLRSLKLADDDVAELTMLCGFDDDLAGQITQTSNRIRGLLTQIHPALERVIGPHLDHPAMLDLIERSPSPAQLASMSEKQIANRLTKLAPRVGKAWAAQIVQALSEQTVVVLGTQAATIVLPRLAQQLAALRRQREDVAREVEQRVLAHPLHPVLTSMPGVGIRTAARLLIDVATRAFASAAHLAAYAGLAPVTRRSGSSIRGEHPSRRGNKQLKRALFLSAFAALRDPVSRAYYTRKISQGKRHNQALIALARRRCDVLFAMLRDGTLYSPPQTENPLTTT

SEQ ID NO: 120986 - protein, 364 aa, unidentified
MIGNENYCNESSGTVAEVVLGVDTHLDVHLAVALDHLGRRLSSFSVPTTKNGYESLLAWAEGFGPVRCAGVEGTSSYGAGLARHLRAMGIAVEIERPKRRHLRRKGKSDPIDAEAAARAVLAGEATGVPKSADGRVEMIRTLRSARHSAVKARSQAANQLQGFVVTAPEELRHRLRELTTKKLVSVAARMRPGKDLDDVEAATKFALRSVARRYQALSEEISELDAQLDSLVAEAAPELISLQAIGTDHAATLLLTVGDNPERLGSEASFASLCGVSPVEASSGKVVRHRLNRGGNRDATRALHLICVVRMRIDERTRRYVARRTAEGKSRREIMRCLKRYIAREVYRVLVSAASPPPIGVSTT

SEQ ID NO: 120987 - protein, 324 aa, unidentified
MKQNSARRQSPKQALKQSPKQSPRQSKKSCQGPMAIGMDLGDRASRYCVLNDCGEVVKEAAVATTKKGMAQVFAALKRSRIAIEVGTHSPWVSRLLKSLGHEVFVANPRQLKLISQSSRKDDRVDAQTLARLVRVDPELLRPIQHRSEEMQLDLMVIRVRAALVEARTQLVNSARGLAKSVGERLPKCDAKCIGSGHLCSLPKPLQDTLEALLLQVEALTVRIEKCDRQVEQIARTKYPETELLRQVQGVGPLIALTFVLTVADKERFQKSRDVGCYLGLRPKRSQSGQSEPELRITKEGDVFCASCWCRARNTFWGARDRTRI

SEQ ID NO: 120988 - protein, 421 aa, unidentified
MGKLKIVYPICCGMDVHRDFLVACIASTNAQGVTDYEVKRFSTFSGGLRDLRDWLAERNCFDVCMESTGKYWFPVHNILEATCNVVVSHPKFVKAIKGKKTDKKDAMWIADLFKHDLVRGSFIPPENIRQLRDLCRYWQKLTWCLNGEKNRAQNCLTVSNFKLDSVFSNVFGKSSSAILEYMLEHPGESFDVAPFVHHRCKSPIEDIQAAVDGAFNPFQAEKLKIIREHMGNLDNLKMLLESLILTLAEPYWRQVKLLLTVPGISEPMTAIRIIAEIGTDMSVFDSSKHLCSWAGLTSQNNESAGKKKTTRIGKAGQYIKPLLVQCALAACNPRSKKHPEILNKYQQLKKRRGSKKARVAIARRLLTAIHQMLLKDEPYSPFVAPASESIPEKRILTLDEGLAMLRRKGFILEGDAAPAHT

SEQ ID NO: 120989 - protein, 357 aa, unidentified
MSNKATKLDFRGQVFHIGIDVHKRNWRVTVLNNGLELKTFSINPSPEGLSSYLQSNYPGGEYYTAYEAGFCGYWIHRKLESLGIKNLVVNPADIPVNFKETVRKTDTIDSRRLARALYSNLAHGNYIPSLEQQGFRSLCRLRKQLVKDQARVKNRIKSFLDFSGIKVLSQNEISHWSGLFLNYLSNLDLGNEHSNETLSRMLGQLMSLRNQIADLVKRLKTIVRQDEAILRVMNNLMTIPGVGFSCAIVLYSELMDINRFSSVDKLCSYVGLVPDLRSSGESEYTLGISKLQLQFLRAMLIECSWIAIRKDPALTAAFNTLSMRMKKQEAIIRIGKKLLTRIMYVWRNNEPYICSIV

SEQ ID NO: 120990 - protein, 353 aa, unidentified
MIWVGLDLHKRYITACALDEDGAVVAEHRRLPTDAEALIAWLQELGGPVTVAMEATLYWAWLHDRLSAAGIAAVAAHPYQVKLIWQARCKTDPIDARKLADLGRTNLLPVIWVATPTVRAQRTLLRGRAYLVQLRTSVKNRIHGLLLAENQWMDVSDLYGRAGRAWLQTVPLSPMARVQVDLLLDLVDGLDQRVARLDQRVQRAMKGDPVVQLLHTWPGIGIFGAALLRAEIGTIERFPSSHELAAYAGLIPSTQSSGGKTTHGGVGRAGSPWLKWILIEIVQSLKLAPGPIGRHYQKLLRAKGKPKATGAAARKLCCYLYWCLKEEWSYDQWLRQHEESREVRPRHALGSAA

SEQ ID NO: 120991 - protein, 396 aa, unidentified
MDVHRSFAQIAVVEGGLCRDEGRIGVKPEDLREWASTLAPDDEIALEATTNSDAIATMLRPLVARVVVSNPRKTRAIAEAKVKTDKVDARILAQLLAVDFLPETWVADDQTRMRRRLVARRTHLVKQSTRLKNQVHAILSRNLVPTCPHADLFSGVGRRWLAKQNLPADEWRSVEALLRQLDFHRDELADLERDIAVDAIDDPVVARLMTIPGVDVTVAVSVVAAVGDFSRFSSPDRLVSYLGLNPKVKQFGDSPAVHGPITKSGRAQARRMLVEAAFSAARAPGPLRAFYGRIKDRRGFQVATVATARKLTVLCWHLVLNGEDYAFARPSLNAHKRRKLELAAGAVSRRGPVAGPSRDYHLKQLRDQEKALVEHAERAYQVMVAHWQPQKRVAKA

SEQ ID NO: 120992 - protein, 362 aa, unidentified
MFYVGIDQHKRHLTICVRNEQGDVALRRQVATGWLEVDRFLESLQERSVPEGGYVAIMEVCGFNDWLLKRLARWGCTKAYVIAAPPRLRNKTDRRDSAKLSELLWINRERIATGSRLVEVREVYQPSPQEQKARQLTHLRQRLGREQTRTKNRIGSILRQHNLEQECPTKGLFTQQAWRWLTKVDLPPLDRIALNMEMERYLLCGKHLDRVTRLIHQQAGRLPAVQLLRTLPKIGDYTALALWAHIGPITRFPHARSLGNYFGLTAGCRNSGESDRPGSMTKAGHPTARFLLGQAVLHALRRDAGLRSWYRRVKRRRGVKVARVAVMRRLCEALWHMLRQQEPYRPVGSTKPAKKSRTPCAA

SEQ ID NO: 120993 - protein, 353 aa, unidentified
MQRPRQGQVIIGVDTHKEIHVAAAVDWQGTLVGEECFPTTRQGYRLLESWARSLGEVLRVGVECSGSYGSGLTRHLLKNGFAVLEVTFPDKTVRRKRGKDDFIDAEMAAEAAFTGARTVTPKSRDGMVEALRMLQKTRSTAVAARRVALQMIRADIISAPEELRDQLRGMTRMQLIRHLVATRPDSTDFRTPLGAAKIALKRLAKRYVDLDDEVSELDDMIDAILADAAPLLVQLKCVGAQSAVQLMVTVGDNPERLRSEASFTMLCGVAPVPVSSGMTYRHRLNRGGDRQANSAIHIIAIGRLRTDERTKEYVAKKMSEGHTKMEAIRCLKRYIAREVYYVIKRQSELVNCS

SEQ ID NO: 120994 - protein, 332 aa, unidentified
MSVYVGIDVHRKRSQVAVIDEVGEVLANRNVPNGVRPILSVIGELPAGTPAAFEAAFGWGWLLELLEGYGFEPHMVHPLQCKAIASARLKNDKVDAATLAQLLRADLLPEAWIAPPEVRQLRALLRHRAQLVRLRTLLRNRIHAVLADYGHGRPAGCWSGPGRAWLASLELPAVSREVIDDDLALIGALQLPIDRLDLEVRQRAKADPRVKVLTQLPGVGQFTALVLLAEIGDITRFSSARKLASWAGLTPTVRGSDRTVHHGHISKQGPAWVRWVTCEAAQTAKRHPDFAPGYEATARRRGKKIATTAVARKLITRAYHLLTDAASGGAPS

SEQ ID NO: 120995 - protein, 392 aa, unidentified
MIYVGIDVAKDKHDCFAMNSDGEILIEKLTITNNLDGFETLYNSLMNFSDSLDNIKVGLEATGHYSNNILNFLTEKGFNIYLINPLQTNLYVKCQSLRKTKTDKLDAHVIATMLVSDNLKPYIPVSYHISELKSLTRHRFRLVKENSKFKTSLVRLVDIVFPELPKIVSSVAQKSCLALLYELPSTKDIAECNLTHLTHLLSDNSNKKFDREKALQIRDLARKSIGLNSNSVSFELKQTINIIQFIQEQLDDVEKRIKEILKEINSPILTIPGISFKTAGSILAEIGDISRFDSPAKLLAFAGLDPSMYQSGKFFSTHSVMVKRGSKYLRFALMTAARMVCLNDATFCAFKDRKMAEGKHYMVTMGHVAKKLVRVIYYLLKTNNVYQASKVA

SEQ ID NO: 120996 - protein, 400 aa, unidentified
MSKIIHYIGLDVHKDSIAIAIAPGGSSEVRTYGKIGGTLDALDKASKKLQTPGVELRFVYEAGPCGYVIYRHLRRRGSSCAVVCPSLIPKKASDRVKTDRRDADQLARLYRAGELAAIYVPDQEDEAVRDLVRCRERAVFDQRRARQRLKGFLLRLGFRYTGKSSWTPAHLRYLADLKMPHPASQLAFTEYVEAITVATERLERLTQAVEAALPDWKWQKVVRALMSLRGVALIHAMTLVAEAGDLSRFDCPTQLMSFFGLCSSEHTSGDKRRQGGITKAGNGACRRALIEAAHQYRLSPCLSPILQKRQEGQSREVRATSWKAQQRLHQRHRALSARAKKPVVVVTALARELCGFVWAIACQLSAPQKVRNRQEPAKPPTSGRVYHLDSVKRFEPRTRK

SEQ ID NO: 120997 - protein, 377 aa, unidentified
MRLETRPMEVRIDKVVRASKEPHCQEPHSQARNTSGRSLIMSEPILGIDVAKASLDVCLRRDTRQQRRQFPNPPDGFDQLHQWLHTHQAPTVHACLEATSNYAWEVALFLHQHGHQVSVLNPLQVRRHADAQLLRNKTDKLDAIQIADFCAKHSPELWHPLPQQLQELRQLLQHRDRLVQQRTAVSNQLEAINAAPSIASPTVLEMLHAQNTFLQTQIALLDKQMTEHIDTHSDLRQQQQWLESIPGIGTITAARLVAMDLPRFDSARSVGAYAGLTPSQYESGTSVHRRPQLSKLGNATLRKALYFPAITAMRVNPVLTDFAQRLRDRGKPSKVIITAVMRKLLGIAFGVLKSGKPFDPDYAKAFAPNHTSEVVST

SEQ ID NO: 120998 - protein, 482 aa, unidentified
MKPKPLEKTKKATDHSTRGHWNEMNRQQRRDMMRKIQSDDLSLEVVHPDAAGIDIGNESHYVAVPPTRDSQPVRRFGCTTAELKAMAHWLRQCGIQTVAMQSTGVYWIAVYDILEAAGLDVYLVNARDTKNLPGRKSDVQESQWLMKLHTYGLLRNSFRPPQEIRTMRTYWRQRNDLVQSASRHIHRIQKALTQMNLQLANVLADVSGMTGQAIINAILAGERDPHKLAAFRDPRVQASQEEIARSLEGNWQEDLLFVLKQEQDGYEFCQKQMAECDRQLERYFQRREDRSQGASLPEEKRKTRLKKKNGNKPQFGLRADLFRMSGTDLTQIDSIDVMTATTILSEVGWDMTKWETEDHFVSWLRLCPDNRISGNKIIGKGRLPTNNRVSIALRMAASTLRVSNTYLGAQFRRFRAKLDARVAVKAMAAKLARLVYRMMRYGMKYVDQGAKFYETQHRNLQVKHLKWRAAKLGYQLVQAPST

SEQ ID NO: 120999 - protein, 453 aa, unidentified
MVVIYERCAGLDVHKRTITVCRVHTRPNGQKEEETVTFGTTTAELLRLGEWLQGWGCTHVAMESTGVYWKPVYNILEGQMEILLVNAHHVKQVPGRKTDVSDAGWLADLLRHGLVRGSFVPPRPQRELRDLTRQRSNLVREKVAVVNRLQKMLEDANIKLASVVTDVTGVSARAMLEEIAAGRADARELAKLARGRLRKKRAELEQALIGRVRDHHRFLLVTHLSHIDFLDEQIEQVNQRIALHIERHSPLPPGHSSKGASDGQTELTAGERGPLTYARAVELLDTIPGISRWLAELIVAEIGIDMTRFPSAGHLSSWGGVAPGNNQSAGKRRSGKTPPGNRVLRKGLVQAAQGAKRTKDTYLAAQYHRIAARRGKKRASVAVAHSILVIAYHVLSRQEPYRELGGNYFDERKRESVANRLLRRLEKLGYQVTLDTQPAAVSVAAWLTTSFSE

SEQ ID NO: 121000 - protein, 381 aa, unidentified
MLDQNPHNPVPTAYAAIELSKKSWVVAIMQPAKDQPSIYRIKGGAFSDLVMRLRTATRGGERLLVCYEAGYDGFWLARSLKMEKIDCRVLDPASLQVNRRARRVKTDRIDVLMLVRALIAVDRGDRHVCSIVRVPTVEEEDARRSHRERQRLIRERTAHINRIKALLFGQGIRGVEPRLRRSRIDFSDLRTGEGLPLPARLRAELEREYARLDLVETQLRVTEAERDTADAQDPCIEYKRKMLIQLRGVGPASAAILTREIFGRRFANRRQLGSYLGLTPSAYDSGSTTRCQGISKAGNSFARRVMIEVAWLWRKYQPNSALAKWYEERAAGQSPRIRRIMLVALARKLIVALWRYVEIGLVPAGAVCCANNGAALEAAAA

SEQ ID NO: 121001 - protein, 335 aa, unidentified
MHKADRTRRHRKERRVETTLGIDIAKAKFAVALMTADGKVRHKSCANSAAGFADLAAWLQRQRVTTVHACLEATGTYGDALATWLHDAGHLVSMVNPAIIHAYARTQLARTKTDRLDAELIARFTATQQPPAWTPPAPEIRQLQALVRRLDALQGMRTQELNRLEAGVAVAAVRASIDAVLANLDAQIAHVKQLIRDHLDRHPDLRVQRELLTTIPGIGETTAAVLIAELFDKSYTNARQAAAFAGLVPRLIESGTLRGRSRLSKIGPGRLRKALYLPAVAALRWNPTIRAVRARLRAAGKPPMVIIGAAMRKLIHLAYGVLKSGRAYEPTCAHP

SEQ ID NO: 121002 - protein, 341 aa, unidentified
MMIIGCDFHPRFQQIAYVDVETGEFCERRLSHPEEAERFYRSLAGTQVRIGLEATGNFSWFRRLINELCHEFLLGDPSAIRAASPRRQKTDKRDARHILRLLVEDRFPAVWQPPEENEELRQLLLHRCRLVRLRTRITNQLDSMAKNEGLLGSKSWSAERRRRIEALPLSGWYMRRRVDLLDLLDELEKRIEPLEKAVVEAAEKNQQACLLMTHPGVGPIVSLVYVLSIGDWKRFARSKELASYLGLIPAEESSADKRRLGHISKQGNTLLRWLLVQAAIGAQRSDPSWHRLYLRLSLNKHHGVAKVAIAHKLAVRLYWMLRSGQNYKQVMERGSHAGQPV

SEQ ID NO: 121003 - protein, 425 aa, unidentified
MNYKQNEKINQVKESTLVVGIDIGSTTQYARAFDWRGIELGKVFTFSNSREGFEAFKAWMQHLQDKYRKSDVIVGIEPTGHYWFDLGAYLEDEGILLVMVNPYAVKQTKELDDNSQSKNDRKDPKVIAKLVTEGRYSAPYTPDGVYADLRIMVANRKRLIREMTQIKNRFARWFAIYFPEYTDVFGDYEAQSSMLLLKKVCTPEAIVELGAEKINQIWRDAKLRAVGMKRATTLCETAKRSIGLKKGSSAARYEMKLLLEDYEYKKAQLDAVMEEIEKLCRKIPESEQMLAIKGIGMITVAGFLAEVGDVRRFESPRQIQKLAGLSLRENSSGKHKGETTISKRGRSKLRAVLFNAAIPLIAKNPEFKSLHEYYTTRANNPLKKKQSVIAISCKLIRVFYAILANGVTYDPQKLLSDIHRQPQVA

SEQ ID NO: 121004 - protein, 351 aa, unidentified
MMIIGVDYHPSFQQIAFFVEETGECGEQELNHSDGQTEKFYRDLKQRGICVRVGMEATGYSRWFERLLAELGFEVWMGDPAEIKTRRVKKQKTDRKDAQLLLRLMRENNFPQIWVPDPENRDLRQLLWHRHRLVQMRTRIMNQLQALAMNEGYRWKKKLFSEQGRALLEKLALAPWASRRRRELLELLDRMNPTIAELTAAAEQEARKRPEAVRLMTHPGVGPLTALAYVLIIGTPERFHCGKQIGTYVGMIPSEDSSAKKQRLGHISKQGNSLLRFLLVEAAQAAARSNPEWRRRYIHLAMRRHKSIAKVAMGRKLGVRLYWMWRNGCAYSRSLEFGSYVGQLGTGHGVK

SEQ ID NO: 121005 - protein, 416 aa, unidentified
MKIVRPICCGMDVHKNIIVATIGITNKKTRITEYIQETFSTLNPDLLNLKQWLINHKCFDACMESTGKYWIPIFNILEDEINIYLTHPKYVKAIKGKKTDKKDSKWICDLFKHDLIKFSFIPPKEIRALREISRYRYKLVGMRSSERNRYQNCMTVSNIGIGSVFSDPFGKSAQAIMKEVLESDIIEDEKILKCIHRSCKNKDKILDSIKHCNIETDQRFKMNESMTHMEELQVHINNCEIEIMKRAAPMFDQFMHITQLPGISTLSAILIISEIGVDMKQFESDKQLTCWAGLAPANNESANKKKSVRISKAGQYLKPLLVQCALGAIKDKEGYFGIKYSRIKKRRGHKKAIIAIARMMLVSIYHMILTGEMFNPSDYESFRNPKPPIKQQDLTEESAIEFLKKSGFDVSKLTKP

SEQ ID NO: 121006 - protein, 370 aa, unidentified
MNKKIAYVGLDVHKNSITMALFIEQRKDEEFTKKLSSNLNSLFKLIKKLSEEFHLRVCYEASGCGYSIYRKLIRHGIDCIVVAPSLIPTDHKKVKTDKIDARKLAIYLRSGLLTAINVPDEQQERDRDLIRFRIFQTNELVRIKQSICAFLLRKGIEYSESTPFTQSFMNFIGTLELPYDDRLMLNRLIGHYNYQNSLVNELTDDIEKLSQTDRYKKQCAILCGFRGIKTLTAMTLLTHISDFRAFPHPSKLMSYIGLTSKEYSSGEKEVKSGITKQGSSILRKALIMTAQPYNKAEMISRYMLMKRDGLPSAVIALVQKADRRCKLKYFRLIHKGKNSNIAKTAVARELVSFIWEAMIIYQQGELKEAS

SEQ ID NO: 121007 - protein, 432 aa, unidentified
MNDQNTTAATPPAPPDYAAFVGLDWGDEKHALSLCAAGSAVVEPATLEQTPEALADWATTLRTRFPNRKIAVAVEQARGALLAGLSQYEHIVPFPVNPKSLARFREALYPSRSKDDLVDADLLLELLVKHREHLRPWQPDTVQTRQLALLNEQRRHFVDYRTGLTDQLLSHLKAVFPQAPKLLGEDLASRLATDFLKKWPTLQAVQKVKPAVLRQFYYGHNSRSEELIALRLELAKNAVALTSDPALLAAHSLSIQTLAAQLEALRPFLQQYDQQIAELFGAHPDAPIFQSLPGAGPVLAPRLLTSLGTDRSRFSEPVALSSYSGIAPVTEKSGKTQHWVHVRWSCPKFLRQSWHEFANSSIKFSAWAALCYQEFRKKMDHHEAIRKLAYKWQRIVWRMWQNRQPYDEGRYLATLQKRGHKLFATPPVKSGE

SEQ ID NO: 121008 - protein, 322 aa, unidentified
MRYIGIDVSKATFVVAYSSDKGGEIRTFNNTTTGIKQFIGALPKDGSIHGVMEATGNYSALLLYMLNVAGITVSMENPLKVKNFAKAMLSTIKTDKSDARLITLYGEKMNPRPFKVQGEAILRLRQKRTVIRQLTKQITAMSNLRGSLACLPVPDKGATHTVDETIKFLEKKRDRLQSELTDLVEVEFSRQLALLTTIKGIGITLATALIITTGGFTYFQNAKQVSRYLGICPTYEQSGTSVNIRGHINRNGDAYTRGLLYVAAWTASRFNTKCGETYTRLRQNGKPGKLAMIAVANKLVRQAFAVVTHDKEYVDGFVSNRP

SEQ ID NO: 121009 - protein, 343 aa, unidentified
MQTVTTIGLDIAKSVFQVHGVDAGGQLVIRRKLKRRYILAFFQKLPPCLVGIEACASSHYWARELQALGHRVRLMPPIYVKPYVKRQKNDMADAEAICEAVTRANMRFVPIKTPEQQSGLVLHRTRHLLIRQQTAVINAIRAHLAELGIVAPVGRKGVEELLRVVADGNDKRVPDVVRACLGALGTQLLSLKKQILELDRMIMVWYRSNETSRRLHYIPGVGPLLATALVANVADPGAFRSGRNFSAWIGLVPKQHSSGGKDRLRSISKQGDRYLRSLFVAGALSVIRYAKAHGSNHRPWLTALLARRPAKVAAIALANKLARMAWAMMAKGERYRNPVALAA

SEQ ID NO: 121010 - protein, 405 aa, unidentified
MSGGRFAGVDWASEEHAVCVVDERGRIVEGRRFRHDEPGIRALCSRLLRLKVALVALERPDGLLIERLLDAGLAVIAVHPNQVKAMRPRYSVAAGKSDGFDSFVLAELARTDSHRFRVLVPDSDRTKALRALTRAREDLVRTRVALANQLRDELGCFWPGAAKVFFAVDSPIALAFLRRYPSPADARGLGEQRLAAFLTRQGYTGRKPARELLARLRNGAQGRAGELEMQARRQIVLGLLDALEPIVAAIRELTAQIRQAVDDHPDGATFRSLFIAPDSFLCAATMIAEIGDCRDRYPTYRQLAADGGQAPVAVESGKAKRAQFRWACDHRLREAFCVLADSSRRHNPWAADIYDRATARGASHQHAARILGRAWCQIIWRLWQDHDTYDPQQHTALQRLIAAAA

SEQ ID NO: 121011 - protein, 338 aa, unidentified
MTIVMGLDQHRAQNTAEWIDTSTGEVSRQRVAPAHRAGVRRFAERFGDIELEVALEATTGWRFVVEEFTAVGARVHLAEPAETAARRGTKKRAKSDRADARHLRELLMVGRLPESWIPPEHLLDLRARVRLRHTLVEQRREWQQRIQAVLYHHGVPPRSWLLGAEARAWLTGLELPPAAREQIAIALALIDAHDAQLVPLDQELREYAKRQPACRALMRHYGIGPLTSITILAELGDARRFSSSREAVRYAGLDITVHQSDARRAPGRLSRQGPAALRWALFEAAQCARRPGSPDHHYYLQTAERLGGNRACLAVARKLLKRSYHTLRELGEEALQPA

SEQ ID NO: 121012 - protein, 411 aa, unidentified
MNKQTKILIGIDWADDKHDFHLIDPSEKVQTGVFKQAPKVIAEQLKVWREQFPGATFLIAIEASKGALINALVEHDDIVIYPVNPAALAYHRKSFAHGGGKNDPLDAKRLAGFLQDRLSDLRPLKRDRPITRELGTLSEDRRRAVDTRADLANELTAVLKQYFPAVLGFNAAKPYAAFLLSFLIEYPTLQAAQEAGEAKLRSYFHGVGMKRKADKLAKLIIEAMPLTVDEVTLRSNRRRAVILAEQLKILNKHIRQYEASIKELLPKHPAYAIAKSLPGPSDNTQARLIAAMGDDPDRYSSAESLQCASGIAPITEQSGKRKFAVARWACTKFLRQTFHEMAGLSITKSRWAKAFYNQQIAKSKSANTAKRALAYKWQRIIYRCWQTGQPYNEDRYITRLKATGSPLCDLL

SEQ ID NO: 121013 - protein, 343 aa, unidentified
MQTITTIGLDIAKSVFQVHGVDAAGQVVIRRQLKRRHVLMFFQKLAPCLIGIEACASSHYWSRELNALGHTVRLMPPAYVKPYVKRQKNDAADAEAICEAVTRANMRFVPTKTPEQQSCLMLHRTRHLFIRQQTAVINVIRAHLAEFGIVAPVGRKGVEELLDVVADPSDKRVPEIARACLFALGAQLRRLKEQILEFDRQIMAWHRSNETSLRLDAIPGVGPMLATALVACVADPKAFRSGRNFSAWIGLVPKQHSSGGKDRLGSISKQGDRYLRSLFMAGALAVIRYAKIHGTKHRPWLTALLARRPTKVAAIALANKIARMAWAMMARGERYKEPVALAA

SEQ ID NO: 121014 - protein, 366 aa, unidentified
MWMEAPVKVQRTSIGLDVHARSVVACGLDGDTGEVFRRRLCPDHGEILDWVQGLPGPVAVTYEAGPTGFGLARVLIAAGIDCRVAAPSKLQRPPGDRVKTDARDAAHLARLLHLGQIVEVTVPSPAQEAARDLVRAREDCRGDLMTVRHRISKLLLRQGIVYYGGQAWTGKHELWLRSQRFDALGLQLAYDTAMDAMIAGVHRRDRLDKAIVAMAADSEFTPVVQRLGCLRGVSTLTAFGLAVEIGDWHRLTGRSIGAYLGLVPCEYSSGDTRVQGGVTKTGNGHARRLLVEAAWHHRAPYRPSRDLRARWTAAPAAAQARGHAANHRLHDRWTGFDARKKRSVVANAAIARELAGWCWSLAVLDD

SEQ ID NO: 121015 - protein, 336 aa, unidentified
MRYIGVDLHTTQITVCYLTEKEEISIKKYQLIEIEKFVSGLTKTDEIAVEATCNTRWFAEQVQEKVRRIVLVNPRQFEVVKNSCKKTDKNDALNLAKFLKADVLPEVRAKGEEAERVQSLVNTRTKLVRLKTSLINKIHALFVEHGRKLKKASLSSEKGLETVLCQEWSAIERIELEIIIEQIRSLKVSIKKLDKAIEAESEKLKGYQSLVSMSGIGSLSAGILLSVIGNIKDFATADKLASYFGIVPRVSNSNETVSHGRITKRGNRTGRTTLVQCSLSAIKKSEYLKNYYEQVKARRGHGKAKIALARKYLGIIYHTLSNNWVFADFNNFELAK

SEQ ID NO: 121016 - protein, 405 aa, unidentified
MNEHLLVGIDVGCHSHQVAIAKSNGTYLKEFGISHNASGFNSLFSEITYYESTLKCPVVIGMEGFNGYARPLDQLIQQKGYTLYNINNLKLARFKELFSGPAKTDAIDARKIVEFMRIAPSFQEQRRAITEIKPGNGVNQTLKRLTRRRRQLVNEKICIQNRMQADLQSVAPGLVDLVKNVDSRWYLHFLTCRPSLRQLATMRKESLLKIKGVGKKYAAVIASWQKEAHFSTDVDLVSSMIIEDAKRILELMEAIATIENELEPLGEQSDLAVTIGSIPGFGLISSAELAGEIDNLSRFPSEKSLALYLGMAPLDNSSGKKEGCKIAKSVNTRAKAAMMVAVAHHSWQVEESKRYYEKKRAEGKKHNQAIRSLGRHLVRVIWSLIKEKRFYEIREENERNILKMA

SEQ ID NO: 121017 - protein, 314 aa, unidentified
MNAQGLVVGIDVSKDWLDVALGSESLRVVNDADGINELVGRMRDAGAQLVVMEATGGYETQAATAIAGAGLRLAVVNPRQVRDFAKAMGRLAKNDRIDAHVIAAFGQAVDPQIVRLPDEETLELQGLIARRSQLVGMRVQESNRLTLMKGAMRKQIKAHIAWLDKAIGEVNTDLTARLRTSAAWREKDELYRSMKGVGPITSGTLMASLPELGTLDRRSIAALVGVAPFNRDSGAFRGRRTIWGGRAQVRHIVYMAATAAVRSNPVIKDFYERLIARGKPHKVAMVACMRKMLTILNAMARTNTPWTPAFQGAN

SEQ ID NO: 121018 - protein, 419 aa, unidentified
MSFKIIKNNCCGLDVHKTWIFACIGITDSNNRTEYKQARFSSFTKGLNELCDWLAKYNCNDVCMESTGKYWIPVFNILEQRSLWVTLSHPKYTKPMKGNKTDRKDAKWICDLYMCGMVKPSFIPPADIRQLRDLVRYRFKLTCMITGEKNRAQNCLTVSNLKLDDVFSDVFGKSSRSITEQILQHPGETFDVAPFVNSRCKTPIVEIQAAIDGAISKEQAVKLRQCLDHIDELNKHISEVEQEILRLSDKYEVALNLIRTVPGFDKNPLTAIQVLSEIGGDMSVFPTAKHLVSWAGCCPRNDQSNQKIKSTRISRAGSYFKPILVQVANALIKSKKHPEFTTRYKRIKARRGHKKAIIAICRMILTAIWHILSDLKPYTPEGFLESRPVKEEKVLSTSQALNLLKQRGYIIKDKPLAVF

SEQ ID NO: 121019 - protein, 482 aa, unidentified
MKKNNIYQNQSQQLLRLFEQAGNNAKVMCVPIDYAKKDHVVMFCNGYGDILRKPFSVKNSPQGVDYLTDQVIRSCRQRGISEKHVFFGGEQVGSFADNFVSTLRAQGWLVAGVNAHDAKTQRENLQASTDRLDLMGIAKSLLNRRANCSPAQSGIYLNMRMVVRHRRKLVGITTEVRNRIHTVVDRLFPGFLNESKSGITPFSKSSLWLMKERFSAPQIRRRRRSSLIEALRRQGSKKPEDTADRLQQYASQVLKPPQNHVHMLQLSLAQHVKHFCCLQESIGQLETEIALNLAQTQGAFLTSVRGIGIVLAAGVSAEIGDPFEQKPINNLVSYCGIIPRVKQTGGPQGKTKTGKVARRCNRILKDYVVKSASHLGLHGPADLMSDYKRREAAEQHADFGIARRYLRVAMCLMRTSQIYLPNRLRKADSQIKDRVDYYLMTWPQLRDKWQKSGALQTAFNADQPLGQWRKIVQHFYGIKLTL

SEQ ID NO: 121020 - protein, 465 aa, unidentified
MKRHRRRQPPKPRVSPSVLERINPNAAGIDCGAAEHFVAVPPDRDPTPIRSFQTFTTELHRLADWLTACHITSVAMEATGVYWIPVFEILEARGFTVLLVNARHVKNVPGRKSDVSDCEWLRDLHIVGLLRGSFRPADAMVALRAYLRHRASLVERAGTHVQRMQKALVQMNVQLALVVSDITGVTGLRILRDIVAGRTDPQALVHHRDYRCHASEADIIAALTGNYRPEHVFVLRQNLEAFDYVQQQLAACDTAIEAHLQTLTAHATPPSTPLPPPRPRQKPRDNEPRFELRTPLHHLTGVDLSQLDGIGPYNALRLLSEIGTDMTRWPTDKHFTSWLTLAPNNKISGGRLLSSRTQPSANRAAAILRLAAMNLGRTQTALGAFYRRLAFRVGKAKAITATARKLAILVYRTLKDGLVYRDPGADAYDAQHRTQVLRRLRQRAANLGFGLVNLTTGEVVESTVS

SEQ ID NO: 121021 - protein, 413 aa, unidentified
MMTTITAEVTGQHDTGEVVAGIDTHADTHHVAVIDPTGRRLADASFPATSAGYQAILAYLNAFGQVRLVGIEGTHSYGAGITLHLQQARLRVIEVLRPNRQVRRLRGKSDPIDAYEAAATALAGVEHPEPKILDGAIEALRYLFAARRSAVKARSAAQVQVKSLLVTAPDRIRRRYRDMGDAELLLALSRLRPSTEADQLSRTVLTALKSVARRHHNLTTEIDELEAELPVLLDQAAPALHRSKGIGVITAAQLLITAGENTDRLHSEAAFAALCGASPIPASSGKTNRHRLNRGGDRQANSALHHIALSRISFDPRTRAYVARKRQAGKNTKEILRCLKRAITREVYKLITNPGTVADYRTLRPLRHQLGLTQAQIATALTINPAKVSLIERGLAHDNECVRTYHQWLCQRI

SEQ ID NO: 121022 - protein, 369 aa, unidentified
MTKSITYVGFDVHKNSIDVALADAGRESEIRYYGTINGDLASLDKVIRKLVSRGTRPSFVYEAGPCGYEIYRHLTQQGYDCKVVAPSLIPRKSGDRIKNDRRDAEMLARLHRAGELTPVYVPCLEDEAMRDLCRARIDSKSAERKARQQLGAFLLRSGFRYSGKTPWSKAHWNWISCIKMPHPAQQITLQEYIDAVRSCTERVERMTEQIRQLAEQWRMNPVVEAIQALRGVSLIVATTTVAELGDLTRFDHPRQLMAYLGLVPSEHSSGETVKRGGITKTGNGHARRMLVEAAWSYRLPARVSRRLLERQRHLPQAVWEIAWKAQLRLCSRYRLLTAKGKRSQVVIAAIARELSAFIWAIAQTVPRPA

SEQ ID NO: 121023 - protein, 389 aa, unidentified
MPQINDLSRSLSSFEQDRTLIVVVEVSLSSWLVAGILPGVARQPMKKLGPAEDALLALICRWKDEASRAGRNIMRVCVAYEAGRDGFWLARWLLTHGIETYVIHSASVSVSREQRRAKTDRLDTELLKRTFLGWLRGERGHCSMAAIPTIQEEDARRPNREREKLVGDRTRTINRIKATLIRFGIRTFKPTLRKAEERLEALRTAEGVPLLENTRAELHRDMARLRMIQEQIKEIEQRRLRDLESVSSAKPGPHAMVRLIARVIGIGIETADMLVHEILLRNLRDRQALARYAGLTGSPDESGSRRREKGLSRSGNARVRRGMIQLAWRFLQFQKESALAQWYRDRTADRRSSTRKTMIVALARKLLIALWLLAKTGQIPEGVLLRPAT

SEQ ID NO: 121024 - protein, 352 aa, unidentified
MMIIGVDFHPEFQQIASVDTETGEFQEKRLAHREEAEKFYRALAGQKVRIGMEASGHARWFERLAAELQFELWIGDAAEIRTRRVRKQKTDRQDAQLILRLLLEDRFPKIWVPSWENRDLRQLLWHRHRMVQARTRIMNQLQAVALNEGLRCKKKLWRERGREQLEAFLLAPWANRRRRDLLELLDRLNPTITELSQAIEREVENCPEAKRLMTHPGVGPLTALAFVLIIGQADRFQCGKQLASYLGLVPLEDSSGNRRRLGHITKQGSSILRFLLVEAAQVTVRSLPEWRSKYMHLMMRRGRKIAKVAMARKLAVRLYWMMRQGWDYEQVRKFGSHAGQPGNRHGVQSNTE

SEQ ID NO: 121025 - protein, 312 aa, unidentified
MREHCYGGIDVSKDRLDVMVLPDSKSFSVDNNAAGYSELVKRLRDLPIAAIGIEPSGGYERAVIRTLLAAGLSVRRINPNKLRQFARARGVLAKNDRLDARLIAEYVTIMPTRLVQRDPAAEQLAEVVTMRRQLCDEHVAVENQTTHLEDAMLRRLNKRRLARLEADILLLDTRMAQIVASHANLARRYQLLTSMRGVGPTLAFTLIALLPELGQMSRKQIAALVGLAPYDFDSGRLKGHRCIYGGRLPVRNVLYMAALSACRYNPALKVFHSRLAATNKKPKVIIVAVMRKMITTLNAMLRDNVAWQPKSA

SEQ ID NO: 121026 - protein, 326 aa, unidentified
MTLSHLLDNTFVGIDVGGAGLDVAWHRGDGAHYANRPDAIATLVERLRSGPKLTRIVLEPTGGYEKSLVKALRQAQLPVEIIHTTRFKAYCQLVGVKAKSDTSDARLLASYAAAPDEIRGRKARHVELPEDAIREELSELASRRDQLKHMIHAETCRLGTVRMAELRQAIIVHLDTLKAEDKQVHQMMMALVRQRLDLKRDQRLLKTIKGIGVKSALVLLASVPELGRIDNKAAAALVGVAPFIRQSGTMTAPSRIHGGRAAVRSILYMAAVTASRHNPVLRPFYEKLIANGKPPKVALIAVLRRLVVFANAVIKSGQPWKGATAS

SEQ ID NO: 121027 - protein, 415 aa, unidentified
MALKIVYKICCGIDVHKTFVVACIASTNDKGVTSYESHRFSTYTSGLKTLLQWLLDRNCKDVCMESTGKYWIPVYNILEKDCSIVLAHPKYVKAIRGKKTDKKDAKWIADLFKHDLVAGSFMPPADIRQLRDLMRYRFKLTCFKSSEKNRLQNCLTVSNIQLGNVVSDTFGKSAQAILDKLLENPADTSFDLEPLVYKSLKKKLPELRDAIDGYITPEQAGKLKVIKAHYENLESRKAELEELILALAAPYQQELAILQTAPGISSDFTAIGIISEIGTNMEAFPSAKHLCSWAGLTPTNNESAGKKKSVRVSKAGCYIKPLLVQCANAVVTSKKHPEIRNRYLRLKKRRGHKKAIIAIARMLLTALYHMLKNGENYNAELYQKSDLLPVDREITVEQALMIARNQGYKIKSATA

SEQ ID NO: 121028 - protein, 408 aa, unidentified
MLLKEVAGDRLVVAIDPGKARHRVWLTTGERGLVGEPVSLPVLRDGVEELARLIVASGVPGVPVIGIEATGALHRAWAGEVERRWPGSLRLFAPSETQAARAQLGSRRLKTDDRDCAALVWLLRQGAGRPSAPSTVQALLEAVRHRRQLVDARRRLQQRLHDQLNALCPGLSAPACQGRALALESPSGQAVLACAAAFAGRAPSARSLLARSPGRMSAQTAGFWAQRWTRVLGPPADADLRAARLDADLRRWQALQADITLGEQQLALLLAPTPGQILTTLPGVAAIRAAAFSAFTLPVERWPTPDHLYSATGLAPASYQSSTITRRGRISRQGLPEHRDALMGIAWGLSSCSPAFAERDRELRARGFRPIQARVALARHACRLCWRPLHTQQPFDERRYARARQRGR

SEQ ID NO: 121029 - protein, 360 aa, unidentified
MMETMTWVGLDVHARSTHAAALTLPTAELQRARFGAESEAIVAWLQRLPQPVHACYEAGPTGFVLYRTVRAAGIAIDVVAPTKTPRATGDRVKTDRKDAELLARLLPTGSLRPIAVPPPEVEGARDLARAREQLRVDLCRARHRVSKMLLRHGRVYPGKSTWTQAHHRWLAGQCFDNANSELAYLDYLAAVDGLVARRRALDERLSRLAVEGDWWPTVQRLRSFRGLDTLSALVLALEVGDFARFRSPRQLASWLGLVPSLSQSGESSTQGAITKTGSRYARRLLVEAAWHYGRPPRIGVTLRQRQDGQPAHVLQIAWRCQHRLYRLHQLLSQRHKPGNIVTVALARSLACYLWAAAVAP

SEQ ID NO: 121030 - protein, 366 aa, unidentified
MPSVSRTKRPIHLGLDVHKDSISVAILHPDSEAVDVERIFHDETSVRRLVGRFQEPRALRACYEAGPTGYELHRLFTSLGVRCQVIAPSLIPKAPGDRIKTDRRDARRLARLHRAGELTAIRVPSLAEESVRDLCRARDDAVADRTRARHRLSKFLLRHGHVWRGGNQWTITHDRWVRSVRLDEPALQATFRHYLGVLEVRDADLRSIDAELVPWYSSGPFAEQVGRLGAYRGIDQLGALTLASEVCDFRRFASAQMFMGFCGLVPSEHSSGERTRRGRITKAGNAHLRRQLVESAWSYRFPANLTDRMRRRQQGLPRETVTRAWAAQLRLCGRYRRLAARKESKTIVATAIARELAGFLWAEMVA

SEQ ID NO: 121031 - protein, 465 aa, unidentified
MSQTQQRRQPRQSKGQPAQPKPPKLDALAQINHHAAGLDIGDAEIYAAVPESAADPAVRVFRTFTTDLETLADWLATCHVDTVAMESTGVYWIPIYELLEERGFQVYLVNARQLKNVSGKKTDILDCQWIQQLHTYGLLLPSFRPPEEICALRALVRQRGRLTQSCSTEIQHMQKALQQMNLKLTSVLSDVAGVTGLHIIRAIVAGERDPHKLAAYRDRRCEKSEGEIAAALTGHYKAEHVFALRQALAGYDFFCSQVQACDAEIAQTYQAVTPAAQRTAPALGPRVRRHIPQRHEPAFDLRTELYHLAGVDLTTVNGLDVLTIQSVLTETGVDPTRWPTVKHFTSWLGLSPDNQKTGGKIIKRGTKPSANRAAAALRVAARSLLHSDSALGAYCRRMRTKLGTAAAITATAHKLARIIYAMLKTKTPYKDPGADHLEAQVQQRKVKQLQHQAKALGYELTPVAA

SEQ ID NO: 121032 - protein, 372 aa, unidentified
MAKSIRYVGLDVHADTIAVAVCEGRGEGRSLGTIPNRPEPIRKLVKRLEPASTLRVCYEAGPTGYALYWQLTGLGVKCEVVAPTLVPVKAGDRVKTDRRDAEKLARSYRSGDLTAVWVPDAAHEALRDVVRAREAAKKDELRAKHRLSKFLLRHGRRPPDGTKAWTGKYWSWLNTMRFEFSAQEATLLDYRTEVERAADRIERLEQAIDEAVQSAPAQMKAVIEALQALRGVAKITATTLVTEVGNFSRFVRPKLLMGYGGLVPSEHSSGNSKRQGGITKTGNAHLRRVLLEAAWNYRHRPKLCGNQKKRQQGVSEEIKAISWKAQQRLHSRYWRLTSKGKIPGKAITAVARELVGFIWAVGVQAEREAASA

SEQ ID NO: 121033 - protein, 321 aa, unidentified
MDGSVVETPSIFIGIDVSKSAWDVHVLPEGRAFTIRVDDGAVERLLEKLGAPKPSLVVIEATGGCERQLVAGLIDAGWTVAVVNPRQARDFARALGQLAKTDPIDARTLALFAERIQPRPTQKTPEKQHELDALVKRRRQLIEVRSMEKMRKRQTTLKAASQSIDKLLKVLDQQIAAIEKAIARLIESDDDWRVKRDVIESTPGFGTATSSTLVAELPELGELNRKEISALVGLAPFNHDSGRFRGQRRIRGGRGSVRTALYMAALTAMRCNPLIRNFAQRLRKVGKAIKVVITACMRKLLTILNTMVRNRTPWNPQLSTK

SEQ ID NO: 121034 - protein, 354 aa, unidentified
MKQLAIQYLALDVHQATVVASLRDERGAIQMRATVPTEASAMVRLVKSAGPRVHVAFEEGTQAQWLHDLLVPHAERVVVCNVRGREKSGNKSDRLDADALSEALRNGSLKPVFHGVADLLNLKELVRNYNSLVEDSTRVMLRLKALFRARAIRTPGVSVYRPSQREEWLGKLDGGARVRAAALLSELDLLLELRPKAKAAMLVEARRQPGWKILRSIPFLGPIRVAEILAIIRTPFRFRTKRNLWPYVGLAVVTHSSADEEFVDGQRRRSRKPPLTRGLNRNHNPILKNVFKAAANAAVSRPGPLRDSYEASLARGVKEELAKVTLTRKIVSVTLRLWKKGELWDPNKLNVQAT

SEQ ID NO: 121035 - protein, 429 aa, unidentified
MENAATVPNPLVAWVGLDWADQEHAVCLQVVGSPDVERSTLKHTPEALQLWVAELRGRFPQGPVAIALEQSRGALFYALMTYDFLVLYPIPPKTLADYRQALYPSGNKSDPTDAQLLLELLRKHPERFRPWRADDAATREIALLVQHRRKLVDERTALVNRLQALLKGYFPQALEWLGDLTGPLAWDFLGQFTSLAEAQKASRLQVRKIYRAHTRRTPEELEQLLDQIRAARPLTTDRAVIESSALMVQAQVDQLRALAAGLERLEKKLAELFAAHPDQAIFDSFPGAGPALAPRLLAAWGADRQRFQAAEDMERLSGAAPVTSRSGKKCWVHWRRACPKFLRQTFHEFAGQSILWSPWARAYYQQMREGGADHHPAVRSLAFKWIRILYRCWKDHTLYDEARYQEALARHGSPLAAALRQLPNQEARA

SEQ ID NO: 121036 - protein, 377 aa, unidentified
MKKELYLGLDVHKDCIITAVAEEGRKGEVRQTGAISNDLHAVEKLIARLRQAHGKETLLRACYEAGPCGFGLARRLGQLGVECQVVAPSLTPKRSGERVKTDRRDARKLARLLRAGELTPVYIPDARDEAIRDLCRARTDAVDDRRRSRHRLKGFLLRHGYHYQGKSSWSAAHERYLRELVLPHPAMKVILEEYLISIKAATERIQRCEAAMRDLLEKWRLRPAVRALMAMKGFRTVAAMILVSELGEVHRFTHPRQVMAYLGLVPTENTSSERRRQGHITKCGNAHARWLLVECAQHYATPPKVSKELSRRQEGQPAQVRAISWRAQNRLHRRYRCLLGRRLQRNKTIVAIARELCGFIWELLRTQDCYQAKSTPV

SEQ ID NO: 121037 - protein, 345 aa, unidentified
MKHYTGLDVSVKETAVCIIDEAGKICREVKVSSHPDDLIVVLKDPRWHIERVGLEAGPLSQWLFETLAKAGVPTICIETRHTKAFLKAQPNKTDRNDARGIAQMMRVNLYKPVHVKTLTSQKRRALLTARQLLQEKAIAIENDIRGLLRNFGLKVGLAGKITFEERVCELVTGFPELAEIMDVLLSARTKLRDEFKKLHKKVLELTSRDEICRLLMTVPGVGPVVSLAFVSTIDIPQRFKNSKAVGPILGLTPKLNESGESKRIGRISCCGDAMMRSLLYEAAQTLLTLVKKWSWLKAWAMKIAKRAGKQKAIVALARRLAVIMHRMWSDGTEFCWTRNGLPAAA

SEQ ID NO: 121038 - protein, 425 aa, unidentified
MKKTDYLSTLFVGIDIGSRTNVVSAIDFNQDFFIRMKPVPNAKEGAETLESLLVDVLSAHHEFNHVIIGLESTGFYGVHIANYLSASDLLAPFGTEVYCLNPKEVAKYKESFNALNKNDGIDSFVIADFARVGRISIKPWRGAQYLALQRLTRHRLHIAECIAREKTYVLNNIFLKFSEFAMLKKEDHPFSNKYGATAEAILEQYVTNDDIIETSIEELVELIESKSRGRITDPEETAKILKAAANGSYRLGRIVAEPITLSISSSFNCIRAFEKELKAIEKAIEHTVQGLNPIEYQILKSIPGIGHVYAAGILAEIGTIKAFTDNGALAKYCGIVWKENQSGNFRAEDTKMSKAGNRYLRYYVIEATGSVINNCPEYKDFYDKKFAETTTHQHKRALALTSRKFLRMLFGLLDKSQLYSLERSR

SEQ ID NO: 121039 - protein, 344 aa, unidentified
MGEVRAIGLDIAKSVFQVHGVDVAGAVVIRKRISRAKVLEYFGELPPCLVGIEACPSAHHWGRELQKLGHVIRLIPPSYVKAYLKRSKNDANDAAAICEAVTRPSMRFVPIKTKEQQTALMLHRTRQLLVRQRTMLSNALRGHLAELGIVSAKGRSGTAELLRIIRDGEDSRVAPAVRGILDVLARQYGAIGTEIASIDKSIMALHRACEASRRLAEIPGIGPVGATALVAEIGDWNSFSSGRSLAAWIGLVPKQHSTGGKDRLGSITKQGNRYLRWLLVVGAMAVIRYARKHGTERRPWLGRLMERRPTKVAAVALANKIARMAWAIMVRGERYKEPKLSLAA

SEQ ID NO: 121040 - protein, 339 aa, unidentified
MNRIAVGVDIAKRVFQLHWVEPATGEIVALQLKREKFLEHFANRSSCVIGMEACGGSQHWARSLQKLGHEVKLLSARMVKPFVGGNKNDAADARGIWTAMQQPGIKVVAVKSEQQQGVLALHRMRQQLVKFRTAQINGLRGLLTEYGEVMPQGRAGIKKDIPAALQRIAERLPAVLIDTLREQYARLGELDQQILQIERRLRQWHHQDVDSQRIAEIPGVGLLSATAAVAMMGDAKAFKSGREFAAWLGLVPRQSGTGGRVRLLGISKRGDTYLRTLLIHGARAVLTHSKSPPEWLTELVKRRPQNVAVVAMANKMARTIWALTAHERTYQKGYVSQRA

SEQ ID NO: 121041 - protein, 387 aa, unidentified
MPQPNDLSRSLVALDQNSTIIAVIEMSQSSWLVAGMLPGIERQPRKKLEPNPERLLGLLHRWQDEAVRAGRTITRIAVAFEAGRDGFWLARWLAARGIEAHVIHASSVAVSREHRRAKTDRLDTELLKRGFLGWLRGERGHCSMARVPTIAEEDAKRPNRERDCLVGERTRIVNRIKSTLARLGIRNFKPTLRKAAERLATVHTPEGMPLPPNTLAELQRDMARLGFVVSQIRQIEDARQKRLEQQPETGPHAMVRLLARIVGVGVETADMLVHEVLSRPMRDRRAVARYAGLTGSPDESGAQRREQGLARAGNARVRRGMIQLAWRFLMFQKESALAVWYRTRTADSRIGTRKTMIVALARKLIIALWRFVTAGEPMEGVVLRPAS

SEQ ID NO: 121042 - protein, 311 aa, unidentified
MNNTIGIDISKDTLDAHRLADGQHKQFLNGKTGHAQLVKWIGKQSDPLIIFEATGAYHRQLERVLCTHIIPFVKVNPKQARRFAQACGKLAKTDRVDCEMLAKMGAALQLVPKPFTTENLYDLKELLSARRALIKDRTAAKARKATVINALIKQQLEKRLRQIKNDIAKIDALMLDVAREDQYMSERLDILFSIPGIGVITALMILVDMPEIGALNNKQVASLAGLAPISQSSGKWMGKARIQGGRPNLRNAIFMPALVAIRHNADLKTKYDQLVTAGKEKKVAITAVMRKLLVLANALLRDNRKWAEKAA

SEQ ID NO: 121043 - protein, 357 aa, unidentified
MQTKVNEKLFDGQSIYVGIDCHKLNWTVTIMGEHYEHKTMSQNPDPELLAAYLKRNFPGAAYHAVYEAGFNGFYSCRRLRELGIDCNVIHAADVPTGNKEKIQKLDPVDSRKLARSLRGREFEPIHIPEQADRALVRQRFRVMKDVTRTKSRIRSLLFQFNINVPDRFTKGQTRNWSRVYINWLKELQLEHESLRHTLDNYLRIGELQRKELLFVNKQVRLLSQTDAYRNNYNLLISLPGIGFLTAMTFLVQIGDMRRFRQLDDLCDYIGLVPMMKGSGPKLYTGKMINRGRKELKIMIIEAAWDAVRMDPALMAKFNKLILRMNKNKAIIRIARNLISRMRYVLLSQESYKVGITE

SEQ ID NO: 121044 - protein, 430 aa, unidentified
MTATRKQHSTKRRTERKQAAVQPKPVEALYMALELSWTEWKLAFAAGPADNPRLKSIGARDTQALLQEIAKAKRRFGLADDAPVRSCYEAGRDGFWLHRFLESNGINNQVVGSSSIEVKRQGRRRKTDRLDAGKLLSMLIRWHQGERKVWNVVQVPSVADEDRRQLHRDLLELKAERTRHTNRIKGLLASCGLDVATIDARFPEVLAKLRTWDGQAVPAELQRRLQREHERWKLVERQIRDLANERVRTIRNSKEPVMDKVRQLLRLRGIGFNSAWMYVMEFFGWRRIRNRKQLAALAGLTPTPYQSGDDCHEQGISKAGNRRLRTMAVEIAWCWLRYQPNSALTEWYNKRFAKGSSRQRRIGIVALARKLLVALWRYLETGELPAGAETASWKKGLSMRTEEGSAGVTCQRDMRAKGVAMYSRQVMEDQ

SEQ ID NO: 121045 - protein, 421 aa, unidentified
MGYIGGDLQERFVERIRGVDPARLLAVPIDVGKASAAAMVCDFWGEVVMPPFTFPLTTPGVQVFTSAVAKAEALRDAAWVRAGLEQAGHYHRTLLVRLEQVGIEVALLNPAQVKENRNQSLLRSLKSDATDLGAMAELLVRGKGHPPAPVDDAMATQAALTAHRARKVKARSAVKNHVHASLDLVFPGLSGCFFDLLETKLGRLLLDEGMGPERIRRLGVERMRTFCAHRGVMVHRRKALEILVAARGALSLAPQVREVHAGVLASDVALLGTFDTAIAEADEALGEVLPHTPAGILTSMPRVGVVRASSYGAALGDPSRFRTAAQVYRMAGLVPRLYESAGKRRSHTSISREGKAELRAAIIELGKALRQGDQDFARYAGELAARGKAPGIIACALGHRANRVAFALVRDQIPFDPERWR

SEQ ID NO: 121046 - protein, 387 aa, unidentified
MLTEATACPAVIGLDVGKFSHWACHVTRQGEILASGPVANTEHDLDSLFARVDAGTLVVVDQVRNIGSLAISRARLAGLPVAYLPGIAAHGAAKLFAGDAKTDERDAAVIAKTALGIPDSLLPVPRRDERLEAARSMAAQRNHMVTCSTRDKNRLRSILLESCPAFEALADLADPHWLKMMESLGGPWGILDAGKPAVGAVTRGANRARIDAALAAISSSTRPSEYQVMAENPQVRMLARRIRESAEEAARLDTEITALLVEDGTYECLLTIPGIGPRTASELVISIDIDDFPDHDHLASYCGIAPRNRQSGKSISSVSASRQGNKRLKNLLIFSCNSLSRSRGRFGDYYRKCRDRGMCHGEALKAVARKRMKVIYAIMRDKVPYSA

SEQ ID NO: 121047 - protein, 426 aa, unidentified
MGERQAGRESGVVRMVFIGDDWAEDHHDVEIEDESGRRLARARLPEGLEGIGRLHALIAAHAPQGWSELGGQEMAARVIVGIETDRGPWVAALRAAGYQVYAINPMSAARYRERHSTSGAKSDVGDAHVLAEVVRLDREHHRPIAGDSDLADAIKLVARAHQTAIWDRTRQVLRLRSLLREYFPAALEAFDDLAAKDALLLLGRAPSPARAAKLTRGQVVSALRAAHRHQVQAKTDALLAALRAPGLRQPQGVETAYAAVVASQVRLITTLNEQIGQLQEVVAEHFGRHPAADIYLSQPGIGTILGARVLGEFGDDAKRFGDARARKNYSGQSPITRASGRKSVVLARYATNRRLSDALHQQALSALTASPGARIYYDSLRARNIGHHAALRQLANRLVGILHGCLKTGTKYDEHTAWHHQITAAA

SEQ ID NO: 121048 - protein, 354 aa, unidentified
MKKLFIGIDFAKEKFDAAIIEAIGLKEFGERQFGTFPNDKKGYRQFIKWVKSHAVNHPETDWLFCGEDTGQCSQGLSKWLYGKGLDIWIESPYAIKHSSGIQRLKTDKADAAMIAEYAWRHQDKASLFKPLSESLEQLREVFLYRHKLVQQRVAMEIRDKGKECEDSSRGLSFIRRKARHLIAELDRTIKECDFMIDHLIDSDEELKANYRIVTSIKGIARQNGACLLIYTNNFSRFDMDARKIACYYGVAPFGKESGTSVHSPAKTSHFANKLIKSLLTQGANIAKMFNPEIRTYYDRLIKRGKHKSVALNNVKNKLLRIIVALVRDKTTYDPKTFQYYQQRWKEKNQESFAL

SEQ ID NO: 121049 - protein, 340 aa, unidentified
MTITTVGIDLAKNVFAVHGVDQNGRTVLVKPKVSRAALPELIASLPPCVIGMEACSGAHYWARLFRQYGHEPRLMAAKFVSPYRMAGKSGKNDAADAQAICEAVRRPHMRFVPVKDESQQAMQCLHRTRQGFIEEKTATYNRLRGLISEFGVIAPQSADALRHMVSVQKSSLPLQVQQCVDDLMEHVDRIEANITEYDRILSHIAKTDHRSQRLMELKGVGPTTACALVASIGNAHDFKNGRQLAAWLGLTPSQYSSGGKSKLGRITKAGDSYLRTLLVQGARSVLIGAGKRTDSFSRWVCMLVERRGYWRAVVAIAAKNARLCWASLHYGDDFQLYSVN

SEQ ID NO: 121050 - protein, 352 aa, unidentified
MIKTAVWAGLDYGEALTAICLIDASGVPVLECSCPSEAGQVAAVLQAPGKGDLTSVIIEGASPTPFIRALREHGLPVTVVDSLKASKLLGVRRNKTDTNDARGLAEIGRVGAAAKMPVFLRSVEHSAIRDQLIIRDQIVRQAASLRSCLRAMLRKWGSSVRTLPRGSRLRSLVEDELSAVEAQGALRKVALEMVTLNEHMVRFAAAMSWQLQCKAESIPQTRAFMAIPGVGHLTALAFYSLIEDPYRFQKAEDVAAYLGLVPRVKQSGTAVRRSGIGKCGDRFVRRSLVLAAQVLIGRRAAHTALRDWALTIASRSGHRTAMVAAARKLSVMMLSMWKSGRDFEPYPSATRV

SEQ ID NO: 121051 - protein, 343 aa, unidentified
MYFIGVDNHKQASQLTVLAEDGRELRTGRVLNLRRELERFLKGFHPFTAVLEAGRSSYVMADLLRELGGEVKMAHTLQVKAIAHARIKTDKRDSRTLAYLLRADLIPEIYQRGEANRQAQRVLRARAYWVRIQTEIKNKIQALLAQQKEEIRLEVDKRKDGLFSGRGIEFLSRLPLEGTDKRILDDLLQGYQETQAHIKMSDGGVQALYGTIEEASRIDTIPGFAATLAVLVAVEIADIHRFSSPAHLHSYAGVIPSTYASGERTYHGRITKQGSAWLRWAALEAVYPAIKKDLGLRVLYTRLAKRKGPNAAKIAVSRRLLTIIYRILTENRTYLPDVNRSAA

SEQ ID NO: 121052 - protein, 338 aa, unidentified
MKKRYNSKPDDSMRMFVGLDVHKKYTEVAIVDEDGVVTEQERIENEPGLIEEFSNRLNNADMVMESSSTWYWLYEILSRKHRVVLSNPAKTKAIASAKLKTDKVDALMLANLLRGGYIAESYVPSRRVMGLRELVRYRANLVRMRGTVKNRVHAYLLMNNIRIGYGPFTKGFLEELRKVDDARVEGYLRIIERLNLEIHEASKRICSEALNDEAARLLMTIPGISFYSALLLVSEIGDVSRFPDSAHLVSYAGLVSSTRSSGGSTYHGRITKAGSPYLRWVLNQCVWVHIRSEPEGNVAEFYKRLRKKKGHAKAVVAASAKLLKIAYWVLREKRPYQG

SEQ ID NO: 121053 - protein, 319 aa, unidentified
MDEPRSASICVGIDVSKDRLDVHLRPSDEAFAVARDGKGLESLVERLKLLDVSLIVLEATGGFEIAVAAALAGAELPLAVVNPRQIRDFARALGRLAKTDSIDAKVIALFAERIGPPARPIASPEAQRLGELVARRRQIVEMIGMEQNRRRRAGDKRLVKRIDRHVAFLEKELADVDGDINSGVRASPAWREAEELLVSVPGVGPVTARTLIAELPELGQIDRRKLAALVGVAPFNRDSGTWRGHRMIAGGRTSVRTVLYMAALTATRCNPLVKATYQRLVARGRPKKVALIACARQLLTILNAIVRDGRPWTPEPAHA

SEQ ID NO: 121054 - protein, 358 aa, unidentified
MAVNEGTRRIVGGVDTHKDLHVAAVVDEQDRVIETRSFATTRQGYRQMLAWMRAFGDLQRIGVESTGSYGAGLLRFMQQAGIAVLEVTTPDKQDRRRRGKNDDLDAQNAAHAAFAGQRTVTPRSRDGMIESLRVLMACRKTAVSARRVALQMIHNTIVCAPDGLRDQLRSLTRMQLVRTLASWRPDLTAYRDLQSAYRIGLKSLARRYLELHDEIADLDVMIAAIVDELAPNLVARNSIGHIGAAQLLLTAGDNPERLRSEASFASLCGVSPVPASSGKTVRHRLNRGGDRAANSALHIIAIGRLRTDQRTKDYVTRRIAEGHSKLDAIRALKRYLAREVFTLITQRRREINATRIAA

SEQ ID NO: 121055 - protein, 343 aa, unidentified
MKYIGLDLHKKSIFATVLGEDGKILSRTKIGPNTRDIRYYLKNQGRREELSVAMEASYNWSYYYRAAEEAADTIVLAHPLKTRIIGEAKIKTDKIDSGVLAYMLKADMLPEAYVPSRDTMEDKMLLRARISLVRIRTQIKNKIHAIVDRNRDSYIGLENITDIFGRTGKKILQDTTICPIDHKIITGYLDLMDEINKKIKDIESQIDKRSLKDRDIELLKTIPGIGTFTAFLVKSEIDDISRFPSKGKLSSYAGLIPSTHSSGQRLHHGRIVKQGNKFLRWALTEATQTSVRCSEYFRYHYSRIRSRKSANSATIAVARRLLEIIYVMLKEGREYIEKPVDIK

SEQ ID NO: 121056 - protein, 340 aa, unidentified
MDATTYGLDVAKRVFQMYWVEAETGEILNRRFVRDELIRFLAQRPPGRVALEACGSAHWWARKIKALGHEVVLLHAKFIRPFVQTNKTDAADARAIWTAVQQPGMRTVAAKTEDQQAMLSLHRMRALLVKFRTMQVNQLRGLLYEFGATFRAGRAAGLAEIRARTAELEDALPGTMMCCLQDQLRRIEELQRDIDLLEKRIGVWQKQDAACHAITAVPGIGRLTATALVATMGDAKSFRSGREFAAFLRLVPRQSGTGGKVRLGPMSKRGDPYLRTLLIHGARSVMYHAKVPTPWQKDIQARRPANVAAVALASKIARTAWAILARGQGYQPNYVSMRPA

SEQ ID NO: 121057 - protein, 391 aa, unidentified
MFIVGIDIGKRNHEATIIDQNGSTIGKAFRFANSIVGFNRLKETVRRVTGNDVVFGMEATGHYWLALYTHLRKEGFVVRVINAIQSDALRAMYIRQQKNDSRDSFIIADVIRFGRFCETNVSPPDLFALRELCRHRFYVVDSVSDIKRKVIALLDQIFPEYENLFSDTFGKTSLELLSEYTTPEEILNVDTDKLVETINIASHGRFGLKKASEIQDAARNSFGILLATDTIALLIRQYIEQIRFVEKQIDVLDTEIARLLSAFETQLTTITGVGPTLAAVILSEIGDVKRFNSAAKLAAFAGVDPTMKQSGDFNGSRNRMSKRGSPYLRRALWLAATVASFKDPAVSVFYRRKRAEGKPHMTALGHVARKMVNIIFAVLRDNSPYSPNIAI

SEQ ID NO: 121058 - protein, 476 aa, unidentified
MNSKTKRANNQVNSVMNIQEQREMVEKANRILSEMRSFTWRDLETQGKFSKNEKLSFISDDMLILGCDIGSETHYVRAIDTRGRELSKKALAFENDAEGFQKARDWAVQLAAANDKKQIVLGLEPTGHYWFCLAAWMISNGISVVQVNPYAVKQTKELEDNSQQKDDRKDPKLIANLVKDGNYGMPYLPEKVYAELRRLSMFREQLMEDRNRHMNRLHREMKIYFPEYKDAFGKIDGAFCIAVLKEAPFPEDILRLGAEGLRDIWHKAKLRGRGYSRAEEIVKYAETSIGLEEGTAAGKEAVRWFAEKITELDEELAEIENKLEGKCGEIPHAENVLEIPGIGGKILAGILAEMGDITRFDDVKEIQKLSGLGLVSCSSGKHKGETRISHRGRKRLRYWLFQAARSAVAHGEEYKWIHAHYTTRAGNPLQKMQSLVVIACKLLRVIYTMLKTGKKYDPEKLLKDIRYPESVQSAAA

SEQ ID NO: 121059 - protein, 455 aa, unidentified
MSHEVKGEAMMRLVYKRCAGIDVHKKMLMVCRVRINEQGEWEQEVRSFGTMTCELLLLLDWLLEWGVTHVAMESTGEYWKPVYNLLEGHVEVLLVNAQHVKHVPGRKTDVKDAEWLAELLVHGLLKASFVPAKPQRNLRDLTRYRVNLVEERARTIQRLQKVLEHGNIKLASVATDVLGVSARRMLEAIVEGKANAATMAELAKGRLRNKLSDLEKALTGIVEPHHRFLLAQHLAHIDFLDEQIETVGQQIEQQLKAMPALQPPADSGSQQTQQEPAAEAQGAVPQPPLTWQEAVDLLDTAPGVDQKLAQQVLAEMGINMRQFPTANHFAAWAGLAPGNRQSGGKRFSTRLSDGNRHLRTVLTQGAWAAVRSKGTYLSALYHRLAARRGKKRAIMAVAHSLGISFYHMLSRRQPYQELGADYFDQRSKGVKTDWLLKQLNKLGYNVQLEPLAQPA

SEQ ID NO: 121060 - protein, 466 aa, unidentified
MESFYLGIDVSKGYSDFVIINNKKQPVVENFQLDDTFESHNRLYGILQEFLVQRPKATVYAAVESTGGYENNWYNSLSKFQGSLSLKTARLNPLAVVHNSKAGLTRNKTDKISAQNVAEYLVAHPEKVTYQHHDQMASLRKQWGFIQMLTKQSTQLRNQLNSLLYTTHPELLSFCQDGMPEWMLKLLIDYPTAEQVKKARAKTLAKIPYVTMQRAQQLVANAKRSVASATDEVSRQLVSDTAQQILHLKKTIATQTDLMIDACDLPEVALLKTFVGIGDKSAIGLLLEIESVARFKTVKKLASFWGLHPVYKTSGDGSGGFKMSKQGRKSPRKILFTVALAAIEKNPVIKALYEYHLKQGRKKMNAIGICMHKILRIIYGMLKNNTPFDPKIDRANRQRMIPVKATNGKESKDRRFEGYDPAAPVSRRQRKKRVEREQPQSVNNTMRGISAPVHISTILANMLCKV

SEQ ID NO: 121061 - protein, 387 aa, unidentified
MMQPKDLSRSGIPFEQDRTIVAVIDMSQSSWLVAAFVPGLDRHPLKKIEPDQEVLLRLLGRWREEAIRAGRDIERVTVAFEAGRDGFWLARWLRLQGIEAHVIHPTSIAVSREHRRAKTDRLDTELLKRAFLGWLRGEPDHCAMAAVPTLGEEDAKRPSRERENLVSERTRLVNRLKGALARLGVRDFKPTLRNAAGRLEAVRTPEGVPLPPNTLAELRRDMARLHFVREQIREVEEARLERLERAPGEGRNAAVRLLARVVGVGLETADMLVHEVLSRNLRDRRAVARYAGLTGAPDESGAKRREKGLAKVGNARVRRGMLQLAWRFLRFQPDSDLARWYRARTADARSATRKTMIVALARKLLVGLWRLVTIGDVPQGVVLRPAT

SEQ ID NO: 121062 - protein, 401 aa, unidentified
MTATHTTNSTVSHAPVLYLALDLGTRDWKLAFTVGLGQKPRLKTITARSTLSLVLEIKAAKRRFGLPEDAPVICCYEAGRDGFWLHRFLLDQGVQNQVVDSSSIEVNRRQRRAKSDRLDAVKLVQMLIRWHNGEHKVWSVVHAPTVAEEDARQLHREMIKLKAERTAQANSINGLLAGLGLCVIVDETLPTQLENLRQWDGAKLPPQLHQRLLRELQRWQLIDRQLRELDAQRMAKIRDDQTPHVEKVRRLLNLKGIGENGAWLLVYEFFAWRIIKNRRELGSLAGLTPTPYSSGESEREQGISKAGNRRVRWMMTELAWGWLRYQPRSELSQWYQRRFGRGNRRLRKVGIMALARKLLIALWKYLEGGEAPAGAEEVGWDNKPRFRAVKTRRRKELSPTG

SEQ ID NO: 121063 - protein, 410 aa, unidentified
MKMAGIDVHKKVLMVVVIDASTPEEKPVRRRFSTMPSELQRFRIWLRDQGVEEAVMESTAQYWRSVWLELEPQMRLHLAQAFSNRAPRGRKHDFKDAERLVRRLMADELILSFVPNGEQRIWRSMTRMKVQLTRDRVRLQNQMECLLEEMRIKLSIVVSNLLGASGLRILCALAKGETDPKKLAQLGDERLQCTEEQLVDALTGRTQPMHRAMLALQLERLQLIDQQIEQLNGLIAQAMKEHQDTVIRLAEVPGLGVDSAQQIIAEVGAQASTFPSAAELTSWVGTCPGKEESAEQNRSSRSAKGNKYLRRVLNQAAHAAVAKKGSYFQVVFRRLLPRLGYQSAVWAIAHRLCRLVWKILHEGVRFIERAGEADPRTKKKRAQMLARALRKLGYQVTITPINQLTATNEI

SEQ ID NO: 121064 - protein, 494 aa, unidentified
MANAYPEGENTARDAFGAGASGWSVSGYGKAANAKPAALTGHLAEPTLGRRGTPSPNRYLQLQPKNPRPNQLTQEECSMKIYPRTRPIQRYIALDIHKEYVVAGGMSARQEWVLPPHRIEMSKFGEWAKKNLCEADAVVIETTTNVWDIYDIVQPLVGHAVVAHAGAVRQIAEARVKTDKEDVKRLIRLLIADILPEVWVPPTPVRELRGLISYRQRLVKTGSMIRNRLQSLLHRHNLLLPEEGLADGDWWEQQEKIPAVEKLQIRQELAMLERIEKYKVEVDQELGRQSLGEMWGQQALRLMQLPGIGMVIAMTILSAIGDIHRFADARHLVGYSGLGAGVHDSGKEHIEKRITKSGRRELRWALVEAAWRAVRMSPYWKEQYEKFLKRMRHPNQAIVVVARKLLVAVWHVLSNEETDERASEEDLAYKMLLWSWSLSAEARQGLTHKQFAKYALMRLGVQTDLTRFVRGKVPRRIASREEVLVRMAELGLNG

SEQ ID NO: 121065 - protein, 342 aa, unidentified
MPLFVGLDASKHTTAICILNADGVLVAEGEVGTDPKEIIAFLRGRRERYRRIGIESMSFAPWIYDGLAKVGFPVICIEARHAHGVLKARLNKTDRNDARGIAELMRAGIYKAVHIKSAQSQHAKLLITTRKMLLSKSRDTENLIRQALLQYGLKLAAGGLRNTFHRRVDLVLRDANEPLRSVTEALLGARAVLVEKAKLIEGEIVAMARADPVCRRLMTAPGVAALTALIYKSAIDVPERFANSRDVGVHLGLTPRIHQSGPVERRSRISKCGDASARSTLFLAARIILVKVKKRSRLKEWGLEVRARRGFAKASIAVARKLAVALHRMWMTETDFCDAPVA

SEQ ID NO: 121066 - protein, 457 aa, unidentified
MSAPQKVKIKSTRKTNVQLPTLRPHAAGIDIGATQIQVAVPCDADPKPVRTFSSFTDELHALRDWLKKCGVQTVAMESTSVYWIALFQILEAAGLEVCLVNARHCKNLPGRKTDISDCQWIQYLHSVGLLRASFRPPEQICAVRSLLRHRANLIRYAGSHVQHLQKALTQMNLQIHNVISDLTGVTGLAILDALLAGERDPQKLAALKDHRIKASRDTIARSLQGDWRPEHLFVIQQTLDTWRHYQRLIAQWDQQIELLLARFDSKVDLYQHPLSATRLQHKKPQRNEPHFDARSELYRLCGVDLTQVPGLQVNTALVLFTELGPDFVTRFPTAKSFASWLGLCPDNRITGGKIISVKTRDVKSRAAMALRLAAQSLWHAKDYLGDCFRRWKARLGTPKAITAMAHKLARIIWHLIKYRTPYDPAVWAQAEEKLKKKRLKFLQQTAAALGYTLLCAS

SEQ ID NO: 121067 - protein, 400 aa, unidentified
MSGLKGSFDGFVGIDVSKDKFDACGITGDEVKLFQFSTTMDRKGFEKLKGHLAAVSISSVIIGMESTASYHVNLFSYLVSEGYRVILINPLLISNYVKMQLRKTKTDKKDAVVIAQFLLANGDTLVQRATPSLISDLRDLSRQRESLVDEMTSLKIEIKQLLNITFPELEHMAGIFTKSILKLLQQYPSAFALRDADLGQLSQTLIADSYGHKREAFAAELIKAAHSSIGSKSTAKDMILKQKIALLLHFEDALQEVTGMLIEMSRKLMDEEINIMTSIKGIGDKSAANFLVEMGGDINQFERSGKIIAMAGLDPAVYQSGKHDGKGRITKRGNRHLRRIIWLMTTKVIQYTNTFSVYYLKRRKEGLPYKMAVLATAHKLIRVIYAMLTQRTTFCPQVNS

SEQ ID NO: 121068 - protein, 397 aa, unidentified
MYIVGIDIAKRKHEAAVIDGEGTVIIKPFSFTNNCSGYNRLLAMLAKAKLPLDEVSFAMEATGHYWLALFTRLQKEGFRVQVINPVQTNSIRSFYIRQAKTDPRDALLIAEVIRFGHFSESTLHPENIYELRELCRGRHAIVSMQADVKRKVVALLDQVFPEYETAFTNMFGDTSMAILQTCPTPKELSEMPLEELCHLIEVSSHKRFRMAKAQELQALARNSFGFAMAGDVFSTMIRLYAKHLVFLKQQVQEMDRKIAEIMDTLDTPITTITGIGPTLGAYILSEIGDISRFSSAAKLAAYAGIDPTMRQSGEYNGVRNRMSKRGSPYLRHAIWLAASSAVLHDPALKLYFQKKRDEGKPYMASVGHACRKMVSIIYAVMRDNKAYTPCIPNEISA

SEQ ID NO: 121069 - protein, 335 aa, unidentified
MQSYGIDLAKEKFDVSFFDLTSKKVSNQPSHKVVKNNLKSIGRFLETLPSDAVLVAEHTGVYGDTLLKCCMDSNVKIAFVGGYVIHRYRATPDRAKTDVLDCALLREFGERYPDKLKYKTFPEEALYELRQLARHREMLVEQRKQLITADKSEDCRPVRSLAVKRSMDRIKEMLDTEIAETEKEMLKVINGHDSIHHNYELVKSVDGVGLITAVELLVKTENFTKITTARQYSAYAGTAPYEKSSGKMDKGAHISKIGNRRSKTLLYICAESARLHNKEIKLYYERRTLIDKKPRHYVLNAIANKLLRIIFTLVEKGEYYDANFIRQDPRAVKYN

SEQ ID NO: 121070 - protein, 370 aa, unidentified
MKQQTKSSNITVGLDLGDRRHRFCALDERGEVVEQDSICNDRVSLRKLAGRYHGALGVMEAGAHSPWISRFLEALGWRVVVSNPRKVRAIYQHERKSDQRDALMLARIGRMDLALLYPVRHGTAEAQQDLLRIKLRDSLVRARVAVINSVRFTLKSLGYTVRNPSSARFHKVVMEEVPESVREMITPSVQALAELTARIKMLELEINTLAQMKYPQSAQLQQIPGVGPITALYFVLKIEDPNRFAHVRDVGAYAGLCPRRDQSGESDPQLRISKRGDAYLRRLLVSAAHYILGPFGPQSALRAYGLMLAADGTARAKKRATVAVARKLAVLLLSLWKSQQPYQPFPGACLKWRARGPTIWNDCAASHGSD

SEQ ID NO: 121071 - protein, 317 aa, unidentified
MIALGIDIAKLKFDIALLTQGKFKTKVFANDSAGLSACLKWLRTHASEPVHACLEATGPYGEAIACALHDAGHTVSVINPARTKAYAQSLGLRQKTDAVDAKRLARFVQTQQPPAWTPAPAELRALQALLRRLDALVEMRTQEKNRLGVAEPTVSASIGQHLDYLEAQIDALKAQIESHIDQHPGLKQQHDLLDSIPGIGPATSAWLIGELNLTRFDSARQAAAFVGLTPRKDTSGTSVRGKPRLSKQGNSLLRKLLYFPALTAMTHNPLVRALCLRLKAKGKHNMAIIAAAMRKLIHIAFGVLKSGKPFDPTLADT

SEQ ID NO: 121072 - protein, 468 aa, unidentified
MLCFQNEYSDEVWSDTKQDSYYKGFAGAKPACTIVKEGKEGVMSESKVLREEPEFAALVGIDWADQKHAWCVQAAGATHRESGEVEHTPEAVEAWIGQLCQRFGNRPIAVAVEQVKGALVFMLSKYEPLHLFPVPPAMSANLRAALYPSGAKDDPRDADLLVDLLLKHRDKLRRLSPDSEETRRVQNLVEERRHLVEEKTAQCNRLTNHLKIYFPQMLDWFDRLDTELVCALLEQWPTLEELQKVPPARLRAFFRKQRCHYPELVERRLVGIRQAMPAIRDRAVIEAKSAVVKVSARVIRSLIRGVADLDRKIEEAAAAHPDFFIFESLPGAGAVLAPRLLAAFGSQRERYANAKEVQAYSGIAPVTEQSGKKKWVHFRWACPKFLRQSFHEWAGHSIAHSPWARSYYQQQRERGKGHHAAVRGLAFKWIRIVFRCWKDRVAYDESRYLAALAKRNSPLAAVAGGTIL

SEQ ID NO: 121073 - protein, 351 aa, unidentified
MRSAKSKDMIDAEENGNDVLYIGADVHERETQLAIFEPGGTLLQEKRIPTKDLQSYVRSLPAKEKHLALESLGFIYPLYDKLKEVPRCDVAVANPKRIRQTSDSKQKHDRADAKLLGNLLRTNYLKRSHMSDLETREKRFLINDRVKYGLKRSELRGSIRWLLKRRGIEIEQDPFSREGRRKLREEIALQEINIRLQELELVESIVEKLDRQIMHVVSGDEKAKFLDTLPGIAPYTALFLSSAFDNVDRFPDSKHACAYLGLVPSLHQSGDVTFTGHITRDGNKFLRRNLIECARAAVRKDPHLKEFHLRLKHKRGERKALIAVARKMVSYAYWMLKRNQTYEELSPWDGS

SEQ ID NO: 121074 - protein, 339 aa, unidentified
MNSMAVGVDIAKKVFQVHYVDKASGEIVNKAITRAKFLEHFANRAPCLIGMEACGGAHHWARQLMKMGHEVRLLPAEFVKAFNIRNKNDAADARAIWLAVQQPGKPVAVKTEMQQAMLALHRMREQLVKFRTMQSNGLRGLLTEYGEVMSRGRAKLDNEMPAALGRLAERLPAALIDTLREQWNGLAKLDEQIAEIERRMREWKREDWAVKAISEIPGVGLLTATAAVAMMGDAKAFSSGREFAAWAGLVPKQTGSGGKVNLHGISKRGDTYLRTLLIHGARSVLTHAREPGPWVEQMKMRRPTNVVIVALANKIARTIWAVLAHDRPYRSDYVSVKPA

SEQ ID NO: 121075 - protein, 445 aa, unidentified
MSTAMVRYAGLDVHKRVVQVCIVDQAGKVVHRERFALSRPVLELFAAKVLRPSDHVALEATTNCWAVADALRPHVARVVVSNPMATKAIAQAKVKTDKVDAHVLAQLLRCNFLPEVWQPDVATRRLRELTGRRSALVSQRTMMRNRIHSVLAMRLVQSPSRLFKTDGLEWLGAVELDDQARFLVDSDLRQLDFLQKEIGVLDAELARRGHASDPVKLLMTLPGVDVATAESVLAAWGDVTRFPDGDHAASYLGLVPSTKQSAACCYHGPITKRGNSQARWMLIEAAQHLDKHPGPLGHFFRRLCRKKNRNVAVVAAARKMAMIGWQMLTRNEPYRYAVPRSTVTKLTRLRVKATGVCRKRGLAKGQRPVAKLPGGSRTIKALAEVYHSEGLPPLHSLTPGEQRTVRRSGSAEFVRQIGQTQILPIRRGPITGSSSLIRGNGRGRN

SEQ ID NO: 121076 - protein, 341 aa, unidentified
MQDVILIGIDLGKHSFHLHGQDARGKAVLRKKCTRKQLITFLATFHPCTVVMEACAGAHHMARHLMTFGHQVKLISPQFVRPFVKGNKNDFIDAEAICEAASRPNMRFVTPKTEVQQILSALHRVRESLVRDRIKASNQIHGFLLEFGVSLPIGSAAIRRLPSVLAEHPLPVRLIAVLNRLLAHYKYLDEQIDEVEKELQLQLQEDGLGQRLMAVPGVGPITASLLSAELGDGKQYGCGRDFAASVGLVPRQYSTGGRATLFGISKRGDKNLRRLLVLCARSYMQRLDKQKGMLADWVRAMLSRRHSNVVACALANKLARTVWALAARHTEYRSAQASKAA

SEQ ID NO: 121077 - protein, 344 aa, unidentified
MDYYVGLDVSLRSVAVCVIDSDGKAVLERAVPCEIEDISQCLLSLRAPKLRIGFEAGAMSQFLFFGLQAAGFDVVCMEARQVNAALSAMRNKTDKTDARGIAQVLRSGWFNAVHMKSREAHAVRALLSSRKAVQRKCIDLANEIRGLFRIFGIRLPSRVEQGSFDERARPIIEADPSLSFALLPLLDARVVLHQAFLELDRRVKQIASRDEVCLRFMAIPGVGPITALTFKAAVDDPDRFSSSRTVAAHFGLTPRRYQSGEMDNPGRISKAGDGDVRAALYSAANAMMMRSIAGSDIKSWGLRLMKRKGRRRAVVAVARKLAVVMHRMWADNTEFHQRPLEGSV

SEQ ID NO: 121078 - protein, 452 aa, unidentified
MSNKKVALEIVNPHAAGIDVGSRSHYVAIGQSAEDVKEFGVYAEDLKELADWLLENNIETVAMESTGTYLQNLFATLQQAGLKVILVNGKFTKNIQGKKTDVKDCQWLQKLHSIGLLTGSFLPDHATEQLRTYCRHRSSLIDTAADTTRRMQKYLRLLNLRLDIVVKDITGLTGLAIIEAICKGETNAEALSSHRHGNCRKSKEEIEKSLQSNGRQDYLFALQQEFEMYKMLQKKITECDAAINNLLIEQISNDENKKRLKAEKKVHKRINKNAPKNIDINQLAYQHFNGIDLMNIEGVSHNTVIALMSEVGYDGLKKFESAKQFTSWLRLSPNNKISGGKILSNRIAKGSNRLKIALRNAANAIGNLKDTHLSNFFKRVCFRRGRPAAISATARKLAVVIWNMIVKGIPYQPPTTYEFLDQKRKRKVQEMKKLIHKFDIKTHELGLQLIRL

SEQ ID NO: 121079 - protein, 343 aa, unidentified
MKYKTITIDLAKNVFQVCGVNEHIKPQFNKKLKRNELLEFMRQQSPTTVVMEACYSSHYWGRELAKLGHDTKLIPAQHVTPFVRGNKNDHNDAFAIAEASQRAHIRFVPVKSEHQQEISCLHSIRERLVKNKTAMSNQARGLLSEFGVVFPCGHKALLSGLSSVIDNPQYSHRLQDMVIDMLSEYNVTLKRLKSIEKQLGEFVDGSESGKILSSIPGIGVINASALLAAIDKGQAFNSPKEFAVWLGLTPKQHASGNISKMGGITKRGDRYLRKQLIHGARAFVSRAAKSTDPLALWATKLRLTKPFNKVAVAVAHRLARLIWILLTRQEHYRVMPTSLEVNA

SEQ ID NO: 121080 - protein, 312 aa, unidentified
MIVGIDVSKEWLDLAVSGPQGELRRIENKPAAIATWLAEAQPGGLHLIAFEPTGSYENALVAALRAADVLHVRVHPNDVLAFRRSRGIKAKTDKIDARLIAAFAAEELTRRGLHPVIAGNPTLRELAARRRQLVDLLQGERCRLALATAGSVHTSLEVMILALETSLRTIEAELNTLIAADPATAQMAALLQSVKGIGPVTAMTLMADVAELGHLSGKEIAALIGLAPITRESGKTRYRAKTGHGRPGVRRVLFNAARCAIRHNPVMRDFYQRLVTQNKRPGKVALIAVMRKMLVTLNAIARDKQPWKHAGT

SEQ ID NO: 121081 - protein, 515 aa, unidentified
MVLDMDFVKSLVRMVMRELQTPPTSTSDATEVQQALQAALSQPELQRALLAEVIQAAQSDKKLRKALAEEAVQLDILQRLNPNAAGLDIGAAEIWVCVPQGRAPQPVRMFPTFTSDLNALADWLTACGITTVAMESTGVYWIPVYELLESRGFQVFLVNARHLKNVPGKKTDVLDCQWIQQLHTFGLLRASFRPAQDLCALRAYVRHRDNLMRYRSSHIQHMQKALAQMNVQLTLVLSDITGETGMQIIRAIVAGERDPHKLAQFRDVRCAKSEAEIAKALTGHYREEHVFELKQSLALYDFYTEQIKACDAELEAKYTAVKPIVDIVAQPLPETPKSKRRKPKNSPDYDLRTYLYQMTGVDLTAVDGLDSVLVQDILSEIGLDMSCWPTDKHFTSWLRLAPRNDISGGKVLRSRAGKTTNRATRALRLAAQSVSRTDTALGAFFRRMRAKHGAPKAIVATACKIARIIYHMLKDKREYVDHGADHYEQKYQEQALKKLKRQAAKLGMKLIPATA

SEQ ID NO: 121082 - protein, 410 aa, unidentified
MGLYCGIDWATAHHDVAVVDDDGRVVARGRVGNDAAGFAQLLTLLAQAGDAPENPIPVGIETDHGLWVAALRETGRVIYPINPLAASRYRARYAVSGAKSDATDAVLLANIVRTDSTAHRPLPADTELAQVIRVLARAQQDAVWARQQIGNQIRDLLKDFYPAALAAFAELPDGGLARADARTILAAAPTPAQAAALTPARLRRLLAKAGRRRHLDRDVDRLREIFTDTYLHQPPQVEAAMGIQLGALLRQFDAACTAADELTEAAIAHFEQHPDAEIITSFPGLGMLAGARVLAEIGDDRSRFADARGLKAFAGSAPITRASGKKTVVLHRHIKNRRLAAVGPIWALGSLRASPGARRHYDARRAAGDWNHQAQRHLFNKFLGQLHHCLHTGQLYDEHLAFPPPLLLAA

SEQ ID NO: 121083 - protein, 334 aa, unidentified
MYYSGIDLHTDNCYITTIDEQGALVKQQRVENISELIVDYFQRLPGPHSTVVESTSGWYWLNDLLEEHGIELVLAHAKYLKAIAYAKVKTDKVDSHTLATLLRQNLIPRAHKISRQLRGLRDTMRLRLRLVQQRTACLRRIDSIAVKFNTTTVPDPYRFQLSVLHHTRDTFTSQILALEKSLHPVLIPNDDVQHLLGVPGIGKLTAFTIYLEIDGIERFESDKRFESYCRLVPASDNSNRRVHHRSSKDGNKYLKIAFSEAAVHAIQYYSEYRCFYQKLARRSNQAIARTVVAKELAKIVYYILKNKTDYQGFKGQPISRQKSLEWPRLSSPHA

SEQ ID NO: 121084 - protein, 459 aa, unidentified
MIDDKIDAVRKSSDKGLKSLNLNAAGIDIGSQQHYVAVPEGRDEVNVRSFASFTPDLYQLADWLKECGIETIAMESTGVYWIPLYEILSSEGFEVKLVNARHVKNVSGRKTDVLDCQWLQQLHTYGLLSGAFRPDDQICQLRGYNRHREMLVNQSAKHVLHMQKALSQMNIQLHNVLSDVTGKTGMKIIRAIISGEQNPKKLAKYRDRRCKNSLEVIEKSLQGNYRAEHLFALKQAMELYDIYHEKIQACDKEIEALLAKFDGQIDLDNTDIPKPKAGNKKENANTPQFDLHKQLFRITGVNLTALPGINSHSAFKIISEVGLDMRHWRTEKHFVSWLGLCPGNKVSGGKRLSGPTTPTANRAAAAFRMAASTLFHSKSALGAFHRRMKARLGPAKAVTATAHKLAKLFYLMLKYGESYVEKGQDYYEKQHKNRVVKNLQHRAQQMGFKLVAVSGLEAA

SEQ ID NO: 121085 - protein, 416 aa, unidentified
MNAVGIDVSSRKSTVAVLRPLGEVVCLPFDVSHDADGLASLAEKLKALDGETRVVMEHTGRYYEAVAKALHEAGFFVCAVNPLLIKEYGANSLRRVKTDKADAVKIARYALDNWADLRDFTPMDAIRYDLKTLNRQFQLASKQRTASANNLIALLEQSFPGIRKCFDSPVRSDGTQKWVDFAHSFWHVDCVRKQPFAAFCERYRKWCKRHAYFFKLSNAEEVYALAKRAVVLTPKSKVVKVLVQEAANQLSSISRSVEVYRAEMDRLAAMLPEYPVVMAMYGVGKSYGPQLMAEIGDVRRFERKQALVAFAGIDPMPNQSGDKNVRSNKSSKRGSPYLRKTLFNVTRTYLQCAPQDEPVFQFLNRKRAEGKPFYVYMLAAANKFLRRYYAKLRDYFASLDTLQPVDPIPTILKATL

SEQ ID NO: 121086 - protein, 373 aa, unidentified
MSANQNSIFVGMDVHKAAINVAVGVRGKREPEAEWQLANEPRAVKKLTKKLKEMTNGAVKTAYEAGPCGYALQRQMREQGIDCIVVAPSLIPVKPGERVKTDRRDARKIAAMLQADLLTEVHPPTPEDESVRDLTRAREDTKQDQMRARHRLAKMLLRHGFVFRGGKNWTKRHGEWLGQIRFEDGVSQHVFDGYLLVAQQVEERLKRIDEQLEEVARSERYRERVGWLRCLRGVDTVTAMTLLAELHGFRRFTNPRELMSFLGLTPSEHTSSSRVRRGSITKAGNSHVRRILIEAAWHYRHRPSASAYMRRRRDGQPAKVLAIADRAQERLHSRYFKLKEGYKKPHNVAAVAVARELVGFVWAVLHHNEAACA

SEQ ID NO: 121087 - protein, 428 aa, unidentified
MNGKEIIRHEKYCQLRKEIRGSEDHMIVGIDVAKDKHHAFIGTATGKTLLKRLIFENNMDGYSRLLARTEAIRVQNGLSEIVFGLEPTGNYHKPLATHLIRCDHNVVLVSGVAVKRNRELLDGRWDKHDTKCAANIADLISQGKCLFYEFPLPDINELRNLLSLRKRLKKEDHSLRMRIRNNLLAKYFPELDRFYGQCETENLAIVRWCLEPGKIAGMEFNKFFRMVTTRERGIAQKQRLRKIHSLSFESVGCPMGQSSEFEAQVLVDKLKQVRQVIKKTEDLIKDVSLGLPEYSWMLTIPGFGPYVSSIVLATIGDPFRFKNRKQVLKMSGYDLNANRSGKTSLSAVPVISKKGSSTLRYALYQAALVASTRNSYFINYYTNLLRGREREQGIKTKMRVKLAAKMLIIAWTLMKKKEPFNPNYLNKK

SEQ ID NO: 121088 - protein, 387 aa, unidentified
MSQSFDASKSLTAFEQDSTLVAVIEMSQSKWLVAAVVPGIARQPLKKLDADAGALLKLLQRWREEARKAGREVKRIVCAYEAGRDGFWLVRWLQARTIEAYVIHAASIAVSREHRRAKTDRIDTELLMRSFLGWLRGEKRHCSMVAIPTMVEEDARRPSRERESLVAEQTRTVNRVKAALALFGIGGFNPRLRKAAQKLETLRTVEGTPLPENVHAELRRDLERLRLVHDQIRTIESERLRRLAQAPAAATGPHAMVRLIAKVLGVGIETADMLVNEVLARNLRDRRAVARYAGLTGAPDESGKRRREKGLARAGNGRVRRGMIQLAWRSLIFQKESRLVRWFRARTADGRSTTRKTMIVALARKLLIALVTTGEMTEGIKLRPAGT

SEQ ID NO: 121089 - protein, 408 aa, unidentified
MNSVGIDISKGKSMVAAMRPYGEVSLMPREITHTYSNLEKLGYEIISLGEGTRVIMEATGRYHEPVAAALHELGIYVCILNPIVIKQSGGGSVRKVKSDKKDALKIAKYGLDNWANLRQHTPMDALRQQLKLFSRQYHLYMKTSVALQNNLIALLDKTFPGVNALFDSPTRDDGHQKWVDFVTKFWHCDCITRISQKAFTERYQKWCKRNGYNFSEAKVEDVYFSSAGHFPTLPMNDNTKLLITSATAELTATRKILMTIRAELIRLAKELPEFEIVHSMYGVGEITAAGLMAELGDVRRFNNRGAIVAFAGIDPGINESGSYQSKSNSSSKRGSSHLRKTLFQVVDTYCKKSPLDEPVYQFLDKKRSEGKPYYVYMTAAANKFLRIYYARVKAFLNEHYPEQGALDI

SEQ ID NO: 121090 - protein, 408 aa, unidentified
MEVVYRCRCGIDVHKKIIVACLDQGGEQSLREFGTTTSEIKSLATWLTESGCEMIAMESTGVFWKPLYNLFELMDLDAIVVNAAHMKALPGRKTDVKDAEWIADLLRHGLLKASYIPSREQRELREITRYRKSLTEERCRETNRLQKILEGANIKLDSVVKDINGKSARKLLEKIIEDDVPTSEEEISKMIHGRMRSKLGQLVTAIEGITTPLQRKLLAQVIDHIDDLNRRIADLDKLVQDYMDEYEAAITALCDIPGIARRSAEVILAEIGLDMSRFPSAAHLCSWAGVCPGNCQSAGRRKHGKTTKGNKPLKTILTQCAKSARSVKGSYFSAQYQRIAARRGKNRATLAVAHSMLIAIYHMLRNNVPFRDLGSDYYDSFNRDRKIHGYLKRLKALGWEPDALPGSA

SEQ ID NO: 121091 - protein, 350 aa, unidentified
MDTTVAPLASIGIDIGKEVFHLVGFSTDGRIAFRRKIKRLALIETFKKLPPCIVGMEACLSAHFVSRALRQLGHEPRIIPAIYVKPFVKGQKNDYNDAEAIAEAALRPNLRTVREKSQEQLDLQACHRVRSRLVSRRTATINQIRAFLIEQGIAVRAGANALRNSLFEILKNREDEISPRMSELIVGLYEDWLWLDERIETITKEIEEISQREGNCLRLMSVPGVGPLISTAVVAAIGTGEAFDRGRDFGAWLGLVPRQYSTGGRSILGSISKRGSRYLRTLFIQAAKVLLMRPQNWSKFSFGPWLTNAAPRMHRNKLAAALANKLARIAWSVLSTGKAFDTHKLEIEAV

SEQ ID NO: 121092 - protein, 431 aa, unidentified
MSGPLVLVPVCNAIVGIDLADNKQMVVVTDHDSKVLARRTFRCRAWDLGLALDWAGHQASKAGFAGVTVACEPTGHRWRVLGQLAADRGMAFVCVQTLLTSWARRSEDLTFDKTDEKDAVLIARLTAQLRCYVPEPLDERWGRLRHLGARRERLLAETVGQVQQIRDLLECVWPASLDTAKQPFRSRTWLAGMSVILARTDGDPARLRRLGPARFEAAVRREVVARQGKRPCLRIARLLFVAAADPRGVTIHRPGALERAQLLLDDFRDTQRRLGEAEARMVAVLDELQLSELVCSIVGLSALGGATILAETGDLTRFASARAVVKHSGLAPREKSSGTFTGRTKLTGQGRPGLRAAAWRAVWGAQKANPVYAAKFTHLTSRTENKLNRGQAHAAIAAALLRQLYAVVTTGQKWDAAIAAGGRCEVIEPAA

SEQ ID NO: 121093 - protein, 294 aa, unidentified
MDRQYVGIDFHRRRSVIVRLSSAGERLAIHRVDNDPFQFSAVLAEAGPAPAVVVEATYGWYWVVDLLQELGATVYLANPNALNWGERRVKNDVVDATDLADMLRLGRLPQAWIAPSALRELRELVRYRAKLVQLRSGLKAQVHAVLAKEGVTTESLDMFCQRHDRGYQAVQAITGIGRTIAAILVAEIGDVSRFPSAAHLCSWAGLTPRHRESDLKTRRGRISKQGSKLLRWALIEGISRYHGGAVLAAQHRKLAERRGANKSRIATARKVLPLAYYGLRHGEIRCLVPARQAP

SEQ ID NO: 121094 - protein, 364 aa, unidentified
MDPALPAGRNVGRGLQRGRIIMQVVRIGLDLAKYVFEVHGVDGQGNVVIRKTLRRGSVSTFFANLPPCLVGMEASNGAHYWARVLTELGHKVRLISPQFVAPYVKSNKNDRNDAEAICEAVGRPTMRFVPPKSPEQLAIQALHRIRQRLVRSRTKLVNQIRGILAEHGIVIARDIWRLRRALAEITGDVPDDLNALVGVLMLEAHAELIELDRRIASCDRRIRELYRTSELCQRLGEIAGIGPVTATALVAAVGDRSCFKNGRQFAAWLGLVPKQRSSGGRHRLFGISKRGDRYLRTLMIHGARAALGKAGGKQDPRSRWLASLRQRRHANVAAVALANKNARIVWAMLAGNVSYEPERTVQAA

SEQ ID NO: 121095 - protein, 378 aa, unidentified
MDRATNSTAPADRLFCAVELSKNSWLLGIQFPDRQKASVYPIKGGDSEGLMAKLFAACDRWTKVSGKKPSIIVCYEAGYDAFWLARFLKARGIECLVVDSGSMQVNRRSRRAKTDRIDLAKLLRALIAWCGGEQHVWSVVRTPTVDEEDLRRSHRERSRLITERTAHVNRIKGLLFAQGIRGINVKARYKTLRIDKLVTGEGRSLPPRLAREIKREIDRLELVQQQIAAIEQERDESPTTCKETEKKRAQLLLLKGIGPTGSAVMAREVYYRQFSNRRQIAGFLGLATSPYDSGQVERSQGISRAGSGPVRATMIQIAWLWIKYQPKSEITRWFVQRTADQSGRIKRIMIVAVARKLAIALWRYLEQGLVPQGAALTR

SEQ ID NO: 121096 - protein, 296 aa, unidentified
MKHYAGLDLSMETTHVCVVDVDGRKIGAQCVDSTPEAIATALEQYGPIERAVIETGRMTPSIALGLRELGVAIVCIDARQAHQSLKAMRANKTDPHDAAGLAQLARTGFYKEVHVKSPAAHGVRSVITARGHLVEARVRLDNTIRGLCATFGIRLGVGQGERFLSRMQVAASVPGLGEAVASLLRARERLVVEIGQLDRQLKAISTASPICQALMSIPGVGVQTSAAFAAAVDDASRFKRSRTAGAYFGLVPRRHQSGELDWTGRITRQGDKLRVRCAPAIAAQGNRSGCEATPRS

SEQ ID NO: 121097 - protein, 340 aa, unidentified
MDMTTLGIDIAKSVFQLHGIDADGAVVVQKKLRRGAVLNFLGKVGPCLIGMEACATSHYWAREIAALGHEVRLIPPTYVKPYVKRQKNDAADAEAICEAVTRPNMRFVPIKTEEQQSVLVLHRARDLLMRQRTMILNAIRGHLAEFGIIAAQGPRQVMGMIAQLRDDGDASLPEIARSALLALGAHLEALAGEIRALERQLIVRHRADPTSQRLETIPGVGLITATALAASVSDPSVFKSGREFAAFLGLVPRQNSSGGKDRLGRISKMGDRYLRKLLVVGATSVIRRAGSNPTKTGTWVRSLMERKPARVVTVAMANKTARIAWAVMTRGEAYRASPIA

SEQ ID NO: 121098 - protein, 385 aa, unidentified
MIDAVIERCAGIDVGKRFLVVCVMTGPLDAEPKTEIRKFGTIVAELERLRDWLMAERCSHAVMESTGSYWKPVFNILEDGIQVILANAYDVQNRRGHKTDPNDSRWLAHLLRHGMIRSSFIPERPIRELRDLTRRRRQLVQEAARERNRVQRVLEEANVKLGDVLSDVLGLSGRLMINALLEGVLAAEEIAQLAQRKAKQKIPDLIAALRRHRLTDHHRFLLRHALRHIDFLEKEIEVLNVEIRSRLDAEQFRQAHALLQSIPGIKEDASAAILAEVGPDMAQFPSSSHLASWAGLCPGNHESAGVRKTGRTNRGNKWLRSVLTQCAWAASNKKNSALQSFYSRLSSGSRRKRAIVALGHRLLRIIHGVLLHLQPYREPWKPVRT

SEQ ID NO: 121099 - protein, 369 aa, unidentified
MVYFVCPEQKHTQRRLAMAKGTKLDFTGQHIYIGMDIHKKSWSVSIYTEHFEHKTFTQPPEVKKLTNYLQRNFPGATYHCVYEAGFSGFWIHDRLTEEGIHCMVVNPADVPTKHKEKTGKADKVDCRKLARNLRSGDIKGIYVPSRVQAEDRHLIRTRQSMVRKQTRCKNQIKAILFFYGILIPEEGHWSRNFINWIETIRMERASGDLALKVHLEELNYLRQIIAGLNKAIRALSRTDTYRDKVLLLRTVPGISTLTAMTLLTELCDISRFSSLDKLASYAGLVPDIKSSGETEYTSGITHRRNPALRAVLIEASWVAARKDPALIIAFHKFSLRMKKTAAIVHIARKLLNRVRFVLINQERYVPAVV

SEQ ID NO: 121100 - protein, 370 aa, unidentified
MGSIAFIGMDVHKATIAVAVAEGSRTGEVRQLGTFPNRAEVIARLVRRLASDGRELRFCYEAGPCGYGLQRQIEGLGHGCEVVAPSLIPTRPGDRVKTDRRDALALARLHRAGELTPVWVPDAAHEAMRDLVRARATAVRVLGKARQHLQGFLLRHGRIHGGRTTWTVAYRRWLTTLRFEHPAQQIVLQDYIHAVQDAEQRVLLLIEQIGALLPSWSLAPVVQALQAMRGVGQIVAVTVAAEVGDFSRFANPRQLMAYLGLVPSERSSGSTTRRGGITKAGNALARRVLVEGAWTYRMQARVSRKLHDRIEPLPSTIRDIAWKAQLRLCGRHRHLVAAGKTKVVVTTAIAREMVGFIWAIARQVQLQPAS

SEQ ID NO: 121101 - protein, 415 aa, unidentified
MRVLLFIGDDWAEDHHDIELEDETGRRLAKVRLPEGLEGIARLHALVAQHAPAGWADLPSEEVAARVVVGIETDRGPWATALRAAGYLVFAINPLSSARYRERYSTSGAESDAGDAHVLAEIVRLDRDHHRQIAGDTDLVDAVKVVARAHQTAVWERTRQVLRMRSTLLEYFPAAVEAFEDLSAKDSLLLLARAPSPARVGKLTRSQVVSALRAARRHHIEAKADALLTVLRAPGLRQPTTTEAAYAAVVVGQVGIITALNVQITQLEEVVDEHFGRHPAADIHLSQPGLGVVLAARVLGEFGDDKNRFHDVRARKNYSGQSPITRASGKKTIVMARYATNRRLGDALHQQAFSALTASPGARAYYDALKARKIGHHAALRQLANRLVGILHGCLKTGTKYDETIAWQYQNIAAA

SEQ ID NO: 121102 - protein, 330 aa, unidentified
MGVVGVDVAAESVEVVARQGGRNGKAKRFAQNPKGHRRLISYLQRLAPERVVLEATGVYFLDLALALHYAGLPVCVINPRSFKHFAELKLTGSKTDPIDAALLAEYAECLHPPLWQPPREAALALRELGRQVNRLVGERTAAKNRLHALSATKTTPALVIDDERQGITALEQRIDRLRAAALEQIHNDAVLQAQFRALIAAKGVGEVSAIAILAELCALPEYLKAKQLARHAGLDVRLTHSGSSVSRPGRLSKAGNAYLRAALFLPAMSAIRHDPYARAFYEALVARGRKRLQAICAVMRKYLTGLWACFRTQQPFDSSQLFSDIHMQKT

SEQ ID NO: 121103 - protein, 316 aa, unidentified
MTQTITTAGIDTSKAKLDVAIYGRSERWQVSNQPGGWRRLASELHKGGVRRVGIEASGGYERGVIAELRERGFTVLVLQPIQVRAYARVHLRRAKNDALDAILIAACAASVKPPTIEADERLEKLADHLTYVEQVEEDIARLKVRLEHVADPRLRRIVMADIGRLKARRAAELLRIVNQLRAYDDLARRLHLVLSVPGIGERTALALIIRMPELGRVSREQAAALAGLAPYDNDSGIYKGQRRIAGGRHRLRRSLFAAALPAAFRWNTALIALYARLTARGKAHNAALVACARKLLIYANTVLQRGTPWLEKPAAT

SEQ ID NO: 121104 - protein, 350 aa, unidentified
MAIVGAFDIHRSQLTFEYLDDRTGELSRGRVAPADREHLREFLARFRRYRNVDFAMEGCTGWRYVAEELAGVGATAHVAEPADAAALRGKKRRAKTDRTDAAHLRDLLVSGRLPESWIPPECVLEARAKVRLYKDLSEERTRWNQRVHASLFHLGVPVIAGGLATGAGREAISRADLPPAVAQAVRVGMEAIDQRGAQINGLRSELVGIARSQPAARALHEQLFGVGPLISVFIWAEMGDTRRFRSSADKLRHAGLDITVYSSDDHRAPGHLARQGPAALRWALYEAAKSAARAASPDHAYYASVRARQGAHRATLSVARKLARRSHHILRGLGDDVLADWAIAAAKRAA

SEQ ID NO: 121105 - protein, 337 aa, unidentified
MYQHYLGVDLHRHRSYVVLMDSQGNISDQRRLPNDAMPDYVTQLPESTFAVLEATGNWSFMYDILEAGTDEVVLAHPKRVRAIAAAKVKTDKIDATILAHLARADLLPLAYAPPVEIRELRDLVRHRSKLVRERTRHKNRIHTILSRYNLHSPCTDLFGKKGRAFLDEIRNHLSSIHQIMLDDYLGLIAGLNERIKSVNRVIRAWAKDDPRAQLLISMPGIGIYSAAVIVADIGDIKRFDSPKQLCSYAGLVPSTRSSDTRVRHGRITKEGSPWLRWIMVSAAQRSSNTSPRLASFHKRILERHGKKTARVALARKMLSIVYYMLLHRRPYQERQQG

SEQ ID NO: 121106 - protein, 340 aa, unidentified
MTVIIGIDPHKASHTAVAIDCDEHSLAEIKVRATCQQTEKLLAWAKPLGPRTWAVESAGGMGYLLSQQLVSAGEDVLDVPATLASRIRVLGTGRSNKNDPNDALSVAIAALRSPGLRSVRVADHGELLRLLAKRNHEIGRLRNIIVSRLHAALQNLSPGGIAKELNASDAVALLGAYEPVTPVEHTRYYLAVELLEDVKRLDVQLKASHKRIKVAVQASGTTLTDLYGVGPILACELIGYTGDVRRFTNRDQFASYAGVAPIELSSGGRTVHRLSRRGNRQLNHAIHMVAICQIRQTDSEGRIYFEKKVAEGKTKREAIRSLKRHVANSVYRQLLADATK

SEQ ID NO: 121107 - protein, 389 aa, unidentified
MYYPTLREDLTSIKLFVGIDVDDTAFHGYAIASDENEGVEFKTRPSASSLIKTLKKIRRAEHQMRVCYEAGYLGYSLQRELKKHGILCEVIAPTLIPKPAGKTVKTDRIDARSLAIYYKKGLLIPVHIPTQTQEALRDLLRSRHFVKKQTVRIRHHLLSHTRRMGLHYRQETNNPDGAYWTKKHLSWLNTRMGHKYAPGIEIKLSLLLKRLESLNNEADTYDDEIRKISQASEYKDSIQALVCYRGINVLSAATLVTEIGDIRRFAHPRYLTSYCGMDIREYSSGGKEKKFHMSRFGNRYIRTTVVEACQCVASAPLISQSLKQRRQNAPKEFIDIADRCMQRLHKKARHLLYKSKPKNKVKAACARELLGFIWESLMLASKVPPIYKT

SEQ ID NO: 121108 - protein, 349 aa, unidentified
MVMLADQVDAVIGVDTHKHTHTAAVVTPTGGLVADVTITTDAFGAKRVLAFAREHAPGRRVWAIEGSGSYGSGLTTFLLEQGEWVVEIDRPARPARRNGAKSDELDALRAAREALSREHLAQPRRRGDREAIRVLVCTREGAVLTRTRAITHLHGLVVNAPEGIRNQLRKLTTDELLERCARLRTGPSQTVEHRTTITALRSTARRALACEAEAGDLESALELIVERVAPELLAQPGVGVMSAARILNAWSHPGRIRTEAAFAQLAGVSPIPASSGQTVRHRLNRSGDRQLNRAMHTIVLSRLQHDPETRAYADRRRAEGRTDREIKRCLKRFVARGLFRLLERPAEVA

SEQ ID NO: 121109 - protein, 326 aa, unidentified
MGEDDTMSSELFIGIDVSKDHLDIAVRPTAQCLTFENTDTGVDELIRTLLEFSPTLIVMEATGRYHQLALGRLVAANLPAIAINPRQSRDFARALGRLAKTDRIDAALLAEFADKVRPVLRSIPNSDTQELEALSTRRRQLMTMLIAEQNRHHSAPRSLRPGIKKHIHWLEKELEQSDKELKNRIRSSPAWREKEDLLSSCKGIGPVTTHSMLAYLPELGTFNRRQIAAIVGIAPFNNDSGKYRGRRSISGGRRQLRSVLYMAALVATRHNPTIRVFYQRLIAAGKLPKVAIVACMRKLLTMLNSMVRHNTPWRADYLLDRQDSLS

SEQ ID NO: 121110 - protein, 353 aa, unidentified
MDLNFGWEIDMTINMLGIDIAKNTFQLHGADSSGNAVHKKRLARRELAAHVANLPACTVVMEACGGANYWARVFQRSGHSVKLISPQFVKPFVKTNKNDANDALAIVEAASRPSMHFVPIKQVEQQDIQSIHRIRTRIVKNRTALINEIRGLCLEYGVVLIPGAARVKSSLCVAIADGDNELTPSSRESLQGLYEELVDVEARVKNLNTKIRQLCRQNENCQRILKIPGVGELTATAIVAAVPDPGEFRNGRHMSAWLGLVPRQSSSGDKQTLLGISKRGDRYLRTLLIHGARSVLSHYKDRDNDYTRWVGRKKATLSHNKAAVALANKNARIIWSMLRSGEEFNYGVQTAAA

SEQ ID NO: 121111 - protein, 312 aa, unidentified
MNDLLERCIGLDIHKESVVACLLAGPLDCVVEKEFRTFGTLSEDLQELRRWVDEADCRHIAMESTGIYWQPVYEALEDCFGGEIEILVVNARHMRNVPGKKTDMRDAEWIATLLRAGLVNGSFIPAKDIRELRHLTRYRKSIISDITSQKNRIEKFLQSSGFRLSSFMSDIFGASGRNVMHHLCQHGAITMEALDGCLKTQTRKRIKEIMSSVNGTLSDHQRSFLSMMLSHLEILGCHRTEVEDAISAEIEKHSGALSLLCSIPGIGVTAAAAIISEIGTDMGRFPTAQHLCSWAGLAPGNNESAGKKKQYP

SEQ ID NO: 121112 - protein, 340 aa, unidentified
MLYCGVDLHAKSSNFCLVNRRGKRMAEGLVPSSRQGFTTLMASGKGEEIRVVLEASTRSRWAAGALERLGAEVIVVDPRKVRVIAETKHKTDRTDARILADLLRTEALPPALWRVPLATRELREQIRLRWGLVRQRASLMLRARSMLASVGVSLSKRALARDTTWDRILKRREVTPPMKRLLEILRQSAEALSSAITEVESEYAARLKDPDVQRLQGIPGVGPVVALTTLASLGDPRRFRDSRAAAAYTGLTPSERSSGGNQRRGHITKEGPSELRRVWIQAAHAALRMRNHPLKAWAQKLIYRRGRAVAVVALARRMFRWAFALWRDGKSFDARLVTAS

SEQ ID NO: 121113 - protein, 362 aa, unidentified
MLPTSISVKGIDLHTNRFNVSHLTTMDGKEKRATYDIRTDLEAFIKTLNPEDVVIMEASTNTFAFAHLIRPRVKKVHVVNAMDFKIIHDTKKKTDRIDALKLARGGHYHECVDPHHLPLVTIPDKKIMELRSLFTTYKKVTAHITAILNRIHSILKGCLKPYNDENIQSKRIRAEIRDLDIGIAYKLQIQMLYDQLDLLVKHKENLAEAITDYAGHYIEEIKIIISISGISILTALALKADYIDISRFANQKKFCSYLRTAPKVDKSNNTTRILGLNKNSRKLSLSLVMQGLSHFYRNNVGLTAYRNSKMKGKHIAKVRIAMARKLLTILYFMLTRKELYRNRDPYTYSKKLEVLEKLSLAA

SEQ ID NO: 121114 - protein, 422 aa, unidentified
MSYCPVAGIDVSKRFSDMCILSPDNKIFAQEKIYHDETSINRANALLQKAERLFFSKPVIVMESTSHYHLILFQFFSEHGYDVIVVNPLQSNSMKDFSIRKRKTDRVDAFKLAMMYRTKTLRPSQIPQTATRALRQLCRHRAELLNDVSSYKNRLTALLDQTFPGYDKVFSDVGGVTSCAVLVRFPTPTILLVEEESELVEVIAATSKSGYSFAKKKAGLLISAAQKAQTLGIHSCADETLIVCTIQMLRTLSESVLQIETAIDNLLAQIKEMRNNVSLLQSIPGIGSHSAALLLGEIGDISLFKKPKQLAAYFGLDPTERQSGSFRGTKNKLSKRGSSYARAALHMGIVNSICKRGKDSAANPVLLSYYEKKCKNKPAKVAQAASMHKLVFIIFAVLRDQKPFELKTPEQHAVEQGFVKAA

SEQ ID NO: 121115 - protein, 443 aa, unidentified
MQQPVEVHVEEHESIVERVAAVDVAKASGMVCLRTPHEMIPGRRVTKIWPVAATTAALVELGDHLRCERVTRVVLESTSDYWRPFYYLLEAAGLTVWLVNAAQVKNVPGRPKTDKLDAVWLAKLAERSMLSPSLVPTEPMRQVRDLARARFDLVEDRTRVKQRIEKLLEDALIKISSVLTDVLGVSGRTMIEALIAGQRNPTVLAELARGRARRNRATLQRALHGRFTDHHARLTRLLLGQLDELSARIDEVTGLLDAAIRALPTPAADAQDNPAPAGYDSAVARLCAVPGGGPDSVRAVLGEIGLDMRVFGTSARLCSWARVAPRTVQSGRKTGRARTGKGNPYLKSALAQIATGAAKTDTFLGERYRRLIKRMPKAKALVALQRSILVIFFHLLADPTAEFTDLGSDFFAKRIDRARRTTHLLRQLHALGYQVQLTETAAA

SEQ ID NO: 121116 - protein, 322 aa, unidentified
MFKYTGIDISKETFDCCIDDGSRVQHVKLKNDFNGFEKLKNLLPPHAHVVMEASGPYYYRLAFFLYRNNIKVSVINPLVIRRFCQMRMTRTKTDKKDAVMIREYALMENPGEWTPDSPVITQLKQLNGAIDLIEKNITAMSNQLSAFKQMPNADTQTLEQMETLLQITINTKLKLEKQMDQVAKKHFNQTYKTLLTIPGIGPKAAVLLIAITGNFEKFNDYRQLVAYIGLNPNIFESGSSVKGKGHISKLGTARLRKVLYLCSWSAKRYNEQCKEMADRLKQKCKPNKVINVAIASKLIRQAFAIGKSGQEYQQNYQPKFAF

SEQ ID NO: 121117 - protein, 458 aa, unidentified
MPKKSSKKAKSQRSRERALLEKVHLNAAGIDVGADTHWVAVPEDRDENPVRSFGVFTSDLIALCDWLKQCQIETVAMESTGVYWIPLFQVLERNGFEVRLVNASHAKNVPGRKTDVKDCQWLQQLHTFGMLRGSFRPEGQMCVVRSYLRLRDTLSKDCNSLVQRMQKALTEMNIQIHRVISDITGMTGMSILRAILAGERDCIKLAQMKHPQIKSSAQDIAKALEGDYRQEHLFALQTALELYDSYQFKIMECDQHVEKALAAFEPKVRVSAPDLSRLRSAEKRQEAVRRHHLEEMTGADLTKLPGLELLAVQRILSEIGLDMSRWPSEKHFCAWLNVAPNNRISGGKILSSKPRKNANRAAAALRLAAQSAMQSKTAIGAFIRRIKSRLGAPTAINAGAHKLARLLYRMLKFGKAYVETGQEVYEKFFKERTLRNLQRKARELGFNVTPMSSTALVS

SEQ ID NO: 121118 - protein, 505 aa, unidentified
MTAPTTRRQPASSAPPSGKPAQAQAQRQAYDRRKTRAQAKSEALRQQEAAQVQALPVLRPHAAGIDIGSRSHWVCIGFTTEADSGWVKEFPAHTDGLKAIVAFLREHQVTTIALESTGIYWIPLYELLQAEGFEVLLVDPSYSHQLRGRPKTDRRDCQWIYRLHSVGLLAAAFRPDDKTCQLRAYLRQRANVVRQASKHVQHMQKALEQMNLKLTEILSDITGVTGRSILRAILRGTRAPEKLAKYRDKQCKASEAEIAQALTGSYREEHLFELKQAYEAWQFSLGQVAKVDEQIALQLGRMKCDRALPPLKPKARPKRRVNSPGFDVRTALYYVVGLDLTEIEGISELTALTLISEIGPGVSQFATVKKFCSWLGLCPNWKKTGGRVKSSRTRRGVNRAAQALRLAAQSLHHSQGALGGFLRRMKGRLGTQAAVTATAHKLARIVYLALKHGMTYVRQSQEEYEAQMKEKQIKALRRKARQLGLEVVEKTSGSVPTAAAASVQG

SEQ ID NO: 121119 - protein, 347 aa, unidentified
MRHCGLDVHSKRTTVVWMDDDTGEIGRACSMPNDELVAFLQSLPELKQVVMEAGSTSAFLKRQFDTCQIPAIVVDAHKARRLLEAINALAKSDKVDAKGLALLSVRGWIEQISVWVADTRTQRLRVLTRSRERWSKVSNITRNGIRATIRGEGLMCSATDLTGPTAKAWLDDIETRLDPLTRQILQQDRQMLDRIMENIAVIDILMADIATEDERCRQLDTIAGCGLVTAAAVVAEVGDIARFANAKALRRYAGLTPKIEQSGERTITGKLVCHCNKHLRRALVIIAQCFVKSARVTGTRMRSHYYQCVFRHGPNPAKVDLARRLCDVIFAMLRDGTDFDPGRLAVA

SEQ ID NO: 121120 - protein, 313 aa, unidentified
MTTMIAAGIDVGRDSLDVAIAPTGRSFRAPNVPQGVHVVVDRLKRAGVSHVVLESIGAYAQRLVRALADAGFAVGVVDPKRIRALRLAEGKRAKTDRLDARLIARFALLMSDAARPIPDANALRLRALSTRRRQLVEIAAMEKTRLKQALDPEIIDSINATLAALAAERARVERQLEACARLHPDGERRRQLLITAPGVGPAVAITLLADLPELGTLNRKAVASLAGLAPQADESGTRKGHAHIAGGRPCVRTALYMAALAAVRCDPALKARYQAMRATGKPAKVALIAIARHLLLALNAMLAEDRPWITKPQ

SEQ ID NO: 121121 - protein, 353 aa, unidentified
MRRYLGGDVHSTTCTFAQVSASGKRLRQDVIETSGQALVEYIRSVPGEVFLCIEEGELSQWLYELLASEVAEMAVIRAEKKRGSKSDRLDAFGLGRKIWKGDLERAVYKSARSPFRALREHARVYGMLRQDLVRTKNRLKHFYRSRGLGKLGDAVYDPKQRSRVLSRLPAWHRGALEPLYTELDHLEALRAAAERAMVRESHRHPIARILETAPGLGPVRVAELLPIVITPHRFRTARQLWQYAGLGIVTRSSNDWIPRPGGGFVRGPVVQTRGLTPEYNRRLKGILKGAATTVIQHTKDEPLREDYARLLANGTKPNLAKLTIARKVAAIVLAIWKREESYQPDVYRRSRAA

SEQ ID NO: 121122 - protein, 452 aa, unidentified
MAHKRKTKVQSIRPVINPHAAGADIGAREIYVAVPTELTSEPVRCFPTFTEDLRTLVQWLQSFGIKTLAMEATSVYWIPLAELLEEAKIEVCLVNPRHVKNVPGRKSDVMDCQWLQYLHSVGLLRGAFRPAAEVRGVRALWRQRDALVRHCGWHIQHIHKALDQMNLQIHHVIADITGLSGLAIVEAILQGERDPVKLAALGDDRLKATKATLRKALTGDYRTEHLFCLRQSHAGYLFLTQQIAELEAEIEKRLAQMAPKPAAEPNADRPKAKAAVQRAGNAPALLERLFGVDLCTVPGFSAGTVHTLWAELGADLSAFPTAKHFCSWLSLCPDNRISGGKILSVATRHTSNRVAKALRLAAQALWRAKNELGEYYRRMRAKLGGAAAVTAVAHKLARIFFVMVKTKAPYDPTPHQTGSLVHRERTLARIRSKAKELGFQIVPIPQSAECVS

SEQ ID NO: 121123 - protein, 350 aa, unidentified
MLIGVDYHPSFQTIAFFVEETGECGEQELNHSDGQAEKFYRDLKQRGICVRVGMEATGYSRWFERLLAELGFELWIGDPAEIKAKRVKKQKFDREDARLLLRLLRENNFPQIWVPGPENRDLRQLLWHRHRLVQMRTRIMNQLHALAMNEGYRWKKKLFSEQGRAQLEKLALAPWASRRRQELLELLDRMNPTIEELTAAVEREARKRPEAMRLMTHPGVGPLTALAYVLIIGTPTRFQRGKQIGTYVGMIPCEESSARKQRLGHISKQGNSLLRFLLVEAAQAAARIHPDWRRRYMHLAMRRHKSIAKVAMGRRLAVRLYWMWRNGCEYSQSLEFGSYAGQLGTGDGVK

SEQ ID NO: 121124 - protein, 402 aa, unidentified
MLRVACGVDVHRDGFVATILTNKGCETKKFEKNLKGIEVFKAWLRMKKCKAVVMESTGVYWIPLYAGLEGEFDVRLANAQRTRKVPGRKTDQSDSEWLAYLLRGGLIEACYVPDRKVRVLRELTRLRTKMVQNRTDYKNRVHKVLQRCNIRLGSKIRTVFGKAGLEVLKGLMGGKSLDEIVSQSRSRVLRERKDELEMVVRGGLDEEDIFVLKRCLRMIEHLDEEIREVDGRIAMLLGGWKDDAKRISGVPGVAQVSAPAILAEIGDAKRFENGKKIASWAGLCPSVYQTAEKNLTGRVKMGSKHLRRMMVQVAHAATRARGSRLRRFYLRVAARRGKKKAIVALARKILVIIHHLLVNGEDYVEEGFMKVPRLRFKALARVPLEEMVEVLREAGYVVWAPG

SEQ ID NO: 121125 - protein, 387 aa, unidentified
MPQPNDLSRSLVALDQNSTIIAVVELSQSSWLVGGMLPGIERQPRKKLEPSPERLLALLHRWRDEAVKAGRTITRIALAFEAGRDGFWLARWLEARGVEAHVIHPSSVAVSREHRRAKTDRLDTELLKRGFLGWLRGERGHCSMVRVPTLAEEDAKRPNRERECLVKERTRLVNRMKGTLARLGIRNFRPTLRKAAEHLAALYTPEGSPLPPNVSAELERDIARLGVVIGQIKQIEVARRRRLEEQPKSRPHAMVRLLVRVVGIGTETADMLVNEVLSRPMRDRRAVARYAGLTGAPDESGAKRREQGLAKAGNARVRRGMIPLAWRFLRFQKDSALARWYQARTADRRAGTRKTMIVALARKLLIALWRFVTTGETLEGVVLRPAG

SEQ ID NO: 121126 - protein, 326 aa, unidentified
MHYVGIDVSKAKLDCCWLRDVEKNKVKTKVFKNTLADHDALCGWLKAQTKADPADIRVVIEATGIYHESLAYALYDAGFQICVVNPARTHEFSNSLGSVHKTDAKDSLMLAQYSCRMQPERWQPEAEEIRELKALIARLEALEADLQRETNRLEKAEFNRTSERVIESLTLMIERLQEEKARLEKDIDDHIDRHPQLKKDRELMASIPGVGDVVSRMMLSLIHSRSFNNARQVSAFVGLIPRIQESGQWKGRSRLSKQGPSRIRAKLYMASVVCVQWNPDIKAQYQRLLANGKSKMQALGAAMRKLVQICFGVVKHQSEYRSQVPI

SEQ ID NO: 121127 - protein, 357 aa, unidentified
MDYGAIDLHKKESQIRIVTKSGEVIDQRIATTRERLSHVFWARPRMRILVEASTESEWVAQQLEEMGHEVIVADPNYGPMYGHRSRRIKTDRRDVVALTEACQHGTYRLAHRRSARQHEVQCRLNVRQELTQARTRAISLARGITRAAGLRIRSGRTETFLDRLFALDLSPSMKTTLSPLRSVIEILDDELANADAQFEALVVADPIVKRLTTLPGIGPITASAFVAALDVVSRFERAGQVTSYLGLVPQEYSSGEKQRRGRVVRSAHPHLQSLLVQAAWRVWRVSDPRTEHFRTWTHAIARRRGKKVAMVALGRRLARTLFAMWRDQTEYQPERDRSRRSTVVTERTADTDIAASV

SEQ ID NO: 121128 - protein, 317 aa, unidentified
MENSLQSTWIGVDVAKHHWDVVVAGQTQVHHFPADQEGCQQLQQFLAQHQVTHACLEATGGYERMLADFLREQGIVVSIANPRQIRDFARTQGQLAKTDRLDALVIARYAVLMQPKKTKKPSENERKLGSLRTRRQQVSDALTREKNRLGTQHDDLVRQSIEEAIDFYQRQLEQLDQQIQQLLQADDQFRERSALLTSVPGVGATTAAALIAHLPELGSLNRGEASRLAGLAPINRDSGTLRGKRMIGGGRAVVRKMLYMPTLVATKHNRVIREHYQQLLQRGKAKMIALTACMRKLLLILNAMIKTNSTWNDPRET

SEQ ID NO: 121129 - protein, 414 aa, unidentified
MSPLPEQSFTAYVGIDWADTKHDICLQAAGDTRREFCCIRHQAAAIDEWANTLYRRFGGPLAVALELWKGPIVAALQKYEFLVLFPINPTTLAKYREAFQPSGAKNDPKDAELALDLLLHHPERFDPLKPQSVAMRTLVSLVERRRQLVGDQNRLCDTLKQYYPQALEWFDDRGTVLFCDFLARWPTLRSVRQARTATLEAFFHAHHCRSASRISARIRSIRGAAPLTDDVAIIGPCRLYVLALVSQLRAVLAAIAQFEHEIAAVAPTLPDYALFRNLPGAGEQLAPRLLAAFGEQRERFRSADELQKYVGIAPVTERSGKKSWVHWRLQCPKFLRQTFVEWAAQTIPRSFWAGAYYRQQRAKGSSHHIAVRALAFKWIRILYRCWQTRTPYNETMYLNVLRKRGSRLLGTLGA

SEQ ID NO: 121130 - protein, 310 aa, unidentified
MREEKYVGVDVAKAHLDVCVLPEGESWRTSNDESGIAELSGRLQSLEPEGIVLEATGGLEQALVASLMAADLPVVVINPRQVRDFARATGRLAKTDKIDAAVLAHFGQVVRPELRPLPDEASQALKGLVARRHQIQEMLTAEKIRRHMAKDRIRSSIDANIEWLKRLLKDIEDELDKTIRSSPVWREKDDLLRSVPGIGRVVSSVFVSRLPELGRAARRKVSALVGVAPFNRDSGLMRGRRTIWGGRADVRVALYQATLVAIRHNALIKAFYQRLLAAGKPKKVALVACMRKLLGIVNAMLRTGQPWQPA

SEQ ID NO: 121131 - protein, 364 aa, unidentified
MRKTTKIVALDQHMESMTVALLGSRQRTPVIYGNIANTPAAVAKLARGLDDGKTRLRFCYEAGPCGYGVFRQLTQMGHECTVVAPSMIPRRPGERIKTDRRDAASLARLHRLGERTPVWVPDEEQEAIRDLVRCREDAKHAQRRVKQRLNSFLLRHGRVHGGRSRWTQAHFRWLEQQSFDHPAQQIAFEEYVDAVKDAGQRVAQLETEMSRALDGWSLEPVVRGVDLIVAMTVMSELGDLTRFDSPAQLMAYVGLVPSEHSSGRSRRQGAITRTGNGHVRRVLAQSAWCYNHPARKTAALQRKAEKTSLAVQDIAWKAQKRLCHRFYSMMARGKTPCKVATAVGRELLGFIWAIACETMPRQAA

SEQ ID NO: 121132 - protein, 338 aa, unidentified
MINKKIYWMGCDLGKQSFTVALARPDRPNEKWANLPHAEFAHTPKGVTALLAWLQEQHASQQLAGVCVEATGCYTRQWLRLLGERLGGVSVVNPIGPKRFKELLRIREKSDRVDAAACALFGVSRQPEPTPLAQGTQQKLRELYRLFLRLQTERDAHKNRLECAPEEKTARSVLRTMLKTLEREMRKLEDAMNALIQQDTSMHEDAQNAQSIPGVGPRTIQALFAEFGDLRQYTRNQLVALSGLYPREYSSGTSVYKKPRMAKGGGARIRKTLYMAAMSARRYNPHLRAFYQRLIDNGKRPMESLGAVMRKLLLLIRAVVISGAPYDPGFDTRKTIFP

SEQ ID NO: 121133 - protein, 538 aa, unidentified
MSEISTVGLDLAKNVFQVHAVDASGKVLLRRQLRRSAMAKFFAELPPCTVGMEACGSAHHWARVIGGYGHQVRLMPPAYVKPYVKRNKNDGRDAEAICEAVGRPTMRFVAVKSVEQQASLAVHSIRSLLVRQRTMIANSLRAALSELGIVAAQGIKGLQELIAKLQAPGEVPEPMRGALLLLAEHWQTLDADERELEQRIAKAARADREARRLMEVPGVGPIIASTVLAKVPDASLFRSGRDFAAWIGLTGRDHGTGGKHRPGRISKKGDRMLRALLISGASAVLRHQKKHGVSDPWLRELLARRPYKVVMVALAAKTARILWAMLAKGEAYRSAFGRAIEGVMAKMVRKPGSKHSASSSRVTARRNDWNSICDLHQGPRSQAASRGRIHDRSPIRSPQHQKALAEREPSIHDGSIGLVLIRQDRPEQDPALAVEFHHLELLVDAPVVGIGRHGHARERYVGHVVVDIRGLLHDIRAGQLIAALLQDLHQKRRGRIAIGRDAAVGILGGRVFGHEGLVTLHAGVIGPLRVERVLAVVD

SEQ ID NO: 121134 - protein, 343 aa, unidentified
MQVVTTVGFDIAKSVFQVHGIDTAGQVVIRRQLKRRYVLAFFEKLPPCLVGIEACASSHHWSRELKTLGHTVRLMPPAYVKPYVKRQKNDATDAEAICEAVTRANMRFVATKTPEQQSGLTLHRTRHLFIRQQTAVINVIRAHLAEFGIVAPVGRKGVEELLNVVTDASDKRLPVVARMCLAALGAQLRRLKEQILEFDRMIMAWHRSHETSRRLAAIPGVGPILATALVASVADPKAFRSGRNFSAWIGLVPKQHSSGGKDRLGSISKQGDRYLRSLFMAGALAVIRYARIHGTKRRPWLTALLARRPTKIAAIALANKMARMVWVMMARGERYKEPVALAA

SEQ ID NO: 121135 - protein, 382 aa, unidentified
MDVMHPRCAGLDVHKKTVVACVRCVGATGVAVSRTRSFGTTTAELTALADWLAEAGVTHVAMEATGVYWKPAWHRLEGRFELVLANARHLKRVPGRKTDVKDAEWIAQLLQHGLIAASFVPPRPIRELRDLTRERTQLIRHRAALANRLQKVLEDADIKLASVVTDVLGKTGRAILMALVAGQDDPAKLAELACGSLRKKRPQLREALRGSVSEHHRFLLRSLLDRVRQAEDMIERYSLRLGEVGAPFAAAAARLATIPGVSQKAAEVILAEVGDDMGRFPTAGHLASWAGMSPGNDVSAGKRRGGRTTKGSRWLRATLVQVAWSAGHTKATALGARYRRWAKRLGAKRAVVATAHKVLVLVYRLLTDETTYVEDHRPGLAA

SEQ ID NO: 121136 - protein, 401 aa, unidentified
MQVTRIGMDIAKQIFDLHRVDRRGKVTLRKTLRRERVLEFFAQLKPCEVGMEACAGAHYWHREISRLGHTVRLLSAHKVKPYVDGNKNNRHDAAAICEAMSRPSMRFVQPKTTAQQDLQTLHRARALLVRDLTALSNQVRGLLHEYGIVMRKGAAALRRVVPELLTGDDERITAVLKAVVAEQFERFKYLTLRIDRYDRQIGELCKQDQRCQRLLKVPGIGPLSATALVAAIGNGHEFKNGRHFSAYLGLVPGHSNTGDKTVMLPITKRGNRYLRTLLIHGGRSAVYAARRRSDPRSIWLNRLREISCYNVAAVALANKNARVAWAMLRYGEDYRASRAHRQSADLAAARSARPANRALAFASHRARPAGQRREHFSAPPSVQTKGGAKNAKAESKKARQD

SEQ ID NO: 121137 - protein, 419 aa, unidentified
MSFKILKNNCCGLDVHKTWIYACIGITDSFKRTEYKQARFSSFTKGLQELCLWLAKYNCIDVCMESTGKYWIPVFNVLEKNNIFVTLSHPKYTKPQKGNKTDRKDAKWICDLYMCGMVKPSFIPPADIRQLRDLVRYRFKLTCMITGEKNRAHNCLTVSNLKLDDVFSDIFGKSSRSITEQILQHPGEVFDVAPFVDSRCKTPIEEIQAAVDGAISHEQAVKLRQCLKHIDELEMHKAEIEREIFRLSQKYESVLDLIRTIPGFDKNPLTAIQVLSEIGADMSVFPTAKNLVSWAGCCPRNDQSSRKIKSTRISRAGSYFKPVLVQIANALIKSKKHPEFTTRYRRIKARRGHKKAIIAICRMILTAIWHILTDLKPYTLEGFLESRPVNKEKVLTISQALNLIKQRGYIIKDDVGPVT

SEQ ID NO: 121138 - protein, 305 aa, unidentified
MISWVGIDISKSNLVVWVQPQGEGFEVSNLSEGFAELIKRLGCFKVGRVLLEATGGYERQVMAALQEANFNVLRINPRRARAFAVAMGKTAKTDPIDAAVLADFAEVLHGAREKRISPEREALRELIQLREHFVQQRDDNKRRLQQAQLPAVVTATQDHIRYLKTQIKALEKYITHSMLELDAEKANRLMSVKGIGMVAAASLLVYLPELGELDRREVAALAGIAPYNDDSGNHNGKRQIYGGRGRVRHALYMSSWVVIRYQADFKTRYEALRERGKSAKVALIACMRILLIRLNAMLRDGTEWR

SEQ ID NO: 121139 - protein, 404 aa, unidentified
MRVIGLDVSRTVGEIAYLEDGQLREGGRVVLRHDALERFAHGLRPSDEIVLEATGNTSAIVTALKPHVAKVVIANPLQVRLIAEARVKTDKIDAAILAQLYASGFLPQVWMPDSYTLALRRQVARRSQIVRHRTRLKNQIHAVLAAHLIPQCPAADLFGRKGRTWLAEQPLPMDERLAIEQRLRELDRLGEDLDAIDKLLCESVLHDEQLKRLLTITGVNCIVAIGLLAAVGDISRFASPEKLVSYFGLNPRVRQSGLQPAQHGHISKVGRAHARAMLVEAAWASANAPGPLRAFFLRIRGRRGQQIAAVATARKLAVITWHVLASHEDYEWARPALAAKKRRELELRAGLPVRKGHRGSAAEYSIKEVRDRERATAEMAERAYTRFVSSWKPNRPPSSMREAP

SEQ ID NO: 121140 - protein, 375 aa, unidentified
MIMSQTILFYQSFVGVDLHKTTVTLVAVAPDGTEIARLTINTKCREKIRAWLLALPRPSHLAVETVGFVEWFIDAFRPHVDHIDMADATELANRRGKRRKNDYKDALDVAQRLARGECPCGYIADDELMQLRKLGRHWRQLSSVLARSKQFMKSILLAANLRGPKFDGASAQRWLLAHGRRLKPAQRRAFANFTRIVQLVELQRQPLRFAIIEASRSERFEAKTKLLQSVPGIGEIWSCIIVAEIGPFDRFPNADALEFWAGMTADLKESAGRTQSGKITKAGSRTLRWALCSAALTLCHSDAGQEAIRRRLIRKNGGIKAKANTAMGRRLLRILFAMDRDGKPYKPVGPSRRRNSAANKARAAKRARKNRKEAA

SEQ ID NO: 121141 - protein, 411 aa, unidentified
MDIIYDKCCGIDVHKKLIVACFRCGKKQDVRNFGATTRELLELADWLKEGGCEMVAMESTASYWKPLYNILESSDLNAMVVNARHMKAVPGRKTDVKDAEWIADLLQYGLLQPSYIPDKDQRELRELVSYRKSLVGERTRELNRLQKMLEGANIKLSGTVSDINGKSARSILEYLLTGEFIDEAKYDEMYEKKIIAHNLKANKEQIIDDLNGVMSSLQRRMMKELLAHLDELNKHIKNLNDEIDNFMKPEEKQASQAIQDITGIGNTSAQAIISVIGTDMTRFPTDRHISSWAGLCPGNNESAGKRKSGKTRKGNSLLRTTLITCAHSAVRNRKSYFYAQFMRISAHRNPKRAYVAVAHSMLIAIYHILNEGVVFKDLGADYYNQFNKEHKINAYLKKLKALGWEVPVVAA

SEQ ID NO: 121142 - protein, 331 aa, unidentified
MKKVTQTIGIDVSKLTLDLTIRTTNVHKQFSNDTKGFKQIISWLIKKKINLDETLICFEHTGWYCLLLSYFLYDNNYSYCCVNALEIKRSMGLKRGKSDKADAWEIANYAWLRREELVPSTPPAKNLIELQRMMSLREQLVKQQTASKNLLKGMASIVQDDTNDVSMAILKDNINHLENQILNIEKAMNELIKQDETMINNYKLSKTVKGVGMVLAVQMLLHTHNYSRFESSRQFAAYCGLVPYPYQSGTSINGRNKIHPISDRKMKSLLSMSAISAIQHDKELKVYYQKRVEEGKPKMVVLNIIRNKIVSRVFATVNRGTPYVEINKFLA

SEQ ID NO: 121143 - protein, 429 aa, unidentified
MSYRIAGIDVHKKMLAVVVSDVEIESEYQFERRMFSSNPEQLRSLAAWLVEQKAEEIVMESTAQYWKPVWETLERYWKPLCEKREGARRRSGTLHLAQALSNRGRRGRKRDFVDAERLVKRLVARELTLSFVPDAEQRLWRTVTRKKYQLRRDMVRIHNQLEALLEEAHIKLSSLVSDLLGVSARRMLKALADGETNPAALAALAHERLRATPEQLCDALGACTELKPVYRRLLKMTLEHLQILEHQIGQLDQELATLLHPHQDAVQRLAEVPGFAVDSAQQIIAEVGPAAATFPSEKCLSSWVGACPGEEESAGVNYSHRSPKGNRHMRRLLNQTANAAVKAKGSIFEIIYRRCVPRLGHNQAIGVIAHRQCRLIWLILHQGTRYEERGPAVTKRSRYQRTWRMIRQLRQLGYRIESPNPQPSQAPAQ

SEQ ID NO: 121144 - protein, 388 aa, unidentified
MFKHSRLVIFLLLRMASFLIFINTLFNQKRKDAIMKEKNKQLDFTGIKLFIGIDVHKNSWTITIRTNEIALKTYSMNPSPKELYRHLQKYYPNAEYYSVYEAGFCGFWIHRELINFGINSMVTNPADVPTKHKERRRRRDKVDSRKLARELAKGSLDSIYTPTKEQEALKALSRRRYQIRKRTTQIKNRIKQFLYNRGFDIPQKSEISHWSGRFIHWLKSIKFDQPNDWYYLNSQLIDLENERKQMKNVLKTIRELPKNNSIIQYLKSVPGVGLITAFTFYAEIMDIKRFKNLDHLAAFIGLVPDIEASGEKTNIKGLTKRYQKYLRSLLIEAAWIASANDPALTLALSNLCKKKIKQKAIIKITKKLVNRLRSVWINQQEYVYAVVQ

SEQ ID NO: 121145 - protein, 320 aa, unidentified
MSATLVVVGIDVAKAQVDVAVLGAALDAPQFINEAEGHSALAAALIPLGVALVVMEATGGYEAALACALQAAGLAVAVVNPKQARDFAKSLGKLAKTDRTDGRMRGEFAAVLARRDDLAHFIRPLANSEQQALAALVTRRRQLLTMLLGERQRLQLAMALVRPSIEAMITAIRAQLDDVEAQMVDHVREHFAELDQLLQSASGIGPVASATIIAELPELGRLNRREIAALVGVAPMANDSGTSRGRRHVGGGRFEIRRVLYMATLSAARHNPSINAFYVRLLAAGKFPKVALVACMRKLLTILNAMVRYNKPWDQSLHNA

SEQ ID NO: 121146 - protein, 342 aa, unidentified
MQISTIGIDIGKNSVHFVGFDARGAIVVRRQCSRTQLIRALANLPPCLVGMEACCGAHHLGRMLAAQGHDVRLIPPQYVKPFVKSHKNDLLDAEAIGEAVQRPTMRFVPLKTMAQLDLQAIHRLRTRLVARRTAVINQLRGFLLERGVTCPIGREALFKRFPEVLDNPGLGLSVRFCRLLQQLRDEWRLLDDDIEDVDQEILSLARDDEACDRLMHVPGIGPLTATALVAAVGNGAAFAKGRDRAAWLGLVPRQHSTGGKTVLRGISKRGNAYLRRLFIHGARSVCRHHHQKPHRLGRWLTSLKARAHPNVVAVALANKLVRTAWAVLQRNAPYDGRLLANA

SEQ ID NO: 121147 - protein, 341 aa, unidentified
MAVAGGLDLHRGQLTFDYVDTGTGESWRGRICPADRESLRGWLRRFHGVPDVEFAVEGCTGWRYVAEELQRAGITPHLAEPAETAGLRGRKRRAKTDWADARHLRDLLLDGRIPESWIPPGHVLEARALVRLYKDLLEERTSWQQRVHATLFHQGIPVVPKLGTADGQQRLDAAELSAAGRRAVQAGLRQIERLTQEMASLRRELARLSSRQPGCRALRRAHYGIGGLLSVAVWAELGDCRRFSSSDDAVRHTGLDVTIYDSDGRRARGHIARQGPPVLRWALYEAALYASRPASPDYAYYCGVRDRIDGQRALLSVARKLARRCYHTLRDLGEDALAPAA

SEQ ID NO: 121148 - protein, 314 aa, unidentified
MASKSLDARIGQQGAAGSFANDAEGIAALGDFCRTHQAELVAMEATGGYEQQAFAQLSGQGLAVAILNPRAVRQFAQSMGSLEKTDRIDAGMIAWYAEVKKSPPVCLAPDNQQHLRALVTRLRQLTEVRSAQLNQQRLVTDRKVQASFKKLLTLLARQIGELEQSIAALLEKDPLWRQLDQAFRTIKGVADRTVARLMAEMPEIGTLSNKTISKLAGVAPLANDSGKHQGKRAVRGGRAAVREILFIVASVVGRHEPDFIAFRERLRAAGKPPKVVRIALAHKLLVRLNAKARQVRQAMAALEYGTVAVQIERA

SEQ ID NO: 121149 - protein, 381 aa, unidentified
MRQVCGLDVHKDSVFACIVNENGVVFHEKFGVLTPELEQLASVLQEHEVNEVCMESTSIYWMPVWRVLEPYVVELKLVNPYFIKQLPGKKSDVKDAEWIATCLLKDLIRGSYVPADIIQQLRQYDRRISDLNAECVCKLGKLDAALHRCNIRISNYVSTTDGKSYKDVVRLISEGIRDPAALLKVIHGRITNRVGKDVIQASLTGVISDTDIDVIRQLREEVDLAQRHKDECQSKMDAICQQYFPEQLKNLQTIPGVKGRSATAIIAEVGSDVSSFQDAAHLVSWCGLKPRNEESAGKIKARSITHGNRYLRKTLIECAWAASKTQGCYLNKFSYYQTIVRRKNKMKVQVAIARKILTAVWYVLHDNVAYRDYNPDIAPAA

SEQ ID NO: 121150 - protein, 314 aa, unidentified
MFELFIGIDVSKDRLDACVLPGGELSSFANDPTGRGELVTWIQSLGDCLVVLESTGGYERPALFALQDAHIAAALVNPRQVRNFAKGIGQLAKTDALDAAILAEFARLVSPPPSEVLTEKQRELEALVTRRRQLLEVRVAEKNRCGQTQDKFIERSLSQVLKTIERQIQAIEDRIAKLVESDDHWQAKLGILLSTPGIGKTVAATLIAELPELGQLNRQEIASLVGVAPFAKDSGRQQGKRSTWGGRRDVRSVLYMAALTARRFNPAIKAFAERLAKAGKSFKQVQIACIRKLLVILNTMIKNNTPWENKLQKT

SEQ ID NO: 121151 - protein, 426 aa, unidentified
MKEHIDYLSTLFVGIDIASRIHVISALDFNQDFYIKMKPFENTKDGAGIVEKLIADVLADNHQFKYVVIGMESTGFYGVHLANYLSTSELLAPFSVRVYCLNPKEVKNYKKSFNDIGKNDGIDSFVIADFARVGRIAIKPWRGSQYLALQRLTRHRMHITECITREKTYMLNNIYLKFSQYALLRNGEHPFSNKYGATAEAILTEFTTNEDIVNSSIEELVEFINSKSKGRIADPEETAKIVQAAARNSYRLDKCLYEPLTISIASSFNCISSFEKELKAIDKAILQTVQGLNPEEYTVLNSIPGIGKVYSAGILAEIGSIKAFQNANQLAKYCGIVWNDNDSGDFESEDSRMSKAGNRYLRYYIIEATGSVINHCPEYKAFYQKKYAETRNHQHKRALALTSRKFIRLLFGLLDKGQLYSPEKSR

SEQ ID NO: 121152 - protein, 392 aa, unidentified
MKVTYQTCCGVDVHKSFLVATIVKTTGGIEPSYQKKRFSTFNNSILEFKQWLLDNHCHDVCMESTGKYWVPVFNLLEDEINVVIANPKWVKAVKGNKDDTKDSKWIGDLFRLGLVKGSYIPCKKIRILREYTRYRYKLVSCRSSEKNRYQNALTVCNVALDSVVSDIFGKSSTSIIDYLLKQSGTSVNHEEIASKLLRSLKSKEDAVIESIEGYQMTDAQKYRMRLVRAHMDYITAEINDVDKMIENMISSNPDFENAIQFLCTIPGVKRDSAITIISEIGTDMSQFSSSKRLCCWAGLTPGSNESAGKKKSVRITRAGVYLKPALVQCAHAAVKSDKSPYYKKKYESLVKRRGKKRAIIAIARMIFLLPSTRCCLLVSSGIRAIFTKSICL

SEQ ID NO: 121153 - protein, 360 aa, unidentified
MTKQLMAGIDLHSNNLMIGIVDQSGKRLKHQKVACDLKEVIAVLSPYKARLKSIAVESTYNWYWLVDGLRASSYPVVLANPAGIEQYSGIKCADDKNDAFFLADLQRLNILPTGYIYDAKLRPVRDLLRRRMNLVHHRSALLISFKSLYTRTTGGEMKLGELKSLEPREAAALYEHPANQLIAKTQKEHIEQFDQSIERIEKAVLKCARELPYYDKLNTLPGIGKILGMTITMEAGEIERFKSAGNFASYCRAVESKRTSNEKGKGQNNRKCGNKYLSWAFVEAANFARRYDQSCRRWYDRKAARTNKVIATKALACKLAKAAWHVMTHHTDYDRKRMLPEECGRAAASQVNGLAKSPKN

SEQ ID NO: 121154 - protein, 375 aa, unidentified
MEGAPMLDTTTFVGLDVHARSIKAVSLDVMTGEVRAATFGYDAGAVAGWVRSVDPKAKCVYESGVTGFDLQKRLSGLGVDCVVGAVSKMIKPSADRRRKNDRNDAEFLARMLSVGNVVEVWVPDDECEAARDLTRALEDARDDLSRSKQRLSKFLLRHGLVFDERTPTGRRKGNWTRAHWSWIESIRFAERADNDVLAYYVDAVRRAAEEKARLEGLVEAEARKPRWRKRVDSLRCLKGVDTATAADLVFEAGEFSRFRNARSFAAWVGLTPSEHSSGESDRRGAITKAGNKHLRKALVEAAWHYLTCSGRPKDLAKDQTPDRVARRHAAKSVRRLAERREALLARGVHGNKANVATARELACWVWAVGLMAEEA

SEQ ID NO: 121155 - protein, 440 aa, unidentified
MKKRKERVCGADVHKDLIVATITGDEVPPIQENFGTTKSELKRFRDWLTTNKCEQVAFEATGVYWIPVYDALNGAIDTIVANPHQIKTIPNDKSDSKDSKRIATLCLNNQIKRSRVFSDEDRELRNLTRARSGYVKTRTQFKNRIHKYLSSNGVKLSSCMDDVFCKSGTHIIRGLAEKKPVEEILKSIPCGKIRKKQDEIRSALANELSETNRMLISDALEMMDNAETKIEKMSLEILKKVQQLRSNDLAIVMSIPGIAFISGSVILSEIGDCRDFQSPDQLAKWCGLIPGENESAGKKRKCGITKRGSKYIRVVLIQAAQSISNMKNTTLSRFYKRLSKKKEHNVAIVAVARKLICLIYHLLINQEFYQEVGCRKKRTGRNESRHEPSLKDEDLADRVAAIVDAFYGMSDSNRKKVLMRALEDISGNKPDRKRSSEGGG

SEQ ID NO: 121156 - protein, 338 aa, unidentified
MSIATVGLDIAKQFFQVHGVDENGRAVLRKKLRRNQVSAFFANLPACTVGLEACCGSHYWVRVLARCGHRVQLIAPQFVKPYVKSNKNDANDAEAICEAVSRPHMRFVPAKSVEQQDIQSLHRVRSRLVSSRTALANQIRGLLAEYGIVLPQRVSQLRRGLPLVLEDANNELTAFSRRLFASLYEELLSLQEKIEALDARIESVYRVSEPCQRIAAVEGIGPLTATALVAAVSDGKAFKNGRQFAAWLGLVPRQHSSGGKARLFGISKRGDTYLRTLLIHGARSVVSRAKRKTDRRSLWIADKQRRLGTSKACVAVANKNARIVWSLIAREETYRRAA

SEQ ID NO: 121157 - protein, 419 aa, unidentified
MSTEKRKVCGIDVHKKFLVATILDRDGKYETRRISQNTESLLELRDWIQSKNCDSVAFESTGDYWRPLYLVLENRVPVTVANAHHIKHVPGKKTDITDSQWIAQLELNNLITPSRIFTGEMYDLRTLTRSRELLVQNRTEVKNKIHHLLDSASIRLSSVLSDLFGKSGTIILQGMVQNKPLEEIIESLPKKMRCHTDAIFAAVPASIPPVTIVLLQSYLKVVNDLDNEIKSIEGRIRESLTGKSREIQILTSVPGIGFIGASTLIAEIGNVHDFKDADKLTKWAGLTPSVYQSANVMRTGSITKQGSRHIRWILVELAHVAIRSPGRIRTFFERLMPKKGYKKAIVAVARKMLRIVWHLLVYDEVFVDEFPRSKQVKFPKMPKKIQTMGINRFIELLSKASEVVIRDRNQEIFRLGLSD

SEQ ID NO: 121158 - protein, 457 aa, unidentified
MGKRNGLSRGDARRNARLLRLRGIVRHDRAILAIDLADTKQVLAVCDHDSRVLARRTVRGHAWQLEEALRWGRQVAVERGFAGVVVGCEPTGHRWRIVAELCDRLGMELVCVQPLLVARAREQEDLTADKSDPKDAVLIGRLVGELRCYLPERADQVWARLRQLGARRVQLTTTAGACRQQLRDLLECAWPAALQAAGEPLDSVTWRAAVQVVLARTAGDPATLSRLGEGRYTRAVTRELARWGGQRRCLRIVRAVWTAATSPQALAFGVGAQRPGALERARLTLDDWHHALAGLTDVEQRMTGVLDALDLTSLVGSIPGLSAVGAAAILAETGDPARFDSARALVKHAGLCPRANESGTYAGTTRISGRGRPALRLAAWRATWGALAHNPVLAARHAHLTSRRDNPLSTAQARTALAAALLRWLWVVVTKRIGWQAAIAAGQLDPRTSMEVTTPAA

SEQ ID NO: 121159 - protein, 394 aa, unidentified
MRFAGIDIASETHVVAVIGSDREVVCKPTRFAEDAAGYQTLFELLGTPSQVLIAMEATGHYWKNLFAALAAAGYAVALLNPLRTHRFAAEELARTKTDAIDALGIARFAAEKRPPPMPLPDALTEELRELVRLRQRLLQDFGDRVRQLHRLVDLGFPEFTRYVHGLDSELASAILHDYPTAAAFRGLSVKRLAALRYDGRHKVGAQLATALLEVAHRSVGQHHASAYRVQVRYACEDLDLLRRRLRDLDRDIAATLATHEIGTLLTTIDGIGSNTAACLIAELGDPAHFRAPAALAAYVGVIPGLKQSGKRNPTRAGLNPLGNARLRAALWMPTLTAVRTNPWLHAYYERLLARGKLPKVALVACMHKLLFAVYSVAKHRRPFVPQPTIQGAQA

SEQ ID NO: 121160 - protein, 391 aa, unidentified
MVCVGIDVAKDKHDCCILDSNGMVRADCFTIPNNMDGFKQLLQTIRNCTKKSDKIKVGLEATGHYSYNILGFLINQGLPTYVINPLHTNLYRKSLSLRKTKTDRVDAKTIATMLLSDVDLKSYTDTAYHNEELKSLTRYRFDKVQERAKLKQSVSRLATILFPELEGLVSSIHGTSIYALLSEYPGTKQISEVHLTKLTNLLTTASKGRYGKEKAIQIREAARASIGSVMPAKSLELKHTIKLIQELASEINEIEDSIQKIIDELNPPILSIPGMGVNSAAVILAEIGDFSNFSSPDKILAYAGCSPSTYQSGKLTNCYAHMEKRGSRYLRHALYNATKYVCYWNPVFAEYLAKKRAEGKHYNVALSHAMKKLVRLIYALQKSGKAYLAAA

SEQ ID NO: 121161 - protein, 308 aa, unidentified
MKMSIGVDLHKTQFTTCMLSEDRMIIKFDEYPTKDEGYKAFIGKLNFLIENGYEVSAAVESTGNTRYFMNKIMKAGVIVKVVNTLKFKVVNESVKKTDRHDAKTLAEFLEKDMLPEAQLCSQESEDIRRVIKSRATLVKAAVSLKNQVHALLLSYGIETKRGQLQSKKERQRILTGLEDHKSFGGAAKAVEPLLDTINQVSIEVKKLEKVLNELVKEDEDVELLKTIPGVGPITASIIRAFTDDIQRFDSAKKYAAYAGLVPWVQNSNQTIQHGKITKRGSVELRTAFVQVVMGMIRAQKRTHSYLQC

SEQ ID NO: 121162 - protein, 320 aa, unidentified
MNKEQKYVGVDISKEYLDMAVVEPDNKWRFSNNPNGISKAVEMLKGMSSVFVVFEATGGLELSFWEGLTEAGIEAAAINPRQIRDFAKAKGKLAKTDEIDAGVIAHFGQAMQPRSQPFPTTQEIKEMMSRRSQIVEMITAEKNRLNWARSRRIKEDIQLHIEWLERQKDDVDKTLKQAINIDPSMREKSKILQSTPGVGPTVSASLLTQVPELGTLNRHQIAALVGVAPLNRDSGHWRGKRSVWGGRSRVRSALYMATLVATQHNPVITAFYQRLIGEGKPAKVALTACMRKLLVILNAMLKNKTTWSVSETAATLTPCL

SEQ ID NO: 121163 - protein, 383 aa, unidentified
MRRSLAPALIHHPPLFQQTNVVTQWTANRQETFTASKPAVPYADARARRFQLIEFFAMYEVCTVVMEACAGSHHMARKLASFGHEVKLISSQFVRPFVKSNKNDFVDAEAICEAAARPAMRFLTPKTESQQTLSVLHRVRESMVRDRTRTTNQMDGFLLESGVRLPVGKTAVARLPEFLDAQALPPRLIAILERLHEHLKYLEKQIGEIERERAHQLADDDVGQRLMSITGIGRITASVLAAEMGNGRQYGCSRDFAASVGLVPRQYSTGGRSNLVGISRRGDKHVRCLLVLCARAYLTLIRGHRARQLLLCLLPFSLLVRSITPDVLGLCCWLLKRQRRAVASGATCAVYKREHPTFPANEGKGTSAAVAPFLIVAPYVSYH

SEQ ID NO: 121164 - protein, 369 aa, unidentified
MTDVTLFVGLDVHKKTISVALVDAAASATVRFYGTIVNTPDALLGLSKKLSKDGQALHFCYEAGPCGYGVQRQLTRLGHRCDVVAPALIPRKVGDKVKTDRRDAMMLAQTLRAGQLTAVWVPDEAHEAMRDLVRLRAQAMRDLRKTRQQLLSFLLRGGLVSPYGHWTKMHRRWLGELVFAHPAQHLAHEEMLQRIERAEALCDRLKGAILDLVPQWSLAPVVQAIQALRGVSLIVASVIVAEVGCFTRFDNPRQLMAYLGLNPSEHSSGSTIRRGAITKTGNALARTCLVEAAWTYRFPARVTQIIRDRLAGLPEPIRNVAWKAQVRLSARYRKLVAAGKPTPKVVVAIARELVGFIWAIARMVEPKFA

SEQ ID NO: 121165 - protein, 341 aa, unidentified
MSIITVGIDLAKHVFAVHGVDDNGKSALVKPKVSREHLLPLVAQLPPCVIGMEACSGAHHWARLFRQHGHTVKLMAPKFVTPYRLGGKRGKNDAADAAAICEAVTRPNMRFVPIKEEHQQIILCLHRTRQGFVEERTATYNRLRGLIAEFGIVLPQKVANLHRHIGARLEDLPGFANQCVGDLLSHADQLDVRIAEYDRLIAKVAREDARSKRLMQRPGIGPVTASALLASIGGGHDFKNGRQVAAWIGLTPGQHSSGGKDRLGRITKAGDHYLRTLLVLGARTILNTLGDKQDHFSRWARNLVARRGYGRAAVAIAAKNARLAWAVLRYGEDFRLSPSAA

SEQ ID NO: 121166 - protein, 358 aa, unidentified
MSDHKMQNFILKGKEIFVGLEDSKNNWKIAVRSGKMLIQQTAMEANYPILISYLKNKFPECTIQLIYEAGFKGFNLFDQLMADGINCIVIPPHLVTEPKVNKVKTDKRDAKRLAQMLENHDFLDGCYVPDEERREDRQISRTLGAIRKDITRNRSRIRMLLHFHGIEVAFAAKEKWGQKDFLSLKDLPLSEPLKISLNILVVMLEQLWTHQKELRAYLRQLCRKERYRKAYEIAKSMPGIGWYTAIRLVLELGEDLSRFTNGKKIASFVGLGCGEHSTGDTERKGHITGMGSGFIRSTLIENAWAAIRKDPVLLDKFNRVKGNNKSKKKAIVAVARMLIVRFRACVMSGKPYVIGVVR

SEQ ID NO: 121167 - protein, 349 aa, unidentified
MSIMTEGNHRVITVGIDLSKNVFAVHGVDDNGKSVLVKPKVSREHLLPLIAPLPPCVIGMEACSGAHHWARLFRQHGHTVRLMAPKFVTPYRLSGKRGKNDAADAQAICEAVRRPHMRFVPVKEEHQQIILCLHRTRNGFVEERTAIYNRLRGLMSEFGIVLPQKVACLRRSVGAHLEDLPGCANRCIGDLLAHADALDARIAEYDRLIAQTAREDARSKRLMQRPGIGPVTASALLASIGNGHDFKNGRQVAAWIGLVPGQYSRGGKSRLGRITKAGDAYLRSLLVMGARAILSGLDGKQDGFSRWARRLVERRGYWKAVVAIAAKNARLAWAVLHYGEDFRLSQSTA

SEQ ID NO: 121168 - protein, 356 aa, unidentified
MSQKLDTSPAVIGIDIGKNSFHIIGQNQRGAIVLRQKWSRGQVEARLANLPPCLIGMEACVGAHHLSRTLKALGHDARLMPAKYVRPYSKGQKNDYRDAEAIAEAVQRPTMKFVATKTADQLDLQALHRVRERFVGRRTGIINQIRAFLLERGIAVRQGLRFLRAELPGILATRTEALSPRMLHILEDLTADWRRLDARIEDLSSEIEALARQDKGCERLMSVPGIGPIISSAMVAAIGAGDAFSKGRDFGAWLGLVPKQSSTGDRTILGSISKRGNRYLRTLFVQAAWVVLVKIGPKHWDRYGLKSWIEAAKKRLHHNVLAIALANKLARIAWAVLHKGRAFECVKTNEAASQTA

SEQ ID NO: 121169 - protein, 323 aa, unidentified
MKTNSDTTPKLYVGLDVHKEQTSVAIADPGAQGEVRSHGNIATSIPSIEKLLRRLAKARNISLSDLHVCYEAGGCGMWIARQLTKLKVPCMVVAPSLIPSKSGDQVKTDKKDAIKLARLLRAGELVSVYVPDETDEAIRDLCRARVDAKDDLRRAKTRLLAMLRRLGHQYDGKTHWTQAHWRYLRSLRLPHESHAFIMEELLQQIARIEDQVSRIEARMELLLQEWKSKPIVEAIMALRGFKTVAAMMVVSEIGNFVRFTHPKQLMSYIGLTPGEYSSGGKQKQGAFDAPRRSHPCGARRVRSCPSRSARFQMRQFPSPLDTC

SEQ ID NO: 121170 - protein, 409 aa, unidentified
MMKQNIIFGIDVSSKSSTVCVVIDRIKQGETFKITNDSFGYQDLLDRLNQYLITPLVVFEATGVYSLSLQAFLEDYHIKYLKLNPLKAKKLMDNNLRHNKTDKVDAYRLALIQFNAPQKLRAPQPKEYHELQNASRYYEELTQALIINKNQLHRNLQSTFPQIESILSTSSGRVYWTIVSLFPHAQYVLNHNENQVFQSLLAISGIGRQRAHYLTTRLYALARQAYPYDNESSIAIRAIQRNIANLLSLSAERDNVINYMEKLAMQANARSLTIYESIPGIAKTTAVRLAAELGDLRRFDTSAQIDAFVGIDPGRYQSGEKDSHLGITKHGNHLARKILYRTITQMETVKAAQPCHITDYYDKKKRSSNSRGYKKIAIASVHKLIRTMFALIKHDQLYDYNVATHNQRL

SEQ ID NO: 121171 - protein, 322 aa, unidentified
MTSTVLGIDISKRDFHVSLLREGRATKPKKFTNNIQGFESLHNWLQQQSVVELHACMEATSIYGEALAEFLYGAGFQVSIVNPARIKGFAKSELLRTKTDSVDAALIARFCAAMKPSLWIPTAPEVKELQALLRRLESVIEMTTQEQNRLETATPTVAGLTLAHLEYLKEQQKLIKKLISDHFNQHPQLKQQRDLLTSIPGIGEQTASVLLAEIRDVSDYNNARQLAAYAGLTPCERSSGTSVKGKTRLSCTGVRLRKALYLPAVVAMRHNPLLKAMSDRLLGRGKVKMQVIGALMRKLVHLAFGILKSQKPFDPNYLLATP

SEQ ID NO: 121172 - protein, 342 aa, unidentified
MTAIGVDTHKATLAACAVDLLGAPIAEATFANDPKGHLAFIAWARANAPAATIGIEGSSSYGAPLARAAQQAGLCVREVPPHLSRAERGRTRRPGKSDPGDALAIARVTARETNLPPIRLPDQTTELRLLVEAREDLIGEATRVRNRLHAHLIILLPGYGGTVANLVAAHNRTTIGRRLRGNHAVQAELARSLLARLVVLGREVEGLTRRITAGVAGHPLLGLPGAGAITVARLIAEVGDVRRFRTADALAALAGVAPIPASSGQVQRMRLNRGGNRQLNRALHVIAVSQARFHPEAKAYVTRRIEVDGKTWREAIRALKRRLVRPVYRLLLEGSNLQLAAA

SEQ ID NO: 121173 - protein, 351 aa, unidentified
MSQRLNSAIAVIGIDIGKNSFHIVGLDDRGAIVLRQKWSRSQVEARLANIPPCLIGMEACVGAHHLSRKLNALGHDARLMPARYVRPYSKGQKNDFRDAEAIAEAVQRPTMKFVATKTADQLDLQALHRVRERLVSQRTGIINQIRAFLLERGIAVRQGQHFLRMELPRILATPPDVLSPRMVRVIEDLASDWRRLDARIEGLSGEIEELAKRDAGCERLMSVPGIGPIISSAMVAAIGTGEGFSKGRDFAAWLGLVPKQVSTGDRTILGSISKRGNRYLRVLFVQAAWVVLVKVKPNRWEGHGLQPWIEAAKKRLHHNVLAIALANKLARIAWSVLARGRAFEASTLQAA

SEQ ID NO: 121174 - protein, 361 aa, unidentified
MSESMALVGLDVHKSRTVAAVLDPVSGELRLQRLRGEPERVVPAFLEKLDRPVAAVYEAGPTGFVLARVAERRGLDIRVVAPGSIPKAPDDRVKTDRRDAKRLVRLFAAGELRFAFVPSEADERFRDLVRCIDDVRRDLMRSRHRLSKFLLRRGVRFEGKAWTQQHERWLCTLDFEDPLSQAVFVDYLSAVQGLAQRRKTLTGVLEGAVPNSSHAETVKRLRCFRSIDTLTAAGLCAEVGDFARFSKPALLSGFLGIVPSEYTSDEKRTQGHITKAGPPNARRLLVEAAHNYRHRPAVGENLKARQAGQDPRVVEIAWRCQQRLHGRWMHLGGQRGKPAGTVAVAVARELAAFCWEAATLN

SEQ ID NO: 121175 - protein, 427 aa, unidentified
MRKKAYGATRVNDVDLERLIRGRGSLAVTVGTDVGKYELLGVCRWSDGTFERPWRVRNPIEIPQLVTLLKSLRVGRTLVVALEPSGTYGDALRQALADGGIPVQRVGSKAAHDYAEIFDAVPSQHDGKDAAVVAELAALGKATAWDYQAPSVWEQELKYWVDWLVAQRHMLAMWQGRLEALLARHWPEATRVLKLSRVTLLRVLERYGSAQALAADPEASSHIARWGGCFLEPRKVEELLAGARSTVGVRPGEWESRQIRDYAGQALEVRRQGQRGDRRLRQLAQGHPVLGAQGKVVGVATACVLWVSTGDPRNYHSAAAYRKAMGLNLAERSSGIYKGHLRISKRGHPRSRQWLYFAMLRLVQKCGVRRWYEAKKARNANDAKRVLVALMRKVVLALYHVGVHGQEFEPRRLFHRIACRSGSGVHR

SEQ ID NO: 121176 - protein, 419 aa, unidentified
MSFKILKNNCCGLDVHKTWIFACIGITDSHSRTEYKQARFSSFTKGLQELCNWLARYNCTDVCMESTGKYWIPVFNVLEKNNIWVTLSHPKYTKPQKGNKTDRKDARWICDLYMCGMVKPSFIPPADIRELRDLVRYRFKLTCMIAGEKNRAHNCLTVSNLKLDDVFSDIFGKSSRSITEQILQHPGETFDVAPFVDGRCKTPIEEIQAAVDGAISTEQAVKLRQCLDHIDELEKHQAEIEREIFRLSDKYESVLNLIRTVPGFDKNPMTAIQVLSEIGGDMSVFPTAKNLVSWAGCCPRNDQSNHKIKSTRISRAGSYFKPVLVQIANALIKSKKHPEFTTRYRRIKARRGHKKAIIAICRMILTAIWHILTDLKPYTPEGFLEQRPVKRSKILTTSQALNLLKQRGYIIKEDTIPVT

SEQ ID NO: 121177 - protein, 340 aa, unidentified
MKITTIGLDLAKNVFQVHGLDDTTNVTLRKKLRRAEVLAFFAELPPCRVGIEACATAHHWARELATFGHDVRLMPPSYVKAYVRRQKNDAADAEAICEAVRRPTMRFVPVKSAEQQSVLVLHRSRELLVRQRTMLINAIRGHCAEFGIIVAQGVRRACELVEKIRHEEVSMLPDLARSALLALANQLDALAAEIYVLERQLLAWHRQDQASQRLATIPGVGIITATALAASVPDPSVFRSGREFAAFLGLVPRQNSSAGKERLGRISKMGNGYLRKLLVVGATSVIRRARTSTSASATWINALLERRPARVVTVAMANKNARIAWAVLARGEVYRPQTAA

SEQ ID NO: 121178 - protein, 430 aa, unidentified
MSYKIAGIDVHKKILAVVVSDVEVENEYKFERRMFGSSPDQLRSLAAWLLEQEVEEAVMESTAQYWKPIWEALERYWKPIRQKREGASRRSGTLHLAQAQSNRGRRGRKRDFPDAERLVKRLVAQELTLSFVPDAEQRLWRTVTRRKYQLTRDRVRLQNQVESLLEEAHIKLSSLVSDLLGASARRMLKALAEGETNPAALAALADQKLRATPEQLCDALGACTDLKPVYRRLLKMALEQLQFLEQQIGQLDQELASLLHPHQDAVQRLAEVPGLGVDSAQQIIAEVGSTAATFPSEKQLSSWVGACPGDDESAGVNYSHRSPKGNRHMRRILNQSATAAVKAKGTIFEIVYRRTVARLGHQQTIGAIAHRQCRLIWLILHQGVRYEERGPAVTKQSKQRRTAKMIRQLRSLGYRIEPPNPQHPSPAQGQ

SEQ ID NO: 121179 - protein, 347 aa, unidentified
MNFYTQQHKHYCGIDLHAKAMYVCVLDPQGTKLVHKNLPTTPEAFLRVIAPYKEDVVVGVDGMGSWYGLADLCQQEGIPFVLGHALYMKAIHGGKAKNDKIDAHKLAVLLRGGMFPQAYVYPAEMRATRDLLRRRCHLVQKRAELLAHIQNTNSQYNLPEIGKKLAYKANREGVEQHFPDPSVRKTIEVDVSLIDHYDQLLGEVELYITRTAKTHEVQTFARLQSVPGIGQILALVILYEIHDIHRFPRVQDFVSYCRLVKCAKESGGKRLGTSGKKIGNAHLRWAFAEAAVLFLRQNQPGKEYFATLEHKHGKAKALTVLAHKLARAVYYMLTREQAFDLKRFVTA

SEQ ID NO: 121180 - protein, 343 aa, unidentified
MQVSTIGVDLAKNVFQVHGVDNAGKVVITRQLRRKQVIDFFSKIPACLVGMEACGTAHHWAREISKLGHTVRLMPPSYVKGYVKRSKNDAADAAAICEAVTRPSMRFVPIKSADQQALLMLHRTRDLLIRQRTQLINALRAHLAEFGLVAETGREGLAQLAEIITDESNREALPSAMKQALQAIVDQLAALELPIGALDRAIHAHHRANDMSCRIETVPGIGVIAATAIASTVTDPSNFKSGRDFAAWIGLVPRQHSTGGKERLGGISKQGDRYLRRLLVIGATSVVQHARRHPQKYPWIIRLLARKPAKLVAVAVANKMARIAWAIMAKGGYYRRPELAAAT

SEQ ID NO: 121181 - protein, 328 aa, unidentified
MIGIDVSKDTIDCTFVSKDTREIVWHKSFPNTPEGVMELLSITPEGVGWVLEATGRYSLMIAKLAKASGQPAYAAPTRQAKLFCRSIQARAKTDRLDSYGLALFGLSRPLRPYPIKSESLEEVEQLLRARRGLSKALTGLMQRQKELPYARDVLDPTIEHLKERIKEIDKRIREATEESEELGFTKELRKVPGIGPTTAAHVGVALASREFERADQFVAYVGLDVGVVASGKRKGERGLTKQGDAELRRLLYCSAQSSARARKDRTFREQYEAELAKGLSKTGAWCAVARKIAKVCWALHRHGGVYDPERVRAGRSERGANRSQHLRE

SEQ ID NO: 121182 - protein, 403 aa, unidentified
MNAVGIDVSKKKSTVAIFQPGGKVILQPRDFLHTQSDINSLIQIIKDLDGETRVCMEHTGRYYEPVATWLSAADIFVSAVNPILIKEYGNDSLHAPKTDKADARKIARYALDRWTKLKQYGHMDETRNQLKTMNRQFGFYMDQKTAMKNNLIALLDQTYPGANAFFDSPARSDGSQKWVDFVYTYWHVDCVRGKSLKAFTEHYMNWCKRKGYNFSAAKSEEIYNSSADLIAVFPKNANTKMLVRQAVELLNVTSRTVESLRVEMDHTAATLPEYPVVMAMNGVGPTLGPQLIAEIGDVTRFKKRGALTAFAGVDPGKNESGQYTQKSVPTSKKGSPHLRKTLFQIMESLIKRSPKDDPVYAFMEKKRAEGKSYYVYMTAGANKFLRIYYGRVNEYLSSLSESE

SEQ ID NO: 121183 - protein, 451 aa, unidentified
MAKMKPQVIDDEQHERVYERVAAVDVAKDSGMVCTRMPHPSRPGARQSTVWAVKARMAAIGALGRQLKRDGIQMVTLESTSDYWRIWFYVLEAAGLAVQLVNAAQARNLPGRPKTDKLDAMWLARLTEMGLLRPSFVPPAAIRALRDYTRARTRLTQERTRCFQRLEKLLEGALIKLSSVASKLTTESAKDMIKAMIAGERDPHTLAALARTRMKAKHDDLVEALAGMFDDHHGELAQLLLDQAAFCDTRIDQLTARITGSVAAMPAAWGVDADGTTGPDAGTGPDAAALPAVARLAEIPGVSPGLACSIIAETGLDMSRFPTAAHLVSWAGLCPRASQSGPRTRAGKKNQGDSWLRSHLGQAATSAARTSTFLGERYGRIARRRGKAKAQVAVARSILIIIWHLLADPAARYTDLGAGYYQARTDTDRKIRNHIRQIQALGFDVTITKTA

SEQ ID NO: 121184 - protein, 283 aa, unidentified
MRFYTTTHQYYCGIDLHARVMYLCIISSDGEIVLHRNMKASPENLLEAIQPYRSDIVVGVECVFTWYWIADLCTEEGIPFVLGHALYMKAIHGGKAKNDRIDSWKIAAILKGGTFPMAYVYPAEMRSTRDLLRRRNYLVRKRAELISHIQISNSQYNHEPFGRYDIIHKCCREEVLSNFTNPEVALSVRINFNIIDSLGKQVWALEQHVLENARNHDPHPYHLLRIVHGIGKILALCILYEIGDINRFPRVQQFASYSRLVKCSGNQQENGMVPQAARSVMFI

SEQ ID NO: 121185 - protein, 362 aa, unidentified
MGTVAQLVGVDLAKNVFSICVLDGSGRVHQRKELRRPAFAIWLAQLPANTVVAMEACSGAHHWARRCQFHGLEPRLMAAQFVTPFRKSQSVKNDRNDAEAIATAARQGNMRFVPVKTVAQQARLSWHRVREGYKAEGLAISNRLRGLLAEFGVTVAQGDAALHRALGDNALRLQLPAMLADLLEGLLGHWRQVRERLADCDARIASHAKADVRSVRVQQILGVGALTADAVVATVGDGREFRNGRQLSAWLGLTPRQHSSGGKSRLGSIRCRGDGYLRTLLIQGARSSVQRAKAAPLEKATPEQRWIKDLCSRLPFGKVLVAIANRHARQLWAMLSRGEDYDANACLHHPMAQRPARRLAMA

SEQ ID NO: 121186 - protein, 353 aa, unidentified
MVDVSSEAKSSATGVTNPYRRTEHCDKIHEYRCDKEVGVIGIDISKEHLITSRGRVRKYENNKKGYEEILKMKPCTIVLEPTGVYAIRPSQYFKEKGIKVLQVSPNVLSREKELRGKKTDFYDAEKLENMVNKAKEYDYNPLKELVTLYLFLKDIETKYKNRLKRALFLVSDNDKVNKDRLERLAKGDFTREELYQLEYTPIVLEEIKILAKNLLEIQERLKEVRRMIEGQVPQDHVLLTIPGVGKLAAGIVGDIRRFPKPESFVAYCGLDPVVERSGRAVVSRGISKRSNKYLRSLFYFLAMRSYSRNPTLLKFYETHKDRLKGKKLYVALARKLARVVWSVWYNNRPYEPK

SEQ ID NO: 121187 - protein, 341 aa, unidentified
MTAIGIDTHKATLAACAVDELGAPLEERTFPNDPTGHRALAAWARRVSPEGIVGLEGSASYGAAAARFLLTDGLAVREVPPQLSHRERIRIRRAGKSDPGDALAIARVTAREQDLPPVRVADRSREIGLLVEAREDLVAEATRVRNRVHADLVVVLPGYQAEAKNLVAACHRRTIARGLRRLGGVQAELALGRLARLRAIDAETRALTAKIATLVGAHPLLGVPGVGVLTAAKLIAETGDVGRFRSPDAFAALAGVAPIPASSGQTQRMRLNRGGNRQLNRALHTIATVQAAHHPPARAYLARKRTEQKTNRDAIRALKRQLVRTVFRLLREGAQGLQLAA

SEQ ID NO: 121188 - protein, 343 aa, unidentified
MDHFAGLDVSVKETSVCIVDDTGRIVREVKVASEPEALLVVLRNLAYHFKRIGLEAGPLSQWLYSAFAEAGLPVICVETRHMRAVLKAQINKTDRNDARGIAQMMRVGLYRPVHVKTLRSQKLRMLLTHRKLLQSKAIAIENDLRSTLRNFGLKVGMVGAVKFEARIKELVENLPDLAALVEPMLIVRRVLHEQLGILHRRLLDIVRNDDVCRRLMTVPGVGPVVALTYRATVDVPARFRNSKAVGASFGLTPSRHQSGESDRPGSISRCGDEMMRAMLYEAAQVMLTRTNKWSWLKAWAMKIARHRGMKKAIVALARRLAVIMHRIWVDGTEFRWTREVATA

SEQ ID NO: 121189 - protein, 371 aa, unidentified
MSSVASGSERIHLGMDTSKNTIVVGVLRPGEEVPVVDRVFNDEASVRRLIGRFPDRSVLAACYEAGPGGYELHRLLTSMNVACDVVAPSLIPKGYGDRVKTDRRDAIRLARLHRAGELTAIRVPTPAEEAVRDLIRVRRDLLGDRKRVQQRIGALLLRHGRIWRNGATWTKAHREWVAVQTFTEPALNAALAAYQGALSAREVELAALEAQLHTLAGLEPLATAVGRLSCYRGIAELSALTLVAEVVDWRRFATARAFMGFTGLTPTEYSSGERTRRGGITKAGPESVRTVLVEAAWSYRNKPTIGSGLRTRQNNASPPTIARSWTAQQRLCGRYRRMLATGKSPAITIVAIARELAGFTWAEMTAEPLTA

SEQ ID NO: 121190 - protein, 394 aa, unidentified
MIYVGIDVAKDKHDCIIVNSDGKVVFDVFTIQNNIDGFEDLLFKIKATEKYPDKVKVGLEATGHYSCNILGFLKNKGLSTIVINPLYTSLSRKSISLRKTKTDKVDARTIACMIMSDVNLKPYSDTLYLNEDLKSLTRYRFNKVAQRAKLKISVSRLVNILFPELEKLVSTLHGKAVYELLSEFPSAQHIASANLKHLTNLLHTASKGRFQRASADQIRQAARKSIGSYLPAKSLELKHTIKLIRELNSEITEIEAEIKKIMDVIDSPIISIPGIGQNLGAVILAEIGDFSRFESPDKILAFAGCSPSTYQSGQLYSSHAKMEKRGSRYLRWALLNAAAYVCKWEPTFATYLAKKLAEGKHYYVALSHAAKKLVRVLYHLETTGKTYKPTSILS

SEQ ID NO: 121191 - protein, 428 aa, unidentified
MRSIGMDVHRDFCEVAISDGGKARSAGRIATDPEELELFAQSLGHDDRVVLEATGNALAIARIIRPHVAEVVIAHSAQVRVISHAKVKSDKLDARRLAELLAANLVPEVWIPDEPTRALRRRISLRRSLVRQNTRLKNETHAILHRNLIRRVPVTDLFGKRGRAWLADLELQVDERETLDACLRQLDFGASELKRAETEIAKAAVASEEIRRLMTIPGVDVIAAATLMAAIGDISRFPSSRHLVGYLGLHPRSRQSGAKAPQHGGTSKEGSRAARHVLGQAAWSAARTPGPLHGFAVRVAARRGKQVATIAVARKLCVIAWHLLSKEEDYAFKHPRMVQRKLRAMELKAGAPRLRPGPRKGKKVWGSAEEDERDRAELEHVEAAYQRFVADWQASGAKGGAGATPGRASHRPSTGQAARQDFAPEPAL

SEQ ID NO: 121192 - protein, 279 aa, unidentified
MKLTRVGVDLAKQVFQVHGVDRAERAVWCQRLKRNRWIGELERHVEPGSEIGMEACGGAHHWARLLQSKGYVVKLIAPQFVKPYVKSNKNDANDAQAICEAMSRPSMRYVAVKTVEQQDIQAVHRIRASPIGERTAKANQLRGLVYEYGLVAPREIASLRRAVPAWLEDATNGLSARFRALLAGLYRDLQCLDERVHELDRQIAVIVRENEAVRRIEQLRGIGPLTASALVAMVGDGRQFKNGRHLAVALGLTPRQHGSGGKEKLLGISKRATNTSGRC

SEQ ID NO: 121193 - protein, 390 aa, unidentified
MRAALPLSRVKDGKTTMARTKRSVTPTLATGLVAGDQTGDREVVGGVDTHKDTHTAAVIDTAGRMLGHATFPATGPGYAQLLDWLGGFGRLGLVGIEGTGVYGSGLAGYLRGQGVGMVEVDRPDRKARRWAGKSDPVDAEAAARAALAARATGTPKDRDSAVEALRVLRVARRSGVDQRADVQRQIKALIVTAPEPLRERLRGLRDKQLLAVCARLRPDTTRLHEPAEAAKHALRTLAARHAQLTVEITGLDAHLTTLVKRINPALLELTGVGVDVAGQLLVTAGGNPDRVRSEAAFAMLCGVAPLPASSGKTQRHRLNRGGDRQANCALYRVTLSRLRWDPRTRAYAERRTTEGLSKKEIIRCLKRLIAREIYYVLCPGTITESAPQAA

SEQ ID NO: 121194 - protein, 425 aa, unidentified
MNSISNKKINQVTDQTLVVGMDIAKKKHYACFVDERGRVLKKSFPVPQSREGLEWLYQCIVKAMEEFEKTEVIVGIEPTGHYWLNLAYFLDEKGIPLVMTNPMHVKRSKELDDNLPTKHDAKDALVIARLVKDGRFSYPRILKGMEAELRVGATFRSKLVEEQGAIRNQMIRWLDRYFPEFSQVFPSFGKMALAVLEYTPFPSDLAGKELEEVLALYRQSEGLQSPQKPKAKKLMELAQHSIGVTEGQQMARIEIATLVRRYRQLEKEIEALTEQLIELVQTSVEYEWLKTVPGLGDATIVELLSEIGSFSHYQDPRQLIKLAGLTLREHSSGQHKGQKRISKRGRRRLRALLFRVMMPMIRHNEAFRQLHDYYTTRPDNPLRKKQSIVVLCGKLLKVLHAVCTKHQAFDAKRMMQDIFGLETAA

SEQ ID NO: 121195 - protein, 348 aa, unidentified
MVHFVGLDVSVKTTSVCVVDDAGKVILEQKVPTDPADIIAILTSLGVSFGRIGIEAGPLSQWLVNALVAADLPVICVETRHMKALLTAQQISKTDRNDARGIAQMMRVGLFKPVHVKTLVAQEQRMLLTSRKLLQRKLLDVESDLRGTLRNFGLKVGVVGGSRYEARVRELVEGFPGLAAIVEPLLSVRRVMRQQFAVLHKMLLDTVRGDPVCRRLMTAPGVGAVVALTYRATVDQPQRFVHSRAVGAHVGLTPKRYQSGEIDYDGGVSKCGDALLRTMLYEAAHSLLTHGRQWSWLKAWGIRVAQRRGMRRAIVAVARRLAVVLHRMWVDGSEFRWRKDSAAVSAVA

SEQ ID NO: 121196 - protein, 474 aa, unidentified
MPVCFTYHLIMVSMMKNKEESQQRKNKRISKHLEQVNLFAAGIDIGSHSHYVSVPEELATESVREFPCFTGDLNRMADWLVEIGIQTVAMESTGIYWIPAYEILEERGLIVLLVNARHIKNVPGRKTDVLDCQWIQQLHTYGLLEGAFRPEEETVALRTYMRQRETLTQQASDQIRRMQKALRQMNLLLDNVVSDIDGVTGMKIIRAILEGERESTVLAKLRDGRCKKDEKTIAASLEGHYREEHLFSLKQSVELYDTYQTKIIDCDQAIQSQLDKMDSKGDKKDLPPSKKVKSKNTPKFDVRGELYQMTGVDLTCIDGLNESSVLKILSETGSDISAWPTEKHFSSWLGLSPGNKVTGGKSLSGKTKPSANRAAAAFRLAAFGLLNSQSALGAYCRRQRTRLGAPKAITATAHKLARTFYSMLKNGTEYVDKGQDYYEKQYHDRIINNLKKRADNMGFELIAKDISMLEMSKT

SEQ ID NO: 121197 - protein, 350 aa, unidentified
MQSFPKNCVSVALLTTDGEVVCIDRLDYSELEKSAQVLCPTTFAMEPCTEMNYLVQKLEAWGHRCLVIGGKNVQNYVENHFSGQKTDLNDAQALAFLAQDTQLRTIKAKDVEQQKYASLTTLREQYIKQYRQTIVSLKGICQAWGLNISKGISGKARLKDLIENHAAFPEELKESLVDMVTHAQTAQKALNKITKTLEELAKSDKVCQLIQTIPGLGSICSCRLRATVGDIKRFKSPKDFPAYYGLVPRSIATGHNERKGKITHRGDRTMRSLMVQAAGSLVNMATKGKLKSKQLTKWILKKQKEKMPWGKLVCAVAAKLLRIVRAVLISNKPYNSKIAGVAKCSLPKGS

SEQ ID NO: 121198 - protein, 407 aa, unidentified
MDVLHPKCAGLDVHQQTVVACARTGAGKAVTYDVRTFGTTTAELLALSDWLTAHGCTHVAMESSGVYWKPVWHVLEGHFELVLANARHIRNIPGRKSDVNDAPWIADLLAHGLIRGSFVPPEPIQELRDLTRTRQQLVREIAQHTLRIQKTLENANINLTAVLAAVLGSSGRAILRALARGERDPERLAELASDRVKASRAELVAALHGRVTPHHRFMLTLHLTQIEALEAAVREVEARLGDALAPFRAALDRLITMPGVSETVARVIVAEIGFDMTRFPSAGHLVSWAGLCPRLHESAGKRISNRTRSSNPWLKTTLVQAAWAAARKKDSYCRAQFLRIKSRRGPKKAVLAVAASMLTAAYYMLKHGVHYRDLGADHFDRRDKAKLAKRLIARLHDLGLTVEVRAA

SEQ ID NO: 121199 - protein, 531 aa, unidentified
MLNSMAVGLCPDTFSKVIHDRAERAAGAERSEVVNNFAEMNFESNLRPGNNGSGRKARGRTRSACPNPTRIKPRTPADLGAFIKKSERTSPHEGPRIRTTHDKSQGPRASKPMIETINWESITHYAGFDWAKDHHDVVLVNQQGKIVKDFTFEHSAEGWVKWKELVAAYPHLAVAIETSQGAAIEQLLESGVVVYPVNPKSAERYRDRKAPSGTKTDYLDAWSLGDALRVDGHGWRALKPLDPLIQELRLLCRDEVELIGKRTELVNQLQAALHEYYPAALQAFEDWTATPSWGFVQQFPTPELLRQAGRRKWEKFLHVHRLYRPELNEKRLEIFAKAHEFCGPAAVVRAKSRLALALVKLLHALESQLEDYRKEIRRLFNEHPDHDLFGSLPGAGEKLAPRLLSEMGSDRTLFESAQALQCYVGTAPVSFESGQVRKAYVRFMCNKSFRHAVHLWADLSRKFCSWAQVYYQQLRAKGKTHATALRCLGQRWLKILWKMWQTKTCYNADFHMANQLKHGSWVLSVQPNKSK

SEQ ID NO: 121200 - protein, 362 aa, unidentified
MEQFIGCDAHKKFSVFVAVNEKGQAGEALRVAHDRELYREFLARLPAHSTIAVEASGSYSWLVDEMERSGHCPRLCNPFEAKRRMGLTNKTDKLDARGLAILLRNGTLPEVWIPPSELRDQRELLRLRIFLVHLRTRVKNRIHGTLARHNLQVPGADLFGVAARLELGARLPELPVHSREAVEQELATLDFLEMQIESAERRLEVIMKVSVEADLLKTLPCVGTILSMVLMLEIGRVDRFPTAAHLASYAGLVPRVHSSGGHTRMGQVCGNVNRNLKWAFVETGNLIVINQRRLAGSHAVRLYQRIKRAKNHQKAVVAVARHLAEAAWWVLTKQEVYREPQGPRAKSSFVNARVSAFNSLAQ

SEQ ID NO: 121201 - protein, 429 aa, unidentified
MHYTQNQKLEQVTEKTLVIGVDVGSENHHGRVFNYRGIEYSPKAFKFGNNAKGFEAFQGWMQGFVRMNGAKKVIVGFEPTGHYWYNFADFLKAQGIMFVMVAPQHVKHSKEMDDNTQRKDDHKDPRVIAKLVTEGRYIIPYVPEGVDAELRTAYVRYCELTETKVRLENRITRWFDIYFPEYREAYKNPGAKTGMMVLRVAPLPADVLKLGADGINQLWRGEKVRAAGIKRAKTLVAAAKRSTGREGGDAVRRDLWQMLEEYELVMRHLAEMQVMLEELVARIDGAERLLRIKGVGFSTVAGFFAEVGDLSRFTDPKQIQKLAGLSVVTPDSSGKHNGQSEISRRGRKRLRMILFRAAMSMVKNNREMKMLHKYYTTREQNPLKKMQSLMAIAGKIIRVFYGIMKNGTEYDPVKLLADIRRPGTDKNVA

SEQ ID NO: 121202 - protein, 456 aa, unidentified
MINYFLGCDVSKGYADFVIIDERKQVVEQNFQLDDTFAGHHQLFQILKQFIEKNLEAFLYAAVESTGGYENNWFQALRKFSRALPVKAARINPFAIAHNNKAAMKRVTNDRISAYTIAEYQIHHPEKLQYNQDDAYQTFKRLVTTTLMLKKTKSQFINELETLLYVANPEIIKYRKSKIPQWLLRILQHFPDAASLATVSVENLSQIALIKPTRAKEIIQAAQQSVASAADEMIRLAITSTVETIIALDKKTDQHIKLLQKQLMVPQIELLQTFKCIGLLSAIELFIEIGCIERFPTAKHLASFFGVHPVFKESGDGICGVGMSKMGRRKPRAVLFMVALNAIQHNELIRSVYQRELKKGKAKMAALGVCMHKILRIIYGMLKNNTAFDPEIDRKNQQKRVRKTNKEKFDDNRRFQIEDLNAPISKKQTKKRKERKLAQSDNITINGISVPAPSTV

SEQ ID NO: 121203 - protein, 339 aa, unidentified
MDTIRFLAIDLAKNVFQVHGVDAAGKLVLRRRVGRAQLTELVLRLAPCTIGMEACSSAHHWARQFLQQGHTVKLISPQFVKPFVKGNKTDGNDAEAICEALQRPSIRFVPIKSVEQQDVQSLHRARSRLVSNRTGLVSQMRGILAERGIVFAQSITRARREIPVIVADTSNALTPLAREMLADLMDQLRELDRRIAGFDRRIDLVFKASETCQRIAQIEGVGPKTATAIVAAVSDPKDFRNGRHFAAWLGLVPRQSSSGDRTHLLGISKRGDRHLRTLLIHGARAVLRTAPTKHDKKHAWALALKARRGANRAIVAIANKMARVIWSMLATGQSYQKAG

SEQ ID NO: 121204 - protein, 302 aa, unidentified
MEHYAGIDVSLESASLCVVDATGRIIREAKVASEPDVLIAWFRGLEFAVTRIGLEAGPLSQWLYAGMREAGLTVELLEIRHVRDAFKAMPVKTDRKDARGIAQLMRLGWFRPVRCKSLLAQEVRALLTARKLLQTKNHDVEMSLRGVLHGFGLKVGPTTPRTFATRIRELVAGHPTLSTAAEALLAARSTLFEQWQQLEKRLRSLAREDHRVRLLTTVPGVGAIVGLTYVSAIDDPGRFRSSKAVGAHFGLTPKKYQSGETDVTGRISKIGDGGVRTALYEAANVILTRPVKGSTLKSWGCV

SEQ ID NO: 121205 - protein, 339 aa, unidentified
MRLYAGCDLHSSNTYLGIVDEDGKRVFKKKLSNDHEVILSTLAPYKDSMAGIVVESTYNWYWLVDILMEEGYQVHLANTTKIQKYSGLKYADDQHDAFWLAEMLRLGILPEGYIYPKEDRPIRDLLRKRSHFVRLRTSLILSLQNILSRNNGISLKANAVKALTIDHVTPYLAGNEDLALAGKVSKESIDFFTLQIKSLESVVEERIELRDPYNKLLTEPGIGKILGLTIMLEAGPINRFADVGNFVSYCRKVSTAWISNEKQKGKGNRKCGNKYLAWAFSEAAELARRFDKDARAYYNRKAQKTNRMVAHNALAHKLARAAYYIMRDGVPFVPEKCFG

SEQ ID NO: 121206 - protein, 312 aa, unidentified
MNTIICGVDVSKAWLDAKVGAAGASGRFGNDPMGIAKLEAFCRHHDVELVAMEASGGYERLVFMMLWEKGQPCALVNARNVRRFAEAMGFLEKTDDIDAGVIAQYAEVKRVSPTPLPSAAQQRLKALVSRLSQVTGDLTVNKQRRSAAADAETTASLDEIIFLLKRQQRRLEGEVASLIDDDPLWACLDKAFRQMKGVASRTVARLMAEVPEIGILSNKAIAKLVGLAPIANDSGKRQGRRPVRGGREGPRSILFLIARGAAKYDPNLAAFYQRLQQAGKPKMVARIALARKLLVILNAKARDARTEFANAT

SEQ ID NO: 121207 - protein, 427 aa, unidentified
MPYQIAGIDVHKKMLAVVVADVEVEGDYHFERLKVGTSPAQLCAFADCLVEREVDEVVMESTAQYWRPVWEALEQYWRPVRRTRAGASPVSGTLHLAQAQSNRGAGGRKRDFPDAERLVKRLAAQELTLSFVPDAEQRLWRTVMRRKYQVTRNRVQLHNRLESLLEEAHIKLSSLVSDLLGTSARRMLQALADGESDPATLASLADQRLRATAAQLCDAFRACTTLNPVYRRLVKLTLEELRLIEDHLAQLDHQMAQLLAQHHDAVQRLAEVPGLGADSAQQLIAEVGATAATFPSPKHLASWMGACPGSEESAGVNYSHRCPKGNRQMRRVVNQAANAAAKAKGTIFAIVYRRLVPRLGHAQAIGAIAHRLCRLIWKILHQGIRYEERGPAVSAEAKKVRARKMIRELRSLGYRVEQLPAPSSSPA

SEQ ID NO: 121208 - protein, 346 aa, unidentified
MAYYVGLDVSVKETSICILDDKGVVAAHTDVSTDPDLITRFISGHAPNVERVVHESGILAIWLTRELAKRGVPIICIDARLAHKALSGRINKSDQGDAEGLAQLARTGWFTQVHIRSEASERVRVLIGARERLIRMRKDLEGHVRGVLKVFGICMSSIGTGKLRRDFRDQLAAAADTDPAIELMAEMFIPLHKTLCIARDALDEEVRIMARESDLARRLMTVPGVGPIVALAYIATLDDEKRFRKSIDVGAFLGLTPKRHQSGEVDWSGKISKCGDCDMRRLLYSAASTLISCTRKPSRLKEWATKLAERKGHKKAAVAASRKIAVIMHSVWRHGTVFEPGMEGAG

SEQ ID NO: 121209 - protein, 328 aa, unidentified
MVRRLISTLRWMILLAGLRGIIEMQIRSVGIDLGKTTFHLVALSAAGKVLVRKKFTQKQLITFTANMQISLVGMEACSGAHFLGRVLREQGHDVKLIPAQFVKPFVKSNKNDFLDAEAIAEAVGRQNMRFVPIKTDDQLDLQAMHRVRDRLVARRTSVINQLRAFLLERGMVFAKTPFKLRLAMPEILENGDANLTPRMRNLVNLLWSEWKDLEQQIVAMNEEVEQIASSDPACQQLRQIPGIGPLVATAIVAAIGNGSAFRKGREFSSWLGLVPRQHSTGGNARLFGISKRGNCYRRKLLVHGARSAVLRVKRERSPFGPWLDASPR

SEQ ID NO: 121210 - protein, 332 aa, unidentified
MQKDFYIGVDISKKTIDVAIYKKEKSNKVSVCEKFPNSPDGFKGMKRWLRKSGVSLTNALFCMEATGHYTYDLCLFLEQQEVSYSVQSPLHLKRSLGLTHGKNDKVDAYRIASYAYLHREDIKLSKLATNSIRKLKALMTERKSLVVEIARCKAQLKEVGSHSSSIGTIKRTKELLEFLETQVLDIEKDMAQTIDSDAELKNNYQLLLSVSGIGVVNAVNTIVATHNFQLFDNARQYACYIGVAPFEHKSGTSVKGKTHVEKGAKILKADLTGSVRTCINHDKEIKKYFERKIAEGKEYGVVANAIKFKLLLRMFAVIKRGTPFVKKADHLI

SEQ ID NO: 121211 - protein, 435 aa, unidentified
MEEVTDEPLYRDRVCGIDIGKAGLVATIRVPSDRDPARRMQETRSFGTTKREVLALADWLRSWQVPAVVMEATGDYWKGPFYRLEAEGFECVLADAKQVKNLPGRPKRDPSDSRWLTACFERGAVTACFVATPEFRIIRLHTRYRRDLTDERTREKNRAEKLLESAALKISSVLTDLHGVTGRDIMDHLIAGERTPKVLAQLARAAARRKISQLEEALEGAEFFTPAHAALLATMLARIDRLSADIGDLTEVIEQLLAPYEEQLAQAESMPGWARRAAQDAIAETGVDMSRFRTGPHLVSWAGRAPQDHQSGKRKGRAKAKKGNRYLGAITGETAVAAGRTQTREGARHRRLVRRRGSAKACVATGNTQLKVYHKLLSNPGMRYEDLGPDYYERQRDVRRQIAHHVGKLGALGFEVTLCRTPEPSPDETGPIQAA

SEQ ID NO: 121212 - protein, 429 aa, unidentified
MHMAAVGPDRTDEPVRSFGTFTADLHRLADWFEVCSVTSVVMESTGVYWIPVFEILQDRGFEVLLVNARDAKHVPGRKTDVKDAQWLQRLHAYGLLRASFQPKAEIAELRAYLRQRERLLEYAASHIQHMQKALTEMNLQLHHVVSDITGATGMRIIRAILAGERDPAVLASLRDIRCHSSSETIEKALTGHYRAEHLFALEQALALYDTYQHKVAACDQRIEAVLKALSTHGPDPASLPAPRRRMSRQPNEPSFDLRGALYAVLGQDLTRIHGLGPSLALKLIAECGTDLTAWPSSKHFTSWLCLAPGNKISGGKVLSSRTRRSGSRAAALLRLAAVTIGKTETALGAFYRRLSTRIGKAKTVTATARKIAALFYNALRHGMDYVDPGASYYEERYRKRVIDNLHRRAKAFGFVLQEVGVDASKGAVS

SEQ ID NO: 121213 - protein, 328 aa, unidentified
MHFIGCDVSKATLDLAGRKRGQRQAFVTRKVANTRRGWADLMHWAQQQCGADPEQICVVLEATGVYHLKAAGYLASAGLKVLVVNPGRAAQFAKSINQVNKNDGLDARSLQRYGEQLDAPHWFRPDTKDISQLKALLSRLAQLEKDRQRERNRLESCAYTEGGDILKASLRRSIRRLEKDAQQIQKAIDELIRGNTQLHHDRHLLCSIKGIGPKASQWLLPLLHGQRFHAGREVAAFLGLTPCHRESGSSLKTRGKLSGRGNATLRARLYMPALSAIQHSPEMQAFYQLLLDRGKTKKQAIVAVMRKLVHVCYGVINTQTPYLENYAA

SEQ ID NO: 121214 - protein, 350 aa, unidentified
MWYSGIDQHKAYCVITTYGPEGPRVKQARVASTPLALQQYFAESPGPQQAVVESTGAWYWLADTLAGVGVELVLAHATRVKAIAAAKVKTDKVDSNTLALLLRADLIPAAHMIGPAQRAPRDLMRTRLRLVAKSVSAQNSIDRLLEKFNARDVGELDELYQLQARCHAAQIQLLENQIRTLERALHPHLIPNADVQRLLWVPGLGKVSAFTIYTEIDGIARFPTARQFFSYCRLVPGADNSGGHTRHRSGSKAGNRYLKLAFSHAGIRAVQYYPEIRGFFKAKARKKPIRIARTLVALELARIVYHVLTKQEAFNGRFKDRPLSRHKQAQWPRRASPPVLTETPQGGSRA

SEQ ID NO: 121215 - protein, 458 aa, unidentified
MGRNKSKNKDHRAMSVVHPNAAAIDVGATMHMAAVNADRTPEPVRSFGTFTTDLHRLVDWFAECGVDTVVMESTSVYWIPIFELLDARGFAVFLVNARDAKHVPGRKTDVSDAQWLQRLHSFGLLRASFRPKGQIAELRAYLRQRERLLEYGASHIQHMQKALTEMNVQLHHVVTDITGSTGLRIIRAILAGERDPAVLARMRDRRCHATVETIEKALAGNYRIEHLFILEQALALYDTYQQKAFACDARIEAVLKELSVRRGREGGQLPAARQNRSRQQNSLLFDVRAALFALLGKDLTQINGLGPYLALKLIAECGDDLSAWPSAKHFTSWLCLAPSNKISGGKVLSARTRRSGRSAAALLRLAAATVGRTDTALGAFYRRLSARIGKAKAVTATARKIAVLFYNAVQHGMDYVDPGASFYETRYRARVIDNLRRRAKAFGFVLQPAGPTPGIAVS

SEQ ID NO: 121216 - protein, 332 aa, unidentified
MNMDLQGGVARGDRRSNAGVDVSKHHLDVCFNGQTYRVANDAQGWDELTAMLRQAQVDLIVLEATGGYERGLLCALQSAQLCVARVNPRQARDFAKSMGVLAKTDRVDARVLCDFADVLARHAGRQRYVTPMLEQARQTLAELMTRRRQLVDMRVAEHNRLEHAGPKAKRSIHSVIKLLDRQLESIDHQIDDHMDEHFKQQRKLLDSVKGVGPVTILTLTATLPELGQLGRRQIAKLVGVAPLADDSGTRQGKRMTWGGRAEVRSVLYMAAIVAMKHNLVIRAFYERLVAAGKPKKVAIVACMRKLLTILNAMLRDQATWNAARHLSLAIGA

SEQ ID NO: 121217 - protein, 367 aa, unidentified
MKKVSTRAAAQSRNISQRKLTIGLDLGDGNSWYCVVDEAGQIQLEERVRTNAKALEEVFGAMPRSRIAVEIGTHSPWISRLLSELGHEVIVANARKVRLIGESRKKDDRLDAQTLARLARIDPELLYPVKHRSAQAQADLTLIRARAGLVRARTALVNTARGLAKSYGERLRSCNVRNLNPEKAESLSPELQAALEPLLNAIESLSERIVEYNERIENLAQQSYPQVALLKQIKGVGTLIALTFLLTLEDPHRFRKSRDVGCYLGLQPGRRNSGQSEPQMHISKEGDPYLRTLLVQGAQHILGPFGVDCDLRRWGLKLAERGGRNGKKRAIVATARKLAVLLHHLWVSGEVYEPLHNSSPTTVATAA

SEQ ID NO: 121218 - protein, 463 aa, unidentified
MTLPPLAFAGLQTGNRGTRRRAPVSDRPGVSLAAAGPSLPLPLQGAELSLALPEALFFTGIDWAAATHAVCVMDAAGKITAEFTIEHSADGIATLVRRLARYGDPADMPVGIERPNGQLADLLLEAGHPVVPVSPNAIKTWREGEVLSGAKSDAGDAAVIAEYLRLRQHRLRVAAPYSDQTKALRTVVRTRDDLVEMRVASTSQLSALLEAHWPGAKAIFADVESPISLAFLTRYPTPDAARHLGEKRIAAFCAAQGYSGKRPAAVLLARLRSAPAGTAGAVLTRALRDAVLALVAVLTAQNAAIKSLSRSAAAHLSEHPDGTVFTSLPRSGQINAAQMLAEWGDCRQAYGGPDSVAALAGCTPVTKESGKHRAVHFRWACNKRFRKAMTTFADNSRHASPWAAKIYNDARANGKDHPHAVRILARAWIRVIWPCWLNAVPYDPARHGAAAALTTQATGQIAG

SEQ ID NO: 121219 - protein, 348 aa, unidentified
MPLMKYFIGLDAHSTTSTFAVVDQTGKCVHRSTVKTSEKNLSYVISQINGERVLTFEESTISQWLYLQLREYVDDLIVCNPVYVAKKQGAKTDFRDALHLAQELRTGHLTPVYHDSSHWIQLRVSVSGYLDVVEEIVRTKNRLKAVFRAEALNTDENSFYKNKHRTVELHNESARFVAERLFAQIEYLEEEKLKYIDLFRRNQKKYRPIRNLMTIPGISIIRANIIVALVCQPARFKNKHQFWGYCMLVRHIQKSGGRIYGNKRVFGRRELRDIFIGAAENAMRTKTTLRDHYDALKARGVNHKDAKVSLARQISSISLSCLKNNEIYQDDYRERLKERKKVRQMLSQ

SEQ ID NO: 121220 - protein, 350 aa, unidentified
MVVVGADVHKRTHTFVAVDEVGRKLAEKVVKATTTGHAEAVMWARERFGADVVWAIEDCRHLSARLERDLMGFDQSVVRVPPKLMAQTRASARTWGKSDPIDALAVARGYLREPDLPVASHDEVSRELKLLVDRREVLVAQRTATINRLLWRVHELDPDHAPKARSLDLAKHRRILGDWLATVPGLVAELARDELADITRLTETINALAKRIGQRVRDVAPALLSLPGCGELTAAKLVGETAGVTRFKSEAAFARHAGVAPVPVWSGNTAGRVRMTRSGNRQLNAALHRIAVTQIRLDGLGQAYYRKRIDAGDSKTEALRCLKRRLARVVFHHLHTDYHNRIQPCQPAAA

SEQ ID NO: 121221 - protein, 397 aa, unidentified
MYLNVGIDVSKNKHDACILNENGEQIGKFMKLTNTKTSLDKFLEQIKLISEKNGAEVRIGLEATGIYWYSLFSKISDDHKISIYNPTQIHAFAKVNVRGSKTDKIDAKTIANMLMFGNAPQTNYSDKQRLELREYVRFHWKLTNNKTNLKKRFKRNLHLVFPGYDQVFKDVFTKTSREILSQSPTPDDILEMGEEKLLELMKKASKNHIDKEKARELIVKAEDTIPSEILKESSLFELQIMMDMIENLENHIDTLENRIFAIWDKVKDKHYIQTIPGISEFRAAMIWAEIGDIENFKHPDQIVAFAGLDPKVRKSANREVIGGPNKRGSSTLRWALGWAVQESKNVNPVLAPYFEKKIAEGKHYNTARCAASKKLIRIIWSVEKNKKPFQIPSNLKS

SEQ ID NO: 121222 - protein, 337 aa, unidentified
MKYSGIDLHSNNSVVVVSDEADRVVYERRLPNELAKVLEALEPYREELAGVVVESTYNWYWLVDGLQAAGYRVHLAHTAAMKRYEGLKRSGDVTDAAQLAHLLRLGILPTGYIYPPAERAVRDLARRRMQLVRHRTMHVLAVENVQSRQSGKRMSGDRIKRLKAQGVEALGWAQEVALGMQANVAVIGTLNDEIAKLEKHLAKRVQLRPEYGLLTTAPGIGRILATTIMLEAGSIERFERVGNFASYARCVDSVRLSNGKKKGEGNVRNGNKYLAWAFIEAANFARRWCPEARRFHDRKRAKTNAIVATKALAHKLARACYHMLKTQQPFDAKRCFA

SEQ ID NO: 121223 - protein, 352 aa, unidentified
MQSSNSTDRVVIAVDPHKASWTAVAVDSGLRPLAAVRVEVNRDGYRQLQRFARRWPQATWAIEGAAGLGAPLRTKLAADGVEVLDVPAKLARRVRMLSTGHGRKTDEADALSVGIAALTATRLNSSQIDDTIAALRALTEHRDDLVRARTQAVNRLHALLAQLVPAGLPRHLSADAAAAALRSVRPRAVLARTLRQVAVEILADLRRLDRRVEAATQTVSAAVATSGSTLTELFGIGDLLAAKILSRTGVINRFRSAAAFASFAGVAPIEVSSGDVQRHRLSRAGDRQLNYALHVMAITQIQRDTAGRVYYQGKRAAGKSHKEALRCLKRRLADVVYRTMIKDTETSLSPST

SEQ ID NO: 121224 - protein, 379 aa, unidentified
MRRVCGLDVHKDSIYMCILYENGSKIESVFGVLTPELDKLRDLLVSHHVCEVALESTSIYWIPIWNILSVDFSLKLVNPYFIKQLPGRKSDVKDAEWIATVLQKGLIRGSYVPDCMIQCLRQYERRNHELSKNIVHAEQRMDMILQRCNIRISNYVSCISCKGYQKVVNAIISGESNPKVLVTLIHKRTLNKHGRQVVEDSLNGFVSDTDRDILRQYRDERMQMEQHKSENKAKMQAICEAHYCEELELLQTLPGIKEESAANIIAEIGVDMKMFLTASAIVGWAGLKPRNDQSAGKIKSRKSTHGNKYLRKILVEAAWSAARTKDSRFMKMYQRLLARGKSKQKALIAVVRKLLVLIWNMLSKKEAFNPEYKRRIQAA

SEQ ID NO: 121225 - protein, 368 aa, unidentified
MYNSTTSLTYVGLDVHKDTIAVAVLRPGNEGADQQTVSNRPEAVRRLVSSWNDPGSFQVCYEAGPTGYELQRHLASLGVSCQVVAPALVPRRPGVRIKTDRRDALNLAGLYRAGELTPIRIPSPEEEAIRDLVRLREDLKQDVLRARHRLTKFLLRHGRTYEGHSWSGAHTVWLNHQEFSHAAEKSTFSHYRTALDLRLAQLAGLERELEAYLSGPPFGEMVSRLVCLRGISYLSALTIASEVVDFARFASPAEFAAFVGLVPSEYSSGKSERRGSITKTGNAHVRRVLVEAAWHYRHRPAVGANLYRRSQRQPPEVLAAAWQVQVRLCGRYQRLTKRGKRSAVAVVAVARELAEAVCAFMQPDTTAA

SEQ ID NO: 121226 - protein, 343 aa, unidentified
MQVTTIGLDIAKRVFQIHGIDGAGTVVVRRRLRRSELLQFFAQLAPCLIGIEACATAHHWARELMALGHQVRLVPPSYVKAYLKRGKNDAADAEAICEAVTRPNMRFVPVKSTEQQGVLVLHRARELVVRQRTMLVNGLRAHMAEFGIVVPQGIQRLPELVALLEDGRTDIPQIAREALAAMVVQINNLTTSIRQMERRIVAWCRANASARRLATIPGVGPITASALAATITDPTLFRSGRHLAAWLGLVPRQHSTGGKAKLGRITKMGDQYLRKLLIVGMTAVIRSARRTKAPAFAWVNALLERRPARLVSVALANKAARIAWAILIRGETYRAPTTTKAAA

SEQ ID NO: 121227 - protein, 369 aa, unidentified
MDKPIIYVGLDVHKDTIAVALAEAGKRGEVRQHGQIANTPAALKGVVARLSHGGRDLRFCYEAGPCGYGIQRQLTTAGHECVVVAPSLIPRRPGDRIKTDRRDAINLAKLHRAGELTAVWVPDQAHEAIRDLVRARLAAVRSLRQARQQLSGFLLRHGHHYHRPAWTLMHRRWLAGLRFEQSVHHIVLEDCIATVEAATARRDRLHAHIEAALPGWSLAPVVHALQALRGMALVVAATMIAELGDITRFTNPRQLMAYLGLVPSEHSSGATRRQGGITKAGNSAARRMLVEAAWSYRFPPRISRELLLRQEGLSKAVRDTAWKAQERLCRRYRKLSQAGKLPTVVTAAIARELAGFVWAIAQLVQQANG

SEQ ID NO: 121228 - protein, 427 aa, unidentified
MKYNQNERILQITEKTLIVGIDVGSETHYARAFNFRGVEFGKVLKFNNDVEGFEELAKWSGKIAKEQNFSKITVGMEPTGHYWFSIAEFIKEKGMKLVLVNPHHVKKSKELDDNNPSKTDRKDPKTIAMLIKDGRYMEPYIPEGVYKELRTAMETRWHIMKELTAIKNRVCRWIHIYYPEFNKVFADWEGKAALLILNECPTPKKVLEKGIEGLIAIWRRHKIRTVGRKRAVKLIESAEFSVGCREGLVSAENDLLMLLEDYHRKTEQLERTLALIENLAMQVPGFEKLLEIKGIGLVTAAGFIAEVGDVNRFEHPKQIQKLAGLSLKENSSGKHKGKTTICKRGRKRLRYYLTFGIMPLLSKNEEFRQLHQYYTTRENRPLKKMQSLVALSNKLIRIFYALLTKQTAYDPQKMMNDIKRAELLKVA

SEQ ID NO: 121229 - protein, 370 aa, unidentified
MTTAPTIVGIDLGKNWFHLVGLDGRGAAVLRKKLNRGQLAEYAATAPRCVVATESCPGSQYWGRVFAKAGHEVRILPAQFVKPYLKANKNDFNDAEAIAEAGNRASMRCVPLKTTEQLELQALHRVRQRIIVERTAVVNQMRALLLEQGIVIPLGRALFARRLPAIFEDAENGLSPRLVGLLHRLRQRWLAIDIEIKDATRDLTTWADQSDMCRRVVTVPGIGPMIATATVAAVGNGRMFTSGRDMAAWLGIVPRQYSTGGKPTLGRISKRGNTYLRQLFIQGAQSSFLHLKRDHSSLGEWLRQVEARRHRRSRWSRSPTRWSGSAGKYSRPRRCTNRIRPAWPRRTRPSSNCEGSLDVMAQPSTGAPPA

SEQ ID NO: 121230 - protein, 365 aa, unidentified
MPSVTPPAGLIHLGMDTSKNTIVAAVLMPGEQIPAVDRIFNDEAAIRRLVGRFPDRGLLRACYEAGPGGYDLYRLLASMGVACDVVAPSLIPKGGSDKVKTDKRDSFRLARLHRAGELTPIRVPSPAEEAVRDLARVRAAVLADRKRAQQRLTAMLMRHGRVWRNTYWTGPHRAWVAAQSFPEPALATALAHYRAALDTRESELACIEAELAPWARREPLAAAAGRLCCYRGIAELNGLTLAAEVAGWRRFASARAFMGFTGLVPAEYSSGQRTWRGHITKAGSGPVRTALIEAAWAYRFSPAVGVTLRRRQQGAAPDTIARSQKAQRRLHGKYRRMVTGGKAAPEAVTAVARELAGFVWAEMTS

SEQ ID NO: 121231 - protein, 462 aa, unidentified
MPKQDRKKKSPRGKRSQDWEALPALNQNAAGIDVGNTEHYVAVPAGRDAEPVQNFGSFTADLHRMARWLKACGIQTVAMQATGVYWIAVYQILEEHGLQVNVVNAHHTKTLPGRKTDVLECQWLQKLHTFGLLNNSFQPAEEIWILRTYMRQREKLVAAASTCIQHVQKALTEMNVQLANVISDISGLTGMAILRAIVSGERNPQALAGLKNERIQASREEIAQSLEGNWRQELLFVLEQSLALYDTYQIKIAECNLRLESHLKRMESKTTVEQQPAPKASNARSHRKQMPGLDMGSQLYRIAGVDLTQIDGIQVQTAQTVISEVGVDMSRWRTEKQFASWLGLCPDNRISGGKVLKRGTRHVVNRAATALRMAAWSLFRSRSALGANFRRLRRKLGAPKAVTAMAHKLARLVYRMLKFGQGYVDKGMEHYEAKYRQDQIKWLAKSAAALNLQLIPLAEVVD

SEQ ID NO: 121232 - protein, 493 aa, unidentified
MLSPIQESNKSHPGLPLLHPIIARRQIGMARKTKNVKSKDRQRLPRSLKTIYANAAGIDLGSREHWVCGPPREDGTPNVQRFGTTTPELFRLADWLKEQGVKTVAMESTGVYWIPLFEILDNRGLEVLLVNARHISNVPGRKTDMLDCQWIQLLHSCGLLRGSFRPSDDICRLRALIRERNTMVEQRSDWVRRMQKALDQMNVCVHHAVSDITGVTGMAILRAIVEGERDPFALARLRDARCRKSEKQIAEELTGNWRPEHLFNLRQALKMYDQLCAVIEDYDTEILTYITKHQPEQAASYPAPAHSSKSKARTLAKRGQEPLRQALYAFSGFDLTTIDGIGVDTASVILSELGLDFSMFPDESHFVSYLRLAPNLSISAGKKVPSKFKPTTCTRVSNALRMAALTLRNSKSALGGLYRRIAWRKGASVAIFATARKLAQLIYRLVRYGQAYVDTGTEAYDARFNQRRLKFYTKALKEMGYSLQPLTENTLTA

SEQ ID NO: 121233 - protein, 430 aa, unidentified
MKSNTQNAKIEAITEKTLVLGIDVGSETHYARAFDYRGIEYSKKPFKFSNTEAGFVTFKEWILDIKERHEKDKVVPGMEPTGHYWFNLGKFLQDNEMKPVLVNPHHVKKSKELDDNNPTKNDRKDPKVIAGLVREGRYMIPYLPDGVYADLRTASNIRFQLQAELTRIQNRISRWFNIYFPEYKTVYGKPDAKSGILILKAAPLPEDILTLGIDGVNQIWRDAKLRAVGKARAKTLIEAAEHSVGSKEGAVAARMEIRMLLEDYESRSIRLQEVMTLIEGLVKQIPMAEKLLEIKGVGIRTVSGFLAEVGDISRFNNPKELQKLAGLALVENSSGKHKGETTISRRGRKRLRYLLFEVAMSLVSKNQEFRELHNYYTTRRLNPLKKMQSLMAIAAKLIRVFYVMLTKGVNYDPKKMVNDIKRPAVYLQTA

SEQ ID NO: 121234 - protein, 380 aa, unidentified
MKHQMGWTAPGFLSHYPGRRNQRIGTARMNISMIGLDTAKSVFQVHGVDESGKAVLKRKLQRSEMVPFFEKLPPCTVVLEACGAAHFWARTLIGLGHDAKLIAPEAVRPFVKKRKKNDAADAEGLVTAGRQPGTRFVPVKDTEQQGILAIHTSRAILVKQQTMLSNSVRGQAAEFGHTAAKGNEKLAELVTEVEADELVPARARQAIVVLYDQHRALDEQIETLEAEIVAHAKNDEKARILDAIPGVGPITASLVVATVSDWSVFKTGRDFAAWAGLVPRQNGTGGKVRLGKITKAGNKQIRKLLVIGATSMVHRAEHWDSALGRWTASLLKQGRPVRLVTVALANKVARVMWALMAHNDVYRPQGAVKPSAAASAAVVA

SEQ ID NO: 121235 - protein, 386 aa, unidentified
MQHATTLPAPPRTCSRGDCATLFVSLELSRSTWVATALAPGSSKMSKHTLVGGDGRKLLDLLARLKTRAEQRIAAPVKVVTIQEVGLDGFWIHRLLEANGIESHVVDPASIAVPRRHRRAKTDAIDGETLLRTLMAWQRGEPRVCAMTVPPSPSEEDRRRISRERATLLQERVRHTNRIRGLLFGQGITNYNPLHKNRRKNLEQLRTGDGRSVPAHLKSAILREIDRLELVLRQIGEVETERDEMLQLAQPSSPAALLMRLKGIGAEFATVLYLEGLFRQFENRRQLAAYAGLAPSPWKSGSIDHEQGISKAGNPRLRSTMVELAWMWVRYQPASALSCWFRQRVGSKRGLIRRISIVALARKLLIALARYVSHGEIPAGAIMKAG

SEQ ID NO: 121236 - protein, 397 aa, unidentified
MYIVGIDIAKRKHEAAVIDGDGAVIIKPFSFTNNCSGYNRLLAMLTKAKLPLDEVSFAMEATGHYWLALFTRLQKEGFRVQVINPVQTNSIRSFYIRQAKTDPRDALLIAEVIRFGHFSESTLHPENIYELRELCRGRHAIVSMQADVKRKVVALLDQVFPEYETAFTNMFGDTSMAILQTCPTPKELSEMPLEELCHLIEVSSHKRFRMVKAQELQELARNSFGFAMAGDVFSTMIRLYAKHLDFLKQQVREMDRKIAEIMETLDTPITTITGIGPTLGAYILSEIGDINRFSSAAKLAAYAGIDPTMRQSGEYNGVRNRMSKRGSPYLRHAIWLAASSAVLHDPALKLYFQKKRDEGKPYMASVGHACRKMVSIIYAVMRDNKAYTPYIPNEISA

SEQ ID NO: 121237 - protein, 340 aa, unidentified
MTITTVGIDLAKNVFAVHCIDQNGKAVLVKPKVSRAALSELIAGLPPCVIGMEACSGAHYWERLFRQYGHDVRLMAPKFVSPYRMAGKTGKNDAADAIAICEAVQRPHMRFVPVKDESQQAMQCLHRTRQGFIQERTATYNRLRGLISEFGVIAPQSTDALRHVVSDQKETLPVQVRLCIDDLLTHVTNIEEKIAEYDRVLSRVAKTDHRSQQLMELKGVGPTTASALVASIGNAHDFKNGRQLAAWLGLTPSQYSSGGKSKLGRITKAGDAYLRTLLVQGARSVMVGAENRTDPFSRWVCSLIGRRGYWRAVVAIAAKNARLCWASLHYGDDFRLYSTT

SEQ ID NO: 121238 - protein, 427 aa, unidentified
MLIVGSCRRLAEILISDKVAWMNGLWACAASQKSFFMGGNTMICVGIDVGKNTHYACVANDRQTILKQPFAVPNDEAGFSKLYAAIRKHPKEKVVVGLEATSFYGENLITFLAGHGYKVALINPIQTSALGRGNIRNAKNDKIDSRGVCKFLATEEYRLLQPGELQMLELRGLCRFRQTLRKSTTRLKTQLTSYLDLSFPEFHQAFSSVHGKGAYAALMEYPTAKSMQKANIIKLSSVLLKASRGRLGRARAEDLKRLAKQSIAYGSRDMSLQIQLTIPQIRMIEQQVKQVEKQIETIYNQLNSVISTVPGIGVISGAIILSEIGDIKRFSNPGQLIAFAGLDPIVRQSGNFRAANTRMSKRGSSLLRYALVNAAWHISVHNETFKKYYQEKKAHKGGHYKTLGHVAGKLTRVIFMMLKNDVAFNLP

SEQ ID NO: 121239 - protein, 345 aa, unidentified
MKRSTTLIENQAVYAGIDYHKLGSVVTLGDKAGSVLLQEKLVNDENIIRKFFLRHGPLSCAIENCRGNEWFVELLKTCGCSVKVSNTYAVRLIADSTKKNDKIDSRLLMELLAKDYLPTCYQPSQEERSLRERLRWRTQLMRTRTKYKNIAHALMDKENKGAKIGSAKSRKELAGNKHLSEQRQVRLKRNLKVIDYFEEKVCSEDQELLMLAKKNPDIERLKTIPGVGDLSALMIIAEFGDVNRFKKAGNISGYLGLVPRLYASSDVRRLGSITKQGSGAMRRILVQDAWMAIKTSEAFKKRYNTIMRRRGKKVAIVAIARMIAETAFCLLRDKTEFDEKRLTLG

SEQ ID NO: 121240 - protein, 482 aa, unidentified
MKKRNIYQNQSQELLSLFEEAGSSAKVMCVPMDYAKKDHLVMFCNGHGDILRKPFSVKNSPEGIEYLLDQMTRSCRRRGIKREHVFLGGEDANSFAENFVSTLRFKGWLVAGVNAHDAKKQRVNLQASTDRIDLMGIATMLLNCRANCCPAATGIYRNLRTLVRHRRKLVVMLTEVKNRAHGIVDRLFPGFLNENKSGIVPFTQSSLYLMENRFSPKQIRRRRRQPLIEILKRFGTSKAQETALKLQQYAAKVLHTPDEYIDTLQISLAQHVKHIRCLKESIVQLEKEIAVNLAQTQGAFLTSVRGIGIVLAAGVSAEIGDPYEQKPLNNVISYSGIIPRVKQTGGVDGKTYTGHVAKRCNRILKDYVVKSAYHLGLYGPEDLMADYKRRDASGQHADFGIGRRYLRMAMSLMRTSQVYLSPRLRKADTALEERAGHYLTSWPFLRDKWKKAGALEAAFSKDRPLGLWRQIVQKLYDIKLKL

SEQ ID NO: 121241 - protein, 410 aa, unidentified
MLELFVGDDWAEEHHDVELMDPAGRRLARARLPEGVAGMARLHAMIAAQLGEGVEDAVVKVGIETDRGPWAQALVAAGYEVFAVNPLQAARYRERHSVSGAKSDKADAHTLADMVRTDSHQLRPVAADTPRAEAIKVVARAHKTLIWERTRHTQRLRHALREYFPAALEAFEDLAASDTLELLSKAPDPGAAARLSISQISAALRRARRRKIEEKAAVIQSALRAEHLRQPEVVVAAYAAAVQSTVAVLRVMVEQVKTLQGQVESHFGRHPAAEIILSQPGLGSILGARVLGEFGDADDRYVSAKSRKNYAGTSPITRASGKKKLVMARCVHNDRLIDALDAQAFAALSASPGARAYYDRIRVRGVGHRAALRQLANRLVGILHGCLKTGTVYDEATAWPADATASPAAA

SEQ ID NO: 121242 - protein, 367 aa, unidentified
MKNTIVQDEGAASLEVAVGKVKLPGSVIKIGLDVHARLYVAVAQYDQLLPKPARRLLPTEFVPWVEQLLRAGHTVHVVYEACGFGFGLYRQLKTIGADCHVIAPRKLDEQYTRVKTDPRDATTLCQRLSRYLDGNTRELAVIRVPSEEEEQARHVSRQREQLVQLRQKLEFQGRSLLVNHALPSPAHWWKNQTWSRLSKLLPGWLIIRLEVHRPALLTLQQQIDALSAELEAAAPADIPAGIGKLTTVMMTREICSWERFKNRRAISSYTGLCPGEHTSGNKRIPGSVTKRGNPRLRAALVECAWRMVRFQPNYPPVKKRLAVLCKGARATGAQRKKAIVAVARHLAIDLWRLHTGRNTAQQLGLII

SEQ ID NO: 121243 - protein, 349 aa, unidentified
MKILAIDLGKYKSVACNYVTATGTARFATVVTHANELDRLLSQESPDLVVIETCSIAGWVHDLCCQRGVKCQVANPSSEAWKWKNVKRKTDRDDALKLAQLAALEQLPTVHVPAPETRQRRALLKYRQSLITRRVAIQNHLRAIAQRQGILLDRGSRAWTAAGFEVIQQLAKPLEQCSADELWRGEAALELQALEAVTKLLREVERKLEAFAASDESVKLLRSIPGVGRCTAEVVVAYLDNPQRFENGRQVSAYAGLVPKQFQSGETDRRGRISRRGPSLLRKMLVEAGWILLRYNSWAQRLMLRLSRGQKTRRKQAIVALARKLLVRCWAMLRDSTEWREPPPATATT

SEQ ID NO: 121244 - protein, 422 aa, unidentified
MSYCPVAGIDVSKRFSDMCILSPDNKIFAQEKIYHDETSINRANALLQKAERLFFSKPVIVMESTSHYHLILFQFFSEHGYDVIVVNPLQSNSMKDFSIRKRKTDRVDAFKLAMMYRTKTLRPSQIPQTATRALRQLCRHRAELLNDVSSYKNRLTALLDQTFPGYDKVFSDVGGVTSCAVLVRFPTPTILLVEEESELVEVIAAASKSGYSFAKKKAGLLISAAQKAQTLGIHSCADETLIVCTIQMLRTLSESVLQIETAIDNLLAQIKEMRNNVSLLQSIPGVGSHSAALLLGEIGDISLFKKPKQLAAYFGLDPTERQSGSFRGTKNKLSKRGFPYARAALHMGVVNSICKRGKDSAANPVLLSYYEKKCKNKPAKVAQAASMHKLVFIIFAVLRDQKPFELKTPEQHAVEQGFVKAA

SEQ ID NO: 121245 - protein, 403 aa, unidentified
MNMNAVGIDVSKGKSMVAILRPYGEIVSSPFEIKHTSGSIQSLIEQIKSIEVEARIVMEHTSRYYEPLARELSQAGLFVSAVNPKLIKDFGDNSLRKVKSDKADAVKIARYALDRWTDLKQYSFMDEIRNQLKTMNRQFGFYMKHKTAMKNNLIGILDQTYPGVNTYFDSTAREDGSQKWVDFAMTYWHVDCVRKMSLNAFTDNYQKWCKRKKYNFSKSKAEEIYGAAKELVPVLPKDDLTKLIVKQAIEQLNTTSKTVEELRTLMNETASKLPEYPIVMAMCGVGPSLGPQLMAEIGDVTRFTHKGAITAFAGVDPGVNESGSYEQKSVPTSKRGSSTLRKTLFQIMDVLIKTKPLNDAVYQFLDKKRAQGKPYYVYMTAGANKFLRIYYGRVKEYLTSLPQ

SEQ ID NO: 121246 - protein, 312 aa, unidentified
MTDITIGADISKDHIDLHSLPDGGTLKVANDRKGFAAIVRWIGTKGVERIVYEPTGAYHKAFERFMMVQRLPLSKVNPRLARRFAEATGRLAKTDRIDAGLLAHYGALLQPRILQANTQIHNDLKELHVARLALIKDRTAAKNRAKNLSNLLLKRQNVDRLRHIERQMKAVDEAIVALIGADVSLKARFDILVSIPGVSQITAFTLLIEMPELGELDEKAAAALSGLAPMNRQSGRWAGRAFIAGGRAIVRHALYMPALVACRFNPDLKTKYQDLTKAGKPPKVAITAVMRKLIVLANALLRKNRKWEPKPT

SEQ ID NO: 121247 - protein, 348 aa, unidentified
MNLKRIGLDTSKAVFTLHGVDQDEKAVLRRNMKRAEMEAFFAKLPPTRVALEACGGSHHWGRRLVALGHTVQLIPPQYVKPFVRRGKNDRNDAEAISEAAARPDMPSVPVRSAEQQAEAIVLSARELLVQQRTQLVNAVRGHAAEFGVVAAKNISQLPALLQAVAAEEVGPDAAKQMLAFLGAQVTQLDGRIAELERRMKQQHKANPVSRLLAEVPGIGPISALSLALTIDPGRFQSGRHFAAWLGLVPKEHSTGGRQRLGGISRAGNERLRQLLVVGAMAVIRYAKPASKSASAWLLALLERKPRKVAAVALANKMARIVWAMMATGEAYRGSKTVATQAAETAAAA

SEQ ID NO: 121248 - protein, 514 aa, unidentified
MSEGTAQPPFSRLCPRLLRKHSAWLIRHIPLTQKFHPQPLAPAKKADWVHAHCARVRSPYAAQDKPFASGFTNPHRNGGDIMLKLNYMSTLFVGIDVSSKSNSVYAMDFEENKYISSSFGNNQPGADQLVNMIAECMQKHKNLDTVLIVLESTSVYSVHISNFLSTSEVLMPYKPYVFCVNPKATSNYRKSYIGMEKTDPTDAYLIADFARVGRTKKLEPWRGGQFIALKRLTRHRMHLSECITREKTYMVSNLYLKFSELQLLEGDDKPFGNLYGATSSAILTEFLSPQEIIDMPEEDLLTFLAGKSRNRISDLSKTSELLRKAARDSYRLDKCMYEPLSISLASSFNCIHAYQKEIKLIEQAIEKCIKGMNPNALIILQSIPGIGPVWASGILSEIGDISAFHSSDALAKYAGLYWPKGDSGDFISEDNQMSKAGNPYLRHYFGEAANSIRKHIPEYADFYARKYAEVTKHQHKRALALTSRKLVRLVFGLLVKNQLYTGEKLDTEHNTESN

SEQ ID NO: 121249 - protein, 416 aa, unidentified
MNAVGIDVSSRKSTVAVLRPLGEVVCLPFDVTHDIAGLASLAEKLKAIDGETRVVMEHTGRYYEAVAKALHEAGFFVCAVNPLLIKEYGANSLRRVKTDKADAVKIARYALDNWADLRDFTPMDAIRYDLKTLNRQFQLASKQRTASANNLIALLEQSFPGIRKCFDSPVRSDGTQKWVDFAHSFWHVDCVRKQPFAAFCERYRKWCKRHAYLFKLSNAEEVYALAKRAVVLTPKSKVVKVLVQEAANQLSSISRSVEVYRAEMDRLAAMLPEYPVVMAMYGVGKSYGPQLMAEIGDVRRFERKQALVAFAGIDPMPNQSGDKNVRSNKSSKRGSPYLRKTLFNVIRTYLQCAPQDEPVFQFLNRKRAEGKPFYVYMLAAANKFLRRYYAKLRDYFASLDTLQPVAPIPTILKATL

SEQ ID NO: 121250 - protein, 395 aa, unidentified
MFIVGIDVAKRSHEVCMITSDGQTVQRPFSIRNNCTGYNLMLEKIRKHTNIKSQIVFAMESTAHYWLALFTRLRKDGYHVILLNPIQTSAMRDMFIRKIKTDAKDSFIIAELIRFGRYAESNVAQDRLLALKELCRNRFYLVDMAGDLKRKLIALIDRVSPEYEAQFDTIFCKSSVALLKKYPTPQKLSNAHLDKLTELLWNSSNGHFGEWKARELKELARNSFGVEDCDGAYSTLILLMLDQIQSLSGKADALEKEISQLFQSFDTTVTTIPGVGPIIGAVILSEVGDISRFSSADKLAAYIGVDPSVNQSGEFQAAHAHMSKRGSPYLRRCIWMASQVAVQRDPMFRAYYEKKAAEGLKYMTIIGHVTRKMTAVVFAILRDHKVYEPVLPTAA

SEQ ID NO: 121251 - protein, 354 aa, unidentified
MLIIGCDYHPSFQQIAVVDTETGEVKERRLVHREEAEKFYRDLAATGQPVRVGMEASGHSRWFERLLAELQLELWMGDATEIQRKRGRKQKTDRQDAQHILSLLLKDDFPPIWVPSWENRDLRQLLWHRHRMVQARTRIMNQLQAVALNEGLLCRKKLWRERGRQQLEAFQLAPWARRRRHDLLEMLDRLNPTITELSQAIEREVEKCPAAQQLMTHPGVGPLTALAFVLMIGDASRFQCGKQVASYLGLVPLEDSSGNRRRLGHITKQGSSMLRFLLVEAAQVTVRSLPEWRRKYAHLMMRRGRKTAKVAMARRLAIRLYWMMRQGWDYQQWSKFGSHAGQPGNRDGVPSNIE

SEQ ID NO: 121252 - protein, 366 aa, unidentified
MEQKKGRFVGVDLAKRSMEVCFLAHDGTAERRSYRTDDDGRRRLGSALRKSDRVAVEACSLAFVLSRQLEREVGCRVSILNPGKLAVIWQSTRKTDKEDAYKLASLIQRFRADELPIVAVPTEREEKLRGVVSMKHYLVKLRTSLLNRLHAIYVQAGMTFVKKSDLATAKTRQKMALHLSGQLERFAAIIGAELGVTEGQLASITEELRTMVAEHELAPYVMSIPGVGPEVAAAFLAYVGDGSRFAGPAQVANYIGFVPRIDCSGETNRYGHITQEGCQAVRGVILQAAWSVIRCKEGGRLKEKFFLLSQRRGKTRSAVALARRMVGLMWILVTRREYYADASKQMLEKKFRRYGLKSEGWEASVA

SEQ ID NO: 121253 - protein, 328 aa, unidentified
MGNVTTIGLDIAKNVFQVHGVDADGAAVVRQRLTRGRMLKFFAKLPPCLVGIEACATSHYWARELVALGHDVKLMPAQHVKSYVKRGKNDAADAEAICEAVTRPTMRFVGIKSPEQQSAMMLHRVRLILNRQGTQLSNAMRAHLAEFGITAPIGRNGIEQLLDVIADPTDERVPADARFCLEMLAAQLRIVKEQILENDRRILASARETELGRRLMEIPGVGPLLASAIVATVPDPAIFRSGRNLAAWIGLVPRQNSSGGKERLGGIYTWVLLSRPVLSVTSAKARTSLKRWSLEPGRRGSLRLRVDTPAFVKRTHDRCHCQAMQQDR

SEQ ID NO: 121254 - protein, 313 aa, unidentified
MLYIGIDMSKDTFHAAFDDERVEIFKNTVSGSVAFIEILAQRNYHTNDTVIGTESTGVYHLLLSEHMRKNGWNIKVINPFLTHRMIASTLRKVKTDRLDALAIRKTLMTGVGYTYTDTPDVLALKTLVQEREALSRMRSETKQRVHAHAIREKASAGELHDSFSGVIKLLSYEIREIEEKMGQYLPETQKLLRSIPGIGATSAAALVAHVGNINRFQSPEKLVAYIGLDCRVYQSGTSIHGKGYISKRGNRYLRFVLFNAAFIARQKNPSLKTYFEKKMKEGKHYYSALCAVERKLVHLIWAVWTRGTPFEER

SEQ ID NO: 121255 - protein, 326 aa, unidentified
MKWFLGVDVSKAKFDVALLRADGKFRSKIFSNDPAGFAALLPWVQAQVHDELTDGHVCMEATGSYHEQLACFLHDRGMRVSVVNPLLAKRFAELRRQRNKTDSVDAKCLAMFCRDEQPQLWQAPSLAVRTLQALVARLDTLVAIRQSEANRLEVAHPSVADSIRKVMAELDAAIADVKAQIARTVDDDPDLKRRAQLLETIPGLGERTIPQLLAYIGRPERFTSAKALIAYASLTPLVRQSGSSLDQRRGMHPMGHRELKRLLYFPAMVAGRHNPLVAAFWQRLHAQNKPGKVIVVACMHKLLRIAYGVLRSGKPFDARQTHLTPA

SEQ ID NO: 121256 - protein, 427 aa, unidentified
MSNNDYNKQYERRQRIKKTTLVMGIDIGADFNAIGFMNKDGNILGRLPKVYNSREGFDKFVRVTEELKAKHGLKDVLIGLEPTGHYWRKIAYFAKDQGYAVRFIRTTSLKHERELNESSSAKSDIKDALTLTNLTREGKYIDTIIEDGVARQLRTLSKVREKIQRQNTGAQNMLHAVLDDYFPELKKIFWAMNSKGLWAILETCPFPEDVLKCKQSTLADIIAKASRKKAEGARKAAALYLAAQTSIGLKRIGAADRYRLMVCLKEVKRTEGMLKEIQKELKDLLNQLPSARYLLSIPGVGYLSAAVFLGELGNPAYFHRAKQIIKYAGYDPQESDSGKRIGRKVISKKGRWLLRKFLYLMSLRAVAHSKFFQAYYQRRLETKNRFGQLLKKKEALCAVAIKLIKVIFALLRDRREFQDTASFALAA

SEQ ID NO: 121257 - protein, 425 aa, unidentified
MNLLILKGVPMSLKIVYKICCGIDVHKTFVVACIASTNDIGVTSYESHRFSTYTSGLKTLLQWLINRNCKDVCMESTGKYWIPVYNILENDCSIVLAHPKYVKAIRGKKTDKKDAKWIADLFKHDLVAGSFMPPADIRQLRDLMRYRFKLTCFQSSEKNRLQNCLTVSNIQLGNVVSDTFGKSAQAILDKLLENPADTSFDLEPLVYKSLKKKLPQLRDAIDGYITPEQAGKLKVIKSHYENLESRKAELEELILALAAPYQQELAILQTAPGIRSDFTAIGIISEIGTNMEAFPSAKHLCSWAGLTPTNNESAGKKKSVRVSKAGCYIKPLLVQCANAVVTSKKHPEIRNRYLRLKKRRGHKKAIIAIARMLLTALYHMLKNGETYKAELYRQSDLPPVDREITVEQAIIIARNQGYKIKSATA

SEQ ID NO: 121258 - protein, 347 aa, unidentified
MRFYTKQHKFSGGIDLHARTMYRCILNQNGEIVLHRNMRAAPEPFLQAIAPYREDLVVCVECIFTWYWLADLCTQEGIPFVLGHALYMKAIHGGKAKHDKIDAQKIAVLLRGGMLPQAYVYPADMRATRDLLRRRLHLVRHRAELLTHVQQTNSQYNLPEIGKKIAYQANRDGVAERFPDPAVQKSIEVDLTLIGHYEALLRDLELAIVTTAKQHEANTLYLLQTVPGIGKILSLVLLYAMHDIARFPRVQDFVSYCRLVTCAKESAGKRYGTSGTKIGHAYLKWAFSEAAVLFLRNHPAGQQYLVRLEHKHGKGKALTVLAHKLARAVYYLLKRTTAFDMEKFLRS

SEQ ID NO: 121259 - protein, 345 aa, unidentified
MDKVVAGMDLHSNNVMIGVMDMSGKRLASRKVKCDLEEVVKFLAPFKSRLEKIAVESTFNWYWLVDGLQSLKYPVVLANPAAMEQYSGVKHADDTNDAFFLAELLRLNILPTGYIYDAHLRPMRDLLRRRLMLVHQRTALMLSFKSLYTRTTGLGMTLGYLKELEVKEAQKLYDHPANQLIAGMQIKHIEQLSESIEKIEKVVLASARELPFYGKLTTLPGVGKILGMTITMEVGEIKRFAGPGEFASYCRTVEAQCTSNSKKKGENNSKCGNKYLAWAFVEAANFARRSYPDCQAWFERKAAKTSNVIATKALACKLAKAAWHLMSEATDYQAQRMFGPSATKK

SEQ ID NO: 121260 - protein, 339 aa, unidentified
MSKLTQPKQAMVFCGIDVSAATLAVAVQQENQRFEERIFDNTTSGHKALIGWLRKDKVPARVSLEATGIYSLDLALALDRAEGIEVAVLNPKLIHRFAQTLRRSKTDSADAQVLAEYSRRMPFAPWVAPELGGLRLRTISRHIQGLVVEQTRQGNRLHAAEQSASTPRCVVKDLKRSMASLKLRIARLRREALELVRSDEAMRKRFDLLILIPGIAAISALQLLGELAPLSPEMSVRQWVAHSGLDPSHQVSGTSVHKPSRISRAGNGHLRHALYMPALVAVRRDPHLKAFYENLLSRHKAKLQALIAVARKLLHAIYGILRTQTPYDGSKLFPRLETT

SEQ ID NO: 121261 - protein, 338 aa, unidentified
MYYTGIDLHKKTSFFTTVDKTGKVVARKNLLNDEKIILDYFGTLEQQSRVVIESTASWYWLYDLLEAHGFDVVISNPLKTKAIASAKIKNDRVDSHMLAQLLRADLIPTVYVSPLELRELKELIRHRQRLVSDAKRMKNRIHALLRKNNQVVPFSDVFGVRGLQYLEQVQLPQYHRDQLHTYLSMYQKLVEEIKPLTQTLNGLATDKPIAKLLMSIPGIGPIVAMTIFAEVGDISRFPSYRNLASYAGLVSCLDASGGKYRMGSITKRGSRYLRTALVESAHAIARIKNCRLTLFFRRRIVRGGYKKAIVATAHKVLKIVYYVWKNRIPYQETYPVCA

SEQ ID NO: 121262 - protein, 344 aa, unidentified
MGEVRAIGLDIAKSVFQVHGVDVAGAVVIRKRISRAKVLEYFGELPPCLVGIEACPSAHHWGRELQKLGHVIRLIPPSYVKAYLKRSKNDANDAAAICEAVTRPSMRFVPIKTKEQQTALMLHRTRQLLVRQRTMLSNALRGHLAELGIVSAKGRSGTAELLRIIRDGEDSRVAPAVRGILDVLARQYGAIGTEIASIDKRIMALHRACEASRRLAEIPGIGPVGATALVAEIGDWNSFSSGRSLAAWIGLVPKQHSTGGKDRLGSITKQGNRYLRWLLVVGAMAVIRYARKHGTERRPWLGRLMERRPTKVAAVALANKIARMAWAIMVRGERYKEPKLSLAA

SEQ ID NO: 121263 - protein, 330 aa, unidentified
MEIKAHLGLDISKNKIDCCLLINNEAINFIIDNNSNGFNNLLTQFAKYKIGLNTIHVCSEATNVYYLPVSKFLFENGALVSVVNPSIIKSYAQFKLKRVKTDKQDAKLIAEFCVKENPEKWQPESAEQVKLKSLHRRIEQLLEMQIMEKNRLGVADSVALHSINQMIDFLSKQVELCRREIQDLINQSKNLKRQQEILESIVGIGKTTAQILLSVMIDLDKFPTYRHLVSWLGLSPIIRDSGNKKGLSTISKMGNRPIRKALYMPARAACTRSKLWRSWFEAHLARGKHPKQVYVLMMVKLVKYAYTCLKNNTYFDVKRHQDVGAEEMGV

SEQ ID NO: 121264 - protein, 431 aa, unidentified
MSKFFYRPTVGIDVSADFSVVAILAPNGEVHRKPFKIKHNRNGFDYLVDQIKKAEKEFNMKTAIFMESTGVYHLTLFHFLKDTFETCILNPLITNCNKNGDIRKVKNDKKDALTIAKIGKFQNVKYSSEFDIEIYTLKALCRDYYKFTDSKSTFKKKLSTDLRVIFPGYSSVFSNITCKTSIAILKQYSSPEYILNADKNKLIELISNCSRKGLARSEKIYKKLIDAAKDAIYIGLKSPSLFVKITNTISIIEALEIQLKNLLIEIHSLMKSNKLSEEFKKNIQLIYSIPGVGELTSVTIMSEIGNIKSFIKPKHLVAYFGIDPSVNQSGKFNSTRNTMSKRGTKIGRRALYAVALASIRTNRNGQPINKILLSYYKENLNGKSKKVRLVSIMHKIVNYIFSVLKNQKEYELRDPKMHAKMYLKNRFTTAA

SEQ ID NO: 121265 - protein, 449 aa, unidentified
MKKKVLMEIINPYAAGIDVGSRSHFVAIGQSKDDVKEFGVYNEDLQAIAVWLLANEVKTVAMESTGTYWQSLFAVLQNAGLQVILCNGKFTKNIKGKKTDVQDCQWIQKLHTIGLLSGSFLPDEATEQLRTYCRHRGNLLDNAADTTRKMQKYLRLLNLRLDVVVKDVTGLTGLAIIEAICKGETNAEILASLRHGNCKKSEEEIAKALQTNGRKDYLFALKHEYRMYQNLQSAIKDCDIEIEKMLNEQINNNEDKRQHYVDKKVHKKVNKNAPKNIDINLMSYQYFEGVDLMAIEGVSHSTVLTVMSEVGLEGLKKFGTAKQFASWLRLVPNNKISGGKVLSHKVPKGSNRLKIALRNAANAIGNLKDTPLSNFFNRINFRKGRVSAVSATARKLAVIIWNMIIKKQPYNNNHGYEFLDQKRKRKVQEMRKLIHKFDIKTDELGLAYQ

SEQ ID NO: 121266 - protein, 360 aa, unidentified
MAETRIAHDDQVRVTVGVDTHKDTHVARAKDQLGRRLGERAIPTTPAGYADLLAWAKGLGVVETFGLEGTSSYGAGLARHLRREGQVVVEVIRPNRQARRRNGKSDPADADAAASAVLSGDASGPPKAGEGTVEMIRALRVARSTALKARTQAANAMQALVVTAPDQLRQSLRGLSKIELVRTCARSRPGKLAGTTAATKAALRSLAVRHEALEAEVKALDGEIGPLIATTAPELLAVFGVGPDTAGALLVAAGDNPDRLRSDAAFSMLCGSSPVEASSGKVTRHRVNRGGDRQANAALYRIVLVRLRHHEPTQDYMRRRTTEGKSKPEIIRCLKRYVAREIYAVLCIMAVRAGLADVAA

SEQ ID NO: 121267 - protein, 347 aa, unidentified
MSICMIGLDTAKTVFQIHGVDEAGKAEIRRKLRRNDLIAFFEKQAACTVVMEACGAAHHWARMLTGLGHSVKLIAPEAVKPFVKKGKKNDAADAAAICEAASRPDVKFVPAKSVEQQGILALHAARSLLVKQQTMLANAMRGLATEFGITVPKGIHKLDELMAVVDADEIIPKPAKQAIAGLHDCCNNLSDGVETFETEIVAHARRDETARRLATIPGIGPITASLIAATVGDISLFKTARQFAAWLGLVPRQSSTGGKTRLGRITKTGNREIRKLLVLGATSMVYRADGWNSAVGAWLRSVLERRPVRLVTVALANKMARIAWAVMTRKEVYRPKGGVAAVAQAAA

SEQ ID NO: 121268 - protein, 368 aa, unidentified
MMGWMAPLRHLGAKMPVGQKPPANREASMNEITTIGLDLAKHVFQVHGVDAEGRTVLRKQLRRAQLLAFFSRLPRCLVGMEACATAHYWARELSAFGHEVRLMPAQYVKAYVKRNKNDAADAEAICEAVLRPTMRFVPAKTAEQQAAVLLHRGRERLVRQRTMLVNALRAHLAEFGVIAPQGLRNVGRLIAIIRDEEDTRLPGLARQVLQVLATQIEQIEAAVTGLEKQLMGWHKSNPISQRLATIPGIGPIIATAIAAMVAEPSGFRSGREFAAWLGLVPRQNSTGGKNRLGGISKRGNQYLRRLLINGASANLLRSKATNADPWVIGLRRRRPSLVVAVALANKTARIAWAVMHRQENYQRMTTAA

SEQ ID NO: 121269 - protein, 371 aa, unidentified
MYIVGIDIGKNHHEASIVSPEGKQIGRSLRFATTHKGADSLMSFIFKNIGNSPCVFGMEATGHYWYPIYSFLKAKGYTIYVINPIQSDSLRKMYIRQTKNDSIDSFLIAEVIRFGQFGTTSMADENILAMRQLCRYRDSVISSRTEIKLRIGTIMEQIFPEYEKQFSSLWVSTSMGTLEKYLTPENIENAPIDELFEIIKDKSHNRLTKAKAISIKEAAADTFGIKIAQDAFSFQLKQLIDRMNFLDKQIEALDIEIMKYYEQFDCYLHTIPGIGIIGAATILAEIGDISRFKNSSALVAFAGIDPTVRQSGEFNSTHNHMSKRGSPYLRHAIFLAATTCSFHNSPLNAYYKKKRDQGKHHLTATGAVVRL

SEQ ID NO: 121270 - protein, 336 aa, unidentified
MKQTIIKQNVGVDVSKDDIKVAISNLTVDHRVVVRCTRTFVNTARGFQQLHDWVNLKKDLEMAVHFTMEATGVYYEGLAFFLYEQEYLLHIVLPNYAKKYADSLGIKSKTDKLDAKALAQMGLERDLRLWQPVSPSLLGLKQLTREREALVCSRTEVANQLHAYRHQGKPNKESIQRSQEHIAFIDRQVKEIEQEITHLINQDEKLKTKIGYLDSIPGVSLVTAAVIVAETNGFAAFESIKQLTSYAGLDVRIQESGKWKGKSRISKRGNSHIRKALYMPSIVKKKHDSTTNRFFERIKGKKGVGMIAIVAVERKLLGLMFSLWKKEEMYSAQYEK

SEQ ID NO: 121271 - protein, 323 aa, unidentified
MDYYMGIDISKQTLSLFDGKEDGIVANTPKLEEFQAYLQESYGKRWKKVRLIYEPTGPYAYALRRFASGQGMKVFVLNPKQSAHFKRALGLRSKTDVMDARMLYRFKDLLKEEEAKVPTIDPTTARLSSYLKTYALIQKVRKIVGSHLYAHGYDEHFPIPLTQAMQAEASRLQQLETALVEALKTFAETTEELREDFALLQSIPGVGTLSAAVLLELFRRYPPTNRSRIVALAGLDPTRKESGTSLHGRSRISKAGSDLLRRILYFSCLSAVRSNDRLQAFYQHLLEEHKPKKVALIACMKKMILIAHQIYTKKEGYRPMVLT

SEQ ID NO: 121272 - protein, 360 aa, unidentified
MVPTMTYAGLDVHARSTHAAAVEVRTGELRRARFAGGVTEPLAWLAGLPGPVHACYEAGPTGFGLYRAAVEAGLRVEVVAPSKTPRAPGDRVKTDRKDAELLARLLLAGQLRPIVVPSCEVEAARHLCRAREQVRGDLMRCRHRVSKLLLLHGRVYGEPTTWNRPHRQWLARQRFDQPATELAYLDTLAAVDGLVARKTVLDERLSHLALDGEWGPTVARLRCFRGIDTLTALVLSLEIGDVARFARPGQLASWLGLVPTLDQSGESRTSGAITKCGSSFARRLLVEAAWQYLRQPRIGATLQNRQLGQPAHVLQIAWRAQYRLHDQLMRLRSRGKPGNVATVAVARELACFLWAAALAE

SEQ ID NO: 121273 - protein, 342 aa, unidentified
MSIVIVGIDLGKNSCSIVGLDSLGTVVVRRRLRRDGVIAFASKLPACIMAMEACCGAHHMGRSLAALGHEVRLMSPEYVRPYVKAQKNDDRDAEAIAEAATRPTMRFVELKSEEQLDVQTLHRVRDRLVCERTSLTNQIRSLLLERGHVVAQGHARLRHLLADLLDPATCSLSARMAFLLGDMRTRWDELDRRIAAFDAEFSAMARTDERARRLTSIPGIGALNATALVAAVGNAATFTKGRDLAAWLGLVPRQATTGGKPKLLGITKRGSRYLRKMLIQGARSAMPTLAKANTAIGAWLRALLVRTHPNVAVVALAAKMARTVWALLRHGRNYEAVPQAAG

SEQ ID NO: 121274 - protein, 332 aa, unidentified
MYYIGIDLHKQDLVMALEDEQGPVGRPRRLSCRDAALVAETVALWRPFRAVVEASASYRWLCDLLSPMGEVVLAHPLRLRAIATARAKTDRLDAALLARLLRANLIPASYVPPARYQTLRDLTRSRARLSCNATLAKNQVHALLARANVHSPFKTPFGVRGRRWLAGLDLGPGGNLARDELLRRLEHYGREVAVLDGHLEQLASEFPEASALDVLHGVGRYSALLIVAEIGEAGRFKNARQMGAYAGLTARVHQSGKTEHRGGISKQGSRWLRWILVQAAMKLVWKDEPLANFYTRVRKRAGRNVARVAVARKLAGICWVRLRAWQRAHAAA

SEQ ID NO: 121275 - protein, 423 aa, unidentified
MEALSHLQFTAYVGIDWADTKHDICLQAAGDTEHRFDCIPHQAARIDEWAKALHQRYGGPIAVALELAKGPIVAALQKYDFFVLFPINPSTLAKYRVAFKPSRAKDDPTDAELALDLLFRHPERFTPLKPQSAAMRSLLSLIEQRRELVNDKTRFTNRLCNTLKQYYPQALDWFEQTDTVLFCDFLNRWPTLMAVKRARKTTLEAFFHAHNGRRTKLIKARLESIRVATPLTEDPGIVAPCRLHVLALVEQLRTTLTAINLFDEEIAAVASTLPDYALFQSLPGAGPHLAPRLLAAFGEQRDRFQGAHELQKYAGIAPVTERSGKKSWVHWRWQCPTFLRQTFVEWAGQTINKSFWAGAYYRQQRAKGSSYQAAVRALAFKWIRILYRCWQTRTPYDESTYLNALRERGSSLLQNLDLQVQNA

SEQ ID NO: 121276 - protein, 309 aa, unidentified
MEVTTIGIDLAKNVFAVCGADSSGRVLMRRQLRRAQVLSFMRGLPRCVVGMEASGGAQYWARQLTALGHEVRLMSPALVMPYRKGNKTDRNDADAILEAVTRPSMRFAMVKSVAQQDLLALHRVRAQLVKSRTALCNQLRGLLRERGVVVRTGAAALKRSLPAALADDSSELSGEMGELLYEISQWLRSLEQCIASCEARITRKFKHDERCQRLAAVPGVGPLTATALVAAVGNAQRFRNGRELSAYLGLVPRQHSSGGKTVLLGITKRGDRYLRTLLIHGARSALRQCKLKGDALQQTWYGRTVDQRK

SEQ ID NO: 121277 - protein, 475 aa, unidentified
MNLKGTKKKNQVSNVNIFEQQELLKKIEVVRENLTASTWHELETKGKFDKNAKLSFICDDMLILGCDVGSETHYLRAIDTRGRELSKSDFSFSNNADGFSKAKEWAVKIAAEYDKKQIVLGLEPTGHYWFCLATWMISNGISVVQVNPYAVKQTKELEDNSQLKDDTKDPKLIANLVKDGNFGMPYLPEQLYADLRRLSMFRDQLNEDRIRSINRLHRELKIYFPEYKEALGKTEGTFSLELLKQAPFPDDLAALKEDGIRQIWHNAKLRGRGYSRAGEILEYAKASVGIREGKETGKLVVQWFVQKILELDAELALIETQINQKCLEIPHTDKVLEICGIGENTLSSMVAEMGDISRFDDVKEIQKLSGLGLVASSSGKHKGETKISHRGRKRLRYWLFQAAKSAVAHAEEFKKLHVYYTTREQNPLKKMQSLIAIACKLLRIIFTILKKGIKYDPRKMLKDIRRESRQESVAA

SEQ ID NO: 121278 - protein, 354 aa, unidentified
MKYYTSTTKFNCGIDLHARQMYVCLMDRDGKKLVHTNIRNNDFEFFLKLVTPYRHDLTVCAECMFGWYWLADACQGAGLHFVLAHALYLKAIHGGKNKNDRIDSEKIAHLLRTNLIPPAYVYPAQKRPLRALLRQRILYVWRRSELLARIQSHQLAHNRPTLRQTRPNREPWEIQLLAQEDHPIRQLALQNDLALSRHYDTQIATLEVQLQKLTKQHAPRDYTLLQTVPGIGEHLGLILLYEIGDIHRFPTVKDFLSYCRLVKGTVASAGKLKGLRGAKLGNAYLRWTFGEAAVIAKRDPVVIGPLAQRLEGRLGNKFKANTVLAIKLARAVYFMLRDHTVFDPERLVAALTHK

SEQ ID NO: 121279 - protein, 356 aa, unidentified
MVMLADTIDGVIGVDTHRDTLTAAAVTAIGGLLADATASTDAAGYRQLLGFATSHLPGRRCWAIEGAGSFGAGLATFLLDHGEQVIEVPRRRRSTRRTAAKSDPLDAVHIARDALITQHPAIVRRRGDREALRVLLTTRRNAVTAWTQTVSQLKALIVSAPEELRAELRGRGTKAQITYCAALRERPTRSLEHQMTARALHATARRCQLLRAEINQHQHDLHTLVVAIAPWLLELPGVGPITAAQILISWSHAGRWRSEAAFAAQAGTSPIPASSGQTKRYRLNRRGDRQLNHALHTIAIVRMRDDPLTHAYVQRRTAQGKNPREIRRCLKRIIARQLYNLLKHYDRPAIQILHAT

SEQ ID NO: 121280 - protein, 480 aa, unidentified
MLIHFRLSGHSHCISPTKLFMAKQSKSKKERFLLQQVCHPNAAGIDIAAEEIVVAVPDGRDTQAVRSFGTFNVDLQQAVTWLLDSGIETVAMESTGNYWVPLFDLLQEAKIEVCLVNARHVKGVPGRKTDVQDAQWLQQLHTAGLLNASFVPDADVRRMRYLYRYRDDLIRAGAREIQLMQKALNEMNVQLHHVISDIDGLSGRRIISAIIEGQRDPLQLAMLRHSRCKTPLEDVLKALDGNYCEEYVFALRLAYERWMEVHRQITELERFLGNLLKAFKKEEAPMPESKAAKQMELPMNLDRKQDTKHEPIFDVRKHAHRIYGTDLSLIPGVSSGVLGTLLTEVGTADAFKERFHSSKSFASWLGLCPDNRISGNKVLGSKTRSIKSRLAYQLRMAAMTLWRNDSFLGDYCRRMKAKLGNAEGITATAHKLARIIYNLITTGQTYDESHLSRMPLRVRDRRIKNLQKQAAKLGMQIIAA

SEQ ID NO: 121281 - protein, 339 aa, unidentified
MGYSGIDQHKRDSVITTYGPDGPAVKQARVPNTALQLERYCAHFPGPHRAVVESTGGWYWLADVLTTQGIDLVLAHATRVKAIAAAKVKTDQVDADTLGVLLRADLIPVAHRIRPEQRGARDLMRTRLRLVEKCVSAQNSIDRLLEKFNVSDVGQLDACYQLHAGCHAAQIQLCTQQITTLERALYPHLIPNADVQRLLWIPGLGKVNAFTIYTEIDGITRFPSVGQFFSYSRLVPGAVNSGPRTRHRSGSKAGNRYLKLAFSHAGIRAVQYYPEIRAFFKAKARRKPLRIARTLVALELARIVYHVLTTQEAFDDRFKGRALSHRKHATWPRQASPPA

SEQ ID NO: 121282 - protein, 404 aa, unidentified
MKGPIVSIDVSKGKSDYQAFKNLNVKYTGSRSIKHTKEGFDEIVNLVREMEKKLETEVCVVYEATGVYHRVLKKVLEDNNIKQFIINPLLSAKTRKNDSLRCPKTDKLDPKSIAKTYYSHSLHNSHKQETIYHELRELSRYYEDILVHIRKDKVAFRAQLDIVFPGYDTLYDDLYGPVALAVIEKYPHPEMLQKKKINTVSKVIQSKTCHRQAVSDTMADKAIEYSKTIYSGCDKDDIEVLILQRFIKKLNEDMAEAERTIGEMIKLAQELPDFSIIKSIPGIGDNLAARMIAELGDMTRFKKKNELVAFAGLDPRISESGQNDGDHMHITKKGNKRLRCLLYLAVTCSIRLKRDDNSIKDFYIKKKQQSNPMCSKAAKTACASKLVRIIYSMCKTGELYQYNK

SEQ ID NO: 121283 - protein, 363 aa, unidentified
MELIYERCCGIDVHKKMVMACIFVKGKKKEIRKFGTLTDELEEMLVWIREKNCEVVAMESTGVYWKPVYNLLESEGIKAIVVNAQHIKGVPGRKTDVKDAEWIADLVRHGLVKESFIPNREQRELREITRYRNDLVEERARQLNRIQATLEGANIKLASVITDVSGKTGTAIIKAIISGTTDNNALSLLAQGSIKNKIPLLQRALRGSVGEHQRQMLNHQIRHIEFLSGEIESLDAEIQKKTEFAAQEIEWLDGIPGIGRRSAERIIAETGIDMGQFQSAAHFASWAGLVPECNKSAGKKKSTKTRKGNKFLKSTLVECARSAIRNTDSFLHARYKKNISAARWQKGYSCSRSQYAFSHLRHF

SEQ ID NO: 121284 - protein, 384 aa, unidentified
MGKTIRYVGLDQHAASIAVAVAEGGREGEVRSLGTIANRPEAIRKLVAKLGAPETLRFCYEAGPCGYGLYWQLVQLGAQCEVIAPTLIPTKPGERVKTDRLDAEKLARCHRSGDLTAVWVPSPEHEALRDLVRAREAAKEDQLRARNRLGKFLLRQGRHRPDESVAWGTKHLAWLKTLKFEQRAQEMTFADYLSEVEHAKERVGRLENAIRDAIAQAPASIRAVITGLEALRGVKTLTAVTVVAEIGSFSRFAAAPQLMSFSGLVPSEHSTGGPGRARRGGITKTGNAHVRRVLVEAAWSYRHRPSREGDLAKRNKLAGEEARTIAWKAQHRLHARFWKLSASGKPMAKVATAIARELLGFMWAIGAEAERAHQPADKQRKAAA

SEQ ID NO: 121285 - protein, 365 aa, unidentified
MTNSNILFIGMDVHKESIEIAIAEGTSQEVRRYGKIGGTQDAVRKVLRKLVSLGKSLHFCYEAGPCGYELYRYLVSEGHDCWVVAPSLIPKKAGDKVKTDKRDAVQLARLFRAGELTPVYVPDREDEAIRDLSRAREDAMLVQKSARQRLKSFLLRHDIRYQGKTSWTEAHLRWLADEVRCPSAAQQIVFQEYVNAVTEAQHRLLRLNDQIEGFVKQWRLYPVVEALMSMRGVKMTVAVTVVSELGDLSRFDNPKQLMSFLGLTPSEYSSGPRRSQGRITKTGNGHVRRILIEAAWCYRYPAKVSREIQLRQESLPLVIRDIAWRAQLRLTQRYQHMQRKGKPHNVTVVALARELAGFMWALPMK

SEQ ID NO: 121286 - protein, 338 aa, unidentified
MQTGQTAQTYALFVGVDIAATTAAVATQRPGAKASQSFIIDQTPEGYTSLLHTLQRTGHAPCQVLVVMEATGSYWISLATRLVHEGFGVSVINPAQAHHFAKALLKRAKTDVIDAQTLAQLAMVLQPEPWTPPPQIYYALQQRLAQRDDLLNLRQQVRNQLHALVQHPEVIPEVRARMDRLLATFEAQLTEVEREIAAALTQDSAWAAAATRLQSIKGVGWVTAAWTLVTTLNLTSCDTVDSLTAYAGLAPMPRQSGSSVWHRPSIGHTGNGRLRTAFYMATLSAAQHNPVIKAFYTRLREVGKPEKVARCAAARKLLHIAWAVVKKDQQFDPYYARG

SEQ ID NO: 121287 - protein, 357 aa, unidentified
MSKTASGTDIIIGVDTHKLTHAAVAISALGARLGSVTIPADSGGYQTLLAWAQALGVIRAFGVEGTGTYGAGLSRFLCEHGHPVFEVNRPNRQLRRQKGKDDLLDAESAARSVLAGHATASPKSGTSAVEMIRHLKVSRDTAVRARSQAMQALKAIIVSAPPVLRERLDRLTGKMTLLRHLAALRPGPLTSTTASAKTGLRAIARRWLTLDAEVRDHDAHLELLTRQLAPDLVEAHGMGAGTAAEMLLLVGDNRERIRSEAALAKLCGVCPVPASSGKTSRHRLNRGGHRQANAALYRVVIVRMRAHQPTLDYVKRRTAEGKSKPEIIRCLKRFVAREIFGYLCRPSNAQCSAPAAP

SEQ ID NO: 121288 - protein, 408 aa, unidentified
MKVLHARCAGLDVHKDTVVACVRIQEGSTASHIVESFGTTTKALLALGDWLGEHEVTHVAMEATGVYWKPVWHVLEPSVELVLANAMHIKNVPGRKTDVNDATWIADLLAHGLIQSSFVPPTAIQEMRTLMRTRKQLVRERAQHVQRLQKTLEDANLKIASFISDVAGTSGRAIVKALIDGKTKPEELLAVTTGRLRADHDTLLESLRGRVRDHHRFLFKLHLEQVEALEKAIASIDAEVGSTLDPFRDQVTRLKTMPGLSDVAAQVLVSEIGVDMSRFPTAAHLISWAGLCPRNDESAGKRRSTRLRQGAPWLKATLVQAAWSAARAKTGYLRAQFLRLKSRRGPKKAIMAVAASMLTAAYYMLRDHVDYRDLGTDYFDRTNKAKATNRLVRRLKELGYEVELKAAA

SEQ ID NO: 121289 - protein, 350 aa, unidentified
MRFYTGQHRHYCGIDLHAHTMYVCILDSAGEIVLERNLATTPEAFLEAIAPYRGDLVVACECLFTWYWLADLCAKEKIAFVLGHALYMKAIHGGKAKNDRIDAHKIAVLLRGGMLPQAYVYPPGMRETRDLLRRRLHLVRKRGQLLAHLQNLRHAYNRGAFAKRIAYPSNREGVVAHFAGEPMVQASAALDLSLLDHYDKLLTDLELRLVRQAKREAPRGFHLLRSIPGIGKVLAMTIVYELHDVHRFERVQQFASYARLVKCAKASAGKRKGTSGAKMGNVHLKWAFSEAAVLFVRHSVEAKALLARLTQRHGKGKALSILAHKIGRAAYYVLAREKPFDASKFFAHAR

SEQ ID NO: 121290 - protein, 407 aa, unidentified
MKKNSNTQMKSNRTGKPRCPVQREVKEVMAELLIKLGEKLEPRMSGTETNEDGGLNRDRLTVGVDLGDQWSNYCILGLEGEKLVEGRLRTEQHEIAEFFQAMAPARVVMEVGTHSAWVREVVLGCGHEVLVANPRQMDGPKRRRKNDRIDAHKLARVGRVDPQSLFPIEHRSIDVRQDLVTLRAREALVKVRTELINTTRGLVKTMGERLPKCTSLGFARRADEALPQGMREVLLPLVRLVETLTGYIQIYDKRIEKLAREKYEHTELLRQVKGVGALTSLAYVLTLENPERFAKSRDVGPYLGLVPKQEDSGESQPQLRITKTGDEMLRRLLVGSAHYILGPFGPDTDLRRYGLRLCERGGKNAKKRAAVAVARKLAVLLHRLWVTGEVYEPLRHARPPAIEQSAA

SEQ ID NO: 121291 - protein, 403 aa, unidentified
MNAVGIDVSKGKSTVAILRPQGIVVASPYDVPHTGSSLKELAAAIKKLRGETRVVMEATGNYYEPIARYLHEQGIFVSVVNPMLISDFGGNTLRKPKTDKKDAVKLALYAQTYWLDLKQYEPQENLRKSLKMLNRQYVQADKVKTMLNNNLISQLDLTFPGINKLFASHERESDGHLKWVDFVLEFPHRDSVAKLTPSAFKKKYQRWCEENGYYYRCSKAEEIHAFARETVSAVPDSDTIHVIIVQAATTLNAVRENAAALHCEMIRIAEMLPEYDTVMNLYGVGNKTCPQLMAEIGDTRRFHSRRAITAYFGYDSENNDSGQHISKSNPITKKGSSPLRRTLFTIMIALLQNQPAENPVYQFLDKKRSEGKHYYCYMTAAANKFLRIYYAKVNEVLNAQPSS

SEQ ID NO: 121292 - protein, 347 aa, unidentified
MLHAGLDLSRRKVDVCLLSEAGEHLDQLVSPPDGDALTTLARRIEEVHAEPVCAVIEAMTGARFVHDTLEQEGWSVEIADAQKVKGLAPLACKTDKIDSMVLATLSQRDLVPAIWLPDPRVREERELARFRLHLVKHKSALKNRIHSSLINFGKPCPVTDLFGVEGRKLLEHLEVPEPWRSNITASVELIDDLEDQIADANKRLKQGHADHPYIPLLISAPGIGWVLAFTIAAEIGEIERFSSPDKLAGYTGLCPRVNQSGDKDRRGPITKHGPTYLRWALLEATMHASRHPAYAERYQRNKKRLGKQRGAKVAQIDIARRLTHAIWHMLRRGQTFAPRGAAFRLAA

SEQ ID NO: 121293 - protein, 454 aa, unidentified
MRKPQVVPDEDHEVIYERVAAVDVAKASGVVCLRTPDPARPGRFVNRIWDNVPAMRAQIAELGAELLRCRVQMVTLESTSDYWRIWYYVLESLGLAVQLVSASQAKNLKGRPKTDKLDAMWLARLTQWGMLRPSFVPPAAIRRVRDFTRARQDLVAERTRCLQRVEKLLEDAMIKITSVARDGMKAKSVVAMVAALAAGQRDPRALADLARGPLRAKRDQLAQALDGMFDSHHGMIARSLLDQVAFLDRQITLMEDQAIAALAGVPESWGVDADGQTGPQAGTSLGSPVLAAAHRLAEIPGISLWLAIVIIAEIGLNMTCFPTPAHLVSWMGLCRSAASSGTRHGKGKPKKGNSYARAAAGQAAIGAARTATFLGERYSRIARRRGKAIAQAAVARSIMIIAWHLLNDPQARYRDLGPDFYASRINRDKKIRNHIRGLQALGLTIAITGDEQAA

SEQ ID NO: 121294 - protein, 319 aa, unidentified
MDVLGIDVGKRELHAVLLQGERSSSKSVPNSSAGIAQLQTWLKNRKVECAHVCLEATGGWSEAAAVTLSEAGHVVSLVNPARIKAFAQSEMLRTKTDRIDAALIARFCRLYQPEKWTPPAPEIRILQGLVRRQHSLIEMRVEEENRRGAPMVSPTVMSSIEATIAHLEREIERVEHEIAQLFRDYPTLRRQRELLISIPGIGETTAARILGEMPDITEYRNVKAVAAFAGLSPRHYQSGTIQHRSRLAKTGNAHLRHALYWPAISAIRFNPRIRAFAQRLSARGLTKMAIIGAAMRKLLTIAYGVLKSGRAFDPVYVSA

SEQ ID NO: 121295 - protein, 340 aa, unidentified
MKVHVCGIDIGKTVFHLVGLSKEGHIVTKKRFSRKQLVTYTVNLPMCLIGIEACPGAHFLARILLKQGHDVKLMPAEYVRPFVKSNKNDYVDAEAIAEAVQRPTMRFVPVKNEAQLDLQALHRVRDRWMGRKTAVINQLRGFLLEHGITVAAGPAHLKRQIPSILEDADNLLSPRMRMLLLELREEWNKLEEQIDASNQELAQFAKKEDDCRRLLTIPGIGPLTATALTAAIGNGTAFRKGRDLAAWLGLVPRQHSTGGKARLLGISKRGDPYLRRLFVHGGRAVLAQVKRERHQFGRWLDRLEARTPRNVAIVAMANKIARMAWAILTSGQTYNAAFST

SEQ ID NO: 121296 - protein, 353 aa, unidentified
MDKYIGFDIDSKKVSVCVVESGKKDYYATISPDIGSMKKFLLSQWQKGIRINLAYEVSGYSGYIHDQLCECVDRIAVVNPVKATWIYRTAKKNDRIDARKMAILLSIGELPTVHVPNKEIRQWRQTILHRRNIVKSTTRIKNRIRAVMKSAGYFKAANRGKWWNRVNMAWMLFLSQGKELWQMQLGQLMDEYEFHNKQLEKVTHYLDGYIKSKPGCMLLMSIPGIGPRTAEAIIAYTDGVERFENARQYSSYFGVVPKLDESGSTRRLGHISKHGPSVVRWLLCEAAWKSIRKSPSLNKFYERVRNSDNKRKKIAIVSVCRKLLSIMRAMLITGELFNEELVLQQCSEIDKAA

SEQ ID NO: 121297 - protein, 409 aa, unidentified
MIYCGIDWAERTHDVALVDDTGRLLAKRHITDDAAGYKILLDLLVEHGDSEEDPIPVAIETSRGLLVAVLRTGKRQVFAINPMAAARYRDRHSVSRKKSDPGDALVLANILRTDMHAHRPLPGDSDLGRAIAVLARAQQDATWNRQQTANQLRSLLREYYPAALAAAETWKNGLCRPEAFELLRLAPTPSQAARLTRSQLQAALKRAGRKRGIDAEAERLREVLRADWAHQPPLVEDALGKQMFALLIQLEAASQAADDLAEAVEEAFPQHPDAEVILSFPGLGVQLGARVLAEIGDDRTRFADARGLKAYAGSSPITRASGKKSSITRRWVKNDRLNHVGYLWAFSALTASPGAKAHYPKRRDEHGDWHAAAQRNLFNRMIGQLYHCLQHNKPFEEQTAFPTHFSAAA

SEQ ID NO: 121298 - protein, 341 aa, unidentified
MEQAIMIGLDIAKNVFELHGRDADGKVVLRRRLRRAQVEALFAALPKAVIGMEACGSAHHWARLLLRQGHEVRLMPPAYVKPYVKRNKNDGRDAEACCEAMGRPDMRFVRVKTVEQQAALSLHRGRELMVRQRTQTANALRAQLSEFGIVAPVGKRGLDQLLAAVAGEEALLPEPALTMVRTLAAQHANLEAAIEDLHARIVAEARADTRALLLESAPGVGPLTAHAVLATMPDPAMFKSGRDFAAWLGLTPREDSTGGKRRLGSITKQGDQSLRRLLVLGATAWLRHVYRQPDKASPWLRGLMARQPRKKAVAVAQAARTARILWAMLSHNQPYRAPLAG

SEQ ID NO: 121299 - protein, 343 aa, unidentified
MAYFVGLDVSVKETSVCIVDDAGKIVREARVASEPEALLQVLTNNIDRLARVGLEAGPLSQWLYSALAEAGLPVICVETRHMRAVLKAQVNKTDRNDARGIAQMMRVGLYRPVHVKTLRSQKLRVLLTHRKLLPSKAIAIENDLRASLRNLGLKVGMVGTVKFEARIKELVANLPDLAVLVEPLLIVRRVVREQLGILHHRLLAIVRDDDVCRRLMTIPGVGPVVALTYRVTVDVPTRFRNSKAVGAVLGLTPVKYQSGENDRTGAISRCGDEMMRMMLYEAAQSLLVRSAKWSWLKAWAMKIARHRGMKKAIVALARRLAVIMHRIWVDGTGSRRTREVAAA

SEQ ID NO: 121300 - protein, 340 aa, unidentified
MPLYGGIDLHANNSVVVLLNEQDQVVYEKRLPNHLPTVLDLLDPYRAEIMGFVVASTYNWYWLVDGLMEAGYRVHLANPAAMQQYSGLKDTDDHSDARWLAHLLRLGVFPEGYIYPKAERAVRDLLRKRAHLVRQHTANVLSVQNIIVRNTSTRLSIKRIRELTQQELEGLLPEVAQVLAVTSSLAVLACLSHQIKTLEQTVHKRLKHTPSYEQLLTVDGIGTILAPTIALETGTIGRFPTVGHSASYCRCVDRSKIRNGKRKGQGNVKNGNRYLGWASMEAAQFALRFHPSAQRFYQRKLAKSNNNTTLARKAVAHKLSRACYDSMRDRVPFDALKAFG

SEQ ID NO: 121301 - protein, 341 aa, unidentified
MDYFAGLDVSVKDTSICIVDDAGRIVREVRVASEPDALLAVLKNAAYRCKRIGLEAGPLSQWLYTALGEAGLPVICVETRHMRAVLKAQINKTDRNDARGIAQMMRVGLYRPVHVKTLRSQKLRMLLTHRKLLQSKAIAIENDLRGTLRNFGLKVGMAGAAKFEARIKELVENLPDLAVLVEPLLVVRRALREQIAVLHHRLLAIVRDDEVCRRLMTVPGVGPVVALTYRATVDVPARFRKSKSVGAVFGLTCAKYQSGEIDRSGRISRCGDEMMRVMLYEAAQSMLRSKKWSWLKAWAMQVARRCGMKKAIVALARRLAVIMHRIWLDGTEFRWTRETAA

SEQ ID NO: 121302 - protein, 451 aa, unidentified
MRGEHAGLHGERDKAMKDPLELPIVNPHAAGIDVGSEKFFASVGGQEPKVFLTVTRQMNELCEHFKAAGVRTVAMEATGVYWINLHGVLEDSGFKVVVVNGAHCRNFPGRKTDMKDCQWLAVLHAHGLLESGFVPPSDIRRLRDYMRLRADLVSMAAQHVQHMQKAMDRLNVKIHVVISDITGSSGMRIIKAILEGQREAEKLVELCDEQILKSKRAPMIEALRGLWRKEHLFALRLAVESYEAYQKQIAECDIQIAEVIETISAGKPVPELGKSKELRHNAIILPELHKQVAQIFGKDLTKLPCLNQSTLALLLAEIGSDMSRWKDWRHFGSWMALAPSSSQSGNRRWRLKRRLTRSGQILCRAVQCMAVGKHTWLAAFYRRIRAKRGAKVAIKATAYKLAKLIYLVLTQGWEYVEQGIAKYQEKIHQMQVRALQKLAKTLKFDLVPQNM

SEQ ID NO: 121303 - protein, 514 aa, unidentified
MQAPLAVAAGERLLEGQHVEKNLESLASCVKVQISGKSQLHIKGRQDMEEIFEDCHDVEVVYQRCCGLDVHKKIIVACLIIVAADGKRRKQIRTFGTTTAALLELLDWLKAAGCTIVGMEATGVYWKPVYNLLEGHFELVVANARHIKAVPGHKTDVKDAQWIASLLQHGLLKASFVPSSEQRELRELTRYRTTLVEERARIVNRLQKTLEDTNLKLGDVVSDMTGKSAQAILRGLLAGETDPAVLADLARGRLKAKRAELEAALVGTIKPHHHFLLTEHLDHLHRLDQSIERVGAEIEARMGPFLPPEPEKDSSKQPQAVQAPSDEQPQAEPTASDEPSEPATKAPLSLAQAVVLLCSIPGISQRAAEGILAEIGTNMDRFASAKHLASWAGMCPGHHESAGKRSSGKTTKGSPWLRKLLVQAALAAGRTKNTYLSAQYGRLAARRGKKRASIAVGHTILVIIFHVLREQKPYQELGGNFFDEQERQAVEKRLVQRLEKLGYDVTLEPVAHAA

SEQ ID NO: 121304 - protein, 411 aa, unidentified
MLVAGIDIGAEVHHVAVVDEAEAAIVKPTPFPENVSGYQKLLELLARAGARGGEDLPLAPASAQALQILVVMEATGHYWQNLFAALVAHGFAVALVNPLRTHRFAGEELARTKTDRVDCLQIARFGAQKRPAATDVPDTLVEELRELVRLRSRLVQDAVERVNQLHRLVDLGFPEFNHYLGELNTQLATAILRQYPTAQAFHRLSRHRLAHLCYDGRHRVGAELAQQLIDAAKISVGSQHSAAHQLGVRYACEDLQTLRARLKQLDGDIAAKLQQHEIGKLLTTIGGIGDNTAACLIAELGNPARFESARALAAYAGLCPRHNQSGKRRPKSSALTPIGNRRLRQALWMPTLTAVSRCNPWLQTFYRRLLERGKPHKVALVAAMRKLLAAVYSVAKHSRAFVPFVISTQGL

SEQ ID NO: 121305 - protein, 431 aa, unidentified
MLKINPLSTLYIGIDVSSKSNYVCALDFFKNKYISSSFANNQTGAEELALKILECLKEHSDLTTVVAALESTSVYSIHIANYLSSCEELMRFKPYVFVLNPKCTANYKKSYIGLGKSDPIDAFVIADYARAGNIESEPWRGSQFLALKRLTRHRLHLVECMTREKTYLVSNLYLKFSELQMLEGDDQPFCDIYGATSSSVLMEYLSPEEILNSSEEDLIAFLAEKSRNRIKDISKTADLLKKAARDSYRLDKSLYEPLNVSISSSFNCIETFKREIKVIDNAIEKEIKGLNPNAFIILQSIDGIGPVFAGGIIAEIGDITAFHSSDALAKYAGLTWKSNQSGDFDGEDTPMTKAGNRYLQYYLGEAANSMRKHNVEYGAYYRKKYNEVPKHQHKRALALTSRKFVRLVYGLLARNQLYSGVSLDTSIKDSN

SEQ ID NO: 121306 - protein, 348 aa, unidentified
MMVVLGVDAHKRTHTVVAADEAGVSLGEVTVAATTAGHLRALRWAARWDERRWALEDCRHLSRRLEAELLGAGELVVRVPPKMMAGVRRSARTRGKSDPIDALAVARAAMREPGLPVARLEGPAREIRLLVDYREGLVRERTGLQNRLRWRLHELDPELDPAPGSLDRYVVLDGLIEALDAYGGVVAELACREITRIRDLTAEINQLERHIAARVGEVAPSLLEVPGCGALTAAKLVGEAADITRFHSRDAYAMWAGVAPIPVWSSNTERFRLNRGGNRQTNAALHRIAITQMRIHPGARKLITKHLSAGKTKTEALRILKRRLADVVYRTMIKDTKQLSQAAPARAA

SEQ ID NO: 121307 - protein, 346 aa, unidentified
MEHTTIAVDLAKSVFQVAISHRPGRVDSERRLSRERLLPYFAQQPPATVLLEACGSSHHWARQLEQFGHVVRLLPAHDVHRYVRRNKTDRTDTKALLEAGRNEEIHPVPIKTVEHQAIASLHCLRSTWLATRTARLNTLRGLLREFGIFIPTGAQHVVPRVRELLGDPAAVPLLMRTTLASTCDEIGTLETNMRDVERQLTALARQFPDVTLLRTVPGVGLLTATALIALVGDIRRFDSGRHFASFLGLTPKEDSSAFRRRLGAISKQGDAYLRMLLIHGARSFLWHAKRGAHPYPLQAWARATEQRRGHNVAAVAVANKLARIIWAVWRQQRPFAADHRAMTVIV

SEQ ID NO: 121308 - protein, 339 aa, unidentified
METESITRPYDHSIAVDWSQRNMAIAVLKRDSEKARVVDVPTSVSELKVFLRSLKGSKILTIEESSTSQWLYTELRDCVDRLIVCDPYRNRLLQDGPKNDKIDAEKLAILLRNGLLKEVFHNGSEYFHLRKLVSSYNDIVRSMVRFKNQRAAVLIAQGKSKRCVSPEADSGSFSLEALDALIRVHEERLEKFTAEFKRLKNTNKLIRVLTTIPGIKEKSAVKLLAIVIDPRRFPDKGRWLSYCGLVRHAKMSGGKSYGTRQPRYSRLAKSIFKTAAISCIGLGSKDNVFRKYYERLKKRGLPDYNARHAVARRIAVVALGILKTGLAFENRWEGKAAEK

SEQ ID NO: 121309 - protein, 346 aa, unidentified
MTTTAATTTIIGMDISKHSFELWGADERGKQTMHKRLHRDKVSLFFANFPRCAVAMEACASSQHWARQLKELGHEVMLIPAQHVIAYRRGGKNDRNDAHAISEAAARPSMRSVPVKTTDQQDLQAIHRVRERLIHHRTALINELRGLLMEYGIICAKGRTRLRIWLREAFDACVETLSPMAQETFRSLRDELRALEERIAATDKRIKMVFDSHPVCHRLATVPGVGALVATALVASVAEPQRFKNGRQFAAYLGLVPRQHTTGGKPKLLGISKAGNRYLRMLLVHGARSIMFHHRGKEDPRSKWVAKLVERRGFHKANVALANKNARVLWKLLTTPGETFGQQLAA

SEQ ID NO: 121310 - protein, 325 aa, unidentified
METKKVCCGIDVSHATLDVCYQNNLGELFHLQVGNNNAGYKKIIEHTGTHYHFVMEATGVYYIRLAFYLHSLGCELSVVNAMCIKRYIQMHLERNKTDKKDARWICRYAIEQRPGCWQMPDSAYFESKQLYNSIRQYTEHIKSFNNQLHSLRLLPVPSRDTIKSIEKIIVCMEKEIKLLEQKLQLLLQQWQPDQLKSVSSIKGIGKRAAAMLIVFTQGFKHTENHRQLISFAGLAPTQYSSGSSIQGKPRIYKRGGKNLRDVLYMCSMNAMKTNVACKALYERLRANGKTGKQALIAVCNKLLKQVFAVVKNNSLYQPNYCSAKP

SEQ ID NO: 121311 - protein, 388 aa, unidentified
MIQQESEESNGGRTVVGIDPCREFLQLAILAPNQETKFLKLPLAPSITAEIVKSTNPHTTQIAIESYGSYGKLFIYDLLKKGYDIREVNPHISKRLSGLYSEEHSDLKDAESLAKALLLIPNLPKVAITDKQQWLAKLTRTRRKLVKDLNGYLNRLHIALTESYGAVYKKLFKILSMKKALKFFEDYPTINDSVSDERLKERLGEEKWELLRQAGKWEDNTYLETLRTEIRGYIGIIRSITSTKVAIETKIRDAADVVEEMKLLGTFPGIGGVAGATLLSAIGDIERFGTESHLSAYCGVRPVIWQSGTGQIRTKRRRRYSRRLKGILYFISLSQIRINPESRAYYDRKRNEGKTHWQAMNALSRQLIKIIYYILKDKVLYQRTPLVN

SEQ ID NO: 121312 - protein, 332 aa, unidentified
MMAQSDCVVVGIDVAKDKVDACIRSLSQRQTFPSTTEGRRALIRWLRKHKVGKAAMEASGGYERDWAKVLRGAGIEVRIVDPKRVRSFARSAGRLAKNDAIDAAMIAWFAETFTDAPGQTCDAARDKLVQIVRARQSLLDLQTSLQNRGEHAAPEVVEKMQARLLKTIAREVAELEAAIAALVKATPHLAELAEIIESVPGLGKITSAGLVAAMPELGQVSNNVAAALLGVAPYDDDSGPRRGDRHIKGGRRKVRNLFYMACLGAATRHNPVLKAFYDRLSAKGKEPKVALTACMRKLICILNTMIARRQKWDANRYKMSDPARLPPSACPA

SEQ ID NO: 121313 - protein, 313 aa, unidentified
MSPNNTPILHVGLDVAKLTLELHLGAKTYALTNDRKGHAQLAKRLRARPGAHVVCEATGGYEQPVVRALHAAGLPVSVVEAARVRYFARAQGQRAKTDPIDAALLTAYGDTFKPAVTPPPTATQQRLADLSQRRRQLIQARTTERNHTEHYTDPQCVCQARQLLKTLDRQIAQCDLALTQLVAADAGLAHKARRLETIPGVGTVVAITVLAEMPELGHLTPQTAAALAGVAPYNRDSGGMKGGRHISGGRRAVRCALYMATLSAIRHDHILKEIYLRLRTNGKKPLVAMTAVMRKLIILMNRLLKYPEFTLAH

SEQ ID NO: 121314 - protein, 342 aa, unidentified
MNITTIGIDLAKNVFQVHGADEKGKAVLKKQLKRAQMLAFFANLKPCRIGMEACGSAHYWARKLQALGHTVQLIPPQYVKPFVKRNKNDAADAEAICEAMMRPNMPTVPIKNTSQQAILSVHRARQGFVKARTAQANQIRGLLAEYGIVIAKGIGHITKRVTEILEDGENDLPGSFRLLIARLTDHFKELDRQVDELETQIKLWHRDDSASQKLAKIPGIGPITASATVASVGDARNFKNGRQLAAWVGMVPRQHSTGGKSTLQGISKRGDTYLRTLLIHGARAVVRVAERKPNADPWLKNLLARRHKNVAAVALANKNVRTIWALLAHDRDYEAGYVRAAA

SEQ ID NO: 121315 - protein, 340 aa, unidentified
MQVTTIGVDLAKNVFQVHGITASEEVVFNKPLRRAQFLPFFAKLDPCLIGMESCSSAHHWARELTALGHEVRLIPPMYVKPYVKRGKSDAIDAEAICEAVTRPTMRFVATKTVEQQSLLSLHRARDLLVRQRTQLINNLRGLVAEFGIFIPKGLARVIGFAEDITLGEVLDLPDIANEVIRNLSEQLMALHKQVRWYEERLKQVAKEDARVRLLRTIPGVGAVTASAIIASIGDVHQFKNGREFAAWLGLTPANKSSGGKEKLGRITKMGDQYLRSLLVVGMTSLVRQTRSHPERASKWLTSLLERKPARVATVAMANKTARIVWAVLTRNEPYSPRTVA

SEQ ID NO: 121316 - protein, 322 aa, unidentified
MAMLSFGGIDVSKDRLDITVLPDEQCSSVSNDAAGWAELIEQLRGSSITAIGVEASGGYERGVVRALLAAGMSVRQINPFKLRQFAKASGILAKNDRLDARMIASFVAIMPTRPAQRQTPMIEQLAAMLTVRRQLSDHKVATENASRLLEGAMLQRLSRRRVAGLTADINLLDQRLVEIVTADAALAHRFWLLTSMPGVGAVLACTLIALLPELGQMSRKQVAALVGLAPYDFDSGKLKGRRCIWGGRARVRHVLYMAALSASNWNPALKAFHDRLEATGKKPKVVIVAVMRKMITTLNAMLRDGTAWVDRYSGRRSASTAR

SEQ ID NO: 121317 - protein, 300 aa, unidentified
MEYYVGLDVSLKQTSICIVDQAGLVVREGVVDSDPEAISAYVKSKAPDAVRIGLETGPTSTWLWTELKRLGLPVICIDARHAKAVLKMQINKSDRNDAIGIARIMQTGWFKEVHVKDIDSHSVRALLASRALLVKIKRDLENHVRGLLKNLGLVIGRAKFNVFAVRVDELIEGRPELVAAVRPLLEARNAVEQQVSELDRKVMRLARHDAHVRRFMTVPGVGPITALAFKATIDDPARFARSRSVGAYVGLTSRRHASGEVDWSGRISKCGDAMLRSYLFEAAGVLLTRVPKWSAVKAWG

SEQ ID NO: 121318 - protein, 320 aa, unidentified
MARIVCGIDISSRTLDVSIGPEGQRAQFLNNPEGIAELARFCRDHAVELVAMEATGGYEQQALAGLSEQGLPVAILNPRAVRQFAHSMGRLEKTDAIDAAMIAWYAEIKGAKPVYLAPSGQQHLRALVTRLRQLVDLRTAQRNQSRLVADPLICASFQQLLALVDQQIEALETEIASAIAQDPLWSCMDPVLRTIKGVADRTVARLFAELPELGTLSNKTISKLAGLAPLARDSGQHQGKRQVRGGRAPVREILFVVASVVGRYEPDFIAFQQRLRAAGKPPKVVRIALAHKLLVRLNAKARELRQALNPIICPQENMVL
